United States Patent Application Publication US 2005/0244851 A1 - sequence listing, part 42

SEQ ID NO: 1625238 - DNA, 25 bp, Homo sapien
atgagaacagatgtgcaggtcatgg

SEQ ID NO: 1625239 - DNA, 25 bp, Homo sapien
cagtgcacgggcatatgaaacttgc

SEQ ID NO: 1625240 - DNA, 25 bp, Homo sapien
ggtttcccacaagcataagagcatg

SEQ ID NO: 1625241 - DNA, 25 bp, Homo sapien
tcctggagtccccataccagtaggg

SEQ ID NO: 1625242 - DNA, 25 bp, Homo sapien
caggctttctatttgggcaaggcca

SEQ ID NO: 1625243 - DNA, 25 bp, Homo sapien
atgccaagcaccgaacctgatagcc

SEQ ID NO: 1625244 - DNA, 25 bp, Homo sapien
cagcaatcagtgtcatcaaccgcat

SEQ ID NO: 1625245 - DNA, 25 bp, Homo sapien
caatgccaagcaccgaacctgatag

SEQ ID NO: 1625246 - DNA, 25 bp, Homo sapien
ctccaatgccaagcaccgaacctga

SEQ ID NO: 1625247 - DNA, 25 bp, Homo sapien
cagtcctccaagacacagcatttat

SEQ ID NO: 1625248 - DNA, 25 bp, Homo sapien
tcctccaagacacagcatttataac

SEQ ID NO: 1625249 - DNA, 25 bp, Homo sapien
gtcctccaagacacagcatttataa

SEQ ID NO: 1625250 - DNA, 25 bp, Homo sapien
accagtcctccaagacacagcattt

SEQ ID NO: 1625251 - DNA, 25 bp, Homo sapien
tgcaattgttccctgaggtccaggt

SEQ ID NO: 1625252 - DNA, 25 bp, Homo sapien
ttgcaattgttccctgaggtccagg

SEQ ID NO: 1625253 - DNA, 25 bp, Homo sapien
cttgcaattgttccctgaggtccag

SEQ ID NO: 1625254 - DNA, 25 bp, Homo sapien
aactcaaactggcacgtggggtacg

SEQ ID NO: 1625255 - DNA, 25 bp, Homo sapien
tcaagtggagtaacccggcacgttc

SEQ ID NO: 1625256 - DNA, 25 bp, Homo sapien
gaaggcaggaacttcaagtggagta

SEQ ID NO: 1625257 - DNA, 25 bp, Homo sapien
gaacttcaagtggagtaacccggca

SEQ ID NO: 1625258 - DNA, 25 bp, Homo sapien
caccagacgcaccagtgtgcagaaa

SEQ ID NO: 1625259 - DNA, 25 bp, Homo sapien
gcaccagacgcaccagtgtgcagaa

SEQ ID NO: 1625260 - DNA, 25 bp, Homo sapien
accagacgcaccagtgtgcagaaat

SEQ ID NO: 1625261 - DNA, 25 bp, Homo sapien
ctgcaccagacgcaccagtgtgcag

SEQ ID NO: 1625262 - DNA, 25 bp, Homo sapien
tccttggacatctgagttaagccac

SEQ ID NO: 1625263 - DNA, 25 bp, Homo sapien
caggacttttgatggccatacacaa

SEQ ID NO: 1625264 - DNA, 25 bp, Homo sapien
cctggaaaacgtgggccaatccttg

SEQ ID NO: 1625265 - DNA, 25 bp, Homo sapien
ggtttccttttaggtatcacatgga

SEQ ID NO: 1625266 - DNA, 25 bp, Homo sapien
ctcctggacaccttccaacatgatg

SEQ ID NO: 1625267 - DNA, 25 bp, Homo sapien
cgtgaccagcaggggttcagcccct

SEQ ID NO: 1625268 - DNA, 25 bp, Homo sapien
cagcaggggttcagcccctcctgga

SEQ ID NO: 1625269 - DNA, 25 bp, Homo sapien
tggacaccttccaacatgatggcca

SEQ ID NO: 1625270 - DNA, 25 bp, Homo sapien
tggctggtccttgggttatacgaca

SEQ ID NO: 1625271 - DNA, 25 bp, Homo sapien
gaattctgagcccaggcataatgcc

SEQ ID NO: 1625272 - DNA, 25 bp, Homo sapien
gaatgagctcttcccatattgggca

SEQ ID NO: 1625273 - DNA, 25 bp, Homo sapien
gctgcatctgagcacggaatctctg

SEQ ID NO: 1625274 - DNA, 25 bp, Homo sapien
acagtggtcagagcaactccagctc

SEQ ID NO: 1625275 - DNA, 25 bp, Homo sapien
tgctggtgaccccactgacatcctc

SEQ ID NO: 1625276 - DNA, 25 bp, Homo sapien
tccacagtggtcagagcaactccag

SEQ ID NO: 1625277 - DNA, 25 bp, Homo sapien
agctcctggctgcttggaactctcc

SEQ ID NO: 1625278 - DNA, 25 bp, Homo sapien
cctggagccgaacccttcattagac

SEQ ID NO: 1625279 - DNA, 25 bp, Homo sapien
atacctggagccgaacccttcatta

SEQ ID NO: 1625280 - DNA, 25 bp, Homo sapien
catatacctggagccgaacccttca

SEQ ID NO: 1625281 - DNA, 25 bp, Homo sapien
tcccatatacctggagccgaaccct

SEQ ID NO: 1625282 - DNA, 25 bp, Homo sapien
tgttgtaaaaagatcctttcgtgca

SEQ ID NO: 1625283 - DNA, 25 bp, Homo sapien
tgtaaaaagatcctttcgtgcaaac

SEQ ID NO: 1625284 - DNA, 25 bp, Homo sapien
ctgttgtaaaaagatcctttcgtgc

SEQ ID NO: 1625285 - DNA, 25 bp, Homo sapien
gttgtaaaaagatcctttcgtgcaa

SEQ ID NO: 1625286 - DNA, 25 bp, Homo sapien
gctccggcctctttctcgctgctct

SEQ ID NO: 1625287 - DNA, 25 bp, Homo sapien
cagatgcaatttcaggccaacccca

SEQ ID NO: 1625288 - DNA, 25 bp, Homo sapien
tccggcctctttctcgctgctctct

SEQ ID NO: 1625289 - DNA, 25 bp, Homo sapien
ctcgctccggcctctttctcgctgc

SEQ ID NO: 1625290 - DNA, 25 bp, Homo sapien
tgtgaccaaaaccctttgtgggcag

SEQ ID NO: 1625291 - DNA, 25 bp, Homo sapien
ctgtgaccaaaaccctttgtgggca

SEQ ID NO: 1625292 - DNA, 25 bp, Homo sapien
tgaccaaaaccctttgtgggcagtg

SEQ ID NO: 1625293 - DNA, 25 bp, Homo sapien
ttctccttgtgcacctctgtgtact

SEQ ID NO: 1625294 - DNA, 25 bp, Homo sapien
atgcctatttgacccagcatctgtc

SEQ ID NO: 1625295 - DNA, 25 bp, Homo sapien
aaatgcctatttgacccagcatctg

SEQ ID NO: 1625296 - DNA, 25 bp, Homo sapien
aatgcctatttgacccagcatctgt

SEQ ID NO: 1625297 - DNA, 25 bp, Homo sapien
ggctccaagagcatccaaaagggtt

SEQ ID NO: 1625298 - DNA, 25 bp, Homo sapien
caagagcatccaaaagggtttgttc

SEQ ID NO: 1625299 - DNA, 25 bp, Homo sapien
tttaaggctccaagagcatccaaaa

SEQ ID NO: 1625300 - DNA, 25 bp, Homo sapien
agcatccaaaagggtttgttctttg

SEQ ID NO: 1625301 - DNA, 25 bp, Homo sapien
cctgccaaactcgaagagcttggag

SEQ ID NO: 1625302 - DNA, 25 bp, Homo sapien
cagtacctgccaaactcgaagagct

SEQ ID NO: 1625303 - DNA, 25 bp, Homo sapien
gccaaactcgaagagcttggaggca

SEQ ID NO: 1625304 - DNA, 25 bp, Homo sapien
gtacctgccaaactcgaagagcttg

SEQ ID NO: 1625305 - DNA, 25 bp, Homo sapien
cttttatgtataaagagctttgact

SEQ ID NO: 1625306 - DNA, 25 bp, Homo sapien
tatgtataaagagctttgactgcat

SEQ ID NO: 1625307 - DNA, 25 bp, Homo sapien
acttccatacttttatgtataaaga

SEQ ID NO: 1625308 - DNA, 25 bp, Homo sapien
aattacttccatacttttatgtata

SEQ ID NO: 1625309 - DNA, 25 bp, Homo sapien
tggtgccaagcagcagaccaaggtc

SEQ ID NO: 1625310 - DNA, 25 bp, Homo sapien
cagtgtgtggccttcagccagtgtt

SEQ ID NO: 1625311 - DNA, 25 bp, Homo sapien
agccagtgttgtccccagagaaggg

SEQ ID NO: 1625312 - DNA, 25 bp, Homo sapien
tcttcattagaaccacagtgtgtgg

SEQ ID NO: 1625313 - DNA, 25 bp, Homo sapien
tcaacttcccggcttgaaacgtcca

SEQ ID NO: 1625314 - DNA, 25 bp, Homo sapien
catcaacttcccggcttgaaacgtc

SEQ ID NO: 1625315 - DNA, 25 bp, Homo sapien
caacttcccggcttgaaacgtccat

SEQ ID NO: 1625316 - DNA, 25 bp, Homo sapien
gaatctgccacgagtttctctgctc

SEQ ID NO: 1625317 - DNA, 25 bp, Homo sapien
aaccagtgcatccacattcactcca

SEQ ID NO: 1625318 - DNA, 25 bp, Homo sapien
tggaatctgccacgagtttctctgc

SEQ ID NO: 1625319 - DNA, 25 bp, Homo sapien
cccctatgccgtttgtcaaccagtg

SEQ ID NO: 1625320 - DNA, 25 bp, Homo sapien
ctctgggtccagcaggtctcagata

SEQ ID NO: 1625321 - DNA, 25 bp, Homo sapien
tgggtccagcaggtctcagatattt

SEQ ID NO: 1625322 - DNA, 25 bp, Homo sapien
ccagcaggtctcagatatttggatc

SEQ ID NO: 1625323 - DNA, 25 bp, Homo sapien
gggtccagcaggtctcagatatttg

SEQ ID NO: 1625324 - DNA, 25 bp, Homo sapien
ggaaagctctggctaagaacttgac

SEQ ID NO: 1625325 - DNA, 25 bp, Homo sapien
gcaccatatggttcttctaagctcg

SEQ ID NO: 1625326 - DNA, 25 bp, Homo sapien
tcaacaatagtggtcgacgctcagc

SEQ ID NO: 1625327 - DNA, 25 bp, Homo sapien
agtcatatggactgggcgagcacca

SEQ ID NO: 1625328 - DNA, 25 bp, Homo sapien
catccacgcgtgtgaatgaggccag

SEQ ID NO: 1625329 - DNA, 25 bp, Homo sapien
tgccggtgaatgttgcatccacgcg

SEQ ID NO: 1625330 - DNA, 25 bp, Homo sapien
gctgacagccggcataatcgaaagt

SEQ ID NO: 1625331 - DNA, 25 bp, Homo sapien
tggtcctctccacttaatgccggtg

SEQ ID NO: 1625332 - DNA, 25 bp, Homo sapien
tcaggcactttccattctctgaagg

SEQ ID NO: 1625333 - DNA, 25 bp, Homo sapien
gcacattcggctggtgtccttgtct

SEQ ID NO: 1625334 - DNA, 25 bp, Homo sapien
aacgttcaggcactttccattctct

SEQ ID NO: 1625335 - DNA, 25 bp, Homo sapien
catatccccatgcacattcggctgg

SEQ ID NO: 1625336 - DNA, 25 bp, Homo sapien
atatggcgtggattggagatggtgc

SEQ ID NO: 1625337 - DNA, 25 bp, Homo sapien
aaagaaacaggcatatggcgtggat

SEQ ID NO: 1625338 - DNA, 25 bp, Homo sapien
ttggagatggtgcagtgttggcaca

SEQ ID NO: 1625339 - DNA, 25 bp, Homo sapien
gtaaagaaacaggcatatggcgtgg

SEQ ID NO: 1625340 - DNA, 25 bp, Homo sapien
ttaccatttcattacgcgacagcag

SEQ ID NO: 1625341 - DNA, 25 bp, Homo sapien
gcatctaagtgcagaaggttctctg

SEQ ID NO: 1625342 - DNA, 25 bp, Homo sapien
gcatccgttggtggctgtgtaaaga

SEQ ID NO: 1625343 - DNA, 25 bp, Homo sapien
tgtaaagaggagttccggactgcct

SEQ ID NO: 1625344 - DNA, 25 bp, Homo sapien
tctccccgggtactccagctgatgg

SEQ ID NO: 1625345 - DNA, 25 bp, Homo sapien
cccgggtactccagctgatgggtgc

SEQ ID NO: 1625346 - DNA, 25 bp, Homo sapien
atgagtgggccgccggagagctgtg

SEQ ID NO: 1625347 - DNA, 25 bp, Homo sapien
gtgccagtggctgcaacgttttcca

SEQ ID NO: 1625348 - DNA, 25 bp, Homo sapien
attttaatgatgagggaaatgagat

SEQ ID NO: 1625349 - DNA, 25 bp, Homo sapien
gatgagggaaatgagataaccaggt

SEQ ID NO: 1625350 - DNA, 25 bp, Homo sapien
tggctgcagcctgttgcgggcctgg

SEQ ID NO: 1625351 - DNA, 25 bp, Homo sapien
tctcctgtgcgttctggctaccctg

SEQ ID NO: 1625352 - DNA, 25 bp, Homo sapien
tcctttctcctgtgcgttctggcta

SEQ ID NO: 1625353 - DNA, 25 bp, Homo sapien
tggtttcgaacagagtccgcagaag

SEQ ID NO: 1625354 - DNA, 25 bp, Homo sapien
tatcggtagacttggatctctttgt

SEQ ID NO: 1625355 - DNA, 25 bp, Homo sapien
caaatatcggtagacttggatctct

SEQ ID NO: 1625356 - DNA, 25 bp, Homo sapien
tggatcaaatatcggtagacttgga

SEQ ID NO: 1625357 - DNA, 25 bp, Homo sapien
tttgagtggatcaaatatcggtaga

SEQ ID NO: 1625358 - DNA, 25 bp, Homo sapien
ccactgctcaagtcaagcttactgg

SEQ ID NO: 1625359 - DNA, 25 bp, Homo sapien
cctgattagtgtttccaatatcttc

SEQ ID NO: 1625360 - DNA, 25 bp, Homo sapien
gctcaagtcaagcttactggtgttt

SEQ ID NO: 1625361 - DNA, 25 bp, Homo sapien
ttttgtccctgattagtgtttccaa

SEQ ID NO: 1625362 - DNA, 25 bp, Homo sapien
ctttctgcagagtctgattatgttc

SEQ ID NO: 1625363 - DNA, 25 bp, Homo sapien
cagagtctgattatgttcagtcttt

SEQ ID NO: 1625364 - DNA, 25 bp, Homo sapien
ttctgcagagtctgattatgttcag

SEQ ID NO: 1625365 - DNA, 25 bp, Homo sapien
ctgcagagtctgattatgttcagtc

SEQ ID NO: 1625366 - DNA, 25 bp, Homo sapien
tcagctttaaaaggttcctatcgat

SEQ ID NO: 1625367 - DNA, 25 bp, Homo sapien
cctgagtattggatttgtgccgtca

SEQ ID NO: 1625368 - DNA, 25 bp, Homo sapien
attgcaagtttcaaggccatatggc

SEQ ID NO: 1625369 - DNA, 25 bp, Homo sapien
gccatatggcctgagtattggattt

SEQ ID NO: 1625370 - DNA, 25 bp, Homo sapien
ctttctgtgtccatccgggaggcct

SEQ ID NO: 1625371 - DNA, 25 bp, Homo sapien
ttctgtgtccatccgggaggcctcc

SEQ ID NO: 1625372 - DNA, 25 bp, Homo sapien
gctgctttctgtgtccatccgggag

SEQ ID NO: 1625373 - DNA, 25 bp, Homo sapien
tgctttctgtgtccatccgggaggc

SEQ ID NO: 1625374 - DNA, 25 bp, Homo sapien
gcagacgtgttccaaggaccactgg

SEQ ID NO: 1625375 - DNA, 25 bp, Homo sapien
cacactccctttaggcggtgcctgg

SEQ ID NO: 1625376 - DNA, 25 bp, Homo sapien
gcgcttccctaaactgggcatctgg

SEQ ID NO: 1625377 - DNA, 25 bp, Homo sapien
gaccactggcatttgtgatggctga

SEQ ID NO: 1625378 - DNA, 25 bp, Homo sapien
gggcttcttagcctctggcgcagca

SEQ ID NO: 1625379 - DNA, 25 bp, Homo sapien
ggcttcttagcctctggcgcagcat

SEQ ID NO: 1625380 - DNA, 25 bp, Homo sapien
ccatagaagatgctggtgagcaatt

SEQ ID NO: 1625381 - DNA, 25 bp, Homo sapien
cttgaatgaaggctgctccggtcct

SEQ ID NO: 1625382 - DNA, 25 bp, Homo sapien
tccagcaagctcttatgaaatagct

SEQ ID NO: 1625383 - DNA, 25 bp, Homo sapien
gaaaaactagctaaccccatccata

SEQ ID NO: 1625384 - DNA, 25 bp, Homo sapien
aaatgaggtcgctgtgcaacttgga

SEQ ID NO: 1625385 - DNA, 25 bp, Homo sapien
ctaataaggaatccggtttgcatat

SEQ ID NO: 1625386 - DNA, 25 bp, Homo sapien
taaccgaggtttcagtgtaaatgag

SEQ ID NO: 1625387 - DNA, 25 bp, Homo sapien
caaaagggtgtcatctaaccgaggt

SEQ ID NO: 1625388 - DNA, 25 bp, Homo sapien
aaatctatcttggaggaaatctgag

SEQ ID NO: 1625389 - DNA, 25 bp, Homo sapien
gcatcctcagatgcgacaggcaata

SEQ ID NO: 1625390 - DNA, 25 bp, Homo sapien
tactgtctacattcctacgcaaaga

SEQ ID NO: 1625391 - DNA, 25 bp, Homo sapien
cacagtgatgcagcgtcagtttctg

SEQ ID NO: 1625392 - DNA, 25 bp, Homo sapien
ttgctaactatagtgccggtctgac

SEQ ID NO: 1625393 - DNA, 25 bp, Homo sapien
taaagtgtcataggctcgtgtcaga

SEQ ID NO: 1625394 - DNA, 25 bp, Homo sapien
tggccgtggaaccttatcaatttgc

SEQ ID NO: 1625395 - DNA, 25 bp, Homo sapien
cgtgtcagaacgaataaagcttggc

SEQ ID NO: 1625396 - DNA, 25 bp, Homo sapien
cattgcagatgtaatggagtagaat

SEQ ID NO: 1625397 - DNA, 25 bp, Homo sapien
tgtgagtttactggcattaatccta

SEQ ID NO: 1625398 - DNA, 25 bp, Homo sapien
cagatgtaatggagtagaatgttgc

SEQ ID NO: 1625399 - DNA, 25 bp, Homo sapien
tgcagtttgtgagtttactggcatt

SEQ ID NO: 1625400 - DNA, 25 bp, Homo sapien
agtgaaggtcttttgggaaaagctg

SEQ ID NO: 1625401 - DNA, 25 bp, Homo sapien
gctatcatttttggcgtggaagaga

SEQ ID NO: 1625402 - DNA, 25 bp, Homo sapien
gaagagagtttgatggattctgcaa

SEQ ID NO: 1625403 - DNA, 25 bp, Homo sapien
tgcaataatgagattgacgagacag

SEQ ID NO: 1625404 - DNA, 25 bp, Homo sapien
acagatggtcgctgccaggaattca

SEQ ID NO: 1625405 - DNA, 25 bp, Homo sapien
gtgttggaagctcagtggtggtttc

SEQ ID NO: 1625406 - DNA, 25 bp, Homo sapien
cgggagcgggaggtgttggaagctc

SEQ ID NO: 1625407 - DNA, 25 bp, Homo sapien
atatgcatggaggtagcgccatccc

SEQ ID NO: 1625408 - DNA, 25 bp, Homo sapien
acttcttcatatgcatggaggtagc

SEQ ID NO: 1625409 - DNA, 25 bp, Homo sapien
atccccgggattcccatgggtctct

SEQ ID NO: 1625410 - DNA, 25 bp, Homo sapien
tggaggtagcgccatccccgggatt

SEQ ID NO: 1625411 - DNA, 25 bp, Homo sapien
cagctcattgcatggaaatccatta

SEQ ID NO: 1625412 - DNA, 25 bp, Homo sapien
ggtaagttacatctccaagtgtttc

SEQ ID NO: 1625413 - DNA, 25 bp, Homo sapien
tacatctccaagtgtttccagctca

SEQ ID NO: 1625414 - DNA, 25 bp, Homo sapien
aaatccattatgcattgggccctct

SEQ ID NO: 1625415 - DNA, 25 bp, Homo sapien
aggccagctccaggacacttggagt

SEQ ID NO: 1625416 - DNA, 25 bp, Homo sapien
caggccagctccaggacacttggag

SEQ ID NO: 1625417 - DNA, 25 bp, Homo sapien
tcaggccagctccaggacacttgga

SEQ ID NO: 1625418 - DNA, 25 bp, Homo sapien
ttatcagccttagagatacccttgc

SEQ ID NO: 1625419 - DNA, 25 bp, Homo sapien
tgtctgatgttatcagccttagaga

SEQ ID NO: 1625420 - DNA, 25 bp, Homo sapien
tcatgtctgatgttatcagccttag

SEQ ID NO: 1625421 - DNA, 25 bp, Homo sapien
gatgttatcagccttagagataccc

SEQ ID NO: 1625422 - DNA, 25 bp, Homo sapien
tgccttcttgcttagaggggaaaca

SEQ ID NO: 1625423 - DNA, 25 bp, Homo sapien
gccttcttgcttagaggggaaacag

SEQ ID NO: 1625424 - DNA, 25 bp, Homo sapien
gcttccatccatatgcggaagtgag

SEQ ID NO: 1625425 - DNA, 25 bp, Homo sapien
catccatatgcggaagtgagaagga

SEQ ID NO: 1625426 - DNA, 25 bp, Homo sapien
ccaggagcttccatccatatgcgga

SEQ ID NO: 1625427 - DNA, 25 bp, Homo sapien
tgtatgcacactggggcatgtaaag

SEQ ID NO: 1625428 - DNA, 25 bp, Homo sapien
ggcctccaggatccatgtgaccctg

SEQ ID NO: 1625429 - DNA, 25 bp, Homo sapien
ctgccgtggagagtagagctggtgg

SEQ ID NO: 1625430 - DNA, 25 bp, Homo sapien
aggcctccaggatccatgtgaccct

SEQ ID NO: 1625431 - DNA, 25 bp, Homo sapien
gagagtagagctggtgggtaaagga

SEQ ID NO: 1625432 - DNA, 25 bp, Homo sapien
gaagtaaaaggcctggtacagagct

SEQ ID NO: 1625433 - DNA, 25 bp, Homo sapien
aataatatgcggaagtaaaaggcct

SEQ ID NO: 1625434 - DNA, 25 bp, Homo sapien
taaacgatggagtctatcatcattg

SEQ ID NO: 1625435 - DNA, 25 bp, Homo sapien
ccagcagctaagcagaggcttaaac

SEQ ID NO: 1625436 - DNA, 25 bp, Homo sapien
tatgtagccagttgcagtgtaaagg

SEQ ID NO: 1625437 - DNA, 25 bp, Homo sapien
ttatgtagccagttgcagtgtaaag

SEQ ID NO: 1625438 - DNA, 25 bp, Homo sapien
tttgtgacacgcttgtccccttctt

SEQ ID NO: 1625439 - DNA, 25 bp, Homo sapien
gcttttgtgacacgcttgtcccctt

SEQ ID NO: 1625440 - DNA, 25 bp, Homo sapien
gctggcctggtgtgcaaattgccaa

SEQ ID NO: 1625441 - DNA, 25 bp, Homo sapien
ctgtgtccagttagggccattcccc

SEQ ID NO: 1625442 - DNA, 25 bp, Homo sapien
ccaaaggtggagtgtggcccgagga

SEQ ID NO: 1625443 - DNA, 25 bp, Homo sapien
tctcctgatgccgagcttgtaaaac

SEQ ID NO: 1625444 - DNA, 25 bp, Homo sapien
actcgagggcaatccgctggcttct

SEQ ID NO: 1625445 - DNA, 25 bp, Homo sapien
gtctcctgtcattacaaacaactcg

SEQ ID NO: 1625446 - DNA, 25 bp, Homo sapien
acaatcaggccaccatcccgaggcc

SEQ ID NO: 1625447 - DNA, 25 bp, Homo sapien
agccattctttgtctcctgtcatta

SEQ ID NO: 1625448 - DNA, 25 bp, Homo sapien
cagccataatttggtgaggatttct

SEQ ID NO: 1625449 - DNA, 25 bp, Homo sapien
ttctaagctttgaacattgtggtgg

SEQ ID NO: 1625450 - DNA, 25 bp, Homo sapien
tctttgtaatcattggaggtcctgg

SEQ ID NO: 1625451 - DNA, 25 bp, Homo sapien
gctttgaacattgtggtggtttgga

SEQ ID NO: 1625452 - DNA, 25 bp, Homo sapien
tttctggtaacacaagtaaatgaag

SEQ ID NO: 1625453 - DNA, 25 bp, Homo sapien
tctttctggtaacacaagtaaatga

SEQ ID NO: 1625454 - DNA, 25 bp, Homo sapien
tctggtaacacaagtaaatgaagta

SEQ ID NO: 1625455 - DNA, 25 bp, Homo sapien
ggtaacacaagtaaatgaagtatgt

SEQ ID NO: 1625456 - DNA, 25 bp, Homo sapien
gagagtggtggccccttgtccatct

SEQ ID NO: 1625457 - DNA, 25 bp, Homo sapien
gagtggtggccccttgtccatcttc

SEQ ID NO: 1625458 - DNA, 25 bp, Homo sapien
agacaccagcagagactgacatagg

SEQ ID NO: 1625459 - DNA, 25 bp, Homo sapien
ccagcagagactgacataggccaac

SEQ ID NO: 1625460 - DNA, 25 bp, Homo sapien
ggcccatcaaattgcaggcggccat

SEQ ID NO: 1625461 - DNA, 25 bp, Homo sapien
caggcccatcaaattgcaggcggcc

SEQ ID NO: 1625462 - DNA, 25 bp, Homo sapien
ccaggcccatcaaattgcaggcggc

SEQ ID NO: 1625463 - DNA, 25 bp, Homo sapien
cccaggcccatcaaattgcaggcgg

SEQ ID NO: 1625464 - DNA, 25 bp, Homo sapien
gccacctttttaatgatgatgggaa

SEQ ID NO: 1625465 - DNA, 25 bp, Homo sapien
cctttttaatgatgatgggaactga

SEQ ID NO: 1625466 - DNA, 25 bp, Homo sapien
aaacaatgagacctccccacgtgct

SEQ ID NO: 1625467 - DNA, 25 bp, Homo sapien
acgtgctcctagagacaaggcaggg

SEQ ID NO: 1625468 - DNA, 25 bp, Homo sapien
ttctaaggaggcagtgccatcagct

SEQ ID NO: 1625469 - DNA, 25 bp, Homo sapien
ggaggcagtgccatcagcttgtttg

SEQ ID NO: 1625470 - DNA, 25 bp, Homo sapien
agtgccatcagcttgtttgaagctc

SEQ ID NO: 1625471 - DNA, 25 bp, Homo sapien
ctggttctaaggaggcagtgccatc

SEQ ID NO: 1625472 - DNA, 25 bp, Homo sapien
tgagctctgtctataggaactgtgc

SEQ ID NO: 1625473 - DNA, 25 bp, Homo sapien
cttcttccctcttgaatttaggcat

SEQ ID NO: 1625474 - DNA, 25 bp, Homo sapien
tgtgccagacagctcggttctcctg

SEQ ID NO: 1625475 - DNA, 25 bp, Homo sapien
tcctgctgggtcctcgagtggactt

SEQ ID NO: 1625476 - DNA, 25 bp, Homo sapien
tacgcagagctccggttggaagtgc

SEQ ID NO: 1625477 - DNA, 25 bp, Homo sapien
acgcagagctccggttggaagtgca

SEQ ID NO: 1625478 - DNA, 25 bp, Homo sapien
ctacgcagagctccggttggaagtg

SEQ ID NO: 1625479 - DNA, 25 bp, Homo sapien
cattgtggatgttgtctgatctcag

SEQ ID NO: 1625480 - DNA, 25 bp, Homo sapien
cactgacagcgttctcagacactca

SEQ ID NO: 1625481 - DNA, 25 bp, Homo sapien
tgtggatgttgtctgatctcagtag

SEQ ID NO: 1625482 - DNA, 25 bp, Homo sapien
cagtagcaacactgacagcgttctc

SEQ ID NO: 1625483 - DNA, 25 bp, Homo sapien
ctttcccattatccagcaggttacc

SEQ ID NO: 1625484 - DNA, 25 bp, Homo sapien
gtttcctctgaagacactaagctgc

SEQ ID NO: 1625485 - DNA, 25 bp, Homo sapien
ttcccattatccagcaggttaccct

SEQ ID NO: 1625486 - DNA, 25 bp, Homo sapien
taagctgcatcgatgttttctcttc

SEQ ID NO: 1625487 - DNA, 25 bp, Homo sapien
aggtaacggtctctccacatccagg

SEQ ID NO: 1625488 - DNA, 25 bp, Homo sapien
tggaaatagtgctccgtgccacttg

SEQ ID NO: 1625489 - DNA, 25 bp, Homo sapien
ggcagcagaggtgccgtggaaatag

SEQ ID NO: 1625490 - DNA, 25 bp, Homo sapien
gtgctccgtgccacttgctagatct

SEQ ID NO: 1625491 - DNA, 25 bp, Homo sapien
tcatcaccaaagaacgcaacattct

SEQ ID NO: 1625492 - DNA, 25 bp, Homo sapien
cgcagccatcttcgggccaatttgt

SEQ ID NO: 1625493 - DNA, 25 bp, Homo sapien
cagtatacattatgagcacactatt

SEQ ID NO: 1625494 - DNA, 25 bp, Homo sapien
aatttgtcaatcctcgctcgttcca

SEQ ID NO: 1625495 - DNA, 25 bp, Homo sapien
tagaagagtccttgccatgtttctc

SEQ ID NO: 1625496 - DNA, 25 bp, Homo sapien
ttcttctagaagagtccttgccatg

SEQ ID NO: 1625497 - DNA, 25 bp, Homo sapien
tctagaagagtccttgccatgtttc

SEQ ID NO: 1625498 - DNA, 25 bp, Homo sapien
tgcagttgcctccatttcttctaga

SEQ ID NO: 1625499 - DNA, 25 bp, Homo sapien
catgcaacaccatcaagatcagagg

SEQ ID NO: 1625500 - DNA, 25 bp, Homo sapien
tttaaaactccatgcaacaccatca

SEQ ID NO: 1625501 - DNA, 25 bp, Homo sapien
ccatcaagatcagagggatgtaaat

SEQ ID NO: 1625502 - DNA, 25 bp, Homo sapien
agtctcttgatgtgatttacttgtg

SEQ ID NO: 1625503 - DNA, 25 bp, Homo sapien
cagtgtttctctgcacttgtagtgg

SEQ ID NO: 1625504 - DNA, 25 bp, Homo sapien
tgaccttttgggcattaagaaccca

SEQ ID NO: 1625505 - DNA, 25 bp, Homo sapien
tttgctactgcagccctaagagatg

SEQ ID NO: 1625506 - DNA, 25 bp, Homo sapien
aaagctggccaggtatataacaggc

SEQ ID NO: 1625507 - DNA, 25 bp, Homo sapien
cttgaaccctgtaccatccacaggg

SEQ ID NO: 1625508 - DNA, 25 bp, Homo sapien
tggatccagagccttgaaccctgta

SEQ ID NO: 1625509 - DNA, 25 bp, Homo sapien
ttgaaccctgtaccatccacagggc

SEQ ID NO: 1625510 - DNA, 25 bp, Homo sapien
tccagagccttgaaccctgtaccat

SEQ ID NO: 1625511 - DNA, 25 bp, Homo sapien
tattttgctgcatggctcattacac

SEQ ID NO: 1625512 - DNA, 25 bp, Homo sapien
tctggtctggtgtgtcagcaagcct

SEQ ID NO: 1625513 - DNA, 25 bp, Homo sapien
tttatgggcgttgggcccaccgagc

SEQ ID NO: 1625514 - DNA, 25 bp, Homo sapien
caagccttcatcaagtggctgctga

SEQ ID NO: 1625515 - DNA, 25 bp, Homo sapien
ccgaatactgctgtgcattggcgaa

SEQ ID NO: 1625516 - DNA, 25 bp, Homo sapien
cattggcgaatggtattttgcagca

SEQ ID NO: 1625517 - DNA, 25 bp, Homo sapien
tatgcgagtcctgcctattacagca

SEQ ID NO: 1625518 - DNA, 25 bp, Homo sapien
tgctctcagaaatatgcgagtcctg

SEQ ID NO: 1625519 - DNA, 25 bp, Homo sapien
gagacactggtctctgctccagagt

SEQ ID NO: 1625520 - DNA, 25 bp, Homo sapien
gacactggtctctgctccagagtaa

SEQ ID NO: 1625521 - DNA, 25 bp, Homo sapien
gctgcagagacactggtctctgctc

SEQ ID NO: 1625522 - DNA, 25 bp, Homo sapien
gtctctgctccagagtaattggcat

SEQ ID NO: 1625523 - DNA, 25 bp, Homo sapien
tagttcactatctgccatggagcca

SEQ ID NO: 1625524 - DNA, 25 bp, Homo sapien
catggagccagcacaacgattgttg

SEQ ID NO: 1625525 - DNA, 25 bp, Homo sapien
gtggtgccacacaactgaactgctg

SEQ ID NO: 1625526 - DNA, 25 bp, Homo sapien
gattgttgctgagagccttcaggcc

SEQ ID NO: 1625527 - DNA, 25 bp, Homo sapien
ggactttccattaaacgacatctgt

SEQ ID NO: 1625528 - DNA, 25 bp, Homo sapien
ctccaaaaataacaggactttccat

SEQ ID NO: 1625529 - DNA, 25 bp, Homo sapien
tggaatatgcatttcgtcctccaaa

SEQ ID NO: 1625530 - DNA, 25 bp, Homo sapien
taaacgacatctgttaatgatgcag

SEQ ID NO: 1625531 - DNA, 25 bp, Homo sapien
ccatcggaaacatgaaccagatttc

SEQ ID NO: 1625532 - DNA, 25 bp, Homo sapien
tctggccaataggaaagctatgtcc

SEQ ID NO: 1625533 - DNA, 25 bp, Homo sapien
tgggctccatatttaggcccagcag

SEQ ID NO: 1625534 - DNA, 25 bp, Homo sapien
gctgtaagcctgtgccagcaacaca

SEQ ID NO: 1625535 - DNA, 25 bp, Homo sapien
tggatgtgaattgtaacagatcagc

SEQ ID NO: 1625536 - DNA, 25 bp, Homo sapien
tttctcgagaagctggagagtttcc

SEQ ID NO: 1625537 - DNA, 25 bp, Homo sapien
agtgaaaccgagaccttgtgcagca

SEQ ID NO: 1625538 - DNA, 25 bp, Homo sapien
gatcagctgagagtcgcagttcaac

SEQ ID NO: 1625539 - DNA, 25 bp, Homo sapien
atgccaaaaccataaggtcctttgc

SEQ ID NO: 1625540 - DNA, 25 bp, Homo sapien
acctgcacaggttatgccaaaacca

SEQ ID NO: 1625541 - DNA, 25 bp, Homo sapien
ggaaacctgcacaggttatgccaaa

SEQ ID NO: 1625542 - DNA, 25 bp, Homo sapien
tgccaaaaccataaggtcctttgcc

SEQ ID NO: 1625543 - DNA, 25 bp, Homo sapien
catagtaaggaaacccatcagctgt

SEQ ID NO: 1625544 - DNA, 25 bp, Homo sapien
ggctggtcatttcctggaactggtg

SEQ ID NO: 1625545 - DNA, 25 bp, Homo sapien
taaaggagagttcttacacagcgta

SEQ ID NO: 1625546 - DNA, 25 bp, Homo sapien
ggtacatttggccatccttggttgg

SEQ ID NO: 1625547 - DNA, 25 bp, Homo sapien
gccaacgttcagtcctatttccaga

SEQ ID NO: 1625548 - DNA, 25 bp, Homo sapien
gctgccatgagggagaaatcacgtc

SEQ ID NO: 1625549 - DNA, 25 bp, Homo sapien
caagtctgatactgtagctcatggg

SEQ ID NO: 1625550 - DNA, 25 bp, Homo sapien
tatgtgcttcccgtcttggcgtaca

SEQ ID NO: 1625551 - DNA, 25 bp, Homo sapien
aggaaaggtaactgtacagatacat

SEQ ID NO: 1625552 - DNA, 25 bp, Homo sapien
tgtcagtagaaaagcctcgtacatc

SEQ ID NO: 1625553 - DNA, 25 bp, Homo sapien
ttgtatcgcatccaatgggcccagt

SEQ ID NO: 1625554 - DNA, 25 bp, Homo sapien
tgggcccagtgacctgattcaatgt

SEQ ID NO: 1625555 - DNA, 25 bp, Homo sapien
acagtttcattgacattgtatcgca

SEQ ID NO: 1625556 - DNA, 25 bp, Homo sapien
tcaacgaggcttctcctccatgggc

SEQ ID NO: 1625557 - DNA, 25 bp, Homo sapien
gcatccttcctggtcaagccctctc

SEQ ID NO: 1625558 - DNA, 25 bp, Homo sapien
ggctccctgcatccttcctggtcaa

SEQ ID NO: 1625559 - DNA, 25 bp, Homo sapien
tccctgcatccttcctggtcaagcc

SEQ ID NO: 1625560 - DNA, 25 bp, Homo sapien
ttagaggccttcttcatgtggctgg

SEQ ID NO: 1625561 - DNA, 25 bp, Homo sapien
ggtctcagacaaggccaggagctca

SEQ ID NO: 1625562 - DNA, 25 bp, Homo sapien
atgtggctgggtctcagacaaggcc

SEQ ID NO: 1625563 - DNA, 25 bp, Homo sapien
ggccaggagctcaatattgaaatca

SEQ ID NO: 1625564 - DNA, 25 bp, Homo sapien
tctagtggcttgagctatgcagctt

SEQ ID NO: 1625565 - DNA, 25 bp, Homo sapien
gacatggagggattgactgttcctt

SEQ ID NO: 1625566 - DNA, 25 bp, Homo sapien
gcttaacgtaatggccccagacatg

SEQ ID NO: 1625567 - DNA, 25 bp, Homo sapien
tgtcagaaagcgctcagggccttgg

SEQ ID NO: 1625568 - DNA, 25 bp, Homo sapien
cttgtgaatttcataaccaagccac

SEQ ID NO: 1625569 - DNA, 25 bp, Homo sapien
ggagcaccttgtgaatttcataacc

SEQ ID NO: 1625570 - DNA, 25 bp, Homo sapien
ttagctttctcactgatccaaggct

SEQ ID NO: 1625571 - DNA, 25 bp, Homo sapien
agctttctcactgatccaaggctgc

SEQ ID NO: 1625572 - DNA, 25 bp, Homo sapien
tgaggccaggtttaggagtactggg

SEQ ID NO: 1625573 - DNA, 25 bp, Homo sapien
tggaatcaatgattgatgtgtcccc

SEQ ID NO: 1625574 - DNA, 25 bp, Homo sapien
atgattgatgtgtcccccagagctg

SEQ ID NO: 1625575 - DNA, 25 bp, Homo sapien
caatgattgatgtgtcccccagagc

SEQ ID NO: 1625576 - DNA, 25 bp, Homo sapien
tgggtactggaatcaatgattgatg

SEQ ID NO: 1625577 - DNA, 25 bp, Homo sapien
ggcatcccgactgcaggtagcaaga

SEQ ID NO: 1625578 - DNA, 25 bp, Homo sapien
tttagggttgtgcagcgcatccagg

SEQ ID NO: 1625579 - DNA, 25 bp, Homo sapien
tgtgaaacttctcagggcatcccga

SEQ ID NO: 1625580 - DNA, 25 bp, Homo sapien
aaatgctctctgtgtcagatggcgc

SEQ ID NO: 1625581 - DNA, 25 bp, Homo sapien
tcctgaaggaatatggatctgtgga

SEQ ID NO: 1625582 - DNA, 25 bp, Homo sapien
tactttataaaagccgaagccactg

SEQ ID NO: 1625583 - DNA, 25 bp, Homo sapien
gaaggaatatggatctgtggaaagc

SEQ ID NO: 1625584 - DNA, 25 bp, Homo sapien
ggaatatggatctgtggaaagcagc

SEQ ID NO: 1625585 - DNA, 25 bp, Homo sapien
aagtcttctcaattttaggacgctg

SEQ ID NO: 1625586 - DNA, 25 bp, Homo sapien
caactgcattctaaagcattctggg

SEQ ID NO: 1625587 - DNA, 25 bp, Homo sapien
gactgcatgagcagaccaagtcttc

SEQ ID NO: 1625588 - DNA, 25 bp, Homo sapien
taggacgctgggttcttccatttct

SEQ ID NO: 1625589 - DNA, 25 bp, Homo sapien
cgaaatacatttggattaaactcaa

SEQ ID NO: 1625590 - DNA, 25 bp, Homo sapien
caacaattgaaaccactgttttcga

SEQ ID NO: 1625591 - DNA, 25 bp, Homo sapien
taaactcaatgtactaagactcaat

SEQ ID NO: 1625592 - DNA, 25 bp, Homo sapien
ccactgttttcgaaatacatttgga

SEQ ID NO: 1625593 - DNA, 25 bp, Homo sapien
ccaatccttggatgtgtacacagca

SEQ ID NO: 1625594 - DNA, 25 bp, Homo sapien
tgctggcaccatgagaacactcacc

SEQ ID NO: 1625595 - DNA, 25 bp, Homo sapien
gtggtttccaatccttggatgtgta

SEQ ID NO: 1625596 - DNA, 25 bp, Homo sapien
ccttggatgtgtacacagcatacag

SEQ ID NO: 1625597 - DNA, 25 bp, Homo sapien
cacggagtcctgacaagaagctgac

SEQ ID NO: 1625598 - DNA, 25 bp, Homo sapien
tcctgacacagaagtccatttcgta

SEQ ID NO: 1625599 - DNA, 25 bp, Homo sapien
gcagaggtccaaacaaaccacggag

SEQ ID NO: 1625600 - DNA, 25 bp, Homo sapien
caacacctcacggtaacaagcagag

SEQ ID NO: 1625601 - DNA, 25 bp, Homo sapien
ccttttgtcttctatggcattccat

SEQ ID NO: 1625602 - DNA, 25 bp, Homo sapien
aaaacttgaccattatctcaataaa

SEQ ID NO: 1625603 - DNA, 25 bp, Homo sapien
gtttgatattatcccgcacctttta

SEQ ID NO: 1625604 - DNA, 25 bp, Homo sapien
tattatcccgcaccttttaaatgct

SEQ ID NO: 1625605 - DNA, 25 bp, Homo sapien
aggcctggtccccagacgtccccat

SEQ ID NO: 1625606 - DNA, 25 bp, Homo sapien
gaggcctggtccccagacgtcccca

SEQ ID NO: 1625607 - DNA, 25 bp, Homo sapien
gcctggtccccagacgtccccataa

SEQ ID NO: 1625608 - DNA, 25 bp, Homo sapien
ctggtccccagacgtccccataaat

SEQ ID NO: 1625609 - DNA, 25 bp, Homo sapien
catgggtcatccatgtgaaaggaca

SEQ ID NO: 1625610 - DNA, 25 bp, Homo sapien
gaggctgcttcttgggaaacttcgg

SEQ ID NO: 1625611 - DNA, 25 bp, Homo sapien
gaaaggacagtcctgatgtatcagg

SEQ ID NO: 1625612 - DNA, 25 bp, Homo sapien
aacttcgggttctgagttaacacag

SEQ ID NO: 1625613 - DNA, 25 bp, Homo sapien
aatgcctcgagggtcctctgtgcgc

SEQ ID NO: 1625614 - DNA, 25 bp, Homo sapien
ccccgggcaactggcactcacaggc

SEQ ID NO: 1625615 - DNA, 25 bp, Homo sapien
tctaatgaatgcctcgagggtcctc

SEQ ID NO: 1625616 - DNA, 25 bp, Homo sapien
agggtcctctgtgcgctgccacctg

SEQ ID NO: 1625617 - DNA, 25 bp, Homo sapien
catgcaagagcgtaaaacagaagga

SEQ ID NO: 1625618 - DNA, 25 bp, Homo sapien
tcgggctagaaagagcttggtcacc

SEQ ID NO: 1625619 - DNA, 25 bp, Homo sapien
gcttggtcaccaagacatgggaaga

SEQ ID NO: 1625620 - DNA, 25 bp, Homo sapien
tgcttgttctccatgctgattcggg

SEQ ID NO: 1625621 - DNA, 25 bp, Homo sapien
taaaattgtaagagaaacgatgcag

SEQ ID NO: 1625622 - DNA, 25 bp, Homo sapien
ggaagaggaacaagccgtgccataa

SEQ ID NO: 1625623 - DNA, 25 bp, Homo sapien
ctgcttgctgtagtataaaattgta

SEQ ID NO: 1625624 - DNA, 25 bp, Homo sapien
gcagatcaagttgcgggcttgaagt

SEQ ID NO: 1625625 - DNA, 25 bp, Homo sapien
tctccaagggaagtcccagctcaaa

SEQ ID NO: 1625626 - DNA, 25 bp, Homo sapien
tggggaagatctccaagggaagtcc

SEQ ID NO: 1625627 - DNA, 25 bp, Homo sapien
agatctccaagggaagtcccagctc

SEQ ID NO: 1625628 - DNA, 25 bp, Homo sapien
gggaagatctccaagggaagtccca

SEQ ID NO: 1625629 - DNA, 25 bp, Homo sapien
caccatggttgcagatgcagaagaa

SEQ ID NO: 1625630 - DNA, 25 bp, Homo sapien
tcaaatggaagtgcatgataacaaa

SEQ ID NO: 1625631 - DNA, 25 bp, Homo sapien
aaaataaggtatggagtccagatgg

SEQ ID NO: 1625632 - DNA, 25 bp, Homo sapien
atgaaaaatggtccccacagcccat

SEQ ID NO: 1625633 - DNA, 25 bp, Homo sapien
tttctcaggacggttaagatgcagc

SEQ ID NO: 1625634 - DNA, 25 bp, Homo sapien
gacggttaagatgcagcttgcatga

SEQ ID NO: 1625635 - DNA, 25 bp, Homo sapien
caggacggttaagatgcagcttgca

SEQ ID NO: 1625636 - DNA, 25 bp, Homo sapien
catgatttattcagaataaggtcca

SEQ ID NO: 1625637 - DNA, 25 bp, Homo sapien
tcacttggtgaacacattatgtgct

SEQ ID NO: 1625638 - DNA, 25 bp, Homo sapien
tacatcgatggtcagccgaggagat

SEQ ID NO: 1625639 - DNA, 25 bp, Homo sapien
ggtgaacacattatgtgcttctggg

SEQ ID NO: 1625640 - DNA, 25 bp, Homo sapien
gcttctgggagataataagctacat

SEQ ID NO: 1625641 - DNA, 25 bp, Homo sapien
tatctgtgactgtagagaagccatt

SEQ ID NO: 1625642 - DNA, 25 bp, Homo sapien
ccatttctttgttggctctaaatgg

SEQ ID NO: 1625643 - DNA, 25 bp, Homo sapien
acacgcgccaatgtgccatttacca

SEQ ID NO: 1625644 - DNA, 25 bp, Homo sapien
ccccattccttcgttgtgcaaattg

SEQ ID NO: 1625645 - DNA, 25 bp, Homo sapien
tatacttccgatgatgtcgattttg

SEQ ID NO: 1625646 - DNA, 25 bp, Homo sapien
ccgatgatgtcgattttgattttca

SEQ ID NO: 1625647 - DNA, 25 bp, Homo sapien
tacttccgatgatgtcgattttgat

SEQ ID NO: 1625648 - DNA, 25 bp, Homo sapien
ttttatacttccgatgatgtcgatt

SEQ ID NO: 1625649 - DNA, 25 bp, Homo sapien
caggagcatggaaaactcacgtttt

SEQ ID NO: 1625650 - DNA, 25 bp, Homo sapien
aataccaggagcatggaaaactcac

SEQ ID NO: 1625651 - DNA, 25 bp, Homo sapien
aattaataccaggagcatggaaaac

SEQ ID NO: 1625652 - DNA, 25 bp, Homo sapien
tcaaaattaataccaggagcatgga

SEQ ID NO: 1625653 - DNA, 25 bp, Homo sapien
gctccttcaggctagcaacctgcat

SEQ ID NO: 1625654 - DNA, 25 bp, Homo sapien
tgctccttcaggctagcaacctgca

SEQ ID NO: 1625655 - DNA, 25 bp, Homo sapien
cgtgcttgtcaatgcaggaaagtag

SEQ ID NO: 1625656 - DNA, 25 bp, Homo sapien
gttttcggtcccgacgtgcttgtca

SEQ ID NO: 1625657 - DNA, 25 bp, Homo sapien
tcggtcccgacgtgcttgtcaatgc

SEQ ID NO: 1625658 - DNA, 25 bp, Homo sapien
cccgacgtgcttgtcaatgcaggaa

SEQ ID NO: 1625659 - DNA, 25 bp, Homo sapien
tggctgctgcgtttccaaatgttcc

SEQ ID NO: 1625660 - DNA, 25 bp, Homo sapien
tatggcacctgcagataatgagata

SEQ ID NO: 1625661 - DNA, 25 bp, Homo sapien
tcagggaacgcttttatgtggctgc

SEQ ID NO: 1625662 - DNA, 25 bp, Homo sapien
aaaccggaatttccagcgcctgagc

SEQ ID NO: 1625663 - DNA, 25 bp, Homo sapien
gctgcatgctgtaaacaacaaacaa

SEQ ID NO: 1625664 - DNA, 25 bp, Homo sapien
gcttcaatcttatacaactcccatg

SEQ ID NO: 1625665 - DNA, 25 bp, Homo sapien
gcaaagctccgtattttagtctcag

SEQ ID NO: 1625666 - DNA, 25 bp, Homo sapien
aactcccatgcagcattgcccacag

SEQ ID NO: 1625667 - DNA, 25 bp, Homo sapien
gcatgatgtgcaaatccacactcct

SEQ ID NO: 1625668 - DNA, 25 bp, Homo sapien
tgatgtgcaaatccacactccttaa

SEQ ID NO: 1625669 - DNA, 25 bp, Homo sapien
gatgtgcaaatccacactccttaaa

SEQ ID NO: 1625670 - DNA, 25 bp, Homo sapien
agggcatgatgtgcaaatccacact

SEQ ID NO: 1625671 - DNA, 25 bp, Homo sapien
aaatctgcatatggctgcagcttgc

SEQ ID NO: 1625672 - DNA, 25 bp, Homo sapien
gctggaacgctctcgcactaaatct

SEQ ID NO: 1625673 - DNA, 25 bp, Homo sapien
taaaggctgcttatgcacactttgc

SEQ ID NO: 1625674 - DNA, 25 bp, Homo sapien
taacatcataatcaataaaggctgc

SEQ ID NO: 1625675 - DNA, 25 bp, Homo sapien
gctatcttgggaaatacctgtttta

SEQ ID NO: 1625676 - DNA, 25 bp, Homo sapien
gagccgtgttttgcaaagctcagaa

SEQ ID NO: 1625677 - DNA, 25 bp, Homo sapien
cacatatgtagaagctatcttggga

SEQ ID NO: 1625678 - DNA, 25 bp, Homo sapien
acatatgtagaagctatcttgggaa

SEQ ID NO: 1625679 - DNA, 25 bp, Homo sapien
cattgatacagcaccagtcatattc

SEQ ID NO: 1625680 - DNA, 25 bp, Homo sapien
attctcatcagaatttgtactcatg

SEQ ID NO: 1625681 - DNA, 25 bp, Homo sapien
tctcatcagaatttgtactcatgtc

SEQ ID NO: 1625682 - DNA, 25 bp, Homo sapien
gatacagcaccagtcatattctgtt

SEQ ID NO: 1625683 - DNA, 25 bp, Homo sapien
caagcattcagttgtttcagtttct

SEQ ID NO: 1625684 - DNA, 25 bp, Homo sapien
gctgagatatcagagtcaagcattc

SEQ ID NO: 1625685 - DNA, 25 bp, Homo sapien
caattccatgaatgacgatagttgc

SEQ ID NO: 1625686 - DNA, 25 bp, Homo sapien
gacatctttgtagctgccatatcca

SEQ ID NO: 1625687 - DNA, 25 bp, Homo sapien
tcgtttgcagtccacaggatgccaa

SEQ ID NO: 1625688 - DNA, 25 bp, Homo sapien
ggtcttggtcttcacgtcgtttgca

SEQ ID NO: 1625689 - DNA, 25 bp, Homo sapien
tgccaagacccatttggcagtacaa

SEQ ID NO: 1625690 - DNA, 25 bp, Homo sapien
tctacaggagggatgatttccgtca

SEQ ID NO: 1625691 - DNA, 25 bp, Homo sapien
caggcaggagactttctgccaggag

SEQ ID NO: 1625692 - DNA, 25 bp, Homo sapien
gcaggagactttctgccaggagcca

SEQ ID NO: 1625693 - DNA, 25 bp, Homo sapien
caggagccaggcctgcagggagcag

SEQ ID NO: 1625694 - DNA, 25 bp, Homo sapien
ccaggagccaggcctgcagggagca

SEQ ID NO: 1625695 - DNA, 25 bp, Homo sapien
tcttggcacgaaacagccgcggagg

SEQ ID NO: 1625696 - DNA, 25 bp, Homo sapien
aatctgccgcggctttcttggcacg

SEQ ID NO: 1625697 - DNA, 25 bp, Homo sapien
ctgccgcggctttcttggcacgaaa

SEQ ID NO: 1625698 - DNA, 25 bp, Homo sapien
gaaacagccgcggaggcaaagagct

SEQ ID NO: 1625699 - DNA, 25 bp, Homo sapien
aactgcagcaaactggtaaggatgc

SEQ ID NO: 1625700 - DNA, 25 bp, Homo sapien
tatcacgatctactcaagagaccag

SEQ ID NO: 1625701 - DNA, 25 bp, Homo sapien
cactgacagaccatcacccatgaag

SEQ ID NO: 1625702 - DNA, 25 bp, Homo sapien
gcaagatcggcagctttgaaatatc

SEQ ID NO: 1625703 - DNA, 25 bp, Homo sapien
ggcccttgcatctaattggacagct

SEQ ID NO: 1625704 - DNA, 25 bp, Homo sapien
tcaggcccttgcatctaattggaca

SEQ ID NO: 1625705 - DNA, 25 bp, Homo sapien
ccttgcatctaattggacagctggg

SEQ ID NO: 1625706 - DNA, 25 bp, Homo sapien
catctaattggacagctgggttggt

SEQ ID NO: 1625707 - DNA, 25 bp, Homo sapien
gagaagcgttgacacatgatcaact

SEQ ID NO: 1625708 - DNA, 25 bp, Homo sapien
tgatcaacttccctctaatatcctt

SEQ ID NO: 1625709 - DNA, 25 bp, Homo sapien
ctgagaagcgttgacacatgatcaa

SEQ ID NO: 1625710 - DNA, 25 bp, Homo sapien
agcgttgacacatgatcaacttccc

SEQ ID NO: 1625711 - DNA, 25 bp, Homo sapien
cattgtgggacagcttcctaaggaa

SEQ ID NO: 1625712 - DNA, 25 bp, Homo sapien
actagctgggtggtctcgtcgatgc

SEQ ID NO: 1625713 - DNA, 25 bp, Homo sapien
aaatgatagcatttgagagggccac

SEQ ID NO: 1625714 - DNA, 25 bp, Homo sapien
gaaacactctctcgtaccaggaaaa

SEQ ID NO: 1625715 - DNA, 25 bp, Homo sapien
ccagcccgccagcacaggactttgg

SEQ ID NO: 1625716 - DNA, 25 bp, Homo sapien
attcgtctccacgacacactgttgg

SEQ ID NO: 1625717 - DNA, 25 bp, Homo sapien
ctgtctgagttctggcacggctgaa

SEQ ID NO: 1625718 - DNA, 25 bp, Homo sapien
actttgggatggcacatggcagctt

SEQ ID NO: 1625719 - DNA, 25 bp, Homo sapien
caccgtgatgtcctgaaaacacggg

SEQ ID NO: 1625720 - DNA, 25 bp, Homo sapien
cacatctccaccgtgatgtcctgaa

SEQ ID NO: 1625721 - DNA, 25 bp, Homo sapien
cctacaccggcagacatttcctggt

SEQ ID NO: 1625722 - DNA, 25 bp, Homo sapien
tctccaccgtgatgtcctgaaaaca

SEQ ID NO: 1625723 - DNA, 25 bp, Homo sapien
ggacatccttgtgtgcaccgtgctt

SEQ ID NO: 1625724 - DNA, 25 bp, Homo sapien
ccagaatttagctcccccagatctt

SEQ ID NO: 1625725 - DNA, 25 bp, Homo sapien
gtgcaccgtgcttccgcattgcctg

SEQ ID NO: 1625726 - DNA, 25 bp, Homo sapien
tgcccctccccggacatccttgtgt

SEQ ID NO: 1625727 - DNA, 25 bp, Homo sapien
cttggtcgggtctcgcctgtcacca

SEQ ID NO: 1625728 - DNA, 25 bp, Homo sapien
gtcgggtctcgcctgtcaccagatc

SEQ ID NO: 1625729 - DNA, 25 bp, Homo sapien
ggtcgggtctcgcctgtcaccagat

SEQ ID NO: 1625730 - DNA, 25 bp, Homo sapien
ttggtcgggtctcgcctgtcaccag

SEQ ID NO: 1625731 - DNA, 25 bp, Homo sapien
catgttccagaagccagtcaatggg

SEQ ID NO: 1625732 - DNA, 25 bp, Homo sapien
tgttccagaagccagtcaatggggg

SEQ ID NO: 1625733 - DNA, 25 bp, Homo sapien
cacatgttccagaagccagtcaatg

SEQ ID NO: 1625734 - DNA, 25 bp, Homo sapien
ttccagaagccagtcaatgggggca

SEQ ID NO: 1625735 - DNA, 25 bp, Homo sapien
gctgtaagcctttgcttgctactgg

SEQ ID NO: 1625736 - DNA, 25 bp, Homo sapien
cttgctactggtctcaggaagctgt

SEQ ID NO: 1625737 - DNA, 25 bp, Homo sapien
gaggcactttcttctccgacctcag

SEQ ID NO: 1625738 - DNA, 25 bp, Homo sapien
ggaaatcctggcctttttagctgct

SEQ ID NO: 1625739 - DNA, 25 bp, Homo sapien
tccagcatgcacaatggtttaatcg

SEQ ID NO: 1625740 - DNA, 25 bp, Homo sapien
tctgagtaccaaccctttacaaatc

SEQ ID NO: 1625741 - DNA, 25 bp, Homo sapien
caacgagccagcattaggcttgcat

SEQ ID NO: 1625742 - DNA, 25 bp, Homo sapien
gagaactgttgagctaaagtgcctc

SEQ ID NO: 1625743 - DNA, 25 bp, Homo sapien
tgctctgaagtcagcccgtgaggcc

SEQ ID NO: 1625744 - DNA, 25 bp, Homo sapien
ctcagtggagaaaacgcccgggttg

SEQ ID NO: 1625745 - DNA, 25 bp, Homo sapien
aatcattcgccgagcacggtgggag

SEQ ID NO: 1625746 - DNA, 25 bp, Homo sapien
cttgcagtgggcaaagcgatgctga

SEQ ID NO: 1625747 - DNA, 25 bp, Homo sapien
cctcattattccactgattggcctt

SEQ ID NO: 1625748 - DNA, 25 bp, Homo sapien
aaaaaatctatcacctccttaatag

SEQ ID NO: 1625749 - DNA, 25 bp, Homo sapien
gccttatttcatctgaagaatgctg

SEQ ID NO: 1625750 - DNA, 25 bp, Homo sapien
tattccactgattggccttatttca

SEQ ID NO: 1625751 - DNA, 25 bp, Homo sapien
taggtcttcccgattccgatgccca

SEQ ID NO: 1625752 - DNA, 25 bp, Homo sapien
gtcttcccgattccgatgcccacag

SEQ ID NO: 1625753 - DNA, 25 bp, Homo sapien
cagtaggtcttcccgattccgatgc

SEQ ID NO: 1625754 - DNA, 25 bp, Homo sapien
gtaggtcttcccgattccgatgccc

SEQ ID NO: 1625755 - DNA, 25 bp, Homo sapien
gtggtggtggaaagcccaccctgcc

SEQ ID NO: 1625756 - DNA, 25 bp, Homo sapien
tgcataaaagcgagcggcagcctcg

SEQ ID NO: 1625757 - DNA, 25 bp, Homo sapien
gccagggccggcgtttgttcctgct

SEQ ID NO: 1625758 - DNA, 25 bp, Homo sapien
gcagtaattctgtgcataaaagcga

SEQ ID NO: 1625759 - DNA, 25 bp, Homo sapien
tagtgtggggtgtataaaaagcaac

SEQ ID NO: 1625760 - DNA, 25 bp, Homo sapien
tgagccccgtaggacgtagtctgtg

SEQ ID NO: 1625761 - DNA, 25 bp, Homo sapien
aataggttctgtacccaggtcttga

SEQ ID NO: 1625762 - DNA, 25 bp, Homo sapien
cttggccatgtggaatgcaataggt

SEQ ID NO: 1625763 - DNA, 25 bp, Homo sapien
caagcagaacagcaccaacttccct

SEQ ID NO: 1625764 - DNA, 25 bp, Homo sapien
tcaagcagaacagcaccaacttccc

SEQ ID NO: 1625765 - DNA, 25 bp, Homo sapien
tctatgagaaactactgagatggtt

SEQ ID NO: 1625766 - DNA, 25 bp, Homo sapien
catctgttcttttaacgaatgttgg

SEQ ID NO: 1625767 - DNA, 25 bp, Homo sapien
cattatgaatcaagtcgcggtgacc

SEQ ID NO: 1625768 - DNA, 25 bp, Homo sapien
ctgggctctagggtaaagagtatat

SEQ ID NO: 1625769 - DNA, 25 bp, Homo sapien
atcatagtgtgtacttatacaaatc

SEQ ID NO: 1625770 - DNA, 25 bp, Homo sapien
gcatacataatcaatatagtcatgt

SEQ ID NO: 1625771 - DNA, 25 bp, Homo sapien
tagtgtgtacttatacaaatctaga

SEQ ID NO: 1625772 - DNA, 25 bp, Homo sapien
aatcaatatagtcatgtgtatacag

SEQ ID NO: 1625773 - DNA, 25 bp, Homo sapien
gaggatggaacttggggtctttcaa

SEQ ID NO: 1625774 - DNA, 25 bp, Homo sapien
ctttcaagttctcagtagggctgcg

SEQ ID NO: 1625775 - DNA, 25 bp, Homo sapien
ttttgtaatgatgcagcagcgagga

SEQ ID NO: 1625776 - DNA, 25 bp, Homo sapien
ttctcagtagggctgcgatccttcc

SEQ ID NO: 1625777 - DNA, 25 bp, Homo sapien
caagcatttcccagacattagtcat

SEQ ID NO: 1625778 - DNA, 25 bp, Homo sapien
ggttggctatacatctccagtgtag

SEQ ID NO: 1625779 - DNA, 25 bp, Homo sapien
ccagtgtaggtgtttcaagcatttc

SEQ ID NO: 1625780 - DNA, 25 bp, Homo sapien
cattcagaattgtggcgctatatca

SEQ ID NO: 1625781 - DNA, 25 bp, Homo sapien
tgcagaaggagatgcttcaggtaca

SEQ ID NO: 1625782 - DNA, 25 bp, Homo sapien
gcagaaggagatgcttcaggtacat

SEQ ID NO: 1625783 - DNA, 25 bp, Homo sapien
ttgcagaaggagatgcttcaggtac

SEQ ID NO: 1625784 - DNA, 25 bp, Homo sapien
gcagctctaacatccagatgcactc

SEQ ID NO: 1625785 - DNA, 25 bp, Homo sapien
tctaacatccagatgcactcggcaa

SEQ ID NO: 1625786 - DNA, 25 bp, Homo sapien
atccagatgcactcggcaaccaggc

SEQ ID NO: 1625787 - DNA, 25 bp, Homo sapien
taacatccagatgcactcggcaacc

SEQ ID NO: 1625788 - DNA, 25 bp, Homo sapien
cagggccacggtcctggagtcagca

SEQ ID NO: 1625789 - DNA, 25 bp, Homo sapien
agtcagcagccccatcactacccct

SEQ ID NO: 1625790 - DNA, 25 bp, Homo sapien
ctctcagggccacggtcctggagtc

SEQ ID NO: 1625791 - DNA, 25 bp, Homo sapien
agccccatcactacccctgcttccc

SEQ ID NO: 1625792 - DNA, 25 bp, Homo sapien
tccacctggctgtggttaagtagga

SEQ ID NO: 1625793 - DNA, 25 bp, Homo sapien
gagaggctgctccaatctgaacagg

SEQ ID NO: 1625794 - DNA, 25 bp, Homo sapien
ggccaacaagcagtgatctgacaaa

SEQ ID NO: 1625795 - DNA, 25 bp, Homo sapien
cacatgtggctttccaaggcaatcc

SEQ ID NO: 1625796 - DNA, 25 bp, Homo sapien
ccagaggtgtagcttgaagtctgag

SEQ ID NO: 1625797 - DNA, 25 bp, Homo sapien
gagaagtcctacaacaggccatatg

SEQ ID NO: 1625798 - DNA, 25 bp, Homo sapien
gaagatgggtgcctcggttctacgt

SEQ ID NO: 1625799 - DNA, 25 bp, Homo sapien
ctagagtacaaaggcctgagaatct

SEQ ID NO: 1625800 - DNA, 25 bp, Homo sapien
caacgcttgaaacgcatgtgccttt

SEQ ID NO: 1625801 - DNA, 25 bp, Homo sapien
cctttccagcgcagttggatctagc

SEQ ID NO: 1625802 - DNA, 25 bp, Homo sapien
gctaggtgtccgcttattcagaggg

SEQ ID NO: 1625803 - DNA, 25 bp, Homo sapien
ggcaggatagcccacccaacgcttg

SEQ ID NO: 1625804 - DNA, 25 bp, Homo sapien
cagcaggttccctgtctgcccgggt

SEQ ID NO: 1625805 - DNA, 25 bp, Homo sapien
ggcaggccagcaggttccctgtctg

SEQ ID NO: 1625806 - DNA, 25 bp, Homo sapien
caggttccctgtctgcccgggtcaa

SEQ ID NO: 1625807 - DNA, 25 bp, Homo sapien
gggcaggccagcaggttccctgtct

SEQ ID NO: 1625808 - DNA, 25 bp, Homo sapien
gagggtagagcctgctttgccacca

SEQ ID NO: 1625809 - DNA, 25 bp, Homo sapien
ttgccaccaaacacagtagaaggtt

SEQ ID NO: 1625810 - DNA, 25 bp, Homo sapien
tgagggtagagcctgctttgccacc

SEQ ID NO: 1625811 - DNA, 25 bp, Homo sapien
tgccaccaaacacagtagaaggttc

SEQ ID NO: 1625812 - DNA, 25 bp, Homo sapien
aagtagtgacagatgtttgcccaga

SEQ ID NO: 1625813 - DNA, 25 bp, Homo sapien
gagggcctcgggagtgactgtctgt

SEQ ID NO: 1625814 - DNA, 25 bp, Homo sapien
ccagagggcctcgggagtgactgtc

SEQ ID NO: 1625815 - DNA, 25 bp, Homo sapien
gggcctcgggagtgactgtctgtgc

SEQ ID NO: 1625816 - DNA, 25 bp, Homo sapien
tccccagggcatatgaggcagaggc

SEQ ID NO: 1625817 - DNA, 25 bp, Homo sapien
ggcatatgaggcagaggcgctctga

SEQ ID NO: 1625818 - DNA, 25 bp, Homo sapien
catatgaggcagaggcgctctgatg

SEQ ID NO: 1625819 - DNA, 25 bp, Homo sapien
gggtattccccagggcatatgaggc

SEQ ID NO: 1625820 - DNA, 25 bp, Homo sapien
ggacaggactggacacgctacaggt

SEQ ID NO: 1625821 - DNA, 25 bp, Homo sapien
gctacaggtgactgaaagcaaggcc

SEQ ID NO: 1625822 - DNA, 25 bp, Homo sapien
tggacacgctacaggtgactgaaag

SEQ ID NO: 1625823 - DNA, 25 bp, Homo sapien
caggtgactgaaagcaaggccgcca

SEQ ID NO: 1625824 - DNA, 25 bp, Homo sapien
tcgcaaatcctcagactgtccaggt

SEQ ID NO: 1625825 - DNA, 25 bp, Homo sapien
tagggtccagtcgaagcatgcgtct

SEQ ID NO: 1625826 - DNA, 25 bp, Homo sapien
acatggcctgaagctcgcaaatcct

SEQ ID NO: 1625827 - DNA, 25 bp, Homo sapien
gaaatggtcgttccctgctaggcac

SEQ ID NO: 1625828 - DNA, 25 bp, Homo sapien
tccctgggtatctgagctcactcaa

SEQ ID NO: 1625829 - DNA, 25 bp, Homo sapien
cctgggtatctgagctcactcaatt

SEQ ID NO: 1625830 - DNA, 25 bp, Homo sapien
tgggtatctgagctcactcaatttt

SEQ ID NO: 1625831 - DNA, 25 bp, Homo sapien
ggtatctgagctcactcaatttttg

SEQ ID NO: 1625832 - DNA, 25 bp, Homo sapien
gatagtgcgactactttcactctga

SEQ ID NO: 1625833 - DNA, 25 bp, Homo sapien
agtagcatactccaagtgttctcca

SEQ ID NO: 1625834 - DNA, 25 bp, Homo sapien
ttcactctgaccgttgccaaaatgt

SEQ ID NO: 1625835 - DNA, 25 bp, Homo sapien
gccaaaatgtagaaattcatcgttg

SEQ ID NO: 1625836 - DNA, 25 bp, Homo sapien
catatacgttacaagtggagctggg

SEQ ID NO: 1625837 - DNA, 25 bp, Homo sapien
gccacatatacgttacaagtggagc

SEQ ID NO: 1625838 - DNA, 25 bp, Homo sapien
tatacgttacaagtggagctgggac

SEQ ID NO: 1625839 - DNA, 25 bp, Homo sapien
ctgcagccacatatacgttacaagt

SEQ ID NO: 1625840 - DNA, 25 bp, Homo sapien
tagcagtggaaatctacctccgcgg

SEQ ID NO: 1625841 - DNA, 25 bp, Homo sapien
tatgcatagcagtggaaatctacct

SEQ ID NO: 1625842 - DNA, 25 bp, Homo sapien
aaaatatgcatagcagtggaaatct

SEQ ID NO: 1625843 - DNA, 25 bp, Homo sapien
ggaaatctacctccgcggtacagta

SEQ ID NO: 1625844 - DNA, 25 bp, Homo sapien
gcactatgctgagcttgttgagaat

SEQ ID NO: 1625845 - DNA, 25 bp, Homo sapien
cttctcctttgggatcattgccaag

SEQ ID NO: 1625846 - DNA, 25 bp, Homo sapien
tgccaagcactatgctgagcttgtt

SEQ ID NO: 1625847 - DNA, 25 bp, Homo sapien
tttgggatcattgccaagcactatg

SEQ ID NO: 1625848 - DNA, 25 bp, Homo sapien
gaccccagttcaacagacacagtct

SEQ ID NO: 1625849 - DNA, 25 bp, Homo sapien
agtctcttgtaccccaagctcagcg

SEQ ID NO: 1625850 - DNA, 25 bp, Homo sapien
ctgagaccccagttcaacagacaca

SEQ ID NO: 1625851 - DNA, 25 bp, Homo sapien
tgcctccccgggcaaatccatccat

SEQ ID NO: 1625852 - DNA, 25 bp, Homo sapien
tgaggctttcaggagccgggtcctt

SEQ ID NO: 1625853 - DNA, 25 bp, Homo sapien
cattagagcaatgacaagccctgat

SEQ ID NO: 1625854 - DNA, 25 bp, Homo sapien
tccaaactccaccaatatacaaagc

SEQ ID NO: 1625855 - DNA, 25 bp, Homo sapien
caaattaaatcgacatccaaactcc

SEQ ID NO: 1625856 - DNA, 25 bp, Homo sapien
tgacggtcataaatgtgtccctgga

SEQ ID NO: 1625857 - DNA, 25 bp, Homo sapien
ggtcataaatgtgtccctggattcc

SEQ ID NO: 1625858 - DNA, 25 bp, Homo sapien
attatgacggtcataaatgtgtccc

SEQ ID NO: 1625859 - DNA, 25 bp, Homo sapien
tatgacggtcataaatgtgtccctg

SEQ ID NO: 1625860 - DNA, 25 bp, Homo sapien
ccttcatggactgtcaggccgctaa

SEQ ID NO: 1625861 - DNA, 25 bp, Homo sapien
attagactgcctggtacggctccag

SEQ ID NO: 1625862 - DNA, 25 bp, Homo sapien
caagactgagtcatcattagactgc

SEQ ID NO: 1625863 - DNA, 25 bp, Homo sapien
tgtccacagcagtaccaagactgag

SEQ ID NO: 1625864 - DNA, 25 bp, Homo sapien
gttctgaatcatccagcgctttggg

SEQ ID NO: 1625865 - DNA, 25 bp, Homo sapien
ggctaatctattgtcttggcagggc

SEQ ID NO: 1625866 - DNA, 25 bp, Homo sapien
cagttccagggttcgctggccttta

SEQ ID NO: 1625867 - DNA, 25 bp, Homo sapien
gatgcaggcccttggaaccatgaaa

SEQ ID NO: 1625868 - DNA, 25 bp, Homo sapien
ttgtgaagtgagctgttcaagctcc

SEQ ID NO: 1625869 - DNA, 25 bp, Homo sapien
tttcttgttgtgaagtgagctgttc

SEQ ID NO: 1625870 - DNA, 25 bp, Homo sapien
tttttgctaaatgttgactgcagcg

SEQ ID NO: 1625871 - DNA, 25 bp, Homo sapien
gctaagatgtggcatattgatttct

SEQ ID NO: 1625872 - DNA, 25 bp, Homo sapien
ccccaaattggaaagcccagaagat

SEQ ID NO: 1625873 - DNA, 25 bp, Homo sapien
ttcgagctgcctctgagtaagtgct

SEQ ID NO: 1625874 - DNA, 25 bp, Homo sapien
tttacgcacagcttccgactgccag

SEQ ID NO: 1625875 - DNA, 25 bp, Homo sapien
tctccaaacgccaaagttcactaaa

SEQ ID NO: 1625876 - DNA, 25 bp, Homo sapien
tctcggtgcagatcctattcgagct

SEQ ID NO: 1625877 - DNA, 25 bp, Homo sapien
cagccgcagcaaccagctccgtcat

SEQ ID NO: 1625878 - DNA, 25 bp, Homo sapien
tggcagccgcagcaaccagctccgt

SEQ ID NO: 1625879 - DNA, 25 bp, Homo sapien
gcagccgcagcaaccagctccgtca

SEQ ID NO: 1625880 - DNA, 25 bp, Homo sapien
ctggcagccgcagcaaccagctccg

SEQ ID NO: 1625881 - DNA, 25 bp, Homo sapien
tagacttaaccctttgagcactgag

SEQ ID NO: 1625882 - DNA, 25 bp, Homo sapien
aaggcgtgttatacccctgcagacc

SEQ ID NO: 1625883 - DNA, 25 bp, Homo sapien
tatggaatagcaaccaagagggctt

SEQ ID NO: 1625884 - DNA, 25 bp, Homo sapien
gaaagaggttggatcacagaatgcc

SEQ ID NO: 1625885 - DNA, 25 bp, Homo sapien
taacaacagctgattatgcacctct

SEQ ID NO: 1625886 - DNA, 25 bp, Homo sapien
gagaaatgccagcacactcgagtct

SEQ ID NO: 1625887 - DNA, 25 bp, Homo sapien
tcgagtctcgtggaaaaggtgtgcc

SEQ ID NO: 1625888 - DNA, 25 bp, Homo sapien
tactcagagggctaaagatgaaagg

SEQ ID NO: 1625889 - DNA, 25 bp, Homo sapien
actgcttctctaactcagagacata

SEQ ID NO: 1625890 - DNA, 25 bp, Homo sapien
ctgcttctctaactcagagacatac

SEQ ID NO: 1625891 - DNA, 25 bp, Homo sapien
tactgcttctctaactcagagacat

SEQ ID NO: 1625892 - DNA, 25 bp, Homo sapien
ctactgcttctctaactcagagaca

SEQ ID NO: 1625893 - DNA, 25 bp, Homo sapien
tatcggtctcatggttgtcgtcgcg

SEQ ID NO: 1625894 - DNA, 25 bp, Homo sapien
gtttgcactgataggaagtccccag

SEQ ID NO: 1625895 - DNA, 25 bp, Homo sapien
tgacaaggcattctcgcgtagcggc

SEQ ID NO: 1625896 - DNA, 25 bp, Homo sapien
gataagtcccgtagccggaagccta

SEQ ID NO: 1625897 - DNA, 25 bp, Homo sapien
gcgtcttagccatggcgctctggtg

SEQ ID NO: 1625898 - DNA, 25 bp, Homo sapien
cagcgtcttagccatggcgctctgg

SEQ ID NO: 1625899 - DNA, 25 bp, Homo sapien
ttagccatggcgctctggtgccagt

SEQ ID NO: 1625900 - DNA, 25 bp, Homo sapien
catggcgctctggtgccagtcgaag

SEQ ID NO: 1625901 - DNA, 25 bp, Homo sapien
ctgctgccgttgttcttctccgagg

SEQ ID NO: 1625902 - DNA, 25 bp, Homo sapien
gctgccgttgttcttctccgaggag

SEQ ID NO: 1625903 - DNA, 25 bp, Homo sapien
tgccgttgttcttctccgaggaggg

SEQ ID NO: 1625904 - DNA, 25 bp, Homo sapien
ccgttgttcttctccgaggagggct

SEQ ID NO: 1625905 - DNA, 25 bp, Homo sapien
gacacagtcgtgtcttccagtggga

SEQ ID NO: 1625906 - DNA, 25 bp, Homo sapien
caaagtcagccattcggtcactggt

SEQ ID NO: 1625907 - DNA, 25 bp, Homo sapien
tgccgtatgctcctctgggtctaaa

SEQ ID NO: 1625908 - DNA, 25 bp, Homo sapien
gcacatgtacttggccgagggctct

SEQ ID NO: 1625909 - DNA, 25 bp, Homo sapien
actggctctcgatcctttttggaaa

SEQ ID NO: 1625910 - DNA, 25 bp, Homo sapien
caaaatagagacagctccggtgtca

SEQ ID NO: 1625911 - DNA, 25 bp, Homo sapien
cagcgtggaccaccactaagggctc

SEQ ID NO: 1625912 - DNA, 25 bp, Homo sapien
tcccaggtgttttaggctccacagg

SEQ ID NO: 1625913 - DNA, 25 bp, Homo sapien
tgagagtcccctgaacaacgaaatg

SEQ ID NO: 1625914 - DNA, 25 bp, Homo sapien
catgtggtatgcagaaacgtcaaac

SEQ ID NO: 1625915 - DNA, 25 bp, Homo sapien
tagcatttccacacccgagatttgg

SEQ ID NO: 1625916 - DNA, 25 bp, Homo sapien
caacgaaatgcatggccgtagccat

SEQ ID NO: 1625917 - DNA, 25 bp, Homo sapien
tagacaaccagaaaggatgcctcct

SEQ ID NO: 1625918 - DNA, 25 bp, Homo sapien
catctcgggtaatgacggtgagcct

SEQ ID NO: 1625919 - DNA, 25 bp, Homo sapien
tattatcgagaagggtatggcactg

SEQ ID NO: 1625920 - DNA, 25 bp, Homo sapien
tgggctcaccggatgcaattggaag

SEQ ID NO: 1625921 - DNA, 25 bp, Homo sapien
tcggccatcactgcaatcctgagaa

SEQ ID NO: 1625922 - DNA, 25 bp, Homo sapien
aattgttccgagtgccagattcgta

SEQ ID NO: 1625923 - DNA, 25 bp, Homo sapien
tttgccaagcactgctacatgcagg

SEQ ID NO: 1625924 - DNA, 25 bp, Homo sapien
tctcagggccgggtttctgatgcat

SEQ ID NO: 1625925 - DNA, 25 bp, Homo sapien
tgacctcttatagaggagattcccc

SEQ ID NO: 1625926 - DNA, 25 bp, Homo sapien
acacatcatatcagagccaggccag

SEQ ID NO: 1625927 - DNA, 25 bp, Homo sapien
ttcatcacttgggactgataagtcc

SEQ ID NO: 1625928 - DNA, 25 bp, Homo sapien
ctggatactgccaggtggcaggaca

SEQ ID NO: 1625929 - DNA, 25 bp, Homo sapien
gatccggtcaccaatactgtggcaa

SEQ ID NO: 1625930 - DNA, 25 bp, Homo sapien
gatcaaggatcctctgagccggaga

SEQ ID NO: 1625931 - DNA, 25 bp, Homo sapien
ggcaaacacctagtcccaagagcag

SEQ ID NO: 1625932 - DNA, 25 bp, Homo sapien
taacccctgtggctctattaggaac

SEQ ID NO: 1625933 - DNA, 25 bp, Homo sapien
agtacttactttttgaatggatgaa

SEQ ID NO: 1625934 - DNA, 25 bp, Homo sapien
aagctctctgatacaagataacatc

SEQ ID NO: 1625935 - DNA, 25 bp, Homo sapien
tagtgatggacataataaaggaatg

SEQ ID NO: 1625936 - DNA, 25 bp, Homo sapien
cccgtgcctagccttatgtatgtat

SEQ ID NO: 1625937 - DNA, 25 bp, Homo sapien
aaagaattttgcctgtacacccatc

SEQ ID NO: 1625938 - DNA, 25 bp, Homo sapien
caaaaacaggtacaacatggagtgt

SEQ ID NO: 1625939 - DNA, 25 bp, Homo sapien
ttggatgcatgtcaaagtaaactgc

SEQ ID NO: 1625940 - DNA, 25 bp, Homo sapien
gtacaatgtaatatacacagcaaag

SEQ ID NO: 1625941 - DNA, 25 bp, Homo sapien
gacaacatcattctagagcctttag

SEQ ID NO: 1625942 - DNA, 25 bp, Homo sapien
aaaacgttgctacaaactctgtcag

SEQ ID NO: 1625943 - DNA, 25 bp, Homo sapien
ggctgtcagatcactaaggcatttg

SEQ ID NO: 1625944 - DNA, 25 bp, Homo sapien
tgttcttgcagataccagctattta

SEQ ID NO: 1625945 - DNA, 25 bp, Homo sapien
gagcacgctgcaccttcgtaaggag

SEQ ID NO: 1625946 - DNA, 25 bp, Homo sapien
tcaatgaggtggtgtgttcccggcc

SEQ ID NO: 1625947 - DNA, 25 bp, Homo sapien
tgtcataacgaagggaagtcaactc

SEQ ID NO: 1625948 - DNA, 25 bp, Homo sapien
tcactgtgtcactgcggccaaggtt

SEQ ID NO: 1625949 - DNA, 25 bp, Homo sapien
aaaaaatccccggtgctgtgacagg

SEQ ID NO: 1625950 - DNA, 25 bp, Homo sapien
gacggagtccctagtgcactgatct

SEQ ID NO: 1625951 - DNA, 25 bp, Homo sapien
ttcattacagaaggtggacgtcaca

SEQ ID NO: 1625952 - DNA, 25 bp, Homo sapien
cactgatctggcgttccctgaaaac

SEQ ID NO: 1625953 - DNA, 25 bp, Homo sapien
cagaactgtagaagggcatcggatc

SEQ ID NO: 1625954 - DNA, 25 bp, Homo sapien
ggaacgaagtttcagacccaccaga

SEQ ID NO: 1625955 - DNA, 25 bp, Homo sapien
catcttgacggtggacctcatggaa

SEQ ID NO: 1625956 - DNA, 25 bp, Homo sapien
ggccagaggagatgcatagcttact

SEQ ID NO: 1625957 - DNA, 25 bp, Homo sapien
agtggatacctgaagaccccagcct

SEQ ID NO: 1625958 - DNA, 25 bp, Homo sapien
taattaaaaactatgcactgcagag

SEQ ID NO: 1625959 - DNA, 25 bp, Homo sapien
tgcagagtgcatattttatcagccc

SEQ ID NO: 1625960 - DNA, 25 bp, Homo sapien
aactttgtgtcaagcccttcaagca

SEQ ID NO: 1625961 - DNA, 25 bp, Homo sapien
cccagtagtgtagatccagcaggaa

SEQ ID NO: 1625962 - DNA, 25 bp, Homo sapien
tgtgtcagtgaaccaggctgcgtcc

SEQ ID NO: 1625963 - DNA, 25 bp, Homo sapien
ggcagggagccgcaaaagattattt

SEQ ID NO: 1625964 - DNA, 25 bp, Homo sapien
caacccgggtgtgatggatgagccc

SEQ ID NO: 1625965 - DNA, 25 bp, Homo sapien
tacgtaagttagcatctgccagtgc

SEQ ID NO: 1625966 - DNA, 25 bp, Homo sapien
tattctcttagcgaggtgaccagga

SEQ ID NO: 1625967 - DNA, 25 bp, Homo sapien
gaccaggaatgcgatgacaaggagt

SEQ ID NO: 1625968 - DNA, 25 bp, Homo sapien
ggtttgccttcggatctcacctgga

SEQ ID NO: 1625969 - DNA, 25 bp, Homo sapien
ctaccaagtctatgtctccagtcct

SEQ ID NO: 1625970 - DNA, 25 bp, Homo sapien
atgtctccagtccttacaattcagg

SEQ ID NO: 1625971 - DNA, 25 bp, Homo sapien
aaagctaccaagtctatgtctccag

SEQ ID NO: 1625972 - DNA, 25 bp, Homo sapien
aagctaccaagtctatgtctccagt

SEQ ID NO: 1625973 - DNA, 25 bp, Homo sapien
caagggtttgggatactggatacca

SEQ ID NO: 1625974 - DNA, 25 bp, Homo sapien
catttaaatgcatgtatcgggacac

SEQ ID NO: 1625975 - DNA, 25 bp, Homo sapien
tactggaaactggaattaatctgtc

SEQ ID NO: 1625976 - DNA, 25 bp, Homo sapien
cacagagtgaacacctgcaagggtt

SEQ ID NO: 1625977 - DNA, 25 bp, Homo sapien
tttgagaaaagaccctaagccatac

SEQ ID NO: 1625978 - DNA, 25 bp, Homo sapien
gataatggtcattttgcctgaagga

SEQ ID NO: 1625979 - DNA, 25 bp, Homo sapien
tacaggtctcaaggaagcaaactcc

SEQ ID NO: 1625980 - DNA, 25 bp, Homo sapien
tatctgctattaagtattacactaa

SEQ ID NO: 1625981 - DNA, 25 bp, Homo sapien
taaataagtagctcttcagtccgcc

SEQ ID NO: 1625982 - DNA, 25 bp, Homo sapien
tcaccagcctaaatgtggagttttt

SEQ ID NO: 1625983 - DNA, 25 bp, Homo sapien
tgaaccttataacttgcagctggga

SEQ ID NO: 1625984 - DNA, 25 bp, Homo sapien
aaacctctgtgcatacttatcacca

SEQ ID NO: 1625985 - DNA, 25 bp, Homo sapien
tgaccattaagctattgatgaatgt

SEQ ID NO: 1625986 - DNA, 25 bp, Homo sapien
gaccattaagctattgatgaatgtg

SEQ ID NO: 1625987 - DNA, 25 bp, Homo sapien
accattaagctattgatgaatgtgc

SEQ ID NO: 1625988 - DNA, 25 bp, Homo sapien
cattttgatagagcaaaaccattct

SEQ ID NO: 1625989 - DNA, 25 bp, Homo sapien
tcaggagagagacaattaaatcaaa

SEQ ID NO: 1625990 - DNA, 25 bp, Homo sapien
tctcctattagtcctgcagtcaagt

SEQ ID NO: 1625991 - DNA, 25 bp, Homo sapien
taactgacctgagatttcctggctg

SEQ ID NO: 1625992 - DNA, 25 bp, Homo sapien
tgatgtttattgggaatgaatagat

SEQ ID NO: 1625993 - DNA, 25 bp, Homo sapien
tttattgatgtttattgggaatgaa

SEQ ID NO: 1625994 - DNA, 25 bp, Homo sapien
ttgatgtttattgggaatgaataga

SEQ ID NO: 1625995 - DNA, 25 bp, Homo sapien
tattgatgtttattgggaatgaata

SEQ ID NO: 1625996 - DNA, 25 bp, Homo sapien
tgctgcgcgccggggcgcctgctgc

SEQ ID NO: 1625997 - DNA, 25 bp, Homo sapien
ctgctgcgcgccggggcgcctgctg

SEQ ID NO: 1625998 - DNA, 25 bp, Homo sapien
ctgcgcgccggggcgcctgctgctt

SEQ ID NO: 1625999 - DNA, 25 bp, Homo sapien
cgcgccggggcgcctgctgcttcct

SEQ ID NO: 1626000 - DNA, 25 bp, Homo sapien
ggggcgaggcgggcctgctctcagc

SEQ ID NO: 1626001 - DNA, 25 bp, Homo sapien
gcgaggcgggcctgctctcagcctc

SEQ ID NO: 1626002 - DNA, 25 bp, Homo sapien
ccgctgccgggctgaggacagggag

SEQ ID NO: 1626003 - DNA, 25 bp, Homo sapien
gatgcttctccggcgactgccactg

SEQ ID NO: 1626004 - DNA, 25 bp, Homo sapien
tgcgctgcgggctcgattgcgtctc

SEQ ID NO: 1626005 - DNA, 25 bp, Homo sapien
tgcgggctcgattgcgtctccctgg

SEQ ID NO: 1626006 - DNA, 25 bp, Homo sapien
gcggcggcgcatcgatgcgctgcgg

SEQ ID NO: 1626007 - DNA, 25 bp, Homo sapien
tcgattgcgtctccctgggccagct

SEQ ID NO: 1626008 - DNA, 25 bp, Homo sapien
caccattctggtggccgcgctgagc

SEQ ID NO: 1626009 - DNA, 25 bp, Homo sapien
gaaacgcttcttgcaagcgaggaaa

SEQ ID NO: 1626010 - DNA, 25 bp, Homo sapien
gtctcccaggatgcagatgcgccgc

SEQ ID NO: 1626011 - DNA, 25 bp, Homo sapien
gaaacggtgagttggccgacaccgc

SEQ ID NO: 1626012 - DNA, 25 bp, Homo sapien
taacatctgtccgtccaaccattgg

SEQ ID NO: 1626013 - DNA, 25 bp, Homo sapien
caaccattggcgcatccatcagtgt

SEQ ID NO: 1626014 - DNA, 25 bp, Homo sapien
tcttgcaaacctctgttccttcggc

SEQ ID NO: 1626015 - DNA, 25 bp, Homo sapien
cacggaagcgtgtagttctccctgg

SEQ ID NO: 1626016 - DNA, 25 bp, Homo sapien
gaactgttttcacgctagactagag

SEQ ID NO: 1626017 - DNA, 25 bp, Homo sapien
tcactctgaaaagtaagcccctagg

SEQ ID NO: 1626018 - DNA, 25 bp, Homo sapien
tgcgcccgcggagaaactagaattc

SEQ ID NO: 1626019 - DNA, 25 bp, Homo sapien
tgagatgtccccacctttgggaggt

SEQ ID NO: 1626020 - DNA, 25 bp, Homo sapien
aacaccgaggtgcaaatgtccattg

SEQ ID NO: 1626021 - DNA, 25 bp, Homo sapien
acgattgcacctcaggcccggtgga

SEQ ID NO: 1626022 - DNA, 25 bp, Homo sapien
ggctcacccaatagctgggtggtaa

SEQ ID NO: 1626023 - DNA, 25 bp, Homo sapien
gtggtaaccttgtgatccccaaaca

SEQ ID NO: 1626024 - DNA, 25 bp, Homo sapien
gctaggcagtgtcgaggaggtgcct

SEQ ID NO: 1626025 - DNA, 25 bp, Homo sapien
ttgggttcagggaagcttgccacct

SEQ ID NO: 1626026 - DNA, 25 bp, Homo sapien
cacctgaaccaggaattgggccccg

SEQ ID NO: 1626027 - DNA, 25 bp, Homo sapien
aatgctggcatatgggtttttcgcc

SEQ ID NO: 1626028 - DNA, 25 bp, Homo sapien
aaaagtgcatttacacggcggcgaa

SEQ ID NO: 1626029 - DNA, 25 bp, Homo sapien
gaaggatagggaccctggccctcgc

SEQ ID NO: 1626030 - DNA, 25 bp, Homo sapien
tagctttgttttaacgaaccagatg

SEQ ID NO: 1626031 - DNA, 25 bp, Homo sapien
ccctcgccaggtggtaaattgtttg

SEQ ID NO: 1626032 - DNA, 25 bp, Homo sapien
gggcacagagatgtagctcaacttt

SEQ ID NO: 1626033 - DNA, 25 bp, Homo sapien
cgaggaccgcctgactgaaaggcaa

SEQ ID NO: 1626034 - DNA, 25 bp, Homo sapien
tccaaccaggcatagcttgctactt

SEQ ID NO: 1626035 - DNA, 25 bp, Homo sapien
tgccgctgccgttttccacgaggac

SEQ ID NO: 1626036 - DNA, 25 bp, Homo sapien
aatcgggcgccgctttcctgcgcgg

SEQ ID NO: 1626037 - DNA, 25 bp, Homo sapien
taagtggcttgtgattcagtgcctg

SEQ ID NO: 1626038 - DNA, 25 bp, Homo sapien
taaattgaccagactggcggcagcc

SEQ ID NO: 1626039 - DNA, 25 bp, Homo sapien
ctgcgcgggcgatggctcctctctg

SEQ ID NO: 1626040 - DNA, 25 bp, Homo sapien
ctaatagaactccttatctggttcc

SEQ ID NO: 1626041 - DNA, 25 bp, Homo sapien
gacatcgtccgtagtggctgatgct

SEQ ID NO: 1626042 - DNA, 25 bp, Homo sapien
aaaaatgacatcgtccgtagtggct

SEQ ID NO: 1626043 - DNA, 25 bp, Homo sapien
aaatgacatcgtccgtagtggctga

SEQ ID NO: 1626044 - DNA, 25 bp, Homo sapien
cccttgggtattagactctcctatt

SEQ ID NO: 1626045 - DNA, 25 bp, Homo sapien
aatggtagtacgtggcttcgaagaa

SEQ ID NO: 1626046 - DNA, 25 bp, Homo sapien
tagactctcctattgaaggcctttt

SEQ ID NO: 1626047 - DNA, 25 bp, Homo sapien
tctgaagtcacaagctataggccct

SEQ ID NO: 1626048 - DNA, 25 bp, Homo sapien
agcaagcatagatgagatcaacaat

SEQ ID NO: 1626049 - DNA, 25 bp, Homo sapien
gaagcaagcatagatgagatcaaca

SEQ ID NO: 1626050 - DNA, 25 bp, Homo sapien
cttgaagcaagcatagatgagatca

SEQ ID NO: 1626051 - DNA, 25 bp, Homo sapien
tgaagcaagcatagatgagatcaac

SEQ ID NO: 1626052 - DNA, 25 bp, Homo sapien
ccacgagcagttccaatggggtgtc

SEQ ID NO: 1626053 - DNA, 25 bp, Homo sapien
gttccaatggggtgtctctctgctt

SEQ ID NO: 1626054 - DNA, 25 bp, Homo sapien
ccaatggggtgtctctctgcttggg

SEQ ID NO: 1626055 - DNA, 25 bp, Homo sapien
gagcagttccaatggggtgtctctc

SEQ ID NO: 1626056 - DNA, 25 bp, Homo sapien
gtccagctcggtcagccagcatcct

SEQ ID NO: 1626057 - DNA, 25 bp, Homo sapien
tcatctccagcgatgcaaagcagct

SEQ ID NO: 1626058 - DNA, 25 bp, Homo sapien
cgatgcaaagcagctttctcccgtg

SEQ ID NO: 1626059 - DNA, 25 bp, Homo sapien
aggacttgggcctcatctccagcga

SEQ ID NO: 1626060 - DNA, 25 bp, Homo sapien
cagccaagtggccagtggatctttg

SEQ ID NO: 1626061 - DNA, 25 bp, Homo sapien
atgtcaatttcccaactgggcatcc

SEQ ID NO: 1626062 - DNA, 25 bp, Homo sapien
cagttcctgtttgccgagccttgtg

SEQ ID NO: 1626063 - DNA, 25 bp, Homo sapien
tgtgcacttgaggcccatgggtgga

SEQ ID NO: 1626064 - DNA, 25 bp, Homo sapien
gatttcctggctcgatgtccatttg

SEQ ID NO: 1626065 - DNA, 25 bp, Homo sapien
ttcctggctcgatgtccatttgctg

SEQ ID NO: 1626066 - DNA, 25 bp, Homo sapien
ctgctgatttcctggctcgatgtcc

SEQ ID NO: 1626067 - DNA, 25 bp, Homo sapien
ccatccacgtaccagaacctgctct

SEQ ID NO: 1626068 - DNA, 25 bp, Homo sapien
acagcttctgcatggagggcgaggg

SEQ ID NO: 1626069 - DNA, 25 bp, Homo sapien
cctccagctccctgaggcccagcag

SEQ ID NO: 1626070 - DNA, 25 bp, Homo sapien
tcacacagcttctgcatggagggcg

SEQ ID NO: 1626071 - DNA, 25 bp, Homo sapien
acacagcttctgcatggagggcgag

SEQ ID NO: 1626072 - DNA, 25 bp, Homo sapien
tcacatgtccacatctccagagttc

SEQ ID NO: 1626073 - DNA, 25 bp, Homo sapien
gggtgcattgctagcaacatccaca

SEQ ID NO: 1626074 - DNA, 25 bp, Homo sapien
caggcaccgggatcttgagcactgg

SEQ ID NO: 1626075 - DNA, 25 bp, Homo sapien
caccgggatcttgagcactggagcg

SEQ ID NO: 1626076 - DNA, 25 bp, Homo sapien
gggatcttgagcactggagcggccc

SEQ ID NO: 1626077 - DNA, 25 bp, Homo sapien
gcgcagacccgctccgtgcggcgct

SEQ ID NO: 1626078 - DNA, 25 bp, Homo sapien
tgcggcgctcagcttgaagtagcct

SEQ ID NO: 1626079 - DNA, 25 bp, Homo sapien
ctccgtgcggcgctcagcttgaagt

SEQ ID NO: 1626080 - DNA, 25 bp, Homo sapien
ctcagcttgaagtagcctcagatcc

SEQ ID NO: 1626081 - DNA, 25 bp, Homo sapien
ccaactccggtatgcacatctttac

SEQ ID NO: 1626082 - DNA, 25 bp, Homo sapien
atcaagaccaactccggtatgcaca

SEQ ID NO: 1626083 - DNA, 25 bp, Homo sapien
cctgggatagaggaggatcaagacc

SEQ ID NO: 1626084 - DNA, 25 bp, Homo sapien
ccggtatgcacatctttacctgctg

SEQ ID NO: 1626085 - DNA, 25 bp, Homo sapien
cacattgaacaggaccactggtgga

SEQ ID NO: 1626086 - DNA, 25 bp, Homo sapien
cttccacattgaacaggaccactgg

SEQ ID NO: 1626087 - DNA, 25 bp, Homo sapien
gggacttccacattgaacaggacca

SEQ ID NO: 1626088 - DNA, 25 bp, Homo sapien
acctgggacttccacattgaacagg

SEQ ID NO: 1626089 - DNA, 25 bp, Homo sapien
caaatccacattggtccatgccagg

SEQ ID NO: 1626090 - DNA, 25 bp, Homo sapien
gcgttacgggccttctcaaatccac

SEQ ID NO: 1626091 - DNA, 25 bp, Homo sapien
tcagatcctgcaggcgttacgggcc

SEQ ID NO: 1626092 - DNA, 25 bp, Homo sapien
catgccaggatgctggaatgccaag

SEQ ID NO: 1626093 - DNA, 25 bp, Homo sapien
gagtcatcgtcacgtttcaggagca

SEQ ID NO: 1626094 - DNA, 25 bp, Homo sapien
tcgtcacgtttcaggagcaaccacc

SEQ ID NO: 1626095 - DNA, 25 bp, Homo sapien
ctgaacaggtgagtcatcgtcacgt

SEQ ID NO: 1626096 - DNA, 25 bp, Homo sapien
caggtgagtcatcgtcacgtttcag

SEQ ID NO: 1626097 - DNA, 25 bp, Homo sapien
gagtgggtggaattccatccacagg

SEQ ID NO: 1626098 - DNA, 25 bp, Homo sapien
actctagacttgagaagctcttggc

SEQ ID NO: 1626099 - DNA, 25 bp, Homo sapien
ttctctggggaagtaggaaactgat

SEQ ID NO: 1626100 - DNA, 25 bp, Homo sapien
gccaagagtgggtggaattccatcc

SEQ ID NO: 1626101 - DNA, 25 bp, Homo sapien
cctcttggctttcatcatcatgttt

SEQ ID NO: 1626102 - DNA, 25 bp, Homo sapien
ttcccttgaaggcaacctcttggct

SEQ ID NO: 1626103 - DNA, 25 bp, Homo sapien
ccttcccttgaaggcaacctcttgg

SEQ ID NO: 1626104 - DNA, 25 bp, Homo sapien
ggctttcatcatcatgtttggccac

SEQ ID NO: 1626105 - DNA, 25 bp, Homo sapien
cactttcctcggatggatctttctg

SEQ ID NO: 1626106 - DNA, 25 bp, Homo sapien
tctttctgatggacagcctgctggc

SEQ ID NO: 1626107 - DNA, 25 bp, Homo sapien
taattatagatgagcggcaagccac

SEQ ID NO: 1626108 - DNA, 25 bp, Homo sapien
tatggtgctgatcagcacactccca

SEQ ID NO: 1626109 - DNA, 25 bp, Homo sapien
caccgggaacgtcctagcatctccc

SEQ ID NO: 1626110 - DNA, 25 bp, Homo sapien
accgggaacgtcctagcatctccca

SEQ ID NO: 1626111 - DNA, 25 bp, Homo sapien
cccaccgggaacgtcctagcatctc

SEQ ID NO: 1626112 - DNA, 25 bp, Homo sapien
ccgggaacgtcctagcatctcccat

SEQ ID NO: 1626113 - DNA, 25 bp, Homo sapien
gtgccaggcatcattgtggtggcca

SEQ ID NO: 1626114 - DNA, 25 bp, Homo sapien
ggtgccaggcatcattgtggtggcc

SEQ ID NO: 1626115 - DNA, 25 bp, Homo sapien
tgccaggcatcattgtggtggccat

SEQ ID NO: 1626116 - DNA, 25 bp, Homo sapien
ctggaacatcaaaccgatggccaca

SEQ ID NO: 1626117 - DNA, 25 bp, Homo sapien
tggaggtgaaagctaaaccctggaa

SEQ ID NO: 1626118 - DNA, 25 bp, Homo sapien
gggacgcctcatgtccatgatctga

SEQ ID NO: 1626119 - DNA, 25 bp, Homo sapien
cgaatgaacaagtggagaggaaaga

SEQ ID NO: 1626120 - DNA, 25 bp, Homo sapien
gaataccaggtgagccacttcatct

SEQ ID NO: 1626121 - DNA, 25 bp, Homo sapien
taccaggtgagccacttcatctgct

SEQ ID NO: 1626122 - DNA, 25 bp, Homo sapien
taaaatgaaaagaataccaggtgag

SEQ ID NO: 1626123 - DNA, 25 bp, Homo sapien
tgaaaagaataccaggtgagccact

SEQ ID NO: 1626124 - DNA, 25 bp, Homo sapien
gtctctgctgctcggctcacggtgt

SEQ ID NO: 1626125 - DNA, 25 bp, Homo sapien
ctctgctgctcggctcacggtgttg

SEQ ID NO: 1626126 - DNA, 25 bp, Homo sapien
gggtctctgctgctcggctcacggt

SEQ ID NO: 1626127 - DNA, 25 bp, Homo sapien
tctgctgctcggctcacggtgttgg

SEQ ID NO: 1626128 - DNA, 25 bp, Homo sapien
gacagagctggatgaacagaagcag

SEQ ID NO: 1626129 - DNA, 25 bp, Homo sapien
gccaccaaggagaaggtgtccacac

SEQ ID NO: 1626130 - DNA, 25 bp, Homo sapien
ggtgtccacacctcgggctgacagt

SEQ ID NO: 1626131 - DNA, 25 bp, Homo sapien
aaaacgcattgtcaaacctaatgaa

SEQ ID NO: 1626132 - DNA, 25 bp, Homo sapien
tgtggatggttgaatcctcatgatt

SEQ ID NO: 1626133 - DNA, 25 bp, Homo sapien
ctttcatgtgagttatgtggatggt

SEQ ID NO: 1626134 - DNA, 25 bp, Homo sapien
caggatatagcatccccgatttcac

SEQ ID NO: 1626135 - DNA, 25 bp, Homo sapien
tcttcttgcacaggatatagcatcc

SEQ ID NO: 1626136 - DNA, 25 bp, Homo sapien
atcatgtaaagtgtgcttgggaagg

SEQ ID NO: 1626137 - DNA, 25 bp, Homo sapien
tgtaatgtagaattgatttgcattt

SEQ ID NO: 1626138 - DNA, 25 bp, Homo sapien
ctgagttttatcatgtaaagtgtgc

SEQ ID NO: 1626139 - DNA, 25 bp, Homo sapien
ttttatcatgtaaagtgtgcttggg

SEQ ID NO: 1626140 - DNA, 25 bp, Homo sapien
ctgttggagagacgcccctcgtctc

SEQ ID NO: 1626141 - DNA, 25 bp, Homo sapien
ctcgtctccatgcttaacagactct

SEQ ID NO: 1626142 - DNA, 25 bp, Homo sapien
gcccctcgtctccatgcttaacaga

SEQ ID NO: 1626143 - DNA, 25 bp, Homo sapien
tccatgcttaacagactctcctgct

SEQ ID NO: 1626144 - DNA, 25 bp, Homo sapien
cagagggtggcctacgggtccatca

SEQ ID NO: 1626145 - DNA, 25 bp, Homo sapien
caacagcttgttcagggtcgctcat

SEQ ID NO: 1626146 - DNA, 25 bp, Homo sapien
catgtgcagagggtggcctacgggt

SEQ ID NO: 1626147 - DNA, 25 bp, Homo sapien
tgttcagggtcgctcatgtgcagag

SEQ ID NO: 1626148 - DNA, 25 bp, Homo sapien
gtattttggtccatctcagcagaaa

SEQ ID NO: 1626149 - DNA, 25 bp, Homo sapien
ccagtattttggtccatctcagcag

SEQ ID NO: 1626150 - DNA, 25 bp, Homo sapien
agtattttggtccatctcagcagaa

SEQ ID NO: 1626151 - DNA, 25 bp, Homo sapien
cagtattttggtccatctcagcaga

SEQ ID NO: 1626152 - DNA, 25 bp, Homo sapien
gagagacgccctaaaggtactctgt

SEQ ID NO: 1626153 - DNA, 25 bp, Homo sapien
caatcgtgccggaatagttggcgga

SEQ ID NO: 1626154 - DNA, 25 bp, Homo sapien
ctgatgacagtgtggacaatcgtgc

SEQ ID NO: 1626155 - DNA, 25 bp, Homo sapien
gaatagttggcggagagacgcccta

SEQ ID NO: 1626156 - DNA, 25 bp, Homo sapien
cagttatccttcttggaatcccggt

SEQ ID NO: 1626157 - DNA, 25 bp, Homo sapien
agcagttatccttcttggaatcccg

SEQ ID NO: 1626158 - DNA, 25 bp, Homo sapien
gcagttatccttcttggaatcccgg

SEQ ID NO: 1626159 - DNA, 25 bp, Homo sapien
tcagcagttatccttcttggaatcc

SEQ ID NO: 1626160 - DNA, 25 bp, Homo sapien
cagatgccataacagatgtgagagc

SEQ ID NO: 1626161 - DNA, 25 bp, Homo sapien
ccgtcattaatacaagcagtgcttg

SEQ ID NO: 1626162 - DNA, 25 bp, Homo sapien
caagaaacttccatcagacatgaca

SEQ ID NO: 1626163 - DNA, 25 bp, Homo sapien
agcatttggcaaacaagaaacttcc

SEQ ID NO: 1626164 - DNA, 25 bp, Homo sapien
ggatgttagagtggccccttctggg

SEQ ID NO: 1626165 - DNA, 25 bp, Homo sapien
tgtctgtctggccactccggaaacc

SEQ ID NO: 1626166 - DNA, 25 bp, Homo sapien
ctggcgtttgttgtggtgctggccc

SEQ ID NO: 1626167 - DNA, 25 bp, Homo sapien
gggaggtctctatgtagctgtcctc

SEQ ID NO: 1626168 - DNA, 25 bp, Homo sapien
ctcactgctccagtcaggggtgaag

SEQ ID NO: 1626169 - DNA, 25 bp, Homo sapien
agtgaacccccgctggacatctgga

SEQ ID NO: 1626170 - DNA, 25 bp, Homo sapien
atcactttggtcagaactgcgctgg

SEQ ID NO: 1626171 - DNA, 25 bp, Homo sapien
tcagaactgcgctggcctcactttc

SEQ ID NO: 1626172 - DNA, 25 bp, Homo sapien
agcactgaaaaatatctacaggtac

SEQ ID NO: 1626173 - DNA, 25 bp, Homo sapien
ttattctggaggtaaatcacagcac

SEQ ID NO: 1626174 - DNA, 25 bp, Homo sapien
cacagcactgaaaaatatctacagg

SEQ ID NO: 1626175 - DNA, 25 bp, Homo sapien
tattctggaggtaaatcacagcact

SEQ ID NO: 1626176 - DNA, 25 bp, Homo sapien
agttcagcagttcctgaaaccctag

SEQ ID NO: 1626177 - DNA, 25 bp, Homo sapien
tcagcagttcctgaaaccctagagc

SEQ ID NO: 1626178 - DNA, 25 bp, Homo sapien
tcagttcagcagttcctgaaaccct

SEQ ID NO: 1626179 - DNA, 25 bp, Homo sapien
ttcagcagttcctgaaaccctagag

SEQ ID NO: 1626180 - DNA, 25 bp, Homo sapien
agagatctttcctcatgaatacgcc

SEQ ID NO: 1626181 - DNA, 25 bp, Homo sapien
gccgccacagatccattctcctctc

SEQ ID NO: 1626182 - DNA, 25 bp, Homo sapien
tctttcctcatgaatacgccgggcc

SEQ ID NO: 1626183 - DNA, 25 bp, Homo sapien
tcctcatgaatacgccgggcccttg

SEQ ID NO: 1626184 - DNA, 25 bp, Homo sapien
agaacagcaatccttgatgctctgg

SEQ ID NO: 1626185 - DNA, 25 bp, Homo sapien
cagcaatccttgatgctctggtggc

SEQ ID NO: 1626186 - DNA, 25 bp, Homo sapien
cacactggagaacagcaatccttga

SEQ ID NO: 1626187 - DNA, 25 bp, Homo sapien
actggagaacagcaatccttgatgc

SEQ ID NO: 1626188 - DNA, 25 bp, Homo sapien
taaggaggccactcgctgcaggcag

SEQ ID NO: 1626189 - DNA, 25 bp, Homo sapien
ggttgtgattcataaggaggccact

SEQ ID NO: 1626190 - DNA, 25 bp, Homo sapien
ataaggaggccactcgctgcaggca

SEQ ID NO: 1626191 - DNA, 25 bp, Homo sapien
ggtcgggggttgtgattcataagga

SEQ ID NO: 1626192 - DNA, 25 bp, Homo sapien
ggaatttcggatgtgtgcttttatg

SEQ ID NO: 1626193 - DNA, 25 bp, Homo sapien
cctggaatttcggatgtgtgctttt

SEQ ID NO: 1626194 - DNA, 25 bp, Homo sapien
ttttatgctcagtagggatgcggga

SEQ ID NO: 1626195 - DNA, 25 bp, Homo sapien
tgtgtgcttttatgctcagtaggga

SEQ ID NO: 1626196 - DNA, 25 bp, Homo sapien
ttgaatcaagttggaagtccgagat

SEQ ID NO: 1626197 - DNA, 25 bp, Homo sapien
tgattttgaatcaagttggaagtcc

SEQ ID NO: 1626198 - DNA, 25 bp, Homo sapien
ttttgaatcaagttggaagtccgag

SEQ ID NO: 1626199 - DNA, 25 bp, Homo sapien
cagtgattttgaatcaagttggaag

SEQ ID NO: 1626200 - DNA, 25 bp, Homo sapien
tggtatcccgaagcctgagcacatc

SEQ ID NO: 1626201 - DNA, 25 bp, Homo sapien
ctggtatcccgaagcctgagcacat

SEQ ID NO: 1626202 - DNA, 25 bp, Homo sapien
cattgtagatcaccgggacctgcta

SEQ ID NO: 1626203 - DNA, 25 bp, Homo sapien
tagaatcctactacagcctgttggc

SEQ ID NO: 1626204 - DNA, 25 bp, Homo sapien
tctgtcaaggtaggtccatcagcct

SEQ ID NO: 1626205 - DNA, 25 bp, Homo sapien
gagagatcctcctagttggccaaag

SEQ ID NO: 1626206 - DNA, 25 bp, Homo sapien
tttgttgattaaaaggctcttcaga

SEQ ID NO: 1626207 - DNA, 25 bp, Homo sapien
gggttttaaattgtctaatgctgat

SEQ ID NO: 1626208 - DNA, 25 bp, Homo sapien
taaaaggctcttcagaacttccggc

SEQ ID NO: 1626209 - DNA, 25 bp, Homo sapien
cagaacttccggctggtgaaagggt

SEQ ID NO: 1626210 - DNA, 25 bp, Homo sapien
gctgtgcgaggcatagcattcccca

SEQ ID NO: 1626211 - DNA, 25 bp, Homo sapien
agttttgcctacaactgcttgtagc

SEQ ID NO: 1626212 - DNA, 25 bp, Homo sapien
agattcgcgaacatgcaggattgag

SEQ ID NO: 1626213 - DNA, 25 bp, Homo sapien
cattgtagctgtgaatgctccgttc

SEQ ID NO: 1626214 - DNA, 25 bp, Homo sapien
agctgtcccttccacaaatctgtgt

SEQ ID NO: 1626215 - DNA, 25 bp, Homo sapien
ccactgtttttgattggctcctggg

SEQ ID NO: 1626216 - DNA, 25 bp, Homo sapien
ctgaactgccaaagtgagtcctaca

SEQ ID NO: 1626217 - DNA, 25 bp, Homo sapien
tacacctgggacaaacgctcttggt

SEQ ID NO: 1626218 - DNA, 25 bp, Homo sapien
tggattcaagggaggcgttgatatt

SEQ ID NO: 1626219 - DNA, 25 bp, Homo sapien
gggaggcgttgatattcctgccaaa

SEQ ID NO: 1626220 - DNA, 25 bp, Homo sapien
ttcaagggaggcgttgatattcctg

SEQ ID NO: 1626221 - DNA, 25 bp, Homo sapien
caagggaggcgttgatattcctgcc

SEQ ID NO: 1626222 - DNA, 25 bp, Homo sapien
tgcccctgtatagaccctgcatgcg

SEQ ID NO: 1626223 - DNA, 25 bp, Homo sapien
tgcttcactatcctgcccctgtata

SEQ ID NO: 1626224 - DNA, 25 bp, Homo sapien
tctggacttgcttcactatcctgcc

SEQ ID NO: 1626225 - DNA, 25 bp, Homo sapien
tagaccctgcatgcgatgaagagga

SEQ ID NO: 1626226 - DNA, 25 bp, Homo sapien
cgggccgctctactgggccagtgaa

SEQ ID NO: 1626227 - DNA, 25 bp, Homo sapien
gctctactgggccagtgaattcacg

SEQ ID NO: 1626228 - DNA, 25 bp, Homo sapien
cagtgaattcacgacagctgttcat

SEQ ID NO: 1626229 - DNA, 25 bp, Homo sapien
tgggccagtgaattcacgacagctg

SEQ ID NO: 1626230 - DNA, 25 bp, Homo sapien
ttaaaaagcagagccataaatcgca

SEQ ID NO: 1626231 - DNA, 25 bp, Homo sapien
cagtgtcagcacatattgtttttat

SEQ ID NO: 1626232 - DNA, 25 bp, Homo sapien
cgcaccggttttattggcaccatga

SEQ ID NO: 1626233 - DNA, 25 bp, Homo sapien
cattaacctcccaatgaagagagaa

SEQ ID NO: 1626234 - DNA, 25 bp, Homo sapien
gctaatgttccacagcagagaacca

SEQ ID NO: 1626235 - DNA, 25 bp, Homo sapien
cttctgtcaaggaggtcacccactc

SEQ ID NO: 1626236 - DNA, 25 bp, Homo sapien
gcataggatgctgtgcgtccgctaa

SEQ ID NO: 1626237 - DNA, 25 bp, Homo sapien
taccctctgtagcagtgttcgcata

SEQ ID NO: 1626238 - DNA, 25 bp, Homo sapien
ctgttgccagtgagatacgtaagtg

SEQ ID NO: 1626239 - DNA, 25 bp, Homo sapien
cagtgagatacgtaagtgtgcagga

SEQ ID NO: 1626240 - DNA, 25 bp, Homo sapien
gggcgtcttgtctacatatctggcc

SEQ ID NO: 1626241 - DNA, 25 bp, Homo sapien
tgtgctatttcgtgcacaaggaggg

SEQ ID NO: 1626242 - DNA, 25 bp, Homo sapien
tgtgacggccgggaaggaggcggca

SEQ ID NO: 1626243 - DNA, 25 bp, Homo sapien
ctgtgtgacggccgggaaggaggcg

SEQ ID NO: 1626244 - DNA, 25 bp, Homo sapien
ctgtaaggtggaggcccacggcttc

SEQ ID NO: 1626245 - DNA, 25 bp, Homo sapien
tgtgtgacggccgggaaggaggcgg

SEQ ID NO: 1626246 - DNA, 25 bp, Homo sapien
gcccgactggaaccgagaggtagac

SEQ ID NO: 1626247 - DNA, 25 bp, Homo sapien
ccgactggaaccgagaggtagacca

SEQ ID NO: 1626248 - DNA, 25 bp, Homo sapien
cggcccgactggaaccgagaggtag

SEQ ID NO: 1626249 - DNA, 25 bp, Homo sapien
cgactggaaccgagaggtagaccat

SEQ ID NO: 1626250 - DNA, 25 bp, Homo sapien
tttgcggcaccccttaaagtatgtg

SEQ ID NO: 1626251 - DNA, 25 bp, Homo sapien
ccttcattggcgaagtgcttagacc

SEQ ID NO: 1626252 - DNA, 25 bp, Homo sapien
cagctttgccaagtaaggtctttga

SEQ ID NO: 1626253 - DNA, 25 bp, Homo sapien
ggtagctatagacttttgaatgcct

SEQ ID NO: 1626254 - DNA, 25 bp, Homo sapien
tgttgcttctacatcgagtggctgg

SEQ ID NO: 1626255 - DNA, 25 bp, Homo sapien
gattctaagcccaatatcctcaggg

SEQ ID NO: 1626256 - DNA, 25 bp, Homo sapien
caaagggtgctgaaaggcctagacg

SEQ ID NO: 1626257 - DNA, 25 bp, Homo sapien
ggttccaaacaactccaggtggcag

SEQ ID NO: 1626258 - DNA, 25 bp, Homo sapien
cctggccgtcggtcctcagtcttct

SEQ ID NO: 1626259 - DNA, 25 bp, Homo sapien
ggccttccctggccgtcggtcctca

SEQ ID NO: 1626260 - DNA, 25 bp, Homo sapien
ttccctggccgtcggtcctcagtct

SEQ ID NO: 1626261 - DNA, 25 bp, Homo sapien
tggccgtcggtcctcagtcttctca

SEQ ID NO: 1626262 - DNA, 25 bp, Homo sapien
atggaggatggagcttcccgccact

SEQ ID NO: 1626263 - DNA, 25 bp, Homo sapien
caagagtgagtgcaacctgcaagta

SEQ ID NO: 1626264 - DNA, 25 bp, Homo sapien
gagtaacaagctcggcaatgccagc

SEQ ID NO: 1626265 - DNA, 25 bp, Homo sapien
taaggacgtaagttgtgtgaccaca

SEQ ID NO: 1626266 - DNA, 25 bp, Homo sapien
tctggccaagggcattatgtaataa

SEQ ID NO: 1626267 - DNA, 25 bp, Homo sapien
ctggccaagggcattatgtaataag

SEQ ID NO: 1626268 - DNA, 25 bp, Homo sapien
tcatacatgttcaggggctgctcct

SEQ ID NO: 1626269 - DNA, 25 bp, Homo sapien
tggccaagggcattatgtaataagg

SEQ ID NO: 1626270 - DNA, 25 bp, Homo sapien
atctccctgttccttgatggtcctg

SEQ ID NO: 1626271 - DNA, 25 bp, Homo sapien
atcatctccctgttccttgatggtc

SEQ ID NO: 1626272 - DNA, 25 bp, Homo sapien
tccttgatggtcctgagctctttca

SEQ ID NO: 1626273 - DNA, 25 bp, Homo sapien
tctccctgttccttgatggtcctga

SEQ ID NO: 1626274 - DNA, 25 bp, Homo sapien
gaagaaacatgagcgttctcggcca

SEQ ID NO: 1626275 - DNA, 25 bp, Homo sapien
catgagcgttctcggccatgaccct

SEQ ID NO: 1626276 - DNA, 25 bp, Homo sapien
tctcggccatgaccctgacaaatgt

SEQ ID NO: 1626277 - DNA, 25 bp, Homo sapien
tctactagaagaaacatgagcgttc

SEQ ID NO: 1626278 - DNA, 25 bp, Homo sapien
tgcatcaggtctgccaaaattcatt

SEQ ID NO: 1626279 - DNA, 25 bp, Homo sapien
ctaaattgcatcaggtctgccaaaa

SEQ ID NO: 1626280 - DNA, 25 bp, Homo sapien
attgcatcaggtctgccaaaattca

SEQ ID NO: 1626281 - DNA, 25 bp, Homo sapien
tcaggtctgccaaaattcattccag

SEQ ID NO: 1626282 - DNA, 25 bp, Homo sapien
gacatcaacgcattttcctccaaat

SEQ ID NO: 1626283 - DNA, 25 bp, Homo sapien
ttatgttgattctccgatataaaat

SEQ ID NO: 1626284 - DNA, 25 bp, Homo sapien
gaagacataaactgtatcaaggtct

SEQ ID NO: 1626285 - DNA, 25 bp, Homo sapien
tgtatcaaggtctgacatcaacgca

SEQ ID NO: 1626286 - DNA, 25 bp, Homo sapien
aaacagttaccagcttttgagtcaa

SEQ ID NO: 1626287 - DNA, 25 bp, Homo sapien
catgaagtgcagaacgtaaggtcag

SEQ ID NO: 1626288 - DNA, 25 bp, Homo sapien
ctaataaagcaagcccacagacatg

SEQ ID NO: 1626289 - DNA, 25 bp, Homo sapien
ggtttgcacttgtaaacaatgaggc

SEQ ID NO: 1626290 - DNA, 25 bp, Homo sapien
agcagcttcgttgggctgagagact

SEQ ID NO: 1626291 - DNA, 25 bp, Homo sapien
tcgttgggctgagagactccgccat

SEQ ID NO: 1626292 - DNA, 25 bp, Homo sapien
gaattctgagcaatgactggctact

SEQ ID NO: 1626293 - DNA, 25 bp, Homo sapien
tgactggctactttagcaattaaaa

SEQ ID NO: 1626294 - DNA, 25 bp, Homo sapien
tcatgcacaccatcaaggtgcttgt

SEQ ID NO: 1626295 - DNA, 25 bp, Homo sapien
ccatcaaggtgcttgttaaagcagg

SEQ ID NO: 1626296 - DNA, 25 bp, Homo sapien
tatccattggattccctcgaattcc

SEQ ID NO: 1626297 - DNA, 25 bp, Homo sapien
caggacatcacttggggaccctttg

SEQ ID NO: 1626298 - DNA, 25 bp, Homo sapien
tttgtttctggtgttcgtctacagt

SEQ ID NO: 1626299 - DNA, 25 bp, Homo sapien
ttgtttctggtgttcgtctacagtt

SEQ ID NO: 1626300 - DNA, 25 bp, Homo sapien
tgtttctggtgttcgtctacagttt

SEQ ID NO: 1626301 - DNA, 25 bp, Homo sapien
ctacgtagatatcagcatatgaggg

SEQ ID NO: 1626302 - DNA, 25 bp, Homo sapien
cgtagatatcagcatatgagggctg

SEQ ID NO: 1626303 - DNA, 25 bp, Homo sapien
tatcagcatatgagggctgcagcat

SEQ ID NO: 1626304 - DNA, 25 bp, Homo sapien
gatatcagcatatgagggctgcagc

SEQ ID NO: 1626305 - DNA, 25 bp, Homo sapien
ttttattatatgcactaccaaactg

SEQ ID NO: 1626306 - DNA, 25 bp, Homo sapien
attccaaacttttattatatgcact

SEQ ID NO: 1626307 - DNA, 25 bp, Homo sapien
gatcacttcgtgaatttgcatatta

SEQ ID NO: 1626308 - DNA, 25 bp, Homo sapien
ttgcatattatctttgtgtagaggc

SEQ ID NO: 1626309 - DNA, 25 bp, Homo sapien
aagaatctggactttttccgtcaca

SEQ ID NO: 1626310 - DNA, 25 bp, Homo sapien
tatgatatcatcagcaccggcacca

SEQ ID NO: 1626311 - DNA, 25 bp, Homo sapien
catagcctctgttaccccagtggag

SEQ ID NO: 1626312 - DNA, 25 bp, Homo sapien
caatagccacgatctctttgggttc

SEQ ID NO: 1626313 - DNA, 25 bp, Homo sapien
gtgtaaacatgatgtggagccacag

SEQ ID NO: 1626314 - DNA, 25 bp, Homo sapien
ccacctttgcatgcagagtgaacag

SEQ ID NO: 1626315 - DNA, 25 bp, Homo sapien
aactgagcgtccaccaatcaccaag

SEQ ID NO: 1626316 - DNA, 25 bp, Homo sapien
gtggtgccagtctgtaggcaagagc

SEQ ID NO: 1626317 - DNA, 25 bp, Homo sapien
tttccagacatggagcaatttctct

SEQ ID NO: 1626318 - DNA, 25 bp, Homo sapien
ctttccagacatggagcaatttctc

SEQ ID NO: 1626319 - DNA, 25 bp, Homo sapien
cagatataagtagtatctttaggat

SEQ ID NO: 1626320 - DNA, 25 bp, Homo sapien
ggatcgaaggccttcgctgttatat

SEQ ID NO: 1626321 - DNA, 25 bp, Homo sapien
taggataaaaggatcgaaggccttc

SEQ ID NO: 1626322 - DNA, 25 bp, Homo sapien
gaaggccttcgctgttatatctggg

SEQ ID NO: 1626323 - DNA, 25 bp, Homo sapien
ccctctccagggcaaatgcacctcc

SEQ ID NO: 1626324 - DNA, 25 bp, Homo sapien
agggcaaatgcacctcccttgtctc

SEQ ID NO: 1626325 - DNA, 25 bp, Homo sapien
tccagggcaaatgcacctcccttgt

SEQ ID NO: 1626326 - DNA, 25 bp, Homo sapien
tctccagggcaaatgcacctccctt

SEQ ID NO: 1626327 - DNA, 25 bp, Homo sapien
ctctgtgaaagggagtggagcaata

SEQ ID NO: 1626328 - DNA, 25 bp, Homo sapien
ctgtgaaagggagtggagcaatact

SEQ ID NO: 1626329 - DNA, 25 bp, Homo sapien
agggagtggagcaatactggacaca

SEQ ID NO: 1626330 - DNA, 25 bp, Homo sapien
aaagggagtggagcaatactggaca

SEQ ID NO: 1626331 - DNA, 25 bp, Homo sapien
tgcatagagcctttgtggaagccat

SEQ ID NO: 1626332 - DNA, 25 bp, Homo sapien
gaagccatctaatatcttttgcatg

SEQ ID NO: 1626333 - DNA, 25 bp, Homo sapien
cattgtcttcttgtcaacagggctt

SEQ ID NO: 1626334 - DNA, 25 bp, Homo sapien
acagggattctcatatgcatagagc

SEQ ID NO: 1626335 - DNA, 25 bp, Homo sapien
tctgctggtaagttgtttctgctga

SEQ ID NO: 1626336 - DNA, 25 bp, Homo sapien
tagtgatatattgcgggaaatgtaa

SEQ ID NO: 1626337 - DNA, 25 bp, Homo sapien
gctccgtcattaagtatttctgctg

SEQ ID NO: 1626338 - DNA, 25 bp, Homo sapien
ggaacaaagctgtgaccgcgtggct

SEQ ID NO: 1626339 - DNA, 25 bp, Homo sapien
tatggagctgtgaatcctgaacttt

SEQ ID NO: 1626340 - DNA, 25 bp, Homo sapien
ggagctgtgaatcctgaacttttct

SEQ ID NO: 1626341 - DNA, 25 bp, Homo sapien
tggagctgtgaatcctgaacttttc

SEQ ID NO: 1626342 - DNA, 25 bp, Homo sapien
tgtatggagctgtgaatcctgaact

SEQ ID NO: 1626343 - DNA, 25 bp, Homo sapien
ccaaagctttgtggggctagagtcc

SEQ ID NO: 1626344 - DNA, 25 bp, Homo sapien
agacatacatctggcactctgcacc

SEQ ID NO: 1626345 - DNA, 25 bp, Homo sapien
ttgagacatttactgattccaaagc

SEQ ID NO: 1626346 - DNA, 25 bp, Homo sapien
aggagtcacagacatacatctggca

SEQ ID NO: 1626347 - DNA, 25 bp, Homo sapien
atgaagcaatacactggtaaatatt

SEQ ID NO: 1626348 - DNA, 25 bp, Homo sapien
caatgaagcaatacactggtaaata

SEQ ID NO: 1626349 - DNA, 25 bp, Homo sapien
aactcaacacagcttcccaacttgg

SEQ ID NO: 1626350 - DNA, 25 bp, Homo sapien
tagacacatacagctctacgtatgt

SEQ ID NO: 1626351 - DNA, 25 bp, Homo sapien
agctctacgtatgtgaaccaactca

SEQ ID NO: 1626352 - DNA, 25 bp, Homo sapien
caacttggtactggcaataatgaga

SEQ ID NO: 1626353 - DNA, 25 bp, Homo sapien
tcagagcgtgctgtgtaaaatccat

SEQ ID NO: 1626354 - DNA, 25 bp, Homo sapien
ccataccataagacttcctttgcca

SEQ ID NO: 1626355 - DNA, 25 bp, Homo sapien
aatccataccataagacttcctttg

SEQ ID NO: 1626356 - DNA, 25 bp, Homo sapien
gcgtgctgtgtaaaatccataccat

SEQ ID NO: 1626357 - DNA, 25 bp, Homo sapien
gctggcgaaacaccctctttactgg

SEQ ID NO: 1626358 - DNA, 25 bp, Homo sapien
ggccgatcccttgagaaaatggaca

SEQ ID NO: 1626359 - DNA, 25 bp, Homo sapien
tggccgcatcaagagaacaagctgg

SEQ ID NO: 1626360 - DNA, 25 bp, Homo sapien
tgacttcatgcaatgaggccgatcc

SEQ ID NO: 1626361 - DNA, 25 bp, Homo sapien
catcgccggcgctgtaaagggagca

SEQ ID NO: 1626362 - DNA, 25 bp, Homo sapien
gattccgcaagagtcaaaaacccaa

SEQ ID NO: 1626363 - DNA, 25 bp, Homo sapien
gcatgctgccggtgtctgtgaccac

SEQ ID NO: 1626364 - DNA, 25 bp, Homo sapien
ttggcattagtcacagccgggccgg

SEQ ID NO: 1626365 - DNA, 25 bp, Homo sapien
tcctctttgcttacagtgagggggg

SEQ ID NO: 1626366 - DNA, 25 bp, Homo sapien
ctgggctaccgtcaggtgcttctgc

SEQ ID NO: 1626367 - DNA, 25 bp, Homo sapien
atcttcccagccatgtacagaacag

SEQ ID NO: 1626368 - DNA, 25 bp, Homo sapien
agtgacactgctcaggcgtcctctg

SEQ ID NO: 1626369 - DNA, 25 bp, Homo sapien
gagtggagacaataaaactgcaatt

SEQ ID NO: 1626370 - DNA, 25 bp, Homo sapien
cctgagtggagacaataaaactgca

SEQ ID NO: 1626371 - DNA, 25 bp, Homo sapien
ctgagtggagacaataaaactgcaa

SEQ ID NO: 1626372 - DNA, 25 bp, Homo sapien
tcctgagtggagacaataaaactgc

SEQ ID NO: 1626373 - DNA, 25 bp, Homo sapien
acagggagtcctgtgaaatttacag

SEQ ID NO: 1626374 - DNA, 25 bp, Homo sapien
caaattgaatgcaaggtatagacat

SEQ ID NO: 1626375 - DNA, 25 bp, Homo sapien
tacagcgctcttaagatatgcaaat

SEQ ID NO: 1626376 - DNA, 25 bp, Homo sapien
cataagggtaattaattgtaaatct

SEQ ID NO: 1626377 - DNA, 25 bp, Homo sapien
tcaccctcgcggcatctgccatgtg

SEQ ID NO: 1626378 - DNA, 25 bp, Homo sapien
ccatgtgcaaaggagcttgcaaggg

SEQ ID NO: 1626379 - DNA, 25 bp, Homo sapien
gacattaaagtcctcccccgagtca

SEQ ID NO: 1626380 - DNA, 25 bp, Homo sapien
ccactggttttccaaccatctgttg

SEQ ID NO: 1626381 - DNA, 25 bp, Homo sapien
gacaaggatgctgtttttccttcaa

SEQ ID NO: 1626382 - DNA, 25 bp, Homo sapien
tgtttttccttcaaagagccactcc

SEQ ID NO: 1626383 - DNA, 25 bp, Homo sapien
tttccttcaaagagccactccccaa

SEQ ID NO: 1626384 - DNA, 25 bp, Homo sapien
gatgctgtttttccttcaaagagcc

SEQ ID NO: 1626385 - DNA, 25 bp, Homo sapien
ggaagttatttcgattgcacccagg

SEQ ID NO: 1626386 - DNA, 25 bp, Homo sapien
cgattgcacccaggtgtcttttcct

SEQ ID NO: 1626387 - DNA, 25 bp, Homo sapien
attgcacccaggtgtcttttcctga

SEQ ID NO: 1626388 - DNA, 25 bp, Homo sapien
agttaggaagttatttcgattgcac

SEQ ID NO: 1626389 - DNA, 25 bp, Homo sapien
ttgggaagttcacagtccaggaaag

SEQ ID NO: 1626390 - DNA, 25 bp, Homo sapien
caaggcaaaagacaagcagttcagg

SEQ ID NO: 1626391 - DNA, 25 bp, Homo sapien
gtccaggaaagataacaaggcaaaa

SEQ ID NO: 1626392 - DNA, 25 bp, Homo sapien
aggaaagataacaaggcaaaagaca

SEQ ID NO: 1626393 - DNA, 25 bp, Homo sapien
aaggtgggccgtgtcctgataagct

SEQ ID NO: 1626394 - DNA, 25 bp, Homo sapien
gccgtgtcctgataagctataacaa

SEQ ID NO: 1626395 - DNA, 25 bp, Homo sapien
cctgataagctataacaacagtagt

SEQ ID NO: 1626396 - DNA, 25 bp, Homo sapien
accaacagaaggtgggccgtgtcct

SEQ ID NO: 1626397 - DNA, 25 bp, Homo sapien
ttctaggtctgtatttaattccgga

SEQ ID NO: 1626398 - DNA, 25 bp, Homo sapien
aatgcctctgctcctattgacacaa

SEQ ID NO: 1626399 - DNA, 25 bp, Homo sapien
tctatcagctaagcatttagggtgc

SEQ ID NO: 1626400 - DNA, 25 bp, Homo sapien
aagagggatgcgtcaggctccgcca

SEQ ID NO: 1626401 - DNA, 25 bp, Homo sapien
agacatagcctttttcaggaaatat

SEQ ID NO: 1626402 - DNA, 25 bp, Homo sapien
acatagcctttttcaggaaatatgt

SEQ ID NO: 1626403 - DNA, 25 bp, Homo sapien
gacatagcctttttcaggaaatatg

SEQ ID NO: 1626404 - DNA, 25 bp, Homo sapien
caatctcttgctgcacattctggtc

SEQ ID NO: 1626405 - DNA, 25 bp, Homo sapien
cacctccttgccaatctcttgctgc

SEQ ID NO: 1626406 - DNA, 25 bp, Homo sapien
ccacctccttgccaatctcttgctg

SEQ ID NO: 1626407 - DNA, 25 bp, Homo sapien
tctcttgctgcacattctggtccat

SEQ ID NO: 1626408 - DNA, 25 bp, Homo sapien
tcttttctctgagttataagaaagc

SEQ ID NO: 1626409 - DNA, 25 bp, Homo sapien
tctccttcctgttctttgattcatt

SEQ ID NO: 1626410 - DNA, 25 bp, Homo sapien
taagaaagcatcttccagttcatgg

SEQ ID NO: 1626411 - DNA, 25 bp, Homo sapien
gtctccttcctgttctttgattcat

SEQ ID NO: 1626412 - DNA, 25 bp, Homo sapien
cagtttaccatacgggtcacattcc

SEQ ID NO: 1626413 - DNA, 25 bp, Homo sapien
aaatgccagtttaccatacgggtca

SEQ ID NO: 1626414 - DNA, 25 bp, Homo sapien
agaaaatgccagtttaccatacggg

SEQ ID NO: 1626415 - DNA, 25 bp, Homo sapien
ttaccatacgggtcacattcctggg

SEQ ID NO: 1626416 - DNA, 25 bp, Homo sapien
tttctgacgttaactgttatccagc

SEQ ID NO: 1626417 - DNA, 25 bp, Homo sapien
gttaactgttatccagcccagccgg

SEQ ID NO: 1626418 - DNA, 25 bp, Homo sapien
ttggtttaaatgcaatgccgtctag

SEQ ID NO: 1626419 - DNA, 25 bp, Homo sapien
tagtttttcaataccattagcgtcc

SEQ ID NO: 1626420 - DNA, 25 bp, Homo sapien
tcctttcagggcgttcagtgcaggt

SEQ ID NO: 1626421 - DNA, 25 bp, Homo sapien
ctttcagggcgttcagtgcaggtag

SEQ ID NO: 1626422 - DNA, 25 bp, Homo sapien
cattcttcctttcagggcgttcagt

SEQ ID NO: 1626423 - DNA, 25 bp, Homo sapien
gaaggggcagacaaatagattttcc

SEQ ID NO: 1626424 - DNA, 25 bp, Homo sapien
ccgtgattgataggccgactcggca

SEQ ID NO: 1626425 - DNA, 25 bp, Homo sapien
tgtttgcagattgcagaccggcgct

SEQ ID NO: 1626426 - DNA, 25 bp, Homo sapien
cacatctgccgggattgtctggaaa

SEQ ID NO: 1626427 - DNA, 25 bp, Homo sapien
ggcgctcctgccgatctgagttcag

SEQ ID NO: 1626428 - DNA, 25 bp, Homo sapien
aagtgggtgccagatgtacagtggg

SEQ ID NO: 1626429 - DNA, 25 bp, Homo sapien
tgaagtgggtgccagatgtacagtg

SEQ ID NO: 1626430 - DNA, 25 bp, Homo sapien
gtgggagcccccattcaagagagga

SEQ ID NO: 1626431 - DNA, 25 bp, Homo sapien
cccattcaagagaggatggcttctc

SEQ ID NO: 1626432 - DNA, 25 bp, Homo sapien
gctctagcaactgggtgcaggcaca

SEQ ID NO: 1626433 - DNA, 25 bp, Homo sapien
gtgaacgatgacagcctcttgcctt

SEQ ID NO: 1626434 - DNA, 25 bp, Homo sapien
tctggtccttgtgatgtgaacgatg

SEQ ID NO: 1626435 - DNA, 25 bp, Homo sapien
tgttccatcattattgcctccacgc

SEQ ID NO: 1626436 - DNA, 25 bp, Homo sapien
agcaatatttttcacaagacagagg

SEQ ID NO: 1626437 - DNA, 25 bp, Homo sapien
acatttgtaaagtgacccttcttct

SEQ ID NO: 1626438 - DNA, 25 bp, Homo sapien
catttgtaaagtgacccttcttctg

SEQ ID NO: 1626439 - DNA, 25 bp, Homo sapien
cacatttgtaaagtgacccttcttc

SEQ ID NO: 1626440 - DNA, 25 bp, Homo sapien
gagacttaaagctgatggttaaatc

SEQ ID NO: 1626441 - DNA, 25 bp, Homo sapien
aactctctggcttgcacaacgctaa

SEQ ID NO: 1626442 - DNA, 25 bp, Homo sapien
tgcacaacgctaagaagagacttaa

SEQ ID NO: 1626443 - DNA, 25 bp, Homo sapien
tgtgtctgctcatcaccaaaaggac

SEQ ID NO: 1626444 - DNA, 25 bp, Homo sapien
ttcaaatgcggaacctgcttgcaaa

SEQ ID NO: 1626445 - DNA, 25 bp, Homo sapien
caaatgcggaacctgcttgcaaaca

SEQ ID NO: 1626446 - DNA, 25 bp, Homo sapien
ttcaaattcaaatgcggaacctgct

SEQ ID NO: 1626447 - DNA, 25 bp, Homo sapien
cggaacctgcttgcaaacatagcat

SEQ ID NO: 1626448 - DNA, 25 bp, Homo sapien
tgacgcattgattttcctgtccgtg

SEQ ID NO: 1626449 - DNA, 25 bp, Homo sapien
ttcctgtccgtgtacagttctaaag

SEQ ID NO: 1626450 - DNA, 25 bp, Homo sapien
cctggtatgacgcattgattttcct

SEQ ID NO: 1626451 - DNA, 25 bp, Homo sapien
ctgaagcctcctggtatgacgcatt

SEQ ID NO: 1626452 - DNA, 25 bp, Homo sapien
tgtgaatacaggtctaacttgcggg

SEQ ID NO: 1626453 - DNA, 25 bp, Homo sapien
cacacctttaaggtctgtgtgtcct

SEQ ID NO: 1626454 - DNA, 25 bp, Homo sapien
tgtgtgtcctgtgaatacaggtcta

SEQ ID NO: 1626455 - DNA, 25 bp, Homo sapien
tctaacttgcgggacacagagagga

SEQ ID NO: 1626456 - DNA, 25 bp, Homo sapien
gaacgctgtgacaaatgctaggacc

SEQ ID NO: 1626457 - DNA, 25 bp, Homo sapien
tccaagaccttgaaatagctgaggc

SEQ ID NO: 1626458 - DNA, 25 bp, Homo sapien
gaaaaaatctgcacggctgctcaca

SEQ ID NO: 1626459 - DNA, 25 bp, Homo sapien
tgcatcgttcaaaggcaaagctcct

SEQ ID NO: 1626460 - DNA, 25 bp, Homo sapien
cacccacgaaatggcgctctgtcaa

SEQ ID NO: 1626461 - DNA, 25 bp, Homo sapien
ctccacacccacgaaatggcgctct

SEQ ID NO: 1626462 - DNA, 25 bp, Homo sapien
acacccacgaaatggcgctctgtca

SEQ ID NO: 1626463 - DNA, 25 bp, Homo sapien
ccacacccacgaaatggcgctctgt

SEQ ID NO: 1626464 - DNA, 25 bp, Homo sapien
gatgagcacaccctgagaccagcca

SEQ ID NO: 1626465 - DNA, 25 bp, Homo sapien
ctgcatgcagatagcccgcccggac

SEQ ID NO: 1626466 - DNA, 25 bp, Homo sapien
tgcatgcagatagcccgcccggaca

SEQ ID NO: 1626467 - DNA, 25 bp, Homo sapien
aaaggatgagcacaccctgagacca

SEQ ID NO: 1626468 - DNA, 25 bp, Homo sapien
ttcttcaaagatagagcatcatcga

SEQ ID NO: 1626469 - DNA, 25 bp, Homo sapien
aagcaataaaagctgccggtctggg

SEQ ID NO: 1626470 - DNA, 25 bp, Homo sapien
gatagagcatcatcgaactggatga

SEQ ID NO: 1626471 - DNA, 25 bp, Homo sapien
cctgcctgtgctgctaacaagacac

SEQ ID NO: 1626472 - DNA, 25 bp, Homo sapien
gcatggcctcggaactcagaaacac

SEQ ID NO: 1626473 - DNA, 25 bp, Homo sapien
tcagaaacaccacgcaaagccacag

SEQ ID NO: 1626474 - DNA, 25 bp, Homo sapien
ggctacagagatggacatagcatgg

SEQ ID NO: 1626475 - DNA, 25 bp, Homo sapien
catgcaccaagtactgaggggctac

SEQ ID NO: 1626476 - DNA, 25 bp, Homo sapien
tcagtagagctgaccatcatgttca

SEQ ID NO: 1626477 - DNA, 25 bp, Homo sapien
tcaaagacctcagtagagctgacca

SEQ ID NO: 1626478 - DNA, 25 bp, Homo sapien
gacctcagtagagctgaccatcatg

SEQ ID NO: 1626479 - DNA, 25 bp, Homo sapien
gctcccccggactttcaacattcaa

SEQ ID NO: 1626480 - DNA, 25 bp, Homo sapien
ttctgcaggctactcaagcacagca

SEQ ID NO: 1626481 - DNA, 25 bp, Homo sapien
aggctactcaagcacagcaccagcg

SEQ ID NO: 1626482 - DNA, 25 bp, Homo sapien
tgcaggctactcaagcacagcacca

SEQ ID NO: 1626483 - DNA, 25 bp, Homo sapien
ggctactcaagcacagcaccagcgt

SEQ ID NO: 1626484 - DNA, 25 bp, Homo sapien
aaaaacatccaagccatatcaacct

SEQ ID NO: 1626485 - DNA, 25 bp, Homo sapien
aaacatccaagccatatcaacctca

SEQ ID NO: 1626486 - DNA, 25 bp, Homo sapien
cctcactccatcacaagtgcttgca

SEQ ID NO: 1626487 - DNA, 25 bp, Homo sapien
ggaaaaaacatccaagccatatcaa

SEQ ID NO: 1626488 - DNA, 25 bp, Homo sapien
gagtactcatatcccttctcccgaa

SEQ ID NO: 1626489 - DNA, 25 bp, Homo sapien
gcctctcttgcaatgtcctgtccga

SEQ ID NO: 1626490 - DNA, 25 bp, Homo sapien
caatggctgagtccagttgaacatc

SEQ ID NO: 1626491 - DNA, 25 bp, Homo sapien
ccagcgagcccttgtgtccaatggc

SEQ ID NO: 1626492 - DNA, 25 bp, Homo sapien
catcagtcatatctttaacttcatc

SEQ ID NO: 1626493 - DNA, 25 bp, Homo sapien
agtcatatctttaacttcatccttg

SEQ ID NO: 1626494 - DNA, 25 bp, Homo sapien
tctttcatcagtcatatctttaact

SEQ ID NO: 1626495 - DNA, 25 bp, Homo sapien
cccaaactccttctttcatcagtca

SEQ ID NO: 1626496 - DNA, 25 bp, Homo sapien
cgttcagagacacgggcacgttgat

SEQ ID NO: 1626497 - DNA, 25 bp, Homo sapien
ggcatttgtaagcatccataggaca

SEQ ID NO: 1626498 - DNA, 25 bp, Homo sapien
gaggctcttttcgacaatttgccag

SEQ ID NO: 1626499 - DNA, 25 bp, Homo sapien
gcacgttgatgggagctgtacaaag

SEQ ID NO: 1626500 - DNA, 25 bp, Homo sapien
agctctccgcgagctgggccagtcc

SEQ ID NO: 1626501 - DNA, 25 bp, Homo sapien
aatttaatgccagctccatctttgc

SEQ ID NO: 1626502 - DNA, 25 bp, Homo sapien
agtgacaaacaccatctaacagata

SEQ ID NO: 1626503 - DNA, 25 bp, Homo sapien
tgcaacttccaactgacgaacatcc

SEQ ID NO: 1626504 - DNA, 25 bp, Homo sapien
tgtccatatcgttcaactgcctgca

SEQ ID NO: 1626505 - DNA, 25 bp, Homo sapien
gaactcctcagactggatcctggga

SEQ ID NO: 1626506 - DNA, 25 bp, Homo sapien
tgaggcactgcctggtattaacacc

SEQ ID NO: 1626507 - DNA, 25 bp, Homo sapien
cctggccggtacacatggatattat

SEQ ID NO: 1626508 - DNA, 25 bp, Homo sapien
aaggacattctaactacctggccgg

SEQ ID NO: 1626509 - DNA, 25 bp, Homo sapien
ggggctaatggcagagctgtcgatg

SEQ ID NO: 1626510 - DNA, 25 bp, Homo sapien
ctgcaccctggggctaatggcagag

SEQ ID NO: 1626511 - DNA, 25 bp, Homo sapien
gctccagccatatcacacacttgag

SEQ ID NO: 1626512 - DNA, 25 bp, Homo sapien
accctggggctaatggcagagctgt

SEQ ID NO: 1626513 - DNA, 25 bp, Homo sapien
tggccactggcttgtgatcccgact

SEQ ID NO: 1626514 - DNA, 25 bp, Homo sapien
caaggtacgggccaggtttgatcct

SEQ ID NO: 1626515 - DNA, 25 bp, Homo sapien
gatcccgactcacatcaaggtacgg

SEQ ID NO: 1626516 - DNA, 25 bp, Homo sapien
ggaaattcctcagagtattcagagc

SEQ ID NO: 1626517 - DNA, 25 bp, Homo sapien
tgatgggttggctgtctctccgacc

SEQ ID NO: 1626518 - DNA, 25 bp, Homo sapien
ggcttgatgggttggctgtctctcc

SEQ ID NO: 1626519 - DNA, 25 bp, Homo sapien
tcaaattcacatgttgggggacaaa

SEQ ID NO: 1626520 - DNA, 25 bp, Homo sapien
gttggctgtctctccgaccaccttt

SEQ ID NO: 1626521 - DNA, 25 bp, Homo sapien
gctgggacaatgaattcttccgact

SEQ ID NO: 1626522 - DNA, 25 bp, Homo sapien
ttttgttaggtaggggccatgtgct

SEQ ID NO: 1626523 - DNA, 25 bp, Homo sapien
cttggctgggacaatgaattcttcc

SEQ ID NO: 1626524 - DNA, 25 bp, Homo sapien
ggctgggacaatgaattcttccgac

SEQ ID NO: 1626525 - DNA, 25 bp, Homo sapien
gtacgtgctgcttagcaaaagggtg

SEQ ID NO: 1626526 - DNA, 25 bp, Homo sapien
gccctggtacgtgctgcttagcaaa

SEQ ID NO: 1626527 - DNA, 25 bp, Homo sapien
accaatcgccttttctgccgtgctg

SEQ ID NO: 1626528 - DNA, 25 bp, Homo sapien
gtctcgctcttgcaccaatcgcctt

SEQ ID NO: 1626529 - DNA, 25 bp, Homo sapien
gagatgtagcacatggccaaaacag

SEQ ID NO: 1626530 - DNA, 25 bp, Homo sapien
cagagatgtagcacatggccaaaac

SEQ ID NO: 1626531 - DNA, 25 bp, Homo sapien
gtccagagatgtagcacatggccaa

SEQ ID NO: 1626532 - DNA, 25 bp, Homo sapien
gatgtagcacatggccaaaacagaa

SEQ ID NO: 1626533 - DNA, 25 bp, Homo sapien
catgaggctcggaatggtttctggc

SEQ ID NO: 1626534 - DNA, 25 bp, Homo sapien
gaccaaacctgacttgcccacttca

SEQ ID NO: 1626535 - DNA, 25 bp, Homo sapien
caaacctgacttgcccacttcatga

SEQ ID NO: 1626536 - DNA, 25 bp, Homo sapien
cacttcatgaggctcggaatggttt

SEQ ID NO: 1626537 - DNA, 25 bp, Homo sapien
tttacagacgaaccacaaacgcctg

SEQ ID NO: 1626538 - DNA, 25 bp, Homo sapien
catcatagcttgactggatacaggt

SEQ ID NO: 1626539 - DNA, 25 bp, Homo sapien
tcaaggaaccgatcggaatgacagg

SEQ ID NO: 1626540 - DNA, 25 bp, Homo sapien
gaatcgcagctattattggctccgg

SEQ ID NO: 1626541 - DNA, 25 bp, Homo sapien
caaacccgcctaaactgatcagaag

SEQ ID NO: 1626542 - DNA, 25 bp, Homo sapien
aagtaaaatattattgactggactg

SEQ ID NO: 1626543 - DNA, 25 bp, Homo sapien
aaatattattgactggactgtttca

SEQ ID NO: 1626544 - DNA, 25 bp, Homo sapien
tttctgcagtcaaacccgcctaaac

SEQ ID NO: 1626545 - DNA, 25 bp, Homo sapien
aggtcattgttctgcgcggggaaca

SEQ ID NO: 1626546 - DNA, 25 bp, Homo sapien
gggaccccgttccttgtcagcaggc

SEQ ID NO: 1626547 - DNA, 25 bp, Homo sapien
tgcattcctctacgggaccccgttc

SEQ ID NO: 1626548 - DNA, 25 bp, Homo sapien
ccaggcaaacaagggcgcaattgca

SEQ ID NO: 1626549 - DNA, 25 bp, Homo sapien
gaaacttcacgcagatgaatgctgg

SEQ ID NO: 1626550 - DNA, 25 bp, Homo sapien
tcagctgcacctgcggaaaattgat

SEQ ID NO: 1626551 - DNA, 25 bp, Homo sapien
gtaaaaaatgacagcgccacgcaag

SEQ ID NO: 1626552 - DNA, 25 bp, Homo sapien
gaattgactgattgcctcagctgca

SEQ ID NO: 1626553 - DNA, 25 bp, Homo sapien
agcctgacagattaaggagtccgat

SEQ ID NO: 1626554 - DNA, 25 bp, Homo sapien
cacattctgagttgttatgctgggc

SEQ ID NO: 1626555 - DNA, 25 bp, Homo sapien
tccacacattctgagttgttatgct

SEQ ID NO: 1626556 - DNA, 25 bp, Homo sapien
taaggagtccgataaatccacacat

SEQ ID NO: 1626557 - DNA, 25 bp, Homo sapien
attcaaatgtggattgccacgctga

SEQ ID NO: 1626558 - DNA, 25 bp, Homo sapien
gattgccacgctgagagaaagcaat

SEQ ID NO: 1626559 - DNA, 25 bp, Homo sapien
caaatgtggattgccacgctgagag

SEQ ID NO: 1626560 - DNA, 25 bp, Homo sapien
tgtggattgccacgctgagagaaag

SEQ ID NO: 1626561 - DNA, 25 bp, Homo sapien
tcatggggagtcaaagcacttgtca

SEQ ID NO: 1626562 - DNA, 25 bp, Homo sapien
tccacggaatgaggagacccatgcc

SEQ ID NO: 1626563 - DNA, 25 bp, Homo sapien
gcacatccatctccacggaatgagg

SEQ ID NO: 1626564 - DNA, 25 bp, Homo sapien
tccatctccacggaatgaggagacc

SEQ ID NO: 1626565 - DNA, 25 bp, Homo sapien
ctgtactgtgtggtgcccagtggtc

SEQ ID NO: 1626566 - DNA, 25 bp, Homo sapien
tgacaagtagtcacggccacatcac

SEQ ID NO: 1626567 - DNA, 25 bp, Homo sapien
ttgcacgctgacctctgtactgtgt

SEQ ID NO: 1626568 - DNA, 25 bp, Homo sapien
ccgtcccgctgtccttgcacgctga

SEQ ID NO: 1626569 - DNA, 25 bp, Homo sapien
acgaggcactcgtggcagcggctcc

SEQ ID NO: 1626570 - DNA, 25 bp, Homo sapien
gagacgaggcactcgtggcagcggc

SEQ ID NO: 1626571 - DNA, 25 bp, Homo sapien
caggagacgaggcactcgtggcagc

SEQ ID NO: 1626572 - DNA, 25 bp, Homo sapien
ctgacaggagacgaggcactcgtgg

SEQ ID NO: 1626573 - DNA, 25 bp, Homo sapien
ctaccagcattaatggagatccttc

SEQ ID NO: 1626574 - DNA, 25 bp, Homo sapien
accagcattaatggagatccttcct

SEQ ID NO: 1626575 - DNA, 25 bp, Homo sapien
tactaccagcattaatggagatcct

SEQ ID NO: 1626576 - DNA, 25 bp, Homo sapien
agtactaccagcattaatggagatc

SEQ ID NO: 1626577 - DNA, 25 bp, Homo sapien
ggtacaccatctatcatgaagagaa

SEQ ID NO: 1626578 - DNA, 25 bp, Homo sapien
cgtgcaggtacaccatctatcatga

SEQ ID NO: 1626579 - DNA, 25 bp, Homo sapien
caggtacaccatctatcatgaagag

SEQ ID NO: 1626580 - DNA, 25 bp, Homo sapien
ttcccacgtgcaggtacaccatcta

SEQ ID NO: 1626581 - DNA, 25 bp, Homo sapien
gccagaccaaccttgaatgcctttg

SEQ ID NO: 1626582 - DNA, 25 bp, Homo sapien
cttggggccagaccaaccttgaatg

SEQ ID NO: 1626583 - DNA, 25 bp, Homo sapien
gggccagaccaaccttgaatgcctt

SEQ ID NO: 1626584 - DNA, 25 bp, Homo sapien
tggggccagaccaaccttgaatgcc

SEQ ID NO: 1626585 - DNA, 25 bp, Homo sapien
gaaggcattactggtcttgtgcaag

SEQ ID NO: 1626586 - DNA, 25 bp, Homo sapien
ttcatcactaatgaaaggtggagct

SEQ ID NO: 1626587 - DNA, 25 bp, Homo sapien
tgtgcaaggtaagccccattccaaa

SEQ ID NO: 1626588 - DNA, 25 bp, Homo sapien
tgggtgtgtatccaatgaaggcatt

SEQ ID NO: 1626589 - DNA, 25 bp, Homo sapien
aatccaccttcgtggccctggagcg

SEQ ID NO: 1626590 - DNA, 25 bp, Homo sapien
gctcatctaggccaactccaagaaa

SEQ ID NO: 1626591 - DNA, 25 bp, Homo sapien
ctggagcggtgacaccaggttcctc

SEQ ID NO: 1626592 - DNA, 25 bp, Homo sapien
acaggcccgctcatctaggccaact

SEQ ID NO: 1626593 - DNA, 25 bp, Homo sapien
gatatggaacaccaccatgggtgga

SEQ ID NO: 1626594 - DNA, 25 bp, Homo sapien
catgggtggaaggtttgcagggagc

SEQ ID NO: 1626595 - DNA, 25 bp, Homo sapien
cagcaaagcctggatatggaacacc

SEQ ID NO: 1626596 - DNA, 25 bp, Homo sapien
gcctggatatggaacaccaccatgg

SEQ ID NO: 1626597 - DNA, 25 bp, Homo sapien
acatgagtaacacgggcgccctgat

SEQ ID NO: 1626598 - DNA, 25 bp, Homo sapien
gcttccacatgagtaacacgggcgc

SEQ ID NO: 1626599 - DNA, 25 bp, Homo sapien
cttccacatgagtaacacgggcgcc

SEQ ID NO: 1626600 - DNA, 25 bp, Homo sapien
tccacatgagtaacacgggcgccct

SEQ ID NO: 1626601 - DNA, 25 bp, Homo sapien
taaagatgacgggtgttgtagcacc

SEQ ID NO: 1626602 - DNA, 25 bp, Homo sapien
ttttcattgatgtacggcagccagg

SEQ ID NO: 1626603 - DNA, 25 bp, Homo sapien
gaaagcggccgagaaatggtaagca

SEQ ID NO: 1626604 - DNA, 25 bp, Homo sapien
attttacaccgcacgacttgaaggg

SEQ ID NO: 1626605 - DNA, 25 bp, Homo sapien
cacaaacactacagtagatccatta

SEQ ID NO: 1626606 - DNA, 25 bp, Homo sapien
ctggaaggaacacaaacactacagt

SEQ ID NO: 1626607 - DNA, 25 bp, Homo sapien
gaaggaacacaaacactacagtaga

SEQ ID NO: 1626608 - DNA, 25 bp, Homo sapien
ggaacacaaacactacagtagatcc

SEQ ID NO: 1626609 - DNA, 25 bp, Homo sapien
tctccttctggccacgggagttccg

SEQ ID NO: 1626610 - DNA, 25 bp, Homo sapien
cctgagcaccctcagtcaccgcggg

SEQ ID NO: 1626611 - DNA, 25 bp, Homo sapien
ctggccacgggagttccggaccctg

SEQ ID NO: 1626612 - DNA, 25 bp, Homo sapien
gccacgggagttccggaccctgagc

SEQ ID NO: 1626613 - DNA, 25 bp, Homo sapien
catcagtggttctggccacattagc

SEQ ID NO: 1626614 - DNA, 25 bp, Homo sapien
tccccaaaagtagtgcttaaagtca

SEQ ID NO: 1626615 - DNA, 25 bp, Homo sapien
gtcacggtgtacaaattgaatttta

SEQ ID NO: 1626616 - DNA, 25 bp, Homo sapien
atcatcagtggttctggccacatta

SEQ ID NO: 1626617 - DNA, 25 bp, Homo sapien
gggtgatactgtggcctgcagttcc

SEQ ID NO: 1626618 - DNA, 25 bp, Homo sapien
ttagttgtcataagagtgagggatg

SEQ ID NO: 1626619 - DNA, 25 bp, Homo sapien
gaaatttcttgataattagttgtca

SEQ ID NO: 1626620 - DNA, 25 bp, Homo sapien
tgcagttccatctgtgagcctctgc

SEQ ID NO: 1626621 - DNA, 25 bp, Homo sapien
ctacttgggaagtcaaggcgggaga

SEQ ID NO: 1626622 - DNA, 25 bp, Homo sapien
gtggtggcaggcaccgtaaacccag

SEQ ID NO: 1626623 - DNA, 25 bp, Homo sapien
ggcaggcaccgtaaacccagctact

SEQ ID NO: 1626624 - DNA, 25 bp, Homo sapien
tacttgggaagtcaaggcgggagaa

SEQ ID NO: 1626625 - DNA, 25 bp, Homo sapien
catcagtgatgcagatgtacttgtc

SEQ ID NO: 1626626 - DNA, 25 bp, Homo sapien
gcacaggctccacttatggctggtt

SEQ ID NO: 1626627 - DNA, 25 bp, Homo sapien
agcagctctccgatgggcacaggct

SEQ ID NO: 1626628 - DNA, 25 bp, Homo sapien
tggaatggcaaatccatcactctct

SEQ ID NO: 1626629 - DNA, 25 bp, Homo sapien
ttgattggcctcgactgcagttagc

SEQ ID NO: 1626630 - DNA, 25 bp, Homo sapien
aactttctccaccaacagggtcagg

SEQ ID NO: 1626631 - DNA, 25 bp, Homo sapien
tataaataaggagctgttctcggcc

SEQ ID NO: 1626632 - DNA, 25 bp, Homo sapien
gatgaattgtgaggaaccctgaccc

SEQ ID NO: 1626633 - DNA, 25 bp, Homo sapien
cctggaataactgtggtcggcctta

SEQ ID NO: 1626634 - DNA, 25 bp, Homo sapien
tgatcagaaacagagctcgggcatg

SEQ ID NO: 1626635 - DNA, 25 bp, Homo sapien
tacagagccagcactacttcggagg

SEQ ID NO: 1626636 - DNA, 25 bp, Homo sapien
tatagtggtgaagcgttctgcctca

SEQ ID NO: 1626637 - DNA, 25 bp, Homo sapien
atcctcgtcagctacacagaagtgg

SEQ ID NO: 1626638 - DNA, 25 bp, Homo sapien
agcatcctcgtcagctacacagaag

SEQ ID NO: 1626639 - DNA, 25 bp, Homo sapien
ctacacagaagtggaaccgtgtaaa

SEQ ID NO: 1626640 - DNA, 25 bp, Homo sapien
cacagaagtggaaccgtgtaaagtt

SEQ ID NO: 1626641 - DNA, 25 bp, Homo sapien
tataacatagtaaggtctcgtgcac

SEQ ID NO: 1626642 - DNA, 25 bp, Homo sapien
aaaggctgcttgttctcatatgtgc

SEQ ID NO: 1626643 - DNA, 25 bp, Homo sapien
tgcacacaaggaaacagcgctgact

SEQ ID NO: 1626644 - DNA, 25 bp, Homo sapien
catatgtgcgttctcggctcctctg

SEQ ID NO: 1626645 - DNA, 25 bp, Homo sapien
taaggttatgagatagcccatgaga

SEQ ID NO: 1626646 - DNA, 25 bp, Homo sapien
taaaataggatatgtggccagagag

SEQ ID NO: 1626647 - DNA, 25 bp, Homo sapien
ccaggtgcatgttgaataagctctc

SEQ ID NO: 1626648 - DNA, 25 bp, Homo sapien
gatgcaggtcatcgtccagtttata

SEQ ID NO: 1626649 - DNA, 25 bp, Homo sapien
atgggtcctccgtgcccatggaggc

SEQ ID NO: 1626650 - DNA, 25 bp, Homo sapien
gtcctccgtgcccatggaggcacca

SEQ ID NO: 1626651 - DNA, 25 bp, Homo sapien
tgggtcctccgtgcccatggaggca

SEQ ID NO: 1626652 - DNA, 25 bp, Homo sapien
gggtcctccgtgcccatggaggcac

SEQ ID NO: 1626653 - DNA, 25 bp, Homo sapien
cgagagaagatctccaatggcagct

SEQ ID NO: 1626654 - DNA, 25 bp, Homo sapien
gcatcagagtaaacagcaggttctg

SEQ ID NO: 1626655 - DNA, 25 bp, Homo sapien
tggttccttcctgtgcctccgagag

SEQ ID NO: 1626656 - DNA, 25 bp, Homo sapien
tgtgcctccgagagaagatctccaa

SEQ ID NO: 1626657 - DNA, 25 bp, Homo sapien
tcccccagtcatcacagattcaatg

SEQ ID NO: 1626658 - DNA, 25 bp, Homo sapien
ctcccccagtcatcacagattcaat

SEQ ID NO: 1626659 - DNA, 25 bp, Homo sapien
cccccagtcatcacagattcaatgt

SEQ ID NO: 1626660 - DNA, 25 bp, Homo sapien
caaattatgcgagggactgggcagc

SEQ ID NO: 1626661 - DNA, 25 bp, Homo sapien
aaatgattaactccaaattatgcga

SEQ ID NO: 1626662 - DNA, 25 bp, Homo sapien
taactccaaattatgcgagggactg

SEQ ID NO: 1626663 - DNA, 25 bp, Homo sapien
ccgcttcagcttgaatggagtgtgt

SEQ ID NO: 1626664 - DNA, 25 bp, Homo sapien
caaaggatcagagaggtgaaaccac

SEQ ID NO: 1626665 - DNA, 25 bp, Homo sapien
tcgtgattcgagctgcaagactcca

SEQ ID NO: 1626666 - DNA, 25 bp, Homo sapien
tgaataaccaaatcctccgagagag

SEQ ID NO: 1626667 - DNA, 25 bp, Homo sapien
ctcgaaactaccactcctgagaggc

SEQ ID NO: 1626668 - DNA, 25 bp, Homo sapien
attccctgggcgctgctaagtctcc

SEQ ID NO: 1626669 - DNA, 25 bp, Homo sapien
tgctaagtctccaccatggctgctg

SEQ ID NO: 1626670 - DNA, 25 bp, Homo sapien
gtccgcagagcttggcatgggccct

SEQ ID NO: 1626671 - DNA, 25 bp, Homo sapien
tggagtagtccgcagagcttggcat

SEQ ID NO: 1626672 - DNA, 25 bp, Homo sapien
gaatggtgccgaaaactagggctga

SEQ ID NO: 1626673 - DNA, 25 bp, Homo sapien
tgcgcttgcacacaaaagaatggtg

SEQ ID NO: 1626674 - DNA, 25 bp, Homo sapien
ctatgacaaattaagcggctggtga

SEQ ID NO: 1626675 - DNA, 25 bp, Homo sapien
gagtgattaccccaaagtgtgctag

SEQ ID NO: 1626676 - DNA, 25 bp, Homo sapien
gtcgagtcagcacccagttccaaat

SEQ ID NO: 1626677 - DNA, 25 bp, Homo sapien
tattgcaggaacaagaattccttgg

SEQ ID NO: 1626678 - DNA, 25 bp, Homo sapien
tctatgattaacacaactcttaatg

SEQ ID NO: 1626679 - DNA, 25 bp, Homo sapien
tgtgaaaccattttgtgtgcaaata

SEQ ID NO: 1626680 - DNA, 25 bp, Homo sapien
gaacacacatcttcccgagacaatg

SEQ ID NO: 1626681 - DNA, 25 bp, Homo sapien
tcttcccgagacaatggagggcctg

SEQ ID NO: 1626682 - DNA, 25 bp, Homo sapien
acacatcttcccgagacaatggagg

SEQ ID NO: 1626683 - DNA, 25 bp, Homo sapien
tcccgagacaatggagggcctggat

SEQ ID NO: 1626684 - DNA, 25 bp, Homo sapien
catgctgtcagtttcataccgagca

SEQ ID NO: 1626685 - DNA, 25 bp, Homo sapien
gctgtcagtttcataccgagcatca

SEQ ID NO: 1626686 - DNA, 25 bp, Homo sapien
ctgtcagtttcataccgagcatcag

SEQ ID NO: 1626687 - DNA, 25 bp, Homo sapien
tgctgtcagtttcataccgagcatc

SEQ ID NO: 1626688 - DNA, 25 bp, Homo sapien
agagagccaactgagcagaggcctg

SEQ ID NO: 1626689 - DNA, 25 bp, Homo sapien
gagattcctctttcgtcctgggtag

SEQ ID NO: 1626690 - DNA, 25 bp, Homo sapien
tggaaactccaaccacttgttacag

SEQ ID NO: 1626691 - DNA, 25 bp, Homo sapien
cagtcaatttcagtaaggaggagcc

SEQ ID NO: 1626692 - DNA, 25 bp, Homo sapien
ctaaataaggacttggtggcagctc

SEQ ID NO: 1626693 - DNA, 25 bp, Homo sapien
ccaccaccaagccgcggctgcgttc

SEQ ID NO: 1626694 - DNA, 25 bp, Homo sapien
tgcgttcccaacgccagacgtggaa

SEQ ID NO: 1626695 - DNA, 25 bp, Homo sapien
cgttcccaacgccagacgtggaagg

SEQ ID NO: 1626696 - DNA, 25 bp, Homo sapien
gcctcttgctatccaccaccaagcc

SEQ ID NO: 1626697 - DNA, 25 bp, Homo sapien
atcagataagaccgggcacattcag

SEQ ID NO: 1626698 - DNA, 25 bp, Homo sapien
cagataagaccgggcacattcaggg

SEQ ID NO: 1626699 - DNA, 25 bp, Homo sapien
tcagataagaccgggcacattcagg

SEQ ID NO: 1626700 - DNA, 25 bp, Homo sapien
tcagatgaggcaaggaggggcttcc

SEQ ID NO: 1626701 - DNA, 25 bp, Homo sapien
cagatgaggcaaggaggggcttccc

SEQ ID NO: 1626702 - DNA, 25 bp, Homo sapien
agaaggtgagaattcctggaagctg

SEQ ID NO: 1626703 - DNA, 25 bp, Homo sapien
gagaaggtgagaattcctggaagct

SEQ ID NO: 1626704 - DNA, 25 bp, Homo sapien
aatctctaagcgctttccgggccac

SEQ ID NO: 1626705 - DNA, 25 bp, Homo sapien
ggccactccgctcggaactgcgttg

SEQ ID NO: 1626706 - DNA, 25 bp, Homo sapien
caaagtccaccaagaagcaaagcct

SEQ ID NO: 1626707 - DNA, 25 bp, Homo sapien
attccacacaccacgacgggcaagg

SEQ ID NO: 1626708 - DNA, 25 bp, Homo sapien
acaggtgaaggcgttcaatttcctg

SEQ ID NO: 1626709 - DNA, 25 bp, Homo sapien
agacgagagtactcagaaatggtcc

SEQ ID NO: 1626710 - DNA, 25 bp, Homo sapien
cctggacaggtgaaggcgttcaatt

SEQ ID NO: 1626711 - DNA, 25 bp, Homo sapien
agaattttgcttagacgagagtact

SEQ ID NO: 1626712 - DNA, 25 bp, Homo sapien
tgacatcgtctaacttaaccatagc

SEQ ID NO: 1626713 - DNA, 25 bp, Homo sapien
ctggcaatccttgacatcgtctaac

SEQ ID NO: 1626714 - DNA, 25 bp, Homo sapien
tcgtctaacttaaccatagctgatg

SEQ ID NO: 1626715 - DNA, 25 bp, Homo sapien
tccttgacatcgtctaacttaacca

SEQ ID NO: 1626716 - DNA, 25 bp, Homo sapien
agtgtccggtattttaatatctgcc

SEQ ID NO: 1626717 - DNA, 25 bp, Homo sapien
tgtccggtattttaatatctgccat

SEQ ID NO: 1626718 - DNA, 25 bp, Homo sapien
gtgtccggtattttaatatctgcca

SEQ ID NO: 1626719 - DNA, 25 bp, Homo sapien
cagtgtccggtattttaatatctgc

SEQ ID NO: 1626720 - DNA, 25 bp, Homo sapien
cagacaggagtgcaagtagctcctc

SEQ ID NO: 1626721 - DNA, 25 bp, Homo sapien
aggagtgcaagtagctcctctagga

SEQ ID NO: 1626722 - DNA, 25 bp, Homo sapien
ccagacaggagtgcaagtagctcct

SEQ ID NO: 1626723 - DNA, 25 bp, Homo sapien
tgcaagtagctcctctaggagctct

SEQ ID NO: 1626724 - DNA, 25 bp, Homo sapien
ggcctccctcctattgtgtatgagt

SEQ ID NO: 1626725 - DNA, 25 bp, Homo sapien
tcctattgtgtatgagtttccactg

SEQ ID NO: 1626726 - DNA, 25 bp, Homo sapien
ttgtgtatgagtttccactgggaaa

SEQ ID NO: 1626727 - DNA, 25 bp, Homo sapien
tccaggcctccctcctattgtgtat

SEQ ID NO: 1626728 - DNA, 25 bp, Homo sapien
tcctcagcagttggacctgcagcag

SEQ ID NO: 1626729 - DNA, 25 bp, Homo sapien
caggaggtcggacttggacacacga

SEQ ID NO: 1626730 - DNA, 25 bp, Homo sapien
cctatcatcgctgttcaggtccagg

SEQ ID NO: 1626731 - DNA, 25 bp, Homo sapien
gcagacattgaaagacgcttctgag

SEQ ID NO: 1626732 - DNA, 25 bp, Homo sapien
gcagttgagaacatcgcctatcatc

SEQ ID NO: 1626733 - DNA, 25 bp, Homo sapien
tacagggatgatgactgtggacctc

SEQ ID NO: 1626734 - DNA, 25 bp, Homo sapien
tcctggagtcagtagggattcctct

SEQ ID NO: 1626735 - DNA, 25 bp, Homo sapien
caacgtgaatcaacagccatgcctg

SEQ ID NO: 1626736 - DNA, 25 bp, Homo sapien
gagttttctgcaatttatccgccaa

SEQ ID NO: 1626737 - DNA, 25 bp, Homo sapien
ctgcttcaacaagaactatgtagag

SEQ ID NO: 1626738 - DNA, 25 bp, Homo sapien
tcaacaagaactatgtagagcccat

SEQ ID NO: 1626739 - DNA, 25 bp, Homo sapien
tatgtagagcccatcagaactatta

SEQ ID NO: 1626740 - DNA, 25 bp, Homo sapien
atgtagagcccatcagaactattag

SEQ ID NO: 1626741 - DNA, 25 bp, Homo sapien
tatgccccatccacatgtgaaactt

SEQ ID NO: 1626742 - DNA, 25 bp, Homo sapien
catccacatgtgaaacttacagggt

SEQ ID NO: 1626743 - DNA, 25 bp, Homo sapien
catgtgaaacttacagggtgataat

SEQ ID NO: 1626744 - DNA, 25 bp, Homo sapien
tccaccaggggatgcaatgaatgtt

SEQ ID NO: 1626745 - DNA, 25 bp, Homo sapien
gcatttgattcagctgacattggca

SEQ ID NO: 1626746 - DNA, 25 bp, Homo sapien
tgattcagctgacattggcaactgt

SEQ ID NO: 1626747 - DNA, 25 bp, Homo sapien
cagccctgagcatttgattcagctg

SEQ ID NO: 1626748 - DNA, 25 bp, Homo sapien
ccctgagcatttgattcagctgaca

SEQ ID NO: 1626749 - DNA, 25 bp, Homo sapien
tgtgccttgcgaacagcagcttcca

SEQ ID NO: 1626750 - DNA, 25 bp, Homo sapien
tgtttccaacaagccattgaatgcg

SEQ ID NO: 1626751 - DNA, 25 bp, Homo sapien
tctgtcatcggtgtctggagctcag

SEQ ID NO: 1626752 - DNA, 25 bp, Homo sapien
gcagcttccaatcaagggcgcgtgg

SEQ ID NO: 1626753 - DNA, 25 bp, Homo sapien
tcctaatacggcaaaactatccagc

SEQ ID NO: 1626754 - DNA, 25 bp, Homo sapien
gcaccatgctgcgtagttcctaata

SEQ ID NO: 1626755 - DNA, 25 bp, Homo sapien
actgttagcaggagaaccaccctag

SEQ ID NO: 1626756 - DNA, 25 bp, Homo sapien
gctggaatgcttcacttagtccgtt

SEQ ID NO: 1626757 - DNA, 25 bp, Homo sapien
ctggccaaacgaggctcgcggaagc

SEQ ID NO: 1626758 - DNA, 25 bp, Homo sapien
tgttagcgccgccgccggccatgtg

SEQ ID NO: 1626759 - DNA, 25 bp, Homo sapien
ggcacggccgggtcctggctggcca

SEQ ID NO: 1626760 - DNA, 25 bp, Homo sapien
ccattttggagctccggatgaggag

SEQ ID NO: 1626761 - DNA, 25 bp, Homo sapien
attaagatgaaaattggtgtattag

SEQ ID NO: 1626762 - DNA, 25 bp, Homo sapien
ggtgtattagagaaagcatggtttt

SEQ ID NO: 1626763 - DNA, 25 bp, Homo sapien
ttttagagtgagattggcctggatt

SEQ ID NO: 1626764 - DNA, 25 bp, Homo sapien
tattctcattgagaattaagatgaa

SEQ ID NO: 1626765 - DNA, 25 bp, Homo sapien
tattgagttggttatatatgcttca

SEQ ID NO: 1626766 - DNA, 25 bp, Homo sapien
gttatatatgcttcatagccacact

SEQ ID NO: 1626767 - DNA, 25 bp, Homo sapien
caaagaaaatgcactgggtgaaaag

SEQ ID NO: 1626768 - DNA, 25 bp, Homo sapien
cactgggtgaaaaggccttaggctt

SEQ ID NO: 1626769 - DNA, 25 bp, Homo sapien
cagatacctggtgaggtggcgatct

SEQ ID NO: 1626770 - DNA, 25 bp, Homo sapien
tacctgctgctttgtatgccggaat

SEQ ID NO: 1626771 - DNA, 25 bp, Homo sapien
tcatggccgtaccaatctacattgt

SEQ ID NO: 1626772 - DNA, 25 bp, Homo sapien
tctggcttgttagcatgaggcctcc

SEQ ID NO: 1626773 - DNA, 25 bp, Homo sapien
ttgagtggacaggaattggctcagt

SEQ ID NO: 1626774 - DNA, 25 bp, Homo sapien
ccacaacgctccacatgaagaaaag

SEQ ID NO: 1626775 - DNA, 25 bp, Homo sapien
gggctctgatagcatggcaaaccag

SEQ ID NO: 1626776 - DNA, 25 bp, Homo sapien
taaagagagagcgtttgctgaccag

SEQ ID NO: 1626777 - DNA, 25 bp, Homo sapien
cactgatgttatgggaccgttctga

SEQ ID NO: 1626778 - DNA, 25 bp, Homo sapien
ttctaggacctctctgaaatcagtg

SEQ ID NO: 1626779 - DNA, 25 bp, Homo sapien
catatgtggaaacatgcaagtgacc

SEQ ID NO: 1626780 - DNA, 25 bp, Homo sapien
ttaacgacgcgatttcacaaagtgg

SEQ ID NO: 1626781 - DNA, 25 bp, Homo sapien
gatcatatgaaagagcacgagggtg

SEQ ID NO: 1626782 - DNA, 25 bp, Homo sapien
cagtgaagagagtgcagatcccgtc

SEQ ID NO: 1626783 - DNA, 25 bp, Homo sapien
gaataatgactcgagcaggaaagca

SEQ ID NO: 1626784 - DNA, 25 bp, Homo sapien
tgggtaccaacgagaatgagaaact

SEQ ID NO: 1626785 - DNA, 25 bp, Homo sapien
cgaccgaagcctttgttctggatct

SEQ ID NO: 1626786 - DNA, 25 bp, Homo sapien
tgcaatgttgtgacaccgaccgaag

SEQ ID NO: 1626787 - DNA, 25 bp, Homo sapien
tattccatttgatcggtagtccaag

SEQ ID NO: 1626788 - DNA, 25 bp, Homo sapien
ccagtgttcaacagtatcatgctaa

SEQ ID NO: 1626789 - DNA, 25 bp, Homo sapien
ccacagttccatcgcagaggtgaaa

SEQ ID NO: 1626790 - DNA, 25 bp, Homo sapien
ggtgaaaaactctaacatgaggctc

SEQ ID NO: 1626791 - DNA, 25 bp, Homo sapien
gaacacagttggtgcggctatgcct

SEQ ID NO: 1626792 - DNA, 25 bp, Homo sapien
gatgatactggagtccaccacagtt

SEQ ID NO: 1626793 - DNA, 25 bp, Homo sapien
gctcagaaggttgaatctgcagtca

SEQ ID NO: 1626794 - DNA, 25 bp, Homo sapien
ttcgtgagctcagaaggttgaatct

SEQ ID NO: 1626795 - DNA, 25 bp, Homo sapien
cgtgagctcagaaggttgaatctgc

SEQ ID NO: 1626796 - DNA, 25 bp, Homo sapien
tcagaaggttgaatctgcagtcagc

SEQ ID NO: 1626797 - DNA, 25 bp, Homo sapien
cactggtcagtgacaatcgggcgct

SEQ ID NO: 1626798 - DNA, 25 bp, Homo sapien
gagacgcaaaatcctctccgcggga

SEQ ID NO: 1626799 - DNA, 25 bp, Homo sapien
agttccgtaaatcaggccctcaggg

SEQ ID NO: 1626800 - DNA, 25 bp, Homo sapien
cacagaggagcctgttttcggaaga

SEQ ID NO: 1626801 - DNA, 25 bp, Homo sapien
aagtgtgccgcttccttccggccag

SEQ ID NO: 1626802 - DNA, 25 bp, Homo sapien
tttccacaaagctccgcggcggttc

SEQ ID NO: 1626803 - DNA, 25 bp, Homo sapien
acagaccggactcaatgcggaccag

SEQ ID NO: 1626804 - DNA, 25 bp, Homo sapien
ctagtgttgacgaacagctcccggg

SEQ ID NO: 1626805 - DNA, 25 bp, Homo sapien
tttagtaccgtaatatacacgtagc

SEQ ID NO: 1626806 - DNA, 25 bp, Homo sapien
tattaacgtgactcaagagttacca

SEQ ID NO: 1626807 - DNA, 25 bp, Homo sapien
tatgtactcttatgtcccaccttga

SEQ ID NO: 1626808 - DNA, 25 bp, Homo sapien
gaacacctggtctcagatggccctc

SEQ ID NO: 1626809 - DNA, 25 bp, Homo sapien
gttggtctcaggataggaggcatct

SEQ ID NO: 1626810 - DNA, 25 bp, Homo sapien
gtctcaggataggaggcatctgcaa

SEQ ID NO: 1626811 - DNA, 25 bp, Homo sapien
tggtctcaggataggaggcatctgc

SEQ ID NO: 1626812 - DNA, 25 bp, Homo sapien
ctagaaggttggtctcaggatagga

SEQ ID NO: 1626813 - DNA, 25 bp, Homo sapien
ttttgactccccgaagaataacatc

SEQ ID NO: 1626814 - DNA, 25 bp, Homo sapien
ttgactccccgaagaataacatctg

SEQ ID NO: 1626815 - DNA, 25 bp, Homo sapien
tttgactccccgaagaataacatct

SEQ ID NO: 1626816 - DNA, 25 bp, Homo sapien
ttcgttctgtccatcacagtgattg

SEQ ID NO: 1626817 - DNA, 25 bp, Homo sapien
tgattgtagcattcgttgttgcctt

SEQ ID NO: 1626818 - DNA, 25 bp, Homo sapien
catcacagtgattgtagcattcgtt

SEQ ID NO: 1626819 - DNA, 25 bp, Homo sapien
atattcgttctgtccatcacagtga

SEQ ID NO: 1626820 - DNA, 25 bp, Homo sapien
gatcaagtctttttagtcaactgtc

SEQ ID NO: 1626821 - DNA, 25 bp, Homo sapien
ggtgctgctttgattctactagtgg

SEQ ID NO: 1626822 - DNA, 25 bp, Homo sapien
tcagtggagcatacatacattgtca

SEQ ID NO: 1626823 - DNA, 25 bp, Homo sapien
agtgaattctacctttgaccttaga

SEQ ID NO: 1626824 - DNA, 25 bp, Homo sapien
ccagatattcctggagagccctaca

SEQ ID NO: 1626825 - DNA, 25 bp, Homo sapien
agatattcctggagagccctacatt

SEQ ID NO: 1626826 - DNA, 25 bp, Homo sapien
accagatattcctggagagccctac

SEQ ID NO: 1626827 - DNA, 25 bp, Homo sapien
cagatattcctggagagccctacat

SEQ ID NO: 1626828 - DNA, 25 bp, Homo sapien
cagtgagactacaaaccaggatcat

SEQ ID NO: 1626829 - DNA, 25 bp, Homo sapien
caaggcccagagtaagtgtttagta

SEQ ID NO: 1626830 - DNA, 25 bp, Homo sapien
tacactctaggtaagggtagcacag

SEQ ID NO: 1626831 - DNA, 25 bp, Homo sapien
ttattcctctgaccatgtgggacag

SEQ ID NO: 1626832 - DNA, 25 bp, Homo sapien
ccatggatacctggataggcacata

SEQ ID NO: 1626833 - DNA, 25 bp, Homo sapien
tcactggtgaagaccaattggtagc

SEQ ID NO: 1626834 - DNA, 25 bp, Homo sapien
cataacatgttggaagatgagcacc

SEQ ID NO: 1626835 - DNA, 25 bp, Homo sapien
ggtagcccaaaccttcaagctgtga

SEQ ID NO: 1626836 - DNA, 25 bp, Homo sapien
tttcccgacccttgtgagatcagcg

SEQ ID NO: 1626837 - DNA, 25 bp, Homo sapien
tatatcttggttaatatgctcccag

SEQ ID NO: 1626838 - DNA, 25 bp, Homo sapien
taaacatggcaaccttttggcctaa

SEQ ID NO: 1626839 - DNA, 25 bp, Homo sapien
gcatagttagatgttacccaggcca

SEQ ID NO: 1626840 - DNA, 25 bp, Homo sapien
taactattcttgctgtagaaaatat

SEQ ID NO: 1626841 - DNA, 25 bp, Homo sapien
ttaactattcttgctgtagaaaata

SEQ ID NO: 1626842 - DNA, 25 bp, Homo sapien
taggccatcatgtaactcaatggtt

SEQ ID NO: 1626843 - DNA, 25 bp, Homo sapien
gaacacaacctttcctaggccatca

SEQ ID NO: 1626844 - DNA, 25 bp, Homo sapien
ctttgaatatctgtaagagcctggt

SEQ ID NO: 1626845 - DNA, 25 bp, Homo sapien
tgtaagagcctggtagattatgaaa

SEQ ID NO: 1626846 - DNA, 25 bp, Homo sapien
ccaccgtcagatttattttgacaaa

SEQ ID NO: 1626847 - DNA, 25 bp, Homo sapien
aattgacaagaatgtctcccatgta

SEQ ID NO: 1626848 - DNA, 25 bp, Homo sapien
ccatgtaacctttaaccaccgtcag

SEQ ID NO: 1626849 - DNA, 25 bp, Homo sapien
gacaagaatgtctcccatgtaacct

SEQ ID NO: 1626850 - DNA, 25 bp, Homo sapien
cgttgcgggctcagtgtgtacattt

SEQ ID NO: 1626851 - DNA, 25 bp, Homo sapien
gaatgcctccaagctagctcctgtg

SEQ ID NO: 1626852 - DNA, 25 bp, Homo sapien
catttagaaataagacgttgcgggc

SEQ ID NO: 1626853 - DNA, 25 bp, Homo sapien
gacatattcccatcaatcgtgaggc

SEQ ID NO: 1626854 - DNA, 25 bp, Homo sapien
tttgagatcaagacgaaccccacct

SEQ ID NO: 1626855 - DNA, 25 bp, Homo sapien
gagtgtgacttacctccttcaaggg

SEQ ID NO: 1626856 - DNA, 25 bp, Homo sapien
gggatgtttaagcttctcgggcaga

SEQ ID NO: 1626857 - DNA, 25 bp, Homo sapien
ttcaattgcccctgcactggaagca

SEQ ID NO: 1626858 - DNA, 25 bp, Homo sapien
gaatgcggtggtgaaacctctccca

SEQ ID NO: 1626859 - DNA, 25 bp, Homo sapien
gactcaggacaaacccatatacgtg

SEQ ID NO: 1626860 - DNA, 25 bp, Homo sapien
tagaaatactgctacaggtgcacgt

SEQ ID NO: 1626861 - DNA, 25 bp, Homo sapien
gacagacattcaagggaggttctca

SEQ ID NO: 1626862 - DNA, 25 bp, Homo sapien
tagttctcagatgtgttcacgctca

SEQ ID NO: 1626863 - DNA, 25 bp, Homo sapien
ttgcttcctagcagtgggttcaaca

SEQ ID NO: 1626864 - DNA, 25 bp, Homo sapien
ttctcaagccagtctcatggaagca

SEQ ID NO: 1626865 - DNA, 25 bp, Homo sapien
catggaagcacatttagttctcaga

SEQ ID NO: 1626866 - DNA, 25 bp, Homo sapien
ggacacgaccgcatcctctaccgtg

SEQ ID NO: 1626867 - DNA, 25 bp, Homo sapien
taccgtgtgtctccgcagcatccgt

SEQ ID NO: 1626868 - DNA, 25 bp, Homo sapien
tccgggccctgggacacgaccgcat

SEQ ID NO: 1626869 - DNA, 25 bp, Homo sapien
atcctctaccgtgtgtctccgcagc

SEQ ID NO: 1626870 - DNA, 25 bp, Homo sapien
tgtctcagtgtgacactttgcctcc

SEQ ID NO: 1626871 - DNA, 25 bp, Homo sapien
tctggccagtcgctgttgcctttct

SEQ ID NO: 1626872 - DNA, 25 bp, Homo sapien
ggcctctctggccagtcgctgttgc

SEQ ID NO: 1626873 - DNA, 25 bp, Homo sapien
catgagatccactctgagctggcag

SEQ ID NO: 1626874 - DNA, 25 bp, Homo sapien
gttaaattagggacacttctatctc

SEQ ID NO: 1626875 - DNA, 25 bp, Homo sapien
cttctatctcttgccataatctccc

SEQ ID NO: 1626876 - DNA, 25 bp, Homo sapien
ttctatctcttgccataatctccct

SEQ ID NO: 1626877 - DNA, 25 bp, Homo sapien
gtaaaactgtcttgtaaaaggctca

SEQ ID NO: 1626878 - DNA, 25 bp, Homo sapien
catctggtagatcatacagttttga

SEQ ID NO: 1626879 - DNA, 25 bp, Homo sapien
aaaaggctcatctggtagatcatac

SEQ ID NO: 1626880 - DNA, 25 bp, Homo sapien
aaaactgtcttgtaaaaggctcatc

SEQ ID NO: 1626881 - DNA, 25 bp, Homo sapien
tgagtatctccaatccaaaaatcta

SEQ ID NO: 1626882 - DNA, 25 bp, Homo sapien
aaagaaacacagctagtacctattt

SEQ ID NO: 1626883 - DNA, 25 bp, Homo sapien
tacagcacagacacaatctttctat

SEQ ID NO: 1626884 - DNA, 25 bp, Homo sapien
aaactgaagcactgaatttgcttaa

SEQ ID NO: 1626885 - DNA, 25 bp, Homo sapien
tagtcagcctgtattatgagaaccc

SEQ ID NO: 1626886 - DNA, 25 bp, Homo sapien
cacaaccaattacggtgagacagtc

SEQ ID NO: 1626887 - DNA, 25 bp, Homo sapien
gagacagtctcagggttatcgagat

SEQ ID NO: 1626888 - DNA, 25 bp, Homo sapien
tcctgatttggatcctcaaccaatg

SEQ ID NO: 1626889 - DNA, 25 bp, Homo sapien
catcatctaatgaagcaacacagct

SEQ ID NO: 1626890 - DNA, 25 bp, Homo sapien
ggtaccacctgaagcaattccatta

SEQ ID NO: 1626891 - DNA, 25 bp, Homo sapien
ccttgcggtcagtttcagccacatc

SEQ ID NO: 1626892 - DNA, 25 bp, Homo sapien
tttcctgatcttaacagtgacatac

SEQ ID NO: 1626893 - DNA, 25 bp, Homo sapien
gcttggaggccataaagcccagtgg

SEQ ID NO: 1626894 - DNA, 25 bp, Homo sapien
tatgcttatcatgaggctgttgagg

SEQ ID NO: 1626895 - DNA, 25 bp, Homo sapien
ttaccactgggtaaaagctctgccc

SEQ ID NO: 1626896 - DNA, 25 bp, Homo sapien
catgcaaccagctcaaccataataa

SEQ ID NO: 1626897 - DNA, 25 bp, Homo sapien
tagaagcgttaatggaggccccgtg

SEQ ID NO: 1626898 - DNA, 25 bp, Homo sapien
agcacctgaactgacgctccgtgga

SEQ ID NO: 1626899 - DNA, 25 bp, Homo sapien
ttttcaatcacagcctcgtgcagcg

SEQ ID NO: 1626900 - DNA, 25 bp, Homo sapien
gaagcagctctaccacgaagacgtg

SEQ ID NO: 1626901 - DNA, 25 bp, Homo sapien
tggccaccggagcaggcgtaaatga

SEQ ID NO: 1626902 - DNA, 25 bp, Homo sapien
gcattcgaatctaacagacacttca

SEQ ID NO: 1626903 - DNA, 25 bp, Homo sapien
cgtgtttccactgaggtccttctta

SEQ ID NO: 1626904 - DNA, 25 bp, Homo sapien
agtgccacaagctcgtgatggccac

SEQ ID NO: 1626905 - DNA, 25 bp, Homo sapien
ggccagagaaggaaaacgtgcaaac

SEQ ID NO: 1626906 - DNA, 25 bp, Homo sapien
gtcctggctggtcacgttcacacca

SEQ ID NO: 1626907 - DNA, 25 bp, Homo sapien
caggtggagcgggacggcttggtct

SEQ ID NO: 1626908 - DNA, 25 bp, Homo sapien
gtctgcgttcctggcacctgcgttg

SEQ ID NO: 1626909 - DNA, 25 bp, Homo sapien
gtgcagggcggcgacatgcagcggg

SEQ ID NO: 1626910 - DNA, 25 bp, Homo sapien
aaggcgacgagattcacttgctgtt

SEQ ID NO: 1626911 - DNA, 25 bp, Homo sapien
acagccccgcaaaggcgacgagatt

SEQ ID NO: 1626912 - DNA, 25 bp, Homo sapien
gcgacgagattcacttgctgtttgc

SEQ ID NO: 1626913 - DNA, 25 bp, Homo sapien
cgcaaaggcgacgagattcacttgc

SEQ ID NO: 1626914 - DNA, 25 bp, Homo sapien
agaataattttactttttgatgatt

SEQ ID NO: 1626915 - DNA, 25 bp, Homo sapien
gaataattttactttttgatgatta

SEQ ID NO: 1626916 - DNA, 25 bp, Homo sapien
cacatgtggcacaactgtacagaac

SEQ ID NO: 1626917 - DNA, 25 bp, Homo sapien
taaacctacacatgtggcacaactg

SEQ ID NO: 1626918 - DNA, 25 bp, Homo sapien
cacacacacgagaacaagcagaact

SEQ ID NO: 1626919 - DNA, 25 bp, Homo sapien
acacacgagaacaagcagaactggg

SEQ ID NO: 1626920 - DNA, 25 bp, Homo sapien
tggggcacacttggggcactggcac

SEQ ID NO: 1626921 - DNA, 25 bp, Homo sapien
tggcacaacgggtgacagaattcgg

SEQ ID NO: 1626922 - DNA, 25 bp, Homo sapien
gctgcactgacagtgtcctccgcat

SEQ ID NO: 1626923 - DNA, 25 bp, Homo sapien
gggtccgctgcactgacagtgtcct

SEQ ID NO: 1626924 - DNA, 25 bp, Homo sapien
catttctagatctccatcagcaact

SEQ ID NO: 1626925 - DNA, 25 bp, Homo sapien
gatttagtatcctgtaaatgtgtcc

SEQ ID NO: 1626926 - DNA, 25 bp, Homo sapien
ctgtaaatgtgtccctaaaactgct

SEQ ID NO: 1626927 - DNA, 25 bp, Homo sapien
tagtatcctgtaaatgtgtccctaa

SEQ ID NO: 1626928 - DNA, 25 bp, Homo sapien
gtatcctgtaaatgtgtccctaaaa

SEQ ID NO: 1626929 - DNA, 25 bp, Homo sapien
ggaagtggaggactcttggctgatg

SEQ ID NO: 1626930 - DNA, 25 bp, Homo sapien
ctggaagtggaggactcttggctga

SEQ ID NO: 1626931 - DNA, 25 bp, Homo sapien
agtccacggagcgctgcggggactg

SEQ ID NO: 1626932 - DNA, 25 bp, Homo sapien
gctggaagtggaggactcttggctg

SEQ ID NO: 1626933 - DNA, 25 bp, Homo sapien
cgaaggacaggtgataggcttccat

SEQ ID NO: 1626934 - DNA, 25 bp, Homo sapien
ggacaggtgataggcttccattaca

SEQ ID NO: 1626935 - DNA, 25 bp, Homo sapien
aaggacaggtgataggcttccatta

SEQ ID NO: 1626936 - DNA, 25 bp, Homo sapien
acaggtgataggcttccattacaga

SEQ ID NO: 1626937 - DNA, 25 bp, Homo sapien
ccccagcgggcagcaatgtgtagag

SEQ ID NO: 1626938 - DNA, 25 bp, Homo sapien
cagtctgttctggatctcggtggac

SEQ ID NO: 1626939 - DNA, 25 bp, Homo sapien
tccacgtcgtagtaaaccagagcct

SEQ ID NO: 1626940 - DNA, 25 bp, Homo sapien
tctctatgacgccttggtagcccca

SEQ ID NO: 1626941 - DNA, 25 bp, Homo sapien
gaacagagttactacagcaggcctg

SEQ ID NO: 1626942 - DNA, 25 bp, Homo sapien
taaccactgagaggcctgcttgcaa

SEQ ID NO: 1626943 - DNA, 25 bp, Homo sapien
gagttcctaatgagcttcccgagtg

SEQ ID NO: 1626944 - DNA, 25 bp, Homo sapien
ggtttatgctgaacgcccgagtttc

SEQ ID NO: 1626945 - DNA, 25 bp, Homo sapien
ggcgtattcccattgttgtcctgca

SEQ ID NO: 1626946 - DNA, 25 bp, Homo sapien
gccaggtggagtggcgtattcccat

SEQ ID NO: 1626947 - DNA, 25 bp, Homo sapien
ttgttgtcctgcacttccgcgctgg

SEQ ID NO: 1626948 - DNA, 25 bp, Homo sapien
tcctcgtggccgtaggtgcaggcca

SEQ ID NO: 1626949 - DNA, 25 bp, Homo sapien
gacagcccgccacaaaggcaccact

SEQ ID NO: 1626950 - DNA, 25 bp, Homo sapien
aggagcaaagcgacagcccgccaca

SEQ ID NO: 1626951 - DNA, 25 bp, Homo sapien
acagcccgccacaaaggcaccactg

SEQ ID NO: 1626952 - DNA, 25 bp, Homo sapien
agcaaagcgacagcccgccacaaag

SEQ ID NO: 1626953 - DNA, 25 bp, Homo sapien
cttctgacaggccaggtggagcgga

SEQ ID NO: 1626954 - DNA, 25 bp, Homo sapien
aaccaggaggtcgatgagggatgcc

SEQ ID NO: 1626955 - DNA, 25 bp, Homo sapien
agtggctccatggtagtctgtggca

SEQ ID NO: 1626956 - DNA, 25 bp, Homo sapien
ggcatttaccatggcgcccttggaa

SEQ ID NO: 1626957 - DNA, 25 bp, Homo sapien
gtgtgccccctgtcgtctctggaga

SEQ ID NO: 1626958 - DNA, 25 bp, Homo sapien
agccacatggagaggggtgtgcccc

SEQ ID NO: 1626959 - DNA, 25 bp, Homo sapien
gccccctgtcgtctctggagaatgg

SEQ ID NO: 1626960 - DNA, 25 bp, Homo sapien
gtgccccctgtcgtctctggagaat

SEQ ID NO: 1626961 - DNA, 25 bp, Homo sapien
ccagagacgagtttctcacagtcat

SEQ ID NO: 1626962 - DNA, 25 bp, Homo sapien
tggacggtatctttatcatggtcct

SEQ ID NO: 1626963 - DNA, 25 bp, Homo sapien
gcagagagggtgacacatcttttgg

SEQ ID NO: 1626964 - DNA, 25 bp, Homo sapien
agacgagtttctcacagtcatcgca

SEQ ID NO: 1626965 - DNA, 25 bp, Homo sapien
ctggacgtgctcattccccaggacc

SEQ ID NO: 1626966 - DNA, 25 bp, Homo sapien
tcctggacgtgctcattccccagga

SEQ ID NO: 1626967 - DNA, 25 bp, Homo sapien
ccctgcgggcacctcagcggcctgc

SEQ ID NO: 1626968 - DNA, 25 bp, Homo sapien
gcttcctggacgtgctcattcccca

SEQ ID NO: 1626969 - DNA, 25 bp, Homo sapien
ctgtggccagtgtctgagcagggag

SEQ ID NO: 1626970 - DNA, 25 bp, Homo sapien
gtggccagtgtctgagcagggagct

SEQ ID NO: 1626971 - DNA, 25 bp, Homo sapien
agtgtctgagcagggagctgccccc

SEQ ID NO: 1626972 - DNA, 25 bp, Homo sapien
tgtctgagcagggagctgcccccat

SEQ ID NO: 1626973 - DNA, 25 bp, Homo sapien
ggaagtcaggcaccgtgttcccaac

SEQ ID NO: 1626974 - DNA, 25 bp, Homo sapien
agaccaccaggaagtcaggcaccgt

SEQ ID NO: 1626975 - DNA, 25 bp, Homo sapien
tctgacaacgggctcctcgagccca

SEQ ID NO: 1626976 - DNA, 25 bp, Homo sapien
agtgcacacgcccataaacatctga

SEQ ID NO: 1626977 - DNA, 25 bp, Homo sapien
tagtagtattgcgaggaactgagaa

SEQ ID NO: 1626978 - DNA, 25 bp, Homo sapien
actgagaaagcaagaggcctggcct

SEQ ID NO: 1626979 - DNA, 25 bp, Homo sapien
tagagacgggtactcatgatgttac

SEQ ID NO: 1626980 - DNA, 25 bp, Homo sapien
tctgagcacagaatggaacttcagg

SEQ ID NO: 1626981 - DNA, 25 bp, Homo sapien
caggcagtcggtgggagacgaagtc

SEQ ID NO: 1626982 - DNA, 25 bp, Homo sapien
taaggaacagcctgtctccaaatcc

SEQ ID NO: 1626983 - DNA, 25 bp, Homo sapien
agctcattctctgcttaaggaacag

SEQ ID NO: 1626984 - DNA, 25 bp, Homo sapien
cagtcggtgggagacgaagtcatct

SEQ ID NO: 1626985 - DNA, 25 bp, Homo sapien
acgagatgtcagtgcagatccttca

SEQ ID NO: 1626986 - DNA, 25 bp, Homo sapien
cacgagatgtcagtgcagatccttc

SEQ ID NO: 1626987 - DNA, 25 bp, Homo sapien
gagatgtcagtgcagatccttcaaa

SEQ ID NO: 1626988 - DNA, 25 bp, Homo sapien
cgagatgtcagtgcagatccttcaa

SEQ ID NO: 1626989 - DNA, 25 bp, Homo sapien
tcccgtctcatatgggacctgctca

SEQ ID NO: 1626990 - DNA, 25 bp, Homo sapien
ctcttcagagcagtatcggctgcgc

SEQ ID NO: 1626991 - DNA, 25 bp, Homo sapien
tctctcccgtctcatatgggacctg

SEQ ID NO: 1626992 - DNA, 25 bp, Homo sapien
gagcagtatcggctgcgcctctctc

SEQ ID NO: 1626993 - DNA, 25 bp, Homo sapien
gagacggaggacgggctgacgtcag

SEQ ID NO: 1626994 - DNA, 25 bp, Homo sapien
tgagacggaggacgggctgacgtca

SEQ ID NO: 1626995 - DNA, 25 bp, Homo sapien
ggaagtggaggctttgacggttgct

SEQ ID NO: 1626996 - DNA, 25 bp, Homo sapien
gcccaattccctgctgtcttatctg

SEQ ID NO: 1626997 - DNA, 25 bp, Homo sapien
cagagcccaattccctgctgtctta

SEQ ID NO: 1626998 - DNA, 25 bp, Homo sapien
ggaaactcacattgccgtggcctcc

SEQ ID NO: 1626999 - DNA, 25 bp, Homo sapien
gatggaaactcacattgccgtggcc

SEQ ID NO: 1627000 - DNA, 25 bp, Homo sapien
gcaggaccctgtacaagcaacttgg

SEQ ID NO: 1627001 - DNA, 25 bp, Homo sapien
ccaagagcgtgaaatgagcccagca

SEQ ID NO: 1627002 - DNA, 25 bp, Homo sapien
gatgtcgggactaccaactgcagga

SEQ ID NO: 1627003 - DNA, 25 bp, Homo sapien
tgtcagtcccaagtggagtccacga

SEQ ID NO: 1627004 - DNA, 25 bp, Homo sapien
atcaaggtcaagaaatccaaattcc

SEQ ID NO: 1627005 - DNA, 25 bp, Homo sapien
caaggtcaagaaatccaaattccct

SEQ ID NO: 1627006 - DNA, 25 bp, Homo sapien
ttgactatcaaggtcaagaaatcca

SEQ ID NO: 1627007 - DNA, 25 bp, Homo sapien
tcacttcttgactatcaaggtcaag

SEQ ID NO: 1627008 - DNA, 25 bp, Homo sapien
atttttaccaccaattgagggcttg

SEQ ID NO: 1627009 - DNA, 25 bp, Homo sapien
caatttaagaatccgtctgcccaca

SEQ ID NO: 1627010 - DNA, 25 bp, Homo sapien
gcaccctatcaagggaaccatgatg

SEQ ID NO: 1627011 - DNA, 25 bp, Homo sapien
gggactaatgaagtaggatattaac

SEQ ID NO: 1627012 - DNA, 25 bp, Homo sapien
tcaatggcagcttcgaatgaggtca

SEQ ID NO: 1627013 - DNA, 25 bp, Homo sapien
tgctaaacctgaagtttttgatgta

SEQ ID NO: 1627014 - DNA, 25 bp, Homo sapien
gcagagaggcttccttgccgaatat

SEQ ID NO: 1627015 - DNA, 25 bp, Homo sapien
gaggtcaggcagtatcccagttcat

SEQ ID NO: 1627016 - DNA, 25 bp, Homo sapien
gggatctccgttttcacaagcaagt

SEQ ID NO: 1627017 - DNA, 25 bp, Homo sapien
tagggatctccgttttcacaagcaa

SEQ ID NO: 1627018 - DNA, 25 bp, Homo sapien
acaagcaagtataacaggactgata

SEQ ID NO: 1627019 - DNA, 25 bp, Homo sapien
agtataacaggactgatagcagatc

SEQ ID NO: 1627020 - DNA, 25 bp, Homo sapien
gagactgtgtaatgagctgcaccac

SEQ ID NO: 1627021 - DNA, 25 bp, Homo sapien
ctcttttggcacgaggtatgttaaa

SEQ ID NO: 1627022 - DNA, 25 bp, Homo sapien
caccacttttcgcaagcagacaagc

SEQ ID NO: 1627023 - DNA, 25 bp, Homo sapien
tctctggcttggagactgtgtaatg

SEQ ID NO: 1627024 - DNA, 25 bp, Homo sapien
gacaccaagccgctgtggcgcaaac

SEQ ID NO: 1627025 - DNA, 25 bp, Homo sapien
aagccgctgtggcgcaaacccttac

SEQ ID NO: 1627026 - DNA, 25 bp, Homo sapien
tgaggacaccaagccgctgtggcgc

SEQ ID NO: 1627027 - DNA, 25 bp, Homo sapien
ccaagccgctgtggcgcaaaccctt

SEQ ID NO: 1627028 - DNA, 25 bp, Homo sapien
ctgaactccggtttcacaccaatat

SEQ ID NO: 1627029 - DNA, 25 bp, Homo sapien
tgaactccggtttcacaccaatatc

SEQ ID NO: 1627030 - DNA, 25 bp, Homo sapien
aaaagcacagaagaaggcttccatc

SEQ ID NO: 1627031 - DNA, 25 bp, Homo sapien
aaaaagcacagaagaaggcttccat

SEQ ID NO: 1627032 - DNA, 25 bp, Homo sapien
ccccacgtatttaaagatcaggttg

SEQ ID NO: 1627033 - DNA, 25 bp, Homo sapien
ggttgtaaatttcatgatggacgta

SEQ ID NO: 1627034 - DNA, 25 bp, Homo sapien
ctccatggtccccacgtatttaaag

SEQ ID NO: 1627035 - DNA, 25 bp, Homo sapien
taaagatcaggttgtaaatttcatg

SEQ ID NO: 1627036 - DNA, 25 bp, Homo sapien
gcctgcttcatcaggttcatctggg

SEQ ID NO: 1627037 - DNA, 25 bp, Homo sapien
tcaggttcatctgggcctcctgctt

SEQ ID NO: 1627038 - DNA, 25 bp, Homo sapien
gggcctcctgcttggcgagcatttt

SEQ ID NO: 1627039 - DNA, 25 bp, Homo sapien
tccactgcctgcttcatcaggttca

SEQ ID NO: 1627040 - DNA, 25 bp, Homo sapien
catttggtgtagagagcattcgctg

SEQ ID NO: 1627041 - DNA, 25 bp, Homo sapien
ggcatttggtgtagagagcattcgc

SEQ ID NO: 1627042 - DNA, 25 bp, Homo sapien
ttggtgtagagagcattcgctgagt

SEQ ID NO: 1627043 - DNA, 25 bp, Homo sapien
atttggtgtagagagcattcgctga

SEQ ID NO: 1627044 - DNA, 25 bp, Homo sapien
ctaaaccacatagagcagagggaca

SEQ ID NO: 1627045 - DNA, 25 bp, Homo sapien
aaaccacatagagcagagggacagg

SEQ ID NO: 1627046 - DNA, 25 bp, Homo sapien
taaaccacatagagcagagggacag

SEQ ID NO: 1627047 - DNA, 25 bp, Homo sapien
gctttatgaagtcaattacgtgatt

SEQ ID NO: 1627048 - DNA, 25 bp, Homo sapien
caagctttatgaagtcaattacgtg

SEQ ID NO: 1627049 - DNA, 25 bp, Homo sapien
gcgggtaaggcgcacagagcttcaa

SEQ ID NO: 1627050 - DNA, 25 bp, Homo sapien
cagagcttcaagtgctaacacaagc

SEQ ID NO: 1627051 - DNA, 25 bp, Homo sapien
tgttcgatggaaagaggcgatgttc

SEQ ID NO: 1627052 - DNA, 25 bp, Homo sapien
gaggctctttctctcgcattctcgg

SEQ ID NO: 1627053 - DNA, 25 bp, Homo sapien
gatgttcctgtcaaatcgctcggag

SEQ ID NO: 1627054 - DNA, 25 bp, Homo sapien
cacatcttcaatggttttcagggaa

SEQ ID NO: 1627055 - DNA, 25 bp, Homo sapien
caattatataggtctccatgtggct

SEQ ID NO: 1627056 - DNA, 25 bp, Homo sapien
catcccaggctgatcacaggtaggc

SEQ ID NO: 1627057 - DNA, 25 bp, Homo sapien
ggaattgtgcaatgcccgacctgtg

SEQ ID NO: 1627058 - DNA, 25 bp, Homo sapien
caggtaggctgtctatgcgaatgct

SEQ ID NO: 1627059 - DNA, 25 bp, Homo sapien
ccaaaggatgggctatacacaggat

SEQ ID NO: 1627060 - DNA, 25 bp, Homo sapien
agagaagacaggcaaaaccagctcc

SEQ ID NO: 1627061 - DNA, 25 bp, Homo sapien
ctgagagaagacaggcaaaaccagc

SEQ ID NO: 1627062 - DNA, 25 bp, Homo sapien
gaagacaggcaaaaccagctcctaa

SEQ ID NO: 1627063 - DNA, 25 bp, Homo sapien
gcaaaaccagctcctaatttaatcc

SEQ ID NO: 1627064 - DNA, 25 bp, Homo sapien
ctgtgttcagatgcggcagctgagg

SEQ ID NO: 1627065 - DNA, 25 bp, Homo sapien
gttcagatgcggcagctgaggtttg

SEQ ID NO: 1627066 - DNA, 25 bp, Homo sapien
tgttcagatgcggcagctgaggttt

SEQ ID NO: 1627067 - DNA, 25 bp, Homo sapien
gggctgtgttcagatgcggcagctg

SEQ ID NO: 1627068 - DNA, 25 bp, Homo sapien
ctgtcagtcagcttagttgatttgt

SEQ ID NO: 1627069 - DNA, 25 bp, Homo sapien
agctgtcagtcagcttagttgattt

SEQ ID NO: 1627070 - DNA, 25 bp, Homo sapien
gtcagtcagcttagttgatttgttc

SEQ ID NO: 1627071 - DNA, 25 bp, Homo sapien
cagtcagcttagttgatttgttctc

SEQ ID NO: 1627072 - DNA, 25 bp, Homo sapien
actggatgctgctcgacaggcttcc

SEQ ID NO: 1627073 - DNA, 25 bp, Homo sapien
ggactcaaactgacaagtagactgg

SEQ ID NO: 1627074 - DNA, 25 bp, Homo sapien
caaaatgtaggactcaaactgacaa

SEQ ID NO: 1627075 - DNA, 25 bp, Homo sapien
catttaaggtctgaaaatgctcttc

SEQ ID NO: 1627076 - DNA, 25 bp, Homo sapien
cacacaaccatgaccagcatttttt

SEQ ID NO: 1627077 - DNA, 25 bp, Homo sapien
gcacacaaccatgaccagcattttt

SEQ ID NO: 1627078 - DNA, 25 bp, Homo sapien
gcctccaaggtacaatagattctca

SEQ ID NO: 1627079 - DNA, 25 bp, Homo sapien
tccaaggtacaatagattctcatgc

SEQ ID NO: 1627080 - DNA, 25 bp, Homo sapien
aaggtacaatagattctcatgcctc

SEQ ID NO: 1627081 - DNA, 25 bp, Homo sapien
cctccaaggtacaatagattctcat

SEQ ID NO: 1627082 - DNA, 25 bp, Homo sapien
agcatagctcacgacatcccagagc

SEQ ID NO: 1627083 - DNA, 25 bp, Homo sapien
catagctcacgacatcccagagctc

SEQ ID NO: 1627084 - DNA, 25 bp, Homo sapien
cagcatagctcacgacatcccagag

SEQ ID NO: 1627085 - DNA, 25 bp, Homo sapien
gcatagctcacgacatcccagagct

SEQ ID NO: 1627086 - DNA, 25 bp, Homo sapien
ccctgaaggcttctgaggttgtggc

SEQ ID NO: 1627087 - DNA, 25 bp, Homo sapien
cagaaaagttctttcatcatggtgc

SEQ ID NO: 1627088 - DNA, 25 bp, Homo sapien
ctttcatcatggtgctttccctttg

SEQ ID NO: 1627089 - DNA, 25 bp, Homo sapien
gaaaagttctttcatcatggtgctt

SEQ ID NO: 1627090 - DNA, 25 bp, Homo sapien
aaaggatttttcaggaggtcttcat

SEQ ID NO: 1627091 - DNA, 25 bp, Homo sapien
ggaggtcttcatcatacagagccat

SEQ ID NO: 1627092 - DNA, 25 bp, Homo sapien
tgccatggatttgggccactttgct

SEQ ID NO: 1627093 - DNA, 25 bp, Homo sapien
gcagagccagatagaaaggattttt

SEQ ID NO: 1627094 - DNA, 25 bp, Homo sapien
cttcagatgggtcagagcaaatctc

SEQ ID NO: 1627095 - DNA, 25 bp, Homo sapien
tggacttcagatgggtcagagcaaa

SEQ ID NO: 1627096 - DNA, 25 bp, Homo sapien
atggacttcagatgggtcagagcaa

SEQ ID NO: 1627097 - DNA, 25 bp, Homo sapien
gacttcagatgggtcagagcaaatc

SEQ ID NO: 1627098 - DNA, 25 bp, Homo sapien
taagctgtttgaaggatgttgctgt

SEQ ID NO: 1627099 - DNA, 25 bp, Homo sapien
aagctgtttgaaggatgttgctgtc

SEQ ID NO: 1627100 - DNA, 25 bp, Homo sapien
agtaagctgtttgaaggatgttgct

SEQ ID NO: 1627101 - DNA, 25 bp, Homo sapien
gctgtttgaaggatgttgctgtctg

SEQ ID NO: 1627102 - DNA, 25 bp, Homo sapien
tcaagaaccgtctggtgacagcgtg

SEQ ID NO: 1627103 - DNA, 25 bp, Homo sapien
caaactagtatttcagggagcagcg

SEQ ID NO: 1627104 - DNA, 25 bp, Homo sapien
tgctgaaatctcactgcgatggccg

SEQ ID NO: 1627105 - DNA, 25 bp, Homo sapien
cactcgtggttttgtggtcttcaac

SEQ ID NO: 1627106 - DNA, 25 bp, Homo sapien
gcaccgcgtggctcgtgtgctcctg

SEQ ID NO: 1627107 - DNA, 25 bp, Homo sapien
cctgggcagtccattttcaaccaca

SEQ ID NO: 1627108 - DNA, 25 bp, Homo sapien
tgcatgctctaaatcctcagcgaag

SEQ ID NO: 1627109 - DNA, 25 bp, Homo sapien
ggcctctatccatgaaacccatcaa

SEQ ID NO: 1627110 - DNA, 25 bp, Homo sapien
ccagggattccccgctccgcgccct

SEQ ID NO: 1627111 - DNA, 25 bp, Homo sapien
aaggctacatcgcttcattcccagc

SEQ ID NO: 1627112 - DNA, 25 bp, Homo sapien
cccatcctgggcgacggcggcacct

SEQ ID NO: 1627113 - DNA, 25 bp, Homo sapien
tcgtccgctgctgggacctcgatgc

SEQ ID NO: 1627114 - DNA, 25 bp, Homo sapien
tcgcgcggcgatctggccctatagc

SEQ ID NO: 1627115 - DNA, 25 bp, Homo sapien
cagcttcgcagggagccaccgtgga

SEQ ID NO: 1627116 - DNA, 25 bp, Homo sapien
tgcagcctgcttgccccggagttgg

SEQ ID NO: 1627117 - DNA, 25 bp, Homo sapien
cacgacgtgtgactcggagtgcgcc

SEQ ID NO: 1627118 - DNA, 25 bp, Homo sapien
ttggcagcgcctaaggcggagcgcg

SEQ ID NO: 1627119 - DNA, 25 bp, Homo sapien
ataggatcttgtggtgtcgcccagg

SEQ ID NO: 1627120 - DNA, 25 bp, Homo sapien
gcctccaaatctcgggctcaaacta

SEQ ID NO: 1627121 - DNA, 25 bp, Homo sapien
tccaaatctcgggctcaaactatcc

SEQ ID NO: 1627122 - DNA, 25 bp, Homo sapien
agagataggatcttgtggtgtcgcc

SEQ ID NO: 1627123 - DNA, 25 bp, Homo sapien
catgatttacctgacgtttaccgta

SEQ ID NO: 1627124 - DNA, 25 bp, Homo sapien
gctattgtgcacaagctaagaatat

SEQ ID NO: 1627125 - DNA, 25 bp, Homo sapien
tttccatgaggactctgacaatgct

SEQ ID NO: 1627126 - DNA, 25 bp, Homo sapien
gttaaagagagttctagtttccatg

SEQ ID NO: 1627127 - DNA, 25 bp, Homo sapien
cccttctctttgtcggccacatgta

SEQ ID NO: 1627128 - DNA, 25 bp, Homo sapien
gatccgacagttgtgccactcctgt

SEQ ID NO: 1627129 - DNA, 25 bp, Homo sapien
atagtgaaggcatggaagtcctccg

SEQ ID NO: 1627130 - DNA, 25 bp, Homo sapien
gctgcagacatagatccgacagttg

SEQ ID NO: 1627131 - DNA, 25 bp, Homo sapien
tcttctagacactaacaaggtggag

SEQ ID NO: 1627132 - DNA, 25 bp, Homo sapien
tgtggaggcccagattaaacatctc

SEQ ID NO: 1627133 - DNA, 25 bp, Homo sapien
aattatgggaaaagctgtcggtgac

SEQ ID NO: 1627134 - DNA, 25 bp, Homo sapien
ccaggcgccctgacaataaaaggta

SEQ ID NO: 1627135 - DNA, 25 bp, Homo sapien
tgcgtgggaatactgcggtcctcct

SEQ ID NO: 1627136 - DNA, 25 bp, Homo sapien
cacatgtgggtccttgtttaaagca

SEQ ID NO: 1627137 - DNA, 25 bp, Homo sapien
ttaccatggcaagtcatatgcgccc

SEQ ID NO: 1627138 - DNA, 25 bp, Homo sapien
tcacgtgtgcttgcaaaggtcagac

SEQ ID NO: 1627139 - DNA, 25 bp, Homo sapien
gagctcatttgggtttccgtttgta

SEQ ID NO: 1627140 - DNA, 25 bp, Homo sapien
cagtgaaagggccagtgggtcggtc

SEQ ID NO: 1627141 - DNA, 25 bp, Homo sapien
tctctaggccagtgaaagggccagt

SEQ ID NO: 1627142 - DNA, 25 bp, Homo sapien
gggaattgggcaatgactgctctag

SEQ ID NO: 1627143 - DNA, 25 bp, Homo sapien
ttcctggtctcgctggcttggagtg

SEQ ID NO: 1627144 - DNA, 25 bp, Homo sapien
cactgactttaggagtgaagccaca

SEQ ID NO: 1627145 - DNA, 25 bp, Homo sapien
cgcttagtgataggtaatagtccct

SEQ ID NO: 1627146 - DNA, 25 bp, Homo sapien
ctcactgactttaggagtgaagcca

SEQ ID NO: 1627147 - DNA, 25 bp, Homo sapien
gatattgtgactttatgttgttgag

SEQ ID NO: 1627148 - DNA, 25 bp, Homo sapien
gttgttgagtgctgaatcttgtcac

SEQ ID NO: 1627149 - DNA, 25 bp, Homo sapien
tctagttttggatgacgttttccca

SEQ ID NO: 1627150 - DNA, 25 bp, Homo sapien
attccttaaagagtattggactttg

SEQ ID NO: 1627151 - DNA, 25 bp, Homo sapien
tttaatccttacagtgtgccacacg

SEQ ID NO: 1627152 - DNA, 25 bp, Homo sapien
tcaggtgttttagggagctcgcttg

SEQ ID NO: 1627153 - DNA, 25 bp, Homo sapien
cactgtattagcaccttccctgatg

SEQ ID NO: 1627154 - DNA, 25 bp, Homo sapien
tgagacacccttcaagtgaccatgt

SEQ ID NO: 1627155 - DNA, 25 bp, Homo sapien
gaatcagaggttgttggagtttttc

SEQ ID NO: 1627156 - DNA, 25 bp, Homo sapien
acaattgggcgggtaggagcttggg

SEQ ID NO: 1627157 - DNA, 25 bp, Homo sapien
gattcaaggattgttgtctcatgcc

SEQ ID NO: 1627158 - DNA, 25 bp, Homo sapien
gattatcggtgtgggtggtgtcagc

SEQ ID NO: 1627159 - DNA, 25 bp, Homo sapien
ggtttccaacggactcagccgcacg

SEQ ID NO: 1627160 - DNA, 25 bp, Homo sapien
caaaggtggtttccaacggactcag

SEQ ID NO: 1627161 - DNA, 25 bp, Homo sapien
ggtggtttccaacggactcagccgc

SEQ ID NO: 1627162 - DNA, 25 bp, Homo sapien
ttagttgggcttccgcccaggaata

SEQ ID NO: 1627163 - DNA, 25 bp, Homo sapien
gtggtctccgacgcctcaaggcctg

SEQ ID NO: 1627164 - DNA, 25 bp, Homo sapien
tggttactgccaggacggagcgcat

SEQ ID NO: 1627165 - DNA, 25 bp, Homo sapien
gccgttgggtggaccacgtggtctc

SEQ ID NO: 1627166 - DNA, 25 bp, Homo sapien
cgggcatccggtgggtgcgggaggc

SEQ ID NO: 1627167 - DNA, 25 bp, Homo sapien
gccccagcccatgggtccgggcttc

SEQ ID NO: 1627168 - DNA, 25 bp, Homo sapien
gagcgcggaattggttgctcctccg

SEQ ID NO: 1627169 - DNA, 25 bp, Homo sapien
aatgctcgatcacccgggccaagcg

SEQ ID NO: 1627170 - DNA, 25 bp, Homo sapien
ggcccttaggctcggcgcctggaca

SEQ ID NO: 1627171 - DNA, 25 bp, Homo sapien
tagaacctgtgccttgcagtatggc

SEQ ID NO: 1627172 - DNA, 25 bp, Homo sapien
tataaacctgtggttagcatacggt

SEQ ID NO: 1627173 - DNA, 25 bp, Homo sapien
catacggtttattagttgagttggc

SEQ ID NO: 1627174 - DNA, 25 bp, Homo sapien
tcccaaggacagcaatctctatcag

SEQ ID NO: 1627175 - DNA, 25 bp, Homo sapien
taaccacaaatattgcttaagaaaa

SEQ ID NO: 1627176 - DNA, 25 bp, Homo sapien
taaattcagctgacttggctacaag

SEQ ID NO: 1627177 - DNA, 25 bp, Homo sapien
tctgagtatattttattcgtaagaa

SEQ ID NO: 1627178 - DNA, 25 bp, Homo sapien
acttggctacaagagacggagcttg

SEQ ID NO: 1627179 - DNA, 25 bp, Homo sapien
gcatctgaaggtgcatggtaatcgg

SEQ ID NO: 1627180 - DNA, 25 bp, Homo sapien
tagcatctgaaggtgcatggtaatc

SEQ ID NO: 1627181 - DNA, 25 bp, Homo sapien
atctgaaggtgcatggtaatcggct

SEQ ID NO: 1627182 - DNA, 25 bp, Homo sapien
ccattagcatctgaaggtgcatggt

SEQ ID NO: 1627183 - DNA, 25 bp, Homo sapien
tcagtctttggtgatgcgtcaccta

SEQ ID NO: 1627184 - DNA, 25 bp, Homo sapien
tacagttagttagactgaaattcga

SEQ ID NO: 1627185 - DNA, 25 bp, Homo sapien
tcgaaagtttcactggagttgttgt

SEQ ID NO: 1627186 - DNA, 25 bp, Homo sapien
tgcgtcacctagaccctgtgctcag

SEQ ID NO: 1627187 - DNA, 25 bp, Homo sapien
aagactgtgtctccaaaaagaaaag

SEQ ID NO: 1627188 - DNA, 25 bp, Homo sapien
agactgtgtctccaaaaagaaaaga

SEQ ID NO: 1627189 - DNA, 25 bp, Homo sapien
gactgtgtctccaaaaagaaaagaa

SEQ ID NO: 1627190 - DNA, 25 bp, Homo sapien
cccagaggtgtacagtgagggcgtg

SEQ ID NO: 1627191 - DNA, 25 bp, Homo sapien
atcaagggtggacccagaggtgtac

SEQ ID NO: 1627192 - DNA, 25 bp, Homo sapien
caatcaagggtggacccagaggtgt

SEQ ID NO: 1627193 - DNA, 25 bp, Homo sapien
aacaatcaagggtggacccagaggt

SEQ ID NO: 1627194 - DNA, 25 bp, Homo sapien
ctgccagcagggtgagacactgtga

SEQ ID NO: 1627195 - DNA, 25 bp, Homo sapien
cactgtgacagaggtcttggagtca

SEQ ID NO: 1627196 - DNA, 25 bp, Homo sapien
tcttggagtcaggacaggtgaggac

SEQ ID NO: 1627197 - DNA, 25 bp, Homo sapien
gtgaggacgccgtgcctgcctgcac

SEQ ID NO: 1627198 - DNA, 25 bp, Homo sapien
caagcggcccttctgttggtactta

SEQ ID NO: 1627199 - DNA, 25 bp, Homo sapien
ggccaagcggcccttctgttggtac

SEQ ID NO: 1627200 - DNA, 25 bp, Homo sapien
agaggccaagcggcccttctgttgg

SEQ ID NO: 1627201 - DNA, 25 bp, Homo sapien
tcacagaggccaagcggcccttctg

SEQ ID NO: 1627202 - DNA, 25 bp, Homo sapien
tcaagacgggaatgactacgggcac

SEQ ID NO: 1627203 - DNA, 25 bp, Homo sapien
ctgagcccatccaaacttgtagtgg

SEQ ID NO: 1627204 - DNA, 25 bp, Homo sapien
cttgctgatgattggagccagaacc

SEQ ID NO: 1627205 - DNA, 25 bp, Homo sapien
taaaaggccgcttaatataaacagc

SEQ ID NO: 1627206 - DNA, 25 bp, Homo sapien
tccttgtaaatctcatcacgatgag

SEQ ID NO: 1627207 - DNA, 25 bp, Homo sapien
ccttgtaaatctcatcacgatgagt

SEQ ID NO: 1627208 - DNA, 25 bp, Homo sapien
ttccttgtaaatctcatcacgatga

SEQ ID NO: 1627209 - DNA, 25 bp, Homo sapien
cttgtaaatctcatcacgatgagtc

SEQ ID NO: 1627210 - DNA, 25 bp, Homo sapien
tcaggccataaaacagccatgcggc

SEQ ID NO: 1627211 - DNA, 25 bp, Homo sapien
caccagggatgatataaatcgttgc

SEQ ID NO: 1627212 - DNA, 25 bp, Homo sapien
tgatataaatcgttgctatgatacc

SEQ ID NO: 1627213 - DNA, 25 bp, Homo sapien
aattgactaacgagtttatgtcacc

SEQ ID NO: 1627214 - DNA, 25 bp, Homo sapien
tgaggcgcctgacgctgatgtaaga

SEQ ID NO: 1627215 - DNA, 25 bp, Homo sapien
ctcccggcccgccacgtaaatgagt

SEQ ID NO: 1627216 - DNA, 25 bp, Homo sapien
agtgaggcgcctgacgctgatgtaa

SEQ ID NO: 1627217 - DNA, 25 bp, Homo sapien
gcgcctgacgctgatgtaagaaagc

SEQ ID NO: 1627218 - DNA, 25 bp, Homo sapien
gaggtgatacatatgccattccaca

SEQ ID NO: 1627219 - DNA, 25 bp, Homo sapien
agtatgtgaggtgatacatatgcca

SEQ ID NO: 1627220 - DNA, 25 bp, Homo sapien
aatgttctcagcataaagaagtatg

SEQ ID NO: 1627221 - DNA, 25 bp, Homo sapien
taatgttctcagcataaagaagtat

SEQ ID NO: 1627222 - DNA, 25 bp, Homo sapien
cgctgtgaagcaggtcccgttagca

SEQ ID NO: 1627223 - DNA, 25 bp, Homo sapien
gcaccgatggttgaaaatgccacaa

SEQ ID NO: 1627224 - DNA, 25 bp, Homo sapien
tggaacgatccaagaagcaggatag

SEQ ID NO: 1627225 - DNA, 25 bp, Homo sapien
gcaggatagagaacacggtcaccaa

SEQ ID NO: 1627226 - DNA, 25 bp, Homo sapien
ccagcagcgatgcccgggcactcac

SEQ ID NO: 1627227 - DNA, 25 bp, Homo sapien
gccagcagcgatgcccgggcactca

SEQ ID NO: 1627228 - DNA, 25 bp, Homo sapien
agcccccgccagcagcgatgcccgg

SEQ ID NO: 1627229 - DNA, 25 bp, Homo sapien
cccgccagcagcgatgcccgggcac

SEQ ID NO: 1627230 - DNA, 25 bp, Homo sapien
gatcccgatgataatggccaaaggc

SEQ ID NO: 1627231 - DNA, 25 bp, Homo sapien
atgaggatgtagcacgccgtcacca

SEQ ID NO: 1627232 - DNA, 25 bp, Homo sapien
gcagtcatcacggtgaagtaggaca

SEQ ID NO: 1627233 - DNA, 25 bp, Homo sapien
taggacacgttcatgaggatgtagc

SEQ ID NO: 1627234 - DNA, 25 bp, Homo sapien
gcccagcaggaacataagacatttt

SEQ ID NO: 1627235 - DNA, 25 bp, Homo sapien
caaactctaagcgtgcatagtgagc

SEQ ID NO: 1627236 - DNA, 25 bp, Homo sapien
cagactccagagcagttcacatgga

SEQ ID NO: 1627237 - DNA, 25 bp, Homo sapien
cataagaaaccattcgctggccggg

SEQ ID NO: 1627238 - DNA, 25 bp, Homo sapien
gggaagggcatcatggaatacccag

SEQ ID NO: 1627239 - DNA, 25 bp, Homo sapien
gaagagaaatcaggctgcccggcta

SEQ ID NO: 1627240 - DNA, 25 bp, Homo sapien
gaatacccagggaaatagctccagc

SEQ ID NO: 1627241 - DNA, 25 bp, Homo sapien
gaaataattcactgtcgggaagggc

SEQ ID NO: 1627242 - DNA, 25 bp, Homo sapien
taagttcttctgtgatgtaattgag

SEQ ID NO: 1627243 - DNA, 25 bp, Homo sapien
aagttcttctgtgatgtaattgagt

SEQ ID NO: 1627244 - DNA, 25 bp, Homo sapien
tttctaagttcttctgtgatgtaat

SEQ ID NO: 1627245 - DNA, 25 bp, Homo sapien
tctaagttcttctgtgatgtaattg

SEQ ID NO: 1627246 - DNA, 25 bp, Homo sapien
tgggcgccctcgaaagaattatcaa

SEQ ID NO: 1627247 - DNA, 25 bp, Homo sapien
taaaacgccaggctgatggctccca

SEQ ID NO: 1627248 - DNA, 25 bp, Homo sapien
catccatcataggcccagagtccat

SEQ ID NO: 1627249 - DNA, 25 bp, Homo sapien
ggcgccctcgaaagaattatcaaaa

SEQ ID NO: 1627250 - DNA, 25 bp, Homo sapien
ccagacagtgaacggcgggtgtcaa

SEQ ID NO: 1627251 - DNA, 25 bp, Homo sapien
tgtcaaccgggcagatcttgagtgt

SEQ ID NO: 1627252 - DNA, 25 bp, Homo sapien
aagccagacagtgaacggcgggtgt

SEQ ID NO: 1627253 - DNA, 25 bp, Homo sapien
ggcgggtgtcaaccgggcagatctt

SEQ ID NO: 1627254 - DNA, 25 bp, Homo sapien
cagcttggccgcggtgaagatgttc

SEQ ID NO: 1627255 - DNA, 25 bp, Homo sapien
gatcaccagcttggccgcggtgaag

SEQ ID NO: 1627256 - DNA, 25 bp, Homo sapien
cacgatcaccagcttggccgcggtg

SEQ ID NO: 1627257 - DNA, 25 bp, Homo sapien
ccagcttggccgcggtgaagatgtt

SEQ ID NO: 1627258 - DNA, 25 bp, Homo sapien
ttcccagccgcacgctcagtgagtt

SEQ ID NO: 1627259 - DNA, 25 bp, Homo sapien
cccagccgcacgctcagtgagttca

SEQ ID NO: 1627260 - DNA, 25 bp, Homo sapien
cttcccagccgcacgctcagtgagt

SEQ ID NO: 1627261 - DNA, 25 bp, Homo sapien
tcccagccgcacgctcagtgagttc

SEQ ID NO: 1627262 - DNA, 25 bp, Homo sapien
tggtcatccttttccaccgagtgcg

SEQ ID NO: 1627263 - DNA, 25 bp, Homo sapien
gatgtccctgccagatcgccctcat

SEQ ID NO: 1627264 - DNA, 25 bp, Homo sapien
ggatggtcatccttttccaccgagt

SEQ ID NO: 1627265 - DNA, 25 bp, Homo sapien
tcatccttttccaccgagtgcgcag

SEQ ID NO: 1627266 - DNA, 25 bp, Homo sapien
ccctgccctgggctcaggtactcac

SEQ ID NO: 1627267 - DNA, 25 bp, Homo sapien
gatcattgtgccaagctccgcaaag

SEQ ID NO: 1627268 - DNA, 25 bp, Homo sapien
ggcttgcagcccacatagaagggcg

SEQ ID NO: 1627269 - DNA, 25 bp, Homo sapien
agggcgcacacacatactcggagaa

SEQ ID NO: 1627270 - DNA, 25 bp, Homo sapien
ggcggccaggcatttcacaacgatt

SEQ ID NO: 1627271 - DNA, 25 bp, Homo sapien
ccacaggccccttgtgaggcactgc

SEQ ID NO: 1627272 - DNA, 25 bp, Homo sapien
agccttcctcccaccggaggctgcg

SEQ ID NO: 1627273 - DNA, 25 bp, Homo sapien
ctgcgctcgtatggaggggcccacc

SEQ ID NO: 1627274 - DNA, 25 bp, Homo sapien
cgtggtccgccctcgctggacggcc

SEQ ID NO: 1627275 - DNA, 25 bp, Homo sapien
ggaaacgaagatcccagagccaatg

SEQ ID NO: 1627276 - DNA, 25 bp, Homo sapien
tccgtgttgctgagcacagacttgg

SEQ ID NO: 1627277 - DNA, 25 bp, Homo sapien
cagagccaatgatggtgcccacgat

SEQ ID NO: 1627278 - DNA, 25 bp, Homo sapien
aagccgcccatatgatgaggcaggg

SEQ ID NO: 1627279 - DNA, 25 bp, Homo sapien
tcaagccctaaagccttggtgccgt

SEQ ID NO: 1627280 - DNA, 25 bp, Homo sapien
cggtcaagccctaaagccttggtgc

SEQ ID NO: 1627281 - DNA, 25 bp, Homo sapien
ctccggtcaagccctaaagccttgg

SEQ ID NO: 1627282 - DNA, 25 bp, Homo sapien
aggccattgccagccctccggtcaa

SEQ ID NO: 1627283 - DNA, 25 bp, Homo sapien
tctctccgctttctcaggccagtat

SEQ ID NO: 1627284 - DNA, 25 bp, Homo sapien
cttttggagactggtggtcttaggc

SEQ ID NO: 1627285 - DNA, 25 bp, Homo sapien
agactggtggtcttaggctcttggc

SEQ ID NO: 1627286 - DNA, 25 bp, Homo sapien
ggctcttggctctggatcgacttct

SEQ ID NO: 1627287 - DNA, 25 bp, Homo sapien
gtttcctcctgctggttccaggaga

SEQ ID NO: 1627288 - DNA, 25 bp, Homo sapien
agcagcagcagacaagacgcaagtg

SEQ ID NO: 1627289 - DNA, 25 bp, Homo sapien
gagggcgcacagctaaatcttggtt

SEQ ID NO: 1627290 - DNA, 25 bp, Homo sapien
caagtgcaagctcggcctggactag

SEQ ID NO: 1627291 - DNA, 25 bp, Homo sapien
cacagctaaatcttggttcagcagc

SEQ ID NO: 1627292 - DNA, 25 bp, Homo sapien
aaaaccatgcactcctgtaccctct

SEQ ID NO: 1627293 - DNA, 25 bp, Homo sapien
aaccatgcactcctgtaccctctct

SEQ ID NO: 1627294 - DNA, 25 bp, Homo sapien
taggagaaaaccatgcactcctgta

SEQ ID NO: 1627295 - DNA, 25 bp, Homo sapien
ggagaaaaccatgcactcctgtacc

SEQ ID NO: 1627296 - DNA, 25 bp, Homo sapien
ctgaccgcccgtgcctgcacggtcc

SEQ ID NO: 1627297 - DNA, 25 bp, Homo sapien
gcggcccagctgaccgcccgtgcct

SEQ ID NO: 1627298 - DNA, 25 bp, Homo sapien
accgcccgtgcctgcacggtccaac

SEQ ID NO: 1627299 - DNA, 25 bp, Homo sapien
agctgaccgcccgtgcctgcacggt

SEQ ID NO: 1627300 - DNA, 25 bp, Homo sapien
atgaatgtccgggaccagccctctg

SEQ ID NO: 1627301 - DNA, 25 bp, Homo sapien
tgttccatgaatgtccgggaccagc

SEQ ID NO: 1627302 - DNA, 25 bp, Homo sapien
aggatcagggtctgaacctgcgacg

SEQ ID NO: 1627303 - DNA, 25 bp, Homo sapien
agggcgagcaacaggcgcctcctca

SEQ ID NO: 1627304 - DNA, 25 bp, Homo sapien
gaaaaccaagagaggcctaacaagc

SEQ ID NO: 1627305 - DNA, 25 bp, Homo sapien
ggcgtggtgagacacaccctgtaat

SEQ ID NO: 1627306 - DNA, 25 bp, Homo sapien
gagaggcctaacaagctgtacccat

SEQ ID NO: 1627307 - DNA, 25 bp, Homo sapien
ggccatggactcacaccttgagaaa

SEQ ID NO: 1627308 - DNA, 25 bp, Homo sapien
gcagagaggtgccacaaacctgggc

SEQ ID NO: 1627309 - DNA, 25 bp, Homo sapien
tgccacaaacctgggcacactgagc

SEQ ID NO: 1627310 - DNA, 25 bp, Homo sapien
gacccagcagagaggtgccacaaac

SEQ ID NO: 1627311 - DNA, 25 bp, Homo sapien
gaggtgccacaaacctgggcacact

SEQ ID NO: 1627312 - DNA, 25 bp, Homo sapien
cgttaagggcattcaggacagctct

SEQ ID NO: 1627313 - DNA, 25 bp, Homo sapien
ttcagtggcgttaagggcattcagg

SEQ ID NO: 1627314 - DNA, 25 bp, Homo sapien
gacagctctcatgacagactcacac

SEQ ID NO: 1627315 - DNA, 25 bp, Homo sapien
tcaggacagctctcatgacagactc

SEQ ID NO: 1627316 - DNA, 25 bp, Homo sapien
caatgccgtatgaaacctcaccagg

SEQ ID NO: 1627317 - DNA, 25 bp, Homo sapien
tgcagagcggccgtaaatgcctttg

SEQ ID NO: 1627318 - DNA, 25 bp, Homo sapien
caggagtccccatacttgcaaagta

SEQ ID NO: 1627319 - DNA, 25 bp, Homo sapien
tctctaggtcacgatggcgggagca

SEQ ID NO: 1627320 - DNA, 25 bp, Homo sapien
gaataaagtacttgctcaggaggat

SEQ ID NO: 1627321 - DNA, 25 bp, Homo sapien
caacttagagggcatgaacagcagc

SEQ ID NO: 1627322 - DNA, 25 bp, Homo sapien
gagagggcagaaaaggtttgtacaa

SEQ ID NO: 1627323 - DNA, 25 bp, Homo sapien
tcaggaggatagagaagggctaggg

SEQ ID NO: 1627324 - DNA, 25 bp, Homo sapien
gcagcgttcagtgggcttacgcacc

SEQ ID NO: 1627325 - DNA, 25 bp, Homo sapien
gggctcccgcagattctagcaggtg

SEQ ID NO: 1627326 - DNA, 25 bp, Homo sapien
gcaggtctgcctgagagacgccatt

SEQ ID NO: 1627327 - DNA, 25 bp, Homo sapien
gtcataggagcagacatcgcagccg

SEQ ID NO: 1627328 - DNA, 25 bp, Homo sapien
cttccgctccatacagcccagagct

SEQ ID NO: 1627329 - DNA, 25 bp, Homo sapien
cttccacaggtcttccgctccatac

SEQ ID NO: 1627330 - DNA, 25 bp, Homo sapien
taagagcgagtcagggggtgaggtg

SEQ ID NO: 1627331 - DNA, 25 bp, Homo sapien
tccacaggtcttccgctccatacag

SEQ ID NO: 1627332 - DNA, 25 bp, Homo sapien
gattggcctggcccatgtgccggga

SEQ ID NO: 1627333 - DNA, 25 bp, Homo sapien
ttggcctggcccatgtgccgggatg

SEQ ID NO: 1627334 - DNA, 25 bp, Homo sapien
tgaggagataagactcattgccaag

SEQ ID NO: 1627335 - DNA, 25 bp, Homo sapien
ctgaggagataagactcattgccaa

SEQ ID NO: 1627336 - DNA, 25 bp, Homo sapien
ccagcagacggtgactgatgtcccc

SEQ ID NO: 1627337 - DNA, 25 bp, Homo sapien
cctgccggtactgggctgtcttgcc

SEQ ID NO: 1627338 - DNA, 25 bp, Homo sapien
gtgcaggtgccgcatctcctgccgg

SEQ ID NO: 1627339 - DNA, 25 bp, Homo sapien
tgtcttgccggcgaagtcctcctgc

SEQ ID NO: 1627340 - DNA, 25 bp, Homo sapien
ctgtgccttgcttcatatccttttt

SEQ ID NO: 1627341 - DNA, 25 bp, Homo sapien
ccactgtgccttgcttcatatcctt

SEQ ID NO: 1627342 - DNA, 25 bp, Homo sapien
tgagtcactgagattacagcgtgag

SEQ ID NO: 1627343 - DNA, 25 bp, Homo sapien
ccttgcttcatatccttttttctta

SEQ ID NO: 1627344 - DNA, 25 bp, Homo sapien
tcccaggcgaatgttgctttttatg

SEQ ID NO: 1627345 - DNA, 25 bp, Homo sapien
gactttattaagcactccatccttc

SEQ ID NO: 1627346 - DNA, 25 bp, Homo sapien
ttatgactttattaagcactccatc

SEQ ID NO: 1627347 - DNA, 25 bp, Homo sapien
tttcccaggcgaatgttgcttttta

SEQ ID NO: 1627348 - DNA, 25 bp, Homo sapien
tattcacaggcaaggaaatcagtat

SEQ ID NO: 1627349 - DNA, 25 bp, Homo sapien
gatagctaccagaggctaggatgca

SEQ ID NO: 1627350 - DNA, 25 bp, Homo sapien
taagttatcatgttcgacagcagag

SEQ ID NO: 1627351 - DNA, 25 bp, Homo sapien
aaagttgacctcatggaggtggaga

SEQ ID NO: 1627352 - DNA, 25 bp, Homo sapien
tgggttatgttttctgccaggccaa

SEQ ID NO: 1627353 - DNA, 25 bp, Homo sapien
tgagcagacatttcgttccccatgg

SEQ ID NO: 1627354 - DNA, 25 bp, Homo sapien
cataagactgtcacgttcctgggtt

SEQ ID NO: 1627355 - DNA, 25 bp, Homo sapien
tttgccaggtactgatgagcagaca

SEQ ID NO: 1627356 - DNA, 25 bp, Homo sapien
gttcttctctaacagcaggctcttc

SEQ ID NO: 1627357 - DNA, 25 bp, Homo sapien
tcttcttctgcgcttgcaggactgt

SEQ ID NO: 1627358 - DNA, 25 bp, Homo sapien
tgtgctcgttcaagttcggcttcca

SEQ ID NO: 1627359 - DNA, 25 bp, Homo sapien
aaactgttcttctctaacagcaggc

SEQ ID NO: 1627360 - DNA, 25 bp, Homo sapien
cagccctttctttctcttcttcctt

SEQ ID NO: 1627361 - DNA, 25 bp, Homo sapien
tcagccctttctttctcttcttcct

SEQ ID NO: 1627362 - DNA, 25 bp, Homo sapien
ctcagccctttctttctcttcttcc

SEQ ID NO: 1627363 - DNA, 25 bp, Homo sapien
acaaaaacattacatgctcgtatcc

SEQ ID NO: 1627364 - DNA, 25 bp, Homo sapien
aaaacattacatgctcgtatccagc

SEQ ID NO: 1627365 - DNA, 25 bp, Homo sapien
acatgctcgtatccagcacaatgaa

SEQ ID NO: 1627366 - DNA, 25 bp, Homo sapien
cattacatgctcgtatccagcacaa

SEQ ID NO: 1627367 - DNA, 25 bp, Homo sapien
cagagctcgaatatgtggaattcca

SEQ ID NO: 1627368 - DNA, 25 bp, Homo sapien
cacttcggagggcaagggagcagaa

SEQ ID NO: 1627369 - DNA, 25 bp, Homo sapien
cccatgttggcatcataatagagat

SEQ ID NO: 1627370 - DNA, 25 bp, Homo sapien
gataggccacatgcagaatactcac

SEQ ID NO: 1627371 - DNA, 25 bp, Homo sapien
tttggagggcacttcggagggcaag

SEQ ID NO: 1627372 - DNA, 25 bp, Homo sapien
tgaaccagcgctcacaccgggggaa

SEQ ID NO: 1627373 - DNA, 25 bp, Homo sapien
agctgctgaaccagcgctcacaccg

SEQ ID NO: 1627374 - DNA, 25 bp, Homo sapien
gctgaaccagcgctcacaccggggg

SEQ ID NO: 1627375 - DNA, 25 bp, Homo sapien
accagcgctcacaccgggggaatgt

SEQ ID NO: 1627376 - DNA, 25 bp, Homo sapien
ccctcaactgacacagtacacacca

SEQ ID NO: 1627377 - DNA, 25 bp, Homo sapien
acaccaagtaccagtagttcctctt

SEQ ID NO: 1627378 - DNA, 25 bp, Homo sapien
agggcagaaaatccctcaactgaca

SEQ ID NO: 1627379 - DNA, 25 bp, Homo sapien
cagtacacaccaagtaccagtagtt

SEQ ID NO: 1627380 - DNA, 25 bp, Homo sapien
tttgccatccgagtgtgttttgagt

SEQ ID NO: 1627381 - DNA, 25 bp, Homo sapien
cagctgttccctgttctccgccagc

SEQ ID NO: 1627382 - DNA, 25 bp, Homo sapien
catttggcacgtaaaatctccagct

SEQ ID NO: 1627383 - DNA, 25 bp, Homo sapien
tatgaacttccactgcgattttgcc

SEQ ID NO: 1627384 - DNA, 25 bp, Homo sapien
tttcctttgctgaatctccaactgc

SEQ ID NO: 1627385 - DNA, 25 bp, Homo sapien
gctcctggtggctgtccttggcttt

SEQ ID NO: 1627386 - DNA, 25 bp, Homo sapien
caactgctccagcaacaacttgttt

SEQ ID NO: 1627387 - DNA, 25 bp, Homo sapien
cttcttggaggcgctcctggtggct

SEQ ID NO: 1627388 - DNA, 25 bp, Homo sapien
taccgagagcggcaaggtctgccca

SEQ ID NO: 1627389 - DNA, 25 bp, Homo sapien
catgcaggtttagcagccgtgcagg

SEQ ID NO: 1627390 - DNA, 25 bp, Homo sapien
gcaggtgtgcaggtaccgagagcgg

SEQ ID NO: 1627391 - DNA, 25 bp, Homo sapien
agtgctgcatgcaggtttagcagcc

SEQ ID NO: 1627392 - DNA, 25 bp, Homo sapien
ctgacgcatcggtgaccacaaaatc

SEQ ID NO: 1627393 - DNA, 25 bp, Homo sapien
ggagagccaatggtaagaatgctgt

SEQ ID NO: 1627394 - DNA, 25 bp, Homo sapien
tgacgcatcggtgaccacaaaatca

SEQ ID NO: 1627395 - DNA, 25 bp, Homo sapien
tgaccacaaaatcagggagagccaa

SEQ ID NO: 1627396 - DNA, 25 bp, Homo sapien
tcttatttaactcttggtgcaattc

SEQ ID NO: 1627397 - DNA, 25 bp, Homo sapien
ggtaacagcactactcttatttaac

SEQ ID NO: 1627398 - DNA, 25 bp, Homo sapien
accacttcttggactcgcatcctaa

SEQ ID NO: 1627399 - DNA, 25 bp, Homo sapien
tggactcgcatcctaaacattctca

SEQ ID NO: 1627400 - DNA, 25 bp, Homo sapien
ctttcatcatatcttcataagccag

SEQ ID NO: 1627401 - DNA, 25 bp, Homo sapien
cttgagggtggcattgagctcgtcc

SEQ ID NO: 1627402 - DNA, 25 bp, Homo sapien
ttcataagccagcaacaatggtgac

SEQ ID NO: 1627403 - DNA, 25 bp, Homo sapien
gagggtggcattgagctcgtccttc

SEQ ID NO: 1627404 - DNA, 25 bp, Homo sapien
cagggtggtatagggcccttggatg

SEQ ID NO: 1627405 - DNA, 25 bp, Homo sapien
gtggtatagggcccttggatgggag

SEQ ID NO: 1627406 - DNA, 25 bp, Homo sapien
ggtatagggcccttggatgggaggc

SEQ ID NO: 1627407 - DNA, 25 bp, Homo sapien
caaccagggtggtatagggcccttg

SEQ ID NO: 1627408 - DNA, 25 bp, Homo sapien
aactcgaaggttcccggtgctgtgt

SEQ ID NO: 1627409 - DNA, 25 bp, Homo sapien
cagtctcatcctacacatgtgcagg

SEQ ID NO: 1627410 - DNA, 25 bp, Homo sapien
tccattgtggctgggcagaactcga

SEQ ID NO: 1627411 - DNA, 25 bp, Homo sapien
caccctggtcatggtaggtctgtag

SEQ ID NO: 1627412 - DNA, 25 bp, Homo sapien
gccttggacagagcttttcttacat

SEQ ID NO: 1627413 - DNA, 25 bp, Homo sapien
taaataagaacctctcaagattgga

SEQ ID NO: 1627414 - DNA, 25 bp, Homo sapien
agaatggtccttagaaacattgtgc

SEQ ID NO: 1627415 - DNA, 25 bp, Homo sapien
gaaggaggcaagaaacagaatggtc

SEQ ID NO: 1627416 - DNA, 25 bp, Homo sapien
aagctgattttcacaatcggaaacg

SEQ ID NO: 1627417 - DNA, 25 bp, Homo sapien
cttgagcttgttttcgcagataaag

SEQ ID NO: 1627418 - DNA, 25 bp, Homo sapien
tgtctgatatcgactgagttctaca

SEQ ID NO: 1627419 - DNA, 25 bp, Homo sapien
cagataaagtaattcaggtgcagca

SEQ ID NO: 1627420 - DNA, 25 bp, Homo sapien
agttctacattcaaacgatggacag

SEQ ID NO: 1627421 - DNA, 25 bp, Homo sapien
cctgtgacgacgccttctcagcctc

SEQ ID NO: 1627422 - DNA, 25 bp, Homo sapien
cttcctgtgacgacgccttctcagc

SEQ ID NO: 1627423 - DNA, 25 bp, Homo sapien
tcctgtgacgacgccttctcagcct

SEQ ID NO: 1627424 - DNA, 25 bp, Homo sapien
ttcctgtgacgacgccttctcagcc

SEQ ID NO: 1627425 - DNA, 25 bp, Homo sapien
tcaagggtaaggctttgattcatat

SEQ ID NO: 1627426 - DNA, 25 bp, Homo sapien
ctttgacgtgctctaccagttatat

SEQ ID NO: 1627427 - DNA, 25 bp, Homo sapien
tatctttgacgtgctctaccagtta

SEQ ID NO: 1627428 - DNA, 25 bp, Homo sapien
tattgtttaggtccatattttcttc

SEQ ID NO: 1627429 - DNA, 25 bp, Homo sapien
cccctcctcaggcagaacacacagg

SEQ ID NO: 1627430 - DNA, 25 bp, Homo sapien
cagcaacagcagaaatgtgtgcccc

SEQ ID NO: 1627431 - DNA, 25 bp, Homo sapien
agcagaaatgtgtgcccctcctcag

SEQ ID NO: 1627432 - DNA, 25 bp, Homo sapien
cctcctcaggcagaacacacaggcc

SEQ ID NO: 1627433 - DNA, 25 bp, Homo sapien
gtgcagtaaacagaggtagcatccc

SEQ ID NO: 1627434 - DNA, 25 bp, Homo sapien
ctgtccatccccatcagttgctgga

SEQ ID NO: 1627435 - DNA, 25 bp, Homo sapien
gggtgcagtaaacagaggtagcatc

SEQ ID NO: 1627436 - DNA, 25 bp, Homo sapien
cagtaaacagaggtagcatccccat

SEQ ID NO: 1627437 - DNA, 25 bp, Homo sapien
agacatttccgaccagaaaagcgac

SEQ ID NO: 1627438 - DNA, 25 bp, Homo sapien
gcaccacagacatttccgaccagaa

SEQ ID NO: 1627439 - DNA, 25 bp, Homo sapien
ccacagacatttccgaccagaaaag

SEQ ID NO: 1627440 - DNA, 25 bp, Homo sapien
cactggcaccacagacatttccgac

SEQ ID NO: 1627441 - DNA, 25 bp, Homo sapien
aattaatctggatattctccaaaac

SEQ ID NO: 1627442 - DNA, 25 bp, Homo sapien
aatcataatataattcaaaaggcaa

SEQ ID NO: 1627443 - DNA, 25 bp, Homo sapien
tccaaaacaagcttttcaatcataa

SEQ ID NO: 1627444 - DNA, 25 bp, Homo sapien
tattttcagataaaattaatctgga

SEQ ID NO: 1627445 - DNA, 25 bp, Homo sapien
tctcacataatggaggtttttcatc

SEQ ID NO: 1627446 - DNA, 25 bp, Homo sapien
ttctcacataatggaggtttttcat

SEQ ID NO: 1627447 - DNA, 25 bp, Homo sapien
agggtggaggtttctcacataatgg

SEQ ID NO: 1627448 - DNA, 25 bp, Homo sapien
gggagggtggaggtttctcacataa

SEQ ID NO: 1627449 - DNA, 25 bp, Homo sapien
taaattcagaacagggtgtttacca

SEQ ID NO: 1627450 - DNA, 25 bp, Homo sapien
aaattcagaacagggtgtttaccat

SEQ ID NO: 1627451 - DNA, 25 bp, Homo sapien
gagaaatattttcatcgtcttcact

SEQ ID NO: 1627452 - DNA, 25 bp, Homo sapien
ttgttgtgtccgctgtggtgcagga

SEQ ID NO: 1627453 - DNA, 25 bp, Homo sapien
tttgttgtgtccgctgtggtgcagg

SEQ ID NO: 1627454 - DNA, 25 bp, Homo sapien
gtttcatcccaacatggcagggaca

SEQ ID NO: 1627455 - DNA, 25 bp, Homo sapien
tcccctgggaggactctcattgaag

SEQ ID NO: 1627456 - DNA, 25 bp, Homo sapien
tctatgtgggacaagcagtgctgac

SEQ ID NO: 1627457 - DNA, 25 bp, Homo sapien
tgactgagagtagctcctatatagg

SEQ ID NO: 1627458 - DNA, 25 bp, Homo sapien
caggaatgggacctgccgctgatga

SEQ ID NO: 1627459 - DNA, 25 bp, Homo sapien
ggagatatttccattggcaggagcc

SEQ ID NO: 1627460 - DNA, 25 bp, Homo sapien
ccaggaatgggacctgccgctgatg

SEQ ID NO: 1627461 - DNA, 25 bp, Homo sapien
ctgatgaggaggagatatttccatt

SEQ ID NO: 1627462 - DNA, 25 bp, Homo sapien
actacaagcgtatgacaccaagccc

SEQ ID NO: 1627463 - DNA, 25 bp, Homo sapien
ggactagcaagacgcccatgagaag

SEQ ID NO: 1627464 - DNA, 25 bp, Homo sapien
catggtaaactgtgactggcgctgt

SEQ ID NO: 1627465 - DNA, 25 bp, Homo sapien
tgcactcgacctgaaccagttgtta

SEQ ID NO: 1627466 - DNA, 25 bp, Homo sapien
gaaccaattaagtctctgtcatcag

SEQ ID NO: 1627467 - DNA, 25 bp, Homo sapien
aatcttggcaatggttaactctgtg

SEQ ID NO: 1627468 - DNA, 25 bp, Homo sapien
gagtggcacggttgtacagtaaaat

SEQ ID NO: 1627469 - DNA, 25 bp, Homo sapien
tggacaatcgtttggcagtatctac

SEQ ID NO: 1627470 - DNA, 25 bp, Homo sapien
agttaacatcagggtgaatgtcaag

SEQ ID NO: 1627471 - DNA, 25 bp, Homo sapien
gttaacatcagggtgaatgtcaaga

SEQ ID NO: 1627472 - DNA, 25 bp, Homo sapien
aagttaacatcagggtgaatgtcaa

SEQ ID NO: 1627473 - DNA, 25 bp, Homo sapien
aaagttaacatcagggtgaatgtca

SEQ ID NO: 1627474 - DNA, 25 bp, Homo sapien
gcacagcgtacaggtcatcactgtg

SEQ ID NO: 1627475 - DNA, 25 bp, Homo sapien
ggcacagcgtacaggtcatcactgt

SEQ ID NO: 1627476 - DNA, 25 bp, Homo sapien
tcttcgtccccatagtccagtgttt

SEQ ID NO: 1627477 - DNA, 25 bp, Homo sapien
tgagtttcaatgtcctcttcgtccc

SEQ ID NO: 1627478 - DNA, 25 bp, Homo sapien
gtccagtgtttcaaaggatggcaaa

SEQ ID NO: 1627479 - DNA, 25 bp, Homo sapien
aattccttgccgctggatgacagct

SEQ ID NO: 1627480 - DNA, 25 bp, Homo sapien
tgtgtccggcccatacagtaaattc

SEQ ID NO: 1627481 - DNA, 25 bp, Homo sapien
gtctacatacatactgcacaaaatc

SEQ ID NO: 1627482 - DNA, 25 bp, Homo sapien
taaaacccactgtctaaatttgcat

SEQ ID NO: 1627483 - DNA, 25 bp, Homo sapien
tcaaatggtgtgaacattttgtgtc

SEQ ID NO: 1627484 - DNA, 25 bp, Homo sapien
tgtcgccagaatggctgctgccaga

SEQ ID NO: 1627485 - DNA, 25 bp, Homo sapien
tgctcacatcactctcagaccggga

SEQ ID NO: 1627486 - DNA, 25 bp, Homo sapien
gaggctgaggaatagcaaccgtccg

SEQ ID NO: 1627487 - DNA, 25 bp, Homo sapien
caaccgtccgcccagtcaatgttgt

SEQ ID NO: 1627488 - DNA, 25 bp, Homo sapien
tggagacagtgagacatgaacattc

SEQ ID NO: 1627489 - DNA, 25 bp, Homo sapien
tgagacatgaacattccaggtgaat

SEQ ID NO: 1627490 - DNA, 25 bp, Homo sapien
ctgcggacaaaaacatcccatggag

SEQ ID NO: 1627491 - DNA, 25 bp, Homo sapien
aacatcccatggagacagtgagaca

SEQ ID NO: 1627492 - DNA, 25 bp, Homo sapien
tggtctctctggagatgggttgggg

SEQ ID NO: 1627493 - DNA, 25 bp, Homo sapien
aggaggtgtgcgtggcacagctgcc

SEQ ID NO: 1627494 - DNA, 25 bp, Homo sapien
gccttcggagcaacgctggctgcag

SEQ ID NO: 1627495 - DNA, 25 bp, Homo sapien
ctgccttcggagcaacgctggctgc

SEQ ID NO: 1627496 - DNA, 25 bp, Homo sapien
cagctgccttcggagcaacgctggc

SEQ ID NO: 1627497 - DNA, 25 bp, Homo sapien
tctccgttttgctagactagaggca

SEQ ID NO: 1627498 - DNA, 25 bp, Homo sapien
gattctccgttttgctagactagag

SEQ ID NO: 1627499 - DNA, 25 bp, Homo sapien
ccgttttgctagactagaggcatct

SEQ ID NO: 1627500 - DNA, 25 bp, Homo sapien
gactagaggcatcttcgagggtggg

SEQ ID NO: 1627501 - DNA, 25 bp, Homo sapien
cacctgccaccctgtatttgtcaag

SEQ ID NO: 1627502 - DNA, 25 bp, Homo sapien
cctgtatttgtcaagtgattccaca

SEQ ID NO: 1627503 - DNA, 25 bp, Homo sapien
caccctgtatttgtcaagtgattcc

SEQ ID NO: 1627504 - DNA, 25 bp, Homo sapien
ctgccaccctgtatttgtcaagtga

SEQ ID NO: 1627505 - DNA, 25 bp, Homo sapien
gagacagattgtcccatgagctcaa

SEQ ID NO: 1627506 - DNA, 25 bp, Homo sapien
gaccgtgtggccataagctgtcagt

SEQ ID NO: 1627507 - DNA, 25 bp, Homo sapien
cagtgcagcaggtgtacgtcgtcca

SEQ ID NO: 1627508 - DNA, 25 bp, Homo sapien
ggctgctacgtggagaatggaccta

SEQ ID NO: 1627509 - DNA, 25 bp, Homo sapien
ctcctgcggcctctccgaaatccca

SEQ ID NO: 1627510 - DNA, 25 bp, Homo sapien
tgcggcctctccgaaatcccaggag

SEQ ID NO: 1627511 - DNA, 25 bp, Homo sapien
gaaatgactcctgcggcctctccga

SEQ ID NO: 1627512 - DNA, 25 bp, Homo sapien
cctgcggcctctccgaaatcccagg

SEQ ID NO: 1627513 - DNA, 25 bp, Homo sapien
accactccctaaagcccgccgcagg

SEQ ID NO: 1627514 - DNA, 25 bp, Homo sapien
gggcctggactcatcagcagatcta

SEQ ID NO: 1627515 - DNA, 25 bp, Homo sapien
ccttgcagcgcgaggagaatggacc

SEQ ID NO: 1627516 - DNA, 25 bp, Homo sapien
atcagcagatctatccacagccagg

SEQ ID NO: 1627517 - DNA, 25 bp, Homo sapien
tgttcccttaagtcaagctgagcca

SEQ ID NO: 1627518 - DNA, 25 bp, Homo sapien
tgagccttcgctccttcgaaccgtg

SEQ ID NO: 1627519 - DNA, 25 bp, Homo sapien
gagggcgctcacgtgctgttgcttt

SEQ ID NO: 1627520 - DNA, 25 bp, Homo sapien
tcattgtggttcaggttcaagagca

SEQ ID NO: 1627521 - DNA, 25 bp, Homo sapien
cgtttaaggccgagtcagcaccgga

SEQ ID NO: 1627522 - DNA, 25 bp, Homo sapien
tcacggtgtcatcgaacttatagca

SEQ ID NO: 1627523 - DNA, 25 bp, Homo sapien
gcaccggaaatgttcagggcctgaa

SEQ ID NO: 1627524 - DNA, 25 bp, Homo sapien
tgtatacaagcatggccctaggagc

SEQ ID NO: 1627525 - DNA, 25 bp, Homo sapien
cattcccacggagtatgtggcactc

SEQ ID NO: 1627526 - DNA, 25 bp, Homo sapien
agccccgaccgatgggaggcacaag

SEQ ID NO: 1627527 - DNA, 25 bp, Homo sapien
tggctaagcagatcatggagtacgt

SEQ ID NO: 1627528 - DNA, 25 bp, Homo sapien
agaactgtctgagttgagaaggctg

SEQ ID NO: 1627529 - DNA, 25 bp, Homo sapien
ttcagcagcttcataacctcactca

SEQ ID NO: 1627530 - DNA, 25 bp, Homo sapien
atccacaagctgaatggagacaata

SEQ ID NO: 1627531 - DNA, 25 bp, Homo sapien
cttcagcagcttcataacctcactc

SEQ ID NO: 1627532 - DNA, 25 bp, Homo sapien
cgtcagccacttacaatccacaagc

SEQ ID NO: 1627533 - DNA, 25 bp, Homo sapien
gtccaccgcttgttagccgaaaaca

SEQ ID NO: 1627534 - DNA, 25 bp, Homo sapien
ggaggcgtccaccgcttgttagccg

SEQ ID NO: 1627535 - DNA, 25 bp, Homo sapien
gcgtccaccgcttgttagccgaaaa

SEQ ID NO: 1627536 - DNA, 25 bp, Homo sapien
aggcgtccaccgcttgttagccgaa

SEQ ID NO: 1627537 - DNA, 25 bp, Homo sapien
catctgggggcatacatgctacagc

SEQ ID NO: 1627538 - DNA, 25 bp, Homo sapien
gggacaaatgacacatctgggggca

SEQ ID NO: 1627539 - DNA, 25 bp, Homo sapien
tgaagatctcacttggccttgttca

SEQ ID NO: 1627540 - DNA, 25 bp, Homo sapien
gggcatacatgctacagcagtcatg

SEQ ID NO: 1627541 - DNA, 25 bp, Homo sapien
aagtccgtgactgtcagcttggaga

SEQ ID NO: 1627542 - DNA, 25 bp, Homo sapien
gaagaagtccgtgactgtcagcttg

SEQ ID NO: 1627543 - DNA, 25 bp, Homo sapien
aagaagtccgtgactgtcagcttgg

SEQ ID NO: 1627544 - DNA, 25 bp, Homo sapien
gaagtccgtgactgtcagcttggag

SEQ ID NO: 1627545 - DNA, 25 bp, Homo sapien
gcaccgactcctcgtgatgagccat

SEQ ID NO: 1627546 - DNA, 25 bp, Homo sapien
catggctctgcgcaagtgggacttc

SEQ ID NO: 1627547 - DNA, 25 bp, Homo sapien
ggcgtcgatcaggttcagcaggtca

SEQ ID NO: 1627548 - DNA, 25 bp, Homo sapien
tgtagcacctcaatgctccgcagct

SEQ ID NO: 1627549 - DNA, 25 bp, Homo sapien
taaagcaacgagtaaacaaactgcc

SEQ ID NO: 1627550 - DNA, 25 bp, Homo sapien
tatgtaataacctcacttgtgtcca

SEQ ID NO: 1627551 - DNA, 25 bp, Homo sapien
caagcctcccttcaatgcgtatgta

SEQ ID NO: 1627552 - DNA, 25 bp, Homo sapien
gctgggcactagagataaagcaacg

SEQ ID NO: 1627553 - DNA, 25 bp, Homo sapien
tgtggtcgtagagctgggacaggca

SEQ ID NO: 1627554 - DNA, 25 bp, Homo sapien
catgtggtcgtagagctgggacagg

SEQ ID NO: 1627555 - DNA, 25 bp, Homo sapien
ggcgctgctgatcattcttcagtgt

SEQ ID NO: 1627556 - DNA, 25 bp, Homo sapien
ggcatgtggtcgtagagctgggaca

SEQ ID NO: 1627557 - DNA, 25 bp, Homo sapien
gatgttctctttcaccggcgcctgg

SEQ ID NO: 1627558 - DNA, 25 bp, Homo sapien
ttcacgcaggctaagctggcccagg

SEQ ID NO: 1627559 - DNA, 25 bp, Homo sapien
ccgcgtagtggtgggccttcacgca

SEQ ID NO: 1627560 - DNA, 25 bp, Homo sapien
gctgcgtgtagctgttggtagacct

SEQ ID NO: 1627561 - DNA, 25 bp, Homo sapien
ctcatgtcgtaacttggagtatggg

SEQ ID NO: 1627562 - DNA, 25 bp, Homo sapien
cagggctcatgtcgtaacttggagt

SEQ ID NO: 1627563 - DNA, 25 bp, Homo sapien
gggctcatgtcgtaacttggagtat

SEQ ID NO: 1627564 - DNA, 25 bp, Homo sapien
gcagggctcatgtcgtaacttggag

SEQ ID NO: 1627565 - DNA, 25 bp, Homo sapien
tctggcccttgcgagggatgacctg

SEQ ID NO: 1627566 - DNA, 25 bp, Homo sapien
aaggctccgtctggtcagccctgga

SEQ ID NO: 1627567 - DNA, 25 bp, Homo sapien
aatgggaagttacaccagagctgga

SEQ ID NO: 1627568 - DNA, 25 bp, Homo sapien
agggatgacctgtagattctcttca

SEQ ID NO: 1627569 - DNA, 25 bp, Homo sapien
gtgttgaacaggacactggccttct

SEQ ID NO: 1627570 - DNA, 25 bp, Homo sapien
ccccagtgttgaacaggacactggc

SEQ ID NO: 1627571 - DNA, 25 bp, Homo sapien
ctctgaaaggcatctatggcactct

SEQ ID NO: 1627572 - DNA, 25 bp, Homo sapien
ctctctgaaaggcatctatggcact

SEQ ID NO: 1627573 - DNA, 25 bp, Homo sapien
tgaccggaaccccggtgagagagtc

SEQ ID NO: 1627574 - DNA, 25 bp, Homo sapien
accggaaccccggtgagagagtcat

SEQ ID NO: 1627575 - DNA, 25 bp, Homo sapien
ctgaccggaaccccggtgagagagt

SEQ ID NO: 1627576 - DNA, 25 bp, Homo sapien
cggaaccccggtgagagagtcatac

SEQ ID NO: 1627577 - DNA, 25 bp, Homo sapien
gagaatagctggcattactggtgca

SEQ ID NO: 1627578 - DNA, 25 bp, Homo sapien
tgcagccttcaactttagggctcag

SEQ ID NO: 1627579 - DNA, 25 bp, Homo sapien
gcagccttcaactttagggctcagt

SEQ ID NO: 1627580 - DNA, 25 bp, Homo sapien
cctcatgagaatagctggcattact

SEQ ID NO: 1627581 - DNA, 25 bp, Homo sapien
tgggcgggaagaatcgactctcgac

SEQ ID NO: 1627582 - DNA, 25 bp, Homo sapien
ccgtgtgggcgggaagaatcgactc

SEQ ID NO: 1627583 - DNA, 25 bp, Homo sapien
gaatcgactctcgacaaagcccagc

SEQ ID NO: 1627584 - DNA, 25 bp, Homo sapien
gaagaatcgactctcgacaaagccc

SEQ ID NO: 1627585 - DNA, 25 bp, Homo sapien
gccatcttcactgtaatgttccagg

SEQ ID NO: 1627586 - DNA, 25 bp, Homo sapien
agccatcttcactgtaatgttccag

SEQ ID NO: 1627587 - DNA, 25 bp, Homo sapien
cattactttcaatggaaaaactgca

SEQ ID NO: 1627588 - DNA, 25 bp, Homo sapien
tcaatggaaaaactgcaattacctt

SEQ ID NO: 1627589 - DNA, 25 bp, Homo sapien
cctttagccattactttcaatggaa

SEQ ID NO: 1627590 - DNA, 25 bp, Homo sapien
tggaaaaactgcaattaccttcaaa

SEQ ID NO: 1627591 - DNA, 25 bp, Homo sapien
cgactgcaaagtcgacgtctttcgt

SEQ ID NO: 1627592 - DNA, 25 bp, Homo sapien
ggacgactgcaaagtcgacgtcttt

SEQ ID NO: 1627593 - DNA, 25 bp, Homo sapien
tgaggacgactgcaaagtcgacgtc

SEQ ID NO: 1627594 - DNA, 25 bp, Homo sapien
cttgaggacgactgcaaagtcgacg

SEQ ID NO: 1627595 - DNA, 25 bp, Homo sapien
atctgacaccgaaatgcacctgcct

SEQ ID NO: 1627596 - DNA, 25 bp, Homo sapien
ctgtgctacagccaggtgagtccca

SEQ ID NO: 1627597 - DNA, 25 bp, Homo sapien
tgctccctgagcctacattcctagg

SEQ ID NO: 1627598 - DNA, 25 bp, Homo sapien
tggaaagccggatcctgctgaaggc

SEQ ID NO: 1627599 - DNA, 25 bp, Homo sapien
ccgcacctttgagtttgtggccact

SEQ ID NO: 1627600 - DNA, 25 bp, Homo sapien
acttgctcccgcacctttgagtttg

SEQ ID NO: 1627601 - DNA, 25 bp, Homo sapien
tctgcaggtctgagttgacgaagct

SEQ ID NO: 1627602 - DNA, 25 bp, Homo sapien
tgtgttctgatagacgcccaccgag

SEQ ID NO: 1627603 - DNA, 25 bp, Homo sapien
caggagtgtcggttaaggtatccca

SEQ ID NO: 1627604 - DNA, 25 bp, Homo sapien
tatcctggcttctaggtgagcagac

SEQ ID NO: 1627605 - DNA, 25 bp, Homo sapien
taccataagatacccacttgaaaag

SEQ ID NO: 1627606 - DNA, 25 bp, Homo sapien
ggacacagggcacctacccagcttg

SEQ ID NO: 1627607 - DNA, 25 bp, Homo sapien
tctctcctttattcttctttctctt

SEQ ID NO: 1627608 - DNA, 25 bp, Homo sapien
tccagctaaatctctcctttattct

SEQ ID NO: 1627609 - DNA, 25 bp, Homo sapien
ctccagctaaatctctcctttattc

SEQ ID NO: 1627610 - DNA, 25 bp, Homo sapien
ggaatggtggtatacgtgtatagtc

SEQ ID NO: 1627611 - DNA, 25 bp, Homo sapien
cattgacatagtgacttgccgcagc

SEQ ID NO: 1627612 - DNA, 25 bp, Homo sapien
caactgacggtgtgagctgtcatca

SEQ ID NO: 1627613 - DNA, 25 bp, Homo sapien
gcgaccttattagagcagcttagcc

SEQ ID NO: 1627614 - DNA, 25 bp, Homo sapien
cccaaaggctatggagggcctgcaa

SEQ ID NO: 1627615 - DNA, 25 bp, Homo sapien
tctgcaatttactccggccggtttg

SEQ ID NO: 1627616 - DNA, 25 bp, Homo sapien
gcagctctttgattctgcaatttac

SEQ ID NO: 1627617 - DNA, 25 bp, Homo sapien
ggatctgctgattcaaagcagctct

SEQ ID NO: 1627618 - DNA, 25 bp, Homo sapien
tccgcacggctttcaggatctgctg

SEQ ID NO: 1627619 - DNA, 25 bp, Homo sapien
gagatgccccttcagaggtcggcca

SEQ ID NO: 1627620 - DNA, 25 bp, Homo sapien
aaaaataagagatgccccttcagag

SEQ ID NO: 1627621 - DNA, 25 bp, Homo sapien
gatgccccttcagaggtcggccact

SEQ ID NO: 1627622 - DNA, 25 bp, Homo sapien
ctgaggaaaaataagagatgcccct

SEQ ID NO: 1627623 - DNA, 25 bp, Homo sapien
ggtatttggattacaacgcttcacg

SEQ ID NO: 1627624 - DNA, 25 bp, Homo sapien
tgctgtctcacatcgtggttttgaa

SEQ ID NO: 1627625 - DNA, 25 bp, Homo sapien
ggccaactgtatatcttcttcgaag

SEQ ID NO: 1627626 - DNA, 25 bp, Homo sapien
gttgacatgcaaaaatagatagctc

SEQ ID NO: 1627627 - DNA, 25 bp, Homo sapien
agcatctcggatcccatggttctgc

SEQ ID NO: 1627628 - DNA, 25 bp, Homo sapien
tctgcagcaaggaggctatatgagc

SEQ ID NO: 1627629 - DNA, 25 bp, Homo sapien
cccatggttctgcagcaaggaggct

SEQ ID NO: 1627630 - DNA, 25 bp, Homo sapien
cctggtacagcatctcggatcccat

SEQ ID NO: 1627631 - DNA, 25 bp, Homo sapien
tacctccaatgcagcctttgtgtca

SEQ ID NO: 1627632 - DNA, 25 bp, Homo sapien
gcagttcgactgtgtcctatggcta

SEQ ID NO: 1627633 - DNA, 25 bp, Homo sapien
gcctttgtgtcacgggacgctggta

SEQ ID NO: 1627634 - DNA, 25 bp, Homo sapien
tgtcctatggctacctccaatgcag

SEQ ID NO: 1627635 - DNA, 25 bp, Homo sapien
ccaaaggaggaagtgttgatcaggc

SEQ ID NO: 1627636 - DNA, 25 bp, Homo sapien
ggctaaagccaacgcccagtagcat

SEQ ID NO: 1627637 - DNA, 25 bp, Homo sapien
cccaggaaacaagggacatttacag

SEQ ID NO: 1627638 - DNA, 25 bp, Homo sapien
tagcatcaggtggtgtcgtggcaac

SEQ ID NO: 1627639 - DNA, 25 bp, Homo sapien
aggacacaatgaacccggaggccct

SEQ ID NO: 1627640 - DNA, 25 bp, Homo sapien
tagccctcactaagatgaatgctgc

SEQ ID NO: 1627641 - DNA, 25 bp, Homo sapien
tatcagtaccaatagagctggagct

SEQ ID NO: 1627642 - DNA, 25 bp, Homo sapien
tccacacaagcgttcataaaagatg

SEQ ID NO: 1627643 - DNA, 25 bp, Homo sapien
aacctcgtgggctccggatatcctc

SEQ ID NO: 1627644 - DNA, 25 bp, Homo sapien
gcatcatcagtagtccgtaaaagag

SEQ ID NO: 1627645 - DNA, 25 bp, Homo sapien
aacacaacactatgccaggctgatt

SEQ ID NO: 1627646 - DNA, 25 bp, Homo sapien
cccctggtctgagctaagggtgcaa

SEQ ID NO: 1627647 - DNA, 25 bp, Homo sapien
aagtagccgtcgttctccttctcca

SEQ ID NO: 1627648 - DNA, 25 bp, Homo sapien
ccgcgggcaacagcgcgtcggtcat

SEQ ID NO: 1627649 - DNA, 25 bp, Homo sapien
gaaagtagccgtcgttctccttctc

SEQ ID NO: 1627650 - DNA, 25 bp, Homo sapien
cgaaagtagccgtcgttctccttct

SEQ ID NO: 1627651 - DNA, 25 bp, Homo sapien
cgcgggcgcggagggcggacggcgg

SEQ ID NO: 1627652 - DNA, 25 bp, Homo sapien
ctagcggcgcgggcgcggagggcgg

SEQ ID NO: 1627653 - DNA, 25 bp, Homo sapien
gcggcgcgggcgcggagggcggacg

SEQ ID NO: 1627654 - DNA, 25 bp, Homo sapien
ggcgcgggcgcggagggcggacggc

SEQ ID NO: 1627655 - DNA, 25 bp, Homo sapien
tctgtgggcgtcgtggctgactcaa

SEQ ID NO: 1627656 - DNA, 25 bp, Homo sapien
gccgcgagagcgcaggaaaggcact

SEQ ID NO: 1627657 - DNA, 25 bp, Homo sapien
actcaactttgcgagtgccgcgaga

SEQ ID NO: 1627658 - DNA, 25 bp, Homo sapien
aggcgctcgtcacccggagagctgc

SEQ ID NO: 1627659 - DNA, 25 bp, Homo sapien
aatcagctgtaattggcttggggtc

SEQ ID NO: 1627660 - DNA, 25 bp, Homo sapien
aacctaatccctcgcatccgcagtt

SEQ ID NO: 1627661 - DNA, 25 bp, Homo sapien
gggacccctgtcatagaacatgact

SEQ ID NO: 1627662 - DNA, 25 bp, Homo sapien
ttgcttgcctaccactcactgtctg

SEQ ID NO: 1627663 - DNA, 25 bp, Homo sapien
gaagtctgataagctctcactgggc

SEQ ID NO: 1627664 - DNA, 25 bp, Homo sapien
tataataagttaccagactgtactg

SEQ ID NO: 1627665 - DNA, 25 bp, Homo sapien
aaaatctaggtatcaacaggactgc

SEQ ID NO: 1627666 - DNA, 25 bp, Homo sapien
tcctttcaggaactattattaacta

SEQ ID NO: 1627667 - DNA, 25 bp, Homo sapien
catagcaaacaggagtaggagtgct

SEQ ID NO: 1627668 - DNA, 25 bp, Homo sapien
ttccagctggatgcggtgtttcacg

SEQ ID NO: 1627669 - DNA, 25 bp, Homo sapien
gagtgctggaggttgcaagatttta

SEQ ID NO: 1627670 - DNA, 25 bp, Homo sapien
gggtgagccatgcagatatttagag

SEQ ID NO: 1627671 - DNA, 25 bp, Homo sapien
ggaccatgcatggtgggaacccctg

SEQ ID NO: 1627672 - DNA, 25 bp, Homo sapien
aagctatccgcacccaaactgggat

SEQ ID NO: 1627673 - DNA, 25 bp, Homo sapien
gaatcaatcaacatgagaagcctga

SEQ ID NO: 1627674 - DNA, 25 bp, Homo sapien
cttgttagtgggaagcagacgtgat

SEQ ID NO: 1627675 - DNA, 25 bp, Homo sapien
tgtttttgactgacattgcctagga

SEQ ID NO: 1627676 - DNA, 25 bp, Homo sapien
tgcagtgctgataggagcgttcacc

SEQ ID NO: 1627677 - DNA, 25 bp, Homo sapien
cctaggaaagcttgtaaggagactt

SEQ ID NO: 1627678 - DNA, 25 bp, Homo sapien
tgtcgttttctagtcaattctcgcg

SEQ ID NO: 1627679 - DNA, 25 bp, Homo sapien
gccgcggccgatgtggccgcgcgcg

SEQ ID NO: 1627680 - DNA, 25 bp, Homo sapien
gcgcgcgccctacgggcctgcaccg

SEQ ID NO: 1627681 - DNA, 25 bp, Homo sapien
gcaccgccaccgcacaaagacgcct

SEQ ID NO: 1627682 - DNA, 25 bp, Homo sapien
aagacgcctcgggagccgccgcctg

SEQ ID NO: 1627683 - DNA, 25 bp, Homo sapien
ttataccaccggcaagctgccgagg

SEQ ID NO: 1627684 - DNA, 25 bp, Homo sapien
tactagatttggacaagcaggagca

SEQ ID NO: 1627685 - DNA, 25 bp, Homo sapien
gaaagtctcgacatccaggtgctgt

SEQ ID NO: 1627686 - DNA, 25 bp, Homo sapien
tggcactaccccgagttcctgtgtg

SEQ ID NO: 1627687 - DNA, 25 bp, Homo sapien
gccttcatctctgcccgcgaccatg

SEQ ID NO: 1627688 - DNA, 25 bp, Homo sapien
ctccgccatcccacctgccttcatc

SEQ ID NO: 1627689 - DNA, 25 bp, Homo sapien
aggagtcccaccagtgctccctgga

SEQ ID NO: 1627690 - DNA, 25 bp, Homo sapien
gcccgcgaccatgtctggattttct

SEQ ID NO: 1627691 - DNA, 25 bp, Homo sapien
tcagaccttcactgcacgtggctgg

SEQ ID NO: 1627692 - DNA, 25 bp, Homo sapien
ggcttcaatgccacctaccaggtga

SEQ ID NO: 1627693 - DNA, 25 bp, Homo sapien
tgcggctgggctatgacgactacgt

SEQ ID NO: 1627694 - DNA, 25 bp, Homo sapien
gactacgtgcaggtatacgagggcc

SEQ ID NO: 1627695 - DNA, 25 bp, Homo sapien
tgcgagacccagagtgcaggcccgt

SEQ ID NO: 1627696 - DNA, 25 bp, Homo sapien
ttggtctgttgaccgctgggctcgc

SEQ ID NO: 1627697 - DNA, 25 bp, Homo sapien
ccagcgatgatgaggccctgttggt

SEQ ID NO: 1627698 - DNA, 25 bp, Homo sapien
agccactggtagacggcccagctcc

SEQ ID NO: 1627699 - DNA, 25 bp, Homo sapien
cttttcaggaagagctagcagggca

SEQ ID NO: 1627700 - DNA, 25 bp, Homo sapien
ccagtccacattttagggcttcctt

SEQ ID NO: 1627701 - DNA, 25 bp, Homo sapien
cagccagccctgtttatttataggc

SEQ ID NO: 1627702 - DNA, 25 bp, Homo sapien
gcttctgagagtcgtatcttttttc

SEQ ID NO: 1627703 - DNA, 25 bp, Homo sapien
cctgggggtagaccacgaaacacag

SEQ ID NO: 1627704 - DNA, 25 bp, Homo sapien
ggtagaccacgaaacacagctcctg

SEQ ID NO: 1627705 - DNA, 25 bp, Homo sapien
cattgtggcttcgagggcttgtctg

SEQ ID NO: 1627706 - DNA, 25 bp, Homo sapien
tcattgtggcttcgagggcttgtct

SEQ ID NO: 1627707 - DNA, 25 bp, Homo sapien
gtaaggatgatgatgacgccgaccc

SEQ ID NO: 1627708 - DNA, 25 bp, Homo sapien
gaacactcccagaaagaaaatgggc

SEQ ID NO: 1627709 - DNA, 25 bp, Homo sapien
gtctgtgcacacactttggtttgct

SEQ ID NO: 1627710 - DNA, 25 bp, Homo sapien
cagaagaccaagtacgccacgggga

SEQ ID NO: 1627711 - DNA, 25 bp, Homo sapien
gcctgtggagtgcaggccgcctcca

SEQ ID NO: 1627712 - DNA, 25 bp, Homo sapien
tgacgccgtagcagaggtagttgat

SEQ ID NO: 1627713 - DNA, 25 bp, Homo sapien
acgagcatgatgacggctgtggccc

SEQ ID NO: 1627714 - DNA, 25 bp, Homo sapien
agttgatgagcgtgtacgtgtcgcc

SEQ ID NO: 1627715 - DNA, 25 bp, Homo sapien
gtgcccctcgcgggctccagagaag

SEQ ID NO: 1627716 - DNA, 25 bp, Homo sapien
gcagtgtctgacgtggatcatggcc

SEQ ID NO: 1627717 - DNA, 25 bp, Homo sapien
gcaggtgcccctcgcgggctccaga

SEQ ID NO: 1627718 - DNA, 25 bp, Homo sapien
gggtgcagtgtctgacgtggatcat

SEQ ID NO: 1627719 - DNA, 25 bp, Homo sapien
tgtccctcttaagctgtcgcctctg

SEQ ID NO: 1627720 - DNA, 25 bp, Homo sapien
ctttgcctcccagttgtgatcagac

SEQ ID NO: 1627721 - DNA, 25 bp, Homo sapien
ttgttaccgtgtgggatcatcatcc

SEQ ID NO: 1627722 - DNA, 25 bp, Homo sapien
gctttggacctgatgtccctcttaa

SEQ ID NO: 1627723 - DNA, 25 bp, Homo sapien
gatccctccgaaggttgacagagcc

SEQ ID NO: 1627724 - DNA, 25 bp, Homo sapien
ccaagaaaagtagcccagcagcttc

SEQ ID NO: 1627725 - DNA, 25 bp, Homo sapien
taggtgaacaggtaaccattgatcc

SEQ ID NO: 1627726 - DNA, 25 bp, Homo sapien
gcatgacccaagaaaagtagcccag

SEQ ID NO: 1627727 - DNA, 25 bp, Homo sapien
ggcacagtagagaggccatgtgtaa

SEQ ID NO: 1627728 - DNA, 25 bp, Homo sapien
gggtgggcacagtagagaggccatg

SEQ ID NO: 1627729 - DNA, 25 bp, Homo sapien
tgggcacagtagagaggccatgtgt

SEQ ID NO: 1627730 - DNA, 25 bp, Homo sapien
gcacagtagagaggccatgtgtaag

SEQ ID NO: 1627731 - DNA, 25 bp, Homo sapien
tacacgaaggtcaccagtgggatgg

SEQ ID NO: 1627732 - DNA, 25 bp, Homo sapien
gccaccgcattggaggagagcagct

SEQ ID NO: 1627733 - DNA, 25 bp, Homo sapien
aatgttggtgaacgtgtacacgaag

SEQ ID NO: 1627734 - DNA, 25 bp, Homo sapien
gacatggccgtgaagtaggcaatgt

SEQ ID NO: 1627735 - DNA, 25 bp, Homo sapien
agccacgagagcagctcatagtctc

SEQ ID NO: 1627736 - DNA, 25 bp, Homo sapien
ctggtgacaggcagtggagtgcgtc

SEQ ID NO: 1627737 - DNA, 25 bp, Homo sapien
cagtggagtgcgtcagcgtcagctc

SEQ ID NO: 1627738 - DNA, 25 bp, Homo sapien
cccagccacgagagcagctcatagt

SEQ ID NO: 1627739 - DNA, 25 bp, Homo sapien
tttcgggcgtcaaccatctcctcgg

SEQ ID NO: 1627740 - DNA, 25 bp, Homo sapien
aggtgtcccacggagggcgtcatcc

SEQ ID NO: 1627741 - DNA, 25 bp, Homo sapien
ctcggtgacatagttgaggaagttc

SEQ ID NO: 1627742 - DNA, 25 bp, Homo sapien
ccactgaaggcgaaggagccctgga

SEQ ID NO: 1627743 - DNA, 25 bp, Homo sapien
gcagcttcccgcctgtgaacatgtc

SEQ ID NO: 1627744 - DNA, 25 bp, Homo sapien
aaggcccacgccgatgatgagggac

SEQ ID NO: 1627745 - DNA, 25 bp, Homo sapien
gagctgttcacccatgtcaggagca

SEQ ID NO: 1627746 - DNA, 25 bp, Homo sapien
aacatgtcctggatgcgcgtggccc

SEQ ID NO: 1627747 - DNA, 25 bp, Homo sapien
ggctgcagcacgtagttggagaagg

SEQ ID NO: 1627748 - DNA, 25 bp, Homo sapien
gctgcagcacgtagttggagaaggt

SEQ ID NO: 1627749 - DNA, 25 bp, Homo sapien
tgaccttgttgaggtcttgcggctg

SEQ ID NO: 1627750 - DNA, 25 bp, Homo sapien
ttgaccttgttgaggtcttgcggct

SEQ ID NO: 1627751 - DNA, 25 bp, Homo sapien
gttgaccttgttgaggtcttgcggc

SEQ ID NO: 1627752 - DNA, 25 bp, Homo sapien
tgccctgtcctcagaaggctgtcca

SEQ ID NO: 1627753 - DNA, 25 bp, Homo sapien
ggagtgggcctcagttccacctgcc

SEQ ID NO: 1627754 - DNA, 25 bp, Homo sapien
gccctgtcctcagaaggctgtccag

SEQ ID NO: 1627755 - DNA, 25 bp, Homo sapien
ggtggagtgggcctcagttccacct

SEQ ID NO: 1627756 - DNA, 25 bp, Homo sapien
cccctgcccgctggtgccccacact

SEQ ID NO: 1627757 - DNA, 25 bp, Homo sapien
agagggtgtccccctgcccgctggt

SEQ ID NO: 1627758 - DNA, 25 bp, Homo sapien
ctgcccgctggtgccccacactcac

SEQ ID NO: 1627759 - DNA, 25 bp, Homo sapien
gagggtgtccccctgcccgctggtg

SEQ ID NO: 1627760 - DNA, 25 bp, Homo sapien
ccaggacccagacgaacagggccag

SEQ ID NO: 1627761 - DNA, 25 bp, Homo sapien
cacggagcctgagtgctccaggacc

SEQ ID NO: 1627762 - DNA, 25 bp, Homo sapien
cgtaggcgtagtccccgccagactt

SEQ ID NO: 1627763 - DNA, 25 bp, Homo sapien
cgaagatctctgtgacgtaggcgta

SEQ ID NO: 1627764 - DNA, 25 bp, Homo sapien
tgtgcacatgaatccggtaacttca

SEQ ID NO: 1627765 - DNA, 25 bp, Homo sapien
catgaatccggtaacttcaccagag

SEQ ID NO: 1627766 - DNA, 25 bp, Homo sapien
catctgtgcacatgaatccggtaac

SEQ ID NO: 1627767 - DNA, 25 bp, Homo sapien
tccggtaacttcaccagagatctgc

SEQ ID NO: 1627768 - DNA, 25 bp, Homo sapien
catctccctcagagcgggagcccgc

SEQ ID NO: 1627769 - DNA, 25 bp, Homo sapien
atctccctcagagcgggagcccgcc

SEQ ID NO: 1627770 - DNA, 25 bp, Homo sapien
ccgggtcctgagaggacgggtccat

SEQ ID NO: 1627771 - DNA, 25 bp, Homo sapien
gtcctgagaggacgggtccatctcc

SEQ ID NO: 1627772 - DNA, 25 bp, Homo sapien
agcaatgaagaagcccagccgttgg

SEQ ID NO: 1627773 - DNA, 25 bp, Homo sapien
gcagcaatgaagaagcccagccgtt

SEQ ID NO: 1627774 - DNA, 25 bp, Homo sapien
ggggagcagcaatgaagaagcccag

SEQ ID NO: 1627775 - DNA, 25 bp, Homo sapien
tgaagaagcccagccgttgggggaa

SEQ ID NO: 1627776 - DNA, 25 bp, Homo sapien
cacgttcctgtccacccggtgggat

SEQ ID NO: 1627777 - DNA, 25 bp, Homo sapien
tggagataccgctgagcccctgttg

SEQ ID NO: 1627778 - DNA, 25 bp, Homo sapien
agagagatgtaggttctgaggcctc

SEQ ID NO: 1627779 - DNA, 25 bp, Homo sapien
tgacccatggctgaccagagagatg

SEQ ID NO: 1627780 - DNA, 25 bp, Homo sapien
cagagtctccaccacccgcccctct

SEQ ID NO: 1627781 - DNA, 25 bp, Homo sapien
tgccccccaagtcggccttcccaga

SEQ ID NO: 1627782 - DNA, 25 bp, Homo sapien
tcttccctgagccttcgctgggtag

SEQ ID NO: 1627783 - DNA, 25 bp, Homo sapien
ctcttccctgagccttcgctgggta

SEQ ID NO: 1627784 - DNA, 25 bp, Homo sapien
ggccattgttccccgtggccgctgc

SEQ ID NO: 1627785 - DNA, 25 bp, Homo sapien
gggccattgttccccgtggccgctg

SEQ ID NO: 1627786 - DNA, 25 bp, Homo sapien
tcttggaggaacgaagaaagggcca

SEQ ID NO: 1627787 - DNA, 25 bp, Homo sapien
tggaggaacgaagaaagggccattg

SEQ ID NO: 1627788 - DNA, 25 bp, Homo sapien
cccacggaggtcgagtcgcagagtg

SEQ ID NO: 1627789 - DNA, 25 bp, Homo sapien
ccacggaggtcgagtcgcagagtga

SEQ ID NO: 1627790 - DNA, 25 bp, Homo sapien
ctgtggtgtgtggggaatgtgcagt

SEQ ID NO: 1627791 - DNA, 25 bp, Homo sapien
ctctggatgtgaagagctgctaatg

SEQ ID NO: 1627792 - DNA, 25 bp, Homo sapien
gggtgggagaggacgaggtgaagac

SEQ ID NO: 1627793 - DNA, 25 bp, Homo sapien
ggtctgccctactgagcccccaaac

SEQ ID NO: 1627794 - DNA, 25 bp, Homo sapien
tgggagaggacgaggtgaagaccct

SEQ ID NO: 1627795 - DNA, 25 bp, Homo sapien
cttcttgagcgccacccgctccgag

SEQ ID NO: 1627796 - DNA, 25 bp, Homo sapien
agcagcccgatctccttcttgagcg

SEQ ID NO: 1627797 - DNA, 25 bp, Homo sapien
gctcagcagcccgatctccttcttg

SEQ ID NO: 1627798 - DNA, 25 bp, Homo sapien
ggcgctcagcagcccgatctccttc

SEQ ID NO: 1627799 - DNA, 25 bp, Homo sapien
gggttcccgcgcccgctcggctgct

SEQ ID NO: 1627800 - DNA, 25 bp, Homo sapien
cgcaggcctggggttcccgcgcccg

SEQ ID NO: 1627801 - DNA, 25 bp, Homo sapien
gcgcccgctcggctgctgcgtgtgg

SEQ ID NO: 1627802 - DNA, 25 bp, Homo sapien
cgctcggctgctgcgtgtggccggc

SEQ ID NO: 1627803 - DNA, 25 bp, Homo sapien
gtcgctgtcccgccgcgtccccgct

SEQ ID NO: 1627804 - DNA, 25 bp, Homo sapien
tcgctgtcccgccgcgtccccgctc

SEQ ID NO: 1627805 - DNA, 25 bp, Homo sapien
cgctgtcccgccgcgtccccgctcc

SEQ ID NO: 1627806 - DNA, 25 bp, Homo sapien
gagctcacggccctcgcagccggga

SEQ ID NO: 1627807 - DNA, 25 bp, Homo sapien
gtccgtcggtccgtgagctcacggc

SEQ ID NO: 1627808 - DNA, 25 bp, Homo sapien
acggccctcgcagccgggacagcgc

SEQ ID NO: 1627809 - DNA, 25 bp, Homo sapien
gtcggtccgtcggtccgtgagctca

SEQ ID NO: 1627810 - DNA, 25 bp, Homo sapien
gcagtttgcctgaactcgcctttct

SEQ ID NO: 1627811 - DNA, 25 bp, Homo sapien
ctcgctgcccacagctgttggacgg

SEQ ID NO: 1627812 - DNA, 25 bp, Homo sapien
gaaaagggcagcatgtgatccctcg

SEQ ID NO: 1627813 - DNA, 25 bp, Homo sapien
acagctgttggacgggcagtttgcc

SEQ ID NO: 1627814 - DNA, 25 bp, Homo sapien
cacgagaaggtagggcttggacttc

SEQ ID NO: 1627815 - DNA, 25 bp, Homo sapien
tggacttctgatctggaaccgggat

SEQ ID NO: 1627816 - DNA, 25 bp, Homo sapien
tgtgcagcccagtagggaacacgag

SEQ ID NO: 1627817 - DNA, 25 bp, Homo sapien
tgaagccactgcattcacggccctg

SEQ ID NO: 1627818 - DNA, 25 bp, Homo sapien
gaccactagagtcagctgggagcca

SEQ ID NO: 1627819 - DNA, 25 bp, Homo sapien
cattccaaaacgtgccaccagaggg

SEQ ID NO: 1627820 - DNA, 25 bp, Homo sapien
ggaagtccttcctgagagcggctca

SEQ ID NO: 1627821 - DNA, 25 bp, Homo sapien
gcagcctccgcgttggtccttgaga

SEQ ID NO: 1627822 - DNA, 25 bp, Homo sapien
gctgggaggcacggggaggcgatag

SEQ ID NO: 1627823 - DNA, 25 bp, Homo sapien
ctgggaggcacggggaggcgataga

SEQ ID NO: 1627824 - DNA, 25 bp, Homo sapien
gggaggcacggggaggcgatagagc

SEQ ID NO: 1627825 - DNA, 25 bp, Homo sapien
gaggcacggggaggcgatagagccc

SEQ ID NO: 1627826 - DNA, 25 bp, Homo sapien
cctctttgtagcatcccagtcctgg

SEQ ID NO: 1627827 - DNA, 25 bp, Homo sapien
aggcagcatccactcattgtgttcc

SEQ ID NO: 1627828 - DNA, 25 bp, Homo sapien
ccagagtctggctcctaaaaggcac

SEQ ID NO: 1627829 - DNA, 25 bp, Homo sapien
caaagttgaggctgtgacactcagt

SEQ ID NO: 1627830 - DNA, 25 bp, Homo sapien
tcaagacggccgagccactgaccac

SEQ ID NO: 1627831 - DNA, 25 bp, Homo sapien
gtcctgggaactgcgttttacctgc

SEQ ID NO: 1627832 - DNA, 25 bp, Homo sapien
tgcgttttacctgcagcaaatcaca

SEQ ID NO: 1627833 - DNA, 25 bp, Homo sapien
gcaaatcacattcagtcacctcagg

SEQ ID NO: 1627834 - DNA, 25 bp, Homo sapien
agctgcagtgtctctccagtcagca

SEQ ID NO: 1627835 - DNA, 25 bp, Homo sapien
ctggtaagagtttctggctaagtcc

SEQ ID NO: 1627836 - DNA, 25 bp, Homo sapien
aagagtttctggctaagtcctggcc

SEQ ID NO: 1627837 - DNA, 25 bp, Homo sapien
gtttctggctaagtcctggccaagc

SEQ ID NO: 1627838 - DNA, 25 bp, Homo sapien
caagactgctgtcagcaaatctttg

SEQ ID NO: 1627839 - DNA, 25 bp, Homo sapien
ccaagactgctgtcagcaaatcttt

SEQ ID NO: 1627840 - DNA, 25 bp, Homo sapien
tccaagactgctgtcagcaaatctt

SEQ ID NO: 1627841 - DNA, 25 bp, Homo sapien
aagactgctgtcagcaaatctttga

SEQ ID NO: 1627842 - DNA, 25 bp, Homo sapien
tgttggtctttccaccaacccttgc

SEQ ID NO: 1627843 - DNA, 25 bp, Homo sapien
aacccttgctctagtctctggggtg

SEQ ID NO: 1627844 - DNA, 25 bp, Homo sapien
cacagtgacccctgaacctgttggt

SEQ ID NO: 1627845 - DNA, 25 bp, Homo sapien
cctgaacctgttggtctttccacca

SEQ ID NO: 1627846 - DNA, 25 bp, Homo sapien
gatcgatctgggacccagcagcctt

SEQ ID NO: 1627847 - DNA, 25 bp, Homo sapien
agcaggctgtgatgaaggattcggg

SEQ ID NO: 1627848 - DNA, 25 bp, Homo sapien
gccagcagcgaagaggatggcttcc

SEQ ID NO: 1627849 - DNA, 25 bp, Homo sapien
gagctccagccatgagtgaagagcc

SEQ ID NO: 1627850 - DNA, 25 bp, Homo sapien
catgtggccctttcctggcccgcct

SEQ ID NO: 1627851 - DNA, 25 bp, Homo sapien
tgctcctaggaagagatgcctccac

SEQ ID NO: 1627852 - DNA, 25 bp, Homo sapien
cttgctcctgctcctaggaagagat

SEQ ID NO: 1627853 - DNA, 25 bp, Homo sapien
tcctgctcctaggaagagatgcctc

SEQ ID NO: 1627854 - DNA, 25 bp, Homo sapien
ctcccccatggggcattctgaaggc

SEQ ID NO: 1627855 - DNA, 25 bp, Homo sapien
tccactcccccatggggcattctga

SEQ ID NO: 1627856 - DNA, 25 bp, Homo sapien
catgggttccagcagtcctgtgctg

SEQ ID NO: 1627857 - DNA, 25 bp, Homo sapien
aggccatgggttccagcagtcctgt

SEQ ID NO: 1627858 - DNA, 25 bp, Homo sapien
agagtgcactgtgcgggtgcccagg

SEQ ID NO: 1627859 - DNA, 25 bp, Homo sapien
ccaggagatggaaccgcattgggag

SEQ ID NO: 1627860 - DNA, 25 bp, Homo sapien
caggaaaatcctgccggaagagtgc

SEQ ID NO: 1627861 - DNA, 25 bp, Homo sapien
cggccagcccgcagctgttgggcaa

SEQ ID NO: 1627862 - DNA, 25 bp, Homo sapien
aactgtgtagtttaggtacagatag

SEQ ID NO: 1627863 - DNA, 25 bp, Homo sapien
taggtacagatagtattctttttgg

SEQ ID NO: 1627864 - DNA, 25 bp, Homo sapien
tctgtataaactgtgtagtttaggt

SEQ ID NO: 1627865 - DNA, 25 bp, Homo sapien
ttatttctgtataaactgtgtagtt

SEQ ID NO: 1627866 - DNA, 25 bp, Homo sapien
tcacaagggtgctctttccggctcc

SEQ ID NO: 1627867 - DNA, 25 bp, Homo sapien
caccatctcccttccggtcacaagg

SEQ ID NO: 1627868 - DNA, 25 bp, Homo sapien
tctcccttccggtcacaagggtgct

SEQ ID NO: 1627869 - DNA, 25 bp, Homo sapien
agggtgctctttccggctccaggct

SEQ ID NO: 1627870 - DNA, 25 bp, Homo sapien
aaggcagttgtgctcagagccccag

SEQ ID NO: 1627871 - DNA, 25 bp, Homo sapien
cagttgtgctcagagccccagagca

SEQ ID NO: 1627872 - DNA, 25 bp, Homo sapien
gcaaggcagttgtgctcagagcccc

SEQ ID NO: 1627873 - DNA, 25 bp, Homo sapien
ctgcaaggcagttgtgctcagagcc

SEQ ID NO: 1627874 - DNA, 25 bp, Homo sapien
cgtcactgtcatgtccgcggcgagg

SEQ ID NO: 1627875 - DNA, 25 bp, Homo sapien
ctggccgcaccaggcagtgattgaa

SEQ ID NO: 1627876 - DNA, 25 bp, Homo sapien
accaggcagtgattgaatgaacaga

SEQ ID NO: 1627877 - DNA, 25 bp, Homo sapien
tgattgaatgaacagatccataaac

SEQ ID NO: 1627878 - DNA, 25 bp, Homo sapien
tgtctagggcctggccgcaccaggc

SEQ ID NO: 1627879 - DNA, 25 bp, Homo sapien
aacctcacaaacgtgcaaaccaaag

SEQ ID NO: 1627880 - DNA, 25 bp, Homo sapien
ggaaactcacattgacagacgctca

SEQ ID NO: 1627881 - DNA, 25 bp, Homo sapien
gtcaccagccatgcacggaaactca

SEQ ID NO: 1627882 - DNA, 25 bp, Homo sapien
agacgctcaacctcacaaacgtgca

SEQ ID NO: 1627883 - DNA, 25 bp, Homo sapien
ccaggtgcagtggagccggcccagg

SEQ ID NO: 1627884 - DNA, 25 bp, Homo sapien
cggctccaggtgcagtggagccggc

SEQ ID NO: 1627885 - DNA, 25 bp, Homo sapien
gctccaggtgcagtggagccggccc

SEQ ID NO: 1627886 - DNA, 25 bp, Homo sapien
ctccaggtgcagtggagccggccca

SEQ ID NO: 1627887 - DNA, 25 bp, Homo sapien
agatgctgaagactcctcggctggt

SEQ ID NO: 1627888 - DNA, 25 bp, Homo sapien
gcaaacttggggctcgggtctccag

SEQ ID NO: 1627889 - DNA, 25 bp, Homo sapien
gctggcctggcttctctcggctgga

SEQ ID NO: 1627890 - DNA, 25 bp, Homo sapien
gcagggtgcttcaggcaaacttggg

SEQ ID NO: 1627891 - DNA, 25 bp, Homo sapien
tgcttccctgctgacgccggtgctg

SEQ ID NO: 1627892 - DNA, 25 bp, Homo sapien
catgagaacagagctgggaaaactg

SEQ ID NO: 1627893 - DNA, 25 bp, Homo sapien
ttcacaactgatctcccaagaacac

SEQ ID NO: 1627894 - DNA, 25 bp, Homo sapien
caagaacacggtcggtccggtcaga

SEQ ID NO: 1627895 - DNA, 25 bp, Homo sapien
gaggcgggggctccactcgccctcc

SEQ ID NO: 1627896 - DNA, 25 bp, Homo sapien
ccgaggcgggggctccactcgccct

SEQ ID NO: 1627897 - DNA, 25 bp, Homo sapien
cgcccgaggcgggggctccactcgc

SEQ ID NO: 1627898 - DNA, 25 bp, Homo sapien
gcgggggctccactcgccctcccca

SEQ ID NO: 1627899 - DNA, 25 bp, Homo sapien
tgctctagggctccgggagagatga

SEQ ID NO: 1627900 - DNA, 25 bp, Homo sapien
gggctttcgtggtttccacctcatc

SEQ ID NO: 1627901 - DNA, 25 bp, Homo sapien
ctgggcagctgttcttaaagctttc

SEQ ID NO: 1627902 - DNA, 25 bp, Homo sapien
gggaagtcttagaaagacctgctct

SEQ ID NO: 1627903 - DNA, 25 bp, Homo sapien
ggaggttctgttcactccacatcat

SEQ ID NO: 1627904 - DNA, 25 bp, Homo sapien
tccacatcataaaccggaaacagcg

SEQ ID NO: 1627905 - DNA, 25 bp, Homo sapien
cagccgacggtaaacctggagtcct

SEQ ID NO: 1627906 - DNA, 25 bp, Homo sapien
atgccgcccagcagccgacggtaaa

SEQ ID NO: 1627907 - DNA, 25 bp, Homo sapien
tcctctgtcagtgcccgcttatcgt

SEQ ID NO: 1627908 - DNA, 25 bp, Homo sapien
cagtgcccgcttatcgtagaggaaa

SEQ ID NO: 1627909 - DNA, 25 bp, Homo sapien
ttatcgtagaggaaagacactgtcc

SEQ ID NO: 1627910 - DNA, 25 bp, Homo sapien
cgttgggagccgctggtctcagctg

SEQ ID NO: 1627911 - DNA, 25 bp, Homo sapien
ctgaagctgattggccagggacaga

SEQ ID NO: 1627912 - DNA, 25 bp, Homo sapien
ccctcagccggccattgtggatgat

SEQ ID NO: 1627913 - DNA, 25 bp, Homo sapien
tgcgtgtgttcacatgcacgctgag

SEQ ID NO: 1627914 - DNA, 25 bp, Homo sapien
gaatgctcctgtttgcacgtgtgcg

SEQ ID NO: 1627915 - DNA, 25 bp, Homo sapien
tcggggagcactttcagtccctccc

SEQ ID NO: 1627916 - DNA, 25 bp, Homo sapien
atgcaagaaacatgctgtggcccac

SEQ ID NO: 1627917 - DNA, 25 bp, Homo sapien
gcaagaaacatgctgtggcccactc

SEQ ID NO: 1627918 - DNA, 25 bp, Homo sapien
agaaacatgctgtggcccactcggg

SEQ ID NO: 1627919 - DNA, 25 bp, Homo sapien
agagccgacttgccctttgccctgg

SEQ ID NO: 1627920 - DNA, 25 bp, Homo sapien
tctggccagagccgacttgcccttt

SEQ ID NO: 1627921 - DNA, 25 bp, Homo sapien
gagctgcggcacctcggggttgggg

SEQ ID NO: 1627922 - DNA, 25 bp, Homo sapien
gaactgatggcctcacctcccccac

SEQ ID NO: 1627923 - DNA, 25 bp, Homo sapien
atgtggaagggcctctagcagagct

SEQ ID NO: 1627924 - DNA, 25 bp, Homo sapien
aagggcctctagcagagctgaggtc

SEQ ID NO: 1627925 - DNA, 25 bp, Homo sapien
gcaggatgtggaagggcctctagca

SEQ ID NO: 1627926 - DNA, 25 bp, Homo sapien
gtggaagggcctctagcagagctga

SEQ ID NO: 1627927 - DNA, 25 bp, Homo sapien
gcaacgtctccggaagctggagaac

SEQ ID NO: 1627928 - DNA, 25 bp, Homo sapien
tcggctgcctcggtgtgcggttcac

SEQ ID NO: 1627929 - DNA, 25 bp, Homo sapien
ctgttgctacagcagacaacctggg

SEQ ID NO: 1627930 - DNA, 25 bp, Homo sapien
cacaaagagggctccagcggtgtcg

SEQ ID NO: 1627931 - DNA, 25 bp, Homo sapien
agaaatggggatgcggacagccatt

SEQ ID NO: 1627932 - DNA, 25 bp, Homo sapien
gggatgcggacagccattgtcaggg

SEQ ID NO: 1627933 - DNA, 25 bp, Homo sapien
cagctgacaggggtcacgtgctgtc

SEQ ID NO: 1627934 - DNA, 25 bp, Homo sapien
caggggtcacgtgctgtctgggctt

SEQ ID NO: 1627935 - DNA, 25 bp, Homo sapien
tcctcccacacccacttggactggg

SEQ ID NO: 1627936 - DNA, 25 bp, Homo sapien
ggccgtcaggcatccgccagctggg

SEQ ID NO: 1627937 - DNA, 25 bp, Homo sapien
ggctgtgctgcccggtgactccaga

SEQ ID NO: 1627938 - DNA, 25 bp, Homo sapien
gtctcagcggccgtcaggcatccgc

SEQ ID NO: 1627939 - DNA, 25 bp, Homo sapien
cccttttctgatcaggccactcgag

SEQ ID NO: 1627940 - DNA, 25 bp, Homo sapien
gccactcgagctgggatcctgtgtg

SEQ ID NO: 1627941 - DNA, 25 bp, Homo sapien
tgagatgtgtcagtgtcgtgtgccc

SEQ ID NO: 1627942 - DNA, 25 bp, Homo sapien
tgtgtcagtgtcgtgtgcccttttc

SEQ ID NO: 1627943 - DNA, 25 bp, Homo sapien
ttgggagaagacttcatgggaagta

SEQ ID NO: 1627944 - DNA, 25 bp, Homo sapien
agtttgggagaagacttcatgggaa

SEQ ID NO: 1627945 - DNA, 25 bp, Homo sapien
cctgcaaaggcctgtcctcgggggt

SEQ ID NO: 1627946 - DNA, 25 bp, Homo sapien
gggtgagtttgggagaagacttcat

SEQ ID NO: 1627947 - DNA, 25 bp, Homo sapien
ctagaaaaagaaccagcagaacatt

SEQ ID NO: 1627948 - DNA, 25 bp, Homo sapien
gaaaaagaaccagcagaacattctc

SEQ ID NO: 1627949 - DNA, 25 bp, Homo sapien
atctttctgtctttccaatgggtac

SEQ ID NO: 1627950 - DNA, 25 bp, Homo sapien
gaacattctctttgccttcatcttt

SEQ ID NO: 1627951 - DNA, 25 bp, Homo sapien
aatgtaagctcccgatggcagaact

SEQ ID NO: 1627952 - DNA, 25 bp, Homo sapien
gagaaccggttaattttgtcagatg

SEQ ID NO: 1627953 - DNA, 25 bp, Homo sapien
gagagctctcggcactcagtgaata

SEQ ID NO: 1627954 - DNA, 25 bp, Homo sapien
ctgcggcttaggagagctctcggca

SEQ ID NO: 1627955 - DNA, 25 bp, Homo sapien
agacaccacccctttggctgccacg

SEQ ID NO: 1627956 - DNA, 25 bp, Homo sapien
ttggctgccacgagggactggccct

SEQ ID NO: 1627957 - DNA, 25 bp, Homo sapien
gacagatttgcttctctgccttcta

SEQ ID NO: 1627958 - DNA, 25 bp, Homo sapien
ctccaggatccccagacagatttgc

SEQ ID NO: 1627959 - DNA, 25 bp, Homo sapien
tgggtagcttgtttgtgactcacgc

SEQ ID NO: 1627960 - DNA, 25 bp, Homo sapien
tcttggacaggcgagtgatctggct

SEQ ID NO: 1627961 - DNA, 25 bp, Homo sapien
tcagacatgctcaaacagagaggct

SEQ ID NO: 1627962 - DNA, 25 bp, Homo sapien
gctctgttctggagggacaccattc

SEQ ID NO: 1627963 - DNA, 25 bp, Homo sapien
catatatttcagcatgacagaccac

SEQ ID NO: 1627964 - DNA, 25 bp, Homo sapien
cactgtgagccagggttctgtagcc

SEQ ID NO: 1627965 - DNA, 25 bp, Homo sapien
tgccttcagattgttccgggataaa

SEQ ID NO: 1627966 - DNA, 25 bp, Homo sapien
tgtccggtacgagactgaaggccca

SEQ ID NO: 1627967 - DNA, 25 bp, Homo sapien
ggagatccaggagataacagtaata

SEQ ID NO: 1627968 - DNA, 25 bp, Homo sapien
gcccagtggctcatcgcaggtgtca

SEQ ID NO: 1627969 - DNA, 25 bp, Homo sapien
agggccaaaccccacgttcacagat

SEQ ID NO: 1627970 - DNA, 25 bp, Homo sapien
gagataacagtaatatccgtgacag

SEQ ID NO: 1627971 - DNA, 25 bp, Homo sapien
gactgatcgtgcttcgtgttcctag

SEQ ID NO: 1627972 - DNA, 25 bp, Homo sapien
aaatggtggtttagcagagacgcgc

SEQ ID NO: 1627973 - DNA, 25 bp, Homo sapien
ttatttacaaatgtgacctggccca

SEQ ID NO: 1627974 - DNA, 25 bp, Homo sapien
caggattgccgccagggaaaatgct

SEQ ID NO: 1627975 - DNA, 25 bp, Homo sapien
tcagagctgacccacgacctagctt

SEQ ID NO: 1627976 - DNA, 25 bp, Homo sapien
gacctagctttctggtgtgactcgg

SEQ ID NO: 1627977 - DNA, 25 bp, Homo sapien
aatgacaaggcacgatttgctcccc

SEQ ID NO: 1627978 - DNA, 25 bp, Homo sapien
gagaggcgtggaactagagaccctc

SEQ ID NO: 1627979 - DNA, 25 bp, Homo sapien
ggaatctcctagtcctggctcgcac

SEQ ID NO: 1627980 - DNA, 25 bp, Homo sapien
atcttagacgcaccaagtccggcgc

SEQ ID NO: 1627981 - DNA, 25 bp, Homo sapien
gctttcaggaggcaccggaatctcc

SEQ ID NO: 1627982 - DNA, 25 bp, Homo sapien
taaatactagagttgccgggctccc

SEQ ID NO: 1627983 - DNA, 25 bp, Homo sapien
tgcgtctccacgttgcgctgcttgg

SEQ ID NO: 1627984 - DNA, 25 bp, Homo sapien
tgttccacccgcttgcgcaggcggt

SEQ ID NO: 1627985 - DNA, 25 bp, Homo sapien
gcagcgtgtccagttcgcggctcag

SEQ ID NO: 1627986 - DNA, 25 bp, Homo sapien
gccgcacccggtactcgttgctgtt

SEQ ID NO: 1627987 - DNA, 25 bp, Homo sapien
ctcgcgcggaggtcggggtgcgcgg

SEQ ID NO: 1627988 - DNA, 25 bp, Homo sapien
gcgcggcgcccagccccttgagcgc

SEQ ID NO: 1627989 - DNA, 25 bp, Homo sapien
cggaggtcggggtgcgcggcgccca

SEQ ID NO: 1627990 - DNA, 25 bp, Homo sapien
gtgcgcggcgcccagccccttgagc

SEQ ID NO: 1627991 - DNA, 25 bp, Homo sapien
gtgcgggctgggcacgggcgtgggc

SEQ ID NO: 1627992 - DNA, 25 bp, Homo sapien
ggtgcgggctgggcacgggcgtggg

SEQ ID NO: 1627993 - DNA, 25 bp, Homo sapien
cgcagtgcgcgatctggaactgcag

SEQ ID NO: 1627994 - DNA, 25 bp, Homo sapien
gccgcagtgcgcgatctggaactgc

SEQ ID NO: 1627995 - DNA, 25 bp, Homo sapien
ccgcagtgcgcgatctggaactgca

SEQ ID NO: 1627996 - DNA, 25 bp, Homo sapien
ggccgcgcagccgtagccgggcggg

SEQ ID NO: 1627997 - DNA, 25 bp, Homo sapien
ccggcgccccgacgcgctcgtacag

SEQ ID NO: 1627998 - DNA, 25 bp, Homo sapien
ctgccgtccaggtagccggcggccg

SEQ ID NO: 1627999 - DNA, 25 bp, Homo sapien
gcgcgcccgggtagtcaaagtcgcc

SEQ ID NO: 1628000 - DNA, 25 bp, Homo sapien
tcgatggacgtctcgtgctcgcaga

SEQ ID NO: 1628001 - DNA, 25 bp, Homo sapien
taggcgctgatgtcgatggacgtct

SEQ ID NO: 1628002 - DNA, 25 bp, Homo sapien
tggacgtctcgtgctcgcagatgcc

SEQ ID NO: 1628003 - DNA, 25 bp, Homo sapien
gctgatgtcgatggacgtctcgtgc

SEQ ID NO: 1628004 - DNA, 25 bp, Homo sapien
gcggctccgcctcgtagaagtcggc

SEQ ID NO: 1628005 - DNA, 25 bp, Homo sapien
gctccgcctcgtagaagtcggccga

SEQ ID NO: 1628006 - DNA, 25 bp, Homo sapien
gcggcgctgctgggcgcgtgcgggg

SEQ ID NO: 1628007 - DNA, 25 bp, Homo sapien
tccgcctcgtagaagtcggccgact

SEQ ID NO: 1628008 - DNA, 25 bp, Homo sapien
gccgcccacccggagaccctgctcg

SEQ ID NO: 1628009 - DNA, 25 bp, Homo sapien
gcacctccgggtcgcgaatggcccg

SEQ ID NO: 1628010 - DNA, 25 bp, Homo sapien
agttagagttctcccggcatggcga

SEQ ID NO: 1628011 - DNA, 25 bp, Homo sapien
ggcatggcgagcctcggcggcctcc

SEQ ID NO: 1628012 - DNA, 25 bp, Homo sapien
ctcggaggacgccggggtcccatgg

SEQ ID NO: 1628013 - DNA, 25 bp, Homo sapien
ctctcggaggacgccggggtcccat

SEQ ID NO: 1628014 - DNA, 25 bp, Homo sapien
gacgccggggtcccatgggcggcgc

SEQ ID NO: 1628015 - DNA, 25 bp, Homo sapien
tctcggaggacgccggggtcccatg

SEQ ID NO: 1628016 - DNA, 25 bp, Homo sapien
aattacttctccaggtcggagcgcg

SEQ ID NO: 1628017 - DNA, 25 bp, Homo sapien
tgttacccggcgtggagtcgccgat

SEQ ID NO: 1628018 - DNA, 25 bp, Homo sapien
tggccggtcgatccgcccgggctgg

SEQ ID NO: 1628019 - DNA, 25 bp, Homo sapien
ggccggcgctgttacccggcgtgga

SEQ ID NO: 1628020 - DNA, 25 bp, Homo sapien
tccccattcaggtgggcgccaacgg

SEQ ID NO: 1628021 - DNA, 25 bp, Homo sapien
gcacgcacagggagaactctgccca

SEQ ID NO: 1628022 - DNA, 25 bp, Homo sapien
gggctgccaggtccgagcacgcaca

SEQ ID NO: 1628023 - DNA, 25 bp, Homo sapien
ccaacggcgggagcgagggtgtcca

SEQ ID NO: 1628024 - DNA, 25 bp, Homo sapien
agccacgtgcgtccctcgcattctt

SEQ ID NO: 1628025 - DNA, 25 bp, Homo sapien
ggagtcttgggagccctcaagtgtc

SEQ ID NO: 1628026 - DNA, 25 bp, Homo sapien
gctacggaccgtcagctgggcccag

SEQ ID NO: 1628027 - DNA, 25 bp, Homo sapien
tcgccactggcgctgaggcctgacg

SEQ ID NO: 1628028 - DNA, 25 bp, Homo sapien
accttggagcagttgcgaagatcca

SEQ ID NO: 1628029 - DNA, 25 bp, Homo sapien
ccttggagcagttgcgaagatccat

SEQ ID NO: 1628030 - DNA, 25 bp, Homo sapien
aagaccttggagcagttgcgaagat

SEQ ID NO: 1628031 - DNA, 25 bp, Homo sapien
gaccttggagcagttgcgaagatcc

SEQ ID NO: 1628032 - DNA, 25 bp, Homo sapien
catgttctggtttttccttggaagc

SEQ ID NO: 1628033 - DNA, 25 bp, Homo sapien
ctaccatgttctggtttttccttgg

SEQ ID NO: 1628034 - DNA, 25 bp, Homo sapien
taccatgttctggtttttccttgga

SEQ ID NO: 1628035 - DNA, 25 bp, Homo sapien
ccatgttctggtttttccttggaag

SEQ ID NO: 1628036 - DNA, 25 bp, Homo sapien
ctctggctcatgtgcaactgagaca

SEQ ID NO: 1628037 - DNA, 25 bp, Homo sapien
aagccagtcctaagagcagcttgta

SEQ ID NO: 1628038 - DNA, 25 bp, Homo sapien
tggctcatgtgcaactgagacaaag

SEQ ID NO: 1628039 - DNA, 25 bp, Homo sapien
tctggctcatgtgcaactgagacaa

SEQ ID NO: 1628040 - DNA, 25 bp, Homo sapien
gaggggcgcccagggaagcatggac

SEQ ID NO: 1628041 - DNA, 25 bp, Homo sapien
aggggcgcccagggaagcatggaca

SEQ ID NO: 1628042 - DNA, 25 bp, Homo sapien
ggggcgcccagggaagcatggacat

SEQ ID NO: 1628043 - DNA, 25 bp, Homo sapien
gtacttccctcatctgagcagccat

SEQ ID NO: 1628044 - DNA, 25 bp, Homo sapien
cgtacttccctcatctgagcagcca

SEQ ID NO: 1628045 - DNA, 25 bp, Homo sapien
tgaagcgagccctgttgatctgcag

SEQ ID NO: 1628046 - DNA, 25 bp, Homo sapien
tcagttggccttaagcgtcatgtgt

SEQ ID NO: 1628047 - DNA, 25 bp, Homo sapien
tcatgtgtttgaagcgagccctgtt

SEQ ID NO: 1628048 - DNA, 25 bp, Homo sapien
ttggccttaagcgtcatgtgtttga

SEQ ID NO: 1628049 - DNA, 25 bp, Homo sapien
gatgaggccggtgctaaagttgaat

SEQ ID NO: 1628050 - DNA, 25 bp, Homo sapien
gatggataggaaccaccggtccaat

SEQ ID NO: 1628051 - DNA, 25 bp, Homo sapien
ggaagccctcttatactcagtacca

SEQ ID NO: 1628052 - DNA, 25 bp, Homo sapien
taccaacaggtttgccaagtctgga

SEQ ID NO: 1628053 - DNA, 25 bp, Homo sapien
aatttcaggtccagtccactgccca

SEQ ID NO: 1628054 - DNA, 25 bp, Homo sapien
tcttggcagagaggtaacttcagat

SEQ ID NO: 1628055 - DNA, 25 bp, Homo sapien
tgtggtcttggcagagaggtaactt

SEQ ID NO: 1628056 - DNA, 25 bp, Homo sapien
gggcctgtgacccatactcagacaa

SEQ ID NO: 1628057 - DNA, 25 bp, Homo sapien
cttaaagatggtggagcatctgctc

SEQ ID NO: 1628058 - DNA, 25 bp, Homo sapien
gagcatctgctcacaaggatggcgg

SEQ ID NO: 1628059 - DNA, 25 bp, Homo sapien
cttggatcttaaagatggtggagca

SEQ ID NO: 1628060 - DNA, 25 bp, Homo sapien
agcatctgctcacaaggatggcggg

SEQ ID NO: 1628061 - DNA, 25 bp, Homo sapien
tggctgtatctccaactggctgttc

SEQ ID NO: 1628062 - DNA, 25 bp, Homo sapien
cgggaagaggccataacggaagata

SEQ ID NO: 1628063 - DNA, 25 bp, Homo sapien
gaggccataacggaagatatctggc

SEQ ID NO: 1628064 - DNA, 25 bp, Homo sapien
gatatctggctgtatctccaactgg

SEQ ID NO: 1628065 - DNA, 25 bp, Homo sapien
tgggcggctcagtgatgacgttcct

SEQ ID NO: 1628066 - DNA, 25 bp, Homo sapien
caaaccttggatgccgatactggtg

SEQ ID NO: 1628067 - DNA, 25 bp, Homo sapien
tcaatccaaaccttggatgccgata

SEQ ID NO: 1628068 - DNA, 25 bp, Homo sapien
cgttcctgtgtgactcaagtggttt

SEQ ID NO: 1628069 - DNA, 25 bp, Homo sapien
tcacttagggatgagcaggcatcca

SEQ ID NO: 1628070 - DNA, 25 bp, Homo sapien
tgaagggattacagttccaagcagc

SEQ ID NO: 1628071 - DNA, 25 bp, Homo sapien
ttgacctggtagatgttgcttctct

SEQ ID NO: 1628072 - DNA, 25 bp, Homo sapien
gagacttctactctattgacagggc

SEQ ID NO: 1628073 - DNA, 25 bp, Homo sapien
aggggtaatccttgtgggaggcaca

SEQ ID NO: 1628074 - DNA, 25 bp, Homo sapien
actcttcatggaaggggtaatcctt

SEQ ID NO: 1628075 - DNA, 25 bp, Homo sapien
tcaaaactcttcatggaaggggtaa

SEQ ID NO: 1628076 - DNA, 25 bp, Homo sapien
aatccttgtgggaggcacagctcac

SEQ ID NO: 1628077 - DNA, 25 bp, Homo sapien
gacttggggatcacacccaaattcc

SEQ ID NO: 1628078 - DNA, 25 bp, Homo sapien
tcctcggggttgacccagggcctgc

SEQ ID NO: 1628079 - DNA, 25 bp, Homo sapien
gctgggagtgccaacggggctatag

SEQ ID NO: 1628080 - DNA, 25 bp, Homo sapien
aacggggctataggcggtcaccacg

SEQ ID NO: 1628081 - DNA, 25 bp, Homo sapien
ggaaccacattacccaactcattca

SEQ ID NO: 1628082 - DNA, 25 bp, Homo sapien
gaaccacattacccaactcattcaa

SEQ ID NO: 1628083 - DNA, 25 bp, Homo sapien
gggaaccacattacccaactcattc

SEQ ID NO: 1628084 - DNA, 25 bp, Homo sapien
tcaggctgctgagggtcttctggca

SEQ ID NO: 1628085 - DNA, 25 bp, Homo sapien
caggcccttcccatggtatgtgcac

SEQ ID NO: 1628086 - DNA, 25 bp, Homo sapien
ccatggtatgtgcaccacagcttac

SEQ ID NO: 1628087 - DNA, 25 bp, Homo sapien
cttcaccaggcccttcccatggtat

SEQ ID NO: 1628088 - DNA, 25 bp, Homo sapien
acgatgaagagctcctcacgcttta

SEQ ID NO: 1628089 - DNA, 25 bp, Homo sapien
tgaagagctcctcacgctttaccac

SEQ ID NO: 1628090 - DNA, 25 bp, Homo sapien
gatgaagagctcctcacgctttacc

SEQ ID NO: 1628091 - DNA, 25 bp, Homo sapien
taacgatgaagagctcctcacgctt

SEQ ID NO: 1628092 - DNA, 25 bp, Homo sapien
tgaatggccacccccacctcattct

SEQ ID NO: 1628093 - DNA, 25 bp, Homo sapien
aatggccacccccacctcattctca

SEQ ID NO: 1628094 - DNA, 25 bp, Homo sapien
tggccacccccacctcattctcatg

SEQ ID NO: 1628095 - DNA, 25 bp, Homo sapien
ctgaatggccacccccacctcattc

SEQ ID NO: 1628096 - DNA, 25 bp, Homo sapien
gtgggcacagtcaatgtggcagtac

SEQ ID NO: 1628097 - DNA, 25 bp, Homo sapien
gatggccacattcacggcctcagtc

SEQ ID NO: 1628098 - DNA, 25 bp, Homo sapien
cattgttgagcacaaggtggctggc

SEQ ID NO: 1628099 - DNA, 25 bp, Homo sapien
ccgacattgatggccacattcacgg

SEQ ID NO: 1628100 - DNA, 25 bp, Homo sapien
cattgatggccacattcacggcctc

SEQ ID NO: 1628101 - DNA, 25 bp, Homo sapien
caagttgcaccctccggttggtgga

SEQ ID NO: 1628102 - DNA, 25 bp, Homo sapien
ccattcttaagagtcgtgaggtcct

SEQ ID NO: 1628103 - DNA, 25 bp, Homo sapien
tccttctgaatgtaaaactggagcc

SEQ ID NO: 1628104 - DNA, 25 bp, Homo sapien
gattgctgaccgtgccgtttctggg

SEQ ID NO: 1628105 - DNA, 25 bp, Homo sapien
gcacctatggtaggcgctacagaca

SEQ ID NO: 1628106 - DNA, 25 bp, Homo sapien
gatgctcccatggaatttataccag

SEQ ID NO: 1628107 - DNA, 25 bp, Homo sapien
aaatctcttgggaattcgatgctcc

SEQ ID NO: 1628108 - DNA, 25 bp, Homo sapien
gatcctactggctccttagcagctg

SEQ ID NO: 1628109 - DNA, 25 bp, Homo sapien
tgaacaacccattttgcactcagtg

SEQ ID NO: 1628110 - DNA, 25 bp, Homo sapien
tgctggcccctgcaatcagttgttg

SEQ ID NO: 1628111 - DNA, 25 bp, Homo sapien
tttaatcaaacacgaccaggtccga

SEQ ID NO: 1628112 - DNA, 25 bp, Homo sapien
caggtccgaaatgcaggtcatgagt

SEQ ID NO: 1628113 - DNA, 25 bp, Homo sapien
tcacttcttgataatcagagatgtt

SEQ ID NO: 1628114 - DNA, 25 bp, Homo sapien
tcctagtgaccctctgaaaagtgtt

SEQ ID NO: 1628115 - DNA, 25 bp, Homo sapien
tagatagaaataagagatttctcct

SEQ ID NO: 1628116 - DNA, 25 bp, Homo sapien
aacgggcagctttggtatggaatgt

SEQ ID NO: 1628117 - DNA, 25 bp, Homo sapien
gaaggcaaacctggaatggtgtaca

SEQ ID NO: 1628118 - DNA, 25 bp, Homo sapien
gcaaacctggaatggtgtacagaat

SEQ ID NO: 1628119 - DNA, 25 bp, Homo sapien
tctgtgagaaggcaaacctggaatg

SEQ ID NO: 1628120 - DNA, 25 bp, Homo sapien
cctggaatggtgtacagaattctag

SEQ ID NO: 1628121 - DNA, 25 bp, Homo sapien
gtctgatcaaatgccgaagctggga

SEQ ID NO: 1628122 - DNA, 25 bp, Homo sapien
agcaggctgcccatcacgaaaagag

SEQ ID NO: 1628123 - DNA, 25 bp, Homo sapien
acgaaaagaggttgcaaggccaggc

SEQ ID NO: 1628124 - DNA, 25 bp, Homo sapien
tgggtgccgtctctcgctactggag

SEQ ID NO: 1628125 - DNA, 25 bp, Homo sapien
accacgacgtcctcctcgatgcgga

SEQ ID NO: 1628126 - DNA, 25 bp, Homo sapien
atgccgctgtcagtcaccacgacgt

SEQ ID NO: 1628127 - DNA, 25 bp, Homo sapien
cttcaatctcttccacagtgcgggg

SEQ ID NO: 1628128 - DNA, 25 bp, Homo sapien
ttgtcacagcctgccatgcatgctt

SEQ ID NO: 1628129 - DNA, 25 bp, Homo sapien
gatgggagcccctggagcgggcagg

SEQ ID NO: 1628130 - DNA, 25 bp, Homo sapien
caggtggatgggagcccctggagcg

SEQ ID NO: 1628131 - DNA, 25 bp, Homo sapien
tggatgggagcccctggagcgggca

SEQ ID NO: 1628132 - DNA, 25 bp, Homo sapien
cctgtctttgccaggtggatgggag

SEQ ID NO: 1628133 - DNA, 25 bp, Homo sapien
aggccgggctcgtcgatgcgctcca

SEQ ID NO: 1628134 - DNA, 25 bp, Homo sapien
caggacctcgcggttaaggaaggag

SEQ ID NO: 1628135 - DNA, 25 bp, Homo sapien
tggtcgatgaagtagatgcccggct

SEQ ID NO: 1628136 - DNA, 25 bp, Homo sapien
gccaaaaccgcgaaagcgctgcagg

SEQ ID NO: 1628137 - DNA, 25 bp, Homo sapien
tgtggggaacagaggtgaggggcct

SEQ ID NO: 1628138 - DNA, 25 bp, Homo sapien
tgaggggcctgatgagcagctccag

SEQ ID NO: 1628139 - DNA, 25 bp, Homo sapien
gaacagaggtgaggggcctgatgag

SEQ ID NO: 1628140 - DNA, 25 bp, Homo sapien
aggtgaggggcctgatgagcagctc

SEQ ID NO: 1628141 - DNA, 25 bp, Homo sapien
aggagagatgggcatgtgagggccg

SEQ ID NO: 1628142 - DNA, 25 bp, Homo sapien
tgccagtctcgtgggctctcttgac

SEQ ID NO: 1628143 - DNA, 25 bp, Homo sapien
agatgggcatgtgagggccggtgcc

SEQ ID NO: 1628144 - DNA, 25 bp, Homo sapien
gagagatgggcatgtgagggccggt

SEQ ID NO: 1628145 - DNA, 25 bp, Homo sapien
ttccaggcagcccaagtagaaactg

SEQ ID NO: 1628146 - DNA, 25 bp, Homo sapien
tacccctggatcttgagtgtccctg

SEQ ID NO: 1628147 - DNA, 25 bp, Homo sapien
gccgaggcccagattttccgtgtga

SEQ ID NO: 1628148 - DNA, 25 bp, Homo sapien
ttagtgcgccagtgcaaatgtgccg

SEQ ID NO: 1628149 - DNA, 25 bp, Homo sapien
ctctgggaattacaggagagctcct

SEQ ID NO: 1628150 - DNA, 25 bp, Homo sapien
tctggtcaggggatgagcctgccct

SEQ ID NO: 1628151 - DNA, 25 bp, Homo sapien
tcatttctgactgtttgggggccaa

SEQ ID NO: 1628152 - DNA, 25 bp, Homo sapien
cctctgagccagtgggcacgagtat

SEQ ID NO: 1628153 - DNA, 25 bp, Homo sapien
cgctgggcacggccagagaggctgt

SEQ ID NO: 1628154 - DNA, 25 bp, Homo sapien
gtaaggtaaccagaaacaggctggc

SEQ ID NO: 1628155 - DNA, 25 bp, Homo sapien
ggctgtgactgattccacggagggc

SEQ ID NO: 1628156 - DNA, 25 bp, Homo sapien
ctgtgactgattccacggagggcag

SEQ ID NO: 1628157 - DNA, 25 bp, Homo sapien
gccccggccccacaacacttgcctc

SEQ ID NO: 1628158 - DNA, 25 bp, Homo sapien
tggccccggccccacaacacttgcc

SEQ ID NO: 1628159 - DNA, 25 bp, Homo sapien
ggaggcgatgaggagacaccacagc

SEQ ID NO: 1628160 - DNA, 25 bp, Homo sapien
ccccggccccacaacacttgcctct

SEQ ID NO: 1628161 - DNA, 25 bp, Homo sapien
aagatgaaaacagtttgctgccaat

SEQ ID NO: 1628162 - DNA, 25 bp, Homo sapien
aaacagtttgctgccaatttttgct

SEQ ID NO: 1628163 - DNA, 25 bp, Homo sapien
aaaaaagcgctttggcgactaatga

SEQ ID NO: 1628164 - DNA, 25 bp, Homo sapien
cgctttggcgactaatgaataacga

SEQ ID NO: 1628165 - DNA, 25 bp, Homo sapien
cagctaacaatgtctggaaggccca

SEQ ID NO: 1628166 - DNA, 25 bp, Homo sapien
tcagctaacaatgtctggaaggccc

SEQ ID NO: 1628167 - DNA, 25 bp, Homo sapien
tcccttatctgccaacgggccccag

SEQ ID NO: 1628168 - DNA, 25 bp, Homo sapien
agcctcccttatctgccaacgggcc

SEQ ID NO: 1628169 - DNA, 25 bp, Homo sapien
ctgagggccggggaaccttgtctgg

SEQ ID NO: 1628170 - DNA, 25 bp, Homo sapien
gccggggaaccttgtctggagatgg

SEQ ID NO: 1628171 - DNA, 25 bp, Homo sapien
tgatgggcaggccactccgcctgcc

SEQ ID NO: 1628172 - DNA, 25 bp, Homo sapien
gctgatgggcaggccactccgcctg

SEQ ID NO: 1628173 - DNA, 25 bp, Homo sapien
gatgggcaggccactccgcctgcca

SEQ ID NO: 1628174 - DNA, 25 bp, Homo sapien
gggcaggccactccgcctgccatgt

SEQ ID NO: 1628175 - DNA, 25 bp, Homo sapien
ctgccgctcaggatgcccatgtggg

SEQ ID NO: 1628176 - DNA, 25 bp, Homo sapien
tggccaagcccgtgaggcataaaca

SEQ ID NO: 1628177 - DNA, 25 bp, Homo sapien
tcgtgcacgtcaatgcccaggaagt

SEQ ID NO: 1628178 - DNA, 25 bp, Homo sapien
agccaggcggtgcatgtcaggccac

SEQ ID NO: 1628179 - DNA, 25 bp, Homo sapien
ccattcctccatcgcgcatgaccag

SEQ ID NO: 1628180 - DNA, 25 bp, Homo sapien
gcaccccggacagtggcattggcca

SEQ ID NO: 1628181 - DNA, 25 bp, Homo sapien
gttccacacttgacattcacttgtt

SEQ ID NO: 1628182 - DNA, 25 bp, Homo sapien
tggttccacacttgacattcacttg

SEQ ID NO: 1628183 - DNA, 25 bp, Homo sapien
ctgctgtttccttagctggggccac

SEQ ID NO: 1628184 - DNA, 25 bp, Homo sapien
tgctgtttccttagctggggccacc

SEQ ID NO: 1628185 - DNA, 25 bp, Homo sapien
acggcctcctcgatgctacgggagg

SEQ ID NO: 1628186 - DNA, 25 bp, Homo sapien
gacctgccccatccggagggcagct

SEQ ID NO: 1628187 - DNA, 25 bp, Homo sapien
tgatccagatggagtccgactctgc

SEQ ID NO: 1628188 - DNA, 25 bp, Homo sapien
actgtgtgtgatccagatggagtcc

SEQ ID NO: 1628189 - DNA, 25 bp, Homo sapien
tggaggacgcctgagctcccctaca

SEQ ID NO: 1628190 - DNA, 25 bp, Homo sapien
ctgagctcccctacacagggggctg

SEQ ID NO: 1628191 - DNA, 25 bp, Homo sapien
cctgtctctctggaggtctgtatag

SEQ ID NO: 1628192 - DNA, 25 bp, Homo sapien
ctggctcctggaggacgcctgagct

SEQ ID NO: 1628193 - DNA, 25 bp, Homo sapien
cggaagcgaagcagtaatactcacc

SEQ ID NO: 1628194 - DNA, 25 bp, Homo sapien
tggtctgcagtgaacttgccgttgg

SEQ ID NO: 1628195 - DNA, 25 bp, Homo sapien
tcatggcacccatgacggcacggga

SEQ ID NO: 1628196 - DNA, 25 bp, Homo sapien
atactcaccgcccatgtcgaacagg

SEQ ID NO: 1628197 - DNA, 25 bp, Homo sapien
tgggtgcctggatatcatccgccag

SEQ ID NO: 1628198 - DNA, 25 bp, Homo sapien
gttctccagtgcagaccagactcag

SEQ ID NO: 1628199 - DNA, 25 bp, Homo sapien
taccggactgtgctgacacaaaaga

SEQ ID NO: 1628200 - DNA, 25 bp, Homo sapien
taggaggcgccaaatcagaaggtga

SEQ ID NO: 1628201 - DNA, 25 bp, Homo sapien
gatgcaagcttttctggaatccagg

SEQ ID NO: 1628202 - DNA, 25 bp, Homo sapien
ttggctcaatcgagaacaggcacgc

SEQ ID NO: 1628203 - DNA, 25 bp, Homo sapien
gatgcatctccaaacaacgtgctgg

SEQ ID NO: 1628204 - DNA, 25 bp, Homo sapien
gaccctaccatctttggccgagtga

SEQ ID NO: 1628205 - DNA, 25 bp, Homo sapien
cccttttcgtgtgacggccactcct

SEQ ID NO: 1628206 - DNA, 25 bp, Homo sapien
aaagctgcccatgccgccagcccat

SEQ ID NO: 1628207 - DNA, 25 bp, Homo sapien
tctctccagtgcgttcctgggcatc

SEQ ID NO: 1628208 - DNA, 25 bp, Homo sapien
cagtgcgttcctgggcatctctgcc

SEQ ID NO: 1628209 - DNA, 25 bp, Homo sapien
gtgacgggagcagctgcgtcctgtg

SEQ ID NO: 1628210 - DNA, 25 bp, Homo sapien
cacgcggtgggtgacgggagcagct

SEQ ID NO: 1628211 - DNA, 25 bp, Homo sapien
tgggtgacgggagcagctgcgtcct

SEQ ID NO: 1628212 - DNA, 25 bp, Homo sapien
ctggtgcacgcggtgggtgacggga

SEQ ID NO: 1628213 - DNA, 25 bp, Homo sapien
cctgcagggtcgaggtctcgccatt

SEQ ID NO: 1628214 - DNA, 25 bp, Homo sapien
agcaggagtaggctggccgcatccc

SEQ ID NO: 1628215 - DNA, 25 bp, Homo sapien
cagcgcgatggtggcagacagactc

SEQ ID NO: 1628216 - DNA, 25 bp, Homo sapien
cacccatggggtccgcagcgcgatg

SEQ ID NO: 1628217 - DNA, 25 bp, Homo sapien
caggaaccagggtgtctggttcata

SEQ ID NO: 1628218 - DNA, 25 bp, Homo sapien
tcggtgaggacaccgggcctgctgc

SEQ ID NO: 1628219 - DNA, 25 bp, Homo sapien
ccagctcggtgaggacaccgggcct

SEQ ID NO: 1628220 - DNA, 25 bp, Homo sapien
gctcggtgaggacaccgggcctgct

SEQ ID NO: 1628221 - DNA, 25 bp, Homo sapien
cccagctcggtgaggacaccgggcc

SEQ ID NO: 1628222 - DNA, 25 bp, Homo sapien
gccagaatgcgctacagggttaaag

SEQ ID NO: 1628223 - DNA, 25 bp, Homo sapien
taaaggagcagtcacttcttctggg

SEQ ID NO: 1628224 - DNA, 25 bp, Homo sapien
taggcgctcggcagatcaatttcaa

SEQ ID NO: 1628225 - DNA, 25 bp, Homo sapien
tattatttaccgaacgcagtaggcg

SEQ ID NO: 1628226 - DNA, 25 bp, Homo sapien
cggcacatcgtgctcaggaaagccc

SEQ ID NO: 1628227 - DNA, 25 bp, Homo sapien
cgtggcttctatgaagaactgtgag

SEQ ID NO: 1628228 - DNA, 25 bp, Homo sapien
aggaaagccctgcacgcagccacgg

SEQ ID NO: 1628229 - DNA, 25 bp, Homo sapien
gcagccacgggtcagcactgctgac

SEQ ID NO: 1628230 - DNA, 25 bp, Homo sapien
ctgaacgcagggccgcagaggccac

SEQ ID NO: 1628231 - DNA, 25 bp, Homo sapien
aacgcagggccgcagaggccacggg

SEQ ID NO: 1628232 - DNA, 25 bp, Homo sapien
cgcagggccgcagaggccacgggct

SEQ ID NO: 1628233 - DNA, 25 bp, Homo sapien
gcagggccgcagaggccacgggctc

SEQ ID NO: 1628234 - DNA, 25 bp, Homo sapien
tatccccattctggatcgttcggtc

SEQ ID NO: 1628235 - DNA, 25 bp, Homo sapien
cgtagtgtagcacggctgagttctc

SEQ ID NO: 1628236 - DNA, 25 bp, Homo sapien
tcggtcgttgggagctccggcgtgt

SEQ ID NO: 1628237 - DNA, 25 bp, Homo sapien
gctccggcgtgtccgtagtgtagca

SEQ ID NO: 1628238 - DNA, 25 bp, Homo sapien
atgtaaaacttagcaatgggccggg

SEQ ID NO: 1628239 - DNA, 25 bp, Homo sapien
ggatgtgggcatcatgtggaacaca

SEQ ID NO: 1628240 - DNA, 25 bp, Homo sapien
cctctatggaaagggccccggctgt

SEQ ID NO: 1628241 - DNA, 25 bp, Homo sapien
ctcctggctgaaggcgtcgttaggc

SEQ ID NO: 1628242 - DNA, 25 bp, Homo sapien
gagctgtggcgcatgccgccccggg

SEQ ID NO: 1628243 - DNA, 25 bp, Homo sapien
gctgtggcgcatgccgccccgggag

SEQ ID NO: 1628244 - DNA, 25 bp, Homo sapien
cccgggagtagcagtagtgctcgaa

SEQ ID NO: 1628245 - DNA, 25 bp, Homo sapien
ccgccccgggagtagcagtagtgct

SEQ ID NO: 1628246 - DNA, 25 bp, Homo sapien
ctccacgagccccatgaaccccaag

SEQ ID NO: 1628247 - DNA, 25 bp, Homo sapien
cactccacgagccccatgaacccca

SEQ ID NO: 1628248 - DNA, 25 bp, Homo sapien
catgaaccccaagggaaggccctcg

SEQ ID NO: 1628249 - DNA, 25 bp, Homo sapien
cccactccacgagccccatgaaccc

SEQ ID NO: 1628250 - DNA, 25 bp, Homo sapien
ctgcaaagtgcagcccgacactggt

SEQ ID NO: 1628251 - DNA, 25 bp, Homo sapien
ctggtcacctttgccggccacgttg

SEQ ID NO: 1628252 - DNA, 25 bp, Homo sapien
gtgcagcccgacactggtcaccttt

SEQ ID NO: 1628253 - DNA, 25 bp, Homo sapien
tttgccggccacgttgacaactcca

SEQ ID NO: 1628254 - DNA, 25 bp, Homo sapien
gcaccacgtgctggatattcacgcc

SEQ ID NO: 1628255 - DNA, 25 bp, Homo sapien
aaaagaggaggagcaccacgtgctg

SEQ ID NO: 1628256 - DNA, 25 bp, Homo sapien
gttccataggaaggagttgaaaaga

SEQ ID NO: 1628257 - DNA, 25 bp, Homo sapien
accacgtgctggatattcacgcccg

SEQ ID NO: 1628258 - DNA, 25 bp, Homo sapien
gttttctgcagactttaggcttggg

SEQ ID NO: 1628259 - DNA, 25 bp, Homo sapien
ttttctgacgcaacttgaggacaca

SEQ ID NO: 1628260 - DNA, 25 bp, Homo sapien
gcaataacaggtgggcaaaacgagc

SEQ ID NO: 1628261 - DNA, 25 bp, Homo sapien
aaaacgagcccacgttttctgcaga

SEQ ID NO: 1628262 - DNA, 25 bp, Homo sapien
gggcagctgtggcggcacagggggc

SEQ ID NO: 1628263 - DNA, 25 bp, Homo sapien
aagggcacccaagttctgggcagct

SEQ ID NO: 1628264 - DNA, 25 bp, Homo sapien
ctgggcagctgtggcggcacagggg

SEQ ID NO: 1628265 - DNA, 25 bp, Homo sapien
gggcacccaagttctgggcagctgt

SEQ ID NO: 1628266 - DNA, 25 bp, Homo sapien
ttgatgcggacgcaacgtgtgcccc

SEQ ID NO: 1628267 - DNA, 25 bp, Homo sapien
gatcttcaagcggtgagcactgagg

SEQ ID NO: 1628268 - DNA, 25 bp, Homo sapien
cggcgcggcacagttctgatcttca

SEQ ID NO: 1628269 - DNA, 25 bp, Homo sapien
ctgtggaagcgtgtgagcccggcgc

SEQ ID NO: 1628270 - DNA, 25 bp, Homo sapien
gtgcgcccaggactggggcacataa

SEQ ID NO: 1628271 - DNA, 25 bp, Homo sapien
ccaggactggggcacataagaggga

SEQ ID NO: 1628272 - DNA, 25 bp, Homo sapien
ggactggggcacataagagggagag

SEQ ID NO: 1628273 - DNA, 25 bp, Homo sapien
ccacagagagtgagaagtacctcat

SEQ ID NO: 1628274 - DNA, 25 bp, Homo sapien
agacacaggccgtctgcagcagatg

SEQ ID NO: 1628275 - DNA, 25 bp, Homo sapien
aacatggcagcgtcagacacaggcc

SEQ ID NO: 1628276 - DNA, 25 bp, Homo sapien
tgcggtgctcggcttcagcagcttg

SEQ ID NO: 1628277 - DNA, 25 bp, Homo sapien
gccggcaccaacatggcagcgtcag

SEQ ID NO: 1628278 - DNA, 25 bp, Homo sapien
cttcccaccagggcttccagaaggc

SEQ ID NO: 1628279 - DNA, 25 bp, Homo sapien
gggcttccagaaggccagccagcat

SEQ ID NO: 1628280 - DNA, 25 bp, Homo sapien
agggcttccagaaggccagccagca

SEQ ID NO: 1628281 - DNA, 25 bp, Homo sapien
accagggcttccagaaggccagcca

SEQ ID NO: 1628282 - DNA, 25 bp, Homo sapien
ttaccgtgtcggtctgtagctctgg

SEQ ID NO: 1628283 - DNA, 25 bp, Homo sapien
tcattttaccgtgtcggtctgtagc

SEQ ID NO: 1628284 - DNA, 25 bp, Homo sapien
attttaccgtgtcggtctgtagctc

SEQ ID NO: 1628285 - DNA, 25 bp, Homo sapien
tttaccgtgtcggtctgtagctctg

SEQ ID NO: 1628286 - DNA, 25 bp, Homo sapien
ccagctgtgtaacggcgatggttct

SEQ ID NO: 1628287 - DNA, 25 bp, Homo sapien
cttggttttgtgtggacgctgccag

SEQ ID NO: 1628288 - DNA, 25 bp, Homo sapien
cgatggttctagcatctctgttttc

SEQ ID NO: 1628289 - DNA, 25 bp, Homo sapien
gcgccaggcatggaatgcttggttt

SEQ ID NO: 1628290 - DNA, 25 bp, Homo sapien
ggccccatgccctgcctaagaggca

SEQ ID NO: 1628291 - DNA, 25 bp, Homo sapien
ggcaggcgggagccgtcctcagcat

SEQ ID NO: 1628292 - DNA, 25 bp, Homo sapien
catgccctgcctaagaggcaggcgg

SEQ ID NO: 1628293 - DNA, 25 bp, Homo sapien
agaggcaggcgggagccgtcctcag

SEQ ID NO: 1628294 - DNA, 25 bp, Homo sapien
ggttcagatggattttgtgtcggca

SEQ ID NO: 1628295 - DNA, 25 bp, Homo sapien
caggggttcagatggattttgtgtc

SEQ ID NO: 1628296 - DNA, 25 bp, Homo sapien
ttcagatggattttgtgtcggcaga

SEQ ID NO: 1628297 - DNA, 25 bp, Homo sapien
cagatggattttgtgtcggcagaca

SEQ ID NO: 1628298 - DNA, 25 bp, Homo sapien
gacctgattcctcgataaccactgg

SEQ ID NO: 1628299 - DNA, 25 bp, Homo sapien
gattcctcgataaccactgggctat

SEQ ID NO: 1628300 - DNA, 25 bp, Homo sapien
accacatccccaggaaatacggccg

SEQ ID NO: 1628301 - DNA, 25 bp, Homo sapien
gtagtgcagacctgattcctcgata

SEQ ID NO: 1628302 - DNA, 25 bp, Homo sapien
caaatgaatgggctgaaagaggagt

SEQ ID NO: 1628303 - DNA, 25 bp, Homo sapien
gggtgtaccatacgcacatgcgcat

SEQ ID NO: 1628304 - DNA, 25 bp, Homo sapien
tgggtgtacatatcacacacttgcg

SEQ ID NO: 1628305 - DNA, 25 bp, Homo sapien
acacttgcgaacatgcgcgtgcaca

SEQ ID NO: 1628306 - DNA, 25 bp, Homo sapien
cacaaggcttgtggcacactcatgg

SEQ ID NO: 1628307 - DNA, 25 bp, Homo sapien
tgaggggaccccaagtgctgtcaca

SEQ ID NO: 1628308 - DNA, 25 bp, Homo sapien
caggggaacactgctgcaccagtgc

SEQ ID NO: 1628309 - DNA, 25 bp, Homo sapien
gtcacaggtgcatccacaaggcttg

SEQ ID NO: 1628310 - DNA, 25 bp, Homo sapien
gggacacagactcatggaccctggg

SEQ ID NO: 1628311 - DNA, 25 bp, Homo sapien
tgcctccacaaaacgggcttttcta

SEQ ID NO: 1628312 - DNA, 25 bp, Homo sapien
tgtgggcagcagtgacaatgacccc

SEQ ID NO: 1628313 - DNA, 25 bp, Homo sapien
aagagggtggaattcacatgaagga

SEQ ID NO: 1628314 - DNA, 25 bp, Homo sapien
agcccttcctggatgaaaccattca

SEQ ID NO: 1628315 - DNA, 25 bp, Homo sapien
tgaaaccattcatgtcatccacaga

SEQ ID NO: 1628316 - DNA, 25 bp, Homo sapien
catgcctgccggcaggtatggagac

SEQ ID NO: 1628317 - DNA, 25 bp, Homo sapien
attcatgtcatccacagaactcaga

SEQ ID NO: 1628318 - DNA, 25 bp, Homo sapien
actcccgcagggagcgtctttcgca

SEQ ID NO: 1628319 - DNA, 25 bp, Homo sapien
tcgcaccagcaggtgataggtctgg

SEQ ID NO: 1628320 - DNA, 25 bp, Homo sapien
ccggaataattactcccgcagggag

SEQ ID NO: 1628321 - DNA, 25 bp, Homo sapien
gagcgtctttcgcaccagcaggtga

SEQ ID NO: 1628322 - DNA, 25 bp, Homo sapien
gtagctggcccactgtagagaagac

SEQ ID NO: 1628323 - DNA, 25 bp, Homo sapien
tgtccaccgaggtgactcggtactg

SEQ ID NO: 1628324 - DNA, 25 bp, Homo sapien
gccaaagccaactccaggtagctgg

SEQ ID NO: 1628325 - DNA, 25 bp, Homo sapien
tgactcggtactgtctggaccacct

SEQ ID NO: 1628326 - DNA, 25 bp, Homo sapien
ccctcctcagctcctctggggtcgc

SEQ ID NO: 1628327 - DNA, 25 bp, Homo sapien
ctcctcagctcctctggggtcgccc

SEQ ID NO: 1628328 - DNA, 25 bp, Homo sapien
agccccctcctcagctcctctgggg

SEQ ID NO: 1628329 - DNA, 25 bp, Homo sapien
cctcagctcctctggggtcgcccat

SEQ ID NO: 1628330 - DNA, 25 bp, Homo sapien
gagcctgtgttcaaagaggcacacc

SEQ ID NO: 1628331 - DNA, 25 bp, Homo sapien
ccagcaggtcttaaggatgcccacc

SEQ ID NO: 1628332 - DNA, 25 bp, Homo sapien
atagaagagcggctggtttcctttg

SEQ ID NO: 1628333 - DNA, 25 bp, Homo sapien
tcagcgattcacacagcagtgcagc

SEQ ID NO: 1628334 - DNA, 25 bp, Homo sapien
ggcatgagggctaaggaacggcggg

SEQ ID NO: 1628335 - DNA, 25 bp, Homo sapien
catgagggctaaggaacggcgggta

SEQ ID NO: 1628336 - DNA, 25 bp, Homo sapien
tggaaggcatgagggctaaggaacg

SEQ ID NO: 1628337 - DNA, 25 bp, Homo sapien
aaggcatgagggctaaggaacggcg

SEQ ID NO: 1628338 - DNA, 25 bp, Homo sapien
agcgaactgaagcatccaagcagcc

SEQ ID NO: 1628339 - DNA, 25 bp, Homo sapien
cacagccacagcgaactgaagcatc

SEQ ID NO: 1628340 - DNA, 25 bp, Homo sapien
ctaagcacagccacagcgaactgaa

SEQ ID NO: 1628341 - DNA, 25 bp, Homo sapien
gccacagcgaactgaagcatccaag

SEQ ID NO: 1628342 - DNA, 25 bp, Homo sapien
caaaggtttccttgtaccatgggtg

SEQ ID NO: 1628343 - DNA, 25 bp, Homo sapien
cttgtaccatgggtggcagcacact

SEQ ID NO: 1628344 - DNA, 25 bp, Homo sapien
ccgggtgccactggctcgctgcagc

SEQ ID NO: 1628345 - DNA, 25 bp, Homo sapien
cacggctgggcagccgccggaagct

SEQ ID NO: 1628346 - DNA, 25 bp, Homo sapien
tcagagtcataagagcagcaatttg

SEQ ID NO: 1628347 - DNA, 25 bp, Homo sapien
caagctgttttactggcggctttca

SEQ ID NO: 1628348 - DNA, 25 bp, Homo sapien
ttacacataaaaacggcaagctgtt

SEQ ID NO: 1628349 - DNA, 25 bp, Homo sapien
gagtcataagagcagcaatttggta

SEQ ID NO: 1628350 - DNA, 25 bp, Homo sapien
aatggtggggcactaaaccaccctg

SEQ ID NO: 1628351 - DNA, 25 bp, Homo sapien
aaatggcagaaacaaagtccgagag

SEQ ID NO: 1628352 - DNA, 25 bp, Homo sapien
aacaaagtccgagagtagaatggtg

SEQ ID NO: 1628353 - DNA, 25 bp, Homo sapien
ccctgaaaagtcatcgaaaaccatt

SEQ ID NO: 1628354 - DNA, 25 bp, Homo sapien
ttacccggagaaacatggtggctta

SEQ ID NO: 1628355 - DNA, 25 bp, Homo sapien
tacccggagaaacatggtggcttac

SEQ ID NO: 1628356 - DNA, 25 bp, Homo sapien
ttcattcccacttttacagccttca

SEQ ID NO: 1628357 - DNA, 25 bp, Homo sapien
tccaactcatattctttcattccca

SEQ ID NO: 1628358 - DNA, 25 bp, Homo sapien
ttcccacttttacagccttcattac

SEQ ID NO: 1628359 - DNA, 25 bp, Homo sapien
ctttccaactcatattctttcattc

SEQ ID NO: 1628360 - DNA, 25 bp, Homo sapien
cacggtgggcctcgctggagatttt

SEQ ID NO: 1628361 - DNA, 25 bp, Homo sapien
cggtgggcctcgctggagattttat

SEQ ID NO: 1628362 - DNA, 25 bp, Homo sapien
ggtgggcctcgctggagattttatt

SEQ ID NO: 1628363 - DNA, 25 bp, Homo sapien
ctcacggtgggcctcgctggagatt

SEQ ID NO: 1628364 - DNA, 25 bp, Homo sapien
tgaacgccctttctctcggcggagg

SEQ ID NO: 1628365 - DNA, 25 bp, Homo sapien
tcatgaaggtgtctctgatgccgcc

SEQ ID NO: 1628366 - DNA, 25 bp, Homo sapien
gccctaaagcctgacagcatgctgt

SEQ ID NO: 1628367 - DNA, 25 bp, Homo sapien
ggagactttctcgaatgaacgccct

SEQ ID NO: 1628368 - DNA, 25 bp, Homo sapien
cccagagggtgacagttcagagcca

SEQ ID NO: 1628369 - DNA, 25 bp, Homo sapien
ccagagggtgacagttcagagccat

SEQ ID NO: 1628370 - DNA, 25 bp, Homo sapien
tgtccccagagggtgacagttcaga

SEQ ID NO: 1628371 - DNA, 25 bp, Homo sapien
tccccagagggtgacagttcagagc

SEQ ID NO: 1628372 - DNA, 25 bp, Homo sapien
ttctcttgtttctgtgaacgagtgg

SEQ ID NO: 1628373 - DNA, 25 bp, Homo sapien
ctaagacgaggcgagtcagagctcc

SEQ ID NO: 1628374 - DNA, 25 bp, Homo sapien
tctttttccacagccgatgcccatt

SEQ ID NO: 1628375 - DNA, 25 bp, Homo sapien
tgaacgagtggtccttttgccaggg

SEQ ID NO: 1628376 - DNA, 25 bp, Homo sapien
gtgaagaatggtattgttgacttcg

SEQ ID NO: 1628377 - DNA, 25 bp, Homo sapien
ctgggtgaagaatggtattgttgac

SEQ ID NO: 1628378 - DNA, 25 bp, Homo sapien
gggtgaagaatggtattgttgactt

SEQ ID NO: 1628379 - DNA, 25 bp, Homo sapien
aagaatggtattgttgacttcgaac

SEQ ID NO: 1628380 - DNA, 25 bp, Homo sapien
ctgcaggcagcaggcggcctggccc

SEQ ID NO: 1628381 - DNA, 25 bp, Homo sapien
aggcagcaggcggcctggccctgat

SEQ ID NO: 1628382 - DNA, 25 bp, Homo sapien
ttactgcaggcagcaggcggcctgg

SEQ ID NO: 1628383 - DNA, 25 bp, Homo sapien
tgcaggcagcaggcggcctggccct

SEQ ID NO: 1628384 - DNA, 25 bp, Homo sapien
ggccaggcaccccgagtagccacac

SEQ ID NO: 1628385 - DNA, 25 bp, Homo sapien
ggtggagggaggtctgagaccaagg

SEQ ID NO: 1628386 - DNA, 25 bp, Homo sapien
gagggaggtctgagaccaaggctga

SEQ ID NO: 1628387 - DNA, 25 bp, Homo sapien
caggccaggcaccccgagtagccac

SEQ ID NO: 1628388 - DNA, 25 bp, Homo sapien
accagggtcccaagggtataggctg

SEQ ID NO: 1628389 - DNA, 25 bp, Homo sapien
ggtggggaccactgtctaccacaag

SEQ ID NO: 1628390 - DNA, 25 bp, Homo sapien
ggaccactgtctaccacaagctcct

SEQ ID NO: 1628391 - DNA, 25 bp, Homo sapien
ccactgtctaccacaagctcctctt

SEQ ID NO: 1628392 - DNA, 25 bp, Homo sapien
ttagaggaggaggtcaatcgaagcc

SEQ ID NO: 1628393 - DNA, 25 bp, Homo sapien
tgaacttctgttagaggaggaggtc

SEQ ID NO: 1628394 - DNA, 25 bp, Homo sapien
aatcgaagcccaaggtgcaaggtgc

SEQ ID NO: 1628395 - DNA, 25 bp, Homo sapien
caaggtgcaaggtgctgcagagaca

SEQ ID NO: 1628396 - DNA, 25 bp, Homo sapien
gtggaaggcagggggatgagctgca

SEQ ID NO: 1628397 - DNA, 25 bp, Homo sapien
agtggaaggcagggggatgagctgc

SEQ ID NO: 1628398 - DNA, 25 bp, Homo sapien
tggaaggcagggggatgagctgcac

SEQ ID NO: 1628399 - DNA, 25 bp, Homo sapien
tggggccccatgtcaaggcccacgg

SEQ ID NO: 1628400 - DNA, 25 bp, Homo sapien
tgtcaaggcccacggcatgcagggt

SEQ ID NO: 1628401 - DNA, 25 bp, Homo sapien
ccatgtcaaggcccacggcatgcag

SEQ ID NO: 1628402 - DNA, 25 bp, Homo sapien
ggccccatgtcaaggcccacggcat

SEQ ID NO: 1628403 - DNA, 25 bp, Homo sapien
agctgccagacgtggtccagggggg

SEQ ID NO: 1628404 - DNA, 25 bp, Homo sapien
acacagctgccagacgtggtccagg

SEQ ID NO: 1628405 - DNA, 25 bp, Homo sapien
cagctgccagacgtggtccaggggg

SEQ ID NO: 1628406 - DNA, 25 bp, Homo sapien
cacagctgccagacgtggtccaggg

SEQ ID NO: 1628407 - DNA, 25 bp, Homo sapien
gctgtgcccgtagcccctctgaggg

SEQ ID NO: 1628408 - DNA, 25 bp, Homo sapien
ttccatggcatggtcgaggaaaggt

SEQ ID NO: 1628409 - DNA, 25 bp, Homo sapien
cagaggccatagagaggttccatgg

SEQ ID NO: 1628410 - DNA, 25 bp, Homo sapien
aaggtgtgcaggacactggagaccc

SEQ ID NO: 1628411 - DNA, 25 bp, Homo sapien
gacccaagcacatccagtgggcagg

SEQ ID NO: 1628412 - DNA, 25 bp, Homo sapien
agccagcaatgcaggccacagaccc

SEQ ID NO: 1628413 - DNA, 25 bp, Homo sapien
cagcagcctcgagcgcaggggcctt

SEQ ID NO: 1628414 - DNA, 25 bp, Homo sapien
agcctcgagcgcaggggccttgtct

SEQ ID NO: 1628415 - DNA, 25 bp, Homo sapien
ttgctgatgccgtcaaaggaggcct

SEQ ID NO: 1628416 - DNA, 25 bp, Homo sapien
actgccgctgtccgtgttgacgcca

SEQ ID NO: 1628417 - DNA, 25 bp, Homo sapien
aggcctccctgcagacactgccgct

SEQ ID NO: 1628418 - DNA, 25 bp, Homo sapien
tgatgccgtcaaaggaggcctccct

SEQ ID NO: 1628419 - DNA, 25 bp, Homo sapien
agggcttctgtgacgtcaggacgct

SEQ ID NO: 1628420 - DNA, 25 bp, Homo sapien
tctgtgacgtcaggacgctggcaat

SEQ ID NO: 1628421 - DNA, 25 bp, Homo sapien
acagagggcttctgtgacgtcagga

SEQ ID NO: 1628422 - DNA, 25 bp, Homo sapien
gcttctgtgacgtcaggacgctggc

SEQ ID NO: 1628423 - DNA, 25 bp, Homo sapien
cgtcgtccacggcatacttctcctt

SEQ ID NO: 1628424 - DNA, 25 bp, Homo sapien
gtcgtccacggcatacttctccttg

SEQ ID NO: 1628425 - DNA, 25 bp, Homo sapien
ggacgtcgtccacggcatacttctc

SEQ ID NO: 1628426 - DNA, 25 bp, Homo sapien
ctggacgtcgtccacggcatacttc

SEQ ID NO: 1628427 - DNA, 25 bp, Homo sapien
cccagttgggccctggcatggatga

SEQ ID NO: 1628428 - DNA, 25 bp, Homo sapien
cccatgactgcacactctgcagtga

SEQ ID NO: 1628429 - DNA, 25 bp, Homo sapien
aaaggggctctcgtcctccacaggg

SEQ ID NO: 1628430 - DNA, 25 bp, Homo sapien
agtccccggagtcaaagcccatgac

SEQ ID NO: 1628431 - DNA, 25 bp, Homo sapien
tgccacacagtgcagacacgaggag

SEQ ID NO: 1628432 - DNA, 25 bp, Homo sapien
aatgccacacagtgcagacacgagg

SEQ ID NO: 1628433 - DNA, 25 bp, Homo sapien
taaattaatgccacacagtgcagac

SEQ ID NO: 1628434 - DNA, 25 bp, Homo sapien
ttaatgccacacagtgcagacacga

SEQ ID NO: 1628435 - DNA, 25 bp, Homo sapien
aaaaagcaggtcttgctggctggct

SEQ ID NO: 1628436 - DNA, 25 bp, Homo sapien
cccgagcctctgctctatctcacag

SEQ ID NO: 1628437 - DNA, 25 bp, Homo sapien
ccgagcctctgctctatctcacagg

SEQ ID NO: 1628438 - DNA, 25 bp, Homo sapien
cgagcctctgctctatctcacaggt

SEQ ID NO: 1628439 - DNA, 25 bp, Homo sapien
tcagagaggcggttccccgatccaa

SEQ ID NO: 1628440 - DNA, 25 bp, Homo sapien
accaccctcaggcacgcacagggcc

SEQ ID NO: 1628441 - DNA, 25 bp, Homo sapien
gcctcagagaggcggttccccgatc

SEQ ID NO: 1628442 - DNA, 25 bp, Homo sapien
ctcagagaggcggttccccgatcca

SEQ ID NO: 1628443 - DNA, 25 bp, Homo sapien
agtgacaccgaacgcccagtgaaag

SEQ ID NO: 1628444 - DNA, 25 bp, Homo sapien
tggctcagtgacaccgaacgcccag

SEQ ID NO: 1628445 - DNA, 25 bp, Homo sapien
acatcgatgacaccatagcagcctg

SEQ ID NO: 1628446 - DNA, 25 bp, Homo sapien
acttcccagtgtcaacatcgatgac

SEQ ID NO: 1628447 - DNA, 25 bp, Homo sapien
ccctgcaggaccacgatggagccgg

SEQ ID NO: 1628448 - DNA, 25 bp, Homo sapien
ccccgccctgcaggaccacgatgga

SEQ ID NO: 1628449 - DNA, 25 bp, Homo sapien
tgcaggaccacgatggagccggcct

SEQ ID NO: 1628450 - DNA, 25 bp, Homo sapien
ggaccacgatggagccggcctgcac

SEQ ID NO: 1628451 - DNA, 25 bp, Homo sapien
ctcctcagcatgcacgctgcctcct

SEQ ID NO: 1628452 - DNA, 25 bp, Homo sapien
gacctcctcagcatgcacgctgcct

SEQ ID NO: 1628453 - DNA, 25 bp, Homo sapien
ccgacctcctcagcatgcacgctgc

SEQ ID NO: 1628454 - DNA, 25 bp, Homo sapien
acctcctcagcatgcacgctgcctc

SEQ ID NO: 1628455 - DNA, 25 bp, Homo sapien
ctgagccaacgacaggcacatgagg

SEQ ID NO: 1628456 - DNA, 25 bp, Homo sapien
acgccagcgggaaagagcgagggag

SEQ ID NO: 1628457 - DNA, 25 bp, Homo sapien
ggaagaggcgcctacccgcggcatt

SEQ ID NO: 1628458 - DNA, 25 bp, Homo sapien
ctgaccctgactcggagcgtgcagc

SEQ ID NO: 1628459 - DNA, 25 bp, Homo sapien
ttggcagcgaacatgcgtgtcgacc

SEQ ID NO: 1628460 - DNA, 25 bp, Homo sapien
tgaagtgcggcgtcagctgagcccc

SEQ ID NO: 1628461 - DNA, 25 bp, Homo sapien
agctgagcccctccgggtgccaatg

SEQ ID NO: 1628462 - DNA, 25 bp, Homo sapien
agcccctccgggtgccaatgcatgg

SEQ ID NO: 1628463 - DNA, 25 bp, Homo sapien
ggcgtcacgtgaagtgcggcgtcag

SEQ ID NO: 1628464 - DNA, 25 bp, Homo sapien
agcaagcaggctggcagtccagcca

SEQ ID NO: 1628465 - DNA, 25 bp, Homo sapien
agcaggctggcagtccagccaaaca

SEQ ID NO: 1628466 - DNA, 25 bp, Homo sapien
tcaagcaagcaggctggcagtccag

SEQ ID NO: 1628467 - DNA, 25 bp, Homo sapien
caagcaggctggcagtccagccaaa

SEQ ID NO: 1628468 - DNA, 25 bp, Homo sapien
ctgctaccatcaccatgggaagatg

SEQ ID NO: 1628469 - DNA, 25 bp, Homo sapien
ccggagggtgagatacctggtcaac

SEQ ID NO: 1628470 - DNA, 25 bp, Homo sapien
tcttggaagccctgctaccatcacc

SEQ ID NO: 1628471 - DNA, 25 bp, Homo sapien
tgggaagatgccctcgccggagggt

SEQ ID NO: 1628472 - DNA, 25 bp, Homo sapien
ccgcacctgcgtcatccccatcaac

SEQ ID NO: 1628473 - DNA, 25 bp, Homo sapien
gcacctgcgtcatccccatcaaccc

SEQ ID NO: 1628474 - DNA, 25 bp, Homo sapien
ccccatcaacccacactctcctggg

SEQ ID NO: 1628475 - DNA, 25 bp, Homo sapien
catccccatcaacccacactctcct

SEQ ID NO: 1628476 - DNA, 25 bp, Homo sapien
actgggctccctcagcagatgcatg

SEQ ID NO: 1628477 - DNA, 25 bp, Homo sapien
cagaccccagggttcaaggcttggg

SEQ ID NO: 1628478 - DNA, 25 bp, Homo sapien
gcactgggctccctcagcagatgca

SEQ ID NO: 1628479 - DNA, 25 bp, Homo sapien
tccagcgcagccagaccccagggtt

SEQ ID NO: 1628480 - DNA, 25 bp, Homo sapien
tcaaaagtccacagtgtttcccgca

SEQ ID NO: 1628481 - DNA, 25 bp, Homo sapien
caaaagtccacagtgtttcccgcac

SEQ ID NO: 1628482 - DNA, 25 bp, Homo sapien
gtgaccccagacagtcgaaaggatg

SEQ ID NO: 1628483 - DNA, 25 bp, Homo sapien
caccacagcggtgtggaatgctgag

SEQ ID NO: 1628484 - DNA, 25 bp, Homo sapien
tctgtctgtcaccacagcggtgtgg

SEQ ID NO: 1628485 - DNA, 25 bp, Homo sapien
tgctgaggatcacctctgtggtgac

SEQ ID NO: 1628486 - DNA, 25 bp, Homo sapien
gcagtgcatacaagtgtcccagagg

SEQ ID NO: 1628487 - DNA, 25 bp, Homo sapien
agcagtgcatacaagtgtcccagag

SEQ ID NO: 1628488 - DNA, 25 bp, Homo sapien
attcccatagggctggctgcagtgg

SEQ ID NO: 1628489 - DNA, 25 bp, Homo sapien
gagagattcccatagggctggctgc

SEQ ID NO: 1628490 - DNA, 25 bp, Homo sapien
cttgaatcacaagggaggaggtagg

SEQ ID NO: 1628491 - DNA, 25 bp, Homo sapien
gaggtagggtgctggatacactcaa

SEQ ID NO: 1628492 - DNA, 25 bp, Homo sapien
tggatacactcaattatcaccccaa

SEQ ID NO: 1628493 - DNA, 25 bp, Homo sapien
aatcacaagggaggaggtagggtgc

SEQ ID NO: 1628494 - DNA, 25 bp, Homo sapien
ccttggacccctgatctgggatcct

SEQ ID NO: 1628495 - DNA, 25 bp, Homo sapien
tggtgtggtacagataacctggaaa

SEQ ID NO: 1628496 - DNA, 25 bp, Homo sapien
gtccttggacccctgatctgggatc

SEQ ID NO: 1628497 - DNA, 25 bp, Homo sapien
tggtggtgtggtacagataacctgg

SEQ ID NO: 1628498 - DNA, 25 bp, Homo sapien
catgaggatgctttgttgaccgtga

SEQ ID NO: 1628499 - DNA, 25 bp, Homo sapien
ccgtgaagacccagtgtttccagca

SEQ ID NO: 1628500 - DNA, 25 bp, Homo sapien
ggccccttcaccactgtagtgagct

SEQ ID NO: 1628501 - DNA, 25 bp, Homo sapien
agcaggcagaattctgtggcctggc

SEQ ID NO: 1628502 - DNA, 25 bp, Homo sapien
gcgaccctctgaccctcaagctggc

SEQ ID NO: 1628503 - DNA, 25 bp, Homo sapien
ctgatggcgaccctctgaccctcaa

SEQ ID NO: 1628504 - DNA, 25 bp, Homo sapien
atggcgaccctctgaccctcaagct

SEQ ID NO: 1628505 - DNA, 25 bp, Homo sapien
tgatggcgaccctctgaccctcaag

SEQ ID NO: 1628506 - DNA, 25 bp, Homo sapien
tggtctggggcgtaattcatactgt

SEQ ID NO: 1628507 - DNA, 25 bp, Homo sapien
tgtaaacagagcttcgctgtgagtt

SEQ ID NO: 1628508 - DNA, 25 bp, Homo sapien
cgcagccctggatcaataccagtgt

SEQ ID NO: 1628509 - DNA, 25 bp, Homo sapien
gctgtgagttgttagttgtctttcc

SEQ ID NO: 1628510 - DNA, 25 bp, Homo sapien
tgtgtggtcagggtgagagcacagt

SEQ ID NO: 1628511 - DNA, 25 bp, Homo sapien
ggggtgtgtggtcagggtgagagca

SEQ ID NO: 1628512 - DNA, 25 bp, Homo sapien
gagaggggtgtgtggtcagggtgag

SEQ ID NO: 1628513 - DNA, 25 bp, Homo sapien
gtggtcagggtgagagcacagtgcc

SEQ ID NO: 1628514 - DNA, 25 bp, Homo sapien
ggcagttccgggagaacagtgagga

SEQ ID NO: 1628515 - DNA, 25 bp, Homo sapien
tggagggcagttccgggagaacagt

SEQ ID NO: 1628516 - DNA, 25 bp, Homo sapien
gagggcagttccgggagaacagtga

SEQ ID NO: 1628517 - DNA, 25 bp, Homo sapien
ctggagggcagttccgggagaacag

SEQ ID NO: 1628518 - DNA, 25 bp, Homo sapien
tggggggaattccctatccagtgtc

SEQ ID NO: 1628519 - DNA, 25 bp, Homo sapien
tgcttgtaatggggggaattcccta

SEQ ID NO: 1628520 - DNA, 25 bp, Homo sapien
aatggggggaattccctatccagtg

SEQ ID NO: 1628521 - DNA, 25 bp, Homo sapien
tgtaatggggggaattccctatcca

SEQ ID NO: 1628522 - DNA, 25 bp, Homo sapien
ttcaggaagctatcccagctctcag

SEQ ID NO: 1628523 - DNA, 25 bp, Homo sapien
gttttaccatggtgacacttgtgag

SEQ ID NO: 1628524 - DNA, 25 bp, Homo sapien
agctatcccagctctcagagtgctt

SEQ ID NO: 1628525 - DNA, 25 bp, Homo sapien
agttttaccatggtgacacttgtga

SEQ ID NO: 1628526 - DNA, 25 bp, Homo sapien
tcatgctgctaaaacggagagcgct

SEQ ID NO: 1628527 - DNA, 25 bp, Homo sapien
catgtggcccttgtgatatcttcag

SEQ ID NO: 1628528 - DNA, 25 bp, Homo sapien
gcccttgtgatatcttcagaaagaa

SEQ ID NO: 1628529 - DNA, 25 bp, Homo sapien
gcgctgcgatagcaaagaggcatgt

SEQ ID NO: 1628530 - DNA, 25 bp, Homo sapien
gatggtatcagcgatgtttttctct

SEQ ID NO: 1628531 - DNA, 25 bp, Homo sapien
tttccagacaaattccagcacagcg

SEQ ID NO: 1628532 - DNA, 25 bp, Homo sapien
tgcaaacccacatcgcctgagatgg

SEQ ID NO: 1628533 - DNA, 25 bp, Homo sapien
gacaaattccagcacagcgatggga

SEQ ID NO: 1628534 - DNA, 25 bp, Homo sapien
gacatcactgcaacaagaatgcata

SEQ ID NO: 1628535 - DNA, 25 bp, Homo sapien
caaggcaccaatgcaggaacaggcg

SEQ ID NO: 1628536 - DNA, 25 bp, Homo sapien
gaacaggcgtgaagggtgcactcat

SEQ ID NO: 1628537 - DNA, 25 bp, Homo sapien
gggcaccatcttagcacatctgtaa

SEQ ID NO: 1628538 - DNA, 25 bp, Homo sapien
aattttgtgcatctcggtttttcca

SEQ ID NO: 1628539 - DNA, 25 bp, Homo sapien
caggggcccaggtcgggtgctggac

SEQ ID NO: 1628540 - DNA, 25 bp, Homo sapien
ccaggtctgctgctctcggatgtcc

SEQ ID NO: 1628541 - DNA, 25 bp, Homo sapien
cttcaggggcccaggtcgggtgctg

SEQ ID NO: 1628542 - DNA, 25 bp, Homo sapien
ttccaggtctgctgctctcggatgt

SEQ ID NO: 1628543 - DNA, 25 bp, Homo sapien
cccggcgcgcaagccggatccggca

SEQ ID NO: 1628544 - DNA, 25 bp, Homo sapien
gccttcccggcgcgcaagccggatc

SEQ ID NO: 1628545 - DNA, 25 bp, Homo sapien
ggcgcgcaagccggatccggcagtg

SEQ ID NO: 1628546 - DNA, 25 bp, Homo sapien
ttcccggcgcgcaagccggatccgg

SEQ ID NO: 1628547 - DNA, 25 bp, Homo sapien
aacctccctccctgatttactggtg

SEQ ID NO: 1628548 - DNA, 25 bp, Homo sapien
cctccctgatttactggtgcgtggc

SEQ ID NO: 1628549 - DNA, 25 bp, Homo sapien
tctgagatccctgtcttagctacat

SEQ ID NO: 1628550 - DNA, 25 bp, Homo sapien
cctggcctggaatctgagatccctg

SEQ ID NO: 1628551 - DNA, 25 bp, Homo sapien
attcagccctagcacgtccagggca

SEQ ID NO: 1628552 - DNA, 25 bp, Homo sapien
gcactcggcaagtgacagcccagtg

SEQ ID NO: 1628553 - DNA, 25 bp, Homo sapien
gtccagggcactcggcaagtgacag

SEQ ID NO: 1628554 - DNA, 25 bp, Homo sapien
cagggcactcggcaagtgacagccc

SEQ ID NO: 1628555 - DNA, 25 bp, Homo sapien
gacaagctgctcgacggccagaccc

SEQ ID NO: 1628556 - DNA, 25 bp, Homo sapien
caagctgctcgacggccagacccat

SEQ ID NO: 1628557 - DNA, 25 bp, Homo sapien
gggacaagctgctcgacggccagac

SEQ ID NO: 1628558 - DNA, 25 bp, Homo sapien
ggggacaagctgctcgacggccaga

SEQ ID NO: 1628559 - DNA, 25 bp, Homo sapien
caatgttcttgtaaccaattccatt

SEQ ID NO: 1628560 - DNA, 25 bp, Homo sapien
gatatttcaatcacaatgttcttgt

SEQ ID NO: 1628561 - DNA, 25 bp, Homo sapien
gaaaagccaattggtgatatttcaa

SEQ ID NO: 1628562 - DNA, 25 bp, Homo sapien
gttcttgtaaccaattccattcaaa

SEQ ID NO: 1628563 - DNA, 25 bp, Homo sapien
tcttctaaaattgctgtcagccagg

SEQ ID NO: 1628564 - DNA, 25 bp, Homo sapien
atattgtgcttaaaggtggcttgca

SEQ ID NO: 1628565 - DNA, 25 bp, Homo sapien
attgtgcttaaaggtggcttgcagg

SEQ ID NO: 1628566 - DNA, 25 bp, Homo sapien
tattgtgcttaaaggtggcttgcag

SEQ ID NO: 1628567 - DNA, 25 bp, Homo sapien
gcttgcggtgaggagttttctgcaa

SEQ ID NO: 1628568 - DNA, 25 bp, Homo sapien
tctgcaaggaaacttctatctcccc

SEQ ID NO: 1628569 - DNA, 25 bp, Homo sapien
ctcagcttgcggtgaggagttttct

SEQ ID NO: 1628570 - DNA, 25 bp, Homo sapien
caaggaaacttctatctccccaggg

SEQ ID NO: 1628571 - DNA, 25 bp, Homo sapien
ggtgtattggaactggttcccatag

SEQ ID NO: 1628572 - DNA, 25 bp, Homo sapien
gtggtgtattggaactggttcccat

SEQ ID NO: 1628573 - DNA, 25 bp, Homo sapien
tggtgtattggaactggttcccata

SEQ ID NO: 1628574 - DNA, 25 bp, Homo sapien
ctgaagatggaagggaagaaggggg

SEQ ID NO: 1628575 - DNA, 25 bp, Homo sapien
tggaaagggacaggaaccaccaaga

SEQ ID NO: 1628576 - DNA, 25 bp, Homo sapien
aggaaccaccaagaccacaggccat

SEQ ID NO: 1628577 - DNA, 25 bp, Homo sapien
gacaggaaccaccaagaccacaggc

SEQ ID NO: 1628578 - DNA, 25 bp, Homo sapien
gagccctggaaagggacaggaacca

SEQ ID NO: 1628579 - DNA, 25 bp, Homo sapien
ctgactgtggcctttgttctgggac

SEQ ID NO: 1628580 - DNA, 25 bp, Homo sapien
cctttgaatccttctggctctggtg

SEQ ID NO: 1628581 - DNA, 25 bp, Homo sapien
atccttctggctctggtgttggcat

SEQ ID NO: 1628582 - DNA, 25 bp, Homo sapien
cttctggctctggtgttggcataca

SEQ ID NO: 1628583 - DNA, 25 bp, Homo sapien
cgtcctttgaatccttctggctctg

SEQ ID NO: 1628584 - DNA, 25 bp, Homo sapien
tctggggcacctgctgacagttcat

SEQ ID NO: 1628585 - DNA, 25 bp, Homo sapien
tcggaaacggctgtgccccacacag

SEQ ID NO: 1628586 - DNA, 25 bp, Homo sapien
ccacacagctttctcgtggatcatg

SEQ ID NO: 1628587 - DNA, 25 bp, Homo sapien
cagctttctcgtggatcatgtctgt

SEQ ID NO: 1628588 - DNA, 25 bp, Homo sapien
tggaggccgaaaggcaggcctctgg

SEQ ID NO: 1628589 - DNA, 25 bp, Homo sapien
gatccaggaatggggttacgcggag

SEQ ID NO: 1628590 - DNA, 25 bp, Homo sapien
caggaatggggttacgcggagacca

SEQ ID NO: 1628591 - DNA, 25 bp, Homo sapien
ggaatggggttacgcggagaccagc

SEQ ID NO: 1628592 - DNA, 25 bp, Homo sapien
tccaggaatggggttacgcggagac

SEQ ID NO: 1628593 - DNA, 25 bp, Homo sapien
catgagaaggcacctaggtttgcac

SEQ ID NO: 1628594 - DNA, 25 bp, Homo sapien
tcacaggcgtgtgtatgcatcgagt

SEQ ID NO: 1628595 - DNA, 25 bp, Homo sapien
cacctaggtttgcacatagtgaggc

SEQ ID NO: 1628596 - DNA, 25 bp, Homo sapien
tcgagtgcccatgagaaggcaccta

SEQ ID NO: 1628597 - DNA, 25 bp, Homo sapien
cccatcttgaagaatggggtttgca

SEQ ID NO: 1628598 - DNA, 25 bp, Homo sapien
tggccaacagtggtcagccacaagt

SEQ ID NO: 1628599 - DNA, 25 bp, Homo sapien
ggccaacagtggtcagccacaagtg

SEQ ID NO: 1628600 - DNA, 25 bp, Homo sapien
tctctgcacctttcaagaagtgttc

SEQ ID NO: 1628601 - DNA, 25 bp, Homo sapien
ggctctgtttggtaacatcgcagca

SEQ ID NO: 1628602 - DNA, 25 bp, Homo sapien
acatcgcagcaaacggccaccttgt

SEQ ID NO: 1628603 - DNA, 25 bp, Homo sapien
ccttgtctctattttggttcttgct

SEQ ID NO: 1628604 - DNA, 25 bp, Homo sapien
acaaacggtgccaaattgttcttgt

SEQ ID NO: 1628605 - DNA, 25 bp, Homo sapien
aacaaacggtgccaaattgttcttg

SEQ ID NO: 1628606 - DNA, 25 bp, Homo sapien
gttttgcgagatgattcgtaaccag

SEQ ID NO: 1628607 - DNA, 25 bp, Homo sapien
tttgcgagatgattcgtaaccagct

SEQ ID NO: 1628608 - DNA, 25 bp, Homo sapien
ttttgcgagatgattcgtaaccagc

SEQ ID NO: 1628609 - DNA, 25 bp, Homo sapien
ttgcgagatgattcgtaaccagctt

SEQ ID NO: 1628610 - DNA, 25 bp, Homo sapien
gatgagacggccctgggccagcttc

SEQ ID NO: 1628611 - DNA, 25 bp, Homo sapien
ttagccaggatgagacggccctggg

SEQ ID NO: 1628612 - DNA, 25 bp, Homo sapien
gcgtggatgtctgaccacccttggc

SEQ ID NO: 1628613 - DNA, 25 bp, Homo sapien
gagcaggacgcttggcgtggatgtc

SEQ ID NO: 1628614 - DNA, 25 bp, Homo sapien
ctccagtttatgtatatagccagaa

SEQ ID NO: 1628615 - DNA, 25 bp, Homo sapien
gtttatgtatatagccagaaggagt

SEQ ID NO: 1628616 - DNA, 25 bp, Homo sapien
aaggagtaggagtccagatgtggaa

SEQ ID NO: 1628617 - DNA, 25 bp, Homo sapien
taggagtccagatgtggaacctctg

SEQ ID NO: 1628618 - DNA, 25 bp, Homo sapien
cagtgcctctggtgagcatgactcc

SEQ ID NO: 1628619 - DNA, 25 bp, Homo sapien
ctgggaggacacagctggtccccgt

SEQ ID NO: 1628620 - DNA, 25 bp, Homo sapien
aagcagcttcccagatatcgatcag

SEQ ID NO: 1628621 - DNA, 25 bp, Homo sapien
caatgtccgggtgtcgtggctggga

SEQ ID NO: 1628622 - DNA, 25 bp, Homo sapien
ccagacatgaggtgaaccagacgtt

SEQ ID NO: 1628623 - DNA, 25 bp, Homo sapien
atcaattccagacatgaggtgaacc

SEQ ID NO: 1628624 - DNA, 25 bp, Homo sapien
caattccagacatgaggtgaaccag

SEQ ID NO: 1628625 - DNA, 25 bp, Homo sapien
acatgaggtgaaccagacgttggcg

SEQ ID NO: 1628626 - DNA, 25 bp, Homo sapien
tttcctctgccaggaagcagacctg

SEQ ID NO: 1628627 - DNA, 25 bp, Homo sapien
ttcctctgccaggaagcagacctga

SEQ ID NO: 1628628 - DNA, 25 bp, Homo sapien
tcctctgccaggaagcagacctgac

SEQ ID NO: 1628629 - DNA, 25 bp, Homo sapien
tgagctggggtgaaggttgccaggg

SEQ ID NO: 1628630 - DNA, 25 bp, Homo sapien
ctggggtgaaggttgccagggtcat

SEQ ID NO: 1628631 - DNA, 25 bp, Homo sapien
tgctgagctggggtgaaggttgcca

SEQ ID NO: 1628632 - DNA, 25 bp, Homo sapien
agctggggtgaaggttgccagggtc

SEQ ID NO: 1628633 - DNA, 25 bp, Homo sapien
tgtgttctggctgtagctggactgc

SEQ ID NO: 1628634 - DNA, 25 bp, Homo sapien
tgggtgtgttctggctgtagctgga

SEQ ID NO: 1628635 - DNA, 25 bp, Homo sapien
gagctgggtgtgttctggctgtagc

SEQ ID NO: 1628636 - DNA, 25 bp, Homo sapien
ttctggctgtagctggactgctccc

SEQ ID NO: 1628637 - DNA, 25 bp, Homo sapien
atgtcagagccgctggaaaatgtga

SEQ ID NO: 1628638 - DNA, 25 bp, Homo sapien
ctgtggctgcggatgtcagagccgc

SEQ ID NO: 1628639 - DNA, 25 bp, Homo sapien
ctagaactgaaaggaagctggccat

SEQ ID NO: 1628640 - DNA, 25 bp, Homo sapien
gctttctagaactgaaaggaagctg

SEQ ID NO: 1628641 - DNA, 25 bp, Homo sapien
gagacccaccggacagagaactttc

SEQ ID NO: 1628642 - DNA, 25 bp, Homo sapien
aaaaattggtgacgccattcaggcc

SEQ ID NO: 1628643 - DNA, 25 bp, Homo sapien
tgcccttgtcatcggagctgagagt

SEQ ID NO: 1628644 - DNA, 25 bp, Homo sapien
tcagccgggagggacgtcattgttc

SEQ ID NO: 1628645 - DNA, 25 bp, Homo sapien
taagaattacttccagccccatagg

SEQ ID NO: 1628646 - DNA, 25 bp, Homo sapien
cattgtttggttcagcagccgggag

SEQ ID NO: 1628647 - DNA, 25 bp, Homo sapien
tgttcactgttcaggtcaggcaggg

SEQ ID NO: 1628648 - DNA, 25 bp, Homo sapien
tgcacagagcccctcagtggcattg

SEQ ID NO: 1628649 - DNA, 25 bp, Homo sapien
cagcctgcggaggagggtgttgagg

SEQ ID NO: 1628650 - DNA, 25 bp, Homo sapien
ctcagccagcatgaggctggccctg

SEQ ID NO: 1628651 - DNA, 25 bp, Homo sapien
aaatgtgcgtctgcagcctggagga

SEQ ID NO: 1628652 - DNA, 25 bp, Homo sapien
caaggagccgtaagcagttctgtaa

SEQ ID NO: 1628653 - DNA, 25 bp, Homo sapien
ggctccatgaataattgaagctcca

SEQ ID NO: 1628654 - DNA, 25 bp, Homo sapien
agtgttccctccacttttagatgag

SEQ ID NO: 1628655 - DNA, 25 bp, Homo sapien
tccttgggcactgacagagcctgct

SEQ ID NO: 1628656 - DNA, 25 bp, Homo sapien
ccctggaggatcgacccagcagatg

SEQ ID NO: 1628657 - DNA, 25 bp, Homo sapien
cactgacagagcctgctccaagggt

SEQ ID NO: 1628658 - DNA, 25 bp, Homo sapien
tgctcaccagcagatccctggagga

SEQ ID NO: 1628659 - DNA, 25 bp, Homo sapien
tgttgtgggcccctcctcgactcat

SEQ ID NO: 1628660 - DNA, 25 bp, Homo sapien
cctgtacctgctgttgtgggcccct

SEQ ID NO: 1628661 - DNA, 25 bp, Homo sapien
gcctcgagtcctaatccaaatctga

SEQ ID NO: 1628662 - DNA, 25 bp, Homo sapien
cattctgagagctaagcctcgagtc

SEQ ID NO: 1628663 - DNA, 25 bp, Homo sapien
ttcttcctcctgaccgccataaaga

SEQ ID NO: 1628664 - DNA, 25 bp, Homo sapien
gcaaggggctaggagacgtgggcca

SEQ ID NO: 1628665 - DNA, 25 bp, Homo sapien
cgaggacaggtttagatttgattct

SEQ ID NO: 1628666 - DNA, 25 bp, Homo sapien
gtgctgaactccagacatggcgagg

SEQ ID NO: 1628667 - DNA, 25 bp, Homo sapien
tctctttactagttgttcttgcatc

SEQ ID NO: 1628668 - DNA, 25 bp, Homo sapien
tctttactagttgttcttgcatctg

SEQ ID NO: 1628669 - DNA, 25 bp, Homo sapien
tttactagttgttcttgcatctgtc

SEQ ID NO: 1628670 - DNA, 25 bp, Homo sapien
atctctttactagttgttcttgcat

SEQ ID NO: 1628671 - DNA, 25 bp, Homo sapien
ctgctaatcaggatggagggtaggg

SEQ ID NO: 1628672 - DNA, 25 bp, Homo sapien
tgggctctcccggatgctgctaatc

SEQ ID NO: 1628673 - DNA, 25 bp, Homo sapien
caggtatttagaaggctccccagct

SEQ ID NO: 1628674 - DNA, 25 bp, Homo sapien
tgctgcaggtatttagaaggctccc

SEQ ID NO: 1628675 - DNA, 25 bp, Homo sapien
tattaaaaccaatctcatggccttg

SEQ ID NO: 1628676 - DNA, 25 bp, Homo sapien
taaacaatgacacttagtagctctg

SEQ ID NO: 1628677 - DNA, 25 bp, Homo sapien
cccgtccttgacatgtaccttgcaa

SEQ ID NO: 1628678 - DNA, 25 bp, Homo sapien
ccagtaccatggtgagatttgtctc

SEQ ID NO: 1628679 - DNA, 25 bp, Homo sapien
agagcgcgctgctgagccgaagctg

SEQ ID NO: 1628680 - DNA, 25 bp, Homo sapien
gtcggccacaaagctgggctgacct

SEQ ID NO: 1628681 - DNA, 25 bp, Homo sapien
ccagcgtgccgaacgcgcagagagc

SEQ ID NO: 1628682 - DNA, 25 bp, Homo sapien
tcctatgtcgtgcttgggacagtcg

SEQ ID NO: 1628683 - DNA, 25 bp, Homo sapien
cgggggcgcagtgccggccagtcgc

SEQ ID NO: 1628684 - DNA, 25 bp, Homo sapien
tccggcccgggcgtccctggagcca

SEQ ID NO: 1628685 - DNA, 25 bp, Homo sapien
caggcgggggcgcagtgccggccag

SEQ ID NO: 1628686 - DNA, 25 bp, Homo sapien
tctccggcccgggcgtccctggagc

SEQ ID NO: 1628687 - DNA, 25 bp, Homo sapien
ggagtcttggctgccgccgtctcca

SEQ ID NO: 1628688 - DNA, 25 bp, Homo sapien
ctcggccgcggggagtcttggctgc

SEQ ID NO: 1628689 - DNA, 25 bp, Homo sapien
ggccgcggggagtcttggctgccgc

SEQ ID NO: 1628690 - DNA, 25 bp, Homo sapien
gggagtcttggctgccgccgtctcc

SEQ ID NO: 1628691 - DNA, 25 bp, Homo sapien
gacagatgtgcgtcctctgacgccc

SEQ ID NO: 1628692 - DNA, 25 bp, Homo sapien
ttggcgcccaaaatcagagaaagtc

SEQ ID NO: 1628693 - DNA, 25 bp, Homo sapien
tcgggatgcacaagtcccggcttgg

SEQ ID NO: 1628694 - DNA, 25 bp, Homo sapien
ccctgcagagctggcgagtttccgg

SEQ ID NO: 1628695 - DNA, 25 bp, Homo sapien
gaggctgacaaggaccaatgcttct

SEQ ID NO: 1628696 - DNA, 25 bp, Homo sapien
tctcagtcagacgtgcagcatggct

SEQ ID NO: 1628697 - DNA, 25 bp, Homo sapien
cagaaggactgttgatgcgacccaa

SEQ ID NO: 1628698 - DNA, 25 bp, Homo sapien
cctgtgtatacttggccgtgggcat

SEQ ID NO: 1628699 - DNA, 25 bp, Homo sapien
tgtcaaatgccagccgtataaatgt

SEQ ID NO: 1628700 - DNA, 25 bp, Homo sapien
gaaacactatgtccccataatgatg

SEQ ID NO: 1628701 - DNA, 25 bp, Homo sapien
ccagtgagtgcagagaactcgcaaa

SEQ ID NO: 1628702 - DNA, 25 bp, Homo sapien
tatctagtccccataaacagtaagt

SEQ ID NO: 1628703 - DNA, 25 bp, Homo sapien
ttctctggaggaccggtgaggtaag

SEQ ID NO: 1628704 - DNA, 25 bp, Homo sapien
aggaccggtgaggtaaggtaatgct

SEQ ID NO: 1628705 - DNA, 25 bp, Homo sapien
ggcagccccgatgttctctggagga

SEQ ID NO: 1628706 - DNA, 25 bp, Homo sapien
ctaggcagccccgatgttctctgga

SEQ ID NO: 1628707 - DNA, 25 bp, Homo sapien
cccttagctctctactattgtggag

SEQ ID NO: 1628708 - DNA, 25 bp, Homo sapien
aggtgcacacagaccctatggcttc

SEQ ID NO: 1628709 - DNA, 25 bp, Homo sapien
atggcaaataaacacccaggtgtct

SEQ ID NO: 1628710 - DNA, 25 bp, Homo sapien
aaacgtgttgcctgtactccaccca

SEQ ID NO: 1628711 - DNA, 25 bp, Homo sapien
ccatgatccttcagagcgagctgaa

SEQ ID NO: 1628712 - DNA, 25 bp, Homo sapien
caacataacttgatgcctgcttaga

SEQ ID NO: 1628713 - DNA, 25 bp, Homo sapien
cagtgaggtgtctagggtggctaca

SEQ ID NO: 1628714 - DNA, 25 bp, Homo sapien
aaccagttggatgcgaccatgatcc

SEQ ID NO: 1628715 - DNA, 25 bp, Homo sapien
gccgggagagggttggatgtagtcc

SEQ ID NO: 1628716 - DNA, 25 bp, Homo sapien
cgaagagatgttggtgtgtccagaa

SEQ ID NO: 1628717 - DNA, 25 bp, Homo sapien
gatgtagtccctgacttcgaagaga

SEQ ID NO: 1628718 - DNA, 25 bp, Homo sapien
agctgccagtgccaacatgagggca

SEQ ID NO: 1628719 - DNA, 25 bp, Homo sapien
tttctctcgagacacaatggagacg

SEQ ID NO: 1628720 - DNA, 25 bp, Homo sapien
gattcggctgctgtcgtaaacagag

SEQ ID NO: 1628721 - DNA, 25 bp, Homo sapien
tgaaagccgtctccaaggatcctga

SEQ ID NO: 1628722 - DNA, 25 bp, Homo sapien
taacagatgtcatttcggcggcggc

SEQ ID NO: 1628723 - DNA, 25 bp, Homo sapien
ttgctaatgttagccagcgctggct

SEQ ID NO: 1628724 - DNA, 25 bp, Homo sapien
taaaagccattaggtggagccaagg

SEQ ID NO: 1628725 - DNA, 25 bp, Homo sapien
actgtctagcttttgtgttgtccca

SEQ ID NO: 1628726 - DNA, 25 bp, Homo sapien
ggttcctaatctacccaaggctgac

SEQ ID NO: 1628727 - DNA, 25 bp, Homo sapien
tccttttgtcttagcctccaaatag

SEQ ID NO: 1628728 - DNA, 25 bp, Homo sapien
ccaaacatagcgcgcaacagcccag

SEQ ID NO: 1628729 - DNA, 25 bp, Homo sapien
ccttttgtcttagcctccaaatagc

SEQ ID NO: 1628730 - DNA, 25 bp, Homo sapien
tgatgccaaacatagcgcgcaacag

SEQ ID NO: 1628731 - DNA, 25 bp, Homo sapien
aaagggtgtccgccattcaacccat

SEQ ID NO: 1628732 - DNA, 25 bp, Homo sapien
gaggaaagggtgtccgccattcaac

SEQ ID NO: 1628733 - DNA, 25 bp, Homo sapien
agggtgtccgccattcaacccattg

SEQ ID NO: 1628734 - DNA, 25 bp, Homo sapien
ccgaggaaagggtgtccgccattca

SEQ ID NO: 1628735 - DNA, 25 bp, Homo sapien
caggttagtatctccaatcaccata

SEQ ID NO: 1628736 - DNA, 25 bp, Homo sapien
gttagtatctccaatcaccatacac

SEQ ID NO: 1628737 - DNA, 25 bp, Homo sapien
ccaggttagtatctccaatcaccat

SEQ ID NO: 1628738 - DNA, 25 bp, Homo sapien
ggttagtatctccaatcaccataca

SEQ ID NO: 1628739 - DNA, 25 bp, Homo sapien
tgtctcctatgagggcatacttaag

SEQ ID NO: 1628740 - DNA, 25 bp, Homo sapien
ttgatgccacagatgagacagaaat

SEQ ID NO: 1628741 - DNA, 25 bp, Homo sapien
aaagcgaccattgatgccacagatg

SEQ ID NO: 1628742 - DNA, 25 bp, Homo sapien
tactttgtctcctatgagggcatac

SEQ ID NO: 1628743 - DNA, 25 bp, Homo sapien
gggactggtggttggacaaggagca

SEQ ID NO: 1628744 - DNA, 25 bp, Homo sapien
acaaggagcaaacacactagtcaat

SEQ ID NO: 1628745 - DNA, 25 bp, Homo sapien
ggttggacaaggagcaaacacacta

SEQ ID NO: 1628746 - DNA, 25 bp, Homo sapien
ctagtcaattcatccagcatccaat

SEQ ID NO: 1628747 - DNA, 25 bp, Homo sapien
agaacccccgcttcacttatgctgt

SEQ ID NO: 1628748 - DNA, 25 bp, Homo sapien
tctttattggccctgctctgctcaa

SEQ ID NO: 1628749 - DNA, 25 bp, Homo sapien
ccgcttcacttatgctgtctcctcc

SEQ ID NO: 1628750 - DNA, 25 bp, Homo sapien
tctattcccagcagttgcttctcag

SEQ ID NO: 1628751 - DNA, 25 bp, Homo sapien
gagcgggtgcgggagatcacccaga

SEQ ID NO: 1628752 - DNA, 25 bp, Homo sapien
ataggcagccgaacgcataggagcg

SEQ ID NO: 1628753 - DNA, 25 bp, Homo sapien
ccgtcggagagagcgatcaggctcg

SEQ ID NO: 1628754 - DNA, 25 bp, Homo sapien
gctcggagatgtggataggcagccg

SEQ ID NO: 1628755 - DNA, 25 bp, Homo sapien
gctgccctcttatgcggagcacttc

SEQ ID NO: 1628756 - DNA, 25 bp, Homo sapien
gccctcttatgcggagcacttcttt

SEQ ID NO: 1628757 - DNA, 25 bp, Homo sapien
cctcttatgcggagcacttctttac

SEQ ID NO: 1628758 - DNA, 25 bp, Homo sapien
tctgatgcctcacatagggctgccc

SEQ ID NO: 1628759 - DNA, 25 bp, Homo sapien
ctgggccggccttcagcagggaggc

SEQ ID NO: 1628760 - DNA, 25 bp, Homo sapien
aatgctccgatgctccaagctgggc

SEQ ID NO: 1628761 - DNA, 25 bp, Homo sapien
tcttatccgactcaggttccaatgc

SEQ ID NO: 1628762 - DNA, 25 bp, Homo sapien
tttccacactccaatgctccgatgc

SEQ ID NO: 1628763 - DNA, 25 bp, Homo sapien
gttgctttaatgacctgatctgaaa

SEQ ID NO: 1628764 - DNA, 25 bp, Homo sapien
tcgagtcgaccttctgttgctttaa

SEQ ID NO: 1628765 - DNA, 25 bp, Homo sapien
atcgagtcgaccttctgttgcttta

SEQ ID NO: 1628766 - DNA, 25 bp, Homo sapien
ttctgttgctttaatgacctgatct

SEQ ID NO: 1628767 - DNA, 25 bp, Homo sapien
caaggtccgtgtcagcaaagggacc

SEQ ID NO: 1628768 - DNA, 25 bp, Homo sapien
ccccaaggtccgtgtcagcaaaggg

SEQ ID NO: 1628769 - DNA, 25 bp, Homo sapien
gcaggctcagcatcacccccaaggt

SEQ ID NO: 1628770 - DNA, 25 bp, Homo sapien
aggtccgtgtcagcaaagggaccca

SEQ ID NO: 1628771 - DNA, 25 bp, Homo sapien
gacgcacgcgcctggctgccactca

SEQ ID NO: 1628772 - DNA, 25 bp, Homo sapien
acgcacgcgcctggctgccactcac

SEQ ID NO: 1628773 - DNA, 25 bp, Homo sapien
cagcagggggcactgcgccggggcc

SEQ ID NO: 1628774 - DNA, 25 bp, Homo sapien
cagggggcactgcgccggggccttt

SEQ ID NO: 1628775 - DNA, 25 bp, Homo sapien
gcagggggcactgcgccggggcctt

SEQ ID NO: 1628776 - DNA, 25 bp, Homo sapien
agcagggggcactgcgccggggcct

SEQ ID NO: 1628777 - DNA, 25 bp, Homo sapien
gagaaacatgtattccgggagacag

SEQ ID NO: 1628778 - DNA, 25 bp, Homo sapien
gtgtcaccatctcagacaaactcat

SEQ ID NO: 1628779 - DNA, 25 bp, Homo sapien
gaaaaatgtgcgtcagtgtcaccat

SEQ ID NO: 1628780 - DNA, 25 bp, Homo sapien
caaaagctaaggattgagaaacatg

SEQ ID NO: 1628781 - DNA, 25 bp, Homo sapien
ctctcccttcagcaatggtgaagcg

SEQ ID NO: 1628782 - DNA, 25 bp, Homo sapien
cccttcagcaatggtgaagcggata

SEQ ID NO: 1628783 - DNA, 25 bp, Homo sapien
tgtttggctgcagtctcttgtctct

SEQ ID NO: 1628784 - DNA, 25 bp, Homo sapien
actgctctgtttggctgcagtctct

SEQ ID NO: 1628785 - DNA, 25 bp, Homo sapien
ccagtgtcgaacttcaaagcagtga

SEQ ID NO: 1628786 - DNA, 25 bp, Homo sapien
tggtgtcgttcactttaatgaggga

SEQ ID NO: 1628787 - DNA, 25 bp, Homo sapien
acgtgaatcgtgtcaaaagatccag

SEQ ID NO: 1628788 - DNA, 25 bp, Homo sapien
cggatagtgtgagcatcgtgaatca

SEQ ID NO: 1628789 - DNA, 25 bp, Homo sapien
gcgacaattgatgccatagatcaga

SEQ ID NO: 1628790 - DNA, 25 bp, Homo sapien
gcaaagcgacaattgatgccataga

SEQ ID NO: 1628791 - DNA, 25 bp, Homo sapien
aaagcgacaattgatgccatagatc

SEQ ID NO: 1628792 - DNA, 25 bp, Homo sapien
gtacagcaaagcgacaattgatgcc

SEQ ID NO: 1628793 - DNA, 25 bp, Homo sapien
cttcagatgctgcttgggaccggaa

SEQ ID NO: 1628794 - DNA, 25 bp, Homo sapien
ttatccagcatccaacgttgtggag

SEQ ID NO: 1628795 - DNA, 25 bp, Homo sapien
taataggcacagaaagaggacctcc

SEQ ID NO: 1628796 - DNA, 25 bp, Homo sapien
ctgtaataggcacagaaagaggacc

SEQ ID NO: 1628797 - DNA, 25 bp, Homo sapien
taggcacagaaagaggacctcccat

SEQ ID NO: 1628798 - DNA, 25 bp, Homo sapien
aataggcacagaaagaggacctccc

SEQ ID NO: 1628799 - DNA, 25 bp, Homo sapien
tgatgccaccgaggaatgtatgaat

SEQ ID NO: 1628800 - DNA, 25 bp, Homo sapien
gatggcaaacaactctaatctgggt

SEQ ID NO: 1628801 - DNA, 25 bp, Homo sapien
gacaggaacacctagctgaagaagg

SEQ ID NO: 1628802 - DNA, 25 bp, Homo sapien
caaaggatttgccaaggatgaggag

SEQ ID NO: 1628803 - DNA, 25 bp, Homo sapien
tggccagccgggcatctcagatgac

SEQ ID NO: 1628804 - DNA, 25 bp, Homo sapien
ctaggatgccccatggaagctgaag

SEQ ID NO: 1628805 - DNA, 25 bp, Homo sapien
gatgacagctgcatacaggccagca

SEQ ID NO: 1628806 - DNA, 25 bp, Homo sapien
gccaacagtggcatccacctctgca

SEQ ID NO: 1628807 - DNA, 25 bp, Homo sapien
agcagcggccttgcttctatgagac

SEQ ID NO: 1628808 - DNA, 25 bp, Homo sapien
tatgagaccagtttttggaggatgc

SEQ ID NO: 1628809 - DNA, 25 bp, Homo sapien
tttttggaggatgcacagaaccagg

SEQ ID NO: 1628810 - DNA, 25 bp, Homo sapien
tagcctcagggaatccagtcggcac

SEQ ID NO: 1628811 - DNA, 25 bp, Homo sapien
tgctattaggtcttaggacttttgg

SEQ ID NO: 1628812 - DNA, 25 bp, Homo sapien
ggtgttcatgctattaggtcttagg

SEQ ID NO: 1628813 - DNA, 25 bp, Homo sapien
ctgccattggtgttcatgctattag

SEQ ID NO: 1628814 - DNA, 25 bp, Homo sapien
ccattggtgttcatgctattaggtc

SEQ ID NO: 1628815 - DNA, 25 bp, Homo sapien
gccataatggccagactgggcttga

SEQ ID NO: 1628816 - DNA, 25 bp, Homo sapien
aagacaaccaatccgctgaataaga

SEQ ID NO: 1628817 - DNA, 25 bp, Homo sapien
ccaatccgctgaataagagagacta

SEQ ID NO: 1628818 - DNA, 25 bp, Homo sapien
acaaccaatccgctgaataagagag

SEQ ID NO: 1628819 - DNA, 25 bp, Homo sapien
gaaaagacaaccaatccgctgaata

SEQ ID NO: 1628820 - DNA, 25 bp, Homo sapien
actctgagttaccatatggctcaac

SEQ ID NO: 1628821 - DNA, 25 bp, Homo sapien
acttgttcatagaggtactcatgga

SEQ ID NO: 1628822 - DNA, 25 bp, Homo sapien
aaaacttgttcatagaggtactcat

SEQ ID NO: 1628823 - DNA, 25 bp, Homo sapien
caactacttcattcttaggaggatt

SEQ ID NO: 1628824 - DNA, 25 bp, Homo sapien
gaccctgtggataggttaggtccaa

SEQ ID NO: 1628825 - DNA, 25 bp, Homo sapien
taatatttggcatccctagagtctg

SEQ ID NO: 1628826 - DNA, 25 bp, Homo sapien
tccgttcacacgtgcagggcctttg

SEQ ID NO: 1628827 - DNA, 25 bp, Homo sapien
aactgcatagcatggttagggaccc

SEQ ID NO: 1628828 - DNA, 25 bp, Homo sapien
tggtgaatgcccttagtcctaactg

SEQ ID NO: 1628829 - DNA, 25 bp, Homo sapien
gtgaatgcccttagtcctaactgct

SEQ ID NO: 1628830 - DNA, 25 bp, Homo sapien
ggtgaatgcccttagtcctaactgc

SEQ ID NO: 1628831 - DNA, 25 bp, Homo sapien
gaatgcccttagtcctaactgcttg

SEQ ID NO: 1628832 - DNA, 25 bp, Homo sapien
gactgcgaagctgcaacatttgaaa

SEQ ID NO: 1628833 - DNA, 25 bp, Homo sapien
tatttgctgaccctataaccaaggc

SEQ ID NO: 1628834 - DNA, 25 bp, Homo sapien
cttaccacgttaacagaccaggaat

SEQ ID NO: 1628835 - DNA, 25 bp, Homo sapien
caaagatttatctcaggactgcgaa

SEQ ID NO: 1628836 - DNA, 25 bp, Homo sapien
attggtagtagaattggagtagagc

SEQ ID NO: 1628837 - DNA, 25 bp, Homo sapien
gattatagacataaattggtagtag

SEQ ID NO: 1628838 - DNA, 25 bp, Homo sapien
aggaactcacggaagagatttgctc

SEQ ID NO: 1628839 - DNA, 25 bp, Homo sapien
tgctctaaccattgaatgcgtaatc

SEQ ID NO: 1628840 - DNA, 25 bp, Homo sapien
ctgggactacatatgccatggaata

SEQ ID NO: 1628841 - DNA, 25 bp, Homo sapien
tagtttagggtcagtctctctggaa

SEQ ID NO: 1628842 - DNA, 25 bp, Homo sapien
caggtatatggtagcagctggtcta

SEQ ID NO: 1628843 - DNA, 25 bp, Homo sapien
cctaaaaggtctggattgatcgtac

SEQ ID NO: 1628844 - DNA, 25 bp, Homo sapien
gatgaagttaagtctcacctaggaa

SEQ ID NO: 1628845 - DNA, 25 bp, Homo sapien
aagctctagtgggaaaaatctggcc

SEQ ID NO: 1628846 - DNA, 25 bp, Homo sapien
tgtcccgggccaatttcaagaaaga

SEQ ID NO: 1628847 - DNA, 25 bp, Homo sapien
tattttggtagcctgtaacacacgg

SEQ ID NO: 1628848 - DNA, 25 bp, Homo sapien
aacacagttccgaggcattcagagc

SEQ ID NO: 1628849 - DNA, 25 bp, Homo sapien
taactctgcctctatccagatgcac

SEQ ID NO: 1628850 - DNA, 25 bp, Homo sapien
gggccagatgcattccggagtgacc

SEQ ID NO: 1628851 - DNA, 25 bp, Homo sapien
tcagagacgctcatgtttttcacgg

SEQ ID NO: 1628852 - DNA, 25 bp, Homo sapien
tttgtcataggcaccaacctcagag

SEQ ID NO: 1628853 - DNA, 25 bp, Homo sapien
ctggaaggccgtagctaccattcct

SEQ ID NO: 1628854 - DNA, 25 bp, Homo sapien
agctggaaggccgtagctaccattc

SEQ ID NO: 1628855 - DNA, 25 bp, Homo sapien
gccgtagctaccattcctgaagatg

SEQ ID NO: 1628856 - DNA, 25 bp, Homo sapien
gaaggccgtagctaccattcctgaa

SEQ ID NO: 1628857 - DNA, 25 bp, Homo sapien
cgggaggtcgcgctggcgccaggac

SEQ ID NO: 1628858 - DNA, 25 bp, Homo sapien
gcccgggaggtcgcgctggcgccag

SEQ ID NO: 1628859 - DNA, 25 bp, Homo sapien
cggggcccgggaggtcgcgctggcg

SEQ ID NO: 1628860 - DNA, 25 bp, Homo sapien
ggaggtcgcgctggcgccaggaccc

SEQ ID NO: 1628861 - DNA, 25 bp, Homo sapien
cggccctcacgccatcccggggctg

SEQ ID NO: 1628862 - DNA, 25 bp, Homo sapien
gggaggcggccctcacgccatcccg

SEQ ID NO: 1628863 - DNA, 25 bp, Homo sapien
gaggcggccctcacgccatcccggg

SEQ ID NO: 1628864 - DNA, 25 bp, Homo sapien
tcacgccatcccggggctgccgggc

SEQ ID NO: 1628865 - DNA, 25 bp, Homo sapien
gctgccgaggaacgcgcttttccgg

SEQ ID NO: 1628866 - DNA, 25 bp, Homo sapien
gaacgcgcttttccggccctgcgga

SEQ ID NO: 1628867 - DNA, 25 bp, Homo sapien
aggaacgcgcttttccggccctgcg

SEQ ID NO: 1628868 - DNA, 25 bp, Homo sapien
cgccaggctgccgaggaacgcgctt

SEQ ID NO: 1628869 - DNA, 25 bp, Homo sapien
tttagaaattttccagagactcagc

SEQ ID NO: 1628870 - DNA, 25 bp, Homo sapien
gcaaaacactcaagacgacacaaaa

SEQ ID NO: 1628871 - DNA, 25 bp, Homo sapien
aaagaagcgtgcctggttggcatga

SEQ ID NO: 1628872 - DNA, 25 bp, Homo sapien
atgacagtcatctgccagtctacca

SEQ ID NO: 1628873 - DNA, 25 bp, Homo sapien
ctggagcctcacagggttgacccgt

SEQ ID NO: 1628874 - DNA, 25 bp, Homo sapien
gaagcaggttgttcccacatgagat

SEQ ID NO: 1628875 - DNA, 25 bp, Homo sapien
cacatgagattggtagcgagccggt

SEQ ID NO: 1628876 - DNA, 25 bp, Homo sapien
cagaggcggtcatggatcaccacgt

SEQ ID NO: 1628877 - DNA, 25 bp, Homo sapien
catggaagccatttctgtagaatag

SEQ ID NO: 1628878 - DNA, 25 bp, Homo sapien
tactctgctagaacagttcagtttt

SEQ ID NO: 1628879 - DNA, 25 bp, Homo sapien
ctttagtattaattccatggaagcc

SEQ ID NO: 1628880 - DNA, 25 bp, Homo sapien
tagaataggctagtgtccagttttg

SEQ ID NO: 1628881 - DNA, 25 bp, Homo sapien
gaagggaggtgcctttctgtattat

SEQ ID NO: 1628882 - DNA, 25 bp, Homo sapien
gcttgagcttaacagccagagactg

SEQ ID NO: 1628883 - DNA, 25 bp, Homo sapien
cttatttatcactttggaagggagg

SEQ ID NO: 1628884 - DNA, 25 bp, Homo sapien
gagcttaacagccagagactggtga

SEQ ID NO: 1628885 - DNA, 25 bp, Homo sapien
tgttggaccaacactaggtacagga

SEQ ID NO: 1628886 - DNA, 25 bp, Homo sapien
gaagtgcaggaagctcagtttacaa

SEQ ID NO: 1628887 - DNA, 25 bp, Homo sapien
ctgttggaccaacactaggtacagg

SEQ ID NO: 1628888 - DNA, 25 bp, Homo sapien
aagtgcaggaagctcagtttacaaa

SEQ ID NO: 1628889 - DNA, 25 bp, Homo sapien
ctactctgaagcctttgtaggggcc

SEQ ID NO: 1628890 - DNA, 25 bp, Homo sapien
ctctgaagcctttgtaggggcctgg

SEQ ID NO: 1628891 - DNA, 25 bp, Homo sapien
tgaagcctttgtaggggcctgggca

SEQ ID NO: 1628892 - DNA, 25 bp, Homo sapien
tactctgaagcctttgtaggggcct

SEQ ID NO: 1628893 - DNA, 25 bp, Homo sapien
agtctgggcgctgatttgatccttg

SEQ ID NO: 1628894 - DNA, 25 bp, Homo sapien
gcagtctgggcgctgatttgatcct

SEQ ID NO: 1628895 - DNA, 25 bp, Homo sapien
agctgcagtctgggcgctgatttga

SEQ ID NO: 1628896 - DNA, 25 bp, Homo sapien
tctgggcgctgatttgatccttggc

SEQ ID NO: 1628897 - DNA, 25 bp, Homo sapien
gcatcttcttgaggcccttcttgtg

SEQ ID NO: 1628898 - DNA, 25 bp, Homo sapien
ttcttgaggcccttcttgtgcttct

SEQ ID NO: 1628899 - DNA, 25 bp, Homo sapien
ggccttgatagcctcggcacgtgca

SEQ ID NO: 1628900 - DNA, 25 bp, Homo sapien
tcttcttgaggcccttcttgtgctt

SEQ ID NO: 1628901 - DNA, 25 bp, Homo sapien
ctcaggaacctggggtccatccact

SEQ ID NO: 1628902 - DNA, 25 bp, Homo sapien
caggaacctggggtccatccactta

SEQ ID NO: 1628903 - DNA, 25 bp, Homo sapien
tcctcaggaacctggggtccatcca

SEQ ID NO: 1628904 - DNA, 25 bp, Homo sapien
gaacctggggtccatccacttaaga

SEQ ID NO: 1628905 - DNA, 25 bp, Homo sapien
gtggtatggttcttggacttggccc

SEQ ID NO: 1628906 - DNA, 25 bp, Homo sapien
tatggttcttggacttggccctgtc

SEQ ID NO: 1628907 - DNA, 25 bp, Homo sapien
ttgtgtgtggtatggttcttggact

SEQ ID NO: 1628908 - DNA, 25 bp, Homo sapien
ttcttggacttggccctgtctgtac

SEQ ID NO: 1628909 - DNA, 25 bp, Homo sapien
tatttgaacctatccagagtcaggg

SEQ ID NO: 1628910 - DNA, 25 bp, Homo sapien
gaagagtcacagtattccgctgttg

SEQ ID NO: 1628911 - DNA, 25 bp, Homo sapien
gaaactacaaccagcgatatccaga

SEQ ID NO: 1628912 - DNA, 25 bp, Homo sapien
gccacccaaggtgtgaaactggtat

SEQ ID NO: 1628913 - DNA, 25 bp, Homo sapien
gacagatgagcgatgggtcacctct

SEQ ID NO: 1628914 - DNA, 25 bp, Homo sapien
ggccgccgacaatctgaaacttaag

SEQ ID NO: 1628915 - DNA, 25 bp, Homo sapien
tctcctttaatgagtcggccgccga

SEQ ID NO: 1628916 - DNA, 25 bp, Homo sapien
gaatatgcaatgaaagccggcttcc

SEQ ID NO: 1628917 - DNA, 25 bp, Homo sapien
atttaattccatgcccagaatgtgg

SEQ ID NO: 1628918 - DNA, 25 bp, Homo sapien
gaaaaagtgctagaggtgcttgcca

SEQ ID NO: 1628919 - DNA, 25 bp, Homo sapien
ggtcatctgttactacttgctgttg

SEQ ID NO: 1628920 - DNA, 25 bp, Homo sapien
gactggccttggcataactaggctg

SEQ ID NO: 1628921 - DNA, 25 bp, Homo sapien
cagtggcctggcatatctgatctca

SEQ ID NO: 1628922 - DNA, 25 bp, Homo sapien
tggcccaaccgtgaccaaagtgatg

SEQ ID NO: 1628923 - DNA, 25 bp, Homo sapien
gcatacagatccagctgcaaaggga

SEQ ID NO: 1628924 - DNA, 25 bp, Homo sapien
tctctcgggctttaacatgggccag

SEQ ID NO: 1628925 - DNA, 25 bp, Homo sapien
actggtcttgaactcttgacctcgt

SEQ ID NO: 1628926 - DNA, 25 bp, Homo sapien
ccgcgcctggcccacacccagctaa

SEQ ID NO: 1628927 - DNA, 25 bp, Homo sapien
tcttggtcagactggtcttgaactc

SEQ ID NO: 1628928 - DNA, 25 bp, Homo sapien
ttagtagtggtgacagggtttcacc

SEQ ID NO: 1628929 - DNA, 25 bp, Homo sapien
tttgcacgctatgtggcaggagtga

SEQ ID NO: 1628930 - DNA, 25 bp, Homo sapien
gctcagacccagagtttgcacgcta

SEQ ID NO: 1628931 - DNA, 25 bp, Homo sapien
actggccgcctatggatgacgcgca

SEQ ID NO: 1628932 - DNA, 25 bp, Homo sapien
agtgagccaggcgatgcagcagaag

SEQ ID NO: 1628933 - DNA, 25 bp, Homo sapien
ggctgcgaagcccacgtgatttatg

SEQ ID NO: 1628934 - DNA, 25 bp, Homo sapien
ggtgaaggcatgtttcacacggcct

SEQ ID NO: 1628935 - DNA, 25 bp, Homo sapien
tatactgaactgagtgtggctgcga

SEQ ID NO: 1628936 - DNA, 25 bp, Homo sapien
tgtgatgtatccctgtgaacgtgcc

SEQ ID NO: 1628937 - DNA, 25 bp, Homo sapien
agcgcaccactctatgcagtcacca

SEQ ID NO: 1628938 - DNA, 25 bp, Homo sapien
agtggaacgacaccatgcagatgct

SEQ ID NO: 1628939 - DNA, 25 bp, Homo sapien
tgggccgcaaccaacgactgcagtg

SEQ ID NO: 1628940 - DNA, 25 bp, Homo sapien
ctggcagccagtggaacgacaccat

SEQ ID NO: 1628941 - DNA, 25 bp, Homo sapien
gaacttgtgccggaggtacactgct

SEQ ID NO: 1628942 - DNA, 25 bp, Homo sapien
gataacagatatactggctggaggt

SEQ ID NO: 1628943 - DNA, 25 bp, Homo sapien
tttccagccagaatggatccagaag

SEQ ID NO: 1628944 - DNA, 25 bp, Homo sapien
ttgtgattggaagcagtcacctggg

SEQ ID NO: 1628945 - DNA, 25 bp, Homo sapien
gaggtcaatccttgatgctccagca

SEQ ID NO: 1628946 - DNA, 25 bp, Homo sapien
cacactaatttgagaggacccgtag

SEQ ID NO: 1628947 - DNA, 25 bp, Homo sapien
tagacattttcaggcacgtgctttg

SEQ ID NO: 1628948 - DNA, 25 bp, Homo sapien
gggtctcgccaaagcgcatgtgtgt

SEQ ID NO: 1628949 - DNA, 25 bp, Homo sapien
tgagaatttgtgactgaagtccaag

SEQ ID NO: 1628950 - DNA, 25 bp, Homo sapien
tgcagagcccagatgcgggagaggt

SEQ ID NO: 1628951 - DNA, 25 bp, Homo sapien
cccagatgcgggagaggtaggaatg

SEQ ID NO: 1628952 - DNA, 25 bp, Homo sapien
cagagcccagatgcgggagaggtag

SEQ ID NO: 1628953 - DNA, 25 bp, Homo sapien
ccaagactgtactcaggtaggcaga

SEQ ID NO: 1628954 - DNA, 25 bp, Homo sapien
agccaagactgtactcaggtaggca

SEQ ID NO: 1628955 - DNA, 25 bp, Homo sapien
agactgtactcaggtaggcagaact

SEQ ID NO: 1628956 - DNA, 25 bp, Homo sapien
caagactgtactcaggtaggcagaa

SEQ ID NO: 1628957 - DNA, 25 bp, Homo sapien
acaggtcgagctgggtctgacaagt

SEQ ID NO: 1628958 - DNA, 25 bp, Homo sapien
ctaaagataggcagacaggtcgagc

SEQ ID NO: 1628959 - DNA, 25 bp, Homo sapien
cagtctggtaaggacgttggagcta

SEQ ID NO: 1628960 - DNA, 25 bp, Homo sapien
tgtgtccttgggcgatgtctgagca

SEQ ID NO: 1628961 - DNA, 25 bp, Homo sapien
tcagactcaggtaggtagagctgcc

SEQ ID NO: 1628962 - DNA, 25 bp, Homo sapien
ctgccaggtatggtctgaagagcca

SEQ ID NO: 1628963 - DNA, 25 bp, Homo sapien
tgaagagccaggatcaagtacaggt

SEQ ID NO: 1628964 - DNA, 25 bp, Homo sapien
ggtagtctgggtcactaggtgtggt

SEQ ID NO: 1628965 - DNA, 25 bp, Homo sapien
ctggtgttgtcgtgagtctgtggat

SEQ ID NO: 1628966 - DNA, 25 bp, Homo sapien
ggtgttgtcgtgagtctgtggatcc

SEQ ID NO: 1628967 - DNA, 25 bp, Homo sapien
tgttgtcgtgagtctgtggatccag

SEQ ID NO: 1628968 - DNA, 25 bp, Homo sapien
gtgttgtcgtgagtctgtggatcca

SEQ ID NO: 1628969 - DNA, 25 bp, Homo sapien
cttaaaggtgaggtctagagaccca

SEQ ID NO: 1628970 - DNA, 25 bp, Homo sapien
gacctgttctcggccaaggtgagca

SEQ ID NO: 1628971 - DNA, 25 bp, Homo sapien
tagagacccatgtctgcagattgag

SEQ ID NO: 1628972 - DNA, 25 bp, Homo sapien
taatgtatggtctcagaggccactg

SEQ ID NO: 1628973 - DNA, 25 bp, Homo sapien
tctggtacaagtatgaggccctggg

SEQ ID NO: 1628974 - DNA, 25 bp, Homo sapien
gacatctgggtcttccagtgtgtga

SEQ ID NO: 1628975 - DNA, 25 bp, Homo sapien
gaggaggtaacatctagtacaggta

SEQ ID NO: 1628976 - DNA, 25 bp, Homo sapien
tctgaggagataacagcaggttaca

SEQ ID NO: 1628977 - DNA, 25 bp, Homo sapien
gcctgaggagatagcatctggcaca

SEQ ID NO: 1628978 - DNA, 25 bp, Homo sapien
gatatgaggatctgcgtcttccagt

SEQ ID NO: 1628979 - DNA, 25 bp, Homo sapien
tccagtgacttaggaggtacgatct

SEQ ID NO: 1628980 - DNA, 25 bp, Homo sapien
caagtatgaggatctgtgtccatca

SEQ ID NO: 1628981 - DNA, 25 bp, Homo sapien
cttttccagggcgacatggagtcca

SEQ ID NO: 1628982 - DNA, 25 bp, Homo sapien
ggagtccaatgggaaatacatcacc

SEQ ID NO: 1628983 - DNA, 25 bp, Homo sapien
ccaaatctggaacccgtgtggacca

SEQ ID NO: 1628984 - DNA, 25 bp, Homo sapien
caatggccagcatgctttttaccag

SEQ ID NO: 1628985 - DNA, 25 bp, Homo sapien
tgcctctgcggacacttaacactaa

SEQ ID NO: 1628986 - DNA, 25 bp, Homo sapien
ttcgggtgaattcctggacaagacc

SEQ ID NO: 1628987 - DNA, 25 bp, Homo sapien
aatcagtcaggacggcaacttggcc

SEQ ID NO: 1628988 - DNA, 25 bp, Homo sapien
gacaagaccgaggatgactgccatc

SEQ ID NO: 1628989 - DNA, 25 bp, Homo sapien
gattacacggcgcacaccaccatac

SEQ ID NO: 1628990 - DNA, 25 bp, Homo sapien
ggattacacggcgcacaccaccata

SEQ ID NO: 1628991 - DNA, 25 bp, Homo sapien
cactgcagccagtaatcctcttgcc

SEQ ID NO: 1628992 - DNA, 25 bp, Homo sapien
tcactgcagccagtaatcctcttgc

SEQ ID NO: 1628993 - DNA, 25 bp, Homo sapien
gctgggtccgcagatgcatgccagt

SEQ ID NO: 1628994 - DNA, 25 bp, Homo sapien
gggtccgcagatgcatgccagtaca

SEQ ID NO: 1628995 - DNA, 25 bp, Homo sapien
agctgggtccgcagatgcatgccag

SEQ ID NO: 1628996 - DNA, 25 bp, Homo sapien
tgggtccgcagatgcatgccagtac

SEQ ID NO: 1628997 - DNA, 25 bp, Homo sapien
gggtctggagacaaaggagcattca

SEQ ID NO: 1628998 - DNA, 25 bp, Homo sapien
ttctggaatgtacttttgcttcaat

SEQ ID NO: 1628999 - DNA, 25 bp, Homo sapien
tacacagggcacttgcttgagcctc

SEQ ID NO: 1629000 - DNA, 25 bp, Homo sapien
tagtgataggatcccactgaggcca

SEQ ID NO: 1629001 - DNA, 25 bp, Homo sapien
gtgtgcaccgttacacccagtgaat

SEQ ID NO: 1629002 - DNA, 25 bp, Homo sapien
cacccgggccagagtacggtggtgc

SEQ ID NO: 1629003 - DNA, 25 bp, Homo sapien
tgtgcaccgttacacccagtgaatt

SEQ ID NO: 1629004 - DNA, 25 bp, Homo sapien
gtgcaccgttacacccagtgaattt

SEQ ID NO: 1629005 - DNA, 25 bp, Homo sapien
tggcagctaggaaggtagctcctct

SEQ ID NO: 1629006 - DNA, 25 bp, Homo sapien
tatgtaccttattttaactcacaag

SEQ ID NO: 1629007 - DNA, 25 bp, Homo sapien
tgtcacagtggcagctaggaaggta

SEQ ID NO: 1629008 - DNA, 25 bp, Homo sapien
ctttttgcctttgggtgctggtgcc

SEQ ID NO: 1629009 - DNA, 25 bp, Homo sapien
tgtctgcacagccgttctggtgggc

SEQ ID NO: 1629010 - DNA, 25 bp, Homo sapien
tctgcacagccgttctggtgggcat

SEQ ID NO: 1629011 - DNA, 25 bp, Homo sapien
gtctgcacagccgttctggtgggca

SEQ ID NO: 1629012 - DNA, 25 bp, Homo sapien
ttgtctgcacagccgttctggtggg

SEQ ID NO: 1629013 - DNA, 25 bp, Homo sapien
gagttgaaaccccaggctagaaggc

SEQ ID NO: 1629014 - DNA, 25 bp, Homo sapien
tctcagctggaggtcgccagccctt

SEQ ID NO: 1629015 - DNA, 25 bp, Homo sapien
ggcctatgctggtgtgggaataaca

SEQ ID NO: 1629016 - DNA, 25 bp, Homo sapien
tttaggtctgatggcgggcctatgc

SEQ ID NO: 1629017 - DNA, 25 bp, Homo sapien
agccagcaggttgttaaatacccac

SEQ ID NO: 1629018 - DNA, 25 bp, Homo sapien
catagtgtatgctttgaggaacaac

SEQ ID NO: 1629019 - DNA, 25 bp, Homo sapien
acctccacaggtgagtatggcccca

SEQ ID NO: 1629020 - DNA, 25 bp, Homo sapien
ccatgaagacatttaaggctgggtg

SEQ ID NO: 1629021 - DNA, 25 bp, Homo sapien
tcttcaaataatgccgacgtcagtg

SEQ ID NO: 1629022 - DNA, 25 bp, Homo sapien
tacaggtgagcacaggtaactccca

SEQ ID NO: 1629023 - DNA, 25 bp, Homo sapien
caaagaggtcacgtatagaacagaa

SEQ ID NO: 1629024 - DNA, 25 bp, Homo sapien
taagctcaagagcaagatgacgttc

SEQ ID NO: 1629025 - DNA, 25 bp, Homo sapien
acagattcaaagaagtatcgagtgc

SEQ ID NO: 1629026 - DNA, 25 bp, Homo sapien
tcgagtgctatgcattgaaacttgt

SEQ ID NO: 1629027 - DNA, 25 bp, Homo sapien
ttttcagtttgtaccgcctggtatg

SEQ ID NO: 1629028 - DNA, 25 bp, Homo sapien
gatggcactatgtatattaatgtaa

SEQ ID NO: 1629029 - DNA, 25 bp, Homo sapien
ctgcctcgggtaggcggccggatca

SEQ ID NO: 1629030 - DNA, 25 bp, Homo sapien
agtgagtgcgcctggatccccagca

SEQ ID NO: 1629031 - DNA, 25 bp, Homo sapien
ttgggacgaggaaggtgcatcccct

SEQ ID NO: 1629032 - DNA, 25 bp, Homo sapien
cggcagttccctgcgcgcatggctg

SEQ ID NO: 1629033 - DNA, 25 bp, Homo sapien
catcctcttctaggtaccaggttcc

SEQ ID NO: 1629034 - DNA, 25 bp, Homo sapien
taccaggttccattagttttgtctg

SEQ ID NO: 1629035 - DNA, 25 bp, Homo sapien
ccattagttttgtctgtcagtcttg

SEQ ID NO: 1629036 - DNA, 25 bp, Homo sapien
tcttctaggtaccaggttccattag

SEQ ID NO: 1629037 - DNA, 25 bp, Homo sapien
aaaatggcaggccaagggttcctgc

SEQ ID NO: 1629038 - DNA, 25 bp, Homo sapien
gatcaagacctgaacatgaaaatgg

SEQ ID NO: 1629039 - DNA, 25 bp, Homo sapien
aaaagtagctacgtgtttgggcctg

SEQ ID NO: 1629040 - DNA, 25 bp, Homo sapien
tcattatttaccaaggatcaagacc

SEQ ID NO: 1629041 - DNA, 25 bp, Homo sapien
catctctcagtaaagctttatggat

SEQ ID NO: 1629042 - DNA, 25 bp, Homo sapien
ctctcagtaaagctttatggattag

SEQ ID NO: 1629043 - DNA, 25 bp, Homo sapien
ttacatctctcagtaaagctttatg

SEQ ID NO: 1629044 - DNA, 25 bp, Homo sapien
tacatctctcagtaaagctttatgg

SEQ ID NO: 1629045 - DNA, 25 bp, Homo sapien
tttcttgtccagaaactccaccact

SEQ ID NO: 1629046 - DNA, 25 bp, Homo sapien
aaactccaccactgtgctaaagaga

SEQ ID NO: 1629047 - DNA, 25 bp, Homo sapien
cactgtgctaaagagacagtggtgg

SEQ ID NO: 1629048 - DNA, 25 bp, Homo sapien
tccaccactgtgctaaagagacagt

SEQ ID NO: 1629049 - DNA, 25 bp, Homo sapien
cctcacctgcatgacatgaccagat

SEQ ID NO: 1629050 - DNA, 25 bp, Homo sapien
cagatcgtgcactttctatgccagg

SEQ ID NO: 1629051 - DNA, 25 bp, Homo sapien
cctgcatgacatgaccagatcgtgc

SEQ ID NO: 1629052 - DNA, 25 bp, Homo sapien
gacatgaccagatcgtgcactttct

SEQ ID NO: 1629053 - DNA, 25 bp, Homo sapien
gtggaccagcatgggaccagcagtt

SEQ ID NO: 1629054 - DNA, 25 bp, Homo sapien
agtggaccagcatgggaccagcagt

SEQ ID NO: 1629055 - DNA, 25 bp, Homo sapien
tggaccagcatgggaccagcagttc

SEQ ID NO: 1629056 - DNA, 25 bp, Homo sapien
acttggtccgggctgcacgtcttgt

SEQ ID NO: 1629057 - DNA, 25 bp, Homo sapien
aaggggctcccttgtcatcacttgg

SEQ ID NO: 1629058 - DNA, 25 bp, Homo sapien
ttggtccgggctgcacgtcttgtga

SEQ ID NO: 1629059 - DNA, 25 bp, Homo sapien
gtcatcacttggtccgggctgcacg

SEQ ID NO: 1629060 - DNA, 25 bp, Homo sapien
tcatggggaagcacccgcaggtcta

SEQ ID NO: 1629061 - DNA, 25 bp, Homo sapien
gggtccttgcgggcttcatgagatc

SEQ ID NO: 1629062 - DNA, 25 bp, Homo sapien
atggggaagcacccgcaggtctaaa

SEQ ID NO: 1629063 - DNA, 25 bp, Homo sapien
gtgttgggtccttgcgggcttcatg

SEQ ID NO: 1629064 - DNA, 25 bp, Homo sapien
cacagtaatgtagtttcacatacag

SEQ ID NO: 1629065 - DNA, 25 bp, Homo sapien
actcacacagtaatgtagtttcaca

SEQ ID NO: 1629066 - DNA, 25 bp, Homo sapien
tgcacaactcacacagtaatgtagt

SEQ ID NO: 1629067 - DNA, 25 bp, Homo sapien
caactcacacagtaatgtagtttca

SEQ ID NO: 1629068 - DNA, 25 bp, Homo sapien
gcattgaaggtgcttgcttcagaaa

SEQ ID NO: 1629069 - DNA, 25 bp, Homo sapien
cataggcattgaaggtgcttgcttc

SEQ ID NO: 1629070 - DNA, 25 bp, Homo sapien
taggcattgaaggtgcttgcttcag

SEQ ID NO: 1629071 - DNA, 25 bp, Homo sapien
acataggcattgaaggtgcttgctt

SEQ ID NO: 1629072 - DNA, 25 bp, Homo sapien
ttcttaacggctttgtacttgggca

SEQ ID NO: 1629073 - DNA, 25 bp, Homo sapien
ccatttctcttgtcagataatgtct

SEQ ID NO: 1629074 - DNA, 25 bp, Homo sapien
tccatttctcttgtcagataatgtc

SEQ ID NO: 1629075 - DNA, 25 bp, Homo sapien
tatccatttctcttgtcagataatg

SEQ ID NO: 1629076 - DNA, 25 bp, Homo sapien
ctatccatttctcttgtcagataat

SEQ ID NO: 1629077 - DNA, 25 bp, Homo sapien
ttatcctagtgtgagtatacttatg

SEQ ID NO: 1629078 - DNA, 25 bp, Homo sapien
cctagtgtgagtatacttatgtcaa

SEQ ID NO: 1629079 - DNA, 25 bp, Homo sapien
catttatggtcttcatatgatttct

SEQ ID NO: 1629080 - DNA, 25 bp, Homo sapien
tttcccacatttatggtcttcatat

SEQ ID NO: 1629081 - DNA, 25 bp, Homo sapien
tctcacatgtatagtgattcatata

SEQ ID NO: 1629082 - DNA, 25 bp, Homo sapien
tctgtaagatttctcacatgtatag

SEQ ID NO: 1629083 - DNA, 25 bp, Homo sapien
tttctcacatgtatagtgattcata

SEQ ID NO: 1629084 - DNA, 25 bp, Homo sapien
gtaagatttctcacatgtatagtga

SEQ ID NO: 1629085 - DNA, 25 bp, Homo sapien
ctctttgatgggcagtaagatttga

SEQ ID NO: 1629086 - DNA, 25 bp, Homo sapien
atgtactctttgatgggcagtaaga

SEQ ID NO: 1629087 - DNA, 25 bp, Homo sapien
atgggcagtaagatttgagcctttg

SEQ ID NO: 1629088 - DNA, 25 bp, Homo sapien
tttgatgggcagtaagatttgagcc

SEQ ID NO: 1629089 - DNA, 25 bp, Homo sapien
acatttatatggcttttctccagta

SEQ ID NO: 1629090 - DNA, 25 bp, Homo sapien
tttatatggcttttctccagtatga

SEQ ID NO: 1629091 - DNA, 25 bp, Homo sapien
tacatttatatggcttttctccagt

SEQ ID NO: 1629092 - DNA, 25 bp, Homo sapien
atatggcttttctccagtatgaatt

SEQ ID NO: 1629093 - DNA, 25 bp, Homo sapien
ctgatgtacggtaaggtttgaacta

SEQ ID NO: 1629094 - DNA, 25 bp, Homo sapien
tctgtgatgttgaagcagggatgac

SEQ ID NO: 1629095 - DNA, 25 bp, Homo sapien
aattctgtgatgttgaagcagggat

SEQ ID NO: 1629096 - DNA, 25 bp, Homo sapien
tgaattctgtgatgttgaagcaggg

SEQ ID NO: 1629097 - DNA, 25 bp, Homo sapien
ttctgtgatgttgaagcagggatga

SEQ ID NO: 1629098 - DNA, 25 bp, Homo sapien
tttcccacatatatggcattcatta

SEQ ID NO: 1629099 - DNA, 25 bp, Homo sapien
atggcattcattagatagaaatcac

SEQ ID NO: 1629100 - DNA, 25 bp, Homo sapien
cacatatatggcattcattagatag

SEQ ID NO: 1629101 - DNA, 25 bp, Homo sapien
catatatggcattcattagatagaa

SEQ ID NO: 1629102 - DNA, 25 bp, Homo sapien
atgctgaacaagaaatgagaggcta

SEQ ID NO: 1629103 - DNA, 25 bp, Homo sapien
tcagtgattcaagctggttgaagga

SEQ ID NO: 1629104 - DNA, 25 bp, Homo sapien
gtgattcaagctggttgaaggattt

SEQ ID NO: 1629105 - DNA, 25 bp, Homo sapien
tgctgaacaagaaatgagaggctac

SEQ ID NO: 1629106 - DNA, 25 bp, Homo sapien
ttatctgatgtcgtgtaagggatga

SEQ ID NO: 1629107 - DNA, 25 bp, Homo sapien
tccacatatacgacactcatagagt

SEQ ID NO: 1629108 - DNA, 25 bp, Homo sapien
gtgagtgctctgatggttagtaagt

SEQ ID NO: 1629109 - DNA, 25 bp, Homo sapien
ctatggcttatctgatgtcgtgtaa

SEQ ID NO: 1629110 - DNA, 25 bp, Homo sapien
tggcgattgaggattgactgtttgc

SEQ ID NO: 1629111 - DNA, 25 bp, Homo sapien
atgaattctccagtggcgattgagg

SEQ ID NO: 1629112 - DNA, 25 bp, Homo sapien
ttgaggattgactgtttgccaaagg

SEQ ID NO: 1629113 - DNA, 25 bp, Homo sapien
tctccagtggcgattgaggattgac

SEQ ID NO: 1629114 - DNA, 25 bp, Homo sapien
ggtgctctggttaacggctgctcca

SEQ ID NO: 1629115 - DNA, 25 bp, Homo sapien
ctattataagtgtggtgaggagagg

SEQ ID NO: 1629116 - DNA, 25 bp, Homo sapien
agaggtgctctggttaacggctgct

SEQ ID NO: 1629117 - DNA, 25 bp, Homo sapien
tattataagtgtggtgaggagaggt

SEQ ID NO: 1629118 - DNA, 25 bp, Homo sapien
gtttggagtgaatcttccttataaa

SEQ ID NO: 1629119 - DNA, 25 bp, Homo sapien
tgttactgtttggagtgaatcttcc

SEQ ID NO: 1629120 - DNA, 25 bp, Homo sapien
actgtttggagtgaatcttccttat

SEQ ID NO: 1629121 - DNA, 25 bp, Homo sapien
tactgtttggagtgaatcttcctta

SEQ ID NO: 1629122 - DNA, 25 bp, Homo sapien
gctccaacaatgtgatcacatatgg

SEQ ID NO: 1629123 - DNA, 25 bp, Homo sapien
ggctctttcccatgctccaacaatg

SEQ ID NO: 1629124 - DNA, 25 bp, Homo sapien
acatatggcttagttatggaaagac

SEQ ID NO: 1629125 - DNA, 25 bp, Homo sapien
tcacatatggcttagttatggaaag

SEQ ID NO: 1629126 - DNA, 25 bp, Homo sapien
gaatctaggcatgcccactcttcat

SEQ ID NO: 1629127 - DNA, 25 bp, Homo sapien
agaatctaggcatgcccactcttca

SEQ ID NO: 1629128 - DNA, 25 bp, Homo sapien
agcagaatctaggcatgcccactct

SEQ ID NO: 1629129 - DNA, 25 bp, Homo sapien
gcagaatctaggcatgcccactctt

SEQ ID NO: 1629130 - DNA, 25 bp, Homo sapien
agctgggtgcggatgcgctggtgct

SEQ ID NO: 1629131 - DNA, 25 bp, Homo sapien
cttgcattctgagctgggtgcggat

SEQ ID NO: 1629132 - DNA, 25 bp, Homo sapien
ccccttgaaaggctcctgggtggtg

SEQ ID NO: 1629133 - DNA, 25 bp, Homo sapien
ctgcgtacaaatggatgaggacccc

SEQ ID NO: 1629134 - DNA, 25 bp, Homo sapien
caaatggatgaggaccccccccttg

SEQ ID NO: 1629135 - DNA, 25 bp, Homo sapien
ccactgggggctgcgtacaaatgga

SEQ ID NO: 1629136 - DNA, 25 bp, Homo sapien
ttattaggcagcattgtcccgcagg

SEQ ID NO: 1629137 - DNA, 25 bp, Homo sapien
ccaggcttgccccaatcagcacagc

SEQ ID NO: 1629138 - DNA, 25 bp, Homo sapien
ggtgagtttattaggcagcattgtc

SEQ ID NO: 1629139 - DNA, 25 bp, Homo sapien
cccagattctcatggttgggacagg

SEQ ID NO: 1629140 - DNA, 25 bp, Homo sapien
agtatcgtgtcggcacactggttgt

SEQ ID NO: 1629141 - DNA, 25 bp, Homo sapien
tcagtatcgtgtcggcacactggtt

SEQ ID NO: 1629142 - DNA, 25 bp, Homo sapien
atcgtgtcggcacactggttgttga

SEQ ID NO: 1629143 - DNA, 25 bp, Homo sapien
ttcagtatcgtgtcggcacactggt

SEQ ID NO: 1629144 - DNA, 25 bp, Homo sapien
gtcttctggggaaggagggatagga

SEQ ID NO: 1629145 - DNA, 25 bp, Homo sapien
tctggggaaggagggataggatggg

SEQ ID NO: 1629146 - DNA, 25 bp, Homo sapien
cttctggggaaggagggataggatg

SEQ ID NO: 1629147 - DNA, 25 bp, Homo sapien
tcttctggggaaggagggataggat

SEQ ID NO: 1629148 - DNA, 25 bp, Homo sapien
gggtcattgtgtcggtcacgcagtc

SEQ ID NO: 1629149 - DNA, 25 bp, Homo sapien
ttctttccggctccgtgaggtggta

SEQ ID NO: 1629150 - DNA, 25 bp, Homo sapien
gaaactggttaatgaccgtcataag

SEQ ID NO: 1629151 - DNA, 25 bp, Homo sapien
tcacgcagtccttgagtttagagga

SEQ ID NO: 1629152 - DNA, 25 bp, Homo sapien
agcaggagacccagcagcgccaggg

SEQ ID NO: 1629153 - DNA, 25 bp, Homo sapien
gcagcagcaggagacccagcagcgc

SEQ ID NO: 1629154 - DNA, 25 bp, Homo sapien
agcagcaggagacccagcagcgcca

SEQ ID NO: 1629155 - DNA, 25 bp, Homo sapien
agcggcagcagcaggagacccagca

SEQ ID NO: 1629156 - DNA, 25 bp, Homo sapien
tcggggccggtaggtatgcgggtca

SEQ ID NO: 1629157 - DNA, 25 bp, Homo sapien
gtaggtatgcgggtcacactggggc

SEQ ID NO: 1629158 - DNA, 25 bp, Homo sapien
actggggcagtgcggacgcaggtcc

SEQ ID NO: 1629159 - DNA, 25 bp, Homo sapien
ggccggtaggtatgcgggtcacact

SEQ ID NO: 1629160 - DNA, 25 bp, Homo sapien
tctctaggcttaggaagggcctccc

SEQ ID NO: 1629161 - DNA, 25 bp, Homo sapien
catctctaggcttaggaagggcctc

SEQ ID NO: 1629162 - DNA, 25 bp, Homo sapien
gtggtccgggctgcatgccttgtga

SEQ ID NO: 1629163 - DNA, 25 bp, Homo sapien
atctctaggcttaggaagggcctcc

SEQ ID NO: 1629164 - DNA, 25 bp, Homo sapien
cagcagatgcagccagccagagtgt

SEQ ID NO: 1629165 - DNA, 25 bp, Homo sapien
agcagatgcagccagccagagtgtg

SEQ ID NO: 1629166 - DNA, 25 bp, Homo sapien
cagtgagactttctggataggggct

SEQ ID NO: 1629167 - DNA, 25 bp, Homo sapien
tgcttttctcccgcactgggaggtg

SEQ ID NO: 1629168 - DNA, 25 bp, Homo sapien
ctgggcagggttttgggcagtgaga

SEQ ID NO: 1629169 - DNA, 25 bp, Homo sapien
tgggcagtgagactttctggatagg

SEQ ID NO: 1629170 - DNA, 25 bp, Homo sapien
catgaagtcacgcaatatgtagctt

SEQ ID NO: 1629171 - DNA, 25 bp, Homo sapien
aagcactaccaccacaatagagatg

SEQ ID NO: 1629172 - DNA, 25 bp, Homo sapien
ccacacccggcaatatgtagttttt

SEQ ID NO: 1629173 - DNA, 25 bp, Homo sapien
gataccattgcgttttctagaactg

SEQ ID NO: 1629174 - DNA, 25 bp, Homo sapien
tgcacagggcctgcattttatcctg

SEQ ID NO: 1629175 - DNA, 25 bp, Homo sapien
agtgcagggaaggtcactctggcag

SEQ ID NO: 1629176 - DNA, 25 bp, Homo sapien
gcttttcctggagccgcaggtgctg

SEQ ID NO: 1629177 - DNA, 25 bp, Homo sapien
caggtgctgccatggagtgcaggga

SEQ ID NO: 1629178 - DNA, 25 bp, Homo sapien
cccgtcctcctggatagctaatgga

SEQ ID NO: 1629179 - DNA, 25 bp, Homo sapien
gactgaataagtagcatgatctgca

SEQ ID NO: 1629180 - DNA, 25 bp, Homo sapien
caactgacagatcatgggtagactc

SEQ ID NO: 1629181 - DNA, 25 bp, Homo sapien
tgtctccaggcccaactattccatg

SEQ ID NO: 1629182 - DNA, 25 bp, Homo sapien
ggagggccaatatctgatctgcagg

SEQ ID NO: 1629183 - DNA, 25 bp, Homo sapien
ggcatgtctatgctacacctgtaga

SEQ ID NO: 1629184 - DNA, 25 bp, Homo sapien
gaaaacaggcatatcgactggacac

SEQ ID NO: 1629185 - DNA, 25 bp, Homo sapien
tggtcacactctgcatatgcggtca

SEQ ID NO: 1629186 - DNA, 25 bp, Homo sapien
ctgcttctatgcaatcgttgctctg

SEQ ID NO: 1629187 - DNA, 25 bp, Homo sapien
gcttctatgcaatcgttgctctgaa

SEQ ID NO: 1629188 - DNA, 25 bp, Homo sapien
ctatgcaatcgttgctctgaaggat

SEQ ID NO: 1629189 - DNA, 25 bp, Homo sapien
ttctatgcaatcgttgctctgaagg

SEQ ID NO: 1629190 - DNA, 25 bp, Homo sapien
gacattggcaaagcattgctggaca

SEQ ID NO: 1629191 - DNA, 25 bp, Homo sapien
cagtttatcgatatccaggcaggca

SEQ ID NO: 1629192 - DNA, 25 bp, Homo sapien
cttcaggaggtcttgggacacatca

SEQ ID NO: 1629193 - DNA, 25 bp, Homo sapien
gagcaaatctttctgtcacggagac

SEQ ID NO: 1629194 - DNA, 25 bp, Homo sapien
agcgtatcgggaactggactcagca

SEQ ID NO: 1629195 - DNA, 25 bp, Homo sapien
gctgcaaaaggtgccgagctctggt

SEQ ID NO: 1629196 - DNA, 25 bp, Homo sapien
tgaacactggtgtaagcctgcaagt

SEQ ID NO: 1629197 - DNA, 25 bp, Homo sapien
tcatgacagcggagtctggtcccag

SEQ ID NO: 1629198 - DNA, 25 bp, Homo sapien
attgtaagtgtgaccccaggggcag

SEQ ID NO: 1629199 - DNA, 25 bp, Homo sapien
gtaagtgtgaccccaggggcagaat

SEQ ID NO: 1629200 - DNA, 25 bp, Homo sapien
ttgtaagtgtgaccccaggggcaga

SEQ ID NO: 1629201 - DNA, 25 bp, Homo sapien
aattgtaagtgtgaccccaggggca

SEQ ID NO: 1629202 - DNA, 25 bp, Homo sapien
tgacgcttgtacactcgggtgccag

SEQ ID NO: 1629203 - DNA, 25 bp, Homo sapien
tcgggtgccagtgccgctccaatag

SEQ ID NO: 1629204 - DNA, 25 bp, Homo sapien
cagcagggatgctgacgcttgtaca

SEQ ID NO: 1629205 - DNA, 25 bp, Homo sapien
tgccgctccaatagcggtttgtgcc

SEQ ID NO: 1629206 - DNA, 25 bp, Homo sapien
acctgagggacacgcccggtgcaga

SEQ ID NO: 1629207 - DNA, 25 bp, Homo sapien
tgtgccacccagactgagtgggctc

SEQ ID NO: 1629208 - DNA, 25 bp, Homo sapien
tgctgagagccatgtagaaccgcag

SEQ ID NO: 1629209 - DNA, 25 bp, Homo sapien
cagttcctagattaggctgtgccac

SEQ ID NO: 1629210 - DNA, 25 bp, Homo sapien
gcacgtacagaacctcatagtagcg

SEQ ID NO: 1629211 - DNA, 25 bp, Homo sapien
tcactgtgcacgtacagaacctcat

SEQ ID NO: 1629212 - DNA, 25 bp, Homo sapien
gccatcactgtgcacgtacagaacc

SEQ ID NO: 1629213 - DNA, 25 bp, Homo sapien
gaacctcatagtagcgcccaggact

SEQ ID NO: 1629214 - DNA, 25 bp, Homo sapien
ccagcattgggtaggacttagagtg

SEQ ID NO: 1629215 - DNA, 25 bp, Homo sapien
tggccgtcaccagtggcagggccct

SEQ ID NO: 1629216 - DNA, 25 bp, Homo sapien
taaagttgagtggatgagttgacag

SEQ ID NO: 1629217 - DNA, 25 bp, Homo sapien
cccacattccagttgtaaagttgag

SEQ ID NO: 1629218 - DNA, 25 bp, Homo sapien
ctgagactctcagccggctctgtgg

SEQ ID NO: 1629219 - DNA, 25 bp, Homo sapien
aacctgcgcagtgcaggcgtccatg

SEQ ID NO: 1629220 - DNA, 25 bp, Homo sapien
gctctgtggcctgtcatgttgtgtg

SEQ ID NO: 1629221 - DNA, 25 bp, Homo sapien
tgcacgtgtgtgagaatgggatttt

SEQ ID NO: 1629222 - DNA, 25 bp, Homo sapien
ttagaccatctctaggcttaggaag

SEQ ID NO: 1629223 - DNA, 25 bp, Homo sapien
tttagaccatctctaggcttaggaa

SEQ ID NO: 1629224 - DNA, 25 bp, Homo sapien
tgggctatgcgccttgtgaccaagg

SEQ ID NO: 1629225 - DNA, 25 bp, Homo sapien
ggtctgggctatgcgccttgtgacc

SEQ ID NO: 1629226 - DNA, 25 bp, Homo sapien
tggtctgggctatgcgccttgtgac

SEQ ID NO: 1629227 - DNA, 25 bp, Homo sapien
actgtggtctgggctatgcgccttg

SEQ ID NO: 1629228 - DNA, 25 bp, Homo sapien
atggccaccgtttcagagggaagac

SEQ ID NO: 1629229 - DNA, 25 bp, Homo sapien
tgctgcagcctcgaggcctgcaggg

SEQ ID NO: 1629230 - DNA, 25 bp, Homo sapien
catggccaccgtttcagagggaaga

SEQ ID NO: 1629231 - DNA, 25 bp, Homo sapien
aattatttggttttgccctgtgagc

SEQ ID NO: 1629232 - DNA, 25 bp, Homo sapien
tatatggctgggatcgtaatgtgtc

SEQ ID NO: 1629233 - DNA, 25 bp, Homo sapien
gtaatgtgtctgttctcccgtatct

SEQ ID NO: 1629234 - DNA, 25 bp, Homo sapien
cattgtttaagtctaccctggtaca

SEQ ID NO: 1629235 - DNA, 25 bp, Homo sapien
catgaacaacactgtagggagcttt

SEQ ID NO: 1629236 - DNA, 25 bp, Homo sapien
cagttcaggtgcagttccccatttc

SEQ ID NO: 1629237 - DNA, 25 bp, Homo sapien
tcactccattgatatcaggctcagg

SEQ ID NO: 1629238 - DNA, 25 bp, Homo sapien
tgtgctgctatattgccagacagtc

SEQ ID NO: 1629239 - DNA, 25 bp, Homo sapien
gctgaagggtcttagggagatctcc

SEQ ID NO: 1629240 - DNA, 25 bp, Homo sapien
tcctatctagttgcactttgtacca

SEQ ID NO: 1629241 - DNA, 25 bp, Homo sapien
gaacttttttagcttcggcagatga

SEQ ID NO: 1629242 - DNA, 25 bp, Homo sapien
tccttgcctctagtgaccattattg

SEQ ID NO: 1629243 - DNA, 25 bp, Homo sapien
ggcttacttcacataacacaatggc

SEQ ID NO: 1629244 - DNA, 25 bp, Homo sapien
aggttgagtcaaatcttggctgtga

SEQ ID NO: 1629245 - DNA, 25 bp, Homo sapien
ggttgagtcaaatcttggctgtgaa

SEQ ID NO: 1629246 - DNA, 25 bp, Homo sapien
gttgagtcaaatcttggctgtgaat

SEQ ID NO: 1629247 - DNA, 25 bp, Homo sapien
tcttggaagactctgagaagaactg

SEQ ID NO: 1629248 - DNA, 25 bp, Homo sapien
catagttagtctggttaatggtctg

SEQ ID NO: 1629249 - DNA, 25 bp, Homo sapien
gcaattgctcaattcaggagttctg

SEQ ID NO: 1629250 - DNA, 25 bp, Homo sapien
ctggttttgcagagtgagtttgaaa

SEQ ID NO: 1629251 - DNA, 25 bp, Homo sapien
ttagtctgttttcactcagagttat

SEQ ID NO: 1629252 - DNA, 25 bp, Homo sapien
gttttcactcagagttattgataag

SEQ ID NO: 1629253 - DNA, 25 bp, Homo sapien
tcatctcttcattttcaattggtat

SEQ ID NO: 1629254 - DNA, 25 bp, Homo sapien
aatatcaattcagacagtttctatc

SEQ ID NO: 1629255 - DNA, 25 bp, Homo sapien
ccccatggcctagactgcagatgtt

SEQ ID NO: 1629256 - DNA, 25 bp, Homo sapien
caataactatgagtgaccccatggc

SEQ ID NO: 1629257 - DNA, 25 bp, Homo sapien
gtggcttaacctctggcatgaaggg

SEQ ID NO: 1629258 - DNA, 25 bp, Homo sapien
tggagtgcttcaacagtggcttaac

SEQ ID NO: 1629259 - DNA, 25 bp, Homo sapien
ttatttcgttcttctgcctcattgc

SEQ ID NO: 1629260 - DNA, 25 bp, Homo sapien
ctttatttcgttcttctgcctcatt

SEQ ID NO: 1629261 - DNA, 25 bp, Homo sapien
tcgttcttctgcctcattgccctgg

SEQ ID NO: 1629262 - DNA, 25 bp, Homo sapien
atttcgttcttctgcctcattgccc

SEQ ID NO: 1629263 - DNA, 25 bp, Homo sapien
cataatacacagacaaaaacggaga

SEQ ID NO: 1629264 - DNA, 25 bp, Homo sapien
caatattcacgcatatataggccaa

SEQ ID NO: 1629265 - DNA, 25 bp, Homo sapien
aacggagatccaagacagaatttca

SEQ ID NO: 1629266 - DNA, 25 bp, Homo sapien
ttaaagaaattagagtcccatgacc

SEQ ID NO: 1629267 - DNA, 25 bp, Homo sapien
gcttttagccaagacaaagggccaa

SEQ ID NO: 1629268 - DNA, 25 bp, Homo sapien
gaatctccccaaaggtagttcagga

SEQ ID NO: 1629269 - DNA, 25 bp, Homo sapien
gctttgtaactcaactgcacagggc

SEQ ID NO: 1629270 - DNA, 25 bp, Homo sapien
tgggcaaagagacggcaagcaattt

SEQ ID NO: 1629271 - DNA, 25 bp, Homo sapien
caagctggccgtactttagccatca

SEQ ID NO: 1629272 - DNA, 25 bp, Homo sapien
tagattcctctaacagcagagcctg

SEQ ID NO: 1629273 - DNA, 25 bp, Homo sapien
gttggccagggacttctcttagaag

SEQ ID NO: 1629274 - DNA, 25 bp, Homo sapien
cattcctcatggttaacttggtggc

SEQ ID NO: 1629275 - DNA, 25 bp, Homo sapien
cactcgaggaaagtgcaggcttgaa

SEQ ID NO: 1629276 - DNA, 25 bp, Homo sapien
ggatgcaagcattaccacccatgga

SEQ ID NO: 1629277 - DNA, 25 bp, Homo sapien
tactcgacctaaaaggctcccatgg

SEQ ID NO: 1629278 - DNA, 25 bp, Homo sapien
catggatccagaggagctagtcagc

SEQ ID NO: 1629279 - DNA, 25 bp, Homo sapien
cattgcctgatttaaagacatagtg

SEQ ID NO: 1629280 - DNA, 25 bp, Homo sapien
taaaggaatacattgcctgatttaa

SEQ ID NO: 1629281 - DNA, 25 bp, Homo sapien
ggaatacattgcctgatttaaagac

SEQ ID NO: 1629282 - DNA, 25 bp, Homo sapien
tacagattaaggaagtgcagaaata

SEQ ID NO: 1629283 - DNA, 25 bp, Homo sapien
agaaatgttgttgaatgaactggac

SEQ ID NO: 1629284 - DNA, 25 bp, Homo sapien
aaagaaatgttgttgaatgaactgg

SEQ ID NO: 1629285 - DNA, 25 bp, Homo sapien
aaatgttgttgaatgaactggacat

SEQ ID NO: 1629286 - DNA, 25 bp, Homo sapien
tgaagatcgtgttttaaagaaatgt

SEQ ID NO: 1629287 - DNA, 25 bp, Homo sapien
taccaagtgttggtgaggacatgga

SEQ ID NO: 1629288 - DNA, 25 bp, Homo sapien
cataccaagtgttggtgaggacatg

SEQ ID NO: 1629289 - DNA, 25 bp, Homo sapien
ccaagtgttggtgaggacatggagt

SEQ ID NO: 1629290 - DNA, 25 bp, Homo sapien
ataccaagtgttggtgaggacatgg

SEQ ID NO: 1629291 - DNA, 25 bp, Homo sapien
aaccagtctagagtctacagcccca

SEQ ID NO: 1629292 - DNA, 25 bp, Homo sapien
cgccaatatctctcctgcactaaag

SEQ ID NO: 1629293 - DNA, 25 bp, Homo sapien
cctgtaagttggtgtgcttatgctt

SEQ ID NO: 1629294 - DNA, 25 bp, Homo sapien
agggctagccctttcttagagatgg

SEQ ID NO: 1629295 - DNA, 25 bp, Homo sapien
caagtatagatttaacgctgaaggc

SEQ ID NO: 1629296 - DNA, 25 bp, Homo sapien
gactctcaggtgttgaacaagtata

SEQ ID NO: 1629297 - DNA, 25 bp, Homo sapien
tatgtggaccaagcagacagcatcc

SEQ ID NO: 1629298 - DNA, 25 bp, Homo sapien
tgtccggtgtcacccactatgtgga

SEQ ID NO: 1629299 - DNA, 25 bp, Homo sapien
tctggtgtaaaatgaggctggatct

SEQ ID NO: 1629300 - DNA, 25 bp, Homo sapien
gtaaaatgaggctggatctttggct

SEQ ID NO: 1629301 - DNA, 25 bp, Homo sapien
gaactctctggtgtaaaatgaggct

SEQ ID NO: 1629302 - DNA, 25 bp, Homo sapien
aaaatgaggctggatctttggctaa

SEQ ID NO: 1629303 - DNA, 25 bp, Homo sapien
ggtgttcaataaggccatagctttg

SEQ ID NO: 1629304 - DNA, 25 bp, Homo sapien
tgccgagcaagtgtgattttgcagc

SEQ ID NO: 1629305 - DNA, 25 bp, Homo sapien
ctacacttataaggctttgccccag

SEQ ID NO: 1629306 - DNA, 25 bp, Homo sapien
aagtgtgattttgcagctgaagcat

SEQ ID NO: 1629307 - DNA, 25 bp, Homo sapien
actgggaactctcgggtgtataatc

SEQ ID NO: 1629308 - DNA, 25 bp, Homo sapien
gggaactctcgggtgtataatcatg

SEQ ID NO: 1629309 - DNA, 25 bp, Homo sapien
ccactgggaactctcgggtgtataa

SEQ ID NO: 1629310 - DNA, 25 bp, Homo sapien
tccactgggaactctcgggtgtata

SEQ ID NO: 1629311 - DNA, 25 bp, Homo sapien
ctggaattctggctaaataatttcg

SEQ ID NO: 1629312 - DNA, 25 bp, Homo sapien
ggaattctggctaaataatttcgca

SEQ ID NO: 1629313 - DNA, 25 bp, Homo sapien
gaattctggctaaataatttcgcac

SEQ ID NO: 1629314 - DNA, 25 bp, Homo sapien
attctggctaaataatttcgcacat

SEQ ID NO: 1629315 - DNA, 25 bp, Homo sapien
gagtgtgtgtttgctgctataggct

SEQ ID NO: 1629316 - DNA, 25 bp, Homo sapien
cctctctccagcgtgaactttcttg

SEQ ID NO: 1629317 - DNA, 25 bp, Homo sapien
taaggctttaaacccatgtgaactc

SEQ ID NO: 1629318 - DNA, 25 bp, Homo sapien
tttttatgcctaacaaggtgggtgc

SEQ ID NO: 1629319 - DNA, 25 bp, Homo sapien
ggaggtccttctcacagtacccaca

SEQ ID NO: 1629320 - DNA, 25 bp, Homo sapien
atgtgaaaggcctccttgcactcag

SEQ ID NO: 1629321 - DNA, 25 bp, Homo sapien
ttcactgcacctgtgatacccttct

SEQ ID NO: 1629322 - DNA, 25 bp, Homo sapien
cttctccaatgtgaaaggcctcctt

SEQ ID NO: 1629323 - DNA, 25 bp, Homo sapien
aatggcattttgaaactgaaattgg

SEQ ID NO: 1629324 - DNA, 25 bp, Homo sapien
tggcattttgaaactgaaattgggc

SEQ ID NO: 1629325 - DNA, 25 bp, Homo sapien
gcattttgaaactgaaattgggctg

SEQ ID NO: 1629326 - DNA, 25 bp, Homo sapien
tttgaaactgaaattgggctgggtg

SEQ ID NO: 1629327 - DNA, 25 bp, Homo sapien
attcagaacagatccataaattggg

SEQ ID NO: 1629328 - DNA, 25 bp, Homo sapien
atggccaaccaaaccttccagtggt

SEQ ID NO: 1629329 - DNA, 25 bp, Homo sapien
gccaccctccaaaaggtagatgata

SEQ ID NO: 1629330 - DNA, 25 bp, Homo sapien
cacttaatagaatatcatgcagctt

SEQ ID NO: 1629331 - DNA, 25 bp, Homo sapien
cagcctcatgcagctttacatcatt

SEQ ID NO: 1629332 - DNA, 25 bp, Homo sapien
gggacttgtgctgaatcaaactgag

SEQ ID NO: 1629333 - DNA, 25 bp, Homo sapien
gagtgctgtatctacacttcccctg

SEQ ID NO: 1629334 - DNA, 25 bp, Homo sapien
acttcccctgattttgctactatgg

SEQ ID NO: 1629335 - DNA, 25 bp, Homo sapien
ggtactattaatgccctagcccagc

SEQ ID NO: 1629336 - DNA, 25 bp, Homo sapien
tggttttgttcatagggcctcctgt

SEQ ID NO: 1629337 - DNA, 25 bp, Homo sapien
gcttatatgcctggactttgacttg

SEQ ID NO: 1629338 - DNA, 25 bp, Homo sapien
tgcagggacttagagctcatacaac

SEQ ID NO: 1629339 - DNA, 25 bp, Homo sapien
tattcatttatgtgctgacggacac

SEQ ID NO: 1629340 - DNA, 25 bp, Homo sapien
tccatggactcacataatttgatgc

SEQ ID NO: 1629341 - DNA, 25 bp, Homo sapien
tgtacccatcaagaaataactcccc

SEQ ID NO: 1629342 - DNA, 25 bp, Homo sapien
gtgtcagccatgtcacacatataga

SEQ ID NO: 1629343 - DNA, 25 bp, Homo sapien
caatgcattgacaaggctccaccaa

SEQ ID NO: 1629344 - DNA, 25 bp, Homo sapien
gaccaggcaatctgcatgaagccat

SEQ ID NO: 1629345 - DNA, 25 bp, Homo sapien
tcctcgctggaggtctcagtggcct

SEQ ID NO: 1629346 - DNA, 25 bp, Homo sapien
aaggagtgtctcctgccacaggtca

SEQ ID NO: 1629347 - DNA, 25 bp, Homo sapien
gctgtcgtgtaataagatagtggcc

SEQ ID NO: 1629348 - DNA, 25 bp, Homo sapien
caagggccgatgtgtctaccaatgg

SEQ ID NO: 1629349 - DNA, 25 bp, Homo sapien
tgaagcgagtgaactgcttgagccc

SEQ ID NO: 1629350 - DNA, 25 bp, Homo sapien
aaattcctcatagtcccaagggccg

SEQ ID NO: 1629351 - DNA, 25 bp, Homo sapien
gggacagacattcacatcatagcac

SEQ ID NO: 1629352 - DNA, 25 bp, Homo sapien
tgtgcccttgaccagataaatccca

SEQ ID NO: 1629353 - DNA, 25 bp, Homo sapien
aaaggagcaaacaagcttgggcctc

SEQ ID NO: 1629354 - DNA, 25 bp, Homo sapien
caatgcaagtcagggtgtcactgga

SEQ ID NO: 1629355 - DNA, 25 bp, Homo sapien
gaatgctttttatgagatggccaga

SEQ ID NO: 1629356 - DNA, 25 bp, Homo sapien
tatgggccatgaccgacaaggaatg

SEQ ID NO: 1629357 - DNA, 25 bp, Homo sapien
tattgaaacaaaaggactagccctc

SEQ ID NO: 1629358 - DNA, 25 bp, Homo sapien
tgaggactcataatgggaaaccacc

SEQ ID NO: 1629359 - DNA, 25 bp, Homo sapien
taacacctgcctcataacgaattgg

SEQ ID NO: 1629360 - DNA, 25 bp, Homo sapien
caggattctaagtgggaaacgatct

SEQ ID NO: 1629361 - DNA, 25 bp, Homo sapien
tatccagaatgcaacacagagattg

SEQ ID NO: 1629362 - DNA, 25 bp, Homo sapien
catttcagttgaaagcccaggattc

SEQ ID NO: 1629363 - DNA, 25 bp, Homo sapien
gccttgctggttaaacaaattgcag

SEQ ID NO: 1629364 - DNA, 25 bp, Homo sapien
cataaaggccttgctggttaaacaa

SEQ ID NO: 1629365 - DNA, 25 bp, Homo sapien
taagtcacaggataacattggaagt

SEQ ID NO: 1629366 - DNA, 25 bp, Homo sapien
aacattggaagtcggcacaagctac

SEQ ID NO: 1629367 - DNA, 25 bp, Homo sapien
ctttggtgtcctcactgctgcttgt

SEQ ID NO: 1629368 - DNA, 25 bp, Homo sapien
ggaagtagaccccagcgcggttgcc

SEQ ID NO: 1629369 - DNA, 25 bp, Homo sapien
ttggtgtcctcactgctgcttgtta

SEQ ID NO: 1629370 - DNA, 25 bp, Homo sapien
cggttgccgctggttgttcgggtgg

SEQ ID NO: 1629371 - DNA, 25 bp, Homo sapien
tcagaacggccattagtgtcacaga

SEQ ID NO: 1629372 - DNA, 25 bp, Homo sapien
aactacagtcgtgacagtcgggcca

SEQ ID NO: 1629373 - DNA, 25 bp, Homo sapien
gaaacgctcatcagtgccatggcaa

SEQ ID NO: 1629374 - DNA, 25 bp, Homo sapien
gcttcacgaagatcatgcaggtcag

SEQ ID NO: 1629375 - DNA, 25 bp, Homo sapien
cataatcaaaccatatgtctatcag

SEQ ID NO: 1629376 - DNA, 25 bp, Homo sapien
tatttgagagacaattgctttagcc

SEQ ID NO: 1629377 - DNA, 25 bp, Homo sapien
gcagagtcctcaaggcccaatagtc

SEQ ID NO: 1629378 - DNA, 25 bp, Homo sapien
agatctaacctctcaatactattag

SEQ ID NO: 1629379 - DNA, 25 bp, Homo sapien
ttttatccatttcgtacagcttacc

SEQ ID NO: 1629380 - DNA, 25 bp, Homo sapien
tacccatttcctttatcacactctg

SEQ ID NO: 1629381 - DNA, 25 bp, Homo sapien
tttgagcattgttcagaagtcactg

SEQ ID NO: 1629382 - DNA, 25 bp, Homo sapien
tggattctctgctctatttgagcat

SEQ ID NO: 1629383 - DNA, 25 bp, Homo sapien
caagtgcatcccttattctatagga

SEQ ID NO: 1629384 - DNA, 25 bp, Homo sapien
gatgaatggtagagcaacctgaagg

SEQ ID NO: 1629385 - DNA, 25 bp, Homo sapien
cccagaggagccagtaaatgttata

SEQ ID NO: 1629386 - DNA, 25 bp, Homo sapien
gaagatatttagtcacccagaggag

SEQ ID NO: 1629387 - DNA, 25 bp, Homo sapien
gcaaggccagcacaagcagtgcccc

SEQ ID NO: 1629388 - DNA, 25 bp, Homo sapien
gctctctgatcaccagcaaggccag

SEQ ID NO: 1629389 - DNA, 25 bp, Homo sapien
agcacagctctctgatcaccagcaa

SEQ ID NO: 1629390 - DNA, 25 bp, Homo sapien
ctggaagcacagctctctgatcacc

SEQ ID NO: 1629391 - DNA, 25 bp, Homo sapien
ggtattgtacacttgagccaccaca

SEQ ID NO: 1629392 - DNA, 25 bp, Homo sapien
caagtgataagtgataaccagtgcc

SEQ ID NO: 1629393 - DNA, 25 bp, Homo sapien
tcagaaacatctagccaccatcaag

SEQ ID NO: 1629394 - DNA, 25 bp, Homo sapien
gacattgatgtcacagggtcctgca

SEQ ID NO: 1629395 - DNA, 25 bp, Homo sapien
gagtgattactgatacaaaatgcaa

SEQ ID NO: 1629396 - DNA, 25 bp, Homo sapien
tctcattcatacacggaagctaaaa

SEQ ID NO: 1629397 - DNA, 25 bp, Homo sapien
gaactcatagaaggagagtgattac

SEQ ID NO: 1629398 - DNA, 25 bp, Homo sapien
catggatgaatttggagccattgtg

SEQ ID NO: 1629399 - DNA, 25 bp, Homo sapien
gataaacattagtgtgagcgcacgc

SEQ ID NO: 1629400 - DNA, 25 bp, Homo sapien
ttttgctagcaaaggcgagagctcg

SEQ ID NO: 1629401 - DNA, 25 bp, Homo sapien
cagtatgactatatgccccaggaca

SEQ ID NO: 1629402 - DNA, 25 bp, Homo sapien
ggttcgcgaactacagctggcacaa

SEQ ID NO: 1629403 - DNA, 25 bp, Homo sapien
tcatgtcctcctatgtaaacgcggg

SEQ ID NO: 1629404 - DNA, 25 bp, Homo sapien
attctgggcagtgtcgtccccagag

SEQ ID NO: 1629405 - DNA, 25 bp, Homo sapien
ccaggctccgggacgattctgggca

SEQ ID NO: 1629406 - DNA, 25 bp, Homo sapien
ctgctgaggactccggccagtatga

SEQ ID NO: 1629407 - DNA, 25 bp, Homo sapien
gcagatgtacatgttgggtgaagtc

SEQ ID NO: 1629408 - DNA, 25 bp, Homo sapien
gggttacctggcaccaaatagatgc

SEQ ID NO: 1629409 - DNA, 25 bp, Homo sapien
taagatgagtaatgacgaactggtg

SEQ ID NO: 1629410 - DNA, 25 bp, Homo sapien
aaatttcttgaaccctgtggtgtgc

SEQ ID NO: 1629411 - DNA, 25 bp, Homo sapien
gctccatttgagcactgttcagaaa

SEQ ID NO: 1629412 - DNA, 25 bp, Homo sapien
tccattatcacactgtgttcccact

SEQ ID NO: 1629413 - DNA, 25 bp, Homo sapien
gaagtcaggtagaccatttcagacc

SEQ ID NO: 1629414 - DNA, 25 bp, Homo sapien
caattctcacctctagagaaagccc

SEQ ID NO: 1629415 - DNA, 25 bp, Homo sapien
gaggctcacagaagctaacgctgta

SEQ ID NO: 1629416 - DNA, 25 bp, Homo sapien
acaaagacacactccctcaagggta

SEQ ID NO: 1629417 - DNA, 25 bp, Homo sapien
tattctcaggtacagtgtaaggctc

SEQ ID NO: 1629418 - DNA, 25 bp, Homo sapien
taaatgcatgttaaccaccaggtct

SEQ ID NO: 1629419 - DNA, 25 bp, Homo sapien
gtgagttctcatgtgctgagttaaa

SEQ ID NO: 1629420 - DNA, 25 bp, Homo sapien
ttctcatgtgctgagttaaagcaaa

SEQ ID NO: 1629421 - DNA, 25 bp, Homo sapien
tgtgctgagttaaagcaaagttgtc

SEQ ID NO: 1629422 - DNA, 25 bp, Homo sapien
tgctgagttaaagcaaagttgtcac

SEQ ID NO: 1629423 - DNA, 25 bp, Homo sapien
tcctcatgtgtcgagtgaaggaaga

SEQ ID NO: 1629424 - DNA, 25 bp, Homo sapien
cagagtggtgtgtaaaagcctttcc

SEQ ID NO: 1629425 - DNA, 25 bp, Homo sapien
tgaaggaagagctatagtaaaaggc

SEQ ID NO: 1629426 - DNA, 25 bp, Homo sapien
cagtgtggatcctattatgccgaac

SEQ ID NO: 1629427 - DNA, 25 bp, Homo sapien
agtggagcgatgagtaaaggccttt

SEQ ID NO: 1629428 - DNA, 25 bp, Homo sapien
cattgtgctggataaatgtggagcg

SEQ ID NO: 1629429 - DNA, 25 bp, Homo sapien
taaggaagagctgtcacaaaaggcc

SEQ ID NO: 1629430 - DNA, 25 bp, Homo sapien
cttatgtcggatgaaagtggagcga

SEQ ID NO: 1629431 - DNA, 25 bp, Homo sapien
aatacgctggtgctccgtgaggtga

SEQ ID NO: 1629432 - DNA, 25 bp, Homo sapien
cttatctccggtgtgaatacgctgg

SEQ ID NO: 1629433 - DNA, 25 bp, Homo sapien
tatgaagcctcatatgtcgaatgac

SEQ ID NO: 1629434 - DNA, 25 bp, Homo sapien
atgacatcagccatataacgacagg

SEQ ID NO: 1629435 - DNA, 25 bp, Homo sapien
cattccgtgcatgtgtaagggttat

SEQ ID NO: 1629436 - DNA, 25 bp, Homo sapien
gggcttcactccagcatgaatctgt

SEQ ID NO: 1629437 - DNA, 25 bp, Homo sapien
taagggttattccttgcatcagtca

SEQ ID NO: 1629438 - DNA, 25 bp, Homo sapien
gaatctgttgatgccgaacaagggc

SEQ ID NO: 1629439 - DNA, 25 bp, Homo sapien
aaatcatcatgtttataactcaact

SEQ ID NO: 1629440 - DNA, 25 bp, Homo sapien
tctcagggcatatctctttgtgggg

SEQ ID NO: 1629441 - DNA, 25 bp, Homo sapien
taaaacccttaagcccagactatca

SEQ ID NO: 1629442 - DNA, 25 bp, Homo sapien
tggagtgactcgttcctgtaaaacc

SEQ ID NO: 1629443 - DNA, 25 bp, Homo sapien
ttcctcatctctagcttgccccaac

SEQ ID NO: 1629444 - DNA, 25 bp, Homo sapien
agcttttcctcatctctagcttgcc

SEQ ID NO: 1629445 - DNA, 25 bp, Homo sapien
ctgaatttttattagcttttcctca

SEQ ID NO: 1629446 - DNA, 25 bp, Homo sapien
tattagcttttcctcatctctagct

SEQ ID NO: 1629447 - DNA, 25 bp, Homo sapien
gatctctgtgccagaagttcctgga

SEQ ID NO: 1629448 - DNA, 25 bp, Homo sapien
ggccagctgagaagcagtaggctct

SEQ ID NO: 1629449 - DNA, 25 bp, Homo sapien
cctggaaagaggattcctcagagaa

SEQ ID NO: 1629450 - DNA, 25 bp, Homo sapien
cagtaggctctgtaatcttgggttt

SEQ ID NO: 1629451 - DNA, 25 bp, Homo sapien
catgttcttgtacttggcgaaaggt

SEQ ID NO: 1629452 - DNA, 25 bp, Homo sapien
gaatcttcctacagaataagcaatg

SEQ ID NO: 1629453 - DNA, 25 bp, Homo sapien
gcgaaaggtttgtaggtgttcatta

SEQ ID NO: 1629454 - DNA, 25 bp, Homo sapien
taccattatgagatgaaacaatctt

SEQ ID NO: 1629455 - DNA, 25 bp, Homo sapien
tccctgatgcagctgagagattcac

SEQ ID NO: 1629456 - DNA, 25 bp, Homo sapien
gatccccaagtcatagtgttcacac

SEQ ID NO: 1629457 - DNA, 25 bp, Homo sapien
tgctggagtctcacacagtggcttg

SEQ ID NO: 1629458 - DNA, 25 bp, Homo sapien
tagatgctgctggagacgtaagagc

SEQ ID NO: 1629459 - DNA, 25 bp, Homo sapien
ctcagcctaacttatataccaaagg

SEQ ID NO: 1629460 - DNA, 25 bp, Homo sapien
tctccagagtcatgaggctagtgag

SEQ ID NO: 1629461 - DNA, 25 bp, Homo sapien
agtgacgtcacacaacctctccaga

SEQ ID NO: 1629462 - DNA, 25 bp, Homo sapien
tgagtggcaaatcattaaagcctag

SEQ ID NO: 1629463 - DNA, 25 bp, Homo sapien
catattccaacctgaataaaggcaa

SEQ ID NO: 1629464 - DNA, 25 bp, Homo sapien
attccaacctgaataaaggcaaaga

SEQ ID NO: 1629465 - DNA, 25 bp, Homo sapien
ccatggggtcaagggctccatgact

SEQ ID NO: 1629466 - DNA, 25 bp, Homo sapien
ctaacatattccaacctgaataaag

SEQ ID NO: 1629467 - DNA, 25 bp, Homo sapien
aggctgccctgatacccgctgccag

SEQ ID NO: 1629468 - DNA, 25 bp, Homo sapien
tgcaggctgccctgatacccgctgc

SEQ ID NO: 1629469 - DNA, 25 bp, Homo sapien
gcaggctgccctgatacccgctgcc

SEQ ID NO: 1629470 - DNA, 25 bp, Homo sapien
gctgccctgatacccgctgccagac

SEQ ID NO: 1629471 - DNA, 25 bp, Homo sapien
tgtccatgttccagtagatagatca

SEQ ID NO: 1629472 - DNA, 25 bp, Homo sapien
cttcactgtccacagttcctgtcca

SEQ ID NO: 1629473 - DNA, 25 bp, Homo sapien
catgttccagtagatagatcagctc

SEQ ID NO: 1629474 - DNA, 25 bp, Homo sapien
ttccagtagatagatcagctctggt

SEQ ID NO: 1629475 - DNA, 25 bp, Homo sapien
agcaaatgttctgccatatgcttgg

SEQ ID NO: 1629476 - DNA, 25 bp, Homo sapien
aaatgttctgccatatgcttggcac

SEQ ID NO: 1629477 - DNA, 25 bp, Homo sapien
cagcaaatgttctgccatatgcttg

SEQ ID NO: 1629478 - DNA, 25 bp, Homo sapien
caaatgttctgccatatgcttggca

SEQ ID NO: 1629479 - DNA, 25 bp, Homo sapien
tgatgagcagcattaaaggggaatc

SEQ ID NO: 1629480 - DNA, 25 bp, Homo sapien
gtgatgagcagcattaaaggggaat

SEQ ID NO: 1629481 - DNA, 25 bp, Homo sapien
tgagcagcattaaaggggaatcagg

SEQ ID NO: 1629482 - DNA, 25 bp, Homo sapien
gatgagcagcattaaaggggaatca

SEQ ID NO: 1629483 - DNA, 25 bp, Homo sapien
tgcttgtagaacctcccattatcca

SEQ ID NO: 1629484 - DNA, 25 bp, Homo sapien
ctttcagctgagactgtgttgctga

SEQ ID NO: 1629485 - DNA, 25 bp, Homo sapien
gtctgtgtcaatcacccgctgcttg

SEQ ID NO: 1629486 - DNA, 25 bp, Homo sapien
gctgagactgtgttgctgaaaaaga

SEQ ID NO: 1629487 - DNA, 25 bp, Homo sapien
tgtgctagacagtgggataaaagtg

SEQ ID NO: 1629488 - DNA, 25 bp, Homo sapien
catttgactcaaccaagctgggcca

SEQ ID NO: 1629489 - DNA, 25 bp, Homo sapien
gcagtctgggataaagatgtcagac

SEQ ID NO: 1629490 - DNA, 25 bp, Homo sapien
caattacctcttgtggcagtctggg

SEQ ID NO: 1629491 - DNA, 25 bp, Homo sapien
ccagtgaaggtcacaaccacgtctt

SEQ ID NO: 1629492 - DNA, 25 bp, Homo sapien
tctccagtgaaggtcacaaccacgt

SEQ ID NO: 1629493 - DNA, 25 bp, Homo sapien
tcctctccagtgaaggtcacaacca

SEQ ID NO: 1629494 - DNA, 25 bp, Homo sapien
tccagtgaaggtcacaaccacgtct

SEQ ID NO: 1629495 - DNA, 25 bp, Homo sapien
aatgagcttcttgtcttctagcctc

SEQ ID NO: 1629496 - DNA, 25 bp, Homo sapien
ataaacagacggcatctgcaaagat

SEQ ID NO: 1629497 - DNA, 25 bp, Homo sapien
tttgtaataaacagacggcatctgc

SEQ ID NO: 1629498 - DNA, 25 bp, Homo sapien
aaagataaatccaatgagcttcttg

SEQ ID NO: 1629499 - DNA, 25 bp, Homo sapien
cagacttccgctggaatgatcccct

SEQ ID NO: 1629500 - DNA, 25 bp, Homo sapien
ttttggtagggccagacttccgctg

SEQ ID NO: 1629501 - DNA, 25 bp, Homo sapien
agtccttcttcaaagacggcaccta

SEQ ID NO: 1629502 - DNA, 25 bp, Homo sapien
caaagacggcacctagagtgatgct

SEQ ID NO: 1629503 - DNA, 25 bp, Homo sapien
gtgaaagacaggacccacgtcacaa

SEQ ID NO: 1629504 - DNA, 25 bp, Homo sapien
agacaggacccacgtcacaagcgta

SEQ ID NO: 1629505 - DNA, 25 bp, Homo sapien
gtcacaagcgtaccctctccagctc

SEQ ID NO: 1629506 - DNA, 25 bp, Homo sapien
aaagacaggacccacgtcacaagcg

SEQ ID NO: 1629507 - DNA, 25 bp, Homo sapien
caccctctcccgggatctccataac

SEQ ID NO: 1629508 - DNA, 25 bp, Homo sapien
tcaccctctcccgggatctccataa

SEQ ID NO: 1629509 - DNA, 25 bp, Homo sapien
ctcaccctctcccgggatctccata

SEQ ID NO: 1629510 - DNA, 25 bp, Homo sapien
tccccgccgtcgtgtaaaatgcaca

SEQ ID NO: 1629511 - DNA, 25 bp, Homo sapien
tgagagtcggcgaggaagccggtcc

SEQ ID NO: 1629512 - DNA, 25 bp, Homo sapien
aaaatgcacacaaggttcgcggcgc

SEQ ID NO: 1629513 - DNA, 25 bp, Homo sapien
tcagtccccgccgtcgtgtaaaatg

SEQ ID NO: 1629514 - DNA, 25 bp, Homo sapien
agggctgtcgccaaggccccaggaa

SEQ ID NO: 1629515 - DNA, 25 bp, Homo sapien
tgcagacgcttgtgggggtgggatc

SEQ ID NO: 1629516 - DNA, 25 bp, Homo sapien
ggacacagggctgtcgccaaggccc

SEQ ID NO: 1629517 - DNA, 25 bp, Homo sapien
gaagggttttgcagacgcttgtggg

SEQ ID NO: 1629518 - DNA, 25 bp, Homo sapien
tctactcggtctcgaaaagtggccc

SEQ ID NO: 1629519 - DNA, 25 bp, Homo sapien
cagtgtagcgttggcaaccacagca

SEQ ID NO: 1629520 - DNA, 25 bp, Homo sapien
cataaaagcgtgtaagtgggtccta

SEQ ID NO: 1629521 - DNA, 25 bp, Homo sapien
gccgcaacctaacggcggacgaaga

SEQ ID NO: 1629522 - DNA, 25 bp, Homo sapien
ctggagcgcactttctgttctcggt

SEQ ID NO: 1629523 - DNA, 25 bp, Homo sapien
caaggctcccaagaaagggattggc

SEQ ID NO: 1629524 - DNA, 25 bp, Homo sapien
ctcaaggctcccaagaaagggattg

SEQ ID NO: 1629525 - DNA, 25 bp, Homo sapien
tcggtgaggcggcttctcaaggctc

SEQ ID NO: 1629526 - DNA, 25 bp, Homo sapien
gaggcaatgacccactctcaaatgt

SEQ ID NO: 1629527 - DNA, 25 bp, Homo sapien
ggaaattatctgaggcaatgaccca

SEQ ID NO: 1629528 - DNA, 25 bp, Homo sapien
aaatgtctctaccaggcaactcacg

SEQ ID NO: 1629529 - DNA, 25 bp, Homo sapien
cctgtgtatccctgcgccagcagtt

SEQ ID NO: 1629530 - DNA, 25 bp, Homo sapien
cctactgccttggccaccctaactg

SEQ ID NO: 1629531 - DNA, 25 bp, Homo sapien
tactgccttggccaccctaactgct

SEQ ID NO: 1629532 - DNA, 25 bp, Homo sapien
ctactgccttggccaccctaactgc

SEQ ID NO: 1629533 - DNA, 25 bp, Homo sapien
catagtcactacactcatgaaaact

SEQ ID NO: 1629534 - DNA, 25 bp, Homo sapien
ctttttccatagtcactacactcat

SEQ ID NO: 1629535 - DNA, 25 bp, Homo sapien
tttccatagtcactacactcatgaa

SEQ ID NO: 1629536 - DNA, 25 bp, Homo sapien
tcatgaaaactttcatcagagtgaa

SEQ ID NO: 1629537 - DNA, 25 bp, Homo sapien
tttggtgttgaaagagatcagagta

SEQ ID NO: 1629538 - DNA, 25 bp, Homo sapien
tgttgaaagagatcagagtagtagc

SEQ ID NO: 1629539 - DNA, 25 bp, Homo sapien
gaaagagatcagagtagtagctgtc

SEQ ID NO: 1629540 - DNA, 25 bp, Homo sapien
tggtgttgaaagagatcagagtagt

SEQ ID NO: 1629541 - DNA, 25 bp, Homo sapien
caactcacatctcttaggagatgca

SEQ ID NO: 1629542 - DNA, 25 bp, Homo sapien
cctttctccaatgtggatttgctga

SEQ ID NO: 1629543 - DNA, 25 bp, Homo sapien
ccaatgtggatttgctgatgctgag

SEQ ID NO: 1629544 - DNA, 25 bp, Homo sapien
tctcttaggagatgcactcataagg

SEQ ID NO: 1629545 - DNA, 25 bp, Homo sapien
agtgtgaactcgatgcatattgaga

SEQ ID NO: 1629546 - DNA, 25 bp, Homo sapien
catattgagagtggaggcctgtcta

SEQ ID NO: 1629547 - DNA, 25 bp, Homo sapien
tgtgaactcgatgcatattgagagt

SEQ ID NO: 1629548 - DNA, 25 bp, Homo sapien
gaggcctgtctaaagaattccccat

SEQ ID NO: 1629549 - DNA, 25 bp, Homo sapien
tgagccctaagggtgtgtccaggcc

SEQ ID NO: 1629550 - DNA, 25 bp, Homo sapien
catgagccctaagggtgtgtccagg

SEQ ID NO: 1629551 - DNA, 25 bp, Homo sapien
aaaaatgcaattgcacctgagttgc

SEQ ID NO: 1629552 - DNA, 25 bp, Homo sapien
gcaattgcacctgagttgctggtgt

SEQ ID NO: 1629553 - DNA, 25 bp, Homo sapien
ccacaccatggccatgttcataggc

SEQ ID NO: 1629554 - DNA, 25 bp, Homo sapien
ttgccgctgctacccaactcctggc

SEQ ID NO: 1629555 - DNA, 25 bp, Homo sapien
accatggccatgttcataggctttc

SEQ ID NO: 1629556 - DNA, 25 bp, Homo sapien
ctgtgaagccccaattgccgctgct

SEQ ID NO: 1629557 - DNA, 25 bp, Homo sapien
gatcctgatcttccccatatgcaat

SEQ ID NO: 1629558 - DNA, 25 bp, Homo sapien
atcctcatggccagtgatttgccga

SEQ ID NO: 1629559 - DNA, 25 bp, Homo sapien
gtgatttgccgaagcaagataacca

SEQ ID NO: 1629560 - DNA, 25 bp, Homo sapien
tcttccccatatgcaatcctcatgg

SEQ ID NO: 1629561 - DNA, 25 bp, Homo sapien
gacactcacatacaatggctgtgag

SEQ ID NO: 1629562 - DNA, 25 bp, Homo sapien
tggcacaaagtcagtactcatgaaa

SEQ ID NO: 1629563 - DNA, 25 bp, Homo sapien
tcatcatcacaagacactcacatac

SEQ ID NO: 1629564 - DNA, 25 bp, Homo sapien
tgcattacggctatttttatcatca

SEQ ID NO: 1629565 - DNA, 25 bp, Homo sapien
caggaactttatgagaggcctctct

SEQ ID NO: 1629566 - DNA, 25 bp, Homo sapien
attttccatcaggtagctcagttcc

SEQ ID NO: 1629567 - DNA, 25 bp, Homo sapien
ctggacaggaactttatgagaggcc

SEQ ID NO: 1629568 - DNA, 25 bp, Homo sapien
cattttccatcaggtagctcagttc

SEQ ID NO: 1629569 - DNA, 25 bp, Homo sapien
catgttccctgcactaataaggtct

SEQ ID NO: 1629570 - DNA, 25 bp, Homo sapien
ttttgctgcattaataagacctttc

SEQ ID NO: 1629571 - DNA, 25 bp, Homo sapien
tgaggaacaagtccatatttgcagc

SEQ ID NO: 1629572 - DNA, 25 bp, Homo sapien
gatatttctgtgtacatggacagag

SEQ ID NO: 1629573 - DNA, 25 bp, Homo sapien
caagaaatctgcagcccttcacgaa

SEQ ID NO: 1629574 - DNA, 25 bp, Homo sapien
tcctgttgtaagtggcctggtgctg

SEQ ID NO: 1629575 - DNA, 25 bp, Homo sapien
cttatttggcacaagaaatctgcag

SEQ ID NO: 1629576 - DNA, 25 bp, Homo sapien
ctgagtcaaccaggaagtaccttcc

SEQ ID NO: 1629577 - DNA, 25 bp, Homo sapien
tggctgagaagatgcttcctcatct

SEQ ID NO: 1629578 - DNA, 25 bp, Homo sapien
cctcagggggctctgacctgtgaca

SEQ ID NO: 1629579 - DNA, 25 bp, Homo sapien
tcttttacagaaaatcttggctgag

SEQ ID NO: 1629580 - DNA, 25 bp, Homo sapien
catatcacaggggtgggctttctga

SEQ ID NO: 1629581 - DNA, 25 bp, Homo sapien
tgtccccactaagaagcacccatag

SEQ ID NO: 1629582 - DNA, 25 bp, Homo sapien
ctgccacttaatagggccaggaccc

SEQ ID NO: 1629583 - DNA, 25 bp, Homo sapien
aggacccctctgagccgcatgtccc

SEQ ID NO: 1629584 - DNA, 25 bp, Homo sapien
gctcccagctgagaatagtacctgg

SEQ ID NO: 1629585 - DNA, 25 bp, Homo sapien
tttcggaacatcatcaaggagactc

SEQ ID NO: 1629586 - DNA, 25 bp, Homo sapien
tccaggagaagtgcatggccacttc

SEQ ID NO: 1629587 - DNA, 25 bp, Homo sapien
catcacactgcagtataggagtttc

SEQ ID NO: 1629588 - DNA, 25 bp, Homo sapien
ggagaagtgcatggccacttcctca

SEQ ID NO: 1629589 - DNA, 25 bp, Homo sapien
cataagcacttttgtggccacagga

SEQ ID NO: 1629590 - DNA, 25 bp, Homo sapien
gatccataagcacttttgtggccac

SEQ ID NO: 1629591 - DNA, 25 bp, Homo sapien
ctgtgtatgatccataagcactttt

SEQ ID NO: 1629592 - DNA, 25 bp, Homo sapien
tatgatccataagcacttttgtggc

SEQ ID NO: 1629593 - DNA, 25 bp, Homo sapien
aagcaggcaactatgggaggactcc

SEQ ID NO: 1629594 - DNA, 25 bp, Homo sapien
tgcccagtggtggaaacaggtgacc

SEQ ID NO: 1629595 - DNA, 25 bp, Homo sapien
tatggcggccaagctggtacaagga

SEQ ID NO: 1629596 - DNA, 25 bp, Homo sapien
catcagaaagtgaaaccgtgcccca

SEQ ID NO: 1629597 - DNA, 25 bp, Homo sapien
ttgaagccaccgtgatgcgagcctg

SEQ ID NO: 1629598 - DNA, 25 bp, Homo sapien
ccaagggacgcaccaccaacttgaa

SEQ ID NO: 1629599 - DNA, 25 bp, Homo sapien
ctagactgaagtgacctgaacaggt

SEQ ID NO: 1629600 - DNA, 25 bp, Homo sapien
gaaacggcttcatcacccatgagct

SEQ ID NO: 1629601 - DNA, 25 bp, Homo sapien
gagaaaaaagcctccagatagggcc

SEQ ID NO: 1629602 - DNA, 25 bp, Homo sapien
cagatagggccacaatagggaagac

SEQ ID NO: 1629603 - DNA, 25 bp, Homo sapien
ttctgtatgccccttcagggagaag

SEQ ID NO: 1629604 - DNA, 25 bp, Homo sapien
cagttagagtcagttctgtgaattt

SEQ ID NO: 1629605 - DNA, 25 bp, Homo sapien
tatatgaccatggagtttggaagac

SEQ ID NO: 1629606 - DNA, 25 bp, Homo sapien
gcatggcgtctactatttctactaa

SEQ ID NO: 1629607 - DNA, 25 bp, Homo sapien
ggagacacaattcatttcatagcat

SEQ ID NO: 1629608 - DNA, 25 bp, Homo sapien
ggtgtacttgcagccacaaccttgg

SEQ ID NO: 1629609 - DNA, 25 bp, Homo sapien
gttgatactgatgtaactaccactg

SEQ ID NO: 1629610 - DNA, 25 bp, Homo sapien
ccactgaaggcaatacagagtatta

SEQ ID NO: 1629611 - DNA, 25 bp, Homo sapien
cactcagggtgttccatgtatccat

SEQ ID NO: 1629612 - DNA, 25 bp, Homo sapien
gcttatatgtggctgttactgacct

SEQ ID NO: 1629613 - DNA, 25 bp, Homo sapien
gattaggtagctaggaagcatctcc

SEQ ID NO: 1629614 - DNA, 25 bp, Homo sapien
tgtggaatgcagtcaaaacagtgcc

SEQ ID NO: 1629615 - DNA, 25 bp, Homo sapien
cagggaggcatcacaaatatcagga

SEQ ID NO: 1629616 - DNA, 25 bp, Homo sapien
gagtggatcctgcacccaactgatg

SEQ ID NO: 1629617 - DNA, 25 bp, Homo sapien
cataatgccatcagattttgcgtac

SEQ ID NO: 1629618 - DNA, 25 bp, Homo sapien
gcccagacacccaatgggagcataa

SEQ ID NO: 1629619 - DNA, 25 bp, Homo sapien
tcaatacaagctctaaactgagcct

SEQ ID NO: 1629620 - DNA, 25 bp, Homo sapien
gtgttacctccatatccatctttga

SEQ ID NO: 1629621 - DNA, 25 bp, Homo sapien
actggatgctcagcatcaggcacag

SEQ ID NO: 1629622 - DNA, 25 bp, Homo sapien
tcactggatgctcagcatcaggcac

SEQ ID NO: 1629623 - DNA, 25 bp, Homo sapien
atgctcagcatcaggcacagttcac

SEQ ID NO: 1629624 - DNA, 25 bp, Homo sapien
ggatgctcagcatcaggcacagttc

SEQ ID NO: 1629625 - DNA, 25 bp, Homo sapien
ctaggaccagtgtgtctgccccaga

SEQ ID NO: 1629626 - DNA, 25 bp, Homo sapien
cttctttggataatgacagctctag

SEQ ID NO: 1629627 - DNA, 25 bp, Homo sapien
ttttgctaacccctctctcgaccca

SEQ ID NO: 1629628 - DNA, 25 bp, Homo sapien
tttccattcatggactctggggctt

SEQ ID NO: 1629629 - DNA, 25 bp, Homo sapien
ttatgttggggaggcttacacatga

SEQ ID NO: 1629630 - DNA, 25 bp, Homo sapien
catgcagcaccttagtttatgttgg

SEQ ID NO: 1629631 - DNA, 25 bp, Homo sapien
atgcagcaccttagtttatgttggg

SEQ ID NO: 1629632 - DNA, 25 bp, Homo sapien
tacacatgagcaccggggttcctgc

SEQ ID NO: 1629633 - DNA, 25 bp, Homo sapien
caagcacctatgttgcagtagcagg

SEQ ID NO: 1629634 - DNA, 25 bp, Homo sapien
gagcaccctgttgcacctttccaag

SEQ ID NO: 1629635 - DNA, 25 bp, Homo sapien
tatgtttccaccacaagcagagcac

SEQ ID NO: 1629636 - DNA, 25 bp, Homo sapien
ggcctttatgtttccaccacaagca

SEQ ID NO: 1629637 - DNA, 25 bp, Homo sapien
tcttcttgtgtctggtcagagcgct

SEQ ID NO: 1629638 - DNA, 25 bp, Homo sapien
ggcctgggcaaacctgttactgctg

SEQ ID NO: 1629639 - DNA, 25 bp, Homo sapien
aacgcctttggaccactcagcttga

SEQ ID NO: 1629640 - DNA, 25 bp, Homo sapien
gttcatgacttctgtcaaacgcctt

SEQ ID NO: 1629641 - DNA, 25 bp, Homo sapien
aatacaatcagagcatgtgagggcc

SEQ ID NO: 1629642 - DNA, 25 bp, Homo sapien
tgcaatgcctgcaatgggaggagat

SEQ ID NO: 1629643 - DNA, 25 bp, Homo sapien
ccagagtataggcagtgcaatgcct

SEQ ID NO: 1629644 - DNA, 25 bp, Homo sapien
gtttatgaatacaatcagagcatgt

SEQ ID NO: 1629645 - DNA, 25 bp, Homo sapien
caaggacttgggttcagatgagcca

SEQ ID NO: 1629646 - DNA, 25 bp, Homo sapien
tgtccatgaatagtcagagagcctg

SEQ ID NO: 1629647 - DNA, 25 bp, Homo sapien
tgcttactcgcgaatacagccagag

SEQ ID NO: 1629648 - DNA, 25 bp, Homo sapien
tggtgcaatggcaggacacagtccc

SEQ ID NO: 1629649 - DNA, 25 bp, Homo sapien
attggcttggcaatcaggcttttgg

SEQ ID NO: 1629650 - DNA, 25 bp, Homo sapien
tggatgattggcttggcaatcaggc

SEQ ID NO: 1629651 - DNA, 25 bp, Homo sapien
gatgattggcttggcaatcaggctt

SEQ ID NO: 1629652 - DNA, 25 bp, Homo sapien
ctatggatgattggcttggcaatca

SEQ ID NO: 1629653 - DNA, 25 bp, Homo sapien
caggagaggccgcagtggaagaaaa

SEQ ID NO: 1629654 - DNA, 25 bp, Homo sapien
gtctcaggagaggccgcagtggaag

SEQ ID NO: 1629655 - DNA, 25 bp, Homo sapien
gagaggccgcagtggaagaaaatcc

SEQ ID NO: 1629656 - DNA, 25 bp, Homo sapien
ctcaggagaggccgcagtggaagaa

SEQ ID NO: 1629657 - DNA, 25 bp, Homo sapien
tcatcaaggtatactcggtcactgg

SEQ ID NO: 1629658 - DNA, 25 bp, Homo sapien
tggcctcatcaaggtatactcggtc

SEQ ID NO: 1629659 - DNA, 25 bp, Homo sapien
actgggcgtgtgaaaaaagatggcc

SEQ ID NO: 1629660 - DNA, 25 bp, Homo sapien
tactcggtcactgggcgtgtgaaaa

SEQ ID NO: 1629661 - DNA, 25 bp, Homo sapien
tgtccataaggagagctccaccttc

SEQ ID NO: 1629662 - DNA, 25 bp, Homo sapien
gttcctggccatcctcccagaaaag

SEQ ID NO: 1629663 - DNA, 25 bp, Homo sapien
cggaggtgcacacaaaggcgcagat

SEQ ID NO: 1629664 - DNA, 25 bp, Homo sapien
ccagaagcagctgcgaagccagcct

SEQ ID NO: 1629665 - DNA, 25 bp, Homo sapien
ttctataaggccagtattactctaa

SEQ ID NO: 1629666 - DNA, 25 bp, Homo sapien
attctataaggccagtattactcta

SEQ ID NO: 1629667 - DNA, 25 bp, Homo sapien
gggcaacttttcgtaactcattcta

SEQ ID NO: 1629668 - DNA, 25 bp, Homo sapien
aacttttcgtaactcattctataag

SEQ ID NO: 1629669 - DNA, 25 bp, Homo sapien
acatcttatgtcctcgttcctggga

SEQ ID NO: 1629670 - DNA, 25 bp, Homo sapien
gcctgattgtgccatgctgacaagt

SEQ ID NO: 1629671 - DNA, 25 bp, Homo sapien
tgattgtgccatgctgacaagtgtt

SEQ ID NO: 1629672 - DNA, 25 bp, Homo sapien
ttttggctgcacatcctacttagaa

SEQ ID NO: 1629673 - DNA, 25 bp, Homo sapien
tccagggcgggcacatagaatgtcc

SEQ ID NO: 1629674 - DNA, 25 bp, Homo sapien
ataggttcaggcctttccagggcgg

SEQ ID NO: 1629675 - DNA, 25 bp, Homo sapien
tataaaggttcttgcaggcggtgtc

SEQ ID NO: 1629676 - DNA, 25 bp, Homo sapien
gaatgtcctcgcctccaaggtttgg

SEQ ID NO: 1629677 - DNA, 25 bp, Homo sapien
tctactccgcgtaggggaggctctg

SEQ ID NO: 1629678 - DNA, 25 bp, Homo sapien
gctgctcctctactccgcgtagggg

SEQ ID NO: 1629679 - DNA, 25 bp, Homo sapien
gctctgcctccggtgaccccgaggg

SEQ ID NO: 1629680 - DNA, 25 bp, Homo sapien
ggaggctctgcctccggtgaccccg

SEQ ID NO: 1629681 - DNA, 25 bp, Homo sapien
cccaaccgtcgaacagagcgcgtgg

SEQ ID NO: 1629682 - DNA, 25 bp, Homo sapien
aacagagcgcgtgggaccatctggt

SEQ ID NO: 1629683 - DNA, 25 bp, Homo sapien
ctgaggacgctgcacacccgttcac

SEQ ID NO: 1629684 - DNA, 25 bp, Homo sapien
gttcaccggctgacccagtgctgct

SEQ ID NO: 1629685 - DNA, 25 bp, Homo sapien
gtgtctactaatgaggcaggagcca

SEQ ID NO: 1629686 - DNA, 25 bp, Homo sapien
ccagggccccatggaatctttcatt

SEQ ID NO: 1629687 - DNA, 25 bp, Homo sapien
gtagggcttctcgtttcatgatcaa

SEQ ID NO: 1629688 - DNA, 25 bp, Homo sapien
ggagccaggatccacatgatgaaag

SEQ ID NO: 1629689 - DNA, 25 bp, Homo sapien
tccagtagcagagtgcagataagac

SEQ ID NO: 1629690 - DNA, 25 bp, Homo sapien
cagataagactggacgggacagccc

SEQ ID NO: 1629691 - DNA, 25 bp, Homo sapien
gaggcttcctttcaggagtccagga

SEQ ID NO: 1629692 - DNA, 25 bp, Homo sapien
caaagaggtctgtataagctggcga

SEQ ID NO: 1629693 - DNA, 25 bp, Homo sapien
tgaccacaagatgacaccgttgatc

SEQ ID NO: 1629694 - DNA, 25 bp, Homo sapien
gatgacaccgttgatcttccagaca

SEQ ID NO: 1629695 - DNA, 25 bp, Homo sapien
ctggaaggaagtgaccacaagatga

SEQ ID NO: 1629696 - DNA, 25 bp, Homo sapien
gacaccgttgatcttccagacactc

SEQ ID NO: 1629697 - DNA, 25 bp, Homo sapien
tctcgagcttcgggattccgcctac

SEQ ID NO: 1629698 - DNA, 25 bp, Homo sapien
gcaaagggcgaggtccaacggccca

SEQ ID NO: 1629699 - DNA, 25 bp, Homo sapien
cctgttacgcaattgagccgccgtt

SEQ ID NO: 1629700 - DNA, 25 bp, Homo sapien
ctcgaagaaacgcagcagagggcaa

SEQ ID NO: 1629701 - DNA, 25 bp, Homo sapien
tctgcaagcagtccaggtgtatcct

SEQ ID NO: 1629702 - DNA, 25 bp, Homo sapien
agaccggcccctgcgcgatatgagc

SEQ ID NO: 1629703 - DNA, 25 bp, Homo sapien
aagcctggcccggaccgtagcttct

SEQ ID NO: 1629704 - DNA, 25 bp, Homo sapien
tatgagcaccgctcaggactgcagc

SEQ ID NO: 1629705 - DNA, 25 bp, Homo sapien
ggaagtgccaggtgtgggagaggga

SEQ ID NO: 1629706 - DNA, 25 bp, Homo sapien
ctggaagtgccaggtgtgggagagg

SEQ ID NO: 1629707 - DNA, 25 bp, Homo sapien
gaagtgccaggtgtgggagagggag

SEQ ID NO: 1629708 - DNA, 25 bp, Homo sapien
tggaagtgccaggtgtgggagaggg

SEQ ID NO: 1629709 - DNA, 25 bp, Homo sapien
gctgccctagaccagctttctggat

SEQ ID NO: 1629710 - DNA, 25 bp, Homo sapien
taattcttcactccaccagctgata

SEQ ID NO: 1629711 - DNA, 25 bp, Homo sapien
tagtatacggcagtttacagaaaaa

SEQ ID NO: 1629712 - DNA, 25 bp, Homo sapien
tctggattctggctgaaacggacaa

SEQ ID NO: 1629713 - DNA, 25 bp, Homo sapien
taatttgtccgttatctggcccctg

SEQ ID NO: 1629714 - DNA, 25 bp, Homo sapien
aatttgtccgttatctggcccctgc

SEQ ID NO: 1629715 - DNA, 25 bp, Homo sapien
tttgtacacagcctcggtgaaccag

SEQ ID NO: 1629716 - DNA, 25 bp, Homo sapien
cccatgttcaccttcgagtggagaa

SEQ ID NO: 1629717 - DNA, 25 bp, Homo sapien
gctgagaccacaaacaggtactttg

SEQ ID NO: 1629718 - DNA, 25 bp, Homo sapien
tcaggccgcatcagcaggcagttgg

SEQ ID NO: 1629719 - DNA, 25 bp, Homo sapien
tccccacagtggactttctcaaact

SEQ ID NO: 1629720 - DNA, 25 bp, Homo sapien
gggtattgacctctgatgaaccgcc

SEQ ID NO: 1629721 - DNA, 25 bp, Homo sapien
tgcaaacccgtgcctttcaacataa

SEQ ID NO: 1629722 - DNA, 25 bp, Homo sapien
tgatgaaccgccatgcaaacccgtg

SEQ ID NO: 1629723 - DNA, 25 bp, Homo sapien
acactgagcttgctgggttgcataa

SEQ ID NO: 1629724 - DNA, 25 bp, Homo sapien
tctcaggggtgatataaaccgaggg

SEQ ID NO: 1629725 - DNA, 25 bp, Homo sapien
ctgggttgcataaggcctctcaggg

SEQ ID NO: 1629726 - DNA, 25 bp, Homo sapien
gtaaaggtgaccgtgttgctcccag

SEQ ID NO: 1629727 - DNA, 25 bp, Homo sapien
gtggagagcaccaattgtcagcaca

SEQ ID NO: 1629728 - DNA, 25 bp, Homo sapien
tcactgcctgcatcagaagatgcag

SEQ ID NO: 1629729 - DNA, 25 bp, Homo sapien
gagcaccaattgtcagcacaaccat

SEQ ID NO: 1629730 - DNA, 25 bp, Homo sapien
gaagatgcagggtggagagcaccaa

SEQ ID NO: 1629731 - DNA, 25 bp, Homo sapien
tcctacccaaatactgcgcctttcc

SEQ ID NO: 1629732 - DNA, 25 bp, Homo sapien
tcactcctacccaaatactgcgcct

SEQ ID NO: 1629733 - DNA, 25 bp, Homo sapien
gtgggagcgagcaccatgcgcgagc

SEQ ID NO: 1629734 - DNA, 25 bp, Homo sapien
ctacccaaatactgcgcctttccga

SEQ ID NO: 1629735 - DNA, 25 bp, Homo sapien
aaaaccaagacccaatgatatgctg

SEQ ID NO: 1629736 - DNA, 25 bp, Homo sapien
attaaactctccaataaacatgtgg

SEQ ID NO: 1629737 - DNA, 25 bp, Homo sapien
acacaaaaaaggcagtagtggagga

SEQ ID NO: 1629738 - DNA, 25 bp, Homo sapien
aatggttgaagttctaccttatcag

SEQ ID NO: 1629739 - DNA, 25 bp, Homo sapien
gtggccacagaaaaggtgcacccag

SEQ ID NO: 1629740 - DNA, 25 bp, Homo sapien
ccgggtggccacagaaaaggtgcac

SEQ ID NO: 1629741 - DNA, 25 bp, Homo sapien
gatagtcgcctgtcccgggtggcca

SEQ ID NO: 1629742 - DNA, 25 bp, Homo sapien
gagatgcttgggatagtcgcctgtc

SEQ ID NO: 1629743 - DNA, 25 bp, Homo sapien
tctctgtcgcatgtcccgtgtgtca

SEQ ID NO: 1629744 - DNA, 25 bp, Homo sapien
acctggtttgccatggaggtagcag

SEQ ID NO: 1629745 - DNA, 25 bp, Homo sapien
tgcatcaagctgaacagtacctggt

SEQ ID NO: 1629746 - DNA, 25 bp, Homo sapien
catgcattttgctggcaatatgccc

SEQ ID NO: 1629747 - DNA, 25 bp, Homo sapien
tcacatctgccagttgtagtctctg

SEQ ID NO: 1629748 - DNA, 25 bp, Homo sapien
atactctgtcaatgagaaattctcc

SEQ ID NO: 1629749 - DNA, 25 bp, Homo sapien
ctgccagttgtagtctctgtaaaca

SEQ ID NO: 1629750 - DNA, 25 bp, Homo sapien
caatgagaaattctccactcacatc

SEQ ID NO: 1629751 - DNA, 25 bp, Homo sapien
gcagaagaccttagcttggagaacc

SEQ ID NO: 1629752 - DNA, 25 bp, Homo sapien
tgcagaagaccttagcttggagaac

SEQ ID NO: 1629753 - DNA, 25 bp, Homo sapien
cctttgccattggtcaccttttcct

SEQ ID NO: 1629754 - DNA, 25 bp, Homo sapien
tcctttgccattggtcaccttttcc

SEQ ID NO: 1629755 - DNA, 25 bp, Homo sapien
gaggccacagatcctttgccattgg

SEQ ID NO: 1629756 - DNA, 25 bp, Homo sapien
aattagcagtcactgacttggctgg

SEQ ID NO: 1629757 - DNA, 25 bp, Homo sapien
gttaggccactcatactctctgacc

SEQ ID NO: 1629758 - DNA, 25 bp, Homo sapien
gctggcctgttaggccactcatact

SEQ ID NO: 1629759 - DNA, 25 bp, Homo sapien
gacttggctggcctgttaggccact

SEQ ID NO: 1629760 - DNA, 25 bp, Homo sapien
ggcccacctaccactgattctgcag

SEQ ID NO: 1629761 - DNA, 25 bp, Homo sapien
gacttggtgtctccgcctgactttg

SEQ ID NO: 1629762 - DNA, 25 bp, Homo sapien
tgcctctaaggaaatcaacatgggt

SEQ ID NO: 1629763 - DNA, 25 bp, Homo sapien
tacaacccgtcttcagacttggtgt

SEQ ID NO: 1629764 - DNA, 25 bp, Homo sapien
agcacaggtgatacactgggcggag

SEQ ID NO: 1629765 - DNA, 25 bp, Homo sapien
gacctggggtacacagtctggagca

SEQ ID NO: 1629766 - DNA, 25 bp, Homo sapien
tgtgattggagatgctactggcaga

SEQ ID NO: 1629767 - DNA, 25 bp, Homo sapien
aggtgatacactgggcggaggcagc

SEQ ID NO: 1629768 - DNA, 25 bp, Homo sapien
ggctccacctcttctagttatgtca

SEQ ID NO: 1629769 - DNA, 25 bp, Homo sapien
tgagactggtcagaagtcaacacac

SEQ ID NO: 1629770 - DNA, 25 bp, Homo sapien
ggaccttgctccattaggaagaggc

SEQ ID NO: 1629771 - DNA, 25 bp, Homo sapien
cctaaagaaagctggcagcccaacc

SEQ ID NO: 1629772 - DNA, 25 bp, Homo sapien
ttatccaaatctagctggctgtgga

SEQ ID NO: 1629773 - DNA, 25 bp, Homo sapien
ttttatccaaatctagctggctgtg

SEQ ID NO: 1629774 - DNA, 25 bp, Homo sapien
aatctttcctaagataattcaaggt

SEQ ID NO: 1629775 - DNA, 25 bp, Homo sapien
acaatctttcctaagataattcaag

SEQ ID NO: 1629776 - DNA, 25 bp, Homo sapien
ggctcatgcctgtaatcccagcgct

SEQ ID NO: 1629777 - DNA, 25 bp, Homo sapien
tgcaatggcaatggccaggcatggt

SEQ ID NO: 1629778 - DNA, 25 bp, Homo sapien
aatcccagcgctttgggaggccaag

SEQ ID NO: 1629779 - DNA, 25 bp, Homo sapien
ggagggaacagcctttacatgataa

SEQ ID NO: 1629780 - DNA, 25 bp, Homo sapien
gttaatagcacactgagcactttcc

SEQ ID NO: 1629781 - DNA, 25 bp, Homo sapien
tctcagtatagaaagaattggaggg

SEQ ID NO: 1629782 - DNA, 25 bp, Homo sapien
tattgtctccacttgtattaaacat

SEQ ID NO: 1629783 - DNA, 25 bp, Homo sapien
tagctgcaaagctcagtaagaaaag

SEQ ID NO: 1629784 - DNA, 25 bp, Homo sapien
gccacacacaactgtgtaggtagct

SEQ ID NO: 1629785 - DNA, 25 bp, Homo sapien
tgtcatctcatgtccttgcacccag

SEQ ID NO: 1629786 - DNA, 25 bp, Homo sapien
acaactgtgtaggtagctgcaaagc

SEQ ID NO: 1629787 - DNA, 25 bp, Homo sapien
ctgatgtgccatctcctacgcttgc

SEQ ID NO: 1629788 - DNA, 25 bp, Homo sapien
caccaaagccaatcctcttgggttc

SEQ ID NO: 1629789 - DNA, 25 bp, Homo sapien
cccagcgtatgaggcaggaccttct

SEQ ID NO: 1629790 - DNA, 25 bp, Homo sapien
tcttgggttcttattgaagcattcc

SEQ ID NO: 1629791 - DNA, 25 bp, Homo sapien
cactcgccattagttctgccatgag

SEQ ID NO: 1629792 - DNA, 25 bp, Homo sapien
tgtaacaagagctacgagagttaag

SEQ ID NO: 1629793 - DNA, 25 bp, Homo sapien
tttcacaggaagattacagtcatgc

SEQ ID NO: 1629794 - DNA, 25 bp, Homo sapien
gagctacgagagttaagagccagga

SEQ ID NO: 1629795 - DNA, 25 bp, Homo sapien
ttcacaggaagattacagtcatgcc

SEQ ID NO: 1629796 - DNA, 25 bp, Homo sapien
taagtcagactaactttgggagaca

SEQ ID NO: 1629797 - DNA, 25 bp, Homo sapien
gctaccaggttaggaaaatcagagg

SEQ ID NO: 1629798 - DNA, 25 bp, Homo sapien
gggcataagtcagactaactttggg

SEQ ID NO: 1629799 - DNA, 25 bp, Homo sapien
tactaaaatgtaggtgcagttaaac

SEQ ID NO: 1629800 - DNA, 25 bp, Homo sapien
cacaagataatacaactgcggccac

SEQ ID NO: 1629801 - DNA, 25 bp, Homo sapien
gacgtatcttttccaggcatcacag

SEQ ID NO: 1629802 - DNA, 25 bp, Homo sapien
cggatgacctctcttgacaaatgca

SEQ ID NO: 1629803 - DNA, 25 bp, Homo sapien
tagaaatgcatctgcaacagggcgg

SEQ ID NO: 1629804 - DNA, 25 bp, Homo sapien
caaatgcttttgatgcgaggctact

SEQ ID NO: 1629805 - DNA, 25 bp, Homo sapien
tgaacttacagaggcaaagcgactg

SEQ ID NO: 1629806 - DNA, 25 bp, Homo sapien
tccgcaggcggcttatgttagtcaa

SEQ ID NO: 1629807 - DNA, 25 bp, Homo sapien
cagaagtgatcagtgaccacagcca

SEQ ID NO: 1629808 - DNA, 25 bp, Homo sapien
ctgctccgcagcaccggctctcctt

SEQ ID NO: 1629809 - DNA, 25 bp, Homo sapien
tcgggctgctccgcagcaccggctc

SEQ ID NO: 1629810 - DNA, 25 bp, Homo sapien
gggctgctccgcagcaccggctctc

SEQ ID NO: 1629811 - DNA, 25 bp, Homo sapien
ccgcagcaccggctctccttggact

SEQ ID NO: 1629812 - DNA, 25 bp, Homo sapien
tacaggcagctaatacagagaggtg

SEQ ID NO: 1629813 - DNA, 25 bp, Homo sapien
gaagaatgccataaaggctacaggc

SEQ ID NO: 1629814 - DNA, 25 bp, Homo sapien
tatctcctaaacgtatgatgggaca

SEQ ID NO: 1629815 - DNA, 25 bp, Homo sapien
tgtagcgaaaagcaaacagtacgga

SEQ ID NO: 1629816 - DNA, 25 bp, Homo sapien
ttctgcaaacgaacacagcaccggg

SEQ ID NO: 1629817 - DNA, 25 bp, Homo sapien
tacttcgggcctcaggtgtcagacg

SEQ ID NO: 1629818 - DNA, 25 bp, Homo sapien
gaacccggactgagacatgcgtgag

SEQ ID NO: 1629819 - DNA, 25 bp, Homo sapien
taatgccctgggttggccctctaag

SEQ ID NO: 1629820 - DNA, 25 bp, Homo sapien
cagtattgatgtccaggaacttccc

SEQ ID NO: 1629821 - DNA, 25 bp, Homo sapien
ggattttaatgtaagcgccacaaga

SEQ ID NO: 1629822 - DNA, 25 bp, Homo sapien
cagaagatttttaggcgatgatgcc

SEQ ID NO: 1629823 - DNA, 25 bp, Homo sapien
aacatggataggataagaaagctcc

SEQ ID NO: 1629824 - DNA, 25 bp, Homo sapien
tacaatcggctgtaaagaaatgccc

SEQ ID NO: 1629825 - DNA, 25 bp, Homo sapien
gaaatgcccacctctgaaaactgtc

SEQ ID NO: 1629826 - DNA, 25 bp, Homo sapien
taagtagacagaaaccacgtgaatg

SEQ ID NO: 1629827 - DNA, 25 bp, Homo sapien
gattgcatgttggtgagaaacccta

SEQ ID NO: 1629828 - DNA, 25 bp, Homo sapien
gaagacacaaaccactaaagttcac

SEQ ID NO: 1629829 - DNA, 25 bp, Homo sapien
aaacctctagccaaggattatcaag

SEQ ID NO: 1629830 - DNA, 25 bp, Homo sapien
gccttaagaacaatacaactgataa

SEQ ID NO: 1629831 - DNA, 25 bp, Homo sapien
cccagattgggaatgagagacatga

SEQ ID NO: 1629832 - DNA, 25 bp, Homo sapien
tatgctcaaaatcatgaagccttag

SEQ ID NO: 1629833 - DNA, 25 bp, Homo sapien
ccatagaagttatatgggtggcaaa

SEQ ID NO: 1629834 - DNA, 25 bp, Homo sapien
tctctagtttcccattgtgaacagc

SEQ ID NO: 1629835 - DNA, 25 bp, Homo sapien
gaccaggtagacttaagaaagcaga

SEQ ID NO: 1629836 - DNA, 25 bp, Homo sapien
tgagggaatgcgttaccaagagaac

SEQ ID NO: 1629837 - DNA, 25 bp, Homo sapien
tcagaaaccttagagggcagaagac

SEQ ID NO: 1629838 - DNA, 25 bp, Homo sapien
gaattcaaagagactcacgctgagg

SEQ ID NO: 1629839 - DNA, 25 bp, Homo sapien
caaaactatccaccaaaactgaggg

SEQ ID NO: 1629840 - DNA, 25 bp, Homo sapien
acaatagaatacacttgcacatggg

SEQ ID NO: 1629841 - DNA, 25 bp, Homo sapien
cttccctgatcacaagaggttagga

SEQ ID NO: 1629842 - DNA, 25 bp, Homo sapien
gagcacttgaacaatacaataagcc

SEQ ID NO: 1629843 - DNA, 25 bp, Homo sapien
caggccataaattaagggtcaatag

SEQ ID NO: 1629844 - DNA, 25 bp, Homo sapien
tttctgatcccaggtgatattatat

SEQ ID NO: 1629845 - DNA, 25 bp, Homo sapien
tctgatcccaggtgatattatatgt

SEQ ID NO: 1629846 - DNA, 25 bp, Homo sapien
attcagcaaactagcaggataaaaa

SEQ ID NO: 1629847 - DNA, 25 bp, Homo sapien
gatcccaggtgatattatatgtaga

SEQ ID NO: 1629848 - DNA, 25 bp, Homo sapien
cagaacatggaagactaaaggcggc

SEQ ID NO: 1629849 - DNA, 25 bp, Homo sapien
tgtacaaattatggtcccagctggg

SEQ ID NO: 1629850 - DNA, 25 bp, Homo sapien
cacagcacggagatggtaatccaca

SEQ ID NO: 1629851 - DNA, 25 bp, Homo sapien
catacagggcgggaatgacatcttc

SEQ ID NO: 1629852 - DNA, 25 bp, Homo sapien
gcctgtctggtttgtgaactttcag

SEQ ID NO: 1629853 - DNA, 25 bp, Homo sapien
caacttgtagttgacagcgccctga

SEQ ID NO: 1629854 - DNA, 25 bp, Homo sapien
tgaacagggaaggagcacattctcc

SEQ ID NO: 1629855 - DNA, 25 bp, Homo sapien
tcagattggacctctgcctgaaggt

SEQ ID NO: 1629856 - DNA, 25 bp, Homo sapien
agtgtgaagtctccgatggctattg

SEQ ID NO: 1629857 - DNA, 25 bp, Homo sapien
catgggcacttctgcccgtatgaac

SEQ ID NO: 1629858 - DNA, 25 bp, Homo sapien
ccgctcgccggtgtgaagtctccgg

SEQ ID NO: 1629859 - DNA, 25 bp, Homo sapien
cactgcactggtaaggccgttcacc

SEQ ID NO: 1629860 - DNA, 25 bp, Homo sapien
tgtgaaaatccaccacaccttcggt

SEQ ID NO: 1629861 - DNA, 25 bp, Homo sapien
gtctttcaaacgtaggccacatatg

SEQ ID NO: 1629862 - DNA, 25 bp, Homo sapien
gatttgttattgaaggcatccccag

SEQ ID NO: 1629863 - DNA, 25 bp, Homo sapien
cagcggcgtaagtgaagaagattcc

SEQ ID NO: 1629864 - DNA, 25 bp, Homo sapien
tcagaaggtaagtccttgccctctg

SEQ ID NO: 1629865 - DNA, 25 bp, Homo sapien
gggcacagagttgcctcgggactcc

SEQ ID NO: 1629866 - DNA, 25 bp, Homo sapien
agaaacgttatgctcagaaggtaag

SEQ ID NO: 1629867 - DNA, 25 bp, Homo sapien
tatgctcagaaggtaagtccttgcc

SEQ ID NO: 1629868 - DNA, 25 bp, Homo sapien
agagccaggcctgccataagcccct

SEQ ID NO: 1629869 - DNA, 25 bp, Homo sapien
caactgggaaacgatgtgggacctg

SEQ ID NO: 1629870 - DNA, 25 bp, Homo sapien
actgggaaacgatgtgggacctgaa

SEQ ID NO: 1629871 - DNA, 25 bp, Homo sapien
tccaactgggaaacgatgtgggacc

SEQ ID NO: 1629872 - DNA, 25 bp, Homo sapien
tctccaactgggaaacgatgtggga

SEQ ID NO: 1629873 - DNA, 25 bp, Homo sapien
cattgggtggtcacggcaagcagta

SEQ ID NO: 1629874 - DNA, 25 bp, Homo sapien
ggtagtcacacagctaaccgcaaga

SEQ ID NO: 1629875 - DNA, 25 bp, Homo sapien
caggaagctccgtatgacacaggga

SEQ ID NO: 1629876 - DNA, 25 bp, Homo sapien
taatcacccaggagggaatggccga

SEQ ID NO: 1629877 - DNA, 25 bp, Homo sapien
gaaagagctgtttcttgggcaaagg

SEQ ID NO: 1629878 - DNA, 25 bp, Homo sapien
aggcagagaggagctcgggacaccg

SEQ ID NO: 1629879 - DNA, 25 bp, Homo sapien
gcagagaggagctcgggacaccggg

SEQ ID NO: 1629880 - DNA, 25 bp, Homo sapien
aaggaaagagctgtttcttgggcaa

SEQ ID NO: 1629881 - DNA, 25 bp, Homo sapien
tgagcctcatcgaggagcacccact

SEQ ID NO: 1629882 - DNA, 25 bp, Homo sapien
cgaggctataagtgcaaagttttcc

SEQ ID NO: 1629883 - DNA, 25 bp, Homo sapien
tcctgggagaagtaaatggtcacgt

SEQ ID NO: 1629884 - DNA, 25 bp, Homo sapien
aagtaaatggtcacgtcctcaaagg

SEQ ID NO: 1629885 - DNA, 25 bp, Homo sapien
gtcacggctggtgcaaaggcgcgga

SEQ ID NO: 1629886 - DNA, 25 bp, Homo sapien
gccgtgccccagacgaggtgtgacc

SEQ ID NO: 1629887 - DNA, 25 bp, Homo sapien
gagggtcgcactcctagcctcagtc

SEQ ID NO: 1629888 - DNA, 25 bp, Homo sapien
gggtctcgcaggctgaggctaccac

SEQ ID NO: 1629889 - DNA, 25 bp, Homo sapien
ttctatataggtacaggggacatag

SEQ ID NO: 1629890 - DNA, 25 bp, Homo sapien
gggacatagaggactgttatatttt

SEQ ID NO: 1629891 - DNA, 25 bp, Homo sapien
gacatagaggactgttatattttct

SEQ ID NO: 1629892 - DNA, 25 bp, Homo sapien
tatataggtacaggggacatagagg

SEQ ID NO: 1629893 - DNA, 25 bp, Homo sapien
gtgggactcgcatttctgtgtggtt

SEQ ID NO: 1629894 - DNA, 25 bp, Homo sapien
caggagtccaggacaccacctgact

SEQ ID NO: 1629895 - DNA, 25 bp, Homo sapien
gctgtgaggtgggactcgcatttct

SEQ ID NO: 1629896 - DNA, 25 bp, Homo sapien
tcgcatttctgtgtggttgggccag

SEQ ID NO: 1629897 - DNA, 25 bp, Homo sapien
cagctgcctccacgatgtttggttt

SEQ ID NO: 1629898 - DNA, 25 bp, Homo sapien
gcagctgcctccacgatgtttggtt

SEQ ID NO: 1629899 - DNA, 25 bp, Homo sapien
tcgccccgctattaataccggcggc

SEQ ID NO: 1629900 - DNA, 25 bp, Homo sapien
gggacattctaaccgccgccaggtc

SEQ ID NO: 1629901 - DNA, 25 bp, Homo sapien
cccgggccccgccaagtcagcttca

SEQ ID NO: 1629902 - DNA, 25 bp, Homo sapien
tggccttagtggtcggcgcggcact

SEQ ID NO: 1629903 - DNA, 25 bp, Homo sapien
ggttcatgaggattgagcagctgca

SEQ ID NO: 1629904 - DNA, 25 bp, Homo sapien
tgtctctgagccaaagggttgtcct

SEQ ID NO: 1629905 - DNA, 25 bp, Homo sapien
gggcttgcccgggataataatccga

SEQ ID NO: 1629906 - DNA, 25 bp, Homo sapien
tactgttcgagtagctcagccctgc

SEQ ID NO: 1629907 - DNA, 25 bp, Homo sapien
ttagccgccgtaagtgccgagatta

SEQ ID NO: 1629908 - DNA, 25 bp, Homo sapien
taacatgactcattgtgctattgta

SEQ ID NO: 1629909 - DNA, 25 bp, Homo sapien
tacccaccatgctatgctatagtat

SEQ ID NO: 1629910 - DNA, 25 bp, Homo sapien
catcattacctctgatactacagta

SEQ ID NO: 1629911 - DNA, 25 bp, Homo sapien
cctctctcaccagccttgaactgtg

SEQ ID NO: 1629912 - DNA, 25 bp, Homo sapien
atttgcacacattggccgcttcaga

SEQ ID NO: 1629913 - DNA, 25 bp, Homo sapien
ggtcgcgatgatgggctggagcagt

SEQ ID NO: 1629914 - DNA, 25 bp, Homo sapien
ccattcagcctcgtctctttacaga

SEQ ID NO: 1629915 - DNA, 25 bp, Homo sapien
tggccttcttataatccctagtgaa

SEQ ID NO: 1629916 - DNA, 25 bp, Homo sapien
aagggcagttgaacccaagccaggc

SEQ ID NO: 1629917 - DNA, 25 bp, Homo sapien
catcaccatgggtgcagatgggcga

SEQ ID NO: 1629918 - DNA, 25 bp, Homo sapien
tgctggcctggtgccgggttcacca

SEQ ID NO: 1629919 - DNA, 25 bp, Homo sapien
ccctgagagtcgtaaccttatctgt

SEQ ID NO: 1629920 - DNA, 25 bp, Homo sapien
catgagaacgtgaacccctgagagt

SEQ ID NO: 1629921 - DNA, 25 bp, Homo sapien
atctgtcttctttgggttatgttcc

SEQ ID NO: 1629922 - DNA, 25 bp, Homo sapien
cttgtttccttgttaatgtctccca

SEQ ID NO: 1629923 - DNA, 25 bp, Homo sapien
gttcacgtctacaccacatggctgg

SEQ ID NO: 1629924 - DNA, 25 bp, Homo sapien
cagtgattgccccagaggccgtttc

SEQ ID NO: 1629925 - DNA, 25 bp, Homo sapien
atctcgagggagcacaaagtgggcc

SEQ ID NO: 1629926 - DNA, 25 bp, Homo sapien
aaatgtggtatattgaccgggcgcg

SEQ ID NO: 1629927 - DNA, 25 bp, Homo sapien
ggatgaaacttgagaacagtgctga

SEQ ID NO: 1629928 - DNA, 25 bp, Homo sapien
tattggaccatagaaatgaatgagg

SEQ ID NO: 1629929 - DNA, 25 bp, Homo sapien
ggtatatccacacaacgggagaata

SEQ ID NO: 1629930 - DNA, 25 bp, Homo sapien
ccacaaggatgaaacttgagaacag

SEQ ID NO: 1629931 - DNA, 25 bp, Homo sapien
ttcttgggcccggtccacaggtcca

SEQ ID NO: 1629932 - DNA, 25 bp, Homo sapien
cctcctgacccccatgtaaatattg

SEQ ID NO: 1629933 - DNA, 25 bp, Homo sapien
ctcttccacagtggcgggcccactc

SEQ ID NO: 1629934 - DNA, 25 bp, Homo sapien
aggtgcccctgatgacgggatgctc

SEQ ID NO: 1629935 - DNA, 25 bp, Homo sapien
caaagtgctgggtgtcacgcgcatc

SEQ ID NO: 1629936 - DNA, 25 bp, Homo sapien
agtgctgggtgtcacgcgcatccat

SEQ ID NO: 1629937 - DNA, 25 bp, Homo sapien
tgctgggtgtcacgcgcatccatgt

SEQ ID NO: 1629938 - DNA, 25 bp, Homo sapien
aaagtgctgggtgtcacgcgcatcc

SEQ ID NO: 1629939 - DNA, 25 bp, Homo sapien
ctgtacctgtgttttaggaagtctg

SEQ ID NO: 1629940 - DNA, 25 bp, Homo sapien
caacacggagtgactgagttttcct

SEQ ID NO: 1629941 - DNA, 25 bp, Homo sapien
ggatctgatggaaatttggtcatta

SEQ ID NO: 1629942 - DNA, 25 bp, Homo sapien
tttcctttgtaattgccagctgaga

SEQ ID NO: 1629943 - DNA, 25 bp, Homo sapien
tgaccttgactatccaccatggcag

SEQ ID NO: 1629944 - DNA, 25 bp, Homo sapien
cccaggctgaggctgtttggcccaa

SEQ ID NO: 1629945 - DNA, 25 bp, Homo sapien
tggatgtgctccctaacctggagag

SEQ ID NO: 1629946 - DNA, 25 bp, Homo sapien
cctcgaacaatggaaggtgagctcc

SEQ ID NO: 1629947 - DNA, 25 bp, Homo sapien
cagcctgggcaacgtagtgagaacc

SEQ ID NO: 1629948 - DNA, 25 bp, Homo sapien
tcgcttgagtctaggagttccagac

SEQ ID NO: 1629949 - DNA, 25 bp, Homo sapien
cctgggcaacgtagtgagaacccat

SEQ ID NO: 1629950 - DNA, 25 bp, Homo sapien
gatcgcttgagtctaggagttccag

SEQ ID NO: 1629951 - DNA, 25 bp, Homo sapien
tgtccaggttaatgggacccaggtc

SEQ ID NO: 1629952 - DNA, 25 bp, Homo sapien
ttccggctcactgccattcttcagg

SEQ ID NO: 1629953 - DNA, 25 bp, Homo sapien
gccattcttcaggatacagctgtga

SEQ ID NO: 1629954 - DNA, 25 bp, Homo sapien
gtgtgtccgtctttgccgaatcctg

SEQ ID NO: 1629955 - DNA, 25 bp, Homo sapien
tgctggggctagagtgcacgggcgc

SEQ ID NO: 1629956 - DNA, 25 bp, Homo sapien
agagtgcacgggcgccatcttagct

SEQ ID NO: 1629957 - DNA, 25 bp, Homo sapien
agatgaggtctgaccgtatcgccca

SEQ ID NO: 1629958 - DNA, 25 bp, Homo sapien
tcaaatgatactccccctcagtcac

SEQ ID NO: 1629959 - DNA, 25 bp, Homo sapien
ttcgatggggccatagcccacttcc

SEQ ID NO: 1629960 - DNA, 25 bp, Homo sapien
tcgatggggccatagcccacttcca

SEQ ID NO: 1629961 - DNA, 25 bp, Homo sapien
cttcgatggggccatagcccacttc

SEQ ID NO: 1629962 - DNA, 25 bp, Homo sapien
gattcatacaccttacctgctgtgg

SEQ ID NO: 1629963 - DNA, 25 bp, Homo sapien
gaaatggatcctgagctcttcccct

SEQ ID NO: 1629964 - DNA, 25 bp, Homo sapien
tctgcggactctgtggcaacttcag

SEQ ID NO: 1629965 - DNA, 25 bp, Homo sapien
cttggtggcatggagcagacagctc

SEQ ID NO: 1629966 - DNA, 25 bp, Homo sapien
tcgagtgccaccctcatgcctgcag

SEQ ID NO: 1629967 - DNA, 25 bp, Homo sapien
tgtgatcagaggtgcgtgtaccatg

SEQ ID NO: 1629968 - DNA, 25 bp, Homo sapien
gggttgctaccccatgcactacggg

SEQ ID NO: 1629969 - DNA, 25 bp, Homo sapien
tgcgtgtaccatggacctggacgcc

SEQ ID NO: 1629970 - DNA, 25 bp, Homo sapien
tcttccagagctggcctgtcctccc

SEQ ID NO: 1629971 - DNA, 25 bp, Homo sapien
ctgttttcttccagagctggcctgt

SEQ ID NO: 1629972 - DNA, 25 bp, Homo sapien
tgttttcttccagagctggcctgtc

SEQ ID NO: 1629973 - DNA, 25 bp, Homo sapien
ttttcttccagagctggcctgtcct

SEQ ID NO: 1629974 - DNA, 25 bp, Homo sapien
tgagactccccaatacctaataagg

SEQ ID NO: 1629975 - DNA, 25 bp, Homo sapien
caccatgagaaggttggcgtgccct

SEQ ID NO: 1629976 - DNA, 25 bp, Homo sapien
cacagaaacttgaactccaggatgg

SEQ ID NO: 1629977 - DNA, 25 bp, Homo sapien
ttataatagtaagcccctgtgaccc

SEQ ID NO: 1629978 - DNA, 25 bp, Homo sapien
gagtccctccataaccacgaaccca

SEQ ID NO: 1629979 - DNA, 25 bp, Homo sapien
ctgagtccctccataaccacgaacc

SEQ ID NO: 1629980 - DNA, 25 bp, Homo sapien
tgagtccctccataaccacgaaccc

SEQ ID NO: 1629981 - DNA, 25 bp, Homo sapien
cctgagtccctccataaccacgaac

SEQ ID NO: 1629982 - DNA, 25 bp, Homo sapien
tttagacctgaagggcagctcggga

SEQ ID NO: 1629983 - DNA, 25 bp, Homo sapien
taagaagtgggcttaaggcctagac

SEQ ID NO: 1629984 - DNA, 25 bp, Homo sapien
gccccagccgagatgtccagatgtt

SEQ ID NO: 1629985 - DNA, 25 bp, Homo sapien
gctcctccaggaaagcgattggctg

SEQ ID NO: 1629986 - DNA, 25 bp, Homo sapien
cagctggtccctggcgatgagcagt

SEQ ID NO: 1629987 - DNA, 25 bp, Homo sapien
tgcagcagacgaaacatggagccgt

SEQ ID NO: 1629988 - DNA, 25 bp, Homo sapien
gaagtcgctgcctaggatggccagc

SEQ ID NO: 1629989 - DNA, 25 bp, Homo sapien
caggcactgaggtcgatctcgtgat

SEQ ID NO: 1629990 - DNA, 25 bp, Homo sapien
tggttcggagtcagccagccttgag

SEQ ID NO: 1629991 - DNA, 25 bp, Homo sapien
tgtcggtcccaaaactcccatagct

SEQ ID NO: 1629992 - DNA, 25 bp, Homo sapien
gagaccttgtgaacacctgagtcag

SEQ ID NO: 1629993 - DNA, 25 bp, Homo sapien
tggaatgcatccgagtcacagagcc

SEQ ID NO: 1629994 - DNA, 25 bp, Homo sapien
ccccaatgtagcgtgtgaggcacag

SEQ ID NO: 1629995 - DNA, 25 bp, Homo sapien
gtctgtgcgtctctcgaagcggcca

SEQ ID NO: 1629996 - DNA, 25 bp, Homo sapien
tggcgtgtggcatagacatcctcgg

SEQ ID NO: 1629997 - DNA, 25 bp, Homo sapien
gccaccggtccagtggaagagcacg

SEQ ID NO: 1629998 - DNA, 25 bp, Homo sapien
ggtggggaggcaggtcaggccagcc

SEQ ID NO: 1629999 - DNA, 25 bp, Homo sapien
ggctgctggacaggcagaaggacgg

SEQ ID NO: 1630000 - DNA, 25 bp, Homo sapien
tggacaggcagaaggacggggaggg

SEQ ID NO: 1630001 - DNA, 25 bp, Homo sapien
ggcagaaggacggggagggggctca

SEQ ID NO: 1630002 - DNA, 25 bp, Homo sapien
tgtgccagcacaatgtgaggctccc

SEQ ID NO: 1630003 - DNA, 25 bp, Homo sapien
agaagggctctacgctcagtgccga

SEQ ID NO: 1630004 - DNA, 25 bp, Homo sapien
tgaggctccccttggtaggagaagg

SEQ ID NO: 1630005 - DNA, 25 bp, Homo sapien
aggagagaatcaggcagcggccggc

SEQ ID NO: 1630006 - DNA, 25 bp, Homo sapien
cgtgaagatgtatcattgaattccc

SEQ ID NO: 1630007 - DNA, 25 bp, Homo sapien
ccggcgccaaatgccgaacacgtga

SEQ ID NO: 1630008 - DNA, 25 bp, Homo sapien
tgaacgtttataaggacctcctgtc

SEQ ID NO: 1630009 - DNA, 25 bp, Homo sapien
ttataaggacctcctgtcccaggcc

SEQ ID NO: 1630010 - DNA, 25 bp, Homo sapien
gggagtgagacgagcctcttggccc

SEQ ID NO: 1630011 - DNA, 25 bp, Homo sapien
gcagggagtgagacgagcctcttgg

SEQ ID NO: 1630012 - DNA, 25 bp, Homo sapien
tgctgcttgctcagggtcttcccac

SEQ ID NO: 1630013 - DNA, 25 bp, Homo sapien
tcccactccgggaaatggcagggca

SEQ ID NO: 1630014 - DNA, 25 bp, Homo sapien
acaggcgccggtccccacgctggca

SEQ ID NO: 1630015 - DNA, 25 bp, Homo sapien
tggctctgcacttgaaagtcttggg

SEQ ID NO: 1630016 - DNA, 25 bp, Homo sapien
ctatggctctgcacttgaaagtctt

SEQ ID NO: 1630017 - DNA, 25 bp, Homo sapien
cgctggcattcacggtgggcatcca

SEQ ID NO: 1630018 - DNA, 25 bp, Homo sapien
cggcagtcacactggaacgggttcc

SEQ ID NO: 1630019 - DNA, 25 bp, Homo sapien
gcagtcacactggaacgggttcccg

SEQ ID NO: 1630020 - DNA, 25 bp, Homo sapien
cacactggaacgggttcccgcggag

SEQ ID NO: 1630021 - DNA, 25 bp, Homo sapien
agtcacactggaacgggttcccgcg

SEQ ID NO: 1630022 - DNA, 25 bp, Homo sapien
ctggggcaagaggccagggaggggc

SEQ ID NO: 1630023 - DNA, 25 bp, Homo sapien
cagggaggggctgcgacccggcttc

SEQ ID NO: 1630024 - DNA, 25 bp, Homo sapien
gccagggaggggctgcgacccggct

SEQ ID NO: 1630025 - DNA, 25 bp, Homo sapien
aggccagggaggggctgcgacccgg

SEQ ID NO: 1630026 - DNA, 25 bp, Homo sapien
gatggggccccatagtggtaagaaa

SEQ ID NO: 1630027 - DNA, 25 bp, Homo sapien
atgcatgcacgccaaccagaagtgg

SEQ ID NO: 1630028 - DNA, 25 bp, Homo sapien
tgcagccaaatgcatgcacgccaac

SEQ ID NO: 1630029 - DNA, 25 bp, Homo sapien
aaatacgtaagaaccactgcagcca

SEQ ID NO: 1630030 - DNA, 25 bp, Homo sapien
gggtctccagatggttattggccag

SEQ ID NO: 1630031 - DNA, 25 bp, Homo sapien
gggagggtctccagatggttattgg

SEQ ID NO: 1630032 - DNA, 25 bp, Homo sapien
taagggtgtccaggcctcggaacag

SEQ ID NO: 1630033 - DNA, 25 bp, Homo sapien
ccaggcctcggaacaggaatctggg

SEQ ID NO: 1630034 - DNA, 25 bp, Homo sapien
aaggcaccgtcagcagccacaagga

SEQ ID NO: 1630035 - DNA, 25 bp, Homo sapien
aggcaccgtcagcagccacaaggat

SEQ ID NO: 1630036 - DNA, 25 bp, Homo sapien
gcaccgtcagcagccacaaggatac

SEQ ID NO: 1630037 - DNA, 25 bp, Homo sapien
ggcaccgtcagcagccacaaggata

SEQ ID NO: 1630038 - DNA, 25 bp, Homo sapien
ggggggtggagcatgggtgcctctc

SEQ ID NO: 1630039 - DNA, 25 bp, Homo sapien
gtggagcatgggtgcctctcatgga

SEQ ID NO: 1630040 - DNA, 25 bp, Homo sapien
ggggtggagcatgggtgcctctcat

SEQ ID NO: 1630041 - DNA, 25 bp, Homo sapien
ggtggagcatgggtgcctctcatgg

SEQ ID NO: 1630042 - DNA, 25 bp, Homo sapien
tgagggcattcttagagatggagcc

SEQ ID NO: 1630043 - DNA, 25 bp, Homo sapien
cattcttagagatggagccaatctc

SEQ ID NO: 1630044 - DNA, 25 bp, Homo sapien
gaagtcctctgagggcattcttaga

SEQ ID NO: 1630045 - DNA, 25 bp, Homo sapien
gtgtgtaagcgagcgaagtcctctg

SEQ ID NO: 1630046 - DNA, 25 bp, Homo sapien
aagacataggcccactggaaggtgc

SEQ ID NO: 1630047 - DNA, 25 bp, Homo sapien
ggaacgcaccccatgaaagacatag

SEQ ID NO: 1630048 - DNA, 25 bp, Homo sapien
gctgaattctcttccaataccacgg

SEQ ID NO: 1630049 - DNA, 25 bp, Homo sapien
taccacggacaatcccagggaaagc

SEQ ID NO: 1630050 - DNA, 25 bp, Homo sapien
tcctggtcatttgaaacgtttcttg

SEQ ID NO: 1630051 - DNA, 25 bp, Homo sapien
caggctctggttatccgggcccttt

SEQ ID NO: 1630052 - DNA, 25 bp, Homo sapien
cttcctgggtttctatgagtcaggg

SEQ ID NO: 1630053 - DNA, 25 bp, Homo sapien
tttgaaacgtttcttgtctctgact

SEQ ID NO: 1630054 - DNA, 25 bp, Homo sapien
gcatcgtcctcaatcacggagaagg

SEQ ID NO: 1630055 - DNA, 25 bp, Homo sapien
gcaaatgcatcgtcctcaatcacgg

SEQ ID NO: 1630056 - DNA, 25 bp, Homo sapien
gggacaggcccgcaaatgcatcgtc

SEQ ID NO: 1630057 - DNA, 25 bp, Homo sapien
cctcaatcacggagaaggagttgga

SEQ ID NO: 1630058 - DNA, 25 bp, Homo sapien
agctgggtgactcccgtcctgacga

SEQ ID NO: 1630059 - DNA, 25 bp, Homo sapien
cttcagctgggtgactcccgtcctg

SEQ ID NO: 1630060 - DNA, 25 bp, Homo sapien
gcaggtgcagagacggaattctcag

SEQ ID NO: 1630061 - DNA, 25 bp, Homo sapien
gccggccttcagctgggtgactccc

SEQ ID NO: 1630062 - DNA, 25 bp, Homo sapien
agctgacgggcaggtccggggagcc

SEQ ID NO: 1630063 - DNA, 25 bp, Homo sapien
gaagctgacgggcaggtccggggag

SEQ ID NO: 1630064 - DNA, 25 bp, Homo sapien
agcagggtcggagagaagctgacgg

SEQ ID NO: 1630065 - DNA, 25 bp, Homo sapien
agtgacagcagggtcggagagaagc

SEQ ID NO: 1630066 - DNA, 25 bp, Homo sapien
gcgctgtctttagagcaggagcagc

SEQ ID NO: 1630067 - DNA, 25 bp, Homo sapien
acagggcgctgtctttagagcagga

SEQ ID NO: 1630068 - DNA, 25 bp, Homo sapien
cacacagggcgctgtctttagagca

SEQ ID NO: 1630069 - DNA, 25 bp, Homo sapien
tcacacagggcgctgtctttagagc

SEQ ID NO: 1630070 - DNA, 25 bp, Homo sapien
tccgtctttctttcagtcggccttc

SEQ ID NO: 1630071 - DNA, 25 bp, Homo sapien
tccctgttcgtatgtctttggtgtc

SEQ ID NO: 1630072 - DNA, 25 bp, Homo sapien
ctgtgttgctgtcagtctttcaggc

SEQ ID NO: 1630073 - DNA, 25 bp, Homo sapien
tctttcaggctttaggtagctgtct

SEQ ID NO: 1630074 - DNA, 25 bp, Homo sapien
gggcagtactgctatccctgcttta

SEQ ID NO: 1630075 - DNA, 25 bp, Homo sapien
cccagaagcctcgttggaggataag

SEQ ID NO: 1630076 - DNA, 25 bp, Homo sapien
aatgcatgcagcctctcttgacact

SEQ ID NO: 1630077 - DNA, 25 bp, Homo sapien
gtttcctggctctagtcagctctaa

SEQ ID NO: 1630078 - DNA, 25 bp, Homo sapien
ctgagagagttaaccaagcgggcca

SEQ ID NO: 1630079 - DNA, 25 bp, Homo sapien
tgttaaggacctcacggagcactgg

SEQ ID NO: 1630080 - DNA, 25 bp, Homo sapien
cccagaggaggagtattggatgcct

SEQ ID NO: 1630081 - DNA, 25 bp, Homo sapien
tgtggccatccatctacatgagcgt

SEQ ID NO: 1630082 - DNA, 25 bp, Homo sapien
ctcaccccggcagggctgtgcgtga

SEQ ID NO: 1630083 - DNA, 25 bp, Homo sapien
catgtgttttctatctctaaggccc

SEQ ID NO: 1630084 - DNA, 25 bp, Homo sapien
tccgattgtgaaagatgtcacccag

SEQ ID NO: 1630085 - DNA, 25 bp, Homo sapien
gctgggcctcatgtcacttgcctga

SEQ ID NO: 1630086 - DNA, 25 bp, Homo sapien
agtccctgcagatcggaggcctcgt

SEQ ID NO: 1630087 - DNA, 25 bp, Homo sapien
tcggaggcctcgtcatcgccgggat

SEQ ID NO: 1630088 - DNA, 25 bp, Homo sapien
gactaccagtccctgcagatcggag

SEQ ID NO: 1630089 - DNA, 25 bp, Homo sapien
tcacagactaccagtccctgcagat

SEQ ID NO: 1630090 - DNA, 25 bp, Homo sapien
caatctgggaaaggaggcttgtact

SEQ ID NO: 1630091 - DNA, 25 bp, Homo sapien
tcatttctggcggaccccgagcctg

SEQ ID NO: 1630092 - DNA, 25 bp, Homo sapien
ccatatctgggcctagttacaccaa

SEQ ID NO: 1630093 - DNA, 25 bp, Homo sapien
cacataagctgctcctgggtgctcc

SEQ ID NO: 1630094 - DNA, 25 bp, Homo sapien
ttctctttcatccacgttgaagaag

SEQ ID NO: 1630095 - DNA, 25 bp, Homo sapien
tgctttctctttcatccacgttgaa

SEQ ID NO: 1630096 - DNA, 25 bp, Homo sapien
ctctttcatccacgttgaagaagag

SEQ ID NO: 1630097 - DNA, 25 bp, Homo sapien
ttttgctttctctttcatccacgtt

SEQ ID NO: 1630098 - DNA, 25 bp, Homo sapien
ccaagccagtcattgctgtatgtga

SEQ ID NO: 1630099 - DNA, 25 bp, Homo sapien
caagccagtcattgctgtatgtgat

SEQ ID NO: 1630100 - DNA, 25 bp, Homo sapien
agccagtcattgctgtatgtgatca

SEQ ID NO: 1630101 - DNA, 25 bp, Homo sapien
tccaagccagtcattgctgtatgtg

SEQ ID NO: 1630102 - DNA, 25 bp, Homo sapien
gtggctaagagagaaccggaggccg

SEQ ID NO: 1630103 - DNA, 25 bp, Homo sapien
tgtggctaagagagaaccggaggcc

SEQ ID NO: 1630104 - DNA, 25 bp, Homo sapien
actgggcatcgttctctctccactg

SEQ ID NO: 1630105 - DNA, 25 bp, Homo sapien
tgcacgaagcacttgtagacggccg

SEQ ID NO: 1630106 - DNA, 25 bp, Homo sapien
tagacggccggctggaaaacctgca

SEQ ID NO: 1630107 - DNA, 25 bp, Homo sapien
aagtcctggccggagagctggctct

SEQ ID NO: 1630108 - DNA, 25 bp, Homo sapien
cacttggcggccattcttgttccag

SEQ ID NO: 1630109 - DNA, 25 bp, Homo sapien
gatcctaagggacagtcgagccaca

SEQ ID NO: 1630110 - DNA, 25 bp, Homo sapien
tgtttgctgcccaaatgcagggtct

SEQ ID NO: 1630111 - DNA, 25 bp, Homo sapien
tgttccagcagtggtagaggcccgt

SEQ ID NO: 1630112 - DNA, 25 bp, Homo sapien
tctttaatgagaaggctgccctcgg

SEQ ID NO: 1630113 - DNA, 25 bp, Homo sapien
tatcattgcctgagagtagggcctg

SEQ ID NO: 1630114 - DNA, 25 bp, Homo sapien
ccccgaggagttgcaatacaggaga

SEQ ID NO: 1630115 - DNA, 25 bp, Homo sapien
gcagctgatggaaaagtagaacccc

SEQ ID NO: 1630116 - DNA, 25 bp, Homo sapien
tggcagtgggctggtgccaccccga

SEQ ID NO: 1630117 - DNA, 25 bp, Homo sapien
gcagtgggctggtgccaccccgaac

SEQ ID NO: 1630118 - DNA, 25 bp, Homo sapien
ctgtggcagtgggctggtgccaccc

SEQ ID NO: 1630119 - DNA, 25 bp, Homo sapien
cagtgggctggtgccaccccgaaca

SEQ ID NO: 1630120 - DNA, 25 bp, Homo sapien
catccacttgccaggctggtaaaaa

SEQ ID NO: 1630121 - DNA, 25 bp, Homo sapien
tatggctagtgaatttccttgacgg

SEQ ID NO: 1630122 - DNA, 25 bp, Homo sapien
ggtaaaaatcaaagatgaggtatgg

SEQ ID NO: 1630123 - DNA, 25 bp, Homo sapien
caaagatgaggtatggctagtgaat

SEQ ID NO: 1630124 - DNA, 25 bp, Homo sapien
catctctcagatacagctggcaggg

SEQ ID NO: 1630125 - DNA, 25 bp, Homo sapien
catgggatggtcacacttcaggaca

SEQ ID NO: 1630126 - DNA, 25 bp, Homo sapien
aatgtagcagtaccccaggcgtctg

SEQ ID NO: 1630127 - DNA, 25 bp, Homo sapien
cagggcataggtttttccacgggct

SEQ ID NO: 1630128 - DNA, 25 bp, Homo sapien
ggcaagaaaggctaagcagccacag

SEQ ID NO: 1630129 - DNA, 25 bp, Homo sapien
gcaagaaaggctaagcagccacagg

SEQ ID NO: 1630130 - DNA, 25 bp, Homo sapien
gctcacagagtggggcaagaaaggc

SEQ ID NO: 1630131 - DNA, 25 bp, Homo sapien
ggctcacagagtggggcaagaaagg

SEQ ID NO: 1630132 - DNA, 25 bp, Homo sapien
gcaggtggctcgttccgggaattcc

SEQ ID NO: 1630133 - DNA, 25 bp, Homo sapien
cagaatttccggagggctgacccgg

SEQ ID NO: 1630134 - DNA, 25 bp, Homo sapien
gaattccaacttttcctggccctga

SEQ ID NO: 1630135 - DNA, 25 bp, Homo sapien
cctcaggtcatctaactgggagaca

SEQ ID NO: 1630136 - DNA, 25 bp, Homo sapien
acacatacccacaggaatgctgcac

SEQ ID NO: 1630137 - DNA, 25 bp, Homo sapien
gaatgctgcacattttacccagcta

SEQ ID NO: 1630138 - DNA, 25 bp, Homo sapien
cccagctactatgtctagggtcgta

SEQ ID NO: 1630139 - DNA, 25 bp, Homo sapien
ggtcgtatctagcacaccagcatgg

SEQ ID NO: 1630140 - DNA, 25 bp, Homo sapien
ccaacgggacactttcacagaggag

SEQ ID NO: 1630141 - DNA, 25 bp, Homo sapien
gcttatggcagagctcaccacactg

SEQ ID NO: 1630142 - DNA, 25 bp, Homo sapien
cagaggagctgattgacgtggtcac

SEQ ID NO: 1630143 - DNA, 25 bp, Homo sapien
tgaacagtgaagtgccaggcaatcc

SEQ ID NO: 1630144 - DNA, 25 bp, Homo sapien
gcaggctgcctgagctaatgaaggg

SEQ ID NO: 1630145 - DNA, 25 bp, Homo sapien
tctaggctgtgcacttagtcttctg

SEQ ID NO: 1630146 - DNA, 25 bp, Homo sapien
ctgcttccaaaccaaatcagaggtg

SEQ ID NO: 1630147 - DNA, 25 bp, Homo sapien
ggaggaagccacttgcctagggccc

SEQ ID NO: 1630148 - DNA, 25 bp, Homo sapien
gaatgaggaccaacagggactcaga

SEQ ID NO: 1630149 - DNA, 25 bp, Homo sapien
ctcacagtgtatgccgccggcaaag

SEQ ID NO: 1630150 - DNA, 25 bp, Homo sapien
cagcggagaggacggcttgggaagg

SEQ ID NO: 1630151 - DNA, 25 bp, Homo sapien
caaggaagctctacagcggagagga

SEQ ID NO: 1630152 - DNA, 25 bp, Homo sapien
tcacaagctctggagagaaccattt

SEQ ID NO: 1630153 - DNA, 25 bp, Homo sapien
tatgcgtctgtaaagcgccgcgtcc

SEQ ID NO: 1630154 - DNA, 25 bp, Homo sapien
agaaccatttgttcggccgcgcggg

SEQ ID NO: 1630155 - DNA, 25 bp, Homo sapien
ggaacactgatgaagccctgccata

SEQ ID NO: 1630156 - DNA, 25 bp, Homo sapien
cgcgcgcgcagctcaagtaaaggag

SEQ ID NO: 1630157 - DNA, 25 bp, Homo sapien
tactttactgtctccaaactcgggc

SEQ ID NO: 1630158 - DNA, 25 bp, Homo sapien
aaaaatagaaagcggcggcggctgc

SEQ ID NO: 1630159 - DNA, 25 bp, Homo sapien
cagccagggcgggccgtgttcaaaa

SEQ ID NO: 1630160 - DNA, 25 bp, Homo sapien
aagctggtgtgcaatgatgtggtct

SEQ ID NO: 1630161 - DNA, 25 bp, Homo sapien
ccaagctggtgtgcaatgatgtggt

SEQ ID NO: 1630162 - DNA, 25 bp, Homo sapien
ccccacccagcttctgaattttaag

SEQ ID NO: 1630163 - DNA, 25 bp, Homo sapien
ttataggcatgcactgctatgcctg

SEQ ID NO: 1630164 - DNA, 25 bp, Homo sapien
tctagtggtctcacctggaggcaag

SEQ ID NO: 1630165 - DNA, 25 bp, Homo sapien
tccccagcccttagcacagagaggg

SEQ ID NO: 1630166 - DNA, 25 bp, Homo sapien
cacttggaaacggtatcctccctgc

SEQ ID NO: 1630167 - DNA, 25 bp, Homo sapien
ctggacctatgcagggaggccacgt

SEQ ID NO: 1630168 - DNA, 25 bp, Homo sapien
acccagccctatcggtgcttttgga

SEQ ID NO: 1630169 - DNA, 25 bp, Homo sapien
cccagccctatcggtgcttttggaa

SEQ ID NO: 1630170 - DNA, 25 bp, Homo sapien
cttttgttgactagccccacagagt

SEQ ID NO: 1630171 - DNA, 25 bp, Homo sapien
acacccagccctatcggtgcttttg

SEQ ID NO: 1630172 - DNA, 25 bp, Homo sapien
tatacccttcctcatgacacagacg

SEQ ID NO: 1630173 - DNA, 25 bp, Homo sapien
gggtatttttcacacgcacaattca

SEQ ID NO: 1630174 - DNA, 25 bp, Homo sapien
cacaattcacacacagaggtctgtg

SEQ ID NO: 1630175 - DNA, 25 bp, Homo sapien
taaatagtggaaagacagacgcggc

SEQ ID NO: 1630176 - DNA, 25 bp, Homo sapien
ggaacaggtggttagcacttcatcc

SEQ ID NO: 1630177 - DNA, 25 bp, Homo sapien
tacaatccaatgatggaagatggca

SEQ ID NO: 1630178 - DNA, 25 bp, Homo sapien
gaagatggcattagctacaccaccc

SEQ ID NO: 1630179 - DNA, 25 bp, Homo sapien
tccctgggatgctacaatccaatga

SEQ ID NO: 1630180 - DNA, 25 bp, Homo sapien
gctatatctgcggtgaaagcccggc

SEQ ID NO: 1630181 - DNA, 25 bp, Homo sapien
caatgggacctgctacctggagttc

SEQ ID NO: 1630182 - DNA, 25 bp, Homo sapien
tggagttccggaaggaccagctagc

SEQ ID NO: 1630183 - DNA, 25 bp, Homo sapien
aaagcccggcgtggaggatctacgt

SEQ ID NO: 1630184 - DNA, 25 bp, Homo sapien
gcagcgtcatactggactttaagtg

SEQ ID NO: 1630185 - DNA, 25 bp, Homo sapien
tcagaggcagcgtcatactggactt

SEQ ID NO: 1630186 - DNA, 25 bp, Homo sapien
ctggactttaagtgcatccttcctg

SEQ ID NO: 1630187 - DNA, 25 bp, Homo sapien
cttcatcagaggcagcgtcatactg

SEQ ID NO: 1630188 - DNA, 25 bp, Homo sapien
gctccctggttcatggggatgagaa

SEQ ID NO: 1630189 - DNA, 25 bp, Homo sapien
aatgaagcctctgttggctctgggt

SEQ ID NO: 1630190 - DNA, 25 bp, Homo sapien
ggatgagaatgaagcctctgttggc

SEQ ID NO: 1630191 - DNA, 25 bp, Homo sapien
gaagcctctgttggctctgggtcat

SEQ ID NO: 1630192 - DNA, 25 bp, Homo sapien
gcttccgagggaactagagccactt

SEQ ID NO: 1630193 - DNA, 25 bp, Homo sapien
ggccctctgcggacattttaataag

SEQ ID NO: 1630194 - DNA, 25 bp, Homo sapien
taaccaattccagctaggcacaggg

SEQ ID NO: 1630195 - DNA, 25 bp, Homo sapien
tgtctgtgtcaaatggcttccgagg

SEQ ID NO: 1630196 - DNA, 25 bp, Homo sapien
tgcactggagagacgtggcccagaa

SEQ ID NO: 1630197 - DNA, 25 bp, Homo sapien
gatttccacgcaagacaagctcagt

SEQ ID NO: 1630198 - DNA, 25 bp, Homo sapien
cagtgttaggagacacggtgcatcc

SEQ ID NO: 1630199 - DNA, 25 bp, Homo sapien
acacctggcccaggactcctttaga

SEQ ID NO: 1630200 - DNA, 25 bp, Homo sapien
tgggtcttcacctggtgggtctgca

SEQ ID NO: 1630201 - DNA, 25 bp, Homo sapien
tggtgggtctgcagctgaaccctgg

SEQ ID NO: 1630202 - DNA, 25 bp, Homo sapien
gtgggtcttcacctggtgggtctgc

SEQ ID NO: 1630203 - DNA, 25 bp, Homo sapien
ggtccgtccctagccaggctggaag

SEQ ID NO: 1630204 - DNA, 25 bp, Homo sapien
aagcttgtctctgcgcatctggtcc

SEQ ID NO: 1630205 - DNA, 25 bp, Homo sapien
tctcaaaagccgttgagacacactg

SEQ ID NO: 1630206 - DNA, 25 bp, Homo sapien
tctggtcccctctcgaagcagttct

SEQ ID NO: 1630207 - DNA, 25 bp, Homo sapien
cacatgcgcagatggtcttgacaga

SEQ ID NO: 1630208 - DNA, 25 bp, Homo sapien
ttcagtttccgtggctcaagcaggc

SEQ ID NO: 1630209 - DNA, 25 bp, Homo sapien
ctcacagtgcagactggagactgca

SEQ ID NO: 1630210 - DNA, 25 bp, Homo sapien
caggctgatgtcagcccttggcgat

SEQ ID NO: 1630211 - DNA, 25 bp, Homo sapien
ccctctctctgcacaggttattatc

SEQ ID NO: 1630212 - DNA, 25 bp, Homo sapien
gaccctctctctgcacaggttatta

SEQ ID NO: 1630213 - DNA, 25 bp, Homo sapien
gagaccctctctctgcacaggttat

SEQ ID NO: 1630214 - DNA, 25 bp, Homo sapien
ggacaggagaccctctctctgcaca

SEQ ID NO: 1630215 - DNA, 25 bp, Homo sapien
ttcatgtggccggagggcactcctg

SEQ ID NO: 1630216 - DNA, 25 bp, Homo sapien
tgttagcgccttgtcttcatgtggc

SEQ ID NO: 1630217 - DNA, 25 bp, Homo sapien
tgtaaaaacgcttcctgtccaggga

SEQ ID NO: 1630218 - DNA, 25 bp, Homo sapien
gcagaacgccatgtttgttagcgcc

SEQ ID NO: 1630219 - DNA, 25 bp, Homo sapien
cagaagcgaatggtagctgttcagg

SEQ ID NO: 1630220 - DNA, 25 bp, Homo sapien
tctgccctatcgaggaagctgaagg

SEQ ID NO: 1630221 - DNA, 25 bp, Homo sapien
tgaatggagccagcgtggtcacttc

SEQ ID NO: 1630222 - DNA, 25 bp, Homo sapien
ccgacaggtgtctcacagaagcgaa

SEQ ID NO: 1630223 - DNA, 25 bp, Homo sapien
agcggtcatccagtaacccacttgg

SEQ ID NO: 1630224 - DNA, 25 bp, Homo sapien
tcagaagcggtcatccagtaaccca

SEQ ID NO: 1630225 - DNA, 25 bp, Homo sapien
gaagcggtcatccagtaacccactt

SEQ ID NO: 1630226 - DNA, 25 bp, Homo sapien
ggtcatccagtaacccacttggcaa

SEQ ID NO: 1630227 - DNA, 25 bp, Homo sapien
gcaggaaagagttatggtaggttga

SEQ ID NO: 1630228 - DNA, 25 bp, Homo sapien
taggttgagaatcagcgctcacgct

SEQ ID NO: 1630229 - DNA, 25 bp, Homo sapien
atggtaggttgagaatcagcgctca

SEQ ID NO: 1630230 - DNA, 25 bp, Homo sapien
tgagaatcagcgctcacgctagccc

SEQ ID NO: 1630231 - DNA, 25 bp, Homo sapien
tcaggagttgcgctcctcagtcctt

SEQ ID NO: 1630232 - DNA, 25 bp, Homo sapien
cactgggcatcaggagttgcgctcc

SEQ ID NO: 1630233 - DNA, 25 bp, Homo sapien
gagttgcgctcctcagtcctttcag

SEQ ID NO: 1630234 - DNA, 25 bp, Homo sapien
ggcatcaggagttgcgctcctcagt

SEQ ID NO: 1630235 - DNA, 25 bp, Homo sapien
gcatcccagttgaggaaaggaagtt

SEQ ID NO: 1630236 - DNA, 25 bp, Homo sapien
cttaggaaaggcatcccagttgagg

SEQ ID NO: 1630237 - DNA, 25 bp, Homo sapien
taggaaaggcatcccagttgaggaa

SEQ ID NO: 1630238 - DNA, 25 bp, Homo sapien
aaggcatcccagttgaggaaaggaa

SEQ ID NO: 1630239 - DNA, 25 bp, Homo sapien
caaagagggcgtgccagttcaggaa

SEQ ID NO: 1630240 - DNA, 25 bp, Homo sapien
gagggcgtgccagttcaggaactca

SEQ ID NO: 1630241 - DNA, 25 bp, Homo sapien
ctcaaagagggcgtgccagttcagg

SEQ ID NO: 1630242 - DNA, 25 bp, Homo sapien
gggcgtgccagttcaggaactcatc

SEQ ID NO: 1630243 - DNA, 25 bp, Homo sapien
agatcgcaatttgtcgatgttcagg

SEQ ID NO: 1630244 - DNA, 25 bp, Homo sapien
gcaatttgtcgatgttcaggaacgg

SEQ ID NO: 1630245 - DNA, 25 bp, Homo sapien
caatttgtcgatgttcaggaacggg

SEQ ID NO: 1630246 - DNA, 25 bp, Homo sapien
tcgcaatttgtcgatgttcaggaac

SEQ ID NO: 1630247 - DNA, 25 bp, Homo sapien
ctcgggtcgtgacgcataattctca

SEQ ID NO: 1630248 - DNA, 25 bp, Homo sapien
cgtgacgcataattctcaatggtgc

SEQ ID NO: 1630249 - DNA, 25 bp, Homo sapien
tgacgcataattctcaatggtgctt

SEQ ID NO: 1630250 - DNA, 25 bp, Homo sapien
ggtcgtgacgcataattctcaatgg

SEQ ID NO: 1630251 - DNA, 25 bp, Homo sapien
agagccacttatccaggaatggaca

SEQ ID NO: 1630252 - DNA, 25 bp, Homo sapien
agccacttatccaggaatggacagg

SEQ ID NO: 1630253 - DNA, 25 bp, Homo sapien
gccacttatccaggaatggacagga

SEQ ID NO: 1630254 - DNA, 25 bp, Homo sapien
gagccacttatccaggaatggacag

SEQ ID NO: 1630255 - DNA, 25 bp, Homo sapien
cacggcaggaaggaccgggatcttc

SEQ ID NO: 1630256 - DNA, 25 bp, Homo sapien
caccacggcaggaaggaccgggatc

SEQ ID NO: 1630257 - DNA, 25 bp, Homo sapien
cggcaggaaggaccgggatcttcat

SEQ ID NO: 1630258 - DNA, 25 bp, Homo sapien
ggagcaccacggcaggaaggaccgg

SEQ ID NO: 1630259 - DNA, 25 bp, Homo sapien
ggctccttctagggcgttgtggaag

SEQ ID NO: 1630260 - DNA, 25 bp, Homo sapien
ccttctagggcgttgtggaagaacg

SEQ ID NO: 1630261 - DNA, 25 bp, Homo sapien
tccttctagggcgttgtggaagaac

SEQ ID NO: 1630262 - DNA, 25 bp, Homo sapien
gcaggggctccttctagggcgttgt

SEQ ID NO: 1630263 - DNA, 25 bp, Homo sapien
gagacttcagctccccacgggtttc

SEQ ID NO: 1630264 - DNA, 25 bp, Homo sapien
gcagcgaggacggagcgtcctccct

SEQ ID NO: 1630265 - DNA, 25 bp, Homo sapien
ccacgctccgggaagctctctgtgc

SEQ ID NO: 1630266 - DNA, 25 bp, Homo sapien
tgggctgaggagacttcagctcccc

SEQ ID NO: 1630267 - DNA, 25 bp, Homo sapien
gaaacaaggagagacaagctgggtc

SEQ ID NO: 1630268 - DNA, 25 bp, Homo sapien
gcctcggtggtggttgcaagaaatt

SEQ ID NO: 1630269 - DNA, 25 bp, Homo sapien
tgtcacagtgacttcaggtcaccaa

SEQ ID NO: 1630270 - DNA, 25 bp, Homo sapien
aggagctccctgacgaccagtgctt

SEQ ID NO: 1630271 - DNA, 25 bp, Homo sapien
ccactcctaagcctgcggaaacggg

SEQ ID NO: 1630272 - DNA, 25 bp, Homo sapien
ggcatcttttcacccagcgtctggg

SEQ ID NO: 1630273 - DNA, 25 bp, Homo sapien
caaatggtagcacgtggccactcct

SEQ ID NO: 1630274 - DNA, 25 bp, Homo sapien
gggcacccaccattcttttgctgtc

SEQ ID NO: 1630275 - DNA, 25 bp, Homo sapien
ctgtggtgcccctcacttttgctcc

SEQ ID NO: 1630276 - DNA, 25 bp, Homo sapien
tgtggtgcccctcacttttgctccg

SEQ ID NO: 1630277 - DNA, 25 bp, Homo sapien
ttcgcctgtggtgcccctcactttt

SEQ ID NO: 1630278 - DNA, 25 bp, Homo sapien
ctgttcgcctgtggtgcccctcact

SEQ ID NO: 1630279 - DNA, 25 bp, Homo sapien
tatgtggtcccaccctaaggtgctt

SEQ ID NO: 1630280 - DNA, 25 bp, Homo sapien
acagttcccctgtaacatctctatc

SEQ ID NO: 1630281 - DNA, 25 bp, Homo sapien
cagagctgtgcctatgtggtcccac

SEQ ID NO: 1630282 - DNA, 25 bp, Homo sapien
gttctgccgagccaagctatcacct

SEQ ID NO: 1630283 - DNA, 25 bp, Homo sapien
tcacctttagagcacgcacccagag

SEQ ID NO: 1630284 - DNA, 25 bp, Homo sapien
tgcagcggtgcaatcgcagttcgca

SEQ ID NO: 1630285 - DNA, 25 bp, Homo sapien
gcggtgcaatcgcagttcgcagcag

SEQ ID NO: 1630286 - DNA, 25 bp, Homo sapien
tcttccttatcacctttagagcacg

SEQ ID NO: 1630287 - DNA, 25 bp, Homo sapien
ggatataccaagatcctggccctgc

SEQ ID NO: 1630288 - DNA, 25 bp, Homo sapien
gagatctgaggatataccaagatcc

SEQ ID NO: 1630289 - DNA, 25 bp, Homo sapien
gcctgggtcggctcactctgacact

SEQ ID NO: 1630290 - DNA, 25 bp, Homo sapien
ctgacttcatgtcgctgcccactga

SEQ ID NO: 1630291 - DNA, 25 bp, Homo sapien
cagcaggccaggttgcacccgggaa

SEQ ID NO: 1630292 - DNA, 25 bp, Homo sapien
gcaggccaggttgcacccgggaagc

SEQ ID NO: 1630293 - DNA, 25 bp, Homo sapien
agcaggccaggttgcacccgggaag

SEQ ID NO: 1630294 - DNA, 25 bp, Homo sapien
catcctgagtgcacttgatccaaga

SEQ ID NO: 1630295 - DNA, 25 bp, Homo sapien
tgaacatggttcctgggcacgtact

SEQ ID NO: 1630296 - DNA, 25 bp, Homo sapien
gggtcaaaagagcataggcctcgct

SEQ ID NO: 1630297 - DNA, 25 bp, Homo sapien
tcacaccagggctatcaccaaggtt

SEQ ID NO: 1630298 - DNA, 25 bp, Homo sapien
cctggactcaaagagagcgggatcc

SEQ ID NO: 1630299 - DNA, 25 bp, Homo sapien
aagacagggtggttgccggtctcac

SEQ ID NO: 1630300 - DNA, 25 bp, Homo sapien
tccaaactgtctcagggaacccgag

SEQ ID NO: 1630301 - DNA, 25 bp, Homo sapien
taagtgctagtctgctttcctcgcc

SEQ ID NO: 1630302 - DNA, 25 bp, Homo sapien
ggtcttgactgagtacttcccacca

SEQ ID NO: 1630303 - DNA, 25 bp, Homo sapien
tgagtacttcccaccataggcagtg

SEQ ID NO: 1630304 - DNA, 25 bp, Homo sapien
caccataggcagtgggatacgcatg

SEQ ID NO: 1630305 - DNA, 25 bp, Homo sapien
gatacgcatgctggttgtaattgta

SEQ ID NO: 1630306 - DNA, 25 bp, Homo sapien
cagcgggtccatggtagatgtctca

SEQ ID NO: 1630307 - DNA, 25 bp, Homo sapien
tttactgtcctagcccaaatggccg

SEQ ID NO: 1630308 - DNA, 25 bp, Homo sapien
aaagaagtgccaggacgtaacccag

SEQ ID NO: 1630309 - DNA, 25 bp, Homo sapien
catggcggttagaacagacggacga

SEQ ID NO: 1630310 - DNA, 25 bp, Homo sapien
cttggaagttacagctgccacctcc

SEQ ID NO: 1630311 - DNA, 25 bp, Homo sapien
gctgccacctcctgccatcctgcac

SEQ ID NO: 1630312 - DNA, 25 bp, Homo sapien
ccacctcctgccatcctgcacccgg

SEQ ID NO: 1630313 - DNA, 25 bp, Homo sapien
ctgccacctcctgccatcctgcacc

SEQ ID NO: 1630314 - DNA, 25 bp, Homo sapien
agtgaaagagaatttcagattgccc

SEQ ID NO: 1630315 - DNA, 25 bp, Homo sapien
gcccagacccgggagcaaggccaag

SEQ ID NO: 1630316 - DNA, 25 bp, Homo sapien
agaatttcagattgcccagacccgg

SEQ ID NO: 1630317 - DNA, 25 bp, Homo sapien
agattgcccagacccgggagcaagg

SEQ ID NO: 1630318 - DNA, 25 bp, Homo sapien
agccgtggctcccctgggtccaggc

SEQ ID NO: 1630319 - DNA, 25 bp, Homo sapien
ccagccgtggctcccctgggtccag

SEQ ID NO: 1630320 - DNA, 25 bp, Homo sapien
gagcagaggcagtggccggcttcat

SEQ ID NO: 1630321 - DNA, 25 bp, Homo sapien
gcagagcagaggcagtggccggctt

SEQ ID NO: 1630322 - DNA, 25 bp, Homo sapien
cagggccccgaaccctgtgtcccag

SEQ ID NO: 1630323 - DNA, 25 bp, Homo sapien
gtcccagagctgagaagtcctgccc

SEQ ID NO: 1630324 - DNA, 25 bp, Homo sapien
ctcgcccagggccccgaaccctgtg

SEQ ID NO: 1630325 - DNA, 25 bp, Homo sapien
agctgagaagtcctgccccccttac

SEQ ID NO: 1630326 - DNA, 25 bp, Homo sapien
ttgaggaaaggagtgttctgtttga

SEQ ID NO: 1630327 - DNA, 25 bp, Homo sapien
tgaggaaaggagtgttctgtttgaa

SEQ ID NO: 1630328 - DNA, 25 bp, Homo sapien
agttcttcaaacagcaagaattctc

SEQ ID NO: 1630329 - DNA, 25 bp, Homo sapien
gctgaagtagaggagggctcgggtg

SEQ ID NO: 1630330 - DNA, 25 bp, Homo sapien
cggctgaagtagaggagggctcggg

SEQ ID NO: 1630331 - DNA, 25 bp, Homo sapien
gtcggctgaagtagaggagggctcg

SEQ ID NO: 1630332 - DNA, 25 bp, Homo sapien
tcccagagtcggctgaagtagagga

SEQ ID NO: 1630333 - DNA, 25 bp, Homo sapien
ggcagctaaggtttatttcaagggc

SEQ ID NO: 1630334 - DNA, 25 bp, Homo sapien
gcaagggctgagattagtgatgaga

SEQ ID NO: 1630335 - DNA, 25 bp, Homo sapien
tcccatccaatctggtggctccttg

SEQ ID NO: 1630336 - DNA, 25 bp, Homo sapien
ctgagattagtgatgagagggtggt

SEQ ID NO: 1630337 - DNA, 25 bp, Homo sapien
acgggatgcgagagcttctctggtc

SEQ ID NO: 1630338 - DNA, 25 bp, Homo sapien
cacgggatgcgagagcttctctggt

SEQ ID NO: 1630339 - DNA, 25 bp, Homo sapien
tcacgggatgcgagagcttctctgg

SEQ ID NO: 1630340 - DNA, 25 bp, Homo sapien
atcccagttgatgaaacccagcttg

SEQ ID NO: 1630341 - DNA, 25 bp, Homo sapien
ttccagaaagtgtcaaagttaaaca

SEQ ID NO: 1630342 - DNA, 25 bp, Homo sapien
tccagaaagtgtcaaagttaaacat

SEQ ID NO: 1630343 - DNA, 25 bp, Homo sapien
actttgtgagccagagtcgggagat

SEQ ID NO: 1630344 - DNA, 25 bp, Homo sapien
cactttgtgagccagagtcgggaga

SEQ ID NO: 1630345 - DNA, 25 bp, Homo sapien
ccatggtcccagcccaaggtggagt

SEQ ID NO: 1630346 - DNA, 25 bp, Homo sapien
ttgactccaccaacagcgtcacctc

SEQ ID NO: 1630347 - DNA, 25 bp, Homo sapien
gtattgactccaccaacagcgtcac

SEQ ID NO: 1630348 - DNA, 25 bp, Homo sapien
cagtattgactccaccaacagcgtc

SEQ ID NO: 1630349 - DNA, 25 bp, Homo sapien
cacagtattgactccaccaacagcg

SEQ ID NO: 1630350 - DNA, 25 bp, Homo sapien
tggactccacaacaccttggtctgg

SEQ ID NO: 1630351 - DNA, 25 bp, Homo sapien
gagattagctaacgtgtagtcccac

SEQ ID NO: 1630352 - DNA, 25 bp, Homo sapien
tggacgcagattcagagcagcttgc

SEQ ID NO: 1630353 - DNA, 25 bp, Homo sapien
tacaaaagtaacatggctccgatcc

SEQ ID NO: 1630354 - DNA, 25 bp, Homo sapien
ggcgattgccctctttgcttatttc

SEQ ID NO: 1630355 - DNA, 25 bp, Homo sapien
aaggaggcgattgccctctttgctt

SEQ ID NO: 1630356 - DNA, 25 bp, Homo sapien
gaggcgattgccctctttgcttatt

SEQ ID NO: 1630357 - DNA, 25 bp, Homo sapien
tccaaggaggcgattgccctctttg

SEQ ID NO: 1630358 - DNA, 25 bp, Homo sapien
tgagcatgacagaggacttcccaga

SEQ ID NO: 1630359 - DNA, 25 bp, Homo sapien
catagagtagactggctggtcccct

SEQ ID NO: 1630360 - DNA, 25 bp, Homo sapien
ggctgctcacttacgatgtccatag

SEQ ID NO: 1630361 - DNA, 25 bp, Homo sapien
gagatctcgtttcaagctcctgtgg

SEQ ID NO: 1630362 - DNA, 25 bp, Homo sapien
tcatgttgctggaaactccctgtcc

SEQ ID NO: 1630363 - DNA, 25 bp, Homo sapien
tgttgctggaaactccctgtcctct

SEQ ID NO: 1630364 - DNA, 25 bp, Homo sapien
cctcatgttgctggaaactccctgt

SEQ ID NO: 1630365 - DNA, 25 bp, Homo sapien
catgttgctggaaactccctgtcct

SEQ ID NO: 1630366 - DNA, 25 bp, Homo sapien
gacccctgctgaagatcctgaggcc

SEQ ID NO: 1630367 - DNA, 25 bp, Homo sapien
tgattcctctaagaatcctaatggc

SEQ ID NO: 1630368 - DNA, 25 bp, Homo sapien
taaagctaccataaataaagcagtc

SEQ ID NO: 1630369 - DNA, 25 bp, Homo sapien
taaagcagtcctgtccgacagaatt

SEQ ID NO: 1630370 - DNA, 25 bp, Homo sapien
cccgctcccgcgggcttcattccct

SEQ ID NO: 1630371 - DNA, 25 bp, Homo sapien
cgctcccgcgggcttcattccctgg

SEQ ID NO: 1630372 - DNA, 25 bp, Homo sapien
ctgaatcccagattccccgctcccg

SEQ ID NO: 1630373 - DNA, 25 bp, Homo sapien
gaatcccagattccccgctcccgcg

SEQ ID NO: 1630374 - DNA, 25 bp, Homo sapien
ccatctccgcggagccttggctccc

SEQ ID NO: 1630375 - DNA, 25 bp, Homo sapien
cgatcctgcgagtgaaaccagctgc

SEQ ID NO: 1630376 - DNA, 25 bp, Homo sapien
gtgggagattcacgccagccactca

SEQ ID NO: 1630377 - DNA, 25 bp, Homo sapien
cttggctccccgatcctgcgagtga

SEQ ID NO: 1630378 - DNA, 25 bp, Homo sapien
atgtccatttcctccgccgctccca

SEQ ID NO: 1630379 - DNA, 25 bp, Homo sapien
cgctcccaccgtggttgccggagga

SEQ ID NO: 1630380 - DNA, 25 bp, Homo sapien
tccgccgctcccaccgtggttgccg

SEQ ID NO: 1630381 - DNA, 25 bp, Homo sapien
tcctccgccgctcccaccgtggttg

SEQ ID NO: 1630382 - DNA, 25 bp, Homo sapien
tgttggaaccccaatcagattccag

SEQ ID NO: 1630383 - DNA, 25 bp, Homo sapien
gacccagtcgttcccagcggtgtta

SEQ ID NO: 1630384 - DNA, 25 bp, Homo sapien
cagcggtgttacagatttgttggaa

SEQ ID NO: 1630385 - DNA, 25 bp, Homo sapien
gatttcaaacgctgtcctaaaggac

SEQ ID NO: 1630386 - DNA, 25 bp, Homo sapien
gatttggagaacctgagctgctgcc

SEQ ID NO: 1630387 - DNA, 25 bp, Homo sapien
tcggaactacgcaatgatttggaga

SEQ ID NO: 1630388 - DNA, 25 bp, Homo sapien
tgtggccgagggtattcggaactac

SEQ ID NO: 1630389 - DNA, 25 bp, Homo sapien
tgttggtcgctgcaggaagttattc

SEQ ID NO: 1630390 - DNA, 25 bp, Homo sapien
gggcagcaagtggaagggaccctag

SEQ ID NO: 1630391 - DNA, 25 bp, Homo sapien
gtggaagggaccctagagccctcac

SEQ ID NO: 1630392 - DNA, 25 bp, Homo sapien
caagtggaagggaccctagagccct

SEQ ID NO: 1630393 - DNA, 25 bp, Homo sapien
cagcaagtggaagggaccctagagc

SEQ ID NO: 1630394 - DNA, 25 bp, Homo sapien
gagcggccgtagctgccttggtcac

SEQ ID NO: 1630395 - DNA, 25 bp, Homo sapien
gctgccttggtcaccattcccagaa

SEQ ID NO: 1630396 - DNA, 25 bp, Homo sapien
ctgggagcggccgtagctgccttgg

SEQ ID NO: 1630397 - DNA, 25 bp, Homo sapien
ggagcggccgtagctgccttggtca

SEQ ID NO: 1630398 - DNA, 25 bp, Homo sapien
actgccactgctgcccgactgtgag

SEQ ID NO: 1630399 - DNA, 25 bp, Homo sapien
ttgttgtcaccattgctgccactgc

SEQ ID NO: 1630400 - DNA, 25 bp, Homo sapien
aggaggactcactgccgctgtcacc

SEQ ID NO: 1630401 - DNA, 25 bp, Homo sapien
tgccattgttgttgtcaccattgct

SEQ ID NO: 1630402 - DNA, 25 bp, Homo sapien
agccagatggtgggggattcgtgca

SEQ ID NO: 1630403 - DNA, 25 bp, Homo sapien
gatggtgagtttggggacggtgagt

SEQ ID NO: 1630404 - DNA, 25 bp, Homo sapien
tgagtttggagacgttggcctcggc

SEQ ID NO: 1630405 - DNA, 25 bp, Homo sapien
gtttggagacgttggcctcggccat

SEQ ID NO: 1630406 - DNA, 25 bp, Homo sapien
tgagtttggggacggtgagtttgga

SEQ ID NO: 1630407 - DNA, 25 bp, Homo sapien
gttgctggctctcactgaaccatag

SEQ ID NO: 1630408 - DNA, 25 bp, Homo sapien
ctctcactgaaccatagccaggctg

SEQ ID NO: 1630409 - DNA, 25 bp, Homo sapien
ctggttgctggctctcactgaacca

SEQ ID NO: 1630410 - DNA, 25 bp, Homo sapien
tggctctcactgaaccatagccagg

SEQ ID NO: 1630411 - DNA, 25 bp, Homo sapien
tgcctgctgagtttccggggtatcc

SEQ ID NO: 1630412 - DNA, 25 bp, Homo sapien
ctgagtgttggtcccaaagtttggt

SEQ ID NO: 1630413 - DNA, 25 bp, Homo sapien
acctccaggattgccctggccctgg

SEQ ID NO: 1630414 - DNA, 25 bp, Homo sapien
tgaggattcattccaaagctgcctg

SEQ ID NO: 1630415 - DNA, 25 bp, Homo sapien
cttgagagccaaagatgccatggcc

SEQ ID NO: 1630416 - DNA, 25 bp, Homo sapien
caggagccgcggacagcatctgctc

SEQ ID NO: 1630417 - DNA, 25 bp, Homo sapien
tgtctgccaatctcgtgcccagtgt

SEQ ID NO: 1630418 - DNA, 25 bp, Homo sapien
aatgacatcttctgcctgtctgcca

SEQ ID NO: 1630419 - DNA, 25 bp, Homo sapien
agcatctgctccgtgtcgaatgaca

SEQ ID NO: 1630420 - DNA, 25 bp, Homo sapien
tgtccaagggcctccccaatatttg

SEQ ID NO: 1630421 - DNA, 25 bp, Homo sapien
agggcgtctcccaggccatgtccaa

SEQ ID NO: 1630422 - DNA, 25 bp, Homo sapien
gcctcactgactttagagccagctg

SEQ ID NO: 1630423 - DNA, 25 bp, Homo sapien
tctctggtcccttggccaagggcct

SEQ ID NO: 1630424 - DNA, 25 bp, Homo sapien
cttgccgcccttgctctgcgtctct

SEQ ID NO: 1630425 - DNA, 25 bp, Homo sapien
ccttgccgcccttgctctgcgtctc

SEQ ID NO: 1630426 - DNA, 25 bp, Homo sapien
ttgccgcccttgctctgcgtctctg

SEQ ID NO: 1630427 - DNA, 25 bp, Homo sapien
ctccttccgactccctgtcctccct

SEQ ID NO: 1630428 - DNA, 25 bp, Homo sapien
gacaacggcgacattattctcccag

SEQ ID NO: 1630429 - DNA, 25 bp, Homo sapien
tacaacccccttcagggatttcaga

SEQ ID NO: 1630430 - DNA, 25 bp, Homo sapien
agtttattcacaaatcccagtacaa

SEQ ID NO: 1630431 - DNA, 25 bp, Homo sapien
caggtcatgtcagctgatgtgacaa

SEQ ID NO: 1630432 - DNA, 25 bp, Homo sapien
aaggttgatgaaaggcgtgttgacc

SEQ ID NO: 1630433 - DNA, 25 bp, Homo sapien
ggttgatgaaaggcgtgttgaccga

SEQ ID NO: 1630434 - DNA, 25 bp, Homo sapien
tgatgaaaggcgtgttgaccgaggc

SEQ ID NO: 1630435 - DNA, 25 bp, Homo sapien
cacagggcgggaaggttgatgaaag

SEQ ID NO: 1630436 - DNA, 25 bp, Homo sapien
cttgatggctggaagatccgctttg

SEQ ID NO: 1630437 - DNA, 25 bp, Homo sapien
tggaagatccgctttgatggttgcc

SEQ ID NO: 1630438 - DNA, 25 bp, Homo sapien
cccagaggctaacggcgtggttgtg

SEQ ID NO: 1630439 - DNA, 25 bp, Homo sapien
gctaacggcgtggttgtggcccctc

SEQ ID NO: 1630440 - DNA, 25 bp, Homo sapien
ggcaccttggccaagcttctccact

SEQ ID NO: 1630441 - DNA, 25 bp, Homo sapien
ggttgaccccattatgagcattctg

SEQ ID NO: 1630442 - DNA, 25 bp, Homo sapien
ctccttgctggcttggttgacccca

SEQ ID NO: 1630443 - DNA, 25 bp, Homo sapien
catggttgaccccttggccaagttt

SEQ ID NO: 1630444 - DNA, 25 bp, Homo sapien
tgtggaacccttggaccgctttgtc

SEQ ID NO: 1630445 - DNA, 25 bp, Homo sapien
acccttggaccgctttgtctgcttc

SEQ ID NO: 1630446 - DNA, 25 bp, Homo sapien
ggaacccttggaccgctttgtctgc

SEQ ID NO: 1630447 - DNA, 25 bp, Homo sapien
agtgtggaacccttggaccgctttg

SEQ ID NO: 1630448 - DNA, 25 bp, Homo sapien
tggtgaatgtcgtggccaaactgcc

SEQ ID NO: 1630449 - DNA, 25 bp, Homo sapien
gatggaggccttggaccactctgtc

SEQ ID NO: 1630450 - DNA, 25 bp, Homo sapien
cttccagcctgactaacgccatgat

SEQ ID NO: 1630451 - DNA, 25 bp, Homo sapien
gggtatggtgaactccctggccaaa

SEQ ID NO: 1630452 - DNA, 25 bp, Homo sapien
caacctgaccggcagcatggtggat

SEQ ID NO: 1630453 - DNA, 25 bp, Homo sapien
attgtcgactccctggccaaacttc

SEQ ID NO: 1630454 - DNA, 25 bp, Homo sapien
ccaggcctcattaaccccatggtgg

SEQ ID NO: 1630455 - DNA, 25 bp, Homo sapien
aacctgaccagcagtatggtggacc

SEQ ID NO: 1630456 - DNA, 25 bp, Homo sapien
gatggatcagtttgtctgcctcctt

SEQ ID NO: 1630457 - DNA, 25 bp, Homo sapien
tggaccccatgatggatcagtttgt

SEQ ID NO: 1630458 - DNA, 25 bp, Homo sapien
gccccgtgatggaccccatgatgga

SEQ ID NO: 1630459 - DNA, 25 bp, Homo sapien
ttcccgcctggttggccccgtgatg

SEQ ID NO: 1630460 - DNA, 25 bp, Homo sapien
gcctttgtccaactccttgccggtg

SEQ ID NO: 1630461 - DNA, 25 bp, Homo sapien
tgtggctccccatgttgctaagtcc

SEQ ID NO: 1630462 - DNA, 25 bp, Homo sapien
ccggcatgcgtgattccactgttga

SEQ ID NO: 1630463 - DNA, 25 bp, Homo sapien
tgggcaaccttgtccatgccgtggt

SEQ ID NO: 1630464 - DNA, 25 bp, Homo sapien
ttgctgggaaggtcgggaaggatgc

SEQ ID NO: 1630465 - DNA, 25 bp, Homo sapien
ctgggaaggtcgggaaggatgcaga

SEQ ID NO: 1630466 - DNA, 25 bp, Homo sapien
tgctgggaaggtcgggaaggatgca

SEQ ID NO: 1630467 - DNA, 25 bp, Homo sapien
tgggaaggtcgggaaggatgcagag

SEQ ID NO: 1630468 - DNA, 25 bp, Homo sapien
cacagaagcaaagcacccggttact

SEQ ID NO: 1630469 - DNA, 25 bp, Homo sapien
catgagtttaatgcaggtaaggcac

SEQ ID NO: 1630470 - DNA, 25 bp, Homo sapien
caaaggaaacagaccgacactggcc

SEQ ID NO: 1630471 - DNA, 25 bp, Homo sapien
gtaaggcacttagaatatgggcaca

SEQ ID NO: 1630472 - DNA, 25 bp, Homo sapien
ttgtttgctaaagccaagtagaaaa

SEQ ID NO: 1630473 - DNA, 25 bp, Homo sapien
gatgtttagtgtgcttcaaatacaa

SEQ ID NO: 1630474 - DNA, 25 bp, Homo sapien
gccaagtagaaaacggcaatactag

SEQ ID NO: 1630475 - DNA, 25 bp, Homo sapien
gaaaacggcaatactagatgtttag

SEQ ID NO: 1630476 - DNA, 25 bp, Homo sapien
cagcattggcgcctctgaggaggtt

SEQ ID NO: 1630477 - DNA, 25 bp, Homo sapien
tttccaatgtaaaccatgagccact

SEQ ID NO: 1630478 - DNA, 25 bp, Homo sapien
cacgtcccgggcagcatatggagaa

SEQ ID NO: 1630479 - DNA, 25 bp, Homo sapien
tggcagccagcttcctattgcagga

SEQ ID NO: 1630480 - DNA, 25 bp, Homo sapien
ctgtacccaggcataacaggggtgg

SEQ ID NO: 1630481 - DNA, 25 bp, Homo sapien
taacaggggtggtgcaatcagcaaa

SEQ ID NO: 1630482 - DNA, 25 bp, Homo sapien
tcagcaaagggaaagtggtctgaag

SEQ ID NO: 1630483 - DNA, 25 bp, Homo sapien
ccaggcataacaggggtggtgcaat

SEQ ID NO: 1630484 - DNA, 25 bp, Homo sapien
tgtccgtgcacaccttggctgtttc

SEQ ID NO: 1630485 - DNA, 25 bp, Homo sapien
aaagtcatccacgagcgatttggga

SEQ ID NO: 1630486 - DNA, 25 bp, Homo sapien
ggctgtttcagcaacgcgtcctgca

SEQ ID NO: 1630487 - DNA, 25 bp, Homo sapien
gatggcagggaaacccaacttcttc

SEQ ID NO: 1630488 - DNA, 25 bp, Homo sapien
caaccccggatgtgtctgtcgtgga

SEQ ID NO: 1630489 - DNA, 25 bp, Homo sapien
tagtcatctagacccaggctcatgg

SEQ ID NO: 1630490 - DNA, 25 bp, Homo sapien
taaaacactgtgcaaccctcaggca

SEQ ID NO: 1630491 - DNA, 25 bp, Homo sapien
gaatatggctacagtcaccgggtgg

SEQ ID NO: 1630492 - DNA, 25 bp, Homo sapien
caagccgggttccacttcaggagac

SEQ ID NO: 1630493 - DNA, 25 bp, Homo sapien
gtcccgtatctctgcgccggtcagg

SEQ ID NO: 1630494 - DNA, 25 bp, Homo sapien
cagggcgggttctgatccgggtttg

SEQ ID NO: 1630495 - DNA, 25 bp, Homo sapien
accgcgatggcagcggtagaggccc

SEQ ID NO: 1630496 - DNA, 25 bp, Homo sapien
ggtctaaaccttgtcatgtcccgga

SEQ ID NO: 1630497 - DNA, 25 bp, Homo sapien
tgtggcagacctgataggtctaaac

SEQ ID NO: 1630498 - DNA, 25 bp, Homo sapien
ctgggaaggcggcatctatgacttc

SEQ ID NO: 1630499 - DNA, 25 bp, Homo sapien
ttaagcctcaacctgacccgcagga

SEQ ID NO: 1630500 - DNA, 25 bp, Homo sapien
tgcttgatgtggaaatgacttgggc

SEQ ID NO: 1630501 - DNA, 25 bp, Homo sapien
tcagaaaggagacaccgctgggggg

SEQ ID NO: 1630502 - DNA, 25 bp, Homo sapien
cagaaaggagacaccgctggggggt

SEQ ID NO: 1630503 - DNA, 25 bp, Homo sapien
tggaaatgacttgggcccccttgtg

SEQ ID NO: 1630504 - DNA, 25 bp, Homo sapien
ggttttattaccatcgcccaggaca

SEQ ID NO: 1630505 - DNA, 25 bp, Homo sapien
tccccaaggcaggtttattgaggac

SEQ ID NO: 1630506 - DNA, 25 bp, Homo sapien
cactaatgagagacgctgaggacag

SEQ ID NO: 1630507 - DNA, 25 bp, Homo sapien
tgtctttaacgaagggccctcaggc

SEQ ID NO: 1630508 - DNA, 25 bp, Homo sapien
acaggtggcggctttcccgaggcca

SEQ ID NO: 1630509 - DNA, 25 bp, Homo sapien
cagctgtactccctgtcagagcccc

SEQ ID NO: 1630510 - DNA, 25 bp, Homo sapien
gccaccacaggtggcggctttcccg

SEQ ID NO: 1630511 - DNA, 25 bp, Homo sapien
accacaggtggcggctttcccgagg

SEQ ID NO: 1630512 - DNA, 25 bp, Homo sapien
tccaagtttggggtgccgtgggcta

SEQ ID NO: 1630513 - DNA, 25 bp, Homo sapien
tgccgtgggctacagaagcagatac

SEQ ID NO: 1630514 - DNA, 25 bp, Homo sapien
cctgctgtggcagttgcagggatgc

SEQ ID NO: 1630515 - DNA, 25 bp, Homo sapien
gggatgcttgaaggcagtcgtccct

SEQ ID NO: 1630516 - DNA, 25 bp, Homo sapien
tagtagagttcctggtcccaccagc

SEQ ID NO: 1630517 - DNA, 25 bp, Homo sapien
taatagtagagttcctggtcccacc

SEQ ID NO: 1630518 - DNA, 25 bp, Homo sapien
ctaatagtagagttcctggtcccac

SEQ ID NO: 1630519 - DNA, 25 bp, Homo sapien
aatagtagagttcctggtcccacca

SEQ ID NO: 1630520 - DNA, 25 bp, Homo sapien
ctgggcaacagcgaactccaagctt

SEQ ID NO: 1630521 - DNA, 25 bp, Homo sapien
cttccggatctcatcatagacgaag

SEQ ID NO: 1630522 - DNA, 25 bp, Homo sapien
caacagcgaactccaagcttccgga

SEQ ID NO: 1630523 - DNA, 25 bp, Homo sapien
gcgaactccaagcttccggatctca

SEQ ID NO: 1630524 - DNA, 25 bp, Homo sapien
ggcagtagcacaggaagcagccgat

SEQ ID NO: 1630525 - DNA, 25 bp, Homo sapien
aagcagccgatgcagacctggaaca

SEQ ID NO: 1630526 - DNA, 25 bp, Homo sapien
gcagacctggaacacgatggcgatc

SEQ ID NO: 1630527 - DNA, 25 bp, Homo sapien
gatggcgatcaccaggatcttattc

SEQ ID NO: 1630528 - DNA, 25 bp, Homo sapien
tttgccggctgttctaaaccacagt

SEQ ID NO: 1630529 - DNA, 25 bp, Homo sapien
ggcatttgccggctgttctaaacca

SEQ ID NO: 1630530 - DNA, 25 bp, Homo sapien
catttgccggctgttctaaaccaca

SEQ ID NO: 1630531 - DNA, 25 bp, Homo sapien
ccgctggcatttgccggctgttcta

SEQ ID NO: 1630532 - DNA, 25 bp, Homo sapien
caatgctgatgaagaacacggtgta

SEQ ID NO: 1630533 - DNA, 25 bp, Homo sapien
tcttgcggatgaggacatcggcgat

SEQ ID NO: 1630534 - DNA, 25 bp, Homo sapien
tgtactgctggtacaggcgctgccc

SEQ ID NO: 1630535 - DNA, 25 bp, Homo sapien
aggacatcggcgatctggcacacct

SEQ ID NO: 1630536 - DNA, 25 bp, Homo sapien
gaggcaaagcaacctgcccagggtt

SEQ ID NO: 1630537 - DNA, 25 bp, Homo sapien
catttaatccgctgggtaaccctag

SEQ ID NO: 1630538 - DNA, 25 bp, Homo sapien
actgctccaggtgccgagtgttgca

SEQ ID NO: 1630539 - DNA, 25 bp, Homo sapien
gagaagcagtaccagaccataagtc

SEQ ID NO: 1630540 - DNA, 25 bp, Homo sapien
cctgcagatcttgtaggtggtggtc

SEQ ID NO: 1630541 - DNA, 25 bp, Homo sapien
cgtgaagtagtcagtgaagccagca

SEQ ID NO: 1630542 - DNA, 25 bp, Homo sapien
tggccgtagctgtcctgcagatctt

SEQ ID NO: 1630543 - DNA, 25 bp, Homo sapien
ggccattgccgtgaagtagtcagtg

SEQ ID NO: 1630544 - DNA, 25 bp, Homo sapien
ctccaggctccccggcccacgggca

SEQ ID NO: 1630545 - DNA, 25 bp, Homo sapien
tccaggctccccggcccacgggcac

SEQ ID NO: 1630546 - DNA, 25 bp, Homo sapien
tcacgctttgggttgcgtggacgca

SEQ ID NO: 1630547 - DNA, 25 bp, Homo sapien
gggctcgttgaccaatctgtcacgc

SEQ ID NO: 1630548 - DNA, 25 bp, Homo sapien
caatctgtcacgctttgggttgcgt

SEQ ID NO: 1630549 - DNA, 25 bp, Homo sapien
tgtcactctcggccttttcatatgc

SEQ ID NO: 1630550 - DNA, 25 bp, Homo sapien
tgtagatgaggtagggtgtcagctc

SEQ ID NO: 1630551 - DNA, 25 bp, Homo sapien
gcacgctgacggtgatgtagatgag

SEQ ID NO: 1630552 - DNA, 25 bp, Homo sapien
agttcgatgaagaggatggtgatgc

SEQ ID NO: 1630553 - DNA, 25 bp, Homo sapien
ggatgttcttggtcaatgtgtaggc

SEQ ID NO: 1630554 - DNA, 25 bp, Homo sapien
cttcaggttgtcgaagatcagtcga

SEQ ID NO: 1630555 - DNA, 25 bp, Homo sapien
ttcaggttgtcgaagatcagtcgac

SEQ ID NO: 1630556 - DNA, 25 bp, Homo sapien
gatcatgtcagctgcatttttggca

SEQ ID NO: 1630557 - DNA, 25 bp, Homo sapien
agcgatgcccatggctactccgatg

SEQ ID NO: 1630558 - DNA, 25 bp, Homo sapien
catggctactccgatgtctgccttc

SEQ ID NO: 1630559 - DNA, 25 bp, Homo sapien
ccacgcctgtcacaatggaggcaaa

SEQ ID NO: 1630560 - DNA, 25 bp, Homo sapien
gcctcgaccagttccgatgggtcca

SEQ ID NO: 1630561 - DNA, 25 bp, Homo sapien
cctcgaccagttccgatgggtccat

SEQ ID NO: 1630562 - DNA, 25 bp, Homo sapien
gggtgggtgcgcagggcctcgacca

SEQ ID NO: 1630563 - DNA, 25 bp, Homo sapien
ctggtgcgcgcaaacaccatctcgg

SEQ ID NO: 1630564 - DNA, 25 bp, Homo sapien
gtgatggggtggtcacccgttacca

SEQ ID NO: 1630565 - DNA, 25 bp, Homo sapien
tccactgtctcgctgccttccgaga

SEQ ID NO: 1630566 - DNA, 25 bp, Homo sapien
cacggaggcgggcagcgatgtcctc

SEQ ID NO: 1630567 - DNA, 25 bp, Homo sapien
gggtggtcacccgttaccatgatca

SEQ ID NO: 1630568 - DNA, 25 bp, Homo sapien
tagggggaaccagtggatcactgac

SEQ ID NO: 1630569 - DNA, 25 bp, Homo sapien
gggggaaccagtggatcactgaccc

SEQ ID NO: 1630570 - DNA, 25 bp, Homo sapien
tgtagggggaaccagtggatcactg

SEQ ID NO: 1630571 - DNA, 25 bp, Homo sapien
ctgtagggggaaccagtggatcact

SEQ ID NO: 1630572 - DNA, 25 bp, Homo sapien
tgcggtgcgacacttgagcacagca

SEQ ID NO: 1630573 - DNA, 25 bp, Homo sapien
aagttcatggcctctacgtcgaagg

SEQ ID NO: 1630574 - DNA, 25 bp, Homo sapien
ggtcaatcatggatacaagtcccgc

SEQ ID NO: 1630575 - DNA, 25 bp, Homo sapien
cagaggccgctagatggaaagttca

SEQ ID NO: 1630576 - DNA, 25 bp, Homo sapien
tctcctcccctgcccaggggtctca

SEQ ID NO: 1630577 - DNA, 25 bp, Homo sapien
ctggagtctcctcccctgcccaggg

SEQ ID NO: 1630578 - DNA, 25 bp, Homo sapien
tggagtctcctcccctgcccagggg

SEQ ID NO: 1630579 - DNA, 25 bp, Homo sapien
gagtctcctcccctgcccaggggtc

SEQ ID NO: 1630580 - DNA, 25 bp, Homo sapien
tgcagcgctccagcacgcgctcggg

SEQ ID NO: 1630581 - DNA, 25 bp, Homo sapien
tcatcaccagcaagtgtcgcgggtc

SEQ ID NO: 1630582 - DNA, 25 bp, Homo sapien
tcgcgccactgctcgtccagcggca

SEQ ID NO: 1630583 - DNA, 25 bp, Homo sapien
ggtcctccagcgtatggatggacag

SEQ ID NO: 1630584 - DNA, 25 bp, Homo sapien
cccagcgtcagctccgagaacttga

SEQ ID NO: 1630585 - DNA, 25 bp, Homo sapien
tccgatgcgtctccaatcacgatgc

SEQ ID NO: 1630586 - DNA, 25 bp, Homo sapien
tcgcagacttttgggaagcggtccc

SEQ ID NO: 1630587 - DNA, 25 bp, Homo sapien
ttgagcagcgccgtctccgatgcgt

SEQ ID NO: 1630588 - DNA, 25 bp, Homo sapien
catcctggccggacttgaaggcggc

SEQ ID NO: 1630589 - DNA, 25 bp, Homo sapien
cgccacgtctccgaggactggtcaa

SEQ ID NO: 1630590 - DNA, 25 bp, Homo sapien
tctccgaggactggtcaaacgtctg

SEQ ID NO: 1630591 - DNA, 25 bp, Homo sapien
ttgcacagggtgagcacccggcaca

SEQ ID NO: 1630592 - DNA, 25 bp, Homo sapien
caggttcttgaccacgcagttctta

SEQ ID NO: 1630593 - DNA, 25 bp, Homo sapien
gaccacgcagttcttactggccagg

SEQ ID NO: 1630594 - DNA, 25 bp, Homo sapien
gagagtccctgtcttgtccgagcag

SEQ ID NO: 1630595 - DNA, 25 bp, Homo sapien
gaagtggagcccaatgtctccaccg

SEQ ID NO: 1630596 - DNA, 25 bp, Homo sapien
cgtgtgcaacgtgcttctgcaaaca

SEQ ID NO: 1630597 - DNA, 25 bp, Homo sapien
gtgtgcaacgtgcttctgcaaacac

SEQ ID NO: 1630598 - DNA, 25 bp, Homo sapien
gcgtgtgcaacgtgcttctgcaaac

SEQ ID NO: 1630599 - DNA, 25 bp, Homo sapien
tgcgtgtgcaacgtgcttctgcaaa

SEQ ID NO: 1630600 - DNA, 25 bp, Homo sapien
gatgtccacaaaatgctcgatctcg

SEQ ID NO: 1630601 - DNA, 25 bp, Homo sapien
accatggcccgcaggaaggtgtagc

SEQ ID NO: 1630602 - DNA, 25 bp, Homo sapien
tctcgatagcgatgggtgtcttctc

SEQ ID NO: 1630603 - DNA, 25 bp, Homo sapien
ccagcgatgcgatgcgcccaatgat

SEQ ID NO: 1630604 - DNA, 25 bp, Homo sapien
gcgcgactcagggatagggggcggc

SEQ ID NO: 1630605 - DNA, 25 bp, Homo sapien
gactcagggatagggggcggcagtg

SEQ ID NO: 1630606 - DNA, 25 bp, Homo sapien
ggccaaggcgcgactcagggatagg

SEQ ID NO: 1630607 - DNA, 25 bp, Homo sapien
gccaaggcgcgactcagggataggg

SEQ ID NO: 1630608 - DNA, 25 bp, Homo sapien
tctccagagggctctcgtgcgtgca

SEQ ID NO: 1630609 - DNA, 25 bp, Homo sapien
aagaaggcgatgttgcgggtctcca

SEQ ID NO: 1630610 - DNA, 25 bp, Homo sapien
ggtggagaagaaggcgatgttgcgg

SEQ ID NO: 1630611 - DNA, 25 bp, Homo sapien
cgtgcactcgggtgagcgggtctgt

SEQ ID NO: 1630612 - DNA, 25 bp, Homo sapien
aggtcgcccaccaccagttggtcag

SEQ ID NO: 1630613 - DNA, 25 bp, Homo sapien
ccctgtcagcgaggagttgtccacc

SEQ ID NO: 1630614 - DNA, 25 bp, Homo sapien
tctccatcgcggatgacagtggctt

SEQ ID NO: 1630615 - DNA, 25 bp, Homo sapien
gatgtcggcgggcactctgtcccca

SEQ ID NO: 1630616 - DNA, 25 bp, Homo sapien
caatgagagcgattgccaggtacag

SEQ ID NO: 1630617 - DNA, 25 bp, Homo sapien
tggcacaaggttcttaaagctggcg

SEQ ID NO: 1630618 - DNA, 25 bp, Homo sapien
gaattcctggtagtagccaaagcag

SEQ ID NO: 1630619 - DNA, 25 bp, Homo sapien
agccggtgacgacaaccacagcaat

SEQ ID NO: 1630620 - DNA, 25 bp, Homo sapien
ggcaacccacatgaggcactgcagg

SEQ ID NO: 1630621 - DNA, 25 bp, Homo sapien
gtcgtcggtggtgaggtccccctca

SEQ ID NO: 1630622 - DNA, 25 bp, Homo sapien
tggcaaaggcgatgaggcagatggc

SEQ ID NO: 1630623 - DNA, 25 bp, Homo sapien
ggccagctgcctcgcgaacttgacg

SEQ ID NO: 1630624 - DNA, 25 bp, Homo sapien
gcagtgcgttgggcccatcccgcag

SEQ ID NO: 1630625 - DNA, 25 bp, Homo sapien
tggggtgccccgtggtggccgcagt

SEQ ID NO: 1630626 - DNA, 25 bp, Homo sapien
tggtggccgcagtgcgttgggccca

SEQ ID NO: 1630627 - DNA, 25 bp, Homo sapien
ctggggtgccccgtggtggccgcag

SEQ ID NO: 1630628 - DNA, 25 bp, Homo sapien
gtggcactggtctggtatttctgtt

SEQ ID NO: 1630629 - DNA, 25 bp, Homo sapien
tggtatttctgttccagctccgcca

SEQ ID NO: 1630630 - DNA, 25 bp, Homo sapien
ctggtctggtatttctgttccagct

SEQ ID NO: 1630631 - DNA, 25 bp, Homo sapien
agctccgccactgacagctggtggt

SEQ ID NO: 1630632 - DNA, 25 bp, Homo sapien
cttggcagccatgtccccgccaggg

SEQ ID NO: 1630633 - DNA, 25 bp, Homo sapien
ccaccgagtagagctcatagttctc

SEQ ID NO: 1630634 - DNA, 25 bp, Homo sapien
tccaccgagtagagctcatagttct

SEQ ID NO: 1630635 - DNA, 25 bp, Homo sapien
agctccaccgagtagagctcatagt

SEQ ID NO: 1630636 - DNA, 25 bp, Homo sapien
gtgcccggtgcctgtgctcccaccc

SEQ ID NO: 1630637 - DNA, 25 bp, Homo sapien
ccggtgcctgtgctcccacccaaca

SEQ ID NO: 1630638 - DNA, 25 bp, Homo sapien
ggtgcccggtgcctgtgctcccacc

SEQ ID NO: 1630639 - DNA, 25 bp, Homo sapien
gcccggtgcctgtgctcccacccaa

SEQ ID NO: 1630640 - DNA, 25 bp, Homo sapien
gtctgctgtcacaagaacctgcagg

SEQ ID NO: 1630641 - DNA, 25 bp, Homo sapien
tacagggcgattgcaagagggcttc

SEQ ID NO: 1630642 - DNA, 25 bp, Homo sapien
caggatcattaacaagctcagaacg

SEQ ID NO: 1630643 - DNA, 25 bp, Homo sapien
cctgatgctgaagcccaaagctagc

SEQ ID NO: 1630644 - DNA, 25 bp, Homo sapien
agcaggatggcacaatggcaagtat

SEQ ID NO: 1630645 - DNA, 25 bp, Homo sapien
caagcaggatggcacaatggcaagt

SEQ ID NO: 1630646 - DNA, 25 bp, Homo sapien
aagcaggatggcacaatggcaagta

SEQ ID NO: 1630647 - DNA, 25 bp, Homo sapien
gagcaaatgatcacaatgcagccca

SEQ ID NO: 1630648 - DNA, 25 bp, Homo sapien
gcttttgatcacaatggagcaaatg

SEQ ID NO: 1630649 - DNA, 25 bp, Homo sapien
tggagcaaatgatcacaatgcagcc

SEQ ID NO: 1630650 - DNA, 25 bp, Homo sapien
atggagcaaatgatcacaatgcagc

SEQ ID NO: 1630651 - DNA, 25 bp, Homo sapien
caaaaagtagtctggaattgatctg

SEQ ID NO: 1630652 - DNA, 25 bp, Homo sapien
tctctgattcccaaggaagttggct

SEQ ID NO: 1630653 - DNA, 25 bp, Homo sapien
gctgaatccaaaaagtagtctggaa

SEQ ID NO: 1630654 - DNA, 25 bp, Homo sapien
ttctctgattcccaaggaagttggc

SEQ ID NO: 1630655 - DNA, 25 bp, Homo sapien
cgacagcgagcagtaaatagtctct

SEQ ID NO: 1630656 - DNA, 25 bp, Homo sapien
ttgcattggggcgagcagctgcact

SEQ ID NO: 1630657 - DNA, 25 bp, Homo sapien
gcaggacgcagaagaaggatacgac

SEQ ID NO: 1630658 - DNA, 25 bp, Homo sapien
aggacacaagggcatcagggtgact

SEQ ID NO: 1630659 - DNA, 25 bp, Homo sapien
gtgaccagggacttcaagtccctgg

SEQ ID NO: 1630660 - DNA, 25 bp, Homo sapien
ggtgaccagggacttcaagtccctg

SEQ ID NO: 1630661 - DNA, 25 bp, Homo sapien
tccttgtctggtaggtcagcaccca

SEQ ID NO: 1630662 - DNA, 25 bp, Homo sapien
ggccagcttgtagcctttttggctg

SEQ ID NO: 1630663 - DNA, 25 bp, Homo sapien
tgggcacagtaaccacagtgattcc

SEQ ID NO: 1630664 - DNA, 25 bp, Homo sapien
tatcctggggccatctgaactggga

SEQ ID NO: 1630665 - DNA, 25 bp, Homo sapien
gctgtaccaaaaaggcacaaaccca

SEQ ID NO: 1630666 - DNA, 25 bp, Homo sapien
ggataaagcccacgactttcttgag

SEQ ID NO: 1630667 - DNA, 25 bp, Homo sapien
attaagcggataaagcccacgactt

SEQ ID NO: 1630668 - DNA, 25 bp, Homo sapien
aagcccacgactttcttgagctgct

SEQ ID NO: 1630669 - DNA, 25 bp, Homo sapien
tgggcttggcgacacagagatatcc

SEQ ID NO: 1630670 - DNA, 25 bp, Homo sapien
gcagagattcggtccctgtgcagtg

SEQ ID NO: 1630671 - DNA, 25 bp, Homo sapien
gatcaaaacttagggtgccaggacc

SEQ ID NO: 1630672 - DNA, 25 bp, Homo sapien
gacctaactcttgatgacagcccta

SEQ ID NO: 1630673 - DNA, 25 bp, Homo sapien
tcccagtcagagtggcagttgcctc

SEQ ID NO: 1630674 - DNA, 25 bp, Homo sapien
acagaaatgtcctagctgatgggaa

SEQ ID NO: 1630675 - DNA, 25 bp, Homo sapien
gtagttgtagtcttaaggcctgtgc

SEQ ID NO: 1630676 - DNA, 25 bp, Homo sapien
gaatttatcctagcacatggatcca

SEQ ID NO: 1630677 - DNA, 25 bp, Homo sapien
tcccaaactaagtgaacattagatt

SEQ ID NO: 1630678 - DNA, 25 bp, Homo sapien
cttcacctgctgggattagtttccc

SEQ ID NO: 1630679 - DNA, 25 bp, Homo sapien
ctgggattagtttcccctgtctcag

SEQ ID NO: 1630680 - DNA, 25 bp, Homo sapien
tttcccaaactaagtgaacattaga

SEQ ID NO: 1630681 - DNA, 25 bp, Homo sapien
ggaggacaggttggacacagtttca

SEQ ID NO: 1630682 - DNA, 25 bp, Homo sapien
cacagtagttcctcccatggtgggt

SEQ ID NO: 1630683 - DNA, 25 bp, Homo sapien
gagatagccagccacatacagagca

SEQ ID NO: 1630684 - DNA, 25 bp, Homo sapien
gaagtggcattttagctaagacctg

SEQ ID NO: 1630685 - DNA, 25 bp, Homo sapien
cacgcccagcctcgattatatctta

SEQ ID NO: 1630686 - DNA, 25 bp, Homo sapien
gagtttgtccggttgtttgctcctg

SEQ ID NO: 1630687 - DNA, 25 bp, Homo sapien
tatatcttaataagaacggtctctt

SEQ ID NO: 1630688 - DNA, 25 bp, Homo sapien
tgtcccaccttctgagtttgtccgg

SEQ ID NO: 1630689 - DNA, 25 bp, Homo sapien
catagaaggattcaatgaaggggta

SEQ ID NO: 1630690 - DNA, 25 bp, Homo sapien
gaaggattcaatgaaggggtatggc

SEQ ID NO: 1630691 - DNA, 25 bp, Homo sapien
tagaaggattcaatgaaggggtatg

SEQ ID NO: 1630692 - DNA, 25 bp, Homo sapien
ctcatagaaggattcaatgaagggg

SEQ ID NO: 1630693 - DNA, 25 bp, Homo sapien
catatgggtgacagccgaccagtac

SEQ ID NO: 1630694 - DNA, 25 bp, Homo sapien
ttttatccccgaagaaactggcagc

SEQ ID NO: 1630695 - DNA, 25 bp, Homo sapien
tcatggaaggcgaggtctttgccca

SEQ ID NO: 1630696 - DNA, 25 bp, Homo sapien
gaacttgctcgtggagatgcctggt

SEQ ID NO: 1630697 - DNA, 25 bp, Homo sapien
ctggattgccatcttctgcggcttc

SEQ ID NO: 1630698 - DNA, 25 bp, Homo sapien
gacgtcttcgctggtgcctggattg

SEQ ID NO: 1630699 - DNA, 25 bp, Homo sapien
tcaggcaaggatgacgtcttcgctg

SEQ ID NO: 1630700 - DNA, 25 bp, Homo sapien
tgtgggtgccgcactctgccgccgc

SEQ ID NO: 1630701 - DNA, 25 bp, Homo sapien
acatcttcgagtgcgcctcctgcat

SEQ ID NO: 1630702 - DNA, 25 bp, Homo sapien
cgtctacatcttcgagtgcgcctcc

SEQ ID NO: 1630703 - DNA, 25 bp, Homo sapien
tctacatcttcgagtgcgcctcctg

SEQ ID NO: 1630704 - DNA, 25 bp, Homo sapien
tacatcttcgagtgcgcctcctgca

SEQ ID NO: 1630705 - DNA, 25 bp, Homo sapien
tgctccacctgccttaggtactgca

SEQ ID NO: 1630706 - DNA, 25 bp, Homo sapien
gaaaacgaaaacagcggcggcagag

SEQ ID NO: 1630707 - DNA, 25 bp, Homo sapien
gactgcctgcctgccgaaaacgaaa

SEQ ID NO: 1630708 - DNA, 25 bp, Homo sapien
tccacctgccttaggtactgcagct

SEQ ID NO: 1630709 - DNA, 25 bp, Homo sapien
aagtgtgcagttaatcccagctcgg

SEQ ID NO: 1630710 - DNA, 25 bp, Homo sapien
tgcagttaatcccagctcggcagac

SEQ ID NO: 1630711 - DNA, 25 bp, Homo sapien
ccattccctctatggtgtggtgggg

SEQ ID NO: 1630712 - DNA, 25 bp, Homo sapien
agttaatcccagctcggcagacagc

SEQ ID NO: 1630713 - DNA, 25 bp, Homo sapien
cttagctctgttaccaggctggagt

SEQ ID NO: 1630714 - DNA, 25 bp, Homo sapien
tcttagctctgttaccaggctggag

SEQ ID NO: 1630715 - DNA, 25 bp, Homo sapien
gatggagtcttagctctgttaccag

SEQ ID NO: 1630716 - DNA, 25 bp, Homo sapien
ggagtcttagctctgttaccaggct

SEQ ID NO: 1630717 - DNA, 25 bp, Homo sapien
ggtgacattctgaacctgatggtga

SEQ ID NO: 1630718 - DNA, 25 bp, Homo sapien
tcagggtctagcgtgtgtgtacatc

SEQ ID NO: 1630719 - DNA, 25 bp, Homo sapien
aagaagagttagtcccatgggtgac

SEQ ID NO: 1630720 - DNA, 25 bp, Homo sapien
ggtgtctcacattctagcctgcaca

SEQ ID NO: 1630721 - DNA, 25 bp, Homo sapien
tgacccaaggaagttcatcagcctc

SEQ ID NO: 1630722 - DNA, 25 bp, Homo sapien
gctgccgtcggttccttaactgagg

SEQ ID NO: 1630723 - DNA, 25 bp, Homo sapien
aacacattgttatcttcgccctgcg

SEQ ID NO: 1630724 - DNA, 25 bp, Homo sapien
cgactacaagttccccatcgaggat

SEQ ID NO: 1630725 - DNA, 25 bp, Homo sapien
aaccccagatgagccaagcttggac

SEQ ID NO: 1630726 - DNA, 25 bp, Homo sapien
ttaagcccagcaaaccccagatgag

SEQ ID NO: 1630727 - DNA, 25 bp, Homo sapien
aaaccccagatgagccaagcttgga

SEQ ID NO: 1630728 - DNA, 25 bp, Homo sapien
cccagatgagccaagcttggacagc

SEQ ID NO: 1630729 - DNA, 25 bp, Homo sapien
tatcttgcggccaggtgtcgagtag

SEQ ID NO: 1630730 - DNA, 25 bp, Homo sapien
aataggcaaaggtggaccaggcagc

SEQ ID NO: 1630731 - DNA, 25 bp, Homo sapien
tcgagtagtgccatgggccataccc

SEQ ID NO: 1630732 - DNA, 25 bp, Homo sapien
gagcgactcggcctcagcgaatagg

SEQ ID NO: 1630733 - DNA, 25 bp, Homo sapien
caggaggcgagacaggggttgtgac

SEQ ID NO: 1630734 - DNA, 25 bp, Homo sapien
catccaggaggcgagacaggggttg

SEQ ID NO: 1630735 - DNA, 25 bp, Homo sapien
gacaggggttgtgacgccagactgg

SEQ ID NO: 1630736 - DNA, 25 bp, Homo sapien
ggttgtgacgccagactggacagtt

SEQ ID NO: 1630737 - DNA, 25 bp, Homo sapien
tggaagtagtgaggcctccttccat

SEQ ID NO: 1630738 - DNA, 25 bp, Homo sapien
aagtagtgaggcctccttccatgtg

SEQ ID NO: 1630739 - DNA, 25 bp, Homo sapien
gagtggaagtagtgaggcctccttc

SEQ ID NO: 1630740 - DNA, 25 bp, Homo sapien
gtagtgaggcctccttccatgtgtc

SEQ ID NO: 1630741 - DNA, 25 bp, Homo sapien
ggaacttgctggtgagctgcgctcc

SEQ ID NO: 1630742 - DNA, 25 bp, Homo sapien
ccagagcagaataaacaggaggatc

SEQ ID NO: 1630743 - DNA, 25 bp, Homo sapien
caccacgagcggaaggaaattcggc

SEQ ID NO: 1630744 - DNA, 25 bp, Homo sapien
tccgcagaccaagccaggataggga

SEQ ID NO: 1630745 - DNA, 25 bp, Homo sapien
cttgccctgccgggagtcccatctg

SEQ ID NO: 1630746 - DNA, 25 bp, Homo sapien
ctccagcacgcccttgccctgccgg

SEQ ID NO: 1630747 - DNA, 25 bp, Homo sapien
cgcccttgccctgccgggagtccca

SEQ ID NO: 1630748 - DNA, 25 bp, Homo sapien
gccctgccgggagtcccatctgcac

SEQ ID NO: 1630749 - DNA, 25 bp, Homo sapien
gggcgttacgaaatcgccgtggtca

SEQ ID NO: 1630750 - DNA, 25 bp, Homo sapien
aaatcgccgtggtcattgagtccgc

SEQ ID NO: 1630751 - DNA, 25 bp, Homo sapien
gagtccgcagttttcccggaactca

SEQ ID NO: 1630752 - DNA, 25 bp, Homo sapien
gggctacatagctccgcgccgtcgg

SEQ ID NO: 1630753 - DNA, 25 bp, Homo sapien
gcaaggctcggtctcggattctcac

SEQ ID NO: 1630754 - DNA, 25 bp, Homo sapien
agcacttgttgtctgggttccagta

SEQ ID NO: 1630755 - DNA, 25 bp, Homo sapien
gcccgaagcgttgcaggcagctgct

SEQ ID NO: 1630756 - DNA, 25 bp, Homo sapien
ctgctgcagcacttgttgtctgggt

SEQ ID NO: 1630757 - DNA, 25 bp, Homo sapien
ttccagtattcaaggcggccgcagt

SEQ ID NO: 1630758 - DNA, 25 bp, Homo sapien
agcaacaaggccgtcaggaggcatc

SEQ ID NO: 1630759 - DNA, 25 bp, Homo sapien
cagggccagaagcaacaaggccgtc

SEQ ID NO: 1630760 - DNA, 25 bp, Homo sapien
gccagaagcaacaaggccgtcagga

SEQ ID NO: 1630761 - DNA, 25 bp, Homo sapien
acaaggccgtcaggaggcatcgtcc

SEQ ID NO: 1630762 - DNA, 25 bp, Homo sapien
ccgtgatagcgggacttccaaacac

SEQ ID NO: 1630763 - DNA, 25 bp, Homo sapien
gatagcgggacttccaaacacagcg

SEQ ID NO: 1630764 - DNA, 25 bp, Homo sapien
gggccgtgatagcgggacttccaaa

SEQ ID NO: 1630765 - DNA, 25 bp, Homo sapien
tgatagcgggacttccaaacacagc

SEQ ID NO: 1630766 - DNA, 25 bp, Homo sapien
gtgatgtgggggaacagaattctca

SEQ ID NO: 1630767 - DNA, 25 bp, Homo sapien
cagaagaaaggacgcggtgatgtgg

SEQ ID NO: 1630768 - DNA, 25 bp, Homo sapien
tgtgggggaacagaattctcacgcc

SEQ ID NO: 1630769 - DNA, 25 bp, Homo sapien
gaaatcgggcagaagaaaggacgcg

SEQ ID NO: 1630770 - DNA, 25 bp, Homo sapien
tctagattgcaagaatgcatatccc

SEQ ID NO: 1630771 - DNA, 25 bp, Homo sapien
aatgcatatcccacctctgccgtgt

SEQ ID NO: 1630772 - DNA, 25 bp, Homo sapien
ggactaacagggctgcggatctaga

SEQ ID NO: 1630773 - DNA, 25 bp, Homo sapien
caactgagccggttatcagagaagc

SEQ ID NO: 1630774 - DNA, 25 bp, Homo sapien
ttagaaccgtcattagaagtaaagc

SEQ ID NO: 1630775 - DNA, 25 bp, Homo sapien
aaccgtcattagaagtaaagcaggg

SEQ ID NO: 1630776 - DNA, 25 bp, Homo sapien
catagggttattgtggagaattaga

SEQ ID NO: 1630777 - DNA, 25 bp, Homo sapien
tggagaattagaaccgtcattagaa

SEQ ID NO: 1630778 - DNA, 25 bp, Homo sapien
gagtcagccccatactggctggaga

SEQ ID NO: 1630779 - DNA, 25 bp, Homo sapien
aacagcacctcacatacagtaaact

SEQ ID NO: 1630780 - DNA, 25 bp, Homo sapien
acctttgaatcctaatctccttggg

SEQ ID NO: 1630781 - DNA, 25 bp, Homo sapien
caattcggcaggcacggaggagtca

SEQ ID NO: 1630782 - DNA, 25 bp, Homo sapien
ccaagttcctcagctgaagttgtgg

SEQ ID NO: 1630783 - DNA, 25 bp, Homo sapien
ccttttcgtcacatgtgtgggtgga

SEQ ID NO: 1630784 - DNA, 25 bp, Homo sapien
gggaaatgccaaaccacagcaaaag

SEQ ID NO: 1630785 - DNA, 25 bp, Homo sapien
tgggtcccaagctggccgtgccaag

SEQ ID NO: 1630786 - DNA, 25 bp, Homo sapien
aacacgcagctttattaagacaggg

SEQ ID NO: 1630787 - DNA, 25 bp, Homo sapien
tgaaacacgcagctttattaagaca

SEQ ID NO: 1630788 - DNA, 25 bp, Homo sapien
ggcggtagaagaaggtctccatgct

SEQ ID NO: 1630789 - DNA, 25 bp, Homo sapien
gcggtagaagaaggtctccatgctg

SEQ ID NO: 1630790 - DNA, 25 bp, Homo sapien
aggagaggtcctgccaggaacatct

SEQ ID NO: 1630791 - DNA, 25 bp, Homo sapien
ggagaggtcctgccaggaacatctg

SEQ ID NO: 1630792 - DNA, 25 bp, Homo sapien
gggatggtggccagtatggaacctc

SEQ ID NO: 1630793 - DNA, 25 bp, Homo sapien
gaacaccgatggttcctctctcggg

SEQ ID NO: 1630794 - DNA, 25 bp, Homo sapien
atggtggccagtatggaacctcggg

SEQ ID NO: 1630795 - DNA, 25 bp, Homo sapien
cagtgatcaggggaacaccgatggt

SEQ ID NO: 1630796 - DNA, 25 bp, Homo sapien
agttctgttagaaccctgaggagtg

SEQ ID NO: 1630797 - DNA, 25 bp, Homo sapien
ctgggaataggagcgttgagagttc

SEQ ID NO: 1630798 - DNA, 25 bp, Homo sapien
gaataggagcgttgagagttctgtt

SEQ ID NO: 1630799 - DNA, 25 bp, Homo sapien
gagagttctgttagaaccctgagga

SEQ ID NO: 1630800 - DNA, 25 bp, Homo sapien
gagttctaagacacgacctcagtgg

SEQ ID NO: 1630801 - DNA, 25 bp, Homo sapien
cagaactactcttagggtataagag

SEQ ID NO: 1630802 - DNA, 25 bp, Homo sapien
gcaggagggtgctgaaataactaga

SEQ ID NO: 1630803 - DNA, 25 bp, Homo sapien
tctccagatggagctcagaactact

SEQ ID NO: 1630804 - DNA, 25 bp, Homo sapien
ctgagccaagactgcgcctttgcac

SEQ ID NO: 1630805 - DNA, 25 bp, Homo sapien
gcactgagccaagactgcgcctttg

SEQ ID NO: 1630806 - DNA, 25 bp, Homo sapien
actgagccaagactgcgcctttgca

SEQ ID NO: 1630807 - DNA, 25 bp, Homo sapien
ttgcactgagccaagactgcgcctt

SEQ ID NO: 1630808 - DNA, 25 bp, Homo sapien
aagattcttgggaacgtggttactg

SEQ ID NO: 1630809 - DNA, 25 bp, Homo sapien
agattcttgggaacgtggttactgg

SEQ ID NO: 1630810 - DNA, 25 bp, Homo sapien
ctggggcttagggttaggctcatct

SEQ ID NO: 1630811 - DNA, 25 bp, Homo sapien
gggcttagggttaggctcatctgag

SEQ ID NO: 1630812 - DNA, 25 bp, Homo sapien
ttaggacatgaggagacatagcagg

SEQ ID NO: 1630813 - DNA, 25 bp, Homo sapien
acatgaggagacatagcaggctggt

SEQ ID NO: 1630814 - DNA, 25 bp, Homo sapien
ggagacatagcaggctggtcctgag

SEQ ID NO: 1630815 - DNA, 25 bp, Homo sapien
acatagcaggctggtcctgaggtac

SEQ ID NO: 1630816 - DNA, 25 bp, Homo sapien
tctgggaaatgggccgcagatgcat

SEQ ID NO: 1630817 - DNA, 25 bp, Homo sapien
agttgcagaagccacctcgggtaca

SEQ ID NO: 1630818 - DNA, 25 bp, Homo sapien
gcagaagccacctcgggtacattcc

SEQ ID NO: 1630819 - DNA, 25 bp, Homo sapien
ggttctgggaaatgggccgcagatg

SEQ ID NO: 1630820 - DNA, 25 bp, Homo sapien
cccatctcatactggcgacagcatg

SEQ ID NO: 1630821 - DNA, 25 bp, Homo sapien
ggcgacagcatgactcccggaagtc

SEQ ID NO: 1630822 - DNA, 25 bp, Homo sapien
atactggcgacagcatgactcccgg

SEQ ID NO: 1630823 - DNA, 25 bp, Homo sapien
tgactcccggaagtcagtgacagga

SEQ ID NO: 1630824 - DNA, 25 bp, Homo sapien
acagcctgcccgttgaaccagcggt

SEQ ID NO: 1630825 - DNA, 25 bp, Homo sapien
gaaccagcggttactgagttcagcc

SEQ ID NO: 1630826 - DNA, 25 bp, Homo sapien
cccgttgaaccagcggttactgagt

SEQ ID NO: 1630827 - DNA, 25 bp, Homo sapien
agcctgcccgttgaaccagcggtta

SEQ ID NO: 1630828 - DNA, 25 bp, Homo sapien
tggccaccatcaggcattgaaacgc

SEQ ID NO: 1630829 - DNA, 25 bp, Homo sapien
tcaggcattgaaacgcctccacttc

SEQ ID NO: 1630830 - DNA, 25 bp, Homo sapien
ctacagtggccaccatcaggcattg

SEQ ID NO: 1630831 - DNA, 25 bp, Homo sapien
cattgaaacgcctccacttctgggc

SEQ ID NO: 1630832 - DNA, 25 bp, Homo sapien
cttgacatagacgttgcccacgagg

SEQ ID NO: 1630833 - DNA, 25 bp, Homo sapien
ccaaggttgtcgcacacattcatct

SEQ ID NO: 1630834 - DNA, 25 bp, Homo sapien
atagacgttgcccacgaggtggtcc

SEQ ID NO: 1630835 - DNA, 25 bp, Homo sapien
gtggtccccaaggttgtcgcacaca

SEQ ID NO: 1630836 - DNA, 25 bp, Homo sapien
cccatctgcccctaccaaccctcac

SEQ ID NO: 1630837 - DNA, 25 bp, Homo sapien
gagctcccacaagaaaccccatctg

SEQ ID NO: 1630838 - DNA, 25 bp, Homo sapien
tggaagacggggaggaactcagctg

SEQ ID NO: 1630839 - DNA, 25 bp, Homo sapien
ctcagctgagctcccacaagaaacc

SEQ ID NO: 1630840 - DNA, 25 bp, Homo sapien
gaagctatcatagtgctcctgcacc

SEQ ID NO: 1630841 - DNA, 25 bp, Homo sapien
tgcacctccacgtcactcacatgac

SEQ ID NO: 1630842 - DNA, 25 bp, Homo sapien
tcctgcacctccacgtcactcacat

SEQ ID NO: 1630843 - DNA, 25 bp, Homo sapien
ctcgaagaagctatcatagtgctcc

SEQ ID NO: 1630844 - DNA, 25 bp, Homo sapien
gggctgttcaccttgcccccaggcc

SEQ ID NO: 1630845 - DNA, 25 bp, Homo sapien
tggaatcagagtgtagcctactggg

SEQ ID NO: 1630846 - DNA, 25 bp, Homo sapien
gggcgggcagggtggaatcagagtg

SEQ ID NO: 1630847 - DNA, 25 bp, Homo sapien
gctgttcaccttgcccccaggcctg

SEQ ID NO: 1630848 - DNA, 25 bp, Homo sapien
gctgtgttctgtggattccggtaca

SEQ ID NO: 1630849 - DNA, 25 bp, Homo sapien
tgtgatccgtctgcagtttgggctg

SEQ ID NO: 1630850 - DNA, 25 bp, Homo sapien
agtgtgatccgtctgcagtttgggc

SEQ ID NO: 1630851 - DNA, 25 bp, Homo sapien
gttctgtggattccggtacaggttg

SEQ ID NO: 1630852 - DNA, 25 bp, Homo sapien
gcggggcctgagctcagagggcagg

SEQ ID NO: 1630853 - DNA, 25 bp, Homo sapien
aggggcggggcctgagctcagaggg

SEQ ID NO: 1630854 - DNA, 25 bp, Homo sapien
ctgcacagaatttaaaaggggcggg

SEQ ID NO: 1630855 - DNA, 25 bp, Homo sapien
gggcggggcctgagctcagagggca

SEQ ID NO: 1630856 - DNA, 25 bp, Homo sapien
tggcaaagatgaacagccgccgtgt

SEQ ID NO: 1630857 - DNA, 25 bp, Homo sapien
ccccagcctaagcatcatgagtgca

SEQ ID NO: 1630858 - DNA, 25 bp, Homo sapien
gactggcaaggatgaacagcgggat

SEQ ID NO: 1630859 - DNA, 25 bp, Homo sapien
tcggcgatcctttgcccctaagaaa

SEQ ID NO: 1630860 - DNA, 25 bp, Homo sapien
ggacatggtgacgacggccccagaa

SEQ ID NO: 1630861 - DNA, 25 bp, Homo sapien
cccgaggctccgtgccgggtctcac

SEQ ID NO: 1630862 - DNA, 25 bp, Homo sapien
tcaggaacccggaataggcgggaca

SEQ ID NO: 1630863 - DNA, 25 bp, Homo sapien
gaataggcgggacatggtgacgacg

SEQ ID NO: 1630864 - DNA, 25 bp, Homo sapien
ttgttgtgaagccgggagcaccggt

SEQ ID NO: 1630865 - DNA, 25 bp, Homo sapien
tcggcttgttgtgaagccgggagca

SEQ ID NO: 1630866 - DNA, 25 bp, Homo sapien
tgtcggcttgttgtgaagccgggag

SEQ ID NO: 1630867 - DNA, 25 bp, Homo sapien
gggagcaccggtccccgtgccggca

SEQ ID NO: 1630868 - DNA, 25 bp, Homo sapien
atatcgaagctaaatattcagccat

SEQ ID NO: 1630869 - DNA, 25 bp, Homo sapien
gaatatcgaagctaaatattcagcc

SEQ ID NO: 1630870 - DNA, 25 bp, Homo sapien
cttctcagtcccgaatatcgaagct

SEQ ID NO: 1630871 - DNA, 25 bp, Homo sapien
cagtcccgaatatcgaagctaaata

SEQ ID NO: 1630872 - DNA, 25 bp, Homo sapien
ggcgcttgcgcgtgggaggcgcgcg

SEQ ID NO: 1630873 - DNA, 25 bp, Homo sapien
agggcgcttgcgcgtgggaggcgcg

SEQ ID NO: 1630874 - DNA, 25 bp, Homo sapien
gggcgcttgcgcgtgggaggcgcgc

SEQ ID NO: 1630875 - DNA, 25 bp, Homo sapien
tgacagatgtctggcgctcagctgt

SEQ ID NO: 1630876 - DNA, 25 bp, Homo sapien
tcccatgacagatgtctggcgctca

SEQ ID NO: 1630877 - DNA, 25 bp, Homo sapien
cctcttctgggtgatagtgctcacc

SEQ ID NO: 1630878 - DNA, 25 bp, Homo sapien
ttcctcttctgggtgatagtgctca

SEQ ID NO: 1630879 - DNA, 25 bp, Homo sapien
ggtaggatcggcctagtgcttccat

SEQ ID NO: 1630880 - DNA, 25 bp, Homo sapien
gatttatctggaccaagacgtgtga

SEQ ID NO: 1630881 - DNA, 25 bp, Homo sapien
tgtagatcacgatgctacttcctgg

SEQ ID NO: 1630882 - DNA, 25 bp, Homo sapien
cctgtactggtagtcgtgaattcaa

SEQ ID NO: 1630883 - DNA, 25 bp, Homo sapien
gcaatcacgtgggacagctctggaa

SEQ ID NO: 1630884 - DNA, 25 bp, Homo sapien
tatgtgatcaagctgttcgaccgga

SEQ ID NO: 1630885 - DNA, 25 bp, Homo sapien
gtcaaagcccggaaccaactggatg

SEQ ID NO: 1630886 - DNA, 25 bp, Homo sapien
cacaggcgtttgtctgagggtcaac

SEQ ID NO: 1630887 - DNA, 25 bp, Homo sapien
tagtacccggatgtctttgtagagg

SEQ ID NO: 1630888 - DNA, 25 bp, Homo sapien
gagggctgtctacaccataatttgg

SEQ ID NO: 1630889 - DNA, 25 bp, Homo sapien
gagaggacagtccttggcgcactcg

SEQ ID NO: 1630890 - DNA, 25 bp, Homo sapien
tctatgttatcaaggcagtgtccag

SEQ ID NO: 1630891 - DNA, 25 bp, Homo sapien
gggcggagtcagatcggctttaata

SEQ ID NO: 1630892 - DNA, 25 bp, Homo sapien
gagtcagatcggctttaatagaggg

SEQ ID NO: 1630893 - DNA, 25 bp, Homo sapien
tcggctttaatagagggagcctgag

SEQ ID NO: 1630894 - DNA, 25 bp, Homo sapien
tcagatcggctttaatagagggagc

SEQ ID NO: 1630895 - DNA, 25 bp, Homo sapien
cggtagcgacggtggaactcgcgcg

SEQ ID NO: 1630896 - DNA, 25 bp, Homo sapien
ggacgtcacggcagccggatccacg

SEQ ID NO: 1630897 - DNA, 25 bp, Homo sapien
tcgcgcgcgacgaatccgtgctcat

SEQ ID NO: 1630898 - DNA, 25 bp, Homo sapien
cctgggccgacgctggtgcggcctg

SEQ ID NO: 1630899 - DNA, 25 bp, Homo sapien
gggagggaggcttgagcggccccgc

SEQ ID NO: 1630900 - DNA, 25 bp, Homo sapien
ggagggaggcttgagcggccccgcc

SEQ ID NO: 1630901 - DNA, 25 bp, Homo sapien
cagcaatttcctccggcgagaagtg

SEQ ID NO: 1630902 - DNA, 25 bp, Homo sapien
gcgcgtgcacctccacgtgttcgcc

SEQ ID NO: 1630903 - DNA, 25 bp, Homo sapien
cacgtgttcgcccaccaccttgaca

SEQ ID NO: 1630904 - DNA, 25 bp, Homo sapien
gggcgctcctcgtggcgcgcgtgca

SEQ ID NO: 1630905 - DNA, 25 bp, Homo sapien
ctagcagcaccgaaaagtggccggg

SEQ ID NO: 1630906 - DNA, 25 bp, Homo sapien
cgtctagcagcaccgaaaagtggcc

SEQ ID NO: 1630907 - DNA, 25 bp, Homo sapien
cacgtctagcagcaccgaaaagtgg

SEQ ID NO: 1630908 - DNA, 25 bp, Homo sapien
cttcacgtctagcagcaccgaaaag

SEQ ID NO: 1630909 - DNA, 25 bp, Homo sapien
ccgctgcagtgtgcgggcctcagat

SEQ ID NO: 1630910 - DNA, 25 bp, Homo sapien
ccattgactccggaagcccttcgga

SEQ ID NO: 1630911 - DNA, 25 bp, Homo sapien
gcctcagattcccattgactccgga

SEQ ID NO: 1630912 - DNA, 25 bp, Homo sapien
gaagcccttcggagctgcggactct

SEQ ID NO: 1630913 - DNA, 25 bp, Homo sapien
cagccaagacggctgcacaggcaca

SEQ ID NO: 1630914 - DNA, 25 bp, Homo sapien
tcgccgaagcgctggtcaaagaggc

SEQ ID NO: 1630915 - DNA, 25 bp, Homo sapien
ggcagcgccacgctgggtgcgcgca

SEQ ID NO: 1630916 - DNA, 25 bp, Homo sapien
gcggcgcagccaagacggctgcaca

SEQ ID NO: 1630917 - DNA, 25 bp, Homo sapien
cagacctggcaactgatgcaaccag

SEQ ID NO: 1630918 - DNA, 25 bp, Homo sapien
agaaagaagttagatgaccgttggg

SEQ ID NO: 1630919 - DNA, 25 bp, Homo sapien
gaaagaagttagatgaccgttggga

SEQ ID NO: 1630920 - DNA, 25 bp, Homo sapien
cccctgcaacagaaagaatggtagt

SEQ ID NO: 1630921 - DNA, 25 bp, Homo sapien
cagaaagaatggtagttagaccggg

SEQ ID NO: 1630922 - DNA, 25 bp, Homo sapien
cactgcccctgcaacagaaagaatg

SEQ ID NO: 1630923 - DNA, 25 bp, Homo sapien
gaatagcggttagagagagggcaga

SEQ ID NO: 1630924 - DNA, 25 bp, Homo sapien
tctgagacccggttaggcatccagc

SEQ ID NO: 1630925 - DNA, 25 bp, Homo sapien
tcggcagaaaaggtgaccgaccctc

SEQ ID NO: 1630926 - DNA, 25 bp, Homo sapien
caggtgctaagagcccatagggcag

SEQ ID NO: 1630927 - DNA, 25 bp, Homo sapien
gacgatcccgtgctgcaggtgctaa

SEQ ID NO: 1630928 - DNA, 25 bp, Homo sapien
aagacttctggcaagactgggaccc

SEQ ID NO: 1630929 - DNA, 25 bp, Homo sapien
tccacggaggaagctactagggtca

SEQ ID NO: 1630930 - DNA, 25 bp, Homo sapien
tggatgatggtcaggctatagccca

SEQ ID NO: 1630931 - DNA, 25 bp, Homo sapien
tatagcccacacatgcttgagcagc

SEQ ID NO: 1630932 - DNA, 25 bp, Homo sapien
ttgccgctcagaccaaaaaccttag

SEQ ID NO: 1630933 - DNA, 25 bp, Homo sapien
tgtcctttgccgctcagaccaaaaa

SEQ ID NO: 1630934 - DNA, 25 bp, Homo sapien
gctctgtcctttgccgctcagacca

SEQ ID NO: 1630935 - DNA, 25 bp, Homo sapien
ctttgccgctcagaccaaaaacctt

SEQ ID NO: 1630936 - DNA, 25 bp, Homo sapien
ctggtcaaggcatggaacctgggat

SEQ ID NO: 1630937 - DNA, 25 bp, Homo sapien
tctgggaggccggtcatagtccaat

SEQ ID NO: 1630938 - DNA, 25 bp, Homo sapien
gtctggcagctggttaatttattca

SEQ ID NO: 1630939 - DNA, 25 bp, Homo sapien
gtctgaacaccaactcaatgcccag

SEQ ID NO: 1630940 - DNA, 25 bp, Homo sapien
gatgactttcgttccctggatgccc

SEQ ID NO: 1630941 - DNA, 25 bp, Homo sapien
caaacccgtccctagatagtgccat

SEQ ID NO: 1630942 - DNA, 25 bp, Homo sapien
tccagaagggagtcacaaacccgtc

SEQ ID NO: 1630943 - DNA, 25 bp, Homo sapien
taaatactggtatggcccaagtccc

SEQ ID NO: 1630944 - DNA, 25 bp, Homo sapien
ggcaccctgggagtctaggtcagga

SEQ ID NO: 1630945 - DNA, 25 bp, Homo sapien
cttttctccaagctgacatcctttt

SEQ ID NO: 1630946 - DNA, 25 bp, Homo sapien
cctttttgtagctctgctatgatct

SEQ ID NO: 1630947 - DNA, 25 bp, Homo sapien
ggcaccaaggcaggagttactcctg

SEQ ID NO: 1630948 - DNA, 25 bp, Homo sapien
ctctagtcagctcagtaccgggtgc

SEQ ID NO: 1630949 - DNA, 25 bp, Homo sapien
agacctcctctagtcagctcagtac

SEQ ID NO: 1630950 - DNA, 25 bp, Homo sapien
gagacctcctctagtcagctcagta

SEQ ID NO: 1630951 - DNA, 25 bp, Homo sapien
ctcctctagtcagctcagtaccggg

SEQ ID NO: 1630952 - DNA, 25 bp, Homo sapien
ggagctgccacctggtagccatggt

SEQ ID NO: 1630953 - DNA, 25 bp, Homo sapien
ctggagctgccacctggtagccatg

SEQ ID NO: 1630954 - DNA, 25 bp, Homo sapien
tggtagccatggtgctccagcgggc

SEQ ID NO: 1630955 - DNA, 25 bp, Homo sapien
acctggtagccatggtgctccagcg

SEQ ID NO: 1630956 - DNA, 25 bp, Homo sapien
agggctggggctccagcagaataac

SEQ ID NO: 1630957 - DNA, 25 bp, Homo sapien
ctgagtcctagaggctggagttgga

SEQ ID NO: 1630958 - DNA, 25 bp, Homo sapien
caaactgttccgcagagctctgggt

SEQ ID NO: 1630959 - DNA, 25 bp, Homo sapien
gcagggaggctgagtcctagaggct

SEQ ID NO: 1630960 - DNA, 25 bp, Homo sapien
aagcagggttggttaagggtcatag

SEQ ID NO: 1630961 - DNA, 25 bp, Homo sapien
aagttccctggtcaaaggagaggca

SEQ ID NO: 1630962 - DNA, 25 bp, Homo sapien
agttccctggtcaaaggagaggcag

SEQ ID NO: 1630963 - DNA, 25 bp, Homo sapien
gctgctgcctagagtcaagctgctg

SEQ ID NO: 1630964 - DNA, 25 bp, Homo sapien
caggttagcagtgggacagttgtgc

SEQ ID NO: 1630965 - DNA, 25 bp, Homo sapien
tatctgtactgttgagctgggctcc

SEQ ID NO: 1630966 - DNA, 25 bp, Homo sapien
cagtgggacagttgtgcagggctct

SEQ ID NO: 1630967 - DNA, 25 bp, Homo sapien
tctgtgagccacttgatgtacagtt

SEQ ID NO: 1630968 - DNA, 25 bp, Homo sapien
tgtgagccacttgatgtacagtttc

SEQ ID NO: 1630969 - DNA, 25 bp, Homo sapien
ctgtgagccacttgatgtacagttt

SEQ ID NO: 1630970 - DNA, 25 bp, Homo sapien
aggtatcgggtactctgcaggctgc

SEQ ID NO: 1630971 - DNA, 25 bp, Homo sapien
cccagcggtcagcaggtgctaggcc

SEQ ID NO: 1630972 - DNA, 25 bp, Homo sapien
gtgctaggcctagcccagctcgaat

SEQ ID NO: 1630973 - DNA, 25 bp, Homo sapien
ccagctcgaatcagggcctggtagg

SEQ ID NO: 1630974 - DNA, 25 bp, Homo sapien
tggtgggcatgtcaccgcagatcag

SEQ ID NO: 1630975 - DNA, 25 bp, Homo sapien
gtggtgggcatgtcaccgcagatca

SEQ ID NO: 1630976 - DNA, 25 bp, Homo sapien
tgaagtggcagccatgggtgtagtt

SEQ ID NO: 1630977 - DNA, 25 bp, Homo sapien
aagtggcagccatgggtgtagttca

SEQ ID NO: 1630978 - DNA, 25 bp, Homo sapien
cagccatgggtgtagttcagggggc

SEQ ID NO: 1630979 - DNA, 25 bp, Homo sapien
catgggtgtagttcagggggcgggg

SEQ ID NO: 1630980 - DNA, 25 bp, Homo sapien
tccccaggggtagcccttctgctgc

SEQ ID NO: 1630981 - DNA, 25 bp, Homo sapien
ctccccaggggtagcccttctgctg

SEQ ID NO: 1630982 - DNA, 25 bp, Homo sapien
cctccccaggggtagcccttctgct

SEQ ID NO: 1630983 - DNA, 25 bp, Homo sapien
gcctccccaggggtagcccttctgc

SEQ ID NO: 1630984 - DNA, 25 bp, Homo sapien
ctggtgagccgacggctgctggaca

SEQ ID NO: 1630985 - DNA, 25 bp, Homo sapien
gtgagccgacggctgctggacaggg

SEQ ID NO: 1630986 - DNA, 25 bp, Homo sapien
ccctggtgagccgacggctgctgga

SEQ ID NO: 1630987 - DNA, 25 bp, Homo sapien
ctgtggagcccaagggccctggtga

SEQ ID NO: 1630988 - DNA, 25 bp, Homo sapien
ctgcacccgccaccagacaggaaaa

SEQ ID NO: 1630989 - DNA, 25 bp, Homo sapien
cgcagccagcgctggcgtaggaggc

SEQ ID NO: 1630990 - DNA, 25 bp, Homo sapien
tccaggtggcccactttagccaggc

SEQ ID NO: 1630991 - DNA, 25 bp, Homo sapien
caggtggcccactttagccaggcct

SEQ ID NO: 1630992 - DNA, 25 bp, Homo sapien
gtaggaggcgcctgtgctccaggtg

SEQ ID NO: 1630993 - DNA, 25 bp, Homo sapien
cactgtgagctcgccagtgggcctg

SEQ ID NO: 1630994 - DNA, 25 bp, Homo sapien
cacttggtctcggtgggtgcagcac

SEQ ID NO: 1630995 - DNA, 25 bp, Homo sapien
tcctcacttggtctcggtgggtgca

SEQ ID NO: 1630996 - DNA, 25 bp, Homo sapien
ctgtgagctcgccagtgggcctgca

SEQ ID NO: 1630997 - DNA, 25 bp, Homo sapien
agccccgacagatctgcagagggac

SEQ ID NO: 1630998 - DNA, 25 bp, Homo sapien
ccacacaggctcaaagagaaggcac

SEQ ID NO: 1630999 - DNA, 25 bp, Homo sapien
aagagaaggcacagccccgacagat

SEQ ID NO: 1631000 - DNA, 25 bp, Homo sapien
cacacaggctcaaagagaaggcaca

SEQ ID NO: 1631001 - DNA, 25 bp, Homo sapien
ggcaggaggacagcaggccactcac

SEQ ID NO: 1631002 - DNA, 25 bp, Homo sapien
gggcaggaggacagcaggccactca

SEQ ID NO: 1631003 - DNA, 25 bp, Homo sapien
tgggcaggaggacagcaggccactc

SEQ ID NO: 1631004 - DNA, 25 bp, Homo sapien
ctgggcaggaggacagcaggccact

SEQ ID NO: 1631005 - DNA, 25 bp, Homo sapien
ccaccacgtgccagggcaggcaatc

SEQ ID NO: 1631006 - DNA, 25 bp, Homo sapien
accacgtgccagggcaggcaatctg

SEQ ID NO: 1631007 - DNA, 25 bp, Homo sapien
caccacgtgccagggcaggcaatct

SEQ ID NO: 1631008 - DNA, 25 bp, Homo sapien
ccacgtgccagggcaggcaatctgc

SEQ ID NO: 1631009 - DNA, 25 bp, Homo sapien
ttccagtggggggatcgccccagca

SEQ ID NO: 1631010 - DNA, 25 bp, Homo sapien
cagaggaaagactgatcccaggtca

SEQ ID NO: 1631011 - DNA, 25 bp, Homo sapien
caggcctacagggcattgcacacac

SEQ ID NO: 1631012 - DNA, 25 bp, Homo sapien
agaagggctccatgccgggtgctgg

SEQ ID NO: 1631013 - DNA, 25 bp, Homo sapien
ttgtcttccgtgggagggccaacag

SEQ ID NO: 1631014 - DNA, 25 bp, Homo sapien
tgtcttccgtgggagggccaacagg

SEQ ID NO: 1631015 - DNA, 25 bp, Homo sapien
gtcttccgtgggagggccaacagga

SEQ ID NO: 1631016 - DNA, 25 bp, Homo sapien
cttgtcttccgtgggagggccaaca

SEQ ID NO: 1631017 - DNA, 25 bp, Homo sapien
aaggtcagccagtagcacatctgtc

SEQ ID NO: 1631018 - DNA, 25 bp, Homo sapien
gttccaggggccttcggctgctgca

SEQ ID NO: 1631019 - DNA, 25 bp, Homo sapien
gcacagtcattttgtgacccatcca

SEQ ID NO: 1631020 - DNA, 25 bp, Homo sapien
cattttgtgacccatccacaggagg

SEQ ID NO: 1631021 - DNA, 25 bp, Homo sapien
aggggcggggcagtacaggcctgag

SEQ ID NO: 1631022 - DNA, 25 bp, Homo sapien
gggcagtacaggcctgagacgaggg

SEQ ID NO: 1631023 - DNA, 25 bp, Homo sapien
ggcggggcagtacaggcctgagacg

SEQ ID NO: 1631024 - DNA, 25 bp, Homo sapien
cggggcagtacaggcctgagacgag

SEQ ID NO: 1631025 - DNA, 25 bp, Homo sapien
gatgcccgttaccagccccggtggc

SEQ ID NO: 1631026 - DNA, 25 bp, Homo sapien
tccacaagggggatgcccgttacca

SEQ ID NO: 1631027 - DNA, 25 bp, Homo sapien
gccccggtggccacaggctactcag

SEQ ID NO: 1631028 - DNA, 25 bp, Homo sapien
gggagctgctctcataggtgcagtc

SEQ ID NO: 1631029 - DNA, 25 bp, Homo sapien
acttgggaggctctcctgatctgtg

SEQ ID NO: 1631030 - DNA, 25 bp, Homo sapien
gcctgcaactggtccagagatgcca

SEQ ID NO: 1631031 - DNA, 25 bp, Homo sapien
tggcctgcaactggtccagagatgc

SEQ ID NO: 1631032 - DNA, 25 bp, Homo sapien
tctggcctgcaactggtccagagat

SEQ ID NO: 1631033 - DNA, 25 bp, Homo sapien
ctggcctgcaactggtccagagatg

SEQ ID NO: 1631034 - DNA, 25 bp, Homo sapien
aacgctgatatgtgggcccggcaga

SEQ ID NO: 1631035 - DNA, 25 bp, Homo sapien
acgaacgctgatatgtgggcccggc

SEQ ID NO: 1631036 - DNA, 25 bp, Homo sapien
catgcacgaacgctgatatgtgggc

SEQ ID NO: 1631037 - DNA, 25 bp, Homo sapien
cgtcatgcacgaacgctgatatgtg

SEQ ID NO: 1631038 - DNA, 25 bp, Homo sapien
tgctcagcccagtcttgtggtgtgc

SEQ ID NO: 1631039 - DNA, 25 bp, Homo sapien
gaccccgctggtcatgcagttgcaa

SEQ ID NO: 1631040 - DNA, 25 bp, Homo sapien
tggtcatgcagttgcaagtcacccc

SEQ ID NO: 1631041 - DNA, 25 bp, Homo sapien
agcccagtcttgtggtgtgcgaccc

SEQ ID NO: 1631042 - DNA, 25 bp, Homo sapien
cgcctgcaggcacgggggtgctgcc

SEQ ID NO: 1631043 - DNA, 25 bp, Homo sapien
taaagaaggcgcctgcaggcacggg

SEQ ID NO: 1631044 - DNA, 25 bp, Homo sapien
gaaggcgcctgcaggcacgggggtg

SEQ ID NO: 1631045 - DNA, 25 bp, Homo sapien
ctaaagaaggcgcctgcaggcacgg

SEQ ID NO: 1631046 - DNA, 25 bp, Homo sapien
agcggttagagcagaacaacgcggt

SEQ ID NO: 1631047 - DNA, 25 bp, Homo sapien
tagagcagaacaacgcggtgggagt

SEQ ID NO: 1631048 - DNA, 25 bp, Homo sapien
agaacaacgcggtgggagtcgatta

SEQ ID NO: 1631049 - DNA, 25 bp, Homo sapien
gcagcggttagagcagaacaacgcg

SEQ ID NO: 1631050 - DNA, 25 bp, Homo sapien
ctgcatggcagagccgtggcccagc

SEQ ID NO: 1631051 - DNA, 25 bp, Homo sapien
agagcgctgtctgcccctcagagtt

SEQ ID NO: 1631052 - DNA, 25 bp, Homo sapien
gtctgcccctcagagttctccccgt

SEQ ID NO: 1631053 - DNA, 25 bp, Homo sapien
ccgagaggaagagcgctgtctgccc

SEQ ID NO: 1631054 - DNA, 25 bp, Homo sapien
cacctgggtgtctagatccctcttg

SEQ ID NO: 1631055 - DNA, 25 bp, Homo sapien
gggtgtctagatccctcttggagcc

SEQ ID NO: 1631056 - DNA, 25 bp, Homo sapien
cctgggtgtctagatccctcttgga

SEQ ID NO: 1631057 - DNA, 25 bp, Homo sapien
tgtctagatccctcttggagcccag

SEQ ID NO: 1631058 - DNA, 25 bp, Homo sapien
atctgtgggctgcggctcagtcggc

SEQ ID NO: 1631059 - DNA, 25 bp, Homo sapien
ctgtgggctgcggctcagtcggctc

SEQ ID NO: 1631060 - DNA, 25 bp, Homo sapien
ctgcgagggcatctgtgggctgcgg

SEQ ID NO: 1631061 - DNA, 25 bp, Homo sapien
gcgagggcatctgtgggctgcggct

SEQ ID NO: 1631062 - DNA, 25 bp, Homo sapien
cgttgggctagatagtggtcgccac

SEQ ID NO: 1631063 - DNA, 25 bp, Homo sapien
tccgaggtgcttgagcaccagtggc

SEQ ID NO: 1631064 - DNA, 25 bp, Homo sapien
gatccggccggctgtatgagcggga

SEQ ID NO: 1631065 - DNA, 25 bp, Homo sapien
tgtatgagcgggaatccgaggtgct

SEQ ID NO: 1631066 - DNA, 25 bp, Homo sapien
cgggaatccgaggtgcttgagcacc

SEQ ID NO: 1631067 - DNA, 25 bp, Homo sapien
ggccagacccaacccaggatggtct

SEQ ID NO: 1631068 - DNA, 25 bp, Homo sapien
agtcactggccagacccaacccagg

SEQ ID NO: 1631069 - DNA, 25 bp, Homo sapien
tgtgcccttcctttaggcatcccct

SEQ ID NO: 1631070 - DNA, 25 bp, Homo sapien
actggccagacccaacccaggatgg

SEQ ID NO: 1631071 - DNA, 25 bp, Homo sapien
tgagcccttccccaaggaggcggcg

SEQ ID NO: 1631072 - DNA, 25 bp, Homo sapien
aactgcaaaacccctagcttgggct

SEQ ID NO: 1631073 - DNA, 25 bp, Homo sapien
aggaggcggcgtcagtgcaggacag

SEQ ID NO: 1631074 - DNA, 25 bp, Homo sapien
tctcttgaactgcaaaacccctagc

SEQ ID NO: 1631075 - DNA, 25 bp, Homo sapien
cagcacctaaggacttttattgacc

SEQ ID NO: 1631076 - DNA, 25 bp, Homo sapien
gcacctaaggacttttattgaccac

SEQ ID NO: 1631077 - DNA, 25 bp, Homo sapien
acctaaggacttttattgaccacat

SEQ ID NO: 1631078 - DNA, 25 bp, Homo sapien
ttattgaccacatgaccccctcagg

SEQ ID NO: 1631079 - DNA, 25 bp, Homo sapien
gggtatccttcggcatcctggcagc

SEQ ID NO: 1631080 - DNA, 25 bp, Homo sapien
ctgagcagctcctgttccctgcggg

SEQ ID NO: 1631081 - DNA, 25 bp, Homo sapien
tgagcagctcctgttccctgcgggc

SEQ ID NO: 1631082 - DNA, 25 bp, Homo sapien
agcagctcctgttccctgcgggcac

SEQ ID NO: 1631083 - DNA, 25 bp, Homo sapien
gagcagctcctgttccctgcgggca

SEQ ID NO: 1631084 - DNA, 25 bp, Homo sapien
cctgaagcacgctccggttctcctg

SEQ ID NO: 1631085 - DNA, 25 bp, Homo sapien
tggacttatacactacatagccggc

SEQ ID NO: 1631086 - DNA, 25 bp, Homo sapien
caggtaggggattacctcctccaag

SEQ ID NO: 1631087 - DNA, 25 bp, Homo sapien
ggagccatagggaatggacttatac

SEQ ID NO: 1631088 - DNA, 25 bp, Homo sapien
ctgcagggagagtgggttttgtttt

SEQ ID NO: 1631089 - DNA, 25 bp, Homo sapien
gcagattaagtgagttggataaaat

SEQ ID NO: 1631090 - DNA, 25 bp, Homo sapien
tggcagattaagtgagttggataaa

SEQ ID NO: 1631091 - DNA, 25 bp, Homo sapien
ggcagattaagtgagttggataaaa

SEQ ID NO: 1631092 - DNA, 25 bp, Homo sapien
tatttgcagctcaaatttgtgccag

SEQ ID NO: 1631093 - DNA, 25 bp, Homo sapien
taattacctggtgtcaggccctgag

SEQ ID NO: 1631094 - DNA, 25 bp, Homo sapien
ggaatgacagatctctctggaagga

SEQ ID NO: 1631095 - DNA, 25 bp, Homo sapien
agcagaaatgacagacggcagacac

SEQ ID NO: 1631096 - DNA, 25 bp, Homo sapien
gtcacacatgcccagaagttgtccg

SEQ ID NO: 1631097 - DNA, 25 bp, Homo sapien
tgctagagagacgtggtcacacatg

SEQ ID NO: 1631098 - DNA, 25 bp, Homo sapien
tgtccgaaacagacagtcccatcca

SEQ ID NO: 1631099 - DNA, 25 bp, Homo sapien
ccagtgctagagagacgtggtcaca

SEQ ID NO: 1631100 - DNA, 25 bp, Homo sapien
tatgcacccatatggcggctccagt

SEQ ID NO: 1631101 - DNA, 25 bp, Homo sapien
tacagcttaaagtcagccactatgc

SEQ ID NO: 1631102 - DNA, 25 bp, Homo sapien
agaaaaggccacatcatcagtccag

SEQ ID NO: 1631103 - DNA, 25 bp, Homo sapien
gactgtggctgcatctacagcttaa

SEQ ID NO: 1631104 - DNA, 25 bp, Homo sapien
tttgtgggcacctatttcccgccca

SEQ ID NO: 1631105 - DNA, 25 bp, Homo sapien
tctggcatttgagcaaaggagagga

SEQ ID NO: 1631106 - DNA, 25 bp, Homo sapien
tgggcacctatttcccgcccatccc

SEQ ID NO: 1631107 - DNA, 25 bp, Homo sapien
tctgtccatctctggcatttgagca

SEQ ID NO: 1631108 - DNA, 25 bp, Homo sapien
tgggaagccaccatgaggtggcaca

SEQ ID NO: 1631109 - DNA, 25 bp, Homo sapien
gcttggttgcctggcgaacagattc

SEQ ID NO: 1631110 - DNA, 25 bp, Homo sapien
acagattcctcattgtgggaagcca

SEQ ID NO: 1631111 - DNA, 25 bp, Homo sapien
ccacgtgcgtcagcatcagttccag

SEQ ID NO: 1631112 - DNA, 25 bp, Homo sapien
gcaaggggtctctggaaccagtact

SEQ ID NO: 1631113 - DNA, 25 bp, Homo sapien
caaggggtctctggaaccagtactc

SEQ ID NO: 1631114 - DNA, 25 bp, Homo sapien
ccttgtccagatatgcacctcgtac

SEQ ID NO: 1631115 - DNA, 25 bp, Homo sapien
cgtaccagcttcactccgaaggcca

SEQ ID NO: 1631116 - DNA, 25 bp, Homo sapien
tggcctcatagtcaggctgagtggg

SEQ ID NO: 1631117 - DNA, 25 bp, Homo sapien
ctgggccaccgctctctccttgtcc

SEQ ID NO: 1631118 - DNA, 25 bp, Homo sapien
cacgcaggcaggttctggtaggtca

SEQ ID NO: 1631119 - DNA, 25 bp, Homo sapien
ctatagggcacgcaggcaggttctg

SEQ ID NO: 1631120 - DNA, 25 bp, Homo sapien
aggttctggtaggtcagggtgtggg

SEQ ID NO: 1631121 - DNA, 25 bp, Homo sapien
gggcacgcaggcaggttctggtagg

SEQ ID NO: 1631122 - DNA, 25 bp, Homo sapien
acaggcctggtaggtgttccacacc

SEQ ID NO: 1631123 - DNA, 25 bp, Homo sapien
caggcctggtaggtgttccacaccc

SEQ ID NO: 1631124 - DNA, 25 bp, Homo sapien
gtgaggtgtactccgcatccaccag

SEQ ID NO: 1631125 - DNA, 25 bp, Homo sapien
atccaccaggagccgcacgtgctgg

SEQ ID NO: 1631126 - DNA, 25 bp, Homo sapien
accagcagcgagagcgcagggttca

SEQ ID NO: 1631127 - DNA, 25 bp, Homo sapien
gggttcagtgaggtgtactccgcat

SEQ ID NO: 1631128 - DNA, 25 bp, Homo sapien
tgatggcgacagagacgacggtcag

SEQ ID NO: 1631129 - DNA, 25 bp, Homo sapien
gatggcgacagagacgacggtcagg

SEQ ID NO: 1631130 - DNA, 25 bp, Homo sapien
ctgatggcgacagagacgacggtca

SEQ ID NO: 1631131 - DNA, 25 bp, Homo sapien
ccggaggtgctggttccagcaggag

SEQ ID NO: 1631132 - DNA, 25 bp, Homo sapien
ggcccggaggtgctggttccagcag

SEQ ID NO: 1631133 - DNA, 25 bp, Homo sapien
cccggaggtgctggttccagcagga

SEQ ID NO: 1631134 - DNA, 25 bp, Homo sapien
gcccggaggtgctggttccagcagg

SEQ ID NO: 1631135 - DNA, 25 bp, Homo sapien
tggttctgctcagcattgaggcagg

SEQ ID NO: 1631136 - DNA, 25 bp, Homo sapien
ctggttctgctcagcattgaggcag

SEQ ID NO: 1631137 - DNA, 25 bp, Homo sapien
ggttctgctcagcattgaggcagga

SEQ ID NO: 1631138 - DNA, 25 bp, Homo sapien
tgttacgtactgacttttgttttgc

SEQ ID NO: 1631139 - DNA, 25 bp, Homo sapien
tttgttttgctgagacggggtcttg

SEQ ID NO: 1631140 - DNA, 25 bp, Homo sapien
tgagacggggtcttgctgtgttgcc

SEQ ID NO: 1631141 - DNA, 25 bp, Homo sapien
cgaggtcagggattttgccttcatg

SEQ ID NO: 1631142 - DNA, 25 bp, Homo sapien
tgcaagtaagtgcctcgaggtcagg

SEQ ID NO: 1631143 - DNA, 25 bp, Homo sapien
ttcatgcttcctcggcccctagcac

SEQ ID NO: 1631144 - DNA, 25 bp, Homo sapien
ttattgtctcttgcccctgacttgc

SEQ ID NO: 1631145 - DNA, 25 bp, Homo sapien
tgcaaccttccgcatggtggggaga

SEQ ID NO: 1631146 - DNA, 25 bp, Homo sapien
gctgcaaccttccgcatggtgggga

SEQ ID NO: 1631147 - DNA, 25 bp, Homo sapien
agctgcaaccttccgcatggtgggg

SEQ ID NO: 1631148 - DNA, 25 bp, Homo sapien
aagctgcaaccttccgcatggtggg

SEQ ID NO: 1631149 - DNA, 25 bp, Homo sapien
ttctgacccacgaggctagctcctt

SEQ ID NO: 1631150 - DNA, 25 bp, Homo sapien
ggctcctggccttctgacccacgag

SEQ ID NO: 1631151 - DNA, 25 bp, Homo sapien
ggccttctgacccacgaggctagct

SEQ ID NO: 1631152 - DNA, 25 bp, Homo sapien
gagtccatagcttcagccagcctct

SEQ ID NO: 1631153 - DNA, 25 bp, Homo sapien
tgaggggagcccgatgggcagccgc

SEQ ID NO: 1631154 - DNA, 25 bp, Homo sapien
ggtggtgaggggagcccgatgggca

SEQ ID NO: 1631155 - DNA, 25 bp, Homo sapien
gagcccgatgggcagccgcgccctc

SEQ ID NO: 1631156 - DNA, 25 bp, Homo sapien
ctgaaatggggtggtaggcggggtg

SEQ ID NO: 1631157 - DNA, 25 bp, Homo sapien
gccgagtactggtcagcgccgtcac

SEQ ID NO: 1631158 - DNA, 25 bp, Homo sapien
agagccgagtactggtcagcgccgt

SEQ ID NO: 1631159 - DNA, 25 bp, Homo sapien
agccgagtactggtcagcgccgtca

SEQ ID NO: 1631160 - DNA, 25 bp, Homo sapien
acagagccgagtactggtcagcgcc

SEQ ID NO: 1631161 - DNA, 25 bp, Homo sapien
acacaccgcagcatagcaccgaggt

SEQ ID NO: 1631162 - DNA, 25 bp, Homo sapien
gaggttcccctcataccacgcctca

SEQ ID NO: 1631163 - DNA, 25 bp, Homo sapien
acaccgcagcatagcaccgaggttc

SEQ ID NO: 1631164 - DNA, 25 bp, Homo sapien
gcatagcaccgaggttcccctcata

SEQ ID NO: 1631165 - DNA, 25 bp, Homo sapien
tgtcagggcccgaacagcaaagccc

SEQ ID NO: 1631166 - DNA, 25 bp, Homo sapien
gtgtcagggcccgaacagcaaagcc

SEQ ID NO: 1631167 - DNA, 25 bp, Homo sapien
cagggcccgaacagcaaagcccctt

SEQ ID NO: 1631168 - DNA, 25 bp, Homo sapien
caggtgtcagggcccgaacagcaaa

SEQ ID NO: 1631169 - DNA, 25 bp, Homo sapien
aaactgcccatagacggatgctcgg

SEQ ID NO: 1631170 - DNA, 25 bp, Homo sapien
tagacggatgctcggagaaatgcgc

SEQ ID NO: 1631171 - DNA, 25 bp, Homo sapien
tgctgtctcaccagccacaaactgc

SEQ ID NO: 1631172 - DNA, 25 bp, Homo sapien
agcagtggtcggaggctgagggtcc

SEQ ID NO: 1631173 - DNA, 25 bp, Homo sapien
gccgggagcccaggagtcgccgaga

SEQ ID NO: 1631174 - DNA, 25 bp, Homo sapien
agccgggagcccaggagtcgccgag

SEQ ID NO: 1631175 - DNA, 25 bp, Homo sapien
ccgggagcccaggagtcgccgagac

SEQ ID NO: 1631176 - DNA, 25 bp, Homo sapien
gcaaggcccgtgtcagctctcctgt

SEQ ID NO: 1631177 - DNA, 25 bp, Homo sapien
tcctgtgcccttaaggtggaaggcc

SEQ ID NO: 1631178 - DNA, 25 bp, Homo sapien
caacagcccgtgagtgacgagtggg

SEQ ID NO: 1631179 - DNA, 25 bp, Homo sapien
gtggaaggccccgccatcaaagctc

SEQ ID NO: 1631180 - DNA, 25 bp, Homo sapien
agagcacgtaacaggtccggagcat

SEQ ID NO: 1631181 - DNA, 25 bp, Homo sapien
ggaacagagcacgtaacaggtccgg

SEQ ID NO: 1631182 - DNA, 25 bp, Homo sapien
aacagagcacgtaacaggtccggag

SEQ ID NO: 1631183 - DNA, 25 bp, Homo sapien
ttgggaacagagcacgtaacaggtc

SEQ ID NO: 1631184 - DNA, 25 bp, Homo sapien
agttcaccaactgccccttgcccag

SEQ ID NO: 1631185 - DNA, 25 bp, Homo sapien
gcaagttcaccaactgccccttgcc

SEQ ID NO: 1631186 - DNA, 25 bp, Homo sapien
cagcaagttcaccaactgccccttg

SEQ ID NO: 1631187 - DNA, 25 bp, Homo sapien
gaggcagcaagttcaccaactgccc

SEQ ID NO: 1631188 - DNA, 25 bp, Homo sapien
tgaaaatacggttctcacgtttgta

SEQ ID NO: 1631189 - DNA, 25 bp, Homo sapien
aattggaaacgctgtagtgttattg

SEQ ID NO: 1631190 - DNA, 25 bp, Homo sapien
gaaacgctgtagtgttattgaatac

SEQ ID NO: 1631191 - DNA, 25 bp, Homo sapien
ggaggccaagaccgaggagtttgag

SEQ ID NO: 1631192 - DNA, 25 bp, Homo sapien
ctggtcactggggaatcctgagtgc

SEQ ID NO: 1631193 - DNA, 25 bp, Homo sapien
tggtcactggggaatcctgagtgcc

SEQ ID NO: 1631194 - DNA, 25 bp, Homo sapien
atctgctcacctctgcctcccaagg

SEQ ID NO: 1631195 - DNA, 25 bp, Homo sapien
ctgctcacctctgcctcccaaggtg

SEQ ID NO: 1631196 - DNA, 25 bp, Homo sapien
ctgaggtgatctgctcacctctgcc

SEQ ID NO: 1631197 - DNA, 25 bp, Homo sapien
tgatctgctcacctctgcctcccaa

SEQ ID NO: 1631198 - DNA, 25 bp, Homo sapien
tgcactccaacctggactacagagt

SEQ ID NO: 1631199 - DNA, 25 bp, Homo sapien
gatgcagtgagccgaaataacgcca

SEQ ID NO: 1631200 - DNA, 25 bp, Homo sapien
ctccaacctggactacagagtgaga

SEQ ID NO: 1631201 - DNA, 25 bp, Homo sapien
atgcagtgagccgaaataacgccac

SEQ ID NO: 1631202 - DNA, 25 bp, Homo sapien
gagacgacgtttacaatctgccctg

SEQ ID NO: 1631203 - DNA, 25 bp, Homo sapien
gaccagtggagtgtaaattcctgca

SEQ ID NO: 1631204 - DNA, 25 bp, Homo sapien
tcatgaagcacttagggaccctcag

SEQ ID NO: 1631205 - DNA, 25 bp, Homo sapien
tatggagctcacctaaccagctcgg

SEQ ID NO: 1631206 - DNA, 25 bp, Homo sapien
cctcagctcgaagggcagagaatcg

SEQ ID NO: 1631207 - DNA, 25 bp, Homo sapien
tcccctcagctcgaagggcagagaa

SEQ ID NO: 1631208 - DNA, 25 bp, Homo sapien
tccagagtgtccaagtctccggcca

SEQ ID NO: 1631209 - DNA, 25 bp, Homo sapien
cagatgtcccctcagctcgaagggc

SEQ ID NO: 1631210 - DNA, 25 bp, Homo sapien
tgatatgtgtcttcaggccagtgga

SEQ ID NO: 1631211 - DNA, 25 bp, Homo sapien
ctgatatgtgtcttcaggccagtgg

SEQ ID NO: 1631212 - DNA, 25 bp, Homo sapien
ttcaggccagtggaggtcccagggt

SEQ ID NO: 1631213 - DNA, 25 bp, Homo sapien
gtgtcttcaggccagtggaggtccc

SEQ ID NO: 1631214 - DNA, 25 bp, Homo sapien
gggtacgttctttctacctcatcat

SEQ ID NO: 1631215 - DNA, 25 bp, Homo sapien
catctgcacttcatcgtagaggggt

SEQ ID NO: 1631216 - DNA, 25 bp, Homo sapien
acttcatcgtagaggggtccccagg

SEQ ID NO: 1631217 - DNA, 25 bp, Homo sapien
ctacctcatcatacaagtgcccagg

SEQ ID NO: 1631218 - DNA, 25 bp, Homo sapien
cctcagggagcggtaatacggctct

SEQ ID NO: 1631219 - DNA, 25 bp, Homo sapien
agggagcggtaatacggctctgcct

SEQ ID NO: 1631220 - DNA, 25 bp, Homo sapien
gtccctcagggagcggtaatacggc

SEQ ID NO: 1631221 - DNA, 25 bp, Homo sapien
ctcgggaataagacacctcctcctg

SEQ ID NO: 1631222 - DNA, 25 bp, Homo sapien
tcatattcgttcctgactcggtcct

SEQ ID NO: 1631223 - DNA, 25 bp, Homo sapien
tgtccactggctctcctcatattcg

SEQ ID NO: 1631224 - DNA, 25 bp, Homo sapien
tgtcccgctctcctgtccactggct

SEQ ID NO: 1631225 - DNA, 25 bp, Homo sapien
ctggctctcctcatattcgttcctg

SEQ ID NO: 1631226 - DNA, 25 bp, Homo sapien
tgaaggtgtggggggaagttgagtg

SEQ ID NO: 1631227 - DNA, 25 bp, Homo sapien
atgaaggtgtggggggaagttgagt

SEQ ID NO: 1631228 - DNA, 25 bp, Homo sapien
cttccaggatgaaggtgtgggggga

SEQ ID NO: 1631229 - DNA, 25 bp, Homo sapien
ccaggatgaaggtgtggggggaagt

SEQ ID NO: 1631230 - DNA, 25 bp, Homo sapien
cctgcctctgtcttctctgagatgc

SEQ ID NO: 1631231 - DNA, 25 bp, Homo sapien
ctgagtctccgctgccagaggaccc

SEQ ID NO: 1631232 - DNA, 25 bp, Homo sapien
ccccgacacaggaggcattggagag

SEQ ID NO: 1631233 - DNA, 25 bp, Homo sapien
cagcaagacgcctgagtctccgctg

SEQ ID NO: 1631234 - DNA, 25 bp, Homo sapien
cccccaagagcgaacagcacaggca

SEQ ID NO: 1631235 - DNA, 25 bp, Homo sapien
aaaaccagcctggccgatatggtaa

SEQ ID NO: 1631236 - DNA, 25 bp, Homo sapien
tatggtaaaaccctgtctctactaa

SEQ ID NO: 1631237 - DNA, 25 bp, Homo sapien
tctgggaggctgaggggttggatca

SEQ ID NO: 1631238 - DNA, 25 bp, Homo sapien
gctgaggggttggatcacaaggtca

SEQ ID NO: 1631239 - DNA, 25 bp, Homo sapien
tggctctgtgggcagctggtcttca

SEQ ID NO: 1631240 - DNA, 25 bp, Homo sapien
tgtgggcagctggtcttcaggttct

SEQ ID NO: 1631241 - DNA, 25 bp, Homo sapien
ggttctccagaaggctggtggagac

SEQ ID NO: 1631242 - DNA, 25 bp, Homo sapien
gaaggtggctctgtgggcagctggt

SEQ ID NO: 1631243 - DNA, 25 bp, Homo sapien
agcaagattccattgcaaaaaaaaa

SEQ ID NO: 1631244 - DNA, 25 bp, Homo sapien
cagagcaagattccattgcaaaaaa

SEQ ID NO: 1631245 - DNA, 25 bp, Homo sapien
gacagagcaagattccattgcaaaa

SEQ ID NO: 1631246 - DNA, 25 bp, Homo sapien
tgacagagcaagattccattgcaaa

SEQ ID NO: 1631247 - DNA, 25 bp, Homo sapien
gacatccacatagtggaaccctgga

SEQ ID NO: 1631248 - DNA, 25 bp, Homo sapien
ggtagtgatgggaagctgggtccct

SEQ ID NO: 1631249 - DNA, 25 bp, Homo sapien
gggtggtacgacatccacatagtgg

SEQ ID NO: 1631250 - DNA, 25 bp, Homo sapien
cacatagtggaaccctggagtcccc

SEQ ID NO: 1631251 - DNA, 25 bp, Homo sapien
ggtcagactcacaacctttaatcct

SEQ ID NO: 1631252 - DNA, 25 bp, Homo sapien
tccagccccacggagtgtggggtca

SEQ ID NO: 1631253 - DNA, 25 bp, Homo sapien
tctgtggcaggcccccatcaaagcc

SEQ ID NO: 1631254 - DNA, 25 bp, Homo sapien
gtggggtcagactcacaacctttaa

SEQ ID NO: 1631255 - DNA, 25 bp, Homo sapien
tgtacatgtgaagagggcgtaatcc

SEQ ID NO: 1631256 - DNA, 25 bp, Homo sapien
acacgttggcaatggtcaggaggct

SEQ ID NO: 1631257 - DNA, 25 bp, Homo sapien
ctggtggtatgtgtgctccgtgtac

SEQ ID NO: 1631258 - DNA, 25 bp, Homo sapien
gaatgttggtttggtccgagccaag

SEQ ID NO: 1631259 - DNA, 25 bp, Homo sapien
ccagctgcagccaccttagttaggg

SEQ ID NO: 1631260 - DNA, 25 bp, Homo sapien
cgatgttggggacacctcgggcacg

SEQ ID NO: 1631261 - DNA, 25 bp, Homo sapien
ttgtccaagtgaaaacgatgttggg

SEQ ID NO: 1631262 - DNA, 25 bp, Homo sapien
agtggggtgctccacctggggggca

SEQ ID NO: 1631263 - DNA, 25 bp, Homo sapien
acggagcagccgtcgtgctggaggc

SEQ ID NO: 1631264 - DNA, 25 bp, Homo sapien
ctgggccagtttggcatggtgaatc

SEQ ID NO: 1631265 - DNA, 25 bp, Homo sapien
tggtgaatccgcaggcgccccgttg

SEQ ID NO: 1631266 - DNA, 25 bp, Homo sapien
aatgcactggtaagcgccagcctgg

SEQ ID NO: 1631267 - DNA, 25 bp, Homo sapien
tcctggagggcacggatggtgggag

SEQ ID NO: 1631268 - DNA, 25 bp, Homo sapien
ccagttgaacatgcccgggaggatg

SEQ ID NO: 1631269 - DNA, 25 bp, Homo sapien
tggcatcgacagtgcagactatgtc

SEQ ID NO: 1631270 - DNA, 25 bp, Homo sapien
gacagtgcagactatgtccacagaa

SEQ ID NO: 1631271 - DNA, 25 bp, Homo sapien
ctggtggaaggcagaggcttgggga

SEQ ID NO: 1631272 - DNA, 25 bp, Homo sapien
ggaaggcagaggcttggggaagaca

SEQ ID NO: 1631273 - DNA, 25 bp, Homo sapien
gtggaaggcagaggcttggggaaga

SEQ ID NO: 1631274 - DNA, 25 bp, Homo sapien
tggtggaaggcagaggcttggggaa

SEQ ID NO: 1631275 - DNA, 25 bp, Homo sapien
tgcagagccccgctggacaggatgc

SEQ ID NO: 1631276 - DNA, 25 bp, Homo sapien
cgggtcacattccacagatgcagag

SEQ ID NO: 1631277 - DNA, 25 bp, Homo sapien
cagctgatagaggccgtcgtccgcg

SEQ ID NO: 1631278 - DNA, 25 bp, Homo sapien
gcgcttccgcggtgccctcagagtt

SEQ ID NO: 1631279 - DNA, 25 bp, Homo sapien
ccgcggaaggtccagttgaaggcct

SEQ ID NO: 1631280 - DNA, 25 bp, Homo sapien
ctggactgaggcgatagccgcggaa

SEQ ID NO: 1631281 - DNA, 25 bp, Homo sapien
acacgggcagcaacgcctcgccctg

SEQ ID NO: 1631282 - DNA, 25 bp, Homo sapien
tcgccctgctccaccgcggtcacca

SEQ ID NO: 1631283 - DNA, 25 bp, Homo sapien
gcaggtcacgcgctggccatgatcg

SEQ ID NO: 1631284 - DNA, 25 bp, Homo sapien
tagaaggagctcacggtttcgcgga

SEQ ID NO: 1631285 - DNA, 25 bp, Homo sapien
tacgttgaggcgatagaaggagctc

SEQ ID NO: 1631286 - DNA, 25 bp, Homo sapien
gatcgcgggatgacacttgcagaag

SEQ ID NO: 1631287 - DNA, 25 bp, Homo sapien
tgctgacgctgacgcatgtcaagtt

SEQ ID NO: 1631288 - DNA, 25 bp, Homo sapien
atgtcaagtttaaggcgtctcccgg

SEQ ID NO: 1631289 - DNA, 25 bp, Homo sapien
ttggccaggatcgtcacgttagttg

SEQ ID NO: 1631290 - DNA, 25 bp, Homo sapien
caggacaagttgaccggcggattgc

SEQ ID NO: 1631291 - DNA, 25 bp, Homo sapien
tgtccagccttgcacgtgaacttgg

SEQ ID NO: 1631292 - DNA, 25 bp, Homo sapien
tttctccacgctgccgagatgcacg

SEQ ID NO: 1631293 - DNA, 25 bp, Homo sapien
ctggttgtccgacggccctgtgacc

SEQ ID NO: 1631294 - DNA, 25 bp, Homo sapien
accgccagctgcgtggacgcgctga

SEQ ID NO: 1631295 - DNA, 25 bp, Homo sapien
tttccaagattgcccaagattctga

SEQ ID NO: 1631296 - DNA, 25 bp, Homo sapien
atctttttccaagattgcccaagat

SEQ ID NO: 1631297 - DNA, 25 bp, Homo sapien
cacattcctggccacccccatagcc

SEQ ID NO: 1631298 - DNA, 25 bp, Homo sapien
ccccatagccctggcgtggcaccaa

SEQ ID NO: 1631299 - DNA, 25 bp, Homo sapien
ccccgatagccaaacacaccagcct

SEQ ID NO: 1631300 - DNA, 25 bp, Homo sapien
gctctgggttgcccccgatagccaa

SEQ ID NO: 1631301 - DNA, 25 bp, Homo sapien
gggttgcccccgatagccaaacaca

SEQ ID NO: 1631302 - DNA, 25 bp, Homo sapien
cgatagccaaacacaccagcctcac

SEQ ID NO: 1631303 - DNA, 25 bp, Homo sapien
ccctcaatccacagtttctgggcgg

SEQ ID NO: 1631304 - DNA, 25 bp, Homo sapien
tcaatccacagtttctgggcgggat

SEQ ID NO: 1631305 - DNA, 25 bp, Homo sapien
tctgggggaccctcaatccacagtt

SEQ ID NO: 1631306 - DNA, 25 bp, Homo sapien
gggaccctcaatccacagtttctgg

SEQ ID NO: 1631307 - DNA, 25 bp, Homo sapien
ttgggggcattgctgggccagggca

SEQ ID NO: 1631308 - DNA, 25 bp, Homo sapien
gcttgggggcattgctgggccaggg

SEQ ID NO: 1631309 - DNA, 25 bp, Homo sapien
cttgggggcattgctgggccagggc

SEQ ID NO: 1631310 - DNA, 25 bp, Homo sapien
ggcttgggggcattgctgggccagg

SEQ ID NO: 1631311 - DNA, 25 bp, Homo sapien
acatgtgagggtcagaccgttgtcc

SEQ ID NO: 1631312 - DNA, 25 bp, Homo sapien
atggagatgtgaccgccatgcagtc

SEQ ID NO: 1631313 - DNA, 25 bp, Homo sapien
caggatgagcgacttcttgaaggtc

SEQ ID NO: 1631314 - DNA, 25 bp, Homo sapien
ttttacgttcaggatgagcgacttc

SEQ ID NO: 1631315 - DNA, 25 bp, Homo sapien
cacaggagagtgtcacgttcttgtt

SEQ ID NO: 1631316 - DNA, 25 bp, Homo sapien
accatcgtagcagaacccgcgggcg

SEQ ID NO: 1631317 - DNA, 25 bp, Homo sapien
acccgcgggcgactggacttgctga

SEQ ID NO: 1631318 - DNA, 25 bp, Homo sapien
tctcagtctgggatgcagatcccaa

SEQ ID NO: 1631319 - DNA, 25 bp, Homo sapien
ggtccctgcagacacgctgttgtgg

SEQ ID NO: 1631320 - DNA, 25 bp, Homo sapien
cagtgtgatgccgtgctcctgggtc

SEQ ID NO: 1631321 - DNA, 25 bp, Homo sapien
acgctgttgtgggcctcgcagctga

SEQ ID NO: 1631322 - DNA, 25 bp, Homo sapien
gtcatcaccagcacactgcgggcca

SEQ ID NO: 1631323 - DNA, 25 bp, Homo sapien
caggcctggccactcgatgacaggg

SEQ ID NO: 1631324 - DNA, 25 bp, Homo sapien
tgcagtgtggctaagggattacccc

SEQ ID NO: 1631325 - DNA, 25 bp, Homo sapien
tgtcctgcccgcacgtgcccctcat

SEQ ID NO: 1631326 - DNA, 25 bp, Homo sapien
atccaggcctggccactcgatgaca

SEQ ID NO: 1631327 - DNA, 25 bp, Homo sapien
tcagcgccctagttggcccagttct

SEQ ID NO: 1631328 - DNA, 25 bp, Homo sapien
atcctcagcgccctagttggcccag

SEQ ID NO: 1631329 - DNA, 25 bp, Homo sapien
ctccccatcctcagcgccctagttg

SEQ ID NO: 1631330 - DNA, 25 bp, Homo sapien
tccccatcctcagcgccctagttgg

SEQ ID NO: 1631331 - DNA, 25 bp, Homo sapien
tgggctagacgcctcacagaccagc

SEQ ID NO: 1631332 - DNA, 25 bp, Homo sapien
aactgcctattatctgagctccggg

SEQ ID NO: 1631333 - DNA, 25 bp, Homo sapien
tcacagaccagcaactgcctattat

SEQ ID NO: 1631334 - DNA, 25 bp, Homo sapien
gcctccagtgctgggctagacgcct

SEQ ID NO: 1631335 - DNA, 25 bp, Homo sapien
gagccctcgttcacgtttgcagaga

SEQ ID NO: 1631336 - DNA, 25 bp, Homo sapien
agccctcgttcacgtttgcagagat

SEQ ID NO: 1631337 - DNA, 25 bp, Homo sapien
gggagccctcgttcacgtttgcaga

SEQ ID NO: 1631338 - DNA, 25 bp, Homo sapien
tgggagccctcgttcacgtttgcag

SEQ ID NO: 1631339 - DNA, 25 bp, Homo sapien
aatggtgatgtcaggtgctggcttc

SEQ ID NO: 1631340 - DNA, 25 bp, Homo sapien
aggtgctggcttcgcgtccccagac

SEQ ID NO: 1631341 - DNA, 25 bp, Homo sapien
aggtgaccatggtgcctgcctctgg

SEQ ID NO: 1631342 - DNA, 25 bp, Homo sapien
agacacacagttgaccacgtactcc

SEQ ID NO: 1631343 - DNA, 25 bp, Homo sapien
atcactctgggagacacgagctcgg

SEQ ID NO: 1631344 - DNA, 25 bp, Homo sapien
gcctcgatgtgcaggtggaattcac

SEQ ID NO: 1631345 - DNA, 25 bp, Homo sapien
gagcggccgacctggcactcatact

SEQ ID NO: 1631346 - DNA, 25 bp, Homo sapien
tcatcgctgaggtcacaggcctcga

SEQ ID NO: 1631347 - DNA, 25 bp, Homo sapien
caggcggtacctcgggaagcctggg

SEQ ID NO: 1631348 - DNA, 25 bp, Homo sapien
atctttggcccattgcaccgcactg

SEQ ID NO: 1631349 - DNA, 25 bp, Homo sapien
ggcaggaatcgccaactgcgccagg

SEQ ID NO: 1631350 - DNA, 25 bp, Homo sapien
cgtcaggttttcaggcagggcccag

SEQ ID NO: 1631351 - DNA, 25 bp, Homo sapien
agaagccctgagcgtcgtccccagg

SEQ ID NO: 1631352 - DNA, 25 bp, Homo sapien
gagaagccctgagcgtcgtccccag

SEQ ID NO: 1631353 - DNA, 25 bp, Homo sapien
gaagccctgagcgtcgtccccaggg

SEQ ID NO: 1631354 - DNA, 25 bp, Homo sapien
cccctactgtgacccccacagcgcc

SEQ ID NO: 1631355 - DNA, 25 bp, Homo sapien
tatctctttccgttactctcctccc

SEQ ID NO: 1631356 - DNA, 25 bp, Homo sapien
tctgtcttgctctcagtctcaatct

SEQ ID NO: 1631357 - DNA, 25 bp, Homo sapien
gtccccctactgtgacccccacagc

SEQ ID NO: 1631358 - DNA, 25 bp, Homo sapien
cagcctttcaagaaggacctgcagc

SEQ ID NO: 1631359 - DNA, 25 bp, Homo sapien
ttgtctcactactcacagcctttca

SEQ ID NO: 1631360 - DNA, 25 bp, Homo sapien
cctaggagagcgatgaggctgatgc

SEQ ID NO: 1631361 - DNA, 25 bp, Homo sapien
ttctctccttgtctaagccgttctc

SEQ ID NO: 1631362 - DNA, 25 bp, Homo sapien
ccttctctgcatgctcctgggacct

SEQ ID NO: 1631363 - DNA, 25 bp, Homo sapien
tggctgttttccttctctgcatgct

SEQ ID NO: 1631364 - DNA, 25 bp, Homo sapien
ctctgcatgctcctgggaccttggg

SEQ ID NO: 1631365 - DNA, 25 bp, Homo sapien
tttccttctctgcatgctcctggga

SEQ ID NO: 1631366 - DNA, 25 bp, Homo sapien
tccaatggaagagtcctgggatctc

SEQ ID NO: 1631367 - DNA, 25 bp, Homo sapien
tcaggagcatttgtatacagtcagc

SEQ ID NO: 1631368 - DNA, 25 bp, Homo sapien
gacaagttggcgaccttactcctcc

SEQ ID NO: 1631369 - DNA, 25 bp, Homo sapien
tattccccggtgtaaaagagattca

SEQ ID NO: 1631370 - DNA, 25 bp, Homo sapien
ttctctaggtagaaaaggcgacctg

SEQ ID NO: 1631371 - DNA, 25 bp, Homo sapien
gtacagagctccctaaataccagga

SEQ ID NO: 1631372 - DNA, 25 bp, Homo sapien
cgtaggatgcgccagattaatgagg

SEQ ID NO: 1631373 - DNA, 25 bp, Homo sapien
tggctaaactgggtgcatgatggtc

SEQ ID NO: 1631374 - DNA, 25 bp, Homo sapien
cgcttcctggaggaacgaccctgac

SEQ ID NO: 1631375 - DNA, 25 bp, Homo sapien
actgcagcggcacggctatgagaac

SEQ ID NO: 1631376 - DNA, 25 bp, Homo sapien
ccacttaccgcttcctggaggaacg

SEQ ID NO: 1631377 - DNA, 25 bp, Homo sapien
cacacccttttgtgagacggctgga

SEQ ID NO: 1631378 - DNA, 25 bp, Homo sapien
tgttcttgcactcctaagtcattct

SEQ ID NO: 1631379 - DNA, 25 bp, Homo sapien
ttttcccactgaagatgatcttggt

SEQ ID NO: 1631380 - DNA, 25 bp, Homo sapien
tgttgttattcaaattccagcagga

SEQ ID NO: 1631381 - DNA, 25 bp, Homo sapien
tatttatctgatgttcttgcactcc

SEQ ID NO: 1631382 - DNA, 25 bp, Homo sapien
gtgtgccctgcccaagatggccatc

SEQ ID NO: 1631383 - DNA, 25 bp, Homo sapien
tctcacaagtgctagaggctgagaa

SEQ ID NO: 1631384 - DNA, 25 bp, Homo sapien
caaggtgccagcagctccaaagtct

SEQ ID NO: 1631385 - DNA, 25 bp, Homo sapien
ccaaagtctggaggactctcttcct

SEQ ID NO: 1631386 - DNA, 25 bp, Homo sapien
gggattcatctgctggggaactctg

SEQ ID NO: 1631387 - DNA, 25 bp, Homo sapien
caagttagcccaacagacaggtggg

SEQ ID NO: 1631388 - DNA, 25 bp, Homo sapien
gggaactctggagcccgcataggcc

SEQ ID NO: 1631389 - DNA, 25 bp, Homo sapien
taggccatgcacttccaagttagcc

SEQ ID NO: 1631390 - DNA, 25 bp, Homo sapien
aggattacaggcatgagccaccaaa

SEQ ID NO: 1631391 - DNA, 25 bp, Homo sapien
catgtccagccaattgtttttgtat

SEQ ID NO: 1631392 - DNA, 25 bp, Homo sapien
caccatgtccagccaattgtttttg

SEQ ID NO: 1631393 - DNA, 25 bp, Homo sapien
taggattacaggcatgagccaccaa

SEQ ID NO: 1631394 - DNA, 25 bp, Homo sapien
agagaacccgaaagatctcagtggg

SEQ ID NO: 1631395 - DNA, 25 bp, Homo sapien
cctaagggtccctgatctcagaggg

SEQ ID NO: 1631396 - DNA, 25 bp, Homo sapien
cagctgagctctgaatcagagagca

SEQ ID NO: 1631397 - DNA, 25 bp, Homo sapien
ttactgagatggtatcgggatgccc

SEQ ID NO: 1631398 - DNA, 25 bp, Homo sapien
cagccattctggggttttaatgtaa

SEQ ID NO: 1631399 - DNA, 25 bp, Homo sapien
ggtatcacagcaccccaaatattgg

SEQ ID NO: 1631400 - DNA, 25 bp, Homo sapien
ggtagaagaggggtatcacagcacc

SEQ ID NO: 1631401 - DNA, 25 bp, Homo sapien
accccaatggcaggatattccacat

SEQ ID NO: 1631402 - DNA, 25 bp, Homo sapien
tgcaacattagcatacgctggctgt

SEQ ID NO: 1631403 - DNA, 25 bp, Homo sapien
tatcatgggtttgcaacattagcat

SEQ ID NO: 1631404 - DNA, 25 bp, Homo sapien
cggtggggactggaaaatcagtcca

SEQ ID NO: 1631405 - DNA, 25 bp, Homo sapien
ggtttgcaacattagcatacgctgg

SEQ ID NO: 1631406 - DNA, 25 bp, Homo sapien
ggcggcgccacacggctcctcttca

SEQ ID NO: 1631407 - DNA, 25 bp, Homo sapien
gaggacaggcctggcggcgccacac

SEQ ID NO: 1631408 - DNA, 25 bp, Homo sapien
gcctggcggcgccacacggctcctc

SEQ ID NO: 1631409 - DNA, 25 bp, Homo sapien
ctggcggcgccacacggctcctctt

SEQ ID NO: 1631410 - DNA, 25 bp, Homo sapien
ctgtagacaaggcaaaggagggaga

SEQ ID NO: 1631411 - DNA, 25 bp, Homo sapien
gagaagtctgtcaggttggaaggag

SEQ ID NO: 1631412 - DNA, 25 bp, Homo sapien
agaagtctgtcaggttggaaggaga

SEQ ID NO: 1631413 - DNA, 25 bp, Homo sapien
gaaggtcaaggcctgggttcgtaca

SEQ ID NO: 1631414 - DNA, 25 bp, Homo sapien
cacacttggggggatcaaaggtcac

SEQ ID NO: 1631415 - DNA, 25 bp, Homo sapien
cttggggggatcaaaggtcacacct

SEQ ID NO: 1631416 - DNA, 25 bp, Homo sapien
ctgggttcgtacactgagaaagggt

SEQ ID NO: 1631417 - DNA, 25 bp, Homo sapien
tcagggttggggtagagatcagaga

SEQ ID NO: 1631418 - DNA, 25 bp, Homo sapien
gggtagagatcagagaagtcaccat

SEQ ID NO: 1631419 - DNA, 25 bp, Homo sapien
ttggggtagagatcagagaagtcac

SEQ ID NO: 1631420 - DNA, 25 bp, Homo sapien
ggtagagatcagagaagtcaccatt

SEQ ID NO: 1631421 - DNA, 25 bp, Homo sapien
cagaggtcacattatagagtcaggg

SEQ ID NO: 1631422 - DNA, 25 bp, Homo sapien
cattctctgaaagcgagcattgggt

SEQ ID NO: 1631423 - DNA, 25 bp, Homo sapien
cagggttgcctgagggctgaagtca

SEQ ID NO: 1631424 - DNA, 25 bp, Homo sapien
caccttccgagattagaagtcattc

SEQ ID NO: 1631425 - DNA, 25 bp, Homo sapien
ccgcagcaggtgaacgggctgctca

SEQ ID NO: 1631426 - DNA, 25 bp, Homo sapien
agctgccaacaggtgccgcacgatg

SEQ ID NO: 1631427 - DNA, 25 bp, Homo sapien
acaggtgccgcacgatggcctcctg

SEQ ID NO: 1631428 - DNA, 25 bp, Homo sapien
cattctccaggttgcgcagtgtggg

SEQ ID NO: 1631429 - DNA, 25 bp, Homo sapien
gttgacaaaggtccgcaggtctccc

SEQ ID NO: 1631430 - DNA, 25 bp, Homo sapien
gcacggccaagtgcagaactgtctt

SEQ ID NO: 1631431 - DNA, 25 bp, Homo sapien
gcctgcacggccaagtgcagaactg

SEQ ID NO: 1631432 - DNA, 25 bp, Homo sapien
ttcatgttgacaaaggtccgcaggt

SEQ ID NO: 1631433 - DNA, 25 bp, Homo sapien
cctggacaacacagcaagacctcat

SEQ ID NO: 1631434 - DNA, 25 bp, Homo sapien
ccttggcggagtgcggtggttcacg

SEQ ID NO: 1631435 - DNA, 25 bp, Homo sapien
tgggaagctgaagaaggaggatcac

SEQ ID NO: 1631436 - DNA, 25 bp, Homo sapien
acttgaggccaggagctgcagacca

SEQ ID NO: 1631437 - DNA, 25 bp, Homo sapien
caaaaaagttgccacgcatggtggt

SEQ ID NO: 1631438 - DNA, 25 bp, Homo sapien
tcagccagcctatgaaggagctact

SEQ ID NO: 1631439 - DNA, 25 bp, Homo sapien
tcacttaagtgcacaaggtcaaggc

SEQ ID NO: 1631440 - DNA, 25 bp, Homo sapien
caaagtcagcatttgcctggagctc

SEQ ID NO: 1631441 - DNA, 25 bp, Homo sapien
agcaacatgtggacacaatccagcc

SEQ ID NO: 1631442 - DNA, 25 bp, Homo sapien
gtgattagcacccatttgcagcaac

SEQ ID NO: 1631443 - DNA, 25 bp, Homo sapien
gcaacatgtggacacaatccagcct

SEQ ID NO: 1631444 - DNA, 25 bp, Homo sapien
ggacagaggtcggaagggcgcatag

SEQ ID NO: 1631445 - DNA, 25 bp, Homo sapien
tagcaacgttaagggccaggatggc

SEQ ID NO: 1631446 - DNA, 25 bp, Homo sapien
tcggaagggcgcatagcaacgttaa

SEQ ID NO: 1631447 - DNA, 25 bp, Homo sapien
gcgcatagcaacgttaagggccagg

SEQ ID NO: 1631448 - DNA, 25 bp, Homo sapien
gcagaatggagacagtgagggaccc

SEQ ID NO: 1631449 - DNA, 25 bp, Homo sapien
tggagacagtgagggacccgcatct

SEQ ID NO: 1631450 - DNA, 25 bp, Homo sapien
gagacagtgagggacccgcatctgc

SEQ ID NO: 1631451 - DNA, 25 bp, Homo sapien
aatggagacagtgagggacccgcat

SEQ ID NO: 1631452 - DNA, 25 bp, Homo sapien
cgcccagccacaccaaccacaccag

SEQ ID NO: 1631453 - DNA, 25 bp, Homo sapien
ctcgcccagccacaccaaccacacc

SEQ ID NO: 1631454 - DNA, 25 bp, Homo sapien
acaccagccctgcccacacccaact

SEQ ID NO: 1631455 - DNA, 25 bp, Homo sapien
ccagccctgcccacacccaacttac

SEQ ID NO: 1631456 - DNA, 25 bp, Homo sapien
tccaggtcaacctggaccccagagt

SEQ ID NO: 1631457 - DNA, 25 bp, Homo sapien
cctggaccccagagttaagcacagc

SEQ ID NO: 1631458 - DNA, 25 bp, Homo sapien
aagtctctggcttccaggtcaacct

SEQ ID NO: 1631459 - DNA, 25 bp, Homo sapien
agtctctggcttccaggtcaacctg

SEQ ID NO: 1631460 - DNA, 25 bp, Homo sapien
caaaatctgggcaaccagtctaccc

SEQ ID NO: 1631461 - DNA, 25 bp, Homo sapien
gccctggaagccaaaatctgggcaa

SEQ ID NO: 1631462 - DNA, 25 bp, Homo sapien
tgctgggtaagggtatcccctggcc

SEQ ID NO: 1631463 - DNA, 25 bp, Homo sapien
gcagactgctgggtaagggtatccc

SEQ ID NO: 1631464 - DNA, 25 bp, Homo sapien
gaccgaacgtccctgatggtcagcg

SEQ ID NO: 1631465 - DNA, 25 bp, Homo sapien
caagagaactcctgggagcccgtag

SEQ ID NO: 1631466 - DNA, 25 bp, Homo sapien
gtaggtagcggccacgtgcaagacc

SEQ ID NO: 1631467 - DNA, 25 bp, Homo sapien
tggtcagcggcattgggctctgctc

SEQ ID NO: 1631468 - DNA, 25 bp, Homo sapien
ctcacgaatgtcaagacgccggtac

SEQ ID NO: 1631469 - DNA, 25 bp, Homo sapien
ccttatgctcacgaatgtcaagacg

SEQ ID NO: 1631470 - DNA, 25 bp, Homo sapien
cttgcccttatgctcacgaatgtca

SEQ ID NO: 1631471 - DNA, 25 bp, Homo sapien
tatgctcacgaatgtcaagacgccg

SEQ ID NO: 1631472 - DNA, 25 bp, Homo sapien
agcccccgagccgcaaacaggtgaa

SEQ ID NO: 1631473 - DNA, 25 bp, Homo sapien
cccccgagccgcaaacaggtgaagg

SEQ ID NO: 1631474 - DNA, 25 bp, Homo sapien
gccgcagcatatgccgcccagcgca

SEQ ID NO: 1631475 - DNA, 25 bp, Homo sapien
tcagccgcagcatatgccgcccagc

SEQ ID NO: 1631476 - DNA, 25 bp, Homo sapien
caagagtctgcagacaaccctatcc

SEQ ID NO: 1631477 - DNA, 25 bp, Homo sapien
gggacagccgtgagaacagccccca

SEQ ID NO: 1631478 - DNA, 25 bp, Homo sapien
caagccaagagtctgcagacaaccc

SEQ ID NO: 1631479 - DNA, 25 bp, Homo sapien
caccaagccaagagtctgcagacaa

SEQ ID NO: 1631480 - DNA, 25 bp, Homo sapien
ccccaaagccagcatgtgagctcgg

SEQ ID NO: 1631481 - DNA, 25 bp, Homo sapien
ctgtgggggtcctgaagggggtgca

SEQ ID NO: 1631482 - DNA, 25 bp, Homo sapien
gtcctgaagggggtgcagaaactct

SEQ ID NO: 1631483 - DNA, 25 bp, Homo sapien
tgggggtcctgaagggggtgcagaa

SEQ ID NO: 1631484 - DNA, 25 bp, Homo sapien
ctgaagggggtgcagaaactctcca

SEQ ID NO: 1631485 - DNA, 25 bp, Homo sapien
tggcagagaagatcctacatagaac

SEQ ID NO: 1631486 - DNA, 25 bp, Homo sapien
cagagaagatcctacatagaactgg

SEQ ID NO: 1631487 - DNA, 25 bp, Homo sapien
gaagatcctacatagaactgggtgt

SEQ ID NO: 1631488 - DNA, 25 bp, Homo sapien
agatcctacatagaactgggtgtct

SEQ ID NO: 1631489 - DNA, 25 bp, Homo sapien
cctggaaaagggaatcgtaactgag

SEQ ID NO: 1631490 - DNA, 25 bp, Homo sapien
caggagtgcaactgcgaatttttag

SEQ ID NO: 1631491 - DNA, 25 bp, Homo sapien
aaagggaatcgtaactgagctccag

SEQ ID NO: 1631492 - DNA, 25 bp, Homo sapien
gagctccagacatctcagaatactg

SEQ ID NO: 1631493 - DNA, 25 bp, Homo sapien
gctgccctgggtccgagggtgggta

SEQ ID NO: 1631494 - DNA, 25 bp, Homo sapien
tgggtccgagggtgggtagaagtca

SEQ ID NO: 1631495 - DNA, 25 bp, Homo sapien
cagggcaagagtaggggctgtcagt

SEQ ID NO: 1631496 - DNA, 25 bp, Homo sapien
ccagaacccacagtctccgagtgtg

SEQ ID NO: 1631497 - DNA, 25 bp, Homo sapien
tgtaagaggaggggcaggggcaggt

SEQ ID NO: 1631498 - DNA, 25 bp, Homo sapien
agcctcattcacagatggggtcagg

SEQ ID NO: 1631499 - DNA, 25 bp, Homo sapien
cagtcacagcctcattcacagatgg

SEQ ID NO: 1631500 - DNA, 25 bp, Homo sapien
tcattcacagatggggtcaggggct

SEQ ID NO: 1631501 - DNA, 25 bp, Homo sapien
agtcacagcctcattcacagatggg

SEQ ID NO: 1631502 - DNA, 25 bp, Homo sapien
tcttcacggtttgcgttgggcagtg

SEQ ID NO: 1631503 - DNA, 25 bp, Homo sapien
gcttcttcacggtttgcgttgggca

SEQ ID NO: 1631504 - DNA, 25 bp, Homo sapien
tgcgttgggcagtggctgcgctcac

SEQ ID NO: 1631505 - DNA, 25 bp, Homo sapien
cagaagcttcttcacggtttgcgtt

SEQ ID NO: 1631506 - DNA, 25 bp, Homo sapien
catcaagggtccttaagtcacctaa

SEQ ID NO: 1631507 - DNA, 25 bp, Homo sapien
ggtccttaagtcacctaaatgccgc

SEQ ID NO: 1631508 - DNA, 25 bp, Homo sapien
ggaagtcatcaagggtccttaagtc

SEQ ID NO: 1631509 - DNA, 25 bp, Homo sapien
ccttaagtcacctaaatgccgcggg

SEQ ID NO: 1631510 - DNA, 25 bp, Homo sapien
ttccgtggcgtggattgcgggcccc

SEQ ID NO: 1631511 - DNA, 25 bp, Homo sapien
ctcggggattccgtggcgtggattg

SEQ ID NO: 1631512 - DNA, 25 bp, Homo sapien
tcggggattccgtggcgtggattgc

SEQ ID NO: 1631513 - DNA, 25 bp, Homo sapien
ggattccgtggcgtggattgcgggc

SEQ ID NO: 1631514 - DNA, 25 bp, Homo sapien
cgatcttgggtccggtacccgcgag

SEQ ID NO: 1631515 - DNA, 25 bp, Homo sapien
aactaggggttatggcaccgcccag

SEQ ID NO: 1631516 - DNA, 25 bp, Homo sapien
gggttatggcaccgcccagtcctgg

SEQ ID NO: 1631517 - DNA, 25 bp, Homo sapien
gagtccccgggtcgcgctccggcga

SEQ ID NO: 1631518 - DNA, 25 bp, Homo sapien
catcttctcagcgtttcatgccaga

SEQ ID NO: 1631519 - DNA, 25 bp, Homo sapien
tcagcgtttcatgccagaaggcttg

SEQ ID NO: 1631520 - DNA, 25 bp, Homo sapien
agaaggcttggctgtctaggatccc

SEQ ID NO: 1631521 - DNA, 25 bp, Homo sapien
tgtctaggatccctctcaaacacac

SEQ ID NO: 1631522 - DNA, 25 bp, Homo sapien
attttaggagagtattggggagcgg

SEQ ID NO: 1631523 - DNA, 25 bp, Homo sapien
atgtttattttaggagagtattggg

SEQ ID NO: 1631524 - DNA, 25 bp, Homo sapien
ttattttaggagagtattggggagc

SEQ ID NO: 1631525 - DNA, 25 bp, Homo sapien
tattttaggagagtattggggagcg

SEQ ID NO: 1631526 - DNA, 25 bp, Homo sapien
tctgtatcgcggtaggagttggaat

SEQ ID NO: 1631527 - DNA, 25 bp, Homo sapien
tgttgctgactgtcatgattcgggc

SEQ ID NO: 1631528 - DNA, 25 bp, Homo sapien
tctcagggatggcactctgtgggtc

SEQ ID NO: 1631529 - DNA, 25 bp, Homo sapien
ggtatcatgttgctgactgtcatga

SEQ ID NO: 1631530 - DNA, 25 bp, Homo sapien
tgttgaggtcgctgtagacatccga

SEQ ID NO: 1631531 - DNA, 25 bp, Homo sapien
tcgctgtagacatccgacctctgac

SEQ ID NO: 1631532 - DNA, 25 bp, Homo sapien
tcatttgtaatacggcctctgtgtg

SEQ ID NO: 1631533 - DNA, 25 bp, Homo sapien
tacggcctctgtgtgttgaggtcgc

SEQ ID NO: 1631534 - DNA, 25 bp, Homo sapien
gggccatcagtggaagggacccacc

SEQ ID NO: 1631535 - DNA, 25 bp, Homo sapien
tattcaagtacattcaatgttcccc

SEQ ID NO: 1631536 - DNA, 25 bp, Homo sapien
tgcctaaaactctgttcccctagat

SEQ ID NO: 1631537 - DNA, 25 bp, Homo sapien
tagccatgaaagagatccggatttt

SEQ ID NO: 1631538 - DNA, 25 bp, Homo sapien
caaggtagggctgaatgacattctc

SEQ ID NO: 1631539 - DNA, 25 bp, Homo sapien
cattctctgccctactgagagcgtc

SEQ ID NO: 1631540 - DNA, 25 bp, Homo sapien
gctctcagattatatgcacaatttt

SEQ ID NO: 1631541 - DNA, 25 bp, Homo sapien
ttcttagtttctcaaagggatgaag

SEQ ID NO: 1631542 - DNA, 25 bp, Homo sapien
gttttggacagatgtcccatgtgcc

SEQ ID NO: 1631543 - DNA, 25 bp, Homo sapien
tggttgatcattcggcccagttttg

SEQ ID NO: 1631544 - DNA, 25 bp, Homo sapien
taagcttgtggttgatcattcggcc

SEQ ID NO: 1631545 - DNA, 25 bp, Homo sapien
cattcggcccagttttggacagatg

SEQ ID NO: 1631546 - DNA, 25 bp, Homo sapien
gatggcatgaaggagtatctggggc

SEQ ID NO: 1631547 - DNA, 25 bp, Homo sapien
aatgtgaggaggacagtctggtttt

SEQ ID NO: 1631548 - DNA, 25 bp, Homo sapien
gagtgaaatgtgaggaggacagtct

SEQ ID NO: 1631549 - DNA, 25 bp, Homo sapien
ctggcaggagtgaaatgtgaggagg

SEQ ID NO: 1631550 - DNA, 25 bp, Homo sapien
gaggaggacagtctggttttctcac

SEQ ID NO: 1631551 - DNA, 25 bp, Homo sapien
ctgataaggcgactcggtctcagtg

SEQ ID NO: 1631552 - DNA, 25 bp, Homo sapien
gactcggtctcagtgatacgctgtt

SEQ ID NO: 1631553 - DNA, 25 bp, Homo sapien
aaggcgactcggtctcagtgatacg

SEQ ID NO: 1631554 - DNA, 25 bp, Homo sapien
tcagtgatacgctgtttccgggtcg

SEQ ID NO: 1631555 - DNA, 25 bp, Homo sapien
cagagtggtgagttgagggtgtttt

SEQ ID NO: 1631556 - DNA, 25 bp, Homo sapien
gcagagtggtgagttgagggtgttt

SEQ ID NO: 1631557 - DNA, 25 bp, Homo sapien
cagagacaggcagagtggtgagttg

SEQ ID NO: 1631558 - DNA, 25 bp, Homo sapien
ggcagagtggtgagttgagggtgtt

SEQ ID NO: 1631559 - DNA, 25 bp, Homo sapien
gcagcccctcgcccccgagggacca

SEQ ID NO: 1631560 - DNA, 25 bp, Homo sapien
ctccgcagcccctcgcccccgaggg

SEQ ID NO: 1631561 - DNA, 25 bp, Homo sapien
tccgcagcccctcgcccccgaggga

SEQ ID NO: 1631562 - DNA, 25 bp, Homo sapien
cctccgcagcccctcgcccccgagg

SEQ ID NO: 1631563 - DNA, 25 bp, Homo sapien
agggcaatgagcactgtcagcacca

SEQ ID NO: 1631564 - DNA, 25 bp, Homo sapien
ccaggaagtacacggccagggcaat

SEQ ID NO: 1631565 - DNA, 25 bp, Homo sapien
gggcaatgagcactgtcagcaccag

SEQ ID NO: 1631566 - DNA, 25 bp, Homo sapien
aggtctcccatcacgatccctgcca

SEQ ID NO: 1631567 - DNA, 25 bp, Homo sapien
agagggactgctgggtctaggccta

SEQ ID NO: 1631568 - DNA, 25 bp, Homo sapien
gagggactgctgggtctaggcctac

SEQ ID NO: 1631569 - DNA, 25 bp, Homo sapien
gcctgggcctggacaggacggagac

SEQ ID NO: 1631570 - DNA, 25 bp, Homo sapien
gggcctgggcctggacaggacggag

SEQ ID NO: 1631571 - DNA, 25 bp, Homo sapien
ggcctgggcctggacaggacggaga

SEQ ID NO: 1631572 - DNA, 25 bp, Homo sapien
tgggcctgggcctggacaggacgga

SEQ ID NO: 1631573 - DNA, 25 bp, Homo sapien
cttctcccctgcttgtagcggacga

SEQ ID NO: 1631574 - DNA, 25 bp, Homo sapien
tctgggccaccggactatgtgcgtt

SEQ ID NO: 1631575 - DNA, 25 bp, Homo sapien
gaaggtggatcctgacagccaagag

SEQ ID NO: 1631576 - DNA, 25 bp, Homo sapien
tgtggcaacacacttagatgtctct

SEQ ID NO: 1631577 - DNA, 25 bp, Homo sapien
gagcctgctgcagggttcaagtccc

SEQ ID NO: 1631578 - DNA, 25 bp, Homo sapien
ccacagtgtaagggccggtgggatg

SEQ ID NO: 1631579 - DNA, 25 bp, Homo sapien
gtgtaagggccggtgggatgtggcg

SEQ ID NO: 1631580 - DNA, 25 bp, Homo sapien
agggccggtgggatgtggcgcagcg

SEQ ID NO: 1631581 - DNA, 25 bp, Homo sapien
gtaagggccggtgggatgtggcgca

SEQ ID NO: 1631582 - DNA, 25 bp, Homo sapien
tcaaggtggaaatggaacccaagac

SEQ ID NO: 1631583 - DNA, 25 bp, Homo sapien
gtagagacgcttgcctaaggctgca

SEQ ID NO: 1631584 - DNA, 25 bp, Homo sapien
ggcactctgtcccaagcgttaaatc

SEQ ID NO: 1631585 - DNA, 25 bp, Homo sapien
tctagggcacatgctcttatcatcc

SEQ ID NO: 1631586 - DNA, 25 bp, Homo sapien
gcgtgagccaccgcaactggctttt

SEQ ID NO: 1631587 - DNA, 25 bp, Homo sapien
gtgagccaccgcaactggctttttt

SEQ ID NO: 1631588 - DNA, 25 bp, Homo sapien
cgtgagccaccgcaactggcttttt

SEQ ID NO: 1631589 - DNA, 25 bp, Homo sapien
ttgggccgtttctgaccacgtgtct

SEQ ID NO: 1631590 - DNA, 25 bp, Homo sapien
gccgtttctgaccacgtgtctctga

SEQ ID NO: 1631591 - DNA, 25 bp, Homo sapien
tggctttgggccgtttctgaccacg

SEQ ID NO: 1631592 - DNA, 25 bp, Homo sapien
tctgaccacgtgtctctgacatggt

SEQ ID NO: 1631593 - DNA, 25 bp, Homo sapien
ttctgccaaggtggccgacactggg

SEQ ID NO: 1631594 - DNA, 25 bp, Homo sapien
ggctgctaggcaactcaagccgtgc

SEQ ID NO: 1631595 - DNA, 25 bp, Homo sapien
ttccccaatgggacgctggagctgc

SEQ ID NO: 1631596 - DNA, 25 bp, Homo sapien
cattgcggccaatgcagctggcgag

SEQ ID NO: 1631597 - DNA, 25 bp, Homo sapien
cgccgtgtatgaggacagcgccacg

SEQ ID NO: 1631598 - DNA, 25 bp, Homo sapien
ggctcacggccacgcggcctgtggg

SEQ ID NO: 1631599 - DNA, 25 bp, Homo sapien
tgcgtgctcgccgtgtatgaggaca

SEQ ID NO: 1631600 - DNA, 25 bp, Homo sapien
tgctcgccgtgtatgaggacagcgc

SEQ ID NO: 1631601 - DNA, 25 bp, Homo sapien
agattcccgcgcctgttagcagcgt

SEQ ID NO: 1631602 - DNA, 25 bp, Homo sapien
tcatcttcgtgctgctaatgcgcta

SEQ ID NO: 1631603 - DNA, 25 bp, Homo sapien
aatgcgctacaaggtgcacggcggc

SEQ ID NO: 1631604 - DNA, 25 bp, Homo sapien
ttagcagcgtttgctcccagaccaa

SEQ ID NO: 1631605 - DNA, 25 bp, Homo sapien
atgtctgccagcagtccgccggagc

SEQ ID NO: 1631606 - DNA, 25 bp, Homo sapien
gccttctgatgaactgctttaacat

SEQ ID NO: 1631607 - DNA, 25 bp, Homo sapien
ctccattccttaccctatctgtccc

SEQ ID NO: 1631608 - DNA, 25 bp, Homo sapien
ttgctggggtaagcgggaagtggcc

SEQ ID NO: 1631609 - DNA, 25 bp, Homo sapien
tcatcacggctttctcggaaaacgg

SEQ ID NO: 1631610 - DNA, 25 bp, Homo sapien
tccctaatcgatggtgacgccgtcg

SEQ ID NO: 1631611 - DNA, 25 bp, Homo sapien
caacttccagctatatatgtcgcca

SEQ ID NO: 1631612 - DNA, 25 bp, Homo sapien
gaatctgacgcatttagcttccaaa

SEQ ID NO: 1631613 - DNA, 25 bp, Homo sapien
ccgagactgcgtgttcctggaggct

SEQ ID NO: 1631614 - DNA, 25 bp, Homo sapien
aaggcctgtggccacgcgtttggac

SEQ ID NO: 1631615 - DNA, 25 bp, Homo sapien
tggcctcagttgtctgcaagcgaga

SEQ ID NO: 1631616 - DNA, 25 bp, Homo sapien
tcccgggcgccgagactgcgtgttc

SEQ ID NO: 1631617 - DNA, 25 bp, Homo sapien
tctggctttgcgctcttcggctggc

SEQ ID NO: 1631618 - DNA, 25 bp, Homo sapien
tacgatccctccttcgcgcttatgc

SEQ ID NO: 1631619 - DNA, 25 bp, Homo sapien
ttcggctggcgtgcaggtgtttttc

SEQ ID NO: 1631620 - DNA, 25 bp, Homo sapien
ttcgcaagcatggtgcagccaaact

SEQ ID NO: 1631621 - DNA, 25 bp, Homo sapien
tgcagggcagtgcaagacctgtaga

SEQ ID NO: 1631622 - DNA, 25 bp, Homo sapien
catgtttagcttcggcatcgcccaa

SEQ ID NO: 1631623 - DNA, 25 bp, Homo sapien
gagccgcgtcatgagcagcattctg

SEQ ID NO: 1631624 - DNA, 25 bp, Homo sapien
attctgaccaaaggctggtcccggc

SEQ ID NO: 1631625 - DNA, 25 bp, Homo sapien
tcacatgtgagtctgagaccttgtc

SEQ ID NO: 1631626 - DNA, 25 bp, Homo sapien
ggcaggactccaaaacaccgtccat

SEQ ID NO: 1631627 - DNA, 25 bp, Homo sapien
tctgagaccttgtccagttccaaga

SEQ ID NO: 1631628 - DNA, 25 bp, Homo sapien
ccaagatggcaggactccaaaacac

SEQ ID NO: 1631629 - DNA, 25 bp, Homo sapien
tccagctgtgtcatgagttgctggc

SEQ ID NO: 1631630 - DNA, 25 bp, Homo sapien
cacatctatggcatcctcctggatg

SEQ ID NO: 1631631 - DNA, 25 bp, Homo sapien
cactttgttcacatctatggcatcc

SEQ ID NO: 1631632 - DNA, 25 bp, Homo sapien
gagttgctggcaccaggtccctatt

SEQ ID NO: 1631633 - DNA, 25 bp, Homo sapien
ccactcttcccgcaccagtcctggc

SEQ ID NO: 1631634 - DNA, 25 bp, Homo sapien
tgattccccgtggcctccatggcaa

SEQ ID NO: 1631635 - DNA, 25 bp, Homo sapien
tggcacaccgcctccgacctctgat

SEQ ID NO: 1631636 - DNA, 25 bp, Homo sapien
ttctcacatgcatctgatccccctc

SEQ ID NO: 1631637 - DNA, 25 bp, Homo sapien
ttccaggcctgcgtggccgaagtgg

SEQ ID NO: 1631638 - DNA, 25 bp, Homo sapien
ccaggcctgcgtggccgaagtggac

SEQ ID NO: 1631639 - DNA, 25 bp, Homo sapien
gcctgcgtggccgaagtggaccaca

SEQ ID NO: 1631640 - DNA, 25 bp, Homo sapien
ctgcgtggccgaagtggaccacatc

SEQ ID NO: 1631641 - DNA, 25 bp, Homo sapien
gatggctggtaccagtgtgctgtcc

SEQ ID NO: 1631642 - DNA, 25 bp, Homo sapien
ctgtgagctgatggctggtaccagt

SEQ ID NO: 1631643 - DNA, 25 bp, Homo sapien
acccaagagcggacagagccagcat

SEQ ID NO: 1631644 - DNA, 25 bp, Homo sapien
tgggcctctgctgtgagtctccacc

SEQ ID NO: 1631645 - DNA, 25 bp, Homo sapien
gcccggaaggttgctaagttgccag

SEQ ID NO: 1631646 - DNA, 25 bp, Homo sapien
gtgtagactctggccccagtgaccc

SEQ ID NO: 1631647 - DNA, 25 bp, Homo sapien
attttgccagatggccgtgcatgcc

SEQ ID NO: 1631648 - DNA, 25 bp, Homo sapien
agtgaccctattacatccttgccca

SEQ ID NO: 1631649 - DNA, 25 bp, Homo sapien
ttcccgctgagcggcgcctctgagt

SEQ ID NO: 1631650 - DNA, 25 bp, Homo sapien
tgagtgcccgcagccgaatgcggct

SEQ ID NO: 1631651 - DNA, 25 bp, Homo sapien
gagcgctgagtatgcggccagggct

SEQ ID NO: 1631652 - DNA, 25 bp, Homo sapien
ctggccacatgcgcgggtgacagcc

SEQ ID NO: 1631653 - DNA, 25 bp, Homo sapien
gcccttccttagtatatgcctgcag

SEQ ID NO: 1631654 - DNA, 25 bp, Homo sapien
gatcttcaaagctcccaaactgtgt

SEQ ID NO: 1631655 - DNA, 25 bp, Homo sapien
cggatggcccctttaaccactgtgt

SEQ ID NO: 1631656 - DNA, 25 bp, Homo sapien
caggatgcgtgtcatcccagtggcc

SEQ ID NO: 1631657 - DNA, 25 bp, Homo sapien
aagtggaaatgagttcttgtggatg

SEQ ID NO: 1631658 - DNA, 25 bp, Homo sapien
tggaaatgagttcttgtggatgtag

SEQ ID NO: 1631659 - DNA, 25 bp, Homo sapien
gtggaaatgagttcttgtggatgta

SEQ ID NO: 1631660 - DNA, 25 bp, Homo sapien
ataagtggaaatgagttcttgtgga

SEQ ID NO: 1631661 - DNA, 25 bp, Homo sapien
atagctgagcaccaggtagggtgtc

SEQ ID NO: 1631662 - DNA, 25 bp, Homo sapien
gggaagaccattgacatagctgagc

SEQ ID NO: 1631663 - DNA, 25 bp, Homo sapien
gaccattgacatagctgagcaccag

SEQ ID NO: 1631664 - DNA, 25 bp, Homo sapien
tcagactgggggaagaccattgaca

SEQ ID NO: 1631665 - DNA, 25 bp, Homo sapien
gggtattcgggcatgagagcagcag

SEQ ID NO: 1631666 - DNA, 25 bp, Homo sapien
ctgggtattcgggcatgagagcagc

SEQ ID NO: 1631667 - DNA, 25 bp, Homo sapien
tgggtattcgggcatgagagcagca

SEQ ID NO: 1631668 - DNA, 25 bp, Homo sapien
gaaacatggcacccaccaggaggag

SEQ ID NO: 1631669 - DNA, 25 bp, Homo sapien
gaggagatgcttgcctcttcttgtc

SEQ ID NO: 1631670 - DNA, 25 bp, Homo sapien
gatgaggagatgcttgcctcttctt

SEQ ID NO: 1631671 - DNA, 25 bp, Homo sapien
atgaggagatgcttgcctcttcttg

SEQ ID NO: 1631672 - DNA, 25 bp, Homo sapien
tgaggagatgcttgcctcttcttgt

SEQ ID NO: 1631673 - DNA, 25 bp, Homo sapien
taagcgtttctggtggccgaggcca

SEQ ID NO: 1631674 - DNA, 25 bp, Homo sapien
tctttggtgacgtgctaagcgtttc

SEQ ID NO: 1631675 - DNA, 25 bp, Homo sapien
ggcttccggagcagggagtgtcttt

SEQ ID NO: 1631676 - DNA, 25 bp, Homo sapien
tggccgaggccagactccagcatgt

SEQ ID NO: 1631677 - DNA, 25 bp, Homo sapien
gtcgggagtgagaggtgtctgcttc

SEQ ID NO: 1631678 - DNA, 25 bp, Homo sapien
tgtcgggagtgagaggtgtctgctt

SEQ ID NO: 1631679 - DNA, 25 bp, Homo sapien
ctgtcgggagtgagaggtgtctgct

SEQ ID NO: 1631680 - DNA, 25 bp, Homo sapien
caggatagggatgtcatagagatga

SEQ ID NO: 1631681 - DNA, 25 bp, Homo sapien
gatagggatgtcatagagatgagat

SEQ ID NO: 1631682 - DNA, 25 bp, Homo sapien
atagggatgtcatagagatgagatt

SEQ ID NO: 1631683 - DNA, 25 bp, Homo sapien
ggatagggatgtcatagagatgaga

SEQ ID NO: 1631684 - DNA, 25 bp, Homo sapien
gatctcacaggacagacaaaggcag

SEQ ID NO: 1631685 - DNA, 25 bp, Homo sapien
cctccgtggagcttatatttgacag

SEQ ID NO: 1631686 - DNA, 25 bp, Homo sapien
tacaaagtcaagctgtggtgagtgc

SEQ ID NO: 1631687 - DNA, 25 bp, Homo sapien
tcatgtttggaggtcacgacaggcc

SEQ ID NO: 1631688 - DNA, 25 bp, Homo sapien
agaaggtgcgcagagatgtccccag

SEQ ID NO: 1631689 - DNA, 25 bp, Homo sapien
gcttgaggatgtagacagagacaga

SEQ ID NO: 1631690 - DNA, 25 bp, Homo sapien
gcaggatcttgctagaaggtgcgca

SEQ ID NO: 1631691 - DNA, 25 bp, Homo sapien
ttgctagaaggtgcgcagagatgtc

SEQ ID NO: 1631692 - DNA, 25 bp, Homo sapien
ggcactcctagtgtccgggctgtct

SEQ ID NO: 1631693 - DNA, 25 bp, Homo sapien
tagtgtccgggctgtcttttgtccc

SEQ ID NO: 1631694 - DNA, 25 bp, Homo sapien
acagggcactcctagtgtccgggct

SEQ ID NO: 1631695 - DNA, 25 bp, Homo sapien
gaagtggggaggctactgggtgccc

SEQ ID NO: 1631696 - DNA, 25 bp, Homo sapien
gtccagcgtgttggcctcctcgaac

SEQ ID NO: 1631697 - DNA, 25 bp, Homo sapien
caggtcctggccagtccgagtctcc

SEQ ID NO: 1631698 - DNA, 25 bp, Homo sapien
tccgagtctccctcgacctccaagt

SEQ ID NO: 1631699 - DNA, 25 bp, Homo sapien
cctccaagtcctggtccagcgtgtt

SEQ ID NO: 1631700 - DNA, 25 bp, Homo sapien
ccagagccgccggaagatggagtct

SEQ ID NO: 1631701 - DNA, 25 bp, Homo sapien
ggagtctcggtaagctcccagggcc

SEQ ID NO: 1631702 - DNA, 25 bp, Homo sapien
cctgggctcactccgctgtgccagc

SEQ ID NO: 1631703 - DNA, 25 bp, Homo sapien
tgcccctcgtaggtccacctggagg

SEQ ID NO: 1631704 - DNA, 25 bp, Homo sapien
caggtgcaggctgttctgctcagcc

SEQ ID NO: 1631705 - DNA, 25 bp, Homo sapien
tctgctcagcctctagtacctccag

SEQ ID NO: 1631706 - DNA, 25 bp, Homo sapien
agcctctagtacctccaggccagaa

SEQ ID NO: 1631707 - DNA, 25 bp, Homo sapien
cctctagtacctccaggccagaaat

SEQ ID NO: 1631708 - DNA, 25 bp, Homo sapien
gcacagtccatctccgggtctgtct

SEQ ID NO: 1631709 - DNA, 25 bp, Homo sapien
cagtccatctccgggtctgtctgca

SEQ ID NO: 1631710 - DNA, 25 bp, Homo sapien
catctccgggtctgtctgcaccagg

SEQ ID NO: 1631711 - DNA, 25 bp, Homo sapien
gtccatctccgggtctgtctgcacc

SEQ ID NO: 1631712 - DNA, 25 bp, Homo sapien
ttggcccaccctggaagtgctcagg

SEQ ID NO: 1631713 - DNA, 25 bp, Homo sapien
cccagctgggtcctcgtaggaagag

SEQ ID NO: 1631714 - DNA, 25 bp, Homo sapien
caggagggcccaaggagtcctgtcc

SEQ ID NO: 1631715 - DNA, 25 bp, Homo sapien
gtgagcggcaggctcattgcccctt

SEQ ID NO: 1631716 - DNA, 25 bp, Homo sapien
tcacttttcagcctaccgtcacccc

SEQ ID NO: 1631717 - DNA, 25 bp, Homo sapien
ctcctatgtccccaggcgatcacag

SEQ ID NO: 1631718 - DNA, 25 bp, Homo sapien
ggcggtgactgggtgagtctcgaca

SEQ ID NO: 1631719 - DNA, 25 bp, Homo sapien
tcctaccctcacatggcccctgcca

SEQ ID NO: 1631720 - DNA, 25 bp, Homo sapien
gctctgagccaagtctagggcccag

SEQ ID NO: 1631721 - DNA, 25 bp, Homo sapien
tcgtgctctcctctccggacgcggg

SEQ ID NO: 1631722 - DNA, 25 bp, Homo sapien
cctctctaggtgctcccggtgggtg

SEQ ID NO: 1631723 - DNA, 25 bp, Homo sapien
cagacggtgcatccaacaatgtccg

SEQ ID NO: 1631724 - DNA, 25 bp, Homo sapien
gagctcctccgctggagtcacccgg

SEQ ID NO: 1631725 - DNA, 25 bp, Homo sapien
tccgctggagtcacccgggcctgag

SEQ ID NO: 1631726 - DNA, 25 bp, Homo sapien
ttccctagacaagggtgtcccagag

SEQ ID NO: 1631727 - DNA, 25 bp, Homo sapien
gtgagggcagccagtaagacctctt

SEQ ID NO: 1631728 - DNA, 25 bp, Homo sapien
ggggtcttctgtagctcacacaaaa

SEQ ID NO: 1631729 - DNA, 25 bp, Homo sapien
cacggttcctaggtcgcggagtcac

SEQ ID NO: 1631730 - DNA, 25 bp, Homo sapien
ttcctaggtcgcggagtcacagcag

SEQ ID NO: 1631731 - DNA, 25 bp, Homo sapien
gggtcttctgtagctcacacaaaat

SEQ ID NO: 1631732 - DNA, 25 bp, Homo sapien
ggcgtccagcgcgtctacgcgggcg

SEQ ID NO: 1631733 - DNA, 25 bp, Homo sapien
agcgagacccgggtgccgcgcacca

SEQ ID NO: 1631734 - DNA, 25 bp, Homo sapien
tccagcagtagcgaggtggtgggcc

SEQ ID NO: 1631735 - DNA, 25 bp, Homo sapien
cgccgacgggcaggctgccgcattg

SEQ ID NO: 1631736 - DNA, 25 bp, Homo sapien
ggcatgtgggacagacaccctgtaa

SEQ ID NO: 1631737 - DNA, 25 bp, Homo sapien
tctgggaggaagtgggtacacccca

SEQ ID NO: 1631738 - DNA, 25 bp, Homo sapien
tacaccccatgaggggacaagggaa

SEQ ID NO: 1631739 - DNA, 25 bp, Homo sapien
caccctgtaagcagatgggttgggt

SEQ ID NO: 1631740 - DNA, 25 bp, Homo sapien
gttgaagtgcctacaagcagctggg

SEQ ID NO: 1631741 - DNA, 25 bp, Homo sapien
cccgaaggcatgtgggaccaggtca

SEQ ID NO: 1631742 - DNA, 25 bp, Homo sapien
catcttggaggatgtgcgaggttga

SEQ ID NO: 1631743 - DNA, 25 bp, Homo sapien
gcatgtgggaccaggtcatcttgga

SEQ ID NO: 1631744 - DNA, 25 bp, Homo sapien
ctcgtagaagtccagcacggtgtgg

SEQ ID NO: 1631745 - DNA, 25 bp, Homo sapien
tggccgccgcggctcgtagaagtcc

SEQ ID NO: 1631746 - DNA, 25 bp, Homo sapien
aagtccagcacggtgtgggagccca

SEQ ID NO: 1631747 - DNA, 25 bp, Homo sapien
gcggctcgtagaagtccagcacggt

SEQ ID NO: 1631748 - DNA, 25 bp, Homo sapien
tagtacagtggtccgtcctcgtggg

SEQ ID NO: 1631749 - DNA, 25 bp, Homo sapien
cagtcgggtagtacagtggtccgtc

SEQ ID NO: 1631750 - DNA, 25 bp, Homo sapien
tcgggtagtacagtggtccgtcctc

SEQ ID NO: 1631751 - DNA, 25 bp, Homo sapien
ctgacagtcgggtagtacagtggtc

SEQ ID NO: 1631752 - DNA, 25 bp, Homo sapien
cagggcaggagtccacaacccccac

SEQ ID NO: 1631753 - DNA, 25 bp, Homo sapien
tgggcagggcaggagtccacaaccc

SEQ ID NO: 1631754 - DNA, 25 bp, Homo sapien
gcaggagtccacaacccccaccctc

SEQ ID NO: 1631755 - DNA, 25 bp, Homo sapien
aggagtccacaacccccaccctctg

SEQ ID NO: 1631756 - DNA, 25 bp, Homo sapien
tgcctaatgagtgagggtgggtaca

SEQ ID NO: 1631757 - DNA, 25 bp, Homo sapien
agaagtctgagtggggggacacggg

SEQ ID NO: 1631758 - DNA, 25 bp, Homo sapien
tctgagtggggggacacgggccgag

SEQ ID NO: 1631759 - DNA, 25 bp, Homo sapien
gctgcctaatgagtgagggtgggta

SEQ ID NO: 1631760 - DNA, 25 bp, Homo sapien
gatgccctccccaggcagatactgg

SEQ ID NO: 1631761 - DNA, 25 bp, Homo sapien
catgatgccctccccaggcagatac

SEQ ID NO: 1631762 - DNA, 25 bp, Homo sapien
atgccctccccaggcagatactggt

SEQ ID NO: 1631763 - DNA, 25 bp, Homo sapien
tgatgccctccccaggcagatactg

SEQ ID NO: 1631764 - DNA, 25 bp, Homo sapien
cacgtagcgctggagccatgggggc

SEQ ID NO: 1631765 - DNA, 25 bp, Homo sapien
tcacgaggacatggttagctgggag

SEQ ID NO: 1631766 - DNA, 25 bp, Homo sapien
gaggacatggttagctgggaggcct

SEQ ID NO: 1631767 - DNA, 25 bp, Homo sapien
cgaggacatggttagctgggaggcc

SEQ ID NO: 1631768 - DNA, 25 bp, Homo sapien
ctggggaaggcaatggggtcctgag

SEQ ID NO: 1631769 - DNA, 25 bp, Homo sapien
tggggaaggcaatggggtcctgagg

SEQ ID NO: 1631770 - DNA, 25 bp, Homo sapien
gaaggcaatggggtcctgagggccc

SEQ ID NO: 1631771 - DNA, 25 bp, Homo sapien
gggaaggcaatggggtcctgagggc

SEQ ID NO: 1631772 - DNA, 25 bp, Homo sapien
tcaggaaatccctaatccctcagga

SEQ ID NO: 1631773 - DNA, 25 bp, Homo sapien
ccattagggattccacagtggctgg

SEQ ID NO: 1631774 - DNA, 25 bp, Homo sapien
cccctgaccgtttggagatagccac

SEQ ID NO: 1631775 - DNA, 25 bp, Homo sapien
ccttgagctgtcagggaccctctga

SEQ ID NO: 1631776 - DNA, 25 bp, Homo sapien
cagttctgtaactttctcccagaga

SEQ ID NO: 1631777 - DNA, 25 bp, Homo sapien
ccagttctgtaactttctcccagag

SEQ ID NO: 1631778 - DNA, 25 bp, Homo sapien
agttctgtaactttctcccagagag

SEQ ID NO: 1631779 - DNA, 25 bp, Homo sapien
tcatggttatggagctgtactgggc

SEQ ID NO: 1631780 - DNA, 25 bp, Homo sapien
aaccgacttgttcctattgcctggg

SEQ ID NO: 1631781 - DNA, 25 bp, Homo sapien
caaaggtctggaatgggctatctca

SEQ ID NO: 1631782 - DNA, 25 bp, Homo sapien
cagtgggttactccaacacagggaa

SEQ ID NO: 1631783 - DNA, 25 bp, Homo sapien
ggacatagtagattacaggtggtgc

SEQ ID NO: 1631784 - DNA, 25 bp, Homo sapien
ctgtcgaagcaaatactcctcctct

SEQ ID NO: 1631785 - DNA, 25 bp, Homo sapien
ctttggagatgaagtcagggacata

SEQ ID NO: 1631786 - DNA, 25 bp, Homo sapien
tggagatgaagtcagggacatagta

SEQ ID NO: 1631787 - DNA, 25 bp, Homo sapien
agtcaagggaccagtgccattccag

SEQ ID NO: 1631788 - DNA, 25 bp, Homo sapien
gtggcccttcaacccacacagagga

SEQ ID NO: 1631789 - DNA, 25 bp, Homo sapien
caggtcagggtctaaagtcaaggga

SEQ ID NO: 1631790 - DNA, 25 bp, Homo sapien
tcaggatgtcctcagacaggtcagg

SEQ ID NO: 1631791 - DNA, 25 bp, Homo sapien
ctgctccactctgaacggttccagg

SEQ ID NO: 1631792 - DNA, 25 bp, Homo sapien
cactctgaacggttccagggctggg

SEQ ID NO: 1631793 - DNA, 25 bp, Homo sapien
caacaccaactccttgcacccaatc

SEQ ID NO: 1631794 - DNA, 25 bp, Homo sapien
gctgggactctggcgtcctgctcct

SEQ ID NO: 1631795 - DNA, 25 bp, Homo sapien
tcagccctcttctgaaacgcacttg

SEQ ID NO: 1631796 - DNA, 25 bp, Homo sapien
cctcttctgaaacgcacttggtctc

SEQ ID NO: 1631797 - DNA, 25 bp, Homo sapien
tctgaaacgcacttggtctctaaaa

SEQ ID NO: 1631798 - DNA, 25 bp, Homo sapien
aaacgcacttggtctctaaaatctg

SEQ ID NO: 1631799 - DNA, 25 bp, Homo sapien
ttcagacctgcaactgtgagcccgg

SEQ ID NO: 1631800 - DNA, 25 bp, Homo sapien
tgagcccggctatcaacactcagcg

SEQ ID NO: 1631801 - DNA, 25 bp, Homo sapien
attactctgtccactaagggcccat

SEQ ID NO: 1631802 - DNA, 25 bp, Homo sapien
gccttttaggactccaagctctgag

SEQ ID NO: 1631803 - DNA, 25 bp, Homo sapien
aatttccaaattcaacatccccatc

SEQ ID NO: 1631804 - DNA, 25 bp, Homo sapien
ccaatttccaaattcaacatcccca

SEQ ID NO: 1631805 - DNA, 25 bp, Homo sapien
ccagcgtcccctccaatttccaaat

SEQ ID NO: 1631806 - DNA, 25 bp, Homo sapien
cgtccaccagcgtcccctccaattt

SEQ ID NO: 1631807 - DNA, 25 bp, Homo sapien
gaaacgtctttattgaagaggacag

SEQ ID NO: 1631808 - DNA, 25 bp, Homo sapien
aaacgtctttattgaagaggacagg

SEQ ID NO: 1631809 - DNA, 25 bp, Homo sapien
aacgtctttattgaagaggacagga

SEQ ID NO: 1631810 - DNA, 25 bp, Homo sapien
tagagaattttctgggagtctggcc

SEQ ID NO: 1631811 - DNA, 25 bp, Homo sapien
gggtcacgacatcttgagaggactg

SEQ ID NO: 1631812 - DNA, 25 bp, Homo sapien
tgtactctagggtttgggatcccca

SEQ ID NO: 1631813 - DNA, 25 bp, Homo sapien
ggttccaggatttgagatcccctca

SEQ ID NO: 1631814 - DNA, 25 bp, Homo sapien
tctatctcagggtgactcagggctc

SEQ ID NO: 1631815 - DNA, 25 bp, Homo sapien
tcagggaatctctttctgggtgaca

SEQ ID NO: 1631816 - DNA, 25 bp, Homo sapien
tctctttgtcaggtgtccagggcct

SEQ ID NO: 1631817 - DNA, 25 bp, Homo sapien
ctcaatgatcgagggctggctaaca

SEQ ID NO: 1631818 - DNA, 25 bp, Homo sapien
ctaagactgcatctccgccctcagc

SEQ ID NO: 1631819 - DNA, 25 bp, Homo sapien
gccctcagcatccaggggaaccagc

SEQ ID NO: 1631820 - DNA, 25 bp, Homo sapien
aagactgcatctccgccctcagcat

SEQ ID NO: 1631821 - DNA, 25 bp, Homo sapien
gcatctccgccctcagcatccaggg

SEQ ID NO: 1631822 - DNA, 25 bp, Homo sapien
gtgaaggtgcgtttgggctgcgtca

SEQ ID NO: 1631823 - DNA, 25 bp, Homo sapien
ctctgatgcaatgtcctttggggtc

SEQ ID NO: 1631824 - DNA, 25 bp, Homo sapien
gggtccggactgtggtgaaggtgcg

SEQ ID NO: 1631825 - DNA, 25 bp, Homo sapien
gatgcaatgtcctttggggtccgga

SEQ ID NO: 1631826 - DNA, 25 bp, Homo sapien
cacttttttggctccaacgctgtcc

SEQ ID NO: 1631827 - DNA, 25 bp, Homo sapien
tgtccccgggggaatcagtggatcc

SEQ ID NO: 1631828 - DNA, 25 bp, Homo sapien
ttgtcacttgatgcacttttttggc

SEQ ID NO: 1631829 - DNA, 25 bp, Homo sapien
cccgggggaatcagtggatccgcca

SEQ ID NO: 1631830 - DNA, 25 bp, Homo sapien
ctggtgcgaagaccccatgcctcgg

SEQ ID NO: 1631831 - DNA, 25 bp, Homo sapien
tctgaatacgggatgctggtgcgaa

SEQ ID NO: 1631832 - DNA, 25 bp, Homo sapien
tgaagtaccggacaccgaagacaga

SEQ ID NO: 1631833 - DNA, 25 bp, Homo sapien
gggcaagtgaagtaccggacaccga

SEQ ID NO: 1631834 - DNA, 25 bp, Homo sapien
gcgacaaggacctggtctccaacct

SEQ ID NO: 1631835 - DNA, 25 bp, Homo sapien
gaagcgcacgatcccctgcttctgg

SEQ ID NO: 1631836 - DNA, 25 bp, Homo sapien
gtctgtcttcccgtagaagcgcacg

SEQ ID NO: 1631837 - DNA, 25 bp, Homo sapien
ttctggcccgcgacaaggacctggt

SEQ ID NO: 1631838 - DNA, 25 bp, Homo sapien
cactgccttggagatcttggacacg

SEQ ID NO: 1631839 - DNA, 25 bp, Homo sapien
cggtgacacgggagaagtccatccg

SEQ ID NO: 1631840 - DNA, 25 bp, Homo sapien
tgccttggagatcttggacacggag

SEQ ID NO: 1631841 - DNA, 25 bp, Homo sapien
tttgtgttccctgcggcctttgccg

SEQ ID NO: 1631842 - DNA, 25 bp, Homo sapien
gctgccatcgttcttgccctcaggt

SEQ ID NO: 1631843 - DNA, 25 bp, Homo sapien
gccctcaggttcgtccagctccacg

SEQ ID NO: 1631844 - DNA, 25 bp, Homo sapien
actggccgctggcaaactccgtggt

SEQ ID NO: 1631845 - DNA, 25 bp, Homo sapien
ggcagatgaagtaccgaacgccccc

SEQ ID NO: 1631846 - DNA, 25 bp, Homo sapien
tagaaagaagactcagatgattttt

SEQ ID NO: 1631847 - DNA, 25 bp, Homo sapien
gactgggtcccgtatggagcccaag

SEQ ID NO: 1631848 - DNA, 25 bp, Homo sapien
tcattacaagtggagccccatgaca

SEQ ID NO: 1631849 - DNA, 25 bp, Homo sapien
gagcccaagggacaccgggaaatga

SEQ ID NO: 1631850 - DNA, 25 bp, Homo sapien
gaaatgagtgaaattggagtccctg

SEQ ID NO: 1631851 - DNA, 25 bp, Homo sapien
ccatgcaaacacacatcccagcccc

SEQ ID NO: 1631852 - DNA, 25 bp, Homo sapien
ccaccatgcaaacacacatcccagc

SEQ ID NO: 1631853 - DNA, 25 bp, Homo sapien
gcaaacacacatcccagcccctgac

SEQ ID NO: 1631854 - DNA, 25 bp, Homo sapien
atgcaaacacacatcccagcccctg

SEQ ID NO: 1631855 - DNA, 25 bp, Homo sapien
ggcgcaagatagtggcactgcctct

SEQ ID NO: 1631856 - DNA, 25 bp, Homo sapien
gagattgcctgggacgttgtcatag

SEQ ID NO: 1631857 - DNA, 25 bp, Homo sapien
ggcgcaagcccagtgcgctaagcat

SEQ ID NO: 1631858 - DNA, 25 bp, Homo sapien
tcatagttgggtagcgtgaccttgg

SEQ ID NO: 1631859 - DNA, 25 bp, Homo sapien
ctccgccggcacctgtccttttcga

SEQ ID NO: 1631860 - DNA, 25 bp, Homo sapien
cctccgccggcacctgtccttttcg

SEQ ID NO: 1631861 - DNA, 25 bp, Homo sapien
ccgccggcacctgtccttttcgatt

SEQ ID NO: 1631862 - DNA, 25 bp, Homo sapien
tccgccggcacctgtccttttcgat

SEQ ID NO: 1631863 - DNA, 25 bp, Homo sapien
ggttggcgccgtgctccagcaaaca

SEQ ID NO: 1631864 - DNA, 25 bp, Homo sapien
ttggcgccgtgctccagcaaacatt

SEQ ID NO: 1631865 - DNA, 25 bp, Homo sapien
gttggcgccgtgctccagcaaacat

SEQ ID NO: 1631866 - DNA, 25 bp, Homo sapien
gggttggcgccgtgctccagcaaac

SEQ ID NO: 1631867 - DNA, 25 bp, Homo sapien
ttcagcagcacacgcacgaggtcgg

SEQ ID NO: 1631868 - DNA, 25 bp, Homo sapien
cgaggtcgggcacatcaaaataggc

SEQ ID NO: 1631869 - DNA, 25 bp, Homo sapien
agtgaagcgcgttcatgttggtcca

SEQ ID NO: 1631870 - DNA, 25 bp, Homo sapien
agcggctgcgcagcgtcacatctgc

SEQ ID NO: 1631871 - DNA, 25 bp, Homo sapien
tttgcacgcatagtggagcagtgtc

SEQ ID NO: 1631872 - DNA, 25 bp, Homo sapien
ccagctttgcacgcatagtggagca

SEQ ID NO: 1631873 - DNA, 25 bp, Homo sapien
tgcacgcatagtggagcagtgtcat

SEQ ID NO: 1631874 - DNA, 25 bp, Homo sapien
gctttgcacgcatagtggagcagtg

SEQ ID NO: 1631875 - DNA, 25 bp, Homo sapien
gtcacgatcgttcacatggcagcct

SEQ ID NO: 1631876 - DNA, 25 bp, Homo sapien
gtcggtcagcccgtcacgatcgttc

SEQ ID NO: 1631877 - DNA, 25 bp, Homo sapien
tcagcccgtcacgatcgttcacatg

SEQ ID NO: 1631878 - DNA, 25 bp, Homo sapien
gatcgttcacatggcagcctcggcg

SEQ ID NO: 1631879 - DNA, 25 bp, Homo sapien
gacgtctatcttgtgctggacttgg

SEQ ID NO: 1631880 - DNA, 25 bp, Homo sapien
aacaggatctcctggcacgccgggt

SEQ ID NO: 1631881 - DNA, 25 bp, Homo sapien
cactggcgcacaatggcaaacagct

SEQ ID NO: 1631882 - DNA, 25 bp, Homo sapien
cacgccgggtcattgggatcgaaga

SEQ ID NO: 1631883 - DNA, 25 bp, Homo sapien
tgccgaggggtgcacaacaggcttc

SEQ ID NO: 1631884 - DNA, 25 bp, Homo sapien
gccgaggggtgcacaacaggcttct

SEQ ID NO: 1631885 - DNA, 25 bp, Homo sapien
cgaggggtgcacaacaggcttctgc

SEQ ID NO: 1631886 - DNA, 25 bp, Homo sapien
aggtgccgaggggtgcacaacaggc

SEQ ID NO: 1631887 - DNA, 25 bp, Homo sapien
cttcctcctctcctcggggtggcgg

SEQ ID NO: 1631888 - DNA, 25 bp, Homo sapien
tcttcctcctctcctcggggtggcg

SEQ ID NO: 1631889 - DNA, 25 bp, Homo sapien
tcggggcaggatctgtcttagtcat

SEQ ID NO: 1631890 - DNA, 25 bp, Homo sapien
ccatcggggcaggatctgtcttagt

SEQ ID NO: 1631891 - DNA, 25 bp, Homo sapien
catcggggcaggatctgtcttagtc

SEQ ID NO: 1631892 - DNA, 25 bp, Homo sapien
atcggggcaggatctgtcttagtca

SEQ ID NO: 1631893 - DNA, 25 bp, Homo sapien
cgggtgcagagttgggggcagcctt

SEQ ID NO: 1631894 - DNA, 25 bp, Homo sapien
gttgggggcagccttcaggcaaatc

SEQ ID NO: 1631895 - DNA, 25 bp, Homo sapien
cagagttgggggcagccttcaggca

SEQ ID NO: 1631896 - DNA, 25 bp, Homo sapien
gagttgggggcagccttcaggcaaa

SEQ ID NO: 1631897 - DNA, 25 bp, Homo sapien
ccgggtggcctccgcgcaactggat

SEQ ID NO: 1631898 - DNA, 25 bp, Homo sapien
gatcttgggcaaccatagggacccc

SEQ ID NO: 1631899 - DNA, 25 bp, Homo sapien
tccaagcccctaggagcttccaggg

SEQ ID NO: 1631900 - DNA, 25 bp, Homo sapien
tggcctccgcgcaactggatcttgg

SEQ ID NO: 1631901 - DNA, 25 bp, Homo sapien
tagagggccccggtgtgtgcgccca

SEQ ID NO: 1631902 - DNA, 25 bp, Homo sapien
ggtgtgtgcgcccagcgcctgccac

SEQ ID NO: 1631903 - DNA, 25 bp, Homo sapien
agagggccccggtgtgtgcgcccag

SEQ ID NO: 1631904 - DNA, 25 bp, Homo sapien
ccatagagggccccggtgtgtgcgc

SEQ ID NO: 1631905 - DNA, 25 bp, Homo sapien
cgtcaggcccctcagtcgcggctgc

SEQ ID NO: 1631906 - DNA, 25 bp, Homo sapien
tcttctcctcccgcgtcaggcccct

SEQ ID NO: 1631907 - DNA, 25 bp, Homo sapien
cgcgtcaggcccctcagtcgcggct

SEQ ID NO: 1631908 - DNA, 25 bp, Homo sapien
tcctcccgcgtcaggcccctcagtc

SEQ ID NO: 1631909 - DNA, 25 bp, Homo sapien
cgctggggaccaaagtggagactgg

SEQ ID NO: 1631910 - DNA, 25 bp, Homo sapien
gtgtcggtgtcaggggacgtgatgg

SEQ ID NO: 1631911 - DNA, 25 bp, Homo sapien
ggacgaggcccagacgccgacaggg

SEQ ID NO: 1631912 - DNA, 25 bp, Homo sapien
ctgtgggagcaatggggtgtcggtg

SEQ ID NO: 1631913 - DNA, 25 bp, Homo sapien
gggacgaggcccagacgccgacagg

SEQ ID NO: 1631914 - DNA, 25 bp, Homo sapien
cgagtagccgagaccacacgtgcat

SEQ ID NO: 1631915 - DNA, 25 bp, Homo sapien
tagccgagaccacacgtgcatgcca

SEQ ID NO: 1631916 - DNA, 25 bp, Homo sapien
ccaggctactgtgcagtgttgtgat

SEQ ID NO: 1631917 - DNA, 25 bp, Homo sapien
cccgagtagccgagaccacacgtgc

SEQ ID NO: 1631918 - DNA, 25 bp, Homo sapien
ggaacctgagcctgtagcgctccag

SEQ ID NO: 1631919 - DNA, 25 bp, Homo sapien
ttgttgtctttatagcactcatcgc

SEQ ID NO: 1631920 - DNA, 25 bp, Homo sapien
tctgatcacccaggtttctgctaaa

SEQ ID NO: 1631921 - DNA, 25 bp, Homo sapien
ggctctttgtgatgcccggaatgct

SEQ ID NO: 1631922 - DNA, 25 bp, Homo sapien
aaagcgtgggactccttagaaccag

SEQ ID NO: 1631923 - DNA, 25 bp, Homo sapien
tgggccaagcccacgtataatgtct

SEQ ID NO: 1631924 - DNA, 25 bp, Homo sapien
caagtagaatgagcaccatgagggc

SEQ ID NO: 1631925 - DNA, 25 bp, Homo sapien
tcagtaccaggcttggcaaaaagcg

SEQ ID NO: 1631926 - DNA, 25 bp, Homo sapien
aggagctccggcttggcatccactg

SEQ ID NO: 1631927 - DNA, 25 bp, Homo sapien
atccgagtgtccaggagctccggct

SEQ ID NO: 1631928 - DNA, 25 bp, Homo sapien
aggaccatggctatgtcaggccctc

SEQ ID NO: 1631929 - DNA, 25 bp, Homo sapien
tccacagatgatggtgaaggtttgg

SEQ ID NO: 1631930 - DNA, 25 bp, Homo sapien
tgcagctgcgcctggtgccgctcct

SEQ ID NO: 1631931 - DNA, 25 bp, Homo sapien
gctcctggcaccgttgcagcctccg

SEQ ID NO: 1631932 - DNA, 25 bp, Homo sapien
gcacccggcgttgcagtgctcccag

SEQ ID NO: 1631933 - DNA, 25 bp, Homo sapien
gcagggacttcaggttgtgaccgct

SEQ ID NO: 1631934 - DNA, 25 bp, Homo sapien
ttctgggtgcttcgggtcctccgct

SEQ ID NO: 1631935 - DNA, 25 bp, Homo sapien
tctgggtgcttcgggtcctccgctg

SEQ ID NO: 1631936 - DNA, 25 bp, Homo sapien
tgggtgcttcgggtcctccgctgac

SEQ ID NO: 1631937 - DNA, 25 bp, Homo sapien
gggtgcttcgggtcctccgctgact

SEQ ID NO: 1631938 - DNA, 25 bp, Homo sapien
agggtgtgaagtgctcgctgcacaa

SEQ ID NO: 1631939 - DNA, 25 bp, Homo sapien
tgctcgctgcacaagtgctggtggc

SEQ ID NO: 1631940 - DNA, 25 bp, Homo sapien
atcaggccgcaggtagcgcacaccc

SEQ ID NO: 1631941 - DNA, 25 bp, Homo sapien
gcagctgggcacccagtgctcacag

SEQ ID NO: 1631942 - DNA, 25 bp, Homo sapien
aggcctgcagccggggaccatcctt

SEQ ID NO: 1631943 - DNA, 25 bp, Homo sapien
tgcagccggggaccatccttcagtg

SEQ ID NO: 1631944 - DNA, 25 bp, Homo sapien
gcctgcagccggggaccatccttca

SEQ ID NO: 1631945 - DNA, 25 bp, Homo sapien
ctgcagccggggaccatccttcagt

SEQ ID NO: 1631946 - DNA, 25 bp, Homo sapien
tgttggagcagttcggcgccctgca

SEQ ID NO: 1631947 - DNA, 25 bp, Homo sapien
ttgtagaagctcacagggcggttgt

SEQ ID NO: 1631948 - DNA, 25 bp, Homo sapien
ccaggcggcccgcagtgttggagca

SEQ ID NO: 1631949 - DNA, 25 bp, Homo sapien
acagggcggttgtctgcacccaggc

SEQ ID NO: 1631950 - DNA, 25 bp, Homo sapien
ccatagcgagtactgtgcacctgcg

SEQ ID NO: 1631951 - DNA, 25 bp, Homo sapien
gcactttggttctcgcggagcgccg

SEQ ID NO: 1631952 - DNA, 25 bp, Homo sapien
ccgtggagtctcgtcacgtaccggg

SEQ ID NO: 1631953 - DNA, 25 bp, Homo sapien
cgtcacgtgacgaatgggccatagc

SEQ ID NO: 1631954 - DNA, 25 bp, Homo sapien
tcacggcgtttctgagcctgcgcca

SEQ ID NO: 1631955 - DNA, 25 bp, Homo sapien
caccccgactttcatcacgtgttgg

SEQ ID NO: 1631956 - DNA, 25 bp, Homo sapien
tgcgccaaccaaatcaactggctag

SEQ ID NO: 1631957 - DNA, 25 bp, Homo sapien
ggctagtcaatctcttacggctcca

SEQ ID NO: 1631958 - DNA, 25 bp, Homo sapien
gacgcttaatcaggcatccagtaca

SEQ ID NO: 1631959 - DNA, 25 bp, Homo sapien
cacatagttcctctaggtggcggca

SEQ ID NO: 1631960 - DNA, 25 bp, Homo sapien
aaaacgcagtctggatgaaagaccc

SEQ ID NO: 1631961 - DNA, 25 bp, Homo sapien
gcggccgtggccttagcctcgtaaa

SEQ ID NO: 1631962 - DNA, 25 bp, Homo sapien
ctgagccgggcggatcacctgcatt

SEQ ID NO: 1631963 - DNA, 25 bp, Homo sapien
ggctgcagtgtgtggagatcgtacc

SEQ ID NO: 1631964 - DNA, 25 bp, Homo sapien
gaggtcatagaggagccaagatcac

SEQ ID NO: 1631965 - DNA, 25 bp, Homo sapien
cggatcacctgcatttaggagtttg

SEQ ID NO: 1631966 - DNA, 25 bp, Homo sapien
ggagatgcctatatcccaggtgggc

SEQ ID NO: 1631967 - DNA, 25 bp, Homo sapien
gagagacgcagtgtcaccatctggc

SEQ ID NO: 1631968 - DNA, 25 bp, Homo sapien
tgagtgtgtaactggctagcaaagc

SEQ ID NO: 1631969 - DNA, 25 bp, Homo sapien
caacagtcgtccagtgtcagggatc

SEQ ID NO: 1631970 - DNA, 25 bp, Homo sapien
tggtgtttattacactcgggggaga

SEQ ID NO: 1631971 - DNA, 25 bp, Homo sapien
atctggtgtttattacactcggggg

SEQ ID NO: 1631972 - DNA, 25 bp, Homo sapien
tttattacactcgggggagagagga

SEQ ID NO: 1631973 - DNA, 25 bp, Homo sapien
gtgtttattacactcgggggagaga

SEQ ID NO: 1631974 - DNA, 25 bp, Homo sapien
tcactcggtccagcggtggccgcag

SEQ ID NO: 1631975 - DNA, 25 bp, Homo sapien
gctgtgcacacgtagtaaaggcgca

SEQ ID NO: 1631976 - DNA, 25 bp, Homo sapien
acacgtagtaaaggcgcatggcgtc

SEQ ID NO: 1631977 - DNA, 25 bp, Homo sapien
tgcacacgtagtaaaggcgcatggc

SEQ ID NO: 1631978 - DNA, 25 bp, Homo sapien
ctcggcccgcgcactgtgtgactgg

SEQ ID NO: 1631979 - DNA, 25 bp, Homo sapien
tcggcccgcgcactgtgtgactgga

SEQ ID NO: 1631980 - DNA, 25 bp, Homo sapien
tccccagtaccagctgaacgctcac

SEQ ID NO: 1631981 - DNA, 25 bp, Homo sapien
ctccccagtaccagctgaacgctca

SEQ ID NO: 1631982 - DNA, 25 bp, Homo sapien
ttggcacgggtggtcctcggtccgc

SEQ ID NO: 1631983 - DNA, 25 bp, Homo sapien
gtggtcctcggtccgcggcaacgtg

SEQ ID NO: 1631984 - DNA, 25 bp, Homo sapien
cacgtcggcgataatctgggtcagt

SEQ ID NO: 1631985 - DNA, 25 bp, Homo sapien
ggtcctgggacacgtcggcgataat

SEQ ID NO: 1631986 - DNA, 25 bp, Homo sapien
gcctcctgctggtaatcacagttcc

SEQ ID NO: 1631987 - DNA, 25 bp, Homo sapien
ttgacatagatgcagctgttgtcgg

SEQ ID NO: 1631988 - DNA, 25 bp, Homo sapien
cctgctggtaatcacagttccggca

SEQ ID NO: 1631989 - DNA, 25 bp, Homo sapien
tccacttcgtgcgtgatcttgttga

SEQ ID NO: 1631990 - DNA, 25 bp, Homo sapien
tgatcccggaggatatgacgacagg

SEQ ID NO: 1631991 - DNA, 25 bp, Homo sapien
cacgctgggaacaggtggacctgcc

SEQ ID NO: 1631992 - DNA, 25 bp, Homo sapien
agggcgaacagggagtccgatcaca

SEQ ID NO: 1631993 - DNA, 25 bp, Homo sapien
ggcaggacatgagagtcaggatcac

SEQ ID NO: 1631994 - DNA, 25 bp, Homo sapien
cgcgtagagcagaatgcggttctcc

SEQ ID NO: 1631995 - DNA, 25 bp, Homo sapien
agcagaatgcggttctccttgtctt

SEQ ID NO: 1631996 - DNA, 25 bp, Homo sapien
gagcagaatgcggttctccttgtct

SEQ ID NO: 1631997 - DNA, 25 bp, Homo sapien
gtagagcagaatgcggttctccttg

SEQ ID NO: 1631998 - DNA, 25 bp, Homo sapien
gggttagttctggagccattcctcg

SEQ ID NO: 1631999 - DNA, 25 bp, Homo sapien
ttcctcgcccgccttctaacatcac

SEQ ID NO: 1632000 - DNA, 25 bp, Homo sapien
tagttctggagccattcctcgcccg

SEQ ID NO: 1632001 - DNA, 25 bp, Homo sapien
gccttctaacatcacccgctccctc

SEQ ID NO: 1632002 - DNA, 25 bp, Homo sapien
attcctggcagaagcgaatacccac

SEQ ID NO: 1632003 - DNA, 25 bp, Homo sapien
gctcgtaagtcccgtcgggctccat

SEQ ID NO: 1632004 - DNA, 25 bp, Homo sapien
tggcagaagcgaatacccacgaagc

SEQ ID NO: 1632005 - DNA, 25 bp, Homo sapien
cacgaagcccggctcgtaagtcccg

SEQ ID NO: 1632006 - DNA, 25 bp, Homo sapien
agccttccgcgcttgctccgccgcg

SEQ ID NO: 1632007 - DNA, 25 bp, Homo sapien
ccagccttccgcgcttgctccgccg

SEQ ID NO: 1632008 - DNA, 25 bp, Homo sapien
cagccttccgcgcttgctccgccgc

SEQ ID NO: 1632009 - DNA, 25 bp, Homo sapien
gggccgctattggaagaaccgtgaa

SEQ ID NO: 1632010 - DNA, 25 bp, Homo sapien
tcgtaaaccgcaaaacactgagcat

SEQ ID NO: 1632011 - DNA, 25 bp, Homo sapien
gcatcgccgcctcagtttacagaat

SEQ ID NO: 1632012 - DNA, 25 bp, Homo sapien
caggcctaggtgcttcgccaaaaga

SEQ ID NO: 1632013 - DNA, 25 bp, Homo sapien
agtggagcctcggagaccacgctct

SEQ ID NO: 1632014 - DNA, 25 bp, Homo sapien
tcatgtatgtaggtgcgtggctcgc

SEQ ID NO: 1632015 - DNA, 25 bp, Homo sapien
tgccgacactgacggcccagagtgt

SEQ ID NO: 1632016 - DNA, 25 bp, Homo sapien
tcagtccctggaggtgacggaacca

SEQ ID NO: 1632017 - DNA, 25 bp, Homo sapien
tgacacctaaggaattcccctgctt

SEQ ID NO: 1632018 - DNA, 25 bp, Homo sapien
gactacgggttggacgagatatgac

SEQ ID NO: 1632019 - DNA, 25 bp, Homo sapien
caggccaagtatggcgcctttgtca

SEQ ID NO: 1632020 - DNA, 25 bp, Homo sapien
tcaagccagcagtcgtgacggtggg

SEQ ID NO: 1632021 - DNA, 25 bp, Homo sapien
tggccgcctgggtagcaaccgtgaa

SEQ ID NO: 1632022 - DNA, 25 bp, Homo sapien
cagggactggagtcatcctcccaga

SEQ ID NO: 1632023 - DNA, 25 bp, Homo sapien
gcagaatatagacaaaggcactggg

SEQ ID NO: 1632024 - DNA, 25 bp, Homo sapien
ggtagcaaccgtgaagggtgtgcca

SEQ ID NO: 1632025 - DNA, 25 bp, Homo sapien
gagcttggccgcctgggtagcaacc

SEQ ID NO: 1632026 - DNA, 25 bp, Homo sapien
gcgtgcagggactggagtcatcctc

SEQ ID NO: 1632027 - DNA, 25 bp, Homo sapien
gccccagtgcctttgtctatattct

SEQ ID NO: 1632028 - DNA, 25 bp, Homo sapien
tctgggaggatgactccagtccctg

SEQ ID NO: 1632029 - DNA, 25 bp, Homo sapien
ggttgctacccaggcggccaagctc

SEQ ID NO: 1632030 - DNA, 25 bp, Homo sapien
ttcacggttgctacccaggcggcca

SEQ ID NO: 1632031 - DNA, 25 bp, Homo sapien
gaggatgactccagtccctgcacgc

SEQ ID NO: 1632032 - DNA, 25 bp, Homo sapien
tggcacacccttcacggttgctacc

SEQ ID NO: 1632033 - DNA, 25 bp, Homo sapien
aggccagcgtttattgacacttgtt

SEQ ID NO: 1632034 - DNA, 25 bp, Homo sapien
cagcgtttattgacacttgttcaag

SEQ ID NO: 1632035 - DNA, 25 bp, Homo sapien
attgacacttgttcaagtctctcag

SEQ ID NO: 1632036 - DNA, 25 bp, Homo sapien
acacttgttcaagtctctcaggccc

SEQ ID NO: 1632037 - DNA, 25 bp, Homo sapien
agggagtacaagctgtagacagtgc

SEQ ID NO: 1632038 - DNA, 25 bp, Homo sapien
cccagccaagggagtacaagctgta

SEQ ID NO: 1632039 - DNA, 25 bp, Homo sapien
ccaagggagtacaagctgtagacag

SEQ ID NO: 1632040 - DNA, 25 bp, Homo sapien
gcccagccaagggagtacaagctgt

SEQ ID NO: 1632041 - DNA, 25 bp, Homo sapien
caggtacaacgggatgtcattgtcc

SEQ ID NO: 1632042 - DNA, 25 bp, Homo sapien
ggatgttgtcaacgatgccgccctt

SEQ ID NO: 1632043 - DNA, 25 bp, Homo sapien
tgccgcccttcaggtacaacgggat

SEQ ID NO: 1632044 - DNA, 25 bp, Homo sapien
cagacacagcgtcattgtcactcgg

SEQ ID NO: 1632045 - DNA, 25 bp, Homo sapien
ctggatgtgggggtgtctgatgaga

SEQ ID NO: 1632046 - DNA, 25 bp, Homo sapien
ctcccggctggcgcgtcggatcccc

SEQ ID NO: 1632047 - DNA, 25 bp, Homo sapien
ctgctccttagagcgcgccccgcct

SEQ ID NO: 1632048 - DNA, 25 bp, Homo sapien
cggctggcgcgtcggatccccaccc

SEQ ID NO: 1632049 - DNA, 25 bp, Homo sapien
ctgaaggagcggatcagcgcctggg

SEQ ID NO: 1632050 - DNA, 25 bp, Homo sapien
ggttccgggcggtggagctgaagga

SEQ ID NO: 1632051 - DNA, 25 bp, Homo sapien
ggaagagcttctgtttctcgcgcac

SEQ ID NO: 1632052 - DNA, 25 bp, Homo sapien
cactcggttctgaaagcggttccgg

SEQ ID NO: 1632053 - DNA, 25 bp, Homo sapien
tgaccgggctgcctagagggtcctg

SEQ ID NO: 1632054 - DNA, 25 bp, Homo sapien
accgggctgcctagagggtcctgga

SEQ ID NO: 1632055 - DNA, 25 bp, Homo sapien
ggtgaccgggctgcctagagggtcc

SEQ ID NO: 1632056 - DNA, 25 bp, Homo sapien
ccgggctgcctagagggtcctggaa

SEQ ID NO: 1632057 - DNA, 25 bp, Homo sapien
tcggattcgtccaccacggaggagg

SEQ ID NO: 1632058 - DNA, 25 bp, Homo sapien
ccgctgcgcgcagcgtgacagctgg

SEQ ID NO: 1632059 - DNA, 25 bp, Homo sapien
gccttgtcctcttccgccggagtca

SEQ ID NO: 1632060 - DNA, 25 bp, Homo sapien
ttctccgcccaaggacacgcgtagt

SEQ ID NO: 1632061 - DNA, 25 bp, Homo sapien
ccaaagcggtaccagggaatacatt

SEQ ID NO: 1632062 - DNA, 25 bp, Homo sapien
gaatttcgcttggtcccaccggagc

SEQ ID NO: 1632063 - DNA, 25 bp, Homo sapien
agcgcgcatccgtttcggtctcgga

SEQ ID NO: 1632064 - DNA, 25 bp, Homo sapien
gggcaagtgcaactcctccccggat

SEQ ID NO: 1632065 - DNA, 25 bp, Homo sapien
agtgaggaaacgcataaggccgtgt

SEQ ID NO: 1632066 - DNA, 25 bp, Homo sapien
ctgcccgctggtatgtgagagtgag

SEQ ID NO: 1632067 - DNA, 25 bp, Homo sapien
ggaaacgcataaggccgtgttccaa

SEQ ID NO: 1632068 - DNA, 25 bp, Homo sapien
tatgtgagagtgaggaaacgcataa

SEQ ID NO: 1632069 - DNA, 25 bp, Homo sapien
tacacagccagagattgcacctccg

SEQ ID NO: 1632070 - DNA, 25 bp, Homo sapien
gattgcacctccgagcctgtttccg

SEQ ID NO: 1632071 - DNA, 25 bp, Homo sapien
acctccgagcctgtttccgtatctg

SEQ ID NO: 1632072 - DNA, 25 bp, Homo sapien
agccagagattgcacctccgagcct

SEQ ID NO: 1632073 - DNA, 25 bp, Homo sapien
gatgttggcactgagccgggtaagg

SEQ ID NO: 1632074 - DNA, 25 bp, Homo sapien
tggttaaaatatctcggcctaataa

SEQ ID NO: 1632075 - DNA, 25 bp, Homo sapien
tggttaataaggcatagatcctgaa

SEQ ID NO: 1632076 - DNA, 25 bp, Homo sapien
tgaactaacctgtaaggcttttcca

SEQ ID NO: 1632077 - DNA, 25 bp, Homo sapien
gacataaatggcaatgcatgcatca

SEQ ID NO: 1632078 - DNA, 25 bp, Homo sapien
cagagacataaatggcaatgcatgc

SEQ ID NO: 1632079 - DNA, 25 bp, Homo sapien
cataaatggcaatgcatgcatcagg

SEQ ID NO: 1632080 - DNA, 25 bp, Homo sapien
taaatggcaatgcatgcatcaggca

SEQ ID NO: 1632081 - DNA, 25 bp, Homo sapien
ttcctgaaggcacttgagcaatgtc

SEQ ID NO: 1632082 - DNA, 25 bp, Homo sapien
tgtgctaaaatcaattccaatggtc

SEQ ID NO: 1632083 - DNA, 25 bp, Homo sapien
gcgtggctttgggatctcttctact

SEQ ID NO: 1632084 - DNA, 25 bp, Homo sapien
aaatggcgacttaaaggtgagagac

SEQ ID NO: 1632085 - DNA, 25 bp, Homo sapien
taaactacaccatgcagatgcagcc

SEQ ID NO: 1632086 - DNA, 25 bp, Homo sapien
taagatatcgccattttgcaacctc

SEQ ID NO: 1632087 - DNA, 25 bp, Homo sapien
ttggagaaggcaagtctacaaggca

SEQ ID NO: 1632088 - DNA, 25 bp, Homo sapien
tttagttgagatggccgtgttgccc

SEQ ID NO: 1632089 - DNA, 25 bp, Homo sapien
tgatgaggccgctggagttcaatat

SEQ ID NO: 1632090 - DNA, 25 bp, Homo sapien
cacagacaaagcaagattggccatg

SEQ ID NO: 1632091 - DNA, 25 bp, Homo sapien
aaaataatggaaagtccaggcacgg

SEQ ID NO: 1632092 - DNA, 25 bp, Homo sapien
gacggaatcgcgctctgttgctaat

SEQ ID NO: 1632093 - DNA, 25 bp, Homo sapien
ggaattgtcagaaatttaacatatt

SEQ ID NO: 1632094 - DNA, 25 bp, Homo sapien
tttttagcatagattatctgatgct

SEQ ID NO: 1632095 - DNA, 25 bp, Homo sapien
acagaatcttttaatcgggtcattt

SEQ ID NO: 1632096 - DNA, 25 bp, Homo sapien
ttatctgatgcttaggaaacagtga

SEQ ID NO: 1632097 - DNA, 25 bp, Homo sapien
tgttctatgatggaagtgacaggtg

SEQ ID NO: 1632098 - DNA, 25 bp, Homo sapien
tgtgaactccacataaaggcttatc

SEQ ID NO: 1632099 - DNA, 25 bp, Homo sapien
tagtactgagccagatgtgaactcc

SEQ ID NO: 1632100 - DNA, 25 bp, Homo sapien
gttttctgacattaattacactaca

SEQ ID NO: 1632101 - DNA, 25 bp, Homo sapien
tctgatgttcggtaagttgtgaact

SEQ ID NO: 1632102 - DNA, 25 bp, Homo sapien
acattcgtaaggtttgataccagga

SEQ ID NO: 1632103 - DNA, 25 bp, Homo sapien
ttgtgagccaagaataaatgcctgc

SEQ ID NO: 1632104 - DNA, 25 bp, Homo sapien
gttgtgaactacgaataaaggccat

SEQ ID NO: 1632105 - DNA, 25 bp, Homo sapien
ttgggagccacgaatgaaagccttg

SEQ ID NO: 1632106 - DNA, 25 bp, Homo sapien
gatgctggaacacgggcatatgtcc

SEQ ID NO: 1632107 - DNA, 25 bp, Homo sapien
gattctccgatgcacagtgagttgg

SEQ ID NO: 1632108 - DNA, 25 bp, Homo sapien
catagggtctgtcgccagtatggac

SEQ ID NO: 1632109 - DNA, 25 bp, Homo sapien
gacgacatcaggcttagaaatggag

SEQ ID NO: 1632110 - DNA, 25 bp, Homo sapien
tgggcaccatggtcctgtcacatca

SEQ ID NO: 1632111 - DNA, 25 bp, Homo sapien
accatggtcctgtcacatcatttgc

SEQ ID NO: 1632112 - DNA, 25 bp, Homo sapien
gctccaataaggagacgacatcagg

SEQ ID NO: 1632113 - DNA, 25 bp, Homo sapien
ggccaagtgaccaaagttctccaga

SEQ ID NO: 1632114 - DNA, 25 bp, Homo sapien
gaggccaagtgaccaaagttctcca

SEQ ID NO: 1632115 - DNA, 25 bp, Homo sapien
tgaggccaagtgaccaaagttctcc

SEQ ID NO: 1632116 - DNA, 25 bp, Homo sapien
gccaagtgaccaaagttctccagag

SEQ ID NO: 1632117 - DNA, 25 bp, Homo sapien
tctggattcttctcttggacaagtg

SEQ ID NO: 1632118 - DNA, 25 bp, Homo sapien
ggcttttagaactatttgacctgct

SEQ ID NO: 1632119 - DNA, 25 bp, Homo sapien
gcttttagaactatttgacctgctc

SEQ ID NO: 1632120 - DNA, 25 bp, Homo sapien
tcttctcttggacaagtgcagagtc

SEQ ID NO: 1632121 - DNA, 25 bp, Homo sapien
gcatcttgcttgcatacccgcacat

SEQ ID NO: 1632122 - DNA, 25 bp, Homo sapien
gcaagaaagcctcagtaatacaggc

SEQ ID NO: 1632123 - DNA, 25 bp, Homo sapien
caagaaagcctcagtaatacaggca

SEQ ID NO: 1632124 - DNA, 25 bp, Homo sapien
gcatacccgcacatccagagtactg

SEQ ID NO: 1632125 - DNA, 25 bp, Homo sapien
aacaaggagttcaattcataactga

SEQ ID NO: 1632126 - DNA, 25 bp, Homo sapien
aggagttcaattcataactgactgt

SEQ ID NO: 1632127 - DNA, 25 bp, Homo sapien
aaaaaagacaagtacagtagtgaga

SEQ ID NO: 1632128 - DNA, 25 bp, Homo sapien
agaagagggggaagaatagaacaag

SEQ ID NO: 1632129 - DNA, 25 bp, Homo sapien
ggaaagttgagctatctctacacca

SEQ ID NO: 1632130 - DNA, 25 bp, Homo sapien
gaagctacgtgcctaaatgttcccc

SEQ ID NO: 1632131 - DNA, 25 bp, Homo sapien
gccaacaagttgattctgacccagc

SEQ ID NO: 1632132 - DNA, 25 bp, Homo sapien
aaccatgctgttttagagctccaac

SEQ ID NO: 1632133 - DNA, 25 bp, Homo sapien
cgggtccttgcggagctaactagct

SEQ ID NO: 1632134 - DNA, 25 bp, Homo sapien
atttttgcgcccacgagtcttcgga

SEQ ID NO: 1632135 - DNA, 25 bp, Homo sapien
acgacgtaacgtcaggccgctgtgg

SEQ ID NO: 1632136 - DNA, 25 bp, Homo sapien
tgtagtccagagctagatcggccac

SEQ ID NO: 1632137 - DNA, 25 bp, Homo sapien
caaggcctgagaagcgacgttgctg

SEQ ID NO: 1632138 - DNA, 25 bp, Homo sapien
gaaggtaattcagtaccagcctggg

SEQ ID NO: 1632139 - DNA, 25 bp, Homo sapien
gtcgaccagtaaagcctcaagggaa

SEQ ID NO: 1632140 - DNA, 25 bp, Homo sapien
tcaagggaaatgtagtccaaggcct

SEQ ID NO: 1632141 - DNA, 25 bp, Homo sapien
agtactttttattactagctgcaaa

SEQ ID NO: 1632142 - DNA, 25 bp, Homo sapien
ggttgtgtagctccagaagttaata

SEQ ID NO: 1632143 - DNA, 25 bp, Homo sapien
tgtaaagttctaagaatagtcccca

SEQ ID NO: 1632144 - DNA, 25 bp, Homo sapien
gaaagaataagatatgtagatgcac

SEQ ID NO: 1632145 - DNA, 25 bp, Homo sapien
tacctaatttcttagctcctagttc

SEQ ID NO: 1632146 - DNA, 25 bp, Homo sapien
agatcaagggtgtgctcattgccca

SEQ ID NO: 1632147 - DNA, 25 bp, Homo sapien
tctaattcactttaaatggtatagt

SEQ ID NO: 1632148 - DNA, 25 bp, Homo sapien
catgagtccatattcgtatttctaa

SEQ ID NO: 1632149 - DNA, 25 bp, Homo sapien
tccagcccacggtaacatttctccc

SEQ ID NO: 1632150 - DNA, 25 bp, Homo sapien
cagcccacggtaacatttctccctg

SEQ ID NO: 1632151 - DNA, 25 bp, Homo sapien
cgtccagcccacggtaacatttctc

SEQ ID NO: 1632152 - DNA, 25 bp, Homo sapien
gtccagcccacggtaacatttctcc

SEQ ID NO: 1632153 - DNA, 25 bp, Homo sapien
gggagtttgggagttcagcctaaca

SEQ ID NO: 1632154 - DNA, 25 bp, Homo sapien
tttgggagttcagcctaacacagag

SEQ ID NO: 1632155 - DNA, 25 bp, Homo sapien
gagtttgggagttcagcctaacaca

SEQ ID NO: 1632156 - DNA, 25 bp, Homo sapien
tcgggagtttgggagttcagcctaa

SEQ ID NO: 1632157 - DNA, 25 bp, Homo sapien
gatgggaacgtgttaaagtcagaca

SEQ ID NO: 1632158 - DNA, 25 bp, Homo sapien
gaaaaacagcaatcactcacacaag

SEQ ID NO: 1632159 - DNA, 25 bp, Homo sapien
tgaattcatccacgaataagggctg

SEQ ID NO: 1632160 - DNA, 25 bp, Homo sapien
gggctgtagttaaaatcctctcagg

SEQ ID NO: 1632161 - DNA, 25 bp, Homo sapien
gattttctcatgctcagtaaggttg

SEQ ID NO: 1632162 - DNA, 25 bp, Homo sapien
ttatgaggtacttcttctggccaaa

SEQ ID NO: 1632163 - DNA, 25 bp, Homo sapien
caataagtgatgttcgctgagagaa

SEQ ID NO: 1632164 - DNA, 25 bp, Homo sapien
gacttctgaatgaaagctttcccgc

SEQ ID NO: 1632165 - DNA, 25 bp, Homo sapien
ggccaaaggctgttccacattcact

SEQ ID NO: 1632166 - DNA, 25 bp, Homo sapien
cattgcattcgtaaggtttatcacc

SEQ ID NO: 1632167 - DNA, 25 bp, Homo sapien
tttggccagaagaagtacctcataa

SEQ ID NO: 1632168 - DNA, 25 bp, Homo sapien
tagtgaatgtggaacagcctttggc

SEQ ID NO: 1632169 - DNA, 25 bp, Homo sapien
caaccttactgagcatgagaaaatc

SEQ ID NO: 1632170 - DNA, 25 bp, Homo sapien
gattgcgggaaagctttcattcaga

SEQ ID NO: 1632171 - DNA, 25 bp, Homo sapien
cacttattgtacatgtgaggattca

SEQ ID NO: 1632172 - DNA, 25 bp, Homo sapien
ggtgataaaccttacgaatgcaatg

SEQ ID NO: 1632173 - DNA, 25 bp, Homo sapien
aaaataagacaagatatccctatac

SEQ ID NO: 1632174 - DNA, 25 bp, Homo sapien
tccagtataacatgacttccacaga

SEQ ID NO: 1632175 - DNA, 25 bp, Homo sapien
gagagcaagtccatccattcatccg

SEQ ID NO: 1632176 - DNA, 25 bp, Homo sapien
tattacatagagagcaagtccatcc

SEQ ID NO: 1632177 - DNA, 25 bp, Homo sapien
gatatccctataccacaatccagaa

SEQ ID NO: 1632178 - DNA, 25 bp, Homo sapien
tccattcatccgtgataaaatttta

SEQ ID NO: 1632179 - DNA, 25 bp, Homo sapien
gattctggattgtggtatagggata

SEQ ID NO: 1632180 - DNA, 25 bp, Homo sapien
gacttgctctctatgtaatatgaaa

SEQ ID NO: 1632181 - DNA, 25 bp, Homo sapien
taaaattttatcacggatgaatgga

SEQ ID NO: 1632182 - DNA, 25 bp, Homo sapien
tttttatataaacatccacttctct

SEQ ID NO: 1632183 - DNA, 25 bp, Homo sapien
gatgaatggatggacttgctctcta

SEQ ID NO: 1632184 - DNA, 25 bp, Homo sapien
tctgtggaagtcatgttatactgga

SEQ ID NO: 1632185 - DNA, 25 bp, Homo sapien
tagagggcgtgtatgaccccagctc

SEQ ID NO: 1632186 - DNA, 25 bp, Homo sapien
tcttttgagtttagggatccacagc

SEQ ID NO: 1632187 - DNA, 25 bp, Homo sapien
cattctagggtctgatctggcgggc

SEQ ID NO: 1632188 - DNA, 25 bp, Homo sapien
tgcccttgcgagagccatggattcg

SEQ ID NO: 1632189 - DNA, 25 bp, Homo sapien
tccaccgcggatctaggaggaggct

SEQ ID NO: 1632190 - DNA, 25 bp, Homo sapien
ggtgacttgcgagggaccacctttc

SEQ ID NO: 1632191 - DNA, 25 bp, Homo sapien
taaggaccctccgttgacgatgcct

SEQ ID NO: 1632192 - DNA, 25 bp, Homo sapien
gaggctaccacctgcccgaattggt

SEQ ID NO: 1632193 - DNA, 25 bp, Homo sapien
attgacaaggatacagattaacagc

SEQ ID NO: 1632194 - DNA, 25 bp, Homo sapien
cagagcttccatgccgtctctggct

SEQ ID NO: 1632195 - DNA, 25 bp, Homo sapien
aacctttacgtgttcaataatccag

SEQ ID NO: 1632196 - DNA, 25 bp, Homo sapien
ctttacgtgttcaataatccaggag

SEQ ID NO: 1632197 - DNA, 25 bp, Homo sapien
gtgtatgccaccaggcctgactaat

SEQ ID NO: 1632198 - DNA, 25 bp, Homo sapien
gattctcttgtctcggcctttcaag

SEQ ID NO: 1632199 - DNA, 25 bp, Homo sapien
gcaatgacacgatctgggctcattg

SEQ ID NO: 1632200 - DNA, 25 bp, Homo sapien
agcgattctcttgtctcggcctttc

SEQ ID NO: 1632201 - DNA, 25 bp, Homo sapien
tggtccaaagtgaaaatagtgtcag

SEQ ID NO: 1632202 - DNA, 25 bp, Homo sapien
cattcactgatgatcaatgcctaga

SEQ ID NO: 1632203 - DNA, 25 bp, Homo sapien
gagaaactgtgctctagagacttga

SEQ ID NO: 1632204 - DNA, 25 bp, Homo sapien
tgttagtgggcttaagtgtcatcaa

SEQ ID NO: 1632205 - DNA, 25 bp, Homo sapien
tcactcagaatgggcaggtgacttg

SEQ ID NO: 1632206 - DNA, 25 bp, Homo sapien
tgactgcccgttccagtcacaggac

SEQ ID NO: 1632207 - DNA, 25 bp, Homo sapien
gaacgcctgcgggtccgacacagca

SEQ ID NO: 1632208 - DNA, 25 bp, Homo sapien
caactgccaggaaaatgactgcccg

SEQ ID NO: 1632209 - DNA, 25 bp, Homo sapien
tcgatacagggacggaaaaggaagc

SEQ ID NO: 1632210 - DNA, 25 bp, Homo sapien
actcctccccggatggccgtggtgg

SEQ ID NO: 1632211 - DNA, 25 bp, Homo sapien
gccctcactgagaaatctagccaca

SEQ ID NO: 1632212 - DNA, 25 bp, Homo sapien
cctgcttatgcaggtcgaggtgccc

SEQ ID NO: 1632213 - DNA, 25 bp, Homo sapien
tttagttatctgacttggggcatgt

SEQ ID NO: 1632214 - DNA, 25 bp, Homo sapien
ggtgggggcaaatcttcaagcttga

SEQ ID NO: 1632215 - DNA, 25 bp, Homo sapien
gggtgggggcaaatcttcaagcttg

SEQ ID NO: 1632216 - DNA, 25 bp, Homo sapien
tattttagttatctgacttggggca

SEQ ID NO: 1632217 - DNA, 25 bp, Homo sapien
cccgggtctcttcctgcgtcgtgtg

SEQ ID NO: 1632218 - DNA, 25 bp, Homo sapien
gtctcttcctgcgtcgtgtggcccg

SEQ ID NO: 1632219 - DNA, 25 bp, Homo sapien
tcctgcgtcgtgtggcccgttggca

SEQ ID NO: 1632220 - DNA, 25 bp, Homo sapien
tctccccgggtctcttcctgcgtcg

SEQ ID NO: 1632221 - DNA, 25 bp, Homo sapien
gactgcgtccccatgagtaacagag

SEQ ID NO: 1632222 - DNA, 25 bp, Homo sapien
gagtgagggtctgtctctaacccgg

SEQ ID NO: 1632223 - DNA, 25 bp, Homo sapien
ttctgagacaggtctacggctccca

SEQ ID NO: 1632224 - DNA, 25 bp, Homo sapien
cctccagggcaagaaatggtaacag

SEQ ID NO: 1632225 - DNA, 25 bp, Homo sapien
attttgttcaacatgggcgttttct

SEQ ID NO: 1632226 - DNA, 25 bp, Homo sapien
tgttcaacatgggcgttttctttgt

SEQ ID NO: 1632227 - DNA, 25 bp, Homo sapien
ttgttcaacatgggcgttttctttg

SEQ ID NO: 1632228 - DNA, 25 bp, Homo sapien
ccattttgttcaacatgggcgtttt

SEQ ID NO: 1632229 - DNA, 25 bp, Homo sapien
tctggattaccctcgtgaatctgaa

SEQ ID NO: 1632230 - DNA, 25 bp, Homo sapien
tataacagcacgtcaagtgataagg

SEQ ID NO: 1632231 - DNA, 25 bp, Homo sapien
gacagttactgagtgatgcgggcca

SEQ ID NO: 1632232 - DNA, 25 bp, Homo sapien
cattatggtgaaagctcctctctac

SEQ ID NO: 1632233 - DNA, 25 bp, Homo sapien
tgggtgcacaatgatcgagctagat

SEQ ID NO: 1632234 - DNA, 25 bp, Homo sapien
tctagaaggcaatcctggagggtac

SEQ ID NO: 1632235 - DNA, 25 bp, Homo sapien
taaaagccatataaaccactgtgtc

SEQ ID NO: 1632236 - DNA, 25 bp, Homo sapien
taaagtcactccctaaggacagtcc

SEQ ID NO: 1632237 - DNA, 25 bp, Homo sapien
gaataccatccatagcctgcagtag

SEQ ID NO: 1632238 - DNA, 25 bp, Homo sapien
gacactgtgaagtcaacgaggagat

SEQ ID NO: 1632239 - DNA, 25 bp, Homo sapien
gtttacacaaactgcactgacactg

SEQ ID NO: 1632240 - DNA, 25 bp, Homo sapien
tgacctgatgtggagtgttcaccca

SEQ ID NO: 1632241 - DNA, 25 bp, Homo sapien
gaaagacatgcttcaagtaagaggg

SEQ ID NO: 1632242 - DNA, 25 bp, Homo sapien
aagacatgcttcaagtaagagggac

SEQ ID NO: 1632243 - DNA, 25 bp, Homo sapien
agacatgcttcaagtaagagggact

SEQ ID NO: 1632244 - DNA, 25 bp, Homo sapien
tctgaaagacatgcttcaagtaaga

SEQ ID NO: 1632245 - DNA, 25 bp, Homo sapien
tgagcagacgtgtgtgtcagtgatt

SEQ ID NO: 1632246 - DNA, 25 bp, Homo sapien
caagcagtgagcagacgtgtgtgtc

SEQ ID NO: 1632247 - DNA, 25 bp, Homo sapien
ctgtgcaaagagcaagcagtgagca

SEQ ID NO: 1632248 - DNA, 25 bp, Homo sapien
cagtgagcagacgtgtgtgtcagtg

SEQ ID NO: 1632249 - DNA, 25 bp, Homo sapien
tcactgtgccgtcctatggtggaag

SEQ ID NO: 1632250 - DNA, 25 bp, Homo sapien
aaatacaaggcaccacgcagggagt

SEQ ID NO: 1632251 - DNA, 25 bp, Homo sapien
catctggtgaaggtctcactgtgcc

SEQ ID NO: 1632252 - DNA, 25 bp, Homo sapien
cgcagggagtgctccatcaagtaga

SEQ ID NO: 1632253 - DNA, 25 bp, Homo sapien
aatcaagcagaaacataaggggctc

SEQ ID NO: 1632254 - DNA, 25 bp, Homo sapien
ttcaatgatgcaaagcaacacatac

SEQ ID NO: 1632255 - DNA, 25 bp, Homo sapien
cataaggggctctatacacaccttt

SEQ ID NO: 1632256 - DNA, 25 bp, Homo sapien
ccaaaaatgttcaatgatgcaaagc

SEQ ID NO: 1632257 - DNA, 25 bp, Homo sapien
gagggacacgatagtcacagactgc

SEQ ID NO: 1632258 - DNA, 25 bp, Homo sapien
tccagactggttgccataggaagac

SEQ ID NO: 1632259 - DNA, 25 bp, Homo sapien
ccaagacaaaaaggcacgtcacgtg

SEQ ID NO: 1632260 - DNA, 25 bp, Homo sapien
ggaaaactgtgacccttgaatgtaa

SEQ ID NO: 1632261 - DNA, 25 bp, Homo sapien
ttggaaactactgctgtagagagaa

SEQ ID NO: 1632262 - DNA, 25 bp, Homo sapien
tactgctgtagagagaaatggtctc

SEQ ID NO: 1632263 - DNA, 25 bp, Homo sapien
actactgctgtagagagaaatggtc

SEQ ID NO: 1632264 - DNA, 25 bp, Homo sapien
gaaactactgctgtagagagaaatg

SEQ ID NO: 1632265 - DNA, 25 bp, Homo sapien
tgaacaagatgattttaacccctta

SEQ ID NO: 1632266 - DNA, 25 bp, Homo sapien
tcttggggtatggttggagcctgag

SEQ ID NO: 1632267 - DNA, 25 bp, Homo sapien
tgaaacctggcagtaatttaaacaa

SEQ ID NO: 1632268 - DNA, 25 bp, Homo sapien
ctacagatgggtcattttatatgct

SEQ ID NO: 1632269 - DNA, 25 bp, Homo sapien
tcactgtggcgggatccaggcgcag

SEQ ID NO: 1632270 - DNA, 25 bp, Homo sapien
ctcactgtggcgggatccaggcgca

SEQ ID NO: 1632271 - DNA, 25 bp, Homo sapien
ctctagcgagatttgttcaaaatct

SEQ ID NO: 1632272 - DNA, 25 bp, Homo sapien
ctgttcaatctctagcgagatttgt

SEQ ID NO: 1632273 - DNA, 25 bp, Homo sapien
tcaatctctagcgagatttgttcaa

SEQ ID NO: 1632274 - DNA, 25 bp, Homo sapien
atctctagcgagatttgttcaaaat

SEQ ID NO: 1632275 - DNA, 25 bp, Homo sapien
gggaaagcccttaagaaatatcagc

SEQ ID NO: 1632276 - DNA, 25 bp, Homo sapien
tgcctgagtaggtttggctttttcc

SEQ ID NO: 1632277 - DNA, 25 bp, Homo sapien
ttaagaaatatcagccccttggcca

SEQ ID NO: 1632278 - DNA, 25 bp, Homo sapien
aagatttgcctgagtaggtttggct

SEQ ID NO: 1632279 - DNA, 25 bp, Homo sapien
gcgggtgcatcacctgacgtcacaa

SEQ ID NO: 1632280 - DNA, 25 bp, Homo sapien
gcatcacctgacgtcacaagttcaa

SEQ ID NO: 1632281 - DNA, 25 bp, Homo sapien
gggtgcatcacctgacgtcacaagt

SEQ ID NO: 1632282 - DNA, 25 bp, Homo sapien
ggtgcatcacctgacgtcacaagtt

SEQ ID NO: 1632283 - DNA, 25 bp, Homo sapien
cagtgagccaacacggtgccacaga

SEQ ID NO: 1632284 - DNA, 25 bp, Homo sapien
agtgagccaacacggtgccacagaa

SEQ ID NO: 1632285 - DNA, 25 bp, Homo sapien
ccagcctgggaaacagagtgagact

SEQ ID NO: 1632286 - DNA, 25 bp, Homo sapien
gagccaacacggtgccacagaactc

SEQ ID NO: 1632287 - DNA, 25 bp, Homo sapien
aatccgtttatttagctggtggcca

SEQ ID NO: 1632288 - DNA, 25 bp, Homo sapien
accaggttggacactacattcccca

SEQ ID NO: 1632289 - DNA, 25 bp, Homo sapien
gaacgttaatagttccaggtgcagg

SEQ ID NO: 1632290 - DNA, 25 bp, Homo sapien
cagagccgttggcatcgtgatgacg

SEQ ID NO: 1632291 - DNA, 25 bp, Homo sapien
aggatgatatcttgtacctgttggg

SEQ ID NO: 1632292 - DNA, 25 bp, Homo sapien
aaattagtttgtgatatttttgcca

SEQ ID NO: 1632293 - DNA, 25 bp, Homo sapien
tttttagggtgcagttcatgcgttc

SEQ ID NO: 1632294 - DNA, 25 bp, Homo sapien
tgcgttctacttgcccagagctctg

SEQ ID NO: 1632295 - DNA, 25 bp, Homo sapien
aggagacttacacaatttacaccgg

SEQ ID NO: 1632296 - DNA, 25 bp, Homo sapien
tgtttgctggtaaagcctgagccca

SEQ ID NO: 1632297 - DNA, 25 bp, Homo sapien
tagtcccttctcgaggaagctgcta

SEQ ID NO: 1632298 - DNA, 25 bp, Homo sapien
gctgtcagtgttaacgttaatatcc

SEQ ID NO: 1632299 - DNA, 25 bp, Homo sapien
gtgagtagcccacgctcctggtaga

SEQ ID NO: 1632300 - DNA, 25 bp, Homo sapien
tttgaagatcaggtcggccagtttc

SEQ ID NO: 1632301 - DNA, 25 bp, Homo sapien
tctgcagcatatactggagagggct

SEQ ID NO: 1632302 - DNA, 25 bp, Homo sapien
aacaattgtgaggttcagtgaccct

SEQ ID NO: 1632303 - DNA, 25 bp, Homo sapien
tctactttgcagagtgtccagagct

SEQ ID NO: 1632304 - DNA, 25 bp, Homo sapien
agtacagggcgagctaaaccggctg

SEQ ID NO: 1632305 - DNA, 25 bp, Homo sapien
tcaaaggcaaatagctcaaacccag

SEQ ID NO: 1632306 - DNA, 25 bp, Homo sapien
gaccacttggatcgtttttaagatg

SEQ ID NO: 1632307 - DNA, 25 bp, Homo sapien
taccacttgccacatcactgtagct

SEQ ID NO: 1632308 - DNA, 25 bp, Homo sapien
gggtcagttggatctaggtgttctc

SEQ ID NO: 1632309 - DNA, 25 bp, Homo sapien
tcagggtcgcttccctctgccagaa

SEQ ID NO: 1632310 - DNA, 25 bp, Homo sapien
ccagagattctccaagaaacctgaa

SEQ ID NO: 1632311 - DNA, 25 bp, Homo sapien
acagagacacagaggcgtctaacag

SEQ ID NO: 1632312 - DNA, 25 bp, Homo sapien
tcatcagggtcgcttccctctgcca

SEQ ID NO: 1632313 - DNA, 25 bp, Homo sapien
ttctcccggtgacgtttctcgctgg

SEQ ID NO: 1632314 - DNA, 25 bp, Homo sapien
ctgtcctccggaagacggtcaccct

SEQ ID NO: 1632315 - DNA, 25 bp, Homo sapien
cctacaagctggctgtccttccggg

SEQ ID NO: 1632316 - DNA, 25 bp, Homo sapien
ggctctcgcccggtgacgtttctcc

SEQ ID NO: 1632317 - DNA, 25 bp, Homo sapien
gagacaatacgggtcagaggtcagg

SEQ ID NO: 1632318 - DNA, 25 bp, Homo sapien
ctggagacaatacgggtcagaggtc

SEQ ID NO: 1632319 - DNA, 25 bp, Homo sapien
acaatacgggtcagaggtcaggaaa

SEQ ID NO: 1632320 - DNA, 25 bp, Homo sapien
gacaatacgggtcagaggtcaggaa

SEQ ID NO: 1632321 - DNA, 25 bp, Homo sapien
tggcaatggccaatttcccacccgt

SEQ ID NO: 1632322 - DNA, 25 bp, Homo sapien
gcacgtggccgaatagcccaagact

SEQ ID NO: 1632323 - DNA, 25 bp, Homo sapien
cccgtggacgcaaaaggccaggact

SEQ ID NO: 1632324 - DNA, 25 bp, Homo sapien
agcgtcccatgtccggcaggcacgt

SEQ ID NO: 1632325 - DNA, 25 bp, Homo sapien
ctttcagagcatgatatgagctgca

SEQ ID NO: 1632326 - DNA, 25 bp, Homo sapien
caaggatcgggctggaatcttttcc

SEQ ID NO: 1632327 - DNA, 25 bp, Homo sapien
taaagcaggtagctactttcagagc

SEQ ID NO: 1632328 - DNA, 25 bp, Homo sapien
tctatagaaaagcactaaccatcca

SEQ ID NO: 1632329 - DNA, 25 bp, Homo sapien
tctaaaattacacccttgaagacat

SEQ ID NO: 1632330 - DNA, 25 bp, Homo sapien
tatctaaaattacacccttgaagac

SEQ ID NO: 1632331 - DNA, 25 bp, Homo sapien
catatctaaaattacacccttgaag

SEQ ID NO: 1632332 - DNA, 25 bp, Homo sapien
taaaattacacccttgaagacattc

SEQ ID NO: 1632333 - DNA, 25 bp, Homo sapien
tgtctttactaaatctttggcaaac

SEQ ID NO: 1632334 - DNA, 25 bp, Homo sapien
cagatattcggactgagaattccac

SEQ ID NO: 1632335 - DNA, 25 bp, Homo sapien
ggtagcatctaacaaagctgttcct

SEQ ID NO: 1632336 - DNA, 25 bp, Homo sapien
gctgttcctattccagatattcgga

SEQ ID NO: 1632337 - DNA, 25 bp, Homo sapien
taatgaaggtggtctagaatttgct

SEQ ID NO: 1632338 - DNA, 25 bp, Homo sapien
caaataccatcgagaattaatattc

SEQ ID NO: 1632339 - DNA, 25 bp, Homo sapien
aagaaacactgacctattagcaaag

SEQ ID NO: 1632340 - DNA, 25 bp, Homo sapien
taatattccttgaagcaaacttctg

SEQ ID NO: 1632341 - DNA, 25 bp, Homo sapien
gcttgatataatctagagttgtgtc

SEQ ID NO: 1632342 - DNA, 25 bp, Homo sapien
tgggttatacggtgagttaattgta

SEQ ID NO: 1632343 - DNA, 25 bp, Homo sapien
tttacttgtactggaatgaatatac

SEQ ID NO: 1632344 - DNA, 25 bp, Homo sapien
ggaaaaatgcaatcctacattttta

SEQ ID NO: 1632345 - DNA, 25 bp, Homo sapien
tgacaaggttagatgtgcaggcatc

SEQ ID NO: 1632346 - DNA, 25 bp, Homo sapien
cactgaacagaactttgattatatc

SEQ ID NO: 1632347 - DNA, 25 bp, Homo sapien
tccttaccacattacagggcattaa

SEQ ID NO: 1632348 - DNA, 25 bp, Homo sapien
gatgaagactgtatccacaaataag

SEQ ID NO: 1632349 - DNA, 25 bp, Homo sapien
acaggcctcacggaaatacattggg

SEQ ID NO: 1632350 - DNA, 25 bp, Homo sapien
tagtctggatgtggatccttcccca

SEQ ID NO: 1632351 - DNA, 25 bp, Homo sapien
tctgtagccttgcaagagaccctga

SEQ ID NO: 1632352 - DNA, 25 bp, Homo sapien
taccatcagtggaggatcctggaac

SEQ ID NO: 1632353 - DNA, 25 bp, Homo sapien
gctgtctaaaggccttcttacactc

SEQ ID NO: 1632354 - DNA, 25 bp, Homo sapien
atgctgtctaaaggccttcttacac

SEQ ID NO: 1632355 - DNA, 25 bp, Homo sapien
ctgtctaaaggccttcttacactcc

SEQ ID NO: 1632356 - DNA, 25 bp, Homo sapien
tgctgtctaaaggccttcttacact

SEQ ID NO: 1632357 - DNA, 25 bp, Homo sapien
cttgtagggcttctcaccagtatga

SEQ ID NO: 1632358 - DNA, 25 bp, Homo sapien
acttgtagggcttctcaccagtatg

SEQ ID NO: 1632359 - DNA, 25 bp, Homo sapien
gtagggcttctcaccagtatgaatt

SEQ ID NO: 1632360 - DNA, 25 bp, Homo sapien
ttgtagggcttctcaccagtatgaa

SEQ ID NO: 1632361 - DNA, 25 bp, Homo sapien
ggtgttgagtaagaaatgaataaag

SEQ ID NO: 1632362 - DNA, 25 bp, Homo sapien
agaaatgaataaagtctaaaagcct

SEQ ID NO: 1632363 - DNA, 25 bp, Homo sapien
ctctggtgttgagtaagaaatgaat

SEQ ID NO: 1632364 - DNA, 25 bp, Homo sapien
ctggtgttgagtaagaaatgaataa

SEQ ID NO: 1632365 - DNA, 25 bp, Homo sapien
tgttgagcgacgaataaaggtcttc

SEQ ID NO: 1632366 - DNA, 25 bp, Homo sapien
gatgtgcacgctgtctaaaggcctg

SEQ ID NO: 1632367 - DNA, 25 bp, Homo sapien
tctctgatgtcgagccagttgctga

SEQ ID NO: 1632368 - DNA, 25 bp, Homo sapien
ggtctggaccacatacgaaggcttt

SEQ ID NO: 1632369 - DNA, 25 bp, Homo sapien
acttgcccaaaatatccctcttgtt

SEQ ID NO: 1632370 - DNA, 25 bp, Homo sapien
tgcccaaaatatccctcttgttgtt

SEQ ID NO: 1632371 - DNA, 25 bp, Homo sapien
tttttcagaggtaattttcacttgc

SEQ ID NO: 1632372 - DNA, 25 bp, Homo sapien
ttttcacttgcccaaaatatccctc

SEQ ID NO: 1632373 - DNA, 25 bp, Homo sapien
ttggtcctgtatctggactccaaat

SEQ ID NO: 1632374 - DNA, 25 bp, Homo sapien
tctttccattatatcccactgaaat

SEQ ID NO: 1632375 - DNA, 25 bp, Homo sapien
tttccccctcaatcttgcttttgca

SEQ ID NO: 1632376 - DNA, 25 bp, Homo sapien
gataaagtattggtcctgtatctgg

SEQ ID NO: 1632377 - DNA, 25 bp, Homo sapien
acaagaaagcaaatacatactgttt

SEQ ID NO: 1632378 - DNA, 25 bp, Homo sapien
agaaagcaaatacatactgttttcc

SEQ ID NO: 1632379 - DNA, 25 bp, Homo sapien
caaatacatactgttttcctgttcc

SEQ ID NO: 1632380 - DNA, 25 bp, Homo sapien
acatactgttttcctgttccagaaa

SEQ ID NO: 1632381 - DNA, 25 bp, Homo sapien
gcttcttacgaagccatgtgtccca

SEQ ID NO: 1632382 - DNA, 25 bp, Homo sapien
cattaagccatgaaagcccttgtga

SEQ ID NO: 1632383 - DNA, 25 bp, Homo sapien
aggcagcgcacagaccatcaatggg

SEQ ID NO: 1632384 - DNA, 25 bp, Homo sapien
tggtgacaaccctgcagagtcccaa

SEQ ID NO: 1632385 - DNA, 25 bp, Homo sapien
gcctcggaattcagcagagtcccca

SEQ ID NO: 1632386 - DNA, 25 bp, Homo sapien
taggtgccccttaccagattgagga

SEQ ID NO: 1632387 - DNA, 25 bp, Homo sapien
tttgatgccctgcaaagcctcggaa

SEQ ID NO: 1632388 - DNA, 25 bp, Homo sapien
gagaggcctcaactagcacatttgc

SEQ ID NO: 1632389 - DNA, 25 bp, Homo sapien
tcagtttagctattacctgcagtag

SEQ ID NO: 1632390 - DNA, 25 bp, Homo sapien
gctagtccaggcttaaaagatctta

SEQ ID NO: 1632391 - DNA, 25 bp, Homo sapien
tgtgcctccaccctaatcagtttag

SEQ ID NO: 1632392 - DNA, 25 bp, Homo sapien
ccaacatctcaagggtgtgcctcca

SEQ ID NO: 1632393 - DNA, 25 bp, Homo sapien
tcacaaccatcccaggttccttcct

SEQ ID NO: 1632394 - DNA, 25 bp, Homo sapien
cacaaccatcccaggttccttcctt

SEQ ID NO: 1632395 - DNA, 25 bp, Homo sapien
ggatccaggaattcccattcttcct

SEQ ID NO: 1632396 - DNA, 25 bp, Homo sapien
ccattcttcctgtgagaagtctatg

SEQ ID NO: 1632397 - DNA, 25 bp, Homo sapien
ttcttcctgtgagaagtctatggcc

SEQ ID NO: 1632398 - DNA, 25 bp, Homo sapien
ttctcccacattacatccctatata

SEQ ID NO: 1632399 - DNA, 25 bp, Homo sapien
ggagaactatggagtcctgataagc

SEQ ID NO: 1632400 - DNA, 25 bp, Homo sapien
gttggagaactatggagtcctgata

SEQ ID NO: 1632401 - DNA, 25 bp, Homo sapien
ttggagaactatggagtcctgataa

SEQ ID NO: 1632402 - DNA, 25 bp, Homo sapien
tggagaactatggagtcctgataag

SEQ ID NO: 1632403 - DNA, 25 bp, Homo sapien
gacttgtctatatgcaacagcaatc

SEQ ID NO: 1632404 - DNA, 25 bp, Homo sapien
aaactcatctggatgttgacttgtc

SEQ ID NO: 1632405 - DNA, 25 bp, Homo sapien
tcatggaacaaaacggaaacacaaa

SEQ ID NO: 1632406 - DNA, 25 bp, Homo sapien
caaaacggaaacacaaactcatctg

SEQ ID NO: 1632407 - DNA, 25 bp, Homo sapien
cctttcccgtatcagagcgaaaggc

SEQ ID NO: 1632408 - DNA, 25 bp, Homo sapien
cgaaaggccaggtacacgaagacgg

SEQ ID NO: 1632409 - DNA, 25 bp, Homo sapien
ggatctgtctccgagttccccgcag

SEQ ID NO: 1632410 - DNA, 25 bp, Homo sapien
tatcagagcgaaaggccaggtacac

SEQ ID NO: 1632411 - DNA, 25 bp, Homo sapien
cactccggggttcctgtatctaact

SEQ ID NO: 1632412 - DNA, 25 bp, Homo sapien
cattccgggccgctggacctgggcg

SEQ ID NO: 1632413 - DNA, 25 bp, Homo sapien
aactcggagccattccgggccgctg

SEQ ID NO: 1632414 - DNA, 25 bp, Homo sapien
ggttcctgtatctaactcggagcca

SEQ ID NO: 1632415 - DNA, 25 bp, Homo sapien
gccggaaagaactgcgagcggaggc

SEQ ID NO: 1632416 - DNA, 25 bp, Homo sapien
gcagcgaagccggaaagaactgcga

SEQ ID NO: 1632417 - DNA, 25 bp, Homo sapien
agcgaagccggaaagaactgcgagc

SEQ ID NO: 1632418 - DNA, 25 bp, Homo sapien
aagccggaaagaactgcgagcggag

SEQ ID NO: 1632419 - DNA, 25 bp, Homo sapien
agccccaacgggctgcgcggagtgc

SEQ ID NO: 1632420 - DNA, 25 bp, Homo sapien
tccgccgatgggagggactggttcc

SEQ ID NO: 1632421 - DNA, 25 bp, Homo sapien
atgtagtccgccgatgggagggact

SEQ ID NO: 1632422 - DNA, 25 bp, Homo sapien
cgatgggagggactggttccagccc

SEQ ID NO: 1632423 - DNA, 25 bp, Homo sapien
ttggagaaaatgaccagatgcctgg

SEQ ID NO: 1632424 - DNA, 25 bp, Homo sapien
ggagttgctttcctcaccataccag

SEQ ID NO: 1632425 - DNA, 25 bp, Homo sapien
cgaagtccttttggttatcgcagca

SEQ ID NO: 1632426 - DNA, 25 bp, Homo sapien
ttgtgcactgggagcatactgatgc

SEQ ID NO: 1632427 - DNA, 25 bp, Homo sapien
ttaatgacatctgcccaatctgagc

SEQ ID NO: 1632428 - DNA, 25 bp, Homo sapien
tgtctccagaagacctctgttaatg

SEQ ID NO: 1632429 - DNA, 25 bp, Homo sapien
ggagaaacacattgtcctattagca

SEQ ID NO: 1632430 - DNA, 25 bp, Homo sapien
caatctgagcaaactggacttggag

SEQ ID NO: 1632431 - DNA, 25 bp, Homo sapien
gctgaatttgtgtccatgccttggg

SEQ ID NO: 1632432 - DNA, 25 bp, Homo sapien
tgcccttccgccatgagatgacaca

SEQ ID NO: 1632433 - DNA, 25 bp, Homo sapien
aagaggccactcataagatgtcagc

SEQ ID NO: 1632434 - DNA, 25 bp, Homo sapien
gatgtcagcctgtcaatcttgggct

SEQ ID NO: 1632435 - DNA, 25 bp, Homo sapien
tcatagagttaaggaagggtcttct

SEQ ID NO: 1632436 - DNA, 25 bp, Homo sapien
aggaagggtcttctggagccttaag

SEQ ID NO: 1632437 - DNA, 25 bp, Homo sapien
cccagtgtgtccaagtaggtcatag

SEQ ID NO: 1632438 - DNA, 25 bp, Homo sapien
tgtgtccaagtaggtcatagagtta

SEQ ID NO: 1632439 - DNA, 25 bp, Homo sapien
aactacttgctgttattcaccttag

SEQ ID NO: 1632440 - DNA, 25 bp, Homo sapien
cataaattgcctgttatgtgacagg

SEQ ID NO: 1632441 - DNA, 25 bp, Homo sapien
taggtgtgtgaacagaatggtgaac

SEQ ID NO: 1632442 - DNA, 25 bp, Homo sapien
agtagagctttggttggtgatttcc

SEQ ID NO: 1632443 - DNA, 25 bp, Homo sapien
tgataaactccactgcaagcatgcc

SEQ ID NO: 1632444 - DNA, 25 bp, Homo sapien
gggcaagctaatgcatagatgataa

SEQ ID NO: 1632445 - DNA, 25 bp, Homo sapien
taagcttaccagtgtgcctacccct

SEQ ID NO: 1632446 - DNA, 25 bp, Homo sapien
tcaatattcccctgccctaactaga

SEQ ID NO: 1632447 - DNA, 25 bp, Homo sapien
tcatctggctgatctcatttagaga

SEQ ID NO: 1632448 - DNA, 25 bp, Homo sapien
ttgctatcaccacgaaaatccatga

SEQ ID NO: 1632449 - DNA, 25 bp, Homo sapien
tttcatcacatcaagttcatctggc

SEQ ID NO: 1632450 - DNA, 25 bp, Homo sapien
tccactgtgtgtatccatttcatca

SEQ ID NO: 1632451 - DNA, 25 bp, Homo sapien
acgagaataagatatctcaagttca

SEQ ID NO: 1632452 - DNA, 25 bp, Homo sapien
gattaaatgttggtggaaggcattt

SEQ ID NO: 1632453 - DNA, 25 bp, Homo sapien
tctatactcattatgcccacagcct

SEQ ID NO: 1632454 - DNA, 25 bp, Homo sapien
cctcacctggtctagggtatctgtt

SEQ ID NO: 1632455 - DNA, 25 bp, Homo sapien
gaagacagggttcagcaggtgcctc

SEQ ID NO: 1632456 - DNA, 25 bp, Homo sapien
taccatattctactgggcgaagcag

SEQ ID NO: 1632457 - DNA, 25 bp, Homo sapien
tctacatggcatcagttcaggttac

SEQ ID NO: 1632458 - DNA, 25 bp, Homo sapien
caggttaccaagtcgctcactggca

SEQ ID NO: 1632459 - DNA, 25 bp, Homo sapien
ctgtatacaacagagggatgtagat

SEQ ID NO: 1632460 - DNA, 25 bp, Homo sapien
gtatacaacagagggatgtagattc

SEQ ID NO: 1632461 - DNA, 25 bp, Homo sapien
tgtatacaacagagggatgtagatt

SEQ ID NO: 1632462 - DNA, 25 bp, Homo sapien
tataaaacctctaatgccaacgcag

SEQ ID NO: 1632463 - DNA, 25 bp, Homo sapien
gagcagttaagcgtcttgtccagta

SEQ ID NO: 1632464 - DNA, 25 bp, Homo sapien
caacgcagttgcatgtatggagcaa

SEQ ID NO: 1632465 - DNA, 25 bp, Homo sapien
caaactgctgcactcttatatgacc

SEQ ID NO: 1632466 - DNA, 25 bp, Homo sapien
tcaggtgtgcgtactgtctaaaggc

SEQ ID NO: 1632467 - DNA, 25 bp, Homo sapien
taagatctgcaccacatatgaaagc

SEQ ID NO: 1632468 - DNA, 25 bp, Homo sapien
gaaaagtaagctgttggcgcactct

SEQ ID NO: 1632469 - DNA, 25 bp, Homo sapien
tagttgttgtcgcactctaaaggcc

SEQ ID NO: 1632470 - DNA, 25 bp, Homo sapien
tttcctgtggattcccaatcatttt

SEQ ID NO: 1632471 - DNA, 25 bp, Homo sapien
aagcaaacacatgctgttttctttt

SEQ ID NO: 1632472 - DNA, 25 bp, Homo sapien
acaagaaagcaaacacatgctgttt

SEQ ID NO: 1632473 - DNA, 25 bp, Homo sapien
agaaagcaaacacatgctgttttct

SEQ ID NO: 1632474 - DNA, 25 bp, Homo sapien
aaacaagaaagcaaacacatgctgt

SEQ ID NO: 1632475 - DNA, 25 bp, Homo sapien
tgagccaggccacctggctgtattt

SEQ ID NO: 1632476 - DNA, 25 bp, Homo sapien
caggccacctggctgtatttttgtt

SEQ ID NO: 1632477 - DNA, 25 bp, Homo sapien
aggccacctggctgtatttttgttt

SEQ ID NO: 1632478 - DNA, 25 bp, Homo sapien
gccaggccacctggctgtatttttg

SEQ ID NO: 1632479 - DNA, 25 bp, Homo sapien
tttgaaaacctgcatataagtatct

SEQ ID NO: 1632480 - DNA, 25 bp, Homo sapien
ccatagtgcttataagaaaatttac

SEQ ID NO: 1632481 - DNA, 25 bp, Homo sapien
aattaagctgaagtaaagcagaaga

SEQ ID NO: 1632482 - DNA, 25 bp, Homo sapien
gtgaaaaacatcgttaaaagtctca

SEQ ID NO: 1632483 - DNA, 25 bp, Homo sapien
ccatgagtcagttctcgggcctgcc

SEQ ID NO: 1632484 - DNA, 25 bp, Homo sapien
caagttccaggtgtacgtattcaac

SEQ ID NO: 1632485 - DNA, 25 bp, Homo sapien
tacagacagccaaacataaaccagg

SEQ ID NO: 1632486 - DNA, 25 bp, Homo sapien
tctttcaaaggtctacagggtggag

SEQ ID NO: 1632487 - DNA, 25 bp, Homo sapien
tttccttgctccaatgaggaaatca

SEQ ID NO: 1632488 - DNA, 25 bp, Homo sapien
tcacatctggtttagaaatgaagca

SEQ ID NO: 1632489 - DNA, 25 bp, Homo sapien
tcttcctttcctcacaactttccaa

SEQ ID NO: 1632490 - DNA, 25 bp, Homo sapien
cctcacaactttccaaggctctttt

SEQ ID NO: 1632491 - DNA, 25 bp, Homo sapien
tttgttccaagtccaggtattccca

SEQ ID NO: 1632492 - DNA, 25 bp, Homo sapien
tccttggggtttacttgccaggaga

SEQ ID NO: 1632493 - DNA, 25 bp, Homo sapien
ggtatagaaattcaagaactggtca

SEQ ID NO: 1632494 - DNA, 25 bp, Homo sapien
caagaactggtcagtcctccttggg

SEQ ID NO: 1632495 - DNA, 25 bp, Homo sapien
tagaaattcaagaactggtcagtcc

SEQ ID NO: 1632496 - DNA, 25 bp, Homo sapien
tctataagcctgtgacatgagtggg

SEQ ID NO: 1632497 - DNA, 25 bp, Homo sapien
tgtggcacaaataagtaacacccat

SEQ ID NO: 1632498 - DNA, 25 bp, Homo sapien
cgatgggctattttcactctcaaga

SEQ ID NO: 1632499 - DNA, 25 bp, Homo sapien
tgttcttcatcaaaacgatgggcta

SEQ ID NO: 1632500 - DNA, 25 bp, Homo sapien
tcttaaagaattgggcaggactggc

SEQ ID NO: 1632501 - DNA, 25 bp, Homo sapien
taggtatcagctcaatggacaggac

SEQ ID NO: 1632502 - DNA, 25 bp, Homo sapien
ggtatgtgcatacaggctctcggga

SEQ ID NO: 1632503 - DNA, 25 bp, Homo sapien
tcgcctcgaccttgacttaaacagg

SEQ ID NO: 1632504 - DNA, 25 bp, Homo sapien
atgcccgaacggaggaagccgctgc

SEQ ID NO: 1632505 - DNA, 25 bp, Homo sapien
gccgcagcgcttttcctacagatta

SEQ ID NO: 1632506 - DNA, 25 bp, Homo sapien
agccgctgccgggtcacgccacaat

SEQ ID NO: 1632507 - DNA, 25 bp, Homo sapien
gcgcgaacccgaggcacagcgatgc

SEQ ID NO: 1632508 - DNA, 25 bp, Homo sapien
gcctgtgagatcgagattacagtga

SEQ ID NO: 1632509 - DNA, 25 bp, Homo sapien
ctgtgagatcgagattacagtgagc

SEQ ID NO: 1632510 - DNA, 25 bp, Homo sapien
tgagcctgtgagatcgagattacag

SEQ ID NO: 1632511 - DNA, 25 bp, Homo sapien
gagcctgtgagatcgagattacagt

SEQ ID NO: 1632512 - DNA, 25 bp, Homo sapien
ggacaatcggcgcacttgccacgat

SEQ ID NO: 1632513 - DNA, 25 bp, Homo sapien
gcctcgggcctcgaccttaagattc

SEQ ID NO: 1632514 - DNA, 25 bp, Homo sapien
ttgccacgatcttggacgggcctcg

SEQ ID NO: 1632515 - DNA, 25 bp, Homo sapien
ttttgcctcagacgagtccagggcg

SEQ ID NO: 1632516 - DNA, 25 bp, Homo sapien
ccgcggctgccgagacaagccggtg

SEQ ID NO: 1632517 - DNA, 25 bp, Homo sapien
gagacaagccggtgcgcatcaccat

SEQ ID NO: 1632518 - DNA, 25 bp, Homo sapien
gcctggcttcggagccgctggacac

SEQ ID NO: 1632519 - DNA, 25 bp, Homo sapien
gcatcaccatgcgcggcctggcttc

SEQ ID NO: 1632520 - DNA, 25 bp, Homo sapien
gcgctttctgaagcgggacgtacag

SEQ ID NO: 1632521 - DNA, 25 bp, Homo sapien
cgggacgtacagattccctttatcg

SEQ ID NO: 1632522 - DNA, 25 bp, Homo sapien
caagaaacctttttggcgctttctg

SEQ ID NO: 1632523 - DNA, 25 bp, Homo sapien
gaccccgagcctggacggctgttgt

SEQ ID NO: 1632524 - DNA, 25 bp, Homo sapien
gagaacagaaatagatgtgagcatt

SEQ ID NO: 1632525 - DNA, 25 bp, Homo sapien
aacactggaaatgacgccgggtgcg

SEQ ID NO: 1632526 - DNA, 25 bp, Homo sapien
taatagttacttctggcataactgg

SEQ ID NO: 1632527 - DNA, 25 bp, Homo sapien
gaaacaagtctgacatcctgcatta

SEQ ID NO: 1632528 - DNA, 25 bp, Homo sapien
ttttagatggcaaaaaagcgcaaac

SEQ ID NO: 1632529 - DNA, 25 bp, Homo sapien
gaaaaggcattggtaaataacactg

SEQ ID NO: 1632530 - DNA, 25 bp, Homo sapien
ggaacatactgtaaccatcagaaag

SEQ ID NO: 1632531 - DNA, 25 bp, Homo sapien
tcagaaagactgttagatcatcatc

SEQ ID NO: 1632532 - DNA, 25 bp, Homo sapien
tcattaatttgggtgcaaatgcact

SEQ ID NO: 1632533 - DNA, 25 bp, Homo sapien
ttgataacgcaaaacattacaacag

SEQ ID NO: 1632534 - DNA, 25 bp, Homo sapien
atctctataattttagatgaagaac

SEQ ID NO: 1632535 - DNA, 25 bp, Homo sapien
agaactttataaaagacataagcac

SEQ ID NO: 1632536 - DNA, 25 bp, Homo sapien
tgagtaaaaatggggtttcaacatg

SEQ ID NO: 1632537 - DNA, 25 bp, Homo sapien
ccatggcgtgatcttggctcactgc

SEQ ID NO: 1632538 - DNA, 25 bp, Homo sapien
gtcgctcaggctgaagtgccatggc

SEQ ID NO: 1632539 - DNA, 25 bp, Homo sapien
tttttttaatagtctcattctgtcg

SEQ ID NO: 1632540 - DNA, 25 bp, Homo sapien
gatgtgcttagggagaatgtccagc

SEQ ID NO: 1632541 - DNA, 25 bp, Homo sapien
tccagcagggacttgtattttggca

SEQ ID NO: 1632542 - DNA, 25 bp, Homo sapien
gagactacgatatccaccaatagga

SEQ ID NO: 1632543 - DNA, 25 bp, Homo sapien
tattagtcggaataaagtccttcac

SEQ ID NO: 1632544 - DNA, 25 bp, Homo sapien
gatgtcaagagaagtaagcgtttag

SEQ ID NO: 1632545 - DNA, 25 bp, Homo sapien
ttttgagccataattaaaagcctcc

SEQ ID NO: 1632546 - DNA, 25 bp, Homo sapien
caggctgaataagctgtagtccaca

SEQ ID NO: 1632547 - DNA, 25 bp, Homo sapien
caaaaattctctgacgttaagaagg

SEQ ID NO: 1632548 - DNA, 25 bp, Homo sapien
tgtgggtcataattaaagttctttc

SEQ ID NO: 1632549 - DNA, 25 bp, Homo sapien
gatgactaataagctgtgaactctg

SEQ ID NO: 1632550 - DNA, 25 bp, Homo sapien
gctgaataagttgtgggtcataatt

SEQ ID NO: 1632551 - DNA, 25 bp, Homo sapien
tctatgatgactaataagctgtgaa

SEQ ID NO: 1632552 - DNA, 25 bp, Homo sapien
gccagaacgaaaagccttttcacat

SEQ ID NO: 1632553 - DNA, 25 bp, Homo sapien
tgtctagtaaggtctgagccagaac

SEQ ID NO: 1632554 - DNA, 25 bp, Homo sapien
tctagtaaggtctgagccagaacga

SEQ ID NO: 1632555 - DNA, 25 bp, Homo sapien
ccagaacgaaaagccttttcacatt

SEQ ID NO: 1632556 - DNA, 25 bp, Homo sapien
ctgatgttgagtaaagtttgagcca

SEQ ID NO: 1632557 - DNA, 25 bp, Homo sapien
ttgagtaaagtttgagccactacta

SEQ ID NO: 1632558 - DNA, 25 bp, Homo sapien
tgttgagtaaagtttgagccactac

SEQ ID NO: 1632559 - DNA, 25 bp, Homo sapien
tgatgttgagtaaagtttgagccac

SEQ ID NO: 1632560 - DNA, 25 bp, Homo sapien
ggagcactgaaaatcacgtcttgtg

SEQ ID NO: 1632561 - DNA, 25 bp, Homo sapien
cctgagagccgagttctttcttaaa

SEQ ID NO: 1632562 - DNA, 25 bp, Homo sapien
tctgatgtcgagtgaagtttgaacc

SEQ ID NO: 1632563 - DNA, 25 bp, Homo sapien
tgtgtagcaaactgtgagccatgtc

SEQ ID NO: 1632564 - DNA, 25 bp, Homo sapien
aataaataaactggcggggcgctgg

SEQ ID NO: 1632565 - DNA, 25 bp, Homo sapien
aaataaataaactggcggggcgctg

SEQ ID NO: 1632566 - DNA, 25 bp, Homo sapien
taaatcacttttaactctagtataa

SEQ ID NO: 1632567 - DNA, 25 bp, Homo sapien
taactctagtataaaagttagaaga

SEQ ID NO: 1632568 - DNA, 25 bp, Homo sapien
gcctcttgttagctctctgtcagcc

SEQ ID NO: 1632569 - DNA, 25 bp, Homo sapien
ggcctcttgttagctctctgtcagc

SEQ ID NO: 1632570 - DNA, 25 bp, Homo sapien
atctctgtataaatctctctgatca

SEQ ID NO: 1632571 - DNA, 25 bp, Homo sapien
cattgaaaccaggttgctgtaattc

SEQ ID NO: 1632572 - DNA, 25 bp, Homo sapien
ctctgatcatcattcaggcattccc

SEQ ID NO: 1632573 - DNA, 25 bp, Homo sapien
cctgagagaagtctacggacacatc

SEQ ID NO: 1632574 - DNA, 25 bp, Homo sapien
atttgtagaaaaggaccttctcttg

SEQ ID NO: 1632575 - DNA, 25 bp, Homo sapien
tgaatagcatccatgtagacccaca

SEQ ID NO: 1632576 - DNA, 25 bp, Homo sapien
gatgaacactgatgcctacgctgct

SEQ ID NO: 1632577 - DNA, 25 bp, Homo sapien
gattatccaggctcagtgttcctca

SEQ ID NO: 1632578 - DNA, 25 bp, Homo sapien
ccttgagagttgagataagagcacg

SEQ ID NO: 1632579 - DNA, 25 bp, Homo sapien
cgaggaggcagtcacagtcacaacc

SEQ ID NO: 1632580 - DNA, 25 bp, Homo sapien
accacattgtcacagtcggcgcaca

SEQ ID NO: 1632581 - DNA, 25 bp, Homo sapien
agtcacaaccacattgtcacagtcg

SEQ ID NO: 1632582 - DNA, 25 bp, Homo sapien
aggaggcagtcacagtcacaaccac

SEQ ID NO: 1632583 - DNA, 25 bp, Homo sapien
caccgccgcacaaagccgaggcttg

SEQ ID NO: 1632584 - DNA, 25 bp, Homo sapien
ccaccgccgcacaaagccgaggctt

SEQ ID NO: 1632585 - DNA, 25 bp, Homo sapien
accgccgcacaaagccgaggcttgg

SEQ ID NO: 1632586 - DNA, 25 bp, Homo sapien
ctccaccgccgcacaaagccgaggc

SEQ ID NO: 1632587 - DNA, 25 bp, Homo sapien
cgtgagttggaagctgaattaccgc

SEQ ID NO: 1632588 - DNA, 25 bp, Homo sapien
gaagtacagtcttgccgaggagacc

SEQ ID NO: 1632589 - DNA, 25 bp, Homo sapien
cactggggtagttgctggtaaagcc

SEQ ID NO: 1632590 - DNA, 25 bp, Homo sapien
tcccgccagcgcgtgagttggaagc

SEQ ID NO: 1632591 - DNA, 25 bp, Homo sapien
tgagatgggcttagttcccggaccc

SEQ ID NO: 1632592 - DNA, 25 bp, Homo sapien
tatcaaggccggacaagatggttcc

SEQ ID NO: 1632593 - DNA, 25 bp, Homo sapien
gaaagccactccgacgtgtttgaga

SEQ ID NO: 1632594 - DNA, 25 bp, Homo sapien
gatggttcccgatcgtcagaattcc

SEQ ID NO: 1632595 - DNA, 25 bp, Homo sapien
tagggtgctgtcgattgtccccatg

SEQ ID NO: 1632596 - DNA, 25 bp, Homo sapien
cttattagggtgctgtcgattgtcc

SEQ ID NO: 1632597 - DNA, 25 bp, Homo sapien
tattagggtgctgtcgattgtcccc

SEQ ID NO: 1632598 - DNA, 25 bp, Homo sapien
attagggtgctgtcgattgtcccca

SEQ ID NO: 1632599 - DNA, 25 bp, Homo sapien
ctcaggaggttgtaagtcattggga

SEQ ID NO: 1632600 - DNA, 25 bp, Homo sapien
tctgtatgttgcaccgttgagctcg

SEQ ID NO: 1632601 - DNA, 25 bp, Homo sapien
ttgggacgcctccagggatgattcc

SEQ ID NO: 1632602 - DNA, 25 bp, Homo sapien
cgcgacctgtgatgactcggcggat

SEQ ID NO: 1632603 - DNA, 25 bp, Homo sapien
ctaaagggctccgattcgtgcaagc

SEQ ID NO: 1632604 - DNA, 25 bp, Homo sapien
caagggctgcccctcctatcctgtc

SEQ ID NO: 1632605 - DNA, 25 bp, Homo sapien
cgcatctttcaacggagtctgagca

SEQ ID NO: 1632606 - DNA, 25 bp, Homo sapien
agatttggcgcatctttcaacggag

SEQ ID NO: 1632607 - DNA, 25 bp, Homo sapien
caaggaatgctccctgtctcatctg

SEQ ID NO: 1632608 - DNA, 25 bp, Homo sapien
catgggctgcgttcacaaggaatgc

SEQ ID NO: 1632609 - DNA, 25 bp, Homo sapien
tttctcatccaccaggccaccatgg

SEQ ID NO: 1632610 - DNA, 25 bp, Homo sapien
ctgtgctaaggctttctcatccacc

SEQ ID NO: 1632611 - DNA, 25 bp, Homo sapien
ttgcagtgcaacgagacacagtcac

SEQ ID NO: 1632612 - DNA, 25 bp, Homo sapien
attgcagtgcaacgagacacagtca

SEQ ID NO: 1632613 - DNA, 25 bp, Homo sapien
tgcagtgcaacgagacacagtcact

SEQ ID NO: 1632614 - DNA, 25 bp, Homo sapien
ttccacgaatgagggccactcccat

SEQ ID NO: 1632615 - DNA, 25 bp, Homo sapien
gtcttccacgaatgagggccactcc

SEQ ID NO: 1632616 - DNA, 25 bp, Homo sapien
ctagcgtcttccacgaatgagggcc

SEQ ID NO: 1632617 - DNA, 25 bp, Homo sapien
gcgtcttccacgaatgagggccact

SEQ ID NO: 1632618 - DNA, 25 bp, Homo sapien
gcagatagtggagttggctgcctct

SEQ ID NO: 1632619 - DNA, 25 bp, Homo sapien
ccacatattcctccggcagagattg

SEQ ID NO: 1632620 - DNA, 25 bp, Homo sapien
tgtggcagatagtggagttggctgc

SEQ ID NO: 1632621 - DNA, 25 bp, Homo sapien
tggcagatagtggagttggctgcct

SEQ ID NO: 1632622 - DNA, 25 bp, Homo sapien
gttgcacatagtaatccggagctca

SEQ ID NO: 1632623 - DNA, 25 bp, Homo sapien
ttgcacatagtaatccggagctcac

SEQ ID NO: 1632624 - DNA, 25 bp, Homo sapien
tgtccacgttgtcgtagccacttgc

SEQ ID NO: 1632625 - DNA, 25 bp, Homo sapien
gatgtccacgttgtcgtagccactt

SEQ ID NO: 1632626 - DNA, 25 bp, Homo sapien
ccttgatgtccacgttgtcgtagcc

SEQ ID NO: 1632627 - DNA, 25 bp, Homo sapien
cagccttgatgtccacgttgtcgta

SEQ ID NO: 1632628 - DNA, 25 bp, Homo sapien
tcccttgtttagaatcttctcgtgg

SEQ ID NO: 1632629 - DNA, 25 bp, Homo sapien
cccttgtttagaatcttctcgtgga

SEQ ID NO: 1632630 - DNA, 25 bp, Homo sapien
agcggcgccagcagcgggagggggt

SEQ ID NO: 1632631 - DNA, 25 bp, Homo sapien
agggggtgcagggggctgttcgtga

SEQ ID NO: 1632632 - DNA, 25 bp, Homo sapien
cgccagcagcgggagggggtgcagg

SEQ ID NO: 1632633 - DNA, 25 bp, Homo sapien
ggcgccagcagcgggagggggtgca

SEQ ID NO: 1632634 - DNA, 25 bp, Homo sapien
gcatgacgccactatgaacccaata

SEQ ID NO: 1632635 - DNA, 25 bp, Homo sapien
gtgtgtgcatgacgccactatgaac

SEQ ID NO: 1632636 - DNA, 25 bp, Homo sapien
ggaaactcgcaggagtgtgtgtgca

SEQ ID NO: 1632637 - DNA, 25 bp, Homo sapien
gaaactcgcaggagtgtgtgtgcat

SEQ ID NO: 1632638 - DNA, 25 bp, Homo sapien
gggtccaggaccatggctaactcat

SEQ ID NO: 1632639 - DNA, 25 bp, Homo sapien
cctggtttggtctgaatttgagtcc

SEQ ID NO: 1632640 - DNA, 25 bp, Homo sapien
gacttcaaggctacccaagcacatg

SEQ ID NO: 1632641 - DNA, 25 bp, Homo sapien
gcaaactgtgagtaaacgagggcag

SEQ ID NO: 1632642 - DNA, 25 bp, Homo sapien
tcttatctcaagaccaaccttcaga

SEQ ID NO: 1632643 - DNA, 25 bp, Homo sapien
ccttcagaaatgctagtaagtgcta

SEQ ID NO: 1632644 - DNA, 25 bp, Homo sapien
aaatcagtctaaggttttaatgctg

SEQ ID NO: 1632645 - DNA, 25 bp, Homo sapien
ttgggtatattacctcagaaaatca

SEQ ID NO: 1632646 - DNA, 25 bp, Homo sapien
tagtctgcaggttaaaagtgaagct

SEQ ID NO: 1632647 - DNA, 25 bp, Homo sapien
tcagcacggtcttcccaaggtaaca

SEQ ID NO: 1632648 - DNA, 25 bp, Homo sapien
aacactgtttaggtggaagatctcc

SEQ ID NO: 1632649 - DNA, 25 bp, Homo sapien
caatctgtggcaaatcataacctcc

SEQ ID NO: 1632650 - DNA, 25 bp, Homo sapien
tgaacacaaatattaccaccaccca

SEQ ID NO: 1632651 - DNA, 25 bp, Homo sapien
aaatagcacgaatgatagaatgaac

SEQ ID NO: 1632652 - DNA, 25 bp, Homo sapien
caaatattaccaccacccagaatta

SEQ ID NO: 1632653 - DNA, 25 bp, Homo sapien
aaggaaataaatagcacgaatgata

SEQ ID NO: 1632654 - DNA, 25 bp, Homo sapien
tcaagagtggaactaccgggtattc

SEQ ID NO: 1632655 - DNA, 25 bp, Homo sapien
taatgcatctgtaggccttccagga

SEQ ID NO: 1632656 - DNA, 25 bp, Homo sapien
aaccaattcttagtactagggctgg

SEQ ID NO: 1632657 - DNA, 25 bp, Homo sapien
catggtgcaatgaactatacagcta

SEQ ID NO: 1632658 - DNA, 25 bp, Homo sapien
cagtatggattctcatgtgcagagc

SEQ ID NO: 1632659 - DNA, 25 bp, Homo sapien
tggcttctcatatgcacagtaagag

SEQ ID NO: 1632660 - DNA, 25 bp, Homo sapien
tctggtgtctaatgtgatgtgactt

SEQ ID NO: 1632661 - DNA, 25 bp, Homo sapien
agatgagctttgacagaaggctttc

SEQ ID NO: 1632662 - DNA, 25 bp, Homo sapien
aatgaggtattgcttctgcctgaag

SEQ ID NO: 1632663 - DNA, 25 bp, Homo sapien
gtgagatttgacttgccactgaagg

SEQ ID NO: 1632664 - DNA, 25 bp, Homo sapien
taagtgatgtgattcgagagaaggc

SEQ ID NO: 1632665 - DNA, 25 bp, Homo sapien
gcctgaagattgttccacattcatt

SEQ ID NO: 1632666 - DNA, 25 bp, Homo sapien
tctggtgtctgatgatggttggcat

SEQ ID NO: 1632667 - DNA, 25 bp, Homo sapien
catgcatagggtttggttcctgtat

SEQ ID NO: 1632668 - DNA, 25 bp, Homo sapien
taatgaggtattgcttctggctgaa

SEQ ID NO: 1632669 - DNA, 25 bp, Homo sapien
tgagatatgctttgccgttaaaggc

SEQ ID NO: 1632670 - DNA, 25 bp, Homo sapien
ttcttatgctctacaaggttttgct

SEQ ID NO: 1632671 - DNA, 25 bp, Homo sapien
gctgaagactttccaacatgcctat

SEQ ID NO: 1632672 - DNA, 25 bp, Homo sapien
gctgaaggagatctgattcatgctg

SEQ ID NO: 1632673 - DNA, 25 bp, Homo sapien
gagactcgagagcacactttaccac

SEQ ID NO: 1632674 - DNA, 25 bp, Homo sapien
gaagaatcaatgactgttcagagga

SEQ ID NO: 1632675 - DNA, 25 bp, Homo sapien
acttttctcacattgattaccctga

SEQ ID NO: 1632676 - DNA, 25 bp, Homo sapien
gagttccatacacagaagggtagtc

SEQ ID NO: 1632677 - DNA, 25 bp, Homo sapien
cattcactaaattcatatggtgtat

SEQ ID NO: 1632678 - DNA, 25 bp, Homo sapien
ttcatgttgcgtctttatctgttta

SEQ ID NO: 1632679 - DNA, 25 bp, Homo sapien
catgttgcgtctttatctgtttata

SEQ ID NO: 1632680 - DNA, 25 bp, Homo sapien
gttgcgtctttatctgtttataaac

SEQ ID NO: 1632681 - DNA, 25 bp, Homo sapien
tgcgtctttatctgtttataaactt

SEQ ID NO: 1632682 - DNA, 25 bp, Homo sapien
caggaggtgacatagtgttgaacta

SEQ ID NO: 1632683 - DNA, 25 bp, Homo sapien
tgttgaactatgatggctggaggta

SEQ ID NO: 1632684 - DNA, 25 bp, Homo sapien
tgaactaataggaagtcagcactaa

SEQ ID NO: 1632685 - DNA, 25 bp, Homo sapien
agcactaatccctaagcctgtaata

SEQ ID NO: 1632686 - DNA, 25 bp, Homo sapien
taaggaaacgcatctaggcatacag

SEQ ID NO: 1632687 - DNA, 25 bp, Homo sapien
gacaaaggctagtacgaaaatctca

SEQ ID NO: 1632688 - DNA, 25 bp, Homo sapien
catagattcaggaagacagtctgga

SEQ ID NO: 1632689 - DNA, 25 bp, Homo sapien
gaattcccagcaacagtcactctaa

SEQ ID NO: 1632690 - DNA, 25 bp, Homo sapien
agtgctgactttaaacttgtgagca

SEQ ID NO: 1632691 - DNA, 25 bp, Homo sapien
cagaaaaatgacactggacttggat

SEQ ID NO: 1632692 - DNA, 25 bp, Homo sapien
ttagaactctaagaggttttgcagc

SEQ ID NO: 1632693 - DNA, 25 bp, Homo sapien
ccaaaattcagggagcgcccttaga

SEQ ID NO: 1632694 - DNA, 25 bp, Homo sapien
cggcagacaaagacgaccatggcaa

SEQ ID NO: 1632695 - DNA, 25 bp, Homo sapien
aagtcggagattccgcgcctgcgca

SEQ ID NO: 1632696 - DNA, 25 bp, Homo sapien
ggcagcgctcccagaggtctcctgg

SEQ ID NO: 1632697 - DNA, 25 bp, Homo sapien
gaccatggcaagtcggagattccgc

SEQ ID NO: 1632698 - DNA, 25 bp, Homo sapien
cctacaactgaatcttaggtaaaga

SEQ ID NO: 1632699 - DNA, 25 bp, Homo sapien
aagatggacacctgcatgagggaag

SEQ ID NO: 1632700 - DNA, 25 bp, Homo sapien
ttaagacttcttcctacaactgaat

SEQ ID NO: 1632701 - DNA, 25 bp, Homo sapien
tccaacagtagattgttcagcctcc

SEQ ID NO: 1632702 - DNA, 25 bp, Homo sapien
ttctagcatctaccctcagcattct

SEQ ID NO: 1632703 - DNA, 25 bp, Homo sapien
attcttctagcctatttgcccacca

SEQ ID NO: 1632704 - DNA, 25 bp, Homo sapien
caaagcttggacttgcacattttta

SEQ ID NO: 1632705 - DNA, 25 bp, Homo sapien
aacaactgtcttagtttgcttaggg

SEQ ID NO: 1632706 - DNA, 25 bp, Homo sapien
tgtgtgagcataggaagagacgtct

SEQ ID NO: 1632707 - DNA, 25 bp, Homo sapien
gatgagactgcaatatcctatccta

SEQ ID NO: 1632708 - DNA, 25 bp, Homo sapien
gccataagttcattacgaagttaag

SEQ ID NO: 1632709 - DNA, 25 bp, Homo sapien
gaataaagctcctatgcaggcttag

SEQ ID NO: 1632710 - DNA, 25 bp, Homo sapien
tcaaaaagtaaaagccaagacacaa

SEQ ID NO: 1632711 - DNA, 25 bp, Homo sapien
caaaaagtaaaagccaagacacaag

SEQ ID NO: 1632712 - DNA, 25 bp, Homo sapien
ttcaaaaagtaaaagccaagacaca

SEQ ID NO: 1632713 - DNA, 25 bp, Homo sapien
tggatcctggttggtatagcctgca

SEQ ID NO: 1632714 - DNA, 25 bp, Homo sapien
tgttgaaatgcccaaacctagtaag

SEQ ID NO: 1632715 - DNA, 25 bp, Homo sapien
aaaatcaaataaccggacaggcgtg

SEQ ID NO: 1632716 - DNA, 25 bp, Homo sapien
taaccagtggctcgtgatctcattg

SEQ ID NO: 1632717 - DNA, 25 bp, Homo sapien
tctcacagtgcatacatttgtaggg

SEQ ID NO: 1632718 - DNA, 25 bp, Homo sapien
catgtcgagtaagttcactacctac

SEQ ID NO: 1632719 - DNA, 25 bp, Homo sapien
tctctgatgacgagcaagttctcta

SEQ ID NO: 1632720 - DNA, 25 bp, Homo sapien
gaataagggctgacgtaagtctaaa

SEQ ID NO: 1632721 - DNA, 25 bp, Homo sapien
tgtgcatgcactctaaaggatttcc

SEQ ID NO: 1632722 - DNA, 25 bp, Homo sapien
cactgtcatgagttctccgaggtaa

SEQ ID NO: 1632723 - DNA, 25 bp, Homo sapien
aggatttcccacagaatgagcattc

SEQ ID NO: 1632724 - DNA, 25 bp, Homo sapien
tccgaggtaaagtaagagattcatg

SEQ ID NO: 1632725 - DNA, 25 bp, Homo sapien
gataaatgcttagtctcattcctgg

SEQ ID NO: 1632726 - DNA, 25 bp, Homo sapien
gaataatatcttttcctacagataa

SEQ ID NO: 1632727 - DNA, 25 bp, Homo sapien
gaaccagtgttttgaataatatctt

SEQ ID NO: 1632728 - DNA, 25 bp, Homo sapien
tcctacagataaatgcttagtctca

SEQ ID NO: 1632729 - DNA, 25 bp, Homo sapien
tcagaaagggcatattagttgaccc

SEQ ID NO: 1632730 - DNA, 25 bp, Homo sapien
tttaccgaggataataacaaggtgc

SEQ ID NO: 1632731 - DNA, 25 bp, Homo sapien
agtctcaagataccctcagaaaggg

SEQ ID NO: 1632732 - DNA, 25 bp, Homo sapien
tgtagaggtaatgctaacgcagatc

SEQ ID NO: 1632733 - DNA, 25 bp, Homo sapien
tttctccatcacacaccatcccttt

SEQ ID NO: 1632734 - DNA, 25 bp, Homo sapien
atcacacaccatccctttattctta

SEQ ID NO: 1632735 - DNA, 25 bp, Homo sapien
agagattggtttctgaccacactgt

SEQ ID NO: 1632736 - DNA, 25 bp, Homo sapien
tccatcacacaccatccctttattc

SEQ ID NO: 1632737 - DNA, 25 bp, Homo sapien
tgtcaattccatgagagcagggtct

SEQ ID NO: 1632738 - DNA, 25 bp, Homo sapien
ttgtaccgatatctgtctcaatgta

SEQ ID NO: 1632739 - DNA, 25 bp, Homo sapien
tctcaagaactagtatgtcaattcc

SEQ ID NO: 1632740 - DNA, 25 bp, Homo sapien
cagggtctgtattggtcttggtcac

SEQ ID NO: 1632741 - DNA, 25 bp, Homo sapien
agttggtggcactgaagatcttaat

SEQ ID NO: 1632742 - DNA, 25 bp, Homo sapien
gcagaatccagatattcccattcct

SEQ ID NO: 1632743 - DNA, 25 bp, Homo sapien
gagaagttgatgaccacatccctga

SEQ ID NO: 1632744 - DNA, 25 bp, Homo sapien
cctctgagcagaatccagatattcc

SEQ ID NO: 1632745 - DNA, 25 bp, Homo sapien
cagtacaagttcctctgagcagaat

SEQ ID NO: 1632746 - DNA, 25 bp, Homo sapien
ctccatggacatgatccccaatgaa

SEQ ID NO: 1632747 - DNA, 25 bp, Homo sapien
gagctccatggacatgatccccaat

SEQ ID NO: 1632748 - DNA, 25 bp, Homo sapien
ggagctccatggacatgatccccaa

SEQ ID NO: 1632749 - DNA, 25 bp, Homo sapien
gaggagctccatggacatgatcccc

SEQ ID NO: 1632750 - DNA, 25 bp, Homo sapien
gcaaagtggtgaacctcagcatcca

SEQ ID NO: 1632751 - DNA, 25 bp, Homo sapien
taaaccaagggtgtgaccaagtgac

SEQ ID NO: 1632752 - DNA, 25 bp, Homo sapien
gaagggcgtagaacactcatggaac

SEQ ID NO: 1632753 - DNA, 25 bp, Homo sapien
cacaagatgtggaagcatggcatcc

SEQ ID NO: 1632754 - DNA, 25 bp, Homo sapien
gccattagtaccaatgctgtcttcc

SEQ ID NO: 1632755 - DNA, 25 bp, Homo sapien
cttgagttggccattagtaccaatg

SEQ ID NO: 1632756 - DNA, 25 bp, Homo sapien
cttcagggggccttcacttgcagaa

SEQ ID NO: 1632757 - DNA, 25 bp, Homo sapien
tgagttggccattagtaccaatgct

SEQ ID NO: 1632758 - DNA, 25 bp, Homo sapien
caatgacgtcgtaaacaatagcact

SEQ ID NO: 1632759 - DNA, 25 bp, Homo sapien
tgacgtcgtaaacaatagcactaac

SEQ ID NO: 1632760 - DNA, 25 bp, Homo sapien
cacaatgacgtcgtaaacaatagca

SEQ ID NO: 1632761 - DNA, 25 bp, Homo sapien
aatgacgtcgtaaacaatagcacta

SEQ ID NO: 1632762 - DNA, 25 bp, Homo sapien
gggtcacctcgactcgccaggctta

SEQ ID NO: 1632763 - DNA, 25 bp, Homo sapien
gtggaccgacctcgcccggcagcgc

SEQ ID NO: 1632764 - DNA, 25 bp, Homo sapien
aggctcccggctccacgtggaccga

SEQ ID NO: 1632765 - DNA, 25 bp, Homo sapien
agctcccgcgtacagaggcctcagg

SEQ ID NO: 1632766 - DNA, 25 bp, Homo sapien
tttttttttgagatgaagtgttgct

SEQ ID NO: 1632767 - DNA, 25 bp, Homo sapien
tgcactccactgggggagaattttt

SEQ ID NO: 1632768 - DNA, 25 bp, Homo sapien
tttttttgagatgaagtgttgctct

SEQ ID NO: 1632769 - DNA, 25 bp, Homo sapien
actgcactccactgggggagaattt

SEQ ID NO: 1632770 - DNA, 25 bp, Homo sapien
tactacacgtgtgaattagaaattc

SEQ ID NO: 1632771 - DNA, 25 bp, Homo sapien
gtagtatcagataataggcctcaaa

SEQ ID NO: 1632772 - DNA, 25 bp, Homo sapien
ttaagtataagaaagttggcatggc

SEQ ID NO: 1632773 - DNA, 25 bp, Homo sapien
gctgagaaagctacttaaaattggt

SEQ ID NO: 1632774 - DNA, 25 bp, Homo sapien
tcacttattattatcacctattacg

SEQ ID NO: 1632775 - DNA, 25 bp, Homo sapien
tatcacctattacgtactatacata

SEQ ID NO: 1632776 - DNA, 25 bp, Homo sapien
tgtaatcacttattattatcaccta

SEQ ID NO: 1632777 - DNA, 25 bp, Homo sapien
tattattatcacctattacgtacta

SEQ ID NO: 1632778 - DNA, 25 bp, Homo sapien
gttgcatgacaacgtccacaagtga

SEQ ID NO: 1632779 - DNA, 25 bp, Homo sapien
gaaatagatccacaagcataattgg

SEQ ID NO: 1632780 - DNA, 25 bp, Homo sapien
taggttttggtatccacaaggtgtc

SEQ ID NO: 1632781 - DNA, 25 bp, Homo sapien
ggtttatttacagcagcgtcaccac

SEQ ID NO: 1632782 - DNA, 25 bp, Homo sapien
caaaagattgccacattacagggaa

SEQ ID NO: 1632783 - DNA, 25 bp, Homo sapien
tacgtacaacccagatgttcatcag

SEQ ID NO: 1632784 - DNA, 25 bp, Homo sapien
ttgttccctcaaaatctcacacgga

SEQ ID NO: 1632785 - DNA, 25 bp, Homo sapien
ccatgatagactattggctggacca

SEQ ID NO: 1632786 - DNA, 25 bp, Homo sapien
tgtgatatgctagctctccctttgc

SEQ ID NO: 1632787 - DNA, 25 bp, Homo sapien
tcagaaagtattactggtctcccac

SEQ ID NO: 1632788 - DNA, 25 bp, Homo sapien
tgtaggtttcttgtcgtggttgcca

SEQ ID NO: 1632789 - DNA, 25 bp, Homo sapien
tatgaagtatctagagtagtccacc

SEQ ID NO: 1632790 - DNA, 25 bp, Homo sapien
tccatacatacagaaccaggttcag

SEQ ID NO: 1632791 - DNA, 25 bp, Homo sapien
gaagatgccactacggatcctatag

SEQ ID NO: 1632792 - DNA, 25 bp, Homo sapien
gctgtcttaatccagggcacatgaa

SEQ ID NO: 1632793 - DNA, 25 bp, Homo sapien
aacgaggaaataaccatcacaggag

SEQ ID NO: 1632794 - DNA, 25 bp, Homo sapien
taaatgatgagcaaggaaattggta

SEQ ID NO: 1632795 - DNA, 25 bp, Homo sapien
atcaaaagcaccagacaaaaataga

SEQ ID NO: 1632796 - DNA, 25 bp, Homo sapien
ctgtttactaagtaatgatgattac

SEQ ID NO: 1632797 - DNA, 25 bp, Homo sapien
tatgttggggattctgtttactaag

SEQ ID NO: 1632798 - DNA, 25 bp, Homo sapien
gaatgtacctacagcattctaaggt

SEQ ID NO: 1632799 - DNA, 25 bp, Homo sapien
tcaagaaggagataccaattagtca

SEQ ID NO: 1632800 - DNA, 25 bp, Homo sapien
taaaagaagcagcaagtataagcct

SEQ ID NO: 1632801 - DNA, 25 bp, Homo sapien
gatgcaaggttaagagtaacttccg

SEQ ID NO: 1632802 - DNA, 25 bp, Homo sapien
tattcagagcgttgttttaccctcc

SEQ ID NO: 1632803 - DNA, 25 bp, Homo sapien
taatgtgtctcatgccttaagggat

SEQ ID NO: 1632804 - DNA, 25 bp, Homo sapien
ccacagtcctgtattcagaggtaaa

SEQ ID NO: 1632805 - DNA, 25 bp, Homo sapien
taagtgtatgtttgcaccccacacc

SEQ ID NO: 1632806 - DNA, 25 bp, Homo sapien
gctaggactacacaggcttgtacct

SEQ ID NO: 1632807 - DNA, 25 bp, Homo sapien
ggatacgcagttagtgtctgctgca

SEQ ID NO: 1632808 - DNA, 25 bp, Homo sapien
gaatgccaacttgaagcccagctgg

SEQ ID NO: 1632809 - DNA, 25 bp, Homo sapien
cactgtaaatgtctgggaatgccaa

SEQ ID NO: 1632810 - DNA, 25 bp, Homo sapien
tgcactccaagcacttcaatgattt

SEQ ID NO: 1632811 - DNA, 25 bp, Homo sapien
cagccttactgtagtcctggtgttg

SEQ ID NO: 1632812 - DNA, 25 bp, Homo sapien
aatgatttcagccttactgtagtcc

SEQ ID NO: 1632813 - DNA, 25 bp, Homo sapien
ttcagttctgcactccaagcacttc

SEQ ID NO: 1632814 - DNA, 25 bp, Homo sapien
tccgttccgggagagctgtctaagg

SEQ ID NO: 1632815 - DNA, 25 bp, Homo sapien
cagaagcgtagtgccagccgcaata

SEQ ID NO: 1632816 - DNA, 25 bp, Homo sapien
gaggccagggaggtaaccaagagtc

SEQ ID NO: 1632817 - DNA, 25 bp, Homo sapien
gcaggcgcagacgactcaccctggg

SEQ ID NO: 1632818 - DNA, 25 bp, Homo sapien
gcggtatccagacgctccgatctgt

SEQ ID NO: 1632819 - DNA, 25 bp, Homo sapien
ggtatccagacgctccgatctgtac

SEQ ID NO: 1632820 - DNA, 25 bp, Homo sapien
ccgcggtatccagacgctccgatct

SEQ ID NO: 1632821 - DNA, 25 bp, Homo sapien
gaccgcggtatccagacgctccgat

SEQ ID NO: 1632822 - DNA, 25 bp, Homo sapien
tccccgcgcggagcgggcgctgtgt

SEQ ID NO: 1632823 - DNA, 25 bp, Homo sapien
tgaccttgagggtgacccggagcga

SEQ ID NO: 1632824 - DNA, 25 bp, Homo sapien
ggcgtggtccatgggcgtgaccttg

SEQ ID NO: 1632825 - DNA, 25 bp, Homo sapien
gatcccgcggaagcgccatcgctgg

SEQ ID NO: 1632826 - DNA, 25 bp, Homo sapien
gaaacatgcagctacatagatgaac

SEQ ID NO: 1632827 - DNA, 25 bp, Homo sapien
gaacctcaaatgcattacgctaaag

SEQ ID NO: 1632828 - DNA, 25 bp, Homo sapien
tacactgtggtacattcccaagatg

SEQ ID NO: 1632829 - DNA, 25 bp, Homo sapien
tgcacgaggcaattctttgaggtgt

SEQ ID NO: 1632830 - DNA, 25 bp, Homo sapien
gcaaatcaaaagctgcaaaggcgcc

SEQ ID NO: 1632831 - DNA, 25 bp, Homo sapien
actctggtcataggaacgtgatggc

SEQ ID NO: 1632832 - DNA, 25 bp, Homo sapien
gagtgggcctaactagaagccagca

SEQ ID NO: 1632833 - DNA, 25 bp, Homo sapien
tattcttttacttatcagagagcag

SEQ ID NO: 1632834 - DNA, 25 bp, Homo sapien
aatatagcttattggccgggcatag

SEQ ID NO: 1632835 - DNA, 25 bp, Homo sapien
taagaataaatatagcttattggcc

SEQ ID NO: 1632836 - DNA, 25 bp, Homo sapien
ataaatatagcttattggccgggca

SEQ ID NO: 1632837 - DNA, 25 bp, Homo sapien
tttgataattttcatccacatcaaa

SEQ ID NO: 1632838 - DNA, 25 bp, Homo sapien
ggtaatggcccaaaatacggacata

SEQ ID NO: 1632839 - DNA, 25 bp, Homo sapien
catctgtggaaagtgagtggctaca

SEQ ID NO: 1632840 - DNA, 25 bp, Homo sapien
tacatctttacgtactgacctggaa

SEQ ID NO: 1632841 - DNA, 25 bp, Homo sapien
tgttgggaatctgcacaatagaaac

SEQ ID NO: 1632842 - DNA, 25 bp, Homo sapien
tggttaatacaataactcagaaaca

SEQ ID NO: 1632843 - DNA, 25 bp, Homo sapien
acactttagttatccactttctcac

SEQ ID NO: 1632844 - DNA, 25 bp, Homo sapien
tctcaataatggttaatacaataac

SEQ ID NO: 1632845 - DNA, 25 bp, Homo sapien
ttacactttagttatccactttctc

SEQ ID NO: 1632846 - DNA, 25 bp, Homo sapien
taagatgtgagcgatgcctaaaagt

SEQ ID NO: 1632847 - DNA, 25 bp, Homo sapien
tccagtatggagtcgcaggtgttca

SEQ ID NO: 1632848 - DNA, 25 bp, Homo sapien
gattaaacgccttcccgcattgata

SEQ ID NO: 1632849 - DNA, 25 bp, Homo sapien
tctcgccagtatgaagagtctgatg

SEQ ID NO: 1632850 - DNA, 25 bp, Homo sapien
caggactatggcttttaaattcttc

SEQ ID NO: 1632851 - DNA, 25 bp, Homo sapien
gatgttgctcaaaatgacagttgcc

SEQ ID NO: 1632852 - DNA, 25 bp, Homo sapien
gatagcgctgaaaattgatctctca

SEQ ID NO: 1632853 - DNA, 25 bp, Homo sapien
gacagttgccttcccagatagcgct

SEQ ID NO: 1632854 - DNA, 25 bp, Homo sapien
tggggctcatctctggatgccaagt

SEQ ID NO: 1632855 - DNA, 25 bp, Homo sapien
taacccactgggataattctgtttc

SEQ ID NO: 1632856 - DNA, 25 bp, Homo sapien
cataaatatccctttttggagataa

SEQ ID NO: 1632857 - DNA, 25 bp, Homo sapien
ttggagataacttctggggctcatc

SEQ ID NO: 1632858 - DNA, 25 bp, Homo sapien
tatagcagcagtactcaatgggtgg

SEQ ID NO: 1632859 - DNA, 25 bp, Homo sapien
tcaggaagtctataaggtcaaagct

SEQ ID NO: 1632860 - DNA, 25 bp, Homo sapien
tcttctgtccagtaccacatgtgag

SEQ ID NO: 1632861 - DNA, 25 bp, Homo sapien
ccaccaaaggtaggcgatatcctgc

SEQ ID NO: 1632862 - DNA, 25 bp, Homo sapien
gtctgtagcctcattattgtccaag

SEQ ID NO: 1632863 - DNA, 25 bp, Homo sapien
tgtagcctcattattgtccaagaaa

SEQ ID NO: 1632864 - DNA, 25 bp, Homo sapien
tagcctcattattgtccaagaaatt

SEQ ID NO: 1632865 - DNA, 25 bp, Homo sapien
tgtctgtagcctcattattgtccaa

SEQ ID NO: 1632866 - DNA, 25 bp, Homo sapien
ggagattacggctggcttagaaaca

SEQ ID NO: 1632867 - DNA, 25 bp, Homo sapien
tgctccaatgaggagattacggctg

SEQ ID NO: 1632868 - DNA, 25 bp, Homo sapien
caatgaggagattacggctggctta

SEQ ID NO: 1632869 - DNA, 25 bp, Homo sapien
ccttgctccaatgaggagattacgg

SEQ ID NO: 1632870 - DNA, 25 bp, Homo sapien
agttgctataattctccaacatcac

SEQ ID NO: 1632871 - DNA, 25 bp, Homo sapien
aagtgacaccaagttgctataattc

SEQ ID NO: 1632872 - DNA, 25 bp, Homo sapien
caagtgacaccaagttgctataatt

SEQ ID NO: 1632873 - DNA, 25 bp, Homo sapien
ccaagttgctataattctccaacat

SEQ ID NO: 1632874 - DNA, 25 bp, Homo sapien
attcctcctgagagacatctatagc

SEQ ID NO: 1632875 - DNA, 25 bp, Homo sapien
tgagagacatctatagccacatctc

SEQ ID NO: 1632876 - DNA, 25 bp, Homo sapien
aattcctctgcgctgggttcaggca

SEQ ID NO: 1632877 - DNA, 25 bp, Homo sapien
gtacaaattcctctgcgctgggttc

SEQ ID NO: 1632878 - DNA, 25 bp, Homo sapien
taagattaatccaagacgaggtagg

SEQ ID NO: 1632879 - DNA, 25 bp, Homo sapien
tagcaaataatcctatagtgacgat

SEQ ID NO: 1632880 - DNA, 25 bp, Homo sapien
acttgaatagtgtaaagcacattgc

SEQ ID NO: 1632881 - DNA, 25 bp, Homo sapien
tttatagagccagcattgccttgac

SEQ ID NO: 1632882 - DNA, 25 bp, Homo sapien
tctgcatatatctgggaagtcttac

SEQ ID NO: 1632883 - DNA, 25 bp, Homo sapien
caaccacaagcagctgattaacaca

SEQ ID NO: 1632884 - DNA, 25 bp, Homo sapien
tccgttacctagaagaatgcctgtc

SEQ ID NO: 1632885 - DNA, 25 bp, Homo sapien
cactaccagttaagcttcagaaggg

SEQ ID NO: 1632886 - DNA, 25 bp, Homo sapien
tggaagaaactcaatccaaagaagg

SEQ ID NO: 1632887 - DNA, 25 bp, Homo sapien
ttaatcctcttcttcgttccctctg

SEQ ID NO: 1632888 - DNA, 25 bp, Homo sapien
gaaactcaatccaaagaaggtgttg

SEQ ID NO: 1632889 - DNA, 25 bp, Homo sapien
ccctctggaagaaactcaatccaaa

SEQ ID NO: 1632890 - DNA, 25 bp, Homo sapien
caccaggtcgctgtcccaacagtaa

SEQ ID NO: 1632891 - DNA, 25 bp, Homo sapien
actatagacattcccttccgcggca

SEQ ID NO: 1632892 - DNA, 25 bp, Homo sapien
caatcacactgtcactaaagcacac

SEQ ID NO: 1632893 - DNA, 25 bp, Homo sapien
ttcacaatcatggtcacagtcacct

SEQ ID NO: 1632894 - DNA, 25 bp, Homo sapien
tggtccaagctctgattcggattcc

SEQ ID NO: 1632895 - DNA, 25 bp, Homo sapien
tctacccggagaccattcctgcgag

SEQ ID NO: 1632896 - DNA, 25 bp, Homo sapien
ttcggattccaagcgaagccacacg

SEQ ID NO: 1632897 - DNA, 25 bp, Homo sapien
acccggagaccattcctgcgaggct

SEQ ID NO: 1632898 - DNA, 25 bp, Homo sapien
cttgcgcagtttcacccgaggctgg

SEQ ID NO: 1632899 - DNA, 25 bp, Homo sapien
tagctgtggacagcagtgtcctctg

SEQ ID NO: 1632900 - DNA, 25 bp, Homo sapien
ggagtgacgccaacctgttaatgtt

SEQ ID NO: 1632901 - DNA, 25 bp, Homo sapien
tgttaatgttcgttttcggattctg

SEQ ID NO: 1632902 - DNA, 25 bp, Homo sapien
gatgtggcttaaatgtgagaggcca

SEQ ID NO: 1632903 - DNA, 25 bp, Homo sapien
caccgcgctgggtggtgaaacggtt

SEQ ID NO: 1632904 - DNA, 25 bp, Homo sapien
tggctgttctatatgcccgcgtggg

SEQ ID NO: 1632905 - DNA, 25 bp, Homo sapien
cggttttgaggctttttgagaatgg

SEQ ID NO: 1632906 - DNA, 25 bp, Homo sapien
acccgtgtgattgccacgtttgcag

SEQ ID NO: 1632907 - DNA, 25 bp, Homo sapien
gcagccacgtgcacagggatcttgt

SEQ ID NO: 1632908 - DNA, 25 bp, Homo sapien
ttctgtgtgaggctttttgcgctgg

SEQ ID NO: 1632909 - DNA, 25 bp, Homo sapien
ggctttttgcgctgggtccacccat

SEQ ID NO: 1632910 - DNA, 25 bp, Homo sapien
ctagtgtgactgtggcggcccctga

SEQ ID NO: 1632911 - DNA, 25 bp, Homo sapien
gattagaggactagtgtgactgtgg

SEQ ID NO: 1632912 - DNA, 25 bp, Homo sapien
attagaggactagtgtgactgtggc

SEQ ID NO: 1632913 - DNA, 25 bp, Homo sapien
aggactagtgtgactgtggcggccc

SEQ ID NO: 1632914 - DNA, 25 bp, Homo sapien
taagcagaagtataaccttgttact

SEQ ID NO: 1632915 - DNA, 25 bp, Homo sapien
ggttttatgcaggatagttgtatca

SEQ ID NO: 1632916 - DNA, 25 bp, Homo sapien
tcatgtacagtatgatatactgact

SEQ ID NO: 1632917 - DNA, 25 bp, Homo sapien
tgggatatcagggagaagcattaac

SEQ ID NO: 1632918 - DNA, 25 bp, Homo sapien
actgatcacttaacagttcgttctg

SEQ ID NO: 1632919 - DNA, 25 bp, Homo sapien
aacagttcgttctgaggaagttctg

SEQ ID NO: 1632920 - DNA, 25 bp, Homo sapien
ttaaactagtatattcctgctagac

SEQ ID NO: 1632921 - DNA, 25 bp, Homo sapien
tgctagactcaaagctgaaccatgc

SEQ ID NO: 1632922 - DNA, 25 bp, Homo sapien
catcactgagatttccacctccggg

SEQ ID NO: 1632923 - DNA, 25 bp, Homo sapien
tctttgtcagcaagtagcggtaaac

SEQ ID NO: 1632924 - DNA, 25 bp, Homo sapien
tgcagggtcatcagtcagccgacta

SEQ ID NO: 1632925 - DNA, 25 bp, Homo sapien
gctggagcgctcctagagattctag

SEQ ID NO: 1632926 - DNA, 25 bp, Homo sapien
tgacattaagaggagttttgtttct

SEQ ID NO: 1632927 - DNA, 25 bp, Homo sapien
ccttgacattaagaggagttttgtt

SEQ ID NO: 1632928 - DNA, 25 bp, Homo sapien
cccttgacattaagaggagttttgt

SEQ ID NO: 1632929 - DNA, 25 bp, Homo sapien
cttgacattaagaggagttttgttt

SEQ ID NO: 1632930 - DNA, 25 bp, Homo sapien
attgttatagactgatttgttcccc

SEQ ID NO: 1632931 - DNA, 25 bp, Homo sapien
ttacatgataaagggtgggtgctat

SEQ ID NO: 1632932 - DNA, 25 bp, Homo sapien
tgtatatactgatcaacctaactcc

SEQ ID NO: 1632933 - DNA, 25 bp, Homo sapien
taagacttaagacatacaaccagat

SEQ ID NO: 1632934 - DNA, 25 bp, Homo sapien
aagccagcacgctataattttaaaa

SEQ ID NO: 1632935 - DNA, 25 bp, Homo sapien
aaagccagcacgctataattttaaa

SEQ ID NO: 1632936 - DNA, 25 bp, Homo sapien
aaaaagccagcacgctataatttta

SEQ ID NO: 1632937 - DNA, 25 bp, Homo sapien
ttaaaaagccagcacgctataattt

SEQ ID NO: 1632938 - DNA, 25 bp, Homo sapien
tcacgaactattgctccaagaagga

SEQ ID NO: 1632939 - DNA, 25 bp, Homo sapien
tcagttgcctctcatttacctgggc

SEQ ID NO: 1632940 - DNA, 25 bp, Homo sapien
gaattctggctgaagagacccaaac

SEQ ID NO: 1632941 - DNA, 25 bp, Homo sapien
gattttatacacaacgagttcctct

SEQ ID NO: 1632942 - DNA, 25 bp, Homo sapien
gataggaacccatgtgcccataagg

SEQ ID NO: 1632943 - DNA, 25 bp, Homo sapien
cattcctgagtctacatacccgtga

SEQ ID NO: 1632944 - DNA, 25 bp, Homo sapien
tgtactccacccagaagtcaatgcc

SEQ ID NO: 1632945 - DNA, 25 bp, Homo sapien
ccagaagtcaatgccacattcctga

SEQ ID NO: 1632946 - DNA, 25 bp, Homo sapien
taaataagttaccacatatccatgt

SEQ ID NO: 1632947 - DNA, 25 bp, Homo sapien
agatagacaaatgcaaagttgtaga

SEQ ID NO: 1632948 - DNA, 25 bp, Homo sapien
aggaattgcaaagggaagttagtag

SEQ ID NO: 1632949 - DNA, 25 bp, Homo sapien
catatccatgtaatataatactaag

SEQ ID NO: 1632950 - DNA, 25 bp, Homo sapien
agcttattatttggggggcttggca

SEQ ID NO: 1632951 - DNA, 25 bp, Homo sapien
ctatataaccacctcaaaagtttat

SEQ ID NO: 1632952 - DNA, 25 bp, Homo sapien
tataaccacctcaaaagtttatggc

SEQ ID NO: 1632953 - DNA, 25 bp, Homo sapien
tagcttattatttggggggcttggc

SEQ ID NO: 1632954 - DNA, 25 bp, Homo sapien
gatggtctccctgaaatttctggcc

SEQ ID NO: 1632955 - DNA, 25 bp, Homo sapien
ggccgttgttgctcactggacctct

SEQ ID NO: 1632956 - DNA, 25 bp, Homo sapien
gagtggttcttctgctgatcatatt

SEQ ID NO: 1632957 - DNA, 25 bp, Homo sapien
caagcaagttgctcttagccttcag

SEQ ID NO: 1632958 - DNA, 25 bp, Homo sapien
aaaggggaagagaaaaagctgcaag

SEQ ID NO: 1632959 - DNA, 25 bp, Homo sapien
tcagggcaggaaaaggggaagagaa

SEQ ID NO: 1632960 - DNA, 25 bp, Homo sapien
gaaaaggggaagagaaaaagctgca

SEQ ID NO: 1632961 - DNA, 25 bp, Homo sapien
ctcagggcaggaaaaggggaagaga

SEQ ID NO: 1632962 - DNA, 25 bp, Homo sapien
tttattccaccactcgattatccct

SEQ ID NO: 1632963 - DNA, 25 bp, Homo sapien
gcctcgttccgaaaacaggtctgtc

SEQ ID NO: 1632964 - DNA, 25 bp, Homo sapien
ttcactgcagctggggtctatacag

SEQ ID NO: 1632965 - DNA, 25 bp, Homo sapien
aagcctcgttccgaaaacaggtctg

SEQ ID NO: 1632966 - DNA, 25 bp, Homo sapien
agcagcactgtcatgatggaaggtc

SEQ ID NO: 1632967 - DNA, 25 bp, Homo sapien
gaaggtctcaaaccctacagtgtca

SEQ ID NO: 1632968 - DNA, 25 bp, Homo sapien
catgatggaaggtctcaaaccctac

SEQ ID NO: 1632969 - DNA, 25 bp, Homo sapien
ggtctcaaaccctacagtgtcacac

SEQ ID NO: 1632970 - DNA, 25 bp, Homo sapien
cagggacaggaacacaatcacgcac

SEQ ID NO: 1632971 - DNA, 25 bp, Homo sapien
catccgagcagggacaggaacacaa

SEQ ID NO: 1632972 - DNA, 25 bp, Homo sapien
ccaaaggtcccgcatccgagcaggg

SEQ ID NO: 1632973 - DNA, 25 bp, Homo sapien
aaggtcccgcatccgagcagggaca

SEQ ID NO: 1632974 - DNA, 25 bp, Homo sapien
gcagcctcctcgccgcgcacaccgc

SEQ ID NO: 1632975 - DNA, 25 bp, Homo sapien
cgcagcctcctcgccgcgcacaccg

SEQ ID NO: 1632976 - DNA, 25 bp, Homo sapien
tcccgggagctcggggcttcctcac

SEQ ID NO: 1632977 - DNA, 25 bp, Homo sapien
agctacggccctgcacaccctgtct

SEQ ID NO: 1632978 - DNA, 25 bp, Homo sapien
aggcccgagctacggccctgcacac

SEQ ID NO: 1632979 - DNA, 25 bp, Homo sapien
gcacaggtgcatacacaggcccgag

SEQ ID NO: 1632980 - DNA, 25 bp, Homo sapien
tccagatacacttcccttctcatgg

SEQ ID NO: 1632981 - DNA, 25 bp, Homo sapien
gagaacctgctgcttggaacctcca

SEQ ID NO: 1632982 - DNA, 25 bp, Homo sapien
acctgctgcttggaacctccagata

SEQ ID NO: 1632983 - DNA, 25 bp, Homo sapien
gaacctgctgcttggaacctccaga

SEQ ID NO: 1632984 - DNA, 25 bp, Homo sapien
cagtggcaacttgaacagcattatt

SEQ ID NO: 1632985 - DNA, 25 bp, Homo sapien
ttggaaatctgcgaagacagtgact

SEQ ID NO: 1632986 - DNA, 25 bp, Homo sapien
ccttttggcgaggagagtaagctca

SEQ ID NO: 1632987 - DNA, 25 bp, Homo sapien
agcattattgcaggtccttcttggg

SEQ ID NO: 1632988 - DNA, 25 bp, Homo sapien
gacacaccaggtacaagagaaaaac

SEQ ID NO: 1632989 - DNA, 25 bp, Homo sapien
ctttctaatactatggcagaggaga

SEQ ID NO: 1632990 - DNA, 25 bp, Homo sapien
ggatttaccccaaatagatcatctt

SEQ ID NO: 1632991 - DNA, 25 bp, Homo sapien
aaaactcaatgtcgtaaagatgtca

SEQ ID NO: 1632992 - DNA, 25 bp, Homo sapien
tctaaattagtcctgcccagagttc

SEQ ID NO: 1632993 - DNA, 25 bp, Homo sapien
cttatctaaattagtcctgcccaga

SEQ ID NO: 1632994 - DNA, 25 bp, Homo sapien
aaaatgcaaccatatgtctacattc

SEQ ID NO: 1632995 - DNA, 25 bp, Homo sapien
aatgcaaccatatgtctacattcat

SEQ ID NO: 1632996 - DNA, 25 bp, Homo sapien
gacaaggtgggccattctttatatt

SEQ ID NO: 1632997 - DNA, 25 bp, Homo sapien
agaggacaaggtgggccattcttta

SEQ ID NO: 1632998 - DNA, 25 bp, Homo sapien
ggacaaggtgggccattctttatat

SEQ ID NO: 1632999 - DNA, 25 bp, Homo sapien
gaggacaaggtgggccattctttat

SEQ ID NO: 1633000 - DNA, 25 bp, Homo sapien
gtatttgacccacatatggaatctg

SEQ ID NO: 1633001 - DNA, 25 bp, Homo sapien
tggcatgagaacagtttcctacatt

SEQ ID NO: 1633002 - DNA, 25 bp, Homo sapien
ttgtatttgacccacatatggaatc

SEQ ID NO: 1633003 - DNA, 25 bp, Homo sapien
gatgatccatgacaaatggcatgag

SEQ ID NO: 1633004 - DNA, 25 bp, Homo sapien
tctgatgtcggctgagtcctgaggc

SEQ ID NO: 1633005 - DNA, 25 bp, Homo sapien
gtcggctgagtcctgaggcatagaa

SEQ ID NO: 1633006 - DNA, 25 bp, Homo sapien
gatgtcggctgagtcctgaggcata

SEQ ID NO: 1633007 - DNA, 25 bp, Homo sapien
gaacactctgatgtcggctgagtcc

SEQ ID NO: 1633008 - DNA, 25 bp, Homo sapien
cgccgatgttggattattgctgagc

SEQ ID NO: 1633009 - DNA, 25 bp, Homo sapien
ttgaacgacgtctaaaggccttgcc

SEQ ID NO: 1633010 - DNA, 25 bp, Homo sapien
aggtgtgtacgctgtctgaaggact

SEQ ID NO: 1633011 - DNA, 25 bp, Homo sapien
tctgagccgcaagtaaaagatttcc

SEQ ID NO: 1633012 - DNA, 25 bp, Homo sapien
tcctgagcagaaagtaaaagatttc

SEQ ID NO: 1633013 - DNA, 25 bp, Homo sapien
tgttgagtaagtcgtaaacgaagtc

SEQ ID NO: 1633014 - DNA, 25 bp, Homo sapien
ttaaggtatgtacgctgtctaaagg

SEQ ID NO: 1633015 - DNA, 25 bp, Homo sapien
gctgatgttgaattagtgttgaatg

SEQ ID NO: 1633016 - DNA, 25 bp, Homo sapien
ggtgtcgaattagtgttgagccaac

SEQ ID NO: 1633017 - DNA, 25 bp, Homo sapien
gaactgcctgatgtccaattagccc

SEQ ID NO: 1633018 - DNA, 25 bp, Homo sapien
gatgtcgaattagtgctgagcctga

SEQ ID NO: 1633019 - DNA, 25 bp, Homo sapien
cgattgcgtgttgagcgaaaagtaa

SEQ ID NO: 1633020 - DNA, 25 bp, Homo sapien
gatgtgcagacggtctaaaggcctt

SEQ ID NO: 1633021 - DNA, 25 bp, Homo sapien
tcaccagtatgggtttcttgctgtt

SEQ ID NO: 1633022 - DNA, 25 bp, Homo sapien
tgaggtctctcatctgtatacattt

SEQ ID NO: 1633023 - DNA, 25 bp, Homo sapien
taaaggccttcacggattcctgaca

SEQ ID NO: 1633024 - DNA, 25 bp, Homo sapien
gctttttccaaatatcgctcctgat

SEQ ID NO: 1633025 - DNA, 25 bp, Homo sapien
ggatgaatccgatgatgcagagtga

SEQ ID NO: 1633026 - DNA, 25 bp, Homo sapien
gatttatatcttggtgctgaaactg

SEQ ID NO: 1633027 - DNA, 25 bp, Homo sapien
gagcccacaaggctatgacattttt

SEQ ID NO: 1633028 - DNA, 25 bp, Homo sapien
aacatgaatctttggtcttacatct

SEQ ID NO: 1633029 - DNA, 25 bp, Homo sapien
aaacatgaatctttggtcttacatc

SEQ ID NO: 1633030 - DNA, 25 bp, Homo sapien
acatgaatctttggtcttacatcta

SEQ ID NO: 1633031 - DNA, 25 bp, Homo sapien
gcaaaaacatagcatttccttgttg

SEQ ID NO: 1633032 - DNA, 25 bp, Homo sapien
catttccttgttgagtagaaataaa

SEQ ID NO: 1633033 - DNA, 25 bp, Homo sapien
catagcatttccttgttgagtagaa

SEQ ID NO: 1633034 - DNA, 25 bp, Homo sapien
tccttgttgagtagaaataaaaaca

SEQ ID NO: 1633035 - DNA, 25 bp, Homo sapien
ctcggcaccatcctcccagcacgtc

SEQ ID NO: 1633036 - DNA, 25 bp, Homo sapien
cggcaccatcctcccagcacgtccc

SEQ ID NO: 1633037 - DNA, 25 bp, Homo sapien
tcctcccagcacgtcccttgaaacc

SEQ ID NO: 1633038 - DNA, 25 bp, Homo sapien
accatcctcccagcacgtcccttga

SEQ ID NO: 1633039 - DNA, 25 bp, Homo sapien
ttcatgagttatttgcggatagaca

SEQ ID NO: 1633040 - DNA, 25 bp, Homo sapien
ccaaaattcatgagttatttgcgga

SEQ ID NO: 1633041 - DNA, 25 bp, Homo sapien
catgagttatttgcggatagacatc

SEQ ID NO: 1633042 - DNA, 25 bp, Homo sapien
gttatttgcggatagacatccttac

SEQ ID NO: 1633043 - DNA, 25 bp, Homo sapien
tctctgtataagtccttctgagcag

SEQ ID NO: 1633044 - DNA, 25 bp, Homo sapien
taagtccttctgagcagcgtccagg

SEQ ID NO: 1633045 - DNA, 25 bp, Homo sapien
agagaagtctatagacagatcctgg

SEQ ID NO: 1633046 - DNA, 25 bp, Homo sapien
caggctgctgtagttctccatcatt

SEQ ID NO: 1633047 - DNA, 25 bp, Homo sapien
gtttttaagatgaaggaagagatgg

SEQ ID NO: 1633048 - DNA, 25 bp, Homo sapien
taagatgaaggaagagatggaaggg

SEQ ID NO: 1633049 - DNA, 25 bp, Homo sapien
aggtttttaagatgaaggaagagat

SEQ ID NO: 1633050 - DNA, 25 bp, Homo sapien
agatgaaggaagagatggaagggtg

SEQ ID NO: 1633051 - DNA, 25 bp, Homo sapien
gcagccagcaaacctccttcataga

SEQ ID NO: 1633052 - DNA, 25 bp, Homo sapien
tccttcatagaatgggacattccga

SEQ ID NO: 1633053 - DNA, 25 bp, Homo sapien
gccagcaaacctccttcatagaatg

SEQ ID NO: 1633054 - DNA, 25 bp, Homo sapien
tgggacattccgaatattccatggt

SEQ ID NO: 1633055 - DNA, 25 bp, Homo sapien
taacttgccccctgtattagggtca

SEQ ID NO: 1633056 - DNA, 25 bp, Homo sapien
ctgtattagggtcatactaggaaaa

SEQ ID NO: 1633057 - DNA, 25 bp, Homo sapien
tgccccctgtattagggtcatacta

SEQ ID NO: 1633058 - DNA, 25 bp, Homo sapien
ccctgtattagggtcatactaggaa

SEQ ID NO: 1633059 - DNA, 25 bp, Homo sapien
ctagccaagttcctcaggactccaa

SEQ ID NO: 1633060 - DNA, 25 bp, Homo sapien
tagccaagttcctcaggactccaag

SEQ ID NO: 1633061 - DNA, 25 bp, Homo sapien
gcgcggcggcagctaaatcggcaca

SEQ ID NO: 1633062 - DNA, 25 bp, Homo sapien
cagctaaatcggcacagcaaacggt

SEQ ID NO: 1633063 - DNA, 25 bp, Homo sapien
gcctgcgggatcctctgggaaatgt

SEQ ID NO: 1633064 - DNA, 25 bp, Homo sapien
aaaatctcgcgagacgtggcgtcgg

SEQ ID NO: 1633065 - DNA, 25 bp, Homo sapien
tcctctccaacgaggatcgcagagc

SEQ ID NO: 1633066 - DNA, 25 bp, Homo sapien
tgcgggcttccctatgcctctcatt

SEQ ID NO: 1633067 - DNA, 25 bp, Homo sapien
tacaggaccttgtgtgatcagctag

SEQ ID NO: 1633068 - DNA, 25 bp, Homo sapien
tctaacaactggatagatacctggg

SEQ ID NO: 1633069 - DNA, 25 bp, Homo sapien
catacggcttcaggaaatggtctgt

SEQ ID NO: 1633070 - DNA, 25 bp, Homo sapien
taaaccatgggtagatggtacaccc

SEQ ID NO: 1633071 - DNA, 25 bp, Homo sapien
ctgaattactgtgcaaacacccgcc

SEQ ID NO: 1633072 - DNA, 25 bp, Homo sapien
tgaattactgtgcaaacacccgcca

SEQ ID NO: 1633073 - DNA, 25 bp, Homo sapien
cgccactcaaatccgggtggttact

SEQ ID NO: 1633074 - DNA, 25 bp, Homo sapien
aacacccgccactcaaatccgggtg

SEQ ID NO: 1633075 - DNA, 25 bp, Homo sapien
ccagctccacttcacggatgggaaa

SEQ ID NO: 1633076 - DNA, 25 bp, Homo sapien
aggcccagctccacttcacggatgg

SEQ ID NO: 1633077 - DNA, 25 bp, Homo sapien
tgggaaaactgaggtacgaggcctc

SEQ ID NO: 1633078 - DNA, 25 bp, Homo sapien
agctccacttcacggatgggaaaac

SEQ ID NO: 1633079 - DNA, 25 bp, Homo sapien
ccagagagcgttgggagcgtgcgta

SEQ ID NO: 1633080 - DNA, 25 bp, Homo sapien
cagccagataccgttgggagcgcag

SEQ ID NO: 1633081 - DNA, 25 bp, Homo sapien
ataccgttgggagcgcagccagaga

SEQ ID NO: 1633082 - DNA, 25 bp, Homo sapien
ccgtgatttgcagccagataccgtt

SEQ ID NO: 1633083 - DNA, 25 bp, Homo sapien
tcgctgcgcctgctcgctgaaggag

SEQ ID NO: 1633084 - DNA, 25 bp, Homo sapien
gcgcctgctcgctgaaggagtcacc

SEQ ID NO: 1633085 - DNA, 25 bp, Homo sapien
ggcctttctcgtcgctgcgcctgct

SEQ ID NO: 1633086 - DNA, 25 bp, Homo sapien
gctgcgcctgctcgctgaaggagtc

SEQ ID NO: 1633087 - DNA, 25 bp, Homo sapien
agaaccaggaatacgagagccaggc

SEQ ID NO: 1633088 - DNA, 25 bp, Homo sapien
accaggaatacgagagccaggcggc

SEQ ID NO: 1633089 - DNA, 25 bp, Homo sapien
ccgacgagactaacggctgcggcgc

SEQ ID NO: 1633090 - DNA, 25 bp, Homo sapien
ccgccgagaaccaggaatacgagag

SEQ ID NO: 1633091 - DNA, 25 bp, Homo sapien
taggcacatactctcctctgtacat

SEQ ID NO: 1633092 - DNA, 25 bp, Homo sapien
tgtgtatcctacctgttcccgacct

SEQ ID NO: 1633093 - DNA, 25 bp, Homo sapien
taatttattgttatgagatccgtgc

SEQ ID NO: 1633094 - DNA, 25 bp, Homo sapien
tatttcgatttaaatcttccaccta

SEQ ID NO: 1633095 - DNA, 25 bp, Homo sapien
aaatattctgcttctcgactttatc

SEQ ID NO: 1633096 - DNA, 25 bp, Homo sapien
tgtttcttttttcgatgatccacaa

SEQ ID NO: 1633097 - DNA, 25 bp, Homo sapien
ttcgatgatccacaaatcttgatgg

SEQ ID NO: 1633098 - DNA, 25 bp, Homo sapien
tctcgactttatcaggatgtttctt

SEQ ID NO: 1633099 - DNA, 25 bp, Homo sapien
actattattattcgatcagacttta

SEQ ID NO: 1633100 - DNA, 25 bp, Homo sapien
tctgcaaccggttagacggagaagc

SEQ ID NO: 1633101 - DNA, 25 bp, Homo sapien
tcgttttcgcattccatccctgata

SEQ ID NO: 1633102 - DNA, 25 bp, Homo sapien
aagtgttaatggaaactgttctggt

SEQ ID NO: 1633103 - DNA, 25 bp, Homo sapien
tggctaatctggagcaaacctgcat

SEQ ID NO: 1633104 - DNA, 25 bp, Homo sapien
tagggtgactgagagcgtctcttcc

SEQ ID NO: 1633105 - DNA, 25 bp, Homo sapien
tggaaacggactgttcgcctagtaa

SEQ ID NO: 1633106 - DNA, 25 bp, Homo sapien
ggaaggtcggccacaagcacttctt

SEQ ID NO: 1633107 - DNA, 25 bp, Homo sapien
atcggccatcgctacggcgggaact

SEQ ID NO: 1633108 - DNA, 25 bp, Homo sapien
ccggacatggtacgccgaagggtca

SEQ ID NO: 1633109 - DNA, 25 bp, Homo sapien
tacacagtggcgagtgtgattccgc

SEQ ID NO: 1633110 - DNA, 25 bp, Homo sapien
ggtcatcggcgtggagtcctcgctt

SEQ ID NO: 1633111 - DNA, 25 bp, Homo sapien
tgagcacgagtgattctgttaccct

SEQ ID NO: 1633112 - DNA, 25 bp, Homo sapien
caaatacttgagcacgagtgattct

SEQ ID NO: 1633113 - DNA, 25 bp, Homo sapien
taggggtggaatcataggttattgc

SEQ ID NO: 1633114 - DNA, 25 bp, Homo sapien
aaccaaagttgccaaatctaaagca

SEQ ID NO: 1633115 - DNA, 25 bp, Homo sapien
gatgcactggcaccaatgcccccat

SEQ ID NO: 1633116 - DNA, 25 bp, Homo sapien
caccaatgcccccattttggtgtgc

SEQ ID NO: 1633117 - DNA, 25 bp, Homo sapien
actggcaccaatgcccccattttgg

SEQ ID NO: 1633118 - DNA, 25 bp, Homo sapien
accaatgcccccattttggtgtgcc

SEQ ID NO: 1633119 - DNA, 25 bp, Homo sapien
tgctgtacttggaatggactggtcc

SEQ ID NO: 1633120 - DNA, 25 bp, Homo sapien
tggagcgtccatctgtgccacgttt

SEQ ID NO: 1633121 - DNA, 25 bp, Homo sapien
tgggaggtcatgaaccaggacccta

SEQ ID NO: 1633122 - DNA, 25 bp, Homo sapien
ttttggcaaccatgcgtggagcgtc

SEQ ID NO: 1633123 - DNA, 25 bp, Homo sapien
tgagtgctctcaagagttttgtctt

SEQ ID NO: 1633124 - DNA, 25 bp, Homo sapien
atcttttgttattatccctatggcc

SEQ ID NO: 1633125 - DNA, 25 bp, Homo sapien
gatattctagacatggatttcattg

SEQ ID NO: 1633126 - DNA, 25 bp, Homo sapien
taattctctgaaatttggatttgat

SEQ ID NO: 1633127 - DNA, 25 bp, Homo sapien
gaggtaagaatccatatggctatcc

SEQ ID NO: 1633128 - DNA, 25 bp, Homo sapien
tttgaggccctacaacattataggc

SEQ ID NO: 1633129 - DNA, 25 bp, Homo sapien
cttataatatagtagaggcactgac

SEQ ID NO: 1633130 - DNA, 25 bp, Homo sapien
taaaagtcctcctctcataaaatgg

SEQ ID NO: 1633131 - DNA, 25 bp, Homo sapien
ctttatgcaacatctctgatgagaa

SEQ ID NO: 1633132 - DNA, 25 bp, Homo sapien
ttctttatgcaacatctctgatgag

SEQ ID NO: 1633133 - DNA, 25 bp, Homo sapien
ttatgcaacatctctgatgagaatg

SEQ ID NO: 1633134 - DNA, 25 bp, Homo sapien
tatgcaacatctctgatgagaatgt

SEQ ID NO: 1633135 - DNA, 25 bp, Homo sapien
cctgatattctgcaattgataactg

SEQ ID NO: 1633136 - DNA, 25 bp, Homo sapien
ctgctggatgtgtgctctgttaaaa

SEQ ID NO: 1633137 - DNA, 25 bp, Homo sapien
aattaatgagtcatgaataaagccc

SEQ ID NO: 1633138 - DNA, 25 bp, Homo sapien
tgattgcatgatgaattctctgctg

SEQ ID NO: 1633139 - DNA, 25 bp, Homo sapien
tatgaatggtgactaaagatgtggc

SEQ ID NO: 1633140 - DNA, 25 bp, Homo sapien
gtttgactcatgactaaaggtgttc

SEQ ID NO: 1633141 - DNA, 25 bp, Homo sapien
tatgtcgtgtaagctgtgaacccca

SEQ ID NO: 1633142 - DNA, 25 bp, Homo sapien
tctggtgttgagcaaagtttgactc

SEQ ID NO: 1633143 - DNA, 25 bp, Homo sapien
tcgagtaagttgtgaaccccagaga

SEQ ID NO: 1633144 - DNA, 25 bp, Homo sapien
gtcgagtaagttgtgaaccccagag

SEQ ID NO: 1633145 - DNA, 25 bp, Homo sapien
cgagtaagttgtgaaccccagagaa

SEQ ID NO: 1633146 - DNA, 25 bp, Homo sapien
tgagccatgaagaaaggtctttcca

SEQ ID NO: 1633147 - DNA, 25 bp, Homo sapien
gttgagcaagatacgaagcccaagt

SEQ ID NO: 1633148 - DNA, 25 bp, Homo sapien
ggtgtgagctccaaatataggcttt

SEQ ID NO: 1633149 - DNA, 25 bp, Homo sapien
tctgatgtcgattaaactctgagcc

SEQ ID NO: 1633150 - DNA, 25 bp, Homo sapien
ataagatgtgatcgctgactaaagg

SEQ ID NO: 1633151 - DNA, 25 bp, Homo sapien
ttatgaccagtaagactcgaacgta

SEQ ID NO: 1633152 - DNA, 25 bp, Homo sapien
tataaggtttcctaccaacatgaac

SEQ ID NO: 1633153 - DNA, 25 bp, Homo sapien
taggtgtgatccacgagtaaaagct

SEQ ID NO: 1633154 - DNA, 25 bp, Homo sapien
actgtatgctggttaaaagtgggcc

SEQ ID NO: 1633155 - DNA, 25 bp, Homo sapien
caggtgcgtatcacctgcttgaagc

SEQ ID NO: 1633156 - DNA, 25 bp, Homo sapien
aagtgggccttttttcacaggtgcg

SEQ ID NO: 1633157 - DNA, 25 bp, Homo sapien
tctaaaacataaacagtcaaggctg

SEQ ID NO: 1633158 - DNA, 25 bp, Homo sapien
tgggcaaggtcctcttgtctcatcc

SEQ ID NO: 1633159 - DNA, 25 bp, Homo sapien
ctttctccaataaagagaacgcttc

SEQ ID NO: 1633160 - DNA, 25 bp, Homo sapien
aagagaacgcttctggctgataaat

SEQ ID NO: 1633161 - DNA, 25 bp, Homo sapien
ttgtctcatccctcaaaatcttcca

SEQ ID NO: 1633162 - DNA, 25 bp, Homo sapien
aaatccctctgttccaggtccaggc

SEQ ID NO: 1633163 - DNA, 25 bp, Homo sapien
aatccctctgttccaggtccaggca

SEQ ID NO: 1633164 - DNA, 25 bp, Homo sapien
tccctctgttccaggtccaggcact

SEQ ID NO: 1633165 - DNA, 25 bp, Homo sapien
ctctgttccaggtccaggcactccc

SEQ ID NO: 1633166 - DNA, 25 bp, Homo sapien
ttctttcttggtgaggcagcgtgct

SEQ ID NO: 1633167 - DNA, 25 bp, Homo sapien
agtccaccagtccttctctggattc

SEQ ID NO: 1633168 - DNA, 25 bp, Homo sapien
gaggaaacaacatgcgccaatcaag

SEQ ID NO: 1633169 - DNA, 25 bp, Homo sapien
taaagcctgtagtatgaattggtcc

SEQ ID NO: 1633170 - DNA, 25 bp, Homo sapien
gacagtggcagatggagacgtataa

SEQ ID NO: 1633171 - DNA, 25 bp, Homo sapien
gcagggatcctgttatgaaaagccc

SEQ ID NO: 1633172 - DNA, 25 bp, Homo sapien
cattcacgaaggactatgcctgtca

SEQ ID NO: 1633173 - DNA, 25 bp, Homo sapien
gcggctgctatcaccacctttacga

SEQ ID NO: 1633174 - DNA, 25 bp, Homo sapien
caacgcgacgcagtcataatcacgt

SEQ ID NO: 1633175 - DNA, 25 bp, Homo sapien
ttacgaacgtggtcacgcacaacgc

SEQ ID NO: 1633176 - DNA, 25 bp, Homo sapien
ccagctcctgcatcaatttcactct

SEQ ID NO: 1633177 - DNA, 25 bp, Homo sapien
ctgtcaacgtcgtgtgcgcgtgcgc

SEQ ID NO: 1633178 - DNA, 25 bp, Homo sapien
cagcgcctgtcaacgtcgtgtgcgc

SEQ ID NO: 1633179 - DNA, 25 bp, Homo sapien
cattagggtcacacacagcgcctgt

SEQ ID NO: 1633180 - DNA, 25 bp, Homo sapien
ttgatggtggaaggttccgcgatct

SEQ ID NO: 1633181 - DNA, 25 bp, Homo sapien
ccttgatggtggaaggttccgcgat

SEQ ID NO: 1633182 - DNA, 25 bp, Homo sapien
gaaggttccgcgatctttctattaa

SEQ ID NO: 1633183 - DNA, 25 bp, Homo sapien
tggtggaaggttccgcgatctttct

SEQ ID NO: 1633184 - DNA, 25 bp, Homo sapien
tctgctgccgagagcttccagaatt

SEQ ID NO: 1633185 - DNA, 25 bp, Homo sapien
cgctcacatctgctgccgagagctt

SEQ ID NO: 1633186 - DNA, 25 bp, Homo sapien
ccagaattccaggccgcgtttagga

SEQ ID NO: 1633187 - DNA, 25 bp, Homo sapien
caggccgcgtttaggaagcttcagc

SEQ ID NO: 1633188 - DNA, 25 bp, Homo sapien
gaacaggacagtaagcccaggccat

SEQ ID NO: 1633189 - DNA, 25 bp, Homo sapien
gtctcacacacactcgagccttcct

SEQ ID NO: 1633190 - DNA, 25 bp, Homo sapien
accagcacaagcaggcccaccgcgg

SEQ ID NO: 1633191 - DNA, 25 bp, Homo sapien
cgcggtctcacacacactcgagcct

SEQ ID NO: 1633192 - DNA, 25 bp, Homo sapien
acaagcaggcccaccgcggtctcac

SEQ ID NO: 1633193 - DNA, 25 bp, Homo sapien
ttccgactccccatgctggttcggt

SEQ ID NO: 1633194 - DNA, 25 bp, Homo sapien
gatcgcggatttgtccccttccgac

SEQ ID NO: 1633195 - DNA, 25 bp, Homo sapien
actgggatcgcggatttgtcccctt

SEQ ID NO: 1633196 - DNA, 25 bp, Homo sapien
atgcatgactgggatcgcggatttg

SEQ ID NO: 1633197 - DNA, 25 bp, Homo sapien
ctttgtgagatagctagggtcgact

SEQ ID NO: 1633198 - DNA, 25 bp, Homo sapien
gaccgcggttgtgactgtatgtccc

SEQ ID NO: 1633199 - DNA, 25 bp, Homo sapien
gaccctatccgaacaggcgtaagtg

SEQ ID NO: 1633200 - DNA, 25 bp, Homo sapien
tctgtgcgaccgtgtatggaactgt

SEQ ID NO: 1633201 - DNA, 25 bp, Homo sapien
catttgccgaactgtgtgtagtatg

SEQ ID NO: 1633202 - DNA, 25 bp, Homo sapien
tgtgcgcgcgcgttggtgatattgt

SEQ ID NO: 1633203 - DNA, 25 bp, Homo sapien
tattgttgatggagggtgcgtgtga

SEQ ID NO: 1633204 - DNA, 25 bp, Homo sapien
gtgtagtatgccttaattttgaggt

SEQ ID NO: 1633205 - DNA, 25 bp, Homo sapien
taatcaagcaaagcagtgagaatgg

SEQ ID NO: 1633206 - DNA, 25 bp, Homo sapien
taagactaatcaagcaaagcagtga

SEQ ID NO: 1633207 - DNA, 25 bp, Homo sapien
aagactaatcaagcaaagcagtgag

SEQ ID NO: 1633208 - DNA, 25 bp, Homo sapien
gactaatcaagcaaagcagtgagaa

SEQ ID NO: 1633209 - DNA, 25 bp, Homo sapien
cactcagggccttagatagtatctt

SEQ ID NO: 1633210 - DNA, 25 bp, Homo sapien
tctgggtgctaagggtgcaaaactg

SEQ ID NO: 1633211 - DNA, 25 bp, Homo sapien
caggctaaatatcactctgggtgct

SEQ ID NO: 1633212 - DNA, 25 bp, Homo sapien
taagagcgagttcattttgagcaga

SEQ ID NO: 1633213 - DNA, 25 bp, Homo sapien
gcattgagtgttcaagtttcagagg

SEQ ID NO: 1633214 - DNA, 25 bp, Homo sapien
gaagacatgcccactttcagtatcc

SEQ ID NO: 1633215 - DNA, 25 bp, Homo sapien
tatcagtccttgttcgacatcagcg

SEQ ID NO: 1633216 - DNA, 25 bp, Homo sapien
tgggaatgtaaaaaccagtttgaga

SEQ ID NO: 1633217 - DNA, 25 bp, Homo sapien
gcaaaacagctttccctcatcataa

SEQ ID NO: 1633218 - DNA, 25 bp, Homo sapien
taccaatcatagataatcactgtca

SEQ ID NO: 1633219 - DNA, 25 bp, Homo sapien
tatgctatactataaccagccctta

SEQ ID NO: 1633220 - DNA, 25 bp, Homo sapien
tatgtctcatcctgtttatggtcaa

SEQ ID NO: 1633221 - DNA, 25 bp, Homo sapien
gaaggaaccaaaacgatcagcaccc

SEQ ID NO: 1633222 - DNA, 25 bp, Homo sapien
aaggactgccagctgttaacagagg

SEQ ID NO: 1633223 - DNA, 25 bp, Homo sapien
cagagatacacagcgagaatgcaat

SEQ ID NO: 1633224 - DNA, 25 bp, Homo sapien
gaacagatcctcagagtcctcagaa

SEQ ID NO: 1633225 - DNA, 25 bp, Homo sapien
cagtatgaattccctcatggcgaat

SEQ ID NO: 1633226 - DNA, 25 bp, Homo sapien
atgaattccctcatggcgaatgagg

SEQ ID NO: 1633227 - DNA, 25 bp, Homo sapien
gaattccctcatggcgaatgaggtc

SEQ ID NO: 1633228 - DNA, 25 bp, Homo sapien
ttccctcatggcgaatgaggtcaga

SEQ ID NO: 1633229 - DNA, 25 bp, Homo sapien
gatgctgaataagccttgagtgttg

SEQ ID NO: 1633230 - DNA, 25 bp, Homo sapien
aagtgttgaggcactattaaaggcc

SEQ ID NO: 1633231 - DNA, 25 bp, Homo sapien
aagttctgagctctgaataaaggcc

SEQ ID NO: 1633232 - DNA, 25 bp, Homo sapien
atatgaactacaactaaaagccttg

SEQ ID NO: 1633233 - DNA, 25 bp, Homo sapien
tggataaattgtgagttttgattaa

SEQ ID NO: 1633234 - DNA, 25 bp, Homo sapien
ttggataaattgtgagttttgatta

SEQ ID NO: 1633235 - DNA, 25 bp, Homo sapien
ggataaattgtgagttttgattaaa

SEQ ID NO: 1633236 - DNA, 25 bp, Homo sapien
gataaattgtgagttttgattaaag

SEQ ID NO: 1633237 - DNA, 25 bp, Homo sapien
tttttgaggtggaataagaaatgtg

SEQ ID NO: 1633238 - DNA, 25 bp, Homo sapien
ttttgaggtggaataagaaatgtgg

SEQ ID NO: 1633239 - DNA, 25 bp, Homo sapien
tttgaggtggaataagaaatgtggg

SEQ ID NO: 1633240 - DNA, 25 bp, Homo sapien
tattacttgactgaaatgtctcttc

SEQ ID NO: 1633241 - DNA, 25 bp, Homo sapien
gacatgtcttcacgggtaattatta

SEQ ID NO: 1633242 - DNA, 25 bp, Homo sapien
aaagtagacatgtcttcacgggtaa

SEQ ID NO: 1633243 - DNA, 25 bp, Homo sapien
cacgggtaattattacttgactgaa

SEQ ID NO: 1633244 - DNA, 25 bp, Homo sapien
ttgtggagctccgactgcaaggcca

SEQ ID NO: 1633245 - DNA, 25 bp, Homo sapien
ctccgactgcaaggccatcagcatg

SEQ ID NO: 1633246 - DNA, 25 bp, Homo sapien
tacagcttgtggagctccgactgca

SEQ ID NO: 1633247 - DNA, 25 bp, Homo sapien
gtcgtacagcttgtggagctccgac

SEQ ID NO: 1633248 - DNA, 25 bp, Homo sapien
agtagtttgaatgtgctagccttaa

SEQ ID NO: 1633249 - DNA, 25 bp, Homo sapien
ccacaaggtggtgacctgagaatac

SEQ ID NO: 1633250 - DNA, 25 bp, Homo sapien
ccatccacaaggtggtgacctgaga

SEQ ID NO: 1633251 - DNA, 25 bp, Homo sapien
ccatcagtatgcacaagcgcatcca

SEQ ID NO: 1633252 - DNA, 25 bp, Homo sapien
tgtagccagggaggtacttgctata

SEQ ID NO: 1633253 - DNA, 25 bp, Homo sapien
agcataattgtagccagggaggtac

SEQ ID NO: 1633254 - DNA, 25 bp, Homo sapien
ccagggaggtacttgctatattgga

SEQ ID NO: 1633255 - DNA, 25 bp, Homo sapien
aattatagcataattgtagccaggg

SEQ ID NO: 1633256 - DNA, 25 bp, Homo sapien
tagtcagctctctatcaaccatcca

SEQ ID NO: 1633257 - DNA, 25 bp, Homo sapien
aggcctctagtcagctctctatcaa

SEQ ID NO: 1633258 - DNA, 25 bp, Homo sapien
ctctagtcagctctctatcaaccat

SEQ ID NO: 1633259 - DNA, 25 bp, Homo sapien
agtcagctctctatcaaccatccag

SEQ ID NO: 1633260 - DNA, 25 bp, Homo sapien
ttccaagggcacactctgaattttg

SEQ ID NO: 1633261 - DNA, 25 bp, Homo sapien
ccaagggcacactctgaattttggg

SEQ ID NO: 1633262 - DNA, 25 bp, Homo sapien
agacacttccaagggcacactctga

SEQ ID NO: 1633263 - DNA, 25 bp, Homo sapien
cacttccaagggcacactctgaatt

SEQ ID NO: 1633264 - DNA, 25 bp, Homo sapien
acttctttgtataaattcatctgat

SEQ ID NO: 1633265 - DNA, 25 bp, Homo sapien
tggaaacatccctgaacatcaccgg

SEQ ID NO: 1633266 - DNA, 25 bp, Homo sapien
gaaaccaggttgctgaaattctcca

SEQ ID NO: 1633267 - DNA, 25 bp, Homo sapien
catctgatcagcgtccaggcattcc

SEQ ID NO: 1633268 - DNA, 25 bp, Homo sapien
gaagttcatcatgcattctttcctc

SEQ ID NO: 1633269 - DNA, 25 bp, Homo sapien
agaagttcatcatgcattctttcct

SEQ ID NO: 1633270 - DNA, 25 bp, Homo sapien
tagaagttcatcatgcattctttcc

SEQ ID NO: 1633271 - DNA, 25 bp, Homo sapien
gaatggggcattctgtccaattcca

SEQ ID NO: 1633272 - DNA, 25 bp, Homo sapien
cattctgtccaattccagtggctca

SEQ ID NO: 1633273 - DNA, 25 bp, Homo sapien
tggaatctgaccagacctcagagag

SEQ ID NO: 1633274 - DNA, 25 bp, Homo sapien
gggttggaatctgaccagacctcag

SEQ ID NO: 1633275 - DNA, 25 bp, Homo sapien
tcggcctcccaaacacaacctccac

SEQ ID NO: 1633276 - DNA, 25 bp, Homo sapien
ctcggcctcccaaacacaacctcca

SEQ ID NO: 1633277 - DNA, 25 bp, Homo sapien
cgctccgcccgcaggggcccaaggc

SEQ ID NO: 1633278 - DNA, 25 bp, Homo sapien
ctttcaggccgctccgcccgcaggg

SEQ ID NO: 1633279 - DNA, 25 bp, Homo sapien
caggggcccaaggcgccagctcccc

SEQ ID NO: 1633280 - DNA, 25 bp, Homo sapien
cgcaggggcccaaggcgccagctcc

SEQ ID NO: 1633281 - DNA, 25 bp, Homo sapien
tctcctggggaccaaaatatctcac

SEQ ID NO: 1633282 - DNA, 25 bp, Homo sapien
taagccctttccagtcatcccggat

SEQ ID NO: 1633283 - DNA, 25 bp, Homo sapien
tgggaacttgcagacctgagccagt

SEQ ID NO: 1633284 - DNA, 25 bp, Homo sapien
ggaccaaaatatctcacctcccaga

SEQ ID NO: 1633285 - DNA, 25 bp, Homo sapien
atccgtttatcttgtttgactgtta

SEQ ID NO: 1633286 - DNA, 25 bp, Homo sapien
tattttaataggtgagtatagttca

SEQ ID NO: 1633287 - DNA, 25 bp, Homo sapien
ttttaataggtgagtatagttcagt

SEQ ID NO: 1633288 - DNA, 25 bp, Homo sapien
taataggtgagtatagttcagtggc

SEQ ID NO: 1633289 - DNA, 25 bp, Homo sapien
gcagtaatgcgagggaacatccttg

SEQ ID NO: 1633290 - DNA, 25 bp, Homo sapien
tccctaccttttgagcgcctagatt

SEQ ID NO: 1633291 - DNA, 25 bp, Homo sapien
gcattaggtaggacttctagtacaa

SEQ ID NO: 1633292 - DNA, 25 bp, Homo sapien
tgccttgtgcttgtttatccctacc

SEQ ID NO: 1633293 - DNA, 25 bp, Homo sapien
gatgctcaactattttatgaaaaat

SEQ ID NO: 1633294 - DNA, 25 bp, Homo sapien
cctttcaactgatgatatcttagat

SEQ ID NO: 1633295 - DNA, 25 bp, Homo sapien
gcacattttagcaacttgatgatgc

SEQ ID NO: 1633296 - DNA, 25 bp, Homo sapien
taatgtgaaattagcacattttagc

SEQ ID NO: 1633297 - DNA, 25 bp, Homo sapien
atgcctcagccttctgagtagctgg

SEQ ID NO: 1633298 - DNA, 25 bp, Homo sapien
ctggagtatgtgatgcaatcttggc

SEQ ID NO: 1633299 - DNA, 25 bp, Homo sapien
cactgaaacctctgcctcccaggct

SEQ ID NO: 1633300 - DNA, 25 bp, Homo sapien
aggctcaagcgattctcatgcctca

SEQ ID NO: 1633301 - DNA, 25 bp, Homo sapien
gatacaggcctgtttggattgtctg

SEQ ID NO: 1633302 - DNA, 25 bp, Homo sapien
tcttatatgtttgggagcattaatc

SEQ ID NO: 1633303 - DNA, 25 bp, Homo sapien
attaatcagtaaacccatctgggcc

SEQ ID NO: 1633304 - DNA, 25 bp, Homo sapien
ggattgtctgtttattcttggtgag

SEQ ID NO: 1633305 - DNA, 25 bp, Homo sapien
gcgctggagcggtctgggaatgtta

SEQ ID NO: 1633306 - DNA, 25 bp, Homo sapien
tgggtgtggtgtgaggctggcgctg

SEQ ID NO: 1633307 - DNA, 25 bp, Homo sapien
agagggcagtgtcgggccgcgcgca

SEQ ID NO: 1633308 - DNA, 25 bp, Homo sapien
aatgttaggaggtctagggtatcgc

SEQ ID NO: 1633309 - DNA, 25 bp, Homo sapien
cccagcgacaggtgcttggcgatct

SEQ ID NO: 1633310 - DNA, 25 bp, Homo sapien
gcgtgtgccgggtcatcgaccccat

SEQ ID NO: 1633311 - DNA, 25 bp, Homo sapien
tgggagtcctgtctgcacggtattc

SEQ ID NO: 1633312 - DNA, 25 bp, Homo sapien
agttctccccggacctggattgtgg

SEQ ID NO: 1633313 - DNA, 25 bp, Homo sapien
ctccccaacatccagtgaagtgccc

SEQ ID NO: 1633314 - DNA, 25 bp, Homo sapien
ggtctccccaacatccagtgaagtg

SEQ ID NO: 1633315 - DNA, 25 bp, Homo sapien
tctggtctccccaacatccagtgaa

SEQ ID NO: 1633316 - DNA, 25 bp, Homo sapien
catccagtgaagtgcccaatttcat

SEQ ID NO: 1633317 - DNA, 25 bp, Homo sapien
cgttgtgagtctggatctttctcca

SEQ ID NO: 1633318 - DNA, 25 bp, Homo sapien
cgtgtgacatcgttgtgagtctgga

SEQ ID NO: 1633319 - DNA, 25 bp, Homo sapien
ctcgtgtgacatcgttgtgagtctg

SEQ ID NO: 1633320 - DNA, 25 bp, Homo sapien
tgacatcgttgtgagtctggatctt

SEQ ID NO: 1633321 - DNA, 25 bp, Homo sapien
aaagaatggtttgtctcttgtgaag

SEQ ID NO: 1633322 - DNA, 25 bp, Homo sapien
aaaagaatggtttgtctcttgtgaa

SEQ ID NO: 1633323 - DNA, 25 bp, Homo sapien
caaaagaatggtttgtctcttgtga

SEQ ID NO: 1633324 - DNA, 25 bp, Homo sapien
ctaaaggcctcgacgacgtgaggag

SEQ ID NO: 1633325 - DNA, 25 bp, Homo sapien
ggagaggcgtcggtcctggaggaac

SEQ ID NO: 1633326 - DNA, 25 bp, Homo sapien
cctcgacgacgtgaggagaggcgtc

SEQ ID NO: 1633327 - DNA, 25 bp, Homo sapien
agaggcgtcggtcctggaggaactg

SEQ ID NO: 1633328 - DNA, 25 bp, Homo sapien
tcctccagcaggtgtagcaaaatgt

SEQ ID NO: 1633329 - DNA, 25 bp, Homo sapien
ggactcgcccctgttcctgtttgca

SEQ ID NO: 1633330 - DNA, 25 bp, Homo sapien
gccacgtgtggtcgcattggctcca

SEQ ID NO: 1633331 - DNA, 25 bp, Homo sapien
tgtggcttggattcacgcacaggcc

SEQ ID NO: 1633332 - DNA, 25 bp, Homo sapien
ctgatgtgctttaaggcctgagttg

SEQ ID NO: 1633333 - DNA, 25 bp, Homo sapien
aattgcccaaacacactaaaggcct

SEQ ID NO: 1633334 - DNA, 25 bp, Homo sapien
cactatgagtactctgatattgagc

SEQ ID NO: 1633335 - DNA, 25 bp, Homo sapien
gatgtgctttaaggcctgagttgag

SEQ ID NO: 1633336 - DNA, 25 bp, Homo sapien
gccttgtcacattccaaacatttat

SEQ ID NO: 1633337 - DNA, 25 bp, Homo sapien
ccatacacactaaaggccttgtcac

SEQ ID NO: 1633338 - DNA, 25 bp, Homo sapien
ttgtcacattccaaacatttatagg

SEQ ID NO: 1633339 - DNA, 25 bp, Homo sapien
tcatccatacacactaaaggccttg

SEQ ID NO: 1633340 - DNA, 25 bp, Homo sapien
gatgtacagaaagttggcggctagt

SEQ ID NO: 1633341 - DNA, 25 bp, Homo sapien
gcggctagtcctaaaagcttcccca

SEQ ID NO: 1633342 - DNA, 25 bp, Homo sapien
cagaatgaaatctatgatgtacaga

SEQ ID NO: 1633343 - DNA, 25 bp, Homo sapien
ttcataggttttctcagcatcatct

SEQ ID NO: 1633344 - DNA, 25 bp, Homo sapien
tgtatatgaggctgaagggtgtttt

SEQ ID NO: 1633345 - DNA, 25 bp, Homo sapien
aacatgtatatgaggctgaagggtg

SEQ ID NO: 1633346 - DNA, 25 bp, Homo sapien
ttgaacatgtatatgaggctgaagg

SEQ ID NO: 1633347 - DNA, 25 bp, Homo sapien
tatatgaggctgaagggtgttttcc

SEQ ID NO: 1633348 - DNA, 25 bp, Homo sapien
ttatcgatgcagcaaccttttacat

SEQ ID NO: 1633349 - DNA, 25 bp, Homo sapien
aattgattatcgatgcagcaacctt

SEQ ID NO: 1633350 - DNA, 25 bp, Homo sapien
cagaaattgattatcgatgcagcaa

SEQ ID NO: 1633351 - DNA, 25 bp, Homo sapien
gattatcgatgcagcaaccttttac

SEQ ID NO: 1633352 - DNA, 25 bp, Homo sapien
cacaaatgacttaaggaattcctca

SEQ ID NO: 1633353 - DNA, 25 bp, Homo sapien
gagagtggactcctattggtggcca

SEQ ID NO: 1633354 - DNA, 25 bp, Homo sapien
tgtgaaattttgcatggctacatgc

SEQ ID NO: 1633355 - DNA, 25 bp, Homo sapien
gcattacttagaagcatcagtagga

SEQ ID NO: 1633356 - DNA, 25 bp, Homo sapien
actaagatataccagccaggcttct

SEQ ID NO: 1633357 - DNA, 25 bp, Homo sapien
tgagcgccccttacttacacatata

SEQ ID NO: 1633358 - DNA, 25 bp, Homo sapien
tgcggcctttaacaggttcctatca

SEQ ID NO: 1633359 - DNA, 25 bp, Homo sapien
tactggtaatactccttgatgaaag

SEQ ID NO: 1633360 - DNA, 25 bp, Homo sapien
tcattgtgctcaagctacagtgcag

SEQ ID NO: 1633361 - DNA, 25 bp, Homo sapien
taggcctaagtaactgcaccggcat

SEQ ID NO: 1633362 - DNA, 25 bp, Homo sapien
ggcatgtatgcctagcttgctcagc

SEQ ID NO: 1633363 - DNA, 25 bp, Homo sapien
tacagtgcagtgctttaggcctaag

SEQ ID NO: 1633364 - DNA, 25 bp, Homo sapien
gcacagggaacaaattgaccaatat

SEQ ID NO: 1633365 - DNA, 25 bp, Homo sapien
tgcatattctgggacaactggtata

SEQ ID NO: 1633366 - DNA, 25 bp, Homo sapien
tacagcatggaaatagcacagggaa

SEQ ID NO: 1633367 - DNA, 25 bp, Homo sapien
taatgaattcccaacatatgtgaca

SEQ ID NO: 1633368 - DNA, 25 bp, Homo sapien
acaacatagttttggagtaagtagc

SEQ ID NO: 1633369 - DNA, 25 bp, Homo sapien
gatgtctaggagtcttcaaagttag

SEQ ID NO: 1633370 - DNA, 25 bp, Homo sapien
cagcctctgcatgtccatcagtaaa

SEQ ID NO: 1633371 - DNA, 25 bp, Homo sapien
tagctacactacttaatctcaggaa

SEQ ID NO: 1633372 - DNA, 25 bp, Homo sapien
caaaattattggcatagaattgtat

SEQ ID NO: 1633373 - DNA, 25 bp, Homo sapien
aaggaatttgtctatattgttgaaa

SEQ ID NO: 1633374 - DNA, 25 bp, Homo sapien
tattggcatagaattgtattatctt

SEQ ID NO: 1633375 - DNA, 25 bp, Homo sapien
cttgataggggtttgtaaactgtat

SEQ ID NO: 1633376 - DNA, 25 bp, Homo sapien
ttctggaggctgtacgagcatagca

SEQ ID NO: 1633377 - DNA, 25 bp, Homo sapien
tacgagcatagcactagtgtctgct

SEQ ID NO: 1633378 - DNA, 25 bp, Homo sapien
ggctgtacgagcatagcactagtgt

SEQ ID NO: 1633379 - DNA, 25 bp, Homo sapien
gaggtccaggaagcttttagtcatg

SEQ ID NO: 1633380 - DNA, 25 bp, Homo sapien
tgtgcacgtgtacaaacatctcggt

SEQ ID NO: 1633381 - DNA, 25 bp, Homo sapien
caaaagtctctgtgtcgtaaacaag

SEQ ID NO: 1633382 - DNA, 25 bp, Homo sapien
taaagagcagtattaccactagcat

SEQ ID NO: 1633383 - DNA, 25 bp, Homo sapien
tatttctgcatagacacggtaacag

SEQ ID NO: 1633384 - DNA, 25 bp, Homo sapien
ttcccttgctctcactagcagaata

SEQ ID NO: 1633385 - DNA, 25 bp, Homo sapien
cacacgccttcccttgctctcacta

SEQ ID NO: 1633386 - DNA, 25 bp, Homo sapien
gccttcccttgctctcactagcaga

SEQ ID NO: 1633387 - DNA, 25 bp, Homo sapien
acgccttcccttgctctcactagca

SEQ ID NO: 1633388 - DNA, 25 bp, Homo sapien
atgatctcctgtttctatagcttga

SEQ ID NO: 1633389 - DNA, 25 bp, Homo sapien
ttatgatctcctgtttctatagctt

SEQ ID NO: 1633390 - DNA, 25 bp, Homo sapien
agcatataagggcgctttatacaac

SEQ ID NO: 1633391 - DNA, 25 bp, Homo sapien
actagcatataagggcgctttatac

SEQ ID NO: 1633392 - DNA, 25 bp, Homo sapien
ttttatcttgtgagttgatggtgct

SEQ ID NO: 1633393 - DNA, 25 bp, Homo sapien
tatcttgtgagttgatggtgcttga

SEQ ID NO: 1633394 - DNA, 25 bp, Homo sapien
agtgtttctgtctccgtggaggtgc

SEQ ID NO: 1633395 - DNA, 25 bp, Homo sapien
gtttctgtctccgtggaggtgcttt

SEQ ID NO: 1633396 - DNA, 25 bp, Homo sapien
gcattttctaaaggtccgtgactgg

SEQ ID NO: 1633397 - DNA, 25 bp, Homo sapien
cattttctaaaggtccgtgactggt

SEQ ID NO: 1633398 - DNA, 25 bp, Homo sapien
gaaggctcagtatgtccgttttctg

SEQ ID NO: 1633399 - DNA, 25 bp, Homo sapien
tgcagcacatcaaatatcaacgtaa

SEQ ID NO: 1633400 - DNA, 25 bp, Homo sapien
tatcaacgtaatgaataacagtctg

SEQ ID NO: 1633401 - DNA, 25 bp, Homo sapien
gtcagttaacattcgccatctgctg

SEQ ID NO: 1633402 - DNA, 25 bp, Homo sapien
ggcccattccctgaagcacttgtga

SEQ ID NO: 1633403 - DNA, 25 bp, Homo sapien
gatttagactcgatcttcctgagat

SEQ ID NO: 1633404 - DNA, 25 bp, Homo sapien
ggcaggcatagtgatttcctcaccc

SEQ ID NO: 1633405 - DNA, 25 bp, Homo sapien
gccgtgggccatatatccctgtggg

SEQ ID NO: 1633406 - DNA, 25 bp, Homo sapien
caaagggtgaccatagacgtactca

SEQ ID NO: 1633407 - DNA, 25 bp, Homo sapien
ggcttcttctgagcgcacaagttta

SEQ ID NO: 1633408 - DNA, 25 bp, Homo sapien
catagacgtactcaggaatctctcg

SEQ ID NO: 1633409 - DNA, 25 bp, Homo sapien
caagtttaccgcaaagggtgaccat

SEQ ID NO: 1633410 - DNA, 25 bp, Homo sapien
atggctctcagcttactctacatca

SEQ ID NO: 1633411 - DNA, 25 bp, Homo sapien
ggcaaggcctttagtcatggctctc

SEQ ID NO: 1633412 - DNA, 25 bp, Homo sapien
tatgaatgcaaggagtgtggcaagg

SEQ ID NO: 1633413 - DNA, 25 bp, Homo sapien
cagttgactcaacatcagcgaattc

SEQ ID NO: 1633414 - DNA, 25 bp, Homo sapien
gctggagctccgttactctcatggg

SEQ ID NO: 1633415 - DNA, 25 bp, Homo sapien
tgtggaacagccatactagctctgg

SEQ ID NO: 1633416 - DNA, 25 bp, Homo sapien
tctgggtgttatggatcatggagca

SEQ ID NO: 1633417 - DNA, 25 bp, Homo sapien
gaaggagtctgcaaccctgatgact

SEQ ID NO: 1633418 - DNA, 25 bp, Homo sapien
tcagccctccatgatgcctaggatc

SEQ ID NO: 1633419 - DNA, 25 bp, Homo sapien
catgatgcctaggatcccaagacca

SEQ ID NO: 1633420 - DNA, 25 bp, Homo sapien
ggctgggatcccgtggtgaatttct

SEQ ID NO: 1633421 - DNA, 25 bp, Homo sapien
ctgggatcccgtggtgaatttctgg

SEQ ID NO: 1633422 - DNA, 25 bp, Homo sapien
gctttaagctgactttggccacggg

SEQ ID NO: 1633423 - DNA, 25 bp, Homo sapien
agagggtggaaaacatcagcccagg

SEQ ID NO: 1633424 - DNA, 25 bp, Homo sapien
tggcagaaactagcagagacagagg

SEQ ID NO: 1633425 - DNA, 25 bp, Homo sapien
cactagtagcccatttgagagctga

SEQ ID NO: 1633426 - DNA, 25 bp, Homo sapien
tatgtgaaagtttgatatgtaaaat

SEQ ID NO: 1633427 - DNA, 25 bp, Homo sapien
gcaactacgtgaaagtagaaataac

SEQ ID NO: 1633428 - DNA, 25 bp, Homo sapien
acattaaatgcaactacgtgaaagt

SEQ ID NO: 1633429 - DNA, 25 bp, Homo sapien
tagttatatctttacactacaaaca

SEQ ID NO: 1633430 - DNA, 25 bp, Homo sapien
gaactatagagacggaaacagactg

SEQ ID NO: 1633431 - DNA, 25 bp, Homo sapien
ttctttatgtctgagcagccctcca

SEQ ID NO: 1633432 - DNA, 25 bp, Homo sapien
aacttttgtgcatagtggacagacc

SEQ ID NO: 1633433 - DNA, 25 bp, Homo sapien
tgaaagcactccgactcaaaaggag

SEQ ID NO: 1633434 - DNA, 25 bp, Homo sapien
tatggtgttacaccaaggatgaacc

SEQ ID NO: 1633435 - DNA, 25 bp, Homo sapien
taatgagtgtcagtggaggttcacc

SEQ ID NO: 1633436 - DNA, 25 bp, Homo sapien
gctccaacaagcagaaagtacaaga

SEQ ID NO: 1633437 - DNA, 25 bp, Homo sapien
gaaacatgccatgatccacttgctc

SEQ ID NO: 1633438 - DNA, 25 bp, Homo sapien
gctgagggtccctaagtggatcagt

SEQ ID NO: 1633439 - DNA, 25 bp, Homo sapien
catgtagtagacaggaagcccagct

SEQ ID NO: 1633440 - DNA, 25 bp, Homo sapien
caccatcttccagggatcatgacca

SEQ ID NO: 1633441 - DNA, 25 bp, Homo sapien
tttcactgttctgctcacaccatac

SEQ ID NO: 1633442 - DNA, 25 bp, Homo sapien
tccaccgtattgagggcattcccac

SEQ ID NO: 1633443 - DNA, 25 bp, Homo sapien
taaaagaggtaatgaggagatctcc

SEQ ID NO: 1633444 - DNA, 25 bp, Homo sapien
caagtgggaagaggtaacagacacc

SEQ ID NO: 1633445 - DNA, 25 bp, Homo sapien
tatggttcattgtaagtcaccgcca

SEQ ID NO: 1633446 - DNA, 25 bp, Homo sapien
tgaaggtgatgggagttcacaagac

SEQ ID NO: 1633447 - DNA, 25 bp, Homo sapien
aggtgatgggagttcacaagacacg

SEQ ID NO: 1633448 - DNA, 25 bp, Homo sapien
tgatgggagttcacaagacacggtg

SEQ ID NO: 1633449 - DNA, 25 bp, Homo sapien
gtgatgggagttcacaagacacggt

SEQ ID NO: 1633450 - DNA, 25 bp, Homo sapien
cccaggagtctgttacacaatgtgt

SEQ ID NO: 1633451 - DNA, 25 bp, Homo sapien
catacattctgaggtttacgtctgt

SEQ ID NO: 1633452 - DNA, 25 bp, Homo sapien
ccaactgtggtagattcgaatgaga

SEQ ID NO: 1633453 - DNA, 25 bp, Homo sapien
ggtgcaagtcttggtagatgacagt

SEQ ID NO: 1633454 - DNA, 25 bp, Homo sapien
atttctgaacgaagcctttcccaca

SEQ ID NO: 1633455 - DNA, 25 bp, Homo sapien
gatttctgaacgaagcctttcccac

SEQ ID NO: 1633456 - DNA, 25 bp, Homo sapien
gtttattcaaattggacctgtcagt

SEQ ID NO: 1633457 - DNA, 25 bp, Homo sapien
tattcaaattggacctgtcagtaaa

SEQ ID NO: 1633458 - DNA, 25 bp, Homo sapien
attcaaattggacctgtcagtaaag

SEQ ID NO: 1633459 - DNA, 25 bp, Homo sapien
tttattcaaattggacctgtcagta

SEQ ID NO: 1633460 - DNA, 25 bp, Homo sapien
tttgacctgccactaaaggccttcc

SEQ ID NO: 1633461 - DNA, 25 bp, Homo sapien
ctgtgtgaattcgtttatgaacatg

SEQ ID NO: 1633462 - DNA, 25 bp, Homo sapien
gtgaattcgtttatgaacatggagt

SEQ ID NO: 1633463 - DNA, 25 bp, Homo sapien
tcatgcatatatacgatttttctcc

SEQ ID NO: 1633464 - DNA, 25 bp, Homo sapien
acatttcatgcatatatacgatttt

SEQ ID NO: 1633465 - DNA, 25 bp, Homo sapien
cacactcagtacatatggaagattt

SEQ ID NO: 1633466 - DNA, 25 bp, Homo sapien
ctcagtacatatggaagatttctct

SEQ ID NO: 1633467 - DNA, 25 bp, Homo sapien
tctgacctgtaggtaaaggccttcc

SEQ ID NO: 1633468 - DNA, 25 bp, Homo sapien
ctctgacctgtaggtaaaggccttc

SEQ ID NO: 1633469 - DNA, 25 bp, Homo sapien
gaccttcccatattcggtacatata

SEQ ID NO: 1633470 - DNA, 25 bp, Homo sapien
attcggtacatatatagggcttcac

SEQ ID NO: 1633471 - DNA, 25 bp, Homo sapien
tgaagaccttcccatattcggtaca

SEQ ID NO: 1633472 - DNA, 25 bp, Homo sapien
cccatattcggtacatatatagggc

SEQ ID NO: 1633473 - DNA, 25 bp, Homo sapien
tcggtgtgcaatcaaatgggtcttc

SEQ ID NO: 1633474 - DNA, 25 bp, Homo sapien
tcttcggtgtgcaatcaaatgggtc

SEQ ID NO: 1633475 - DNA, 25 bp, Homo sapien
cctgaagagggacgacacttgaaaa

SEQ ID NO: 1633476 - DNA, 25 bp, Homo sapien
tgaagagggacgacacttgaaaaaa

SEQ ID NO: 1633477 - DNA, 25 bp, Homo sapien
atatcttttcaaatttggcgcattc

SEQ ID NO: 1633478 - DNA, 25 bp, Homo sapien
gaggatacttgtttataactgagga

SEQ ID NO: 1633479 - DNA, 25 bp, Homo sapien
aagctttctccccaggatacatttt

SEQ ID NO: 1633480 - DNA, 25 bp, Homo sapien
caggtgtactttgagctgtgacttc

SEQ ID NO: 1633481 - DNA, 25 bp, Homo sapien
acattctttgaaggattatttttat

SEQ ID NO: 1633482 - DNA, 25 bp, Homo sapien
ttatcatttggtaatctttttaaca

SEQ ID NO: 1633483 - DNA, 25 bp, Homo sapien
ctttgaaggattatttttattatga

SEQ ID NO: 1633484 - DNA, 25 bp, Homo sapien
tatcatttggtaatctttttaacat

SEQ ID NO: 1633485 - DNA, 25 bp, Homo sapien
cacctctgcttcaggaacttgatat

SEQ ID NO: 1633486 - DNA, 25 bp, Homo sapien
acctctgcttcaggaacttgatatc

SEQ ID NO: 1633487 - DNA, 25 bp, Homo sapien
agagcaggtggctgtaggtctccag

SEQ ID NO: 1633488 - DNA, 25 bp, Homo sapien
ctgagagcaggtggctgtaggtctc

SEQ ID NO: 1633489 - DNA, 25 bp, Homo sapien
gagagcaggtggctgtaggtctcca

SEQ ID NO: 1633490 - DNA, 25 bp, Homo sapien
ctactgagagcaggtggctgtaggt

SEQ ID NO: 1633491 - DNA, 25 bp, Homo sapien
tctgctgaaatcgatagccacatcc

SEQ ID NO: 1633492 - DNA, 25 bp, Homo sapien
cctctctgctgaaatcgatagccac

SEQ ID NO: 1633493 - DNA, 25 bp, Homo sapien
tccaggtgccgccattcctctctgc

SEQ ID NO: 1633494 - DNA, 25 bp, Homo sapien
gctgaaatcgatagccacatccctg

SEQ ID NO: 1633495 - DNA, 25 bp, Homo sapien
caaattcttgttcaatgtgcacagt

SEQ ID NO: 1633496 - DNA, 25 bp, Homo sapien
aattcttgttcaatgtgcacagtca

SEQ ID NO: 1633497 - DNA, 25 bp, Homo sapien
tgtgcacagtcagcttagagggttg

SEQ ID NO: 1633498 - DNA, 25 bp, Homo sapien
tgcacagtcagcttagagggttgga

SEQ ID NO: 1633499 - DNA, 25 bp, Homo sapien
gaagacgcatgctctagttttctct

SEQ ID NO: 1633500 - DNA, 25 bp, Homo sapien
tacagttttgctatataccagagct

SEQ ID NO: 1633501 - DNA, 25 bp, Homo sapien
gtacagttttgctatataccagagc

SEQ ID NO: 1633502 - DNA, 25 bp, Homo sapien
acatagcagttgtttcactaatccc

SEQ ID NO: 1633503 - DNA, 25 bp, Homo sapien
agtgggttgctgagaacatagcagt

SEQ ID NO: 1633504 - DNA, 25 bp, Homo sapien
gcagttgtttcactaatcccagtaa

SEQ ID NO: 1633505 - DNA, 25 bp, Homo sapien
ggttgctgagaacatagcagttgtt

SEQ ID NO: 1633506 - DNA, 25 bp, Homo sapien
tactcttcaatgcagttagttaaca

SEQ ID NO: 1633507 - DNA, 25 bp, Homo sapien
cttctactcttcaatgcagttagtt

SEQ ID NO: 1633508 - DNA, 25 bp, Homo sapien
tctactcttcaatgcagttagttaa

SEQ ID NO: 1633509 - DNA, 25 bp, Homo sapien
tcttcaatgcagttagttaacatat

SEQ ID NO: 1633510 - DNA, 25 bp, Homo sapien
cgtggcaccacgcacggcttatttt

SEQ ID NO: 1633511 - DNA, 25 bp, Homo sapien
tcttcagtatatgagtttcaccatg

SEQ ID NO: 1633512 - DNA, 25 bp, Homo sapien
gtgtcttcagtatgagtcttcagta

SEQ ID NO: 1633513 - DNA, 25 bp, Homo sapien
ctgccttgagagtagtgtactaaaa

SEQ ID NO: 1633514 - DNA, 25 bp, Homo sapien
cataggagctgccatgatcctctgg

SEQ ID NO: 1633515 - DNA, 25 bp, Homo sapien
ctcataggagctgccatgatcctct

SEQ ID NO: 1633516 - DNA, 25 bp, Homo sapien
ataggagctgccatgatcctctgga

SEQ ID NO: 1633517 - DNA, 25 bp, Homo sapien
tcataggagctgccatgatcctctg

SEQ ID NO: 1633518 - DNA, 25 bp, Homo sapien
gctggagtctagaggaaaatctggc

SEQ ID NO: 1633519 - DNA, 25 bp, Homo sapien
acactgggtctcaaccctttttctg

SEQ ID NO: 1633520 - DNA, 25 bp, Homo sapien
tctgtagggtgtctgaagcttggca

SEQ ID NO: 1633521 - DNA, 25 bp, Homo sapien
gggtgtctgaagcttggcagtcatc

SEQ ID NO: 1633522 - DNA, 25 bp, Homo sapien
tcaactcaggttagaaagcaagctg

SEQ ID NO: 1633523 - DNA, 25 bp, Homo sapien
actttcaactcaggttagaaagcaa

SEQ ID NO: 1633524 - DNA, 25 bp, Homo sapien
tagaaagcaagctgattacagtcct

SEQ ID NO: 1633525 - DNA, 25 bp, Homo sapien
aaagcaagctgattacagtcctcac

SEQ ID NO: 1633526 - DNA, 25 bp, Homo sapien
gatcaccataactgaccctacaggc

SEQ ID NO: 1633527 - DNA, 25 bp, Homo sapien
accgaagcctgaaaccgcaatcact

SEQ ID NO: 1633528 - DNA, 25 bp, Homo sapien
gtcacaatcaacaacggacgccaca

SEQ ID NO: 1633529 - DNA, 25 bp, Homo sapien
gaaaccccaatcgtgatcaaccaaa

SEQ ID NO: 1633530 - DNA, 25 bp, Homo sapien
aagatttatcggtattggaatatga

SEQ ID NO: 1633531 - DNA, 25 bp, Homo sapien
gatttatcggtattggaatatgaaa

SEQ ID NO: 1633532 - DNA, 25 bp, Homo sapien
ctcaaagatttatcggtattggaat

SEQ ID NO: 1633533 - DNA, 25 bp, Homo sapien
tcaaagatttatcggtattggaata

SEQ ID NO: 1633534 - DNA, 25 bp, Homo sapien
cagcggcaaaaaagccttggaagac

SEQ ID NO: 1633535 - DNA, 25 bp, Homo sapien
gcggcaaaaaagccttggaagacca

SEQ ID NO: 1633536 - DNA, 25 bp, Homo sapien
accagcggcaaaaaagccttggaag

SEQ ID NO: 1633537 - DNA, 25 bp, Homo sapien
ccagcggcaaaaaagccttggaaga

SEQ ID NO: 1633538 - DNA, 25 bp, Homo sapien
tttcctcgaacagtcaacagggcgc

SEQ ID NO: 1633539 - DNA, 25 bp, Homo sapien
atggtgtttattcgcgtgggccgcc

SEQ ID NO: 1633540 - DNA, 25 bp, Homo sapien
ggcgcatgctctgaataaacttgga

SEQ ID NO: 1633541 - DNA, 25 bp, Homo sapien
caggttccgtaatgtggcgctgtcc

SEQ ID NO: 1633542 - DNA, 25 bp, Homo sapien
ctagaagggacaggatttcttagca

SEQ ID NO: 1633543 - DNA, 25 bp, Homo sapien
ttaaaggcatgtaacaaatagcgac

SEQ ID NO: 1633544 - DNA, 25 bp, Homo sapien
aaacattacctctagagctgaggct

SEQ ID NO: 1633545 - DNA, 25 bp, Homo sapien
gctattgtgctcatgcaaactccaa

SEQ ID NO: 1633546 - DNA, 25 bp, Homo sapien
aatggtaatagacctctgccactgg

SEQ ID NO: 1633547 - DNA, 25 bp, Homo sapien
catggtatgccactgtgaccaagag

SEQ ID NO: 1633548 - DNA, 25 bp, Homo sapien
ggcaccacccgcacatggaattagg

SEQ ID NO: 1633549 - DNA, 25 bp, Homo sapien
gattgaaagtactagggtggatgcc

SEQ ID NO: 1633550 - DNA, 25 bp, Homo sapien
aggctgtctgaaccctatgacccgt

SEQ ID NO: 1633551 - DNA, 25 bp, Homo sapien
tgaaccctatgacccgttattatag

SEQ ID NO: 1633552 - DNA, 25 bp, Homo sapien
gcttccttggtgctaaatcagccag

SEQ ID NO: 1633553 - DNA, 25 bp, Homo sapien
tcagccagaattgggattcttgaca

SEQ ID NO: 1633554 - DNA, 25 bp, Homo sapien
taattaaaccatggactttggccga

SEQ ID NO: 1633555 - DNA, 25 bp, Homo sapien
tattgggacagtgaaacggctcttt

SEQ ID NO: 1633556 - DNA, 25 bp, Homo sapien
tttagggttgagaagggatacagcc

SEQ ID NO: 1633557 - DNA, 25 bp, Homo sapien
gatacagcccaggtacagactagag

SEQ ID NO: 1633558 - DNA, 25 bp, Homo sapien
aattctactagacagtgtgttctgg

SEQ ID NO: 1633559 - DNA, 25 bp, Homo sapien
gcacaactgtgttcgattcaaaaga

SEQ ID NO: 1633560 - DNA, 25 bp, Homo sapien
cacagggagtttgtcttattgcagt

SEQ ID NO: 1633561 - DNA, 25 bp, Homo sapien
ccattcaaactgttggcactatacc

SEQ ID NO: 1633562 - DNA, 25 bp, Homo sapien
atttctgaacgaagcctttcccaca

SEQ ID NO: 1633563 - DNA, 25 bp, Homo sapien
gatttctgaacgaagcctttcccac

SEQ ID NO: 1633564 - DNA, 25 bp, Homo sapien
tgttgtctgatgtttattcaaattg

SEQ ID NO: 1633565 - DNA, 25 bp, Homo sapien
ccagtgtgtgttgtctgatgtttat

SEQ ID NO: 1633566 - DNA, 25 bp, Homo sapien
tgtctgatgtttattcaaattggac

SEQ ID NO: 1633567 - DNA, 25 bp, Homo sapien
tgtgtgttgtctgatgtttattcaa

SEQ ID NO: 1633568 - DNA, 25 bp, Homo sapien
gcttactgagatttgacctgccact

SEQ ID NO: 1633569 - DNA, 25 bp, Homo sapien
tttgacttgcggatgaaagctcttc

SEQ ID NO: 1633570 - DNA, 25 bp, Homo sapien
tgagacttggaggtaaaggacttcc

SEQ ID NO: 1633571 - DNA, 25 bp, Homo sapien
tctgacttctgtcgaaaggtcttcc

SEQ ID NO: 1633572 - DNA, 25 bp, Homo sapien
tgtgtaatgagatttgaccggttgg

SEQ ID NO: 1633573 - DNA, 25 bp, Homo sapien
tttattgcatacatagggcttttct

SEQ ID NO: 1633574 - DNA, 25 bp, Homo sapien
gaccggttggtgaatgccttcccac

SEQ ID NO: 1633575 - DNA, 25 bp, Homo sapien
gagatttgaccggttggtgaatgcc

SEQ ID NO: 1633576 - DNA, 25 bp, Homo sapien
ctgtgtgaattcgtttatgaacatg

SEQ ID NO: 1633577 - DNA, 25 bp, Homo sapien
gtgaattcgtttatgaacatggagt

SEQ ID NO: 1633578 - DNA, 25 bp, Homo sapien
acatttcatgcatatatacgatttt

SEQ ID NO: 1633579 - DNA, 25 bp, Homo sapien
tcatgcatatatacgatttttctcc

SEQ ID NO: 1633580 - DNA, 25 bp, Homo sapien
gaccttcccatattcggtacatata

SEQ ID NO: 1633581 - DNA, 25 bp, Homo sapien
attcggtacatatatagggcttcac

SEQ ID NO: 1633582 - DNA, 25 bp, Homo sapien
tgaagaccttcccatattcggtaca

SEQ ID NO: 1633583 - DNA, 25 bp, Homo sapien
cccatattcggtacatatatagggc

SEQ ID NO: 1633584 - DNA, 25 bp, Homo sapien
tcttcggtgtgcaatcaattgtgtt

SEQ ID NO: 1633585 - DNA, 25 bp, Homo sapien
ttcggtgtgcaatcaattgtgtttt

SEQ ID NO: 1633586 - DNA, 25 bp, Homo sapien
tgaattcttcggtgtgcaatcaatt

SEQ ID NO: 1633587 - DNA, 25 bp, Homo sapien
gtggacttttgtgtgaacgctttgc

SEQ ID NO: 1633588 - DNA, 25 bp, Homo sapien
tttctgatgtgtgatgaattctggc

SEQ ID NO: 1633589 - DNA, 25 bp, Homo sapien
ctgaaaagagacgatacttgaaaaa

SEQ ID NO: 1633590 - DNA, 25 bp, Homo sapien
tctgatgtgtgatgaattctggctt

SEQ ID NO: 1633591 - DNA, 25 bp, Homo sapien
aagagacgatacttgaaaaaaggat

SEQ ID NO: 1633592 - DNA, 25 bp, Homo sapien
tgtacaaaagccctcccacattcaa

SEQ ID NO: 1633593 - DNA, 25 bp, Homo sapien
ctcctgtaggaactttcagatgtac

SEQ ID NO: 1633594 - DNA, 25 bp, Homo sapien
tttttctcctgtaggaactttcaga

SEQ ID NO: 1633595 - DNA, 25 bp, Homo sapien
tcaatacatacatagagtttttctc

SEQ ID NO: 1633596 - DNA, 25 bp, Homo sapien
attttttgatcttgagaggaagctg

SEQ ID NO: 1633597 - DNA, 25 bp, Homo sapien
tcagcacactcataggatttttccc

SEQ ID NO: 1633598 - DNA, 25 bp, Homo sapien
agctctttccaaattcagcacactc

SEQ ID NO: 1633599 - DNA, 25 bp, Homo sapien
gtttataaccgatgatttttctatg

SEQ ID NO: 1633600 - DNA, 25 bp, Homo sapien
gagtacattcacagtaagtatagaa

SEQ ID NO: 1633601 - DNA, 25 bp, Homo sapien
ctgttggagtacattcacagtaagt

SEQ ID NO: 1633602 - DNA, 25 bp, Homo sapien
tggagtacattcacagtaagtatag

SEQ ID NO: 1633603 - DNA, 25 bp, Homo sapien
gttggagtacattcacagtaagtat

SEQ ID NO: 1633604 - DNA, 25 bp, Homo sapien
attctttgaagcatcgtttctatca

SEQ ID NO: 1633605 - DNA, 25 bp, Homo sapien
aatgtgtagatctaaattatgcttc

SEQ ID NO: 1633606 - DNA, 25 bp, Homo sapien
catcgtttctatcatgaatgtgtag

SEQ ID NO: 1633607 - DNA, 25 bp, Homo sapien
ccatagttagtactcttcttaacat

SEQ ID NO: 1633608 - DNA, 25 bp, Homo sapien
catctaacctgagtcacattcacct

SEQ ID NO: 1633609 - DNA, 25 bp, Homo sapien
gcacttcacaggttccagtgttttt

SEQ ID NO: 1633610 - DNA, 25 bp, Homo sapien
tcctgtctcccatctaacctgagtc

SEQ ID NO: 1633611 - DNA, 25 bp, Homo sapien
taacctgagtcacattcacctcact

SEQ ID NO: 1633612 - DNA, 25 bp, Homo sapien
tgctccaacatgaccacctctggtt

SEQ ID NO: 1633613 - DNA, 25 bp, Homo sapien
ggcagctgtgacgtggcctctcacc

SEQ ID NO: 1633614 - DNA, 25 bp, Homo sapien
tgcagtgcccatggttcctttcctt

SEQ ID NO: 1633615 - DNA, 25 bp, Homo sapien
ctgggcagctgtgacgtggcctctc

SEQ ID NO: 1633616 - DNA, 25 bp, Homo sapien
agtaaccagatatctctgagtaata

SEQ ID NO: 1633617 - DNA, 25 bp, Homo sapien
ttaggaaagtaaccagatatctctg

SEQ ID NO: 1633618 - DNA, 25 bp, Homo sapien
atctctgagtaatattctgagtacc

SEQ ID NO: 1633619 - DNA, 25 bp, Homo sapien
ccagatatctctgagtaatattctg

SEQ ID NO: 1633620 - DNA, 25 bp, Homo sapien
gctgaaatcgatagccacatccctg

SEQ ID NO: 1633621 - DNA, 25 bp, Homo sapien
tctgctgaaatcgatagccacatcc

SEQ ID NO: 1633622 - DNA, 25 bp, Homo sapien
cctctctgctgaaatcgatagccac

SEQ ID NO: 1633623 - DNA, 25 bp, Homo sapien
tccaggtgccgccattcctctctgc

SEQ ID NO: 1633624 - DNA, 25 bp, Homo sapien
cacggtggagtgactatatatggga

SEQ ID NO: 1633625 - DNA, 25 bp, Homo sapien
cagctttgcacggtggagtgactat

SEQ ID NO: 1633626 - DNA, 25 bp, Homo sapien
tgcatagtcagctttgcacggtgga

SEQ ID NO: 1633627 - DNA, 25 bp, Homo sapien
tatatatgggattacggaacatggg

SEQ ID NO: 1633628 - DNA, 25 bp, Homo sapien
tgttgatttcttcatttaactgcat

SEQ ID NO: 1633629 - DNA, 25 bp, Homo sapien
ttgttgatttcttcatttaactgca

SEQ ID NO: 1633630 - DNA, 25 bp, Homo sapien
cttgttgatttcttcatttaactgc

SEQ ID NO: 1633631 - DNA, 25 bp, Homo sapien
tttctttgaaaatggtacctatata

SEQ ID NO: 1633632 - DNA, 25 bp, Homo sapien
tattgattgtgcttatagggctcag

SEQ ID NO: 1633633 - DNA, 25 bp, Homo sapien
tgatgcatattgattgtgcttatag

SEQ ID NO: 1633634 - DNA, 25 bp, Homo sapien
tgcatattgattgtgcttatagggc

SEQ ID NO: 1633635 - DNA, 25 bp, Homo sapien
ataggagctgccatgatcctctgga

SEQ ID NO: 1633636 - DNA, 25 bp, Homo sapien
ctcataggagctgccatgatcctct

SEQ ID NO: 1633637 - DNA, 25 bp, Homo sapien
cataggagctgccatgatcctctgg

SEQ ID NO: 1633638 - DNA, 25 bp, Homo sapien
tcataggagctgccatgatcctctg

SEQ ID NO: 1633639 - DNA, 25 bp, Homo sapien
tagggtgcctgaagtttagtggtca

SEQ ID NO: 1633640 - DNA, 25 bp, Homo sapien
gggtgcctgaagtttagtggtcatc

SEQ ID NO: 1633641 - DNA, 25 bp, Homo sapien
agggtgcctgaagtttagtggtcat

SEQ ID NO: 1633642 - DNA, 25 bp, Homo sapien
gtttagtggtcatctgtgaactcag

SEQ ID NO: 1633643 - DNA, 25 bp, Homo sapien
ctctcggcattaaaacgtgaaaata

SEQ ID NO: 1633644 - DNA, 25 bp, Homo sapien
taaaacgtgaaaatagtcctgacgc

SEQ ID NO: 1633645 - DNA, 25 bp, Homo sapien
tagtcctgacgccagcggcgaaata

SEQ ID NO: 1633646 - DNA, 25 bp, Homo sapien
cgccagcggcgaaatagccttcggg

SEQ ID NO: 1633647 - DNA, 25 bp, Homo sapien
tatggtgtttatttgtgtgggtcgc

SEQ ID NO: 1633648 - DNA, 25 bp, Homo sapien
cagagaatataaccgcgcccttatg

SEQ ID NO: 1633649 - DNA, 25 bp, Homo sapien
cgtaatcggcgctcacgggcagaga

SEQ ID NO: 1633650 - DNA, 25 bp, Homo sapien
tatttagagacatcgtgcagtttcc

SEQ ID NO: 1633651 - DNA, 25 bp, Homo sapien
tatcctgattacgatggtggtgaca

SEQ ID NO: 1633652 - DNA, 25 bp, Homo sapien
gacatgcgttgaagcttaccgaaca

SEQ ID NO: 1633653 - DNA, 25 bp, Homo sapien
tggtgacaagggtttagacatgcgt

SEQ ID NO: 1633654 - DNA, 25 bp, Homo sapien
tcctgattacgatggtggtgacaag

SEQ ID NO: 1633655 - DNA, 25 bp, Homo sapien
acattagctcgtttatggtgtacca

SEQ ID NO: 1633656 - DNA, 25 bp, Homo sapien
ttcaagaagctttgcattaccccaa

SEQ ID NO: 1633657 - DNA, 25 bp, Homo sapien
tcagtcacttttagtgtattcagag

SEQ ID NO: 1633658 - DNA, 25 bp, Homo sapien
taatcctgctagtcctaaaaaactc

SEQ ID NO: 1633659 - DNA, 25 bp, Homo sapien
tgcgttctgcactgagtcggcttgg

SEQ ID NO: 1633660 - DNA, 25 bp, Homo sapien
tctagtcaacatctggcccgaagct

SEQ ID NO: 1633661 - DNA, 25 bp, Homo sapien
cgttataacgcctagtacagtccgg

SEQ ID NO: 1633662 - DNA, 25 bp, Homo sapien
tcagtctagcattctcagagagcgt

SEQ ID NO: 1633663 - DNA, 25 bp, Homo sapien
cctacggcagtttcactctgagcct

SEQ ID NO: 1633664 - DNA, 25 bp, Homo sapien
taccatggaggaagattgtcttcag

SEQ ID NO: 1633665 - DNA, 25 bp, Homo sapien
tgtgtctggatcacggagacgcggg

SEQ ID NO: 1633666 - DNA, 25 bp, Homo sapien
cgtgcagggccagcgtcctacggca

SEQ ID NO: 1633667 - DNA, 25 bp, Homo sapien
gctggaccctccgcctcaagggtag

SEQ ID NO: 1633668 - DNA, 25 bp, Homo sapien
ttctcggcgcggtcctactccggac

SEQ ID NO: 1633669 - DNA, 25 bp, Homo sapien
tgcaagaacccgaaaaaacaggcgc

SEQ ID NO: 1633670 - DNA, 25 bp, Homo sapien
agggtaggggaagtgcgcggtgagc

SEQ ID NO: 1633671 - DNA, 25 bp, Homo sapien
catcttgggatattgtgtgaggcca

SEQ ID NO: 1633672 - DNA, 25 bp, Homo sapien
ggcttgccgcccagagtatgcaata

SEQ ID NO: 1633673 - DNA, 25 bp, Homo sapien
cagttactggcgctaccgctagacc

SEQ ID NO: 1633674 - DNA, 25 bp, Homo sapien
tgtctactaactgcagtgaatcccc

SEQ ID NO: 1633675 - DNA, 25 bp, Homo sapien
ccatggctgaggtgagttgatgctt

SEQ ID NO: 1633676 - DNA, 25 bp, Homo sapien
cctttttcaggagaacggcctcaag

SEQ ID NO: 1633677 - DNA, 25 bp, Homo sapien
ggcctcaaggaagactaaccatctg

SEQ ID NO: 1633678 - DNA, 25 bp, Homo sapien
aatatggaggtggttttatctgacc

SEQ ID NO: 1633679 - DNA, 25 bp, Homo sapien
tgcaaccaatcctagtgaacacgta

SEQ ID NO: 1633680 - DNA, 25 bp, Homo sapien
tatgatcagtccgttgcagttgtcc

SEQ ID NO: 1633681 - DNA, 25 bp, Homo sapien
tctctgcagaaaatagggaaattca

SEQ ID NO: 1633682 - DNA, 25 bp, Homo sapien
tagtcacacttgcatacagtcccct

SEQ ID NO: 1633683 - DNA, 25 bp, Homo sapien
ttatgccagagggagataatgggac

SEQ ID NO: 1633684 - DNA, 25 bp, Homo sapien
taatgggacttacaaagcatggcct

SEQ ID NO: 1633685 - DNA, 25 bp, Homo sapien
gaagccaccttgcaaaacaactggg

SEQ ID NO: 1633686 - DNA, 25 bp, Homo sapien
ggttcacatgttactcggcatctga

SEQ ID NO: 1633687 - DNA, 25 bp, Homo sapien
tccagaggtgaaataaggatgacaa

SEQ ID NO: 1633688 - DNA, 25 bp, Homo sapien
ggaactaaaacaagctgaaatgaat

SEQ ID NO: 1633689 - DNA, 25 bp, Homo sapien
agacaaagtttagtgattccagagg

SEQ ID NO: 1633690 - DNA, 25 bp, Homo sapien
ccaaaattgatatttgatggaagag

SEQ ID NO: 1633691 - DNA, 25 bp, Homo sapien
cggactggggctgatgtagtttccc

SEQ ID NO: 1633692 - DNA, 25 bp, Homo sapien
atcggccatcgccacggcagaaact

SEQ ID NO: 1633693 - DNA, 25 bp, Homo sapien
cgtccgtccacaggtctcatgggcg

SEQ ID NO: 1633694 - DNA, 25 bp, Homo sapien
gtttcccgacctctgacacatagga

SEQ ID NO: 1633695 - DNA, 25 bp, Homo sapien
tgtaaaccagattttggactctgca

SEQ ID NO: 1633696 - DNA, 25 bp, Homo sapien
gctgctctgctaataattaggttcc

SEQ ID NO: 1633697 - DNA, 25 bp, Homo sapien
ggatagtctcatggattctcaagga

SEQ ID NO: 1633698 - DNA, 25 bp, Homo sapien
agatcattaggagcttcttttccaa

SEQ ID NO: 1633699 - DNA, 25 bp, Homo sapien
tcctcacagtttacagagaagccca

SEQ ID NO: 1633700 - DNA, 25 bp, Homo sapien
tgcacagatgtaatttgggcctaca

SEQ ID NO: 1633701 - DNA, 25 bp, Homo sapien
tacatgtgtccaaagcctaatgccc

SEQ ID NO: 1633702 - DNA, 25 bp, Homo sapien
tctttgcgcttatctagtgagggtg

SEQ ID NO: 1633703 - DNA, 25 bp, Homo sapien
taagctatggttttgggcagcacga

SEQ ID NO: 1633704 - DNA, 25 bp, Homo sapien
gaagtctacatgtaacccaaacgga

SEQ ID NO: 1633705 - DNA, 25 bp, Homo sapien
tcaatagttacaccaagaaaggcct

SEQ ID NO: 1633706 - DNA, 25 bp, Homo sapien
cagaagacatgagggcacagactac

SEQ ID NO: 1633707 - DNA, 25 bp, Homo sapien
tgaggaaacattcccgattcccgga

SEQ ID NO: 1633708 - DNA, 25 bp, Homo sapien
aacattcccgattcccggagtagct

SEQ ID NO: 1633709 - DNA, 25 bp, Homo sapien
tgccctgaggaaacattcccgattc

SEQ ID NO: 1633710 - DNA, 25 bp, Homo sapien
acattcccgattcccggagtagctt

SEQ ID NO: 1633711 - DNA, 25 bp, Homo sapien
acttctgtatgtcagcttagcaccc

SEQ ID NO: 1633712 - DNA, 25 bp, Homo sapien
taaagctgaatacttctgtatgtca

SEQ ID NO: 1633713 - DNA, 25 bp, Homo sapien
tgtatgtcagcttagcacccctagc

SEQ ID NO: 1633714 - DNA, 25 bp, Homo sapien
tgtgtttttcacgtttataaagctg

SEQ ID NO: 1633715 - DNA, 25 bp, Homo sapien
gcctgtccccctgctgaatctcctg

SEQ ID NO: 1633716 - DNA, 25 bp, Homo sapien
tagatgggggcctgtccccctgctg

SEQ ID NO: 1633717 - DNA, 25 bp, Homo sapien
tctcctgctgtgcatagatgggggc

SEQ ID NO: 1633718 - DNA, 25 bp, Homo sapien
tcctgctgtgcatagatgggggcct

SEQ ID NO: 1633719 - DNA, 25 bp, Homo sapien
accacccaagttgggtatctggtga

SEQ ID NO: 1633720 - DNA, 25 bp, Homo sapien
ttcagagcccggcaccacccaagtt

SEQ ID NO: 1633721 - DNA, 25 bp, Homo sapien
ccggcaccacccaagttgggtatct

SEQ ID NO: 1633722 - DNA, 25 bp, Homo sapien
agagcccggcaccacccaagttggg

SEQ ID NO: 1633723 - DNA, 25 bp, Homo sapien
gggtgtgaagatttacaaataatct

SEQ ID NO: 1633724 - DNA, 25 bp, Homo sapien
ttatttctccaggcgaagggatgtt

SEQ ID NO: 1633725 - DNA, 25 bp, Homo sapien
cgaagggatgttggaagacattctg

SEQ ID NO: 1633726 - DNA, 25 bp, Homo sapien
ttctccaggcgaagggatgttggaa

SEQ ID NO: 1633727 - DNA, 25 bp, Homo sapien
agaaaacgcccatgttgaacaaaat

SEQ ID NO: 1633728 - DNA, 25 bp, Homo sapien
acaaagaaaacgcccatgttgaaca

SEQ ID NO: 1633729 - DNA, 25 bp, Homo sapien
ttgaacaaaatggtgacaattgtgc

SEQ ID NO: 1633730 - DNA, 25 bp, Homo sapien
tccagaagtttccttcaagccgtac

SEQ ID NO: 1633731 - DNA, 25 bp, Homo sapien
gggaaatgcgaccagactctcccca

SEQ ID NO: 1633732 - DNA, 25 bp, Homo sapien
ccattccgggagtttgcctcaagcc

SEQ ID NO: 1633733 - DNA, 25 bp, Homo sapien
aactcctggggaaatgcgaccagac

SEQ ID NO: 1633734 - DNA, 25 bp, Homo sapien
ctcaagccaatcttgttctccctga

SEQ ID NO: 1633735 - DNA, 25 bp, Homo sapien
gctctcgtggtcagcagctctcatt

SEQ ID NO: 1633736 - DNA, 25 bp, Homo sapien
ggagaaacttgtccgtgtcactggg

SEQ ID NO: 1633737 - DNA, 25 bp, Homo sapien
cacccgggaccacattttccagaat

SEQ ID NO: 1633738 - DNA, 25 bp, Homo sapien
gggcatcttaacagtcggctcctaa

SEQ ID NO: 1633739 - DNA, 25 bp, Homo sapien
tggcctaactctgcactgatgaatt

SEQ ID NO: 1633740 - DNA, 25 bp, Homo sapien
gaaaatgaatctggcctaactctgc

SEQ ID NO: 1633741 - DNA, 25 bp, Homo sapien
aatgaatctggcctaactctgcact

SEQ ID NO: 1633742 - DNA, 25 bp, Homo sapien
cggctcgggcctcgcgcatgcgcac

SEQ ID NO: 1633743 - DNA, 25 bp, Homo sapien
cgcatgcgcactggcgaggccgact

SEQ ID NO: 1633744 - DNA, 25 bp, Homo sapien
gcatgcgcactggcgaggccgactc

SEQ ID NO: 1633745 - DNA, 25 bp, Homo sapien
tgcgcactggcgaggccgactcccc

SEQ ID NO: 1633746 - DNA, 25 bp, Homo sapien
gcccaggcaggatacgggggggcca

SEQ ID NO: 1633747 - DNA, 25 bp, Homo sapien
cagacacagcaagagggaggtcaga

SEQ ID NO: 1633748 - DNA, 25 bp, Homo sapien
ggcagacacagcaagagggaggtca

SEQ ID NO: 1633749 - DNA, 25 bp, Homo sapien
ggggcagacacagcaagagggaggt

SEQ ID NO: 1633750 - DNA, 25 bp, Homo sapien
ggtggcggcgcagcccgaggcggcg

SEQ ID NO: 1633751 - DNA, 25 bp, Homo sapien
gcggcgcagcccgaggcggcgggtg

SEQ ID NO: 1633752 - DNA, 25 bp, Homo sapien
gcggtggcggcgcagcccgaggcgg

SEQ ID NO: 1633753 - DNA, 25 bp, Homo sapien
cggcggtggcggcgcagcccgaggc

SEQ ID NO: 1633754 - DNA, 25 bp, Homo sapien
gcccaggcaggatacgggggggcca

SEQ ID NO: 1633755 - DNA, 25 bp, Homo sapien
ggggcagacacagcaagagggaggt

SEQ ID NO: 1633756 - DNA, 25 bp, Homo sapien
ggcagacacagcaagagggaggtca

SEQ ID NO: 1633757 - DNA, 25 bp, Homo sapien
cagacacagcaagagggaggtcaga

SEQ ID NO: 1633758 - DNA, 25 bp, Homo sapien
cgacaggcgtgacaaccaccttctt

SEQ ID NO: 1633759 - DNA, 25 bp, Homo sapien
ggcgacaggcgtgacaaccaccttc

SEQ ID NO: 1633760 - DNA, 25 bp, Homo sapien
gggcgacaggcgtgacaaccacctt

SEQ ID NO: 1633761 - DNA, 25 bp, Homo sapien
gcgacaggcgtgacaaccaccttct

SEQ ID NO: 1633762 - DNA, 25 bp, Homo sapien
ggcgacaggcgtgacaaccaccttc

SEQ ID NO: 1633763 - DNA, 25 bp, Homo sapien
cgacaggcgtgacaaccaccttctt

SEQ ID NO: 1633764 - DNA, 25 bp, Homo sapien
gggcgacaggcgtgacaaccacctt

SEQ ID NO: 1633765 - DNA, 25 bp, Homo sapien
gcgacaggcgtgacaaccaccttct

SEQ ID NO: 1633766 - DNA, 25 bp, Homo sapien
ttgtccaggccgtcacgaacccaaa

SEQ ID NO: 1633767 - DNA, 25 bp, Homo sapien
cctgcgggtccgacgcaactcccca

SEQ ID NO: 1633768 - DNA, 25 bp, Homo sapien
gacgcaactccccacgttgtccagg

SEQ ID NO: 1633769 - DNA, 25 bp, Homo sapien
ccacgttgtccaggccgtcacgaac

SEQ ID NO: 1633770 - DNA, 25 bp, Homo sapien
ggagggagcggaccacagttgctat

SEQ ID NO: 1633771 - DNA, 25 bp, Homo sapien
agggagcggaccacagttgctatca

SEQ ID NO: 1633772 - DNA, 25 bp, Homo sapien
gagggagcggaccacagttgctatc

SEQ ID NO: 1633773 - DNA, 25 bp, Homo sapien
gggagcggaccacagttgctatcat

SEQ ID NO: 1633774 - DNA, 25 bp, Homo sapien
cattgatgacacttaagcccactac

SEQ ID NO: 1633775 - DNA, 25 bp, Homo sapien
gacactatttacactttggaccaga

SEQ ID NO: 1633776 - DNA, 25 bp, Homo sapien
cagtaatggctgaaagagagacaca

SEQ ID NO: 1633777 - DNA, 25 bp, Homo sapien
tctttgggattggagaaggctgtcc

SEQ ID NO: 1633778 - DNA, 25 bp, Homo sapien
gagaactcaagtctcagggtaggca

SEQ ID NO: 1633779 - DNA, 25 bp, Homo sapien
cagtccgtcgcgattctccaatagg

SEQ ID NO: 1633780 - DNA, 25 bp, Homo sapien
tctgcaaccgattacatggagaagg

SEQ ID NO: 1633781 - DNA, 25 bp, Homo sapien
cagtgcaagagtgccaatggaaccc

SEQ ID NO: 1633782 - DNA, 25 bp, Homo sapien
tatttgaggctaaccgagagcgtcc

SEQ ID NO: 1633783 - DNA, 25 bp, Homo sapien
aaagtttttgctgcgcatgtaggcg

SEQ ID NO: 1633784 - DNA, 25 bp, Homo sapien
tggctaatgtggagcgaacctgcac

SEQ ID NO: 1633785 - DNA, 25 bp, Homo sapien
ggtcaggcccaagcgcttcttattg

SEQ ID NO: 1633786 - DNA, 25 bp, Homo sapien
gcgtccgcggctgggaaatcggcca

SEQ ID NO: 1633787 - DNA, 25 bp, Homo sapien
cgtccgcggctgggaaatcggccat

SEQ ID NO: 1633788 - DNA, 25 bp, Homo sapien
ttcagcgtccgcggctgggaaatcg

SEQ ID NO: 1633789 - DNA, 25 bp, Homo sapien
agcgtccgcggctgggaaatcggcc

SEQ ID NO: 1633790 - DNA, 25 bp, Homo sapien
ggaatcaggagcttcttttgctgtt

SEQ ID NO: 1633791 - DNA, 25 bp, Homo sapien
ggcctttttacgctcccattttgca

SEQ ID NO: 1633792 - DNA, 25 bp, Homo sapien
gaatcaggagcttcttttgctgttc

SEQ ID NO: 1633793 - DNA, 25 bp, Homo sapien
ccaaatggcctttttacgctcccat

SEQ ID NO: 1633794 - DNA, 25 bp, Homo sapien
ttgcagaatccttcggcagtcccgc

SEQ ID NO: 1633795 - DNA, 25 bp, Homo sapien
gagcaccgggaccacattttgcaga

SEQ ID NO: 1633796 - DNA, 25 bp, Homo sapien
gaaacttgtcaacgtcacttgggca

SEQ ID NO: 1633797 - DNA, 25 bp, Homo sapien
tcgcggtcagcagatctcattggtt

SEQ ID NO: 1633798 - DNA, 25 bp, Homo sapien
ggttcgtaaacttggttgtgtgcgc

SEQ ID NO: 1633799 - DNA, 25 bp, Homo sapien
tgggttcgtaaacttggttgtgtgc

SEQ ID NO: 1633800 - DNA, 25 bp, Homo sapien
gcgtgcacccgcgttccgtgagtgc

SEQ ID NO: 1633801 - DNA, 25 bp, Homo sapien
tccgtgagtgccctataggcagtca

SEQ ID NO: 1633802 - DNA, 25 bp, Homo sapien
ttcggcttcaggatccgcagcgtgc

SEQ ID NO: 1633803 - DNA, 25 bp, Homo sapien
gactttcggcttcaggatccgcagc

SEQ ID NO: 1633804 - DNA, 25 bp, Homo sapien
aggctgccttgttggtattgggcaa

SEQ ID NO: 1633805 - DNA, 25 bp, Homo sapien
ccttgttggtattgggcaaagtcat

SEQ ID NO: 1633806 - DNA, 25 bp, Homo sapien
tgggcaaagtcattcctagccctag

SEQ ID NO: 1633807 - DNA, 25 bp, Homo sapien
gcaaagtcattcctagccctagtca

SEQ ID NO: 1633808 - DNA, 25 bp, Homo sapien
atgagcaccgcggctggccctgaac

SEQ ID NO: 1633809 - DNA, 25 bp, Homo sapien
ggcatgagcaccgcggctggccctg

SEQ ID NO: 1633810 - DNA, 25 bp, Homo sapien
agaatttgaacttccaattacttct

SEQ ID NO: 1633811 - DNA, 25 bp, Homo sapien
agcaccgcggctggccctgaaccct

SEQ ID NO: 1633812 - DNA, 25 bp, Homo sapien
gagtttgtgcttttagccactgagt

SEQ ID NO: 1633813 - DNA, 25 bp, Homo sapien
agttgttaaactttagtgtgcatca

SEQ ID NO: 1633814 - DNA, 25 bp, Homo sapien
attgagacacagatattaagatatc

SEQ ID NO: 1633815 - DNA, 25 bp, Homo sapien
aagatatcaacgcaaagtcataggg

SEQ ID NO: 1633816 - DNA, 25 bp, Homo sapien
ctctcattctaaagtgtgggaggga

SEQ ID NO: 1633817 - DNA, 25 bp, Homo sapien
gacctctcattctaaagtgtgggag

SEQ ID NO: 1633818 - DNA, 25 bp, Homo sapien
cattctaaagtgtgggagggaaaga

SEQ ID NO: 1633819 - DNA, 25 bp, Homo sapien
gccttgacctctcattctaaagtgt

SEQ ID NO: 1633820 - DNA, 25 bp, Homo sapien
tctgcagttgttgagggtactatcc

SEQ ID NO: 1633821 - DNA, 25 bp, Homo sapien
tactgcaaaggtgtgttaacatatc

SEQ ID NO: 1633822 - DNA, 25 bp, Homo sapien
gaacatcctatgagctcttaaaagg

SEQ ID NO: 1633823 - DNA, 25 bp, Homo sapien
tatgtctctgtagtgatctctaagg

SEQ ID NO: 1633824 - DNA, 25 bp, Homo sapien
tcaacgtgtattcccctattctgag

SEQ ID NO: 1633825 - DNA, 25 bp, Homo sapien
tggtgtgctttcctccgattgatcc

SEQ ID NO: 1633826 - DNA, 25 bp, Homo sapien
aattggtttttacactgctgtgccc

SEQ ID NO: 1633827 - DNA, 25 bp, Homo sapien
gagtggtgcctttgcatacttacaa

SEQ ID NO: 1633828 - DNA, 25 bp, Homo sapien
ggactacaagtgcctgccacctcac

SEQ ID NO: 1633829 - DNA, 25 bp, Homo sapien
actacaagtgcctgccacctcaccc

SEQ ID NO: 1633830 - DNA, 25 bp, Homo sapien
ctacaagtgcctgccacctcacccg

SEQ ID NO: 1633831 - DNA, 25 bp, Homo sapien
gactacaagtgcctgccacctcacc

SEQ ID NO: 1633832 - DNA, 25 bp, Homo sapien
aggactggctttaggatgttcaaca

SEQ ID NO: 1633833 - DNA, 25 bp, Homo sapien
cagtgtgcccggctgtccttagtgt

SEQ ID NO: 1633834 - DNA, 25 bp, Homo sapien
gaacgtagataggaaagagatcgaa

SEQ ID NO: 1633835 - DNA, 25 bp, Homo sapien
acaggatgagattatcttgagggca

SEQ ID NO: 1633836 - DNA, 25 bp, Homo sapien
gaacatactgtacatactggaaccc

SEQ ID NO: 1633837 - DNA, 25 bp, Homo sapien
cctacagttcagtgctatagcctaa

SEQ ID NO: 1633838 - DNA, 25 bp, Homo sapien
tgcgcctggcctgatatttcattat

SEQ ID NO: 1633839 - DNA, 25 bp, Homo sapien
catggaagttatacaacactatgga

SEQ ID NO: 1633840 - DNA, 25 bp, Homo sapien
agcctctgagctccgttatgataca

SEQ ID NO: 1633841 - DNA, 25 bp, Homo sapien
cttggacatgcatcctcagagcgct

SEQ ID NO: 1633842 - DNA, 25 bp, Homo sapien
ttctttgcttgtcggtccccttgga

SEQ ID NO: 1633843 - DNA, 25 bp, Homo sapien
cagtgagctgccaaaattaaggtga

SEQ ID NO: 1633844 - DNA, 25 bp, Homo sapien
ctgtgttcttttcataccatagatt

SEQ ID NO: 1633845 - DNA, 25 bp, Homo sapien
ttccctgcacatacagtgggccaca

SEQ ID NO: 1633846 - DNA, 25 bp, Homo sapien
tcctgtttccctgcacatacagtgg

SEQ ID NO: 1633847 - DNA, 25 bp, Homo sapien
tagattagacctaaaatggattccc

SEQ ID NO: 1633848 - DNA, 25 bp, Homo sapien
tgcctgtgaggccaatacaccaaaa

SEQ ID NO: 1633849 - DNA, 25 bp, Homo sapien
gaggtgttaattccttcagatggcc

SEQ ID NO: 1633850 - DNA, 25 bp, Homo sapien
ggctttttcagaaggctatcccaca

SEQ ID NO: 1633851 - DNA, 25 bp, Homo sapien
gatccatgaccaatacacagtactg

SEQ ID NO: 1633852 - DNA, 25 bp, Homo sapien
aacaaggtgcgacttttggctgaaa

SEQ ID NO: 1633853 - DNA, 25 bp, Homo sapien
tttctcatatgaagggtaagagatg

SEQ ID NO: 1633854 - DNA, 25 bp, Homo sapien
ttactacagtcgaagggtttctcac

SEQ ID NO: 1633855 - DNA, 25 bp, Homo sapien
gccttgccacactcaatacagtgat

SEQ ID NO: 1633856 - DNA, 25 bp, Homo sapien
tatgtaaattaagcagtgagcactg

SEQ ID NO: 1633857 - DNA, 25 bp, Homo sapien
tttcacctgtatggcctctcatgtg

SEQ ID NO: 1633858 - DNA, 25 bp, Homo sapien
taaattaagcagtgagcactgagag

SEQ ID NO: 1633859 - DNA, 25 bp, Homo sapien
tgtatgtcctcgtatatgtatagta

SEQ ID NO: 1633860 - DNA, 25 bp, Homo sapien
catatgtacagtaagggctgagctt

SEQ ID NO: 1633861 - DNA, 25 bp, Homo sapien
tctctggtgtctaacaagatttgac

SEQ ID NO: 1633862 - DNA, 25 bp, Homo sapien
ctcaaatgaagggtaagggatgcaa

SEQ ID NO: 1633863 - DNA, 25 bp, Homo sapien
caagggatgcaattcgagggaaggc

SEQ ID NO: 1633864 - DNA, 25 bp, Homo sapien
ggcttttctacagttactacattca

SEQ ID NO: 1633865 - DNA, 25 bp, Homo sapien
gactgctccctactgtgaattttat

SEQ ID NO: 1633866 - DNA, 25 bp, Homo sapien
tccaaagtctgattgaagccttttc

SEQ ID NO: 1633867 - DNA, 25 bp, Homo sapien
aattctcagatgtctgatgaggtcc

SEQ ID NO: 1633868 - DNA, 25 bp, Homo sapien
ggaatttaacttcaacttgtctcaa

SEQ ID NO: 1633869 - DNA, 25 bp, Homo sapien
cttgtctcaaaagtctgtcctggtt

SEQ ID NO: 1633870 - DNA, 25 bp, Homo sapien
aaatcagagttcagaggaaatacat

SEQ ID NO: 1633871 - DNA, 25 bp, Homo sapien
tgatgctcatcaactccccatattt

SEQ ID NO: 1633872 - DNA, 25 bp, Homo sapien
catccagaagcattcacattaaagt

SEQ ID NO: 1633873 - DNA, 25 bp, Homo sapien
ccagggatacgtttcgataatagaa

SEQ ID NO: 1633874 - DNA, 25 bp, Homo sapien
cagaggtatgaaaattaagaggccg

SEQ ID NO: 1633875 - DNA, 25 bp, Homo sapien
ccactcattgcagtactaggtagta

SEQ ID NO: 1633876 - DNA, 25 bp, Homo sapien
tttctaagttacccagcttgtggta

SEQ ID NO: 1633877 - DNA, 25 bp, Homo sapien
ttatttctaagttacccagcttgtg

SEQ ID NO: 1633878 - DNA, 25 bp, Homo sapien
cttcgacgctggggttcaaaagatt

SEQ ID NO: 1633879 - DNA, 25 bp, Homo sapien
ccttcgacgctggggttcaaaagat

SEQ ID NO: 1633880 - DNA, 25 bp, Homo sapien
tatagagcacgagcagggtgtattt

SEQ ID NO: 1633881 - DNA, 25 bp, Homo sapien
gaaggctgttgcatctacatcggaa

SEQ ID NO: 1633882 - DNA, 25 bp, Homo sapien
caggcatgaaaaccaacactgatct

SEQ ID NO: 1633883 - DNA, 25 bp, Homo sapien
tctcgtgagcagtaggtatcaacag

SEQ ID NO: 1633884 - DNA, 25 bp, Homo sapien
tattttagagggatcaaccattcac

SEQ ID NO: 1633885 - DNA, 25 bp, Homo sapien
cacctgtctggttcccttccactaa

SEQ ID NO: 1633886 - DNA, 25 bp, Homo sapien
gattaatcattaataggccctgacc

SEQ ID NO: 1633887 - DNA, 25 bp, Homo sapien
gaaccactgtgccaacctctgaaaa

SEQ ID NO: 1633888 - DNA, 25 bp, Homo sapien
cttgccagtgtctccttaatacttc

SEQ ID NO: 1633889 - DNA, 25 bp, Homo sapien
tgccagtgtctccttaatacttctt

SEQ ID NO: 1633890 - DNA, 25 bp, Homo sapien
ttgccagtgtctccttaatacttct

SEQ ID NO: 1633891 - DNA, 25 bp, Homo sapien
gtcaaagggaagttacatagatttg

SEQ ID NO: 1633892 - DNA, 25 bp, Homo sapien
ggcatacatactaggaacaaagaac

SEQ ID NO: 1633893 - DNA, 25 bp, Homo sapien
gaagttacatagatttgggcataca

SEQ ID NO: 1633894 - DNA, 25 bp, Homo sapien
catagatttgggcatacatactagg

SEQ ID NO: 1633895 - DNA, 25 bp, Homo sapien
ctgagtgaagtcgatagccacatct

SEQ ID NO: 1633896 - DNA, 25 bp, Homo sapien
tagcatcacattccggtacagtttt

SEQ ID NO: 1633897 - DNA, 25 bp, Homo sapien
tgaagtcgatagccacatctttgaa

SEQ ID NO: 1633898 - DNA, 25 bp, Homo sapien
acactcccactcaatctgaagtcat

SEQ ID NO: 1633899 - DNA, 25 bp, Homo sapien
ctcccactcaatctgaagtcatcca

SEQ ID NO: 1633900 - DNA, 25 bp, Homo sapien
aacacactcccactcaatctgaagt

SEQ ID NO: 1633901 - DNA, 25 bp, Homo sapien
tcccactcaatctgaagtcatccat

SEQ ID NO: 1633902 - DNA, 25 bp, Homo sapien
gcctgaagataggctatttgaaaac

SEQ ID NO: 1633903 - DNA, 25 bp, Homo sapien
gtcactgaacaacagaattgatcaa

SEQ ID NO: 1633904 - DNA, 25 bp, Homo sapien
gaattagtgagcctgaagataggct

SEQ ID NO: 1633905 - DNA, 25 bp, Homo sapien
ccccagtctgttcagtcactgaaca

SEQ ID NO: 1633906 - DNA, 25 bp, Homo sapien
tcttctttctgggaagggatggggc

SEQ ID NO: 1633907 - DNA, 25 bp, Homo sapien
tcctcttctttctgggaagggatgg

SEQ ID NO: 1633908 - DNA, 25 bp, Homo sapien
tttctgggaagggatggggcctgca

SEQ ID NO: 1633909 - DNA, 25 bp, Homo sapien
tctttctgggaagggatggggcctg

SEQ ID NO: 1633910 - DNA, 25 bp, Homo sapien
gaaatgtccatgtgtactggagaag

SEQ ID NO: 1633911 - DNA, 25 bp, Homo sapien
gacccaatggttattcaagattatg

SEQ ID NO: 1633912 - DNA, 25 bp, Homo sapien
tatgatgcattatggagaaatgtcc

SEQ ID NO: 1633913 - DNA, 25 bp, Homo sapien
tataaagttgtgtagatggccaggc

SEQ ID NO: 1633914 - DNA, 25 bp, Homo sapien
cagatttaagattacttggttgccc

SEQ ID NO: 1633915 - DNA, 25 bp, Homo sapien
tcccaggtaagtaaagcttgagtcc

SEQ ID NO: 1633916 - DNA, 25 bp, Homo sapien
ctcagttctctgaagggtcctagaa

SEQ ID NO: 1633917 - DNA, 25 bp, Homo sapien
gcttatatggtgtctggcagagtcc

SEQ ID NO: 1633918 - DNA, 25 bp, Homo sapien
tagtagggggtttgtctcttgttca

SEQ ID NO: 1633919 - DNA, 25 bp, Homo sapien
tgtaagtaccatgatagtagggggt

SEQ ID NO: 1633920 - DNA, 25 bp, Homo sapien
tgcctgttacacagacagccttcaa

SEQ ID NO: 1633921 - DNA, 25 bp, Homo sapien
tattatccagcccacaaaaatgtaa

SEQ ID NO: 1633922 - DNA, 25 bp, Homo sapien
actgtcatgcacgtttgcacgcagg

SEQ ID NO: 1633923 - DNA, 25 bp, Homo sapien
tcattcaagatcccactgtcatgca

SEQ ID NO: 1633924 - DNA, 25 bp, Homo sapien
cattcaagatcccactgtcatgcac

SEQ ID NO: 1633925 - DNA, 25 bp, Homo sapien
attcaagatcccactgtcatgcacg

SEQ ID NO: 1633926 - DNA, 25 bp, Homo sapien
ctgaaagataaaagggaaagcgcct

SEQ ID NO: 1633927 - DNA, 25 bp, Homo sapien
gataaaagggaaagcgcctccacga

SEQ ID NO: 1633928 - DNA, 25 bp, Homo sapien
tgaaagataaaagggaaagcgcctc

SEQ ID NO: 1633929 - DNA, 25 bp, Homo sapien
agataaaagggaaagcgcctccacg

SEQ ID NO: 1633930 - DNA, 25 bp, Homo sapien
tcagagctagcggtttcccgaggac

SEQ ID NO: 1633931 - DNA, 25 bp, Homo sapien
agctagcggtttcccgaggactcac

SEQ ID NO: 1633932 - DNA, 25 bp, Homo sapien
cggcgctcagagctagcggtttccc

SEQ ID NO: 1633933 - DNA, 25 bp, Homo sapien
cgctcagagctagcggtttcccgag

SEQ ID NO: 1633934 - DNA, 25 bp, Homo sapien
ctgtcggtggctgagagcgccacaa

SEQ ID NO: 1633935 - DNA, 25 bp, Homo sapien
acacttaacgctgccaaagtggcag

SEQ ID NO: 1633936 - DNA, 25 bp, Homo sapien
gattccacacttaacgctgccaaag

SEQ ID NO: 1633937 - DNA, 25 bp, Homo sapien
acaagtctcggtccgttacaccagg

SEQ ID NO: 1633938 - DNA, 25 bp, Homo sapien
cgggactggcttcactgtttgcgcg

SEQ ID NO: 1633939 - DNA, 25 bp, Homo sapien
ggcgggactggcttcactgtttgcg

SEQ ID NO: 1633940 - DNA, 25 bp, Homo sapien
ccgggcgggactggcttcactgttt

SEQ ID NO: 1633941 - DNA, 25 bp, Homo sapien
ggactggcttcactgtttgcgcgtc

SEQ ID NO: 1633942 - DNA, 25 bp, Homo sapien
ggtgctgagaagaatcgaatcgttc

SEQ ID NO: 1633943 - DNA, 25 bp, Homo sapien
gcctaggttttgcacgagcggcctc

SEQ ID NO: 1633944 - DNA, 25 bp, Homo sapien
ccagctctgagagattgggagcgca

SEQ ID NO: 1633945 - DNA, 25 bp, Homo sapien
ggagctcagcctaggttttgcacga

SEQ ID NO: 1633946 - DNA, 25 bp, Homo sapien
ctgaggctagaatacagcggggtga

SEQ ID NO: 1633947 - DNA, 25 bp, Homo sapien
gggtgaaggtggtgagagctccagg

SEQ ID NO: 1633948 - DNA, 25 bp, Homo sapien
tggagccttaaggtcctgacagcgg

SEQ ID NO: 1633949 - DNA, 25 bp, Homo sapien
agtgaaggccgggtcagctggagcc

SEQ ID NO: 1633950 - DNA, 25 bp, Homo sapien
ttgtcagagacaatgtgcatgtatt

SEQ ID NO: 1633951 - DNA, 25 bp, Homo sapien
gacttctcgattgtgagtgtgacag

SEQ ID NO: 1633952 - DNA, 25 bp, Homo sapien
gacaatgtgcatgtatttgttcttt

SEQ ID NO: 1633953 - DNA, 25 bp, Homo sapien
ggacttctcgattgtgagtgtgaca

SEQ ID NO: 1633954 - DNA, 25 bp, Homo sapien
tgcggccaacctgcgattctcaact

SEQ ID NO: 1633955 - DNA, 25 bp, Homo sapien
gaatccggactttcgggctctctgg

SEQ ID NO: 1633956 - DNA, 25 bp, Homo sapien
caccagcccgtgtagtgtgacgctg

SEQ ID NO: 1633957 - DNA, 25 bp, Homo sapien
gtgttacaaaccctgcgcggagctg

SEQ ID NO: 1633958 - DNA, 25 bp, Homo sapien
gatgcgtacatctactggtctagac

SEQ ID NO: 1633959 - DNA, 25 bp, Homo sapien
tgatgaattcacttagatgcgtaca

SEQ ID NO: 1633960 - DNA, 25 bp, Homo sapien
gaagctgcaatctggaggtcaggaa

SEQ ID NO: 1633961 - DNA, 25 bp, Homo sapien
ccttggccatatgcgtggaatctga

SEQ ID NO: 1633962 - DNA, 25 bp, Homo sapien
ctcaggcgtaaagtgcctccagagt

SEQ ID NO: 1633963 - DNA, 25 bp, Homo sapien
gatgctccctcaggcgtaaagtgcc

SEQ ID NO: 1633964 - DNA, 25 bp, Homo sapien
cagtccaacccatctcaaattgagt

SEQ ID NO: 1633965 - DNA, 25 bp, Homo sapien
aaaattatttgtggatgctccctca

SEQ ID NO: 1633966 - DNA, 25 bp, Homo sapien
gaatgattacggacaggtcacctca

SEQ ID NO: 1633967 - DNA, 25 bp, Homo sapien
gaggcagaacgtttaattcccagca

SEQ ID NO: 1633968 - DNA, 25 bp, Homo sapien
acatgtctgctatcacactcctggg

SEQ ID NO: 1633969 - DNA, 25 bp, Homo sapien
gggtggccatgtgacgtctcaaaga

SEQ ID NO: 1633970 - DNA, 25 bp, Homo sapien
aggcaggcctgtagtgaatgctgtt

SEQ ID NO: 1633971 - DNA, 25 bp, Homo sapien
tgtgatatgcggagcactgcgctag

SEQ ID NO: 1633972 - DNA, 25 bp, Homo sapien
accacccctgagcaatcatatgcag

SEQ ID NO: 1633973 - DNA, 25 bp, Homo sapien
tatgcagaccgctggcttcttaact

SEQ ID NO: 1633974 - DNA, 25 bp, Homo sapien
tcccacgaggcaggctcgaagtgct

SEQ ID NO: 1633975 - DNA, 25 bp, Homo sapien
tcgaagtgctggagctttaacacct

SEQ ID NO: 1633976 - DNA, 25 bp, Homo sapien
agtgctggagctttaacacctctgg

SEQ ID NO: 1633977 - DNA, 25 bp, Homo sapien
agactcagcctaagactttcccacg

SEQ ID NO: 1633978 - DNA, 25 bp, Homo sapien
ggctgccggagacaaagaaagctca

SEQ ID NO: 1633979 - DNA, 25 bp, Homo sapien
caggctgccggagacaaagaaagct

SEQ ID NO: 1633980 - DNA, 25 bp, Homo sapien
aggctgccggagacaaagaaagctc

SEQ ID NO: 1633981 - DNA, 25 bp, Homo sapien
gacagcctcaaagtcgcaattgagt

SEQ ID NO: 1633982 - DNA, 25 bp, Homo sapien
cggcgtggcaggacgaccaatttca

SEQ ID NO: 1633983 - DNA, 25 bp, Homo sapien
gacgaccttataccgcggtgaggcg

SEQ ID NO: 1633984 - DNA, 25 bp, Homo sapien
tgcgcaccggccattcaggatggga

SEQ ID NO: 1633985 - DNA, 25 bp, Homo sapien
gcacacaggagaaagaccgtatcgt

SEQ ID NO: 1633986 - DNA, 25 bp, Homo sapien
tgggaaagctttctaccagaagcca

SEQ ID NO: 1633987 - DNA, 25 bp, Homo sapien
agtcacaccgcacagaacatcagag

SEQ ID NO: 1633988 - DNA, 25 bp, Homo sapien
tctgcagtgaatgcgggaaatcgtt

SEQ ID NO: 1633989 - DNA, 25 bp, Homo sapien
caatgagggaccacatatacagtag

SEQ ID NO: 1633990 - DNA, 25 bp, Homo sapien
ggcactgtgtgtacctaggctaatg

SEQ ID NO: 1633991 - DNA, 25 bp, Homo sapien
taaataatattacctgggaagcgga

SEQ ID NO: 1633992 - DNA, 25 bp, Homo sapien
acattttgatgatcctggcactgtg

SEQ ID NO: 1633993 - DNA, 25 bp, Homo sapien
gataggctgtaccatcaggctacat

SEQ ID NO: 1633994 - DNA, 25 bp, Homo sapien
gctccatccacggtaagtgctgtat

SEQ ID NO: 1633995 - DNA, 25 bp, Homo sapien
gtatacagtactgccctagccttca

SEQ ID NO: 1633996 - DNA, 25 bp, Homo sapien
tataattgtttacagtatccaggca

SEQ ID NO: 1633997 - DNA, 25 bp, Homo sapien
tagaacataagcaatgagcggccca

SEQ ID NO: 1633998 - DNA, 25 bp, Homo sapien
gcagtgtgtcccacttctaagaaag

SEQ ID NO: 1633999 - DNA, 25 bp, Homo sapien
agatgtaattgggacactctccaca

SEQ ID NO: 1634000 - DNA, 25 bp, Homo sapien
taagtgaagtgatgcatacaggcca

SEQ ID NO: 1634001 - DNA, 25 bp, Homo sapien
ctgggcttgccttagtcctcgttcc

SEQ ID NO: 1634002 - DNA, 25 bp, Homo sapien
cctgagcttggagacgcaggaagag

SEQ ID NO: 1634003 - DNA, 25 bp, Homo sapien
gcttgccttagtcctcgttcccgcc

SEQ ID NO: 1634004 - DNA, 25 bp, Homo sapien
tgagcttggagacgcaggaagagcc

SEQ ID NO: 1634005 - DNA, 25 bp, Homo sapien
caaacacgaggtcggctcaaggagg

SEQ ID NO: 1634006 - DNA, 25 bp, Homo sapien
cactgttttcctattgggctgcagc

SEQ ID NO: 1634007 - DNA, 25 bp, Homo sapien
cacaaaccgggaacgcgaaagtgca

SEQ ID NO: 1634008 - DNA, 25 bp, Homo sapien
gaggcactgaggtcacgacagtcag

SEQ ID NO: 1634009 - DNA, 25 bp, Homo sapien
gggatcgtcgccatggtcctgcgat

SEQ ID NO: 1634010 - DNA, 25 bp, Homo sapien
gggactcgcgtcacagtaaccgcca

SEQ ID NO: 1634011 - DNA, 25 bp, Homo sapien
gcgcgatcaccaggcgctagcgctg

SEQ ID NO: 1634012 - DNA, 25 bp, Homo sapien
ccccaggcgtctgtggcagtgcgtc

SEQ ID NO: 1634013 - DNA, 25 bp, Homo sapien
ctaggagtcgggcaaggccgaacct

SEQ ID NO: 1634014 - DNA, 25 bp, Homo sapien
taggagtcgggcaaggccgaacctg

SEQ ID NO: 1634015 - DNA, 25 bp, Homo sapien
aggagtcgggcaaggccgaacctgc

SEQ ID NO: 1634016 - DNA, 25 bp, Homo sapien
tcgtgcagtgaagcgcggtttctct

SEQ ID NO: 1634017 - DNA, 25 bp, Homo sapien
taaggatcccaaagatgcgtcgggc

SEQ ID NO: 1634018 - DNA, 25 bp, Homo sapien
gaagcaccacgtgatccctaaggat

SEQ ID NO: 1634019 - DNA, 25 bp, Homo sapien
tgggatttcgaggtacggcctgcct

SEQ ID NO: 1634020 - DNA, 25 bp, Homo sapien
gcagaacaggtgcagacagatgtca

SEQ ID NO: 1634021 - DNA, 25 bp, Homo sapien
gtcaaagaaactgtttccaacgcca

SEQ ID NO: 1634022 - DNA, 25 bp, Homo sapien
ttcacctgcagaacaggtgcagaca

SEQ ID NO: 1634023 - DNA, 25 bp, Homo sapien
tgtcaaagaaactgtttccaacgcc

SEQ ID NO: 1634024 - DNA, 25 bp, Homo sapien
gaagacacgagtgttcggagaacct

SEQ ID NO: 1634025 - DNA, 25 bp, Homo sapien
gaagactgtcgcctttctggccagg

SEQ ID NO: 1634026 - DNA, 25 bp, Homo sapien
gagaacctttggaccgaagactgtc

SEQ ID NO: 1634027 - DNA, 25 bp, Homo sapien
cacgagtgttcggagaacctttgga

SEQ ID NO: 1634028 - DNA, 25 bp, Homo sapien
gacatgccataatactactgagttg

SEQ ID NO: 1634029 - DNA, 25 bp, Homo sapien
tgacacttcctgcttttgggaccgg

SEQ ID NO: 1634030 - DNA, 25 bp, Homo sapien
cataatttaggacgagaagcacgag

SEQ ID NO: 1634031 - DNA, 25 bp, Homo sapien
ggagaggtccagctaacccagtgat

SEQ ID NO: 1634032 - DNA, 25 bp, Homo sapien
gggacccatgtttctagttgggctc

SEQ ID NO: 1634033 - DNA, 25 bp, Homo sapien
aggatgatatcttgtacctgttggg

SEQ ID NO: 1634034 - DNA, 25 bp, Homo sapien
actatagacgaggtgaaggccggtc

SEQ ID NO: 1634035 - DNA, 25 bp, Homo sapien
actagaaggtatttgtacccagcct

SEQ ID NO: 1634036 - DNA, 25 bp, Homo sapien
gaaggtatttgtacccagcctggtg

SEQ ID NO: 1634037 - DNA, 25 bp, Homo sapien
taacgccttactgaccgacagaact

SEQ ID NO: 1634038 - DNA, 25 bp, Homo sapien
caaaggagcaactaaagcagtgctg

SEQ ID NO: 1634039 - DNA, 25 bp, Homo sapien
cataagtgctgaaagagttaacagt

SEQ ID NO: 1634040 - DNA, 25 bp, Homo sapien
attctgattagtgtacattcctccc

SEQ ID NO: 1634041 - DNA, 25 bp, Homo sapien
gcagtgctgcaaccacttttgtctg

SEQ ID NO: 1634042 - DNA, 25 bp, Homo sapien
gaggtcttgagttctgtgcaccaga

SEQ ID NO: 1634043 - DNA, 25 bp, Homo sapien
caaaaaatggaatgtagcctccgag

SEQ ID NO: 1634044 - DNA, 25 bp, Homo sapien
gcctccgagatctgggtctctaaaa

SEQ ID NO: 1634045 - DNA, 25 bp, Homo sapien
gatgaacagctatggtgacagctac

SEQ ID NO: 1634046 - DNA, 25 bp, Homo sapien
caaaaaacaacagccctaaagcaat

SEQ ID NO: 1634047 - DNA, 25 bp, Homo sapien
tcataaaatattcccaccatttgag

SEQ ID NO: 1634048 - DNA, 25 bp, Homo sapien
tatatatatggaactaccttggcca

SEQ ID NO: 1634049 - DNA, 25 bp, Homo sapien
tctgatgctcagaagtccttcatac

SEQ ID NO: 1634050 - DNA, 25 bp, Homo sapien
ttctgcatccatgttaatgtaggcc

SEQ ID NO: 1634051 - DNA, 25 bp, Homo sapien
ctagcgtttatagagatgttaagga

SEQ ID NO: 1634052 - DNA, 25 bp, Homo sapien
cagttaggatatggtgaaatggaga

SEQ ID NO: 1634053 - DNA, 25 bp, Homo sapien
ctaagaatgagcagattctgagcag

SEQ ID NO: 1634054 - DNA, 25 bp, Homo sapien
attatgaagccttgtatgttgagta

SEQ ID NO: 1634055 - DNA, 25 bp, Homo sapien
taagttgtgaaggacatctaaagtc

SEQ ID NO: 1634056 - DNA, 25 bp, Homo sapien
caattatgaagccttgtatgttgag

SEQ ID NO: 1634057 - DNA, 25 bp, Homo sapien
gagtaagttgtgaaggacatctaaa

SEQ ID NO: 1634058 - DNA, 25 bp, Homo sapien
cacactggacacatgtatagggttt

SEQ ID NO: 1634059 - DNA, 25 bp, Homo sapien
gtgtgagccacgaataaaagccttc

SEQ ID NO: 1634060 - DNA, 25 bp, Homo sapien
atggatcctttgatgcagagtaagt

SEQ ID NO: 1634061 - DNA, 25 bp, Homo sapien
tgagccataaataaaggccttgtca

SEQ ID NO: 1634062 - DNA, 25 bp, Homo sapien
taaggcatgacaggtagctgaaacc

SEQ ID NO: 1634063 - DNA, 25 bp, Homo sapien
gagatcagaagtacgaccaaaggcc

SEQ ID NO: 1634064 - DNA, 25 bp, Homo sapien
tgtagcacgtacaaaggtcttccca

SEQ ID NO: 1634065 - DNA, 25 bp, Homo sapien
gatgttcattcagttgggaggcaca

SEQ ID NO: 1634066 - DNA, 25 bp, Homo sapien
ctttttggtcacacaactggattcc

SEQ ID NO: 1634067 - DNA, 25 bp, Homo sapien
actttttggtcacacaactggattc

SEQ ID NO: 1634068 - DNA, 25 bp, Homo sapien
aactttttggtcacacaactggatt

SEQ ID NO: 1634069 - DNA, 25 bp, Homo sapien
tttttggtcacacaactggattcca

SEQ ID NO: 1634070 - DNA, 25 bp, Homo sapien
ttcctgcttttgtttacaaggagaa

SEQ ID NO: 1634071 - DNA, 25 bp, Homo sapien
aaaagaaagcaaattcctgcttttg

SEQ ID NO: 1634072 - DNA, 25 bp, Homo sapien
gcaaattcctgcttttgtttacaag

SEQ ID NO: 1634073 - DNA, 25 bp, Homo sapien
gaaagcaaattcctgcttttgttta

SEQ ID NO: 1634074 - DNA, 25 bp, Homo sapien
tttgcaacaactttttggctcctaa

SEQ ID NO: 1634075 - DNA, 25 bp, Homo sapien
ttgcaacaactttttggctcctaag

SEQ ID NO: 1634076 - DNA, 25 bp, Homo sapien
caacagattgcatctaacctttaaa

SEQ ID NO: 1634077 - DNA, 25 bp, Homo sapien
aaggccaacagattgcatctaacct

SEQ ID NO: 1634078 - DNA, 25 bp, Homo sapien
tatattgttacatatgaaggcatga

SEQ ID NO: 1634079 - DNA, 25 bp, Homo sapien
tattgttacatatgaaggcatgagt

SEQ ID NO: 1634080 - DNA, 25 bp, Homo sapien
gttacatatgaaggcatgagttagc

SEQ ID NO: 1634081 - DNA, 25 bp, Homo sapien
tcagaaagctatattgttacatatg

SEQ ID NO: 1634082 - DNA, 25 bp, Homo sapien
ttacctttataccacccctccagca

SEQ ID NO: 1634083 - DNA, 25 bp, Homo sapien
tcaagcaaccgtcctttttgaccac

SEQ ID NO: 1634084 - DNA, 25 bp, Homo sapien
gaagttaccagatcatttaccttta

SEQ ID NO: 1634085 - DNA, 25 bp, Homo sapien
acaggcatgtgacataatgccctgc

SEQ ID NO: 1634086 - DNA, 25 bp, Homo sapien
tatttggcttagggactgcacatac

SEQ ID NO: 1634087 - DNA, 25 bp, Homo sapien
atttggcttagggactgcacataca

SEQ ID NO: 1634088 - DNA, 25 bp, Homo sapien
tttggcttagggactgcacatacag

SEQ ID NO: 1634089 - DNA, 25 bp, Homo sapien
atctagtccattggcatcaaagaag

SEQ ID NO: 1634090 - DNA, 25 bp, Homo sapien
gattcaaatctagtccattggcatc

SEQ ID NO: 1634091 - DNA, 25 bp, Homo sapien
aagggagacactgacaggaagtgac

SEQ ID NO: 1634092 - DNA, 25 bp, Homo sapien
tcccagattcaaatctagtccattg

SEQ ID NO: 1634093 - DNA, 25 bp, Homo sapien
ccaatgagatcaggttgctgtagtt

SEQ ID NO: 1634094 - DNA, 25 bp, Homo sapien
atccctgtacaagtccctctgagca

SEQ ID NO: 1634095 - DNA, 25 bp, Homo sapien
attcctcctgagagaagtcaatggc

SEQ ID NO: 1634096 - DNA, 25 bp, Homo sapien
ggccacatccctgaaagtcaccaac

SEQ ID NO: 1634097 - DNA, 25 bp, Homo sapien
ttctcctggaggtgtgcaaagtcca

SEQ ID NO: 1634098 - DNA, 25 bp, Homo sapien
ggtcttcttcctaagacacttccag

SEQ ID NO: 1634099 - DNA, 25 bp, Homo sapien
tctagaaagggattagtcttcccca

SEQ ID NO: 1634100 - DNA, 25 bp, Homo sapien
gaataggacatctttaacagtggtc

SEQ ID NO: 1634101 - DNA, 25 bp, Homo sapien
cagggctgtcaagctagaataggac

SEQ ID NO: 1634102 - DNA, 25 bp, Homo sapien
gcttaatgatgtccgtgtcacacga

SEQ ID NO: 1634103 - DNA, 25 bp, Homo sapien
gtgtcacacgaggagtactgcggcc

SEQ ID NO: 1634104 - DNA, 25 bp, Homo sapien
tctcagctggcttaatgatgtccgt

SEQ ID NO: 1634105 - DNA, 25 bp, Homo sapien
gcagcagctgtaaccgcacgattct

SEQ ID NO: 1634106 - DNA, 25 bp, Homo sapien
tttcgatgaagcaacccaaaagctg

SEQ ID NO: 1634107 - DNA, 25 bp, Homo sapien
tccagggcggaggaacactactagt

SEQ ID NO: 1634108 - DNA, 25 bp, Homo sapien
aagtaattagccagagcaccgtccc

SEQ ID NO: 1634109 - DNA, 25 bp, Homo sapien
cataaattcggtgcggaggaacaca

SEQ ID NO: 1634110 - DNA, 25 bp, Homo sapien
gctccgtgcgtcaagacataacagc

SEQ ID NO: 1634111 - DNA, 25 bp, Homo sapien
cgtcaagacataacagcgtaagtgt

SEQ ID NO: 1634112 - DNA, 25 bp, Homo sapien
ctggccggcgcagacaagctccgtg

SEQ ID NO: 1634113 - DNA, 25 bp, Homo sapien
ggcgcagacaagctccgtgcgtcaa

SEQ ID NO: 1634114 - DNA, 25 bp, Homo sapien
gtttgcaaggataggtgtttcacaa

SEQ ID NO: 1634115 - DNA, 25 bp, Homo sapien
caaggataggtgtttcacaatggaa

SEQ ID NO: 1634116 - DNA, 25 bp, Homo sapien
gcaaggataggtgtttcacaatgga

SEQ ID NO: 1634117 - DNA, 25 bp, Homo sapien
ttgcaaggataggtgtttcacaatg

SEQ ID NO: 1634118 - DNA, 25 bp, Homo sapien
gaaagtacaggtttcctgtatactc

SEQ ID NO: 1634119 - DNA, 25 bp, Homo sapien
agcagaaagtacaggtttcctgtat

SEQ ID NO: 1634120 - DNA, 25 bp, Homo sapien
ctccccaactaccaacaatccacat

SEQ ID NO: 1634121 - DNA, 25 bp, Homo sapien
tacaggtttcctgtatactctctgt

SEQ ID NO: 1634122 - DNA, 25 bp, Homo sapien
ttggcctagtcatccctctctccac

SEQ ID NO: 1634123 - DNA, 25 bp, Homo sapien
ctcaacatctttttgtgatggctta

SEQ ID NO: 1634124 - DNA, 25 bp, Homo sapien
ttcctatgttgaaacacgaatccca

SEQ ID NO: 1634125 - DNA, 25 bp, Homo sapien
tgaaacacgaatcccaaggtgatgg

SEQ ID NO: 1634126 - DNA, 25 bp, Homo sapien
tgtgttcccgtaacaattcctatgt

SEQ ID NO: 1634127 - DNA, 25 bp, Homo sapien
ttgtgttcccgtaacaattcctatg

SEQ ID NO: 1634128 - DNA, 25 bp, Homo sapien
acatttttttgcgataccatttgag

SEQ ID NO: 1634129 - DNA, 25 bp, Homo sapien
acacagaaacatagaatgcattcta

SEQ ID NO: 1634130 - DNA, 25 bp, Homo sapien
tcattttgcccctaaatcagtttgt

SEQ ID NO: 1634131 - DNA, 25 bp, Homo sapien
tttttgcgataccatttgagagtta

SEQ ID NO: 1634132 - DNA, 25 bp, Homo sapien
ctcaagctggctgatacttaaggaa

SEQ ID NO: 1634133 - DNA, 25 bp, Homo sapien
cagcttgagtcagagtgagatcttg

SEQ ID NO: 1634134 - DNA, 25 bp, Homo sapien
ataccccagcttgagtcagagtgag

SEQ ID NO: 1634135 - DNA, 25 bp, Homo sapien
gctggctgatacttaaggaaaatag

SEQ ID NO: 1634136 - DNA, 25 bp, Homo sapien
tatcccaggaactgcactgaaggag

SEQ ID NO: 1634137 - DNA, 25 bp, Homo sapien
tcaaggagctggttatgtgtgccca

SEQ ID NO: 1634138 - DNA, 25 bp, Homo sapien
catactcaaggagtgtatcccagga

SEQ ID NO: 1634139 - DNA, 25 bp, Homo sapien
tgaaggaggcttatccacacctgga

SEQ ID NO: 1634140 - DNA, 25 bp, Homo sapien
tgctgcccgcaggtcctacctccag

SEQ ID NO: 1634141 - DNA, 25 bp, Homo sapien
gtattgctgcccgcaggtcctacct

SEQ ID NO: 1634142 - DNA, 25 bp, Homo sapien
tttctccgagagggggatatgtcag

SEQ ID NO: 1634143 - DNA, 25 bp, Homo sapien
gtgtttctccgagagggggatatgt

SEQ ID NO: 1634144 - DNA, 25 bp, Homo sapien
taaagctggatggatctggtccaag

SEQ ID NO: 1634145 - DNA, 25 bp, Homo sapien
ggtgaaatcaccgaagtccaactga

SEQ ID NO: 1634146 - DNA, 25 bp, Homo sapien
catcaagcactagtgtttcctggga

SEQ ID NO: 1634147 - DNA, 25 bp, Homo sapien
tgaattgagatgatactgggccaga

SEQ ID NO: 1634148 - DNA, 25 bp, Homo sapien
aaacatatgaagtgagagtcgggca

SEQ ID NO: 1634149 - DNA, 25 bp, Homo sapien
tgccagcgctgacaatagaaatacg

SEQ ID NO: 1634150 - DNA, 25 bp, Homo sapien
gaaagcgtatcttctaaccgtctta

SEQ ID NO: 1634151 - DNA, 25 bp, Homo sapien
tcaacaggttgctagtgactaccat

SEQ ID NO: 1634152 - DNA, 25 bp, Homo sapien
tgtggacctacattttaacttcctg

SEQ ID NO: 1634153 - DNA, 25 bp, Homo sapien
taatatagagatagagaggtcaact

SEQ ID NO: 1634154 - DNA, 25 bp, Homo sapien
aaaaaaggtgcataccatgggtact

SEQ ID NO: 1634155 - DNA, 25 bp, Homo sapien
tattccaatcccaatgtgtagagct

SEQ ID NO: 1634156 - DNA, 25 bp, Homo sapien
tgaagtggttccctagcaaccttcg

SEQ ID NO: 1634157 - DNA, 25 bp, Homo sapien
tactgtagcacattaggaggcacgt

SEQ ID NO: 1634158 - DNA, 25 bp, Homo sapien
tgtctcaagtctgtcaatacctagg

SEQ ID NO: 1634159 - DNA, 25 bp, Homo sapien
tcaacctgtacagagaatcatgcct

SEQ ID NO: 1634160 - DNA, 25 bp, Homo sapien
tgtgaatgttgtctaaatgcctttt

SEQ ID NO: 1634161 - DNA, 25 bp, Homo sapien
taagttacattatgaattcgctgat

SEQ ID NO: 1634162 - DNA, 25 bp, Homo sapien
gtgaaagcagtctaaaagtcttctc

SEQ ID NO: 1634163 - DNA, 25 bp, Homo sapien
cgctgatggtaagtaagatgtgaat

SEQ ID NO: 1634164 - DNA, 25 bp, Homo sapien
tctgatgtcgactgaggtgggcaca

SEQ ID NO: 1634165 - DNA, 25 bp, Homo sapien
tgtactacacagaaaggcctgacca

SEQ ID NO: 1634166 - DNA, 25 bp, Homo sapien
tgatggagagtaagttgctgccgca

SEQ ID NO: 1634167 - DNA, 25 bp, Homo sapien
gatgtactcgaaggtctgagccaca

SEQ ID NO: 1634168 - DNA, 25 bp, Homo sapien
tttttgtcacttgcctgaaacacac

SEQ ID NO: 1634169 - DNA, 25 bp, Homo sapien
ttcagaggtggtttttgtcacttgc

SEQ ID NO: 1634170 - DNA, 25 bp, Homo sapien
tttcagaggtggtttttgtcacttg

SEQ ID NO: 1634171 - DNA, 25 bp, Homo sapien
ccactgagataagttcatttcataa

SEQ ID NO: 1634172 - DNA, 25 bp, Homo sapien
taccttccactgagataagttcatt

SEQ ID NO: 1634173 - DNA, 25 bp, Homo sapien
ttagtgtcatatctggattccaaat

SEQ ID NO: 1634174 - DNA, 25 bp, Homo sapien
tgaaataactttttagtgtcatatc

SEQ ID NO: 1634175 - DNA, 25 bp, Homo sapien
tgaccacaaaattgtacttctgaaa

SEQ ID NO: 1634176 - DNA, 25 bp, Homo sapien
aaccctatgaccacaaaattgtact

SEQ ID NO: 1634177 - DNA, 25 bp, Homo sapien
aaaattaacactgatctaatactgc

SEQ ID NO: 1634178 - DNA, 25 bp, Homo sapien
tctaatactgcataatccatactga

SEQ ID NO: 1634179 - DNA, 25 bp, Homo sapien
cttgttccaatagggtgatcacatc

SEQ ID NO: 1634180 - DNA, 25 bp, Homo sapien
tgttccaatagggtgatcacatctg

SEQ ID NO: 1634181 - DNA, 25 bp, Homo sapien
tccaatagggtgatcacatctggct

SEQ ID NO: 1634182 - DNA, 25 bp, Homo sapien
cccttgttccaatagggtgatcaca

SEQ ID NO: 1634183 - DNA, 25 bp, Homo sapien
tctcagacgtgaaaaagggataaca

SEQ ID NO: 1634184 - DNA, 25 bp, Homo sapien
aatttaaacttacacaggctctgtc

SEQ ID NO: 1634185 - DNA, 25 bp, Homo sapien
gcctctctttcccatgtcagtagag

SEQ ID NO: 1634186 - DNA, 25 bp, Homo sapien
catagagttacttcaggatcacaag

SEQ ID NO: 1634187 - DNA, 25 bp, Homo sapien
tatgtagagccagacacctctgtct

SEQ ID NO: 1634188 - DNA, 25 bp, Homo sapien
catggaccatccatagcagtatgaa

SEQ ID NO: 1634189 - DNA, 25 bp, Homo sapien
taacaaactgtcaattcaacccagc

SEQ ID NO: 1634190 - DNA, 25 bp, Homo sapien
caatggttttgccatgagtgtctaa

SEQ ID NO: 1634191 - DNA, 25 bp, Homo sapien
cagtcctgtgaatgtctaaattatc

SEQ ID NO: 1634192 - DNA, 25 bp, Homo sapien
aaacaaagacagcccagaaattcag

SEQ ID NO: 1634193 - DNA, 25 bp, Homo sapien
aacaaagacagcccagaaattcagt

SEQ ID NO: 1634194 - DNA, 25 bp, Homo sapien
acaaagacagcccagaaattcagtc

SEQ ID NO: 1634195 - DNA, 25 bp, Homo sapien
tcctctgatatgagttcaggcattc

SEQ ID NO: 1634196 - DNA, 25 bp, Homo sapien
tacaaattcctctgatatgagttca

SEQ ID NO: 1634197 - DNA, 25 bp, Homo sapien
aattcctctgatatgagttcaggca

SEQ ID NO: 1634198 - DNA, 25 bp, Homo sapien
caaattcctctgatatgagttcagg

SEQ ID NO: 1634199 - DNA, 25 bp, Homo sapien
tctgctctagacagataaggagcac

SEQ ID NO: 1634200 - DNA, 25 bp, Homo sapien
gctgaatgatttggtcaatgcacac

SEQ ID NO: 1634201 - DNA, 25 bp, Homo sapien
tactggtacaatttggctgtgtccc

SEQ ID NO: 1634202 - DNA, 25 bp, Homo sapien
taaggagcacacaagagatgctgaa

SEQ ID NO: 1634203 - DNA, 25 bp, Homo sapien
gaagcagggtccacagacaccagag

SEQ ID NO: 1634204 - DNA, 25 bp, Homo sapien
ctcaaggttcatgtacttcagaagc

SEQ ID NO: 1634205 - DNA, 25 bp, Homo sapien
tcaattttcctcaaggttcatgtac

SEQ ID NO: 1634206 - DNA, 25 bp, Homo sapien
tttcctcaaggttcatgtacttcag

SEQ ID NO: 1634207 - DNA, 25 bp, Homo sapien
agagcagcagcgattcgtttctcct

SEQ ID NO: 1634208 - DNA, 25 bp, Homo sapien
cagcagcgattcgtttctccttctc

SEQ ID NO: 1634209 - DNA, 25 bp, Homo sapien
gagcagcagcgattcgtttctcctt

SEQ ID NO: 1634210 - DNA, 25 bp, Homo sapien
gcagcagcgattcgtttctccttct

SEQ ID NO: 1634211 - DNA, 25 bp, Homo sapien
ttgactcgattggaacccaccctcc

SEQ ID NO: 1634212 - DNA, 25 bp, Homo sapien
gattggaacccaccctccacgcttc

SEQ ID NO: 1634213 - DNA, 25 bp, Homo sapien
tccacgcttccctggccccaactaa

SEQ ID NO: 1634214 - DNA, 25 bp, Homo sapien
actcgattggaacccaccctccacg

SEQ ID NO: 1634215 - DNA, 25 bp, Homo sapien
tacgctgtagttccgcacccggttg

SEQ ID NO: 1634216 - DNA, 25 bp, Homo sapien
ctgggttcgcagctccgggtacgct

SEQ ID NO: 1634217 - DNA, 25 bp, Homo sapien
cagtcacccgcgtctgggttcgcag

SEQ ID NO: 1634218 - DNA, 25 bp, Homo sapien
tccgggtacgctgtagttccgcacc

SEQ ID NO: 1634219 - DNA, 25 bp, Homo sapien
tcttttcggaactgtccagcgtgtc

SEQ ID NO: 1634220 - DNA, 25 bp, Homo sapien
tgtgtcttttcggaactgtccagcg

SEQ ID NO: 1634221 - DNA, 25 bp, Homo sapien
ttttcggaactgtccagcgtgtcct

SEQ ID NO: 1634222 - DNA, 25 bp, Homo sapien
tgtcttttcggaactgtccagcgtg

SEQ ID NO: 1634223 - DNA, 25 bp, Homo sapien
cccagcgttttgcaggggaccttca

SEQ ID NO: 1634224 - DNA, 25 bp, Homo sapien
aatctaggtcccagcgttttgcagg

SEQ ID NO: 1634225 - DNA, 25 bp, Homo sapien
atctaggtcccagcgttttgcaggg

SEQ ID NO: 1634226 - DNA, 25 bp, Homo sapien
cgttttgcaggggaccttcatcctg

SEQ ID NO: 1634227 - DNA, 25 bp, Homo sapien
cttgggccttttcgctacggccgag

SEQ ID NO: 1634228 - DNA, 25 bp, Homo sapien
tgggccttttcgctacggccgagcc

SEQ ID NO: 1634229 - DNA, 25 bp, Homo sapien
ctcttgggccttttcgctacggccg

SEQ ID NO: 1634230 - DNA, 25 bp, Homo sapien
gccttttcgctacggccgagcctaa

SEQ ID NO: 1634231 - DNA, 25 bp, Homo sapien
acctggtccggcacagttactaccg

SEQ ID NO: 1634232 - DNA, 25 bp, Homo sapien
tttccctcagaaaagcagcggccac

SEQ ID NO: 1634233 - DNA, 25 bp, Homo sapien
aaaaagcacaccggcctgaggctcc

SEQ ID NO: 1634234 - DNA, 25 bp, Homo sapien
gcagaagctcagtcccgggaaaaaa

SEQ ID NO: 1634235 - DNA, 25 bp, Homo sapien
tgtctccgtcgcgaatgcgctagcg

SEQ ID NO: 1634236 - DNA, 25 bp, Homo sapien
tctacctgtaatggccgccccgtga

SEQ ID NO: 1634237 - DNA, 25 bp, Homo sapien
ccagaatacgggagagcgcctgtct

SEQ ID NO: 1634238 - DNA, 25 bp, Homo sapien
tcatttggttctcggctcggagaca

SEQ ID NO: 1634239 - DNA, 25 bp, Homo sapien
tttggaaatcggcttctgcctcgag

SEQ ID NO: 1634240 - DNA, 25 bp, Homo sapien
gaaatcggcttctgcctcgagtgcg

SEQ ID NO: 1634241 - DNA, 25 bp, Homo sapien
atcggcttctgcctcgagtgcgcaa

SEQ ID NO: 1634242 - DNA, 25 bp, Homo sapien
ttctgcctcgagtgcgcaagcgcgc

SEQ ID NO: 1634243 - DNA, 25 bp, Homo sapien
ctgctgcgtgcgcgtgtgccgttct

SEQ ID NO: 1634244 - DNA, 25 bp, Homo sapien
gggctgctgcgtgcgcgtgtgccgt

SEQ ID NO: 1634245 - DNA, 25 bp, Homo sapien
tagtgtttccgtgcacggggctgct

SEQ ID NO: 1634246 - DNA, 25 bp, Homo sapien
tggccgctggcggagtagtgtttcc

SEQ ID NO: 1634247 - DNA, 25 bp, Homo sapien
ctgactctgacgctggctgtagcgg

SEQ ID NO: 1634248 - DNA, 25 bp, Homo sapien
gatggtgccgcagagaaggctgcgc

SEQ ID NO: 1634249 - DNA, 25 bp, Homo sapien
cgcggtggtgcctgactctgacgct

SEQ ID NO: 1634250 - DNA, 25 bp, Homo sapien
gggattaggatggtgccgcagagaa

SEQ ID NO: 1634251 - DNA, 25 bp, Homo sapien
ctgacatcggatctgtgactgtggc

SEQ ID NO: 1634252 - DNA, 25 bp, Homo sapien
ggatctgtgactgtggctctgcctc

SEQ ID NO: 1634253 - DNA, 25 bp, Homo sapien
gacatcggatctgtgactgtggctc

SEQ ID NO: 1634254 - DNA, 25 bp, Homo sapien
atctgtgactgtggctctgcctcat

SEQ ID NO: 1634255 - DNA, 25 bp, Homo sapien
tctgatagggcagcgcttctggttc

SEQ ID NO: 1634256 - DNA, 25 bp, Homo sapien
ttatctgcatctggcccttgtgtgc

SEQ ID NO: 1634257 - DNA, 25 bp, Homo sapien
atttccagaatccttctgatagggc

SEQ ID NO: 1634258 - DNA, 25 bp, Homo sapien
tgtgggtccctatgaaactgagtgt

SEQ ID NO: 1634259 - DNA, 25 bp, Homo sapien
tctttagttgaaagatcagcctcat

SEQ ID NO: 1634260 - DNA, 25 bp, Homo sapien
tcttggatagtaagtttctttgatc

SEQ ID NO: 1634261 - DNA, 25 bp, Homo sapien
cctggatgaactcttggataaattc

SEQ ID NO: 1634262 - DNA, 25 bp, Homo sapien
tctccaagcattcttggatagtaag

SEQ ID NO: 1634263 - DNA, 25 bp, Homo sapien
tacttccctgaaatgtgtggtaatc

SEQ ID NO: 1634264 - DNA, 25 bp, Homo sapien
taaaacctctaatctctcagagggc

SEQ ID NO: 1634265 - DNA, 25 bp, Homo sapien
gacttcagagccagccgtttcattg

SEQ ID NO: 1634266 - DNA, 25 bp, Homo sapien
ggtaatccttgcctctagtcatgga

SEQ ID NO: 1634267 - DNA, 25 bp, Homo sapien
gctttgcttcaattactacagggtt

SEQ ID NO: 1634268 - DNA, 25 bp, Homo sapien
tttgcttcaattactacagggttgc

SEQ ID NO: 1634269 - DNA, 25 bp, Homo sapien
tcactctgacgcatcagacatctgc

SEQ ID NO: 1634270 - DNA, 25 bp, Homo sapien
ctgctttgcttcaattactacaggg

SEQ ID NO: 1634271 - DNA, 25 bp, Homo sapien
tgtgtgagtgctggtttcttctaca

SEQ ID NO: 1634272 - DNA, 25 bp, Homo sapien
taaacagagtcctggtgtgtgagtg

SEQ ID NO: 1634273 - DNA, 25 bp, Homo sapien
ctacagtgatccgtcccaggactgc

SEQ ID NO: 1634274 - DNA, 25 bp, Homo sapien
cttctacagtgatccgtcccaggac

SEQ ID NO: 1634275 - DNA, 25 bp, Homo sapien
gggacttggtggtgtggaagcagtt

SEQ ID NO: 1634276 - DNA, 25 bp, Homo sapien
taggagaggtgttgcctgtgctggg

SEQ ID NO: 1634277 - DNA, 25 bp, Homo sapien
acttggtggtgtggaagcagttggg

SEQ ID NO: 1634278 - DNA, 25 bp, Homo sapien
ctaggagaggtgttgcctgtgctgg

SEQ ID NO: 1634279 - DNA, 25 bp, Homo sapien
cagttgcaggggtgccataagcagc

SEQ ID NO: 1634280 - DNA, 25 bp, Homo sapien
ccctttcccaggttgttggtgatgg

SEQ ID NO: 1634281 - DNA, 25 bp, Homo sapien
cctggcaagagtctccggtccagtt

SEQ ID NO: 1634282 - DNA, 25 bp, Homo sapien
gggtgccataagcagcgaacagcct

SEQ ID NO: 1634283 - DNA, 25 bp, Homo sapien
gacttacttgatactgagttaactg

SEQ ID NO: 1634284 - DNA, 25 bp, Homo sapien
tccagtgaaatttctctgatgttcc

SEQ ID NO: 1634285 - DNA, 25 bp, Homo sapien
gaaagttatgaccaaagtctctgcc

SEQ ID NO: 1634286 - DNA, 25 bp, Homo sapien
ttcattaagcttatcactggcatgg

SEQ ID NO: 1634287 - DNA, 25 bp, Homo sapien
tctacattcacaaagtcaacatgat

SEQ ID NO: 1634288 - DNA, 25 bp, Homo sapien
gggctttcattaggcttctcacctg

SEQ ID NO: 1634289 - DNA, 25 bp, Homo sapien
gacgtggaaactggtgaaagtataa

SEQ ID NO: 1634290 - DNA, 25 bp, Homo sapien
gatctttacacatatcgggctttca

SEQ ID NO: 1634291 - DNA, 25 bp, Homo sapien
tgaaagacaagaagaggccttctca

SEQ ID NO: 1634292 - DNA, 25 bp, Homo sapien
aagacaagaagaggccttctcacat

SEQ ID NO: 1634293 - DNA, 25 bp, Homo sapien
aaagacaagaagaggccttctcaca

SEQ ID NO: 1634294 - DNA, 25 bp, Homo sapien
gaaagacaagaagaggccttctcac

SEQ ID NO: 1634295 - DNA, 25 bp, Homo sapien
atgttgagtaagatgcgccctctgc

SEQ ID NO: 1634296 - DNA, 25 bp, Homo sapien
gttgagtaagatgcgccctctgcct

SEQ ID NO: 1634297 - DNA, 25 bp, Homo sapien
gtaagatgcgccctctgcctaaagg

SEQ ID NO: 1634298 - DNA, 25 bp, Homo sapien
gatgcgccctctgcctaaaggcctt

SEQ ID NO: 1634299 - DNA, 25 bp, Homo sapien
gatgggctctctgcttaaaggcctt

SEQ ID NO: 1634300 - DNA, 25 bp, Homo sapien
tctctgatttctattaaggtaggaa

SEQ ID NO: 1634301 - DNA, 25 bp, Homo sapien
ttgaacaatcaataaaggattttct

SEQ ID NO: 1634302 - DNA, 25 bp, Homo sapien
ttgatgttgactaagatgggctctc

SEQ ID NO: 1634303 - DNA, 25 bp, Homo sapien
tgaaagccaagtaaaggtctttaca

SEQ ID NO: 1634304 - DNA, 25 bp, Homo sapien
gatgtttattcaagtttgaaagcca

SEQ ID NO: 1634305 - DNA, 25 bp, Homo sapien
attcaagtttgaaagccaagtaaag

SEQ ID NO: 1634306 - DNA, 25 bp, Homo sapien
tgtttattcaagtttgaaagccaag

SEQ ID NO: 1634307 - DNA, 25 bp, Homo sapien
gtttcacactggtatgaattctttg

SEQ ID NO: 1634308 - DNA, 25 bp, Homo sapien
gatgttgagtaagagttggataatt

SEQ ID NO: 1634309 - DNA, 25 bp, Homo sapien
gttgagtaagagttggataattatt

SEQ ID NO: 1634310 - DNA, 25 bp, Homo sapien
gagtaagagttggataattattaaa

SEQ ID NO: 1634311 - DNA, 25 bp, Homo sapien
tcaaaaaaacaaatgaaggcattcc

SEQ ID NO: 1634312 - DNA, 25 bp, Homo sapien
tcattacattcatagggtttctccc

SEQ ID NO: 1634313 - DNA, 25 bp, Homo sapien
aaaacaaatgaaggcattcccacat

SEQ ID NO: 1634314 - DNA, 25 bp, Homo sapien
aatcaaaaaaacaaatgaaggcatt

SEQ ID NO: 1634315 - DNA, 25 bp, Homo sapien
tgtgcattatgcttgaaggccttct

SEQ ID NO: 1634316 - DNA, 25 bp, Homo sapien
gtgcattatgcttgaaggccttctt

SEQ ID NO: 1634317 - DNA, 25 bp, Homo sapien
cattcataaggtttttcattagtat

SEQ ID NO: 1634318 - DNA, 25 bp, Homo sapien
taaggtttttcattagtatgtgttc

SEQ ID NO: 1634319 - DNA, 25 bp, Homo sapien
tcataaggtttttcattagtatgtg

SEQ ID NO: 1634320 - DNA, 25 bp, Homo sapien
acattcataaggtttttcattagta

SEQ ID NO: 1634321 - DNA, 25 bp, Homo sapien
gaacaagtgttggacaggagacaaa

SEQ ID NO: 1634322 - DNA, 25 bp, Homo sapien
tgcttatattcataagccttctcac

SEQ ID NO: 1634323 - DNA, 25 bp, Homo sapien
gaataagagctgaacaattgttaaa

SEQ ID NO: 1634324 - DNA, 25 bp, Homo sapien
tgaataagagctgaacaattgttaa

SEQ ID NO: 1634325 - DNA, 25 bp, Homo sapien
tggtgttgaataagagctgaacaat

SEQ ID NO: 1634326 - DNA, 25 bp, Homo sapien
taagagctgaacaattgttaaaagc

SEQ ID NO: 1634327 - DNA, 25 bp, Homo sapien
taaaatcagaaacacaagtgaaagc

SEQ ID NO: 1634328 - DNA, 25 bp, Homo sapien
aaatcagaaacacaagtgaaagcct

SEQ ID NO: 1634329 - DNA, 25 bp, Homo sapien
cagaaacacaagtgaaagccttccc

SEQ ID NO: 1634330 - DNA, 25 bp, Homo sapien
attaaaatcagaaacacaagtgaaa

SEQ ID NO: 1634331 - DNA, 25 bp, Homo sapien
tgagtaagtgttgagcaattattga

SEQ ID NO: 1634332 - DNA, 25 bp, Homo sapien
gttgagtaagatgtgcactttgcct

SEQ ID NO: 1634333 - DNA, 25 bp, Homo sapien
gagtaagtgttgagcaattattgaa

SEQ ID NO: 1634334 - DNA, 25 bp, Homo sapien
tgcactttgcctaaaagccttttta

SEQ ID NO: 1634335 - DNA, 25 bp, Homo sapien
gagcgattgttaaatgccttcccac

SEQ ID NO: 1634336 - DNA, 25 bp, Homo sapien
agttgagcgattgttaaatgccttc

SEQ ID NO: 1634337 - DNA, 25 bp, Homo sapien
gaataagagttgagcgattgttaaa

SEQ ID NO: 1634338 - DNA, 25 bp, Homo sapien
aagagttgagcgattgttaaatgcc

SEQ ID NO: 1634339 - DNA, 25 bp, Homo sapien
gtacattcgtaaagtctctcatcag

SEQ ID NO: 1634340 - DNA, 25 bp, Homo sapien
cattcgtaaagtctctcatcagtgt

SEQ ID NO: 1634341 - DNA, 25 bp, Homo sapien
ctgtacattcgtaaagtctctcatc

SEQ ID NO: 1634342 - DNA, 25 bp, Homo sapien
gaattttccgatgtctattaaatca

SEQ ID NO: 1634343 - DNA, 25 bp, Homo sapien
gttgaacaacagataaacactttcc

SEQ ID NO: 1634344 - DNA, 25 bp, Homo sapien
gaattcgattatgttgggtaaggtg

SEQ ID NO: 1634345 - DNA, 25 bp, Homo sapien
aagatgtgcactccgcctaaacgtc

SEQ ID NO: 1634346 - DNA, 25 bp, Homo sapien
ctaaagggctttccacatatctgac

SEQ ID NO: 1634347 - DNA, 25 bp, Homo sapien
tatttgatattgagttagttgaaag

SEQ ID NO: 1634348 - DNA, 25 bp, Homo sapien
ctgattagcatgacttatttgatat

SEQ ID NO: 1634349 - DNA, 25 bp, Homo sapien
tagcatgacttatttgatattgagt

SEQ ID NO: 1634350 - DNA, 25 bp, Homo sapien
catgacttatttgatattgagttag

SEQ ID NO: 1634351 - DNA, 25 bp, Homo sapien
tttaaatacattgcatttctttgca

SEQ ID NO: 1634352 - DNA, 25 bp, Homo sapien
ttaaatacattgcatttctttgcat

SEQ ID NO: 1634353 - DNA, 25 bp, Homo sapien
ctttaaatacattgcatttctttgc

SEQ ID NO: 1634354 - DNA, 25 bp, Homo sapien
tgtttcatatgatttgtgcaaaata

SEQ ID NO: 1634355 - DNA, 25 bp, Homo sapien
tttgtgcaaaatacagaggtgttcc

SEQ ID NO: 1634356 - DNA, 25 bp, Homo sapien
ttgtgcaaaatacagaggtgttccc

SEQ ID NO: 1634357 - DNA, 25 bp, Homo sapien
tcatatgatttgtgcaaaatacaga

SEQ ID NO: 1634358 - DNA, 25 bp, Homo sapien
atttcgtcaagcttgtcactgatat

SEQ ID NO: 1634359 - DNA, 25 bp, Homo sapien
tcgtcaagcttgtcactgatatgaa

SEQ ID NO: 1634360 - DNA, 25 bp, Homo sapien
ttcgtcaagcttgtcactgatatga

SEQ ID NO: 1634361 - DNA, 25 bp, Homo sapien
gtcaagcttgtcactgatatgaatt

SEQ ID NO: 1634362 - DNA, 25 bp, Homo sapien
gctggatgaattcggatattttttc

SEQ ID NO: 1634363 - DNA, 25 bp, Homo sapien
ggctggatgaattcggatatttttt

SEQ ID NO: 1634364 - DNA, 25 bp, Homo sapien
tcctgttgtctctcaaagagtcctt

SEQ ID NO: 1634365 - DNA, 25 bp, Homo sapien
aagtgccattcttaagagttaactc

SEQ ID NO: 1634366 - DNA, 25 bp, Homo sapien
tccttggtctcatatctagacagca

SEQ ID NO: 1634367 - DNA, 25 bp, Homo sapien
gaaatattcctctgtagtttcctgt

SEQ ID NO: 1634368 - DNA, 25 bp, Homo sapien
aatcactgatggcttagaaatggca

SEQ ID NO: 1634369 - DNA, 25 bp, Homo sapien
tcactgatggcttagaaatggcaag

SEQ ID NO: 1634370 - DNA, 25 bp, Homo sapien
taccaccctgttttcccagccatcc

SEQ ID NO: 1634371 - DNA, 25 bp, Homo sapien
ggaaatcactgatggcttagaaatg

SEQ ID NO: 1634372 - DNA, 25 bp, Homo sapien
actctcccttagagaaatctatagc

SEQ ID NO: 1634373 - DNA, 25 bp, Homo sapien
ttcccactctcccttagagaaatct

SEQ ID NO: 1634374 - DNA, 25 bp, Homo sapien
cccactctcccttagagaaatctat

SEQ ID NO: 1634375 - DNA, 25 bp, Homo sapien
cactctcccttagagaaatctatag

SEQ ID NO: 1634376 - DNA, 25 bp, Homo sapien
actgcaggcacataccaccatacct

SEQ ID NO: 1634377 - DNA, 25 bp, Homo sapien
agagatggggtcttgatagttgtcc

SEQ ID NO: 1634378 - DNA, 25 bp, Homo sapien
tggacttgacctcctgggctcaagt

SEQ ID NO: 1634379 - DNA, 25 bp, Homo sapien
ggtcttgatagttgtccaggctgga

SEQ ID NO: 1634380 - DNA, 25 bp, Homo sapien
tatgtaagtccaccctctgatgttc

SEQ ID NO: 1634381 - DNA, 25 bp, Homo sapien
tatcccatctaggtgtatgtaagtc

SEQ ID NO: 1634382 - DNA, 25 bp, Homo sapien
taaaattctatacaggctggtggcc

SEQ ID NO: 1634383 - DNA, 25 bp, Homo sapien
tatccctgttcttaggtgacgtctg

SEQ ID NO: 1634384 - DNA, 25 bp, Homo sapien
tggcttttacatccacaatagccat

SEQ ID NO: 1634385 - DNA, 25 bp, Homo sapien
tcagggcacctctggaaaaacacag

SEQ ID NO: 1634386 - DNA, 25 bp, Homo sapien
gctcctcagggcacctctggaaaaa

SEQ ID NO: 1634387 - DNA, 25 bp, Homo sapien
tcctcagggcacctctggaaaaaca

SEQ ID NO: 1634388 - DNA, 25 bp, Homo sapien
tgctcctcagggcacctctggaaaa

SEQ ID NO: 1634389 - DNA, 25 bp, Homo sapien
ttaggagaaaccagttttgtgtcaa

SEQ ID NO: 1634390 - DNA, 25 bp, Homo sapien
ggagaaaccagttttgtgtcaatat

SEQ ID NO: 1634391 - DNA, 25 bp, Homo sapien
gagaaaccagttttgtgtcaatata

SEQ ID NO: 1634392 - DNA, 25 bp, Homo sapien
taggagaaaccagttttgtgtcaat

SEQ ID NO: 1634393 - DNA, 25 bp, Homo sapien
aaaagtctccctttggctgggcaca

SEQ ID NO: 1634394 - DNA, 25 bp, Homo sapien
ccctttgcacccttcagtggctttt

SEQ ID NO: 1634395 - DNA, 25 bp, Homo sapien
caaactaggtacatggaccaaactc

SEQ ID NO: 1634396 - DNA, 25 bp, Homo sapien
ttagcaaactaggtacatggaccaa

SEQ ID NO: 1634397 - DNA, 25 bp, Homo sapien
ggtagtcaacggagcttcataaatt

SEQ ID NO: 1634398 - DNA, 25 bp, Homo sapien
accccaaattatgatctctccacgg

SEQ ID NO: 1634399 - DNA, 25 bp, Homo sapien
tccttaatccgaggcttctcaaatc

SEQ ID NO: 1634400 - DNA, 25 bp, Homo sapien
ataaattattccttaatccgaggct

SEQ ID NO: 1634401 - DNA, 25 bp, Homo sapien
ttcattcaggtgacgatccctcgcg

SEQ ID NO: 1634402 - DNA, 25 bp, Homo sapien
aaccgttaggaatcagtggctggac

SEQ ID NO: 1634403 - DNA, 25 bp, Homo sapien
gataagaggcggtgaatccgagact

SEQ ID NO: 1634404 - DNA, 25 bp, Homo sapien
gggatccgtgcgtcttctacagcca

SEQ ID NO: 1634405 - DNA, 25 bp, Homo sapien
tgagtccgcgcactcggaaaacaag

SEQ ID NO: 1634406 - DNA, 25 bp, Homo sapien
cataaactgtgacccgatgagtccg

SEQ ID NO: 1634407 - DNA, 25 bp, Homo sapien
tgtgccagcgactactaggtcaggg

SEQ ID NO: 1634408 - DNA, 25 bp, Homo sapien
gaaaacaagagaacgctcccacgtc

SEQ ID NO: 1634409 - DNA, 25 bp, Homo sapien
tgtgaatagggcagtcggaagacca

SEQ ID NO: 1634410 - DNA, 25 bp, Homo sapien
gctggtagcccggaatacatttccc

SEQ ID NO: 1634411 - DNA, 25 bp, Homo sapien
cgcctcccgactggaggacgcggta

SEQ ID NO: 1634412 - DNA, 25 bp, Homo sapien
acgcggtagcggagctgctcaaagc

SEQ ID NO: 1634413 - DNA, 25 bp, Homo sapien
gatgattgattggacccattcttcc

SEQ ID NO: 1634414 - DNA, 25 bp, Homo sapien
atgattgattggacccattcttcca

SEQ ID NO: 1634415 - DNA, 25 bp, Homo sapien
tgattgattggacccattcttccag

SEQ ID NO: 1634416 - DNA, 25 bp, Homo sapien
acttgtgcgtttgagatgtaaacca

SEQ ID NO: 1634417 - DNA, 25 bp, Homo sapien
cacttgtgcgtttgagatgtaaacc

SEQ ID NO: 1634418 - DNA, 25 bp, Homo sapien
acacttgtgcgtttgagatgtaaac

SEQ ID NO: 1634419 - DNA, 25 bp, Homo sapien
tgactctcctctcacagaatgcatt

SEQ ID NO: 1634420 - DNA, 25 bp, Homo sapien
taggttctttaagtcattactccag

SEQ ID NO: 1634421 - DNA, 25 bp, Homo sapien
tcagttacatattcgttttgtttaa

SEQ ID NO: 1634422 - DNA, 25 bp, Homo sapien
aaatttatcaatactctgactctcc

SEQ ID NO: 1634423 - DNA, 25 bp, Homo sapien
taatgtttattgaacgtaacagtat

SEQ ID NO: 1634424 - DNA, 25 bp, Homo sapien
aacagtatatttcatgtagtttccc

SEQ ID NO: 1634425 - DNA, 25 bp, Homo sapien
ttgcctcacggaggtgcaggtaggc

SEQ ID NO: 1634426 - DNA, 25 bp, Homo sapien
aaaggtggtgttacgaatcatcggg

SEQ ID NO: 1634427 - DNA, 25 bp, Homo sapien
acagctcgctctggccgtcccctgc

SEQ ID NO: 1634428 - DNA, 25 bp, Homo sapien
tggtatgcaatgtcttctgcagctt

SEQ ID NO: 1634429 - DNA, 25 bp, Homo sapien
ctggtatgcaatgtcttctgcagct

SEQ ID NO: 1634430 - DNA, 25 bp, Homo sapien
cctgtctgttaactccttcaagaag

SEQ ID NO: 1634431 - DNA, 25 bp, Homo sapien
gccacctgtctgttaactccttcaa

SEQ ID NO: 1634432 - DNA, 25 bp, Homo sapien
cacctgtctgttaactccttcaaga

SEQ ID NO: 1634433 - DNA, 25 bp, Homo sapien
ccacctgtctgttaactccttcaag

SEQ ID NO: 1634434 - DNA, 25 bp, Homo sapien
tgatgactggcgcactacgtggttg

SEQ ID NO: 1634435 - DNA, 25 bp, Homo sapien
caccagtgacttgaggatctccgtg

SEQ ID NO: 1634436 - DNA, 25 bp, Homo sapien
cgtggtaatgaacggcagcacacac

SEQ ID NO: 1634437 - DNA, 25 bp, Homo sapien
acactcatcgtagtcctctccaatg

SEQ ID NO: 1634438 - DNA, 25 bp, Homo sapien
catcatcgcttatatcaacagaggt

SEQ ID NO: 1634439 - DNA, 25 bp, Homo sapien
catttatatatgatccccagaaggg

SEQ ID NO: 1634440 - DNA, 25 bp, Homo sapien
gaatctgagttaacacaggtcatac

SEQ ID NO: 1634441 - DNA, 25 bp, Homo sapien
tatcatcccagctataggaagcaga

SEQ ID NO: 1634442 - DNA, 25 bp, Homo sapien
tagggatttccatcagcatgaacgc

SEQ ID NO: 1634443 - DNA, 25 bp, Homo sapien
ctctgatgtacttcaaggatggatc

SEQ ID NO: 1634444 - DNA, 25 bp, Homo sapien
ggatggatctaagcctaaaggacct

SEQ ID NO: 1634445 - DNA, 25 bp, Homo sapien
taaaggaccttctgcatttgttaca

SEQ ID NO: 1634446 - DNA, 25 bp, Homo sapien
taagttgtccagatacactaaaggc

SEQ ID NO: 1634447 - DNA, 25 bp, Homo sapien
ttgtggcatgacgaaaggccttgcc

SEQ ID NO: 1634448 - DNA, 25 bp, Homo sapien
cagcgctatgaatattctgatgggc

SEQ ID NO: 1634449 - DNA, 25 bp, Homo sapien
ggacttttcaccagcatgagttcgg

SEQ ID NO: 1634450 - DNA, 25 bp, Homo sapien
gaattctgttatgatgggcaaggtg

SEQ ID NO: 1634451 - DNA, 25 bp, Homo sapien
tatgaggcacaacgaaaggacttcc

SEQ ID NO: 1634452 - DNA, 25 bp, Homo sapien
aacactttcaaatgtatgaggtgca

SEQ ID NO: 1634453 - DNA, 25 bp, Homo sapien
aagggatgaattgagcctaaaggac

SEQ ID NO: 1634454 - DNA, 25 bp, Homo sapien
tagggtttctcaacatgaactttcc

SEQ ID NO: 1634455 - DNA, 25 bp, Homo sapien
catgagtgtttcctataaagctgca

SEQ ID NO: 1634456 - DNA, 25 bp, Homo sapien
gaattcttttatgacccacaaggtg

SEQ ID NO: 1634457 - DNA, 25 bp, Homo sapien
tctgatggagagtaacacatgagtg

SEQ ID NO: 1634458 - DNA, 25 bp, Homo sapien
tgctccaataaggtgattaaatctg

SEQ ID NO: 1634459 - DNA, 25 bp, Homo sapien
taaatctggcttagatacggaatgt

SEQ ID NO: 1634460 - DNA, 25 bp, Homo sapien
aaatctggcttagatacggaatgtc

SEQ ID NO: 1634461 - DNA, 25 bp, Homo sapien
ccaatgagactaagttgtcatagtt

SEQ ID NO: 1634462 - DNA, 25 bp, Homo sapien
caatgagactaagttgtcatagttc

SEQ ID NO: 1634463 - DNA, 25 bp, Homo sapien
aagaaaatggagtggatggccgggc

SEQ ID NO: 1634464 - DNA, 25 bp, Homo sapien
gaaaatggagtggatggccgggcgc

SEQ ID NO: 1634465 - DNA, 25 bp, Homo sapien
agagatgaagaccatcatggtcaac

SEQ ID NO: 1634466 - DNA, 25 bp, Homo sapien
gatgaagaccatcatggtcaacatg

SEQ ID NO: 1634467 - DNA, 25 bp, Homo sapien
ttcaatgccaatttccaccttatct

SEQ ID NO: 1634468 - DNA, 25 bp, Homo sapien
caatgccaatttccaccttatctag

SEQ ID NO: 1634469 - DNA, 25 bp, Homo sapien
tcaatgccaatttccaccttatcta

SEQ ID NO: 1634470 - DNA, 25 bp, Homo sapien
gtttgagactggcaagagttgatca

SEQ ID NO: 1634471 - DNA, 25 bp, Homo sapien
caagagttgatcagtccttggcgtt

SEQ ID NO: 1634472 - DNA, 25 bp, Homo sapien
ccttggcgtttctctaccagaagag

SEQ ID NO: 1634473 - DNA, 25 bp, Homo sapien
tttctctaccagaagagcaaagtca

SEQ ID NO: 1634474 - DNA, 25 bp, Homo sapien
gaatggatgatggtctcaatacagc

SEQ ID NO: 1634475 - DNA, 25 bp, Homo sapien
tagaattgtgtctccaacaacatgg

SEQ ID NO: 1634476 - DNA, 25 bp, Homo sapien
tgagaaatctcctctgtgaatggat

SEQ ID NO: 1634477 - DNA, 25 bp, Homo sapien
ccttcacgattattgtaagcacgga

SEQ ID NO: 1634478 - DNA, 25 bp, Homo sapien
tcacacaggcaagccggtcctgtcg

SEQ ID NO: 1634479 - DNA, 25 bp, Homo sapien
caggtaccggtgagaaatggagtcc

SEQ ID NO: 1634480 - DNA, 25 bp, Homo sapien
agaacagtcaggaccgcaggtaccg

SEQ ID NO: 1634481 - DNA, 25 bp, Homo sapien
agaaatacggcagcgaccacttgga

SEQ ID NO: 1634482 - DNA, 25 bp, Homo sapien
gtggccgccttgcctcgagtgcgca

SEQ ID NO: 1634483 - DNA, 25 bp, Homo sapien
tggccgccttgcctcgagtgcgcat

SEQ ID NO: 1634484 - DNA, 25 bp, Homo sapien
ccggagacttctgggagtggccgcc

SEQ ID NO: 1634485 - DNA, 25 bp, Homo sapien
agacttctgggagtggccgccttgc

SEQ ID NO: 1634486 - DNA, 25 bp, Homo sapien
ttcttcaatacatgacattatgttc

SEQ ID NO: 1634487 - DNA, 25 bp, Homo sapien
gagggtttgaagttccatcacattc

SEQ ID NO: 1634488 - DNA, 25 bp, Homo sapien
tcaatacatgacattatgttcttca

SEQ ID NO: 1634489 - DNA, 25 bp, Homo sapien
tcctatatgagggtttgaagttcca

SEQ ID NO: 1634490 - DNA, 25 bp, Homo sapien
aactgtttaaacaactaagacactg

SEQ ID NO: 1634491 - DNA, 25 bp, Homo sapien
tagagcatacttgcatacaacaaag

SEQ ID NO: 1634492 - DNA, 25 bp, Homo sapien
gaagttagccctaattatagagcat

SEQ ID NO: 1634493 - DNA, 25 bp, Homo sapien
aacaataatataccacagctaagca

SEQ ID NO: 1634494 - DNA, 25 bp, Homo sapien
ggttagagtgataatggcaacatcc

SEQ ID NO: 1634495 - DNA, 25 bp, Homo sapien
gcactttaaacagctactctccagg

SEQ ID NO: 1634496 - DNA, 25 bp, Homo sapien
tatagatacatcagctatgactgca

SEQ ID NO: 1634497 - DNA, 25 bp, Homo sapien
tgtattcataaatcagcaggttgag

SEQ ID NO: 1634498 - DNA, 25 bp, Homo sapien
aggcaggcgtggtgatgcgtgcctg

SEQ ID NO: 1634499 - DNA, 25 bp, Homo sapien
ttaggcaggcgtggtgatgcgtgcc

SEQ ID NO: 1634500 - DNA, 25 bp, Homo sapien
attaggcaggcgtggtgatgcgtgc

SEQ ID NO: 1634501 - DNA, 25 bp, Homo sapien
aaattaggcaggcgtggtgatgcgt

SEQ ID NO: 1634502 - DNA, 25 bp, Homo sapien
gcagcctatgctccgggttcaagtg

SEQ ID NO: 1634503 - DNA, 25 bp, Homo sapien
gatatgagcatgtagatcacaacga

SEQ ID NO: 1634504 - DNA, 25 bp, Homo sapien
tcacgctgacactacagaactttgg

SEQ ID NO: 1634505 - DNA, 25 bp, Homo sapien
cagtgcacgtcaatcttgtgagagg

SEQ ID NO: 1634506 - DNA, 25 bp, Homo sapien
taatgcgtgatgctccttagtttgg

SEQ ID NO: 1634507 - DNA, 25 bp, Homo sapien
cagtgatgacaggtaaggcatgtgc

SEQ ID NO: 1634508 - DNA, 25 bp, Homo sapien
caacaatgattgagtggtgtcaggt

SEQ ID NO: 1634509 - DNA, 25 bp, Homo sapien
ggctaaaagcactattgcatatgtg

SEQ ID NO: 1634510 - DNA, 25 bp, Homo sapien
ggtgtcaggtgtggcgatttaaaaa

SEQ ID NO: 1634511 - DNA, 25 bp, Homo sapien
gtgtaactggcccaggctcgtgcta

SEQ ID NO: 1634512 - DNA, 25 bp, Homo sapien
tggcccaggctcgtgctataatccc

SEQ ID NO: 1634513 - DNA, 25 bp, Homo sapien
agaaagcaacatggctgcacgtggt

SEQ ID NO: 1634514 - DNA, 25 bp, Homo sapien
cacgtggttactgtgaaaagtacaa

SEQ ID NO: 1634515 - DNA, 25 bp, Homo sapien
aatggcgcgctcgtactctttacgg

SEQ ID NO: 1634516 - DNA, 25 bp, Homo sapien
tgaactctctcaattgctaaagcca

SEQ ID NO: 1634517 - DNA, 25 bp, Homo sapien
taaaacaggactgacattgaatgct

SEQ ID NO: 1634518 - DNA, 25 bp, Homo sapien
caccagtgtgggctgtctgatgatg

SEQ ID NO: 1634519 - DNA, 25 bp, Homo sapien
taaggtagccatacaagctaaaggc

SEQ ID NO: 1634520 - DNA, 25 bp, Homo sapien
taagatatccatgcaagctaaaggt

SEQ ID NO: 1634521 - DNA, 25 bp, Homo sapien
gaacaaggtttgaagcacgactgaa

SEQ ID NO: 1634522 - DNA, 25 bp, Homo sapien
tttgagcgcctactaaaagtcttcc

SEQ ID NO: 1634523 - DNA, 25 bp, Homo sapien
tatctgtttcataagtgggtacttc

SEQ ID NO: 1634524 - DNA, 25 bp, Homo sapien
tctgaagttgtgtagaggatatatc

SEQ ID NO: 1634525 - DNA, 25 bp, Homo sapien
tgtagctgattatctcacactgtaa

SEQ ID NO: 1634526 - DNA, 25 bp, Homo sapien
ctctcttatatatgctctgaagttg

SEQ ID NO: 1634527 - DNA, 25 bp, Homo sapien
catcagctctttgcttcctattctc

SEQ ID NO: 1634528 - DNA, 25 bp, Homo sapien
tctttgcttcctattctctatcata

SEQ ID NO: 1634529 - DNA, 25 bp, Homo sapien
tcctattctctatcatagtccctct

SEQ ID NO: 1634530 - DNA, 25 bp, Homo sapien
aacatcagctctttgcttcctattc

SEQ ID NO: 1634531 - DNA, 25 bp, Homo sapien
gctacttggaggctgtggcaggaga

SEQ ID NO: 1634532 - DNA, 25 bp, Homo sapien
cactccagcctgtgcgacagagcaa

SEQ ID NO: 1634533 - DNA, 25 bp, Homo sapien
tgcttgaacctgggaggcggaggtt

SEQ ID NO: 1634534 - DNA, 25 bp, Homo sapien
gcagtgagctgagatcgggccactg

SEQ ID NO: 1634535 - DNA, 25 bp, Homo sapien
gaccagctgagcaacccagtgagac

SEQ ID NO: 1634536 - DNA, 25 bp, Homo sapien
tagagaccagctgagcaacccagtg

SEQ ID NO: 1634537 - DNA, 25 bp, Homo sapien
gagttagagaccagctgagcaaccc

SEQ ID NO: 1634538 - DNA, 25 bp, Homo sapien
gttagagaccagctgagcaacccag

SEQ ID NO: 1634539 - DNA, 25 bp, Homo sapien
ttcctcgctccagtaaatcaaccac

SEQ ID NO: 1634540 - DNA, 25 bp, Homo sapien
tttcctcgctccagtaaatcaacca

SEQ ID NO: 1634541 - DNA, 25 bp, Homo sapien
taataatactactattggctaggca

SEQ ID NO: 1634542 - DNA, 25 bp, Homo sapien
taatactactattggctaggcatgg

SEQ ID NO: 1634543 - DNA, 25 bp, Homo sapien
aactggacataataatactactatt

SEQ ID NO: 1634544 - DNA, 25 bp, Homo sapien
cataataatactactattggctagg

SEQ ID NO: 1634545 - DNA, 25 bp, Homo sapien
cctctgattagggtccaggtattcc

SEQ ID NO: 1634546 - DNA, 25 bp, Homo sapien
ctctgattagggtccaggtattccc

SEQ ID NO: 1634547 - DNA, 25 bp, Homo sapien
tctgattagggtccaggtattccca

SEQ ID NO: 1634548 - DNA, 25 bp, Homo sapien
tggtagcagactaaagcaacgtgtc

SEQ ID NO: 1634549 - DNA, 25 bp, Homo sapien
tcctaaaggatcctattgccacagg

SEQ ID NO: 1634550 - DNA, 25 bp, Homo sapien
gaaagataggagattacaagagcac

SEQ ID NO: 1634551 - DNA, 25 bp, Homo sapien
taaaggatcctattgccacagacaa

SEQ ID NO: 1634552 - DNA, 25 bp, Homo sapien
ttggacagaacttcaaaggtcttcc

SEQ ID NO: 1634553 - DNA, 25 bp, Homo sapien
catatactttgttggacagaacttc

SEQ ID NO: 1634554 - DNA, 25 bp, Homo sapien
cttcatatactttgttggacagaac

SEQ ID NO: 1634555 - DNA, 25 bp, Homo sapien
cagaacttcaaaggtcttccccagt

SEQ ID NO: 1634556 - DNA, 25 bp, Homo sapien
taggataatattctcattcatcgcc

SEQ ID NO: 1634557 - DNA, 25 bp, Homo sapien
ggataatattctcattcatcgccat

SEQ ID NO: 1634558 - DNA, 25 bp, Homo sapien
aggataatattctcattcatcgcca

SEQ ID NO: 1634559 - DNA, 25 bp, Homo sapien
aacattcaaactccagagaatccag

SEQ ID NO: 1634560 - DNA, 25 bp, Homo sapien
tggggttccaatactggaaacattc

SEQ ID NO: 1634561 - DNA, 25 bp, Homo sapien
ggttttagaattgtaagacctgatc

SEQ ID NO: 1634562 - DNA, 25 bp, Homo sapien
aagacctgatcagtcctacttggtg

SEQ ID NO: 1634563 - DNA, 25 bp, Homo sapien
caaatcccggttagattgcaggcac

SEQ ID NO: 1634564 - DNA, 25 bp, Homo sapien
cacgcgaaaacggaagggaagccat

SEQ ID NO: 1634565 - DNA, 25 bp, Homo sapien
tgggtgttcccgttgccctctggga

SEQ ID NO: 1634566 - DNA, 25 bp, Homo sapien
catgaccgcggtggcttgtgggaaa

SEQ ID NO: 1634567 - DNA, 25 bp, Homo sapien
agtggaatccgaactcgaggctgcc

SEQ ID NO: 1634568 - DNA, 25 bp, Homo sapien
tcctcggagttctgagggtttcagt

SEQ ID NO: 1634569 - DNA, 25 bp, Homo sapien
aagacacagagacttattgcgctgg

SEQ ID NO: 1634570 - DNA, 25 bp, Homo sapien
gaaggcgtgtccgacttgtcctcgg

SEQ ID NO: 1634571 - DNA, 25 bp, Homo sapien
ctctaggggctcctaccgctgccat

SEQ ID NO: 1634572 - DNA, 25 bp, Homo sapien
catatgtattcgtgtccaaaggtga

SEQ ID NO: 1634573 - DNA, 25 bp, Homo sapien
tactggcgctgagaacgcagcgact

SEQ ID NO: 1634574 - DNA, 25 bp, Homo sapien
ttaagtcactcctataggacctgag

SEQ ID NO: 1634575 - DNA, 25 bp, Homo sapien
tgatctgcgcttgcgtactcctagg

SEQ ID NO: 1634576 - DNA, 25 bp, Homo sapien
tcgtgataggtattggaagcacagc

SEQ ID NO: 1634577 - DNA, 25 bp, Homo sapien
gcaggttagggatcactggatgaca

SEQ ID NO: 1634578 - DNA, 25 bp, Homo sapien
ggtacaagagattgggttcaactcc

SEQ ID NO: 1634579 - DNA, 25 bp, Homo sapien
gattctggctaaacgcacctgttgg

SEQ ID NO: 1634580 - DNA, 25 bp, Homo sapien
tgtggagcacattatccgggaagac

SEQ ID NO: 1634581 - DNA, 25 bp, Homo sapien
tgtctacattgatctgggctgctcc

SEQ ID NO: 1634582 - DNA, 25 bp, Homo sapien
gaagactacttcgtggaggccatgg

SEQ ID NO: 1634583 - DNA, 25 bp, Homo sapien
tggtgaaccctgattctgaagtcgg

SEQ ID NO: 1634584 - DNA, 25 bp, Homo sapien
gaatctgtagatgacattaatgctg

SEQ ID NO: 1634585 - DNA, 25 bp, Homo sapien
gacattaatgctgataagaatatct

SEQ ID NO: 1634586 - DNA, 25 bp, Homo sapien
gcaactcccccatcatatgaatctg

SEQ ID NO: 1634587 - DNA, 25 bp, Homo sapien
gcacagattgttggtcctggaccca

SEQ ID NO: 1634588 - DNA, 25 bp, Homo sapien
tgtattctgtagctcagtagctgct

SEQ ID NO: 1634589 - DNA, 25 bp, Homo sapien
ttgtattctgtagctcagtagctgc

SEQ ID NO: 1634590 - DNA, 25 bp, Homo sapien
tctgtagctcagtagctgctaataa

SEQ ID NO: 1634591 - DNA, 25 bp, Homo sapien
tattctgtagctcagtagctgctaa

SEQ ID NO: 1634592 - DNA, 25 bp, Homo sapien
ctcatatagcatgggccttgggcac

SEQ ID NO: 1634593 - DNA, 25 bp, Homo sapien
tgcctgggtgactgaacttaactcc

SEQ ID NO: 1634594 - DNA, 25 bp, Homo sapien
tataagggttgaacaccacaggcct

SEQ ID NO: 1634595 - DNA, 25 bp, Homo sapien
tactcaaactcaaggcgaaggatgc

SEQ ID NO: 1634596 - DNA, 25 bp, Homo sapien
ttcttgtaaattgcaggactacact

SEQ ID NO: 1634597 - DNA, 25 bp, Homo sapien
gtcccatggaaggtcttcagtggca

SEQ ID NO: 1634598 - DNA, 25 bp, Homo sapien
gctccacatcgcgtcccatggaagg

SEQ ID NO: 1634599 - DNA, 25 bp, Homo sapien
cacagagctgtcatcgtctataaca

SEQ ID NO: 1634600 - DNA, 25 bp, Homo sapien
acctcaattgacccacccacctcgg

SEQ ID NO: 1634601 - DNA, 25 bp, Homo sapien
caggctggagtgccaccctgttacc

SEQ ID NO: 1634602 - DNA, 25 bp, Homo sapien
ccaagtatctaggattacaggtgct

SEQ ID NO: 1634603 - DNA, 25 bp, Homo sapien
ggctggagtgccaccctgttaccca

SEQ ID NO: 1634604 - DNA, 25 bp, Homo sapien
caatgcgtgcatagtgggacacaga

SEQ ID NO: 1634605 - DNA, 25 bp, Homo sapien
gcaacagtgccagcctaagagacag

SEQ ID NO: 1634606 - DNA, 25 bp, Homo sapien
tcaccaaggttagagtggcactgca

SEQ ID NO: 1634607 - DNA, 25 bp, Homo sapien
gagctttcagtatccatcgtgcatg

SEQ ID NO: 1634608 - DNA, 25 bp, Homo sapien
gattctacagggcagtcatcacaca

SEQ ID NO: 1634609 - DNA, 25 bp, Homo sapien
tagcgtcagaaacgttccctcacgg

SEQ ID NO: 1634610 - DNA, 25 bp, Homo sapien
cctcagaagagcgtcgaagtcacct

SEQ ID NO: 1634611 - DNA, 25 bp, Homo sapien
gagtttataccaactcaagcgcgcg

SEQ ID NO: 1634612 - DNA, 25 bp, Homo sapien
tccagtaacactatgggtttgccat

SEQ ID NO: 1634613 - DNA, 25 bp, Homo sapien
tacgtatacattccacttcagtccc

SEQ ID NO: 1634614 - DNA, 25 bp, Homo sapien
ttcccaaatggtgcaagtattttag

SEQ ID NO: 1634615 - DNA, 25 bp, Homo sapien
agtattttagagtatgccacatagt

SEQ ID NO: 1634616 - DNA, 25 bp, Homo sapien
aatgtctcgaccatgttcagaagac

SEQ ID NO: 1634617 - DNA, 25 bp, Homo sapien
agtgggaatgtctcgaccatgttca

SEQ ID NO: 1634618 - DNA, 25 bp, Homo sapien
ggagtgggaatgtctcgaccatgtt

SEQ ID NO: 1634619 - DNA, 25 bp, Homo sapien
tgggaatgtctcgaccatgttcaga

SEQ ID NO: 1634620 - DNA, 25 bp, Homo sapien
tggtatgttttctgcctcagacaat

SEQ ID NO: 1634621 - DNA, 25 bp, Homo sapien
tctgcctcagacaatttaggataac

SEQ ID NO: 1634622 - DNA, 25 bp, Homo sapien
gagaactgtagtaacttggtatgtt

SEQ ID NO: 1634623 - DNA, 25 bp, Homo sapien
tattgggatgtgatgatggagaact

SEQ ID NO: 1634624 - DNA, 25 bp, Homo sapien
cagggaagagacatacacttgggat

SEQ ID NO: 1634625 - DNA, 25 bp, Homo sapien
tctgactgtgggaagccatctgtgt

SEQ ID NO: 1634626 - DNA, 25 bp, Homo sapien
tgtaattacatcattggagcaagga

SEQ ID NO: 1634627 - DNA, 25 bp, Homo sapien
taaatactctgcataagctacccag

SEQ ID NO: 1634628 - DNA, 25 bp, Homo sapien
cttaacattcctggatgggaacttg

SEQ ID NO: 1634629 - DNA, 25 bp, Homo sapien
gggaacttgctatccttgaagtgac

SEQ ID NO: 1634630 - DNA, 25 bp, Homo sapien
ttaacattcctggatgggaacttgc

SEQ ID NO: 1634631 - DNA, 25 bp, Homo sapien
atgggaacttgctatccttgaagtg

SEQ ID NO: 1634632 - DNA, 25 bp, Homo sapien
ccggctcttcttttcacttttcttg

SEQ ID NO: 1634633 - DNA, 25 bp, Homo sapien
caggagtcccagccaaaccccggct

SEQ ID NO: 1634634 - DNA, 25 bp, Homo sapien
cggctcttcttttcacttttcttgc

SEQ ID NO: 1634635 - DNA, 25 bp, Homo sapien
ctgcacgtccaggagtcccagccaa

SEQ ID NO: 1634636 - DNA, 25 bp, Homo sapien
tctggctctaaggtaacatgttggg

SEQ ID NO: 1634637 - DNA, 25 bp, Homo sapien
gctctgtttcagcataatcctggga

SEQ ID NO: 1634638 - DNA, 25 bp, Homo sapien
tcaactagctctgatttcccggcct

SEQ ID NO: 1634639 - DNA, 25 bp, Homo sapien
tatagcttgtaaaatgacctcctgc

SEQ ID NO: 1634640 - DNA, 25 bp, Homo sapien
ttgagtaagatcctttgtaaaatct

SEQ ID NO: 1634641 - DNA, 25 bp, Homo sapien
ctgcagagatattgggagaaaaaca

SEQ ID NO: 1634642 - DNA, 25 bp, Homo sapien
gagtaagatcctttgtaaaatctaa

SEQ ID NO: 1634643 - DNA, 25 bp, Homo sapien
tgcagagatattgggagaaaaacag

SEQ ID NO: 1634644 - DNA, 25 bp, Homo sapien
agaccttaagttcttcagaccatgg

SEQ ID NO: 1634645 - DNA, 25 bp, Homo sapien
acaggttctgacaaaggtatgcaca

SEQ ID NO: 1634646 - DNA, 25 bp, Homo sapien
tgaatattcagcagttggcccagag

SEQ ID NO: 1634647 - DNA, 25 bp, Homo sapien
taagcagggactgtatatcttcagc

SEQ ID NO: 1634648 - DNA, 25 bp, Homo sapien
tgtgattcatgggaagaagtcaggt

SEQ ID NO: 1634649 - DNA, 25 bp, Homo sapien
taactgctgcagttacttgtggtgg

SEQ ID NO: 1634650 - DNA, 25 bp, Homo sapien
tgatcaaacttgaatggattaagaa

SEQ ID NO: 1634651 - DNA, 25 bp, Homo sapien
gaagtcaggtatcaacatgaacaga

SEQ ID NO: 1634652 - DNA, 25 bp, Homo sapien
tggaaagacaggctagtcagtggtc

SEQ ID NO: 1634653 - DNA, 25 bp, Homo sapien
aaaatatgcctgtagtcagtgggac

SEQ ID NO: 1634654 - DNA, 25 bp, Homo sapien
catgagtcttgaggaatcttgagaa

SEQ ID NO: 1634655 - DNA, 25 bp, Homo sapien
tggttgggagatttgtggacatgag

SEQ ID NO: 1634656 - DNA, 25 bp, Homo sapien
gagtttcgtgtttcttcagcaggtg

SEQ ID NO: 1634657 - DNA, 25 bp, Homo sapien
tttctggagagtttcgtgtttcttc

SEQ ID NO: 1634658 - DNA, 25 bp, Homo sapien
cagcaggtgtaccagcctggtcttg

SEQ ID NO: 1634659 - DNA, 25 bp, Homo sapien
tggagagtttcgtgtttcttcagca

SEQ ID NO: 1634660 - DNA, 25 bp, Homo sapien
ggcgatgggcagtcttagaaaccaa

SEQ ID NO: 1634661 - DNA, 25 bp, Homo sapien
cgcctcccagggtagttcacggata

SEQ ID NO: 1634662 - DNA, 25 bp, Homo sapien
tctgaagatatctggcaagtggcaa

SEQ ID NO: 1634663 - DNA, 25 bp, Homo sapien
aaatgatggttcatgaggcctagcc

SEQ ID NO: 1634664 - DNA, 25 bp, Homo sapien
caggaacctcatgtcggggacgatt

SEQ ID NO: 1634665 - DNA, 25 bp, Homo sapien
gagcaggaacctcatgtcggggacg

SEQ ID NO: 1634666 - DNA, 25 bp, Homo sapien
gcaggaacctcatgtcggggacgat

SEQ ID NO: 1634667 - DNA, 25 bp, Homo sapien
ggaacctcatgtcggggacgattat

SEQ ID NO: 1634668 - DNA, 25 bp, Homo sapien
gatccggactgagccatcaatgcca

SEQ ID NO: 1634669 - DNA, 25 bp, Homo sapien
cagggctgagtcgaactcggttaca

SEQ ID NO: 1634670 - DNA, 25 bp, Homo sapien
agagtggtccaaaatgcagggctga

SEQ ID NO: 1634671 - DNA, 25 bp, Homo sapien
tttaggatacgcaggtgaaccagct

SEQ ID NO: 1634672 - DNA, 25 bp, Homo sapien
gaaggactaccttgttcacctgaag

SEQ ID NO: 1634673 - DNA, 25 bp, Homo sapien
gggaaagggttctcacaatgccact

SEQ ID NO: 1634674 - DNA, 25 bp, Homo sapien
gaacagtcttctctattcgggcaca

SEQ ID NO: 1634675 - DNA, 25 bp, Homo sapien
cagtagctttcagtgatggcaccca

SEQ ID NO: 1634676 - DNA, 25 bp, Homo sapien
tagaatccgagtccagttatggccg

SEQ ID NO: 1634677 - DNA, 25 bp, Homo sapien
cctgttactggagacaagaagcgca

SEQ ID NO: 1634678 - DNA, 25 bp, Homo sapien
tccataacaagtagaggccaagtga

SEQ ID NO: 1634679 - DNA, 25 bp, Homo sapien
ggccaagtgataaccaggagatccc

SEQ ID NO: 1634680 - DNA, 25 bp, Homo sapien
ggtgatctccaaaaagcctcaggcg

SEQ ID NO: 1634681 - DNA, 25 bp, Homo sapien
tggtctaaaccccaagcgtggatct

SEQ ID NO: 1634682 - DNA, 25 bp, Homo sapien
cattgcttgaatgggcggccactga

SEQ ID NO: 1634683 - DNA, 25 bp, Homo sapien
gggaaaatccctgtacaagctcatg

SEQ ID NO: 1634684 - DNA, 25 bp, Homo sapien
gtagtagaagcagacaaaaggcttg

SEQ ID NO: 1634685 - DNA, 25 bp, Homo sapien
tcccggtatagagtctcaggccagt

SEQ ID NO: 1634686 - DNA, 25 bp, Homo sapien
ctgtggatggtgagactcccggtat

SEQ ID NO: 1634687 - DNA, 25 bp, Homo sapien
caggccagtcactcagtagaaccac

SEQ ID NO: 1634688 - DNA, 25 bp, Homo sapien
gcagatgtctgtaatgtatgtacat

SEQ ID NO: 1634689 - DNA, 25 bp, Homo sapien
tgtaataggttacacagtagaacat

SEQ ID NO: 1634690 - DNA, 25 bp, Homo sapien
caatacatgccaccttccagtgatg

SEQ ID NO: 1634691 - DNA, 25 bp, Homo sapien
tccagtgatgtagcagatgtctgta

SEQ ID NO: 1634692 - DNA, 25 bp, Homo sapien
ttacagacatcttggattacagaac

SEQ ID NO: 1634693 - DNA, 25 bp, Homo sapien
tcctagtgatatcccagctctttac

SEQ ID NO: 1634694 - DNA, 25 bp, Homo sapien
atgatttcctagtgatatcccagct

SEQ ID NO: 1634695 - DNA, 25 bp, Homo sapien
cactcaggaataagtctggatgaag

SEQ ID NO: 1634696 - DNA, 25 bp, Homo sapien
ttcatgccttgtctccaaacactgc

SEQ ID NO: 1634697 - DNA, 25 bp, Homo sapien
gccttgtctccaaacactgccttaa

SEQ ID NO: 1634698 - DNA, 25 bp, Homo sapien
tctaggaactgttcatgccttgtct

SEQ ID NO: 1634699 - DNA, 25 bp, Homo sapien
tgctctaggaactgttcatgccttg

SEQ ID NO: 1634700 - DNA, 25 bp, Homo sapien
gcaggtgtctaagccggaccattgg

SEQ ID NO: 1634701 - DNA, 25 bp, Homo sapien
cagaggcaggtgtctaagccggacc

SEQ ID NO: 1634702 - DNA, 25 bp, Homo sapien
attggctcccttccgcgccagcccg

SEQ ID NO: 1634703 - DNA, 25 bp, Homo sapien
tgtctaagccggaccattggctccc

SEQ ID NO: 1634704 - DNA, 25 bp, Homo sapien
ggactgcatccgccagcgtccaggg

SEQ ID NO: 1634705 - DNA, 25 bp, Homo sapien
gacaccggactgcatccgccagcgt

SEQ ID NO: 1634706 - DNA, 25 bp, Homo sapien
atcggggaccgcgacaccggactgc

SEQ ID NO: 1634707 - DNA, 25 bp, Homo sapien
atccgccagcgtccagggcgtagcg

SEQ ID NO: 1634708 - DNA, 25 bp, Homo sapien
caagttccatggatttcgcctttcc

SEQ ID NO: 1634709 - DNA, 25 bp, Homo sapien
tccatggatttcgcctttcccttta

SEQ ID NO: 1634710 - DNA, 25 bp, Homo sapien
agttccatggatttcgcctttccct

SEQ ID NO: 1634711 - DNA, 25 bp, Homo sapien
ccatctgcctcgtgttggaagtctc

SEQ ID NO: 1634712 - DNA, 25 bp, Homo sapien
tccatggtgttcacctccccaatgt

SEQ ID NO: 1634713 - DNA, 25 bp, Homo sapien
tgatagcagatgagggtggtgacag

SEQ ID NO: 1634714 - DNA, 25 bp, Homo sapien
cgtgttggaagtctccatggtgttc

SEQ ID NO: 1634715 - DNA, 25 bp, Homo sapien
tgcttcctgtccagctactggtatg

SEQ ID NO: 1634716 - DNA, 25 bp, Homo sapien
actgagtgatggctcctctgaacat

SEQ ID NO: 1634717 - DNA, 25 bp, Homo sapien
tgcagttgtactgagtgatggctcc

SEQ ID NO: 1634718 - DNA, 25 bp, Homo sapien
ccagctactggtatgcagttgtact

SEQ ID NO: 1634719 - DNA, 25 bp, Homo sapien
taagatcccataccgggcaatgccc

SEQ ID NO: 1634720 - DNA, 25 bp, Homo sapien
cagtgccttggtgagatgaagatca

SEQ ID NO: 1634721 - DNA, 25 bp, Homo sapien
ccacgggaaggatggtgcgcacaca

SEQ ID NO: 1634722 - DNA, 25 bp, Homo sapien
ggatggtgcgcacacagttctgcca

SEQ ID NO: 1634723 - DNA, 25 bp, Homo sapien
ttccccgggaactagctctgtggct

SEQ ID NO: 1634724 - DNA, 25 bp, Homo sapien
cagcatccgcaaaacatggtacagt

SEQ ID NO: 1634725 - DNA, 25 bp, Homo sapien
tacaggtccatgagctggtagaact

SEQ ID NO: 1634726 - DNA, 25 bp, Homo sapien
tcttttggatatcgctgctgcagca

SEQ ID NO: 1634727 - DNA, 25 bp, Homo sapien
tctgtgacggtacacaatggcttca

SEQ ID NO: 1634728 - DNA, 25 bp, Homo sapien
cagctggcacagtctatggaaacca

SEQ ID NO: 1634729 - DNA, 25 bp, Homo sapien
cattcgttctaggacatggcggatc

SEQ ID NO: 1634730 - DNA, 25 bp, Homo sapien
tggcggatccactctacatctgaga

SEQ ID NO: 1634731 - DNA, 25 bp, Homo sapien
tctgtcccatcagaggtggatgctg

SEQ ID NO: 1634732 - DNA, 25 bp, Homo sapien
caaaacatgtggaggtatgggttca

SEQ ID NO: 1634733 - DNA, 25 bp, Homo sapien
gatatttgtttctccggcactggca

SEQ ID NO: 1634734 - DNA, 25 bp, Homo sapien
ccacggtcctccttaatatgtggga

SEQ ID NO: 1634735 - DNA, 25 bp, Homo sapien
tcttatagccctgcctttgccatga

SEQ ID NO: 1634736 - DNA, 25 bp, Homo sapien
tcttcctcgtcactcaaactttctg

SEQ ID NO: 1634737 - DNA, 25 bp, Homo sapien
gctttttagaactcctagtcttata

SEQ ID NO: 1634738 - DNA, 25 bp, Homo sapien
tcttccaatgagcagctctcctctt

SEQ ID NO: 1634739 - DNA, 25 bp, Homo sapien
ttctagttcatctaacaggctttcc

SEQ ID NO: 1634740 - DNA, 25 bp, Homo sapien
catttcttcagaaaaatgctcttca

SEQ ID NO: 1634741 - DNA, 25 bp, Homo sapien
ctagttcatctaacaggctttccat

SEQ ID NO: 1634742 - DNA, 25 bp, Homo sapien
gcttttctagttcatctaacaggct

SEQ ID NO: 1634743 - DNA, 25 bp, Homo sapien
acttcatccacttgactggaaaact

SEQ ID NO: 1634744 - DNA, 25 bp, Homo sapien
catccacttgactggaaaacttttc

SEQ ID NO: 1634745 - DNA, 25 bp, Homo sapien
tcatccacttgactggaaaactttt

SEQ ID NO: 1634746 - DNA, 25 bp, Homo sapien
tttccacttcatccacttgactgga

SEQ ID NO: 1634747 - DNA, 25 bp, Homo sapien
ttggcctctttcctctttctccacc

SEQ ID NO: 1634748 - DNA, 25 bp, Homo sapien
ctctttcctctttctccaccttcgt

SEQ ID NO: 1634749 - DNA, 25 bp, Homo sapien
gcctctttcctctttctccaccttc

SEQ ID NO: 1634750 - DNA, 25 bp, Homo sapien
tctcttggcctctttcctctttctc

SEQ ID NO: 1634751 - DNA, 25 bp, Homo sapien
tcaacctgcgctccttaacaaagag

SEQ ID NO: 1634752 - DNA, 25 bp, Homo sapien
tggcaatttcgctttcctccatggc

SEQ ID NO: 1634753 - DNA, 25 bp, Homo sapien
gacagtttctccctttgccaggcca

SEQ ID NO: 1634754 - DNA, 25 bp, Homo sapien
catccctggttagtttttgaagtgc

SEQ ID NO: 1634755 - DNA, 25 bp, Homo sapien
gatggtgtcctctcaatcataacca

SEQ ID NO: 1634756 - DNA, 25 bp, Homo sapien
caggatttccttgtctcaccatgga

SEQ ID NO: 1634757 - DNA, 25 bp, Homo sapien
tcagctcgggctcgtttcctgtgta

SEQ ID NO: 1634758 - DNA, 25 bp, Homo sapien
tgggttattttcacgtatgcctggg

SEQ ID NO: 1634759 - DNA, 25 bp, Homo sapien
tgatcacctcttgggtcacaccttg

SEQ ID NO: 1634760 - DNA, 25 bp, Homo sapien
cttcccttggcatcacttccttgtg

SEQ ID NO: 1634761 - DNA, 25 bp, Homo sapien
gtatcatgtcctctctaattgctcc

SEQ ID NO: 1634762 - DNA, 25 bp, Homo sapien
ggcgggactacatcccaatcaaggt

SEQ ID NO: 1634763 - DNA, 25 bp, Homo sapien
gcaaatgtcactagctcagcgttta

SEQ ID NO: 1634764 - DNA, 25 bp, Homo sapien
cagggccataagacgacatagatcg

SEQ ID NO: 1634765 - DNA, 25 bp, Homo sapien
catagatcgtccctccatgatgagc

SEQ ID NO: 1634766 - DNA, 25 bp, Homo sapien
tttgggaaccagatatcctcagggc

SEQ ID NO: 1634767 - DNA, 25 bp, Homo sapien
ttgagaccccgcaaccatttttggc

SEQ ID NO: 1634768 - DNA, 25 bp, Homo sapien
accattgggaatagacggatgcttc

SEQ ID NO: 1634769 - DNA, 25 bp, Homo sapien
tgcggccagatattccagaggctcc

SEQ ID NO: 1634770 - DNA, 25 bp, Homo sapien
catctcaattggtgcggcctcagtc

SEQ ID NO: 1634771 - DNA, 25 bp, Homo sapien
cagtcaacatctatctacccttaac

SEQ ID NO: 1634772 - DNA, 25 bp, Homo sapien
taaattccctcctatatagtgtccc

SEQ ID NO: 1634773 - DNA, 25 bp, Homo sapien
acaatcaggatataaggcatttcta

SEQ ID NO: 1634774 - DNA, 25 bp, Homo sapien
ctgctttctgtgactgtagattcat

SEQ ID NO: 1634775 - DNA, 25 bp, Homo sapien
gctgggcttgatggccacttcagat

SEQ ID NO: 1634776 - DNA, 25 bp, Homo sapien
tcttcagaaactgtaggaggtttca

SEQ ID NO: 1634777 - DNA, 25 bp, Homo sapien
ttttcatctctatgtgacagggtca

SEQ ID NO: 1634778 - DNA, 25 bp, Homo sapien
ggatttaagttcagaaggcattgag

SEQ ID NO: 1634779 - DNA, 25 bp, Homo sapien
gaaaggatttggagatctgtggccc

SEQ ID NO: 1634780 - DNA, 25 bp, Homo sapien
atttggagatctgtggcccgcatcc

SEQ ID NO: 1634781 - DNA, 25 bp, Homo sapien
aggatttggagatctgtggcccgca

SEQ ID NO: 1634782 - DNA, 25 bp, Homo sapien
tgtggcccgcatccccagtagatgg

SEQ ID NO: 1634783 - DNA, 25 bp, Homo sapien
gtggattccaatctcagccatgagg

SEQ ID NO: 1634784 - DNA, 25 bp, Homo sapien
tgcatctcccgaaaagtctcttgtt

SEQ ID NO: 1634785 - DNA, 25 bp, Homo sapien
gagtgaggtcctagagtggattcca

SEQ ID NO: 1634786 - DNA, 25 bp, Homo sapien
ccatgaggcttagggtcttgatcct

SEQ ID NO: 1634787 - DNA, 25 bp, Homo sapien
gtatcattcagtagccgacgggctg

SEQ ID NO: 1634788 - DNA, 25 bp, Homo sapien
gatttgccctagtgcaccaacacag

SEQ ID NO: 1634789 - DNA, 25 bp, Homo sapien
gagtaatcattcctagacgcttcag

SEQ ID NO: 1634790 - DNA, 25 bp, Homo sapien
caagctagttctcggatcagcgggt

SEQ ID NO: 1634791 - DNA, 25 bp, Homo sapien
aaagaattcttgagacctgtcccat

SEQ ID NO: 1634792 - DNA, 25 bp, Homo sapien
ggttgagtccatcccagctagtcag

SEQ ID NO: 1634793 - DNA, 25 bp, Homo sapien
caaagacgggcacgaatcactgaat

SEQ ID NO: 1634794 - DNA, 25 bp, Homo sapien
cattcccgcccatgaccaaagtagt

SEQ ID NO: 1634795 - DNA, 25 bp, Homo sapien
cataatggcattggtaacgtttgct

SEQ ID NO: 1634796 - DNA, 25 bp, Homo sapien
gcacataatggcattggtaacgttt

SEQ ID NO: 1634797 - DNA, 25 bp, Homo sapien
gaagcacataatggcattggtaacg

SEQ ID NO: 1634798 - DNA, 25 bp, Homo sapien
aatggcattggtaacgtttgctcac

SEQ ID NO: 1634799 - DNA, 25 bp, Homo sapien
taatgctgtcaataaactggagccg

SEQ ID NO: 1634800 - DNA, 25 bp, Homo sapien
gagcagagagtttccttggccacca

SEQ ID NO: 1634801 - DNA, 25 bp, Homo sapien
ccaaagtgcagtgatgagtccagaa

SEQ ID NO: 1634802 - DNA, 25 bp, Homo sapien
gttaaaagtcacaagcaggtcaccc

SEQ ID NO: 1634803 - DNA, 25 bp, Homo sapien
ccaaagagtcgcaggatcaggtcac

SEQ ID NO: 1634804 - DNA, 25 bp, Homo sapien
tttgaatgcccgaaagtggtcccca

SEQ ID NO: 1634805 - DNA, 25 bp, Homo sapien
tgttgaagcggcagggcactttacc

SEQ ID NO: 1634806 - DNA, 25 bp, Homo sapien
tcatttccgggtcatagcagaggca

SEQ ID NO: 1634807 - DNA, 25 bp, Homo sapien
gatagcgagactctttgaacagtac

SEQ ID NO: 1634808 - DNA, 25 bp, Homo sapien
tcactgaagtaatagcatacacacg

SEQ ID NO: 1634809 - DNA, 25 bp, Homo sapien
agggaggcgaagaagtgggcatcac

SEQ ID NO: 1634810 - DNA, 25 bp, Homo sapien
gcatacacacggcatattttgagga

SEQ ID NO: 1634811 - DNA, 25 bp, Homo sapien
cggtcactcagcacaatcaggcagt

SEQ ID NO: 1634812 - DNA, 25 bp, Homo sapien
tcagcacaatcaggcagttctttgg

SEQ ID NO: 1634813 - DNA, 25 bp, Homo sapien
cactcagcacaatcaggcagttctt

SEQ ID NO: 1634814 - DNA, 25 bp, Homo sapien
ctgggaccggtcactcagcacaatc

SEQ ID NO: 1634815 - DNA, 25 bp, Homo sapien
ttatttatggtgtcatttaggagga

SEQ ID NO: 1634816 - DNA, 25 bp, Homo sapien
ctttccacaggggaatgagcctggg

SEQ ID NO: 1634817 - DNA, 25 bp, Homo sapien
gggaagacatcaccgtcagactccc

SEQ ID NO: 1634818 - DNA, 25 bp, Homo sapien
taaatctttccacaggggaatgagc

SEQ ID NO: 1634819 - DNA, 25 bp, Homo sapien
aaagagcccagcttagtcactgcca

SEQ ID NO: 1634820 - DNA, 25 bp, Homo sapien
ttagcgtgttcctgtcgtaacccag

SEQ ID NO: 1634821 - DNA, 25 bp, Homo sapien
gaaccaggacagacacttaacgact

SEQ ID NO: 1634822 - DNA, 25 bp, Homo sapien
cattttgtggtgtgtccggagagca

SEQ ID NO: 1634823 - DNA, 25 bp, Homo sapien
atttccttccaactcatacttcatg

SEQ ID NO: 1634824 - DNA, 25 bp, Homo sapien
tctcagacaggtgaccactctattt

SEQ ID NO: 1634825 - DNA, 25 bp, Homo sapien
ccaactcatacttcatgcttttcag

SEQ ID NO: 1634826 - DNA, 25 bp, Homo sapien
gctgtttgtaggctggcctagttct

SEQ ID NO: 1634827 - DNA, 25 bp, Homo sapien
ggaaacatgacagttaaatttatag

SEQ ID NO: 1634828 - DNA, 25 bp, Homo sapien
ctggaaacatgacagttaaatttat

SEQ ID NO: 1634829 - DNA, 25 bp, Homo sapien
gaaacatgacagttaaatttatagt

SEQ ID NO: 1634830 - DNA, 25 bp, Homo sapien
tggaaacatgacagttaaatttata

SEQ ID NO: 1634831 - DNA, 25 bp, Homo sapien
cctttcctgccagatgtagaagaac

SEQ ID NO: 1634832 - DNA, 25 bp, Homo sapien
ggccaacctttcctgccagatgtag

SEQ ID NO: 1634833 - DNA, 25 bp, Homo sapien
ccagcagagggcaacggaggccaac

SEQ ID NO: 1634834 - DNA, 25 bp, Homo sapien
agcagagggcaacggaggccaacct

SEQ ID NO: 1634835 - DNA, 25 bp, Homo sapien
agctgctgagagagtagtcgtttgt

SEQ ID NO: 1634836 - DNA, 25 bp, Homo sapien
ttccaaatagctccactgggtccca

SEQ ID NO: 1634837 - DNA, 25 bp, Homo sapien
atattccaaatagctccactgggtc

SEQ ID NO: 1634838 - DNA, 25 bp, Homo sapien
tgctgagagagtagtcgtttgtaac

SEQ ID NO: 1634839 - DNA, 25 bp, Homo sapien
ttgcgagaggactccgcccacagaa

SEQ ID NO: 1634840 - DNA, 25 bp, Homo sapien
acaagggacgggtacggcgtgtgca

SEQ ID NO: 1634841 - DNA, 25 bp, Homo sapien
tgcgacaggattcccgacaagggac

SEQ ID NO: 1634842 - DNA, 25 bp, Homo sapien
ggcagcaactaagaagctacctggc

SEQ ID NO: 1634843 - DNA, 25 bp, Homo sapien
ggctgcggaagtgctctacagactg

SEQ ID NO: 1634844 - DNA, 25 bp, Homo sapien
cgaaggcgaccagcggactaccgtt

SEQ ID NO: 1634845 - DNA, 25 bp, Homo sapien
actggagctgcacgaaggcgaccag

SEQ ID NO: 1634846 - DNA, 25 bp, Homo sapien
tacagactggagctgcacgaaggcg

SEQ ID NO: 1634847 - DNA, 25 bp, Homo sapien
gaagcggcttggaagtgggcagcct

SEQ ID NO: 1634848 - DNA, 25 bp, Homo sapien
ggcagcctggaagtcactcgggcca

SEQ ID NO: 1634849 - DNA, 25 bp, Homo sapien
atcggcctcgcgcaagggtggcggg

SEQ ID NO: 1634850 - DNA, 25 bp, Homo sapien
ttcccaggaggactcgcgcgaagcg

SEQ ID NO: 1634851 - DNA, 25 bp, Homo sapien
ggcgccgggactcgcgccctccgga

SEQ ID NO: 1634852 - DNA, 25 bp, Homo sapien
tcgcgccctccggacccagccggac

SEQ ID NO: 1634853 - DNA, 25 bp, Homo sapien
cctccggacccagccggactcgtgc

SEQ ID NO: 1634854 - DNA, 25 bp, Homo sapien
gggactcgcgccctccggacccagc

SEQ ID NO: 1634855 - DNA, 25 bp, Homo sapien
cgcctggctgtgacaaggttaagtc

SEQ ID NO: 1634856 - DNA, 25 bp, Homo sapien
gacccagttctgtgattttagcctg

SEQ ID NO: 1634857 - DNA, 25 bp, Homo sapien
ttttagcctggtaaagatcggctga

SEQ ID NO: 1634858 - DNA, 25 bp, Homo sapien
tggatgtggcatgaaagcctggctt

SEQ ID NO: 1634859 - DNA, 25 bp, Homo sapien
gaggcaggaaacgtgcccctttcca

SEQ ID NO: 1634860 - DNA, 25 bp, Homo sapien
aaccggaatccagtctttggtgtgc

SEQ ID NO: 1634861 - DNA, 25 bp, Homo sapien
ttgaggccccacacgaaccggaatc

SEQ ID NO: 1634862 - DNA, 25 bp, Homo sapien
gcaggaggcaggaaacgtgcccctt

SEQ ID NO: 1634863 - DNA, 25 bp, Homo sapien
tgcaagtcgttgtggaaccagggca

SEQ ID NO: 1634864 - DNA, 25 bp, Homo sapien
ccctgtagcgatgggagacttgcaa

SEQ ID NO: 1634865 - DNA, 25 bp, Homo sapien
tgaggagccgtgcacctccctgtag

SEQ ID NO: 1634866 - DNA, 25 bp, Homo sapien
tctgtgggaatctctgcggggacca

SEQ ID NO: 1634867 - DNA, 25 bp, Homo sapien
gatgggcatccgggttgattccctg

SEQ ID NO: 1634868 - DNA, 25 bp, Homo sapien
tatctttgtccagtccgctgttgat

SEQ ID NO: 1634869 - DNA, 25 bp, Homo sapien
tacgtgtacgcaatgtttagcatcc

SEQ ID NO: 1634870 - DNA, 25 bp, Homo sapien
tccctggctttgtgggttgattcac

SEQ ID NO: 1634871 - DNA, 25 bp, Homo sapien
actctgcccagaaacacctgggtct

SEQ ID NO: 1634872 - DNA, 25 bp, Homo sapien
tcactctgcccagaaacacctgggt

SEQ ID NO: 1634873 - DNA, 25 bp, Homo sapien
ctgcccagaaacacctgggtctcac

SEQ ID NO: 1634874 - DNA, 25 bp, Homo sapien
tctgcccagaaacacctgggtctca

SEQ ID NO: 1634875 - DNA, 25 bp, Homo sapien
catctcctggggaactccggtggct

SEQ ID NO: 1634876 - DNA, 25 bp, Homo sapien
tgttgaataagtcgctgttaggagc

SEQ ID NO: 1634877 - DNA, 25 bp, Homo sapien
ctggcgtgttcctgcggctgttgaa

SEQ ID NO: 1634878 - DNA, 25 bp, Homo sapien
gagctggcacggcaggttcccgttt

SEQ ID NO: 1634879 - DNA, 25 bp, Homo sapien
gggggcgggcaccactgaggtcggc

SEQ ID NO: 1634880 - DNA, 25 bp, Homo sapien
ctgggggcgggcaccactgaggtcg

SEQ ID NO: 1634881 - DNA, 25 bp, Homo sapien
tgggggcgggcaccactgaggtcgg

SEQ ID NO: 1634882 - DNA, 25 bp, Homo sapien
tggagagccaaggcaggtggcctcg

SEQ ID NO: 1634883 - DNA, 25 bp, Homo sapien
ctggagagccaaggcaggtggcctc

SEQ ID NO: 1634884 - DNA, 25 bp, Homo sapien
ggagagccaaggcaggtggcctcgc

SEQ ID NO: 1634885 - DNA, 25 bp, Homo sapien
gagagccaaggcaggtggcctcgcc

SEQ ID NO: 1634886 - DNA, 25 bp, Homo sapien
agaaagagtgggccgggtgttgacg

SEQ ID NO: 1634887 - DNA, 25 bp, Homo sapien
ctgtgaagaaagagtgggccgggtg

SEQ ID NO: 1634888 - DNA, 25 bp, Homo sapien
tgaagaaagagtgggccgggtgttg

SEQ ID NO: 1634889 - DNA, 25 bp, Homo sapien
tgtgaagaaagagtgggccgggtgt

SEQ ID NO: 1634890 - DNA, 25 bp, Homo sapien
tgcaacccctgcagtctgtgcagcc

SEQ ID NO: 1634891 - DNA, 25 bp, Homo sapien
aggcctggtagtgactcatctgggc

SEQ ID NO: 1634892 - DNA, 25 bp, Homo sapien
cctgtggcatggaacaggaaagctt

SEQ ID NO: 1634893 - DNA, 25 bp, Homo sapien
cctggtagtgactcatctgggcagc

SEQ ID NO: 1634894 - DNA, 25 bp, Homo sapien
attcataaaatggttgctctacctc

SEQ ID NO: 1634895 - DNA, 25 bp, Homo sapien
tcataaaatggttgctctacctcca

SEQ ID NO: 1634896 - DNA, 25 bp, Homo sapien
cataaaatggttgctctacctccag

SEQ ID NO: 1634897 - DNA, 25 bp, Homo sapien
taaaatggttgctctacctccagcc

SEQ ID NO: 1634898 - DNA, 25 bp, Homo sapien
cataccctgtcctgagcttgccaat

SEQ ID NO: 1634899 - DNA, 25 bp, Homo sapien
tcattgtgtgggcacggctgctcca

SEQ ID NO: 1634900 - DNA, 25 bp, Homo sapien
catttgacatttgccggtctccacc

SEQ ID NO: 1634901 - DNA, 25 bp, Homo sapien
gatgaaccagtccagtcatctcatt

SEQ ID NO: 1634902 - DNA, 25 bp, Homo sapien
tgctctacgccaaggaattagtcct

SEQ ID NO: 1634903 - DNA, 25 bp, Homo sapien
taaagggctctactccattgcagag

SEQ ID NO: 1634904 - DNA, 25 bp, Homo sapien
tcttgagagcagtagcacgcttgaa

SEQ ID NO: 1634905 - DNA, 25 bp, Homo sapien
tattgcacgatatctaagggcctct

SEQ ID NO: 1634906 - DNA, 25 bp, Homo sapien
tgacctatcggttcagaaaatccct

SEQ ID NO: 1634907 - DNA, 25 bp, Homo sapien
aaatcttttgaattgacctatcggt

SEQ ID NO: 1634908 - DNA, 25 bp, Homo sapien
ggcgaaagcccttttactcgaatga

SEQ ID NO: 1634909 - DNA, 25 bp, Homo sapien
gcgaaagcccttttactcgaatgaa

SEQ ID NO: 1634910 - DNA, 25 bp, Homo sapien
tggcacaatcatggccttttgggct

SEQ ID NO: 1634911 - DNA, 25 bp, Homo sapien
tctcaacctcctgcatagctaggac

SEQ ID NO: 1634912 - DNA, 25 bp, Homo sapien
cacaatcatggccttttgggctcaa

SEQ ID NO: 1634913 - DNA, 25 bp, Homo sapien
cctctcaccttagcttctggagtag

SEQ ID NO: 1634914 - DNA, 25 bp, Homo sapien
atgagttactgtgcccttctccacc

SEQ ID NO: 1634915 - DNA, 25 bp, Homo sapien
ggcctcaagttatcttcgtacctgg

SEQ ID NO: 1634916 - DNA, 25 bp, Homo sapien
ttctttagtgatggggatctcgctg

SEQ ID NO: 1634917 - DNA, 25 bp, Homo sapien
ctttagtgatggggatctcgctgtg

SEQ ID NO: 1634918 - DNA, 25 bp, Homo sapien
ttctaccttccaggccatggttgcc

SEQ ID NO: 1634919 - DNA, 25 bp, Homo sapien
agatcatacactgtagcagctgtgg

SEQ ID NO: 1634920 - DNA, 25 bp, Homo sapien
acacatgcatacgtgtagggatggg

SEQ ID NO: 1634921 - DNA, 25 bp, Homo sapien
gaacactgaacattttagatcatac

SEQ ID NO: 1634922 - DNA, 25 bp, Homo sapien
cgttctgaatctctgcagtttgtca

SEQ ID NO: 1634923 - DNA, 25 bp, Homo sapien
tcccatgctgcagataccgttctga

SEQ ID NO: 1634924 - DNA, 25 bp, Homo sapien
tcgcactaaagccatccgttcagct

SEQ ID NO: 1634925 - DNA, 25 bp, Homo sapien
ccacagttctttcttcgcactaaag

SEQ ID NO: 1634926 - DNA, 25 bp, Homo sapien
tccctgaactggcatgactgcaaag

SEQ ID NO: 1634927 - DNA, 25 bp, Homo sapien
gaggtccctgaactggcatgactgc

SEQ ID NO: 1634928 - DNA, 25 bp, Homo sapien
catgactgcaaaggcggttgaaccc

SEQ ID NO: 1634929 - DNA, 25 bp, Homo sapien
tgcaaaggcggttgaaccctcctct

SEQ ID NO: 1634930 - DNA, 25 bp, Homo sapien
ccaggtcagaacacgtgttcttctc

SEQ ID NO: 1634931 - DNA, 25 bp, Homo sapien
caggtcagaacacgtgttcttctca

SEQ ID NO: 1634932 - DNA, 25 bp, Homo sapien
ctgcaggacaccttcccgcaaatcc

SEQ ID NO: 1634933 - DNA, 25 bp, Homo sapien
tgcaggacaccttcccgcaaatcct

SEQ ID NO: 1634934 - DNA, 25 bp, Homo sapien
tctgcaggacaccttcccgcaaatc

SEQ ID NO: 1634935 - DNA, 25 bp, Homo sapien
tcttacgcatgtccacgttgtggtc

SEQ ID NO: 1634936 - DNA, 25 bp, Homo sapien
agaagtcacccgtgatatgtggcaa

SEQ ID NO: 1634937 - DNA, 25 bp, Homo sapien
tgtggtcagtttgcaagaagtcacc

SEQ ID NO: 1634938 - DNA, 25 bp, Homo sapien
aacagccggactcccaacataaagt

SEQ ID NO: 1634939 - DNA, 25 bp, Homo sapien
tgtggcctccctgggttgtcttcct

SEQ ID NO: 1634940 - DNA, 25 bp, Homo sapien
ctgtggcctccctgggttgtcttcc

SEQ ID NO: 1634941 - DNA, 25 bp, Homo sapien
tgtcttcctggggtcgagggttctc

SEQ ID NO: 1634942 - DNA, 25 bp, Homo sapien
cgagggttctctggcaggcatacca

SEQ ID NO: 1634943 - DNA, 25 bp, Homo sapien
gaagctgagaattgtcaggatgttt

SEQ ID NO: 1634944 - DNA, 25 bp, Homo sapien
aaagggactgctcttgcttgccagg

SEQ ID NO: 1634945 - DNA, 25 bp, Homo sapien
tcaggatgtttgtcgccagcgttgg

SEQ ID NO: 1634946 - DNA, 25 bp, Homo sapien
ggcctgtgtggtgcctccacaaaag

SEQ ID NO: 1634947 - DNA, 25 bp, Homo sapien
gctcaggtcccacagtagcagtcat

SEQ ID NO: 1634948 - DNA, 25 bp, Homo sapien
cgatgctcaggtcccacagtagcag

SEQ ID NO: 1634949 - DNA, 25 bp, Homo sapien
atgctcaggtcccacagtagcagtc

SEQ ID NO: 1634950 - DNA, 25 bp, Homo sapien
atcgatgctcaggtcccacagtagc

SEQ ID NO: 1634951 - DNA, 25 bp, Homo sapien
gatctggagtaccagctttgacttc

SEQ ID NO: 1634952 - DNA, 25 bp, Homo sapien
caggtccgatgggatctggagtacc

SEQ ID NO: 1634953 - DNA, 25 bp, Homo sapien
aactttggcggaagccaggtccgat

SEQ ID NO: 1634954 - DNA, 25 bp, Homo sapien
gaactttggcggaagccaggtccga

SEQ ID NO: 1634955 - DNA, 25 bp, Homo sapien
ctgagcacagccactctagagtgga

SEQ ID NO: 1634956 - DNA, 25 bp, Homo sapien
tataccaagtgtttatcgctagcgc

SEQ ID NO: 1634957 - DNA, 25 bp, Homo sapien
tggctcttgaaaaccactgaaggtc

SEQ ID NO: 1634958 - DNA, 25 bp, Homo sapien
gaaaggctgaagctccctcaggagg

SEQ ID NO: 1634959 - DNA, 25 bp, Homo sapien
agaaactcggcttgggcaccatcag

SEQ ID NO: 1634960 - DNA, 25 bp, Homo sapien
agtaggagttctgccagatacacag

SEQ ID NO: 1634961 - DNA, 25 bp, Homo sapien
ccagccggccataatgcagcgtggt

SEQ ID NO: 1634962 - DNA, 25 bp, Homo sapien
tcgaaaggttagtaggagttctgcc

SEQ ID NO: 1634963 - DNA, 25 bp, Homo sapien
tgcgtgtggtcagctgtagcttccg

SEQ ID NO: 1634964 - DNA, 25 bp, Homo sapien
cctggttgctccagaaaggtcatcg

SEQ ID NO: 1634965 - DNA, 25 bp, Homo sapien
gtagcttccggctgtctcacttctg

SEQ ID NO: 1634966 - DNA, 25 bp, Homo sapien
taagaatgtttcttgggtagcccag

SEQ ID NO: 1634967 - DNA, 25 bp, Homo sapien
gctgctgttaacactggtgtgctgg

SEQ ID NO: 1634968 - DNA, 25 bp, Homo sapien
taaatacagacgtggcagggtccct

SEQ ID NO: 1634969 - DNA, 25 bp, Homo sapien
tcgtagctgcccagagaacggatgt

SEQ ID NO: 1634970 - DNA, 25 bp, Homo sapien
tcccgagagagctcgttgtggaacc

SEQ ID NO: 1634971 - DNA, 25 bp, Homo sapien
tgccatgtggcggtttctcttccat

SEQ ID NO: 1634972 - DNA, 25 bp, Homo sapien
agtgtcatcctcaaacgtggctccc

SEQ ID NO: 1634973 - DNA, 25 bp, Homo sapien
cctgaaagttgcacaccagctgcca

SEQ ID NO: 1634974 - DNA, 25 bp, Homo sapien
gcctcaggaccagtcagttacttgg

SEQ ID NO: 1634975 - DNA, 25 bp, Homo sapien
gaaaggattggctcattcaactgga

SEQ ID NO: 1634976 - DNA, 25 bp, Homo sapien
tcacagattacaagaaggtaaaagt

SEQ ID NO: 1634977 - DNA, 25 bp, Homo sapien
gctcgtaccaggtccaaaaagcaaa

SEQ ID NO: 1634978 - DNA, 25 bp, Homo sapien
tcgtaccaggtccaaaaagcaaaga

SEQ ID NO: 1634979 - DNA, 25 bp, Homo sapien
tcagctcgtaccaggtccaaaaagc

SEQ ID NO: 1634980 - DNA, 25 bp, Homo sapien
cagctcgtaccaggtccaaaaagca

SEQ ID NO: 1634981 - DNA, 25 bp, Homo sapien
cccactggtcattattagaggcctg

SEQ ID NO: 1634982 - DNA, 25 bp, Homo sapien
tagaggcctgtctgcgagcatcctc

SEQ ID NO: 1634983 - DNA, 25 bp, Homo sapien
ttattagaggcctgtctgcgagcat

SEQ ID NO: 1634984 - DNA, 25 bp, Homo sapien
cacccactggtcattattagaggcc

SEQ ID NO: 1634985 - DNA, 25 bp, Homo sapien
tcagatctcgggctgtgttccagct

SEQ ID NO: 1634986 - DNA, 25 bp, Homo sapien
tctcgggctgtgttccagctgaagg

SEQ ID NO: 1634987 - DNA, 25 bp, Homo sapien
gatctcgggctgtgttccagctgaa

SEQ ID NO: 1634988 - DNA, 25 bp, Homo sapien
tcgggctgtgttccagctgaaggtt

SEQ ID NO: 1634989 - DNA, 25 bp, Homo sapien
tctgccatccactggtgggtagtgg

SEQ ID NO: 1634990 - DNA, 25 bp, Homo sapien
tgccatccactggtgggtagtggtc

SEQ ID NO: 1634991 - DNA, 25 bp, Homo sapien
ccatccactggtgggtagtggtcca

SEQ ID NO: 1634992 - DNA, 25 bp, Homo sapien
catccactggtgggtagtggtccat

SEQ ID NO: 1634993 - DNA, 25 bp, Homo sapien
cagtcgaaaccacattgacaggctg

SEQ ID NO: 1634994 - DNA, 25 bp, Homo sapien
gacaggctgttttcataggcgttca

SEQ ID NO: 1634995 - DNA, 25 bp, Homo sapien
aactgttggcacatccagcaaatgg

SEQ ID NO: 1634996 - DNA, 25 bp, Homo sapien
tttgtggaaaagcacccaacagtcg

SEQ ID NO: 1634997 - DNA, 25 bp, Homo sapien
agaatttgcacagccgcacatgggt

SEQ ID NO: 1634998 - DNA, 25 bp, Homo sapien
aatttgcacagccgcacatgggtct

SEQ ID NO: 1634999 - DNA, 25 bp, Homo sapien
tcaacccagaaagaatttgcacagc

SEQ ID NO: 1635000 - DNA, 25 bp, Homo sapien
ttgcacagccgcacatgggtctggg

SEQ ID NO: 1635001 - DNA, 25 bp, Homo sapien
agcagatgccagcaacagttgcaat

SEQ ID NO: 1635002 - DNA, 25 bp, Homo sapien
gccggttagattggccagcccttct

SEQ ID NO: 1635003 - DNA, 25 bp, Homo sapien
tgccagcaacagttgcaatctctgg

SEQ ID NO: 1635004 - DNA, 25 bp, Homo sapien
aatctctggccggttagattggcca

SEQ ID NO: 1635005 - DNA, 25 bp, Homo sapien
gttcttgctgtaaacctgcaggaag

SEQ ID NO: 1635006 - DNA, 25 bp, Homo sapien
tgattggccgtgcttggctcacgtg

SEQ ID NO: 1635007 - DNA, 25 bp, Homo sapien
tcaggtggcaaagaagtcctcagca

SEQ ID NO: 1635008 - DNA, 25 bp, Homo sapien
ctgcaggaagtgaagtgctcggcct

SEQ ID NO: 1635009 - DNA, 25 bp, Homo sapien
tgtgatgaatgggtcatggccatga

SEQ ID NO: 1635010 - DNA, 25 bp, Homo sapien
tgctgccgtttccacggccctttgg

SEQ ID NO: 1635011 - DNA, 25 bp, Homo sapien
tggaggcaaactgaaggtcatcgtc

SEQ ID NO: 1635012 - DNA, 25 bp, Homo sapien
gattcccggatctgtagccctcctt

SEQ ID NO: 1635013 - DNA, 25 bp, Homo sapien
ctgagagagacttggcaccacggca

SEQ ID NO: 1635014 - DNA, 25 bp, Homo sapien
actgcagggcgacgggcatccgcag

SEQ ID NO: 1635015 - DNA, 25 bp, Homo sapien
accacggcacatcgctgctgatcag

SEQ ID NO: 1635016 - DNA, 25 bp, Homo sapien
cagctccctctagtcggcaggaagt

SEQ ID NO: 1635017 - DNA, 25 bp, Homo sapien
ttggcggggatatttgggtagcatt

SEQ ID NO: 1635018 - DNA, 25 bp, Homo sapien
tgaggttggcggggatatttgggta

SEQ ID NO: 1635019 - DNA, 25 bp, Homo sapien
ggttggcggggatatttgggtagca

SEQ ID NO: 1635020 - DNA, 25 bp, Homo sapien
gttggcggggatatttgggtagcat

SEQ ID NO: 1635021 - DNA, 25 bp, Homo sapien
tgggtaatgggtatttacacatatt

SEQ ID NO: 1635022 - DNA, 25 bp, Homo sapien
cacatgtatggcatgggtaatgggt

SEQ ID NO: 1635023 - DNA, 25 bp, Homo sapien
acatacacatgtatggcatgggtaa

SEQ ID NO: 1635024 - DNA, 25 bp, Homo sapien
tgtatggcatgggtaatgggtattt

SEQ ID NO: 1635025 - DNA, 25 bp, Homo sapien
tacctgtgctatataggttttgaat

SEQ ID NO: 1635026 - DNA, 25 bp, Homo sapien
tgaatatgttatgtttaggtttctg

SEQ ID NO: 1635027 - DNA, 25 bp, Homo sapien
aatacttacctgtgctatataggtt

SEQ ID NO: 1635028 - DNA, 25 bp, Homo sapien
aatatgttatgtttaggtttctggg

SEQ ID NO: 1635029 - DNA, 25 bp, Homo sapien
tgcagccttgctggttcagcttcct

SEQ ID NO: 1635030 - DNA, 25 bp, Homo sapien
tcctctggctaagagggttttccag

SEQ ID NO: 1635031 - DNA, 25 bp, Homo sapien
tccctaaggagcgtgtgtcccgagg

SEQ ID NO: 1635032 - DNA, 25 bp, Homo sapien
gctgtgatccctaaggagcgtgtgt

SEQ ID NO: 1635033 - DNA, 25 bp, Homo sapien
tcacgtcagagactccagagccgcc

SEQ ID NO: 1635034 - DNA, 25 bp, Homo sapien
ttccttgaagctttttgccgtcatc

SEQ ID NO: 1635035 - DNA, 25 bp, Homo sapien
tttttgccgtcatctggccactcag

SEQ ID NO: 1635036 - DNA, 25 bp, Homo sapien
gtcatctggccactcagtcggcggg

SEQ ID NO: 1635037 - DNA, 25 bp, Homo sapien
agaaggtgccctggttctcgactca

SEQ ID NO: 1635038 - DNA, 25 bp, Homo sapien
gaaggtgccctggttctcgactcat

SEQ ID NO: 1635039 - DNA, 25 bp, Homo sapien
gtgccctggttctcgactcatcagc

SEQ ID NO: 1635040 - DNA, 25 bp, Homo sapien
aggtgccctggttctcgactcatca

SEQ ID NO: 1635041 - DNA, 25 bp, Homo sapien
gcgctgccagcagcctgtcccccct

SEQ ID NO: 1635042 - DNA, 25 bp, Homo sapien
catttcctctcaggcccagcgctgc

SEQ ID NO: 1635043 - DNA, 25 bp, Homo sapien
ctgctgcccgcaaagatggcctcat

SEQ ID NO: 1635044 - DNA, 25 bp, Homo sapien
atggcctcatttcctctcaggccca

SEQ ID NO: 1635045 - DNA, 25 bp, Homo sapien
tgacctcatgccgatcaacgtgctt

SEQ ID NO: 1635046 - DNA, 25 bp, Homo sapien
tggagtctttgacctcatgccgatc

SEQ ID NO: 1635047 - DNA, 25 bp, Homo sapien
tgacagcacaaagcttcaaggtcgg

SEQ ID NO: 1635048 - DNA, 25 bp, Homo sapien
caacgtgcttctctcggttccctgt

SEQ ID NO: 1635049 - DNA, 25 bp, Homo sapien
tgatagcaggtgaacggtgaagagt

SEQ ID NO: 1635050 - DNA, 25 bp, Homo sapien
gcctgtggtcgctgctcaggccatg

SEQ ID NO: 1635051 - DNA, 25 bp, Homo sapien
cttggtgatagcaggtgaacggtga

SEQ ID NO: 1635052 - DNA, 25 bp, Homo sapien
agcaggtgaacggtgaagagtccat

SEQ ID NO: 1635053 - DNA, 25 bp, Homo sapien
ggcaggtcacgatctccatgacagc

SEQ ID NO: 1635054 - DNA, 25 bp, Homo sapien
tcacgatctccatgacagccagtcg

SEQ ID NO: 1635055 - DNA, 25 bp, Homo sapien
cctcggcaggtcacgatctccatga

SEQ ID NO: 1635056 - DNA, 25 bp, Homo sapien
gtggcatccttgcacctgtttttcc

SEQ ID NO: 1635057 - DNA, 25 bp, Homo sapien
cttctgagctcaggtaacccgccca

SEQ ID NO: 1635058 - DNA, 25 bp, Homo sapien
aacttctgagctcaggtaacccgcc

SEQ ID NO: 1635059 - DNA, 25 bp, Homo sapien
cctcagcctctcagagtgctgggat

SEQ ID NO: 1635060 - DNA, 25 bp, Homo sapien
gaacttctgagctcaggtaacccgc

SEQ ID NO: 1635061 - DNA, 25 bp, Homo sapien
tggccgaatcacaattcactgagga

SEQ ID NO: 1635062 - DNA, 25 bp, Homo sapien
cagcagaagccacgcttggcagtct

SEQ ID NO: 1635063 - DNA, 25 bp, Homo sapien
tgtacagaatgaacacgaggccaga

SEQ ID NO: 1635064 - DNA, 25 bp, Homo sapien
cagtctgtggccgaatcacaattca

SEQ ID NO: 1635065 - DNA, 25 bp, Homo sapien
ctgctgaggacaggcagcgccctca

SEQ ID NO: 1635066 - DNA, 25 bp, Homo sapien
gaaggcagagccacaacacaggctg

SEQ ID NO: 1635067 - DNA, 25 bp, Homo sapien
gctgctgaggacaggcagcgccctc

SEQ ID NO: 1635068 - DNA, 25 bp, Homo sapien
tctgcactctgaaggcagagccaca

SEQ ID NO: 1635069 - DNA, 25 bp, Homo sapien
tacagcatcgagcatgtggacctgg

SEQ ID NO: 1635070 - DNA, 25 bp, Homo sapien
cagcatctcggtgttggaagttccc

SEQ ID NO: 1635071 - DNA, 25 bp, Homo sapien
cgagtgtgagcgcaacgtgagcttc

SEQ ID NO: 1635072 - DNA, 25 bp, Homo sapien
aggacctcggcgatgacaacagcaa

SEQ ID NO: 1635073 - DNA, 25 bp, Homo sapien
ggagtatgtcatccccgagctcaac

SEQ ID NO: 1635074 - DNA, 25 bp, Homo sapien
ccaaggtgacggagcaactgctgaa

SEQ ID NO: 1635075 - DNA, 25 bp, Homo sapien
catcctggaagatgctacgcccaca

SEQ ID NO: 1635076 - DNA, 25 bp, Homo sapien
cagccaccaagcatgggaccgggcg

SEQ ID NO: 1635077 - DNA, 25 bp, Homo sapien
tgcaaagcgtgtctggagttcacac

SEQ ID NO: 1635078 - DNA, 25 bp, Homo sapien
cgtgggactcccgtccatggatctc

SEQ ID NO: 1635079 - DNA, 25 bp, Homo sapien
gagttcacactgtgagccatgtcac

SEQ ID NO: 1635080 - DNA, 25 bp, Homo sapien
catgtcacttagagctccgtgggac

SEQ ID NO: 1635081 - DNA, 25 bp, Homo sapien
gggtgagagtcccatagggcactcg

SEQ ID NO: 1635082 - DNA, 25 bp, Homo sapien
gcaattcaagatgaattgtagggtg

SEQ ID NO: 1635083 - DNA, 25 bp, Homo sapien
agatgaattgtagggtgtggacaca

SEQ ID NO: 1635084 - DNA, 25 bp, Homo sapien
gagggtgagagtcccatagggcact

SEQ ID NO: 1635085 - DNA, 25 bp, Homo sapien
aatcttctatggacgaggagaccac

SEQ ID NO: 1635086 - DNA, 25 bp, Homo sapien
agttaggctaagacacgcactggcc

SEQ ID NO: 1635087 - DNA, 25 bp, Homo sapien
ttcctacaggcgacagagggttctg

SEQ ID NO: 1635088 - DNA, 25 bp, Homo sapien
gaaatacttccctagcccagtcagt

SEQ ID NO: 1635089 - DNA, 25 bp, Homo sapien
gacactggcaccaagatactggatg

SEQ ID NO: 1635090 - DNA, 25 bp, Homo sapien
tctgctttgtagacgagaaaaccga

SEQ ID NO: 1635091 - DNA, 25 bp, Homo sapien
cacatatgaccttgctgggctcaca

SEQ ID NO: 1635092 - DNA, 25 bp, Homo sapien
gctattaatacacgggcatgcgagt

SEQ ID NO: 1635093 - DNA, 25 bp, Homo sapien
gcatctacccgccattcacgtggtg

SEQ ID NO: 1635094 - DNA, 25 bp, Homo sapien
tcacatgggaggtgttttttagccc

SEQ ID NO: 1635095 - DNA, 25 bp, Homo sapien
gatttccctctcctgtaacagcgca

SEQ ID NO: 1635096 - DNA, 25 bp, Homo sapien
cagcgcagtgcaggtattcagtgag

SEQ ID NO: 1635097 - DNA, 25 bp, Homo sapien
gccacttaacccttaccttgcaaga

SEQ ID NO: 1635098 - DNA, 25 bp, Homo sapien
aattctagtttagctgggccgggcg

SEQ ID NO: 1635099 - DNA, 25 bp, Homo sapien
aacatgccacttaacccttaccttg

SEQ ID NO: 1635100 - DNA, 25 bp, Homo sapien
attctagtttagctgggccgggcgc

SEQ ID NO: 1635101 - DNA, 25 bp, Homo sapien
tggccgaagatagcagcaggttttt

SEQ ID NO: 1635102 - DNA, 25 bp, Homo sapien
ttcagatcattcgaatcattttggg

SEQ ID NO: 1635103 - DNA, 25 bp, Homo sapien
gaggttgatgttctatccaatggcc

SEQ ID NO: 1635104 - DNA, 25 bp, Homo sapien
gggacttaatcatgtacatggacaa

SEQ ID NO: 1635105 - DNA, 25 bp, Homo sapien
gaaaaaggctctgtccatgcccctg

SEQ ID NO: 1635106 - DNA, 25 bp, Homo sapien
agggcagacattccacttgcacaga

SEQ ID NO: 1635107 - DNA, 25 bp, Homo sapien
catcatgcagtatccaccgtgggca

SEQ ID NO: 1635108 - DNA, 25 bp, Homo sapien
caggcaatagaggagactcggtgac

SEQ ID NO: 1635109 - DNA, 25 bp, Homo sapien
ccttttccttcaggtgccggagaca

SEQ ID NO: 1635110 - DNA, 25 bp, Homo sapien
gtaagcagaagccttttccttcagg

SEQ ID NO: 1635111 - DNA, 25 bp, Homo sapien
ctaggtgagggtgatgtaagcagaa

SEQ ID NO: 1635112 - DNA, 25 bp, Homo sapien
tcaggtgccggagacagaggtgaca

SEQ ID NO: 1635113 - DNA, 25 bp, Homo sapien
atcgcagtcatcacaaaacagcagc

SEQ ID NO: 1635114 - DNA, 25 bp, Homo sapien
aggcagtacatgtggtaaccccgat

SEQ ID NO: 1635115 - DNA, 25 bp, Homo sapien
gcagtacatgtggtaaccccgatcg

SEQ ID NO: 1635116 - DNA, 25 bp, Homo sapien
tcgcagtcatcacaaaacagcagct

SEQ ID NO: 1635117 - DNA, 25 bp, Homo sapien
ggggtgagacccgcccagctggcac

SEQ ID NO: 1635118 - DNA, 25 bp, Homo sapien
gggtgagacccgcccagctggcacc

SEQ ID NO: 1635119 - DNA, 25 bp, Homo sapien
ctgggggcacgggcaccagaaacgg

SEQ ID NO: 1635120 - DNA, 25 bp, Homo sapien
ggttcgatttatggacaccggcata

SEQ ID NO: 1635121 - DNA, 25 bp, Homo sapien
cgctccgcctgtggaaggctttaaa

SEQ ID NO: 1635122 - DNA, 25 bp, Homo sapien
catttccctagctggctgaccctgg

SEQ ID NO: 1635123 - DNA, 25 bp, Homo sapien
taagatgatctgataccagctctgc

SEQ ID NO: 1635124 - DNA, 25 bp, Homo sapien
ctgccagcggtaggtccgcacggct

SEQ ID NO: 1635125 - DNA, 25 bp, Homo sapien
tcaccgtgaattgtaaacacgaggg

SEQ ID NO: 1635126 - DNA, 25 bp, Homo sapien
gaggttccgcacaggctgcaggatt

SEQ ID NO: 1635127 - DNA, 25 bp, Homo sapien
gcacggctgccgtcatgttcaccgt

SEQ ID NO: 1635128 - DNA, 25 bp, Homo sapien
tacccctggctcatgacgccaggat

SEQ ID NO: 1635129 - DNA, 25 bp, Homo sapien
gggagccatagctcagcccctaccc

SEQ ID NO: 1635130 - DNA, 25 bp, Homo sapien
gtgcagttaggaggtcaccgtgccc

SEQ ID NO: 1635131 - DNA, 25 bp, Homo sapien
gctcatgacgccaggatgagctgcc

SEQ ID NO: 1635132 - DNA, 25 bp, Homo sapien
atgaggtcctcgggacaccccgtct

SEQ ID NO: 1635133 - DNA, 25 bp, Homo sapien
tgacagtgccgtcgggcgccttctt

SEQ ID NO: 1635134 - DNA, 25 bp, Homo sapien
tcgggacaccccgtcttcttggagc

SEQ ID NO: 1635135 - DNA, 25 bp, Homo sapien
cagaagtcacagtagccgttgggga

SEQ ID NO: 1635136 - DNA, 25 bp, Homo sapien
ttcctttgtgcctcagggacccagg

SEQ ID NO: 1635137 - DNA, 25 bp, Homo sapien
tttcctttgtgcctcagggacccag

SEQ ID NO: 1635138 - DNA, 25 bp, Homo sapien
agggactctcaccacaggcaaggct

SEQ ID NO: 1635139 - DNA, 25 bp, Homo sapien
ggtgggtgtgggtgtagtggtagct

SEQ ID NO: 1635140 - DNA, 25 bp, Homo sapien
aagggcagggcgtggcgttcggcgt

SEQ ID NO: 1635141 - DNA, 25 bp, Homo sapien
ggcgtggcgttcggcgttctcctcc

SEQ ID NO: 1635142 - DNA, 25 bp, Homo sapien
ggtgtgggtgtagtggtagctgagc

SEQ ID NO: 1635143 - DNA, 25 bp, Homo sapien
ctcccccctcagccagagacctgag

SEQ ID NO: 1635144 - DNA, 25 bp, Homo sapien
tcccccctcagccagagacctgagc

SEQ ID NO: 1635145 - DNA, 25 bp, Homo sapien
cacagacatacggcttgtctcggtc

SEQ ID NO: 1635146 - DNA, 25 bp, Homo sapien
tatcacagacatacggcttgtctcg

SEQ ID NO: 1635147 - DNA, 25 bp, Homo sapien
atcacagacatacggcttgtctcgg

SEQ ID NO: 1635148 - DNA, 25 bp, Homo sapien
tcacagacatacggcttgtctcggt

SEQ ID NO: 1635149 - DNA, 25 bp, Homo sapien
gaagcggtgtcctggcgtttccgga

SEQ ID NO: 1635150 - DNA, 25 bp, Homo sapien
ttccggagacccccgatgccatatg

SEQ ID NO: 1635151 - DNA, 25 bp, Homo sapien
gtttccggagacccccgatgccata

SEQ ID NO: 1635152 - DNA, 25 bp, Homo sapien
ctggcgtttccggagacccccgatg

SEQ ID NO: 1635153 - DNA, 25 bp, Homo sapien
tcttccacctcgaggtcatgcggaa

SEQ ID NO: 1635154 - DNA, 25 bp, Homo sapien
atgcggaaactccagcaactgctgt

SEQ ID NO: 1635155 - DNA, 25 bp, Homo sapien
gaggtcatgcggaaactccagcaac

SEQ ID NO: 1635156 - DNA, 25 bp, Homo sapien
tccaagtcttccacctcgaggtcat

SEQ ID NO: 1635157 - DNA, 25 bp, Homo sapien
tccttcagctcaatcttcttctccc

SEQ ID NO: 1635158 - DNA, 25 bp, Homo sapien
gacagtccataatggtctcctcctc

SEQ ID NO: 1635159 - DNA, 25 bp, Homo sapien
ctgacagtccataatggtctcctcc

SEQ ID NO: 1635160 - DNA, 25 bp, Homo sapien
agctcaatcttcttctcccccgtct

SEQ ID NO: 1635161 - DNA, 25 bp, Homo sapien
cgggaggccaccctccttcttcagg

SEQ ID NO: 1635162 - DNA, 25 bp, Homo sapien
ctgcacacagtagagcctcgaggac

SEQ ID NO: 1635163 - DNA, 25 bp, Homo sapien
gcacacagtagagcctcgaggaccg

SEQ ID NO: 1635164 - DNA, 25 bp, Homo sapien
tccgggaggccaccctccttcttca

SEQ ID NO: 1635165 - DNA, 25 bp, Homo sapien
tatggacagatccagacactcgcag

SEQ ID NO: 1635166 - DNA, 25 bp, Homo sapien
tactcagggaagacacagcgactct

SEQ ID NO: 1635167 - DNA, 25 bp, Homo sapien
tcagagacaattagctggccaggcg

SEQ ID NO: 1635168 - DNA, 25 bp, Homo sapien
aagacacagttaggccatcaggcac

SEQ ID NO: 1635169 - DNA, 25 bp, Homo sapien
tacgtgtaaatctgtcccggggcca

SEQ ID NO: 1635170 - DNA, 25 bp, Homo sapien
cagcgggcggggtacgtgtaaatct

SEQ ID NO: 1635171 - DNA, 25 bp, Homo sapien
cgatcttgtactcgcagggcctgag

SEQ ID NO: 1635172 - DNA, 25 bp, Homo sapien
cttgtactcgcagggcctgagtctg

SEQ ID NO: 1635173 - DNA, 25 bp, Homo sapien
gtcgaggaagggcagtcgcaggctg

SEQ ID NO: 1635174 - DNA, 25 bp, Homo sapien
taactgcggcagtgctcgatggcct

SEQ ID NO: 1635175 - DNA, 25 bp, Homo sapien
ggcccgcggtgggtcttctccatcc

SEQ ID NO: 1635176 - DNA, 25 bp, Homo sapien
gttgttctgggccacgccggtctgc

SEQ ID NO: 1635177 - DNA, 25 bp, Homo sapien
cggctgtcagcaagggcaggcgcac

SEQ ID NO: 1635178 - DNA, 25 bp, Homo sapien
agggcaggcgcacagggtcgcccag

SEQ ID NO: 1635179 - DNA, 25 bp, Homo sapien
tcagcaagggcaggcgcacagggtc

SEQ ID NO: 1635180 - DNA, 25 bp, Homo sapien
ggcgggcggctgtcagcaagggcag

SEQ ID NO: 1635181 - DNA, 25 bp, Homo sapien
catttacaaagatgcacgatgcgca

SEQ ID NO: 1635182 - DNA, 25 bp, Homo sapien
tagtgtggacttcactccagttgcc

SEQ ID NO: 1635183 - DNA, 25 bp, Homo sapien
tcacacgggattcacacacaaagag

SEQ ID NO: 1635184 - DNA, 25 bp, Homo sapien
gacatatagttccaaaggacacgga

SEQ ID NO: 1635185 - DNA, 25 bp, Homo sapien
agcggtcgggcgggcgctgaggccg

SEQ ID NO: 1635186 - DNA, 25 bp, Homo sapien
ctcagggggccagggatgacagtgg

SEQ ID NO: 1635187 - DNA, 25 bp, Homo sapien
gtcctcccagcggtcgggcgggcgc

SEQ ID NO: 1635188 - DNA, 25 bp, Homo sapien
acagtggccatcttgctccccgggt

SEQ ID NO: 1635189 - DNA, 25 bp, Homo sapien
gagtccccaccttcacccccacaga

SEQ ID NO: 1635190 - DNA, 25 bp, Homo sapien
tccccaccttcacccccacagagac

SEQ ID NO: 1635191 - DNA, 25 bp, Homo sapien
attctttcaggagccagggagtccc

SEQ ID NO: 1635192 - DNA, 25 bp, Homo sapien
caggagccagggagtccccaccttc

SEQ ID NO: 1635193 - DNA, 25 bp, Homo sapien
gtgaggggccccatcgcctgtagat

SEQ ID NO: 1635194 - DNA, 25 bp, Homo sapien
tgggcccctgctcacggctgtagca

SEQ ID NO: 1635195 - DNA, 25 bp, Homo sapien
accaacctgcacaagagccccgttc

SEQ ID NO: 1635196 - DNA, 25 bp, Homo sapien
atcgcctgtagatccaccaacctgc

SEQ ID NO: 1635197 - DNA, 25 bp, Homo sapien
gaatggcggtggccatggcccgctc

SEQ ID NO: 1635198 - DNA, 25 bp, Homo sapien
ggttctgaatggcggtggccatggc

SEQ ID NO: 1635199 - DNA, 25 bp, Homo sapien
ctgaatggcggtggccatggcccgc

SEQ ID NO: 1635200 - DNA, 25 bp, Homo sapien
ttctgaatggcggtggccatggccc

SEQ ID NO: 1635201 - DNA, 25 bp, Homo sapien
tagtgactgagggtgctccttagat

SEQ ID NO: 1635202 - DNA, 25 bp, Homo sapien
tcaagtgacaggatagtgactgagg

SEQ ID NO: 1635203 - DNA, 25 bp, Homo sapien
tgagggtgctccttagattaggtgc

SEQ ID NO: 1635204 - DNA, 25 bp, Homo sapien
ttagattaggtgctgcagaacacct

SEQ ID NO: 1635205 - DNA, 25 bp, Homo sapien
cacgggtcatggaggggccggtagg

SEQ ID NO: 1635206 - DNA, 25 bp, Homo sapien
gaggcaatgtggccacgggtcatgg

SEQ ID NO: 1635207 - DNA, 25 bp, Homo sapien
gcaatgtggccacgggtcatggagg

SEQ ID NO: 1635208 - DNA, 25 bp, Homo sapien
atgagagaaacacggggagaactgc

SEQ ID NO: 1635209 - DNA, 25 bp, Homo sapien
gctgggtggggaggctagtgtggct

SEQ ID NO: 1635210 - DNA, 25 bp, Homo sapien
ggtggggaggctagtgtggctacaa

SEQ ID NO: 1635211 - DNA, 25 bp, Homo sapien
ggaggctagtgtggctacaaggcgg

SEQ ID NO: 1635212 - DNA, 25 bp, Homo sapien
tggggaggctagtgtggctacaagg

SEQ ID NO: 1635213 - DNA, 25 bp, Homo sapien
gattggttatctccacggattgcga

SEQ ID NO: 1635214 - DNA, 25 bp, Homo sapien
ttagagacttgagtcaccccgcctg

SEQ ID NO: 1635215 - DNA, 25 bp, Homo sapien
gtcataatgcctgggactgaagccc

SEQ ID NO: 1635216 - DNA, 25 bp, Homo sapien
ttgcgagcaatcatgaagaccttag

SEQ ID NO: 1635217 - DNA, 25 bp, Homo sapien
acacaagcaagctgggcggcgtccg

SEQ ID NO: 1635218 - DNA, 25 bp, Homo sapien
cacaagcaagctgggcggcgtccgg

SEQ ID NO: 1635219 - DNA, 25 bp, Homo sapien
ggaggccttgaagctttgccagcag

SEQ ID NO: 1635220 - DNA, 25 bp, Homo sapien
tcaggggtgagcagtccgggcccgg

SEQ ID NO: 1635221 - DNA, 25 bp, Homo sapien
agcagtccgggcccggtcctggagg

SEQ ID NO: 1635222 - DNA, 25 bp, Homo sapien
ggctgaggctgccgtcgtgggaggg

SEQ ID NO: 1635223 - DNA, 25 bp, Homo sapien
aggggttgggccgctcagcttcagg

SEQ ID NO: 1635224 - DNA, 25 bp, Homo sapien
ggggttgggccgctcagcttcaggg

SEQ ID NO: 1635225 - DNA, 25 bp, Homo sapien
ctggagaccagaaagagctgcggag

SEQ ID NO: 1635226 - DNA, 25 bp, Homo sapien
gaggacaaaagacacccctggagac

SEQ ID NO: 1635227 - DNA, 25 bp, Homo sapien
agactgagcccgaaggctggtggcc

SEQ ID NO: 1635228 - DNA, 25 bp, Homo sapien
gagagagacaagtaggaggacaaaa

SEQ ID NO: 1635229 - DNA, 25 bp, Homo sapien
ctcgacaggtttcccacatgacttc

SEQ ID NO: 1635230 - DNA, 25 bp, Homo sapien
caggtttcccacatgacttcaggag

SEQ ID NO: 1635231 - DNA, 25 bp, Homo sapien
gtttcccacatgacttcaggagtcc

SEQ ID NO: 1635232 - DNA, 25 bp, Homo sapien
gacaggtttcccacatgacttcagg

SEQ ID NO: 1635233 - DNA, 25 bp, Homo sapien
tcttcactctctaactccaacaatt

SEQ ID NO: 1635234 - DNA, 25 bp, Homo sapien
caacaattcatcaatgttgatctca

SEQ ID NO: 1635235 - DNA, 25 bp, Homo sapien
actctctaactccaacaattcatca

SEQ ID NO: 1635236 - DNA, 25 bp, Homo sapien
tgttgatctcatcgggcatgtctgc

SEQ ID NO: 1635237 - DNA, 25 bp, Homo sapien
ctccctcgcctttgtccagggctct

SEQ ID NO: 1635238 - DNA, 25 bp, Homo sapien
cagggagggaggggtgcttaggatc

SEQ ID NO: 1635239 - DNA, 25 bp, Homo sapien
cgcctttgtccagggctctgcagga

SEQ ID NO: 1635240 - DNA, 25 bp, Homo sapien
ccctccctccctcgcctttgtccag

SEQ ID NO: 1635241 - DNA, 25 bp, Homo sapien
cccagctggcgggttctggagcatt

SEQ ID NO: 1635242 - DNA, 25 bp, Homo sapien
ggacagcactgccaagacgggacat

SEQ ID NO: 1635243 - DNA, 25 bp, Homo sapien
taatgtggcagtccgggacagcact

SEQ ID NO: 1635244 - DNA, 25 bp, Homo sapien
gcccagctggcgggttctggagcat

SEQ ID NO: 1635245 - DNA, 25 bp, Homo sapien
ggccctgtaccagcccgatgcctgg

SEQ ID NO: 1635246 - DNA, 25 bp, Homo sapien
tgacagatgggctgagagagccccg

SEQ ID NO: 1635247 - DNA, 25 bp, Homo sapien
ggggccctgtaccagcccgatgcct

SEQ ID NO: 1635248 - DNA, 25 bp, Homo sapien
ccggggccctgtaccagcccgatgc

SEQ ID NO: 1635249 - DNA, 25 bp, Homo sapien
ggccccgggagcctcggggctggca

SEQ ID NO: 1635250 - DNA, 25 bp, Homo sapien
gccccgggagcctcggggctggcac

SEQ ID NO: 1635251 - DNA, 25 bp, Homo sapien
ccccgggagcctcggggctggcacg

SEQ ID NO: 1635252 - DNA, 25 bp, Homo sapien
tcagcgcttgtgcttgaaggtggtc

SEQ ID NO: 1635253 - DNA, 25 bp, Homo sapien
tgtgcttgaaggtggtcagtttttt

SEQ ID NO: 1635254 - DNA, 25 bp, Homo sapien
gcttgtgcttgaaggtggtcagttt

SEQ ID NO: 1635255 - DNA, 25 bp, Homo sapien
cagcgcttgtgcttgaaggtggtca

SEQ ID NO: 1635256 - DNA, 25 bp, Homo sapien
tgcagctcccgccggtcatacttga

SEQ ID NO: 1635257 - DNA, 25 bp, Homo sapien
gcccgcgatggagactgcagcttgc

SEQ ID NO: 1635258 - DNA, 25 bp, Homo sapien
tgcagcttgctcagcacgcgcttgc

SEQ ID NO: 1635259 - DNA, 25 bp, Homo sapien
atacttgacggtgacgcgcgcgtgc

SEQ ID NO: 1635260 - DNA, 25 bp, Homo sapien
agagtaggccgctgcgtcggcttga

SEQ ID NO: 1635261 - DNA, 25 bp, Homo sapien
gtttccccgtctgcagtgcgagagt

SEQ ID NO: 1635262 - DNA, 25 bp, Homo sapien
ctcgcgccccgggtgcttcttacgg

SEQ ID NO: 1635263 - DNA, 25 bp, Homo sapien
cccgtctgcagtgcgagagtaggcc

SEQ ID NO: 1635264 - DNA, 25 bp, Homo sapien
ctctgaacgcgctgagggccgttga

SEQ ID NO: 1635265 - DNA, 25 bp, Homo sapien
cacactgaaggtccggaaaggcgac

SEQ ID NO: 1635266 - DNA, 25 bp, Homo sapien
taggcgttcgccattggctctggcg

SEQ ID NO: 1635267 - DNA, 25 bp, Homo sapien
tcgggagccgcttccaataggcgtt

SEQ ID NO: 1635268 - DNA, 25 bp, Homo sapien
caccaacagggtgacgtaagatgtt

SEQ ID NO: 1635269 - DNA, 25 bp, Homo sapien
actgaggccctgctacgtgtcaggc

SEQ ID NO: 1635270 - DNA, 25 bp, Homo sapien
caggcactggcgctggttataacag

SEQ ID NO: 1635271 - DNA, 25 bp, Homo sapien
aatgaggcagtagccacacggagac

SEQ ID NO: 1635272 - DNA, 25 bp, Homo sapien
aggcctgcatgctccgctgcttccg

SEQ ID NO: 1635273 - DNA, 25 bp, Homo sapien
gctgttcgtgatggtgttgatcctc

SEQ ID NO: 1635274 - DNA, 25 bp, Homo sapien
gctttggaaatcctctaggaggctc

SEQ ID NO: 1635275 - DNA, 25 bp, Homo sapien
tgatcacaagacactatctgaggtg

SEQ ID NO: 1635276 - DNA, 25 bp, Homo sapien
acatatgtcctgtgaccgccctgtc

SEQ ID NO: 1635277 - DNA, 25 bp, Homo sapien
aactgggtccctgcatactgtgtgc

SEQ ID NO: 1635278 - DNA, 25 bp, Homo sapien
gtgcttaaggtcatctgtctcccaa

SEQ ID NO: 1635279 - DNA, 25 bp, Homo sapien
tatggtgtttacagaaccaaggcac

SEQ ID NO: 1635280 - DNA, 25 bp, Homo sapien
tcaaggaccagagcaagactgactg

SEQ ID NO: 1635281 - DNA, 25 bp, Homo sapien
tcagggttagagtgtccctcggaag

SEQ ID NO: 1635282 - DNA, 25 bp, Homo sapien
tttcagggttagagtgtccctcgga

SEQ ID NO: 1635283 - DNA, 25 bp, Homo sapien
ttagagtgtccctcggaaggatggc

SEQ ID NO: 1635284 - DNA, 25 bp, Homo sapien
agtgtccctcggaaggatggctgct

SEQ ID NO: 1635285 - DNA, 25 bp, Homo sapien
tgacatcaatactgctgccagctgg

SEQ ID NO: 1635286 - DNA, 25 bp, Homo sapien
atgacatcaatactgctgccagctg

SEQ ID NO: 1635287 - DNA, 25 bp, Homo sapien
aattttttgtatgagccaagcatag

SEQ ID NO: 1635288 - DNA, 25 bp, Homo sapien
aaaaattttttgtatgagccaagca

SEQ ID NO: 1635289 - DNA, 25 bp, Homo sapien
caaaaaattttttgtatgagccaag

SEQ ID NO: 1635290 - DNA, 25 bp, Homo sapien
attttttgtatgagccaagcatagt

SEQ ID NO: 1635291 - DNA, 25 bp, Homo sapien
tattgtcgcggtacgcaggaaggca

SEQ ID NO: 1635292 - DNA, 25 bp, Homo sapien
tggcatctagtgcagcaggctggct

SEQ ID NO: 1635293 - DNA, 25 bp, Homo sapien
tcttaccgccatggagttcgacctg

SEQ ID NO: 1635294 - DNA, 25 bp, Homo sapien
gagcgagttagaacacgggacgccc

SEQ ID NO: 1635295 - DNA, 25 bp, Homo sapien
gggagatcccaagctcagtccccac

SEQ ID NO: 1635296 - DNA, 25 bp, Homo sapien
agatcccaagctcagtccccacaaa

SEQ ID NO: 1635297 - DNA, 25 bp, Homo sapien
ggccacgggggagatcccaagctca

SEQ ID NO: 1635298 - DNA, 25 bp, Homo sapien
cacgggggagatcccaagctcagtc

SEQ ID NO: 1635299 - DNA, 25 bp, Homo sapien
gggtccaaaggtaagtcgcctcatc

SEQ ID NO: 1635300 - DNA, 25 bp, Homo sapien
ccaaaggtaagtcgcctcatcaccg

SEQ ID NO: 1635301 - DNA, 25 bp, Homo sapien
ggtccaaaggtaagtcgcctcatca

SEQ ID NO: 1635302 - DNA, 25 bp, Homo sapien
tccaaaggtaagtcgcctcatcacc

SEQ ID NO: 1635303 - DNA, 25 bp, Homo sapien
tgggtaaggggcgccgcctcactgc

SEQ ID NO: 1635304 - DNA, 25 bp, Homo sapien
gggtaaggggcgccgcctcactgcc

SEQ ID NO: 1635305 - DNA, 25 bp, Homo sapien
ggtaaggggcgccgcctcactgccg

SEQ ID NO: 1635306 - DNA, 25 bp, Homo sapien
gcagcagctccagcgattcggacac

SEQ ID NO: 1635307 - DNA, 25 bp, Homo sapien
atgtgaaggtaaggggctctcgcca

SEQ ID NO: 1635308 - DNA, 25 bp, Homo sapien
ccagcgattcggacacggatgtgaa

SEQ ID NO: 1635309 - DNA, 25 bp, Homo sapien
cagctccagcgattcggacacggat

SEQ ID NO: 1635310 - DNA, 25 bp, Homo sapien
ctgcaccccagagaggcgtccccgc

SEQ ID NO: 1635311 - DNA, 25 bp, Homo sapien
ccccagagaggcgtccccgcactgg

SEQ ID NO: 1635312 - DNA, 25 bp, Homo sapien
gcaccccagagaggcgtccccgcac

SEQ ID NO: 1635313 - DNA, 25 bp, Homo sapien
ccagagaggcgtccccgcactgggg

SEQ ID NO: 1635314 - DNA, 25 bp, Homo sapien
tgtctcgcttccagcccagaaccat

SEQ ID NO: 1635315 - DNA, 25 bp, Homo sapien
cctgccctcggccccacagtcccac

SEQ ID NO: 1635316 - DNA, 25 bp, Homo sapien
gggagtggtccccctgtctcgcttc

SEQ ID NO: 1635317 - DNA, 25 bp, Homo sapien
agtggtccccctgtctcgcttccag

SEQ ID NO: 1635318 - DNA, 25 bp, Homo sapien
ggccctggacagggctcattaaacc

SEQ ID NO: 1635319 - DNA, 25 bp, Homo sapien
tggacagggctcattaaaccttcct

SEQ ID NO: 1635320 - DNA, 25 bp, Homo sapien
gaggctccccactgaagggccctgg

SEQ ID NO: 1635321 - DNA, 25 bp, Homo sapien
ggaggctccccactgaagggccctg

SEQ ID NO: 1635322 - DNA, 25 bp, Homo sapien
ccgcccattcgtgcgcgaggccaag

SEQ ID NO: 1635323 - DNA, 25 bp, Homo sapien
ccattcgtgcgcgaggccaaggaga

SEQ ID NO: 1635324 - DNA, 25 bp, Homo sapien
ccagcgctgggcccgcccattcgtg

SEQ ID NO: 1635325 - DNA, 25 bp, Homo sapien
tgggcccgcccattcgtgcgcgagg

SEQ ID NO: 1635326 - DNA, 25 bp, Homo sapien
cgccctggggcggtggcctgtgcag

SEQ ID NO: 1635327 - DNA, 25 bp, Homo sapien
ctgggcgggacatgggatggaggcg

SEQ ID NO: 1635328 - DNA, 25 bp, Homo sapien
ttgtttctgtaacagcggccacgcc

SEQ ID NO: 1635329 - DNA, 25 bp, Homo sapien
tggagatctctcagcaccttgggtt

SEQ ID NO: 1635330 - DNA, 25 bp, Homo sapien
aggagatgagttcggcggccacagt

SEQ ID NO: 1635331 - DNA, 25 bp, Homo sapien
caggcaggagatgagttcggcggcc

SEQ ID NO: 1635332 - DNA, 25 bp, Homo sapien
agcagcgggaggttcagcgggcgcg

SEQ ID NO: 1635333 - DNA, 25 bp, Homo sapien
gcagcgggaggttcagcgggcgcgc

SEQ ID NO: 1635334 - DNA, 25 bp, Homo sapien
gaaggtgagccagtacatgagcata

SEQ ID NO: 1635335 - DNA, 25 bp, Homo sapien
ggtcaggtacatgcgcagctggttc

SEQ ID NO: 1635336 - DNA, 25 bp, Homo sapien
tctgccaagatcttcagccgcagcg

SEQ ID NO: 1635337 - DNA, 25 bp, Homo sapien
agtacatgagcataggctgcgccgc

SEQ ID NO: 1635338 - DNA, 25 bp, Homo sapien
ctggagcgcaggtgtgcgatctcgg

SEQ ID NO: 1635339 - DNA, 25 bp, Homo sapien
tggagcgcaggtgtgcgatctcggc

SEQ ID NO: 1635340 - DNA, 25 bp, Homo sapien
accaccacacccagctaattttttg

SEQ ID NO: 1635341 - DNA, 25 bp, Homo sapien
caccaccacacccagctaatttttt

SEQ ID NO: 1635342 - DNA, 25 bp, Homo sapien
caatcttcccgaagagcaggcccat

SEQ ID NO: 1635343 - DNA, 25 bp, Homo sapien
aagatggctacgcagcaccagccca

SEQ ID NO: 1635344 - DNA, 25 bp, Homo sapien
catgaacacaaagatggctacgcag

SEQ ID NO: 1635345 - DNA, 25 bp, Homo sapien
caggtagtagccaatcttcccgaag

SEQ ID NO: 1635346 - DNA, 25 bp, Homo sapien
gctggcgtgaagggcgggggtactc

SEQ ID NO: 1635347 - DNA, 25 bp, Homo sapien
tggcgtgaagggcgggggtactcac

SEQ ID NO: 1635348 - DNA, 25 bp, Homo sapien
ctggcgtgaagggcgggggtactca

SEQ ID NO: 1635349 - DNA, 25 bp, Homo sapien
tttgtagcccaagaaggccaccagg

SEQ ID NO: 1635350 - DNA, 25 bp, Homo sapien
ccgacatatttgtagcccaagaagg

SEQ ID NO: 1635351 - DNA, 25 bp, Homo sapien
gacatatttgtagcccaagaaggcc

SEQ ID NO: 1635352 - DNA, 25 bp, Homo sapien
atatttgtagcccaagaaggccacc

SEQ ID NO: 1635353 - DNA, 25 bp, Homo sapien
gggtccccagcgcaagaccagccac

SEQ ID NO: 1635354 - DNA, 25 bp, Homo sapien
gaccagccaccaaaacgtaggtgat

SEQ ID NO: 1635355 - DNA, 25 bp, Homo sapien
accagccaccaaaacgtaggtgatg

SEQ ID NO: 1635356 - DNA, 25 bp, Homo sapien
caagaccagccaccaaaacgtaggt

SEQ ID NO: 1635357 - DNA, 25 bp, Homo sapien
ccgctccatataggcccggaagaga

SEQ ID NO: 1635358 - DNA, 25 bp, Homo sapien
gctccatataggcccggaagagaga

SEQ ID NO: 1635359 - DNA, 25 bp, Homo sapien
ccatataggcccggaagagagagga

SEQ ID NO: 1635360 - DNA, 25 bp, Homo sapien
catataggcccggaagagagaggag

SEQ ID NO: 1635361 - DNA, 25 bp, Homo sapien
cattgacgtcaaagcggggggccac

SEQ ID NO: 1635362 - DNA, 25 bp, Homo sapien
aggtccggggcattgacgtcaaagc

SEQ ID NO: 1635363 - DNA, 25 bp, Homo sapien
gtgtcctgttggtactgcacttccc

SEQ ID NO: 1635364 - DNA, 25 bp, Homo sapien
ccaccggggtgtcctgttggtactg

SEQ ID NO: 1635365 - DNA, 25 bp, Homo sapien
aagtaatacttgagcttggtgatgg

SEQ ID NO: 1635366 - DNA, 25 bp, Homo sapien
caaagtaatacttgagcttggtgat

SEQ ID NO: 1635367 - DNA, 25 bp, Homo sapien
cacagcaaagtaatacttgagcttg

SEQ ID NO: 1635368 - DNA, 25 bp, Homo sapien
cagcaaagtaatacttgagcttggt

SEQ ID NO: 1635369 - DNA, 25 bp, Homo sapien
gagaggctgcaggataactcaggcc

SEQ ID NO: 1635370 - DNA, 25 bp, Homo sapien
cttgtgtcatcgaaaagctggtggg

SEQ ID NO: 1635371 - DNA, 25 bp, Homo sapien
ccggctctgggctgaacttgtgtca

SEQ ID NO: 1635372 - DNA, 25 bp, Homo sapien
gccatggccatgttggacaccgggt

SEQ ID NO: 1635373 - DNA, 25 bp, Homo sapien
tgggacacagggatcctccgcttcg

SEQ ID NO: 1635374 - DNA, 25 bp, Homo sapien
gcccggctgggacacagggatcctc

SEQ ID NO: 1635375 - DNA, 25 bp, Homo sapien
ccggctgggacacagggatcctccg

SEQ ID NO: 1635376 - DNA, 25 bp, Homo sapien
gacacagggatcctccgcttcgagg

SEQ ID NO: 1635377 - DNA, 25 bp, Homo sapien
acccaggataggtaagggagacctg

SEQ ID NO: 1635378 - DNA, 25 bp, Homo sapien
tgtcaccattagagacactggcttt

SEQ ID NO: 1635379 - DNA, 25 bp, Homo sapien
ggtgcaagctctgccattcatccac

SEQ ID NO: 1635380 - DNA, 25 bp, Homo sapien
gggagacctggcgaacctcattcat

SEQ ID NO: 1635381 - DNA, 25 bp, Homo sapien
tacaggttcgcttcttaaatgagcg

SEQ ID NO: 1635382 - DNA, 25 bp, Homo sapien
ggccacgaagctgtcctaagggtgt

SEQ ID NO: 1635383 - DNA, 25 bp, Homo sapien
taaatgagcggtaggcatggccctc

SEQ ID NO: 1635384 - DNA, 25 bp, Homo sapien
gggcggatcgctaactgcaaatgaa

SEQ ID NO: 1635385 - DNA, 25 bp, Homo sapien
agatccttgatctcgtgacctctga

SEQ ID NO: 1635386 - DNA, 25 bp, Homo sapien
ccagatccttgatctcgtgacctct

SEQ ID NO: 1635387 - DNA, 25 bp, Homo sapien
ctcagggttccagatccttgatctc

SEQ ID NO: 1635388 - DNA, 25 bp, Homo sapien
gggttccagatccttgatctcgtga

SEQ ID NO: 1635389 - DNA, 25 bp, Homo sapien
ccgcccgcccgatctcctccgccgg

SEQ ID NO: 1635390 - DNA, 25 bp, Homo sapien
cgcccgcccgatctcctccgccggc

SEQ ID NO: 1635391 - DNA, 25 bp, Homo sapien
cgcccgatctcctccgccggccacg

SEQ ID NO: 1635392 - DNA, 25 bp, Homo sapien
gcccgcccgatctcctccgccggcc

SEQ ID NO: 1635393 - DNA, 25 bp, Homo sapien
ccgccgccgccaagcctgccgggtg

SEQ ID NO: 1635394 - DNA, 25 bp, Homo sapien
gcagccggggcgtccccgcagccgc

SEQ ID NO: 1635395 - DNA, 25 bp, Homo sapien
cagccggggcgtccccgcagccgcc

SEQ ID NO: 1635396 - DNA, 25 bp, Homo sapien
ccgccgccaagcctgccgggtgcat

SEQ ID NO: 1635397 - DNA, 25 bp, Homo sapien
cccgccggcgaagagacagccaatg

SEQ ID NO: 1635398 - DNA, 25 bp, Homo sapien
ccgccggcgaagagacagccaatgg

SEQ ID NO: 1635399 - DNA, 25 bp, Homo sapien
gccgccacctaagccgcggttcgga

SEQ ID NO: 1635400 - DNA, 25 bp, Homo sapien
ctaagccgcggttcggagcgtgccc

SEQ ID NO: 1635401 - DNA, 25 bp, Homo sapien
tttggaaggctgaggatcgcttgag

SEQ ID NO: 1635402 - DNA, 25 bp, Homo sapien
tgttctcacattgcaacctggttcc

SEQ ID NO: 1635403 - DNA, 25 bp, Homo sapien
gaagaaccaggtgtctctcttggaa

SEQ ID NO: 1635404 - DNA, 25 bp, Homo sapien
ggcgcacctgcaagtgaagagccct

SEQ ID NO: 1635405 - DNA, 25 bp, Homo sapien
ccaacaagttaggtgagaagaacca

SEQ ID NO: 1635406 - DNA, 25 bp, Homo sapien
gaatgcatggcgcaggatggtctca

SEQ ID NO: 1635407 - DNA, 25 bp, Homo sapien
cacaacttggcgaatggagcgagaa

SEQ ID NO: 1635408 - DNA, 25 bp, Homo sapien
tgagtagctgaggatccccactctg

SEQ ID NO: 1635409 - DNA, 25 bp, Homo sapien
gaattggatttcagtttgccccttg

SEQ ID NO: 1635410 - DNA, 25 bp, Homo sapien
cgggagctggcttagagggcgaggc

SEQ ID NO: 1635411 - DNA, 25 bp, Homo sapien
cgctcgggcttccacaacgagaact

SEQ ID NO: 1635412 - DNA, 25 bp, Homo sapien
acaacgagaactcgctcgccatcta

SEQ ID NO: 1635413 - DNA, 25 bp, Homo sapien
tccgtgtacgacaaggtgggcgtcc

SEQ ID NO: 1635414 - DNA, 25 bp, Homo sapien
tgggggtgtggccgggttgaaagca

SEQ ID NO: 1635415 - DNA, 25 bp, Homo sapien
attggagaacaggactggtggtggg

SEQ ID NO: 1635416 - DNA, 25 bp, Homo sapien
gaggtggtctggggatgccgcttgc

SEQ ID NO: 1635417 - DNA, 25 bp, Homo sapien
ggcctggcttgagcaggacttccag

SEQ ID NO: 1635418 - DNA, 25 bp, Homo sapien
tcttggcgagcaattggcgaagcgc

SEQ ID NO: 1635419 - DNA, 25 bp, Homo sapien
gctggtgggcgaacaacaaacaaga

SEQ ID NO: 1635420 - DNA, 25 bp, Homo sapien
caaacaagaccaggtaggcggagcg

SEQ ID NO: 1635421 - DNA, 25 bp, Homo sapien
aatggacagctacgaaaagatctac

SEQ ID NO: 1635422 - DNA, 25 bp, Homo sapien
caactcaagggcgagtggaaccgta

SEQ ID NO: 1635423 - DNA, 25 bp, Homo sapien
tctgcaggccgcgaccggcatgtac

SEQ ID NO: 1635424 - DNA, 25 bp, Homo sapien
gcggcaacctcgggcgctgttctgc

SEQ ID NO: 1635425 - DNA, 25 bp, Homo sapien
aaagccccaatcttagcaagtgcgg

SEQ ID NO: 1635426 - DNA, 25 bp, Homo sapien
accaaacagcagctaattctggccc

SEQ ID NO: 1635427 - DNA, 25 bp, Homo sapien
ctgaccaaacagcagctaattctgg

SEQ ID NO: 1635428 - DNA, 25 bp, Homo sapien
tgaccaaacagcagctaattctggc

SEQ ID NO: 1635429 - DNA, 25 bp, Homo sapien
gaccaaacagcagctaattctggcc

SEQ ID NO: 1635430 - DNA, 25 bp, Homo sapien
agctcaaatgctactactttgatta

SEQ ID NO: 1635431 - DNA, 25 bp, Homo sapien
ggcccaatggagcatcctacgcaag

SEQ ID NO: 1635432 - DNA, 25 bp, Homo sapien
tccttcgagcgctacatggcccagc

SEQ ID NO: 1635433 - DNA, 25 bp, Homo sapien
gtgacatactggagatcggggccca

SEQ ID NO: 1635434 - DNA, 25 bp, Homo sapien
agctccccgagtcagcctatatgca

SEQ ID NO: 1635435 - DNA, 25 bp, Homo sapien
ccccgagtcagcctatatgcaccag

SEQ ID NO: 1635436 - DNA, 25 bp, Homo sapien
agcagctccccgagtcagcctatat

SEQ ID NO: 1635437 - DNA, 25 bp, Homo sapien
ccgagtcagcctatatgcaccagct

SEQ ID NO: 1635438 - DNA, 25 bp, Homo sapien
cagttacactgcagggtttcgccca

SEQ ID NO: 1635439 - DNA, 25 bp, Homo sapien
aacaggtcatcgagtatgcccggca

SEQ ID NO: 1635440 - DNA, 25 bp, Homo sapien
caataaaggtggactgacattccct

SEQ ID NO: 1635441 - DNA, 25 bp, Homo sapien
tgtggacacataggaatgctggacc

SEQ ID NO: 1635442 - DNA, 25 bp, Homo sapien
actgccttggcgagtgattgacagg

SEQ ID NO: 1635443 - DNA, 25 bp, Homo sapien
tttaatggcgatcctgccctgctgc

SEQ ID NO: 1635444 - DNA, 25 bp, Homo sapien
gatgtgctttaatggcgatcctgcc

SEQ ID NO: 1635445 - DNA, 25 bp, Homo sapien
cctacccactgccttggcgagtgat

SEQ ID NO: 1635446 - DNA, 25 bp, Homo sapien
gtggagggtgttgagccgactacac

SEQ ID NO: 1635447 - DNA, 25 bp, Homo sapien
ggtggagggtgttgagccgactaca

SEQ ID NO: 1635448 - DNA, 25 bp, Homo sapien
ggtggctcgcccaggtggttggtgg

SEQ ID NO: 1635449 - DNA, 25 bp, Homo sapien
ccagagagccggacagcttgatggt

SEQ ID NO: 1635450 - DNA, 25 bp, Homo sapien
cctgcaagtcgtagtgctccagctt

SEQ ID NO: 1635451 - DNA, 25 bp, Homo sapien
gaatgggtggcctgcaagtcgtagt

SEQ ID NO: 1635452 - DNA, 25 bp, Homo sapien
cccatatgaatagggaagcttctga

SEQ ID NO: 1635453 - DNA, 25 bp, Homo sapien
gggagggtagagtcagcaaagccca

SEQ ID NO: 1635454 - DNA, 25 bp, Homo sapien
aaggctatattggaatatcccaaag

SEQ ID NO: 1635455 - DNA, 25 bp, Homo sapien
cccaaaggcagtttagggcagggct

SEQ ID NO: 1635456 - DNA, 25 bp, Homo sapien
agtaacacttgcagggacaggagtt

SEQ ID NO: 1635457 - DNA, 25 bp, Homo sapien
acgttgcgtggcaggcggcgatggc

SEQ ID NO: 1635458 - DNA, 25 bp, Homo sapien
cagagacgttgcgtggcaggcggcg

SEQ ID NO: 1635459 - DNA, 25 bp, Homo sapien
caggcagagacgttgcgtggcaggc

SEQ ID NO: 1635460 - DNA, 25 bp, Homo sapien
cgcagcgcgggtgttagctgcccca

SEQ ID NO: 1635461 - DNA, 25 bp, Homo sapien
aggcacggtagctgtagctcgttcg

SEQ ID NO: 1635462 - DNA, 25 bp, Homo sapien
tcgttcgcgaggaccatctccatgc

SEQ ID NO: 1635463 - DNA, 25 bp, Homo sapien
cgggtgttagctgccccagtctgag

SEQ ID NO: 1635464 - DNA, 25 bp, Homo sapien
tgatgggcgcagccgcgggtgcggg

SEQ ID NO: 1635465 - DNA, 25 bp, Homo sapien
cttgatgggcgcagccgcgggtgcg

SEQ ID NO: 1635466 - DNA, 25 bp, Homo sapien
tgggcgcagccgcgggtgcgggcgc

SEQ ID NO: 1635467 - DNA, 25 bp, Homo sapien
atgggcgcagccgcgggtgcgggcg

SEQ ID NO: 1635468 - DNA, 25 bp, Homo sapien
ggtcggcggctaaggctgggggcag

SEQ ID NO: 1635469 - DNA, 25 bp, Homo sapien
ggagccaccggcagcggcgttggct

SEQ ID NO: 1635470 - DNA, 25 bp, Homo sapien
gtgtgggcggcggtgtgggcggtgg

SEQ ID NO: 1635471 - DNA, 25 bp, Homo sapien
agggctgactccttgtggcccagac

SEQ ID NO: 1635472 - DNA, 25 bp, Homo sapien
aagatgaacgtaggcggcgccagca

SEQ ID NO: 1635473 - DNA, 25 bp, Homo sapien
gccccgggcgcatgggctcgccatt

SEQ ID NO: 1635474 - DNA, 25 bp, Homo sapien
ggctcgccattggtgggtgctggga

SEQ ID NO: 1635475 - DNA, 25 bp, Homo sapien
tgctgggaagatgaacgtaggcggc

SEQ ID NO: 1635476 - DNA, 25 bp, Homo sapien
gttcagggccgtcgggagcgctaac

SEQ ID NO: 1635477 - DNA, 25 bp, Homo sapien
tccgccagccccgttgaagcggaag

SEQ ID NO: 1635478 - DNA, 25 bp, Homo sapien
cccgttgaagcggaagtggcgttca

SEQ ID NO: 1635479 - DNA, 25 bp, Homo sapien
aagtggcgttcagggccgtcgggag

SEQ ID NO: 1635480 - DNA, 25 bp, Homo sapien
ttggctgctaaggaactcgaggctg

SEQ ID NO: 1635481 - DNA, 25 bp, Homo sapien
agcaggctcagaccggactcggaat

SEQ ID NO: 1635482 - DNA, 25 bp, Homo sapien
caaagagggcctcgacttgaaggtg

SEQ ID NO: 1635483 - DNA, 25 bp, Homo sapien
gacctcggcgtaagagatggcacct

SEQ ID NO: 1635484 - DNA, 25 bp, Homo sapien
gacagtgtccttcacggatagttgc

SEQ ID NO: 1635485 - DNA, 25 bp, Homo sapien
cgccggctgccgttcagaaggtaat

SEQ ID NO: 1635486 - DNA, 25 bp, Homo sapien
ttttgccatttagacgggccgggca

SEQ ID NO: 1635487 - DNA, 25 bp, Homo sapien
tggtggtggcggcttccaagtctcc

SEQ ID NO: 1635488 - DNA, 25 bp, Homo sapien
cggatggctccgactgcaagttccc

SEQ ID NO: 1635489 - DNA, 25 bp, Homo sapien
gcccacgagtcaggcgcatggcctg

SEQ ID NO: 1635490 - DNA, 25 bp, Homo sapien
ctgggaggtcatctcgggctccacc

SEQ ID NO: 1635491 - DNA, 25 bp, Homo sapien
ggcgcggtccgagggctgcactttt

SEQ ID NO: 1635492 - DNA, 25 bp, Homo sapien
gagttcagaccgcggcgccctgggc

SEQ ID NO: 1635493 - DNA, 25 bp, Homo sapien
agtcctccagccgagcagagttcag

SEQ ID NO: 1635494 - DNA, 25 bp, Homo sapien
tcctccagccgagcagagttcagac

SEQ ID NO: 1635495 - DNA, 25 bp, Homo sapien
cgagtcctccagccgagcagagttc

SEQ ID NO: 1635496 - DNA, 25 bp, Homo sapien
ctaggtctccccttgaaatactccg

SEQ ID NO: 1635497 - DNA, 25 bp, Homo sapien
tctccccttgaaatactccgaggtc

SEQ ID NO: 1635498 - DNA, 25 bp, Homo sapien
aatactccgaggtcttgttcctcgc

SEQ ID NO: 1635499 - DNA, 25 bp, Homo sapien
cccttgaaatactccgaggtcttgt

SEQ ID NO: 1635500 - DNA, 25 bp, Homo sapien
ctggtgcgccgtctaagctgcctgt

SEQ ID NO: 1635501 - DNA, 25 bp, Homo sapien
tgtggtgcgccgagagcttgctcta

SEQ ID NO: 1635502 - DNA, 25 bp, Homo sapien
aaacctaggcacatccggaacttgg

SEQ ID NO: 1635503 - DNA, 25 bp, Homo sapien
ttgctctaccactgcctgtcggacg

SEQ ID NO: 1635504 - DNA, 25 bp, Homo sapien
gatcccaattcgagaggttctgacc

SEQ ID NO: 1635505 - DNA, 25 bp, Homo sapien
attgcacacgttctggctgcccgag

SEQ ID NO: 1635506 - DNA, 25 bp, Homo sapien
gaatcggacatctccattgcacacg

SEQ ID NO: 1635507 - DNA, 25 bp, Homo sapien
agccaccagcgtggctgtccgcaga

SEQ ID NO: 1635508 - DNA, 25 bp, Homo sapien
gcttatgggcaacgttccagaccgg

SEQ ID NO: 1635509 - DNA, 25 bp, Homo sapien
gggccgcccaaatgagctggagcct

SEQ ID NO: 1635510 - DNA, 25 bp, Homo sapien
tgctaatgctatcggtaatctctgg

SEQ ID NO: 1635511 - DNA, 25 bp, Homo sapien
tccttggtatttggcacccaagccc

SEQ ID NO: 1635512 - DNA, 25 bp, Homo sapien
tgaatgacattgatagaaatccctg

SEQ ID NO: 1635513 - DNA, 25 bp, Homo sapien
gagacattcaggcatcagacaagca

SEQ ID NO: 1635514 - DNA, 25 bp, Homo sapien
cagacaagcatctgtcaggcgccta

SEQ ID NO: 1635515 - DNA, 25 bp, Homo sapien
acatctatcctgtgccgtgggcatg

SEQ ID NO: 1635516 - DNA, 25 bp, Homo sapien
gacgttcaacgagataaagagggaa

SEQ ID NO: 1635517 - DNA, 25 bp, Homo sapien
cagagggagcacattctatgcagaa

SEQ ID NO: 1635518 - DNA, 25 bp, Homo sapien
aaaagtataggctgtcagagggagc

SEQ ID NO: 1635519 - DNA, 25 bp, Homo sapien
taaatgtatccaacacacagccgca

SEQ ID NO: 1635520 - DNA, 25 bp, Homo sapien
tccagggaaaaagatgacggacgta

SEQ ID NO: 1635521 - DNA, 25 bp, Homo sapien
gggaaagggagcaggattagcatcc

SEQ ID NO: 1635522 - DNA, 25 bp, Homo sapien
taccactaaaggcagtgtggatggg

SEQ ID NO: 1635523 - DNA, 25 bp, Homo sapien
tgtggatgggaaggcggatgcctct

SEQ ID NO: 1635524 - DNA, 25 bp, Homo sapien
caggactcaggactgactgggggaa

SEQ ID NO: 1635525 - DNA, 25 bp, Homo sapien
gagtctgacggcaggactcaggact

SEQ ID NO: 1635526 - DNA, 25 bp, Homo sapien
gatggtgggtccatcaccgggcagg

SEQ ID NO: 1635527 - DNA, 25 bp, Homo sapien
tgatggtgggtccatcaccgggcag

SEQ ID NO: 1635528 - DNA, 25 bp, Homo sapien
gtgggtccatcaccgggcaggggac

SEQ ID NO: 1635529 - DNA, 25 bp, Homo sapien
tggtgggtccatcaccgggcagggg

SEQ ID NO: 1635530 - DNA, 25 bp, Homo sapien
gtgtaggagtgattttcctcggagc

SEQ ID NO: 1635531 - DNA, 25 bp, Homo sapien
tctgggtccaggcatggcgaagctg

SEQ ID NO: 1635532 - DNA, 25 bp, Homo sapien
ggctccagggatagcgtgtaggagt

SEQ ID NO: 1635533 - DNA, 25 bp, Homo sapien
agtctgggtccaggcatggcgaagc

SEQ ID NO: 1635534 - DNA, 25 bp, Homo sapien
tccggggggtcctgcatcgcccttg

SEQ ID NO: 1635535 - DNA, 25 bp, Homo sapien
cttacattctaccttcacctggtct

SEQ ID NO: 1635536 - DNA, 25 bp, Homo sapien
tcttacattctaccttcacctggtc

SEQ ID NO: 1635537 - DNA, 25 bp, Homo sapien
gagctccggggggtcctgcatcgcc

SEQ ID NO: 1635538 - DNA, 25 bp, Homo sapien
ttcttccagcctgcgggccaaggct

SEQ ID NO: 1635539 - DNA, 25 bp, Homo sapien
attcttccagcctgcgggccaaggc

SEQ ID NO: 1635540 - DNA, 25 bp, Homo sapien
gaaggcagcggcaggggtccgatct

SEQ ID NO: 1635541 - DNA, 25 bp, Homo sapien
ccgatctgtgtcatccattcttcca

SEQ ID NO: 1635542 - DNA, 25 bp, Homo sapien
cagcggtagccttgcttggtgacac

SEQ ID NO: 1635543 - DNA, 25 bp, Homo sapien
tagccttgcttggtgacaccccaga

SEQ ID NO: 1635544 - DNA, 25 bp, Homo sapien
ggtagccttgcttggtgacacccca

SEQ ID NO: 1635545 - DNA, 25 bp, Homo sapien
ccgacagcggtagccttgcttggtg

SEQ ID NO: 1635546 - DNA, 25 bp, Homo sapien
tggcccggagcaggtaccctgtcag

SEQ ID NO: 1635547 - DNA, 25 bp, Homo sapien
gcccaacttggagcagatggcgctg

SEQ ID NO: 1635548 - DNA, 25 bp, Homo sapien
cagctgtcgcagaaggtaggctttc

SEQ ID NO: 1635549 - DNA, 25 bp, Homo sapien
ggctttcggaaggtgacctcatgga

SEQ ID NO: 1635550 - DNA, 25 bp, Homo sapien
ggaaaattgcccgagagtcgctcaa

SEQ ID NO: 1635551 - DNA, 25 bp, Homo sapien
caaagtcctcctgagagattgttcc

SEQ ID NO: 1635552 - DNA, 25 bp, Homo sapien
ttgttcctcggccttcagggtcata

SEQ ID NO: 1635553 - DNA, 25 bp, Homo sapien
atggcaggcgaagggaaaattgccc

SEQ ID NO: 1635554 - DNA, 25 bp, Homo sapien
aaggcccagttgtcgaaatatgatc

SEQ ID NO: 1635555 - DNA, 25 bp, Homo sapien
tatgatccccatggccataagtccc

SEQ ID NO: 1635556 - DNA, 25 bp, Homo sapien
gtcgaaatatgatccccatggccat

SEQ ID NO: 1635557 - DNA, 25 bp, Homo sapien
gggaagcagataaggcccagttgtc

SEQ ID NO: 1635558 - DNA, 25 bp, Homo sapien
tcagggttctacagatgtcttccct

SEQ ID NO: 1635559 - DNA, 25 bp, Homo sapien
cagggttctacagatgtcttccctc

SEQ ID NO: 1635560 - DNA, 25 bp, Homo sapien
cagtgtgaccctgtccggcttgggt

SEQ ID NO: 1635561 - DNA, 25 bp, Homo sapien
ccaccaccagaggtgcattgaaggg

SEQ ID NO: 1635562 - DNA, 25 bp, Homo sapien
actccaccaccagaggtgcattgaa

SEQ ID NO: 1635563 - DNA, 25 bp, Homo sapien
tgctccacatgccgacccagtgtga

SEQ ID NO: 1635564 - DNA, 25 bp, Homo sapien
tagatctcgtcttccgtgtagaaga

SEQ ID NO: 1635565 - DNA, 25 bp, Homo sapien
caggctcttgggacaacgcggctcc

SEQ ID NO: 1635566 - DNA, 25 bp, Homo sapien
tcgtcttccgtgtagaagaggtcca

SEQ ID NO: 1635567 - DNA, 25 bp, Homo sapien
cggctcccgggcataagaaagctca

SEQ ID NO: 1635568 - DNA, 25 bp, Homo sapien
aagcccagcctgggcggggccaggg

SEQ ID NO: 1635569 - DNA, 25 bp, Homo sapien
cttggaagcccagcctgggcggggc

SEQ ID NO: 1635570 - DNA, 25 bp, Homo sapien
tggaagcccagcctgggcggggcca

SEQ ID NO: 1635571 - DNA, 25 bp, Homo sapien
ccttggaagcccagcctgggcgggg

SEQ ID NO: 1635572 - DNA, 25 bp, Homo sapien
cgtgagcaggtgcagcagatcctca

SEQ ID NO: 1635573 - DNA, 25 bp, Homo sapien
gtccttgaggtgcacgcccagtaca

SEQ ID NO: 1635574 - DNA, 25 bp, Homo sapien
tcaggcaacctgtcgggctgtgcct

SEQ ID NO: 1635575 - DNA, 25 bp, Homo sapien
cagatcctcattggcgctgcagggt

SEQ ID NO: 1635576 - DNA, 25 bp, Homo sapien
tctggagatggcactgtgacacagg

SEQ ID NO: 1635577 - DNA, 25 bp, Homo sapien
cttggtgctgtcagggctcaggtgg

SEQ ID NO: 1635578 - DNA, 25 bp, Homo sapien
tggcactgtgacacaggccccctgt

SEQ ID NO: 1635579 - DNA, 25 bp, Homo sapien
catgggagtccttgagtctggagat

SEQ ID NO: 1635580 - DNA, 25 bp, Homo sapien
gcgtgttgaaattctgcagctggtg

SEQ ID NO: 1635581 - DNA, 25 bp, Homo sapien
gtgttgaaattctgcagctggtgga

SEQ ID NO: 1635582 - DNA, 25 bp, Homo sapien
cgtgttgaaattctgcagctggtgg

SEQ ID NO: 1635583 - DNA, 25 bp, Homo sapien
agcgtgttgaaattctgcagctggt

SEQ ID NO: 1635584 - DNA, 25 bp, Homo sapien
gacacgctgttgctgagacctacgg

SEQ ID NO: 1635585 - DNA, 25 bp, Homo sapien
tgcaaaacgtagctccgcaggtcct

SEQ ID NO: 1635586 - DNA, 25 bp, Homo sapien
tcgtactgagccctgcaaaacgtag

SEQ ID NO: 1635587 - DNA, 25 bp, Homo sapien
tgaacttgtccagcacctgtgcacg

SEQ ID NO: 1635588 - DNA, 25 bp, Homo sapien
agcaaggacactttgcgctttttgc

SEQ ID NO: 1635589 - DNA, 25 bp, Homo sapien
atagcctggaaggaccggaactcca

SEQ ID NO: 1635590 - DNA, 25 bp, Homo sapien
aaagcaaggacactttgcgcttttt

SEQ ID NO: 1635591 - DNA, 25 bp, Homo sapien
cgtgatagcctggaaggaccggaac

SEQ ID NO: 1635592 - DNA, 25 bp, Homo sapien
ctgctcattgggagtggggggccag

SEQ ID NO: 1635593 - DNA, 25 bp, Homo sapien
tgctcattgggagtggggggccagg

SEQ ID NO: 1635594 - DNA, 25 bp, Homo sapien
agtggctcacagttgagggcttggg

SEQ ID NO: 1635595 - DNA, 25 bp, Homo sapien
agatggcagaatggcgatggggcag

SEQ ID NO: 1635596 - DNA, 25 bp, Homo sapien
gggcagggtattggagtggctcaca

SEQ ID NO: 1635597 - DNA, 25 bp, Homo sapien
cttggggatatagagggagatggca

SEQ ID NO: 1635598 - DNA, 25 bp, Homo sapien
tgagttgccctcccgggccacggtg

SEQ ID NO: 1635599 - DNA, 25 bp, Homo sapien
gcccagaaacgacctatgacttctt

SEQ ID NO: 1635600 - DNA, 25 bp, Homo sapien
gaaacgacctatgacttcttctagc

SEQ ID NO: 1635601 - DNA, 25 bp, Homo sapien
gtggcccagaaacgacctatgactt

SEQ ID NO: 1635602 - DNA, 25 bp, Homo sapien
ctcagggtgtcgcatcagccagtac

SEQ ID NO: 1635603 - DNA, 25 bp, Homo sapien
tcacctcagggtgtcgcatcagcca

SEQ ID NO: 1635604 - DNA, 25 bp, Homo sapien
acctcagggtgtcgcatcagccagt

SEQ ID NO: 1635605 - DNA, 25 bp, Homo sapien
atcacctcagggtgtcgcatcagcc

SEQ ID NO: 1635606 - DNA, 25 bp, Homo sapien
gaccaggtgacagatctgcagccgt

SEQ ID NO: 1635607 - DNA, 25 bp, Homo sapien
ccaggtgacagatctgcagccgtct

SEQ ID NO: 1635608 - DNA, 25 bp, Homo sapien
ctgaccaggtgacagatctgcagcc

SEQ ID NO: 1635609 - DNA, 25 bp, Homo sapien
caggtgacagatctgcagccgtctc

SEQ ID NO: 1635610 - DNA, 25 bp, Homo sapien
atgttgagcatgtggtcctcgtggc

SEQ ID NO: 1635611 - DNA, 25 bp, Homo sapien
tggtcctcgtggcacaggctgccag

SEQ ID NO: 1635612 - DNA, 25 bp, Homo sapien
gggcagccaggtcggcggacggcag

SEQ ID NO: 1635613 - DNA, 25 bp, Homo sapien
gcatgtggtcctcgtggcacaggct

SEQ ID NO: 1635614 - DNA, 25 bp, Homo sapien
gcagctcatcttcgctgcagccgcc

SEQ ID NO: 1635615 - DNA, 25 bp, Homo sapien
cgaaggactggatgcatttctccag

SEQ ID NO: 1635616 - DNA, 25 bp, Homo sapien
cagcagctcatcttcgctgcagccg

SEQ ID NO: 1635617 - DNA, 25 bp, Homo sapien
agctcatcttcgctgcagccgccct

SEQ ID NO: 1635618 - DNA, 25 bp, Homo sapien
gctggggcatgtcttgtggcggcgc

SEQ ID NO: 1635619 - DNA, 25 bp, Homo sapien
gaccttgctgatttcccgagggctg

SEQ ID NO: 1635620 - DNA, 25 bp, Homo sapien
ccttgctgatttcccgagggctggg

SEQ ID NO: 1635621 - DNA, 25 bp, Homo sapien
catgtcttgtggcggcgcacttggc

SEQ ID NO: 1635622 - DNA, 25 bp, Homo sapien
ggtcttgcaagagtagggctcagct

SEQ ID NO: 1635623 - DNA, 25 bp, Homo sapien
ctcctcggtgcttgggaaggaaaga

SEQ ID NO: 1635624 - DNA, 25 bp, Homo sapien
gggcctcctcggtgcttgggaagga

SEQ ID NO: 1635625 - DNA, 25 bp, Homo sapien
cttgcaagagtagggctcagctcct

SEQ ID NO: 1635626 - DNA, 25 bp, Homo sapien
aggcacgagatcgagagaaggccca

SEQ ID NO: 1635627 - DNA, 25 bp, Homo sapien
ggccaaggagaaggcacgagatcga

SEQ ID NO: 1635628 - DNA, 25 bp, Homo sapien
agaaggcccaggagctactgaaatt

SEQ ID NO: 1635629 - DNA, 25 bp, Homo sapien
ggagctactgaaattcctgcagatg

SEQ ID NO: 1635630 - DNA, 25 bp, Homo sapien
tctctgtctgcggtccggtgaagca

SEQ ID NO: 1635631 - DNA, 25 bp, Homo sapien
ttcttgtctctgtctgcggtccggt

SEQ ID NO: 1635632 - DNA, 25 bp, Homo sapien
gggagatatacaggtcagccccaca

SEQ ID NO: 1635633 - DNA, 25 bp, Homo sapien
aagcaggcgggagatatacaggtca

SEQ ID NO: 1635634 - DNA, 25 bp, Homo sapien
ccctcgccgtggatggtttaaagct

SEQ ID NO: 1635635 - DNA, 25 bp, Homo sapien
tcaaagttgccagccggcgtggatg

SEQ ID NO: 1635636 - DNA, 25 bp, Homo sapien
agcttgtcatcagggcttctcgctg

SEQ ID NO: 1635637 - DNA, 25 bp, Homo sapien
tcttgatagttagccgtgtgacctt

SEQ ID NO: 1635638 - DNA, 25 bp, Homo sapien
tcagcttgcgcatggttcatcctgg

SEQ ID NO: 1635639 - DNA, 25 bp, Homo sapien
gatttaggagctctctgatgatccc

SEQ ID NO: 1635640 - DNA, 25 bp, Homo sapien
cctcttgatttcagcgcatagatgg

SEQ ID NO: 1635641 - DNA, 25 bp, Homo sapien
tgtggctctccaggctaccatggtg

SEQ ID NO: 1635642 - DNA, 25 bp, Homo sapien
ggatattgtcggacttccagaccca

SEQ ID NO: 1635643 - DNA, 25 bp, Homo sapien
gagaacatggtaaagatctctttcc

SEQ ID NO: 1635644 - DNA, 25 bp, Homo sapien
acccagattcgcagtcccggtgtgg

SEQ ID NO: 1635645 - DNA, 25 bp, Homo sapien
cttcactttccccatgtgtgaagca

SEQ ID NO: 1635646 - DNA, 25 bp, Homo sapien
aggctaaagtcatgtttattgggag

SEQ ID NO: 1635647 - DNA, 25 bp, Homo sapien
taaagtcatgtttattgggagatga

SEQ ID NO: 1635648 - DNA, 25 bp, Homo sapien
ggctaaagtcatgtttattgggaga

SEQ ID NO: 1635649 - DNA, 25 bp, Homo sapien
gctaaagtcatgtttattgggagat

SEQ ID NO: 1635650 - DNA, 25 bp, Homo sapien
gagggggtgcaaggactagttcctg

SEQ ID NO: 1635651 - DNA, 25 bp, Homo sapien
ggacatgccatgaccactagtgtgt

SEQ ID NO: 1635652 - DNA, 25 bp, Homo sapien
ccatgaccactagtgtgtctatggg

SEQ ID NO: 1635653 - DNA, 25 bp, Homo sapien
catgccatgaccactagtgtgtcta

SEQ ID NO: 1635654 - DNA, 25 bp, Homo sapien
agtaggatcatccactgggcgtgtc

SEQ ID NO: 1635655 - DNA, 25 bp, Homo sapien
tgctgggagcagtaggatcatccac

SEQ ID NO: 1635656 - DNA, 25 bp, Homo sapien
gagcagtaggatcatccactgggcg

SEQ ID NO: 1635657 - DNA, 25 bp, Homo sapien
ggatcatccactgggcgtgtctcca

SEQ ID NO: 1635658 - DNA, 25 bp, Homo sapien
caagcagacggaaagtgagggtagg

SEQ ID NO: 1635659 - DNA, 25 bp, Homo sapien
ctgggggagccaagcagacggaaag

SEQ ID NO: 1635660 - DNA, 25 bp, Homo sapien
gccaagcagacggaaagtgagggta

SEQ ID NO: 1635661 - DNA, 25 bp, Homo sapien
gggagccaagcagacggaaagtgag

SEQ ID NO: 1635662 - DNA, 25 bp, Homo sapien
tcaggagttctcggagcccatctga

SEQ ID NO: 1635663 - DNA, 25 bp, Homo sapien
gagcccatctgatgaatgtcatgat

SEQ ID NO: 1635664 - DNA, 25 bp, Homo sapien
atctgatgaatgtcatgatggaggc

SEQ ID NO: 1635665 - DNA, 25 bp, Homo sapien
gcagtgatgtggagtttggatggag

SEQ ID NO: 1635666 - DNA, 25 bp, Homo sapien
tgcactccatgcttccagaaggcct

SEQ ID NO: 1635667 - DNA, 25 bp, Homo sapien
gcactccatgcttccagaaggcctg

SEQ ID NO: 1635668 - DNA, 25 bp, Homo sapien
cctgcactccatgcttccagaaggc

SEQ ID NO: 1635669 - DNA, 25 bp, Homo sapien
cacctgcactccatgcttccagaag

SEQ ID NO: 1635670 - DNA, 25 bp, Homo sapien
accgcttcggtcatggggatctcag

SEQ ID NO: 1635671 - DNA, 25 bp, Homo sapien
tccggggtcaccagcttcacagagc

SEQ ID NO: 1635672 - DNA, 25 bp, Homo sapien
cggcctccaccgcttcggtcatggg

SEQ ID NO: 1635673 - DNA, 25 bp, Homo sapien
gggatctcaggtgtgcgaagtcccc

SEQ ID NO: 1635674 - DNA, 25 bp, Homo sapien
gggtcacctgcacgggtcccctgtg

SEQ ID NO: 1635675 - DNA, 25 bp, Homo sapien
tgtggaagagcaccgacttccccgg

SEQ ID NO: 1635676 - DNA, 25 bp, Homo sapien
agcctggcccggtcagcagcgcgaa

SEQ ID NO: 1635677 - DNA, 25 bp, Homo sapien
agagcgcgccaaagcgcaccgtgtg

SEQ ID NO: 1635678 - DNA, 25 bp, Homo sapien
tcacgccgatgcacacagcgggcag

SEQ ID NO: 1635679 - DNA, 25 bp, Homo sapien
tccaatgcaccgcacaggaacgggc

SEQ ID NO: 1635680 - DNA, 25 bp, Homo sapien
aggaatttgttcatgggctggtacc

SEQ ID NO: 1635681 - DNA, 25 bp, Homo sapien
cactgaagcaggacaacggacgtct

SEQ ID NO: 1635682 - DNA, 25 bp, Homo sapien
ccggacaagcaggaatttgttcatg

SEQ ID NO: 1635683 - DNA, 25 bp, Homo sapien
gtcctggatcttggtggaaaccatg

SEQ ID NO: 1635684 - DNA, 25 bp, Homo sapien
tcctggatcttggtggaaaccatgt

SEQ ID NO: 1635685 - DNA, 25 bp, Homo sapien
cacgcccggcagcctttggtgtcct

SEQ ID NO: 1635686 - DNA, 25 bp, Homo sapien
tctctttccgttccagcaggccaag

SEQ ID NO: 1635687 - DNA, 25 bp, Homo sapien
cgatggggtttcctgctctggtctc

SEQ ID NO: 1635688 - DNA, 25 bp, Homo sapien
tggtctctttccgttccagcaggcc

SEQ ID NO: 1635689 - DNA, 25 bp, Homo sapien
agcgatggggtttcctgctctggtc

SEQ ID NO: 1635690 - DNA, 25 bp, Homo sapien
tatgagaatacaggtggggggtctt

SEQ ID NO: 1635691 - DNA, 25 bp, Homo sapien
ctatgagaatacaggtggggggtct

SEQ ID NO: 1635692 - DNA, 25 bp, Homo sapien
atgagaatacaggtggggggtcttt

SEQ ID NO: 1635693 - DNA, 25 bp, Homo sapien
tgagaatacaggtggggggtctttc

SEQ ID NO: 1635694 - DNA, 25 bp, Homo sapien
agtacacccacgtagtccggctagg

SEQ ID NO: 1635695 - DNA, 25 bp, Homo sapien
tgatggagtacacccacgtagtccg

SEQ ID NO: 1635696 - DNA, 25 bp, Homo sapien
gaacgttgttgatggagtacaccca

SEQ ID NO: 1635697 - DNA, 25 bp, Homo sapien
gagagacatgagaacgttgttgatg

SEQ ID NO: 1635698 - DNA, 25 bp, Homo sapien
tggtcattccggttcaggatgaaga

SEQ ID NO: 1635699 - DNA, 25 bp, Homo sapien
ctcctggtcattccggttcaggatg

SEQ ID NO: 1635700 - DNA, 25 bp, Homo sapien
ggtcattccggttcaggatgaagat

SEQ ID NO: 1635701 - DNA, 25 bp, Homo sapien
cctggtcattccggttcaggatgaa

SEQ ID NO: 1635702 - DNA, 25 bp, Homo sapien
ggcggccgtgctgtggatccggagg

SEQ ID NO: 1635703 - DNA, 25 bp, Homo sapien
ggccgtgctgtggatccggaggggg

SEQ ID NO: 1635704 - DNA, 25 bp, Homo sapien
gcggccgtgctgtggatccggaggg

SEQ ID NO: 1635705 - DNA, 25 bp, Homo sapien
cgtgctgtggatccggagggggcag

SEQ ID NO: 1635706 - DNA, 25 bp, Homo sapien
tccccagccccgtccagaggtgtaa

SEQ ID NO: 1635707 - DNA, 25 bp, Homo sapien
cagccccgtccagaggtgtaagtcc

SEQ ID NO: 1635708 - DNA, 25 bp, Homo sapien
ccccgtccagaggtgtaagtcctca

SEQ ID NO: 1635709 - DNA, 25 bp, Homo sapien
cccagccccgtccagaggtgtaagt

SEQ ID NO: 1635710 - DNA, 25 bp, Homo sapien
ccgggagggtgggttccagagtgag

SEQ ID NO: 1635711 - DNA, 25 bp, Homo sapien
tgggggcttgtcaagctcccgggag

SEQ ID NO: 1635712 - DNA, 25 bp, Homo sapien
cagaagtgggggcttgtcaagctcc

SEQ ID NO: 1635713 - DNA, 25 bp, Homo sapien
gcttgtcaagctcccgggagggtgg

SEQ ID NO: 1635714 - DNA, 25 bp, Homo sapien
gaccctcgtctgatggagaacggaa

SEQ ID NO: 1635715 - DNA, 25 bp, Homo sapien
tcccaggaccctcgtctgatggaga

SEQ ID NO: 1635716 - DNA, 25 bp, Homo sapien
ccaggaccctcgtctgatggagaac

SEQ ID NO: 1635717 - DNA, 25 bp, Homo sapien
tcgtctgatggagaacggaacttgg

SEQ ID NO: 1635718 - DNA, 25 bp, Homo sapien
ggaggtgtgtcctctgcaggggtgg

SEQ ID NO: 1635719 - DNA, 25 bp, Homo sapien
gtggaggaggtgtgtcctctgcagg

SEQ ID NO: 1635720 - DNA, 25 bp, Homo sapien
aagtggaggaggtgtgtcctctgca

SEQ ID NO: 1635721 - DNA, 25 bp, Homo sapien
gggaagtggaggaggtgtgtcctct

SEQ ID NO: 1635722 - DNA, 25 bp, Homo sapien
ctggatctggggctcagtatctggt

SEQ ID NO: 1635723 - DNA, 25 bp, Homo sapien
gatctggggctcagtatctggtctt

SEQ ID NO: 1635724 - DNA, 25 bp, Homo sapien
ggatggagcctgactcggcctgtgg

SEQ ID NO: 1635725 - DNA, 25 bp, Homo sapien
atggagcctgactcggcctgtgggc

SEQ ID NO: 1635726 - DNA, 25 bp, Homo sapien
ccacgtcgtcatagtcatcgtcaga

SEQ ID NO: 1635727 - DNA, 25 bp, Homo sapien
gtcagacgactctgacagttgcttc

SEQ ID NO: 1635728 - DNA, 25 bp, Homo sapien
catagtcatcgtcagacgactctga

SEQ ID NO: 1635729 - DNA, 25 bp, Homo sapien
tgtccacgtcgtcatagtcatcgtc

SEQ ID NO: 1635730 - DNA, 25 bp, Homo sapien
tgaagggtgacaggtatgagccttg

SEQ ID NO: 1635731 - DNA, 25 bp, Homo sapien
aggtatgagccttgggggccttgtc

SEQ ID NO: 1635732 - DNA, 25 bp, Homo sapien
ctgaagggtgacaggtatgagcctt

SEQ ID NO: 1635733 - DNA, 25 bp, Homo sapien
acaggtatgagccttgggggccttg

SEQ ID NO: 1635734 - DNA, 25 bp, Homo sapien
ctgctgctcctgaggtctcgaggag

SEQ ID NO: 1635735 - DNA, 25 bp, Homo sapien
ctgctcctgaggtctcgaggaggct

SEQ ID NO: 1635736 - DNA, 25 bp, Homo sapien
ggtctcgaggaggctgtaggcgagc

SEQ ID NO: 1635737 - DNA, 25 bp, Homo sapien
aggtctcgaggaggctgtaggcgag

SEQ ID NO: 1635738 - DNA, 25 bp, Homo sapien
gggtaggaaaagggtcagcagtggc

SEQ ID NO: 1635739 - DNA, 25 bp, Homo sapien
gtctccattcctcggagcttcctga

SEQ ID NO: 1635740 - DNA, 25 bp, Homo sapien
tggtctccattcctcggagcttcct

SEQ ID NO: 1635741 - DNA, 25 bp, Homo sapien
agcttcctgaactccatgtgccgcc

SEQ ID NO: 1635742 - DNA, 25 bp, Homo sapien
ggagcttcctgaactccatgtgccg

SEQ ID NO: 1635743 - DNA, 25 bp, Homo sapien
tgggtgggggaagataacctgctgt

SEQ ID NO: 1635744 - DNA, 25 bp, Homo sapien
gtgggggaagataacctgctgtgag

SEQ ID NO: 1635745 - DNA, 25 bp, Homo sapien
gtgggtgggggaagataacctgctg

SEQ ID NO: 1635746 - DNA, 25 bp, Homo sapien
ggtgggggaagataacctgctgtga

SEQ ID NO: 1635747 - DNA, 25 bp, Homo sapien
atctgatccgccgagggatagcagg

SEQ ID NO: 1635748 - DNA, 25 bp, Homo sapien
ggtggatctgatccgccgagggata

SEQ ID NO: 1635749 - DNA, 25 bp, Homo sapien
cggtgggtggatctgatccgccgag

SEQ ID NO: 1635750 - DNA, 25 bp, Homo sapien
cccagagagctggagcggtgggtgg

SEQ ID NO: 1635751 - DNA, 25 bp, Homo sapien
ctcaatgtccccaatggagggtcct

SEQ ID NO: 1635752 - DNA, 25 bp, Homo sapien
tcctcaatgtccccaatggagggtc

SEQ ID NO: 1635753 - DNA, 25 bp, Homo sapien
catcctcaatgtccccaatggaggg

SEQ ID NO: 1635754 - DNA, 25 bp, Homo sapien
tttcccgggattcttcagtttgtca

SEQ ID NO: 1635755 - DNA, 25 bp, Homo sapien
ctcgattcagcccaggctgggatac

SEQ ID NO: 1635756 - DNA, 25 bp, Homo sapien
ttcagcccaggctgggataccagtt

SEQ ID NO: 1635757 - DNA, 25 bp, Homo sapien
cgattcagcccaggctgggatacca

SEQ ID NO: 1635758 - DNA, 25 bp, Homo sapien
gcccaggctgggataccagttgatg

SEQ ID NO: 1635759 - DNA, 25 bp, Homo sapien
agaggtgtccgtatccagagggatg

SEQ ID NO: 1635760 - DNA, 25 bp, Homo sapien
aggtgtccgtatccagagggatggt

SEQ ID NO: 1635761 - DNA, 25 bp, Homo sapien
agggaagaggtgtccgtatccagag

SEQ ID NO: 1635762 - DNA, 25 bp, Homo sapien
cggagggaagaggtgtccgtatcca

SEQ ID NO: 1635763 - DNA, 25 bp, Homo sapien
gcgctgggtcgtttcttgggactct

SEQ ID NO: 1635764 - DNA, 25 bp, Homo sapien
gatgaagttgtggaaggcagccgac

SEQ ID NO: 1635765 - DNA, 25 bp, Homo sapien
ggactcttagtcagagtgactttga

SEQ ID NO: 1635766 - DNA, 25 bp, Homo sapien
actgagcatcttggtggcgctgggt

SEQ ID NO: 1635767 - DNA, 25 bp, Homo sapien
cctccctcctgttactctctcgtac

SEQ ID NO: 1635768 - DNA, 25 bp, Homo sapien
ggtagccactcttggtcatgaggaa

SEQ ID NO: 1635769 - DNA, 25 bp, Homo sapien
ggctggtagccactcttggtcatga

SEQ ID NO: 1635770 - DNA, 25 bp, Homo sapien
gaggctggtagccactcttggtcat

SEQ ID NO: 1635771 - DNA, 25 bp, Homo sapien
ctttttccttcagtcggggaggctg

SEQ ID NO: 1635772 - DNA, 25 bp, Homo sapien
ctgtagctcggccagttcgatggcc

SEQ ID NO: 1635773 - DNA, 25 bp, Homo sapien
ggccagttcgatggccgtgatgccc

SEQ ID NO: 1635774 - DNA, 25 bp, Homo sapien
catcaaagagcggtggctgtagctc

SEQ ID NO: 1635775 - DNA, 25 bp, Homo sapien
gtgcacatcaaagagcggtggctgt

SEQ ID NO: 1635776 - DNA, 25 bp, Homo sapien
tctggccagtgtagccccaatctgg

SEQ ID NO: 1635777 - DNA, 25 bp, Homo sapien
caatctgggccgagatgccaaagtc

SEQ ID NO: 1635778 - DNA, 25 bp, Homo sapien
tagggtgtcccaatgaaagagaggc

SEQ ID NO: 1635779 - DNA, 25 bp, Homo sapien
caatgaaagagaggcgtctggccag

SEQ ID NO: 1635780 - DNA, 25 bp, Homo sapien
cccagcatcattgatgaggatgtta

SEQ ID NO: 1635781 - DNA, 25 bp, Homo sapien
ctccccagcatcattgatgaggatg

SEQ ID NO: 1635782 - DNA, 25 bp, Homo sapien
catcattgatgaggatgttagctcc

SEQ ID NO: 1635783 - DNA, 25 bp, Homo sapien
cagcatcattgatgaggatgttagc

SEQ ID NO: 1635784 - DNA, 25 bp, Homo sapien
tgagaggggatatgggaggctgcag

SEQ ID NO: 1635785 - DNA, 25 bp, Homo sapien
tgagcccctgaaatgccactcccat

SEQ ID NO: 1635786 - DNA, 25 bp, Homo sapien
agcccactccgccagctcaaactac

SEQ ID NO: 1635787 - DNA, 25 bp, Homo sapien
cagctcaaactaccctgatccctga

SEQ ID NO: 1635788 - DNA, 25 bp, Homo sapien
cttgatgtccctgtgtatcttcttc

SEQ ID NO: 1635789 - DNA, 25 bp, Homo sapien
tgtatcttcttctgtgagtgcaaat

SEQ ID NO: 1635790 - DNA, 25 bp, Homo sapien
tctgtgagtgcaaataggccagtcc

SEQ ID NO: 1635791 - DNA, 25 bp, Homo sapien
atcttcttctgtgagtgcaaatagg

SEQ ID NO: 1635792 - DNA, 25 bp, Homo sapien
cccagaatccccaggcctctcctta

SEQ ID NO: 1635793 - DNA, 25 bp, Homo sapien
gacaaggggacagtgagtgtttggg

SEQ ID NO: 1635794 - DNA, 25 bp, Homo sapien
agaagggtggacaaggggacagtga

SEQ ID NO: 1635795 - DNA, 25 bp, Homo sapien
tgggggctggagtggggccaccctc

SEQ ID NO: 1635796 - DNA, 25 bp, Homo sapien
cttcccggcagacatagctaatctg

SEQ ID NO: 1635797 - DNA, 25 bp, Homo sapien
cggcagacatagctaatctggagct

SEQ ID NO: 1635798 - DNA, 25 bp, Homo sapien
cccggcagacatagctaatctggag

SEQ ID NO: 1635799 - DNA, 25 bp, Homo sapien
cagacatagctaatctggagctctg

SEQ ID NO: 1635800 - DNA, 25 bp, Homo sapien
caaaggtcaccccggccaggccagg

SEQ ID NO: 1635801 - DNA, 25 bp, Homo sapien
tgcaaaggtcaccccggccaggcca

SEQ ID NO: 1635802 - DNA, 25 bp, Homo sapien
ctgcaaaggtcaccccggccaggcc

SEQ ID NO: 1635803 - DNA, 25 bp, Homo sapien
aggtcaccccggccaggccaggcat

SEQ ID NO: 1635804 - DNA, 25 bp, Homo sapien
cttggtagatgtcctggagagaacc

SEQ ID NO: 1635805 - DNA, 25 bp, Homo sapien
ttggtagatgtcctggagagaacca

SEQ ID NO: 1635806 - DNA, 25 bp, Homo sapien
agagataactcccatggtaggccac

SEQ ID NO: 1635807 - DNA, 25 bp, Homo sapien
ccatggtaggccacgatgttggcgt

SEQ ID NO: 1635808 - DNA, 25 bp, Homo sapien
taactcccatggtaggccacgatgt

SEQ ID NO: 1635809 - DNA, 25 bp, Homo sapien
ttggcgtgccggcaagttttcaata

SEQ ID NO: 1635810 - DNA, 25 bp, Homo sapien
accaggtcccctgacaccttgtctc

SEQ ID NO: 1635811 - DNA, 25 bp, Homo sapien
atcttcagtgccaccaggtcccctg

SEQ ID NO: 1635812 - DNA, 25 bp, Homo sapien
cttcaccatcttcagtgccaccagg

SEQ ID NO: 1635813 - DNA, 25 bp, Homo sapien
aggtcccctgacaccttgtctcgag

SEQ ID NO: 1635814 - DNA, 25 bp, Homo sapien
gaaaatgtcagggtccacgacgtcc

SEQ ID NO: 1635815 - DNA, 25 bp, Homo sapien
ccagccgctgtagcaggtcatagtg

SEQ ID NO: 1635816 - DNA, 25 bp, Homo sapien
ttaaagacttccccatacgtgccgc

SEQ ID NO: 1635817 - DNA, 25 bp, Homo sapien
cacccagccgctgtagcaggtcata

SEQ ID NO: 1635818 - DNA, 25 bp, Homo sapien
ggcctcagggctcaacttctggcac

SEQ ID NO: 1635819 - DNA, 25 bp, Homo sapien
cctcagggctcaacttctggcacct

SEQ ID NO: 1635820 - DNA, 25 bp, Homo sapien
agggcctcagggctcaacttctggc

SEQ ID NO: 1635821 - DNA, 25 bp, Homo sapien
gggcctcagggctcaacttctggca

SEQ ID NO: 1635822 - DNA, 25 bp, Homo sapien
tgccgggtcagtgttagcctccagc

SEQ ID NO: 1635823 - DNA, 25 bp, Homo sapien
caagttgctcaagggtatcgacagg

SEQ ID NO: 1635824 - DNA, 25 bp, Homo sapien
catggcgatgtttgagcagatgaga

SEQ ID NO: 1635825 - DNA, 25 bp, Homo sapien
cagatgagagccaacgtgggcaagt

SEQ ID NO: 1635826 - DNA, 25 bp, Homo sapien
gccaaggaaaatgcctatgatctgg

SEQ ID NO: 1635827 - DNA, 25 bp, Homo sapien
aacctggccaccctggagcgctatg

SEQ ID NO: 1635828 - DNA, 25 bp, Homo sapien
gacgcaggccaaggaaaatgcctat

SEQ ID NO: 1635829 - DNA, 25 bp, Homo sapien
gagcgctatgtagagacgcaggcca

SEQ ID NO: 1635830 - DNA, 25 bp, Homo sapien
agctgtacgtatcggggggcctgcc

SEQ ID NO: 1635831 - DNA, 25 bp, Homo sapien
ctcctaagtagctgtacgtatcggg

SEQ ID NO: 1635832 - DNA, 25 bp, Homo sapien
cagctaattttacttgggtgctttc

SEQ ID NO: 1635833 - DNA, 25 bp, Homo sapien
tattcctaagcattggctggcttga

SEQ ID NO: 1635834 - DNA, 25 bp, Homo sapien
aaggccctcaccaacttgccgcaca

SEQ ID NO: 1635835 - DNA, 25 bp, Homo sapien
cttgccgcacacagacttcaccctg

SEQ ID NO: 1635836 - DNA, 25 bp, Homo sapien
ttcaccctgtgcaagtgcatgatcg

SEQ ID NO: 1635837 - DNA, 25 bp, Homo sapien
gcatgatcgaccaggcacatgtatc

SEQ ID NO: 1635838 - DNA, 25 bp, Homo sapien
cttacgctccgaggccagttttcct

SEQ ID NO: 1635839 - DNA, 25 bp, Homo sapien
tgatctggggtccaaccttacgctc

SEQ ID NO: 1635840 - DNA, 25 bp, Homo sapien
gctgaagctttggaagaaagcagcc

SEQ ID NO: 1635841 - DNA, 25 bp, Homo sapien
gccaccaggactggcatgtcatttc

SEQ ID NO: 1635842 - DNA, 25 bp, Homo sapien
aagaagaacggccaatccgacagat

SEQ ID NO: 1635843 - DNA, 25 bp, Homo sapien
ccaatccgacagattttgtacctcg

SEQ ID NO: 1635844 - DNA, 25 bp, Homo sapien
gaagaacggccaatccgacagattt

SEQ ID NO: 1635845 - DNA, 25 bp, Homo sapien
aacggccaatccgacagattttgta

SEQ ID NO: 1635846 - DNA, 25 bp, Homo sapien
gcctggtagctgctattcttgttaa

SEQ ID NO: 1635847 - DNA, 25 bp, Homo sapien
gctattcttgttaacattactgaag

SEQ ID NO: 1635848 - DNA, 25 bp, Homo sapien
accacacatggcctggtagctgcta

SEQ ID NO: 1635849 - DNA, 25 bp, Homo sapien
catggcctggtagctgctattcttg

SEQ ID NO: 1635850 - DNA, 25 bp, Homo sapien
atggacctcttggaaggtataactg

SEQ ID NO: 1635851 - DNA, 25 bp, Homo sapien
catggacctcttggaaggtataact

SEQ ID NO: 1635852 - DNA, 25 bp, Homo sapien
ctggatgaaaacatggacctcttgg

SEQ ID NO: 1635853 - DNA, 25 bp, Homo sapien
gcagtaaacaaagtgggatggctcc

SEQ ID NO: 1635854 - DNA, 25 bp, Homo sapien
tgagcccttacctccgtagagagag

SEQ ID NO: 1635855 - DNA, 25 bp, Homo sapien
tcatcaggtcagcatggaaggccca

SEQ ID NO: 1635856 - DNA, 25 bp, Homo sapien
caacaggcctgtctgggtctcatca

SEQ ID NO: 1635857 - DNA, 25 bp, Homo sapien
ccactgcccagaactaggaggtagt

SEQ ID NO: 1635858 - DNA, 25 bp, Homo sapien
aagcagttagctagctgcaccccgg

SEQ ID NO: 1635859 - DNA, 25 bp, Homo sapien
tacccaccaagataggaggcagctc

SEQ ID NO: 1635860 - DNA, 25 bp, Homo sapien
gctcagatgtcactgggattcgcag

SEQ ID NO: 1635861 - DNA, 25 bp, Homo sapien
caaaggcagcgtggtaagttagaca

SEQ ID NO: 1635862 - DNA, 25 bp, Homo sapien
gttagacactaggtgcacggtgccc

SEQ ID NO: 1635863 - DNA, 25 bp, Homo sapien
tgttttgacctgacacgatggctca

SEQ ID NO: 1635864 - DNA, 25 bp, Homo sapien
tcattgttcgaagctgtcaccgcca

SEQ ID NO: 1635865 - DNA, 25 bp, Homo sapien
ccctgccaaggttctattatttgat

SEQ ID NO: 1635866 - DNA, 25 bp, Homo sapien
ggttctattatttgatctatgttct

SEQ ID NO: 1635867 - DNA, 25 bp, Homo sapien
ccaaggttctattatttgatctatg

SEQ ID NO: 1635868 - DNA, 25 bp, Homo sapien
tgccaaggttctattatttgatcta

SEQ ID NO: 1635869 - DNA, 25 bp, Homo sapien
caagatgatgacagtgaagtgaggc

SEQ ID NO: 1635870 - DNA, 25 bp, Homo sapien
tcaggggagactttccaagatgatg

SEQ ID NO: 1635871 - DNA, 25 bp, Homo sapien
tccaagatgatgacagtgaagtgag

SEQ ID NO: 1635872 - DNA, 25 bp, Homo sapien
tttccaagatgatgacagtgaagtg

SEQ ID NO: 1635873 - DNA, 25 bp, Homo sapien
tcttggagaatagggtatggcgaaa

SEQ ID NO: 1635874 - DNA, 25 bp, Homo sapien
agaactcgtgatatcgctgattcag

SEQ ID NO: 1635875 - DNA, 25 bp, Homo sapien
tagcccagagttgtacgagtccttg

SEQ ID NO: 1635876 - DNA, 25 bp, Homo sapien
gtatggcgaaaggagagaactcgtg

SEQ ID NO: 1635877 - DNA, 25 bp, Homo sapien
cacctgcatcagtgattatcagcat

SEQ ID NO: 1635878 - DNA, 25 bp, Homo sapien
tcacctgcatcagtgattatcagca

SEQ ID NO: 1635879 - DNA, 25 bp, Homo sapien
ctcccctcagccttaagtaccccat

SEQ ID NO: 1635880 - DNA, 25 bp, Homo sapien
ctcagccttaagtaccccatctgtg

SEQ ID NO: 1635881 - DNA, 25 bp, Homo sapien
ccctcagccttaagtaccccatctg

SEQ ID NO: 1635882 - DNA, 25 bp, Homo sapien
cagccttaagtaccccatctgtggg

SEQ ID NO: 1635883 - DNA, 25 bp, Homo sapien
caggtgtagtagcatattcctggga

SEQ ID NO: 1635884 - DNA, 25 bp, Homo sapien
aggtgtagtagcatattcctgggag

SEQ ID NO: 1635885 - DNA, 25 bp, Homo sapien
ccaggtgtagtagcatattcctggg

SEQ ID NO: 1635886 - DNA, 25 bp, Homo sapien
gtgtagtagcatattcctgggaggc

SEQ ID NO: 1635887 - DNA, 25 bp, Homo sapien
agaaaagctggatgcgagatgccgc

SEQ ID NO: 1635888 - DNA, 25 bp, Homo sapien
tgcctagccttgttctggaattagt

SEQ ID NO: 1635889 - DNA, 25 bp, Homo sapien
gatgaaaagtgcagtgagtaaaaca

SEQ ID NO: 1635890 - DNA, 25 bp, Homo sapien
ggagactggttatgaacaaagaaca

SEQ ID NO: 1635891 - DNA, 25 bp, Homo sapien
tggaagatgaccgcgatcatgaagc

SEQ ID NO: 1635892 - DNA, 25 bp, Homo sapien
ttctttggcgtgccggcagggcacc

SEQ ID NO: 1635893 - DNA, 25 bp, Homo sapien
agatgaccgcgatcatgaagcccag

SEQ ID NO: 1635894 - DNA, 25 bp, Homo sapien
caggagagctcgatgctttttgcct

SEQ ID NO: 1635895 - DNA, 25 bp, Homo sapien
ctccgcatggagaagtggccgtcat

SEQ ID NO: 1635896 - DNA, 25 bp, Homo sapien
tctccgcatggagaagtggccgtca

SEQ ID NO: 1635897 - DNA, 25 bp, Homo sapien
cagtctctccgcatggagaagtggc

SEQ ID NO: 1635898 - DNA, 25 bp, Homo sapien
tctctccgcatggagaagtggccgt

SEQ ID NO: 1635899 - DNA, 25 bp, Homo sapien
tctctacagctggtatttcaccttg

SEQ ID NO: 1635900 - DNA, 25 bp, Homo sapien
gctatccacggggaacagaagggcc

SEQ ID NO: 1635901 - DNA, 25 bp, Homo sapien
gtctgtgaggacagccgagctatcc

SEQ ID NO: 1635902 - DNA, 25 bp, Homo sapien
ctctctacagctggtatttcacctt

SEQ ID NO: 1635903 - DNA, 25 bp, Homo sapien
catccgtctgcatccggaatgggag

SEQ ID NO: 1635904 - DNA, 25 bp, Homo sapien
cagagaaagacagccccgtataaga

SEQ ID NO: 1635905 - DNA, 25 bp, Homo sapien
ccgtataagaacgtcaatgtgcaga

SEQ ID NO: 1635906 - DNA, 25 bp, Homo sapien
agaacttccacatcaggtaagcgcc

SEQ ID NO: 1635907 - DNA, 25 bp, Homo sapien
tggtgtgatcactcatccctgctgc

SEQ ID NO: 1635908 - DNA, 25 bp, Homo sapien
tctcgccggcctaatagaacgttct

SEQ ID NO: 1635909 - DNA, 25 bp, Homo sapien
gcaaggtgactctcagaagcaacaa

SEQ ID NO: 1635910 - DNA, 25 bp, Homo sapien
agaacgttcttcgtccccaggcaag

SEQ ID NO: 1635911 - DNA, 25 bp, Homo sapien
tggcctagccagactgagccaggtg

SEQ ID NO: 1635912 - DNA, 25 bp, Homo sapien
agcccagaagcagtcaggctctcag

SEQ ID NO: 1635913 - DNA, 25 bp, Homo sapien
cagtgcacatactggcctagccaga

SEQ ID NO: 1635914 - DNA, 25 bp, Homo sapien
tcttagacctgagggaaaagactaa

SEQ ID NO: 1635915 - DNA, 25 bp, Homo sapien
acagggagcgcttggcagagaaaac

SEQ ID NO: 1635916 - DNA, 25 bp, Homo sapien
tggcagcaggcaacctcgtttaaac

SEQ ID NO: 1635917 - DNA, 25 bp, Homo sapien
gagcactcactacataccaggcaac

SEQ ID NO: 1635918 - DNA, 25 bp, Homo sapien
taaaatgaagttgggcacagggagc

SEQ ID NO: 1635919 - DNA, 25 bp, Homo sapien
aggtcatgccaccacacttcggtct

SEQ ID NO: 1635920 - DNA, 25 bp, Homo sapien
aggtgagccgaggtcatgccaccac

SEQ ID NO: 1635921 - DNA, 25 bp, Homo sapien
ccgaggtcatgccaccacacttcgg

SEQ ID NO: 1635922 - DNA, 25 bp, Homo sapien
tgaggtgagccgaggtcatgccacc

SEQ ID NO: 1635923 - DNA, 25 bp, Homo sapien
ccagactcacttgccattgccagga

SEQ ID NO: 1635924 - DNA, 25 bp, Homo sapien
cattgccaggagatggccccaacaa

SEQ ID NO: 1635925 - DNA, 25 bp, Homo sapien
gctttgtctggcctcacgtgtctca

SEQ ID NO: 1635926 - DNA, 25 bp, Homo sapien
caagcaccccgcttttgcagcagag

SEQ ID NO: 1635927 - DNA, 25 bp, Homo sapien
agacatagccgattctctgcccggg

SEQ ID NO: 1635928 - DNA, 25 bp, Homo sapien
tccgggtctgcgtcgggcgtgggtc

SEQ ID NO: 1635929 - DNA, 25 bp, Homo sapien
atatatattcacctagcaacatatc

SEQ ID NO: 1635930 - DNA, 25 bp, Homo sapien
tggtttctggataaaccaccctctg

SEQ ID NO: 1635931 - DNA, 25 bp, Homo sapien
tggactagctcgtgtcatctgctcg

SEQ ID NO: 1635932 - DNA, 25 bp, Homo sapien
catctgctcgagaagggctgtcgct

SEQ ID NO: 1635933 - DNA, 25 bp, Homo sapien
tcttaagctgtcaacgtggactagc

SEQ ID NO: 1635934 - DNA, 25 bp, Homo sapien
gccccagacaggtggatgccagaga

SEQ ID NO: 1635935 - DNA, 25 bp, Homo sapien
aggagaaggtggccacctccatcca

SEQ ID NO: 1635936 - DNA, 25 bp, Homo sapien
taggagaaggtggccacctccatcc

SEQ ID NO: 1635937 - DNA, 25 bp, Homo sapien
ctaggagaaggtggccacctccatc

SEQ ID NO: 1635938 - DNA, 25 bp, Homo sapien
ctgtctgtgggtcaggcagatgacc

SEQ ID NO: 1635939 - DNA, 25 bp, Homo sapien
agatgaccccctcacccccatccag

SEQ ID NO: 1635940 - DNA, 25 bp, Homo sapien
gtctgtgggtcaggcagatgacccc

SEQ ID NO: 1635941 - DNA, 25 bp, Homo sapien
cctcacccccatccaggtgctggct

SEQ ID NO: 1635942 - DNA, 25 bp, Homo sapien
acaggacacgaaccgctcgaagtcc

SEQ ID NO: 1635943 - DNA, 25 bp, Homo sapien
acacgcagacggctatcccggtagc

SEQ ID NO: 1635944 - DNA, 25 bp, Homo sapien
acacaggacacgaaccgctcgaagt

SEQ ID NO: 1635945 - DNA, 25 bp, Homo sapien
tcccggtagcggctggtgagggtct

SEQ ID NO: 1635946 - DNA, 25 bp, Homo sapien
agagaacaggtcctgtccccacgac

SEQ ID NO: 1635947 - DNA, 25 bp, Homo sapien
tagagtgaggattccaaccccggtg

SEQ ID NO: 1635948 - DNA, 25 bp, Homo sapien
tcaaagagatgaagtcaagtgccca

SEQ ID NO: 1635949 - DNA, 25 bp, Homo sapien
cagggactggcaacaagctaaggtg

SEQ ID NO: 1635950 - DNA, 25 bp, Homo sapien
tcagctcgtaggagttcatggttcc

SEQ ID NO: 1635951 - DNA, 25 bp, Homo sapien
gcctcagctcgtaggagttcatggt

SEQ ID NO: 1635952 - DNA, 25 bp, Homo sapien
gtgccagcctcagctcgtaggagtt

SEQ ID NO: 1635953 - DNA, 25 bp, Homo sapien
gctcgtaggagttcatggttccaga

SEQ ID NO: 1635954 - DNA, 25 bp, Homo sapien
ccagcaagcagcctagccacttggg

SEQ ID NO: 1635955 - DNA, 25 bp, Homo sapien
cccccagcaagcagcctagccactt

SEQ ID NO: 1635956 - DNA, 25 bp, Homo sapien
ttcttctggtgtggacccccagcaa

SEQ ID NO: 1635957 - DNA, 25 bp, Homo sapien
catcccaactccctttcttctggtg

SEQ ID NO: 1635958 - DNA, 25 bp, Homo sapien
atgggaataagagcaatgacccaga

SEQ ID NO: 1635959 - DNA, 25 bp, Homo sapien
aaaatgggaataagagcaatgaccc

SEQ ID NO: 1635960 - DNA, 25 bp, Homo sapien
ctccaagtcagcctagtccagtacc

SEQ ID NO: 1635961 - DNA, 25 bp, Homo sapien
agggtgcctatgtctctgttagtaa

SEQ ID NO: 1635962 - DNA, 25 bp, Homo sapien
ctgccactccaggaggtagccccag

SEQ ID NO: 1635963 - DNA, 25 bp, Homo sapien
actccaggaggtagccccagagctg

SEQ ID NO: 1635964 - DNA, 25 bp, Homo sapien
gccactccaggaggtagccccagag

SEQ ID NO: 1635965 - DNA, 25 bp, Homo sapien
cactccaggaggtagccccagagct

SEQ ID NO: 1635966 - DNA, 25 bp, Homo sapien
tggtgtaaggccaggctttgcccat

SEQ ID NO: 1635967 - DNA, 25 bp, Homo sapien
ctggaagtggtgtaaggccaggctt

SEQ ID NO: 1635968 - DNA, 25 bp, Homo sapien
ggtgtaaggccaggctttgcccatg

SEQ ID NO: 1635969 - DNA, 25 bp, Homo sapien
gaagtggtgtaaggccaggctttgc

SEQ ID NO: 1635970 - DNA, 25 bp, Homo sapien
gggcatctggttaaggtcaatctct

SEQ ID NO: 1635971 - DNA, 25 bp, Homo sapien
catctggttaaggtcaatctctcca

SEQ ID NO: 1635972 - DNA, 25 bp, Homo sapien
tcgggggcatctggttaaggtcaat

SEQ ID NO: 1635973 - DNA, 25 bp, Homo sapien
cgggggcatctggttaaggtcaatc

SEQ ID NO: 1635974 - DNA, 25 bp, Homo sapien
caggtcctgagcccgatctctctgg

SEQ ID NO: 1635975 - DNA, 25 bp, Homo sapien
aggtcctgagcccgatctctctggg

SEQ ID NO: 1635976 - DNA, 25 bp, Homo sapien
ttcatagacatagggtggcaccggc

SEQ ID NO: 1635977 - DNA, 25 bp, Homo sapien
ggatgtgactcccttaagcaggtga

SEQ ID NO: 1635978 - DNA, 25 bp, Homo sapien
tggccaccactttaagggctgggtg

SEQ ID NO: 1635979 - DNA, 25 bp, Homo sapien
tcccatattatagaagccgaggcac

SEQ ID NO: 1635980 - DNA, 25 bp, Homo sapien
ctggagctgagaggcattgagttct

SEQ ID NO: 1635981 - DNA, 25 bp, Homo sapien
ggagctgagaggcattgagttcttc

SEQ ID NO: 1635982 - DNA, 25 bp, Homo sapien
gcctggagctgagaggcattgagtt

SEQ ID NO: 1635983 - DNA, 25 bp, Homo sapien
gagctgagaggcattgagttcttcc

SEQ ID NO: 1635984 - DNA, 25 bp, Homo sapien
gcttgtgaggccatttactcatcca

SEQ ID NO: 1635985 - DNA, 25 bp, Homo sapien
aagccctgtgctagggacacggcag

SEQ ID NO: 1635986 - DNA, 25 bp, Homo sapien
ccttagatgagacctgagcctggct

SEQ ID NO: 1635987 - DNA, 25 bp, Homo sapien
aaggtcaggagatttaagcccggag

SEQ ID NO: 1635988 - DNA, 25 bp, Homo sapien
cctgaaacagctgctccaaccccag

SEQ ID NO: 1635989 - DNA, 25 bp, Homo sapien
tccagccagctcctgaaacagctgc

SEQ ID NO: 1635990 - DNA, 25 bp, Homo sapien
agctcctgaaacagctgctccaacc

SEQ ID NO: 1635991 - DNA, 25 bp, Homo sapien
aaacagctgctccaaccccagctcc

SEQ ID NO: 1635992 - DNA, 25 bp, Homo sapien
catggcggaagtttagcgctggcca

SEQ ID NO: 1635993 - DNA, 25 bp, Homo sapien
aagtttagcgctggccaagatcccc

SEQ ID NO: 1635994 - DNA, 25 bp, Homo sapien
ggaagtttagcgctggccaagatcc

SEQ ID NO: 1635995 - DNA, 25 bp, Homo sapien
tgccgcatggcggaagtttagcgct

SEQ ID NO: 1635996 - DNA, 25 bp, Homo sapien
ggtctgcgctgatcacgtcgtcgat

SEQ ID NO: 1635997 - DNA, 25 bp, Homo sapien
gagagactgcaggtctgcgctgatc

SEQ ID NO: 1635998 - DNA, 25 bp, Homo sapien
tgcaggtctgcgctgatcacgtcgt

SEQ ID NO: 1635999 - DNA, 25 bp, Homo sapien
gactgcaggtctgcgctgatcacgt

SEQ ID NO: 1636000 - DNA, 25 bp, Homo sapien
tgaggaatcgcgtggggtctaggta

SEQ ID NO: 1636001 - DNA, 25 bp, Homo sapien
tctcaggtgaggaatcgcgtggggt

SEQ ID NO: 1636002 - DNA, 25 bp, Homo sapien
gaatcgcgtggggtctaggtaggga

SEQ ID NO: 1636003 - DNA, 25 bp, Homo sapien
tctaggtagggaccgtggagccctg

SEQ ID NO: 1636004 - DNA, 25 bp, Homo sapien
gccgtgtggcggcgctcggagaaga

SEQ ID NO: 1636005 - DNA, 25 bp, Homo sapien
agaagacacgcagagtgaagtcagc

SEQ ID NO: 1636006 - DNA, 25 bp, Homo sapien
ggcgggtcacgtcgcggcgggcgct

SEQ ID NO: 1636007 - DNA, 25 bp, Homo sapien
gcggtgctcggcaccaccaggtagt

SEQ ID NO: 1636008 - DNA, 25 bp, Homo sapien
tgtccctaacctcgtccctctgtct

SEQ ID NO: 1636009 - DNA, 25 bp, Homo sapien
tattagacccttattgaacctttgc

SEQ ID NO: 1636010 - DNA, 25 bp, Homo sapien
tctctgtatccttggtcccctctgg

SEQ ID NO: 1636011 - DNA, 25 bp, Homo sapien
cttcttcgtcctattagacccttat

SEQ ID NO: 1636012 - DNA, 25 bp, Homo sapien
ccaacggtgaggtaagtgaggccct

SEQ ID NO: 1636013 - DNA, 25 bp, Homo sapien
caggctccagcagcgttaaacggaa

SEQ ID NO: 1636014 - DNA, 25 bp, Homo sapien
ctggaacacgtggaagccaacggtg

SEQ ID NO: 1636015 - DNA, 25 bp, Homo sapien
acagaaggaccgtgcacttgggcgt

SEQ ID NO: 1636016 - DNA, 25 bp, Homo sapien
tggctcccgccggagttgaagccac

SEQ ID NO: 1636017 - DNA, 25 bp, Homo sapien
cccagcggccttggaaggtgtggac

SEQ ID NO: 1636018 - DNA, 25 bp, Homo sapien
tcagcgagcagatctgcacggtgtc

SEQ ID NO: 1636019 - DNA, 25 bp, Homo sapien
gagttgaagccacgcacccagcggc

SEQ ID NO: 1636020 - DNA, 25 bp, Homo sapien
cctttttcaccagcagggcatcgcg

SEQ ID NO: 1636021 - DNA, 25 bp, Homo sapien
ttttcaccagcagggcatcgcggca

SEQ ID NO: 1636022 - DNA, 25 bp, Homo sapien
accagcagggcatcgcggcactcgg

SEQ ID NO: 1636023 - DNA, 25 bp, Homo sapien
ccagcagggcatcgcggcactcggt

SEQ ID NO: 1636024 - DNA, 25 bp, Homo sapien
agccccatgggttccgcagccgcag

SEQ ID NO: 1636025 - DNA, 25 bp, Homo sapien
cgcagcagccgcaccttggtgaagc

SEQ ID NO: 1636026 - DNA, 25 bp, Homo sapien
acgcagccccatgggttccgcagcc

SEQ ID NO: 1636027 - DNA, 25 bp, Homo sapien
tccacgcagccccatgggttccgca

SEQ ID NO: 1636028 - DNA, 25 bp, Homo sapien
gaatacgcgtgtccctttaccaggc

SEQ ID NO: 1636029 - DNA, 25 bp, Homo sapien
ttgtgtgtgcccgtgatggaatacg

SEQ ID NO: 1636030 - DNA, 25 bp, Homo sapien
ttctgtgcggtactcaccccgatca

SEQ ID NO: 1636031 - DNA, 25 bp, Homo sapien
tcttctgtgcggtactcaccccgat

SEQ ID NO: 1636032 - DNA, 25 bp, Homo sapien
ccgcatgcgagtccaggtctcttac

SEQ ID NO: 1636033 - DNA, 25 bp, Homo sapien
tcctggtgggggttccgcatgcgag

SEQ ID NO: 1636034 - DNA, 25 bp, Homo sapien
tccgcatgcgagtccaggtctctta

SEQ ID NO: 1636035 - DNA, 25 bp, Homo sapien
ggttccgcatgcgagtccaggtctc

SEQ ID NO: 1636036 - DNA, 25 bp, Homo sapien
tttgtctcagatagagcacctcgcc

SEQ ID NO: 1636037 - DNA, 25 bp, Homo sapien
gggcagagaacagccccatgctgtt

SEQ ID NO: 1636038 - DNA, 25 bp, Homo sapien
aaaagcctcattcatgtggccgccc

SEQ ID NO: 1636039 - DNA, 25 bp, Homo sapien
agtggcgcccacgagggactccttg

SEQ ID NO: 1636040 - DNA, 25 bp, Homo sapien
ttccgagcgcacgaacatcagcttc

SEQ ID NO: 1636041 - DNA, 25 bp, Homo sapien
gggcccagaactcattccgctgttc

SEQ ID NO: 1636042 - DNA, 25 bp, Homo sapien
tgtcatccaccacgacgtccatcca

SEQ ID NO: 1636043 - DNA, 25 bp, Homo sapien
atcagcttcccctcacgcacgggca

SEQ ID NO: 1636044 - DNA, 25 bp, Homo sapien
tgggggaaacggaggcatgggcaga

SEQ ID NO: 1636045 - DNA, 25 bp, Homo sapien
atgggggaaacggaggcatgggcag

SEQ ID NO: 1636046 - DNA, 25 bp, Homo sapien
catgggggaaacggaggcatgggca

SEQ ID NO: 1636047 - DNA, 25 bp, Homo sapien
agacgcctgcgtagccatgctggaa

SEQ ID NO: 1636048 - DNA, 25 bp, Homo sapien
gaagacgcctgcgtagccatgctgg

SEQ ID NO: 1636049 - DNA, 25 bp, Homo sapien
cctgcgtagccatgctggaaatcct

SEQ ID NO: 1636050 - DNA, 25 bp, Homo sapien
agtggaagacgcctgcgtagccatg

SEQ ID NO: 1636051 - DNA, 25 bp, Homo sapien
cctgacacacgtctgtgcggctcat

SEQ ID NO: 1636052 - DNA, 25 bp, Homo sapien
tgtcttcacagatgaacttcggctc

SEQ ID NO: 1636053 - DNA, 25 bp, Homo sapien
cgtctgtgcggctcatgtcttcaca

SEQ ID NO: 1636054 - DNA, 25 bp, Homo sapien
acagatgaacttcggctcagcacag

SEQ ID NO: 1636055 - DNA, 25 bp, Homo sapien
gggtggtgggggattccaggcctca

SEQ ID NO: 1636056 - DNA, 25 bp, Homo sapien
ctgtgggtggtgggggattccaggc

SEQ ID NO: 1636057 - DNA, 25 bp, Homo sapien
tgggtggtgggggattccaggcctc

SEQ ID NO: 1636058 - DNA, 25 bp, Homo sapien
gtggtgggggattccaggcctcagc

SEQ ID NO: 1636059 - DNA, 25 bp, Homo sapien
ggccagcagggaagtaagggtcgcg

SEQ ID NO: 1636060 - DNA, 25 bp, Homo sapien
gaattgcctcatagctctggccccg

SEQ ID NO: 1636061 - DNA, 25 bp, Homo sapien
ggccccagctggtcatagccaaggg

SEQ ID NO: 1636062 - DNA, 25 bp, Homo sapien
ggtcgcggaacaggatccccgaatc

SEQ ID NO: 1636063 - DNA, 25 bp, Homo sapien
cctcatccacgagctggatggtgac

SEQ ID NO: 1636064 - DNA, 25 bp, Homo sapien
tggatggtgaccctcccactgctgg

SEQ ID NO: 1636065 - DNA, 25 bp, Homo sapien
tccacgagctggatggtgaccctcc

SEQ ID NO: 1636066 - DNA, 25 bp, Homo sapien
gagctggatggtgaccctcccactg

SEQ ID NO: 1636067 - DNA, 25 bp, Homo sapien
actggcctcacaagccggcaccagg

SEQ ID NO: 1636068 - DNA, 25 bp, Homo sapien
cccagtggggtctttaggcaatgag

SEQ ID NO: 1636069 - DNA, 25 bp, Homo sapien
aaggtagcagcttaatgggcttggc

SEQ ID NO: 1636070 - DNA, 25 bp, Homo sapien
gagcagggacgcctcttcagtagct

SEQ ID NO: 1636071 - DNA, 25 bp, Homo sapien
tgtctgtccctgtaacccatatgtg

SEQ ID NO: 1636072 - DNA, 25 bp, Homo sapien
tctctgtacctgtcagacccaggag

SEQ ID NO: 1636073 - DNA, 25 bp, Homo sapien
tggagggatggctctgtacctctcc

SEQ ID NO: 1636074 - DNA, 25 bp, Homo sapien
cctgtcagtgtaccttgtgtctgcc

SEQ ID NO: 1636075 - DNA, 25 bp, Homo sapien
tagccctcatgtctccgtgcagcgc

SEQ ID NO: 1636076 - DNA, 25 bp, Homo sapien
cgtgcagcgcgtgccgctgctttaa

SEQ ID NO: 1636077 - DNA, 25 bp, Homo sapien
cgcgtgccgctgctttaacactttt

SEQ ID NO: 1636078 - DNA, 25 bp, Homo sapien
tcatgtctccgtgcagcgcgtgccg

SEQ ID NO: 1636079 - DNA, 25 bp, Homo sapien
taacgctttatttgccagccaaggc

SEQ ID NO: 1636080 - DNA, 25 bp, Homo sapien
ctttatttgccagccaaggccccgg

SEQ ID NO: 1636081 - DNA, 25 bp, Homo sapien
acgctttatttgccagccaaggccc

SEQ ID NO: 1636082 - DNA, 25 bp, Homo sapien
gctttatttgccagccaaggccccg

SEQ ID NO: 1636083 - DNA, 25 bp, Homo sapien
ggagtccagctgcacgtccccgccc

SEQ ID NO: 1636084 - DNA, 25 bp, Homo sapien
gagtccagctgcacgtccccgccca

SEQ ID NO: 1636085 - DNA, 25 bp, Homo sapien
tgttgaagaccacctccgacgtgtc

SEQ ID NO: 1636086 - DNA, 25 bp, Homo sapien
ccccgcacagcaggtttacatggaa

SEQ ID NO: 1636087 - DNA, 25 bp, Homo sapien
gctgcccgcgctggaaaggaacgcc

SEQ ID NO: 1636088 - DNA, 25 bp, Homo sapien
cgtctgacgcgatgatgagcacctc

SEQ ID NO: 1636089 - DNA, 25 bp, Homo sapien
ctcagaatccagaaggcccgaagtt

SEQ ID NO: 1636090 - DNA, 25 bp, Homo sapien
tcagacatggaagtcataggactat

SEQ ID NO: 1636091 - DNA, 25 bp, Homo sapien
cagggtgtctccaggacttggagta

SEQ ID NO: 1636092 - DNA, 25 bp, Homo sapien
aggatggcttggcaaggactcccag

SEQ ID NO: 1636093 - DNA, 25 bp, Homo sapien
agcaccgtgccagggcggatgccct

SEQ ID NO: 1636094 - DNA, 25 bp, Homo sapien
gcattgggaggaaccaagccgcgaa

SEQ ID NO: 1636095 - DNA, 25 bp, Homo sapien
tgggaggaaccaagccgcgaattct

SEQ ID NO: 1636096 - DNA, 25 bp, Homo sapien
aagccgcgaattctcagcaccgtgc

SEQ ID NO: 1636097 - DNA, 25 bp, Homo sapien
cttgctcctttgaaagaggagcccc

SEQ ID NO: 1636098 - DNA, 25 bp, Homo sapien
tctgcatcattccagattttagtat

SEQ ID NO: 1636099 - DNA, 25 bp, Homo sapien
aatcttctctgcatcattccagatt

SEQ ID NO: 1636100 - DNA, 25 bp, Homo sapien
ctgcatcattccagattttagtata

SEQ ID NO: 1636101 - DNA, 25 bp, Homo sapien
ttctctgcatcattccagattttag

SEQ ID NO: 1636102 - DNA, 25 bp, Homo sapien
cagagggactcctcacgtcccagat

SEQ ID NO: 1636103 - DNA, 25 bp, Homo sapien
ccagacagggtggcagccgggcgga

SEQ ID NO: 1636104 - DNA, 25 bp, Homo sapien
agggactcctcacgtcccagatgat

SEQ ID NO: 1636105 - DNA, 25 bp, Homo sapien
cccagacagggtggcagccgggcgg

SEQ ID NO: 1636106 - DNA, 25 bp, Homo sapien
tcccatgagttatggccccaggaat

SEQ ID NO: 1636107 - DNA, 25 bp, Homo sapien
ccatgagttatggccccaggaatag

SEQ ID NO: 1636108 - DNA, 25 bp, Homo sapien
cccatgagttatggccccaggaata

SEQ ID NO: 1636109 - DNA, 25 bp, Homo sapien
atcaccctggatttccaatgtgtcc

SEQ ID NO: 1636110 - DNA, 25 bp, Homo sapien
cataggacaaggtgacatcaccctg

SEQ ID NO: 1636111 - DNA, 25 bp, Homo sapien
gacatcaccctggatttccaatgtg

SEQ ID NO: 1636112 - DNA, 25 bp, Homo sapien
catcaccctggatttccaatgtgtc

SEQ ID NO: 1636113 - DNA, 25 bp, Homo sapien
agaggtgctggccattggcgtaaac

SEQ ID NO: 1636114 - DNA, 25 bp, Homo sapien
aagtcaaagaggtgctggccattgg

SEQ ID NO: 1636115 - DNA, 25 bp, Homo sapien
tggaaggccgagaggcgatgggcaa

SEQ ID NO: 1636116 - DNA, 25 bp, Homo sapien
caaagaggtgctggccattggcgta

SEQ ID NO: 1636117 - DNA, 25 bp, Homo sapien
cttgaagcgatccaagccacagcga

SEQ ID NO: 1636118 - DNA, 25 bp, Homo sapien
tgaagcgatccaagccacagcgaat

SEQ ID NO: 1636119 - DNA, 25 bp, Homo sapien
agcgatccaagccacagcgaatgga

SEQ ID NO: 1636120 - DNA, 25 bp, Homo sapien
gatccaagccacagcgaatggacag

SEQ ID NO: 1636121 - DNA, 25 bp, Homo sapien
gtgggaaaagagagctcagactcac

SEQ ID NO: 1636122 - DNA, 25 bp, Homo sapien
agaagggtgggcatgaggccagggc

SEQ ID NO: 1636123 - DNA, 25 bp, Homo sapien
cagggagaagggtgggcatgaggcc

SEQ ID NO: 1636124 - DNA, 25 bp, Homo sapien
ggagaagggtgggcatgaggccagg

SEQ ID NO: 1636125 - DNA, 25 bp, Homo sapien
cagaaggctgttccggaccacggta

SEQ ID NO: 1636126 - DNA, 25 bp, Homo sapien
ccaaatgggttgtgggtgatcttct

SEQ ID NO: 1636127 - DNA, 25 bp, Homo sapien
tcaaagaactgtccgggaccaaatg

SEQ ID NO: 1636128 - DNA, 25 bp, Homo sapien
tgcagagctatgtcccctgaggagc

SEQ ID NO: 1636129 - DNA, 25 bp, Homo sapien
gatgatggttcttcgagctgtgagc

SEQ ID NO: 1636130 - DNA, 25 bp, Homo sapien
gcagcctcccgaaatatggcacagg

SEQ ID NO: 1636131 - DNA, 25 bp, Homo sapien
ttgcctgtgggaggcacatagccct

SEQ ID NO: 1636132 - DNA, 25 bp, Homo sapien
ggcacatagcccttgatgatgatgg

SEQ ID NO: 1636133 - DNA, 25 bp, Homo sapien
cctaaacctgaccacgaactctatc

SEQ ID NO: 1636134 - DNA, 25 bp, Homo sapien
aaacctgaccacgaactctatctac

SEQ ID NO: 1636135 - DNA, 25 bp, Homo sapien
ctgaccacgaactctatctaccctt

SEQ ID NO: 1636136 - DNA, 25 bp, Homo sapien
tgaccacgaactctatctacccttc

SEQ ID NO: 1636137 - DNA, 25 bp, Homo sapien
gagtcgacagatatctatgacacac

SEQ ID NO: 1636138 - DNA, 25 bp, Homo sapien
gttagtacaccttgggctgcaaccc

SEQ ID NO: 1636139 - DNA, 25 bp, Homo sapien
tagactccggcgtttctctaggtgc

SEQ ID NO: 1636140 - DNA, 25 bp, Homo sapien
gatattattctccaagagtcgacag

SEQ ID NO: 1636141 - DNA, 25 bp, Homo sapien
taccccaattctcaccattcccact

SEQ ID NO: 1636142 - DNA, 25 bp, Homo sapien
tctcaccattcccactcctcacccg

SEQ ID NO: 1636143 - DNA, 25 bp, Homo sapien
cccaattctcaccattcccactcct

SEQ ID NO: 1636144 - DNA, 25 bp, Homo sapien
cctaccccaattctcaccattccca

SEQ ID NO: 1636145 - DNA, 25 bp, Homo sapien
agctgttgatggcaatgtccgggac

SEQ ID NO: 1636146 - DNA, 25 bp, Homo sapien
cagctgttgatggcaatgtccggga

SEQ ID NO: 1636147 - DNA, 25 bp, Homo sapien
ctagggaggaagaccctcacctatc

SEQ ID NO: 1636148 - DNA, 25 bp, Homo sapien
gaccctcacctatcagcaagtactt

SEQ ID NO: 1636149 - DNA, 25 bp, Homo sapien
gaagaccctcacctatcagcaagta

SEQ ID NO: 1636150 - DNA, 25 bp, Homo sapien
gaggaagaccctcacctatcagcaa

SEQ ID NO: 1636151 - DNA, 25 bp, Homo sapien
gggtaaggtggcatcatcgggggtc

SEQ ID NO: 1636152 - DNA, 25 bp, Homo sapien
agggtaaggtggcatcatcgggggt

SEQ ID NO: 1636153 - DNA, 25 bp, Homo sapien
ggtaaggtggcatcatcgggggtcc

SEQ ID NO: 1636154 - DNA, 25 bp, Homo sapien
gaatttagaaagaaaggacgcaaga

SEQ ID NO: 1636155 - DNA, 25 bp, Homo sapien
gaaaggacgcaagaagggatgggac

SEQ ID NO: 1636156 - DNA, 25 bp, Homo sapien
caagaagggatgggacccctcacac

SEQ ID NO: 1636157 - DNA, 25 bp, Homo sapien
aatgtggaactgaatttagaaagaa

SEQ ID NO: 1636158 - DNA, 25 bp, Homo sapien
tggcctccgatgaagttgattgatt

SEQ ID NO: 1636159 - DNA, 25 bp, Homo sapien
gggctggcctccgatgaagttgatt

SEQ ID NO: 1636160 - DNA, 25 bp, Homo sapien
tgattgattgaagttgcagatcccc

SEQ ID NO: 1636161 - DNA, 25 bp, Homo sapien
tgattgaagttgcagatccccatcc

SEQ ID NO: 1636162 - DNA, 25 bp, Homo sapien
aagccggtgcccgtactcatagaag

SEQ ID NO: 1636163 - DNA, 25 bp, Homo sapien
cggtgcccgtactcatagaagggat

SEQ ID NO: 1636164 - DNA, 25 bp, Homo sapien
taggggaagccggtgcccgtactca

SEQ ID NO: 1636165 - DNA, 25 bp, Homo sapien
cccgtactcatagaagggatttcca

SEQ ID NO: 1636166 - DNA, 25 bp, Homo sapien
cacccatgatcctgggaaggtacaa

SEQ ID NO: 1636167 - DNA, 25 bp, Homo sapien
ccatgatcctgggaaggtacaaaca

SEQ ID NO: 1636168 - DNA, 25 bp, Homo sapien
tcagcacccatgatcctgggaaggt

SEQ ID NO: 1636169 - DNA, 25 bp, Homo sapien
ggagtcagcacccatgatcctggga

SEQ ID NO: 1636170 - DNA, 25 bp, Homo sapien
ggatcctgcccaaccacaaagttca

SEQ ID NO: 1636171 - DNA, 25 bp, Homo sapien
cgtcaaaccgcggattgaagtggaa

SEQ ID NO: 1636172 - DNA, 25 bp, Homo sapien
tgcaacgtgttgaagaccaccttgt

SEQ ID NO: 1636173 - DNA, 25 bp, Homo sapien
gccaggactatgaagaccagctcaa

SEQ ID NO: 1636174 - DNA, 25 bp, Homo sapien
cttgaaattactccccaggacaggc

SEQ ID NO: 1636175 - DNA, 25 bp, Homo sapien
tgactgttacaagtctgccacgggc

SEQ ID NO: 1636176 - DNA, 25 bp, Homo sapien
tgtgtacacccatgacgcatcatat

SEQ ID NO: 1636177 - DNA, 25 bp, Homo sapien
tgagttgctgtacccagcccacctt

SEQ ID NO: 1636178 - DNA, 25 bp, Homo sapien
ccactccttggatgtaaacagacat

SEQ ID NO: 1636179 - DNA, 25 bp, Homo sapien
aacagacattcccacgttgagcccg

SEQ ID NO: 1636180 - DNA, 25 bp, Homo sapien
gcccgcccgggatgggctggtagta

SEQ ID NO: 1636181 - DNA, 25 bp, Homo sapien
gagcccgcccgggatgggctggtag

SEQ ID NO: 1636182 - DNA, 25 bp, Homo sapien
gctggtagcccggtgcggggacata

SEQ ID NO: 1636183 - DNA, 25 bp, Homo sapien
tggtagcccggtgcggggacatagg

SEQ ID NO: 1636184 - DNA, 25 bp, Homo sapien
agcccggtgcggggacataggccat

SEQ ID NO: 1636185 - DNA, 25 bp, Homo sapien
gggctggtagcccggtgcggggaca

SEQ ID NO: 1636186 - DNA, 25 bp, Homo sapien
ggcttctcctagagcgcaccctagt

SEQ ID NO: 1636187 - DNA, 25 bp, Homo sapien
tggtggctcttatacccagggtaag

SEQ ID NO: 1636188 - DNA, 25 bp, Homo sapien
ctcgaggctgcgctagtggctggtc

SEQ ID NO: 1636189 - DNA, 25 bp, Homo sapien
ctgggactctcaggctgtcggcttc

SEQ ID NO: 1636190 - DNA, 25 bp, Homo sapien
gacctacgttgattgcgtgcccacc

SEQ ID NO: 1636191 - DNA, 25 bp, Homo sapien
tatgatcatgggtcagtgccttacc

SEQ ID NO: 1636192 - DNA, 25 bp, Homo sapien
tagattactagtgtgtggagccaga

SEQ ID NO: 1636193 - DNA, 25 bp, Homo sapien
ccagcaactgtgaagggacctacgt

SEQ ID NO: 1636194 - DNA, 25 bp, Homo sapien
ggtcagaaggcatagaaacaactgt

SEQ ID NO: 1636195 - DNA, 25 bp, Homo sapien
ccttgggcttgagaaactcattgtc

SEQ ID NO: 1636196 - DNA, 25 bp, Homo sapien
tcattgtcataaagttataaactgg

SEQ ID NO: 1636197 - DNA, 25 bp, Homo sapien
cctttctgtggatgaggcgggacaa

SEQ ID NO: 1636198 - DNA, 25 bp, Homo sapien
tcagtcgtggcctggaccgacttca

SEQ ID NO: 1636199 - DNA, 25 bp, Homo sapien
ccgacttcacgaggtcttgggtctg

SEQ ID NO: 1636200 - DNA, 25 bp, Homo sapien
cttggagaaggtgacggttttcagt

SEQ ID NO: 1636201 - DNA, 25 bp, Homo sapien
tggagaaggtgacggttttcagttc

SEQ ID NO: 1636202 - DNA, 25 bp, Homo sapien
gcaggggccaatcaggataaagcat

SEQ ID NO: 1636203 - DNA, 25 bp, Homo sapien
ctggtaccgagggtgttgagagaga

SEQ ID NO: 1636204 - DNA, 25 bp, Homo sapien
gagattagcaggggccaatcaggat

SEQ ID NO: 1636205 - DNA, 25 bp, Homo sapien
gtaccgagggtgttgagagagaacg

SEQ ID NO: 1636206 - DNA, 25 bp, Homo sapien
ggctgtgattggtcggagcgtgcac

SEQ ID NO: 1636207 - DNA, 25 bp, Homo sapien
ggctctcggccaccgaatggtcgcg

SEQ ID NO: 1636208 - DNA, 25 bp, Homo sapien
tcgcgggaatacagcaggttgacct

SEQ ID NO: 1636209 - DNA, 25 bp, Homo sapien
ccgccacggggctcttgctggaaat

SEQ ID NO: 1636210 - DNA, 25 bp, Homo sapien
accttggtgctctgcaccgccacgg

SEQ ID NO: 1636211 - DNA, 25 bp, Homo sapien
gcagcatccagcatgacctctttgt

SEQ ID NO: 1636212 - DNA, 25 bp, Homo sapien
gccagcgctaaggcagcatccagca

SEQ ID NO: 1636213 - DNA, 25 bp, Homo sapien
tcggccgccagcgctaaggcagcat

SEQ ID NO: 1636214 - DNA, 25 bp, Homo sapien
catgacctctttgtctgggaacacc

SEQ ID NO: 1636215 - DNA, 25 bp, Homo sapien
gtggccactcacagaggaaggccca

SEQ ID NO: 1636216 - DNA, 25 bp, Homo sapien
tgaagaagtggccactcacagagga

SEQ ID NO: 1636217 - DNA, 25 bp, Homo sapien
tccagcctcccgcagatgaagaagt

SEQ ID NO: 1636218 - DNA, 25 bp, Homo sapien
aaagagatcagggaccgggtgggct

SEQ ID NO: 1636219 - DNA, 25 bp, Homo sapien
agagcgaggagacaaggggacccgg

SEQ ID NO: 1636220 - DNA, 25 bp, Homo sapien
ctagagcgaggagacaaggggaccc

SEQ ID NO: 1636221 - DNA, 25 bp, Homo sapien
aggcctccaaccctccaggcctggc

SEQ ID NO: 1636222 - DNA, 25 bp, Homo sapien
agcgaggagacaaggggacccggag

SEQ ID NO: 1636223 - DNA, 25 bp, Homo sapien
ggcggtgaaggccagctcgttgacc

SEQ ID NO: 1636224 - DNA, 25 bp, Homo sapien
agccatcatcttgcgggcggtgaag

SEQ ID NO: 1636225 - DNA, 25 bp, Homo sapien
cggtgaaggccagctcgttgaccag

SEQ ID NO: 1636226 - DNA, 25 bp, Homo sapien
tcagccatcatcttgcgggcggtga

SEQ ID NO: 1636227 - DNA, 25 bp, Homo sapien
ctgcaaaggcaagcgtgcatcagga

SEQ ID NO: 1636228 - DNA, 25 bp, Homo sapien
tgcaaaggcaagcgtgcatcaggag

SEQ ID NO: 1636229 - DNA, 25 bp, Homo sapien
tctggttcccgatgaccttgggcag

SEQ ID NO: 1636230 - DNA, 25 bp, Homo sapien
caggcgctgcagtgttcctacatcg

SEQ ID NO: 1636231 - DNA, 25 bp, Homo sapien
cagtgttcctacatcggcagccaaa

SEQ ID NO: 1636232 - DNA, 25 bp, Homo sapien
ctctggttcccgatgaccttgggca

SEQ ID NO: 1636233 - DNA, 25 bp, Homo sapien
gatgtcacaggcggtgacaaggtcc

SEQ ID NO: 1636234 - DNA, 25 bp, Homo sapien
cctgggcacagtaccggatgtcaca

SEQ ID NO: 1636235 - DNA, 25 bp, Homo sapien
tgtcacaggcggtgacaaggtccac

SEQ ID NO: 1636236 - DNA, 25 bp, Homo sapien
tcacaggcggtgacaaggtccacac

SEQ ID NO: 1636237 - DNA, 25 bp, Homo sapien
agtggccgcggcatcggagcagcag

SEQ ID NO: 1636238 - DNA, 25 bp, Homo sapien
cagggatgctgaatgaccaccagaa

SEQ ID NO: 1636239 - DNA, 25 bp, Homo sapien
gatgctgaatgaccaccagaaccaa

SEQ ID NO: 1636240 - DNA, 25 bp, Homo sapien
gggatgctgaatgaccaccagaacc

SEQ ID NO: 1636241 - DNA, 25 bp, Homo sapien
cacccgagcaggaggatagccgcag

SEQ ID NO: 1636242 - DNA, 25 bp, Homo sapien
gagcaggaggatagccgcagactca

SEQ ID NO: 1636243 - DNA, 25 bp, Homo sapien
agcaggaggatagccgcagactcac

SEQ ID NO: 1636244 - DNA, 25 bp, Homo sapien
ccgagcaggaggatagccgcagact

SEQ ID NO: 1636245 - DNA, 25 bp, Homo sapien
aatgcagcccccatggacggcagca

SEQ ID NO: 1636246 - DNA, 25 bp, Homo sapien
atggacggcagcaatcacgggcttg

SEQ ID NO: 1636247 - DNA, 25 bp, Homo sapien
ccatggacggcagcaatcacgggct

SEQ ID NO: 1636248 - DNA, 25 bp, Homo sapien
ccccatggacggcagcaatcacggg

SEQ ID NO: 1636249 - DNA, 25 bp, Homo sapien
gcgcgtatggagaaagatcccctcc

SEQ ID NO: 1636250 - DNA, 25 bp, Homo sapien
ggcgcgtatggagaaagatcccctc

SEQ ID NO: 1636251 - DNA, 25 bp, Homo sapien
gggaggcgcgtatggagaaagatcc

SEQ ID NO: 1636252 - DNA, 25 bp, Homo sapien
gaggcgcgtatggagaaagatcccc

SEQ ID NO: 1636253 - DNA, 25 bp, Homo sapien
cgttgaaggtctcctggtatcgagt

SEQ ID NO: 1636254 - DNA, 25 bp, Homo sapien
gtaccagctgatccgggccacatca

SEQ ID NO: 1636255 - DNA, 25 bp, Homo sapien
gatgatgtcacggaggtaccagctg

SEQ ID NO: 1636256 - DNA, 25 bp, Homo sapien
gcaggatgtccgaagccatgtccat

SEQ ID NO: 1636257 - DNA, 25 bp, Homo sapien
gactcaaccagggatcagaacccag

SEQ ID NO: 1636258 - DNA, 25 bp, Homo sapien
aaggcatgatggagctcatccaggc

SEQ ID NO: 1636259 - DNA, 25 bp, Homo sapien
caccatgccgcatcagaagtaggat

SEQ ID NO: 1636260 - DNA, 25 bp, Homo sapien
gcaaccgtaccagctaggtcctatt

SEQ ID NO: 1636261 - DNA, 25 bp, Homo sapien
ttcagctatagctcaaaggtcacct

SEQ ID NO: 1636262 - DNA, 25 bp, Homo sapien
tgtgcagtggtacagaatcttctca

SEQ ID NO: 1636263 - DNA, 25 bp, Homo sapien
cagatcactgcctgagggctgtgca

SEQ ID NO: 1636264 - DNA, 25 bp, Homo sapien
tgatcaatacagacaacagtccctg

SEQ ID NO: 1636265 - DNA, 25 bp, Homo sapien
gataagacggccacattcagctggg

SEQ ID NO: 1636266 - DNA, 25 bp, Homo sapien
tccttctggccttcggggtcttgct

SEQ ID NO: 1636267 - DNA, 25 bp, Homo sapien
aataagataagacggccacattcag

SEQ ID NO: 1636268 - DNA, 25 bp, Homo sapien
ctgctgaaaataagataagacggcc

SEQ ID NO: 1636269 - DNA, 25 bp, Homo sapien
ggatcgctttagatcaggggttcga

SEQ ID NO: 1636270 - DNA, 25 bp, Homo sapien
aggatcgctttagatcaggggttcg

SEQ ID NO: 1636271 - DNA, 25 bp, Homo sapien
aggaacagagggagatgcagaaaga

SEQ ID NO: 1636272 - DNA, 25 bp, Homo sapien
gaggaacagagggagatgcagaaag

SEQ ID NO: 1636273 - DNA, 25 bp, Homo sapien
gcactcgaatacttgccgggcctca

SEQ ID NO: 1636274 - DNA, 25 bp, Homo sapien
cccgcactcggagtggtgggccggc

SEQ ID NO: 1636275 - DNA, 25 bp, Homo sapien
ggtgtgagctcggcgaccccgcact

SEQ ID NO: 1636276 - DNA, 25 bp, Homo sapien
aggctgcacgcagtgctctccggcc

SEQ ID NO: 1636277 - DNA, 25 bp, Homo sapien
tcagagaggacagatagtagaggcc

SEQ ID NO: 1636278 - DNA, 25 bp, Homo sapien
tggcgcggccttctcagtgttaatc

SEQ ID NO: 1636279 - DNA, 25 bp, Homo sapien
aagtttattatccaatcagccgcag

SEQ ID NO: 1636280 - DNA, 25 bp, Homo sapien
tagaggccaatcacccggtagggct

SEQ ID NO: 1636281 - DNA, 25 bp, Homo sapien
gatagaatccagagtatccacatct

SEQ ID NO: 1636282 - DNA, 25 bp, Homo sapien
taccaaaacacgaaactcaacactc

SEQ ID NO: 1636283 - DNA, 25 bp, Homo sapien
gcatgtatggtctgtaaatcagcaa

SEQ ID NO: 1636284 - DNA, 25 bp, Homo sapien
ttggaactatatgatagaatccaga

SEQ ID NO: 1636285 - DNA, 25 bp, Homo sapien
aagtgtgtaagtcagaagctgctta

SEQ ID NO: 1636286 - DNA, 25 bp, Homo sapien
cagggtgtgtgaagagcgtctggta

SEQ ID NO: 1636287 - DNA, 25 bp, Homo sapien
tgtgtaagtcagaagctgcttaaaa

SEQ ID NO: 1636288 - DNA, 25 bp, Homo sapien
gtaagtcagaagctgcttaaaaccc

SEQ ID NO: 1636289 - DNA, 25 bp, Homo sapien
gcccgacagtcagcgtctctcgaaa

SEQ ID NO: 1636290 - DNA, 25 bp, Homo sapien
cgtctctcgaaatcttgttgaagca

SEQ ID NO: 1636291 - DNA, 25 bp, Homo sapien
tcgaaatcttgttgaagcactctac

SEQ ID NO: 1636292 - DNA, 25 bp, Homo sapien
tttcctgcaccagagatcaccaccg

SEQ ID NO: 1636293 - DNA, 25 bp, Homo sapien
gaagcaacgagtgaagggttacaaa

SEQ ID NO: 1636294 - DNA, 25 bp, Homo sapien
gcaacgagtgaagggttacaaatgg

SEQ ID NO: 1636295 - DNA, 25 bp, Homo sapien
gtgaagcaacgagtgaagggttaca

SEQ ID NO: 1636296 - DNA, 25 bp, Homo sapien
agcaacgagtgaagggttacaaatg

SEQ ID NO: 1636297 - DNA, 25 bp, Homo sapien
tcccacaacgttccactttcaccca

SEQ ID NO: 1636298 - DNA, 25 bp, Homo sapien
tcttcccacaacgttccactttcac

SEQ ID NO: 1636299 - DNA, 25 bp, Homo sapien
cacaacgttccactttcacccagtc

SEQ ID NO: 1636300 - DNA, 25 bp, Homo sapien
atcttcccacaacgttccactttca

SEQ ID NO: 1636301 - DNA, 25 bp, Homo sapien
gcagaacatgtttctgcgcagacgt

SEQ ID NO: 1636302 - DNA, 25 bp, Homo sapien
ccggttgagctggacatgcagaaca

SEQ ID NO: 1636303 - DNA, 25 bp, Homo sapien
gacgtcacacgaagggactcatagc

SEQ ID NO: 1636304 - DNA, 25 bp, Homo sapien
tcctcttgttgggccggttgagctg

SEQ ID NO: 1636305 - DNA, 25 bp, Homo sapien
ttcaccgagggctactccggaagcc

SEQ ID NO: 1636306 - DNA, 25 bp, Homo sapien
gcctcctcttgtgcagaggagccag

SEQ ID NO: 1636307 - DNA, 25 bp, Homo sapien
gaaggctaatactgagtcccgggta

SEQ ID NO: 1636308 - DNA, 25 bp, Homo sapien
tcccgggtagttggagcctgtcagt

SEQ ID NO: 1636309 - DNA, 25 bp, Homo sapien
cccagactgcaagacacaggcctat

SEQ ID NO: 1636310 - DNA, 25 bp, Homo sapien
cagactgcaagacacaggcctatcg

SEQ ID NO: 1636311 - DNA, 25 bp, Homo sapien
atcgaattagggagtccttcaaaag

SEQ ID NO: 1636312 - DNA, 25 bp, Homo sapien
cacaggcctatcgaattagggagtc

SEQ ID NO: 1636313 - DNA, 25 bp, Homo sapien
ccccgtcctacatctgctataacag

SEQ ID NO: 1636314 - DNA, 25 bp, Homo sapien
tataacagcacgacagcgcgacgca

SEQ ID NO: 1636315 - DNA, 25 bp, Homo sapien
ccggatagccctccccgtcctacat

SEQ ID NO: 1636316 - DNA, 25 bp, Homo sapien
tctgctataacagcacgacagcgcg

SEQ ID NO: 1636317 - DNA, 25 bp, Homo sapien
ccccataaggcaagaggtgactcac

SEQ ID NO: 1636318 - DNA, 25 bp, Homo sapien
gtcgcggagtctgcgagaagccact

SEQ ID NO: 1636319 - DNA, 25 bp, Homo sapien
cagtaggtcgcggagtctgcgagaa

SEQ ID NO: 1636320 - DNA, 25 bp, Homo sapien
agtctgcgagaagccactatccccg

SEQ ID NO: 1636321 - DNA, 25 bp, Homo sapien
gccgggtcagtaggtcgcggagtct

SEQ ID NO: 1636322 - DNA, 25 bp, Homo sapien
actaagggcagtcgatttccggttg

SEQ ID NO: 1636323 - DNA, 25 bp, Homo sapien
ttccggttgccttacatagagccag

SEQ ID NO: 1636324 - DNA, 25 bp, Homo sapien
tgcgttcggacggagtaacgtgccc

SEQ ID NO: 1636325 - DNA, 25 bp, Homo sapien
cagaaatggaccctttgccccagtg

SEQ ID NO: 1636326 - DNA, 25 bp, Homo sapien
tcagatgggactcttcctaggcacc

SEQ ID NO: 1636327 - DNA, 25 bp, Homo sapien
aaaaaggaatacaagatcttttgca

SEQ ID NO: 1636328 - DNA, 25 bp, Homo sapien
ctgctcagatgggactcttcctagg

SEQ ID NO: 1636329 - DNA, 25 bp, Homo sapien
gaatacaagatcttttgcaaataac

SEQ ID NO: 1636330 - DNA, 25 bp, Homo sapien
cacaacttcagagtgtaagggtatg

SEQ ID NO: 1636331 - DNA, 25 bp, Homo sapien
aaacacaacttcagagtgtaagggt

SEQ ID NO: 1636332 - DNA, 25 bp, Homo sapien
acaacttcagagtgtaagggtatgg

SEQ ID NO: 1636333 - DNA, 25 bp, Homo sapien
gcagtggagaaacacaacttcagag

SEQ ID NO: 1636334 - DNA, 25 bp, Homo sapien
taacagagtggctttcctacctaag

SEQ ID NO: 1636335 - DNA, 25 bp, Homo sapien
tgtcaccaacagtgcgaagatcccg

SEQ ID NO: 1636336 - DNA, 25 bp, Homo sapien
tgagcaactcccaagctggcagagt

SEQ ID NO: 1636337 - DNA, 25 bp, Homo sapien
tctaaggagtgactgcccaacgtga

SEQ ID NO: 1636338 - DNA, 25 bp, Homo sapien
gtttttcatctggtaatggttcagg

SEQ ID NO: 1636339 - DNA, 25 bp, Homo sapien
agtctccagggcatcgctcttggat

SEQ ID NO: 1636340 - DNA, 25 bp, Homo sapien
gggcatcgctcttggattcccactc

SEQ ID NO: 1636341 - DNA, 25 bp, Homo sapien
ttcccactccagcagtccagaggag

SEQ ID NO: 1636342 - DNA, 25 bp, Homo sapien
tgcccaccaaccaccatgcaattag

SEQ ID NO: 1636343 - DNA, 25 bp, Homo sapien
gactcacccaataggaactaggcag

SEQ ID NO: 1636344 - DNA, 25 bp, Homo sapien
tagactcacccaataggaactaggc

SEQ ID NO: 1636345 - DNA, 25 bp, Homo sapien
tttagactcacccaataggaactag

SEQ ID NO: 1636346 - DNA, 25 bp, Homo sapien
atactttcacagaagatggccgctt

SEQ ID NO: 1636347 - DNA, 25 bp, Homo sapien
actttcacagaagatggccgcttca

SEQ ID NO: 1636348 - DNA, 25 bp, Homo sapien
tactttcacagaagatggccgcttc

SEQ ID NO: 1636349 - DNA, 25 bp, Homo sapien
cgtatgactgaccaggcatgatggc

SEQ ID NO: 1636350 - DNA, 25 bp, Homo sapien
tgtaactgcaagacccgtcttccaa

SEQ ID NO: 1636351 - DNA, 25 bp, Homo sapien
tctggggtggagaaccgattgttcc

SEQ ID NO: 1636352 - DNA, 25 bp, Homo sapien
gtcttccaacccgtatgactgacca

SEQ ID NO: 1636353 - DNA, 25 bp, Homo sapien
tgtggcctccagaggcttagcttgc

SEQ ID NO: 1636354 - DNA, 25 bp, Homo sapien
cagagacacgtctgggaacacacct

SEQ ID NO: 1636355 - DNA, 25 bp, Homo sapien
cctgtggtgtcagagacacgtctgg

SEQ ID NO: 1636356 - DNA, 25 bp, Homo sapien
gtgtgagtcaacacctcggcctcac

SEQ ID NO: 1636357 - DNA, 25 bp, Homo sapien
cttctgcccaaacatgaagttgttg

SEQ ID NO: 1636358 - DNA, 25 bp, Homo sapien
gcttctgcccaaacatgaagttgtt

SEQ ID NO: 1636359 - DNA, 25 bp, Homo sapien
agcttctgcccaaacatgaagttgt

SEQ ID NO: 1636360 - DNA, 25 bp, Homo sapien
tgggttacaacagagcagtgccggc

SEQ ID NO: 1636361 - DNA, 25 bp, Homo sapien
taatgggccaagtcatgagctgcac

SEQ ID NO: 1636362 - DNA, 25 bp, Homo sapien
taaaggctatgtgaacctgggcgcg

SEQ ID NO: 1636363 - DNA, 25 bp, Homo sapien
taatcgggaccactagaaaaacatg

SEQ ID NO: 1636364 - DNA, 25 bp, Homo sapien
tgagtcactcattggcgtctgcccg

SEQ ID NO: 1636365 - DNA, 25 bp, Homo sapien
gagtcactcattggcgtctgcccgc

SEQ ID NO: 1636366 - DNA, 25 bp, Homo sapien
agtcactcattggcgtctgcccgcc

SEQ ID NO: 1636367 - DNA, 25 bp, Homo sapien
ccaagccatagaccatgagcacagg

SEQ ID NO: 1636368 - DNA, 25 bp, Homo sapien
tagattgatccaagccatagaccat

SEQ ID NO: 1636369 - DNA, 25 bp, Homo sapien
agattgatccaagccatagaccatg

SEQ ID NO: 1636370 - DNA, 25 bp, Homo sapien
tgatccaagccatagaccatgagca

SEQ ID NO: 1636371 - DNA, 25 bp, Homo sapien
ggaggacgggtgagaatttgcacgg

SEQ ID NO: 1636372 - DNA, 25 bp, Homo sapien
acgggtgagaatttgcacggcgggc

SEQ ID NO: 1636373 - DNA, 25 bp, Homo sapien
gcaggggcacatgagccacgggagt

SEQ ID NO: 1636374 - DNA, 25 bp, Homo sapien
tgagaatttgcacggcgggcggcgg

SEQ ID NO: 1636375 - DNA, 25 bp, Homo sapien
cctctggcgtttgttggggttgctg

SEQ ID NO: 1636376 - DNA, 25 bp, Homo sapien
ggggctgcctctggcgtttgttggg

SEQ ID NO: 1636377 - DNA, 25 bp, Homo sapien
tttgtgatctgacctacggcgggca

SEQ ID NO: 1636378 - DNA, 25 bp, Homo sapien
ccccagagggaagcaagcaagtttg

SEQ ID NO: 1636379 - DNA, 25 bp, Homo sapien
ttatggcgggccaaaagcagctttc

SEQ ID NO: 1636380 - DNA, 25 bp, Homo sapien
taacttagcgcttaagtggcaggca

SEQ ID NO: 1636381 - DNA, 25 bp, Homo sapien
caatgtccatttgtcacaaaaaaca

SEQ ID NO: 1636382 - DNA, 25 bp, Homo sapien
acaatgtccatttgtcacaaaaaac

SEQ ID NO: 1636383 - DNA, 25 bp, Homo sapien
tacaatgtccatttgtcacaaaaaa

SEQ ID NO: 1636384 - DNA, 25 bp, Homo sapien
tggacgcttcaacagtgagttagca

SEQ ID NO: 1636385 - DNA, 25 bp, Homo sapien
gacgcttcaacagtgagttagcaca

SEQ ID NO: 1636386 - DNA, 25 bp, Homo sapien
gcttcaacagtgagttagcacagtt

SEQ ID NO: 1636387 - DNA, 25 bp, Homo sapien
cattggacgcttcaacagtgagtta

SEQ ID NO: 1636388 - DNA, 25 bp, Homo sapien
aaagatggcgtcccatcaaacatac

SEQ ID NO: 1636389 - DNA, 25 bp, Homo sapien
ctgaaagatggcgtcccatcaaaca

SEQ ID NO: 1636390 - DNA, 25 bp, Homo sapien
gaaagatggcgtcccatcaaacata

SEQ ID NO: 1636391 - DNA, 25 bp, Homo sapien
tgaaagatggcgtcccatcaaacat

SEQ ID NO: 1636392 - DNA, 25 bp, Homo sapien
cacggtacacatccgctacaatttt

SEQ ID NO: 1636393 - DNA, 25 bp, Homo sapien
cagtcataaatacaagtcacggtac

SEQ ID NO: 1636394 - DNA, 25 bp, Homo sapien
aataaaggtgtatgaagtgggtagt

SEQ ID NO: 1636395 - DNA, 25 bp, Homo sapien
ttttgattaaatcaaaaatggctca

SEQ ID NO: 1636396 - DNA, 25 bp, Homo sapien
tctggctgtgtagcgctccgtgtgc

SEQ ID NO: 1636397 - DNA, 25 bp, Homo sapien
gtggccccactacgctcgcgctttt

SEQ ID NO: 1636398 - DNA, 25 bp, Homo sapien
tctcctggtatgaggtgtgccagtg

SEQ ID NO: 1636399 - DNA, 25 bp, Homo sapien
tccgtgtgcgtgtctcctggtatga

SEQ ID NO: 1636400 - DNA, 25 bp, Homo sapien
cgcgcctggttacccggcagcaggt

SEQ ID NO: 1636401 - DNA, 25 bp, Homo sapien
cgcctggttacccggcagcaggtaa

SEQ ID NO: 1636402 - DNA, 25 bp, Homo sapien
gagcgcgcctggttacccggcagca

SEQ ID NO: 1636403 - DNA, 25 bp, Homo sapien
agcgcgcctggttacccggcagcag

SEQ ID NO: 1636404 - DNA, 25 bp, Homo sapien
caaatgatgtgaggcatgtccgccc

SEQ ID NO: 1636405 - DNA, 25 bp, Homo sapien
tgagcccaggcctattaagtgcact

SEQ ID NO: 1636406 - DNA, 25 bp, Homo sapien
gatgtagtgagctcaagtctgcggc

SEQ ID NO: 1636407 - DNA, 25 bp, Homo sapien
gtatcagaccaagacagacaccgag

SEQ ID NO: 1636408 - DNA, 25 bp, Homo sapien
ctgagattggggtttgtgtagtccc

SEQ ID NO: 1636409 - DNA, 25 bp, Homo sapien
tcttgaacacattcaagcgtgtagg

SEQ ID NO: 1636410 - DNA, 25 bp, Homo sapien
ggtttgtgtagtcccaagtatcctg

SEQ ID NO: 1636411 - DNA, 25 bp, Homo sapien
gtagtcccaagtatcctgatcattc

SEQ ID NO: 1636412 - DNA, 25 bp, Homo sapien
gacaagacttgaggtcagccatgcc

SEQ ID NO: 1636413 - DNA, 25 bp, Homo sapien
gacaaggggcagtcagtcacctccc

SEQ ID NO: 1636414 - DNA, 25 bp, Homo sapien
ggacaagacaagacttgaggtcagc

SEQ ID NO: 1636415 - DNA, 25 bp, Homo sapien
ttgaggtcagccatgccccagctca

SEQ ID NO: 1636416 - DNA, 25 bp, Homo sapien
gagtgcaacagccagaatagatatc

SEQ ID NO: 1636417 - DNA, 25 bp, Homo sapien
ctttgcgtattcgatcttcagagtg

SEQ ID NO: 1636418 - DNA, 25 bp, Homo sapien
ttgcgtattcgatcttcagagtgca

SEQ ID NO: 1636419 - DNA, 25 bp, Homo sapien
tcagccccattgagagaggccttgg

SEQ ID NO: 1636420 - DNA, 25 bp, Homo sapien
tattccaaacccgtctgcttgccag

SEQ ID NO: 1636421 - DNA, 25 bp, Homo sapien
caagcatcgcaacgctgtctaggat

SEQ ID NO: 1636422 - DNA, 25 bp, Homo sapien
gagttctctcataatctgcaccccg

SEQ ID NO: 1636423 - DNA, 25 bp, Homo sapien
gaaacatcaactcgattacagctct

SEQ ID NO: 1636424 - DNA, 25 bp, Homo sapien
tcaaagaatggccactgtcaagccc

SEQ ID NO: 1636425 - DNA, 25 bp, Homo sapien
tgcaagagtccctaccctaaggaac

SEQ ID NO: 1636426 - DNA, 25 bp, Homo sapien
ggacctcttgagactatgttcccca

SEQ ID NO: 1636427 - DNA, 25 bp, Homo sapien
tgcacgtccacacgatatgcctggt

SEQ ID NO: 1636428 - DNA, 25 bp, Homo sapien
gacagggccacaaggattacagata

SEQ ID NO: 1636429 - DNA, 25 bp, Homo sapien
ccattcttcctgaaaatgacaattc

SEQ ID NO: 1636430 - DNA, 25 bp, Homo sapien
atcgcctgaactccattcttcctga

SEQ ID NO: 1636431 - DNA, 25 bp, Homo sapien
ggccacaaggattacagatagtgta

SEQ ID NO: 1636432 - DNA, 25 bp, Homo sapien
tgaaggggcactggcagatcagtct

SEQ ID NO: 1636433 - DNA, 25 bp, Homo sapien
cactggcagatcagtctggcttggg

SEQ ID NO: 1636434 - DNA, 25 bp, Homo sapien
gggcactggcagatcagtctggctt

SEQ ID NO: 1636435 - DNA, 25 bp, Homo sapien
ggggcactggcagatcagtctggct

SEQ ID NO: 1636436 - DNA, 25 bp, Homo sapien
agtagttgacaaaagctgggtgacc

SEQ ID NO: 1636437 - DNA, 25 bp, Homo sapien
tctggctggtagagtagttgacaaa

SEQ ID NO: 1636438 - DNA, 25 bp, Homo sapien
catcttcaaactccaccagtgcttg

SEQ ID NO: 1636439 - DNA, 25 bp, Homo sapien
gagaagcacactgttcacgctccgg

SEQ ID NO: 1636440 - DNA, 25 bp, Homo sapien
ggacacccaggagtcaactttggaa

SEQ ID NO: 1636441 - DNA, 25 bp, Homo sapien
gaaatcgtggacacacaaggacacc

SEQ ID NO: 1636442 - DNA, 25 bp, Homo sapien
aatggccaacccaaaagcagagcgg

SEQ ID NO: 1636443 - DNA, 25 bp, Homo sapien
gagcggccacagaatctagaccagg

SEQ ID NO: 1636444 - DNA, 25 bp, Homo sapien
caccgtcaatcaggcccctgatgtg

SEQ ID NO: 1636445 - DNA, 25 bp, Homo sapien
caggggttttgtgcgggtcatcgta

SEQ ID NO: 1636446 - DNA, 25 bp, Homo sapien
tgatgggtccaaactcctgcaaggc

SEQ ID NO: 1636447 - DNA, 25 bp, Homo sapien
ttttgtgcgggtcatcgtagttctc

SEQ ID NO: 1636448 - DNA, 25 bp, Homo sapien
ctcctttgtaaatcgggaatcccag

SEQ ID NO: 1636449 - DNA, 25 bp, Homo sapien
gaagtatcttacacccaccgacaaa

SEQ ID NO: 1636450 - DNA, 25 bp, Homo sapien
tctatttcaggagcgatccacgcga

SEQ ID NO: 1636451 - DNA, 25 bp, Homo sapien
gaaccgactgctccttcctaagaga

SEQ ID NO: 1636452 - DNA, 25 bp, Homo sapien
aggccgggcgggaacactgcgcctg

SEQ ID NO: 1636453 - DNA, 25 bp, Homo sapien
caggcgctcccctaaccgcccacga

SEQ ID NO: 1636454 - DNA, 25 bp, Homo sapien
gcgctcccctaaccgcccacgaggc

SEQ ID NO: 1636455 - DNA, 25 bp, Homo sapien
cccacgaggccgggcgggaacactg

SEQ ID NO: 1636456 - DNA, 25 bp, Homo sapien
gttgtcagtcttgagccgcttaggg

SEQ ID NO: 1636457 - DNA, 25 bp, Homo sapien
cgttgtcagtcttgagccgcttagg

SEQ ID NO: 1636458 - DNA, 25 bp, Homo sapien
ccgcctccgtgctggtcgccggcgt

SEQ ID NO: 1636459 - DNA, 25 bp, Homo sapien
gctggtcgccggcgttgtcagtctt

SEQ ID NO: 1636460 - DNA, 25 bp, Homo sapien
gcctccgctgctcgtccggctgctg

SEQ ID NO: 1636461 - DNA, 25 bp, Homo sapien
cgcctccgctgctcgtccggctgct

SEQ ID NO: 1636462 - DNA, 25 bp, Homo sapien
gcttattggacattgcccacgccgt

SEQ ID NO: 1636463 - DNA, 25 bp, Homo sapien
taaaagcacctgataggaacggcgc

SEQ ID NO: 1636464 - DNA, 25 bp, Homo sapien
tataggtggtcgctttctgccagtc

SEQ ID NO: 1636465 - DNA, 25 bp, Homo sapien
gagggcccgcccttgtttgtctgag

SEQ ID NO: 1636466 - DNA, 25 bp, Homo sapien
cagctcggcggcgagcctgaccggc

SEQ ID NO: 1636467 - DNA, 25 bp, Homo sapien
ccatgcccggccccaagttttatat

SEQ ID NO: 1636468 - DNA, 25 bp, Homo sapien
atgcccggccccaagttttatatat

SEQ ID NO: 1636469 - DNA, 25 bp, Homo sapien
catgcccggccccaagttttatata

SEQ ID NO: 1636470 - DNA, 25 bp, Homo sapien
tgcccggccccaagttttatatata

SEQ ID NO: 1636471 - DNA, 25 bp, Homo sapien
tctttgggaaaaacgatcacaattg

SEQ ID NO: 1636472 - DNA, 25 bp, Homo sapien
tttaaattgtagttactatgaacaa

SEQ ID NO: 1636473 - DNA, 25 bp, Homo sapien
gaaaaacgatcacaattgggcacgg

SEQ ID NO: 1636474 - DNA, 25 bp, Homo sapien
aaacgatcacaattgggcacggtgg

SEQ ID NO: 1636475 - DNA, 25 bp, Homo sapien
ggaacagcctacctctgggcctttg

SEQ ID NO: 1636476 - DNA, 25 bp, Homo sapien
tcagtgaggctttctctgatacgcc

SEQ ID NO: 1636477 - DNA, 25 bp, Homo sapien
caagatgccagacgtacctgggtca

SEQ ID NO: 1636478 - DNA, 25 bp, Homo sapien
gacctatgtggtttaggagcagcaa

SEQ ID NO: 1636479 - DNA, 25 bp, Homo sapien
tacaggcatgaacggaggggtgtga

SEQ ID NO: 1636480 - DNA, 25 bp, Homo sapien
caggcatgaacggaggggtgtgaaa

SEQ ID NO: 1636481 - DNA, 25 bp, Homo sapien
ttacaggcatgaacggaggggtgtg

SEQ ID NO: 1636482 - DNA, 25 bp, Homo sapien
ggcatgaacggaggggtgtgaaacc

SEQ ID NO: 1636483 - DNA, 25 bp, Homo sapien
ctagttgtcactggtccctgtcaca

SEQ ID NO: 1636484 - DNA, 25 bp, Homo sapien
tcactggtccctgtcacagtctctt

SEQ ID NO: 1636485 - DNA, 25 bp, Homo sapien
ctcttctgcccatggctccttaaag

SEQ ID NO: 1636486 - DNA, 25 bp, Homo sapien
tctgcccatggctccttaaagggca

SEQ ID NO: 1636487 - DNA, 25 bp, Homo sapien
ctcaccctcccttctacttgcagcc

SEQ ID NO: 1636488 - DNA, 25 bp, Homo sapien
cttctacttgcagccagatgggcag

SEQ ID NO: 1636489 - DNA, 25 bp, Homo sapien
ccttctacttgcagccagatgggca

SEQ ID NO: 1636490 - DNA, 25 bp, Homo sapien
cccttctacttgcagccagatgggc

SEQ ID NO: 1636491 - DNA, 25 bp, Homo sapien
aaccacgtggtcaggtagtacccag

SEQ ID NO: 1636492 - DNA, 25 bp, Homo sapien
tctgtttcgggctggtagtgggcaa

SEQ ID NO: 1636493 - DNA, 25 bp, Homo sapien
tgggcaatgtggtgcagcgccccaa

SEQ ID NO: 1636494 - DNA, 25 bp, Homo sapien
tgggatgatcctttctgtgcagcgt

SEQ ID NO: 1636495 - DNA, 25 bp, Homo sapien
agatgagttcctcggtcagcgccgg

SEQ ID NO: 1636496 - DNA, 25 bp, Homo sapien
taagaaactctacgtccagctgcgt

SEQ ID NO: 1636497 - DNA, 25 bp, Homo sapien
cccgcagctcatctggatctaagag

SEQ ID NO: 1636498 - DNA, 25 bp, Homo sapien
caatgtccgggctccagatgagttc

SEQ ID NO: 1636499 - DNA, 25 bp, Homo sapien
tccccaggaccacgagggctggctg

SEQ ID NO: 1636500 - DNA, 25 bp, Homo sapien
tccaccttgtcgggcatgacagcgc

SEQ ID NO: 1636501 - DNA, 25 bp, Homo sapien
gatggatccccatctcaaggcgcgt

SEQ ID NO: 1636502 - DNA, 25 bp, Homo sapien
ggcgcgtagacaccttccatccgat

SEQ ID NO: 1636503 - DNA, 25 bp, Homo sapien
ttcaggaccgcatagattcctccca

SEQ ID NO: 1636504 - DNA, 25 bp, Homo sapien
agtgctaccctctcccgcctggctc

SEQ ID NO: 1636505 - DNA, 25 bp, Homo sapien
accagtgctaccctctcccgcctgg

SEQ ID NO: 1636506 - DNA, 25 bp, Homo sapien
cagaatcttcaggaccgcatagatt

SEQ ID NO: 1636507 - DNA, 25 bp, Homo sapien
caagaggagcgccaccttgcggcgc

SEQ ID NO: 1636508 - DNA, 25 bp, Homo sapien
agtcgtgtccacagggccggcttca

SEQ ID NO: 1636509 - DNA, 25 bp, Homo sapien
tgcgcaaggcgctcgtggatgcggc

SEQ ID NO: 1636510 - DNA, 25 bp, Homo sapien
aggcccgcatagacatctctgcaca

SEQ ID NO: 1636511 - DNA, 25 bp, Homo sapien
aacgcgtgggatgtgtaggaagggc

SEQ ID NO: 1636512 - DNA, 25 bp, Homo sapien
gcgatagaacgcgtgggatgtgtag

SEQ ID NO: 1636513 - DNA, 25 bp, Homo sapien
gtgggcgatagaacgcgtgggatgt

SEQ ID NO: 1636514 - DNA, 25 bp, Homo sapien
taggaagggcgtgtgggtgcagaag

SEQ ID NO: 1636515 - DNA, 25 bp, Homo sapien
gaagttgcacacttgaacccgtggg

SEQ ID NO: 1636516 - DNA, 25 bp, Homo sapien
ggacgaagttgcacacttgaacccg

SEQ ID NO: 1636517 - DNA, 25 bp, Homo sapien
cgatggagaggacgaagttgcacac

SEQ ID NO: 1636518 - DNA, 25 bp, Homo sapien
gagaggacgaagttgcacacttgaa

SEQ ID NO: 1636519 - DNA, 25 bp, Homo sapien
gccctgatgtaggagtcctttgcca

SEQ ID NO: 1636520 - DNA, 25 bp, Homo sapien
ggatcctcgtccttcttggggagcc

SEQ ID NO: 1636521 - DNA, 25 bp, Homo sapien
tgatgtaggagtcctttgccaggtg

SEQ ID NO: 1636522 - DNA, 25 bp, Homo sapien
acagccctgatgtaggagtcctttg

SEQ ID NO: 1636523 - DNA, 25 bp, Homo sapien
ccccagaatctgaggcgatgcgcac

SEQ ID NO: 1636524 - DNA, 25 bp, Homo sapien
gtcagtaaggaggtgccgcacatcc

SEQ ID NO: 1636525 - DNA, 25 bp, Homo sapien
ctggaggtcagtaaggaggtgccgc

SEQ ID NO: 1636526 - DNA, 25 bp, Homo sapien
ggtgccgcacatcctgaagcagctc

SEQ ID NO: 1636527 - DNA, 25 bp, Homo sapien
ccgaaggcttcggtactgcctggcc

SEQ ID NO: 1636528 - DNA, 25 bp, Homo sapien
gaaggcttcggtactgcctggccac

SEQ ID NO: 1636529 - DNA, 25 bp, Homo sapien
cctggccacgtagctgctccgggcc

SEQ ID NO: 1636530 - DNA, 25 bp, Homo sapien
tgcctggccacgtagctgctccggg

SEQ ID NO: 1636531 - DNA, 25 bp, Homo sapien
tgagcgggcctttcacccaggagac

SEQ ID NO: 1636532 - DNA, 25 bp, Homo sapien
gatggtccacttccgggctgagcgg

SEQ ID NO: 1636533 - DNA, 25 bp, Homo sapien
agaccccgtgaggcgcagggttcct

SEQ ID NO: 1636534 - DNA, 25 bp, Homo sapien
cagtaggctggcgagagccggccca

SEQ ID NO: 1636535 - DNA, 25 bp, Homo sapien
ctggctctgtttcttgaggggtctg

SEQ ID NO: 1636536 - DNA, 25 bp, Homo sapien
tggctctgtttcttgaggggtctgc

SEQ ID NO: 1636537 - DNA, 25 bp, Homo sapien
ctctgtttcttgaggggtctgctcc

SEQ ID NO: 1636538 - DNA, 25 bp, Homo sapien
gctctgtttcttgaggggtctgctc

SEQ ID NO: 1636539 - DNA, 25 bp, Homo sapien
agagctggttcacaatggaaagcac

SEQ ID NO: 1636540 - DNA, 25 bp, Homo sapien
caggtagagctggttcacaatggaa

SEQ ID NO: 1636541 - DNA, 25 bp, Homo sapien
ccaggtagagctggttcacaatgga

SEQ ID NO: 1636542 - DNA, 25 bp, Homo sapien
gtagagctggttcacaatggaaagc

SEQ ID NO: 1636543 - DNA, 25 bp, Homo sapien
ctgttggaccctgccgatctgcaca

SEQ ID NO: 1636544 - DNA, 25 bp, Homo sapien
tggaccctgccgatctgcacaggat

SEQ ID NO: 1636545 - DNA, 25 bp, Homo sapien
ggtgtcctgttggaccctgccgatc

SEQ ID NO: 1636546 - DNA, 25 bp, Homo sapien
tgtcctgttggaccctgccgatctg

SEQ ID NO: 1636547 - DNA, 25 bp, Homo sapien
agaaggtgtcctaggtatccaaggg

SEQ ID NO: 1636548 - DNA, 25 bp, Homo sapien
tgttaggacctaggaatacaggccc

SEQ ID NO: 1636549 - DNA, 25 bp, Homo sapien
tcaaggcgccaggagacttacttcc

SEQ ID NO: 1636550 - DNA, 25 bp, Homo sapien
gccctctttagagaaccgtgcctca

SEQ ID NO: 1636551 - DNA, 25 bp, Homo sapien
agtgggagggggcaagagcagggtt

SEQ ID NO: 1636552 - DNA, 25 bp, Homo sapien
ctagagtgggagggggcaagagcag

SEQ ID NO: 1636553 - DNA, 25 bp, Homo sapien
tagagtgggagggggcaagagcagg

SEQ ID NO: 1636554 - DNA, 25 bp, Homo sapien
gggagggggcaagagcagggttctg

SEQ ID NO: 1636555 - DNA, 25 bp, Homo sapien
ccccttagtgcctcagatgggtgac

SEQ ID NO: 1636556 - DNA, 25 bp, Homo sapien
gaagggtcccccttagtgcctcaga

SEQ ID NO: 1636557 - DNA, 25 bp, Homo sapien
tagtgcctcagatgggtgacctgta

SEQ ID NO: 1636558 - DNA, 25 bp, Homo sapien
gggtcccccttagtgcctcagatgg

SEQ ID NO: 1636559 - DNA, 25 bp, Homo sapien
aggccaggagatggggcaggtctgg

SEQ ID NO: 1636560 - DNA, 25 bp, Homo sapien
ctgctggctgatagaaaggccagga

SEQ ID NO: 1636561 - DNA, 25 bp, Homo sapien
ccaggagatggggcaggtctggcat

SEQ ID NO: 1636562 - DNA, 25 bp, Homo sapien
aaggccaggagatggggcaggtctg

SEQ ID NO: 1636563 - DNA, 25 bp, Homo sapien
gaggttggaggattccagggacaca

SEQ ID NO: 1636564 - DNA, 25 bp, Homo sapien
gcagaggttggaggattccagggac

SEQ ID NO: 1636565 - DNA, 25 bp, Homo sapien
aggttggaggattccagggacacac

SEQ ID NO: 1636566 - DNA, 25 bp, Homo sapien
cagaggttggaggattccagggaca

SEQ ID NO: 1636567 - DNA, 25 bp, Homo sapien
aaaggtcctgacctcaacaccaggg

SEQ ID NO: 1636568 - DNA, 25 bp, Homo sapien
gacttctcctggtaaaggtcctgac

SEQ ID NO: 1636569 - DNA, 25 bp, Homo sapien
tggatctggtaggtattgacttctc

SEQ ID NO: 1636570 - DNA, 25 bp, Homo sapien
tgggaatcttctggatctggtaggt

SEQ ID NO: 1636571 - DNA, 25 bp, Homo sapien
gtcgtctccaaacctattccacatt

SEQ ID NO: 1636572 - DNA, 25 bp, Homo sapien
gtggtagcccccgtttgctgtcgtc

SEQ ID NO: 1636573 - DNA, 25 bp, Homo sapien
tgttcacggcattaatatacccagc

SEQ ID NO: 1636574 - DNA, 25 bp, Homo sapien
attccttgttcacggcattaatata

SEQ ID NO: 1636575 - DNA, 25 bp, Homo sapien
gtgtcatgtttgtcactagtaacca

SEQ ID NO: 1636576 - DNA, 25 bp, Homo sapien
tggtttgcccaatttgtgtcatgtt

SEQ ID NO: 1636577 - DNA, 25 bp, Homo sapien
cactagtaaccagcagagtcctaat

SEQ ID NO: 1636578 - DNA, 25 bp, Homo sapien
tgtttgtcactagtaaccagcagag

SEQ ID NO: 1636579 - DNA, 25 bp, Homo sapien
cctctgcaggcgagtaagtggctct

SEQ ID NO: 1636580 - DNA, 25 bp, Homo sapien
tggctctagggtgctgaggacccct

SEQ ID NO: 1636581 - DNA, 25 bp, Homo sapien
tgggtatccagctctggcacatgcc

SEQ ID NO: 1636582 - DNA, 25 bp, Homo sapien
acccctagaggggtcctgtctgctt

SEQ ID NO: 1636583 - DNA, 25 bp, Homo sapien
ctgtggggacttcaggtgccttgtc

SEQ ID NO: 1636584 - DNA, 25 bp, Homo sapien
gacttcaggtgccttgtcttctggc

SEQ ID NO: 1636585 - DNA, 25 bp, Homo sapien
cttcaggtgccttgtcttctggctg

SEQ ID NO: 1636586 - DNA, 25 bp, Homo sapien
tggggacttcaggtgccttgtcttc

SEQ ID NO: 1636587 - DNA, 25 bp, Homo sapien
tgcaggaagccagtgagtcatgacc

SEQ ID NO: 1636588 - DNA, 25 bp, Homo sapien
gttgcaggaagccagtgagtcatga

SEQ ID NO: 1636589 - DNA, 25 bp, Homo sapien
gtcaggttgcaggaagccagtgagt

SEQ ID NO: 1636590 - DNA, 25 bp, Homo sapien
aagccagtgagtcatgacctggcct

SEQ ID NO: 1636591 - DNA, 25 bp, Homo sapien
caataagcaatgtcttctgcccatc

SEQ ID NO: 1636592 - DNA, 25 bp, Homo sapien
tccaataagcaatgtcttctgccca

SEQ ID NO: 1636593 - DNA, 25 bp, Homo sapien
tctccaataagcaatgtcttctgcc

SEQ ID NO: 1636594 - DNA, 25 bp, Homo sapien
tgtctccaataagcaatgtcttctg

SEQ ID NO: 1636595 - DNA, 25 bp, Homo sapien
gctgaaggcagagactcgggagccc

SEQ ID NO: 1636596 - DNA, 25 bp, Homo sapien
catgggaagtgggtcccacgtgaag

SEQ ID NO: 1636597 - DNA, 25 bp, Homo sapien
ccaccacccactttgggagctgaag

SEQ ID NO: 1636598 - DNA, 25 bp, Homo sapien
tgaaggcagagactcgggagccctc

SEQ ID NO: 1636599 - DNA, 25 bp, Homo sapien
gtgtgggttatattcagaggcccac

SEQ ID NO: 1636600 - DNA, 25 bp, Homo sapien
ctacgctgggtgtgggttatattca

SEQ ID NO: 1636601 - DNA, 25 bp, Homo sapien
tgggtgtgggttatattcagaggcc

SEQ ID NO: 1636602 - DNA, 25 bp, Homo sapien
tacgctgggtgtgggttatattcag

SEQ ID NO: 1636603 - DNA, 25 bp, Homo sapien
gatgttctgagctccccagacaaga

SEQ ID NO: 1636604 - DNA, 25 bp, Homo sapien
gtatggtttacttagccacaggccc

SEQ ID NO: 1636605 - DNA, 25 bp, Homo sapien
cagacaagaactgctggttaagagg

SEQ ID NO: 1636606 - DNA, 25 bp, Homo sapien
tgagggaggttactccttagcccag

SEQ ID NO: 1636607 - DNA, 25 bp, Homo sapien
cctggcctcgtccttggcaggtggc

SEQ ID NO: 1636608 - DNA, 25 bp, Homo sapien
tctctgttgtcctggcctcgtcctt

SEQ ID NO: 1636609 - DNA, 25 bp, Homo sapien
tggcgtgctccctccggacaaggtc

SEQ ID NO: 1636610 - DNA, 25 bp, Homo sapien
actgggcatctatgctggcgtgctc

SEQ ID NO: 1636611 - DNA, 25 bp, Homo sapien
ggcagccctggtcgcattcacccag

SEQ ID NO: 1636612 - DNA, 25 bp, Homo sapien
ccaggcagccctggtcgcattcacc

SEQ ID NO: 1636613 - DNA, 25 bp, Homo sapien
agccctggtcgcattcacccagcca

SEQ ID NO: 1636614 - DNA, 25 bp, Homo sapien
ccctggtcgcattcacccagccagg

SEQ ID NO: 1636615 - DNA, 25 bp, Homo sapien
ttcttggagtcaaagtccatgcctc

SEQ ID NO: 1636616 - DNA, 25 bp, Homo sapien
gagtcaaagtccatgcctcctccga

SEQ ID NO: 1636617 - DNA, 25 bp, Homo sapien
gaggcccataatcatccccaggaaa

SEQ ID NO: 1636618 - DNA, 25 bp, Homo sapien
taatcatccccaggaaagggtccga

SEQ ID NO: 1636619 - DNA, 25 bp, Homo sapien
caggctaagacttgggacagtgtct

SEQ ID NO: 1636620 - DNA, 25 bp, Homo sapien
agggagagctaagagcacagaccct

SEQ ID NO: 1636621 - DNA, 25 bp, Homo sapien
gttgtggcgccagtgagttcacgca

SEQ ID NO: 1636622 - DNA, 25 bp, Homo sapien
gaataggggtgatcacaaaaccgcg

SEQ ID NO: 1636623 - DNA, 25 bp, Homo sapien
gagttggaattctatcacttgctca

SEQ ID NO: 1636624 - DNA, 25 bp, Homo sapien
attctatcacttgctcaaaagggca

SEQ ID NO: 1636625 - DNA, 25 bp, Homo sapien
agaggcctggaacccgacccctctg

SEQ ID NO: 1636626 - DNA, 25 bp, Homo sapien
tggaagcccggccttcctatctggc

SEQ ID NO: 1636627 - DNA, 25 bp, Homo sapien
tctccttgttgatgagcaggcgagg

SEQ ID NO: 1636628 - DNA, 25 bp, Homo sapien
ctccttgttgatgagcaggcgaggg

SEQ ID NO: 1636629 - DNA, 25 bp, Homo sapien
cagctttctccttgttgatgagcag

SEQ ID NO: 1636630 - DNA, 25 bp, Homo sapien
tggccagctttctccttgttgatga

SEQ ID NO: 1636631 - DNA, 25 bp, Homo sapien
tgatgagggaggcaaagggctgcac

SEQ ID NO: 1636632 - DNA, 25 bp, Homo sapien
ctgatgagggaggcaaagggctgca

SEQ ID NO: 1636633 - DNA, 25 bp, Homo sapien
tgctgatgagggaggcaaagggctg

SEQ ID NO: 1636634 - DNA, 25 bp, Homo sapien
gctgatgagggaggcaaagggctgc

SEQ ID NO: 1636635 - DNA, 25 bp, Homo sapien
aggaggtacccatgaccaggaggag

SEQ ID NO: 1636636 - DNA, 25 bp, Homo sapien
caaggaggtacccatgaccaggagg

SEQ ID NO: 1636637 - DNA, 25 bp, Homo sapien
aaggaggtacccatgaccaggagga

SEQ ID NO: 1636638 - DNA, 25 bp, Homo sapien
gaggctctcaccaaaaaagacgata

SEQ ID NO: 1636639 - DNA, 25 bp, Homo sapien
aggctctcaccaaaaaagacgatat

SEQ ID NO: 1636640 - DNA, 25 bp, Homo sapien
ggaggctctcaccaaaaaagacgat

SEQ ID NO: 1636641 - DNA, 25 bp, Homo sapien
aggagaagaaacgcgctgggaggct

SEQ ID NO: 1636642 - DNA, 25 bp, Homo sapien
caggctctgacagtcttcacacttg

SEQ ID NO: 1636643 - DNA, 25 bp, Homo sapien
tctgacagtcttcacacttgggcgt

SEQ ID NO: 1636644 - DNA, 25 bp, Homo sapien
agtcttcacacttgggcgtcacctc

SEQ ID NO: 1636645 - DNA, 25 bp, Homo sapien
acacttgggcgtcacctcagagaag

SEQ ID NO: 1636646 - DNA, 25 bp, Homo sapien
gcagctggcgctgacgcagtgtgat

SEQ ID NO: 1636647 - DNA, 25 bp, Homo sapien
gctattcgctccagggtatctatgt

SEQ ID NO: 1636648 - DNA, 25 bp, Homo sapien
ctttcatccagcttagcgggtattc

SEQ ID NO: 1636649 - DNA, 25 bp, Homo sapien
gtagaaggtgccgtgcgcctccacc

SEQ ID NO: 1636650 - DNA, 25 bp, Homo sapien
gcagacctgagagggcaaacctttt

SEQ ID NO: 1636651 - DNA, 25 bp, Homo sapien
atggccctgagaggaggtcactgcc

SEQ ID NO: 1636652 - DNA, 25 bp, Homo sapien
tcatgcagcaaggaggcagtaggcc

SEQ ID NO: 1636653 - DNA, 25 bp, Homo sapien
ggaaactcgctcataaccaatgtga

SEQ ID NO: 1636654 - DNA, 25 bp, Homo sapien
tgcgtgtagcagcgcaggagtagcc

SEQ ID NO: 1636655 - DNA, 25 bp, Homo sapien
cgtgtagcagcgcaggagtagcccc

SEQ ID NO: 1636656 - DNA, 25 bp, Homo sapien
ctgcgtgtagcagcgcaggagtagc

SEQ ID NO: 1636657 - DNA, 25 bp, Homo sapien
tgtagcagcgcaggagtagcccctt

SEQ ID NO: 1636658 - DNA, 25 bp, Homo sapien
agttccttggcgagggcgaagaagg

SEQ ID NO: 1636659 - DNA, 25 bp, Homo sapien
cgagggcgaagaagggttccggatg

SEQ ID NO: 1636660 - DNA, 25 bp, Homo sapien
caggtagcgtgagggttggagccag

SEQ ID NO: 1636661 - DNA, 25 bp, Homo sapien
gatgccccaggtagcgtgagggttg

SEQ ID NO: 1636662 - DNA, 25 bp, Homo sapien
cccaggtagcgtgagggttggagcc

SEQ ID NO: 1636663 - DNA, 25 bp, Homo sapien
gccccaggtagcgtgagggttggag

SEQ ID NO: 1636664 - DNA, 25 bp, Homo sapien
tacttctctaggttgtcatagaggc

SEQ ID NO: 1636665 - DNA, 25 bp, Homo sapien
ctctaggttgtcatagaggccggtg

SEQ ID NO: 1636666 - DNA, 25 bp, Homo sapien
gaagatggtacttctctaggttgtc

SEQ ID NO: 1636667 - DNA, 25 bp, Homo sapien
gccggtggatggagagcgaaagtcg

SEQ ID NO: 1636668 - DNA, 25 bp, Homo sapien
ggagattccagctcccaccaaacag

SEQ ID NO: 1636669 - DNA, 25 bp, Homo sapien
attccagctcccaccaaacagatga

SEQ ID NO: 1636670 - DNA, 25 bp, Homo sapien
gattccagctcccaccaaacagatg

SEQ ID NO: 1636671 - DNA, 25 bp, Homo sapien
gagattccagctcccaccaaacaga

SEQ ID NO: 1636672 - DNA, 25 bp, Homo sapien
ccccttccaaggtcagctcgtccag

SEQ ID NO: 1636673 - DNA, 25 bp, Homo sapien
ggagaataagttccgcaggaagtcc

SEQ ID NO: 1636674 - DNA, 25 bp, Homo sapien
ctgagcgtctgggagaataagttcc

SEQ ID NO: 1636675 - DNA, 25 bp, Homo sapien
ggccaccccttccaaggtcagctcg

SEQ ID NO: 1636676 - DNA, 25 bp, Homo sapien
gggcatggatgtctccggcaccctg

SEQ ID NO: 1636677 - DNA, 25 bp, Homo sapien
cactgctacatactttggatgtcac

SEQ ID NO: 1636678 - DNA, 25 bp, Homo sapien
acatctaaaggcacaaggcccggcc

SEQ ID NO: 1636679 - DNA, 25 bp, Homo sapien
ggagttgaggaggtatcacccacac

SEQ ID NO: 1636680 - DNA, 25 bp, Homo sapien
agcggctcctccctcagagtctgaa

SEQ ID NO: 1636681 - DNA, 25 bp, Homo sapien
ctccctcagagtctgaatctgagtc

SEQ ID NO: 1636682 - DNA, 25 bp, Homo sapien
ttctccaccagcggctcctccctca

SEQ ID NO: 1636683 - DNA, 25 bp, Homo sapien
tcctccctcagagtctgaatctgag

SEQ ID NO: 1636684 - DNA, 25 bp, Homo sapien
caggcccgagaggtgggattaggga

SEQ ID NO: 1636685 - DNA, 25 bp, Homo sapien
ccaggcccgagaggtgggattaggg

SEQ ID NO: 1636686 - DNA, 25 bp, Homo sapien
gccaggcccgagaggtgggattagg

SEQ ID NO: 1636687 - DNA, 25 bp, Homo sapien
ggccaggcccgagaggtgggattag

SEQ ID NO: 1636688 - DNA, 25 bp, Homo sapien
ccggggttggagtcctggccatgcc

SEQ ID NO: 1636689 - DNA, 25 bp, Homo sapien
cctcatgtgagtggctttgctttgc

SEQ ID NO: 1636690 - DNA, 25 bp, Homo sapien
gcaagacctcatgtgagtggctttg

SEQ ID NO: 1636691 - DNA, 25 bp, Homo sapien
caggctgccggggttggagtcctgg

SEQ ID NO: 1636692 - DNA, 25 bp, Homo sapien
ctcatccatgccaatgacctctgcc

SEQ ID NO: 1636693 - DNA, 25 bp, Homo sapien
cagacatctatggaattgccaggat

SEQ ID NO: 1636694 - DNA, 25 bp, Homo sapien
tgggccctgcaatggatttcaccaa

SEQ ID NO: 1636695 - DNA, 25 bp, Homo sapien
cagggactttgtctgggtgcccagc

SEQ ID NO: 1636696 - DNA, 25 bp, Homo sapien
ggatactcactgctctgcgtccaag

SEQ ID NO: 1636697 - DNA, 25 bp, Homo sapien
gtctttgcacaagcgatacctgttg

SEQ ID NO: 1636698 - DNA, 25 bp, Homo sapien
acagtgggcccagctttagtaagcc

SEQ ID NO: 1636699 - DNA, 25 bp, Homo sapien
tgagttgccacagcctaacaggagg

SEQ ID NO: 1636700 - DNA, 25 bp, Homo sapien
catttgtgaggtattctgatgcccg

SEQ ID NO: 1636701 - DNA, 25 bp, Homo sapien
gagttactttcgtcatcacgctgtg

SEQ ID NO: 1636702 - DNA, 25 bp, Homo sapien
gatctgtgcgttccaagaccaaatg

SEQ ID NO: 1636703 - DNA, 25 bp, Homo sapien
ccagtcccaggacaaatgtggttca

SEQ ID NO: 1636704 - DNA, 25 bp, Homo sapien
gaccaaatgggatacctgtctcttc

SEQ ID NO: 1636705 - DNA, 25 bp, Homo sapien
tgcctgggtctccagagggtgagag

SEQ ID NO: 1636706 - DNA, 25 bp, Homo sapien
ccctgcctgggtctccagagggtga

SEQ ID NO: 1636707 - DNA, 25 bp, Homo sapien
tgagcctcctgcaccttccctgcct

SEQ ID NO: 1636708 - DNA, 25 bp, Homo sapien
gcctgggtctccagagggtgagagg

SEQ ID NO: 1636709 - DNA, 25 bp, Homo sapien
taaaggggttcaaatggtcagtgag

SEQ ID NO: 1636710 - DNA, 25 bp, Homo sapien
gcaagaacacccaccaacctagtta

SEQ ID NO: 1636711 - DNA, 25 bp, Homo sapien
gccattgtttctggccctgacttac

SEQ ID NO: 1636712 - DNA, 25 bp, Homo sapien
aaagatcttatctacatgcaaagtg

SEQ ID NO: 1636713 - DNA, 25 bp, Homo sapien
gagaaagggtctcgctcatgtcacc

SEQ ID NO: 1636714 - DNA, 25 bp, Homo sapien
caggttggagtgcaatagtgcgatc

SEQ ID NO: 1636715 - DNA, 25 bp, Homo sapien
ttagagaaagggtctcgctcatgtc

SEQ ID NO: 1636716 - DNA, 25 bp, Homo sapien
gttggagtgcaatagtgcgatcata

SEQ ID NO: 1636717 - DNA, 25 bp, Homo sapien
gagaaacacgcgatcattggcaact

SEQ ID NO: 1636718 - DNA, 25 bp, Homo sapien
tgcagcgagggaccttagcaaccaa

SEQ ID NO: 1636719 - DNA, 25 bp, Homo sapien
caatcaggtacccatagcaagcggg

SEQ ID NO: 1636720 - DNA, 25 bp, Homo sapien
gtaaacgaaccctgaacacactgcg

SEQ ID NO: 1636721 - DNA, 25 bp, Homo sapien
gcccttgaggctgtcaccgaccgct

SEQ ID NO: 1636722 - DNA, 25 bp, Homo sapien
ttgaggctgtcaccgaccgctctgt

SEQ ID NO: 1636723 - DNA, 25 bp, Homo sapien
ccttgaggctgtcaccgaccgctct

SEQ ID NO: 1636724 - DNA, 25 bp, Homo sapien
aagcccttgaggctgtcaccgaccg

SEQ ID NO: 1636725 - DNA, 25 bp, Homo sapien
accgactgctctgtcctgtcaccga

SEQ ID NO: 1636726 - DNA, 25 bp, Homo sapien
tctgtcccgtgacggcaccagaaat

SEQ ID NO: 1636727 - DNA, 25 bp, Homo sapien
tacaactctcagcagacattgcggc

SEQ ID NO: 1636728 - DNA, 25 bp, Homo sapien
tgatagggcacagaactacaactct

SEQ ID NO: 1636729 - DNA, 25 bp, Homo sapien
caggaggcactgaatattgatctca

SEQ ID NO: 1636730 - DNA, 25 bp, Homo sapien
tgcccagtgatgcaagcagggcctg

SEQ ID NO: 1636731 - DNA, 25 bp, Homo sapien
taaacagattgataagaccacaagg

SEQ ID NO: 1636732 - DNA, 25 bp, Homo sapien
caggctccgtttaggtgctagtgat

SEQ ID NO: 1636733 - DNA, 25 bp, Homo sapien
gtgtggttccaaggcacgtccgcct

SEQ ID NO: 1636734 - DNA, 25 bp, Homo sapien
aggtggaggcttcggggtcaacagt

SEQ ID NO: 1636735 - DNA, 25 bp, Homo sapien
cttgggtgtggttccaaggcacgtc

SEQ ID NO: 1636736 - DNA, 25 bp, Homo sapien
tcagactcacctccttgggtgtggt

SEQ ID NO: 1636737 - DNA, 25 bp, Homo sapien
ggagggactgaggtaggggtcagcc

SEQ ID NO: 1636738 - DNA, 25 bp, Homo sapien
ctccctcctgagctgctcccccagc

SEQ ID NO: 1636739 - DNA, 25 bp, Homo sapien
ctaagccacagggtgtgtcaggagg

SEQ ID NO: 1636740 - DNA, 25 bp, Homo sapien
actgaggtaggggtcagccctccct

SEQ ID NO: 1636741 - DNA, 25 bp, Homo sapien
cttcagttcgtctctcaagtgctcc

SEQ ID NO: 1636742 - DNA, 25 bp, Homo sapien
cttcttcagttcgtctctcaagtgc

SEQ ID NO: 1636743 - DNA, 25 bp, Homo sapien
tcttcagttcgtctctcaagtgctc

SEQ ID NO: 1636744 - DNA, 25 bp, Homo sapien
ttcagttcgtctctcaagtgctcca

SEQ ID NO: 1636745 - DNA, 25 bp, Homo sapien
tgtcggttctcatagtggcatccag

SEQ ID NO: 1636746 - DNA, 25 bp, Homo sapien
tgattgccataaccccggaagagtg

SEQ ID NO: 1636747 - DNA, 25 bp, Homo sapien
tggcatccagcagcggtcgttctga

SEQ ID NO: 1636748 - DNA, 25 bp, Homo sapien
tcgttctgatcgtcgtggaccgcga

SEQ ID NO: 1636749 - DNA, 25 bp, Homo sapien
tgccgctgccacaggtcctcaaagg

SEQ ID NO: 1636750 - DNA, 25 bp, Homo sapien
ccttgcatgcggatggcttgttcct

SEQ ID NO: 1636751 - DNA, 25 bp, Homo sapien
gtggggcaagtcctcgcgcctctct

SEQ ID NO: 1636752 - DNA, 25 bp, Homo sapien
tgccacccgcttctggaggtcccct

SEQ ID NO: 1636753 - DNA, 25 bp, Homo sapien
cagacttgtgggtcctctctgctac

SEQ ID NO: 1636754 - DNA, 25 bp, Homo sapien
tcagacttgtgggtcctctctgcta

SEQ ID NO: 1636755 - DNA, 25 bp, Homo sapien
ctcagacttgtgggtcctctctgct

SEQ ID NO: 1636756 - DNA, 25 bp, Homo sapien
cctgcttcttgaaatccccaagcag

SEQ ID NO: 1636757 - DNA, 25 bp, Homo sapien
ctcggtggacgcacagccgtggggc

SEQ ID NO: 1636758 - DNA, 25 bp, Homo sapien
tgcttcttgaaatccccaagcagca

SEQ ID NO: 1636759 - DNA, 25 bp, Homo sapien
cttcttgaaatccccaagcagcagg

SEQ ID NO: 1636760 - DNA, 25 bp, Homo sapien
tgtgaccacctctgccagacagcgg

SEQ ID NO: 1636761 - DNA, 25 bp, Homo sapien
tggcccacggtcagcacctctgtga

SEQ ID NO: 1636762 - DNA, 25 bp, Homo sapien
gagcagtgcagggtcctctctggac

SEQ ID NO: 1636763 - DNA, 25 bp, Homo sapien
ctggacctggcccacggtcagcacc

SEQ ID NO: 1636764 - DNA, 25 bp, Homo sapien
cctccttggagggtctcggtgccaa

SEQ ID NO: 1636765 - DNA, 25 bp, Homo sapien
ggtctcggtgccaagggagcagcgg

SEQ ID NO: 1636766 - DNA, 25 bp, Homo sapien
ctcagaggctggccctcggggcggc

SEQ ID NO: 1636767 - DNA, 25 bp, Homo sapien
cagaggctggccctcggggcggcat

SEQ ID NO: 1636768 - DNA, 25 bp, Homo sapien
cagcagctcagaggctggccctcgg

SEQ ID NO: 1636769 - DNA, 25 bp, Homo sapien
agcagcagctcagaggctggccctc

SEQ ID NO: 1636770 - DNA, 25 bp, Homo sapien
tgaccatttattggggactttttgc

SEQ ID NO: 1636771 - DNA, 25 bp, Homo sapien
ctgaccatttattggggactttttg

SEQ ID NO: 1636772 - DNA, 25 bp, Homo sapien
aaccgtaaagcccagacgtcctgct

SEQ ID NO: 1636773 - DNA, 25 bp, Homo sapien
ggaccctcaatgataacagggtcag

SEQ ID NO: 1636774 - DNA, 25 bp, Homo sapien
ccactgggaccctcaatgataacag

SEQ ID NO: 1636775 - DNA, 25 bp, Homo sapien
ctcaatgataacagggtcagtgact

SEQ ID NO: 1636776 - DNA, 25 bp, Homo sapien
tcagcaacacaggtcccaggtgtcc

SEQ ID NO: 1636777 - DNA, 25 bp, Homo sapien
agcagtgacacccccgagggctgct

SEQ ID NO: 1636778 - DNA, 25 bp, Homo sapien
acacagatgtcaggacgggctcagc

SEQ ID NO: 1636779 - DNA, 25 bp, Homo sapien
caggtgtccggggtctcctgaactc

SEQ ID NO: 1636780 - DNA, 25 bp, Homo sapien
gggccgatgtactggagaggcacgt

SEQ ID NO: 1636781 - DNA, 25 bp, Homo sapien
gatgtactggagaggcacgtgggta

SEQ ID NO: 1636782 - DNA, 25 bp, Homo sapien
tgatccgatcagtgccgaggtagga

SEQ ID NO: 1636783 - DNA, 25 bp, Homo sapien
taggggctgtgatccgatcagtgcc

SEQ ID NO: 1636784 - DNA, 25 bp, Homo sapien
cagggggcacgagcactgagccgtc

SEQ ID NO: 1636785 - DNA, 25 bp, Homo sapien
ggcagggggcacgagcactgagccg

SEQ ID NO: 1636786 - DNA, 25 bp, Homo sapien
gcagggggcacgagcactgagccgt

SEQ ID NO: 1636787 - DNA, 25 bp, Homo sapien
tgagctgcctctctgggtgggcccc

SEQ ID NO: 1636788 - DNA, 25 bp, Homo sapien
cagagcagacctcaggacactgcag

SEQ ID NO: 1636789 - DNA, 25 bp, Homo sapien
agcagacctcaggacactgcagatg

SEQ ID NO: 1636790 - DNA, 25 bp, Homo sapien
gagctgcctctctgggtgggcccct

SEQ ID NO: 1636791 - DNA, 25 bp, Homo sapien
ttctgctggttactctccaggagcg

SEQ ID NO: 1636792 - DNA, 25 bp, Homo sapien
tactctccaggagcgcgatgagaag

SEQ ID NO: 1636793 - DNA, 25 bp, Homo sapien
tggttactctccaggagcgcgatga

SEQ ID NO: 1636794 - DNA, 25 bp, Homo sapien
ggacagcacaggcggtggcgttcac

SEQ ID NO: 1636795 - DNA, 25 bp, Homo sapien
cgagggcacgcgggcaggaggctgt

SEQ ID NO: 1636796 - DNA, 25 bp, Homo sapien
tgtgagacagccatgctcggaactg

SEQ ID NO: 1636797 - DNA, 25 bp, Homo sapien
tggcgcccaccccaagctgagcccg

SEQ ID NO: 1636798 - DNA, 25 bp, Homo sapien
gacagccatgctcggaactggcgcc

SEQ ID NO: 1636799 - DNA, 25 bp, Homo sapien
cagcctcggtctggaacatgatgtg

SEQ ID NO: 1636800 - DNA, 25 bp, Homo sapien
ggtctggaacatgatgtggaggcgg

SEQ ID NO: 1636801 - DNA, 25 bp, Homo sapien
cctcggtctggaacatgatgtggag

SEQ ID NO: 1636802 - DNA, 25 bp, Homo sapien
cggtctggaacatgatgtggaggcg

SEQ ID NO: 1636803 - DNA, 25 bp, Homo sapien
cccagttcttgggtgggcatatcca

SEQ ID NO: 1636804 - DNA, 25 bp, Homo sapien
gcccagttcttgggtgggcatatcc

SEQ ID NO: 1636805 - DNA, 25 bp, Homo sapien
ggcccagttcttgggtgggcatatc

SEQ ID NO: 1636806 - DNA, 25 bp, Homo sapien
aaatggaaacgatggaagagaaggc

SEQ ID NO: 1636807 - DNA, 25 bp, Homo sapien
aaaaaaggagacgatagtgccaaag

SEQ ID NO: 1636808 - DNA, 25 bp, Homo sapien
acgtggcagggtccaccggctcttc

SEQ ID NO: 1636809 - DNA, 25 bp, Homo sapien
tttgcaccttctaggcaccctcggt

SEQ ID NO: 1636810 - DNA, 25 bp, Homo sapien
ctggatccctggcccctctccacac

SEQ ID NO: 1636811 - DNA, 25 bp, Homo sapien
ccctgccatccctggatccctggcc

SEQ ID NO: 1636812 - DNA, 25 bp, Homo sapien
cctggatccctggcccctctccaca

SEQ ID NO: 1636813 - DNA, 25 bp, Homo sapien
tgccatccctggatccctggcccct

SEQ ID NO: 1636814 - DNA, 25 bp, Homo sapien
gatctccatctgaagggacaggaac

SEQ ID NO: 1636815 - DNA, 25 bp, Homo sapien
ggcctgtcaccccaaacatctccac

SEQ ID NO: 1636816 - DNA, 25 bp, Homo sapien
tcaagatctccatctgaagggacag

SEQ ID NO: 1636817 - DNA, 25 bp, Homo sapien
aagatctccatctgaagggacagga

SEQ ID NO: 1636818 - DNA, 25 bp, Homo sapien
tctgagctcttggggtggcccccca

SEQ ID NO: 1636819 - DNA, 25 bp, Homo sapien
ggcacaggagtcaggaggctctgag

SEQ ID NO: 1636820 - DNA, 25 bp, Homo sapien
agagggcacaggagtcaggaggctc

SEQ ID NO: 1636821 - DNA, 25 bp, Homo sapien
caggagtcaggaggctctgagctct

SEQ ID NO: 1636822 - DNA, 25 bp, Homo sapien
tgtctctgcccggtagcaggtgctg

SEQ ID NO: 1636823 - DNA, 25 bp, Homo sapien
tgtcccgtgtttgtctctgcccggt

SEQ ID NO: 1636824 - DNA, 25 bp, Homo sapien
ggttcctgtcccgtgtttgtctctg

SEQ ID NO: 1636825 - DNA, 25 bp, Homo sapien
gtgtttgtctctgcccggtagcagg

SEQ ID NO: 1636826 - DNA, 25 bp, Homo sapien
agcagggaaagtcgggtcaaggagg

SEQ ID NO: 1636827 - DNA, 25 bp, Homo sapien
tcacaggtggggtcaaggtctaagg

SEQ ID NO: 1636828 - DNA, 25 bp, Homo sapien
tcgggtcaaggagggaagactgatt

SEQ ID NO: 1636829 - DNA, 25 bp, Homo sapien
agagagcagggaaagtcgggtcaag

SEQ ID NO: 1636830 - DNA, 25 bp, Homo sapien
aaggccacggtgtggtccatgaagt

SEQ ID NO: 1636831 - DNA, 25 bp, Homo sapien
gtccctgaaggccacggtgtggtcc

SEQ ID NO: 1636832 - DNA, 25 bp, Homo sapien
tgaaggccacggtgtggtccatgaa

SEQ ID NO: 1636833 - DNA, 25 bp, Homo sapien
ccctgaaggccacggtgtggtccat

SEQ ID NO: 1636834 - DNA, 25 bp, Homo sapien
ccacctccgctgttccagccaggtt

SEQ ID NO: 1636835 - DNA, 25 bp, Homo sapien
caggttgagatctttgaagcgggca

SEQ ID NO: 1636836 - DNA, 25 bp, Homo sapien
gaagcgggcagggtcgatgttgtaa

SEQ ID NO: 1636837 - DNA, 25 bp, Homo sapien
cagggtcgatgttgtaaatttggga

SEQ ID NO: 1636838 - DNA, 25 bp, Homo sapien
aaacactgctccgcggagaaggtct

SEQ ID NO: 1636839 - DNA, 25 bp, Homo sapien
ctgctccgcggagaaggtctggcac

SEQ ID NO: 1636840 - DNA, 25 bp, Homo sapien
ctggcaccgtcatgggggtgaagcc

SEQ ID NO: 1636841 - DNA, 25 bp, Homo sapien
cgcggagaaggtctggcaccgtcat

SEQ ID NO: 1636842 - DNA, 25 bp, Homo sapien
cggagaagcttgttgaatgtgaagt

SEQ ID NO: 1636843 - DNA, 25 bp, Homo sapien
gtggccagacacgtgggacaggcgc

SEQ ID NO: 1636844 - DNA, 25 bp, Homo sapien
ccccgcgcaggtaataggaccggtg

SEQ ID NO: 1636845 - DNA, 25 bp, Homo sapien
tgttgaatgtgaagttgaccaggcc

SEQ ID NO: 1636846 - DNA, 25 bp, Homo sapien
caggctggcagggaatgtggggatg

SEQ ID NO: 1636847 - DNA, 25 bp, Homo sapien
gacagacagacaggcgggtgcacat

SEQ ID NO: 1636848 - DNA, 25 bp, Homo sapien
cagggaatgtggggatgaaaacacc

SEQ ID NO: 1636849 - DNA, 25 bp, Homo sapien
caggcgggtgcacatgggccaggct

SEQ ID NO: 1636850 - DNA, 25 bp, Homo sapien
gagtttctcgccaatttccaggtgg

SEQ ID NO: 1636851 - DNA, 25 bp, Homo sapien
tcgccaatttccaggtggccccgag

SEQ ID NO: 1636852 - DNA, 25 bp, Homo sapien
ttctgacggatgatgtcgagtttct

SEQ ID NO: 1636853 - DNA, 25 bp, Homo sapien
cggatgatgtcgagtttctcgccaa

SEQ ID NO: 1636854 - DNA, 25 bp, Homo sapien
gaccatgtggagcactcgagcctgg

SEQ ID NO: 1636855 - DNA, 25 bp, Homo sapien
gtggagcactcgagcctggctctca

SEQ ID NO: 1636856 - DNA, 25 bp, Homo sapien
tggcttgtctccgaccatgtggagc

SEQ ID NO: 1636857 - DNA, 25 bp, Homo sapien
tctccgaccatgtggagcactcgag

SEQ ID NO: 1636858 - DNA, 25 bp, Homo sapien
ggtagaactgctcctcaagctgggc

SEQ ID NO: 1636859 - DNA, 25 bp, Homo sapien
cttcagcgcctgcaggtagaactgc

SEQ ID NO: 1636860 - DNA, 25 bp, Homo sapien
cgcctgcaggtagaactgctcctca

SEQ ID NO: 1636861 - DNA, 25 bp, Homo sapien
tggttgggcagcttcagcgcctgca

SEQ ID NO: 1636862 - DNA, 25 bp, Homo sapien
gatctcccggccacgtgcccgcaga

SEQ ID NO: 1636863 - DNA, 25 bp, Homo sapien
gtgaacaagctccttccggatctcc

SEQ ID NO: 1636864 - DNA, 25 bp, Homo sapien
tccttccggatctcccggccacgtg

SEQ ID NO: 1636865 - DNA, 25 bp, Homo sapien
cacgtgcccgcagaccctggtactt

SEQ ID NO: 1636866 - DNA, 25 bp, Homo sapien
tggaactatcaggaaagcgtgcttg

SEQ ID NO: 1636867 - DNA, 25 bp, Homo sapien
tgaactcatgagaatcagccccagg

SEQ ID NO: 1636868 - DNA, 25 bp, Homo sapien
tagaacgttctattgccttggccac

SEQ ID NO: 1636869 - DNA, 25 bp, Homo sapien
caatgactggctcagagacaggcac

SEQ ID NO: 1636870 - DNA, 25 bp, Homo sapien
gcacttcaccactgtcctggtttgc

SEQ ID NO: 1636871 - DNA, 25 bp, Homo sapien
gctgcacttcaccactgtcctggtt

SEQ ID NO: 1636872 - DNA, 25 bp, Homo sapien
ctgctgcacttcaccactgtcctgg

SEQ ID NO: 1636873 - DNA, 25 bp, Homo sapien
tgcacttcaccactgtcctggtttg

SEQ ID NO: 1636874 - DNA, 25 bp, Homo sapien
tcttcctccaggctccggatctgct

SEQ ID NO: 1636875 - DNA, 25 bp, Homo sapien
agcagggcccgcactgcctcagtca

SEQ ID NO: 1636876 - DNA, 25 bp, Homo sapien
ttcctccaggctccggatctgctcc

SEQ ID NO: 1636877 - DNA, 25 bp, Homo sapien
gcccgcactgcctcagtcacagctg

SEQ ID NO: 1636878 - DNA, 25 bp, Homo sapien
tggggtggatataagagaaaaggag

SEQ ID NO: 1636879 - DNA, 25 bp, Homo sapien
ggatataagagaaaaggagatgaag

SEQ ID NO: 1636880 - DNA, 25 bp, Homo sapien
ggtggatataagagaaaaggagatg

SEQ ID NO: 1636881 - DNA, 25 bp, Homo sapien
ctggggtggatataagagaaaagga

SEQ ID NO: 1636882 - DNA, 25 bp, Homo sapien
agccctgaccccgtccgattcacac

SEQ ID NO: 1636883 - DNA, 25 bp, Homo sapien
ctctctctctaaacgcaagagctcc

SEQ ID NO: 1636884 - DNA, 25 bp, Homo sapien
tgaccccgtccgattcacacttggc

SEQ ID NO: 1636885 - DNA, 25 bp, Homo sapien
tctaaacgcaagagctccaccacac

SEQ ID NO: 1636886 - DNA, 25 bp, Homo sapien
gcgcatactcgtacaggaggttccg

SEQ ID NO: 1636887 - DNA, 25 bp, Homo sapien
cctcttctgggcatgcgcagaaccg

SEQ ID NO: 1636888 - DNA, 25 bp, Homo sapien
gaaccgctctatgtccagctgaggg

SEQ ID NO: 1636889 - DNA, 25 bp, Homo sapien
gactatcgttggagatgcagcctcc

SEQ ID NO: 1636890 - DNA, 25 bp, Homo sapien
tgaccgtgacgagccaatcagatcc

SEQ ID NO: 1636891 - DNA, 25 bp, Homo sapien
cagatcctgaggaaagttgaccgcg

SEQ ID NO: 1636892 - DNA, 25 bp, Homo sapien
aattgcaaggcagcgaacctgaccg

SEQ ID NO: 1636893 - DNA, 25 bp, Homo sapien
cactccgcgtttagaccaattgcaa

SEQ ID NO: 1636894 - DNA, 25 bp, Homo sapien
actattaagccataggagtcctggg

SEQ ID NO: 1636895 - DNA, 25 bp, Homo sapien
caagctcaccgttgtgcgtggcaag

SEQ ID NO: 1636896 - DNA, 25 bp, Homo sapien
tctgctgggacaagacactgtactg

SEQ ID NO: 1636897 - DNA, 25 bp, Homo sapien
cagaccctggcgcttgtgatgtaaa

SEQ ID NO: 1636898 - DNA, 25 bp, Homo sapien
tattgagctagtttgttggccatgc

SEQ ID NO: 1636899 - DNA, 25 bp, Homo sapien
ttgagctagtttgttggccatgcct

SEQ ID NO: 1636900 - DNA, 25 bp, Homo sapien
ttattgagctagtttgttggccatg

SEQ ID NO: 1636901 - DNA, 25 bp, Homo sapien
gagctagtttgttggccatgcctag

SEQ ID NO: 1636902 - DNA, 25 bp, Homo sapien
gaagtgttaccttgcaggaagttgc

SEQ ID NO: 1636903 - DNA, 25 bp, Homo sapien
tagcctgacctgaacaggagatgct

SEQ ID NO: 1636904 - DNA, 25 bp, Homo sapien
tgatgagagaggtgctagcctgacc

SEQ ID NO: 1636905 - DNA, 25 bp, Homo sapien
gcacagagatggctggttacacagc

SEQ ID NO: 1636906 - DNA, 25 bp, Homo sapien
ccaaaataaacggatgggctctggc

SEQ ID NO: 1636907 - DNA, 25 bp, Homo sapien
gatgtgccaaaataaacggatgggc

SEQ ID NO: 1636908 - DNA, 25 bp, Homo sapien
tgccaaaataaacggatgggctctg

SEQ ID NO: 1636909 - DNA, 25 bp, Homo sapien
gggatgtgccaaaataaacggatgg

SEQ ID NO: 1636910 - DNA, 25 bp, Homo sapien
gttcacgtgtgcctgggatacttta

SEQ ID NO: 1636911 - DNA, 25 bp, Homo sapien
attaagttcacgtgtgcctgggata

SEQ ID NO: 1636912 - DNA, 25 bp, Homo sapien
taagttcacgtgtgcctgggatact

SEQ ID NO: 1636913 - DNA, 25 bp, Homo sapien
ttcacgtgtgcctgggatactttaa

SEQ ID NO: 1636914 - DNA, 25 bp, Homo sapien
catccccataggtgaccaattaata

SEQ ID NO: 1636915 - DNA, 25 bp, Homo sapien
taggaactcttgctgtatttcttac

SEQ ID NO: 1636916 - DNA, 25 bp, Homo sapien
agatgagctgatcacagtgtggcca

SEQ ID NO: 1636917 - DNA, 25 bp, Homo sapien
ttttgttcagatgagctgatcacag

SEQ ID NO: 1636918 - DNA, 25 bp, Homo sapien
ttaccgagggcttgtgagaccagga

SEQ ID NO: 1636919 - DNA, 25 bp, Homo sapien
aaatcggctgttgagtcagtcctgg

SEQ ID NO: 1636920 - DNA, 25 bp, Homo sapien
ggacttgcttttcgattagccgcag

SEQ ID NO: 1636921 - DNA, 25 bp, Homo sapien
ctgcaaaaggtgacgcctggaagag

SEQ ID NO: 1636922 - DNA, 25 bp, Homo sapien
aaacatgccggcaagtctctgctcc

SEQ ID NO: 1636923 - DNA, 25 bp, Homo sapien
tgttagtctcaaggacagactgcct

SEQ ID NO: 1636924 - DNA, 25 bp, Homo sapien
caccgagatccttgcaggagaagaa

SEQ ID NO: 1636925 - DNA, 25 bp, Homo sapien
tctgctccctgcgtcggcagaggga

SEQ ID NO: 1636926 - DNA, 25 bp, Homo sapien
tggtcttgactgacaacgtcaggca

SEQ ID NO: 1636927 - DNA, 25 bp, Homo sapien
attcatggaaggtgtgctgagaacc

SEQ ID NO: 1636928 - DNA, 25 bp, Homo sapien
acaacgtcaggcagtagtccagtcg

SEQ ID NO: 1636929 - DNA, 25 bp, Homo sapien
ctgggagccctactgtccctgggta

SEQ ID NO: 1636930 - DNA, 25 bp, Homo sapien
agggcgccatagtgccccacccagg

SEQ ID NO: 1636931 - DNA, 25 bp, Homo sapien
ctaggacagacggatcctgaccctc

SEQ ID NO: 1636932 - DNA, 25 bp, Homo sapien
ggacagacggatcctgaccctcaca

SEQ ID NO: 1636933 - DNA, 25 bp, Homo sapien
gagtgggtcacaagggcgccatagt

SEQ ID NO: 1636934 - DNA, 25 bp, Homo sapien
tactgctcaaaagatacgtagcgga

SEQ ID NO: 1636935 - DNA, 25 bp, Homo sapien
caaagttggtgaagacgtgggagac

SEQ ID NO: 1636936 - DNA, 25 bp, Homo sapien
gtctctcccgtactgctcaaaagat

SEQ ID NO: 1636937 - DNA, 25 bp, Homo sapien
tagcggatgcccttgccaaagttgg

SEQ ID NO: 1636938 - DNA, 25 bp, Homo sapien
tagccacaggagcattacaagcagt

SEQ ID NO: 1636939 - DNA, 25 bp, Homo sapien
cttttactgtgagatgtagccacag

SEQ ID NO: 1636940 - DNA, 25 bp, Homo sapien
gttgattcacgatattatgcagcca

SEQ ID NO: 1636941 - DNA, 25 bp, Homo sapien
cagtttatccacgttgcagtgtgaa

SEQ ID NO: 1636942 - DNA, 25 bp, Homo sapien
gggctcgatacttcttagctgttat

SEQ ID NO: 1636943 - DNA, 25 bp, Homo sapien
cttgggatgtaagaagggctcgata

SEQ ID NO: 1636944 - DNA, 25 bp, Homo sapien
tatgtaagcgtcttgacacagggct

SEQ ID NO: 1636945 - DNA, 25 bp, Homo sapien
gggttttgctaatgaaatgaatcga

SEQ ID NO: 1636946 - DNA, 25 bp, Homo sapien
tttcatacacatccagaaggcggac

SEQ ID NO: 1636947 - DNA, 25 bp, Homo sapien
acccggagctggtagacgcagccgc

SEQ ID NO: 1636948 - DNA, 25 bp, Homo sapien
tcaggtgaggctgagaacttgacca

SEQ ID NO: 1636949 - DNA, 25 bp, Homo sapien
gacgcagccgcagttctctcgagcg

SEQ ID NO: 1636950 - DNA, 25 bp, Homo sapien
cttgatgaaggtcctgcacatctgg

SEQ ID NO: 1636951 - DNA, 25 bp, Homo sapien
atttggagacgtcctggcctgggaa

SEQ ID NO: 1636952 - DNA, 25 bp, Homo sapien
cacatttggagacgtcctggcctgg

SEQ ID NO: 1636953 - DNA, 25 bp, Homo sapien
cagctctctgggtttcggggcggga

SEQ ID NO: 1636954 - DNA, 25 bp, Homo sapien
ctgggtggtcctggggaggagccag

SEQ ID NO: 1636955 - DNA, 25 bp, Homo sapien
ggtggtcctggggaggagccagagc

SEQ ID NO: 1636956 - DNA, 25 bp, Homo sapien
ctggcggaggagcctgggtggtcct

SEQ ID NO: 1636957 - DNA, 25 bp, Homo sapien
tggcggaggagcctgggtggtcctg

SEQ ID NO: 1636958 - DNA, 25 bp, Homo sapien
gagtctgggtggtcctggagtggag

SEQ ID NO: 1636959 - DNA, 25 bp, Homo sapien
gggtggtcctggagtggagccagag

SEQ ID NO: 1636960 - DNA, 25 bp, Homo sapien
ctggagtggagccagagcctggggg

SEQ ID NO: 1636961 - DNA, 25 bp, Homo sapien
ggtcctggggtggagccagagcctg

SEQ ID NO: 1636962 - DNA, 25 bp, Homo sapien
gaaccacaatgcagggcaggtgcct

SEQ ID NO: 1636963 - DNA, 25 bp, Homo sapien
cgtttcagaggggtatcaagccagt

SEQ ID NO: 1636964 - DNA, 25 bp, Homo sapien
ggcattcatcctaagcctgtaggct

SEQ ID NO: 1636965 - DNA, 25 bp, Homo sapien
cctgggtggtcctgcggttgattct

SEQ ID NO: 1636966 - DNA, 25 bp, Homo sapien
ggaaatgagcccctgttgcagagcc

SEQ ID NO: 1636967 - DNA, 25 bp, Homo sapien
tgacagccgctacccgtggggttga

SEQ ID NO: 1636968 - DNA, 25 bp, Homo sapien
gggcgggaaatgagcccctgttgca

SEQ ID NO: 1636969 - DNA, 25 bp, Homo sapien
atgagcccctgttgcagagccgctg

SEQ ID NO: 1636970 - DNA, 25 bp, Homo sapien
tggggcagggtgccgctcctcactc

SEQ ID NO: 1636971 - DNA, 25 bp, Homo sapien
gggcagggtgccgctcctcactcac

SEQ ID NO: 1636972 - DNA, 25 bp, Homo sapien
ctggggcagggtgccgctcctcact

SEQ ID NO: 1636973 - DNA, 25 bp, Homo sapien
ggggcagggtgccgctcctcactca

SEQ ID NO: 1636974 - DNA, 25 bp, Homo sapien
cagatctcaatctgggcgctgtcca

SEQ ID NO: 1636975 - DNA, 25 bp, Homo sapien
gatctcaatctgggcgctgtccagc

SEQ ID NO: 1636976 - DNA, 25 bp, Homo sapien
agatctcaatctgggcgctgtccag

SEQ ID NO: 1636977 - DNA, 25 bp, Homo sapien
ctgggaaggagagatggcagggggc

SEQ ID NO: 1636978 - DNA, 25 bp, Homo sapien
cccgggtctaaagctggacagcctt

SEQ ID NO: 1636979 - DNA, 25 bp, Homo sapien
tggatcagccaatgggatgctccgg

SEQ ID NO: 1636980 - DNA, 25 bp, Homo sapien
gaccctcatctttgtgggacaggac

SEQ ID NO: 1636981 - DNA, 25 bp, Homo sapien
tccaggcagctgacctctatgaaag

SEQ ID NO: 1636982 - DNA, 25 bp, Homo sapien
agaatcattggaacccagggaggca

SEQ ID NO: 1636983 - DNA, 25 bp, Homo sapien
ctgagcgcggtggcttagacctgta

SEQ ID NO: 1636984 - DNA, 25 bp, Homo sapien
aagtgccaggaaccggctgagcgcg

SEQ ID NO: 1636985 - DNA, 25 bp, Homo sapien
aacaaagtgccaggaaccggctgag

SEQ ID NO: 1636986 - DNA, 25 bp, Homo sapien
ctgttataaagtgggggcaataata

SEQ ID NO: 1636987 - DNA, 25 bp, Homo sapien
gccttcagtttcctgttataaagtg

SEQ ID NO: 1636988 - DNA, 25 bp, Homo sapien
ttcctgttataaagtgggggcaata

SEQ ID NO: 1636989 - DNA, 25 bp, Homo sapien
gcaataatagtatctatgtcacagg

SEQ ID NO: 1636990 - DNA, 25 bp, Homo sapien
aagcaggtctgcgaaggagccccag

SEQ ID NO: 1636991 - DNA, 25 bp, Homo sapien
tcgaaagaggtcacgaagcaggtct

SEQ ID NO: 1636992 - DNA, 25 bp, Homo sapien
ttttctatggcccagccgttcccgc

SEQ ID NO: 1636993 - DNA, 25 bp, Homo sapien
agaggtcacgaagcaggtctgcgaa

SEQ ID NO: 1636994 - DNA, 25 bp, Homo sapien
cctctgcataccaaactacttgctt

SEQ ID NO: 1636995 - DNA, 25 bp, Homo sapien
tcgcccattggctacatctctcaga

SEQ ID NO: 1636996 - DNA, 25 bp, Homo sapien
tcccaaagcgttgccattcccaccg

SEQ ID NO: 1636997 - DNA, 25 bp, Homo sapien
cactcgttcggattcccggcttcac

SEQ ID NO: 1636998 - DNA, 25 bp, Homo sapien
cagtgggcccgtccactatgtcgcg

SEQ ID NO: 1636999 - DNA, 25 bp, Homo sapien
cgttgagccactgcgtagagtgcgc

SEQ ID NO: 1637000 - DNA, 25 bp, Homo sapien
ccttgtcttcgttgctgggcaggca

SEQ ID NO: 1637001 - DNA, 25 bp, Homo sapien
acactgggcggcatcgcgtgaccaa

SEQ ID NO: 1637002 - DNA, 25 bp, Homo sapien
cctgctgctcgagagaccccattag

SEQ ID NO: 1637003 - DNA, 25 bp, Homo sapien
gtcggtaggcgggtcagcgcagcca

SEQ ID NO: 1637004 - DNA, 25 bp, Homo sapien
tcgagagaccccattaggtccatgg

SEQ ID NO: 1637005 - DNA, 25 bp, Homo sapien
ggtccatgggcaaccagggacccat

SEQ ID NO: 1637006 - DNA, 25 bp, Homo sapien
tctgctgacccagatcatgactcct

SEQ ID NO: 1637007 - DNA, 25 bp, Homo sapien
ctaattttagctctgggctcacggc

SEQ ID NO: 1637008 - DNA, 25 bp, Homo sapien
ctgctcttagcatcattctcagtga

SEQ ID NO: 1637009 - DNA, 25 bp, Homo sapien
tcttctccctaattttagctctggg

SEQ ID NO: 1637010 - DNA, 25 bp, Homo sapien
ccgttgctcccagcctcaacattct

SEQ ID NO: 1637011 - DNA, 25 bp, Homo sapien
gttgctcccagcctcaacattcttt

SEQ ID NO: 1637012 - DNA, 25 bp, Homo sapien
atgagccgttgctcccagcctcaac

SEQ ID NO: 1637013 - DNA, 25 bp, Homo sapien
agccgttgctcccagcctcaacatt

SEQ ID NO: 1637014 - DNA, 25 bp, Homo sapien
caagttgctaaatcgagaaaccgcc

SEQ ID NO: 1637015 - DNA, 25 bp, Homo sapien
tgtcctgtcctacgtgtctgagtgt

SEQ ID NO: 1637016 - DNA, 25 bp, Homo sapien
tacagagctttcgaacatatcactg

SEQ ID NO: 1637017 - DNA, 25 bp, Homo sapien
gggccgcagcgaaacacataatgtg

SEQ ID NO: 1637018 - DNA, 25 bp, Homo sapien
cagcggcgggctaagcttccctttc

SEQ ID NO: 1637019 - DNA, 25 bp, Homo sapien
ctctcccggggcgtggcggctgcag

SEQ ID NO: 1637020 - DNA, 25 bp, Homo sapien
gctccccgtgatcggcgtggcccag

SEQ ID NO: 1637021 - DNA, 25 bp, Homo sapien
gcggtctgggcggtcggtcctctcc

SEQ ID NO: 1637022 - DNA, 25 bp, Homo sapien
gcttggagggctgcgtgcagcgagg

SEQ ID NO: 1637023 - DNA, 25 bp, Homo sapien
gagcttggagggctgcgtgcagcga

SEQ ID NO: 1637024 - DNA, 25 bp, Homo sapien
gcgggggagcttggagggctgcgtg

SEQ ID NO: 1637025 - DNA, 25 bp, Homo sapien
gggagcttggagggctgcgtgcagc

SEQ ID NO: 1637026 - DNA, 25 bp, Homo sapien
cttgtgcagtgcattgcctgggccc

SEQ ID NO: 1637027 - DNA, 25 bp, Homo sapien
tgtgcagtgcattgcctgggcccat

SEQ ID NO: 1637028 - DNA, 25 bp, Homo sapien
ttgtgcagtgcattgcctgggccca

SEQ ID NO: 1637029 - DNA, 25 bp, Homo sapien
ccagctgggtcaccagggacctgtg

SEQ ID NO: 1637030 - DNA, 25 bp, Homo sapien
ccagtggctttggtctagctggcca

SEQ ID NO: 1637031 - DNA, 25 bp, Homo sapien
catctatgaaccagagaatgtgccc

SEQ ID NO: 1637032 - DNA, 25 bp, Homo sapien
tgtaagtggatctcctttgaagatc

SEQ ID NO: 1637033 - DNA, 25 bp, Homo sapien
ttcatgtgtattagtggtgggttgc

SEQ ID NO: 1637034 - DNA, 25 bp, Homo sapien
gaaatacacattcctaggagagaat

SEQ ID NO: 1637035 - DNA, 25 bp, Homo sapien
gagaagagcatgtttacatgaccag

SEQ ID NO: 1637036 - DNA, 25 bp, Homo sapien
tggtgggttgccctaccactagaaa

SEQ ID NO: 1637037 - DNA, 25 bp, Homo sapien
ttttgagtcacggatcagagctgag

SEQ ID NO: 1637038 - DNA, 25 bp, Homo sapien
gggagatatttgtgggtcagcccca

SEQ ID NO: 1637039 - DNA, 25 bp, Homo sapien
gtcagccccagaaacgtaacacgtc

SEQ ID NO: 1637040 - DNA, 25 bp, Homo sapien
gaagtgtagtcaggctctgtgtgcc

SEQ ID NO: 1637041 - DNA, 25 bp, Homo sapien
taattcatcatccacggctgggcac

SEQ ID NO: 1637042 - DNA, 25 bp, Homo sapien
attcatcatccacggctgggcacat

SEQ ID NO: 1637043 - DNA, 25 bp, Homo sapien
ctaattcatcatccacggctgggca

SEQ ID NO: 1637044 - DNA, 25 bp, Homo sapien
aattcatcatccacggctgggcaca

SEQ ID NO: 1637045 - DNA, 25 bp, Homo sapien
tgttcagggctgagacagtgtccta

SEQ ID NO: 1637046 - DNA, 25 bp, Homo sapien
taatcttagcacttgaggctgccga

SEQ ID NO: 1637047 - DNA, 25 bp, Homo sapien
ggttcaagacattgactcaggcaca

SEQ ID NO: 1637048 - DNA, 25 bp, Homo sapien
gagatctatcttcgaaagccaagtg

SEQ ID NO: 1637049 - DNA, 25 bp, Homo sapien
agattttccgattctgggcaattca

SEQ ID NO: 1637050 - DNA, 25 bp, Homo sapien
cagtggttttcggtacattcacaat

SEQ ID NO: 1637051 - DNA, 25 bp, Homo sapien
caaaatcagtatgtctcattcggtc

SEQ ID NO: 1637052 - DNA, 25 bp, Homo sapien
aaacaatccgtgtacctgtgagcag

SEQ ID NO: 1637053 - DNA, 25 bp, Homo sapien
ggcattgactcgatgacccaaaagt

SEQ ID NO: 1637054 - DNA, 25 bp, Homo sapien
tcagagttgtaacagggctggagct

SEQ ID NO: 1637055 - DNA, 25 bp, Homo sapien
taagacacgctcatcagttgccatg

SEQ ID NO: 1637056 - DNA, 25 bp, Homo sapien
caagaacctcatgggctaagtctca

SEQ ID NO: 1637057 - DNA, 25 bp, Homo sapien
cacgcccagcgtcattttcaaattc

SEQ ID NO: 1637058 - DNA, 25 bp, Homo sapien
cgcccagcgtcattttcaaattctc

SEQ ID NO: 1637059 - DNA, 25 bp, Homo sapien
ggcatgggcaaccacgcccgaccca

SEQ ID NO: 1637060 - DNA, 25 bp, Homo sapien
ccacgcccagcgtcattttcaaatt

SEQ ID NO: 1637061 - DNA, 25 bp, Homo sapien
tcaagaaaagaagcggggcacgatt

SEQ ID NO: 1637062 - DNA, 25 bp, Homo sapien
aagaagcggggcacgattgctcatg

SEQ ID NO: 1637063 - DNA, 25 bp, Homo sapien
atcaagaaaagaagcggggcacgat

SEQ ID NO: 1637064 - DNA, 25 bp, Homo sapien
gaaaagaagcggggcacgattgctc

SEQ ID NO: 1637065 - DNA, 25 bp, Homo sapien
gaagtagagtcaggctacaggccac

SEQ ID NO: 1637066 - DNA, 25 bp, Homo sapien
gggaccgctgcatcagtaatcaaac

SEQ ID NO: 1637067 - DNA, 25 bp, Homo sapien
ccaatgaacttcctgcaaaagctca

SEQ ID NO: 1637068 - DNA, 25 bp, Homo sapien
tctataacctctttcccgatcatca

SEQ ID NO: 1637069 - DNA, 25 bp, Homo sapien
tcaagtgcaagtgacaaacaaggct

SEQ ID NO: 1637070 - DNA, 25 bp, Homo sapien
gaaatgaggcgtctcccaagtgtcc

SEQ ID NO: 1637071 - DNA, 25 bp, Homo sapien
tagaaatacattcgatggccaggcg

SEQ ID NO: 1637072 - DNA, 25 bp, Homo sapien
ggaattggtgcactcaaaaacacgc

SEQ ID NO: 1637073 - DNA, 25 bp, Homo sapien
ttacatatgattggcagatacatgc

SEQ ID NO: 1637074 - DNA, 25 bp, Homo sapien
atatgattggcagatacatgctgct

SEQ ID NO: 1637075 - DNA, 25 bp, Homo sapien
acatatgattggcagatacatgctg

SEQ ID NO: 1637076 - DNA, 25 bp, Homo sapien
ttattacatatgattggcagataca

SEQ ID NO: 1637077 - DNA, 25 bp, Homo sapien
ataccacacaattacaggtccttga

SEQ ID NO: 1637078 - DNA, 25 bp, Homo sapien
taccacacaattacaggtccttgag

SEQ ID NO: 1637079 - DNA, 25 bp, Homo sapien
ccacacaattacaggtccttgagga

SEQ ID NO: 1637080 - DNA, 25 bp, Homo sapien
cacacaattacaggtccttgaggat

SEQ ID NO: 1637081 - DNA, 25 bp, Homo sapien
tgtactactgtacctggctaacttt

SEQ ID NO: 1637082 - DNA, 25 bp, Homo sapien
atagcctcaacctgggcacaaatga

SEQ ID NO: 1637083 - DNA, 25 bp, Homo sapien
gtgtgtactactgtacctggctaac

SEQ ID NO: 1637084 - DNA, 25 bp, Homo sapien
ctatagcctcaacctgggcacaaat

SEQ ID NO: 1637085 - DNA, 25 bp, Homo sapien
tttaacgtagactttcagctgcatg

SEQ ID NO: 1637086 - DNA, 25 bp, Homo sapien
cacccttagggctgggactctctga

SEQ ID NO: 1637087 - DNA, 25 bp, Homo sapien
gttcagagatgagttgagggcttcc

SEQ ID NO: 1637088 - DNA, 25 bp, Homo sapien
cagctgcagtaggtagataagatgg

SEQ ID NO: 1637089 - DNA, 25 bp, Homo sapien
cacgatcacactggagttggtcaca

SEQ ID NO: 1637090 - DNA, 25 bp, Homo sapien
cccggtgttcgaaagacacaaagcg

SEQ ID NO: 1637091 - DNA, 25 bp, Homo sapien
gtcacacgggctccatagtggccag

SEQ ID NO: 1637092 - DNA, 25 bp, Homo sapien
aaagcggacgcccatcttgatgttg

SEQ ID NO: 1637093 - DNA, 25 bp, Homo sapien
tagaagttggacgaggagtctgtac

SEQ ID NO: 1637094 - DNA, 25 bp, Homo sapien
gaacagtctggttggcgtctagaag

SEQ ID NO: 1637095 - DNA, 25 bp, Homo sapien
tccactgcgggatgggatcaggcac

SEQ ID NO: 1637096 - DNA, 25 bp, Homo sapien
catacagccgctgtcgtgtcgggct

SEQ ID NO: 1637097 - DNA, 25 bp, Homo sapien
tcctgccactatccagcagttctgg

SEQ ID NO: 1637098 - DNA, 25 bp, Homo sapien
tcctctaggtccaagacctgcttct

SEQ ID NO: 1637099 - DNA, 25 bp, Homo sapien
cagagacacaaatctcaatcctgcc

SEQ ID NO: 1637100 - DNA, 25 bp, Homo sapien
aaatctcaatcctgccactatccag

SEQ ID NO: 1637101 - DNA, 25 bp, Homo sapien
tgcaggagacagggtaatgagaaca

SEQ ID NO: 1637102 - DNA, 25 bp, Homo sapien
gcaggagacagggtaatgagaacag

SEQ ID NO: 1637103 - DNA, 25 bp, Homo sapien
gccgtccccaccgtgttgcaccatc

SEQ ID NO: 1637104 - DNA, 25 bp, Homo sapien
tgcaccatccactttcggaggcctt

SEQ ID NO: 1637105 - DNA, 25 bp, Homo sapien
accgtgttgcaccatccactttcgg

SEQ ID NO: 1637106 - DNA, 25 bp, Homo sapien
caggcacggttgtcctgttttcctc

SEQ ID NO: 1637107 - DNA, 25 bp, Homo sapien
tggacttcctcttccgagatcccac

SEQ ID NO: 1637108 - DNA, 25 bp, Homo sapien
gcagctgcgggcgaggtgcagcagc

SEQ ID NO: 1637109 - DNA, 25 bp, Homo sapien
gtggtcgcgggccaggatcagcagc

SEQ ID NO: 1637110 - DNA, 25 bp, Homo sapien
ataaggttgcgtccgatgggtctgc

SEQ ID NO: 1637111 - DNA, 25 bp, Homo sapien
gcaaggcctggcgttacgggcggga

SEQ ID NO: 1637112 - DNA, 25 bp, Homo sapien
aggtccagcgcctcttcgggttccg

SEQ ID NO: 1637113 - DNA, 25 bp, Homo sapien
ctgggggtagttggctcaggtccag

SEQ ID NO: 1637114 - DNA, 25 bp, Homo sapien
caggtccagcgcctcttcgggttcc

SEQ ID NO: 1637115 - DNA, 25 bp, Homo sapien
gccgggatgccctagctgtgccgca

SEQ ID NO: 1637116 - DNA, 25 bp, Homo sapien
cgggatgccctagctgtgccgcaag

SEQ ID NO: 1637117 - DNA, 25 bp, Homo sapien
gatgccctagctgtgccgcaagctc

SEQ ID NO: 1637118 - DNA, 25 bp, Homo sapien
tcctcgccgggatgccctagctgtg

SEQ ID NO: 1637119 - DNA, 25 bp, Homo sapien
ttaaggtcgggcgtggttatcttca

SEQ ID NO: 1637120 - DNA, 25 bp, Homo sapien
taaggtcgggcgtggttatcttcat

SEQ ID NO: 1637121 - DNA, 25 bp, Homo sapien
tatctttctttaaccctcaccatcg

SEQ ID NO: 1637122 - DNA, 25 bp, Homo sapien
attattttgtagagccacgatcttg

SEQ ID NO: 1637123 - DNA, 25 bp, Homo sapien
tttaaccctcaccatcgcttcaaaa

SEQ ID NO: 1637124 - DNA, 25 bp, Homo sapien
aagcctgtatttgatgtccagcccc

SEQ ID NO: 1637125 - DNA, 25 bp, Homo sapien
ccaaggggccatagggcctcattcc

SEQ ID NO: 1637126 - DNA, 25 bp, Homo sapien
tgcgcccaaggggccatagggcctc

SEQ ID NO: 1637127 - DNA, 25 bp, Homo sapien
cccgcctgcgcccaaggggccatag

SEQ ID NO: 1637128 - DNA, 25 bp, Homo sapien
caaggggccatagggcctcattccc

SEQ ID NO: 1637129 - DNA, 25 bp, Homo sapien
ccgccggccctgcttggtccccata

SEQ ID NO: 1637130 - DNA, 25 bp, Homo sapien
cggccctgcttggtccccatacaaa

SEQ ID NO: 1637131 - DNA, 25 bp, Homo sapien
gccctgcttggtccccatacaaagg

SEQ ID NO: 1637132 - DNA, 25 bp, Homo sapien
gtgccgccggccctgcttggtcccc

SEQ ID NO: 1637133 - DNA, 25 bp, Homo sapien
gagaggctgggaaattgccatccac

SEQ ID NO: 1637134 - DNA, 25 bp, Homo sapien
tgtgggagaggctgggaaattgcca

SEQ ID NO: 1637135 - DNA, 25 bp, Homo sapien
gggagaggctgggaaattgccatcc

SEQ ID NO: 1637136 - DNA, 25 bp, Homo sapien
gtgggagaggctgggaaattgccat

SEQ ID NO: 1637137 - DNA, 25 bp, Homo sapien
tatatggcttaccaggtagtccagg

SEQ ID NO: 1637138 - DNA, 25 bp, Homo sapien
gctcgggggagccattcattgcctc

SEQ ID NO: 1637139 - DNA, 25 bp, Homo sapien
caaaggagcggaaggactgcctgcc

SEQ ID NO: 1637140 - DNA, 25 bp, Homo sapien
agtttcactgggctggagtcaaagg

SEQ ID NO: 1637141 - DNA, 25 bp, Homo sapien
gaggtgtggactgaaagccacaaaa

SEQ ID NO: 1637142 - DNA, 25 bp, Homo sapien
aggtgtggactgaaagccacaaaag

SEQ ID NO: 1637143 - DNA, 25 bp, Homo sapien
aaatggtcagataatgcatttcctt

SEQ ID NO: 1637144 - DNA, 25 bp, Homo sapien
gatgacactcttgaaaggatcccag

SEQ ID NO: 1637145 - DNA, 25 bp, Homo sapien
tcccagtactggtcgaaggtgaaga

SEQ ID NO: 1637146 - DNA, 25 bp, Homo sapien
taactggcggtctacattacgtgta

SEQ ID NO: 1637147 - DNA, 25 bp, Homo sapien
taggttagccgccattttgcagagc

SEQ ID NO: 1637148 - DNA, 25 bp, Homo sapien
tggattctcctcagatctgttttca

SEQ ID NO: 1637149 - DNA, 25 bp, Homo sapien
tgacaactggattctcctcagatct

SEQ ID NO: 1637150 - DNA, 25 bp, Homo sapien
cacccaccaccccatacttggctaa

SEQ ID NO: 1637151 - DNA, 25 bp, Homo sapien
gtatctggtttggtaactgacaact

SEQ ID NO: 1637152 - DNA, 25 bp, Homo sapien
tgggccgggagccagccttcccgca

SEQ ID NO: 1637153 - DNA, 25 bp, Homo sapien
agtgggccgggagccagccttcccg

SEQ ID NO: 1637154 - DNA, 25 bp, Homo sapien
tcagtgggccgggagccagccttcc

SEQ ID NO: 1637155 - DNA, 25 bp, Homo sapien
gggccgggagccagccttcccgcac

SEQ ID NO: 1637156 - DNA, 25 bp, Homo sapien
tcagcctcgttgctatggggactgg

SEQ ID NO: 1637157 - DNA, 25 bp, Homo sapien
cccgcttggcattttctgcccgaag

SEQ ID NO: 1637158 - DNA, 25 bp, Homo sapien
tgcccgaaggtctccgattggacgc

SEQ ID NO: 1637159 - DNA, 25 bp, Homo sapien
cgctctgtaccaatcggaggctgga

SEQ ID NO: 1637160 - DNA, 25 bp, Homo sapien
gcaggaggagcagtgtgtgcagagg

SEQ ID NO: 1637161 - DNA, 25 bp, Homo sapien
caggcaggaggagcagtgtgtgcag

SEQ ID NO: 1637162 - DNA, 25 bp, Homo sapien
aggcaggaggagcagtgtgtgcaga

SEQ ID NO: 1637163 - DNA, 25 bp, Homo sapien
aggaggagcagtgtgtgcagaggcc

SEQ ID NO: 1637164 - DNA, 25 bp, Homo sapien
caggacacagagtgccgcctcgtgt

SEQ ID NO: 1637165 - DNA, 25 bp, Homo sapien
cgcctcgtgtcccacgcacacgcgt

SEQ ID NO: 1637166 - DNA, 25 bp, Homo sapien
tgtcaggacacagagtgccgcctcg

SEQ ID NO: 1637167 - DNA, 25 bp, Homo sapien
tttgcgtttcccactccgaagctcg

SEQ ID NO: 1637168 - DNA, 25 bp, Homo sapien
aagtccttcgcccattttgcaaact

SEQ ID NO: 1637169 - DNA, 25 bp, Homo sapien
ggtgtttcctctgtggtctgatgtg

SEQ ID NO: 1637170 - DNA, 25 bp, Homo sapien
tagagtagatctggtggtgtttcct

SEQ ID NO: 1637171 - DNA, 25 bp, Homo sapien
ccttcgcccattttgcaaactagag

SEQ ID NO: 1637172 - DNA, 25 bp, Homo sapien
cccagggtagttcatgatgtggcag

SEQ ID NO: 1637173 - DNA, 25 bp, Homo sapien
caccctgggtttagccttgctggct

SEQ ID NO: 1637174 - DNA, 25 bp, Homo sapien
ccacaagatgccgtgcaccctgggt

SEQ ID NO: 1637175 - DNA, 25 bp, Homo sapien
gatgtggcagggagtctgtgccctc

SEQ ID NO: 1637176 - DNA, 25 bp, Homo sapien
ttcagtaataactccttccactctg

SEQ ID NO: 1637177 - DNA, 25 bp, Homo sapien
tccctgccggggggatgcttgaccc

SEQ ID NO: 1637178 - DNA, 25 bp, Homo sapien
tccagcacggggcaccgatgagcca

SEQ ID NO: 1637179 - DNA, 25 bp, Homo sapien
tgagccagccagaagccgtccctgc

SEQ ID NO: 1637180 - DNA, 25 bp, Homo sapien
tggtatgtggagagacctggctgtt

SEQ ID NO: 1637181 - DNA, 25 bp, Homo sapien
gactgggattggagcaggattgaga

SEQ ID NO: 1637182 - DNA, 25 bp, Homo sapien
tggctgttgtggcatgagtccgagg

SEQ ID NO: 1637183 - DNA, 25 bp, Homo sapien
tgtggcatgagtccgagggctcagg

SEQ ID NO: 1637184 - DNA, 25 bp, Homo sapien
cacctccagtggaagtggtagagcg

SEQ ID NO: 1637185 - DNA, 25 bp, Homo sapien
cctccagtggaagtggtagagcgcc

SEQ ID NO: 1637186 - DNA, 25 bp, Homo sapien
tccacgtgggtttgaggcggccacc

SEQ ID NO: 1637187 - DNA, 25 bp, Homo sapien
cacgtgggtttgaggcggccacctc

SEQ ID NO: 1637188 - DNA, 25 bp, Homo sapien
gaggctcaactcctggccgcgtcac

SEQ ID NO: 1637189 - DNA, 25 bp, Homo sapien
gccgaggctcaactcctggccgcgt

SEQ ID NO: 1637190 - DNA, 25 bp, Homo sapien
cacagccgaggctcaactcctggcc

SEQ ID NO: 1637191 - DNA, 25 bp, Homo sapien
actcctggccgcgtcaccaccgctg

SEQ ID NO: 1637192 - DNA, 25 bp, Homo sapien
gctgaacagccagattcagtctctg

SEQ ID NO: 1637193 - DNA, 25 bp, Homo sapien
tgaacagccagattcagtctctgaa

SEQ ID NO: 1637194 - DNA, 25 bp, Homo sapien
ttgctgaacagccagattcagtctc

SEQ ID NO: 1637195 - DNA, 25 bp, Homo sapien
gaacagccagattcagtctctgaag

SEQ ID NO: 1637196 - DNA, 25 bp, Homo sapien
tgagccgggaggagaagtaggtgtg

SEQ ID NO: 1637197 - DNA, 25 bp, Homo sapien
cctgagccgggaggagaagtaggtg

SEQ ID NO: 1637198 - DNA, 25 bp, Homo sapien
agccgggaggagaagtaggtgtgga

SEQ ID NO: 1637199 - DNA, 25 bp, Homo sapien
ccgggaggagaagtaggtgtggagg

SEQ ID NO: 1637200 - DNA, 25 bp, Homo sapien
aaatgactactgcacctggacagcc

SEQ ID NO: 1637201 - DNA, 25 bp, Homo sapien
tcatgaatgtccgaagagtggcctt

SEQ ID NO: 1637202 - DNA, 25 bp, Homo sapien
gatgagaccctactactgaactcca

SEQ ID NO: 1637203 - DNA, 25 bp, Homo sapien
aagaaccaggttcctgcccggtcag

SEQ ID NO: 1637204 - DNA, 25 bp, Homo sapien
cagatgagagaccagcaatgcatca

SEQ ID NO: 1637205 - DNA, 25 bp, Homo sapien
gcagatgagagaccagcaatgcatc

SEQ ID NO: 1637206 - DNA, 25 bp, Homo sapien
tgcagatgagagaccagcaatgcat

SEQ ID NO: 1637207 - DNA, 25 bp, Homo sapien
gggtgggctcggagctttgggcggc

SEQ ID NO: 1637208 - DNA, 25 bp, Homo sapien
gtgggctcggagctttgggcggccg

SEQ ID NO: 1637209 - DNA, 25 bp, Homo sapien
tgggctcggagctttgggcggccgg

SEQ ID NO: 1637210 - DNA, 25 bp, Homo sapien
gctcggagctttgggcggccgggca

SEQ ID NO: 1637211 - DNA, 25 bp, Homo sapien
gtcatagagcttggcgcaagtgcgc

SEQ ID NO: 1637212 - DNA, 25 bp, Homo sapien
gatagcgttggaccagtctcctaag

SEQ ID NO: 1637213 - DNA, 25 bp, Homo sapien
ccaccacaagtgaggaggcggtgtt

SEQ ID NO: 1637214 - DNA, 25 bp, Homo sapien
gagaacttgtgcgtcttgcccgcct

SEQ ID NO: 1637215 - DNA, 25 bp, Homo sapien
tggcagtgccctgccgcagccccgc

SEQ ID NO: 1637216 - DNA, 25 bp, Homo sapien
gcagtgccctgccgcagccccgcgc

SEQ ID NO: 1637217 - DNA, 25 bp, Homo sapien
agtgccctgccgcagccccgcgcgc

SEQ ID NO: 1637218 - DNA, 25 bp, Homo sapien
ggtggcagtgccctgccgcagcccc

SEQ ID NO: 1637219 - DNA, 25 bp, Homo sapien
gaaaagggaacatctccagtgcctg

SEQ ID NO: 1637220 - DNA, 25 bp, Homo sapien
tagcaattagaaaagggaacatctc

SEQ ID NO: 1637221 - DNA, 25 bp, Homo sapien
tacagaaaaatattgtcattagcaa

SEQ ID NO: 1637222 - DNA, 25 bp, Homo sapien
gctccaaatgcccagactgaacttg

SEQ ID NO: 1637223 - DNA, 25 bp, Homo sapien
cgttgacagcttcataccgtggcag

SEQ ID NO: 1637224 - DNA, 25 bp, Homo sapien
catggacaccaaacacaagaacgtt

SEQ ID NO: 1637225 - DNA, 25 bp, Homo sapien
tgaagaagtggtgttgccacaagag

SEQ ID NO: 1637226 - DNA, 25 bp, Homo sapien
agtagatggcaaagtaatgcatttg

SEQ ID NO: 1637227 - DNA, 25 bp, Homo sapien
ggggaatggtgatggcagagcaggc

SEQ ID NO: 1637228 - DNA, 25 bp, Homo sapien
gaatggtgatggcagagcaggccca

SEQ ID NO: 1637229 - DNA, 25 bp, Homo sapien
aatggtgatggcagagcaggcccat

SEQ ID NO: 1637230 - DNA, 25 bp, Homo sapien
ctttggggaatggtgatggcagagc

SEQ ID NO: 1637231 - DNA, 25 bp, Homo sapien
acttcaggtcccaaatagagaggca

SEQ ID NO: 1637232 - DNA, 25 bp, Homo sapien
gctagcagggaagatcgtttgaacc

SEQ ID NO: 1637233 - DNA, 25 bp, Homo sapien
gagacactaattcgtgcacctgcca

SEQ ID NO: 1637234 - DNA, 25 bp, Homo sapien
gatgaggcctctcgaccttgccgtt

SEQ ID NO: 1637235 - DNA, 25 bp, Homo sapien
ggcctgggccttgctgaggctggat

SEQ ID NO: 1637236 - DNA, 25 bp, Homo sapien
tggtgcagccagtggtggaggcggc

SEQ ID NO: 1637237 - DNA, 25 bp, Homo sapien
tcatcttcctcggggcctcctggag

SEQ ID NO: 1637238 - DNA, 25 bp, Homo sapien
ttcctcggggcctcctggagctggt

SEQ ID NO: 1637239 - DNA, 25 bp, Homo sapien
aggagggcggtgtgtgaggcggggc

SEQ ID NO: 1637240 - DNA, 25 bp, Homo sapien
ggagggcggtgtgtgaggcggggcc

SEQ ID NO: 1637241 - DNA, 25 bp, Homo sapien
tgggtgcccgggccccgaggactca

SEQ ID NO: 1637242 - DNA, 25 bp, Homo sapien
ccagggccggatcagcatcagcggt

SEQ ID NO: 1637243 - DNA, 25 bp, Homo sapien
cggatcagcatcagcggtgacctcc

SEQ ID NO: 1637244 - DNA, 25 bp, Homo sapien
cccagggccggatcagcatcagcgg

SEQ ID NO: 1637245 - DNA, 25 bp, Homo sapien
ggccggatcagcatcagcggtgacc

SEQ ID NO: 1637246 - DNA, 25 bp, Homo sapien
ctgcagctgcctcaggtcccaggtc

SEQ ID NO: 1637247 - DNA, 25 bp, Homo sapien
agtccttcagcagaagcgacacttc

SEQ ID NO: 1637248 - DNA, 25 bp, Homo sapien
ggaagaggcgggagcggcacctgca

SEQ ID NO: 1637249 - DNA, 25 bp, Homo sapien
gagcggcacctgcagtccttcagca

SEQ ID NO: 1637250 - DNA, 25 bp, Homo sapien
gcagtccttcagcagaagcgacact

SEQ ID NO: 1637251 - DNA, 25 bp, Homo sapien
tgggctccacggctttgggtctcta

SEQ ID NO: 1637252 - DNA, 25 bp, Homo sapien
tgagctgcatggacttcctgtctgg

SEQ ID NO: 1637253 - DNA, 25 bp, Homo sapien
tctgtctattaaagcctgagctgca

SEQ ID NO: 1637254 - DNA, 25 bp, Homo sapien
tctggcttcggtctcttcttctgga

SEQ ID NO: 1637255 - DNA, 25 bp, Homo sapien
tttccagctcggtctggggtatcat

SEQ ID NO: 1637256 - DNA, 25 bp, Homo sapien
gatttccagctcggtctggggtatc

SEQ ID NO: 1637257 - DNA, 25 bp, Homo sapien
tgatttccagctcggtctggggtat

SEQ ID NO: 1637258 - DNA, 25 bp, Homo sapien
atttccagctcggtctggggtatca

SEQ ID NO: 1637259 - DNA, 25 bp, Homo sapien
agaggccagtcccacgggtgcagag

SEQ ID NO: 1637260 - DNA, 25 bp, Homo sapien
ctgagctccagggcacactgtttag

SEQ ID NO: 1637261 - DNA, 25 bp, Homo sapien
gagctccagggcacactgtttagct

SEQ ID NO: 1637262 - DNA, 25 bp, Homo sapien
ctccagggcacactgtttagctggg

SEQ ID NO: 1637263 - DNA, 25 bp, Homo sapien
gcccaggctggagaagtccagagca

SEQ ID NO: 1637264 - DNA, 25 bp, Homo sapien
tggggtgggggaggcccaggctgga

SEQ ID NO: 1637265 - DNA, 25 bp, Homo sapien
gaggcccaggctggagaagtccaga

SEQ ID NO: 1637266 - DNA, 25 bp, Homo sapien
cccaggctggagaagtccagagcag

SEQ ID NO: 1637267 - DNA, 25 bp, Homo sapien
cccttgaggaaacctgggggctgat

SEQ ID NO: 1637268 - DNA, 25 bp, Homo sapien
ccttgaggaaacctgggggctgatc

SEQ ID NO: 1637269 - DNA, 25 bp, Homo sapien
cttgaggaaacctgggggctgatct

SEQ ID NO: 1637270 - DNA, 25 bp, Homo sapien
ggcaacacaattcaggtctcgcgtg

SEQ ID NO: 1637271 - DNA, 25 bp, Homo sapien
aacacaattcaggtctcgcgtgagg

SEQ ID NO: 1637272 - DNA, 25 bp, Homo sapien
gcaacacaattcaggtctcgcgtga

SEQ ID NO: 1637273 - DNA, 25 bp, Homo sapien
caacacaattcaggtctcgcgtgag

SEQ ID NO: 1637274 - DNA, 25 bp, Homo sapien
tgggccctgccgtgggctgaggctg

SEQ ID NO: 1637275 - DNA, 25 bp, Homo sapien
ctcctggagccggtgcagccaatgg

SEQ ID NO: 1637276 - DNA, 25 bp, Homo sapien
ctggagccggtgcagccaatggtgg

SEQ ID NO: 1637277 - DNA, 25 bp, Homo sapien
gccggtgcagccaatggtggaggcg

SEQ ID NO: 1637278 - DNA, 25 bp, Homo sapien
ctgggtgcccgggccctgacgactc

SEQ ID NO: 1637279 - DNA, 25 bp, Homo sapien
tgggtgcccgggccctgacgactca

SEQ ID NO: 1637280 - DNA, 25 bp, Homo sapien
gggtgcccgggccctgacgactcac

SEQ ID NO: 1637281 - DNA, 25 bp, Homo sapien
tggtccaagacatcccccagggctg

SEQ ID NO: 1637282 - DNA, 25 bp, Homo sapien
tccagaaccttcagcgtcagggcca

SEQ ID NO: 1637283 - DNA, 25 bp, Homo sapien
gagaggatatggtgcagggtgtgaa

SEQ ID NO: 1637284 - DNA, 25 bp, Homo sapien
agtgtcagcggtggcctccagaacc

SEQ ID NO: 1637285 - DNA, 25 bp, Homo sapien
ctgcagctgcctcaggtcccaggtc

SEQ ID NO: 1637286 - DNA, 25 bp, Homo sapien
ggaagaggcgggagcggcacttgca

SEQ ID NO: 1637287 - DNA, 25 bp, Homo sapien
gcgggagcggcacttgcagtccttc

SEQ ID NO: 1637288 - DNA, 25 bp, Homo sapien
gggagcggcacttgcagtccttcag

SEQ ID NO: 1637289 - DNA, 25 bp, Homo sapien
gagcggcacttgcagtccttcagca

SEQ ID NO: 1637290 - DNA, 25 bp, Homo sapien
atgtggcagccccttgcatccggga

SEQ ID NO: 1637291 - DNA, 25 bp, Homo sapien
gacagggacttgaactgggctatgt

SEQ ID NO: 1637292 - DNA, 25 bp, Homo sapien
ggaactgctccagtcacggtcagca

SEQ ID NO: 1637293 - DNA, 25 bp, Homo sapien
taaggcatctttggccctcttaaag

SEQ ID NO: 1637294 - DNA, 25 bp, Homo sapien
ccggccagcccaatggacgacagga

SEQ ID NO: 1637295 - DNA, 25 bp, Homo sapien
tgcctcagcacccattgactgagag

SEQ ID NO: 1637296 - DNA, 25 bp, Homo sapien
ttgactgagagcctcgcccggccag

SEQ ID NO: 1637297 - DNA, 25 bp, Homo sapien
agcccaatggacgacaggagctgct

SEQ ID NO: 1637298 - DNA, 25 bp, Homo sapien
ggcccagagtgtgcagccagccgga

SEQ ID NO: 1637299 - DNA, 25 bp, Homo sapien
ccagagtgtgcagccagccggagct

SEQ ID NO: 1637300 - DNA, 25 bp, Homo sapien
agagtgtgcagccagccggagctcc

SEQ ID NO: 1637301 - DNA, 25 bp, Homo sapien
aaggcccagagtgtgcagccagccg

SEQ ID NO: 1637302 - DNA, 25 bp, Homo sapien
ttgaagaccacgctggctttgcggc

SEQ ID NO: 1637303 - DNA, 25 bp, Homo sapien
gaagaccacgctggctttgcggcac

SEQ ID NO: 1637304 - DNA, 25 bp, Homo sapien
agaccacgctggctttgcggcaccg

SEQ ID NO: 1637305 - DNA, 25 bp, Homo sapien
cacgctggctttgcggcaccgaggc

SEQ ID NO: 1637306 - DNA, 25 bp, Homo sapien
taagcaggacagattggcaaagcgc

SEQ ID NO: 1637307 - DNA, 25 bp, Homo sapien
ggtttttccgctaagcaggacagat

SEQ ID NO: 1637308 - DNA, 25 bp, Homo sapien
agcaggacagattggcaaagcgctg

SEQ ID NO: 1637309 - DNA, 25 bp, Homo sapien
aagcaggacagattggcaaagcgct

SEQ ID NO: 1637310 - DNA, 25 bp, Homo sapien
gcggtgcaggccgctgagcactgcc

SEQ ID NO: 1637311 - DNA, 25 bp, Homo sapien
cggtgcaggccgctgagcactgcct

SEQ ID NO: 1637312 - DNA, 25 bp, Homo sapien
cgatggccgcggaggatccctcctg

SEQ ID NO: 1637313 - DNA, 25 bp, Homo sapien
cgctgacataggagaggcgcctgct

SEQ ID NO: 1637314 - DNA, 25 bp, Homo sapien
ttgtgggcgctgacataggagaggc

SEQ ID NO: 1637315 - DNA, 25 bp, Homo sapien
cagggctcccttctgtgattgaccc

SEQ ID NO: 1637316 - DNA, 25 bp, Homo sapien
gtctcgtggtgggaattgtgggcgc

SEQ ID NO: 1637317 - DNA, 25 bp, Homo sapien
cttgggacaggaacgggtgtatggg

SEQ ID NO: 1637318 - DNA, 25 bp, Homo sapien
tgggacaggaacgggtgtatgggaa

SEQ ID NO: 1637319 - DNA, 25 bp, Homo sapien
ttgggacaggaacgggtgtatggga

SEQ ID NO: 1637320 - DNA, 25 bp, Homo sapien
gcgagcggtagtgcgagagcaggca

SEQ ID NO: 1637321 - DNA, 25 bp, Homo sapien
ccagcgagcggtagtgcgagagcag

SEQ ID NO: 1637322 - DNA, 25 bp, Homo sapien
agcgagcggtagtgcgagagcaggc

SEQ ID NO: 1637323 - DNA, 25 bp, Homo sapien
ctccagcgagcggtagtgcgagagc

SEQ ID NO: 1637324 - DNA, 25 bp, Homo sapien
gtgcacaggacccacagccccgcgg

SEQ ID NO: 1637325 - DNA, 25 bp, Homo sapien
cactgcggcccagacactcggccgc

SEQ ID NO: 1637326 - DNA, 25 bp, Homo sapien
ggccactgcggcccagacactcggc

SEQ ID NO: 1637327 - DNA, 25 bp, Homo sapien
agccccgcggccactgcggcccaga

SEQ ID NO: 1637328 - DNA, 25 bp, Homo sapien
agtgcctcgacggtccatgctggct

SEQ ID NO: 1637329 - DNA, 25 bp, Homo sapien
gacttcaacccgaggttggcctgtg

SEQ ID NO: 1637330 - DNA, 25 bp, Homo sapien
tcccagtcgggtgtgaggacttcaa

SEQ ID NO: 1637331 - DNA, 25 bp, Homo sapien
catgctggcttttatgcgcagggct

SEQ ID NO: 1637332 - DNA, 25 bp, Homo sapien
ctttagggacaaacttcagcgagct

SEQ ID NO: 1637333 - DNA, 25 bp, Homo sapien
tagggacaaacttcagcgagctgct

SEQ ID NO: 1637334 - DNA, 25 bp, Homo sapien
gggacaaacttcagcgagctgctga

SEQ ID NO: 1637335 - DNA, 25 bp, Homo sapien
ttagggacaaacttcagcgagctgc

SEQ ID NO: 1637336 - DNA, 25 bp, Homo sapien
tcgggactgccgcagcttggggcca

SEQ ID NO: 1637337 - DNA, 25 bp, Homo sapien
gggactgccgcagcttggggccatc

SEQ ID NO: 1637338 - DNA, 25 bp, Homo sapien
cgggactgccgcagcttggggccat

SEQ ID NO: 1637339 - DNA, 25 bp, Homo sapien
tcaacgtgttgccacacttgcacga

SEQ ID NO: 1637340 - DNA, 25 bp, Homo sapien
gtgttgccacacttgcacgagacac

SEQ ID NO: 1637341 - DNA, 25 bp, Homo sapien
cgtgttgccacacttgcacgagaca

SEQ ID NO: 1637342 - DNA, 25 bp, Homo sapien
aacgtgttgccacacttgcacgaga

SEQ ID NO: 1637343 - DNA, 25 bp, Homo sapien
tgaacaccggccaggggaatgagta

SEQ ID NO: 1637344 - DNA, 25 bp, Homo sapien
ttcaggatgattgtgctctgggcgc

SEQ ID NO: 1637345 - DNA, 25 bp, Homo sapien
cacgctgtcagaacggatggtcttg

SEQ ID NO: 1637346 - DNA, 25 bp, Homo sapien
tgattgtgctctgggcgcttggcca

SEQ ID NO: 1637347 - DNA, 25 bp, Homo sapien
ggcacacatatagacgcctggctca

SEQ ID NO: 1637348 - DNA, 25 bp, Homo sapien
ttggcacacatatagacgcctggct

SEQ ID NO: 1637349 - DNA, 25 bp, Homo sapien
cacacatatagacgcctggctcaaa

SEQ ID NO: 1637350 - DNA, 25 bp, Homo sapien
acatatagacgcctggctcaaagtg

SEQ ID NO: 1637351 - DNA, 25 bp, Homo sapien
tccggccccagttagtcatcttccc

SEQ ID NO: 1637352 - DNA, 25 bp, Homo sapien
tatgctgcaatctaggtcaccctcc

SEQ ID NO: 1637353 - DNA, 25 bp, Homo sapien
cttcagtctcacttagagtccttat

SEQ ID NO: 1637354 - DNA, 25 bp, Homo sapien
cctctaagtctctcagaggataaaa

SEQ ID NO: 1637355 - DNA, 25 bp, Homo sapien
aagtttaattctgctgcggcggagg

SEQ ID NO: 1637356 - DNA, 25 bp, Homo sapien
tccagccagatacaagaaatgggcc

SEQ ID NO: 1637357 - DNA, 25 bp, Homo sapien
ccgccgcgggacagaataggatcta

SEQ ID NO: 1637358 - DNA, 25 bp, Homo sapien
cactacagagagacgacaagagggc

SEQ ID NO: 1637359 - DNA, 25 bp, Homo sapien
gaagtttcctcggatggcagcaggc

SEQ ID NO: 1637360 - DNA, 25 bp, Homo sapien
tagtccccgtcgaacgaatagcgct

SEQ ID NO: 1637361 - DNA, 25 bp, Homo sapien
cgcgggtaactgtggctctggaata

SEQ ID NO: 1637362 - DNA, 25 bp, Homo sapien
cccaggaactagagctagagtaggg

SEQ ID NO: 1637363 - DNA, 25 bp, Homo sapien
gcgcctgtgcctgcgccgttggtct

SEQ ID NO: 1637364 - DNA, 25 bp, Homo sapien
tgcctgcgccgttggtctgcgagca

SEQ ID NO: 1637365 - DNA, 25 bp, Homo sapien
tgtgccgcgcctgtgcctgcgccgt

SEQ ID NO: 1637366 - DNA, 25 bp, Homo sapien
ctcgtagtggtcctgggccggcagg

SEQ ID NO: 1637367 - DNA, 25 bp, Homo sapien
ccccagcggtggtgaactgtacaca

SEQ ID NO: 1637368 - DNA, 25 bp, Homo sapien
ccttatagcggatcatgagcagaac

SEQ ID NO: 1637369 - DNA, 25 bp, Homo sapien
tgagcagaacgatgaagacgaggac

SEQ ID NO: 1637370 - DNA, 25 bp, Homo sapien
catggtgccgcccaagaaatgggcc

SEQ ID NO: 1637371 - DNA, 25 bp, Homo sapien
ccttcatagcggagctgggaagatc

SEQ ID NO: 1637372 - DNA, 25 bp, Homo sapien
gctgggccaggatctaacctatctc

SEQ ID NO: 1637373 - DNA, 25 bp, Homo sapien
ccatctcccttccaagcagtgggtg

SEQ ID NO: 1637374 - DNA, 25 bp, Homo sapien
cctcatgtttgtaaggctgggccag

SEQ ID NO: 1637375 - DNA, 25 bp, Homo sapien
ggccaggactgcaactcatagtgta

SEQ ID NO: 1637376 - DNA, 25 bp, Homo sapien
actactgagatggagagacatggca

SEQ ID NO: 1637377 - DNA, 25 bp, Homo sapien
taaatgtcgctgtaggctaggcacg

SEQ ID NO: 1637378 - DNA, 25 bp, Homo sapien
tactatggaccacgacctactgggc

SEQ ID NO: 1637379 - DNA, 25 bp, Homo sapien
tataagcacgaaaaacagagacagt

SEQ ID NO: 1637380 - DNA, 25 bp, Homo sapien
gcccagccctggtcgggttcatgta

SEQ ID NO: 1637381 - DNA, 25 bp, Homo sapien
atctagaaccctggctgagcaagaa

SEQ ID NO: 1637382 - DNA, 25 bp, Homo sapien
taggtgctcagcgaatattttctat

SEQ ID NO: 1637383 - DNA, 25 bp, Homo sapien
ccggtcttggcgcacagcattgtca

SEQ ID NO: 1637384 - DNA, 25 bp, Homo sapien
gtctctaagtcgtcctcgcgggtca

SEQ ID NO: 1637385 - DNA, 25 bp, Homo sapien
ggtacatgcgtattccgggcacagg

SEQ ID NO: 1637386 - DNA, 25 bp, Homo sapien
tagacgagggagtcatcaacggaac

SEQ ID NO: 1637387 - DNA, 25 bp, Homo sapien
ggaaggcaggaggggtgggaggtga

SEQ ID NO: 1637388 - DNA, 25 bp, Homo sapien
aggcaggaggggtgggaggtgagac

SEQ ID NO: 1637389 - DNA, 25 bp, Homo sapien
cagtgggaaggcaggaggggtggga

SEQ ID NO: 1637390 - DNA, 25 bp, Homo sapien
ggtgcagtgggaaggcaggaggggt

SEQ ID NO: 1637391 - DNA, 25 bp, Homo sapien
gacctccagcaagtatctgaacctc

SEQ ID NO: 1637392 - DNA, 25 bp, Homo sapien
tccagcaagtatctgaacctctctg

SEQ ID NO: 1637393 - DNA, 25 bp, Homo sapien
tgtgacctccagcaagtatctgaac

SEQ ID NO: 1637394 - DNA, 25 bp, Homo sapien
gcaagtatctgaacctctctgattc

SEQ ID NO: 1637395 - DNA, 25 bp, Homo sapien
ctactctacaatgtactggaaaccc

SEQ ID NO: 1637396 - DNA, 25 bp, Homo sapien
tctacaatgtactggaaaccctggc

SEQ ID NO: 1637397 - DNA, 25 bp, Homo sapien
actctacaatgtactggaaaccctg

SEQ ID NO: 1637398 - DNA, 25 bp, Homo sapien
ctctacaatgtactggaaaccctgg

SEQ ID NO: 1637399 - DNA, 25 bp, Homo sapien
agggagtcagggcctgggccagcac

SEQ ID NO: 1637400 - DNA, 25 bp, Homo sapien
cttcagggagtcagggcctgggcca

SEQ ID NO: 1637401 - DNA, 25 bp, Homo sapien
tcagggagtcagggcctgggccagc

SEQ ID NO: 1637402 - DNA, 25 bp, Homo sapien
ctctcttcagggagtcagggcctgg

SEQ ID NO: 1637403 - DNA, 25 bp, Homo sapien
ggcccggccccgccgccgctgcctc

SEQ ID NO: 1637404 - DNA, 25 bp, Homo sapien
cccggccccgccgccgctgcctcgc

SEQ ID NO: 1637405 - DNA, 25 bp, Homo sapien
gcccggccccgccgccgctgcctcg

SEQ ID NO: 1637406 - DNA, 25 bp, Homo sapien
agcagcccctgagcatatgcactct

SEQ ID NO: 1637407 - DNA, 25 bp, Homo sapien
ttcatgatggtcttaaatgtaatct

SEQ ID NO: 1637408 - DNA, 25 bp, Homo sapien
gcagcccctgagcatatgcactctt

SEQ ID NO: 1637409 - DNA, 25 bp, Homo sapien
cagtcaccttgaggactcagacatc

SEQ ID NO: 1637410 - DNA, 25 bp, Homo sapien
actcagacatcaggaattcagtccc

SEQ ID NO: 1637411 - DNA, 25 bp, Homo sapien
gactcagacatcaggaattcagtcc

SEQ ID NO: 1637412 - DNA, 25 bp, Homo sapien
cccagtcaccttgaggactcagaca

SEQ ID NO: 1637413 - DNA, 25 bp, Homo sapien
gtcatcagtggtgcggatttcgaac

SEQ ID NO: 1637414 - DNA, 25 bp, Homo sapien
catcagtggtgcggatttcgaacac

SEQ ID NO: 1637415 - DNA, 25 bp, Homo sapien
aggtcatcagtggtgcggatttcga

SEQ ID NO: 1637416 - DNA, 25 bp, Homo sapien
tgaggtcatcagtggtgcggatttc

SEQ ID NO: 1637417 - DNA, 25 bp, Homo sapien
gatctactcaaacactgagacagtg

SEQ ID NO: 1637418 - DNA, 25 bp, Homo sapien
gaggtctcggcattatgatctactc

SEQ ID NO: 1637419 - DNA, 25 bp, Homo sapien
gtggctcacctgtaagagagcactt

SEQ ID NO: 1637420 - DNA, 25 bp, Homo sapien
aaaaccactgagacagtgaggactc

SEQ ID NO: 1637421 - DNA, 25 bp, Homo sapien
tctccctaacactctggagccccat

SEQ ID NO: 1637422 - DNA, 25 bp, Homo sapien
ctccctaacactctggagccccatc

SEQ ID NO: 1637423 - DNA, 25 bp, Homo sapien
cacctctccctaacactctggagcc

SEQ ID NO: 1637424 - DNA, 25 bp, Homo sapien
cctctccctaacactctggagcccc

SEQ ID NO: 1637425 - DNA, 25 bp, Homo sapien
catcatctgttgttccggcttgcag

SEQ ID NO: 1637426 - DNA, 25 bp, Homo sapien
tttactccctgcatacatcatctgt

SEQ ID NO: 1637427 - DNA, 25 bp, Homo sapien
tctgcaccagcctgtttttactccc

SEQ ID NO: 1637428 - DNA, 25 bp, Homo sapien
atcatctgttgttccggcttgcagc

SEQ ID NO: 1637429 - DNA, 25 bp, Homo sapien
acactcggccatcgtcatgcacgta

SEQ ID NO: 1637430 - DNA, 25 bp, Homo sapien
catgcacgtacttgtagctgtaaac

SEQ ID NO: 1637431 - DNA, 25 bp, Homo sapien
ggccatcgtcatgcacgtacttgta

SEQ ID NO: 1637432 - DNA, 25 bp, Homo sapien
acaaagggtaggacactcggccatc

SEQ ID NO: 1637433 - DNA, 25 bp, Homo sapien
aaataatcatagggccgggcgcagg

SEQ ID NO: 1637434 - DNA, 25 bp, Homo sapien
tcatagggccgggcgcaggactcac

SEQ ID NO: 1637435 - DNA, 25 bp, Homo sapien
taatcatagggccgggcgcaggact

SEQ ID NO: 1637436 - DNA, 25 bp, Homo sapien
aataatcatagggccgggcgcagga

SEQ ID NO: 1637437 - DNA, 25 bp, Homo sapien
caaagtccatgaatagggctggaac

SEQ ID NO: 1637438 - DNA, 25 bp, Homo sapien
ccacctcactcggccaaacacagag

SEQ ID NO: 1637439 - DNA, 25 bp, Homo sapien
ttcaaagtccatgaatagggctgga

SEQ ID NO: 1637440 - DNA, 25 bp, Homo sapien
cctcactcggccaaacacagagatt

SEQ ID NO: 1637441 - DNA, 25 bp, Homo sapien
tctctccggcaactccattttgagc

SEQ ID NO: 1637442 - DNA, 25 bp, Homo sapien
tctccggcaactccattttgagctc

SEQ ID NO: 1637443 - DNA, 25 bp, Homo sapien
ctctccggcaactccattttgagct

SEQ ID NO: 1637444 - DNA, 25 bp, Homo sapien
ccacggcacccagccgagatggggt

SEQ ID NO: 1637445 - DNA, 25 bp, Homo sapien
tcattattaagatcatcatcacctt

SEQ ID NO: 1637446 - DNA, 25 bp, Homo sapien
tctttcatttaaatgccaataaagc

SEQ ID NO: 1637447 - DNA, 25 bp, Homo sapien
ggctagctttttaacttatatggaa

SEQ ID NO: 1637448 - DNA, 25 bp, Homo sapien
tcggccaatctccaggtctttctac

SEQ ID NO: 1637449 - DNA, 25 bp, Homo sapien
tgtgctcggccaatctccaggtctt

SEQ ID NO: 1637450 - DNA, 25 bp, Homo sapien
tgctcggccaatctccaggtctttc

SEQ ID NO: 1637451 - DNA, 25 bp, Homo sapien
actgtgctcggccaatctccaggtc

SEQ ID NO: 1637452 - DNA, 25 bp, Homo sapien
cagtcccaatcaccccagcccatca

SEQ ID NO: 1637453 - DNA, 25 bp, Homo sapien
agtcccaatcaccccagcccatcac

SEQ ID NO: 1637454 - DNA, 25 bp, Homo sapien
cccagtcccaatcaccccagcccat

SEQ ID NO: 1637455 - DNA, 25 bp, Homo sapien
ctcccagtcccaatcaccccagccc

SEQ ID NO: 1637456 - DNA, 25 bp, Homo sapien
caccaccatctgccggtctttgtcc

SEQ ID NO: 1637457 - DNA, 25 bp, Homo sapien
caccatctgccggtctttgtccacc

SEQ ID NO: 1637458 - DNA, 25 bp, Homo sapien
ccaccatctgccggtctttgtccac

SEQ ID NO: 1637459 - DNA, 25 bp, Homo sapien
gcaccaccatctgccggtctttgtc

SEQ ID NO: 1637460 - DNA, 25 bp, Homo sapien
agggattagacactccccctgatcc

SEQ ID NO: 1637461 - DNA, 25 bp, Homo sapien
tggcacacagggattagacactccc

SEQ ID NO: 1637462 - DNA, 25 bp, Homo sapien
ggattagacactccccctgatccat

SEQ ID NO: 1637463 - DNA, 25 bp, Homo sapien
cccctgatccatgggggacacaagc

SEQ ID NO: 1637464 - DNA, 25 bp, Homo sapien
tgttagctctgggtctacctcgcac

SEQ ID NO: 1637465 - DNA, 25 bp, Homo sapien
attgtctgtctcttttcggaagcgg

SEQ ID NO: 1637466 - DNA, 25 bp, Homo sapien
ttagctctgggtctacctcgcacac

SEQ ID NO: 1637467 - DNA, 25 bp, Homo sapien
tttcggaagcggaatttcctcagct

SEQ ID NO: 1637468 - DNA, 25 bp, Homo sapien
cttcgcccaggtgtcctccaagccc

SEQ ID NO: 1637469 - DNA, 25 bp, Homo sapien
tcttttcttagttccgctgtcttct

SEQ ID NO: 1637470 - DNA, 25 bp, Homo sapien
agttccgctgtcttctaggcgtggg

SEQ ID NO: 1637471 - DNA, 25 bp, Homo sapien
ttcttagttccgctgtcttctaggc

SEQ ID NO: 1637472 - DNA, 25 bp, Homo sapien
ttagttccgctgtcttctaggcgtg

SEQ ID NO: 1637473 - DNA, 25 bp, Homo sapien
taaaggctagatctcgcctcgccat

SEQ ID NO: 1637474 - DNA, 25 bp, Homo sapien
aacagcgcgatgagaaagccgagcg

SEQ ID NO: 1637475 - DNA, 25 bp, Homo sapien
gaggaggcctggaacgcctgaatca

SEQ ID NO: 1637476 - DNA, 25 bp, Homo sapien
tgacagcctccttgatccttagcgc

SEQ ID NO: 1637477 - DNA, 25 bp, Homo sapien
gcggcggtggtcggtgcgggaggag

SEQ ID NO: 1637478 - DNA, 25 bp, Homo sapien
gcggtggtcggtgcgggaggaggga

SEQ ID NO: 1637479 - DNA, 25 bp, Homo sapien
ggcgcggtgacgcagcgcgacggcg

SEQ ID NO: 1637480 - DNA, 25 bp, Homo sapien
ggcggcggcggtggtcggtgcggga

SEQ ID NO: 1637481 - DNA, 25 bp, Homo sapien
caggaccccccgcacatccccctcg

SEQ ID NO: 1637482 - DNA, 25 bp, Homo sapien
gatcccccgtgtgcgccctgaaagg

SEQ ID NO: 1637483 - DNA, 25 bp, Homo sapien
ccctcggagagccccggaaagcctg

SEQ ID NO: 1637484 - DNA, 25 bp, Homo sapien
ggaaagcctgccgatcccccgtgtg

SEQ ID NO: 1637485 - DNA, 25 bp, Homo sapien
tgtctccagaaatagtcctcggagg

SEQ ID NO: 1637486 - DNA, 25 bp, Homo sapien
ttcatgggtcccagcagctttcctc

SEQ ID NO: 1637487 - DNA, 25 bp, Homo sapien
actcctcgtccattccacagcgtgg

SEQ ID NO: 1637488 - DNA, 25 bp, Homo sapien
atagtcctcggaggccactcctcgt

SEQ ID NO: 1637489 - DNA, 25 bp, Homo sapien
cacctggccagattaggcatgtttt

SEQ ID NO: 1637490 - DNA, 25 bp, Homo sapien
acacctggccagattaggcatgttt

SEQ ID NO: 1637491 - DNA, 25 bp, Homo sapien
gagttgggggcagccaggataaagg

SEQ ID NO: 1637492 - DNA, 25 bp, Homo sapien
cagccaggataaagggggcagggac

SEQ ID NO: 1637493 - DNA, 25 bp, Homo sapien
tgggggcagccaggataaagggggc

SEQ ID NO: 1637494 - DNA, 25 bp, Homo sapien
gggcagccaggataaagggggcagg

SEQ ID NO: 1637495 - DNA, 25 bp, Homo sapien
cctggctacccggatgaagaggttg

SEQ ID NO: 1637496 - DNA, 25 bp, Homo sapien
tcaggaagtctgttgccttaacgtc

SEQ ID NO: 1637497 - DNA, 25 bp, Homo sapien
tccccacattctgcaaggacaggag

SEQ ID NO: 1637498 - DNA, 25 bp, Homo sapien
gacaaactgaccactaccttgtgga

SEQ ID NO: 1637499 - DNA, 25 bp, Homo sapien
tctaagcctcaagccaagatccttg

SEQ ID NO: 1637500 - DNA, 25 bp, Homo sapien
gaattctgaccttcgttgtgctaca

SEQ ID NO: 1637501 - DNA, 25 bp, Homo sapien
tgtttaatggtctgggcttattttg

SEQ ID NO: 1637502 - DNA, 25 bp, Homo sapien
gggaaaccattggccctgcctctgg

SEQ ID NO: 1637503 - DNA, 25 bp, Homo sapien
tgctgctcacaataatggtgtctga

SEQ ID NO: 1637504 - DNA, 25 bp, Homo sapien
tgaaccagccctgaatgccctggga

SEQ ID NO: 1637505 - DNA, 25 bp, Homo sapien
gctttgctgctcacaataatggtgt

SEQ ID NO: 1637506 - DNA, 25 bp, Homo sapien
tggggaacaaacaagtgaaaggctc

SEQ ID NO: 1637507 - DNA, 25 bp, Homo sapien
tcatcatcagagtcggcatcgtcct

SEQ ID NO: 1637508 - DNA, 25 bp, Homo sapien
actgtcactatcagcttcactggaa

SEQ ID NO: 1637509 - DNA, 25 bp, Homo sapien
gtcggcatcgtcctcagaatcagca

SEQ ID NO: 1637510 - DNA, 25 bp, Homo sapien
ccattgctgccgctgtctgaatcat

SEQ ID NO: 1637511 - DNA, 25 bp, Homo sapien
accttcctcccgttcactctcgctg

SEQ ID NO: 1637512 - DNA, 25 bp, Homo sapien
cctcgctgctctcgtcctcaccact

SEQ ID NO: 1637513 - DNA, 25 bp, Homo sapien
actcttgtcactggcctcgtccctg

SEQ ID NO: 1637514 - DNA, 25 bp, Homo sapien
ctctttgtcacgggcagcccgggcc

SEQ ID NO: 1637515 - DNA, 25 bp, Homo sapien
agtggagagagatgaaacccacttt

SEQ ID NO: 1637516 - DNA, 25 bp, Homo sapien
gagtggagagagatgaaacccactt

SEQ ID NO: 1637517 - DNA, 25 bp, Homo sapien
tggagagagatgaaacccacttttc

SEQ ID NO: 1637518 - DNA, 25 bp, Homo sapien
gtggagagagatgaaacccactttt

SEQ ID NO: 1637519 - DNA, 25 bp, Homo sapien
cctccggttcgtggttttctagctg

SEQ ID NO: 1637520 - DNA, 25 bp, Homo sapien
ggcgttggtgcctgactgaacccca

SEQ ID NO: 1637521 - DNA, 25 bp, Homo sapien
tttgaccacaagcagggcgttggtg

SEQ ID NO: 1637522 - DNA, 25 bp, Homo sapien
ttggcccggcgcttactaaggcgga

SEQ ID NO: 1637523 - DNA, 25 bp, Homo sapien
cttctcattcatgtcccgatgtttg

SEQ ID NO: 1637524 - DNA, 25 bp, Homo sapien
aatcagataggagtgtgctgagtac

SEQ ID NO: 1637525 - DNA, 25 bp, Homo sapien
caggctaatcagataggagtgtgct

SEQ ID NO: 1637526 - DNA, 25 bp, Homo sapien
agatccaggctaatcagataggagt

SEQ ID NO: 1637527 - DNA, 25 bp, Homo sapien
gctaatcagataggagtgtgctgag

SEQ ID NO: 1637528 - DNA, 25 bp, Homo sapien
ctggtttccaactcattgtagtaaa

SEQ ID NO: 1637529 - DNA, 25 bp, Homo sapien
tggtttccaactcattgtagtaaac

SEQ ID NO: 1637530 - DNA, 25 bp, Homo sapien
gaagaagtagttttcctcatagccc

SEQ ID NO: 1637531 - DNA, 25 bp, Homo sapien
cacgttccagttgtactcccgagca

SEQ ID NO: 1637532 - DNA, 25 bp, Homo sapien
ctcatagcccttgctagctttgttc

SEQ ID NO: 1637533 - DNA, 25 bp, Homo sapien
ctcccgagcaattttgtagtcatac

SEQ ID NO: 1637534 - DNA, 25 bp, Homo sapien
ggcaggaaataggccacaaactggt

SEQ ID NO: 1637535 - DNA, 25 bp, Homo sapien
gtctcttctacaggcaggaaatagg

SEQ ID NO: 1637536 - DNA, 25 bp, Homo sapien
ccgctttcgtttcttcaacgtctct

SEQ ID NO: 1637537 - DNA, 25 bp, Homo sapien
gtttcttcaacgtctcttctacagg

SEQ ID NO: 1637538 - DNA, 25 bp, Homo sapien
ctaatcatggcctgagacatcatct

SEQ ID NO: 1637539 - DNA, 25 bp, Homo sapien
ctgggtctgagtcaaagatcacctg

SEQ ID NO: 1637540 - DNA, 25 bp, Homo sapien
agacatcatctccaacgcagctgca

SEQ ID NO: 1637541 - DNA, 25 bp, Homo sapien
cgcagctgcaccactcgtgtccttg

SEQ ID NO: 1637542 - DNA, 25 bp, Homo sapien
gaacaggcacaaataggctgtccct

SEQ ID NO: 1637543 - DNA, 25 bp, Homo sapien
actggggttagatgggaacaggcac

SEQ ID NO: 1637544 - DNA, 25 bp, Homo sapien
cacaaataggctgtccctttctacc

SEQ ID NO: 1637545 - DNA, 25 bp, Homo sapien
caggcacaaataggctgtccctttc

SEQ ID NO: 1637546 - DNA, 25 bp, Homo sapien
gcatgacctccaccggtgtgactcg

SEQ ID NO: 1637547 - DNA, 25 bp, Homo sapien
aggcatgacctccaccggtgtgact

SEQ ID NO: 1637548 - DNA, 25 bp, Homo sapien
agacaggcatgacctccaccggtgt

SEQ ID NO: 1637549 - DNA, 25 bp, Homo sapien
tgactcggggtttgctgtaatgctg

SEQ ID NO: 1637550 - DNA, 25 bp, Homo sapien
ctccccatcccagtccctcaattac

SEQ ID NO: 1637551 - DNA, 25 bp, Homo sapien
ccttgcctctccccatcccagtccc

SEQ ID NO: 1637552 - DNA, 25 bp, Homo sapien
gcctctccccatcccagtccctcaa

SEQ ID NO: 1637553 - DNA, 25 bp, Homo sapien
ctctccccatcccagtccctcaatt

SEQ ID NO: 1637554 - DNA, 25 bp, Homo sapien
ttcctcggtaaactgctgcttcaca

SEQ ID NO: 1637555 - DNA, 25 bp, Homo sapien
gatttctgggcatcctcaaaagtct

SEQ ID NO: 1637556 - DNA, 25 bp, Homo sapien
tctggctatccctgtctttgtatat

SEQ ID NO: 1637557 - DNA, 25 bp, Homo sapien
aaagtcttctcaatggctgtgatct

SEQ ID NO: 1637558 - DNA, 25 bp, Homo sapien
tactctgtctttcgcatccatggca

SEQ ID NO: 1637559 - DNA, 25 bp, Homo sapien
tggcaccaccttcgcgtgctgctgg

SEQ ID NO: 1637560 - DNA, 25 bp, Homo sapien
ttctcattggagatgccataacggt

SEQ ID NO: 1637561 - DNA, 25 bp, Homo sapien
gttgaactcagtggagatgtactct

SEQ ID NO: 1637562 - DNA, 25 bp, Homo sapien
gggcctgaatctcctcttccaaaag

SEQ ID NO: 1637563 - DNA, 25 bp, Homo sapien
gcctgaatctcctcttccaaaagtt

SEQ ID NO: 1637564 - DNA, 25 bp, Homo sapien
ttctcatcagctggatctagaagaa

SEQ ID NO: 1637565 - DNA, 25 bp, Homo sapien
cttccaaaagtttctcatcagctgg

SEQ ID NO: 1637566 - DNA, 25 bp, Homo sapien
ggggcaggaggaccatgagggaggc

SEQ ID NO: 1637567 - DNA, 25 bp, Homo sapien
gggggcaggaggaccatgagggagg

SEQ ID NO: 1637568 - DNA, 25 bp, Homo sapien
ggggggcaggaggaccatgagggag

SEQ ID NO: 1637569 - DNA, 25 bp, Homo sapien
cggggggcaggaggaccatgaggga

SEQ ID NO: 1637570 - DNA, 25 bp, Homo sapien
tgagcctttgctgacctagagcaga

SEQ ID NO: 1637571 - DNA, 25 bp, Homo sapien
ctgagcctttgctgacctagagcag

SEQ ID NO: 1637572 - DNA, 25 bp, Homo sapien
gagcctttgctgacctagagcagac

SEQ ID NO: 1637573 - DNA, 25 bp, Homo sapien
ttctccaaggaagtggctttgtact

SEQ ID NO: 1637574 - DNA, 25 bp, Homo sapien
ggaagtggctttgtactggacgaac

SEQ ID NO: 1637575 - DNA, 25 bp, Homo sapien
gattgatgagatcgatggtgacccc

SEQ ID NO: 1637576 - DNA, 25 bp, Homo sapien
gggtcgatgcggtaggtgtcaggat

SEQ ID NO: 1637577 - DNA, 25 bp, Homo sapien
tattgcagtacttgactcggcagac

SEQ ID NO: 1637578 - DNA, 25 bp, Homo sapien
acttgactcggcagaccactccaga

SEQ ID NO: 1637579 - DNA, 25 bp, Homo sapien
gcagtacttgactcggcagaccact

SEQ ID NO: 1637580 - DNA, 25 bp, Homo sapien
gaggctattgcagtacttgactcgg

SEQ ID NO: 1637581 - DNA, 25 bp, Homo sapien
tctcaggcagagtccggtgggaatt

SEQ ID NO: 1637582 - DNA, 25 bp, Homo sapien
ctcaggcagagtccggtgggaattg

SEQ ID NO: 1637583 - DNA, 25 bp, Homo sapien
ctctcaggcagagtccggtgggaat

SEQ ID NO: 1637584 - DNA, 25 bp, Homo sapien
caggcagagtccggtgggaattggg

SEQ ID NO: 1637585 - DNA, 25 bp, Homo sapien
ctgggcctgggtctggatggtgggc

SEQ ID NO: 1637586 - DNA, 25 bp, Homo sapien
ctgtggccatcctcccgctgggcct

SEQ ID NO: 1637587 - DNA, 25 bp, Homo sapien
cctgggtctggatggtgggcgccat

SEQ ID NO: 1637588 - DNA, 25 bp, Homo sapien
cccgctgggcctgggtctggatggt

SEQ ID NO: 1637589 - DNA, 25 bp, Homo sapien
aagacgctgaggacccaacgggtct

SEQ ID NO: 1637590 - DNA, 25 bp, Homo sapien
cagcgagactcaggtgaacgcgcag

SEQ ID NO: 1637591 - DNA, 25 bp, Homo sapien
ctccccgcggaaagtgggttgagat

SEQ ID NO: 1637592 - DNA, 25 bp, Homo sapien
cacacacggattggcgagcgtctgg

SEQ ID NO: 1637593 - DNA, 25 bp, Homo sapien
ttctatgcactctgtgaccagctgg

SEQ ID NO: 1637594 - DNA, 25 bp, Homo sapien
cttggttgggtagatactggtgtcc

SEQ ID NO: 1637595 - DNA, 25 bp, Homo sapien
tcttcagaaacagtcagtcagtcaa

SEQ ID NO: 1637596 - DNA, 25 bp, Homo sapien
tgatggacccatacagcgctttgac

SEQ ID NO: 1637597 - DNA, 25 bp, Homo sapien
gactgtagcccgtccaagttgacac

SEQ ID NO: 1637598 - DNA, 25 bp, Homo sapien
tgagcgcacacacaagactgaggga

SEQ ID NO: 1637599 - DNA, 25 bp, Homo sapien
tgtttgaataactgggactgtagcc

SEQ ID NO: 1637600 - DNA, 25 bp, Homo sapien
ggagatgtcggtccatgagcgcaca

SEQ ID NO: 1637601 - DNA, 25 bp, Homo sapien
gttacaccatggatctgactgccat

SEQ ID NO: 1637602 - DNA, 25 bp, Homo sapien
tcatggccaaccgttacaccatgga

SEQ ID NO: 1637603 - DNA, 25 bp, Homo sapien
aaccgttacaccatggatctgactg

SEQ ID NO: 1637604 - DNA, 25 bp, Homo sapien
tggccaaccgttacaccatggatct

SEQ ID NO: 1637605 - DNA, 25 bp, Homo sapien
ggaaacagtggtgcgccctgacttc

SEQ ID NO: 1637606 - DNA, 25 bp, Homo sapien
gacagagaaccctaaaaccgaagca

SEQ ID NO: 1637607 - DNA, 25 bp, Homo sapien
gaagcaatccggacttccaggtcaa

SEQ ID NO: 1637608 - DNA, 25 bp, Homo sapien
ttgtgaaactggagatcccgacgcg

SEQ ID NO: 1637609 - DNA, 25 bp, Homo sapien
tacaagacggaactctgtcacaagt

SEQ ID NO: 1637610 - DNA, 25 bp, Homo sapien
cgtgccatccgaccatggagggact

SEQ ID NO: 1637611 - DNA, 25 bp, Homo sapien
gagctatgtcggaccttctcagaga

SEQ ID NO: 1637612 - DNA, 25 bp, Homo sapien
gaagggccactcctatcagcgtctg

SEQ ID NO: 1637613 - DNA, 25 bp, Homo sapien
cccatcttcaatcgcatctctgttt

SEQ ID NO: 1637614 - DNA, 25 bp, Homo sapien
taatcaagtaatccccttttccaga

SEQ ID NO: 1637615 - DNA, 25 bp, Homo sapien
gtcagatcagctggatctcagcggg

SEQ ID NO: 1637616 - DNA, 25 bp, Homo sapien
tgagtgacaaagtgactgcccggtc

SEQ ID NO: 1637617 - DNA, 25 bp, Homo sapien
tggtaactggaacctctcctgaggg

SEQ ID NO: 1637618 - DNA, 25 bp, Homo sapien
tatgtgctgtgaataataggccttc

SEQ ID NO: 1637619 - DNA, 25 bp, Homo sapien
caagtagccaaagccgttgccaaac

SEQ ID NO: 1637620 - DNA, 25 bp, Homo sapien
ttaagggaggcaatgaaccctctcc

SEQ ID NO: 1637621 - DNA, 25 bp, Homo sapien
cctggccgttcacctgaaagggtgg

SEQ ID NO: 1637622 - DNA, 25 bp, Homo sapien
aggtgaggtcaccagatgggaaccg

SEQ ID NO: 1637623 - DNA, 25 bp, Homo sapien
ccttgacccagcttcgggcgggtgc

SEQ ID NO: 1637624 - DNA, 25 bp, Homo sapien
gtgaggtcaccagatgggaaccggg

SEQ ID NO: 1637625 - DNA, 25 bp, Homo sapien
gtttattagatgtgtaagtttataa

SEQ ID NO: 1637626 - DNA, 25 bp, Homo sapien
ggtttattagatgtgtaagtttata

SEQ ID NO: 1637627 - DNA, 25 bp, Homo sapien
tggtttattagatgtgtaagtttat

SEQ ID NO: 1637628 - DNA, 25 bp, Homo sapien
tccgctcgcactgtcatataagtac

SEQ ID NO: 1637629 - DNA, 25 bp, Homo sapien
ccgctcgcactgtcatataagtacc

SEQ ID NO: 1637630 - DNA, 25 bp, Homo sapien
cgctcgcactgtcatataagtaccg

SEQ ID NO: 1637631 - DNA, 25 bp, Homo sapien
ctccgctcgcactgtcatataagta

SEQ ID NO: 1637632 - DNA, 25 bp, Homo sapien
cagtggttcatagccacgtgacctc

SEQ ID NO: 1637633 - DNA, 25 bp, Homo sapien
gggtcttcttcagtggttcatagcc

SEQ ID NO: 1637634 - DNA, 25 bp, Homo sapien
gaccaataggagacagtgcattgcc

SEQ ID NO: 1637635 - DNA, 25 bp, Homo sapien
agggccccgccttgtgttatatatg

SEQ ID NO: 1637636 - DNA, 25 bp, Homo sapien
gtctggttaaacatccaataccaac

SEQ ID NO: 1637637 - DNA, 25 bp, Homo sapien
atccaataccaacacataaggccac

SEQ ID NO: 1637638 - DNA, 25 bp, Homo sapien
catccaataccaacacataaggcca

SEQ ID NO: 1637639 - DNA, 25 bp, Homo sapien
ctggttaaacatccaataccaacac

SEQ ID NO: 1637640 - DNA, 25 bp, Homo sapien
acaagtgagttttgagtcacgatgg

SEQ ID NO: 1637641 - DNA, 25 bp, Homo sapien
caagtgagttttgagtcacgatggg

SEQ ID NO: 1637642 - DNA, 25 bp, Homo sapien
aagtgagttttgagtcacgatgggc

SEQ ID NO: 1637643 - DNA, 25 bp, Homo sapien
tttggactcgcagcgacgagggtca

SEQ ID NO: 1637644 - DNA, 25 bp, Homo sapien
tttttggactcgcagcgacgagggt

SEQ ID NO: 1637645 - DNA, 25 bp, Homo sapien
ttttggactcgcagcgacgagggtc

SEQ ID NO: 1637646 - DNA, 25 bp, Homo sapien
ttggactcgcagcgacgagggtcag

SEQ ID NO: 1637647 - DNA, 25 bp, Homo sapien
ccggtcatactggatgaggatgtct

SEQ ID NO: 1637648 - DNA, 25 bp, Homo sapien
cggtcatactggatgaggatgtctt

SEQ ID NO: 1637649 - DNA, 25 bp, Homo sapien
ctaccagcagggtccggtcatactg

SEQ ID NO: 1637650 - DNA, 25 bp, Homo sapien
agcagggtccggtcatactggatga

SEQ ID NO: 1637651 - DNA, 25 bp, Homo sapien
aagagcagggacgaggatttagata

SEQ ID NO: 1637652 - DNA, 25 bp, Homo sapien
gacgaggatttagataatcacacag

SEQ ID NO: 1637653 - DNA, 25 bp, Homo sapien
agataatcacacagagtccttgact

SEQ ID NO: 1637654 - DNA, 25 bp, Homo sapien
acagagtccttgacttgatccccac

SEQ ID NO: 1637655 - DNA, 25 bp, Homo sapien
gtaataggccaccagggctttggag

SEQ ID NO: 1637656 - DNA, 25 bp, Homo sapien
ctggtaataggccaccagggctttg

SEQ ID NO: 1637657 - DNA, 25 bp, Homo sapien
atttctggtaataggccaccagggc

SEQ ID NO: 1637658 - DNA, 25 bp, Homo sapien
tttctggtaataggccaccagggct

SEQ ID NO: 1637659 - DNA, 25 bp, Homo sapien
tcctccatgcgcccagttcctggga

SEQ ID NO: 1637660 - DNA, 25 bp, Homo sapien
ccacctcctccatgcgcccagttcc

SEQ ID NO: 1637661 - DNA, 25 bp, Homo sapien
aaagggtacaggagcgctgtgaagg

SEQ ID NO: 1637662 - DNA, 25 bp, Homo sapien
gacacacaattaaagggtacaggag

SEQ ID NO: 1637663 - DNA, 25 bp, Homo sapien
tacacggacacggatgtctacacca

SEQ ID NO: 1637664 - DNA, 25 bp, Homo sapien
accaccctttacacggacacggatg

SEQ ID NO: 1637665 - DNA, 25 bp, Homo sapien
accctttacacggacacggatgtct

SEQ ID NO: 1637666 - DNA, 25 bp, Homo sapien
cctttacacggacacggatgtctac

SEQ ID NO: 1637667 - DNA, 25 bp, Homo sapien
ggtaaagggaacaagatctgggctc

SEQ ID NO: 1637668 - DNA, 25 bp, Homo sapien
gatttaagttacatgctgggcagct

SEQ ID NO: 1637669 - DNA, 25 bp, Homo sapien
ggctgaacagtaaggagcattccaa

SEQ ID NO: 1637670 - DNA, 25 bp, Homo sapien
tcaagtagtcgaaagccatccctgg

SEQ ID NO: 1637671 - DNA, 25 bp, Homo sapien
aatatttctcaaatgagccaggcgt

SEQ ID NO: 1637672 - DNA, 25 bp, Homo sapien
tgcctgtagtcttggcaaccgaaag

SEQ ID NO: 1637673 - DNA, 25 bp, Homo sapien
aaattcggccgcacacggtggctga

SEQ ID NO: 1637674 - DNA, 25 bp, Homo sapien
taaacatcccgttgctgatgccagc

SEQ ID NO: 1637675 - DNA, 25 bp, Homo sapien
gtactgtagcgtgcgcggctcaatc

SEQ ID NO: 1637676 - DNA, 25 bp, Homo sapien
cttgtactgtagcgtgcgcggctca

SEQ ID NO: 1637677 - DNA, 25 bp, Homo sapien
ggctcaatcatctccaggggccgcc

SEQ ID NO: 1637678 - DNA, 25 bp, Homo sapien
cggctcaatcatctccaggggccgc

SEQ ID NO: 1637679 - DNA, 25 bp, Homo sapien
cttgatgagaccattgccgcgtttg

SEQ ID NO: 1637680 - DNA, 25 bp, Homo sapien
gatgagaccattgccgcgtttgcag

SEQ ID NO: 1637681 - DNA, 25 bp, Homo sapien
cattgccgcgtttgcagtgcgccac

SEQ ID NO: 1637682 - DNA, 25 bp, Homo sapien
gaccattgccgcgtttgcagtgcgc

SEQ ID NO: 1637683 - DNA, 25 bp, Homo sapien
tgcgtccgaagacctgcacagactg

SEQ ID NO: 1637684 - DNA, 25 bp, Homo sapien
cttgcgtccgaagacctgcacagac

SEQ ID NO: 1637685 - DNA, 25 bp, Homo sapien
gcacagactgcagcgggcccttgga

SEQ ID NO: 1637686 - DNA, 25 bp, Homo sapien
ctgcacagactgcagcgggcccttg

SEQ ID NO: 1637687 - DNA, 25 bp, Homo sapien
cgcgcggcgccgcaaccggaaaagg

SEQ ID NO: 1637688 - DNA, 25 bp, Homo sapien
gccaccctggccgcttttcagggtc

SEQ ID NO: 1637689 - DNA, 25 bp, Homo sapien
gcgcggcgccgcaaccggaaaagga

SEQ ID NO: 1637690 - DNA, 25 bp, Homo sapien
tggccgcttttcagggtctgcgcag

SEQ ID NO: 1637691 - DNA, 25 bp, Homo sapien
tctggcagtacagggtctgggatcc

SEQ ID NO: 1637692 - DNA, 25 bp, Homo sapien
atccagggttcaaaagggcgtcgtg

SEQ ID NO: 1637693 - DNA, 25 bp, Homo sapien
ggcgtcgtggtgcaccttgccaaag

SEQ ID NO: 1637694 - DNA, 25 bp, Homo sapien
cgtggtgcaccttgccaaagagggt

SEQ ID NO: 1637695 - DNA, 25 bp, Homo sapien
cagacacagataaaggctagcacag

SEQ ID NO: 1637696 - DNA, 25 bp, Homo sapien
tcaaatattcacttgcagacacaga

SEQ ID NO: 1637697 - DNA, 25 bp, Homo sapien
tccaatgaagacacaggcagatgag

SEQ ID NO: 1637698 - DNA, 25 bp, Homo sapien
gtcgccactgcaccctaggctgggc

SEQ ID NO: 1637699 - DNA, 25 bp, Homo sapien
gaccatctatgggaactgctgtgtt

SEQ ID NO: 1637700 - DNA, 25 bp, Homo sapien
aaagtaaggtgcgatctgaagtctc

SEQ ID NO: 1637701 - DNA, 25 bp, Homo sapien
caggccttacggttgggattatcca

SEQ ID NO: 1637702 - DNA, 25 bp, Homo sapien
tggagttactacagggagcttgtgc

SEQ ID NO: 1637703 - DNA, 25 bp, Homo sapien
tctcaccctcctttagatactcttc

SEQ ID NO: 1637704 - DNA, 25 bp, Homo sapien
tcatccctataccttgagaacaggg

SEQ ID NO: 1637705 - DNA, 25 bp, Homo sapien
gtattctctaacctcatccctatac

SEQ ID NO: 1637706 - DNA, 25 bp, Homo sapien
agaagtgcacaggtattctctaacc

SEQ ID NO: 1637707 - DNA, 25 bp, Homo sapien
tggaatcatgctggacatctcctga

SEQ ID NO: 1637708 - DNA, 25 bp, Homo sapien
tgttttggagattcagtcatgggtg

SEQ ID NO: 1637709 - DNA, 25 bp, Homo sapien
tgttactattctgttgcatggatgg

SEQ ID NO: 1637710 - DNA, 25 bp, Homo sapien
ccagacatccactaatctgcattgt

SEQ ID NO: 1637711 - DNA, 25 bp, Homo sapien
agaaattttaccaatgtgtcctgag

SEQ ID NO: 1637712 - DNA, 25 bp, Homo sapien
tgcagcagtgtctgtagcgatttaa

SEQ ID NO: 1637713 - DNA, 25 bp, Homo sapien
tgctcttttgtcacagcaacctcca

SEQ ID NO: 1637714 - DNA, 25 bp, Homo sapien
cccggcccaggtgtgtcatacttat

SEQ ID NO: 1637715 - DNA, 25 bp, Homo sapien
tacaggcgaaggttcatttttcatc

SEQ ID NO: 1637716 - DNA, 25 bp, Homo sapien
tttaaatgaacttaggaagcctgga

SEQ ID NO: 1637717 - DNA, 25 bp, Homo sapien
ttagcctttggagtagcagggacca

SEQ ID NO: 1637718 - DNA, 25 bp, Homo sapien
tgccatcactcgtcagccgtcatta

SEQ ID NO: 1637719 - DNA, 25 bp, Homo sapien
tgagcgctctgcgaatattcactgg

SEQ ID NO: 1637720 - DNA, 25 bp, Homo sapien
aagactgtggcttggcacccttggg

SEQ ID NO: 1637721 - DNA, 25 bp, Homo sapien
gatgagcagttactgatgccacaga

SEQ ID NO: 1637722 - DNA, 25 bp, Homo sapien
acctgcctgcttttgaatcctgtca

SEQ ID NO: 1637723 - DNA, 25 bp, Homo sapien
cttgcttttgttgtaccgtctttca

SEQ ID NO: 1637724 - DNA, 25 bp, Homo sapien
gcttttgttgtaccgtctttcaata

SEQ ID NO: 1637725 - DNA, 25 bp, Homo sapien
tgcttttgttgtaccgtctttcaat

SEQ ID NO: 1637726 - DNA, 25 bp, Homo sapien
agcttgcttttgttgtaccgtcttt

SEQ ID NO: 1637727 - DNA, 25 bp, Homo sapien
ccaaaattctgggagtacggtcgtg

SEQ ID NO: 1637728 - DNA, 25 bp, Homo sapien
tgtgggggtcgatgccatcatccaa

SEQ ID NO: 1637729 - DNA, 25 bp, Homo sapien
aaattctgggagtacggtcgtgagc

SEQ ID NO: 1637730 - DNA, 25 bp, Homo sapien
gtgggggtcgatgccatcatccaaa

SEQ ID NO: 1637731 - DNA, 25 bp, Homo sapien
tctgaatcgggacccagctcgagta

SEQ ID NO: 1637732 - DNA, 25 bp, Homo sapien
tttcatgtctgaatcgggacccagc

SEQ ID NO: 1637733 - DNA, 25 bp, Homo sapien
acccagctcgagtagtagttgtgga

SEQ ID NO: 1637734 - DNA, 25 bp, Homo sapien
tcgggacccagctcgagtagtagtt

SEQ ID NO: 1637735 - DNA, 25 bp, Homo sapien
gacttgggccaccacttgtccaata

SEQ ID NO: 1637736 - DNA, 25 bp, Homo sapien
ggccgagctctccaagtccaacaag

SEQ ID NO: 1637737 - DNA, 25 bp, Homo sapien
tgctgtgtcccgagagtctccagat

SEQ ID NO: 1637738 - DNA, 25 bp, Homo sapien
aactctgggcctcctcaaactcagt

SEQ ID NO: 1637739 - DNA, 25 bp, Homo sapien
gcattgatgtgatcttagcttacaa

SEQ ID NO: 1637740 - DNA, 25 bp, Homo sapien
gatgtgatcttagcttacaacagcc

SEQ ID NO: 1637741 - DNA, 25 bp, Homo sapien
gatcttagcttacaacagccttgac

SEQ ID NO: 1637742 - DNA, 25 bp, Homo sapien
tgtgatcttagcttacaacagcctt

SEQ ID NO: 1637743 - DNA, 25 bp, Homo sapien
atgcctggccccacataaagtttct

SEQ ID NO: 1637744 - DNA, 25 bp, Homo sapien
tggccccacataaagtttctgagca

SEQ ID NO: 1637745 - DNA, 25 bp, Homo sapien
ccacataaagtttctgagcacttga

SEQ ID NO: 1637746 - DNA, 25 bp, Homo sapien
gcctggccccacataaagtttctga

SEQ ID NO: 1637747 - DNA, 25 bp, Homo sapien
tatgtatatattcccaggtgcttgc

SEQ ID NO: 1637748 - DNA, 25 bp, Homo sapien
aaatgaagcactcccatgtaggcac

SEQ ID NO: 1637749 - DNA, 25 bp, Homo sapien
taaaataataactgggcaggcacag

SEQ ID NO: 1637750 - DNA, 25 bp, Homo sapien
ggtgcttgctgttaccaggccatat

SEQ ID NO: 1637751 - DNA, 25 bp, Homo sapien
agcgcggtgtgagttcccagtgcac

SEQ ID NO: 1637752 - DNA, 25 bp, Homo sapien
gcagttggcccgattccttgatgca

SEQ ID NO: 1637753 - DNA, 25 bp, Homo sapien
tacccatctccgtggtgcagttggc

SEQ ID NO: 1637754 - DNA, 25 bp, Homo sapien
gatgcactcaacaacctaaggacgc

SEQ ID NO: 1637755 - DNA, 25 bp, Homo sapien
gtagattggaatcgccctgaagatg

SEQ ID NO: 1637756 - DNA, 25 bp, Homo sapien
aagggatttatgtcatatctgctcc

SEQ ID NO: 1637757 - DNA, 25 bp, Homo sapien
cctgaagatgtagaccctcaaggga

SEQ ID NO: 1637758 - DNA, 25 bp, Homo sapien
agctcgtccgtagattggaatcgcc

SEQ ID NO: 1637759 - DNA, 25 bp, Homo sapien
tccctggctgaatggaaggtaaact

SEQ ID NO: 1637760 - DNA, 25 bp, Homo sapien
caaagctgtcagattagccaggccg

SEQ ID NO: 1637761 - DNA, 25 bp, Homo sapien
tggcgagaggcacaactatccctgg

SEQ ID NO: 1637762 - DNA, 25 bp, Homo sapien
tctgcatggcaaaaggatcacagca

SEQ ID NO: 1637763 - DNA, 25 bp, Homo sapien
cattatactaagataaggctttaca

SEQ ID NO: 1637764 - DNA, 25 bp, Homo sapien
caacccagatgtccaaaaggtgtct

SEQ ID NO: 1637765 - DNA, 25 bp, Homo sapien
tatggaaaacgagtaaacacgtata

SEQ ID NO: 1637766 - DNA, 25 bp, Homo sapien
ccaaaaggtgtctagttcattatac

SEQ ID NO: 1637767 - DNA, 25 bp, Homo sapien
tggcacctgcatggaatagttctga

SEQ ID NO: 1637768 - DNA, 25 bp, Homo sapien
tatgcattagaaaacctgaaaggcg

SEQ ID NO: 1637769 - DNA, 25 bp, Homo sapien
tgttgagtcttgtgaatagaataca

SEQ ID NO: 1637770 - DNA, 25 bp, Homo sapien
cctgaaaggcgtacagtgaaaaagc

SEQ ID NO: 1637771 - DNA, 25 bp, Homo sapien
cactaggatttgttgacatgaccac

SEQ ID NO: 1637772 - DNA, 25 bp, Homo sapien
accagcctagggatgcgagactccc

SEQ ID NO: 1637773 - DNA, 25 bp, Homo sapien
tcgctcgggtccaagcgttcgggac

SEQ ID NO: 1637774 - DNA, 25 bp, Homo sapien
ttgaaaacaagattcggccgggcgc

SEQ ID NO: 1637775 - DNA, 25 bp, Homo sapien
ggcagtcagcgctaccgtaaacgcg

SEQ ID NO: 1637776 - DNA, 25 bp, Homo sapien
taccgtaaacgcgacagcagcgaag

SEQ ID NO: 1637777 - DNA, 25 bp, Homo sapien
ggcctcggaggcagtcagcgctacc

SEQ ID NO: 1637778 - DNA, 25 bp, Homo sapien
gacagcagcgaagtccatctgcggg

SEQ ID NO: 1637779 - DNA, 25 bp, Homo sapien
tctaagaaagcgagctgctgatggg

SEQ ID NO: 1637780 - DNA, 25 bp, Homo sapien
tctgaccggaatcatggagctacca

SEQ ID NO: 1637781 - DNA, 25 bp, Homo sapien
atactcgcggaacaacagctgccgg

SEQ ID NO: 1637782 - DNA, 25 bp, Homo sapien
tcgaaatcccgtagtaatctgaccg

SEQ ID NO: 1637783 - DNA, 25 bp, Homo sapien
ctccaacagcccagtcggctccgcc

SEQ ID NO: 1637784 - DNA, 25 bp, Homo sapien
tccaacagcccagtcggctccgcca

SEQ ID NO: 1637785 - DNA, 25 bp, Homo sapien
ccaacagcccagtcggctccgccat

SEQ ID NO: 1637786 - DNA, 25 bp, Homo sapien
tctacggagactggaataacggcac

SEQ ID NO: 1637787 - DNA, 25 bp, Homo sapien
gagactggaataacggcactgcact

SEQ ID NO: 1637788 - DNA, 25 bp, Homo sapien
ataacggcactgcactgctgtatgc

SEQ ID NO: 1637789 - DNA, 25 bp, Homo sapien
agcgtttctacggagactggaataa

SEQ ID NO: 1637790 - DNA, 25 bp, Homo sapien
tgtgaaaaaatattcgtaactcata

SEQ ID NO: 1637791 - DNA, 25 bp, Homo sapien
aaaatctaatgacaacttgtgaaaa

SEQ ID NO: 1637792 - DNA, 25 bp, Homo sapien
caaaaattaccatggccaaaggctt

SEQ ID NO: 1637793 - DNA, 25 bp, Homo sapien
aatattcgtaactcatatcccaagc

SEQ ID NO: 1637794 - DNA, 25 bp, Homo sapien
tataatatgccgacttctgtgaaga

SEQ ID NO: 1637795 - DNA, 25 bp, Homo sapien
tatgtgcctgtgtacacgtaaggaa

SEQ ID NO: 1637796 - DNA, 25 bp, Homo sapien
tattagaggtcatcgttggtactgg

SEQ ID NO: 1637797 - DNA, 25 bp, Homo sapien
taaatgtccgtcaatatatccctgg

SEQ ID NO: 1637798 - DNA, 25 bp, Homo sapien
cagagggttgataacttcagaggca

SEQ ID NO: 1637799 - DNA, 25 bp, Homo sapien
ttcaagctcttgtattctgccggga

SEQ ID NO: 1637800 - DNA, 25 bp, Homo sapien
tgatattcggcatcaaacgctgctt

SEQ ID NO: 1637801 - DNA, 25 bp, Homo sapien
tgatgcctaaaacgctaagtgggtg

SEQ ID NO: 1637802 - DNA, 25 bp, Homo sapien
gggcttccctggccgccgccgccgc

SEQ ID NO: 1637803 - DNA, 25 bp, Homo sapien
ggcttccctggccgccgccgccgcc

SEQ ID NO: 1637804 - DNA, 25 bp, Homo sapien
cgggcttccctggccgccgccgccg

SEQ ID NO: 1637805 - DNA, 25 bp, Homo sapien
cgcggctgccctggccaacgccgcc

SEQ ID NO: 1637806 - DNA, 25 bp, Homo sapien
gccgcggctgccctggccaacgccg

SEQ ID NO: 1637807 - DNA, 25 bp, Homo sapien
gccaccggggctcccctggctgccg

SEQ ID NO: 1637808 - DNA, 25 bp, Homo sapien
gccgctgccaccggggctcccctgg

SEQ ID NO: 1637809 - DNA, 25 bp, Homo sapien
cgaccttccctggccgccggcaccg

SEQ ID NO: 1637810 - DNA, 25 bp, Homo sapien
gcaccgggcctcccctggccgccgc

SEQ ID NO: 1637811 - DNA, 25 bp, Homo sapien
tccctggccgccggcaccgggcctc

SEQ ID NO: 1637812 - DNA, 25 bp, Homo sapien
ctggccgccgccatcgcgccttccc

SEQ ID NO: 1637813 - DNA, 25 bp, Homo sapien
gcctcctcaggctgtgccggggccg

SEQ ID NO: 1637814 - DNA, 25 bp, Homo sapien
tcctcaggctgtgccggggccggct

SEQ ID NO: 1637815 - DNA, 25 bp, Homo sapien
gccggctcccgcctcccgcggccta

SEQ ID NO: 1637816 - DNA, 25 bp, Homo sapien
ggcctcctcaggctgtgccggggcc

SEQ ID NO: 1637817 - DNA, 25 bp, Homo sapien
tgctgtctgcgggcagcttggacat

SEQ ID NO: 1637818 - DNA, 25 bp, Homo sapien
ccattcgccgcgcctgtctgcggga

SEQ ID NO: 1637819 - DNA, 25 bp, Homo sapien
gggacgtctctgtcaccattcgccg

SEQ ID NO: 1637820 - DNA, 25 bp, Homo sapien
gcctgcgggacgtctctgtcaccat

SEQ ID NO: 1637821 - DNA, 25 bp, Homo sapien
aataactggacagagcgatgcccgg

SEQ ID NO: 1637822 - DNA, 25 bp, Homo sapien
gtgcgtgggcgctatgcgcgctgta

SEQ ID NO: 1637823 - DNA, 25 bp, Homo sapien
taactggacagagcgatgcccggcg

SEQ ID NO: 1637824 - DNA, 25 bp, Homo sapien
gcggacaccccagtgcgcgtgcgtg

SEQ ID NO: 1637825 - DNA, 25 bp, Homo sapien
ccaaacttcacaggattttggcttt

SEQ ID NO: 1637826 - DNA, 25 bp, Homo sapien
caccaaacttcacaggattttggct

SEQ ID NO: 1637827 - DNA, 25 bp, Homo sapien
aaacttcacaggattttggcttttg

SEQ ID NO: 1637828 - DNA, 25 bp, Homo sapien
tcaccaaacttcacaggattttggc

SEQ ID NO: 1637829 - DNA, 25 bp, Homo sapien
acagcagaaagacgagtatagggtg

SEQ ID NO: 1637830 - DNA, 25 bp, Homo sapien
cagaaagacgagtatagggtggtgg

SEQ ID NO: 1637831 - DNA, 25 bp, Homo sapien
tgacagcagaaagacgagtataggg

SEQ ID NO: 1637832 - DNA, 25 bp, Homo sapien
agcagaaagacgagtatagggtggt

SEQ ID NO: 1637833 - DNA, 25 bp, Homo sapien
cagtgaggtcaggaagacatcccac

SEQ ID NO: 1637834 - DNA, 25 bp, Homo sapien
gacacacagtgaggtcaggaagaca

SEQ ID NO: 1637835 - DNA, 25 bp, Homo sapien
tcaccctaaatcacagacacacagt

SEQ ID NO: 1637836 - DNA, 25 bp, Homo sapien
cacacagtgaggtcaggaagacatc

SEQ ID NO: 1637837 - DNA, 25 bp, Homo sapien
tcttcacgtaacatagtgggagttg

SEQ ID NO: 1637838 - DNA, 25 bp, Homo sapien
gttgataggcaaagctgtaacactg

SEQ ID NO: 1637839 - DNA, 25 bp, Homo sapien
ttgcaccatcttcacgtaacatagt

SEQ ID NO: 1637840 - DNA, 25 bp, Homo sapien
catagtgggagttgataggcaaagc

SEQ ID NO: 1637841 - DNA, 25 bp, Homo sapien
cggaagttccgccactctgtgtcac

SEQ ID NO: 1637842 - DNA, 25 bp, Homo sapien
caatgtttcctctcattagtccgga

SEQ ID NO: 1637843 - DNA, 25 bp, Homo sapien
gccatactctgtgtcatgaacttga

SEQ ID NO: 1637844 - DNA, 25 bp, Homo sapien
tgtcatgaacttgaatccttgcatc

SEQ ID NO: 1637845 - DNA, 25 bp, Homo sapien
tgtgcaggtcaaattgtttgccatc

SEQ ID NO: 1637846 - DNA, 25 bp, Homo sapien
cagctctgagatgtgcaggtcaaat

SEQ ID NO: 1637847 - DNA, 25 bp, Homo sapien
ctgagatgtgcaggtcaaattgttt

SEQ ID NO: 1637848 - DNA, 25 bp, Homo sapien
tggtactcattgtccagctctgaga

SEQ ID NO: 1637849 - DNA, 25 bp, Homo sapien
cttcttatctatcccggtgtggaaa

SEQ ID NO: 1637850 - DNA, 25 bp, Homo sapien
aattgccaaagtacactccaaagtg

SEQ ID NO: 1637851 - DNA, 25 bp, Homo sapien
ccaattgccaaagtacactccaaag

SEQ ID NO: 1637852 - DNA, 25 bp, Homo sapien
acccaattgccaaagtacactccaa

SEQ ID NO: 1637853 - DNA, 25 bp, Homo sapien
acagacagaagccttcccggtgaca

SEQ ID NO: 1637854 - DNA, 25 bp, Homo sapien
gacagaagccttcccggtgacactg

SEQ ID NO: 1637855 - DNA, 25 bp, Homo sapien
gccttcccggtgacactgcaggcct

SEQ ID NO: 1637856 - DNA, 25 bp, Homo sapien
ccttcccggtgacactgcaggcctc

SEQ ID NO: 1637857 - DNA, 25 bp, Homo sapien
ctggcctggccccagtagttgttca

SEQ ID NO: 1637858 - DNA, 25 bp, Homo sapien
ctggccccagtagttgttcaggacc

SEQ ID NO: 1637859 - DNA, 25 bp, Homo sapien
ctggccttcttgggctctgagagca

SEQ ID NO: 1637860 - DNA, 25 bp, Homo sapien
gccccagtagttgttcaggacccat

SEQ ID NO: 1637861 - DNA, 25 bp, Homo sapien
tctgctaatgttgtccttgatgccc

SEQ ID NO: 1637862 - DNA, 25 bp, Homo sapien
ggactctaaagccttgccttctgaa

SEQ ID NO: 1637863 - DNA, 25 bp, Homo sapien
cctctaaggtgctgtccgtggtact

SEQ ID NO: 1637864 - DNA, 25 bp, Homo sapien
tgatgcccaagtcccctaaagctgt

SEQ ID NO: 1637865 - DNA, 25 bp, Homo sapien
tgaaaaatgacctcacatgccctaa

SEQ ID NO: 1637866 - DNA, 25 bp, Homo sapien
cctaaagcaatgttgacgcaaactc

SEQ ID NO: 1637867 - DNA, 25 bp, Homo sapien
gaaaaatgacctcacatgccctaaa

SEQ ID NO: 1637868 - DNA, 25 bp, Homo sapien
ccattgacagccatgtgtgtagggc

SEQ ID NO: 1637869 - DNA, 25 bp, Homo sapien
ccattgtctggccattgacagccat

SEQ ID NO: 1637870 - DNA, 25 bp, Homo sapien
tgagtgcactttggccattgtctgg

SEQ ID NO: 1637871 - DNA, 25 bp, Homo sapien
ctgagtgcactttggccattgtctg

SEQ ID NO: 1637872 - DNA, 25 bp, Homo sapien
catcaaaacgctctgcttgcgccat

SEQ ID NO: 1637873 - DNA, 25 bp, Homo sapien
tgggcttttcatcaaaacgctctgc

SEQ ID NO: 1637874 - DNA, 25 bp, Homo sapien
tgctttgggcttttcatcaaaacgc

SEQ ID NO: 1637875 - DNA, 25 bp, Homo sapien
tcccataactagttttgctttgggc

SEQ ID NO: 1637876 - DNA, 25 bp, Homo sapien
cttgatgcctaagtccaccaaagct

SEQ ID NO: 1637877 - DNA, 25 bp, Homo sapien
tccttgatgcctaagtccaccaaag

SEQ ID NO: 1637878 - DNA, 25 bp, Homo sapien
tgtccttgatgcctaagtccaccaa

SEQ ID NO: 1637879 - DNA, 25 bp, Homo sapien
gatgcctaagtccaccaaagctgtt

SEQ ID NO: 1637880 - DNA, 25 bp, Homo sapien
cttagcatggggcaggttcatgcaa

SEQ ID NO: 1637881 - DNA, 25 bp, Homo sapien
ctggtagagccaaagggcttagcat

SEQ ID NO: 1637882 - DNA, 25 bp, Homo sapien
gggcaggttcatgcaaggacgttct

SEQ ID NO: 1637883 - DNA, 25 bp, Homo sapien
aggttcatgcaaggacgttctctac

SEQ ID NO: 1637884 - DNA, 25 bp, Homo sapien
gtctgacttctcattggttccagta

SEQ ID NO: 1637885 - DNA, 25 bp, Homo sapien
gtatgggaatcatccacctgcagct

SEQ ID NO: 1637886 - DNA, 25 bp, Homo sapien
caccttttcccaggccaaacaggag

SEQ ID NO: 1637887 - DNA, 25 bp, Homo sapien
gatgacactgcaggctttatccctg

SEQ ID NO: 1637888 - DNA, 25 bp, Homo sapien
aggacacaggtcgtgtgtgtgacac

SEQ ID NO: 1637889 - DNA, 25 bp, Homo sapien
atgtcacagaaccaatagtcaagga

SEQ ID NO: 1637890 - DNA, 25 bp, Homo sapien
atagtcaaggacacaggtcgtgtgt

SEQ ID NO: 1637891 - DNA, 25 bp, Homo sapien
gaccatggggtactcacaagaaagt

SEQ ID NO: 1637892 - DNA, 25 bp, Homo sapien
tgcattcattttcaactctgaagtg

SEQ ID NO: 1637893 - DNA, 25 bp, Homo sapien
ctgcattcattttcaactctgaagt

SEQ ID NO: 1637894 - DNA, 25 bp, Homo sapien
tctcccagaacgggatagacagctt

SEQ ID NO: 1637895 - DNA, 25 bp, Homo sapien
cccagaacgggatagacagcttggg

SEQ ID NO: 1637896 - DNA, 25 bp, Homo sapien
tcttctcccagaacgggatagacag

SEQ ID NO: 1637897 - DNA, 25 bp, Homo sapien
tcccagaacgggatagacagcttgg

SEQ ID NO: 1637898 - DNA, 25 bp, Homo sapien
tgtctgtgggtggagatgaatgagg

SEQ ID NO: 1637899 - DNA, 25 bp, Homo sapien
tgtgtctgtgggtggagatgaatga

SEQ ID NO: 1637900 - DNA, 25 bp, Homo sapien
cttgtgtctgtgggtggagatgaat

SEQ ID NO: 1637901 - DNA, 25 bp, Homo sapien
gtctgtgggtggagatgaatgaggc

SEQ ID NO: 1637902 - DNA, 25 bp, Homo sapien
tataccccttgttcctgaactgagg

SEQ ID NO: 1637903 - DNA, 25 bp, Homo sapien
ctttcgagaaatggtgttgtatacc

SEQ ID NO: 1637904 - DNA, 25 bp, Homo sapien
tgaggggacgagcatatgagtttct

SEQ ID NO: 1637905 - DNA, 25 bp, Homo sapien
tctctggagattttcttcttggcat

SEQ ID NO: 1637906 - DNA, 25 bp, Homo sapien
ccaagccctcttgatgatgaccact

SEQ ID NO: 1637907 - DNA, 25 bp, Homo sapien
tagaaggatgtggttgctaatgcct

SEQ ID NO: 1637908 - DNA, 25 bp, Homo sapien
ggaagatttatcctccttgacttgt

SEQ ID NO: 1637909 - DNA, 25 bp, Homo sapien
tgactcatatgaaattgggtagggt

SEQ ID NO: 1637910 - DNA, 25 bp, Homo sapien
ggaatcccaagttcacgtagagaca

SEQ ID NO: 1637911 - DNA, 25 bp, Homo sapien
tggaatcccaagttcacgtagagac

SEQ ID NO: 1637912 - DNA, 25 bp, Homo sapien
tagagacagggattccttggcaaca

SEQ ID NO: 1637913 - DNA, 25 bp, Homo sapien
aatgagcaggagtaaggattgaagt

SEQ ID NO: 1637914 - DNA, 25 bp, Homo sapien
aatttggtcagggagatatctctcc

SEQ ID NO: 1637915 - DNA, 25 bp, Homo sapien
ttaaatttggtcagggagatatctc

SEQ ID NO: 1637916 - DNA, 25 bp, Homo sapien
tttggtcagggagatatctctccac

SEQ ID NO: 1637917 - DNA, 25 bp, Homo sapien
ttggtcagggagatatctctccaca

SEQ ID NO: 1637918 - DNA, 25 bp, Homo sapien
ggtgtaagaggattggccattgacc

SEQ ID NO: 1637919 - DNA, 25 bp, Homo sapien
tcaaaggtgtaagaggattggccat

SEQ ID NO: 1637920 - DNA, 25 bp, Homo sapien
gcctcaggcttgattctatggtcaa

SEQ ID NO: 1637921 - DNA, 25 bp, Homo sapien
gattctatggtcaaaggtgtaagag

SEQ ID NO: 1637922 - DNA, 25 bp, Homo sapien
agtgaaccgacattgaccctggtca

SEQ ID NO: 1637923 - DNA, 25 bp, Homo sapien
taaggggaagatagaggatattctc

SEQ ID NO: 1637924 - DNA, 25 bp, Homo sapien
cattgaccctggtcaggtatgggaa

SEQ ID NO: 1637925 - DNA, 25 bp, Homo sapien
cagagcaagcaacaacacctgttga

SEQ ID NO: 1637926 - DNA, 25 bp, Homo sapien
atgaccacacgacgaccaaagcaca

SEQ ID NO: 1637927 - DNA, 25 bp, Homo sapien
gccccatactcacggctgttcatga

SEQ ID NO: 1637928 - DNA, 25 bp, Homo sapien
tgaccacacgacgaccaaagcacac

SEQ ID NO: 1637929 - DNA, 25 bp, Homo sapien
ccccatactcacggctgttcatgac

SEQ ID NO: 1637930 - DNA, 25 bp, Homo sapien
ctcccatctttgcaccatggagtac

SEQ ID NO: 1637931 - DNA, 25 bp, Homo sapien
tttgattgtcacagtagaaccagta

SEQ ID NO: 1637932 - DNA, 25 bp, Homo sapien
gattgtcacagtagaaccagtagac

SEQ ID NO: 1637933 - DNA, 25 bp, Homo sapien
agtggtcgccctttgattgtcacag

SEQ ID NO: 1637934 - DNA, 25 bp, Homo sapien
aagaaacaggcaagtggtcgccctt

SEQ ID NO: 1637935 - DNA, 25 bp, Homo sapien
ggctcttctgaattgtgtccagact

SEQ ID NO: 1637936 - DNA, 25 bp, Homo sapien
catagatcttgatcattcgcaggac

SEQ ID NO: 1637937 - DNA, 25 bp, Homo sapien
gttctgggagagcatagatcttgat

SEQ ID NO: 1637938 - DNA, 25 bp, Homo sapien
ggagagcatagatcttgatcattcg

SEQ ID NO: 1637939 - DNA, 25 bp, Homo sapien
tctgggagagcatagatcttgatca

SEQ ID NO: 1637940 - DNA, 25 bp, Homo sapien
ttccatatcctctgcacaatagccc

SEQ ID NO: 1637941 - DNA, 25 bp, Homo sapien
gatgcagagagattgatcttcttta

SEQ ID NO: 1637942 - DNA, 25 bp, Homo sapien
agtgatgcagagagattgatcttct

SEQ ID NO: 1637943 - DNA, 25 bp, Homo sapien
gcagagagattgatcttctttaact

SEQ ID NO: 1637944 - DNA, 25 bp, Homo sapien
ggcatcaatgtaggaaacaaagtct

SEQ ID NO: 1637945 - DNA, 25 bp, Homo sapien
ctgggcatcaatgtaggaaacaaag

SEQ ID NO: 1637946 - DNA, 25 bp, Homo sapien
gaaacaaagtcttggctttcaccta

SEQ ID NO: 1637947 - DNA, 25 bp, Homo sapien
ggctttcacctactgatgcatccat

SEQ ID NO: 1637948 - DNA, 25 bp, Homo sapien
gacacattccccactgcagtccttc

SEQ ID NO: 1637949 - DNA, 25 bp, Homo sapien
tctgaaccttattggtcactgtctc

SEQ ID NO: 1637950 - DNA, 25 bp, Homo sapien
aacatcaaaactctgaaccttattg

SEQ ID NO: 1637951 - DNA, 25 bp, Homo sapien
agatcacagacacattccccactgc

SEQ ID NO: 1637952 - DNA, 25 bp, Homo sapien
cagcactcctgttgtgcacagggac

SEQ ID NO: 1637953 - DNA, 25 bp, Homo sapien
gcgaacatcccatgaaagcgcgcgg

SEQ ID NO: 1637954 - DNA, 25 bp, Homo sapien
atgatgtttgcaggggaactgagcc

SEQ ID NO: 1637955 - DNA, 25 bp, Homo sapien
tgtgccatctcctgccggtgggcag

SEQ ID NO: 1637956 - DNA, 25 bp, Homo sapien
taacacgagccatacatgtgagctg

SEQ ID NO: 1637957 - DNA, 25 bp, Homo sapien
agctgtggaagctcagaacgggccc

SEQ ID NO: 1637958 - DNA, 25 bp, Homo sapien
tccagttgtgaaatgtgcacgaccc

SEQ ID NO: 1637959 - DNA, 25 bp, Homo sapien
ggagacacctttactgagacctgaa

SEQ ID NO: 1637960 - DNA, 25 bp, Homo sapien
ctgtactgtactgaagagcagggca

SEQ ID NO: 1637961 - DNA, 25 bp, Homo sapien
cattcagcgcatggttactgagcac

SEQ ID NO: 1637962 - DNA, 25 bp, Homo sapien
cagagtttgagagaaatgggtccag

SEQ ID NO: 1637963 - DNA, 25 bp, Homo sapien
tgttgaggactcaccgacggtacag

SEQ ID NO: 1637964 - DNA, 25 bp, Homo sapien
agaaggatcgttttcaggcttcaga

SEQ ID NO: 1637965 - DNA, 25 bp, Homo sapien
gaaatgtggagaaacgcctggagta

SEQ ID NO: 1637966 - DNA, 25 bp, Homo sapien
aagaggccaccaccatggcgaaagg

SEQ ID NO: 1637967 - DNA, 25 bp, Homo sapien
cattcatggtcattaagaaggatcg

SEQ ID NO: 1637968 - DNA, 25 bp, Homo sapien
tcactgtgccaacagccactgatat

SEQ ID NO: 1637969 - DNA, 25 bp, Homo sapien
ccctcttgcacatacaaaatccttt

SEQ ID NO: 1637970 - DNA, 25 bp, Homo sapien
taatctagttaacttccctcttgca

SEQ ID NO: 1637971 - DNA, 25 bp, Homo sapien
gaagaattctcccaatgccagtatt

SEQ ID NO: 1637972 - DNA, 25 bp, Homo sapien
taataactgctacagaccgggtcca

SEQ ID NO: 1637973 - DNA, 25 bp, Homo sapien
cctgaaagataaacgctgatggcca

SEQ ID NO: 1637974 - DNA, 25 bp, Homo sapien
ggaggccaacgagaaatgaccaaca

SEQ ID NO: 1637975 - DNA, 25 bp, Homo sapien
tattatcgttgggaaatctgcagac

SEQ ID NO: 1637976 - DNA, 25 bp, Homo sapien
cacatggtgtcaactggaatgggag

SEQ ID NO: 1637977 - DNA, 25 bp, Homo sapien
taggcctccatttagtacagcatca

SEQ ID NO: 1637978 - DNA, 25 bp, Homo sapien
ctaaaagttggaacagccgcgggct

SEQ ID NO: 1637979 - DNA, 25 bp, Homo sapien
cagatctatagaaagggcagggctc

SEQ ID NO: 1637980 - DNA, 25 bp, Homo sapien
gccttatagtcaattccccacacag

SEQ ID NO: 1637981 - DNA, 25 bp, Homo sapien
gtctccctactttaatccttaatgc

SEQ ID NO: 1637982 - DNA, 25 bp, Homo sapien
gaagccagaggagtcttttaaagta

SEQ ID NO: 1637983 - DNA, 25 bp, Homo sapien
tggctgtcttcaatcacagctattt

SEQ ID NO: 1637984 - DNA, 25 bp, Homo sapien
gctgggatccagatatgtgctcttc

SEQ ID NO: 1637985 - DNA, 25 bp, Homo sapien
cactgaggagcctgccataatggtc

SEQ ID NO: 1637986 - DNA, 25 bp, Homo sapien
caacagtctcctagaggtaagggtc

SEQ ID NO: 1637987 - DNA, 25 bp, Homo sapien
ccccgagcaagatgtagccttggaa

SEQ ID NO: 1637988 - DNA, 25 bp, Homo sapien
tgaacatacataggtccgcaacggg

SEQ ID NO: 1637989 - DNA, 25 bp, Homo sapien
cgggatgatcttcctaccaaggtct

SEQ ID NO: 1637990 - DNA, 25 bp, Homo sapien
tactgcccgctctggaactgtgagc

SEQ ID NO: 1637991 - DNA, 25 bp, Homo sapien
gacagctcctagtcttccgggatga

SEQ ID NO: 1637992 - DNA, 25 bp, Homo sapien
caccggaccaccactgtctttggta

SEQ ID NO: 1637993 - DNA, 25 bp, Homo sapien
ggagcggccaaaaccctctccttga

SEQ ID NO: 1637994 - DNA, 25 bp, Homo sapien
aaagctctttactgggggtacagcg

SEQ ID NO: 1637995 - DNA, 25 bp, Homo sapien
tagcagcaattccagtcaaggagag

SEQ ID NO: 1637996 - DNA, 25 bp, Homo sapien
tccagtcatccgagtccggagggct

SEQ ID NO: 1637997 - DNA, 25 bp, Homo sapien
agagtggcagggtcatcaggaggcg

SEQ ID NO: 1637998 - DNA, 25 bp, Homo sapien
gtggacgacctccagtcatccgagt

SEQ ID NO: 1637999 - DNA, 25 bp, Homo sapien
tggcagggtcatcaggaggcgggag

SEQ ID NO: 1638000 - DNA, 25 bp, Homo sapien
gggagcagtcagcagggccgcccac

SEQ ID NO: 1638001 - DNA, 25 bp, Homo sapien
gtggggagcagtcagcagggccgcc

SEQ ID NO: 1638002 - DNA, 25 bp, Homo sapien
gggtgaggtggggagcagtcagcag

SEQ ID NO: 1638003 - DNA, 25 bp, Homo sapien
tgggtgaggtggggagcagtcagca

SEQ ID NO: 1638004 - DNA, 25 bp, Homo sapien
tgatgggggacgaccaaggtatcgg

SEQ ID NO: 1638005 - DNA, 25 bp, Homo sapien
cccggtcccaggcagtgacgaggca

SEQ ID NO: 1638006 - DNA, 25 bp, Homo sapien
gccccggtcccaggcagtgacgagg

SEQ ID NO: 1638007 - DNA, 25 bp, Homo sapien
ttggtgatgggggacgaccaaggta

SEQ ID NO: 1638008 - DNA, 25 bp, Homo sapien
tcacagtctgtgatagggggcccag

SEQ ID NO: 1638009 - DNA, 25 bp, Homo sapien
gggctgttcatctcacagtctgtga

SEQ ID NO: 1638010 - DNA, 25 bp, Homo sapien
tgtagcggtaggtccggttgtcact

SEQ ID NO: 1638011 - DNA, 25 bp, Homo sapien
cagggcccccacaatatcggttgct

SEQ ID NO: 1638012 - DNA, 25 bp, Homo sapien
ctcgtcggccgtgcggcggaagaag

SEQ ID NO: 1638013 - DNA, 25 bp, Homo sapien
cctgccgggcccgtgttggtggcct

SEQ ID NO: 1638014 - DNA, 25 bp, Homo sapien
ccccagggggctgatgcgggcggcg

SEQ ID NO: 1638015 - DNA, 25 bp, Homo sapien
gcggaagaagccgtgctgcagagcc

SEQ ID NO: 1638016 - DNA, 25 bp, Homo sapien
ccgggcccgcccgtctgcacgccca

SEQ ID NO: 1638017 - DNA, 25 bp, Homo sapien
agcggaggtagtcggcggggctgtg

SEQ ID NO: 1638018 - DNA, 25 bp, Homo sapien
ctggaagcggaggtagtcggcgggg

SEQ ID NO: 1638019 - DNA, 25 bp, Homo sapien
cgggcccgcccgtctgcacgcccag

SEQ ID NO: 1638020 - DNA, 25 bp, Homo sapien
tcctgcagccgccgtgtcccggggc

SEQ ID NO: 1638021 - DNA, 25 bp, Homo sapien
gttcaaagtacttgcgagccttggg

SEQ ID NO: 1638022 - DNA, 25 bp, Homo sapien
atggcggccggtgggatgcccagca

SEQ ID NO: 1638023 - DNA, 25 bp, Homo sapien
ctgagttctttcgtccttcgtaggg

SEQ ID NO: 1638024 - DNA, 25 bp, Homo sapien
ccacaatgcggttcatctggtcgac

SEQ ID NO: 1638025 - DNA, 25 bp, Homo sapien
caaggtcatcaggccagccaggctc

SEQ ID NO: 1638026 - DNA, 25 bp, Homo sapien
gcatctccacaaggatgcagcccag

SEQ ID NO: 1638027 - DNA, 25 bp, Homo sapien
agaagcggctctggatatactggta

SEQ ID NO: 1638028 - DNA, 25 bp, Homo sapien
ccaggtcgtagggtgtgcccaggag

SEQ ID NO: 1638029 - DNA, 25 bp, Homo sapien
agcacctcaggtgagcggtagaagc

SEQ ID NO: 1638030 - DNA, 25 bp, Homo sapien
cttttagtggcagctcatacagagc

SEQ ID NO: 1638031 - DNA, 25 bp, Homo sapien
tagtggcagctcatacagagctgca

SEQ ID NO: 1638032 - DNA, 25 bp, Homo sapien
gtggcagctcatacagagctgcaaa

SEQ ID NO: 1638033 - DNA, 25 bp, Homo sapien
cacttttagtggcagctcatacaga

SEQ ID NO: 1638034 - DNA, 25 bp, Homo sapien
cacaatcttgatggcgctgcgcttg

SEQ ID NO: 1638035 - DNA, 25 bp, Homo sapien
ccagcttccgggtcaggttcagcga

SEQ ID NO: 1638036 - DNA, 25 bp, Homo sapien
taggacagcagctcaaataccaggc

SEQ ID NO: 1638037 - DNA, 25 bp, Homo sapien
tggttccggaacatgaagtgccgct

SEQ ID NO: 1638038 - DNA, 25 bp, Homo sapien
aggaaatgggccagagaagaaacgg

SEQ ID NO: 1638039 - DNA, 25 bp, Homo sapien
ggaggggaggaaatgggccagagaa

SEQ ID NO: 1638040 - DNA, 25 bp, Homo sapien
gggaggaaatgggccagagaagaaa

SEQ ID NO: 1638041 - DNA, 25 bp, Homo sapien
aggggaggaaatgggccagagaaga

SEQ ID NO: 1638042 - DNA, 25 bp, Homo sapien
ttattgaagaagaaactaggatgga

SEQ ID NO: 1638043 - DNA, 25 bp, Homo sapien
ttgaagaagaaactaggatggaagc

SEQ ID NO: 1638044 - DNA, 25 bp, Homo sapien
ggaagcccaggtttcttatcttcaa

SEQ ID NO: 1638045 - DNA, 25 bp, Homo sapien
agaagaaactaggatggaagcccag

SEQ ID NO: 1638046 - DNA, 25 bp, Homo sapien
agctcctgggtctgatgatcatagg

SEQ ID NO: 1638047 - DNA, 25 bp, Homo sapien
tctccgtgtcatgctggttcatcag

SEQ ID NO: 1638048 - DNA, 25 bp, Homo sapien
tatatagtacttcatctccgtgtca

SEQ ID NO: 1638049 - DNA, 25 bp, Homo sapien
catgctggttcatcagctccagcag

SEQ ID NO: 1638050 - DNA, 25 bp, Homo sapien
catgtcacgaagaaaggggtgggag

SEQ ID NO: 1638051 - DNA, 25 bp, Homo sapien
gtcacgaagaaaggggtgggagcag

SEQ ID NO: 1638052 - DNA, 25 bp, Homo sapien
ggcagggcatgtcacgaagaaaggg

SEQ ID NO: 1638053 - DNA, 25 bp, Homo sapien
gcatgtcacgaagaaaggggtggga

SEQ ID NO: 1638054 - DNA, 25 bp, Homo sapien
aggcacagggaaactaagtgggcta

SEQ ID NO: 1638055 - DNA, 25 bp, Homo sapien
cactgaaccactgggtgtgtgatca

SEQ ID NO: 1638056 - DNA, 25 bp, Homo sapien
tgtgtgatcaatgttagtggggcct

SEQ ID NO: 1638057 - DNA, 25 bp, Homo sapien
tacagaaaaggcgactgaggcacag

SEQ ID NO: 1638058 - DNA, 25 bp, Homo sapien
tccttcttgttgctcgaatcctggg

SEQ ID NO: 1638059 - DNA, 25 bp, Homo sapien
tgtcgtcatcataaccatggttcag

SEQ ID NO: 1638060 - DNA, 25 bp, Homo sapien
gtcaatttcgtagcgctccagccag

SEQ ID NO: 1638061 - DNA, 25 bp, Homo sapien
cactgcgcacgatgtagtcatggtt

SEQ ID NO: 1638062 - DNA, 25 bp, Homo sapien
gctgaggttgcatcccggaaggcca

SEQ ID NO: 1638063 - DNA, 25 bp, Homo sapien
agcctccgaggcagtagccgcacat

SEQ ID NO: 1638064 - DNA, 25 bp, Homo sapien
ggcagtagccgcacatcaggcaata

SEQ ID NO: 1638065 - DNA, 25 bp, Homo sapien
cacagagagcttacgcagcggggct

SEQ ID NO: 1638066 - DNA, 25 bp, Homo sapien
ggaccatggcccggtgggacggcca

SEQ ID NO: 1638067 - DNA, 25 bp, Homo sapien
gaccatggcccggtgggacggccat

SEQ ID NO: 1638068 - DNA, 25 bp, Homo sapien
gccggggggcgccttcttgcatcct

SEQ ID NO: 1638069 - DNA, 25 bp, Homo sapien
cgggtcagggctggcgcggggccca

SEQ ID NO: 1638070 - DNA, 25 bp, Homo sapien
ctggcgcggggcccacggggggctg

SEQ ID NO: 1638071 - DNA, 25 bp, Homo sapien
ctggggcgcggtggggcccccagtg

SEQ ID NO: 1638072 - DNA, 25 bp, Homo sapien
agtggggtgggcgagcggccagcat

SEQ ID NO: 1638073 - DNA, 25 bp, Homo sapien
ctgacactccgcctgcgcgagatgg

SEQ ID NO: 1638074 - DNA, 25 bp, Homo sapien
gattacccagtaatgcaaccagcaa

SEQ ID NO: 1638075 - DNA, 25 bp, Homo sapien
caaaatggcgaccacaacaaaccgg

SEQ ID NO: 1638076 - DNA, 25 bp, Homo sapien
acgcggcaagccagggccccgatta

SEQ ID NO: 1638077 - DNA, 25 bp, Homo sapien
atcccacccaagaaccgaaatccag

SEQ ID NO: 1638078 - DNA, 25 bp, Homo sapien
cgcaaaggcagctagaaacggagca

SEQ ID NO: 1638079 - DNA, 25 bp, Homo sapien
atgcgcagcgagctaccaatcccac

SEQ ID NO: 1638080 - DNA, 25 bp, Homo sapien
ccaagaaccgaaatccaggctgccg

SEQ ID NO: 1638081 - DNA, 25 bp, Homo sapien
gagtgagaatttacccaaccccgca

SEQ ID NO: 1638082 - DNA, 25 bp, Homo sapien
aaaattgaccaagggtgcgtgctcc

SEQ ID NO: 1638083 - DNA, 25 bp, Homo sapien
caaaattgaccaagggtgcgtgctc

SEQ ID NO: 1638084 - DNA, 25 bp, Homo sapien
ctgtgaccgagtgagaatttaccca

SEQ ID NO: 1638085 - DNA, 25 bp, Homo sapien
acacatctctcgcaatcctgacagc

SEQ ID NO: 1638086 - DNA, 25 bp, Homo sapien
tgcaacagtatcaacacacatctct

SEQ ID NO: 1638087 - DNA, 25 bp, Homo sapien
tttaatagaaaaacacacgtgcaac

SEQ ID NO: 1638088 - DNA, 25 bp, Homo sapien
ctcgcaatcctgacagcgctgaact

SEQ ID NO: 1638089 - DNA, 25 bp, Homo sapien
gatcatggcactcggggtgcaaggg

SEQ ID NO: 1638090 - DNA, 25 bp, Homo sapien
ctgtcttggtgtattgctgggcccc

SEQ ID NO: 1638091 - DNA, 25 bp, Homo sapien
gtgcaagggacagagatgtctgtct

SEQ ID NO: 1638092 - DNA, 25 bp, Homo sapien
tgtcttggtgtattgctgggcccct

SEQ ID NO: 1638093 - DNA, 25 bp, Homo sapien
gtctctttcatatggctcaagggtc

SEQ ID NO: 1638094 - DNA, 25 bp, Homo sapien
gtacactcccacgaccacggcatgg

SEQ ID NO: 1638095 - DNA, 25 bp, Homo sapien
accacggcatggtctctttcatatg

SEQ ID NO: 1638096 - DNA, 25 bp, Homo sapien
tcaagggtcaactgctcctgcggct

SEQ ID NO: 1638097 - DNA, 25 bp, Homo sapien
ggcaaacacggcctcggctgaggct

SEQ ID NO: 1638098 - DNA, 25 bp, Homo sapien
aggcaaacacggcctcggctgaggc

SEQ ID NO: 1638099 - DNA, 25 bp, Homo sapien
ctgccaccccatcttagactcttcc

SEQ ID NO: 1638100 - DNA, 25 bp, Homo sapien
actgccaccccatcttagactcttc

SEQ ID NO: 1638101 - DNA, 25 bp, Homo sapien
tgccaccccatcttagactcttcca

SEQ ID NO: 1638102 - DNA, 25 bp, Homo sapien
cattcagggccacaatccgggtctg

SEQ ID NO: 1638103 - DNA, 25 bp, Homo sapien
aagtgtcctccattacgcaggaagg

SEQ ID NO: 1638104 - DNA, 25 bp, Homo sapien
catcagcaaagatcacatccaccat

SEQ ID NO: 1638105 - DNA, 25 bp, Homo sapien
ttcagggccacaatccgggtctggt

SEQ ID NO: 1638106 - DNA, 25 bp, Homo sapien
cagcaggttcctgggagattctccc

SEQ ID NO: 1638107 - DNA, 25 bp, Homo sapien
tacttctggcggtggtttataaggc

SEQ ID NO: 1638108 - DNA, 25 bp, Homo sapien
tgggatatgctctcaccagacaatg

SEQ ID NO: 1638109 - DNA, 25 bp, Homo sapien
gacatagagacgagtcagacccgga

SEQ ID NO: 1638110 - DNA, 25 bp, Homo sapien
tataggcaagagtgtccgcaggact

SEQ ID NO: 1638111 - DNA, 25 bp, Homo sapien
tgtgggtgtcgagcatcctcgatca

SEQ ID NO: 1638112 - DNA, 25 bp, Homo sapien
gatgagcatgcggtatttgtgtggg

SEQ ID NO: 1638113 - DNA, 25 bp, Homo sapien
cgatcacaggaatgatgttggtcct

SEQ ID NO: 1638114 - DNA, 25 bp, Homo sapien
tcctcgatcacaggaatgatgttgg

SEQ ID NO: 1638115 - DNA, 25 bp, Homo sapien
caagttaatgaggtcacggccagag

SEQ ID NO: 1638116 - DNA, 25 bp, Homo sapien
ttaatgaggtcacggccagagcggt

SEQ ID NO: 1638117 - DNA, 25 bp, Homo sapien
cttggccaagttaatgaggtcacgg

SEQ ID NO: 1638118 - DNA, 25 bp, Homo sapien
gccaagttaatgaggtcacggccag

SEQ ID NO: 1638119 - DNA, 25 bp, Homo sapien
tgaataaactgaggtccagacataa

SEQ ID NO: 1638120 - DNA, 25 bp, Homo sapien
gacataaagtcactggccaagagtt

SEQ ID NO: 1638121 - DNA, 25 bp, Homo sapien
gactattgctatcatgtccattttt

SEQ ID NO: 1638122 - DNA, 25 bp, Homo sapien
cagcaagtagcaaaagtacccaatc

SEQ ID NO: 1638123 - DNA, 25 bp, Homo sapien
cgtctggccaaagcctgaggtttta

SEQ ID NO: 1638124 - DNA, 25 bp, Homo sapien
gcctatacaggctcagaaaccatga

SEQ ID NO: 1638125 - DNA, 25 bp, Homo sapien
gggccctctaaatgggaagcctata

SEQ ID NO: 1638126 - DNA, 25 bp, Homo sapien
gttttaaggcactacacttaacagc

SEQ ID NO: 1638127 - DNA, 25 bp, Homo sapien
ttgctgctgctagcttggagcggaa

SEQ ID NO: 1638128 - DNA, 25 bp, Homo sapien
ggcagccccgaggtagagaacctta

SEQ ID NO: 1638129 - DNA, 25 bp, Homo sapien
ccaggctcggtactcaattttgtca

SEQ ID NO: 1638130 - DNA, 25 bp, Homo sapien
gaccaacgatgtcagagacatggga

SEQ ID NO: 1638131 - DNA, 25 bp, Homo sapien
agggaccaggttcttggtgaccagt

SEQ ID NO: 1638132 - DNA, 25 bp, Homo sapien
ggttcttggtgaccagtgcatcttc

SEQ ID NO: 1638133 - DNA, 25 bp, Homo sapien
gaccaggttcttggtgaccagtgca

SEQ ID NO: 1638134 - DNA, 25 bp, Homo sapien
ccaggttcttggtgaccagtgcatc

SEQ ID NO: 1638135 - DNA, 25 bp, Homo sapien
catcacattcttccccgactggttt

SEQ ID NO: 1638136 - DNA, 25 bp, Homo sapien
cccggttgccaccagaatggaagcc

SEQ ID NO: 1638137 - DNA, 25 bp, Homo sapien
gttgccaccagaatggaagcctcca

SEQ ID NO: 1638138 - DNA, 25 bp, Homo sapien
acgaccccggttgccaccagaatgg

SEQ ID NO: 1638139 - DNA, 25 bp, Homo sapien
gccgcctccacctcctcctcgtcca

SEQ ID NO: 1638140 - DNA, 25 bp, Homo sapien
gcctccacctcctcctcgtccacga

SEQ ID NO: 1638141 - DNA, 25 bp, Homo sapien
cgcctccacctcctcctcgtccacg

SEQ ID NO: 1638142 - DNA, 25 bp, Homo sapien
cctccacctcctcctcgtccacgac

SEQ ID NO: 1638143 - DNA, 25 bp, Homo sapien
ctcggccgccaaagccacccccacg

SEQ ID NO: 1638144 - DNA, 25 bp, Homo sapien
ttcgcacgtggaaaagagcgcaggc

SEQ ID NO: 1638145 - DNA, 25 bp, Homo sapien
ggcgttcacaactccacgagtccgg

SEQ ID NO: 1638146 - DNA, 25 bp, Homo sapien
gagccctggtttgtgcggctccgga

SEQ ID NO: 1638147 - DNA, 25 bp, Homo sapien
ggagtccgcggcgttcacaactcca

SEQ ID NO: 1638148 - DNA, 25 bp, Homo sapien
tccagctgtggaatgccaccaattt

SEQ ID NO: 1638149 - DNA, 25 bp, Homo sapien
cagctgtggaatgccaccaatttgc

SEQ ID NO: 1638150 - DNA, 25 bp, Homo sapien
ccagctgtggaatgccaccaatttg

SEQ ID NO: 1638151 - DNA, 25 bp, Homo sapien
gtgccagattccccaggcacctgat

SEQ ID NO: 1638152 - DNA, 25 bp, Homo sapien
tcacgtgccagattccccaggcacc

SEQ ID NO: 1638153 - DNA, 25 bp, Homo sapien
agattccccaggcacctgatacctg

SEQ ID NO: 1638154 - DNA, 25 bp, Homo sapien
ccagattccccaggcacctgatacc

SEQ ID NO: 1638155 - DNA, 25 bp, Homo sapien
aggaaatcttcgttcctggtggatg

SEQ ID NO: 1638156 - DNA, 25 bp, Homo sapien
tgtgacccagaaaagcggtagagca

SEQ ID NO: 1638157 - DNA, 25 bp, Homo sapien
gagcacatgatgcatccttcagcca

SEQ ID NO: 1638158 - DNA, 25 bp, Homo sapien
agcagggtaggagcacatgatgcat

SEQ ID NO: 1638159 - DNA, 25 bp, Homo sapien
cacctccgcttgcagactaaacacc

SEQ ID NO: 1638160 - DNA, 25 bp, Homo sapien
gaagcctggtttccatactacatcc

SEQ ID NO: 1638161 - DNA, 25 bp, Homo sapien
aagcctggtttccatactacatccc

SEQ ID NO: 1638162 - DNA, 25 bp, Homo sapien
tgcaagacacagacatttagcacct

SEQ ID NO: 1638163 - DNA, 25 bp, Homo sapien
gggagaagtcctgcgctctccattt

SEQ ID NO: 1638164 - DNA, 25 bp, Homo sapien
ggagtcatgccaatcattggtctgg

SEQ ID NO: 1638165 - DNA, 25 bp, Homo sapien
agtttcccagcatggtcattgctga

SEQ ID NO: 1638166 - DNA, 25 bp, Homo sapien
cattggtctggtccccgtcaaagtt

SEQ ID NO: 1638167 - DNA, 25 bp, Homo sapien
cacggacacagatgctaacttctca

SEQ ID NO: 1638168 - DNA, 25 bp, Homo sapien
gctgggagatccactcggagaccat

SEQ ID NO: 1638169 - DNA, 25 bp, Homo sapien
cttctggcggactagcagggagcca

SEQ ID NO: 1638170 - DNA, 25 bp, Homo sapien
tcaggtgtacgactcacggacacag

SEQ ID NO: 1638171 - DNA, 25 bp, Homo sapien
tggagaccccaaacaagataagttc

SEQ ID NO: 1638172 - DNA, 25 bp, Homo sapien
tggagagacgtacccatggatctac

SEQ ID NO: 1638173 - DNA, 25 bp, Homo sapien
gggaagcattttgtaccagacagat

SEQ ID NO: 1638174 - DNA, 25 bp, Homo sapien
ggatctacacaacaccccaaagtcg

SEQ ID NO: 1638175 - DNA, 25 bp, Homo sapien
cataggctgcagatccagtaacttt

SEQ ID NO: 1638176 - DNA, 25 bp, Homo sapien
cctcagcctggttctagtttgcaaa

SEQ ID NO: 1638177 - DNA, 25 bp, Homo sapien
taaaacaaactttgagcacatcctg

SEQ ID NO: 1638178 - DNA, 25 bp, Homo sapien
tctatgttagttggtgaattaaccc

SEQ ID NO: 1638179 - DNA, 25 bp, Homo sapien
catgtcaggccagagcttgaggaac

SEQ ID NO: 1638180 - DNA, 25 bp, Homo sapien
gaagagagctcatagacaccaggag

SEQ ID NO: 1638181 - DNA, 25 bp, Homo sapien
tgtttggagtcaacgtcaccatccc

SEQ ID NO: 1638182 - DNA, 25 bp, Homo sapien
tctggacttcggcaactacacggta

SEQ ID NO: 1638183 - DNA, 25 bp, Homo sapien
tttcctgtataatcgggcctgatcc

SEQ ID NO: 1638184 - DNA, 25 bp, Homo sapien
tctgagtgagccttagatgcaatca

SEQ ID NO: 1638185 - DNA, 25 bp, Homo sapien
tgttatgacacactcagaagaggag

SEQ ID NO: 1638186 - DNA, 25 bp, Homo sapien
tgtggccacaaccaaggaaaacctg

SEQ ID NO: 1638187 - DNA, 25 bp, Homo sapien
cctctctgcccaccccaagccccta

SEQ ID NO: 1638188 - DNA, 25 bp, Homo sapien
ctgcccaccccaagcccctactcac

SEQ ID NO: 1638189 - DNA, 25 bp, Homo sapien
tctgcccaccccaagcccctactca

SEQ ID NO: 1638190 - DNA, 25 bp, Homo sapien
tctctgcccaccccaagcccctact

SEQ ID NO: 1638191 - DNA, 25 bp, Homo sapien
atccctggcaggtgcgagtgcagat

SEQ ID NO: 1638192 - DNA, 25 bp, Homo sapien
gcaagtatcggccattatgggtgca

SEQ ID NO: 1638193 - DNA, 25 bp, Homo sapien
tatgggtgcagccacaatcttggac

SEQ ID NO: 1638194 - DNA, 25 bp, Homo sapien
tcaaaacagcgggtggtgcagcccg

SEQ ID NO: 1638195 - DNA, 25 bp, Homo sapien
ggaggcagggctgagtcacacctcc

SEQ ID NO: 1638196 - DNA, 25 bp, Homo sapien
ggctgagtcacacctccaaagggtc

SEQ ID NO: 1638197 - DNA, 25 bp, Homo sapien
cagggctgagtcacacctccaaagg

SEQ ID NO: 1638198 - DNA, 25 bp, Homo sapien
aggaggcagggctgagtcacacctc

SEQ ID NO: 1638199 - DNA, 25 bp, Homo sapien
gcacaggcaaagaggtcggggccag

SEQ ID NO: 1638200 - DNA, 25 bp, Homo sapien
cacaggcaaagaggtcggggccaga

SEQ ID NO: 1638201 - DNA, 25 bp, Homo sapien
ttgggggcacaagcaaaggggtcag

SEQ ID NO: 1638202 - DNA, 25 bp, Homo sapien
aggcaaagaggtcggggccagagtg

SEQ ID NO: 1638203 - DNA, 25 bp, Homo sapien
tcgtctgcagaaccatgtttcggcc

SEQ ID NO: 1638204 - DNA, 25 bp, Homo sapien
gcctcgttgctctcatagggtgcag

SEQ ID NO: 1638205 - DNA, 25 bp, Homo sapien
tttgtcacccttttgcgcgcacagg

SEQ ID NO: 1638206 - DNA, 25 bp, Homo sapien
tacgcattggcggaagtactcagag

SEQ ID NO: 1638207 - DNA, 25 bp, Homo sapien
ccagggcaggctcacatggactcac

SEQ ID NO: 1638208 - DNA, 25 bp, Homo sapien
tcagacccccagggcaggctcacat

SEQ ID NO: 1638209 - DNA, 25 bp, Homo sapien
ccccagggcaggctcacatggactc

SEQ ID NO: 1638210 - DNA, 25 bp, Homo sapien
gacccccagggcaggctcacatgga

SEQ ID NO: 1638211 - DNA, 25 bp, Homo sapien
gccaagacataggagcaggagccat

SEQ ID NO: 1638212 - DNA, 25 bp, Homo sapien
cgtagacacggccatcaagggtgat

SEQ ID NO: 1638213 - DNA, 25 bp, Homo sapien
cgcaggtgtcaccactgagtacgaa

SEQ ID NO: 1638214 - DNA, 25 bp, Homo sapien
tctcaagcacgatggaaaagtcctc

SEQ ID NO: 1638215 - DNA, 25 bp, Homo sapien
gagccaggtaggtgttcgagtcggg

SEQ ID NO: 1638216 - DNA, 25 bp, Homo sapien
agccaggtaggtgttcgagtcgggg

SEQ ID NO: 1638217 - DNA, 25 bp, Homo sapien
tcagtgtgtgagtgccaaggtgttt

SEQ ID NO: 1638218 - DNA, 25 bp, Homo sapien
ggctgctgtcctacagtcctgggaa

SEQ ID NO: 1638219 - DNA, 25 bp, Homo sapien
ggtgacaggagataccaagctcaga

SEQ ID NO: 1638220 - DNA, 25 bp, Homo sapien
ggagagacccaaccatgtggaccat

SEQ ID NO: 1638221 - DNA, 25 bp, Homo sapien
ttcccgcataagccacagagagagg

SEQ ID NO: 1638222 - DNA, 25 bp, Homo sapien
ggcctgacaggctgccacgtaggta

SEQ ID NO: 1638223 - DNA, 25 bp, Homo sapien
gctggaaaggcagagccacgaacac

SEQ ID NO: 1638224 - DNA, 25 bp, Homo sapien
ggcacaaggccgtggcagggtgcca

SEQ ID NO: 1638225 - DNA, 25 bp, Homo sapien
tctataggctcatgtcactgactcc

SEQ ID NO: 1638226 - DNA, 25 bp, Homo sapien
accaggctcctaggcgtacactctg

SEQ ID NO: 1638227 - DNA, 25 bp, Homo sapien
ttacagaggaatacactaggctcag

SEQ ID NO: 1638228 - DNA, 25 bp, Homo sapien
actttcttagaccagtttacagagg

SEQ ID NO: 1638229 - DNA, 25 bp, Homo sapien
aaatcgaatcggtgcccatccagag

SEQ ID NO: 1638230 - DNA, 25 bp, Homo sapien
cctcgtggtaggtgccattggccca

SEQ ID NO: 1638231 - DNA, 25 bp, Homo sapien
gacactgcgggtgtagctgacagcc

SEQ ID NO: 1638232 - DNA, 25 bp, Homo sapien
ggaacacagcggtcagcacttaaca

SEQ ID NO: 1638233 - DNA, 25 bp, Homo sapien
accacccatgcagacgtccagaaca

SEQ ID NO: 1638234 - DNA, 25 bp, Homo sapien
ttgcaaagaatgtcacggtccccac

SEQ ID NO: 1638235 - DNA, 25 bp, Homo sapien
caaccggtcctcagggcacgttggg

SEQ ID NO: 1638236 - DNA, 25 bp, Homo sapien
cgacattcgtcccaacacagtgggt

SEQ ID NO: 1638237 - DNA, 25 bp, Homo sapien
gggttgcggtccatgttaccgcaga

SEQ ID NO: 1638238 - DNA, 25 bp, Homo sapien
gcggtccatgttaccgcagagcccg

SEQ ID NO: 1638239 - DNA, 25 bp, Homo sapien
agatgggtatggagggagccagtgt

SEQ ID NO: 1638240 - DNA, 25 bp, Homo sapien
agccagtgtgccattagggaagacc

SEQ ID NO: 1638241 - DNA, 25 bp, Homo sapien
ccatgatagctgctggggagcgtca

SEQ ID NO: 1638242 - DNA, 25 bp, Homo sapien
agtgccttcgatgcaccctgggcca

SEQ ID NO: 1638243 - DNA, 25 bp, Homo sapien
actgcgccatgatagctgctgggga

SEQ ID NO: 1638244 - DNA, 25 bp, Homo sapien
tgaaatccgcccgtcggccacggag

SEQ ID NO: 1638245 - DNA, 25 bp, Homo sapien
gcagccagttgttgccagcacatag

SEQ ID NO: 1638246 - DNA, 25 bp, Homo sapien
tctcacgtaggacacagcagggttg

SEQ ID NO: 1638247 - DNA, 25 bp, Homo sapien
aaacttccggccatcgaaggagtgg

SEQ ID NO: 1638248 - DNA, 25 bp, Homo sapien
catagttacaggtgccctggaagtc

SEQ ID NO: 1638249 - DNA, 25 bp, Homo sapien
tgccgacagttgtcaatgaggactg

SEQ ID NO: 1638250 - DNA, 25 bp, Homo sapien
tgtgttcctggcacaccacgacttt

SEQ ID NO: 1638251 - DNA, 25 bp, Homo sapien
agctcaggatgcctccggagggctg

SEQ ID NO: 1638252 - DNA, 25 bp, Homo sapien
atgcctccggagggctggcacacct

SEQ ID NO: 1638253 - DNA, 25 bp, Homo sapien
ccgttgtagaggaagccggagtcac

SEQ ID NO: 1638254 - DNA, 25 bp, Homo sapien
caggtgtccgcacagagctcgtagt

SEQ ID NO: 1638255 - DNA, 25 bp, Homo sapien
gccacattgctggatgggcacgcag

SEQ ID NO: 1638256 - DNA, 25 bp, Homo sapien
agtagacaccattgtggtagcagcc

SEQ ID NO: 1638257 - DNA, 25 bp, Homo sapien
caaggagggggtgccgatcagagcc

SEQ ID NO: 1638258 - DNA, 25 bp, Homo sapien
gcaaggagggggtgccgatcagagc

SEQ ID NO: 1638259 - DNA, 25 bp, Homo sapien
tgcaaggagggggtgccgatcagag

SEQ ID NO: 1638260 - DNA, 25 bp, Homo sapien
ctgcaaggagggggtgccgatcaga

SEQ ID NO: 1638261 - DNA, 25 bp, Homo sapien
ctccagccgcctggcaagcactcac

SEQ ID NO: 1638262 - DNA, 25 bp, Homo sapien
gacagaaagtttcattcctccaggg

SEQ ID NO: 1638263 - DNA, 25 bp, Homo sapien
agggctccacgtggcctccagccgc

SEQ ID NO: 1638264 - DNA, 25 bp, Homo sapien
acagaaagtttcattcctccagggc

SEQ ID NO: 1638265 - DNA, 25 bp, Homo sapien
tagtacacaaggtcgtaggccacac

SEQ ID NO: 1638266 - DNA, 25 bp, Homo sapien
cacccaggcagagatcaaagatgca

SEQ ID NO: 1638267 - DNA, 25 bp, Homo sapien
gccgaagtcggtctcaatcacaaca

SEQ ID NO: 1638268 - DNA, 25 bp, Homo sapien
gatgcaatctttcaagggaccctgg

SEQ ID NO: 1638269 - DNA, 25 bp, Homo sapien
cacaggcccctcgccccctgctccc

SEQ ID NO: 1638270 - DNA, 25 bp, Homo sapien
ccacaggcccctcgccccctgctcc

SEQ ID NO: 1638271 - DNA, 25 bp, Homo sapien
ccccctgctccccatctgctctcac

SEQ ID NO: 1638272 - DNA, 25 bp, Homo sapien
ctcgccccctgctccccatctgctc

SEQ ID NO: 1638273 - DNA, 25 bp, Homo sapien
tgcaggacggcaaaccgatgcaggc

SEQ ID NO: 1638274 - DNA, 25 bp, Homo sapien
agtttgccacctggaccgtgatcac

SEQ ID NO: 1638275 - DNA, 25 bp, Homo sapien
tctgagccagcacatacacgcaggt

SEQ ID NO: 1638276 - DNA, 25 bp, Homo sapien
ccagccgcagggtgaagtttgccac

SEQ ID NO: 1638277 - DNA, 25 bp, Homo sapien
cccagtgggtagtagcggtcatcgt

SEQ ID NO: 1638278 - DNA, 25 bp, Homo sapien
ggtacacacgtgtcaccactgagca

SEQ ID NO: 1638279 - DNA, 25 bp, Homo sapien
gagtcaccgcagagctcgtagtggc

SEQ ID NO: 1638280 - DNA, 25 bp, Homo sapien
tcccggcagcggcaaagggaatcac

SEQ ID NO: 1638281 - DNA, 25 bp, Homo sapien
cagccaggtaggtgtttgagtcgca

SEQ ID NO: 1638282 - DNA, 25 bp, Homo sapien
tggggacaaggtgggcatcagccag

SEQ ID NO: 1638283 - DNA, 25 bp, Homo sapien
catcagccaggtaggtgtttgagtc

SEQ ID NO: 1638284 - DNA, 25 bp, Homo sapien
tcagccaggtaggtgtttgagtcgc

SEQ ID NO: 1638285 - DNA, 25 bp, Homo sapien
tcactgaaggtatgcgactaattcc

SEQ ID NO: 1638286 - DNA, 25 bp, Homo sapien
gaagggaaccgcctaggactatcta

SEQ ID NO: 1638287 - DNA, 25 bp, Homo sapien
tctgacatggtctgcctaaggctgt

SEQ ID NO: 1638288 - DNA, 25 bp, Homo sapien
tatgcatctgtgtggatctgcccaa

SEQ ID NO: 1638289 - DNA, 25 bp, Homo sapien
aacttggcaggcgtccagcaagcag

SEQ ID NO: 1638290 - DNA, 25 bp, Homo sapien
gacaggctgccacgtaggtggccac

SEQ ID NO: 1638291 - DNA, 25 bp, Homo sapien
tagttcccgcataagccacagagag

SEQ ID NO: 1638292 - DNA, 25 bp, Homo sapien
cgacgggcatggcttggacacacat

SEQ ID NO: 1638293 - DNA, 25 bp, Homo sapien
gggcagagtgacgaacacgccgtcc

SEQ ID NO: 1638294 - DNA, 25 bp, Homo sapien
agggcagagtgacgaacacgccgtc

SEQ ID NO: 1638295 - DNA, 25 bp, Homo sapien
aagggcagagtgacgaacacgccgt

SEQ ID NO: 1638296 - DNA, 25 bp, Homo sapien
gaagggcagagtgacgaacacgccg

SEQ ID NO: 1638297 - DNA, 25 bp, Homo sapien
aatcgaatcggtgcccatccagagt

SEQ ID NO: 1638298 - DNA, 25 bp, Homo sapien
tagatttgcagggtgacactgcggg

SEQ ID NO: 1638299 - DNA, 25 bp, Homo sapien
tgctcattggctacagtgacagtga

SEQ ID NO: 1638300 - DNA, 25 bp, Homo sapien
acactgcgggtgtagctgacagcct

SEQ ID NO: 1638301 - DNA, 25 bp, Homo sapien
tcacatacggctggcgtcgtaaggg

SEQ ID NO: 1638302 - DNA, 25 bp, Homo sapien
gggaacacagcggtcagcacttaac

SEQ ID NO: 1638303 - DNA, 25 bp, Homo sapien
agcacttaacacgaaacccgcgtcg

SEQ ID NO: 1638304 - DNA, 25 bp, Homo sapien
cctcgtggtaggtgccattggccca

SEQ ID NO: 1638305 - DNA, 25 bp, Homo sapien
gagagagacactagggagcagacag

SEQ ID NO: 1638306 - DNA, 25 bp, Homo sapien
ttgcaaagaatgtcacggtccccac

SEQ ID NO: 1638307 - DNA, 25 bp, Homo sapien
gccagtgtgccattagggaagacct

SEQ ID NO: 1638308 - DNA, 25 bp, Homo sapien
gcagtgccttcgatgcaccctgggt

SEQ ID NO: 1638309 - DNA, 25 bp, Homo sapien
acactgcgccatgatagctgctggg

SEQ ID NO: 1638310 - DNA, 25 bp, Homo sapien
gcagccagttgttgccagcacatag

SEQ ID NO: 1638311 - DNA, 25 bp, Homo sapien
tctcacgtaggacacagcagggttg

SEQ ID NO: 1638312 - DNA, 25 bp, Homo sapien
aaacttccggccatcgaaggagtgg

SEQ ID NO: 1638313 - DNA, 25 bp, Homo sapien
catagttacaggtgccctggaagtc

SEQ ID NO: 1638314 - DNA, 25 bp, Homo sapien
tgccgacagttgtcaatgaggactg

SEQ ID NO: 1638315 - DNA, 25 bp, Homo sapien
tgtgttcctggcacaccacgacttt

SEQ ID NO: 1638316 - DNA, 25 bp, Homo sapien
agctcaggatgcctccggagggctg

SEQ ID NO: 1638317 - DNA, 25 bp, Homo sapien
atgcctccggagggctggcacacct

SEQ ID NO: 1638318 - DNA, 25 bp, Homo sapien
ccacattgctggatgggcacgcagg

SEQ ID NO: 1638319 - DNA, 25 bp, Homo sapien
ccattgtggtagcagccacattgct

SEQ ID NO: 1638320 - DNA, 25 bp, Homo sapien
caggtgtccgcacagagctcgtagt

SEQ ID NO: 1638321 - DNA, 25 bp, Homo sapien
ccgttgtagaggaagccggagtcac

SEQ ID NO: 1638322 - DNA, 25 bp, Homo sapien
caaggagggggtgccgatcagagcc

SEQ ID NO: 1638323 - DNA, 25 bp, Homo sapien
gcaaggagggggtgccgatcagagc

SEQ ID NO: 1638324 - DNA, 25 bp, Homo sapien
tgcaaggagggggtgccgatcagag

SEQ ID NO: 1638325 - DNA, 25 bp, Homo sapien
ctgcaaggagggggtgccgatcaga

SEQ ID NO: 1638326 - DNA, 25 bp, Homo sapien
aaagtttcattcctccagggctcca

SEQ ID NO: 1638327 - DNA, 25 bp, Homo sapien
gaaagtttcattcctccagggctcc

SEQ ID NO: 1638328 - DNA, 25 bp, Homo sapien
gacagaaagtttcattcctccaggg

SEQ ID NO: 1638329 - DNA, 25 bp, Homo sapien
cagaaagtttcattcctccagggct

SEQ ID NO: 1638330 - DNA, 25 bp, Homo sapien
tggcctccagctgcctggcaagcac

SEQ ID NO: 1638331 - DNA, 25 bp, Homo sapien
ctggcctccagctgcctggcaagca

SEQ ID NO: 1638332 - DNA, 25 bp, Homo sapien
gcctccagctgcctggcaagcactc

SEQ ID NO: 1638333 - DNA, 25 bp, Homo sapien
ctccagctgcctggcaagcactcac

SEQ ID NO: 1638334 - DNA, 25 bp, Homo sapien
tagtacacaaggtcgtaggccacac

SEQ ID NO: 1638335 - DNA, 25 bp, Homo sapien
cacccaggcagagatcaaagatgca

SEQ ID NO: 1638336 - DNA, 25 bp, Homo sapien
gccgaagtcggtctcaatcacaaca

SEQ ID NO: 1638337 - DNA, 25 bp, Homo sapien
gatgcaatctttcaagggaccctgg

SEQ ID NO: 1638338 - DNA, 25 bp, Homo sapien
gtgagagtgtcacccacagattgtc

SEQ ID NO: 1638339 - DNA, 25 bp, Homo sapien
acaccatggacgtgaagtgcctggc

SEQ ID NO: 1638340 - DNA, 25 bp, Homo sapien
tgttgttgttaaggcggtgagagtg

SEQ ID NO: 1638341 - DNA, 25 bp, Homo sapien
ggtgtgcagtcagctgtatagaaac

SEQ ID NO: 1638342 - DNA, 25 bp, Homo sapien
ccacaggcccctcgccccctgctcc

SEQ ID NO: 1638343 - DNA, 25 bp, Homo sapien
cacaggcccctcgccccctgctccc

SEQ ID NO: 1638344 - DNA, 25 bp, Homo sapien
ccccctgctccccatctgctctcac

SEQ ID NO: 1638345 - DNA, 25 bp, Homo sapien
ctcgccccctgctccccatctgctc

SEQ ID NO: 1638346 - DNA, 25 bp, Homo sapien
actgactcgcccattaccccaggcc

SEQ ID NO: 1638347 - DNA, 25 bp, Homo sapien
agtttgccacctggaccgtgatcac

SEQ ID NO: 1638348 - DNA, 25 bp, Homo sapien
ccagccgcagggtgaagtttgccac

SEQ ID NO: 1638349 - DNA, 25 bp, Homo sapien
ctggaccgtgatcaccctggtcaca

SEQ ID NO: 1638350 - DNA, 25 bp, Homo sapien
caggacggcaaaccgatgtaggcca

SEQ ID NO: 1638351 - DNA, 25 bp, Homo sapien
tcctgcaggacggcaaaccgatgta

SEQ ID NO: 1638352 - DNA, 25 bp, Homo sapien
tgcaggacggcaaaccgatgtaggc

SEQ ID NO: 1638353 - DNA, 25 bp, Homo sapien
cctgcaggacggcaaaccgatgtag

SEQ ID NO: 1638354 - DNA, 25 bp, Homo sapien
cagccaggtaggtgtttgagtcgca

SEQ ID NO: 1638355 - DNA, 25 bp, Homo sapien
tggggacaaggtgggcatcagccag

SEQ ID NO: 1638356 - DNA, 25 bp, Homo sapien
catcagccaggtaggtgtttgagtc

SEQ ID NO: 1638357 - DNA, 25 bp, Homo sapien
tcagccaggtaggtgtttgagtcgc

SEQ ID NO: 1638358 - DNA, 25 bp, Homo sapien
tgactaggtgtttctaacggactct

SEQ ID NO: 1638359 - DNA, 25 bp, Homo sapien
tctgactaggtgtttctaacggact

SEQ ID NO: 1638360 - DNA, 25 bp, Homo sapien
ctctgactaggtgtttctaacggac

SEQ ID NO: 1638361 - DNA, 25 bp, Homo sapien
actaggtgtttctaacggactctct

SEQ ID NO: 1638362 - DNA, 25 bp, Homo sapien
cgcacgaagctgtccccgtcgaaag

SEQ ID NO: 1638363 - DNA, 25 bp, Homo sapien
aggcgcacgaagctgtccccgtcga

SEQ ID NO: 1638364 - DNA, 25 bp, Homo sapien
gcaggcgcacgaagctgtccccgtc

SEQ ID NO: 1638365 - DNA, 25 bp, Homo sapien
gcgcaggcgcacgaagctgtccccg

SEQ ID NO: 1638366 - DNA, 25 bp, Homo sapien
gggcagagtgacgaacacgccgtcc

SEQ ID NO: 1638367 - DNA, 25 bp, Homo sapien
agggcagagtgacgaacacgccgtc

SEQ ID NO: 1638368 - DNA, 25 bp, Homo sapien
gaagggcagagtgacgaacacgccg

SEQ ID NO: 1638369 - DNA, 25 bp, Homo sapien
aagggcagagtgacgaacacgccgt

SEQ ID NO: 1638370 - DNA, 25 bp, Homo sapien
gggaacacagcggtcagcacttaac

SEQ ID NO: 1638371 - DNA, 25 bp, Homo sapien
tgctcattggctacagtgacagtga

SEQ ID NO: 1638372 - DNA, 25 bp, Homo sapien
cctcgtggtaggtgccattggccca

SEQ ID NO: 1638373 - DNA, 25 bp, Homo sapien
gacactgcgggtgtagctgacagcc

SEQ ID NO: 1638374 - DNA, 25 bp, Homo sapien
agacgagcaccaagaaacagagaga

SEQ ID NO: 1638375 - DNA, 25 bp, Homo sapien
tgagaaacagacagatagagacaag

SEQ ID NO: 1638376 - DNA, 25 bp, Homo sapien
ggcccagagacgagcaccaagaaac

SEQ ID NO: 1638377 - DNA, 25 bp, Homo sapien
aacagacagatagagacaagcaaag

SEQ ID NO: 1638378 - DNA, 25 bp, Homo sapien
ttgcaaagaatgtcacggtccccac

SEQ ID NO: 1638379 - DNA, 25 bp, Homo sapien
gccagtgtgccattagggaagacct

SEQ ID NO: 1638380 - DNA, 25 bp, Homo sapien
gcagtgccttcgatgcaccctgggt

SEQ ID NO: 1638381 - DNA, 25 bp, Homo sapien
acactgcgccatgatagctgctggg

SEQ ID NO: 1638382 - DNA, 25 bp, Homo sapien
tgttcacctggactagactctgagc

SEQ ID NO: 1638383 - DNA, 25 bp, Homo sapien
agctcagcatgtgacatgcacggcc

SEQ ID NO: 1638384 - DNA, 25 bp, Homo sapien
tcaccgacactcaaacgactgttca

SEQ ID NO: 1638385 - DNA, 25 bp, Homo sapien
cagcatgtgacatgcacggccttgc

SEQ ID NO: 1638386 - DNA, 25 bp, Homo sapien
gcagccagttgttgccagcacatag

SEQ ID NO: 1638387 - DNA, 25 bp, Homo sapien
tctcacgtaggacacagcagggttg

SEQ ID NO: 1638388 - DNA, 25 bp, Homo sapien
aaacttccggccatcgaaggagtgg

SEQ ID NO: 1638389 - DNA, 25 bp, Homo sapien
catagttacaggtgccctggaagtc

SEQ ID NO: 1638390 - DNA, 25 bp, Homo sapien
ccttgtcctccatccctagtcgcat

SEQ ID NO: 1638391 - DNA, 25 bp, Homo sapien
atccctagtcgcatcagccccaggc

SEQ ID NO: 1638392 - DNA, 25 bp, Homo sapien
atggacaccccagttacaccaccct

SEQ ID NO: 1638393 - DNA, 25 bp, Homo sapien
catggacaccccagttacaccaccc

SEQ ID NO: 1638394 - DNA, 25 bp, Homo sapien
gctgccgacagttgtcaatgaggac

SEQ ID NO: 1638395 - DNA, 25 bp, Homo sapien
agctcaggatgcctccggagggctg

SEQ ID NO: 1638396 - DNA, 25 bp, Homo sapien
atgcctccggagggctggcacacct

SEQ ID NO: 1638397 - DNA, 25 bp, Homo sapien
ccgacagttgtcaatgaggactgtc

SEQ ID NO: 1638398 - DNA, 25 bp, Homo sapien
caccattgtggtagcagccgcattg

SEQ ID NO: 1638399 - DNA, 25 bp, Homo sapien
cagagctcgtagtgactgttcggag

SEQ ID NO: 1638400 - DNA, 25 bp, Homo sapien
gcacagagctcgtagtgactgttcg

SEQ ID NO: 1638401 - DNA, 25 bp, Homo sapien
actgtggaggggcactgagagctga

SEQ ID NO: 1638402 - DNA, 25 bp, Homo sapien
caaggagggggtgccgatcagagcc

SEQ ID NO: 1638403 - DNA, 25 bp, Homo sapien
gcaaggagggggtgccgatcagagc

SEQ ID NO: 1638404 - DNA, 25 bp, Homo sapien
tgcaaggagggggtgccgatcagag

SEQ ID NO: 1638405 - DNA, 25 bp, Homo sapien
ctgcaaggagggggtgccgatcaga

SEQ ID NO: 1638406 - DNA, 25 bp, Homo sapien
ctccagccgcctggcaagcactcac

SEQ ID NO: 1638407 - DNA, 25 bp, Homo sapien
gaaagtttcagtcctccagggctcc

SEQ ID NO: 1638408 - DNA, 25 bp, Homo sapien
gacagaaagtttcagtcctccaggg

SEQ ID NO: 1638409 - DNA, 25 bp, Homo sapien
cagaaagtttcagtcctccagggct

SEQ ID NO: 1638410 - DNA, 25 bp, Homo sapien
gaactcattggcgttgcctgcctgt

SEQ ID NO: 1638411 - DNA, 25 bp, Homo sapien
agctcgggaggacacttgtggctgg

SEQ ID NO: 1638412 - DNA, 25 bp, Homo sapien
ttggcgttgcctgcctgtgagccat

SEQ ID NO: 1638413 - DNA, 25 bp, Homo sapien
agtcctcgctccccggcgggcaagg

SEQ ID NO: 1638414 - DNA, 25 bp, Homo sapien
gcctgcagcccctgttggaagcata

SEQ ID NO: 1638415 - DNA, 25 bp, Homo sapien
cctgcagcccctgttggaagcatac

SEQ ID NO: 1638416 - DNA, 25 bp, Homo sapien
tttttcccaacctctgatggtatca

SEQ ID NO: 1638417 - DNA, 25 bp, Homo sapien
ctggccccctgttccccatctgctc

SEQ ID NO: 1638418 - DNA, 25 bp, Homo sapien
ggccccctgttccccatctgctctc

SEQ ID NO: 1638419 - DNA, 25 bp, Homo sapien
cccctggccccctgttccccatctg

SEQ ID NO: 1638420 - DNA, 25 bp, Homo sapien
ccccctgttccccatctgctctcac

SEQ ID NO: 1638421 - DNA, 25 bp, Homo sapien
gcaggactcaccactgagcgcaaag

SEQ ID NO: 1638422 - DNA, 25 bp, Homo sapien
tggcaaagggaatcacatccggggc

SEQ ID NO: 1638423 - DNA, 25 bp, Homo sapien
gtaggtgccctggtgtacgcagcca

SEQ ID NO: 1638424 - DNA, 25 bp, Homo sapien
taggaacacgcctcatagtggctgt

SEQ ID NO: 1638425 - DNA, 25 bp, Homo sapien
ttgctatggcactcccggaagggcc

SEQ ID NO: 1638426 - DNA, 25 bp, Homo sapien
cagcttgggacagtcacccggttca

SEQ ID NO: 1638427 - DNA, 25 bp, Homo sapien
gctgttcccaaaggccagtgcattg

SEQ ID NO: 1638428 - DNA, 25 bp, Homo sapien
cagcggtcatagacacagtcgcgca

SEQ ID NO: 1638429 - DNA, 25 bp, Homo sapien
acccagccctgggcgccacgtcgct

SEQ ID NO: 1638430 - DNA, 25 bp, Homo sapien
ccagccctgggcgccacgtcgctca

SEQ ID NO: 1638431 - DNA, 25 bp, Homo sapien
cagccctgggcgccacgtcgctcac

SEQ ID NO: 1638432 - DNA, 25 bp, Homo sapien
tcacccagccctgggcgccacgtcg

SEQ ID NO: 1638433 - DNA, 25 bp, Homo sapien
ccggccgtcgaagctcacatagtgt

SEQ ID NO: 1638434 - DNA, 25 bp, Homo sapien
ggtgcagcgcctttggcacaactcg

SEQ ID NO: 1638435 - DNA, 25 bp, Homo sapien
tgcttgtcgcggcaggtgacctgat

SEQ ID NO: 1638436 - DNA, 25 bp, Homo sapien
atgagccgaccagcaggtacgtgca

SEQ ID NO: 1638437 - DNA, 25 bp, Homo sapien
tggtcagcatgccacagagtcggtc

SEQ ID NO: 1638438 - DNA, 25 bp, Homo sapien
tgaggaagtcgtctgctgggtcacc

SEQ ID NO: 1638439 - DNA, 25 bp, Homo sapien
gagtcggtcgccctcatagtgttgg

SEQ ID NO: 1638440 - DNA, 25 bp, Homo sapien
ggtcatatacacactgctccaggaa

SEQ ID NO: 1638441 - DNA, 25 bp, Homo sapien
acacagagtggctgtaggcgcgcac

SEQ ID NO: 1638442 - DNA, 25 bp, Homo sapien
ggctgccccggtgctcgttcttggc

SEQ ID NO: 1638443 - DNA, 25 bp, Homo sapien
catcatgtcgtagcgacggccgtcg

SEQ ID NO: 1638444 - DNA, 25 bp, Homo sapien
catcgtgtacgaacaggtgcccatc

SEQ ID NO: 1638445 - DNA, 25 bp, Homo sapien
agacagcggtggactccgccacaca

SEQ ID NO: 1638446 - DNA, 25 bp, Homo sapien
tgcatgccttcgcaggagggctcca

SEQ ID NO: 1638447 - DNA, 25 bp, Homo sapien
cggcagacagcggtggactccgcca

SEQ ID NO: 1638448 - DNA, 25 bp, Homo sapien
ggctgcgcactgcatgccttcgcag

SEQ ID NO: 1638449 - DNA, 25 bp, Homo sapien
ttataattaatcacccaccgctccc

SEQ ID NO: 1638450 - DNA, 25 bp, Homo sapien
cctcaaaagtttttgcagctgggtg

SEQ ID NO: 1638451 - DNA, 25 bp, Homo sapien
tcttagcgtggcagggactacatgg

SEQ ID NO: 1638452 - DNA, 25 bp, Homo sapien
gggcatttttgccaggtccaggaat

SEQ ID NO: 1638453 - DNA, 25 bp, Homo sapien
caaatcatagcgagattgggaggcc

SEQ ID NO: 1638454 - DNA, 25 bp, Homo sapien
agtaggccgccacatctgggatcag

SEQ ID NO: 1638455 - DNA, 25 bp, Homo sapien
catcgcctgctggatagaacttgcc

SEQ ID NO: 1638456 - DNA, 25 bp, Homo sapien
ctgtgacctttgaccccgagagatc

SEQ ID NO: 1638457 - DNA, 25 bp, Homo sapien
aatacagttgtgggtccacttatcc

SEQ ID NO: 1638458 - DNA, 25 bp, Homo sapien
gagaaaatacagttgtgggtccact

SEQ ID NO: 1638459 - DNA, 25 bp, Homo sapien
gaaaatacagttgtgggtccactta

SEQ ID NO: 1638460 - DNA, 25 bp, Homo sapien
aaatacagttgtgggtccacttatc

SEQ ID NO: 1638461 - DNA, 25 bp, Homo sapien
cccacaggagggttgctccagccca

SEQ ID NO: 1638462 - DNA, 25 bp, Homo sapien
ctccagcccagagtatccaccagct

SEQ ID NO: 1638463 - DNA, 25 bp, Homo sapien
ccacaggagggttgctccagcccag

SEQ ID NO: 1638464 - DNA, 25 bp, Homo sapien
ccagcccagagtatccaccagctcc

SEQ ID NO: 1638465 - DNA, 25 bp, Homo sapien
gcagggctatatagtggagtttctg

SEQ ID NO: 1638466 - DNA, 25 bp, Homo sapien
tggcagggctatatagtggagtttc

SEQ ID NO: 1638467 - DNA, 25 bp, Homo sapien
tgtggcagggctatatagtggagtt

SEQ ID NO: 1638468 - DNA, 25 bp, Homo sapien
cctgtggcagggctatatagtggag

SEQ ID NO: 1638469 - DNA, 25 bp, Homo sapien
gagccaaaagcacaccactgcattc

SEQ ID NO: 1638470 - DNA, 25 bp, Homo sapien
ttgcagtgagccaaaagcacaccac

SEQ ID NO: 1638471 - DNA, 25 bp, Homo sapien
caggagaatcactgggaggtggagg

SEQ ID NO: 1638472 - DNA, 25 bp, Homo sapien
agcctggaggacagagcgagactgt

SEQ ID NO: 1638473 - DNA, 25 bp, Homo sapien
ccacagggagcaagtcgatctgtct

SEQ ID NO: 1638474 - DNA, 25 bp, Homo sapien
tcttggcgcctgcacaatggttcaa

SEQ ID NO: 1638475 - DNA, 25 bp, Homo sapien
tgttaacaagggatttcttggcgcc

SEQ ID NO: 1638476 - DNA, 25 bp, Homo sapien
gagatgttaccatcatcctggcttg

SEQ ID NO: 1638477 - DNA, 25 bp, Homo sapien
tttcccctagccactcagggctcaa

SEQ ID NO: 1638478 - DNA, 25 bp, Homo sapien
ccccaatcacaagtattataagtgg

SEQ ID NO: 1638479 - DNA, 25 bp, Homo sapien
aaatagctcccctgcctaattcatt

SEQ ID NO: 1638480 - DNA, 25 bp, Homo sapien
aagctcatcaaccaaatggactcta

SEQ ID NO: 1638481 - DNA, 25 bp, Homo sapien
gaatgcttgtcatgcttgtggtact

SEQ ID NO: 1638482 - DNA, 25 bp, Homo sapien
ggaatgcttgtcatgcttgtggtac

SEQ ID NO: 1638483 - DNA, 25 bp, Homo sapien
aggaatgcttgtcatgcttgtggta

SEQ ID NO: 1638484 - DNA, 25 bp, Homo sapien
gacccaacggttggcatcctggata

SEQ ID NO: 1638485 - DNA, 25 bp, Homo sapien
atcctggataccctggctgtggcac

SEQ ID NO: 1638486 - DNA, 25 bp, Homo sapien
aggcggtgggtatggaggagggtag

SEQ ID NO: 1638487 - DNA, 25 bp, Homo sapien
tagggacccaacggttggcatcctg

SEQ ID NO: 1638488 - DNA, 25 bp, Homo sapien
ctggggggaaagctggattgccatg

SEQ ID NO: 1638489 - DNA, 25 bp, Homo sapien
gggaaagctggattgccatggggag

SEQ ID NO: 1638490 - DNA, 25 bp, Homo sapien
tggggggaaagctggattgccatgg

SEQ ID NO: 1638491 - DNA, 25 bp, Homo sapien
aaagctggattgccatggggagctc

SEQ ID NO: 1638492 - DNA, 25 bp, Homo sapien
gcacccaatattggggggatatgga

SEQ ID NO: 1638493 - DNA, 25 bp, Homo sapien
aacctccagggcacccaatattggg

SEQ ID NO: 1638494 - DNA, 25 bp, Homo sapien
agggtggattaataggtggtgggtg

SEQ ID NO: 1638495 - DNA, 25 bp, Homo sapien
cagggcacccaatattggggggata

SEQ ID NO: 1638496 - DNA, 25 bp, Homo sapien
gctctgggctagtggtctctgaaac

SEQ ID NO: 1638497 - DNA, 25 bp, Homo sapien
ggaactacttcctgctaagcatgga

SEQ ID NO: 1638498 - DNA, 25 bp, Homo sapien
gaaagacgtgaattttaccagcagg

SEQ ID NO: 1638499 - DNA, 25 bp, Homo sapien
gcatgaaagcattacagtctgaaag

SEQ ID NO: 1638500 - DNA, 25 bp, Homo sapien
ctagggtccagacttgactctccaa

SEQ ID NO: 1638501 - DNA, 25 bp, Homo sapien
taccacctggtcagttgcctctgtc

SEQ ID NO: 1638502 - DNA, 25 bp, Homo sapien
agtggccacctttgttaccacctgg

SEQ ID NO: 1638503 - DNA, 25 bp, Homo sapien
caccaaagcaatggtccagagtggc

SEQ ID NO: 1638504 - DNA, 25 bp, Homo sapien
ggctcaccattgttcttgcgcgggc

SEQ ID NO: 1638505 - DNA, 25 bp, Homo sapien
aatgatcggcgggatataacccagc

SEQ ID NO: 1638506 - DNA, 25 bp, Homo sapien
gatccgggtgtccactgcacttctg

SEQ ID NO: 1638507 - DNA, 25 bp, Homo sapien
tgagctttcgctcactgtccaccgc

SEQ ID NO: 1638508 - DNA, 25 bp, Homo sapien
tacttttggtagaaatggggttgca

SEQ ID NO: 1638509 - DNA, 25 bp, Homo sapien
aggcgtgagccactgcacccggctg

SEQ ID NO: 1638510 - DNA, 25 bp, Homo sapien
gcgtgagccactgcacccggctgtg

SEQ ID NO: 1638511 - DNA, 25 bp, Homo sapien
gtgagccactgcacccggctgtgat

SEQ ID NO: 1638512 - DNA, 25 bp, Homo sapien
cagggtcatgtctggcaaggcgcgg

SEQ ID NO: 1638513 - DNA, 25 bp, Homo sapien
acagggtcatgtctggcaaggcgcg

SEQ ID NO: 1638514 - DNA, 25 bp, Homo sapien
gacagggtcatgtctggcaaggcgc

SEQ ID NO: 1638515 - DNA, 25 bp, Homo sapien
ccacctgtctctcctaagtaggtgg

SEQ ID NO: 1638516 - DNA, 25 bp, Homo sapien
caatcctccccacctgtctctccta

SEQ ID NO: 1638517 - DNA, 25 bp, Homo sapien
tttgtatcttcattttcagtagaga

SEQ ID NO: 1638518 - DNA, 25 bp, Homo sapien
cctccccacctgtctctcctaagta

SEQ ID NO: 1638519 - DNA, 25 bp, Homo sapien
ctgtgcctggtcaagaaatggaact

SEQ ID NO: 1638520 - DNA, 25 bp, Homo sapien
ggtcaagaaatggaactcttacaca

SEQ ID NO: 1638521 - DNA, 25 bp, Homo sapien
actgtgcctggtcaagaaatggaac

SEQ ID NO: 1638522 - DNA, 25 bp, Homo sapien
cctggtcaagaaatggaactcttac

SEQ ID NO: 1638523 - DNA, 25 bp, Homo sapien
taagtaacaaagcataccaatggta

SEQ ID NO: 1638524 - DNA, 25 bp, Homo sapien
gcaggtgagacggattatagagaaa

SEQ ID NO: 1638525 - DNA, 25 bp, Homo sapien
tccaaactaatctaagtaacaaagc

SEQ ID NO: 1638526 - DNA, 25 bp, Homo sapien
aaaaagtaggaggtgatagacatgt

SEQ ID NO: 1638527 - DNA, 25 bp, Homo sapien
gcctctaacaggtcatactctatag

SEQ ID NO: 1638528 - DNA, 25 bp, Homo sapien
aagagcatagtagcacgcctaaacg

SEQ ID NO: 1638529 - DNA, 25 bp, Homo sapien
tcaaacaagtggctcaaaagtccag

SEQ ID NO: 1638530 - DNA, 25 bp, Homo sapien
tacactccacagagttagagagggc

SEQ ID NO: 1638531 - DNA, 25 bp, Homo sapien
caagttgcagcaaacccctaggttt

SEQ ID NO: 1638532 - DNA, 25 bp, Homo sapien
ggcccatgcagaaacacaagacttg

SEQ ID NO: 1638533 - DNA, 25 bp, Homo sapien
tgcaggttccctgatcaaacagcct

SEQ ID NO: 1638534 - DNA, 25 bp, Homo sapien
tgtacagtctagaaaaccaggccaa

SEQ ID NO: 1638535 - DNA, 25 bp, Homo sapien
tacacactcttggtggagatttaaa

SEQ ID NO: 1638536 - DNA, 25 bp, Homo sapien
gaatcaccctgcgtccatcaataga

SEQ ID NO: 1638537 - DNA, 25 bp, Homo sapien
aattagtacatctcctgtggaaaag

SEQ ID NO: 1638538 - DNA, 25 bp, Homo sapien
taaatgaaatgtgatagccgggcac

SEQ ID NO: 1638539 - DNA, 25 bp, Homo sapien
cattgttacgtcaagcacagccagt

SEQ ID NO: 1638540 - DNA, 25 bp, Homo sapien
caaacaaaatcctgcctggcggagc

SEQ ID NO: 1638541 - DNA, 25 bp, Homo sapien
gtcacaaaaatcacagccccgggta

SEQ ID NO: 1638542 - DNA, 25 bp, Homo sapien
gcctattatgtactacacgccggga

SEQ ID NO: 1638543 - DNA, 25 bp, Homo sapien
tacccactgcccaggtaagcactga

SEQ ID NO: 1638544 - DNA, 25 bp, Homo sapien
catctctctgtcactataacttagt

SEQ ID NO: 1638545 - DNA, 25 bp, Homo sapien
tgatctgtaaactcttaacagtgtc

SEQ ID NO: 1638546 - DNA, 25 bp, Homo sapien
gtcttctgaatagcataagctctta

SEQ ID NO: 1638547 - DNA, 25 bp, Homo sapien
ttgcattggttgtttgctaattatt

SEQ ID NO: 1638548 - DNA, 25 bp, Homo sapien
agtcctttatcaaatgtatgatctg

SEQ ID NO: 1638549 - DNA, 25 bp, Homo sapien
cagtgagagcacctacatatgtaaa

SEQ ID NO: 1638550 - DNA, 25 bp, Homo sapien
caccggtgagattccctatgaatgt

SEQ ID NO: 1638551 - DNA, 25 bp, Homo sapien
aaggagaacttacccgacatcacag

SEQ ID NO: 1638552 - DNA, 25 bp, Homo sapien
ttacatctgagaactcacaccggtg

SEQ ID NO: 1638553 - DNA, 25 bp, Homo sapien
gccctgtgggtgtaagaaatttgta

SEQ ID NO: 1638554 - DNA, 25 bp, Homo sapien
tatgtcagtcgctttttctgcccac

SEQ ID NO: 1638555 - DNA, 25 bp, Homo sapien
gaagactcagggatagctgtaatgc

SEQ ID NO: 1638556 - DNA, 25 bp, Homo sapien
tacattcatgtgagaggaaggccct

SEQ ID NO: 1638557 - DNA, 25 bp, Homo sapien
taagttttggagtagtttgccacac

SEQ ID NO: 1638558 - DNA, 25 bp, Homo sapien
gtggccaaacctgtgctcagtgaaa

SEQ ID NO: 1638559 - DNA, 25 bp, Homo sapien
tgccacacagcgataggtaactgaa

SEQ ID NO: 1638560 - DNA, 25 bp, Homo sapien
ggtgagtcattacgaagaaagcaga

SEQ ID NO: 1638561 - DNA, 25 bp, Homo sapien
gactgtccagggatagatctgttct

SEQ ID NO: 1638562 - DNA, 25 bp, Homo sapien
gtatcttcaagatccatgttctcag

SEQ ID NO: 1638563 - DNA, 25 bp, Homo sapien
gaagagctgatccagtccaagtatc

SEQ ID NO: 1638564 - DNA, 25 bp, Homo sapien
gcttaacactgagcacaatttttca

SEQ ID NO: 1638565 - DNA, 25 bp, Homo sapien
tggatactttgctatgttgatgcag

SEQ ID NO: 1638566 - DNA, 25 bp, Homo sapien
tcttccctctaattgacttgaatgt

SEQ ID NO: 1638567 - DNA, 25 bp, Homo sapien
cacagttgaatattatggtagtagg

SEQ ID NO: 1638568 - DNA, 25 bp, Homo sapien
gttatcagttatgtaatctttgcag

SEQ ID NO: 1638569 - DNA, 25 bp, Homo sapien
cacaattttgttgagagaagctagg

SEQ ID NO: 1638570 - DNA, 25 bp, Homo sapien
tcagtggaatccagtcagaatttgt

SEQ ID NO: 1638571 - DNA, 25 bp, Homo sapien
gctagggaaggccttaataaattga

SEQ ID NO: 1638572 - DNA, 25 bp, Homo sapien
caaaacacatgcaagactactacct

SEQ ID NO: 1638573 - DNA, 25 bp, Homo sapien
agaagggactcagtaagcatggcag

SEQ ID NO: 1638574 - DNA, 25 bp, Homo sapien
gaagggactcagtaagcatggcagc

SEQ ID NO: 1638575 - DNA, 25 bp, Homo sapien
gagaagggactcagtaagcatggca

SEQ ID NO: 1638576 - DNA, 25 bp, Homo sapien
ggtccctggctgttgtcatgaaaat

SEQ ID NO: 1638577 - DNA, 25 bp, Homo sapien
aaaggaagaatacgggcaaccactg

SEQ ID NO: 1638578 - DNA, 25 bp, Homo sapien
cttgataaggaaagggaggtccctg

SEQ ID NO: 1638579 - DNA, 25 bp, Homo sapien
catgatctgtacaaagcggtcatca

SEQ ID NO: 1638580 - DNA, 25 bp, Homo sapien
gagcaggtcgctgtcttagacttag

SEQ ID NO: 1638581 - DNA, 25 bp, Homo sapien
catgctacaaattccgtactttcgc

SEQ ID NO: 1638582 - DNA, 25 bp, Homo sapien
tgtcttagacttaggagataatgtc

SEQ ID NO: 1638583 - DNA, 25 bp, Homo sapien
gctcatccattagagcaggtcgctg

SEQ ID NO: 1638584 - DNA, 25 bp, Homo sapien
tcaatcatttttcagggattattca

SEQ ID NO: 1638585 - DNA, 25 bp, Homo sapien
caatcatttttcagggattattcac

SEQ ID NO: 1638586 - DNA, 25 bp, Homo sapien
caacagcatcaatcatttttcaggg

SEQ ID NO: 1638587 - DNA, 25 bp, Homo sapien
gcatcaatcatttttcagggattat

SEQ ID NO: 1638588 - DNA, 25 bp, Homo sapien
tgtactggcttataggtgcgctcca

SEQ ID NO: 1638589 - DNA, 25 bp, Homo sapien
gagcccacaaattgtactggcttat

SEQ ID NO: 1638590 - DNA, 25 bp, Homo sapien
gcttgttatgctcctttttagggcc

SEQ ID NO: 1638591 - DNA, 25 bp, Homo sapien
taagcttgttatgctcctttttagg

SEQ ID NO: 1638592 - DNA, 25 bp, Homo sapien
tggatggaggggagttgcgtccagt

SEQ ID NO: 1638593 - DNA, 25 bp, Homo sapien
tgtggatggaggggagttgcgtcca

SEQ ID NO: 1638594 - DNA, 25 bp, Homo sapien
gtggatggaggggagttgcgtccag

SEQ ID NO: 1638595 - DNA, 25 bp, Homo sapien
gggacttgagatcttaagttttgca

SEQ ID NO: 1638596 - DNA, 25 bp, Homo sapien
ccttgtagcaacttgggattcatag

SEQ ID NO: 1638597 - DNA, 25 bp, Homo sapien
caacttgggattcatagcagcatgc

SEQ ID NO: 1638598 - DNA, 25 bp, Homo sapien
ttgcccttgtagcaacttgggattc

SEQ ID NO: 1638599 - DNA, 25 bp, Homo sapien
ggattcatagcagcatgcagactac

SEQ ID NO: 1638600 - DNA, 25 bp, Homo sapien
cagggacccatgcaaactggctggg

SEQ ID NO: 1638601 - DNA, 25 bp, Homo sapien
aacaaatccagggacccatgcaaac

SEQ ID NO: 1638602 - DNA, 25 bp, Homo sapien
actggctgggagacatctgtccagg

SEQ ID NO: 1638603 - DNA, 25 bp, Homo sapien
ggagacatctgtccaggctgtagct

SEQ ID NO: 1638604 - DNA, 25 bp, Homo sapien
ggaccaggataacacggtggcattg

SEQ ID NO: 1638605 - DNA, 25 bp, Homo sapien
ggaagagttcaggacactgtagagc

SEQ ID NO: 1638606 - DNA, 25 bp, Homo sapien
tctcatcatagggaccaggataaca

SEQ ID NO: 1638607 - DNA, 25 bp, Homo sapien
gagttcaggacactgtagagctgat

SEQ ID NO: 1638608 - DNA, 25 bp, Homo sapien
gccctcatgatagctggatcttcta

SEQ ID NO: 1638609 - DNA, 25 bp, Homo sapien
tgccctcatgatagctggatcttct

SEQ ID NO: 1638610 - DNA, 25 bp, Homo sapien
cctcatgatagctggatcttctagt

SEQ ID NO: 1638611 - DNA, 25 bp, Homo sapien
catgatagctggatcttctagttca

SEQ ID NO: 1638612 - DNA, 25 bp, Homo sapien
ctgccaatcatcatcaactgcacct

SEQ ID NO: 1638613 - DNA, 25 bp, Homo sapien
cctgccaatcatcatcaactgcacc

SEQ ID NO: 1638614 - DNA, 25 bp, Homo sapien
tgccaatcatcatcaactgcacctg

SEQ ID NO: 1638615 - DNA, 25 bp, Homo sapien
cagaagacaatcctcccaagactca

SEQ ID NO: 1638616 - DNA, 25 bp, Homo sapien
cctcccaagactcatagtggaacat

SEQ ID NO: 1638617 - DNA, 25 bp, Homo sapien
gggagttgtgtcttaaatgccacaa

SEQ ID NO: 1638618 - DNA, 25 bp, Homo sapien
acaaattctcttaccaagttcttgg

SEQ ID NO: 1638619 - DNA, 25 bp, Homo sapien
atttcacttcctatatactgtttgg

SEQ ID NO: 1638620 - DNA, 25 bp, Homo sapien
ttggacactttcagacctcaaatgg

SEQ ID NO: 1638621 - DNA, 25 bp, Homo sapien
cattctggagaatcatagatgtggc

SEQ ID NO: 1638622 - DNA, 25 bp, Homo sapien
caacatgcatgggatagacactctg

SEQ ID NO: 1638623 - DNA, 25 bp, Homo sapien
gatgtaagcctgatactgtggcctt

SEQ ID NO: 1638624 - DNA, 25 bp, Homo sapien
tccagaagtggaactacatatagtc

SEQ ID NO: 1638625 - DNA, 25 bp, Homo sapien
taaacatcctcttacggcctgaaaa

SEQ ID NO: 1638626 - DNA, 25 bp, Homo sapien
taatgtatcatttcagccaggcctt

SEQ ID NO: 1638627 - DNA, 25 bp, Homo sapien
gattccatgactcaggacaagaggc

SEQ ID NO: 1638628 - DNA, 25 bp, Homo sapien
gggacatgaaccaacaaacagggtc

SEQ ID NO: 1638629 - DNA, 25 bp, Homo sapien
gacaactcttaatgatactaccggg

SEQ ID NO: 1638630 - DNA, 25 bp, Homo sapien
tcaatccagggcttaagtacacgtg

SEQ ID NO: 1638631 - DNA, 25 bp, Homo sapien
gagtttcaccgaaaggctgccaggg

SEQ ID NO: 1638632 - DNA, 25 bp, Homo sapien
tactaccgggatgtgcaatgaccca

SEQ ID NO: 1638633 - DNA, 25 bp, Homo sapien
caaggctcgagctacaagtaaaggt

SEQ ID NO: 1638634 - DNA, 25 bp, Homo sapien
tgcacaattaagcaaggtacgcctg

SEQ ID NO: 1638635 - DNA, 25 bp, Homo sapien
gctgatagacttattcactgcaagg

SEQ ID NO: 1638636 - DNA, 25 bp, Homo sapien
tcacagtaagggtttgctcacattc

SEQ ID NO: 1638637 - DNA, 25 bp, Homo sapien
ctttacactcacagggtttctcagc

SEQ ID NO: 1638638 - DNA, 25 bp, Homo sapien
cacagggtttctcagcagtacggat

SEQ ID NO: 1638639 - DNA, 25 bp, Homo sapien
ctcacagggtttctcagcagtacgg

SEQ ID NO: 1638640 - DNA, 25 bp, Homo sapien
cagggtttctcagcagtacggattc

SEQ ID NO: 1638641 - DNA, 25 bp, Homo sapien
taattactgctaaaggccttttcac

SEQ ID NO: 1638642 - DNA, 25 bp, Homo sapien
ataattactgctaaaggccttttca

SEQ ID NO: 1638643 - DNA, 25 bp, Homo sapien
cataattactgctaaaggccttttc

SEQ ID NO: 1638644 - DNA, 25 bp, Homo sapien
tcataattactgctaaaggcctttt

SEQ ID NO: 1638645 - DNA, 25 bp, Homo sapien
atcagtatgaattttaacatgttta

SEQ ID NO: 1638646 - DNA, 25 bp, Homo sapien
gtatgaattttaacatgtttaacag

SEQ ID NO: 1638647 - DNA, 25 bp, Homo sapien
ttctcatcagtatgaattttaacat

SEQ ID NO: 1638648 - DNA, 25 bp, Homo sapien
atgaattttaacatgtttaacaggt

SEQ ID NO: 1638649 - DNA, 25 bp, Homo sapien
gatgtactctaaggtttctaccact

SEQ ID NO: 1638650 - DNA, 25 bp, Homo sapien
cataagggttctcacgaatatgaaa

SEQ ID NO: 1638651 - DNA, 25 bp, Homo sapien
tctaccactggtaaagcatttccca

SEQ ID NO: 1638652 - DNA, 25 bp, Homo sapien
acatccttgacattcataagggttc

SEQ ID NO: 1638653 - DNA, 25 bp, Homo sapien
tgtccatgaaattggtaatgatatt

SEQ ID NO: 1638654 - DNA, 25 bp, Homo sapien
atgtccatgaaattggtaatgatat

SEQ ID NO: 1638655 - DNA, 25 bp, Homo sapien
gatgttcagtaagttgctactgatg

SEQ ID NO: 1638656 - DNA, 25 bp, Homo sapien
gtaagttgctactgatgtctgaagg

SEQ ID NO: 1638657 - DNA, 25 bp, Homo sapien
ctactgatgtctgaaggctgtccca

SEQ ID NO: 1638658 - DNA, 25 bp, Homo sapien
ctgatgttcagtaagttgctactga

SEQ ID NO: 1638659 - DNA, 25 bp, Homo sapien
ttgtaggtgaagtctaaaagccttc

SEQ ID NO: 1638660 - DNA, 25 bp, Homo sapien
agttgtaggtgaagtctaaaagcct

SEQ ID NO: 1638661 - DNA, 25 bp, Homo sapien
caaggtttgagccacgattaaaggc

SEQ ID NO: 1638662 - DNA, 25 bp, Homo sapien
tgaggttgaacaaggtttgagccac

SEQ ID NO: 1638663 - DNA, 25 bp, Homo sapien
aggttgaacaaggtttgagccacga

SEQ ID NO: 1638664 - DNA, 25 bp, Homo sapien
gaacaaggtttgagccacgattaaa

SEQ ID NO: 1638665 - DNA, 25 bp, Homo sapien
tgaattcggtaatgttcagtaagct

SEQ ID NO: 1638666 - DNA, 25 bp, Homo sapien
ttcagtaagctggtaatgatatcta

SEQ ID NO: 1638667 - DNA, 25 bp, Homo sapien
gagcaagctgtgtcagaagaccaaa

SEQ ID NO: 1638668 - DNA, 25 bp, Homo sapien
caaagggtttcgcactggaatgagt

SEQ ID NO: 1638669 - DNA, 25 bp, Homo sapien
tttgagacacgattaaaggacttcc

SEQ ID NO: 1638670 - DNA, 25 bp, Homo sapien
aggtttgagacacgattaaaggact

SEQ ID NO: 1638671 - DNA, 25 bp, Homo sapien
gaacaaggtttgagacacgattaaa

SEQ ID NO: 1638672 - DNA, 25 bp, Homo sapien
caaggtttgagacacgattaaagga

SEQ ID NO: 1638673 - DNA, 25 bp, Homo sapien
gaatacttcgatgttgattaagatt

SEQ ID NO: 1638674 - DNA, 25 bp, Homo sapien
tgcatatgaagtcgaaaggctttcc

SEQ ID NO: 1638675 - DNA, 25 bp, Homo sapien
aataaggtgcatatgaagtcgaaag

SEQ ID NO: 1638676 - DNA, 25 bp, Homo sapien
agatttgaaccacgacgaaagaatt

SEQ ID NO: 1638677 - DNA, 25 bp, Homo sapien
gagcaagctgtgtcagaagactaaa

SEQ ID NO: 1638678 - DNA, 25 bp, Homo sapien
tgttcttatgtcgagcaagctgtgt

SEQ ID NO: 1638679 - DNA, 25 bp, Homo sapien
tgaatgttcttatgtcgagcaagct

SEQ ID NO: 1638680 - DNA, 25 bp, Homo sapien
ttcttatgtcgagcaagctgtgtca

SEQ ID NO: 1638681 - DNA, 25 bp, Homo sapien
ttcttatggcgattaagctgattga

SEQ ID NO: 1638682 - DNA, 25 bp, Homo sapien
tcttatggcgattaagctgattgag

SEQ ID NO: 1638683 - DNA, 25 bp, Homo sapien
atggtttatgtgtattatgaatagg

SEQ ID NO: 1638684 - DNA, 25 bp, Homo sapien
tggtttatgtgtattatgaatagga

SEQ ID NO: 1638685 - DNA, 25 bp, Homo sapien
gtttatgtgtattatgaataggaga

SEQ ID NO: 1638686 - DNA, 25 bp, Homo sapien
ggtttatgtgtattatgaataggag

SEQ ID NO: 1638687 - DNA, 25 bp, Homo sapien
tgatgtccctgtcgtccctcaaatc

SEQ ID NO: 1638688 - DNA, 25 bp, Homo sapien
aaataaaaggcctcgaggccaagtg

SEQ ID NO: 1638689 - DNA, 25 bp, Homo sapien
tggttgatatatccttcttgatgtc

SEQ ID NO: 1638690 - DNA, 25 bp, Homo sapien
caaatctacttctatattctgagtc

SEQ ID NO: 1638691 - DNA, 25 bp, Homo sapien
ttctcaggtccatattttgactcca

SEQ ID NO: 1638692 - DNA, 25 bp, Homo sapien
tttctcaggtccatattttgactcc

SEQ ID NO: 1638693 - DNA, 25 bp, Homo sapien
ggcacatgccactaagtctggacaa

SEQ ID NO: 1638694 - DNA, 25 bp, Homo sapien
gaatggtttatctttagtcttagca

SEQ ID NO: 1638695 - DNA, 25 bp, Homo sapien
cctatcagggcactgtcctcctttg

SEQ ID NO: 1638696 - DNA, 25 bp, Homo sapien
tcttgcttgcttagactgcttcatc

SEQ ID NO: 1638697 - DNA, 25 bp, Homo sapien
cccacctcctcccaccccacaacat

SEQ ID NO: 1638698 - DNA, 25 bp, Homo sapien
cacctcctcccaccccacaacattc

SEQ ID NO: 1638699 - DNA, 25 bp, Homo sapien
ccacctcctcccaccccacaacatt

SEQ ID NO: 1638700 - DNA, 25 bp, Homo sapien
attagtcttgctaatggtctttcaa

SEQ ID NO: 1638701 - DNA, 25 bp, Homo sapien
ttttttcgttgtgtctctgcccagc

SEQ ID NO: 1638702 - DNA, 25 bp, Homo sapien
ttattagtcttgctaatggtctttc

SEQ ID NO: 1638703 - DNA, 25 bp, Homo sapien
tcgttgtgtctctgcccagctttgg

SEQ ID NO: 1638704 - DNA, 25 bp, Homo sapien
gctgcagaacagtggtggctgtaga

SEQ ID NO: 1638705 - DNA, 25 bp, Homo sapien
tgcagaacagtggtggctgtagaac

SEQ ID NO: 1638706 - DNA, 25 bp, Homo sapien
gaggagaggcactctgctttttaga

SEQ ID NO: 1638707 - DNA, 25 bp, Homo sapien
cagaacagtggtggctgtagaacag

SEQ ID NO: 1638708 - DNA, 25 bp, Homo sapien
cactgaacgtcaatggattaaactt

SEQ ID NO: 1638709 - DNA, 25 bp, Homo sapien
gccctcacatatcagtaatcacact

SEQ ID NO: 1638710 - DNA, 25 bp, Homo sapien
agaaactcttctcactggtaaagac

SEQ ID NO: 1638711 - DNA, 25 bp, Homo sapien
tgataagaatcagccctcacatatc

SEQ ID NO: 1638712 - DNA, 25 bp, Homo sapien
gaggctaaaaaaagatctcacagag

SEQ ID NO: 1638713 - DNA, 25 bp, Homo sapien
ggctaaaaaaagatctcacagaggt

SEQ ID NO: 1638714 - DNA, 25 bp, Homo sapien
gctaaaaaaagatctcacagaggta

SEQ ID NO: 1638715 - DNA, 25 bp, Homo sapien
tggaggctaaaaaaagatctcacag

SEQ ID NO: 1638716 - DNA, 25 bp, Homo sapien
ggctgtccgggacaatgatggcttc

SEQ ID NO: 1638717 - DNA, 25 bp, Homo sapien
gctgtccgggacaatgatggcttcc

SEQ ID NO: 1638718 - DNA, 25 bp, Homo sapien
gagcacatgggctgtccgggacaat

SEQ ID NO: 1638719 - DNA, 25 bp, Homo sapien
cacatgggctgtccgggacaatgat

SEQ ID NO: 1638720 - DNA, 25 bp, Homo sapien
ggataccatctgcttgtttctttac

SEQ ID NO: 1638721 - DNA, 25 bp, Homo sapien
accatctgcttgtttctttacttac

SEQ ID NO: 1638722 - DNA, 25 bp, Homo sapien
ctggataccatctgcttgtttcttt

SEQ ID NO: 1638723 - DNA, 25 bp, Homo sapien
ataccatctgcttgtttctttactt

SEQ ID NO: 1638724 - DNA, 25 bp, Homo sapien
tagtaatgtaatcacatctggctta

SEQ ID NO: 1638725 - DNA, 25 bp, Homo sapien
tctttctcttgctctagtaatgtaa

SEQ ID NO: 1638726 - DNA, 25 bp, Homo sapien
tcttgctctagtaatgtaatcacat

SEQ ID NO: 1638727 - DNA, 25 bp, Homo sapien
ttctcttgctctagtaatgtaatca

SEQ ID NO: 1638728 - DNA, 25 bp, Homo sapien
tacaaaaataactgggaccaatgac

SEQ ID NO: 1638729 - DNA, 25 bp, Homo sapien
gatattccagagaacagatacaaaa

SEQ ID NO: 1638730 - DNA, 25 bp, Homo sapien
gatgaagaaagctgatattccagag

SEQ ID NO: 1638731 - DNA, 25 bp, Homo sapien
tcatgatgaagaaagctgatattcc

SEQ ID NO: 1638732 - DNA, 25 bp, Homo sapien
tgtacaaggtcctctgatcaggctg

SEQ ID NO: 1638733 - DNA, 25 bp, Homo sapien
tacaaggtcctctgatcaggctgca

SEQ ID NO: 1638734 - DNA, 25 bp, Homo sapien
caaggtcctctgatcaggctgcagg

SEQ ID NO: 1638735 - DNA, 25 bp, Homo sapien
cctgtacaaggtcctctgatcaggc

SEQ ID NO: 1638736 - DNA, 25 bp, Homo sapien
ggagaccaaggtggaaggactgctt

SEQ ID NO: 1638737 - DNA, 25 bp, Homo sapien
gcctgggcaacataacgagatgcac

SEQ ID NO: 1638738 - DNA, 25 bp, Homo sapien
gagcccaggagttggcaaacagcct

SEQ ID NO: 1638739 - DNA, 25 bp, Homo sapien
acattcttcaagaatcctgctgctg

SEQ ID NO: 1638740 - DNA, 25 bp, Homo sapien
ggaccatgtttctagaattacaaaa

SEQ ID NO: 1638741 - DNA, 25 bp, Homo sapien
atggaccatgtttctagaattacaa

SEQ ID NO: 1638742 - DNA, 25 bp, Homo sapien
aaattggtcaatcttcctcgggctt

SEQ ID NO: 1638743 - DNA, 25 bp, Homo sapien
tacaaaattggtcaatcttcctcgg

SEQ ID NO: 1638744 - DNA, 25 bp, Homo sapien
ttgaaagcaccctccatggccacaa

SEQ ID NO: 1638745 - DNA, 25 bp, Homo sapien
taagtttgaaagcaccctccatggc

SEQ ID NO: 1638746 - DNA, 25 bp, Homo sapien
ttggagcgcagactaagtttgaaag

SEQ ID NO: 1638747 - DNA, 25 bp, Homo sapien
cgcagactaagtttgaaagcaccct

SEQ ID NO: 1638748 - DNA, 25 bp, Homo sapien
gcagattccgtctgcgccccgggtt

SEQ ID NO: 1638749 - DNA, 25 bp, Homo sapien
gggttcctcctctgagcgcctcgct

SEQ ID NO: 1638750 - DNA, 25 bp, Homo sapien
ctaaggatctggcagattccgtctg

SEQ ID NO: 1638751 - DNA, 25 bp, Homo sapien
gatctggcagattccgtctgcgccc

SEQ ID NO: 1638752 - DNA, 25 bp, Homo sapien
gcactgccgggtcggtcaggttcga

SEQ ID NO: 1638753 - DNA, 25 bp, Homo sapien
ggtcggtcaggttcgagtcccagtc

SEQ ID NO: 1638754 - DNA, 25 bp, Homo sapien
ttcgagtcccagtccacgaagacct

SEQ ID NO: 1638755 - DNA, 25 bp, Homo sapien
agacctcccgcagccaccgatttct

SEQ ID NO: 1638756 - DNA, 25 bp, Homo sapien
ctaggacgtgaagaccttacccagc

SEQ ID NO: 1638757 - DNA, 25 bp, Homo sapien
aggacgtgaagaccttacccagcta

SEQ ID NO: 1638758 - DNA, 25 bp, Homo sapien
taggacgtgaagaccttacccagct

SEQ ID NO: 1638759 - DNA, 25 bp, Homo sapien
ccaaaaagactatatcagggataaa

SEQ ID NO: 1638760 - DNA, 25 bp, Homo sapien
gcaacagggtatagattatctaaac

SEQ ID NO: 1638761 - DNA, 25 bp, Homo sapien
tatctaaacaacatatcaacctgct

SEQ ID NO: 1638762 - DNA, 25 bp, Homo sapien
taatacagcttctaagtatgtgagt

SEQ ID NO: 1638763 - DNA, 25 bp, Homo sapien
ccatacaaatggtgatcagaagaga

SEQ ID NO: 1638764 - DNA, 25 bp, Homo sapien
gccaccatgcctgacgactactgtt

SEQ ID NO: 1638765 - DNA, 25 bp, Homo sapien
gagaataggaatggttatactacca

SEQ ID NO: 1638766 - DNA, 25 bp, Homo sapien
ggaatggttatactaccatcagaca

SEQ ID NO: 1638767 - DNA, 25 bp, Homo sapien
tatactagacttatatatggcaaat

SEQ ID NO: 1638768 - DNA, 25 bp, Homo sapien
gctcaacaatagaaggtggagattt

SEQ ID NO: 1638769 - DNA, 25 bp, Homo sapien
caatgaacgtatatgctcctaaaaa

SEQ ID NO: 1638770 - DNA, 25 bp, Homo sapien
tgatggttggttgaacactcaacca

SEQ ID NO: 1638771 - DNA, 25 bp, Homo sapien
actatgacgtgtctgtttgtggata

SEQ ID NO: 1638772 - DNA, 25 bp, Homo sapien
tctgttcacagtttgttgagatgct

SEQ ID NO: 1638773 - DNA, 25 bp, Homo sapien
tctcattacatgtacactggtgcac

SEQ ID NO: 1638774 - DNA, 25 bp, Homo sapien
ttgaaggcagcattactagaaataa

SEQ ID NO: 1638775 - DNA, 25 bp, Homo sapien
tggtataatttaagccaagcagggc

SEQ ID NO: 1638776 - DNA, 25 bp, Homo sapien
ccattcttcttgagagagcttcaga

SEQ ID NO: 1638777 - DNA, 25 bp, Homo sapien
gggtagagcttccaacctatgggtg

SEQ ID NO: 1638778 - DNA, 25 bp, Homo sapien
ggtacagccttggacatacgcagaa

SEQ ID NO: 1638779 - DNA, 25 bp, Homo sapien
gatatcataatgtggttcaaggtcc

SEQ ID NO: 1638780 - DNA, 25 bp, Homo sapien
gggactgtgacttccaacttagaaa

SEQ ID NO: 1638781 - DNA, 25 bp, Homo sapien
gagataccagaatgtgcaatgaccc

SEQ ID NO: 1638782 - DNA, 25 bp, Homo sapien
catgagactagaaagccaggtttta

SEQ ID NO: 1638783 - DNA, 25 bp, Homo sapien
tatactgtcagccttatcacacaag

SEQ ID NO: 1638784 - DNA, 25 bp, Homo sapien
attagagcagttgttggccaacctc

SEQ ID NO: 1638785 - DNA, 25 bp, Homo sapien
tctttacaatggacttatggcggtt

SEQ ID NO: 1638786 - DNA, 25 bp, Homo sapien
taatctgacctaacagagcctctgg

SEQ ID NO: 1638787 - DNA, 25 bp, Homo sapien
aatgcacaattcagcgaggtatgcc

SEQ ID NO: 1638788 - DNA, 25 bp, Homo sapien
gaaaatggacctgatcgtcttgctc

SEQ ID NO: 1638789 - DNA, 25 bp, Homo sapien
tatttagtgtggctataaaacgccc

SEQ ID NO: 1638790 - DNA, 25 bp, Homo sapien
gaaatgcacacctgacgttgggaaa

SEQ ID NO: 1638791 - DNA, 25 bp, Homo sapien
ttgaacaatgtttgagctacaacta

SEQ ID NO: 1638792 - DNA, 25 bp, Homo sapien
tgatgtgcagtcaggaccaaactaa

SEQ ID NO: 1638793 - DNA, 25 bp, Homo sapien
gaatgacctgaagtccagcaagctg

SEQ ID NO: 1638794 - DNA, 25 bp, Homo sapien
gaagtccagcaagctgtgtcagaaa

SEQ ID NO: 1638795 - DNA, 25 bp, Homo sapien
gctgaataacgtttgaaccacaaat

SEQ ID NO: 1638796 - DNA, 25 bp, Homo sapien
ttgagacacgattaaaggactttcc

SEQ ID NO: 1638797 - DNA, 25 bp, Homo sapien
tctaaaggtcgtcctccactccttg

SEQ ID NO: 1638798 - DNA, 25 bp, Homo sapien
tccttacattcaagatgccttctca

SEQ ID NO: 1638799 - DNA, 25 bp, Homo sapien
ctgtgtgaatgttcttatggcgatt

SEQ ID NO: 1638800 - DNA, 25 bp, Homo sapien
tgttcttatggcgattaagctgggt

SEQ ID NO: 1638801 - DNA, 25 bp, Homo sapien
gtgaatgttcttatggcgattaagc

SEQ ID NO: 1638802 - DNA, 25 bp, Homo sapien
ttcttatggcgattaagctgggtgg

SEQ ID NO: 1638803 - DNA, 25 bp, Homo sapien
tgcatatgaagtcgaaaggctttcc

SEQ ID NO: 1638804 - DNA, 25 bp, Homo sapien
gaatacttcgatgttgattaagatt

SEQ ID NO: 1638805 - DNA, 25 bp, Homo sapien
agatttgaaccacgacgaaagaatt

SEQ ID NO: 1638806 - DNA, 25 bp, Homo sapien
tgcatatgaagtcgaaaggctttcc

SEQ ID NO: 1638807 - DNA, 25 bp, Homo sapien
aataaggtgcatatgaagtcgaaag

SEQ ID NO: 1638808 - DNA, 25 bp, Homo sapien
tttgtcagaagagtaaacgcctttc

SEQ ID NO: 1638809 - DNA, 25 bp, Homo sapien
gagaatgttcaataagttggcaatg

SEQ ID NO: 1638810 - DNA, 25 bp, Homo sapien
attcgagaatgttcaataagttggc

SEQ ID NO: 1638811 - DNA, 25 bp, Homo sapien
tgaattcgagaatgttcaataagtt

SEQ ID NO: 1638812 - DNA, 25 bp, Homo sapien
tcttatggcgattaagcagggtaag

SEQ ID NO: 1638813 - DNA, 25 bp, Homo sapien
tatggcgattaagcagggtaagaag

SEQ ID NO: 1638814 - DNA, 25 bp, Homo sapien
ttatggcgattaagcagggtaagaa

SEQ ID NO: 1638815 - DNA, 25 bp, Homo sapien
ttcttatggcgattaagcagggtaa

SEQ ID NO: 1638816 - DNA, 25 bp, Homo sapien
ttgcactacgactaaagtatttccc

SEQ ID NO: 1638817 - DNA, 25 bp, Homo sapien
cggtttatgtgtattgcaaataaga

SEQ ID NO: 1638818 - DNA, 25 bp, Homo sapien
tagctgatcatcttttgattgatat

SEQ ID NO: 1638819 - DNA, 25 bp, Homo sapien
ttatgtgtattgcaaataagagaag

SEQ ID NO: 1638820 - DNA, 25 bp, Homo sapien
attcatacggtttatgtgtattgca

SEQ ID NO: 1638821 - DNA, 25 bp, Homo sapien
cctgtagtccctcaaattgtctata

SEQ ID NO: 1638822 - DNA, 25 bp, Homo sapien
tgtagtccctcaaattgtctatatt

SEQ ID NO: 1638823 - DNA, 25 bp, Homo sapien
ctgtagtccctcaaattgtctatat

SEQ ID NO: 1638824 - DNA, 25 bp, Homo sapien
aggcctcaatgccaagagttgtact

SEQ ID NO: 1638825 - DNA, 25 bp, Homo sapien
aaaataaaaggcctcaatgccaaga

SEQ ID NO: 1638826 - DNA, 25 bp, Homo sapien
aaggcctcaatgccaagagttgtac

SEQ ID NO: 1638827 - DNA, 25 bp, Homo sapien
ttttattttcgtataacacacatgc

SEQ ID NO: 1638828 - DNA, 25 bp, Homo sapien
tgtttctttccttacaaccatccag

SEQ ID NO: 1638829 - DNA, 25 bp, Homo sapien
tgcttgtttctttccttacaaccat

SEQ ID NO: 1638830 - DNA, 25 bp, Homo sapien
ctggataccgtctgcttgtttcttt

SEQ ID NO: 1638831 - DNA, 25 bp, Homo sapien
ttctttccttacaaccatccagggc

SEQ ID NO: 1638832 - DNA, 25 bp, Homo sapien
ctagtaacgtaattacatctggttt

SEQ ID NO: 1638833 - DNA, 25 bp, Homo sapien
tagtaacgtaattacatctggttta

SEQ ID NO: 1638834 - DNA, 25 bp, Homo sapien
agtaacgtaattacatctggtttag

SEQ ID NO: 1638835 - DNA, 25 bp, Homo sapien
gtaacgtaattacatctggtttaga

SEQ ID NO: 1638836 - DNA, 25 bp, Homo sapien
tgtacaaggtcctctgatcaggctg

SEQ ID NO: 1638837 - DNA, 25 bp, Homo sapien
tacaaggtcctctgatcaggctgca

SEQ ID NO: 1638838 - DNA, 25 bp, Homo sapien
cctgtacaaggtcctctgatcaggc

SEQ ID NO: 1638839 - DNA, 25 bp, Homo sapien
caaggtcctctgatcaggctgcagg

SEQ ID NO: 1638840 - DNA, 25 bp, Homo sapien
cacaaacacatgtataatggtgaaa

SEQ ID NO: 1638841 - DNA, 25 bp, Homo sapien
gaaaccacaaacacatgtataatgg

SEQ ID NO: 1638842 - DNA, 25 bp, Homo sapien
ctgaaaccacaaacacatgtataat

SEQ ID NO: 1638843 - DNA, 25 bp, Homo sapien
aaccacaaacacatgtataatggtg

SEQ ID NO: 1638844 - DNA, 25 bp, Homo sapien
ggaattctaccttagctacctggaa

SEQ ID NO: 1638845 - DNA, 25 bp, Homo sapien
aatattcttcctgaccaaggtctga

SEQ ID NO: 1638846 - DNA, 25 bp, Homo sapien
tttcaaagtgttcccaagtgtggtc

SEQ ID NO: 1638847 - DNA, 25 bp, Homo sapien
tgcagactgaggctactcactatgg

SEQ ID NO: 1638848 - DNA, 25 bp, Homo sapien
tctaggtacgaagcttcaggttaaa

SEQ ID NO: 1638849 - DNA, 25 bp, Homo sapien
aaagtcaccatatttcaaggaaaag

SEQ ID NO: 1638850 - DNA, 25 bp, Homo sapien
gggtgtaagatcgtgaattctaggt

SEQ ID NO: 1638851 - DNA, 25 bp, Homo sapien
taacagtcacctaacctgaaagtca

SEQ ID NO: 1638852 - DNA, 25 bp, Homo sapien
gttgctagaattacaaaactggtca

SEQ ID NO: 1638853 - DNA, 25 bp, Homo sapien
acaaaactggtcaatcttcctcggg

SEQ ID NO: 1638854 - DNA, 25 bp, Homo sapien
tggtcaatcttcctcgggcttctcc

SEQ ID NO: 1638855 - DNA, 25 bp, Homo sapien
gaattacaaaactggtcaatcttcc

SEQ ID NO: 1638856 - DNA, 25 bp, Homo sapien
gatacctatcttggcctaggtctgg

SEQ ID NO: 1638857 - DNA, 25 bp, Homo sapien
gaaagcatatttgcactggcagtgt

SEQ ID NO: 1638858 - DNA, 25 bp, Homo sapien
gaagggattgcatcatccaaaccag

SEQ ID NO: 1638859 - DNA, 25 bp, Homo sapien
cagaagcatgaatgccgagcacagg

SEQ ID NO: 1638860 - DNA, 25 bp, Homo sapien
acaaccagcagtcgcaatgaatcac

SEQ ID NO: 1638861 - DNA, 25 bp, Homo sapien
tatatctgtcgatttaaaaagaaag

SEQ ID NO: 1638862 - DNA, 25 bp, Homo sapien
atttctgtcctagatcatttgagcc

SEQ ID NO: 1638863 - DNA, 25 bp, Homo sapien
tgaatcacatattcccaatgctcct

SEQ ID NO: 1638864 - DNA, 25 bp, Homo sapien
ctttaggtgtgcagcagtaacgctc

SEQ ID NO: 1638865 - DNA, 25 bp, Homo sapien
tgtgcagcagtaacgctctcatcct

SEQ ID NO: 1638866 - DNA, 25 bp, Homo sapien
ccttgactttaggtgtgcagcagta

SEQ ID NO: 1638867 - DNA, 25 bp, Homo sapien
taggtgtgcagcagtaacgctctca

SEQ ID NO: 1638868 - DNA, 25 bp, Homo sapien
tggagcgcagactaagtttgaaaac

SEQ ID NO: 1638869 - DNA, 25 bp, Homo sapien
aaggaagaggaatcgattcaaccag

SEQ ID NO: 1638870 - DNA, 25 bp, Homo sapien
cacttcacacgaaataggaaggaag

SEQ ID NO: 1638871 - DNA, 25 bp, Homo sapien
gattcaaccagtacaaccagtttgg

SEQ ID NO: 1638872 - DNA, 25 bp, Homo sapien
tggggatccggcagatcccgtctgc

SEQ ID NO: 1638873 - DNA, 25 bp, Homo sapien
gatccggcagatcccgtctgcaccc

SEQ ID NO: 1638874 - DNA, 25 bp, Homo sapien
gggatccggcagatcccgtctgcac

SEQ ID NO: 1638875 - DNA, 25 bp, Homo sapien
ctggggatccggcagatcccgtctg

SEQ ID NO: 1638876 - DNA, 25 bp, Homo sapien
ccgcactgtcgggtcagtcaggctg

SEQ ID NO: 1638877 - DNA, 25 bp, Homo sapien
tcagtcaggctggagccccaatccg

SEQ ID NO: 1638878 - DNA, 25 bp, Homo sapien
gccacccgcactgtcgggtcagtca

SEQ ID NO: 1638879 - DNA, 25 bp, Homo sapien
tggagccccaatccgcagagatctc

SEQ ID NO: 1638880 - DNA, 25 bp, Homo sapien
tatgtcgtcgaccccggagaccgga

SEQ ID NO: 1638881 - DNA, 25 bp, Homo sapien
cccgctatgtcgtcgaccccggaga

SEQ ID NO: 1638882 - DNA, 25 bp, Homo sapien
gctatgtcgtcgaccccggagaccg

SEQ ID NO: 1638883 - DNA, 25 bp, Homo sapien
ccgctatgtcgtcgaccccggagac

SEQ ID NO: 1638884 - DNA, 25 bp, Homo sapien
acttctctagtaacaaactatagaa

SEQ ID NO: 1638885 - DNA, 25 bp, Homo sapien
gtaacaaactatagaaatgatccct

SEQ ID NO: 1638886 - DNA, 25 bp, Homo sapien
ctagtaacaaactatagaaatgatc

SEQ ID NO: 1638887 - DNA, 25 bp, Homo sapien
ctcggtgctctacacgttcagagaa

SEQ ID NO: 1638888 - DNA, 25 bp, Homo sapien
tgctagtgaactttttcaggtcctg

SEQ ID NO: 1638889 - DNA, 25 bp, Homo sapien
ggaatctgtataccatagtgaaata

SEQ ID NO: 1638890 - DNA, 25 bp, Homo sapien
tatgtcaacctatttaacaaacaga

SEQ ID NO: 1638891 - DNA, 25 bp, Homo sapien
catatatgtcaacctatttaacaaa

SEQ ID NO: 1638892 - DNA, 25 bp, Homo sapien
gatgagaacaatatccaaggtttga

SEQ ID NO: 1638893 - DNA, 25 bp, Homo sapien
ccatgccatgattcccaagcaaaaa

SEQ ID NO: 1638894 - DNA, 25 bp, Homo sapien
ggaacaatgagatttaccagcaagt

SEQ ID NO: 1638895 - DNA, 25 bp, Homo sapien
ccattggctagtcattctcatggga

SEQ ID NO: 1638896 - DNA, 25 bp, Homo sapien
ctggagtttgtggggttgatactta

SEQ ID NO: 1638897 - DNA, 25 bp, Homo sapien
gggttgatacttaaggcctggaagc

SEQ ID NO: 1638898 - DNA, 25 bp, Homo sapien
gttgatacttaaggcctggaagcca

SEQ ID NO: 1638899 - DNA, 25 bp, Homo sapien
ttgtggggttgatacttaaggcctg

SEQ ID NO: 1638900 - DNA, 25 bp, Homo sapien
cactctgtgacaataaaagacaagt

SEQ ID NO: 1638901 - DNA, 25 bp, Homo sapien
taaaagacagatggtgttgagagaa

SEQ ID NO: 1638902 - DNA, 25 bp, Homo sapien
ttgagagaatttccccaggccactc

SEQ ID NO: 1638903 - DNA, 25 bp, Homo sapien
gccactctgtgacaataaaagacaa

SEQ ID NO: 1638904 - DNA, 25 bp, Homo sapien
tccaggaagtattgcaacccaaaag

SEQ ID NO: 1638905 - DNA, 25 bp, Homo sapien
cctccacaaagaaggattgatgtat

SEQ ID NO: 1638906 - DNA, 25 bp, Homo sapien
tgatgtattggctaacacaagatgg

SEQ ID NO: 1638907 - DNA, 25 bp, Homo sapien
cacaagatggttggttatttgctct

SEQ ID NO: 1638908 - DNA, 25 bp, Homo sapien
gccagcattgacctctgtggtaacc

SEQ ID NO: 1638909 - DNA, 25 bp, Homo sapien
aaccactgccctgaactgcatatat

SEQ ID NO: 1638910 - DNA, 25 bp, Homo sapien
tgccagcattgacctctgtggtaac

SEQ ID NO: 1638911 - DNA, 25 bp, Homo sapien
ccaggatgttgtacctaatgtttac

SEQ ID NO: 1638912 - DNA, 25 bp, Homo sapien
tgagagagaaagctaagcctttagt

SEQ ID NO: 1638913 - DNA, 25 bp, Homo sapien
tacctaatgtttaccagatttgtcc

SEQ ID NO: 1638914 - DNA, 25 bp, Homo sapien
ctaagtaacctccattccaggatgt

SEQ ID NO: 1638915 - DNA, 25 bp, Homo sapien
agaattaacaggctgttggatgtca

SEQ ID NO: 1638916 - DNA, 25 bp, Homo sapien
gaattaacaggctgttggatgtcag

SEQ ID NO: 1638917 - DNA, 25 bp, Homo sapien
aattaacaggctgttggatgtcagg

SEQ ID NO: 1638918 - DNA, 25 bp, Homo sapien
ttagaattaacaggctgttggatgt

SEQ ID NO: 1638919 - DNA, 25 bp, Homo sapien
gttgtctcgcctctcccacagtcct

SEQ ID NO: 1638920 - DNA, 25 bp, Homo sapien
tcctcctgggtgcatccccgagtcc

SEQ ID NO: 1638921 - DNA, 25 bp, Homo sapien
ctgttgtctcgcctctcccacagtc

SEQ ID NO: 1638922 - DNA, 25 bp, Homo sapien
ctaactcctgttgtctcgcctctcc

SEQ ID NO: 1638923 - DNA, 25 bp, Homo sapien
tcagtggagtcctccgcagaagtct

SEQ ID NO: 1638924 - DNA, 25 bp, Homo sapien
ccccgagctcatttctgagtagaag

SEQ ID NO: 1638925 - DNA, 25 bp, Homo sapien
gagactcccacagctctctcagtgg

SEQ ID NO: 1638926 - DNA, 25 bp, Homo sapien
gagtagaaggatttgaaaccctcag

SEQ ID NO: 1638927 - DNA, 25 bp, Homo sapien
catttcaatccactggtccaggagc

SEQ ID NO: 1638928 - DNA, 25 bp, Homo sapien
tataatgatacatccatttcaatcc

SEQ ID NO: 1638929 - DNA, 25 bp, Homo sapien
ctccaggcacgttcaaaggcgattt

SEQ ID NO: 1638930 - DNA, 25 bp, Homo sapien
tcaaaggcgatttgtcatataatga

SEQ ID NO: 1638931 - DNA, 25 bp, Homo sapien
gaacaagcaagagtgagttcaacaa

SEQ ID NO: 1638932 - DNA, 25 bp, Homo sapien
tattctagaacaagcaagagtgagt

SEQ ID NO: 1638933 - DNA, 25 bp, Homo sapien
cccagagacaacctgttctgcagcc

SEQ ID NO: 1638934 - DNA, 25 bp, Homo sapien
ttctagaacaagcaagagtgagttc

SEQ ID NO: 1638935 - DNA, 25 bp, Homo sapien
gaccccggcgggcattcgagagccg

SEQ ID NO: 1638936 - DNA, 25 bp, Homo sapien
tggggggcacgggtgaacctgccgc

SEQ ID NO: 1638937 - DNA, 25 bp, Homo sapien
gccctcttagccctctgccgtttgg

SEQ ID NO: 1638938 - DNA, 25 bp, Homo sapien
gagccgcgcggccaggccctcttag

SEQ ID NO: 1638939 - DNA, 25 bp, Homo sapien
tctgcctagtgatggagtatgcccg

SEQ ID NO: 1638940 - DNA, 25 bp, Homo sapien
ctcacgtgctggtcaactgggctgt

SEQ ID NO: 1638941 - DNA, 25 bp, Homo sapien
cagccaaatcggaagggacgagcct

SEQ ID NO: 1638942 - DNA, 25 bp, Homo sapien
tctggaccgcggtgttcgactacga

SEQ ID NO: 1638943 - DNA, 25 bp, Homo sapien
tggcacaagaccaccaagatgagcg

SEQ ID NO: 1638944 - DNA, 25 bp, Homo sapien
ggtgctcaagatcacggacttcggc

SEQ ID NO: 1638945 - DNA, 25 bp, Homo sapien
gatggcgccggaggttatccgtctc

SEQ ID NO: 1638946 - DNA, 25 bp, Homo sapien
tcttctccaaaagcagtgatgtctg

SEQ ID NO: 1638947 - DNA, 25 bp, Homo sapien
tacctgttcagctagcacaaatggc

SEQ ID NO: 1638948 - DNA, 25 bp, Homo sapien
cagttacctgttcagctagcacaaa

SEQ ID NO: 1638949 - DNA, 25 bp, Homo sapien
tgttcagctagcacaaatggcaact

SEQ ID NO: 1638950 - DNA, 25 bp, Homo sapien
aaatggcaactagggggcacactgg

SEQ ID NO: 1638951 - DNA, 25 bp, Homo sapien
caacaaacacatgagtcgggggaag

SEQ ID NO: 1638952 - DNA, 25 bp, Homo sapien
atcaccagtgacaagtgttttacca

SEQ ID NO: 1638953 - DNA, 25 bp, Homo sapien
gagggcgagggatagagaggtcccc

SEQ ID NO: 1638954 - DNA, 25 bp, Homo sapien
gacaagtgttttaccaacaaacaca

SEQ ID NO: 1638955 - DNA, 25 bp, Homo sapien
tcagctggatgtagcggagcacatt

SEQ ID NO: 1638956 - DNA, 25 bp, Homo sapien
gctggaggctgcaacgattcatctt

SEQ ID NO: 1638957 - DNA, 25 bp, Homo sapien
gctgcaacgattcatcttcagctga

SEQ ID NO: 1638958 - DNA, 25 bp, Homo sapien
ccccactgtcttcccgctggaggct

SEQ ID NO: 1638959 - DNA, 25 bp, Homo sapien
tgtatttgcggcaccctctgccagg

SEQ ID NO: 1638960 - DNA, 25 bp, Homo sapien
caatgacggtagatgagaaatggcc

SEQ ID NO: 1638961 - DNA, 25 bp, Homo sapien
cattctccgaagtatccagcagctc

SEQ ID NO: 1638962 - DNA, 25 bp, Homo sapien
gaaaactaatctcgtctcggctccc

SEQ ID NO: 1638963 - DNA, 25 bp, Homo sapien
cgtagtttaccagctccgactgcag

SEQ ID NO: 1638964 - DNA, 25 bp, Homo sapien
tgcgtagtcgcccaggtggtagaag

SEQ ID NO: 1638965 - DNA, 25 bp, Homo sapien
taccttgagacagtactcgcgcacg

SEQ ID NO: 1638966 - DNA, 25 bp, Homo sapien
caatgccggcacggtaggtggcctt

SEQ ID NO: 1638967 - DNA, 25 bp, Homo sapien
gcgagggccccgcggccggcactct

SEQ ID NO: 1638968 - DNA, 25 bp, Homo sapien
ctgcgagggccccgcggccggcact

SEQ ID NO: 1638969 - DNA, 25 bp, Homo sapien
gggccccgcggccggcactctcaga

SEQ ID NO: 1638970 - DNA, 25 bp, Homo sapien
gagggccccgcggccggcactctca

SEQ ID NO: 1638971 - DNA, 25 bp, Homo sapien
caatccgctcgcctatcgaaacagg

SEQ ID NO: 1638972 - DNA, 25 bp, Homo sapien
tcgaaacaggcgcaactgcgccgct

SEQ ID NO: 1638973 - DNA, 25 bp, Homo sapien
taagggattgctccggcaaccaggg

SEQ ID NO: 1638974 - DNA, 25 bp, Homo sapien
ctccaggcggcagggaaccaggcct

SEQ ID NO: 1638975 - DNA, 25 bp, Homo sapien
gtgggcaagagcactaaggccccgc

SEQ ID NO: 1638976 - DNA, 25 bp, Homo sapien
cacccagagctgtcggtgggcaaga

SEQ ID NO: 1638977 - DNA, 25 bp, Homo sapien
ctgaatacccgacccaaagaccatt

SEQ ID NO: 1638978 - DNA, 25 bp, Homo sapien
tcaccttgggtccacgtgcggccag

SEQ ID NO: 1638979 - DNA, 25 bp, Homo sapien
aagtcgccaagctctcccgattgcc

SEQ ID NO: 1638980 - DNA, 25 bp, Homo sapien
cccaagtcgccaagctctcccgatt

SEQ ID NO: 1638981 - DNA, 25 bp, Homo sapien
ccctttccttgatcaagctctgaag

SEQ ID NO: 1638982 - DNA, 25 bp, Homo sapien
cttgatcaagctctgaaggctcccc

SEQ ID NO: 1638983 - DNA, 25 bp, Homo sapien
ggagtcgtaacactccacctccgtg

SEQ ID NO: 1638984 - DNA, 25 bp, Homo sapien
cctccgtgctctccaccaggcgccg

SEQ ID NO: 1638985 - DNA, 25 bp, Homo sapien
ccgtgagggagtcgtaacactccac

SEQ ID NO: 1638986 - DNA, 25 bp, Homo sapien
tgagggagtcgtaacactccacctc

SEQ ID NO: 1638987 - DNA, 25 bp, Homo sapien
cagctgcagcagcgctcggtggtac

SEQ ID NO: 1638988 - DNA, 25 bp, Homo sapien
ggcgggcaggccgctagggcgggcc

SEQ ID NO: 1638989 - DNA, 25 bp, Homo sapien
gcgggcaggccgctagggcgggccc

SEQ ID NO: 1638990 - DNA, 25 bp, Homo sapien
cccctgcgccgccttcagctgcagc

SEQ ID NO: 1638991 - DNA, 25 bp, Homo sapien
ctctgccttgaacgccacggcggca

SEQ ID NO: 1638992 - DNA, 25 bp, Homo sapien
tcttctctcgatagcagcgctggcc

SEQ ID NO: 1638993 - DNA, 25 bp, Homo sapien
acgcaggctgctgtcgagcgccgcg

SEQ ID NO: 1638994 - DNA, 25 bp, Homo sapien
gatggcctcccggaacttcttctct

SEQ ID NO: 1638995 - DNA, 25 bp, Homo sapien
cgggacgagccgagccatggcggga

SEQ ID NO: 1638996 - DNA, 25 bp, Homo sapien
ggtaggaccgggacgagccgagcca

SEQ ID NO: 1638997 - DNA, 25 bp, Homo sapien
catggcgggagcccgagcctgggcc

SEQ ID NO: 1638998 - DNA, 25 bp, Homo sapien
gagccgagccatggcgggagcccga

SEQ ID NO: 1638999 - DNA, 25 bp, Homo sapien
ggaaactcctgccgccgccgctgca

SEQ ID NO: 1639000 - DNA, 25 bp, Homo sapien
gaaactcctgccgccgccgctgcag

SEQ ID NO: 1639001 - DNA, 25 bp, Homo sapien
tgggaaactcctgccgccgccgctg

SEQ ID NO: 1639002 - DNA, 25 bp, Homo sapien
gtgggaaactcctgccgccgccgct

SEQ ID NO: 1639003 - DNA, 25 bp, Homo sapien
cggtgcccaaagctcccgaagattt

SEQ ID NO: 1639004 - DNA, 25 bp, Homo sapien
cccggtgcccaaagctcccgaagat

SEQ ID NO: 1639005 - DNA, 25 bp, Homo sapien
ccggtgcccaaagctcccgaagatt

SEQ ID NO: 1639006 - DNA, 25 bp, Homo sapien
aggtggtgataaagtcttcctggag

SEQ ID NO: 1639007 - DNA, 25 bp, Homo sapien
aataaattcttttattgagatgaga

SEQ ID NO: 1639008 - DNA, 25 bp, Homo sapien
atgagagacggacacacactgggag

SEQ ID NO: 1639009 - DNA, 25 bp, Homo sapien
agacggacacacactgggagggttt

SEQ ID NO: 1639010 - DNA, 25 bp, Homo sapien
ttattgagatgagagacggacacac

SEQ ID NO: 1639011 - DNA, 25 bp, Homo sapien
ggcaggcggcggcaaggctggtccc

SEQ ID NO: 1639012 - DNA, 25 bp, Homo sapien
catacttgaggaagactgcggcgcg

SEQ ID NO: 1639013 - DNA, 25 bp, Homo sapien
gggccgcgcatacttgaggaagact

SEQ ID NO: 1639014 - DNA, 25 bp, Homo sapien
acggctcgagggtgcccagttcctc

SEQ ID NO: 1639015 - DNA, 25 bp, Homo sapien
aagaagcgtcgatgtggttccccac

SEQ ID NO: 1639016 - DNA, 25 bp, Homo sapien
cgcgtcccgtcttcaactggagtga

SEQ ID NO: 1639017 - DNA, 25 bp, Homo sapien
tgaggcagggcaagtggttggagat

SEQ ID NO: 1639018 - DNA, 25 bp, Homo sapien
ggctctcttgagatcgggcacgcgt

SEQ ID NO: 1639019 - DNA, 25 bp, Homo sapien
tattcttcctacagggcgcggctag

SEQ ID NO: 1639020 - DNA, 25 bp, Homo sapien
gaaggtaagtccctgaagctgcggt

SEQ ID NO: 1639021 - DNA, 25 bp, Homo sapien
caaggttaagagaccccagatctgg

SEQ ID NO: 1639022 - DNA, 25 bp, Homo sapien
cacctggtagcatggttagcggccc

SEQ ID NO: 1639023 - DNA, 25 bp, Homo sapien
gagcccgccccgtcgagcaagcggt

SEQ ID NO: 1639024 - DNA, 25 bp, Homo sapien
gagccgcagccgcacgacgacccgg

SEQ ID NO: 1639025 - DNA, 25 bp, Homo sapien
agccgcacgacgacccggctcccat

SEQ ID NO: 1639026 - DNA, 25 bp, Homo sapien
tcgagcaagcggtgcgccaggctca

SEQ ID NO: 1639027 - DNA, 25 bp, Homo sapien
gccggggtggtgcagccggaaatcc

SEQ ID NO: 1639028 - DNA, 25 bp, Homo sapien
cagcccgaggcacagcagcgggccg

SEQ ID NO: 1639029 - DNA, 25 bp, Homo sapien
cggggtggtgcagccggaaatccag

SEQ ID NO: 1639030 - DNA, 25 bp, Homo sapien
agcccgaggcacagcagcgggccgg

SEQ ID NO: 1639031 - DNA, 25 bp, Homo sapien
ctccgcccgtgagaaggagtccgcg

SEQ ID NO: 1639032 - DNA, 25 bp, Homo sapien
gtgaaggagtcttggatccgggctc

SEQ ID NO: 1639033 - DNA, 25 bp, Homo sapien
tgaaggagtcttggatccgggctct

SEQ ID NO: 1639034 - DNA, 25 bp, Homo sapien
aggtgaaggagtcttggatccgggc

SEQ ID NO: 1639035 - DNA, 25 bp, Homo sapien
ggtgaaggagtcttggatccgggct

SEQ ID NO: 1639036 - DNA, 25 bp, Homo sapien
tactccctgccctggaaaggcccca

SEQ ID NO: 1639037 - DNA, 25 bp, Homo sapien
ctccctgccctggaaaggccccaag

SEQ ID NO: 1639038 - DNA, 25 bp, Homo sapien
tttgcacgccacaaacaggcaagcc

SEQ ID NO: 1639039 - DNA, 25 bp, Homo sapien
gaaccgccagataaagtgtgtcacc

SEQ ID NO: 1639040 - DNA, 25 bp, Homo sapien
ccagcgctcaggtaggaatcaagca

SEQ ID NO: 1639041 - DNA, 25 bp, Homo sapien
cagctgcaggcgatgtagacgcacg

SEQ ID NO: 1639042 - DNA, 25 bp, Homo sapien
gccagtctaccaccagggcgcgcat

SEQ ID NO: 1639043 - DNA, 25 bp, Homo sapien
cagtctaccaccagggcgcgcatct

SEQ ID NO: 1639044 - DNA, 25 bp, Homo sapien
ccagtctaccaccagggcgcgcatc

SEQ ID NO: 1639045 - DNA, 25 bp, Homo sapien
agtctaccaccagggcgcgcatctc

SEQ ID NO: 1639046 - DNA, 25 bp, Homo sapien
ctcctccagtcagttggacatctta

SEQ ID NO: 1639047 - DNA, 25 bp, Homo sapien
gcctcgccaggcgtcttggggagac

SEQ ID NO: 1639048 - DNA, 25 bp, Homo sapien
gatgtccccggcgtactcgcgttct

SEQ ID NO: 1639049 - DNA, 25 bp, Homo sapien
cgcggggaagccgtcggggactgcg

SEQ ID NO: 1639050 - DNA, 25 bp, Homo sapien
gagacagtggggcccgcggggaagc

SEQ ID NO: 1639051 - DNA, 25 bp, Homo sapien
ctgcgtcgagggaggcagcgagact

SEQ ID NO: 1639052 - DNA, 25 bp, Homo sapien
ggcccagcgcctaacgataggcccg

SEQ ID NO: 1639053 - DNA, 25 bp, Homo sapien
cgcctaacgataggcccgagccggg

SEQ ID NO: 1639054 - DNA, 25 bp, Homo sapien
ggggcccagcgcctaacgataggcc

SEQ ID NO: 1639055 - DNA, 25 bp, Homo sapien
ccagcgcctaacgataggcccgagc

SEQ ID NO: 1639056 - DNA, 25 bp, Homo sapien
cctccaggagggtgttgcgggcgag

SEQ ID NO: 1639057 - DNA, 25 bp, Homo sapien
ctccaggagggtgttgcgggcgagg

SEQ ID NO: 1639058 - DNA, 25 bp, Homo sapien
ggtgttgcgggcgaggccaagcacc

SEQ ID NO: 1639059 - DNA, 25 bp, Homo sapien
gggcgaggccaagcaccgacccttg

SEQ ID NO: 1639060 - DNA, 25 bp, Homo sapien
cagcgacaccccaatagtgagaagc

SEQ ID NO: 1639061 - DNA, 25 bp, Homo sapien
gggagagcttaagagcagcgacacc

SEQ ID NO: 1639062 - DNA, 25 bp, Homo sapien
tatttcctagcttaatccactggga

SEQ ID NO: 1639063 - DNA, 25 bp, Homo sapien
tcctagcttaatccactgggagagc

SEQ ID NO: 1639064 - DNA, 25 bp, Homo sapien
tacaggactgctggtagcaccaaac

SEQ ID NO: 1639065 - DNA, 25 bp, Homo sapien
acaaccatcagtgcacgagggcagc

SEQ ID NO: 1639066 - DNA, 25 bp, Homo sapien
gcagcagctaaaagggaatcgcact

SEQ ID NO: 1639067 - DNA, 25 bp, Homo sapien
catttgcagagaggtaatcagcacc

SEQ ID NO: 1639068 - DNA, 25 bp, Homo sapien
ctctaagttcaaacacccttcttgg

SEQ ID NO: 1639069 - DNA, 25 bp, Homo sapien
tcttgggaaaagctctacaggataa

SEQ ID NO: 1639070 - DNA, 25 bp, Homo sapien
tattaagactctaagttcaaacacc

SEQ ID NO: 1639071 - DNA, 25 bp, Homo sapien
tctacaggataaccacacatgctca

SEQ ID NO: 1639072 - DNA, 25 bp, Homo sapien
cagctgctgcagctgtgggacccca

SEQ ID NO: 1639073 - DNA, 25 bp, Homo sapien
gctgctgcagctgtgggaccccatc

SEQ ID NO: 1639074 - DNA, 25 bp, Homo sapien
gccagctgctgcagctgtgggaccc

SEQ ID NO: 1639075 - DNA, 25 bp, Homo sapien
ctacggggccagctgctgcagctgt

SEQ ID NO: 1639076 - DNA, 25 bp, Homo sapien
ggttctaaccaaacgctcaggagct

SEQ ID NO: 1639077 - DNA, 25 bp, Homo sapien
gaagtgctaacaccttgcggcaaaa

SEQ ID NO: 1639078 - DNA, 25 bp, Homo sapien
caaccaaacgagtcctagctgtagc

SEQ ID NO: 1639079 - DNA, 25 bp, Homo sapien
ttccaggtggcagcataaacaggga

SEQ ID NO: 1639080 - DNA, 25 bp, Homo sapien
tgaagggaacggctagtacaggagg

SEQ ID NO: 1639081 - DNA, 25 bp, Homo sapien
ccaggggtctgactccatcaccaag

SEQ ID NO: 1639082 - DNA, 25 bp, Homo sapien
ggggtctgactccatcaccaaggca

SEQ ID NO: 1639083 - DNA, 25 bp, Homo sapien
gggaacggctagtacaggaggagct

SEQ ID NO: 1639084 - DNA, 25 bp, Homo sapien
ccagtagggacggagaactgtcaga

SEQ ID NO: 1639085 - DNA, 25 bp, Homo sapien
gtaccgtacaaatatgaagacgagg

SEQ ID NO: 1639086 - DNA, 25 bp, Homo sapien
aagctaaactccaaacacccagagg

SEQ ID NO: 1639087 - DNA, 25 bp, Homo sapien
taacaacatcgcacacagaggaaaa

SEQ ID NO: 1639088 - DNA, 25 bp, Homo sapien
cacagcactgacatggacgtgcact

SEQ ID NO: 1639089 - DNA, 25 bp, Homo sapien
cagtccgaggcacgcacaggagtcc

SEQ ID NO: 1639090 - DNA, 25 bp, Homo sapien
catggacgtgcactcatgttcaacc

SEQ ID NO: 1639091 - DNA, 25 bp, Homo sapien
gcactcatgttcaaccttaaggctg

SEQ ID NO: 1639092 - DNA, 25 bp, Homo sapien
ccccaataggtaccagagatgccca

SEQ ID NO: 1639093 - DNA, 25 bp, Homo sapien
ccaccccaataggtaccagagatgc

SEQ ID NO: 1639094 - DNA, 25 bp, Homo sapien
accccaataggtaccagagatgccc

SEQ ID NO: 1639095 - DNA, 25 bp, Homo sapien
ccccaccccaataggtaccagagat

SEQ ID NO: 1639096 - DNA, 25 bp, Homo sapien
gggcccaatactgtccggtgtaaga

SEQ ID NO: 1639097 - DNA, 25 bp, Homo sapien
agggtccagcgggaggtaaggccag

SEQ ID NO: 1639098 - DNA, 25 bp, Homo sapien
tgtaacagccaaggctggtggccct

SEQ ID NO: 1639099 - DNA, 25 bp, Homo sapien
tgtaagattgtaacagccaaggctg

SEQ ID NO: 1639100 - DNA, 25 bp, Homo sapien
tggaaggaagccctagtaaggcacg

SEQ ID NO: 1639101 - DNA, 25 bp, Homo sapien
aggcaggcaggtttggccccaaatg

SEQ ID NO: 1639102 - DNA, 25 bp, Homo sapien
ccccatggtacagatcctaggatct

SEQ ID NO: 1639103 - DNA, 25 bp, Homo sapien
ggcagccttcgtccagatgcagcag

SEQ ID NO: 1639104 - DNA, 25 bp, Homo sapien
gagtcttccaaatgcgagtctgggc

SEQ ID NO: 1639105 - DNA, 25 bp, Homo sapien
acctgaatctccaaccgcccaacag

SEQ ID NO: 1639106 - DNA, 25 bp, Homo sapien
ctcactggggcttgtgtggattaaa

SEQ ID NO: 1639107 - DNA, 25 bp, Homo sapien
aaatgcgagtctgggcacaaaggtg

SEQ ID NO: 1639108 - DNA, 25 bp, Homo sapien
aaaaaccacccagcggtgatggcag

SEQ ID NO: 1639109 - DNA, 25 bp, Homo sapien
tgatggcagcgagcgtgcgtcctct

SEQ ID NO: 1639110 - DNA, 25 bp, Homo sapien
tgcgtcctctgcgtgggcagactgc

SEQ ID NO: 1639111 - DNA, 25 bp, Homo sapien
gaaaaaaccacccagcggtgatggc

SEQ ID NO: 1639112 - DNA, 25 bp, Homo sapien
aagtgggtccgctggtccagctcca

SEQ ID NO: 1639113 - DNA, 25 bp, Homo sapien
ctgctgccggtccttagctatgcca

SEQ ID NO: 1639114 - DNA, 25 bp, Homo sapien
ggcatcccacacgtcattcctccgg

SEQ ID NO: 1639115 - DNA, 25 bp, Homo sapien
acacgtcattcctccggccagctga

SEQ ID NO: 1639116 - DNA, 25 bp, Homo sapien
cggccagctgacacgtttgcttcct

SEQ ID NO: 1639117 - DNA, 25 bp, Homo sapien
gaggaccaacagcaaaagggcctga

SEQ ID NO: 1639118 - DNA, 25 bp, Homo sapien
gtccaaagaggaccaacagcaaaag

SEQ ID NO: 1639119 - DNA, 25 bp, Homo sapien
catgaagcgggggccttcgagggcc

SEQ ID NO: 1639120 - DNA, 25 bp, Homo sapien
gggaaatctcccagacatgaagcgg

SEQ ID NO: 1639121 - DNA, 25 bp, Homo sapien
cttgagaagtgagttaagagcagat

SEQ ID NO: 1639122 - DNA, 25 bp, Homo sapien
aagtgagttaagagcagatcccatc

SEQ ID NO: 1639123 - DNA, 25 bp, Homo sapien
ttgagaagtgagttaagagcagatc

SEQ ID NO: 1639124 - DNA, 25 bp, Homo sapien
cagcgcgggggccccaggcactcac

SEQ ID NO: 1639125 - DNA, 25 bp, Homo sapien
tgtgattgtgatggactgggcggta

SEQ ID NO: 1639126 - DNA, 25 bp, Homo sapien
ttgtgatggactgggcggtaaattc

SEQ ID NO: 1639127 - DNA, 25 bp, Homo sapien
ggcggtaaattcatcatcgaagtac

SEQ ID NO: 1639128 - DNA, 25 bp, Homo sapien
tggactgggcggtaaattcatcatc

SEQ ID NO: 1639129 - DNA, 25 bp, Homo sapien
agttgatgctgaggaagaacctgtg

SEQ ID NO: 1639130 - DNA, 25 bp, Homo sapien
tgaggaagaacctgtgctccatgac

SEQ ID NO: 1639131 - DNA, 25 bp, Homo sapien
ggaccacgtcctgccagttgatgct

SEQ ID NO: 1639132 - DNA, 25 bp, Homo sapien
tccatgacctccttggcatcgctgg

SEQ ID NO: 1639133 - DNA, 25 bp, Homo sapien
gcccagcaagcagggacttggcctc

SEQ ID NO: 1639134 - DNA, 25 bp, Homo sapien
acggcccggccatagtcattgtcct

SEQ ID NO: 1639135 - DNA, 25 bp, Homo sapien
ggtccttcttaagcagcccagcaag

SEQ ID NO: 1639136 - DNA, 25 bp, Homo sapien
catgaggatgagctcgaagaggcgc

SEQ ID NO: 1639137 - DNA, 25 bp, Homo sapien
aggatggaggagaaatgagggctgg

SEQ ID NO: 1639138 - DNA, 25 bp, Homo sapien
atggaggagaaatgagggctgggcc

SEQ ID NO: 1639139 - DNA, 25 bp, Homo sapien
gagaaatgagggctgggcccgtggc

SEQ ID NO: 1639140 - DNA, 25 bp, Homo sapien
tgaggatggaggagaaatgagggct

SEQ ID NO: 1639141 - DNA, 25 bp, Homo sapien
tacccttggcctcacacgttcctac

SEQ ID NO: 1639142 - DNA, 25 bp, Homo sapien
cctacccttggcctcacacgttcct

SEQ ID NO: 1639143 - DNA, 25 bp, Homo sapien
ctacccttggcctcacacgttccta

SEQ ID NO: 1639144 - DNA, 25 bp, Homo sapien
cagaaggttttcatggtggccccgt

SEQ ID NO: 1639145 - DNA, 25 bp, Homo sapien
gatgccctctttgcagaggccaaag

SEQ ID NO: 1639146 - DNA, 25 bp, Homo sapien
atggtggccccgtcactgatgccct

SEQ ID NO: 1639147 - DNA, 25 bp, Homo sapien
tgatgccctctttgcagaggccaaa

SEQ ID NO: 1639148 - DNA, 25 bp, Homo sapien
tcagagagaggccagatccaaccct

SEQ ID NO: 1639149 - DNA, 25 bp, Homo sapien
tcttatttcgaacgtgggggcacta

SEQ ID NO: 1639150 - DNA, 25 bp, Homo sapien
cccccatggtacctgggaacagctg

SEQ ID NO: 1639151 - DNA, 25 bp, Homo sapien
gaaaagtcaacggatctcaggtgca

SEQ ID NO: 1639152 - DNA, 25 bp, Homo sapien
tgacactccgctagtggcctaggag

SEQ ID NO: 1639153 - DNA, 25 bp, Homo sapien
tgtggcgtcccactgtgagaacact

SEQ ID NO: 1639154 - DNA, 25 bp, Homo sapien
cactgtcgtgtgtagctgtagctca

SEQ ID NO: 1639155 - DNA, 25 bp, Homo sapien
tatgagacgcgtccacactgtcgtg

SEQ ID NO: 1639156 - DNA, 25 bp, Homo sapien
tcccgcgagtgcaagtactcaagag

SEQ ID NO: 1639157 - DNA, 25 bp, Homo sapien
tgatgtcgcggtataccacgtcccg

SEQ ID NO: 1639158 - DNA, 25 bp, Homo sapien
aatctctgcaccataaaaccgggcc

SEQ ID NO: 1639159 - DNA, 25 bp, Homo sapien
tactcaagagccgagacaatctctg

SEQ ID NO: 1639160 - DNA, 25 bp, Homo sapien
gggtctggaaggcatacttcagcgc

SEQ ID NO: 1639161 - DNA, 25 bp, Homo sapien
gtcgtgggtctggaaggcatacttc

SEQ ID NO: 1639162 - DNA, 25 bp, Homo sapien
tcacaaagcacaggcggtcgtgggt

SEQ ID NO: 1639163 - DNA, 25 bp, Homo sapien
ctcacccccgttggcatactccatc

SEQ ID NO: 1639164 - DNA, 25 bp, Homo sapien
gctctgcggtaggaaagggttacat

SEQ ID NO: 1639165 - DNA, 25 bp, Homo sapien
tcacataccggctgcaccttttggg

SEQ ID NO: 1639166 - DNA, 25 bp, Homo sapien
tactgtggcttaataggatacctgg

SEQ ID NO: 1639167 - DNA, 25 bp, Homo sapien
agtagttctccactgcactaaggag

SEQ ID NO: 1639168 - DNA, 25 bp, Homo sapien
cggtgactgtgtgagcgacttcatc

SEQ ID NO: 1639169 - DNA, 25 bp, Homo sapien
gctctcggtgactgtgtgagcgact

SEQ ID NO: 1639170 - DNA, 25 bp, Homo sapien
acccggctctcggtgactgtgtgag

SEQ ID NO: 1639171 - DNA, 25 bp, Homo sapien
tggaggacccggctctcggtgactg

SEQ ID NO: 1639172 - DNA, 25 bp, Homo sapien
ctgactgtacagcagaaccaccagg

SEQ ID NO: 1639173 - DNA, 25 bp, Homo sapien
tgactgtacagcagaaccaccagga

SEQ ID NO: 1639174 - DNA, 25 bp, Homo sapien
cagcagaaccaccaggagtggttcc

SEQ ID NO: 1639175 - DNA, 25 bp, Homo sapien
cagaaccaccaggagtggttccaaa

SEQ ID NO: 1639176 - DNA, 25 bp, Homo sapien
tattccagaacaagagggacaggca

SEQ ID NO: 1639177 - DNA, 25 bp, Homo sapien
actggttaaactggacaatggctac

SEQ ID NO: 1639178 - DNA, 25 bp, Homo sapien
tcccaaaacgttaacagtgctgagg

SEQ ID NO: 1639179 - DNA, 25 bp, Homo sapien
caaggctggctaaacgctgataact

SEQ ID NO: 1639180 - DNA, 25 bp, Homo sapien
gactttgccaaaggttcccttgcca

SEQ ID NO: 1639181 - DNA, 25 bp, Homo sapien
tgacttccttccgcaggatcttcat

SEQ ID NO: 1639182 - DNA, 25 bp, Homo sapien
gagtttgagatagtcgaagtcattc

SEQ ID NO: 1639183 - DNA, 25 bp, Homo sapien
ttccttccgcaggatcttcatggcg

SEQ ID NO: 1639184 - DNA, 25 bp, Homo sapien
aactgtgtgttctgaagcggccttc

SEQ ID NO: 1639185 - DNA, 25 bp, Homo sapien
gggtagccaggtcttcaccaactcc

SEQ ID NO: 1639186 - DNA, 25 bp, Homo sapien
ccaaacggcttaggctggagcagga

SEQ ID NO: 1639187 - DNA, 25 bp, Homo sapien
gctcatggcccgtgggaggaaattt

SEQ ID NO: 1639188 - DNA, 25 bp, Homo sapien
tcgtggaggagtcactgggggagcc

SEQ ID NO: 1639189 - DNA, 25 bp, Homo sapien
gcccgtgccttgctgaccgccactt

SEQ ID NO: 1639190 - DNA, 25 bp, Homo sapien
gggagccacacttgtagtccatggg

SEQ ID NO: 1639191 - DNA, 25 bp, Homo sapien
gtgccttgctgaccgccacttccat

SEQ ID NO: 1639192 - DNA, 25 bp, Homo sapien
tgttggcgaccatctggatggcccg

SEQ ID NO: 1639193 - DNA, 25 bp, Homo sapien
ctgttggcgaccatctggatggccc

SEQ ID NO: 1639194 - DNA, 25 bp, Homo sapien
tggcgaccatctggatggcccgcat

SEQ ID NO: 1639195 - DNA, 25 bp, Homo sapien
ttggcgaccatctggatggcccgca

SEQ ID NO: 1639196 - DNA, 25 bp, Homo sapien
tcagagtcgaacagctgagtgccac

SEQ ID NO: 1639197 - DNA, 25 bp, Homo sapien
caaaggagctgaagacactgcaagg

SEQ ID NO: 1639198 - DNA, 25 bp, Homo sapien
ccaagtgcttgagccgaagcgttca

SEQ ID NO: 1639199 - DNA, 25 bp, Homo sapien
agtgaaattccacgccaggcgcagt

SEQ ID NO: 1639200 - DNA, 25 bp, Homo sapien
tgttgggtcgcggcctctcggtctt

SEQ ID NO: 1639201 - DNA, 25 bp, Homo sapien
tcctctcgatgactgtggtccactg

SEQ ID NO: 1639202 - DNA, 25 bp, Homo sapien
tatgacaaaggtgttgggtcgcggc

SEQ ID NO: 1639203 - DNA, 25 bp, Homo sapien
ggagaatccacgtggaaggtcctct

SEQ ID NO: 1639204 - DNA, 25 bp, Homo sapien
ctgctacggagaagttgtttaaggg

SEQ ID NO: 1639205 - DNA, 25 bp, Homo sapien
cttcagcaggaagtaccgtggcctc

SEQ ID NO: 1639206 - DNA, 25 bp, Homo sapien
tgtacccaatgaaggagccgtcgct

SEQ ID NO: 1639207 - DNA, 25 bp, Homo sapien
ctcgggcctctccttgtacccaatg

SEQ ID NO: 1639208 - DNA, 25 bp, Homo sapien
cactgggctgagcccgggtgatcca

SEQ ID NO: 1639209 - DNA, 25 bp, Homo sapien
actgggctgagcccgggtgatccac

SEQ ID NO: 1639210 - DNA, 25 bp, Homo sapien
tgggctgagcccgggtgatccacag

SEQ ID NO: 1639211 - DNA, 25 bp, Homo sapien
ggcactgggctgagcccgggtgatc

SEQ ID NO: 1639212 - DNA, 25 bp, Homo sapien
gccagccttctttgatgacagacac

SEQ ID NO: 1639213 - DNA, 25 bp, Homo sapien
cacgcttgtggagccagccttcttt

SEQ ID NO: 1639214 - DNA, 25 bp, Homo sapien
ggagccagccttctttgatgacaga

SEQ ID NO: 1639215 - DNA, 25 bp, Homo sapien
tgtggagccagccttctttgatgac

SEQ ID NO: 1639216 - DNA, 25 bp, Homo sapien
ctgtcacctagctcgggacagctca

SEQ ID NO: 1639217 - DNA, 25 bp, Homo sapien
tggtacgctgtcacctagctcggga

SEQ ID NO: 1639218 - DNA, 25 bp, Homo sapien
gtggcagcgtggtacgctgtcacct

SEQ ID NO: 1639219 - DNA, 25 bp, Homo sapien
agcgtggtacgctgtcacctagctc

SEQ ID NO: 1639220 - DNA, 25 bp, Homo sapien
ggacatgcaggaggcaccgtggaca

SEQ ID NO: 1639221 - DNA, 25 bp, Homo sapien
aggacatgcaggaggcaccgtggac

SEQ ID NO: 1639222 - DNA, 25 bp, Homo sapien
acatgcaggaggcaccgtggacagg

SEQ ID NO: 1639223 - DNA, 25 bp, Homo sapien
gacatgcaggaggcaccgtggacag

SEQ ID NO: 1639224 - DNA, 25 bp, Homo sapien
tatttgcggacagcaggtcgggagc

SEQ ID NO: 1639225 - DNA, 25 bp, Homo sapien
gcctggggttatttgcggacagcag

SEQ ID NO: 1639226 - DNA, 25 bp, Homo sapien
gttatttgcggacagcaggtcggga

SEQ ID NO: 1639227 - DNA, 25 bp, Homo sapien
gggttatttgcggacagcaggtcgg

SEQ ID NO: 1639228 - DNA, 25 bp, Homo sapien
catctcagcaactaaggagtcagca

SEQ ID NO: 1639229 - DNA, 25 bp, Homo sapien
ctcagcaactaaggagtcagcacag

SEQ ID NO: 1639230 - DNA, 25 bp, Homo sapien
ctcgggtctcccagccgagaagcag

SEQ ID NO: 1639231 - DNA, 25 bp, Homo sapien
cgctgctgggatcaacagagctgct

SEQ ID NO: 1639232 - DNA, 25 bp, Homo sapien
tgtagaggaaccagaacccttactc

SEQ ID NO: 1639233 - DNA, 25 bp, Homo sapien
gaaccagaacccttactcattattg

SEQ ID NO: 1639234 - DNA, 25 bp, Homo sapien
gccaactgctggctcggatgtagag

SEQ ID NO: 1639235 - DNA, 25 bp, Homo sapien
actcattattggtgggaggtgcaaa

SEQ ID NO: 1639236 - DNA, 25 bp, Homo sapien
ctgtcgcctgcactcagatctgtgc

SEQ ID NO: 1639237 - DNA, 25 bp, Homo sapien
cacagcgcccggaggaagacttgct

SEQ ID NO: 1639238 - DNA, 25 bp, Homo sapien
tgtgcctttccacagcgcccggagg

SEQ ID NO: 1639239 - DNA, 25 bp, Homo sapien
cctggtgctgcggaggctcattggg

SEQ ID NO: 1639240 - DNA, 25 bp, Homo sapien
agacaacaggaactagtggtgtaac

SEQ ID NO: 1639241 - DNA, 25 bp, Homo sapien
aagacaacaggaactagtggtgtaa

SEQ ID NO: 1639242 - DNA, 25 bp, Homo sapien
acaacaggaactagtggtgtaacag

SEQ ID NO: 1639243 - DNA, 25 bp, Homo sapien
gacaacaggaactagtggtgtaaca

SEQ ID NO: 1639244 - DNA, 25 bp, Homo sapien
ggcaagtcaccaagtcatgttccct

SEQ ID NO: 1639245 - DNA, 25 bp, Homo sapien
tactgtcttagacttcagggcacgg

SEQ ID NO: 1639246 - DNA, 25 bp, Homo sapien
gatcaatgatggaccttatagggca

SEQ ID NO: 1639247 - DNA, 25 bp, Homo sapien
tccgaaggaaatacgccacactaag

SEQ ID NO: 1639248 - DNA, 25 bp, Homo sapien
ctacactcgccccatctgtctgctt

SEQ ID NO: 1639249 - DNA, 25 bp, Homo sapien
acactcgccccatctgtctgcttgg

SEQ ID NO: 1639250 - DNA, 25 bp, Homo sapien
gctggaggcaggttgaagccgtggg

SEQ ID NO: 1639251 - DNA, 25 bp, Homo sapien
actcgccccatctgtctgcttggag

SEQ ID NO: 1639252 - DNA, 25 bp, Homo sapien
caccttccccctcacgccacccagg

SEQ ID NO: 1639253 - DNA, 25 bp, Homo sapien
ctgcaaaagaaacggggacaagaat

SEQ ID NO: 1639254 - DNA, 25 bp, Homo sapien
aagaataagcacagagcagattcct

SEQ ID NO: 1639255 - DNA, 25 bp, Homo sapien
ggacaagaataagcacagagcagat

SEQ ID NO: 1639256 - DNA, 25 bp, Homo sapien
gccacgggctccatacactctgagg

SEQ ID NO: 1639257 - DNA, 25 bp, Homo sapien
tcatgtcaaatattctagtctgctt

SEQ ID NO: 1639258 - DNA, 25 bp, Homo sapien
ttggccacgggctccatacactctg

SEQ ID NO: 1639259 - DNA, 25 bp, Homo sapien
aatattctagtctgcttggccacgg

SEQ ID NO: 1639260 - DNA, 25 bp, Homo sapien
tagtgcccatggatcacgtccaagg

SEQ ID NO: 1639261 - DNA, 25 bp, Homo sapien
gcgggatcctccacgcagttctgac

SEQ ID NO: 1639262 - DNA, 25 bp, Homo sapien
gtccaaggcccctatggaggctgcc

SEQ ID NO: 1639263 - DNA, 25 bp, Homo sapien
tggtctgctcgctccaacacacaat

SEQ ID NO: 1639264 - DNA, 25 bp, Homo sapien
actatgtgggtaatgtcgcctctcc

SEQ ID NO: 1639265 - DNA, 25 bp, Homo sapien
tacgcaaattagacaggatagccaa

SEQ ID NO: 1639266 - DNA, 25 bp, Homo sapien
cgcagtctgagcaaaaccggaagca

SEQ ID NO: 1639267 - DNA, 25 bp, Homo sapien
actgctcgggtcaccagggattcag

SEQ ID NO: 1639268 - DNA, 25 bp, Homo sapien
cacctcccatcttgtgtcgcctcct

SEQ ID NO: 1639269 - DNA, 25 bp, Homo sapien
ggagagattcggtgaatacccacag

SEQ ID NO: 1639270 - DNA, 25 bp, Homo sapien
tgaaaaccgaggatgggagagattc

SEQ ID NO: 1639271 - DNA, 25 bp, Homo sapien
tacccacagcgagagacagcaggga

SEQ ID NO: 1639272 - DNA, 25 bp, Homo sapien
tgatgtgcacgcatgcacgggagcc

SEQ ID NO: 1639273 - DNA, 25 bp, Homo sapien
gcccctgatgtgcacgcatgcacgg

SEQ ID NO: 1639274 - DNA, 25 bp, Homo sapien
tgcatggggaatccctgacccacgt

SEQ ID NO: 1639275 - DNA, 25 bp, Homo sapien
gcacgggagccctccagttggactg

SEQ ID NO: 1639276 - DNA, 25 bp, Homo sapien
ccagtgggtctgcatcaaggctaat

SEQ ID NO: 1639277 - DNA, 25 bp, Homo sapien
ggctaatactcagtgagcactcaca

SEQ ID NO: 1639278 - DNA, 25 bp, Homo sapien
aaaggagaaaccagtgggtctgcat

SEQ ID NO: 1639279 - DNA, 25 bp, Homo sapien
gcaccaggcatggattaatgttcat

SEQ ID NO: 1639280 - DNA, 25 bp, Homo sapien
atggaatcttaacaccaatctgccc

SEQ ID NO: 1639281 - DNA, 25 bp, Homo sapien
gtgcccagcctgtagaatggaatct

SEQ ID NO: 1639282 - DNA, 25 bp, Homo sapien
tggaatcttaacaccaatctgccca

SEQ ID NO: 1639283 - DNA, 25 bp, Homo sapien
cagcctgtagaatggaatcttaaca

SEQ ID NO: 1639284 - DNA, 25 bp, Homo sapien
gaaggttcccgtttacagctgagca

SEQ ID NO: 1639285 - DNA, 25 bp, Homo sapien
tgattcacattcctgtctggagccc

SEQ ID NO: 1639286 - DNA, 25 bp, Homo sapien
aggaggcctgtgctttccaacgcag

SEQ ID NO: 1639287 - DNA, 25 bp, Homo sapien
caggagtagcatcagcccaaattca

SEQ ID NO: 1639288 - DNA, 25 bp, Homo sapien
gtcagctacccccgggaccaggtca

SEQ ID NO: 1639289 - DNA, 25 bp, Homo sapien
gcagccccagctgggtaagtgtaca

SEQ ID NO: 1639290 - DNA, 25 bp, Homo sapien
ccacgtcagctacccccgggaccag

SEQ ID NO: 1639291 - DNA, 25 bp, Homo sapien
ccccagctgggtaagtgtacaccaa

SEQ ID NO: 1639292 - DNA, 25 bp, Homo sapien
aagagaaccggggagcggcaactgc

SEQ ID NO: 1639293 - DNA, 25 bp, Homo sapien
agaagagaaccggggagcggcaact

SEQ ID NO: 1639294 - DNA, 25 bp, Homo sapien
gagaaccggggagcggcaactgccc

SEQ ID NO: 1639295 - DNA, 25 bp, Homo sapien
agagaaccggggagcggcaactgcc

SEQ ID NO: 1639296 - DNA, 25 bp, Homo sapien
aacatctgcgaacgagcttctccag

SEQ ID NO: 1639297 - DNA, 25 bp, Homo sapien
cctcttggccgacccggcttgctgt

SEQ ID NO: 1639298 - DNA, 25 bp, Homo sapien
gacctctgacatgcagtctcctctt

SEQ ID NO: 1639299 - DNA, 25 bp, Homo sapien
tgggtgccgagttggcagtgggtcc

SEQ ID NO: 1639300 - DNA, 25 bp, Homo sapien
ttgagggccttccgctgagagctct

SEQ ID NO: 1639301 - DNA, 25 bp, Homo sapien
tgcaaagccactgcgtggaagagga

SEQ ID NO: 1639302 - DNA, 25 bp, Homo sapien
tgtgtctaccttggaggcgctcagg

SEQ ID NO: 1639303 - DNA, 25 bp, Homo sapien
ggttctgtgaactggcaaaggcctt

SEQ ID NO: 1639304 - DNA, 25 bp, Homo sapien
tagtgctctctgacacggttctgtg

SEQ ID NO: 1639305 - DNA, 25 bp, Homo sapien
caaggtcgcagagctagaaccgact

SEQ ID NO: 1639306 - DNA, 25 bp, Homo sapien
gtgaacagtgtggtccaaggtcgca

SEQ ID NO: 1639307 - DNA, 25 bp, Homo sapien
caaggtggacgtccttctgagacca

SEQ ID NO: 1639308 - DNA, 25 bp, Homo sapien
tgctgctagctaacgcaggtccctg

SEQ ID NO: 1639309 - DNA, 25 bp, Homo sapien
tttcggactctgcaaaaaaggacac

SEQ ID NO: 1639310 - DNA, 25 bp, Homo sapien
aagacgatctgaggccaaggttggc

SEQ ID NO: 1639311 - DNA, 25 bp, Homo sapien
taaaataggcctaaccacaggtatg

SEQ ID NO: 1639312 - DNA, 25 bp, Homo sapien
tgagatcacatgtacaaaagccctg

SEQ ID NO: 1639313 - DNA, 25 bp, Homo sapien
cagggcaagccaaggtcatgatctg

SEQ ID NO: 1639314 - DNA, 25 bp, Homo sapien
tgctgggtcaatcagggactgcagc

SEQ ID NO: 1639315 - DNA, 25 bp, Homo sapien
aggtctgctgggtcaatcagggact

SEQ ID NO: 1639316 - DNA, 25 bp, Homo sapien
gggcaagccaaggtcatgatctggc

SEQ ID NO: 1639317 - DNA, 25 bp, Homo sapien
cagcttcgtggccagcgacagagga

SEQ ID NO: 1639318 - DNA, 25 bp, Homo sapien
caagttcagcccacgagtgaactcc

SEQ ID NO: 1639319 - DNA, 25 bp, Homo sapien
gggagacacaaacagcttcgtggcc

SEQ ID NO: 1639320 - DNA, 25 bp, Homo sapien
catgtagtggtctgcgttggttcct

SEQ ID NO: 1639321 - DNA, 25 bp, Homo sapien
tgcccgccgcgcccgaaaggtccag

SEQ ID NO: 1639322 - DNA, 25 bp, Homo sapien
ccgggcacgggtggtacagcccatc

SEQ ID NO: 1639323 - DNA, 25 bp, Homo sapien
cgccgggcacgggtggtacagccca

SEQ ID NO: 1639324 - DNA, 25 bp, Homo sapien
cacgggtggtacagcccatcgcggc

SEQ ID NO: 1639325 - DNA, 25 bp, Homo sapien
ggtggtacagcccatcgcggcaccg

SEQ ID NO: 1639326 - DNA, 25 bp, Homo sapien
cgcccatcgccacgctgcgctggtt

SEQ ID NO: 1639327 - DNA, 25 bp, Homo sapien
cggcggcgacgcctcctccgaggca

SEQ ID NO: 1639328 - DNA, 25 bp, Homo sapien
gcagcggcaacggcgccggcagcgg

SEQ ID NO: 1639329 - DNA, 25 bp, Homo sapien
aggcaggcccaacggctagcacggc

SEQ ID NO: 1639330 - DNA, 25 bp, Homo sapien
aaatatttaagtggtcatgctaggc

SEQ ID NO: 1639331 - DNA, 25 bp, Homo sapien
gggtgcagtcgcacacacccatggt

SEQ ID NO: 1639332 - DNA, 25 bp, Homo sapien
gaaacgtttaagtccaggtgcagca

SEQ ID NO: 1639333 - DNA, 25 bp, Homo sapien
ggccaagacaaggagatcactcaaa

SEQ ID NO: 1639334 - DNA, 25 bp, Homo sapien
taggaaagtccaatcccagtagtgc

SEQ ID NO: 1639335 - DNA, 25 bp, Homo sapien
gaagcccacgatgcagtgacaagcg

SEQ ID NO: 1639336 - DNA, 25 bp, Homo sapien
gactaattttgctgtgggtccccaa

SEQ ID NO: 1639337 - DNA, 25 bp, Homo sapien
caataactgtcccagtccgtagggc

SEQ ID NO: 1639338 - DNA, 25 bp, Homo sapien
ggaaggcctcatgaatttgtgagtt

SEQ ID NO: 1639339 - DNA, 25 bp, Homo sapien
atggaaggcctcatgaatttgtgag

SEQ ID NO: 1639340 - DNA, 25 bp, Homo sapien
gaaggcctcatgaatttgtgagtta

SEQ ID NO: 1639341 - DNA, 25 bp, Homo sapien
ggcctcatgaatttgtgagttatcc

SEQ ID NO: 1639342 - DNA, 25 bp, Homo sapien
gactctgacaagtagtctggaatag

SEQ ID NO: 1639343 - DNA, 25 bp, Homo sapien
gaaaactgctgactcgactaggtgt

SEQ ID NO: 1639344 - DNA, 25 bp, Homo sapien
actctagtggaaaaactggactcag

SEQ ID NO: 1639345 - DNA, 25 bp, Homo sapien
tcatttaaggccagaagctcgagac

SEQ ID NO: 1639346 - DNA, 25 bp, Homo sapien
gggctcagagcacttaaacctaaat

SEQ ID NO: 1639347 - DNA, 25 bp, Homo sapien
ggtggcagagcgaccttatctcaaa

SEQ ID NO: 1639348 - DNA, 25 bp, Homo sapien
taggttcagctacataatcagcagc

SEQ ID NO: 1639349 - DNA, 25 bp, Homo sapien
caattctactgctagggtatatacc

SEQ ID NO: 1639350 - DNA, 25 bp, Homo sapien
gagcaactgccctagccaagaggaa

SEQ ID NO: 1639351 - DNA, 25 bp, Homo sapien
gaggaacctaaggagacacgacaac

SEQ ID NO: 1639352 - DNA, 25 bp, Homo sapien
cagtgtgtccccttgatatgtgatg

SEQ ID NO: 1639353 - DNA, 25 bp, Homo sapien
caactccttacatgcaggctgtgca

SEQ ID NO: 1639354 - DNA, 25 bp, Homo sapien
tatccactgatgtgggctaccagag

SEQ ID NO: 1639355 - DNA, 25 bp, Homo sapien
caaagttgggtctatagttgcagca

SEQ ID NO: 1639356 - DNA, 25 bp, Homo sapien
gcagcacttgccaaactaactcagg

SEQ ID NO: 1639357 - DNA, 25 bp, Homo sapien
ggccacttgccacagatactgctag

SEQ ID NO: 1639358 - DNA, 25 bp, Homo sapien
caggcgtgcaccaacacaccggcca

SEQ ID NO: 1639359 - DNA, 25 bp, Homo sapien
tagtggtatgatctctgctcacggc

SEQ ID NO: 1639360 - DNA, 25 bp, Homo sapien
tgcaccaacacaccggccaattttt

SEQ ID NO: 1639361 - DNA, 25 bp, Homo sapien
cgtgcaccaacacaccggccaattt

SEQ ID NO: 1639362 - DNA, 25 bp, Homo sapien
taggcgggccctatgattctcatct

SEQ ID NO: 1639363 - DNA, 25 bp, Homo sapien
gatgctccggtctaacatctaggcg

SEQ ID NO: 1639364 - DNA, 25 bp, Homo sapien
gctgtaccctgcgcactgtcagcag

SEQ ID NO: 1639365 - DNA, 25 bp, Homo sapien
gggaccctaacaggcgcaatgcagt

SEQ ID NO: 1639366 - DNA, 25 bp, Homo sapien
tggtctcacaaacggagcccatcat

SEQ ID NO: 1639367 - DNA, 25 bp, Homo sapien
tagagtgacaaaaccactacggctt

SEQ ID NO: 1639368 - DNA, 25 bp, Homo sapien
tgaaacagtcctgcaactcaccctg

SEQ ID NO: 1639369 - DNA, 25 bp, Homo sapien
gcccagctgcgcatagtgtgaaaca

SEQ ID NO: 1639370 - DNA, 25 bp, Homo sapien
ccagggcaggaaaacggatgcgcct

SEQ ID NO: 1639371 - DNA, 25 bp, Homo sapien
tagagggcggctaacagtctcaaca

SEQ ID NO: 1639372 - DNA, 25 bp, Homo sapien
ctgggaggccggaggtacaggaggg

SEQ ID NO: 1639373 - DNA, 25 bp, Homo sapien
ccgccatacactttcagagacagat

SEQ ID NO: 1639374 - DNA, 25 bp, Homo sapien
aacagaagagaaatgaacaaagtga

SEQ ID NO: 1639375 - DNA, 25 bp, Homo sapien
gaagagaaatgaacaaagtgaagac

SEQ ID NO: 1639376 - DNA, 25 bp, Homo sapien
cttgccacggggacagaaaacagaa

SEQ ID NO: 1639377 - DNA, 25 bp, Homo sapien
gagaaatgaacaaagtgaagacagg

SEQ ID NO: 1639378 - DNA, 25 bp, Homo sapien
gaaaagtgggttctgccaaggccac

SEQ ID NO: 1639379 - DNA, 25 bp, Homo sapien
ccaggtgacacccacttagttgagg

SEQ ID NO: 1639380 - DNA, 25 bp, Homo sapien
gcctagctctagagcccgagggaga

SEQ ID NO: 1639381 - DNA, 25 bp, Homo sapien
cctggcacttgggagaggtagaaaa

SEQ ID NO: 1639382 - DNA, 25 bp, Homo sapien
ggcaccaaggccctcgctggagctg

SEQ ID NO: 1639383 - DNA, 25 bp, Homo sapien
ttttgaacacgctcacagtgcccgc

SEQ ID NO: 1639384 - DNA, 25 bp, Homo sapien
cagtgcccgcgtggtccatctgggc

SEQ ID NO: 1639385 - DNA, 25 bp, Homo sapien
aatggtgaccttgacctcggctgag

SEQ ID NO: 1639386 - DNA, 25 bp, Homo sapien
tgtcattgtcgctgtcccaagccag

SEQ ID NO: 1639387 - DNA, 25 bp, Homo sapien
aggaccccggcatactgcaagacag

SEQ ID NO: 1639388 - DNA, 25 bp, Homo sapien
tgctgactttagacaaggactccgg

SEQ ID NO: 1639389 - DNA, 25 bp, Homo sapien
ggcagcagccgttgtcgctgagctt

SEQ ID NO: 1639390 - DNA, 25 bp, Homo sapien
cgccgaggcggtcaaacacagacgt

SEQ ID NO: 1639391 - DNA, 25 bp, Homo sapien
gtctcggcgccgaggcggtcaaaca

SEQ ID NO: 1639392 - DNA, 25 bp, Homo sapien
tctgccttggtctcggcgccgaggc

SEQ ID NO: 1639393 - DNA, 25 bp, Homo sapien
tcaaacacagacgtcctatggagac

SEQ ID NO: 1639394 - DNA, 25 bp, Homo sapien
cctttgggcatgttgatgacgtact

SEQ ID NO: 1639395 - DNA, 25 bp, Homo sapien
atctcagcagtgacccggcgccgct

SEQ ID NO: 1639396 - DNA, 25 bp, Homo sapien
gctgctgctccaggatcttgcgggt

SEQ ID NO: 1639397 - DNA, 25 bp, Homo sapien
tgctgctccaggatcttgcgggtgc

SEQ ID NO: 1639398 - DNA, 25 bp, Homo sapien
cttacaatattggaagcatgacccc

SEQ ID NO: 1639399 - DNA, 25 bp, Homo sapien
tggccttcaaagcaccttacaatat

SEQ ID NO: 1639400 - DNA, 25 bp, Homo sapien
gcaccttacaatattggaagcatga

SEQ ID NO: 1639401 - DNA, 25 bp, Homo sapien
caaagcaccttacaatattggaagc

SEQ ID NO: 1639402 - DNA, 25 bp, Homo sapien
cagtgaccgagatcttggaggtgct

SEQ ID NO: 1639403 - DNA, 25 bp, Homo sapien
tggagagtcatggttcaggctgttg

SEQ ID NO: 1639404 - DNA, 25 bp, Homo sapien
atcttgttggacacagtgaccgaga

SEQ ID NO: 1639405 - DNA, 25 bp, Homo sapien
gccttggcactctttgctgccatct

SEQ ID NO: 1639406 - DNA, 25 bp, Homo sapien
aatgagaaggtcagcgggtatcacc

SEQ ID NO: 1639407 - DNA, 25 bp, Homo sapien
ggatcttcctcacctagcaagtagg

SEQ ID NO: 1639408 - DNA, 25 bp, Homo sapien
gggtatcaccctgtaactgcatggt

SEQ ID NO: 1639409 - DNA, 25 bp, Homo sapien
agcaagtaggcgcttcctcagggtc

SEQ ID NO: 1639410 - DNA, 25 bp, Homo sapien
tggccaacaggacaagagcaaatgt

SEQ ID NO: 1639411 - DNA, 25 bp, Homo sapien
cattactggatttgggtgctggcta

SEQ ID NO: 1639412 - DNA, 25 bp, Homo sapien
gtaggccctacccacaatgactgtg

SEQ ID NO: 1639413 - DNA, 25 bp, Homo sapien
catcagatatgtgaatgcggccgtc

SEQ ID NO: 1639414 - DNA, 25 bp, Homo sapien
ttgcagttagctaagcgtgccatcg

SEQ ID NO: 1639415 - DNA, 25 bp, Homo sapien
agttagctaagcgtgccatcgcact

SEQ ID NO: 1639416 - DNA, 25 bp, Homo sapien
atcgcactccaacgtaggcaacaca

SEQ ID NO: 1639417 - DNA, 25 bp, Homo sapien
aaaaaggtatctgtcgggtgcggtg

SEQ ID NO: 1639418 - DNA, 25 bp, Homo sapien
cactgagccaaggtcgcgccactgt

SEQ ID NO: 1639419 - DNA, 25 bp, Homo sapien
actgagccaaggtcgcgccactgta

SEQ ID NO: 1639420 - DNA, 25 bp, Homo sapien
cctgggcaacagagggagactccat

SEQ ID NO: 1639421 - DNA, 25 bp, Homo sapien
ctccagcctgggcaacagagggaga

SEQ ID NO: 1639422 - DNA, 25 bp, Homo sapien
ccacggcgaatttcgcctgcaaggg

SEQ ID NO: 1639423 - DNA, 25 bp, Homo sapien
gctgcagggtactgactcagtggca

SEQ ID NO: 1639424 - DNA, 25 bp, Homo sapien
cactggtgccacggcgaatttcgcc

SEQ ID NO: 1639425 - DNA, 25 bp, Homo sapien
tagggctgcagggtactgactcagt

SEQ ID NO: 1639426 - DNA, 25 bp, Homo sapien
ctgacggtgcaccactttggcatgc

SEQ ID NO: 1639427 - DNA, 25 bp, Homo sapien
catgcttgagaatggcgatgatgtc

SEQ ID NO: 1639428 - DNA, 25 bp, Homo sapien
gctcattcattatctccttattgag

SEQ ID NO: 1639429 - DNA, 25 bp, Homo sapien
tgatgtcacccaccacggtcacgcc

SEQ ID NO: 1639430 - DNA, 25 bp, Homo sapien
ggcataattgacggcaggtcctgga

SEQ ID NO: 1639431 - DNA, 25 bp, Homo sapien
cacggcataattgacggcaggtcct

SEQ ID NO: 1639432 - DNA, 25 bp, Homo sapien
cggcataattgacggcaggtcctgg

SEQ ID NO: 1639433 - DNA, 25 bp, Homo sapien
cataattgacggcaggtcctggagg

SEQ ID NO: 1639434 - DNA, 25 bp, Homo sapien
accaatcagttcctagggaccaggc

SEQ ID NO: 1639435 - DNA, 25 bp, Homo sapien
taaagaccaatcagttcctagggac

SEQ ID NO: 1639436 - DNA, 25 bp, Homo sapien
aagaccaatcagttcctagggacca

SEQ ID NO: 1639437 - DNA, 25 bp, Homo sapien
gttgtaaagaccaatcagttcctag

SEQ ID NO: 1639438 - DNA, 25 bp, Homo sapien
gccctggagagaaggccacagactc

SEQ ID NO: 1639439 - DNA, 25 bp, Homo sapien
agagggggccctggagagaaggcca

SEQ ID NO: 1639440 - DNA, 25 bp, Homo sapien
ctcaaaaagggcagtggggagaggg

SEQ ID NO: 1639441 - DNA, 25 bp, Homo sapien
gggccctggagagaaggccacagac

SEQ ID NO: 1639442 - DNA, 25 bp, Homo sapien
ccatagtcacggagaccatcgtctc

SEQ ID NO: 1639443 - DNA, 25 bp, Homo sapien
ctgctgccggctgtgagtgtttgtc

SEQ ID NO: 1639444 - DNA, 25 bp, Homo sapien
ccaggaatagcctggagcagctggc

SEQ ID NO: 1639445 - DNA, 25 bp, Homo sapien
gagcagctggcaggaagtcagcctg

SEQ ID NO: 1639446 - DNA, 25 bp, Homo sapien
cctgggacagagctgccaccaccat

SEQ ID NO: 1639447 - DNA, 25 bp, Homo sapien
cgcccaggaatagcctggagcagct

SEQ ID NO: 1639448 - DNA, 25 bp, Homo sapien
catcgcttgtgcctgagacaaggcc

SEQ ID NO: 1639449 - DNA, 25 bp, Homo sapien
tcgcttgtgcctgagacaaggccca

SEQ ID NO: 1639450 - DNA, 25 bp, Homo sapien
gcaaatgtccacagctccattcaca

SEQ ID NO: 1639451 - DNA, 25 bp, Homo sapien
cttgtgcctgagacaaggcccaggg

SEQ ID NO: 1639452 - DNA, 25 bp, Homo sapien
tagaggactgctataagggctggat

SEQ ID NO: 1639453 - DNA, 25 bp, Homo sapien
cctggaggtgttgtgcctggtctca

SEQ ID NO: 1639454 - DNA, 25 bp, Homo sapien
gcttggtgcctactaagcaccctgg

SEQ ID NO: 1639455 - DNA, 25 bp, Homo sapien
gcctcccagtttttagaggatgtca

SEQ ID NO: 1639456 - DNA, 25 bp, Homo sapien
attgaagacagcaatgcgccgggca

SEQ ID NO: 1639457 - DNA, 25 bp, Homo sapien
tttccattgaagacagcaatgcgcc

SEQ ID NO: 1639458 - DNA, 25 bp, Homo sapien
tcctctcatggccagcaatgctagt

SEQ ID NO: 1639459 - DNA, 25 bp, Homo sapien
gccagcaatgctagttttccattga

SEQ ID NO: 1639460 - DNA, 25 bp, Homo sapien
cccaccgggcccgcgcccactcgcg

SEQ ID NO: 1639461 - DNA, 25 bp, Homo sapien
cctcccggcggcgccaactgtcaga

SEQ ID NO: 1639462 - DNA, 25 bp, Homo sapien
ggcccgcgcccactcgcgccgcccg

SEQ ID NO: 1639463 - DNA, 25 bp, Homo sapien
ccggcggcgccaactgtcagacact

SEQ ID NO: 1639464 - DNA, 25 bp, Homo sapien
agctgaactgactcgtccgcggccg

SEQ ID NO: 1639465 - DNA, 25 bp, Homo sapien
cggaagctgaactgactcgtccgcg

SEQ ID NO: 1639466 - DNA, 25 bp, Homo sapien
gaagctgaactgactcgtccgcggc

SEQ ID NO: 1639467 - DNA, 25 bp, Homo sapien
cgccggaagctgaactgactcgtcc

SEQ ID NO: 1639468 - DNA, 25 bp, Homo sapien
aacaggccgccaccagcgagagtgc

SEQ ID NO: 1639469 - DNA, 25 bp, Homo sapien
gagagtgcggccataaccatcacgt

SEQ ID NO: 1639470 - DNA, 25 bp, Homo sapien
gacaccagcgagagtgcagtcgtaa

SEQ ID NO: 1639471 - DNA, 25 bp, Homo sapien
cgaagctagcaagcggcgcggccaa

SEQ ID NO: 1639472 - DNA, 25 bp, Homo sapien
caagcactgccagctaatcacagca

SEQ ID NO: 1639473 - DNA, 25 bp, Homo sapien
gagttagatagcctggacctgccgt

SEQ ID NO: 1639474 - DNA, 25 bp, Homo sapien
gagacgaacccatcattaggcactg

SEQ ID NO: 1639475 - DNA, 25 bp, Homo sapien
tatgcactttcctatgctccatggt

SEQ ID NO: 1639476 - DNA, 25 bp, Homo sapien
ttgtttttcagactgaccgtcttct

SEQ ID NO: 1639477 - DNA, 25 bp, Homo sapien
ttttcagactgaccgtcttctctcc

SEQ ID NO: 1639478 - DNA, 25 bp, Homo sapien
ttaattgtttttcagactgaccgtc

SEQ ID NO: 1639479 - DNA, 25 bp, Homo sapien
gtttttcagactgaccgtcttctct

SEQ ID NO: 1639480 - DNA, 25 bp, Homo sapien
tcatggaggaggtggtatgtgagcg

SEQ ID NO: 1639481 - DNA, 25 bp, Homo sapien
tgagcaaggtgtgctcggcagggaa

SEQ ID NO: 1639482 - DNA, 25 bp, Homo sapien
atgagcaaggtgtgctcggcaggga

SEQ ID NO: 1639483 - DNA, 25 bp, Homo sapien
gtatgtgagcggacagaaatgagca

SEQ ID NO: 1639484 - DNA, 25 bp, Homo sapien
tggatggggcgcgctgggagcccca

SEQ ID NO: 1639485 - DNA, 25 bp, Homo sapien
ggatggggcgcgctgggagccccat

SEQ ID NO: 1639486 - DNA, 25 bp, Homo sapien
ctggatggggcgcgctgggagcccc

SEQ ID NO: 1639487 - DNA, 25 bp, Homo sapien
gagggtgtccctgtctcattgagag

SEQ ID NO: 1639488 - DNA, 25 bp, Homo sapien
tgccctgttgcttctctcagtaata

SEQ ID NO: 1639489 - DNA, 25 bp, Homo sapien
aagcaatcttgacctaccccaaaat

SEQ ID NO: 1639490 - DNA, 25 bp, Homo sapien
gcctagggaacagaactctggcact

SEQ ID NO: 1639491 - DNA, 25 bp, Homo sapien
ggtgctctgggtcacggtccctgtc

SEQ ID NO: 1639492 - DNA, 25 bp, Homo sapien
aactacttcacggagacggcgggca

SEQ ID NO: 1639493 - DNA, 25 bp, Homo sapien
atgaccttgacacctcagctgacag

SEQ ID NO: 1639494 - DNA, 25 bp, Homo sapien
ctctgaggcccgatccagtgggcag

SEQ ID NO: 1639495 - DNA, 25 bp, Homo sapien
ctgggcccagcatcgcagagcaagt

SEQ ID NO: 1639496 - DNA, 25 bp, Homo sapien
aatttgtgggttcaggagatggctc

SEQ ID NO: 1639497 - DNA, 25 bp, Homo sapien
aaagccctgctgtgtttaggagagg

SEQ ID NO: 1639498 - DNA, 25 bp, Homo sapien
ggagcatgggccagactccaaagcc

SEQ ID NO: 1639499 - DNA, 25 bp, Homo sapien
tgggcccctgacgctctccagggtg

SEQ ID NO: 1639500 - DNA, 25 bp, Homo sapien
gtgcagtctggctcactcagccatt

SEQ ID NO: 1639501 - DNA, 25 bp, Homo sapien
tggaccatgctggtgggagcggcgg

SEQ ID NO: 1639502 - DNA, 25 bp, Homo sapien
ggtgcccggtgacatgctggaggaa

SEQ ID NO: 1639503 - DNA, 25 bp, Homo sapien
gggaccatcatgtcggagaccgcat

SEQ ID NO: 1639504 - DNA, 25 bp, Homo sapien
ttggagtcggacttggaacccgcag

SEQ ID NO: 1639505 - DNA, 25 bp, Homo sapien
ccacttgcagcgagaggcggtagct

SEQ ID NO: 1639506 - DNA, 25 bp, Homo sapien
tgatgcgttcgtgtgactcccaggt

SEQ ID NO: 1639507 - DNA, 25 bp, Homo sapien
tcagggaaggttagccgactggcca

SEQ ID NO: 1639508 - DNA, 25 bp, Homo sapien
catgctcttgaggtcggcgtgctcc

SEQ ID NO: 1639509 - DNA, 25 bp, Homo sapien
gacttgagcatatacttgcggcgct

SEQ ID NO: 1639510 - DNA, 25 bp, Homo sapien
tcactgtctcaatctggtccaacga

SEQ ID NO: 1639511 - DNA, 25 bp, Homo sapien
agtcagccgaggacttgagctgcca

SEQ ID NO: 1639512 - DNA, 25 bp, Homo sapien
aggtagtcagccgaggacttgagct

SEQ ID NO: 1639513 - DNA, 25 bp, Homo sapien
cttcgtctcggccaggtagtcagcc

SEQ ID NO: 1639514 - DNA, 25 bp, Homo sapien
tcagccgaggacttgagctgccagg

SEQ ID NO: 1639515 - DNA, 25 bp, Homo sapien
tgtatggctccttcacgtagcgcac

SEQ ID NO: 1639516 - DNA, 25 bp, Homo sapien
tagcgcacctcgctgaaaatgctgg

SEQ ID NO: 1639517 - DNA, 25 bp, Homo sapien
gcaggccctgggtttcgcagatgta

SEQ ID NO: 1639518 - DNA, 25 bp, Homo sapien
gcagatgtagcgcacctggtcgtac

SEQ ID NO: 1639519 - DNA, 25 bp, Homo sapien
cctgaagtcccggtcctcttctgtc

SEQ ID NO: 1639520 - DNA, 25 bp, Homo sapien
ctgaagtcccggtcctcttctgtct

SEQ ID NO: 1639521 - DNA, 25 bp, Homo sapien
tccctgaagtcccggtcctcttctg

SEQ ID NO: 1639522 - DNA, 25 bp, Homo sapien
ctccctgaagtcccggtcctcttct

SEQ ID NO: 1639523 - DNA, 25 bp, Homo sapien
agggtctaggcctcgcatgcagtgc

SEQ ID NO: 1639524 - DNA, 25 bp, Homo sapien
tcagcgtggatgatagccagctcct

SEQ ID NO: 1639525 - DNA, 25 bp, Homo sapien
acttgagggcgtcatggaagaactc

SEQ ID NO: 1639526 - DNA, 25 bp, Homo sapien
tgcccaagacctcgatgatgtcgta

SEQ ID NO: 1639527 - DNA, 25 bp, Homo sapien
tgcaaagaccaaacaggtgaagtgt

SEQ ID NO: 1639528 - DNA, 25 bp, Homo sapien
gcactcgtgtctcctcctatgaggt

SEQ ID NO: 1639529 - DNA, 25 bp, Homo sapien
cccagtggcggaatcttgcaaagac

SEQ ID NO: 1639530 - DNA, 25 bp, Homo sapien
ccaccgaatgggttccagcgctgtt

SEQ ID NO: 1639531 - DNA, 25 bp, Homo sapien
cacacaacagcgagggggtagagaa

SEQ ID NO: 1639532 - DNA, 25 bp, Homo sapien
tattcacatggcttggtggggtaca

SEQ ID NO: 1639533 - DNA, 25 bp, Homo sapien
ccggccctcttagggttagtgctag

SEQ ID NO: 1639534 - DNA, 25 bp, Homo sapien
tagtgctagttatcacacacacaac

SEQ ID NO: 1639535 - DNA, 25 bp, Homo sapien
gtctctgaaaaccccacgctgggca

SEQ ID NO: 1639536 - DNA, 25 bp, Homo sapien
ctgtctctgaaaaccccacgctggg

SEQ ID NO: 1639537 - DNA, 25 bp, Homo sapien
ctgggcagccgcacccgcaatccac

SEQ ID NO: 1639538 - DNA, 25 bp, Homo sapien
cgctgggcagccgcacccgcaatcc

SEQ ID NO: 1639539 - DNA, 25 bp, Homo sapien
acttctctctgacgggggacttggg

SEQ ID NO: 1639540 - DNA, 25 bp, Homo sapien
ctggggaagcggaacttgggtgact

SEQ ID NO: 1639541 - DNA, 25 bp, Homo sapien
gtgacttctctctgacgggggactt

SEQ ID NO: 1639542 - DNA, 25 bp, Homo sapien
acttgggggctgcatcgccctcctg

SEQ ID NO: 1639543 - DNA, 25 bp, Homo sapien
ctacacgtggcaagcggacccggac

SEQ ID NO: 1639544 - DNA, 25 bp, Homo sapien
gctgaagggactgtactctgagcct

SEQ ID NO: 1639545 - DNA, 25 bp, Homo sapien
ccacctggtactcggcatggttgcc

SEQ ID NO: 1639546 - DNA, 25 bp, Homo sapien
ggcactgtcacggtgggcatcttaa

SEQ ID NO: 1639547 - DNA, 25 bp, Homo sapien
cgtaccttgagcttgtgtccggcct

SEQ ID NO: 1639548 - DNA, 25 bp, Homo sapien
ggatcttaagctgcacagcggtgga

SEQ ID NO: 1639549 - DNA, 25 bp, Homo sapien
cacctcggggatcttaagctgcaca

SEQ ID NO: 1639550 - DNA, 25 bp, Homo sapien
gctgcacagcggtggactcagcctt

SEQ ID NO: 1639551 - DNA, 25 bp, Homo sapien
gaccagctccacctcggggatctta

SEQ ID NO: 1639552 - DNA, 25 bp, Homo sapien
ttccttccctcgagccagcccaaag

SEQ ID NO: 1639553 - DNA, 25 bp, Homo sapien
ctgcttccttccctcgagccagccc

SEQ ID NO: 1639554 - DNA, 25 bp, Homo sapien
gcttccttccctcgagccagcccaa

SEQ ID NO: 1639555 - DNA, 25 bp, Homo sapien
tgcttccttccctcgagccagccca

SEQ ID NO: 1639556 - DNA, 25 bp, Homo sapien
ttagccacctttggccccgagagtc

SEQ ID NO: 1639557 - DNA, 25 bp, Homo sapien
ccttgcccattttagcggctgggac

SEQ ID NO: 1639558 - DNA, 25 bp, Homo sapien
ggccaagtgctcctggcaggtctag

SEQ ID NO: 1639559 - DNA, 25 bp, Homo sapien
tgggccccttgaacttgaggtcggc

SEQ ID NO: 1639560 - DNA, 25 bp, Homo sapien
agagaggggacacccacatgagcct

SEQ ID NO: 1639561 - DNA, 25 bp, Homo sapien
tgagagaggggacacccacatgagc

SEQ ID NO: 1639562 - DNA, 25 bp, Homo sapien
agtgagagaggggacacccacatga

SEQ ID NO: 1639563 - DNA, 25 bp, Homo sapien
gaggggacacccacatgagcctcac

SEQ ID NO: 1639564 - DNA, 25 bp, Homo sapien
tctctacaacttcaggagcagcggg

SEQ ID NO: 1639565 - DNA, 25 bp, Homo sapien
ttttggaagcttgacctcaggagcc

SEQ ID NO: 1639566 - DNA, 25 bp, Homo sapien
ccttcggaagatgcacgtcgggaac

SEQ ID NO: 1639567 - DNA, 25 bp, Homo sapien
gactttcgggagctgcacttccggg

SEQ ID NO: 1639568 - DNA, 25 bp, Homo sapien
gcaggaggcggtgggacagtgggag

SEQ ID NO: 1639569 - DNA, 25 bp, Homo sapien
gagagaggcaggaggcggtgggaca

SEQ ID NO: 1639570 - DNA, 25 bp, Homo sapien
aggcaggaggcggtgggacagtggg

SEQ ID NO: 1639571 - DNA, 25 bp, Homo sapien
agaggcaggaggcggtgggacagtg

SEQ ID NO: 1639572 - DNA, 25 bp, Homo sapien
cctagcaagcctggatccgatggtg

SEQ ID NO: 1639573 - DNA, 25 bp, Homo sapien
cactcagcagtaattgggccagcac

SEQ ID NO: 1639574 - DNA, 25 bp, Homo sapien
gaaacaactttgtccagggccactc

SEQ ID NO: 1639575 - DNA, 25 bp, Homo sapien
gaagtagcctggttcaggaccccta

SEQ ID NO: 1639576 - DNA, 25 bp, Homo sapien
acggcgcagagaccggatcgctggg

SEQ ID NO: 1639577 - DNA, 25 bp, Homo sapien
tcacggcgcagagaccggatcgctg

SEQ ID NO: 1639578 - DNA, 25 bp, Homo sapien
cggcgcagagaccggatcgctgggg

SEQ ID NO: 1639579 - DNA, 25 bp, Homo sapien
cacggcgcagagaccggatcgctgg

SEQ ID NO: 1639580 - DNA, 25 bp, Homo sapien
tagtgcgtcctcgtacttgaagttc

SEQ ID NO: 1639581 - DNA, 25 bp, Homo sapien
gactttgtaaggctcggcgcattgc

SEQ ID NO: 1639582 - DNA, 25 bp, Homo sapien
tgatctcgtagccagacacggtccc

SEQ ID NO: 1639583 - DNA, 25 bp, Homo sapien
gaagttctcgaagaacactcgggca

SEQ ID NO: 1639584 - DNA, 25 bp, Homo sapien
tgcgcctccgtctccacgataattt

SEQ ID NO: 1639585 - DNA, 25 bp, Homo sapien
agctcccgaacgaagattccctctt

SEQ ID NO: 1639586 - DNA, 25 bp, Homo sapien
tttgccgccgcccgctacgttgatg

SEQ ID NO: 1639587 - DNA, 25 bp, Homo sapien
acgttgatgccgctgaccccggtct

SEQ ID NO: 1639588 - DNA, 25 bp, Homo sapien
ctggctttctaggacccgcggaacg

SEQ ID NO: 1639589 - DNA, 25 bp, Homo sapien
cgccattgcgctcaacagtggctca

SEQ ID NO: 1639590 - DNA, 25 bp, Homo sapien
cagagggcggcgaggtgtcgcgttg

SEQ ID NO: 1639591 - DNA, 25 bp, Homo sapien
cgcggaacggttaaacagctccgcg

SEQ ID NO: 1639592 - DNA, 25 bp, Homo sapien
ctcggcactccggctcctggcctcc

SEQ ID NO: 1639593 - DNA, 25 bp, Homo sapien
cggcactccggctcctggcctccat

SEQ ID NO: 1639594 - DNA, 25 bp, Homo sapien
tcggcactccggctcctggcctcca

SEQ ID NO: 1639595 - DNA, 25 bp, Homo sapien
ctgcagaaccagcttcagttctgca

SEQ ID NO: 1639596 - DNA, 25 bp, Homo sapien
gaaccagcttcagttctgcatggag

SEQ ID NO: 1639597 - DNA, 25 bp, Homo sapien
ccagcttcagttctgcatggagcag

SEQ ID NO: 1639598 - DNA, 25 bp, Homo sapien
gttgctgggaggcacctgcacccca

SEQ ID NO: 1639599 - DNA, 25 bp, Homo sapien
ggccatgcttacagggagaaagcag

SEQ ID NO: 1639600 - DNA, 25 bp, Homo sapien
gaggcttgaggccagtaggggacga

SEQ ID NO: 1639601 - DNA, 25 bp, Homo sapien
agtaggggacgagaggtggaggcca

SEQ ID NO: 1639602 - DNA, 25 bp, Homo sapien
aggccatgcttacagggagaaagca

SEQ ID NO: 1639603 - DNA, 25 bp, Homo sapien
ccgaggtgccgcacagctgtctgca

SEQ ID NO: 1639604 - DNA, 25 bp, Homo sapien
acgcccttccgtggggttcttgctg

SEQ ID NO: 1639605 - DNA, 25 bp, Homo sapien
tgcagggctcacgcccttccgtggg

SEQ ID NO: 1639606 - DNA, 25 bp, Homo sapien
taacaggagcccagcccgaggtgcc

SEQ ID NO: 1639607 - DNA, 25 bp, Homo sapien
ccttgggcctcctgggtccggcgct

SEQ ID NO: 1639608 - DNA, 25 bp, Homo sapien
tgagggtcacctccagctccttggg

SEQ ID NO: 1639609 - DNA, 25 bp, Homo sapien
agctccttgggcctcctgggtccgg

SEQ ID NO: 1639610 - DNA, 25 bp, Homo sapien
ctgagggtcacctccagctccttgg

SEQ ID NO: 1639611 - DNA, 25 bp, Homo sapien
gtgagcagtgttattggctaacagc

SEQ ID NO: 1639612 - DNA, 25 bp, Homo sapien
taatgtgagcagtgttattggctaa

SEQ ID NO: 1639613 - DNA, 25 bp, Homo sapien
aagaataatgtgagcagtgttattg

SEQ ID NO: 1639614 - DNA, 25 bp, Homo sapien
gaataatgtgagcagtgttattggc

SEQ ID NO: 1639615 - DNA, 25 bp, Homo sapien
agctctctgtcccaggcccgtggct

SEQ ID NO: 1639616 - DNA, 25 bp, Homo sapien
tgtaggtggtagtagagggggtctc

SEQ ID NO: 1639617 - DNA, 25 bp, Homo sapien
tctgtcccaggcccgtggctgtgag

SEQ ID NO: 1639618 - DNA, 25 bp, Homo sapien
gggtctcctgggtcatcagctctct

SEQ ID NO: 1639619 - DNA, 25 bp, Homo sapien
tggcacaggaagttcaggcggggca

SEQ ID NO: 1639620 - DNA, 25 bp, Homo sapien
ggcagggacaagagagagtgccctc

SEQ ID NO: 1639621 - DNA, 25 bp, Homo sapien
gagtgccctccttcttcgtccctgc

SEQ ID NO: 1639622 - DNA, 25 bp, Homo sapien
agcctggcacaggaagttcaggcgg

SEQ ID NO: 1639623 - DNA, 25 bp, Homo sapien
cccgtctgtcagccctagccctagg

SEQ ID NO: 1639624 - DNA, 25 bp, Homo sapien
agcctccagacacctcgagagctcc

SEQ ID NO: 1639625 - DNA, 25 bp, Homo sapien
gagcctccagacacctcgagagctc

SEQ ID NO: 1639626 - DNA, 25 bp, Homo sapien
cccggggggcggcacagggagcaca

SEQ ID NO: 1639627 - DNA, 25 bp, Homo sapien
ggcggcacagggagcacaggtaccc

SEQ ID NO: 1639628 - DNA, 25 bp, Homo sapien
gcacagggagcacaggtacccccac

SEQ ID NO: 1639629 - DNA, 25 bp, Homo sapien
gcggcacagggagcacaggtacccc

SEQ ID NO: 1639630 - DNA, 25 bp, Homo sapien
ccccaaagcgcatgtcagcagcttc

SEQ ID NO: 1639631 - DNA, 25 bp, Homo sapien
gctcgtcgctctctgaacccaggcc

SEQ ID NO: 1639632 - DNA, 25 bp, Homo sapien
cggctgctgcctcggaagctcgtcg

SEQ ID NO: 1639633 - DNA, 25 bp, Homo sapien
gggattacccccaaagcgcatgtca

SEQ ID NO: 1639634 - DNA, 25 bp, Homo sapien
ccgggactgcataccataggtgctc

SEQ ID NO: 1639635 - DNA, 25 bp, Homo sapien
cagcttactgcttcaataatatctc

SEQ ID NO: 1639636 - DNA, 25 bp, Homo sapien
aaagtgtgccgggactgcataccat

SEQ ID NO: 1639637 - DNA, 25 bp, Homo sapien
tctgttagatttctaaagtgtgccg

SEQ ID NO: 1639638 - DNA, 25 bp, Homo sapien
taatactaccgatcttgtagggctg

SEQ ID NO: 1639639 - DNA, 25 bp, Homo sapien
tgacgtgcttagaaactgtgcctcg

SEQ ID NO: 1639640 - DNA, 25 bp, Homo sapien
aaatacaggtagactccaggcgagg

SEQ ID NO: 1639641 - DNA, 25 bp, Homo sapien
cttggagaggatctgtccagggtcc

SEQ ID NO: 1639642 - DNA, 25 bp, Homo sapien
tgaagttgcccaggactagattctg

SEQ ID NO: 1639643 - DNA, 25 bp, Homo sapien
ttcagataccagacaaccattccag

SEQ ID NO: 1639644 - DNA, 25 bp, Homo sapien
ttcgaggacagttggtccagccagc

SEQ ID NO: 1639645 - DNA, 25 bp, Homo sapien
tgttctctgtactagggaagccagc

SEQ ID NO: 1639646 - DNA, 25 bp, Homo sapien
ccggcggtcgctccagtgcctgtgt

SEQ ID NO: 1639647 - DNA, 25 bp, Homo sapien
gccctggccccggcggtcgctccag

SEQ ID NO: 1639648 - DNA, 25 bp, Homo sapien
gcggtcgctccagtgcctgtgtgcc

SEQ ID NO: 1639649 - DNA, 25 bp, Homo sapien
ggccccggcggtcgctccagtgcct

SEQ ID NO: 1639650 - DNA, 25 bp, Homo sapien
catccatgaggtagtccaattcggc

SEQ ID NO: 1639651 - DNA, 25 bp, Homo sapien
gcagcgtccgagcttgccagtaagt

SEQ ID NO: 1639652 - DNA, 25 bp, Homo sapien
ccaggagtcgactgccagaggttcc

SEQ ID NO: 1639653 - DNA, 25 bp, Homo sapien
tggatgcgccgcagagtgttcacga

SEQ ID NO: 1639654 - DNA, 25 bp, Homo sapien
ggtagccacccacaaccaatcagga

SEQ ID NO: 1639655 - DNA, 25 bp, Homo sapien
gcggccaatcagaacgaagaggtag

SEQ ID NO: 1639656 - DNA, 25 bp, Homo sapien
tgtcctctggaaacccgcgcctggg

SEQ ID NO: 1639657 - DNA, 25 bp, Homo sapien
cctgggtcgcgagacgcagttctga

SEQ ID NO: 1639658 - DNA, 25 bp, Homo sapien
tggctcacttcaacttccgcctccc

SEQ ID NO: 1639659 - DNA, 25 bp, Homo sapien
ctatgcctggctaatttttgtatgt

SEQ ID NO: 1639660 - DNA, 25 bp, Homo sapien
gtagctaggatacaggtgcatgcca

SEQ ID NO: 1639661 - DNA, 25 bp, Homo sapien
gctggtgtgtaatggcgtggtcttg

SEQ ID NO: 1639662 - DNA, 25 bp, Homo sapien
ggactgggccttcccgccacgccca

SEQ ID NO: 1639663 - DNA, 25 bp, Homo sapien
tcccgccacgcccagggcgggccgc

SEQ ID NO: 1639664 - DNA, 25 bp, Homo sapien
gccacgcccagggcgggccgcgggc

SEQ ID NO: 1639665 - DNA, 25 bp, Homo sapien
gcagcggggagggactgggccttcc

SEQ ID NO: 1639666 - DNA, 25 bp, Homo sapien
cggcctggttatgaaatcaggaggc

SEQ ID NO: 1639667 - DNA, 25 bp, Homo sapien
aataacccggcatggagcagtttgg

SEQ ID NO: 1639668 - DNA, 25 bp, Homo sapien
tattgcacgtggtccggcctggtta

SEQ ID NO: 1639669 - DNA, 25 bp, Homo sapien
agtttggtttccaccctattgcacg

SEQ ID NO: 1639670 - DNA, 25 bp, Homo sapien
gtgtaagtggaaaatcagactccca

SEQ ID NO: 1639671 - DNA, 25 bp, Homo sapien
taagtggaaaatcagactcccagaa

SEQ ID NO: 1639672 - DNA, 25 bp, Homo sapien
cagagtctcgttaaggcatttggaa

SEQ ID NO: 1639673 - DNA, 25 bp, Homo sapien
ctagcaggaaaggtggaagaaatgt

SEQ ID NO: 1639674 - DNA, 25 bp, Homo sapien
ggaaggatcgatcccctctatcaca

SEQ ID NO: 1639675 - DNA, 25 bp, Homo sapien
caggccaccgaagatgacatgagga

SEQ ID NO: 1639676 - DNA, 25 bp, Homo sapien
ttcagggatccaggccaccgaagat

SEQ ID NO: 1639677 - DNA, 25 bp, Homo sapien
gcaagacagtttgtggaaccctgaa

SEQ ID NO: 1639678 - DNA, 25 bp, Homo sapien
taccgcagatgtgtcaatgtccaga

SEQ ID NO: 1639679 - DNA, 25 bp, Homo sapien
ggctcagtcccatccatggaggtgt

SEQ ID NO: 1639680 - DNA, 25 bp, Homo sapien
cccaagtaccgggagctcagagctt

SEQ ID NO: 1639681 - DNA, 25 bp, Homo sapien
tctaagaagactggatcaggctggg

SEQ ID NO: 1639682 - DNA, 25 bp, Homo sapien
taactcaagttcctctaagccttaa

SEQ ID NO: 1639683 - DNA, 25 bp, Homo sapien
gccaagtacggatcctaactcaagt

SEQ ID NO: 1639684 - DNA, 25 bp, Homo sapien
tcaaacatggagcacgaaagacaag

SEQ ID NO: 1639685 - DNA, 25 bp, Homo sapien
gtggcctcaaacagtgaatttacat

SEQ ID NO: 1639686 - DNA, 25 bp, Homo sapien
gcgtgatcatgggaagtgatctgaa

SEQ ID NO: 1639687 - DNA, 25 bp, Homo sapien
ctgaattctgtattggaaactgctc

SEQ ID NO: 1639688 - DNA, 25 bp, Homo sapien
aaactgctcagctgcgtgatcatgg

SEQ ID NO: 1639689 - DNA, 25 bp, Homo sapien
gtgatctgaatgagtcaattctcag

SEQ ID NO: 1639690 - DNA, 25 bp, Homo sapien
tacacgaattgacgtcgagcacgca

SEQ ID NO: 1639691 - DNA, 25 bp, Homo sapien
caggaacgccccaatttggcccagg

SEQ ID NO: 1639692 - DNA, 25 bp, Homo sapien
agagcatccaggaacgccccaattt

SEQ ID NO: 1639693 - DNA, 25 bp, Homo sapien
cagccgccaggtacacgaattgacg

SEQ ID NO: 1639694 - DNA, 25 bp, Homo sapien
cagagacccagatccgaacacatcg

SEQ ID NO: 1639695 - DNA, 25 bp, Homo sapien
agtccgcgattctccttccaaactg

SEQ ID NO: 1639696 - DNA, 25 bp, Homo sapien
caaactgcccttggatccagagacc

SEQ ID NO: 1639697 - DNA, 25 bp, Homo sapien
cagactccggctctaaatttgcttt

SEQ ID NO: 1639698 - DNA, 25 bp, Homo sapien
gtccggaagacccaagtggaatcga

SEQ ID NO: 1639699 - DNA, 25 bp, Homo sapien
gtggaatcgaatctccaggttccct

SEQ ID NO: 1639700 - DNA, 25 bp, Homo sapien
gaacacgataaagccccgaattcaa

SEQ ID NO: 1639701 - DNA, 25 bp, Homo sapien
tttccagaacacgataaagccccga

SEQ ID NO: 1639702 - DNA, 25 bp, Homo sapien
tcctggaacgcccacagcgttgcga

SEQ ID NO: 1639703 - DNA, 25 bp, Homo sapien
aggacccaccagtgaccggttggag

SEQ ID NO: 1639704 - DNA, 25 bp, Homo sapien
ttggagcctcgctcacctcggcggg

SEQ ID NO: 1639705 - DNA, 25 bp, Homo sapien
cgagccgcgattggctggagtcccg

SEQ ID NO: 1639706 - DNA, 25 bp, Homo sapien
ttcctttgctcctcatgtcccagaa

SEQ ID NO: 1639707 - DNA, 25 bp, Homo sapien
tttgaagctcttggctcaacattta

SEQ ID NO: 1639708 - DNA, 25 bp, Homo sapien
ctttgctcctcatgtcccagaatgc

SEQ ID NO: 1639709 - DNA, 25 bp, Homo sapien
atttgaagctcttggctcaacattt

SEQ ID NO: 1639710 - DNA, 25 bp, Homo sapien
gtaggtgctgtgtccgtcgtactca

SEQ ID NO: 1639711 - DNA, 25 bp, Homo sapien
cagcgcagcatgaaatggcccaggt

SEQ ID NO: 1639712 - DNA, 25 bp, Homo sapien
tactcatcggtggtgaggcagcgca

SEQ ID NO: 1639713 - DNA, 25 bp, Homo sapien
ttgagggccctcgtccatccagggt

SEQ ID NO: 1639714 - DNA, 25 bp, Homo sapien
gtgtacgccccagttagtggctggt

SEQ ID NO: 1639715 - DNA, 25 bp, Homo sapien
tacgccccagttagtggctggtctc

SEQ ID NO: 1639716 - DNA, 25 bp, Homo sapien
gtacgccccagttagtggctggtct

SEQ ID NO: 1639717 - DNA, 25 bp, Homo sapien
tgtacgccccagttagtggctggtc

SEQ ID NO: 1639718 - DNA, 25 bp, Homo sapien
acagccacgtacttcaggcctgatt

SEQ ID NO: 1639719 - DNA, 25 bp, Homo sapien
ctgattcccgcagcaccttgtgcat

SEQ ID NO: 1639720 - DNA, 25 bp, Homo sapien
tgtggcggcatcacagccacgtact

SEQ ID NO: 1639721 - DNA, 25 bp, Homo sapien
caccttgtgcatccggatgtggtca

SEQ ID NO: 1639722 - DNA, 25 bp, Homo sapien
gggaacacagggcaggatcagcctg

SEQ ID NO: 1639723 - DNA, 25 bp, Homo sapien
aggatcagcctgggctctcttgtct

SEQ ID NO: 1639724 - DNA, 25 bp, Homo sapien
tcagcctgggctctcttgtcttttt

SEQ ID NO: 1639725 - DNA, 25 bp, Homo sapien
agggaacacagggcaggatcagcct

SEQ ID NO: 1639726 - DNA, 25 bp, Homo sapien
tttcttgggacttgccgaaggtgtc

SEQ ID NO: 1639727 - DNA, 25 bp, Homo sapien
aagtgtgacaatagcactgtggtgc

SEQ ID NO: 1639728 - DNA, 25 bp, Homo sapien
gtgcctggccttactctgggtttct

SEQ ID NO: 1639729 - DNA, 25 bp, Homo sapien
gtctgtgggtgtgcaactccatttc

SEQ ID NO: 1639730 - DNA, 25 bp, Homo sapien
attagccagccttataacccggtct

SEQ ID NO: 1639731 - DNA, 25 bp, Homo sapien
gccagccttataacccggtctcaaa

SEQ ID NO: 1639732 - DNA, 25 bp, Homo sapien
tagatagatagctacaaacttaaaa

SEQ ID NO: 1639733 - DNA, 25 bp, Homo sapien
ggaatatggttgttcacacgactat

SEQ ID NO: 1639734 - DNA, 25 bp, Homo sapien
tggcttcagcgtcacctttcagagg

SEQ ID NO: 1639735 - DNA, 25 bp, Homo sapien
ccataatcgggagctctgtgagggc

SEQ ID NO: 1639736 - DNA, 25 bp, Homo sapien
gcagagacctagtgtctatccacag

SEQ ID NO: 1639737 - DNA, 25 bp, Homo sapien
tgggctcccatagtcctgtagtttc

SEQ ID NO: 1639738 - DNA, 25 bp, Homo sapien
caatgttccgggcgccctcggacat

SEQ ID NO: 1639739 - DNA, 25 bp, Homo sapien
cttgtccacaccatgagccttcatg

SEQ ID NO: 1639740 - DNA, 25 bp, Homo sapien
atggctgccacaatgttccgggcgc

SEQ ID NO: 1639741 - DNA, 25 bp, Homo sapien
tgtccacaccatgagccttcatggc

SEQ ID NO: 1639742 - DNA, 25 bp, Homo sapien
gaggtgtaggggagggccgtgggca

SEQ ID NO: 1639743 - DNA, 25 bp, Homo sapien
agaacatctcccactaccacgtggg

SEQ ID NO: 1639744 - DNA, 25 bp, Homo sapien
tgcccagccacggtcttgtccacat

SEQ ID NO: 1639745 - DNA, 25 bp, Homo sapien
tcttgtccacatcggctgcctgcag

SEQ ID NO: 1639746 - DNA, 25 bp, Homo sapien
aggtcattgcgggtgcccagcagca

SEQ ID NO: 1639747 - DNA, 25 bp, Homo sapien
ctgtgggcaaagaggagcagagagc

SEQ ID NO: 1639748 - DNA, 25 bp, Homo sapien
tcagtgggctggcactcttgggctc

SEQ ID NO: 1639749 - DNA, 25 bp, Homo sapien
tgggctggcactcttgggctccagg

SEQ ID NO: 1639750 - DNA, 25 bp, Homo sapien
ctggtcagtgggctggcactcttgg

SEQ ID NO: 1639751 - DNA, 25 bp, Homo sapien
agtgggctggcactcttgggctcca

SEQ ID NO: 1639752 - DNA, 25 bp, Homo sapien
cagcaaaccaagcaccctgtgggtc

SEQ ID NO: 1639753 - DNA, 25 bp, Homo sapien
gcaaaccaagcaccctgtgggtcca

SEQ ID NO: 1639754 - DNA, 25 bp, Homo sapien
gcagcaaaccaagcaccctgtgggt

SEQ ID NO: 1639755 - DNA, 25 bp, Homo sapien
ctgcagcaaaccaagcaccctgtgg

SEQ ID NO: 1639756 - DNA, 25 bp, Homo sapien
ttctccattactcccgaataaatgc

SEQ ID NO: 1639757 - DNA, 25 bp, Homo sapien
taggctccagttcttaaccctctga

SEQ ID NO: 1639758 - DNA, 25 bp, Homo sapien
gaataaatgcttatcagcaaactgg

SEQ ID NO: 1639759 - DNA, 25 bp, Homo sapien
tcggtggaattagtggatttccagg

SEQ ID NO: 1639760 - DNA, 25 bp, Homo sapien
tgggagttggtcaagtctgggctgt

SEQ ID NO: 1639761 - DNA, 25 bp, Homo sapien
ttttcagccctcattgactttccca

SEQ ID NO: 1639762 - DNA, 25 bp, Homo sapien
ggcaactccaaattttcagccctca

SEQ ID NO: 1639763 - DNA, 25 bp, Homo sapien
ttaggtactcgcagcaacctgaccc

SEQ ID NO: 1639764 - DNA, 25 bp, Homo sapien
atgccccgcccgccccggctcatgc

SEQ ID NO: 1639765 - DNA, 25 bp, Homo sapien
gcccggtctggccagtggcgccgaa

SEQ ID NO: 1639766 - DNA, 25 bp, Homo sapien
gccagtggcgccgaagatcgcgatc

SEQ ID NO: 1639767 - DNA, 25 bp, Homo sapien
cagtggcgccgaagatcgcgatctt

SEQ ID NO: 1639768 - DNA, 25 bp, Homo sapien
tctggccagtggcgccgaagatcgc

SEQ ID NO: 1639769 - DNA, 25 bp, Homo sapien
acgcgcgggaacccactggctgctg

SEQ ID NO: 1639770 - DNA, 25 bp, Homo sapien
ccctactcaagccaggaacaacggg

SEQ ID NO: 1639771 - DNA, 25 bp, Homo sapien
ctgctgggcggtgctctctgcccta

SEQ ID NO: 1639772 - DNA, 25 bp, Homo sapien
tgcaaggcctcagagtctcggcacg

SEQ ID NO: 1639773 - DNA, 25 bp, Homo sapien
tcacacagtgcagcacgagggcttc

SEQ ID NO: 1639774 - DNA, 25 bp, Homo sapien
tgcgcaagcgcgagctcgacgctaa

SEQ ID NO: 1639775 - DNA, 25 bp, Homo sapien
tcaggctcagggtgaccattgcgtg

SEQ ID NO: 1639776 - DNA, 25 bp, Homo sapien
caagtcgtccaaccggtgagcgtgt

SEQ ID NO: 1639777 - DNA, 25 bp, Homo sapien
gagggcgtgggagacctaatatcca

SEQ ID NO: 1639778 - DNA, 25 bp, Homo sapien
tcttctgagcggacgcatctcgacg

SEQ ID NO: 1639779 - DNA, 25 bp, Homo sapien
tctgtccaatcgctagtgactcctg

SEQ ID NO: 1639780 - DNA, 25 bp, Homo sapien
aaagttaaccgcgatgggcaggcgc

SEQ ID NO: 1639781 - DNA, 25 bp, Homo sapien
tcgatcttcttgtggaaacgtcctc

SEQ ID NO: 1639782 - DNA, 25 bp, Homo sapien
ctgcagcttcgagaggagttggatc

SEQ ID NO: 1639783 - DNA, 25 bp, Homo sapien
ttcaatggttacctgccgccaccag

SEQ ID NO: 1639784 - DNA, 25 bp, Homo sapien
gcagttcgtcgcctgcagcttcgag

SEQ ID NO: 1639785 - DNA, 25 bp, Homo sapien
agcgggactcggcgcccgacacgat

SEQ ID NO: 1639786 - DNA, 25 bp, Homo sapien
gggctagcctgacccgctggacaga

SEQ ID NO: 1639787 - DNA, 25 bp, Homo sapien
tggagaaagtgagtcggcctcgggc

SEQ ID NO: 1639788 - DNA, 25 bp, Homo sapien
actcggcgcccgacacgatgccgag

SEQ ID NO: 1639789 - DNA, 25 bp, Homo sapien
cacccaataagtctggtggtccagg

SEQ ID NO: 1639790 - DNA, 25 bp, Homo sapien
ccttggatttattaggcgccctcaa

SEQ ID NO: 1639791 - DNA, 25 bp, Homo sapien
ggctgagctctcctagaatgataga

SEQ ID NO: 1639792 - DNA, 25 bp, Homo sapien
gtcttcgagctaggatggagcgccc

SEQ ID NO: 1639793 - DNA, 25 bp, Homo sapien
taggaggagccgctgcatccgaggt

SEQ ID NO: 1639794 - DNA, 25 bp, Homo sapien
ggagccgctgcatccgaggtgggtt

SEQ ID NO: 1639795 - DNA, 25 bp, Homo sapien
gaggagccgctgcatccgaggtggg

SEQ ID NO: 1639796 - DNA, 25 bp, Homo sapien
aggaggagccgctgcatccgaggtg

SEQ ID NO: 1639797 - DNA, 25 bp, Homo sapien
ccgagtctgggtatttggaccgtga

SEQ ID NO: 1639798 - DNA, 25 bp, Homo sapien
cagcgaggaggacctttgccagagc

SEQ ID NO: 1639799 - DNA, 25 bp, Homo sapien
tcccgcagacgttgacgagtgcagc

SEQ ID NO: 1639800 - DNA, 25 bp, Homo sapien
cgacggctccttcgagtgcatctgt

SEQ ID NO: 1639801 - DNA, 25 bp, Homo sapien
ggaagagtttgaccccatgactgga

SEQ ID NO: 1639802 - DNA, 25 bp, Homo sapien
tagaagcttataaccactgagtccc

SEQ ID NO: 1639803 - DNA, 25 bp, Homo sapien
gattgacccagcatgatcactgcct

SEQ ID NO: 1639804 - DNA, 25 bp, Homo sapien
tggccccatgggaaaatcacgtggt

SEQ ID NO: 1639805 - DNA, 25 bp, Homo sapien
taagacagggtcgtactttcaccca

SEQ ID NO: 1639806 - DNA, 25 bp, Homo sapien
tatttaggctaggattggtggctga

SEQ ID NO: 1639807 - DNA, 25 bp, Homo sapien
cagggtcgtactttcacccaggccg

SEQ ID NO: 1639808 - DNA, 25 bp, Homo sapien
aatgttacatatttaggctaggatt

SEQ ID NO: 1639809 - DNA, 25 bp, Homo sapien
gattacaggctccaacacactctct

SEQ ID NO: 1639810 - DNA, 25 bp, Homo sapien
tcttgccacctctctttttgcccac

SEQ ID NO: 1639811 - DNA, 25 bp, Homo sapien
tctgtgcttcttgccacctctcttt

SEQ ID NO: 1639812 - DNA, 25 bp, Homo sapien
tctctctgtgcttcttgccacctct

SEQ ID NO: 1639813 - DNA, 25 bp, Homo sapien
tatggcgaatctgaggctcctgcgc

SEQ ID NO: 1639814 - DNA, 25 bp, Homo sapien
cgctggccctatcggtcccgggaca

SEQ ID NO: 1639815 - DNA, 25 bp, Homo sapien
cccgcttcgacatgccagactttga

SEQ ID NO: 1639816 - DNA, 25 bp, Homo sapien
cgatggtggcccctatggcgaatct

SEQ ID NO: 1639817 - DNA, 25 bp, Homo sapien
ggtcttgatcccaaagagctctcgg

SEQ ID NO: 1639818 - DNA, 25 bp, Homo sapien
tgacatcatagtacgaacctgaagg

SEQ ID NO: 1639819 - DNA, 25 bp, Homo sapien
cgaacctgaaggaaaggtcttgatc

SEQ ID NO: 1639820 - DNA, 25 bp, Homo sapien
ctcagttttgggcagtagtagcaat

SEQ ID NO: 1639821 - DNA, 25 bp, Homo sapien
agtgaatcaatttctctctttcata

SEQ ID NO: 1639822 - DNA, 25 bp, Homo sapien
cacgctagaggagcgctcccggcaa

SEQ ID NO: 1639823 - DNA, 25 bp, Homo sapien
gctagaggagcgctcccggcaacca

SEQ ID NO: 1639824 - DNA, 25 bp, Homo sapien
tcaccacgctagaggagcgctcccg

SEQ ID NO: 1639825 - DNA, 25 bp, Homo sapien
tagaggagcgctcccggcaaccacg

SEQ ID NO: 1639826 - DNA, 25 bp, Homo sapien
ccctggtctattcttagcgggctga

SEQ ID NO: 1639827 - DNA, 25 bp, Homo sapien
gagtgggcggttgatccgggttcca

SEQ ID NO: 1639828 - DNA, 25 bp, Homo sapien
ccagggcctctttggagcgaaaagc

SEQ ID NO: 1639829 - DNA, 25 bp, Homo sapien
gggctttccagtgcgatgtccctgg

SEQ ID NO: 1639830 - DNA, 25 bp, Homo sapien
cagaggttatcactcagggacatcc

SEQ ID NO: 1639831 - DNA, 25 bp, Homo sapien
aaaacaagaatttgccagcatgggc

SEQ ID NO: 1639832 - DNA, 25 bp, Homo sapien
gactgtaaaacgttgccacatcagg

SEQ ID NO: 1639833 - DNA, 25 bp, Homo sapien
catcaggtgacactttggccagagt

SEQ ID NO: 1639834 - DNA, 25 bp, Homo sapien
cagcgggcaccgacatgaggtaact

SEQ ID NO: 1639835 - DNA, 25 bp, Homo sapien
taagtccggcagtgaaatggttccc

SEQ ID NO: 1639836 - DNA, 25 bp, Homo sapien
aagatagaaaagtacccgccaggca

SEQ ID NO: 1639837 - DNA, 25 bp, Homo sapien
ccaggagagcccctaagcaagtgtc

SEQ ID NO: 1639838 - DNA, 25 bp, Homo sapien
gctttcccaagcagagtggcaggct

SEQ ID NO: 1639839 - DNA, 25 bp, Homo sapien
cgaatgtcttttgcaggtcgccaga

SEQ ID NO: 1639840 - DNA, 25 bp, Homo sapien
tacagtggctttgccttctaatgcc

SEQ ID NO: 1639841 - DNA, 25 bp, Homo sapien
ggcgtttgccaccatctgtgagggt

SEQ ID NO: 1639842 - DNA, 25 bp, Homo sapien
gcagggcaggaggcatggtgggcac

SEQ ID NO: 1639843 - DNA, 25 bp, Homo sapien
cactggggccactgaggctgcttgc

SEQ ID NO: 1639844 - DNA, 25 bp, Homo sapien
ggccactgaggctgcttgctgctgt

SEQ ID NO: 1639845 - DNA, 25 bp, Homo sapien
gggcaggaggcatggtgggcactgg

SEQ ID NO: 1639846 - DNA, 25 bp, Homo sapien
tgctgctgctgctgggccttggcca

SEQ ID NO: 1639847 - DNA, 25 bp, Homo sapien
gctgctgctgctgggccttggccac

SEQ ID NO: 1639848 - DNA, 25 bp, Homo sapien
ctgctgctgctgctgggccttggcc

SEQ ID NO: 1639849 - DNA, 25 bp, Homo sapien
ctctgaaggtgtccgcttgtgccca

SEQ ID NO: 1639850 - DNA, 25 bp, Homo sapien
agcctctgaaggtgtccgcttgtgc

SEQ ID NO: 1639851 - DNA, 25 bp, Homo sapien
atcgctcagcctctgaaggtgtccg

SEQ ID NO: 1639852 - DNA, 25 bp, Homo sapien
aaggtgtccgcttgtgcccaggctg

SEQ ID NO: 1639853 - DNA, 25 bp, Homo sapien
gggcacggagggctcaccccaggca

SEQ ID NO: 1639854 - DNA, 25 bp, Homo sapien
acggagggctcaccccaggcagaag

SEQ ID NO: 1639855 - DNA, 25 bp, Homo sapien
agggggcacggagggctcaccccag

SEQ ID NO: 1639856 - DNA, 25 bp, Homo sapien
gcagggggcacggagggctcacccc

SEQ ID NO: 1639857 - DNA, 25 bp, Homo sapien
aaaagatgaactgatctgtgtgcac

SEQ ID NO: 1639858 - DNA, 25 bp, Homo sapien
tgtgcacagagcgttgatgctgtca

SEQ ID NO: 1639859 - DNA, 25 bp, Homo sapien
ggcgctccagcactggcaaaagatg

SEQ ID NO: 1639860 - DNA, 25 bp, Homo sapien
tgtcactgtcgccggcaccaggagg

SEQ ID NO: 1639861 - DNA, 25 bp, Homo sapien
tagtaactaagtggccatgaccgcc

SEQ ID NO: 1639862 - DNA, 25 bp, Homo sapien
cctttcccactgtagtaactaagtg

SEQ ID NO: 1639863 - DNA, 25 bp, Homo sapien
gccatgaccgccaaataactgtgca

SEQ ID NO: 1639864 - DNA, 25 bp, Homo sapien
taagtggccatgaccgccaaataac

SEQ ID NO: 1639865 - DNA, 25 bp, Homo sapien
gttttagccaatggctgtctccaag

SEQ ID NO: 1639866 - DNA, 25 bp, Homo sapien
tcagaactggccgtaggagtctgca

SEQ ID NO: 1639867 - DNA, 25 bp, Homo sapien
tccaagggaccatgtagatgctcca

SEQ ID NO: 1639868 - DNA, 25 bp, Homo sapien
aacaattaaggactcccatgtgtgg

SEQ ID NO: 1639869 - DNA, 25 bp, Homo sapien
tcacctggaagtcagtgcggcgctg

SEQ ID NO: 1639870 - DNA, 25 bp, Homo sapien
tggcagctcattcagccgtaggctc

SEQ ID NO: 1639871 - DNA, 25 bp, Homo sapien
ggctcagctgccgtttgaaaggcga

SEQ ID NO: 1639872 - DNA, 25 bp, Homo sapien
tgaaaggcgagttcttctggctgag

SEQ ID NO: 1639873 - DNA, 25 bp, Homo sapien
tgtcggggacacgtgcccaggctgg

SEQ ID NO: 1639874 - DNA, 25 bp, Homo sapien
gtgtcggggacacgtgcccaggctg

SEQ ID NO: 1639875 - DNA, 25 bp, Homo sapien
tcgaaggcggccgtgaccccacatt

SEQ ID NO: 1639876 - DNA, 25 bp, Homo sapien
aggcaggcggcaaaagcacagccca

SEQ ID NO: 1639877 - DNA, 25 bp, Homo sapien
attccttctcccgtcgctgttttcg

SEQ ID NO: 1639878 - DNA, 25 bp, Homo sapien
gctggtgcggctggcatcgaaggcg

SEQ ID NO: 1639879 - DNA, 25 bp, Homo sapien
gaaagccttgtccaggttgcggtca

SEQ ID NO: 1639880 - DNA, 25 bp, Homo sapien
tagtcccgtcacgacagatatagga

SEQ ID NO: 1639881 - DNA, 25 bp, Homo sapien
aaaaggagaccttttcgatggtctg

SEQ ID NO: 1639882 - DNA, 25 bp, Homo sapien
cgatggtctggtcgaccagaagatc

SEQ ID NO: 1639883 - DNA, 25 bp, Homo sapien
tggttttgtcgtccaccactcggag

SEQ ID NO: 1639884 - DNA, 25 bp, Homo sapien
gttttgtcgtccaccactcggagcc

SEQ ID NO: 1639885 - DNA, 25 bp, Homo sapien
cttggttttgtcgtccaccactcgg

SEQ ID NO: 1639886 - DNA, 25 bp, Homo sapien
agcccatcggctgacacccacagga

SEQ ID NO: 1639887 - DNA, 25 bp, Homo sapien
caccgcatcttcacacacgtgcatt

SEQ ID NO: 1639888 - DNA, 25 bp, Homo sapien
tgcattccccgggactcctctacct

SEQ ID NO: 1639889 - DNA, 25 bp, Homo sapien
ttcttcaccgcatcttcacacacgt

SEQ ID NO: 1639890 - DNA, 25 bp, Homo sapien
cacacacgtgcattccccgggactc

SEQ ID NO: 1639891 - DNA, 25 bp, Homo sapien
caccaacttcaaacgacttgggctg

SEQ ID NO: 1639892 - DNA, 25 bp, Homo sapien
ttcaaacgacttgggctggtgtccc

SEQ ID NO: 1639893 - DNA, 25 bp, Homo sapien
gccggcctcacgctttttaacacca

SEQ ID NO: 1639894 - DNA, 25 bp, Homo sapien
tcacgctttttaacaccaacttcaa

SEQ ID NO: 1639895 - DNA, 25 bp, Homo sapien
gtgcccttccgcaccgcgtcctcgt

SEQ ID NO: 1639896 - DNA, 25 bp, Homo sapien
gtgcgggcgcgacgcctcgggcacg

SEQ ID NO: 1639897 - DNA, 25 bp, Homo sapien
tcgtctgcctgccactggtgcgggc

SEQ ID NO: 1639898 - DNA, 25 bp, Homo sapien
gggcgcgacgcctcgggcacgtagg

SEQ ID NO: 1639899 - DNA, 25 bp, Homo sapien
gttacagggtcagttggcagcgcac

SEQ ID NO: 1639900 - DNA, 25 bp, Homo sapien
tgttctggaacgctgtctatgaggg

SEQ ID NO: 1639901 - DNA, 25 bp, Homo sapien
cgcacatgggatcagcagctcaagt

SEQ ID NO: 1639902 - DNA, 25 bp, Homo sapien
ggtggccagccactaggacagtctt

SEQ ID NO: 1639903 - DNA, 25 bp, Homo sapien
catctgtgaatgctgtccgtgaggg

SEQ ID NO: 1639904 - DNA, 25 bp, Homo sapien
gctgtctggaagaacgcatgtctga

SEQ ID NO: 1639905 - DNA, 25 bp, Homo sapien
tgctgtctatatccgagagtgccgt

SEQ ID NO: 1639906 - DNA, 25 bp, Homo sapien
gagtgccgttgttgtctatgagaac

SEQ ID NO: 1639907 - DNA, 25 bp, Homo sapien
gtttgtacacaaccgtagctccctg

SEQ ID NO: 1639908 - DNA, 25 bp, Homo sapien
tgagggatctacaagactgtctgtg

SEQ ID NO: 1639909 - DNA, 25 bp, Homo sapien
tctgtgtccaagagtgcagctgttg

SEQ ID NO: 1639910 - DNA, 25 bp, Homo sapien
cattgcctcggagagtgcatctgag

SEQ ID NO: 1639911 - DNA, 25 bp, Homo sapien
aggtgccgctcaggcctccggggtc

SEQ ID NO: 1639912 - DNA, 25 bp, Homo sapien
gtgccgctcaggcctccggggtccg

SEQ ID NO: 1639913 - DNA, 25 bp, Homo sapien
caggtgccgctcaggcctccggggt

SEQ ID NO: 1639914 - DNA, 25 bp, Homo sapien
gcaggtgccgctcaggcctccgggg

SEQ ID NO: 1639915 - DNA, 25 bp, Homo sapien
gagtcctagttgtcctagcaactgt

SEQ ID NO: 1639916 - DNA, 25 bp, Homo sapien
tccatcttgggctccctgatgagag

SEQ ID NO: 1639917 - DNA, 25 bp, Homo sapien
tctgatacttcaccccgactttgga

SEQ ID NO: 1639918 - DNA, 25 bp, Homo sapien
tgggctccctgatgagagtcctagt

SEQ ID NO: 1639919 - DNA, 25 bp, Homo sapien
ggtatgtttggggggcatatgttgg

SEQ ID NO: 1639920 - DNA, 25 bp, Homo sapien
ggagtaggtatgtttggggggcata

SEQ ID NO: 1639921 - DNA, 25 bp, Homo sapien
tggggggcatatgttggggatgtgc

SEQ ID NO: 1639922 - DNA, 25 bp, Homo sapien
tttggggggcatatgttggggatgt

SEQ ID NO: 1639923 - DNA, 25 bp, Homo sapien
gggctacacacatacgcagccaact

SEQ ID NO: 1639924 - DNA, 25 bp, Homo sapien
catagacgcaatcacagctacacac

SEQ ID NO: 1639925 - DNA, 25 bp, Homo sapien
cagctttacacacttggttacacat

SEQ ID NO: 1639926 - DNA, 25 bp, Homo sapien
gatgctgtgagagtggccttgccct

SEQ ID NO: 1639927 - DNA, 25 bp, Homo sapien
gatacacagaaacagtcccaaaccc

SEQ ID NO: 1639928 - DNA, 25 bp, Homo sapien
cactgtaaacatctggccgcatatt

SEQ ID NO: 1639929 - DNA, 25 bp, Homo sapien
caaacccagaaagctgccactgtaa

SEQ ID NO: 1639930 - DNA, 25 bp, Homo sapien
ctgtaaacatctggccgcatattca

SEQ ID NO: 1639931 - DNA, 25 bp, Homo sapien
ggtcacaccacccactgaaatttgg

SEQ ID NO: 1639932 - DNA, 25 bp, Homo sapien
cactagagccgcacatgcgtggcca

SEQ ID NO: 1639933 - DNA, 25 bp, Homo sapien
gttcggacacacacagtctctacta

SEQ ID NO: 1639934 - DNA, 25 bp, Homo sapien
ccacatacaaagaacggggcccaga

SEQ ID NO: 1639935 - DNA, 25 bp, Homo sapien
tacacttgttacacgtatctccact

SEQ ID NO: 1639936 - DNA, 25 bp, Homo sapien
cacacgacacaatcgcagctatata

SEQ ID NO: 1639937 - DNA, 25 bp, Homo sapien
ggtcacagatgcacacggacagaca

SEQ ID NO: 1639938 - DNA, 25 bp, Homo sapien
cagacacacatttggtcccacggag

SEQ ID NO: 1639939 - DNA, 25 bp, Homo sapien
tctggaatcgcgtcctggaggcctt

SEQ ID NO: 1639940 - DNA, 25 bp, Homo sapien
cagggccttggcaagagatggccca

SEQ ID NO: 1639941 - DNA, 25 bp, Homo sapien
catccccatctagttctaggagttg

SEQ ID NO: 1639942 - DNA, 25 bp, Homo sapien
agaatctctgtacccctgtccttgg

SEQ ID NO: 1639943 - DNA, 25 bp, Homo sapien
gcggcggcagctcggtctgacgccg

SEQ ID NO: 1639944 - DNA, 25 bp, Homo sapien
gggatggtgcgggatgcacgcgcgc

SEQ ID NO: 1639945 - DNA, 25 bp, Homo sapien
agctcggtctgacgccggccagggc

SEQ ID NO: 1639946 - DNA, 25 bp, Homo sapien
atggtgcgggatgcacgcgcgcgag

SEQ ID NO: 1639947 - DNA, 25 bp, Homo sapien
gaagggataagaggcactacagcag

SEQ ID NO: 1639948 - DNA, 25 bp, Homo sapien
caaggctccctcaaatgttggcaaa

SEQ ID NO: 1639949 - DNA, 25 bp, Homo sapien
gagggctgcttttattccgattgaa

SEQ ID NO: 1639950 - DNA, 25 bp, Homo sapien
tctagggcacgaagttgggagttcc

SEQ ID NO: 1639951 - DNA, 25 bp, Homo sapien
ggaggctgccggcagtggctgcgtc

SEQ ID NO: 1639952 - DNA, 25 bp, Homo sapien
atccacccaggagtcccctttggtg

SEQ ID NO: 1639953 - DNA, 25 bp, Homo sapien
gcagtggctgcgtctggctggcgac

SEQ ID NO: 1639954 - DNA, 25 bp, Homo sapien
atgagggatccacccaggagtcccc

SEQ ID NO: 1639955 - DNA, 25 bp, Homo sapien
gcccctgccagcttgcggtgcaggg

SEQ ID NO: 1639956 - DNA, 25 bp, Homo sapien
cagggcataggtctcctcgggtggg

SEQ ID NO: 1639957 - DNA, 25 bp, Homo sapien
tgcggtgcagggcataggtctcctc

SEQ ID NO: 1639958 - DNA, 25 bp, Homo sapien
cagcttgcggtgcagggcataggtc

SEQ ID NO: 1639959 - DNA, 25 bp, Homo sapien
ggtggcgaaaggctcccccaggatc

SEQ ID NO: 1639960 - DNA, 25 bp, Homo sapien
gaggtcctgtatgcggcgggccgtt

SEQ ID NO: 1639961 - DNA, 25 bp, Homo sapien
ccaaagtcataagggccctgggtgg

SEQ ID NO: 1639962 - DNA, 25 bp, Homo sapien
tgcctccacgtgggcgtcggagaat

SEQ ID NO: 1639963 - DNA, 25 bp, Homo sapien
cctgtgaggaatttgaggtccctgg

SEQ ID NO: 1639964 - DNA, 25 bp, Homo sapien
ttcaaagcctgtgaggaatttgagg

SEQ ID NO: 1639965 - DNA, 25 bp, Homo sapien
caaagcctgtgaggaatttgaggtc

SEQ ID NO: 1639966 - DNA, 25 bp, Homo sapien
gcctgtgaggaatttgaggtccctg

SEQ ID NO: 1639967 - DNA, 25 bp, Homo sapien
tgtctccatcagctgcagccttcac

SEQ ID NO: 1639968 - DNA, 25 bp, Homo sapien
ctccatcagctgcagccttcaccac

SEQ ID NO: 1639969 - DNA, 25 bp, Homo sapien
tctgtctccatcagctgcagccttc

SEQ ID NO: 1639970 - DNA, 25 bp, Homo sapien
ctctgtctccatcagctgcagcctt

SEQ ID NO: 1639971 - DNA, 25 bp, Homo sapien
tcgatgtaatggtctgtgaactctg

SEQ ID NO: 1639972 - DNA, 25 bp, Homo sapien
cccaaactcccggcttgcaccaaag

SEQ ID NO: 1639973 - DNA, 25 bp, Homo sapien
ctgtgaactctgtcccaaactcccg

SEQ ID NO: 1639974 - DNA, 25 bp, Homo sapien
ctcgatgtaatggtctgtgaactct

SEQ ID NO: 1639975 - DNA, 25 bp, Homo sapien
tactgggcgttcatgcaaatgcaca

SEQ ID NO: 1639976 - DNA, 25 bp, Homo sapien
aaaagtgtcccaaggccaggcgcaa

SEQ ID NO: 1639977 - DNA, 25 bp, Homo sapien
agagtttctactgggcgttcatgca

SEQ ID NO: 1639978 - DNA, 25 bp, Homo sapien
agagagagagtttctactgggcgtt

SEQ ID NO: 1639979 - DNA, 25 bp, Homo sapien
agctgtaggagggatatcttgacca

SEQ ID NO: 1639980 - DNA, 25 bp, Homo sapien
aacagttggcaacccctgataaagg

SEQ ID NO: 1639981 - DNA, 25 bp, Homo sapien
tgtgctttagaaagacccctctggg

SEQ ID NO: 1639982 - DNA, 25 bp, Homo sapien
cactcaagtctgcaggtccaaacct

SEQ ID NO: 1639983 - DNA, 25 bp, Homo sapien
ggttggtacgaaccactctaggtca

SEQ ID NO: 1639984 - DNA, 25 bp, Homo sapien
gctctcactgatggaatggcaacgg

SEQ ID NO: 1639985 - DNA, 25 bp, Homo sapien
tctaggtcatcgctgtgtggtgcca

SEQ ID NO: 1639986 - DNA, 25 bp, Homo sapien
tttattgctgtcaagaggcaagggc

SEQ ID NO: 1639987 - DNA, 25 bp, Homo sapien
agctcccgcagacacagcgtcagga

SEQ ID NO: 1639988 - DNA, 25 bp, Homo sapien
tgcatgaatcggaactcaaacagct

SEQ ID NO: 1639989 - DNA, 25 bp, Homo sapien
tcatacaggaagttggcccagttgg

SEQ ID NO: 1639990 - DNA, 25 bp, Homo sapien
gggtcagtctgcatgaatcggaact

SEQ ID NO: 1639991 - DNA, 25 bp, Homo sapien
acccgtgtcgtgcacagctccttaa

SEQ ID NO: 1639992 - DNA, 25 bp, Homo sapien
acagctccttaaccacggctgggac

SEQ ID NO: 1639993 - DNA, 25 bp, Homo sapien
gcccagcacccgtgtcgtgcacagc

SEQ ID NO: 1639994 - DNA, 25 bp, Homo sapien
cacagctccttaaccacggctggga

SEQ ID NO: 1639995 - DNA, 25 bp, Homo sapien
gatacccatgggtcagtccttgcaa

SEQ ID NO: 1639996 - DNA, 25 bp, Homo sapien
cacctggctggactgagatttaaca

SEQ ID NO: 1639997 - DNA, 25 bp, Homo sapien
tttaacaagtatctccaaggtgcct

SEQ ID NO: 1639998 - DNA, 25 bp, Homo sapien
ggttgccccagaaggatgagttcag

SEQ ID NO: 1639999 - DNA, 25 bp, Homo sapien
cgtaacctgttaagggctgacccag

SEQ ID NO: 1640000 - DNA, 25 bp, Homo sapien
gtttgaactgctcctcatgaaccgg

SEQ ID NO: 1640001 - DNA, 25 bp, Homo sapien
tacagattgtatggatgcaggccac

SEQ ID NO: 1640002 - DNA, 25 bp, Homo sapien
aaaagggtccctagagtgttcagca

SEQ ID NO: 1640003 - DNA, 25 bp, Homo sapien
ggcacaagccgcctcacgacggtag

SEQ ID NO: 1640004 - DNA, 25 bp, Homo sapien
gctcctgctgcaaggcctgcaggct

SEQ ID NO: 1640005 - DNA, 25 bp, Homo sapien
ctgcaggctctgctcggcaaacagg

SEQ ID NO: 1640006 - DNA, 25 bp, Homo sapien
aagccgcctcacgacggtagtcaca

SEQ ID NO: 1640007 - DNA, 25 bp, Homo sapien
tccccgccttggtgtcctttctgtc

SEQ ID NO: 1640008 - DNA, 25 bp, Homo sapien
cagcagaggagtgggtgggcgcctc

SEQ ID NO: 1640009 - DNA, 25 bp, Homo sapien
aacgccagcacaccctgcccgtgct

SEQ ID NO: 1640010 - DNA, 25 bp, Homo sapien
tgacactcccgctcacaacgccagc

SEQ ID NO: 1640011 - DNA, 25 bp, Homo sapien
gcgctcatcttgagtaccgccagca

SEQ ID NO: 1640012 - DNA, 25 bp, Homo sapien
cttgagtaccgccagcaggttctgg

SEQ ID NO: 1640013 - DNA, 25 bp, Homo sapien
tctggacatcgctctgaatgctctg

SEQ ID NO: 1640014 - DNA, 25 bp, Homo sapien
ggcagggccgcgctcatcttgagta

SEQ ID NO: 1640015 - DNA, 25 bp, Homo sapien
tgcacctgcccaattgaggcagcgg

SEQ ID NO: 1640016 - DNA, 25 bp, Homo sapien
gtccctgccgagctcctcttcaaga

SEQ ID NO: 1640017 - DNA, 25 bp, Homo sapien
ggtgcacctgcccaattgaggcagc

SEQ ID NO: 1640018 - DNA, 25 bp, Homo sapien
tggtgcacctgcccaattgaggcag

SEQ ID NO: 1640019 - DNA, 25 bp, Homo sapien
tattagaacagctcatgtcctgggc

SEQ ID NO: 1640020 - DNA, 25 bp, Homo sapien
tcactatcgccatttcccagggaag

SEQ ID NO: 1640021 - DNA, 25 bp, Homo sapien
gggccgttctcagtgctcagtgtaa

SEQ ID NO: 1640022 - DNA, 25 bp, Homo sapien
caggtcctattcagagtggcccaga

SEQ ID NO: 1640023 - DNA, 25 bp, Homo sapien
aagtcggcgctctggcggacccgct

SEQ ID NO: 1640024 - DNA, 25 bp, Homo sapien
tgccagcggggcatgaagtcggcgc

SEQ ID NO: 1640025 - DNA, 25 bp, Homo sapien
cgctctggcggacccgctcaaagat

SEQ ID NO: 1640026 - DNA, 25 bp, Homo sapien
atgaagtcggcgctctggcggaccc

SEQ ID NO: 1640027 - DNA, 25 bp, Homo sapien
ggaagtaagcgaagaggtgaggagg

SEQ ID NO: 1640028 - DNA, 25 bp, Homo sapien
ggaccccgtgtgagtatctgaagtt

SEQ ID NO: 1640029 - DNA, 25 bp, Homo sapien
gagggaccccgtgtgagtatctgaa

SEQ ID NO: 1640030 - DNA, 25 bp, Homo sapien
aggagggaccccgtgtgagtatctg

SEQ ID NO: 1640031 - DNA, 25 bp, Homo sapien
gaagggaggtcaggggtcaggagtc

SEQ ID NO: 1640032 - DNA, 25 bp, Homo sapien
gaggtcaggggtcaggagtcgaggg

SEQ ID NO: 1640033 - DNA, 25 bp, Homo sapien
gtagaagggaggtcaggggtcagga

SEQ ID NO: 1640034 - DNA, 25 bp, Homo sapien
agggaggtcaggggtcaggagtcga

SEQ ID NO: 1640035 - DNA, 25 bp, Homo sapien
cctggatgctgagcatctggccaac

SEQ ID NO: 1640036 - DNA, 25 bp, Homo sapien
ggcggcccctcgaactgtacataag

SEQ ID NO: 1640037 - DNA, 25 bp, Homo sapien
tgagggcggcccctcgaactgtaca

SEQ ID NO: 1640038 - DNA, 25 bp, Homo sapien
tgtacataaggtctgcacaatccgc

SEQ ID NO: 1640039 - DNA, 25 bp, Homo sapien
tcggcattggcctccgacaggaagg

SEQ ID NO: 1640040 - DNA, 25 bp, Homo sapien
aatttttatttatatgtgatgctga

SEQ ID NO: 1640041 - DNA, 25 bp, Homo sapien
aatatgaacactttatgaatttatg

SEQ ID NO: 1640042 - DNA, 25 bp, Homo sapien
ttatttatatgtgatgctgaagcaa

SEQ ID NO: 1640043 - DNA, 25 bp, Homo sapien
tctttgcacagaggccgtgctaatt

SEQ ID NO: 1640044 - DNA, 25 bp, Homo sapien
tgttattgagctcattattgagctg

SEQ ID NO: 1640045 - DNA, 25 bp, Homo sapien
agcacaacaaagcaattcttaagcc

SEQ ID NO: 1640046 - DNA, 25 bp, Homo sapien
aataaaatgttattgagctcattat

SEQ ID NO: 1640047 - DNA, 25 bp, Homo sapien
tattaattttgaaggccagttgtgg

SEQ ID NO: 1640048 - DNA, 25 bp, Homo sapien
tagccatctcggccagtactcctag

SEQ ID NO: 1640049 - DNA, 25 bp, Homo sapien
ctcggccagtactcctagccccaag

SEQ ID NO: 1640050 - DNA, 25 bp, Homo sapien
ggcatggacttcttagccatctcgg

SEQ ID NO: 1640051 - DNA, 25 bp, Homo sapien
tcctggcatggacttcttagccatc

SEQ ID NO: 1640052 - DNA, 25 bp, Homo sapien
caaagttggccaagcggctgatgcg

SEQ ID NO: 1640053 - DNA, 25 bp, Homo sapien
ccccaaagttggccaagcggctgat

SEQ ID NO: 1640054 - DNA, 25 bp, Homo sapien
gttggccaagcggctgatgcgggag

SEQ ID NO: 1640055 - DNA, 25 bp, Homo sapien
ttggccaagcggctgatgcgggagg

SEQ ID NO: 1640056 - DNA, 25 bp, Homo sapien
tgcgttctcgagagcggtcactcag

SEQ ID NO: 1640057 - DNA, 25 bp, Homo sapien
cttgcgttctcgagagcggtcactc

SEQ ID NO: 1640058 - DNA, 25 bp, Homo sapien
ttgcgttctcgagagcggtcactca

SEQ ID NO: 1640059 - DNA, 25 bp, Homo sapien
ggccagcagtattcgtggggtgttg

SEQ ID NO: 1640060 - DNA, 25 bp, Homo sapien
aagctcagggggccagcagtattcg

SEQ ID NO: 1640061 - DNA, 25 bp, Homo sapien
tcagggggccagcagtattcgtggg

SEQ ID NO: 1640062 - DNA, 25 bp, Homo sapien
gctcagggggccagcagtattcgtg

SEQ ID NO: 1640063 - DNA, 25 bp, Homo sapien
tcttcctgggacgggcctcccgtgc

SEQ ID NO: 1640064 - DNA, 25 bp, Homo sapien
caggcccatcctggtaaaacttttg

SEQ ID NO: 1640065 - DNA, 25 bp, Homo sapien
agggccccacaaggccaaccaacag

SEQ ID NO: 1640066 - DNA, 25 bp, Homo sapien
gcccagctgtccaccggtcccccga

SEQ ID NO: 1640067 - DNA, 25 bp, Homo sapien
gccccacaaggccaaccaacagtct

SEQ ID NO: 1640068 - DNA, 25 bp, Homo sapien
cagctgtccaccggtcccccgaagt

SEQ ID NO: 1640069 - DNA, 25 bp, Homo sapien
cttcctccactattaatagattccc

SEQ ID NO: 1640070 - DNA, 25 bp, Homo sapien
tcccacccactaaatacttcctcca

SEQ ID NO: 1640071 - DNA, 25 bp, Homo sapien
atccccaccccgttactgagcacct

SEQ ID NO: 1640072 - DNA, 25 bp, Homo sapien
gttggccctgtaggcacccgcaatt

SEQ ID NO: 1640073 - DNA, 25 bp, Homo sapien
taggcacccgcaattcctccggtgt

SEQ ID NO: 1640074 - DNA, 25 bp, Homo sapien
tctgttggccctgtaggcacccgca

SEQ ID NO: 1640075 - DNA, 25 bp, Homo sapien
cagcctccgagtccgcaacctgctg

SEQ ID NO: 1640076 - DNA, 25 bp, Homo sapien
ctgcggaatggtgcgactgggagcc

SEQ ID NO: 1640077 - DNA, 25 bp, Homo sapien
gtgcgactgggagccctctgcttcc

SEQ ID NO: 1640078 - DNA, 25 bp, Homo sapien
ggaatggtgcgactgggagccctct

SEQ ID NO: 1640079 - DNA, 25 bp, Homo sapien
aatggtgcgactgggagccctctgc

SEQ ID NO: 1640080 - DNA, 25 bp, Homo sapien
cacagtctggaatagaggcatctgg

SEQ ID NO: 1640081 - DNA, 25 bp, Homo sapien
tctcacagtctggaatagaggcatc

SEQ ID NO: 1640082 - DNA, 25 bp, Homo sapien
cagtctggaatagaggcatctggtt

SEQ ID NO: 1640083 - DNA, 25 bp, Homo sapien
tcacagtctggaatagaggcatctg

SEQ ID NO: 1640084 - DNA, 25 bp, Homo sapien
gtcatttgctcagggtagcggagct

SEQ ID NO: 1640085 - DNA, 25 bp, Homo sapien
aactggcagaggaaggtctcgaacc

SEQ ID NO: 1640086 - DNA, 25 bp, Homo sapien
cacccgtgggaactccaagtctttg

SEQ ID NO: 1640087 - DNA, 25 bp, Homo sapien
cttgtcattcaaccgtgtagggagg

SEQ ID NO: 1640088 - DNA, 25 bp, Homo sapien
aggaaaaaagaactagctagatgtg

SEQ ID NO: 1640089 - DNA, 25 bp, Homo sapien
aaaaaagaactagctagatgtggtg

SEQ ID NO: 1640090 - DNA, 25 bp, Homo sapien
atgtggtggtatatgcctgttttcc

SEQ ID NO: 1640091 - DNA, 25 bp, Homo sapien
gtggtatatgcctgttttccagcta

SEQ ID NO: 1640092 - DNA, 25 bp, Homo sapien
ttaagaccaacctaggcaatatagt

SEQ ID NO: 1640093 - DNA, 25 bp, Homo sapien
ggcaggccaaaacaggaggatcgct

SEQ ID NO: 1640094 - DNA, 25 bp, Homo sapien
tatagtgagaccccgtttcaattaa

SEQ ID NO: 1640095 - DNA, 25 bp, Homo sapien
ttggcaggccaaaacaggaggatcg

SEQ ID NO: 1640096 - DNA, 25 bp, Homo sapien
tgccaccacaccctggtctcttccg

SEQ ID NO: 1640097 - DNA, 25 bp, Homo sapien
gatccccccacctcagtcttttgag

SEQ ID NO: 1640098 - DNA, 25 bp, Homo sapien
cgtgccaccacaccctggtctcttc

SEQ ID NO: 1640099 - DNA, 25 bp, Homo sapien
cagcctcaatctcctaaactcaagt

SEQ ID NO: 1640100 - DNA, 25 bp, Homo sapien
ttggcagtcactgggcggctattct

SEQ ID NO: 1640101 - DNA, 25 bp, Homo sapien
ccaagcaggctggttcactcacttg

SEQ ID NO: 1640102 - DNA, 25 bp, Homo sapien
gcatctggagtgtatttggacacgt

SEQ ID NO: 1640103 - DNA, 25 bp, Homo sapien
tgtatttggacacgtgggctgggtg

SEQ ID NO: 1640104 - DNA, 25 bp, Homo sapien
gtggtgagcaaggctgctccaagcc

SEQ ID NO: 1640105 - DNA, 25 bp, Homo sapien
agtggtgagcaaggctgctccaagc

SEQ ID NO: 1640106 - DNA, 25 bp, Homo sapien
tgggatggtggacacgcatcctctt

SEQ ID NO: 1640107 - DNA, 25 bp, Homo sapien
gttagaaatactgcactgtggccgg

SEQ ID NO: 1640108 - DNA, 25 bp, Homo sapien
ggtggacacgcatcctctttaccct

SEQ ID NO: 1640109 - DNA, 25 bp, Homo sapien
tctttaccctgatcactggttagaa

SEQ ID NO: 1640110 - DNA, 25 bp, Homo sapien
ccagcctggacgacagaacgagact

SEQ ID NO: 1640111 - DNA, 25 bp, Homo sapien
cctggacgacagaacgagactccat

SEQ ID NO: 1640112 - DNA, 25 bp, Homo sapien
tgagctgagatcacgccaccgcact

SEQ ID NO: 1640113 - DNA, 25 bp, Homo sapien
tgggaagtggaggctggagtgagct

SEQ ID NO: 1640114 - DNA, 25 bp, Homo sapien
tactgactacctagcttgaatcctg

SEQ ID NO: 1640115 - DNA, 25 bp, Homo sapien
tccctaaatgagatgggctcagtta

SEQ ID NO: 1640116 - DNA, 25 bp, Homo sapien
ccataatgttcagggagccaggaga

SEQ ID NO: 1640117 - DNA, 25 bp, Homo sapien
agtttgtataagtggacaggaaagt

SEQ ID NO: 1640118 - DNA, 25 bp, Homo sapien
tgccatctgtcaaatcgggtccatc

SEQ ID NO: 1640119 - DNA, 25 bp, Homo sapien
agggttgccagatctgctaacacag

SEQ ID NO: 1640120 - DNA, 25 bp, Homo sapien
tgtcaaatcgggtccatctagcacc

SEQ ID NO: 1640121 - DNA, 25 bp, Homo sapien
gccagatctgctaacacaggtagag

SEQ ID NO: 1640122 - DNA, 25 bp, Homo sapien
ggtagtgatacctgagccccaatgg

SEQ ID NO: 1640123 - DNA, 25 bp, Homo sapien
aaagttaaggagtgatccgcagcag

SEQ ID NO: 1640124 - DNA, 25 bp, Homo sapien
cacttcagggatctaaaaggccagt

SEQ ID NO: 1640125 - DNA, 25 bp, Homo sapien
ccagtatgactagtaggtggcaagc

SEQ ID NO: 1640126 - DNA, 25 bp, Homo sapien
agctgaggctgacgcagttcagtgt

SEQ ID NO: 1640127 - DNA, 25 bp, Homo sapien
ctgaggctgacgcagttcagtgtcc

SEQ ID NO: 1640128 - DNA, 25 bp, Homo sapien
gaggctgacgcagttcagtgtccct

SEQ ID NO: 1640129 - DNA, 25 bp, Homo sapien
gctgacgcagttcagtgtccctgtc

SEQ ID NO: 1640130 - DNA, 25 bp, Homo sapien
cagacgatgcgacattcagatggaa

SEQ ID NO: 1640131 - DNA, 25 bp, Homo sapien
cggcccctagtgagaaacagacgat

SEQ ID NO: 1640132 - DNA, 25 bp, Homo sapien
ctgatgaaggaggactggagacccc

SEQ ID NO: 1640133 - DNA, 25 bp, Homo sapien
tctagtgagatgacagaggcggccc

SEQ ID NO: 1640134 - DNA, 25 bp, Homo sapien
cgagctaggctgcagcctgagaccg

SEQ ID NO: 1640135 - DNA, 25 bp, Homo sapien
agctaggctgcagcctgagaccgca

SEQ ID NO: 1640136 - DNA, 25 bp, Homo sapien
aggctgcagcctgagaccgcagccg

SEQ ID NO: 1640137 - DNA, 25 bp, Homo sapien
ctgcagcctgagaccgcagccgcag

SEQ ID NO: 1640138 - DNA, 25 bp, Homo sapien
tcctgtggtgtgaggagcagggcct

SEQ ID NO: 1640139 - DNA, 25 bp, Homo sapien
gtcctgtggtgtgaggagcagggcc

SEQ ID NO: 1640140 - DNA, 25 bp, Homo sapien
gcagtcctgtggtgtgaggagcagg

SEQ ID NO: 1640141 - DNA, 25 bp, Homo sapien
gcctggccacagaggccagcccgta

SEQ ID NO: 1640142 - DNA, 25 bp, Homo sapien
acccggccgtcagtggcccgtgagg

SEQ ID NO: 1640143 - DNA, 25 bp, Homo sapien
ccggccgtcagtggcccgtgagggc

SEQ ID NO: 1640144 - DNA, 25 bp, Homo sapien
cgtcagtggcccgtgagggcgagaa

SEQ ID NO: 1640145 - DNA, 25 bp, Homo sapien
agtggcccgtgagggcgagaagtcc

SEQ ID NO: 1640146 - DNA, 25 bp, Homo sapien
cgtagtcccacagctgatagtgcca

SEQ ID NO: 1640147 - DNA, 25 bp, Homo sapien
tagtgccaactcttgccctgcttgg

SEQ ID NO: 1640148 - DNA, 25 bp, Homo sapien
tcagggtcctcagtgtagccgagac

SEQ ID NO: 1640149 - DNA, 25 bp, Homo sapien
gttgctctcccggacctggtcgtag

SEQ ID NO: 1640150 - DNA, 25 bp, Homo sapien
cccagtgtgccttgtggcccttcct

SEQ ID NO: 1640151 - DNA, 25 bp, Homo sapien
cttcctctgacacggctcatggttg

SEQ ID NO: 1640152 - DNA, 25 bp, Homo sapien
ctctgacacggctcatggttgaagt

SEQ ID NO: 1640153 - DNA, 25 bp, Homo sapien
ggcccttcctctgacacggctcatg

SEQ ID NO: 1640154 - DNA, 25 bp, Homo sapien
cattaaggtaaaaacgatggtgtgg

SEQ ID NO: 1640155 - DNA, 25 bp, Homo sapien
aggtaaaaacgatggtgtggccctg

SEQ ID NO: 1640156 - DNA, 25 bp, Homo sapien
tggcattaaggtaaaaacgatggtg

SEQ ID NO: 1640157 - DNA, 25 bp, Homo sapien
ctggcattaaggtaaaaacgatggt

SEQ ID NO: 1640158 - DNA, 25 bp, Homo sapien
gaccaggtgctgcaggacgaggtct

SEQ ID NO: 1640159 - DNA, 25 bp, Homo sapien
ggatgtccagtgaccaggtgctgca

SEQ ID NO: 1640160 - DNA, 25 bp, Homo sapien
atgagcaggggatgtccagtgacca

SEQ ID NO: 1640161 - DNA, 25 bp, Homo sapien
ggatgagcaggggatgtccagtgac

SEQ ID NO: 1640162 - DNA, 25 bp, Homo sapien
gttgggaccgcccaggccaccagag

SEQ ID NO: 1640163 - DNA, 25 bp, Homo sapien
ctgggccagcctgcccatatcggcc

SEQ ID NO: 1640164 - DNA, 25 bp, Homo sapien
tgggaccgcccaggccaccagagag

SEQ ID NO: 1640165 - DNA, 25 bp, Homo sapien
gcccaggccaccagagagcagcttg

SEQ ID NO: 1640166 - DNA, 25 bp, Homo sapien
ctgggccgtgtagcctctttccgtg

SEQ ID NO: 1640167 - DNA, 25 bp, Homo sapien
ggggcgacaggagagtacctgccat

SEQ ID NO: 1640168 - DNA, 25 bp, Homo sapien
tttccgtggccacccgtatgagtct

SEQ ID NO: 1640169 - DNA, 25 bp, Homo sapien
tgagtctctccagggggacgccact

SEQ ID NO: 1640170 - DNA, 25 bp, Homo sapien
agggagacctgactccccttcaggg

SEQ ID NO: 1640171 - DNA, 25 bp, Homo sapien
gccagcgagggagacctgactcccc

SEQ ID NO: 1640172 - DNA, 25 bp, Homo sapien
cagcgagggagacctgactcccctt

SEQ ID NO: 1640173 - DNA, 25 bp, Homo sapien
gcgagggagacctgactccccttca

SEQ ID NO: 1640174 - DNA, 25 bp, Homo sapien
ggggttcccgcatcagggcacatac

SEQ ID NO: 1640175 - DNA, 25 bp, Homo sapien
tccagatcagtccttaagaagccca

SEQ ID NO: 1640176 - DNA, 25 bp, Homo sapien
gcccagcaagggcagagtaaaggca

SEQ ID NO: 1640177 - DNA, 25 bp, Homo sapien
cagatcagtccttaagaagcccagc

SEQ ID NO: 1640178 - DNA, 25 bp, Homo sapien
tcttggatgagggacggcaggtctg

SEQ ID NO: 1640179 - DNA, 25 bp, Homo sapien
gggacggcaggtctgcacagaagag

SEQ ID NO: 1640180 - DNA, 25 bp, Homo sapien
ttggatgagggacggcaggtctgca

SEQ ID NO: 1640181 - DNA, 25 bp, Homo sapien
tgagggacggcaggtctgcacagaa

SEQ ID NO: 1640182 - DNA, 25 bp, Homo sapien
cactgcacccggcccttttttgtat

SEQ ID NO: 1640183 - DNA, 25 bp, Homo sapien
ttcgtgatttgcccgcctcagccta

SEQ ID NO: 1640184 - DNA, 25 bp, Homo sapien
acccgcctcagcctctgaaaagtgc

SEQ ID NO: 1640185 - DNA, 25 bp, Homo sapien
gtagcaacagggtttcaccctgtta

SEQ ID NO: 1640186 - DNA, 25 bp, Homo sapien
ccttgtgtagtttcagaagcctctt

SEQ ID NO: 1640187 - DNA, 25 bp, Homo sapien
tccttgtgtagtttcagaagcctct

SEQ ID NO: 1640188 - DNA, 25 bp, Homo sapien
gctcttctccaggccgaagacatga

SEQ ID NO: 1640189 - DNA, 25 bp, Homo sapien
tcttctccaggccgaagacatgacg

SEQ ID NO: 1640190 - DNA, 25 bp, Homo sapien
ccgaagacatgacggggagcaggcc

SEQ ID NO: 1640191 - DNA, 25 bp, Homo sapien
ttctccaggccgaagacatgacggg

SEQ ID NO: 1640192 - DNA, 25 bp, Homo sapien
gggggaacaggggtctgctgactcc

SEQ ID NO: 1640193 - DNA, 25 bp, Homo sapien
gggatggtaaagctgaaaagtccag

SEQ ID NO: 1640194 - DNA, 25 bp, Homo sapien
gatggtaaagctgaaaagtccaggg

SEQ ID NO: 1640195 - DNA, 25 bp, Homo sapien
ggaggcagtgggagcggtgggggaa

SEQ ID NO: 1640196 - DNA, 25 bp, Homo sapien
tggttttaggggaggagagcatgga

SEQ ID NO: 1640197 - DNA, 25 bp, Homo sapien
gtagaggaggagatggaatgctgct

SEQ ID NO: 1640198 - DNA, 25 bp, Homo sapien
gttttaggggaggagagcatggaga

SEQ ID NO: 1640199 - DNA, 25 bp, Homo sapien
gatggaatgctgctggcttggggta

SEQ ID NO: 1640200 - DNA, 25 bp, Homo sapien
ttaaggatgcgacttagggacccag

SEQ ID NO: 1640201 - DNA, 25 bp, Homo sapien
gacccagggctaaagattcggagaa

SEQ ID NO: 1640202 - DNA, 25 bp, Homo sapien
taatatttgaaaccacgggagcagg

SEQ ID NO: 1640203 - DNA, 25 bp, Homo sapien
tcataaggcacctgacggttaacag

SEQ ID NO: 1640204 - DNA, 25 bp, Homo sapien
cccgagttcggaacctttgagctga

SEQ ID NO: 1640205 - DNA, 25 bp, Homo sapien
gcccgagttcggaacctttgagctg

SEQ ID NO: 1640206 - DNA, 25 bp, Homo sapien
ccgagttcggaacctttgagctgac

SEQ ID NO: 1640207 - DNA, 25 bp, Homo sapien
caggcccgagttcggaacctttgag

SEQ ID NO: 1640208 - DNA, 25 bp, Homo sapien
ggaaaatggcctagttgtggagaag

SEQ ID NO: 1640209 - DNA, 25 bp, Homo sapien
aaatggcctagttgtggagaaggtc

SEQ ID NO: 1640210 - DNA, 25 bp, Homo sapien
aaaatggcctagttgtggagaaggt

SEQ ID NO: 1640211 - DNA, 25 bp, Homo sapien
agggaaaatggcctagttgtggaga

SEQ ID NO: 1640212 - DNA, 25 bp, Homo sapien
gtgggcgccgcgataaccactggaa

SEQ ID NO: 1640213 - DNA, 25 bp, Homo sapien
gggcgccgcgataaccactggaaaa

SEQ ID NO: 1640214 - DNA, 25 bp, Homo sapien
gcgccgcgataaccactggaaaaag

SEQ ID NO: 1640215 - DNA, 25 bp, Homo sapien
gccgcgataaccactggaaaaagga

SEQ ID NO: 1640216 - DNA, 25 bp, Homo sapien
aaaatggcggcccccgcacactgcc

SEQ ID NO: 1640217 - DNA, 25 bp, Homo sapien
ggcggcccccgcacactgcctttcc

SEQ ID NO: 1640218 - DNA, 25 bp, Homo sapien
aatggcggcccccgcacactgcctt

SEQ ID NO: 1640219 - DNA, 25 bp, Homo sapien
tggcggcccccgcacactgcctttc

SEQ ID NO: 1640220 - DNA, 25 bp, Homo sapien
ctgaggaaacttgctgctcgaggcc

SEQ ID NO: 1640221 - DNA, 25 bp, Homo sapien
gtgcaaacgaccatcggcggcaggc

SEQ ID NO: 1640222 - DNA, 25 bp, Homo sapien
ccttttttctatactggctcccaca

SEQ ID NO: 1640223 - DNA, 25 bp, Homo sapien
tccgggacggcccttcggatgcttg

SEQ ID NO: 1640224 - DNA, 25 bp, Homo sapien
agttctctccgcacgcgggctggag

SEQ ID NO: 1640225 - DNA, 25 bp, Homo sapien
tttgttgtcgcgctttgcctccgtc

SEQ ID NO: 1640226 - DNA, 25 bp, Homo sapien
gggtcctacgcacgctttgttgtcg

SEQ ID NO: 1640227 - DNA, 25 bp, Homo sapien
ccgggtcgcgtagagcatcctggaa

SEQ ID NO: 1640228 - DNA, 25 bp, Homo sapien
gccagtttttatgaaggttggagtc

SEQ ID NO: 1640229 - DNA, 25 bp, Homo sapien
ctcttgagtgcaaaggatctgccca

SEQ ID NO: 1640230 - DNA, 25 bp, Homo sapien
ccctttgcagacctgggtggtgaga

SEQ ID NO: 1640231 - DNA, 25 bp, Homo sapien
cataagacattggtgccctttgcag

SEQ ID NO: 1640232 - DNA, 25 bp, Homo sapien
gaggtcaggcctgtagtaagctacc

SEQ ID NO: 1640233 - DNA, 25 bp, Homo sapien
actccaccctgagcagtagaaggag

SEQ ID NO: 1640234 - DNA, 25 bp, Homo sapien
cctgtagtaagctaccatcatgcca

SEQ ID NO: 1640235 - DNA, 25 bp, Homo sapien
aattagccgtgcgtcgtgctgcgtg

SEQ ID NO: 1640236 - DNA, 25 bp, Homo sapien
tagtgggtctgaggctgagcttaat

SEQ ID NO: 1640237 - DNA, 25 bp, Homo sapien
catgaatggcaggagtcgggcttat

SEQ ID NO: 1640238 - DNA, 25 bp, Homo sapien
gcttatgggctagagggaacactga

SEQ ID NO: 1640239 - DNA, 25 bp, Homo sapien
taatcgatttaggtggagcctgagg

SEQ ID NO: 1640240 - DNA, 25 bp, Homo sapien
cacatggcaagtactacataagagt

SEQ ID NO: 1640241 - DNA, 25 bp, Homo sapien
cataagagttatctgttactgttac

SEQ ID NO: 1640242 - DNA, 25 bp, Homo sapien
tctgttactgttacctattggtttg

SEQ ID NO: 1640243 - DNA, 25 bp, Homo sapien
ggcaagtactacataagagttatct

SEQ ID NO: 1640244 - DNA, 25 bp, Homo sapien
tcttattatatatgatgcactctgg

SEQ ID NO: 1640245 - DNA, 25 bp, Homo sapien
gccgttctgtgctattctgtttgaa

SEQ ID NO: 1640246 - DNA, 25 bp, Homo sapien
ggtcaagacccaccaaactgatttc

SEQ ID NO: 1640247 - DNA, 25 bp, Homo sapien
tatatgatgcactctggtatttgcc

SEQ ID NO: 1640248 - DNA, 25 bp, Homo sapien
ccagattcatgatatttagatgttg

SEQ ID NO: 1640249 - DNA, 25 bp, Homo sapien
gagccactgcgtccatccagattca

SEQ ID NO: 1640250 - DNA, 25 bp, Homo sapien
ctttacagactcagacagctctctg

SEQ ID NO: 1640251 - DNA, 25 bp, Homo sapien
tctctgaggcaaacaaagagggaga

SEQ ID NO: 1640252 - DNA, 25 bp, Homo sapien
tatggacagaccgatgcagatagga

SEQ ID NO: 1640253 - DNA, 25 bp, Homo sapien
tacctggaaatgagatagagaccgg

SEQ ID NO: 1640254 - DNA, 25 bp, Homo sapien
agacaatgtagaaaccgggagaaga

SEQ ID NO: 1640255 - DNA, 25 bp, Homo sapien
tctgagaggccgtgtcctaacctgc

SEQ ID NO: 1640256 - DNA, 25 bp, Homo sapien
tgtccctgtgtttgtgacatgtgta

SEQ ID NO: 1640257 - DNA, 25 bp, Homo sapien
ctgatgtccctgtgtttgtgacatg

SEQ ID NO: 1640258 - DNA, 25 bp, Homo sapien
tgtgtaaacacgctgatgtccctgt

SEQ ID NO: 1640259 - DNA, 25 bp, Homo sapien
gtgtgtaaacacgctgatgtccctg

SEQ ID NO: 1640260 - DNA, 25 bp, Homo sapien
cggtgccctccatgcccgggggatg

SEQ ID NO: 1640261 - DNA, 25 bp, Homo sapien
aggagggtggcaccatgggcccggg

SEQ ID NO: 1640262 - DNA, 25 bp, Homo sapien
tccatgcccgggggatgaagacact

SEQ ID NO: 1640263 - DNA, 25 bp, Homo sapien
cccagctgcatcaagtggaggcgga

SEQ ID NO: 1640264 - DNA, 25 bp, Homo sapien
cagctagtgagccagagggcgatcc

SEQ ID NO: 1640265 - DNA, 25 bp, Homo sapien
gctgtcgaagcattggtgccctcat

SEQ ID NO: 1640266 - DNA, 25 bp, Homo sapien
gcgcctggccctggactatatcgtg

SEQ ID NO: 1640267 - DNA, 25 bp, Homo sapien
tgggcagctatgtcatcaacgggcg

SEQ ID NO: 1640268 - DNA, 25 bp, Homo sapien
ccatggtggcgtgttacccaggcaa

SEQ ID NO: 1640269 - DNA, 25 bp, Homo sapien
tctattacctgaatcagaactggga

SEQ ID NO: 1640270 - DNA, 25 bp, Homo sapien
gtaaggcacgttgacaatccccacg

SEQ ID NO: 1640271 - DNA, 25 bp, Homo sapien
tgggcgctgcatcacctgtatctat

SEQ ID NO: 1640272 - DNA, 25 bp, Homo sapien
gcctgctgcagatcttccctgaggg

SEQ ID NO: 1640273 - DNA, 25 bp, Homo sapien
gcatggcggcctgctgcagatcttc

SEQ ID NO: 1640274 - DNA, 25 bp, Homo sapien
gcggcctgctgcagatcttccctga

SEQ ID NO: 1640275 - DNA, 25 bp, Homo sapien
gtgcatggcggcctgctgcagatct

SEQ ID NO: 1640276 - DNA, 25 bp, Homo sapien
ggaggccaccgttaccaactgaagc

SEQ ID NO: 1640277 - DNA, 25 bp, Homo sapien
gcaccttttggactgggctgccact

SEQ ID NO: 1640278 - DNA, 25 bp, Homo sapien
tgggtcctaccctgtctggtcatga

SEQ ID NO: 1640279 - DNA, 25 bp, Homo sapien
tggaatgtgaagtgactccccaacc

SEQ ID NO: 1640280 - DNA, 25 bp, Homo sapien
caatttagggcctttattgaccgag

SEQ ID NO: 1640281 - DNA, 25 bp, Homo sapien
gcaatttagggcctttattgaccga

SEQ ID NO: 1640282 - DNA, 25 bp, Homo sapien
gaggtttgagggccagtgagcccac

SEQ ID NO: 1640283 - DNA, 25 bp, Homo sapien
tttgagggccagtgagcccaccata

SEQ ID NO: 1640284 - DNA, 25 bp, Homo sapien
gtttgagggccagtgagcccaccat

SEQ ID NO: 1640285 - DNA, 25 bp, Homo sapien
tgagggccagtgagcccaccatagt

SEQ ID NO: 1640286 - DNA, 25 bp, Homo sapien
cagcaggccactggctggagctgga

SEQ ID NO: 1640287 - DNA, 25 bp, Homo sapien
tcagcaggccactggctggagctgg

SEQ ID NO: 1640288 - DNA, 25 bp, Homo sapien
caggccactggctggagctggaagt

SEQ ID NO: 1640289 - DNA, 25 bp, Homo sapien
gcaggccactggctggagctggaag

SEQ ID NO: 1640290 - DNA, 25 bp, Homo sapien
ggggggacactgcccaggccagtgc

SEQ ID NO: 1640291 - DNA, 25 bp, Homo sapien
tggggggacactgcccaggccagtg

SEQ ID NO: 1640292 - DNA, 25 bp, Homo sapien
ctggggggacactgcccaggccagt

SEQ ID NO: 1640293 - DNA, 25 bp, Homo sapien
gggggacactgcccaggccagtgca

SEQ ID NO: 1640294 - DNA, 25 bp, Homo sapien
ggttgatggtgccagggcgtaccac

SEQ ID NO: 1640295 - DNA, 25 bp, Homo sapien
gcaggtgaggttgatggtgccaggg

SEQ ID NO: 1640296 - DNA, 25 bp, Homo sapien
gtgaggttgatggtgccagggcgta

SEQ ID NO: 1640297 - DNA, 25 bp, Homo sapien
tgcaggtgaggttgatggtgccagg

SEQ ID NO: 1640298 - DNA, 25 bp, Homo sapien
tgtaaggtggccgtaaggaatagga

SEQ ID NO: 1640299 - DNA, 25 bp, Homo sapien
aagatacccgagtgggccaggcctg

SEQ ID NO: 1640300 - DNA, 25 bp, Homo sapien
aggaataggaagatacccgagtggg

SEQ ID NO: 1640301 - DNA, 25 bp, Homo sapien
aataggaagatacccgagtgggcca

SEQ ID NO: 1640302 - DNA, 25 bp, Homo sapien
caccaggtaccccagagccagtcca

SEQ ID NO: 1640303 - DNA, 25 bp, Homo sapien
gctttgccgggtacacaggtgcaca

SEQ ID NO: 1640304 - DNA, 25 bp, Homo sapien
accaggtaccccagagccagtccag

SEQ ID NO: 1640305 - DNA, 25 bp, Homo sapien
ctgctttgccgggtacacaggtgca

SEQ ID NO: 1640306 - DNA, 25 bp, Homo sapien
cagtctgggtctttgaattgagtgg

SEQ ID NO: 1640307 - DNA, 25 bp, Homo sapien
gggtcccggtgtgcagtcacaagca

SEQ ID NO: 1640308 - DNA, 25 bp, Homo sapien
gggcatgaaagcatcattgccctgg

SEQ ID NO: 1640309 - DNA, 25 bp, Homo sapien
tccaggaagttggtagggttgaagc

SEQ ID NO: 1640310 - DNA, 25 bp, Homo sapien
tggggatacatgcaacttgggttac

SEQ ID NO: 1640311 - DNA, 25 bp, Homo sapien
ctggggatacatgcaacttgggtta

SEQ ID NO: 1640312 - DNA, 25 bp, Homo sapien
cgggcttggtgagcacctgcaccac

SEQ ID NO: 1640313 - DNA, 25 bp, Homo sapien
ttggtgagcacctgcaccacctcca

SEQ ID NO: 1640314 - DNA, 25 bp, Homo sapien
tggtgagcacctgcaccacctccat

SEQ ID NO: 1640315 - DNA, 25 bp, Homo sapien
ctgcgggcttggtgagcacctgcac

SEQ ID NO: 1640316 - DNA, 25 bp, Homo sapien
cctgctccaggggtaactgattgtg

SEQ ID NO: 1640317 - DNA, 25 bp, Homo sapien
agcccaagggaataggccgggcaag

SEQ ID NO: 1640318 - DNA, 25 bp, Homo sapien
gcacagcgcacacctgctgattctg

SEQ ID NO: 1640319 - DNA, 25 bp, Homo sapien
tgatctcatgcacccgggtcccgca

SEQ ID NO: 1640320 - DNA, 25 bp, Homo sapien
gcacacgcgatagtccaggcttggg

SEQ ID NO: 1640321 - DNA, 25 bp, Homo sapien
gcagcactgcgttggcgtagggcag

SEQ ID NO: 1640322 - DNA, 25 bp, Homo sapien
actgcgttggcgtagggcaggcaca

SEQ ID NO: 1640323 - DNA, 25 bp, Homo sapien
cgtagggcaggcacacgcgatagtc

SEQ ID NO: 1640324 - DNA, 25 bp, Homo sapien
gaggctgtgagctgcgcacttccag

SEQ ID NO: 1640325 - DNA, 25 bp, Homo sapien
ccattctgggtctctccgggttgca

SEQ ID NO: 1640326 - DNA, 25 bp, Homo sapien
ttctgggtctctccgggttgcacac

SEQ ID NO: 1640327 - DNA, 25 bp, Homo sapien
ctgtgagctgcgcacttccaggacc

SEQ ID NO: 1640328 - DNA, 25 bp, Homo sapien
tacttaagcagaatgaggagcccat

SEQ ID NO: 1640329 - DNA, 25 bp, Homo sapien
tgctcgtggtttcggtgacgccaaa

SEQ ID NO: 1640330 - DNA, 25 bp, Homo sapien
aatgaggagcccatagcacagggtg

SEQ ID NO: 1640331 - DNA, 25 bp, Homo sapien
gccacctctaggtacttaagcagaa

SEQ ID NO: 1640332 - DNA, 25 bp, Homo sapien
gaggagatgtgctgccgcgtgccag

SEQ ID NO: 1640333 - DNA, 25 bp, Homo sapien
tgggcagaggagatgtgctgccgcg

SEQ ID NO: 1640334 - DNA, 25 bp, Homo sapien
ctggaaatggctctccgggtcctgc

SEQ ID NO: 1640335 - DNA, 25 bp, Homo sapien
ctccgggtcctgctgttactgtggg

SEQ ID NO: 1640336 - DNA, 25 bp, Homo sapien
cggcatggatagagtttagagagct

SEQ ID NO: 1640337 - DNA, 25 bp, Homo sapien
ttggtgggcggcatggatagagttt

SEQ ID NO: 1640338 - DNA, 25 bp, Homo sapien
tagagtttagagagctgggacccat

SEQ ID NO: 1640339 - DNA, 25 bp, Homo sapien
gatagagtttagagagctgggaccc

SEQ ID NO: 1640340 - DNA, 25 bp, Homo sapien
tgacccgcagctccgaaaagtttcg

SEQ ID NO: 1640341 - DNA, 25 bp, Homo sapien
ctgccagtgtcgttgaatttgctca

SEQ ID NO: 1640342 - DNA, 25 bp, Homo sapien
atgacccgcagctccgaaaagtttc

SEQ ID NO: 1640343 - DNA, 25 bp, Homo sapien
tggctgccgcatctgccagtgtcgt

SEQ ID NO: 1640344 - DNA, 25 bp, Homo sapien
ttccctacagggagattggactagg

SEQ ID NO: 1640345 - DNA, 25 bp, Homo sapien
ggatgttctagaactcttccaggaa

SEQ ID NO: 1640346 - DNA, 25 bp, Homo sapien
aaggctggacgcaccaaggaaagat

SEQ ID NO: 1640347 - DNA, 25 bp, Homo sapien
aggactttgatactggatgttctag

SEQ ID NO: 1640348 - DNA, 25 bp, Homo sapien
catctggaactaatgatgcagaagt

SEQ ID NO: 1640349 - DNA, 25 bp, Homo sapien
aatgatgcagaagttgtcactgaag

SEQ ID NO: 1640350 - DNA, 25 bp, Homo sapien
cccatctggaactaatgatgcagaa

SEQ ID NO: 1640351 - DNA, 25 bp, Homo sapien
tgatgcagaagttgtcactgaagag

SEQ ID NO: 1640352 - DNA, 25 bp, Homo sapien
gtaggaacaggacggtggtcataac

SEQ ID NO: 1640353 - DNA, 25 bp, Homo sapien
cagccccatgggcttactggctttc

SEQ ID NO: 1640354 - DNA, 25 bp, Homo sapien
aacaggacggtggtcataacgcgtg

SEQ ID NO: 1640355 - DNA, 25 bp, Homo sapien
cccatgggcttactggctttcttcc

SEQ ID NO: 1640356 - DNA, 25 bp, Homo sapien
gccccgtcttggcagtgcaagggac

SEQ ID NO: 1640357 - DNA, 25 bp, Homo sapien
tggccccgtcttggcagtgcaaggg

SEQ ID NO: 1640358 - DNA, 25 bp, Homo sapien
cagtggccccgtcttggcagtgcaa

SEQ ID NO: 1640359 - DNA, 25 bp, Homo sapien
cttccagtggccccgtcttggcagt

SEQ ID NO: 1640360 - DNA, 25 bp, Homo sapien
aattcgtctagcagacaagccgcct

SEQ ID NO: 1640361 - DNA, 25 bp, Homo sapien
ggccgaagcaatggtggcttgaaat

SEQ ID NO: 1640362 - DNA, 25 bp, Homo sapien
tggcttgaaattcgtctagcagaca

SEQ ID NO: 1640363 - DNA, 25 bp, Homo sapien
caatggtggcttgaaattcgtctag

SEQ ID NO: 1640364 - DNA, 25 bp, Homo sapien
caagtgcaaaattgcgcagtgtcca

SEQ ID NO: 1640365 - DNA, 25 bp, Homo sapien
aattgcgcagtgtccaccagcacgg

SEQ ID NO: 1640366 - DNA, 25 bp, Homo sapien
agcacggccggttagaaaacaagat

SEQ ID NO: 1640367 - DNA, 25 bp, Homo sapien
ccagcacggccggttagaaaacaag

SEQ ID NO: 1640368 - DNA, 25 bp, Homo sapien
acgccctatccaggaagcgccgggt

SEQ ID NO: 1640369 - DNA, 25 bp, Homo sapien
ggtcactggctacatccctttaggg

SEQ ID NO: 1640370 - DNA, 25 bp, Homo sapien
tgcttctttaccagacctccaagtg

SEQ ID NO: 1640371 - DNA, 25 bp, Homo sapien
tgcggccggcttcgttccctttgct

SEQ ID NO: 1640372 - DNA, 25 bp, Homo sapien
ccggcaagtccagcgccggggcctc

SEQ ID NO: 1640373 - DNA, 25 bp, Homo sapien
ttcgaagactgccatggacccgcgg

SEQ ID NO: 1640374 - DNA, 25 bp, Homo sapien
gcatccgcctgtagcactaacgcgt

SEQ ID NO: 1640375 - DNA, 25 bp, Homo sapien
tgtttccgcgtgtgaagcgttcgaa

SEQ ID NO: 1640376 - DNA, 25 bp, Homo sapien
tcccgcagcgctgcgtagccgcaca

SEQ ID NO: 1640377 - DNA, 25 bp, Homo sapien
cgaatccagaattccgttcccccat

SEQ ID NO: 1640378 - DNA, 25 bp, Homo sapien
aggcctccggactgcagctgcaagt

SEQ ID NO: 1640379 - DNA, 25 bp, Homo sapien
caggcctccggactgcagctgcaag

SEQ ID NO: 1640380 - DNA, 25 bp, Homo sapien
aacagcagcgcagcgatacccgcga

SEQ ID NO: 1640381 - DNA, 25 bp, Homo sapien
cagaagccacaacagcagcgcagcg

SEQ ID NO: 1640382 - DNA, 25 bp, Homo sapien
gaccctgtgtactatgcttgttccc

SEQ ID NO: 1640383 - DNA, 25 bp, Homo sapien
ccattactcttaggaccctgtgtac

SEQ ID NO: 1640384 - DNA, 25 bp, Homo sapien
gtcacttccattactcttaggaccc

SEQ ID NO: 1640385 - DNA, 25 bp, Homo sapien
tactatgcttgttccccagatctgc

SEQ ID NO: 1640386 - DNA, 25 bp, Homo sapien
gactccactgacagcgggagtgtgg

SEQ ID NO: 1640387 - DNA, 25 bp, Homo sapien
actccactgacagcgggagtgtggt

SEQ ID NO: 1640388 - DNA, 25 bp, Homo sapien
acagggtcttgttaggttggccagg

SEQ ID NO: 1640389 - DNA, 25 bp, Homo sapien
atgcccagcctctttcttccctccc

SEQ ID NO: 1640390 - DNA, 25 bp, Homo sapien
aggttggtcttcaactcttggtctc

SEQ ID NO: 1640391 - DNA, 25 bp, Homo sapien
gttggtcttcaactcttggtctcaa

SEQ ID NO: 1640392 - DNA, 25 bp, Homo sapien
caagctctgtgggtacaaaaagaca

SEQ ID NO: 1640393 - DNA, 25 bp, Homo sapien
catgcagggaagacagcgtgactgc

SEQ ID NO: 1640394 - DNA, 25 bp, Homo sapien
catagaacaagctctgtgggtacaa

SEQ ID NO: 1640395 - DNA, 25 bp, Homo sapien
gggcacgcggcaggcacagcatgca

SEQ ID NO: 1640396 - DNA, 25 bp, Homo sapien
aaaggccgcggcaaattgccaagac

SEQ ID NO: 1640397 - DNA, 25 bp, Homo sapien
tggaaaggccgcggcaaattgccaa

SEQ ID NO: 1640398 - DNA, 25 bp, Homo sapien
gaaaggccgcggcaaattgccaaga

SEQ ID NO: 1640399 - DNA, 25 bp, Homo sapien
agctggaaaggccgcggcaaattgc

SEQ ID NO: 1640400 - DNA, 25 bp, Homo sapien
tcaggtcgatgtcctcgggcgcacc

SEQ ID NO: 1640401 - DNA, 25 bp, Homo sapien
ctgcagcgaaaagctctgcaggatg

SEQ ID NO: 1640402 - DNA, 25 bp, Homo sapien
ccagcggctgcagcgaaaagctctg

SEQ ID NO: 1640403 - DNA, 25 bp, Homo sapien
gaaagagctccatgcgcgccagcga

SEQ ID NO: 1640404 - DNA, 25 bp, Homo sapien
agataagatgaggttagaggctgca

SEQ ID NO: 1640405 - DNA, 25 bp, Homo sapien
taagatgaggttagaggctgcaacc

SEQ ID NO: 1640406 - DNA, 25 bp, Homo sapien
gataagatgaggttagaggctgcaa

SEQ ID NO: 1640407 - DNA, 25 bp, Homo sapien
agatgaggttagaggctgcaacccc

SEQ ID NO: 1640408 - DNA, 25 bp, Homo sapien
ggttgaactcctggggcgtcaggaa

SEQ ID NO: 1640409 - DNA, 25 bp, Homo sapien
gctggggtcgtagtggacggtgtta

SEQ ID NO: 1640410 - DNA, 25 bp, Homo sapien
agtggacggtgttaaggagggtgat

SEQ ID NO: 1640411 - DNA, 25 bp, Homo sapien
ttgaactcctggggcgtcaggaact

SEQ ID NO: 1640412 - DNA, 25 bp, Homo sapien
aggaggtggacttagcagtgtagga

SEQ ID NO: 1640413 - DNA, 25 bp, Homo sapien
gaggtggacttagcagtgtaggagg

SEQ ID NO: 1640414 - DNA, 25 bp, Homo sapien
tgaggaggtggacttagcagtgtag

SEQ ID NO: 1640415 - DNA, 25 bp, Homo sapien
gggtgaggaggtggacttagcagtg

SEQ ID NO: 1640416 - DNA, 25 bp, Homo sapien
cgcacgtgtcccaccacaaggttga

SEQ ID NO: 1640417 - DNA, 25 bp, Homo sapien
cacgtgtcccaccacaaggttgatc

SEQ ID NO: 1640418 - DNA, 25 bp, Homo sapien
gctggcagccgcacgtgtcccacca

SEQ ID NO: 1640419 - DNA, 25 bp, Homo sapien
tgtcccaccacaaggttgatctcct

SEQ ID NO: 1640420 - DNA, 25 bp, Homo sapien
gggaagaggtgtgtccgtatgtggg

SEQ ID NO: 1640421 - DNA, 25 bp, Homo sapien
gctgggaagaggtgtgtccgtatgt

SEQ ID NO: 1640422 - DNA, 25 bp, Homo sapien
agggtatcaaaccaggctgggaaga

SEQ ID NO: 1640423 - DNA, 25 bp, Homo sapien
gggtggagggtatcaaaccaggctg

SEQ ID NO: 1640424 - DNA, 25 bp, Homo sapien
tgccgccaaagagcaggttatgtgt

SEQ ID NO: 1640425 - DNA, 25 bp, Homo sapien
ggtgccgccaaagagcaggttatgt

SEQ ID NO: 1640426 - DNA, 25 bp, Homo sapien
aaagagcaggttatgtgtggtcatc

SEQ ID NO: 1640427 - DNA, 25 bp, Homo sapien
cgccaaagagcaggttatgtgtggt

SEQ ID NO: 1640428 - DNA, 25 bp, Homo sapien
tgacttcttaatgagctgtaagttg

SEQ ID NO: 1640429 - DNA, 25 bp, Homo sapien
tggcggtggctgcgagtggctcctg

SEQ ID NO: 1640430 - DNA, 25 bp, Homo sapien
acttcttaatgagctgtaagttggc

SEQ ID NO: 1640431 - DNA, 25 bp, Homo sapien
cttcttaatgagctgtaagttggcg

SEQ ID NO: 1640432 - DNA, 25 bp, Homo sapien
tggtcgtggacgctgtgggcgatga

SEQ ID NO: 1640433 - DNA, 25 bp, Homo sapien
agcgaggcctggtggtcgtggacgc

SEQ ID NO: 1640434 - DNA, 25 bp, Homo sapien
caggaggctcgggaagatgtcgtac

SEQ ID NO: 1640435 - DNA, 25 bp, Homo sapien
tgaggtctctcaggcacttgaagtt

SEQ ID NO: 1640436 - DNA, 25 bp, Homo sapien
cagtgtggattaggtaggcagggac

SEQ ID NO: 1640437 - DNA, 25 bp, Homo sapien
cagacagagtaggagggttttggag

SEQ ID NO: 1640438 - DNA, 25 bp, Homo sapien
ctggggaccagacagagtaggaggg

SEQ ID NO: 1640439 - DNA, 25 bp, Homo sapien
ttggaggaggacgaagggtgttcag

SEQ ID NO: 1640440 - DNA, 25 bp, Homo sapien
gctgccgaagagcacggaacagata

SEQ ID NO: 1640441 - DNA, 25 bp, Homo sapien
ggtgagcagacgctcatcatcatag

SEQ ID NO: 1640442 - DNA, 25 bp, Homo sapien
cacaaacgtggggtcaaagggctcg

SEQ ID NO: 1640443 - DNA, 25 bp, Homo sapien
aagttgtcattgataaggcggataa

SEQ ID NO: 1640444 - DNA, 25 bp, Homo sapien
catagcacaaggcaatcatcaggca

SEQ ID NO: 1640445 - DNA, 25 bp, Homo sapien
acacagcacgcgacatagcacaagg

SEQ ID NO: 1640446 - DNA, 25 bp, Homo sapien
gcttcctgcagcacatcgacagcaa

SEQ ID NO: 1640447 - DNA, 25 bp, Homo sapien
accacagaacaggttggcaacacac

SEQ ID NO: 1640448 - DNA, 25 bp, Homo sapien
atctggccgtccaacagctgaacag

SEQ ID NO: 1640449 - DNA, 25 bp, Homo sapien
cacgtagcatctggccgtccaacag

SEQ ID NO: 1640450 - DNA, 25 bp, Homo sapien
tctcaacacaacacgtagcatctgg

SEQ ID NO: 1640451 - DNA, 25 bp, Homo sapien
aatatctcaacacaacacgtagcat

SEQ ID NO: 1640452 - DNA, 25 bp, Homo sapien
taaacagttctttgatgaatctagg

SEQ ID NO: 1640453 - DNA, 25 bp, Homo sapien
tggaccaagtctatcaaatgaatgc

SEQ ID NO: 1640454 - DNA, 25 bp, Homo sapien
ccgtaactgagagtaaggattgctc

SEQ ID NO: 1640455 - DNA, 25 bp, Homo sapien
tatcttggtgcatatgttggtttcc

SEQ ID NO: 1640456 - DNA, 25 bp, Homo sapien
tgcagacagccaggatttaagattt

SEQ ID NO: 1640457 - DNA, 25 bp, Homo sapien
agattttaagagatattgaaagcct

SEQ ID NO: 1640458 - DNA, 25 bp, Homo sapien
taagagatattgaaagccttttgtt

SEQ ID NO: 1640459 - DNA, 25 bp, Homo sapien
cagccaggatttaagattttaagag

SEQ ID NO: 1640460 - DNA, 25 bp, Homo sapien
gtctgctcagatcgtttgcccattc

SEQ ID NO: 1640461 - DNA, 25 bp, Homo sapien
taagtcccttatcaggtatgtcccc

SEQ ID NO: 1640462 - DNA, 25 bp, Homo sapien
ccgaagaacatgattgctgtagcac

SEQ ID NO: 1640463 - DNA, 25 bp, Homo sapien
gctttgcaagaaaccgccaaattgt

SEQ ID NO: 1640464 - DNA, 25 bp, Homo sapien
cctctcatcccagctcggaagcacc

SEQ ID NO: 1640465 - DNA, 25 bp, Homo sapien
cccagctcggaagcaccttatcaag

SEQ ID NO: 1640466 - DNA, 25 bp, Homo sapien
atcccagctcggaagcaccttatca

SEQ ID NO: 1640467 - DNA, 25 bp, Homo sapien
tcatcccagctcggaagcaccttat

SEQ ID NO: 1640468 - DNA, 25 bp, Homo sapien
gggacacgtcaatgtccttaggtga

SEQ ID NO: 1640469 - DNA, 25 bp, Homo sapien
gacacgtcaatgtccttaggtgact

SEQ ID NO: 1640470 - DNA, 25 bp, Homo sapien
caatgtccttaggtgactgggagga

SEQ ID NO: 1640471 - DNA, 25 bp, Homo sapien
cgtcaatgtccttaggtgactggga

SEQ ID NO: 1640472 - DNA, 25 bp, Homo sapien
ggcggaagttctgcatgacggtggt

SEQ ID NO: 1640473 - DNA, 25 bp, Homo sapien
ttgaggcggaagttctgcatgacgg

SEQ ID NO: 1640474 - DNA, 25 bp, Homo sapien
gaggcggaagttctgcatgacggtg

SEQ ID NO: 1640475 - DNA, 25 bp, Homo sapien
tgaggcggaagttctgcatgacggt

SEQ ID NO: 1640476 - DNA, 25 bp, Homo sapien
agagcccagcatagggaacacttcg

SEQ ID NO: 1640477 - DNA, 25 bp, Homo sapien
ccagcatagggaacacttcggtgcc

SEQ ID NO: 1640478 - DNA, 25 bp, Homo sapien
gaaactggggtctctcagcacagag

SEQ ID NO: 1640479 - DNA, 25 bp, Homo sapien
cacagagcccagcatagggaacact

SEQ ID NO: 1640480 - DNA, 25 bp, Homo sapien
aaagcttctaatgtgggtgggatgc

SEQ ID NO: 1640481 - DNA, 25 bp, Homo sapien
tctgtccctatgacaaaaggccgaa

SEQ ID NO: 1640482 - DNA, 25 bp, Homo sapien
gataggaagtttgggaacatgtgtt

SEQ ID NO: 1640483 - DNA, 25 bp, Homo sapien
gagtgggacagggtctagaaagctt

SEQ ID NO: 1640484 - DNA, 25 bp, Homo sapien
cttgggctgccggttcttgccgatc

SEQ ID NO: 1640485 - DNA, 25 bp, Homo sapien
tttggatctcgtggatcactgcctc

SEQ ID NO: 1640486 - DNA, 25 bp, Homo sapien
tctgtcaatctcctcatggaccttg

SEQ ID NO: 1640487 - DNA, 25 bp, Homo sapien
ggttcttgccgatcactctgtcaat

SEQ ID NO: 1640488 - DNA, 25 bp, Homo sapien
caagaagccatagcgcagggtggtg

SEQ ID NO: 1640489 - DNA, 25 bp, Homo sapien
gcaagaagccatagcgcagggtggt

SEQ ID NO: 1640490 - DNA, 25 bp, Homo sapien
ggctttgcatctccccgcagtggct

SEQ ID NO: 1640491 - DNA, 25 bp, Homo sapien
tttgcatctccccgcagtggctgct

SEQ ID NO: 1640492 - DNA, 25 bp, Homo sapien
gcatctccccgcagtggctgctggg

SEQ ID NO: 1640493 - DNA, 25 bp, Homo sapien
ctggctttgcatctccccgcagtgg

SEQ ID NO: 1640494 - DNA, 25 bp, Homo sapien
cagcccttgcagcaactgaaaggcc

SEQ ID NO: 1640495 - DNA, 25 bp, Homo sapien
ttgacgtgaactggaagattcctag

SEQ ID NO: 1640496 - DNA, 25 bp, Homo sapien
acgtgaactggaagattcctagcat

SEQ ID NO: 1640497 - DNA, 25 bp, Homo sapien
gacgtgaactggaagattcctagca

SEQ ID NO: 1640498 - DNA, 25 bp, Homo sapien
ggttgacgtgaactggaagattcct

SEQ ID NO: 1640499 - DNA, 25 bp, Homo sapien
aaagcggtccccaaagacaatggag

SEQ ID NO: 1640500 - DNA, 25 bp, Homo sapien
gacaatggagctgatgacattggag

SEQ ID NO: 1640501 - DNA, 25 bp, Homo sapien
aagaaggtgggatcgatattggcgc

SEQ ID NO: 1640502 - DNA, 25 bp, Homo sapien
atgacattggagactgtgcggctca

SEQ ID NO: 1640503 - DNA, 25 bp, Homo sapien
ctcgatgcctcgcttgcccaccccg

SEQ ID NO: 1640504 - DNA, 25 bp, Homo sapien
cttgcccaccccgaagtcccgcagg

SEQ ID NO: 1640505 - DNA, 25 bp, Homo sapien
gatgcctcgcttgcccaccccgaag

SEQ ID NO: 1640506 - DNA, 25 bp, Homo sapien
gcctcgcttgcccaccccgaagtcc

SEQ ID NO: 1640507 - DNA, 25 bp, Homo sapien
gccggggccccaagtgaatggtgaa

SEQ ID NO: 1640508 - DNA, 25 bp, Homo sapien
cggggccccaagtgaatggtgaaca

SEQ ID NO: 1640509 - DNA, 25 bp, Homo sapien
ccgccggggccccaagtgaatggtg

SEQ ID NO: 1640510 - DNA, 25 bp, Homo sapien
ggggccccaagtgaatggtgaacac

SEQ ID NO: 1640511 - DNA, 25 bp, Homo sapien
ctgctgccaaacagacatcaagacc

SEQ ID NO: 1640512 - DNA, 25 bp, Homo sapien
caaacagacatcaagaccattacag

SEQ ID NO: 1640513 - DNA, 25 bp, Homo sapien
ggtagtttccaatgaagggcaatgg

SEQ ID NO: 1640514 - DNA, 25 bp, Homo sapien
caaggccaccagaagcatccctgag

SEQ ID NO: 1640515 - DNA, 25 bp, Homo sapien
taagggtggcaccatatagggtctg

SEQ ID NO: 1640516 - DNA, 25 bp, Homo sapien
gatattggtcctatgtgggtctgag

SEQ ID NO: 1640517 - DNA, 25 bp, Homo sapien
catatagggtctgaggttggtccca

SEQ ID NO: 1640518 - DNA, 25 bp, Homo sapien
cattgagggcataagagtgtcctgc

SEQ ID NO: 1640519 - DNA, 25 bp, Homo sapien
ggtggttggaccatttagggttgca

SEQ ID NO: 1640520 - DNA, 25 bp, Homo sapien
gtggttggaccatttagggttgcac

SEQ ID NO: 1640521 - DNA, 25 bp, Homo sapien
ccccaggactgacatcttgctcaaa

SEQ ID NO: 1640522 - DNA, 25 bp, Homo sapien
ccatggagctgtgaataggaaatta

SEQ ID NO: 1640523 - DNA, 25 bp, Homo sapien
tcatggcctcctggagtgtggtgct

SEQ ID NO: 1640524 - DNA, 25 bp, Homo sapien
agtgtggtgctgagttaggcagtat

SEQ ID NO: 1640525 - DNA, 25 bp, Homo sapien
gaaattaatccttcatggcctcctg

SEQ ID NO: 1640526 - DNA, 25 bp, Homo sapien
tctgtctatgcttgtcttggatccc

SEQ ID NO: 1640527 - DNA, 25 bp, Homo sapien
tgtctatgcttgtcttggatcccat

SEQ ID NO: 1640528 - DNA, 25 bp, Homo sapien
gtctgtctatgcttgtcttggatcc

SEQ ID NO: 1640529 - DNA, 25 bp, Homo sapien
ctgtctgtctatgcttgtcttggat

SEQ ID NO: 1640530 - DNA, 25 bp, Homo sapien
tataccaaaggtctcactgggctcc

SEQ ID NO: 1640531 - DNA, 25 bp, Homo sapien
tgcttccagcctaactctgttttat

SEQ ID NO: 1640532 - DNA, 25 bp, Homo sapien
aggatttcccttaatgctgccctca

SEQ ID NO: 1640533 - DNA, 25 bp, Homo sapien
gcaatggagccccactgttatgggc

SEQ ID NO: 1640534 - DNA, 25 bp, Homo sapien
ctgcacactaattctgtcttgaggg

SEQ ID NO: 1640535 - DNA, 25 bp, Homo sapien
tgtctatcacaaggggctgacacct

SEQ ID NO: 1640536 - DNA, 25 bp, Homo sapien
ttcctctgcttgtctatcacaaggg

SEQ ID NO: 1640537 - DNA, 25 bp, Homo sapien
ctaattctgtcttgagggagactgt

SEQ ID NO: 1640538 - DNA, 25 bp, Homo sapien
cttggtaccttggtaatgaggacat

SEQ ID NO: 1640539 - DNA, 25 bp, Homo sapien
cccagctcggaagcaccttatcaag

SEQ ID NO: 1640540 - DNA, 25 bp, Homo sapien
atcccagctcggaagcaccttatca

SEQ ID NO: 1640541 - DNA, 25 bp, Homo sapien
tcatcccagctcggaagcaccttat

SEQ ID NO: 1640542 - DNA, 25 bp, Homo sapien
cctctcatcccagctcggaagcacc

SEQ ID NO: 1640543 - DNA, 25 bp, Homo sapien
gggacacgtcaatgtccttaggtga

SEQ ID NO: 1640544 - DNA, 25 bp, Homo sapien
cttgaggcggaagttctgcatgacg

SEQ ID NO: 1640545 - DNA, 25 bp, Homo sapien
caatgtccttaggtgactgggagga

SEQ ID NO: 1640546 - DNA, 25 bp, Homo sapien
tgggaggacttgaggcggaagttct

SEQ ID NO: 1640547 - DNA, 25 bp, Homo sapien
gggtagattctaacaggaacttcca

SEQ ID NO: 1640548 - DNA, 25 bp, Homo sapien
tgcaggtactgggtgcttggtagtt

SEQ ID NO: 1640549 - DNA, 25 bp, Homo sapien
gctggctcaagggtagattctaaca

SEQ ID NO: 1640550 - DNA, 25 bp, Homo sapien
aaggaagtatcagctgctggctcaa

SEQ ID NO: 1640551 - DNA, 25 bp, Homo sapien
ctcttcttaaactgccccttgtcat

SEQ ID NO: 1640552 - DNA, 25 bp, Homo sapien
actgccccttgtcatccaggaaatg

SEQ ID NO: 1640553 - DNA, 25 bp, Homo sapien
aaagggcacaaaagcatcactcttc

SEQ ID NO: 1640554 - DNA, 25 bp, Homo sapien
atcactcttcttaaactgccccttg

SEQ ID NO: 1640555 - DNA, 25 bp, Homo sapien
tcagcacggagcccagcatagggaa

SEQ ID NO: 1640556 - DNA, 25 bp, Homo sapien
cacggagcccagcatagggaacact

SEQ ID NO: 1640557 - DNA, 25 bp, Homo sapien
cggagcccagcatagggaacacttc

SEQ ID NO: 1640558 - DNA, 25 bp, Homo sapien
agcacggagcccagcatagggaaca

SEQ ID NO: 1640559 - DNA, 25 bp, Homo sapien
tcgggggattggtgaaagtacacag

SEQ ID NO: 1640560 - DNA, 25 bp, Homo sapien
gtgatgaggagggtcgggggattgg

SEQ ID NO: 1640561 - DNA, 25 bp, Homo sapien
gtcgggggattggtgaaagtacaca

SEQ ID NO: 1640562 - DNA, 25 bp, Homo sapien
ctgtttcttaagataggaagttttg

SEQ ID NO: 1640563 - DNA, 25 bp, Homo sapien
ggtccatgtcttgctacgcaggttg

SEQ ID NO: 1640564 - DNA, 25 bp, Homo sapien
ttgtgtccctaagacaaaaggccta

SEQ ID NO: 1640565 - DNA, 25 bp, Homo sapien
cttgagtttgattctcccgacacaa

SEQ ID NO: 1640566 - DNA, 25 bp, Homo sapien
catgtagggcatcttggtccggtcc

SEQ ID NO: 1640567 - DNA, 25 bp, Homo sapien
ccatgtagggcatcttggtccggtc

SEQ ID NO: 1640568 - DNA, 25 bp, Homo sapien
tggtgctgaccgtctcggtgcctgc

SEQ ID NO: 1640569 - DNA, 25 bp, Homo sapien
ggtgctgaccgtctcggtgcctgca

SEQ ID NO: 1640570 - DNA, 25 bp, Homo sapien
ctgcaatgaagaggttcaacgtgct

SEQ ID NO: 1640571 - DNA, 25 bp, Homo sapien
atgaagaggttcaacgtgctcatca

SEQ ID NO: 1640572 - DNA, 25 bp, Homo sapien
tccccgcactggctgctggggtgta

SEQ ID NO: 1640573 - DNA, 25 bp, Homo sapien
ctccccgcactggctgctggggtgt

SEQ ID NO: 1640574 - DNA, 25 bp, Homo sapien
ccccgcactggctgctggggtgtac

SEQ ID NO: 1640575 - DNA, 25 bp, Homo sapien
cgtgcgctggttgtgctccaccttc

SEQ ID NO: 1640576 - DNA, 25 bp, Homo sapien
tcaccgaagagaacatctcatagag

SEQ ID NO: 1640577 - DNA, 25 bp, Homo sapien
gggaattgggatccagcgtgcgctg

SEQ ID NO: 1640578 - DNA, 25 bp, Homo sapien
tcctggcaggtgtttcatcaccgaa

SEQ ID NO: 1640579 - DNA, 25 bp, Homo sapien
acgtgaactggaagattcctagcat

SEQ ID NO: 1640580 - DNA, 25 bp, Homo sapien
gacgtgaactggaagattcctagca

SEQ ID NO: 1640581 - DNA, 25 bp, Homo sapien
ttgacgtgaactggaagattcctag

SEQ ID NO: 1640582 - DNA, 25 bp, Homo sapien
ggttgacgtgaactggaagattcct

SEQ ID NO: 1640583 - DNA, 25 bp, Homo sapien
aaagcggtccccaaagacaatggag

SEQ ID NO: 1640584 - DNA, 25 bp, Homo sapien
aagaaggtgggatcgatattggcgc

SEQ ID NO: 1640585 - DNA, 25 bp, Homo sapien
ttgtcctcatagtcaaagcggtccc

SEQ ID NO: 1640586 - DNA, 25 bp, Homo sapien
atgacattggagactgtgcggctca

SEQ ID NO: 1640587 - DNA, 25 bp, Homo sapien
tgcttggcgcgctccccgttgctga

SEQ ID NO: 1640588 - DNA, 25 bp, Homo sapien
gcttggcgcgctccccgttgctgaa

SEQ ID NO: 1640589 - DNA, 25 bp, Homo sapien
ggccccaagtgaatggtgaacacgg

SEQ ID NO: 1640590 - DNA, 25 bp, Homo sapien
catagcctttgaagacccagtcgaa

SEQ ID NO: 1640591 - DNA, 25 bp, Homo sapien
ccagtcgaaggtggcttgctcgcct

SEQ ID NO: 1640592 - DNA, 25 bp, Homo sapien
cagagcctccctgacggcatcatgt

SEQ ID NO: 1640593 - DNA, 25 bp, Homo sapien
cttcatgatggagtcacatatgtgc

SEQ ID NO: 1640594 - DNA, 25 bp, Homo sapien
tcatgatggagtcacatatgtgctc

SEQ ID NO: 1640595 - DNA, 25 bp, Homo sapien
atgatggagtcacatatgtgctctg

SEQ ID NO: 1640596 - DNA, 25 bp, Homo sapien
catgatggagtcacatatgtgctct

SEQ ID NO: 1640597 - DNA, 25 bp, Homo sapien
gagtgagaatgcaccccaaagttgt

SEQ ID NO: 1640598 - DNA, 25 bp, Homo sapien
cctttatactgcctgaaaaagaggg

SEQ ID NO: 1640599 - DNA, 25 bp, Homo sapien
gagggatggactttggctaattaca

SEQ ID NO: 1640600 - DNA, 25 bp, Homo sapien
gaactgaagagtttggaatatttgc

SEQ ID NO: 1640601 - DNA, 25 bp, Homo sapien
ggtggttggaccatttagggttgca

SEQ ID NO: 1640602 - DNA, 25 bp, Homo sapien
gtggttggaccatttagggttgcac

SEQ ID NO: 1640603 - DNA, 25 bp, Homo sapien
ccccaggactgacatcttgctcaaa

SEQ ID NO: 1640604 - DNA, 25 bp, Homo sapien
tctgtctatgcttgtcttggatccc

SEQ ID NO: 1640605 - DNA, 25 bp, Homo sapien
tgtctatgcttgtcttggatcccat

SEQ ID NO: 1640606 - DNA, 25 bp, Homo sapien
gtctgtctatgcttgtcttggatcc

SEQ ID NO: 1640607 - DNA, 25 bp, Homo sapien
ctgtctgtctatgcttgtcttggat

SEQ ID NO: 1640608 - DNA, 25 bp, Homo sapien
atctctttgtttcgttgcctttctc

SEQ ID NO: 1640609 - DNA, 25 bp, Homo sapien
tctctcttgtccctgtatctctttg

SEQ ID NO: 1640610 - DNA, 25 bp, Homo sapien
tctagttggatttctctgtgagcca

SEQ ID NO: 1640611 - DNA, 25 bp, Homo sapien
gtctagttggatttctctgtgagcc

SEQ ID NO: 1640612 - DNA, 25 bp, Homo sapien
atcccagctctgaaggacatcgtca

SEQ ID NO: 1640613 - DNA, 25 bp, Homo sapien
catcgtcaaggtgaactgagcccct

SEQ ID NO: 1640614 - DNA, 25 bp, Homo sapien
cagctctgaaggacatcgtcaaggt

SEQ ID NO: 1640615 - DNA, 25 bp, Homo sapien
tattactactctttgtagcatagtt

SEQ ID NO: 1640616 - DNA, 25 bp, Homo sapien
tcctctgatcccgcccaccacgccg

SEQ ID NO: 1640617 - DNA, 25 bp, Homo sapien
caagtagcacttggtgtagtttcgt

SEQ ID NO: 1640618 - DNA, 25 bp, Homo sapien
gggacacaacaatgtccttaggcga

SEQ ID NO: 1640619 - DNA, 25 bp, Homo sapien
tccttaggcgactgccgcgatttga

SEQ ID NO: 1640620 - DNA, 25 bp, Homo sapien
ccgcgatttgaagcggaagttctgc

SEQ ID NO: 1640621 - DNA, 25 bp, Homo sapien
tcagcacggagcccagcatagggaa

SEQ ID NO: 1640622 - DNA, 25 bp, Homo sapien
cacggagcccagcatagggaacact

SEQ ID NO: 1640623 - DNA, 25 bp, Homo sapien
cggagcccagcatagggaacacttc

SEQ ID NO: 1640624 - DNA, 25 bp, Homo sapien
agcacggagcccagcatagggaaca

SEQ ID NO: 1640625 - DNA, 25 bp, Homo sapien
gttcttgccgatcactctgtcaatc

SEQ ID NO: 1640626 - DNA, 25 bp, Homo sapien
ggttcttgccgatcactctgtcaat

SEQ ID NO: 1640627 - DNA, 25 bp, Homo sapien
gaggttcaacgtggtcagcaccagg

SEQ ID NO: 1640628 - DNA, 25 bp, Homo sapien
agaggttcaacgtggtcagcaccag

SEQ ID NO: 1640629 - DNA, 25 bp, Homo sapien
gaagaggttcaacgtggtcagcacc

SEQ ID NO: 1640630 - DNA, 25 bp, Homo sapien
tggttctgcatttcttgcccctcct

SEQ ID NO: 1640631 - DNA, 25 bp, Homo sapien
ttcttgcccctccttctgtttctcc

SEQ ID NO: 1640632 - DNA, 25 bp, Homo sapien
ttgcccctccttctgtttctcccat

SEQ ID NO: 1640633 - DNA, 25 bp, Homo sapien
ggttctgcatttcttgcccctcctt

SEQ ID NO: 1640634 - DNA, 25 bp, Homo sapien
tgcctgttgtagaccacagtcacac

SEQ ID NO: 1640635 - DNA, 25 bp, Homo sapien
tctgcactggtgctttggattccct

SEQ ID NO: 1640636 - DNA, 25 bp, Homo sapien
tgttgtagaccacagtcacacactg

SEQ ID NO: 1640637 - DNA, 25 bp, Homo sapien
ggattccctgatatgttccttcaaa

SEQ ID NO: 1640638 - DNA, 25 bp, Homo sapien
gggttgatagatacatctacatgca

SEQ ID NO: 1640639 - DNA, 25 bp, Homo sapien
acaacgtgcagggttgatagataca

SEQ ID NO: 1640640 - DNA, 25 bp, Homo sapien
ttaacccagtctaccattggtgggc

SEQ ID NO: 1640641 - DNA, 25 bp, Homo sapien
tgcattgtgttggtttgctccaccc

SEQ ID NO: 1640642 - DNA, 25 bp, Homo sapien
tgctcactgagtgaccaggatctgg

SEQ ID NO: 1640643 - DNA, 25 bp, Homo sapien
ttaacatgcaccatccatgaaaggc

SEQ ID NO: 1640644 - DNA, 25 bp, Homo sapien
gggaggctgctttaggccaaattta

SEQ ID NO: 1640645 - DNA, 25 bp, Homo sapien
gttttgcgcagtacagtgacctcct

SEQ ID NO: 1640646 - DNA, 25 bp, Homo sapien
cagtgatccagggtttggcccagcc

SEQ ID NO: 1640647 - DNA, 25 bp, Homo sapien
gtgcccagccatgtatatatataat

SEQ ID NO: 1640648 - DNA, 25 bp, Homo sapien
aaaattaagctgaaattcacataac

SEQ ID NO: 1640649 - DNA, 25 bp, Homo sapien
ttaaaaattaagctgaaattcacat

SEQ ID NO: 1640650 - DNA, 25 bp, Homo sapien
cataaaattagctgttttaaagtgt

SEQ ID NO: 1640651 - DNA, 25 bp, Homo sapien
tcatctcggcccctgtcaatctggt

SEQ ID NO: 1640652 - DNA, 25 bp, Homo sapien
ccttccaagatcaagagattctcca

SEQ ID NO: 1640653 - DNA, 25 bp, Homo sapien
caatctggtttttgtcactatggac

SEQ ID NO: 1640654 - DNA, 25 bp, Homo sapien
caaaacccatacctatcaagctgtc

SEQ ID NO: 1640655 - DNA, 25 bp, Homo sapien
taaacatctctaaagcctgacctcc

SEQ ID NO: 1640656 - DNA, 25 bp, Homo sapien
tcaatgccaactctgtgaagggcca

SEQ ID NO: 1640657 - DNA, 25 bp, Homo sapien
cctgtactctcaacacagcgtgtgg

SEQ ID NO: 1640658 - DNA, 25 bp, Homo sapien
tgaagggccaaaccattgtcttgct

SEQ ID NO: 1640659 - DNA, 25 bp, Homo sapien
taaccttttggcgtctgcagcatct

SEQ ID NO: 1640660 - DNA, 25 bp, Homo sapien
ccttttggcgtctgcagcatctgcc

SEQ ID NO: 1640661 - DNA, 25 bp, Homo sapien
ctaaccttttggcgtctgcagcatc

SEQ ID NO: 1640662 - DNA, 25 bp, Homo sapien
aaccttttggcgtctgcagcatctg

SEQ ID NO: 1640663 - DNA, 25 bp, Homo sapien
tggaacagcgatggttgatatagtt

SEQ ID NO: 1640664 - DNA, 25 bp, Homo sapien
gaacagcgatggttgatatagttgg

SEQ ID NO: 1640665 - DNA, 25 bp, Homo sapien
tgacaggggctaatttgaatgggcc

SEQ ID NO: 1640666 - DNA, 25 bp, Homo sapien
agatggaacagcgatggttgatata

SEQ ID NO: 1640667 - DNA, 25 bp, Homo sapien
gaattgggatccagcgtgcactggt

SEQ ID NO: 1640668 - DNA, 25 bp, Homo sapien
aaacgagtcaatgaagtcccgtggg

SEQ ID NO: 1640669 - DNA, 25 bp, Homo sapien
tgtgctccactttcttggcaatgaa

SEQ ID NO: 1640670 - DNA, 25 bp, Homo sapien
ccttgcatgcggatgagaaacgagt

SEQ ID NO: 1640671 - DNA, 25 bp, Homo sapien
gacaatggagctgatgacattggag

SEQ ID NO: 1640672 - DNA, 25 bp, Homo sapien
aaagcggtccccaaagacaatggag

SEQ ID NO: 1640673 - DNA, 25 bp, Homo sapien
ctcatagtcaaagcggtccccaaag

SEQ ID NO: 1640674 - DNA, 25 bp, Homo sapien
ttgtcctcatagtcaaagcggtccc

SEQ ID NO: 1640675 - DNA, 25 bp, Homo sapien
ggccttgatgaggaagcccgccttc

SEQ ID NO: 1640676 - DNA, 25 bp, Homo sapien
gaggaagcccgccttctcctggata

SEQ ID NO: 1640677 - DNA, 25 bp, Homo sapien
gatgaggaagcccgccttctcctgg

SEQ ID NO: 1640678 - DNA, 25 bp, Homo sapien
aggaagcccgccttctcctggatac

SEQ ID NO: 1640679 - DNA, 25 bp, Homo sapien
gcgcctgagcggcttggtgcgctcc

SEQ ID NO: 1640680 - DNA, 25 bp, Homo sapien
gagaagcgcctgagcggcttggtgc

SEQ ID NO: 1640681 - DNA, 25 bp, Homo sapien
cctgagcggcttggtgcgctcccag

SEQ ID NO: 1640682 - DNA, 25 bp, Homo sapien
gcttggtgcgctcccaggtgcggca

SEQ ID NO: 1640683 - DNA, 25 bp, Homo sapien
tggtccaccagagcctccttgacgg

SEQ ID NO: 1640684 - DNA, 25 bp, Homo sapien
cttcatgatggagtcacatatgtgc

SEQ ID NO: 1640685 - DNA, 25 bp, Homo sapien
atgatggagtcacatatgtgctctg

SEQ ID NO: 1640686 - DNA, 25 bp, Homo sapien
tcatgatggagtcacatatgtgctc

SEQ ID NO: 1640687 - DNA, 25 bp, Homo sapien
catgatggagtcacatatgtgctct

SEQ ID NO: 1640688 - DNA, 25 bp, Homo sapien
tttaggagcgggcaacagataagct

SEQ ID NO: 1640689 - DNA, 25 bp, Homo sapien
gactaaatctgtggtacctcaggag

SEQ ID NO: 1640690 - DNA, 25 bp, Homo sapien
tgaacagagagggtacctcccgact

SEQ ID NO: 1640691 - DNA, 25 bp, Homo sapien
tttggacacaaccagcaaaggagga

SEQ ID NO: 1640692 - DNA, 25 bp, Homo sapien
gctctgatggttggtccttccaggg

SEQ ID NO: 1640693 - DNA, 25 bp, Homo sapien
ggctctaactggctcaaattggctg

SEQ ID NO: 1640694 - DNA, 25 bp, Homo sapien
tggatgtgggtgaggttgacactcc

SEQ ID NO: 1640695 - DNA, 25 bp, Homo sapien
gatgtgggtgaggttgacactccca

SEQ ID NO: 1640696 - DNA, 25 bp, Homo sapien
ggtttctcctagatgcctctgccat

SEQ ID NO: 1640697 - DNA, 25 bp, Homo sapien
tgtccagtggtttctcctagatgcc

SEQ ID NO: 1640698 - DNA, 25 bp, Homo sapien
ctcctgcaactttgcaactttgcat

SEQ ID NO: 1640699 - DNA, 25 bp, Homo sapien
cctgtgtgctcctgcaactttgcaa

SEQ ID NO: 1640700 - DNA, 25 bp, Homo sapien
gaaacctaagcaacggtgaccatgt

SEQ ID NO: 1640701 - DNA, 25 bp, Homo sapien
ggtcaaaatcagagcacacacaaaa

SEQ ID NO: 1640702 - DNA, 25 bp, Homo sapien
gtgaccatgtgaccatgaaacctgc

SEQ ID NO: 1640703 - DNA, 25 bp, Homo sapien
gatgcagccagaaacctaagcaacg

SEQ ID NO: 1640704 - DNA, 25 bp, Homo sapien
tgctcctgaacacgagaggagagct

SEQ ID NO: 1640705 - DNA, 25 bp, Homo sapien
gcttgaggattagtaagatgaggaa

SEQ ID NO: 1640706 - DNA, 25 bp, Homo sapien
cctggctgactctgtaatcatagtg

SEQ ID NO: 1640707 - DNA, 25 bp, Homo sapien
taatcatagtgcctcctcttaggga

SEQ ID NO: 1640708 - DNA, 25 bp, Homo sapien
cacaagacagagctcgtaggtcggg

SEQ ID NO: 1640709 - DNA, 25 bp, Homo sapien
cagcgagtgtagagagaagttctga

SEQ ID NO: 1640710 - DNA, 25 bp, Homo sapien
tgatatcgatgtccacaggcggcac

SEQ ID NO: 1640711 - DNA, 25 bp, Homo sapien
gagaaagagttccatgcggtccatg

SEQ ID NO: 1640712 - DNA, 25 bp, Homo sapien
gcacaggggagggcagaaggaaggg

SEQ ID NO: 1640713 - DNA, 25 bp, Homo sapien
caggggagggcagaaggaagggtcg

SEQ ID NO: 1640714 - DNA, 25 bp, Homo sapien
gggagggcagaaggaagggtcgcac

SEQ ID NO: 1640715 - DNA, 25 bp, Homo sapien
ggaggcacaggggagggcagaagga

SEQ ID NO: 1640716 - DNA, 25 bp, Homo sapien
ggaggaagtcagaccagagaaacct

SEQ ID NO: 1640717 - DNA, 25 bp, Homo sapien
cctggaggaagtcagaccagagaaa

SEQ ID NO: 1640718 - DNA, 25 bp, Homo sapien
tggatttagcacatgcctggaggaa

SEQ ID NO: 1640719 - DNA, 25 bp, Homo sapien
gggtggatttagcacatgcctggag

SEQ ID NO: 1640720 - DNA, 25 bp, Homo sapien
ttcattcttcttgaagcggccctgc

SEQ ID NO: 1640721 - DNA, 25 bp, Homo sapien
attcttcttgaagcggccctgctca

SEQ ID NO: 1640722 - DNA, 25 bp, Homo sapien
aaggcatctgggtagcggaagtatt

SEQ ID NO: 1640723 - DNA, 25 bp, Homo sapien
aaagtgctggggatagaaggcatct

SEQ ID NO: 1640724 - DNA, 25 bp, Homo sapien
tctctgtatttcgtggatgacggca

SEQ ID NO: 1640725 - DNA, 25 bp, Homo sapien
ctgtatttcgtggatgacggcatct

SEQ ID NO: 1640726 - DNA, 25 bp, Homo sapien
tctgtatttcgtggatgacggcatc

SEQ ID NO: 1640727 - DNA, 25 bp, Homo sapien
agtctctgtatttcgtggatgacgg

SEQ ID NO: 1640728 - DNA, 25 bp, Homo sapien
gtgtttttgctagggaagccaggac

SEQ ID NO: 1640729 - DNA, 25 bp, Homo sapien
tttgctagggaagccaggacaaatc

SEQ ID NO: 1640730 - DNA, 25 bp, Homo sapien
gaggtgtttttgctagggaagccag

SEQ ID NO: 1640731 - DNA, 25 bp, Homo sapien
tggaaggggccagaaaatatagctg

SEQ ID NO: 1640732 - DNA, 25 bp, Homo sapien
agataggcagctcagggtggactca

SEQ ID NO: 1640733 - DNA, 25 bp, Homo sapien
gataggcagctcagggtggactcac

SEQ ID NO: 1640734 - DNA, 25 bp, Homo sapien
cagataggcagctcagggtggactc

SEQ ID NO: 1640735 - DNA, 25 bp, Homo sapien
ttgaggttgaattctgtacgaggat

SEQ ID NO: 1640736 - DNA, 25 bp, Homo sapien
taacagcaagaatccatagcgcagt

SEQ ID NO: 1640737 - DNA, 25 bp, Homo sapien
agtgtagagctcaccgtctccgtgc

SEQ ID NO: 1640738 - DNA, 25 bp, Homo sapien
tcagagtggtgaggaccaagttctt

SEQ ID NO: 1640739 - DNA, 25 bp, Homo sapien
tagaggttgagaagtgagagggaag

SEQ ID NO: 1640740 - DNA, 25 bp, Homo sapien
tgagaagtgagagggaaggaccagg

SEQ ID NO: 1640741 - DNA, 25 bp, Homo sapien
gttgagaagtgagagggaaggacca

SEQ ID NO: 1640742 - DNA, 25 bp, Homo sapien
aggttgagaagtgagagggaaggac

SEQ ID NO: 1640743 - DNA, 25 bp, Homo sapien
cttcgttgatcttgaccctggaggc

SEQ ID NO: 1640744 - DNA, 25 bp, Homo sapien
gggtcaaaggatgcttcgttgatct

SEQ ID NO: 1640745 - DNA, 25 bp, Homo sapien
caaaggatgcttcgttgatcttgac

SEQ ID NO: 1640746 - DNA, 25 bp, Homo sapien
gatgcttcgttgatcttgaccctgg

SEQ ID NO: 1640747 - DNA, 25 bp, Homo sapien
gtgtcttcctggcaaatactgcatg

SEQ ID NO: 1640748 - DNA, 25 bp, Homo sapien
caagtagtagatgagattgtgtctt

SEQ ID NO: 1640749 - DNA, 25 bp, Homo sapien
gcatgattccagagtacatgtcata

SEQ ID NO: 1640750 - DNA, 25 bp, Homo sapien
attgtgtcttcctggcaaatactgc

SEQ ID NO: 1640751 - DNA, 25 bp, Homo sapien
gaactgcttgtcctcatagtcgaag

SEQ ID NO: 1640752 - DNA, 25 bp, Homo sapien
tcaaccgcagcagattcaggaactg

SEQ ID NO: 1640753 - DNA, 25 bp, Homo sapien
tgaaactctcattgatcaaccgcag

SEQ ID NO: 1640754 - DNA, 25 bp, Homo sapien
ttctgaagacaacggaactgatgac

SEQ ID NO: 1640755 - DNA, 25 bp, Homo sapien
cggaactcctccagtaggtagctgg

SEQ ID NO: 1640756 - DNA, 25 bp, Homo sapien
cttccggaactcctccagtaggtag

SEQ ID NO: 1640757 - DNA, 25 bp, Homo sapien
gctcctcaatgctccgctttcccat

SEQ ID NO: 1640758 - DNA, 25 bp, Homo sapien
gcctcctcctgaattcgctcctcaa

SEQ ID NO: 1640759 - DNA, 25 bp, Homo sapien
gaatcctccatcgttctccattggc

SEQ ID NO: 1640760 - DNA, 25 bp, Homo sapien
cctccatcgttctccattggccaga

SEQ ID NO: 1640761 - DNA, 25 bp, Homo sapien
cccgaagtcccgaaggatggtcagg

SEQ ID NO: 1640762 - DNA, 25 bp, Homo sapien
gagaatcctccatcgttctccattg

SEQ ID NO: 1640763 - DNA, 25 bp, Homo sapien
tgaccttggaagttttgctttattg

SEQ ID NO: 1640764 - DNA, 25 bp, Homo sapien
catgaccttggaagttttgctttat

SEQ ID NO: 1640765 - DNA, 25 bp, Homo sapien
tccacggccactgaactcatccgct

SEQ ID NO: 1640766 - DNA, 25 bp, Homo sapien
ccactgaactcatccgcttggtcta

SEQ ID NO: 1640767 - DNA, 25 bp, Homo sapien
gggctgattggagtaccaagcatag

SEQ ID NO: 1640768 - DNA, 25 bp, Homo sapien
cataggccaattgaggattttagag

SEQ ID NO: 1640769 - DNA, 25 bp, Homo sapien
gattttagaggatggcgatttcaga

SEQ ID NO: 1640770 - DNA, 25 bp, Homo sapien
aaacacagtaggaggggctgattgg

SEQ ID NO: 1640771 - DNA, 25 bp, Homo sapien
gaaagactgaaacgtagcgtcagtt

SEQ ID NO: 1640772 - DNA, 25 bp, Homo sapien
gaaacgtagcgtcagttcgaacttg

SEQ ID NO: 1640773 - DNA, 25 bp, Homo sapien
tcagttcgaacttgcagcaggttcc

SEQ ID NO: 1640774 - DNA, 25 bp, Homo sapien
caggaaaggaattggtgtaggacct

SEQ ID NO: 1640775 - DNA, 25 bp, Homo sapien
aaagatggtgacagcccctcccatc

SEQ ID NO: 1640776 - DNA, 25 bp, Homo sapien
tgagcaggcaagacaagcagagtgc

SEQ ID NO: 1640777 - DNA, 25 bp, Homo sapien
ccaggcaatgaggatgagcaggcaa

SEQ ID NO: 1640778 - DNA, 25 bp, Homo sapien
caagcagagtgccagaaagatggtg

SEQ ID NO: 1640779 - DNA, 25 bp, Homo sapien
ttaaccatcttgtggtggtggcatg

SEQ ID NO: 1640780 - DNA, 25 bp, Homo sapien
ctgtgtacgtgtgctgaattttgtc

SEQ ID NO: 1640781 - DNA, 25 bp, Homo sapien
tgtacgtgtgctgaattttgtcctt

SEQ ID NO: 1640782 - DNA, 25 bp, Homo sapien
taggcattgtccttaagaagtttcc

SEQ ID NO: 1640783 - DNA, 25 bp, Homo sapien
tttgtccttaggcattgtccttaag

SEQ ID NO: 1640784 - DNA, 25 bp, Homo sapien
gtggaaggtccaaacatcagagcct

SEQ ID NO: 1640785 - DNA, 25 bp, Homo sapien
aacatcagagcctgtcctgtgccca

SEQ ID NO: 1640786 - DNA, 25 bp, Homo sapien
agaggtgcaacagtggaaggtccaa

SEQ ID NO: 1640787 - DNA, 25 bp, Homo sapien
ccacagttggtgacccagaggagag

SEQ ID NO: 1640788 - DNA, 25 bp, Homo sapien
tatatgcggtgacatgctactctgc

SEQ ID NO: 1640789 - DNA, 25 bp, Homo sapien
tatacactcatcatagaacccagca

SEQ ID NO: 1640790 - DNA, 25 bp, Homo sapien
tagccagaccttgggaacaatccac

SEQ ID NO: 1640791 - DNA, 25 bp, Homo sapien
gaagcaggcttggtatatggaagaa

SEQ ID NO: 1640792 - DNA, 25 bp, Homo sapien
atccctctggcagtcacgctgtctt

SEQ ID NO: 1640793 - DNA, 25 bp, Homo sapien
agtcacgctgtcttccctgcatgct

SEQ ID NO: 1640794 - DNA, 25 bp, Homo sapien
acagtctgccctcatccctctggca

SEQ ID NO: 1640795 - DNA, 25 bp, Homo sapien
tggcagtcacgctgtcttccctgca

SEQ ID NO: 1640796 - DNA, 25 bp, Homo sapien
ggagatccagcgcttcatcagcgtg

SEQ ID NO: 1640797 - DNA, 25 bp, Homo sapien
catcagcgtggtgccgcgcaccctc

SEQ ID NO: 1640798 - DNA, 25 bp, Homo sapien
gatccagcgcttcatcagcgtggtg

SEQ ID NO: 1640799 - DNA, 25 bp, Homo sapien
agcgcttcatcagcgtggtgccgcg

SEQ ID NO: 1640800 - DNA, 25 bp, Homo sapien
ccgacttcgggctgttgtaagattt

SEQ ID NO: 1640801 - DNA, 25 bp, Homo sapien
ttacttatgtaactgaattcctatg

SEQ ID NO: 1640802 - DNA, 25 bp, Homo sapien
gagatcataaaggtgccgacttcgg

SEQ ID NO: 1640803 - DNA, 25 bp, Homo sapien
ctgttgtaagatttcggtgccacac

SEQ ID NO: 1640804 - DNA, 25 bp, Homo sapien
tgtctccactaacctgccgatccac

SEQ ID NO: 1640805 - DNA, 25 bp, Homo sapien
ctgtctccactaacctgccgatcca

SEQ ID NO: 1640806 - DNA, 25 bp, Homo sapien
tctccactaacctgccgatccacat

SEQ ID NO: 1640807 - DNA, 25 bp, Homo sapien
ccctgtctccactaacctgccgatc

SEQ ID NO: 1640808 - DNA, 25 bp, Homo sapien
aagacatcatgcccggtcgggcaca

SEQ ID NO: 1640809 - DNA, 25 bp, Homo sapien
taagacatcatgcccggtcgggcac

SEQ ID NO: 1640810 - DNA, 25 bp, Homo sapien
gacatcatgcccggtcgggcacagt

SEQ ID NO: 1640811 - DNA, 25 bp, Homo sapien
catcatgcccggtcgggcacagtgg

SEQ ID NO: 1640812 - DNA, 25 bp, Homo sapien
cattctggtcttcagataaggcgtc

SEQ ID NO: 1640813 - DNA, 25 bp, Homo sapien
ttggatgtcctaggcatcagacacc

SEQ ID NO: 1640814 - DNA, 25 bp, Homo sapien
taaggcgtcagaggcacgcaacgta

SEQ ID NO: 1640815 - DNA, 25 bp, Homo sapien
ccatagaatgagatgaggatgagct

SEQ ID NO: 1640816 - DNA, 25 bp, Homo sapien
cctggccacggctccaggtcacggc

SEQ ID NO: 1640817 - DNA, 25 bp, Homo sapien
atgctctaccacctgaactatcctg

SEQ ID NO: 1640818 - DNA, 25 bp, Homo sapien
tgctctaccacctgaactatcctgg

SEQ ID NO: 1640819 - DNA, 25 bp, Homo sapien
gcccaaacagagacttgaaccctga

SEQ ID NO: 1640820 - DNA, 25 bp, Homo sapien
caaacagagacttgaaccctgaacc

SEQ ID NO: 1640821 - DNA, 25 bp, Homo sapien
gtactctacacccttatacttttga

SEQ ID NO: 1640822 - DNA, 25 bp, Homo sapien
tctccattagaaggctggaaagcca

SEQ ID NO: 1640823 - DNA, 25 bp, Homo sapien
tacacccttatacttttgaaatcat

SEQ ID NO: 1640824 - DNA, 25 bp, Homo sapien
aatcttagaactatagactctccat

SEQ ID NO: 1640825 - DNA, 25 bp, Homo sapien
cagggtgattttggttcaggatctc

SEQ ID NO: 1640826 - DNA, 25 bp, Homo sapien
tgaaagttggatactgggaacagct

SEQ ID NO: 1640827 - DNA, 25 bp, Homo sapien
tctgccaaatcagaagcaagtcact

SEQ ID NO: 1640828 - DNA, 25 bp, Homo sapien
ttcaaggtggcttactcacatggct

SEQ ID NO: 1640829 - DNA, 25 bp, Homo sapien
tctagattctctggctgtaaggctc

SEQ ID NO: 1640830 - DNA, 25 bp, Homo sapien
tagacatggaggttctaaggcctag

SEQ ID NO: 1640831 - DNA, 25 bp, Homo sapien
taagggtcgaaagctctagaatctg

SEQ ID NO: 1640832 - DNA, 25 bp, Homo sapien
taaggtccggtgttctaagatgtga

SEQ ID NO: 1640833 - DNA, 25 bp, Homo sapien
tttgtttcctaccttggctagttca

SEQ ID NO: 1640834 - DNA, 25 bp, Homo sapien
ttgtttcctaccttggctagttcac

SEQ ID NO: 1640835 - DNA, 25 bp, Homo sapien
ggtcagaccttgtcatacatgatga

SEQ ID NO: 1640836 - DNA, 25 bp, Homo sapien
cctgagagactggagcttgaatgcc

SEQ ID NO: 1640837 - DNA, 25 bp, Homo sapien
cctggactgggatcatgatctaggc

SEQ ID NO: 1640838 - DNA, 25 bp, Homo sapien
gatgacatggtactacacacagctg

SEQ ID NO: 1640839 - DNA, 25 bp, Homo sapien
ccagaggaacgtcaatgcagggtcc

SEQ ID NO: 1640840 - DNA, 25 bp, Homo sapien
gaacaataaagcgaaccgacgagga

SEQ ID NO: 1640841 - DNA, 25 bp, Homo sapien
gaaggatgtcccagatcatgcggtc

SEQ ID NO: 1640842 - DNA, 25 bp, Homo sapien
cactgacgaggacctaaaagaccga

SEQ ID NO: 1640843 - DNA, 25 bp, Homo sapien
tggggttttgccatgttggccaggc

SEQ ID NO: 1640844 - DNA, 25 bp, Homo sapien
atggggttttgccatgttggccagg

SEQ ID NO: 1640845 - DNA, 25 bp, Homo sapien
cctgagttcacccagttctcctgcc

SEQ ID NO: 1640846 - DNA, 25 bp, Homo sapien
cgcctcctgagttcacccagttctc

SEQ ID NO: 1640847 - DNA, 25 bp, Homo sapien
ttccttcctcctagccaacttcacg

SEQ ID NO: 1640848 - DNA, 25 bp, Homo sapien
caacttcacgttgccagatgttggg

SEQ ID NO: 1640849 - DNA, 25 bp, Homo sapien
tcctagccaacttcacgttgccaga

SEQ ID NO: 1640850 - DNA, 25 bp, Homo sapien
cagatgttggggacttcctggatga

SEQ ID NO: 1640851 - DNA, 25 bp, Homo sapien
tccagcgctatgaaaaccgaggacc

SEQ ID NO: 1640852 - DNA, 25 bp, Homo sapien
ccctggaggcaaccgtggcggcttc

SEQ ID NO: 1640853 - DNA, 25 bp, Homo sapien
aaaagcgctttgacaaccgaggtgg

SEQ ID NO: 1640854 - DNA, 25 bp, Homo sapien
gtggtggcttccagcgctatgaaaa

SEQ ID NO: 1640855 - DNA, 25 bp, Homo sapien
gcctggccccgattttggtgctaaa

SEQ ID NO: 1640856 - DNA, 25 bp, Homo sapien
taaatgacatggcacctcctagcag

SEQ ID NO: 1640857 - DNA, 25 bp, Homo sapien
taactgagggattcatgtgcctggc

SEQ ID NO: 1640858 - DNA, 25 bp, Homo sapien
cccaggtgccagacccaaaagcttt

SEQ ID NO: 1640859 - DNA, 25 bp, Homo sapien
gagcacgaaccctcagcgtatgacg

SEQ ID NO: 1640860 - DNA, 25 bp, Homo sapien
gacccggaacattctcaggcgaaag

SEQ ID NO: 1640861 - DNA, 25 bp, Homo sapien
aatgcaacgtctgccttaggcccgg

SEQ ID NO: 1640862 - DNA, 25 bp, Homo sapien
caaaattaagcacgctgggagctgg

SEQ ID NO: 1640863 - DNA, 25 bp, Homo sapien
ggcaaaggaatagtgcagacaggca

SEQ ID NO: 1640864 - DNA, 25 bp, Homo sapien
cctgtgccttgatgccgggcaaagg

SEQ ID NO: 1640865 - DNA, 25 bp, Homo sapien
taaaatgggtgttatcagagtccct

SEQ ID NO: 1640866 - DNA, 25 bp, Homo sapien
catctcagagtgttgctatggtgac

SEQ ID NO: 1640867 - DNA, 25 bp, Homo sapien
tctccatctttaatggggccccagg

SEQ ID NO: 1640868 - DNA, 25 bp, Homo sapien
tccttaaatacagcccccatgggca

SEQ ID NO: 1640869 - DNA, 25 bp, Homo sapien
tggggcacgggtgtccttaaataca

SEQ ID NO: 1640870 - DNA, 25 bp, Homo sapien
gcacgggtgtccttaaatacagccc

SEQ ID NO: 1640871 - DNA, 25 bp, Homo sapien
gcgcccgggttatgctggttgtaca

SEQ ID NO: 1640872 - DNA, 25 bp, Homo sapien
cacgatcatgttggacagctgctcc

SEQ ID NO: 1640873 - DNA, 25 bp, Homo sapien
gcttgcggcccacgtagtacacgat

SEQ ID NO: 1640874 - DNA, 25 bp, Homo sapien
tcagctgcacttgcaggagcgcacg

SEQ ID NO: 1640875 - DNA, 25 bp, Homo sapien
tctcgtagcccggtgggccagacgt

SEQ ID NO: 1640876 - DNA, 25 bp, Homo sapien
gcgcatctcgtagcccggtgggcca

SEQ ID NO: 1640877 - DNA, 25 bp, Homo sapien
ccaagcgcatctcgtagcccggtgg

SEQ ID NO: 1640878 - DNA, 25 bp, Homo sapien
tcgtagcccggtgggccagacgtac

SEQ ID NO: 1640879 - DNA, 25 bp, Homo sapien
tagcccttgggctcgtggatccact

SEQ ID NO: 1640880 - DNA, 25 bp, Homo sapien
ggatccacttccagccgaggtcctt

SEQ ID NO: 1640881 - DNA, 25 bp, Homo sapien
aagtcaatgtacagctgccgcacgc

SEQ ID NO: 1640882 - DNA, 25 bp, Homo sapien
cagccgaggtccttgcggaagtcaa

SEQ ID NO: 1640883 - DNA, 25 bp, Homo sapien
tcgagctgccttaagaacaaatttt

SEQ ID NO: 1640884 - DNA, 25 bp, Homo sapien
gttcgagctgccttaagaacaaatt

SEQ ID NO: 1640885 - DNA, 25 bp, Homo sapien
aaggaggtagtgttcgagctgcctt

SEQ ID NO: 1640886 - DNA, 25 bp, Homo sapien
gaaggaggtagtgttcgagctgcct

SEQ ID NO: 1640887 - DNA, 25 bp, Homo sapien
atctcgggtcactgcaacctgtgcc

SEQ ID NO: 1640888 - DNA, 25 bp, Homo sapien
acccaggatgcagtgaagtggtgca

SEQ ID NO: 1640889 - DNA, 25 bp, Homo sapien
cctgccaccataccctgctaatttt

SEQ ID NO: 1640890 - DNA, 25 bp, Homo sapien
tgcctcccaggttcaagtgattctc

SEQ ID NO: 1640891 - DNA, 25 bp, Homo sapien
attctcctgccccagcctgggtacc

SEQ ID NO: 1640892 - DNA, 25 bp, Homo sapien
agtgattctcctgccccagcctggg

SEQ ID NO: 1640893 - DNA, 25 bp, Homo sapien
ctccacccccgaggttccagtgatt

SEQ ID NO: 1640894 - DNA, 25 bp, Homo sapien
tgattctcctgccccagcctgggta

SEQ ID NO: 1640895 - DNA, 25 bp, Homo sapien
ctgaagcaatagttggtgtccaggg

SEQ ID NO: 1640896 - DNA, 25 bp, Homo sapien
ggttcatgccatgaatggtggccag

SEQ ID NO: 1640897 - DNA, 25 bp, Homo sapien
caatagttggtgtccagggctcggc

SEQ ID NO: 1640898 - DNA, 25 bp, Homo sapien
tcacctcggcggccggtagtgaacc

SEQ ID NO: 1640899 - DNA, 25 bp, Homo sapien
cacacactctcagagggatagataa

SEQ ID NO: 1640900 - DNA, 25 bp, Homo sapien
actctcagagggatagataagtggg

SEQ ID NO: 1640901 - DNA, 25 bp, Homo sapien
agtcaggggataggggacatacaca

SEQ ID NO: 1640902 - DNA, 25 bp, Homo sapien
gcacacacgtcacaactgggcatgg

SEQ ID NO: 1640903 - DNA, 25 bp, Homo sapien
ccacttgcagtgtgttatccctgct

SEQ ID NO: 1640904 - DNA, 25 bp, Homo sapien
gcagtgtgttatccctgctgtcaca

SEQ ID NO: 1640905 - DNA, 25 bp, Homo sapien
gcgctaaggcgaaagccctcaattt

SEQ ID NO: 1640906 - DNA, 25 bp, Homo sapien
cagtgggcgctaaggcgaaagccct

SEQ ID NO: 1640907 - DNA, 25 bp, Homo sapien
tgccgcacaactccggtgacatcaa

SEQ ID NO: 1640908 - DNA, 25 bp, Homo sapien
cactctggcgagtcgctgggtgcca

SEQ ID NO: 1640909 - DNA, 25 bp, Homo sapien
tcaaaagataaccactctggcgagt

SEQ ID NO: 1640910 - DNA, 25 bp, Homo sapien
cagccggttgctgaggtatcgccag

SEQ ID NO: 1640911 - DNA, 25 bp, Homo sapien
ttcaggtaccgcttctcggagctct

SEQ ID NO: 1640912 - DNA, 25 bp, Homo sapien
cgtgctgctccacttttaacttgag

SEQ ID NO: 1640913 - DNA, 25 bp, Homo sapien
tttaacttgagcctcagcagacgca

SEQ ID NO: 1640914 - DNA, 25 bp, Homo sapien
tgcccgggagagcaacacgggttca

SEQ ID NO: 1640915 - DNA, 25 bp, Homo sapien
tactctgcttgaacttgtcatagat

SEQ ID NO: 1640916 - DNA, 25 bp, Homo sapien
atatgctgtgtgtactctgcttgaa

SEQ ID NO: 1640917 - DNA, 25 bp, Homo sapien
atatatgctgtgtgtactctgcttg

SEQ ID NO: 1640918 - DNA, 25 bp, Homo sapien
ctctgcttgaacttgtcatagattt

SEQ ID NO: 1640919 - DNA, 25 bp, Homo sapien
agctccatgtcgatagtcttgcagg

SEQ ID NO: 1640920 - DNA, 25 bp, Homo sapien
tccttggcgtagtagtcggcctcag

SEQ ID NO: 1640921 - DNA, 25 bp, Homo sapien
tgtgggtttccaccattagcacgcg

SEQ ID NO: 1640922 - DNA, 25 bp, Homo sapien
cgcagcttggacaggatctggccgc

SEQ ID NO: 1640923 - DNA, 25 bp, Homo sapien
cacggaaataacctagatgggcgcg

SEQ ID NO: 1640924 - DNA, 25 bp, Homo sapien
ggtgtctcagtatcccacggaaata

SEQ ID NO: 1640925 - DNA, 25 bp, Homo sapien
tcccagcggcaacggaaaagtctca

SEQ ID NO: 1640926 - DNA, 25 bp, Homo sapien
gcaggtcggagagagatccgtctcc

SEQ ID NO: 1640927 - DNA, 25 bp, Homo sapien
ctgtcactcaacaccctgcgacccc

SEQ ID NO: 1640928 - DNA, 25 bp, Homo sapien
ctcccatgtggctaagcagcctcct

SEQ ID NO: 1640929 - DNA, 25 bp, Homo sapien
ccccatcactgggtgtccggggtgt

SEQ ID NO: 1640930 - DNA, 25 bp, Homo sapien
agaaaggacagaagcggtgccatgc

SEQ ID NO: 1640931 - DNA, 25 bp, Homo sapien
tcgaagttgcggagcagcaggccga

SEQ ID NO: 1640932 - DNA, 25 bp, Homo sapien
ctccacgccgtagcggtcgaagttg

SEQ ID NO: 1640933 - DNA, 25 bp, Homo sapien
tagcggtcgaagttgcggagcagca

SEQ ID NO: 1640934 - DNA, 25 bp, Homo sapien
gcactccacgccgtagcggtcgaag

SEQ ID NO: 1640935 - DNA, 25 bp, Homo sapien
ggcgatagcggtcggccccactgta

SEQ ID NO: 1640936 - DNA, 25 bp, Homo sapien
gggcacatggcaaaatccatagcct

SEQ ID NO: 1640937 - DNA, 25 bp, Homo sapien
ctgcaagctggcagcggccaaagct

SEQ ID NO: 1640938 - DNA, 25 bp, Homo sapien
cgtgccaactgttctcgccaactgc

SEQ ID NO: 1640939 - DNA, 25 bp, Homo sapien
cctcccgcacgcctgacaggagctt

SEQ ID NO: 1640940 - DNA, 25 bp, Homo sapien
gggtgtccacttgcgtttggccctc

SEQ ID NO: 1640941 - DNA, 25 bp, Homo sapien
agtaagccatgtcccctatctgcgg

SEQ ID NO: 1640942 - DNA, 25 bp, Homo sapien
tgaagacctttggtggcgaagtgca

SEQ ID NO: 1640943 - DNA, 25 bp, Homo sapien
ataacaatttcgatcctactgaggg

SEQ ID NO: 1640944 - DNA, 25 bp, Homo sapien
actgagtggtaggatacagtggctc

SEQ ID NO: 1640945 - DNA, 25 bp, Homo sapien
ggtaccctccaggagcgcatcctga

SEQ ID NO: 1640946 - DNA, 25 bp, Homo sapien
tgatagctaaaatgcactgagtggt

SEQ ID NO: 1640947 - DNA, 25 bp, Homo sapien
agtattcttggctggatcaacatcc

SEQ ID NO: 1640948 - DNA, 25 bp, Homo sapien
tagcagaccaaggtcccatcatggg

SEQ ID NO: 1640949 - DNA, 25 bp, Homo sapien
tgacatagcagtgactatagcagac

SEQ ID NO: 1640950 - DNA, 25 bp, Homo sapien
gttttccatgctggtgacatagcag

SEQ ID NO: 1640951 - DNA, 25 bp, Homo sapien
agtgggtggcctgtttgagcgcagg

SEQ ID NO: 1640952 - DNA, 25 bp, Homo sapien
tgaagtgggtggcctgtttgagcgc

SEQ ID NO: 1640953 - DNA, 25 bp, Homo sapien
gaagtgggtggcctgtttgagcgca

SEQ ID NO: 1640954 - DNA, 25 bp, Homo sapien
gctgaagtgggtggcctgtttgagc

SEQ ID NO: 1640955 - DNA, 25 bp, Homo sapien
acttgcagaagaggctactttccga

SEQ ID NO: 1640956 - DNA, 25 bp, Homo sapien
tatgatctgcccgatcacgtgcacc

SEQ ID NO: 1640957 - DNA, 25 bp, Homo sapien
agaggctactttccgagaaaccgct

SEQ ID NO: 1640958 - DNA, 25 bp, Homo sapien
ccgagaaaccgctggcccctatgat

SEQ ID NO: 1640959 - DNA, 25 bp, Homo sapien
cttagcgcacttaacggttaggaga

SEQ ID NO: 1640960 - DNA, 25 bp, Homo sapien
ccgcctggctgcgagatatgtaagc

SEQ ID NO: 1640961 - DNA, 25 bp, Homo sapien
tgcttcttttctccgcgggcgccga

SEQ ID NO: 1640962 - DNA, 25 bp, Homo sapien
tatgtaagccgcgatacttccgcga

SEQ ID NO: 1640963 - DNA, 25 bp, Homo sapien
tagtggtggcaccagccttgcattc

SEQ ID NO: 1640964 - DNA, 25 bp, Homo sapien
tgtgggtgaggtagacagctctaac

SEQ ID NO: 1640965 - DNA, 25 bp, Homo sapien
ggaaatcttactgcctctacttttg

SEQ ID NO: 1640966 - DNA, 25 bp, Homo sapien
cagctctaacctttcagctcttggg

SEQ ID NO: 1640967 - DNA, 25 bp, Homo sapien
tgcctctacagaccaacaaggcttg

SEQ ID NO: 1640968 - DNA, 25 bp, Homo sapien
taggtgctacgtatctgcttttgga

SEQ ID NO: 1640969 - DNA, 25 bp, Homo sapien
gcgtgtgcacgtatgcggctgccct

SEQ ID NO: 1640970 - DNA, 25 bp, Homo sapien
caggagcatctagaaacgggagcga

SEQ ID NO: 1640971 - DNA, 25 bp, Homo sapien
tcatccattccataaatgtgagctc

SEQ ID NO: 1640972 - DNA, 25 bp, Homo sapien
ggtggaggcaatgggagcggcccct

SEQ ID NO: 1640973 - DNA, 25 bp, Homo sapien
gaggcaatgggagcggccccttgcc

SEQ ID NO: 1640974 - DNA, 25 bp, Homo sapien
cattccataaatgtgagctcctttg

SEQ ID NO: 1640975 - DNA, 25 bp, Homo sapien
agaaacggaagacgtgttgcgaagc

SEQ ID NO: 1640976 - DNA, 25 bp, Homo sapien
cagctcttggagtaacgcctctgca

SEQ ID NO: 1640977 - DNA, 25 bp, Homo sapien
aacgcctctgcagcgattcccggta

SEQ ID NO: 1640978 - DNA, 25 bp, Homo sapien
cagcgattcccggtagaaacggaag

SEQ ID NO: 1640979 - DNA, 25 bp, Homo sapien
ggacatcagcagcttccgttccacg

SEQ ID NO: 1640980 - DNA, 25 bp, Homo sapien
ctcagtgtctgagtagagccccttg

SEQ ID NO: 1640981 - DNA, 25 bp, Homo sapien
tggacatcagcagcttccgttccac

SEQ ID NO: 1640982 - DNA, 25 bp, Homo sapien
tgtctgagtagagccccttggtgct

SEQ ID NO: 1640983 - DNA, 25 bp, Homo sapien
cctaattaagcaagtctgagctggg

SEQ ID NO: 1640984 - DNA, 25 bp, Homo sapien
gctgggtttccagcacttgctgcta

SEQ ID NO: 1640985 - DNA, 25 bp, Homo sapien
gagccgactgtctgtagagaagcga

SEQ ID NO: 1640986 - DNA, 25 bp, Homo sapien
tgaaccatgatgattagagcagccc

SEQ ID NO: 1640987 - DNA, 25 bp, Homo sapien
gcaggcgaccccacagaagagagcc

SEQ ID NO: 1640988 - DNA, 25 bp, Homo sapien
gatgtaggatccagcacgagggtcc

SEQ ID NO: 1640989 - DNA, 25 bp, Homo sapien
tttcttgcttggatgtaggatccag

SEQ ID NO: 1640990 - DNA, 25 bp, Homo sapien
aagagagcccgcatgggcacacctg

SEQ ID NO: 1640991 - DNA, 25 bp, Homo sapien
ggcggcattcagacaacaggccagg

SEQ ID NO: 1640992 - DNA, 25 bp, Homo sapien
cggcattcagacaacaggccaggag

SEQ ID NO: 1640993 - DNA, 25 bp, Homo sapien
gcaggcggcattcagacaacaggcc

SEQ ID NO: 1640994 - DNA, 25 bp, Homo sapien
caggcggcattcagacaacaggcca

SEQ ID NO: 1640995 - DNA, 25 bp, Homo sapien
aggaggaggcctggcagaaaggata

SEQ ID NO: 1640996 - DNA, 25 bp, Homo sapien
ctggaggaggaggcctggcagaaag

SEQ ID NO: 1640997 - DNA, 25 bp, Homo sapien
gaggaggaggcctggcagaaaggat

SEQ ID NO: 1640998 - DNA, 25 bp, Homo sapien
ggaggaggaggcctggcagaaagga

SEQ ID NO: 1640999 - DNA, 25 bp, Homo sapien
tgcgggggtgcaacgtgcccagcac

SEQ ID NO: 1641000 - DNA, 25 bp, Homo sapien
tcgcacgtgttcctgatcagccgct

SEQ ID NO: 1641001 - DNA, 25 bp, Homo sapien
agccgctcccggctcttctctgcaa

SEQ ID NO: 1641002 - DNA, 25 bp, Homo sapien
accgcctcgcacgtgttcctgatca

SEQ ID NO: 1641003 - DNA, 25 bp, Homo sapien
aaggcaaggcctgactgccatccac

SEQ ID NO: 1641004 - DNA, 25 bp, Homo sapien
gaaggcaaggcctgactgccatcca

SEQ ID NO: 1641005 - DNA, 25 bp, Homo sapien
ctgcagggatgatggaagattccag

SEQ ID NO: 1641006 - DNA, 25 bp, Homo sapien
tggaagattccagtgggaagaaggc

SEQ ID NO: 1641007 - DNA, 25 bp, Homo sapien
gccttgttgaaaatctctttgctga

SEQ ID NO: 1641008 - DNA, 25 bp, Homo sapien
tctttgctgaccttcacctcggccg

SEQ ID NO: 1641009 - DNA, 25 bp, Homo sapien
cacttcgagtgtggccttgttgaaa

SEQ ID NO: 1641010 - DNA, 25 bp, Homo sapien
aggcagcccaatcttcggcctcagg

SEQ ID NO: 1641011 - DNA, 25 bp, Homo sapien
gcaggttctgttcgcaggcaaagtg

SEQ ID NO: 1641012 - DNA, 25 bp, Homo sapien
atctggccgcgacagcaggttctgt

SEQ ID NO: 1641013 - DNA, 25 bp, Homo sapien
cagagccatctggccgcgacagcag

SEQ ID NO: 1641014 - DNA, 25 bp, Homo sapien
ggttctgttcgcaggcaaagtgccg

SEQ ID NO: 1641015 - DNA, 25 bp, Homo sapien
cagcacggattttggcgtcagtatg

SEQ ID NO: 1641016 - DNA, 25 bp, Homo sapien
tggcgtcagtatgcgtctcctcctc

SEQ ID NO: 1641017 - DNA, 25 bp, Homo sapien
ggaccctgttccattttcagcacgg

SEQ ID NO: 1641018 - DNA, 25 bp, Homo sapien
tccattttcagcacggattttggcg

SEQ ID NO: 1641019 - DNA, 25 bp, Homo sapien
tgcagttgtcacttccgcctggcag

SEQ ID NO: 1641020 - DNA, 25 bp, Homo sapien
agcgcgcgccgcaaacaggctgcgt

SEQ ID NO: 1641021 - DNA, 25 bp, Homo sapien
ccacgtgcggctgcagttgtcactt

SEQ ID NO: 1641022 - DNA, 25 bp, Homo sapien
aggctgcgtaaccagtgcgcacgcg

SEQ ID NO: 1641023 - DNA, 25 bp, Homo sapien
agcgtttaccaacaatctggctccg

SEQ ID NO: 1641024 - DNA, 25 bp, Homo sapien
cctgggcgtccgcacgtggcttagc

SEQ ID NO: 1641025 - DNA, 25 bp, Homo sapien
gcacgtggcttagcgtttaccaaca

SEQ ID NO: 1641026 - DNA, 25 bp, Homo sapien
ggcttagcgtttaccaacaatctgg

SEQ ID NO: 1641027 - DNA, 25 bp, Homo sapien
catgacaacccctgagataagtact

SEQ ID NO: 1641028 - DNA, 25 bp, Homo sapien
tcagtgtttgtcattcatccctccc

SEQ ID NO: 1641029 - DNA, 25 bp, Homo sapien
cacaggtcaactcggttaatcctca

SEQ ID NO: 1641030 - DNA, 25 bp, Homo sapien
tctctagccttcagttcagggcatg

SEQ ID NO: 1641031 - DNA, 25 bp, Homo sapien
gaataaactgcatctctgcgcctgg

SEQ ID NO: 1641032 - DNA, 25 bp, Homo sapien
tgtcgaggtgggaacacaaaggctt

SEQ ID NO: 1641033 - DNA, 25 bp, Homo sapien
tcagacgtgtatcaggagatgcccg

SEQ ID NO: 1641034 - DNA, 25 bp, Homo sapien
ctctaaaatactcagcggccagggc

SEQ ID NO: 1641035 - DNA, 25 bp, Homo sapien
cagagtggggagtgcatgtttttca

SEQ ID NO: 1641036 - DNA, 25 bp, Homo sapien
ctcccatcaagacctggaaggaggg

SEQ ID NO: 1641037 - DNA, 25 bp, Homo sapien
gtggcttaagttgtccagcttctgg

SEQ ID NO: 1641038 - DNA, 25 bp, Homo sapien
aggccaaggagtggcttaagttgtc

SEQ ID NO: 1641039 - DNA, 25 bp, Homo sapien
ctggagccttgggtcttgcagttgt

SEQ ID NO: 1641040 - DNA, 25 bp, Homo sapien
cagcactggagccttgggtcttgca

SEQ ID NO: 1641041 - DNA, 25 bp, Homo sapien
ggagccttgggtcttgcagttgttt

SEQ ID NO: 1641042 - DNA, 25 bp, Homo sapien
cactggagccttgggtcttgcagtt

SEQ ID NO: 1641043 - DNA, 25 bp, Homo sapien
taccagcagcaggttgcggaaagca

SEQ ID NO: 1641044 - DNA, 25 bp, Homo sapien
aaaggcatcgtcctgagctcgcaag

SEQ ID NO: 1641045 - DNA, 25 bp, Homo sapien
gctcgcaagacaaaactcacggtgg

SEQ ID NO: 1641046 - DNA, 25 bp, Homo sapien
actcgggcacatagaagggtcctcc

SEQ ID NO: 1641047 - DNA, 25 bp, Homo sapien
cactcgatgtacactttgaggccca

SEQ ID NO: 1641048 - DNA, 25 bp, Homo sapien
tggttccagtaagcaaagggcagcg

SEQ ID NO: 1641049 - DNA, 25 bp, Homo sapien
ttgctgagccgggactcggatgtcc

SEQ ID NO: 1641050 - DNA, 25 bp, Homo sapien
aagggcagcgggatagtctggccca

SEQ ID NO: 1641051 - DNA, 25 bp, Homo sapien
cagcccctgtgttgtcgaccggcgg

SEQ ID NO: 1641052 - DNA, 25 bp, Homo sapien
ggcaggaggccgacctgagagatgg

SEQ ID NO: 1641053 - DNA, 25 bp, Homo sapien
cgggtgccggcctcaggtcaggcct

SEQ ID NO: 1641054 - DNA, 25 bp, Homo sapien
gcgtgttagggctggtttctggtga

SEQ ID NO: 1641055 - DNA, 25 bp, Homo sapien
tgggaagggatcggcgggcctgcca

SEQ ID NO: 1641056 - DNA, 25 bp, Homo sapien
ccacagaaacaagacgggggctttg

SEQ ID NO: 1641057 - DNA, 25 bp, Homo sapien
ttagagtgaccagggcgaggcaggg

SEQ ID NO: 1641058 - DNA, 25 bp, Homo sapien
gccaggaggcggcagtgaatgtgct

SEQ ID NO: 1641059 - DNA, 25 bp, Homo sapien
ccccaaagtttgaataatggagcct

SEQ ID NO: 1641060 - DNA, 25 bp, Homo sapien
atgatctgtccagccctgatttcct

SEQ ID NO: 1641061 - DNA, 25 bp, Homo sapien
caaagtttgaataatggagcctgtg

SEQ ID NO: 1641062 - DNA, 25 bp, Homo sapien
gtttgaataatggagcctgtgggaa

SEQ ID NO: 1641063 - DNA, 25 bp, Homo sapien
tgtaaagtgtcagtagtagcccctg

SEQ ID NO: 1641064 - DNA, 25 bp, Homo sapien
caagaaccacgaaggaggcgccttt

SEQ ID NO: 1641065 - DNA, 25 bp, Homo sapien
taaatactgggaactcacgctctct

SEQ ID NO: 1641066 - DNA, 25 bp, Homo sapien
ggtgagctaccagacattccatgca

SEQ ID NO: 1641067 - DNA, 25 bp, Homo sapien
ggctgtgtcccgaggctgctcctcc

SEQ ID NO: 1641068 - DNA, 25 bp, Homo sapien
tggctgtgtcccgaggctgctcctc

SEQ ID NO: 1641069 - DNA, 25 bp, Homo sapien
ttggacacggcagggaggtccgaga

SEQ ID NO: 1641070 - DNA, 25 bp, Homo sapien
acaacctcgcaattgggcagcatct

SEQ ID NO: 1641071 - DNA, 25 bp, Homo sapien
gtcgactcccacaacctcgcaattg

SEQ ID NO: 1641072 - DNA, 25 bp, Homo sapien
ccgagatgtccagcctgcggaggtt

SEQ ID NO: 1641073 - DNA, 25 bp, Homo sapien
cctgctgttctgcaacagcgtcgat

SEQ ID NO: 1641074 - DNA, 25 bp, Homo sapien
tgtagggaggtacaggacagcgtgc

SEQ ID NO: 1641075 - DNA, 25 bp, Homo sapien
caaatttcaaccttacaggacagtg

SEQ ID NO: 1641076 - DNA, 25 bp, Homo sapien
ttgcaaatatgcaactccagctcct

SEQ ID NO: 1641077 - DNA, 25 bp, Homo sapien
tactctaggtttgtgatggatgcag

SEQ ID NO: 1641078 - DNA, 25 bp, Homo sapien
ccagagactcactgtgactgctcat

SEQ ID NO: 1641079 - DNA, 25 bp, Homo sapien
gctcatctaccataaatactctagg

SEQ ID NO: 1641080 - DNA, 25 bp, Homo sapien
tgagaactgcctaacattgcccctc

SEQ ID NO: 1641081 - DNA, 25 bp, Homo sapien
cgctgcagcgacaaggactggagct

SEQ ID NO: 1641082 - DNA, 25 bp, Homo sapien
cctgcaacgagtcggccagtgggta

SEQ ID NO: 1641083 - DNA, 25 bp, Homo sapien
aggcgaggccccgttcggagatgcg

SEQ ID NO: 1641084 - DNA, 25 bp, Homo sapien
gctgagacaccagtcgtccacgtgg

SEQ ID NO: 1641085 - DNA, 25 bp, Homo sapien
gatgtcacagtcaccggcatccaca

SEQ ID NO: 1641086 - DNA, 25 bp, Homo sapien
ccaggccctcgtagttgatgtcaca

SEQ ID NO: 1641087 - DNA, 25 bp, Homo sapien
gcatccacagcttcgacaggcactt

SEQ ID NO: 1641088 - DNA, 25 bp, Homo sapien
tatctggcctgatccactccttgtc

SEQ ID NO: 1641089 - DNA, 25 bp, Homo sapien
gaaccttccccagccctatataata

SEQ ID NO: 1641090 - DNA, 25 bp, Homo sapien
atgtataggtcacccttgacataac

SEQ ID NO: 1641091 - DNA, 25 bp, Homo sapien
tgacataactaattccatcttagaa

SEQ ID NO: 1641092 - DNA, 25 bp, Homo sapien
tataatatgtataggtcacccttga

SEQ ID NO: 1641093 - DNA, 25 bp, Homo sapien
ctccctgcttcaggatgaaaaaggc

SEQ ID NO: 1641094 - DNA, 25 bp, Homo sapien
cgcctccctgcttcaggatgaaaaa

SEQ ID NO: 1641095 - DNA, 25 bp, Homo sapien
ttgactgcgcctccctgcttcagga

SEQ ID NO: 1641096 - DNA, 25 bp, Homo sapien
ctgcgcctccctgcttcaggatgaa

SEQ ID NO: 1641097 - DNA, 25 bp, Homo sapien
ccgtatggaccatgttgcttctcca

SEQ ID NO: 1641098 - DNA, 25 bp, Homo sapien
ctgcgccgtatggaccatgttgctt

SEQ ID NO: 1641099 - DNA, 25 bp, Homo sapien
tgcgccgtatggaccatgttgcttc

SEQ ID NO: 1641100 - DNA, 25 bp, Homo sapien
cgccgtatggaccatgttgcttctc

SEQ ID NO: 1641101 - DNA, 25 bp, Homo sapien
cctcagagcctccacatcgtagaaa

SEQ ID NO: 1641102 - DNA, 25 bp, Homo sapien
gaaatagttggtcaggaactggagt

SEQ ID NO: 1641103 - DNA, 25 bp, Homo sapien
gatttttctcatgcaccttgtacat

SEQ ID NO: 1641104 - DNA, 25 bp, Homo sapien
actgccgcacccaggcgatggatgc

SEQ ID NO: 1641105 - DNA, 25 bp, Homo sapien
attggacacccctgaaccgagaagg

SEQ ID NO: 1641106 - DNA, 25 bp, Homo sapien
agaagggtataaaaagcatgagctt

SEQ ID NO: 1641107 - DNA, 25 bp, Homo sapien
cttcttcgaacagcgtggcccaggg

SEQ ID NO: 1641108 - DNA, 25 bp, Homo sapien
caattttgctttcaaggtctcctct

SEQ ID NO: 1641109 - DNA, 25 bp, Homo sapien
attcatccttcggtcttctaagacc

SEQ ID NO: 1641110 - DNA, 25 bp, Homo sapien
aaatcccacatcctcgaacaatccc

SEQ ID NO: 1641111 - DNA, 25 bp, Homo sapien
tcccacatcctcgaacaatcccttc

SEQ ID NO: 1641112 - DNA, 25 bp, Homo sapien
catccttcggtcttctaagaccaaa

SEQ ID NO: 1641113 - DNA, 25 bp, Homo sapien
cactggaggtgcctgcgatagtctg

SEQ ID NO: 1641114 - DNA, 25 bp, Homo sapien
gacactggaggtgcctgcgatagtc

SEQ ID NO: 1641115 - DNA, 25 bp, Homo sapien
ggcagacactggaggtgcctgcgat

SEQ ID NO: 1641116 - DNA, 25 bp, Homo sapien
cagacactggaggtgcctgcgatag

SEQ ID NO: 1641117 - DNA, 25 bp, Homo sapien
tggcatccctgtgacgtccccttcc

SEQ ID NO: 1641118 - DNA, 25 bp, Homo sapien
cctgcgccgagtggatgtccagctg

SEQ ID NO: 1641119 - DNA, 25 bp, Homo sapien
ttcctactggcaggggaacctgcgc

SEQ ID NO: 1641120 - DNA, 25 bp, Homo sapien
ctgtgacgtccccttcctactggca

SEQ ID NO: 1641121 - DNA, 25 bp, Homo sapien
gacaccccacaaagcatgcaagcgg

SEQ ID NO: 1641122 - DNA, 25 bp, Homo sapien
gcatgcaagcggcagggcattctct

SEQ ID NO: 1641123 - DNA, 25 bp, Homo sapien
tcatgcttcacaagtgccagggtcc

SEQ ID NO: 1641124 - DNA, 25 bp, Homo sapien
ggagaacgttgaagtcacgcctagc

SEQ ID NO: 1641125 - DNA, 25 bp, Homo sapien
gacccaaggcttacatgcaatagga

SEQ ID NO: 1641126 - DNA, 25 bp, Homo sapien
cagaagtcaatttggcaggtgagca

SEQ ID NO: 1641127 - DNA, 25 bp, Homo sapien
cagcaggctttgtagaatcatcttc

SEQ ID NO: 1641128 - DNA, 25 bp, Homo sapien
gtaactgtaggcacatttctggagc

SEQ ID NO: 1641129 - DNA, 25 bp, Homo sapien
caaaggtagtttcagtccctgagca

SEQ ID NO: 1641130 - DNA, 25 bp, Homo sapien
cctgaggccagacacgagatgaagt

SEQ ID NO: 1641131 - DNA, 25 bp, Homo sapien
catggctagcttggcctatgcccaa

SEQ ID NO: 1641132 - DNA, 25 bp, Homo sapien
tctggccatgtgactcctgagaagc

SEQ ID NO: 1641133 - DNA, 25 bp, Homo sapien
gagtaatgagtatctccaatggttc

SEQ ID NO: 1641134 - DNA, 25 bp, Homo sapien
gattcttatcagctccataaagtca

SEQ ID NO: 1641135 - DNA, 25 bp, Homo sapien
taagtcgtatttgaattcattccac

SEQ ID NO: 1641136 - DNA, 25 bp, Homo sapien
tccactgtaagccttcaaagagtaa

SEQ ID NO: 1641137 - DNA, 25 bp, Homo sapien
ggaattgctatccagagagcaagca

SEQ ID NO: 1641138 - DNA, 25 bp, Homo sapien
ggcttactcgatcaccatcagccag

SEQ ID NO: 1641139 - DNA, 25 bp, Homo sapien
gaatctagcagcatctcgagatgga

SEQ ID NO: 1641140 - DNA, 25 bp, Homo sapien
gatgcttcttctaacagagtggcag

SEQ ID NO: 1641141 - DNA, 25 bp, Homo sapien
atgggtaactacatggccactcagg

SEQ ID NO: 1641142 - DNA, 25 bp, Homo sapien
tatgacaggtaacaataactatggg

SEQ ID NO: 1641143 - DNA, 25 bp, Homo sapien
gaagtttggaaacgtagtcacacaa

SEQ ID NO: 1641144 - DNA, 25 bp, Homo sapien
ccaactcactatggctaagggcaag

SEQ ID NO: 1641145 - DNA, 25 bp, Homo sapien
tggggaaatctatagagcatcctct

SEQ ID NO: 1641146 - DNA, 25 bp, Homo sapien
aatctatagagcatcctcttcctgg

SEQ ID NO: 1641147 - DNA, 25 bp, Homo sapien
tctatagagcatcctcttcctggct

SEQ ID NO: 1641148 - DNA, 25 bp, Homo sapien
gggaaatctatagagcatcctcttc

SEQ ID NO: 1641149 - DNA, 25 bp, Homo sapien
ttaggccattactctaacaggggtc

SEQ ID NO: 1641150 - DNA, 25 bp, Homo sapien
atggtgatgtttccaaccatgggtt

SEQ ID NO: 1641151 - DNA, 25 bp, Homo sapien
tttatgccagcaagaccttcatggc

SEQ ID NO: 1641152 - DNA, 25 bp, Homo sapien
tgatgtttccaaccatgggttttat

SEQ ID NO: 1641153 - DNA, 25 bp, Homo sapien
accactttgttgctatgaatggagc

SEQ ID NO: 1641154 - DNA, 25 bp, Homo sapien
ctttgttgctatgaatggagcccat

SEQ ID NO: 1641155 - DNA, 25 bp, Homo sapien
cactttgttgctatgaatggagccc

SEQ ID NO: 1641156 - DNA, 25 bp, Homo sapien
tcaccactttgttgctatgaatgga

SEQ ID NO: 1641157 - DNA, 25 bp, Homo sapien
tacaggcgtctggcacaacacccat

SEQ ID NO: 1641158 - DNA, 25 bp, Homo sapien
cgtctggcacaacacccatctaatt

SEQ ID NO: 1641159 - DNA, 25 bp, Homo sapien
agcagtgcgattggggctcaccgcc

SEQ ID NO: 1641160 - DNA, 25 bp, Homo sapien
gtgcgattggggctcaccgccacct

SEQ ID NO: 1641161 - DNA, 25 bp, Homo sapien
gcagcgagccaccgcataagcagac

SEQ ID NO: 1641162 - DNA, 25 bp, Homo sapien
agcgagccaccgcataagcagacat

SEQ ID NO: 1641163 - DNA, 25 bp, Homo sapien
cagcgagccaccgcataagcagaca

SEQ ID NO: 1641164 - DNA, 25 bp, Homo sapien
agcagcgagccaccgcataagcaga

SEQ ID NO: 1641165 - DNA, 25 bp, Homo sapien
tcaatgcttttcttccccgaggaaa

SEQ ID NO: 1641166 - DNA, 25 bp, Homo sapien
aggaaactcttccagattaccctct

SEQ ID NO: 1641167 - DNA, 25 bp, Homo sapien
gagctcaggagaacagtgtcatcaa

SEQ ID NO: 1641168 - DNA, 25 bp, Homo sapien
gagacctcactccagccaaataaca

SEQ ID NO: 1641169 - DNA, 25 bp, Homo sapien
tgaaccacgctatattggaacagag

SEQ ID NO: 1641170 - DNA, 25 bp, Homo sapien
cacagaccgagacccaggaggttta

SEQ ID NO: 1641171 - DNA, 25 bp, Homo sapien
taggcaaacaacttgactcaggaga

SEQ ID NO: 1641172 - DNA, 25 bp, Homo sapien
gagaagccatgagtgtgtgaccccg

SEQ ID NO: 1641173 - DNA, 25 bp, Homo sapien
tcttcccctgaatgaaaagcacggt

SEQ ID NO: 1641174 - DNA, 25 bp, Homo sapien
tacaaaaagtgacgtgaagtgggca

SEQ ID NO: 1641175 - DNA, 25 bp, Homo sapien
cattataggcgaagtaagtgagccc

SEQ ID NO: 1641176 - DNA, 25 bp, Homo sapien
gaagtatccaggttcctacattggg

SEQ ID NO: 1641177 - DNA, 25 bp, Homo sapien
gaggcacagaagggttttgccactt

SEQ ID NO: 1641178 - DNA, 25 bp, Homo sapien
gatgaggcacagaagggttttgcca

SEQ ID NO: 1641179 - DNA, 25 bp, Homo sapien
tgaggcacagaagggttttgccact

SEQ ID NO: 1641180 - DNA, 25 bp, Homo sapien
tgacagtgaagccttcgtgctcacc

SEQ ID NO: 1641181 - DNA, 25 bp, Homo sapien
gtatgggtgcgcgtgtgatgtcgac

SEQ ID NO: 1641182 - DNA, 25 bp, Homo sapien
atgggtgcgcgtgtgatgtcgacaa

SEQ ID NO: 1641183 - DNA, 25 bp, Homo sapien
gtgagtatgggtgcgcgtgtgatgt

SEQ ID NO: 1641184 - DNA, 25 bp, Homo sapien
ctgtgagtatgggtgcgcgtgtgat

SEQ ID NO: 1641185 - DNA, 25 bp, Homo sapien
gagagtaattgcaccacttttctgg

SEQ ID NO: 1641186 - DNA, 25 bp, Homo sapien
ttctggtggtctcttgacgcaagag

SEQ ID NO: 1641187 - DNA, 25 bp, Homo sapien
gatgatagtcaatgattcttgacag

SEQ ID NO: 1641188 - DNA, 25 bp, Homo sapien
ttcttgacaggagagtaattgcacc

SEQ ID NO: 1641189 - DNA, 25 bp, Homo sapien
ttcctgtccatcagacctggtaatg

SEQ ID NO: 1641190 - DNA, 25 bp, Homo sapien
tgtccatcagacctggtaatgacat

SEQ ID NO: 1641191 - DNA, 25 bp, Homo sapien
catttcctgtccatcagacctggta

SEQ ID NO: 1641192 - DNA, 25 bp, Homo sapien
cctgtccatcagacctggtaatgac

SEQ ID NO: 1641193 - DNA, 25 bp, Homo sapien
caggactacttggatggctaatgag

SEQ ID NO: 1641194 - DNA, 25 bp, Homo sapien
gatgggcttggttcctcaggactac

SEQ ID NO: 1641195 - DNA, 25 bp, Homo sapien
caacaatgcatacagtgtgaccgag

SEQ ID NO: 1641196 - DNA, 25 bp, Homo sapien
tgaaacagatgactggacccacagc

SEQ ID NO: 1641197 - DNA, 25 bp, Homo sapien
cctgttctgagcagcgagccaccgc

SEQ ID NO: 1641198 - DNA, 25 bp, Homo sapien
ctgttctgagcagcgagccaccgca

SEQ ID NO: 1641199 - DNA, 25 bp, Homo sapien
agagtaggtcagaaaactcatccgg

SEQ ID NO: 1641200 - DNA, 25 bp, Homo sapien
cagaaaactcatccggattaccctc

SEQ ID NO: 1641201 - DNA, 25 bp, Homo sapien
aggtcagaaaactcatccggattac

SEQ ID NO: 1641202 - DNA, 25 bp, Homo sapien
gtaggtcagaaaactcatccggatt

SEQ ID NO: 1641203 - DNA, 25 bp, Homo sapien
tctggattagagacctcaacacggc

SEQ ID NO: 1641204 - DNA, 25 bp, Homo sapien
catgtcatgaattggtcggcacacc

SEQ ID NO: 1641205 - DNA, 25 bp, Homo sapien
taacatatcggtcagaatactggcc

SEQ ID NO: 1641206 - DNA, 25 bp, Homo sapien
tttccgttgctagttttgggacaca

SEQ ID NO: 1641207 - DNA, 25 bp, Homo sapien
cggtgaagcgcaagatccaggttct

SEQ ID NO: 1641208 - DNA, 25 bp, Homo sapien
ggctactgccctgcaaaagctggaa

SEQ ID NO: 1641209 - DNA, 25 bp, Homo sapien
tgagcgcctccagcgagaagttgag

SEQ ID NO: 1641210 - DNA, 25 bp, Homo sapien
cttggaacgcacagaggaacgagct

SEQ ID NO: 1641211 - DNA, 25 bp, Homo sapien
tacaatattctataaagtgcagagt

SEQ ID NO: 1641212 - DNA, 25 bp, Homo sapien
tataacaatagttcaattacagcag

SEQ ID NO: 1641213 - DNA, 25 bp, Homo sapien
tacttagagaaagttggacactaca

SEQ ID NO: 1641214 - DNA, 25 bp, Homo sapien
gcttttgcatagcaatacttagaga

SEQ ID NO: 1641215 - DNA, 25 bp, Homo sapien
ttcaagaggaatatcactacaagaa

SEQ ID NO: 1641216 - DNA, 25 bp, Homo sapien
gaatggttgctgatgccaaatctcc

SEQ ID NO: 1641217 - DNA, 25 bp, Homo sapien
tctgagtaggttcttcggcgtcgct

SEQ ID NO: 1641218 - DNA, 25 bp, Homo sapien
ggccataagtctgctttcttcagga

SEQ ID NO: 1641219 - DNA, 25 bp, Homo sapien
agaaactaagggatccggatggtgc

SEQ ID NO: 1641220 - DNA, 25 bp, Homo sapien
gagaaactaagggatccggatggtg

SEQ ID NO: 1641221 - DNA, 25 bp, Homo sapien
tcaaacatgctttggagctccccag

SEQ ID NO: 1641222 - DNA, 25 bp, Homo sapien
tgttacacgtggcactaagcagaga

SEQ ID NO: 1641223 - DNA, 25 bp, Homo sapien
tagaggcgaagttcagacattttgg

SEQ ID NO: 1641224 - DNA, 25 bp, Homo sapien
cattaagaggtcacagtagaggcga

SEQ ID NO: 1641225 - DNA, 25 bp, Homo sapien
gaatttatgtatccaatcaagggtg

SEQ ID NO: 1641226 - DNA, 25 bp, Homo sapien
acagaatttatgtatccaatcaagg

SEQ ID NO: 1641227 - DNA, 25 bp, Homo sapien
tgtatccaatcaagggtggtcccct

SEQ ID NO: 1641228 - DNA, 25 bp, Homo sapien
tttatgtatccaatcaagggtggtc

SEQ ID NO: 1641229 - DNA, 25 bp, Homo sapien
taggataagattccattatctaaaa

SEQ ID NO: 1641230 - DNA, 25 bp, Homo sapien
tctaaaacaaaccaacgaggctgcc

SEQ ID NO: 1641231 - DNA, 25 bp, Homo sapien
ctaaaacaaaccaacgaggctgcca

SEQ ID NO: 1641232 - DNA, 25 bp, Homo sapien
ccctccgccggcacgaagccgcttt

SEQ ID NO: 1641233 - DNA, 25 bp, Homo sapien
cgccggcacgaagccgctttctgcc

SEQ ID NO: 1641234 - DNA, 25 bp, Homo sapien
tgcgcgcgccgcagggacgtggcgg

SEQ ID NO: 1641235 - DNA, 25 bp, Homo sapien
ggcacgaagccgctttctgcctgcg

SEQ ID NO: 1641236 - DNA, 25 bp, Homo sapien
ttagaggccgggacagcgggcgcag

SEQ ID NO: 1641237 - DNA, 25 bp, Homo sapien
gactgcgaccgcgaccggtctcgtg

SEQ ID NO: 1641238 - DNA, 25 bp, Homo sapien
aaatgcgactgcgaccgcgaccggt

SEQ ID NO: 1641239 - DNA, 25 bp, Homo sapien
ccggtctcgtgctcgcgcttccgcg

SEQ ID NO: 1641240 - DNA, 25 bp, Homo sapien
cggcaaaaatgcgactgcgaccgcg

SEQ ID NO: 1641241 - DNA, 25 bp, Homo sapien
ccaactggggctctcagagtgctgg

SEQ ID NO: 1641242 - DNA, 25 bp, Homo sapien
tatccttgctaatgggggttacagc

SEQ ID NO: 1641243 - DNA, 25 bp, Homo sapien
cagacagattatcactctaatgcct

SEQ ID NO: 1641244 - DNA, 25 bp, Homo sapien
ccttgaatgttaggcagacttcctc

SEQ ID NO: 1641245 - DNA, 25 bp, Homo sapien
tccgtgaacgaagagatctgctggt

SEQ ID NO: 1641246 - DNA, 25 bp, Homo sapien
tcacgcagaactgacaaaaccttgt

SEQ ID NO: 1641247 - DNA, 25 bp, Homo sapien
agagtctcccggacaatccagtcac

SEQ ID NO: 1641248 - DNA, 25 bp, Homo sapien
gaatacgtcaacgtctccgtgaacg

SEQ ID NO: 1641249 - DNA, 25 bp, Homo sapien
tttgtccaatagagggcgcccctcc

SEQ ID NO: 1641250 - DNA, 25 bp, Homo sapien
tttagggagtccgtcgatggaagac

SEQ ID NO: 1641251 - DNA, 25 bp, Homo sapien
tatttgtccaatagagggcgcccct

SEQ ID NO: 1641252 - DNA, 25 bp, Homo sapien
cctccacgccgctggctttttaggg

SEQ ID NO: 1641253 - DNA, 25 bp, Homo sapien
tccaggcactgcaaggatgtgagtt

SEQ ID NO: 1641254 - DNA, 25 bp, Homo sapien
tggagtctgaagctccaggcactgc

SEQ ID NO: 1641255 - DNA, 25 bp, Homo sapien
ctccccgttttactggatctttcag

SEQ ID NO: 1641256 - DNA, 25 bp, Homo sapien
ttttactggatctttcagggtctcc

SEQ ID NO: 1641257 - DNA, 25 bp, Homo sapien
atttgtgatacaccctctcataggg

SEQ ID NO: 1641258 - DNA, 25 bp, Homo sapien
tcccacagcaattaatgacgagtgc

SEQ ID NO: 1641259 - DNA, 25 bp, Homo sapien
ggactctaggcatttgccaccgtgc

SEQ ID NO: 1641260 - DNA, 25 bp, Homo sapien
tacttctttggatcgaatagctcca

SEQ ID NO: 1641261 - DNA, 25 bp, Homo sapien
tcaggcctgtgaacaacgttgcatc

SEQ ID NO: 1641262 - DNA, 25 bp, Homo sapien
tgagatcggaagttagaagctgtag

SEQ ID NO: 1641263 - DNA, 25 bp, Homo sapien
tcatccttccaatacaggtaacacc

SEQ ID NO: 1641264 - DNA, 25 bp, Homo sapien
caagaaacagttaattacagtctta

SEQ ID NO: 1641265 - DNA, 25 bp, Homo sapien
cgtgaaaggcggactttgaacagat

SEQ ID NO: 1641266 - DNA, 25 bp, Homo sapien
taggaacggattagcttcagggttg

SEQ ID NO: 1641267 - DNA, 25 bp, Homo sapien
acggattagcttcagggttgtcacc

SEQ ID NO: 1641268 - DNA, 25 bp, Homo sapien
gctcctctaggaacggattagcttc

SEQ ID NO: 1641269 - DNA, 25 bp, Homo sapien
tggtcccttttccactggacgccat

SEQ ID NO: 1641270 - DNA, 25 bp, Homo sapien
ctgccttgagtgaagggcaaggggg

SEQ ID NO: 1641271 - DNA, 25 bp, Homo sapien
gtggtcccttttccactggacgcca

SEQ ID NO: 1641272 - DNA, 25 bp, Homo sapien
ttgagtgaagggcaagggggtggtc

SEQ ID NO: 1641273 - DNA, 25 bp, Homo sapien
caagcatctgaatctgcagggcctc

SEQ ID NO: 1641274 - DNA, 25 bp, Homo sapien
tcagcacaggacctaggcagtggct

SEQ ID NO: 1641275 - DNA, 25 bp, Homo sapien
gtactgggcaggatcgccatggcaa

SEQ ID NO: 1641276 - DNA, 25 bp, Homo sapien
gcattgtgaacgcttgctggccaca

SEQ ID NO: 1641277 - DNA, 25 bp, Homo sapien
gtgggcgcgggaccaactactgatc

SEQ ID NO: 1641278 - DNA, 25 bp, Homo sapien
cgttcggcaggtgtgcgcctcaatc

SEQ ID NO: 1641279 - DNA, 25 bp, Homo sapien
tgagctcgccttagctaatcctgcg

SEQ ID NO: 1641280 - DNA, 25 bp, Homo sapien
gggaacttagcctgacgacactccg

SEQ ID NO: 1641281 - DNA, 25 bp, Homo sapien
tgcaggttccgccgagcccgtccct

SEQ ID NO: 1641282 - DNA, 25 bp, Homo sapien
gccgatgcttctttcctgcaggttc

SEQ ID NO: 1641283 - DNA, 25 bp, Homo sapien
agcccgtcccttggcggtggtgtca

SEQ ID NO: 1641284 - DNA, 25 bp, Homo sapien
agccgatgcttctttcctgcaggtt

SEQ ID NO: 1641285 - DNA, 25 bp, Homo sapien
gctcccttgagagagtcacggtttc

SEQ ID NO: 1641286 - DNA, 25 bp, Homo sapien
gcgtcactaattagacaaggaggcc

SEQ ID NO: 1641287 - DNA, 25 bp, Homo sapien
tacttggatattcagagcgctggac

SEQ ID NO: 1641288 - DNA, 25 bp, Homo sapien
agatggtgggaagagcctccatcca

SEQ ID NO: 1641289 - DNA, 25 bp, Homo sapien
cgctccgtcggaatgacacagttgg

SEQ ID NO: 1641290 - DNA, 25 bp, Homo sapien
ttggcgctaacaccctcggaggtcc

SEQ ID NO: 1641291 - DNA, 25 bp, Homo sapien
ctcggaggtcctcacggcgctccgt

SEQ ID NO: 1641292 - DNA, 25 bp, Homo sapien
tcacttggcgctaacaccctcggag

SEQ ID NO: 1641293 - DNA, 25 bp, Homo sapien
tggagccgagcggtgaggaataacc

SEQ ID NO: 1641294 - DNA, 25 bp, Homo sapien
ccggcctgcgtcgagtttccagggt

SEQ ID NO: 1641295 - DNA, 25 bp, Homo sapien
acgattcactagaagggccggcctg

SEQ ID NO: 1641296 - DNA, 25 bp, Homo sapien
acggtgcgtggtgagtctccccaac

SEQ ID NO: 1641297 - DNA, 25 bp, Homo sapien
aggcggcagtcaccctggtgccaca

SEQ ID NO: 1641298 - DNA, 25 bp, Homo sapien
atcctggaggtgatgaatgatcagg

SEQ ID NO: 1641299 - DNA, 25 bp, Homo sapien
cagcgacagcgctgatggccattct

SEQ ID NO: 1641300 - DNA, 25 bp, Homo sapien
aagggagcctagagcgggccccaca

SEQ ID NO: 1641301 - DNA, 25 bp, Homo sapien
caggagagctgggcgtcccacagaa

SEQ ID NO: 1641302 - DNA, 25 bp, Homo sapien
gagacccaggatctgtccccactgg

SEQ ID NO: 1641303 - DNA, 25 bp, Homo sapien
gggccacagatattctggtcccttg

SEQ ID NO: 1641304 - DNA, 25 bp, Homo sapien
agtgggggccacagatattctggtc

SEQ ID NO: 1641305 - DNA, 25 bp, Homo sapien
tggcatctggctgagctgaagttca

SEQ ID NO: 1641306 - DNA, 25 bp, Homo sapien
atttactgctggatcgaccacaaag

SEQ ID NO: 1641307 - DNA, 25 bp, Homo sapien
tactgctggatcgaccacaaagcag

SEQ ID NO: 1641308 - DNA, 25 bp, Homo sapien
tacactctgacacaaacatttactg

SEQ ID NO: 1641309 - DNA, 25 bp, Homo sapien
tcctgtgggttgatggagcgtccct

SEQ ID NO: 1641310 - DNA, 25 bp, Homo sapien
aaaatatctccaccttatctcaacc

SEQ ID NO: 1641311 - DNA, 25 bp, Homo sapien
ggaaaaatatctccaccttatctca

SEQ ID NO: 1641312 - DNA, 25 bp, Homo sapien
ccaccttatctcaaccccagtctct

SEQ ID NO: 1641313 - DNA, 25 bp, Homo sapien
accttatctcaaccccagtctctct

SEQ ID NO: 1641314 - DNA, 25 bp, Homo sapien
gagagcagaggtaactagaagattc

SEQ ID NO: 1641315 - DNA, 25 bp, Homo sapien
tacagcagcttcagggttatgggag

SEQ ID NO: 1641316 - DNA, 25 bp, Homo sapien
tacatcacactctgttccatagctc

SEQ ID NO: 1641317 - DNA, 25 bp, Homo sapien
gaagtcacttcaagatcctgaacac

SEQ ID NO: 1641318 - DNA, 25 bp, Homo sapien
ctccaagccaagccttgtcaccccc

SEQ ID NO: 1641319 - DNA, 25 bp, Homo sapien
cccatgggcttctgtaccagatcct

SEQ ID NO: 1641320 - DNA, 25 bp, Homo sapien
catgggcttctgtaccagatcctcc

SEQ ID NO: 1641321 - DNA, 25 bp, Homo sapien
ccaagccaagccttgtcacccccat

SEQ ID NO: 1641322 - DNA, 25 bp, Homo sapien
tacatgagtctaacatcagaggcca

SEQ ID NO: 1641323 - DNA, 25 bp, Homo sapien
actattcgaagtcacagcatgagcc

SEQ ID NO: 1641324 - DNA, 25 bp, Homo sapien
gaagccctgggtttaaatgcaagaa

SEQ ID NO: 1641325 - DNA, 25 bp, Homo sapien
gagatgctgccacaactgtcgttca

SEQ ID NO: 1641326 - DNA, 25 bp, Homo sapien
gttttatgtgcttcatggcttcgca

SEQ ID NO: 1641327 - DNA, 25 bp, Homo sapien
ccacctctgtagtaataatctctga

SEQ ID NO: 1641328 - DNA, 25 bp, Homo sapien
ggcttcgcaaaatgtaacagcttgc

SEQ ID NO: 1641329 - DNA, 25 bp, Homo sapien
aaatcctgcagcagcggtcagttca

SEQ ID NO: 1641330 - DNA, 25 bp, Homo sapien
catgtagcatgtcagtatagatctg

SEQ ID NO: 1641331 - DNA, 25 bp, Homo sapien
tccatgtagcatgtcagtatagatc

SEQ ID NO: 1641332 - DNA, 25 bp, Homo sapien
tctccatgtagcatgtcagtataga

SEQ ID NO: 1641333 - DNA, 25 bp, Homo sapien
ccatgtagcatgtcagtatagatct

SEQ ID NO: 1641334 - DNA, 25 bp, Homo sapien
ggtgtgtggagccacaggtatctca

SEQ ID NO: 1641335 - DNA, 25 bp, Homo sapien
aggacacccctgcgcagtgaagcct

SEQ ID NO: 1641336 - DNA, 25 bp, Homo sapien
tcaggtgtgtggagccacaggtatc

SEQ ID NO: 1641337 - DNA, 25 bp, Homo sapien
acacccctgcgcagtgaagcctcag

SEQ ID NO: 1641338 - DNA, 25 bp, Homo sapien
tggacccaggtattcagggacccag

SEQ ID NO: 1641339 - DNA, 25 bp, Homo sapien
gatgtcagggtgagagtcactgtca

SEQ ID NO: 1641340 - DNA, 25 bp, Homo sapien
tggtgattcttgtcagacacgtgcc

SEQ ID NO: 1641341 - DNA, 25 bp, Homo sapien
tcagacacgtgccttgggtgaggat

SEQ ID NO: 1641342 - DNA, 25 bp, Homo sapien
tgaaaagacaaagcctcaatcctac

SEQ ID NO: 1641343 - DNA, 25 bp, Homo sapien
tggtgagagagggttgcatggagct

SEQ ID NO: 1641344 - DNA, 25 bp, Homo sapien
tgtgctcagagtgggagggactcct

SEQ ID NO: 1641345 - DNA, 25 bp, Homo sapien
atggagctgagcagtttcatgtgct

SEQ ID NO: 1641346 - DNA, 25 bp, Homo sapien
cagacattgagtgtgaggacaggac

SEQ ID NO: 1641347 - DNA, 25 bp, Homo sapien
tgctgtgtgtgactagcagggacac

SEQ ID NO: 1641348 - DNA, 25 bp, Homo sapien
gaagccctccattgtaccctgagtg

SEQ ID NO: 1641349 - DNA, 25 bp, Homo sapien
cactggatgggttggacctgtgcct

SEQ ID NO: 1641350 - DNA, 25 bp, Homo sapien
tgctgccacctggaaattagcctca

SEQ ID NO: 1641351 - DNA, 25 bp, Homo sapien
tgtccacgaactattgaagggccgg

SEQ ID NO: 1641352 - DNA, 25 bp, Homo sapien
tccaggtgcccatgtgtagtttgta

SEQ ID NO: 1641353 - DNA, 25 bp, Homo sapien
gcaactaagcatgtcaccaagaaga

SEQ ID NO: 1641354 - DNA, 25 bp, Homo sapien
gagtttctgctaagttcccgtgagc

SEQ ID NO: 1641355 - DNA, 25 bp, Homo sapien
caggtgagtttctgctaagttcccg

SEQ ID NO: 1641356 - DNA, 25 bp, Homo sapien
taagttcccgtgagcagaaaaagag

SEQ ID NO: 1641357 - DNA, 25 bp, Homo sapien
gctaagttcccgtgagcagaaaaag

SEQ ID NO: 1641358 - DNA, 25 bp, Homo sapien
gggtctccagatattcagcagggac

SEQ ID NO: 1641359 - DNA, 25 bp, Homo sapien
gatgagaggcctttgtcccggccca

SEQ ID NO: 1641360 - DNA, 25 bp, Homo sapien
gagcccagggcaacctgtcagggtc

SEQ ID NO: 1641361 - DNA, 25 bp, Homo sapien
gaagggtcctctttattcagatcct

SEQ ID NO: 1641362 - DNA, 25 bp, Homo sapien
atgtttgcatcagagtatagcaatt

SEQ ID NO: 1641363 - DNA, 25 bp, Homo sapien
tgtttgcatcagagtatagcaattc

SEQ ID NO: 1641364 - DNA, 25 bp, Homo sapien
aatgtttgcatcagagtatagcaat

SEQ ID NO: 1641365 - DNA, 25 bp, Homo sapien
ctgttctggggctgggtagaggggc

SEQ ID NO: 1641366 - DNA, 25 bp, Homo sapien
ggctgttctggggctgggtagaggg

SEQ ID NO: 1641367 - DNA, 25 bp, Homo sapien
gtggctgttctggggctgggtagag

SEQ ID NO: 1641368 - DNA, 25 bp, Homo sapien
ctcatagatgggagtggctgttctg

SEQ ID NO: 1641369 - DNA, 25 bp, Homo sapien
gagaaggtggatctgtgagagggac

SEQ ID NO: 1641370 - DNA, 25 bp, Homo sapien
gaaggtggatctgtgagagggacca

SEQ ID NO: 1641371 - DNA, 25 bp, Homo sapien
gtggatctgtgagagggaccatggc

SEQ ID NO: 1641372 - DNA, 25 bp, Homo sapien
aaggtggatctgtgagagggaccat

SEQ ID NO: 1641373 - DNA, 25 bp, Homo sapien
gctccctgaggtcacgctggatgct

SEQ ID NO: 1641374 - DNA, 25 bp, Homo sapien
ggctgctccctgaggtcacgctgga

SEQ ID NO: 1641375 - DNA, 25 bp, Homo sapien
cctgaggtcacgctggatgctggcc

SEQ ID NO: 1641376 - DNA, 25 bp, Homo sapien
ggcggctgctccctgaggtcacgct

SEQ ID NO: 1641377 - DNA, 25 bp, Homo sapien
cagtcctggagagaagcagaaaaca

SEQ ID NO: 1641378 - DNA, 25 bp, Homo sapien
cttccagtcctggagagaagcagaa

SEQ ID NO: 1641379 - DNA, 25 bp, Homo sapien
tcctggagagaagcagaaaacacac

SEQ ID NO: 1641380 - DNA, 25 bp, Homo sapien
ccagtcctggagagaagcagaaaac

SEQ ID NO: 1641381 - DNA, 25 bp, Homo sapien
ccacaggaaggcctgggacgttgtt

SEQ ID NO: 1641382 - DNA, 25 bp, Homo sapien
ccccaaccaggaccccagtcacgat

SEQ ID NO: 1641383 - DNA, 25 bp, Homo sapien
cacaggaaggcctgggacgttgttt

SEQ ID NO: 1641384 - DNA, 25 bp, Homo sapien
aggaccccagtcacgatgccagcga

SEQ ID NO: 1641385 - DNA, 25 bp, Homo sapien
actggagtgcactgacgcaatctcg

SEQ ID NO: 1641386 - DNA, 25 bp, Homo sapien
ccagactggagtgcactgacgcaat

SEQ ID NO: 1641387 - DNA, 25 bp, Homo sapien
cagactggagtgcactgacgcaatc

SEQ ID NO: 1641388 - DNA, 25 bp, Homo sapien
gactggagtgcactgacgcaatctc

SEQ ID NO: 1641389 - DNA, 25 bp, Homo sapien
gcccgcagacatctggtaaatcctt

SEQ ID NO: 1641390 - DNA, 25 bp, Homo sapien
ggtaaatccttgctcccagtaagcc

SEQ ID NO: 1641391 - DNA, 25 bp, Homo sapien
gacatctggtaaatccttgctccca

SEQ ID NO: 1641392 - DNA, 25 bp, Homo sapien
ccacagcccgcagacatctggtaaa

SEQ ID NO: 1641393 - DNA, 25 bp, Homo sapien
cactggacggcagggcttcaatagt

SEQ ID NO: 1641394 - DNA, 25 bp, Homo sapien
tattgcaggccagtagaagaacatc

SEQ ID NO: 1641395 - DNA, 25 bp, Homo sapien
ggccagttgcttggtcagagtcgta

SEQ ID NO: 1641396 - DNA, 25 bp, Homo sapien
gcggcccctgggatatttgcttgaa

SEQ ID NO: 1641397 - DNA, 25 bp, Homo sapien
tggtgggcgggtgccagaaggttaa

SEQ ID NO: 1641398 - DNA, 25 bp, Homo sapien
cgggtgccagaaggttaaaagtgag

SEQ ID NO: 1641399 - DNA, 25 bp, Homo sapien
ctggacagtggtgggcgggtgccag

SEQ ID NO: 1641400 - DNA, 25 bp, Homo sapien
agtggtgggcgggtgccagaaggtt

SEQ ID NO: 1641401 - DNA, 25 bp, Homo sapien
cctgtgccctccacggggagcggct

SEQ ID NO: 1641402 - DNA, 25 bp, Homo sapien
gccctccacggggagcggctgaggg

SEQ ID NO: 1641403 - DNA, 25 bp, Homo sapien
cctccacggggagcggctgaggggg

SEQ ID NO: 1641404 - DNA, 25 bp, Homo sapien
ctgtgatcaggagcccctgccaggg

SEQ ID NO: 1641405 - DNA, 25 bp, Homo sapien
ctccaggaacgctcttgtcagagct

SEQ ID NO: 1641406 - DNA, 25 bp, Homo sapien
agctgggctccaggaacgctcttgt

SEQ ID NO: 1641407 - DNA, 25 bp, Homo sapien
gctgctgtgactgtcggctgtcggg

SEQ ID NO: 1641408 - DNA, 25 bp, Homo sapien
aggaacgctcttgtcagagctgctg

SEQ ID NO: 1641409 - DNA, 25 bp, Homo sapien
ctctgtgaaggtgattgtcctgttg

SEQ ID NO: 1641410 - DNA, 25 bp, Homo sapien
tctgtgaaggtgattgtcctgttgt

SEQ ID NO: 1641411 - DNA, 25 bp, Homo sapien
ttccccatgcatgataccaggagaa

SEQ ID NO: 1641412 - DNA, 25 bp, Homo sapien
ttgtcactgtaccttccccatgcat

SEQ ID NO: 1641413 - DNA, 25 bp, Homo sapien
tttcctgtgttgtctgcgtgcaatg

SEQ ID NO: 1641414 - DNA, 25 bp, Homo sapien
tcctgtgttgtctgcgtgcaatgtt

SEQ ID NO: 1641415 - DNA, 25 bp, Homo sapien
ctgtgttgtctgcgtgcaatgttgc

SEQ ID NO: 1641416 - DNA, 25 bp, Homo sapien
atttcctgtgttgtctgcgtgcaat

SEQ ID NO: 1641417 - DNA, 25 bp, Homo sapien
ctgcaggctgcaagggatacctggt

SEQ ID NO: 1641418 - DNA, 25 bp, Homo sapien
gcaggctgcaagggatacctggttc

SEQ ID NO: 1641419 - DNA, 25 bp, Homo sapien
tgtttgtgagaaagacatatgttag

SEQ ID NO: 1641420 - DNA, 25 bp, Homo sapien
atatccggagtttgtgtcagttttg

SEQ ID NO: 1641421 - DNA, 25 bp, Homo sapien
ccacctgggatcgaatatccggagt

SEQ ID NO: 1641422 - DNA, 25 bp, Homo sapien
gtgtgtttgtgagaaagacatatgt

SEQ ID NO: 1641423 - DNA, 25 bp, Homo sapien
ctgagcaaagactcttgatcttctg

SEQ ID NO: 1641424 - DNA, 25 bp, Homo sapien
gtggaacctgagagctggctgggat

SEQ ID NO: 1641425 - DNA, 25 bp, Homo sapien
ggtggaacctgagagctggctggga

SEQ ID NO: 1641426 - DNA, 25 bp, Homo sapien
ggaacctgagagctggctgggatct

SEQ ID NO: 1641427 - DNA, 25 bp, Homo sapien
tggaacctgagagctggctgggatc

SEQ ID NO: 1641428 - DNA, 25 bp, Homo sapien
tctgtcgtaataacctctgaaaaat

SEQ ID NO: 1641429 - DNA, 25 bp, Homo sapien
ctctgtcgtaataacctctgaaaaa

SEQ ID NO: 1641430 - DNA, 25 bp, Homo sapien
tctgtgcttcgtggcttgccaaaca

SEQ ID NO: 1641431 - DNA, 25 bp, Homo sapien
gcttcgtggcttgccaaacataaca

SEQ ID NO: 1641432 - DNA, 25 bp, Homo sapien
ctttctgtgcttcgtggcttgccaa

SEQ ID NO: 1641433 - DNA, 25 bp, Homo sapien
tgtgcttcgtggcttgccaaacata

SEQ ID NO: 1641434 - DNA, 25 bp, Homo sapien
tgcagcagcagtcggtacagctgct

SEQ ID NO: 1641435 - DNA, 25 bp, Homo sapien
ctgcagcagcagtcggtacagctgc

SEQ ID NO: 1641436 - DNA, 25 bp, Homo sapien
agcagcagtcggtacagctgctacc

SEQ ID NO: 1641437 - DNA, 25 bp, Homo sapien
gcagtcggtacagctgctaccactg

SEQ ID NO: 1641438 - DNA, 25 bp, Homo sapien
gagtaaagtgaaggtcctgttgccc

SEQ ID NO: 1641439 - DNA, 25 bp, Homo sapien
tgggttccactctcatagagtcctg

SEQ ID NO: 1641440 - DNA, 25 bp, Homo sapien
ctgcagtcggcattcactgggttct

SEQ ID NO: 1641441 - DNA, 25 bp, Homo sapien
gtcactacctgtgacactgagtaaa

SEQ ID NO: 1641442 - DNA, 25 bp, Homo sapien
tctaactctaacagggaccaccgtg

SEQ ID NO: 1641443 - DNA, 25 bp, Homo sapien
tgttatctggcatcccatagctggg

SEQ ID NO: 1641444 - DNA, 25 bp, Homo sapien
gaatgagccacatgagaagcctacc

SEQ ID NO: 1641445 - DNA, 25 bp, Homo sapien
gagtggcccacatctcaggcatgag

SEQ ID NO: 1641446 - DNA, 25 bp, Homo sapien
cagtaggtgattttaggaaggtaat

SEQ ID NO: 1641447 - DNA, 25 bp, Homo sapien
aacttatctaatgggctagagtagg

SEQ ID NO: 1641448 - DNA, 25 bp, Homo sapien
ttttaggaaggtaatgaagtagtca

SEQ ID NO: 1641449 - DNA, 25 bp, Homo sapien
gccgctgcaggttcttcagtaggtg

SEQ ID NO: 1641450 - DNA, 25 bp, Homo sapien
cactcttcccgaaatgcagaaacta

SEQ ID NO: 1641451 - DNA, 25 bp, Homo sapien
cgaaatgcagaaactacaccaaggc

SEQ ID NO: 1641452 - DNA, 25 bp, Homo sapien
aaatgcagaaactacaccaaggctg

SEQ ID NO: 1641453 - DNA, 25 bp, Homo sapien
cccgaaatgcagaaactacaccaag

SEQ ID NO: 1641454 - DNA, 25 bp, Homo sapien
atgctgacagcggtcccagctgaga

SEQ ID NO: 1641455 - DNA, 25 bp, Homo sapien
gagaggtcaggtgaacttgcttgta

SEQ ID NO: 1641456 - DNA, 25 bp, Homo sapien
ggtgaacttgcttgtactgactcat

SEQ ID NO: 1641457 - DNA, 25 bp, Homo sapien
gacagcggtcccagctgagaggtca

SEQ ID NO: 1641458 - DNA, 25 bp, Homo sapien
atttctgttgcaataatttgggctt

SEQ ID NO: 1641459 - DNA, 25 bp, Homo sapien
tatttctgttgcaataatttgggct

SEQ ID NO: 1641460 - DNA, 25 bp, Homo sapien
tttctgttgcaataatttgggctta

SEQ ID NO: 1641461 - DNA, 25 bp, Homo sapien
gtgtaagccgttgcatccagccaaa

SEQ ID NO: 1641462 - DNA, 25 bp, Homo sapien
ttacatgtgtaagccgttgcatcca

SEQ ID NO: 1641463 - DNA, 25 bp, Homo sapien
gttgtattcctatgcacttacaatg

SEQ ID NO: 1641464 - DNA, 25 bp, Homo sapien
aaaaaacagttgtattcctatgcac

SEQ ID NO: 1641465 - DNA, 25 bp, Homo sapien
cagcctgggccacagaggaacagaa

SEQ ID NO: 1641466 - DNA, 25 bp, Homo sapien
tcagcctgggccacagaggaacaga

SEQ ID NO: 1641467 - DNA, 25 bp, Homo sapien
ccacagaggaacagaagatactcac

SEQ ID NO: 1641468 - DNA, 25 bp, Homo sapien
gggccacagaggaacagaagatact

SEQ ID NO: 1641469 - DNA, 25 bp, Homo sapien
tctttgtggcgctgagtagaacgag

SEQ ID NO: 1641470 - DNA, 25 bp, Homo sapien
gtcctatgtcattctttgtggcgct

SEQ ID NO: 1641471 - DNA, 25 bp, Homo sapien
gggtcctgttgtcagtggagagcag

SEQ ID NO: 1641472 - DNA, 25 bp, Homo sapien
gcgctgagtagaacgagggtcctgt

SEQ ID NO: 1641473 - DNA, 25 bp, Homo sapien
tcaggttgacaggttaaaaccacaa

SEQ ID NO: 1641474 - DNA, 25 bp, Homo sapien
atctttgttctccaccggattgaag

SEQ ID NO: 1641475 - DNA, 25 bp, Homo sapien
tgttctccaccggattgaagttgtt

SEQ ID NO: 1641476 - DNA, 25 bp, Homo sapien
ccaccggattgaagttgttgctggt

SEQ ID NO: 1641477 - DNA, 25 bp, Homo sapien
gttgtagccataaagattctgggac

SEQ ID NO: 1641478 - DNA, 25 bp, Homo sapien
tataattcgatagttggcatgcacc

SEQ ID NO: 1641479 - DNA, 25 bp, Homo sapien
tgaacggcacgacatcaatattggt

SEQ ID NO: 1641480 - DNA, 25 bp, Homo sapien
tatggactactagaaggacctcctt

SEQ ID NO: 1641481 - DNA, 25 bp, Homo sapien
agggaatgcacactctgtatggaca

SEQ ID NO: 1641482 - DNA, 25 bp, Homo sapien
acactctgtatggacaggctgaagg

SEQ ID NO: 1641483 - DNA, 25 bp, Homo sapien
cctgccagggaatgcacactctgta

SEQ ID NO: 1641484 - DNA, 25 bp, Homo sapien
aatgcacactctgtatggacaggct

SEQ ID NO: 1641485 - DNA, 25 bp, Homo sapien
tgtcctctgtggagaagagcttggg

SEQ ID NO: 1641486 - DNA, 25 bp, Homo sapien
tccaggaactctcttgtcagggctg

SEQ ID NO: 1641487 - DNA, 25 bp, Homo sapien
gggctccaggaactctcttgtcagg

SEQ ID NO: 1641488 - DNA, 25 bp, Homo sapien
caggaactctcttgtcagggctgct

SEQ ID NO: 1641489 - DNA, 25 bp, Homo sapien
gaaatgtatgacgtgagcccacagc

SEQ ID NO: 1641490 - DNA, 25 bp, Homo sapien
acagcctaaggcagtggacagtcca

SEQ ID NO: 1641491 - DNA, 25 bp, Homo sapien
gacactcactgggttacattacaaa

SEQ ID NO: 1641492 - DNA, 25 bp, Homo sapien
caagggcctgtaaccacaactggaa

SEQ ID NO: 1641493 - DNA, 25 bp, Homo sapien
ctggaaccttgaacacttggctgtc

SEQ ID NO: 1641494 - DNA, 25 bp, Homo sapien
aacacttggctgtcgcccggatctg

SEQ ID NO: 1641495 - DNA, 25 bp, Homo sapien
gtgccctcacaccagtggtcactgg

SEQ ID NO: 1641496 - DNA, 25 bp, Homo sapien
ctggaagtcaaattactgcccactt

SEQ ID NO: 1641497 - DNA, 25 bp, Homo sapien
ggaatccagaacaaattaagtgttg

SEQ ID NO: 1641498 - DNA, 25 bp, Homo sapien
aacaaattaagtgttgaccacagcg

SEQ ID NO: 1641499 - DNA, 25 bp, Homo sapien
tgtaggaccctatgagtgtggaatc

SEQ ID NO: 1641500 - DNA, 25 bp, Homo sapien
tgtcacaaggaatgatgtaggaccc

SEQ ID NO: 1641501 - DNA, 25 bp, Homo sapien
actgagaagaacagcggactctata

SEQ ID NO: 1641502 - DNA, 25 bp, Homo sapien
tgccaggccaataactcagccagtg

SEQ ID NO: 1641503 - DNA, 25 bp, Homo sapien
gcaggactacagtcaagacaatcac

SEQ ID NO: 1641504 - DNA, 25 bp, Homo sapien
gatgggaacatccagcaacacacac

SEQ ID NO: 1641505 - DNA, 25 bp, Homo sapien
tggcacacacttggagacacacaga

SEQ ID NO: 1641506 - DNA, 25 bp, Homo sapien
cacagaagacagtcagtggcacaca

SEQ ID NO: 1641507 - DNA, 25 bp, Homo sapien
aaactcttgggtagagctgcccacc

SEQ ID NO: 1641508 - DNA, 25 bp, Homo sapien
tatagacagggtaagaataccagcc

SEQ ID NO: 1641509 - DNA, 25 bp, Homo sapien
tccaaacccgtggaggacaaggatg

SEQ ID NO: 1641510 - DNA, 25 bp, Homo sapien
gaggctcagaacacaacctacctgt

SEQ ID NO: 1641511 - DNA, 25 bp, Homo sapien
ctccaaacccgtggaggacaaggat

SEQ ID NO: 1641512 - DNA, 25 bp, Homo sapien
ccaaacccgtggaggacaaggatgc

SEQ ID NO: 1641513 - DNA, 25 bp, Homo sapien
tacattttctccctatgtggtcgct

SEQ ID NO: 1641514 - DNA, 25 bp, Homo sapien
acaagtttctgataccactgcactg

SEQ ID NO: 1641515 - DNA, 25 bp, Homo sapien
tctgacctgtactcttgaatacaag

SEQ ID NO: 1641516 - DNA, 25 bp, Homo sapien
cactgcactgtctgagaatttccaa

SEQ ID NO: 1641517 - DNA, 25 bp, Homo sapien
caggaggaactgctgctggcaatag

SEQ ID NO: 1641518 - DNA, 25 bp, Homo sapien
tgcaggaggaactgctgctggcaat

SEQ ID NO: 1641519 - DNA, 25 bp, Homo sapien
atgcctgccagggtctggtgcagct

SEQ ID NO: 1641520 - DNA, 25 bp, Homo sapien
tcacatgcctgccagggtctggtgc

SEQ ID NO: 1641521 - DNA, 25 bp, Homo sapien
caggctctatgcatacatgggacca

SEQ ID NO: 1641522 - DNA, 25 bp, Homo sapien
gcctcggtgtggactgatgcagaac

SEQ ID NO: 1641523 - DNA, 25 bp, Homo sapien
ccaggccctgtgtgagttcaggcaa

SEQ ID NO: 1641524 - DNA, 25 bp, Homo sapien
cataagtaagtaaagtggccgcacc

SEQ ID NO: 1641525 - DNA, 25 bp, Homo sapien
gctccaccgacagtcacaataaaaa

SEQ ID NO: 1641526 - DNA, 25 bp, Homo sapien
agctccaccgacagtcacaataaaa

SEQ ID NO: 1641527 - DNA, 25 bp, Homo sapien
ctccaccgacagtcacaataaaaat

SEQ ID NO: 1641528 - DNA, 25 bp, Homo sapien
taaatccaaccttcccagacgtgtg

SEQ ID NO: 1641529 - DNA, 25 bp, Homo sapien
cagaatcttagacccgggctttagc

SEQ ID NO: 1641530 - DNA, 25 bp, Homo sapien
gatgtgtccactcctaggaccccaa

SEQ ID NO: 1641531 - DNA, 25 bp, Homo sapien
tgtgagaacactaggaacatcctgc

SEQ ID NO: 1641532 - DNA, 25 bp, Homo sapien
gacagttccatgtataccgtgagta

SEQ ID NO: 1641533 - DNA, 25 bp, Homo sapien
cagtgtcagacaagcaccccatggt

SEQ ID NO: 1641534 - DNA, 25 bp, Homo sapien
cagtggtcgagagacaatatacccc

SEQ ID NO: 1641535 - DNA, 25 bp, Homo sapien
aatgcatccctgctgatccagaacg

SEQ ID NO: 1641536 - DNA, 25 bp, Homo sapien
caaattttcaaagccttcaaaaatg

SEQ ID NO: 1641537 - DNA, 25 bp, Homo sapien
gggaccccactgtagaataacatca

SEQ ID NO: 1641538 - DNA, 25 bp, Homo sapien
ggggaccccactgtagaataacatc

SEQ ID NO: 1641539 - DNA, 25 bp, Homo sapien
ggaccccactgtagaataacatcac

SEQ ID NO: 1641540 - DNA, 25 bp, Homo sapien
tggggaccccactgtagaataacat

SEQ ID NO: 1641541 - DNA, 25 bp, Homo sapien
ccgtcggcatcacgattggagtgct

SEQ ID NO: 1641542 - DNA, 25 bp, Homo sapien
agcagccctggtgtattttcgatat

SEQ ID NO: 1641543 - DNA, 25 bp, Homo sapien
gaagactggcaggtatgatcgcctt

SEQ ID NO: 1641544 - DNA, 25 bp, Homo sapien
gggtggctctgatatagcagccctg

SEQ ID NO: 1641545 - DNA, 25 bp, Homo sapien
tgcagccagccatcaaatagtgaat

SEQ ID NO: 1641546 - DNA, 25 bp, Homo sapien
tcacctaggtgagcgcattgagcca

SEQ ID NO: 1641547 - DNA, 25 bp, Homo sapien
gagttagcataatacagaagtcccc

SEQ ID NO: 1641548 - DNA, 25 bp, Homo sapien
tcttgcctaaggtgcgtagtccaac

SEQ ID NO: 1641549 - DNA, 25 bp, Homo sapien
gaacctcagtgagtctaacaccgga

SEQ ID NO: 1641550 - DNA, 25 bp, Homo sapien
taacttgccaaggttgttggtggat

SEQ ID NO: 1641551 - DNA, 25 bp, Homo sapien
tatttcacaaggaggatactgatcc

SEQ ID NO: 1641552 - DNA, 25 bp, Homo sapien
ttactcttctcacacacgatatggg

SEQ ID NO: 1641553 - DNA, 25 bp, Homo sapien
catgggatcatttctgagctgagat

SEQ ID NO: 1641554 - DNA, 25 bp, Homo sapien
tctcaccaggttccacgcatacatg

SEQ ID NO: 1641555 - DNA, 25 bp, Homo sapien
ggttccacgcatacatgggatcatt

SEQ ID NO: 1641556 - DNA, 25 bp, Homo sapien
ttgtgaaaaatctcccactcttggt

SEQ ID NO: 1641557 - DNA, 25 bp, Homo sapien
gcaataaccacgatgacaaccacca

SEQ ID NO: 1641558 - DNA, 25 bp, Homo sapien
caatattccggcgtagacactcttt

SEQ ID NO: 1641559 - DNA, 25 bp, Homo sapien
tccggcgtagacactctttgaaaac

SEQ ID NO: 1641560 - DNA, 25 bp, Homo sapien
attccacagcaataaccacgatgac

SEQ ID NO: 1641561 - DNA, 25 bp, Homo sapien
aaacaactgataagagcctgagaag

SEQ ID NO: 1641562 - DNA, 25 bp, Homo sapien
gagtgtcccgaagagcctgaacagc

SEQ ID NO: 1641563 - DNA, 25 bp, Homo sapien
cgctccaggagctttgggcttgtca

SEQ ID NO: 1641564 - DNA, 25 bp, Homo sapien
tcagagtgtcccgaagagcctgaac

SEQ ID NO: 1641565 - DNA, 25 bp, Homo sapien
ttttttgcatcgatgctgttgatcg

SEQ ID NO: 1641566 - DNA, 25 bp, Homo sapien
gcatcgatgctgttgatcgctaaat

SEQ ID NO: 1641567 - DNA, 25 bp, Homo sapien
tcgatgctgttgatcgctaaatgta

SEQ ID NO: 1641568 - DNA, 25 bp, Homo sapien
ttttgcatcgatgctgttgatcgct

SEQ ID NO: 1641569 - DNA, 25 bp, Homo sapien
tgtagcaaatatgtcctgtccctgg

SEQ ID NO: 1641570 - DNA, 25 bp, Homo sapien
gagttaagcctgtgtcctcgcctgt

SEQ ID NO: 1641571 - DNA, 25 bp, Homo sapien
tatcatttcatacccaacagagtgg

SEQ ID NO: 1641572 - DNA, 25 bp, Homo sapien
taagaatattcatagcggcagtagc

SEQ ID NO: 1641573 - DNA, 25 bp, Homo sapien
gtgcttgtcgggtgcagctagatgg

SEQ ID NO: 1641574 - DNA, 25 bp, Homo sapien
tatgtgaaagagtctgggtgcttgt

SEQ ID NO: 1641575 - DNA, 25 bp, Homo sapien
ttgttatgtgaaagagtctgggtgc

SEQ ID NO: 1641576 - DNA, 25 bp, Homo sapien
agagtctgggtgcttgtcgggtgca

SEQ ID NO: 1641577 - DNA, 25 bp, Homo sapien
gacgacaccccaagcaggatcttgc

SEQ ID NO: 1641578 - DNA, 25 bp, Homo sapien
gaaggcaaacaggaggcctaagacg

SEQ ID NO: 1641579 - DNA, 25 bp, Homo sapien
gagacttctctaagatgttgaggac

SEQ ID NO: 1641580 - DNA, 25 bp, Homo sapien
ccaacaatctgagacttctctaaga

SEQ ID NO: 1641581 - DNA, 25 bp, Homo sapien
cactttgatgctcccaatatgatga

SEQ ID NO: 1641582 - DNA, 25 bp, Homo sapien
tgttcacgagcacaccccatgagga

SEQ ID NO: 1641583 - DNA, 25 bp, Homo sapien
agtcactttgatgctcccaatatga

SEQ ID NO: 1641584 - DNA, 25 bp, Homo sapien
aagctggttatgttcacgagcacac

SEQ ID NO: 1641585 - DNA, 25 bp, Homo sapien
cagggtaagacgaagacgagctgca

SEQ ID NO: 1641586 - DNA, 25 bp, Homo sapien
agataagaccggcagacgcgactgt

SEQ ID NO: 1641587 - DNA, 25 bp, Homo sapien
tgtaacacgtagaagcagccaaggg

SEQ ID NO: 1641588 - DNA, 25 bp, Homo sapien
gcgactgtaggaggcaatggacact

SEQ ID NO: 1641589 - DNA, 25 bp, Homo sapien
tttaaagcccacaactccccttgca

SEQ ID NO: 1641590 - DNA, 25 bp, Homo sapien
aagcccacaactccccttgcagtcc

SEQ ID NO: 1641591 - DNA, 25 bp, Homo sapien
ttaaagcccacaactccccttgcag

SEQ ID NO: 1641592 - DNA, 25 bp, Homo sapien
taaagcccacaactccccttgcagt

SEQ ID NO: 1641593 - DNA, 25 bp, Homo sapien
aggctgttgcttcatagcacaaaag

SEQ ID NO: 1641594 - DNA, 25 bp, Homo sapien
tcaatgaacactagcgtctcctcgc

SEQ ID NO: 1641595 - DNA, 25 bp, Homo sapien
ctcttgcagcttacacaccatgttc

SEQ ID NO: 1641596 - DNA, 25 bp, Homo sapien
gcaacagctctgaatcttgaggctg

SEQ ID NO: 1641597 - DNA, 25 bp, Homo sapien
ttatagcatccagccccacaggaca

SEQ ID NO: 1641598 - DNA, 25 bp, Homo sapien
ggtcttatagcatccagccccacag

SEQ ID NO: 1641599 - DNA, 25 bp, Homo sapien
tcttatagcatccagccccacagga

SEQ ID NO: 1641600 - DNA, 25 bp, Homo sapien
tgggtcttatagcatccagccccac

SEQ ID NO: 1641601 - DNA, 25 bp, Homo sapien
gagatggcccctagaaggcagaaca

SEQ ID NO: 1641602 - DNA, 25 bp, Homo sapien
gtggagatggcccctagaaggcaga

SEQ ID NO: 1641603 - DNA, 25 bp, Homo sapien
tggagatggcccctagaaggcagaa

SEQ ID NO: 1641604 - DNA, 25 bp, Homo sapien
gatggcccctagaaggcagaacagc

SEQ ID NO: 1641605 - DNA, 25 bp, Homo sapien
agtttcagtctggatcccaagctca

SEQ ID NO: 1641606 - DNA, 25 bp, Homo sapien
atcagtttcagtctggatcccaagc

SEQ ID NO: 1641607 - DNA, 25 bp, Homo sapien
ttcagtctggatcccaagctcagtt

SEQ ID NO: 1641608 - DNA, 25 bp, Homo sapien
gctcagttcccatcagtccccgaat

SEQ ID NO: 1641609 - DNA, 25 bp, Homo sapien
cccacttaggtcctcccattggaca

SEQ ID NO: 1641610 - DNA, 25 bp, Homo sapien
tccaccatcttagcttctcaaagca

SEQ ID NO: 1641611 - DNA, 25 bp, Homo sapien
caaagcaggactctcactctcccac

SEQ ID NO: 1641612 - DNA, 25 bp, Homo sapien
tctcactctcccacttaggtcctcc

SEQ ID NO: 1641613 - DNA, 25 bp, Homo sapien
caagctgagtacaagtggagacgca

SEQ ID NO: 1641614 - DNA, 25 bp, Homo sapien
gaaggcgacgattacacagaggagc

SEQ ID NO: 1641615 - DNA, 25 bp, Homo sapien
gaaggctgacaacagatctcacggg

SEQ ID NO: 1641616 - DNA, 25 bp, Homo sapien
tggacctggacctaacaagctgagt

SEQ ID NO: 1641617 - DNA, 25 bp, Homo sapien
gttcgtcagagctctggcagccttc

SEQ ID NO: 1641618 - DNA, 25 bp, Homo sapien
agttcgtcagagctctggcagcctt

SEQ ID NO: 1641619 - DNA, 25 bp, Homo sapien
agagctctggcagccttcctcaaaa

SEQ ID NO: 1641620 - DNA, 25 bp, Homo sapien
gtcagagctctggcagccttcctca

SEQ ID NO: 1641621 - DNA, 25 bp, Homo sapien
gaagctgaaagtccccgaatgggtg

SEQ ID NO: 1641622 - DNA, 25 bp, Homo sapien
tataggaatgagtgtgaggtagaca

SEQ ID NO: 1641623 - DNA, 25 bp, Homo sapien
gcctcctcagatttgaggctaaagt

SEQ ID NO: 1641624 - DNA, 25 bp, Homo sapien
tgagcagggccaaattgtggagacc

SEQ ID NO: 1641625 - DNA, 25 bp, Homo sapien
ggctaaagtgtgctaaagctgcgcc

SEQ ID NO: 1641626 - DNA, 25 bp, Homo sapien
tggtagaagatggggccctcttgag

SEQ ID NO: 1641627 - DNA, 25 bp, Homo sapien
atggtagaagatggggccctcttga

SEQ ID NO: 1641628 - DNA, 25 bp, Homo sapien
gaattgggatgtctggaaacacttc

SEQ ID NO: 1641629 - DNA, 25 bp, Homo sapien
ctctggctcctgcatggggctgggc

SEQ ID NO: 1641630 - DNA, 25 bp, Homo sapien
cctgcatggggctgggcacccactt

SEQ ID NO: 1641631 - DNA, 25 bp, Homo sapien
tctggctcctgcatggggctgggca

SEQ ID NO: 1641632 - DNA, 25 bp, Homo sapien
gcatggggctgggcacccacttgtg

SEQ ID NO: 1641633 - DNA, 25 bp, Homo sapien
ttacaagttcggcagagaagggtca

SEQ ID NO: 1641634 - DNA, 25 bp, Homo sapien
cctctcggtctagcaggaacacagc

SEQ ID NO: 1641635 - DNA, 25 bp, Homo sapien
ggaccaccggtctggactttgctga

SEQ ID NO: 1641636 - DNA, 25 bp, Homo sapien
tcagtaggtcaggatgggaccaccg

SEQ ID NO: 1641637 - DNA, 25 bp, Homo sapien
tcctgagaggagtgggttgccatcc

SEQ ID NO: 1641638 - DNA, 25 bp, Homo sapien
gacagcaacttgctcgcaattggcc

SEQ ID NO: 1641639 - DNA, 25 bp, Homo sapien
tggcctcctttacagttccaggtaa

SEQ ID NO: 1641640 - DNA, 25 bp, Homo sapien
cagaaggcctctagcatggaggaac

SEQ ID NO: 1641641 - DNA, 25 bp, Homo sapien
gagtaccagctacggcggtctgcat

SEQ ID NO: 1641642 - DNA, 25 bp, Homo sapien
ctacggcggtctgcatttgtgcagc

SEQ ID NO: 1641643 - DNA, 25 bp, Homo sapien
cagctccacatcaaaagctggggct

SEQ ID NO: 1641644 - DNA, 25 bp, Homo sapien
tccacatcaaaagctggggctggaa

SEQ ID NO: 1641645 - DNA, 25 bp, Homo sapien
ccaaagcccatacttcgtcaggtag

SEQ ID NO: 1641646 - DNA, 25 bp, Homo sapien
cttagaaatttggaggcaggctggc

SEQ ID NO: 1641647 - DNA, 25 bp, Homo sapien
ctgcttagaaatttggaggcaggct

SEQ ID NO: 1641648 - DNA, 25 bp, Homo sapien
tacttcgtcaggtagacttatttcc

SEQ ID NO: 1641649 - DNA, 25 bp, Homo sapien
gcctcattcgtaatcctggtctggg

SEQ ID NO: 1641650 - DNA, 25 bp, Homo sapien
ctgttacaaagtgccccagcagaga

SEQ ID NO: 1641651 - DNA, 25 bp, Homo sapien
aatacccacagtgagaattagatga

SEQ ID NO: 1641652 - DNA, 25 bp, Homo sapien
tgctgggttaataaattgcctcatt

SEQ ID NO: 1641653 - DNA, 25 bp, Homo sapien
tcatcacagccgaggggatcatcct

SEQ ID NO: 1641654 - DNA, 25 bp, Homo sapien
gcggtggtgcctgggacgctgctgc

SEQ ID NO: 1641655 - DNA, 25 bp, Homo sapien
gggagggcaccaagaaccgaatcat

SEQ ID NO: 1641656 - DNA, 25 bp, Homo sapien
gccgaggggatcatcctcctgttct

SEQ ID NO: 1641657 - DNA, 25 bp, Homo sapien
gaaacgatggcagaacgagaagctc

SEQ ID NO: 1641658 - DNA, 25 bp, Homo sapien
aagctcgggttggatgccggggatg

SEQ ID NO: 1641659 - DNA, 25 bp, Homo sapien
acgagaagctcgggttggatgccgg

SEQ ID NO: 1641660 - DNA, 25 bp, Homo sapien
aaacgatggcagaacgagaagctcg

SEQ ID NO: 1641661 - DNA, 25 bp, Homo sapien
gataacaacaacgacgagggtcgct

SEQ ID NO: 1641662 - DNA, 25 bp, Homo sapien
gaggccttctcccattgtacggatg

SEQ ID NO: 1641663 - DNA, 25 bp, Homo sapien
tgctcagtggagaacggacgatcac

SEQ ID NO: 1641664 - DNA, 25 bp, Homo sapien
cacttgacgagtgccccataggtgg

SEQ ID NO: 1641665 - DNA, 25 bp, Homo sapien
tgggtctcgtgtagacccgcctcat

SEQ ID NO: 1641666 - DNA, 25 bp, Homo sapien
ccgccacgtccatgtaagatttggg

SEQ ID NO: 1641667 - DNA, 25 bp, Homo sapien
ggtggcggcgatggcttctctttcc

SEQ ID NO: 1641668 - DNA, 25 bp, Homo sapien
gtaagacccgccacgtccatgtaag

SEQ ID NO: 1641669 - DNA, 25 bp, Homo sapien
gtactcagggaaggcgcggccataa

SEQ ID NO: 1641670 - DNA, 25 bp, Homo sapien
atcgccctcgctgtcagagctgcag

SEQ ID NO: 1641671 - DNA, 25 bp, Homo sapien
tgcagccgctgacgtcggtgatctc

SEQ ID NO: 1641672 - DNA, 25 bp, Homo sapien
gcggccataaggacccagcaggcca

SEQ ID NO: 1641673 - DNA, 25 bp, Homo sapien
gggctgtccagacgcaatttatctg

SEQ ID NO: 1641674 - DNA, 25 bp, Homo sapien
aatgggaaagggctgtccagacgca

SEQ ID NO: 1641675 - DNA, 25 bp, Homo sapien
cagacgcaatttatctgtctcggag

SEQ ID NO: 1641676 - DNA, 25 bp, Homo sapien
ttatctgtctcggaggtgaacaggg

SEQ ID NO: 1641677 - DNA, 25 bp, Homo sapien
gagaatccgcttgttgtagtagtaa

SEQ ID NO: 1641678 - DNA, 25 bp, Homo sapien
ccctttggtcttgtggagaatccgc

SEQ ID NO: 1641679 - DNA, 25 bp, Homo sapien
ccagcagcgggtaattgacaagcac

SEQ ID NO: 1641680 - DNA, 25 bp, Homo sapien
tgacaagcacgactttgctgaagtt

SEQ ID NO: 1641681 - DNA, 25 bp, Homo sapien
ttgcatttgcgaataccccacagcc

SEQ ID NO: 1641682 - DNA, 25 bp, Homo sapien
catttgcgaataccccacagccggg

SEQ ID NO: 1641683 - DNA, 25 bp, Homo sapien
gggcttgcatttgcgaataccccac

SEQ ID NO: 1641684 - DNA, 25 bp, Homo sapien
tgtggggcttgcatttgcgaatacc

SEQ ID NO: 1641685 - DNA, 25 bp, Homo sapien
tgtaggcccaatccgggaaggcaaa

SEQ ID NO: 1641686 - DNA, 25 bp, Homo sapien
cttgtaggcccaatccgggaaggca

SEQ ID NO: 1641687 - DNA, 25 bp, Homo sapien
ttgtaggcccaatccgggaaggcaa

SEQ ID NO: 1641688 - DNA, 25 bp, Homo sapien
cgaaatctcatctcccatgcagaag

SEQ ID NO: 1641689 - DNA, 25 bp, Homo sapien
agcatcacgtctcacatgcagaggg

SEQ ID NO: 1641690 - DNA, 25 bp, Homo sapien
caagccctgggtccaacttctgtgt

SEQ ID NO: 1641691 - DNA, 25 bp, Homo sapien
gaacacactgtacgatggagacggt

SEQ ID NO: 1641692 - DNA, 25 bp, Homo sapien
ggtcggagacgcagctacagtccat

SEQ ID NO: 1641693 - DNA, 25 bp, Homo sapien
agagaaggtcggagacgcagctaca

SEQ ID NO: 1641694 - DNA, 25 bp, Homo sapien
gcgaagagaaggtcggagacgcagc

SEQ ID NO: 1641695 - DNA, 25 bp, Homo sapien
ggcggggcgaagagaaggtcggaga

SEQ ID NO: 1641696 - DNA, 25 bp, Homo sapien
ctatagccacgtccatgtgtacaca

SEQ ID NO: 1641697 - DNA, 25 bp, Homo sapien
ggccggccctcgacaggcaccagga

SEQ ID NO: 1641698 - DNA, 25 bp, Homo sapien
ctgtccgtccagactatagccacgt

SEQ ID NO: 1641699 - DNA, 25 bp, Homo sapien
cgtccagactatagccacgtccatg

SEQ ID NO: 1641700 - DNA, 25 bp, Homo sapien
caccctgtttctctgggactgagcc

SEQ ID NO: 1641701 - DNA, 25 bp, Homo sapien
tgccggggtcctctcagggtcgcac

SEQ ID NO: 1641702 - DNA, 25 bp, Homo sapien
cagggtcgcactcacttggtccttc

SEQ ID NO: 1641703 - DNA, 25 bp, Homo sapien
cttccaccctgtttctctgggactg

SEQ ID NO: 1641704 - DNA, 25 bp, Homo sapien
tagagagggatgtgagcgacaggtg

SEQ ID NO: 1641705 - DNA, 25 bp, Homo sapien
gaagtcaggtacaggtagagaggga

SEQ ID NO: 1641706 - DNA, 25 bp, Homo sapien
gcgacaggtgtgctcttaggtgacc

SEQ ID NO: 1641707 - DNA, 25 bp, Homo sapien
tcttaggtgacctgtgtgtggccag

SEQ ID NO: 1641708 - DNA, 25 bp, Homo sapien
caggtgagaggaaataggtgttacc

SEQ ID NO: 1641709 - DNA, 25 bp, Homo sapien
gcaggtatgaggagatagatgttac

SEQ ID NO: 1641710 - DNA, 25 bp, Homo sapien
acaggtatggaggacaggtgttgcg

SEQ ID NO: 1641711 - DNA, 25 bp, Homo sapien
gacaggtgttgcgtgcaggcaggta

SEQ ID NO: 1641712 - DNA, 25 bp, Homo sapien
gtgtttaaagttcggatcccgcagc

SEQ ID NO: 1641713 - DNA, 25 bp, Homo sapien
ttaaagttcggatcccgcagccatg

SEQ ID NO: 1641714 - DNA, 25 bp, Homo sapien
catccgctccggtccggggagaagt

SEQ ID NO: 1641715 - DNA, 25 bp, Homo sapien
tttctgggcttttcgcatccgctcc

SEQ ID NO: 1641716 - DNA, 25 bp, Homo sapien
gtcgaatcgcgactctaaataaggt

SEQ ID NO: 1641717 - DNA, 25 bp, Homo sapien
gggcgcgatcgatggaatataattt

SEQ ID NO: 1641718 - DNA, 25 bp, Homo sapien
tcaaatttgaaaacagatgtcgaat

SEQ ID NO: 1641719 - DNA, 25 bp, Homo sapien
cgactctaaataaggttcgatcccg

SEQ ID NO: 1641720 - DNA, 25 bp, Homo sapien
gggcagcccctggaggcttctaccc

SEQ ID NO: 1641721 - DNA, 25 bp, Homo sapien
tgggcagcccctggaggcttctacc

SEQ ID NO: 1641722 - DNA, 25 bp, Homo sapien
ctgggcagcccctggaggcttctac

SEQ ID NO: 1641723 - DNA, 25 bp, Homo sapien
tggtctcagagactagaaccctgga

SEQ ID NO: 1641724 - DNA, 25 bp, Homo sapien
agcctggacctttgggacatggaag

SEQ ID NO: 1641725 - DNA, 25 bp, Homo sapien
tgtctcgcctcaatcctacaggtgg

SEQ ID NO: 1641726 - DNA, 25 bp, Homo sapien
ttccctggacagcatgaccttagcc

SEQ ID NO: 1641727 - DNA, 25 bp, Homo sapien
actgtcgtcactaatgtgggtgtca

SEQ ID NO: 1641728 - DNA, 25 bp, Homo sapien
cgtcactaatgtgggtgtcagtagc

SEQ ID NO: 1641729 - DNA, 25 bp, Homo sapien
ccccactgtcgtcactaatgtgggt

SEQ ID NO: 1641730 - DNA, 25 bp, Homo sapien
gtaggcccccactgtcgtcactaat

SEQ ID NO: 1641731 - DNA, 25 bp, Homo sapien
tcttgtgtccagtaaagggcagctg

SEQ ID NO: 1641732 - DNA, 25 bp, Homo sapien
gatcctcttgtgtccagtaaagggc

SEQ ID NO: 1641733 - DNA, 25 bp, Homo sapien
cctcttgtgtccagtaaagggcagc

SEQ ID NO: 1641734 - DNA, 25 bp, Homo sapien
aggatcctcttgtgtccagtaaagg

SEQ ID NO: 1641735 - DNA, 25 bp, Homo sapien
tgccccagccacagcgacccctagg

SEQ ID NO: 1641736 - DNA, 25 bp, Homo sapien
tgtgccccagccacagcgaccccta

SEQ ID NO: 1641737 - DNA, 25 bp, Homo sapien
ccacagcgacccctaggccaggcat

SEQ ID NO: 1641738 - DNA, 25 bp, Homo sapien
ccagccacagcgacccctaggccag

SEQ ID NO: 1641739 - DNA, 25 bp, Homo sapien
gcgatgtagactggacctagcgtcc

SEQ ID NO: 1641740 - DNA, 25 bp, Homo sapien
ccagaatttgagacctgtagccagt

SEQ ID NO: 1641741 - DNA, 25 bp, Homo sapien
tagtcttgatcaccccagatggaag

SEQ ID NO: 1641742 - DNA, 25 bp, Homo sapien
gcctgctgcctcagtgatctcagaa

SEQ ID NO: 1641743 - DNA, 25 bp, Homo sapien
tagctgggattacagtgcaccgcca

SEQ ID NO: 1641744 - DNA, 25 bp, Homo sapien
gggattacagtgcaccgccaccatg

SEQ ID NO: 1641745 - DNA, 25 bp, Homo sapien
tgggattacagtgcaccgccaccat

SEQ ID NO: 1641746 - DNA, 25 bp, Homo sapien
agctgggattacagtgcaccgccac

SEQ ID NO: 1641747 - DNA, 25 bp, Homo sapien
gaaaagagttaacctggcaggctcc

SEQ ID NO: 1641748 - DNA, 25 bp, Homo sapien
gaagtgcatgcctggtttcccgagt

SEQ ID NO: 1641749 - DNA, 25 bp, Homo sapien
tctatctaggctgttcgtgcaggca

SEQ ID NO: 1641750 - DNA, 25 bp, Homo sapien
tctatctaggctgttcgtgcaggcc

SEQ ID NO: 1641751 - DNA, 25 bp, Homo sapien
ccctccccgggcttgtgatgggacg

SEQ ID NO: 1641752 - DNA, 25 bp, Homo sapien
gcgggatccctccccgggcttgtga

SEQ ID NO: 1641753 - DNA, 25 bp, Homo sapien
ggacggcgctgtgggcccgagcagc

SEQ ID NO: 1641754 - DNA, 25 bp, Homo sapien
cttgtgatgggacggcgctgtgggc

SEQ ID NO: 1641755 - DNA, 25 bp, Homo sapien
cagctcctccccgtccacagcctca

SEQ ID NO: 1641756 - DNA, 25 bp, Homo sapien
tcacacgggttccatctgcagctcc

SEQ ID NO: 1641757 - DNA, 25 bp, Homo sapien
tgcagctcctccccgtccacagcct

SEQ ID NO: 1641758 - DNA, 25 bp, Homo sapien
gctcctccccgtccacagcctcaat

SEQ ID NO: 1641759 - DNA, 25 bp, Homo sapien
gcagcgtgggagccgatgaccacca

SEQ ID NO: 1641760 - DNA, 25 bp, Homo sapien
gcgtgggagccgatgaccaccaggg

SEQ ID NO: 1641761 - DNA, 25 bp, Homo sapien
cgtgggagccgatgaccaccagggt

SEQ ID NO: 1641762 - DNA, 25 bp, Homo sapien
agcgtgggagccgatgaccaccagg

SEQ ID NO: 1641763 - DNA, 25 bp, Homo sapien
ctgcaggaaagccggcagctcaggg

SEQ ID NO: 1641764 - DNA, 25 bp, Homo sapien
aaagccggcagctcagggccacact

SEQ ID NO: 1641765 - DNA, 25 bp, Homo sapien
ggccacactcctgcacctggctccc

SEQ ID NO: 1641766 - DNA, 25 bp, Homo sapien
tcccaccatccaccccagctgctca

SEQ ID NO: 1641767 - DNA, 25 bp, Homo sapien
tccagccagagcatactgatgcgct

SEQ ID NO: 1641768 - DNA, 25 bp, Homo sapien
gagcatactgatgcgctgggctcac

SEQ ID NO: 1641769 - DNA, 25 bp, Homo sapien
tgatgcgctgggctcacctctcggc

SEQ ID NO: 1641770 - DNA, 25 bp, Homo sapien
gagatgcctccagccagagcatact

SEQ ID NO: 1641771 - DNA, 25 bp, Homo sapien
agctgaagccaagtcgtgcctgtgc

SEQ ID NO: 1641772 - DNA, 25 bp, Homo sapien
tacaagctccaggttctcgggatcg

SEQ ID NO: 1641773 - DNA, 25 bp, Homo sapien
tctcaaactggtggcccaagggcca

SEQ ID NO: 1641774 - DNA, 25 bp, Homo sapien
gcacataacttgcaggcccctgaag

SEQ ID NO: 1641775 - DNA, 25 bp, Homo sapien
tggtcacaccccagaaagcaggaaa

SEQ ID NO: 1641776 - DNA, 25 bp, Homo sapien
ggagtaggtttaaggcacagcagcc

SEQ ID NO: 1641777 - DNA, 25 bp, Homo sapien
gaaacgggaacagatctaggccagt

SEQ ID NO: 1641778 - DNA, 25 bp, Homo sapien
tacatctaggcttgggcggacttgg

SEQ ID NO: 1641779 - DNA, 25 bp, Homo sapien
gcttggactccaaggtgcgcagata

SEQ ID NO: 1641780 - DNA, 25 bp, Homo sapien
caaagagcacaagcttggactccaa

SEQ ID NO: 1641781 - DNA, 25 bp, Homo sapien
cagatagagaatgtaacaggcgccg

SEQ ID NO: 1641782 - DNA, 25 bp, Homo sapien
taacaggcgccgaaaaagacagcca

SEQ ID NO: 1641783 - DNA, 25 bp, Homo sapien
tagtactccacgttgcgtacgaggc

SEQ ID NO: 1641784 - DNA, 25 bp, Homo sapien
cacatagttgctctggtagtactcc

SEQ ID NO: 1641785 - DNA, 25 bp, Homo sapien
aggcccaggaacacgaacacatagt

SEQ ID NO: 1641786 - DNA, 25 bp, Homo sapien
tgctggtccacgaaggtgctccagg

SEQ ID NO: 1641787 - DNA, 25 bp, Homo sapien
ctgcaccggagggaatcagcttcgg

SEQ ID NO: 1641788 - DNA, 25 bp, Homo sapien
cccagattcctgtacagcaggcagg

SEQ ID NO: 1641789 - DNA, 25 bp, Homo sapien
gccgggtcagtggtggaccgggatg

SEQ ID NO: 1641790 - DNA, 25 bp, Homo sapien
accccagattcctgtacagcaggca

SEQ ID NO: 1641791 - DNA, 25 bp, Homo sapien
cagattcctgtacagcaggcaggga

SEQ ID NO: 1641792 - DNA, 25 bp, Homo sapien
tctctggtccgagggcctagagcca

SEQ ID NO: 1641793 - DNA, 25 bp, Homo sapien
gccaacacttctgcggctcggggct

SEQ ID NO: 1641794 - DNA, 25 bp, Homo sapien
ggggccaacacttctgcggctcggg

SEQ ID NO: 1641795 - DNA, 25 bp, Homo sapien
cggactcccgggtctctggtccgag

SEQ ID NO: 1641796 - DNA, 25 bp, Homo sapien
cgctcagcccttccgcctcggcatc

SEQ ID NO: 1641797 - DNA, 25 bp, Homo sapien
tccgcctcggcatctttctgctggt

SEQ ID NO: 1641798 - DNA, 25 bp, Homo sapien
cagcccttccgcctcggcatctttc

SEQ ID NO: 1641799 - DNA, 25 bp, Homo sapien
cttccgcctcggcatctttctgctg

SEQ ID NO: 1641800 - DNA, 25 bp, Homo sapien
tcgtgaggggtagagctgctgtaac

SEQ ID NO: 1641801 - DNA, 25 bp, Homo sapien
ctgcgtcgtgaggggtagagctgct

SEQ ID NO: 1641802 - DNA, 25 bp, Homo sapien
cgtcgtgaggggtagagctgctgta

SEQ ID NO: 1641803 - DNA, 25 bp, Homo sapien
gcgtcgtgaggggtagagctgctgt

SEQ ID NO: 1641804 - DNA, 25 bp, Homo sapien
cctccaccgaaagacagagcttggg

SEQ ID NO: 1641805 - DNA, 25 bp, Homo sapien
caccaaaggaggagtgcaatagcac

SEQ ID NO: 1641806 - DNA, 25 bp, Homo sapien
aatagcacaattagccccgagcagg

SEQ ID NO: 1641807 - DNA, 25 bp, Homo sapien
gccgtaggagattcaggatggactt

SEQ ID NO: 1641808 - DNA, 25 bp, Homo sapien
gcagtttcgagagtcgcctggcagc

SEQ ID NO: 1641809 - DNA, 25 bp, Homo sapien
aggggatgctgtcccagccgcagtc

SEQ ID NO: 1641810 - DNA, 25 bp, Homo sapien
ctaagttcctgcagtttcgagagtc

SEQ ID NO: 1641811 - DNA, 25 bp, Homo sapien
gttcctgcagtttcgagagtcgcct

SEQ ID NO: 1641812 - DNA, 25 bp, Homo sapien
tttgataattgtccagaaccagaga

SEQ ID NO: 1641813 - DNA, 25 bp, Homo sapien
gataattgtccagaaccagagatgg

SEQ ID NO: 1641814 - DNA, 25 bp, Homo sapien
tatatttgataattgtccagaacca

SEQ ID NO: 1641815 - DNA, 25 bp, Homo sapien
tatttgataattgtccagaaccaga

SEQ ID NO: 1641816 - DNA, 25 bp, Homo sapien
gggaagagatgggcgatgtggtggg

SEQ ID NO: 1641817 - DNA, 25 bp, Homo sapien
tggggcgggaggaatggatagaggg

SEQ ID NO: 1641818 - DNA, 25 bp, Homo sapien
aggaatggatagaggggtgaggaga

SEQ ID NO: 1641819 - DNA, 25 bp, Homo sapien
gaatacaaaattggggggactgaca

SEQ ID NO: 1641820 - DNA, 25 bp, Homo sapien
tcagtagtaggtttccttctccacc

SEQ ID NO: 1641821 - DNA, 25 bp, Homo sapien
gacagagtgggtgcccggagagatg

SEQ ID NO: 1641822 - DNA, 25 bp, Homo sapien
caggcaaggcgagccgcccagcaga

SEQ ID NO: 1641823 - DNA, 25 bp, Homo sapien
agagagacaggcaaggcgagccgcc

SEQ ID NO: 1641824 - DNA, 25 bp, Homo sapien
acagagacccgtgagaagacagagt

SEQ ID NO: 1641825 - DNA, 25 bp, Homo sapien
gagtttgcggatttcgtcgtagacg

SEQ ID NO: 1641826 - DNA, 25 bp, Homo sapien
caggatgagtttgcggatttcgtcg

SEQ ID NO: 1641827 - DNA, 25 bp, Homo sapien
cctgggttcctgcgcaggatgagtt

SEQ ID NO: 1641828 - DNA, 25 bp, Homo sapien
gatttcgtcgtagacgaagatgagg

SEQ ID NO: 1641829 - DNA, 25 bp, Homo sapien
aaacagcccgaagatcaggatcttg

SEQ ID NO: 1641830 - DNA, 25 bp, Homo sapien
ctcaaacagcccgaagatcaggatc

SEQ ID NO: 1641831 - DNA, 25 bp, Homo sapien
cagggccgtctcctcaaacagcccg

SEQ ID NO: 1641832 - DNA, 25 bp, Homo sapien
cagcccgaagatcaggatcttgttc

SEQ ID NO: 1641833 - DNA, 25 bp, Homo sapien
gaccgagttcctccgggtcttgcag

SEQ ID NO: 1641834 - DNA, 25 bp, Homo sapien
cactggacgacaacgatgctcacaa

SEQ ID NO: 1641835 - DNA, 25 bp, Homo sapien
tcttgcagatgatcagatcggccca

SEQ ID NO: 1641836 - DNA, 25 bp, Homo sapien
gatgctcacaaagaaggccgtgtgg

SEQ ID NO: 1641837 - DNA, 25 bp, Homo sapien
ggggatcttacggtgggcagagaca

SEQ ID NO: 1641838 - DNA, 25 bp, Homo sapien
ggatcttacggtgggcagagacaca

SEQ ID NO: 1641839 - DNA, 25 bp, Homo sapien
ccggggatcttacggtgggcagaga

SEQ ID NO: 1641840 - DNA, 25 bp, Homo sapien
cccggggatcttacggtgggcagag

SEQ ID NO: 1641841 - DNA, 25 bp, Homo sapien
tgcggtcatcccagttcagccggat

SEQ ID NO: 1641842 - DNA, 25 bp, Homo sapien
gttcagccggatgcccaccaggttg

SEQ ID NO: 1641843 - DNA, 25 bp, Homo sapien
gtcattgacggtgcggtcatcccag

SEQ ID NO: 1641844 - DNA, 25 bp, Homo sapien
ggttgccgggcaagaagccattttc

SEQ ID NO: 1641845 - DNA, 25 bp, Homo sapien
tggtaaggagatggagtccccggtg

SEQ ID NO: 1641846 - DNA, 25 bp, Homo sapien
ggcactgctctaggcccggcactgg

SEQ ID NO: 1641847 - DNA, 25 bp, Homo sapien
ggtaaggagatggagtccccggtgc

SEQ ID NO: 1641848 - DNA, 25 bp, Homo sapien
ctctaggcccggcactgggtggtaa

SEQ ID NO: 1641849 - DNA, 25 bp, Homo sapien
cgtccgcgggttcctgggctgtctc

SEQ ID NO: 1641850 - DNA, 25 bp, Homo sapien
catgatgtcgctttcggcagcctcg

SEQ ID NO: 1641851 - DNA, 25 bp, Homo sapien
ggcagcctcgtacgccagtgagatg

SEQ ID NO: 1641852 - DNA, 25 bp, Homo sapien
gatgagtctctcattgaccaatttg

SEQ ID NO: 1641853 - DNA, 25 bp, Homo sapien
tgcccagatcgatgcagaggatggt

SEQ ID NO: 1641854 - DNA, 25 bp, Homo sapien
gatctccgggatattgctggtcagg

SEQ ID NO: 1641855 - DNA, 25 bp, Homo sapien
cagggtgtaggcaatggacttcttt

SEQ ID NO: 1641856 - DNA, 25 bp, Homo sapien
tgaacagcaggaagggcgtgatctc

SEQ ID NO: 1641857 - DNA, 25 bp, Homo sapien
aggcaggctcagagcaggcgcccat

SEQ ID NO: 1641858 - DNA, 25 bp, Homo sapien
acaggcaggctcagagcaggcgccc

SEQ ID NO: 1641859 - DNA, 25 bp, Homo sapien
gcacaggcaggctcagagcaggcgc

SEQ ID NO: 1641860 - DNA, 25 bp, Homo sapien
ctgtggcacaggcaggctcagagca

SEQ ID NO: 1641861 - DNA, 25 bp, Homo sapien
ggagtcgttcacaccatccccggtc

SEQ ID NO: 1641862 - DNA, 25 bp, Homo sapien
tccccggtcacagccacaattgcac

SEQ ID NO: 1641863 - DNA, 25 bp, Homo sapien
tggccaccccaatgtcggccttctt

SEQ ID NO: 1641864 - DNA, 25 bp, Homo sapien
agcgatgcccatggccaccccaatg

SEQ ID NO: 1641865 - DNA, 25 bp, Homo sapien
ggcgaagacgatctcggtgtgattc

SEQ ID NO: 1641866 - DNA, 25 bp, Homo sapien
tgtgattctgcaggatctcgtcgat

SEQ ID NO: 1641867 - DNA, 25 bp, Homo sapien
cgatttgctcggaggtgaagtcctt

SEQ ID NO: 1641868 - DNA, 25 bp, Homo sapien
tgccgtggatcacgcaggccttggc

SEQ ID NO: 1641869 - DNA, 25 bp, Homo sapien
tcgttgccctcagagatgatgccca

SEQ ID NO: 1641870 - DNA, 25 bp, Homo sapien
gggtgatcgccggtgaccatgatga

SEQ ID NO: 1641871 - DNA, 25 bp, Homo sapien
taacctggctgacgggaatgttgag

SEQ ID NO: 1641872 - DNA, 25 bp, Homo sapien
gttaacctggctgacgggaatgttg

SEQ ID NO: 1641873 - DNA, 25 bp, Homo sapien
aggcattgttttttagggatggcct

SEQ ID NO: 1641874 - DNA, 25 bp, Homo sapien
ctgcaggcattgttttttagggatg

SEQ ID NO: 1641875 - DNA, 25 bp, Homo sapien
cattgttttttagggatggcctctc

SEQ ID NO: 1641876 - DNA, 25 bp, Homo sapien
cccacgcctggctttgcctccccca

SEQ ID NO: 1641877 - DNA, 25 bp, Homo sapien
gtcatcacagtcgaaggcaaagccc

SEQ ID NO: 1641878 - DNA, 25 bp, Homo sapien
cgtggtgaagttcacgtcatcacag

SEQ ID NO: 1641879 - DNA, 25 bp, Homo sapien
caaagcagaggttgtccgtggtgaa

SEQ ID NO: 1641880 - DNA, 25 bp, Homo sapien
ctcctcgggcaggtaataatggcag

SEQ ID NO: 1641881 - DNA, 25 bp, Homo sapien
catcaccagcaggtatcggttgtcg

SEQ ID NO: 1641882 - DNA, 25 bp, Homo sapien
gggtcctcggtctcatggatggaga

SEQ ID NO: 1641883 - DNA, 25 bp, Homo sapien
cgagctcaaggtaggcattctggaa

SEQ ID NO: 1641884 - DNA, 25 bp, Homo sapien
ccttcatttcctcgtccagaggctg

SEQ ID NO: 1641885 - DNA, 25 bp, Homo sapien
caggctggctctcccggaaagccca

SEQ ID NO: 1641886 - DNA, 25 bp, Homo sapien
ctctttacaggcgtcataaggaacc

SEQ ID NO: 1641887 - DNA, 25 bp, Homo sapien
aggcgtcataaggaacctgaggtcc

SEQ ID NO: 1641888 - DNA, 25 bp, Homo sapien
tacaggcgtcataaggaacctgagg

SEQ ID NO: 1641889 - DNA, 25 bp, Homo sapien
gcgttcacgcatcagcttcacggag

SEQ ID NO: 1641890 - DNA, 25 bp, Homo sapien
ttgagcagggcagactcagacgcat

SEQ ID NO: 1641891 - DNA, 25 bp, Homo sapien
ttcacggagccagaggacagctcga

SEQ ID NO: 1641892 - DNA, 25 bp, Homo sapien
ggaattgaagggaatctcagccact

SEQ ID NO: 1641893 - DNA, 25 bp, Homo sapien
gtcctgaccacccttgaagacagcg

SEQ ID NO: 1641894 - DNA, 25 bp, Homo sapien
tgcgaactcttgtcaaatgaggtcc

SEQ ID NO: 1641895 - DNA, 25 bp, Homo sapien
gacagcgcgattgcagagcccagcg

SEQ ID NO: 1641896 - DNA, 25 bp, Homo sapien
cccaggtgtgcgaactcttgtcaaa

SEQ ID NO: 1641897 - DNA, 25 bp, Homo sapien
cagtggtgtcagcctcgtggatctg

SEQ ID NO: 1641898 - DNA, 25 bp, Homo sapien
agtggtgtcagcctcgtggatctgg

SEQ ID NO: 1641899 - DNA, 25 bp, Homo sapien
ctcagtggtgtcagcctcgtggatc

SEQ ID NO: 1641900 - DNA, 25 bp, Homo sapien
tcagtggtgtcagcctcgtggatct

SEQ ID NO: 1641901 - DNA, 25 bp, Homo sapien
cgcttggcggtcagcgtcagacaca

SEQ ID NO: 1641902 - DNA, 25 bp, Homo sapien
gcttggcggtcagcgtcagacacac

SEQ ID NO: 1641903 - DNA, 25 bp, Homo sapien
tgcgcttggcggtcagcgtcagaca

SEQ ID NO: 1641904 - DNA, 25 bp, Homo sapien
catgcgcttggcggtcagcgtcaga

SEQ ID NO: 1641905 - DNA, 25 bp, Homo sapien
cccggcagcagggttggatgagcga

SEQ ID NO: 1641906 - DNA, 25 bp, Homo sapien
agttacagggacaagcccggcagca

SEQ ID NO: 1641907 - DNA, 25 bp, Homo sapien
ttggatgagcgacacgagggccaca

SEQ ID NO: 1641908 - DNA, 25 bp, Homo sapien
ctggaggacgagcaagggcaggcaa

SEQ ID NO: 1641909 - DNA, 25 bp, Homo sapien
caagccaggtgtatccgagaatgag

SEQ ID NO: 1641910 - DNA, 25 bp, Homo sapien
tctcgatggcgatgggcgtcttgcc

SEQ ID NO: 1641911 - DNA, 25 bp, Homo sapien
cagccacgccggtgatgagctggat

SEQ ID NO: 1641912 - DNA, 25 bp, Homo sapien
atacggcccatgacagtgcggtcgc

SEQ ID NO: 1641913 - DNA, 25 bp, Homo sapien
tctccaaggggttgtcgtgagtgca

SEQ ID NO: 1641914 - DNA, 25 bp, Homo sapien
gtgcagtcgggagagcgagtctggg

SEQ ID NO: 1641915 - DNA, 25 bp, Homo sapien
gctcggattcgccagtcagggagga

SEQ ID NO: 1641916 - DNA, 25 bp, Homo sapien
aaagaaggtgatgttccgagtctcc

SEQ ID NO: 1641917 - DNA, 25 bp, Homo sapien
ggctgagatgatccgcaggtcagct

SEQ ID NO: 1641918 - DNA, 25 bp, Homo sapien
gctgagatgatccgcaggtcagctg

SEQ ID NO: 1641919 - DNA, 25 bp, Homo sapien
cttgcagccgtgggctgagatgatc

SEQ ID NO: 1641920 - DNA, 25 bp, Homo sapien
acctcctcagcgttcacctgcatct

SEQ ID NO: 1641921 - DNA, 25 bp, Homo sapien
gccagtgatgatcaccacggccgcc

SEQ ID NO: 1641922 - DNA, 25 bp, Homo sapien
agcagccagtgatgatcaccacggc

SEQ ID NO: 1641923 - DNA, 25 bp, Homo sapien
cagccagtgatgatcaccacggccg

SEQ ID NO: 1641924 - DNA, 25 bp, Homo sapien
agccagtgatgatcaccacggccgc

SEQ ID NO: 1641925 - DNA, 25 bp, Homo sapien
tggcgtgagtgcgttaggcccatcc

SEQ ID NO: 1641926 - DNA, 25 bp, Homo sapien
ggtggtaggcggtggcgtgagtgcg

SEQ ID NO: 1641927 - DNA, 25 bp, Homo sapien
ccggcaaaacttgacccactctggg

SEQ ID NO: 1641928 - DNA, 25 bp, Homo sapien
tcggtgcccgcctggataccgtagg

SEQ ID NO: 1641929 - DNA, 25 bp, Homo sapien
ctgagggacagaggactcacacaga

SEQ ID NO: 1641930 - DNA, 25 bp, Homo sapien
actcacacagaaccctccctgggca

SEQ ID NO: 1641931 - DNA, 25 bp, Homo sapien
agggacagaggactcacacagaacc

SEQ ID NO: 1641932 - DNA, 25 bp, Homo sapien
gaggactcacacagaaccctccctg

SEQ ID NO: 1641933 - DNA, 25 bp, Homo sapien
gtctgtgttgtatttccggcagacc

SEQ ID NO: 1641934 - DNA, 25 bp, Homo sapien
atttccggcagacctcttccactga

SEQ ID NO: 1641935 - DNA, 25 bp, Homo sapien
ttgtatttccggcagacctcttcca

SEQ ID NO: 1641936 - DNA, 25 bp, Homo sapien
tgtgttgtatttccggcagacctct

SEQ ID NO: 1641937 - DNA, 25 bp, Homo sapien
cttgggtgagtccttgtcatctttc

SEQ ID NO: 1641938 - DNA, 25 bp, Homo sapien
ttcttgggtgagtccttgtcatctt

SEQ ID NO: 1641939 - DNA, 25 bp, Homo sapien
tcttgggtgagtccttgtcatcttt

SEQ ID NO: 1641940 - DNA, 25 bp, Homo sapien
gatacgatagctgtcagagccacca

SEQ ID NO: 1641941 - DNA, 25 bp, Homo sapien
gtggcgatacgatagctgtcagagc

SEQ ID NO: 1641942 - DNA, 25 bp, Homo sapien
gcgatacgatagctgtcagagccac

SEQ ID NO: 1641943 - DNA, 25 bp, Homo sapien
cgaggtggcgatacgatagctgtca

SEQ ID NO: 1641944 - DNA, 25 bp, Homo sapien
ggcgagaaggggttccaggaggaca

SEQ ID NO: 1641945 - DNA, 25 bp, Homo sapien
gcgagaaggggttccaggaggacac

SEQ ID NO: 1641946 - DNA, 25 bp, Homo sapien
tgcgggcgagaaggggttccaggag

SEQ ID NO: 1641947 - DNA, 25 bp, Homo sapien
ctgcgggcgagaaggggttccagga

SEQ ID NO: 1641948 - DNA, 25 bp, Homo sapien
gcgcccgcgcctcggtaggtgcgcg

SEQ ID NO: 1641949 - DNA, 25 bp, Homo sapien
cagcgcccgcgcctcggtaggtgcg

SEQ ID NO: 1641950 - DNA, 25 bp, Homo sapien
cccgcgcctcggtaggtgcgcgcgt

SEQ ID NO: 1641951 - DNA, 25 bp, Homo sapien
cggctccgcggcgagagagccaggc

SEQ ID NO: 1641952 - DNA, 25 bp, Homo sapien
tccaacaggggctgcgatgtggcaa

SEQ ID NO: 1641953 - DNA, 25 bp, Homo sapien
ccaggggacacccatctgtccagag

SEQ ID NO: 1641954 - DNA, 25 bp, Homo sapien
ctcatagaaattccgaggtttctcc

SEQ ID NO: 1641955 - DNA, 25 bp, Homo sapien
gggaggtctcatagaaattccgagg

SEQ ID NO: 1641956 - DNA, 25 bp, Homo sapien
cttggggagcctgagcagtcccaga

SEQ ID NO: 1641957 - DNA, 25 bp, Homo sapien
agtcttggggagcctgagcagtccc

SEQ ID NO: 1641958 - DNA, 25 bp, Homo sapien
ccagaatggggtcctctccgctgac

SEQ ID NO: 1641959 - DNA, 25 bp, Homo sapien
cccagaatggggtcctctccgctga

SEQ ID NO: 1641960 - DNA, 25 bp, Homo sapien
cagagccaggcctcggacttcgcgg

SEQ ID NO: 1641961 - DNA, 25 bp, Homo sapien
caaaggcaaaatcgcggcgtccggg

SEQ ID NO: 1641962 - DNA, 25 bp, Homo sapien
gagtcctcggttcctgcgcccttct

SEQ ID NO: 1641963 - DNA, 25 bp, Homo sapien
gggcgccggcgcacaagtcctgtcc

SEQ ID NO: 1641964 - DNA, 25 bp, Homo sapien
ctgcgggagcggagactgctggggc

SEQ ID NO: 1641965 - DNA, 25 bp, Homo sapien
ccttcggtcagtccgggcgcccgca

SEQ ID NO: 1641966 - DNA, 25 bp, Homo sapien
ttcggtcagtccgggcgcccgcaca

SEQ ID NO: 1641967 - DNA, 25 bp, Homo sapien
tcggtcagtccgggcgcccgcacag

SEQ ID NO: 1641968 - DNA, 25 bp, Homo sapien
ggtcagtccgggcgcccgcacagcc

SEQ ID NO: 1641969 - DNA, 25 bp, Homo sapien
cggggcgggctggtggcttcggcgg

SEQ ID NO: 1641970 - DNA, 25 bp, Homo sapien
gtggcttcggcggggacgcccaggc

SEQ ID NO: 1641971 - DNA, 25 bp, Homo sapien
tggcttcggcggggacgcccaggcc

SEQ ID NO: 1641972 - DNA, 25 bp, Homo sapien
gccggggcgggctggtggcttcggc

SEQ ID NO: 1641973 - DNA, 25 bp, Homo sapien
actcctggcagacgcgcacgtgggt

SEQ ID NO: 1641974 - DNA, 25 bp, Homo sapien
gccgagtagagcttgccgttgctga

SEQ ID NO: 1641975 - DNA, 25 bp, Homo sapien
gatgcgccggcactcctggcagacg

SEQ ID NO: 1641976 - DNA, 25 bp, Homo sapien
gccccgggtcgtccaggaggcgctg

SEQ ID NO: 1641977 - DNA, 25 bp, Homo sapien
caagaaacggcgtggcgcagctcct

SEQ ID NO: 1641978 - DNA, 25 bp, Homo sapien
gcgccggcgggaacgcgacgtcttg

SEQ ID NO: 1641979 - DNA, 25 bp, Homo sapien
gacgtcttgcggcaagaaacggcgt

SEQ ID NO: 1641980 - DNA, 25 bp, Homo sapien
tcgcggaccgcgcgcagtgacagca

SEQ ID NO: 1641981 - DNA, 25 bp, Homo sapien
cagcatggacggctccttcagagga

SEQ ID NO: 1641982 - DNA, 25 bp, Homo sapien
catgaggcctgagaccgggaatttc

SEQ ID NO: 1641983 - DNA, 25 bp, Homo sapien
tccttgggccaagtgcagaacactg

SEQ ID NO: 1641984 - DNA, 25 bp, Homo sapien
catatttgtacgttggtggcctgaa

SEQ ID NO: 1641985 - DNA, 25 bp, Homo sapien
cagctgacctccgtgtggaccatat

SEQ ID NO: 1641986 - DNA, 25 bp, Homo sapien
tatgaattccatgaccgccacgaag

SEQ ID NO: 1641987 - DNA, 25 bp, Homo sapien
gcacgataaaaatgccaccaatgtt

SEQ ID NO: 1641988 - DNA, 25 bp, Homo sapien
aaatgccaccaatgttctccatgcc

SEQ ID NO: 1641989 - DNA, 25 bp, Homo sapien
agccggttgttctcctgaagctgca

SEQ ID NO: 1641990 - DNA, 25 bp, Homo sapien
agtgtgatctcatcccggaacgggg

SEQ ID NO: 1641991 - DNA, 25 bp, Homo sapien
tagctcgatggtcctcctccttggg

SEQ ID NO: 1641992 - DNA, 25 bp, Homo sapien
ctttagctcgatggtcctcctcctt

SEQ ID NO: 1641993 - DNA, 25 bp, Homo sapien
gcaggcacacgaggggctggaccag

SEQ ID NO: 1641994 - DNA, 25 bp, Homo sapien
ctgggcaggcacacgaggggctgga

SEQ ID NO: 1641995 - DNA, 25 bp, Homo sapien
caggcacacgaggggctggaccagc

SEQ ID NO: 1641996 - DNA, 25 bp, Homo sapien
gggcaggcacacgaggggctggacc

SEQ ID NO: 1641997 - DNA, 25 bp, Homo sapien
ccggtggtattcgttcatggtggac

SEQ ID NO: 1641998 - DNA, 25 bp, Homo sapien
cgtagcccttggtgtcgaggagtcc

SEQ ID NO: 1641999 - DNA, 25 bp, Homo sapien
tgtagttccacatgcgctggtacgt

SEQ ID NO: 1642000 - DNA, 25 bp, Homo sapien
cgctgggctgcttcgactgcatgta

SEQ ID NO: 1642001 - DNA, 25 bp, Homo sapien
aaggtcatggtggagccggcgtgga

SEQ ID NO: 1642002 - DNA, 25 bp, Homo sapien
gatctgccaggtcatcggccgactc

SEQ ID NO: 1642003 - DNA, 25 bp, Homo sapien
agccggcgtggatggtgccatactc

SEQ ID NO: 1642004 - DNA, 25 bp, Homo sapien
tactcgatgttggtctgatctgcca

SEQ ID NO: 1642005 - DNA, 25 bp, Homo sapien
aattcttagagttgacacagggctg

SEQ ID NO: 1642006 - DNA, 25 bp, Homo sapien
tataggaagggaagcccaaacagcc

SEQ ID NO: 1642007 - DNA, 25 bp, Homo sapien
gaatatcaatctgtgcatgcatggg

SEQ ID NO: 1642008 - DNA, 25 bp, Homo sapien
gagactggtgatcaggcaggccaac

SEQ ID NO: 1642009 - DNA, 25 bp, Homo sapien
gaaaatgtgacctataaccaagaga

SEQ ID NO: 1642010 - DNA, 25 bp, Homo sapien
gattacacagattagacaccggcag

SEQ ID NO: 1642011 - DNA, 25 bp, Homo sapien
tagatgatgacggaattagcagaca

SEQ ID NO: 1642012 - DNA, 25 bp, Homo sapien
taagtctacactgagcctggtcgtc

SEQ ID NO: 1642013 - DNA, 25 bp, Homo sapien
aaagtctgatgaagtaatggcctac

SEQ ID NO: 1642014 - DNA, 25 bp, Homo sapien
tcagagagtgtgcaagcccaaagat

SEQ ID NO: 1642015 - DNA, 25 bp, Homo sapien
aattaattgccagcagacccgcaca

SEQ ID NO: 1642016 - DNA, 25 bp, Homo sapien
gaagggcaccctcttcaaatggtag

SEQ ID NO: 1642017 - DNA, 25 bp, Homo sapien
taatgcctgccataccacagttagt

SEQ ID NO: 1642018 - DNA, 25 bp, Homo sapien
caaacaatcctctacagggttataa

SEQ ID NO: 1642019 - DNA, 25 bp, Homo sapien
gactcgcaagtgtccaagccagtgg

SEQ ID NO: 1642020 - DNA, 25 bp, Homo sapien
gccagtggaccaagtgaattgctaa

SEQ ID NO: 1642021 - DNA, 25 bp, Homo sapien
cagactccgctgacacagcgcgtgg

SEQ ID NO: 1642022 - DNA, 25 bp, Homo sapien
ggttataccactcataggggctcag

SEQ ID NO: 1642023 - DNA, 25 bp, Homo sapien
ccagcgtgtactggttctccaggat

SEQ ID NO: 1642024 - DNA, 25 bp, Homo sapien
gggcgtgcccgcaggcatgggtgtg

SEQ ID NO: 1642025 - DNA, 25 bp, Homo sapien
gccagaaacaggacgcagctgacag

SEQ ID NO: 1642026 - DNA, 25 bp, Homo sapien
agctgacagccaggtaggcaagaag

SEQ ID NO: 1642027 - DNA, 25 bp, Homo sapien
agaaacaggacgcagctgacagcca

SEQ ID NO: 1642028 - DNA, 25 bp, Homo sapien
agccaggtaggcaagaagcatgaag

SEQ ID NO: 1642029 - DNA, 25 bp, Homo sapien
cactcggtagaggatgctgatcccc

SEQ ID NO: 1642030 - DNA, 25 bp, Homo sapien
tgctgatccccagggtcataaaggg

SEQ ID NO: 1642031 - DNA, 25 bp, Homo sapien
gatccccagggtcataaagggcttg

SEQ ID NO: 1642032 - DNA, 25 bp, Homo sapien
catgtgcactcggtagaggatgctg

SEQ ID NO: 1642033 - DNA, 25 bp, Homo sapien
ctgtgatggtgaaggcggccacagc

SEQ ID NO: 1642034 - DNA, 25 bp, Homo sapien
tgtgatggtgaaggcggccacagcc

SEQ ID NO: 1642035 - DNA, 25 bp, Homo sapien
tgaaggcggccacagccaggtctgc

SEQ ID NO: 1642036 - DNA, 25 bp, Homo sapien
aggcggccacagccaggtctgcctt

SEQ ID NO: 1642037 - DNA, 25 bp, Homo sapien
tctgactgaatagctggtctctgcc

SEQ ID NO: 1642038 - DNA, 25 bp, Homo sapien
gagataccaacatatgacagtctgg

SEQ ID NO: 1642039 - DNA, 25 bp, Homo sapien
ccagggagttcaagaaatgagggct

SEQ ID NO: 1642040 - DNA, 25 bp, Homo sapien
tagattctgcaacgggctgggcaca

SEQ ID NO: 1642041 - DNA, 25 bp, Homo sapien
ggttagtagctcacaccagctgcca

SEQ ID NO: 1642042 - DNA, 25 bp, Homo sapien
caaccggcgctgttttgtatccaga

SEQ ID NO: 1642043 - DNA, 25 bp, Homo sapien
tagagaaacttcatttgggacagca

SEQ ID NO: 1642044 - DNA, 25 bp, Homo sapien
gccaggtttaatgccaactgcactg

SEQ ID NO: 1642045 - DNA, 25 bp, Homo sapien
aatgggtcataattcaagacaggcc

SEQ ID NO: 1642046 - DNA, 25 bp, Homo sapien
gggtgggacctgaattcacaccatg

SEQ ID NO: 1642047 - DNA, 25 bp, Homo sapien
aagacaggccaaggagacctgtgcc

SEQ ID NO: 1642048 - DNA, 25 bp, Homo sapien
gctctcctggtcactagccatgggc

SEQ ID NO: 1642049 - DNA, 25 bp, Homo sapien
tggcagctttatggggcagcgcctt

SEQ ID NO: 1642050 - DNA, 25 bp, Homo sapien
agctttatggggcagcgccttggga

SEQ ID NO: 1642051 - DNA, 25 bp, Homo sapien
gcagctttatggggcagcgccttgg

SEQ ID NO: 1642052 - DNA, 25 bp, Homo sapien
cagctttatggggcagcgccttggg

SEQ ID NO: 1642053 - DNA, 25 bp, Homo sapien
cgccgggtccatgcatctttcccgg

SEQ ID NO: 1642054 - DNA, 25 bp, Homo sapien
gggtccatgcatctttcccggcccc

SEQ ID NO: 1642055 - DNA, 25 bp, Homo sapien
tcgccgggtccatgcatctttcccg

SEQ ID NO: 1642056 - DNA, 25 bp, Homo sapien
tccatgcatctttcccggccccagt

SEQ ID NO: 1642057 - DNA, 25 bp, Homo sapien
ccaggagccgttgggctcgggcgcc

SEQ ID NO: 1642058 - DNA, 25 bp, Homo sapien
ccggttgatgagctcgccaaccatg

SEQ ID NO: 1642059 - DNA, 25 bp, Homo sapien
ctcgaagcgttcgttccccgacagg

SEQ ID NO: 1642060 - DNA, 25 bp, Homo sapien
tccaccaaccgcaggcggtagcgga

SEQ ID NO: 1642061 - DNA, 25 bp, Homo sapien
tgtctagtggctgggttgcggatcc

SEQ ID NO: 1642062 - DNA, 25 bp, Homo sapien
gctgggttgcggatcctggagcccg

SEQ ID NO: 1642063 - DNA, 25 bp, Homo sapien
gctgagcacggttgatttattcata

SEQ ID NO: 1642064 - DNA, 25 bp, Homo sapien
caggtagagcaggaatctgcttgct

SEQ ID NO: 1642065 - DNA, 25 bp, Homo sapien
cagtgtctgcgacaggttgatgtcc

SEQ ID NO: 1642066 - DNA, 25 bp, Homo sapien
cattcatggccagggtgcggttaga

SEQ ID NO: 1642067 - DNA, 25 bp, Homo sapien
caggatggttgtgaccaccagggtc

SEQ ID NO: 1642068 - DNA, 25 bp, Homo sapien
caccagggtcttgttggccagtgtc

SEQ ID NO: 1642069 - DNA, 25 bp, Homo sapien
cagggctctggcgtcaccctgggtc

SEQ ID NO: 1642070 - DNA, 25 bp, Homo sapien
cagcagggctctggcgtcaccctgg

SEQ ID NO: 1642071 - DNA, 25 bp, Homo sapien
gctctggcgtcaccctgggtctgct

SEQ ID NO: 1642072 - DNA, 25 bp, Homo sapien
tctggcgtcaccctgggtctgctca

SEQ ID NO: 1642073 - DNA, 25 bp, Homo sapien
gccctgccgggacttttctaggatg

SEQ ID NO: 1642074 - DNA, 25 bp, Homo sapien
gcagggtgtagttggttctctgccc

SEQ ID NO: 1642075 - DNA, 25 bp, Homo sapien
tgttgaactcgacccgcccggtcag

SEQ ID NO: 1642076 - DNA, 25 bp, Homo sapien
acttttctaggatgcgcagggtgta

SEQ ID NO: 1642077 - DNA, 25 bp, Homo sapien
aggcttcacaccgatctcctggctg

SEQ ID NO: 1642078 - DNA, 25 bp, Homo sapien
cggttcagctctcggacagcgctca

SEQ ID NO: 1642079 - DNA, 25 bp, Homo sapien
acgtgcacggcgtcaaacatcaggg

SEQ ID NO: 1642080 - DNA, 25 bp, Homo sapien
tcccgtggggccaaatgttggccga

SEQ ID NO: 1642081 - DNA, 25 bp, Homo sapien
tcctccacaataccgtccagatgca

SEQ ID NO: 1642082 - DNA, 25 bp, Homo sapien
caggatgttggaggagtcctccaca

SEQ ID NO: 1642083 - DNA, 25 bp, Homo sapien
ccacaataccgtccagatgcaggat

SEQ ID NO: 1642084 - DNA, 25 bp, Homo sapien
ggacgtgttgaacatggagaagccc

SEQ ID NO: 1642085 - DNA, 25 bp, Homo sapien
gctgaggtcattcccagttccgagg

SEQ ID NO: 1642086 - DNA, 25 bp, Homo sapien
cttgtaaaacgctgaggtcattccc

SEQ ID NO: 1642087 - DNA, 25 bp, Homo sapien
aacgctgaggtcattcccagttccg

SEQ ID NO: 1642088 - DNA, 25 bp, Homo sapien
acttgtaaaacgctgaggtcattcc

SEQ ID NO: 1642089 - DNA, 25 bp, Homo sapien
ggctgtcgtccaacatcctcactga

SEQ ID NO: 1642090 - DNA, 25 bp, Homo sapien
accagttcctccaatcgcagcaggc

SEQ ID NO: 1642091 - DNA, 25 bp, Homo sapien
gtcatcacggatctccttgagcagt

SEQ ID NO: 1642092 - DNA, 25 bp, Homo sapien
tggtggacaccttgtcatcacggat

SEQ ID NO: 1642093 - DNA, 25 bp, Homo sapien
catgcttaatctccttgctcaacca

SEQ ID NO: 1642094 - DNA, 25 bp, Homo sapien
gctcaggccaaaactctggcttcct

SEQ ID NO: 1642095 - DNA, 25 bp, Homo sapien
tgacccctcattgggtgtcttgaca

SEQ ID NO: 1642096 - DNA, 25 bp, Homo sapien
tctagtgtgccagtcgctcaggcca

SEQ ID NO: 1642097 - DNA, 25 bp, Homo sapien
gacttgaggattcgggagaccgcca

SEQ ID NO: 1642098 - DNA, 25 bp, Homo sapien
tcagccttggcgcagatgaggctgg

SEQ ID NO: 1642099 - DNA, 25 bp, Homo sapien
gtacaggctgacagacgcgaagcga

SEQ ID NO: 1642100 - DNA, 25 bp, Homo sapien
ccaagctgacgtcctcgttactggg

SEQ ID NO: 1642101 - DNA, 25 bp, Homo sapien
cgggacccaccttgatgtgggggat

SEQ ID NO: 1642102 - DNA, 25 bp, Homo sapien
ctcgggacccaccttgatgtggggg

SEQ ID NO: 1642103 - DNA, 25 bp, Homo sapien
tcgggacccaccttgatgtggggga

SEQ ID NO: 1642104 - DNA, 25 bp, Homo sapien
caaagcgccggcccacactccccat

SEQ ID NO: 1642105 - DNA, 25 bp, Homo sapien
tgcttctccgcccagccctcgcctc

SEQ ID NO: 1642106 - DNA, 25 bp, Homo sapien
aaactttggcctccatcctgcttct

SEQ ID NO: 1642107 - DNA, 25 bp, Homo sapien
agaggaaactttggcctccatcctg

SEQ ID NO: 1642108 - DNA, 25 bp, Homo sapien
tctccacagatatggctcacggtgg

SEQ ID NO: 1642109 - DNA, 25 bp, Homo sapien
tctctccacagatatggctcacggt

SEQ ID NO: 1642110 - DNA, 25 bp, Homo sapien
ccacagatatggctcacggtggagg

SEQ ID NO: 1642111 - DNA, 25 bp, Homo sapien
ttctctccacagatatggctcacgg

SEQ ID NO: 1642112 - DNA, 25 bp, Homo sapien
acacaacccctttgggtaagatctg

SEQ ID NO: 1642113 - DNA, 25 bp, Homo sapien
actggcacctgatgcaggccttggg

SEQ ID NO: 1642114 - DNA, 25 bp, Homo sapien
tggggagtcacagaactccattctt

SEQ ID NO: 1642115 - DNA, 25 bp, Homo sapien
ttgactggcacctgatgcaggcctt

SEQ ID NO: 1642116 - DNA, 25 bp, Homo sapien
gaactccattcttctagccatggca

SEQ ID NO: 1642117 - DNA, 25 bp, Homo sapien
gagccagcgtgacaatctgcacagc

SEQ ID NO: 1642118 - DNA, 25 bp, Homo sapien
gtatagacctatcaatggcttccca

SEQ ID NO: 1642119 - DNA, 25 bp, Homo sapien
tactaccctgtcacacttagctctg

SEQ ID NO: 1642120 - DNA, 25 bp, Homo sapien
tgtagcctccttgagccagcgtgac

SEQ ID NO: 1642121 - DNA, 25 bp, Homo sapien
tcttttcaacgccgccccgtgctcc

SEQ ID NO: 1642122 - DNA, 25 bp, Homo sapien
tatcttttcaacgccgccccgtgct

SEQ ID NO: 1642123 - DNA, 25 bp, Homo sapien
ttttcaacgccgccccgtgctcctc

SEQ ID NO: 1642124 - DNA, 25 bp, Homo sapien
ttatcttttcaacgccgccccgtgc

SEQ ID NO: 1642125 - DNA, 25 bp, Homo sapien
gatgtctacttccactcgggccttg

SEQ ID NO: 1642126 - DNA, 25 bp, Homo sapien
cgttgatctgctcccgggccaaggc

SEQ ID NO: 1642127 - DNA, 25 bp, Homo sapien
cccgctgcagctcaaagatgtctac

SEQ ID NO: 1642128 - DNA, 25 bp, Homo sapien
ttggctgggacctcgatgatcccgt

SEQ ID NO: 1642129 - DNA, 25 bp, Homo sapien
gggctggcgaaggcaacaatcagca

SEQ ID NO: 1642130 - DNA, 25 bp, Homo sapien
tgcgcagtgatgagagcacctggca

SEQ ID NO: 1642131 - DNA, 25 bp, Homo sapien
ctggggctggcgaaggcaacaatca

SEQ ID NO: 1642132 - DNA, 25 bp, Homo sapien
ccatgcgcagtgatgagagcacctg

SEQ ID NO: 1642133 - DNA, 25 bp, Homo sapien
tcccctcctcatggggacgcagctg

SEQ ID NO: 1642134 - DNA, 25 bp, Homo sapien
tcctcccctcctcatggggacgcag

SEQ ID NO: 1642135 - DNA, 25 bp, Homo sapien
agctgccgcggcccccactcgccac

SEQ ID NO: 1642136 - DNA, 25 bp, Homo sapien
tcctcatggggacgcagctgccgcg

SEQ ID NO: 1642137 - DNA, 25 bp, Homo sapien
tccccagttcccacaatcccatggg

SEQ ID NO: 1642138 - DNA, 25 bp, Homo sapien
ttgccactttcctaacatccccagt

SEQ ID NO: 1642139 - DNA, 25 bp, Homo sapien
ccacaatcccatggggagagaggcc

SEQ ID NO: 1642140 - DNA, 25 bp, Homo sapien
ggagagaggcctggacatccgaggt

SEQ ID NO: 1642141 - DNA, 25 bp, Homo sapien
gtgcggcccacagcatatgtgaccg

SEQ ID NO: 1642142 - DNA, 25 bp, Homo sapien
tgcggcccacagcatatgtgaccgc

SEQ ID NO: 1642143 - DNA, 25 bp, Homo sapien
cggcccacagcatatgtgaccgcat

SEQ ID NO: 1642144 - DNA, 25 bp, Homo sapien
gcggcccacagcatatgtgaccgca

SEQ ID NO: 1642145 - DNA, 25 bp, Homo sapien
gcattgagcataatacctagcacgt

SEQ ID NO: 1642146 - DNA, 25 bp, Homo sapien
tgtcaaaaactgagcatggcttcca

SEQ ID NO: 1642147 - DNA, 25 bp, Homo sapien
tagcacgtcataatacactcaagag

SEQ ID NO: 1642148 - DNA, 25 bp, Homo sapien
tcctaactatgggaactacgactag

SEQ ID NO: 1642149 - DNA, 25 bp, Homo sapien
ccggaggaacaacagtggagaagca

SEQ ID NO: 1642150 - DNA, 25 bp, Homo sapien
ccttggagaccatagcagcgagtca

SEQ ID NO: 1642151 - DNA, 25 bp, Homo sapien
tacgagctgcgcaatggtgaagcca

SEQ ID NO: 1642152 - DNA, 25 bp, Homo sapien
tctacaagtgctctgagtgctccca

SEQ ID NO: 1642153 - DNA, 25 bp, Homo sapien
tccgtcagagtacccacctgaaaga

SEQ ID NO: 1642154 - DNA, 25 bp, Homo sapien
gactgtggcaaagcgttccgtcaga

SEQ ID NO: 1642155 - DNA, 25 bp, Homo sapien
ctgactgtggcaagagctaccgctc

SEQ ID NO: 1642156 - DNA, 25 bp, Homo sapien
aggtgagcggccctttgcctgtgaa

SEQ ID NO: 1642157 - DNA, 25 bp, Homo sapien
caaaggctctctacgagttgccgag

SEQ ID NO: 1642158 - DNA, 25 bp, Homo sapien
gaaaaactagtcaggtcaagaggtc

SEQ ID NO: 1642159 - DNA, 25 bp, Homo sapien
gtaaatagttgtctccatcccagca

SEQ ID NO: 1642160 - DNA, 25 bp, Homo sapien
ggagttgaaagttcaggcccctgct

SEQ ID NO: 1642161 - DNA, 25 bp, Homo sapien
agaggcattcgccagtaccagaggg

SEQ ID NO: 1642162 - DNA, 25 bp, Homo sapien
caatggctcgtgtccttcactgcaa

SEQ ID NO: 1642163 - DNA, 25 bp, Homo sapien
tgaaggatcccacggataggcactg

SEQ ID NO: 1642164 - DNA, 25 bp, Homo sapien
aaaagagaacgctgaggcctggagc

SEQ ID NO: 1642165 - DNA, 25 bp, Homo sapien
gaacttggcaaaatggcctagccca

SEQ ID NO: 1642166 - DNA, 25 bp, Homo sapien
acttggcaaaatggcctagcccacc

SEQ ID NO: 1642167 - DNA, 25 bp, Homo sapien
ggttgaggagggacttgtgagagct

SEQ ID NO: 1642168 - DNA, 25 bp, Homo sapien
ttgtgagagctagaacttggcaaaa

SEQ ID NO: 1642169 - DNA, 25 bp, Homo sapien
gatgaaaagttgtccgcaggccttc

SEQ ID NO: 1642170 - DNA, 25 bp, Homo sapien
cctttggatgaagctactgaatatt

SEQ ID NO: 1642171 - DNA, 25 bp, Homo sapien
gggacacatggtagggacacattct

SEQ ID NO: 1642172 - DNA, 25 bp, Homo sapien
aaaaattctgtacatcctttggatg

SEQ ID NO: 1642173 - DNA, 25 bp, Homo sapien
tgggtggtgctaagccccagcccat

SEQ ID NO: 1642174 - DNA, 25 bp, Homo sapien
tttatttggcgtcgtagcagtgagg

SEQ ID NO: 1642175 - DNA, 25 bp, Homo sapien
tctggctcgcgactggttttttggt

SEQ ID NO: 1642176 - DNA, 25 bp, Homo sapien
tgaggtctgacctgctggaggcttc

SEQ ID NO: 1642177 - DNA, 25 bp, Homo sapien
actcaggtttggaccctgcctcggg

SEQ ID NO: 1642178 - DNA, 25 bp, Homo sapien
tccaggggtctgtgctgccgtctcg

SEQ ID NO: 1642179 - DNA, 25 bp, Homo sapien
tgcctcgggcccccctggacctcca

SEQ ID NO: 1642180 - DNA, 25 bp, Homo sapien
tcactcaggtttggaccctgcctcg

SEQ ID NO: 1642181 - DNA, 25 bp, Homo sapien
agaggatgaggaggagaggccagga

SEQ ID NO: 1642182 - DNA, 25 bp, Homo sapien
aggatgaagaggatgaggaggagag

SEQ ID NO: 1642183 - DNA, 25 bp, Homo sapien
aagaggatgaggaggagaggccagg

SEQ ID NO: 1642184 - DNA, 25 bp, Homo sapien
ggatgaggaggagaggccaggagac

SEQ ID NO: 1642185 - DNA, 25 bp, Homo sapien
gagatggaggctgccacagccgcag

SEQ ID NO: 1642186 - DNA, 25 bp, Homo sapien
agccgcagccgctgctgagaccagg

SEQ ID NO: 1642187 - DNA, 25 bp, Homo sapien
tggaggctgccacagccgcagccgc

SEQ ID NO: 1642188 - DNA, 25 bp, Homo sapien
agccgctgctgagaccaggcccaca

SEQ ID NO: 1642189 - DNA, 25 bp, Homo sapien
gattcaagaagagcggcgaggtcac

SEQ ID NO: 1642190 - DNA, 25 bp, Homo sapien
catgattcaagaagagcggcgaggt

SEQ ID NO: 1642191 - DNA, 25 bp, Homo sapien
aagagcggcgaggtcaccaggccag

SEQ ID NO: 1642192 - DNA, 25 bp, Homo sapien
agcatgattcaagaagagcggcgag

SEQ ID NO: 1642193 - DNA, 25 bp, Homo sapien
ggggcagggttccaccagaggccag

SEQ ID NO: 1642194 - DNA, 25 bp, Homo sapien
ctggtaaggggcagggttccaccag

SEQ ID NO: 1642195 - DNA, 25 bp, Homo sapien
taaggggcagggttccaccagaggc

SEQ ID NO: 1642196 - DNA, 25 bp, Homo sapien
ggcagggttccaccagaggccaggg

SEQ ID NO: 1642197 - DNA, 25 bp, Homo sapien
ctggcggggagagagagaggctggg

SEQ ID NO: 1642198 - DNA, 25 bp, Homo sapien
cgatgggtgtgacatgaggcagcac

SEQ ID NO: 1642199 - DNA, 25 bp, Homo sapien
tgggtgtgacatgaggcagcacgca

SEQ ID NO: 1642200 - DNA, 25 bp, Homo sapien
gggtgtgacatgaggcagcacgcac

SEQ ID NO: 1642201 - DNA, 25 bp, Homo sapien
gatgggtgtgacatgaggcagcacg

SEQ ID NO: 1642202 - DNA, 25 bp, Homo sapien
caaagggttgttgctcatgagggct

SEQ ID NO: 1642203 - DNA, 25 bp, Homo sapien
gatagtggccaaagggttgttgctc

SEQ ID NO: 1642204 - DNA, 25 bp, Homo sapien
gttgttgctcatgagggctggactc

SEQ ID NO: 1642205 - DNA, 25 bp, Homo sapien
cttggatagtggccaaagggttgtt

SEQ ID NO: 1642206 - DNA, 25 bp, Homo sapien
gggtgccgctccccaccctagaagc

SEQ ID NO: 1642207 - DNA, 25 bp, Homo sapien
cctagaagcagcagcgaccctgctt

SEQ ID NO: 1642208 - DNA, 25 bp, Homo sapien
caggggcagggacctgccaacataa

SEQ ID NO: 1642209 - DNA, 25 bp, Homo sapien
gccaacataactggggtgccgctcc

SEQ ID NO: 1642210 - DNA, 25 bp, Homo sapien
gccgatagccgagtggctgccttga

SEQ ID NO: 1642211 - DNA, 25 bp, Homo sapien
caggcctgacaagccgatagccgag

SEQ ID NO: 1642212 - DNA, 25 bp, Homo sapien
tgacaagccgatagccgagtggctg

SEQ ID NO: 1642213 - DNA, 25 bp, Homo sapien
gcctgacaagccgatagccgagtgg

SEQ ID NO: 1642214 - DNA, 25 bp, Homo sapien
cagctgtccggctggggtggagcgt

SEQ ID NO: 1642215 - DNA, 25 bp, Homo sapien
gatggaattgagggggggcgcagcc

SEQ ID NO: 1642216 - DNA, 25 bp, Homo sapien
gtggagcgtccccacagctgaggat

SEQ ID NO: 1642217 - DNA, 25 bp, Homo sapien
ccccacagctgaggataaggtagta

SEQ ID NO: 1642218 - DNA, 25 bp, Homo sapien
gcccaggagacaaagccctatggct

SEQ ID NO: 1642219 - DNA, 25 bp, Homo sapien
aatggaagtcagagcaggtgcttcc

SEQ ID NO: 1642220 - DNA, 25 bp, Homo sapien
tggtgacccctgtcataacaatgga

SEQ ID NO: 1642221 - DNA, 25 bp, Homo sapien
gtcagaacagccttagacctccctg

SEQ ID NO: 1642222 - DNA, 25 bp, Homo sapien
gaggccaggcacaaaactcaagtgc

SEQ ID NO: 1642223 - DNA, 25 bp, Homo sapien
agtgcctcaccttttaccaggccca

SEQ ID NO: 1642224 - DNA, 25 bp, Homo sapien
cccaggcccagtcttgaggcccatg

SEQ ID NO: 1642225 - DNA, 25 bp, Homo sapien
gaagcagattaaagctgagttgctc

SEQ ID NO: 1642226 - DNA, 25 bp, Homo sapien
tgctggaagcttgggacaacggtaa

SEQ ID NO: 1642227 - DNA, 25 bp, Homo sapien
ctggaagcttgggacaacggtaagg

SEQ ID NO: 1642228 - DNA, 25 bp, Homo sapien
gctggaagcttgggacaacggtaag

SEQ ID NO: 1642229 - DNA, 25 bp, Homo sapien
gtagctggccggcttccctgggctg

SEQ ID NO: 1642230 - DNA, 25 bp, Homo sapien
gggctgtagctggccggcttccctg

SEQ ID NO: 1642231 - DNA, 25 bp, Homo sapien
atatgggggctgtagctggccggct

SEQ ID NO: 1642232 - DNA, 25 bp, Homo sapien
catatgggggctgtagctggccggc

SEQ ID NO: 1642233 - DNA, 25 bp, Homo sapien
cagctgctcggcgatcagcaggatc

SEQ ID NO: 1642234 - DNA, 25 bp, Homo sapien
gaaccagacgcggatcacttccttc

SEQ ID NO: 1642235 - DNA, 25 bp, Homo sapien
caggatctcctctgaggtaggcttc

SEQ ID NO: 1642236 - DNA, 25 bp, Homo sapien
gggttgatgcgtttctccttctggc

SEQ ID NO: 1642237 - DNA, 25 bp, Homo sapien
gaagcggacgtttgtctcgatgctg

SEQ ID NO: 1642238 - DNA, 25 bp, Homo sapien
tgggcaggcttgagtccacagacat

SEQ ID NO: 1642239 - DNA, 25 bp, Homo sapien
actcttctctaaggcgaagcggacg

SEQ ID NO: 1642240 - DNA, 25 bp, Homo sapien
tcttcttgcgtctccggccgggcag

SEQ ID NO: 1642241 - DNA, 25 bp, Homo sapien
gctgaagtcgttgccgtagagcttg

SEQ ID NO: 1642242 - DNA, 25 bp, Homo sapien
tgccgtagagcttgcccatggccag

SEQ ID NO: 1642243 - DNA, 25 bp, Homo sapien
tgagggcctcgaagcgggaaatggt

SEQ ID NO: 1642244 - DNA, 25 bp, Homo sapien
ggaaatggtcgtctggctgaagtcg

SEQ ID NO: 1642245 - DNA, 25 bp, Homo sapien
cgcccagcctgcaaggtgcctccag

SEQ ID NO: 1642246 - DNA, 25 bp, Homo sapien
cccagcctgcaaggtgcctccagac

SEQ ID NO: 1642247 - DNA, 25 bp, Homo sapien
gcccagcctgcaaggtgcctccaga

SEQ ID NO: 1642248 - DNA, 25 bp, Homo sapien
aaggtgcgggcgaattgctccagct

SEQ ID NO: 1642249 - DNA, 25 bp, Homo sapien
gcttgatgcggcgttgcttgaaggt

SEQ ID NO: 1642250 - DNA, 25 bp, Homo sapien
cgttgcttgaaggtgcgggcgaatt

SEQ ID NO: 1642251 - DNA, 25 bp, Homo sapien
gatcactgggctcctcggggtggga

SEQ ID NO: 1642252 - DNA, 25 bp, Homo sapien
ggtcgggcagcgtagggcgggtcac

SEQ ID NO: 1642253 - DNA, 25 bp, Homo sapien
tcgggcagcgtagggcgggtcacgg

SEQ ID NO: 1642254 - DNA, 25 bp, Homo sapien
gagaggtgcgggtcgggcagcgtag

SEQ ID NO: 1642255 - DNA, 25 bp, Homo sapien
gggtgcgagaggtgcgggtcgggca

SEQ ID NO: 1642256 - DNA, 25 bp, Homo sapien
caacagctctatctgggattcttca

SEQ ID NO: 1642257 - DNA, 25 bp, Homo sapien
tgtgaatctaaaacagctcttaaga

SEQ ID NO: 1642258 - DNA, 25 bp, Homo sapien
tacagggatgtttgtcgctcaggtc

SEQ ID NO: 1642259 - DNA, 25 bp, Homo sapien
gaaattaagtcctaagcaatgagta

SEQ ID NO: 1642260 - DNA, 25 bp, Homo sapien
cagctttcagcaggccttgctgctg

SEQ ID NO: 1642261 - DNA, 25 bp, Homo sapien
aggtagctggaatagatttggtgtc

SEQ ID NO: 1642262 - DNA, 25 bp, Homo sapien
tgaggtagctggaatagatttggtg

SEQ ID NO: 1642263 - DNA, 25 bp, Homo sapien
gctgaggtagctggaatagatttgg

SEQ ID NO: 1642264 - DNA, 25 bp, Homo sapien
ggtagctggaatagatttggtgtcg

SEQ ID NO: 1642265 - DNA, 25 bp, Homo sapien
ggtggcctggcacaagcaccagctg

SEQ ID NO: 1642266 - DNA, 25 bp, Homo sapien
tagtacaaccactccgggaagctct

SEQ ID NO: 1642267 - DNA, 25 bp, Homo sapien
aaaacactcccaaggcaaatgattt

SEQ ID NO: 1642268 - DNA, 25 bp, Homo sapien
tccagcaaatagtgtaaattagtac

SEQ ID NO: 1642269 - DNA, 25 bp, Homo sapien
tctttagcactgttataggttgcag

SEQ ID NO: 1642270 - DNA, 25 bp, Homo sapien
cagaaaggttgatatgtggattgca

SEQ ID NO: 1642271 - DNA, 25 bp, Homo sapien
tacatgggtgaattgcccactttcc

SEQ ID NO: 1642272 - DNA, 25 bp, Homo sapien
tgatatgtggattgcaggatacatg

SEQ ID NO: 1642273 - DNA, 25 bp, Homo sapien
tttgccatagctgggactttggcta

SEQ ID NO: 1642274 - DNA, 25 bp, Homo sapien
tgtgcctgggggaagccactttccc

SEQ ID NO: 1642275 - DNA, 25 bp, Homo sapien
cttcttgctgtgtgcctgggggaag

SEQ ID NO: 1642276 - DNA, 25 bp, Homo sapien
ctgggggaagccactttccctctgg

SEQ ID NO: 1642277 - DNA, 25 bp, Homo sapien
tgtgtgcctgggggaagccactttc

SEQ ID NO: 1642278 - DNA, 25 bp, Homo sapien
ccacaataagtcttacttcatggag

SEQ ID NO: 1642279 - DNA, 25 bp, Homo sapien
ggtgacaccacaataagtcttactt

SEQ ID NO: 1642280 - DNA, 25 bp, Homo sapien
caggtgacaccacaataagtcttac

SEQ ID NO: 1642281 - DNA, 25 bp, Homo sapien
gacaccacaataagtcttacttcat

SEQ ID NO: 1642282 - DNA, 25 bp, Homo sapien
ttcactgggttgttctgaggcctga

SEQ ID NO: 1642283 - DNA, 25 bp, Homo sapien
gacaatatgtgtagaatgtttagcc

SEQ ID NO: 1642284 - DNA, 25 bp, Homo sapien
aattggtccttcataaatggcagtc

SEQ ID NO: 1642285 - DNA, 25 bp, Homo sapien
atttgctaccattgcccacctcatg

SEQ ID NO: 1642286 - DNA, 25 bp, Homo sapien
gttgtggcgatcagggcagaatacc

SEQ ID NO: 1642287 - DNA, 25 bp, Homo sapien
tacaaaatagcaaccaggatcccca

SEQ ID NO: 1642288 - DNA, 25 bp, Homo sapien
gattagtacagtcactccactaggg

SEQ ID NO: 1642289 - DNA, 25 bp, Homo sapien
cactagggcaagctctaaagatggg

SEQ ID NO: 1642290 - DNA, 25 bp, Homo sapien
gatgggttgggacaaggtgagctgt

SEQ ID NO: 1642291 - DNA, 25 bp, Homo sapien
ggttgggacaaggtgagctgtgggg

SEQ ID NO: 1642292 - DNA, 25 bp, Homo sapien
tgggttgggacaaggtgagctgtgg

SEQ ID NO: 1642293 - DNA, 25 bp, Homo sapien
ggatgggttgggacaaggtgagctg

SEQ ID NO: 1642294 - DNA, 25 bp, Homo sapien
tgctgagctggcatcagtgccgtga

SEQ ID NO: 1642295 - DNA, 25 bp, Homo sapien
tgctgctgagctggcatcagtgccg

SEQ ID NO: 1642296 - DNA, 25 bp, Homo sapien
tggactgctgcacggcggcggccag

SEQ ID NO: 1642297 - DNA, 25 bp, Homo sapien
ctgctgctgagctggcatcagtgcc

SEQ ID NO: 1642298 - DNA, 25 bp, Homo sapien
cagctagctggctgcccgtcaacat

SEQ ID NO: 1642299 - DNA, 25 bp, Homo sapien
ctggctgcccgtcaacatgagttgg

SEQ ID NO: 1642300 - DNA, 25 bp, Homo sapien
agctggctgcccgtcaacatgagtt

SEQ ID NO: 1642301 - DNA, 25 bp, Homo sapien
cccgtcaacatgagttgggcctggg

SEQ ID NO: 1642302 - DNA, 25 bp, Homo sapien
gaccccagaatgttaagtggaggcc

SEQ ID NO: 1642303 - DNA, 25 bp, Homo sapien
cgggaccccagaatgttaagtggag

SEQ ID NO: 1642304 - DNA, 25 bp, Homo sapien
gagaggcagggtccgggaccccaga

SEQ ID NO: 1642305 - DNA, 25 bp, Homo sapien
cagaatgttaagtggaggccagaga

SEQ ID NO: 1642306 - DNA, 25 bp, Homo sapien
cagttggggacacggagaatgggga

SEQ ID NO: 1642307 - DNA, 25 bp, Homo sapien
cacggagaatggggaggtcttattt

SEQ ID NO: 1642308 - DNA, 25 bp, Homo sapien
ggacacggagaatggggaggtctta

SEQ ID NO: 1642309 - DNA, 25 bp, Homo sapien
gggccagttggggacacggagaatg

SEQ ID NO: 1642310 - DNA, 25 bp, Homo sapien
gatgattagtgtctggtccatttct

SEQ ID NO: 1642311 - DNA, 25 bp, Homo sapien
tgattagtgtctggtccatttcttt

SEQ ID NO: 1642312 - DNA, 25 bp, Homo sapien
tgatgattagtgtctggtccatttc

SEQ ID NO: 1642313 - DNA, 25 bp, Homo sapien
ctgatgattagtgtctggtccattt

SEQ ID NO: 1642314 - DNA, 25 bp, Homo sapien
gagtccagaccttgcttctcggcct

SEQ ID NO: 1642315 - DNA, 25 bp, Homo sapien
tggggagtccagaccttgcttctcg

SEQ ID NO: 1642316 - DNA, 25 bp, Homo sapien
tctgatggggagtccagaccttgct

SEQ ID NO: 1642317 - DNA, 25 bp, Homo sapien
tgatggggagtccagaccttgcttc

SEQ ID NO: 1642318 - DNA, 25 bp, Homo sapien
gggtgttacccacagtgcagcaaag

SEQ ID NO: 1642319 - DNA, 25 bp, Homo sapien
tgacgtcccaaaggagggagagcag

SEQ ID NO: 1642320 - DNA, 25 bp, Homo sapien
aggaggctggtgacgtcccaaagga

SEQ ID NO: 1642321 - DNA, 25 bp, Homo sapien
gtcgtgagaaggtatcagctgccca

SEQ ID NO: 1642322 - DNA, 25 bp, Homo sapien
gcctcagagatgtgatggggctgca

SEQ ID NO: 1642323 - DNA, 25 bp, Homo sapien
gttttccactctgagtggggcctca

SEQ ID NO: 1642324 - DNA, 25 bp, Homo sapien
gagtggggcctcagagatgtgatgg

SEQ ID NO: 1642325 - DNA, 25 bp, Homo sapien
cagagatgtgatggggctgcagcgt

SEQ ID NO: 1642326 - DNA, 25 bp, Homo sapien
cggcctagcagacccaacctcatcc

SEQ ID NO: 1642327 - DNA, 25 bp, Homo sapien
tcctatgtttagcacaccggcctag

SEQ ID NO: 1642328 - DNA, 25 bp, Homo sapien
tatgtttagcacaccggcctagcag

SEQ ID NO: 1642329 - DNA, 25 bp, Homo sapien
tcttcctatgtttagcacaccggcc

SEQ ID NO: 1642330 - DNA, 25 bp, Homo sapien
ctccccggactttcacttctcctct

SEQ ID NO: 1642331 - DNA, 25 bp, Homo sapien
ccaccaaaccaagactcatgcccat

SEQ ID NO: 1642332 - DNA, 25 bp, Homo sapien
gggtgcccgcacacaatggcgcata

SEQ ID NO: 1642333 - DNA, 25 bp, Homo sapien
cccgcacacaatggcgcatatagga

SEQ ID NO: 1642334 - DNA, 25 bp, Homo sapien
tgcccgcacacaatggcgcatatag

SEQ ID NO: 1642335 - DNA, 25 bp, Homo sapien
gggaacaactgtgtcatctccccac

SEQ ID NO: 1642336 - DNA, 25 bp, Homo sapien
gctgggggaacaactgtgtcatctc

SEQ ID NO: 1642337 - DNA, 25 bp, Homo sapien
tgggggaacaactgtgtcatctccc

SEQ ID NO: 1642338 - DNA, 25 bp, Homo sapien
ggggaacaactgtgtcatctcccca

SEQ ID NO: 1642339 - DNA, 25 bp, Homo sapien
gaggccgcagtgaagaaccagagga

SEQ ID NO: 1642340 - DNA, 25 bp, Homo sapien
ggtatgttaaagtatctttcctggc

SEQ ID NO: 1642341 - DNA, 25 bp, Homo sapien
agtcaagaatgaggtccaggtatgt

SEQ ID NO: 1642342 - DNA, 25 bp, Homo sapien
ctcaggtaagaaagatcagggtagg

SEQ ID NO: 1642343 - DNA, 25 bp, Homo sapien
cacagaggcctagatggggggtgga

SEQ ID NO: 1642344 - DNA, 25 bp, Homo sapien
gagcacagaggcctagatggggggt

SEQ ID NO: 1642345 - DNA, 25 bp, Homo sapien
ggagcacagaggcctagatgggggg

SEQ ID NO: 1642346 - DNA, 25 bp, Homo sapien
gaagggagcacagaggcctagatgg

SEQ ID NO: 1642347 - DNA, 25 bp, Homo sapien
ttattgaagatgtgcgggcactgcg

SEQ ID NO: 1642348 - DNA, 25 bp, Homo sapien
tgcggctgacatggatgaggaggaa

SEQ ID NO: 1642349 - DNA, 25 bp, Homo sapien
cgggcactgcggctgacatggatga

SEQ ID NO: 1642350 - DNA, 25 bp, Homo sapien
gtcttggtgatggacgatgctgatc

SEQ ID NO: 1642351 - DNA, 25 bp, Homo sapien
ccggagccatttggctgatggtcag

SEQ ID NO: 1642352 - DNA, 25 bp, Homo sapien
tgctcactcccggagccatttggct

SEQ ID NO: 1642353 - DNA, 25 bp, Homo sapien
ctcactcccggagccatttggctga

SEQ ID NO: 1642354 - DNA, 25 bp, Homo sapien
tcccggagccatttggctgatggtc

SEQ ID NO: 1642355 - DNA, 25 bp, Homo sapien
tttcctcgtactctgccaggcatgg

SEQ ID NO: 1642356 - DNA, 25 bp, Homo sapien
acacacagtccacacacaccagggc

SEQ ID NO: 1642357 - DNA, 25 bp, Homo sapien
cttggccaatttcctcgtactctgc

SEQ ID NO: 1642358 - DNA, 25 bp, Homo sapien
acacaccagggccttggccaatttc

SEQ ID NO: 1642359 - DNA, 25 bp, Homo sapien
agcagtcagattctaacctctgggt

SEQ ID NO: 1642360 - DNA, 25 bp, Homo sapien
gtttggcccgaaagccacaggatgc

SEQ ID NO: 1642361 - DNA, 25 bp, Homo sapien
cagattctaacctctgggtgggcag

SEQ ID NO: 1642362 - DNA, 25 bp, Homo sapien
tggagggtgagaacaaagcagtcag

SEQ ID NO: 1642363 - DNA, 25 bp, Homo sapien
ctcttgggcagacgcagcgaagcta

SEQ ID NO: 1642364 - DNA, 25 bp, Homo sapien
agcgaagctaatacattcaggccac

SEQ ID NO: 1642365 - DNA, 25 bp, Homo sapien
gccaccaacccggtccagtcgagaa

SEQ ID NO: 1642366 - DNA, 25 bp, Homo sapien
gacgcagcgaagctaatacattcag

SEQ ID NO: 1642367 - DNA, 25 bp, Homo sapien
gggctgtggtgcccataggcagcac

SEQ ID NO: 1642368 - DNA, 25 bp, Homo sapien
ctattgataagctggcaaggatgga

SEQ ID NO: 1642369 - DNA, 25 bp, Homo sapien
caggcggtgagtgggctcagggagg

SEQ ID NO: 1642370 - DNA, 25 bp, Homo sapien
cacttaacctattgataagctggca

SEQ ID NO: 1642371 - DNA, 25 bp, Homo sapien
taacctattgataagctggcaagga

SEQ ID NO: 1642372 - DNA, 25 bp, Homo sapien
tctgagtatgtgtttacccctgttt

SEQ ID NO: 1642373 - DNA, 25 bp, Homo sapien
gtgtctgagtatgtgtttacccctg

SEQ ID NO: 1642374 - DNA, 25 bp, Homo sapien
tgagtatgtgtttacccctgtttcc

SEQ ID NO: 1642375 - DNA, 25 bp, Homo sapien
ctgtgtctgagtatgtgtttacccc

SEQ ID NO: 1642376 - DNA, 25 bp, Homo sapien
tggcagaaccgtccggaccaatgga

SEQ ID NO: 1642377 - DNA, 25 bp, Homo sapien
tgtaccctgttgtatgaccctcggc

SEQ ID NO: 1642378 - DNA, 25 bp, Homo sapien
tggaacccttttggagtcggcctga

SEQ ID NO: 1642379 - DNA, 25 bp, Homo sapien
accttttcctcaagggattccgatg

SEQ ID NO: 1642380 - DNA, 25 bp, Homo sapien
ggtggtggcggcacgttctcactta

SEQ ID NO: 1642381 - DNA, 25 bp, Homo sapien
ttactacatcccattcaggcacgtc

SEQ ID NO: 1642382 - DNA, 25 bp, Homo sapien
aggcacgtcccgaggccttcgcaag

SEQ ID NO: 1642383 - DNA, 25 bp, Homo sapien
aatggctgctgaccctcgaatgggt

SEQ ID NO: 1642384 - DNA, 25 bp, Homo sapien
agtgcaagtctatgttcagctctgg

SEQ ID NO: 1642385 - DNA, 25 bp, Homo sapien
tccaggtgacatccaagtgcaagtc

SEQ ID NO: 1642386 - DNA, 25 bp, Homo sapien
tttggccccatgtgcaacagtaggc

SEQ ID NO: 1642387 - DNA, 25 bp, Homo sapien
gatgctgccataacactcccatgtg

SEQ ID NO: 1642388 - DNA, 25 bp, Homo sapien
cccttaggccaaagaagtgtgtgct

SEQ ID NO: 1642389 - DNA, 25 bp, Homo sapien
ggaaatggtttaggcctcagagccc

SEQ ID NO: 1642390 - DNA, 25 bp, Homo sapien
ttggtgagtgtgtagctgtgcccct

SEQ ID NO: 1642391 - DNA, 25 bp, Homo sapien
caagatcagagatacaatgtgcagg

SEQ ID NO: 1642392 - DNA, 25 bp, Homo sapien
caaagatgctagagtgacagtcctc

SEQ ID NO: 1642393 - DNA, 25 bp, Homo sapien
cctgctgtcccggtcctgtcgcagt

SEQ ID NO: 1642394 - DNA, 25 bp, Homo sapien
cgcagtcctcaaagatgctagagtg

SEQ ID NO: 1642395 - DNA, 25 bp, Homo sapien
ccggtcctgtcgcagtcctcaaaga

SEQ ID NO: 1642396 - DNA, 25 bp, Homo sapien
aaggtggcccggagacttggaggtg

SEQ ID NO: 1642397 - DNA, 25 bp, Homo sapien
gtgggatcaatcctgccagtcctgg

SEQ ID NO: 1642398 - DNA, 25 bp, Homo sapien
ggtagagatggtcgtcctcccagga

SEQ ID NO: 1642399 - DNA, 25 bp, Homo sapien
agagatggtcgtcctcccaggagaa

SEQ ID NO: 1642400 - DNA, 25 bp, Homo sapien
tcaggaggcctctgtcgggcgccgc

SEQ ID NO: 1642401 - DNA, 25 bp, Homo sapien
cggccagcctcatagtcagcctcat

SEQ ID NO: 1642402 - DNA, 25 bp, Homo sapien
cgccggccagcctcatagtcagcct

SEQ ID NO: 1642403 - DNA, 25 bp, Homo sapien
cggcgccggccagcctcatagtcag

SEQ ID NO: 1642404 - DNA, 25 bp, Homo sapien
ttgatgtcacaaaccacagagccca

SEQ ID NO: 1642405 - DNA, 25 bp, Homo sapien
gcagtactctgctcgaacccggagc

SEQ ID NO: 1642406 - DNA, 25 bp, Homo sapien
agcagggcgccactcaggtagtcgc

SEQ ID NO: 1642407 - DNA, 25 bp, Homo sapien
gaaggcgtccagataggagagctct

SEQ ID NO: 1642408 - DNA, 25 bp, Homo sapien
gctcaaaagccaccttgccaacaag

SEQ ID NO: 1642409 - DNA, 25 bp, Homo sapien
taggccaacctatttacagctgtaa

SEQ ID NO: 1642410 - DNA, 25 bp, Homo sapien
tcagcatggagagacagatgacagc

SEQ ID NO: 1642411 - DNA, 25 bp, Homo sapien
tggatctgcacaacacttgctccct

SEQ ID NO: 1642412 - DNA, 25 bp, Homo sapien
ggccttgggcatgtgaccttacctc

SEQ ID NO: 1642413 - DNA, 25 bp, Homo sapien
ggggccttgggcatgtgaccttacc

SEQ ID NO: 1642414 - DNA, 25 bp, Homo sapien
ctctgccactctctaagctgtgggg

SEQ ID NO: 1642415 - DNA, 25 bp, Homo sapien
gccactctctaagctgtggggcctt

SEQ ID NO: 1642416 - DNA, 25 bp, Homo sapien
atggaagcttccggaggtcctcaac

SEQ ID NO: 1642417 - DNA, 25 bp, Homo sapien
aatggaagcttccggaggtcctcaa

SEQ ID NO: 1642418 - DNA, 25 bp, Homo sapien
tgaatggaagcttccggaggtcctc

SEQ ID NO: 1642419 - DNA, 25 bp, Homo sapien
gaatggaagcttccggaggtcctca

SEQ ID NO: 1642420 - DNA, 25 bp, Homo sapien
tggcaccaccactgggccggccccg

SEQ ID NO: 1642421 - DNA, 25 bp, Homo sapien
ccgctgccgcttggttgggggggag

SEQ ID NO: 1642422 - DNA, 25 bp, Homo sapien
ggcaccaccactgggccggccccga

SEQ ID NO: 1642423 - DNA, 25 bp, Homo sapien
gccatagctatagcgttctggagac

SEQ ID NO: 1642424 - DNA, 25 bp, Homo sapien
gacggcgacggcagctaccctctgt

SEQ ID NO: 1642425 - DNA, 25 bp, Homo sapien
agaactgcttgactgccgacggcga

SEQ ID NO: 1642426 - DNA, 25 bp, Homo sapien
tctttgaagagctggaggtgccata

SEQ ID NO: 1642427 - DNA, 25 bp, Homo sapien
ttgcgcgccaggtgcggcagcaggt

SEQ ID NO: 1642428 - DNA, 25 bp, Homo sapien
agcacgcgcaggagttgccccagca

SEQ ID NO: 1642429 - DNA, 25 bp, Homo sapien
cagcagccgcaggttgctctcgtcg

SEQ ID NO: 1642430 - DNA, 25 bp, Homo sapien
ccgggctaagcctccggcggcgcca

SEQ ID NO: 1642431 - DNA, 25 bp, Homo sapien
ccggggtcgacccggatagcgccat

SEQ ID NO: 1642432 - DNA, 25 bp, Homo sapien
gaagcgacagcatcccgtagtagtc

SEQ ID NO: 1642433 - DNA, 25 bp, Homo sapien
acggtgaagcgacagcatcccgtag

SEQ ID NO: 1642434 - DNA, 25 bp, Homo sapien
ggtgaagcgacagcatcccgtagta

SEQ ID NO: 1642435 - DNA, 25 bp, Homo sapien
gggagggaggcggaacaagctcaga

SEQ ID NO: 1642436 - DNA, 25 bp, Homo sapien
ggagggaggcggaacaagctcagaa

SEQ ID NO: 1642437 - DNA, 25 bp, Homo sapien
tctggcgtccgatgactcctgggcg

SEQ ID NO: 1642438 - DNA, 25 bp, Homo sapien
cagattctggcgtccgatgactcct

SEQ ID NO: 1642439 - DNA, 25 bp, Homo sapien
cttctctattattacgcctgcgtca

SEQ ID NO: 1642440 - DNA, 25 bp, Homo sapien
tattattacgcctgcgtcacctcgc

SEQ ID NO: 1642441 - DNA, 25 bp, Homo sapien
caaccgaagcatcttggttcgcgag

SEQ ID NO: 1642442 - DNA, 25 bp, Homo sapien
ctgcgcttgcgcagagcgagagcac

SEQ ID NO: 1642443 - DNA, 25 bp, Homo sapien
gggctgtatctggtacccggttcca

SEQ ID NO: 1642444 - DNA, 25 bp, Homo sapien
gagcacgccgcctcttgggctgtat

SEQ ID NO: 1642445 - DNA, 25 bp, Homo sapien
caaaggttgcccgagtttctctaca

SEQ ID NO: 1642446 - DNA, 25 bp, Homo sapien
gtttctctacagaacttgccgacgc

SEQ ID NO: 1642447 - DNA, 25 bp, Homo sapien
cttgccgacgcttagcccgggagcg

SEQ ID NO: 1642448 - DNA, 25 bp, Homo sapien
tctacagaacttgccgacgcttagc

SEQ ID NO: 1642449 - DNA, 25 bp, Homo sapien
caggaggggagttacagctgtagga

SEQ ID NO: 1642450 - DNA, 25 bp, Homo sapien
gcaaaccttactgtggaaactaaga

SEQ ID NO: 1642451 - DNA, 25 bp, Homo sapien
ccaggttggacggtgcgaatcgacg

SEQ ID NO: 1642452 - DNA, 25 bp, Homo sapien
tgtacacaggcaaaccttactgtgg

SEQ ID NO: 1642453 - DNA, 25 bp, Homo sapien
ggctgggctggttctatttacaagg

SEQ ID NO: 1642454 - DNA, 25 bp, Homo sapien
aaaagcccaccacaggggtgaggct

SEQ ID NO: 1642455 - DNA, 25 bp, Homo sapien
tgggctggttctatttacaagggac

SEQ ID NO: 1642456 - DNA, 25 bp, Homo sapien
caatctatttacacccgggggccag

SEQ ID NO: 1642457 - DNA, 25 bp, Homo sapien
gagcttgatgggctatggcccccct

SEQ ID NO: 1642458 - DNA, 25 bp, Homo sapien
ggagcttgatgggctatggcccccc

SEQ ID NO: 1642459 - DNA, 25 bp, Homo sapien
gcttgatgggctatggccccccttc

SEQ ID NO: 1642460 - DNA, 25 bp, Homo sapien
ttgatgggctatggccccccttccc

SEQ ID NO: 1642461 - DNA, 25 bp, Homo sapien
agtgagggtaggtgtggcatcggtc

SEQ ID NO: 1642462 - DNA, 25 bp, Homo sapien
tgagctggtcggagtctcagttaaa

SEQ ID NO: 1642463 - DNA, 25 bp, Homo sapien
tcggtcgactgccagtctgagctgg

SEQ ID NO: 1642464 - DNA, 25 bp, Homo sapien
taggtgtggcatcggtcgactgcca

SEQ ID NO: 1642465 - DNA, 25 bp, Homo sapien
ttgagagacggttggatggagagtt

SEQ ID NO: 1642466 - DNA, 25 bp, Homo sapien
ataagaatggcgttgagagacggtt

SEQ ID NO: 1642467 - DNA, 25 bp, Homo sapien
cctcaagtgaggagggataagaatg

SEQ ID NO: 1642468 - DNA, 25 bp, Homo sapien
tggtagtgcccgctggggacctcaa

SEQ ID NO: 1642469 - DNA, 25 bp, Homo sapien
catcaaagaagctgtgcgcacaggc

SEQ ID NO: 1642470 - DNA, 25 bp, Homo sapien
caccagcactgaagttgaagagagg

SEQ ID NO: 1642471 - DNA, 25 bp, Homo sapien
tctggcggcgttcgagatttgaaca

SEQ ID NO: 1642472 - DNA, 25 bp, Homo sapien
gctgggttcccagacatcgcagttc

SEQ ID NO: 1642473 - DNA, 25 bp, Homo sapien
catgagggtgagatgccctggacac

SEQ ID NO: 1642474 - DNA, 25 bp, Homo sapien
tgcctgcggcaagttatgactggtt

SEQ ID NO: 1642475 - DNA, 25 bp, Homo sapien
gcatactcctgttatctcactgcca

SEQ ID NO: 1642476 - DNA, 25 bp, Homo sapien
gttatgactggttgcttcccacacc

SEQ ID NO: 1642477 - DNA, 25 bp, Homo sapien
tccaggggtgagctttaatctgagg

SEQ ID NO: 1642478 - DNA, 25 bp, Homo sapien
atctctcggatttgttcccgggttg

SEQ ID NO: 1642479 - DNA, 25 bp, Homo sapien
tcatctctcggatttgttcccgggt

SEQ ID NO: 1642480 - DNA, 25 bp, Homo sapien
tggggttcatctctcggatttgttc

SEQ ID NO: 1642481 - DNA, 25 bp, Homo sapien
tggcccaagaggagctctgccagta

SEQ ID NO: 1642482 - DNA, 25 bp, Homo sapien
aggagctctgccagtacacagccag

SEQ ID NO: 1642483 - DNA, 25 bp, Homo sapien
ccaagaggagctctgccagtacaca

SEQ ID NO: 1642484 - DNA, 25 bp, Homo sapien
gggctggcccaagaggagctctgcc

SEQ ID NO: 1642485 - DNA, 25 bp, Homo sapien
gctaggcgagtagggccaccaacct

SEQ ID NO: 1642486 - DNA, 25 bp, Homo sapien
gaaatggagggagcgtcagggctag

SEQ ID NO: 1642487 - DNA, 25 bp, Homo sapien
gcgtcagggctaggcgagtagggcc

SEQ ID NO: 1642488 - DNA, 25 bp, Homo sapien
gggaaatggagggagcgtcagggct

SEQ ID NO: 1642489 - DNA, 25 bp, Homo sapien
atggatgaggtgtaatcagtggctc

SEQ ID NO: 1642490 - DNA, 25 bp, Homo sapien
ctctggggcccggtagtagcgagaa

SEQ ID NO: 1642491 - DNA, 25 bp, Homo sapien
ggcccggtagtagcgagaacagatg

SEQ ID NO: 1642492 - DNA, 25 bp, Homo sapien
cgatggatgaggtgtaatcagtggc

SEQ ID NO: 1642493 - DNA, 25 bp, Homo sapien
gccaaaatcgcagagcttgaggaca

SEQ ID NO: 1642494 - DNA, 25 bp, Homo sapien
cagagcttgaggacagcagtgtcag

SEQ ID NO: 1642495 - DNA, 25 bp, Homo sapien
cttgatgtcgcggtgacacacgccc

SEQ ID NO: 1642496 - DNA, 25 bp, Homo sapien
gtggatgtaggccaagctgcggaag

SEQ ID NO: 1642497 - DNA, 25 bp, Homo sapien
tcaacttggccttggtgaagtggcg

SEQ ID NO: 1642498 - DNA, 25 bp, Homo sapien
gacatagaggatagggatggtcaac

SEQ ID NO: 1642499 - DNA, 25 bp, Homo sapien
ggtacactgtctcgggcacatattc

SEQ ID NO: 1642500 - DNA, 25 bp, Homo sapien
caccagatttaggtaaagctcgtct

SEQ ID NO: 1642501 - DNA, 25 bp, Homo sapien
gggagcaaaggagaggtgtgaggca

SEQ ID NO: 1642502 - DNA, 25 bp, Homo sapien
cagggagcaaaggagaggtgtgagg

SEQ ID NO: 1642503 - DNA, 25 bp, Homo sapien
tgcagggagcaaaggagaggtgtga

SEQ ID NO: 1642504 - DNA, 25 bp, Homo sapien
ctgcagggagcaaaggagaggtgtg

SEQ ID NO: 1642505 - DNA, 25 bp, Homo sapien
gtatctcagcctcacaatattgcag

SEQ ID NO: 1642506 - DNA, 25 bp, Homo sapien
cactggagtagaaaaagtatctcag

SEQ ID NO: 1642507 - DNA, 25 bp, Homo sapien
gtggtccagcttacgcatgatctgc

SEQ ID NO: 1642508 - DNA, 25 bp, Homo sapien
ctcacaatattgcagtggtccagct

SEQ ID NO: 1642509 - DNA, 25 bp, Homo sapien
taagccacttcttgggagcgctctg

SEQ ID NO: 1642510 - DNA, 25 bp, Homo sapien
tgcctggtacacgaccccaaatgag

SEQ ID NO: 1642511 - DNA, 25 bp, Homo sapien
tcactttgatgtccgtgtaagccac

SEQ ID NO: 1642512 - DNA, 25 bp, Homo sapien
ggagaaccttcttgatggcgactag

SEQ ID NO: 1642513 - DNA, 25 bp, Homo sapien
gggaacaaaggggatacacgatcca

SEQ ID NO: 1642514 - DNA, 25 bp, Homo sapien
ctggggaacaaaggggatacacgat

SEQ ID NO: 1642515 - DNA, 25 bp, Homo sapien
tggggaacaaaggggatacacgatc

SEQ ID NO: 1642516 - DNA, 25 bp, Homo sapien
tacctgttcttaaggctcaaggacc

SEQ ID NO: 1642517 - DNA, 25 bp, Homo sapien
taggaaactgtgacctaccctgctc

SEQ ID NO: 1642518 - DNA, 25 bp, Homo sapien
catttgcaagcgactgtgacctctg

SEQ ID NO: 1642519 - DNA, 25 bp, Homo sapien
gcagtacagctcaacaagatttagg

SEQ ID NO: 1642520 - DNA, 25 bp, Homo sapien
ggcggcgggaagctagtgcctgcgc

SEQ ID NO: 1642521 - DNA, 25 bp, Homo sapien
cgggcggcgggaagctagtgcctgc

SEQ ID NO: 1642522 - DNA, 25 bp, Homo sapien
gcgggaagctagtgcctgcgccggg

SEQ ID NO: 1642523 - DNA, 25 bp, Homo sapien
cccgggcggcgggaagctagtgcct

SEQ ID NO: 1642524 - DNA, 25 bp, Homo sapien
ggccccgacagatgcctttccgccg

SEQ ID NO: 1642525 - DNA, 25 bp, Homo sapien
gccccgacagatgcctttccgccgc

SEQ ID NO: 1642526 - DNA, 25 bp, Homo sapien
cgggctccgcgaacgagctagtccg

SEQ ID NO: 1642527 - DNA, 25 bp, Homo sapien
gccgggctccgcgaacgagctagtc

SEQ ID NO: 1642528 - DNA, 25 bp, Homo sapien
ggctccgcgaacgagctagtccgcg

SEQ ID NO: 1642529 - DNA, 25 bp, Homo sapien
ccgccgggctccgcgaacgagctag

SEQ ID NO: 1642530 - DNA, 25 bp, Homo sapien
caggccgcgccgctctggcttgggc

SEQ ID NO: 1642531 - DNA, 25 bp, Homo sapien
aggccgcgccgctctggcttgggct

SEQ ID NO: 1642532 - DNA, 25 bp, Homo sapien
gaatgacgggtcacgctgtacgtcg

SEQ ID NO: 1642533 - DNA, 25 bp, Homo sapien
gagtccagggtaatctgtcagccga

SEQ ID NO: 1642534 - DNA, 25 bp, Homo sapien
cctcagagtagaccgcgggaatgat

SEQ ID NO: 1642535 - DNA, 25 bp, Homo sapien
cacgctgtacgtcgggaaatggagt

SEQ ID NO: 1642536 - DNA, 25 bp, Homo sapien
tttgaatacattctccagcggcccc

SEQ ID NO: 1642537 - DNA, 25 bp, Homo sapien
cccaatacagaataaggcttgacca

SEQ ID NO: 1642538 - DNA, 25 bp, Homo sapien
gatagcaggcacttgtagagatttg

SEQ ID NO: 1642539 - DNA, 25 bp, Homo sapien
agatttgtggcccatgggcggcacc

SEQ ID NO: 1642540 - DNA, 25 bp, Homo sapien
gcgattgtaatagaaaagttcctgg

SEQ ID NO: 1642541 - DNA, 25 bp, Homo sapien
gagacaaggctttacttcctaagcg

SEQ ID NO: 1642542 - DNA, 25 bp, Homo sapien
gagacagggaatagcccctagccct

SEQ ID NO: 1642543 - DNA, 25 bp, Homo sapien
taaattccccagaatggaggtgacc

SEQ ID NO: 1642544 - DNA, 25 bp, Homo sapien
ggtcagagctcacccgccttggggt

SEQ ID NO: 1642545 - DNA, 25 bp, Homo sapien
tggaggtcagagctcacccgccttg

SEQ ID NO: 1642546 - DNA, 25 bp, Homo sapien
gaggtcagagctcacccgccttggg

SEQ ID NO: 1642547 - DNA, 25 bp, Homo sapien
ctggaggtcagagctcacccgcctt

SEQ ID NO: 1642548 - DNA, 25 bp, Homo sapien
ccccttcgaggcgacagtcttcact

SEQ ID NO: 1642549 - DNA, 25 bp, Homo sapien
ttcgaggcgacagtcttcactccag

SEQ ID NO: 1642550 - DNA, 25 bp, Homo sapien
actccagcgccgcttaaagcgtagc

SEQ ID NO: 1642551 - DNA, 25 bp, Homo sapien
taaagcgtagcttgaggggcatgca

SEQ ID NO: 1642552 - DNA, 25 bp, Homo sapien
ggcacggggcgtcttgaacacctcc

SEQ ID NO: 1642553 - DNA, 25 bp, Homo sapien
ctgggatgccccgggtgcctcgccg

SEQ ID NO: 1642554 - DNA, 25 bp, Homo sapien
tgggatgccccgggtgcctcgccgg

SEQ ID NO: 1642555 - DNA, 25 bp, Homo sapien
gatgccccgggtgcctcgccgggct

SEQ ID NO: 1642556 - DNA, 25 bp, Homo sapien
gggcggctggagcttaaacttgaat

SEQ ID NO: 1642557 - DNA, 25 bp, Homo sapien
taccgtttcatgtcctcagggctga

SEQ ID NO: 1642558 - DNA, 25 bp, Homo sapien
gacgtgccatcactacagtcactga

SEQ ID NO: 1642559 - DNA, 25 bp, Homo sapien
gatagactcggaagacaccagggtc

SEQ ID NO: 1642560 - DNA, 25 bp, Homo sapien
gagggcgttgagggagggaagcgga

SEQ ID NO: 1642561 - DNA, 25 bp, Homo sapien
ggctaccacccgacggcactggcgg

SEQ ID NO: 1642562 - DNA, 25 bp, Homo sapien
ggagggaagcggaagtggctaccac

SEQ ID NO: 1642563 - DNA, 25 bp, Homo sapien
gaagtggctaccacccgacggcact

SEQ ID NO: 1642564 - DNA, 25 bp, Homo sapien
agccaaccccacatcaatgaatggg

SEQ ID NO: 1642565 - DNA, 25 bp, Homo sapien
cagaatgcgcttgttatagtaatag

SEQ ID NO: 1642566 - DNA, 25 bp, Homo sapien
tttccccttggtcttgtgcagaatg

SEQ ID NO: 1642567 - DNA, 25 bp, Homo sapien
gaatgggtaattgaccagcaccagt

SEQ ID NO: 1642568 - DNA, 25 bp, Homo sapien
actctggcttgtaggcccaatccgg

SEQ ID NO: 1642569 - DNA, 25 bp, Homo sapien
tgatgacgaattccccgtagtcccc

SEQ ID NO: 1642570 - DNA, 25 bp, Homo sapien
ctttgatgacgaattccccgtagtc

SEQ ID NO: 1642571 - DNA, 25 bp, Homo sapien
ctctggcttgtaggcccaatccggg

SEQ ID NO: 1642572 - DNA, 25 bp, Homo sapien
tgtctcctccgaagacccaacagag

SEQ ID NO: 1642573 - DNA, 25 bp, Homo sapien
accccagctcctcggatgtcctcct

SEQ ID NO: 1642574 - DNA, 25 bp, Homo sapien
cggatgtcctccttagaaacatgca

SEQ ID NO: 1642575 - DNA, 25 bp, Homo sapien
tcccattcagagccagttgcaccac

SEQ ID NO: 1642576 - DNA, 25 bp, Homo sapien
actcggttgccgatgaggtcagcgc

SEQ ID NO: 1642577 - DNA, 25 bp, Homo sapien
agcttgagcaggcaccctggagctg

SEQ ID NO: 1642578 - DNA, 25 bp, Homo sapien
aggtcagcgcttgcacacacagagg

SEQ ID NO: 1642579 - DNA, 25 bp, Homo sapien
gagagtgaaacccagactgtctgag

SEQ ID NO: 1642580 - DNA, 25 bp, Homo sapien
cagcctccgtgtcccggtaaccagg

SEQ ID NO: 1642581 - DNA, 25 bp, Homo sapien
cggtaaccaggcaacgtgtgtgcag

SEQ ID NO: 1642582 - DNA, 25 bp, Homo sapien
caggcaacgtgtgtgcagcgacagt

SEQ ID NO: 1642583 - DNA, 25 bp, Homo sapien
taaccaggcaacgtgtgtgcagcga

SEQ ID NO: 1642584 - DNA, 25 bp, Homo sapien
atcggacacagcatacatgaaggcc

SEQ ID NO: 1642585 - DNA, 25 bp, Homo sapien
cctcatcggacacagcatacatgaa

SEQ ID NO: 1642586 - DNA, 25 bp, Homo sapien
tcatcggacacagcatacatgaagg

SEQ ID NO: 1642587 - DNA, 25 bp, Homo sapien
ttcctcatcggacacagcatacatg

SEQ ID NO: 1642588 - DNA, 25 bp, Homo sapien
aggagcccgagccgccgccgccgcc

SEQ ID NO: 1642589 - DNA, 25 bp, Homo sapien
ccgcacacaggagcccgagccgccg

SEQ ID NO: 1642590 - DNA, 25 bp, Homo sapien
gccacgagaagcaacaggtctccag

SEQ ID NO: 1642591 - DNA, 25 bp, Homo sapien
actccgcccggagccaggaatcggg

SEQ ID NO: 1642592 - DNA, 25 bp, Homo sapien
cgctcgcgccacgagaagcaacagg

SEQ ID NO: 1642593 - DNA, 25 bp, Homo sapien
caggtctccagtgcttgaggggtcc

SEQ ID NO: 1642594 - DNA, 25 bp, Homo sapien
gcgccccgattccgggccgcggctc

SEQ ID NO: 1642595 - DNA, 25 bp, Homo sapien
agcgccccgattccgggccgcggct

SEQ ID NO: 1642596 - DNA, 25 bp, Homo sapien
gcgaagcgccccgattccgggccgc

SEQ ID NO: 1642597 - DNA, 25 bp, Homo sapien
gcgccctcgctgccccgtcccgtcc

SEQ ID NO: 1642598 - DNA, 25 bp, Homo sapien
gcatttcccagcttggttttaccca

SEQ ID NO: 1642599 - DNA, 25 bp, Homo sapien
gatgatgaagaccacagcatttccc

SEQ ID NO: 1642600 - DNA, 25 bp, Homo sapien
accctgagcctgaatgggggcagct

SEQ ID NO: 1642601 - DNA, 25 bp, Homo sapien
gaatgggtgggatgcatttcccagc

SEQ ID NO: 1642602 - DNA, 25 bp, Homo sapien
cacggatattgtaaccctctgggag

SEQ ID NO: 1642603 - DNA, 25 bp, Homo sapien
taaccctctgggagcggtgtggtcc

SEQ ID NO: 1642604 - DNA, 25 bp, Homo sapien
ccccacggatattgtaaccctctgg

SEQ ID NO: 1642605 - DNA, 25 bp, Homo sapien
ggagcggtgtggtccagcaataata

SEQ ID NO: 1642606 - DNA, 25 bp, Homo sapien
ggagttgtagtctgccttgtactgt

SEQ ID NO: 1642607 - DNA, 25 bp, Homo sapien
ctcctcgccgggtttctttggtgct

SEQ ID NO: 1642608 - DNA, 25 bp, Homo sapien
tctcctcgccgggtttctttggtgc

SEQ ID NO: 1642609 - DNA, 25 bp, Homo sapien
gggagttgtagtctgccttgtactg

SEQ ID NO: 1642610 - DNA, 25 bp, Homo sapien
gatcaggcagtcgtaggctcaggtt

SEQ ID NO: 1642611 - DNA, 25 bp, Homo sapien
ttgttgtagggtagggccctaggca

SEQ ID NO: 1642612 - DNA, 25 bp, Homo sapien
tagggccctaggcagatcaggcagt

SEQ ID NO: 1642613 - DNA, 25 bp, Homo sapien
ctcaggttggtgtcggtcccggagg

SEQ ID NO: 1642614 - DNA, 25 bp, Homo sapien
ttcaagtctcgagcgcccaagaaga

SEQ ID NO: 1642615 - DNA, 25 bp, Homo sapien
gaagaagtatgtggaggagcacgga

SEQ ID NO: 1642616 - DNA, 25 bp, Homo sapien
gggcccctgaagagcgggtgcggac

SEQ ID NO: 1642617 - DNA, 25 bp, Homo sapien
agccgcaagacagccacgttcaagt

SEQ ID NO: 1642618 - DNA, 25 bp, Homo sapien
tgggggtgcctccacggccacccac

SEQ ID NO: 1642619 - DNA, 25 bp, Homo sapien
aggccagtggcctgggggtgcctcc

SEQ ID NO: 1642620 - DNA, 25 bp, Homo sapien
ctgaggaggccagtggcctgggggt

SEQ ID NO: 1642621 - DNA, 25 bp, Homo sapien
agtggcctgggggtgcctccacggc

SEQ ID NO: 1642622 - DNA, 25 bp, Homo sapien
tgaccgagccctgactttctatgag

SEQ ID NO: 1642623 - DNA, 25 bp, Homo sapien
ggcagcaccagtggcagctatgacc

SEQ ID NO: 1642624 - DNA, 25 bp, Homo sapien
actgacacagccagcgagcactcgg

SEQ ID NO: 1642625 - DNA, 25 bp, Homo sapien
gtgtggatgtagttttggatgccac

SEQ ID NO: 1642626 - DNA, 25 bp, Homo sapien
aagttcaacggcaagcagtggcgcc

SEQ ID NO: 1642627 - DNA, 25 bp, Homo sapien
tacaagaagggcgatgtggtctgca

SEQ ID NO: 1642628 - DNA, 25 bp, Homo sapien
gcacacccagcggaatacgaaagaa

SEQ ID NO: 1642629 - DNA, 25 bp, Homo sapien
tgacagccgcccagcagaagtacaa

SEQ ID NO: 1642630 - DNA, 25 bp, Homo sapien
gtgcagcgggactcacctgttattg

SEQ ID NO: 1642631 - DNA, 25 bp, Homo sapien
gaagacagagctgttgccgcatcca

SEQ ID NO: 1642632 - DNA, 25 bp, Homo sapien
tgttattgtccgcaaccctgatgtg

SEQ ID NO: 1642633 - DNA, 25 bp, Homo sapien
tagactctggtgtggactcagtgtc

SEQ ID NO: 1642634 - DNA, 25 bp, Homo sapien
gccctgttgcccgttttggtgccca

SEQ ID NO: 1642635 - DNA, 25 bp, Homo sapien
tggtgcccagcagctataccagcca

SEQ ID NO: 1642636 - DNA, 25 bp, Homo sapien
gcccgttttggtgcccagcagctat

SEQ ID NO: 1642637 - DNA, 25 bp, Homo sapien
ctgctgccctgttgcccgttttggt

SEQ ID NO: 1642638 - DNA, 25 bp, Homo sapien
cggtgcccgggtattaatggctcca

SEQ ID NO: 1642639 - DNA, 25 bp, Homo sapien
ggtgcccgggtattaatggctccat

SEQ ID NO: 1642640 - DNA, 25 bp, Homo sapien
aatgttgtgggaaggcagcaggatg

SEQ ID NO: 1642641 - DNA, 25 bp, Homo sapien
atgttgtgggaaggcagcaggatgc

SEQ ID NO: 1642642 - DNA, 25 bp, Homo sapien
tggtcttgggccagcagacgcagaa

SEQ ID NO: 1642643 - DNA, 25 bp, Homo sapien
tagcccaggcggctcagatgcaggt

SEQ ID NO: 1642644 - DNA, 25 bp, Homo sapien
tgccatctgagtgcacaaagccagg

SEQ ID NO: 1642645 - DNA, 25 bp, Homo sapien
tgcagagcccggcaaacaggtgtgt

SEQ ID NO: 1642646 - DNA, 25 bp, Homo sapien
gtatcttgttctctgtgccaacctg

SEQ ID NO: 1642647 - DNA, 25 bp, Homo sapien
ccaccatgaagtttccagctgcaga

SEQ ID NO: 1642648 - DNA, 25 bp, Homo sapien
ggcgtagtaaggaaacaagcatttg

SEQ ID NO: 1642649 - DNA, 25 bp, Homo sapien
ctgagcaggaacacgaggcgtagta

SEQ ID NO: 1642650 - DNA, 25 bp, Homo sapien
gtgggagggtagttcctaaatatca

SEQ ID NO: 1642651 - DNA, 25 bp, Homo sapien
ctttcccactctcccagcctctcac

SEQ ID NO: 1642652 - DNA, 25 bp, Homo sapien
ttcttcctttcccactctcccagcc

SEQ ID NO: 1642653 - DNA, 25 bp, Homo sapien
tcctttcccactctcccagcctctc

SEQ ID NO: 1642654 - DNA, 25 bp, Homo sapien
cttcctttcccactctcccagcctc

SEQ ID NO: 1642655 - DNA, 25 bp, Homo sapien
cagcaccacaacccgggcctggggc

SEQ ID NO: 1642656 - DNA, 25 bp, Homo sapien
ttgcacaatggccttgatgccacca

SEQ ID NO: 1642657 - DNA, 25 bp, Homo sapien
gcacaatggccttgatgccaccagt

SEQ ID NO: 1642658 - DNA, 25 bp, Homo sapien
cagttgcacaatggccttgatgcca

SEQ ID NO: 1642659 - DNA, 25 bp, Homo sapien
caatggccttgatgccaccagtcac

SEQ ID NO: 1642660 - DNA, 25 bp, Homo sapien
tgtgtgtccgtggttgttggtgccc

SEQ ID NO: 1642661 - DNA, 25 bp, Homo sapien
gtgtgtccgtggttgttggtgccca

SEQ ID NO: 1642662 - DNA, 25 bp, Homo sapien
gccaaaagatgttttagagccccac

SEQ ID NO: 1642663 - DNA, 25 bp, Homo sapien
aagagacatgaagcagcggtgaggg

SEQ ID NO: 1642664 - DNA, 25 bp, Homo sapien
gaaaaagagacatgaagcagcggtg

SEQ ID NO: 1642665 - DNA, 25 bp, Homo sapien
aagatgttttagagccccacccaag

SEQ ID NO: 1642666 - DNA, 25 bp, Homo sapien
ttgggccggatgtgttccagctccc

SEQ ID NO: 1642667 - DNA, 25 bp, Homo sapien
ctccagccgccacagtacatgctgt

SEQ ID NO: 1642668 - DNA, 25 bp, Homo sapien
tgccgtcaccaccaatgccaaagtt

SEQ ID NO: 1642669 - DNA, 25 bp, Homo sapien
tgccaaagttaagtgcatgcagagg

SEQ ID NO: 1642670 - DNA, 25 bp, Homo sapien
cgacttcgggttccttatctttgct

SEQ ID NO: 1642671 - DNA, 25 bp, Homo sapien
tgctgtcagccacgaaccgatggtg

SEQ ID NO: 1642672 - DNA, 25 bp, Homo sapien
gagtccccgatgaagacgacttcgg

SEQ ID NO: 1642673 - DNA, 25 bp, Homo sapien
tgcatgagctggaccaaggagtccc

SEQ ID NO: 1642674 - DNA, 25 bp, Homo sapien
ccgcgcccccggactcctcaatatc

SEQ ID NO: 1642675 - DNA, 25 bp, Homo sapien
gcccccggactcctcaatatcccag

SEQ ID NO: 1642676 - DNA, 25 bp, Homo sapien
cggactcctcaatatcccaggtggg

SEQ ID NO: 1642677 - DNA, 25 bp, Homo sapien
ccccggactcctcaatatcccaggt

SEQ ID NO: 1642678 - DNA, 25 bp, Homo sapien
ggcgtgggcttgctggctgggttct

SEQ ID NO: 1642679 - DNA, 25 bp, Homo sapien
atccagcgcccgtcgccctgtacgt

SEQ ID NO: 1642680 - DNA, 25 bp, Homo sapien
cagggacatccagcgcccgtcgccc

SEQ ID NO: 1642681 - DNA, 25 bp, Homo sapien
ctgtacgtcctgcaccggcgtgggc

SEQ ID NO: 1642682 - DNA, 25 bp, Homo sapien
tgcaggatgagcgagtcgggtcggc

SEQ ID NO: 1642683 - DNA, 25 bp, Homo sapien
gagtgttccgaacggagctggctcc

SEQ ID NO: 1642684 - DNA, 25 bp, Homo sapien
agcgagtcgggtcggcccgggagtg

SEQ ID NO: 1642685 - DNA, 25 bp, Homo sapien
acaaaggaccgtcccaacgctagca

SEQ ID NO: 1642686 - DNA, 25 bp, Homo sapien
tcctctccagggacggaagccttca

SEQ ID NO: 1642687 - DNA, 25 bp, Homo sapien
cgaaggccgatacagggcgccgcct

SEQ ID NO: 1642688 - DNA, 25 bp, Homo sapien
gcggaggacgaaggccgatacaggg

SEQ ID NO: 1642689 - DNA, 25 bp, Homo sapien
ttcacttaggaggtaggtggaatca

SEQ ID NO: 1642690 - DNA, 25 bp, Homo sapien
gctcgcccggcgcttcccgctcggg

SEQ ID NO: 1642691 - DNA, 25 bp, Homo sapien
gggccgctgactcccaggccgcgca

SEQ ID NO: 1642692 - DNA, 25 bp, Homo sapien
agtgggctcgcccggcgcttcccgc

SEQ ID NO: 1642693 - DNA, 25 bp, Homo sapien
ccgctcgggccgctgactcccaggc

SEQ ID NO: 1642694 - DNA, 25 bp, Homo sapien
gaaaatctagccctctgtctagcaa

SEQ ID NO: 1642695 - DNA, 25 bp, Homo sapien
tgggcggggaaaatctagccctctg

SEQ ID NO: 1642696 - DNA, 25 bp, Homo sapien
gggaaaatctagccctctgtctagc

SEQ ID NO: 1642697 - DNA, 25 bp, Homo sapien
cggggaaaatctagccctctgtcta

SEQ ID NO: 1642698 - DNA, 25 bp, Homo sapien
gaccaggtggggggctcactccctg

SEQ ID NO: 1642699 - DNA, 25 bp, Homo sapien
accaggtggggggctcactccctgc

SEQ ID NO: 1642700 - DNA, 25 bp, Homo sapien
gatgacccctagctttgtggcctga

SEQ ID NO: 1642701 - DNA, 25 bp, Homo sapien
tttaagaggtcactcagttgtgctg

SEQ ID NO: 1642702 - DNA, 25 bp, Homo sapien
tctcttcactcaggtccaactaggg

SEQ ID NO: 1642703 - DNA, 25 bp, Homo sapien
tgagggaggagacaaaaccacgatg

SEQ ID NO: 1642704 - DNA, 25 bp, Homo sapien
aggccagaggcgagactggtggaaa

SEQ ID NO: 1642705 - DNA, 25 bp, Homo sapien
gggtgtatttctggcagcgggacag

SEQ ID NO: 1642706 - DNA, 25 bp, Homo sapien
gtgggtgtatttctggcagcgggac

SEQ ID NO: 1642707 - DNA, 25 bp, Homo sapien
ccagaggcgagactggtggaaaagg

SEQ ID NO: 1642708 - DNA, 25 bp, Homo sapien
gccgcccagtcgtgcccgacggagc

SEQ ID NO: 1642709 - DNA, 25 bp, Homo sapien
gacaaaaggtgagggccgcccagtc

SEQ ID NO: 1642710 - DNA, 25 bp, Homo sapien
ttcccgcgccatctggcagagggcg

SEQ ID NO: 1642711 - DNA, 25 bp, Homo sapien
tctcggatcttcagttcccgcgcca

SEQ ID NO: 1642712 - DNA, 25 bp, Homo sapien
cgccaaagtcgtcggagatgcggca

SEQ ID NO: 1642713 - DNA, 25 bp, Homo sapien
cacagaggagcaaaagtgccgcaca

SEQ ID NO: 1642714 - DNA, 25 bp, Homo sapien
gatgtggtagcgctcccgcatgccg

SEQ ID NO: 1642715 - DNA, 25 bp, Homo sapien
gcgcagcagcactcgccaaagtcgt

SEQ ID NO: 1642716 - DNA, 25 bp, Homo sapien
tcgttgcagcagtccgtgagacctg

SEQ ID NO: 1642717 - DNA, 25 bp, Homo sapien
agtccgtgagacctgtgtgccagtc

SEQ ID NO: 1642718 - DNA, 25 bp, Homo sapien
agacaggcatgtcgttgcagcagtc

SEQ ID NO: 1642719 - DNA, 25 bp, Homo sapien
catgtcgttgcagcagtccgtgaga

SEQ ID NO: 1642720 - DNA, 25 bp, Homo sapien
ttgtcgtgcatctcaaactgcatct

SEQ ID NO: 1642721 - DNA, 25 bp, Homo sapien
gcctttcacgttgtcgtgcatctca

SEQ ID NO: 1642722 - DNA, 25 bp, Homo sapien
catctcaaactgcatcttgctggcc

SEQ ID NO: 1642723 - DNA, 25 bp, Homo sapien
tcacgttgtcgtgcatctcaaactg

SEQ ID NO: 1642724 - DNA, 25 bp, Homo sapien
caggatcgcgatggcagtgatggag

SEQ ID NO: 1642725 - DNA, 25 bp, Homo sapien
gcaggatcgcgatggcagtgatgga

SEQ ID NO: 1642726 - DNA, 25 bp, Homo sapien
aggatcgcgatggcagtgatggagg

SEQ ID NO: 1642727 - DNA, 25 bp, Homo sapien
tgcaggatcgcgatggcagtgatgg

SEQ ID NO: 1642728 - DNA, 25 bp, Homo sapien
catcttcacctttccagctgtgaat

SEQ ID NO: 1642729 - DNA, 25 bp, Homo sapien
tgcatcttcacctttccagctgtga

SEQ ID NO: 1642730 - DNA, 25 bp, Homo sapien
tcttcacctttccagctgtgaatct

SEQ ID NO: 1642731 - DNA, 25 bp, Homo sapien
ctgcatcttcacctttccagctgtg

SEQ ID NO: 1642732 - DNA, 25 bp, Homo sapien
gagtctggcggcgaaagctatccat

SEQ ID NO: 1642733 - DNA, 25 bp, Homo sapien
cacgcgaggcgcttctttggagtct

SEQ ID NO: 1642734 - DNA, 25 bp, Homo sapien
cccaactcgggcagcgataggcttt

SEQ ID NO: 1642735 - DNA, 25 bp, Homo sapien
gataggctttcggagacgccagtct

SEQ ID NO: 1642736 - DNA, 25 bp, Homo sapien
agtcagtcggccaatagacccggaa

SEQ ID NO: 1642737 - DNA, 25 bp, Homo sapien
ttaggattctgcacatagctcgggt

SEQ ID NO: 1642738 - DNA, 25 bp, Homo sapien
ttctccgagtctggccgggtaagcc

SEQ ID NO: 1642739 - DNA, 25 bp, Homo sapien
gccctttccagcacgcctagtatta

SEQ ID NO: 1642740 - DNA, 25 bp, Homo sapien
tgtccagaatggccctccacaggtc

SEQ ID NO: 1642741 - DNA, 25 bp, Homo sapien
gtcttcaaggggaggagctgaggac

SEQ ID NO: 1642742 - DNA, 25 bp, Homo sapien
cgaaggtcttcaaggggaggagctg

SEQ ID NO: 1642743 - DNA, 25 bp, Homo sapien
gagctgaggacccagcatctcctgg

SEQ ID NO: 1642744 - DNA, 25 bp, Homo sapien
aggacccagcatctcctggcagtgt

SEQ ID NO: 1642745 - DNA, 25 bp, Homo sapien
tcttggttcccagccgcttgagtcc

SEQ ID NO: 1642746 - DNA, 25 bp, Homo sapien
tcccagccgcttgagtccgatgctg

SEQ ID NO: 1642747 - DNA, 25 bp, Homo sapien
gatgaagtccgaggggaggtgggtc

SEQ ID NO: 1642748 - DNA, 25 bp, Homo sapien
ggttcccagccgcttgagtccgatg

SEQ ID NO: 1642749 - DNA, 25 bp, Homo sapien
cggcgcagatgggaacaacaggctt

SEQ ID NO: 1642750 - DNA, 25 bp, Homo sapien
ccggaaggcattcatgacggaggcc

SEQ ID NO: 1642751 - DNA, 25 bp, Homo sapien
tccccgtggcgagggtctcagcttt

SEQ ID NO: 1642752 - DNA, 25 bp, Homo sapien
acttaagtaaggcacagcccgcgtc

SEQ ID NO: 1642753 - DNA, 25 bp, Homo sapien
tgtcgccccccgcagcccccgtcta

SEQ ID NO: 1642754 - DNA, 25 bp, Homo sapien
ggaggagtgaggacgaggcggatgc

SEQ ID NO: 1642755 - DNA, 25 bp, Homo sapien
aggagtgaggacgaggcggatgcgc

SEQ ID NO: 1642756 - DNA, 25 bp, Homo sapien
gcgggaggagtgaggacgaggcgga

SEQ ID NO: 1642757 - DNA, 25 bp, Homo sapien
gagtgaggacgaggcggatgcgctc

SEQ ID NO: 1642758 - DNA, 25 bp, Homo sapien
gctggcccaggttgcgcagtcgccg

SEQ ID NO: 1642759 - DNA, 25 bp, Homo sapien
ggcacagcgccgctagggtcaggaa

SEQ ID NO: 1642760 - DNA, 25 bp, Homo sapien
tcaggaagccgtgcggcaggtcctc

SEQ ID NO: 1642761 - DNA, 25 bp, Homo sapien
agtcgccgcgcgagcatgaccgagt

SEQ ID NO: 1642762 - DNA, 25 bp, Homo sapien
tcttgagggaatccgtgcccagtgg

SEQ ID NO: 1642763 - DNA, 25 bp, Homo sapien
tctcagctgacagcgacatctcggg

SEQ ID NO: 1642764 - DNA, 25 bp, Homo sapien
tcggagtttcccctcaggctcaagt

SEQ ID NO: 1642765 - DNA, 25 bp, Homo sapien
ctcttgagcatgctgtcgggtgcca

SEQ ID NO: 1642766 - DNA, 25 bp, Homo sapien
agccccatcatgccgagggctttct

SEQ ID NO: 1642767 - DNA, 25 bp, Homo sapien
ccaggcggaagtctcggaggagcag

SEQ ID NO: 1642768 - DNA, 25 bp, Homo sapien
tctggtctgagttggagtggtcctc

SEQ ID NO: 1642769 - DNA, 25 bp, Homo sapien
ggacttgcgcccacttaactccagg

SEQ ID NO: 1642770 - DNA, 25 bp, Homo sapien
tgtgggtagctgagttgttttcccc

SEQ ID NO: 1642771 - DNA, 25 bp, Homo sapien
tcccagggacccgagaatatccaat

SEQ ID NO: 1642772 - DNA, 25 bp, Homo sapien
tctgggcccagttttaacgcccaga

SEQ ID NO: 1642773 - DNA, 25 bp, Homo sapien
agaatatccaatcgcttcaaaaggg

SEQ ID NO: 1642774 - DNA, 25 bp, Homo sapien
cgcaaggcagattcgttcccctgtt

SEQ ID NO: 1642775 - DNA, 25 bp, Homo sapien
gcataggcgctgacacacttggaga

SEQ ID NO: 1642776 - DNA, 25 bp, Homo sapien
taggctgccatgatgccatctggca

SEQ ID NO: 1642777 - DNA, 25 bp, Homo sapien
tgcccgaagagccacggtgaagcag

SEQ ID NO: 1642778 - DNA, 25 bp, Homo sapien
gggtggttggtgacaacctggcagg

SEQ ID NO: 1642779 - DNA, 25 bp, Homo sapien
aggggtggttggtgacaacctggca

SEQ ID NO: 1642780 - DNA, 25 bp, Homo sapien
tgggagaggggtggttggtgacaac

SEQ ID NO: 1642781 - DNA, 25 bp, Homo sapien
gagaggggtggttggtgacaacctg

SEQ ID NO: 1642782 - DNA, 25 bp, Homo sapien
cgttggccgttggactttatcaggc

SEQ ID NO: 1642783 - DNA, 25 bp, Homo sapien
gtggaagtgcactatcagggaccgc

SEQ ID NO: 1642784 - DNA, 25 bp, Homo sapien
acagctccaggctccgttggccgtt

SEQ ID NO: 1642785 - DNA, 25 bp, Homo sapien
tgatggcccagcagtaggcgaagaa

SEQ ID NO: 1642786 - DNA, 25 bp, Homo sapien
gcaggctgagcaggcggcttaccct

SEQ ID NO: 1642787 - DNA, 25 bp, Homo sapien
cataggagatgagcctgacgaggac

SEQ ID NO: 1642788 - DNA, 25 bp, Homo sapien
catctcaaaggcttcgggtggcagg

SEQ ID NO: 1642789 - DNA, 25 bp, Homo sapien
tgtccttcacgcaggtcataggaga

SEQ ID NO: 1642790 - DNA, 25 bp, Homo sapien
acttccatctcggtgatgttccaga

SEQ ID NO: 1642791 - DNA, 25 bp, Homo sapien
aaggctttccagaagtgcacgtcca

SEQ ID NO: 1642792 - DNA, 25 bp, Homo sapien
caaagcggccgctggtgaagagaga

SEQ ID NO: 1642793 - DNA, 25 bp, Homo sapien
cagaagtgcacgtccaggttctgtg

SEQ ID NO: 1642794 - DNA, 25 bp, Homo sapien
gaggcctgtctcgttgcgtttgtag

SEQ ID NO: 1642795 - DNA, 25 bp, Homo sapien
gagatggtctgcaggaatggccgga

SEQ ID NO: 1642796 - DNA, 25 bp, Homo sapien
cgtttgtagtgctccccgaaggaca

SEQ ID NO: 1642797 - DNA, 25 bp, Homo sapien
caggaatggccggatggcaggcgtg

SEQ ID NO: 1642798 - DNA, 25 bp, Homo sapien
tatgcagcgtgacatactcccggag

SEQ ID NO: 1642799 - DNA, 25 bp, Homo sapien
gaccctggctcgagaagaaggctat

SEQ ID NO: 1642800 - DNA, 25 bp, Homo sapien
gctgtgtgcactaggctgcggtacc

SEQ ID NO: 1642801 - DNA, 25 bp, Homo sapien
gaaggctatgttgtcctccgccaga

SEQ ID NO: 1642802 - DNA, 25 bp, Homo sapien
cccttctaggtcctggggcctggca

SEQ ID NO: 1642803 - DNA, 25 bp, Homo sapien
tcccttctaggtcctggggcctggc

SEQ ID NO: 1642804 - DNA, 25 bp, Homo sapien
ctcctaggcatcttccgagcttccc

SEQ ID NO: 1642805 - DNA, 25 bp, Homo sapien
tcctaggcatcttccgagcttccct

SEQ ID NO: 1642806 - DNA, 25 bp, Homo sapien
cctaggcatcttccgagcttccctg

SEQ ID NO: 1642807 - DNA, 25 bp, Homo sapien
ctaggcatcttccgagcttccctgg

SEQ ID NO: 1642808 - DNA, 25 bp, Homo sapien
gacagggctgtgttgcctagcctgg

SEQ ID NO: 1642809 - DNA, 25 bp, Homo sapien
ggttttgaattccaggcctcaagag

SEQ ID NO: 1642810 - DNA, 25 bp, Homo sapien
gtagctgggagagtcactgcatctg

SEQ ID NO: 1642811 - DNA, 25 bp, Homo sapien
ttgagtagctgggagagtcactgca

SEQ ID NO: 1642812 - DNA, 25 bp, Homo sapien
tgccccacaacctatgagggagaga

SEQ ID NO: 1642813 - DNA, 25 bp, Homo sapien
tatgtgtcatggctggcgtgtgtcc

SEQ ID NO: 1642814 - DNA, 25 bp, Homo sapien
tgtgaagtgactcatgtcgcctgcc

SEQ ID NO: 1642815 - DNA, 25 bp, Homo sapien
tccgtcggcactggtacatttgaag

SEQ ID NO: 1642816 - DNA, 25 bp, Homo sapien
tggtccacgaagctcgcattccgga

SEQ ID NO: 1642817 - DNA, 25 bp, Homo sapien
tgggaaacactgagggcatccgttg

SEQ ID NO: 1642818 - DNA, 25 bp, Homo sapien
tcacacagcgaatacggaatccgag

SEQ ID NO: 1642819 - DNA, 25 bp, Homo sapien
gctggagccctgaacatcggcgctt

SEQ ID NO: 1642820 - DNA, 25 bp, Homo sapien
ttgtccccgcaagcggcaatgggcc

SEQ ID NO: 1642821 - DNA, 25 bp, Homo sapien
tcatcccgttgtccccgcaagcggc

SEQ ID NO: 1642822 - DNA, 25 bp, Homo sapien
cccgttgtccccgcaagcggcaatg

SEQ ID NO: 1642823 - DNA, 25 bp, Homo sapien
cgttgtccccgcaagcggcaatggg

SEQ ID NO: 1642824 - DNA, 25 bp, Homo sapien
gatgtacgaggttccttccgggctg

SEQ ID NO: 1642825 - DNA, 25 bp, Homo sapien
tgccccgtaggatgtacgaggttcc

SEQ ID NO: 1642826 - DNA, 25 bp, Homo sapien
ccttccgggctgctgccggtctccg

SEQ ID NO: 1642827 - DNA, 25 bp, Homo sapien
cccactgccccgtaggatgtacgag

SEQ ID NO: 1642828 - DNA, 25 bp, Homo sapien
ttgtcttttcgccaccgccggcgac

SEQ ID NO: 1642829 - DNA, 25 bp, Homo sapien
ctctttggcattcttcgaggccggg

SEQ ID NO: 1642830 - DNA, 25 bp, Homo sapien
atagcggcctcggcgggctccgttc

SEQ ID NO: 1642831 - DNA, 25 bp, Homo sapien
gccggcgaccgtggctccttgagcc

SEQ ID NO: 1642832 - DNA, 25 bp, Homo sapien
gggggccaattccagccgcgaggcc

SEQ ID NO: 1642833 - DNA, 25 bp, Homo sapien
gcgggggccaattccagccgcgagg

SEQ ID NO: 1642834 - DNA, 25 bp, Homo sapien
cgggggccaattccagccgcgaggc

SEQ ID NO: 1642835 - DNA, 25 bp, Homo sapien
cgcgggggccaattccagccgcgag

SEQ ID NO: 1642836 - DNA, 25 bp, Homo sapien
gaaaagcgtccttcgggcaggacta

SEQ ID NO: 1642837 - DNA, 25 bp, Homo sapien
gggctcgcggccaacaaaaaggcaa

SEQ ID NO: 1642838 - DNA, 25 bp, Homo sapien
gaagtcccgatcttcccacgtgctg

SEQ ID NO: 1642839 - DNA, 25 bp, Homo sapien
agaatttaagatctggctccgcccc

SEQ ID NO: 1642840 - DNA, 25 bp, Homo sapien
gagaaacgcgttactctcttatcag

SEQ ID NO: 1642841 - DNA, 25 bp, Homo sapien
ggcgctgagaaacgcgttactctct

SEQ ID NO: 1642842 - DNA, 25 bp, Homo sapien
gcagccccggcgctgagaaacgcgt

SEQ ID NO: 1642843 - DNA, 25 bp, Homo sapien
ccccggcgctgagaaacgcgttact

SEQ ID NO: 1642844 - DNA, 25 bp, Homo sapien
ggttttctcatgtggcgacgtccca

SEQ ID NO: 1642845 - DNA, 25 bp, Homo sapien
gatttggctccctggactggcgttg

SEQ ID NO: 1642846 - DNA, 25 bp, Homo sapien
tgggccgcaggtgttgattcagctt

SEQ ID NO: 1642847 - DNA, 25 bp, Homo sapien
caggcttctgttgggtattggatcc

SEQ ID NO: 1642848 - DNA, 25 bp, Homo sapien
gcctctggtgtggttcaggttgcca

SEQ ID NO: 1642849 - DNA, 25 bp, Homo sapien
ggttataggcctctggtgtggttca

SEQ ID NO: 1642850 - DNA, 25 bp, Homo sapien
tcaggttgccagtctgacctagaca

SEQ ID NO: 1642851 - DNA, 25 bp, Homo sapien
gacactgacttagaacctggctcca

SEQ ID NO: 1642852 - DNA, 25 bp, Homo sapien
gtgcctagcactctcttacaagaag

SEQ ID NO: 1642853 - DNA, 25 bp, Homo sapien
tgggtttcactccatcctagcatca

SEQ ID NO: 1642854 - DNA, 25 bp, Homo sapien
gcagctggcagttggccgatcacag

SEQ ID NO: 1642855 - DNA, 25 bp, Homo sapien
tccctcacgggagatattgatcttc

SEQ ID NO: 1642856 - DNA, 25 bp, Homo sapien
cagtctgcagtgaatagggtaaaat

SEQ ID NO: 1642857 - DNA, 25 bp, Homo sapien
catctggttgtgaattggcagaccc

SEQ ID NO: 1642858 - DNA, 25 bp, Homo sapien
gatgaacaagtaggccaatggagac

SEQ ID NO: 1642859 - DNA, 25 bp, Homo sapien
tggcagaccccatttgaaggaaaca

SEQ ID NO: 1642860 - DNA, 25 bp, Homo sapien
tcaggtaattaagcctaagcctggg

SEQ ID NO: 1642861 - DNA, 25 bp, Homo sapien
gaagaagacactagagagagcaaca

SEQ ID NO: 1642862 - DNA, 25 bp, Homo sapien
cacaggctaagactgacgagagaag

SEQ ID NO: 1642863 - DNA, 25 bp, Homo sapien
tgtttaattggaagagtgggcgctc

SEQ ID NO: 1642864 - DNA, 25 bp, Homo sapien
agagcaaagcttcttagctgacatt

SEQ ID NO: 1642865 - DNA, 25 bp, Homo sapien
ctggcaggctctggaatgcttgttt

SEQ ID NO: 1642866 - DNA, 25 bp, Homo sapien
caggctctggaatgcttgtttggct

SEQ ID NO: 1642867 - DNA, 25 bp, Homo sapien
gcttcttagctgacattgtttgaga

SEQ ID NO: 1642868 - DNA, 25 bp, Homo sapien
ggtgtgtacctctaaccccagatcc

SEQ ID NO: 1642869 - DNA, 25 bp, Homo sapien
aacacaaaactgctagactagggag

SEQ ID NO: 1642870 - DNA, 25 bp, Homo sapien
actggtagactaaactgggtgtggt

SEQ ID NO: 1642871 - DNA, 25 bp, Homo sapien
gactagggaggagtcaaattctgtt

SEQ ID NO: 1642872 - DNA, 25 bp, Homo sapien
tgaattttcttctcggggctctcag

SEQ ID NO: 1642873 - DNA, 25 bp, Homo sapien
cttctcggggctctcaggaaccaat

SEQ ID NO: 1642874 - DNA, 25 bp, Homo sapien
ctttggcagcccagacactgtcatg

SEQ ID NO: 1642875 - DNA, 25 bp, Homo sapien
tcacaggggcactgcttctttggca

SEQ ID NO: 1642876 - DNA, 25 bp, Homo sapien
gctttaatcgccatcttctgtgcct

SEQ ID NO: 1642877 - DNA, 25 bp, Homo sapien
gcttagatgggagagttaatacatt

SEQ ID NO: 1642878 - DNA, 25 bp, Homo sapien
ctgcttagatgggagagttaataca

SEQ ID NO: 1642879 - DNA, 25 bp, Homo sapien
taggagggagtaggacagagcttta

SEQ ID NO: 1642880 - DNA, 25 bp, Homo sapien
tgatgccatcgctgttgttgttgct

SEQ ID NO: 1642881 - DNA, 25 bp, Homo sapien
tcatggtgatgccatcgctgttgtt

SEQ ID NO: 1642882 - DNA, 25 bp, Homo sapien
ctgttgttgttgctgaattactgac

SEQ ID NO: 1642883 - DNA, 25 bp, Homo sapien
tggtgatgccatcgctgttgttgtt

SEQ ID NO: 1642884 - DNA, 25 bp, Homo sapien
ttggccgccttcctggagccatctc

SEQ ID NO: 1642885 - DNA, 25 bp, Homo sapien
gaagcctggcctcggtccctgtggc

SEQ ID NO: 1642886 - DNA, 25 bp, Homo sapien
tggagccatctcctagaagcctggc

SEQ ID NO: 1642887 - DNA, 25 bp, Homo sapien
attcttggccgccttcctggagcca

SEQ ID NO: 1642888 - DNA, 25 bp, Homo sapien
catggacatcagcattagtggcagc

SEQ ID NO: 1642889 - DNA, 25 bp, Homo sapien
catcagcattagtggcagcaacagg

SEQ ID NO: 1642890 - DNA, 25 bp, Homo sapien
ggacatcagcattagtggcagcaac

SEQ ID NO: 1642891 - DNA, 25 bp, Homo sapien
gagaccatggacatcagcattagtg

SEQ ID NO: 1642892 - DNA, 25 bp, Homo sapien
ccaggccagcgttcccatttgaggg

SEQ ID NO: 1642893 - DNA, 25 bp, Homo sapien
cgcaactgtcggtgcagctgtaagt

SEQ ID NO: 1642894 - DNA, 25 bp, Homo sapien
ggtctatgctttagtcccaggccag

SEQ ID NO: 1642895 - DNA, 25 bp, Homo sapien
tgactcaggtcaggatactcagcct

SEQ ID NO: 1642896 - DNA, 25 bp, Homo sapien
cctgagcaccctggattaaccggga

SEQ ID NO: 1642897 - DNA, 25 bp, Homo sapien
ctgcaggtgtagacgtggtgagctc

SEQ ID NO: 1642898 - DNA, 25 bp, Homo sapien
gctccgataggagagaggacgttca

SEQ ID NO: 1642899 - DNA, 25 bp, Homo sapien
agagaggacgttcagagtgaaatgg

SEQ ID NO: 1642900 - DNA, 25 bp, Homo sapien
gggatatttgtattctctttttcac

SEQ ID NO: 1642901 - DNA, 25 bp, Homo sapien
cagggatatttgtattctctttttc

SEQ ID NO: 1642902 - DNA, 25 bp, Homo sapien
tttgtattctctttttcactttgag

SEQ ID NO: 1642903 - DNA, 25 bp, Homo sapien
tatttgtattctctttttcactttg

SEQ ID NO: 1642904 - DNA, 25 bp, Homo sapien
tggattctctgaattgttctttcaa

SEQ ID NO: 1642905 - DNA, 25 bp, Homo sapien
tctaacctggattctctgaattgtt

SEQ ID NO: 1642906 - DNA, 25 bp, Homo sapien
acctggattctctgaattgttcttt

SEQ ID NO: 1642907 - DNA, 25 bp, Homo sapien
ctctaacctggattctctgaattgt

SEQ ID NO: 1642908 - DNA, 25 bp, Homo sapien
tttcagtctcttcacaagaagtaat

SEQ ID NO: 1642909 - DNA, 25 bp, Homo sapien
ttttcagccacaacaactggattct

SEQ ID NO: 1642910 - DNA, 25 bp, Homo sapien
taatcatacggacagttgtgcttgt

SEQ ID NO: 1642911 - DNA, 25 bp, Homo sapien
tgtaagaccaactttctttctgcac

SEQ ID NO: 1642912 - DNA, 25 bp, Homo sapien
caaaacaaatttccacatcggcagt

SEQ ID NO: 1642913 - DNA, 25 bp, Homo sapien
ctgaaaaactgatgggctgggctga

SEQ ID NO: 1642914 - DNA, 25 bp, Homo sapien
tgggctgggctgagtgacaactggc

SEQ ID NO: 1642915 - DNA, 25 bp, Homo sapien
actgatgggctgggctgagtgacaa

SEQ ID NO: 1642916 - DNA, 25 bp, Homo sapien
tgatgggctgggctgagtgacaact

SEQ ID NO: 1642917 - DNA, 25 bp, Homo sapien
gttgaaatgctcatttctgtcattt

SEQ ID NO: 1642918 - DNA, 25 bp, Homo sapien
gggtagttattttgtcctctgttga

SEQ ID NO: 1642919 - DNA, 25 bp, Homo sapien
ttttgtcctctgttgaaatgctcat

SEQ ID NO: 1642920 - DNA, 25 bp, Homo sapien
ctgttgaaatgctcatttctgtcat

SEQ ID NO: 1642921 - DNA, 25 bp, Homo sapien
gctacacagcatgggccccggggtc

SEQ ID NO: 1642922 - DNA, 25 bp, Homo sapien
cccggggtctggttagtctcctgag

SEQ ID NO: 1642923 - DNA, 25 bp, Homo sapien
gtagcaaactgaacacattccattt

SEQ ID NO: 1642924 - DNA, 25 bp, Homo sapien
cagttgtttaagctagtgtctgctc

SEQ ID NO: 1642925 - DNA, 25 bp, Homo sapien
aggtctgagttccaaccatccccat

SEQ ID NO: 1642926 - DNA, 25 bp, Homo sapien
caggtctgagttccaaccatcccca

SEQ ID NO: 1642927 - DNA, 25 bp, Homo sapien
tttctgccaggtctgagttccaacc

SEQ ID NO: 1642928 - DNA, 25 bp, Homo sapien
atttttctgccaggtctgagttcca

SEQ ID NO: 1642929 - DNA, 25 bp, Homo sapien
tcctctggacgaaacagggctggct

SEQ ID NO: 1642930 - DNA, 25 bp, Homo sapien
attaaccaggaaggcttcaaatggg

SEQ ID NO: 1642931 - DNA, 25 bp, Homo sapien
taaactcctgctagtattaaactgt

SEQ ID NO: 1642932 - DNA, 25 bp, Homo sapien
aacagggctggctgatggaattaac

SEQ ID NO: 1642933 - DNA, 25 bp, Homo sapien
agaggctgttcagagagtatcttat

SEQ ID NO: 1642934 - DNA, 25 bp, Homo sapien
ccttcactaattgcagaataagcaa

SEQ ID NO: 1642935 - DNA, 25 bp, Homo sapien
tagaagagatccgaccctcctagag

SEQ ID NO: 1642936 - DNA, 25 bp, Homo sapien
tataaattaagagccatctccagag

SEQ ID NO: 1642937 - DNA, 25 bp, Homo sapien
gaagggtctgagtactaaatctggt

SEQ ID NO: 1642938 - DNA, 25 bp, Homo sapien
tctccagagaggtcactaagctgat

SEQ ID NO: 1642939 - DNA, 25 bp, Homo sapien
caatcggattggctgacatagctaa

SEQ ID NO: 1642940 - DNA, 25 bp, Homo sapien
aaagtatgcacagtccgtgtcaggg

SEQ ID NO: 1642941 - DNA, 25 bp, Homo sapien
cagaggctgttaaaagaggctaggc

SEQ ID NO: 1642942 - DNA, 25 bp, Homo sapien
taaataatcgctgaagggcagctct

SEQ ID NO: 1642943 - DNA, 25 bp, Homo sapien
gggtttcctacagactcccaatgta

SEQ ID NO: 1642944 - DNA, 25 bp, Homo sapien
tcaatgacaagaaggttgggtttcc

SEQ ID NO: 1642945 - DNA, 25 bp, Homo sapien
cactgcagtgagcaggacaggtttc

SEQ ID NO: 1642946 - DNA, 25 bp, Homo sapien
taacctcaaggctatggcaaatccg

SEQ ID NO: 1642947 - DNA, 25 bp, Homo sapien
tggttgtgtgggttgctgggcttca

SEQ ID NO: 1642948 - DNA, 25 bp, Homo sapien
ggaggctgaagttggttgtgtgggt

SEQ ID NO: 1642949 - DNA, 25 bp, Homo sapien
gctgggcttcaaagttcagggtaga

SEQ ID NO: 1642950 - DNA, 25 bp, Homo sapien
tgggttgctgggcttcaaagttcag

SEQ ID NO: 1642951 - DNA, 25 bp, Homo sapien
cttgttaggtgggtcattggagtgg

SEQ ID NO: 1642952 - DNA, 25 bp, Homo sapien
tgttaggtgggtcattggagtggtc

SEQ ID NO: 1642953 - DNA, 25 bp, Homo sapien
ttgttaggtgggtcattggagtggt

SEQ ID NO: 1642954 - DNA, 25 bp, Homo sapien
tcaggtgattctagctgaaggaggt

SEQ ID NO: 1642955 - DNA, 25 bp, Homo sapien
cttccctcagagtgtatggtccaga

SEQ ID NO: 1642956 - DNA, 25 bp, Homo sapien
catggaaatgcaaagctgacttcag

SEQ ID NO: 1642957 - DNA, 25 bp, Homo sapien
gaagagttagcgatccatggaaatg

SEQ ID NO: 1642958 - DNA, 25 bp, Homo sapien
aaatggctcctggaaacatgggatc

SEQ ID NO: 1642959 - DNA, 25 bp, Homo sapien
ctctctcctcagatgtgtctcaggg

SEQ ID NO: 1642960 - DNA, 25 bp, Homo sapien
agagtgcccacatccgtaatagagg

SEQ ID NO: 1642961 - DNA, 25 bp, Homo sapien
ccacatccgtaatagaggcaggagg

SEQ ID NO: 1642962 - DNA, 25 bp, Homo sapien
tggttggagactgagggtttgtgct

SEQ ID NO: 1642963 - DNA, 25 bp, Homo sapien
ggttggagactgagggtttgtgctc

SEQ ID NO: 1642964 - DNA, 25 bp, Homo sapien
tgtggttggagactgagggtttgtg

SEQ ID NO: 1642965 - DNA, 25 bp, Homo sapien
tgtgagatcacgctggtcgcttgcc

SEQ ID NO: 1642966 - DNA, 25 bp, Homo sapien
taggttctcttcctatgctatttct

SEQ ID NO: 1642967 - DNA, 25 bp, Homo sapien
cctgtgggaattagtgccgagaagc

SEQ ID NO: 1642968 - DNA, 25 bp, Homo sapien
gggattggaatacccatgtccaaga

SEQ ID NO: 1642969 - DNA, 25 bp, Homo sapien
ccttcttagaccttgctttccctga

SEQ ID NO: 1642970 - DNA, 25 bp, Homo sapien
cagaaaacatgccagggctactgct

SEQ ID NO: 1642971 - DNA, 25 bp, Homo sapien
tatcagagcaaccagggccactact

SEQ ID NO: 1642972 - DNA, 25 bp, Homo sapien
gccagggctactgctatcagagcaa

SEQ ID NO: 1642973 - DNA, 25 bp, Homo sapien
tactgctatcagagcaaccagggcc

SEQ ID NO: 1642974 - DNA, 25 bp, Homo sapien
tgggtaacatggtgagattctgtct

SEQ ID NO: 1642975 - DNA, 25 bp, Homo sapien
ttgagcccaggagttcgagtccagc

SEQ ID NO: 1642976 - DNA, 25 bp, Homo sapien
gcctgggtaacatggtgagattctg

SEQ ID NO: 1642977 - DNA, 25 bp, Homo sapien
tttgggaaacagatgggaggattgc

SEQ ID NO: 1642978 - DNA, 25 bp, Homo sapien
aaccccaaacccgtgcaatactatg

SEQ ID NO: 1642979 - DNA, 25 bp, Homo sapien
ggtagtatgtactacttaggaggct

SEQ ID NO: 1642980 - DNA, 25 bp, Homo sapien
gcaatactatggagcaggcattcac

SEQ ID NO: 1642981 - DNA, 25 bp, Homo sapien
caattttcggttgaggaatccgagg

SEQ ID NO: 1642982 - DNA, 25 bp, Homo sapien
gggaggtggaggcgggtggattgct

SEQ ID NO: 1642983 - DNA, 25 bp, Homo sapien
aggtggaggcgggtggattgcttga

SEQ ID NO: 1642984 - DNA, 25 bp, Homo sapien
ttggcaacatggtgaaacgccatct

SEQ ID NO: 1642985 - DNA, 25 bp, Homo sapien
gctcaggagtttgagaccagccttg

SEQ ID NO: 1642986 - DNA, 25 bp, Homo sapien
ttgcacaccattgacagagtaatcc

SEQ ID NO: 1642987 - DNA, 25 bp, Homo sapien
tcttaaccactttgcaattctgttt

SEQ ID NO: 1642988 - DNA, 25 bp, Homo sapien
taatcctagagggacatataggaag

SEQ ID NO: 1642989 - DNA, 25 bp, Homo sapien
gacagagtaatcctagagggacata

SEQ ID NO: 1642990 - DNA, 25 bp, Homo sapien
tacgttcagcatgatggggtcgctt

SEQ ID NO: 1642991 - DNA, 25 bp, Homo sapien
gatggggtcgctttggttcttactg

SEQ ID NO: 1642992 - DNA, 25 bp, Homo sapien
tttggttcttactgattgggttgaa

SEQ ID NO: 1642993 - DNA, 25 bp, Homo sapien
gttcttactgattgggttgaagacc

SEQ ID NO: 1642994 - DNA, 25 bp, Homo sapien
ctccctcttgacagggtttatgctg

SEQ ID NO: 1642995 - DNA, 25 bp, Homo sapien
tcatcctctccgaggacgggagact

SEQ ID NO: 1642996 - DNA, 25 bp, Homo sapien
ggtttatgctgagggtggtgttgcc

SEQ ID NO: 1642997 - DNA, 25 bp, Homo sapien
tcacaccaatacgtcccagcatcct

SEQ ID NO: 1642998 - DNA, 25 bp, Homo sapien
ttttgaagaaccaacggatggagat

SEQ ID NO: 1642999 - DNA, 25 bp, Homo sapien
aagaaccaacggatggagattccag

SEQ ID NO: 1643000 - DNA, 25 bp, Homo sapien
ttgaagaaccaacggatggagattc

SEQ ID NO: 1643001 - DNA, 25 bp, Homo sapien
tggggctttgctactactggactta

SEQ ID NO: 1643002 - DNA, 25 bp, Homo sapien
ctcatggaataggtaaaagaaggcc

SEQ ID NO: 1643003 - DNA, 25 bp, Homo sapien
gctggattcatgacaggccacctgg

SEQ ID NO: 1643004 - DNA, 25 bp, Homo sapien
aaaccagaaagcttgtaccccagat

SEQ ID NO: 1643005 - DNA, 25 bp, Homo sapien
agaagcaaattgaccttgaggaccc

SEQ ID NO: 1643006 - DNA, 25 bp, Homo sapien
tgactatgatcgtcttgactgtggt

SEQ ID NO: 1643007 - DNA, 25 bp, Homo sapien
tattggcgtggcaggtataggatcc

SEQ ID NO: 1643008 - DNA, 25 bp, Homo sapien
ttgcagccagtgactgagttattgg

SEQ ID NO: 1643009 - DNA, 25 bp, Homo sapien
gaatgttccattgataagccaggag

SEQ ID NO: 1643010 - DNA, 25 bp, Homo sapien
caaagagaataaagccacaggtgat

SEQ ID NO: 1643011 - DNA, 25 bp, Homo sapien
agccacaggtgatgtcatcagaggg

SEQ ID NO: 1643012 - DNA, 25 bp, Homo sapien
cacaggtgatgtcatcagagggaag

SEQ ID NO: 1643013 - DNA, 25 bp, Homo sapien
aataaagccacaggtgatgtcatca

SEQ ID NO: 1643014 - DNA, 25 bp, Homo sapien
tcctgagtctcaggttcacaggtga

SEQ ID NO: 1643015 - DNA, 25 bp, Homo sapien
gaggctctgattgtttatccaccac

SEQ ID NO: 1643016 - DNA, 25 bp, Homo sapien
ggttcgcactcactgggttctgtat

SEQ ID NO: 1643017 - DNA, 25 bp, Homo sapien
tgggtcactgcggttcgcactcact

SEQ ID NO: 1643018 - DNA, 25 bp, Homo sapien
aggcctgacaatcccatgtgtggga

SEQ ID NO: 1643019 - DNA, 25 bp, Homo sapien
aatttgacggttgccatccactctt

SEQ ID NO: 1643020 - DNA, 25 bp, Homo sapien
tttgacggttgccatccactctttc

SEQ ID NO: 1643021 - DNA, 25 bp, Homo sapien
cgggccctggggtagcttgttgagt

SEQ ID NO: 1643022 - DNA, 25 bp, Homo sapien
cctggggtagcttgttgagttccta

SEQ ID NO: 1643023 - DNA, 25 bp, Homo sapien
catggattcagtagtgagctgggca

SEQ ID NO: 1643024 - DNA, 25 bp, Homo sapien
ctgcaacattgaatggcatggattc

SEQ ID NO: 1643025 - DNA, 25 bp, Homo sapien
cattgaatggcatggattcagtagt

SEQ ID NO: 1643026 - DNA, 25 bp, Homo sapien
aatggcatggattcagtagtgagct

SEQ ID NO: 1643027 - DNA, 25 bp, Homo sapien
ggagagagcatcagtcaatattggg

SEQ ID NO: 1643028 - DNA, 25 bp, Homo sapien
gaggagagagcatcagtcaatattg

SEQ ID NO: 1643029 - DNA, 25 bp, Homo sapien
agagaggagagagcatcagtcaata

SEQ ID NO: 1643030 - DNA, 25 bp, Homo sapien
agagagcatcagtcaatattgggac

SEQ ID NO: 1643031 - DNA, 25 bp, Homo sapien
tgccagggtacacgcactctgtgaa

SEQ ID NO: 1643032 - DNA, 25 bp, Homo sapien
gtgtctcctgctggccctgtcttca

SEQ ID NO: 1643033 - DNA, 25 bp, Homo sapien
ggtgtctcctgctggccctgtcttc

SEQ ID NO: 1643034 - DNA, 25 bp, Homo sapien
tgtctcctgctggccctgtcttcac

SEQ ID NO: 1643035 - DNA, 25 bp, Homo sapien
gaacgcttcgagcacggctgctctg

SEQ ID NO: 1643036 - DNA, 25 bp, Homo sapien
gctccaggaacgcttcgagcacggc

SEQ ID NO: 1643037 - DNA, 25 bp, Homo sapien
cacggctgctctgtcacctctgctg

SEQ ID NO: 1643038 - DNA, 25 bp, Homo sapien
cctctgctgttttccactctctgtg

SEQ ID NO: 1643039 - DNA, 25 bp, Homo sapien
ggggcccagagctttgtctgatcat

SEQ ID NO: 1643040 - DNA, 25 bp, Homo sapien
tggggcccagagctttgtctgatca

SEQ ID NO: 1643041 - DNA, 25 bp, Homo sapien
ctggggcccagagctttgtctgatc

SEQ ID NO: 1643042 - DNA, 25 bp, Homo sapien
tgttgtctgtgtgcaatgtctcccc

SEQ ID NO: 1643043 - DNA, 25 bp, Homo sapien
gcttgaggaggaatccatttgtaga

SEQ ID NO: 1643044 - DNA, 25 bp, Homo sapien
gaggaggaatccatttgtagaggcc

SEQ ID NO: 1643045 - DNA, 25 bp, Homo sapien
gccagcttgaggaggaatccatttg

SEQ ID NO: 1643046 - DNA, 25 bp, Homo sapien
tagaggccactggatggggccacct

SEQ ID NO: 1643047 - DNA, 25 bp, Homo sapien
cagcagggaggccatccaggctgca

SEQ ID NO: 1643048 - DNA, 25 bp, Homo sapien
aagaacagcagggaggccatccagg

SEQ ID NO: 1643049 - DNA, 25 bp, Homo sapien
tcatggaccaagaacagcagggagg

SEQ ID NO: 1643050 - DNA, 25 bp, Homo sapien
ccaagaacagcagggaggccatcca

SEQ ID NO: 1643051 - DNA, 25 bp, Homo sapien
ctccatatagagggtcagtatagat

SEQ ID NO: 1643052 - DNA, 25 bp, Homo sapien
catatagagggtcagtatagatctg

SEQ ID NO: 1643053 - DNA, 25 bp, Homo sapien
tccatatagagggtcagtatagatc

SEQ ID NO: 1643054 - DNA, 25 bp, Homo sapien
ccatatagagggtcagtatagatct

SEQ ID NO: 1643055 - DNA, 25 bp, Homo sapien
gcctgacaaggacccaggtatccag

SEQ ID NO: 1643056 - DNA, 25 bp, Homo sapien
tgttatgatgtttgcctgacaagga

SEQ ID NO: 1643057 - DNA, 25 bp, Homo sapien
tgacagtttcagggttcaggtggtt

SEQ ID NO: 1643058 - DNA, 25 bp, Homo sapien
tccagggatcgagagcacaagaccc

SEQ ID NO: 1643059 - DNA, 25 bp, Homo sapien
aggacagtgatagacagggccgcca

SEQ ID NO: 1643060 - DNA, 25 bp, Homo sapien
ttggggacaggcaaactcacttgtg

SEQ ID NO: 1643061 - DNA, 25 bp, Homo sapien
ttgattactctgacagcccctctct

SEQ ID NO: 1643062 - DNA, 25 bp, Homo sapien
tggtggccagggctaagcatccagg

SEQ ID NO: 1643063 - DNA, 25 bp, Homo sapien
cggctgtcctggggtcgggtagcgg

SEQ ID NO: 1643064 - DNA, 25 bp, Homo sapien
agcggctgtcctggggtcgggtagc

SEQ ID NO: 1643065 - DNA, 25 bp, Homo sapien
ggagcggctgtcctggggtcgggta

SEQ ID NO: 1643066 - DNA, 25 bp, Homo sapien
tgggagcggctgtcctggggtcggg

SEQ ID NO: 1643067 - DNA, 25 bp, Homo sapien
ggtggagttgtttgagggaccatgg

SEQ ID NO: 1643068 - DNA, 25 bp, Homo sapien
gtggagttgtttgagggaccatggc

SEQ ID NO: 1643069 - DNA, 25 bp, Homo sapien
taggtggagttgtttgagggaccat

SEQ ID NO: 1643070 - DNA, 25 bp, Homo sapien
gtaggtggagttgtttgagggacca

SEQ ID NO: 1643071 - DNA, 25 bp, Homo sapien
accagaaccctggtcacgatgccag

SEQ ID NO: 1643072 - DNA, 25 bp, Homo sapien
cttccagtcctgacgaggagcagga

SEQ ID NO: 1643073 - DNA, 25 bp, Homo sapien
tggtcacgatgccagtgaaggcccc

SEQ ID NO: 1643074 - DNA, 25 bp, Homo sapien
gaaccctggtcacgatgccagtgaa

SEQ ID NO: 1643075 - DNA, 25 bp, Homo sapien
agggtttatctttatggcgtgtagg

SEQ ID NO: 1643076 - DNA, 25 bp, Homo sapien
gtttatctttatggcgtgtagggtg

SEQ ID NO: 1643077 - DNA, 25 bp, Homo sapien
ctcagggtttatctttatggcgtgt

SEQ ID NO: 1643078 - DNA, 25 bp, Homo sapien
tatctttatggcgtgtagggtgtag

SEQ ID NO: 1643079 - DNA, 25 bp, Homo sapien
ctgtaatatggtggttggcctccac

SEQ ID NO: 1643080 - DNA, 25 bp, Homo sapien
tcctgtaatatggtggttggcctcc

SEQ ID NO: 1643081 - DNA, 25 bp, Homo sapien
atatcctgtaatatggtggttggcc

SEQ ID NO: 1643082 - DNA, 25 bp, Homo sapien
tatcctgtaatatggtggttggcct

SEQ ID NO: 1643083 - DNA, 25 bp, Homo sapien
gattgtgagtgagtagaagaacctc

SEQ ID NO: 1643084 - DNA, 25 bp, Homo sapien
cagttatagccaataagatcatggg

SEQ ID NO: 1643085 - DNA, 25 bp, Homo sapien
ttcaacagtgagcatggcagtagtg

SEQ ID NO: 1643086 - DNA, 25 bp, Homo sapien
tggcattggacagcatggcttcaac

SEQ ID NO: 1643087 - DNA, 25 bp, Homo sapien
taccaagtgctcatcaggtaccagc

SEQ ID NO: 1643088 - DNA, 25 bp, Homo sapien
tggaagttaccagtgttaggcagaa

SEQ ID NO: 1643089 - DNA, 25 bp, Homo sapien
cagagctggtgtgtttcacctcaaa

SEQ ID NO: 1643090 - DNA, 25 bp, Homo sapien
gaacattctagcagagtcacgagag

SEQ ID NO: 1643091 - DNA, 25 bp, Homo sapien
tattatctagcattgcatgcctggg

SEQ ID NO: 1643092 - DNA, 25 bp, Homo sapien
ctgttactgtcagccattgggtgga

SEQ ID NO: 1643093 - DNA, 25 bp, Homo sapien
tgggcaacttcacaaaggtatcagc

SEQ ID NO: 1643094 - DNA, 25 bp, Homo sapien
tcagcctgtttgcaagttcatagac

SEQ ID NO: 1643095 - DNA, 25 bp, Homo sapien
aaatgcagaaactacaccagagcta

SEQ ID NO: 1643096 - DNA, 25 bp, Homo sapien
cttgaaatgcagaaactacaccaga

SEQ ID NO: 1643097 - DNA, 25 bp, Homo sapien
gccagtcttcttgaaatgcagaaac

SEQ ID NO: 1643098 - DNA, 25 bp, Homo sapien
ctgccagtcttcttgaaatgcagaa

SEQ ID NO: 1643099 - DNA, 25 bp, Homo sapien
ctgagaggccaggagaacttccttg

SEQ ID NO: 1643100 - DNA, 25 bp, Homo sapien
ccaggagaacttccttgtactaaag

SEQ ID NO: 1643101 - DNA, 25 bp, Homo sapien
gacagtggctctagctgagaggcca

SEQ ID NO: 1643102 - DNA, 25 bp, Homo sapien
gatgctgacagtggctctagctgag

SEQ ID NO: 1643103 - DNA, 25 bp, Homo sapien
gatttacccctgcatggtaataggt

SEQ ID NO: 1643104 - DNA, 25 bp, Homo sapien
actgtgagggtggattagaggccgc

SEQ ID NO: 1643105 - DNA, 25 bp, Homo sapien
ctggaatgtgccattgacagaccaa

SEQ ID NO: 1643106 - DNA, 25 bp, Homo sapien
tgtggcaggcataggatccgctgtt

SEQ ID NO: 1643107 - DNA, 25 bp, Homo sapien
gaaatggtgggggcatctgggccat

SEQ ID NO: 1643108 - DNA, 25 bp, Homo sapien
ctgaaggggaaatggtgggggcatc

SEQ ID NO: 1643109 - DNA, 25 bp, Homo sapien
gggaaatggtgggggcatctgggcc

SEQ ID NO: 1643110 - DNA, 25 bp, Homo sapien
aggggaaatggtgggggcatctggg

SEQ ID NO: 1643111 - DNA, 25 bp, Homo sapien
cactgaagtttgcactcgctgggtt

SEQ ID NO: 1643112 - DNA, 25 bp, Homo sapien
tcactgaagtttgcactcgctgggt

SEQ ID NO: 1643113 - DNA, 25 bp, Homo sapien
actgaagtttgcactcgctgggttc

SEQ ID NO: 1643114 - DNA, 25 bp, Homo sapien
ctgggactgaccgggagactctgac

SEQ ID NO: 1643115 - DNA, 25 bp, Homo sapien
cacaggtaggttgtgttctgagtct

SEQ ID NO: 1643116 - DNA, 25 bp, Homo sapien
ttctgagtctcaggttcacaggtga

SEQ ID NO: 1643117 - DNA, 25 bp, Homo sapien
cacggggttggagttgttgctggag

SEQ ID NO: 1643118 - DNA, 25 bp, Homo sapien
gcatccttgtcctccacggggttgg

SEQ ID NO: 1643119 - DNA, 25 bp, Homo sapien
agcttcacagtcctactttgccctt

SEQ ID NO: 1643120 - DNA, 25 bp, Homo sapien
tttgagggttctgtttccaagaaca

SEQ ID NO: 1643121 - DNA, 25 bp, Homo sapien
ttgcccttcgaggtgtgtttttgag

SEQ ID NO: 1643122 - DNA, 25 bp, Homo sapien
cctactttgcccttcgaggtgtgtt

SEQ ID NO: 1643123 - DNA, 25 bp, Homo sapien
gtgacctctaaagatagagcagagt

SEQ ID NO: 1643124 - DNA, 25 bp, Homo sapien
gacctctaaagatagagcagagtcc

SEQ ID NO: 1643125 - DNA, 25 bp, Homo sapien
tgacctctaaagatagagcagagtc

SEQ ID NO: 1643126 - DNA, 25 bp, Homo sapien
cctctaaagatagagcagagtccaa

SEQ ID NO: 1643127 - DNA, 25 bp, Homo sapien
accagttgtagccacgagggtcctg

SEQ ID NO: 1643128 - DNA, 25 bp, Homo sapien
ataattcgacggttggcatccactg

SEQ ID NO: 1643129 - DNA, 25 bp, Homo sapien
gatgtacgctgaactggccagttac

SEQ ID NO: 1643130 - DNA, 25 bp, Homo sapien
ttctggtgacgttccgcatcagcag

SEQ ID NO: 1643131 - DNA, 25 bp, Homo sapien
attggatggcacagcttcaatagtg

SEQ ID NO: 1643132 - DNA, 25 bp, Homo sapien
ttggatggcacagcttcaatagtga

SEQ ID NO: 1643133 - DNA, 25 bp, Homo sapien
tggatggcacagcttcaatagtgag

SEQ ID NO: 1643134 - DNA, 25 bp, Homo sapien
cattggatggcacagcttcaatagt

SEQ ID NO: 1643135 - DNA, 25 bp, Homo sapien
ctgccaggggatgcgccatctgcag

SEQ ID NO: 1643136 - DNA, 25 bp, Homo sapien
ccaggggatgcgccatctgcaggaa

SEQ ID NO: 1643137 - DNA, 25 bp, Homo sapien
tgccaggggatgcgccatctgcagg

SEQ ID NO: 1643138 - DNA, 25 bp, Homo sapien
gccaggggatgcgccatctgcagga

SEQ ID NO: 1643139 - DNA, 25 bp, Homo sapien
gtctctgctgcctgcgtgttctcct

SEQ ID NO: 1643140 - DNA, 25 bp, Homo sapien
ggtctctgctgcctgcgtgttctcc

SEQ ID NO: 1643141 - DNA, 25 bp, Homo sapien
agatgagcctgggatccagaaactt

SEQ ID NO: 1643142 - DNA, 25 bp, Homo sapien
tggagatgagcctgggatccagaaa

SEQ ID NO: 1643143 - DNA, 25 bp, Homo sapien
atgagcctgggatccagaaactttc

SEQ ID NO: 1643144 - DNA, 25 bp, Homo sapien
aaactttctgagcacggctgtcagc

SEQ ID NO: 1643145 - DNA, 25 bp, Homo sapien
ggtgtaagcttaactgcctcatatc

SEQ ID NO: 1643146 - DNA, 25 bp, Homo sapien
agtaggttgtactgtgtatgcccgg

SEQ ID NO: 1643147 - DNA, 25 bp, Homo sapien
tgcagggcgggaatatcaatgttag

SEQ ID NO: 1643148 - DNA, 25 bp, Homo sapien
catgagtccgtctctgtgattgcaa

SEQ ID NO: 1643149 - DNA, 25 bp, Homo sapien
tgcaccacgttctccgtgtggcccc

SEQ ID NO: 1643150 - DNA, 25 bp, Homo sapien
cacctgctctcgttccagggagctg

SEQ ID NO: 1643151 - DNA, 25 bp, Homo sapien
cattcctgggtattccttcctgcac

SEQ ID NO: 1643152 - DNA, 25 bp, Homo sapien
gctgcccctgggttgctgcccctct

SEQ ID NO: 1643153 - DNA, 25 bp, Homo sapien
catttcttctgagccctgaacactg

SEQ ID NO: 1643154 - DNA, 25 bp, Homo sapien
atttcttctgagccctgaacactga

SEQ ID NO: 1643155 - DNA, 25 bp, Homo sapien
cagatgtagattccactattctttt

SEQ ID NO: 1643156 - DNA, 25 bp, Homo sapien
taaagagctcttgtgctgatttttg

SEQ ID NO: 1643157 - DNA, 25 bp, Homo sapien
gatcttcttgatcgtgaaacacctg

SEQ ID NO: 1643158 - DNA, 25 bp, Homo sapien
tcagtggctgagttgcgaacgaaac

SEQ ID NO: 1643159 - DNA, 25 bp, Homo sapien
ctggagcaaagaaaatagagccaaa

SEQ ID NO: 1643160 - DNA, 25 bp, Homo sapien
gctcctggtctgtggaagagccaca

SEQ ID NO: 1643161 - DNA, 25 bp, Homo sapien
agcaaagaaaatagagccaaaagtc

SEQ ID NO: 1643162 - DNA, 25 bp, Homo sapien
aaagtcatgtcatcagagggaagga

SEQ ID NO: 1643163 - DNA, 25 bp, Homo sapien
aggtttgcctggggcaggaagtcat

SEQ ID NO: 1643164 - DNA, 25 bp, Homo sapien
ttgcctggggcaggaagtcatggcc

SEQ ID NO: 1643165 - DNA, 25 bp, Homo sapien
cctggggcaggaagtcatggccagc

SEQ ID NO: 1643166 - DNA, 25 bp, Homo sapien
ggtttgcctggggcaggaagtcatg

SEQ ID NO: 1643167 - DNA, 25 bp, Homo sapien
ggtgcccaggagtaaaggtctctgt

SEQ ID NO: 1643168 - DNA, 25 bp, Homo sapien
ctgggtgcccaggagtaaaggtctc

SEQ ID NO: 1643169 - DNA, 25 bp, Homo sapien
tgcccaggagtaaaggtctctgtac

SEQ ID NO: 1643170 - DNA, 25 bp, Homo sapien
tgggtgcccaggagtaaaggtctct

SEQ ID NO: 1643171 - DNA, 25 bp, Homo sapien
tctggccatgtggatttgggctggc

SEQ ID NO: 1643172 - DNA, 25 bp, Homo sapien
ctgagagggactgagaggcctggcc

SEQ ID NO: 1643173 - DNA, 25 bp, Homo sapien
ccatgtggatttgggctggcagcct

SEQ ID NO: 1643174 - DNA, 25 bp, Homo sapien
ctggcctctggccatgtggatttgg

SEQ ID NO: 1643175 - DNA, 25 bp, Homo sapien
ggtgactgggtcactgtggttggca

SEQ ID NO: 1643176 - DNA, 25 bp, Homo sapien
actgggtcactgtggttggcactca

SEQ ID NO: 1643177 - DNA, 25 bp, Homo sapien
tgactgggtcactgtggttggcact

SEQ ID NO: 1643178 - DNA, 25 bp, Homo sapien
aggacattcagggtgactgggtcac

SEQ ID NO: 1643179 - DNA, 25 bp, Homo sapien
taaggccgcagtatcctcattctcc

SEQ ID NO: 1643180 - DNA, 25 bp, Homo sapien
gattccggatttcacattcatatgt

SEQ ID NO: 1643181 - DNA, 25 bp, Homo sapien
ctgatggtgacgaagggcttggata

SEQ ID NO: 1643182 - DNA, 25 bp, Homo sapien
tatgttcctgcgtccttccttgtga

SEQ ID NO: 1643183 - DNA, 25 bp, Homo sapien
agcccaattgagtccttgaaagccc

SEQ ID NO: 1643184 - DNA, 25 bp, Homo sapien
tgtctctcagcccaattgagtcctt

SEQ ID NO: 1643185 - DNA, 25 bp, Homo sapien
ggacactttttgatcagagttggaa

SEQ ID NO: 1643186 - DNA, 25 bp, Homo sapien
ggcaacttttatcgctccatggaca

SEQ ID NO: 1643187 - DNA, 25 bp, Homo sapien
cagggcgatgttccagatctccagg

SEQ ID NO: 1643188 - DNA, 25 bp, Homo sapien
gatctgcctttaaaatttgcacggt

SEQ ID NO: 1643189 - DNA, 25 bp, Homo sapien
cacggtgtaggatcctgagtcattc

SEQ ID NO: 1643190 - DNA, 25 bp, Homo sapien
tactttttcagtcataagatctgcc

SEQ ID NO: 1643191 - DNA, 25 bp, Homo sapien
taccgcattagatggcagaacttca

SEQ ID NO: 1643192 - DNA, 25 bp, Homo sapien
acttcaactgtaacttgggcagtgg

SEQ ID NO: 1643193 - DNA, 25 bp, Homo sapien
tagacaagtagaacaacctccttct

SEQ ID NO: 1643194 - DNA, 25 bp, Homo sapien
tatcctggggcagattgtagacaag

SEQ ID NO: 1643195 - DNA, 25 bp, Homo sapien
aaggctgatgcagcagggagtaggg

SEQ ID NO: 1643196 - DNA, 25 bp, Homo sapien
ccaaggctgatgcagcagggagtag

SEQ ID NO: 1643197 - DNA, 25 bp, Homo sapien
gctgcccagggacttcacaggacat

SEQ ID NO: 1643198 - DNA, 25 bp, Homo sapien
ccccaaggctgatgcagcagggagt

SEQ ID NO: 1643199 - DNA, 25 bp, Homo sapien
agcctcatcaggggatttttaacct

SEQ ID NO: 1643200 - DNA, 25 bp, Homo sapien
cagcctcatcaggggatttttaacc

SEQ ID NO: 1643201 - DNA, 25 bp, Homo sapien
cccagcctcatcaggggatttttaa

SEQ ID NO: 1643202 - DNA, 25 bp, Homo sapien
ccagcctcatcaggggatttttaac

SEQ ID NO: 1643203 - DNA, 25 bp, Homo sapien
tgttaatgcctaagaagagtcggat

SEQ ID NO: 1643204 - DNA, 25 bp, Homo sapien
agatgttaatgcctaagaagagtcg

SEQ ID NO: 1643205 - DNA, 25 bp, Homo sapien
gatgttaatgcctaagaagagtcgg

SEQ ID NO: 1643206 - DNA, 25 bp, Homo sapien
caagatgttaatgcctaagaagagt

SEQ ID NO: 1643207 - DNA, 25 bp, Homo sapien
tatgatcttaaaacatgtaataggc

SEQ ID NO: 1643208 - DNA, 25 bp, Homo sapien
gggcctcactatggtcatctgtcca

SEQ ID NO: 1643209 - DNA, 25 bp, Homo sapien
catgcatatttctgcgggcctcact

SEQ ID NO: 1643210 - DNA, 25 bp, Homo sapien
ttccagaagtagcagttttatgatc

SEQ ID NO: 1643211 - DNA, 25 bp, Homo sapien
tcctcacaatacctgatggtcaggg

SEQ ID NO: 1643212 - DNA, 25 bp, Homo sapien
tttgtagccgattctcttggcctga

SEQ ID NO: 1643213 - DNA, 25 bp, Homo sapien
aagttggcggcacttttgacttggc

SEQ ID NO: 1643214 - DNA, 25 bp, Homo sapien
gcaaccagctccttcaacttcgtgt

SEQ ID NO: 1643215 - DNA, 25 bp, Homo sapien
accacctggacccaacacatgttgg

SEQ ID NO: 1643216 - DNA, 25 bp, Homo sapien
cacatgttggaatggatgagggaca

SEQ ID NO: 1643217 - DNA, 25 bp, Homo sapien
tggaaagcatctgactaccagaaag

SEQ ID NO: 1643218 - DNA, 25 bp, Homo sapien
catttcctaatgagagatggaaagc

SEQ ID NO: 1643219 - DNA, 25 bp, Homo sapien
acatgtgcacataaagatagaagga

SEQ ID NO: 1643220 - DNA, 25 bp, Homo sapien
tacatgtgcacataaagatagaagg

SEQ ID NO: 1643221 - DNA, 25 bp, Homo sapien
atgtggactacacaaaaggttcaca

SEQ ID NO: 1643222 - DNA, 25 bp, Homo sapien
tgtgcctgctgatgtggactacaca

SEQ ID NO: 1643223 - DNA, 25 bp, Homo sapien
ttgcaagctgaaactagacgactta

SEQ ID NO: 1643224 - DNA, 25 bp, Homo sapien
tgaaactagacgacttatgtaaact

SEQ ID NO: 1643225 - DNA, 25 bp, Homo sapien
aattaaaacagggagtgagaatagg

SEQ ID NO: 1643226 - DNA, 25 bp, Homo sapien
ttaaaacagggagtgagaataggta

SEQ ID NO: 1643227 - DNA, 25 bp, Homo sapien
ataaattaaaacagggagtgagaat

SEQ ID NO: 1643228 - DNA, 25 bp, Homo sapien
aagggaacatcacactttggggtct

SEQ ID NO: 1643229 - DNA, 25 bp, Homo sapien
acatttggtgagctcttagtggccc

SEQ ID NO: 1643230 - DNA, 25 bp, Homo sapien
cacttcagacacgagggtttctcca

SEQ ID NO: 1643231 - DNA, 25 bp, Homo sapien
gtcatcaacttgtcgtggtttgcag

SEQ ID NO: 1643232 - DNA, 25 bp, Homo sapien
gcggcaagagtagcgatggaccata

SEQ ID NO: 1643233 - DNA, 25 bp, Homo sapien
tccttgtcagagtcttttcataaat

SEQ ID NO: 1643234 - DNA, 25 bp, Homo sapien
agtccttgtcagagtcttttcataa

SEQ ID NO: 1643235 - DNA, 25 bp, Homo sapien
gtccttgtcagagtcttttcataaa

SEQ ID NO: 1643236 - DNA, 25 bp, Homo sapien
tagctgatggtaaatactttgagga

SEQ ID NO: 1643237 - DNA, 25 bp, Homo sapien
caccatgtgaaattgtgtttttcat

SEQ ID NO: 1643238 - DNA, 25 bp, Homo sapien
catgtgaaattgtgtttttcatttg

SEQ ID NO: 1643239 - DNA, 25 bp, Homo sapien
gtgaaattgtgtttttcatttgaat

SEQ ID NO: 1643240 - DNA, 25 bp, Homo sapien
tcaccatgtgaaattgtgtttttca

SEQ ID NO: 1643241 - DNA, 25 bp, Homo sapien
ttcctgaaatacagaaatgacatca

SEQ ID NO: 1643242 - DNA, 25 bp, Homo sapien
gccagtcttcctgaaatacagaaat

SEQ ID NO: 1643243 - DNA, 25 bp, Homo sapien
agtcttcctgaaatacagaaatgac

SEQ ID NO: 1643244 - DNA, 25 bp, Homo sapien
tgaaatacagaaatgacatcacggc

SEQ ID NO: 1643245 - DNA, 25 bp, Homo sapien
atggattaaggccaggaagatgtcc

SEQ ID NO: 1643246 - DNA, 25 bp, Homo sapien
caggaagatgtcctgttcctgaagg

SEQ ID NO: 1643247 - DNA, 25 bp, Homo sapien
ccaggaagatgtcctgttcctgaag

SEQ ID NO: 1643248 - DNA, 25 bp, Homo sapien
ctataatggattaaggccaggaaga

SEQ ID NO: 1643249 - DNA, 25 bp, Homo sapien
tctgttggaaaattgataggagatg

SEQ ID NO: 1643250 - DNA, 25 bp, Homo sapien
ttctgttggaaaattgataggagat

SEQ ID NO: 1643251 - DNA, 25 bp, Homo sapien
tcaattctctactgtgctcagatat

SEQ ID NO: 1643252 - DNA, 25 bp, Homo sapien
ctgtcaattctctactgtgctcaga

SEQ ID NO: 1643253 - DNA, 25 bp, Homo sapien
accaggtgtttggaccagcataggt

SEQ ID NO: 1643254 - DNA, 25 bp, Homo sapien
ggtgtttggaccagcataggtaacc

SEQ ID NO: 1643255 - DNA, 25 bp, Homo sapien
gtttggaccagcataggtaacctgg

SEQ ID NO: 1643256 - DNA, 25 bp, Homo sapien
caggtgtttggaccagcataggtaa

SEQ ID NO: 1643257 - DNA, 25 bp, Homo sapien
tgcatcagtcactgtcctccgtgct

SEQ ID NO: 1643258 - DNA, 25 bp, Homo sapien
aatagttaatggtaagtcttatatt

SEQ ID NO: 1643259 - DNA, 25 bp, Homo sapien
tagttaatggtaagtcttatattag

SEQ ID NO: 1643260 - DNA, 25 bp, Homo sapien
atcagtcactgtcctccgtgctgtg

SEQ ID NO: 1643261 - DNA, 25 bp, Homo sapien
caagaaaacaaagacgtggcagaag

SEQ ID NO: 1643262 - DNA, 25 bp, Homo sapien
agaaaacaaagacgtggcagaaggg

SEQ ID NO: 1643263 - DNA, 25 bp, Homo sapien
aagaaaacaaagacgtggcagaagg

SEQ ID NO: 1643264 - DNA, 25 bp, Homo sapien
gaacagagcaagcatagagcccgct

SEQ ID NO: 1643265 - DNA, 25 bp, Homo sapien
gactttgactgtcatggatttggag

SEQ ID NO: 1643266 - DNA, 25 bp, Homo sapien
tagagcccgctatgctttgtagtaa

SEQ ID NO: 1643267 - DNA, 25 bp, Homo sapien
agtggctgagttacgaacagagcaa

SEQ ID NO: 1643268 - DNA, 25 bp, Homo sapien
ttcccattaattgtccaagaatatt

SEQ ID NO: 1643269 - DNA, 25 bp, Homo sapien
ataaagagcttttgtcctgatagct

SEQ ID NO: 1643270 - DNA, 25 bp, Homo sapien
gagcttttgtcctgatagctgaaac

SEQ ID NO: 1643271 - DNA, 25 bp, Homo sapien
tttgtcctgatagctgaaacttccc

SEQ ID NO: 1643272 - DNA, 25 bp, Homo sapien
taggtgaatgaagggtaaattctgg

SEQ ID NO: 1643273 - DNA, 25 bp, Homo sapien
taaattctggggaggtctggaccat

SEQ ID NO: 1643274 - DNA, 25 bp, Homo sapien
ctgaatggtaataggtgaatgaagg

SEQ ID NO: 1643275 - DNA, 25 bp, Homo sapien
gtaaattctggggaggtctggacca

SEQ ID NO: 1643276 - DNA, 25 bp, Homo sapien
tcctggtctcttaaagggacacagt

SEQ ID NO: 1643277 - DNA, 25 bp, Homo sapien
tggtctcttaaagggacacagtgac

SEQ ID NO: 1643278 - DNA, 25 bp, Homo sapien
atgctcctggtctcttaaagggaca

SEQ ID NO: 1643279 - DNA, 25 bp, Homo sapien
tctcttaaagggacacagtgaccct

SEQ ID NO: 1643280 - DNA, 25 bp, Homo sapien
tgtttcatttctcgtgacactgggt

SEQ ID NO: 1643281 - DNA, 25 bp, Homo sapien
gacactgggtagaatgaggatcctg

SEQ ID NO: 1643282 - DNA, 25 bp, Homo sapien
tgactgggtaactgcggatgccacc

SEQ ID NO: 1643283 - DNA, 25 bp, Homo sapien
caatgggtcgctttaccctgggact

SEQ ID NO: 1643284 - DNA, 25 bp, Homo sapien
tagccaccaaatgtaggtgtagttc

SEQ ID NO: 1643285 - DNA, 25 bp, Homo sapien
tctcactcttaggttcacaggtgaa

SEQ ID NO: 1643286 - DNA, 25 bp, Homo sapien
gaaggctaagacatccttattctcc

SEQ ID NO: 1643287 - DNA, 25 bp, Homo sapien
tttaagttgttgatggtgatgtagg

SEQ ID NO: 1643288 - DNA, 25 bp, Homo sapien
ctgtgtggataacagagagaagatt

SEQ ID NO: 1643289 - DNA, 25 bp, Homo sapien
tccactggcatccttcaatcagagt

SEQ ID NO: 1643290 - DNA, 25 bp, Homo sapien
ggcacctttgattcctccactggca

SEQ ID NO: 1643291 - DNA, 25 bp, Homo sapien
ttcaatcagagttggcatctcccac

SEQ ID NO: 1643292 - DNA, 25 bp, Homo sapien
tgtgcaactggtgggccccttccaa

SEQ ID NO: 1643293 - DNA, 25 bp, Homo sapien
ttccaaattccatcctactttgccc

SEQ ID NO: 1643294 - DNA, 25 bp, Homo sapien
cccatagatgtgatttctctgcaac

SEQ ID NO: 1643295 - DNA, 25 bp, Homo sapien
tctgcaacttccatttccaaggaca

SEQ ID NO: 1643296 - DNA, 25 bp, Homo sapien
gagtaataatgggacttcccatggc

SEQ ID NO: 1643297 - DNA, 25 bp, Homo sapien
gtaataatgggacttcccatggccc

SEQ ID NO: 1643298 - DNA, 25 bp, Homo sapien
agtaataatgggacttcccatggcc

SEQ ID NO: 1643299 - DNA, 25 bp, Homo sapien
ctgggactggatgtttcagcagaaa

SEQ ID NO: 1643300 - DNA, 25 bp, Homo sapien
tggatgtttcagcagaaataacaca

SEQ ID NO: 1643301 - DNA, 25 bp, Homo sapien
gactggatgtttcagcagaaataac

SEQ ID NO: 1643302 - DNA, 25 bp, Homo sapien
gcagaaataacacaggggagaccag

SEQ ID NO: 1643303 - DNA, 25 bp, Homo sapien
gtgacctctaaagatagagcagagt

SEQ ID NO: 1643304 - DNA, 25 bp, Homo sapien
cctctaaagatagagcagagtgcaa

SEQ ID NO: 1643305 - DNA, 25 bp, Homo sapien
taaagatagagcagagtgcaaggaa

SEQ ID NO: 1643306 - DNA, 25 bp, Homo sapien
gatagagcagagtgcaaggaatgat

SEQ ID NO: 1643307 - DNA, 25 bp, Homo sapien
gaagagactgctggttgccaggagc

SEQ ID NO: 1643308 - DNA, 25 bp, Homo sapien
atcagaagttgttcatgggtgggca

SEQ ID NO: 1643309 - DNA, 25 bp, Homo sapien
ggatatgagacaaatttggagagaa

SEQ ID NO: 1643310 - DNA, 25 bp, Homo sapien
caatgattccatgggttcgactact

SEQ ID NO: 1643311 - DNA, 25 bp, Homo sapien
ggtgattagttttcggtgaattcca

SEQ ID NO: 1643312 - DNA, 25 bp, Homo sapien
tcggtgaattccatactggccatgc

SEQ ID NO: 1643313 - DNA, 25 bp, Homo sapien
atgtcatcagaactttccacctttt

SEQ ID NO: 1643314 - DNA, 25 bp, Homo sapien
catgctgcacttgtatatttttgaa

SEQ ID NO: 1643315 - DNA, 25 bp, Homo sapien
tagacccctctatatgttttagtga

SEQ ID NO: 1643316 - DNA, 25 bp, Homo sapien
ggctgagttatggatgaaacagaca

SEQ ID NO: 1643317 - DNA, 25 bp, Homo sapien
gggactatgatcctcttgattatga

SEQ ID NO: 1643318 - DNA, 25 bp, Homo sapien
ttatgagatttgttccagcagtggc

SEQ ID NO: 1643319 - DNA, 25 bp, Homo sapien
gccatgtggagcaaagagaataatg

SEQ ID NO: 1643320 - DNA, 25 bp, Homo sapien
catgtggagcaaagagaataatgtc

SEQ ID NO: 1643321 - DNA, 25 bp, Homo sapien
cttcccctgtatggtaataggtgta

SEQ ID NO: 1643322 - DNA, 25 bp, Homo sapien
tcccctgtatggtaataggtgtatg

SEQ ID NO: 1643323 - DNA, 25 bp, Homo sapien
cagaaagtcatggccaggtttgatg

SEQ ID NO: 1643324 - DNA, 25 bp, Homo sapien
gcagaaagtcatggccaggtttgat

SEQ ID NO: 1643325 - DNA, 25 bp, Homo sapien
tactttgtgacaccaaatagaaaga

SEQ ID NO: 1643326 - DNA, 25 bp, Homo sapien
gtcctgcagtgtactttgtgacacc

SEQ ID NO: 1643327 - DNA, 25 bp, Homo sapien
gggtcctgcagtgtactttgtgaca

SEQ ID NO: 1643328 - DNA, 25 bp, Homo sapien
agggtcctgcagtgtactttgtgac

SEQ ID NO: 1643329 - DNA, 25 bp, Homo sapien
cttgcgtccggagtctcaggatcac

SEQ ID NO: 1643330 - DNA, 25 bp, Homo sapien
agcttgcgtccggagtctcaggatc

SEQ ID NO: 1643331 - DNA, 25 bp, Homo sapien
tcaggatcacaggttaagctcacag

SEQ ID NO: 1643332 - DNA, 25 bp, Homo sapien
tcacaggttaagctcacagcctcca

SEQ ID NO: 1643333 - DNA, 25 bp, Homo sapien
agtttcagtcttactttgccgcccg

SEQ ID NO: 1643334 - DNA, 25 bp, Homo sapien
ggagaacagagtcaagtccggagtt

SEQ ID NO: 1643335 - DNA, 25 bp, Homo sapien
acagagtcaagtccggagttcagtt

SEQ ID NO: 1643336 - DNA, 25 bp, Homo sapien
tcagtcttactttgccgcccgaggt

SEQ ID NO: 1643337 - DNA, 25 bp, Homo sapien
ccagagtgaatcagagtgtagaata

SEQ ID NO: 1643338 - DNA, 25 bp, Homo sapien
ggattccagagtgaatcagagtgta

SEQ ID NO: 1643339 - DNA, 25 bp, Homo sapien
cggtttcagttatgcaggatgagga

SEQ ID NO: 1643340 - DNA, 25 bp, Homo sapien
ttctgtgggtgtgcggtttcagtta

SEQ ID NO: 1643341 - DNA, 25 bp, Homo sapien
tggttagtgtgtcaattgcataaag

SEQ ID NO: 1643342 - DNA, 25 bp, Homo sapien
gaactggttagtgtgtcaattgcat

SEQ ID NO: 1643343 - DNA, 25 bp, Homo sapien
actggttagtgtgtcaattgcataa

SEQ ID NO: 1643344 - DNA, 25 bp, Homo sapien
agaactggttagtgtgtcaattgca

SEQ ID NO: 1643345 - DNA, 25 bp, Homo sapien
aaggtgaaggtgaaatgtccagttt

SEQ ID NO: 1643346 - DNA, 25 bp, Homo sapien
gaaggtgaaatgtccagtttctcct

SEQ ID NO: 1643347 - DNA, 25 bp, Homo sapien
ggtataaggtgaaggtgaaatgtcc

SEQ ID NO: 1643348 - DNA, 25 bp, Homo sapien
gtataaggtgaaggtgaaatgtcca

SEQ ID NO: 1643349 - DNA, 25 bp, Homo sapien
tgatgtaatgtaatggtagaggtcc

SEQ ID NO: 1643350 - DNA, 25 bp, Homo sapien
gcagggatgcattggaatatactgt

SEQ ID NO: 1643351 - DNA, 25 bp, Homo sapien
tgtttctcgtccactgtatgcaggc

SEQ ID NO: 1643352 - DNA, 25 bp, Homo sapien
tggttggctcggcttcaatcgtgac

SEQ ID NO: 1643353 - DNA, 25 bp, Homo sapien
tccttagacttctttcctgacgcct

SEQ ID NO: 1643354 - DNA, 25 bp, Homo sapien
tcaggtcctgctcacatcagggcat

SEQ ID NO: 1643355 - DNA, 25 bp, Homo sapien
gacgcctccttcagagaccctgggt

SEQ ID NO: 1643356 - DNA, 25 bp, Homo sapien
ctgtttggaatcctcttccccaggg

SEQ ID NO: 1643357 - DNA, 25 bp, Homo sapien
gccccttccaggtgatgcgctgtgt

SEQ ID NO: 1643358 - DNA, 25 bp, Homo sapien
aggagccccttccaggtgatgcgct

SEQ ID NO: 1643359 - DNA, 25 bp, Homo sapien
gagcaggagccccttccaggtgatg

SEQ ID NO: 1643360 - DNA, 25 bp, Homo sapien
gagccccttccaggtgatgcgctgt

SEQ ID NO: 1643361 - DNA, 25 bp, Homo sapien
gtggagctgagcctaggatccagaa

SEQ ID NO: 1643362 - DNA, 25 bp, Homo sapien
tctgtggagctgagcctaggatcca

SEQ ID NO: 1643363 - DNA, 25 bp, Homo sapien
ctgtggagctgagcctaggatccag

SEQ ID NO: 1643364 - DNA, 25 bp, Homo sapien
tggagctgagcctaggatccagaaa

SEQ ID NO: 1643365 - DNA, 25 bp, Homo sapien
ctgtgctgtccttcctccttctgcg

SEQ ID NO: 1643366 - DNA, 25 bp, Homo sapien
tcagctgtgctgtccttcctccttc

SEQ ID NO: 1643367 - DNA, 25 bp, Homo sapien
ggctctcagctgtgctgtccttcct

SEQ ID NO: 1643368 - DNA, 25 bp, Homo sapien
agctgtgctgtccttcctccttctg

SEQ ID NO: 1643369 - DNA, 25 bp, Homo sapien
gaaagaggtgtctgctaaggcaatg

SEQ ID NO: 1643370 - DNA, 25 bp, Homo sapien
tttacaatgtatctcttaggaaatg

SEQ ID NO: 1643371 - DNA, 25 bp, Homo sapien
tacaatgtatctcttaggaaatggc

SEQ ID NO: 1643372 - DNA, 25 bp, Homo sapien
ttacaatgtatctcttaggaaatgg

SEQ ID NO: 1643373 - DNA, 25 bp, Homo sapien
gagttctgagtggctcacccttcag

SEQ ID NO: 1643374 - DNA, 25 bp, Homo sapien
ggtctttttcttagcgattccatgg

SEQ ID NO: 1643375 - DNA, 25 bp, Homo sapien
ttcatttctattgggagtcctgtat

SEQ ID NO: 1643376 - DNA, 25 bp, Homo sapien
atgttatgtaaaagtttgggttgag

SEQ ID NO: 1643377 - DNA, 25 bp, Homo sapien
attgtttacataagtgcagcaagag

SEQ ID NO: 1643378 - DNA, 25 bp, Homo sapien
gttcaataaactgcggtatagttta

SEQ ID NO: 1643379 - DNA, 25 bp, Homo sapien
cagttcaataaactgcggtatagtt

SEQ ID NO: 1643380 - DNA, 25 bp, Homo sapien
ataaactgcggtatagtttattgaa

SEQ ID NO: 1643381 - DNA, 25 bp, Homo sapien
ttacagttcaataaactgcggtata

SEQ ID NO: 1643382 - DNA, 25 bp, Homo sapien
gagaaaaattccgtcaatgtagaaa

SEQ ID NO: 1643383 - DNA, 25 bp, Homo sapien
cattgaaatcaatgtttttcctgct

SEQ ID NO: 1643384 - DNA, 25 bp, Homo sapien
aaagagaaaaattccgtcaatgtag

SEQ ID NO: 1643385 - DNA, 25 bp, Homo sapien
tcctcattattatcaattatttcat

SEQ ID NO: 1643386 - DNA, 25 bp, Homo sapien
tccacctaaatccctattgccaagg

SEQ ID NO: 1643387 - DNA, 25 bp, Homo sapien
cacctaaatccctattgccaaggat

SEQ ID NO: 1643388 - DNA, 25 bp, Homo sapien
ccacctaaatccctattgccaagga

SEQ ID NO: 1643389 - DNA, 25 bp, Homo sapien
ctccacctaaatccctattgccaag

SEQ ID NO: 1643390 - DNA, 25 bp, Homo sapien
tacgaacagagcaagcatagagccc

SEQ ID NO: 1643391 - DNA, 25 bp, Homo sapien
ccggtgggttagagtccgcagaaca

SEQ ID NO: 1643392 - DNA, 25 bp, Homo sapien
cgcagaacaggacaagtagaggact

SEQ ID NO: 1643393 - DNA, 25 bp, Homo sapien
tagagcccgctatgctttgtagtaa

SEQ ID NO: 1643394 - DNA, 25 bp, Homo sapien
gcaaagagaataaagccacaggtga

SEQ ID NO: 1643395 - DNA, 25 bp, Homo sapien
caaagagaataaagccacaggtgat

SEQ ID NO: 1643396 - DNA, 25 bp, Homo sapien
ctggagcaaagagaataaagccaca

SEQ ID NO: 1643397 - DNA, 25 bp, Homo sapien
gagcaaagagaataaagccacaggt

SEQ ID NO: 1643398 - DNA, 25 bp, Homo sapien
tcctggtctcttaaagggacacagt

SEQ ID NO: 1643399 - DNA, 25 bp, Homo sapien
gtctcttaaagggacacagtgaccc

SEQ ID NO: 1643400 - DNA, 25 bp, Homo sapien
tggtctcttaaagggacacagtgac

SEQ ID NO: 1643401 - DNA, 25 bp, Homo sapien
tctcttaaagggacacagtgaccct

SEQ ID NO: 1643402 - DNA, 25 bp, Homo sapien
ccccaagtctcccatgacaagagcg

SEQ ID NO: 1643403 - DNA, 25 bp, Homo sapien
ggccccaagtctcccatgacaagag

SEQ ID NO: 1643404 - DNA, 25 bp, Homo sapien
gggccccaagtctcccatgacaaga

SEQ ID NO: 1643405 - DNA, 25 bp, Homo sapien
caagtctcccatgacaagagcgtcc

SEQ ID NO: 1643406 - DNA, 25 bp, Homo sapien
tgtttcatttctcgtgacactgggt

SEQ ID NO: 1643407 - DNA, 25 bp, Homo sapien
gacactgggtagaatgaggatcctg

SEQ ID NO: 1643408 - DNA, 25 bp, Homo sapien
caatgggtcgctttaccctgggact

SEQ ID NO: 1643409 - DNA, 25 bp, Homo sapien
tgactgggtaactgcggatgccacc

SEQ ID NO: 1643410 - DNA, 25 bp, Homo sapien
ccaaatgtaggtgtagttctcactc

SEQ ID NO: 1643411 - DNA, 25 bp, Homo sapien
tctcactcttaggttcacaggtgaa

SEQ ID NO: 1643412 - DNA, 25 bp, Homo sapien
tttaagttgttgatggtgatgtagg

SEQ ID NO: 1643413 - DNA, 25 bp, Homo sapien
cacaggtgaagtttaagacatcctt

SEQ ID NO: 1643414 - DNA, 25 bp, Homo sapien
gacagacacgtcagtggaagtcaca

SEQ ID NO: 1643415 - DNA, 25 bp, Homo sapien
tcaaagactatgaggccagctgctc

SEQ ID NO: 1643416 - DNA, 25 bp, Homo sapien
tccttgaaagccaatagctggtgcg

SEQ ID NO: 1643417 - DNA, 25 bp, Homo sapien
aatcagttgactggctggctcaccc

SEQ ID NO: 1643418 - DNA, 25 bp, Homo sapien
gatagagcagagtgcaaggaatgat

SEQ ID NO: 1643419 - DNA, 25 bp, Homo sapien
gtgacctctaaagatagagcagagt

SEQ ID NO: 1643420 - DNA, 25 bp, Homo sapien
cctctaaagatagagcagagtgcaa

SEQ ID NO: 1643421 - DNA, 25 bp, Homo sapien
taaagatagagcagagtgcaaggaa

SEQ ID NO: 1643422 - DNA, 25 bp, Homo sapien
cagaactatgttgcctgtcctgcgt

SEQ ID NO: 1643423 - DNA, 25 bp, Homo sapien
gtggctttggagcagaactatgttg

SEQ ID NO: 1643424 - DNA, 25 bp, Homo sapien
actgactggtagaaagggtgggaag

SEQ ID NO: 1643425 - DNA, 25 bp, Homo sapien
ctgtcctgcgttcaagtttcctctc

SEQ ID NO: 1643426 - DNA, 25 bp, Homo sapien
tagacccctctatatgttttagtga

SEQ ID NO: 1643427 - DNA, 25 bp, Homo sapien
ggctgagttatggatgaaacagaca

SEQ ID NO: 1643428 - DNA, 25 bp, Homo sapien
gggactatgatcctcttgattatga

SEQ ID NO: 1643429 - DNA, 25 bp, Homo sapien
ttatgagatttgttccagcagtggc

SEQ ID NO: 1643430 - DNA, 25 bp, Homo sapien
catgtggagcaaagagaataatgtc

SEQ ID NO: 1643431 - DNA, 25 bp, Homo sapien
gccatgtggagcaaagagaataatg

SEQ ID NO: 1643432 - DNA, 25 bp, Homo sapien
gacttcccctgtatggtaataggtg

SEQ ID NO: 1643433 - DNA, 25 bp, Homo sapien
tcccctgtatggtaataggtgtatg

SEQ ID NO: 1643434 - DNA, 25 bp, Homo sapien
agattcagggtgaatgggtcactgc

SEQ ID NO: 1643435 - DNA, 25 bp, Homo sapien
ggaggagattcagggtgaatgggtc

SEQ ID NO: 1643436 - DNA, 25 bp, Homo sapien
ggtgaatgggtcactgcggctggca

SEQ ID NO: 1643437 - DNA, 25 bp, Homo sapien
gaatgggtcactgcggctggcactc

SEQ ID NO: 1643438 - DNA, 25 bp, Homo sapien
gacacccaatagaaagagggtcctg

SEQ ID NO: 1643439 - DNA, 25 bp, Homo sapien
gtcctgcagtgtactttgtgacacc

SEQ ID NO: 1643440 - DNA, 25 bp, Homo sapien
ccaatagaaagagggtcctgttggt

SEQ ID NO: 1643441 - DNA, 25 bp, Homo sapien
agggtcctgcagtgtactttgtgac

SEQ ID NO: 1643442 - DNA, 25 bp, Homo sapien
agcttgcgtccggagtctcaggatc

SEQ ID NO: 1643443 - DNA, 25 bp, Homo sapien
tcaggatcacaggttaagctcacag

SEQ ID NO: 1643444 - DNA, 25 bp, Homo sapien
gaccattcatccaccacaggtagct

SEQ ID NO: 1643445 - DNA, 25 bp, Homo sapien
tcacaggttaagctcacagcctcca

SEQ ID NO: 1643446 - DNA, 25 bp, Homo sapien
gtttcagtcttactttgccgcccaa

SEQ ID NO: 1643447 - DNA, 25 bp, Homo sapien
agtttcagtcttactttgccgccca

SEQ ID NO: 1643448 - DNA, 25 bp, Homo sapien
ttcagtcttactttgccgcccaagg

SEQ ID NO: 1643449 - DNA, 25 bp, Homo sapien
tttcagtcttactttgccgcccaag

SEQ ID NO: 1643450 - DNA, 25 bp, Homo sapien
tcaggcagtggagccacaaggtggc

SEQ ID NO: 1643451 - DNA, 25 bp, Homo sapien
gggagaacagagtcaagtccggagg

SEQ ID NO: 1643452 - DNA, 25 bp, Homo sapien
acagagtcaagtccggaggtcagtt

SEQ ID NO: 1643453 - DNA, 25 bp, Homo sapien
gaacagagtcaagtccggaggtcag

SEQ ID NO: 1643454 - DNA, 25 bp, Homo sapien
aattaaaagaagtgatgtgtgttat

SEQ ID NO: 1643455 - DNA, 25 bp, Homo sapien
gcagtaaaaccatcagatagcaccc

SEQ ID NO: 1643456 - DNA, 25 bp, Homo sapien
aaagaagtgatgtgtgttatgttag

SEQ ID NO: 1643457 - DNA, 25 bp, Homo sapien
aaaccatcagatagcacccacctgg

SEQ ID NO: 1643458 - DNA, 25 bp, Homo sapien
ttgtcttgtccacaggtcagcctca

SEQ ID NO: 1643459 - DNA, 25 bp, Homo sapien
cattggctcgagatgaagcctggca

SEQ ID NO: 1643460 - DNA, 25 bp, Homo sapien
gcctatccctgtcccattgtcttgt

SEQ ID NO: 1643461 - DNA, 25 bp, Homo sapien
gaagctcattctcttagtgacctgg

SEQ ID NO: 1643462 - DNA, 25 bp, Homo sapien
aatgactatggggtgcttggaagcc

SEQ ID NO: 1643463 - DNA, 25 bp, Homo sapien
cctaagaagagaggttttgagccaa

SEQ ID NO: 1643464 - DNA, 25 bp, Homo sapien
tgtcaatcagataagctaaatggca

SEQ ID NO: 1643465 - DNA, 25 bp, Homo sapien
caaatggacagtggcttttcatgct

SEQ ID NO: 1643466 - DNA, 25 bp, Homo sapien
atgtccagttactcctctattctca

SEQ ID NO: 1643467 - DNA, 25 bp, Homo sapien
cgtgacttgggcagtcgtgggtggg

SEQ ID NO: 1643468 - DNA, 25 bp, Homo sapien
aatgtccagttactcctctattctc

SEQ ID NO: 1643469 - DNA, 25 bp, Homo sapien
tgtccagttactcctctattctcat

SEQ ID NO: 1643470 - DNA, 25 bp, Homo sapien
aggagccccttccaggtgatgcgct

SEQ ID NO: 1643471 - DNA, 25 bp, Homo sapien
gagcaggagccccttccaggtgatg

SEQ ID NO: 1643472 - DNA, 25 bp, Homo sapien
gagccccttccaggtgatgcgctgt

SEQ ID NO: 1643473 - DNA, 25 bp, Homo sapien
gccccttccaggtgatgcgctgtgt

SEQ ID NO: 1643474 - DNA, 25 bp, Homo sapien
tggagatgagcctaggatccagaag

SEQ ID NO: 1643475 - DNA, 25 bp, Homo sapien
tctgtggagatgagcctaggatcca

SEQ ID NO: 1643476 - DNA, 25 bp, Homo sapien
gatgagcctaggatccagaagcttc

SEQ ID NO: 1643477 - DNA, 25 bp, Homo sapien
gagatgagcctaggatccagaagct

SEQ ID NO: 1643478 - DNA, 25 bp, Homo sapien
gaaagaggtgtctgctaaggcaatg

SEQ ID NO: 1643479 - DNA, 25 bp, Homo sapien
gaggtgtctgctaaggcaatgacac

SEQ ID NO: 1643480 - DNA, 25 bp, Homo sapien
aaagaggtgtctgctaaggcaatga

SEQ ID NO: 1643481 - DNA, 25 bp, Homo sapien
aagaggtgtctgctaaggcaatgac

SEQ ID NO: 1643482 - DNA, 25 bp, Homo sapien
aagtgatgctgggtatcccatgttc

SEQ ID NO: 1643483 - DNA, 25 bp, Homo sapien
gcatatcgggacgaagtccatgtca

SEQ ID NO: 1643484 - DNA, 25 bp, Homo sapien
gctctgcagctgaagatttgggcct

SEQ ID NO: 1643485 - DNA, 25 bp, Homo sapien
gtacatgggcgatgccggtagccac

SEQ ID NO: 1643486 - DNA, 25 bp, Homo sapien
atggtgagagccatccacactatgt

SEQ ID NO: 1643487 - DNA, 25 bp, Homo sapien
aatggtgagagccatccacactatg

SEQ ID NO: 1643488 - DNA, 25 bp, Homo sapien
tggtgagagccatccacactatgtg

SEQ ID NO: 1643489 - DNA, 25 bp, Homo sapien
aaatggtgagagccatccacactat

SEQ ID NO: 1643490 - DNA, 25 bp, Homo sapien
actggccagtacttcaatcatgatg

SEQ ID NO: 1643491 - DNA, 25 bp, Homo sapien
tcaatcatgatgctgccagtggctc

SEQ ID NO: 1643492 - DNA, 25 bp, Homo sapien
ctagatcagcgccacactggccagt

SEQ ID NO: 1643493 - DNA, 25 bp, Homo sapien
agatcagcgccacactggccagtac

SEQ ID NO: 1643494 - DNA, 25 bp, Homo sapien
ctgaaaggccaggagaacttccttt

SEQ ID NO: 1643495 - DNA, 25 bp, Homo sapien
aaggccaggagaacttcctttcact

SEQ ID NO: 1643496 - DNA, 25 bp, Homo sapien
gaaaggccaggagaacttcctttca

SEQ ID NO: 1643497 - DNA, 25 bp, Homo sapien
gccaggagaacttcctttcactgaa

SEQ ID NO: 1643498 - DNA, 25 bp, Homo sapien
agaggttgaggtttgaccctggata

SEQ ID NO: 1643499 - DNA, 25 bp, Homo sapien
aataagttgtgggttcatctgggcc

SEQ ID NO: 1643500 - DNA, 25 bp, Homo sapien
ccctggatagtaataggtgtctgaa

SEQ ID NO: 1643501 - DNA, 25 bp, Homo sapien
caagaatactctgctgatgggttag

SEQ ID NO: 1643502 - DNA, 25 bp, Homo sapien
agaataatgccacaggtaatgttat

SEQ ID NO: 1643503 - DNA, 25 bp, Homo sapien
tgccacaggtaatgttatcagaggg

SEQ ID NO: 1643504 - DNA, 25 bp, Homo sapien
ctggagcaaagagaataatgccaca

SEQ ID NO: 1643505 - DNA, 25 bp, Homo sapien
aatgccacaggtaatgttatcagag

SEQ ID NO: 1643506 - DNA, 25 bp, Homo sapien
tggtctgtgaaaggggcacagtgtt

SEQ ID NO: 1643507 - DNA, 25 bp, Homo sapien
ctggtctgtgaaaggggcacagtgt

SEQ ID NO: 1643508 - DNA, 25 bp, Homo sapien
ggtctgtgaaaggggcacagtgttc

SEQ ID NO: 1643509 - DNA, 25 bp, Homo sapien
tttgggccggcagccttgtccatga

SEQ ID NO: 1643510 - DNA, 25 bp, Homo sapien
ggcaggaagtcatggccagcttggg

SEQ ID NO: 1643511 - DNA, 25 bp, Homo sapien
gggtaagtgtcttcatacttgaacc

SEQ ID NO: 1643512 - DNA, 25 bp, Homo sapien
ggcctggcctcatgttatgtggatt

SEQ ID NO: 1643513 - DNA, 25 bp, Homo sapien
atccaggtgactgggtcaatttggc

SEQ ID NO: 1643514 - DNA, 25 bp, Homo sapien
acatccaggtgactgggtcaatttg

SEQ ID NO: 1643515 - DNA, 25 bp, Homo sapien
ccaggtgactgggtcaatttggctg

SEQ ID NO: 1643516 - DNA, 25 bp, Homo sapien
agaacatccaggtgactgggtcaat

SEQ ID NO: 1643517 - DNA, 25 bp, Homo sapien
caccacatgtagattgtgccatgaa

SEQ ID NO: 1643518 - DNA, 25 bp, Homo sapien
tacccaccacatgtagattgtgcca

SEQ ID NO: 1643519 - DNA, 25 bp, Homo sapien
gacatctttagcctgggactgagtg

SEQ ID NO: 1643520 - DNA, 25 bp, Homo sapien
cattggacatctttagcctgggact

SEQ ID NO: 1643521 - DNA, 25 bp, Homo sapien
taacagagaagattcccctgtgtgg

SEQ ID NO: 1643522 - DNA, 25 bp, Homo sapien
aagattcccctgtgtggcaccactg

SEQ ID NO: 1643523 - DNA, 25 bp, Homo sapien
gtgtggcaccactgatttctccatg

SEQ ID NO: 1643524 - DNA, 25 bp, Homo sapien
tgcagataacagagaagattcccct

SEQ ID NO: 1643525 - DNA, 25 bp, Homo sapien
gctctgcctttccttctgagcccag

SEQ ID NO: 1643526 - DNA, 25 bp, Homo sapien
caactctggcctcactgggctctgc

SEQ ID NO: 1643527 - DNA, 25 bp, Homo sapien
tgggctctgcctttccttctgagcc

SEQ ID NO: 1643528 - DNA, 25 bp, Homo sapien
ctttccttctgagcccagagccccg

SEQ ID NO: 1643529 - DNA, 25 bp, Homo sapien
tccctgcttccctcttcaaagcact

SEQ ID NO: 1643530 - DNA, 25 bp, Homo sapien
ttccctgcttccctcttcaaagcac

SEQ ID NO: 1643531 - DNA, 25 bp, Homo sapien
tgcttccctcttcaaagcacttctc

SEQ ID NO: 1643532 - DNA, 25 bp, Homo sapien
cctgcttccctcttcaaagcacttc

SEQ ID NO: 1643533 - DNA, 25 bp, Homo sapien
gaagttcaggtagtaagaattctca

SEQ ID NO: 1643534 - DNA, 25 bp, Homo sapien
ttcaggtagtaagaattctcactgg

SEQ ID NO: 1643535 - DNA, 25 bp, Homo sapien
aagttcaggtagtaagaattctcac

SEQ ID NO: 1643536 - DNA, 25 bp, Homo sapien
tggggatgggtcatatggagaatta

SEQ ID NO: 1643537 - DNA, 25 bp, Homo sapien
ctggagtgcatcccggggacttggg

SEQ ID NO: 1643538 - DNA, 25 bp, Homo sapien
agtgcatcccggggacttgggagct

SEQ ID NO: 1643539 - DNA, 25 bp, Homo sapien
aggcctctcttagcagctggagtgc

SEQ ID NO: 1643540 - DNA, 25 bp, Homo sapien
ggcctctcttagcagctggagtgca

SEQ ID NO: 1643541 - DNA, 25 bp, Homo sapien
cggaggaggcctgaaaaagatcatc

SEQ ID NO: 1643542 - DNA, 25 bp, Homo sapien
cagagaagaagctggctcggatgct

SEQ ID NO: 1643543 - DNA, 25 bp, Homo sapien
agaagaagctggctcggatgctgct

SEQ ID NO: 1643544 - DNA, 25 bp, Homo sapien
ggaaagggccatggccggaggaggc

SEQ ID NO: 1643545 - DNA, 25 bp, Homo sapien
cccctcacatccatagaagtaaaag

SEQ ID NO: 1643546 - DNA, 25 bp, Homo sapien
aacttgtcttatgattgagtaagca

SEQ ID NO: 1643547 - DNA, 25 bp, Homo sapien
aagaaatcccacctttgtatccagc

SEQ ID NO: 1643548 - DNA, 25 bp, Homo sapien
agaaacttgtcttatgattgagtaa

SEQ ID NO: 1643549 - DNA, 25 bp, Homo sapien
ttaataaggttccaggattatactg

SEQ ID NO: 1643550 - DNA, 25 bp, Homo sapien
taaggttccaggattatactgtccc

SEQ ID NO: 1643551 - DNA, 25 bp, Homo sapien
ggattatactgtcccttttttgctg

SEQ ID NO: 1643552 - DNA, 25 bp, Homo sapien
gtgtgactttaataaggttccagga

SEQ ID NO: 1643553 - DNA, 25 bp, Homo sapien
actggaaagctctcaggatagtgcc

SEQ ID NO: 1643554 - DNA, 25 bp, Homo sapien
gggacgcttaacttccaggagtgga

SEQ ID NO: 1643555 - DNA, 25 bp, Homo sapien
tgaggaccgtagttaactggaaagc

SEQ ID NO: 1643556 - DNA, 25 bp, Homo sapien
agagtgggtgtgtcttccgtgacaa

SEQ ID NO: 1643557 - DNA, 25 bp, Homo sapien
aaaaaagttcataaatctggagaat

SEQ ID NO: 1643558 - DNA, 25 bp, Homo sapien
ttgaagttatcaggagcttgtattc

SEQ ID NO: 1643559 - DNA, 25 bp, Homo sapien
tagctgatggtaaatactttgagga

SEQ ID NO: 1643560 - DNA, 25 bp, Homo sapien
aagggtgtggttaagtctgcagtgc

SEQ ID NO: 1643561 - DNA, 25 bp, Homo sapien
ttatgtctatatgggtgaaggggca

SEQ ID NO: 1643562 - DNA, 25 bp, Homo sapien
ctgtttttagacatagcattggaac

SEQ ID NO: 1643563 - DNA, 25 bp, Homo sapien
gacatagcattggaactaagaattt

SEQ ID NO: 1643564 - DNA, 25 bp, Homo sapien
ccagtcttcctgaaatacagaaatg

SEQ ID NO: 1643565 - DNA, 25 bp, Homo sapien
ctgccagtcttcctgaaatacagaa

SEQ ID NO: 1643566 - DNA, 25 bp, Homo sapien
tgccagtcttcctgaaatacagaaa

SEQ ID NO: 1643567 - DNA, 25 bp, Homo sapien
agtcttcctgaaatacagaaatgac

SEQ ID NO: 1643568 - DNA, 25 bp, Homo sapien
ggaagacgtcctattcctggaggag

SEQ ID NO: 1643569 - DNA, 25 bp, Homo sapien
agaaaggaagacgtcctattcctgg

SEQ ID NO: 1643570 - DNA, 25 bp, Homo sapien
tcaccgctgctctattggagtaaag

SEQ ID NO: 1643571 - DNA, 25 bp, Homo sapien
ccgctgctctattggagtaaagaaa

SEQ ID NO: 1643572 - DNA, 25 bp, Homo sapien
cttctcatccgtctctgaagtctct

SEQ ID NO: 1643573 - DNA, 25 bp, Homo sapien
ttctcatccgtctctgaagtctctt

SEQ ID NO: 1643574 - DNA, 25 bp, Homo sapien
acttcgactgtcatggatttggagc

SEQ ID NO: 1643575 - DNA, 25 bp, Homo sapien
cagagacttcgactgtcatggattt

SEQ ID NO: 1643576 - DNA, 25 bp, Homo sapien
gagacttcgactgtcatggatttgg

SEQ ID NO: 1643577 - DNA, 25 bp, Homo sapien
gacttcgactgtcatggatttggag

SEQ ID NO: 1643578 - DNA, 25 bp, Homo sapien
ctgagttacgaacagagcaagcata

SEQ ID NO: 1643579 - DNA, 25 bp, Homo sapien
gagttacgaacagagcaagcataga

SEQ ID NO: 1643580 - DNA, 25 bp, Homo sapien
tacgaacagagcaagcatagagccc

SEQ ID NO: 1643581 - DNA, 25 bp, Homo sapien
gttacgaacagagcaagcatagagc

SEQ ID NO: 1643582 - DNA, 25 bp, Homo sapien
cgcgaagcaggacaagtaaaggttt

SEQ ID NO: 1643583 - DNA, 25 bp, Homo sapien
ttttgtcctgaacggtaataggtga

SEQ ID NO: 1643584 - DNA, 25 bp, Homo sapien
tgtcctgaacggtaataggtgaatg

SEQ ID NO: 1643585 - DNA, 25 bp, Homo sapien
ctatgccggtgggttacattccgcg

SEQ ID NO: 1643586 - DNA, 25 bp, Homo sapien
tcctggtctcttaaagggacacagt

SEQ ID NO: 1643587 - DNA, 25 bp, Homo sapien
tggtctcttaaagggacacagtgac

SEQ ID NO: 1643588 - DNA, 25 bp, Homo sapien
tctcttaaagggacacagtgaccct

SEQ ID NO: 1643589 - DNA, 25 bp, Homo sapien
atgctcctggtctcttaaagggaca

SEQ ID NO: 1643590 - DNA, 25 bp, Homo sapien
agtcccagccgaaccccctctatgt

SEQ ID NO: 1643591 - DNA, 25 bp, Homo sapien
cccctctatgttcactgagctgaag

SEQ ID NO: 1643592 - DNA, 25 bp, Homo sapien
tctatgttcactgagctgaagcctg

SEQ ID NO: 1643593 - DNA, 25 bp, Homo sapien
gaaccccctctatgttcactgagct

SEQ ID NO: 1643594 - DNA, 25 bp, Homo sapien
caagtctcccatgacaagagcgtcc

SEQ ID NO: 1643595 - DNA, 25 bp, Homo sapien
aagtctcccatgacaagagcgtccc

SEQ ID NO: 1643596 - DNA, 25 bp, Homo sapien
ccaagtctcccatgacaagagcgtc

SEQ ID NO: 1643597 - DNA, 25 bp, Homo sapien
gcttgtggtcatttagagttaagct

SEQ ID NO: 1643598 - DNA, 25 bp, Homo sapien
ggcttgtggtcatttagagttaagc

SEQ ID NO: 1643599 - DNA, 25 bp, Homo sapien
cacattgatagggtcctgtttcatt

SEQ ID NO: 1643600 - DNA, 25 bp, Homo sapien
tgactgggttactgcggatgccacc

SEQ ID NO: 1643601 - DNA, 25 bp, Homo sapien
ggatgccaccatatcggtcccgtat

SEQ ID NO: 1643602 - DNA, 25 bp, Homo sapien
tatcggtcccgtatttcacattgat

SEQ ID NO: 1643603 - DNA, 25 bp, Homo sapien
tgggaggctctgaccatttagccac

SEQ ID NO: 1643604 - DNA, 25 bp, Homo sapien
gttttgagttgttgatggtgatgta

SEQ ID NO: 1643605 - DNA, 25 bp, Homo sapien
tttgagttgttgatggtgatgtagg

SEQ ID NO: 1643606 - DNA, 25 bp, Homo sapien
gagttgttgatggtgatgtagggct

SEQ ID NO: 1643607 - DNA, 25 bp, Homo sapien
tgagttgttgatggtgatgtagggc

SEQ ID NO: 1643608 - DNA, 25 bp, Homo sapien
gtgacctctaaagatagagcagagt

SEQ ID NO: 1643609 - DNA, 25 bp, Homo sapien
cctctaaagatagagcagagtgcaa

SEQ ID NO: 1643610 - DNA, 25 bp, Homo sapien
taaagatagagcagagtgcaaggaa

SEQ ID NO: 1643611 - DNA, 25 bp, Homo sapien
gatagagcagagtgcaaggaatgat

SEQ ID NO: 1643612 - DNA, 25 bp, Homo sapien
cagccaagaatgctctgctagtggg

SEQ ID NO: 1643613 - DNA, 25 bp, Homo sapien
agccaagaatgctctgctagtgggt

SEQ ID NO: 1643614 - DNA, 25 bp, Homo sapien
cagggataaaggtctctgtacttgg

SEQ ID NO: 1643615 - DNA, 25 bp, Homo sapien
gggataaaggtctctgtacttggac

SEQ ID NO: 1643616 - DNA, 25 bp, Homo sapien
taaaggtctctgtacttggacctga

SEQ ID NO: 1643617 - DNA, 25 bp, Homo sapien
gataaaggtctctgtacttggacct

SEQ ID NO: 1643618 - DNA, 25 bp, Homo sapien
gtcactgcggctggcactcactggg

SEQ ID NO: 1643619 - DNA, 25 bp, Homo sapien
ggcactcactgggttccgtatttca

SEQ ID NO: 1643620 - DNA, 25 bp, Homo sapien
ggaggagattcagggtgaatgggtc

SEQ ID NO: 1643621 - DNA, 25 bp, Homo sapien
tgaatgggtcactgcggctggcact

SEQ ID NO: 1643622 - DNA, 25 bp, Homo sapien
agattaagatcacagcctccatgat

SEQ ID NO: 1643623 - DNA, 25 bp, Homo sapien
agctgcaacctttgagtggtaggga

SEQ ID NO: 1643624 - DNA, 25 bp, Homo sapien
cacaggtagcttgcgttcggagttg

SEQ ID NO: 1643625 - DNA, 25 bp, Homo sapien
cgttcggagttgcaggatcacagat

SEQ ID NO: 1643626 - DNA, 25 bp, Homo sapien
agcagtgagggagacactgacttca

SEQ ID NO: 1643627 - DNA, 25 bp, Homo sapien
tgagcagtgagggagacactgactt

SEQ ID NO: 1643628 - DNA, 25 bp, Homo sapien
gtgagcagtgagggagacactgact

SEQ ID NO: 1643629 - DNA, 25 bp, Homo sapien
gagcagtgagggagacactgacttc

SEQ ID NO: 1643630 - DNA, 25 bp, Homo sapien
tccagttactcctctagtcccatca

SEQ ID NO: 1643631 - DNA, 25 bp, Homo sapien
gcagggatgcattggaatatactgt

SEQ ID NO: 1643632 - DNA, 25 bp, Homo sapien
tgtttctcgtccactgtatgcaggc

SEQ ID NO: 1643633 - DNA, 25 bp, Homo sapien
ggaatatactgtttctcgtccactg

SEQ ID NO: 1643634 - DNA, 25 bp, Homo sapien
tgatgtaatgtaatggtagaggtcc

SEQ ID NO: 1643635 - DNA, 25 bp, Homo sapien
tacatatgatgtaatgtaatggtag

SEQ ID NO: 1643636 - DNA, 25 bp, Homo sapien
catatgatgtaatgtaatggtagag

SEQ ID NO: 1643637 - DNA, 25 bp, Homo sapien
atgtaatgtaatggtagaggtccct

SEQ ID NO: 1643638 - DNA, 25 bp, Homo sapien
aactttgggtggctgggcttcagtc

SEQ ID NO: 1643639 - DNA, 25 bp, Homo sapien
ttcagtcgtgacttgggcaatggta

SEQ ID NO: 1643640 - DNA, 25 bp, Homo sapien
ctaccacatgtaaccagtaagattc

SEQ ID NO: 1643641 - DNA, 25 bp, Homo sapien
tagaagaacatccttcccctcggaa

SEQ ID NO: 1643642 - DNA, 25 bp, Homo sapien
ttggcatttttctgtttggaatcct

SEQ ID NO: 1643643 - DNA, 25 bp, Homo sapien
tttctgtttggaatcctcttcccca

SEQ ID NO: 1643644 - DNA, 25 bp, Homo sapien
cttggcatttttctgtttggaatcc

SEQ ID NO: 1643645 - DNA, 25 bp, Homo sapien
ctgtttggaatcctcttccccaggg

SEQ ID NO: 1643646 - DNA, 25 bp, Homo sapien
caggacccccttccatttgatgtgc

SEQ ID NO: 1643647 - DNA, 25 bp, Homo sapien
gcaggacccccttccatttgatgtg

SEQ ID NO: 1643648 - DNA, 25 bp, Homo sapien
tgagcaggacccccttccatttgat

SEQ ID NO: 1643649 - DNA, 25 bp, Homo sapien
ctgtgagcaggacccccttccattt

SEQ ID NO: 1643650 - DNA, 25 bp, Homo sapien
ccagaaacttcctgagcacggctgt

SEQ ID NO: 1643651 - DNA, 25 bp, Homo sapien
tcctgagcacggctgtaggctgtgc

SEQ ID NO: 1643652 - DNA, 25 bp, Homo sapien
gaaacttcctgagcacggctgtagg

SEQ ID NO: 1643653 - DNA, 25 bp, Homo sapien
acttcctgagcacggctgtaggctg

SEQ ID NO: 1643654 - DNA, 25 bp, Homo sapien
acagagaccggtagtggcaccgaat

SEQ ID NO: 1643655 - DNA, 25 bp, Homo sapien
caagacacagagaccggtagtggca

SEQ ID NO: 1643656 - DNA, 25 bp, Homo sapien
acacagagaccggtagtggcaccga

SEQ ID NO: 1643657 - DNA, 25 bp, Homo sapien
agacacagagaccggtagtggcacc

SEQ ID NO: 1643658 - DNA, 25 bp, Homo sapien
gaaggtggactaggattgtgaccac

SEQ ID NO: 1643659 - DNA, 25 bp, Homo sapien
gggagacagtcaggcctccaaataa

SEQ ID NO: 1643660 - DNA, 25 bp, Homo sapien
tgcaggtggacctgactaatgtcag

SEQ ID NO: 1643661 - DNA, 25 bp, Homo sapien
ggctactgctagaccagggtccgct

SEQ ID NO: 1643662 - DNA, 25 bp, Homo sapien
aaagaggtgtctgctaaggcattgc

SEQ ID NO: 1643663 - DNA, 25 bp, Homo sapien
aagaggtgtctgctaaggcattgcc

SEQ ID NO: 1643664 - DNA, 25 bp, Homo sapien
gaggtgtctgctaaggcattgccac

SEQ ID NO: 1643665 - DNA, 25 bp, Homo sapien
tgaaagaggtgtctgctaaggcatt

SEQ ID NO: 1643666 - DNA, 25 bp, Homo sapien
ttagaaactatgggtcagcagatgg

SEQ ID NO: 1643667 - DNA, 25 bp, Homo sapien
aatgggccatgccagtagacattgc

SEQ ID NO: 1643668 - DNA, 25 bp, Homo sapien
gtaaatgggccatgccagtagacat

SEQ ID NO: 1643669 - DNA, 25 bp, Homo sapien
agaaactatgggtcagcagatgggt

SEQ ID NO: 1643670 - DNA, 25 bp, Homo sapien
gttttattctgctagaatgtcttac

SEQ ID NO: 1643671 - DNA, 25 bp, Homo sapien
ataatttcagctttcctacgtcttc

SEQ ID NO: 1643672 - DNA, 25 bp, Homo sapien
taatttcagctttcctacgtcttca

SEQ ID NO: 1643673 - DNA, 25 bp, Homo sapien
gtcttgctcttagtgattccatggg

SEQ ID NO: 1643674 - DNA, 25 bp, Homo sapien
cttgctcttagtgattccatgggag

SEQ ID NO: 1643675 - DNA, 25 bp, Homo sapien
ggtcttgctcttagtgattccatgg

SEQ ID NO: 1643676 - DNA, 25 bp, Homo sapien
tcttgctcttagtgattccatggga

SEQ ID NO: 1643677 - DNA, 25 bp, Homo sapien
aacacagaaacaatgaacagagctg

SEQ ID NO: 1643678 - DNA, 25 bp, Homo sapien
ctacaggtggataataaaaacacag

SEQ ID NO: 1643679 - DNA, 25 bp, Homo sapien
agaaacaatgaacagagctgcagtc

SEQ ID NO: 1643680 - DNA, 25 bp, Homo sapien
tacaggtggataataaaaacacaga

SEQ ID NO: 1643681 - DNA, 25 bp, Homo sapien
ggaatctgagattaaatcttcacaa

SEQ ID NO: 1643682 - DNA, 25 bp, Homo sapien
gtttttaatataacatccgaatcaa

SEQ ID NO: 1643683 - DNA, 25 bp, Homo sapien
ttaatataacatccgaatcaaagca

SEQ ID NO: 1643684 - DNA, 25 bp, Homo sapien
cttcacaaacctcttgagaatagga

SEQ ID NO: 1643685 - DNA, 25 bp, Homo sapien
gaagtatagtttattgaactgctat

SEQ ID NO: 1643686 - DNA, 25 bp, Homo sapien
tcccagaagtatagtttattgaact

SEQ ID NO: 1643687 - DNA, 25 bp, Homo sapien
ccagaagtatagtttattgaactgc

SEQ ID NO: 1643688 - DNA, 25 bp, Homo sapien
ttcccagaagtatagtttattgaac

SEQ ID NO: 1643689 - DNA, 25 bp, Homo sapien
cctgcttggtctaggctgggaatat

SEQ ID NO: 1643690 - DNA, 25 bp, Homo sapien
tcctgcttggtctaggctgggaata

SEQ ID NO: 1643691 - DNA, 25 bp, Homo sapien
cgaagttcttagacaaatttggagg

SEQ ID NO: 1643692 - DNA, 25 bp, Homo sapien
gccaacgatgctgggatccacttac

SEQ ID NO: 1643693 - DNA, 25 bp, Homo sapien
tattgccaacgatgctgggatccac

SEQ ID NO: 1643694 - DNA, 25 bp, Homo sapien
ctaaaaccctattgccaacgatgct

SEQ ID NO: 1643695 - DNA, 25 bp, Homo sapien
aaccctattgccaacgatgctggga

SEQ ID NO: 1643696 - DNA, 25 bp, Homo sapien
cgcagaacaggacaagtagaggact

SEQ ID NO: 1643697 - DNA, 25 bp, Homo sapien
tacgaacagagcaaacatagagccc

SEQ ID NO: 1643698 - DNA, 25 bp, Homo sapien
ccggtgggttagagtccgcagaaca

SEQ ID NO: 1643699 - DNA, 25 bp, Homo sapien
tagagcccgctatgctttgtagtaa

SEQ ID NO: 1643700 - DNA, 25 bp, Homo sapien
caaagagaataaagccacaggtgat

SEQ ID NO: 1643701 - DNA, 25 bp, Homo sapien
gcaaagagaataaagccacaggtga

SEQ ID NO: 1643702 - DNA, 25 bp, Homo sapien
ctggagcaaagagaataaagccaca

SEQ ID NO: 1643703 - DNA, 25 bp, Homo sapien
gagcaaagagaataaagccacaggt

SEQ ID NO: 1643704 - DNA, 25 bp, Homo sapien
tcctggtctcttaaagggacacagt

SEQ ID NO: 1643705 - DNA, 25 bp, Homo sapien
gtctcttaaagggacacagtgaccc

SEQ ID NO: 1643706 - DNA, 25 bp, Homo sapien
tggtctcttaaagggacacagtgac

SEQ ID NO: 1643707 - DNA, 25 bp, Homo sapien
tctcttaaagggacacagtgaccct

SEQ ID NO: 1643708 - DNA, 25 bp, Homo sapien
gacactgggtagaatgaggatcctg

SEQ ID NO: 1643709 - DNA, 25 bp, Homo sapien
tgtttcatttctcgtgacactgggt

SEQ ID NO: 1643710 - DNA, 25 bp, Homo sapien
actgcggatgccaccatatcggtcc

SEQ ID NO: 1643711 - DNA, 25 bp, Homo sapien
caatgggtcgctttaccctgggact

SEQ ID NO: 1643712 - DNA, 25 bp, Homo sapien
cacaggtgaagtttaagacatcctt

SEQ ID NO: 1643713 - DNA, 25 bp, Homo sapien
ccaaatgtaggtgtagttctcactc

SEQ ID NO: 1643714 - DNA, 25 bp, Homo sapien
tttaagttgttgatggtgatgtagg

SEQ ID NO: 1643715 - DNA, 25 bp, Homo sapien
tctcactcttaggttcacaggtgaa

SEQ ID NO: 1643716 - DNA, 25 bp, Homo sapien
gacagacacgtcagtgggagtcaca

SEQ ID NO: 1643717 - DNA, 25 bp, Homo sapien
tgatctaagggctcaaagactgtga

SEQ ID NO: 1643718 - DNA, 25 bp, Homo sapien
aatcagttgactggctggctcacct

SEQ ID NO: 1643719 - DNA, 25 bp, Homo sapien
tcttagggaagcacagactttctga

SEQ ID NO: 1643720 - DNA, 25 bp, Homo sapien
gatagagcagagtgcaaggaatgat

SEQ ID NO: 1643721 - DNA, 25 bp, Homo sapien
gtgacctctaaagatagagcagagt

SEQ ID NO: 1643722 - DNA, 25 bp, Homo sapien
cctctaaagatagagcagagtgcaa

SEQ ID NO: 1643723 - DNA, 25 bp, Homo sapien
taaagatagagcagagtgcaaggaa

SEQ ID NO: 1643724 - DNA, 25 bp, Homo sapien
gatcagttttcggtgaattccacag

SEQ ID NO: 1643725 - DNA, 25 bp, Homo sapien
cagtggccatgctgcactcgtatat

SEQ ID NO: 1643726 - DNA, 25 bp, Homo sapien
actgctggaaatctggtcctcatga

SEQ ID NO: 1643727 - DNA, 25 bp, Homo sapien
aatcagaagttgttcatgggtgtgc

SEQ ID NO: 1643728 - DNA, 25 bp, Homo sapien
ggtaataggtgtatgaggaagaaat

SEQ ID NO: 1643729 - DNA, 25 bp, Homo sapien
gaggaagaaatggtgggggcatcca

SEQ ID NO: 1643730 - DNA, 25 bp, Homo sapien
ggaagaaatggtgggggcatccagg

SEQ ID NO: 1643731 - DNA, 25 bp, Homo sapien
aagaaatggtgggggcatccaggcc

SEQ ID NO: 1643732 - DNA, 25 bp, Homo sapien
gaccattcatccaccacaggtagct

SEQ ID NO: 1643733 - DNA, 25 bp, Homo sapien
cattcatagggtcctgcagtatact

SEQ ID NO: 1643734 - DNA, 25 bp, Homo sapien
tcacaggttaagctcacagcctcca

SEQ ID NO: 1643735 - DNA, 25 bp, Homo sapien
cacccaatagaaagagggtcctgtt

SEQ ID NO: 1643736 - DNA, 25 bp, Homo sapien
tacttagcgttagaaaccagtgaca

SEQ ID NO: 1643737 - DNA, 25 bp, Homo sapien
aaatttcaagcttgttatacgcctg

SEQ ID NO: 1643738 - DNA, 25 bp, Homo sapien
gaactctctagaaagtgaccggaga

SEQ ID NO: 1643739 - DNA, 25 bp, Homo sapien
gcctgtcaggaagctagaactctct

SEQ ID NO: 1643740 - DNA, 25 bp, Homo sapien
gtggcaactccagatgatttctgtg

SEQ ID NO: 1643741 - DNA, 25 bp, Homo sapien
ccagagtggttagagggagtgtcta

SEQ ID NO: 1643742 - DNA, 25 bp, Homo sapien
tgaacagccagagtggttagaggga

SEQ ID NO: 1643743 - DNA, 25 bp, Homo sapien
actccagatgatttctgtgcctttc

SEQ ID NO: 1643744 - DNA, 25 bp, Homo sapien
ctccttgatcctctcatgacagtga

SEQ ID NO: 1643745 - DNA, 25 bp, Homo sapien
gaaaacaaggtcctctccttgatcc

SEQ ID NO: 1643746 - DNA, 25 bp, Homo sapien
cacaggatttcaggttcagtgatgg

SEQ ID NO: 1643747 - DNA, 25 bp, Homo sapien
cctaggattctgcatccaagatcca

SEQ ID NO: 1643748 - DNA, 25 bp, Homo sapien
tggctcggcttcaatcgtgacttgg

SEQ ID NO: 1643749 - DNA, 25 bp, Homo sapien
tgaaggtgaaacgtccagttactcc

SEQ ID NO: 1643750 - DNA, 25 bp, Homo sapien
tctcgtccactatatgcaggcccat

SEQ ID NO: 1643751 - DNA, 25 bp, Homo sapien
gatgtaatgtaatggtagaggtccc

SEQ ID NO: 1643752 - DNA, 25 bp, Homo sapien
gagcaggagccccttccatttgatg

SEQ ID NO: 1643753 - DNA, 25 bp, Homo sapien
gtctctgctgcttgtgtgttctcct

SEQ ID NO: 1643754 - DNA, 25 bp, Homo sapien
ctgtggagataagcctaggatccag

SEQ ID NO: 1643755 - DNA, 25 bp, Homo sapien
gcaggagcaattctcaagctcatgg

SEQ ID NO: 1643756 - DNA, 25 bp, Homo sapien
ggcaggagcaattctcaagctcatg

SEQ ID NO: 1643757 - DNA, 25 bp, Homo sapien
ctcttctctgcccagctgactgtcc

SEQ ID NO: 1643758 - DNA, 25 bp, Homo sapien
ccagctgactgtcctgtggtcacca

SEQ ID NO: 1643759 - DNA, 25 bp, Homo sapien
tgcccagctgactgtcctgtggtca

SEQ ID NO: 1643760 - DNA, 25 bp, Homo sapien
agctgactgtcctgtggtcaccaca

SEQ ID NO: 1643761 - DNA, 25 bp, Homo sapien
tcctgatggttttgacctggccaag

SEQ ID NO: 1643762 - DNA, 25 bp, Homo sapien
cctgtctggagggacattgctctca

SEQ ID NO: 1643763 - DNA, 25 bp, Homo sapien
gggtctgtcctgatggttttgacct

SEQ ID NO: 1643764 - DNA, 25 bp, Homo sapien
gccaagctgctgtgtgtagaggagg

SEQ ID NO: 1643765 - DNA, 25 bp, Homo sapien
ttgcttcctgggtggagccataaac

SEQ ID NO: 1643766 - DNA, 25 bp, Homo sapien
gtcataggagcttgcagttgcttcc

SEQ ID NO: 1643767 - DNA, 25 bp, Homo sapien
tgaagtcataggagcttgcagttgc

SEQ ID NO: 1643768 - DNA, 25 bp, Homo sapien
tgggtggagccataaacaaacatct

SEQ ID NO: 1643769 - DNA, 25 bp, Homo sapien
ttcacaaactgagtctccaatgacc

SEQ ID NO: 1643770 - DNA, 25 bp, Homo sapien
aactgagtctccaatgaccacataa

SEQ ID NO: 1643771 - DNA, 25 bp, Homo sapien
cacaaactgagtctccaatgaccac

SEQ ID NO: 1643772 - DNA, 25 bp, Homo sapien
caaactgagtctccaatgaccacat

SEQ ID NO: 1643773 - DNA, 25 bp, Homo sapien
aaacattccaagaatcagcacattt

SEQ ID NO: 1643774 - DNA, 25 bp, Homo sapien
tatactttaccaattgctgaagaaa

SEQ ID NO: 1643775 - DNA, 25 bp, Homo sapien
taccataaacctatgaatactcatg

SEQ ID NO: 1643776 - DNA, 25 bp, Homo sapien
ggcactcagatagagagcaaaagca

SEQ ID NO: 1643777 - DNA, 25 bp, Homo sapien
ttaatgagactctgtctggtttcca

SEQ ID NO: 1643778 - DNA, 25 bp, Homo sapien
ctctgtctggtttccatggcaggga

SEQ ID NO: 1643779 - DNA, 25 bp, Homo sapien
tgagactctgtctggtttccatggc

SEQ ID NO: 1643780 - DNA, 25 bp, Homo sapien
aatgagactctgtctggtttccatg

SEQ ID NO: 1643781 - DNA, 25 bp, Homo sapien
tcatatggctagtgacaggtggatc

SEQ ID NO: 1643782 - DNA, 25 bp, Homo sapien
tctaggactatttgacctcaaggct

SEQ ID NO: 1643783 - DNA, 25 bp, Homo sapien
aaaaactttcctggtgtcatatggc

SEQ ID NO: 1643784 - DNA, 25 bp, Homo sapien
ggaatcagctctgcatagcggtctg

SEQ ID NO: 1643785 - DNA, 25 bp, Homo sapien
gacaaccattaactagattggctaa

SEQ ID NO: 1643786 - DNA, 25 bp, Homo sapien
gcacagtgaatgagggaaataataa

SEQ ID NO: 1643787 - DNA, 25 bp, Homo sapien
aagaacaaactaaacccaagcacag

SEQ ID NO: 1643788 - DNA, 25 bp, Homo sapien
ggtgggtcatgttttaatcctagca

SEQ ID NO: 1643789 - DNA, 25 bp, Homo sapien
ggtgtttggaccagcataggtaacc

SEQ ID NO: 1643790 - DNA, 25 bp, Homo sapien
gtttggaccagcataggtaacctgg

SEQ ID NO: 1643791 - DNA, 25 bp, Homo sapien
accaggtgtttggaccagcataggt

SEQ ID NO: 1643792 - DNA, 25 bp, Homo sapien
caggtgtttggaccagcataggtaa

SEQ ID NO: 1643793 - DNA, 25 bp, Homo sapien
ccaattagctgggcatgttgacatg

SEQ ID NO: 1643794 - DNA, 25 bp, Homo sapien
agctgggcatgttgacatgcacctg

SEQ ID NO: 1643795 - DNA, 25 bp, Homo sapien
aaaccaattagctgggcatgttgac

SEQ ID NO: 1643796 - DNA, 25 bp, Homo sapien
gctgggcatgttgacatgcacctgt

SEQ ID NO: 1643797 - DNA, 25 bp, Homo sapien
taaagatggaacaaacctattagaa

SEQ ID NO: 1643798 - DNA, 25 bp, Homo sapien
tttccctgtatgagcaggaaaagac

SEQ ID NO: 1643799 - DNA, 25 bp, Homo sapien
tctaagaatggaaggcaaccacctc

SEQ ID NO: 1643800 - DNA, 25 bp, Homo sapien
tcctagggtggcctacagagtgaga

SEQ ID NO: 1643801 - DNA, 25 bp, Homo sapien
gagaagcattactcacactagccaa

SEQ ID NO: 1643802 - DNA, 25 bp, Homo sapien
aaaaccttttatatagcccatgcaa

SEQ ID NO: 1643803 - DNA, 25 bp, Homo sapien
attttcatcgagtgtgccaagatcg

SEQ ID NO: 1643804 - DNA, 25 bp, Homo sapien
atatcatagcccagaaagaaatgct

SEQ ID NO: 1643805 - DNA, 25 bp, Homo sapien
acacatgttggttccaccccaggtg

SEQ ID NO: 1643806 - DNA, 25 bp, Homo sapien
cctttctccacacatgttggttcca

SEQ ID NO: 1643807 - DNA, 25 bp, Homo sapien
cgtggtcttgccctctctataatta

SEQ ID NO: 1643808 - DNA, 25 bp, Homo sapien
cacacttagttaatggtaagtctaa

SEQ ID NO: 1643809 - DNA, 25 bp, Homo sapien
gaacagagcaagcatagagcccgct

SEQ ID NO: 1643810 - DNA, 25 bp, Homo sapien
ccggtgggttagagtccgcaaagca

SEQ ID NO: 1643811 - DNA, 25 bp, Homo sapien
ggacaagtcgaggttttctcctgaa

SEQ ID NO: 1643812 - DNA, 25 bp, Homo sapien
tttgtcctgatagctgaaacttccc

SEQ ID NO: 1643813 - DNA, 25 bp, Homo sapien
tcctggtctcttaaagggacacagt

SEQ ID NO: 1643814 - DNA, 25 bp, Homo sapien
tggtctcttaaagggacacagtgac

SEQ ID NO: 1643815 - DNA, 25 bp, Homo sapien
atgctcctggtctcttaaagggaca

SEQ ID NO: 1643816 - DNA, 25 bp, Homo sapien
tctcttaaagggacacagtgaccct

SEQ ID NO: 1643817 - DNA, 25 bp, Homo sapien
cacattgatagggtcctgtttcatt

SEQ ID NO: 1643818 - DNA, 25 bp, Homo sapien
tgactgggttactgcggatgccacc

SEQ ID NO: 1643819 - DNA, 25 bp, Homo sapien
ggatgccaccatatcggtcccgtat

SEQ ID NO: 1643820 - DNA, 25 bp, Homo sapien
tgacactgggtagaatgagtatcct

SEQ ID NO: 1643821 - DNA, 25 bp, Homo sapien
ggtttaagttgttgatggtgatgta

SEQ ID NO: 1643822 - DNA, 25 bp, Homo sapien
tagccaccaaatgtaggtgtagttc

SEQ ID NO: 1643823 - DNA, 25 bp, Homo sapien
ttagccaccaaatgtaggtgtagtt

SEQ ID NO: 1643824 - DNA, 25 bp, Homo sapien
cctggggtttaagttgttgatggtg

SEQ ID NO: 1643825 - DNA, 25 bp, Homo sapien
ggcacctttgattcctccacaggca

SEQ ID NO: 1643826 - DNA, 25 bp, Homo sapien
ttcattcagagttggcatctcccac

SEQ ID NO: 1643827 - DNA, 25 bp, Homo sapien
ctgtgtggataacagaagattgtcc

SEQ ID NO: 1643828 - DNA, 25 bp, Homo sapien
cacaggcatccttcattcagagttg

SEQ ID NO: 1643829 - DNA, 25 bp, Homo sapien
gtgacctctaaagatagagcagagt

SEQ ID NO: 1643830 - DNA, 25 bp, Homo sapien
cctctaaagatagagcagagtgcaa

SEQ ID NO: 1643831 - DNA, 25 bp, Homo sapien
gatagagcagagtgcaaggaatgat

SEQ ID NO: 1643832 - DNA, 25 bp, Homo sapien
taaagatagagcagagtgcaaggaa

SEQ ID NO: 1643833 - DNA, 25 bp, Homo sapien
gtgtattgtctaaagaatgatctag

SEQ ID NO: 1643834 - DNA, 25 bp, Homo sapien
tcttccctgacagctagatagactt

SEQ ID NO: 1643835 - DNA, 25 bp, Homo sapien
ccttttgatgttaatgtgaattgaa

SEQ ID NO: 1643836 - DNA, 25 bp, Homo sapien
agttttcagggtataatcatttgac

SEQ ID NO: 1643837 - DNA, 25 bp, Homo sapien
cagggactatgatcctcttgattat

SEQ ID NO: 1643838 - DNA, 25 bp, Homo sapien
tggctgagttatggatgaaacagac

SEQ ID NO: 1643839 - DNA, 25 bp, Homo sapien
gaaacagacatagacccctctatat

SEQ ID NO: 1643840 - DNA, 25 bp, Homo sapien
tagacccctctatatgttttagtga

SEQ ID NO: 1643841 - DNA, 25 bp, Homo sapien
gacttcccctgtatggtaataggtg

SEQ ID NO: 1643842 - DNA, 25 bp, Homo sapien
ttcccctgtatggtaataggtgtat

SEQ ID NO: 1643843 - DNA, 25 bp, Homo sapien
cttcccctgtatggtaataggtgta

SEQ ID NO: 1643844 - DNA, 25 bp, Homo sapien
tcccctgtatggtaataggtgtatg

SEQ ID NO: 1643845 - DNA, 25 bp, Homo sapien
ccgctgtgttcactgatctggagcc

SEQ ID NO: 1643846 - DNA, 25 bp, Homo sapien
tgtgagccaagttgcaacactgaag

SEQ ID NO: 1643847 - DNA, 25 bp, Homo sapien
ccctgtgagccaagttgcaacactg

SEQ ID NO: 1643848 - DNA, 25 bp, Homo sapien
aagtcccagccaaatccccgctgtg

SEQ ID NO: 1643849 - DNA, 25 bp, Homo sapien
ggcctactctggtttgcctggagca

SEQ ID NO: 1643850 - DNA, 25 bp, Homo sapien
gcctactctggtttgcctggagcag

SEQ ID NO: 1643851 - DNA, 25 bp, Homo sapien
taggcctactctggtttgcctggag

SEQ ID NO: 1643852 - DNA, 25 bp, Homo sapien
ctaggcctactctggtttgcctgga

SEQ ID NO: 1643853 - DNA, 25 bp, Homo sapien
cagggataaaggtctctgtacttgg

SEQ ID NO: 1643854 - DNA, 25 bp, Homo sapien
gggataaaggtctctgtacttggac

SEQ ID NO: 1643855 - DNA, 25 bp, Homo sapien
gataaaggtctctgtacttggacct

SEQ ID NO: 1643856 - DNA, 25 bp, Homo sapien
taaaggtctctgtacttggacctga

SEQ ID NO: 1643857 - DNA, 25 bp, Homo sapien
agggtgactgggtcactgcggctgg

SEQ ID NO: 1643858 - DNA, 25 bp, Homo sapien
ctgggtcactgcggctggcactcac

SEQ ID NO: 1643859 - DNA, 25 bp, Homo sapien
ggtgactgggtcactgcggctggca

SEQ ID NO: 1643860 - DNA, 25 bp, Homo sapien
tgactgggtcactgcggctggcact

SEQ ID NO: 1643861 - DNA, 25 bp, Homo sapien
caccaaatagatagagggtcctgtt

SEQ ID NO: 1643862 - DNA, 25 bp, Homo sapien
gatcacagattaagcgcacagcctc

SEQ ID NO: 1643863 - DNA, 25 bp, Homo sapien
cattcatagggtcctgcaatatact

SEQ ID NO: 1643864 - DNA, 25 bp, Homo sapien
ggacagctgcaacctgtgagtcata

SEQ ID NO: 1643865 - DNA, 25 bp, Homo sapien
caagtattcccgttaagtgtatgtg

SEQ ID NO: 1643866 - DNA, 25 bp, Homo sapien
gtgtatgtgacagcctttgtagttg

SEQ ID NO: 1643867 - DNA, 25 bp, Homo sapien
taagtgtatgtgacagcctttgtag

SEQ ID NO: 1643868 - DNA, 25 bp, Homo sapien
tcccgttaagtgtatgtgacagcct

SEQ ID NO: 1643869 - DNA, 25 bp, Homo sapien
tataatttgaccgtgtactacatat

SEQ ID NO: 1643870 - DNA, 25 bp, Homo sapien
ttcaattattacttgggcagtggtg

SEQ ID NO: 1643871 - DNA, 25 bp, Homo sapien
tttgggtggcttggcttcaattatt

SEQ ID NO: 1643872 - DNA, 25 bp, Homo sapien
cagtgaaatatccagttactcctcc

SEQ ID NO: 1643873 - DNA, 25 bp, Homo sapien
tgagcaggagccccttccaggtgat

SEQ ID NO: 1643874 - DNA, 25 bp, Homo sapien
caggagccccttccaggtgatgtgc

SEQ ID NO: 1643875 - DNA, 25 bp, Homo sapien
gagccccttccaggtgatgtgctga

SEQ ID NO: 1643876 - DNA, 25 bp, Homo sapien
aggtgatgtgctgagtgcagggagg

SEQ ID NO: 1643877 - DNA, 25 bp, Homo sapien
tgagcctaggatccagagacttcct

SEQ ID NO: 1643878 - DNA, 25 bp, Homo sapien
tgtgttctcccctgtggagatgagc

SEQ ID NO: 1643879 - DNA, 25 bp, Homo sapien
cagggctgtcaggtgtgctgtcctt

SEQ ID NO: 1643880 - DNA, 25 bp, Homo sapien
ccctgtggagatgagcctaggatcc

SEQ ID NO: 1643881 - DNA, 25 bp, Homo sapien
tcctgagggtttttgacctggccaa

SEQ ID NO: 1643882 - DNA, 25 bp, Homo sapien
ctgtctggagggacgttgctcacac

SEQ ID NO: 1643883 - DNA, 25 bp, Homo sapien
gccaagctgctgtgtgtagaggagg

SEQ ID NO: 1643884 - DNA, 25 bp, Homo sapien
aggaacaggcagtggccagagatcc

SEQ ID NO: 1643885 - DNA, 25 bp, Homo sapien
gccctgggcttgtacgaccctgaag

SEQ ID NO: 1643886 - DNA, 25 bp, Homo sapien
tctgcagctgaagatttgggccctg

SEQ ID NO: 1643887 - DNA, 25 bp, Homo sapien
tgggcttgtacgaccctgaagcagg

SEQ ID NO: 1643888 - DNA, 25 bp, Homo sapien
gctctgcagctgaagatttgggccc

SEQ ID NO: 1643889 - DNA, 25 bp, Homo sapien
agaggcaggcacaagcaaggacagc

SEQ ID NO: 1643890 - DNA, 25 bp, Homo sapien
ggcacaagcaaggacagctaagagg

SEQ ID NO: 1643891 - DNA, 25 bp, Homo sapien
tgagttgtccaactctgacttatag

SEQ ID NO: 1643892 - DNA, 25 bp, Homo sapien
gaagctcctatactacatgtgaaat

SEQ ID NO: 1643893 - DNA, 25 bp, Homo sapien
ctaaaaccctattgccaaggatgct

SEQ ID NO: 1643894 - DNA, 25 bp, Homo sapien
gaacagagcaagcatagagcccgct

SEQ ID NO: 1643895 - DNA, 25 bp, Homo sapien
gagttacgaacagagcaagcataga

SEQ ID NO: 1643896 - DNA, 25 bp, Homo sapien
tagagcccgctatgctttgtagtaa

SEQ ID NO: 1643897 - DNA, 25 bp, Homo sapien
agtggctgagttacgaacagagcaa

SEQ ID NO: 1643898 - DNA, 25 bp, Homo sapien
ttagagtccgcaaagcaggacaagt

SEQ ID NO: 1643899 - DNA, 25 bp, Homo sapien
tcccattaattgtccaagaatactg

SEQ ID NO: 1643900 - DNA, 25 bp, Homo sapien
ccggtgggttagagtccgcaaagca

SEQ ID NO: 1643901 - DNA, 25 bp, Homo sapien
tttgtcctgatagctgaaacttccc

SEQ ID NO: 1643902 - DNA, 25 bp, Homo sapien
taggtgaatgaagggtaaattctgg

SEQ ID NO: 1643903 - DNA, 25 bp, Homo sapien
taaattctggggaggtctggaccat

SEQ ID NO: 1643904 - DNA, 25 bp, Homo sapien
ctgaatggtaataggtgaatgaagg

SEQ ID NO: 1643905 - DNA, 25 bp, Homo sapien
gtaaattctggggaggtctggacca

SEQ ID NO: 1643906 - DNA, 25 bp, Homo sapien
atgctcctggtctcttaaagggaca

SEQ ID NO: 1643907 - DNA, 25 bp, Homo sapien
tgtttcatttctcgtgacactgggt

SEQ ID NO: 1643908 - DNA, 25 bp, Homo sapien
cacattgatagggtcctgtttcatt

SEQ ID NO: 1643909 - DNA, 25 bp, Homo sapien
actgcggatgccaccatatcggtcc

SEQ ID NO: 1643910 - DNA, 25 bp, Homo sapien
tatcggtcccgtatttcacattgat

SEQ ID NO: 1643911 - DNA, 25 bp, Homo sapien
ccaaatgtaggtgtagttctcactc

SEQ ID NO: 1643912 - DNA, 25 bp, Homo sapien
tctcactcttaggttcacaggtgaa

SEQ ID NO: 1643913 - DNA, 25 bp, Homo sapien
tgtaggtgtagttctcactcttagg

SEQ ID NO: 1643914 - DNA, 25 bp, Homo sapien
ttagccaccaaatgtaggtgtagtt

SEQ ID NO: 1643915 - DNA, 25 bp, Homo sapien
gatagagcagagtgcaaggaatgat

SEQ ID NO: 1643916 - DNA, 25 bp, Homo sapien
gtgacctctaaagatagagcagagt

SEQ ID NO: 1643917 - DNA, 25 bp, Homo sapien
cctctaaagatagagcagagtgcaa

SEQ ID NO: 1643918 - DNA, 25 bp, Homo sapien
taaagatagagcagagtgcaaggaa

SEQ ID NO: 1643919 - DNA, 25 bp, Homo sapien
tagattcaaagtctaagatgcttca

SEQ ID NO: 1643920 - DNA, 25 bp, Homo sapien
aaaatgttactgggatgctggtagg

SEQ ID NO: 1643921 - DNA, 25 bp, Homo sapien
aatctgatagattcaaagtctaaga

SEQ ID NO: 1643922 - DNA, 25 bp, Homo sapien
tcattaagaagagcctgtcagctca

SEQ ID NO: 1643923 - DNA, 25 bp, Homo sapien
agaatgctcggccagtggatgagaa

SEQ ID NO: 1643924 - DNA, 25 bp, Homo sapien
gaatgctcggccagtggatgagaat

SEQ ID NO: 1643925 - DNA, 25 bp, Homo sapien
ccatgtggagcaaagagaataatgt

SEQ ID NO: 1643926 - DNA, 25 bp, Homo sapien
gccatgtggagcaaagagaataatg

SEQ ID NO: 1643927 - DNA, 25 bp, Homo sapien
catgtggagcaaagagaataatgtc

SEQ ID NO: 1643928 - DNA, 25 bp, Homo sapien
gatcaagcctaggcctactctggtt

SEQ ID NO: 1643929 - DNA, 25 bp, Homo sapien
tcaagcctaggcctactctggtttg

SEQ ID NO: 1643930 - DNA, 25 bp, Homo sapien
cctaggcctactctggtttgcctgg

SEQ ID NO: 1643931 - DNA, 25 bp, Homo sapien
aagcctaggcctactctggtttgcc

SEQ ID NO: 1643932 - DNA, 25 bp, Homo sapien
gtatagtttgtgacaccaaataggt

SEQ ID NO: 1643933 - DNA, 25 bp, Homo sapien
gaccattcatccaccacaggtagct

SEQ ID NO: 1643934 - DNA, 25 bp, Homo sapien
accattcatccaccacaggtagctt

SEQ ID NO: 1643935 - DNA, 25 bp, Homo sapien
tttgccccctgtggtatgttttctc

SEQ ID NO: 1643936 - DNA, 25 bp, Homo sapien
ccctgtggtatgttttctcttcagc

SEQ ID NO: 1643937 - DNA, 25 bp, Homo sapien
ttcaatcttactttgccccctgtgg

SEQ ID NO: 1643938 - DNA, 25 bp, Homo sapien
tttcaatcttactttgccccctgtg

SEQ ID NO: 1643939 - DNA, 25 bp, Homo sapien
ggagtgtctgcggaaggcctagcag

SEQ ID NO: 1643940 - DNA, 25 bp, Homo sapien
aagaacttgtctggcaattataaga

SEQ ID NO: 1643941 - DNA, 25 bp, Homo sapien
gagtgtctgcggaaggcctagcagt

SEQ ID NO: 1643942 - DNA, 25 bp, Homo sapien
acttgtctggcaattataagagtgg

SEQ ID NO: 1643943 - DNA, 25 bp, Homo sapien
tgaaggtgaaacgtccagttactcc

SEQ ID NO: 1643944 - DNA, 25 bp, Homo sapien
gtgaaggtgaaacgtccagttactc

SEQ ID NO: 1643945 - DNA, 25 bp, Homo sapien
gcagggatgcattggaatatactgt

SEQ ID NO: 1643946 - DNA, 25 bp, Homo sapien
cagggatgcattggaatatactgtt

SEQ ID NO: 1643947 - DNA, 25 bp, Homo sapien
agggatgcattggaatatactgttt

SEQ ID NO: 1643948 - DNA, 25 bp, Homo sapien
cagtaagattctggggcaaattgtg

SEQ ID NO: 1643949 - DNA, 25 bp, Homo sapien
gccagtaagattctggggcaaattg

SEQ ID NO: 1643950 - DNA, 25 bp, Homo sapien
ggtggctgggcttcaatcgtgactt

SEQ ID NO: 1643951 - DNA, 25 bp, Homo sapien
gctgggcttcaatcgtgacttgggc

SEQ ID NO: 1643952 - DNA, 25 bp, Homo sapien
agccctttccaggttatatgctgtg

SEQ ID NO: 1643953 - DNA, 25 bp, Homo sapien
ggagccctttccaggttatatgctg

SEQ ID NO: 1643954 - DNA, 25 bp, Homo sapien
gccctttccaggttatatgctgtgt

SEQ ID NO: 1643955 - DNA, 25 bp, Homo sapien
gagccctttccaggttatatgctgt

SEQ ID NO: 1643956 - DNA, 25 bp, Homo sapien
tctgtggagatgagcctaggatcca

SEQ ID NO: 1643957 - DNA, 25 bp, Homo sapien
caggatttctcgtgttcttcctgac

SEQ ID NO: 1643958 - DNA, 25 bp, Homo sapien
tcaggatttctcgtgttcttcctga

SEQ ID NO: 1643959 - DNA, 25 bp, Homo sapien
ctttgatgtcctctcttatgtgccc

SEQ ID NO: 1643960 - DNA, 25 bp, Homo sapien
tatgtgcccagctgattgtcctgtg

SEQ ID NO: 1643961 - DNA, 25 bp, Homo sapien
tgtgcccagctgattgtcctgtggt

SEQ ID NO: 1643962 - DNA, 25 bp, Homo sapien
tcctctcttatgtgcccagctgatt

SEQ ID NO: 1643963 - DNA, 25 bp, Homo sapien
ggcttagctgttcgctgcagctgaa

SEQ ID NO: 1643964 - DNA, 25 bp, Homo sapien
ttagctgttcgctgcagctgaaaga

SEQ ID NO: 1643965 - DNA, 25 bp, Homo sapien
tggcttagctgttcgctgcagctga

SEQ ID NO: 1643966 - DNA, 25 bp, Homo sapien
cttagctgttcgctgcagctgaaag

SEQ ID NO: 1643967 - DNA, 25 bp, Homo sapien
agctctgcagctgaagatttcggcc

SEQ ID NO: 1643968 - DNA, 25 bp, Homo sapien
gaacagagtgggtcttgctctttga

SEQ ID NO: 1643969 - DNA, 25 bp, Homo sapien
gctcagacatcaggtacaaggattt

SEQ ID NO: 1643970 - DNA, 25 bp, Homo sapien
agcagctgttgttatggtgttgaac

SEQ ID NO: 1643971 - DNA, 25 bp, Homo sapien
gatggaattggaggaactagtagaa

SEQ ID NO: 1643972 - DNA, 25 bp, Homo sapien
ctgaaagcatattgccaatgctcca

SEQ ID NO: 1643973 - DNA, 25 bp, Homo sapien
ataacacagatagtccccactattt

SEQ ID NO: 1643974 - DNA, 25 bp, Homo sapien
taacacagatagtccccactatttt

SEQ ID NO: 1643975 - DNA, 25 bp, Homo sapien
gcaaagagaataaagccacaggtaa

SEQ ID NO: 1643976 - DNA, 25 bp, Homo sapien
cacaggtaatgttatcagagggaat

SEQ ID NO: 1643977 - DNA, 25 bp, Homo sapien
gtaatgttatcagagggaatgggaa

SEQ ID NO: 1643978 - DNA, 25 bp, Homo sapien
aataaagccacaggtaatgttatca

SEQ ID NO: 1643979 - DNA, 25 bp, Homo sapien
ctggtctgtgaaaggggcatagtgt

SEQ ID NO: 1643980 - DNA, 25 bp, Homo sapien
tggtctgtgaaaggggcatagtgtt

SEQ ID NO: 1643981 - DNA, 25 bp, Homo sapien
ggtctgtgaaaggggcatagtgttc

SEQ ID NO: 1643982 - DNA, 25 bp, Homo sapien
tcatacttggacctgagagggactg

SEQ ID NO: 1643983 - DNA, 25 bp, Homo sapien
ccaggtttgcctgggacaggaagtc

SEQ ID NO: 1643984 - DNA, 25 bp, Homo sapien
ctggcagccttgtccatgaaggaaa

SEQ ID NO: 1643985 - DNA, 25 bp, Homo sapien
ggcctggcctcatgttatgtggatt

SEQ ID NO: 1643986 - DNA, 25 bp, Homo sapien
agagaacatccaggagactgggtca

SEQ ID NO: 1643987 - DNA, 25 bp, Homo sapien
acatccaggagactgggtcactgtg

SEQ ID NO: 1643988 - DNA, 25 bp, Homo sapien
gaacatccaggagactgggtcactg

SEQ ID NO: 1643989 - DNA, 25 bp, Homo sapien
atccaggagactgggtcactgtggc

SEQ ID NO: 1643990 - DNA, 25 bp, Homo sapien
ttcatagagtcctttgtcactcctt

SEQ ID NO: 1643991 - DNA, 25 bp, Homo sapien
atattcttcctttgacgttcataga

SEQ ID NO: 1643992 - DNA, 25 bp, Homo sapien
tatattcttcctttgacgttcatag

SEQ ID NO: 1643993 - DNA, 25 bp, Homo sapien
gagtcctttgtcactccttgtgaca

SEQ ID NO: 1643994 - DNA, 25 bp, Homo sapien
ctgagtagagcaaggatcctgttat

SEQ ID NO: 1643995 - DNA, 25 bp, Homo sapien
tgtgagtctatgactatttacccac

SEQ ID NO: 1643996 - DNA, 25 bp, Homo sapien
gacatctttagcctgggactgagtg

SEQ ID NO: 1643997 - DNA, 25 bp, Homo sapien
cctgttatcattggacatctttagc

SEQ ID NO: 1643998 - DNA, 25 bp, Homo sapien
ttgctggtgacatagggcttgggca

SEQ ID NO: 1643999 - DNA, 25 bp, Homo sapien
cacatgtagattgtgccatgagtct

SEQ ID NO: 1644000 - DNA, 25 bp, Homo sapien
tgtagattgtgccatgagtctcagg

SEQ ID NO: 1644001 - DNA, 25 bp, Homo sapien
gattgtgccatgagtctcaggttca

SEQ ID NO: 1644002 - DNA, 25 bp, Homo sapien
taacagagaagattcccctgtgtgg

SEQ ID NO: 1644003 - DNA, 25 bp, Homo sapien
gtgcagataacagagaagattcccc

SEQ ID NO: 1644004 - DNA, 25 bp, Homo sapien
cagataacagagaagattcccctgt

SEQ ID NO: 1644005 - DNA, 25 bp, Homo sapien
cagagaagattcccctgtgtggcat

SEQ ID NO: 1644006 - DNA, 25 bp, Homo sapien
tgtcagctttgctgagtgtctccgg

SEQ ID NO: 1644007 - DNA, 25 bp, Homo sapien
tttttggctgcgttgtggtatataa

SEQ ID NO: 1644008 - DNA, 25 bp, Homo sapien
catggtttttggctgcgttgtggta

SEQ ID NO: 1644009 - DNA, 25 bp, Homo sapien
ggtatataatctttccgtttctcat

SEQ ID NO: 1644010 - DNA, 25 bp, Homo sapien
tggctgcgttgtggtatataatctt

SEQ ID NO: 1644011 - DNA, 25 bp, Homo sapien
tggctccaccctttttaagtagcat

SEQ ID NO: 1644012 - DNA, 25 bp, Homo sapien
gcatcattataaggcccccggctgg

SEQ ID NO: 1644013 - DNA, 25 bp, Homo sapien
gctggctccaccctttttaagtagc

SEQ ID NO: 1644014 - DNA, 25 bp, Homo sapien
tcatttcagcatcattataaggccc

SEQ ID NO: 1644015 - DNA, 25 bp, Homo sapien
tctttttggactagaattttgggca

SEQ ID NO: 1644016 - DNA, 25 bp, Homo sapien
cctcatctttttggactagaatttt

SEQ ID NO: 1644017 - DNA, 25 bp, Homo sapien
catctttttggactagaattttggg

SEQ ID NO: 1644018 - DNA, 25 bp, Homo sapien
ttcctcatctttttggactagaatt

SEQ ID NO: 1644019 - DNA, 25 bp, Homo sapien
ttccctgcttccctcttcaaagcac

SEQ ID NO: 1644020 - DNA, 25 bp, Homo sapien
tccctgcttccctcttcaaagcact

SEQ ID NO: 1644021 - DNA, 25 bp, Homo sapien
tgcttccctcttcaaagcacttctc

SEQ ID NO: 1644022 - DNA, 25 bp, Homo sapien
cctgcttccctcttcaaagcacttc

SEQ ID NO: 1644023 - DNA, 25 bp, Homo sapien
aaactgagtctccaatgacaacaca

SEQ ID NO: 1644024 - DNA, 25 bp, Homo sapien
cacaaactgagtctccaatgacaac

SEQ ID NO: 1644025 - DNA, 25 bp, Homo sapien
ttcacaaactgagtctccaatgaca

SEQ ID NO: 1644026 - DNA, 25 bp, Homo sapien
actgagtctccaatgacaacacaaa

SEQ ID NO: 1644027 - DNA, 25 bp, Homo sapien
ttcttctcaccaacatcacgtattg

SEQ ID NO: 1644028 - DNA, 25 bp, Homo sapien
tggacagatgtgagctcctcttcta

SEQ ID NO: 1644029 - DNA, 25 bp, Homo sapien
ggttcttctcaccaacatcacgtat

SEQ ID NO: 1644030 - DNA, 25 bp, Homo sapien
gaaatgcaatataaatcatggacag

SEQ ID NO: 1644031 - DNA, 25 bp, Homo sapien
gaagttcaggtagtaagaattctca

SEQ ID NO: 1644032 - DNA, 25 bp, Homo sapien
ttcaggtagtaagaattctcactgg

SEQ ID NO: 1644033 - DNA, 25 bp, Homo sapien
aagttcaggtagtaagaattctcac

SEQ ID NO: 1644034 - DNA, 25 bp, Homo sapien
tggggatgggtcatatggagaatta

SEQ ID NO: 1644035 - DNA, 25 bp, Homo sapien
ggaaaccaggcttgactagcctcat

SEQ ID NO: 1644036 - DNA, 25 bp, Homo sapien
cagttagagcgatgtttgccaaatg

SEQ ID NO: 1644037 - DNA, 25 bp, Homo sapien
gaaaacctagtctatacagttagag

SEQ ID NO: 1644038 - DNA, 25 bp, Homo sapien
gattgccattgcaattggaagacac

SEQ ID NO: 1644039 - DNA, 25 bp, Homo sapien
ctagtgatgtaggatcagatggaac

SEQ ID NO: 1644040 - DNA, 25 bp, Homo sapien
tcatgaatagattcccaattctggg

SEQ ID NO: 1644041 - DNA, 25 bp, Homo sapien
tatactttaccaattgctgaagaaa

SEQ ID NO: 1644042 - DNA, 25 bp, Homo sapien
atactttaccaattgctgaagaaaa

SEQ ID NO: 1644043 - DNA, 25 bp, Homo sapien
tactttaccaattgctgaagaaaaa

SEQ ID NO: 1644044 - DNA, 25 bp, Homo sapien
tttgaggaagaatcaaagcaacttt

SEQ ID NO: 1644045 - DNA, 25 bp, Homo sapien
tagctgattttaaatactttgagga

SEQ ID NO: 1644046 - DNA, 25 bp, Homo sapien
ggactgtagctgattttaaatactt

SEQ ID NO: 1644047 - DNA, 25 bp, Homo sapien
tactttgaggaagaatcaaagcaac

SEQ ID NO: 1644048 - DNA, 25 bp, Homo sapien
attatttagagaaggtttagcatca

SEQ ID NO: 1644049 - DNA, 25 bp, Homo sapien
aatattatttagagaaggtttagca

SEQ ID NO: 1644050 - DNA, 25 bp, Homo sapien
ttatttagagaaggtttagcatcac

SEQ ID NO: 1644051 - DNA, 25 bp, Homo sapien
tattatttagagaaggtttagcatc

SEQ ID NO: 1644052 - DNA, 25 bp, Homo sapien
ttttaagttctacctattgcaacaa

SEQ ID NO: 1644053 - DNA, 25 bp, Homo sapien
tttaagttctacctattgcaacaag

SEQ ID NO: 1644054 - DNA, 25 bp, Homo sapien
gttttaagttctacctattgcaaca

SEQ ID NO: 1644055 - DNA, 25 bp, Homo sapien
tagttttaagttctacctattgcaa

SEQ ID NO: 1644056 - DNA, 25 bp, Homo sapien
atttccctctcccaagcatggcagt

SEQ ID NO: 1644057 - DNA, 25 bp, Homo sapien
tcatttccctctcccaagcatggca

SEQ ID NO: 1644058 - DNA, 25 bp, Homo sapien
ttccctctcccaagcatggcagtca

SEQ ID NO: 1644059 - DNA, 25 bp, Homo sapien
ccctctcccaagcatggcagtcagc

SEQ ID NO: 1644060 - DNA, 25 bp, Homo sapien
tcttcctgaaatacaaaaatgacat

SEQ ID NO: 1644061 - DNA, 25 bp, Homo sapien
cctgaaatacaaaaatgacatcacg

SEQ ID NO: 1644062 - DNA, 25 bp, Homo sapien
ctgccagtcttcctgaaatacaaaa

SEQ ID NO: 1644063 - DNA, 25 bp, Homo sapien
aaatacaaaaatgacatcacggctg

SEQ ID NO: 1644064 - DNA, 25 bp, Homo sapien
aagcaaaagttcctaatcctggagg

SEQ ID NO: 1644065 - DNA, 25 bp, Homo sapien
ttattgaaagcaaaagttcctaatc

SEQ ID NO: 1644066 - DNA, 25 bp, Homo sapien
tgaaagcaaaagttcctaatcctgg

SEQ ID NO: 1644067 - DNA, 25 bp, Homo sapien
ttgaaagcaaaagttcctaatcctg

SEQ ID NO: 1644068 - DNA, 25 bp, Homo sapien
ttacatgggggagcgtcaggaacaa

SEQ ID NO: 1644069 - DNA, 25 bp, Homo sapien
gaacaagcatgtaacatgagatact

SEQ ID NO: 1644070 - DNA, 25 bp, Homo sapien
gggagcgtcaggaacaagcatgtaa

SEQ ID NO: 1644071 - DNA, 25 bp, Homo sapien
tgttattttacatgggggagcgtca

SEQ ID NO: 1644072 - DNA, 25 bp, Homo sapien
ctgttgtggcagtcatgaatgagac

SEQ ID NO: 1644073 - DNA, 25 bp, Homo sapien
tcagttggtgatcagtcctctgtca

SEQ ID NO: 1644074 - DNA, 25 bp, Homo sapien
gatcagtcctctgtcaattctctac

SEQ ID NO: 1644075 - DNA, 25 bp, Homo sapien
tctctgttgtggcagtcatgaatga

SEQ ID NO: 1644076 - DNA, 25 bp, Homo sapien
ggattcctcatcagccttgcaaaaa

SEQ ID NO: 1644077 - DNA, 25 bp, Homo sapien
aaggcccaggtcagtgcatttcaaa

SEQ ID NO: 1644078 - DNA, 25 bp, Homo sapien
gaaagcaagcctagttctctgaggc

SEQ ID NO: 1644079 - DNA, 25 bp, Homo sapien
tgcattggtacctaaaacttctttc

SEQ ID NO: 1644080 - DNA, 25 bp, Homo sapien
caatgactctgattgtcaaggatgt

SEQ ID NO: 1644081 - DNA, 25 bp, Homo sapien
aatgactctgattgtcaaggatgtg

SEQ ID NO: 1644082 - DNA, 25 bp, Homo sapien
atgactctgattgtcaaggatgtgg

SEQ ID NO: 1644083 - DNA, 25 bp, Homo sapien
tgcgaagcaggacaagtcgaggttc

SEQ ID NO: 1644084 - DNA, 25 bp, Homo sapien
gaaaattctggggaggtctggacca

SEQ ID NO: 1644085 - DNA, 25 bp, Homo sapien
atagtaagaggtgactgaagggaaa

SEQ ID NO: 1644086 - DNA, 25 bp, Homo sapien
aaaattctggggaggtctggaccat

SEQ ID NO: 1644087 - DNA, 25 bp, Homo sapien
ctgaatagtaagaggtgactgaagg

SEQ ID NO: 1644088 - DNA, 25 bp, Homo sapien
agaataaagccacagttgatgtcat

SEQ ID NO: 1644089 - DNA, 25 bp, Homo sapien
ggaggaaagagaataaagccacagt

SEQ ID NO: 1644090 - DNA, 25 bp, Homo sapien
agagaataaagccacagttgatgtc

SEQ ID NO: 1644091 - DNA, 25 bp, Homo sapien
aggaaagagaataaagccacagttg

SEQ ID NO: 1644092 - DNA, 25 bp, Homo sapien
gtctcttaaagggacacagtgaccc

SEQ ID NO: 1644093 - DNA, 25 bp, Homo sapien
tctcttaaagggacacagtgaccct

SEQ ID NO: 1644094 - DNA, 25 bp, Homo sapien
gggccccaagtctcccatgacaaga

SEQ ID NO: 1644095 - DNA, 25 bp, Homo sapien
gacactgggtagaatgaggatcctg

SEQ ID NO: 1644096 - DNA, 25 bp, Homo sapien
ggatgccaccatatcggtcccgtat

SEQ ID NO: 1644097 - DNA, 25 bp, Homo sapien
caatgggtcgctttaccctgggact

SEQ ID NO: 1644098 - DNA, 25 bp, Homo sapien
acctctaaagatagagcagagcgca

SEQ ID NO: 1644099 - DNA, 25 bp, Homo sapien
ttgaaccagtgacctctaaagatag

SEQ ID NO: 1644100 - DNA, 25 bp, Homo sapien
gtgacctctaaagatagagcagagc

SEQ ID NO: 1644101 - DNA, 25 bp, Homo sapien
tctaaagatagagcagagcgcaagg

SEQ ID NO: 1644102 - DNA, 25 bp, Homo sapien
caatcagccaagaatgctctgccag

SEQ ID NO: 1644103 - DNA, 25 bp, Homo sapien
gacttcccctgtatggtaataggtg

SEQ ID NO: 1644104 - DNA, 25 bp, Homo sapien
tagacccctctatatgttttagtga

SEQ ID NO: 1644105 - DNA, 25 bp, Homo sapien
gggactatgatcctcttgattatga

SEQ ID NO: 1644106 - DNA, 25 bp, Homo sapien
agaataaagtcacaggtgacattgt

SEQ ID NO: 1644107 - DNA, 25 bp, Homo sapien
gaataaagtcacaggtgacattgtc

SEQ ID NO: 1644108 - DNA, 25 bp, Homo sapien
aggtgacattgtcagagggaaggga

SEQ ID NO: 1644109 - DNA, 25 bp, Homo sapien
gtgacattgtcagagggaagggaaa

SEQ ID NO: 1644110 - DNA, 25 bp, Homo sapien
ttggtttcagacagctgcatcctat

SEQ ID NO: 1644111 - DNA, 25 bp, Homo sapien
tggtttcagacagctgcatcctatg

SEQ ID NO: 1644112 - DNA, 25 bp, Homo sapien
gaggtccctgatttgccctttgtac

SEQ ID NO: 1644113 - DNA, 25 bp, Homo sapien
tgaaggtgaaatatccagttactcc

SEQ ID NO: 1644114 - DNA, 25 bp, Homo sapien
gaatatactgtttctcgtccactgt

SEQ ID NO: 1644115 - DNA, 25 bp, Homo sapien
tgtaatgtaatggtagaggtccctg

SEQ ID NO: 1644116 - DNA, 25 bp, Homo sapien
ttttagaaccccaggagcctctcca

SEQ ID NO: 1644117 - DNA, 25 bp, Homo sapien
cctctcccaggaagttctctcctca

SEQ ID NO: 1644118 - DNA, 25 bp, Homo sapien
gcctctccaggagaccccatccagt

SEQ ID NO: 1644119 - DNA, 25 bp, Homo sapien
ggagaccccatccagtcactctgct

SEQ ID NO: 1644120 - DNA, 25 bp, Homo sapien
gccccatgatctctgctgcgtgcat

SEQ ID NO: 1644121 - DNA, 25 bp, Homo sapien
ggccccatgatctctgctgcgtgca

SEQ ID NO: 1644122 - DNA, 25 bp, Homo sapien
cttcccggtggaaggagcacttctc

SEQ ID NO: 1644123 - DNA, 25 bp, Homo sapien
cttctgcgctgagactcttcccggt

SEQ ID NO: 1644124 - DNA, 25 bp, Homo sapien
agactcttcccggtggaaggagcac

SEQ ID NO: 1644125 - DNA, 25 bp, Homo sapien
tccttctgcgctgagactcttcccg

SEQ ID NO: 1644126 - DNA, 25 bp, Homo sapien
aatcccgcgggacatgacttattga

SEQ ID NO: 1644127 - DNA, 25 bp, Homo sapien
caggaatcccgcgggacatgactta

SEQ ID NO: 1644128 - DNA, 25 bp, Homo sapien
tcccgcgggacatgacttattgaga

SEQ ID NO: 1644129 - DNA, 25 bp, Homo sapien
catgacttattgagacgcaggagga

SEQ ID NO: 1644130 - DNA, 25 bp, Homo sapien
tgtgtttgtgtgcagtaggcggcac

SEQ ID NO: 1644131 - DNA, 25 bp, Homo sapien
taggcggcactgtgtataccctggg

SEQ ID NO: 1644132 - DNA, 25 bp, Homo sapien
tctccctctttcacgatcagatatc

SEQ ID NO: 1644133 - DNA, 25 bp, Homo sapien
gatcagatatcccaaacgcagatgt

SEQ ID NO: 1644134 - DNA, 25 bp, Homo sapien
aaagaggtgtctgctaaggcaatga

SEQ ID NO: 1644135 - DNA, 25 bp, Homo sapien
gaaagaggtgtctgctaaggcaatg

SEQ ID NO: 1644136 - DNA, 25 bp, Homo sapien
aagaggtgtctgctaaggcaatgac

SEQ ID NO: 1644137 - DNA, 25 bp, Homo sapien
gaggtgtctgctaaggcaatgacac

SEQ ID NO: 1644138 - DNA, 25 bp, Homo sapien
actgcattatcctgccaaatgaaag

SEQ ID NO: 1644139 - DNA, 25 bp, Homo sapien
ttacaacgtatctcttaggaaatca

SEQ ID NO: 1644140 - DNA, 25 bp, Homo sapien
cgtatctcttaggaaatcatgagag

SEQ ID NO: 1644141 - DNA, 25 bp, Homo sapien
caacgtatctcttaggaaatcatga

SEQ ID NO: 1644142 - DNA, 25 bp, Homo sapien
gatgctgacagtggctctacctgaa

SEQ ID NO: 1644143 - DNA, 25 bp, Homo sapien
aataagttgtgggttcatctgggcc

SEQ ID NO: 1644144 - DNA, 25 bp, Homo sapien
caagaatactctgctgatgggttag

SEQ ID NO: 1644145 - DNA, 25 bp, Homo sapien
agaggttgaggtttgaccctggata

SEQ ID NO: 1644146 - DNA, 25 bp, Homo sapien
ccctggatagtaataggtgtctgaa

SEQ ID NO: 1644147 - DNA, 25 bp, Homo sapien
agaataatgccacaggtaatgttat

SEQ ID NO: 1644148 - DNA, 25 bp, Homo sapien
ctggagcaaagagaataatgccaca

SEQ ID NO: 1644149 - DNA, 25 bp, Homo sapien
tatcagagggaatgggaagctcctg

SEQ ID NO: 1644150 - DNA, 25 bp, Homo sapien
tgccacaggtaatgttatcagaggg

SEQ ID NO: 1644151 - DNA, 25 bp, Homo sapien
caacatagggcttgagcagatttgc

SEQ ID NO: 1644152 - DNA, 25 bp, Homo sapien
tgtagattgtgccatgaatctcagg

SEQ ID NO: 1644153 - DNA, 25 bp, Homo sapien
cacatgtagattgtgccatgaatct

SEQ ID NO: 1644154 - DNA, 25 bp, Homo sapien
tcctccacggggttgctggcaacat

SEQ ID NO: 1644155 - DNA, 25 bp, Homo sapien
aactctggaaaacctagtctatagg

SEQ ID NO: 1644156 - DNA, 25 bp, Homo sapien
ttgccattgcaattggaagatactt

SEQ ID NO: 1644157 - DNA, 25 bp, Homo sapien
cagattgccattgcaattggaagat

SEQ ID NO: 1644158 - DNA, 25 bp, Homo sapien
ggttagaacgatgtttgccaaacga

SEQ ID NO: 1644159 - DNA, 25 bp, Homo sapien
ttcctagtgatgtaggatcagatga

SEQ ID NO: 1644160 - DNA, 25 bp, Homo sapien
tcctagtgatgtaggatcagatgaa

SEQ ID NO: 1644161 - DNA, 25 bp, Homo sapien
cctagtgatgtaggatcagatgaaa

SEQ ID NO: 1644162 - DNA, 25 bp, Homo sapien
tagctgggactatattgcgggatct

SEQ ID NO: 1644163 - DNA, 25 bp, Homo sapien
tttgatttatgatttggggcagctc

SEQ ID NO: 1644164 - DNA, 25 bp, Homo sapien
cagcagcttgcaatgcaacagggct

SEQ ID NO: 1644165 - DNA, 25 bp, Homo sapien
ggccagcagcttgcaatgcaacagg

SEQ ID NO: 1644166 - DNA, 25 bp, Homo sapien
tgcgatgctaccaatgcactggata

SEQ ID NO: 1644167 - DNA, 25 bp, Homo sapien
tttaaggtcatttgtaagctgtcca

SEQ ID NO: 1644168 - DNA, 25 bp, Homo sapien
gccttctggtcctgcgatgctacca

SEQ ID NO: 1644169 - DNA, 25 bp, Homo sapien
ggcggaagcacatcacatgctgttg

SEQ ID NO: 1644170 - DNA, 25 bp, Homo sapien
aacttcagcactaggtaaagcagat

SEQ ID NO: 1644171 - DNA, 25 bp, Homo sapien
acttcagcactaggtaaagcagata

SEQ ID NO: 1644172 - DNA, 25 bp, Homo sapien
tgtagattgcaccacacgagggaga

SEQ ID NO: 1644173 - DNA, 25 bp, Homo sapien
tgaagaatggctgcacaccaataaa

SEQ ID NO: 1644174 - DNA, 25 bp, Homo sapien
cccctgttcagctgatagagagcaa

SEQ ID NO: 1644175 - DNA, 25 bp, Homo sapien
ccaactgcaataggatagatcaagg

SEQ ID NO: 1644176 - DNA, 25 bp, Homo sapien
gggcactcagatagagagcaaaagg

SEQ ID NO: 1644177 - DNA, 25 bp, Homo sapien
tattcaagagtccttgtaagagacc

SEQ ID NO: 1644178 - DNA, 25 bp, Homo sapien
gagtccttgtaagagacctttccat

SEQ ID NO: 1644179 - DNA, 25 bp, Homo sapien
gcactcagatagagagcaaaaggaa

SEQ ID NO: 1644180 - DNA, 25 bp, Homo sapien
aggtgattgtaagtagtttgaggaa

SEQ ID NO: 1644181 - DNA, 25 bp, Homo sapien
aagtagtttgaggaagaatcaaagc

SEQ ID NO: 1644182 - DNA, 25 bp, Homo sapien
tgattgtaagtagtttgaggaagaa

SEQ ID NO: 1644183 - DNA, 25 bp, Homo sapien
ttgtaagtagtttgaggaagaatca

SEQ ID NO: 1644184 - DNA, 25 bp, Homo sapien
tgtggcatatgacactatgataaca

SEQ ID NO: 1644185 - DNA, 25 bp, Homo sapien
ggaatgacagagatttaaactgact

SEQ ID NO: 1644186 - DNA, 25 bp, Homo sapien
tatggtaaagacacagctcacatag

SEQ ID NO: 1644187 - DNA, 25 bp, Homo sapien
catagaaatctagttacttctgtgg

SEQ ID NO: 1644188 - DNA, 25 bp, Homo sapien
gctttatgtctcctggggtagggac

SEQ ID NO: 1644189 - DNA, 25 bp, Homo sapien
gttctccacgaggtcacatgttgct

SEQ ID NO: 1644190 - DNA, 25 bp, Homo sapien
tctcaaccacacataggttgtgttc

SEQ ID NO: 1644191 - DNA, 25 bp, Homo sapien
tcctaaagtctttgttctccacgag

SEQ ID NO: 1644192 - DNA, 25 bp, Homo sapien
tgaggcaatcatatgcaaggaagat

SEQ ID NO: 1644193 - DNA, 25 bp, Homo sapien
tttatgggaatggagagaattacac

SEQ ID NO: 1644194 - DNA, 25 bp, Homo sapien
tatcaaataggctagagtagacccc

SEQ ID NO: 1644195 - DNA, 25 bp, Homo sapien
gaagacagttctaattaggatggag

SEQ ID NO: 1644196 - DNA, 25 bp, Homo sapien
gtgaaattgtgtttctcatttgaat

SEQ ID NO: 1644197 - DNA, 25 bp, Homo sapien
tgtgaaattgtgtttctcatttgaa

SEQ ID NO: 1644198 - DNA, 25 bp, Homo sapien
tcaccatgtgaaattgtgtttctca

SEQ ID NO: 1644199 - DNA, 25 bp, Homo sapien
ccatgtgaaattgtgtttctcattt

SEQ ID NO: 1644200 - DNA, 25 bp, Homo sapien
agggaactgcaggaattagtgctga

SEQ ID NO: 1644201 - DNA, 25 bp, Homo sapien
gtggggtacagggagcataaaggcc

SEQ ID NO: 1644202 - DNA, 25 bp, Homo sapien
catggcagtcagctctgcaggaacc

SEQ ID NO: 1644203 - DNA, 25 bp, Homo sapien
atggcagtcagctctgcaggaacca

SEQ ID NO: 1644204 - DNA, 25 bp, Homo sapien
ttcctgaaatacagaaatgacatca

SEQ ID NO: 1644205 - DNA, 25 bp, Homo sapien
tgccagtcttcctgaaatacagaaa

SEQ ID NO: 1644206 - DNA, 25 bp, Homo sapien
tcctgaaatacagaaatgacatcac

SEQ ID NO: 1644207 - DNA, 25 bp, Homo sapien
agtcttcctgaaatacagaaatgac

SEQ ID NO: 1644208 - DNA, 25 bp, Homo sapien
gaggaagaagtcctattcttgtaga

SEQ ID NO: 1644209 - DNA, 25 bp, Homo sapien
agaggaagaagtcctattcttgtag

SEQ ID NO: 1644210 - DNA, 25 bp, Homo sapien
gagaggaagaagtcctattcttgta

SEQ ID NO: 1644211 - DNA, 25 bp, Homo sapien
attttcatcgagtgtgccaagatca

SEQ ID NO: 1644212 - DNA, 25 bp, Homo sapien
gtataatagcccagaaagaaattct

SEQ ID NO: 1644213 - DNA, 25 bp, Homo sapien
tgttatagccactgtaaaaattggt

SEQ ID NO: 1644214 - DNA, 25 bp, Homo sapien
actgtaaaaattggtgtgctgtttc

SEQ ID NO: 1644215 - DNA, 25 bp, Homo sapien
gccactgtaaaaattggtgtgctgt

SEQ ID NO: 1644216 - DNA, 25 bp, Homo sapien
tatagccactgtaaaaattggtgtg

SEQ ID NO: 1644217 - DNA, 25 bp, Homo sapien
ggtacagaggtttaatatggtaaga

SEQ ID NO: 1644218 - DNA, 25 bp, Homo sapien
taaaagatagttagaatagccagtt

SEQ ID NO: 1644219 - DNA, 25 bp, Homo sapien
agaatagccagttacatagagacag

SEQ ID NO: 1644220 - DNA, 25 bp, Homo sapien
gtgagagttactgtttattgggtac

SEQ ID NO: 1644221 - DNA, 25 bp, Homo sapien
gccaggaccaggcttaggagtctgc

SEQ ID NO: 1644222 - DNA, 25 bp, Homo sapien
gaccaggcttaggagtctgccctga

SEQ ID NO: 1644223 - DNA, 25 bp, Homo sapien
caggaccaggcttaggagtctgccc

SEQ ID NO: 1644224 - DNA, 25 bp, Homo sapien
tgtgcccacagcttcatacaaccgc

SEQ ID NO: 1644225 - DNA, 25 bp, Homo sapien
cgggggaggcttggcttcaactggc

SEQ ID NO: 1644226 - DNA, 25 bp, Homo sapien
ggggaggcttggcttcaactggcag

SEQ ID NO: 1644227 - DNA, 25 bp, Homo sapien
ctggcccgggggaggcttggcttca

SEQ ID NO: 1644228 - DNA, 25 bp, Homo sapien
cccgggggaggcttggcttcaactg

SEQ ID NO: 1644229 - DNA, 25 bp, Homo sapien
caacttgatcttgaggacactcctt

SEQ ID NO: 1644230 - DNA, 25 bp, Homo sapien
gcaacttgatcttgaggacactcct

SEQ ID NO: 1644231 - DNA, 25 bp, Homo sapien
aacttgatcttgaggacactccttc

SEQ ID NO: 1644232 - DNA, 25 bp, Homo sapien
cggtaattggtgtatgaagggtgaa

SEQ ID NO: 1644233 - DNA, 25 bp, Homo sapien
cggtgggttagagttcgcgaagcaa

SEQ ID NO: 1644234 - DNA, 25 bp, Homo sapien
ttatctcctgaacggtaattggtgt

SEQ ID NO: 1644235 - DNA, 25 bp, Homo sapien
ttgactgtcaacgatgtggagcttt

SEQ ID NO: 1644236 - DNA, 25 bp, Homo sapien
caaagagaataaagccacaggtgat

SEQ ID NO: 1644237 - DNA, 25 bp, Homo sapien
gcaaagagaataaagccacaggtga

SEQ ID NO: 1644238 - DNA, 25 bp, Homo sapien
ctggagcaaagagaataaagccaca

SEQ ID NO: 1644239 - DNA, 25 bp, Homo sapien
gagcaaagagaataaagccacaggt

SEQ ID NO: 1644240 - DNA, 25 bp, Homo sapien
ctgagggaaggggatgctcctggtc

SEQ ID NO: 1644241 - DNA, 25 bp, Homo sapien
tgagggaaggggatgctcctggtct

SEQ ID NO: 1644242 - DNA, 25 bp, Homo sapien
ttagccaccaaatgtaggtgtagct

SEQ ID NO: 1644243 - DNA, 25 bp, Homo sapien
tagccaccaaatgtaggtgtagctc

SEQ ID NO: 1644244 - DNA, 25 bp, Homo sapien
tactggccatgctgcactcgtttat

SEQ ID NO: 1644245 - DNA, 25 bp, Homo sapien
tcggtcaattccatactggccatgc

SEQ ID NO: 1644246 - DNA, 25 bp, Homo sapien
tggtgattagttttcggtcaattcc

SEQ ID NO: 1644247 - DNA, 25 bp, Homo sapien
ggccatgctgcactcgtttattttt

SEQ ID NO: 1644248 - DNA, 25 bp, Homo sapien
gagttatggatgaaacagacataga

SEQ ID NO: 1644249 - DNA, 25 bp, Homo sapien
gtggctgagttatggatgaaacaga

SEQ ID NO: 1644250 - DNA, 25 bp, Homo sapien
tgagatttgttccagcagtggctga

SEQ ID NO: 1644251 - DNA, 25 bp, Homo sapien
attatgagatttgttccagcagtgg

SEQ ID NO: 1644252 - DNA, 25 bp, Homo sapien
tcggacagctgaaacctatgagtca

SEQ ID NO: 1644253 - DNA, 25 bp, Homo sapien
tggtttcggacagctgaaacctatg

SEQ ID NO: 1644254 - DNA, 25 bp, Homo sapien
gtttcggacagctgaaacctatgag

SEQ ID NO: 1644255 - DNA, 25 bp, Homo sapien
gttggtttcggacagctgaaaccta

SEQ ID NO: 1644256 - DNA, 25 bp, Homo sapien
ctggggacattagacttcctatgga

SEQ ID NO: 1644257 - DNA, 25 bp, Homo sapien
ttctggggacattagacttcctatg

SEQ ID NO: 1644258 - DNA, 25 bp, Homo sapien
cctcctaaggcagttggctgatggt

SEQ ID NO: 1644259 - DNA, 25 bp, Homo sapien
cctaaggcagttggctgatggtctt

SEQ ID NO: 1644260 - DNA, 25 bp, Homo sapien
tatccagttactcctctagtcccat

SEQ ID NO: 1644261 - DNA, 25 bp, Homo sapien
tcacctcgctttatgatgtgtaagg

SEQ ID NO: 1644262 - DNA, 25 bp, Homo sapien
tgaaggtgaaatatccagttactcc

SEQ ID NO: 1644263 - DNA, 25 bp, Homo sapien
tatgatgtgtaaggtgtaggatcct

SEQ ID NO: 1644264 - DNA, 25 bp, Homo sapien
gaggtccctgatttgccctttgtac

SEQ ID NO: 1644265 - DNA, 25 bp, Homo sapien
tggctgggcttcaatcgtgacttgg

SEQ ID NO: 1644266 - DNA, 25 bp, Homo sapien
tctcgtccactatatgcaggcccat

SEQ ID NO: 1644267 - DNA, 25 bp, Homo sapien
tgtaatgtaatggtagaggtccctg

SEQ ID NO: 1644268 - DNA, 25 bp, Homo sapien
tcatttttcaaaatgtggcccctga

SEQ ID NO: 1644269 - DNA, 25 bp, Homo sapien
tatattttcccctatccaggctcca

SEQ ID NO: 1644270 - DNA, 25 bp, Homo sapien
cagactcctgtagatgtgagacttc

SEQ ID NO: 1644271 - DNA, 25 bp, Homo sapien
cagggacttttgtgatcttggttgc

SEQ ID NO: 1644272 - DNA, 25 bp, Homo sapien
caggagccccttccatttgatgtgc

SEQ ID NO: 1644273 - DNA, 25 bp, Homo sapien
cagggaggggctgagaggggcccca

SEQ ID NO: 1644274 - DNA, 25 bp, Homo sapien
agggaggggctgagaggggccccat

SEQ ID NO: 1644275 - DNA, 25 bp, Homo sapien
tgtgcagggaggggctgagaggggc

SEQ ID NO: 1644276 - DNA, 25 bp, Homo sapien
tgcagggaggggctgagaggggccc

SEQ ID NO: 1644277 - DNA, 25 bp, Homo sapien
ccagaaacttcctgagcacggctgt

SEQ ID NO: 1644278 - DNA, 25 bp, Homo sapien
tctgtggagatgagcctaggatcca

SEQ ID NO: 1644279 - DNA, 25 bp, Homo sapien
gaaagaggtgtctgctaaggcaatg

SEQ ID NO: 1644280 - DNA, 25 bp, Homo sapien
aaagaggtgtctgctaaggcaatga

SEQ ID NO: 1644281 - DNA, 25 bp, Homo sapien
gaggtgtctgctaaggcaatgacac

SEQ ID NO: 1644282 - DNA, 25 bp, Homo sapien
aagaggtgtctgctaaggcaatgac

SEQ ID NO: 1644283 - DNA, 25 bp, Homo sapien
gaggttgagatgacatatctgacac

SEQ ID NO: 1644284 - DNA, 25 bp, Homo sapien
ccctcagaagctactacatgtgaaa

SEQ ID NO: 1644285 - DNA, 25 bp, Homo sapien
gacactctgttgttaccctcagaag

SEQ ID NO: 1644286 - DNA, 25 bp, Homo sapien
gatgacatatctgacactctgttgt

SEQ ID NO: 1644287 - DNA, 25 bp, Homo sapien
gatgctgacagtggctctacctgaa

SEQ ID NO: 1644288 - DNA, 25 bp, Homo sapien
cctgccatggaggtcattcatggct

SEQ ID NO: 1644289 - DNA, 25 bp, Homo sapien
cagtcaagtccctgccatggaggtc

SEQ ID NO: 1644290 - DNA, 25 bp, Homo sapien
gccatggaggtcattcatggctgcc

SEQ ID NO: 1644291 - DNA, 25 bp, Homo sapien
tgggccctctgtcagtcaagtccct

SEQ ID NO: 1644292 - DNA, 25 bp, Homo sapien
agaggttgaggtttgaccctggata

SEQ ID NO: 1644293 - DNA, 25 bp, Homo sapien
caagaatactctgctgatggattag

SEQ ID NO: 1644294 - DNA, 25 bp, Homo sapien
ccctggatagtaataggtgtctgaa

SEQ ID NO: 1644295 - DNA, 25 bp, Homo sapien
taagttgtgggttcatctgggccat

SEQ ID NO: 1644296 - DNA, 25 bp, Homo sapien
gcaaagagaataaagccacaggtaa

SEQ ID NO: 1644297 - DNA, 25 bp, Homo sapien
aataaagccacaggtaatgttatca

SEQ ID NO: 1644298 - DNA, 25 bp, Homo sapien
gtaatgttatcagagggaatgggaa

SEQ ID NO: 1644299 - DNA, 25 bp, Homo sapien
cacaggtaatgttatcagagggaat

SEQ ID NO: 1644300 - DNA, 25 bp, Homo sapien
tggtctgtgaaagggacacagtgtt

SEQ ID NO: 1644301 - DNA, 25 bp, Homo sapien
ggtctgtgaaagggacacagtgttc

SEQ ID NO: 1644302 - DNA, 25 bp, Homo sapien
ctggtctgtgaaagggacacagtgt

SEQ ID NO: 1644303 - DNA, 25 bp, Homo sapien
tcacaagctgtggaagctgagtctc

SEQ ID NO: 1644304 - DNA, 25 bp, Homo sapien
catcacaagctgtggaagctgagtc

SEQ ID NO: 1644305 - DNA, 25 bp, Homo sapien
ctgtttctcccatcacaagctgtgg

SEQ ID NO: 1644306 - DNA, 25 bp, Homo sapien
ttctcccatcacaagctgtggaagc

SEQ ID NO: 1644307 - DNA, 25 bp, Homo sapien
gagaacatccaggtgactgggtcac

SEQ ID NO: 1644308 - DNA, 25 bp, Homo sapien
agagaacatccaggtgactgggtca

SEQ ID NO: 1644309 - DNA, 25 bp, Homo sapien
gtgactgggtcactgtggcttgtac

SEQ ID NO: 1644310 - DNA, 25 bp, Homo sapien
caggtgactgggtcactgtggcttg

SEQ ID NO: 1644311 - DNA, 25 bp, Homo sapien
tgagtttatgacaatttacccaaca

SEQ ID NO: 1644312 - DNA, 25 bp, Homo sapien
ctgggactgagtgtgagtttatgac

SEQ ID NO: 1644313 - DNA, 25 bp, Homo sapien
tgtgagtttatgacaatttacccaa

SEQ ID NO: 1644314 - DNA, 25 bp, Homo sapien
gtgagtttatgacaatttacccaac

SEQ ID NO: 1644315 - DNA, 25 bp, Homo sapien
taacagagaagattcccctgtgtgg

SEQ ID NO: 1644316 - DNA, 25 bp, Homo sapien
ctgtgtggcacccttgatttctcca

SEQ ID NO: 1644317 - DNA, 25 bp, Homo sapien
gattcccctgtgtggcacccttgat

SEQ ID NO: 1644318 - DNA, 25 bp, Homo sapien
gaagattcccctgtgtggcaccctt

SEQ ID NO: 1644319 - DNA, 25 bp, Homo sapien
atgtggtaatttgggaatactgatt

SEQ ID NO: 1644320 - DNA, 25 bp, Homo sapien
aatgtggtaatttgggaatactgat

SEQ ID NO: 1644321 - DNA, 25 bp, Homo sapien
ggtgcgtgccgacataccacactaa

SEQ ID NO: 1644322 - DNA, 25 bp, Homo sapien
tgcagcggcctgatccatggttcac

SEQ ID NO: 1644323 - DNA, 25 bp, Homo sapien
cttttcaagaggcagggtctgattc

SEQ ID NO: 1644324 - DNA, 25 bp, Homo sapien
cacagttgtatatgacatgagagcc

SEQ ID NO: 1644325 - DNA, 25 bp, Homo sapien
ttcccttccctgctgtctcttaggc

SEQ ID NO: 1644326 - DNA, 25 bp, Homo sapien
cattcccttccctgctgtctcttag

SEQ ID NO: 1644327 - DNA, 25 bp, Homo sapien
attcccttccctgctgtctcttagg

SEQ ID NO: 1644328 - DNA, 25 bp, Homo sapien
cataggagcttgcagttacttcctg

SEQ ID NO: 1644329 - DNA, 25 bp, Homo sapien
acttcctgggtggagccataaacaa

SEQ ID NO: 1644330 - DNA, 25 bp, Homo sapien
cagttacttcctgggtggagccata

SEQ ID NO: 1644331 - DNA, 25 bp, Homo sapien
tgaagtcataggagcttgcagttac

SEQ ID NO: 1644332 - DNA, 25 bp, Homo sapien
acaacattcggtggttgacgtccat

SEQ ID NO: 1644333 - DNA, 25 bp, Homo sapien
cattcggtggttgacgtccatgttc

SEQ ID NO: 1644334 - DNA, 25 bp, Homo sapien
ggtggttgacgtccatgttcatgta

SEQ ID NO: 1644335 - DNA, 25 bp, Homo sapien
tcggtggttgacgtccatgttcatg

SEQ ID NO: 1644336 - DNA, 25 bp, Homo sapien
ttcacaaactgagtctccaatgacc

SEQ ID NO: 1644337 - DNA, 25 bp, Homo sapien
cacaaactgagtctccaatgaccac

SEQ ID NO: 1644338 - DNA, 25 bp, Homo sapien
aactgagtctccaatgaccacataa

SEQ ID NO: 1644339 - DNA, 25 bp, Homo sapien
caaactgagtctccaatgaccacat

SEQ ID NO: 1644340 - DNA, 25 bp, Homo sapien
agatgtgagctcttcttctaattcc

SEQ ID NO: 1644341 - DNA, 25 bp, Homo sapien
ctgaaatgcaatagaaatcatggac

SEQ ID NO: 1644342 - DNA, 25 bp, Homo sapien
tggttcttctcaccaacatcacgta

SEQ ID NO: 1644343 - DNA, 25 bp, Homo sapien
ttcttctaattcctgtgtcctctgc

SEQ ID NO: 1644344 - DNA, 25 bp, Homo sapien
gaaaaagttgtgttacagatgcagc

SEQ ID NO: 1644345 - DNA, 25 bp, Homo sapien
gatgcagctaacgtcagcctttggg

SEQ ID NO: 1644346 - DNA, 25 bp, Homo sapien
aactgagtctctataacaccggatg

SEQ ID NO: 1644347 - DNA, 25 bp, Homo sapien
caggctcccaaatgttcagctggta

SEQ ID NO: 1644348 - DNA, 25 bp, Homo sapien
aaagagtagcaatggacaatagagg

SEQ ID NO: 1644349 - DNA, 25 bp, Homo sapien
tccagtaggatgaatttgtttgcaa

SEQ ID NO: 1644350 - DNA, 25 bp, Homo sapien
tagctaagtgcggaaagagtagcaa

SEQ ID NO: 1644351 - DNA, 25 bp, Homo sapien
gataattccagtaggatgaatttgt

SEQ ID NO: 1644352 - DNA, 25 bp, Homo sapien
aattctggggcactcagatagagag

SEQ ID NO: 1644353 - DNA, 25 bp, Homo sapien
caagagtccttgtcagagtcttttc

SEQ ID NO: 1644354 - DNA, 25 bp, Homo sapien
aaaaaagttcataaatctggagaat

SEQ ID NO: 1644355 - DNA, 25 bp, Homo sapien
gcactcagatagagagcaaaagcaa

SEQ ID NO: 1644356 - DNA, 25 bp, Homo sapien
aggtgattgtaagtagtttgaggaa

SEQ ID NO: 1644357 - DNA, 25 bp, Homo sapien
aagtagtttgaggaagaatcaaagc

SEQ ID NO: 1644358 - DNA, 25 bp, Homo sapien
ttgtaagtagtttgaggaagaatca

SEQ ID NO: 1644359 - DNA, 25 bp, Homo sapien
gcaattttggactgtaggtgattgt

SEQ ID NO: 1644360 - DNA, 25 bp, Homo sapien
gagttcttggtgtagcccattcata

SEQ ID NO: 1644361 - DNA, 25 bp, Homo sapien
ttctcaagaggattactgagttctt

SEQ ID NO: 1644362 - DNA, 25 bp, Homo sapien
tattatttagagaaggtttagcctc

SEQ ID NO: 1644363 - DNA, 25 bp, Homo sapien
tatttagagaaggtttagcctcact

SEQ ID NO: 1644364 - DNA, 25 bp, Homo sapien
gttgcctgtgatgaagggtgtcgtt

SEQ ID NO: 1644365 - DNA, 25 bp, Homo sapien
tgcctgtgatgaagggtgtcgttaa

SEQ ID NO: 1644366 - DNA, 25 bp, Homo sapien
tcagatgttgcctgtgatgaagggt

SEQ ID NO: 1644367 - DNA, 25 bp, Homo sapien
cctgtgatgaagggtgtcgttaagt

SEQ ID NO: 1644368 - DNA, 25 bp, Homo sapien
gtgaaattgtgtttctcatttgaat

SEQ ID NO: 1644369 - DNA, 25 bp, Homo sapien
tgtgaaattgtgtttctcatttgaa

SEQ ID NO: 1644370 - DNA, 25 bp, Homo sapien
tcaccatgtgaaattgtgtttctca

SEQ ID NO: 1644371 - DNA, 25 bp, Homo sapien
ccatgtgaaattgtgtttctcattt

SEQ ID NO: 1644372 - DNA, 25 bp, Homo sapien
aaatacagaaatgacttcacggctg

SEQ ID NO: 1644373 - DNA, 25 bp, Homo sapien
tgaaatacagaaatgacttcacggc

SEQ ID NO: 1644374 - DNA, 25 bp, Homo sapien
cctgaaatacagaaatgacttcacg

SEQ ID NO: 1644375 - DNA, 25 bp, Homo sapien
ttcctgaaatacagaaatgacttca

SEQ ID NO: 1644376 - DNA, 25 bp, Homo sapien
ggagaggaagacgtcctattcctga

SEQ ID NO: 1644377 - DNA, 25 bp, Homo sapien
ctcaccatgtttctaggatggtgat

SEQ ID NO: 1644378 - DNA, 25 bp, Homo sapien
ggatggtgatcagtcctctgtcaaa

SEQ ID NO: 1644379 - DNA, 25 bp, Homo sapien
gaaggcccacgtccgtgcatttcac

SEQ ID NO: 1644380 - DNA, 25 bp, Homo sapien
agtactacattattcctcttgggaa

SEQ ID NO: 1644381 - DNA, 25 bp, Homo sapien
tccctgtatgagcaggaacaagaca

SEQ ID NO: 1644382 - DNA, 25 bp, Homo sapien
tagcatcatactcaacggagaaaga

SEQ ID NO: 1644383 - DNA, 25 bp, Homo sapien
ccctgtatgagcaggaacaagacaa

SEQ ID NO: 1644384 - DNA, 25 bp, Homo sapien
atgtgaaaaacccaatgctagcatc

SEQ ID NO: 1644385 - DNA, 25 bp, Homo sapien
tccagcaattccacttctggacaaa

SEQ ID NO: 1644386 - DNA, 25 bp, Homo sapien
tagaatggtgtgtgctaagggttat

SEQ ID NO: 1644387 - DNA, 25 bp, Homo sapien
ccaccccaggttgagtgaggcaggc

SEQ ID NO: 1644388 - DNA, 25 bp, Homo sapien
gacgcaacgcaggagtcttccctga

SEQ ID NO: 1644389 - DNA, 25 bp, Homo sapien
agccaggacgcaacgcaggagtctt

SEQ ID NO: 1644390 - DNA, 25 bp, Homo sapien
caaaaatactctgccggtgggttag

SEQ ID NO: 1644391 - DNA, 25 bp, Homo sapien
tttgggggatagagagcttttgtcc

SEQ ID NO: 1644392 - DNA, 25 bp, Homo sapien
tactctgccggtgggttagattccg

SEQ ID NO: 1644393 - DNA, 25 bp, Homo sapien
acttcgactgtcatggatttggagc

SEQ ID NO: 1644394 - DNA, 25 bp, Homo sapien
ataggtgaatgaagggtaaatgctg

SEQ ID NO: 1644395 - DNA, 25 bp, Homo sapien
tcctggtctcttaaagggacacagt

SEQ ID NO: 1644396 - DNA, 25 bp, Homo sapien
tggtctcttaaagggacacagtgac

SEQ ID NO: 1644397 - DNA, 25 bp, Homo sapien
atgctcctggtctcttaaagggaca

SEQ ID NO: 1644398 - DNA, 25 bp, Homo sapien
tctcttaaagggacacagtgaccct

SEQ ID NO: 1644399 - DNA, 25 bp, Homo sapien
gtctatacttggaccggagaaagac

SEQ ID NO: 1644400 - DNA, 25 bp, Homo sapien
tggttaaggctgtgcctacctaggt

SEQ ID NO: 1644401 - DNA, 25 bp, Homo sapien
taaggctgtgcctacctaggttttc

SEQ ID NO: 1644402 - DNA, 25 bp, Homo sapien
acttggaccggagaaagactgagag

SEQ ID NO: 1644403 - DNA, 25 bp, Homo sapien
cctgtttcatttctcgtgacactgg

SEQ ID NO: 1644404 - DNA, 25 bp, Homo sapien
cactgggtagaatgaggatcctgtt

SEQ ID NO: 1644405 - DNA, 25 bp, Homo sapien
ttcaatgggtcgctttaccctggga

SEQ ID NO: 1644406 - DNA, 25 bp, Homo sapien
tgggtcgctttaccctgggactgac

SEQ ID NO: 1644407 - DNA, 25 bp, Homo sapien
tagccaccaaatgtaggtgtagttc

SEQ ID NO: 1644408 - DNA, 25 bp, Homo sapien
tctcactcttaggttcacaggtgaa

SEQ ID NO: 1644409 - DNA, 25 bp, Homo sapien
gttttgagttgttgatggtgatgta

SEQ ID NO: 1644410 - DNA, 25 bp, Homo sapien
gaaggctaagacatccttattctcc

SEQ ID NO: 1644411 - DNA, 25 bp, Homo sapien
agagaagattgtcctgtgtggcacc

SEQ ID NO: 1644412 - DNA, 25 bp, Homo sapien
ctgtgtggataacagagagaagatt

SEQ ID NO: 1644413 - DNA, 25 bp, Homo sapien
agattgtcctgtgtggcacctttga

SEQ ID NO: 1644414 - DNA, 25 bp, Homo sapien
gcacctttgattcctccacaggcat

SEQ ID NO: 1644415 - DNA, 25 bp, Homo sapien
gatagagcagagtgcaaggaatgat

SEQ ID NO: 1644416 - DNA, 25 bp, Homo sapien
gtgacctctaaagatagagcagagt

SEQ ID NO: 1644417 - DNA, 25 bp, Homo sapien
cctctaaagatagagcagagtgcaa

SEQ ID NO: 1644418 - DNA, 25 bp, Homo sapien
taaagatagagcagagtgcaaggaa

SEQ ID NO: 1644419 - DNA, 25 bp, Homo sapien
gacttcccctgtatggtaataggtg

SEQ ID NO: 1644420 - DNA, 25 bp, Homo sapien
gaataaagtcacaggtgacattgtc

SEQ ID NO: 1644421 - DNA, 25 bp, Homo sapien
gtgacattgtcagagggaagggaaa

SEQ ID NO: 1644422 - DNA, 25 bp, Homo sapien
caatcagccaagaatgctctgccag

SEQ ID NO: 1644423 - DNA, 25 bp, Homo sapien
cattcatagggtcctgcaatatact

SEQ ID NO: 1644424 - DNA, 25 bp, Homo sapien
gaccattcatccaccacaggtagct

SEQ ID NO: 1644425 - DNA, 25 bp, Homo sapien
gtgagtcatagggaggctctgacca

SEQ ID NO: 1644426 - DNA, 25 bp, Homo sapien
ggacagctgcaacctgtgagtcata

SEQ ID NO: 1644427 - DNA, 25 bp, Homo sapien
cacaggttaagatcacagcctccat

SEQ ID NO: 1644428 - DNA, 25 bp, Homo sapien
cgcaggatcacaggttaagatcaca

SEQ ID NO: 1644429 - DNA, 25 bp, Homo sapien
caggatcacaggttaagatcacagc

SEQ ID NO: 1644430 - DNA, 25 bp, Homo sapien
gatcacaggttaagatcacagcctc

SEQ ID NO: 1644431 - DNA, 25 bp, Homo sapien
ggtttaagttgctactggagatgga

SEQ ID NO: 1644432 - DNA, 25 bp, Homo sapien
cctggggtttaagttgctactggag

SEQ ID NO: 1644433 - DNA, 25 bp, Homo sapien
tggggtttaagttgctactggagat

SEQ ID NO: 1644434 - DNA, 25 bp, Homo sapien
ctccctggggtttaagttgctactg

SEQ ID NO: 1644435 - DNA, 25 bp, Homo sapien
taaaatccacaatgcgccagtgagc

SEQ ID NO: 1644436 - DNA, 25 bp, Homo sapien
gcagtacatgtactggtttagcatc

SEQ ID NO: 1644437 - DNA, 25 bp, Homo sapien
ccgatgctcaattcgtaatactgta

SEQ ID NO: 1644438 - DNA, 25 bp, Homo sapien
aaagttgtcaggagtttagacctca

SEQ ID NO: 1644439 - DNA, 25 bp, Homo sapien
attttctcttaagctcacgaaacac

SEQ ID NO: 1644440 - DNA, 25 bp, Homo sapien
cacattatgctcaaagaaagacgcc

SEQ ID NO: 1644441 - DNA, 25 bp, Homo sapien
ttatgctcaaagaaagacgccaaag

SEQ ID NO: 1644442 - DNA, 25 bp, Homo sapien
gatcacattatgctcaaagaaagac

SEQ ID NO: 1644443 - DNA, 25 bp, Homo sapien
cagaagtctctaagaagtgacagga

SEQ ID NO: 1644444 - DNA, 25 bp, Homo sapien
cccagctgtgtgcagtctaccagta

SEQ ID NO: 1644445 - DNA, 25 bp, Homo sapien
tctaccagtaagcatcaaaagcatt

SEQ ID NO: 1644446 - DNA, 25 bp, Homo sapien
agccagaagtctctaagaagtgaca

SEQ ID NO: 1644447 - DNA, 25 bp, Homo sapien
agtttctataattcctgactgctgc

SEQ ID NO: 1644448 - DNA, 25 bp, Homo sapien
tacctatgactaatggctcagccag

SEQ ID NO: 1644449 - DNA, 25 bp, Homo sapien
tcatgtggtccctacctggaggcag

SEQ ID NO: 1644450 - DNA, 25 bp, Homo sapien
tggcaaccggctgacctcattcata

SEQ ID NO: 1644451 - DNA, 25 bp, Homo sapien
gccaaagagcttcagagttgcatga

SEQ ID NO: 1644452 - DNA, 25 bp, Homo sapien
aagagcttcagagttgcatgaggtg

SEQ ID NO: 1644453 - DNA, 25 bp, Homo sapien
cctcctaggattctgcatccaacat

SEQ ID NO: 1644454 - DNA, 25 bp, Homo sapien
acctcctaggattctgcatccaaca

SEQ ID NO: 1644455 - DNA, 25 bp, Homo sapien
ccagtaaggcctgcccaataagcca

SEQ ID NO: 1644456 - DNA, 25 bp, Homo sapien
ttggtcccagtaaggcctgcccaat

SEQ ID NO: 1644457 - DNA, 25 bp, Homo sapien
gtcccagtaaggcctgcccaataag

SEQ ID NO: 1644458 - DNA, 25 bp, Homo sapien
gtaaggcctgcccaataagccacaa

SEQ ID NO: 1644459 - DNA, 25 bp, Homo sapien
gtaatggtagaggtccatcagttgt

SEQ ID NO: 1644460 - DNA, 25 bp, Homo sapien
agcagtgataggcaggttccagaag

SEQ ID NO: 1644461 - DNA, 25 bp, Homo sapien
ggtagaggtccatcagttgtccttt

SEQ ID NO: 1644462 - DNA, 25 bp, Homo sapien
acttgagcagtgataggcaggttcc

SEQ ID NO: 1644463 - DNA, 25 bp, Homo sapien
ggagaaagcaccagtcaatattgag

SEQ ID NO: 1644464 - DNA, 25 bp, Homo sapien
ggtggagaaagcaccagtcaatatt

SEQ ID NO: 1644465 - DNA, 25 bp, Homo sapien
gaggtggagaaagcaccagtcaata

SEQ ID NO: 1644466 - DNA, 25 bp, Homo sapien
agaaagcaccagtcaatattgagac

SEQ ID NO: 1644467 - DNA, 25 bp, Homo sapien
tgagcaggagccccttccaggtgat

SEQ ID NO: 1644468 - DNA, 25 bp, Homo sapien
ggagccccttccaggtgatgtgctg

SEQ ID NO: 1644469 - DNA, 25 bp, Homo sapien
caggagccccttccaggtgatgtgc

SEQ ID NO: 1644470 - DNA, 25 bp, Homo sapien
agccccttccaggtgatgtgctgtg

SEQ ID NO: 1644471 - DNA, 25 bp, Homo sapien
ccagaaacttcctgagcacggctgt

SEQ ID NO: 1644472 - DNA, 25 bp, Homo sapien
tcctgagcacggctgtaggctgtgc

SEQ ID NO: 1644473 - DNA, 25 bp, Homo sapien
tctgtggagctgagcctaggatcca

SEQ ID NO: 1644474 - DNA, 25 bp, Homo sapien
tggagctgagcctaggatccagaaa

SEQ ID NO: 1644475 - DNA, 25 bp, Homo sapien
tccacttggcaacaggtgtcttccc

SEQ ID NO: 1644476 - DNA, 25 bp, Homo sapien
ggttggacctcactaacatcaggcc

SEQ ID NO: 1644477 - DNA, 25 bp, Homo sapien
tccggataactgtggttggacctca

SEQ ID NO: 1644478 - DNA, 25 bp, Homo sapien
ttccttgacactgagggtacctcta

SEQ ID NO: 1644479 - DNA, 25 bp, Homo sapien
aagaggtgtctgctaagtcaatgac

SEQ ID NO: 1644480 - DNA, 25 bp, Homo sapien
gaaagaggtgtctgctaagtcaatg

SEQ ID NO: 1644481 - DNA, 25 bp, Homo sapien
ttagctgcagctgaaagaggtgtct

SEQ ID NO: 1644482 - DNA, 25 bp, Homo sapien
gaggtgtctgctaagtcaatgacac

SEQ ID NO: 1644483 - DNA, 25 bp, Homo sapien
ttctgagtggctcacatgtcaggta

SEQ ID NO: 1644484 - DNA, 25 bp, Homo sapien
tgagttctgagtggctcacatgtca

SEQ ID NO: 1644485 - DNA, 25 bp, Homo sapien
agttctgagtggctcacatgtcagg

SEQ ID NO: 1644486 - DNA, 25 bp, Homo sapien
tggtgagttctgagtggctcacatg

SEQ ID NO: 1644487 - DNA, 25 bp, Homo sapien
ttcaaacgtggtctgattctttaca

SEQ ID NO: 1644488 - DNA, 25 bp, Homo sapien
tctgattctttacataagtgcagca

SEQ ID NO: 1644489 - DNA, 25 bp, Homo sapien
cagcaagagtagcaatagaccatgt

SEQ ID NO: 1644490 - DNA, 25 bp, Homo sapien
aagtgcagcaagagtagcaatagac

SEQ ID NO: 1644491 - DNA, 25 bp, Homo sapien
aagccaaaccaaggctgacttcaga

SEQ ID NO: 1644492 - DNA, 25 bp, Homo sapien
tatagtttattgaactgctacaagc

SEQ ID NO: 1644493 - DNA, 25 bp, Homo sapien
tgcttggtctaggctgggaatttta

SEQ ID NO: 1644494 - DNA, 25 bp, Homo sapien
atagtttattgaactgctacaagct

SEQ ID NO: 1644495 - DNA, 25 bp, Homo sapien
tcctgcttggtctaggctgggaatt

SEQ ID NO: 1644496 - DNA, 25 bp, Homo sapien
aatattgtgcccgtgggttagactc

SEQ ID NO: 1644497 - DNA, 25 bp, Homo sapien
agaatattgtgcccgtgggttagac

SEQ ID NO: 1644498 - DNA, 25 bp, Homo sapien
cccgtgggttagactcggcgaagca

SEQ ID NO: 1644499 - DNA, 25 bp, Homo sapien
tattgtgcccgtgggttagactcgg

SEQ ID NO: 1644500 - DNA, 25 bp, Homo sapien
ataggtgaatgaagggtaaatgctg

SEQ ID NO: 1644501 - DNA, 25 bp, Homo sapien
aataaagccataggtgatgtcatcc

SEQ ID NO: 1644502 - DNA, 25 bp, Homo sapien
cataggtgatgtcatccgagggaag

SEQ ID NO: 1644503 - DNA, 25 bp, Homo sapien
tcatccgagggaaggggatgttcct

SEQ ID NO: 1644504 - DNA, 25 bp, Homo sapien
cctggtctcttaaagggacacagtt

SEQ ID NO: 1644505 - DNA, 25 bp, Homo sapien
cccagccaaactccctctatgttca

SEQ ID NO: 1644506 - DNA, 25 bp, Homo sapien
taagccaagacacaccttcaagtcc

SEQ ID NO: 1644507 - DNA, 25 bp, Homo sapien
ctaagccaagacacaccttcaagtc

SEQ ID NO: 1644508 - DNA, 25 bp, Homo sapien
acaccttcaagtcccagccaaactc

SEQ ID NO: 1644509 - DNA, 25 bp, Homo sapien
ctgagccgaagcctgaggtattcac

SEQ ID NO: 1644510 - DNA, 25 bp, Homo sapien
gggagtcatggccacctcggatgtc

SEQ ID NO: 1644511 - DNA, 25 bp, Homo sapien
ctcggatgtccagaagtaaaggtgt

SEQ ID NO: 1644512 - DNA, 25 bp, Homo sapien
aagtctcccatgacaagagcgtccc

SEQ ID NO: 1644513 - DNA, 25 bp, Homo sapien
taaggctgtgcctacctaggttttc

SEQ ID NO: 1644514 - DNA, 25 bp, Homo sapien
ggatgccaccatatcggtcccgtat

SEQ ID NO: 1644515 - DNA, 25 bp, Homo sapien
cactgcggatgccaccatatcggtc

SEQ ID NO: 1644516 - DNA, 25 bp, Homo sapien
tatcggtcccgtatttcacattgat

SEQ ID NO: 1644517 - DNA, 25 bp, Homo sapien
caccatatcggtcccgtatttcaca

SEQ ID NO: 1644518 - DNA, 25 bp, Homo sapien
gtttcatttctcgtgacattgggta

SEQ ID NO: 1644519 - DNA, 25 bp, Homo sapien
ttcatttctcgtgacattgggtaga

SEQ ID NO: 1644520 - DNA, 25 bp, Homo sapien
catttctcgtgacattgggtagaat

SEQ ID NO: 1644521 - DNA, 25 bp, Homo sapien
tcatttctcgtgacattgggtagaa

SEQ ID NO: 1644522 - DNA, 25 bp, Homo sapien
aatgggtcgctttaccctgggactg

SEQ ID NO: 1644523 - DNA, 25 bp, Homo sapien
caatgggtcgctttaccctgggact

SEQ ID NO: 1644524 - DNA, 25 bp, Homo sapien
ttcaatgggtcgctttaccctggga

SEQ ID NO: 1644525 - DNA, 25 bp, Homo sapien
tgggtcgctttaccctgggactgac

SEQ ID NO: 1644526 - DNA, 25 bp, Homo sapien
acaggtgaaggttaagacatcctta

SEQ ID NO: 1644527 - DNA, 25 bp, Homo sapien
tagccaccaaatgtaggtgtagttc

SEQ ID NO: 1644528 - DNA, 25 bp, Homo sapien
tgaaggttaagacatccttattctc

SEQ ID NO: 1644529 - DNA, 25 bp, Homo sapien
ttagccaccaaatgtaggtgtagtt

SEQ ID NO: 1644530 - DNA, 25 bp, Homo sapien
tccttgaaagccaatagctggtgct

SEQ ID NO: 1644531 - DNA, 25 bp, Homo sapien
ccttgaaagccaatagctggtgctt

SEQ ID NO: 1644532 - DNA, 25 bp, Homo sapien
gatagagcagagtgcaaggaatgat

SEQ ID NO: 1644533 - DNA, 25 bp, Homo sapien
gtgacctctaaagatagagcagagt

SEQ ID NO: 1644534 - DNA, 25 bp, Homo sapien
cctctaaagatagagcagagtgcaa

SEQ ID NO: 1644535 - DNA, 25 bp, Homo sapien
taaagatagagcagagtgcaaggaa

SEQ ID NO: 1644536 - DNA, 25 bp, Homo sapien
tgctattttctgtcgtcagaacttt

SEQ ID NO: 1644537 - DNA, 25 bp, Homo sapien
tagcttgatgattagtttttggtca

SEQ ID NO: 1644538 - DNA, 25 bp, Homo sapien
ttctctcaccacgtttctagcttga

SEQ ID NO: 1644539 - DNA, 25 bp, Homo sapien
ttttctgtcgtcagaactttccacg

SEQ ID NO: 1644540 - DNA, 25 bp, Homo sapien
agaataaagtcacaggtgacattgt

SEQ ID NO: 1644541 - DNA, 25 bp, Homo sapien
gtgacattgtcagagggaagggaaa

SEQ ID NO: 1644542 - DNA, 25 bp, Homo sapien
tcccctgtatggtaataggtgtatg

SEQ ID NO: 1644543 - DNA, 25 bp, Homo sapien
caatcagccaagaatgctctgccag

SEQ ID NO: 1644544 - DNA, 25 bp, Homo sapien
ggcactcactgggttccgtatttca

SEQ ID NO: 1644545 - DNA, 25 bp, Homo sapien
gggttccgtatttcacattcatagg

SEQ ID NO: 1644546 - DNA, 25 bp, Homo sapien
gtcactgcggctggcactcactggg

SEQ ID NO: 1644547 - DNA, 25 bp, Homo sapien
tgactgggtcactgcggctggcact

SEQ ID NO: 1644548 - DNA, 25 bp, Homo sapien
ggttttggacagctgcaacctgtga

SEQ ID NO: 1644549 - DNA, 25 bp, Homo sapien
ggacagctgcaacctgtgagtcata

SEQ ID NO: 1644550 - DNA, 25 bp, Homo sapien
cctgttggttttggacagctgcaac

SEQ ID NO: 1644551 - DNA, 25 bp, Homo sapien
tgcaatatactttgtgacaccaaat

SEQ ID NO: 1644552 - DNA, 25 bp, Homo sapien
cttgcggctggagtcgcaggatcac

SEQ ID NO: 1644553 - DNA, 25 bp, Homo sapien
ttgcggctggagtcgcaggatcaca

SEQ ID NO: 1644554 - DNA, 25 bp, Homo sapien
gggatttaagttgctgctggagatg

SEQ ID NO: 1644555 - DNA, 25 bp, Homo sapien
tggagatggagggcttgggagtctc

SEQ ID NO: 1644556 - DNA, 25 bp, Homo sapien
gagatggagggcttgggagtctcca

SEQ ID NO: 1644557 - DNA, 25 bp, Homo sapien
gatttaagttgctgctggagatgga

SEQ ID NO: 1644558 - DNA, 25 bp, Homo sapien
cagatagcacccacctggtcacctc

SEQ ID NO: 1644559 - DNA, 25 bp, Homo sapien
aaccatcagatagcacccacctggt

SEQ ID NO: 1644560 - DNA, 25 bp, Homo sapien
gttaagctcaggaaataccactaaa

SEQ ID NO: 1644561 - DNA, 25 bp, Homo sapien
tgttaagctcaggaaataccactaa

SEQ ID NO: 1644562 - DNA, 25 bp, Homo sapien
tctcctaagccgatgtcctacaaag

SEQ ID NO: 1644563 - DNA, 25 bp, Homo sapien
tgtgtgtgaagtagaagtgacccct

SEQ ID NO: 1644564 - DNA, 25 bp, Homo sapien
gtgaagaaagctctgtccttgccca

SEQ ID NO: 1644565 - DNA, 25 bp, Homo sapien
caacacccagggatcatgtggaatc

SEQ ID NO: 1644566 - DNA, 25 bp, Homo sapien
gggcttcaatcgtgacttgggcagt

SEQ ID NO: 1644567 - DNA, 25 bp, Homo sapien
ctttgaccgtctactacatatgatg

SEQ ID NO: 1644568 - DNA, 25 bp, Homo sapien
tgaaggtgaaatgtccagttactcc

SEQ ID NO: 1644569 - DNA, 25 bp, Homo sapien
gaaactttgggtggctgggcttcaa

SEQ ID NO: 1644570 - DNA, 25 bp, Homo sapien
gcagactcctgtagatgtgagagtt

SEQ ID NO: 1644571 - DNA, 25 bp, Homo sapien
actcctgtagatgtgagagttctca

SEQ ID NO: 1644572 - DNA, 25 bp, Homo sapien
cagactcctgtagatgtgagagttc

SEQ ID NO: 1644573 - DNA, 25 bp, Homo sapien
gtgagcaggacccccttccaggtga

SEQ ID NO: 1644574 - DNA, 25 bp, Homo sapien
gagcaggacccccttccaggtgatg

SEQ ID NO: 1644575 - DNA, 25 bp, Homo sapien
ctgtgagcaggacccccttccaggt

SEQ ID NO: 1644576 - DNA, 25 bp, Homo sapien
gcaggacccccttccaggtgatgcg

SEQ ID NO: 1644577 - DNA, 25 bp, Homo sapien
agggaggggctgagaggggccccat

SEQ ID NO: 1644578 - DNA, 25 bp, Homo sapien
ctgtgtgcagggaggggctgagagg

SEQ ID NO: 1644579 - DNA, 25 bp, Homo sapien
tgcagggaggggctgagaggggccc

SEQ ID NO: 1644580 - DNA, 25 bp, Homo sapien
tgtgcagggaggggctgagaggggc

SEQ ID NO: 1644581 - DNA, 25 bp, Homo sapien
gttctcctctgtggagataagccta

SEQ ID NO: 1644582 - DNA, 25 bp, Homo sapien
cctctgtggagataagcctaggatc

SEQ ID NO: 1644583 - DNA, 25 bp, Homo sapien
ctgtggagataagcctaggatccag

SEQ ID NO: 1644584 - DNA, 25 bp, Homo sapien
ttctcctctgtggagataagcctag

SEQ ID NO: 1644585 - DNA, 25 bp, Homo sapien
ggtgaatctctcaggcctcttggga

SEQ ID NO: 1644586 - DNA, 25 bp, Homo sapien
ccccgcgggacatggcttgttgaga

SEQ ID NO: 1644587 - DNA, 25 bp, Homo sapien
cttgctcacacctgagagggcgggt

SEQ ID NO: 1644588 - DNA, 25 bp, Homo sapien
gattcatcccgacttactccgtggc

SEQ ID NO: 1644589 - DNA, 25 bp, Homo sapien
ttagctgcagctgaaagaggtgtct

SEQ ID NO: 1644590 - DNA, 25 bp, Homo sapien
tagctgcagctgaaagaggtgtctg

SEQ ID NO: 1644591 - DNA, 25 bp, Homo sapien
ggctcacgcttcaggtacaagggtt

SEQ ID NO: 1644592 - DNA, 25 bp, Homo sapien
tgtccacagtgtgaagtcatccact

SEQ ID NO: 1644593 - DNA, 25 bp, Homo sapien
gaacagagtgggtcttgctcttcgt

SEQ ID NO: 1644594 - DNA, 25 bp, Homo sapien
gctcttcgtgattccatgggagaaa

SEQ ID NO: 1644595 - DNA, 25 bp, Homo sapien
ccagggctggtagatcagagccaca

SEQ ID NO: 1644596 - DNA, 25 bp, Homo sapien
ttcctgaaataaactacaccagggc

SEQ ID NO: 1644597 - DNA, 25 bp, Homo sapien
actggccagtactccaatcaggatg

SEQ ID NO: 1644598 - DNA, 25 bp, Homo sapien
aatcaggatgccgacagtggctcta

SEQ ID NO: 1644599 - DNA, 25 bp, Homo sapien
gaaaggccaggagtacttcttgtac

SEQ ID NO: 1644600 - DNA, 25 bp, Homo sapien
tgaaaggccaggagtacttcttgta

SEQ ID NO: 1644601 - DNA, 25 bp, Homo sapien
ctgaaaggccaggagtacttcttgt

SEQ ID NO: 1644602 - DNA, 25 bp, Homo sapien
tctactgatgggttagagcccgcaa

SEQ ID NO: 1644603 - DNA, 25 bp, Homo sapien
ctgatgggttagagcccgcaaggca

SEQ ID NO: 1644604 - DNA, 25 bp, Homo sapien
tgctctactgatgggttagagcccg

SEQ ID NO: 1644605 - DNA, 25 bp, Homo sapien
gttagagcccgcaaggcaggagaca

SEQ ID NO: 1644606 - DNA, 25 bp, Homo sapien
gctcctggtctgtgaaaggggcaca

SEQ ID NO: 1644607 - DNA, 25 bp, Homo sapien
gtcacaggtaatgttatcagaggga

SEQ ID NO: 1644608 - DNA, 25 bp, Homo sapien
tatcagagggaatgggaagctcctg

SEQ ID NO: 1644609 - DNA, 25 bp, Homo sapien
caaagagaataaagtcacaggtaat

SEQ ID NO: 1644610 - DNA, 25 bp, Homo sapien
tgacactgagtagagcaaggatcct

SEQ ID NO: 1644611 - DNA, 25 bp, Homo sapien
gagtctatgactatttacccaccac

SEQ ID NO: 1644612 - DNA, 25 bp, Homo sapien
cattggacatctttagcctgggact

SEQ ID NO: 1644613 - DNA, 25 bp, Homo sapien
gattgtgccatgagtctcaggttca

SEQ ID NO: 1644614 - DNA, 25 bp, Homo sapien
acagcaggtctgtgtaccaaaagac

SEQ ID NO: 1644615 - DNA, 25 bp, Homo sapien
cacagcaggtctgtgtaccaaaaga

SEQ ID NO: 1644616 - DNA, 25 bp, Homo sapien
cacctggtcctaggaaccaccagta

SEQ ID NO: 1644617 - DNA, 25 bp, Homo sapien
cctggtcctaggaaccaccagtatt

SEQ ID NO: 1644618 - DNA, 25 bp, Homo sapien
tggtcctaggaaccaccagtattcc

SEQ ID NO: 1644619 - DNA, 25 bp, Homo sapien
ccacctggtcctaggaaccaccagt

SEQ ID NO: 1644620 - DNA, 25 bp, Homo sapien
gagcccgtgggctttggaaactgca

SEQ ID NO: 1644621 - DNA, 25 bp, Homo sapien
catgactggaggatatgagcgccac

SEQ ID NO: 1644622 - DNA, 25 bp, Homo sapien
gagtcatgagtgaaatgggtgaaat

SEQ ID NO: 1644623 - DNA, 25 bp, Homo sapien
gaaattcgaagtctctagggcatga

SEQ ID NO: 1644624 - DNA, 25 bp, Homo sapien
caactctggcctcactgggctgtgc

SEQ ID NO: 1644625 - DNA, 25 bp, Homo sapien
gtgcctttcctcctgagccctgagc

SEQ ID NO: 1644626 - DNA, 25 bp, Homo sapien
ctgtgcctttcctcctgagccctga

SEQ ID NO: 1644627 - DNA, 25 bp, Homo sapien
tctggcctcactgggctgtgccttt

SEQ ID NO: 1644628 - DNA, 25 bp, Homo sapien
aatctatccattgttctttgtcaca

SEQ ID NO: 1644629 - DNA, 25 bp, Homo sapien
tcccaaataaaatggctctgtttgg

SEQ ID NO: 1644630 - DNA, 25 bp, Homo sapien
tctcttctgatcacaatcccagatg

SEQ ID NO: 1644631 - DNA, 25 bp, Homo sapien
cacaatcccagatgagaactcccaa

SEQ ID NO: 1644632 - DNA, 25 bp, Homo sapien
aaggcaagttccttttacgtatgag

SEQ ID NO: 1644633 - DNA, 25 bp, Homo sapien
gtccaaaatagcaagtttcatctga

SEQ ID NO: 1644634 - DNA, 25 bp, Homo sapien
ccaaaatagcaagtttcatctgaga

SEQ ID NO: 1644635 - DNA, 25 bp, Homo sapien
aggcaagttccttttacgtatgagc

SEQ ID NO: 1644636 - DNA, 25 bp, Homo sapien
agacatcacccatcttctgtgtcac

SEQ ID NO: 1644637 - DNA, 25 bp, Homo sapien
atcttggctccttccccagttgttt

SEQ ID NO: 1644638 - DNA, 25 bp, Homo sapien
gccatcttggctccttccccagttg

SEQ ID NO: 1644639 - DNA, 25 bp, Homo sapien
cagacatcacccatcttctgtgtca

SEQ ID NO: 1644640 - DNA, 25 bp, Homo sapien
tatgggaatagacaaaggtgccacc

SEQ ID NO: 1644641 - DNA, 25 bp, Homo sapien
gctgcatcagtgtgagctattataa

SEQ ID NO: 1644642 - DNA, 25 bp, Homo sapien
attatgggaatagacaaaggtgcca

SEQ ID NO: 1644643 - DNA, 25 bp, Homo sapien
aatagacaaaggtgccaccctggcc

SEQ ID NO: 1644644 - DNA, 25 bp, Homo sapien
tatactttaccaattgctgaagaaa

SEQ ID NO: 1644645 - DNA, 25 bp, Homo sapien
taactttattaccataaacctatga

SEQ ID NO: 1644646 - DNA, 25 bp, Homo sapien
taccataaacctatgaatactcatg

SEQ ID NO: 1644647 - DNA, 25 bp, Homo sapien
aaaaaagttcataaatctggagaat

SEQ ID NO: 1644648 - DNA, 25 bp, Homo sapien
tctgtcaggtctccatggcagggac

SEQ ID NO: 1644649 - DNA, 25 bp, Homo sapien
tcatgactgagactctgtcaggtct

SEQ ID NO: 1644650 - DNA, 25 bp, Homo sapien
ctctgtcaggtctccatggcaggga

SEQ ID NO: 1644651 - DNA, 25 bp, Homo sapien
gactgagactctgtcaggtctccat

SEQ ID NO: 1644652 - DNA, 25 bp, Homo sapien
aaagaggtgaaatgattatacctga

SEQ ID NO: 1644653 - DNA, 25 bp, Homo sapien
taaagattgaacaaacctaattaga

SEQ ID NO: 1644654 - DNA, 25 bp, Homo sapien
cagtgctacccaaagtgactgcaga

SEQ ID NO: 1644655 - DNA, 25 bp, Homo sapien
ggagaacagtgctacccaaagtgac

SEQ ID NO: 1644656 - DNA, 25 bp, Homo sapien
gggacagtgttctcaccaaaggata

SEQ ID NO: 1644657 - DNA, 25 bp, Homo sapien
gcttcatgatactggatttcccaat

SEQ ID NO: 1644658 - DNA, 25 bp, Homo sapien
acagtgttctcaccaaaggatattg

SEQ ID NO: 1644659 - DNA, 25 bp, Homo sapien
agcttcatgatactggatttcccaa

SEQ ID NO: 1644660 - DNA, 25 bp, Homo sapien
gagaagcattactcacactagcgaa

SEQ ID NO: 1644661 - DNA, 25 bp, Homo sapien
gggccctttctacacacacgctagt

SEQ ID NO: 1644662 - DNA, 25 bp, Homo sapien
tgccatgaataaccccaacggtgaa

SEQ ID NO: 1644663 - DNA, 25 bp, Homo sapien
gaatagccagttacatagagacaaa

SEQ ID NO: 1644664 - DNA, 25 bp, Homo sapien
tcagggctgataaagccccctccct

SEQ ID NO: 1644665 - DNA, 25 bp, Homo sapien
tctctgaaagccagatagactccac

SEQ ID NO: 1644666 - DNA, 25 bp, Homo sapien
ttcaggaggagaatttgggatttgc

SEQ ID NO: 1644667 - DNA, 25 bp, Homo sapien
catgggacacaggctgggaataaaa

SEQ ID NO: 1644668 - DNA, 25 bp, Homo sapien
ctgccggtgggttagattccgtgaa

SEQ ID NO: 1644669 - DNA, 25 bp, Homo sapien
ctctgccggtgggttagattccgtg

SEQ ID NO: 1644670 - DNA, 25 bp, Homo sapien
tctgccggtgggttagattccgtga

SEQ ID NO: 1644671 - DNA, 25 bp, Homo sapien
tcctggtctcttaaagggacacagt

SEQ ID NO: 1644672 - DNA, 25 bp, Homo sapien
gtctcttaaagggacacagtgaccc

SEQ ID NO: 1644673 - DNA, 25 bp, Homo sapien
tggtctcttaaagggacacagtgac

SEQ ID NO: 1644674 - DNA, 25 bp, Homo sapien
tctcttaaagggacacagtgaccct

SEQ ID NO: 1644675 - DNA, 25 bp, Homo sapien
cacattgatagggtcctgtttcatt

SEQ ID NO: 1644676 - DNA, 25 bp, Homo sapien
gacactgggtagaatgagtatcctg

SEQ ID NO: 1644677 - DNA, 25 bp, Homo sapien
ctgtttcatttctcgtgacactggg

SEQ ID NO: 1644678 - DNA, 25 bp, Homo sapien
tatcggtcccgtatttcacattgat

SEQ ID NO: 1644679 - DNA, 25 bp, Homo sapien
tagccaccaaatgtaggtgtagttc

SEQ ID NO: 1644680 - DNA, 25 bp, Homo sapien
tctcactcttaggttcacaggtgaa

SEQ ID NO: 1644681 - DNA, 25 bp, Homo sapien
gaaggctaagacatccttattctcc

SEQ ID NO: 1644682 - DNA, 25 bp, Homo sapien
tttaagttgttgatggtgatgtagg

SEQ ID NO: 1644683 - DNA, 25 bp, Homo sapien
acatagagcagagtgcaaggaatga

SEQ ID NO: 1644684 - DNA, 25 bp, Homo sapien
ttgaaccagtgacctctaaacatag

SEQ ID NO: 1644685 - DNA, 25 bp, Homo sapien
catagagcagagtgcaaggaatgat

SEQ ID NO: 1644686 - DNA, 25 bp, Homo sapien
ccagtgacctctaaacatagagcag

SEQ ID NO: 1644687 - DNA, 25 bp, Homo sapien
tggacagctgcaacctgtgagtcac

SEQ ID NO: 1644688 - DNA, 25 bp, Homo sapien
cccctttgtaccagaagtagccagg

SEQ ID NO: 1644689 - DNA, 25 bp, Homo sapien
aatgtcgaatttcttctctagtctc

SEQ ID NO: 1644690 - DNA, 25 bp, Homo sapien
gtaggttcctgcatccttccgggtg

SEQ ID NO: 1644691 - DNA, 25 bp, Homo sapien
tttaccatcaactatatacgatata

SEQ ID NO: 1644692 - DNA, 25 bp, Homo sapien
gctgcagactcctgtagatgtgaga

SEQ ID NO: 1644693 - DNA, 25 bp, Homo sapien
acaggctgcagactcctgtagatgt

SEQ ID NO: 1644694 - DNA, 25 bp, Homo sapien
actcctgtagatgtgagagttctca

SEQ ID NO: 1644695 - DNA, 25 bp, Homo sapien
cagactcctgtagatgtgagagttc

SEQ ID NO: 1644696 - DNA, 25 bp, Homo sapien
gcaggagccccttccaggtgatgcg

SEQ ID NO: 1644697 - DNA, 25 bp, Homo sapien
tgagcaggagccccttccaggtgat

SEQ ID NO: 1644698 - DNA, 25 bp, Homo sapien
tgtgagcaggagccccttccaggtg

SEQ ID NO: 1644699 - DNA, 25 bp, Homo sapien
agcaggagccccttccaggtgatgc

SEQ ID NO: 1644700 - DNA, 25 bp, Homo sapien
tgtgcaggaaggggctgggaggggc

SEQ ID NO: 1644701 - DNA, 25 bp, Homo sapien
tgcaggaaggggctgggaggggccc

SEQ ID NO: 1644702 - DNA, 25 bp, Homo sapien
tgtgtgcaggaaggggctgggaggg

SEQ ID NO: 1644703 - DNA, 25 bp, Homo sapien
ctgtgtgcaggaaggggctgggagg

SEQ ID NO: 1644704 - DNA, 25 bp, Homo sapien
cagaagctgtctgagcacggctgtc

SEQ ID NO: 1644705 - DNA, 25 bp, Homo sapien
gctgtctgagcacggctgtcagctg

SEQ ID NO: 1644706 - DNA, 25 bp, Homo sapien
ggatccagaagctgtctgagcacgg

SEQ ID NO: 1644707 - DNA, 25 bp, Homo sapien
gatgagcctgggatccagaagctgt

SEQ ID NO: 1644708 - DNA, 25 bp, Homo sapien
attttcacgttgtggttgtattgct

SEQ ID NO: 1644709 - DNA, 25 bp, Homo sapien
aagaggtgtctgctaagtcaatgac

SEQ ID NO: 1644710 - DNA, 25 bp, Homo sapien
ttagctgcagctgaaagaggtgtct

SEQ ID NO: 1644711 - DNA, 25 bp, Homo sapien
gaggtgtctgctaagtcaatgacac

SEQ ID NO: 1644712 - DNA, 25 bp, Homo sapien
gaaagaggtgtctgctaagtcaatg

SEQ ID NO: 1644713 - DNA, 25 bp, Homo sapien
tatctttcatgaacatatgggttgg

SEQ ID NO: 1644714 - DNA, 25 bp, Homo sapien
tctttcatgaacatatgggttggtc

SEQ ID NO: 1644715 - DNA, 25 bp, Homo sapien
ttctgtatctttcatgaacatatgg

SEQ ID NO: 1644716 - DNA, 25 bp, Homo sapien
tgtatctttcatgaacatatgggtt

SEQ ID NO: 1644717 - DNA, 25 bp, Homo sapien
gaccgtggctctacctgaaaggcca

SEQ ID NO: 1644718 - DNA, 25 bp, Homo sapien
ccaggagaacttccttgtactgaag

SEQ ID NO: 1644719 - DNA, 25 bp, Homo sapien
tcaagatgctgaccgtggctctacc

SEQ ID NO: 1644720 - DNA, 25 bp, Homo sapien
cactggccagtacttcaatcaagat

SEQ ID NO: 1644721 - DNA, 25 bp, Homo sapien
gaggttgaggtttgaccctgcatag

SEQ ID NO: 1644722 - DNA, 25 bp, Homo sapien
ggagaggttgaggtttgaccctgca

SEQ ID NO: 1644723 - DNA, 25 bp, Homo sapien
gagaggttgaggtttgaccctgcat

SEQ ID NO: 1644724 - DNA, 25 bp, Homo sapien
ggttgaggtttgaccctgcatagta

SEQ ID NO: 1644725 - DNA, 25 bp, Homo sapien
gtaatgttatcagagggaatgggaa

SEQ ID NO: 1644726 - DNA, 25 bp, Homo sapien
gcaaagagaataaagccacaggtaa

SEQ ID NO: 1644727 - DNA, 25 bp, Homo sapien
cacaggtaatgttatcagagggaat

SEQ ID NO: 1644728 - DNA, 25 bp, Homo sapien
aataaagccacaggtaatgttatca

SEQ ID NO: 1644729 - DNA, 25 bp, Homo sapien
tggtctgtgaaagggacacaatgtt

SEQ ID NO: 1644730 - DNA, 25 bp, Homo sapien
ggtctgtgaaagggacacaatgttc

SEQ ID NO: 1644731 - DNA, 25 bp, Homo sapien
ctggtctgtgaaagggacacaatgt

SEQ ID NO: 1644732 - DNA, 25 bp, Homo sapien
gggtaagtgtcttcatacttggacc

SEQ ID NO: 1644733 - DNA, 25 bp, Homo sapien
aggcctggcctcgtgttatgtggat

SEQ ID NO: 1644734 - DNA, 25 bp, Homo sapien
tcatacttggacctgagagggactg

SEQ ID NO: 1644735 - DNA, 25 bp, Homo sapien
gacagaaagtcatggccagcttggg

SEQ ID NO: 1644736 - DNA, 25 bp, Homo sapien
gagaacatccaggtgactgggtcac

SEQ ID NO: 1644737 - DNA, 25 bp, Homo sapien
tgactgggtcactgtggctggtact

SEQ ID NO: 1644738 - DNA, 25 bp, Homo sapien
agagaacatccaggtgactgggtca

SEQ ID NO: 1644739 - DNA, 25 bp, Homo sapien
ctgggtcactgtggctggtactcac

SEQ ID NO: 1644740 - DNA, 25 bp, Homo sapien
cctttgacattcatagagtcctgtg

SEQ ID NO: 1644741 - DNA, 25 bp, Homo sapien
cattcatagagtcctgtgtcactcc

SEQ ID NO: 1644742 - DNA, 25 bp, Homo sapien
tcttcctttgacattcatagagtcc

SEQ ID NO: 1644743 - DNA, 25 bp, Homo sapien
gacattcatagagtcctgtgtcact

SEQ ID NO: 1644744 - DNA, 25 bp, Homo sapien
tgtgagtctatgactatttacccac

SEQ ID NO: 1644745 - DNA, 25 bp, Homo sapien
gacatctttagcctgggactgagtg

SEQ ID NO: 1644746 - DNA, 25 bp, Homo sapien
tgagtgtgagtctatgactatttac

SEQ ID NO: 1644747 - DNA, 25 bp, Homo sapien
cctgttatcattggacatctttagc

SEQ ID NO: 1644748 - DNA, 25 bp, Homo sapien
cacatgtagattgtgccatgagtct

SEQ ID NO: 1644749 - DNA, 25 bp, Homo sapien
gattgtgccatgagtctcaggttca

SEQ ID NO: 1644750 - DNA, 25 bp, Homo sapien
gctggtgacatagggcttgggcaga

SEQ ID NO: 1644751 - DNA, 25 bp, Homo sapien
cctccgcggggttgctggtgacata

SEQ ID NO: 1644752 - DNA, 25 bp, Homo sapien
tgcagataacagagaagattcccct

SEQ ID NO: 1644753 - DNA, 25 bp, Homo sapien
taacagagaagattcccctgtgtgg

SEQ ID NO: 1644754 - DNA, 25 bp, Homo sapien
agattcccctgtgtggcaccattga

SEQ ID NO: 1644755 - DNA, 25 bp, Homo sapien
gcaccattgatttctccacgagcat

SEQ ID NO: 1644756 - DNA, 25 bp, Homo sapien
caactctggcctcactgggctgtgc

SEQ ID NO: 1644757 - DNA, 25 bp, Homo sapien
gtgcctttcctcctgagccctgagc

SEQ ID NO: 1644758 - DNA, 25 bp, Homo sapien
ctgtgcctttcctcctgagccctga

SEQ ID NO: 1644759 - DNA, 25 bp, Homo sapien
tctggcctcactgggctgtgccttt

SEQ ID NO: 1644760 - DNA, 25 bp, Homo sapien
tttgttaagcttggcctaggttggc

SEQ ID NO: 1644761 - DNA, 25 bp, Homo sapien
taaagacagtaactccagccagtac

SEQ ID NO: 1644762 - DNA, 25 bp, Homo sapien
tggtataatcttgaactgctcagaa

SEQ ID NO: 1644763 - DNA, 25 bp, Homo sapien
ttttggaagtccatagagagtccag

SEQ ID NO: 1644764 - DNA, 25 bp, Homo sapien
tggtgtcatcatgaggacacaggtg

SEQ ID NO: 1644765 - DNA, 25 bp, Homo sapien
gtgtcatcatgaggacacaggtgtg

SEQ ID NO: 1644766 - DNA, 25 bp, Homo sapien
caatggtgtcatcatgaggacacag

SEQ ID NO: 1644767 - DNA, 25 bp, Homo sapien
gcaaacccatcagacagcacccacc

SEQ ID NO: 1644768 - DNA, 25 bp, Homo sapien
tcaaaccgggccctgatgtagttct

SEQ ID NO: 1644769 - DNA, 25 bp, Homo sapien
catcatacagctggtcaatacttgc

SEQ ID NO: 1644770 - DNA, 25 bp, Homo sapien
gagcttctctataaggatcccaggg

SEQ ID NO: 1644771 - DNA, 25 bp, Homo sapien
aatacttgctcccagtcagtcctgc

SEQ ID NO: 1644772 - DNA, 25 bp, Homo sapien
gtttcccccatcagattgtcctttc

SEQ ID NO: 1644773 - DNA, 25 bp, Homo sapien
cagggtgatgggctgagactgatct

SEQ ID NO: 1644774 - DNA, 25 bp, Homo sapien
cctgctgagtttcccccatcagatt

SEQ ID NO: 1644775 - DNA, 25 bp, Homo sapien
ctgagtttcccccatcagattgtcc

SEQ ID NO: 1644776 - DNA, 25 bp, Homo sapien
caacacccagaggtcatgaattcct

SEQ ID NO: 1644777 - DNA, 25 bp, Homo sapien
acacccagaggtcatgaattcctca

SEQ ID NO: 1644778 - DNA, 25 bp, Homo sapien
ccccaacacccagaggtcatgaatt

SEQ ID NO: 1644779 - DNA, 25 bp, Homo sapien
cacccagaggtcatgaattcctcac

SEQ ID NO: 1644780 - DNA, 25 bp, Homo sapien
tcctgggtgactttccgggtcagca

SEQ ID NO: 1644781 - DNA, 25 bp, Homo sapien
ggtcctgagctagatctttgaatgc

SEQ ID NO: 1644782 - DNA, 25 bp, Homo sapien
ggcaaatattacctcctgactactg

SEQ ID NO: 1644783 - DNA, 25 bp, Homo sapien
tgactactgtatgcaggtcctgagc

SEQ ID NO: 1644784 - DNA, 25 bp, Homo sapien
tggcttcagtagtgactctggcagt

SEQ ID NO: 1644785 - DNA, 25 bp, Homo sapien
gccaattgtagcccatcactttcag

SEQ ID NO: 1644786 - DNA, 25 bp, Homo sapien
tcttcctttgtgccaattgtagccc

SEQ ID NO: 1644787 - DNA, 25 bp, Homo sapien
aacatgagcttctgccagaggatgt

SEQ ID NO: 1644788 - DNA, 25 bp, Homo sapien
tgtgaacatgagcttctgccagagg

SEQ ID NO: 1644789 - DNA, 25 bp, Homo sapien
tgaacatgagcttctgccagaggat

SEQ ID NO: 1644790 - DNA, 25 bp, Homo sapien
ctgtgaacatgagcttctgccagag

SEQ ID NO: 1644791 - DNA, 25 bp, Homo sapien
agggactgataggggggcaccatgg

SEQ ID NO: 1644792 - DNA, 25 bp, Homo sapien
ttccaccttctatgctgagcctctt

SEQ ID NO: 1644793 - DNA, 25 bp, Homo sapien
agatgagcctgggatccggaaagtt

SEQ ID NO: 1644794 - DNA, 25 bp, Homo sapien
cctgggatccggaaagtttctgagc

SEQ ID NO: 1644795 - DNA, 25 bp, Homo sapien
caagagggtattttccttcgtggag

SEQ ID NO: 1644796 - DNA, 25 bp, Homo sapien
tcgatgacccggttgtccaagaggg

SEQ ID NO: 1644797 - DNA, 25 bp, Homo sapien
tacagcttccatggttagacattcg

SEQ ID NO: 1644798 - DNA, 25 bp, Homo sapien
tatgttgaactttgctacagcttcc

SEQ ID NO: 1644799 - DNA, 25 bp, Homo sapien
tatacatcccttggggttcctcttg

SEQ ID NO: 1644800 - DNA, 25 bp, Homo sapien
gcccttcttgctatacatcccttgg

SEQ ID NO: 1644801 - DNA, 25 bp, Homo sapien
cagccaggatgggcttagcccttct

SEQ ID NO: 1644802 - DNA, 25 bp, Homo sapien
gggcttagcccttcttgctatacat

SEQ ID NO: 1644803 - DNA, 25 bp, Homo sapien
tagaagaagaacaggcagtggctgg

SEQ ID NO: 1644804 - DNA, 25 bp, Homo sapien
tgtagaagaagaacaggcagtggct

SEQ ID NO: 1644805 - DNA, 25 bp, Homo sapien
aagaagaacaggcagtggctggaga

SEQ ID NO: 1644806 - DNA, 25 bp, Homo sapien
ctgtgtagaagaagaacaggcagtg

SEQ ID NO: 1644807 - DNA, 25 bp, Homo sapien
ctgcgtgaagggactttgctcacac

SEQ ID NO: 1644808 - DNA, 25 bp, Homo sapien
gagagggtgtgtgggggtgggccat

SEQ ID NO: 1644809 - DNA, 25 bp, Homo sapien
ctgagagggtgtgtgggggtgggcc

SEQ ID NO: 1644810 - DNA, 25 bp, Homo sapien
gagggtgtgtgggggtgggccatgt

SEQ ID NO: 1644811 - DNA, 25 bp, Homo sapien
agggtgtgtgggggtgggccatgtt

SEQ ID NO: 1644812 - DNA, 25 bp, Homo sapien
gtgcctgacattgaggctgccccat

SEQ ID NO: 1644813 - DNA, 25 bp, Homo sapien
ggtgcctgacattgaggctgcccca

SEQ ID NO: 1644814 - DNA, 25 bp, Homo sapien
ctggtgcctgacattgaggctgccc

SEQ ID NO: 1644815 - DNA, 25 bp, Homo sapien
tggtgcctgacattgaggctgcccc

SEQ ID NO: 1644816 - DNA, 25 bp, Homo sapien
cctgctggagctcttttcttggggt

SEQ ID NO: 1644817 - DNA, 25 bp, Homo sapien
ggagctcttttcttggggtctctgg

SEQ ID NO: 1644818 - DNA, 25 bp, Homo sapien
ctggttgagcccctgctggagctct

SEQ ID NO: 1644819 - DNA, 25 bp, Homo sapien
cccctgctggagctcttttcttggg

SEQ ID NO: 1644820 - DNA, 25 bp, Homo sapien
ccaggcagctgtccttgcgttgctg

SEQ ID NO: 1644821 - DNA, 25 bp, Homo sapien
agctgtccttgcgttgctgctctct

SEQ ID NO: 1644822 - DNA, 25 bp, Homo sapien
tgtccttgcgttgctgctctctcac

SEQ ID NO: 1644823 - DNA, 25 bp, Homo sapien
ggcagctgtccttgcgttgctgctc

SEQ ID NO: 1644824 - DNA, 25 bp, Homo sapien
agagtgttcgggttgggcaccacaa

SEQ ID NO: 1644825 - DNA, 25 bp, Homo sapien
ttgggagattaatcagacatgatca

SEQ ID NO: 1644826 - DNA, 25 bp, Homo sapien
cttgcggcaggacagcccaggtaat

SEQ ID NO: 1644827 - DNA, 25 bp, Homo sapien
aaagcatctttacgatcaagcacgg

SEQ ID NO: 1644828 - DNA, 25 bp, Homo sapien
ctggttgctatggttcaggcgtttg

SEQ ID NO: 1644829 - DNA, 25 bp, Homo sapien
agccttgggcccagagttccttggg

SEQ ID NO: 1644830 - DNA, 25 bp, Homo sapien
ggacaggcgggagatttgggacgag

SEQ ID NO: 1644831 - DNA, 25 bp, Homo sapien
tggaggaacgcctggttgctatggt

SEQ ID NO: 1644832 - DNA, 25 bp, Homo sapien
tacctctttccagcattaccagtaa

SEQ ID NO: 1644833 - DNA, 25 bp, Homo sapien
tctttccagcattaccagtaaagtc

SEQ ID NO: 1644834 - DNA, 25 bp, Homo sapien
ccagcattaccagtaaagtccaaag

SEQ ID NO: 1644835 - DNA, 25 bp, Homo sapien
cattacctctttccagcattaccag

SEQ ID NO: 1644836 - DNA, 25 bp, Homo sapien
cctgccaggggatgcatcctctgcg

SEQ ID NO: 1644837 - DNA, 25 bp, Homo sapien
ctgccaggggatgcatcctctgcgg

SEQ ID NO: 1644838 - DNA, 25 bp, Homo sapien
aggggatgcatcctctgcggggagg

SEQ ID NO: 1644839 - DNA, 25 bp, Homo sapien
ggatgcatcctctgcggggaggggc

SEQ ID NO: 1644840 - DNA, 25 bp, Homo sapien
gtctgagtcagacacatccaggtgg

SEQ ID NO: 1644841 - DNA, 25 bp, Homo sapien
ggtctccatcaacttagaagcttat

SEQ ID NO: 1644842 - DNA, 25 bp, Homo sapien
aagaagtgaaccattgctttcaatg

SEQ ID NO: 1644843 - DNA, 25 bp, Homo sapien
gcaatcatagaaacagtctgtggtc

SEQ ID NO: 1644844 - DNA, 25 bp, Homo sapien
ttttcaatccgactcttcttctctc

SEQ ID NO: 1644845 - DNA, 25 bp, Homo sapien
gcatcttgggttccccttatgaaaa

SEQ ID NO: 1644846 - DNA, 25 bp, Homo sapien
tttcccctgaatttcctgctcagct

SEQ ID NO: 1644847 - DNA, 25 bp, Homo sapien
tagaagacgaacacctgtcccaagt

SEQ ID NO: 1644848 - DNA, 25 bp, Homo sapien
gccgcagatccaatcccatctgtat

SEQ ID NO: 1644849 - DNA, 25 bp, Homo sapien
ctgcagctttatatgccttgagaaa

SEQ ID NO: 1644850 - DNA, 25 bp, Homo sapien
tatggggaatggagatcccagctct

SEQ ID NO: 1644851 - DNA, 25 bp, Homo sapien
tccagcatttgttttaggtgccgca

SEQ ID NO: 1644852 - DNA, 25 bp, Homo sapien
aacagcaacactggggagagcctgg

SEQ ID NO: 1644853 - DNA, 25 bp, Homo sapien
ctaacagcaacactggggagagcct

SEQ ID NO: 1644854 - DNA, 25 bp, Homo sapien
ggagagcctggagcatccggacttg

SEQ ID NO: 1644855 - DNA, 25 bp, Homo sapien
agagcctggagcatccggacttgcc

SEQ ID NO: 1644856 - DNA, 25 bp, Homo sapien
gagtggctgcatgtatctgataata

SEQ ID NO: 1644857 - DNA, 25 bp, Homo sapien
aggagtggctgcatgtatctgataa

SEQ ID NO: 1644858 - DNA, 25 bp, Homo sapien
ggagtggctgcatgtatctgataat

SEQ ID NO: 1644859 - DNA, 25 bp, Homo sapien
gtggctgcatgtatctgataataca

SEQ ID NO: 1644860 - DNA, 25 bp, Homo sapien
caattctacttctggtgtattctga

SEQ ID NO: 1644861 - DNA, 25 bp, Homo sapien
taaacaagccaaatgatatggcttt

SEQ ID NO: 1644862 - DNA, 25 bp, Homo sapien
tctggtgtattctgaaaagaactga

SEQ ID NO: 1644863 - DNA, 25 bp, Homo sapien
gccaaatgatatggctttcctctgt

SEQ ID NO: 1644864 - DNA, 25 bp, Homo sapien
gacaggaagaataagcgcggctccc

SEQ ID NO: 1644865 - DNA, 25 bp, Homo sapien
gaataagcgcggctccctcccgtga

SEQ ID NO: 1644866 - DNA, 25 bp, Homo sapien
aatctcttcctagttctgatctgca

SEQ ID NO: 1644867 - DNA, 25 bp, Homo sapien
aaaggagacgtcactctgcagtcgg

SEQ ID NO: 1644868 - DNA, 25 bp, Homo sapien
ccaaatacgtttggctggagcaccc

SEQ ID NO: 1644869 - DNA, 25 bp, Homo sapien
gtttggctggagcaccctgaagtct

SEQ ID NO: 1644870 - DNA, 25 bp, Homo sapien
catggtgatgcccaaatacgtttgg

SEQ ID NO: 1644871 - DNA, 25 bp, Homo sapien
ttcccctcccaggtcatggtgatgc

SEQ ID NO: 1644872 - DNA, 25 bp, Homo sapien
ccaccccccaagtgagacactccag

SEQ ID NO: 1644873 - DNA, 25 bp, Homo sapien
ttagcaggaagggcaaaccgctccc

SEQ ID NO: 1644874 - DNA, 25 bp, Homo sapien
agcaggaagggcaaaccgctcccca

SEQ ID NO: 1644875 - DNA, 25 bp, Homo sapien
ccccaagtgagacactccaggcccc

SEQ ID NO: 1644876 - DNA, 25 bp, Homo sapien
aggaggcggctcatcacccttctca

SEQ ID NO: 1644877 - DNA, 25 bp, Homo sapien
caggaggcggctcatcacccttctc

SEQ ID NO: 1644878 - DNA, 25 bp, Homo sapien
gcaggaggcggctcatcacccttct

SEQ ID NO: 1644879 - DNA, 25 bp, Homo sapien
ccaatttgtctggtgtggttcaaca

SEQ ID NO: 1644880 - DNA, 25 bp, Homo sapien
aatgctcattctggtggtcagccca

SEQ ID NO: 1644881 - DNA, 25 bp, Homo sapien
agctggaaggttgggccacacagcc

SEQ ID NO: 1644882 - DNA, 25 bp, Homo sapien
ggccacacagccctgaatgctcatt

SEQ ID NO: 1644883 - DNA, 25 bp, Homo sapien
gcaggtcattcggggggagccactt

SEQ ID NO: 1644884 - DNA, 25 bp, Homo sapien
aggtcattcggggggagccacttga

SEQ ID NO: 1644885 - DNA, 25 bp, Homo sapien
ctggggcaggtcattcggggggagc

SEQ ID NO: 1644886 - DNA, 25 bp, Homo sapien
ataacaatgagtggcgcccctgggg

SEQ ID NO: 1644887 - DNA, 25 bp, Homo sapien
cactattgcacaggtccgaggagca

SEQ ID NO: 1644888 - DNA, 25 bp, Homo sapien
ttgcacaggtccgaggagcagaagt

SEQ ID NO: 1644889 - DNA, 25 bp, Homo sapien
ggagggagttcagcagaacgctgct

SEQ ID NO: 1644890 - DNA, 25 bp, Homo sapien
ctgctggcactattgcacaggtccg

SEQ ID NO: 1644891 - DNA, 25 bp, Homo sapien
ctacatctatgagcagcagcatctc

SEQ ID NO: 1644892 - DNA, 25 bp, Homo sapien
gtctcggtattagatgtggcccaat

SEQ ID NO: 1644893 - DNA, 25 bp, Homo sapien
cacgtctcggtattagatgtggccc

SEQ ID NO: 1644894 - DNA, 25 bp, Homo sapien
aatcagtgggttctttactcaagtt

SEQ ID NO: 1644895 - DNA, 25 bp, Homo sapien
cgcacgtctcggtattagatgtggc

SEQ ID NO: 1644896 - DNA, 25 bp, Homo sapien
gatgaatctctatgaacagcactga

SEQ ID NO: 1644897 - DNA, 25 bp, Homo sapien
tgctcactgtctgctaaactgctga

SEQ ID NO: 1644898 - DNA, 25 bp, Homo sapien
cactgctgcggcttcttataagcgg

SEQ ID NO: 1644899 - DNA, 25 bp, Homo sapien
gcacttggtccccaacgtcttgttg

SEQ ID NO: 1644900 - DNA, 25 bp, Homo sapien
atacccacgggcccaatttcctgtg

SEQ ID NO: 1644901 - DNA, 25 bp, Homo sapien
ctttcatatcgcagttctcagtcat

SEQ ID NO: 1644902 - DNA, 25 bp, Homo sapien
tcccattgagcaggttgcaaactgg

SEQ ID NO: 1644903 - DNA, 25 bp, Homo sapien
ttcctgtgtcccattgagcaggttg

SEQ ID NO: 1644904 - DNA, 25 bp, Homo sapien
cctgaggaggccatcataacagtgt

SEQ ID NO: 1644905 - DNA, 25 bp, Homo sapien
aggccatcataacagtgtgtggtcc

SEQ ID NO: 1644906 - DNA, 25 bp, Homo sapien
ccttggggcagatctcttctgttgt

SEQ ID NO: 1644907 - DNA, 25 bp, Homo sapien
tcccctccagacagccttccataga

SEQ ID NO: 1644908 - DNA, 25 bp, Homo sapien
tcctccatgaagatactcttgaaaa

SEQ ID NO: 1644909 - DNA, 25 bp, Homo sapien
caaagccagattctggagcacctgg

SEQ ID NO: 1644910 - DNA, 25 bp, Homo sapien
gaagatactcttgaaaacacactct

SEQ ID NO: 1644911 - DNA, 25 bp, Homo sapien
taaagactcccctgttgagtacaaa

SEQ ID NO: 1644912 - DNA, 25 bp, Homo sapien
tctaacattgcttgtactgagatca

SEQ ID NO: 1644913 - DNA, 25 bp, Homo sapien
taacattgcttgtactgagatcagc

SEQ ID NO: 1644914 - DNA, 25 bp, Homo sapien
tctctaacattgcttgtactgagat

SEQ ID NO: 1644915 - DNA, 25 bp, Homo sapien
ctttattgctaaacctgccaggaac

SEQ ID NO: 1644916 - DNA, 25 bp, Homo sapien
tgatctttttcaggcctcctccggc

SEQ ID NO: 1644917 - DNA, 25 bp, Homo sapien
aattgccaatccaagcctcaaaatg

SEQ ID NO: 1644918 - DNA, 25 bp, Homo sapien
tgacacatgttctataggccctcct

SEQ ID NO: 1644919 - DNA, 25 bp, Homo sapien
tataggccctcctcttggaaactta

SEQ ID NO: 1644920 - DNA, 25 bp, Homo sapien
caatccaagcctcaaaatgcaagtt

SEQ ID NO: 1644921 - DNA, 25 bp, Homo sapien
cacacagacataaggcacggtccct

SEQ ID NO: 1644922 - DNA, 25 bp, Homo sapien
caaggatgagaaggatacaggagct

SEQ ID NO: 1644923 - DNA, 25 bp, Homo sapien
ctcaaaaagctagaacacccctggc

SEQ ID NO: 1644924 - DNA, 25 bp, Homo sapien
taacatcacaagaggacaagcggag

SEQ ID NO: 1644925 - DNA, 25 bp, Homo sapien
taggtgagagggaaatttccaggtg

SEQ ID NO: 1644926 - DNA, 25 bp, Homo sapien
caaagccgcaaaccagcgcagcaga

SEQ ID NO: 1644927 - DNA, 25 bp, Homo sapien
gcaaaccagcgcagcagaagctggg

SEQ ID NO: 1644928 - DNA, 25 bp, Homo sapien
cagtggtgggaacaggaagtgatga

SEQ ID NO: 1644929 - DNA, 25 bp, Homo sapien
gccctgaattgctgcggtcctggtg

SEQ ID NO: 1644930 - DNA, 25 bp, Homo sapien
caacagaagggctgccaatccagct

SEQ ID NO: 1644931 - DNA, 25 bp, Homo sapien
ctgtctcggagtctgactggttggc

SEQ ID NO: 1644932 - DNA, 25 bp, Homo sapien
tcccgggaggcctcgtgttctactc

SEQ ID NO: 1644933 - DNA, 25 bp, Homo sapien
tccatcccgagtgcagaattcatcc

SEQ ID NO: 1644934 - DNA, 25 bp, Homo sapien
ggtcagagttacagcgggacccctg

SEQ ID NO: 1644935 - DNA, 25 bp, Homo sapien
acacagccccggacaggcaaggaca

SEQ ID NO: 1644936 - DNA, 25 bp, Homo sapien
aggagccactgagcgtgaaccctgg

SEQ ID NO: 1644937 - DNA, 25 bp, Homo sapien
gatgccctacgatacaagcacctag

SEQ ID NO: 1644938 - DNA, 25 bp, Homo sapien
agaactagagattccccgcagtgcc

SEQ ID NO: 1644939 - DNA, 25 bp, Homo sapien
taaaaggaaccagtcgtggcggtgc

SEQ ID NO: 1644940 - DNA, 25 bp, Homo sapien
ggtgcttcagaagggctaccacaac

SEQ ID NO: 1644941 - DNA, 25 bp, Homo sapien
gaagcagcccttgtagacatgatcg

SEQ ID NO: 1644942 - DNA, 25 bp, Homo sapien
tgtagcactccacgccgttgggcgg

SEQ ID NO: 1644943 - DNA, 25 bp, Homo sapien
tcaaggtgacgttgccgtcgaagca

SEQ ID NO: 1644944 - DNA, 25 bp, Homo sapien
gacatgatcgctggcgttgtagcag

SEQ ID NO: 1644945 - DNA, 25 bp, Homo sapien
tcgcggcgcctacagccagaaagtc

SEQ ID NO: 1644946 - DNA, 25 bp, Homo sapien
cacctctatcttggcaggcccgaat

SEQ ID NO: 1644947 - DNA, 25 bp, Homo sapien
atcgatgaccccgcctactagtagc

SEQ ID NO: 1644948 - DNA, 25 bp, Homo sapien
tcgggaaccgcagctcgtcctctag

SEQ ID NO: 1644949 - DNA, 25 bp, Homo sapien
cactgccagcgagaattgtccgtgg

SEQ ID NO: 1644950 - DNA, 25 bp, Homo sapien
cattgctgcagctggatgaacgcca

SEQ ID NO: 1644951 - DNA, 25 bp, Homo sapien
tgaacgccagaagcccgtgaagatc

SEQ ID NO: 1644952 - DNA, 25 bp, Homo sapien
gagcttggcgttgcagcgatcctga

SEQ ID NO: 1644953 - DNA, 25 bp, Homo sapien
tgcacgcagctgtagcactccaggg

SEQ ID NO: 1644954 - DNA, 25 bp, Homo sapien
gggagcatccgtcatctgctttctg

SEQ ID NO: 1644955 - DNA, 25 bp, Homo sapien
tcttcatcttgttcggggagcatcc

SEQ ID NO: 1644956 - DNA, 25 bp, Homo sapien
cccggcgcgcacttcactgtcttca

SEQ ID NO: 1644957 - DNA, 25 bp, Homo sapien
tgggcacctgctttcctggcggggt

SEQ ID NO: 1644958 - DNA, 25 bp, Homo sapien
cacctgctttcctggcggggtccat

SEQ ID NO: 1644959 - DNA, 25 bp, Homo sapien
ctgggcacctgctttcctggcgggg

SEQ ID NO: 1644960 - DNA, 25 bp, Homo sapien
ggcacctgctttcctggcggggtcc

SEQ ID NO: 1644961 - DNA, 25 bp, Homo sapien
ggctccgtcctgctcccttggcgtc

SEQ ID NO: 1644962 - DNA, 25 bp, Homo sapien
ctccgtcctgctcccttggcgtccc

SEQ ID NO: 1644963 - DNA, 25 bp, Homo sapien
tccgtcctgctcccttggcgtcccc

SEQ ID NO: 1644964 - DNA, 25 bp, Homo sapien
gctccgtcctgctcccttggcgtcc

SEQ ID NO: 1644965 - DNA, 25 bp, Homo sapien
agctcgggccctcttacctgagccc

SEQ ID NO: 1644966 - DNA, 25 bp, Homo sapien
gctcgggccctcttacctgagccca

SEQ ID NO: 1644967 - DNA, 25 bp, Homo sapien
ctcgggccctcttacctgagcccag

SEQ ID NO: 1644968 - DNA, 25 bp, Homo sapien
tggagctcccagtgcataaaggaca

SEQ ID NO: 1644969 - DNA, 25 bp, Homo sapien
cagagggaacaacgtaggcaaaggc

SEQ ID NO: 1644970 - DNA, 25 bp, Homo sapien
cattcctagagagccggctgtggga

SEQ ID NO: 1644971 - DNA, 25 bp, Homo sapien
gacatgctctatggtgctgggaaca

SEQ ID NO: 1644972 - DNA, 25 bp, Homo sapien
taaatagtttcttcccgcccctgca

SEQ ID NO: 1644973 - DNA, 25 bp, Homo sapien
caaagcggtgcgtccaagttttccg

SEQ ID NO: 1644974 - DNA, 25 bp, Homo sapien
cgcctgcggaattcccgggagagtt

SEQ ID NO: 1644975 - DNA, 25 bp, Homo sapien
tttaattcggtatcacaggagcacc

SEQ ID NO: 1644976 - DNA, 25 bp, Homo sapien
ggcgtggttttcgtcagcggcggtc

SEQ ID NO: 1644977 - DNA, 25 bp, Homo sapien
tggttttcgtcagcggcggtcacga

SEQ ID NO: 1644978 - DNA, 25 bp, Homo sapien
cagggggcgtggttttcgtcagcgg

SEQ ID NO: 1644979 - DNA, 25 bp, Homo sapien
tcagggggcgtggttttcgtcagcg

SEQ ID NO: 1644980 - DNA, 25 bp, Homo sapien
taggttttgacgcagaaggtcaggc

SEQ ID NO: 1644981 - DNA, 25 bp, Homo sapien
accatgtagaaaaggcgttcgtagg

SEQ ID NO: 1644982 - DNA, 25 bp, Homo sapien
tcggggctcggagccaccatgtaga

SEQ ID NO: 1644983 - DNA, 25 bp, Homo sapien
gtccatccaaatgcgcatggcttcg

SEQ ID NO: 1644984 - DNA, 25 bp, Homo sapien
acaccggccacagtctgggtgcgaa

SEQ ID NO: 1644985 - DNA, 25 bp, Homo sapien
gtggcactggacaaggtacttaagt

SEQ ID NO: 1644986 - DNA, 25 bp, Homo sapien
taagcagaaagtgagggtaattcag

SEQ ID NO: 1644987 - DNA, 25 bp, Homo sapien
ccttgctacttatagtctgtgtggc

SEQ ID NO: 1644988 - DNA, 25 bp, Homo sapien
tagatgacacctttgagcttggtct

SEQ ID NO: 1644989 - DNA, 25 bp, Homo sapien
taagtggtcataatagacttcctca

SEQ ID NO: 1644990 - DNA, 25 bp, Homo sapien
agtagatgacacctttgagcttggt

SEQ ID NO: 1644991 - DNA, 25 bp, Homo sapien
cttgaaggcacagcgtaagtggtca

SEQ ID NO: 1644992 - DNA, 25 bp, Homo sapien
cgggcttggcggtcaaagcagaacc

SEQ ID NO: 1644993 - DNA, 25 bp, Homo sapien
gaaccatcgcttcctccaggtcttg

SEQ ID NO: 1644994 - DNA, 25 bp, Homo sapien
gcatagtaggccaagcggcgggctt

SEQ ID NO: 1644995 - DNA, 25 bp, Homo sapien
tcttcaccaggggtccacggcagca

SEQ ID NO: 1644996 - DNA, 25 bp, Homo sapien
tgccggagatccaagattcgcgggc

SEQ ID NO: 1644997 - DNA, 25 bp, Homo sapien
ctgccggagatccaagattcgcggg

SEQ ID NO: 1644998 - DNA, 25 bp, Homo sapien
tcagctccttggcacttcatggcaa

SEQ ID NO: 1644999 - DNA, 25 bp, Homo sapien
gatgacataatgcacccgaggtcac

SEQ ID NO: 1645000 - DNA, 25 bp, Homo sapien
ccttaggcctaagaattcaagggca

SEQ ID NO: 1645001 - DNA, 25 bp, Homo sapien
tctgacaaatgcaacggctacgtgg

SEQ ID NO: 1645002 - DNA, 25 bp, Homo sapien
tgaccatcatccggtcatgggaaca

SEQ ID NO: 1645003 - DNA, 25 bp, Homo sapien
gatgaccatcatccggtcatgggaa

SEQ ID NO: 1645004 - DNA, 25 bp, Homo sapien
accatcatccggtcatgggaacagg

SEQ ID NO: 1645005 - DNA, 25 bp, Homo sapien
agatgaccatcatccggtcatggga

SEQ ID NO: 1645006 - DNA, 25 bp, Homo sapien
cgtgatggcaggaacagcagggcct

SEQ ID NO: 1645007 - DNA, 25 bp, Homo sapien
cagggcctgaggaaccttccgtgcc

SEQ ID NO: 1645008 - DNA, 25 bp, Homo sapien
gaacagcagggcctgaggaaccttc

SEQ ID NO: 1645009 - DNA, 25 bp, Homo sapien
ctgaggaaccttccgtgccccttct

SEQ ID NO: 1645010 - DNA, 25 bp, Homo sapien
ccgggccttgagcagccgctccctc

SEQ ID NO: 1645011 - DNA, 25 bp, Homo sapien
tgagcagccgctccctctccgccat

SEQ ID NO: 1645012 - DNA, 25 bp, Homo sapien
ccttgagcagccgctccctctccgc

SEQ ID NO: 1645013 - DNA, 25 bp, Homo sapien
cgggccttgagcagccgctccctct

SEQ ID NO: 1645014 - DNA, 25 bp, Homo sapien
tgcaggagccgctccatgtgggcaa

SEQ ID NO: 1645015 - DNA, 25 bp, Homo sapien
gcaggagccgctccatgtgggcaat

SEQ ID NO: 1645016 - DNA, 25 bp, Homo sapien
caggagccgctccatgtgggcaatg

SEQ ID NO: 1645017 - DNA, 25 bp, Homo sapien
aggagccgctccatgtgggcaatgt

SEQ ID NO: 1645018 - DNA, 25 bp, Homo sapien
gggtgggttacagtggctgggcctc

SEQ ID NO: 1645019 - DNA, 25 bp, Homo sapien
agacggggtgggttacagtggctgg

SEQ ID NO: 1645020 - DNA, 25 bp, Homo sapien
gcagctggtagagggggtatctgcc

SEQ ID NO: 1645021 - DNA, 25 bp, Homo sapien
tagagggggtatctgccggagtccc

SEQ ID NO: 1645022 - DNA, 25 bp, Homo sapien
ctggtagagggggtatctgccggag

SEQ ID NO: 1645023 - DNA, 25 bp, Homo sapien
cccactgctggcgggagagctgagg

SEQ ID NO: 1645024 - DNA, 25 bp, Homo sapien
tggcctgagcctatccacttctccc

SEQ ID NO: 1645025 - DNA, 25 bp, Homo sapien
gcaggatgagtgctgatgtgggaag

SEQ ID NO: 1645026 - DNA, 25 bp, Homo sapien
cataggtgcgggtttcctccatcct

SEQ ID NO: 1645027 - DNA, 25 bp, Homo sapien
ggatgagtgctgatgtgggaaggaa

SEQ ID NO: 1645028 - DNA, 25 bp, Homo sapien
cagtcctctggaggccaatggagcc

SEQ ID NO: 1645029 - DNA, 25 bp, Homo sapien
cagtacaatggaaggacagaggtcg

SEQ ID NO: 1645030 - DNA, 25 bp, Homo sapien
ttccggggcaggctcccagtcctct

SEQ ID NO: 1645031 - DNA, 25 bp, Homo sapien
gtcggggggatcctctctggctccc

SEQ ID NO: 1645032 - DNA, 25 bp, Homo sapien
ccagtcagcacaaatcaaaacacta

SEQ ID NO: 1645033 - DNA, 25 bp, Homo sapien
aacacaaaaggctcatgagcatagg

SEQ ID NO: 1645034 - DNA, 25 bp, Homo sapien
tgagcataggaaaaaggcttgatct

SEQ ID NO: 1645035 - DNA, 25 bp, Homo sapien
ggcttgatctccaacctaagtcaga

SEQ ID NO: 1645036 - DNA, 25 bp, Homo sapien
aattggtaaccctggtggccctcag

SEQ ID NO: 1645037 - DNA, 25 bp, Homo sapien
gaaagtacatacatgactagctgtg

SEQ ID NO: 1645038 - DNA, 25 bp, Homo sapien
tttaagcgagtacagaacagcatag

SEQ ID NO: 1645039 - DNA, 25 bp, Homo sapien
tggccctcaggaagtgaacagcgta

SEQ ID NO: 1645040 - DNA, 25 bp, Homo sapien
cagtggtgcgaccttagctcaccga

SEQ ID NO: 1645041 - DNA, 25 bp, Homo sapien
agtggtgcgaccttagctcaccgaa

SEQ ID NO: 1645042 - DNA, 25 bp, Homo sapien
gtgcgaccttagctcaccgaaacct

SEQ ID NO: 1645043 - DNA, 25 bp, Homo sapien
tggtgcgaccttagctcaccgaaac

SEQ ID NO: 1645044 - DNA, 25 bp, Homo sapien
caccagcagctggcggtctgtcttc

SEQ ID NO: 1645045 - DNA, 25 bp, Homo sapien
gcggtctgtcttctgggtgaacagc

SEQ ID NO: 1645046 - DNA, 25 bp, Homo sapien
gagcaccagcagctggcggtctgtc

SEQ ID NO: 1645047 - DNA, 25 bp, Homo sapien
gcaccagcagctggcggtctgtctt

SEQ ID NO: 1645048 - DNA, 25 bp, Homo sapien
ccctgaaggcaattgagctcgagca

SEQ ID NO: 1645049 - DNA, 25 bp, Homo sapien
agtccccgccaggtgttccctgaag

SEQ ID NO: 1645050 - DNA, 25 bp, Homo sapien
ggttgggctcagagaagtccccgcc

SEQ ID NO: 1645051 - DNA, 25 bp, Homo sapien
ttgagctcgagcagccggctccgtt

SEQ ID NO: 1645052 - DNA, 25 bp, Homo sapien
gctcttccaggacccggatccggtg

SEQ ID NO: 1645053 - DNA, 25 bp, Homo sapien
tcccccagtgacttgagctgctctt

SEQ ID NO: 1645054 - DNA, 25 bp, Homo sapien
gagctgctcttccaggacccggatc

SEQ ID NO: 1645055 - DNA, 25 bp, Homo sapien
gctgctcttccaggacccggatccg

SEQ ID NO: 1645056 - DNA, 25 bp, Homo sapien
cgcttaagcacaggacgtggaggct

SEQ ID NO: 1645057 - DNA, 25 bp, Homo sapien
ttttcccaagggtctcacaagtcag

SEQ ID NO: 1645058 - DNA, 25 bp, Homo sapien
gagcccggccgagctttctaatcca

SEQ ID NO: 1645059 - DNA, 25 bp, Homo sapien
gacccttgaatgtgaggctcccagg

SEQ ID NO: 1645060 - DNA, 25 bp, Homo sapien
taaggattcagtgaggaaatgctca

SEQ ID NO: 1645061 - DNA, 25 bp, Homo sapien
aaaacgtaatagaacttgcctcata

SEQ ID NO: 1645062 - DNA, 25 bp, Homo sapien
tagaacttgcctcataagtttgttg

SEQ ID NO: 1645063 - DNA, 25 bp, Homo sapien
atgtttcattagtatcagctcttgt

SEQ ID NO: 1645064 - DNA, 25 bp, Homo sapien
agttcctggaccttggggtctggca

SEQ ID NO: 1645065 - DNA, 25 bp, Homo sapien
gtcctcataggcacgttgggccaca

SEQ ID NO: 1645066 - DNA, 25 bp, Homo sapien
tcataggcacgttgggccacatcca

SEQ ID NO: 1645067 - DNA, 25 bp, Homo sapien
cacgttgggccacatccagttgttc

SEQ ID NO: 1645068 - DNA, 25 bp, Homo sapien
ctgcagaagccgctcgcgttggtcc

SEQ ID NO: 1645069 - DNA, 25 bp, Homo sapien
ctctggcgaagaccctctaggcgat

SEQ ID NO: 1645070 - DNA, 25 bp, Homo sapien
tctggctgtgagtcgagctgtccct

SEQ ID NO: 1645071 - DNA, 25 bp, Homo sapien
gtccctgggccttgcggagtctctg

SEQ ID NO: 1645072 - DNA, 25 bp, Homo sapien
taccctaggaagaagagcacatttc

SEQ ID NO: 1645073 - DNA, 25 bp, Homo sapien
gagtatgaagtagccagtaccctag

SEQ ID NO: 1645074 - DNA, 25 bp, Homo sapien
tccaagcaatgagggtgagacctaa

SEQ ID NO: 1645075 - DNA, 25 bp, Homo sapien
taactgacccaagcaatgaccactg

SEQ ID NO: 1645076 - DNA, 25 bp, Homo sapien
ccggggcgcaggtggctaggagcac

SEQ ID NO: 1645077 - DNA, 25 bp, Homo sapien
ggggcgcaggtggctaggagcacac

SEQ ID NO: 1645078 - DNA, 25 bp, Homo sapien
cggggcgcaggtggctaggagcaca

SEQ ID NO: 1645079 - DNA, 25 bp, Homo sapien
tgatgaagacccggtgagccaaaca

SEQ ID NO: 1645080 - DNA, 25 bp, Homo sapien
ctgatgaagacccggtgagccaaac

SEQ ID NO: 1645081 - DNA, 25 bp, Homo sapien
atgaagacccggtgagccaaacaga

SEQ ID NO: 1645082 - DNA, 25 bp, Homo sapien
gatgaagacccggtgagccaaacag

SEQ ID NO: 1645083 - DNA, 25 bp, Homo sapien
tgttcccgctgctggcggccgcgct

SEQ ID NO: 1645084 - DNA, 25 bp, Homo sapien
gttcccgctgctggcggccgcgctg

SEQ ID NO: 1645085 - DNA, 25 bp, Homo sapien
ctgttcccgctgctggcggccgcgc

SEQ ID NO: 1645086 - DNA, 25 bp, Homo sapien
cggcgagcggccactcgctccccag

SEQ ID NO: 1645087 - DNA, 25 bp, Homo sapien
agccagctcaccccgcagcaaggcc

SEQ ID NO: 1645088 - DNA, 25 bp, Homo sapien
cctcctcccggcgagcggccactcg

SEQ ID NO: 1645089 - DNA, 25 bp, Homo sapien
cgagcggccactcgctccccagcca

SEQ ID NO: 1645090 - DNA, 25 bp, Homo sapien
cagggcctgaactaccggattcgaa

SEQ ID NO: 1645091 - DNA, 25 bp, Homo sapien
cgcctaggtccaaggaagaggccca

SEQ ID NO: 1645092 - DNA, 25 bp, Homo sapien
tgatcccacccgaggaaaaagctgg

SEQ ID NO: 1645093 - DNA, 25 bp, Homo sapien
gcggagggcctaaaatctgatccca

SEQ ID NO: 1645094 - DNA, 25 bp, Homo sapien
tcagggccacacgagtcaatgcctc

SEQ ID NO: 1645095 - DNA, 25 bp, Homo sapien
catagctatcggaggcgtagcctcg

SEQ ID NO: 1645096 - DNA, 25 bp, Homo sapien
cccttcccgcgaagaggtggatgcg

SEQ ID NO: 1645097 - DNA, 25 bp, Homo sapien
agctgctgtccttgcaggcgccgcg

SEQ ID NO: 1645098 - DNA, 25 bp, Homo sapien
ggctcgaaggttccgccaggacttc

SEQ ID NO: 1645099 - DNA, 25 bp, Homo sapien
acttcggatgcctcctgttcccggg

SEQ ID NO: 1645100 - DNA, 25 bp, Homo sapien
tggacctccacgtcgcattccggga

SEQ ID NO: 1645101 - DNA, 25 bp, Homo sapien
cgcattccgggaccagcggcggcgg

SEQ ID NO: 1645102 - DNA, 25 bp, Homo sapien
tcttggattcgcttagagcgaccca

SEQ ID NO: 1645103 - DNA, 25 bp, Homo sapien
ggtgtcaggccttgtaccctcccag

SEQ ID NO: 1645104 - DNA, 25 bp, Homo sapien
aactgagcgttacggaggcgtgtcc

SEQ ID NO: 1645105 - DNA, 25 bp, Homo sapien
cggaatttgagtccgggtcgtagca

SEQ ID NO: 1645106 - DNA, 25 bp, Homo sapien
ggcacggccgcttctgcctatgaga

SEQ ID NO: 1645107 - DNA, 25 bp, Homo sapien
aacaggtccaacagctcccgaggga

SEQ ID NO: 1645108 - DNA, 25 bp, Homo sapien
ccaggagtcggagtccttgagattc

SEQ ID NO: 1645109 - DNA, 25 bp, Homo sapien
tgagattccgaagtccaactgccac

SEQ ID NO: 1645110 - DNA, 25 bp, Homo sapien
gagaggtgcagtgtcattgccgccc

SEQ ID NO: 1645111 - DNA, 25 bp, Homo sapien
cctcccacctagtgcattaatagtg

SEQ ID NO: 1645112 - DNA, 25 bp, Homo sapien
tttatttagggagctccagggaatg

SEQ ID NO: 1645113 - DNA, 25 bp, Homo sapien
tagtggatgggagcatctgacagaa

SEQ ID NO: 1645114 - DNA, 25 bp, Homo sapien
ccacagcgcatgttggctggaacag

SEQ ID NO: 1645115 - DNA, 25 bp, Homo sapien
cgcatgttggctggaacagcaaagt

SEQ ID NO: 1645116 - DNA, 25 bp, Homo sapien
gtgtctgcaccccacagcgcatgtt

SEQ ID NO: 1645117 - DNA, 25 bp, Homo sapien
gtctgcaccccacagcgcatgttgg

SEQ ID NO: 1645118 - DNA, 25 bp, Homo sapien
gcctaggtagagttccaggccccac

SEQ ID NO: 1645119 - DNA, 25 bp, Homo sapien
cagaaatcctaggaacctttcctct

SEQ ID NO: 1645120 - DNA, 25 bp, Homo sapien
gtcctgagcccactccttccctcag

SEQ ID NO: 1645121 - DNA, 25 bp, Homo sapien
ggaaactagagttttggtcctgagc

SEQ ID NO: 1645122 - DNA, 25 bp, Homo sapien
gttcaggttgcccatgattttgaca

SEQ ID NO: 1645123 - DNA, 25 bp, Homo sapien
ttttgacaaactcctcacagctgag

SEQ ID NO: 1645124 - DNA, 25 bp, Homo sapien
gagccgagggttcagagtcctctcc

SEQ ID NO: 1645125 - DNA, 25 bp, Homo sapien
acagctgagggtgagccgagggttc

SEQ ID NO: 1645126 - DNA, 25 bp, Homo sapien
agcagggtagatcagacagtctcct

SEQ ID NO: 1645127 - DNA, 25 bp, Homo sapien
catggtaatcgtgagcagggtagat

SEQ ID NO: 1645128 - DNA, 25 bp, Homo sapien
catggaccgagtggtacaaggtctt

SEQ ID NO: 1645129 - DNA, 25 bp, Homo sapien
cctggaagtgtgaagatcttttcat

SEQ ID NO: 1645130 - DNA, 25 bp, Homo sapien
gagattgggagccttggagagaaaa

SEQ ID NO: 1645131 - DNA, 25 bp, Homo sapien
agattgggagccttggagagaaaaa

SEQ ID NO: 1645132 - DNA, 25 bp, Homo sapien
gggcaaacctctattccaccttgca

SEQ ID NO: 1645133 - DNA, 25 bp, Homo sapien
caccttgcatttcggcctaaatcct

SEQ ID NO: 1645134 - DNA, 25 bp, Homo sapien
cattcaggacgaaggtgacacagcc

SEQ ID NO: 1645135 - DNA, 25 bp, Homo sapien
gccatgctgtggtcattcaggacga

SEQ ID NO: 1645136 - DNA, 25 bp, Homo sapien
cacacccacggatcaacagggcatc

SEQ ID NO: 1645137 - DNA, 25 bp, Homo sapien
cttgctggaagtctgtccgcccaca

SEQ ID NO: 1645138 - DNA, 25 bp, Homo sapien
agatttgggagcgaccaaagtggaa

SEQ ID NO: 1645139 - DNA, 25 bp, Homo sapien
agttaatagtgaaatgagttgagac

SEQ ID NO: 1645140 - DNA, 25 bp, Homo sapien
tgggagcgaccaaagtggaatgata

SEQ ID NO: 1645141 - DNA, 25 bp, Homo sapien
catgagatttgggagcgaccaaagt

SEQ ID NO: 1645142 - DNA, 25 bp, Homo sapien
gcaccaagccaaaagtgatacactt

SEQ ID NO: 1645143 - DNA, 25 bp, Homo sapien
tcaatagaaatcatattccatgcac

SEQ ID NO: 1645144 - DNA, 25 bp, Homo sapien
aagtgatacactttcaatagaaatc

SEQ ID NO: 1645145 - DNA, 25 bp, Homo sapien
catgcacccatacagccattctgtt

SEQ ID NO: 1645146 - DNA, 25 bp, Homo sapien
tcaatgtgtaagtcagcctgggccc

SEQ ID NO: 1645147 - DNA, 25 bp, Homo sapien
gcgggagatgacagactggcagcca

SEQ ID NO: 1645148 - DNA, 25 bp, Homo sapien
gccccgagcctgtaatgtggtccgc

SEQ ID NO: 1645149 - DNA, 25 bp, Homo sapien
cgcccgaagcggatggagtctccat

SEQ ID NO: 1645150 - DNA, 25 bp, Homo sapien
tgaaggtgcagctcacaggctcgaa

SEQ ID NO: 1645151 - DNA, 25 bp, Homo sapien
ctccttgatcagctgggcatcccga

SEQ ID NO: 1645152 - DNA, 25 bp, Homo sapien
tgtcacccagcaggtacgtgaaggt

SEQ ID NO: 1645153 - DNA, 25 bp, Homo sapien
ggactgggtcgatcagaacggcctc

SEQ ID NO: 1645154 - DNA, 25 bp, Homo sapien
ttgctgccgcctagtgcccagcagt

SEQ ID NO: 1645155 - DNA, 25 bp, Homo sapien
ttccgcaagatgcaggcgtgggtcc

SEQ ID NO: 1645156 - DNA, 25 bp, Homo sapien
agaccccggagttccgtccttgctg

SEQ ID NO: 1645157 - DNA, 25 bp, Homo sapien
cccgctttccgcaagatgcaggcgt

SEQ ID NO: 1645158 - DNA, 25 bp, Homo sapien
gccgggcgaccctcagtacagcctc

SEQ ID NO: 1645159 - DNA, 25 bp, Homo sapien
gggcgaccctcagtacagcctccgc

SEQ ID NO: 1645160 - DNA, 25 bp, Homo sapien
ctgccgccgggcgaccctcagtaca

SEQ ID NO: 1645161 - DNA, 25 bp, Homo sapien
cgaccctcagtacagcctccgccat

SEQ ID NO: 1645162 - DNA, 25 bp, Homo sapien
cccactgcggggtcaggaatgagcg

SEQ ID NO: 1645163 - DNA, 25 bp, Homo sapien
tgcaggagccgggcgctacggcact

SEQ ID NO: 1645164 - DNA, 25 bp, Homo sapien
gcgcccactgcggggtcaggaatga

SEQ ID NO: 1645165 - DNA, 25 bp, Homo sapien
cactgcggggtcaggaatgagcgga

SEQ ID NO: 1645166 - DNA, 25 bp, Homo sapien
ttaaagttcatccagaaattgcata

SEQ ID NO: 1645167 - DNA, 25 bp, Homo sapien
ccagaaattgcataagcattttatc

SEQ ID NO: 1645168 - DNA, 25 bp, Homo sapien
tttatcaggaatgtttctctctttc

SEQ ID NO: 1645169 - DNA, 25 bp, Homo sapien
gcattttatcaggaatgtttctctc

SEQ ID NO: 1645170 - DNA, 25 bp, Homo sapien
gctcagaagcccgaggaactctttg

SEQ ID NO: 1645171 - DNA, 25 bp, Homo sapien
taagaccgactgtatgagctcgcct

SEQ ID NO: 1645172 - DNA, 25 bp, Homo sapien
tctcaaaccatggacgtggagctgt

SEQ ID NO: 1645173 - DNA, 25 bp, Homo sapien
gccatttatactgggctcgagctca

SEQ ID NO: 1645174 - DNA, 25 bp, Homo sapien
gacagccaagatacaggtgtggctc

SEQ ID NO: 1645175 - DNA, 25 bp, Homo sapien
gagcctcttagagttttgggagact

SEQ ID NO: 1645176 - DNA, 25 bp, Homo sapien
gagacaagcctcatgggtacccagg

SEQ ID NO: 1645177 - DNA, 25 bp, Homo sapien
taccagatctctgacggaggtgccc

SEQ ID NO: 1645178 - DNA, 25 bp, Homo sapien
ttattaaatgcatcgtgtgtgtgtg

SEQ ID NO: 1645179 - DNA, 25 bp, Homo sapien
gagaaccaactcatctttattaaat

SEQ ID NO: 1645180 - DNA, 25 bp, Homo sapien
catctttattaaatgcatcgtgtgt

SEQ ID NO: 1645181 - DNA, 25 bp, Homo sapien
tgagaaccaactcatctttattaaa

SEQ ID NO: 1645182 - DNA, 25 bp, Homo sapien
tctgcttctcattgcaactgtagat

SEQ ID NO: 1645183 - DNA, 25 bp, Homo sapien
tccatcggggacgaacgaatgccag

SEQ ID NO: 1645184 - DNA, 25 bp, Homo sapien
tcaggcttgcggcaccaccccatag

SEQ ID NO: 1645185 - DNA, 25 bp, Homo sapien
tcattgcaactgtagatccatcggg

SEQ ID NO: 1645186 - DNA, 25 bp, Homo sapien
gtcactcatattgtcctcgagctcc

SEQ ID NO: 1645187 - DNA, 25 bp, Homo sapien
aacccggtcactcatattgtcctcg

SEQ ID NO: 1645188 - DNA, 25 bp, Homo sapien
gatcacaaactgaacccggtcactc

SEQ ID NO: 1645189 - DNA, 25 bp, Homo sapien
aactgaacccggtcactcatattgt

SEQ ID NO: 1645190 - DNA, 25 bp, Homo sapien
ccattgaaggctgtgacgtatcgga

SEQ ID NO: 1645191 - DNA, 25 bp, Homo sapien
aaggctgtgacgtatcggatgagtt

SEQ ID NO: 1645192 - DNA, 25 bp, Homo sapien
tgacgtatcggatgagtttccgccg

SEQ ID NO: 1645193 - DNA, 25 bp, Homo sapien
tcggatgagtttccgccgctcgtcc

SEQ ID NO: 1645194 - DNA, 25 bp, Homo sapien
gtagagagacggggtattgacatgt

SEQ ID NO: 1645195 - DNA, 25 bp, Homo sapien
tagccaggactactgagtagcacac

SEQ ID NO: 1645196 - DNA, 25 bp, Homo sapien
gccaggactactgagtagcacacca

SEQ ID NO: 1645197 - DNA, 25 bp, Homo sapien
tagagagacggggtattgacatgtt

SEQ ID NO: 1645198 - DNA, 25 bp, Homo sapien
gactggcagatcaggaggctcctgg

SEQ ID NO: 1645199 - DNA, 25 bp, Homo sapien
tgggagctcagggactggcagatca

SEQ ID NO: 1645200 - DNA, 25 bp, Homo sapien
tcagggactggcagatcaggaggct

SEQ ID NO: 1645201 - DNA, 25 bp, Homo sapien
tcaggaggctcctggtgttcctcac

SEQ ID NO: 1645202 - DNA, 25 bp, Homo sapien
tgttctcatccgtggagcctgcata

SEQ ID NO: 1645203 - DNA, 25 bp, Homo sapien
catccgtggagcctgcatacgggtc

SEQ ID NO: 1645204 - DNA, 25 bp, Homo sapien
tgtccgtgttctcatccgtggagcc

SEQ ID NO: 1645205 - DNA, 25 bp, Homo sapien
ggagcctgcatacgggtcttcccca

SEQ ID NO: 1645206 - DNA, 25 bp, Homo sapien
ccagaatcttccgccccattgtcct

SEQ ID NO: 1645207 - DNA, 25 bp, Homo sapien
agaatcttccgccccattgtcctgt

SEQ ID NO: 1645208 - DNA, 25 bp, Homo sapien
gaatcttccgccccattgtcctgtc

SEQ ID NO: 1645209 - DNA, 25 bp, Homo sapien
ccccagaatcttccgccccattgtc

SEQ ID NO: 1645210 - DNA, 25 bp, Homo sapien
cccctcaatgtctatatcttcctgg

SEQ ID NO: 1645211 - DNA, 25 bp, Homo sapien
tgactgtaccccctcaatgtctata

SEQ ID NO: 1645212 - DNA, 25 bp, Homo sapien
caatgtctatatcttcctggagcac

SEQ ID NO: 1645213 - DNA, 25 bp, Homo sapien
agctgcctgagtgggcttggttttg

SEQ ID NO: 1645214 - DNA, 25 bp, Homo sapien
gctgccaccgctgtgagaggcctca

SEQ ID NO: 1645215 - DNA, 25 bp, Homo sapien
caccgctgtgagaggcctcatcctc

SEQ ID NO: 1645216 - DNA, 25 bp, Homo sapien
tgccaccgctgtgagaggcctcatc

SEQ ID NO: 1645217 - DNA, 25 bp, Homo sapien
ccaccgctgtgagaggcctcatcct

SEQ ID NO: 1645218 - DNA, 25 bp, Homo sapien
gactacaacactataatcatggttc

SEQ ID NO: 1645219 - DNA, 25 bp, Homo sapien
ttttaaagactacaacactataatc

SEQ ID NO: 1645220 - DNA, 25 bp, Homo sapien
atcagaactttctcctttaagaatc

SEQ ID NO: 1645221 - DNA, 25 bp, Homo sapien
aatcagaactttctcctttaagaat

SEQ ID NO: 1645222 - DNA, 25 bp, Homo sapien
tgccccagatatagcaccagcccat

SEQ ID NO: 1645223 - DNA, 25 bp, Homo sapien
tttgttaagaccagttgcaaatcca

SEQ ID NO: 1645224 - DNA, 25 bp, Homo sapien
tcccaggcagataataacccaaatc

SEQ ID NO: 1645225 - DNA, 25 bp, Homo sapien
gctctcccaggcagataataaccca

SEQ ID NO: 1645226 - DNA, 25 bp, Homo sapien
ggccatggagtacaatccagtctcc

SEQ ID NO: 1645227 - DNA, 25 bp, Homo sapien
tacaccaggtacaactaacttctga

SEQ ID NO: 1645228 - DNA, 25 bp, Homo sapien
tcctgaataacagatgagggttctg

SEQ ID NO: 1645229 - DNA, 25 bp, Homo sapien
gacctcagatatgagctagcctttg

SEQ ID NO: 1645230 - DNA, 25 bp, Homo sapien
cctcaagtgatccacctgcctcagc

SEQ ID NO: 1645231 - DNA, 25 bp, Homo sapien
gtggcacgattttggcttccaggtt

SEQ ID NO: 1645232 - DNA, 25 bp, Homo sapien
cacgattttggcttccaggttcaag

SEQ ID NO: 1645233 - DNA, 25 bp, Homo sapien
acctcaagtgatccacctgcctcag

SEQ ID NO: 1645234 - DNA, 25 bp, Homo sapien
gcatgcggtgacagtccagcaccca

SEQ ID NO: 1645235 - DNA, 25 bp, Homo sapien
ccactccttacgcacgatgcggcct

SEQ ID NO: 1645236 - DNA, 25 bp, Homo sapien
cagccgccgacgcatgcggtgacag

SEQ ID NO: 1645237 - DNA, 25 bp, Homo sapien
cttacgcacgatgcggcctcccagg

SEQ ID NO: 1645238 - DNA, 25 bp, Homo sapien
aagctctagggccttatctcgcagc

SEQ ID NO: 1645239 - DNA, 25 bp, Homo sapien
ttatctcgcagctcggagcggaagg

SEQ ID NO: 1645240 - DNA, 25 bp, Homo sapien
gtgctgtcccgggtccagtctggcc

SEQ ID NO: 1645241 - DNA, 25 bp, Homo sapien
cagtctggccgatacttggccccaa

SEQ ID NO: 1645242 - DNA, 25 bp, Homo sapien
tctcctcggggtttgcctgtcactg

SEQ ID NO: 1645243 - DNA, 25 bp, Homo sapien
ttctcctcggggtttgcctgtcact

SEQ ID NO: 1645244 - DNA, 25 bp, Homo sapien
gctggggtacgagttggagctggca

SEQ ID NO: 1645245 - DNA, 25 bp, Homo sapien
ggctggggtacgagttggagctggc

SEQ ID NO: 1645246 - DNA, 25 bp, Homo sapien
tggctggggtacgagttggagctgg

SEQ ID NO: 1645247 - DNA, 25 bp, Homo sapien
tcttgggaacagatggcgacagctg

SEQ ID NO: 1645248 - DNA, 25 bp, Homo sapien
taggtctcttgggaacagatggcga

SEQ ID NO: 1645249 - DNA, 25 bp, Homo sapien
tctcttgggaacagatggcgacagc

SEQ ID NO: 1645250 - DNA, 25 bp, Homo sapien
atttaggtctcttgggaacagatgg

SEQ ID NO: 1645251 - DNA, 25 bp, Homo sapien
gggatggattgaggcctccagcttc

SEQ ID NO: 1645252 - DNA, 25 bp, Homo sapien
caccccaccaaagtctgatgatttc

SEQ ID NO: 1645253 - DNA, 25 bp, Homo sapien
tccaccccaccaaagtctgatgatt

SEQ ID NO: 1645254 - DNA, 25 bp, Homo sapien
ccccaccaaagtctgatgatttcac

SEQ ID NO: 1645255 - DNA, 25 bp, Homo sapien
ctggagggtagcagctgcatagcta

SEQ ID NO: 1645256 - DNA, 25 bp, Homo sapien
ggtcctgctgggtcgctggctgtga

SEQ ID NO: 1645257 - DNA, 25 bp, Homo sapien
cagctgcatagctaggtcctgctgg

SEQ ID NO: 1645258 - DNA, 25 bp, Homo sapien
agggtagcagctgcatagctaggtc

SEQ ID NO: 1645259 - DNA, 25 bp, Homo sapien
gagaaagtggatccaggatgagagg

SEQ ID NO: 1645260 - DNA, 25 bp, Homo sapien
aagggagaaagtggatccaggatga

SEQ ID NO: 1645261 - DNA, 25 bp, Homo sapien
ggagaaagtggatccaggatgagag

SEQ ID NO: 1645262 - DNA, 25 bp, Homo sapien
gggagaaagtggatccaggatgaga

SEQ ID NO: 1645263 - DNA, 25 bp, Homo sapien
agagagttggcgctctcatcctcct

SEQ ID NO: 1645264 - DNA, 25 bp, Homo sapien
agagcccccggcctcagagagttgg

SEQ ID NO: 1645265 - DNA, 25 bp, Homo sapien
ctggggatgtcttgttgatccggct

SEQ ID NO: 1645266 - DNA, 25 bp, Homo sapien
cttcacacggaactggccaagcttg

SEQ ID NO: 1645267 - DNA, 25 bp, Homo sapien
ggctatgaaaccgtacaaaactcaa

SEQ ID NO: 1645268 - DNA, 25 bp, Homo sapien
tatgaaaccgtacaaaactcaagcc

SEQ ID NO: 1645269 - DNA, 25 bp, Homo sapien
tgaaaccgtacaaaactcaagccaa

SEQ ID NO: 1645270 - DNA, 25 bp, Homo sapien
gggctatgaaaccgtacaaaactca

SEQ ID NO: 1645271 - DNA, 25 bp, Homo sapien
agggcccaagacccttttcactcag

SEQ ID NO: 1645272 - DNA, 25 bp, Homo sapien
cagggcccaagacccttttcactca

SEQ ID NO: 1645273 - DNA, 25 bp, Homo sapien
gcttgtcaggcccaaacatgcgaac

SEQ ID NO: 1645274 - DNA, 25 bp, Homo sapien
gtttgagccactgcggctctcggaa

SEQ ID NO: 1645275 - DNA, 25 bp, Homo sapien
tgcaaacaattttgacccggtccca

SEQ ID NO: 1645276 - DNA, 25 bp, Homo sapien
tgaaagatgaggtgaccagaaggac

SEQ ID NO: 1645277 - DNA, 25 bp, Homo sapien
tcattcccaatgtccacactgtgta

SEQ ID NO: 1645278 - DNA, 25 bp, Homo sapien
gcacctccacgaaagctgagccatc

SEQ ID NO: 1645279 - DNA, 25 bp, Homo sapien
ccagttaaccttttggagcctcagt

SEQ ID NO: 1645280 - DNA, 25 bp, Homo sapien
gctgtgctgcacactagctgtatga

SEQ ID NO: 1645281 - DNA, 25 bp, Homo sapien
gggctttgtccgatcttgctcaccg

SEQ ID NO: 1645282 - DNA, 25 bp, Homo sapien
tgggaatgaccaccatatctaggat

SEQ ID NO: 1645283 - DNA, 25 bp, Homo sapien
taaatagaagggtctgttacgactc

SEQ ID NO: 1645284 - DNA, 25 bp, Homo sapien
ttggctaagcatgggccgggcatca

SEQ ID NO: 1645285 - DNA, 25 bp, Homo sapien
ggttacgtgaggcccaccagataat

SEQ ID NO: 1645286 - DNA, 25 bp, Homo sapien
ccaggctctgcttgcatcttcacag

SEQ ID NO: 1645287 - DNA, 25 bp, Homo sapien
cattttcggtaagtgtctgccttga

SEQ ID NO: 1645288 - DNA, 25 bp, Homo sapien
aagtgtctgccttgagaagattttc

SEQ ID NO: 1645289 - DNA, 25 bp, Homo sapien
tgagaagattttctgcacagtgagt

SEQ ID NO: 1645290 - DNA, 25 bp, Homo sapien
ttggctgcccgccattttcggtaag

SEQ ID NO: 1645291 - DNA, 25 bp, Homo sapien
caggacacgacatggcggaggcgga

SEQ ID NO: 1645292 - DNA, 25 bp, Homo sapien
aggacacgacatggcggaggcggat

SEQ ID NO: 1645293 - DNA, 25 bp, Homo sapien
ggacacgacatggcggaggcggatc

SEQ ID NO: 1645294 - DNA, 25 bp, Homo sapien
attgcacgatggagttaccgcccac

SEQ ID NO: 1645295 - DNA, 25 bp, Homo sapien
tctgggagcctagcaacagaagcga

SEQ ID NO: 1645296 - DNA, 25 bp, Homo sapien
agagcgctgcgttccttagcaacga

SEQ ID NO: 1645297 - DNA, 25 bp, Homo sapien
cacactgaagccgagaaagcaaatc

SEQ ID NO: 1645298 - DNA, 25 bp, Homo sapien
ccgcacccgcaggaccagcctggac

SEQ ID NO: 1645299 - DNA, 25 bp, Homo sapien
gcacccgcaggaccagcctggacat

SEQ ID NO: 1645300 - DNA, 25 bp, Homo sapien
cccgcacccgcaggaccagcctgga

SEQ ID NO: 1645301 - DNA, 25 bp, Homo sapien
cgcacccgcaggaccagcctggaca

SEQ ID NO: 1645302 - DNA, 25 bp, Homo sapien
ggaggtctgaggagtgaccatggca

SEQ ID NO: 1645303 - DNA, 25 bp, Homo sapien
agcaagagaccctcgttgggaggtc

SEQ ID NO: 1645304 - DNA, 25 bp, Homo sapien
aagaggggcagcaagagaccctcgt

SEQ ID NO: 1645305 - DNA, 25 bp, Homo sapien
tgaaaatagccaagaggggcagcaa

SEQ ID NO: 1645306 - DNA, 25 bp, Homo sapien
gggcaaggagttggtgcacacctac

SEQ ID NO: 1645307 - DNA, 25 bp, Homo sapien
gcacacctacaagggctgcatcagg

SEQ ID NO: 1645308 - DNA, 25 bp, Homo sapien
ccaggactgctactccggcgttata

SEQ ID NO: 1645309 - DNA, 25 bp, Homo sapien
gaaagagaccatcccaggaagttgt

SEQ ID NO: 1645310 - DNA, 25 bp, Homo sapien
cgcctgcactgcgagcttcagggac

SEQ ID NO: 1645311 - DNA, 25 bp, Homo sapien
ttcccttgaccaatcttactgagaa

SEQ ID NO: 1645312 - DNA, 25 bp, Homo sapien
tcttactgagaatggcctgatgtgc

SEQ ID NO: 1645313 - DNA, 25 bp, Homo sapien
gcactgcgagcttcagggacaaatg

SEQ ID NO: 1645314 - DNA, 25 bp, Homo sapien
tattacccagcaggttagcccagat

SEQ ID NO: 1645315 - DNA, 25 bp, Homo sapien
tcagaaggctgtcacattggcagtc

SEQ ID NO: 1645316 - DNA, 25 bp, Homo sapien
ctctgggttgcaacttggtctggga

SEQ ID NO: 1645317 - DNA, 25 bp, Homo sapien
tcaaggatgacggagccatgtgtct

SEQ ID NO: 1645318 - DNA, 25 bp, Homo sapien
gataaattctcttgatcacagccca

SEQ ID NO: 1645319 - DNA, 25 bp, Homo sapien
ttaaacagtaagtctgcccgcactc

SEQ ID NO: 1645320 - DNA, 25 bp, Homo sapien
gtcattaatgggtatacctggctcc

SEQ ID NO: 1645321 - DNA, 25 bp, Homo sapien
ccaagggcatggctacagaaaggct

SEQ ID NO: 1645322 - DNA, 25 bp, Homo sapien
aaccagcactcctctatgggcacag

SEQ ID NO: 1645323 - DNA, 25 bp, Homo sapien
tcagtggcggccagtgatctgtcta

SEQ ID NO: 1645324 - DNA, 25 bp, Homo sapien
ctgcttggatgctcccagggacaga

SEQ ID NO: 1645325 - DNA, 25 bp, Homo sapien
tggtgaggaggttgtctcgcccact

SEQ ID NO: 1645326 - DNA, 25 bp, Homo sapien
ttaaataataccgatgacgccaggc

SEQ ID NO: 1645327 - DNA, 25 bp, Homo sapien
tcagacaggaccaaatcagagacag

SEQ ID NO: 1645328 - DNA, 25 bp, Homo sapien
tgaggagcacactccgagcaaaggc

SEQ ID NO: 1645329 - DNA, 25 bp, Homo sapien
gaaggactatctgcccctagagcta

SEQ ID NO: 1645330 - DNA, 25 bp, Homo sapien
tgctacaaggaaactcaactggccg

SEQ ID NO: 1645331 - DNA, 25 bp, Homo sapien
cagtgaatgagaataggcaagggcc

SEQ ID NO: 1645332 - DNA, 25 bp, Homo sapien
gatacccgaggtgtccatacagaag

SEQ ID NO: 1645333 - DNA, 25 bp, Homo sapien
ccttactgtgtgctgttgggcctca

SEQ ID NO: 1645334 - DNA, 25 bp, Homo sapien
gacagagaaacagactccccagaga

SEQ ID NO: 1645335 - DNA, 25 bp, Homo sapien
gcagttgccgggatcccaatacaag

SEQ ID NO: 1645336 - DNA, 25 bp, Homo sapien
gaggtatgctttactgcccttccac

SEQ ID NO: 1645337 - DNA, 25 bp, Homo sapien
cctgaattgctcagcacctagaaga

SEQ ID NO: 1645338 - DNA, 25 bp, Homo sapien
taggaaacaggacttctaccagcct

SEQ ID NO: 1645339 - DNA, 25 bp, Homo sapien
tatttaggaaccaaggtccacagcc

SEQ ID NO: 1645340 - DNA, 25 bp, Homo sapien
gacatagtccctgctagagtctggg

SEQ ID NO: 1645341 - DNA, 25 bp, Homo sapien
tctcccagagaaatgtagaccctgt

SEQ ID NO: 1645342 - DNA, 25 bp, Homo sapien
gctggaagtcaagagtccacatccc

SEQ ID NO: 1645343 - DNA, 25 bp, Homo sapien
actctctgaatccaggtgataagaa

SEQ ID NO: 1645344 - DNA, 25 bp, Homo sapien
tcccagctggaagtcaagagtccac

SEQ ID NO: 1645345 - DNA, 25 bp, Homo sapien
gataagaagtcacacatcccagctg

SEQ ID NO: 1645346 - DNA, 25 bp, Homo sapien
tcacgtcgagccagtgccgtgggtt

SEQ ID NO: 1645347 - DNA, 25 bp, Homo sapien
agcatcagcccgcatctcatcgaga

SEQ ID NO: 1645348 - DNA, 25 bp, Homo sapien
cctgggaaatgagcgcgcgctgcca

SEQ ID NO: 1645349 - DNA, 25 bp, Homo sapien
agctgaccccgcagaagtgccacgt

SEQ ID NO: 1645350 - DNA, 25 bp, Homo sapien
ccgcagccttggttcgggcagcgct

SEQ ID NO: 1645351 - DNA, 25 bp, Homo sapien
tttcttcatgccgacaacctgctgc

SEQ ID NO: 1645352 - DNA, 25 bp, Homo sapien
gagtcgccaccacctgatttcttca

SEQ ID NO: 1645353 - DNA, 25 bp, Homo sapien
cagccattcgcatagccctgggagt

SEQ ID NO: 1645354 - DNA, 25 bp, Homo sapien
cttcccttactgagtgcattctcca

SEQ ID NO: 1645355 - DNA, 25 bp, Homo sapien
ctgctttctgcgatccagcgctaca

SEQ ID NO: 1645356 - DNA, 25 bp, Homo sapien
ccttactgagtgcattctccaatcc

SEQ ID NO: 1645357 - DNA, 25 bp, Homo sapien
ttctgcgatccagcgctacatttct

SEQ ID NO: 1645358 - DNA, 25 bp, Homo sapien
gttctttaagctctcgcccttggga

SEQ ID NO: 1645359 - DNA, 25 bp, Homo sapien
ctgcgttctttaagctctcgccctt

SEQ ID NO: 1645360 - DNA, 25 bp, Homo sapien
gcgttctttaagctctcgcccttgg

SEQ ID NO: 1645361 - DNA, 25 bp, Homo sapien
tctttaagctctcgcccttgggatt

SEQ ID NO: 1645362 - DNA, 25 bp, Homo sapien
gtccagagcaccacattcgggcgct

SEQ ID NO: 1645363 - DNA, 25 bp, Homo sapien
caagaggcgcatctggtagcagcaa

SEQ ID NO: 1645364 - DNA, 25 bp, Homo sapien
gatccaatccaagcagcatgtccac

SEQ ID NO: 1645365 - DNA, 25 bp, Homo sapien
tctgtgcgcacgcagacaagaggcg

SEQ ID NO: 1645366 - DNA, 25 bp, Homo sapien
taaccccgcgctgttcagcagagct

SEQ ID NO: 1645367 - DNA, 25 bp, Homo sapien
agctgctgtctgatcacgggcctgg

SEQ ID NO: 1645368 - DNA, 25 bp, Homo sapien
agttcgccggtagcacaaacagatc

SEQ ID NO: 1645369 - DNA, 25 bp, Homo sapien
tcagctcgcccagaaaaaggcctgg

SEQ ID NO: 1645370 - DNA, 25 bp, Homo sapien
caaaaactctgaaatcaggcgcggt

SEQ ID NO: 1645371 - DNA, 25 bp, Homo sapien
caacgggtagagaagacctgggtca

SEQ ID NO: 1645372 - DNA, 25 bp, Homo sapien
tgtccgccctccctctagatggaaa

SEQ ID NO: 1645373 - DNA, 25 bp, Homo sapien
gaatcccaggcgtcctgtctgtccg

SEQ ID NO: 1645374 - DNA, 25 bp, Homo sapien
gcaaaaagccgacccacgggagaga

SEQ ID NO: 1645375 - DNA, 25 bp, Homo sapien
aaagccgacccacgggagagagcgc

SEQ ID NO: 1645376 - DNA, 25 bp, Homo sapien
cgagcaaaaagccgacccacgggag

SEQ ID NO: 1645377 - DNA, 25 bp, Homo sapien
aaaagccgacccacgggagagagcg

SEQ ID NO: 1645378 - DNA, 25 bp, Homo sapien
ccagggagcggtgatttagagatgc

SEQ ID NO: 1645379 - DNA, 25 bp, Homo sapien
tagctttaacctgacgtcactccct

SEQ ID NO: 1645380 - DNA, 25 bp, Homo sapien
tgatttagagatgccgggacccgtc

SEQ ID NO: 1645381 - DNA, 25 bp, Homo sapien
tcccggtagctttaacctgacgtca

SEQ ID NO: 1645382 - DNA, 25 bp, Homo sapien
taagtaaatacatggaaacctcatc

SEQ ID NO: 1645383 - DNA, 25 bp, Homo sapien
catggaaacctcatcgaatacaagc

SEQ ID NO: 1645384 - DNA, 25 bp, Homo sapien
cattatggggtctgtaagtaaatac

SEQ ID NO: 1645385 - DNA, 25 bp, Homo sapien
tacaagcacgcagtaaatgttatct

SEQ ID NO: 1645386 - DNA, 25 bp, Homo sapien
acagattttggcttttattctggcc

SEQ ID NO: 1645387 - DNA, 25 bp, Homo sapien
gattttggcttttattctggccatc

SEQ ID NO: 1645388 - DNA, 25 bp, Homo sapien
ttttggcttttattctggccatcac

SEQ ID NO: 1645389 - DNA, 25 bp, Homo sapien
tttggcttttattctggccatcaca

SEQ ID NO: 1645390 - DNA, 25 bp, Homo sapien
tacttctaagacaacacagaccggc

SEQ ID NO: 1645391 - DNA, 25 bp, Homo sapien
atgaccactgtcacaaccccaattt

SEQ ID NO: 1645392 - DNA, 25 bp, Homo sapien
ctaagacaacacagaccggcagtac

SEQ ID NO: 1645393 - DNA, 25 bp, Homo sapien
catctacttctaagacaacacagac

SEQ ID NO: 1645394 - DNA, 25 bp, Homo sapien
caccccaccccttctgccaagctcc

SEQ ID NO: 1645395 - DNA, 25 bp, Homo sapien
catgcagcatgaagtgcccgtgcag

SEQ ID NO: 1645396 - DNA, 25 bp, Homo sapien
gcatgcagcatgaagtgcccgtgca

SEQ ID NO: 1645397 - DNA, 25 bp, Homo sapien
ctacacctcaccccgggcatgcagc

SEQ ID NO: 1645398 - DNA, 25 bp, Homo sapien
cctcaccccgggcatgcagcatgaa

SEQ ID NO: 1645399 - DNA, 25 bp, Homo sapien
ccccaggttgtcgaaggaatcctca

SEQ ID NO: 1645400 - DNA, 25 bp, Homo sapien
cccagcccgaggtggttcctcctct

SEQ ID NO: 1645401 - DNA, 25 bp, Homo sapien
gaatcctcacattccgtacagtggt

SEQ ID NO: 1645402 - DNA, 25 bp, Homo sapien
cattccgtacagtggtaggttccct

SEQ ID NO: 1645403 - DNA, 25 bp, Homo sapien
gagagagtgtattctgaatcagagg

SEQ ID NO: 1645404 - DNA, 25 bp, Homo sapien
caccttgtagccaggatcatattca

SEQ ID NO: 1645405 - DNA, 25 bp, Homo sapien
gctctgagagagtgtattctgaatc

SEQ ID NO: 1645406 - DNA, 25 bp, Homo sapien
caggatcgtcagtggtctcctcttc

SEQ ID NO: 1645407 - DNA, 25 bp, Homo sapien
gagttccaggctgcatttgagccat

SEQ ID NO: 1645408 - DNA, 25 bp, Homo sapien
agttccaggctgcatttgagccatg

SEQ ID NO: 1645409 - DNA, 25 bp, Homo sapien
agccatgattgcgccactcccttcc

SEQ ID NO: 1645410 - DNA, 25 bp, Homo sapien
catgattgcgccactcccttccagc

SEQ ID NO: 1645411 - DNA, 25 bp, Homo sapien
tcagcaacacccaacagatccttag

SEQ ID NO: 1645412 - DNA, 25 bp, Homo sapien
gacaggcaatcaggtcatcgtccac

SEQ ID NO: 1645413 - DNA, 25 bp, Homo sapien
catcgtccacggctaccaggtgttt

SEQ ID NO: 1645414 - DNA, 25 bp, Homo sapien
gcgacatcccgtaactcagtcatga

SEQ ID NO: 1645415 - DNA, 25 bp, Homo sapien
ggaagccgcagctccaagaggtcac

SEQ ID NO: 1645416 - DNA, 25 bp, Homo sapien
aagctggcgtagcccccagtctcag

SEQ ID NO: 1645417 - DNA, 25 bp, Homo sapien
ccagtctcagctggctcacgggtct

SEQ ID NO: 1645418 - DNA, 25 bp, Homo sapien
tcagctggctcacgggtctctgtca

SEQ ID NO: 1645419 - DNA, 25 bp, Homo sapien
catcttcttccaagctggcgtagcc

SEQ ID NO: 1645420 - DNA, 25 bp, Homo sapien
acctccggccacaagttctctaata

SEQ ID NO: 1645421 - DNA, 25 bp, Homo sapien
acacctccggccacaagttctctaa

SEQ ID NO: 1645422 - DNA, 25 bp, Homo sapien
cacctccggccacaagttctctaat

SEQ ID NO: 1645423 - DNA, 25 bp, Homo sapien
caagttctctaatacaggatgttgg

SEQ ID NO: 1645424 - DNA, 25 bp, Homo sapien
gcaacctctaccctgcatcagcctc

SEQ ID NO: 1645425 - DNA, 25 bp, Homo sapien
tgcaacctctaccctgcatcagcct

SEQ ID NO: 1645426 - DNA, 25 bp, Homo sapien
gccggcggcccccgctccggctctg

SEQ ID NO: 1645427 - DNA, 25 bp, Homo sapien
cggcggcccccgctccggctctgcg

SEQ ID NO: 1645428 - DNA, 25 bp, Homo sapien
cggcccccgctccggctctgcggcg

SEQ ID NO: 1645429 - DNA, 25 bp, Homo sapien
gcggcccccgctccggctctgcggc

SEQ ID NO: 1645430 - DNA, 25 bp, Homo sapien
ttgcgcggcgagacggactagtcct

SEQ ID NO: 1645431 - DNA, 25 bp, Homo sapien
aacaagaagctgaagggttcgcgcg

SEQ ID NO: 1645432 - DNA, 25 bp, Homo sapien
ctcgctgcctgggtttacttggtac

SEQ ID NO: 1645433 - DNA, 25 bp, Homo sapien
gactagtcctgtagcgctgtgggaa

SEQ ID NO: 1645434 - DNA, 25 bp, Homo sapien
caagactgtgactatttggctgaag

SEQ ID NO: 1645435 - DNA, 25 bp, Homo sapien
caaagttcccttggagactaatgtc

SEQ ID NO: 1645436 - DNA, 25 bp, Homo sapien
tacagcccttgacagcaggacagac

SEQ ID NO: 1645437 - DNA, 25 bp, Homo sapien
taccctcagtgaggtcaggaccttc

SEQ ID NO: 1645438 - DNA, 25 bp, Homo sapien
gacaaatatggatgggacagacgtt

SEQ ID NO: 1645439 - DNA, 25 bp, Homo sapien
aaaccatgaagaccacgaatcctcc

SEQ ID NO: 1645440 - DNA, 25 bp, Homo sapien
catcaaagttatgacacaaagacac

SEQ ID NO: 1645441 - DNA, 25 bp, Homo sapien
taatggtggttagtgagattgccaa

SEQ ID NO: 1645442 - DNA, 25 bp, Homo sapien
ctggtaaatgtctttgctggttcct

SEQ ID NO: 1645443 - DNA, 25 bp, Homo sapien
cccagactctggtaaatgtctttgc

SEQ ID NO: 1645444 - DNA, 25 bp, Homo sapien
ctgcccaagcgtctgaggtgttagt

SEQ ID NO: 1645445 - DNA, 25 bp, Homo sapien
ttctggcccttacagagatccaggc

SEQ ID NO: 1645446 - DNA, 25 bp, Homo sapien
ctggcttcgtgggtcagataggaac

SEQ ID NO: 1645447 - DNA, 25 bp, Homo sapien
caagccactggcttcgtgggtcaga

SEQ ID NO: 1645448 - DNA, 25 bp, Homo sapien
tcgctgccattgaggaaggcttctc

SEQ ID NO: 1645449 - DNA, 25 bp, Homo sapien
tttcctcttgtgtccgtcgctgcca

SEQ ID NO: 1645450 - DNA, 25 bp, Homo sapien
gaccatgcccactagcacacatatg

SEQ ID NO: 1645451 - DNA, 25 bp, Homo sapien
tagggaaccgacgtctgagcctcta

SEQ ID NO: 1645452 - DNA, 25 bp, Homo sapien
tagcacacatatgatcagaaacacc

SEQ ID NO: 1645453 - DNA, 25 bp, Homo sapien
gatgccgcccacaatggcataggga

SEQ ID NO: 1645454 - DNA, 25 bp, Homo sapien
caagtatttaaagtgctgggcccaa

SEQ ID NO: 1645455 - DNA, 25 bp, Homo sapien
gagtccaagaaacaggtccaagtcc

SEQ ID NO: 1645456 - DNA, 25 bp, Homo sapien
aaatttctgccccaccgtcatagag

SEQ ID NO: 1645457 - DNA, 25 bp, Homo sapien
cagctgtgtgctagagcccattcca

SEQ ID NO: 1645458 - DNA, 25 bp, Homo sapien
ctgaggcgcagacaggttcggttac

SEQ ID NO: 1645459 - DNA, 25 bp, Homo sapien
tatttccactttactgatgggtaaa

SEQ ID NO: 1645460 - DNA, 25 bp, Homo sapien
actgaggcgcagacaggttcggtta

SEQ ID NO: 1645461 - DNA, 25 bp, Homo sapien
ttccactttactgatgggtaaactg

SEQ ID NO: 1645462 - DNA, 25 bp, Homo sapien
tctgttggctgccgaacccctgagt

SEQ ID NO: 1645463 - DNA, 25 bp, Homo sapien
ccctgagttatgtggcctctttgct

SEQ ID NO: 1645464 - DNA, 25 bp, Homo sapien
gaatgcagccaacccgaatttgagc

SEQ ID NO: 1645465 - DNA, 25 bp, Homo sapien
agccccgcgggccagtctggtccca

SEQ ID NO: 1645466 - DNA, 25 bp, Homo sapien
taggtgccgttatccgcggatacca

SEQ ID NO: 1645467 - DNA, 25 bp, Homo sapien
tcgcatggccgtgcttattggacgc

SEQ ID NO: 1645468 - DNA, 25 bp, Homo sapien
tattggacgcctcgcaagtgtaggt

SEQ ID NO: 1645469 - DNA, 25 bp, Homo sapien
tagaccacaagtacgtagagcgccc

SEQ ID NO: 1645470 - DNA, 25 bp, Homo sapien
gtgacagcacacgtcaacaccagcg

SEQ ID NO: 1645471 - DNA, 25 bp, Homo sapien
gacagcacacgtcaacaccagcgtg

SEQ ID NO: 1645472 - DNA, 25 bp, Homo sapien
ctggggttccccgtgacagcacacg

SEQ ID NO: 1645473 - DNA, 25 bp, Homo sapien
ggttccccgtgacagcacacgtcaa

SEQ ID NO: 1645474 - DNA, 25 bp, Homo sapien
ttccaagccatcacgcaggacaagg

SEQ ID NO: 1645475 - DNA, 25 bp, Homo sapien
tagtttccaagccatcacgcaggac

SEQ ID NO: 1645476 - DNA, 25 bp, Homo sapien
gcgggtgcgggtggctggcgttggg

SEQ ID NO: 1645477 - DNA, 25 bp, Homo sapien
ctggcgttgggatcccttgggtcct

SEQ ID NO: 1645478 - DNA, 25 bp, Homo sapien
gcgtctgcttgctgtgtccggaggg

SEQ ID NO: 1645479 - DNA, 25 bp, Homo sapien
agggcagcgcctggttctgcgcctc

SEQ ID NO: 1645480 - DNA, 25 bp, Homo sapien
cacagatgatgataccaccgtcgtc

SEQ ID NO: 1645481 - DNA, 25 bp, Homo sapien
actgcacatccagcacgtactgcgt

SEQ ID NO: 1645482 - DNA, 25 bp, Homo sapien
gaaaccgtactgtgcttgccacgct

SEQ ID NO: 1645483 - DNA, 25 bp, Homo sapien
ggtccacacgaaaccgtactgtgct

SEQ ID NO: 1645484 - DNA, 25 bp, Homo sapien
acggtccacacgaaaccgtactgtg

SEQ ID NO: 1645485 - DNA, 25 bp, Homo sapien
cacacgaaaccgtactgtgcttgcc

SEQ ID NO: 1645486 - DNA, 25 bp, Homo sapien
cttgccattttcctggctgctgctc

SEQ ID NO: 1645487 - DNA, 25 bp, Homo sapien
ccattttcctggctgctgctcactc

SEQ ID NO: 1645488 - DNA, 25 bp, Homo sapien
ccagaccttgccattttcctggctg

SEQ ID NO: 1645489 - DNA, 25 bp, Homo sapien
tgccattttcctggctgctgctcac

SEQ ID NO: 1645490 - DNA, 25 bp, Homo sapien
cttgtcagcactcggcccagggtac

SEQ ID NO: 1645491 - DNA, 25 bp, Homo sapien
ccttgtcagcactcggcccagggta

SEQ ID NO: 1645492 - DNA, 25 bp, Homo sapien
cccttgtcagcactcggcccagggt

SEQ ID NO: 1645493 - DNA, 25 bp, Homo sapien
cttgcggtcccggtaccagcgcagg

SEQ ID NO: 1645494 - DNA, 25 bp, Homo sapien
gcagccggacgggaccgcggaacga

SEQ ID NO: 1645495 - DNA, 25 bp, Homo sapien
cggaacgaggcagctgagctccacc

SEQ ID NO: 1645496 - DNA, 25 bp, Homo sapien
cagctccttgcggtcccggtaccag

SEQ ID NO: 1645497 - DNA, 25 bp, Homo sapien
ttaaagaaggcacgaacgtgggctc

SEQ ID NO: 1645498 - DNA, 25 bp, Homo sapien
gggctcaaagcgatcgagctgcctg

SEQ ID NO: 1645499 - DNA, 25 bp, Homo sapien
gctgcctgttcccagcgaccatagg

SEQ ID NO: 1645500 - DNA, 25 bp, Homo sapien
tgcctgttcccagcgaccataggga

SEQ ID NO: 1645501 - DNA, 25 bp, Homo sapien
ctagtaccgtgagcgtggcaatctg

SEQ ID NO: 1645502 - DNA, 25 bp, Homo sapien
tcctcaagctggaaacgctcatcct

SEQ ID NO: 1645503 - DNA, 25 bp, Homo sapien
cgggcatctgagagccggatccgca

SEQ ID NO: 1645504 - DNA, 25 bp, Homo sapien
cggcgtggggagaactcctcaagct

SEQ ID NO: 1645505 - DNA, 25 bp, Homo sapien
actatggacccatcatactggtgca

SEQ ID NO: 1645506 - DNA, 25 bp, Homo sapien
gtgcagacggcaggtgatctcagcc

SEQ ID NO: 1645507 - DNA, 25 bp, Homo sapien
tgccattgaagaagagggtctgccg

SEQ ID NO: 1645508 - DNA, 25 bp, Homo sapien
cactgtcacgttctctgtctgtact

SEQ ID NO: 1645509 - DNA, 25 bp, Homo sapien
aaatggcgcaaatgcaccccatctc

SEQ ID NO: 1645510 - DNA, 25 bp, Homo sapien
ttttaaaatggcgcaaatgcacccc

SEQ ID NO: 1645511 - DNA, 25 bp, Homo sapien
tttaaaatggcgcaaatgcacccca

SEQ ID NO: 1645512 - DNA, 25 bp, Homo sapien
taaaatggcgcaaatgcaccccatc

SEQ ID NO: 1645513 - DNA, 25 bp, Homo sapien
gtgtcaagattctaaagccttctgg

SEQ ID NO: 1645514 - DNA, 25 bp, Homo sapien
gctagcatgctaacaccatcacggt

SEQ ID NO: 1645515 - DNA, 25 bp, Homo sapien
ggaactccaagacatcaagatttca

SEQ ID NO: 1645516 - DNA, 25 bp, Homo sapien
ttaagacgtcaagatgctagcatgc

SEQ ID NO: 1645517 - DNA, 25 bp, Homo sapien
caggattctatgagcctggtgttta

SEQ ID NO: 1645518 - DNA, 25 bp, Homo sapien
ggattcattagttccaggattctat

SEQ ID NO: 1645519 - DNA, 25 bp, Homo sapien
tttatttactggattcattagttcc

SEQ ID NO: 1645520 - DNA, 25 bp, Homo sapien
tagttccaggattctatgagcctgg

SEQ ID NO: 1645521 - DNA, 25 bp, Homo sapien
gcagcggccactggaagcgccgggc

SEQ ID NO: 1645522 - DNA, 25 bp, Homo sapien
agcagcggccactggaagcgccggg

SEQ ID NO: 1645523 - DNA, 25 bp, Homo sapien
cagcagcggccactggaagcgccgg

SEQ ID NO: 1645524 - DNA, 25 bp, Homo sapien
ccgccgctcgctcccggcccggcac

SEQ ID NO: 1645525 - DNA, 25 bp, Homo sapien
gctcgctcccggcccggcacctgca

SEQ ID NO: 1645526 - DNA, 25 bp, Homo sapien
gccgctcgctcccggcccggcacct

SEQ ID NO: 1645527 - DNA, 25 bp, Homo sapien
cgctcgctcccggcccggcacctgc

SEQ ID NO: 1645528 - DNA, 25 bp, Homo sapien
tctgtgacaccctgtagacctgatg

SEQ ID NO: 1645529 - DNA, 25 bp, Homo sapien
tgtagacctgatgcgggatcattac

SEQ ID NO: 1645530 - DNA, 25 bp, Homo sapien
gacaccctgtagacctgatgcggga

SEQ ID NO: 1645531 - DNA, 25 bp, Homo sapien
tccagacttaggtcccttctccctc

SEQ ID NO: 1645532 - DNA, 25 bp, Homo sapien
ttcaggtccaagctcccatcaaccc

SEQ ID NO: 1645533 - DNA, 25 bp, Homo sapien
gctcccatcaactcctgtgtcctca

SEQ ID NO: 1645534 - DNA, 25 bp, Homo sapien
ggtccaagctcccatcaactcctgt

SEQ ID NO: 1645535 - DNA, 25 bp, Homo sapien
cttcaggtccaagctcccatcaacc

SEQ ID NO: 1645536 - DNA, 25 bp, Homo sapien
gtctcactgctgtcagcctcagctg

SEQ ID NO: 1645537 - DNA, 25 bp, Homo sapien
ggagtctcactgctgtcagcctcag

SEQ ID NO: 1645538 - DNA, 25 bp, Homo sapien
ctcactgctgtcagcctcagctgga

SEQ ID NO: 1645539 - DNA, 25 bp, Homo sapien
gagtctcactgctgtcagcctcagc

SEQ ID NO: 1645540 - DNA, 25 bp, Homo sapien
gaatacataatagtggtgtatattt

SEQ ID NO: 1645541 - DNA, 25 bp, Homo sapien
tgaatacataatagtggtgtatatt

SEQ ID NO: 1645542 - DNA, 25 bp, Homo sapien
tatatttacaggacatatgtaatat

SEQ ID NO: 1645543 - DNA, 25 bp, Homo sapien
ggtgtatatttacaggacatatgta

SEQ ID NO: 1645544 - DNA, 25 bp, Homo sapien
tcttcacccacttgtctggtgcctg

SEQ ID NO: 1645545 - DNA, 25 bp, Homo sapien
tttcttctctatatcacatctgctg

SEQ ID NO: 1645546 - DNA, 25 bp, Homo sapien
taatttatcacaggcagccctagga

SEQ ID NO: 1645547 - DNA, 25 bp, Homo sapien
actaatatagccaagtttcctgttt

SEQ ID NO: 1645548 - DNA, 25 bp, Homo sapien
tggtctcagggcagtagtactttta

SEQ ID NO: 1645549 - DNA, 25 bp, Homo sapien
ttatacatgagtagcttgggcttcc

SEQ ID NO: 1645550 - DNA, 25 bp, Homo sapien
tagtacttttacatggcaaccagct

SEQ ID NO: 1645551 - DNA, 25 bp, Homo sapien
ggcagtagtacttttacatggcaac

SEQ ID NO: 1645552 - DNA, 25 bp, Homo sapien
tcacagagtcactcatattcaagag

SEQ ID NO: 1645553 - DNA, 25 bp, Homo sapien
cagacctcacttctttaagccacta

SEQ ID NO: 1645554 - DNA, 25 bp, Homo sapien
gcagtcacagagtcactcatattca

SEQ ID NO: 1645555 - DNA, 25 bp, Homo sapien
ctcacttctttaagccactacagtg

SEQ ID NO: 1645556 - DNA, 25 bp, Homo sapien
tcaatattgtgctcctagagtgcca

SEQ ID NO: 1645557 - DNA, 25 bp, Homo sapien
acagtcctgaggcatcccgggaaat

SEQ ID NO: 1645558 - DNA, 25 bp, Homo sapien
taatttttgtctccatgggttgcct

SEQ ID NO: 1645559 - DNA, 25 bp, Homo sapien
ccacagccagccgaagatatcttat

SEQ ID NO: 1645560 - DNA, 25 bp, Homo sapien
ttctggttatgctgatggtagccat

SEQ ID NO: 1645561 - DNA, 25 bp, Homo sapien
ggtgcttatctaggttcggaatgtt

SEQ ID NO: 1645562 - DNA, 25 bp, Homo sapien
tctggttatgctgatggtagccatt

SEQ ID NO: 1645563 - DNA, 25 bp, Homo sapien
ggggtgcttatctaggttcggaatg

SEQ ID NO: 1645564 - DNA, 25 bp, Homo sapien
acacaacagcggcaacaatattaat

SEQ ID NO: 1645565 - DNA, 25 bp, Homo sapien
ataacaacaacacaacagcggcaac

SEQ ID NO: 1645566 - DNA, 25 bp, Homo sapien
caagagctctcccattggcccacgg

SEQ ID NO: 1645567 - DNA, 25 bp, Homo sapien
cagagaggtcggcacactggcctga

SEQ ID NO: 1645568 - DNA, 25 bp, Homo sapien
ctccccacagtctggcagtcattag

SEQ ID NO: 1645569 - DNA, 25 bp, Homo sapien
cccacagtctggcagtcattagcag

SEQ ID NO: 1645570 - DNA, 25 bp, Homo sapien
tccccacagtctggcagtcattagc

SEQ ID NO: 1645571 - DNA, 25 bp, Homo sapien
ccccacagtctggcagtcattagca

SEQ ID NO: 1645572 - DNA, 25 bp, Homo sapien
tagtacagcaggagacatcaatgtg

SEQ ID NO: 1645573 - DNA, 25 bp, Homo sapien
caatgtggttcatgctgaaggcgtc

SEQ ID NO: 1645574 - DNA, 25 bp, Homo sapien
ggttacagccacttttagtacagca

SEQ ID NO: 1645575 - DNA, 25 bp, Homo sapien
catgttggcacattgaggcggttgc

SEQ ID NO: 1645576 - DNA, 25 bp, Homo sapien
cggaattccacttttccatggcaaa

SEQ ID NO: 1645577 - DNA, 25 bp, Homo sapien
gagaaatccaccaaagaattccatt

SEQ ID NO: 1645578 - DNA, 25 bp, Homo sapien
cagccggaattccacttttccatgg

SEQ ID NO: 1645579 - DNA, 25 bp, Homo sapien
agcaaatccccacaacccacgagaa

SEQ ID NO: 1645580 - DNA, 25 bp, Homo sapien
acagggagacccaccacagttaact

SEQ ID NO: 1645581 - DNA, 25 bp, Homo sapien
ggagacccaccacagttaactccag

SEQ ID NO: 1645582 - DNA, 25 bp, Homo sapien
agtcaatctcttgcggaactctcca

SEQ ID NO: 1645583 - DNA, 25 bp, Homo sapien
taactccagcttaactggaagtcaa

SEQ ID NO: 1645584 - DNA, 25 bp, Homo sapien
gccggtggctaccagacattgattc

SEQ ID NO: 1645585 - DNA, 25 bp, Homo sapien
cggtggctaccagacattgattcat

SEQ ID NO: 1645586 - DNA, 25 bp, Homo sapien
ggtggctaccagacattgattcatg

SEQ ID NO: 1645587 - DNA, 25 bp, Homo sapien
tggctaccagacattgattcatggg

SEQ ID NO: 1645588 - DNA, 25 bp, Homo sapien
gcatccatgggtgctgttccccttg

SEQ ID NO: 1645589 - DNA, 25 bp, Homo sapien
ttccccttgcagctgtaacactggc

SEQ ID NO: 1645590 - DNA, 25 bp, Homo sapien
aggagcatccatgggtgctgttccc

SEQ ID NO: 1645591 - DNA, 25 bp, Homo sapien
tggcggccattctgcggcagatttt

SEQ ID NO: 1645592 - DNA, 25 bp, Homo sapien
ttgggccctcgttgcatttggtggt

SEQ ID NO: 1645593 - DNA, 25 bp, Homo sapien
cagccacggaggtggcggtcatcct

SEQ ID NO: 1645594 - DNA, 25 bp, Homo sapien
tggtggtgttgcagcatttcaggaa

SEQ ID NO: 1645595 - DNA, 25 bp, Homo sapien
tgtggaaaccattggagcccgggca

SEQ ID NO: 1645596 - DNA, 25 bp, Homo sapien
ttcttcagggctgcggcactgcagg

SEQ ID NO: 1645597 - DNA, 25 bp, Homo sapien
gcattcgaggtaacggcttcgggaa

SEQ ID NO: 1645598 - DNA, 25 bp, Homo sapien
cttcgggaataggtgacagcccggc

SEQ ID NO: 1645599 - DNA, 25 bp, Homo sapien
caggaaatgcattcgaggtaacggc

SEQ ID NO: 1645600 - DNA, 25 bp, Homo sapien
tcattgagccctgcctattctgcct

SEQ ID NO: 1645601 - DNA, 25 bp, Homo sapien
gtgagactccatggggacagtcctg

SEQ ID NO: 1645602 - DNA, 25 bp, Homo sapien
tgcaaggactcactcaaaatcaatt

SEQ ID NO: 1645603 - DNA, 25 bp, Homo sapien
cagccagtcattgagccctgcctat

SEQ ID NO: 1645604 - DNA, 25 bp, Homo sapien
cagtatagactctctcatggggtaa

SEQ ID NO: 1645605 - DNA, 25 bp, Homo sapien
ctcatggggtaaatattgacatgac

SEQ ID NO: 1645606 - DNA, 25 bp, Homo sapien
acagtatagactctctcatggggta

SEQ ID NO: 1645607 - DNA, 25 bp, Homo sapien
gggtaaatattgacatgacttcatt

SEQ ID NO: 1645608 - DNA, 25 bp, Homo sapien
cacatctgtgcatcaaccgacatgc

SEQ ID NO: 1645609 - DNA, 25 bp, Homo sapien
tcttgaagtccacgcgtccaaggcg

SEQ ID NO: 1645610 - DNA, 25 bp, Homo sapien
tgacctctatcaagcataactgccg

SEQ ID NO: 1645611 - DNA, 25 bp, Homo sapien
cttggtttctggtcaattggtccct

SEQ ID NO: 1645612 - DNA, 25 bp, Homo sapien
gacacccggttgatatagcacacta

SEQ ID NO: 1645613 - DNA, 25 bp, Homo sapien
tgcagacacccggttgatatagcac

SEQ ID NO: 1645614 - DNA, 25 bp, Homo sapien
cacccggttgatatagcacactaca

SEQ ID NO: 1645615 - DNA, 25 bp, Homo sapien
cagacacccggttgatatagcacac

SEQ ID NO: 1645616 - DNA, 25 bp, Homo sapien
gagagtcaggttttcattcctgtca

SEQ ID NO: 1645617 - DNA, 25 bp, Homo sapien
tgtcaagggcctaaacgatgttttc

SEQ ID NO: 1645618 - DNA, 25 bp, Homo sapien
aattttgatcagacgccagacattc

SEQ ID NO: 1645619 - DNA, 25 bp, Homo sapien
actggacctaggcttgtttagggct

SEQ ID NO: 1645620 - DNA, 25 bp, Homo sapien
tgcgctccgggaaaaagccaggttg

SEQ ID NO: 1645621 - DNA, 25 bp, Homo sapien
cagcagattggcaagtgcgctccgg

SEQ ID NO: 1645622 - DNA, 25 bp, Homo sapien
catgtctgctggaagccttgttcgc

SEQ ID NO: 1645623 - DNA, 25 bp, Homo sapien
caccctgtgcatgtagagcttgcca

SEQ ID NO: 1645624 - DNA, 25 bp, Homo sapien
catgagctcgagcaattcacctgtc

SEQ ID NO: 1645625 - DNA, 25 bp, Homo sapien
actcatgagctcgagcaattcacct

SEQ ID NO: 1645626 - DNA, 25 bp, Homo sapien
tgaactcatgagctcgagcaattca

SEQ ID NO: 1645627 - DNA, 25 bp, Homo sapien
tcatgagctcgagcaattcacctgt

SEQ ID NO: 1645628 - DNA, 25 bp, Homo sapien
agcctccattagctgtttaatagtc

SEQ ID NO: 1645629 - DNA, 25 bp, Homo sapien
tcaagatccagcttagctgttgctt

SEQ ID NO: 1645630 - DNA, 25 bp, Homo sapien
cttagctgttgcttcccctaggaaa

SEQ ID NO: 1645631 - DNA, 25 bp, Homo sapien
taatagtctgattcctactcatcct

SEQ ID NO: 1645632 - DNA, 25 bp, Homo sapien
tattagattcctgaattgatagctg

SEQ ID NO: 1645633 - DNA, 25 bp, Homo sapien
gctgctctaagctcctggtggatcc

SEQ ID NO: 1645634 - DNA, 25 bp, Homo sapien
cctgaattgatagctgctgctctaa

SEQ ID NO: 1645635 - DNA, 25 bp, Homo sapien
gtcccagcactgaccaatattgtta

SEQ ID NO: 1645636 - DNA, 25 bp, Homo sapien
cacacacaacctcggtaaggctggt

SEQ ID NO: 1645637 - DNA, 25 bp, Homo sapien
cagagttgccctggttgcacaagtc

SEQ ID NO: 1645638 - DNA, 25 bp, Homo sapien
tcggtaaggctggtgatcttcaagc

SEQ ID NO: 1645639 - DNA, 25 bp, Homo sapien
gccagtccgatagctcagggtcctg

SEQ ID NO: 1645640 - DNA, 25 bp, Homo sapien
tgtcccagggcgcactcttccacac

SEQ ID NO: 1645641 - DNA, 25 bp, Homo sapien
agggcgcactcttccacacggcaat

SEQ ID NO: 1645642 - DNA, 25 bp, Homo sapien
acaagcgcacgatcgtggtcctgca

SEQ ID NO: 1645643 - DNA, 25 bp, Homo sapien
cacggcaatccccgttggtcttaca

SEQ ID NO: 1645644 - DNA, 25 bp, Homo sapien
tgcatgcaccgcaggccccaagagg

SEQ ID NO: 1645645 - DNA, 25 bp, Homo sapien
ctgcatgcaccgcaggccccaagag

SEQ ID NO: 1645646 - DNA, 25 bp, Homo sapien
agaggttaactacgcttagctccaa

SEQ ID NO: 1645647 - DNA, 25 bp, Homo sapien
tcacccctgcatgtcccaataccaa

SEQ ID NO: 1645648 - DNA, 25 bp, Homo sapien
ggagaggttaactacgcttagctcc

SEQ ID NO: 1645649 - DNA, 25 bp, Homo sapien
ttaactacgcttagctccaagaccc

SEQ ID NO: 1645650 - DNA, 25 bp, Homo sapien
taactgaacgttctatccctgccca

SEQ ID NO: 1645651 - DNA, 25 bp, Homo sapien
ggccccgtccattcagattcgtgtc

SEQ ID NO: 1645652 - DNA, 25 bp, Homo sapien
tcctcgtgaggcgtatatcctgaca

SEQ ID NO: 1645653 - DNA, 25 bp, Homo sapien
cagtctgtccgttgtccacgttcta

SEQ ID NO: 1645654 - DNA, 25 bp, Homo sapien
ggtcgattacgcctctccagttctg

SEQ ID NO: 1645655 - DNA, 25 bp, Homo sapien
gccctccggagtttctattgttaga

SEQ ID NO: 1645656 - DNA, 25 bp, Homo sapien
cacccgcgtcgatctttatgttata

SEQ ID NO: 1645657 - DNA, 25 bp, Homo sapien
tatgttataccgtcactcccagtgc

SEQ ID NO: 1645658 - DNA, 25 bp, Homo sapien
tctagtttcccgcgaagttctgtct

SEQ ID NO: 1645659 - DNA, 25 bp, Homo sapien
gatgctgaggactgaaccgcattcc

SEQ ID NO: 1645660 - DNA, 25 bp, Homo sapien
ccttagctactgagtgccaggtact

SEQ ID NO: 1645661 - DNA, 25 bp, Homo sapien
tcaattagaccctgttccaggcgca

SEQ ID NO: 1645662 - DNA, 25 bp, Homo sapien
ggcgttgcacaaagcacgagaatta

SEQ ID NO: 1645663 - DNA, 25 bp, Homo sapien
tgggacgcaggtgtggagcagcagc

SEQ ID NO: 1645664 - DNA, 25 bp, Homo sapien
gcggcagcagcggcgggtgacccat

SEQ ID NO: 1645665 - DNA, 25 bp, Homo sapien
gcagcggcagcagcggcgggtgacc

SEQ ID NO: 1645666 - DNA, 25 bp, Homo sapien
ctgggacgcaggtgtggagcagcag

SEQ ID NO: 1645667 - DNA, 25 bp, Homo sapien
agtcagccccagatgcgtgggcgcc

SEQ ID NO: 1645668 - DNA, 25 bp, Homo sapien
tggctcggccctgactcatggagtt

SEQ ID NO: 1645669 - DNA, 25 bp, Homo sapien
ttttgcgaaagagcgagtcagcccc

SEQ ID NO: 1645670 - DNA, 25 bp, Homo sapien
gggcaatcgctctccactgctgtaa

SEQ ID NO: 1645671 - DNA, 25 bp, Homo sapien
gcctgcgggatcatgggtgaggccc

SEQ ID NO: 1645672 - DNA, 25 bp, Homo sapien
tgcctgcgggatcatgggtgaggcc

SEQ ID NO: 1645673 - DNA, 25 bp, Homo sapien
tcttgcctgcctgcgggatcatggg

SEQ ID NO: 1645674 - DNA, 25 bp, Homo sapien
agctcttgcctgcctgcgggatcat

SEQ ID NO: 1645675 - DNA, 25 bp, Homo sapien
ccctcatcctcttgccacctgccat

SEQ ID NO: 1645676 - DNA, 25 bp, Homo sapien
ctgtttggggctccctcatcctctt

SEQ ID NO: 1645677 - DNA, 25 bp, Homo sapien
ggctccctcatcctcttgccacctg

SEQ ID NO: 1645678 - DNA, 25 bp, Homo sapien
gctccctcatcctcttgccacctgc

SEQ ID NO: 1645679 - DNA, 25 bp, Homo sapien
tatcttgggatggatctgactccac

SEQ ID NO: 1645680 - DNA, 25 bp, Homo sapien
actcccaggctgagtcgggcttcct

SEQ ID NO: 1645681 - DNA, 25 bp, Homo sapien
tgggatgcaactccctaatgtgcca

SEQ ID NO: 1645682 - DNA, 25 bp, Homo sapien
tcatcctttggatctcaggtcaggt

SEQ ID NO: 1645683 - DNA, 25 bp, Homo sapien
tgagactgtcctgcggctctattcc

SEQ ID NO: 1645684 - DNA, 25 bp, Homo sapien
cagctttggtctggacgacgactcg

SEQ ID NO: 1645685 - DNA, 25 bp, Homo sapien
ccagggctgcctcaacgagatggct

SEQ ID NO: 1645686 - DNA, 25 bp, Homo sapien
gcgtggctaccaccgcagctttggt

SEQ ID NO: 1645687 - DNA, 25 bp, Homo sapien
gttagaggattgcaaaatgctatgt

SEQ ID NO: 1645688 - DNA, 25 bp, Homo sapien
tgcaaagttagaggattgcaaaatg

SEQ ID NO: 1645689 - DNA, 25 bp, Homo sapien
ttatttgcaaagttagaggattgca

SEQ ID NO: 1645690 - DNA, 25 bp, Homo sapien
caaagttagaggattgcaaaatgct

SEQ ID NO: 1645691 - DNA, 25 bp, Homo sapien
cccctaggaggtaggtacaatcatc

SEQ ID NO: 1645692 - DNA, 25 bp, Homo sapien
agctcgtggtttcaaagtgtgtgcc

SEQ ID NO: 1645693 - DNA, 25 bp, Homo sapien
ttattgaggctcagcataggtcagg

SEQ ID NO: 1645694 - DNA, 25 bp, Homo sapien
ctgggcatgtgaagtacctgctccc

SEQ ID NO: 1645695 - DNA, 25 bp, Homo sapien
atctgttccaataaagagctctcca

SEQ ID NO: 1645696 - DNA, 25 bp, Homo sapien
tgaaccaccagatctgttccaataa

SEQ ID NO: 1645697 - DNA, 25 bp, Homo sapien
accaccagatctgttccaataaaga

SEQ ID NO: 1645698 - DNA, 25 bp, Homo sapien
atttgaaccaccagatctgttccaa

SEQ ID NO: 1645699 - DNA, 25 bp, Homo sapien
ggacatctgtgctccctcgcagtac

SEQ ID NO: 1645700 - DNA, 25 bp, Homo sapien
ccttacagggaagggcttagagtca

SEQ ID NO: 1645701 - DNA, 25 bp, Homo sapien
tcgcagtacactgcggacccaggag

SEQ ID NO: 1645702 - DNA, 25 bp, Homo sapien
tccctgaaaaaggaggtcaagatgg

SEQ ID NO: 1645703 - DNA, 25 bp, Homo sapien
aggcggctgtactctgccagagcag

SEQ ID NO: 1645704 - DNA, 25 bp, Homo sapien
cagagcagaggactttctcacccca

SEQ ID NO: 1645705 - DNA, 25 bp, Homo sapien
ccagatccgggcagcgtagtggaac

SEQ ID NO: 1645706 - DNA, 25 bp, Homo sapien
cagcaggcggctgtactctgccaga

SEQ ID NO: 1645707 - DNA, 25 bp, Homo sapien
ctgtgaggaggccaacagtcagggc

SEQ ID NO: 1645708 - DNA, 25 bp, Homo sapien
caactgcaaacagatgtagggagcc

SEQ ID NO: 1645709 - DNA, 25 bp, Homo sapien
tgacaaggacctacatgatgctggc

SEQ ID NO: 1645710 - DNA, 25 bp, Homo sapien
taagctaaatctggtcactggtcct

SEQ ID NO: 1645711 - DNA, 25 bp, Homo sapien
tcacaaggtcatgccgatctaaggg

SEQ ID NO: 1645712 - DNA, 25 bp, Homo sapien
cttctcggtgaggatcgtgtgtgac

SEQ ID NO: 1645713 - DNA, 25 bp, Homo sapien
gagcttgctcaccaaggactggaaa

SEQ ID NO: 1645714 - DNA, 25 bp, Homo sapien
gggtggccacgatacccaggcagca

SEQ ID NO: 1645715 - DNA, 25 bp, Homo sapien
ccatggacatcacttggctccggag

SEQ ID NO: 1645716 - DNA, 25 bp, Homo sapien
ggcagggagggtaagagggatagac

SEQ ID NO: 1645717 - DNA, 25 bp, Homo sapien
tttctcccagttaacagcatcctgg

SEQ ID NO: 1645718 - DNA, 25 bp, Homo sapien
cctgggcttcaaggagcacctgaga

SEQ ID NO: 1645719 - DNA, 25 bp, Homo sapien
gagggatagactgccagggtctttc

SEQ ID NO: 1645720 - DNA, 25 bp, Homo sapien
tggaagccccgggaagacattgcat

SEQ ID NO: 1645721 - DNA, 25 bp, Homo sapien
cccgggaagacattgcattgtaaca

SEQ ID NO: 1645722 - DNA, 25 bp, Homo sapien
taccaggaataagttgacctcagag

SEQ ID NO: 1645723 - DNA, 25 bp, Homo sapien
ttcactgtccatgaagggtaccagg

SEQ ID NO: 1645724 - DNA, 25 bp, Homo sapien
tgagctggtcaatcatcaggtgcat

SEQ ID NO: 1645725 - DNA, 25 bp, Homo sapien
catctgccgcagcttccgaggacag

SEQ ID NO: 1645726 - DNA, 25 bp, Homo sapien
gctggtcaatcatcaggtgcatctg

SEQ ID NO: 1645727 - DNA, 25 bp, Homo sapien
aggtgcatctgccgcagcttccgag

SEQ ID NO: 1645728 - DNA, 25 bp, Homo sapien
gtcaggcagacatcgcttggcttca

SEQ ID NO: 1645729 - DNA, 25 bp, Homo sapien
tagtctctttgaggccctagcgagg

SEQ ID NO: 1645730 - DNA, 25 bp, Homo sapien
caggcaaaggaacggcatgtgcaaa

SEQ ID NO: 1645731 - DNA, 25 bp, Homo sapien
gacctgttgttacccctgagttcag

SEQ ID NO: 1645732 - DNA, 25 bp, Homo sapien
ggagattccagggacccagaaatag

SEQ ID NO: 1645733 - DNA, 25 bp, Homo sapien
tgtcccattccagacacaggctcag

SEQ ID NO: 1645734 - DNA, 25 bp, Homo sapien
aataggcagacctggggcctgtccc

SEQ ID NO: 1645735 - DNA, 25 bp, Homo sapien
cagggacccagaaataggcagacct

SEQ ID NO: 1645736 - DNA, 25 bp, Homo sapien
gctcctcacaactctcaaaagtgct

SEQ ID NO: 1645737 - DNA, 25 bp, Homo sapien
ttggaaggagcagctaatccttttt

SEQ ID NO: 1645738 - DNA, 25 bp, Homo sapien
gagcagctaatcctttttgactttg

SEQ ID NO: 1645739 - DNA, 25 bp, Homo sapien
tgtcaggattggaccagggcagtgg

SEQ ID NO: 1645740 - DNA, 25 bp, Homo sapien
gggtagtactcggtgccttcatcgg

SEQ ID NO: 1645741 - DNA, 25 bp, Homo sapien
gccttcatcggagcccgatgagctg

SEQ ID NO: 1645742 - DNA, 25 bp, Homo sapien
atcggagcccgatgagctgctggac

SEQ ID NO: 1645743 - DNA, 25 bp, Homo sapien
tcggtgccttcatcggagcccgatg

SEQ ID NO: 1645744 - DNA, 25 bp, Homo sapien
ggtggagggcttcaccatctctgct

SEQ ID NO: 1645745 - DNA, 25 bp, Homo sapien
tggggtggagggcttcaccatctct

SEQ ID NO: 1645746 - DNA, 25 bp, Homo sapien
gggatggggtggagggcttcaccat

SEQ ID NO: 1645747 - DNA, 25 bp, Homo sapien
ggatggggtggagggcttcaccatc

SEQ ID NO: 1645748 - DNA, 25 bp, Homo sapien
gctcttgcacttgcaccccaggtcc

SEQ ID NO: 1645749 - DNA, 25 bp, Homo sapien
tggggtgagtggctgttgctcttgc

SEQ ID NO: 1645750 - DNA, 25 bp, Homo sapien
tgagtggctgttgctcttgcacttg

SEQ ID NO: 1645751 - DNA, 25 bp, Homo sapien
ggtgagtggctgttgctcttgcact

SEQ ID NO: 1645752 - DNA, 25 bp, Homo sapien
actgagcagaaagcacgtagcgttc

SEQ ID NO: 1645753 - DNA, 25 bp, Homo sapien
taatcctctcagataccaacccatg

SEQ ID NO: 1645754 - DNA, 25 bp, Homo sapien
gattctgatgaaagctacagccatg

SEQ ID NO: 1645755 - DNA, 25 bp, Homo sapien
cactcttggtgctgtacgtcctaca

SEQ ID NO: 1645756 - DNA, 25 bp, Homo sapien
tgcctggcacacctagatgtgaatg

SEQ ID NO: 1645757 - DNA, 25 bp, Homo sapien
tcagctgcattagatctggtcagaa

SEQ ID NO: 1645758 - DNA, 25 bp, Homo sapien
gagaagcccacctgtagacaagacc

SEQ ID NO: 1645759 - DNA, 25 bp, Homo sapien
ggcctgagccaatactcctaccaga

SEQ ID NO: 1645760 - DNA, 25 bp, Homo sapien
tggccataggttctgagccagtctc

SEQ ID NO: 1645761 - DNA, 25 bp, Homo sapien
aggaagagcccttgtggccataggt

SEQ ID NO: 1645762 - DNA, 25 bp, Homo sapien
ggaagagcccttgtggccataggtt

SEQ ID NO: 1645763 - DNA, 25 bp, Homo sapien
gaagagcccttgtggccataggttc

SEQ ID NO: 1645764 - DNA, 25 bp, Homo sapien
ctataattccggcactttaggtggc

SEQ ID NO: 1645765 - DNA, 25 bp, Homo sapien
tccggcactttaggtggccgaggca

SEQ ID NO: 1645766 - DNA, 25 bp, Homo sapien
ccctgtggctttaataaagggagtg

SEQ ID NO: 1645767 - DNA, 25 bp, Homo sapien
ggctttaataaagggagtgagggca

SEQ ID NO: 1645768 - DNA, 25 bp, Homo sapien
cagtcctggacaacaatcaccacat

SEQ ID NO: 1645769 - DNA, 25 bp, Homo sapien
tggacaacaatcaccacatggcaga

SEQ ID NO: 1645770 - DNA, 25 bp, Homo sapien
catggcagaccgtgaaaaggaaggc

SEQ ID NO: 1645771 - DNA, 25 bp, Homo sapien
tgaggtctgtgaaccagtcctggac

SEQ ID NO: 1645772 - DNA, 25 bp, Homo sapien
gaaggttgtactctggaggcagttt

SEQ ID NO: 1645773 - DNA, 25 bp, Homo sapien
atggtctaggatagaagggctcagg

SEQ ID NO: 1645774 - DNA, 25 bp, Homo sapien
tcattattgatgagatggtctagga

SEQ ID NO: 1645775 - DNA, 25 bp, Homo sapien
catttcaacgtaagtgtggggaagg

SEQ ID NO: 1645776 - DNA, 25 bp, Homo sapien
ccaggaagaggctcaatgcaggatg

SEQ ID NO: 1645777 - DNA, 25 bp, Homo sapien
tccaggaagaggctcaatgcaggat

SEQ ID NO: 1645778 - DNA, 25 bp, Homo sapien
gctctgggcccggaaaacataagtc

SEQ ID NO: 1645779 - DNA, 25 bp, Homo sapien
taaagaagtcgatgccactggtctg

SEQ ID NO: 1645780 - DNA, 25 bp, Homo sapien
gaagtcgatgccactggtctggttg

SEQ ID NO: 1645781 - DNA, 25 bp, Homo sapien
tgggtaataaagaagtcgatgccac

SEQ ID NO: 1645782 - DNA, 25 bp, Homo sapien
gagtgttggctgacaacaatgacat

SEQ ID NO: 1645783 - DNA, 25 bp, Homo sapien
acacatcagtctgatccaacaggta

SEQ ID NO: 1645784 - DNA, 25 bp, Homo sapien
accaaccaccaacacatcagtctga

SEQ ID NO: 1645785 - DNA, 25 bp, Homo sapien
atgacatgaccatggacttgcctgt

SEQ ID NO: 1645786 - DNA, 25 bp, Homo sapien
tgcttcatgcgctctgggggcagta

SEQ ID NO: 1645787 - DNA, 25 bp, Homo sapien
ggtcatccaccaacttgatgctgtg

SEQ ID NO: 1645788 - DNA, 25 bp, Homo sapien
accaattcatctggtcatccaccaa

SEQ ID NO: 1645789 - DNA, 25 bp, Homo sapien
gcagtagtttggcctgacccacgac

SEQ ID NO: 1645790 - DNA, 25 bp, Homo sapien
gacgccagttcccaacctggtactg

SEQ ID NO: 1645791 - DNA, 25 bp, Homo sapien
gatgcagtgaggatctgtgaggaga

SEQ ID NO: 1645792 - DNA, 25 bp, Homo sapien
tctgtgaggagacgccagttcccaa

SEQ ID NO: 1645793 - DNA, 25 bp, Homo sapien
aggatctgtgaggagacgccagttc

SEQ ID NO: 1645794 - DNA, 25 bp, Homo sapien
cccggttctggatctggtacacagg

SEQ ID NO: 1645795 - DNA, 25 bp, Homo sapien
ccctcaggggtagaggcacctgtca

SEQ ID NO: 1645796 - DNA, 25 bp, Homo sapien
tcctcccgtggcttcatgagaacga

SEQ ID NO: 1645797 - DNA, 25 bp, Homo sapien
catgagaacgatgggcttctccaga

SEQ ID NO: 1645798 - DNA, 25 bp, Homo sapien
gggctgttggaggtggtggctgttt

SEQ ID NO: 1645799 - DNA, 25 bp, Homo sapien
ctgttggaggtggtggctgttttga

SEQ ID NO: 1645800 - DNA, 25 bp, Homo sapien
agcaggggctgttggaggtggtggc

SEQ ID NO: 1645801 - DNA, 25 bp, Homo sapien
gcagcaggggctgttggaggtggtg

SEQ ID NO: 1645802 - DNA, 25 bp, Homo sapien
aatcccatcaatgggggcaatccct

SEQ ID NO: 1645803 - DNA, 25 bp, Homo sapien
aaatcccatcaatgggggcaatccc

SEQ ID NO: 1645804 - DNA, 25 bp, Homo sapien
gggttttctgcatgacggaagtgct

SEQ ID NO: 1645805 - DNA, 25 bp, Homo sapien
ccgctctgctggaggttttgagagg

SEQ ID NO: 1645806 - DNA, 25 bp, Homo sapien
tgcatgacggaagtgcttgtctctt

SEQ ID NO: 1645807 - DNA, 25 bp, Homo sapien
ttctgcatgacggaagtgcttgtct

SEQ ID NO: 1645808 - DNA, 25 bp, Homo sapien
tgacccctaactgtgtctgttcctt

SEQ ID NO: 1645809 - DNA, 25 bp, Homo sapien
tgagagtcttgacccctaactgtgt

SEQ ID NO: 1645810 - DNA, 25 bp, Homo sapien
acctcatgagagtcttgacccctaa

SEQ ID NO: 1645811 - DNA, 25 bp, Homo sapien
tctggttccttgagtaacctcatga

SEQ ID NO: 1645812 - DNA, 25 bp, Homo sapien
ctgacatctctgaggtggacagggc

SEQ ID NO: 1645813 - DNA, 25 bp, Homo sapien
tgacatctctgaggtggacagggcc

SEQ ID NO: 1645814 - DNA, 25 bp, Homo sapien
cagggggcaggttctggcagtgagt

SEQ ID NO: 1645815 - DNA, 25 bp, Homo sapien
ctagagaaaaaagcccagggggcag

SEQ ID NO: 1645816 - DNA, 25 bp, Homo sapien
ccagggggcaggttctggcagtgag

SEQ ID NO: 1645817 - DNA, 25 bp, Homo sapien
ggggcaggttctggcagtgagtcac

SEQ ID NO: 1645818 - DNA, 25 bp, Homo sapien
ttgacttcatctcctatctctctcc

SEQ ID NO: 1645819 - DNA, 25 bp, Homo sapien
gacttcatctcctatctctctccct

SEQ ID NO: 1645820 - DNA, 25 bp, Homo sapien
ctccttcctcatcaattgcagccat

SEQ ID NO: 1645821 - DNA, 25 bp, Homo sapien
tccctccttcctcatcaattgcagc

SEQ ID NO: 1645822 - DNA, 25 bp, Homo sapien
gagtccaggctgactgtgtccagac

SEQ ID NO: 1645823 - DNA, 25 bp, Homo sapien
tctctctttcccatggtgcaatgta

SEQ ID NO: 1645824 - DNA, 25 bp, Homo sapien
gctctatcccatagagtccaggctg

SEQ ID NO: 1645825 - DNA, 25 bp, Homo sapien
tggtgcaatgtagtccctctcccga

SEQ ID NO: 1645826 - DNA, 25 bp, Homo sapien
actgtgcccaaccaaggctcttcct

SEQ ID NO: 1645827 - DNA, 25 bp, Homo sapien
tgtgcccaaccaaggctcttccttt

SEQ ID NO: 1645828 - DNA, 25 bp, Homo sapien
ctttcttcttttttttgagacagag

SEQ ID NO: 1645829 - DNA, 25 bp, Homo sapien
ccactgtgcccaaccaaggctcttc

SEQ ID NO: 1645830 - DNA, 25 bp, Homo sapien
tgacgggcagtttgcaggctgtact

SEQ ID NO: 1645831 - DNA, 25 bp, Homo sapien
ggcctccccagtacttgacgggcag

SEQ ID NO: 1645832 - DNA, 25 bp, Homo sapien
cagtatcgaattgacggtcgccggc

SEQ ID NO: 1645833 - DNA, 25 bp, Homo sapien
gatctcgcagagcataagtttctca

SEQ ID NO: 1645834 - DNA, 25 bp, Homo sapien
gccggacgtcccagcgacctttcaa

SEQ ID NO: 1645835 - DNA, 25 bp, Homo sapien
gtcccagcgacctttcaatggccaa

SEQ ID NO: 1645836 - DNA, 25 bp, Homo sapien
cccagcgacctttcaatggccaagg

SEQ ID NO: 1645837 - DNA, 25 bp, Homo sapien
ggacgtcccagcgacctttcaatgg

SEQ ID NO: 1645838 - DNA, 25 bp, Homo sapien
ggttgcagcccctaaggaaagctgg

SEQ ID NO: 1645839 - DNA, 25 bp, Homo sapien
ctaacgcggctgctgattggttctc

SEQ ID NO: 1645840 - DNA, 25 bp, Homo sapien
tcggcttcagcacgcatgcgggttc

SEQ ID NO: 1645841 - DNA, 25 bp, Homo sapien
tcgagaactgaatgcgctcgccggg

SEQ ID NO: 1645842 - DNA, 25 bp, Homo sapien
gagtcttgcgcgcgccaaagaggaa

SEQ ID NO: 1645843 - DNA, 25 bp, Homo sapien
gtcttgcgcgcgccaaagaggaaca

SEQ ID NO: 1645844 - DNA, 25 bp, Homo sapien
gggcggagtcttgcgcgcgccaaag

SEQ ID NO: 1645845 - DNA, 25 bp, Homo sapien
gtgggcggagtcttgcgcgcgccaa

SEQ ID NO: 1645846 - DNA, 25 bp, Homo sapien
gcccaatattgacagacatctgcat

SEQ ID NO: 1645847 - DNA, 25 bp, Homo sapien
ccatcgcccaatattgacagacatc

SEQ ID NO: 1645848 - DNA, 25 bp, Homo sapien
tcgcccaatattgacagacatctgc

SEQ ID NO: 1645849 - DNA, 25 bp, Homo sapien
catcgcccaatattgacagacatct

SEQ ID NO: 1645850 - DNA, 25 bp, Homo sapien
gcatccatgtaaccgctaatcagag

SEQ ID NO: 1645851 - DNA, 25 bp, Homo sapien
tacagcatgtcttccgtgtgtctgg

SEQ ID NO: 1645852 - DNA, 25 bp, Homo sapien
tatgtagcaggagtttagaaccaac

SEQ ID NO: 1645853 - DNA, 25 bp, Homo sapien
agaaccaactttatggccgggcttg

SEQ ID NO: 1645854 - DNA, 25 bp, Homo sapien
tatagcatgtttgtgtgcagatggg

SEQ ID NO: 1645855 - DNA, 25 bp, Homo sapien
ttgcagtttggtgaatagtgaactt

SEQ ID NO: 1645856 - DNA, 25 bp, Homo sapien
ccagtgggatgtttataagatggga

SEQ ID NO: 1645857 - DNA, 25 bp, Homo sapien
gaccaggagactttggagctgtttt

SEQ ID NO: 1645858 - DNA, 25 bp, Homo sapien
tccagcccgtattcctagcttccgg

SEQ ID NO: 1645859 - DNA, 25 bp, Homo sapien
tgggctctccagcccgtattcctag

SEQ ID NO: 1645860 - DNA, 25 bp, Homo sapien
gctctccagcccgtattcctagctt

SEQ ID NO: 1645861 - DNA, 25 bp, Homo sapien
cccgtattcctagcttccggctggg

SEQ ID NO: 1645862 - DNA, 25 bp, Homo sapien
cagaggctggtgagttacacttctt

SEQ ID NO: 1645863 - DNA, 25 bp, Homo sapien
agaggctggtgagttacacttcttc

SEQ ID NO: 1645864 - DNA, 25 bp, Homo sapien
gcagaggctggtgagttacacttct

SEQ ID NO: 1645865 - DNA, 25 bp, Homo sapien
gaggctggtgagttacacttcttcc

SEQ ID NO: 1645866 - DNA, 25 bp, Homo sapien
ctctgcagctctggaaaaatggtgt

SEQ ID NO: 1645867 - DNA, 25 bp, Homo sapien
tgtcctctttgttgtcccaccaggg

SEQ ID NO: 1645868 - DNA, 25 bp, Homo sapien
tctctgcagctctggaaaaatggtg

SEQ ID NO: 1645869 - DNA, 25 bp, Homo sapien
aatggtgtcctctttgttgtcccac

SEQ ID NO: 1645870 - DNA, 25 bp, Homo sapien
cagtcgcctgcacttgtaactgaga

SEQ ID NO: 1645871 - DNA, 25 bp, Homo sapien
gctcggccagcggtaactgaagcct

SEQ ID NO: 1645872 - DNA, 25 bp, Homo sapien
ccatagcagcatagtgagagtgttt

SEQ ID NO: 1645873 - DNA, 25 bp, Homo sapien
actgagagctggaggtcgtccatag

SEQ ID NO: 1645874 - DNA, 25 bp, Homo sapien
tgggccaaggcctacccactttagc

SEQ ID NO: 1645875 - DNA, 25 bp, Homo sapien
ccctttggtccttgcacttgaggtg

SEQ ID NO: 1645876 - DNA, 25 bp, Homo sapien
caagccaacccactccaagccaggg

SEQ ID NO: 1645877 - DNA, 25 bp, Homo sapien
gagtggcagagacgatgtccaccac

SEQ ID NO: 1645878 - DNA, 25 bp, Homo sapien
gaaagtagcctggttcctcctcgtg

SEQ ID NO: 1645879 - DNA, 25 bp, Homo sapien
gtagcctggttcctcctcgtgggtc

SEQ ID NO: 1645880 - DNA, 25 bp, Homo sapien
aagtagcctggttcctcctcgtggg

SEQ ID NO: 1645881 - DNA, 25 bp, Homo sapien
tcagtactggggaaagtagcctggt

SEQ ID NO: 1645882 - DNA, 25 bp, Homo sapien
gagtgggacacaccgaggtgcagac

SEQ ID NO: 1645883 - DNA, 25 bp, Homo sapien
tgagagtgggacacaccgaggtgca

SEQ ID NO: 1645884 - DNA, 25 bp, Homo sapien
gtgggacacaccgaggtgcagacag

SEQ ID NO: 1645885 - DNA, 25 bp, Homo sapien
gagtgagagtgggacacaccgaggt

SEQ ID NO: 1645886 - DNA, 25 bp, Homo sapien
gccacaggaacccttcctccaggat

SEQ ID NO: 1645887 - DNA, 25 bp, Homo sapien
gctggccacaggaacccttcctcca

SEQ ID NO: 1645888 - DNA, 25 bp, Homo sapien
ggatgccttcctgcccaagtcccag

SEQ ID NO: 1645889 - DNA, 25 bp, Homo sapien
ccaggatgccttcctgcccaagtcc

SEQ ID NO: 1645890 - DNA, 25 bp, Homo sapien
ttctgctgcaggtcatacaggatca

SEQ ID NO: 1645891 - DNA, 25 bp, Homo sapien
cagggcagtgctaagcagctcagtc

SEQ ID NO: 1645892 - DNA, 25 bp, Homo sapien
tccccgccagcgtgtcaatctgttt

SEQ ID NO: 1645893 - DNA, 25 bp, Homo sapien
ccggtgtgagctgctcagattctgc

SEQ ID NO: 1645894 - DNA, 25 bp, Homo sapien
tgccaggggccactgtttgaactgt

SEQ ID NO: 1645895 - DNA, 25 bp, Homo sapien
gcattgctgccaggggccactgttt

SEQ ID NO: 1645896 - DNA, 25 bp, Homo sapien
aggggccactgtttgaactgtcgtg

SEQ ID NO: 1645897 - DNA, 25 bp, Homo sapien
tgctgccaggggccactgtttgaac

SEQ ID NO: 1645898 - DNA, 25 bp, Homo sapien
gtgtttcagccgcacctggcggaac

SEQ ID NO: 1645899 - DNA, 25 bp, Homo sapien
catggagttcacttgttcccggagc

SEQ ID NO: 1645900 - DNA, 25 bp, Homo sapien
ccggagcttccggtgtttcagccgc

SEQ ID NO: 1645901 - DNA, 25 bp, Homo sapien
agttcacttgttcccggagcttccg

SEQ ID NO: 1645902 - DNA, 25 bp, Homo sapien
cctggtccctgaatgtagctgtagc

SEQ ID NO: 1645903 - DNA, 25 bp, Homo sapien
gaaacaaagttgtcgaagagctgaa

SEQ ID NO: 1645904 - DNA, 25 bp, Homo sapien
tatgcggagacaaaccagcacagac

SEQ ID NO: 1645905 - DNA, 25 bp, Homo sapien
tcatgcacggtcagatccaggtgag

SEQ ID NO: 1645906 - DNA, 25 bp, Homo sapien
acatggacacgtgtgcatacaaagc

SEQ ID NO: 1645907 - DNA, 25 bp, Homo sapien
gacacgtgtgcatacaaagcggccc

SEQ ID NO: 1645908 - DNA, 25 bp, Homo sapien
tggacacgtgtgcatacaaagcggc

SEQ ID NO: 1645909 - DNA, 25 bp, Homo sapien
acgtgtgcatacaaagcggccctca

SEQ ID NO: 1645910 - DNA, 25 bp, Homo sapien
ccagcagcttgcgctgatgcctgcg

SEQ ID NO: 1645911 - DNA, 25 bp, Homo sapien
cagcttgcgctgatgcctgcgggca

SEQ ID NO: 1645912 - DNA, 25 bp, Homo sapien
agcagcttgcgctgatgcctgcggg

SEQ ID NO: 1645913 - DNA, 25 bp, Homo sapien
cagcagcttgcgctgatgcctgcgg

SEQ ID NO: 1645914 - DNA, 25 bp, Homo sapien
ccaggcttcttgtagcactcgggca

SEQ ID NO: 1645915 - DNA, 25 bp, Homo sapien
agcactcgggcagcggactccttca

SEQ ID NO: 1645916 - DNA, 25 bp, Homo sapien
ggcttcttgtagcactcgggcagcg

SEQ ID NO: 1645917 - DNA, 25 bp, Homo sapien
tcttgtagcactcgggcagcggact

SEQ ID NO: 1645918 - DNA, 25 bp, Homo sapien
atactggatatccatcatgaagttg

SEQ ID NO: 1645919 - DNA, 25 bp, Homo sapien
ggtatactggatatccatcatgaag

SEQ ID NO: 1645920 - DNA, 25 bp, Homo sapien
ttggtatactggatatccatcatga

SEQ ID NO: 1645921 - DNA, 25 bp, Homo sapien
tctttggtatactggatatccatca

SEQ ID NO: 1645922 - DNA, 25 bp, Homo sapien
ctggacaactcagccctggctccat

SEQ ID NO: 1645923 - DNA, 25 bp, Homo sapien
ggggagtggaggtcaccacatcctt

SEQ ID NO: 1645924 - DNA, 25 bp, Homo sapien
ggagtggaggtcaccacatccttca

SEQ ID NO: 1645925 - DNA, 25 bp, Homo sapien
tgggggagtggaggtcaccacatcc

SEQ ID NO: 1645926 - DNA, 25 bp, Homo sapien
actgggggagtggaggtcaccacat

SEQ ID NO: 1645927 - DNA, 25 bp, Homo sapien
ggctgggagacgatttcccagttct

SEQ ID NO: 1645928 - DNA, 25 bp, Homo sapien
aggctgggagacgatttcccagttc

SEQ ID NO: 1645929 - DNA, 25 bp, Homo sapien
gctgggagacgatttcccagttctg

SEQ ID NO: 1645930 - DNA, 25 bp, Homo sapien
acaggcagacgatcttgccccacat

SEQ ID NO: 1645931 - DNA, 25 bp, Homo sapien
cagtgcacaggcagacgatcttgcc

SEQ ID NO: 1645932 - DNA, 25 bp, Homo sapien
tgcacaggcagacgatcttgcccca

SEQ ID NO: 1645933 - DNA, 25 bp, Homo sapien
gcagacgatcttgccccacatggtg

SEQ ID NO: 1645934 - DNA, 25 bp, Homo sapien
gaatgtgatggggatcagccaaagt

SEQ ID NO: 1645935 - DNA, 25 bp, Homo sapien
ggaatgtgatggggatcagccaaag

SEQ ID NO: 1645936 - DNA, 25 bp, Homo sapien
atgtgatggggatcagccaaagtgt

SEQ ID NO: 1645937 - DNA, 25 bp, Homo sapien
gtgatggggatcagccaaagtgtgt

SEQ ID NO: 1645938 - DNA, 25 bp, Homo sapien
ctgaaaggtgcccagtggcattaac

SEQ ID NO: 1645939 - DNA, 25 bp, Homo sapien
tgaaaggtgcccagtggcattaaca

SEQ ID NO: 1645940 - DNA, 25 bp, Homo sapien
gaaaggtgcccagtggcattaacag

SEQ ID NO: 1645941 - DNA, 25 bp, Homo sapien
aaaggtgcccagtggcattaacagc

SEQ ID NO: 1645942 - DNA, 25 bp, Homo sapien
aaccagtggcggaagcggacttgat

SEQ ID NO: 1645943 - DNA, 25 bp, Homo sapien
acttgattgagagcgccgatgctgc

SEQ ID NO: 1645944 - DNA, 25 bp, Homo sapien
cggccagggtgcgtgttcatgtaaa

SEQ ID NO: 1645945 - DNA, 25 bp, Homo sapien
taaagcttggccacgaaccagtggc

SEQ ID NO: 1645946 - DNA, 25 bp, Homo sapien
ctgcggggaggtcagcggcgcccct

SEQ ID NO: 1645947 - DNA, 25 bp, Homo sapien
acgggcgccgggtgcagcccacaca

SEQ ID NO: 1645948 - DNA, 25 bp, Homo sapien
ctaaatcctgcacgcacggcgggcc

SEQ ID NO: 1645949 - DNA, 25 bp, Homo sapien
aggtcagcggcgcccctaaatcctg

SEQ ID NO: 1645950 - DNA, 25 bp, Homo sapien
gcagcccgttgtcggtcatgaacag

SEQ ID NO: 1645951 - DNA, 25 bp, Homo sapien
cggtcagcgccacgcgccagtcccg

SEQ ID NO: 1645952 - DNA, 25 bp, Homo sapien
agctccagcacgatctgcgccgcct

SEQ ID NO: 1645953 - DNA, 25 bp, Homo sapien
tcccgcagcccgttgtcggtcatga

SEQ ID NO: 1645954 - DNA, 25 bp, Homo sapien
aatgctgatcgtgcatttaaccagg

SEQ ID NO: 1645955 - DNA, 25 bp, Homo sapien
aggtggaaatgctgatcgtgcattt

SEQ ID NO: 1645956 - DNA, 25 bp, Homo sapien
atgaaaggccacgatgaggcagagg

SEQ ID NO: 1645957 - DNA, 25 bp, Homo sapien
cgtgcatttaaccaggaacaggtag

SEQ ID NO: 1645958 - DNA, 25 bp, Homo sapien
aaaaagcggtgtgagatcccaggtc

SEQ ID NO: 1645959 - DNA, 25 bp, Homo sapien
cagtccctcttgatgtgtcggttct

SEQ ID NO: 1645960 - DNA, 25 bp, Homo sapien
ttgattcccaattttcctagcctcc

SEQ ID NO: 1645961 - DNA, 25 bp, Homo sapien
atgtgtcggttctggagaagtctca

SEQ ID NO: 1645962 - DNA, 25 bp, Homo sapien
tgggcgtccttacaaagcattgcac

SEQ ID NO: 1645963 - DNA, 25 bp, Homo sapien
ggacctgtctgcacttgggcctgta

SEQ ID NO: 1645964 - DNA, 25 bp, Homo sapien
gcattgcacctgtttctcctaagag

SEQ ID NO: 1645965 - DNA, 25 bp, Homo sapien
tgtgtggcacaaccttggaggaatc

SEQ ID NO: 1645966 - DNA, 25 bp, Homo sapien
ggccaagcaccagatccccgcccat

SEQ ID NO: 1645967 - DNA, 25 bp, Homo sapien
tcctgctccagcaagcgctttcggc

SEQ ID NO: 1645968 - DNA, 25 bp, Homo sapien
aagcgctttcggcgtctcaaggccc

SEQ ID NO: 1645969 - DNA, 25 bp, Homo sapien
gagcaccccccgaaccacagcatct

SEQ ID NO: 1645970 - DNA, 25 bp, Homo sapien
tgtggcttgcaggtcgtcagcctgc

SEQ ID NO: 1645971 - DNA, 25 bp, Homo sapien
ggcttgcaggtcgtcagcctgctct

SEQ ID NO: 1645972 - DNA, 25 bp, Homo sapien
cccacctcgcagcacgcacagggca

SEQ ID NO: 1645973 - DNA, 25 bp, Homo sapien
cactgtggcttgcaggtcgtcagcc

SEQ ID NO: 1645974 - DNA, 25 bp, Homo sapien
tgaggcacagcagagccctgtgccc

SEQ ID NO: 1645975 - DNA, 25 bp, Homo sapien
ctgaggcacagcagagccctgtgcc

SEQ ID NO: 1645976 - DNA, 25 bp, Homo sapien
gaggcacagcagagccctgtgccct

SEQ ID NO: 1645977 - DNA, 25 bp, Homo sapien
gaaagagacgtccatccacgtggat

SEQ ID NO: 1645978 - DNA, 25 bp, Homo sapien
gtcacacacaatggtctgtactttg

SEQ ID NO: 1645979 - DNA, 25 bp, Homo sapien
cacagacacacgatgggctttgtca

SEQ ID NO: 1645980 - DNA, 25 bp, Homo sapien
cagctcccccttttgagaataagga

SEQ ID NO: 1645981 - DNA, 25 bp, Homo sapien
gggtcagtcctaggaaactgcttca

SEQ ID NO: 1645982 - DNA, 25 bp, Homo sapien
tagtagaggacctcaaaatgcctaa

SEQ ID NO: 1645983 - DNA, 25 bp, Homo sapien
gggttacagtgggaagggcacctgc

SEQ ID NO: 1645984 - DNA, 25 bp, Homo sapien
cccttggtctcaatcctagaatggg

SEQ ID NO: 1645985 - DNA, 25 bp, Homo sapien
tatctcctggtcttagtctccaagt

SEQ ID NO: 1645986 - DNA, 25 bp, Homo sapien
ctatctcctggtcttagtctccaag

SEQ ID NO: 1645987 - DNA, 25 bp, Homo sapien
tttttggtcataaaatcagttccca

SEQ ID NO: 1645988 - DNA, 25 bp, Homo sapien
cataaaatcagttcccactatgttg

SEQ ID NO: 1645989 - DNA, 25 bp, Homo sapien
taggtaagctgacacatcaaactgg

SEQ ID NO: 1645990 - DNA, 25 bp, Homo sapien
taaggcctttcagctgatagagtca

SEQ ID NO: 1645991 - DNA, 25 bp, Homo sapien
gaatctcaggcatgggctgaagcag

SEQ ID NO: 1645992 - DNA, 25 bp, Homo sapien
aactggaactgtcacataggtaagc

SEQ ID NO: 1645993 - DNA, 25 bp, Homo sapien
gagtctgggaagtctgcaatcaatg

SEQ ID NO: 1645994 - DNA, 25 bp, Homo sapien
tctcactgagttgctggaaagatca

SEQ ID NO: 1645995 - DNA, 25 bp, Homo sapien
gattcgatggctggtgagaacccac

SEQ ID NO: 1645996 - DNA, 25 bp, Homo sapien
cacagagaacatgctaaaggatccc

SEQ ID NO: 1645997 - DNA, 25 bp, Homo sapien
gaaaatattggcacagagagctcaa

SEQ ID NO: 1645998 - DNA, 25 bp, Homo sapien
ccagagcctggcttaagtaactcgc

SEQ ID NO: 1645999 - DNA, 25 bp, Homo sapien
gattttgctcaagggtgaattcctc

SEQ ID NO: 1646000 - DNA, 25 bp, Homo sapien
tgacctgtgacttagggcttatgac

SEQ ID NO: 1646001 - DNA, 25 bp, Homo sapien
acgacatggctgttttgccctcccc

SEQ ID NO: 1646002 - DNA, 25 bp, Homo sapien
acatggctgttttgccctccccggg

SEQ ID NO: 1646003 - DNA, 25 bp, Homo sapien
ttcatcggggcacgacatggctgtt

SEQ ID NO: 1646004 - DNA, 25 bp, Homo sapien
tcagaattgctcttcatcggggcac

SEQ ID NO: 1646005 - DNA, 25 bp, Homo sapien
agctatgtgataggggctgaagcag

SEQ ID NO: 1646006 - DNA, 25 bp, Homo sapien
tgagctatgtgataggggctgaagc

SEQ ID NO: 1646007 - DNA, 25 bp, Homo sapien
gcagcaagaatgaggtgtgtgagcc

SEQ ID NO: 1646008 - DNA, 25 bp, Homo sapien
agcaagaatgaggtgtgtgagccct

SEQ ID NO: 1646009 - DNA, 25 bp, Homo sapien
cagcaggaggactgggaggagcagg

SEQ ID NO: 1646010 - DNA, 25 bp, Homo sapien
aggaggactgggaggagcagggcca

SEQ ID NO: 1646011 - DNA, 25 bp, Homo sapien
caggaggactgggaggagcagggcc

SEQ ID NO: 1646012 - DNA, 25 bp, Homo sapien
ggactgggaggagcagggccaggac

SEQ ID NO: 1646013 - DNA, 25 bp, Homo sapien
agggctgggtcatggatttcctgtt

SEQ ID NO: 1646014 - DNA, 25 bp, Homo sapien
aagggctgggtcatggatttcctgt

SEQ ID NO: 1646015 - DNA, 25 bp, Homo sapien
ctgtagtgctcggggaggggtggtg

SEQ ID NO: 1646016 - DNA, 25 bp, Homo sapien
gcaggagggccggtggcaggttctg

SEQ ID NO: 1646017 - DNA, 25 bp, Homo sapien
agccctggaggtcgatggctgtcca

SEQ ID NO: 1646018 - DNA, 25 bp, Homo sapien
gccggtggcaggttctgatgtacac

SEQ ID NO: 1646019 - DNA, 25 bp, Homo sapien
gcaggttctgatgtacacagggact

SEQ ID NO: 1646020 - DNA, 25 bp, Homo sapien
tgccgatagcgcagtcatcctggtg

SEQ ID NO: 1646021 - DNA, 25 bp, Homo sapien
tgacactggactcgtcgggacctgc

SEQ ID NO: 1646022 - DNA, 25 bp, Homo sapien
ttgccctggaagcaggcggtctggt

SEQ ID NO: 1646023 - DNA, 25 bp, Homo sapien
ccgatacaggcgtagcactcggcgc

SEQ ID NO: 1646024 - DNA, 25 bp, Homo sapien
catgaggtgggcgttgcatttgtca

SEQ ID NO: 1646025 - DNA, 25 bp, Homo sapien
cgcaccaccgagtagtctggcggca

SEQ ID NO: 1646026 - DNA, 25 bp, Homo sapien
gcaccagggtcaccggcgcgcgata

SEQ ID NO: 1646027 - DNA, 25 bp, Homo sapien
ttcgattgcgtctggcccgcaggag

SEQ ID NO: 1646028 - DNA, 25 bp, Homo sapien
acaggatagcctcaaagcactcatg

SEQ ID NO: 1646029 - DNA, 25 bp, Homo sapien
agacaggatagcctcaaagcactca

SEQ ID NO: 1646030 - DNA, 25 bp, Homo sapien
agagacaggatagcctcaaagcact

SEQ ID NO: 1646031 - DNA, 25 bp, Homo sapien
cagagacaggatagcctcaaagcac

SEQ ID NO: 1646032 - DNA, 25 bp, Homo sapien
tgtgctcaaagctgtagcactgcag

SEQ ID NO: 1646033 - DNA, 25 bp, Homo sapien
caaaggggccaaagtaggtgtgctc

SEQ ID NO: 1646034 - DNA, 25 bp, Homo sapien
taggtgtgctcaaagctgtagcact

SEQ ID NO: 1646035 - DNA, 25 bp, Homo sapien
ccaaagtaggtgtgctcaaagctgt

SEQ ID NO: 1646036 - DNA, 25 bp, Homo sapien
aggcagagcgcagccccaaagaggc

SEQ ID NO: 1646037 - DNA, 25 bp, Homo sapien
ctgtcaggcagagcgcagccccaaa

SEQ ID NO: 1646038 - DNA, 25 bp, Homo sapien
agagcgcagccccaaagaggcagag

SEQ ID NO: 1646039 - DNA, 25 bp, Homo sapien
cagccccaaagaggcagagcagaat

SEQ ID NO: 1646040 - DNA, 25 bp, Homo sapien
agctcctcccgctgtgatgtgctgc

SEQ ID NO: 1646041 - DNA, 25 bp, Homo sapien
tcctcccgctgtgatgtgctgcctg

SEQ ID NO: 1646042 - DNA, 25 bp, Homo sapien
tcccgctgtgatgtgctgcctggct

SEQ ID NO: 1646043 - DNA, 25 bp, Homo sapien
tgctgcctggctggttctccttact

SEQ ID NO: 1646044 - DNA, 25 bp, Homo sapien
tttcacaggcctctaactcatgacc

SEQ ID NO: 1646045 - DNA, 25 bp, Homo sapien
ggagaacgtgtaaccctggagatcg

SEQ ID NO: 1646046 - DNA, 25 bp, Homo sapien
gattagtgattattagttctagcgg

SEQ ID NO: 1646047 - DNA, 25 bp, Homo sapien
gatcgatgggtcagggctaaacccc

SEQ ID NO: 1646048 - DNA, 25 bp, Homo sapien
tgtctccttccgaaactacacgcgg

SEQ ID NO: 1646049 - DNA, 25 bp, Homo sapien
gggcatgagtccgcaacgccctctg

SEQ ID NO: 1646050 - DNA, 25 bp, Homo sapien
gccgactggggcatgagtccgcaac

SEQ ID NO: 1646051 - DNA, 25 bp, Homo sapien
cctgcttcgatgtctccttccgaaa

SEQ ID NO: 1646052 - DNA, 25 bp, Homo sapien
tatttagtaagcaaatacgatgtgc

SEQ ID NO: 1646053 - DNA, 25 bp, Homo sapien
gcaaatacgatgtgccagatgcctt

SEQ ID NO: 1646054 - DNA, 25 bp, Homo sapien
catcataatagtgacaacagtaaaa

SEQ ID NO: 1646055 - DNA, 25 bp, Homo sapien
tcttcactatagcatcataatagtg

SEQ ID NO: 1646056 - DNA, 25 bp, Homo sapien
aagttgatagcaatgactaaaggcc

SEQ ID NO: 1646057 - DNA, 25 bp, Homo sapien
tgatagcaatgactaaaggccttac

SEQ ID NO: 1646058 - DNA, 25 bp, Homo sapien
tgatgttgactaagttgatagcaat

SEQ ID NO: 1646059 - DNA, 25 bp, Homo sapien
catggtgaaatctttgatgttgact

SEQ ID NO: 1646060 - DNA, 25 bp, Homo sapien
catgttgagtaagtcgatcactgcg

SEQ ID NO: 1646061 - DNA, 25 bp, Homo sapien
caagtagatagctgcgaacaaaggc

SEQ ID NO: 1646062 - DNA, 25 bp, Homo sapien
ttaaggtctccaacacgactgaagg

SEQ ID NO: 1646063 - DNA, 25 bp, Homo sapien
cctgagatagaacgaaaggccttct

SEQ ID NO: 1646064 - DNA, 25 bp, Homo sapien
taggtctctgttgtctcccaaattc

SEQ ID NO: 1646065 - DNA, 25 bp, Homo sapien
tatcatttgactaaaacatcccact

SEQ ID NO: 1646066 - DNA, 25 bp, Homo sapien
catgtctcctgatggtacgcattta

SEQ ID NO: 1646067 - DNA, 25 bp, Homo sapien
tgtgggtcagttctgaaaataaacc

SEQ ID NO: 1646068 - DNA, 25 bp, Homo sapien
ccctctgatccgagtttaaatattc

SEQ ID NO: 1646069 - DNA, 25 bp, Homo sapien
tacaaatccctctgatccgagttta

SEQ ID NO: 1646070 - DNA, 25 bp, Homo sapien
ctctgatccgagtttaaatattccc

SEQ ID NO: 1646071 - DNA, 25 bp, Homo sapien
aatccctctgatccgagtttaaata

SEQ ID NO: 1646072 - DNA, 25 bp, Homo sapien
atggcaacatcgctgaatgtcaatg

SEQ ID NO: 1646073 - DNA, 25 bp, Homo sapien
tggcaacatcgctgaatgtcaatgg

SEQ ID NO: 1646074 - DNA, 25 bp, Homo sapien
ggcaacatcgctgaatgtcaatggc

SEQ ID NO: 1646075 - DNA, 25 bp, Homo sapien
tgctcttcaaaattcagttaaaaga

SEQ ID NO: 1646076 - DNA, 25 bp, Homo sapien
gaatgaaaaaatggccaagtatggt

SEQ ID NO: 1646077 - DNA, 25 bp, Homo sapien
actggatttcatccagaaatggaac

SEQ ID NO: 1646078 - DNA, 25 bp, Homo sapien
atccctaaagaaaaagtacaatctg

SEQ ID NO: 1646079 - DNA, 25 bp, Homo sapien
ctaatatggcatgtatgttggacac

SEQ ID NO: 1646080 - DNA, 25 bp, Homo sapien
tatcatctaccacatatcattctag

SEQ ID NO: 1646081 - DNA, 25 bp, Homo sapien
gacaagcaccctcttattagattca

SEQ ID NO: 1646082 - DNA, 25 bp, Homo sapien
tcctgagttggaacacagtaatgca

SEQ ID NO: 1646083 - DNA, 25 bp, Homo sapien
tctgactgcagcttaagagaaggcc

SEQ ID NO: 1646084 - DNA, 25 bp, Homo sapien
tagaaagactcctgcacatatatgg

SEQ ID NO: 1646085 - DNA, 25 bp, Homo sapien
tgtttttaacaaacggtgccagtgc

SEQ ID NO: 1646086 - DNA, 25 bp, Homo sapien
tggtctcacaggctgcaaacgaggg

SEQ ID NO: 1646087 - DNA, 25 bp, Homo sapien
actgttattctgttatggtgggtaa

SEQ ID NO: 1646088 - DNA, 25 bp, Homo sapien
tatgctcccgtctcaggtggtggca

SEQ ID NO: 1646089 - DNA, 25 bp, Homo sapien
catatgccttgagggatggagatat

SEQ ID NO: 1646090 - DNA, 25 bp, Homo sapien
caccgtacccaaccaaaaagatctg

SEQ ID NO: 1646091 - DNA, 25 bp, Homo sapien
ccatttaatgctaagtttaggaagc

SEQ ID NO: 1646092 - DNA, 25 bp, Homo sapien
ggaatgtaaagggatactttcgata

SEQ ID NO: 1646093 - DNA, 25 bp, Homo sapien
gatactttcgataataatctggcag

SEQ ID NO: 1646094 - DNA, 25 bp, Homo sapien
tgctaagtttaggaagctgtttaag

SEQ ID NO: 1646095 - DNA, 25 bp, Homo sapien
tggctggggaaaatgcagagtgagt

SEQ ID NO: 1646096 - DNA, 25 bp, Homo sapien
aaaacttcacttattatataactct

SEQ ID NO: 1646097 - DNA, 25 bp, Homo sapien
cagagtgagtgctagtgggtatgga

SEQ ID NO: 1646098 - DNA, 25 bp, Homo sapien
cttcacttattatataactctattc

SEQ ID NO: 1646099 - DNA, 25 bp, Homo sapien
cacagtgtcctacaagcagctgtta

SEQ ID NO: 1646100 - DNA, 25 bp, Homo sapien
cgatcatatcctgacaatgctgcta

SEQ ID NO: 1646101 - DNA, 25 bp, Homo sapien
gcagctgttaagacatcgtgttcca

SEQ ID NO: 1646102 - DNA, 25 bp, Homo sapien
tgctatagccagaaagatgcctctt

SEQ ID NO: 1646103 - DNA, 25 bp, Homo sapien
ggactttagctttcagatgtgtagc

SEQ ID NO: 1646104 - DNA, 25 bp, Homo sapien
ctggactttagctttcagatgtgta

SEQ ID NO: 1646105 - DNA, 25 bp, Homo sapien
tggactttagctttcagatgtgtag

SEQ ID NO: 1646106 - DNA, 25 bp, Homo sapien
agtaggagagaaactggaacagtgt

SEQ ID NO: 1646107 - DNA, 25 bp, Homo sapien
cttcaccgagcacaaccagatggga

SEQ ID NO: 1646108 - DNA, 25 bp, Homo sapien
cgagcacaaccagatgggagtagga

SEQ ID NO: 1646109 - DNA, 25 bp, Homo sapien
tcaccgagcacaaccagatgggagt

SEQ ID NO: 1646110 - DNA, 25 bp, Homo sapien
gctgctcaagcagacaggcctgaaa

SEQ ID NO: 1646111 - DNA, 25 bp, Homo sapien
caagatcagtgatgcctagggtgga

SEQ ID NO: 1646112 - DNA, 25 bp, Homo sapien
tcccaagtgtctgtgaggcgatagg

SEQ ID NO: 1646113 - DNA, 25 bp, Homo sapien
tggttacaaacatagagctggctcc

SEQ ID NO: 1646114 - DNA, 25 bp, Homo sapien
aaagatctagagctcgagggtgacc

SEQ ID NO: 1646115 - DNA, 25 bp, Homo sapien
tagagctcgagggtgaccctagcgc

SEQ ID NO: 1646116 - DNA, 25 bp, Homo sapien
acgtaggggctacagcagctcggac

SEQ ID NO: 1646117 - DNA, 25 bp, Homo sapien
agggtgaccctagcgcggtgacttc

SEQ ID NO: 1646118 - DNA, 25 bp, Homo sapien
aactgggactttcatacactggtgg

SEQ ID NO: 1646119 - DNA, 25 bp, Homo sapien
tggttaatggattcacaaaggtgcc

SEQ ID NO: 1646120 - DNA, 25 bp, Homo sapien
tgaaaacccaagtatcccaccagtg

SEQ ID NO: 1646121 - DNA, 25 bp, Homo sapien
tctcatatgcaaatagtggacctcc

SEQ ID NO: 1646122 - DNA, 25 bp, Homo sapien
gatttggcagtcaacaaagtccctg

SEQ ID NO: 1646123 - DNA, 25 bp, Homo sapien
caacgtattaggcactgaaaaggca

SEQ ID NO: 1646124 - DNA, 25 bp, Homo sapien
caatcacttggctgaactactgact

SEQ ID NO: 1646125 - DNA, 25 bp, Homo sapien
ccatatgtctccactcttgtgaggc

SEQ ID NO: 1646126 - DNA, 25 bp, Homo sapien
aaggaaagtccttgtcaccctcatc

SEQ ID NO: 1646127 - DNA, 25 bp, Homo sapien
gctgatgaatgataagacttgagct

SEQ ID NO: 1646128 - DNA, 25 bp, Homo sapien
ctcgctgatgaatgataagacttga

SEQ ID NO: 1646129 - DNA, 25 bp, Homo sapien
tcatcagcatggactcgctgatgaa

SEQ ID NO: 1646130 - DNA, 25 bp, Homo sapien
aaggtaggatctctgtctgaagcgc

SEQ ID NO: 1646131 - DNA, 25 bp, Homo sapien
tatgagctccagctgaagactttcc

SEQ ID NO: 1646132 - DNA, 25 bp, Homo sapien
ctctggtgggcttgaaggtaggatc

SEQ ID NO: 1646133 - DNA, 25 bp, Homo sapien
gatgggcttgaaggtatgagctcca

SEQ ID NO: 1646134 - DNA, 25 bp, Homo sapien
tggtccagcagatttgaggcccggc

SEQ ID NO: 1646135 - DNA, 25 bp, Homo sapien
tacattaagatctgagctccgactg

SEQ ID NO: 1646136 - DNA, 25 bp, Homo sapien
tgaagctgtgaacctacactgaagc

SEQ ID NO: 1646137 - DNA, 25 bp, Homo sapien
tgtgccagaaaattggaggcccgac

SEQ ID NO: 1646138 - DNA, 25 bp, Homo sapien
atgagcctgcagtcgtgaacgccaa

SEQ ID NO: 1646139 - DNA, 25 bp, Homo sapien
gcttgaagacttgaaaaccgacgga

SEQ ID NO: 1646140 - DNA, 25 bp, Homo sapien
ccgtatgaactatcagaggagcttg

SEQ ID NO: 1646141 - DNA, 25 bp, Homo sapien
tgtgacctctgactaaaactcctgt

SEQ ID NO: 1646142 - DNA, 25 bp, Homo sapien
ctgaggagttatctctctgggttgc

SEQ ID NO: 1646143 - DNA, 25 bp, Homo sapien
tctctctaactgtggtaggccatct

SEQ ID NO: 1646144 - DNA, 25 bp, Homo sapien
tgagaccacattcctgaagttctcc

SEQ ID NO: 1646145 - DNA, 25 bp, Homo sapien
ccactgagaccacattcctgaagtt

SEQ ID NO: 1646146 - DNA, 25 bp, Homo sapien
ctgagaccacattcctgaagttctc

SEQ ID NO: 1646147 - DNA, 25 bp, Homo sapien
actgagaccacattcctgaagttct

SEQ ID NO: 1646148 - DNA, 25 bp, Homo sapien
tcctccttctggagaagtgccaagt

SEQ ID NO: 1646149 - DNA, 25 bp, Homo sapien
tgtcctcctccttctggagaagtgc

SEQ ID NO: 1646150 - DNA, 25 bp, Homo sapien
cctcctccttctggagaagtgccaa

SEQ ID NO: 1646151 - DNA, 25 bp, Homo sapien
tcctcctccttctggagaagtgcca

SEQ ID NO: 1646152 - DNA, 25 bp, Homo sapien
agaaaaaagccatgagagtttggcc

SEQ ID NO: 1646153 - DNA, 25 bp, Homo sapien
cttggtccaaacacctaaacttctg

SEQ ID NO: 1646154 - DNA, 25 bp, Homo sapien
tggtccaaacacctaaacttctgtg

SEQ ID NO: 1646155 - DNA, 25 bp, Homo sapien
tccaaacacctaaacttctgtgcct

SEQ ID NO: 1646156 - DNA, 25 bp, Homo sapien
ggtccaaacacctaaacttctgtgc

SEQ ID NO: 1646157 - DNA, 25 bp, Homo sapien
cataccagagccagtattctaaatc

SEQ ID NO: 1646158 - DNA, 25 bp, Homo sapien
gcattttagggagttctcaacagat

SEQ ID NO: 1646159 - DNA, 25 bp, Homo sapien
tatccatttaacaggcgaggaagct

SEQ ID NO: 1646160 - DNA, 25 bp, Homo sapien
caggaacagtacctgaatccagctt

SEQ ID NO: 1646161 - DNA, 25 bp, Homo sapien
aaatggagttcttgtagctctcagg

SEQ ID NO: 1646162 - DNA, 25 bp, Homo sapien
ttgtagctctcagggtatgattctg

SEQ ID NO: 1646163 - DNA, 25 bp, Homo sapien
cacatggcttgatgatggggaaaca

SEQ ID NO: 1646164 - DNA, 25 bp, Homo sapien
ttgacccttcagcagagagcctctg

SEQ ID NO: 1646165 - DNA, 25 bp, Homo sapien
cctttagcggcatgaggaatgggct

SEQ ID NO: 1646166 - DNA, 25 bp, Homo sapien
gagagactattaggagagccacact

SEQ ID NO: 1646167 - DNA, 25 bp, Homo sapien
cagattaccctctcaaacgggagga

SEQ ID NO: 1646168 - DNA, 25 bp, Homo sapien
gagggtgactgagctctattagcca

SEQ ID NO: 1646169 - DNA, 25 bp, Homo sapien
gatggattctacagcccaccaaacg

SEQ ID NO: 1646170 - DNA, 25 bp, Homo sapien
tgtagcacccaaaatccagatgcct

SEQ ID NO: 1646171 - DNA, 25 bp, Homo sapien
cctgttggagagctacatgaatcac

SEQ ID NO: 1646172 - DNA, 25 bp, Homo sapien
caccaaacgtgagataacagacaag

SEQ ID NO: 1646173 - DNA, 25 bp, Homo sapien
tgctgggtactcttgagaagaatat

SEQ ID NO: 1646174 - DNA, 25 bp, Homo sapien
actgaataactcctctttgcaaacc

SEQ ID NO: 1646175 - DNA, 25 bp, Homo sapien
ggtactcttgagaagaatatgataa

SEQ ID NO: 1646176 - DNA, 25 bp, Homo sapien
tcttgagaagaatatgataatgtcc

SEQ ID NO: 1646177 - DNA, 25 bp, Homo sapien
tctcgcactcggaacagaagaggaa

SEQ ID NO: 1646178 - DNA, 25 bp, Homo sapien
gaatgctaggtcctgtcacagtggg

SEQ ID NO: 1646179 - DNA, 25 bp, Homo sapien
gacgccacctgttgagtgatgcact

SEQ ID NO: 1646180 - DNA, 25 bp, Homo sapien
taaaaaacgggtcaggcatagtcca

SEQ ID NO: 1646181 - DNA, 25 bp, Homo sapien
cattcaggtccacttccaaccaggg

SEQ ID NO: 1646182 - DNA, 25 bp, Homo sapien
ttttcctgctgaccgaagtgcgagc

SEQ ID NO: 1646183 - DNA, 25 bp, Homo sapien
cagcagctccggatacagtaaggca

SEQ ID NO: 1646184 - DNA, 25 bp, Homo sapien
agtgcgagccctgctgatcctacga

SEQ ID NO: 1646185 - DNA, 25 bp, Homo sapien
catattaccacataggcgtttcgga

SEQ ID NO: 1646186 - DNA, 25 bp, Homo sapien
aaattacatcggcatactatcagtt

SEQ ID NO: 1646187 - DNA, 25 bp, Homo sapien
aaggtaaggacgacactcagtgcag

SEQ ID NO: 1646188 - DNA, 25 bp, Homo sapien
tgttcactctccagtaatacttctg

SEQ ID NO: 1646189 - DNA, 25 bp, Homo sapien
tgggaagaactttagccgggcctca

SEQ ID NO: 1646190 - DNA, 25 bp, Homo sapien
tccacacgggagagagaccttataa

SEQ ID NO: 1646191 - DNA, 25 bp, Homo sapien
tataagcatcaggtggtccacacag

SEQ ID NO: 1646192 - DNA, 25 bp, Homo sapien
taccgtaaagaccagccgagagact

SEQ ID NO: 1646193 - DNA, 25 bp, Homo sapien
taatcagcaggctccgaggaaaaag

SEQ ID NO: 1646194 - DNA, 25 bp, Homo sapien
gcccattcaggtaaaaactcgcaca

SEQ ID NO: 1646195 - DNA, 25 bp, Homo sapien
tcactcagttaagggaacaagacca

SEQ ID NO: 1646196 - DNA, 25 bp, Homo sapien
tattggacgtgagattaagaactcc

SEQ ID NO: 1646197 - DNA, 25 bp, Homo sapien
ttgcctgtctacatccactgttcta

SEQ ID NO: 1646198 - DNA, 25 bp, Homo sapien
tgttggccaacctttggccatctca

SEQ ID NO: 1646199 - DNA, 25 bp, Homo sapien
gcagatatctccgtgacatactaat

SEQ ID NO: 1646200 - DNA, 25 bp, Homo sapien
tatgtctaaagaggattccattgtg

SEQ ID NO: 1646201 - DNA, 25 bp, Homo sapien
tgactacagtctcacctaagcattc

SEQ ID NO: 1646202 - DNA, 25 bp, Homo sapien
gaagcctcagtaatgtgtgtaataa

SEQ ID NO: 1646203 - DNA, 25 bp, Homo sapien
tcaacttcagaatgtccacattgga

SEQ ID NO: 1646204 - DNA, 25 bp, Homo sapien
cacgggagagaaactacggaagtat

SEQ ID NO: 1646205 - DNA, 25 bp, Homo sapien
tagttttaacctcccatcgtcagat

SEQ ID NO: 1646206 - DNA, 25 bp, Homo sapien
gatagctattccatgacgacaccgc

SEQ ID NO: 1646207 - DNA, 25 bp, Homo sapien
gacaccgcttctccactagtagctg

SEQ ID NO: 1646208 - DNA, 25 bp, Homo sapien
tcaggaagagagacggacgactcac

SEQ ID NO: 1646209 - DNA, 25 bp, Homo sapien
gaagcggagtccagacacactctga

SEQ ID NO: 1646210 - DNA, 25 bp, Homo sapien
gagtccaacgcttcccgctgaagag

SEQ ID NO: 1646211 - DNA, 25 bp, Homo sapien
tatggaatacgttcccggtgggcac

SEQ ID NO: 1646212 - DNA, 25 bp, Homo sapien
cactgcggtgtgtgtagtcaaggac

SEQ ID NO: 1646213 - DNA, 25 bp, Homo sapien
cctgtcatggacactgtattccctg

SEQ ID NO: 1646214 - DNA, 25 bp, Homo sapien
tatccagagtgatccagagttggca

SEQ ID NO: 1646215 - DNA, 25 bp, Homo sapien
tagagattacctctcagatgctgag

SEQ ID NO: 1646216 - DNA, 25 bp, Homo sapien
agacactgtcctcccgcatgatatg

SEQ ID NO: 1646217 - DNA, 25 bp, Homo sapien
gcttctgccttaggtcaagtcttaa

SEQ ID NO: 1646218 - DNA, 25 bp, Homo sapien
cttatatttgtgagaaatgtgggag

SEQ ID NO: 1646219 - DNA, 25 bp, Homo sapien
aataggcattgcatggtccacacag

SEQ ID NO: 1646220 - DNA, 25 bp, Homo sapien
tggggagaagccgttcaaatgtgaa

SEQ ID NO: 1646221 - DNA, 25 bp, Homo sapien
agaccttataattgtaaggaatgtg

SEQ ID NO: 1646222 - DNA, 25 bp, Homo sapien
accttataattgtaaggaatgtggg

SEQ ID NO: 1646223 - DNA, 25 bp, Homo sapien
gaccttataattgtaaggaatgtgg

SEQ ID NO: 1646224 - DNA, 25 bp, Homo sapien
gtagtttttcaacacacgccccaca

SEQ ID NO: 1646225 - DNA, 25 bp, Homo sapien
catcccccctctactagttcacagt

SEQ ID NO: 1646226 - DNA, 25 bp, Homo sapien
tcccccctctactagttcacagtga

SEQ ID NO: 1646227 - DNA, 25 bp, Homo sapien
tctactagttcacagtgactattgt

SEQ ID NO: 1646228 - DNA, 25 bp, Homo sapien
ctttggccgtaagattgaggtgaca

SEQ ID NO: 1646229 - DNA, 25 bp, Homo sapien
gatgtgatgcttgagaacttcagga

SEQ ID NO: 1646230 - DNA, 25 bp, Homo sapien
gagtgtgcagtgagaacctacattt

SEQ ID NO: 1646231 - DNA, 25 bp, Homo sapien
ccttgtgccagtgcaatgctgctgt

SEQ ID NO: 1646232 - DNA, 25 bp, Homo sapien
aaatgtgtctatttctgcatcttta

SEQ ID NO: 1646233 - DNA, 25 bp, Homo sapien
tttatatctatgagctgaatgttgc

SEQ ID NO: 1646234 - DNA, 25 bp, Homo sapien
gtgtgcagttgacccacatcccatg

SEQ ID NO: 1646235 - DNA, 25 bp, Homo sapien
gtttatgtctgtgagaaattcttta

SEQ ID NO: 1646236 - DNA, 25 bp, Homo sapien
tagatttagcctcatactattagcg

SEQ ID NO: 1646237 - DNA, 25 bp, Homo sapien
acaacagtgtctggttgtaccaggg

SEQ ID NO: 1646238 - DNA, 25 bp, Homo sapien
gtatattagcctttcagccatctcc

SEQ ID NO: 1646239 - DNA, 25 bp, Homo sapien
tccccgctaactccttgaagattgt

SEQ ID NO: 1646240 - DNA, 25 bp, Homo sapien
gctctgttgcctcggatagagtaca

SEQ ID NO: 1646241 - DNA, 25 bp, Homo sapien
tacagtgatgtaagtgtagcccact

SEQ ID NO: 1646242 - DNA, 25 bp, Homo sapien
catgggattaataaggtgaattctc

SEQ ID NO: 1646243 - DNA, 25 bp, Homo sapien
tatatccccttgaaagattttggag

SEQ ID NO: 1646244 - DNA, 25 bp, Homo sapien
gtaggcaagatctttgtaagcatca

SEQ ID NO: 1646245 - DNA, 25 bp, Homo sapien
gacatcagcgggtccacaatggaga

SEQ ID NO: 1646246 - DNA, 25 bp, Homo sapien
ggaccatacaggagacaaaccatat

SEQ ID NO: 1646247 - DNA, 25 bp, Homo sapien
ggaaggagcttcacttgtaggcaag

SEQ ID NO: 1646248 - DNA, 25 bp, Homo sapien
caggaattcctttctatacggtatt

SEQ ID NO: 1646249 - DNA, 25 bp, Homo sapien
taacactcctgtcctcactagaggg

SEQ ID NO: 1646250 - DNA, 25 bp, Homo sapien
tatttgaagagtgtatcatctcgct

SEQ ID NO: 1646251 - DNA, 25 bp, Homo sapien
cttaccactggcaaaacttatttga

SEQ ID NO: 1646252 - DNA, 25 bp, Homo sapien
gaccctcagtggaatcgcggtcggt

SEQ ID NO: 1646253 - DNA, 25 bp, Homo sapien
tgtaatgctgcaggagtacagtcca

SEQ ID NO: 1646254 - DNA, 25 bp, Homo sapien
caagggcttcccagtagtcgtcaac

SEQ ID NO: 1646255 - DNA, 25 bp, Homo sapien
ctctcagggtagaagtccacatttc

SEQ ID NO: 1646256 - DNA, 25 bp, Homo sapien
ggttgctgcagtttttccgcgatag

SEQ ID NO: 1646257 - DNA, 25 bp, Homo sapien
aaacattcggtggagtcgcggacac

SEQ ID NO: 1646258 - DNA, 25 bp, Homo sapien
agtcgcggtcagtttggctccggct

SEQ ID NO: 1646259 - DNA, 25 bp, Homo sapien
ttagctccggcagttgggtcccagg

SEQ ID NO: 1646260 - DNA, 25 bp, Homo sapien
cttggctctttgaccgagatgctca

SEQ ID NO: 1646261 - DNA, 25 bp, Homo sapien
ccttggctctttgaccgagatgctc

SEQ ID NO: 1646262 - DNA, 25 bp, Homo sapien
ttggctctttgaccgagatgctcac

SEQ ID NO: 1646263 - DNA, 25 bp, Homo sapien
cccaaccgagagtgtataggttgtg

SEQ ID NO: 1646264 - DNA, 25 bp, Homo sapien
gtgtataggttgtgtcctcgggcat

SEQ ID NO: 1646265 - DNA, 25 bp, Homo sapien
ccgagagtgtataggttgtgtcctc

SEQ ID NO: 1646266 - DNA, 25 bp, Homo sapien
agtgtataggttgtgtcctcgggca

SEQ ID NO: 1646267 - DNA, 25 bp, Homo sapien
tagcttcataatttaccatgcaaga

SEQ ID NO: 1646268 - DNA, 25 bp, Homo sapien
tattagcttcataatttaccatgca

SEQ ID NO: 1646269 - DNA, 25 bp, Homo sapien
gattttagactgattaggaaattca

SEQ ID NO: 1646270 - DNA, 25 bp, Homo sapien
gaaattcactaggaagagtagcagg

SEQ ID NO: 1646271 - DNA, 25 bp, Homo sapien
tcctgccatggcctaagtgaaatct

SEQ ID NO: 1646272 - DNA, 25 bp, Homo sapien
aataggcattccatggttcacacgg

SEQ ID NO: 1646273 - DNA, 25 bp, Homo sapien
tagtcatcgcatgatccacacagga

SEQ ID NO: 1646274 - DNA, 25 bp, Homo sapien
gaaaggcttcagtcgtagatcagca

SEQ ID NO: 1646275 - DNA, 25 bp, Homo sapien
gatatgtgctttagtcaggcctcaa

SEQ ID NO: 1646276 - DNA, 25 bp, Homo sapien
tattcccaccagagatcccatagtg

SEQ ID NO: 1646277 - DNA, 25 bp, Homo sapien
ggaagggctacaacaggcgcttgaa

SEQ ID NO: 1646278 - DNA, 25 bp, Homo sapien
aagagctttagtcgggccccatgtc

SEQ ID NO: 1646279 - DNA, 25 bp, Homo sapien
tcttttggagagcagaacatgccag

SEQ ID NO: 1646280 - DNA, 25 bp, Homo sapien
tccaccaacgctatgaaacaggaag

SEQ ID NO: 1646281 - DNA, 25 bp, Homo sapien
catgccagaatgtataaggtgcaac

SEQ ID NO: 1646282 - DNA, 25 bp, Homo sapien
tcaatgagatgatgacatagacaca

SEQ ID NO: 1646283 - DNA, 25 bp, Homo sapien
tgcaaataggcttcccagttgattg

SEQ ID NO: 1646284 - DNA, 25 bp, Homo sapien
gagaaacgggttcctccatagagga

SEQ ID NO: 1646285 - DNA, 25 bp, Homo sapien
gaaaagggtcggctggcagtgaatg

SEQ ID NO: 1646286 - DNA, 25 bp, Homo sapien
tacagaccagtttgaggaggcagtg

SEQ ID NO: 1646287 - DNA, 25 bp, Homo sapien
cagcattcggaggagtgtaatccaa

SEQ ID NO: 1646288 - DNA, 25 bp, Homo sapien
cgctcgtggctttgggattcgttcc

SEQ ID NO: 1646289 - DNA, 25 bp, Homo sapien
aaggaggatacaagcaattctggga

SEQ ID NO: 1646290 - DNA, 25 bp, Homo sapien
gagtcgtacacactggctccagaag

SEQ ID NO: 1646291 - DNA, 25 bp, Homo sapien
gagaaaccattcaaatgtgagcagt

SEQ ID NO: 1646292 - DNA, 25 bp, Homo sapien
gagagaaaccattcaaatgtgagca

SEQ ID NO: 1646293 - DNA, 25 bp, Homo sapien
ctggagagaaaccattcaaatgtga

SEQ ID NO: 1646294 - DNA, 25 bp, Homo sapien
ggagagaaaccattcaaatgtgagc

SEQ ID NO: 1646295 - DNA, 25 bp, Homo sapien
taaaggccagtcttataagcagtcc

SEQ ID NO: 1646296 - DNA, 25 bp, Homo sapien
tctaagatttgcagtctcaggcctg

SEQ ID NO: 1646297 - DNA, 25 bp, Homo sapien
cagttatggaatggtggcaaccctc

SEQ ID NO: 1646298 - DNA, 25 bp, Homo sapien
gagtaacaggtctcaattcctccag

SEQ ID NO: 1646299 - DNA, 25 bp, Homo sapien
tgtaaagatgtactatgagatcagt

SEQ ID NO: 1646300 - DNA, 25 bp, Homo sapien
ccaatctatgtaaataagtacacga

SEQ ID NO: 1646301 - DNA, 25 bp, Homo sapien
gatcagtaacagtgcgggaaggaaa

SEQ ID NO: 1646302 - DNA, 25 bp, Homo sapien
ggatgttacatatacttttggtgac

SEQ ID NO: 1646303 - DNA, 25 bp, Homo sapien
cagcccctggttatcttgaagaaag

SEQ ID NO: 1646304 - DNA, 25 bp, Homo sapien
cccctggttatcttgaagaaagatt

SEQ ID NO: 1646305 - DNA, 25 bp, Homo sapien
ccagcccctggttatcttgaagaaa

SEQ ID NO: 1646306 - DNA, 25 bp, Homo sapien
agcccctggttatcttgaagaaaga

SEQ ID NO: 1646307 - DNA, 25 bp, Homo sapien
taatcctccgtagtcctgggaggcg

SEQ ID NO: 1646308 - DNA, 25 bp, Homo sapien
tgccaagcgcttcaccagttatact

SEQ ID NO: 1646309 - DNA, 25 bp, Homo sapien
cgatataggattcgttccccatggg

SEQ ID NO: 1646310 - DNA, 25 bp, Homo sapien
taggatcctccttaatgctactgca

SEQ ID NO: 1646311 - DNA, 25 bp, Homo sapien
cgaagtggaggaaggcgtgggtgag

SEQ ID NO: 1646312 - DNA, 25 bp, Homo sapien
ctcacccacgccttcctccacttcg

SEQ ID NO: 1646313 - DNA, 25 bp, Homo sapien
gtgtagtcgcgcatagctcagctgc

SEQ ID NO: 1646314 - DNA, 25 bp, Homo sapien
tcagaaggcttggacattccggaag

SEQ ID NO: 1646315 - DNA, 25 bp, Homo sapien
cagcattctgtgatatgtagtccgg

SEQ ID NO: 1646316 - DNA, 25 bp, Homo sapien
tccaggagggcggtactgttctgtt

SEQ ID NO: 1646317 - DNA, 25 bp, Homo sapien
cgggcggctggggtgatgcttcgtc

SEQ ID NO: 1646318 - DNA, 25 bp, Homo sapien
gggtgatgcttcgtcgggtttgaag

SEQ ID NO: 1646319 - DNA, 25 bp, Homo sapien
cttcgtcgggtttgaaggtctctcg

SEQ ID NO: 1646320 - DNA, 25 bp, Homo sapien
tctctcgggctgttcgctccctcat

SEQ ID NO: 1646321 - DNA, 25 bp, Homo sapien
tcacctggtccaaattgccaactgt

SEQ ID NO: 1646322 - DNA, 25 bp, Homo sapien
gattattgcaacaccctttgtactg

SEQ ID NO: 1646323 - DNA, 25 bp, Homo sapien
gacagcaacccgaagacagggaaat

SEQ ID NO: 1646324 - DNA, 25 bp, Homo sapien
gcagctttggataatgacgacagca

SEQ ID NO: 1646325 - DNA, 25 bp, Homo sapien
ccaggagtggaggaatgttatctat

SEQ ID NO: 1646326 - DNA, 25 bp, Homo sapien
ctttgagcatttgtagcagagcata

SEQ ID NO: 1646327 - DNA, 25 bp, Homo sapien
gcctgtctgtacaagttgacccata

SEQ ID NO: 1646328 - DNA, 25 bp, Homo sapien
gaatagtcctagtatatggcagaga

SEQ ID NO: 1646329 - DNA, 25 bp, Homo sapien
tttagtcggccttcaagtcttcagg

SEQ ID NO: 1646330 - DNA, 25 bp, Homo sapien
tcaggcccatcagggagttcacact

SEQ ID NO: 1646331 - DNA, 25 bp, Homo sapien
tatgtactgtatgtgggaaaggctt

SEQ ID NO: 1646332 - DNA, 25 bp, Homo sapien
tggtaaaggctttagtcggccttca

SEQ ID NO: 1646333 - DNA, 25 bp, Homo sapien
tcaagtggagcttgaaccttgacat

SEQ ID NO: 1646334 - DNA, 25 bp, Homo sapien
gagcttgaaccttgacatgcatcag

SEQ ID NO: 1646335 - DNA, 25 bp, Homo sapien
agtggagcttgaaccttgacatgca

SEQ ID NO: 1646336 - DNA, 25 bp, Homo sapien
tggagcttgaaccttgacatgcatc

SEQ ID NO: 1646337 - DNA, 25 bp, Homo sapien
catatgggatgtgctaaaggtcaag

SEQ ID NO: 1646338 - DNA, 25 bp, Homo sapien
ttcaaaggagcactgatagctttac

SEQ ID NO: 1646339 - DNA, 25 bp, Homo sapien
cgttgccaacattagagaaggtcac

SEQ ID NO: 1646340 - DNA, 25 bp, Homo sapien
gatgtcttatcgcataaacccacct

SEQ ID NO: 1646341 - DNA, 25 bp, Homo sapien
atttctaagaggacctgcattagca

SEQ ID NO: 1646342 - DNA, 25 bp, Homo sapien
gaggacctgcattagcacatcaccc

SEQ ID NO: 1646343 - DNA, 25 bp, Homo sapien
gacctgcattagcacatcaccctaa

SEQ ID NO: 1646344 - DNA, 25 bp, Homo sapien
taagaggacctgcattagcacatca

SEQ ID NO: 1646345 - DNA, 25 bp, Homo sapien
cacaagcgccctttttactggaagc

SEQ ID NO: 1646346 - DNA, 25 bp, Homo sapien
gaaggattgagtcatcgggctccaa

SEQ ID NO: 1646347 - DNA, 25 bp, Homo sapien
ggtcaaaccttagaacagtggtggc

SEQ ID NO: 1646348 - DNA, 25 bp, Homo sapien
taaacagcgagttacctatgatccg

SEQ ID NO: 1646349 - DNA, 25 bp, Homo sapien
gctatacctgtctgaatgtagggct

SEQ ID NO: 1646350 - DNA, 25 bp, Homo sapien
tacacatgggctaacagcaggcttg

SEQ ID NO: 1646351 - DNA, 25 bp, Homo sapien
tgcccaatggcactgaactatcatg

SEQ ID NO: 1646352 - DNA, 25 bp, Homo sapien
cagatacttgacttgagagccctca

SEQ ID NO: 1646353 - DNA, 25 bp, Homo sapien
tgagcacatatgatagaagtacctg

SEQ ID NO: 1646354 - DNA, 25 bp, Homo sapien
tatgggaacattttataactgcccc

SEQ ID NO: 1646355 - DNA, 25 bp, Homo sapien
tagtacttagatgtcttgctagccc

SEQ ID NO: 1646356 - DNA, 25 bp, Homo sapien
gactcattggacactgaagcttcca

SEQ ID NO: 1646357 - DNA, 25 bp, Homo sapien
ttctggtatgttgttctttgaaacc

SEQ ID NO: 1646358 - DNA, 25 bp, Homo sapien
attctggtatgttgttctttgaaac

SEQ ID NO: 1646359 - DNA, 25 bp, Homo sapien
caggaggcagtctgccggatctcag

SEQ ID NO: 1646360 - DNA, 25 bp, Homo sapien
aatcctgttgtatgtagtcacaaaa

SEQ ID NO: 1646361 - DNA, 25 bp, Homo sapien
cagttccaaggaatcctgttgtatg

SEQ ID NO: 1646362 - DNA, 25 bp, Homo sapien
tgtatgtagtcacaaaataggacaa

SEQ ID NO: 1646363 - DNA, 25 bp, Homo sapien
agataaatcttcagttccaaggaat

SEQ ID NO: 1646364 - DNA, 25 bp, Homo sapien
gcgttgttcgagtttattgagcatg

SEQ ID NO: 1646365 - DNA, 25 bp, Homo sapien
tgtatggtgtgctaggcacttctaa

SEQ ID NO: 1646366 - DNA, 25 bp, Homo sapien
tcattcatctgatcctttcaaacac

SEQ ID NO: 1646367 - DNA, 25 bp, Homo sapien
attgagcatgtatggtgtgctaggc

SEQ ID NO: 1646368 - DNA, 25 bp, Homo sapien
gaggaaattcagttagtgagagatt

SEQ ID NO: 1646369 - DNA, 25 bp, Homo sapien
ttcagttagtgagagattaaggaat

SEQ ID NO: 1646370 - DNA, 25 bp, Homo sapien
gtgtcaggctcatacaccttataat

SEQ ID NO: 1646371 - DNA, 25 bp, Homo sapien
tttagatacaatgataaagaagagg

SEQ ID NO: 1646372 - DNA, 25 bp, Homo sapien
gccagtccaaaatagtagtgctgca

SEQ ID NO: 1646373 - DNA, 25 bp, Homo sapien
tggtggagaacttcaagaacctggt

SEQ ID NO: 1646374 - DNA, 25 bp, Homo sapien
tgtctggaaatggttgtcacacctg

SEQ ID NO: 1646375 - DNA, 25 bp, Homo sapien
gactgctcgatcttacccagaggaa

SEQ ID NO: 1646376 - DNA, 25 bp, Homo sapien
aaaaagatacatgttggaagcagca

SEQ ID NO: 1646377 - DNA, 25 bp, Homo sapien
tatagggtgaaatctgggtggcttc

SEQ ID NO: 1646378 - DNA, 25 bp, Homo sapien
taaggacttgtgattactttaggct

SEQ ID NO: 1646379 - DNA, 25 bp, Homo sapien
ttaggctcattggataatctaggat

SEQ ID NO: 1646380 - DNA, 25 bp, Homo sapien
tgcgccagtaatccccgctacccgg

SEQ ID NO: 1646381 - DNA, 25 bp, Homo sapien
gcatgcgccagtaatccccgctacc

SEQ ID NO: 1646382 - DNA, 25 bp, Homo sapien
gagtgtagtggcatgcgccagtaat

SEQ ID NO: 1646383 - DNA, 25 bp, Homo sapien
agtgtagtggcatgcgccagtaatc

SEQ ID NO: 1646384 - DNA, 25 bp, Homo sapien
cttagtgaatgggagcctgttgacc

SEQ ID NO: 1646385 - DNA, 25 bp, Homo sapien
cccatggcctaagtgtgaaattctg

SEQ ID NO: 1646386 - DNA, 25 bp, Homo sapien
tacatcgtgtgttatggaaggcatc

SEQ ID NO: 1646387 - DNA, 25 bp, Homo sapien
tacacgatgctgtaaggacaaggtc

SEQ ID NO: 1646388 - DNA, 25 bp, Homo sapien
aacaggttgcaagtgaattaaccag

SEQ ID NO: 1646389 - DNA, 25 bp, Homo sapien
ttacaaggtgactctattcaggttt

SEQ ID NO: 1646390 - DNA, 25 bp, Homo sapien
agagttcccagttattacaaggtga

SEQ ID NO: 1646391 - DNA, 25 bp, Homo sapien
ttgcaagtgaattaaccaggtgtct

SEQ ID NO: 1646392 - DNA, 25 bp, Homo sapien
tgaatcttcgccatcatcagagggt

SEQ ID NO: 1646393 - DNA, 25 bp, Homo sapien
tcaaatcttcgagtccacctgggtg

SEQ ID NO: 1646394 - DNA, 25 bp, Homo sapien
cagtcagagtgcacgtcttgaagcc

SEQ ID NO: 1646395 - DNA, 25 bp, Homo sapien
gatacagttcgcagtttatatacca

SEQ ID NO: 1646396 - DNA, 25 bp, Homo sapien
tcagctattttatgggtgacccaag

SEQ ID NO: 1646397 - DNA, 25 bp, Homo sapien
gcataaattacattgcaaggccaga

SEQ ID NO: 1646398 - DNA, 25 bp, Homo sapien
gtcaataatctaggcaagcttgtcc

SEQ ID NO: 1646399 - DNA, 25 bp, Homo sapien
tagtgaatgtcacaaccacagtttg

SEQ ID NO: 1646400 - DNA, 25 bp, Homo sapien
tacagcatttggatgttcaggttgg

SEQ ID NO: 1646401 - DNA, 25 bp, Homo sapien
tcctttgagttgtcatgtaagcact

SEQ ID NO: 1646402 - DNA, 25 bp, Homo sapien
gattaggagtgttcagatttcggat

SEQ ID NO: 1646403 - DNA, 25 bp, Homo sapien
catctatagttaatgacagcctctc

SEQ ID NO: 1646404 - DNA, 25 bp, Homo sapien
taggagtcaagtgtctttcagagca

SEQ ID NO: 1646405 - DNA, 25 bp, Homo sapien
ttttcatgtgcacaaagacccactg

SEQ ID NO: 1646406 - DNA, 25 bp, Homo sapien
tgtcgttggcatatgctataaagcc

SEQ ID NO: 1646407 - DNA, 25 bp, Homo sapien
caattgtcaagcatttgtcgttggc

SEQ ID NO: 1646408 - DNA, 25 bp, Homo sapien
ttgacccaacatttctaggacaatt

SEQ ID NO: 1646409 - DNA, 25 bp, Homo sapien
ttcagcgttgggactaaattgaccc

SEQ ID NO: 1646410 - DNA, 25 bp, Homo sapien
tataaacgtgcatgtacaaacacct

SEQ ID NO: 1646411 - DNA, 25 bp, Homo sapien
tgcggccggccacacagtttcttta

SEQ ID NO: 1646412 - DNA, 25 bp, Homo sapien
tttacatgtgcacaccttaagtgtg

SEQ ID NO: 1646413 - DNA, 25 bp, Homo sapien
tgctcccggccacaaatctttactt

SEQ ID NO: 1646414 - DNA, 25 bp, Homo sapien
caaattgtaaatgtatagctcccta

SEQ ID NO: 1646415 - DNA, 25 bp, Homo sapien
aatctgacagcgtattctaccctca

SEQ ID NO: 1646416 - DNA, 25 bp, Homo sapien
aaatcatagtaattggatgaagggt

SEQ ID NO: 1646417 - DNA, 25 bp, Homo sapien
cacgttatgcagtgtgtaatgatca

SEQ ID NO: 1646418 - DNA, 25 bp, Homo sapien
tgttaaactaagctgttaaggacac

SEQ ID NO: 1646419 - DNA, 25 bp, Homo sapien
catacttctcagacatcattacacg

SEQ ID NO: 1646420 - DNA, 25 bp, Homo sapien
cccactttcctaaacatattctcag

SEQ ID NO: 1646421 - DNA, 25 bp, Homo sapien
tattctcagtaactaccaacgtcaa

SEQ ID NO: 1646422 - DNA, 25 bp, Homo sapien
gtaactgcgtgtctcagtcttcaaa

SEQ ID NO: 1646423 - DNA, 25 bp, Homo sapien
tattccactgaatggataagtcatc

SEQ ID NO: 1646424 - DNA, 25 bp, Homo sapien
gcaagttcctgctatagatctggga

SEQ ID NO: 1646425 - DNA, 25 bp, Homo sapien
tttctcaaaagttcctaggtcctca

SEQ ID NO: 1646426 - DNA, 25 bp, Homo sapien
cctcacactgtaaggctccagcaag

SEQ ID NO: 1646427 - DNA, 25 bp, Homo sapien
tttactactgttatacactgaggac

SEQ ID NO: 1646428 - DNA, 25 bp, Homo sapien
ttcccacgaggtacttcatgcacag

SEQ ID NO: 1646429 - DNA, 25 bp, Homo sapien
gattaactgcgttgcccactttcca

SEQ ID NO: 1646430 - DNA, 25 bp, Homo sapien
tacagagtactccagctttgaaatg

SEQ ID NO: 1646431 - DNA, 25 bp, Homo sapien
ccaaatgggtgactgctcaagataa

SEQ ID NO: 1646432 - DNA, 25 bp, Homo sapien
tacatcttgagaaccgggacacctg

SEQ ID NO: 1646433 - DNA, 25 bp, Homo sapien
tgtgcagactccgacaagacttttc

SEQ ID NO: 1646434 - DNA, 25 bp, Homo sapien
cagcatggacttcccaacggagaca

SEQ ID NO: 1646435 - DNA, 25 bp, Homo sapien
gggacacctggtactctgatataaa

SEQ ID NO: 1646436 - DNA, 25 bp, Homo sapien
cacacgttgcatcgaaatggtttct

SEQ ID NO: 1646437 - DNA, 25 bp, Homo sapien
acactgctgacacgtatagggtttc

SEQ ID NO: 1646438 - DNA, 25 bp, Homo sapien
tgtgaggcctgactgaatcgcttct

SEQ ID NO: 1646439 - DNA, 25 bp, Homo sapien
gaaggccttaccacaagtgtcacat

SEQ ID NO: 1646440 - DNA, 25 bp, Homo sapien
tgtactacacgctggagacttcttt

SEQ ID NO: 1646441 - DNA, 25 bp, Homo sapien
caagactggagctatcattgaaggc

SEQ ID NO: 1646442 - DNA, 25 bp, Homo sapien
atacctgagctataactggtgtcct

SEQ ID NO: 1646443 - DNA, 25 bp, Homo sapien
cacattcatgacaccaatagcgttt

SEQ ID NO: 1646444 - DNA, 25 bp, Homo sapien
ccacaatcactattgctatgaactt

SEQ ID NO: 1646445 - DNA, 25 bp, Homo sapien
ctgtgtgaatactacgctgggtaag

SEQ ID NO: 1646446 - DNA, 25 bp, Homo sapien
ctacgctgggtaagaggtgatacct

SEQ ID NO: 1646447 - DNA, 25 bp, Homo sapien
ttagggtatctttaccacaatcact

SEQ ID NO: 1646448 - DNA, 25 bp, Homo sapien
gagtctgcttacaacttctctgata

SEQ ID NO: 1646449 - DNA, 25 bp, Homo sapien
gcttgaatagattctcctgctccca

SEQ ID NO: 1646450 - DNA, 25 bp, Homo sapien
ttcaatgatactggaatgatcccct

SEQ ID NO: 1646451 - DNA, 25 bp, Homo sapien
ctagacagttgtcatccacagaagc

SEQ ID NO: 1646452 - DNA, 25 bp, Homo sapien
tcctgctttgtgaagagttgccatc

SEQ ID NO: 1646453 - DNA, 25 bp, Homo sapien
agttgccatctcattttgattcctg

SEQ ID NO: 1646454 - DNA, 25 bp, Homo sapien
tctcccagtgaaaagcaccttaatc

SEQ ID NO: 1646455 - DNA, 25 bp, Homo sapien
taatttgctcgcaatgtgtctcttg

SEQ ID NO: 1646456 - DNA, 25 bp, Homo sapien
caactgggatatcatatctggtttg

SEQ ID NO: 1646457 - DNA, 25 bp, Homo sapien
ccaactgggatatcatatctggttt

SEQ ID NO: 1646458 - DNA, 25 bp, Homo sapien
atctcggtacagcttcctctgggca

SEQ ID NO: 1646459 - DNA, 25 bp, Homo sapien
acatctcggtacagcttcctctggg

SEQ ID NO: 1646460 - DNA, 25 bp, Homo sapien
cggtacagcttcctctgggcagagt

SEQ ID NO: 1646461 - DNA, 25 bp, Homo sapien
ctcggtacagcttcctctgggcaga

SEQ ID NO: 1646462 - DNA, 25 bp, Homo sapien
cttctgggaaaaggcagagttccgg

SEQ ID NO: 1646463 - DNA, 25 bp, Homo sapien
ccctcctccttctgggaaaaggcag

SEQ ID NO: 1646464 - DNA, 25 bp, Homo sapien
ctccttctgggaaaaggcagagttc

SEQ ID NO: 1646465 - DNA, 25 bp, Homo sapien
cctcctccttctgggaaaaggcaga

SEQ ID NO: 1646466 - DNA, 25 bp, Homo sapien
tgggagatatctcagatccgacctc

SEQ ID NO: 1646467 - DNA, 25 bp, Homo sapien
gagatatctcagatccgacctcgcc

SEQ ID NO: 1646468 - DNA, 25 bp, Homo sapien
ccctgggagatatctcagatccgac

SEQ ID NO: 1646469 - DNA, 25 bp, Homo sapien
gatatctcagatccgacctcgcctt

SEQ ID NO: 1646470 - DNA, 25 bp, Homo sapien
tggccgggaatctaagacaacgttg

SEQ ID NO: 1646471 - DNA, 25 bp, Homo sapien
ctgttatggcaaacaaaagcagctc

SEQ ID NO: 1646472 - DNA, 25 bp, Homo sapien
tgatcctgatcctgacataaatgaa

SEQ ID NO: 1646473 - DNA, 25 bp, Homo sapien
gacaacgttgtaatatgggcatgtg

SEQ ID NO: 1646474 - DNA, 25 bp, Homo sapien
tcaggcataagtctcagtcattgag

SEQ ID NO: 1646475 - DNA, 25 bp, Homo sapien
tcattgaggtttactaagccagctg

SEQ ID NO: 1646476 - DNA, 25 bp, Homo sapien
tatcacactgaacaaaataccagtt

SEQ ID NO: 1646477 - DNA, 25 bp, Homo sapien
tatttcctaatacttgacaaccaaa

SEQ ID NO: 1646478 - DNA, 25 bp, Homo sapien
tagtcaccctactaatctactgcta

SEQ ID NO: 1646479 - DNA, 25 bp, Homo sapien
ctttatgctagcaccattctaatgc

SEQ ID NO: 1646480 - DNA, 25 bp, Homo sapien
ctactaatctactgctaggtcttat

SEQ ID NO: 1646481 - DNA, 25 bp, Homo sapien
ctttctttatgctagcaccattcta

SEQ ID NO: 1646482 - DNA, 25 bp, Homo sapien
cagatctgttgcccattaaaaatct

SEQ ID NO: 1646483 - DNA, 25 bp, Homo sapien
atctgttgcccattaaaaatctgat

SEQ ID NO: 1646484 - DNA, 25 bp, Homo sapien
agatctgttgcccattaaaaatctg

SEQ ID NO: 1646485 - DNA, 25 bp, Homo sapien
ccctcaccatcatccattattgcct

SEQ ID NO: 1646486 - DNA, 25 bp, Homo sapien
agagactgacctttcttccattgta

SEQ ID NO: 1646487 - DNA, 25 bp, Homo sapien
tctttgcccatatcaatgttgtgaa

SEQ ID NO: 1646488 - DNA, 25 bp, Homo sapien
ttttgtgaaggtgagataagggtct

SEQ ID NO: 1646489 - DNA, 25 bp, Homo sapien
aatgcatggatttatacttgagctc

SEQ ID NO: 1646490 - DNA, 25 bp, Homo sapien
tatagtctattctggacaatgttcc

SEQ ID NO: 1646491 - DNA, 25 bp, Homo sapien
cagcaattgggtgaaatgatctgta

SEQ ID NO: 1646492 - DNA, 25 bp, Homo sapien
tccatgttgtttgtgaagcttccaa

SEQ ID NO: 1646493 - DNA, 25 bp, Homo sapien
gtgtgtgacctaacttcaatgtttc

SEQ ID NO: 1646494 - DNA, 25 bp, Homo sapien
catactagttatgagtggattgcac

SEQ ID NO: 1646495 - DNA, 25 bp, Homo sapien
ccccttcacttttagactatgtgtg

SEQ ID NO: 1646496 - DNA, 25 bp, Homo sapien
gaaacacttctacacttaactccca

SEQ ID NO: 1646497 - DNA, 25 bp, Homo sapien
ggattgcacatcacaattacaatac

SEQ ID NO: 1646498 - DNA, 25 bp, Homo sapien
tctatgatttccctgtacctggata

SEQ ID NO: 1646499 - DNA, 25 bp, Homo sapien
tcaactccctcctgaacagcagtaa

SEQ ID NO: 1646500 - DNA, 25 bp, Homo sapien
tatttcagtgcagcaaacatatttc

SEQ ID NO: 1646501 - DNA, 25 bp, Homo sapien
tcttagttgggtcaaatctgtttgc

SEQ ID NO: 1646502 - DNA, 25 bp, Homo sapien
gactcctttttggtactagatagcc

SEQ ID NO: 1646503 - DNA, 25 bp, Homo sapien
cattggatatggctccctagagatt

SEQ ID NO: 1646504 - DNA, 25 bp, Homo sapien
tccatttgtgggatgccatggctcc

SEQ ID NO: 1646505 - DNA, 25 bp, Homo sapien
tcttcctgttaggatcagtcactgg

SEQ ID NO: 1646506 - DNA, 25 bp, Homo sapien
gatatttcaagtgcacacatgggta

SEQ ID NO: 1646507 - DNA, 25 bp, Homo sapien
gaccaaacgttaagaaatgcagcac

SEQ ID NO: 1646508 - DNA, 25 bp, Homo sapien
taagccttagctcctgtgcaatgac

SEQ ID NO: 1646509 - DNA, 25 bp, Homo sapien
tgagcacctacattgcgttatgaaa

SEQ ID NO: 1646510 - DNA, 25 bp, Homo sapien
gattctctgatgaagggtagtcctt

SEQ ID NO: 1646511 - DNA, 25 bp, Homo sapien
ttctctgatgaagggtagtccttac

SEQ ID NO: 1646512 - DNA, 25 bp, Homo sapien
tagattctctgatgaagggtagtcc

SEQ ID NO: 1646513 - DNA, 25 bp, Homo sapien
gtagattctctgatgaagggtagtc

SEQ ID NO: 1646514 - DNA, 25 bp, Homo sapien
catagtcttcgcttttatagaattt

SEQ ID NO: 1646515 - DNA, 25 bp, Homo sapien
gaatggacactctgatgactctgaa

SEQ ID NO: 1646516 - DNA, 25 bp, Homo sapien
gcttgaaggcgtgaactctcactga

SEQ ID NO: 1646517 - DNA, 25 bp, Homo sapien
gaaccctccgatgtgcttcaaggcg

SEQ ID NO: 1646518 - DNA, 25 bp, Homo sapien
tgactctgaaggtatgatctctgac

SEQ ID NO: 1646519 - DNA, 25 bp, Homo sapien
tgggccaaaagtgttgaggccttac

SEQ ID NO: 1646520 - DNA, 25 bp, Homo sapien
tatgaactccgactgaatcccttat

SEQ ID NO: 1646521 - DNA, 25 bp, Homo sapien
aatttgaagattaaagctccaactg

SEQ ID NO: 1646522 - DNA, 25 bp, Homo sapien
tttgaagattaaagctccaactgaa

SEQ ID NO: 1646523 - DNA, 25 bp, Homo sapien
ttgaagatatgaactccgactgaat

SEQ ID NO: 1646524 - DNA, 25 bp, Homo sapien
acctttgccgcatatattgcatttg

SEQ ID NO: 1646525 - DNA, 25 bp, Homo sapien
ctttaagttttgagctccagttgaa

SEQ ID NO: 1646526 - DNA, 25 bp, Homo sapien
tgaagccattcccatgctccttacg

SEQ ID NO: 1646527 - DNA, 25 bp, Homo sapien
cattcagaactgatctatgattgaa

SEQ ID NO: 1646528 - DNA, 25 bp, Homo sapien
tgtgcctataggacatctcacctgt

SEQ ID NO: 1646529 - DNA, 25 bp, Homo sapien
gatatcttctccacagtcatggcag

SEQ ID NO: 1646530 - DNA, 25 bp, Homo sapien
catgaactgtatgtatagggcttcc

SEQ ID NO: 1646531 - DNA, 25 bp, Homo sapien
tgatgtgagagccaactgacactgt

SEQ ID NO: 1646532 - DNA, 25 bp, Homo sapien
caggtctgacgggaggaaagctctt

SEQ ID NO: 1646533 - DNA, 25 bp, Homo sapien
tcttgacacctgattaacccacctg

SEQ ID NO: 1646534 - DNA, 25 bp, Homo sapien
tggagccattccctatatgagtgaa

SEQ ID NO: 1646535 - DNA, 25 bp, Homo sapien
gaatgatgtgccctccaagatggat

SEQ ID NO: 1646536 - DNA, 25 bp, Homo sapien
tttactttatgtttgaggcatcaca

SEQ ID NO: 1646537 - DNA, 25 bp, Homo sapien
ctgtgtgcgttaaatgatatgctga

SEQ ID NO: 1646538 - DNA, 25 bp, Homo sapien
cgctaagagggcttagagaataata

SEQ ID NO: 1646539 - DNA, 25 bp, Homo sapien
atcacatatcctgtcactaatgagc

SEQ ID NO: 1646540 - DNA, 25 bp, Homo sapien
agatatttcacaattatcaacggcc

SEQ ID NO: 1646541 - DNA, 25 bp, Homo sapien
tcaacggccatggtgtaggtcaaaa

SEQ ID NO: 1646542 - DNA, 25 bp, Homo sapien
tttcacaattatcaacggccatggt

SEQ ID NO: 1646543 - DNA, 25 bp, Homo sapien
ttatcaacggccatggtgtaggtca

SEQ ID NO: 1646544 - DNA, 25 bp, Homo sapien
gctgggatattaggtctggcttgaa

SEQ ID NO: 1646545 - DNA, 25 bp, Homo sapien
ctctccagctgggatattaggtctg

SEQ ID NO: 1646546 - DNA, 25 bp, Homo sapien
gaacatccatctcttggggtttctg

SEQ ID NO: 1646547 - DNA, 25 bp, Homo sapien
tattaggtctggcttgaagggctga

SEQ ID NO: 1646548 - DNA, 25 bp, Homo sapien
catctcggtacagcttcctctggac

SEQ ID NO: 1646549 - DNA, 25 bp, Homo sapien
ctactaagagcaggttcctgaagtt

SEQ ID NO: 1646550 - DNA, 25 bp, Homo sapien
acatctcggtacagcttcctctgga

SEQ ID NO: 1646551 - DNA, 25 bp, Homo sapien
ctaagagcaggttcctgaagttctc

SEQ ID NO: 1646552 - DNA, 25 bp, Homo sapien
tttctttttctagagaaaggcagag

SEQ ID NO: 1646553 - DNA, 25 bp, Homo sapien
tctttttctagagaaaggcagagac

SEQ ID NO: 1646554 - DNA, 25 bp, Homo sapien
tctttctttttctagagaaaggcag

SEQ ID NO: 1646555 - DNA, 25 bp, Homo sapien
ctttttctagagaaaggcagagacc

SEQ ID NO: 1646556 - DNA, 25 bp, Homo sapien
cctcctggactacgcttcccagaat

SEQ ID NO: 1646557 - DNA, 25 bp, Homo sapien
gacctcctggactacgcttcccaga

SEQ ID NO: 1646558 - DNA, 25 bp, Homo sapien
cgacgggatcagggagacggcctca

SEQ ID NO: 1646559 - DNA, 25 bp, Homo sapien
gacgggatcagggagacggcctcag

SEQ ID NO: 1646560 - DNA, 25 bp, Homo sapien
caagaacgtggatgccaagaatcca

SEQ ID NO: 1646561 - DNA, 25 bp, Homo sapien
gcagaaacagtaaatggttcccacg

SEQ ID NO: 1646562 - DNA, 25 bp, Homo sapien
tgtgtttgttgcaagatccacaaga

SEQ ID NO: 1646563 - DNA, 25 bp, Homo sapien
caaccgttgatgaggccataagcag

SEQ ID NO: 1646564 - DNA, 25 bp, Homo sapien
gttatgtatacactgtagtgaacaa

SEQ ID NO: 1646565 - DNA, 25 bp, Homo sapien
tatacactgtagtgaacaaagaata

SEQ ID NO: 1646566 - DNA, 25 bp, Homo sapien
caaagaatagtaagttgttaagaag

SEQ ID NO: 1646567 - DNA, 25 bp, Homo sapien
tgtatacactgtagtgaacaaagaa

SEQ ID NO: 1646568 - DNA, 25 bp, Homo sapien
tggtactactattccccttatgtta

SEQ ID NO: 1646569 - DNA, 25 bp, Homo sapien
caactgcatcagtttggtactacta

SEQ ID NO: 1646570 - DNA, 25 bp, Homo sapien
acccctagaaggtggcagaactgcc

SEQ ID NO: 1646571 - DNA, 25 bp, Homo sapien
gaatgctaggcacatacagtttgaa

SEQ ID NO: 1646572 - DNA, 25 bp, Homo sapien
tcttccactgctagccgcggatgct

SEQ ID NO: 1646573 - DNA, 25 bp, Homo sapien
ccatcttccactgctagccgcggat

SEQ ID NO: 1646574 - DNA, 25 bp, Homo sapien
tccactgctagccgcggatgctctt

SEQ ID NO: 1646575 - DNA, 25 bp, Homo sapien
gggcccaaccccatcttccactgct

SEQ ID NO: 1646576 - DNA, 25 bp, Homo sapien
gggcctgaacatctttatccaaaag

SEQ ID NO: 1646577 - DNA, 25 bp, Homo sapien
tgtttcctacagcacctaagatact

SEQ ID NO: 1646578 - DNA, 25 bp, Homo sapien
taaggttcatcgttttcggcaagaa

SEQ ID NO: 1646579 - DNA, 25 bp, Homo sapien
gtggctctggtaaactacaatttag

SEQ ID NO: 1646580 - DNA, 25 bp, Homo sapien
gccaaacgcaagagtatattacagt

SEQ ID NO: 1646581 - DNA, 25 bp, Homo sapien
tctctcctgagcgaataccacactg

SEQ ID NO: 1646582 - DNA, 25 bp, Homo sapien
ttctatgggcagtctagtggaggca

SEQ ID NO: 1646583 - DNA, 25 bp, Homo sapien
cagatcagacatcttcggtagctgt

SEQ ID NO: 1646584 - DNA, 25 bp, Homo sapien
catgccaatttcgtgtgaaaccaat

SEQ ID NO: 1646585 - DNA, 25 bp, Homo sapien
cattgagcctgttccctgatgaggc

SEQ ID NO: 1646586 - DNA, 25 bp, Homo sapien
tccttccaatgattatgtctcaaca

SEQ ID NO: 1646587 - DNA, 25 bp, Homo sapien
tgaattttcacatgccaatttcgtg

SEQ ID NO: 1646588 - DNA, 25 bp, Homo sapien
tatcaaatcattggatttgacatgc

SEQ ID NO: 1646589 - DNA, 25 bp, Homo sapien
tgggagctagactaatttctgcttt

SEQ ID NO: 1646590 - DNA, 25 bp, Homo sapien
cccactgattgggagctagactaat

SEQ ID NO: 1646591 - DNA, 25 bp, Homo sapien
aatcattggatttgacatgctcata

SEQ ID NO: 1646592 - DNA, 25 bp, Homo sapien
catgctagtcaggatagcctaggca

SEQ ID NO: 1646593 - DNA, 25 bp, Homo sapien
aaaacaccttgtgggatgagtgcag

SEQ ID NO: 1646594 - DNA, 25 bp, Homo sapien
tgctcccggccaaactagaggattg

SEQ ID NO: 1646595 - DNA, 25 bp, Homo sapien
ccattttagatggttgcactgccac

SEQ ID NO: 1646596 - DNA, 25 bp, Homo sapien
tgtaaaggctagacctgaaagtggc

SEQ ID NO: 1646597 - DNA, 25 bp, Homo sapien
taaagacgttggctgaactgaagac

SEQ ID NO: 1646598 - DNA, 25 bp, Homo sapien
tacagcagttgatgggagcttcaca

SEQ ID NO: 1646599 - DNA, 25 bp, Homo sapien
catgggcacactcttaactgcaagg

SEQ ID NO: 1646600 - DNA, 25 bp, Homo sapien
cagaaggtcctttccacgctcacaa

SEQ ID NO: 1646601 - DNA, 25 bp, Homo sapien
ctcatgtagtctttgatgagtcaga

SEQ ID NO: 1646602 - DNA, 25 bp, Homo sapien
agaaggtcctttccacgctcacaat

SEQ ID NO: 1646603 - DNA, 25 bp, Homo sapien
ctttgatgagtcagaaggtcctttc

SEQ ID NO: 1646604 - DNA, 25 bp, Homo sapien
aagggaagagctgcgcctgaagccc

SEQ ID NO: 1646605 - DNA, 25 bp, Homo sapien
gtggtaatacatgggccgcattacg

SEQ ID NO: 1646606 - DNA, 25 bp, Homo sapien
ttaagatctgaattccggctgaagc

SEQ ID NO: 1646607 - DNA, 25 bp, Homo sapien
gactctgaggtgaacattaagatct

SEQ ID NO: 1646608 - DNA, 25 bp, Homo sapien
cactcttcttgaaggttcacgatat

SEQ ID NO: 1646609 - DNA, 25 bp, Homo sapien
tcacgatataatcctgactcacagt

SEQ ID NO: 1646610 - DNA, 25 bp, Homo sapien
gagggaaacatcttctaaatgtggg

SEQ ID NO: 1646611 - DNA, 25 bp, Homo sapien
gactcacagttaaatcccggatcct

SEQ ID NO: 1646612 - DNA, 25 bp, Homo sapien
gcacttcttgcgaaaggtaacttaa

SEQ ID NO: 1646613 - DNA, 25 bp, Homo sapien
gaagcacttcttgcgaaaggtaact

SEQ ID NO: 1646614 - DNA, 25 bp, Homo sapien
tgaagcacttcttgcgaaaggtaac

SEQ ID NO: 1646615 - DNA, 25 bp, Homo sapien
agcacttcttgcgaaaggtaactta

SEQ ID NO: 1646616 - DNA, 25 bp, Homo sapien
atcttggtacaggtttatctgggct

SEQ ID NO: 1646617 - DNA, 25 bp, Homo sapien
ttatccaatagtgccagctcttcct

SEQ ID NO: 1646618 - DNA, 25 bp, Homo sapien
gggctttatccaatagtgccagctc

SEQ ID NO: 1646619 - DNA, 25 bp, Homo sapien
gctcttccttggtgaagacaacagc

SEQ ID NO: 1646620 - DNA, 25 bp, Homo sapien
ttagagtagcaccaaagtagacatc

SEQ ID NO: 1646621 - DNA, 25 bp, Homo sapien
gagtatggtcatgtatatgctgccc

SEQ ID NO: 1646622 - DNA, 25 bp, Homo sapien
tatgctgcccatgcactcggatgct

SEQ ID NO: 1646623 - DNA, 25 bp, Homo sapien
tccctcatcgggcagtgataagcag

SEQ ID NO: 1646624 - DNA, 25 bp, Homo sapien
ttttggaaagggcaggattctggaa

SEQ ID NO: 1646625 - DNA, 25 bp, Homo sapien
ttggaaagggcaggattctggaaaa

SEQ ID NO: 1646626 - DNA, 25 bp, Homo sapien
tccttttggaaagggcaggattctg

SEQ ID NO: 1646627 - DNA, 25 bp, Homo sapien
ccttttggaaagggcaggattctgg

SEQ ID NO: 1646628 - DNA, 25 bp, Homo sapien
cgcccgcagcgtgcgtccagtacca

SEQ ID NO: 1646629 - DNA, 25 bp, Homo sapien
gcgtgcgtccagtaccacggcgcat

SEQ ID NO: 1646630 - DNA, 25 bp, Homo sapien
agcgtcccaaacaatgtcgcccgca

SEQ ID NO: 1646631 - DNA, 25 bp, Homo sapien
tcccaaacaatgtcgcccgcagcgt

SEQ ID NO: 1646632 - DNA, 25 bp, Homo sapien
cgcagcagtggccattcgcaaggct

SEQ ID NO: 1646633 - DNA, 25 bp, Homo sapien
cgcgcagcagtggccattcgcaagg

SEQ ID NO: 1646634 - DNA, 25 bp, Homo sapien
cagcagtggccattcgcaaggctac

SEQ ID NO: 1646635 - DNA, 25 bp, Homo sapien
cagaaagccccgcgcgcagcagtgg

SEQ ID NO: 1646636 - DNA, 25 bp, Homo sapien
cctttgacttccgtgcatttggaag

SEQ ID NO: 1646637 - DNA, 25 bp, Homo sapien
acttccgtgcatttggaagtccttt

SEQ ID NO: 1646638 - DNA, 25 bp, Homo sapien
agtcctttgacttccgtgcattcgt

SEQ ID NO: 1646639 - DNA, 25 bp, Homo sapien
gaagtcctttgacttccgtgcattc

SEQ ID NO: 1646640 - DNA, 25 bp, Homo sapien
ctgtgcagcgggaccctcctgctgg

SEQ ID NO: 1646641 - DNA, 25 bp, Homo sapien
tgtgcagcgggaccctcctgctggc

SEQ ID NO: 1646642 - DNA, 25 bp, Homo sapien
cccacagctgtgcagcgggaccctc

SEQ ID NO: 1646643 - DNA, 25 bp, Homo sapien
acagctgtgcagcgggaccctcctg

SEQ ID NO: 1646644 - DNA, 25 bp, Homo sapien
gacaccaacctccagcatgtcggca

SEQ ID NO: 1646645 - DNA, 25 bp, Homo sapien
cattctttagaatcaccacgttcat

SEQ ID NO: 1646646 - DNA, 25 bp, Homo sapien
ggcattctttagaatcaccacgttc

SEQ ID NO: 1646647 - DNA, 25 bp, Homo sapien
tgggcattctttagaatcaccacgt

SEQ ID NO: 1646648 - DNA, 25 bp, Homo sapien
tctgggcattctttagaatcaccac

SEQ ID NO: 1646649 - DNA, 25 bp, Homo sapien
tgatgtgcacctaaagccctttccg

SEQ ID NO: 1646650 - DNA, 25 bp, Homo sapien
tgaagacaggagttgcggccaaagc

SEQ ID NO: 1646651 - DNA, 25 bp, Homo sapien
tgaaggtctgaattccgccggaagc

SEQ ID NO: 1646652 - DNA, 25 bp, Homo sapien
tcttatgactaaggagacctgagcc

SEQ ID NO: 1646653 - DNA, 25 bp, Homo sapien
cacacggcttgtctatttcagggaa

SEQ ID NO: 1646654 - DNA, 25 bp, Homo sapien
ggaaggtctgcatcgtccctgaagc

SEQ ID NO: 1646655 - DNA, 25 bp, Homo sapien
tccagggttaatgcgatgaagtaca

SEQ ID NO: 1646656 - DNA, 25 bp, Homo sapien
gacaagcaggtttgaacttcgacca

SEQ ID NO: 1646657 - DNA, 25 bp, Homo sapien
attggtcttatagctctccaggctg

SEQ ID NO: 1646658 - DNA, 25 bp, Homo sapien
ttgattttctagaccgataagccca

SEQ ID NO: 1646659 - DNA, 25 bp, Homo sapien
ggttcacaaacgcttttgcccaaga

SEQ ID NO: 1646660 - DNA, 25 bp, Homo sapien
aaaacacggcgtagatgctccttcc

SEQ ID NO: 1646661 - DNA, 25 bp, Homo sapien
tgtctccaagacctctaggcctcat

SEQ ID NO: 1646662 - DNA, 25 bp, Homo sapien
tgctgccaacagtacccacaggcaa

SEQ ID NO: 1646663 - DNA, 25 bp, Homo sapien
tccatctgttaccccagtcttcaaa

SEQ ID NO: 1646664 - DNA, 25 bp, Homo sapien
cctcatggttctcacctggagatgc

SEQ ID NO: 1646665 - DNA, 25 bp, Homo sapien
cactccaagaagttcagttccaatt

SEQ ID NO: 1646666 - DNA, 25 bp, Homo sapien
caagaacactccaagaagttcagtt

SEQ ID NO: 1646667 - DNA, 25 bp, Homo sapien
ttgtttatatgccactcagtctggc

SEQ ID NO: 1646668 - DNA, 25 bp, Homo sapien
tgtttatatgccactcagtctggca

SEQ ID NO: 1646669 - DNA, 25 bp, Homo sapien
tggtacagctgcctctgggtagagt

SEQ ID NO: 1646670 - DNA, 25 bp, Homo sapien
gccacgtccttgaagctcaatggct

SEQ ID NO: 1646671 - DNA, 25 bp, Homo sapien
gagtaggttcctgaaattctcctgc

SEQ ID NO: 1646672 - DNA, 25 bp, Homo sapien
taggttcctgaaattctcctgcatc

SEQ ID NO: 1646673 - DNA, 25 bp, Homo sapien
tccctatcttgggaaatggctgagg

SEQ ID NO: 1646674 - DNA, 25 bp, Homo sapien
ctgagacatgatcttctcctcccta

SEQ ID NO: 1646675 - DNA, 25 bp, Homo sapien
gagacatgatcttctcctccctatc

SEQ ID NO: 1646676 - DNA, 25 bp, Homo sapien
tcctccctatcttgggaaatggctg

SEQ ID NO: 1646677 - DNA, 25 bp, Homo sapien
tctcatgccttgaggtcaaagtctc

SEQ ID NO: 1646678 - DNA, 25 bp, Homo sapien
cttttctcatgccttgaggtcaaag

SEQ ID NO: 1646679 - DNA, 25 bp, Homo sapien
tttctcatgccttgaggtcaaagtc

SEQ ID NO: 1646680 - DNA, 25 bp, Homo sapien
tcatgccttgaggtcaaagtctcca

SEQ ID NO: 1646681 - DNA, 25 bp, Homo sapien
tctccaagctctgacaagttcctgt

SEQ ID NO: 1646682 - DNA, 25 bp, Homo sapien
tggttttcctaagctggagacgcag

SEQ ID NO: 1646683 - DNA, 25 bp, Homo sapien
ccagagcgtgactgcttcccatggt

SEQ ID NO: 1646684 - DNA, 25 bp, Homo sapien
gctaggttttctgcgagcagcagca

SEQ ID NO: 1646685 - DNA, 25 bp, Homo sapien
taagggtcctaagcaattctatcag

SEQ ID NO: 1646686 - DNA, 25 bp, Homo sapien
tactctgggatccagcaacacatgg

SEQ ID NO: 1646687 - DNA, 25 bp, Homo sapien
catacttgggctgtctactctagga

SEQ ID NO: 1646688 - DNA, 25 bp, Homo sapien
tacaatctgctcagagctactcggg

SEQ ID NO: 1646689 - DNA, 25 bp, Homo sapien
agatgtggggttatttctccttctt

SEQ ID NO: 1646690 - DNA, 25 bp, Homo sapien
tctagtgtcaagagatgtggggtta

SEQ ID NO: 1646691 - DNA, 25 bp, Homo sapien
acaattatctccgagaaacgaacaa

SEQ ID NO: 1646692 - DNA, 25 bp, Homo sapien
tctccgagaaacgaacaattccaag

SEQ ID NO: 1646693 - DNA, 25 bp, Homo sapien
tagagccgatcctaattcccatggc

SEQ ID NO: 1646694 - DNA, 25 bp, Homo sapien
tggcctgacagtacaaccgcatgga

SEQ ID NO: 1646695 - DNA, 25 bp, Homo sapien
tcatggaaatccgtgggcttcgacc

SEQ ID NO: 1646696 - DNA, 25 bp, Homo sapien
ttcacactggtcctatagagccgat

SEQ ID NO: 1646697 - DNA, 25 bp, Homo sapien
cgaggtgtgggactacctttcccag

SEQ ID NO: 1646698 - DNA, 25 bp, Homo sapien
tccgcagcgcagtccgatcctaggg

SEQ ID NO: 1646699 - DNA, 25 bp, Homo sapien
cggaaacggaagtagtcgactcgag

SEQ ID NO: 1646700 - DNA, 25 bp, Homo sapien
cgatggtgtcgtaaatgcgcgtcca

SEQ ID NO: 1646701 - DNA, 25 bp, Homo sapien
tcaagctagggatgtccccggtggc

SEQ ID NO: 1646702 - DNA, 25 bp, Homo sapien
tcgcccgcagaaacacggacaggtt

SEQ ID NO: 1646703 - DNA, 25 bp, Homo sapien
gttcacgctggcacgggcgccagca

SEQ ID NO: 1646704 - DNA, 25 bp, Homo sapien
ccagcagccacgtcagcaggcagga

SEQ ID NO: 1646705 - DNA, 25 bp, Homo sapien
gagtcctcagcaggaatgtggataa

SEQ ID NO: 1646706 - DNA, 25 bp, Homo sapien
tgccagcaaatgtgtgacagtagca

SEQ ID NO: 1646707 - DNA, 25 bp, Homo sapien
taactgcatcacgttggctaggagg

SEQ ID NO: 1646708 - DNA, 25 bp, Homo sapien
tagcaagtaaaaggacaggtctttg

SEQ ID NO: 1646709 - DNA, 25 bp, Homo sapien
gtcatgctggccatgtcaccggtag

SEQ ID NO: 1646710 - DNA, 25 bp, Homo sapien
ccagggaggagggtcatgctggcca

SEQ ID NO: 1646711 - DNA, 25 bp, Homo sapien
ctggccatgtcaccggtagtgtcac

SEQ ID NO: 1646712 - DNA, 25 bp, Homo sapien
cagggaggagggtcatgctggccat

SEQ ID NO: 1646713 - DNA, 25 bp, Homo sapien
gcagggatgccgacatgctggaggt

SEQ ID NO: 1646714 - DNA, 25 bp, Homo sapien
tggaggttggtgtcagcatgggctc

SEQ ID NO: 1646715 - DNA, 25 bp, Homo sapien
agggatgccgacatgctggaggttg

SEQ ID NO: 1646716 - DNA, 25 bp, Homo sapien
aggttggtgtcagcatgggctctgg

SEQ ID NO: 1646717 - DNA, 25 bp, Homo sapien
tgtggggcgctcaccaggaatgtgg

SEQ ID NO: 1646718 - DNA, 25 bp, Homo sapien
aatgtggagaaatggccaggtaact

SEQ ID NO: 1646719 - DNA, 25 bp, Homo sapien
gggcgctcaccaggaatgtggagaa

SEQ ID NO: 1646720 - DNA, 25 bp, Homo sapien
gggtgtggggcgctcaccaggaatg

SEQ ID NO: 1646721 - DNA, 25 bp, Homo sapien
tggctagtagattggccagggcttc

SEQ ID NO: 1646722 - DNA, 25 bp, Homo sapien
gttggctagtagattggccagggct

SEQ ID NO: 1646723 - DNA, 25 bp, Homo sapien
ctagtagattggccagggcttccaa

SEQ ID NO: 1646724 - DNA, 25 bp, Homo sapien
ggctagtagattggccagggcttcc

SEQ ID NO: 1646725 - DNA, 25 bp, Homo sapien
caggaaagggaaatgtaaagttgtg

SEQ ID NO: 1646726 - DNA, 25 bp, Homo sapien
ggaaatgtaaagttgtgaaattctg

SEQ ID NO: 1646727 - DNA, 25 bp, Homo sapien
cctgcggcatgatgtagagtacttc

SEQ ID NO: 1646728 - DNA, 25 bp, Homo sapien
aatgtaaagttgtgaaattctgttg

SEQ ID NO: 1646729 - DNA, 25 bp, Homo sapien
caagtcgcaagacgctgtaagctcc

SEQ ID NO: 1646730 - DNA, 25 bp, Homo sapien
tctgaatccgcttccaagtcgcaag

SEQ ID NO: 1646731 - DNA, 25 bp, Homo sapien
ggccgctgctccgctctgtgaagat

SEQ ID NO: 1646732 - DNA, 25 bp, Homo sapien
tccggccgctgctccgctctgtgaa

SEQ ID NO: 1646733 - DNA, 25 bp, Homo sapien
agcctggcagcggaaagggcggagc

SEQ ID NO: 1646734 - DNA, 25 bp, Homo sapien
gtttaaatagcctcgggcgggcgca

SEQ ID NO: 1646735 - DNA, 25 bp, Homo sapien
gcgggcgcagcctggcagcggaaag

SEQ ID NO: 1646736 - DNA, 25 bp, Homo sapien
gaaagggcggagcttcactcctcct

SEQ ID NO: 1646737 - DNA, 25 bp, Homo sapien
aaagggtgatattcaaggacgtggc

SEQ ID NO: 1646738 - DNA, 25 bp, Homo sapien
gttggaaaacttcaggaacctcatg

SEQ ID NO: 1646739 - DNA, 25 bp, Homo sapien
gataaacctgtaccaagatgtgatg

SEQ ID NO: 1646740 - DNA, 25 bp, Homo sapien
atttatctgcgcctgtgtcctgggc

SEQ ID NO: 1646741 - DNA, 25 bp, Homo sapien
tttccctacaacacttgatttccaa

SEQ ID NO: 1646742 - DNA, 25 bp, Homo sapien
tcaatagaagccagggacaacttcc

SEQ ID NO: 1646743 - DNA, 25 bp, Homo sapien
ttaccgtggctctaattgtttcata

SEQ ID NO: 1646744 - DNA, 25 bp, Homo sapien
ttccaattggcagctcacaggttag

SEQ ID NO: 1646745 - DNA, 25 bp, Homo sapien
ccatgtaagactaggcctggagcct

SEQ ID NO: 1646746 - DNA, 25 bp, Homo sapien
gatcagaggcttcaatatatggtca

SEQ ID NO: 1646747 - DNA, 25 bp, Homo sapien
gttttcccagacctgacactgccag

SEQ ID NO: 1646748 - DNA, 25 bp, Homo sapien
gctccacttagggtcatctcatagg

SEQ ID NO: 1646749 - DNA, 25 bp, Homo sapien
ttcacatgtaacaacagcaagtgct

SEQ ID NO: 1646750 - DNA, 25 bp, Homo sapien
gacacacaattaacagagggctgga

SEQ ID NO: 1646751 - DNA, 25 bp, Homo sapien
gaattgccaggttgaaaagtcgttc

SEQ ID NO: 1646752 - DNA, 25 bp, Homo sapien
catagcataacagcgtacattccaa

SEQ ID NO: 1646753 - DNA, 25 bp, Homo sapien
agtatgagttgcctgatgcctaata

SEQ ID NO: 1646754 - DNA, 25 bp, Homo sapien
gagttgcctgatgcctaataagttt

SEQ ID NO: 1646755 - DNA, 25 bp, Homo sapien
gcctgatgcctaataagtttatagc

SEQ ID NO: 1646756 - DNA, 25 bp, Homo sapien
tatgagttgcctgatgcctaataag

SEQ ID NO: 1646757 - DNA, 25 bp, Homo sapien
tatagctctgcctgaatgactttcc

SEQ ID NO: 1646758 - DNA, 25 bp, Homo sapien
tctttgatgtgcaacaagctgagag

SEQ ID NO: 1646759 - DNA, 25 bp, Homo sapien
gcacaataagtcgagcactcaagct

SEQ ID NO: 1646760 - DNA, 25 bp, Homo sapien
ctgatgtgcaacaagatgcgagctc

SEQ ID NO: 1646761 - DNA, 25 bp, Homo sapien
tgaatacggtcactaaatccatagc

SEQ ID NO: 1646762 - DNA, 25 bp, Homo sapien
acatgaagataaccaaggatcatcc

SEQ ID NO: 1646763 - DNA, 25 bp, Homo sapien
gagtgaatgccacttcctgcaaaag

SEQ ID NO: 1646764 - DNA, 25 bp, Homo sapien
gactggaattcagaccactcttctc

SEQ ID NO: 1646765 - DNA, 25 bp, Homo sapien
aaatcctctgctttgaagttgaatc

SEQ ID NO: 1646766 - DNA, 25 bp, Homo sapien
ctctgctttgaagttgaatcttttt

SEQ ID NO: 1646767 - DNA, 25 bp, Homo sapien
tcctctgctttgaagttgaatcttt

SEQ ID NO: 1646768 - DNA, 25 bp, Homo sapien
aatcctctgctttgaagttgaatct

SEQ ID NO: 1646769 - DNA, 25 bp, Homo sapien
ttcaaatggaccttctacacctgta

SEQ ID NO: 1646770 - DNA, 25 bp, Homo sapien
cacctgtaatgacccctatgtgtct

SEQ ID NO: 1646771 - DNA, 25 bp, Homo sapien
tcctggcctttggtctttaggaaca

SEQ ID NO: 1646772 - DNA, 25 bp, Homo sapien
caactaggagattgtatctgcttca

SEQ ID NO: 1646773 - DNA, 25 bp, Homo sapien
agtaccctgttcctcccgtgtgaag

SEQ ID NO: 1646774 - DNA, 25 bp, Homo sapien
taccctgttcctcccgtgtgaagtc

SEQ ID NO: 1646775 - DNA, 25 bp, Homo sapien
ctgttcctcccgtgtgaagtccaca

SEQ ID NO: 1646776 - DNA, 25 bp, Homo sapien
ccctgttcctcccgtgtgaagtcca

SEQ ID NO: 1646777 - DNA, 25 bp, Homo sapien
taaaaaaggacacacattcctgctc

SEQ ID NO: 1646778 - DNA, 25 bp, Homo sapien
ctaaaaaaggacacacattcctgct

SEQ ID NO: 1646779 - DNA, 25 bp, Homo sapien
ccaaagttcatggaggaggaaaagt

SEQ ID NO: 1646780 - DNA, 25 bp, Homo sapien
ggagtgtccactccataggaagtgg

SEQ ID NO: 1646781 - DNA, 25 bp, Homo sapien
gccactgcagggaaaaatccacaaa

SEQ ID NO: 1646782 - DNA, 25 bp, Homo sapien
aagtattcccttgacctttggagtg

SEQ ID NO: 1646783 - DNA, 25 bp, Homo sapien
tgaatgtcaatctgctatctgtgga

SEQ ID NO: 1646784 - DNA, 25 bp, Homo sapien
ttctccctcgactttgatgataatc

SEQ ID NO: 1646785 - DNA, 25 bp, Homo sapien
tctccctcgactttgatgataatct

SEQ ID NO: 1646786 - DNA, 25 bp, Homo sapien
cttctccctcgactttgatgataat

SEQ ID NO: 1646787 - DNA, 25 bp, Homo sapien
tgaggtctttttgggtcttctgggc

SEQ ID NO: 1646788 - DNA, 25 bp, Homo sapien
gctgactgagtgatccaagacacta

SEQ ID NO: 1646789 - DNA, 25 bp, Homo sapien
caagacactaaggagcactaagacg

SEQ ID NO: 1646790 - DNA, 25 bp, Homo sapien
cagcccattgcagctaaatgcagct

SEQ ID NO: 1646791 - DNA, 25 bp, Homo sapien
tgctatgctgtgaacgccctggaaa

SEQ ID NO: 1646792 - DNA, 25 bp, Homo sapien
cagaatagaccatccacatagggcc

SEQ ID NO: 1646793 - DNA, 25 bp, Homo sapien
tagggctcagagttggctcaaggcc

SEQ ID NO: 1646794 - DNA, 25 bp, Homo sapien
ggactcgtggccttcgttcaaagca

SEQ ID NO: 1646795 - DNA, 25 bp, Homo sapien
aagtttgaggcggcagtgagctagg

SEQ ID NO: 1646796 - DNA, 25 bp, Homo sapien
aggcggcagtgagctaggattgtgt

SEQ ID NO: 1646797 - DNA, 25 bp, Homo sapien
cggcagtgagctaggattgtgtcac

SEQ ID NO: 1646798 - DNA, 25 bp, Homo sapien
gaagtttgaggcggcagtgagctag

SEQ ID NO: 1646799 - DNA, 25 bp, Homo sapien
ctgtgcacaggccttcgggggctct

SEQ ID NO: 1646800 - DNA, 25 bp, Homo sapien
ttctcatcctgctcttccatgctct

SEQ ID NO: 1646801 - DNA, 25 bp, Homo sapien
tctgggggcttctcatcctgctctt

SEQ ID NO: 1646802 - DNA, 25 bp, Homo sapien
gggcttctcatcctgctcttccatg

SEQ ID NO: 1646803 - DNA, 25 bp, Homo sapien
agcatgaagatgtaggtctgccgga

SEQ ID NO: 1646804 - DNA, 25 bp, Homo sapien
gagaagccccaagtacagcatgaag

SEQ ID NO: 1646805 - DNA, 25 bp, Homo sapien
taggtctgccggaaccgctgggccc

SEQ ID NO: 1646806 - DNA, 25 bp, Homo sapien
agatgtaggtctgccggaaccgctg

SEQ ID NO: 1646807 - DNA, 25 bp, Homo sapien
caaatacctgtgtatgtactgagag

SEQ ID NO: 1646808 - DNA, 25 bp, Homo sapien
gcaggatgcattcccatagcaaatg

SEQ ID NO: 1646809 - DNA, 25 bp, Homo sapien
tatgtactgagagtccctcagtccc

SEQ ID NO: 1646810 - DNA, 25 bp, Homo sapien
cctgtgtatgtactgagagtccctc

SEQ ID NO: 1646811 - DNA, 25 bp, Homo sapien
tgtccctccagcaactcagcacaga

SEQ ID NO: 1646812 - DNA, 25 bp, Homo sapien
gtccctccagcaactcagcacagag

SEQ ID NO: 1646813 - DNA, 25 bp, Homo sapien
cagccacagagcaggttcgtgctca

SEQ ID NO: 1646814 - DNA, 25 bp, Homo sapien
gagcaggttcgtgctcacaatctgc

SEQ ID NO: 1646815 - DNA, 25 bp, Homo sapien
ggttcgtgctcacaatctgcatcca

SEQ ID NO: 1646816 - DNA, 25 bp, Homo sapien
tagactccctcctactgatacagcc

SEQ ID NO: 1646817 - DNA, 25 bp, Homo sapien
caccgcttccagcttcccgcgtaga

SEQ ID NO: 1646818 - DNA, 25 bp, Homo sapien
accgcttccagcttcccgcgtagac

SEQ ID NO: 1646819 - DNA, 25 bp, Homo sapien
ccgcttccagcttcccgcgtagacc

SEQ ID NO: 1646820 - DNA, 25 bp, Homo sapien
caagcgctgccccacgcccctacca

SEQ ID NO: 1646821 - DNA, 25 bp, Homo sapien
cggacaccaagcgctgccccacgcc

SEQ ID NO: 1646822 - DNA, 25 bp, Homo sapien
agcgctgccccacgcccctaccaac

SEQ ID NO: 1646823 - DNA, 25 bp, Homo sapien
gacaccaagcgctgccccacgcccc

SEQ ID NO: 1646824 - DNA, 25 bp, Homo sapien
ctcagtgcctagcacggctctgcgg

SEQ ID NO: 1646825 - DNA, 25 bp, Homo sapien
aagctagttcggtcccctctcctag

SEQ ID NO: 1646826 - DNA, 25 bp, Homo sapien
cgcgcgcgggacaatggctgctctt

SEQ ID NO: 1646827 - DNA, 25 bp, Homo sapien
tctgcggcaggacgaactcgggtta

SEQ ID NO: 1646828 - DNA, 25 bp, Homo sapien
tgcatgtgcaggtctagggggagca

SEQ ID NO: 1646829 - DNA, 25 bp, Homo sapien
tagggggagcactaagaccagccgc

SEQ ID NO: 1646830 - DNA, 25 bp, Homo sapien
caggtctagggggagcactaagacc

SEQ ID NO: 1646831 - DNA, 25 bp, Homo sapien
ggagcactaagaccagccgcggcgc

SEQ ID NO: 1646832 - DNA, 25 bp, Homo sapien
ctacgatgtcaattccataaggaaa

SEQ ID NO: 1646833 - DNA, 25 bp, Homo sapien
tatttggtctactgtccgacctacc

SEQ ID NO: 1646834 - DNA, 25 bp, Homo sapien
gacctaccactacgatgtcaattcc

SEQ ID NO: 1646835 - DNA, 25 bp, Homo sapien
tactgtccgacctaccactacgatg

SEQ ID NO: 1646836 - DNA, 25 bp, Homo sapien
gataagggctcaagatacagtgaag

SEQ ID NO: 1646837 - DNA, 25 bp, Homo sapien
tactgagtgcaacccttaagatcct

SEQ ID NO: 1646838 - DNA, 25 bp, Homo sapien
taacgagagggtaaaagggcatgat

SEQ ID NO: 1646839 - DNA, 25 bp, Homo sapien
tattggccatgaattggataagggc

SEQ ID NO: 1646840 - DNA, 25 bp, Homo sapien
tctaagattctatgggagccagggc

SEQ ID NO: 1646841 - DNA, 25 bp, Homo sapien
taaatatatgatcaagcatggtttc

SEQ ID NO: 1646842 - DNA, 25 bp, Homo sapien
cattgcagtagaacatcacaaggtc

SEQ ID NO: 1646843 - DNA, 25 bp, Homo sapien
gaatgactggcttataatatgcact

SEQ ID NO: 1646844 - DNA, 25 bp, Homo sapien
gtgttgggctctggattcacaagct

SEQ ID NO: 1646845 - DNA, 25 bp, Homo sapien
gacggaggggttgatttggatgtaa

SEQ ID NO: 1646846 - DNA, 25 bp, Homo sapien
ggttgatttggatgtaagtgttggg

SEQ ID NO: 1646847 - DNA, 25 bp, Homo sapien
aagtgttgggctctggattcacaag

SEQ ID NO: 1646848 - DNA, 25 bp, Homo sapien
caagatgcaatgttgtgagctgcct

SEQ ID NO: 1646849 - DNA, 25 bp, Homo sapien
ggaagtggatccatccccagctgag

SEQ ID NO: 1646850 - DNA, 25 bp, Homo sapien
caccttgattatacagccttgcaga

SEQ ID NO: 1646851 - DNA, 25 bp, Homo sapien
gaagagctaactaagcaatgcctga

SEQ ID NO: 1646852 - DNA, 25 bp, Homo sapien
gcctctacggcttgctgaaggcagc

SEQ ID NO: 1646853 - DNA, 25 bp, Homo sapien
gggcatcagaggtttgggtggtggc

SEQ ID NO: 1646854 - DNA, 25 bp, Homo sapien
gctgaaagaattgcctctacggctt

SEQ ID NO: 1646855 - DNA, 25 bp, Homo sapien
cacagtggagaccaatctgagtggg

SEQ ID NO: 1646856 - DNA, 25 bp, Homo sapien
taaccaaacccagcagggccaatgt

SEQ ID NO: 1646857 - DNA, 25 bp, Homo sapien
accaaacccagcagggccaatgtac

SEQ ID NO: 1646858 - DNA, 25 bp, Homo sapien
aaccaaacccagcagggccaatgta

SEQ ID NO: 1646859 - DNA, 25 bp, Homo sapien
ttaaccaaacccagcagggccaatg

SEQ ID NO: 1646860 - DNA, 25 bp, Homo sapien
taggtctcctctggaaggtctggtg

SEQ ID NO: 1646861 - DNA, 25 bp, Homo sapien
ctcataggtctcctctggaaggtct

SEQ ID NO: 1646862 - DNA, 25 bp, Homo sapien
cataggtctcctctggaaggtctgg

SEQ ID NO: 1646863 - DNA, 25 bp, Homo sapien
cctctggaaggtctggtggttgcat

SEQ ID NO: 1646864 - DNA, 25 bp, Homo sapien
actctgatccgtccctgaagctggg

SEQ ID NO: 1646865 - DNA, 25 bp, Homo sapien
cgactctgatccgtccctgaagctg

SEQ ID NO: 1646866 - DNA, 25 bp, Homo sapien
gttcgactctgatccgtccctgaag

SEQ ID NO: 1646867 - DNA, 25 bp, Homo sapien
cagttcgactctgatccgtccctga

SEQ ID NO: 1646868 - DNA, 25 bp, Homo sapien
gtgctcctccttcgggatgggttgt

SEQ ID NO: 1646869 - DNA, 25 bp, Homo sapien
cggaactgggctctgtggggtgctc

SEQ ID NO: 1646870 - DNA, 25 bp, Homo sapien
ctcctccttcgggatgggttgtgag

SEQ ID NO: 1646871 - DNA, 25 bp, Homo sapien
tctgtggggtgctcctccttcggga

SEQ ID NO: 1646872 - DNA, 25 bp, Homo sapien
ccccaaagccctcattattctgtgc

SEQ ID NO: 1646873 - DNA, 25 bp, Homo sapien
cccaaagccctcattattctgtgcc

SEQ ID NO: 1646874 - DNA, 25 bp, Homo sapien
tgtgcctctagtccttgcccatctc

SEQ ID NO: 1646875 - DNA, 25 bp, Homo sapien
agaaaatagcccagttctgaggcca

SEQ ID NO: 1646876 - DNA, 25 bp, Homo sapien
aatgacagccaggatcccgatgaca

SEQ ID NO: 1646877 - DNA, 25 bp, Homo sapien
ccgatgacaataccagcgatggccc

SEQ ID NO: 1646878 - DNA, 25 bp, Homo sapien
gtagagaaaatagcccagttctgag

SEQ ID NO: 1646879 - DNA, 25 bp, Homo sapien
caccttgaccaggactgaagtggag

SEQ ID NO: 1646880 - DNA, 25 bp, Homo sapien
tccccggtggagtgttcaagagtcc

SEQ ID NO: 1646881 - DNA, 25 bp, Homo sapien
gctgtgcagttgtagatcccgtcgt

SEQ ID NO: 1646882 - DNA, 25 bp, Homo sapien
tcagatgccgactccctggtgatgt

SEQ ID NO: 1646883 - DNA, 25 bp, Homo sapien
agacctcacaggcatagggccccgt

SEQ ID NO: 1646884 - DNA, 25 bp, Homo sapien
ccgtgtcattccgctggaggccatg

SEQ ID NO: 1646885 - DNA, 25 bp, Homo sapien
agttgatggtcagctcaaggggctc

SEQ ID NO: 1646886 - DNA, 25 bp, Homo sapien
catggatgattagggtcctgttgtc

SEQ ID NO: 1646887 - DNA, 25 bp, Homo sapien
cacgacttgaggcatggtcagtgtt

SEQ ID NO: 1646888 - DNA, 25 bp, Homo sapien
gttcaggcttgaaggcacgacttga

SEQ ID NO: 1646889 - DNA, 25 bp, Homo sapien
tggccacttaggaaccactggacat

SEQ ID NO: 1646890 - DNA, 25 bp, Homo sapien
cacactctgattgacggtttggcag

SEQ ID NO: 1646891 - DNA, 25 bp, Homo sapien
caagtactcggaccttcagagtacc

SEQ ID NO: 1646892 - DNA, 25 bp, Homo sapien
cggaccttcagagtacccaggctgg

SEQ ID NO: 1646893 - DNA, 25 bp, Homo sapien
gttggacaccaagcacctgtacagg

SEQ ID NO: 1646894 - DNA, 25 bp, Homo sapien
caagcacctgtacaggccctcatgt

SEQ ID NO: 1646895 - DNA, 25 bp, Homo sapien
gacagaatggagtcaaggagaaacc

SEQ ID NO: 1646896 - DNA, 25 bp, Homo sapien
ttgtttccgctaagaaggtcatgct

SEQ ID NO: 1646897 - DNA, 25 bp, Homo sapien
cacagcatggatggtgaatgttctc

SEQ ID NO: 1646898 - DNA, 25 bp, Homo sapien
gaaaccaagtataggcacagggtgg

SEQ ID NO: 1646899 - DNA, 25 bp, Homo sapien
cagactccaatttgatttcaacagg

SEQ ID NO: 1646900 - DNA, 25 bp, Homo sapien
tccaatttgatttcaacaggatcag

SEQ ID NO: 1646901 - DNA, 25 bp, Homo sapien
caacaccagactccaatttgatttc

SEQ ID NO: 1646902 - DNA, 25 bp, Homo sapien
caatttgatttcaacaggatcagga

SEQ ID NO: 1646903 - DNA, 25 bp, Homo sapien
ctcagaagggcatctcgagcttcac

SEQ ID NO: 1646904 - DNA, 25 bp, Homo sapien
catccaggaagatggggtcgctcct

SEQ ID NO: 1646905 - DNA, 25 bp, Homo sapien
ctctggctcagaagggcatctcgag

SEQ ID NO: 1646906 - DNA, 25 bp, Homo sapien
gatggggtcgctcctctggctcaga

SEQ ID NO: 1646907 - DNA, 25 bp, Homo sapien
tgacgtccttagtggtgcagtagaa

SEQ ID NO: 1646908 - DNA, 25 bp, Homo sapien
cccagtggatggtaatgttgacgtc

SEQ ID NO: 1646909 - DNA, 25 bp, Homo sapien
tggacagctgcatgcgctcatggaa

SEQ ID NO: 1646910 - DNA, 25 bp, Homo sapien
gctcatggaacacaacggagaggtt

SEQ ID NO: 1646911 - DNA, 25 bp, Homo sapien
ctgggctgactgcaatggagggttt

SEQ ID NO: 1646912 - DNA, 25 bp, Homo sapien
tatggcagtgcctgggctgactgca

SEQ ID NO: 1646913 - DNA, 25 bp, Homo sapien
ctatggcagtgcctgggctgactgc

SEQ ID NO: 1646914 - DNA, 25 bp, Homo sapien
actgcaatggagggtttggccagct

SEQ ID NO: 1646915 - DNA, 25 bp, Homo sapien
ggtcccaaacacaggcagaacaaca

SEQ ID NO: 1646916 - DNA, 25 bp, Homo sapien
ccaaacacaggcagaacaacatcct

SEQ ID NO: 1646917 - DNA, 25 bp, Homo sapien
aacacaggcagaacaacatcctcac

SEQ ID NO: 1646918 - DNA, 25 bp, Homo sapien
ctctggatctgccatgaatctgggg

SEQ ID NO: 1646919 - DNA, 25 bp, Homo sapien
catcaagtgggttggcattgagggt

SEQ ID NO: 1646920 - DNA, 25 bp, Homo sapien
tggaggactccatacggtacaaagc

SEQ ID NO: 1646921 - DNA, 25 bp, Homo sapien
ggactccatacggtacaaagcgagg

SEQ ID NO: 1646922 - DNA, 25 bp, Homo sapien
ctgcagctggaggactccatacggt

SEQ ID NO: 1646923 - DNA, 25 bp, Homo sapien
ccccactggtatcatttctaaggtt

SEQ ID NO: 1646924 - DNA, 25 bp, Homo sapien
aggattcccatccagtggtgtcccc

SEQ ID NO: 1646925 - DNA, 25 bp, Homo sapien
gggtcccggcacctgacttcagtgt

SEQ ID NO: 1646926 - DNA, 25 bp, Homo sapien
cacacacagatacagtcctcactcc

SEQ ID NO: 1646927 - DNA, 25 bp, Homo sapien
tcagtgtgccaggccgtctgtcgcc

SEQ ID NO: 1646928 - DNA, 25 bp, Homo sapien
cccagcacaaagagcgggaagtcca

SEQ ID NO: 1646929 - DNA, 25 bp, Homo sapien
ctgagaccatgaagtagcaagttca

SEQ ID NO: 1646930 - DNA, 25 bp, Homo sapien
tctgagaccatgaagtagcaagttc

SEQ ID NO: 1646931 - DNA, 25 bp, Homo sapien
aaatcgactttgagaaagagcctac

SEQ ID NO: 1646932 - DNA, 25 bp, Homo sapien
aactagggcccagagggtacagtga

SEQ ID NO: 1646933 - DNA, 25 bp, Homo sapien
gagtcttcttggaacatctgggaaa

SEQ ID NO: 1646934 - DNA, 25 bp, Homo sapien
taaacagagattccagtctaagctc

SEQ ID NO: 1646935 - DNA, 25 bp, Homo sapien
tgactgagctacttgagccacagcc

SEQ ID NO: 1646936 - DNA, 25 bp, Homo sapien
gagcaaccgtgcctagtctgaactg

SEQ ID NO: 1646937 - DNA, 25 bp, Homo sapien
gatattagctaatgctgccaaggac

SEQ ID NO: 1646938 - DNA, 25 bp, Homo sapien
tagctcttgtctcactactaggaag

SEQ ID NO: 1646939 - DNA, 25 bp, Homo sapien
tccgcatgaccttaccctaggcaat

SEQ ID NO: 1646940 - DNA, 25 bp, Homo sapien
caatcaatcaccaactcctaagggt

SEQ ID NO: 1646941 - DNA, 25 bp, Homo sapien
tcttctctcgcctgtaaaactgctc

SEQ ID NO: 1646942 - DNA, 25 bp, Homo sapien
tcagctgaccctacaagaagtctgg

SEQ ID NO: 1646943 - DNA, 25 bp, Homo sapien
cttctgaagcatctggaggtaagta

SEQ ID NO: 1646944 - DNA, 25 bp, Homo sapien
agctgaactccacaggattcctggg

SEQ ID NO: 1646945 - DNA, 25 bp, Homo sapien
ttgctgagctgaactccacaggatt

SEQ ID NO: 1646946 - DNA, 25 bp, Homo sapien
gctgagctgaactccacaggattcc

SEQ ID NO: 1646947 - DNA, 25 bp, Homo sapien
tgagctgaactccacaggattcctg

SEQ ID NO: 1646948 - DNA, 25 bp, Homo sapien
tcttcctctgcagctaagccaatag

SEQ ID NO: 1646949 - DNA, 25 bp, Homo sapien
aagaagagttaagtcccaagaggcg

SEQ ID NO: 1646950 - DNA, 25 bp, Homo sapien
taagtcccaagaggcgagtggaaaa

SEQ ID NO: 1646951 - DNA, 25 bp, Homo sapien
cagctaagccaatagcaggctgtct

SEQ ID NO: 1646952 - DNA, 25 bp, Homo sapien
tgatcaggacactcgaggcaatccc

SEQ ID NO: 1646953 - DNA, 25 bp, Homo sapien
aatagtggtcctgagtaaggccggc

SEQ ID NO: 1646954 - DNA, 25 bp, Homo sapien
gaggcaatccctgcgatgcctccag

SEQ ID NO: 1646955 - DNA, 25 bp, Homo sapien
cctgtgagcaccacgctgatcagga

SEQ ID NO: 1646956 - DNA, 25 bp, Homo sapien
gatccagatcttcccattgactgag

SEQ ID NO: 1646957 - DNA, 25 bp, Homo sapien
agatccagatcttcccattgactga

SEQ ID NO: 1646958 - DNA, 25 bp, Homo sapien
tgagatccagatcttcccattgact

SEQ ID NO: 1646959 - DNA, 25 bp, Homo sapien
gagatccagatcttcccattgactg

SEQ ID NO: 1646960 - DNA, 25 bp, Homo sapien
gcagaggtgagtgatgctgttggag

SEQ ID NO: 1646961 - DNA, 25 bp, Homo sapien
ctgcagaggtgagtgatgctgttgg

SEQ ID NO: 1646962 - DNA, 25 bp, Homo sapien
cagaggtgagtgatgctgttggagg

SEQ ID NO: 1646963 - DNA, 25 bp, Homo sapien
tgcagaggtgagtgatgctgttgga

SEQ ID NO: 1646964 - DNA, 25 bp, Homo sapien
ctcagaaatgaccaggtgctgggtg

SEQ ID NO: 1646965 - DNA, 25 bp, Homo sapien
gcaggggggtttgagtcagcaaagc

SEQ ID NO: 1646966 - DNA, 25 bp, Homo sapien
gggttgaccataggagggtctgggc

SEQ ID NO: 1646967 - DNA, 25 bp, Homo sapien
tgggtctggagggttgaccatagga

SEQ ID NO: 1646968 - DNA, 25 bp, Homo sapien
ttctggccattgacatcccggcgga

SEQ ID NO: 1646969 - DNA, 25 bp, Homo sapien
cctggtgatgttcgacagagtcagt

SEQ ID NO: 1646970 - DNA, 25 bp, Homo sapien
ttactggctgtgacattgggctgag

SEQ ID NO: 1646971 - DNA, 25 bp, Homo sapien
cttggaggaaggcaatgcagactga

SEQ ID NO: 1646972 - DNA, 25 bp, Homo sapien
cactgaagctccatgtgtactgggc

SEQ ID NO: 1646973 - DNA, 25 bp, Homo sapien
ggtgtagacccctgagtgtgccctg

SEQ ID NO: 1646974 - DNA, 25 bp, Homo sapien
gtgtccatactgctgtgcaagccgg

SEQ ID NO: 1646975 - DNA, 25 bp, Homo sapien
aaaatctgggtccagtgcggtcacg

SEQ ID NO: 1646976 - DNA, 25 bp, Homo sapien
tctggagattactggtccatcccct

SEQ ID NO: 1646977 - DNA, 25 bp, Homo sapien
caaggttcagaaaccactggaatgt

SEQ ID NO: 1646978 - DNA, 25 bp, Homo sapien
tgaggaccctgccatctctggagat

SEQ ID NO: 1646979 - DNA, 25 bp, Homo sapien
tggttcctggcctcacagtggtagg

SEQ ID NO: 1646980 - DNA, 25 bp, Homo sapien
atgcatgtcaaattcaaggagtctg

SEQ ID NO: 1646981 - DNA, 25 bp, Homo sapien
tgcatgtcaaattcaaggagtctgt

SEQ ID NO: 1646982 - DNA, 25 bp, Homo sapien
attcaaggagtctgtgtgctccaga

SEQ ID NO: 1646983 - DNA, 25 bp, Homo sapien
tcaaattcaaggagtctgtgtgctc

SEQ ID NO: 1646984 - DNA, 25 bp, Homo sapien
gagccatgctttaggacagccctga

SEQ ID NO: 1646985 - DNA, 25 bp, Homo sapien
tactcacagattccggagaagacag

SEQ ID NO: 1646986 - DNA, 25 bp, Homo sapien
gaagagagttgtcgggacacgcaca

SEQ ID NO: 1646987 - DNA, 25 bp, Homo sapien
cacctggccacagtacacttgttta

SEQ ID NO: 1646988 - DNA, 25 bp, Homo sapien
cctaaaagtcctgtgtgtcaataat

SEQ ID NO: 1646989 - DNA, 25 bp, Homo sapien
gcaaagaggtcttaaaaccttcata

SEQ ID NO: 1646990 - DNA, 25 bp, Homo sapien
taaaacaacatctacgcaaagaggt

SEQ ID NO: 1646991 - DNA, 25 bp, Homo sapien
tcatcattcagtcgtcctaaaagtc

SEQ ID NO: 1646992 - DNA, 25 bp, Homo sapien
gacaagtagcatagcatgatggcaa

SEQ ID NO: 1646993 - DNA, 25 bp, Homo sapien
tgattggtggttgctcctcggagcc

SEQ ID NO: 1646994 - DNA, 25 bp, Homo sapien
caataatgatcagggagccatcagc

SEQ ID NO: 1646995 - DNA, 25 bp, Homo sapien
cctcggagccaattgtaggagatga

SEQ ID NO: 1646996 - DNA, 25 bp, Homo sapien
gacagacagggtgacgttgccccct

SEQ ID NO: 1646997 - DNA, 25 bp, Homo sapien
ctggacagacagggtgacgttgccc

SEQ ID NO: 1646998 - DNA, 25 bp, Homo sapien
agacagggtgacgttgccccctcga

SEQ ID NO: 1646999 - DNA, 25 bp, Homo sapien
tggacagacagggtgacgttgcccc

SEQ ID NO: 1647000 - DNA, 25 bp, Homo sapien
atgtgatcgtcagctgagcagacac

SEQ ID NO: 1647001 - DNA, 25 bp, Homo sapien
ggatggatgtgatcgtcagctgagc

SEQ ID NO: 1647002 - DNA, 25 bp, Homo sapien
gagggatggatgtgatcgtcagctg

SEQ ID NO: 1647003 - DNA, 25 bp, Homo sapien
gatgtgatcgtcagctgagcagaca

SEQ ID NO: 1647004 - DNA, 25 bp, Homo sapien
tccttcccaactggtatcttccctg

SEQ ID NO: 1647005 - DNA, 25 bp, Homo sapien
ctcccctccttcccaactggtatct

SEQ ID NO: 1647006 - DNA, 25 bp, Homo sapien
ttcccaactggtatcttccctgcac

SEQ ID NO: 1647007 - DNA, 25 bp, Homo sapien
ctccttcccaactggtatcttccct

SEQ ID NO: 1647008 - DNA, 25 bp, Homo sapien
tctttatcgtttcatcatttctgtt

SEQ ID NO: 1647009 - DNA, 25 bp, Homo sapien
cttctttatcgtttcatcatttctg

SEQ ID NO: 1647010 - DNA, 25 bp, Homo sapien
ctttatcgtttcatcatttctgttc

SEQ ID NO: 1647011 - DNA, 25 bp, Homo sapien
ttatcgtttcatcatttctgttcat

SEQ ID NO: 1647012 - DNA, 25 bp, Homo sapien
acgctcccatccagggctcacccca

SEQ ID NO: 1647013 - DNA, 25 bp, Homo sapien
gagcaacgctcccatccagggctca

SEQ ID NO: 1647014 - DNA, 25 bp, Homo sapien
agccatggggagcaaccaggaaccg

SEQ ID NO: 1647015 - DNA, 25 bp, Homo sapien
cagccatggggagcaaccaggaacc

SEQ ID NO: 1647016 - DNA, 25 bp, Homo sapien
caacctgctgggctgaagccgttct

SEQ ID NO: 1647017 - DNA, 25 bp, Homo sapien
cttcaacctgctgggctgaagccgt

SEQ ID NO: 1647018 - DNA, 25 bp, Homo sapien
gcttcaacctgctgggctgaagccg

SEQ ID NO: 1647019 - DNA, 25 bp, Homo sapien
ttcaacctgctgggctgaagccgtt

SEQ ID NO: 1647020 - DNA, 25 bp, Homo sapien
atccaaatcagctgttcatgttggc

SEQ ID NO: 1647021 - DNA, 25 bp, Homo sapien
atagctaccattactcattctgagt

SEQ ID NO: 1647022 - DNA, 25 bp, Homo sapien
tggtatccaaatcagctgttcatgt

SEQ ID NO: 1647023 - DNA, 25 bp, Homo sapien
ggcatctggctcatgctaaaatttc

SEQ ID NO: 1647024 - DNA, 25 bp, Homo sapien
tacatcaagccaataccgtgtggcc

SEQ ID NO: 1647025 - DNA, 25 bp, Homo sapien
gagctgaggataaagggcccgatct

SEQ ID NO: 1647026 - DNA, 25 bp, Homo sapien
aagactcccagatcagctaccaggc

SEQ ID NO: 1647027 - DNA, 25 bp, Homo sapien
acacggctgacctcatacatcaagc

SEQ ID NO: 1647028 - DNA, 25 bp, Homo sapien
tataggaccaagatggatgcgaccc

SEQ ID NO: 1647029 - DNA, 25 bp, Homo sapien
tggtggcacgtaagctccttgtctg

SEQ ID NO: 1647030 - DNA, 25 bp, Homo sapien
caagctgggactggcaggaaataac

SEQ ID NO: 1647031 - DNA, 25 bp, Homo sapien
gcagttgctcaggacacgctcctat

SEQ ID NO: 1647032 - DNA, 25 bp, Homo sapien
tagatagtacataaacgtcccaaaa

SEQ ID NO: 1647033 - DNA, 25 bp, Homo sapien
cagaggcatggaagcaagacgctaa

SEQ ID NO: 1647034 - DNA, 25 bp, Homo sapien
atgtgtactgtcaccacgtgggatg

SEQ ID NO: 1647035 - DNA, 25 bp, Homo sapien
gtttggagtgtaatggtccagctcc

SEQ ID NO: 1647036 - DNA, 25 bp, Homo sapien
cctttgtaggaacgagaaaccgcat

SEQ ID NO: 1647037 - DNA, 25 bp, Homo sapien
ggattgcctggctctactccgggca

SEQ ID NO: 1647038 - DNA, 25 bp, Homo sapien
tggccaaaagaatgggaccgcctgg

SEQ ID NO: 1647039 - DNA, 25 bp, Homo sapien
gacagagagagtagaatccagccac

SEQ ID NO: 1647040 - DNA, 25 bp, Homo sapien
catatgcattaatttgattacacaa

SEQ ID NO: 1647041 - DNA, 25 bp, Homo sapien
aaatgagttttggacagtgaataga

SEQ ID NO: 1647042 - DNA, 25 bp, Homo sapien
gacagggtcttactgatattgctca

SEQ ID NO: 1647043 - DNA, 25 bp, Homo sapien
ggatgaaataggcaaaagtcaactc

SEQ ID NO: 1647044 - DNA, 25 bp, Homo sapien
tgttggattttatgtgccacccaga

SEQ ID NO: 1647045 - DNA, 25 bp, Homo sapien
ccacccagatggttggatactcaga

SEQ ID NO: 1647046 - DNA, 25 bp, Homo sapien
catgcagtcactgatatagtcggtg

SEQ ID NO: 1647047 - DNA, 25 bp, Homo sapien
gaataaggagctgcccagtacacac

SEQ ID NO: 1647048 - DNA, 25 bp, Homo sapien
gggtttgtgcttattgggtcgtcac

SEQ ID NO: 1647049 - DNA, 25 bp, Homo sapien
tattgccagacttgctgcaagagag

SEQ ID NO: 1647050 - DNA, 25 bp, Homo sapien
gcacaagcgctgcagctaccttgag

SEQ ID NO: 1647051 - DNA, 25 bp, Homo sapien
gcagagcaccacacagatcatgcac

SEQ ID NO: 1647052 - DNA, 25 bp, Homo sapien
tgcatcctcagcgcctagaacagca

SEQ ID NO: 1647053 - DNA, 25 bp, Homo sapien
tcatccgtcttgtgcacggctgcat

SEQ ID NO: 1647054 - DNA, 25 bp, Homo sapien
gagggcagggatttcatccgtcttg

SEQ ID NO: 1647055 - DNA, 25 bp, Homo sapien
gatttcatccgtcttgtgcacggct

SEQ ID NO: 1647056 - DNA, 25 bp, Homo sapien
ccagtcgtggtaagtactgtacttc

SEQ ID NO: 1647057 - DNA, 25 bp, Homo sapien
tactgagcatttactctgcgccagt

SEQ ID NO: 1647058 - DNA, 25 bp, Homo sapien
tttactctgcgccagtcgtggtaag

SEQ ID NO: 1647059 - DNA, 25 bp, Homo sapien
tatttgtccaataagtgaatgagtg

SEQ ID NO: 1647060 - DNA, 25 bp, Homo sapien
cagtggaactatgtccagagcctat

SEQ ID NO: 1647061 - DNA, 25 bp, Homo sapien
gcttggcagagtccataaattgccc

SEQ ID NO: 1647062 - DNA, 25 bp, Homo sapien
cagggtcctggaggtaggaaacagt

SEQ ID NO: 1647063 - DNA, 25 bp, Homo sapien
ggaactatgtccagagcctatactt

SEQ ID NO: 1647064 - DNA, 25 bp, Homo sapien
cagctcttaagagcagttactatca

SEQ ID NO: 1647065 - DNA, 25 bp, Homo sapien
gggactaagaactaaaccatatcaa

SEQ ID NO: 1647066 - DNA, 25 bp, Homo sapien
gaggtccctcctcctacactgagga

SEQ ID NO: 1647067 - DNA, 25 bp, Homo sapien
gatctcaattcctacagcagctctt

SEQ ID NO: 1647068 - DNA, 25 bp, Homo sapien
tccaagtcccacagttcccatgtgt

SEQ ID NO: 1647069 - DNA, 25 bp, Homo sapien
acagttcccatgtgtcctaggtgga

SEQ ID NO: 1647070 - DNA, 25 bp, Homo sapien
tctccattcttcagcagggcagagg

SEQ ID NO: 1647071 - DNA, 25 bp, Homo sapien
cccatgtgtcctaggtggaggtgct

SEQ ID NO: 1647072 - DNA, 25 bp, Homo sapien
gaggacagacagaactctttttagc

SEQ ID NO: 1647073 - DNA, 25 bp, Homo sapien
cagacagaactctttttagctgtgg

SEQ ID NO: 1647074 - DNA, 25 bp, Homo sapien
ctgaggacagacagaactcttttta

SEQ ID NO: 1647075 - DNA, 25 bp, Homo sapien
ggacagacagaactctttttagctg

SEQ ID NO: 1647076 - DNA, 25 bp, Homo sapien
ggagatgataatactgcccctgcct

SEQ ID NO: 1647077 - DNA, 25 bp, Homo sapien
tggagatgataatactgcccctgcc

SEQ ID NO: 1647078 - DNA, 25 bp, Homo sapien
tgtcccgagcaggtccgcagtggct

SEQ ID NO: 1647079 - DNA, 25 bp, Homo sapien
cccattaagccacgaagctctggtg

SEQ ID NO: 1647080 - DNA, 25 bp, Homo sapien
gggaggcagactatacccctctcag

SEQ ID NO: 1647081 - DNA, 25 bp, Homo sapien
gcaggaactagtccagggtcacgga

SEQ ID NO: 1647082 - DNA, 25 bp, Homo sapien
gtcttgccctctcgtccaggctact

SEQ ID NO: 1647083 - DNA, 25 bp, Homo sapien
ccctctcgtccaggctactagagtg

SEQ ID NO: 1647084 - DNA, 25 bp, Homo sapien
ctctcgtccaggctactagagtgca

SEQ ID NO: 1647085 - DNA, 25 bp, Homo sapien
ttgccctctcgtccaggctactaga

SEQ ID NO: 1647086 - DNA, 25 bp, Homo sapien
gccccatgccccgatgccccgcggg

SEQ ID NO: 1647087 - DNA, 25 bp, Homo sapien
ccatgccccgatgccccgcgggggc

SEQ ID NO: 1647088 - DNA, 25 bp, Homo sapien
gaaaccaccctcccgtgcagccgag

SEQ ID NO: 1647089 - DNA, 25 bp, Homo sapien
ctgcaggggaagtcccggcgcccgg

SEQ ID NO: 1647090 - DNA, 25 bp, Homo sapien
cggttaattcatcgccgccaacgca

SEQ ID NO: 1647091 - DNA, 25 bp, Homo sapien
tagttttctcgaccctcgggctcca

SEQ ID NO: 1647092 - DNA, 25 bp, Homo sapien
taggccctgtccacgcattgtcctt

SEQ ID NO: 1647093 - DNA, 25 bp, Homo sapien
gcccctggctacgaacttgtcccat

SEQ ID NO: 1647094 - DNA, 25 bp, Homo sapien
gcctggccaatttatagtaattatc

SEQ ID NO: 1647095 - DNA, 25 bp, Homo sapien
attgaatatcaagccgttgctccca

SEQ ID NO: 1647096 - DNA, 25 bp, Homo sapien
gaatatcaagccgttgctcccaggg

SEQ ID NO: 1647097 - DNA, 25 bp, Homo sapien
aattattgaatatcaagccgttgct

SEQ ID NO: 1647098 - DNA, 25 bp, Homo sapien
cctcagatcttcaaatggaatctgg

SEQ ID NO: 1647099 - DNA, 25 bp, Homo sapien
tccaccctcagatcttcaaatggaa

SEQ ID NO: 1647100 - DNA, 25 bp, Homo sapien
ctccaccctcagatcttcaaatgga

SEQ ID NO: 1647101 - DNA, 25 bp, Homo sapien
caccctcagatcttcaaatggaatc

SEQ ID NO: 1647102 - DNA, 25 bp, Homo sapien
tgcccggcctgaccagtggatgttt

SEQ ID NO: 1647103 - DNA, 25 bp, Homo sapien
ccggcctgaccagtggatgttttaa

SEQ ID NO: 1647104 - DNA, 25 bp, Homo sapien
cccggcctgaccagtggatgtttta

SEQ ID NO: 1647105 - DNA, 25 bp, Homo sapien
cgtgcccggcctgaccagtggatgt

SEQ ID NO: 1647106 - DNA, 25 bp, Homo sapien
ctctttctctggacatggaatctag

SEQ ID NO: 1647107 - DNA, 25 bp, Homo sapien
gttctcaagactcatcaggttctct

SEQ ID NO: 1647108 - DNA, 25 bp, Homo sapien
tccagctcagagatcttgtccctgg

SEQ ID NO: 1647109 - DNA, 25 bp, Homo sapien
ctctggacatggaatctagatcttc

SEQ ID NO: 1647110 - DNA, 25 bp, Homo sapien
ctactaaaccgcccagccgatcggc

SEQ ID NO: 1647111 - DNA, 25 bp, Homo sapien
cccacagagtggcccgcgggcctcc

SEQ ID NO: 1647112 - DNA, 25 bp, Homo sapien
cggcccccacagagtggcccgcggg

SEQ ID NO: 1647113 - DNA, 25 bp, Homo sapien
tactaaaccgcccagccgatcggcc

SEQ ID NO: 1647114 - DNA, 25 bp, Homo sapien
tatgatcaagggtcgaaggctctgt

SEQ ID NO: 1647115 - DNA, 25 bp, Homo sapien
gagactcgatctcgtgggcttcaga

SEQ ID NO: 1647116 - DNA, 25 bp, Homo sapien
tgagatccaaacagaagtgcgagca

SEQ ID NO: 1647117 - DNA, 25 bp, Homo sapien
tcgcctgagtcccagatagaacggg

SEQ ID NO: 1647118 - DNA, 25 bp, Homo sapien
gcgtgtgaccgaagtcccctattca

SEQ ID NO: 1647119 - DNA, 25 bp, Homo sapien
caacgcacccagtctgcaagtggat

SEQ ID NO: 1647120 - DNA, 25 bp, Homo sapien
gatacatttcgcatagctcagactg

SEQ ID NO: 1647121 - DNA, 25 bp, Homo sapien
ggtggcccctctggactggaaaagc

SEQ ID NO: 1647122 - DNA, 25 bp, Homo sapien
ttcttttaaggtaggcagggcctca

SEQ ID NO: 1647123 - DNA, 25 bp, Homo sapien
ttcccctcccgagaccgagtctctc

SEQ ID NO: 1647124 - DNA, 25 bp, Homo sapien
gtggcgaggtctctgggttcaagtg

SEQ ID NO: 1647125 - DNA, 25 bp, Homo sapien
gcctcattctatcgcccatgttgga

SEQ ID NO: 1647126 - DNA, 25 bp, Homo sapien
catccagctacgaatgctctttctt

SEQ ID NO: 1647127 - DNA, 25 bp, Homo sapien
ccacatccagctacgaatgctcttt

SEQ ID NO: 1647128 - DNA, 25 bp, Homo sapien
accacatccagctacgaatgctctt

SEQ ID NO: 1647129 - DNA, 25 bp, Homo sapien
cacatccagctacgaatgctctttc

SEQ ID NO: 1647130 - DNA, 25 bp, Homo sapien
aaagaatgtcccctgcccatgggag

SEQ ID NO: 1647131 - DNA, 25 bp, Homo sapien
gggcatccttatctgccggcagcag

SEQ ID NO: 1647132 - DNA, 25 bp, Homo sapien
atcgccgccatcattgctactgctg

SEQ ID NO: 1647133 - DNA, 25 bp, Homo sapien
agcagtttgagttgaatgaaagaat

SEQ ID NO: 1647134 - DNA, 25 bp, Homo sapien
tcaccgtgataatggaatcctggca

SEQ ID NO: 1647135 - DNA, 25 bp, Homo sapien
aattcctgcctaccaagcaagcagc

SEQ ID NO: 1647136 - DNA, 25 bp, Homo sapien
ggcaaccttatctcatgaggcagga

SEQ ID NO: 1647137 - DNA, 25 bp, Homo sapien
gactgtgaccttagaccatacctct

SEQ ID NO: 1647138 - DNA, 25 bp, Homo sapien
aatgagcaaaaatgtatcaatcaaa

SEQ ID NO: 1647139 - DNA, 25 bp, Homo sapien
aaaataagaattgagagagtaatga

SEQ ID NO: 1647140 - DNA, 25 bp, Homo sapien
gtcaagagagttaaagacaaaaaca

SEQ ID NO: 1647141 - DNA, 25 bp, Homo sapien
agtgaactggggtcaagagagttaa

SEQ ID NO: 1647142 - DNA, 25 bp, Homo sapien
agctgatacgccaccaaggtcgacc

SEQ ID NO: 1647143 - DNA, 25 bp, Homo sapien
caatgagagtaccaagctgatacgc

SEQ ID NO: 1647144 - DNA, 25 bp, Homo sapien
aaggtcgaccccgtacacgctggag

SEQ ID NO: 1647145 - DNA, 25 bp, Homo sapien
tccttcgaccctggaacgttagcca

SEQ ID NO: 1647146 - DNA, 25 bp, Homo sapien
ctgggcgccggcaccagtacgagtc

SEQ ID NO: 1647147 - DNA, 25 bp, Homo sapien
cattcagatggagggtgtcaagctc

SEQ ID NO: 1647148 - DNA, 25 bp, Homo sapien
tggggacaaagcagctgagtcccac

SEQ ID NO: 1647149 - DNA, 25 bp, Homo sapien
gggacaaagcagctgagtcccacag

SEQ ID NO: 1647150 - DNA, 25 bp, Homo sapien
ggggacaaagcagctgagtcccaca

SEQ ID NO: 1647151 - DNA, 25 bp, Homo sapien
gcgttccctgtactggtgggtgaca

SEQ ID NO: 1647152 - DNA, 25 bp, Homo sapien
ggacaacagtggcagtctcaacgct

SEQ ID NO: 1647153 - DNA, 25 bp, Homo sapien
aacgctcaggtcattcaccagctgg

SEQ ID NO: 1647154 - DNA, 25 bp, Homo sapien
ggccccggtctcaggtccaagatgg

SEQ ID NO: 1647155 - DNA, 25 bp, Homo sapien
tgacttcacagcagccgtcaccctg

SEQ ID NO: 1647156 - DNA, 25 bp, Homo sapien
ggagtatcggggctctgacttcaca

SEQ ID NO: 1647157 - DNA, 25 bp, Homo sapien
acccagcagtcgaagtttgtgaact

SEQ ID NO: 1647158 - DNA, 25 bp, Homo sapien
aacccagacgtcctcgtgggttcag

SEQ ID NO: 1647159 - DNA, 25 bp, Homo sapien
gaggcttggattctgcccttgacac

SEQ ID NO: 1647160 - DNA, 25 bp, Homo sapien
gagcatgagtgagtgacttaccctg

SEQ ID NO: 1647161 - DNA, 25 bp, Homo sapien
agcttctataagtggtggtgacccc

SEQ ID NO: 1647162 - DNA, 25 bp, Homo sapien
tgaccacatgggcttgtgtcgacca

SEQ ID NO: 1647163 - DNA, 25 bp, Homo sapien
catgtctctagctgggaaatacaca

SEQ ID NO: 1647164 - DNA, 25 bp, Homo sapien
tcatgtctctagctgggaaatacac

SEQ ID NO: 1647165 - DNA, 25 bp, Homo sapien
ggcatgcacgcaacatactaccaca

SEQ ID NO: 1647166 - DNA, 25 bp, Homo sapien
tgcacgcaacatactaccacaaagc

SEQ ID NO: 1647167 - DNA, 25 bp, Homo sapien
ccaggcgggcatgcacgcaacatac

SEQ ID NO: 1647168 - DNA, 25 bp, Homo sapien
atactaccacaaagccagtgaccag

SEQ ID NO: 1647169 - DNA, 25 bp, Homo sapien
ggccagcacaaggatgcaggacacc

SEQ ID NO: 1647170 - DNA, 25 bp, Homo sapien
aggacaccagcgtctccttcgggta

SEQ ID NO: 1647171 - DNA, 25 bp, Homo sapien
cagcgtctccttcgggtaccagctg

SEQ ID NO: 1647172 - DNA, 25 bp, Homo sapien
gcaggtgggtgtggagtttgaggcc

SEQ ID NO: 1647173 - DNA, 25 bp, Homo sapien
cttcctgaatcaccgcaagaacaag

SEQ ID NO: 1647174 - DNA, 25 bp, Homo sapien
gatagcaactggatcgtgggtgcca

SEQ ID NO: 1647175 - DNA, 25 bp, Homo sapien
ccttcctgaatcaccgcaagaacaa

SEQ ID NO: 1647176 - DNA, 25 bp, Homo sapien
tcgtgggtgccacgctggagaagaa

SEQ ID NO: 1647177 - DNA, 25 bp, Homo sapien
ccctgccacagaggggagacctgag

SEQ ID NO: 1647178 - DNA, 25 bp, Homo sapien
cagaggggagacctgagcccccctc

SEQ ID NO: 1647179 - DNA, 25 bp, Homo sapien
acagaggggagacctgagcccccct

SEQ ID NO: 1647180 - DNA, 25 bp, Homo sapien
gccacagaggggagacctgagcccc

SEQ ID NO: 1647181 - DNA, 25 bp, Homo sapien
ggaattgaggggcacgcaggattct

SEQ ID NO: 1647182 - DNA, 25 bp, Homo sapien
ccggaattgaggggcacgcaggatt

SEQ ID NO: 1647183 - DNA, 25 bp, Homo sapien
aattgaggggcacgcaggattctga

SEQ ID NO: 1647184 - DNA, 25 bp, Homo sapien
gccagacaacctcagggaggagtgt

SEQ ID NO: 1647185 - DNA, 25 bp, Homo sapien
tatggaagaaccgggacattttaca

SEQ ID NO: 1647186 - DNA, 25 bp, Homo sapien
tggaagaaccgggacattttacaga

SEQ ID NO: 1647187 - DNA, 25 bp, Homo sapien
atggaagaaccgggacattttacag

SEQ ID NO: 1647188 - DNA, 25 bp, Homo sapien
ggagcacggaaagcagcggatcctt

SEQ ID NO: 1647189 - DNA, 25 bp, Homo sapien
agggtagggtctcaaggtcacttgc

SEQ ID NO: 1647190 - DNA, 25 bp, Homo sapien
gggtcgctatcttcccatccggaac

SEQ ID NO: 1647191 - DNA, 25 bp, Homo sapien
gatgctgccttaagtccggctcaga

SEQ ID NO: 1647192 - DNA, 25 bp, Homo sapien
tgctcggccagagcaccgaggagct

SEQ ID NO: 1647193 - DNA, 25 bp, Homo sapien
gcagggcgctgatggacgagaccat

SEQ ID NO: 1647194 - DNA, 25 bp, Homo sapien
gagttgaaggcctacaaatcggaac

SEQ ID NO: 1647195 - DNA, 25 bp, Homo sapien
tgcgtaagcggctcctccgcgatgc

SEQ ID NO: 1647196 - DNA, 25 bp, Homo sapien
cagccgctacaggagcgggcccagg

SEQ ID NO: 1647197 - DNA, 25 bp, Homo sapien
tgcgggccgccactgtgggctccct

SEQ ID NO: 1647198 - DNA, 25 bp, Homo sapien
ctgcagaagcgcctggcagtgtacc

SEQ ID NO: 1647199 - DNA, 25 bp, Homo sapien
ctgcgcgcgcggatggaggagatgg

SEQ ID NO: 1647200 - DNA, 25 bp, Homo sapien
cctgtgcccagcgacaatcactgaa

SEQ ID NO: 1647201 - DNA, 25 bp, Homo sapien
ccctggtggaagacatgcagcgcca

SEQ ID NO: 1647202 - DNA, 25 bp, Homo sapien
tcaagagctggttcgagcccctggt

SEQ ID NO: 1647203 - DNA, 25 bp, Homo sapien
cagcagatacgcctgcaggccgagg

SEQ ID NO: 1647204 - DNA, 25 bp, Homo sapien
gagaaactcaagattgactcatgag

SEQ ID NO: 1647205 - DNA, 25 bp, Homo sapien
gaaactcaagattgactcatgagga

SEQ ID NO: 1647206 - DNA, 25 bp, Homo sapien
actcaagattgactcatgaggacct

SEQ ID NO: 1647207 - DNA, 25 bp, Homo sapien
aactcaagattgactcatgaggacc

SEQ ID NO: 1647208 - DNA, 25 bp, Homo sapien
ctgcgtgctggtcctggcctgcatt

SEQ ID NO: 1647209 - DNA, 25 bp, Homo sapien
tgcgtgctggtcctggcctgcattg

SEQ ID NO: 1647210 - DNA, 25 bp, Homo sapien
gtgctggtcctggcctgcattgggg

SEQ ID NO: 1647211 - DNA, 25 bp, Homo sapien
cgtgctggtcctggcctgcattggg

SEQ ID NO: 1647212 - DNA, 25 bp, Homo sapien
agccccccaccaaagctaaagatga

SEQ ID NO: 1647213 - DNA, 25 bp, Homo sapien
aagctaaagatgagtcgctggagcc

SEQ ID NO: 1647214 - DNA, 25 bp, Homo sapien
agctaaagatgagtcgctggagcct

SEQ ID NO: 1647215 - DNA, 25 bp, Homo sapien
aaagctaaagatgagtcgctggagc

SEQ ID NO: 1647216 - DNA, 25 bp, Homo sapien
tcatgcagacctactatgacgacca

SEQ ID NO: 1647217 - DNA, 25 bp, Homo sapien
ccttccggggcttcatgcagaccta

SEQ ID NO: 1647218 - DNA, 25 bp, Homo sapien
agacctactatgacgaccacctgag

SEQ ID NO: 1647219 - DNA, 25 bp, Homo sapien
gggcttcatgcagacctactatgac

SEQ ID NO: 1647220 - DNA, 25 bp, Homo sapien
aacacagcgagatctcttgggggta

SEQ ID NO: 1647221 - DNA, 25 bp, Homo sapien
cacagcgagatctcttgggggtaaa

SEQ ID NO: 1647222 - DNA, 25 bp, Homo sapien
caacacagcgagatctcttgggggt

SEQ ID NO: 1647223 - DNA, 25 bp, Homo sapien
acacagcgagatctcttgggggtaa

SEQ ID NO: 1647224 - DNA, 25 bp, Homo sapien
tcgggaagggtatcaaggaataaca

SEQ ID NO: 1647225 - DNA, 25 bp, Homo sapien
tgatggccctcactgagagcttcgc

SEQ ID NO: 1647226 - DNA, 25 bp, Homo sapien
tgtcggaggcgaattctcagagtga

SEQ ID NO: 1647227 - DNA, 25 bp, Homo sapien
aataacaccctattgtgggcttgcg

SEQ ID NO: 1647228 - DNA, 25 bp, Homo sapien
tgtgcatgttcttcgtcaccaaaag

SEQ ID NO: 1647229 - DNA, 25 bp, Homo sapien
aactcagtgaggagatgcagggaca

SEQ ID NO: 1647230 - DNA, 25 bp, Homo sapien
ctcatagagcaggtgagaactcagt

SEQ ID NO: 1647231 - DNA, 25 bp, Homo sapien
ggatgatgatattgtgccctgtgca

SEQ ID NO: 1647232 - DNA, 25 bp, Homo sapien
tgactcagtccagccaacatttaat

SEQ ID NO: 1647233 - DNA, 25 bp, Homo sapien
cctactttatgtatggagctctaac

SEQ ID NO: 1647234 - DNA, 25 bp, Homo sapien
agtagctcttgcatcctcctcccaa

SEQ ID NO: 1647235 - DNA, 25 bp, Homo sapien
ggagctctaacccatgggtccatgg

SEQ ID NO: 1647236 - DNA, 25 bp, Homo sapien
gagcgggcccaagcatatgggttca

SEQ ID NO: 1647237 - DNA, 25 bp, Homo sapien
tacagttgctggactgacacatttt

SEQ ID NO: 1647238 - DNA, 25 bp, Homo sapien
caaagtcatttatggcctaccggag

SEQ ID NO: 1647239 - DNA, 25 bp, Homo sapien
gttacttctggtacaccctatgtaa

SEQ ID NO: 1647240 - DNA, 25 bp, Homo sapien
ttccatggtcctctacctaaatttg

SEQ ID NO: 1647241 - DNA, 25 bp, Homo sapien
gaaagtttcaaagcccctcacttgc

SEQ ID NO: 1647242 - DNA, 25 bp, Homo sapien
cctaaatttgtacaagtcattttgt

SEQ ID NO: 1647243 - DNA, 25 bp, Homo sapien
agaaagtttcaaagcccctcacttg

SEQ ID NO: 1647244 - DNA, 25 bp, Homo sapien
tttggaccactgagggaacgcgcat

SEQ ID NO: 1647245 - DNA, 25 bp, Homo sapien
tctctcagcagatggccgggtttag

SEQ ID NO: 1647246 - DNA, 25 bp, Homo sapien
tagcccacggatgcgaggtttggac

SEQ ID NO: 1647247 - DNA, 25 bp, Homo sapien
ccgggtttagagctgtacgaagaca

SEQ ID NO: 1647248 - DNA, 25 bp, Homo sapien
gaggcagctccggtcaggtacggag

SEQ ID NO: 1647249 - DNA, 25 bp, Homo sapien
agctccggtcaggtacggaggccga

SEQ ID NO: 1647250 - DNA, 25 bp, Homo sapien
gggcccgcagcgccgtggtggcggc

SEQ ID NO: 1647251 - DNA, 25 bp, Homo sapien
cggtcaggtacggaggccgagaggg

SEQ ID NO: 1647252 - DNA, 25 bp, Homo sapien
tgcccacggccgttcatcatcttgt

SEQ ID NO: 1647253 - DNA, 25 bp, Homo sapien
tgaagctgatgcagcgttgccgagg

SEQ ID NO: 1647254 - DNA, 25 bp, Homo sapien
tttgtttgtggaggcgctgtctgtc

SEQ ID NO: 1647255 - DNA, 25 bp, Homo sapien
cgccgccctttaacacagtctggat

SEQ ID NO: 1647256 - DNA, 25 bp, Homo sapien
ggcaggttcaagtcccactgggaga

SEQ ID NO: 1647257 - DNA, 25 bp, Homo sapien
aactgaggtgtagcgagaccttgga

SEQ ID NO: 1647258 - DNA, 25 bp, Homo sapien
tcagtttgccggcttgctcaatggg

SEQ ID NO: 1647259 - DNA, 25 bp, Homo sapien
ctcaatgggtaaggcgtgatggctc

SEQ ID NO: 1647260 - DNA, 25 bp, Homo sapien
atggcaagatgcccgtctctataaa

SEQ ID NO: 1647261 - DNA, 25 bp, Homo sapien
tgacatggcaagatgcccgtctcta

SEQ ID NO: 1647262 - DNA, 25 bp, Homo sapien
gacatggcaagatgcccgtctctat

SEQ ID NO: 1647263 - DNA, 25 bp, Homo sapien
tacttagaaggtagagacgagaatg

SEQ ID NO: 1647264 - DNA, 25 bp, Homo sapien
aaggtgagtgcctgttatttattta

SEQ ID NO: 1647265 - DNA, 25 bp, Homo sapien
actgagtatctttgaaaggtgagtg

SEQ ID NO: 1647266 - DNA, 25 bp, Homo sapien
ttagctacttagaaggtagagacga

SEQ ID NO: 1647267 - DNA, 25 bp, Homo sapien
ttggcatagtagtcctctgaacagg

SEQ ID NO: 1647268 - DNA, 25 bp, Homo sapien
caggcctgcgaggtaggtattgatc

SEQ ID NO: 1647269 - DNA, 25 bp, Homo sapien
tattaagggcccatggtgcgccaga

SEQ ID NO: 1647270 - DNA, 25 bp, Homo sapien
gatgccacgataacagctaacgctg

SEQ ID NO: 1647271 - DNA, 25 bp, Homo sapien
gacattcgagtgagacagtgcacat

SEQ ID NO: 1647272 - DNA, 25 bp, Homo sapien
ttgggacattcgagtgagacagtgc

SEQ ID NO: 1647273 - DNA, 25 bp, Homo sapien
gagacagtgcacataaaacagtgcc

SEQ ID NO: 1647274 - DNA, 25 bp, Homo sapien
tcgagtgagacagtgcacataaaac

SEQ ID NO: 1647275 - DNA, 25 bp, Homo sapien
tcaggagtatgatgggatcttggcc

SEQ ID NO: 1647276 - DNA, 25 bp, Homo sapien
cagcatgagtagctggactccagca

SEQ ID NO: 1647277 - DNA, 25 bp, Homo sapien
tgtggtcttgagtgttccttagact

SEQ ID NO: 1647278 - DNA, 25 bp, Homo sapien
gaatcagctaaggaatcgagggagg

SEQ ID NO: 1647279 - DNA, 25 bp, Homo sapien
tagaaaagctgaggccagccgggca

SEQ ID NO: 1647280 - DNA, 25 bp, Homo sapien
ccagatagaaaagctgaggccagcc

SEQ ID NO: 1647281 - DNA, 25 bp, Homo sapien
ttgttccagatagaaaagctgaggc

SEQ ID NO: 1647282 - DNA, 25 bp, Homo sapien
ttccagatagaaaagctgaggccag

SEQ ID NO: 1647283 - DNA, 25 bp, Homo sapien
cagtgcagccttgtggtaaaaatga

SEQ ID NO: 1647284 - DNA, 25 bp, Homo sapien
gggattttgtgagggaccaagctca

SEQ ID NO: 1647285 - DNA, 25 bp, Homo sapien
cacaggtcgttgtctcgtggatgaa

SEQ ID NO: 1647286 - DNA, 25 bp, Homo sapien
caaatatggcaaaacagtgtgactg

SEQ ID NO: 1647287 - DNA, 25 bp, Homo sapien
gcagcggtaccagggacagtgaggg

SEQ ID NO: 1647288 - DNA, 25 bp, Homo sapien
caaaaacgaggaggtcaatgggtgt

SEQ ID NO: 1647289 - DNA, 25 bp, Homo sapien
gcaaaaacgaggaggtcaatgggtg

SEQ ID NO: 1647290 - DNA, 25 bp, Homo sapien
gggtggctcgcaggccgaagggcac

SEQ ID NO: 1647291 - DNA, 25 bp, Homo sapien
tcgccggccgcctcagggtgcttct

SEQ ID NO: 1647292 - DNA, 25 bp, Homo sapien
gtgcttctgccgcaggtgtttgtcc

SEQ ID NO: 1647293 - DNA, 25 bp, Homo sapien
gtgtttgtccagggtggctcgcagg

SEQ ID NO: 1647294 - DNA, 25 bp, Homo sapien
ggtaaaatgcttcccgcagaactca

SEQ ID NO: 1647295 - DNA, 25 bp, Homo sapien
tcatgccgtgcatgcggcggtggcg

SEQ ID NO: 1647296 - DNA, 25 bp, Homo sapien
tccccggtgtgtgagcgccggtgca

SEQ ID NO: 1647297 - DNA, 25 bp, Homo sapien
cggtggcggttgagcttactgctct

SEQ ID NO: 1647298 - DNA, 25 bp, Homo sapien
ggacactggtcgcaagcatagggcc

SEQ ID NO: 1647299 - DNA, 25 bp, Homo sapien
tcaccaccgctgcatggaagggtgc

SEQ ID NO: 1647300 - DNA, 25 bp, Homo sapien
tgtgtgagcgcatgtgcactttgag

SEQ ID NO: 1647301 - DNA, 25 bp, Homo sapien
ttccgtggtgatggctccccaagtg

SEQ ID NO: 1647302 - DNA, 25 bp, Homo sapien
tctggtagatggacagtccgtggtc

SEQ ID NO: 1647303 - DNA, 25 bp, Homo sapien
gccactgtgaactgtttgccacagc

SEQ ID NO: 1647304 - DNA, 25 bp, Homo sapien
tttgccacagcgcaggcagctcaag

SEQ ID NO: 1647305 - DNA, 25 bp, Homo sapien
ctgggcgtgacgcagcagcttccag

SEQ ID NO: 1647306 - DNA, 25 bp, Homo sapien
cagtgatggcctccaacgggaaggt

SEQ ID NO: 1647307 - DNA, 25 bp, Homo sapien
cctccaacgggaaggtctgcaggca

SEQ ID NO: 1647308 - DNA, 25 bp, Homo sapien
agcggccgcaggtcaacagatctgg

SEQ ID NO: 1647309 - DNA, 25 bp, Homo sapien
ggtgtttgtcggtccagggctggcg

SEQ ID NO: 1647310 - DNA, 25 bp, Homo sapien
gggaggaagcgggtggtgagcgtgg

SEQ ID NO: 1647311 - DNA, 25 bp, Homo sapien
ggaggaagcgggtggtgagcgtggg

SEQ ID NO: 1647312 - DNA, 25 bp, Homo sapien
aggaagcgggtggtgagcgtggggt

SEQ ID NO: 1647313 - DNA, 25 bp, Homo sapien
gaagcgggtggtgagcgtggggtgg

SEQ ID NO: 1647314 - DNA, 25 bp, Homo sapien
accgaaggtcagaagggggcctgag

SEQ ID NO: 1647315 - DNA, 25 bp, Homo sapien
aaggagataaggcagggcgaggggc

SEQ ID NO: 1647316 - DNA, 25 bp, Homo sapien
aggtcagaagggggcctgaggggca

SEQ ID NO: 1647317 - DNA, 25 bp, Homo sapien
cgaaggtcagaagggggcctgaggg

SEQ ID NO: 1647318 - DNA, 25 bp, Homo sapien
cctgttggggctgcgcgtctggctc

SEQ ID NO: 1647319 - DNA, 25 bp, Homo sapien
ctggctcgggcttgagttcgatgac

SEQ ID NO: 1647320 - DNA, 25 bp, Homo sapien
gatagttcggggtcaacggcgtcca

SEQ ID NO: 1647321 - DNA, 25 bp, Homo sapien
gttcgatgacgaggtcctgcatttc

SEQ ID NO: 1647322 - DNA, 25 bp, Homo sapien
gcgggctctactcggcggggcgcgc

SEQ ID NO: 1647323 - DNA, 25 bp, Homo sapien
cgcgggctctactcggcggggcgcg

SEQ ID NO: 1647324 - DNA, 25 bp, Homo sapien
gcgcgggctctactcggcggggcgc

SEQ ID NO: 1647325 - DNA, 25 bp, Homo sapien
ggcaggcaggcaggcgggcgggcgg

SEQ ID NO: 1647326 - DNA, 25 bp, Homo sapien
gagtcgcgggccgggcgagcgagcg

SEQ ID NO: 1647327 - DNA, 25 bp, Homo sapien
gcgggcaggcaggcaggcgggcggg

SEQ ID NO: 1647328 - DNA, 25 bp, Homo sapien
cgcgggccgggcgagcgagcgggcg

SEQ ID NO: 1647329 - DNA, 25 bp, Homo sapien
gacgcacgagcggaggacgcgcgga

SEQ ID NO: 1647330 - DNA, 25 bp, Homo sapien
accgtgcgcgctcaggtgagtgact

SEQ ID NO: 1647331 - DNA, 25 bp, Homo sapien
agtgactgcggcgacccgccgcgaa

SEQ ID NO: 1647332 - DNA, 25 bp, Homo sapien
gcgaactcttacacgtgctggccgg

SEQ ID NO: 1647333 - DNA, 25 bp, Homo sapien
ggtgaaactgagacacggcatgccc

SEQ ID NO: 1647334 - DNA, 25 bp, Homo sapien
ttaatcacaccgagttcccacaagg

SEQ ID NO: 1647335 - DNA, 25 bp, Homo sapien
tcccgtgcgtttggcttagtgacca

SEQ ID NO: 1647336 - DNA, 25 bp, Homo sapien
taactcaatctaggcagtgtcccgt

SEQ ID NO: 1647337 - DNA, 25 bp, Homo sapien
cacaggatccctgcgtaaagaggac

SEQ ID NO: 1647338 - DNA, 25 bp, Homo sapien
ctgcgtaaagaggaccccgcaagga

SEQ ID NO: 1647339 - DNA, 25 bp, Homo sapien
cactaggccttggtgatctagtgga

SEQ ID NO: 1647340 - DNA, 25 bp, Homo sapien
aaattgtgtacctggcactaggcct

SEQ ID NO: 1647341 - DNA, 25 bp, Homo sapien
cgggtggccccatttagctaatttg

SEQ ID NO: 1647342 - DNA, 25 bp, Homo sapien
tgtctgtggacacgtcaacaccttg

SEQ ID NO: 1647343 - DNA, 25 bp, Homo sapien
tgggaagaaggtccagtccgaacgc

SEQ ID NO: 1647344 - DNA, 25 bp, Homo sapien
aatttgcatcaagattcagcagccg

SEQ ID NO: 1647345 - DNA, 25 bp, Homo sapien
gacctaagtgttgggctcttgaatc

SEQ ID NO: 1647346 - DNA, 25 bp, Homo sapien
cacgggtgaggaccagagtttgctc

SEQ ID NO: 1647347 - DNA, 25 bp, Homo sapien
ccctggcaattgtgaagagttggcc

SEQ ID NO: 1647348 - DNA, 25 bp, Homo sapien
ggacaatggataacgcctgcctcta

SEQ ID NO: 1647349 - DNA, 25 bp, Homo sapien
tttggccactctaatcctatctaag

SEQ ID NO: 1647350 - DNA, 25 bp, Homo sapien
gaaagatttgacctgccagcttcac

SEQ ID NO: 1647351 - DNA, 25 bp, Homo sapien
aatcctatctaagtcatttagtaag

SEQ ID NO: 1647352 - DNA, 25 bp, Homo sapien
taagtactcaccctagagactaggg

SEQ ID NO: 1647353 - DNA, 25 bp, Homo sapien
tgagtaggcgggattacaggagcct

SEQ ID NO: 1647354 - DNA, 25 bp, Homo sapien
attcttatgcctcagcctcctgagt

SEQ ID NO: 1647355 - DNA, 25 bp, Homo sapien
tggagtcccagtctgtcacccagac

SEQ ID NO: 1647356 - DNA, 25 bp, Homo sapien
agcctctggctcacgggttcaagcg

SEQ ID NO: 1647357 - DNA, 25 bp, Homo sapien
cacaacttgaagatgggatgctact

SEQ ID NO: 1647358 - DNA, 25 bp, Homo sapien
caatagtgtccagactgagtagccc

SEQ ID NO: 1647359 - DNA, 25 bp, Homo sapien
tcacatccttggtctatctgcaggg

SEQ ID NO: 1647360 - DNA, 25 bp, Homo sapien
ggctcacagttcaggtgcagagaca

SEQ ID NO: 1647361 - DNA, 25 bp, Homo sapien
gctcattcatgaattctcattggtc

SEQ ID NO: 1647362 - DNA, 25 bp, Homo sapien
gcccagctcattcatgaattctcat

SEQ ID NO: 1647363 - DNA, 25 bp, Homo sapien
catgcccagctcattcatgaattct

SEQ ID NO: 1647364 - DNA, 25 bp, Homo sapien
cagctcattcatgaattctcattgg

SEQ ID NO: 1647365 - DNA, 25 bp, Homo sapien
gccctttcaagctagctcatgtgtg

SEQ ID NO: 1647366 - DNA, 25 bp, Homo sapien
ctcatgtgtgagtgggaatctatct

SEQ ID NO: 1647367 - DNA, 25 bp, Homo sapien
gatagaatttcctgatggattgggt

SEQ ID NO: 1647368 - DNA, 25 bp, Homo sapien
tacttgccagtctacagtaaggatt

SEQ ID NO: 1647369 - DNA, 25 bp, Homo sapien
ccaggagtgtcccatagctcaagaa

SEQ ID NO: 1647370 - DNA, 25 bp, Homo sapien
tgcaaactccagtgaacattcccgt

SEQ ID NO: 1647371 - DNA, 25 bp, Homo sapien
tctgggccccatggagttatgagct

SEQ ID NO: 1647372 - DNA, 25 bp, Homo sapien
tgagccaagctttaagcaagtctgg

SEQ ID NO: 1647373 - DNA, 25 bp, Homo sapien
taaaaggccgaggattcgcgatcag

SEQ ID NO: 1647374 - DNA, 25 bp, Homo sapien
gctgggccaagtacgacaggagtcc

SEQ ID NO: 1647375 - DNA, 25 bp, Homo sapien
gtggcggcgcccctgataaaaggcc

SEQ ID NO: 1647376 - DNA, 25 bp, Homo sapien
taagttcaggatgtaagcgaagcct

SEQ ID NO: 1647377 - DNA, 25 bp, Homo sapien
tacaggctcctgtaaccagaccctg

SEQ ID NO: 1647378 - DNA, 25 bp, Homo sapien
ccgcgccccgccaggtgttttcagt

SEQ ID NO: 1647379 - DNA, 25 bp, Homo sapien
cctgtaaccagaccctgctaatttt

SEQ ID NO: 1647380 - DNA, 25 bp, Homo sapien
tctggctctgtctaccaggtcggag

SEQ ID NO: 1647381 - DNA, 25 bp, Homo sapien
gaggggcagtaaggtctggttggga

SEQ ID NO: 1647382 - DNA, 25 bp, Homo sapien
tcattccagcggttgagagaggggc

SEQ ID NO: 1647383 - DNA, 25 bp, Homo sapien
agaggggcagtaaggtctggttggg

SEQ ID NO: 1647384 - DNA, 25 bp, Homo sapien
gagaggggcagtaaggtctggttgg

SEQ ID NO: 1647385 - DNA, 25 bp, Homo sapien
tcacactctcgaggagtccgtgcgt

SEQ ID NO: 1647386 - DNA, 25 bp, Homo sapien
ctctcgaggagtccgtgcgtctgag

SEQ ID NO: 1647387 - DNA, 25 bp, Homo sapien
cactctcgaggagtccgtgcgtctg

SEQ ID NO: 1647388 - DNA, 25 bp, Homo sapien
ctcgaggagtccgtgcgtctgagct

SEQ ID NO: 1647389 - DNA, 25 bp, Homo sapien
ggcagtgaggagttggatgatcttg

SEQ ID NO: 1647390 - DNA, 25 bp, Homo sapien
cagtgaggagttggatgatcttggg

SEQ ID NO: 1647391 - DNA, 25 bp, Homo sapien
agtgaggagttggatgatcttgggc

SEQ ID NO: 1647392 - DNA, 25 bp, Homo sapien
gcagtgaggagttggatgatcttgg

SEQ ID NO: 1647393 - DNA, 25 bp, Homo sapien
tttgcaggacagaaaacccaagggc

SEQ ID NO: 1647394 - DNA, 25 bp, Homo sapien
tgagtttggacaaagggatttgcag

SEQ ID NO: 1647395 - DNA, 25 bp, Homo sapien
cattggtgaagttggtgagtttgga

SEQ ID NO: 1647396 - DNA, 25 bp, Homo sapien
gtgaagttggtgagtttggacaaag

SEQ ID NO: 1647397 - DNA, 25 bp, Homo sapien
tctgatgttcttctgttgtgtgctt

SEQ ID NO: 1647398 - DNA, 25 bp, Homo sapien
tcttggtggtggtctctctcccgcg

SEQ ID NO: 1647399 - DNA, 25 bp, Homo sapien
gtgaatggccatctgatgttcttct

SEQ ID NO: 1647400 - DNA, 25 bp, Homo sapien
ggccatctgatgttcttctgttgtg

SEQ ID NO: 1647401 - DNA, 25 bp, Homo sapien
gacactcagttgttgaatgagcgcc

SEQ ID NO: 1647402 - DNA, 25 bp, Homo sapien
agagcagaggccgaagtccatcctc

SEQ ID NO: 1647403 - DNA, 25 bp, Homo sapien
cccgtgaggcctggtggtgtctgag

SEQ ID NO: 1647404 - DNA, 25 bp, Homo sapien
tccgctttcctcaaggacactcagt

SEQ ID NO: 1647405 - DNA, 25 bp, Homo sapien
ctcccggaagagcacgcgaagctgg

SEQ ID NO: 1647406 - DNA, 25 bp, Homo sapien
cttcagtgcgtcagcgggagtgcgt

SEQ ID NO: 1647407 - DNA, 25 bp, Homo sapien
gacaggctttagcacccattctgac

SEQ ID NO: 1647408 - DNA, 25 bp, Homo sapien
gctggcactcggtaaccagccttca

SEQ ID NO: 1647409 - DNA, 25 bp, Homo sapien
ggggctctgcgaaccttcacaggca

SEQ ID NO: 1647410 - DNA, 25 bp, Homo sapien
gggctctgcgaaccttcacaggcat

SEQ ID NO: 1647411 - DNA, 25 bp, Homo sapien
accagcaggtttgccgatgccactg

SEQ ID NO: 1647412 - DNA, 25 bp, Homo sapien
tgacttcattgacttcttcatcaga

SEQ ID NO: 1647413 - DNA, 25 bp, Homo sapien
aggtttgccgatgccactgtttccc

SEQ ID NO: 1647414 - DNA, 25 bp, Homo sapien
cattgacttcttcatcagattcctc

SEQ ID NO: 1647415 - DNA, 25 bp, Homo sapien
gggagctcaagtgttggcatgtctt

SEQ ID NO: 1647416 - DNA, 25 bp, Homo sapien
gagctcaagtgttggcatgtctttt

SEQ ID NO: 1647417 - DNA, 25 bp, Homo sapien
tgggagctcaagtgttggcatgtct

SEQ ID NO: 1647418 - DNA, 25 bp, Homo sapien
ctgggagctcaagtgttggcatgtc

SEQ ID NO: 1647419 - DNA, 25 bp, Homo sapien
tgagggcaggaagatgtgcattacc

SEQ ID NO: 1647420 - DNA, 25 bp, Homo sapien
gagggtgagggcaggaagatgtgca

SEQ ID NO: 1647421 - DNA, 25 bp, Homo sapien
gtgagggcaggaagatgtgcattac

SEQ ID NO: 1647422 - DNA, 25 bp, Homo sapien
gggtgagggcaggaagatgtgcatt

SEQ ID NO: 1647423 - DNA, 25 bp, Homo sapien
cctgtcctcttgactcttcatggca

SEQ ID NO: 1647424 - DNA, 25 bp, Homo sapien
gtcctcttgactcttcatggcaaag

SEQ ID NO: 1647425 - DNA, 25 bp, Homo sapien
ctcctgtcctcttgactcttcatgg

SEQ ID NO: 1647426 - DNA, 25 bp, Homo sapien
tgtcctcttgactcttcatggcaaa

SEQ ID NO: 1647427 - DNA, 25 bp, Homo sapien
tgtgtgaggcgctgtggcatgaggg

SEQ ID NO: 1647428 - DNA, 25 bp, Homo sapien
tgttccttccgtcccaagagacttg

SEQ ID NO: 1647429 - DNA, 25 bp, Homo sapien
gaaggtgcgcccaatctgccttgtt

SEQ ID NO: 1647430 - DNA, 25 bp, Homo sapien
tctgaccgcatctgtttctgtaaca

SEQ ID NO: 1647431 - DNA, 25 bp, Homo sapien
tcagcaggcctgaggagggcacggg

SEQ ID NO: 1647432 - DNA, 25 bp, Homo sapien
ggcctctcagcaggcctgaggaggg

SEQ ID NO: 1647433 - DNA, 25 bp, Homo sapien
tctcagcaggcctgaggagggcacg

SEQ ID NO: 1647434 - DNA, 25 bp, Homo sapien
cctctcagcaggcctgaggagggca

SEQ ID NO: 1647435 - DNA, 25 bp, Homo sapien
ggatagagacgtgcagcagcacatc

SEQ ID NO: 1647436 - DNA, 25 bp, Homo sapien
tccacgtgggcagtgtagacgtgtg

SEQ ID NO: 1647437 - DNA, 25 bp, Homo sapien
ttttgcagggatagagacgtgcagc

SEQ ID NO: 1647438 - DNA, 25 bp, Homo sapien
gcagcacatccgcagaggtagcgag

SEQ ID NO: 1647439 - DNA, 25 bp, Homo sapien
aaagctctgtgggtactcttctgcc

SEQ ID NO: 1647440 - DNA, 25 bp, Homo sapien
aagctctgtgggtactcttctgcct

SEQ ID NO: 1647441 - DNA, 25 bp, Homo sapien
gctctgtgggtactcttctgcctcc

SEQ ID NO: 1647442 - DNA, 25 bp, Homo sapien
gaaagctctgtgggtactcttctgc

SEQ ID NO: 1647443 - DNA, 25 bp, Homo sapien
tgcatctttgtcatctctgagactt

SEQ ID NO: 1647444 - DNA, 25 bp, Homo sapien
gcaataaatctatcagggagctggg

SEQ ID NO: 1647445 - DNA, 25 bp, Homo sapien
tactcctgtcggtgcaactctgttc

SEQ ID NO: 1647446 - DNA, 25 bp, Homo sapien
aggctgcgccctgagaggcactaca

SEQ ID NO: 1647447 - DNA, 25 bp, Homo sapien
ggcactccgggaccctgctgtccag

SEQ ID NO: 1647448 - DNA, 25 bp, Homo sapien
ttgttcgtgacaacggtcccgtggc

SEQ ID NO: 1647449 - DNA, 25 bp, Homo sapien
tgtaccacgtaacagaggctgcggc

SEQ ID NO: 1647450 - DNA, 25 bp, Homo sapien
tcccgtggctttacacaggtgcaag

SEQ ID NO: 1647451 - DNA, 25 bp, Homo sapien
tagcagctccacgtgaagatacagt

SEQ ID NO: 1647452 - DNA, 25 bp, Homo sapien
gaaactggcttaagggaggctacag

SEQ ID NO: 1647453 - DNA, 25 bp, Homo sapien
tacagggatatattgaccccaacca

SEQ ID NO: 1647454 - DNA, 25 bp, Homo sapien
gaaacagacttaacggtgtcacgag

SEQ ID NO: 1647455 - DNA, 25 bp, Homo sapien
tacacgttagcatctctcacagcac

SEQ ID NO: 1647456 - DNA, 25 bp, Homo sapien
ggctgtggcttgggccctgtatgtc

SEQ ID NO: 1647457 - DNA, 25 bp, Homo sapien
cagggcctgagcgtgtggctgaaca

SEQ ID NO: 1647458 - DNA, 25 bp, Homo sapien
ccccagggcctgagcgtgtggctga

SEQ ID NO: 1647459 - DNA, 25 bp, Homo sapien
gccctagtgtaacccctcctggctg

SEQ ID NO: 1647460 - DNA, 25 bp, Homo sapien
tggcttcagtgtcagtgactaacca

SEQ ID NO: 1647461 - DNA, 25 bp, Homo sapien
ccctggagtgactcgtaaggcaggt

SEQ ID NO: 1647462 - DNA, 25 bp, Homo sapien
tggagtgactcgtaaggcaggtacc

SEQ ID NO: 1647463 - DNA, 25 bp, Homo sapien
tcagggggctgatgcagtggcttca

SEQ ID NO: 1647464 - DNA, 25 bp, Homo sapien
cgttgagaatggagccaccctaggg

SEQ ID NO: 1647465 - DNA, 25 bp, Homo sapien
cgaggtctaacccattacgttgaga

SEQ ID NO: 1647466 - DNA, 25 bp, Homo sapien
gctgaggtgccagcgaggtctaacc

SEQ ID NO: 1647467 - DNA, 25 bp, Homo sapien
ggtcaccgaggtcatcctcagaaat

SEQ ID NO: 1647468 - DNA, 25 bp, Homo sapien
tcacccaccacccccgcagcctctc

SEQ ID NO: 1647469 - DNA, 25 bp, Homo sapien
tgctctcatgctggcaccggcttgt

SEQ ID NO: 1647470 - DNA, 25 bp, Homo sapien
tcacagggctcattcggaccctggg

SEQ ID NO: 1647471 - DNA, 25 bp, Homo sapien
ccatttattgcatgtataccctgac

SEQ ID NO: 1647472 - DNA, 25 bp, Homo sapien
ggaagctatgtccacggctctggct

SEQ ID NO: 1647473 - DNA, 25 bp, Homo sapien
tgtggtggccttcgccggcttgccc

SEQ ID NO: 1647474 - DNA, 25 bp, Homo sapien
gaagagcgcacaggccaccggccat

SEQ ID NO: 1647475 - DNA, 25 bp, Homo sapien
accggccatagcttgcccctgtggg

SEQ ID NO: 1647476 - DNA, 25 bp, Homo sapien
gattgccctggacggaagagcgcac

SEQ ID NO: 1647477 - DNA, 25 bp, Homo sapien
ggcgctgttggcccggtgggcagcg

SEQ ID NO: 1647478 - DNA, 25 bp, Homo sapien
cagcgtggggggtatcgcgggtagg

SEQ ID NO: 1647479 - DNA, 25 bp, Homo sapien
tgggcagcgtggggggtatcgcggg

SEQ ID NO: 1647480 - DNA, 25 bp, Homo sapien
ggcagcgtggggggtatcgcgggta

SEQ ID NO: 1647481 - DNA, 25 bp, Homo sapien
tggtccaggttgaccgtgcagcgca

SEQ ID NO: 1647482 - DNA, 25 bp, Homo sapien
ctgacggctcggatgagacccatgc

SEQ ID NO: 1647483 - DNA, 25 bp, Homo sapien
ccttggtcatggtgtgcagctcgcg

SEQ ID NO: 1647484 - DNA, 25 bp, Homo sapien
tccaggtcgagcacgttctgcaacg

SEQ ID NO: 1647485 - DNA, 25 bp, Homo sapien
gtctgctgccggtcctccaggcact

SEQ ID NO: 1647486 - DNA, 25 bp, Homo sapien
cagctcaggcggcacggccactggt

SEQ ID NO: 1647487 - DNA, 25 bp, Homo sapien
gcacggccactggttggcgagcacc

SEQ ID NO: 1647488 - DNA, 25 bp, Homo sapien
acggccactggttggcgagcaccac

SEQ ID NO: 1647489 - DNA, 25 bp, Homo sapien
gtcatctcgcggtacaacaggtcgt

SEQ ID NO: 1647490 - DNA, 25 bp, Homo sapien
gcacggtgttgacgatgcgccgcat

SEQ ID NO: 1647491 - DNA, 25 bp, Homo sapien
tcgtcgtgaaggcagaagagcgcct

SEQ ID NO: 1647492 - DNA, 25 bp, Homo sapien
cgtactcgtagaggcagtcgcgctc

SEQ ID NO: 1647493 - DNA, 25 bp, Homo sapien
aggaagcacaggaagtcggtgagca

SEQ ID NO: 1647494 - DNA, 25 bp, Homo sapien
caggaagcacaggaagtcggtgagc

SEQ ID NO: 1647495 - DNA, 25 bp, Homo sapien
ccaggaagcacaggaagtcggtgag

SEQ ID NO: 1647496 - DNA, 25 bp, Homo sapien
cagctggctgccgaacttttcacgc

SEQ ID NO: 1647497 - DNA, 25 bp, Homo sapien
gctcgatcttcttgcgctggcttac

SEQ ID NO: 1647498 - DNA, 25 bp, Homo sapien
aggtgcttgcccaccgagtacacgg

SEQ ID NO: 1647499 - DNA, 25 bp, Homo sapien
tcttgcgctggcttacgaacaggtg

SEQ ID NO: 1647500 - DNA, 25 bp, Homo sapien
aaacaccttgagcaggctgccgctc

SEQ ID NO: 1647501 - DNA, 25 bp, Homo sapien
gagcagccccgagcccgacagtgtg

SEQ ID NO: 1647502 - DNA, 25 bp, Homo sapien
caatgccactcgctctggcagcagt

SEQ ID NO: 1647503 - DNA, 25 bp, Homo sapien
tggccgcccagtgacaagtagagca

SEQ ID NO: 1647504 - DNA, 25 bp, Homo sapien
accaggtaccacagtagctgcggga

SEQ ID NO: 1647505 - DNA, 25 bp, Homo sapien
tgatgggctgcaggaacaccaggta

SEQ ID NO: 1647506 - DNA, 25 bp, Homo sapien
tactgccaggcgctaaagcggatga

SEQ ID NO: 1647507 - DNA, 25 bp, Homo sapien
agtacacgctgaagggcagtgcgcc

SEQ ID NO: 1647508 - DNA, 25 bp, Homo sapien
gcatagaaacccacggtcacaggga

SEQ ID NO: 1647509 - DNA, 25 bp, Homo sapien
gcacgtggcagagtgtcttggccag

SEQ ID NO: 1647510 - DNA, 25 bp, Homo sapien
cagtagacgtcatcctctgtcagga

SEQ ID NO: 1647511 - DNA, 25 bp, Homo sapien
cggcagccgaaaggggcatagaaac

SEQ ID NO: 1647512 - DNA, 25 bp, Homo sapien
cagccgcggagggtagagctgggcc

SEQ ID NO: 1647513 - DNA, 25 bp, Homo sapien
gccagccgcggagggtagagctggg

SEQ ID NO: 1647514 - DNA, 25 bp, Homo sapien
cgcggagggtagagctgggccactc

SEQ ID NO: 1647515 - DNA, 25 bp, Homo sapien
agccgcggagggtagagctgggcca

SEQ ID NO: 1647516 - DNA, 25 bp, Homo sapien
tcgtgaatggggcagagccgctgcc

SEQ ID NO: 1647517 - DNA, 25 bp, Homo sapien
cagtggaggttgcaggcagcccctt

SEQ ID NO: 1647518 - DNA, 25 bp, Homo sapien
cctgaggggcgctggcaggttcctt

SEQ ID NO: 1647519 - DNA, 25 bp, Homo sapien
caggttccttggggacagtggaggt

SEQ ID NO: 1647520 - DNA, 25 bp, Homo sapien
gctcggagggccgctgagtcctggc

SEQ ID NO: 1647521 - DNA, 25 bp, Homo sapien
cccacttggtggctgtggtaggcca

SEQ ID NO: 1647522 - DNA, 25 bp, Homo sapien
tggtaggccagctgccagtgtgatt

SEQ ID NO: 1647523 - DNA, 25 bp, Homo sapien
tcctggcgccactgatgacagcatc

SEQ ID NO: 1647524 - DNA, 25 bp, Homo sapien
ctctgggcatccttggcgaagtgga

SEQ ID NO: 1647525 - DNA, 25 bp, Homo sapien
tcccagaagtagtgcccgttggggc

SEQ ID NO: 1647526 - DNA, 25 bp, Homo sapien
catccttggcgaagtggactttgta

SEQ ID NO: 1647527 - DNA, 25 bp, Homo sapien
aagtggactttgtaatgtttgtgca

SEQ ID NO: 1647528 - DNA, 25 bp, Homo sapien
ggcagccgggcagctgggtgctggg

SEQ ID NO: 1647529 - DNA, 25 bp, Homo sapien
gcagctgggtgctgggggcctgctc

SEQ ID NO: 1647530 - DNA, 25 bp, Homo sapien
gggcagctgggtgctgggggcctgc

SEQ ID NO: 1647531 - DNA, 25 bp, Homo sapien
ccgggcagctgggtgctgggggcct

SEQ ID NO: 1647532 - DNA, 25 bp, Homo sapien
ggagcacacaggcttggcgtagcct

SEQ ID NO: 1647533 - DNA, 25 bp, Homo sapien
aggagggagcacacaggcttggcgt

SEQ ID NO: 1647534 - DNA, 25 bp, Homo sapien
gcaggagggagcacacaggcttggc

SEQ ID NO: 1647535 - DNA, 25 bp, Homo sapien
gagggagcacacaggcttggcgtag

SEQ ID NO: 1647536 - DNA, 25 bp, Homo sapien
aatgtgaagagccgaaagcaggaca

SEQ ID NO: 1647537 - DNA, 25 bp, Homo sapien
atgtgaagagccgaaagcaggacag

SEQ ID NO: 1647538 - DNA, 25 bp, Homo sapien
tgacggtggcctcacggccccagct

SEQ ID NO: 1647539 - DNA, 25 bp, Homo sapien
acggtggcctcacggccccagctgc

SEQ ID NO: 1647540 - DNA, 25 bp, Homo sapien
ctgacggtggcctcacggccccagc

SEQ ID NO: 1647541 - DNA, 25 bp, Homo sapien
gacggtggcctcacggccccagctg

SEQ ID NO: 1647542 - DNA, 25 bp, Homo sapien
ctgccccacgagcagctgccacacc

SEQ ID NO: 1647543 - DNA, 25 bp, Homo sapien
gccccacgagcagctgccacaccag

SEQ ID NO: 1647544 - DNA, 25 bp, Homo sapien
cgagcagctgccacaccagcccgga

SEQ ID NO: 1647545 - DNA, 25 bp, Homo sapien
cacgagcagctgccacaccagcccg

SEQ ID NO: 1647546 - DNA, 25 bp, Homo sapien
gcatctgagcgtgggcatctgcagt

SEQ ID NO: 1647547 - DNA, 25 bp, Homo sapien
gctggcatctgagcgtgggcatctg

SEQ ID NO: 1647548 - DNA, 25 bp, Homo sapien
ggctggcatctgagcgtgggcatct

SEQ ID NO: 1647549 - DNA, 25 bp, Homo sapien
ccgcaggacgagattgccccgggct

SEQ ID NO: 1647550 - DNA, 25 bp, Homo sapien
cggcccgatcatgaagcgtggccca

SEQ ID NO: 1647551 - DNA, 25 bp, Homo sapien
gaagcgtggcccaatgtaaatgagc

SEQ ID NO: 1647552 - DNA, 25 bp, Homo sapien
taaatgagccgtctccgcaggacga

SEQ ID NO: 1647553 - DNA, 25 bp, Homo sapien
cggcgaagcccaggagtccccagat

SEQ ID NO: 1647554 - DNA, 25 bp, Homo sapien
agcgggcggcgaagcccaggagtcc

SEQ ID NO: 1647555 - DNA, 25 bp, Homo sapien
ggcgaagcccaggagtccccagatg

SEQ ID NO: 1647556 - DNA, 25 bp, Homo sapien
ggcagcgggcggcgaagcccaggag

SEQ ID NO: 1647557 - DNA, 25 bp, Homo sapien
gggagggggcagcataagggccact

SEQ ID NO: 1647558 - DNA, 25 bp, Homo sapien
tgggagggggcagcataagggccac

SEQ ID NO: 1647559 - DNA, 25 bp, Homo sapien
gggtgggagggggcagcataagggc

SEQ ID NO: 1647560 - DNA, 25 bp, Homo sapien
ctacagatgcgagcggggtgggagg

SEQ ID NO: 1647561 - DNA, 25 bp, Homo sapien
aagacgctccgttctgtgcacatcg

SEQ ID NO: 1647562 - DNA, 25 bp, Homo sapien
agtaaggccgcccatgccggaggcc

SEQ ID NO: 1647563 - DNA, 25 bp, Homo sapien
agggcagccccagacttgttgactt

SEQ ID NO: 1647564 - DNA, 25 bp, Homo sapien
acttggcagaggtgccagtaaggcc

SEQ ID NO: 1647565 - DNA, 25 bp, Homo sapien
accacagtcctgaccgcagctggga

SEQ ID NO: 1647566 - DNA, 25 bp, Homo sapien
acctcaatttgatacccacttcctg

SEQ ID NO: 1647567 - DNA, 25 bp, Homo sapien
ccaccgtctcctgaggccggtgagg

SEQ ID NO: 1647568 - DNA, 25 bp, Homo sapien
gagcaaatgtgacccctagggcctg

SEQ ID NO: 1647569 - DNA, 25 bp, Homo sapien
gatttcggaatcaccacctggaact

SEQ ID NO: 1647570 - DNA, 25 bp, Homo sapien
ggatttcggaatcaccacctggaac

SEQ ID NO: 1647571 - DNA, 25 bp, Homo sapien
ttaggatttcggaatcaccacctgg

SEQ ID NO: 1647572 - DNA, 25 bp, Homo sapien
taggatttcggaatcaccacctgga

SEQ ID NO: 1647573 - DNA, 25 bp, Homo sapien
tggcttaggcttgaggatgggatgg

SEQ ID NO: 1647574 - DNA, 25 bp, Homo sapien
aaggcctggcttaggcttgaggatg

SEQ ID NO: 1647575 - DNA, 25 bp, Homo sapien
gcctggcttaggcttgaggatggga

SEQ ID NO: 1647576 - DNA, 25 bp, Homo sapien
gagaaggcctggcttaggcttgagg

SEQ ID NO: 1647577 - DNA, 25 bp, Homo sapien
accccagtggctaggttgggctgtt

SEQ ID NO: 1647578 - DNA, 25 bp, Homo sapien
ctggacggctcttaggcgctcaccc

SEQ ID NO: 1647579 - DNA, 25 bp, Homo sapien
ccagtggctaggttgggctgtttcc

SEQ ID NO: 1647580 - DNA, 25 bp, Homo sapien
agtggctaggttgggctgtttcctc

SEQ ID NO: 1647581 - DNA, 25 bp, Homo sapien
ctgtgtgagtaaccaggagcatgag

SEQ ID NO: 1647582 - DNA, 25 bp, Homo sapien
catgagggccacggatgtggcccca

SEQ ID NO: 1647583 - DNA, 25 bp, Homo sapien
gagcatgagggccacggatgtggcc

SEQ ID NO: 1647584 - DNA, 25 bp, Homo sapien
ccagggaagcgcccggcacgggctt

SEQ ID NO: 1647585 - DNA, 25 bp, Homo sapien
gcaggaggccgcaggtgaaggccag

SEQ ID NO: 1647586 - DNA, 25 bp, Homo sapien
tctcaatgcccagggtatagagggc

SEQ ID NO: 1647587 - DNA, 25 bp, Homo sapien
aggcggtgaccacgctctcaatgcc

SEQ ID NO: 1647588 - DNA, 25 bp, Homo sapien
caatgcccagggtatagagggcgcc

SEQ ID NO: 1647589 - DNA, 25 bp, Homo sapien
gctgttgtcttgcaggacgtaggtc

SEQ ID NO: 1647590 - DNA, 25 bp, Homo sapien
ctgttgtcttgcaggacgtaggtcc

SEQ ID NO: 1647591 - DNA, 25 bp, Homo sapien
agctgttgtcttgcaggacgtaggt

SEQ ID NO: 1647592 - DNA, 25 bp, Homo sapien
tgttgtcttgcaggacgtaggtccc

SEQ ID NO: 1647593 - DNA, 25 bp, Homo sapien
cactctcttggtcttgccctcagga

SEQ ID NO: 1647594 - DNA, 25 bp, Homo sapien
aggaggaagctggacgggcaggccg

SEQ ID NO: 1647595 - DNA, 25 bp, Homo sapien
tctcttggtcttgccctcaggagga

SEQ ID NO: 1647596 - DNA, 25 bp, Homo sapien
tgctctggcgccgggggattcccct

SEQ ID NO: 1647597 - DNA, 25 bp, Homo sapien
ctttgcacaagaacttgaggacatc

SEQ ID NO: 1647598 - DNA, 25 bp, Homo sapien
gtctttgcacaagaacttgaggaca

SEQ ID NO: 1647599 - DNA, 25 bp, Homo sapien
ctggtgattggtgcgcaggctgtcc

SEQ ID NO: 1647600 - DNA, 25 bp, Homo sapien
ggtgcgcaggctgtccatctgcttc

SEQ ID NO: 1647601 - DNA, 25 bp, Homo sapien
ctcctgcatggagcaatgcaaccct

SEQ ID NO: 1647602 - DNA, 25 bp, Homo sapien
tggtggggcagtaccaagctgaggc

SEQ ID NO: 1647603 - DNA, 25 bp, Homo sapien
ggcagtaccaagctgaggccgtggg

SEQ ID NO: 1647604 - DNA, 25 bp, Homo sapien
tcctgcatggagcaatgcaaccctc

SEQ ID NO: 1647605 - DNA, 25 bp, Homo sapien
cccataccctccaggaccgacaggc

SEQ ID NO: 1647606 - DNA, 25 bp, Homo sapien
ccacacggaaccccataccctccag

SEQ ID NO: 1647607 - DNA, 25 bp, Homo sapien
taccctccaggaccgacaggctcat

SEQ ID NO: 1647608 - DNA, 25 bp, Homo sapien
ctctcgcctagagcctggcccacac

SEQ ID NO: 1647609 - DNA, 25 bp, Homo sapien
ctgccaggggacccaaagaccaact

SEQ ID NO: 1647610 - DNA, 25 bp, Homo sapien
gacccaaagaccaacttgctggtgc

SEQ ID NO: 1647611 - DNA, 25 bp, Homo sapien
tcaggggcccttagccaccacgaac

SEQ ID NO: 1647612 - DNA, 25 bp, Homo sapien
ggagagatgctcaggggcccttagc

SEQ ID NO: 1647613 - DNA, 25 bp, Homo sapien
tgaaggaagctcaccctcccgctgg

SEQ ID NO: 1647614 - DNA, 25 bp, Homo sapien
cgtgaggcgccaggtttttcagaga

SEQ ID NO: 1647615 - DNA, 25 bp, Homo sapien
gactggggggcaccagaaatcccag

SEQ ID NO: 1647616 - DNA, 25 bp, Homo sapien
acggctggggcgtgaggcgccaggt

SEQ ID NO: 1647617 - DNA, 25 bp, Homo sapien
gggatgcgaattctctgcttggctc

SEQ ID NO: 1647618 - DNA, 25 bp, Homo sapien
tcagcgcagccatccgaatggggat

SEQ ID NO: 1647619 - DNA, 25 bp, Homo sapien
tccagccctggagcgggtctcccag

SEQ ID NO: 1647620 - DNA, 25 bp, Homo sapien
catccgaatggggatgcgaattctc

SEQ ID NO: 1647621 - DNA, 25 bp, Homo sapien
gtccgaggaaggcttcttgcagcct

SEQ ID NO: 1647622 - DNA, 25 bp, Homo sapien
ctggagagcgtgtccgaggaaggct

SEQ ID NO: 1647623 - DNA, 25 bp, Homo sapien
agcgtgtccgaggaaggcttcttgc

SEQ ID NO: 1647624 - DNA, 25 bp, Homo sapien
aggcttcttgcagcctgcgggccca

SEQ ID NO: 1647625 - DNA, 25 bp, Homo sapien
cccagcaggtccagataggagggtg

SEQ ID NO: 1647626 - DNA, 25 bp, Homo sapien
ccagcaggtccagataggagggtgg

SEQ ID NO: 1647627 - DNA, 25 bp, Homo sapien
tctgaggtagaaaagccacggctgc

SEQ ID NO: 1647628 - DNA, 25 bp, Homo sapien
caaagcccctttagacacttgggag

SEQ ID NO: 1647629 - DNA, 25 bp, Homo sapien
cagacaatgggtgacagcgccttag

SEQ ID NO: 1647630 - DNA, 25 bp, Homo sapien
gaagtctaatattccctgtggtgcc

SEQ ID NO: 1647631 - DNA, 25 bp, Homo sapien
tcaatttagcaataaccccgagccg

SEQ ID NO: 1647632 - DNA, 25 bp, Homo sapien
tcgcgaacgccactttccaaaggag

SEQ ID NO: 1647633 - DNA, 25 bp, Homo sapien
aagtgctttaccctgaatcatcgcg

SEQ ID NO: 1647634 - DNA, 25 bp, Homo sapien
gattaagtcattgggtcgcacacct

SEQ ID NO: 1647635 - DNA, 25 bp, Homo sapien
cgcttcctccccacggagcccggcg

SEQ ID NO: 1647636 - DNA, 25 bp, Homo sapien
ttcctccccacggagcccggcgctc

SEQ ID NO: 1647637 - DNA, 25 bp, Homo sapien
cctccccacggagcccggcgctcac

SEQ ID NO: 1647638 - DNA, 25 bp, Homo sapien
gcttcctccccacggagcccggcgc

SEQ ID NO: 1647639 - DNA, 25 bp, Homo sapien
gaaactcaaacaacacagtatccgc

SEQ ID NO: 1647640 - DNA, 25 bp, Homo sapien
caccatctccgtgtgaagaaactca

SEQ ID NO: 1647641 - DNA, 25 bp, Homo sapien
tcagccaccatctccgtgtgaagaa

SEQ ID NO: 1647642 - DNA, 25 bp, Homo sapien
gtcggggtcgtgagcccacagctca

SEQ ID NO: 1647643 - DNA, 25 bp, Homo sapien
ggcttggtaagccacgcctcttgcg

SEQ ID NO: 1647644 - DNA, 25 bp, Homo sapien
tggtgttttagactagccccgcctc

SEQ ID NO: 1647645 - DNA, 25 bp, Homo sapien
tcctactccggcttccattggtgtt

SEQ ID NO: 1647646 - DNA, 25 bp, Homo sapien
ggccacatgtggcaacatcttctgc

SEQ ID NO: 1647647 - DNA, 25 bp, Homo sapien
tccggtccccttggataatgcttta

SEQ ID NO: 1647648 - DNA, 25 bp, Homo sapien
ggccgcgggcctagccatgattcta

SEQ ID NO: 1647649 - DNA, 25 bp, Homo sapien
tgccagggaccgagcctgagaaaga

SEQ ID NO: 1647650 - DNA, 25 bp, Homo sapien
agggccccactatccttagatctgg

SEQ ID NO: 1647651 - DNA, 25 bp, Homo sapien
caagcttggccctggttccgtgtgc

SEQ ID NO: 1647652 - DNA, 25 bp, Homo sapien
gctttcagcgccagatgacagcact

SEQ ID NO: 1647653 - DNA, 25 bp, Homo sapien
gatgctcgctctcaactctgtaggc

SEQ ID NO: 1647654 - DNA, 25 bp, Homo sapien
tgttttcttccgatcccagctctgg

SEQ ID NO: 1647655 - DNA, 25 bp, Homo sapien
tcttgcagggggtatggtcccacag

SEQ ID NO: 1647656 - DNA, 25 bp, Homo sapien
gcagggggtatggtcccacaggggc

SEQ ID NO: 1647657 - DNA, 25 bp, Homo sapien
ttgcagggggtatggtcccacaggg

SEQ ID NO: 1647658 - DNA, 25 bp, Homo sapien
cttcttgcagggggtatggtcccac

SEQ ID NO: 1647659 - DNA, 25 bp, Homo sapien
ttcctttactcccttatggctgcag

SEQ ID NO: 1647660 - DNA, 25 bp, Homo sapien
tgggaagatttgctagagctcagga

SEQ ID NO: 1647661 - DNA, 25 bp, Homo sapien
ctttactcccttatggctgcagtga

SEQ ID NO: 1647662 - DNA, 25 bp, Homo sapien
caaggtgggaagatttgctagagct

SEQ ID NO: 1647663 - DNA, 25 bp, Homo sapien
agggtctttctatcccaggggtgtg

SEQ ID NO: 1647664 - DNA, 25 bp, Homo sapien
tgtcagcagcatagatggggtcact

SEQ ID NO: 1647665 - DNA, 25 bp, Homo sapien
cgtacgggaggttggcttgtcagca

SEQ ID NO: 1647666 - DNA, 25 bp, Homo sapien
tgggtgaaaagacatctaagggtct

SEQ ID NO: 1647667 - DNA, 25 bp, Homo sapien
ggccgaggcagacaggccaaactgg

SEQ ID NO: 1647668 - DNA, 25 bp, Homo sapien
gaggcagacaggccaaactgggcct

SEQ ID NO: 1647669 - DNA, 25 bp, Homo sapien
ccgaggcagacaggccaaactgggc

SEQ ID NO: 1647670 - DNA, 25 bp, Homo sapien
ggggccgaggcagacaggccaaact

SEQ ID NO: 1647671 - DNA, 25 bp, Homo sapien
gggcggctgtgttgcgcaggccacg

SEQ ID NO: 1647672 - DNA, 25 bp, Homo sapien
ctgtgttgcgcaggccacggatgtc

SEQ ID NO: 1647673 - DNA, 25 bp, Homo sapien
cctggcgggcggctgtgttgcgcag

SEQ ID NO: 1647674 - DNA, 25 bp, Homo sapien
ccacggatgtcgaggagggctgcca

SEQ ID NO: 1647675 - DNA, 25 bp, Homo sapien
atgacttcagccaaatggggcacca

SEQ ID NO: 1647676 - DNA, 25 bp, Homo sapien
atgtctgggtagtcgcgcaccaaca

SEQ ID NO: 1647677 - DNA, 25 bp, Homo sapien
ccaaatggggcaccacggcatccag

SEQ ID NO: 1647678 - DNA, 25 bp, Homo sapien
gatgtctgggtagtcgcgcaccaac

SEQ ID NO: 1647679 - DNA, 25 bp, Homo sapien
agcctctgcagttgcgccgcgtcct

SEQ ID NO: 1647680 - DNA, 25 bp, Homo sapien
cgccgagctgcagcgcaggcgccca

SEQ ID NO: 1647681 - DNA, 25 bp, Homo sapien
acgtactcgaccagcgcccgccggt

SEQ ID NO: 1647682 - DNA, 25 bp, Homo sapien
gccggtgtagctcggctaccagcgc

SEQ ID NO: 1647683 - DNA, 25 bp, Homo sapien
tgctcagccacttccggcgcatcag

SEQ ID NO: 1647684 - DNA, 25 bp, Homo sapien
cccagcgtgcccacgatgccatcca

SEQ ID NO: 1647685 - DNA, 25 bp, Homo sapien
cacttccggcgcatcagcttgttga

SEQ ID NO: 1647686 - DNA, 25 bp, Homo sapien
tcgtcctgcattctgcgcagggcca

SEQ ID NO: 1647687 - DNA, 25 bp, Homo sapien
cccctcttttctagaatgcactgta

SEQ ID NO: 1647688 - DNA, 25 bp, Homo sapien
tagatccggtatttgacgaaacttg

SEQ ID NO: 1647689 - DNA, 25 bp, Homo sapien
tatttgacgaaacttgtgaaagtgg

SEQ ID NO: 1647690 - DNA, 25 bp, Homo sapien
ctgtatatgcgactgtgactttcaa

SEQ ID NO: 1647691 - DNA, 25 bp, Homo sapien
ttggccacgacacggtggcagagcc

SEQ ID NO: 1647692 - DNA, 25 bp, Homo sapien
tggaacagcaggttggccacgacac

SEQ ID NO: 1647693 - DNA, 25 bp, Homo sapien
agccgggtcacatggtccagagcac

SEQ ID NO: 1647694 - DNA, 25 bp, Homo sapien
gagcactagcagatgcttcccgggc

SEQ ID NO: 1647695 - DNA, 25 bp, Homo sapien
ttctcatggaatcgctccacacgct

SEQ ID NO: 1647696 - DNA, 25 bp, Homo sapien
gtcaggtagcatctcccggactgct

SEQ ID NO: 1647697 - DNA, 25 bp, Homo sapien
ccggactgctgggttctcatggaat

SEQ ID NO: 1647698 - DNA, 25 bp, Homo sapien
cgatggtcttgctgatataggtgtc

SEQ ID NO: 1647699 - DNA, 25 bp, Homo sapien
gcagtgggccatccgctccccaaac

SEQ ID NO: 1647700 - DNA, 25 bp, Homo sapien
ctgatgcggggtgctcgctctgtgt

SEQ ID NO: 1647701 - DNA, 25 bp, Homo sapien
aactcctggctgatgcggggtgctc

SEQ ID NO: 1647702 - DNA, 25 bp, Homo sapien
agcagtgggccatccgctccccaaa

SEQ ID NO: 1647703 - DNA, 25 bp, Homo sapien
ctcacacacatcctgggccaggctg

SEQ ID NO: 1647704 - DNA, 25 bp, Homo sapien
ggctcccccagtgctcttcgtcctc

SEQ ID NO: 1647705 - DNA, 25 bp, Homo sapien
ccaggctcccccagtgctcttcgtc

SEQ ID NO: 1647706 - DNA, 25 bp, Homo sapien
tgctgggctggtcctccaggctccc

SEQ ID NO: 1647707 - DNA, 25 bp, Homo sapien
ggagaagggcagcccgggtctgagc

SEQ ID NO: 1647708 - DNA, 25 bp, Homo sapien
acggagaagggcagcccgggtctga

SEQ ID NO: 1647709 - DNA, 25 bp, Homo sapien
acacggagaagggcagcccgggtct

SEQ ID NO: 1647710 - DNA, 25 bp, Homo sapien
ctgcagcacacggagaagggcagcc

SEQ ID NO: 1647711 - DNA, 25 bp, Homo sapien
atcctccaaaccccgcagggtgcca

SEQ ID NO: 1647712 - DNA, 25 bp, Homo sapien
ctccaaaccccgcagggtgccaggg

SEQ ID NO: 1647713 - DNA, 25 bp, Homo sapien
ttcatcctccaaaccccgcagggtg

SEQ ID NO: 1647714 - DNA, 25 bp, Homo sapien
gcattcatcctccaaaccccgcagg

SEQ ID NO: 1647715 - DNA, 25 bp, Homo sapien
gtagacgccgaaggcgcccaggccg

SEQ ID NO: 1647716 - DNA, 25 bp, Homo sapien
gtggtagccgcgcaggtagacgccg

SEQ ID NO: 1647717 - DNA, 25 bp, Homo sapien
ctggggtagacctgattgtgccagt

SEQ ID NO: 1647718 - DNA, 25 bp, Homo sapien
tgcagcagcgcgtagcggtcggcca

SEQ ID NO: 1647719 - DNA, 25 bp, Homo sapien
atcctccagcagccgcgcccgcagc

SEQ ID NO: 1647720 - DNA, 25 bp, Homo sapien
tcctccagcagccgcgcccgcagcg

SEQ ID NO: 1647721 - DNA, 25 bp, Homo sapien
agcagccgcgcccgcagcgcctcca

SEQ ID NO: 1647722 - DNA, 25 bp, Homo sapien
tccagcagccgcgcccgcagcgcct

SEQ ID NO: 1647723 - DNA, 25 bp, Homo sapien
gggagccgctgcctctaggcgctcc

SEQ ID NO: 1647724 - DNA, 25 bp, Homo sapien
cccagcgtgcgcgtagtttgcgggc

SEQ ID NO: 1647725 - DNA, 25 bp, Homo sapien
gcgccacggcttcggcccagcgtgc

SEQ ID NO: 1647726 - DNA, 25 bp, Homo sapien
gccgcgcgcgccacggcttcggccc

SEQ ID NO: 1647727 - DNA, 25 bp, Homo sapien
gctgcagggcctcgtacagcagcgc

SEQ ID NO: 1647728 - DNA, 25 bp, Homo sapien
cgcacgcgctagttcgcgctgctgg

SEQ ID NO: 1647729 - DNA, 25 bp, Homo sapien
tccaggatgtgctcgtccgcacgcg

SEQ ID NO: 1647730 - DNA, 25 bp, Homo sapien
cacgcgctagttcgcgctgctggat

SEQ ID NO: 1647731 - DNA, 25 bp, Homo sapien
tgtgctcgtccgcacgcgctagttc

SEQ ID NO: 1647732 - DNA, 25 bp, Homo sapien
gaggcaaagattgagggtgggcata

SEQ ID NO: 1647733 - DNA, 25 bp, Homo sapien
tagacatgggagtagggctgaagac

SEQ ID NO: 1647734 - DNA, 25 bp, Homo sapien
gagtagggctgaagacggcaggtgg

SEQ ID NO: 1647735 - DNA, 25 bp, Homo sapien
ggtgggcatatattaacaggtggca

SEQ ID NO: 1647736 - DNA, 25 bp, Homo sapien
ctgggatgggcttaagtatgaagcc

SEQ ID NO: 1647737 - DNA, 25 bp, Homo sapien
tgagttagacatgtgaattgcaggt

SEQ ID NO: 1647738 - DNA, 25 bp, Homo sapien
cagtggtaatgggttggagctggca

SEQ ID NO: 1647739 - DNA, 25 bp, Homo sapien
cttaagtatgaagcctgggaccacc

SEQ ID NO: 1647740 - DNA, 25 bp, Homo sapien
ccttcatctttgggggctctgggac

SEQ ID NO: 1647741 - DNA, 25 bp, Homo sapien
tgacaatggctccttcatctttggg

SEQ ID NO: 1647742 - DNA, 25 bp, Homo sapien
ggctccttcatctttgggggctctg

SEQ ID NO: 1647743 - DNA, 25 bp, Homo sapien
ctgacaatggctccttcatctttgg

SEQ ID NO: 1647744 - DNA, 25 bp, Homo sapien
cgcggcggcgacaagatgttccatt

SEQ ID NO: 1647745 - DNA, 25 bp, Homo sapien
gggccaggaggccaaaatctgctga

SEQ ID NO: 1647746 - DNA, 25 bp, Homo sapien
gcaccttagggtctgacactcccag

SEQ ID NO: 1647747 - DNA, 25 bp, Homo sapien
agctcctgcgtatccctggtaccag

SEQ ID NO: 1647748 - DNA, 25 bp, Homo sapien
ggtttgcggaatccatcacctccaa

SEQ ID NO: 1647749 - DNA, 25 bp, Homo sapien
cggagtccctaaccttctgcagcgg

SEQ ID NO: 1647750 - DNA, 25 bp, Homo sapien
tctgcagcggccctgacctcggttt

SEQ ID NO: 1647751 - DNA, 25 bp, Homo sapien
tcaggcccgcaggatgtcttggcca

SEQ ID NO: 1647752 - DNA, 25 bp, Homo sapien
tgttctccgcctacaagccttggga

SEQ ID NO: 1647753 - DNA, 25 bp, Homo sapien
ttttagaactcgagagaagccccag

SEQ ID NO: 1647754 - DNA, 25 bp, Homo sapien
cacactctgggatgcacctgattag

SEQ ID NO: 1647755 - DNA, 25 bp, Homo sapien
tagggcaggttgatggccaacacca

SEQ ID NO: 1647756 - DNA, 25 bp, Homo sapien
tttatttatcgctttgcgtggagac

SEQ ID NO: 1647757 - DNA, 25 bp, Homo sapien
tatttatcgctttgcgtggagacaa

SEQ ID NO: 1647758 - DNA, 25 bp, Homo sapien
ccaatgcttttatttatcgctttgc

SEQ ID NO: 1647759 - DNA, 25 bp, Homo sapien
tgcttttatttatcgctttgcgtgg

SEQ ID NO: 1647760 - DNA, 25 bp, Homo sapien
ccagaggatggagcccattggttgg

SEQ ID NO: 1647761 - DNA, 25 bp, Homo sapien
ccattaactagagctcctggttggg

SEQ ID NO: 1647762 - DNA, 25 bp, Homo sapien
caggccctcccactggctgggttcc

SEQ ID NO: 1647763 - DNA, 25 bp, Homo sapien
accctgccagggagatatttcattg

SEQ ID NO: 1647764 - DNA, 25 bp, Homo sapien
agctgcacctgttctacttcggacg

SEQ ID NO: 1647765 - DNA, 25 bp, Homo sapien
gatcatgtcgtcaatggactggcct

SEQ ID NO: 1647766 - DNA, 25 bp, Homo sapien
gacacgtcaaatactgagcccacgg

SEQ ID NO: 1647767 - DNA, 25 bp, Homo sapien
acgagcccagccgatcagcgttgga

SEQ ID NO: 1647768 - DNA, 25 bp, Homo sapien
acaggttacctgcacacaggtaatg

SEQ ID NO: 1647769 - DNA, 25 bp, Homo sapien
tgtgtaacaggttacctgcacacag

SEQ ID NO: 1647770 - DNA, 25 bp, Homo sapien
tgtaacaggttacctgcacacaggt

SEQ ID NO: 1647771 - DNA, 25 bp, Homo sapien
taacaggttacctgcacacaggtaa

SEQ ID NO: 1647772 - DNA, 25 bp, Homo sapien
ggtgcaaaggatgtgggagccgtac

SEQ ID NO: 1647773 - DNA, 25 bp, Homo sapien
tcgtggtgcaaaggatgtgggagcc

SEQ ID NO: 1647774 - DNA, 25 bp, Homo sapien
cctccgtcgtggtgcaaaggatgtg

SEQ ID NO: 1647775 - DNA, 25 bp, Homo sapien
tccccctccgtcgtggtgcaaagga

SEQ ID NO: 1647776 - DNA, 25 bp, Homo sapien
tgtacccctcttctgcagacgcagg

SEQ ID NO: 1647777 - DNA, 25 bp, Homo sapien
ctcaggtgcgccagcttcacatgca

SEQ ID NO: 1647778 - DNA, 25 bp, Homo sapien
ggatctcctcgaacttggggtgctt

SEQ ID NO: 1647779 - DNA, 25 bp, Homo sapien
gtggccagctttcttaaagatctcc

SEQ ID NO: 1647780 - DNA, 25 bp, Homo sapien
aagcggcggaaaacctccttcatgt

SEQ ID NO: 1647781 - DNA, 25 bp, Homo sapien
tgcagccctacgcagaagcggcgga

SEQ ID NO: 1647782 - DNA, 25 bp, Homo sapien
ggaggtgatcctcctcgttcaccca

SEQ ID NO: 1647783 - DNA, 25 bp, Homo sapien
ccatggagatgacccggaggtgatc

SEQ ID NO: 1647784 - DNA, 25 bp, Homo sapien
ctgctccttctccgtcatgctcttc

SEQ ID NO: 1647785 - DNA, 25 bp, Homo sapien
cttccctttgaactcgcccgtcagg

SEQ ID NO: 1647786 - DNA, 25 bp, Homo sapien
aactcgcccgtcaggctgttgagag

SEQ ID NO: 1647787 - DNA, 25 bp, Homo sapien
ttgaactcgcccgtcaggctgttga

SEQ ID NO: 1647788 - DNA, 25 bp, Homo sapien
tgtagcccttgatgctgcggccagt

SEQ ID NO: 1647789 - DNA, 25 bp, Homo sapien
ggccagtgcggacgcggctgctgag

SEQ ID NO: 1647790 - DNA, 25 bp, Homo sapien
cggcgctcgccacgggagcagtgtg

SEQ ID NO: 1647791 - DNA, 25 bp, Homo sapien
gacgcggctgctgagcacgtagtta

SEQ ID NO: 1647792 - DNA, 25 bp, Homo sapien
cctcccctcctgcgcagacaccgac

SEQ ID NO: 1647793 - DNA, 25 bp, Homo sapien
gaggttttcatggttgaggtcagtc

SEQ ID NO: 1647794 - DNA, 25 bp, Homo sapien
gatggggtcaaagagttccttgaaa

SEQ ID NO: 1647795 - DNA, 25 bp, Homo sapien
gtgcttgtcagtgggtttgtagccc

SEQ ID NO: 1647796 - DNA, 25 bp, Homo sapien
ccccgtggcgatccgagatgatggg

SEQ ID NO: 1647797 - DNA, 25 bp, Homo sapien
gcttgaacttgttgtgggtgttacc

SEQ ID NO: 1647798 - DNA, 25 bp, Homo sapien
gatgacatcgtctacagtgaagcca

SEQ ID NO: 1647799 - DNA, 25 bp, Homo sapien
tcctcctcaggcttgtaattcagct

SEQ ID NO: 1647800 - DNA, 25 bp, Homo sapien
agttcaagggtcagtaccttggcca

SEQ ID NO: 1647801 - DNA, 25 bp, Homo sapien
cccacggcttgtggcgccagtgttg

SEQ ID NO: 1647802 - DNA, 25 bp, Homo sapien
ttgtggcgccagtgttggcgacaaa

SEQ ID NO: 1647803 - DNA, 25 bp, Homo sapien
gcttgtggcgccagtgttggcgaca

SEQ ID NO: 1647804 - DNA, 25 bp, Homo sapien
ctcccacggcttgtggcgccagtgt

SEQ ID NO: 1647805 - DNA, 25 bp, Homo sapien
ctgtatcctggaggtgacactgacc

SEQ ID NO: 1647806 - DNA, 25 bp, Homo sapien
tctgtatcctggaggtgacactgac

SEQ ID NO: 1647807 - DNA, 25 bp, Homo sapien
tgtctgtatcctggaggtgacactg

SEQ ID NO: 1647808 - DNA, 25 bp, Homo sapien
ggctgtctgtatcctggaggtgaca

SEQ ID NO: 1647809 - DNA, 25 bp, Homo sapien
agcgacgccgttcagagcgcgggcg

SEQ ID NO: 1647810 - DNA, 25 bp, Homo sapien
ttcagagcgcgggcgccagactcgc

SEQ ID NO: 1647811 - DNA, 25 bp, Homo sapien
gctgggcagcgacgccgttcagagc

SEQ ID NO: 1647812 - DNA, 25 bp, Homo sapien
ccagactcgcgcagatctgggcaga

SEQ ID NO: 1647813 - DNA, 25 bp, Homo sapien
tggtgaataaaataacgtctttcat

SEQ ID NO: 1647814 - DNA, 25 bp, Homo sapien
agggtctggtccatagggtagtggg

SEQ ID NO: 1647815 - DNA, 25 bp, Homo sapien
tggtaggatttttggtaacaagcac

SEQ ID NO: 1647816 - DNA, 25 bp, Homo sapien
tggactgacagcataaatctaggcc

SEQ ID NO: 1647817 - DNA, 25 bp, Homo sapien
gacagcataaatctaggccccttca

SEQ ID NO: 1647818 - DNA, 25 bp, Homo sapien
gactgacagcataaatctaggcccc

SEQ ID NO: 1647819 - DNA, 25 bp, Homo sapien
gatggactgacagcataaatctagg

SEQ ID NO: 1647820 - DNA, 25 bp, Homo sapien
cgtagtgtgcgcagcttgatcatct

SEQ ID NO: 1647821 - DNA, 25 bp, Homo sapien
ccatcgccgtgtttgcagtgcacca

SEQ ID NO: 1647822 - DNA, 25 bp, Homo sapien
tccagcagcttgtatcgtagtgtgc

SEQ ID NO: 1647823 - DNA, 25 bp, Homo sapien
ttgccgggaccgagaaagagaactg

SEQ ID NO: 1647824 - DNA, 25 bp, Homo sapien
cttgccaccgaagacctgcacagat

SEQ ID NO: 1647825 - DNA, 25 bp, Homo sapien
cagattgcagctggccctcggaccg

SEQ ID NO: 1647826 - DNA, 25 bp, Homo sapien
ctgcacagattgcagctggccctcg

SEQ ID NO: 1647827 - DNA, 25 bp, Homo sapien
ccaccgaagacctgcacagattgca

SEQ ID NO: 1647828 - DNA, 25 bp, Homo sapien
gggcagctgcgacagtacgacccac

SEQ ID NO: 1647829 - DNA, 25 bp, Homo sapien
gctgctggccctgtcggcacatgtg

SEQ ID NO: 1647830 - DNA, 25 bp, Homo sapien
ccagcgaggagtccgtggcccagct

SEQ ID NO: 1647831 - DNA, 25 bp, Homo sapien
tgggcccttcatagagccccacagt

SEQ ID NO: 1647832 - DNA, 25 bp, Homo sapien
caagatccgtgagtctatcaggcga

SEQ ID NO: 1647833 - DNA, 25 bp, Homo sapien
tcaggagtcaccaggaaccgtttat

SEQ ID NO: 1647834 - DNA, 25 bp, Homo sapien
tcaaaccctgtgctggaaaggtccc

SEQ ID NO: 1647835 - DNA, 25 bp, Homo sapien
tgttgatcaggtcggcaaagagccc

SEQ ID NO: 1647836 - DNA, 25 bp, Homo sapien
tgctctatcctcttcagcgtctcct

SEQ ID NO: 1647837 - DNA, 25 bp, Homo sapien
gagctgctgagcaatctgctctatc

SEQ ID NO: 1647838 - DNA, 25 bp, Homo sapien
cctctgattctagctgctccaggct

SEQ ID NO: 1647839 - DNA, 25 bp, Homo sapien
tgctgagcaatctgctctatcctct

SEQ ID NO: 1647840 - DNA, 25 bp, Homo sapien
gccagtagggacaggatgtttgaat

SEQ ID NO: 1647841 - DNA, 25 bp, Homo sapien
gaatttggagatgtccgtataatcc

SEQ ID NO: 1647842 - DNA, 25 bp, Homo sapien
gagtcggagaaggaccggctttctc

SEQ ID NO: 1647843 - DNA, 25 bp, Homo sapien
gcgggccatccctgtcaacataaga

SEQ ID NO: 1647844 - DNA, 25 bp, Homo sapien
catctgtggcccctcgaatctcccc

SEQ ID NO: 1647845 - DNA, 25 bp, Homo sapien
ccagagcctggcacgtagatgcacg

SEQ ID NO: 1647846 - DNA, 25 bp, Homo sapien
gcacgtagatgcacgataaacttct

SEQ ID NO: 1647847 - DNA, 25 bp, Homo sapien
cctggcacgtagatgcacgataaac

SEQ ID NO: 1647848 - DNA, 25 bp, Homo sapien
ctgagggcaggaggacaggcaggct

SEQ ID NO: 1647849 - DNA, 25 bp, Homo sapien
caggaggacaggcaggctgagggtg

SEQ ID NO: 1647850 - DNA, 25 bp, Homo sapien
ctttgctgagggcaggaggacaggc

SEQ ID NO: 1647851 - DNA, 25 bp, Homo sapien
gggcaggaggacaggcaggctgagg

SEQ ID NO: 1647852 - DNA, 25 bp, Homo sapien
ggctgtgccatctgccgcaggaagt

SEQ ID NO: 1647853 - DNA, 25 bp, Homo sapien
tgccatctgccgcaggaagtacttg

SEQ ID NO: 1647854 - DNA, 25 bp, Homo sapien
atctgccgcaggaagtacttggcca

SEQ ID NO: 1647855 - DNA, 25 bp, Homo sapien
gctgtgccatctgccgcaggaagta

SEQ ID NO: 1647856 - DNA, 25 bp, Homo sapien
gaaagtcattctcacgaatctggaa

SEQ ID NO: 1647857 - DNA, 25 bp, Homo sapien
aactggtcccgcaggtattccagcc

SEQ ID NO: 1647858 - DNA, 25 bp, Homo sapien
ggcgcatggcatcgaaggtaagaaa

SEQ ID NO: 1647859 - DNA, 25 bp, Homo sapien
caaagaccatgaggccgtagtccgt

SEQ ID NO: 1647860 - DNA, 25 bp, Homo sapien
aacatgatgacggcccgcccgtagt

SEQ ID NO: 1647861 - DNA, 25 bp, Homo sapien
tgtgtagacgtaggggacgccaaac

SEQ ID NO: 1647862 - DNA, 25 bp, Homo sapien
taggggacgccaaacatgatgacgg

SEQ ID NO: 1647863 - DNA, 25 bp, Homo sapien
atgacggcccgcccgtagtggtgca

SEQ ID NO: 1647864 - DNA, 25 bp, Homo sapien
tccccgcgggagcagacagcagagc

SEQ ID NO: 1647865 - DNA, 25 bp, Homo sapien
ggttccccgcgggagcagacagcag

SEQ ID NO: 1647866 - DNA, 25 bp, Homo sapien
ggtggttccccgcgggagcagacag

SEQ ID NO: 1647867 - DNA, 25 bp, Homo sapien
gtgggtggttccccgcgggagcaga

SEQ ID NO: 1647868 - DNA, 25 bp, Homo sapien
caaagtcgattccctcggacacttt

SEQ ID NO: 1647869 - DNA, 25 bp, Homo sapien
tgacagcaggatggccccgcggcca

SEQ ID NO: 1647870 - DNA, 25 bp, Homo sapien
agtcgattccctcggacactttgcc

SEQ ID NO: 1647871 - DNA, 25 bp, Homo sapien
actttgccccgggccactgacagca

SEQ ID NO: 1647872 - DNA, 25 bp, Homo sapien
ctccagggcgacactggtttcggca

SEQ ID NO: 1647873 - DNA, 25 bp, Homo sapien
ggtttcggcaccatcctgggtctca

SEQ ID NO: 1647874 - DNA, 25 bp, Homo sapien
gcgacactggtttcggcaccatcct

SEQ ID NO: 1647875 - DNA, 25 bp, Homo sapien
tacttctccagggcgacactggttt

SEQ ID NO: 1647876 - DNA, 25 bp, Homo sapien
ggtgaagaaggccacgatgccatca

SEQ ID NO: 1647877 - DNA, 25 bp, Homo sapien
cagcaggaggttcccatagttccgg

SEQ ID NO: 1647878 - DNA, 25 bp, Homo sapien
atcagggaccacagcggacatctcc

SEQ ID NO: 1647879 - DNA, 25 bp, Homo sapien
gaggttcccatagttccggatcaca

SEQ ID NO: 1647880 - DNA, 25 bp, Homo sapien
ctcccgggtctcaaatttggagctg

SEQ ID NO: 1647881 - DNA, 25 bp, Homo sapien
gatggccacctggtcattgccacgg

SEQ ID NO: 1647882 - DNA, 25 bp, Homo sapien
tctcaaatttggagctgatggccac

SEQ ID NO: 1647883 - DNA, 25 bp, Homo sapien
cctggtcattgccacggccgatgat

SEQ ID NO: 1647884 - DNA, 25 bp, Homo sapien
ctcagagaaggtgagttgcctgccc

SEQ ID NO: 1647885 - DNA, 25 bp, Homo sapien
cacaaatgacctgggctcagagaag

SEQ ID NO: 1647886 - DNA, 25 bp, Homo sapien
gatggaaccggacccgagtctgtcc

SEQ ID NO: 1647887 - DNA, 25 bp, Homo sapien
taaacacagtgtcattgaatgaacc

SEQ ID NO: 1647888 - DNA, 25 bp, Homo sapien
tgggagatcagggaggatacattcc

SEQ ID NO: 1647889 - DNA, 25 bp, Homo sapien
tactcggcaagatgctaagatgctg

SEQ ID NO: 1647890 - DNA, 25 bp, Homo sapien
gaggcttgagagtcgagcccacaga

SEQ ID NO: 1647891 - DNA, 25 bp, Homo sapien
gatgctgactaagcgcctacctgtg

SEQ ID NO: 1647892 - DNA, 25 bp, Homo sapien
gccagcgtcatggtgaaggttgcca

SEQ ID NO: 1647893 - DNA, 25 bp, Homo sapien
atagggcagaggcagacccgtgcca

SEQ ID NO: 1647894 - DNA, 25 bp, Homo sapien
cttggggtagatgtccagcggggac

SEQ ID NO: 1647895 - DNA, 25 bp, Homo sapien
agacccgtgccagcgtcatggtgaa

SEQ ID NO: 1647896 - DNA, 25 bp, Homo sapien
gaaacgctcaaatacgggtttgatg

SEQ ID NO: 1647897 - DNA, 25 bp, Homo sapien
agactggaaacgctcaaatacgggt

SEQ ID NO: 1647898 - DNA, 25 bp, Homo sapien
atgacagactggaaacgctcaaata

SEQ ID NO: 1647899 - DNA, 25 bp, Homo sapien
aaatacgggtttgatggccagcgag

SEQ ID NO: 1647900 - DNA, 25 bp, Homo sapien
gcccccgacccacagagcattcaca

SEQ ID NO: 1647901 - DNA, 25 bp, Homo sapien
gctgggcccccgacccacagagcat

SEQ ID NO: 1647902 - DNA, 25 bp, Homo sapien
gagagatgagggcagtgagggcccg

SEQ ID NO: 1647903 - DNA, 25 bp, Homo sapien
acccacagagcattcacaccctcac

SEQ ID NO: 1647904 - DNA, 25 bp, Homo sapien
tctgtcgtcaaagggctcgatgatg

SEQ ID NO: 1647905 - DNA, 25 bp, Homo sapien
cgtcaaagggctcgatgatgatggt

SEQ ID NO: 1647906 - DNA, 25 bp, Homo sapien
gcaatggtcggggttctgtcgtcaa

SEQ ID NO: 1647907 - DNA, 25 bp, Homo sapien
ggttctgtcgtcaaagggctcgatg

SEQ ID NO: 1647908 - DNA, 25 bp, Homo sapien
cacgaaggatcccaagtagagagcc

SEQ ID NO: 1647909 - DNA, 25 bp, Homo sapien
gtaaatgcgaccaaacatgactgct

SEQ ID NO: 1647910 - DNA, 25 bp, Homo sapien
tgagactgctcaaaagtcagcccct

SEQ ID NO: 1647911 - DNA, 25 bp, Homo sapien
tgagtccaaaatacaccccaacctg

SEQ ID NO: 1647912 - DNA, 25 bp, Homo sapien
ttagggatgagatcttttttggttc

SEQ ID NO: 1647913 - DNA, 25 bp, Homo sapien
cttttttggttcctgctgcttccac

SEQ ID NO: 1647914 - DNA, 25 bp, Homo sapien
tgctgcttccacagtgctgagcctg

SEQ ID NO: 1647915 - DNA, 25 bp, Homo sapien
ctgctgcttccacagtgctgagcct

SEQ ID NO: 1647916 - DNA, 25 bp, Homo sapien
cagcaaggtcggtgatctccagagt

SEQ ID NO: 1647917 - DNA, 25 bp, Homo sapien
acaagggtggcaaagttagcaagga

SEQ ID NO: 1647918 - DNA, 25 bp, Homo sapien
tctccagagtatgcagcagggaccg

SEQ ID NO: 1647919 - DNA, 25 bp, Homo sapien
ctttggcgtaggtgctgacaagggt

SEQ ID NO: 1647920 - DNA, 25 bp, Homo sapien
gagcaataatcagacactccagagt

SEQ ID NO: 1647921 - DNA, 25 bp, Homo sapien
tgtacacctgcatgtcacaaatagc

SEQ ID NO: 1647922 - DNA, 25 bp, Homo sapien
tcacttgtcacacctgctagcacga

SEQ ID NO: 1647923 - DNA, 25 bp, Homo sapien
cattgccgcataatggcacagacag

SEQ ID NO: 1647924 - DNA, 25 bp, Homo sapien
catgggctcacagaggaatgcagtc

SEQ ID NO: 1647925 - DNA, 25 bp, Homo sapien
gcattaatcccgcatggccacatgg

SEQ ID NO: 1647926 - DNA, 25 bp, Homo sapien
caaacccacatggaaggtggcctca

SEQ ID NO: 1647927 - DNA, 25 bp, Homo sapien
gctagctgaggatgagtctgtcccc

SEQ ID NO: 1647928 - DNA, 25 bp, Homo sapien
ggcttgcgctggatgcacacgcgct

SEQ ID NO: 1647929 - DNA, 25 bp, Homo sapien
aagcccaggaaatgctcggccgtgc

SEQ ID NO: 1647930 - DNA, 25 bp, Homo sapien
agccgccacttcacgtactccagca

SEQ ID NO: 1647931 - DNA, 25 bp, Homo sapien
aaggcgggcgggctctcctgcacca

SEQ ID NO: 1647932 - DNA, 25 bp, Homo sapien
ttggccaggtgggcgtccgtctccc

SEQ ID NO: 1647933 - DNA, 25 bp, Homo sapien
cagcacggggttggccaggtgggcg

SEQ ID NO: 1647934 - DNA, 25 bp, Homo sapien
tgcagcacttcgtcgggcagcacgg

SEQ ID NO: 1647935 - DNA, 25 bp, Homo sapien
gacgccggtactcgtcccgcaggcg

SEQ ID NO: 1647936 - DNA, 25 bp, Homo sapien
tgacgctcatggagtcgatgcagac

SEQ ID NO: 1647937 - DNA, 25 bp, Homo sapien
ctcatggagtcgatgcagacgttgt

SEQ ID NO: 1647938 - DNA, 25 bp, Homo sapien
aggttgacgctcatggagtcgatgc

SEQ ID NO: 1647939 - DNA, 25 bp, Homo sapien
tccggcgggtgaggttgacgctcat

SEQ ID NO: 1647940 - DNA, 25 bp, Homo sapien
ttgcgggccagttccttggacacca

SEQ ID NO: 1647941 - DNA, 25 bp, Homo sapien
gtcgaagaccacgacggccttgcgg

SEQ ID NO: 1647942 - DNA, 25 bp, Homo sapien
aatgttgtgggcctcgtcgaagacc

SEQ ID NO: 1647943 - DNA, 25 bp, Homo sapien
gaggtagtggtagctataaaccacc

SEQ ID NO: 1647944 - DNA, 25 bp, Homo sapien
tatcgagcaaggaagtatgggcacc

SEQ ID NO: 1647945 - DNA, 25 bp, Homo sapien
acctcacgcccatgggcatcaaatt

SEQ ID NO: 1647946 - DNA, 25 bp, Homo sapien
aggggcacctcacgcccatgggcat

SEQ ID NO: 1647947 - DNA, 25 bp, Homo sapien
tcaggtcatccaggttgtagatgcc

SEQ ID NO: 1647948 - DNA, 25 bp, Homo sapien
catagaatcggcagtggggcaggct

SEQ ID NO: 1647949 - DNA, 25 bp, Homo sapien
tgcgcccgcacataggaggctgtga

SEQ ID NO: 1647950 - DNA, 25 bp, Homo sapien
gctgtggcatttcccatcgacgtcc

SEQ ID NO: 1647951 - DNA, 25 bp, Homo sapien
ctggtgtcatgctggtactgcgccc

SEQ ID NO: 1647952 - DNA, 25 bp, Homo sapien
agagccagtcccagaaacggcagct

SEQ ID NO: 1647953 - DNA, 25 bp, Homo sapien
gtttttgcgggagctcagagccagt

SEQ ID NO: 1647954 - DNA, 25 bp, Homo sapien
gcaactttcgaagctcttcaatcac

SEQ ID NO: 1647955 - DNA, 25 bp, Homo sapien
cttctcatagaagttgagcaacttt

SEQ ID NO: 1647956 - DNA, 25 bp, Homo sapien
agcagtagatgagtttggtcacctc

SEQ ID NO: 1647957 - DNA, 25 bp, Homo sapien
gagcagtagatgagtttggtcacct

SEQ ID NO: 1647958 - DNA, 25 bp, Homo sapien
ttgagcagtagatgagtttggtcac

SEQ ID NO: 1647959 - DNA, 25 bp, Homo sapien
gcagtagatgagtttggtcacctcc

SEQ ID NO: 1647960 - DNA, 25 bp, Homo sapien
tgatcagggccaacagggatactgt

SEQ ID NO: 1647961 - DNA, 25 bp, Homo sapien
tctctggtatgccatgatcagggcc

SEQ ID NO: 1647962 - DNA, 25 bp, Homo sapien
catgatcagggccaacagggatact

SEQ ID NO: 1647963 - DNA, 25 bp, Homo sapien
tcagggccaacagggatactgtctt

SEQ ID NO: 1647964 - DNA, 25 bp, Homo sapien
cttggcgtccagcgtgcgtttgagc

SEQ ID NO: 1647965 - DNA, 25 bp, Homo sapien
ggcgtccagcgtgcgtttgagctcc

SEQ ID NO: 1647966 - DNA, 25 bp, Homo sapien
ttggcgtccagcgtgcgtttgagct

SEQ ID NO: 1647967 - DNA, 25 bp, Homo sapien
cgtccagcgtgcgtttgagctcccg

SEQ ID NO: 1647968 - DNA, 25 bp, Homo sapien
tagtcgtacgggaagtagaccagga

SEQ ID NO: 1647969 - DNA, 25 bp, Homo sapien
tagatgtagtcgtacgggaagtaga

SEQ ID NO: 1647970 - DNA, 25 bp, Homo sapien
ctgctcggggtagatgtagtcgtac

SEQ ID NO: 1647971 - DNA, 25 bp, Homo sapien
tcgtacgggaagtagaccaggagcc

SEQ ID NO: 1647972 - DNA, 25 bp, Homo sapien
gtgtctcctcgctatcactgctgct

SEQ ID NO: 1647973 - DNA, 25 bp, Homo sapien
ccagagaagggtgacgggcccggcg

SEQ ID NO: 1647974 - DNA, 25 bp, Homo sapien
tgctgggtcagttcccgtcccctca

SEQ ID NO: 1647975 - DNA, 25 bp, Homo sapien
tgcccggtcgtcgagcccagagaag

SEQ ID NO: 1647976 - DNA, 25 bp, Homo sapien
ccccgcgcccgctagcgagcgcgac

SEQ ID NO: 1647977 - DNA, 25 bp, Homo sapien
ccccccgcgcccgctagcgagcgcg

SEQ ID NO: 1647978 - DNA, 25 bp, Homo sapien
gaccccccgcgcccgctagcgagcg

SEQ ID NO: 1647979 - DNA, 25 bp, Homo sapien
agaccccccgcgcccgctagcgagc

SEQ ID NO: 1647980 - DNA, 25 bp, Homo sapien
ggactgtgcagcggggtcgacccgc

SEQ ID NO: 1647981 - DNA, 25 bp, Homo sapien
actgtgcagcggggtcgacccgcct

SEQ ID NO: 1647982 - DNA, 25 bp, Homo sapien
cggactgtgcagcggggtcgacccg

SEQ ID NO: 1647983 - DNA, 25 bp, Homo sapien
gactgtgcagcggggtcgacccgcc

SEQ ID NO: 1647984 - DNA, 25 bp, Homo sapien
gagggctcgctccacctatattacg

SEQ ID NO: 1647985 - DNA, 25 bp, Homo sapien
ctatattacgagaccattggctaac

SEQ ID NO: 1647986 - DNA, 25 bp, Homo sapien
gtcgtggacatcctcgagggctcgc

SEQ ID NO: 1647987 - DNA, 25 bp, Homo sapien
tcatgaatattcagcgagaggccgg

SEQ ID NO: 1647988 - DNA, 25 bp, Homo sapien
aatccgctagggcagagccaatcgg

SEQ ID NO: 1647989 - DNA, 25 bp, Homo sapien
cgctagggcagagccaatcgggata

SEQ ID NO: 1647990 - DNA, 25 bp, Homo sapien
ccgtcaatccgctagggcagagcca

SEQ ID NO: 1647991 - DNA, 25 bp, Homo sapien
ctgcccgtcaatccgctagggcaga

SEQ ID NO: 1647992 - DNA, 25 bp, Homo sapien
cgcgtgcgcacggaaaagcgagggc

SEQ ID NO: 1647993 - DNA, 25 bp, Homo sapien
cgtgcgcacggaaaagcgagggcgg

SEQ ID NO: 1647994 - DNA, 25 bp, Homo sapien
gcgcgtgcgcacggaaaagcgaggg

SEQ ID NO: 1647995 - DNA, 25 bp, Homo sapien
gcgtgcgcacggaaaagcgagggcg

SEQ ID NO: 1647996 - DNA, 25 bp, Homo sapien
cgtcactgaggatcgtcgagggcca

SEQ ID NO: 1647997 - DNA, 25 bp, Homo sapien
tcctgcgcctgccaagattgtctga

SEQ ID NO: 1647998 - DNA, 25 bp, Homo sapien
tctgagtattgatcgaacccaggag

SEQ ID NO: 1647999 - DNA, 25 bp, Homo sapien
cactagaatttggtcctcctgcgcc

SEQ ID NO: 1648000 - DNA, 25 bp, Homo sapien
acccagaccccaagactgctgggag

SEQ ID NO: 1648001 - DNA, 25 bp, Homo sapien
gatggtgtcagcagtgactcccagg

SEQ ID NO: 1648002 - DNA, 25 bp, Homo sapien
tagagaccaatgtttcccacccaga

SEQ ID NO: 1648003 - DNA, 25 bp, Homo sapien
gcatgggaggcactttggacgggat

SEQ ID NO: 1648004 - DNA, 25 bp, Homo sapien
ccaaggctaaggcagattactaaat

SEQ ID NO: 1648005 - DNA, 25 bp, Homo sapien
ggaagtggtttcctgtccccagtga

SEQ ID NO: 1648006 - DNA, 25 bp, Homo sapien
ggtggcaaggaccaccaccagcagg

SEQ ID NO: 1648007 - DNA, 25 bp, Homo sapien
aggagaacagagaaccggtggcaag

SEQ ID NO: 1648008 - DNA, 25 bp, Homo sapien
tttactcctttgaggcttcaccctg

SEQ ID NO: 1648009 - DNA, 25 bp, Homo sapien
ctttactcctttgaggcttcaccct

SEQ ID NO: 1648010 - DNA, 25 bp, Homo sapien
actcctttgaggcttcaccctgggg

SEQ ID NO: 1648011 - DNA, 25 bp, Homo sapien
ttactcctttgaggcttcaccctgg

SEQ ID NO: 1648012 - DNA, 25 bp, Homo sapien
gatggaaccttccaatcagagcctc

SEQ ID NO: 1648013 - DNA, 25 bp, Homo sapien
cagtgtctcctaactgccataagga

SEQ ID NO: 1648014 - DNA, 25 bp, Homo sapien
catgcaaatccgctgcctgtctcta

SEQ ID NO: 1648015 - DNA, 25 bp, Homo sapien
ctctctctaacaccttggttgtctt

SEQ ID NO: 1648016 - DNA, 25 bp, Homo sapien
ggacttttcgtctcctccccatgag

SEQ ID NO: 1648017 - DNA, 25 bp, Homo sapien
catgagcaataatgagcttttcaga

SEQ ID NO: 1648018 - DNA, 25 bp, Homo sapien
tccccatgagcaataatgagctttt

SEQ ID NO: 1648019 - DNA, 25 bp, Homo sapien
tcctccccatgagcaataatgagct

SEQ ID NO: 1648020 - DNA, 25 bp, Homo sapien
ctcccaatataacggtttgttcctg

SEQ ID NO: 1648021 - DNA, 25 bp, Homo sapien
actgtcgggaggtccccatgacttc

SEQ ID NO: 1648022 - DNA, 25 bp, Homo sapien
cccaactgtcgggaggtccccatga

SEQ ID NO: 1648023 - DNA, 25 bp, Homo sapien
ctccctctcccaatataacggtttg

SEQ ID NO: 1648024 - DNA, 25 bp, Homo sapien
tgtagtcccagagagcgtacactgc

SEQ ID NO: 1648025 - DNA, 25 bp, Homo sapien
tcgccctcgcggaaggacagctcgt

SEQ ID NO: 1648026 - DNA, 25 bp, Homo sapien
cccgaagtagttccgcggcacgtag

SEQ ID NO: 1648027 - DNA, 25 bp, Homo sapien
tcgtccccgaactcggcgctgtagt

SEQ ID NO: 1648028 - DNA, 25 bp, Homo sapien
tgaaacatgccacggaggggaaggt

SEQ ID NO: 1648029 - DNA, 25 bp, Homo sapien
tctctccctagtagggggtagttgc

SEQ ID NO: 1648030 - DNA, 25 bp, Homo sapien
acccgccaggtacccaggcgccagc

SEQ ID NO: 1648031 - DNA, 25 bp, Homo sapien
cgccaggtacccaggcgccagcagc

SEQ ID NO: 1648032 - DNA, 25 bp, Homo sapien
cccgctcctgcgcacccgccaggta

SEQ ID NO: 1648033 - DNA, 25 bp, Homo sapien
tcagcataaccctcgcggtaagggt

SEQ ID NO: 1648034 - DNA, 25 bp, Homo sapien
gcgaagattgcagcgccgtgctgca

SEQ ID NO: 1648035 - DNA, 25 bp, Homo sapien
taagggtcgcacttctcgaaggcgg

SEQ ID NO: 1648036 - DNA, 25 bp, Homo sapien
ccatgcagatgactgtgtcgttgca

SEQ ID NO: 1648037 - DNA, 25 bp, Homo sapien
cacgatagagtagttggcgccgcag

SEQ ID NO: 1648038 - DNA, 25 bp, Homo sapien
agttgacattggcacccgcggtgat

SEQ ID NO: 1648039 - DNA, 25 bp, Homo sapien
ccgcagatggcgttgtgcaaggcag

SEQ ID NO: 1648040 - DNA, 25 bp, Homo sapien
atgccctcctcgttgggctggctcg

SEQ ID NO: 1648041 - DNA, 25 bp, Homo sapien
gggggaagactcagtcccgcggctg

SEQ ID NO: 1648042 - DNA, 25 bp, Homo sapien
atctgcgatgcccccgccgtgccca

SEQ ID NO: 1648043 - DNA, 25 bp, Homo sapien
gagggggaagactcagtcccgcggc

SEQ ID NO: 1648044 - DNA, 25 bp, Homo sapien
gcatctgcgatgcccccgccgtgcc

SEQ ID NO: 1648045 - DNA, 25 bp, Homo sapien
ccagagggttgaggcgcgcgcggcg

SEQ ID NO: 1648046 - DNA, 25 bp, Homo sapien
cgcggcgggccttgcgcggggagcc

SEQ ID NO: 1648047 - DNA, 25 bp, Homo sapien
ggggagcccgccttccgcagcacag

SEQ ID NO: 1648048 - DNA, 25 bp, Homo sapien
agcaccagagggttgaggcgcgcgc

SEQ ID NO: 1648049 - DNA, 25 bp, Homo sapien
attcatttattctgggctgggcgag

SEQ ID NO: 1648050 - DNA, 25 bp, Homo sapien
cagcctcatgggctttcttattttt

SEQ ID NO: 1648051 - DNA, 25 bp, Homo sapien
gtaagattcatttattctgggctgg

SEQ ID NO: 1648052 - DNA, 25 bp, Homo sapien
tttaattttcctcctgtaagattca

SEQ ID NO: 1648053 - DNA, 25 bp, Homo sapien
tcatgtagcaaacataccccggttt

SEQ ID NO: 1648054 - DNA, 25 bp, Homo sapien
catgtagcaaacataccccggtttc

SEQ ID NO: 1648055 - DNA, 25 bp, Homo sapien
ttcatgtagcaaacataccccggtt

SEQ ID NO: 1648056 - DNA, 25 bp, Homo sapien
ggaatttccgccaacacccgtgcca

SEQ ID NO: 1648057 - DNA, 25 bp, Homo sapien
tctgcggctgctctggtgggctgct

SEQ ID NO: 1648058 - DNA, 25 bp, Homo sapien
ccccatgacgatggaagaggcggct

SEQ ID NO: 1648059 - DNA, 25 bp, Homo sapien
gggctgagaggccttgctacagggc

SEQ ID NO: 1648060 - DNA, 25 bp, Homo sapien
ggaacaagagcccatcagaggacag

SEQ ID NO: 1648061 - DNA, 25 bp, Homo sapien
ttccagggcatacaaccagcacatg

SEQ ID NO: 1648062 - DNA, 25 bp, Homo sapien
tgccatctccacattaccgaaaggg

SEQ ID NO: 1648063 - DNA, 25 bp, Homo sapien
gacaagtcagttgcccaaagccatg

SEQ ID NO: 1648064 - DNA, 25 bp, Homo sapien
ggtagctattgatagcttactatgt

SEQ ID NO: 1648065 - DNA, 25 bp, Homo sapien
ctggctaatatggtagctattgata

SEQ ID NO: 1648066 - DNA, 25 bp, Homo sapien
tgcattagcccaccaaactgctagg

SEQ ID NO: 1648067 - DNA, 25 bp, Homo sapien
aatcctgtctgcattagcccaccaa

SEQ ID NO: 1648068 - DNA, 25 bp, Homo sapien
caaggtcacacagcgtggaaccagg

SEQ ID NO: 1648069 - DNA, 25 bp, Homo sapien
aggtcacacagcgtggaaccaggca

SEQ ID NO: 1648070 - DNA, 25 bp, Homo sapien
acatatgtcaataggatcgattcta

SEQ ID NO: 1648071 - DNA, 25 bp, Homo sapien
aggatcgattctatcattatttgcc

SEQ ID NO: 1648072 - DNA, 25 bp, Homo sapien
aaagaggcatttggctgtgatctcc

SEQ ID NO: 1648073 - DNA, 25 bp, Homo sapien
agggacagtgcttgtaaagaggcat

SEQ ID NO: 1648074 - DNA, 25 bp, Homo sapien
atttgtcctcccttcacccagtcct

SEQ ID NO: 1648075 - DNA, 25 bp, Homo sapien
cctctagggccctcattgctgactc

SEQ ID NO: 1648076 - DNA, 25 bp, Homo sapien
gcttaggcgggggtgctcgggtgaa

SEQ ID NO: 1648077 - DNA, 25 bp, Homo sapien
ggacccagggagcatggcgcggctg

SEQ ID NO: 1648078 - DNA, 25 bp, Homo sapien
tgctcgggtgaagaggggggaccca

SEQ ID NO: 1648079 - DNA, 25 bp, Homo sapien
cccagggagcatggcgcggctggcc

SEQ ID NO: 1648080 - DNA, 25 bp, Homo sapien
cttgaagatcatgctgagggggatg

SEQ ID NO: 1648081 - DNA, 25 bp, Homo sapien
gcttgaagatcatgctgagggggat

SEQ ID NO: 1648082 - DNA, 25 bp, Homo sapien
agcttgaagatcatgctgaggggga

SEQ ID NO: 1648083 - DNA, 25 bp, Homo sapien
cagcttgaagatcatgctgaggggg

SEQ ID NO: 1648084 - DNA, 25 bp, Homo sapien
gctggcgcggggccccgcggggctg

SEQ ID NO: 1648085 - DNA, 25 bp, Homo sapien
tggaggggggcatggggatgcggct

SEQ ID NO: 1648086 - DNA, 25 bp, Homo sapien
aggggggcatggggatgcggctgac

SEQ ID NO: 1648087 - DNA, 25 bp, Homo sapien
ctggaggggggcatggggatgcggc

SEQ ID NO: 1648088 - DNA, 25 bp, Homo sapien
agctgcccgcgtctgaacgccggtc

SEQ ID NO: 1648089 - DNA, 25 bp, Homo sapien
tgccagctgcgaggcaaagtgcccg

SEQ ID NO: 1648090 - DNA, 25 bp, Homo sapien
tctgaacgccggtcgctggccagag

SEQ ID NO: 1648091 - DNA, 25 bp, Homo sapien
tgcgaggcaaagtgcccgacggccc

SEQ ID NO: 1648092 - DNA, 25 bp, Homo sapien
tgcgcggcagggtggcgctagtgag

SEQ ID NO: 1648093 - DNA, 25 bp, Homo sapien
taattgcgcggcagggtggcgctag

SEQ ID NO: 1648094 - DNA, 25 bp, Homo sapien
cttgtaattgcgcggcagggtggcg

SEQ ID NO: 1648095 - DNA, 25 bp, Homo sapien
gcagggtggcgctagtgaggttgtc

SEQ ID NO: 1648096 - DNA, 25 bp, Homo sapien
aaggcaacagctgcaggctcggcga

SEQ ID NO: 1648097 - DNA, 25 bp, Homo sapien
ggctcggcgaggcaggccttgcgaa

SEQ ID NO: 1648098 - DNA, 25 bp, Homo sapien
gcaggccttgcgaagacgtccaggc

SEQ ID NO: 1648099 - DNA, 25 bp, Homo sapien
caaggcaacagctgcaggctcggcg

SEQ ID NO: 1648100 - DNA, 25 bp, Homo sapien
cacgtccaggtcagactcgttccag

SEQ ID NO: 1648101 - DNA, 25 bp, Homo sapien
gcgaaggcttcttctcgtacgccac

SEQ ID NO: 1648102 - DNA, 25 bp, Homo sapien
actcgttccaggctttcggaggccg

SEQ ID NO: 1648103 - DNA, 25 bp, Homo sapien
gaaggcttcttctcgtacgccacgt

SEQ ID NO: 1648104 - DNA, 25 bp, Homo sapien
ggaccctcggctgccgaagggctca

SEQ ID NO: 1648105 - DNA, 25 bp, Homo sapien
cgagggagctgcctgcgccatcgaa

SEQ ID NO: 1648106 - DNA, 25 bp, Homo sapien
tccaggctgccgtaggcgtccggct

SEQ ID NO: 1648107 - DNA, 25 bp, Homo sapien
ggcactctctgatcgtccgaacggg

SEQ ID NO: 1648108 - DNA, 25 bp, Homo sapien
gagagtctgaccacagcgactccag

SEQ ID NO: 1648109 - DNA, 25 bp, Homo sapien
gggagagtctgaccacagcgactcc

SEQ ID NO: 1648110 - DNA, 25 bp, Homo sapien
caggaggcgcgggagagtctgacca

SEQ ID NO: 1648111 - DNA, 25 bp, Homo sapien
cgcgggagagtctgaccacagcgac

SEQ ID NO: 1648112 - DNA, 25 bp, Homo sapien
aagtcccgcgcgctctggaatgcct

SEQ ID NO: 1648113 - DNA, 25 bp, Homo sapien
ttcatgtccagaaagtcccgcgcgc

SEQ ID NO: 1648114 - DNA, 25 bp, Homo sapien
tgtccagaaagtcccgcgcgctctg

SEQ ID NO: 1648115 - DNA, 25 bp, Homo sapien
cgcgcgctctggaatgcctcgctgt

SEQ ID NO: 1648116 - DNA, 25 bp, Homo sapien
gatttagtctctctcgcgcctgtgg

SEQ ID NO: 1648117 - DNA, 25 bp, Homo sapien
gattccatactgacattctctggct

SEQ ID NO: 1648118 - DNA, 25 bp, Homo sapien
tggctctcaggaaatgccaaccctg

SEQ ID NO: 1648119 - DNA, 25 bp, Homo sapien
cccgggcaggtgctgtacatcccgg

SEQ ID NO: 1648120 - DNA, 25 bp, Homo sapien
ggtgtgggcaatatccactctccag

SEQ ID NO: 1648121 - DNA, 25 bp, Homo sapien
caagattcctctagacaatgcgagc

SEQ ID NO: 1648122 - DNA, 25 bp, Homo sapien
tcgtaatgaggagtccttccctggg

SEQ ID NO: 1648123 - DNA, 25 bp, Homo sapien
tgagtctggccagtgatcaccctca

SEQ ID NO: 1648124 - DNA, 25 bp, Homo sapien
atccgggcagatcctggcacctggg

SEQ ID NO: 1648125 - DNA, 25 bp, Homo sapien
gatccgggcagatcctggcacctgg

SEQ ID NO: 1648126 - DNA, 25 bp, Homo sapien
tccgggcagatcctggcacctgggg

SEQ ID NO: 1648127 - DNA, 25 bp, Homo sapien
ggatccgggcagatcctggcacctg

SEQ ID NO: 1648128 - DNA, 25 bp, Homo sapien
tcaacagccagaaggagcgaagcct

SEQ ID NO: 1648129 - DNA, 25 bp, Homo sapien
ttcgagccagaagacaagacagtga

SEQ ID NO: 1648130 - DNA, 25 bp, Homo sapien
tctggctcccagatcgtcaagggca

SEQ ID NO: 1648131 - DNA, 25 bp, Homo sapien
tgagcctctagaagacacagtcctg

SEQ ID NO: 1648132 - DNA, 25 bp, Homo sapien
ggaggacgatttattattacactgg

SEQ ID NO: 1648133 - DNA, 25 bp, Homo sapien
gggaggacgatttattattacactg

SEQ ID NO: 1648134 - DNA, 25 bp, Homo sapien
agggctcgtgcaggacatcaaacag

SEQ ID NO: 1648135 - DNA, 25 bp, Homo sapien
ctcgtgcaggacatcaaacagcctc

SEQ ID NO: 1648136 - DNA, 25 bp, Homo sapien
gggctcgtgcaggacatcaaacagc

SEQ ID NO: 1648137 - DNA, 25 bp, Homo sapien
gctcgtgcaggacatcaaacagcct

SEQ ID NO: 1648138 - DNA, 25 bp, Homo sapien
cctggttgtgttatcaaatagtatg

SEQ ID NO: 1648139 - DNA, 25 bp, Homo sapien
tgtgtgtgtgtggtacccattaacc

SEQ ID NO: 1648140 - DNA, 25 bp, Homo sapien
ctgcgcctggctaagttattattat

SEQ ID NO: 1648141 - DNA, 25 bp, Homo sapien
gtcacctggttgtgttatcaaatag

SEQ ID NO: 1648142 - DNA, 25 bp, Homo sapien
taattgacaggatctcatgtttttt

SEQ ID NO: 1648143 - DNA, 25 bp, Homo sapien
cattatgttgtaattgacaggatct

SEQ ID NO: 1648144 - DNA, 25 bp, Homo sapien
cataataatccccagttcattatgt

SEQ ID NO: 1648145 - DNA, 25 bp, Homo sapien
cccagttcattatgttgtaattgac

SEQ ID NO: 1648146 - DNA, 25 bp, Homo sapien
ctcttatcttctgattattgattcc

SEQ ID NO: 1648147 - DNA, 25 bp, Homo sapien
cttctgattattgattccttgtcag

SEQ ID NO: 1648148 - DNA, 25 bp, Homo sapien
tagagttgttagaactcttatcttc

SEQ ID NO: 1648149 - DNA, 25 bp, Homo sapien
tcctatagagttgttagaactctta

SEQ ID NO: 1648150 - DNA, 25 bp, Homo sapien
ttttcttgtagacgtttcatgcatt

SEQ ID NO: 1648151 - DNA, 25 bp, Homo sapien
tgtagacgtttcatgcattgaggtc

SEQ ID NO: 1648152 - DNA, 25 bp, Homo sapien
gctggagcgtagtaacatgcttata

SEQ ID NO: 1648153 - DNA, 25 bp, Homo sapien
cctatgcttatagggcattactcaa

SEQ ID NO: 1648154 - DNA, 25 bp, Homo sapien
agtaaaaatgaggtgtccacttgcc

SEQ ID NO: 1648155 - DNA, 25 bp, Homo sapien
gtaaaaatgaggtgtccacttgccc

SEQ ID NO: 1648156 - DNA, 25 bp, Homo sapien
ctttggggtctcaggttgtgtttat

SEQ ID NO: 1648157 - DNA, 25 bp, Homo sapien
ttgtgtttatttggggctctctcct

SEQ ID NO: 1648158 - DNA, 25 bp, Homo sapien
cactgtgtctggtctttggttcttt

SEQ ID NO: 1648159 - DNA, 25 bp, Homo sapien
caactccttgggttctttcccagag

SEQ ID NO: 1648160 - DNA, 25 bp, Homo sapien
gggcccaggcctgggcataaggcca

SEQ ID NO: 1648161 - DNA, 25 bp, Homo sapien
gagggcccaggcctgggcataaggc

SEQ ID NO: 1648162 - DNA, 25 bp, Homo sapien
tttctgagggcccaggcctgggcat

SEQ ID NO: 1648163 - DNA, 25 bp, Homo sapien
gcccaggcctgggcataaggccaga

SEQ ID NO: 1648164 - DNA, 25 bp, Homo sapien
tcttctcttgatgcggcgatgagct

SEQ ID NO: 1648165 - DNA, 25 bp, Homo sapien
tgatgcggcgatgagctgttccaga

SEQ ID NO: 1648166 - DNA, 25 bp, Homo sapien
atgcggcgatgagctgttccagaga

SEQ ID NO: 1648167 - DNA, 25 bp, Homo sapien
tcttgatgcggcgatgagctgttcc

SEQ ID NO: 1648168 - DNA, 25 bp, Homo sapien
atggggcaggggagccattccttac

SEQ ID NO: 1648169 - DNA, 25 bp, Homo sapien
ctatggggcaggggagccattcctt

SEQ ID NO: 1648170 - DNA, 25 bp, Homo sapien
tatggggcaggggagccattcctta

SEQ ID NO: 1648171 - DNA, 25 bp, Homo sapien
ttgttgactgacttcacggtggtca

SEQ ID NO: 1648172 - DNA, 25 bp, Homo sapien
tgactgtccgttttgttgactgact

SEQ ID NO: 1648173 - DNA, 25 bp, Homo sapien
tcacggtggtcagacattcagtcac

SEQ ID NO: 1648174 - DNA, 25 bp, Homo sapien
tcaggagggtctgactgtccgtttt

SEQ ID NO: 1648175 - DNA, 25 bp, Homo sapien
tggaggcaggagtgtgtcggaagaa

SEQ ID NO: 1648176 - DNA, 25 bp, Homo sapien
ggaggcaggagtgtgtcggaagaag

SEQ ID NO: 1648177 - DNA, 25 bp, Homo sapien
gtggaggcaggagtgtgtcggaaga

SEQ ID NO: 1648178 - DNA, 25 bp, Homo sapien
gggtggaggcaggagtgtgtcggaa

SEQ ID NO: 1648179 - DNA, 25 bp, Homo sapien
ttaaaattggaactgaagctcaacc

SEQ ID NO: 1648180 - DNA, 25 bp, Homo sapien
agctcaaccacccaggagctgcggg

SEQ ID NO: 1648181 - DNA, 25 bp, Homo sapien
aatggacagtgccttaaaattggaa

SEQ ID NO: 1648182 - DNA, 25 bp, Homo sapien
cagggatgaatggacagtgccttaa

SEQ ID NO: 1648183 - DNA, 25 bp, Homo sapien
cgctggtttctgctcataggccttg

SEQ ID NO: 1648184 - DNA, 25 bp, Homo sapien
ttctccatcaggaggtccgctggtt

SEQ ID NO: 1648185 - DNA, 25 bp, Homo sapien
gggagacgaagtcctgctctagctt

SEQ ID NO: 1648186 - DNA, 25 bp, Homo sapien
ttgtaggtctccaggtaccgcccag

SEQ ID NO: 1648187 - DNA, 25 bp, Homo sapien
gcaagaagccaacctcatgaaatgt

SEQ ID NO: 1648188 - DNA, 25 bp, Homo sapien
gcttcagtaacctgtgatagcacca

SEQ ID NO: 1648189 - DNA, 25 bp, Homo sapien
gactgcctgagcctgtcaagttgag

SEQ ID NO: 1648190 - DNA, 25 bp, Homo sapien
gtaagtgccaaaagccacgcctggc

SEQ ID NO: 1648191 - DNA, 25 bp, Homo sapien
ccaggtggagcctgaatgaggcagg

SEQ ID NO: 1648192 - DNA, 25 bp, Homo sapien
cccaggtggagcctgaatgaggcag

SEQ ID NO: 1648193 - DNA, 25 bp, Homo sapien
aggtggagcctgaatgaggcaggga

SEQ ID NO: 1648194 - DNA, 25 bp, Homo sapien
caggtggagcctgaatgaggcaggg

SEQ ID NO: 1648195 - DNA, 25 bp, Homo sapien
aggatcaatgtgcagtcggccagga

SEQ ID NO: 1648196 - DNA, 25 bp, Homo sapien
tgtgcagtcggccaggatacacatc

SEQ ID NO: 1648197 - DNA, 25 bp, Homo sapien
gatacacatcttagccagctccttg

SEQ ID NO: 1648198 - DNA, 25 bp, Homo sapien
tccaggcgaggatcaatgtgcagtc

SEQ ID NO: 1648199 - DNA, 25 bp, Homo sapien
tggaggagaaaatcagaattagaaa

SEQ ID NO: 1648200 - DNA, 25 bp, Homo sapien
ctggaggagaaaatcagaattagaa

SEQ ID NO: 1648201 - DNA, 25 bp, Homo sapien
ggaggagaaaatcagaattagaaac

SEQ ID NO: 1648202 - DNA, 25 bp, Homo sapien
tctgcagccgcccatggatgtagtc

SEQ ID NO: 1648203 - DNA, 25 bp, Homo sapien
acctggacaagcaggacccgcaagg

SEQ ID NO: 1648204 - DNA, 25 bp, Homo sapien
caggacccgcaaggcgaagttcttc

SEQ ID NO: 1648205 - DNA, 25 bp, Homo sapien
cgcccatggatgtagtctgggtgca

SEQ ID NO: 1648206 - DNA, 25 bp, Homo sapien
caaggggagaacaggtgccaggggc

SEQ ID NO: 1648207 - DNA, 25 bp, Homo sapien
gcttcaaggggagaacaggtgccag

SEQ ID NO: 1648208 - DNA, 25 bp, Homo sapien
ttcaaggggagaacaggtgccaggg

SEQ ID NO: 1648209 - DNA, 25 bp, Homo sapien
cttcaaggggagaacaggtgccagg

SEQ ID NO: 1648210 - DNA, 25 bp, Homo sapien
ccagcacatagtcgggaattacgtc

SEQ ID NO: 1648211 - DNA, 25 bp, Homo sapien
ttacgtcgccaaattcccagggcac

SEQ ID NO: 1648212 - DNA, 25 bp, Homo sapien
aaattcccagggcacattgcgcacg

SEQ ID NO: 1648213 - DNA, 25 bp, Homo sapien
cgaacttcagtacgggattgcccct

SEQ ID NO: 1648214 - DNA, 25 bp, Homo sapien
ctctgtgtagatcggaataagggct

SEQ ID NO: 1648215 - DNA, 25 bp, Homo sapien
ctgccgagggctcacaatgatgctg

SEQ ID NO: 1648216 - DNA, 25 bp, Homo sapien
ggaaggctctgtgtagatcggaata

SEQ ID NO: 1648217 - DNA, 25 bp, Homo sapien
tgagatggcatattcggcgtaggtc

SEQ ID NO: 1648218 - DNA, 25 bp, Homo sapien
ccttcctcctaatgtcccttccaga

SEQ ID NO: 1648219 - DNA, 25 bp, Homo sapien
agcctccactctggtcccagccacc

SEQ ID NO: 1648220 - DNA, 25 bp, Homo sapien
tcgaggggtatcacaaatttcttcc

SEQ ID NO: 1648221 - DNA, 25 bp, Homo sapien
aggagggacctcatcctcgtcgagg

SEQ ID NO: 1648222 - DNA, 25 bp, Homo sapien
tccaggagggacctcatcctcgtcg

SEQ ID NO: 1648223 - DNA, 25 bp, Homo sapien
ctcgtcgaggggtatcacaaatttc

SEQ ID NO: 1648224 - DNA, 25 bp, Homo sapien
tggcgtctacgttctcatcccgcag

SEQ ID NO: 1648225 - DNA, 25 bp, Homo sapien
gagcgagtgagccactggcgtctac

SEQ ID NO: 1648226 - DNA, 25 bp, Homo sapien
gagccactggcgtctacgttctcat

SEQ ID NO: 1648227 - DNA, 25 bp, Homo sapien
aaagggaaggtgccaggagcgagtg

SEQ ID NO: 1648228 - DNA, 25 bp, Homo sapien
tcccccacaaaactccgagagctcc

SEQ ID NO: 1648229 - DNA, 25 bp, Homo sapien
gtcccccacaaaactccgagagctc

SEQ ID NO: 1648230 - DNA, 25 bp, Homo sapien
ccccacaaaactccgagagctccat

SEQ ID NO: 1648231 - DNA, 25 bp, Homo sapien
cgtcccccacaaaactccgagagct

SEQ ID NO: 1648232 - DNA, 25 bp, Homo sapien
cgctagaggctctgtaacgccacgc

SEQ ID NO: 1648233 - DNA, 25 bp, Homo sapien
acccagcgctagaggctctgtaacg

SEQ ID NO: 1648234 - DNA, 25 bp, Homo sapien
caacacccagcgctagaggctctgt

SEQ ID NO: 1648235 - DNA, 25 bp, Homo sapien
cagcgctagaggctctgtaacgcca

SEQ ID NO: 1648236 - DNA, 25 bp, Homo sapien
cggcccccgaggctagcatctggac

SEQ ID NO: 1648237 - DNA, 25 bp, Homo sapien
gctagcatctggacgccctccccac

SEQ ID NO: 1648238 - DNA, 25 bp, Homo sapien
ccggcccccgaggctagcatctgga

SEQ ID NO: 1648239 - DNA, 25 bp, Homo sapien
ggtccgggcctcacggtttcagcgc

SEQ ID NO: 1648240 - DNA, 25 bp, Homo sapien
gggcctcacggtttcagcgccgcga

SEQ ID NO: 1648241 - DNA, 25 bp, Homo sapien
ctgtggtccgggcctcacggtttca

SEQ ID NO: 1648242 - DNA, 25 bp, Homo sapien
gcctcacggtttcagcgccgcgagg

SEQ ID NO: 1648243 - DNA, 25 bp, Homo sapien
tcctgtgcgagtccgtgctggtgac

SEQ ID NO: 1648244 - DNA, 25 bp, Homo sapien
tggcctgaggatctggctcccaaac

SEQ ID NO: 1648245 - DNA, 25 bp, Homo sapien
cagatcgcaggagatccaacttggt

SEQ ID NO: 1648246 - DNA, 25 bp, Homo sapien
tgtcctcccggagcttacggttcag

SEQ ID NO: 1648247 - DNA, 25 bp, Homo sapien
ctcaataaacattctggcctttttg

SEQ ID NO: 1648248 - DNA, 25 bp, Homo sapien
gtgacccacggagcctggatgaaga

SEQ ID NO: 1648249 - DNA, 25 bp, Homo sapien
tgagacctttattctgttacgcagg

SEQ ID NO: 1648250 - DNA, 25 bp, Homo sapien
ggtgtgcaccgccagagctggctat

SEQ ID NO: 1648251 - DNA, 25 bp, Homo sapien
gggactcacgggaataaaagcagaa

SEQ ID NO: 1648252 - DNA, 25 bp, Homo sapien
cccgccccaggagagatgtattttc

SEQ ID NO: 1648253 - DNA, 25 bp, Homo sapien
cgcgcccggtcgtctttctctgaga

SEQ ID NO: 1648254 - DNA, 25 bp, Homo sapien
gacagagagatcagagatagggttc

SEQ ID NO: 1648255 - DNA, 25 bp, Homo sapien
tcagcacagcaaggattccaaccac

SEQ ID NO: 1648256 - DNA, 25 bp, Homo sapien
cacagccaggattcagcacagcaag

SEQ ID NO: 1648257 - DNA, 25 bp, Homo sapien
gccaggattcagcacagcaaggatt

SEQ ID NO: 1648258 - DNA, 25 bp, Homo sapien
ttcagcacagcaaggattccaacca

SEQ ID NO: 1648259 - DNA, 25 bp, Homo sapien
gggccttgactcagcctggagatca

SEQ ID NO: 1648260 - DNA, 25 bp, Homo sapien
caatgatgagcccagattggcagag

SEQ ID NO: 1648261 - DNA, 25 bp, Homo sapien
gacttggaggaaaagactatgagcc

SEQ ID NO: 1648262 - DNA, 25 bp, Homo sapien
gagacaaacctatccccagacaatg

SEQ ID NO: 1648263 - DNA, 25 bp, Homo sapien
gacccgtgcgtaacggctgacgcgc

SEQ ID NO: 1648264 - DNA, 25 bp, Homo sapien
gcgctggaatcctccgtctgacgcg

SEQ ID NO: 1648265 - DNA, 25 bp, Homo sapien
ggctgacgcgctggaatcctccgtc

SEQ ID NO: 1648266 - DNA, 25 bp, Homo sapien
ctgacgtcccgggagcgttctattt

SEQ ID NO: 1648267 - DNA, 25 bp, Homo sapien
cctacgtcctcccttggtctgagag

SEQ ID NO: 1648268 - DNA, 25 bp, Homo sapien
tgttactccttgagggaacaaggga

SEQ ID NO: 1648269 - DNA, 25 bp, Homo sapien
gggaattgtcaactttccttctcta

SEQ ID NO: 1648270 - DNA, 25 bp, Homo sapien
gagagttccctgctgtatgcctgca

SEQ ID NO: 1648271 - DNA, 25 bp, Homo sapien
caaagcgagccgttgaattggaaac

SEQ ID NO: 1648272 - DNA, 25 bp, Homo sapien
ctaggtcacgttggccctcaaagcg

SEQ ID NO: 1648273 - DNA, 25 bp, Homo sapien
ccaatatttttggactggcagactc

SEQ ID NO: 1648274 - DNA, 25 bp, Homo sapien
tgaaaaacattccacgtgccccttg

SEQ ID NO: 1648275 - DNA, 25 bp, Homo sapien
gacagctacaggtttgaagcctgca

SEQ ID NO: 1648276 - DNA, 25 bp, Homo sapien
tagacagctacaggtttgaagcctg

SEQ ID NO: 1648277 - DNA, 25 bp, Homo sapien
ctagacagctacaggtttgaagcct

SEQ ID NO: 1648278 - DNA, 25 bp, Homo sapien
cagctacaggtttgaagcctgcacc

SEQ ID NO: 1648279 - DNA, 25 bp, Homo sapien
aaaggtgtgagatggttgacttcaa

SEQ ID NO: 1648280 - DNA, 25 bp, Homo sapien
cttttagagttatggtcgcgtcctt

SEQ ID NO: 1648281 - DNA, 25 bp, Homo sapien
taagttctccccactcatttatcgt

SEQ ID NO: 1648282 - DNA, 25 bp, Homo sapien
cccactcatttatcgtgagagatgt

SEQ ID NO: 1648283 - DNA, 25 bp, Homo sapien
ttatatgccaggcccaatgccaagg

SEQ ID NO: 1648284 - DNA, 25 bp, Homo sapien
tacatgtaggtatagttatggttga

SEQ ID NO: 1648285 - DNA, 25 bp, Homo sapien
tattataactccttactgtgcattt

SEQ ID NO: 1648286 - DNA, 25 bp, Homo sapien
caagcaatactggtttctggtggca

SEQ ID NO: 1648287 - DNA, 25 bp, Homo sapien
aacttctggtctcaagtgatccgcc

SEQ ID NO: 1648288 - DNA, 25 bp, Homo sapien
gaacttctggtctcaagtgatccgc

SEQ ID NO: 1648289 - DNA, 25 bp, Homo sapien
tctcccagattcaagcgactctcat

SEQ ID NO: 1648290 - DNA, 25 bp, Homo sapien
catctcccagattcaagcgactctc

SEQ ID NO: 1648291 - DNA, 25 bp, Homo sapien
ggaaatgtagtcctggtcgctcagg

SEQ ID NO: 1648292 - DNA, 25 bp, Homo sapien
ctgtctaggcaactacaagtcccag

SEQ ID NO: 1648293 - DNA, 25 bp, Homo sapien
taattagcgcagagtccctagtggg

SEQ ID NO: 1648294 - DNA, 25 bp, Homo sapien
caaggtgcctcgtctttcctggact

SEQ ID NO: 1648295 - DNA, 25 bp, Homo sapien
tcattcggctttggctttggatccg

SEQ ID NO: 1648296 - DNA, 25 bp, Homo sapien
gctttggatccggagactgcggctg

SEQ ID NO: 1648297 - DNA, 25 bp, Homo sapien
ctttggctttggatccggagactgc

SEQ ID NO: 1648298 - DNA, 25 bp, Homo sapien
tttggatccggagactgcggctgct

SEQ ID NO: 1648299 - DNA, 25 bp, Homo sapien
cctagtggcctacattggaattgcc

SEQ ID NO: 1648300 - DNA, 25 bp, Homo sapien
gggaaactgaccaagagcccgaagc

SEQ ID NO: 1648301 - DNA, 25 bp, Homo sapien
cagcgagagtagaaaggaaaggttc

SEQ ID NO: 1648302 - DNA, 25 bp, Homo sapien
ggacattaccccaggagatttgcgg

SEQ ID NO: 1648303 - DNA, 25 bp, Homo sapien
tagctttgatgtggctcaactgatt

SEQ ID NO: 1648304 - DNA, 25 bp, Homo sapien
tgtggctcaactgattggtcaccaa

SEQ ID NO: 1648305 - DNA, 25 bp, Homo sapien
gattggtcaccaaccccacatattg

SEQ ID NO: 1648306 - DNA, 25 bp, Homo sapien
caaccccacatattggtcgatctga

SEQ ID NO: 1648307 - DNA, 25 bp, Homo sapien
gacatgttacttagactctggttgt

SEQ ID NO: 1648308 - DNA, 25 bp, Homo sapien
agactctggttgtattgggaaggtg

SEQ ID NO: 1648309 - DNA, 25 bp, Homo sapien
gataagacatgttacttagactctg

SEQ ID NO: 1648310 - DNA, 25 bp, Homo sapien
cctggctgatgctgataagacatgt

SEQ ID NO: 1648311 - DNA, 25 bp, Homo sapien
ctgtcaatgggaccccggttctgga

SEQ ID NO: 1648312 - DNA, 25 bp, Homo sapien
tgacaactgagggtgtcacactcac

SEQ ID NO: 1648313 - DNA, 25 bp, Homo sapien
tggtcagacccccatgtttagctgg

SEQ ID NO: 1648314 - DNA, 25 bp, Homo sapien
tgtctggccgggacatctgtcaatg

SEQ ID NO: 1648315 - DNA, 25 bp, Homo sapien
gcagggggatggtgaatagaccaat

SEQ ID NO: 1648316 - DNA, 25 bp, Homo sapien
tggtgctgccggtacagcaggggga

SEQ ID NO: 1648317 - DNA, 25 bp, Homo sapien
agcagggggatggtgaatagaccaa

SEQ ID NO: 1648318 - DNA, 25 bp, Homo sapien
gagatgggggcgtcagggtgttccc

SEQ ID NO: 1648319 - DNA, 25 bp, Homo sapien
cccaccagactccaagtccccattt

SEQ ID NO: 1648320 - DNA, 25 bp, Homo sapien
gcgtcagggtgttcccaagagatga

SEQ ID NO: 1648321 - DNA, 25 bp, Homo sapien
tgtgggtacagagatgggggcgtca

SEQ ID NO: 1648322 - DNA, 25 bp, Homo sapien
ccagaatgagaagagtcaaaccatt

SEQ ID NO: 1648323 - DNA, 25 bp, Homo sapien
gaagagtcaaaccattgaagatggc

SEQ ID NO: 1648324 - DNA, 25 bp, Homo sapien
cacgaaggtcaagatgtagaagagg

SEQ ID NO: 1648325 - DNA, 25 bp, Homo sapien
ttgaagatggcacccacgaaggtca

SEQ ID NO: 1648326 - DNA, 25 bp, Homo sapien
cgggaattccctctcatgctgtgaa

SEQ ID NO: 1648327 - DNA, 25 bp, Homo sapien
cccctagccatgcagaggtgaatgg

SEQ ID NO: 1648328 - DNA, 25 bp, Homo sapien
tcagcagagcccaccgggaattccc

SEQ ID NO: 1648329 - DNA, 25 bp, Homo sapien
tgtgaatttacccaacagtcgccct

SEQ ID NO: 1648330 - DNA, 25 bp, Homo sapien
agtcagggtgaggtccacatccagg

SEQ ID NO: 1648331 - DNA, 25 bp, Homo sapien
gaatccacgaggtcttctaccagga

SEQ ID NO: 1648332 - DNA, 25 bp, Homo sapien
tggtgggacaaacgttccgtctgct

SEQ ID NO: 1648333 - DNA, 25 bp, Homo sapien
ccgtctgctcccgagtcagggtgag

SEQ ID NO: 1648334 - DNA, 25 bp, Homo sapien
tgtgaagaccactcctgacgtcctc

SEQ ID NO: 1648335 - DNA, 25 bp, Homo sapien
gacacgatgctaaagtgcaggaggc

SEQ ID NO: 1648336 - DNA, 25 bp, Homo sapien
gcactttgcggtaaaccctgagaga

SEQ ID NO: 1648337 - DNA, 25 bp, Homo sapien
tgtccttccagtacagcaggtccgc

SEQ ID NO: 1648338 - DNA, 25 bp, Homo sapien
ggcaccacgatatcgtgctaatttt

SEQ ID NO: 1648339 - DNA, 25 bp, Homo sapien
ggtggcaccacgatatcgtgctaat

SEQ ID NO: 1648340 - DNA, 25 bp, Homo sapien
gtggcaccacgatatcgtgctaatt

SEQ ID NO: 1648341 - DNA, 25 bp, Homo sapien
caggtggcaccacgatatcgtgcta

SEQ ID NO: 1648342 - DNA, 25 bp, Homo sapien
ctccctccccatagcagggccctcc

SEQ ID NO: 1648343 - DNA, 25 bp, Homo sapien
tcctagtggccggcgccggtggatg

SEQ ID NO: 1648344 - DNA, 25 bp, Homo sapien
tgttctggcccgtctggcccctgag

SEQ ID NO: 1648345 - DNA, 25 bp, Homo sapien
gtccctcttagaggctcacccctca

SEQ ID NO: 1648346 - DNA, 25 bp, Homo sapien
tgtctttaaccattccatagctgtt

SEQ ID NO: 1648347 - DNA, 25 bp, Homo sapien
tggaaccgtcttgtaaacagccaaa

SEQ ID NO: 1648348 - DNA, 25 bp, Homo sapien
cagtagaacccggaggacaggagta

SEQ ID NO: 1648349 - DNA, 25 bp, Homo sapien
gggacaccgctgcttctcggggatt

SEQ ID NO: 1648350 - DNA, 25 bp, Homo sapien
aaaaagcggagtttatcacgtctag

SEQ ID NO: 1648351 - DNA, 25 bp, Homo sapien
tactgttcctttgcgaggttggtcc

SEQ ID NO: 1648352 - DNA, 25 bp, Homo sapien
tgcgaggttggtccctttaattcaa

SEQ ID NO: 1648353 - DNA, 25 bp, Homo sapien
gtctagccagatgtgatatcacgtc

SEQ ID NO: 1648354 - DNA, 25 bp, Homo sapien
tttgccttctgtgggccaatgcagc

SEQ ID NO: 1648355 - DNA, 25 bp, Homo sapien
ccttctgtgggccaatgcagcatct

SEQ ID NO: 1648356 - DNA, 25 bp, Homo sapien
tgccttctgtgggccaatgcagcat

SEQ ID NO: 1648357 - DNA, 25 bp, Homo sapien
cttttgccttctgtgggccaatgca

SEQ ID NO: 1648358 - DNA, 25 bp, Homo sapien
cagagttcgaatctcgcgatcggga

SEQ ID NO: 1648359 - DNA, 25 bp, Homo sapien
tgagcaagtcggagtcgtaggtcca

SEQ ID NO: 1648360 - DNA, 25 bp, Homo sapien
taattggtccgtgctatcgaggcac

SEQ ID NO: 1648361 - DNA, 25 bp, Homo sapien
ggcgtggctccaccgtgaattctaa

SEQ ID NO: 1648362 - DNA, 25 bp, Homo sapien
ttcttggaggtgccccaaggagaaa

SEQ ID NO: 1648363 - DNA, 25 bp, Homo sapien
ttggaggtgccccaaggagaaacca

SEQ ID NO: 1648364 - DNA, 25 bp, Homo sapien
ctgatacggtagagagaggaggccg

SEQ ID NO: 1648365 - DNA, 25 bp, Homo sapien
atacggtagagagaggaggccgtga

SEQ ID NO: 1648366 - DNA, 25 bp, Homo sapien
tggtccaaccgaagcctcaggtctt

SEQ ID NO: 1648367 - DNA, 25 bp, Homo sapien
cgatgtaggagaaggtcagctcccg

SEQ ID NO: 1648368 - DNA, 25 bp, Homo sapien
tgtgtgcagctctcgaaaatcagag

SEQ ID NO: 1648369 - DNA, 25 bp, Homo sapien
tcaggtcttccagagggcgctcgga

SEQ ID NO: 1648370 - DNA, 25 bp, Homo sapien
ttctgtggaatcaggagttgaggag

SEQ ID NO: 1648371 - DNA, 25 bp, Homo sapien
tctgtggaatcaggagttgaggagg

SEQ ID NO: 1648372 - DNA, 25 bp, Homo sapien
cttctgtggaatcaggagttgagga

SEQ ID NO: 1648373 - DNA, 25 bp, Homo sapien
cgaatcacagaagtgtcccagtcct

SEQ ID NO: 1648374 - DNA, 25 bp, Homo sapien
gaatcgaagactcttagaagcttag

SEQ ID NO: 1648375 - DNA, 25 bp, Homo sapien
tgcgagagggaaagaatcgaagact

SEQ ID NO: 1648376 - DNA, 25 bp, Homo sapien
gaagcttagactgtccgaatcacag

SEQ ID NO: 1648377 - DNA, 25 bp, Homo sapien
gggaggggagagcttcctttgtctc

SEQ ID NO: 1648378 - DNA, 25 bp, Homo sapien
ctttgtctcctatgcctcctccccc

SEQ ID NO: 1648379 - DNA, 25 bp, Homo sapien
cctttgtctcctatgcctcctcccc

SEQ ID NO: 1648380 - DNA, 25 bp, Homo sapien
ggtcaggctacccccgtcgccgcca

SEQ ID NO: 1648381 - DNA, 25 bp, Homo sapien
tgggcgaagaccggcaggacctgcc

SEQ ID NO: 1648382 - DNA, 25 bp, Homo sapien
tgcagtgggcgaagaccggcaggac

SEQ ID NO: 1648383 - DNA, 25 bp, Homo sapien
cagtgggcgaagaccggcaggacct

SEQ ID NO: 1648384 - DNA, 25 bp, Homo sapien
agtgggcgaagaccggcaggacctg

SEQ ID NO: 1648385 - DNA, 25 bp, Homo sapien
gggcctgcatcgggacccccgccca

SEQ ID NO: 1648386 - DNA, 25 bp, Homo sapien
gcccccctcgggcctgcatcgggac

SEQ ID NO: 1648387 - DNA, 25 bp, Homo sapien
gcctgcatcgggacccccgcccact

SEQ ID NO: 1648388 - DNA, 25 bp, Homo sapien
ggcctgcatcgggacccccgcccac

SEQ ID NO: 1648389 - DNA, 25 bp, Homo sapien
ctggtgctcggctcggcgggggcgg

SEQ ID NO: 1648390 - DNA, 25 bp, Homo sapien
cctggtgctcggctcggcgggggcg

SEQ ID NO: 1648391 - DNA, 25 bp, Homo sapien
ccctggtgctcggctcggcgggggc

SEQ ID NO: 1648392 - DNA, 25 bp, Homo sapien
caggctgaggacgagttcatgctcc

SEQ ID NO: 1648393 - DNA, 25 bp, Homo sapien
gtttctgtacctggcgcactgcggt

SEQ ID NO: 1648394 - DNA, 25 bp, Homo sapien
tacagctcgtttctgcggagccaga

SEQ ID NO: 1648395 - DNA, 25 bp, Homo sapien
tgggcgactttacctacaaggaggc

SEQ ID NO: 1648396 - DNA, 25 bp, Homo sapien
aacacagttttcaggactctggcct

SEQ ID NO: 1648397 - DNA, 25 bp, Homo sapien
tctcagatctgccaggtctcagaag

SEQ ID NO: 1648398 - DNA, 25 bp, Homo sapien
cagaagagtgcggagaggtaaggat

SEQ ID NO: 1648399 - DNA, 25 bp, Homo sapien
tctttctcagaactgtgtgcctctg

SEQ ID NO: 1648400 - DNA, 25 bp, Homo sapien
tgaggataagggatttgcctgatat

SEQ ID NO: 1648401 - DNA, 25 bp, Homo sapien
gataagggatttgcctgatatattt

SEQ ID NO: 1648402 - DNA, 25 bp, Homo sapien
gaggataagggatttgcctgatata

SEQ ID NO: 1648403 - DNA, 25 bp, Homo sapien
agtgaggataagggatttgcctgat

SEQ ID NO: 1648404 - DNA, 25 bp, Homo sapien
gaaggaaggccaatgtaggaaccca

SEQ ID NO: 1648405 - DNA, 25 bp, Homo sapien
ctacatgtaccagcggaaggaagga

SEQ ID NO: 1648406 - DNA, 25 bp, Homo sapien
gaggcctgacagctgttgtcctttg

SEQ ID NO: 1648407 - DNA, 25 bp, Homo sapien
gaagtccaaccccacgcatttgggc

SEQ ID NO: 1648408 - DNA, 25 bp, Homo sapien
agacataggtaggtcctgccccaga

SEQ ID NO: 1648409 - DNA, 25 bp, Homo sapien
gatcaagacataggtaggtcctgcc

SEQ ID NO: 1648410 - DNA, 25 bp, Homo sapien
cacaggcacactcccgggaaaccac

SEQ ID NO: 1648411 - DNA, 25 bp, Homo sapien
gggaaaccacctcccagatcaagac

SEQ ID NO: 1648412 - DNA, 25 bp, Homo sapien
tgattactcggacctacagagggtg

SEQ ID NO: 1648413 - DNA, 25 bp, Homo sapien
tacttttccggctccaaggatccag

SEQ ID NO: 1648414 - DNA, 25 bp, Homo sapien
gcaagagagatctaggtctggcccc

SEQ ID NO: 1648415 - DNA, 25 bp, Homo sapien
cactggcatgccgtatgatcctaga

SEQ ID NO: 1648416 - DNA, 25 bp, Homo sapien
tggctccttccccttttctatgagg

SEQ ID NO: 1648417 - DNA, 25 bp, Homo sapien
ggcttgccccatttggggcagctat

SEQ ID NO: 1648418 - DNA, 25 bp, Homo sapien
aatgctatagccctgggcttgcccc

SEQ ID NO: 1648419 - DNA, 25 bp, Homo sapien
tgggatgtgggagtttttaaatgct

SEQ ID NO: 1648420 - DNA, 25 bp, Homo sapien
gcttcttgaaaatgggcccctgcag

SEQ ID NO: 1648421 - DNA, 25 bp, Homo sapien
ttcttgaaaatgggcccctgcagaa

SEQ ID NO: 1648422 - DNA, 25 bp, Homo sapien
cttcttgaaaatgggcccctgcaga

SEQ ID NO: 1648423 - DNA, 25 bp, Homo sapien
atgacattttgcagacgcacattat

SEQ ID NO: 1648424 - DNA, 25 bp, Homo sapien
ggaactacaggcgtttggtatgacg

SEQ ID NO: 1648425 - DNA, 25 bp, Homo sapien
cgtttggtatgacgcctagctaata

SEQ ID NO: 1648426 - DNA, 25 bp, Homo sapien
tgcagacgcacattatggttctcag

SEQ ID NO: 1648427 - DNA, 25 bp, Homo sapien
cctttaattagaaaacgctgacagt

SEQ ID NO: 1648428 - DNA, 25 bp, Homo sapien
aaacgctgacagtcgatttataaag

SEQ ID NO: 1648429 - DNA, 25 bp, Homo sapien
tagaaaacgctgacagtcgatttat

SEQ ID NO: 1648430 - DNA, 25 bp, Homo sapien
ctgacagtcgatttataaagtagca

SEQ ID NO: 1648431 - DNA, 25 bp, Homo sapien
tcagttgtcgggtgggtaggtcata

SEQ ID NO: 1648432 - DNA, 25 bp, Homo sapien
cctggtggaataccccgcttggaca

SEQ ID NO: 1648433 - DNA, 25 bp, Homo sapien
ctgagggacaggtagtccccctgga

SEQ ID NO: 1648434 - DNA, 25 bp, Homo sapien
cctttgcgtgaaggagggcggagga

SEQ ID NO: 1648435 - DNA, 25 bp, Homo sapien
ggagctaacgcagtccaggattcac

SEQ ID NO: 1648436 - DNA, 25 bp, Homo sapien
tgttggatcgatccactcagggagg

SEQ ID NO: 1648437 - DNA, 25 bp, Homo sapien
tgggcgaactgacgatgacttaggt

SEQ ID NO: 1648438 - DNA, 25 bp, Homo sapien
ctggtgaccaagtgactgagcctga

SEQ ID NO: 1648439 - DNA, 25 bp, Homo sapien
cccctaagactgaggtagatggaag

SEQ ID NO: 1648440 - DNA, 25 bp, Homo sapien
gggaagtccgtaggaactttgtgca

SEQ ID NO: 1648441 - DNA, 25 bp, Homo sapien
caatggtctgtaccaatgaggagga

SEQ ID NO: 1648442 - DNA, 25 bp, Homo sapien
gtgttcggtgcaaaggatgagcgtc

SEQ ID NO: 1648443 - DNA, 25 bp, Homo sapien
gagacttcgcagtccagacagcagt

SEQ ID NO: 1648444 - DNA, 25 bp, Homo sapien
tcttggaacgttccacctgcaggag

SEQ ID NO: 1648445 - DNA, 25 bp, Homo sapien
tagggaggttcgatcagctccagcc

SEQ ID NO: 1648446 - DNA, 25 bp, Homo sapien
aaaagaggtggacgtcctgctggcc

SEQ ID NO: 1648447 - DNA, 25 bp, Homo sapien
ctcggacgccggcgcaactgggggt

SEQ ID NO: 1648448 - DNA, 25 bp, Homo sapien
ctatttctcggacgccggcgcaact

SEQ ID NO: 1648449 - DNA, 25 bp, Homo sapien
tatttctcggacgccggcgcaactg

SEQ ID NO: 1648450 - DNA, 25 bp, Homo sapien
tttctcggacgccggcgcaactggg

SEQ ID NO: 1648451 - DNA, 25 bp, Homo sapien
gggcgagctgcgtcgacgtcgcctg

SEQ ID NO: 1648452 - DNA, 25 bp, Homo sapien
ccagggcgagctgcgtcgacgtcgc

SEQ ID NO: 1648453 - DNA, 25 bp, Homo sapien
gcgagctgcgtcgacgtcgcctgca

SEQ ID NO: 1648454 - DNA, 25 bp, Homo sapien
tccagggcgagctgcgtcgacgtcg

SEQ ID NO: 1648455 - DNA, 25 bp, Homo sapien
tgatggcagcggcattgaaacccat

SEQ ID NO: 1648456 - DNA, 25 bp, Homo sapien
gtgatgaagatgatgccctcgccca

SEQ ID NO: 1648457 - DNA, 25 bp, Homo sapien
gctgctgcaactggtggcgccaata

SEQ ID NO: 1648458 - DNA, 25 bp, Homo sapien
gcaccctcgttcagcggcttgatgg

SEQ ID NO: 1648459 - DNA, 25 bp, Homo sapien
gaaggtggagtgtcagcttttgcat

SEQ ID NO: 1648460 - DNA, 25 bp, Homo sapien
catgtgaaggtggagtgtcagcttt

SEQ ID NO: 1648461 - DNA, 25 bp, Homo sapien
tgtgaaggtggagtgtcagcttttg

SEQ ID NO: 1648462 - DNA, 25 bp, Homo sapien
tcatgtgaaggtggagtgtcagctt

SEQ ID NO: 1648463 - DNA, 25 bp, Homo sapien
cactaaaccagtggcatgtgaagca

SEQ ID NO: 1648464 - DNA, 25 bp, Homo sapien
aatgccagctggactcactgcttcg

SEQ ID NO: 1648465 - DNA, 25 bp, Homo sapien
gattctcaaactaactatgtgaccc

SEQ ID NO: 1648466 - DNA, 25 bp, Homo sapien
cactgcttcgtatcgtgccacattt

SEQ ID NO: 1648467 - DNA, 25 bp, Homo sapien
ctcctcttttgaggaacttgcatcc

SEQ ID NO: 1648468 - DNA, 25 bp, Homo sapien
ccttcatactgctcctcctcttttg

SEQ ID NO: 1648469 - DNA, 25 bp, Homo sapien
ctcttttgaggaacttgcatcctct

SEQ ID NO: 1648470 - DNA, 25 bp, Homo sapien
ctgctgcaggactgtcctccttcat

SEQ ID NO: 1648471 - DNA, 25 bp, Homo sapien
catacactacatataatagatgatg

SEQ ID NO: 1648472 - DNA, 25 bp, Homo sapien
agatgatgttatgttacacatgaca

SEQ ID NO: 1648473 - DNA, 25 bp, Homo sapien
ttgtataaatatgcacacgatggat

SEQ ID NO: 1648474 - DNA, 25 bp, Homo sapien
cacgatggattacataaactctgct

SEQ ID NO: 1648475 - DNA, 25 bp, Homo sapien
tatagtcctgagtcactccagaggg

SEQ ID NO: 1648476 - DNA, 25 bp, Homo sapien
ccagagggaggattccggattcagc

SEQ ID NO: 1648477 - DNA, 25 bp, Homo sapien
gcatctgtaagacccggtgacggca

SEQ ID NO: 1648478 - DNA, 25 bp, Homo sapien
gctccgtgagccaatagatcaggtt

SEQ ID NO: 1648479 - DNA, 25 bp, Homo sapien
cattttgagaggacgttctttccac

SEQ ID NO: 1648480 - DNA, 25 bp, Homo sapien
tgcccacgatgactggctgcctgtc

SEQ ID NO: 1648481 - DNA, 25 bp, Homo sapien
tctagctagcagaacacacgagcag

SEQ ID NO: 1648482 - DNA, 25 bp, Homo sapien
aacatcatgtgatcagtccaccttg

SEQ ID NO: 1648483 - DNA, 25 bp, Homo sapien
ggagctagactgtctccgaaagaaa

SEQ ID NO: 1648484 - DNA, 25 bp, Homo sapien
tctgtgtagagatcgtcaccctccc

SEQ ID NO: 1648485 - DNA, 25 bp, Homo sapien
tagagagggtctcccactatcaacg

SEQ ID NO: 1648486 - DNA, 25 bp, Homo sapien
tatctgggcagatcttggtccaggc

SEQ ID NO: 1648487 - DNA, 25 bp, Homo sapien
tccacatggtggttcaggtacagcc

SEQ ID NO: 1648488 - DNA, 25 bp, Homo sapien
tgtggagatccacatggtggttcag

SEQ ID NO: 1648489 - DNA, 25 bp, Homo sapien
ggttcaggtacagcctcaggatgcc

SEQ ID NO: 1648490 - DNA, 25 bp, Homo sapien
agctctgtacccattgtggagatcc

SEQ ID NO: 1648491 - DNA, 25 bp, Homo sapien
accccctcccgcttcagtggcagat

SEQ ID NO: 1648492 - DNA, 25 bp, Homo sapien
ctacagtcggaaggacagactgcag

SEQ ID NO: 1648493 - DNA, 25 bp, Homo sapien
caccccctcccgcttcagtggcaga

SEQ ID NO: 1648494 - DNA, 25 bp, Homo sapien
ccccctcccgcttcagtggcagatc

SEQ ID NO: 1648495 - DNA, 25 bp, Homo sapien
gaatagtccacttcgggtctcaagg

SEQ ID NO: 1648496 - DNA, 25 bp, Homo sapien
gagcacacagattaggagacacgga

SEQ ID NO: 1648497 - DNA, 25 bp, Homo sapien
tcctgaacttaagatgggccctaaa

SEQ ID NO: 1648498 - DNA, 25 bp, Homo sapien
tgggtccctgagaaatgctactgag

SEQ ID NO: 1648499 - DNA, 25 bp, Homo sapien
ttcagctcaagaccaggttccattt

SEQ ID NO: 1648500 - DNA, 25 bp, Homo sapien
gctcaagaccaggttccattttttc

SEQ ID NO: 1648501 - DNA, 25 bp, Homo sapien
caagaccaggttccattttttcatt

SEQ ID NO: 1648502 - DNA, 25 bp, Homo sapien
acactgatcaggtaaaccgggggtg

SEQ ID NO: 1648503 - DNA, 25 bp, Homo sapien
agggggctatgttgcaacgcttcac

SEQ ID NO: 1648504 - DNA, 25 bp, Homo sapien
tgatggagggggctatgttgcaacg

SEQ ID NO: 1648505 - DNA, 25 bp, Homo sapien
gagggggctatgttgcaacgcttca

SEQ ID NO: 1648506 - DNA, 25 bp, Homo sapien
tggagggggctatgttgcaacgctt

SEQ ID NO: 1648507 - DNA, 25 bp, Homo sapien
gccacgttaggtacataggccatgt

SEQ ID NO: 1648508 - DNA, 25 bp, Homo sapien
caagttgcatcaagatcctggtggt

SEQ ID NO: 1648509 - DNA, 25 bp, Homo sapien
caaattcaggttccatccagcaagc

SEQ ID NO: 1648510 - DNA, 25 bp, Homo sapien
tcccagtggcaggtaacggctgctc

SEQ ID NO: 1648511 - DNA, 25 bp, Homo sapien
ggacgcaggcactgcgtgggaagcg

SEQ ID NO: 1648512 - DNA, 25 bp, Homo sapien
cgcaggcactgcgtgggaagcggac

SEQ ID NO: 1648513 - DNA, 25 bp, Homo sapien
gcggaccggccgggattgcagagct

SEQ ID NO: 1648514 - DNA, 25 bp, Homo sapien
actgcgtgggaagcggaccggccgg

SEQ ID NO: 1648515 - DNA, 25 bp, Homo sapien
ccggaagcccatgatgcgcatcttg

SEQ ID NO: 1648516 - DNA, 25 bp, Homo sapien
gtggcgccagtactccagcactagg

SEQ ID NO: 1648517 - DNA, 25 bp, Homo sapien
agctctgtgcgcagttcctccaggg

SEQ ID NO: 1648518 - DNA, 25 bp, Homo sapien
tcgttcagcggcttgatgaccgtgc

SEQ ID NO: 1648519 - DNA, 25 bp, Homo sapien
gcccctctgtaacacaggaaggaca

SEQ ID NO: 1648520 - DNA, 25 bp, Homo sapien
aggcccctctgtaacacaggaagga

SEQ ID NO: 1648521 - DNA, 25 bp, Homo sapien
aaggcccctctgtaacacaggaagg

SEQ ID NO: 1648522 - DNA, 25 bp, Homo sapien
ggcccctctgtaacacaggaaggac

SEQ ID NO: 1648523 - DNA, 25 bp, Homo sapien
tgtctcagtgcagaccaagcatggg

SEQ ID NO: 1648524 - DNA, 25 bp, Homo sapien
ctggaggactcaccagacttgcggg

SEQ ID NO: 1648525 - DNA, 25 bp, Homo sapien
tgtcagggacacctagcacagtggc

SEQ ID NO: 1648526 - DNA, 25 bp, Homo sapien
tgtgcacgcaggcatgggctttcag

SEQ ID NO: 1648527 - DNA, 25 bp, Homo sapien
gcatgatctccgctctgcaatgcag

SEQ ID NO: 1648528 - DNA, 25 bp, Homo sapien
ctatgaaaggtgagcactctgcccc

SEQ ID NO: 1648529 - DNA, 25 bp, Homo sapien
ggaggtttgttcagatctacgccat

SEQ ID NO: 1648530 - DNA, 25 bp, Homo sapien
ctcatttctgagctcttcaactgga

SEQ ID NO: 1648531 - DNA, 25 bp, Homo sapien
acatgctggctactgagaggctaaa

SEQ ID NO: 1648532 - DNA, 25 bp, Homo sapien
tgagaggctaaatcccgtggaaccg

SEQ ID NO: 1648533 - DNA, 25 bp, Homo sapien
gacacagtagtgactgctagagccc

SEQ ID NO: 1648534 - DNA, 25 bp, Homo sapien
gcccacgatggcaagacggccatga

SEQ ID NO: 1648535 - DNA, 25 bp, Homo sapien
tcagccaaaggtacagatactggat

SEQ ID NO: 1648536 - DNA, 25 bp, Homo sapien
aaggtacagatactggatttgctgg

SEQ ID NO: 1648537 - DNA, 25 bp, Homo sapien
ccaaaggtacagatactggatttgc

SEQ ID NO: 1648538 - DNA, 25 bp, Homo sapien
cagccaaaggtacagatactggatt

SEQ ID NO: 1648539 - DNA, 25 bp, Homo sapien
gcagggccgccagtgcaccctggga

SEQ ID NO: 1648540 - DNA, 25 bp, Homo sapien
agcagggccgccagtgcaccctggg

SEQ ID NO: 1648541 - DNA, 25 bp, Homo sapien
aagcagggccgccagtgcaccctgg

SEQ ID NO: 1648542 - DNA, 25 bp, Homo sapien
cagggccgccagtgcaccctgggaa

SEQ ID NO: 1648543 - DNA, 25 bp, Homo sapien
tcatcataactggtgaggacccagt

SEQ ID NO: 1648544 - DNA, 25 bp, Homo sapien
ctcatcataactggtgaggacccag

SEQ ID NO: 1648545 - DNA, 25 bp, Homo sapien
agatgcgagccaatgggcccagctg

SEQ ID NO: 1648546 - DNA, 25 bp, Homo sapien
cgcgcccggcaagatcaccttttta

SEQ ID NO: 1648547 - DNA, 25 bp, Homo sapien
cacacggtgccgcttttgaaatgaa

SEQ ID NO: 1648548 - DNA, 25 bp, Homo sapien
tgtcaaccgaatgaaaggacggcgt

SEQ ID NO: 1648549 - DNA, 25 bp, Homo sapien
ggtttaacagggcatcagtctccaa

SEQ ID NO: 1648550 - DNA, 25 bp, Homo sapien
taaaactgaggcacgtcgacgtcct

SEQ ID NO: 1648551 - DNA, 25 bp, Homo sapien
tctatcagaaaccccccactattgg

SEQ ID NO: 1648552 - DNA, 25 bp, Homo sapien
gactttgccggttcgggctgtgatt

SEQ ID NO: 1648553 - DNA, 25 bp, Homo sapien
ttggtcgtagacagaagtccatccc

SEQ ID NO: 1648554 - DNA, 25 bp, Homo sapien
gggccacccgtacgcccctctatca

SEQ ID NO: 1648555 - DNA, 25 bp, Homo sapien
tcttgaagaactcgcttcggcgggc

SEQ ID NO: 1648556 - DNA, 25 bp, Homo sapien
tgccggatgcccaagtatagcagct

SEQ ID NO: 1648557 - DNA, 25 bp, Homo sapien
taatacggttggcaagcggcttgct

SEQ ID NO: 1648558 - DNA, 25 bp, Homo sapien
gtatagcagcttcgccatagggaac

SEQ ID NO: 1648559 - DNA, 25 bp, Homo sapien
acgcgcaaccttgctgactgggcgg

SEQ ID NO: 1648560 - DNA, 25 bp, Homo sapien
acagggcacgcgcaaccttgctgac

SEQ ID NO: 1648561 - DNA, 25 bp, Homo sapien
tgggcggggcgcctcaacctcttca

SEQ ID NO: 1648562 - DNA, 25 bp, Homo sapien
cttggcggtctcacagggcacgcgc

SEQ ID NO: 1648563 - DNA, 25 bp, Homo sapien
tacttgtgtatggtgagccctgtga

SEQ ID NO: 1648564 - DNA, 25 bp, Homo sapien
caatttgcatacaccagaccaggag

SEQ ID NO: 1648565 - DNA, 25 bp, Homo sapien
aattgcggtcttatgttccctggcc

SEQ ID NO: 1648566 - DNA, 25 bp, Homo sapien
gcctcagtcattgttgtgtccccag

SEQ ID NO: 1648567 - DNA, 25 bp, Homo sapien
tgtgctgttcctcttggaggtgagt

SEQ ID NO: 1648568 - DNA, 25 bp, Homo sapien
cctgggagggcggagtggccgccca

SEQ ID NO: 1648569 - DNA, 25 bp, Homo sapien
ggagggcggagtggccgcccagctg

SEQ ID NO: 1648570 - DNA, 25 bp, Homo sapien
cggagtggccgcccagctgccagtc

SEQ ID NO: 1648571 - DNA, 25 bp, Homo sapien
tcggaagagctcgtcatggaacagg

SEQ ID NO: 1648572 - DNA, 25 bp, Homo sapien
tgtggtatgcagaaaagacgcgctc

SEQ ID NO: 1648573 - DNA, 25 bp, Homo sapien
gccccacgccgatgacaaagatgta

SEQ ID NO: 1648574 - DNA, 25 bp, Homo sapien
aagagcacgtgatagggcgcaaagc

SEQ ID NO: 1648575 - DNA, 25 bp, Homo sapien
taaaaggctcggtctgtggacggca

SEQ ID NO: 1648576 - DNA, 25 bp, Homo sapien
tttatggaggagacgaaagcatcgc

SEQ ID NO: 1648577 - DNA, 25 bp, Homo sapien
cacaaaaattggtctccgggagtgt

SEQ ID NO: 1648578 - DNA, 25 bp, Homo sapien
gagtgctggcatttcctaggacccc

SEQ ID NO: 1648579 - DNA, 25 bp, Homo sapien
tgcgcgcggcgactggacggggcgg

SEQ ID NO: 1648580 - DNA, 25 bp, Homo sapien
caggtccccggtcttgacaacggcg

SEQ ID NO: 1648581 - DNA, 25 bp, Homo sapien
ctgcgtccaggtccccggtcttgac

SEQ ID NO: 1648582 - DNA, 25 bp, Homo sapien
cacctctctccgctgcgtccaggtc

SEQ ID NO: 1648583 - DNA, 25 bp, Homo sapien
ccacgaggggtcgaaagagcacccg

SEQ ID NO: 1648584 - DNA, 25 bp, Homo sapien
gatgcccgatgaaagggccgcttcc

SEQ ID NO: 1648585 - DNA, 25 bp, Homo sapien
agagcacccggatgcccgatgaaag

SEQ ID NO: 1648586 - DNA, 25 bp, Homo sapien
atgaaagggccgcttccgcagcgct

SEQ ID NO: 1648587 - DNA, 25 bp, Homo sapien
tcccacccggataaatagagacttc

SEQ ID NO: 1648588 - DNA, 25 bp, Homo sapien
tctcccgaaaatagaattcctgccc

SEQ ID NO: 1648589 - DNA, 25 bp, Homo sapien
tctactcggcaatagacatctcccg

SEQ ID NO: 1648590 - DNA, 25 bp, Homo sapien
caatggatccccaaagcgatgtgac

SEQ ID NO: 1648591 - DNA, 25 bp, Homo sapien
cagaccacccgccactgtagcacac

SEQ ID NO: 1648592 - DNA, 25 bp, Homo sapien
tcagaccacccgccactgtagcaca

SEQ ID NO: 1648593 - DNA, 25 bp, Homo sapien
atgctgtcatcccacaagaaggcca

SEQ ID NO: 1648594 - DNA, 25 bp, Homo sapien
ggccatgctgtcatcccacaagaag

SEQ ID NO: 1648595 - DNA, 25 bp, Homo sapien
tgtccaccgtacttgtggctgaggg

SEQ ID NO: 1648596 - DNA, 25 bp, Homo sapien
ggctgctgtgtccaccgtacttgtg

SEQ ID NO: 1648597 - DNA, 25 bp, Homo sapien
tttccttttatagcaatggggtgtc

SEQ ID NO: 1648598 - DNA, 25 bp, Homo sapien
gtttaagaaccaacagaggccaggc

SEQ ID NO: 1648599 - DNA, 25 bp, Homo sapien
aatggggtgtcccagtgttaccagg

SEQ ID NO: 1648600 - DNA, 25 bp, Homo sapien
gggatcacagatatgcgcccccaca

SEQ ID NO: 1648601 - DNA, 25 bp, Homo sapien
agcaacttcccatcatgagagcggg

SEQ ID NO: 1648602 - DNA, 25 bp, Homo sapien
aaacaggtgaactttgccaaagtca

SEQ ID NO: 1648603 - DNA, 25 bp, Homo sapien
tgagagcgggccacagcgttgatat

SEQ ID NO: 1648604 - DNA, 25 bp, Homo sapien
gcgttgatatcagtgccgtccgccc

SEQ ID NO: 1648605 - DNA, 25 bp, Homo sapien
taatttgttccgacctagcctgtat

SEQ ID NO: 1648606 - DNA, 25 bp, Homo sapien
caagaggagcagattgccactccag

SEQ ID NO: 1648607 - DNA, 25 bp, Homo sapien
gccactccagccaccttaatttgtt

SEQ ID NO: 1648608 - DNA, 25 bp, Homo sapien
tgaagggaagtggtaagatgtcagc

SEQ ID NO: 1648609 - DNA, 25 bp, Homo sapien
accctaggacacaagtagctgtggc

SEQ ID NO: 1648610 - DNA, 25 bp, Homo sapien
aaaccctaggacacaagtagctgtg

SEQ ID NO: 1648611 - DNA, 25 bp, Homo sapien
cccaaaccctaggacacaagtagct

SEQ ID NO: 1648612 - DNA, 25 bp, Homo sapien
caaaccctaggacacaagtagctgt

SEQ ID NO: 1648613 - DNA, 25 bp, Homo sapien
ctggtgatctgcttacaggtagccg

SEQ ID NO: 1648614 - DNA, 25 bp, Homo sapien
gtgatctgcttacaggtagccgggt

SEQ ID NO: 1648615 - DNA, 25 bp, Homo sapien
gatctgcttacaggtagccgggtcc

SEQ ID NO: 1648616 - DNA, 25 bp, Homo sapien
atctgcttacaggtagccgggtccc

SEQ ID NO: 1648617 - DNA, 25 bp, Homo sapien
cagcgtaagcaggagcatctacttt

SEQ ID NO: 1648618 - DNA, 25 bp, Homo sapien
ttttaaacccgcatctggccgggca

SEQ ID NO: 1648619 - DNA, 25 bp, Homo sapien
catctacttttaaacccgcatctgg

SEQ ID NO: 1648620 - DNA, 25 bp, Homo sapien
tggggtcttcacagcccgcagcgta

SEQ ID NO: 1648621 - DNA, 25 bp, Homo sapien
caatccaggtgggtgataaaactgg

SEQ ID NO: 1648622 - DNA, 25 bp, Homo sapien
tccccggagttggtgacaaagcagc

SEQ ID NO: 1648623 - DNA, 25 bp, Homo sapien
aatctcatagtccccggagttggtg

SEQ ID NO: 1648624 - DNA, 25 bp, Homo sapien
cccaatccaggtgggtgataaaact

SEQ ID NO: 1648625 - DNA, 25 bp, Homo sapien
tgatgggcagggctagacaaaaagc

SEQ ID NO: 1648626 - DNA, 25 bp, Homo sapien
gactaaaggaaggatacacaggcct

SEQ ID NO: 1648627 - DNA, 25 bp, Homo sapien
aatacagaggtagggcgagaacaca

SEQ ID NO: 1648628 - DNA, 25 bp, Homo sapien
gattaaatcaggaaagtggaagtca

SEQ ID NO: 1648629 - DNA, 25 bp, Homo sapien
cgtacaccaagttgtcgtgggagcc

SEQ ID NO: 1648630 - DNA, 25 bp, Homo sapien
gtccaccgtgtacacgtacaccaag

SEQ ID NO: 1648631 - DNA, 25 bp, Homo sapien
ttgcggccgccctggtccaccgtgt

SEQ ID NO: 1648632 - DNA, 25 bp, Homo sapien
agcacttgcccaggcggctgacctt

SEQ ID NO: 1648633 - DNA, 25 bp, Homo sapien
ccactgagatctgttcattgccgtc

SEQ ID NO: 1648634 - DNA, 25 bp, Homo sapien
actgagatctgttcattgccgtctg

SEQ ID NO: 1648635 - DNA, 25 bp, Homo sapien
cactgagatctgttcattgccgtct

SEQ ID NO: 1648636 - DNA, 25 bp, Homo sapien
tgagatctgttcattgccgtctgtg

SEQ ID NO: 1648637 - DNA, 25 bp, Homo sapien
ggtctccgtgtccagcagcagccat

SEQ ID NO: 1648638 - DNA, 25 bp, Homo sapien
tgggtctccgtgtccagcagcagcc

SEQ ID NO: 1648639 - DNA, 25 bp, Homo sapien
atgggtctccgtgtccagcagcagc

SEQ ID NO: 1648640 - DNA, 25 bp, Homo sapien
tcatgggtctccgtgtccagcagca

SEQ ID NO: 1648641 - DNA, 25 bp, Homo sapien
ccactggggtggaagccggctgagc

SEQ ID NO: 1648642 - DNA, 25 bp, Homo sapien
agccactggggtggaagccggctga

SEQ ID NO: 1648643 - DNA, 25 bp, Homo sapien
gccactggggtggaagccggctgag

SEQ ID NO: 1648644 - DNA, 25 bp, Homo sapien
tagatgcaccagcttatcctgcccg

SEQ ID NO: 1648645 - DNA, 25 bp, Homo sapien
caggtcacaaactgggcccgactgg

SEQ ID NO: 1648646 - DNA, 25 bp, Homo sapien
cgcaggtcacaaactgggcccgact

SEQ ID NO: 1648647 - DNA, 25 bp, Homo sapien
ggaatctgagctccatagatgcacc

SEQ ID NO: 1648648 - DNA, 25 bp, Homo sapien
tgccccagcgggacccagggaagac

SEQ ID NO: 1648649 - DNA, 25 bp, Homo sapien
ctgaagggggcctcaattgggcatc

SEQ ID NO: 1648650 - DNA, 25 bp, Homo sapien
atgccagacaaatgctagatgagcc

SEQ ID NO: 1648651 - DNA, 25 bp, Homo sapien
ctttcccagtatgtctgaagggggc

SEQ ID NO: 1648652 - DNA, 25 bp, Homo sapien
ataatagccaatataatagtatggg

SEQ ID NO: 1648653 - DNA, 25 bp, Homo sapien
gccaatataatagtatgggctgggt

SEQ ID NO: 1648654 - DNA, 25 bp, Homo sapien
tagccaatataatagtatgggctgg

SEQ ID NO: 1648655 - DNA, 25 bp, Homo sapien
aatataatagtatgggctgggtgca

SEQ ID NO: 1648656 - DNA, 25 bp, Homo sapien
ccacccccaatcagagtggcaggag

SEQ ID NO: 1648657 - DNA, 25 bp, Homo sapien
tggagttaaactcttggttgctgga

SEQ ID NO: 1648658 - DNA, 25 bp, Homo sapien
gaagggtgccacccccaatcagagt

SEQ ID NO: 1648659 - DNA, 25 bp, Homo sapien
gagttaaactcttggttgctggatc

SEQ ID NO: 1648660 - DNA, 25 bp, Homo sapien
ggtccccacgtacagtgtgtctccg

SEQ ID NO: 1648661 - DNA, 25 bp, Homo sapien
ccctgcaggatggaattgcgggtgg

SEQ ID NO: 1648662 - DNA, 25 bp, Homo sapien
cacggtgcgcacagggccaaagtcc

SEQ ID NO: 1648663 - DNA, 25 bp, Homo sapien
gtggccctctgccacggtgcgcaca

SEQ ID NO: 1648664 - DNA, 25 bp, Homo sapien
accccagaggaccacccgccgatca

SEQ ID NO: 1648665 - DNA, 25 bp, Homo sapien
agagcccaaacacgccgccgtcgtg

SEQ ID NO: 1648666 - DNA, 25 bp, Homo sapien
caccgcctgtgtgatacggttccca

SEQ ID NO: 1648667 - DNA, 25 bp, Homo sapien
agacaccagcgtcccgtcccgcagg

SEQ ID NO: 1648668 - DNA, 25 bp, Homo sapien
tgaccacgtcgccaccttccaaaaa

SEQ ID NO: 1648669 - DNA, 25 bp, Homo sapien
gcacatacttcggtttctcatgttt

SEQ ID NO: 1648670 - DNA, 25 bp, Homo sapien
acagcacatacttcggtttctcatg

SEQ ID NO: 1648671 - DNA, 25 bp, Homo sapien
cacacagcacatacttcggtttctc

SEQ ID NO: 1648672 - DNA, 25 bp, Homo sapien
actatctgctaggaactgctgtact

SEQ ID NO: 1648673 - DNA, 25 bp, Homo sapien
ttactatctgctaggaactgctgta

SEQ ID NO: 1648674 - DNA, 25 bp, Homo sapien
ccaccttgccacagtacccatttat

SEQ ID NO: 1648675 - DNA, 25 bp, Homo sapien
caccttgccacagtacccatttatt

SEQ ID NO: 1648676 - DNA, 25 bp, Homo sapien
ggtcaccctcttaactccagagtta

SEQ ID NO: 1648677 - DNA, 25 bp, Homo sapien
cagagttaaggtggatcatcaccat

SEQ ID NO: 1648678 - DNA, 25 bp, Homo sapien
ggagtgatcatttgatcacggctca

SEQ ID NO: 1648679 - DNA, 25 bp, Homo sapien
tcaccatggtatggagaaagaaact

SEQ ID NO: 1648680 - DNA, 25 bp, Homo sapien
gaagtagatgtgagatttcccgcag

SEQ ID NO: 1648681 - DNA, 25 bp, Homo sapien
agatttcccgcaggtgataagcaca

SEQ ID NO: 1648682 - DNA, 25 bp, Homo sapien
gccttgccgcttgctcaagctgccc

SEQ ID NO: 1648683 - DNA, 25 bp, Homo sapien
tggaaggtggccaccaatacagcct

SEQ ID NO: 1648684 - DNA, 25 bp, Homo sapien
tgtgttgtatgctgcacacctgaac

SEQ ID NO: 1648685 - DNA, 25 bp, Homo sapien
gggagattctgaatgaggacctcaa

SEQ ID NO: 1648686 - DNA, 25 bp, Homo sapien
aggactgccctaaacggctgtttgt

SEQ ID NO: 1648687 - DNA, 25 bp, Homo sapien
aaggctactatacccgcccctcaca

SEQ ID NO: 1648688 - DNA, 25 bp, Homo sapien
tggcccagtcccacaccgagagcat

SEQ ID NO: 1648689 - DNA, 25 bp, Homo sapien
caccgagagcatgtgatcattggat

SEQ ID NO: 1648690 - DNA, 25 bp, Homo sapien
cgagagcatgtgatcattggattca

SEQ ID NO: 1648691 - DNA, 25 bp, Homo sapien
gagcatgtgatcattggattcatcc

SEQ ID NO: 1648692 - DNA, 25 bp, Homo sapien
ccccaagcccagcacgtgtaaggtg

SEQ ID NO: 1648693 - DNA, 25 bp, Homo sapien
aaactgagtcccagatgcgcacgtg

SEQ ID NO: 1648694 - DNA, 25 bp, Homo sapien
cacagcacacggctctgtcaaacac

SEQ ID NO: 1648695 - DNA, 25 bp, Homo sapien
aagcccagcacgtgtaaggtggaga

SEQ ID NO: 1648696 - DNA, 25 bp, Homo sapien
tggtgaccatatctgggtggatggc

SEQ ID NO: 1648697 - DNA, 25 bp, Homo sapien
ctgtcccgtggcgatggtgaccata

SEQ ID NO: 1648698 - DNA, 25 bp, Homo sapien
gaccatatctgggtggatggccaag

SEQ ID NO: 1648699 - DNA, 25 bp, Homo sapien
tgtcccgtggcgatggtgaccatat

SEQ ID NO: 1648700 - DNA, 25 bp, Homo sapien
ctcctggacttcagcgatccttccg

SEQ ID NO: 1648701 - DNA, 25 bp, Homo sapien
ggacttcagcgatccttccgccttg

SEQ ID NO: 1648702 - DNA, 25 bp, Homo sapien
tgagactagttctcaaaaaaagaaa

SEQ ID NO: 1648703 - DNA, 25 bp, Homo sapien
ctggacttcagcgatccttccgcct

SEQ ID NO: 1648704 - DNA, 25 bp, Homo sapien
cacggctacggaggccacaaagtac

SEQ ID NO: 1648705 - DNA, 25 bp, Homo sapien
caaataaaggttggcccggcagtct

SEQ ID NO: 1648706 - DNA, 25 bp, Homo sapien
ctccccggtgggcagcaaataaagg

SEQ ID NO: 1648707 - DNA, 25 bp, Homo sapien
tgctcctccacgctgtatagcacgg

SEQ ID NO: 1648708 - DNA, 25 bp, Homo sapien
aggtttgagccgctggcgcccagcc

SEQ ID NO: 1648709 - DNA, 25 bp, Homo sapien
cactctcacccctgtagtgggctga

SEQ ID NO: 1648710 - DNA, 25 bp, Homo sapien
tcacccctgtagtgggctgatggtc

SEQ ID NO: 1648711 - DNA, 25 bp, Homo sapien
agactcaacaaggtcattggaatga

SEQ ID NO: 1648712 - DNA, 25 bp, Homo sapien
aataatttccaaactgtaggcctca

SEQ ID NO: 1648713 - DNA, 25 bp, Homo sapien
ccttatctggaaaggaggtataata

SEQ ID NO: 1648714 - DNA, 25 bp, Homo sapien
tcttggaggccactagttgtaaaaa

SEQ ID NO: 1648715 - DNA, 25 bp, Homo sapien
cccagaatcaggattgttgtctcct

SEQ ID NO: 1648716 - DNA, 25 bp, Homo sapien
agtagctgggaaccacaggagcatg

SEQ ID NO: 1648717 - DNA, 25 bp, Homo sapien
ctcttgtggcccaggccggaaagca

SEQ ID NO: 1648718 - DNA, 25 bp, Homo sapien
aggccggaaagcagtggggcaatct

SEQ ID NO: 1648719 - DNA, 25 bp, Homo sapien
gctgggaaccacaggagcatgccac

SEQ ID NO: 1648720 - DNA, 25 bp, Homo sapien
ggagcaccaaggagattccagcaaa

SEQ ID NO: 1648721 - DNA, 25 bp, Homo sapien
ggcggcccctcaggaacattttcac

SEQ ID NO: 1648722 - DNA, 25 bp, Homo sapien
gctccgagcgtgtgtccaggctgta

SEQ ID NO: 1648723 - DNA, 25 bp, Homo sapien
caggaacattttcacggagccatcc

SEQ ID NO: 1648724 - DNA, 25 bp, Homo sapien
aaggcagctccgagcgtgtgtccag

SEQ ID NO: 1648725 - DNA, 25 bp, Homo sapien
acaagcaagcttccaccgagccctt

SEQ ID NO: 1648726 - DNA, 25 bp, Homo sapien
tgacaccagccccatccctattccc

SEQ ID NO: 1648727 - DNA, 25 bp, Homo sapien
ggcaaagacccagtagccaagactc

SEQ ID NO: 1648728 - DNA, 25 bp, Homo sapien
agcctgtcaccccaacaagcaagct

SEQ ID NO: 1648729 - DNA, 25 bp, Homo sapien
cacactgaagataacttctttggtt

SEQ ID NO: 1648730 - DNA, 25 bp, Homo sapien
actgaagataacttctttggttttg

SEQ ID NO: 1648731 - DNA, 25 bp, Homo sapien
ccacactgaagataacttctttggt

SEQ ID NO: 1648732 - DNA, 25 bp, Homo sapien
cactgaagataacttctttggtttt

SEQ ID NO: 1648733 - DNA, 25 bp, Homo sapien
ccagagaggcagtgatcgccaaaga

SEQ ID NO: 1648734 - DNA, 25 bp, Homo sapien
gctcggttgatcttgcagagcctaa

SEQ ID NO: 1648735 - DNA, 25 bp, Homo sapien
tctccgatgaaaacggggccgagta

SEQ ID NO: 1648736 - DNA, 25 bp, Homo sapien
caaagatcacacagcacgaagtggc

SEQ ID NO: 1648737 - DNA, 25 bp, Homo sapien
gagatctaagccccgggagcgcgga

SEQ ID NO: 1648738 - DNA, 25 bp, Homo sapien
gggggtggtctgcgaaagggtctca

SEQ ID NO: 1648739 - DNA, 25 bp, Homo sapien
tgagatctaagccccgggagcgcgg

SEQ ID NO: 1648740 - DNA, 25 bp, Homo sapien
gcggcgggtggcggagcttcggggc

SEQ ID NO: 1648741 - DNA, 25 bp, Homo sapien
gtggagccgggaccggctctgccgc

SEQ ID NO: 1648742 - DNA, 25 bp, Homo sapien
gggtggagccgggaccggctctgcc

SEQ ID NO: 1648743 - DNA, 25 bp, Homo sapien
gggaccggctctgccgcttccggcc

SEQ ID NO: 1648744 - DNA, 25 bp, Homo sapien
tagctggccccactctaggttacga

SEQ ID NO: 1648745 - DNA, 25 bp, Homo sapien
tgtgaataccttcgaggcctccaag

SEQ ID NO: 1648746 - DNA, 25 bp, Homo sapien
ccagattttaatttcgcccaggcga

SEQ ID NO: 1648747 - DNA, 25 bp, Homo sapien
tgttaccgtgccacctcaagattgg

SEQ ID NO: 1648748 - DNA, 25 bp, Homo sapien
ctctggtgacaagtagcggcggaca

SEQ ID NO: 1648749 - DNA, 25 bp, Homo sapien
tcacggcgcaccgaggcgaggcgct

SEQ ID NO: 1648750 - DNA, 25 bp, Homo sapien
gaggcgctctggtgacaagtagcgg

SEQ ID NO: 1648751 - DNA, 25 bp, Homo sapien
cctttttggcgctacagttgctgct

SEQ ID NO: 1648752 - DNA, 25 bp, Homo sapien
gagcaagcgagattctccctgcacc

SEQ ID NO: 1648753 - DNA, 25 bp, Homo sapien
cgagtgccgtgagcaagcgagattc

SEQ ID NO: 1648754 - DNA, 25 bp, Homo sapien
caggcgagtgccgtgagcaagcgag

SEQ ID NO: 1648755 - DNA, 25 bp, Homo sapien
tgccgtgagcaagcgagattctccc

SEQ ID NO: 1648756 - DNA, 25 bp, Homo sapien
gtctcccacgaggtcttggaagagg

SEQ ID NO: 1648757 - DNA, 25 bp, Homo sapien
cctctgtctcccacgaggtcttgga

SEQ ID NO: 1648758 - DNA, 25 bp, Homo sapien
tgtctcccacgaggtcttggaagag

SEQ ID NO: 1648759 - DNA, 25 bp, Homo sapien
tctgtctcccacgaggtcttggaag

SEQ ID NO: 1648760 - DNA, 25 bp, Homo sapien
cggaggtcgcctccttcttgggaga

SEQ ID NO: 1648761 - DNA, 25 bp, Homo sapien
cgcccggaggtcgcctccttcttgg

SEQ ID NO: 1648762 - DNA, 25 bp, Homo sapien
gggacgtggcatagccacccacgcg

SEQ ID NO: 1648763 - DNA, 25 bp, Homo sapien
gaggatggggacgtggcatagccac

SEQ ID NO: 1648764 - DNA, 25 bp, Homo sapien
gggaaggcctttcaagagctgacac

SEQ ID NO: 1648765 - DNA, 25 bp, Homo sapien
ggaaggcctttcaagagctgacaca

SEQ ID NO: 1648766 - DNA, 25 bp, Homo sapien
tgggaaggcctttcaagagctgaca

SEQ ID NO: 1648767 - DNA, 25 bp, Homo sapien
ggtgggaaggcctttcaagagctga

SEQ ID NO: 1648768 - DNA, 25 bp, Homo sapien
agagggtgagtataaggaccaggcc

SEQ ID NO: 1648769 - DNA, 25 bp, Homo sapien
aagagggtgagtataaggaccaggc

SEQ ID NO: 1648770 - DNA, 25 bp, Homo sapien
ggacagaagagggtgagtataagga

SEQ ID NO: 1648771 - DNA, 25 bp, Homo sapien
cagaagagggtgagtataaggacca

SEQ ID NO: 1648772 - DNA, 25 bp, Homo sapien
tttaggaccgccagctcgtcttcct

SEQ ID NO: 1648773 - DNA, 25 bp, Homo sapien
ctgttcttcgcatgcccgcaggcga

SEQ ID NO: 1648774 - DNA, 25 bp, Homo sapien
ccgctcgtgcccgacaaattgtcat

SEQ ID NO: 1648775 - DNA, 25 bp, Homo sapien
gcaggcgacgcagagcatccgccag

SEQ ID NO: 1648776 - DNA, 25 bp, Homo sapien
ctggaagacgggggagtgccggctg

SEQ ID NO: 1648777 - DNA, 25 bp, Homo sapien
tggaagacgggggagtgccggctgc

SEQ ID NO: 1648778 - DNA, 25 bp, Homo sapien
ggaagacgggggagtgccggctgca

SEQ ID NO: 1648779 - DNA, 25 bp, Homo sapien
gactcattgctgaccacaaccaagg

SEQ ID NO: 1648780 - DNA, 25 bp, Homo sapien
ggacagggcgtggagctcgcccctg

SEQ ID NO: 1648781 - DNA, 25 bp, Homo sapien
tggtagcttagacggggacagggcg

SEQ ID NO: 1648782 - DNA, 25 bp, Homo sapien
tggaagtaaaggtggtagcttagac

SEQ ID NO: 1648783 - DNA, 25 bp, Homo sapien
tggtgctaatgcatgggagggccag

SEQ ID NO: 1648784 - DNA, 25 bp, Homo sapien
cacacccatttgtctagggagaagg

SEQ ID NO: 1648785 - DNA, 25 bp, Homo sapien
ttgggaggtatcctagaagcaaagt

SEQ ID NO: 1648786 - DNA, 25 bp, Homo sapien
acccacagtggtccttctggtatca

SEQ ID NO: 1648787 - DNA, 25 bp, Homo sapien
acgtgtcgtacaggccgcagaaggc

SEQ ID NO: 1648788 - DNA, 25 bp, Homo sapien
gtacaggccgcagaaggccgggccg

SEQ ID NO: 1648789 - DNA, 25 bp, Homo sapien
cgttgcagtatcgcagcagcgagga

SEQ ID NO: 1648790 - DNA, 25 bp, Homo sapien
tgcagtatcgcagcagcgaggacgt

SEQ ID NO: 1648791 - DNA, 25 bp, Homo sapien
gttgccatagcaacgcccttcgttc

SEQ ID NO: 1648792 - DNA, 25 bp, Homo sapien
atccccagctcagctcgcctggcat

SEQ ID NO: 1648793 - DNA, 25 bp, Homo sapien
agctcgcctggcatcaggcggccgg

SEQ ID NO: 1648794 - DNA, 25 bp, Homo sapien
gcccttcgttccagcatccccagct

SEQ ID NO: 1648795 - DNA, 25 bp, Homo sapien
ccgcgccctaccagataccaattgt

SEQ ID NO: 1648796 - DNA, 25 bp, Homo sapien
accgcgccctaccagataccaattg

SEQ ID NO: 1648797 - DNA, 25 bp, Homo sapien
cgcgccctaccagataccaattgtt

SEQ ID NO: 1648798 - DNA, 25 bp, Homo sapien
ccaccgcgccctaccagataccaat

SEQ ID NO: 1648799 - DNA, 25 bp, Homo sapien
gctttattattctcaacaccaatgg

SEQ ID NO: 1648800 - DNA, 25 bp, Homo sapien
tttattattctcaacaccaatggca

SEQ ID NO: 1648801 - DNA, 25 bp, Homo sapien
tattattctcaacaccaatggcagc

SEQ ID NO: 1648802 - DNA, 25 bp, Homo sapien
aaaacacagagctttattattctca

SEQ ID NO: 1648803 - DNA, 25 bp, Homo sapien
ggacagaggagtgagttctgtcaac

SEQ ID NO: 1648804 - DNA, 25 bp, Homo sapien
acagaggagtgagttctgtcaacag

SEQ ID NO: 1648805 - DNA, 25 bp, Homo sapien
gaggagtgagttctgtcaacagaca

SEQ ID NO: 1648806 - DNA, 25 bp, Homo sapien
taggacagaggagtgagttctgtca

SEQ ID NO: 1648807 - DNA, 25 bp, Homo sapien
cacgatgactgagtccccgcgcagg

SEQ ID NO: 1648808 - DNA, 25 bp, Homo sapien
acgatgactgagtccccgcgcagga

SEQ ID NO: 1648809 - DNA, 25 bp, Homo sapien
cgatgactgagtccccgcgcaggaa

SEQ ID NO: 1648810 - DNA, 25 bp, Homo sapien
tttgttgactggcttggacttcttc

SEQ ID NO: 1648811 - DNA, 25 bp, Homo sapien
tcttgcccttgccactcttgggtac

SEQ ID NO: 1648812 - DNA, 25 bp, Homo sapien
ccttgccactcttgggtacctcagt

SEQ ID NO: 1648813 - DNA, 25 bp, Homo sapien
cactcttgggtacctcagtccacat

SEQ ID NO: 1648814 - DNA, 25 bp, Homo sapien
tggtggggaacagggaggggaggca

SEQ ID NO: 1648815 - DNA, 25 bp, Homo sapien
gtgcaggtgctaggccgggatgacc

SEQ ID NO: 1648816 - DNA, 25 bp, Homo sapien
ggcgtgaggggcgtgcctctgacag

SEQ ID NO: 1648817 - DNA, 25 bp, Homo sapien
aggggcgtgcctctgacagtgcccc

SEQ ID NO: 1648818 - DNA, 25 bp, Homo sapien
ggtgcaggtgctaggccgggatgac

SEQ ID NO: 1648819 - DNA, 25 bp, Homo sapien
gagtttcttattgttgcggcagttg

SEQ ID NO: 1648820 - DNA, 25 bp, Homo sapien
ctatcgaaggccttcacgcggccca

SEQ ID NO: 1648821 - DNA, 25 bp, Homo sapien
tatcgaaggccttcacgcggcccag

SEQ ID NO: 1648822 - DNA, 25 bp, Homo sapien
tttcttattgttgcggcagttgatg

SEQ ID NO: 1648823 - DNA, 25 bp, Homo sapien
tcactcttgggcttgttgaggaggc

SEQ ID NO: 1648824 - DNA, 25 bp, Homo sapien
cactcttgggcttgttgaggaggct

SEQ ID NO: 1648825 - DNA, 25 bp, Homo sapien
ctcactcttgggcttgttgaggagg

SEQ ID NO: 1648826 - DNA, 25 bp, Homo sapien
cagagtggtctgagggggttgtgct

SEQ ID NO: 1648827 - DNA, 25 bp, Homo sapien
acgttccctgacagtctgttctcca

SEQ ID NO: 1648828 - DNA, 25 bp, Homo sapien
cctaagcctctgtcatctctgtcct

SEQ ID NO: 1648829 - DNA, 25 bp, Homo sapien
ctccacccacgttccctgacagtct

SEQ ID NO: 1648830 - DNA, 25 bp, Homo sapien
gactaattatctaggaccactcccg

SEQ ID NO: 1648831 - DNA, 25 bp, Homo sapien
gtattcgtaaaatcgctgcccctta

SEQ ID NO: 1648832 - DNA, 25 bp, Homo sapien
cgaagtcacgatgcgtcaaaggccc

SEQ ID NO: 1648833 - DNA, 25 bp, Homo sapien
cagcccagggcgttatctgataaag

SEQ ID NO: 1648834 - DNA, 25 bp, Homo sapien
cgctctccgttcactcccgtttcct

SEQ ID NO: 1648835 - DNA, 25 bp, Homo sapien
ctcttcctgcgacccacttccgttg

SEQ ID NO: 1648836 - DNA, 25 bp, Homo sapien
ttcactcccgtttcctccgcgttgc

SEQ ID NO: 1648837 - DNA, 25 bp, Homo sapien
ttcctgcgacccacttccgttggcg

SEQ ID NO: 1648838 - DNA, 25 bp, Homo sapien
accagtaagtggaggcgtggcctgt

SEQ ID NO: 1648839 - DNA, 25 bp, Homo sapien
cagtcagaaccacacgggggcagat

SEQ ID NO: 1648840 - DNA, 25 bp, Homo sapien
ccaacggtgcacaatgatggaataa

SEQ ID NO: 1648841 - DNA, 25 bp, Homo sapien
gggttcgcggccagtcagaaccaca

SEQ ID NO: 1648842 - DNA, 25 bp, Homo sapien
tatctactgatctttccgaccctgc

SEQ ID NO: 1648843 - DNA, 25 bp, Homo sapien
gacgcgttactgacgtatctactga

SEQ ID NO: 1648844 - DNA, 25 bp, Homo sapien
caagctatttccaaatgcccgccgg

SEQ ID NO: 1648845 - DNA, 25 bp, Homo sapien
tcttgaagaatggtacaggttgaag

SEQ ID NO: 1648846 - DNA, 25 bp, Homo sapien
ctgcgcccgggagatcgaatatttt

SEQ ID NO: 1648847 - DNA, 25 bp, Homo sapien
tccgctaaggcggagcctacttctc

SEQ ID NO: 1648848 - DNA, 25 bp, Homo sapien
catgatcaaacgctgttcattggct

SEQ ID NO: 1648849 - DNA, 25 bp, Homo sapien
tggctttccctcctccgctaaggcg

SEQ ID NO: 1648850 - DNA, 25 bp, Homo sapien
cccaatacctaagggaggctgggag

SEQ ID NO: 1648851 - DNA, 25 bp, Homo sapien
caaccccaatacctaagggaggctg

SEQ ID NO: 1648852 - DNA, 25 bp, Homo sapien
tcagaagttcgagcccagcttgtcc

SEQ ID NO: 1648853 - DNA, 25 bp, Homo sapien
cccagcttgtccaacagggaaacct

SEQ ID NO: 1648854 - DNA, 25 bp, Homo sapien
tcaggtgtccactccaatgtcaccc

SEQ ID NO: 1648855 - DNA, 25 bp, Homo sapien
cggccgggcgtggtaactcgcacct

SEQ ID NO: 1648856 - DNA, 25 bp, Homo sapien
taggatacctcagaaggtactttgg

SEQ ID NO: 1648857 - DNA, 25 bp, Homo sapien
aggatacctcagaaggtactttgga

SEQ ID NO: 1648858 - DNA, 25 bp, Homo sapien
ctaggatacctcagaaggtactttg

SEQ ID NO: 1648859 - DNA, 25 bp, Homo sapien
ggatacctcagaaggtactttggaa

SEQ ID NO: 1648860 - DNA, 25 bp, Homo sapien
tgggaccatgttgatcaggttggtc

SEQ ID NO: 1648861 - DNA, 25 bp, Homo sapien
tcttggtttgggggagagagtctta

SEQ ID NO: 1648862 - DNA, 25 bp, Homo sapien
agatgggaccatgttgatcaggttg

SEQ ID NO: 1648863 - DNA, 25 bp, Homo sapien
tggtttgggggagagagtcttactc

SEQ ID NO: 1648864 - DNA, 25 bp, Homo sapien
ttggacttgacttttgcctgctcct

SEQ ID NO: 1648865 - DNA, 25 bp, Homo sapien
cccaattcctagagaggtgagagct

SEQ ID NO: 1648866 - DNA, 25 bp, Homo sapien
tgggaaataacagctccagcgagaa

SEQ ID NO: 1648867 - DNA, 25 bp, Homo sapien
tgtcaaaagcgaggcaaagggcttc

SEQ ID NO: 1648868 - DNA, 25 bp, Homo sapien
aatgcctgaacgagaccccagagtg

SEQ ID NO: 1648869 - DNA, 25 bp, Homo sapien
cagttccggtgagggatcaatgctg

SEQ ID NO: 1648870 - DNA, 25 bp, Homo sapien
agttccggtgagggatcaatgctgc

SEQ ID NO: 1648871 - DNA, 25 bp, Homo sapien
tcagttccggtgagggatcaatgct

SEQ ID NO: 1648872 - DNA, 25 bp, Homo sapien
ggcaggcggcccagtccggaccctc

SEQ ID NO: 1648873 - DNA, 25 bp, Homo sapien
gcaggcggcccagtccggaccctcg

SEQ ID NO: 1648874 - DNA, 25 bp, Homo sapien
gcccggcccccgcctggcccattgc

SEQ ID NO: 1648875 - DNA, 25 bp, Homo sapien
ccggcccccgcctggcccattgcag

SEQ ID NO: 1648876 - DNA, 25 bp, Homo sapien
cccccgcctggcccattgcagggca

SEQ ID NO: 1648877 - DNA, 25 bp, Homo sapien
ggcccccgcctggcccattgcaggg

SEQ ID NO: 1648878 - DNA, 25 bp, Homo sapien
gaacgtccgtaaggcaggtcatggt

SEQ ID NO: 1648879 - DNA, 25 bp, Homo sapien
tttgcacggatcatcgcggtagagc

SEQ ID NO: 1648880 - DNA, 25 bp, Homo sapien
cagttgttatcgtggaggcccaggc

SEQ ID NO: 1648881 - DNA, 25 bp, Homo sapien
tcgacggcagcacatccagtaggaa

SEQ ID NO: 1648882 - DNA, 25 bp, Homo sapien
agcagcatgtactgtcgcggctcca

SEQ ID NO: 1648883 - DNA, 25 bp, Homo sapien
ccagcagccgctgaatcttgaagcg

SEQ ID NO: 1648884 - DNA, 25 bp, Homo sapien
tctaggaagtcgtgcgacacgtgcc

SEQ ID NO: 1648885 - DNA, 25 bp, Homo sapien
tgaagatcttgaccagcacgtgctc

SEQ ID NO: 1648886 - DNA, 25 bp, Homo sapien
aaagaagagctggcccggaggcggc

SEQ ID NO: 1648887 - DNA, 25 bp, Homo sapien
aagaagagctggcccggaggcggcg

SEQ ID NO: 1648888 - DNA, 25 bp, Homo sapien
ggaggcggcggttcctccgggctga

SEQ ID NO: 1648889 - DNA, 25 bp, Homo sapien
gaggcggcggttcctccgggctgac

SEQ ID NO: 1648890 - DNA, 25 bp, Homo sapien
ggcacacagtctcctccttcacgtt

SEQ ID NO: 1648891 - DNA, 25 bp, Homo sapien
tcaggcacacagtctcctccttcac

SEQ ID NO: 1648892 - DNA, 25 bp, Homo sapien
cgtcaggcacacagtctcctccttc

SEQ ID NO: 1648893 - DNA, 25 bp, Homo sapien
aggcacacagtctcctccttcacgt

SEQ ID NO: 1648894 - DNA, 25 bp, Homo sapien
cacgtccacgtggaagcctgacgct

SEQ ID NO: 1648895 - DNA, 25 bp, Homo sapien
tgccagggtaggcacaaccaggcct

SEQ ID NO: 1648896 - DNA, 25 bp, Homo sapien
ggctgatgagctggtataagtcaca

SEQ ID NO: 1648897 - DNA, 25 bp, Homo sapien
aagtcacatgtgatcttgtccttgg

SEQ ID NO: 1648898 - DNA, 25 bp, Homo sapien
cgggccgctcttccttgcggaggcc

SEQ ID NO: 1648899 - DNA, 25 bp, Homo sapien
tggcccgggccgctcttccttgcgg

SEQ ID NO: 1648900 - DNA, 25 bp, Homo sapien
cccgggccgctcttccttgcggagg

SEQ ID NO: 1648901 - DNA, 25 bp, Homo sapien
gcccgggccgctcttccttgcggag

SEQ ID NO: 1648902 - DNA, 25 bp, Homo sapien
gagggctgtccctctgcgcttcaaa

SEQ ID NO: 1648903 - DNA, 25 bp, Homo sapien
gcgcttcaaagtgggccacggcctc

SEQ ID NO: 1648904 - DNA, 25 bp, Homo sapien
cggacacaaagactacaggcgctgg

SEQ ID NO: 1648905 - DNA, 25 bp, Homo sapien
ttggccggtccaccttgctcggcgg

SEQ ID NO: 1648906 - DNA, 25 bp, Homo sapien
ttctcctttgtattcccgggcttga

SEQ ID NO: 1648907 - DNA, 25 bp, Homo sapien
cagtgccccttgaccttcatggagc

SEQ ID NO: 1648908 - DNA, 25 bp, Homo sapien
gatgacataccacgtgtccaggagg

SEQ ID NO: 1648909 - DNA, 25 bp, Homo sapien
cttggccttggagctatcgctgccc

SEQ ID NO: 1648910 - DNA, 25 bp, Homo sapien
atctcaggacctaggtggtggtggg

SEQ ID NO: 1648911 - DNA, 25 bp, Homo sapien
gggcttcagcgcatctcaggaccta

SEQ ID NO: 1648912 - DNA, 25 bp, Homo sapien
tctcaggacctaggtggtggtggga

SEQ ID NO: 1648913 - DNA, 25 bp, Homo sapien
gctatggctgcttaaacccacagag

SEQ ID NO: 1648914 - DNA, 25 bp, Homo sapien
ttttaacttgcagagcgggacccta

SEQ ID NO: 1648915 - DNA, 25 bp, Homo sapien
cagtagctcgttcctgaaaagacag

SEQ ID NO: 1648916 - DNA, 25 bp, Homo sapien
cacagagagaggaacgaaatgcgct

SEQ ID NO: 1648917 - DNA, 25 bp, Homo sapien
gtgtgtcctcagtcagaaaaatgca

SEQ ID NO: 1648918 - DNA, 25 bp, Homo sapien
tgttctagagcctaggaggagttcc

SEQ ID NO: 1648919 - DNA, 25 bp, Homo sapien
cctgggcaaaatccatctctacgaa

SEQ ID NO: 1648920 - DNA, 25 bp, Homo sapien
cccgcggagtaagagggcctgttct

SEQ ID NO: 1648921 - DNA, 25 bp, Homo sapien
gaatgacttgatgtgaatgacctaa

SEQ ID NO: 1648922 - DNA, 25 bp, Homo sapien
cacgagggtgcctgttctagcctag

SEQ ID NO: 1648923 - DNA, 25 bp, Homo sapien
ctaagattacagtgggtccggagca

SEQ ID NO: 1648924 - DNA, 25 bp, Homo sapien
ggcaatcttgcgcatgagtccgaca

SEQ ID NO: 1648925 - DNA, 25 bp, Homo sapien
ccaagatgacactgataggatatgc

SEQ ID NO: 1648926 - DNA, 25 bp, Homo sapien
ttgacctgtataaccaactgcccag

SEQ ID NO: 1648927 - DNA, 25 bp, Homo sapien
gaagggccgaatctcagtcaatctc

SEQ ID NO: 1648928 - DNA, 25 bp, Homo sapien
tatagatggctgtttaccaaccacc

SEQ ID NO: 1648929 - DNA, 25 bp, Homo sapien
tgtgcttactgcacgctcgctgcga

SEQ ID NO: 1648930 - DNA, 25 bp, Homo sapien
tattaatgcctagttcccgatgaga

SEQ ID NO: 1648931 - DNA, 25 bp, Homo sapien
cgctgcgagcttactaggtaggtac

SEQ ID NO: 1648932 - DNA, 25 bp, Homo sapien
caggactggtactctcgggctcttt

SEQ ID NO: 1648933 - DNA, 25 bp, Homo sapien
aggctgcagcccacacgcatgcgcg

SEQ ID NO: 1648934 - DNA, 25 bp, Homo sapien
aacctctgcctcccggttcaagcga

SEQ ID NO: 1648935 - DNA, 25 bp, Homo sapien
cggctcactgcaatcactgcaacct

SEQ ID NO: 1648936 - DNA, 25 bp, Homo sapien
ccatgtccagataattttttcattt

SEQ ID NO: 1648937 - DNA, 25 bp, Homo sapien
cggttcaagcgatttgcttgcctaa

SEQ ID NO: 1648938 - DNA, 25 bp, Homo sapien
ggaaactgacgtccaacgggatcaa

SEQ ID NO: 1648939 - DNA, 25 bp, Homo sapien
gaacgctaattttccagaggaggaa

SEQ ID NO: 1648940 - DNA, 25 bp, Homo sapien
cagaggtgggccctgtctctaagta

SEQ ID NO: 1648941 - DNA, 25 bp, Homo sapien
gagacaggagaatccgctgggccca

SEQ ID NO: 1648942 - DNA, 25 bp, Homo sapien
tttaggagtaagacagctttaccat

SEQ ID NO: 1648943 - DNA, 25 bp, Homo sapien
ttcttcgtttcctagtacatgtcac

SEQ ID NO: 1648944 - DNA, 25 bp, Homo sapien
ctagtacatgtcacaggttttgaaa

SEQ ID NO: 1648945 - DNA, 25 bp, Homo sapien
gaaatacatcattaaacgtggtaaa

SEQ ID NO: 1648946 - DNA, 25 bp, Homo sapien
taatgtgtacaaacagctaaggaca

SEQ ID NO: 1648947 - DNA, 25 bp, Homo sapien
caattaatgctggatagccttggga

SEQ ID NO: 1648948 - DNA, 25 bp, Homo sapien
agccaggctgccaagatcggaatcc

SEQ ID NO: 1648949 - DNA, 25 bp, Homo sapien
gagcccctacatgcttctgagctgg

SEQ ID NO: 1648950 - DNA, 25 bp, Homo sapien
gcgcgctgcatctccctcggctacg

SEQ ID NO: 1648951 - DNA, 25 bp, Homo sapien
atcgccgcgcgctgcatctccctcg

SEQ ID NO: 1648952 - DNA, 25 bp, Homo sapien
gcatctccctcggctacgcgggttt

SEQ ID NO: 1648953 - DNA, 25 bp, Homo sapien
gctgcatctccctcggctacgcggg

SEQ ID NO: 1648954 - DNA, 25 bp, Homo sapien
taacaggcgcgccatcagctaattt

SEQ ID NO: 1648955 - DNA, 25 bp, Homo sapien
tagctggttttagggctcacacagg

SEQ ID NO: 1648956 - DNA, 25 bp, Homo sapien
aaacaagggcgggtatagactgcct

SEQ ID NO: 1648957 - DNA, 25 bp, Homo sapien
gactgccttgagacatagctggttt

SEQ ID NO: 1648958 - DNA, 25 bp, Homo sapien
ccagcacaaccgcatcgtgaagcag

SEQ ID NO: 1648959 - DNA, 25 bp, Homo sapien
gcatcgtgaagcaggacggctccag

SEQ ID NO: 1648960 - DNA, 25 bp, Homo sapien
aaggctcgcaggttcagccgccagc

SEQ ID NO: 1648961 - DNA, 25 bp, Homo sapien
aggactgggagacgccaaagccctt

SEQ ID NO: 1648962 - DNA, 25 bp, Homo sapien
cttacagctagtaccaagtggaggg

SEQ ID NO: 1648963 - DNA, 25 bp, Homo sapien
ttcagcaccaatgtcgggagaggcc

SEQ ID NO: 1648964 - DNA, 25 bp, Homo sapien
ttgtgacaacaccagctatcggcag

SEQ ID NO: 1648965 - DNA, 25 bp, Homo sapien
gggcagggtgttccgcttacagcta

SEQ ID NO: 1648966 - DNA, 25 bp, Homo sapien
gagctgggtcagaaccttggcctca

SEQ ID NO: 1648967 - DNA, 25 bp, Homo sapien
gtgacaacatcagcccctctggtgg

SEQ ID NO: 1648968 - DNA, 25 bp, Homo sapien
tgcgcttagttccagccctgctgac

SEQ ID NO: 1648969 - DNA, 25 bp, Homo sapien
gagatggccgtctctggcttcagtg

SEQ ID NO: 1648970 - DNA, 25 bp, Homo sapien
acacccgtcacgatggggctgccag

SEQ ID NO: 1648971 - DNA, 25 bp, Homo sapien
aggtggcggtgaggatgatcttgcc

SEQ ID NO: 1648972 - DNA, 25 bp, Homo sapien
caggacctgggagacgagcatgctg

SEQ ID NO: 1648973 - DNA, 25 bp, Homo sapien
gcggtgaggatgatcttgccctgct

SEQ ID NO: 1648974 - DNA, 25 bp, Homo sapien
agggaccgagcgcaggtgagagcca

SEQ ID NO: 1648975 - DNA, 25 bp, Homo sapien
tccctctccgagatgactgcacccc

SEQ ID NO: 1648976 - DNA, 25 bp, Homo sapien
tctccgagatgactgcacccctccc

SEQ ID NO: 1648977 - DNA, 25 bp, Homo sapien
cactgggacttgccagggatgagat

SEQ ID NO: 1648978 - DNA, 25 bp, Homo sapien
gatgaggtgcacattggcagggcct

SEQ ID NO: 1648979 - DNA, 25 bp, Homo sapien
ctacctggggcaggttcaatagtgg

SEQ ID NO: 1648980 - DNA, 25 bp, Homo sapien
acgcccaccccggagttgatgaggt

SEQ ID NO: 1648981 - DNA, 25 bp, Homo sapien
agcggtaccacttgtggggcagcca

SEQ ID NO: 1648982 - DNA, 25 bp, Homo sapien
caagggctggtcccggagcagccac

SEQ ID NO: 1648983 - DNA, 25 bp, Homo sapien
ccaagggctggtcccggagcagcca

SEQ ID NO: 1648984 - DNA, 25 bp, Homo sapien
gggcccccgttgaggagcactgctg

SEQ ID NO: 1648985 - DNA, 25 bp, Homo sapien
cgcacctcccctgtctgagggtcca

SEQ ID NO: 1648986 - DNA, 25 bp, Homo sapien
cagccgcacctcccctgtctgaggg

SEQ ID NO: 1648987 - DNA, 25 bp, Homo sapien
ccgttgatgatgacggggcccccgt

SEQ ID NO: 1648988 - DNA, 25 bp, Homo sapien
atggaggaggaagccgggcaaggcg

SEQ ID NO: 1648989 - DNA, 25 bp, Homo sapien
ggaggaagccgggcaaggcgcggga

SEQ ID NO: 1648990 - DNA, 25 bp, Homo sapien
gaagccgggcaaggcgcgggagggc

SEQ ID NO: 1648991 - DNA, 25 bp, Homo sapien
aggatggaggaggaagccgggcaag

SEQ ID NO: 1648992 - DNA, 25 bp, Homo sapien
ggtcctcaggacttcggctggactc

SEQ ID NO: 1648993 - DNA, 25 bp, Homo sapien
gctggactcgtcctcagtcgtggga

SEQ ID NO: 1648994 - DNA, 25 bp, Homo sapien
ggacttcggctggactcgtcctcag

SEQ ID NO: 1648995 - DNA, 25 bp, Homo sapien
gtcctcagtcgtgggattcccatca

SEQ ID NO: 1648996 - DNA, 25 bp, Homo sapien
cccttagcctgtggggcctcccgca

SEQ ID NO: 1648997 - DNA, 25 bp, Homo sapien
gtcagctggggtcccttagcctgtg

SEQ ID NO: 1648998 - DNA, 25 bp, Homo sapien
ctggccggagaaatggctgtcagct

SEQ ID NO: 1648999 - DNA, 25 bp, Homo sapien
ggctgtcagctggggtcccttagcc

SEQ ID NO: 1649000 - DNA, 25 bp, Homo sapien
cagccagctgctcccccacctttcc

SEQ ID NO: 1649001 - DNA, 25 bp, Homo sapien
gccagccagctgctcccccaccttt

SEQ ID NO: 1649002 - DNA, 25 bp, Homo sapien
ccagccagctgctcccccacctttc

SEQ ID NO: 1649003 - DNA, 25 bp, Homo sapien
agccagccagctgctcccccacctt

SEQ ID NO: 1649004 - DNA, 25 bp, Homo sapien
aactccagggccttttgcaagccct

SEQ ID NO: 1649005 - DNA, 25 bp, Homo sapien
gggttatgacgcctctctgagacca

SEQ ID NO: 1649006 - DNA, 25 bp, Homo sapien
ccaagtttcggtggatcattccagg

SEQ ID NO: 1649007 - DNA, 25 bp, Homo sapien
ccctgcgtggacaccactgcagaga

SEQ ID NO: 1649008 - DNA, 25 bp, Homo sapien
gatacttgtccactgcgccaagcgc

SEQ ID NO: 1649009 - DNA, 25 bp, Homo sapien
ttgctgacctgcgtgagcgacaggc

SEQ ID NO: 1649010 - DNA, 25 bp, Homo sapien
gaacttcttgcgcagtcgatacttg

SEQ ID NO: 1649011 - DNA, 25 bp, Homo sapien
acaccgggtcgctgccacgtaggcg

SEQ ID NO: 1649012 - DNA, 25 bp, Homo sapien
gcgagaagcggaggcccgtgggcgg

SEQ ID NO: 1649013 - DNA, 25 bp, Homo sapien
gggcgagaagcggaggcccgtgggc

SEQ ID NO: 1649014 - DNA, 25 bp, Homo sapien
tcgggcgagaagcggaggcccgtgg

SEQ ID NO: 1649015 - DNA, 25 bp, Homo sapien
ctgctcgggcgagaagcggaggccc

SEQ ID NO: 1649016 - DNA, 25 bp, Homo sapien
tctgcaagagctggcgcgcttcctc

SEQ ID NO: 1649017 - DNA, 25 bp, Homo sapien
ctcggccgcctgcaaagtctgcaag

SEQ ID NO: 1649018 - DNA, 25 bp, Homo sapien
agtctgcaagagctggcgcgcttcc

SEQ ID NO: 1649019 - DNA, 25 bp, Homo sapien
gccgcctgcaaagtctgcaagagct

SEQ ID NO: 1649020 - DNA, 25 bp, Homo sapien
ggaaggcgagatccagctctccact

SEQ ID NO: 1649021 - DNA, 25 bp, Homo sapien
cccacgccgggaaggcgagatccag

SEQ ID NO: 1649022 - DNA, 25 bp, Homo sapien
gagatccagctctccactcgggtct

SEQ ID NO: 1649023 - DNA, 25 bp, Homo sapien
cactccccgctcttctcgatcttct

SEQ ID NO: 1649024 - DNA, 25 bp, Homo sapien
gaaagctttgcactttgcgaaccaa

SEQ ID NO: 1649025 - DNA, 25 bp, Homo sapien
ataaatatccaaaccgccgaagcgg

SEQ ID NO: 1649026 - DNA, 25 bp, Homo sapien
caaatttcccgagtaagcaggcaga

SEQ ID NO: 1649027 - DNA, 25 bp, Homo sapien
cagggcgtcatgcacaagaaagctt

SEQ ID NO: 1649028 - DNA, 25 bp, Homo sapien
ctggccgaaagaaagaaatggtctg

SEQ ID NO: 1649029 - DNA, 25 bp, Homo sapien
agaaagaaatggtctgtgatccccc

SEQ ID NO: 1649030 - DNA, 25 bp, Homo sapien
aaagaaagaaatggtctgtgatccc

SEQ ID NO: 1649031 - DNA, 25 bp, Homo sapien
gccgaaagaaagaaatggtctgtga

SEQ ID NO: 1649032 - DNA, 25 bp, Homo sapien
agcattcccggctacaaggaccctt

SEQ ID NO: 1649033 - DNA, 25 bp, Homo sapien
cagcagcattcccggctacaaggac

SEQ ID NO: 1649034 - DNA, 25 bp, Homo sapien
tcgagccccgttcgccggccgcgga

SEQ ID NO: 1649035 - DNA, 25 bp, Homo sapien
gcgggcccggatcacaggactggag

SEQ ID NO: 1649036 - DNA, 25 bp, Homo sapien
gctcggagcggttgtgaactggcag

SEQ ID NO: 1649037 - DNA, 25 bp, Homo sapien
cgggcactcagtcttccaacggggc

SEQ ID NO: 1649038 - DNA, 25 bp, Homo sapien
ggccccggagtcgaagacagttcta

SEQ ID NO: 1649039 - DNA, 25 bp, Homo sapien
tgggcgcggcttctgtgccgtgccc

SEQ ID NO: 1649040 - DNA, 25 bp, Homo sapien
ctgcggtgagttggccggcgtgggc

SEQ ID NO: 1649041 - DNA, 25 bp, Homo sapien
cctgggcggcgccagactgcggtga

SEQ ID NO: 1649042 - DNA, 25 bp, Homo sapien
cagactgcggtgagttggccggcgt

SEQ ID NO: 1649043 - DNA, 25 bp, Homo sapien
cggcgccagactgcggtgagttggc

SEQ ID NO: 1649044 - DNA, 25 bp, Homo sapien
ggcacgagacagaacaacggcgaac

SEQ ID NO: 1649045 - DNA, 25 bp, Homo sapien
gagacagaacaacggcgaacaggag

SEQ ID NO: 1649046 - DNA, 25 bp, Homo sapien
agggcggcggcacgagacagaacaa

SEQ ID NO: 1649047 - DNA, 25 bp, Homo sapien
cagaacaacggcgaacaggagcagg

SEQ ID NO: 1649048 - DNA, 25 bp, Homo sapien
agcaggtggcggcggtgcatggggc

SEQ ID NO: 1649049 - DNA, 25 bp, Homo sapien
cagcaggtggcggcggtgcatgggg

SEQ ID NO: 1649050 - DNA, 25 bp, Homo sapien
gcagcaggtggcggcggtgcatggg

SEQ ID NO: 1649051 - DNA, 25 bp, Homo sapien
cccacagccacggccggggggccat

SEQ ID NO: 1649052 - DNA, 25 bp, Homo sapien
cagcgggcactggcccacagccacg

SEQ ID NO: 1649053 - DNA, 25 bp, Homo sapien
gcgggcactggcccacagccacggc

SEQ ID NO: 1649054 - DNA, 25 bp, Homo sapien
ctggcccacagccacggccgggggg

SEQ ID NO: 1649055 - DNA, 25 bp, Homo sapien
gggcttctgccctctaaagtcgcaa

SEQ ID NO: 1649056 - DNA, 25 bp, Homo sapien
gatctggggctgaataaagggcttc

SEQ ID NO: 1649057 - DNA, 25 bp, Homo sapien
gacaggtgacccgatcggagcccag

SEQ ID NO: 1649058 - DNA, 25 bp, Homo sapien
tagggtgagccctatatctggacgg

SEQ ID NO: 1649059 - DNA, 25 bp, Homo sapien
atgggaaggtggatccgtggcccgg

SEQ ID NO: 1649060 - DNA, 25 bp, Homo sapien
aggtggatccgtggcccggggactg

SEQ ID NO: 1649061 - DNA, 25 bp, Homo sapien
ccctcctccaggtgtctatacacgc

SEQ ID NO: 1649062 - DNA, 25 bp, Homo sapien
gtgtctatacacgccccgcggagca

SEQ ID NO: 1649063 - DNA, 25 bp, Homo sapien
gaagaaagaggcatagggcgcgtgg

SEQ ID NO: 1649064 - DNA, 25 bp, Homo sapien
cggcgtgccccagcgtgggtccctt

SEQ ID NO: 1649065 - DNA, 25 bp, Homo sapien
ggttccgagcctctgcctcgcgtag

SEQ ID NO: 1649066 - DNA, 25 bp, Homo sapien
tgtgcctctaggtcccggttccgag

SEQ ID NO: 1649067 - DNA, 25 bp, Homo sapien
ctgcaactgccggacgtgtgcctct

SEQ ID NO: 1649068 - DNA, 25 bp, Homo sapien
ccgagcctctgcctcgcgtagttga

SEQ ID NO: 1649069 - DNA, 25 bp, Homo sapien
cgaagttctggttgtccgtgcggat

SEQ ID NO: 1649070 - DNA, 25 bp, Homo sapien
ggctctgccgggtgagcacctcctc

SEQ ID NO: 1649071 - DNA, 25 bp, Homo sapien
cgcagcgtcacctcggcctcagcct

SEQ ID NO: 1649072 - DNA, 25 bp, Homo sapien
ctggcgaagttctggttgtccgtgc

SEQ ID NO: 1649073 - DNA, 25 bp, Homo sapien
ctccaggctgggcgcttgcacgtgt

SEQ ID NO: 1649074 - DNA, 25 bp, Homo sapien
ctccagttccatgggtgtggggcct

SEQ ID NO: 1649075 - DNA, 25 bp, Homo sapien
gcttgcacgtgtggctcaagcagct

SEQ ID NO: 1649076 - DNA, 25 bp, Homo sapien
ctgggcgcttgcacgtgtggctcaa

SEQ ID NO: 1649077 - DNA, 25 bp, Homo sapien
cattttgaagtacatagatctgaaa

SEQ ID NO: 1649078 - DNA, 25 bp, Homo sapien
ccaaaacagtaaggttccaagactg

SEQ ID NO: 1649079 - DNA, 25 bp, Homo sapien
tggttacaagattctgggaagccca

SEQ ID NO: 1649080 - DNA, 25 bp, Homo sapien
aactctggcctcttaggagtctttg

SEQ ID NO: 1649081 - DNA, 25 bp, Homo sapien
gccatgcaggagtaggagtagccca

SEQ ID NO: 1649082 - DNA, 25 bp, Homo sapien
aggtggacccctagcggcgcacctt

SEQ ID NO: 1649083 - DNA, 25 bp, Homo sapien
ggagtaggagtagcccacaaaaggc

SEQ ID NO: 1649084 - DNA, 25 bp, Homo sapien
gcaccttcccgaatgtccgacagtg

SEQ ID NO: 1649085 - DNA, 25 bp, Homo sapien
agtattgttcagcaaaagggcaccc

SEQ ID NO: 1649086 - DNA, 25 bp, Homo sapien
gctggatccccagtattgttcagca

SEQ ID NO: 1649087 - DNA, 25 bp, Homo sapien
ttctctagactgcaactggatgagg

SEQ ID NO: 1649088 - DNA, 25 bp, Homo sapien
taattctctaattctctagactgca

SEQ ID NO: 1649089 - DNA, 25 bp, Homo sapien
tcggtggcaccttcgaaatccggtg

SEQ ID NO: 1649090 - DNA, 25 bp, Homo sapien
tcgaagttgcatgtgtcggtggcac

SEQ ID NO: 1649091 - DNA, 25 bp, Homo sapien
cagcaaccgctgaatgaagtctcga

SEQ ID NO: 1649092 - DNA, 25 bp, Homo sapien
accatcccagtcgaggccaaagaag

SEQ ID NO: 1649093 - DNA, 25 bp, Homo sapien
atcttgccataggtctccgccgtgg

SEQ ID NO: 1649094 - DNA, 25 bp, Homo sapien
gaatccgcgtagaagggcgtctgcc

SEQ ID NO: 1649095 - DNA, 25 bp, Homo sapien
gggcgtctgcccatagaacatttca

SEQ ID NO: 1649096 - DNA, 25 bp, Homo sapien
atttcataggcgaatacacccagcg

SEQ ID NO: 1649097 - DNA, 25 bp, Homo sapien
tgggcccacccctctgggcccacca

SEQ ID NO: 1649098 - DNA, 25 bp, Homo sapien
accaaaaggagcagagcgaggcttg

SEQ ID NO: 1649099 - DNA, 25 bp, Homo sapien
aaaaggagcagagcgaggcttgggc

SEQ ID NO: 1649100 - DNA, 25 bp, Homo sapien
gaccaaaaggagcagagcgaggctt

SEQ ID NO: 1649101 - DNA, 25 bp, Homo sapien
gctctgtggccagggcactggctca

SEQ ID NO: 1649102 - DNA, 25 bp, Homo sapien
tgtgccttccatccctcatcagcag

SEQ ID NO: 1649103 - DNA, 25 bp, Homo sapien
actctgtgccttccatccctcatca

SEQ ID NO: 1649104 - DNA, 25 bp, Homo sapien
atcagcagccccagttgctctgtgg

SEQ ID NO: 1649105 - DNA, 25 bp, Homo sapien
gcaagagccgaagtcggccaggcgg

SEQ ID NO: 1649106 - DNA, 25 bp, Homo sapien
aagagccgaagtcggccaggcggat

SEQ ID NO: 1649107 - DNA, 25 bp, Homo sapien
tccagcaggatgttgtcgggtttga

SEQ ID NO: 1649108 - DNA, 25 bp, Homo sapien
cggatgtggccacagcggtccagca

SEQ ID NO: 1649109 - DNA, 25 bp, Homo sapien
gacaatctccgccaggtagaagcgc

SEQ ID NO: 1649110 - DNA, 25 bp, Homo sapien
agaagcgcgccatctcggccggaat

SEQ ID NO: 1649111 - DNA, 25 bp, Homo sapien
cggtgcaccgagtctatggccatga

SEQ ID NO: 1649112 - DNA, 25 bp, Homo sapien
tgtgcacgtagccaagccggtgcac

SEQ ID NO: 1649113 - DNA, 25 bp, Homo sapien
gcagtggccccgttagaattcctga

SEQ ID NO: 1649114 - DNA, 25 bp, Homo sapien
gataaccatagagatctgccgggcc

SEQ ID NO: 1649115 - DNA, 25 bp, Homo sapien
cagaaacgggcagtgaaggacacca

SEQ ID NO: 1649116 - DNA, 25 bp, Homo sapien
tccatcacggatggctgggacaacc

SEQ ID NO: 1649117 - DNA, 25 bp, Homo sapien
tcccacagacgtttccgggcagcac

SEQ ID NO: 1649118 - DNA, 25 bp, Homo sapien
ttcccacagacgtttccgggcagca

SEQ ID NO: 1649119 - DNA, 25 bp, Homo sapien
cccacagacgtttccgggcagcacc

SEQ ID NO: 1649120 - DNA, 25 bp, Homo sapien
ccacagacgtttccgggcagcaccc

SEQ ID NO: 1649121 - DNA, 25 bp, Homo sapien
aaggcgaagtgcagctgcgtgatcc

SEQ ID NO: 1649122 - DNA, 25 bp, Homo sapien
tccctctcctcacggaagcacgaca

SEQ ID NO: 1649123 - DNA, 25 bp, Homo sapien
gccggtccccattcaccaacacgtc

SEQ ID NO: 1649124 - DNA, 25 bp, Homo sapien
tgcagctgcgtgatccaccgccggt

SEQ ID NO: 1649125 - DNA, 25 bp, Homo sapien
tggcccgtctgcttcatcttcacta

SEQ ID NO: 1649126 - DNA, 25 bp, Homo sapien
tcatgatcttcatggcatacacctg

SEQ ID NO: 1649127 - DNA, 25 bp, Homo sapien
cagcatgtcccacttgttcatgatc

SEQ ID NO: 1649128 - DNA, 25 bp, Homo sapien
catggcatacacctggcccgtctgc

SEQ ID NO: 1649129 - DNA, 25 bp, Homo sapien
acagagtggagacggcgggaaaaca

SEQ ID NO: 1649130 - DNA, 25 bp, Homo sapien
cgagatagtgagacagagtggagac

SEQ ID NO: 1649131 - DNA, 25 bp, Homo sapien
aagggctcgcccagacccaactcca

SEQ ID NO: 1649132 - DNA, 25 bp, Homo sapien
ctgaggtcgagatagtgagacagag

SEQ ID NO: 1649133 - DNA, 25 bp, Homo sapien
cgaagtcgtccctctgcagtcggac

SEQ ID NO: 1649134 - DNA, 25 bp, Homo sapien
ttaagcctcaccacgatgggctccg

SEQ ID NO: 1649135 - DNA, 25 bp, Homo sapien
tctgcagtcggacctccttaagcct

SEQ ID NO: 1649136 - DNA, 25 bp, Homo sapien
gcgtccgatcaccttcagaatctcg

SEQ ID NO: 1649137 - DNA, 25 bp, Homo sapien
caaaaatgccctcccatagaggtga

SEQ ID NO: 1649138 - DNA, 25 bp, Homo sapien
ggcttccccacataaacaccgtgta

SEQ ID NO: 1649139 - DNA, 25 bp, Homo sapien
cctttgcgggacagggcattggccc

SEQ ID NO: 1649140 - DNA, 25 bp, Homo sapien
atagaggtgagatgcctgagaagcc

SEQ ID NO: 1649141 - DNA, 25 bp, Homo sapien
cacactttggaaaaccctggatttg

SEQ ID NO: 1649142 - DNA, 25 bp, Homo sapien
caggacagggagacaaaggtagcat

SEQ ID NO: 1649143 - DNA, 25 bp, Homo sapien
tccaggaggagtgctttagtcctac

SEQ ID NO: 1649144 - DNA, 25 bp, Homo sapien
gaatgttaaactgggcagcctgggt

SEQ ID NO: 1649145 - DNA, 25 bp, Homo sapien
aaggtagcatggtcacatatcccag

SEQ ID NO: 1649146 - DNA, 25 bp, Homo sapien
cattaggggctgtgggaggttggga

SEQ ID NO: 1649147 - DNA, 25 bp, Homo sapien
ttaggggctgtgggaggttgggaga

SEQ ID NO: 1649148 - DNA, 25 bp, Homo sapien
tcattaggggctgtgggaggttggg

SEQ ID NO: 1649149 - DNA, 25 bp, Homo sapien
taggggctgtgggaggttgggagaa

SEQ ID NO: 1649150 - DNA, 25 bp, Homo sapien
aaagaaaccagtgaccagtgagccc

SEQ ID NO: 1649151 - DNA, 25 bp, Homo sapien
caaagttgtccctcctggatcgcag

SEQ ID NO: 1649152 - DNA, 25 bp, Homo sapien
caggagaactaaaggacgcagggac

SEQ ID NO: 1649153 - DNA, 25 bp, Homo sapien
cactgagggccagacatatgagggc

SEQ ID NO: 1649154 - DNA, 25 bp, Homo sapien
cccactgcaagaagtcggccacgta

SEQ ID NO: 1649155 - DNA, 25 bp, Homo sapien
ggaagcccgggtccaacaccagctg

SEQ ID NO: 1649156 - DNA, 25 bp, Homo sapien
gccacgtacttgtcctgggccagtt

SEQ ID NO: 1649157 - DNA, 25 bp, Homo sapien
acgcccaggagaaggtcgagcaggg

SEQ ID NO: 1649158 - DNA, 25 bp, Homo sapien
tggagccctggctgcatgtctgcct

SEQ ID NO: 1649159 - DNA, 25 bp, Homo sapien
gggggctcggggtcctcctgtcaca

SEQ ID NO: 1649160 - DNA, 25 bp, Homo sapien
gggctcggggtcctcctgtcacagg

SEQ ID NO: 1649161 - DNA, 25 bp, Homo sapien
ctggctgcatgtctgcctgtccctg

SEQ ID NO: 1649162 - DNA, 25 bp, Homo sapien
tccgactcggacagttaaatttagc

SEQ ID NO: 1649163 - DNA, 25 bp, Homo sapien
gtgactcagagatggattccgactc

SEQ ID NO: 1649164 - DNA, 25 bp, Homo sapien
tgaggctgagtgacccagtagcaac

SEQ ID NO: 1649165 - DNA, 25 bp, Homo sapien
tgggcaaacgagaccccaaaatagc

SEQ ID NO: 1649166 - DNA, 25 bp, Homo sapien
tctttccagggtggacggttctcca

SEQ ID NO: 1649167 - DNA, 25 bp, Homo sapien
ccctgcggctccgagagccaagagg

SEQ ID NO: 1649168 - DNA, 25 bp, Homo sapien
ctccctgcggctccgagagccaaga

SEQ ID NO: 1649169 - DNA, 25 bp, Homo sapien
cactccctgcggctccgagagccaa

SEQ ID NO: 1649170 - DNA, 25 bp, Homo sapien
gggctccggcttttcctgctatgaa

SEQ ID NO: 1649171 - DNA, 25 bp, Homo sapien
gcggactgcctagaaccacagagta

SEQ ID NO: 1649172 - DNA, 25 bp, Homo sapien
accagttgtgtgactcgcaggtccg

SEQ ID NO: 1649173 - DNA, 25 bp, Homo sapien
tataaataagaggtcctgcgggaca

SEQ ID NO: 1649174 - DNA, 25 bp, Homo sapien
agttgcctggttgggaggagatgcc

SEQ ID NO: 1649175 - DNA, 25 bp, Homo sapien
gagttgcctggttgggaggagatgc

SEQ ID NO: 1649176 - DNA, 25 bp, Homo sapien
tcacaccactgtgccactcggggag

SEQ ID NO: 1649177 - DNA, 25 bp, Homo sapien
cactgtgccactcggggagttgcct

SEQ ID NO: 1649178 - DNA, 25 bp, Homo sapien
catcttagctagcttcctgtcctgg

SEQ ID NO: 1649179 - DNA, 25 bp, Homo sapien
gtcagcactttcacgcaataatcaa

SEQ ID NO: 1649180 - DNA, 25 bp, Homo sapien
cactgctctaggctgggaacttgca

SEQ ID NO: 1649181 - DNA, 25 bp, Homo sapien
gggttagagaccacctgggcttcag

SEQ ID NO: 1649182 - DNA, 25 bp, Homo sapien
taccactgacttgctgggtgacctg

SEQ ID NO: 1649183 - DNA, 25 bp, Homo sapien
cttcccctgtctgggcctcggtctc

SEQ ID NO: 1649184 - DNA, 25 bp, Homo sapien
tgggccaacttccttcccctgtctg

SEQ ID NO: 1649185 - DNA, 25 bp, Homo sapien
cttgctgggtgacctgggccaactt

SEQ ID NO: 1649186 - DNA, 25 bp, Homo sapien
ccttcagacggccagccttggatgc

SEQ ID NO: 1649187 - DNA, 25 bp, Homo sapien
ttcccacgaaaggtcctgccaggtc

SEQ ID NO: 1649188 - DNA, 25 bp, Homo sapien
ttggatgccccaattcctagctggc

SEQ ID NO: 1649189 - DNA, 25 bp, Homo sapien
tactgagacactaagatttccctgg

SEQ ID NO: 1649190 - DNA, 25 bp, Homo sapien
cgaagcggccaatgctgaatggtgt

SEQ ID NO: 1649191 - DNA, 25 bp, Homo sapien
gtgaaggaccacacggtgaccaggt

SEQ ID NO: 1649192 - DNA, 25 bp, Homo sapien
cgccgagccaaagcggtaagtaatg

SEQ ID NO: 1649193 - DNA, 25 bp, Homo sapien
caggctgtggtagcgcttgtgctcc

SEQ ID NO: 1649194 - DNA, 25 bp, Homo sapien
tcaccttggtcttgtcgatcaaccg

SEQ ID NO: 1649195 - DNA, 25 bp, Homo sapien
ccttgctcttggcagcatagacaga

SEQ ID NO: 1649196 - DNA, 25 bp, Homo sapien
catcgggcgagaaggcgaactcgtt

SEQ ID NO: 1649197 - DNA, 25 bp, Homo sapien
agtcgaagtggaagacgcgcaggca

SEQ ID NO: 1649198 - DNA, 25 bp, Homo sapien
tcctcggagagaagctcccaaactg

SEQ ID NO: 1649199 - DNA, 25 bp, Homo sapien
tggacaccaggtcatggaaacatgg

SEQ ID NO: 1649200 - DNA, 25 bp, Homo sapien
ctcgatgtcccatctttggcgaggg

SEQ ID NO: 1649201 - DNA, 25 bp, Homo sapien
cccaagaaggccgttggacatggcc

SEQ ID NO: 1649202 - DNA, 25 bp, Homo sapien
tcaggtgagccccaatgagaaaggc

SEQ ID NO: 1649203 - DNA, 25 bp, Homo sapien
caggcttccaactaagagtaaggca

SEQ ID NO: 1649204 - DNA, 25 bp, Homo sapien
ccagtgtatgcaactaaggagctgc

SEQ ID NO: 1649205 - DNA, 25 bp, Homo sapien
cagcgatgctctgtgaagtatcagc

SEQ ID NO: 1649206 - DNA, 25 bp, Homo sapien
taatccactgactgttccgttcact

SEQ ID NO: 1649207 - DNA, 25 bp, Homo sapien
tgcccgcggataaggtcgtttactg

SEQ ID NO: 1649208 - DNA, 25 bp, Homo sapien
catgtatgattctacaacagcggtc

SEQ ID NO: 1649209 - DNA, 25 bp, Homo sapien
tatctcctcgtaggccaagttggcc

SEQ ID NO: 1649210 - DNA, 25 bp, Homo sapien
gtcccgacttatttactagcctcaa

SEQ ID NO: 1649211 - DNA, 25 bp, Homo sapien
cacatgatgagtaaatggtgcagca

SEQ ID NO: 1649212 - DNA, 25 bp, Homo sapien
aagagcaagggcatcaactaagtcc

SEQ ID NO: 1649213 - DNA, 25 bp, Homo sapien
aatgggcagcacacttctgtatcca

SEQ ID NO: 1649214 - DNA, 25 bp, Homo sapien
tattcagcacaagggtaacacagca

SEQ ID NO: 1649215 - DNA, 25 bp, Homo sapien
cctgggtacagtaaaggcagctgtc

SEQ ID NO: 1649216 - DNA, 25 bp, Homo sapien
agcacaagggtaacacagcacaggg

SEQ ID NO: 1649217 - DNA, 25 bp, Homo sapien
aacccaaggagtaaagtattcagca

SEQ ID NO: 1649218 - DNA, 25 bp, Homo sapien
cgcaggcagctgcatcctaatggca

SEQ ID NO: 1649219 - DNA, 25 bp, Homo sapien
tatagtgggtaggtgagaaggcaga

SEQ ID NO: 1649220 - DNA, 25 bp, Homo sapien
tgttccgcaggcagctgcatcctaa

SEQ ID NO: 1649221 - DNA, 25 bp, Homo sapien
agctgcatcctaatggcatatagtg

SEQ ID NO: 1649222 - DNA, 25 bp, Homo sapien
gctgggtgcccttgtagatccgctt

SEQ ID NO: 1649223 - DNA, 25 bp, Homo sapien
ttttgatgagatccaggtactgcac

SEQ ID NO: 1649224 - DNA, 25 bp, Homo sapien
ggtactgcacttgacccgctgagaa

SEQ ID NO: 1649225 - DNA, 25 bp, Homo sapien
cagtgaactggttgaaatcgtggca

SEQ ID NO: 1649226 - DNA, 25 bp, Homo sapien
agaaaaggagttaatggtgtatgcc

SEQ ID NO: 1649227 - DNA, 25 bp, Homo sapien
gaaaaggagttaatggtgtatgcca

SEQ ID NO: 1649228 - DNA, 25 bp, Homo sapien
gagaaaaggagttaatggtgtatgc

SEQ ID NO: 1649229 - DNA, 25 bp, Homo sapien
ctcccacgacgacagcagcctgggt

SEQ ID NO: 1649230 - DNA, 25 bp, Homo sapien
ccgttggctcccacgacgacagcag

SEQ ID NO: 1649231 - DNA, 25 bp, Homo sapien
ttggctcccacgacgacagcagcct

SEQ ID NO: 1649232 - DNA, 25 bp, Homo sapien
ggctcccacgacgacagcagcctgg

SEQ ID NO: 1649233 - DNA, 25 bp, Homo sapien
aaccctcgcgcgtgcggaattgcga

SEQ ID NO: 1649234 - DNA, 25 bp, Homo sapien
gaattgcgacttaatctccgcgcag

SEQ ID NO: 1649235 - DNA, 25 bp, Homo sapien
tcacggcccaagttgaagcagacgc

SEQ ID NO: 1649236 - DNA, 25 bp, Homo sapien
ccgtcgcccgggagtagcttgtaga

SEQ ID NO: 1649237 - DNA, 25 bp, Homo sapien
aatccatgctaactacctctaaggg

SEQ ID NO: 1649238 - DNA, 25 bp, Homo sapien
tggggacaggaagcacatagtgaaa

SEQ ID NO: 1649239 - DNA, 25 bp, Homo sapien
atttgctatctacctgcttggggaa

SEQ ID NO: 1649240 - DNA, 25 bp, Homo sapien
tacctgcttggggaaagtggctaga

SEQ ID NO: 1649241 - DNA, 25 bp, Homo sapien
ctctgtggctcccagggcttgttcc

SEQ ID NO: 1649242 - DNA, 25 bp, Homo sapien
agggcttgttcctgggctgctttca

SEQ ID NO: 1649243 - DNA, 25 bp, Homo sapien
gctgctttcagagcctgctcctctt

SEQ ID NO: 1649244 - DNA, 25 bp, Homo sapien
tggctcccagggcttgttcctgggc

SEQ ID NO: 1649245 - DNA, 25 bp, Homo sapien
aagctctcggggctgtacttgtgac

SEQ ID NO: 1649246 - DNA, 25 bp, Homo sapien
gccactggggtactcttgttgaatg

SEQ ID NO: 1649247 - DNA, 25 bp, Homo sapien
gaccccagccgatgtagatgttctc

SEQ ID NO: 1649248 - DNA, 25 bp, Homo sapien
ggcagggccgggttgaagctctcgg

SEQ ID NO: 1649249 - DNA, 25 bp, Homo sapien
tggagcgcacaacggccactgagta

SEQ ID NO: 1649250 - DNA, 25 bp, Homo sapien
taggccccgggccagaggttggagc

SEQ ID NO: 1649251 - DNA, 25 bp, Homo sapien
tgccactggcataggcataggcccc

SEQ ID NO: 1649252 - DNA, 25 bp, Homo sapien
ccagaggttggagcgcacaacggcc

SEQ ID NO: 1649253 - DNA, 25 bp, Homo sapien
gaggctgcaggacaggcgggtggtc

SEQ ID NO: 1649254 - DNA, 25 bp, Homo sapien
gggtggtccagggtgccaggtgcat

SEQ ID NO: 1649255 - DNA, 25 bp, Homo sapien
ggctgcaggacaggcgggtggtcca

SEQ ID NO: 1649256 - DNA, 25 bp, Homo sapien
aggcgggtggtccagggtgccaggt

SEQ ID NO: 1649257 - DNA, 25 bp, Homo sapien
gcagtggggggccaacctcctgctc

SEQ ID NO: 1649258 - DNA, 25 bp, Homo sapien
ttctgcaaagggttcacccaagtgc

SEQ ID NO: 1649259 - DNA, 25 bp, Homo sapien
tcttctgaaagtggcgttagcagtg

SEQ ID NO: 1649260 - DNA, 25 bp, Homo sapien
aaagggttcacccaagtgcagcggc

SEQ ID NO: 1649261 - DNA, 25 bp, Homo sapien
tcctgccgtttgtgagaggcgggag

SEQ ID NO: 1649262 - DNA, 25 bp, Homo sapien
tgccgtttgtgagaggcgggagtcc

SEQ ID NO: 1649263 - DNA, 25 bp, Homo sapien
ccctgctcctgccgtttgtgagagg

SEQ ID NO: 1649264 - DNA, 25 bp, Homo sapien
gccgtttgtgagaggcgggagtccc

SEQ ID NO: 1649265 - DNA, 25 bp, Homo sapien
tacaggtacttgttggcgcctgagc

SEQ ID NO: 1649266 - DNA, 25 bp, Homo sapien
ggcccggctcgttgcacacaaagta

SEQ ID NO: 1649267 - DNA, 25 bp, Homo sapien
tgacgactggcgtgtccaggtagcc

SEQ ID NO: 1649268 - DNA, 25 bp, Homo sapien
tctttcgggcgttcacgatctgggc

SEQ ID NO: 1649269 - DNA, 25 bp, Homo sapien
agggacgatgtccacggccttctcc

SEQ ID NO: 1649270 - DNA, 25 bp, Homo sapien
ctcgccgtgcgcctccatgacctcg

SEQ ID NO: 1649271 - DNA, 25 bp, Homo sapien
cttagggacgatgtccacggccttc

SEQ ID NO: 1649272 - DNA, 25 bp, Homo sapien
tgcgcctccatgacctcgccacctt

SEQ ID NO: 1649273 - DNA, 25 bp, Homo sapien
gctcgaagtagaaggcagtctccat

SEQ ID NO: 1649274 - DNA, 25 bp, Homo sapien
acgccggcctgctcgaagtagaagg

SEQ ID NO: 1649275 - DNA, 25 bp, Homo sapien
ccaccaggtagctgcgtttgattcc

SEQ ID NO: 1649276 - DNA, 25 bp, Homo sapien
cttgccccagaagcgacaggtgtgg

SEQ ID NO: 1649277 - DNA, 25 bp, Homo sapien
gatcttggtcagcagattcaccagg

SEQ ID NO: 1649278 - DNA, 25 bp, Homo sapien
tccgccatcttgtaggtgggctgca

SEQ ID NO: 1649279 - DNA, 25 bp, Homo sapien
tgcgtggtgcggttcagagactcca

SEQ ID NO: 1649280 - DNA, 25 bp, Homo sapien
tcaggccgctggttcaggatcttgg

SEQ ID NO: 1649281 - DNA, 25 bp, Homo sapien
agagggacctcactcactcagctca

SEQ ID NO: 1649282 - DNA, 25 bp, Homo sapien
actgagctggctcccatgtgcctgg

SEQ ID NO: 1649283 - DNA, 25 bp, Homo sapien
gaggagagggacctcactcactcag

SEQ ID NO: 1649284 - DNA, 25 bp, Homo sapien
tcactgagctggctcccatgtgcct

SEQ ID NO: 1649285 - DNA, 25 bp, Homo sapien
gttggcagtcttgggtgtggtgttg

SEQ ID NO: 1649286 - DNA, 25 bp, Homo sapien
ttgctttgcggaagctgttttgttg

SEQ ID NO: 1649287 - DNA, 25 bp, Homo sapien
tttgttggcagtcttgggtgtggtg

SEQ ID NO: 1649288 - DNA, 25 bp, Homo sapien
gctttgcggaagctgttttgttggc

SEQ ID NO: 1649289 - DNA, 25 bp, Homo sapien
gcacctgggcactgtagtgtgggaa

SEQ ID NO: 1649290 - DNA, 25 bp, Homo sapien
gctgaggtcgcaattgatgctggtc

SEQ ID NO: 1649291 - DNA, 25 bp, Homo sapien
tgaagggcagggtcatcccttatgt

SEQ ID NO: 1649292 - DNA, 25 bp, Homo sapien
gtaggccttggcgttctgcacggcc

SEQ ID NO: 1649293 - DNA, 25 bp, Homo sapien
ctgtctggtagaggttgaactggcc

SEQ ID NO: 1649294 - DNA, 25 bp, Homo sapien
ggcatcagcaagttctcctgttggg

SEQ ID NO: 1649295 - DNA, 25 bp, Homo sapien
catcctgctttcatcagagtaaggc

SEQ ID NO: 1649296 - DNA, 25 bp, Homo sapien
aaagcccgtgttcacagatgggtac

SEQ ID NO: 1649297 - DNA, 25 bp, Homo sapien
tttcgctgggcgtctggaggtatct

SEQ ID NO: 1649298 - DNA, 25 bp, Homo sapien
tgtgaccaaccaggggcgtttcgct

SEQ ID NO: 1649299 - DNA, 25 bp, Homo sapien
cctgagaagtcctccggcccggagg

SEQ ID NO: 1649300 - DNA, 25 bp, Homo sapien
cctgagcttggtcccgactgtgccg

SEQ ID NO: 1649301 - DNA, 25 bp, Homo sapien
aaggcttgcagacaaggaggccaag

SEQ ID NO: 1649302 - DNA, 25 bp, Homo sapien
agaaaggcttgcagacaaggaggcc

SEQ ID NO: 1649303 - DNA, 25 bp, Homo sapien
ttgcagacaaggaggccaagcgaga

SEQ ID NO: 1649304 - DNA, 25 bp, Homo sapien
agacaaggaggccaagcgagagcca

SEQ ID NO: 1649305 - DNA, 25 bp, Homo sapien
tgtcgacaccgccggtttctgagca

SEQ ID NO: 1649306 - DNA, 25 bp, Homo sapien
caccgccggtttctgagcaccgaga

SEQ ID NO: 1649307 - DNA, 25 bp, Homo sapien
gacaccgccggtttctgagcaccga

SEQ ID NO: 1649308 - DNA, 25 bp, Homo sapien
cgccggtttctgagcaccgagagag

SEQ ID NO: 1649309 - DNA, 25 bp, Homo sapien
tttaaggcaaagcacccgcaggtca

SEQ ID NO: 1649310 - DNA, 25 bp, Homo sapien
cacccgcaggtcaagccccgccccg

SEQ ID NO: 1649311 - DNA, 25 bp, Homo sapien
ctttttaaggcaaagcacccgcagg

SEQ ID NO: 1649312 - DNA, 25 bp, Homo sapien
gcaaagcacccgcaggtcaagcccc

SEQ ID NO: 1649313 - DNA, 25 bp, Homo sapien
catcttctccaacaggtgcgagggt

SEQ ID NO: 1649314 - DNA, 25 bp, Homo sapien
ttctccaacaggtgcgagggtctgg

SEQ ID NO: 1649315 - DNA, 25 bp, Homo sapien
tggcgtcctcggcagccgggctggg

SEQ ID NO: 1649316 - DNA, 25 bp, Homo sapien
tcttctccaacaggtgcgagggtct

SEQ ID NO: 1649317 - DNA, 25 bp, Homo sapien
ccgagtcgtcatccatgctgatgaa

SEQ ID NO: 1649318 - DNA, 25 bp, Homo sapien
actagagtccaacagcgcggcctcg

SEQ ID NO: 1649319 - DNA, 25 bp, Homo sapien
gggccctcgagactagagtccaaca

SEQ ID NO: 1649320 - DNA, 25 bp, Homo sapien
tgctgatgaagatgcccggggtctc

SEQ ID NO: 1649321 - DNA, 25 bp, Homo sapien
tggccgggccgacggagagggagag

SEQ ID NO: 1649322 - DNA, 25 bp, Homo sapien
tgggccagtcgcaggccgatgaggt

SEQ ID NO: 1649323 - DNA, 25 bp, Homo sapien
gggccagtcgcaggccgatgaggtc

SEQ ID NO: 1649324 - DNA, 25 bp, Homo sapien
cctgcttgccgctggcctccaagat

SEQ ID NO: 1649325 - DNA, 25 bp, Homo sapien
agatggtcatgatggagttagggat

SEQ ID NO: 1649326 - DNA, 25 bp, Homo sapien
tctggctcctgcttgccgctggcct

SEQ ID NO: 1649327 - DNA, 25 bp, Homo sapien
catgatggagttagggatgtgagct

SEQ ID NO: 1649328 - DNA, 25 bp, Homo sapien
acttgtcaaagacggctcccagctg

SEQ ID NO: 1649329 - DNA, 25 bp, Homo sapien
agctctgggcacttgtcaaagacgg

SEQ ID NO: 1649330 - DNA, 25 bp, Homo sapien
gtgaaggagcggacatgggccagca

SEQ ID NO: 1649331 - DNA, 25 bp, Homo sapien
tctgggcacttgtcaaagacggctc

SEQ ID NO: 1649332 - DNA, 25 bp, Homo sapien
agtgcagtgagtggcgcgtttcttc

SEQ ID NO: 1649333 - DNA, 25 bp, Homo sapien
agtgagtggcgcgtttcttcctcac

SEQ ID NO: 1649334 - DNA, 25 bp, Homo sapien
tatcgtggtatttctaaagcccaaa

SEQ ID NO: 1649335 - DNA, 25 bp, Homo sapien
cacacctggccttatcgtggtattt

SEQ ID NO: 1649336 - DNA, 25 bp, Homo sapien
gatgacggtcctcatgagcagcatg

SEQ ID NO: 1649337 - DNA, 25 bp, Homo sapien
acggccagcacctctgacgtgtaca

SEQ ID NO: 1649338 - DNA, 25 bp, Homo sapien
gacaggatgttcatgacgaagcccc

SEQ ID NO: 1649339 - DNA, 25 bp, Homo sapien
gcttcatgatgaggcgggacaggat

SEQ ID NO: 1649340 - DNA, 25 bp, Homo sapien
tagaacacgaaagtaagcagcacag

SEQ ID NO: 1649341 - DNA, 25 bp, Homo sapien
cagggcttctaatctgggtccacaa

SEQ ID NO: 1649342 - DNA, 25 bp, Homo sapien
tactgtcctgggaatgggctagaac

SEQ ID NO: 1649343 - DNA, 25 bp, Homo sapien
tgcttggccctgagtaagtcaccta

SEQ ID NO: 1649344 - DNA, 25 bp, Homo sapien
catgtgggtgactgaggtcctgccc

SEQ ID NO: 1649345 - DNA, 25 bp, Homo sapien
gcacagcaggtacatcagaggcaga

SEQ ID NO: 1649346 - DNA, 25 bp, Homo sapien
ggagggaggtggctctccagagctc

SEQ ID NO: 1649347 - DNA, 25 bp, Homo sapien
tgagtgacagtctttgacttggcag

SEQ ID NO: 1649348 - DNA, 25 bp, Homo sapien
gtgtaatgcgatcaggagctctcca

SEQ ID NO: 1649349 - DNA, 25 bp, Homo sapien
tcagcggggacaaggctgagtttcc

SEQ ID NO: 1649350 - DNA, 25 bp, Homo sapien
cacttcacggagtcaatgttgtgta

SEQ ID NO: 1649351 - DNA, 25 bp, Homo sapien
gatggatttcatgtcgcacttcacg

SEQ ID NO: 1649352 - DNA, 25 bp, Homo sapien
caccacgatggggttgagtttgatg

SEQ ID NO: 1649353 - DNA, 25 bp, Homo sapien
ccttcaccacgatggggttgagttt

SEQ ID NO: 1649354 - DNA, 25 bp, Homo sapien
cttcaccacgatggggttgagtttg

SEQ ID NO: 1649355 - DNA, 25 bp, Homo sapien
gtttgatgagtttaggcagggcctg

SEQ ID NO: 1649356 - DNA, 25 bp, Homo sapien
cagtcgcttgtggtagagatcccgg

SEQ ID NO: 1649357 - DNA, 25 bp, Homo sapien
gcaccgggatgaggaagcggacgtc

SEQ ID NO: 1649358 - DNA, 25 bp, Homo sapien
agagatcccggacccgcttcaccag

SEQ ID NO: 1649359 - DNA, 25 bp, Homo sapien
acgtctggcagtcgcttgtggtaga

SEQ ID NO: 1649360 - DNA, 25 bp, Homo sapien
gacccagcagctcagatccccaggg

SEQ ID NO: 1649361 - DNA, 25 bp, Homo sapien
caagaggtacgaccatctggggacc

SEQ ID NO: 1649362 - DNA, 25 bp, Homo sapien
ccgcaagaggtacgaccatctgggg

SEQ ID NO: 1649363 - DNA, 25 bp, Homo sapien
gcaagaggtacgaccatctggggac

SEQ ID NO: 1649364 - DNA, 25 bp, Homo sapien
atctcgtgaccagtgtctctgctcc

SEQ ID NO: 1649365 - DNA, 25 bp, Homo sapien
gcagctccggggagttcatgcccat

SEQ ID NO: 1649366 - DNA, 25 bp, Homo sapien
cagacatctcgtgaccagtgtctct

SEQ ID NO: 1649367 - DNA, 25 bp, Homo sapien
ctgtgcagacatctcgtgaccagtg

SEQ ID NO: 1649368 - DNA, 25 bp, Homo sapien
gggagggtcaggtgttgcccggcag

SEQ ID NO: 1649369 - DNA, 25 bp, Homo sapien
ttgcggggcatgctggcgcccaggg

SEQ ID NO: 1649370 - DNA, 25 bp, Homo sapien
acagggatgaccagacccagggtga

SEQ ID NO: 1649371 - DNA, 25 bp, Homo sapien
cagagacagggatgaccagacccag

SEQ ID NO: 1649372 - DNA, 25 bp, Homo sapien
acttgacctgacctcgaatgcccac

SEQ ID NO: 1649373 - DNA, 25 bp, Homo sapien
ttcgttcactggtgaagatgtttct

SEQ ID NO: 1649374 - DNA, 25 bp, Homo sapien
ccaccctgtgcttcgttcactggtg

SEQ ID NO: 1649375 - DNA, 25 bp, Homo sapien
cctgtgcttcgttcactggtgaaga

SEQ ID NO: 1649376 - DNA, 25 bp, Homo sapien
ctcggtttctcaggcgcagctggct

SEQ ID NO: 1649377 - DNA, 25 bp, Homo sapien
tggctgcgagcccagaccaggctcc

SEQ ID NO: 1649378 - DNA, 25 bp, Homo sapien
gactcggtttctcaggcgcagctgg

SEQ ID NO: 1649379 - DNA, 25 bp, Homo sapien
ggctgcgagcccagaccaggctcca

SEQ ID NO: 1649380 - DNA, 25 bp, Homo sapien
tgcggtgaatgccaaacaggagcca

SEQ ID NO: 1649381 - DNA, 25 bp, Homo sapien
aaaccgactgtctctgccctcgaga

SEQ ID NO: 1649382 - DNA, 25 bp, Homo sapien
ttacgctcctgactaaaaccgactg

SEQ ID NO: 1649383 - DNA, 25 bp, Homo sapien
gtgagatcacttttccacagctgga

SEQ ID NO: 1649384 - DNA, 25 bp, Homo sapien
aagtgaacgcgaacccaggtctatc

SEQ ID NO: 1649385 - DNA, 25 bp, Homo sapien
acgggcccaaggtcgcagtgagaaa

SEQ ID NO: 1649386 - DNA, 25 bp, Homo sapien
tttcctcaggagtgacatgcggacc

SEQ ID NO: 1649387 - DNA, 25 bp, Homo sapien
ttcgggcttggcacactctgaggtg

SEQ ID NO: 1649388 - DNA, 25 bp, Homo sapien
ggccgccagttcgtggatcagcttg

SEQ ID NO: 1649389 - DNA, 25 bp, Homo sapien
ggcttcagtgtacacggccgccagt

SEQ ID NO: 1649390 - DNA, 25 bp, Homo sapien
tcaatgaccctcagcaccgtccgct

SEQ ID NO: 1649391 - DNA, 25 bp, Homo sapien
tccgcttgatgtcggcgatggcttc

SEQ ID NO: 1649392 - DNA, 25 bp, Homo sapien
gtgtccttgtcagctccaaacagca

SEQ ID NO: 1649393 - DNA, 25 bp, Homo sapien
aatttctccacatactcccgcagct

SEQ ID NO: 1649394 - DNA, 25 bp, Homo sapien
catgcgtttgatgaacagcagggcc

SEQ ID NO: 1649395 - DNA, 25 bp, Homo sapien
tccttctcatacatgcgtttgatga

SEQ ID NO: 1649396 - DNA, 25 bp, Homo sapien
gctgaggtcgaggaggacatgcagg

SEQ ID NO: 1649397 - DNA, 25 bp, Homo sapien
gtcgaggaggacatgcaggtactgg

SEQ ID NO: 1649398 - DNA, 25 bp, Homo sapien
aggaggacatgcaggtactggaact

SEQ ID NO: 1649399 - DNA, 25 bp, Homo sapien
tgaggtcgaggaggacatgcaggta

SEQ ID NO: 1649400 - DNA, 25 bp, Homo sapien
tggacatgcccagataggtgcgact

SEQ ID NO: 1649401 - DNA, 25 bp, Homo sapien
tgaagatcaggtctcgaagtgtgga

SEQ ID NO: 1649402 - DNA, 25 bp, Homo sapien
cgggacgggcgcttgaagatcaggt

SEQ ID NO: 1649403 - DNA, 25 bp, Homo sapien
ggtctcgaagtgtggacatgcccag

SEQ ID NO: 1649404 - DNA, 25 bp, Homo sapien
tttagactgtgtgcccttcagaccc

SEQ ID NO: 1649405 - DNA, 25 bp, Homo sapien
gatcaggtacctggacaaaagggcc

SEQ ID NO: 1649406 - DNA, 25 bp, Homo sapien
ccggccacaaggtttagactgtgtg

SEQ ID NO: 1649407 - DNA, 25 bp, Homo sapien
tctgatcaggtacctggacaaaagg

SEQ ID NO: 1649408 - DNA, 25 bp, Homo sapien
tgagtggcgcctccagcacaacctt

SEQ ID NO: 1649409 - DNA, 25 bp, Homo sapien
tctgtgatgagtggcgcctccagca

SEQ ID NO: 1649410 - DNA, 25 bp, Homo sapien
agtacttgcggaccacctccagggc

SEQ ID NO: 1649411 - DNA, 25 bp, Homo sapien
tcatcctcgcagtacttgcggacca

SEQ ID NO: 1649412 - DNA, 25 bp, Homo sapien
gagccacccacacatagagttgagg

SEQ ID NO: 1649413 - DNA, 25 bp, Homo sapien
gaggctgtgttttatcccaagacca

SEQ ID NO: 1649414 - DNA, 25 bp, Homo sapien
caaagagattgggtcacataaggcc

SEQ ID NO: 1649415 - DNA, 25 bp, Homo sapien
ggaagctacagaaccaactcaggta

SEQ ID NO: 1649416 - DNA, 25 bp, Homo sapien
tactcctggtagagccaggcgaagg

SEQ ID NO: 1649417 - DNA, 25 bp, Homo sapien
gccttcaggcccgagttgaactgtg

SEQ ID NO: 1649418 - DNA, 25 bp, Homo sapien
cacctgcggccaggtaggcgttgta

SEQ ID NO: 1649419 - DNA, 25 bp, Homo sapien
gacaacaggcggatgaggcagtcct

SEQ ID NO: 1649420 - DNA, 25 bp, Homo sapien
cggtaaggggcttcagcacgtcgct

SEQ ID NO: 1649421 - DNA, 25 bp, Homo sapien
ttctcagcccgcaggatccgcttca

SEQ ID NO: 1649422 - DNA, 25 bp, Homo sapien
gcttccacctgggcatcggtaaggg

SEQ ID NO: 1649423 - DNA, 25 bp, Homo sapien
ggaaaattttcttgcgcccaccagc

SEQ ID NO: 1649424 - DNA, 25 bp, Homo sapien
gagagaacctattccagacttcctt

SEQ ID NO: 1649425 - DNA, 25 bp, Homo sapien
acacgcacacgagctgagaaccaga

SEQ ID NO: 1649426 - DNA, 25 bp, Homo sapien
tgactcgggagtcagagagaaccta

SEQ ID NO: 1649427 - DNA, 25 bp, Homo sapien
accagaccttcagggtagggctcct

SEQ ID NO: 1649428 - DNA, 25 bp, Homo sapien
tcctcttggcctgcggtgcctcttc

SEQ ID NO: 1649429 - DNA, 25 bp, Homo sapien
acaggcgccgcttgatcaggacgct

SEQ ID NO: 1649430 - DNA, 25 bp, Homo sapien
agggaacccaccaccgagatggctt

SEQ ID NO: 1649431 - DNA, 25 bp, Homo sapien
acagggataatgggctctggcctcc

SEQ ID NO: 1649432 - DNA, 25 bp, Homo sapien
tgcctgctgactccacgggggtgta

SEQ ID NO: 1649433 - DNA, 25 bp, Homo sapien
cgggtaggtacaccatgctgatgag

SEQ ID NO: 1649434 - DNA, 25 bp, Homo sapien
ctggcatggcctcgggtaggtacac

SEQ ID NO: 1649435 - DNA, 25 bp, Homo sapien
tgtgtggccatgagccgagccaggt

SEQ ID NO: 1649436 - DNA, 25 bp, Homo sapien
cggagatctgcgctgaggccttcga

SEQ ID NO: 1649437 - DNA, 25 bp, Homo sapien
ctgaggccttcgaggtccccgacgg

SEQ ID NO: 1649438 - DNA, 25 bp, Homo sapien
tgtccgtgtctgactggccggagat

SEQ ID NO: 1649439 - DNA, 25 bp, Homo sapien
attatcaggcgtcagcagaggctgc

SEQ ID NO: 1649440 - DNA, 25 bp, Homo sapien
tggaactccaaggaagccgggtgct

SEQ ID NO: 1649441 - DNA, 25 bp, Homo sapien
caacaggtgcagcttcagattctta

SEQ ID NO: 1649442 - DNA, 25 bp, Homo sapien
tcacctgcgatttggccagcgtcgg

SEQ ID NO: 1649443 - DNA, 25 bp, Homo sapien
catcttcttgagtgtggagtccgag

SEQ ID NO: 1649444 - DNA, 25 bp, Homo sapien
tgcaccatgaacttaagcagctgct

SEQ ID NO: 1649445 - DNA, 25 bp, Homo sapien
acatgggtctctggcgggcgatatt

SEQ ID NO: 1649446 - DNA, 25 bp, Homo sapien
gatggcagggtgcaccatgaactta

SEQ ID NO: 1649447 - DNA, 25 bp, Homo sapien
tggatcacctcagacatgaacatgg

SEQ ID NO: 1649448 - DNA, 25 bp, Homo sapien
aatgcataattatcaccatcagggt

SEQ ID NO: 1649449 - DNA, 25 bp, Homo sapien
tttagtatagttaccctgctgtgct

SEQ ID NO: 1649450 - DNA, 25 bp, Homo sapien
atgcataattatcaccatcagggta

SEQ ID NO: 1649451 - DNA, 25 bp, Homo sapien
tttttagtatagttaccctgctgtg

SEQ ID NO: 1649452 - DNA, 25 bp, Homo sapien
agtccaatagcaggatgatgtcccc

SEQ ID NO: 1649453 - DNA, 25 bp, Homo sapien
aatgaggccctccacaaacttgatg

SEQ ID NO: 1649454 - DNA, 25 bp, Homo sapien
tgtagctcgctaatgacccgtgact

SEQ ID NO: 1649455 - DNA, 25 bp, Homo sapien
gctgatatcatgctcctggcgtcgg

SEQ ID NO: 1649456 - DNA, 25 bp, Homo sapien
cgttcacattctcgtccctcaagag

SEQ ID NO: 1649457 - DNA, 25 bp, Homo sapien
gatagccttcttcaccacgttcaca

SEQ ID NO: 1649458 - DNA, 25 bp, Homo sapien
tttcagcagcaactcaatgtctcgc

SEQ ID NO: 1649459 - DNA, 25 bp, Homo sapien
tgaggtttgcaatgagtttcagcag

SEQ ID NO: 1649460 - DNA, 25 bp, Homo sapien
tgcaacaaatacgtagtcagcccct

SEQ ID NO: 1649461 - DNA, 25 bp, Homo sapien
cacagtatccatcgaggctgccata

SEQ ID NO: 1649462 - DNA, 25 bp, Homo sapien
cacagcgcagggcacagtacgtgtt

SEQ ID NO: 1649463 - DNA, 25 bp, Homo sapien
gccataattacggagataacacggg

SEQ ID NO: 1649464 - DNA, 25 bp, Homo sapien
tgtctgcttggaatgcgatgatctc

SEQ ID NO: 1649465 - DNA, 25 bp, Homo sapien
gccgatgacaaattttcgcacttcg

SEQ ID NO: 1649466 - DNA, 25 bp, Homo sapien
tcgcacttcgattgacttgtctgct

SEQ ID NO: 1649467 - DNA, 25 bp, Homo sapien
ttgtctgcttggaatgcgatgatct

SEQ ID NO: 1649468 - DNA, 25 bp, Homo sapien
agttgtccagtagtgtggggtcttt

SEQ ID NO: 1649469 - DNA, 25 bp, Homo sapien
ttgtccagtagtgtggggtctttgt

SEQ ID NO: 1649470 - DNA, 25 bp, Homo sapien
gaagttgtccagtagtgtggggtct

SEQ ID NO: 1649471 - DNA, 25 bp, Homo sapien
tgtccagtagtgtggggtctttgtt

SEQ ID NO: 1649472 - DNA, 25 bp, Homo sapien
ctgctcagcccaggatgccccccgg

SEQ ID NO: 1649473 - DNA, 25 bp, Homo sapien
gctcagcccaggatgccccccgggc

SEQ ID NO: 1649474 - DNA, 25 bp, Homo sapien
tgctcagcccaggatgccccccggg

SEQ ID NO: 1649475 - DNA, 25 bp, Homo sapien
tcagcccaggatgccccccgggccc

SEQ ID NO: 1649476 - DNA, 25 bp, Homo sapien
gccgcctggttcagaagatccacca

SEQ ID NO: 1649477 - DNA, 25 bp, Homo sapien
gagcactgtgatctttgagtcattg

SEQ ID NO: 1649478 - DNA, 25 bp, Homo sapien
tgtttgagcactgtgatctttgagt

SEQ ID NO: 1649479 - DNA, 25 bp, Homo sapien
tgagtcattggtgatcagcgccgcc

SEQ ID NO: 1649480 - DNA, 25 bp, Homo sapien
acgctccgacgggtgacgctgtctc

SEQ ID NO: 1649481 - DNA, 25 bp, Homo sapien
tctctgaggtggtcatgccatcgat

SEQ ID NO: 1649482 - DNA, 25 bp, Homo sapien
tgtgatgccacgctccgacgggtga

SEQ ID NO: 1649483 - DNA, 25 bp, Homo sapien
tcctcttgagtgaaaaactgtgatg

SEQ ID NO: 1649484 - DNA, 25 bp, Homo sapien
ggaatatcaggcacagagtccggca

SEQ ID NO: 1649485 - DNA, 25 bp, Homo sapien
tgtcacccgaacacctacaaagggc

SEQ ID NO: 1649486 - DNA, 25 bp, Homo sapien
tctgggatatgctttggactgggca

SEQ ID NO: 1649487 - DNA, 25 bp, Homo sapien
acagctgctgaacgatgggccacat

SEQ ID NO: 1649488 - DNA, 25 bp, Homo sapien
tttagatggaatttcactcttgttt

SEQ ID NO: 1649489 - DNA, 25 bp, Homo sapien
ttcccaggctggagtgtaatggcac

SEQ ID NO: 1649490 - DNA, 25 bp, Homo sapien
ccaggctggagtgtaatggcacaat

SEQ ID NO: 1649491 - DNA, 25 bp, Homo sapien
ttagatggaatttcactcttgtttc

SEQ ID NO: 1649492 - DNA, 25 bp, Homo sapien
caccttggcctcccaaattgctggg

SEQ ID NO: 1649493 - DNA, 25 bp, Homo sapien
gacgaagttttaccatgttggtcag

SEQ ID NO: 1649494 - DNA, 25 bp, Homo sapien
gagacgaagttttaccatgttggtc

SEQ ID NO: 1649495 - DNA, 25 bp, Homo sapien
accttggcctcccaaattgctggga

SEQ ID NO: 1649496 - DNA, 25 bp, Homo sapien
catatttataagttccacgaggaca

SEQ ID NO: 1649497 - DNA, 25 bp, Homo sapien
tgggatcacaagtctcagccatcgc

SEQ ID NO: 1649498 - DNA, 25 bp, Homo sapien
tctcgatccccatctgtgttgcttt

SEQ ID NO: 1649499 - DNA, 25 bp, Homo sapien
gcccggccgacgaccatatttcaaa

SEQ ID NO: 1649500 - DNA, 25 bp, Homo sapien
caaaaataggacgggtatagtggct

SEQ ID NO: 1649501 - DNA, 25 bp, Homo sapien
tacaaaaagagcatacacagggccg

SEQ ID NO: 1649502 - DNA, 25 bp, Homo sapien
gacctgaccaaaggcatatagcttg

SEQ ID NO: 1649503 - DNA, 25 bp, Homo sapien
cccaggtctgtttacgtaagccaag

SEQ ID NO: 1649504 - DNA, 25 bp, Homo sapien
tgccgtccccagtcaaaacataaaa

SEQ ID NO: 1649505 - DNA, 25 bp, Homo sapien
ctgggtgtggtggggcacgtttgta

SEQ ID NO: 1649506 - DNA, 25 bp, Homo sapien
agtgaactgggatcgtgccagcctg

SEQ ID NO: 1649507 - DNA, 25 bp, Homo sapien
ggtgtggtggggcacgtttgtaatc

SEQ ID NO: 1649508 - DNA, 25 bp, Homo sapien
gcagtgaactgggatcgtgccagcc

SEQ ID NO: 1649509 - DNA, 25 bp, Homo sapien
tgtttccccaaactggctctaggag

SEQ ID NO: 1649510 - DNA, 25 bp, Homo sapien
tgacatgaaggaacacggaccgaca

SEQ ID NO: 1649511 - DNA, 25 bp, Homo sapien
tccttcaacgaacattagctgggcg

SEQ ID NO: 1649512 - DNA, 25 bp, Homo sapien
tactcgttaagaagtggtaccctgc

SEQ ID NO: 1649513 - DNA, 25 bp, Homo sapien
cgccatcttccgttcgtcgccggga

SEQ ID NO: 1649514 - DNA, 25 bp, Homo sapien
ttcgtcgccgggaacggtgcgcacg

SEQ ID NO: 1649515 - DNA, 25 bp, Homo sapien
catcttccgttcgtcgccgggaacg

SEQ ID NO: 1649516 - DNA, 25 bp, Homo sapien
agagcacagcccgaccccgcccatg

SEQ ID NO: 1649517 - DNA, 25 bp, Homo sapien
tctcagtgggcatggtgttgatcca

SEQ ID NO: 1649518 - DNA, 25 bp, Homo sapien
tggagtctactaccagggcctctat

SEQ ID NO: 1649519 - DNA, 25 bp, Homo sapien
cattggttaacatctgggtgggtct

SEQ ID NO: 1649520 - DNA, 25 bp, Homo sapien
gggtactgtgataaccaccatggat

SEQ ID NO: 1649521 - DNA, 25 bp, Homo sapien
tgcagccccgtgttggccatgtcgt

SEQ ID NO: 1649522 - DNA, 25 bp, Homo sapien
gatggaggtgagaatactccttggt

SEQ ID NO: 1649523 - DNA, 25 bp, Homo sapien
tggccatgtcgtcaccattctctct

SEQ ID NO: 1649524 - DNA, 25 bp, Homo sapien
gaggtgagaatactccttggttttc

SEQ ID NO: 1649525 - DNA, 25 bp, Homo sapien
caaggacagtttgctcacagatagc

SEQ ID NO: 1649526 - DNA, 25 bp, Homo sapien
tctttgctgtccctgaccccaagga

SEQ ID NO: 1649527 - DNA, 25 bp, Homo sapien
aaggacagtttgctcacagatagca

SEQ ID NO: 1649528 - DNA, 25 bp, Homo sapien
ccagttcagtcccaaagggggcgca

SEQ ID NO: 1649529 - DNA, 25 bp, Homo sapien
ggcgcagcatctcacacaactaagg

SEQ ID NO: 1649530 - DNA, 25 bp, Homo sapien
tgcagggcgccacctggaggctacc

SEQ ID NO: 1649531 - DNA, 25 bp, Homo sapien
tggaggctaccgcgcaacgtcctcg

SEQ ID NO: 1649532 - DNA, 25 bp, Homo sapien
ggaataatttatccgcggcagcggt

SEQ ID NO: 1649533 - DNA, 25 bp, Homo sapien
catctttcggtttattgaaggagca

SEQ ID NO: 1649534 - DNA, 25 bp, Homo sapien
taaagagcgagttttcaggaggtcc

SEQ ID NO: 1649535 - DNA, 25 bp, Homo sapien
tatgtacacagatagaggtggcact

SEQ ID NO: 1649536 - DNA, 25 bp, Homo sapien
gactgacttctgcttcgccgttgcg

SEQ ID NO: 1649537 - DNA, 25 bp, Homo sapien
cgccttgatgaactcccgggagcag

SEQ ID NO: 1649538 - DNA, 25 bp, Homo sapien
gaagtgggtgtcttctagccgctcc

SEQ ID NO: 1649539 - DNA, 25 bp, Homo sapien
aaagcagaacttgtgtccgggcacc

SEQ ID NO: 1649540 - DNA, 25 bp, Homo sapien
cctccgccagggtccttgggtgagt

SEQ ID NO: 1649541 - DNA, 25 bp, Homo sapien
ccgccagggtccttgggtgagtggc

SEQ ID NO: 1649542 - DNA, 25 bp, Homo sapien
gcctccgccagggtccttgggtgag

SEQ ID NO: 1649543 - DNA, 25 bp, Homo sapien
ccgcctccgccagggtccttgggtg

SEQ ID NO: 1649544 - DNA, 25 bp, Homo sapien
cgggcagtagcatcgaaggcgaaca

SEQ ID NO: 1649545 - DNA, 25 bp, Homo sapien
gcatcgtggaacatctggcgagcca

SEQ ID NO: 1649546 - DNA, 25 bp, Homo sapien
tcatattcgaggtacttgaagcccg

SEQ ID NO: 1649547 - DNA, 25 bp, Homo sapien
tgatgtggccctgtcatagcggtcc

SEQ ID NO: 1649548 - DNA, 25 bp, Homo sapien
ctggcgggcggcatcgatgagcagt

SEQ ID NO: 1649549 - DNA, 25 bp, Homo sapien
gttcgatgcggtccgcgccctcgaa

SEQ ID NO: 1649550 - DNA, 25 bp, Homo sapien
atgagcagttcgatgcggtccgcgc

SEQ ID NO: 1649551 - DNA, 25 bp, Homo sapien
cacgtggctgcgcttgagctggcgg

SEQ ID NO: 1649552 - DNA, 25 bp, Homo sapien
actggcggcgggacgcctgcacaga

SEQ ID NO: 1649553 - DNA, 25 bp, Homo sapien
gcgacacacggcctcgctgaagtcc

SEQ ID NO: 1649554 - DNA, 25 bp, Homo sapien
gtcgcacaggtagcaccactggcgg

SEQ ID NO: 1649555 - DNA, 25 bp, Homo sapien
acaccatggcccacggcatcttggg

SEQ ID NO: 1649556 - DNA, 25 bp, Homo sapien
gcctccctcgcgaaggcaggctgag

SEQ ID NO: 1649557 - DNA, 25 bp, Homo sapien
cgttcgatccgcgtcccggggacag

SEQ ID NO: 1649558 - DNA, 25 bp, Homo sapien
tgggccctaagcctttctgctcact

SEQ ID NO: 1649559 - DNA, 25 bp, Homo sapien
gatccgcgccgccaacgttcgatcc

SEQ ID NO: 1649560 - DNA, 25 bp, Homo sapien
tgtacctctcccatcagaactcggc

SEQ ID NO: 1649561 - DNA, 25 bp, Homo sapien
ggtatacacggctatatcctctttg

SEQ ID NO: 1649562 - DNA, 25 bp, Homo sapien
tcctctttgtcatccgtattttgat

SEQ ID NO: 1649563 - DNA, 25 bp, Homo sapien
gcagagaacccaacctgtacctctc

SEQ ID NO: 1649564 - DNA, 25 bp, Homo sapien
cccacatagggcaataataaataac

SEQ ID NO: 1649565 - DNA, 25 bp, Homo sapien
agacagcactgtaccagagaaaggg

SEQ ID NO: 1649566 - DNA, 25 bp, Homo sapien
ggcactaactagcacagggagtggg

SEQ ID NO: 1649567 - DNA, 25 bp, Homo sapien
ttgatggcttagaagtcagggttaa

SEQ ID NO: 1649568 - DNA, 25 bp, Homo sapien
tagggtgcagctgggatgggcagag

SEQ ID NO: 1649569 - DNA, 25 bp, Homo sapien
ggttgcaggcaggatcatagatagt

SEQ ID NO: 1649570 - DNA, 25 bp, Homo sapien
cagggagctagggtgcagctgggat

SEQ ID NO: 1649571 - DNA, 25 bp, Homo sapien
cctcgactgcgccaagctggggaga

SEQ ID NO: 1649572 - DNA, 25 bp, Homo sapien
atcggccgcgccttttccgtgtagg

SEQ ID NO: 1649573 - DNA, 25 bp, Homo sapien
ggagatttccatcggccgcgccttt

SEQ ID NO: 1649574 - DNA, 25 bp, Homo sapien
catcggccgcgccttttccgtgtag

SEQ ID NO: 1649575 - DNA, 25 bp, Homo sapien
tcacggagatttccatcggccgcgc

SEQ ID NO: 1649576 - DNA, 25 bp, Homo sapien
tgtgggggggagtcgtgcggaggga

SEQ ID NO: 1649577 - DNA, 25 bp, Homo sapien
tgggggggagtcgtgcggagggagc

SEQ ID NO: 1649578 - DNA, 25 bp, Homo sapien
agtccctgtcgaagggtgccggcca

SEQ ID NO: 1649579 - DNA, 25 bp, Homo sapien
ctgagggcctcgctcagtttggcca

SEQ ID NO: 1649580 - DNA, 25 bp, Homo sapien
ccggatggcgttggcagtctcctgc

SEQ ID NO: 1649581 - DNA, 25 bp, Homo sapien
gccaggcgaggcagctggaccggct

SEQ ID NO: 1649582 - DNA, 25 bp, Homo sapien
ctccgggctgctggagcccgccttg

SEQ ID NO: 1649583 - DNA, 25 bp, Homo sapien
tgggccgtgggcagcccccttcctg

SEQ ID NO: 1649584 - DNA, 25 bp, Homo sapien
ggagtgcaggagggccgggcccatg

SEQ ID NO: 1649585 - DNA, 25 bp, Homo sapien
cccgccttgctgtgggctgatgtat

SEQ ID NO: 1649586 - DNA, 25 bp, Homo sapien
tcttgggttacctggctgtagccac

SEQ ID NO: 1649587 - DNA, 25 bp, Homo sapien
tctatgctcaaaccgtcctgtggct

SEQ ID NO: 1649588 - DNA, 25 bp, Homo sapien
cccggccttatattgcaatataatt

SEQ ID NO: 1649589 - DNA, 25 bp, Homo sapien
ctgtagccacggtggcctccttgct

SEQ ID NO: 1649590 - DNA, 25 bp, Homo sapien
cggcggtcttccgacaacacgtagc

SEQ ID NO: 1649591 - DNA, 25 bp, Homo sapien
ttccgacaacacgtagcgctgaggg

SEQ ID NO: 1649592 - DNA, 25 bp, Homo sapien
ggtcttccgacaacacgtagcgctg

SEQ ID NO: 1649593 - DNA, 25 bp, Homo sapien
cgacaacacgtagcgctgagggcag

SEQ ID NO: 1649594 - DNA, 25 bp, Homo sapien
gcttccagctggtgataccgttgat

SEQ ID NO: 1649595 - DNA, 25 bp, Homo sapien
taccgttgatcttggcggcgatgcc

SEQ ID NO: 1649596 - DNA, 25 bp, Homo sapien
cgagcgagcttctccttggtgcggc

SEQ ID NO: 1649597 - DNA, 25 bp, Homo sapien
tcttcgaatgagaagcgcggcttgc

SEQ ID NO: 1649598 - DNA, 25 bp, Homo sapien
taagagtagctgacaccggctgagc

SEQ ID NO: 1649599 - DNA, 25 bp, Homo sapien
gccacgctgaagagttgatagaaat

SEQ ID NO: 1649600 - DNA, 25 bp, Homo sapien
ggtaagtcggaagcgcctaagagta

SEQ ID NO: 1649601 - DNA, 25 bp, Homo sapien
ttcgcgcggcgcgaagtgccacgct

SEQ ID NO: 1649602 - DNA, 25 bp, Homo sapien
gccggtgggtcagggctcgggcttc

SEQ ID NO: 1649603 - DNA, 25 bp, Homo sapien
agggctcgggcttctgcggcctgtt

SEQ ID NO: 1649604 - DNA, 25 bp, Homo sapien
agccgccggtgggtcagggctcggg

SEQ ID NO: 1649605 - DNA, 25 bp, Homo sapien
tgggtcagggctcgggcttctgcgg

SEQ ID NO: 1649606 - DNA, 25 bp, Homo sapien
ctggcttgggacagcaccgtggaat

SEQ ID NO: 1649607 - DNA, 25 bp, Homo sapien
gaaggctggtcttaagtcgacatcc

SEQ ID NO: 1649608 - DNA, 25 bp, Homo sapien
cggtgccctccagtgatacggtgct

SEQ ID NO: 1649609 - DNA, 25 bp, Homo sapien
cagagctcaatactcagggtcccga

SEQ ID NO: 1649610 - DNA, 25 bp, Homo sapien
tcttcagctggtgtgaggagtagac

SEQ ID NO: 1649611 - DNA, 25 bp, Homo sapien
tggccaccgttaagcgggcagtact

SEQ ID NO: 1649612 - DNA, 25 bp, Homo sapien
tacttgagcgtatgggcctggtcac

SEQ ID NO: 1649613 - DNA, 25 bp, Homo sapien
cgggacacacgtagtgcctcaggat

SEQ ID NO: 1649614 - DNA, 25 bp, Homo sapien
ttgcagaagttgcacagggtcccca

SEQ ID NO: 1649615 - DNA, 25 bp, Homo sapien
ggctcctcaatctcttgggtctcca

SEQ ID NO: 1649616 - DNA, 25 bp, Homo sapien
ctttgaccccgacttgcgatcagcg

SEQ ID NO: 1649617 - DNA, 25 bp, Homo sapien
ctgccccagcggaggcccgggactt

SEQ ID NO: 1649618 - DNA, 25 bp, Homo sapien
ggctcaggttgaagtagtccttcca

SEQ ID NO: 1649619 - DNA, 25 bp, Homo sapien
gtagtccttccacatgtcgaagggt

SEQ ID NO: 1649620 - DNA, 25 bp, Homo sapien
ctggctcaggttgaagtagtccttc

SEQ ID NO: 1649621 - DNA, 25 bp, Homo sapien
ccttccacatgtcgaagggtggcag

SEQ ID NO: 1649622 - DNA, 25 bp, Homo sapien
tgggggcccgtgggcaagggcaaga

SEQ ID NO: 1649623 - DNA, 25 bp, Homo sapien
cccgtgggcaagggcaagagcagca

SEQ ID NO: 1649624 - DNA, 25 bp, Homo sapien
ggcccgtgggcaagggcaagagcag

SEQ ID NO: 1649625 - DNA, 25 bp, Homo sapien
ggggcccgtgggcaagggcaagagc

SEQ ID NO: 1649626 - DNA, 25 bp, Homo sapien
aacacaggatatggaaactgtggct

SEQ ID NO: 1649627 - DNA, 25 bp, Homo sapien
gaggaacacaggatatggaaactgt

SEQ ID NO: 1649628 - DNA, 25 bp, Homo sapien
ggaacacaggatatggaaactgtgg

SEQ ID NO: 1649629 - DNA, 25 bp, Homo sapien
gaagaggaacacaggatatggaaac

SEQ ID NO: 1649630 - DNA, 25 bp, Homo sapien
ccgagggccagcgaggtcaccatca

SEQ ID NO: 1649631 - DNA, 25 bp, Homo sapien
gaccaagacaggggagatgaagacc

SEQ ID NO: 1649632 - DNA, 25 bp, Homo sapien
tcatgcggggaccaagacaggggag

SEQ ID NO: 1649633 - DNA, 25 bp, Homo sapien
ggccagcgaggtcaccatcatcatc

SEQ ID NO: 1649634 - DNA, 25 bp, Homo sapien
gatgctgctacctttggagttggga

SEQ ID NO: 1649635 - DNA, 25 bp, Homo sapien
cagtgttgatgctgctacctttgga

SEQ ID NO: 1649636 - DNA, 25 bp, Homo sapien
ttccttatcccattctgctcagtgt

SEQ ID NO: 1649637 - DNA, 25 bp, Homo sapien
aacactgttcttgggccattctgaa

SEQ ID NO: 1649638 - DNA, 25 bp, Homo sapien
tacctggaggtgcttgatctttcca

SEQ ID NO: 1649639 - DNA, 25 bp, Homo sapien
ctacctggaggtgcttgatctttcc

SEQ ID NO: 1649640 - DNA, 25 bp, Homo sapien
acctggaggtgcttgatctttccac

SEQ ID NO: 1649641 - DNA, 25 bp, Homo sapien
tcctcttcttccttagggatctgag

SEQ ID NO: 1649642 - DNA, 25 bp, Homo sapien
ttccttagggatctgagcttctggt

SEQ ID NO: 1649643 - DNA, 25 bp, Homo sapien
ttcttccttagggatctgagcttct

SEQ ID NO: 1649644 - DNA, 25 bp, Homo sapien
tgagcttctggttcagctgagagtg

SEQ ID NO: 1649645 - DNA, 25 bp, Homo sapien
tcaagagggagatccccgatagtaa

SEQ ID NO: 1649646 - DNA, 25 bp, Homo sapien
agggagatccccgatagtaaggttg

SEQ ID NO: 1649647 - DNA, 25 bp, Homo sapien
gagatccccgatagtaaggttggaa

SEQ ID NO: 1649648 - DNA, 25 bp, Homo sapien
agagggagatccccgatagtaaggt

SEQ ID NO: 1649649 - DNA, 25 bp, Homo sapien
aggatgaggataatggtgaggcagg

SEQ ID NO: 1649650 - DNA, 25 bp, Homo sapien
tgaggatgaggataatggtgaggca

SEQ ID NO: 1649651 - DNA, 25 bp, Homo sapien
atgaggataatggtgaggcaggggg

SEQ ID NO: 1649652 - DNA, 25 bp, Homo sapien
ctgaggatgaggataatggtgaggc

SEQ ID NO: 1649653 - DNA, 25 bp, Homo sapien
gcttcctgatcgcgcaggaggagca

SEQ ID NO: 1649654 - DNA, 25 bp, Homo sapien
gcggttcctggacggccctttctga

SEQ ID NO: 1649655 - DNA, 25 bp, Homo sapien
gaagtaagctgggcgagaggcagcc

SEQ ID NO: 1649656 - DNA, 25 bp, Homo sapien
aaggccagtgcagatcccggcgaga

SEQ ID NO: 1649657 - DNA, 25 bp, Homo sapien
tcctttccatttcctgggccagaga

SEQ ID NO: 1649658 - DNA, 25 bp, Homo sapien
tttcctttccatttcctgggccaga

SEQ ID NO: 1649659 - DNA, 25 bp, Homo sapien
tttccatttcctgggccagagacat

SEQ ID NO: 1649660 - DNA, 25 bp, Homo sapien
tgacctcatctcctttcctttccat

SEQ ID NO: 1649661 - DNA, 25 bp, Homo sapien
tggcctatcctgattctacctggcg

SEQ ID NO: 1649662 - DNA, 25 bp, Homo sapien
tgtgcgtccaagacaaaagcctgtt

SEQ ID NO: 1649663 - DNA, 25 bp, Homo sapien
ttctcctgactggacactgaggccc

SEQ ID NO: 1649664 - DNA, 25 bp, Homo sapien
ggatctaaacccatagctcacctga

SEQ ID NO: 1649665 - DNA, 25 bp, Homo sapien
atgctcaccccgtccagagagaaca

SEQ ID NO: 1649666 - DNA, 25 bp, Homo sapien
tcttcaatcacagttactccggatg

SEQ ID NO: 1649667 - DNA, 25 bp, Homo sapien
atcacagttactccggatgctcacc

SEQ ID NO: 1649668 - DNA, 25 bp, Homo sapien
aagctaaacttgagcacctgcttct

SEQ ID NO: 1649669 - DNA, 25 bp, Homo sapien
tggaggaaaggtagcaactgcccct

SEQ ID NO: 1649670 - DNA, 25 bp, Homo sapien
taatacatggtgcactaggtcacac

SEQ ID NO: 1649671 - DNA, 25 bp, Homo sapien
gacacacagttttccgtgggatgaa

SEQ ID NO: 1649672 - DNA, 25 bp, Homo sapien
tcaaaaagagttcgatgagcgagtc

SEQ ID NO: 1649673 - DNA, 25 bp, Homo sapien
tccaggctttcaggacagcgagccc

SEQ ID NO: 1649674 - DNA, 25 bp, Homo sapien
gacagctgaccacagtgcaaacgga

SEQ ID NO: 1649675 - DNA, 25 bp, Homo sapien
tgtgccccagcttgggtatcgcgat

SEQ ID NO: 1649676 - DNA, 25 bp, Homo sapien
caaacggatcgcgatagcagggctg

SEQ ID NO: 1649677 - DNA, 25 bp, Homo sapien
tcggagataagcgacaccctggtgt

SEQ ID NO: 1649678 - DNA, 25 bp, Homo sapien
tccccaaccatctataggtcggctt

SEQ ID NO: 1649679 - DNA, 25 bp, Homo sapien
tcccaactacaagtccagggtaggc

SEQ ID NO: 1649680 - DNA, 25 bp, Homo sapien
ctctaatcccggtcctgaaacagca

SEQ ID NO: 1649681 - DNA, 25 bp, Homo sapien
tagatactgtaatactcgcgtgcgg

SEQ ID NO: 1649682 - DNA, 25 bp, Homo sapien
cagagcggctcagttccaaggaagt

SEQ ID NO: 1649683 - DNA, 25 bp, Homo sapien
tacagatatcacacagacctgggcc

SEQ ID NO: 1649684 - DNA, 25 bp, Homo sapien
agcaaacacttttcaggaggcccag

SEQ ID NO: 1649685 - DNA, 25 bp, Homo sapien
catcccactttctgggggtttgagg

SEQ ID NO: 1649686 - DNA, 25 bp, Homo sapien
tcatcccactttctgggggtttgag

SEQ ID NO: 1649687 - DNA, 25 bp, Homo sapien
actgatgaggtattgagcggcttgc

SEQ ID NO: 1649688 - DNA, 25 bp, Homo sapien
gctcgtaggtgacccgctgactgat

SEQ ID NO: 1649689 - DNA, 25 bp, Homo sapien
ctggcaggaactcgcccttcttgga

SEQ ID NO: 1649690 - DNA, 25 bp, Homo sapien
agatctggatgcgagcgcccgtcag

SEQ ID NO: 1649691 - DNA, 25 bp, Homo sapien
agctccttggcactctcagccgcca

SEQ ID NO: 1649692 - DNA, 25 bp, Homo sapien
gctccttggcactctcagccgccag

SEQ ID NO: 1649693 - DNA, 25 bp, Homo sapien
caccagctccttggcactctcagcc

SEQ ID NO: 1649694 - DNA, 25 bp, Homo sapien
ccagctccttggcactctcagccgc

SEQ ID NO: 1649695 - DNA, 25 bp, Homo sapien
tgcggccaacgcaaaggaccccagg

SEQ ID NO: 1649696 - DNA, 25 bp, Homo sapien
ccgttggcggctgcggccaacgcaa

SEQ ID NO: 1649697 - DNA, 25 bp, Homo sapien
gttggtgttgtagccgtaacttgcc

SEQ ID NO: 1649698 - DNA, 25 bp, Homo sapien
gtgttaagcgccgtgctgatggcca

SEQ ID NO: 1649699 - DNA, 25 bp, Homo sapien
ggctggcgtacggagagccggtggg

SEQ ID NO: 1649700 - DNA, 25 bp, Homo sapien
ggcctgccacgttggcgtagctgat

SEQ ID NO: 1649701 - DNA, 25 bp, Homo sapien
ccacgttggcgtagctgatgttgag

SEQ ID NO: 1649702 - DNA, 25 bp, Homo sapien
ctgcggccgcggctggcagcacatc

SEQ ID NO: 1649703 - DNA, 25 bp, Homo sapien
acgatggcgctcacggccttgtgca

SEQ ID NO: 1649704 - DNA, 25 bp, Homo sapien
tcaccacgcgctcctgcaggttgat

SEQ ID NO: 1649705 - DNA, 25 bp, Homo sapien
gactgttccatcacggctttcaccg

SEQ ID NO: 1649706 - DNA, 25 bp, Homo sapien
tggcgcctcccttgccgatgatcag

SEQ ID NO: 1649707 - DNA, 25 bp, Homo sapien
tcttaattcctgtggagacatttca

SEQ ID NO: 1649708 - DNA, 25 bp, Homo sapien
cacccatttgtccaagcatctgcaa

SEQ ID NO: 1649709 - DNA, 25 bp, Homo sapien
gcatctgcaagtctgatcaatctta

SEQ ID NO: 1649710 - DNA, 25 bp, Homo sapien
gatcaatcttaattcctgtggagac

SEQ ID NO: 1649711 - DNA, 25 bp, Homo sapien
cttagaatcttggaatcacagagcc

SEQ ID NO: 1649712 - DNA, 25 bp, Homo sapien
gaatcccaggacattagaacagtag

SEQ ID NO: 1649713 - DNA, 25 bp, Homo sapien
gatcccgggccagagtttatgctca

SEQ ID NO: 1649714 - DNA, 25 bp, Homo sapien
tgattcagtggttctggacaggacc

SEQ ID NO: 1649715 - DNA, 25 bp, Homo sapien
tctcggcaataaagctgtgcacagc

SEQ ID NO: 1649716 - DNA, 25 bp, Homo sapien
gggatttctcggaccttctcggcaa

SEQ ID NO: 1649717 - DNA, 25 bp, Homo sapien
tgtactaggcatacccgctctgtgg

SEQ ID NO: 1649718 - DNA, 25 bp, Homo sapien
cacctcaggcttggtcatcgcttgt

SEQ ID NO: 1649719 - DNA, 25 bp, Homo sapien
ctgactgatcacacggtgagcctgg

SEQ ID NO: 1649720 - DNA, 25 bp, Homo sapien
tgatcacacggtgagcctgggggag

SEQ ID NO: 1649721 - DNA, 25 bp, Homo sapien
tgactgatcacacggtgagcctggg

SEQ ID NO: 1649722 - DNA, 25 bp, Homo sapien
actgatcacacggtgagcctggggg

SEQ ID NO: 1649723 - DNA, 25 bp, Homo sapien
gtgcagcacgctggtgacacgaccc

SEQ ID NO: 1649724 - DNA, 25 bp, Homo sapien
gcacgctggtgacacgaccctgact

SEQ ID NO: 1649725 - DNA, 25 bp, Homo sapien
ggtgacacgaccctgactcctcaat

SEQ ID NO: 1649726 - DNA, 25 bp, Homo sapien
tgacacgaccctgactcctcaattg

SEQ ID NO: 1649727 - DNA, 25 bp, Homo sapien
caagttctcttagatggtagtggat

SEQ ID NO: 1649728 - DNA, 25 bp, Homo sapien
catcgcacctgaccaaagcacttta

SEQ ID NO: 1649729 - DNA, 25 bp, Homo sapien
ctgattccctgctaaggacgccgag

SEQ ID NO: 1649730 - DNA, 25 bp, Homo sapien
catggagtgatcagctctatgtgtg

SEQ ID NO: 1649731 - DNA, 25 bp, Homo sapien
tagatgtcgatgcttgtcgggcatt

SEQ ID NO: 1649732 - DNA, 25 bp, Homo sapien
agatgtcgatgcttgtcgggcattg

SEQ ID NO: 1649733 - DNA, 25 bp, Homo sapien
atgtcgatgcttgtcgggcattggt

SEQ ID NO: 1649734 - DNA, 25 bp, Homo sapien
ctagatgtcgatgcttgtcgggcat

SEQ ID NO: 1649735 - DNA, 25 bp, Homo sapien
ccaatgatggagcccgccgcgtagc

SEQ ID NO: 1649736 - DNA, 25 bp, Homo sapien
ccgccgcgtagctggggatcagcac

SEQ ID NO: 1649737 - DNA, 25 bp, Homo sapien
gtagctggggatcagcaccttcagg

SEQ ID NO: 1649738 - DNA, 25 bp, Homo sapien
acgatggtctgcccgcccttgccaa

SEQ ID NO: 1649739 - DNA, 25 bp, Homo sapien
gcttgatctcgtccgttcctcacaa

SEQ ID NO: 1649740 - DNA, 25 bp, Homo sapien
aagtgaaggtaccagcccacggtca

SEQ ID NO: 1649741 - DNA, 25 bp, Homo sapien
aaggacacgaacacagctactgggc

SEQ ID NO: 1649742 - DNA, 25 bp, Homo sapien
ggacagcctcgaagacctagatgca

SEQ ID NO: 1649743 - DNA, 25 bp, Homo sapien
cgggcatggttgtggcacgccttta

SEQ ID NO: 1649744 - DNA, 25 bp, Homo sapien
gaatctacatgccagaactccgcac

SEQ ID NO: 1649745 - DNA, 25 bp, Homo sapien
cagggatgcttctgacggctttcaa

SEQ ID NO: 1649746 - DNA, 25 bp, Homo sapien
gcagctccctctacccgatgtaaga

SEQ ID NO: 1649747 - DNA, 25 bp, Homo sapien
gtttttggtgttagtgtgtccagat

SEQ ID NO: 1649748 - DNA, 25 bp, Homo sapien
gagagttcaccctctaaggtggctt

SEQ ID NO: 1649749 - DNA, 25 bp, Homo sapien
agatgcaacatcaatgttgggtgtt

SEQ ID NO: 1649750 - DNA, 25 bp, Homo sapien
tgttgtagtaagagtggcctatttt

SEQ ID NO: 1649751 - DNA, 25 bp, Homo sapien
gaaggacaggaaactccctcccatc

SEQ ID NO: 1649752 - DNA, 25 bp, Homo sapien
agaaggacaggaaactccctcccat

SEQ ID NO: 1649753 - DNA, 25 bp, Homo sapien
tccaatttctgctggacaccctcac

SEQ ID NO: 1649754 - DNA, 25 bp, Homo sapien
catccagggggtccctgattcctgt

SEQ ID NO: 1649755 - DNA, 25 bp, Homo sapien
tccagggggtccctgattcctgtcc

SEQ ID NO: 1649756 - DNA, 25 bp, Homo sapien
cagggggtccctgattcctgtccca

SEQ ID NO: 1649757 - DNA, 25 bp, Homo sapien
aggcatccagggggtccctgattcc

SEQ ID NO: 1649758 - DNA, 25 bp, Homo sapien
ggaggaagaaagtcggcttgtattc

SEQ ID NO: 1649759 - DNA, 25 bp, Homo sapien
gaggaagaaagtcggcttgtattca

SEQ ID NO: 1649760 - DNA, 25 bp, Homo sapien
aggaagaaagtcggcttgtattcat

SEQ ID NO: 1649761 - DNA, 25 bp, Homo sapien
ttgctgcgcttggtgcagaccacct

SEQ ID NO: 1649762 - DNA, 25 bp, Homo sapien
gctgcgcttggtgcagaccacctcg

SEQ ID NO: 1649763 - DNA, 25 bp, Homo sapien
tgcgcttggtgcagaccacctcggg

SEQ ID NO: 1649764 - DNA, 25 bp, Homo sapien
cgcttggtgcagaccacctcggggg

SEQ ID NO: 1649765 - DNA, 25 bp, Homo sapien
ctcttgcgggaatccggggcctcgg

SEQ ID NO: 1649766 - DNA, 25 bp, Homo sapien
gctgctgtggcggcggcgacggctg

SEQ ID NO: 1649767 - DNA, 25 bp, Homo sapien
tgctgtggcggcggcgacggctgct

SEQ ID NO: 1649768 - DNA, 25 bp, Homo sapien
ggctgctgtggcggcggcgacggct

SEQ ID NO: 1649769 - DNA, 25 bp, Homo sapien
ggcggctgctgtggcggcggcgacg

SEQ ID NO: 1649770 - DNA, 25 bp, Homo sapien
ctgagcttggctgatgtatttctta

SEQ ID NO: 1649771 - DNA, 25 bp, Homo sapien
tgagcttggctgatgtatttcttaa

SEQ ID NO: 1649772 - DNA, 25 bp, Homo sapien
gagcttggctgatgtatttcttaaa

SEQ ID NO: 1649773 - DNA, 25 bp, Homo sapien
tcacagcagtcactcggtgacagga

SEQ ID NO: 1649774 - DNA, 25 bp, Homo sapien
gtctgcaccgcactgtgtcacagca

SEQ ID NO: 1649775 - DNA, 25 bp, Homo sapien
cattctgaacatactgtctgcaccg

SEQ ID NO: 1649776 - DNA, 25 bp, Homo sapien
ggttttgagcatggtagttacctga

SEQ ID NO: 1649777 - DNA, 25 bp, Homo sapien
tctagtggacagtttccgcagccgc

SEQ ID NO: 1649778 - DNA, 25 bp, Homo sapien
tccctctagtggacagtttccgcag

SEQ ID NO: 1649779 - DNA, 25 bp, Homo sapien
ccgtctccctctagtggacagtttc

SEQ ID NO: 1649780 - DNA, 25 bp, Homo sapien
agtggacagtttccgcagccgctgc

SEQ ID NO: 1649781 - DNA, 25 bp, Homo sapien
catctttattggagaaggagacagt

SEQ ID NO: 1649782 - DNA, 25 bp, Homo sapien
gaatggggtgcggatcagcagggcc

SEQ ID NO: 1649783 - DNA, 25 bp, Homo sapien
ttgagctacatctttattggagaag

SEQ ID NO: 1649784 - DNA, 25 bp, Homo sapien
cagtggggtttttggccatgggagg

SEQ ID NO: 1649785 - DNA, 25 bp, Homo sapien
gagtgtacgctgcacatcccggtgt

SEQ ID NO: 1649786 - DNA, 25 bp, Homo sapien
ttgcctggagagagtgtacgctgca

SEQ ID NO: 1649787 - DNA, 25 bp, Homo sapien
cacatcccggtgtcctttgagcaca

SEQ ID NO: 1649788 - DNA, 25 bp, Homo sapien
agcacatagttggacctcagggctc

SEQ ID NO: 1649789 - DNA, 25 bp, Homo sapien
catggggttccataagtgacctgag

SEQ ID NO: 1649790 - DNA, 25 bp, Homo sapien
gagcccgtcttctccaatcaggaag

SEQ ID NO: 1649791 - DNA, 25 bp, Homo sapien
tgtagttgcccatgaagctgatgcc

SEQ ID NO: 1649792 - DNA, 25 bp, Homo sapien
cctgagtgggcacccgtgaagttcc

SEQ ID NO: 1649793 - DNA, 25 bp, Homo sapien
ttactgccgtggtgcacacaacttc

SEQ ID NO: 1649794 - DNA, 25 bp, Homo sapien
taatttcccacgatagtaacaatga

SEQ ID NO: 1649795 - DNA, 25 bp, Homo sapien
cagcatccttctcacccgttaattt

SEQ ID NO: 1649796 - DNA, 25 bp, Homo sapien
ctgcctccgttactgccgtggtgca

SEQ ID NO: 1649797 - DNA, 25 bp, Homo sapien
cacgtcgcaccagcccagtgtcttc

SEQ ID NO: 1649798 - DNA, 25 bp, Homo sapien
ggtagtgctgcacattccgggcctg

SEQ ID NO: 1649799 - DNA, 25 bp, Homo sapien
tgtggtagtgctgcacattccgggc

SEQ ID NO: 1649800 - DNA, 25 bp, Homo sapien
acgtcgcaccagcccagtgtcttca

SEQ ID NO: 1649801 - DNA, 25 bp, Homo sapien
cacatagcgtaagggcaggctcagg

SEQ ID NO: 1649802 - DNA, 25 bp, Homo sapien
tgcgataccaccacatagcgtaagg

SEQ ID NO: 1649803 - DNA, 25 bp, Homo sapien
aggtgctgggcgcactctgatgcca

SEQ ID NO: 1649804 - DNA, 25 bp, Homo sapien
cgccgtgtgcgataccaccacatag

SEQ ID NO: 1649805 - DNA, 25 bp, Homo sapien
ctcgttccggggcactatggggctg

SEQ ID NO: 1649806 - DNA, 25 bp, Homo sapien
tccggggcactatggggctgcagca

SEQ ID NO: 1649807 - DNA, 25 bp, Homo sapien
gtctcctgagccgctccgagtcgaa

SEQ ID NO: 1649808 - DNA, 25 bp, Homo sapien
tcctgagccgctccgagtcgaagga

SEQ ID NO: 1649809 - DNA, 25 bp, Homo sapien
gcagggtccgggagaccgctaggag

SEQ ID NO: 1649810 - DNA, 25 bp, Homo sapien
gggtccgggagaccgctaggagcgc

SEQ ID NO: 1649811 - DNA, 25 bp, Homo sapien
tccgggagaccgctaggagcgcccg

SEQ ID NO: 1649812 - DNA, 25 bp, Homo sapien
ccgggagaccgctaggagcgcccgg

SEQ ID NO: 1649813 - DNA, 25 bp, Homo sapien
ctggttctgcccggcacctcggtga

SEQ ID NO: 1649814 - DNA, 25 bp, Homo sapien
cgtagctgtgtaccctgtccctgtg

SEQ ID NO: 1649815 - DNA, 25 bp, Homo sapien
tccataagttttgtgcgtagctgtg

SEQ ID NO: 1649816 - DNA, 25 bp, Homo sapien
gagcggctcgtatagtccataagtt

SEQ ID NO: 1649817 - DNA, 25 bp, Homo sapien
tatacgatatttcacgtggatgacc

SEQ ID NO: 1649818 - DNA, 25 bp, Homo sapien
tacgatatttcacgtggatgacccg

SEQ ID NO: 1649819 - DNA, 25 bp, Homo sapien
gccagatatacgatatttcacgtgg

SEQ ID NO: 1649820 - DNA, 25 bp, Homo sapien
taaaagccagatatacgatatttca

SEQ ID NO: 1649821 - DNA, 25 bp, Homo sapien
gactgccaagcacctgtagcagtgc

SEQ ID NO: 1649822 - DNA, 25 bp, Homo sapien
ggcccatgaccacacggcaggagtt

SEQ ID NO: 1649823 - DNA, 25 bp, Homo sapien
gagttcctttccgagactgccaagc

SEQ ID NO: 1649824 - DNA, 25 bp, Homo sapien
gcaaaggtcttcatggcataggaac

SEQ ID NO: 1649825 - DNA, 25 bp, Homo sapien
gatcttgacacagggctttttgggt

SEQ ID NO: 1649826 - DNA, 25 bp, Homo sapien
cttgacacagggctttttgggtggt

SEQ ID NO: 1649827 - DNA, 25 bp, Homo sapien
tcagatcttgacacagggctttttg

SEQ ID NO: 1649828 - DNA, 25 bp, Homo sapien
tgacacagggctttttgggtggtat

SEQ ID NO: 1649829 - DNA, 25 bp, Homo sapien
cttcatgcctgggaccttgaacctc

SEQ ID NO: 1649830 - DNA, 25 bp, Homo sapien
taggggaggacttgcaatctggctt

SEQ ID NO: 1649831 - DNA, 25 bp, Homo sapien
ctggcttcatgcctgggaccttgaa

SEQ ID NO: 1649832 - DNA, 25 bp, Homo sapien
gcaatctggcttcatgcctgggacc

SEQ ID NO: 1649833 - DNA, 25 bp, Homo sapien
agagccgggtctggttcaagtctag

SEQ ID NO: 1649834 - DNA, 25 bp, Homo sapien
gggtctggttcaagtctaggatgac

SEQ ID NO: 1649835 - DNA, 25 bp, Homo sapien
ggatgacaccgtcatcacagcactg

SEQ ID NO: 1649836 - DNA, 25 bp, Homo sapien
gatgacaccgtcatcacagcactgc

SEQ ID NO: 1649837 - DNA, 25 bp, Homo sapien
ggctggcatagccacagtctaagat

SEQ ID NO: 1649838 - DNA, 25 bp, Homo sapien
tggctggcatagccacagtctaaga

SEQ ID NO: 1649839 - DNA, 25 bp, Homo sapien
gatgggctgcaaggaccagcctagg

SEQ ID NO: 1649840 - DNA, 25 bp, Homo sapien
caaggaccagcctaggaccacctcc

SEQ ID NO: 1649841 - DNA, 25 bp, Homo sapien
gctgcaaggaccagcctaggaccac

SEQ ID NO: 1649842 - DNA, 25 bp, Homo sapien
tgggctgcaaggaccagcctaggac

SEQ ID NO: 1649843 - DNA, 25 bp, Homo sapien
gactccttctgagtttgaacccaaa

SEQ ID NO: 1649844 - DNA, 25 bp, Homo sapien
ttctgagtttgaacccaaaagttca

SEQ ID NO: 1649845 - DNA, 25 bp, Homo sapien
ctgtgactccttctgagtttgaacc

SEQ ID NO: 1649846 - DNA, 25 bp, Homo sapien
tctgagtttgaacccaaaagttcaa

SEQ ID NO: 1649847 - DNA, 25 bp, Homo sapien
cactaggtcttgaccacggggcaca

SEQ ID NO: 1649848 - DNA, 25 bp, Homo sapien
aagcagaaggagagcgagaatgatt

SEQ ID NO: 1649849 - DNA, 25 bp, Homo sapien
gattctgaggtcactaggtcttgac

SEQ ID NO: 1649850 - DNA, 25 bp, Homo sapien
gagcttctctggttgctgttaacag

SEQ ID NO: 1649851 - DNA, 25 bp, Homo sapien
agaaggagtggtttcttgggaagag

SEQ ID NO: 1649852 - DNA, 25 bp, Homo sapien
ggaggtgtgcagaaggagtggtttc

SEQ ID NO: 1649853 - DNA, 25 bp, Homo sapien
tggtttcttgggaagagttaggcaa

SEQ ID NO: 1649854 - DNA, 25 bp, Homo sapien
tgtgcagaaggagtggtttcttggg

SEQ ID NO: 1649855 - DNA, 25 bp, Homo sapien
aaacaccggctgtctctaggctccc

SEQ ID NO: 1649856 - DNA, 25 bp, Homo sapien
caaacaccggctgtctctaggctcc

SEQ ID NO: 1649857 - DNA, 25 bp, Homo sapien
caccggctgtctctaggctccccat

SEQ ID NO: 1649858 - DNA, 25 bp, Homo sapien
aacaccggctgtctctaggctcccc

SEQ ID NO: 1649859 - DNA, 25 bp, Homo sapien
gtaggagaatttgtgaagttgcagc

SEQ ID NO: 1649860 - DNA, 25 bp, Homo sapien
agaatttgtgaagttgcagcataat

SEQ ID NO: 1649861 - DNA, 25 bp, Homo sapien
taggagaatttgtgaagttgcagca

SEQ ID NO: 1649862 - DNA, 25 bp, Homo sapien
ggagaatttgtgaagttgcagcata

SEQ ID NO: 1649863 - DNA, 25 bp, Homo sapien
tgagaccgagatggctgaattaaca

SEQ ID NO: 1649864 - DNA, 25 bp, Homo sapien
gaccgagatggctgaattaacagaa

SEQ ID NO: 1649865 - DNA, 25 bp, Homo sapien
gctgagaccgagatggctgaattaa

SEQ ID NO: 1649866 - DNA, 25 bp, Homo sapien
gctgaattaacagaagtagttttaa

SEQ ID NO: 1649867 - DNA, 25 bp, Homo sapien
aagtctcatttaagacaaggtgagt

SEQ ID NO: 1649868 - DNA, 25 bp, Homo sapien
tcatttaagacaaggtgagttcctt

SEQ ID NO: 1649869 - DNA, 25 bp, Homo sapien
tctcatttaagacaaggtgagttcc

SEQ ID NO: 1649870 - DNA, 25 bp, Homo sapien
gtctcatttaagacaaggtgagttc

SEQ ID NO: 1649871 - DNA, 25 bp, Homo sapien
cacatccaagttatgctgcaagagg

SEQ ID NO: 1649872 - DNA, 25 bp, Homo sapien
catgagggcgctgttcctgaagcaa

SEQ ID NO: 1649873 - DNA, 25 bp, Homo sapien
tttatccatggctagagcaactggg

SEQ ID NO: 1649874 - DNA, 25 bp, Homo sapien
ccaaatgtgacagactggccaagat

SEQ ID NO: 1649875 - DNA, 25 bp, Homo sapien
tttgcaccctcaaatacctgagttg

SEQ ID NO: 1649876 - DNA, 25 bp, Homo sapien
ttgcaccctcaaatacctgagttgg

SEQ ID NO: 1649877 - DNA, 25 bp, Homo sapien
gtttgcaccctcaaatacctgagtt

SEQ ID NO: 1649878 - DNA, 25 bp, Homo sapien
ttcacaggagttaagctgtcagtag

SEQ ID NO: 1649879 - DNA, 25 bp, Homo sapien
caggagttaagctgtcagtagctca

SEQ ID NO: 1649880 - DNA, 25 bp, Homo sapien
ttgttcacaggagttaagctgtcag

SEQ ID NO: 1649881 - DNA, 25 bp, Homo sapien
cacaggagttaagctgtcagtagct

SEQ ID NO: 1649882 - DNA, 25 bp, Homo sapien
cttcttggttgcgaaggaatctttt

SEQ ID NO: 1649883 - DNA, 25 bp, Homo sapien
ccttcttggttgcgaaggaatcttt

SEQ ID NO: 1649884 - DNA, 25 bp, Homo sapien
cccttcttggttgcgaaggaatctt

SEQ ID NO: 1649885 - DNA, 25 bp, Homo sapien
ttcttggttgcgaaggaatcttttc

SEQ ID NO: 1649886 - DNA, 25 bp, Homo sapien
tatcattcaggaagtggacccagcc

SEQ ID NO: 1649887 - DNA, 25 bp, Homo sapien
aatccccgtggaagatgcacctgtg

SEQ ID NO: 1649888 - DNA, 25 bp, Homo sapien
gatttgcgaggccaaaacctgggtg

SEQ ID NO: 1649889 - DNA, 25 bp, Homo sapien
gcgttccaagtgtccagagcgtctg

SEQ ID NO: 1649890 - DNA, 25 bp, Homo sapien
taactgccttggtgtcagtagtcat

SEQ ID NO: 1649891 - DNA, 25 bp, Homo sapien
tcgtcagtagacatcgcgcaggcga

SEQ ID NO: 1649892 - DNA, 25 bp, Homo sapien
cgcaggcgatgggtgaggcggcttt

SEQ ID NO: 1649893 - DNA, 25 bp, Homo sapien
ggccgccatgttttcgtcgcagtaa

SEQ ID NO: 1649894 - DNA, 25 bp, Homo sapien
tactcctacaacttgcagtaccatt

SEQ ID NO: 1649895 - DNA, 25 bp, Homo sapien
cagtaccattctttgttccagcaca

SEQ ID NO: 1649896 - DNA, 25 bp, Homo sapien
taatctagcatctttactcctacaa

SEQ ID NO: 1649897 - DNA, 25 bp, Homo sapien
gatgtcacctctatatcagttggtc

SEQ ID NO: 1649898 - DNA, 25 bp, Homo sapien
caggatgtgttctgcactttcctgg

SEQ ID NO: 1649899 - DNA, 25 bp, Homo sapien
gcactttcctggtatgccattttgt

SEQ ID NO: 1649900 - DNA, 25 bp, Homo sapien
tagcctgaagtcagactgttgttgg

SEQ ID NO: 1649901 - DNA, 25 bp, Homo sapien
tcatagcctgaagtcagactgttgt

SEQ ID NO: 1649902 - DNA, 25 bp, Homo sapien
tgttggatgtattcagaaatttcca

SEQ ID NO: 1649903 - DNA, 25 bp, Homo sapien
cctgaagtcagactgttgttggatg

SEQ ID NO: 1649904 - DNA, 25 bp, Homo sapien
tttctataccactccagcccctcat

SEQ ID NO: 1649905 - DNA, 25 bp, Homo sapien
tttttctataccactccagcccctc

SEQ ID NO: 1649906 - DNA, 25 bp, Homo sapien
ttggaattttttctataccactcca

SEQ ID NO: 1649907 - DNA, 25 bp, Homo sapien
ggaattttttctataccactccagc

SEQ ID NO: 1649908 - DNA, 25 bp, Homo sapien
gggctgctgtagagaactgatgtcc

SEQ ID NO: 1649909 - DNA, 25 bp, Homo sapien
ctgtagagaactgatgtccccagtt

SEQ ID NO: 1649910 - DNA, 25 bp, Homo sapien
tgcagggctgctgtagagaactgat

SEQ ID NO: 1649911 - DNA, 25 bp, Homo sapien
tagagaactgatgtccccagttctg

SEQ ID NO: 1649912 - DNA, 25 bp, Homo sapien
ctattcagtaagtttttcagtatac

SEQ ID NO: 1649913 - DNA, 25 bp, Homo sapien
gctatgtcattgagccatccctctg

SEQ ID NO: 1649914 - DNA, 25 bp, Homo sapien
aagtcaagttgcttctctccgaagt

SEQ ID NO: 1649915 - DNA, 25 bp, Homo sapien
gaagcaggaaggcattcttcccctg

SEQ ID NO: 1649916 - DNA, 25 bp, Homo sapien
ccttgtctgccgtctgccagtggag

SEQ ID NO: 1649917 - DNA, 25 bp, Homo sapien
atgggtacaggacgtgcctcctgtt

SEQ ID NO: 1649918 - DNA, 25 bp, Homo sapien
tatgggtacaggacgtgcctcctgt

SEQ ID NO: 1649919 - DNA, 25 bp, Homo sapien
tgggtacaggacgtgcctcctgttc

SEQ ID NO: 1649920 - DNA, 25 bp, Homo sapien
ttatgggtacaggacgtgcctcctg

SEQ ID NO: 1649921 - DNA, 25 bp, Homo sapien
gaaggacacagtcaccatgaaaaag

SEQ ID NO: 1649922 - DNA, 25 bp, Homo sapien
aaaaagcaggaagataggacaccac

SEQ ID NO: 1649923 - DNA, 25 bp, Homo sapien
gacttgactgctacaccagatgtgt

SEQ ID NO: 1649924 - DNA, 25 bp, Homo sapien
tcacagtgccccaaatcaaagtgtc

SEQ ID NO: 1649925 - DNA, 25 bp, Homo sapien
gcccactgagaggagtagtattttc

SEQ ID NO: 1649926 - DNA, 25 bp, Homo sapien
agatgcatctcaacagcccactgag

SEQ ID NO: 1649927 - DNA, 25 bp, Homo sapien
tagcctgagcatcttcccaagatgc

SEQ ID NO: 1649928 - DNA, 25 bp, Homo sapien
tcatagcctgagcatcttcccaaga

SEQ ID NO: 1649929 - DNA, 25 bp, Homo sapien
gatgggagataagtgacactgagac

SEQ ID NO: 1649930 - DNA, 25 bp, Homo sapien
atgggagataagtgacactgagact

SEQ ID NO: 1649931 - DNA, 25 bp, Homo sapien
tgggagataagtgacactgagactt

SEQ ID NO: 1649932 - DNA, 25 bp, Homo sapien
gggagataagtgacactgagacttc

SEQ ID NO: 1649933 - DNA, 25 bp, Homo sapien
taacagcactgctctgaagggttgt

SEQ ID NO: 1649934 - DNA, 25 bp, Homo sapien
ccacagcggcgggtctcctttaagg

SEQ ID NO: 1649935 - DNA, 25 bp, Homo sapien
ctcctttaaggataagatggcatca

SEQ ID NO: 1649936 - DNA, 25 bp, Homo sapien
ggccaaaagactcgggacagcagag

SEQ ID NO: 1649937 - DNA, 25 bp, Homo sapien
ctgggtgtcggctggcacagccaca

SEQ ID NO: 1649938 - DNA, 25 bp, Homo sapien
gggtgtcggctggcacagccacagt

SEQ ID NO: 1649939 - DNA, 25 bp, Homo sapien
tgggtgtcggctggcacagccacag

SEQ ID NO: 1649940 - DNA, 25 bp, Homo sapien
ggtgtcggctggcacagccacagtc

SEQ ID NO: 1649941 - DNA, 25 bp, Homo sapien
tggaggaggaagactgttatccagc

SEQ ID NO: 1649942 - DNA, 25 bp, Homo sapien
aagactgttatccagcagacaagag

SEQ ID NO: 1649943 - DNA, 25 bp, Homo sapien
gtagttccttttgaacactggagga

SEQ ID NO: 1649944 - DNA, 25 bp, Homo sapien
tgtagttccttttgaacactggagg

SEQ ID NO: 1649945 - DNA, 25 bp, Homo sapien
gggtggagaatagcaatggcccaaa

SEQ ID NO: 1649946 - DNA, 25 bp, Homo sapien
ctctagcagttgagccacggctctg

SEQ ID NO: 1649947 - DNA, 25 bp, Homo sapien
cctggtgtgcttggtgtgaggattc

SEQ ID NO: 1649948 - DNA, 25 bp, Homo sapien
gttgagccacggctctggaaactcc

SEQ ID NO: 1649949 - DNA, 25 bp, Homo sapien
attggtacttggtctagatttacac

SEQ ID NO: 1649950 - DNA, 25 bp, Homo sapien
tcctggttgagatccattggagtag

SEQ ID NO: 1649951 - DNA, 25 bp, Homo sapien
tgtaagtttcggctgaagctctgtc

SEQ ID NO: 1649952 - DNA, 25 bp, Homo sapien
ttggtctagatttacacatgtcctc

SEQ ID NO: 1649953 - DNA, 25 bp, Homo sapien
tctgtgttttgtcccacaccaactg

SEQ ID NO: 1649954 - DNA, 25 bp, Homo sapien
atatctgtgttttgtcccacaccaa

SEQ ID NO: 1649955 - DNA, 25 bp, Homo sapien
gctgtatatctgtgttttgtcccac

SEQ ID NO: 1649956 - DNA, 25 bp, Homo sapien
ctgctgtatatctgtgttttgtccc

SEQ ID NO: 1649957 - DNA, 25 bp, Homo sapien
gagaaagggacatctttcaatgcag

SEQ ID NO: 1649958 - DNA, 25 bp, Homo sapien
ggcagagaaagggacatctttcaat

SEQ ID NO: 1649959 - DNA, 25 bp, Homo sapien
cagagaaagggacatctttcaatgc

SEQ ID NO: 1649960 - DNA, 25 bp, Homo sapien
ctggcagagaaagggacatctttca

SEQ ID NO: 1649961 - DNA, 25 bp, Homo sapien
gatcactgatggacgagccaaaact

SEQ ID NO: 1649962 - DNA, 25 bp, Homo sapien
cagatcactgatggacgagccaaaa

SEQ ID NO: 1649963 - DNA, 25 bp, Homo sapien
atggcagatcactgatggacgagcc

SEQ ID NO: 1649964 - DNA, 25 bp, Homo sapien
actgatggacgagccaaaactgatc

SEQ ID NO: 1649965 - DNA, 25 bp, Homo sapien
atcttgggcccacggcaggtaattg

SEQ ID NO: 1649966 - DNA, 25 bp, Homo sapien
ggcccacggcaggtaattgtgaact

SEQ ID NO: 1649967 - DNA, 25 bp, Homo sapien
agaaatcttgggcccacggcaggta

SEQ ID NO: 1649968 - DNA, 25 bp, Homo sapien
ttgggcccacggcaggtaattgtga

SEQ ID NO: 1649969 - DNA, 25 bp, Homo sapien
tggcgggcgttgatgaaccagttac

SEQ ID NO: 1649970 - DNA, 25 bp, Homo sapien
atttatctgagaagcttgtggcggg

SEQ ID NO: 1649971 - DNA, 25 bp, Homo sapien
tgagaagcttgtggcgggcgttgat

SEQ ID NO: 1649972 - DNA, 25 bp, Homo sapien
tctgagaagcttgtggcgggcgttg

SEQ ID NO: 1649973 - DNA, 25 bp, Homo sapien
aaggatggacattgtaatggtgctc

SEQ ID NO: 1649974 - DNA, 25 bp, Homo sapien
ctttttcttgctcggaaggatggac

SEQ ID NO: 1649975 - DNA, 25 bp, Homo sapien
tatgtttgctgggacaacagtgctt

SEQ ID NO: 1649976 - DNA, 25 bp, Homo sapien
tgtccatggaatcgtcatcctccgt

SEQ ID NO: 1649977 - DNA, 25 bp, Homo sapien
ccagattaaagccctccttccagta

SEQ ID NO: 1649978 - DNA, 25 bp, Homo sapien
tccagtaactcttagttcctttcag

SEQ ID NO: 1649979 - DNA, 25 bp, Homo sapien
gtgagtgacccactcaccagattaa

SEQ ID NO: 1649980 - DNA, 25 bp, Homo sapien
cagtaactcttagttcctttcaggg

SEQ ID NO: 1649981 - DNA, 25 bp, Homo sapien
ggcccgtctgcctctgttggtatca

SEQ ID NO: 1649982 - DNA, 25 bp, Homo sapien
ggtatcacttgcatctgttagactc

SEQ ID NO: 1649983 - DNA, 25 bp, Homo sapien
aagaccctgacaggcccctgggtgt

SEQ ID NO: 1649984 - DNA, 25 bp, Homo sapien
tatttgtcctaatgtgctgcttccc

SEQ ID NO: 1649985 - DNA, 25 bp, Homo sapien
gaggggtggccagttcagagacgta

SEQ ID NO: 1649986 - DNA, 25 bp, Homo sapien
ggaggggtggccagttcagagacgt

SEQ ID NO: 1649987 - DNA, 25 bp, Homo sapien
cggaggggtggccagttcagagacg

SEQ ID NO: 1649988 - DNA, 25 bp, Homo sapien
aggggtggccagttcagagacgtac

SEQ ID NO: 1649989 - DNA, 25 bp, Homo sapien
aggagggcaccaagacatttgtgag

SEQ ID NO: 1649990 - DNA, 25 bp, Homo sapien
caggagagatgtcagactcaagtca

SEQ ID NO: 1649991 - DNA, 25 bp, Homo sapien
caagacatttgtgaggaatctcctc

SEQ ID NO: 1649992 - DNA, 25 bp, Homo sapien
caaagtaacagggtgagaactcact

SEQ ID NO: 1649993 - DNA, 25 bp, Homo sapien
gcagcctcaagtgtgtctgggcaaa

SEQ ID NO: 1649994 - DNA, 25 bp, Homo sapien
agcctcaagtgtgtctgggcaaaga

SEQ ID NO: 1649995 - DNA, 25 bp, Homo sapien
cagcctcaagtgtgtctgggcaaag

SEQ ID NO: 1649996 - DNA, 25 bp, Homo sapien
caaagtcggctaggtaacgggcatc

SEQ ID NO: 1649997 - DNA, 25 bp, Homo sapien
ttttctgggatgtcctcagctggga

SEQ ID NO: 1649998 - DNA, 25 bp, Homo sapien
cccgggcactggcattaacgctaga

SEQ ID NO: 1649999 - DNA, 25 bp, Homo sapien
tgtaagtaacacgtcctgggttgac

SEQ ID NO: 1650000 - DNA, 25 bp, Homo sapien
tgtggcttcccgatcacaggatggc

SEQ ID NO: 1650001 - DNA, 25 bp, Homo sapien
tgtctcgactctagactcacagggt

SEQ ID NO: 1650002 - DNA, 25 bp, Homo sapien
gtcatggagcaaccctcagtccgtg

SEQ ID NO: 1650003 - DNA, 25 bp, Homo sapien
tacctgggagacactagagctcaca

SEQ ID NO: 1650004 - DNA, 25 bp, Homo sapien
tgtccaggctggtctgggattcctg

SEQ ID NO: 1650005 - DNA, 25 bp, Homo sapien
ggattacaggcatgagccaccatac

SEQ ID NO: 1650006 - DNA, 25 bp, Homo sapien
cctcaagcaattcttcctcctcggc

SEQ ID NO: 1650007 - DNA, 25 bp, Homo sapien
ggcctcaagcaattcttcctcctcg

SEQ ID NO: 1650008 - DNA, 25 bp, Homo sapien
tcttcattcttgttggctttgcgtc

SEQ ID NO: 1650009 - DNA, 25 bp, Homo sapien
ctggccacttcttcattcttgttgg

SEQ ID NO: 1650010 - DNA, 25 bp, Homo sapien
acttcttcattcttgttggctttgc

SEQ ID NO: 1650011 - DNA, 25 bp, Homo sapien
cttcattcttgttggctttgcgtcc

SEQ ID NO: 1650012 - DNA, 25 bp, Homo sapien
tagaggtagagttccaacccctgag

SEQ ID NO: 1650013 - DNA, 25 bp, Homo sapien
gacctgtccccagacaatggattgg

SEQ ID NO: 1650014 - DNA, 25 bp, Homo sapien
tggcggaggcattggacagctctgt

SEQ ID NO: 1650015 - DNA, 25 bp, Homo sapien
ctgggctccagtgccgaagacagac

SEQ ID NO: 1650016 - DNA, 25 bp, Homo sapien
cagcagaattttgagttcatggaca

SEQ ID NO: 1650017 - DNA, 25 bp, Homo sapien
agcagaattttgagttcatggacaa

SEQ ID NO: 1650018 - DNA, 25 bp, Homo sapien
gcagcagaattttgagttcatggac

SEQ ID NO: 1650019 - DNA, 25 bp, Homo sapien
cccgaggtcatgggtggatctcatg

SEQ ID NO: 1650020 - DNA, 25 bp, Homo sapien
caaatgtcacatgagtccatatgaa

SEQ ID NO: 1650021 - DNA, 25 bp, Homo sapien
tgagaagttccttcggctgggctga

SEQ ID NO: 1650022 - DNA, 25 bp, Homo sapien
tgagtccatatgaagagagtccacc

SEQ ID NO: 1650023 - DNA, 25 bp, Homo sapien
acgttccagaagctcaggtctccca

SEQ ID NO: 1650024 - DNA, 25 bp, Homo sapien
gaggacagccagtgctctcctgtgt

SEQ ID NO: 1650025 - DNA, 25 bp, Homo sapien
gattcagccctttccgtgcttgttc

SEQ ID NO: 1650026 - DNA, 25 bp, Homo sapien
ggaagcccatgaaaggaggacagcc

SEQ ID NO: 1650027 - DNA, 25 bp, Homo sapien
tccccttagccctcccaacatagga

SEQ ID NO: 1650028 - DNA, 25 bp, Homo sapien
ttagccctcccaacataggacacac

SEQ ID NO: 1650029 - DNA, 25 bp, Homo sapien
ttgtccccttagccctcccaacata

SEQ ID NO: 1650030 - DNA, 25 bp, Homo sapien
ccttagccctcccaacataggacac

SEQ ID NO: 1650031 - DNA, 25 bp, Homo sapien
tgcaggagcccaggctgtcaacagc

SEQ ID NO: 1650032 - DNA, 25 bp, Homo sapien
gagcccaggctgtcaacagcatcag

SEQ ID NO: 1650033 - DNA, 25 bp, Homo sapien
ggagcccaggctgtcaacagcatca

SEQ ID NO: 1650034 - DNA, 25 bp, Homo sapien
caggagcccaggctgtcaacagcat

SEQ ID NO: 1650035 - DNA, 25 bp, Homo sapien
agcactgcatcactggtgtctgaca

SEQ ID NO: 1650036 - DNA, 25 bp, Homo sapien
tcctctcactgtcatgaacgtcacg

SEQ ID NO: 1650037 - DNA, 25 bp, Homo sapien
agacactgactttgcgttttctact

SEQ ID NO: 1650038 - DNA, 25 bp, Homo sapien
gtctgacacgaagcctgggacatgt

SEQ ID NO: 1650039 - DNA, 25 bp, Homo sapien
gggacaagttctacgaccccctgca

SEQ ID NO: 1650040 - DNA, 25 bp, Homo sapien
caagttctacgaccccctgcagcac

SEQ ID NO: 1650041 - DNA, 25 bp, Homo sapien
ggacaagttctacgaccccctgcag

SEQ ID NO: 1650042 - DNA, 25 bp, Homo sapien
ctgatgctgtgccagccacacaaga

SEQ ID NO: 1650043 - DNA, 25 bp, Homo sapien
ccccttctagaattctggacagcat

SEQ ID NO: 1650044 - DNA, 25 bp, Homo sapien
gggaacccttcacccttctgtgaga

SEQ ID NO: 1650045 - DNA, 25 bp, Homo sapien
tcctgatgacccctatggccaacat

SEQ ID NO: 1650046 - DNA, 25 bp, Homo sapien
cagggactctgaaccctcctgatga

SEQ ID NO: 1650047 - DNA, 25 bp, Homo sapien
aactggcacaaccacagtccaatat

SEQ ID NO: 1650048 - DNA, 25 bp, Homo sapien
tggagtgtcaactggcacaaccaca

SEQ ID NO: 1650049 - DNA, 25 bp, Homo sapien
caagagattgcagatctggtctcca

SEQ ID NO: 1650050 - DNA, 25 bp, Homo sapien
tccactctggagtgtcaactggcac

SEQ ID NO: 1650051 - DNA, 25 bp, Homo sapien
gggtcaccggatcatgatcattggg

SEQ ID NO: 1650052 - DNA, 25 bp, Homo sapien
actgactctggatgtaggtcctggg

SEQ ID NO: 1650053 - DNA, 25 bp, Homo sapien
tctcatctgtggtcccttctgagtc

SEQ ID NO: 1650054 - DNA, 25 bp, Homo sapien
caaaaacaaagatcagctgagagca

SEQ ID NO: 1650055 - DNA, 25 bp, Homo sapien
cttggcaggtgaggaaatgcaggga

SEQ ID NO: 1650056 - DNA, 25 bp, Homo sapien
caggtgaggaaatgcagggagggct

SEQ ID NO: 1650057 - DNA, 25 bp, Homo sapien
gcaggtgaggaaatgcagggagggc

SEQ ID NO: 1650058 - DNA, 25 bp, Homo sapien
tggcaggtgaggaaatgcagggagg

SEQ ID NO: 1650059 - DNA, 25 bp, Homo sapien
tggaaactggttctgttcggagatg

SEQ ID NO: 1650060 - DNA, 25 bp, Homo sapien
acggatgtacgctgctcagatcttc

SEQ ID NO: 1650061 - DNA, 25 bp, Homo sapien
gatgggcaaccacggatgtacgctg

SEQ ID NO: 1650062 - DNA, 25 bp, Homo sapien
ttctgttcggagatgggcaaccacg

SEQ ID NO: 1650063 - DNA, 25 bp, Homo sapien
cagcaggggactagggccacagtct

SEQ ID NO: 1650064 - DNA, 25 bp, Homo sapien
agcaggggactagggccacagtctc

SEQ ID NO: 1650065 - DNA, 25 bp, Homo sapien
ggggactagggccacagtctccgtc

SEQ ID NO: 1650066 - DNA, 25 bp, Homo sapien
gactagggccacagtctccgtcaca

SEQ ID NO: 1650067 - DNA, 25 bp, Homo sapien
gcacagggaaccgtgacatatacga

SEQ ID NO: 1650068 - DNA, 25 bp, Homo sapien
catcaagtagacatcagcatctgca

SEQ ID NO: 1650069 - DNA, 25 bp, Homo sapien
catatacgagacctttgcgtacatg

SEQ ID NO: 1650070 - DNA, 25 bp, Homo sapien
tcagcatcaagtagacatcagcatc

SEQ ID NO: 1650071 - DNA, 25 bp, Homo sapien
gtagctaggactacaaggtgcccac

SEQ ID NO: 1650072 - DNA, 25 bp, Homo sapien
tagctaggactacaaggtgcccacc

SEQ ID NO: 1650073 - DNA, 25 bp, Homo sapien
aattctggacataaatccaggccca

SEQ ID NO: 1650074 - DNA, 25 bp, Homo sapien
ttattccaatttttagcatacatgc

SEQ ID NO: 1650075 - DNA, 25 bp, Homo sapien
agcatacatgctgcctaagcaagca

SEQ ID NO: 1650076 - DNA, 25 bp, Homo sapien
taacatggaaggcttcatgcatttg

SEQ ID NO: 1650077 - DNA, 25 bp, Homo sapien
acatggaaggcttcatgcatttgca

SEQ ID NO: 1650078 - DNA, 25 bp, Homo sapien
taatctaagaaactgccatggctgg

SEQ ID NO: 1650079 - DNA, 25 bp, Homo sapien
cttgggtaaacagctaggattggaa

SEQ ID NO: 1650080 - DNA, 25 bp, Homo sapien
tacaagattttatgagatcacatgt

SEQ ID NO: 1650081 - DNA, 25 bp, Homo sapien
cagttagaagacattgggctgtttc

SEQ ID NO: 1650082 - DNA, 25 bp, Homo sapien
tcatctagtaagagggtctagaggg

SEQ ID NO: 1650083 - DNA, 25 bp, Homo sapien
cattaagtaaatgggccagtctgga

SEQ ID NO: 1650084 - DNA, 25 bp, Homo sapien
ggacttaggacagaacccaaatgga

SEQ ID NO: 1650085 - DNA, 25 bp, Homo sapien
gcccagccctacaagaagacacatt

SEQ ID NO: 1650086 - DNA, 25 bp, Homo sapien
ccagaatgccagtactgtgacccgg

SEQ ID NO: 1650087 - DNA, 25 bp, Homo sapien
taagactccaacacgtcatgcatgg

SEQ ID NO: 1650088 - DNA, 25 bp, Homo sapien
gatgacttaccctcatgcagcttag

SEQ ID NO: 1650089 - DNA, 25 bp, Homo sapien
ggttgcctaaagaatccagtgggtc

SEQ ID NO: 1650090 - DNA, 25 bp, Homo sapien
ggcagctcgttcagtggcaaaacct

SEQ ID NO: 1650091 - DNA, 25 bp, Homo sapien
tgaactactaagaagctgctgatgg

SEQ ID NO: 1650092 - DNA, 25 bp, Homo sapien
ggtcttgattactctccagtggcat

SEQ ID NO: 1650093 - DNA, 25 bp, Homo sapien
tactgtgggtccactccatgtggga

SEQ ID NO: 1650094 - DNA, 25 bp, Homo sapien
gcacaatgtgtgtgggattcataca

SEQ ID NO: 1650095 - DNA, 25 bp, Homo sapien
gtgtatatcggtagctcaagtcctc

SEQ ID NO: 1650096 - DNA, 25 bp, Homo sapien
tgggcttacagcgtttagtgtctct

SEQ ID NO: 1650097 - DNA, 25 bp, Homo sapien
catttcaatgtcatatgggcttaca

SEQ ID NO: 1650098 - DNA, 25 bp, Homo sapien
ggcacacgccactatacccaactaa

SEQ ID NO: 1650099 - DNA, 25 bp, Homo sapien
tctcattctgtcaccagggtagagt

SEQ ID NO: 1650100 - DNA, 25 bp, Homo sapien
ctcattctgtcaccagggtagagtg

SEQ ID NO: 1650101 - DNA, 25 bp, Homo sapien
acaggcacacgccactatacccaac

SEQ ID NO: 1650102 - DNA, 25 bp, Homo sapien
gactagaagtggatgccgcctgcat

SEQ ID NO: 1650103 - DNA, 25 bp, Homo sapien
ttggaaatcgtcagacctacagaga

SEQ ID NO: 1650104 - DNA, 25 bp, Homo sapien
tgtaacttttctaccttctgactag

SEQ ID NO: 1650105 - DNA, 25 bp, Homo sapien
cagtacagttaacatctgtccaccc

SEQ ID NO: 1650106 - DNA, 25 bp, Homo sapien
tccacaggccatccggaaaatctgg

SEQ ID NO: 1650107 - DNA, 25 bp, Homo sapien
gactaaggtagacagtccacaggcc

SEQ ID NO: 1650108 - DNA, 25 bp, Homo sapien
tcagcgtccgttgaaagcaccagtg

SEQ ID NO: 1650109 - DNA, 25 bp, Homo sapien
gacagtgacattgcgctgtgtccag

SEQ ID NO: 1650110 - DNA, 25 bp, Homo sapien
gtttgcagagggggtaggggcagag

SEQ ID NO: 1650111 - DNA, 25 bp, Homo sapien
aggtttgcagagggggtaggggcag

SEQ ID NO: 1650112 - DNA, 25 bp, Homo sapien
ggtttgcagagggggtaggggcaga

SEQ ID NO: 1650113 - DNA, 25 bp, Homo sapien
taggtttgcagagggggtaggggca

SEQ ID NO: 1650114 - DNA, 25 bp, Homo sapien
tcaggggctggccagagggtctgct

SEQ ID NO: 1650115 - DNA, 25 bp, Homo sapien
aggggctggccagagggtctgctcc

SEQ ID NO: 1650116 - DNA, 25 bp, Homo sapien
caggggctggccagagggtctgctc

SEQ ID NO: 1650117 - DNA, 25 bp, Homo sapien
cagcttgtctctggatggtggagcc

SEQ ID NO: 1650118 - DNA, 25 bp, Homo sapien
gatggtctacagcaaatgactcctg

SEQ ID NO: 1650119 - DNA, 25 bp, Homo sapien
tcttgacatcacacgatgaggcgcg

SEQ ID NO: 1650120 - DNA, 25 bp, Homo sapien
cccagttggctcttagtcacaggta

SEQ ID NO: 1650121 - DNA, 25 bp, Homo sapien
caggaaaacaggcacgaggcccagg

SEQ ID NO: 1650122 - DNA, 25 bp, Homo sapien
ggtcaggtgcgccacggtccagaag

SEQ ID NO: 1650123 - DNA, 25 bp, Homo sapien
ccaagtacacatggcttcaggaaaa

SEQ ID NO: 1650124 - DNA, 25 bp, Homo sapien
cacgaggcccaggttgccagtgcca

SEQ ID NO: 1650125 - DNA, 25 bp, Homo sapien
agaagcctcgccactgacaaaggaa

SEQ ID NO: 1650126 - DNA, 25 bp, Homo sapien
ctaagaagcctcgccactgacaaag

SEQ ID NO: 1650127 - DNA, 25 bp, Homo sapien
gaagcctcgccactgacaaaggaag

SEQ ID NO: 1650128 - DNA, 25 bp, Homo sapien
aagaagcctcgccactgacaaagga

SEQ ID NO: 1650129 - DNA, 25 bp, Homo sapien
tgtggggggtgtcagttgcttggca

SEQ ID NO: 1650130 - DNA, 25 bp, Homo sapien
gggtgtcagttgcttggcagccaga

SEQ ID NO: 1650131 - DNA, 25 bp, Homo sapien
cccggccagcaccacagatggagaa

SEQ ID NO: 1650132 - DNA, 25 bp, Homo sapien
cggccagcaccacagatggagaaac

SEQ ID NO: 1650133 - DNA, 25 bp, Homo sapien
ggacactggaaaatgggtggaagca

SEQ ID NO: 1650134 - DNA, 25 bp, Homo sapien
ttggacactggaaaatgggtggaag

SEQ ID NO: 1650135 - DNA, 25 bp, Homo sapien
tcccatggctctcatctccgtggtc

SEQ ID NO: 1650136 - DNA, 25 bp, Homo sapien
cccatggctctcatctccgtggtcc

SEQ ID NO: 1650137 - DNA, 25 bp, Homo sapien
tggttggcggcggtggccgtcactg

SEQ ID NO: 1650138 - DNA, 25 bp, Homo sapien
gttggcggcggtggccgtcactgct

SEQ ID NO: 1650139 - DNA, 25 bp, Homo sapien
cgtggaaaatgctgctgcccggagc

SEQ ID NO: 1650140 - DNA, 25 bp, Homo sapien
gagctgctgtctcgtgaggattgga

SEQ ID NO: 1650141 - DNA, 25 bp, Homo sapien
ttcctctcccgtagcaacagcagtc

SEQ ID NO: 1650142 - DNA, 25 bp, Homo sapien
aagcatcccccagatggcgtcccct

SEQ ID NO: 1650143 - DNA, 25 bp, Homo sapien
ctggcttcctctcccgtagcaacag

SEQ ID NO: 1650144 - DNA, 25 bp, Homo sapien
cccagatggcgtccccttcctctgg

SEQ ID NO: 1650145 - DNA, 25 bp, Homo sapien
gcaagagctgcagcgccccatttaa

SEQ ID NO: 1650146 - DNA, 25 bp, Homo sapien
tatgcagagagcgtgtcaacgcgca

SEQ ID NO: 1650147 - DNA, 25 bp, Homo sapien
cagtcttcgccccttgcataggagg

SEQ ID NO: 1650148 - DNA, 25 bp, Homo sapien
tcctacacgtagatatgcagagagc

SEQ ID NO: 1650149 - DNA, 25 bp, Homo sapien
tcgaagcgcctaagttttccctggc

SEQ ID NO: 1650150 - DNA, 25 bp, Homo sapien
gcagcccggcaagctgaattttcga

SEQ ID NO: 1650151 - DNA, 25 bp, Homo sapien
ggcctttgaacgctagactgcagaa

SEQ ID NO: 1650152 - DNA, 25 bp, Homo sapien
tggtgtttcccgagcactcgaagcg

SEQ ID NO: 1650153 - DNA, 25 bp, Homo sapien
cgatacgggaccagttggagaaacg

SEQ ID NO: 1650154 - DNA, 25 bp, Homo sapien
gaccagttggagaaacggtccggca

SEQ ID NO: 1650155 - DNA, 25 bp, Homo sapien
ctgcgatacgggaccagttggagaa

SEQ ID NO: 1650156 - DNA, 25 bp, Homo sapien
accagttggagaaacggtccggcat

SEQ ID NO: 1650157 - DNA, 25 bp, Homo sapien
aagctttagggactgttgctgcccc

SEQ ID NO: 1650158 - DNA, 25 bp, Homo sapien
agatgtggggtctgatggtctctag

SEQ ID NO: 1650159 - DNA, 25 bp, Homo sapien
tgggaagctttagggactgttgctg

SEQ ID NO: 1650160 - DNA, 25 bp, Homo sapien
gatggtctctaggacccctagggtc

SEQ ID NO: 1650161 - DNA, 25 bp, Homo sapien
tccttctcatgggcccctgatgttc

SEQ ID NO: 1650162 - DNA, 25 bp, Homo sapien
tccacgcagctcctcgtttaactcc

SEQ ID NO: 1650163 - DNA, 25 bp, Homo sapien
cgtttaactccatcttgccacttgt

SEQ ID NO: 1650164 - DNA, 25 bp, Homo sapien
agctcctcgtttaactccatcttgc

SEQ ID NO: 1650165 - DNA, 25 bp, Homo sapien
cccagagcattcgtcagttgtcaag

SEQ ID NO: 1650166 - DNA, 25 bp, Homo sapien
caagatcgggtgaggtgtgcaaacc

SEQ ID NO: 1650167 - DNA, 25 bp, Homo sapien
caaggaggcagtccacattaagtgt

SEQ ID NO: 1650168 - DNA, 25 bp, Homo sapien
taggtgacgcaaccccattgtgtcg

SEQ ID NO: 1650169 - DNA, 25 bp, Homo sapien
ttctgctctggcctcggccctcagc

SEQ ID NO: 1650170 - DNA, 25 bp, Homo sapien
agcttctgctctggcctcggccctc

SEQ ID NO: 1650171 - DNA, 25 bp, Homo sapien
ctgctctggcctcggccctcagcac

SEQ ID NO: 1650172 - DNA, 25 bp, Homo sapien
cagcttctgctctggcctcggccct

SEQ ID NO: 1650173 - DNA, 25 bp, Homo sapien
ttggcaaccggggagtgtgccagaa

SEQ ID NO: 1650174 - DNA, 25 bp, Homo sapien
cacgaaaagcgtccaggggtctgga

SEQ ID NO: 1650175 - DNA, 25 bp, Homo sapien
tctccggcgcttgcaaaaccacgaa

SEQ ID NO: 1650176 - DNA, 25 bp, Homo sapien
ggggactctcttgggcagggttggc

SEQ ID NO: 1650177 - DNA, 25 bp, Homo sapien
tctggtcatgtacggcctcttccct

SEQ ID NO: 1650178 - DNA, 25 bp, Homo sapien
ccctttgattatctgtaacctctga

SEQ ID NO: 1650179 - DNA, 25 bp, Homo sapien
tttccctctggtcatgtacggcctc

SEQ ID NO: 1650180 - DNA, 25 bp, Homo sapien
ctttgattatctgtaacctctgacc

SEQ ID NO: 1650181 - DNA, 25 bp, Homo sapien
ctggtgccctctggcgccgatgata

SEQ ID NO: 1650182 - DNA, 25 bp, Homo sapien
gggcacacaaacatctcccgcgttt

SEQ ID NO: 1650183 - DNA, 25 bp, Homo sapien
ttgatcttgggcctccatcgcctag

SEQ ID NO: 1650184 - DNA, 25 bp, Homo sapien
ttcccgctggtcagctatggcctct

SEQ ID NO: 1650185 - DNA, 25 bp, Homo sapien
catgggcactggcaggttgacgcgg

SEQ ID NO: 1650186 - DNA, 25 bp, Homo sapien
ccaggtagctgacgggcattttgcg

SEQ ID NO: 1650187 - DNA, 25 bp, Homo sapien
cctgtccgctttggacagctgaggc

SEQ ID NO: 1650188 - DNA, 25 bp, Homo sapien
tcactctccaggtcgcttcccagga

SEQ ID NO: 1650189 - DNA, 25 bp, Homo sapien
tgagcaaatagtcgacgtcctcccc

SEQ ID NO: 1650190 - DNA, 25 bp, Homo sapien
gcgttgctgctgtcgtacgtgccca

SEQ ID NO: 1650191 - DNA, 25 bp, Homo sapien
tctggaggtctcgaagtcgctgaac

SEQ ID NO: 1650192 - DNA, 25 bp, Homo sapien
tcttccaggaactgggtcagccgct

SEQ ID NO: 1650193 - DNA, 25 bp, Homo sapien
tttagggcttccacgaggacgtcca

SEQ ID NO: 1650194 - DNA, 25 bp, Homo sapien
tccttgcggaacaccttgccgatct

SEQ ID NO: 1650195 - DNA, 25 bp, Homo sapien
cccccacgtggcttttctcgagagt

SEQ ID NO: 1650196 - DNA, 25 bp, Homo sapien
tctttgcagacatcggggacgctcc

SEQ ID NO: 1650197 - DNA, 25 bp, Homo sapien
aagctattcaatatggccgaggcgc

SEQ ID NO: 1650198 - DNA, 25 bp, Homo sapien
aacttgggacaggacttcgcagaca

SEQ ID NO: 1650199 - DNA, 25 bp, Homo sapien
tccaagctggaaacgtggtgtccca

SEQ ID NO: 1650200 - DNA, 25 bp, Homo sapien
aatttccaggatgcctacgtgagcc

SEQ ID NO: 1650201 - DNA, 25 bp, Homo sapien
tcgccctccgccagaatgaggccca

SEQ ID NO: 1650202 - DNA, 25 bp, Homo sapien
cctccgccagaatgaggcccacctt

SEQ ID NO: 1650203 - DNA, 25 bp, Homo sapien
tcctcgccctccgccagaatgaggc

SEQ ID NO: 1650204 - DNA, 25 bp, Homo sapien
gccctccgccagaatgaggcccacc

SEQ ID NO: 1650205 - DNA, 25 bp, Homo sapien
ggctgtccactcccttcggggcggc

SEQ ID NO: 1650206 - DNA, 25 bp, Homo sapien
ctgtccactcccttcggggcggcct

SEQ ID NO: 1650207 - DNA, 25 bp, Homo sapien
gccgcgccccgggcctagctgggcc

SEQ ID NO: 1650208 - DNA, 25 bp, Homo sapien
gctgtccactcccttcggggcggcc

SEQ ID NO: 1650209 - DNA, 25 bp, Homo sapien
gactctgggatgcaataacgaacac

SEQ ID NO: 1650210 - DNA, 25 bp, Homo sapien
aatattctgcgagtgggtatgccca

SEQ ID NO: 1650211 - DNA, 25 bp, Homo sapien
gcatgacaacttgcattggagtccc

SEQ ID NO: 1650212 - DNA, 25 bp, Homo sapien
gggatttgccctaccagtgatgttt

SEQ ID NO: 1650213 - DNA, 25 bp, Homo sapien
ttcacctcagtgttaacgtcgttca

SEQ ID NO: 1650214 - DNA, 25 bp, Homo sapien
aaacctttgcagatccttgaactaa

SEQ ID NO: 1650215 - DNA, 25 bp, Homo sapien
gacaggtccgttgtctctgagcaaa

SEQ ID NO: 1650216 - DNA, 25 bp, Homo sapien
gacgttaggagtctctgacattaca

SEQ ID NO: 1650217 - DNA, 25 bp, Homo sapien
cagaagggtcccgcttctgaccact

SEQ ID NO: 1650218 - DNA, 25 bp, Homo sapien
gccaatcggggcagaagggtcccgc

SEQ ID NO: 1650219 - DNA, 25 bp, Homo sapien
agaagggtcccgcttctgaccactt

SEQ ID NO: 1650220 - DNA, 25 bp, Homo sapien
cccaggcgccaatcggggcagaagg

SEQ ID NO: 1650221 - DNA, 25 bp, Homo sapien
cacatattcaggtgttacccgcaca

SEQ ID NO: 1650222 - DNA, 25 bp, Homo sapien
ctactttcaattatacgcggatgcc

SEQ ID NO: 1650223 - DNA, 25 bp, Homo sapien
gacgcgctgctaggttctggctctg

SEQ ID NO: 1650224 - DNA, 25 bp, Homo sapien
tgtggtctccatagcaacggtcgga

SEQ ID NO: 1650225 - DNA, 25 bp, Homo sapien
gcgtgatgccgccggcggtttttct

SEQ ID NO: 1650226 - DNA, 25 bp, Homo sapien
ttccttttgcccctcttgccaactc

SEQ ID NO: 1650227 - DNA, 25 bp, Homo sapien
tgatgccgccggcggtttttcttgt

SEQ ID NO: 1650228 - DNA, 25 bp, Homo sapien
agcttcttgtctgaggcgtgatgcc

SEQ ID NO: 1650229 - DNA, 25 bp, Homo sapien
caccacgtccatctggacggtggcc

SEQ ID NO: 1650230 - DNA, 25 bp, Homo sapien
tggcaccacgtccatctggacggtg

SEQ ID NO: 1650231 - DNA, 25 bp, Homo sapien
ccacgtccatctggacggtggcccc

SEQ ID NO: 1650232 - DNA, 25 bp, Homo sapien
ggcaccacgtccatctggacggtgg

SEQ ID NO: 1650233 - DNA, 25 bp, Homo sapien
tcgaattcctcgtggttgcagtcct

SEQ ID NO: 1650234 - DNA, 25 bp, Homo sapien
tcctccgtcagctgaatgatggccg

SEQ ID NO: 1650235 - DNA, 25 bp, Homo sapien
cagccacttcgaacttgcctagagg

SEQ ID NO: 1650236 - DNA, 25 bp, Homo sapien
cagcttggtcaggaattcaatgtcc

SEQ ID NO: 1650237 - DNA, 25 bp, Homo sapien
agcagtatgcccgctggtggacacc

SEQ ID NO: 1650238 - DNA, 25 bp, Homo sapien
tctttgaggcagcagtatgcccgct

SEQ ID NO: 1650239 - DNA, 25 bp, Homo sapien
gcagcagtatgcccgctggtggaca

SEQ ID NO: 1650240 - DNA, 25 bp, Homo sapien
ttgaggcagcagtatgcccgctggt

SEQ ID NO: 1650241 - DNA, 25 bp, Homo sapien
ctcgggaatccacgaaattatccag

SEQ ID NO: 1650242 - DNA, 25 bp, Homo sapien
gaatccacgaaattatccaggatgc

SEQ ID NO: 1650243 - DNA, 25 bp, Homo sapien
aggatgccgcgattccttcccaaag

SEQ ID NO: 1650244 - DNA, 25 bp, Homo sapien
attatccaggatgccgcgattcctt

SEQ ID NO: 1650245 - DNA, 25 bp, Homo sapien
ccctttcttggcgtggcctccgaag

SEQ ID NO: 1650246 - DNA, 25 bp, Homo sapien
cggtctctccggatctgggactgct

SEQ ID NO: 1650247 - DNA, 25 bp, Homo sapien
aactgccaacagagtgtcgtaggcg

SEQ ID NO: 1650248 - DNA, 25 bp, Homo sapien
ctgactcgtggctcccgggtcctgg

SEQ ID NO: 1650249 - DNA, 25 bp, Homo sapien
gaagggcctggaagcctgttcccag

SEQ ID NO: 1650250 - DNA, 25 bp, Homo sapien
gctgaactccaggaacccagcatgg

SEQ ID NO: 1650251 - DNA, 25 bp, Homo sapien
tggtccctgtgagctgaactccagg

SEQ ID NO: 1650252 - DNA, 25 bp, Homo sapien
gggcctggaagcctgttcccaggcc

SEQ ID NO: 1650253 - DNA, 25 bp, Homo sapien
tggaaaccattatctcagggaccct

SEQ ID NO: 1650254 - DNA, 25 bp, Homo sapien
aactgaagtcggaaaagacgccctg

SEQ ID NO: 1650255 - DNA, 25 bp, Homo sapien
tgtagctgcaaacggaaaccactct

SEQ ID NO: 1650256 - DNA, 25 bp, Homo sapien
ggagaacgtcgatgcacacagctgt

SEQ ID NO: 1650257 - DNA, 25 bp, Homo sapien
taccccgctggttacacgagaggaa

SEQ ID NO: 1650258 - DNA, 25 bp, Homo sapien
cagggccagatctctatcaacaggg

SEQ ID NO: 1650259 - DNA, 25 bp, Homo sapien
taactcttgggacctcctggctaga

SEQ ID NO: 1650260 - DNA, 25 bp, Homo sapien
caaagactttgaggtctaggcagac

SEQ ID NO: 1650261 - DNA, 25 bp, Homo sapien
gagaacttggttgacttggtacttc

SEQ ID NO: 1650262 - DNA, 25 bp, Homo sapien
cttggttgacttggtacttcttcct

SEQ ID NO: 1650263 - DNA, 25 bp, Homo sapien
agaacttggttgacttggtacttct

SEQ ID NO: 1650264 - DNA, 25 bp, Homo sapien
acctcctcgggctcctctgccccac

SEQ ID NO: 1650265 - DNA, 25 bp, Homo sapien
cacctcctcgggctcctctgcccca

SEQ ID NO: 1650266 - DNA, 25 bp, Homo sapien
tcatccacttgctggcacgagccca

SEQ ID NO: 1650267 - DNA, 25 bp, Homo sapien
gctggcacgagcccagtcacttctg

SEQ ID NO: 1650268 - DNA, 25 bp, Homo sapien
ctcatccacttgctggcacgagccc

SEQ ID NO: 1650269 - DNA, 25 bp, Homo sapien
cctcatccacttgctggcacgagcc

SEQ ID NO: 1650270 - DNA, 25 bp, Homo sapien
tggcacgccgaggagagccttctgg

SEQ ID NO: 1650271 - DNA, 25 bp, Homo sapien
tcggacccctagaggttgaggctgt

SEQ ID NO: 1650272 - DNA, 25 bp, Homo sapien
tctttggcatcaccggcttcttcct

SEQ ID NO: 1650273 - DNA, 25 bp, Homo sapien
tcaaccaagacgtaggagacagggc

SEQ ID NO: 1650274 - DNA, 25 bp, Homo sapien
tggtgggctttcatggccaccatct

SEQ ID NO: 1650275 - DNA, 25 bp, Homo sapien
tcatgggagcggggttcttggcaga

SEQ ID NO: 1650276 - DNA, 25 bp, Homo sapien
ggttcttggcagacacccaggccac

SEQ ID NO: 1650277 - DNA, 25 bp, Homo sapien
caggccacggccttcttctttggtg

SEQ ID NO: 1650278 - DNA, 25 bp, Homo sapien
agccaactcctccttattcacacag

SEQ ID NO: 1650279 - DNA, 25 bp, Homo sapien
tgggctctcggcttctgcccgggca

SEQ ID NO: 1650280 - DNA, 25 bp, Homo sapien
ccttgatcggctctgagatcgccat

SEQ ID NO: 1650281 - DNA, 25 bp, Homo sapien
tctgctgcccttgatcggctctgag

SEQ ID NO: 1650282 - DNA, 25 bp, Homo sapien
tgtgctgttggaattgatgcctttg

SEQ ID NO: 1650283 - DNA, 25 bp, Homo sapien
gctgtgctgttggaattgatgcctt

SEQ ID NO: 1650284 - DNA, 25 bp, Homo sapien
ctgtgctgttggaattgatgccttt

SEQ ID NO: 1650285 - DNA, 25 bp, Homo sapien
catgctggtcttccgtggcattcca

SEQ ID NO: 1650286 - DNA, 25 bp, Homo sapien
tccagccctgcgaaccaaaggtttg

SEQ ID NO: 1650287 - DNA, 25 bp, Homo sapien
tctcctggagcgagacttagctcca

SEQ ID NO: 1650288 - DNA, 25 bp, Homo sapien
caaaggtttggtaggctcatgctgg

SEQ ID NO: 1650289 - DNA, 25 bp, Homo sapien
ctccctgctgctaaagcccaggctg

SEQ ID NO: 1650290 - DNA, 25 bp, Homo sapien
tgctgctaaagcccaggctgccatc

SEQ ID NO: 1650291 - DNA, 25 bp, Homo sapien
tcctcgaattcagcggcctcctggg

SEQ ID NO: 1650292 - DNA, 25 bp, Homo sapien
caggctgccatctcctcgaattcag

SEQ ID NO: 1650293 - DNA, 25 bp, Homo sapien
aatcttgttgagcacgcggtacggg

SEQ ID NO: 1650294 - DNA, 25 bp, Homo sapien
tgcggatctcggcatccatgcagaa

SEQ ID NO: 1650295 - DNA, 25 bp, Homo sapien
tcctgggtagggtctctacagacca

SEQ ID NO: 1650296 - DNA, 25 bp, Homo sapien
aacaaggacctgtggatgtccactt

SEQ ID NO: 1650297 - DNA, 25 bp, Homo sapien
tagcggctctgaacctactatgtgt

SEQ ID NO: 1650298 - DNA, 25 bp, Homo sapien
aaatagtctatcaggtggacgtggg

SEQ ID NO: 1650299 - DNA, 25 bp, Homo sapien
gctgcagcggtctccaaacagtaat

SEQ ID NO: 1650300 - DNA, 25 bp, Homo sapien
tatgtgtagtaaatagtctatcagg

SEQ ID NO: 1650301 - DNA, 25 bp, Homo sapien
tcgatgccgttagcggcgagaagcc

SEQ ID NO: 1650302 - DNA, 25 bp, Homo sapien
agaagccgaggttggcgtcgcagcg

SEQ ID NO: 1650303 - DNA, 25 bp, Homo sapien
gtttcccagtcgctggctccggcta

SEQ ID NO: 1650304 - DNA, 25 bp, Homo sapien
cccggcgccgctgctagaggcagaa

SEQ ID NO: 1650305 - DNA, 25 bp, Homo sapien
agaaaaaacgccagcagctgtctcc

SEQ ID NO: 1650306 - DNA, 25 bp, Homo sapien
ctgaatttccttctgacagaaaaaa

SEQ ID NO: 1650307 - DNA, 25 bp, Homo sapien
tccttctgacagaaaaaacgccagc

SEQ ID NO: 1650308 - DNA, 25 bp, Homo sapien
gctgcaggccctgaatttccttctg

SEQ ID NO: 1650309 - DNA, 25 bp, Homo sapien
tgtttagggcacgtttctggaggca

SEQ ID NO: 1650310 - DNA, 25 bp, Homo sapien
cctggaagacgtcacgtggtctgaa

SEQ ID NO: 1650311 - DNA, 25 bp, Homo sapien
gggatttgagatggccagagcacat

SEQ ID NO: 1650312 - DNA, 25 bp, Homo sapien
tctatggctgaaaacctgaacgcag

SEQ ID NO: 1650313 - DNA, 25 bp, Homo sapien
ggttgggctgtagatccaatgactg

SEQ ID NO: 1650314 - DNA, 25 bp, Homo sapien
tcatgccgaattgggttgggctgta

SEQ ID NO: 1650315 - DNA, 25 bp, Homo sapien
ccgaattgggttgggctgtagatcc

SEQ ID NO: 1650316 - DNA, 25 bp, Homo sapien
gatgagatcatgccgaattgggttg

SEQ ID NO: 1650317 - DNA, 25 bp, Homo sapien
ctaaatgtcactgattaaactatac

SEQ ID NO: 1650318 - DNA, 25 bp, Homo sapien
ttcattttctaatgaaccaggagac

SEQ ID NO: 1650319 - DNA, 25 bp, Homo sapien
ggtgcggctgaaatgatttgacaca

SEQ ID NO: 1650320 - DNA, 25 bp, Homo sapien
cattttctaatgaaccaggagactt

SEQ ID NO: 1650321 - DNA, 25 bp, Homo sapien
caccgttcagtggtgcggctgaaat

SEQ ID NO: 1650322 - DNA, 25 bp, Homo sapien
cattccgaccgtcagtcattcaaca

SEQ ID NO: 1650323 - DNA, 25 bp, Homo sapien
cacactttttccctacggagctggc

SEQ ID NO: 1650324 - DNA, 25 bp, Homo sapien
attcaacaaataacagccgccgccg

SEQ ID NO: 1650325 - DNA, 25 bp, Homo sapien
cagtccgcgtggttcattccgaccg

SEQ ID NO: 1650326 - DNA, 25 bp, Homo sapien
gcccccatgccgcataggtccccac

SEQ ID NO: 1650327 - DNA, 25 bp, Homo sapien
ccccatgccgcataggtccccacag

SEQ ID NO: 1650328 - DNA, 25 bp, Homo sapien
catgccgcataggtccccacagcca

SEQ ID NO: 1650329 - DNA, 25 bp, Homo sapien
atgccgcataggtccccacagccac

SEQ ID NO: 1650330 - DNA, 25 bp, Homo sapien
tctaagaggacgtctctggcagcca

SEQ ID NO: 1650331 - DNA, 25 bp, Homo sapien
taaaccagtgacaggacagttccca

SEQ ID NO: 1650332 - DNA, 25 bp, Homo sapien
tgggcaaaccacagtcaagaccgtg

SEQ ID NO: 1650333 - DNA, 25 bp, Homo sapien
gaagcctaggactgctacgggagaa

SEQ ID NO: 1650334 - DNA, 25 bp, Homo sapien
gatgggctcctcactgccagggaat

SEQ ID NO: 1650335 - DNA, 25 bp, Homo sapien
tggaaattgggacgaggaagcacac

SEQ ID NO: 1650336 - DNA, 25 bp, Homo sapien
tttaggtaaaaatcgagctcagccg

SEQ ID NO: 1650337 - DNA, 25 bp, Homo sapien
tcatcccctgtaaggagggacacgc

SEQ ID NO: 1650338 - DNA, 25 bp, Homo sapien
cgcagcctgggcggcttcttggggg

SEQ ID NO: 1650339 - DNA, 25 bp, Homo sapien
cagcctgggcggcttcttggggggc

SEQ ID NO: 1650340 - DNA, 25 bp, Homo sapien
gcctgggcggcttcttggggggcca

SEQ ID NO: 1650341 - DNA, 25 bp, Homo sapien
tcgcagcctgggcggcttcttgggg

SEQ ID NO: 1650342 - DNA, 25 bp, Homo sapien
cgacgggccttcttcccgcgcgcgg

SEQ ID NO: 1650343 - DNA, 25 bp, Homo sapien
ccgcgcgcggccttggatccagtgg

SEQ ID NO: 1650344 - DNA, 25 bp, Homo sapien
ctagcggcatttagggggcagcctc

SEQ ID NO: 1650345 - DNA, 25 bp, Homo sapien
ggccttggatccagtgggcgcctgg

SEQ ID NO: 1650346 - DNA, 25 bp, Homo sapien
cggctcccggctttcttctcgggag

SEQ ID NO: 1650347 - DNA, 25 bp, Homo sapien
tcccggctttcttctcgggagtgac

SEQ ID NO: 1650348 - DNA, 25 bp, Homo sapien
ctcccggctttcttctcgggagtga

SEQ ID NO: 1650349 - DNA, 25 bp, Homo sapien
gctcccggctttcttctcgggagtg

SEQ ID NO: 1650350 - DNA, 25 bp, Homo sapien
ctcgttggaccccatgttctcccgg

SEQ ID NO: 1650351 - DNA, 25 bp, Homo sapien
tcctcctcggactgttcgtccgaag

SEQ ID NO: 1650352 - DNA, 25 bp, Homo sapien
ggctccgacgcctcgctctcggtgt

SEQ ID NO: 1650353 - DNA, 25 bp, Homo sapien
tcggactgttcgtccgaagcctcct

SEQ ID NO: 1650354 - DNA, 25 bp, Homo sapien
tccgacgggtcggtataggccacaa

SEQ ID NO: 1650355 - DNA, 25 bp, Homo sapien
cagcccagcgactcgataacagaag

SEQ ID NO: 1650356 - DNA, 25 bp, Homo sapien
gacatgacggacaagacctgtcgga

SEQ ID NO: 1650357 - DNA, 25 bp, Homo sapien
gccaaggtggaaatgcactcccgga

SEQ ID NO: 1650358 - DNA, 25 bp, Homo sapien
ctctccgaagtgtcgctgtccaccg

SEQ ID NO: 1650359 - DNA, 25 bp, Homo sapien
ccggctcctcgtccggggtgtctct

SEQ ID NO: 1650360 - DNA, 25 bp, Homo sapien
ggctcctcgtccggggtgtctctca

SEQ ID NO: 1650361 - DNA, 25 bp, Homo sapien
tccgaagtgtcgctgtccaccggct

SEQ ID NO: 1650362 - DNA, 25 bp, Homo sapien
gtcttctttggtgttcaagcggatg

SEQ ID NO: 1650363 - DNA, 25 bp, Homo sapien
aagcggatggattcggccccagctg

SEQ ID NO: 1650364 - DNA, 25 bp, Homo sapien
tttcttcgatttgtcggtgacggtg

SEQ ID NO: 1650365 - DNA, 25 bp, Homo sapien
cagcagggccactaagtcggggaca

SEQ ID NO: 1650366 - DNA, 25 bp, Homo sapien
gcgtacagcgcgctctggtcctctt

SEQ ID NO: 1650367 - DNA, 25 bp, Homo sapien
cctcggagttgcagggcgcccactg

SEQ ID NO: 1650368 - DNA, 25 bp, Homo sapien
atctcctcgatcacgatgcccaggc

SEQ ID NO: 1650369 - DNA, 25 bp, Homo sapien
aggtcgccctggtcgatctcctcga

SEQ ID NO: 1650370 - DNA, 25 bp, Homo sapien
gctgccccaagaagcgagccagcct

SEQ ID NO: 1650371 - DNA, 25 bp, Homo sapien
cccaagaagcgagccagcctgccct

SEQ ID NO: 1650372 - DNA, 25 bp, Homo sapien
tggttctgtttctgcgaccccgacg

SEQ ID NO: 1650373 - DNA, 25 bp, Homo sapien
actcctcgcgggagcagacggccgt

SEQ ID NO: 1650374 - DNA, 25 bp, Homo sapien
ctccctgggaatggcagcgtgattg

SEQ ID NO: 1650375 - DNA, 25 bp, Homo sapien
aggaccctcgtgtcctgcgcacggt

SEQ ID NO: 1650376 - DNA, 25 bp, Homo sapien
tgcaggacggcttcgacgtctgcct

SEQ ID NO: 1650377 - DNA, 25 bp, Homo sapien
catgtgtcgcaacctgaacgtgccc

SEQ ID NO: 1650378 - DNA, 25 bp, Homo sapien
ggcttacgtgtctgctttccaggac

SEQ ID NO: 1650379 - DNA, 25 bp, Homo sapien
cacttgcagggcttagagtcccggt

SEQ ID NO: 1650380 - DNA, 25 bp, Homo sapien
cgcacggtgtcaatgcaaccctaga

SEQ ID NO: 1650381 - DNA, 25 bp, Homo sapien
tcccggttccggtgaatgtggcaag

SEQ ID NO: 1650382 - DNA, 25 bp, Homo sapien
cagtaagatgtgacatgcaccaagg

SEQ ID NO: 1650383 - DNA, 25 bp, Homo sapien
gatgtgacatgcaccaaggaggaga

SEQ ID NO: 1650384 - DNA, 25 bp, Homo sapien
gaggtgctgtaggacgagtaatggc

SEQ ID NO: 1650385 - DNA, 25 bp, Homo sapien
catgcaccaaggaggagacacatga

SEQ ID NO: 1650386 - DNA, 25 bp, Homo sapien
tacagtgtgcagtaagtactaaggc

SEQ ID NO: 1650387 - DNA, 25 bp, Homo sapien
ggagcttggcccattggagagtcaa

SEQ ID NO: 1650388 - DNA, 25 bp, Homo sapien
cattcagggccctactgctctgata

SEQ ID NO: 1650389 - DNA, 25 bp, Homo sapien
ttttgcaatcaggactgggttcagc

SEQ ID NO: 1650390 - DNA, 25 bp, Homo sapien
gttttaaacaatggcggctggcttc

SEQ ID NO: 1650391 - DNA, 25 bp, Homo sapien
taaacaatggcggctggcttctaac

SEQ ID NO: 1650392 - DNA, 25 bp, Homo sapien
aaacaatggcggctggcttctaaca

SEQ ID NO: 1650393 - DNA, 25 bp, Homo sapien
gaagttttaaacaatggcggctggc

SEQ ID NO: 1650394 - DNA, 25 bp, Homo sapien
cgttctgagccggcgctttagccag

SEQ ID NO: 1650395 - DNA, 25 bp, Homo sapien
cgggccagggcgttctgagccggcg

SEQ ID NO: 1650396 - DNA, 25 bp, Homo sapien
cagggcgttctgagccggcgcttta

SEQ ID NO: 1650397 - DNA, 25 bp, Homo sapien
ttctgagccggcgctttagccagcg

SEQ ID NO: 1650398 - DNA, 25 bp, Homo sapien
gcccgacttccaccagggggccaga

SEQ ID NO: 1650399 - DNA, 25 bp, Homo sapien
cgggagggtgcctgcccgacttcca

SEQ ID NO: 1650400 - DNA, 25 bp, Homo sapien
tgcccgacttccaccagggggccag

SEQ ID NO: 1650401 - DNA, 25 bp, Homo sapien
tattctacgcgctgaggactgctgt

SEQ ID NO: 1650402 - DNA, 25 bp, Homo sapien
gactgtagtcaaacctactcaagag

SEQ ID NO: 1650403 - DNA, 25 bp, Homo sapien
gccttctggagaattcctaggaacc

SEQ ID NO: 1650404 - DNA, 25 bp, Homo sapien
cccggacaaaggtagttgggcacag

SEQ ID NO: 1650405 - DNA, 25 bp, Homo sapien
tcatgtgtagtgagagggttggtgc

SEQ ID NO: 1650406 - DNA, 25 bp, Homo sapien
tcttggatttctctaacggtgctat

SEQ ID NO: 1650407 - DNA, 25 bp, Homo sapien
gcttcttggatttctctaacggtgc

SEQ ID NO: 1650408 - DNA, 25 bp, Homo sapien
tgtgtagtgagagggttggtgcttc

SEQ ID NO: 1650409 - DNA, 25 bp, Homo sapien
ttactgccaatccataatgaccacg

SEQ ID NO: 1650410 - DNA, 25 bp, Homo sapien
tctgaatattgggagggattactgc

SEQ ID NO: 1650411 - DNA, 25 bp, Homo sapien
taatgaccacgactcctgtttggtg

SEQ ID NO: 1650412 - DNA, 25 bp, Homo sapien
cagtgcccgcgcctggcagtgctgt

SEQ ID NO: 1650413 - DNA, 25 bp, Homo sapien
gagccccttcatgaaggtgattgtc

SEQ ID NO: 1650414 - DNA, 25 bp, Homo sapien
aggtgattgtcactttgtcgtcctc

SEQ ID NO: 1650415 - DNA, 25 bp, Homo sapien
tgaaggtgattgtcactttgtcgtc

SEQ ID NO: 1650416 - DNA, 25 bp, Homo sapien
gcatgagccccttcatgaaggtgat

SEQ ID NO: 1650417 - DNA, 25 bp, Homo sapien
tggcatgtgaacaggggagacacga

SEQ ID NO: 1650418 - DNA, 25 bp, Homo sapien
gagacacgagagtcagcgaccacgg

SEQ ID NO: 1650419 - DNA, 25 bp, Homo sapien
ctggcatgtgaacaggggagacacg

SEQ ID NO: 1650420 - DNA, 25 bp, Homo sapien
acacgagagtcagcgaccacggcca

SEQ ID NO: 1650421 - DNA, 25 bp, Homo sapien
ttgggaatcatgagacggagctttg

SEQ ID NO: 1650422 - DNA, 25 bp, Homo sapien
gaatcatgagacggagctttgggct

SEQ ID NO: 1650423 - DNA, 25 bp, Homo sapien
atcatgagacggagctttgggctgc

SEQ ID NO: 1650424 - DNA, 25 bp, Homo sapien
gggaatcatgagacggagctttggg

SEQ ID NO: 1650425 - DNA, 25 bp, Homo sapien
agtccaccacggagcgcttgtgctc

SEQ ID NO: 1650426 - DNA, 25 bp, Homo sapien
tcgatgtccagcgagtccaccacgg

SEQ ID NO: 1650427 - DNA, 25 bp, Homo sapien
gttgcactcctggtatttcattttg

SEQ ID NO: 1650428 - DNA, 25 bp, Homo sapien
tcctggtatttcattttggcatcct

SEQ ID NO: 1650429 - DNA, 25 bp, Homo sapien
tctggaactttgccaccaggttctt

SEQ ID NO: 1650430 - DNA, 25 bp, Homo sapien
acctctggaactttgccaccaggtt

SEQ ID NO: 1650431 - DNA, 25 bp, Homo sapien
gctaggctccgctaacctctggaac

SEQ ID NO: 1650432 - DNA, 25 bp, Homo sapien
ctaggctccgctaacctctggaact

SEQ ID NO: 1650433 - DNA, 25 bp, Homo sapien
cagagggcgctctgacccagcaaat

SEQ ID NO: 1650434 - DNA, 25 bp, Homo sapien
gcaaattcctcatacagcaacagcc

SEQ ID NO: 1650435 - DNA, 25 bp, Homo sapien
ccagcaaattcctcatacagcaaca

SEQ ID NO: 1650436 - DNA, 25 bp, Homo sapien
agggcgctctgacccagcaaattcc

SEQ ID NO: 1650437 - DNA, 25 bp, Homo sapien
gcttcagtcatcatcgtgtccccag

SEQ ID NO: 1650438 - DNA, 25 bp, Homo sapien
ttcagtcatcatcgtgtccccagag

SEQ ID NO: 1650439 - DNA, 25 bp, Homo sapien
tcagtcatcatcgtgtccccagagc

SEQ ID NO: 1650440 - DNA, 25 bp, Homo sapien
caggaggcagggcttcagtcatcat

SEQ ID NO: 1650441 - DNA, 25 bp, Homo sapien
gagacggtatcaccatccctggagc

SEQ ID NO: 1650442 - DNA, 25 bp, Homo sapien
tctgtacttgggacctaaacagtcc

SEQ ID NO: 1650443 - DNA, 25 bp, Homo sapien
tctgggtctcttgtcaacagggaac

SEQ ID NO: 1650444 - DNA, 25 bp, Homo sapien
tgtgtatcccactcctcaaagcatt

SEQ ID NO: 1650445 - DNA, 25 bp, Homo sapien
tgagcaccccgcctacttcccactg

SEQ ID NO: 1650446 - DNA, 25 bp, Homo sapien
gcaccccgcctacttcccactgcac

SEQ ID NO: 1650447 - DNA, 25 bp, Homo sapien
ctgagcaccccgcctacttcccact

SEQ ID NO: 1650448 - DNA, 25 bp, Homo sapien
ctacttcccactgcacagcaggctc

SEQ ID NO: 1650449 - DNA, 25 bp, Homo sapien
ttttgctccccagcatcagtttaac

SEQ ID NO: 1650450 - DNA, 25 bp, Homo sapien
ttgctccccagcatcagtttaacca

SEQ ID NO: 1650451 - DNA, 25 bp, Homo sapien
tttgctccccagcatcagtttaacc

SEQ ID NO: 1650452 - DNA, 25 bp, Homo sapien
ggtgatcaagtgttggggcctccca

SEQ ID NO: 1650453 - DNA, 25 bp, Homo sapien
cctcaggtgatcaagtgttggggcc

SEQ ID NO: 1650454 - DNA, 25 bp, Homo sapien
gtgatcaagtgttggggcctcccaa

SEQ ID NO: 1650455 - DNA, 25 bp, Homo sapien
caggtgatcaagtgttggggcctcc

SEQ ID NO: 1650456 - DNA, 25 bp, Homo sapien
caatgctttgaaataatcattgctg

SEQ ID NO: 1650457 - DNA, 25 bp, Homo sapien
aaataatcattgctgctttttacat

SEQ ID NO: 1650458 - DNA, 25 bp, Homo sapien
aatgctttgaaataatcattgctgc

SEQ ID NO: 1650459 - DNA, 25 bp, Homo sapien
ttgaaataatcattgctgcttttta

SEQ ID NO: 1650460 - DNA, 25 bp, Homo sapien
ggccgtcggactctccagaatatca

SEQ ID NO: 1650461 - DNA, 25 bp, Homo sapien
aaactgtagcatcatggccgtcgga

SEQ ID NO: 1650462 - DNA, 25 bp, Homo sapien
catcaccattttcgaggtgcgagac

SEQ ID NO: 1650463 - DNA, 25 bp, Homo sapien
gagtccatcatggagtcgaccggca

SEQ ID NO: 1650464 - DNA, 25 bp, Homo sapien
tttacgatgtcacaatttccagcag

SEQ ID NO: 1650465 - DNA, 25 bp, Homo sapien
taggttcctcaaggctagagtcaag

SEQ ID NO: 1650466 - DNA, 25 bp, Homo sapien
ttccatagagcaagcaaggcaaggt

SEQ ID NO: 1650467 - DNA, 25 bp, Homo sapien
aaaatctgcctccagactcactcat

SEQ ID NO: 1650468 - DNA, 25 bp, Homo sapien
aggtgaggacgcaatgatgacaaac

SEQ ID NO: 1650469 - DNA, 25 bp, Homo sapien
gtgaggacgcaatgatgacaaactc

SEQ ID NO: 1650470 - DNA, 25 bp, Homo sapien
ctatggtaccaaaaccagccagcag

SEQ ID NO: 1650471 - DNA, 25 bp, Homo sapien
cagccagcaggttagaggtgaggac

SEQ ID NO: 1650472 - DNA, 25 bp, Homo sapien
aatcagcccaagatttactggttga

SEQ ID NO: 1650473 - DNA, 25 bp, Homo sapien
cctgacgtagtaagttatctatcgc

SEQ ID NO: 1650474 - DNA, 25 bp, Homo sapien
gtaagttatctatcgctgtgtaaca

SEQ ID NO: 1650475 - DNA, 25 bp, Homo sapien
ctgtgtaacaaatcagcccaagatt

SEQ ID NO: 1650476 - DNA, 25 bp, Homo sapien
cccacacccactttctaactagatt

SEQ ID NO: 1650477 - DNA, 25 bp, Homo sapien
ttggattgaaccatcgtccgtcggt

SEQ ID NO: 1650478 - DNA, 25 bp, Homo sapien
tctattaaagatcagagcgtctccc

SEQ ID NO: 1650479 - DNA, 25 bp, Homo sapien
gactgtcagctcctatcctaaacgg

SEQ ID NO: 1650480 - DNA, 25 bp, Homo sapien
tagtcagaatctatgggaaggaccc

SEQ ID NO: 1650481 - DNA, 25 bp, Homo sapien
atagtgacgcggctcacagagggac

SEQ ID NO: 1650482 - DNA, 25 bp, Homo sapien
aatgggcgccaagctctcatttccg

SEQ ID NO: 1650483 - DNA, 25 bp, Homo sapien
cccctccgccgaagaaagtgaagtg

SEQ ID NO: 1650484 - DNA, 25 bp, Homo sapien
cccagtttgacgcattgcagggaag

SEQ ID NO: 1650485 - DNA, 25 bp, Homo sapien
gctatagccttaatgcctgcctaga

SEQ ID NO: 1650486 - DNA, 25 bp, Homo sapien
tctcagcaagctagaagaaatccct

SEQ ID NO: 1650487 - DNA, 25 bp, Homo sapien
tgcctagaacgtagtaggtcctccg

SEQ ID NO: 1650488 - DNA, 25 bp, Homo sapien
ggttttgttggtccctgctatagcc

SEQ ID NO: 1650489 - DNA, 25 bp, Homo sapien
gacttcccggagttcctgaccatga

SEQ ID NO: 1650490 - DNA, 25 bp, Homo sapien
caaggatggagatggcactatcacc

SEQ ID NO: 1650491 - DNA, 25 bp, Homo sapien
tccagggaacgggaccattgacttc

SEQ ID NO: 1650492 - DNA, 25 bp, Homo sapien
aaggcatccagcatccagaggtaag

SEQ ID NO: 1650493 - DNA, 25 bp, Homo sapien
aacaaaagatttgtcccaagctgca

SEQ ID NO: 1650494 - DNA, 25 bp, Homo sapien
caccaattgattgactgagaatctg

SEQ ID NO: 1650495 - DNA, 25 bp, Homo sapien
ttctagcaaacaccaattgattgac

SEQ ID NO: 1650496 - DNA, 25 bp, Homo sapien
caagctgcatgattgctctttctcc

SEQ ID NO: 1650497 - DNA, 25 bp, Homo sapien
gaagagcatgccctttgccgttgca

SEQ ID NO: 1650498 - DNA, 25 bp, Homo sapien
tgattccacgtgcagatcccagcag

SEQ ID NO: 1650499 - DNA, 25 bp, Homo sapien
cgttgcatgcaaccagccctgtgat

SEQ ID NO: 1650500 - DNA, 25 bp, Homo sapien
caagtaagtcaatgtgggcagttca

SEQ ID NO: 1650501 - DNA, 25 bp, Homo sapien
tgagggtaagggcaggtaggcgtga

SEQ ID NO: 1650502 - DNA, 25 bp, Homo sapien
tttaaaccgggcaatattgtgttca

SEQ ID NO: 1650503 - DNA, 25 bp, Homo sapien
tgaggctgtggacattttcggaatg

SEQ ID NO: 1650504 - DNA, 25 bp, Homo sapien
aatattgtgttcagttcaagctgtg

SEQ ID NO: 1650505 - DNA, 25 bp, Homo sapien
caaagctggctctgaagctgtgtcc

SEQ ID NO: 1650506 - DNA, 25 bp, Homo sapien
agctgtgtccagtcagtgcagccca

SEQ ID NO: 1650507 - DNA, 25 bp, Homo sapien
aaccccagcactgactcctttggcc

SEQ ID NO: 1650508 - DNA, 25 bp, Homo sapien
ggcccagaggtggaagagcctctcc

SEQ ID NO: 1650509 - DNA, 25 bp, Homo sapien
gcagagatcacagggtcagcttgaa

SEQ ID NO: 1650510 - DNA, 25 bp, Homo sapien
taagtggacgcagattggagccagc

SEQ ID NO: 1650511 - DNA, 25 bp, Homo sapien
tcaagctaggtggaatgtctcaggc

SEQ ID NO: 1650512 - DNA, 25 bp, Homo sapien
gacctgactgtacagaagcctctgg

SEQ ID NO: 1650513 - DNA, 25 bp, Homo sapien
ttgcggaaaaggatgaagacccagg

SEQ ID NO: 1650514 - DNA, 25 bp, Homo sapien
tggcttctgctttggacgacgttcc

SEQ ID NO: 1650515 - DNA, 25 bp, Homo sapien
cagacccagagcttgagtcgctgga

SEQ ID NO: 1650516 - DNA, 25 bp, Homo sapien
tgagtcgctggaagacagccttgcg

SEQ ID NO: 1650517 - DNA, 25 bp, Homo sapien
gataaagactaagtaacaaatgtat

SEQ ID NO: 1650518 - DNA, 25 bp, Homo sapien
ggcgtcaaggagcacccaggagtcc

SEQ ID NO: 1650519 - DNA, 25 bp, Homo sapien
aggggaaggagataagataaagact

SEQ ID NO: 1650520 - DNA, 25 bp, Homo sapien
tcccacttgcttaccagggatgagg

SEQ ID NO: 1650521 - DNA, 25 bp, Homo sapien
tgccactacgtccggctacttttta

SEQ ID NO: 1650522 - DNA, 25 bp, Homo sapien
ccaccgcatccggtcctgcctcggc

SEQ ID NO: 1650523 - DNA, 25 bp, Homo sapien
caccgcatccggtcctgcctcggcc

SEQ ID NO: 1650524 - DNA, 25 bp, Homo sapien
acatgggcacaacccacagagctgc

SEQ ID NO: 1650525 - DNA, 25 bp, Homo sapien
caccatgcccacgatgtctcacctc

SEQ ID NO: 1650526 - DNA, 25 bp, Homo sapien
ctgtgacatgggcacaacccacaga

SEQ ID NO: 1650527 - DNA, 25 bp, Homo sapien
ccatgcccacgatgtctcacctctt

SEQ ID NO: 1650528 - DNA, 25 bp, Homo sapien
ccagcagggagctgttgcgcgcata

SEQ ID NO: 1650529 - DNA, 25 bp, Homo sapien
tgaccactgtcatgagggccagcag

SEQ ID NO: 1650530 - DNA, 25 bp, Homo sapien
taggtgaggttcctgcacgaatccg

SEQ ID NO: 1650531 - DNA, 25 bp, Homo sapien
gctccacggccatggcaaagaggat

SEQ ID NO: 1650532 - DNA, 25 bp, Homo sapien
tgtgtgtgcgggtatgcagtcctct

SEQ ID NO: 1650533 - DNA, 25 bp, Homo sapien
gtgcgggtatgcagtcctctcccct

SEQ ID NO: 1650534 - DNA, 25 bp, Homo sapien
tgtgtgcgggtatgcagtcctctcc

SEQ ID NO: 1650535 - DNA, 25 bp, Homo sapien
tcctgtgtgtgcgggtatgcagtcc

SEQ ID NO: 1650536 - DNA, 25 bp, Homo sapien
ctcctgctctgtgttgctgcatccc

SEQ ID NO: 1650537 - DNA, 25 bp, Homo sapien
cctgctctgtgttgctgcatcccca

SEQ ID NO: 1650538 - DNA, 25 bp, Homo sapien
tcctgctctgtgttgctgcatcccc

SEQ ID NO: 1650539 - DNA, 25 bp, Homo sapien
gctttgctcctcgtgtctctcgctg

SEQ ID NO: 1650540 - DNA, 25 bp, Homo sapien
tgtcccgtgcgtctgtgccttcact

SEQ ID NO: 1650541 - DNA, 25 bp, Homo sapien
tcccgtgcgtctgtgccttcacttg

SEQ ID NO: 1650542 - DNA, 25 bp, Homo sapien
tctctcgctgcctgtgtcggtctgt

SEQ ID NO: 1650543 - DNA, 25 bp, Homo sapien
ccttgaccttcaggaatcatatttt

SEQ ID NO: 1650544 - DNA, 25 bp, Homo sapien
catgatggaaaggtagcactgggcc

SEQ ID NO: 1650545 - DNA, 25 bp, Homo sapien
gacttctcgcacagcacccctaggc

SEQ ID NO: 1650546 - DNA, 25 bp, Homo sapien
ggcttgggagacttccatggcccat

SEQ ID NO: 1650547 - DNA, 25 bp, Homo sapien
gcagaacacaaaagaggcgcttgtc

SEQ ID NO: 1650548 - DNA, 25 bp, Homo sapien
tactggcgtcaccagcgggtcatct

SEQ ID NO: 1650549 - DNA, 25 bp, Homo sapien
tcatctttggcatgcgtctcgcaga

SEQ ID NO: 1650550 - DNA, 25 bp, Homo sapien
aggagttccgctgctgcctgcgaca

SEQ ID NO: 1650551 - DNA, 25 bp, Homo sapien
tgttccaccgtcttgcgggcctcgg

SEQ ID NO: 1650552 - DNA, 25 bp, Homo sapien
agctgttccaccgtcttgcgggcct

SEQ ID NO: 1650553 - DNA, 25 bp, Homo sapien
ttgcgggcctcggcaatcttggcca

SEQ ID NO: 1650554 - DNA, 25 bp, Homo sapien
cttcatgcggtcgatgttcacctcc

SEQ ID NO: 1650555 - DNA, 25 bp, Homo sapien
gtctcctggtgtcacacgcatctga

SEQ ID NO: 1650556 - DNA, 25 bp, Homo sapien
tcgcctgtccagtgacaaccatgga

SEQ ID NO: 1650557 - DNA, 25 bp, Homo sapien
tcacggtggcatgcaattacccaat

SEQ ID NO: 1650558 - DNA, 25 bp, Homo sapien
tttcatagtaacacccagtcgcctg

SEQ ID NO: 1650559 - DNA, 25 bp, Homo sapien
tgtcacacatagtcacgcagttttg

SEQ ID NO: 1650560 - DNA, 25 bp, Homo sapien
ttttcacaagccatacacagagtgg

SEQ ID NO: 1650561 - DNA, 25 bp, Homo sapien
gggaccacagaggtacataaccgca

SEQ ID NO: 1650562 - DNA, 25 bp, Homo sapien
tacggtctctcaatgtcccatacag

SEQ ID NO: 1650563 - DNA, 25 bp, Homo sapien
tggcgtcgtacaccatctcacagca

SEQ ID NO: 1650564 - DNA, 25 bp, Homo sapien
cacactcacagatctcctggagtca

SEQ ID NO: 1650565 - DNA, 25 bp, Homo sapien
tcacagcagtacacactcacagatc

SEQ ID NO: 1650566 - DNA, 25 bp, Homo sapien
ggcagtcgacactcacacagtttcc

SEQ ID NO: 1650567 - DNA, 25 bp, Homo sapien
tgattatgatgaccgtcagagaggg

SEQ ID NO: 1650568 - DNA, 25 bp, Homo sapien
acacataaacatgggaggatgcaca

SEQ ID NO: 1650569 - DNA, 25 bp, Homo sapien
gatgcacatcgaactgctgattatg

SEQ ID NO: 1650570 - DNA, 25 bp, Homo sapien
tagttcaggaatgacctaccacacc

SEQ ID NO: 1650571 - DNA, 25 bp, Homo sapien
ctagattggaacagctgagggtcat

SEQ ID NO: 1650572 - DNA, 25 bp, Homo sapien
gggatatcttaagggtccagggaca

SEQ ID NO: 1650573 - DNA, 25 bp, Homo sapien
tgtccagggatcgaagtgaaagagt

SEQ ID NO: 1650574 - DNA, 25 bp, Homo sapien
tttggaagcagagaaaacgatggtc

SEQ ID NO: 1650575 - DNA, 25 bp, Homo sapien
tgagagaacccgaacggaaacgcag

SEQ ID NO: 1650576 - DNA, 25 bp, Homo sapien
tctttttcttgagcgcgtgggaagc

SEQ ID NO: 1650577 - DNA, 25 bp, Homo sapien
tgtagtcatgaccttgagagaaccc

SEQ ID NO: 1650578 - DNA, 25 bp, Homo sapien
gtgggaagctttgattttcacgaag

SEQ ID NO: 1650579 - DNA, 25 bp, Homo sapien
accgctgccgtctgagtcgctggag

SEQ ID NO: 1650580 - DNA, 25 bp, Homo sapien
ccaccgctgccgtctgagtcgctgg

SEQ ID NO: 1650581 - DNA, 25 bp, Homo sapien
ggccaccgctgccgtctgagtcgct

SEQ ID NO: 1650582 - DNA, 25 bp, Homo sapien
gaggccaccgctgccgtctgagtcg

SEQ ID NO: 1650583 - DNA, 25 bp, Homo sapien
cagccgtaaagcagacgacgctggg

SEQ ID NO: 1650584 - DNA, 25 bp, Homo sapien
cagcgtcgatctccgcagtggagcg

SEQ ID NO: 1650585 - DNA, 25 bp, Homo sapien
aggcgcccagccgagcactcggagt

SEQ ID NO: 1650586 - DNA, 25 bp, Homo sapien
cggcgtggccgtggaggccgaggct

SEQ ID NO: 1650587 - DNA, 25 bp, Homo sapien
agcgcgaggccttgcgggccctggg

SEQ ID NO: 1650588 - DNA, 25 bp, Homo sapien
gcggccgcgggtcagtggcggcggt

SEQ ID NO: 1650589 - DNA, 25 bp, Homo sapien
aagcctcggccatgcgtccacggcg

SEQ ID NO: 1650590 - DNA, 25 bp, Homo sapien
tgcgcgcccgggatgtactgcgcct

SEQ ID NO: 1650591 - DNA, 25 bp, Homo sapien
ccccgacgcgctccaacgagggctc

SEQ ID NO: 1650592 - DNA, 25 bp, Homo sapien
ggcgcggctcaaggcggcagggctg

SEQ ID NO: 1650593 - DNA, 25 bp, Homo sapien
acgacgacgcccaggcgcggctcaa

SEQ ID NO: 1650594 - DNA, 25 bp, Homo sapien
acgcgctccaacgagggctcccgcg

SEQ ID NO: 1650595 - DNA, 25 bp, Homo sapien
cggccgctggcgcacgctgttctgg

SEQ ID NO: 1650596 - DNA, 25 bp, Homo sapien
cccgcgtcgggcgagtcggtgggag

SEQ ID NO: 1650597 - DNA, 25 bp, Homo sapien
gcctgcgcaggagcgccgagatgta

SEQ ID NO: 1650598 - DNA, 25 bp, Homo sapien
gacggagacgcgtcgggcggccgct

SEQ ID NO: 1650599 - DNA, 25 bp, Homo sapien
gccgctccgccgaggagcaggcctc

SEQ ID NO: 1650600 - DNA, 25 bp, Homo sapien
gctgggcgtcagaaagggcccggcg

SEQ ID NO: 1650601 - DNA, 25 bp, Homo sapien
aggagcaggcctccgggccggcgga

SEQ ID NO: 1650602 - DNA, 25 bp, Homo sapien
gccacggcgtgcagggggctgggcg

SEQ ID NO: 1650603 - DNA, 25 bp, Homo sapien
tcgggtagggcgctgagaaggaccg

SEQ ID NO: 1650604 - DNA, 25 bp, Homo sapien
cgctgagaaggaccgcggcaccgct

SEQ ID NO: 1650605 - DNA, 25 bp, Homo sapien
ccaccacctccggagcgctgggact

SEQ ID NO: 1650606 - DNA, 25 bp, Homo sapien
ccctgccgtcgggtagggcgctgag

SEQ ID NO: 1650607 - DNA, 25 bp, Homo sapien
tcctgggatactgctaggtagcaca

SEQ ID NO: 1650608 - DNA, 25 bp, Homo sapien
caagtccaatgccttagagcagagg

SEQ ID NO: 1650609 - DNA, 25 bp, Homo sapien
tgtttaccagtgactgccatgcacc

SEQ ID NO: 1650610 - DNA, 25 bp, Homo sapien
gcacatggcattatttcgtacccta

SEQ ID NO: 1650611 - DNA, 25 bp, Homo sapien
ctactgtcctttccctggccccagg

SEQ ID NO: 1650612 - DNA, 25 bp, Homo sapien
ctggacctcctgtagagctgggatc

SEQ ID NO: 1650613 - DNA, 25 bp, Homo sapien
ggcgaccataggagctggatccaga

SEQ ID NO: 1650614 - DNA, 25 bp, Homo sapien
gtagagctgggatcttcatagaagc

SEQ ID NO: 1650615 - DNA, 25 bp, Homo sapien
atgccccggggctcagagggaccca

SEQ ID NO: 1650616 - DNA, 25 bp, Homo sapien
agctacgcccgctctcctgttccag

SEQ ID NO: 1650617 - DNA, 25 bp, Homo sapien
ccgagctacgcccgctctcctgttc

SEQ ID NO: 1650618 - DNA, 25 bp, Homo sapien
gtcccaggtcccagacgagaccagg

SEQ ID NO: 1650619 - DNA, 25 bp, Homo sapien
tcccaggtcccagacgagaccaggc

SEQ ID NO: 1650620 - DNA, 25 bp, Homo sapien
cactagagaagtttatatttagcgc

SEQ ID NO: 1650621 - DNA, 25 bp, Homo sapien
gatgctgggacaagctttgcctaga

SEQ ID NO: 1650622 - DNA, 25 bp, Homo sapien
tccactatcagctcgtgccgggagg

SEQ ID NO: 1650623 - DNA, 25 bp, Homo sapien
agtttatatttagcgcttctctgct

SEQ ID NO: 1650624 - DNA, 25 bp, Homo sapien
tgctgcacgcggtactcctgcctct

SEQ ID NO: 1650625 - DNA, 25 bp, Homo sapien
ctcccggagccaatgtaactcgcag

SEQ ID NO: 1650626 - DNA, 25 bp, Homo sapien
ctgcctctcccggagccaatgtaac

SEQ ID NO: 1650627 - DNA, 25 bp, Homo sapien
gcgccccccattccgggctgggcca

SEQ ID NO: 1650628 - DNA, 25 bp, Homo sapien
ccatgctcggatcgttcaccttcag

SEQ ID NO: 1650629 - DNA, 25 bp, Homo sapien
taagtcagagcgttctgaaagtctg

SEQ ID NO: 1650630 - DNA, 25 bp, Homo sapien
caggtccatgctcggatcgttcacc

SEQ ID NO: 1650631 - DNA, 25 bp, Homo sapien
tcagataggtctttgcagcacgtaa

SEQ ID NO: 1650632 - DNA, 25 bp, Homo sapien
agtcacattccttccatctctcccc

SEQ ID NO: 1650633 - DNA, 25 bp, Homo sapien
tccatctctccccagtttccaactc

SEQ ID NO: 1650634 - DNA, 25 bp, Homo sapien
tccagtcacattccttccatctctc

SEQ ID NO: 1650635 - DNA, 25 bp, Homo sapien
cctccagtcacattccttccatctc

SEQ ID NO: 1650636 - DNA, 25 bp, Homo sapien
gtaatgattcgagagtgccgtgtgc

SEQ ID NO: 1650637 - DNA, 25 bp, Homo sapien
ccgtgtgctgagatcaaggccatgg

SEQ ID NO: 1650638 - DNA, 25 bp, Homo sapien
catgttggtacaacagagtaatgat

SEQ ID NO: 1650639 - DNA, 25 bp, Homo sapien
caacagagtaatgattcgagagtgc

SEQ ID NO: 1650640 - DNA, 25 bp, Homo sapien
gcagcagctggacgagggcacagga

SEQ ID NO: 1650641 - DNA, 25 bp, Homo sapien
tcattgctgggatcctgtgaagaac

SEQ ID NO: 1650642 - DNA, 25 bp, Homo sapien
ccccacgtgtcccatccagtttggg

SEQ ID NO: 1650643 - DNA, 25 bp, Homo sapien
agatgagtccgttttaattgctggg

SEQ ID NO: 1650644 - DNA, 25 bp, Homo sapien
agagaacactgatgcgctccgccag

SEQ ID NO: 1650645 - DNA, 25 bp, Homo sapien
agatccctgtccgtgggcagcccag

SEQ ID NO: 1650646 - DNA, 25 bp, Homo sapien
tcatgcgtgatgtatcgctctccca

SEQ ID NO: 1650647 - DNA, 25 bp, Homo sapien
cgcacgtcgtcactctcatgcgtga

SEQ ID NO: 1650648 - DNA, 25 bp, Homo sapien
gtccacgctgtagcgtttgcgcatc

SEQ ID NO: 1650649 - DNA, 25 bp, Homo sapien
ctgagagatttgtccacgctgtagc

SEQ ID NO: 1650650 - DNA, 25 bp, Homo sapien
gtggctgagagatttgtccacgctg

SEQ ID NO: 1650651 - DNA, 25 bp, Homo sapien
gctgtagcgtttgcgcatcttcacc

SEQ ID NO: 1650652 - DNA, 25 bp, Homo sapien
cgcccatggggtaggcgggccccag

SEQ ID NO: 1650653 - DNA, 25 bp, Homo sapien
catggggtaggcgggccccaggcac

SEQ ID NO: 1650654 - DNA, 25 bp, Homo sapien
ccatggggtaggcgggccccaggca

SEQ ID NO: 1650655 - DNA, 25 bp, Homo sapien
ccgatgatgcgagcaaagccaaagt

SEQ ID NO: 1650656 - DNA, 25 bp, Homo sapien
tgacgtacatgatcacgcccactga

SEQ ID NO: 1650657 - DNA, 25 bp, Homo sapien
tgaccacatgtccagcgagcggttg

SEQ ID NO: 1650658 - DNA, 25 bp, Homo sapien
gcggaacgacttctcgccgatgatg

SEQ ID NO: 1650659 - DNA, 25 bp, Homo sapien
ccccacatcttgattagtataatcc

SEQ ID NO: 1650660 - DNA, 25 bp, Homo sapien
atcttgattagtataatccccttcc

SEQ ID NO: 1650661 - DNA, 25 bp, Homo sapien
ttgattagtataatccccttcccca

SEQ ID NO: 1650662 - DNA, 25 bp, Homo sapien
ccacatcttgattagtataatcccc

SEQ ID NO: 1650663 - DNA, 25 bp, Homo sapien
tcacagtggacaatgttcttgaagt

SEQ ID NO: 1650664 - DNA, 25 bp, Homo sapien
gctgatgccagcaacacgttttctg

SEQ ID NO: 1650665 - DNA, 25 bp, Homo sapien
tctgctgatgccagcaacacgtttt

SEQ ID NO: 1650666 - DNA, 25 bp, Homo sapien
ttctggtttcaagtcacagtggaca

SEQ ID NO: 1650667 - DNA, 25 bp, Homo sapien
cctatgataaggtgagctgattaaa

SEQ ID NO: 1650668 - DNA, 25 bp, Homo sapien
cttaaataaagcttctcctgctgta

SEQ ID NO: 1650669 - DNA, 25 bp, Homo sapien
catctgtgagaatcatatttcttga

SEQ ID NO: 1650670 - DNA, 25 bp, Homo sapien
tctcctgctgtatctgttcctatga

SEQ ID NO: 1650671 - DNA, 25 bp, Homo sapien
accttgagataataggcacgaccca

SEQ ID NO: 1650672 - DNA, 25 bp, Homo sapien
gctacccaaaccttgagataatagg

SEQ ID NO: 1650673 - DNA, 25 bp, Homo sapien
caacctcctcattctacagactggg

SEQ ID NO: 1650674 - DNA, 25 bp, Homo sapien
ctcctcattctacagactgggagac

SEQ ID NO: 1650675 - DNA, 25 bp, Homo sapien
tgatcagtaagagagctttgacctg

SEQ ID NO: 1650676 - DNA, 25 bp, Homo sapien
atcagtaagagagctttgacctgct

SEQ ID NO: 1650677 - DNA, 25 bp, Homo sapien
actgatcagtaagagagctttgacc

SEQ ID NO: 1650678 - DNA, 25 bp, Homo sapien
tactgatcagtaagagagctttgac

SEQ ID NO: 1650679 - DNA, 25 bp, Homo sapien
actccaggttcacgatcccgggatg

SEQ ID NO: 1650680 - DNA, 25 bp, Homo sapien
cacaaacactttctcaggcgtctcg

SEQ ID NO: 1650681 - DNA, 25 bp, Homo sapien
ggcgtctcgaacatgcactccaggt

SEQ ID NO: 1650682 - DNA, 25 bp, Homo sapien
ggatcatctccaacatgtccccatg

SEQ ID NO: 1650683 - DNA, 25 bp, Homo sapien
tagggaagcgcagtttgtcaatgac

SEQ ID NO: 1650684 - DNA, 25 bp, Homo sapien
aatgaccttaactgccacgtcccgg

SEQ ID NO: 1650685 - DNA, 25 bp, Homo sapien
tggccacttcattccggagctggct

SEQ ID NO: 1650686 - DNA, 25 bp, Homo sapien
tcctgcttggtagggaagcgcagtt

SEQ ID NO: 1650687 - DNA, 25 bp, Homo sapien
cccagcacttcgtcagggaagatct

SEQ ID NO: 1650688 - DNA, 25 bp, Homo sapien
gaagatctggtagacagtggcaatg

SEQ ID NO: 1650689 - DNA, 25 bp, Homo sapien
ttctcttggatctgactgttggaca

SEQ ID NO: 1650690 - DNA, 25 bp, Homo sapien
attctcttggatctgactgttggac

SEQ ID NO: 1650691 - DNA, 25 bp, Homo sapien
tctcttggatctgactgttggacac

SEQ ID NO: 1650692 - DNA, 25 bp, Homo sapien
gtgacgatctcaaagcagtgtgggt

SEQ ID NO: 1650693 - DNA, 25 bp, Homo sapien
cagtgtgggttggtgcccggcggca

SEQ ID NO: 1650694 - DNA, 25 bp, Homo sapien
gcgtcctgaaggatgacgggcatca

SEQ ID NO: 1650695 - DNA, 25 bp, Homo sapien
tgggcggactccaccgtgaggattt

SEQ ID NO: 1650696 - DNA, 25 bp, Homo sapien
tccaggcgccaatagtgccgctttc

SEQ ID NO: 1650697 - DNA, 25 bp, Homo sapien
tatctgttggtcgtgttgttctgga

SEQ ID NO: 1650698 - DNA, 25 bp, Homo sapien
agagcgtgatacacttgcagtccag

SEQ ID NO: 1650699 - DNA, 25 bp, Homo sapien
cgtgttgttctggaagagcgtgata

SEQ ID NO: 1650700 - DNA, 25 bp, Homo sapien
tccctatcccgtggagctgcttggg

SEQ ID NO: 1650701 - DNA, 25 bp, Homo sapien
tggagcaccacgtgcacgccgtaac

SEQ ID NO: 1650702 - DNA, 25 bp, Homo sapien
tgtttgaagagtcacgtgaaccgcc

SEQ ID NO: 1650703 - DNA, 25 bp, Homo sapien
gtgcacgccgtaactctagcaccta

SEQ ID NO: 1650704 - DNA, 25 bp, Homo sapien
cagcgtggtgctggatttccgcgtc

SEQ ID NO: 1650705 - DNA, 25 bp, Homo sapien
accgattgcaccaccctcattaggg

SEQ ID NO: 1650706 - DNA, 25 bp, Homo sapien
cagcgtgtccttgttgctgtaatga

SEQ ID NO: 1650707 - DNA, 25 bp, Homo sapien
ttgctgtaatgaaccacccaaccct

SEQ ID NO: 1650708 - DNA, 25 bp, Homo sapien
ttataaatatgaggtgatgtcagcc

SEQ ID NO: 1650709 - DNA, 25 bp, Homo sapien
gatgtcagcccattgtagagaaaaa

SEQ ID NO: 1650710 - DNA, 25 bp, Homo sapien
aggttcactgtgcaggagggtcttc

SEQ ID NO: 1650711 - DNA, 25 bp, Homo sapien
aggtgatgtcagcccattgtagaga

SEQ ID NO: 1650712 - DNA, 25 bp, Homo sapien
gagccagggatgacaccggagtcct

SEQ ID NO: 1650713 - DNA, 25 bp, Homo sapien
ctcctcactggcgtggagcgcattc

SEQ ID NO: 1650714 - DNA, 25 bp, Homo sapien
cactggcgtggagcgcattctctga

SEQ ID NO: 1650715 - DNA, 25 bp, Homo sapien
agccagggatgacaccggagtcctc

SEQ ID NO: 1650716 - DNA, 25 bp, Homo sapien
ggcgctcttgtcagcctcgctgaaa

SEQ ID NO: 1650717 - DNA, 25 bp, Homo sapien
gctcttgtcagcctcgctgaaatcg

SEQ ID NO: 1650718 - DNA, 25 bp, Homo sapien
gagggcgctcttgtcagcctcgctg

SEQ ID NO: 1650719 - DNA, 25 bp, Homo sapien
tcttgtcagcctcgctgaaatcggt

SEQ ID NO: 1650720 - DNA, 25 bp, Homo sapien
cgcgggtggcgcagcgtttgtgaca

SEQ ID NO: 1650721 - DNA, 25 bp, Homo sapien
tcccccaggcagtcattagggacgc

SEQ ID NO: 1650722 - DNA, 25 bp, Homo sapien
cgtttgtgacagttaaacttgcagt

SEQ ID NO: 1650723 - DNA, 25 bp, Homo sapien
ttagggacgcgggtggcgcagcgtt

SEQ ID NO: 1650724 - DNA, 25 bp, Homo sapien
gattccgtatttctaaggcttcaga

SEQ ID NO: 1650725 - DNA, 25 bp, Homo sapien
tgcagattccaaggttctaggattc

SEQ ID NO: 1650726 - DNA, 25 bp, Homo sapien
tactgcccctgacctgattccgtat

SEQ ID NO: 1650727 - DNA, 25 bp, Homo sapien
tgtggatctaggcttctgaggttct

SEQ ID NO: 1650728 - DNA, 25 bp, Homo sapien
ttgcaagcctggcaaacggtgggcc

SEQ ID NO: 1650729 - DNA, 25 bp, Homo sapien
gaaggtgtgcggcaccttgaccttg

SEQ ID NO: 1650730 - DNA, 25 bp, Homo sapien
ctttgcattgcaggccctgccggaa

SEQ ID NO: 1650731 - DNA, 25 bp, Homo sapien
acggtgggccgtgtatagctgtgga

SEQ ID NO: 1650732 - DNA, 25 bp, Homo sapien
ggcggcccgtatacgatgaggcaga

SEQ ID NO: 1650733 - DNA, 25 bp, Homo sapien
ctcaatggggcggcccgtatacgat

SEQ ID NO: 1650734 - DNA, 25 bp, Homo sapien
gcaggagttcggtggtgctacggct

SEQ ID NO: 1650735 - DNA, 25 bp, Homo sapien
aggatgacgggggacggcgaggcag

SEQ ID NO: 1650736 - DNA, 25 bp, Homo sapien
cagggactcggaggtgccgaggcgc

SEQ ID NO: 1650737 - DNA, 25 bp, Homo sapien
ggtgccgaggcgcaccgagtggcca

SEQ ID NO: 1650738 - DNA, 25 bp, Homo sapien
aggcgcaccgagtggccactggcca

SEQ ID NO: 1650739 - DNA, 25 bp, Homo sapien
ggcagggactcggaggtgccgaggc

SEQ ID NO: 1650740 - DNA, 25 bp, Homo sapien
tgaaggcacagcgcttgtggtagtt

SEQ ID NO: 1650741 - DNA, 25 bp, Homo sapien
aaggcacagcgcttgtggtagttca

SEQ ID NO: 1650742 - DNA, 25 bp, Homo sapien
cactacagttgttggggatgctgaa

SEQ ID NO: 1650743 - DNA, 25 bp, Homo sapien
cgccgtttgcgggccccactacagt

SEQ ID NO: 1650744 - DNA, 25 bp, Homo sapien
tgtgtgctctaatacatctccagtg

SEQ ID NO: 1650745 - DNA, 25 bp, Homo sapien
agctcaactccctgtttcccactgg

SEQ ID NO: 1650746 - DNA, 25 bp, Homo sapien
tctccagtgattccaaacgattcca

SEQ ID NO: 1650747 - DNA, 25 bp, Homo sapien
cactggacgttctgtatgtgtgctc

SEQ ID NO: 1650748 - DNA, 25 bp, Homo sapien
gtccccgtgccaggaccattacgct

SEQ ID NO: 1650749 - DNA, 25 bp, Homo sapien
tagccagcccacacaattctgtaag

SEQ ID NO: 1650750 - DNA, 25 bp, Homo sapien
tctgcttgatccctaactgatagag

SEQ ID NO: 1650751 - DNA, 25 bp, Homo sapien
cagatttgagttgcctagccagccc

SEQ ID NO: 1650752 - DNA, 25 bp, Homo sapien
cctggcgcactaggccgaagagcat

SEQ ID NO: 1650753 - DNA, 25 bp, Homo sapien
caccgtgagggcgtgcgggcggatc

SEQ ID NO: 1650754 - DNA, 25 bp, Homo sapien
tcacagaaggcaggcgcccgatagg

SEQ ID NO: 1650755 - DNA, 25 bp, Homo sapien
caggcgcccgataggagtgcaccgt

SEQ ID NO: 1650756 - DNA, 25 bp, Homo sapien
tgtaggcggaaaataggggtggatg

SEQ ID NO: 1650757 - DNA, 25 bp, Homo sapien
ctgtaggcggaaaataggggtggat

SEQ ID NO: 1650758 - DNA, 25 bp, Homo sapien
cagaagcccccaactctccttattt

SEQ ID NO: 1650759 - DNA, 25 bp, Homo sapien
catgaccccactctgtaaccatctt

SEQ ID NO: 1650760 - DNA, 25 bp, Homo sapien
tccagaagcccccaactctccttat

SEQ ID NO: 1650761 - DNA, 25 bp, Homo sapien
ccttcatgaccccactctgtaacca

SEQ ID NO: 1650762 - DNA, 25 bp, Homo sapien
ccaccaggtcgccctcctggatgtc

SEQ ID NO: 1650763 - DNA, 25 bp, Homo sapien
caccaggtcgccctcctggatgtct

SEQ ID NO: 1650764 - DNA, 25 bp, Homo sapien
ggccgtagaagccacactcagggaa

SEQ ID NO: 1650765 - DNA, 25 bp, Homo sapien
tcttgtcgtaaaggccgtagaagcc

SEQ ID NO: 1650766 - DNA, 25 bp, Homo sapien
tttgaaaagcaggatcttgtcgtaa

SEQ ID NO: 1650767 - DNA, 25 bp, Homo sapien
cgacgtggggtcatgtttgaaaagc

SEQ ID NO: 1650768 - DNA, 25 bp, Homo sapien
gcgtggacacctcgaattttccgga

SEQ ID NO: 1650769 - DNA, 25 bp, Homo sapien
gatgccagcgccccaattgtacggg

SEQ ID NO: 1650770 - DNA, 25 bp, Homo sapien
gaaaagctcagagccgccttcagca

SEQ ID NO: 1650771 - DNA, 25 bp, Homo sapien
atgtggcgacggaaaagctcagagc

SEQ ID NO: 1650772 - DNA, 25 bp, Homo sapien
ggtggggcgagctggaaggaggact

SEQ ID NO: 1650773 - DNA, 25 bp, Homo sapien
gtggggcgagctggaaggaggactt

SEQ ID NO: 1650774 - DNA, 25 bp, Homo sapien
tggggcgagctggaaggaggacttt

SEQ ID NO: 1650775 - DNA, 25 bp, Homo sapien
ctggagataaggagggcgcctgcca

SEQ ID NO: 1650776 - DNA, 25 bp, Homo sapien
cctgccacccaatgctcaaaggacc

SEQ ID NO: 1650777 - DNA, 25 bp, Homo sapien
cacccaatgctcaaaggacccaggt

SEQ ID NO: 1650778 - DNA, 25 bp, Homo sapien
caatgctcaaaggacccaggtgtct

SEQ ID NO: 1650779 - DNA, 25 bp, Homo sapien
ggatccagggagcctgcgccctcac

SEQ ID NO: 1650780 - DNA, 25 bp, Homo sapien
tggatccagggagcctgcgccctca

SEQ ID NO: 1650781 - DNA, 25 bp, Homo sapien
gcggcgggcaacagcacgaactcgc

SEQ ID NO: 1650782 - DNA, 25 bp, Homo sapien
tctggtccacgatggaacaggccag

SEQ ID NO: 1650783 - DNA, 25 bp, Homo sapien
aacagcacgaactcgcgggtcagcc

SEQ ID NO: 1650784 - DNA, 25 bp, Homo sapien
gctgcttcacatgagccagctcgga

SEQ ID NO: 1650785 - DNA, 25 bp, Homo sapien
ctggatgtgaaaggagaccccggaa

SEQ ID NO: 1650786 - DNA, 25 bp, Homo sapien
tggatgtgaaaggagaccccggaac

SEQ ID NO: 1650787 - DNA, 25 bp, Homo sapien
gcagtagcggtggcggcgactgcag

SEQ ID NO: 1650788 - DNA, 25 bp, Homo sapien
cagtagcggtggcggcgactgcagc

SEQ ID NO: 1650789 - DNA, 25 bp, Homo sapien
cagggagcccggcgggataagaggg

SEQ ID NO: 1650790 - DNA, 25 bp, Homo sapien
ccagggagcccggcgggataagagg

SEQ ID NO: 1650791 - DNA, 25 bp, Homo sapien
gccagggagcccggcgggataagag

SEQ ID NO: 1650792 - DNA, 25 bp, Homo sapien
agccagggagcccggcgggataaga

SEQ ID NO: 1650793 - DNA, 25 bp, Homo sapien
cggggatccgagaaaagatctggca

SEQ ID NO: 1650794 - DNA, 25 bp, Homo sapien
tagatccgcgggatctcgtgagcag

SEQ ID NO: 1650795 - DNA, 25 bp, Homo sapien
ggatccgagaaaagatctggcaggc

SEQ ID NO: 1650796 - DNA, 25 bp, Homo sapien
ctgggttctagatccgcgggatctc

SEQ ID NO: 1650797 - DNA, 25 bp, Homo sapien
gaggtcccagcgattgagattccaa

SEQ ID NO: 1650798 - DNA, 25 bp, Homo sapien
acagggatcaggagagcccgcgatt

SEQ ID NO: 1650799 - DNA, 25 bp, Homo sapien
cctgagaggaaatctagtaggtcgg

SEQ ID NO: 1650800 - DNA, 25 bp, Homo sapien
aggatccagtgctccaagaagagga

SEQ ID NO: 1650801 - DNA, 25 bp, Homo sapien
cagagataaaggggttcgcagggac

SEQ ID NO: 1650802 - DNA, 25 bp, Homo sapien
agtcggggaccgagtggattccaga

SEQ ID NO: 1650803 - DNA, 25 bp, Homo sapien
ctctgagtcggggaccgagtggatt

SEQ ID NO: 1650804 - DNA, 25 bp, Homo sapien
aggagtctctgagtcggggaccgag

SEQ ID NO: 1650805 - DNA, 25 bp, Homo sapien
gggtcgccaggcgccagtagctctt

SEQ ID NO: 1650806 - DNA, 25 bp, Homo sapien
ggagggtcgccaggcgccagtagct

SEQ ID NO: 1650807 - DNA, 25 bp, Homo sapien
agttcggtcgggagccgtgaggaag

SEQ ID NO: 1650808 - DNA, 25 bp, Homo sapien
cgccaggcgccagtagctctttttc

SEQ ID NO: 1650809 - DNA, 25 bp, Homo sapien
aacccaggaactgggcattagtgcc

SEQ ID NO: 1650810 - DNA, 25 bp, Homo sapien
catcctttctcgtatgttcactggg

SEQ ID NO: 1650811 - DNA, 25 bp, Homo sapien
agatgactgtcccagcaaaacgctg

SEQ ID NO: 1650812 - DNA, 25 bp, Homo sapien
gtcctgagtgtccagacagcggcct

SEQ ID NO: 1650813 - DNA, 25 bp, Homo sapien
ggacatgagccacgagggctcgggc

SEQ ID NO: 1650814 - DNA, 25 bp, Homo sapien
gacatgagccacgagggctcgggca

SEQ ID NO: 1650815 - DNA, 25 bp, Homo sapien
acatgagccacgagggctcgggcac

SEQ ID NO: 1650816 - DNA, 25 bp, Homo sapien
agcctgcgccccaaagccatcatcc

SEQ ID NO: 1650817 - DNA, 25 bp, Homo sapien
gagcctgcgccccaaagccatcatc

SEQ ID NO: 1650818 - DNA, 25 bp, Homo sapien
gcctgcgccccaaagccatcatcct

SEQ ID NO: 1650819 - DNA, 25 bp, Homo sapien
ggagcctgcgccccaaagccatcat

SEQ ID NO: 1650820 - DNA, 25 bp, Homo sapien
catcacacagtgataatgcgggtgg

SEQ ID NO: 1650821 - DNA, 25 bp, Homo sapien
agaaagccgtctctacccatgggcg

SEQ ID NO: 1650822 - DNA, 25 bp, Homo sapien
cgagggtgcagggtagaaccaaaca

SEQ ID NO: 1650823 - DNA, 25 bp, Homo sapien
tctgataccaggagcggctgtcagg

SEQ ID NO: 1650824 - DNA, 25 bp, Homo sapien
cagcacacctggcagtactaggcat

SEQ ID NO: 1650825 - DNA, 25 bp, Homo sapien
tctagggcgcctctaaggcctcaac

SEQ ID NO: 1650826 - DNA, 25 bp, Homo sapien
catgggcgtgcagagactcagaatg

SEQ ID NO: 1650827 - DNA, 25 bp, Homo sapien
agtgattctcacaggacgcccctga

SEQ ID NO: 1650828 - DNA, 25 bp, Homo sapien
cggccctacaccccagccagcgtgg

SEQ ID NO: 1650829 - DNA, 25 bp, Homo sapien
ccggccctacaccccagccagcgtg

SEQ ID NO: 1650830 - DNA, 25 bp, Homo sapien
cccggccctacaccccagccagcgt

SEQ ID NO: 1650831 - DNA, 25 bp, Homo sapien
cctgcccggccctacaccccagcca

SEQ ID NO: 1650832 - DNA, 25 bp, Homo sapien
tccaggctccagagacgcagggagc

SEQ ID NO: 1650833 - DNA, 25 bp, Homo sapien
tcagcgccagcactggcaatgaggg

SEQ ID NO: 1650834 - DNA, 25 bp, Homo sapien
caggcaacagcgtggatggcctcct

SEQ ID NO: 1650835 - DNA, 25 bp, Homo sapien
cctcgtgcttcttgcggtgggccgt

SEQ ID NO: 1650836 - DNA, 25 bp, Homo sapien
tcatcccccagcatttcttgagcag

SEQ ID NO: 1650837 - DNA, 25 bp, Homo sapien
gggctcctcgctcagacgcagccct

SEQ ID NO: 1650838 - DNA, 25 bp, Homo sapien
atcacctcctgtggcccgcccaaag

SEQ ID NO: 1650839 - DNA, 25 bp, Homo sapien
gacaggcgggaaaggtcctgaggca

SEQ ID NO: 1650840 - DNA, 25 bp, Homo sapien
aggtgtgcaaccatggagtgcaccg

SEQ ID NO: 1650841 - DNA, 25 bp, Homo sapien
tccacggctaggcaggtgactgcgt

SEQ ID NO: 1650842 - DNA, 25 bp, Homo sapien
tcctgacatcaggaatgcgccgttg

SEQ ID NO: 1650843 - DNA, 25 bp, Homo sapien
gcaaccatggagtgcaccggcttac

SEQ ID NO: 1650844 - DNA, 25 bp, Homo sapien
tgaaaggactggacgagagactccc

SEQ ID NO: 1650845 - DNA, 25 bp, Homo sapien
ccacagggacgcaagcatctctgct

SEQ ID NO: 1650846 - DNA, 25 bp, Homo sapien
tctgggcctcgcctgagagagtgaa

SEQ ID NO: 1650847 - DNA, 25 bp, Homo sapien
cactacgagcacaaggggctaggcc

SEQ ID NO: 1650848 - DNA, 25 bp, Homo sapien
aagcggatgcccctgtcgtcgtggg

SEQ ID NO: 1650849 - DNA, 25 bp, Homo sapien
gctggtttggatgactcaccacttg

SEQ ID NO: 1650850 - DNA, 25 bp, Homo sapien
accacttggttgatctgggttggac

SEQ ID NO: 1650851 - DNA, 25 bp, Homo sapien
ccctgtcgtcgtgggcggtgatggt

SEQ ID NO: 1650852 - DNA, 25 bp, Homo sapien
acaagacggtgtcgccagagcggaa

SEQ ID NO: 1650853 - DNA, 25 bp, Homo sapien
acctccatgtcatacaagacggtgt

SEQ ID NO: 1650854 - DNA, 25 bp, Homo sapien
gaggccacgatgtgggcaggctcgg

SEQ ID NO: 1650855 - DNA, 25 bp, Homo sapien
ggtgctggtgaaggccactgaggtg

SEQ ID NO: 1650856 - DNA, 25 bp, Homo sapien
gcggacggtgccatcagcagaacag

SEQ ID NO: 1650857 - DNA, 25 bp, Homo sapien
cagatgcggacggtgccatcagcag

SEQ ID NO: 1650858 - DNA, 25 bp, Homo sapien
gcgctgggaggtgggactgaaggcc

SEQ ID NO: 1650859 - DNA, 25 bp, Homo sapien
tggccctccaggacgtggctcagca

SEQ ID NO: 1650860 - DNA, 25 bp, Homo sapien
cgtagccatcatagggatccatgct

SEQ ID NO: 1650861 - DNA, 25 bp, Homo sapien
catcatagggatccatgctgaggtc

SEQ ID NO: 1650862 - DNA, 25 bp, Homo sapien
tgccccgccactgtagcagtattca

SEQ ID NO: 1650863 - DNA, 25 bp, Homo sapien
cttccaactatggatgcaggcatct

SEQ ID NO: 1650864 - DNA, 25 bp, Homo sapien
gcatgtataggttccacatctagcg

SEQ ID NO: 1650865 - DNA, 25 bp, Homo sapien
ctgtgagcccggaaagcatgtatag

SEQ ID NO: 1650866 - DNA, 25 bp, Homo sapien
ccggaaagcatgtataggttccaca

SEQ ID NO: 1650867 - DNA, 25 bp, Homo sapien
taggttccacatctagcgccgcatt

SEQ ID NO: 1650868 - DNA, 25 bp, Homo sapien
ggttccagagcttgagcgtgccgtc

SEQ ID NO: 1650869 - DNA, 25 bp, Homo sapien
tcggaggcggtgagcagagccgact

SEQ ID NO: 1650870 - DNA, 25 bp, Homo sapien
ggccgtgaccgccttctgcaggttc

SEQ ID NO: 1650871 - DNA, 25 bp, Homo sapien
aaggccagggaacgaatgccgtcgt

SEQ ID NO: 1650872 - DNA, 25 bp, Homo sapien
ccatgagcagggcaatgaattaaag

SEQ ID NO: 1650873 - DNA, 25 bp, Homo sapien
aacaagtccccacactgcgctgggt

SEQ ID NO: 1650874 - DNA, 25 bp, Homo sapien
gtgagccccggaggaatgcgcattt

SEQ ID NO: 1650875 - DNA, 25 bp, Homo sapien
gcaggaatgccctcagagcctgggc

SEQ ID NO: 1650876 - DNA, 25 bp, Homo sapien
tgacggtgagatctgccaagtcccc

SEQ ID NO: 1650877 - DNA, 25 bp, Homo sapien
ccgatagtgtccatgatgaagacgt

SEQ ID NO: 1650878 - DNA, 25 bp, Homo sapien
atcgcagctgaggtcgttgtcgttg

SEQ ID NO: 1650879 - DNA, 25 bp, Homo sapien
tcgttggtgacggtgagatctgcca

SEQ ID NO: 1650880 - DNA, 25 bp, Homo sapien
gggagaggacaagatgaagaatcac

SEQ ID NO: 1650881 - DNA, 25 bp, Homo sapien
cggggagaggacaagatgaagaatc

SEQ ID NO: 1650882 - DNA, 25 bp, Homo sapien
gagacggggagaggacaagatgaag

SEQ ID NO: 1650883 - DNA, 25 bp, Homo sapien
gagaggacaagatgaagaatcacag

SEQ ID NO: 1650884 - DNA, 25 bp, Homo sapien
tcagccagaatgccttggagtttga

SEQ ID NO: 1650885 - DNA, 25 bp, Homo sapien
gtcagccagaatgccttggagtttg

SEQ ID NO: 1650886 - DNA, 25 bp, Homo sapien
aacccagtctggcataggtgacgcc

SEQ ID NO: 1650887 - DNA, 25 bp, Homo sapien
ggtcgaggcatagggccggagtcac

SEQ ID NO: 1650888 - DNA, 25 bp, Homo sapien
ctgcagggtcgaggcatagggccgg

SEQ ID NO: 1650889 - DNA, 25 bp, Homo sapien
ataggtgacgccttccccacactga

SEQ ID NO: 1650890 - DNA, 25 bp, Homo sapien
caggaaacatatccgtccggtagag

SEQ ID NO: 1650891 - DNA, 25 bp, Homo sapien
aaacatatccgtccggtagagagac

SEQ ID NO: 1650892 - DNA, 25 bp, Homo sapien
ggaaacatatccgtccggtagagag

SEQ ID NO: 1650893 - DNA, 25 bp, Homo sapien
tctcaggaaacatatccgtccggta

SEQ ID NO: 1650894 - DNA, 25 bp, Homo sapien
gcccaggaaatcaaactcattgata

SEQ ID NO: 1650895 - DNA, 25 bp, Homo sapien
tcgtcttccatttcgggcaccagag

SEQ ID NO: 1650896 - DNA, 25 bp, Homo sapien
atccacagtgcaccgccgagggtct

SEQ ID NO: 1650897 - DNA, 25 bp, Homo sapien
cattgatagcatcctcagagtcgtc

SEQ ID NO: 1650898 - DNA, 25 bp, Homo sapien
ccccagcactgagccgcccaagcgc

SEQ ID NO: 1650899 - DNA, 25 bp, Homo sapien
tgagccgcccaagcgctctttgcca

SEQ ID NO: 1650900 - DNA, 25 bp, Homo sapien
cttcgtcctcgcagttctgcaggaa

SEQ ID NO: 1650901 - DNA, 25 bp, Homo sapien
tcttgtgctgcacgctgtccagctc

SEQ ID NO: 1650902 - DNA, 25 bp, Homo sapien
tgagagtgaacaagccagagattcc

SEQ ID NO: 1650903 - DNA, 25 bp, Homo sapien
tgttctgcttaactgacaattgctg

SEQ ID NO: 1650904 - DNA, 25 bp, Homo sapien
tccctgctggcgaggcacccagggt

SEQ ID NO: 1650905 - DNA, 25 bp, Homo sapien
cacccagggtgtgccttcggtaagc

SEQ ID NO: 1650906 - DNA, 25 bp, Homo sapien
accgcatgtcgaggatggtgtctgt

SEQ ID NO: 1650907 - DNA, 25 bp, Homo sapien
cggacgcgcttggaccgcatgtcga

SEQ ID NO: 1650908 - DNA, 25 bp, Homo sapien
ctcggctccactgccccgttgagct

SEQ ID NO: 1650909 - DNA, 25 bp, Homo sapien
ggcccagcagggaacggacgcgctt

SEQ ID NO: 1650910 - DNA, 25 bp, Homo sapien
gagccacgtgggtcagacatcccct

SEQ ID NO: 1650911 - DNA, 25 bp, Homo sapien
tgcaaaccgagacaacctcttaagg

SEQ ID NO: 1650912 - DNA, 25 bp, Homo sapien
agttccccgtcaaggctatttccag

SEQ ID NO: 1650913 - DNA, 25 bp, Homo sapien
tatttccagtggaagcccttgtaca

SEQ ID NO: 1650914 - DNA, 25 bp, Homo sapien
agggtgaccgattccacggggccat

SEQ ID NO: 1650915 - DNA, 25 bp, Homo sapien
tctccagggtgaccgattccacggg

SEQ ID NO: 1650916 - DNA, 25 bp, Homo sapien
tgaccgattccacggggccattgga

SEQ ID NO: 1650917 - DNA, 25 bp, Homo sapien
ccacaccaacgggctgttctccagg

SEQ ID NO: 1650918 - DNA, 25 bp, Homo sapien
tgttctgacacatctgctttcttct

SEQ ID NO: 1650919 - DNA, 25 bp, Homo sapien
ttcttctccccctggttcaggtctg

SEQ ID NO: 1650920 - DNA, 25 bp, Homo sapien
cctggttcaggtctgtcccaaactt

SEQ ID NO: 1650921 - DNA, 25 bp, Homo sapien
aaacttcagtttatgatatttggcc

SEQ ID NO: 1650922 - DNA, 25 bp, Homo sapien
gccgcaccaggtccgtctttagatt

SEQ ID NO: 1650923 - DNA, 25 bp, Homo sapien
ggtccgtctttagattctcctgccc

SEQ ID NO: 1650924 - DNA, 25 bp, Homo sapien
cttcagcgcatactctagcatcttg

SEQ ID NO: 1650925 - DNA, 25 bp, Homo sapien
tagcatcttgatccgccgcaccagg

SEQ ID NO: 1650926 - DNA, 25 bp, Homo sapien
cagtcaccccacagtaatgggcagc

SEQ ID NO: 1650927 - DNA, 25 bp, Homo sapien
agtcaccccacagtaatgggcagca

SEQ ID NO: 1650928 - DNA, 25 bp, Homo sapien
tataaacatccaaggccagacaggg

SEQ ID NO: 1650929 - DNA, 25 bp, Homo sapien
caatacctgccactgtttggtgact

SEQ ID NO: 1650930 - DNA, 25 bp, Homo sapien
gggacaagaggcgacaattcagcta

SEQ ID NO: 1650931 - DNA, 25 bp, Homo sapien
aatgtgactaggaccccattgcggg

SEQ ID NO: 1650932 - DNA, 25 bp, Homo sapien
caaaaacgggaagcgtcagtggcca

SEQ ID NO: 1650933 - DNA, 25 bp, Homo sapien
ggaagcgtcagtggccagtctctcc

SEQ ID NO: 1650934 - DNA, 25 bp, Homo sapien
aaacgggaagcgtcagtggccagtc

SEQ ID NO: 1650935 - DNA, 25 bp, Homo sapien
gtctctccctcgctgcaaacgccag

SEQ ID NO: 1650936 - DNA, 25 bp, Homo sapien
tggacccgctctttcccagcgggtc

SEQ ID NO: 1650937 - DNA, 25 bp, Homo sapien
cggttccccatctggacccgctctt

SEQ ID NO: 1650938 - DNA, 25 bp, Homo sapien
cgatcccaggttcccgacttcctct

SEQ ID NO: 1650939 - DNA, 25 bp, Homo sapien
cttccgtgcccaccgtccagtcgcc

SEQ ID NO: 1650940 - DNA, 25 bp, Homo sapien
agcgggctttctcggcttcgaagcg

SEQ ID NO: 1650941 - DNA, 25 bp, Homo sapien
cccagcgggctttctcggcttcgaa

SEQ ID NO: 1650942 - DNA, 25 bp, Homo sapien
cgctcggcctcccagcgggctttct

SEQ ID NO: 1650943 - DNA, 25 bp, Homo sapien
ggctttctcggcttcgaagcgcgcc

SEQ ID NO: 1650944 - DNA, 25 bp, Homo sapien
cggggctgcctccgccgccgcctcc

SEQ ID NO: 1650945 - DNA, 25 bp, Homo sapien
cgccgtgggcccggggctgcctccg

SEQ ID NO: 1650946 - DNA, 25 bp, Homo sapien
gccgtgggcccggggctgcctccgc

SEQ ID NO: 1650947 - DNA, 25 bp, Homo sapien
gcccggggctgcctccgccgccgcc

SEQ ID NO: 1650948 - DNA, 25 bp, Homo sapien
ccagggcccgcgcctgagccgagcg

SEQ ID NO: 1650949 - DNA, 25 bp, Homo sapien
agggcccgcgcctgagccgagcgga

SEQ ID NO: 1650950 - DNA, 25 bp, Homo sapien
agtggggccagggcccgcgcctgag

SEQ ID NO: 1650951 - DNA, 25 bp, Homo sapien
ggccagggcccgcgcctgagccgag

SEQ ID NO: 1650952 - DNA, 25 bp, Homo sapien
cggcgaccgcggcggccgctcgctc

SEQ ID NO: 1650953 - DNA, 25 bp, Homo sapien
cgaccgcggcggccgctcgctcctc

SEQ ID NO: 1650954 - DNA, 25 bp, Homo sapien
ccgcggcggccgctcgctcctccat

SEQ ID NO: 1650955 - DNA, 25 bp, Homo sapien
gcgaccgcggcggccgctcgctcct

SEQ ID NO: 1650956 - DNA, 25 bp, Homo sapien
ccctcgctggagtgagactgaggaa

SEQ ID NO: 1650957 - DNA, 25 bp, Homo sapien
cagagaaagagccttaccccttcca

SEQ ID NO: 1650958 - DNA, 25 bp, Homo sapien
cgggtgggagatcgcgccccgagga

SEQ ID NO: 1650959 - DNA, 25 bp, Homo sapien
ggtctacaccgaagggtagcgtgcc

SEQ ID NO: 1650960 - DNA, 25 bp, Homo sapien
aacaccactctcctggacaattact

SEQ ID NO: 1650961 - DNA, 25 bp, Homo sapien
tcctggacaattacttttactctga

SEQ ID NO: 1650962 - DNA, 25 bp, Homo sapien
ttttactctgagagaaagggcgacc

SEQ ID NO: 1650963 - DNA, 25 bp, Homo sapien
tctgagagaaagggcgaccagcagt

SEQ ID NO: 1650964 - DNA, 25 bp, Homo sapien
catggtaacccttccccagcggtgg

SEQ ID NO: 1650965 - DNA, 25 bp, Homo sapien
tctctgattgccggccaggttggtt

SEQ ID NO: 1650966 - DNA, 25 bp, Homo sapien
ctgattgccggccaggttggttgtc

SEQ ID NO: 1650967 - DNA, 25 bp, Homo sapien
attgccggccaggttggttgtcatg

SEQ ID NO: 1650968 - DNA, 25 bp, Homo sapien
gcgggagttcgaggcatttgacaac

SEQ ID NO: 1650969 - DNA, 25 bp, Homo sapien
cccgtgtcaccgtcctggtgcggga

SEQ ID NO: 1650970 - DNA, 25 bp, Homo sapien
ggcatttgacaacgcggtgcccgag

SEQ ID NO: 1650971 - DNA, 25 bp, Homo sapien
gcggtgcccgagctggtagactcct

SEQ ID NO: 1650972 - DNA, 25 bp, Homo sapien
ggcttggagacccacttagcaggtg

SEQ ID NO: 1650973 - DNA, 25 bp, Homo sapien
ggctctggagcccacaattgtctta

SEQ ID NO: 1650974 - DNA, 25 bp, Homo sapien
tctctagtcatggtccccaagaggg

SEQ ID NO: 1650975 - DNA, 25 bp, Homo sapien
tgaggccagaatcgtgaagtcactt

SEQ ID NO: 1650976 - DNA, 25 bp, Homo sapien
aagcaaacacatcttgtgatggcag

SEQ ID NO: 1650977 - DNA, 25 bp, Homo sapien
tttaatcgacccacagttcagcacg

SEQ ID NO: 1650978 - DNA, 25 bp, Homo sapien
ttaatcgacccacagttcagcacgg

SEQ ID NO: 1650979 - DNA, 25 bp, Homo sapien
aaacacatcttgtgatggcaggaag

SEQ ID NO: 1650980 - DNA, 25 bp, Homo sapien
gctggcctcaaattcgtgactccag

SEQ ID NO: 1650981 - DNA, 25 bp, Homo sapien
ggcctcaaattcgtgactccaggtg

SEQ ID NO: 1650982 - DNA, 25 bp, Homo sapien
tggcctcaaattcgtgactccaggt

SEQ ID NO: 1650983 - DNA, 25 bp, Homo sapien
cctcaaattcgtgactccaggtgat

SEQ ID NO: 1650984 - DNA, 25 bp, Homo sapien
aagtcaaattctcaagaacacctga

SEQ ID NO: 1650985 - DNA, 25 bp, Homo sapien
taagtcaaattctcaagaacacctg

SEQ ID NO: 1650986 - DNA, 25 bp, Homo sapien
ctggcctggagtgatctcaaagtgc

SEQ ID NO: 1650987 - DNA, 25 bp, Homo sapien
cagggtgggacgtaccatggggaca

SEQ ID NO: 1650988 - DNA, 25 bp, Homo sapien
gacagggtgggacgtaccatgggga

SEQ ID NO: 1650989 - DNA, 25 bp, Homo sapien
tgtttctgttattgtggagggaata

SEQ ID NO: 1650990 - DNA, 25 bp, Homo sapien
gggagtgtttctgttattgtggagg

SEQ ID NO: 1650991 - DNA, 25 bp, Homo sapien
cgccaaaataaccagcatggtgttg

SEQ ID NO: 1650992 - DNA, 25 bp, Homo sapien
tacagccgccaaaataaccagcatg

SEQ ID NO: 1650993 - DNA, 25 bp, Homo sapien
cccacaactacagccgccaaaataa

SEQ ID NO: 1650994 - DNA, 25 bp, Homo sapien
aactacagccgccaaaataaccagc

SEQ ID NO: 1650995 - DNA, 25 bp, Homo sapien
tgctgttttctagccttgagttggg

SEQ ID NO: 1650996 - DNA, 25 bp, Homo sapien
ttttgaggagtaacccttgtgaaca

SEQ ID NO: 1650997 - DNA, 25 bp, Homo sapien
gaggagtaacccttgtgaacacatg

SEQ ID NO: 1650998 - DNA, 25 bp, Homo sapien
cctgtgacctgctccctgagacagg

SEQ ID NO: 1650999 - DNA, 25 bp, Homo sapien
tggagggtgctggggcccctggctc

SEQ ID NO: 1651000 - DNA, 25 bp, Homo sapien
cccagatctcctgtcctggagggtg

SEQ ID NO: 1651001 - DNA, 25 bp, Homo sapien
cagatctcctgtcctggagggtgct

SEQ ID NO: 1651002 - DNA, 25 bp, Homo sapien
cctggagggtgctggggcccctggc

SEQ ID NO: 1651003 - DNA, 25 bp, Homo sapien
ccagagccctagctcatccatttat

SEQ ID NO: 1651004 - DNA, 25 bp, Homo sapien
ttcctcataatccagtgtccaaaga

SEQ ID NO: 1651005 - DNA, 25 bp, Homo sapien
tatccattcctcataatccagtgtc

SEQ ID NO: 1651006 - DNA, 25 bp, Homo sapien
gagccctagctcatccatttatcca

SEQ ID NO: 1651007 - DNA, 25 bp, Homo sapien
ttccttctcagaggcgaccgtggca

SEQ ID NO: 1651008 - DNA, 25 bp, Homo sapien
ggctctgtgcttctcgactccgtac

SEQ ID NO: 1651009 - DNA, 25 bp, Homo sapien
tctacattgaggacggtacaggacc

SEQ ID NO: 1651010 - DNA, 25 bp, Homo sapien
tcttcacttgtatcaactcaggctc

SEQ ID NO: 1651011 - DNA, 25 bp, Homo sapien
tcgaccgggaggttgactgcttcga

SEQ ID NO: 1651012 - DNA, 25 bp, Homo sapien
cacgctggacgctgtggccgtgacc

SEQ ID NO: 1651013 - DNA, 25 bp, Homo sapien
atcaaggagatatggtcgaccggga

SEQ ID NO: 1651014 - DNA, 25 bp, Homo sapien
tgaggacacctccagcagggatgcc

SEQ ID NO: 1651015 - DNA, 25 bp, Homo sapien
acgcactggaagagcgcggcaccgt

SEQ ID NO: 1651016 - DNA, 25 bp, Homo sapien
gatgaaacggctgatgtgcttggcc

SEQ ID NO: 1651017 - DNA, 25 bp, Homo sapien
accgtccatgttgacggtggcgccg

SEQ ID NO: 1651018 - DNA, 25 bp, Homo sapien
tttacgaagtccaaggactgctggc

SEQ ID NO: 1651019 - DNA, 25 bp, Homo sapien
acgatgccccacaggaagcggtagg

SEQ ID NO: 1651020 - DNA, 25 bp, Homo sapien
aggagcccatggatggcgtgaccca

SEQ ID NO: 1651021 - DNA, 25 bp, Homo sapien
aggcgggcaaagagtaaacccacat

SEQ ID NO: 1651022 - DNA, 25 bp, Homo sapien
agcggcgtcacgatgccccacagga

SEQ ID NO: 1651023 - DNA, 25 bp, Homo sapien
tgatcagtaacacaggagacagctt

SEQ ID NO: 1651024 - DNA, 25 bp, Homo sapien
agcaccctacccacatcttcctgcc

SEQ ID NO: 1651025 - DNA, 25 bp, Homo sapien
ggctcagcaccctacccacatcttc

SEQ ID NO: 1651026 - DNA, 25 bp, Homo sapien
gaggctcagcaccctacccacatct

SEQ ID NO: 1651027 - DNA, 25 bp, Homo sapien
agaagccccagcaatgtgtgcttca

SEQ ID NO: 1651028 - DNA, 25 bp, Homo sapien
caggagaccagaaccatggtggcct

SEQ ID NO: 1651029 - DNA, 25 bp, Homo sapien
caccaaagacgatggcaaacactac

SEQ ID NO: 1651030 - DNA, 25 bp, Homo sapien
tggcctcattgaaggagttgaagaa

SEQ ID NO: 1651031 - DNA, 25 bp, Homo sapien
tgaagaagcggataagcagctcccc

SEQ ID NO: 1651032 - DNA, 25 bp, Homo sapien
ccctccacctcctgccccacgggca

SEQ ID NO: 1651033 - DNA, 25 bp, Homo sapien
cctccacctcctgccccacgggcac

SEQ ID NO: 1651034 - DNA, 25 bp, Homo sapien
cctggttccggtgatattcctctct

SEQ ID NO: 1651035 - DNA, 25 bp, Homo sapien
cttcaccctggttccggtgatattc

SEQ ID NO: 1651036 - DNA, 25 bp, Homo sapien
accctggttccggtgatattcctct

SEQ ID NO: 1651037 - DNA, 25 bp, Homo sapien
ggttccggtgatattcctctcttca

SEQ ID NO: 1651038 - DNA, 25 bp, Homo sapien
gagcgaaaggctgctgacaccaggt

SEQ ID NO: 1651039 - DNA, 25 bp, Homo sapien
aaaggctgctgacaccaggttggaa

SEQ ID NO: 1651040 - DNA, 25 bp, Homo sapien
aggctgctgacaccaggttggaagg

SEQ ID NO: 1651041 - DNA, 25 bp, Homo sapien
ctgctgacaccaggttggaagggaa

SEQ ID NO: 1651042 - DNA, 25 bp, Homo sapien
gacagacacacagagggttattaga

SEQ ID NO: 1651043 - DNA, 25 bp, Homo sapien
cagacacacagagggttattagata

SEQ ID NO: 1651044 - DNA, 25 bp, Homo sapien
agacacacagagggttattagatac

SEQ ID NO: 1651045 - DNA, 25 bp, Homo sapien
acagacacacagagggttattagat

SEQ ID NO: 1651046 - DNA, 25 bp, Homo sapien
agggcagcattgtctgagaggctgg

SEQ ID NO: 1651047 - DNA, 25 bp, Homo sapien
ggggcccgcctgcacgcaaatacag

SEQ ID NO: 1651048 - DNA, 25 bp, Homo sapien
ggcagggttggaactaggcttgcac

SEQ ID NO: 1651049 - DNA, 25 bp, Homo sapien
cgttttaaggcagcgagtggaagct

SEQ ID NO: 1651050 - DNA, 25 bp, Homo sapien
ctagccctgaggcattgtgggttcg

SEQ ID NO: 1651051 - DNA, 25 bp, Homo sapien
tgctagccctgaggcattgtgggtt

SEQ ID NO: 1651052 - DNA, 25 bp, Homo sapien
caagaggctggcgtgctagccctga

SEQ ID NO: 1651053 - DNA, 25 bp, Homo sapien
gccccaagaggctggcgtgctagcc

SEQ ID NO: 1651054 - DNA, 25 bp, Homo sapien
tcccgagggctggagcctcccctca

SEQ ID NO: 1651055 - DNA, 25 bp, Homo sapien
ctcccgagggctggagcctcccctc

SEQ ID NO: 1651056 - DNA, 25 bp, Homo sapien
actcccgagggctggagcctcccct

SEQ ID NO: 1651057 - DNA, 25 bp, Homo sapien
ccacggaggcgttgatggcggcgga

SEQ ID NO: 1651058 - DNA, 25 bp, Homo sapien
tggcggcgccgccgatcaagctgca

SEQ ID NO: 1651059 - DNA, 25 bp, Homo sapien
gaacgaatcgagcacctccttgctg

SEQ ID NO: 1651060 - DNA, 25 bp, Homo sapien
cagcgtggtgaccaggaaaaagagc

SEQ ID NO: 1651061 - DNA, 25 bp, Homo sapien
acgaaggcgctcaagcgctccgggc

SEQ ID NO: 1651062 - DNA, 25 bp, Homo sapien
cagctcgcccgggaagacgaaggcg

SEQ ID NO: 1651063 - DNA, 25 bp, Homo sapien
caagatgatcatccgcagcagacgc

SEQ ID NO: 1651064 - DNA, 25 bp, Homo sapien
gcggcaagatgatcatccgcagcag

SEQ ID NO: 1651065 - DNA, 25 bp, Homo sapien
aaggcagcggcgcacctggtcccgg

SEQ ID NO: 1651066 - DNA, 25 bp, Homo sapien
cacaagcaggttggctcgaaggcag

SEQ ID NO: 1651067 - DNA, 25 bp, Homo sapien
gcacaagcaggttggctcgaaggca

SEQ ID NO: 1651068 - DNA, 25 bp, Homo sapien
cacctggtcccgggaaccgcagtag

SEQ ID NO: 1651069 - DNA, 25 bp, Homo sapien
ttggtcctcgatggaggccagcgcc

SEQ ID NO: 1651070 - DNA, 25 bp, Homo sapien
tccgccgctgcgagccccttggagt

SEQ ID NO: 1651071 - DNA, 25 bp, Homo sapien
ctgccgcgccttggtcctcgatgga

SEQ ID NO: 1651072 - DNA, 25 bp, Homo sapien
agtctcgaggaggatcggccaccat

SEQ ID NO: 1651073 - DNA, 25 bp, Homo sapien
gagtagcggttaccagccagagaaa

SEQ ID NO: 1651074 - DNA, 25 bp, Homo sapien
taggactgagttgagtaacagcacc

SEQ ID NO: 1651075 - DNA, 25 bp, Homo sapien
cccgtgtgccagatgtccgaaagct

SEQ ID NO: 1651076 - DNA, 25 bp, Homo sapien
gtttcttagcgcctggaagctggct

SEQ ID NO: 1651077 - DNA, 25 bp, Homo sapien
ggatgaaggaagctgagcggaggtc

SEQ ID NO: 1651078 - DNA, 25 bp, Homo sapien
ggagccgggcatcctccccacgtgg

SEQ ID NO: 1651079 - DNA, 25 bp, Homo sapien
ctgagcggaggtcgcagtgcctccc

SEQ ID NO: 1651080 - DNA, 25 bp, Homo sapien
tccccacgtgggcctttgaggatgg

SEQ ID NO: 1651081 - DNA, 25 bp, Homo sapien
aggaatctgcccgatgccctggtgg

SEQ ID NO: 1651082 - DNA, 25 bp, Homo sapien
aatctgcccgatgccctggtggcca

SEQ ID NO: 1651083 - DNA, 25 bp, Homo sapien
gccagctccaggcattaacagcttc

SEQ ID NO: 1651084 - DNA, 25 bp, Homo sapien
agctccaggcattaacagcttcctc

SEQ ID NO: 1651085 - DNA, 25 bp, Homo sapien
agagggaagctctgacgttagtctc

SEQ ID NO: 1651086 - DNA, 25 bp, Homo sapien
gcagaaatagctccttaaagccccg

SEQ ID NO: 1651087 - DNA, 25 bp, Homo sapien
taaagccccgttctacaggatgtag

SEQ ID NO: 1651088 - DNA, 25 bp, Homo sapien
tcttttataaactgcctgctctatt

SEQ ID NO: 1651089 - DNA, 25 bp, Homo sapien
attggggactccacgcacagacgct

SEQ ID NO: 1651090 - DNA, 25 bp, Homo sapien
ggtttattggggactccacgcacag

SEQ ID NO: 1651091 - DNA, 25 bp, Homo sapien
tttattggggactccacgcacagac

SEQ ID NO: 1651092 - DNA, 25 bp, Homo sapien
ttattggggactccacgcacagacg

SEQ ID NO: 1651093 - DNA, 25 bp, Homo sapien
ttactcgggacacacacggtggcct

SEQ ID NO: 1651094 - DNA, 25 bp, Homo sapien
gggtgcagtctcctcccttgtggcc

SEQ ID NO: 1651095 - DNA, 25 bp, Homo sapien
tatggcatcacacgacaacggcacg

SEQ ID NO: 1651096 - DNA, 25 bp, Homo sapien
caacggcacggttactcgggacaca

SEQ ID NO: 1651097 - DNA, 25 bp, Homo sapien
aacatctcgtccacgaccgtgtaaa

SEQ ID NO: 1651098 - DNA, 25 bp, Homo sapien
tcactccagggactgtagcatcagc

SEQ ID NO: 1651099 - DNA, 25 bp, Homo sapien
gatttcgccagccaggaacatctcg

SEQ ID NO: 1651100 - DNA, 25 bp, Homo sapien
ggactgtagcatcagcagctgtttc

SEQ ID NO: 1651101 - DNA, 25 bp, Homo sapien
tgaacaccaggtccagttcacagac

SEQ ID NO: 1651102 - DNA, 25 bp, Homo sapien
gcggcggtaaatgatcttaaagttc

SEQ ID NO: 1651103 - DNA, 25 bp, Homo sapien
tagaggccagcatagcggcggtaaa

SEQ ID NO: 1651104 - DNA, 25 bp, Homo sapien
cagaagtagaggccagcatagcggc

SEQ ID NO: 1651105 - DNA, 25 bp, Homo sapien
ccaggtaagccaggttgttgtcatt

SEQ ID NO: 1651106 - DNA, 25 bp, Homo sapien
ctgtcagcaacggagattgccagga

SEQ ID NO: 1651107 - DNA, 25 bp, Homo sapien
tgtcagcaacggagattgccaggac

SEQ ID NO: 1651108 - DNA, 25 bp, Homo sapien
aggctgtcagcaacggagattgcca

SEQ ID NO: 1651109 - DNA, 25 bp, Homo sapien
ggctgtcagcaacggagattgccag

SEQ ID NO: 1651110 - DNA, 25 bp, Homo sapien
ttcattgctatactccaagcatgtt

SEQ ID NO: 1651111 - DNA, 25 bp, Homo sapien
cattgctatactccaagcatgtttt

SEQ ID NO: 1651112 - DNA, 25 bp, Homo sapien
tcattgctatactccaagcatgttt

SEQ ID NO: 1651113 - DNA, 25 bp, Homo sapien
gatataggatggatagagggtccaa

SEQ ID NO: 1651114 - DNA, 25 bp, Homo sapien
tcttgcaactagaagctgggcaggg

SEQ ID NO: 1651115 - DNA, 25 bp, Homo sapien
gaagcaagcaagctcaaagcaggtt

SEQ ID NO: 1651116 - DNA, 25 bp, Homo sapien
gggtagtaggtatacgaatctccaa

SEQ ID NO: 1651117 - DNA, 25 bp, Homo sapien
ggacggtgaccacggcatgcacctc

SEQ ID NO: 1651118 - DNA, 25 bp, Homo sapien
caaactgcatgtaccacttggccag

SEQ ID NO: 1651119 - DNA, 25 bp, Homo sapien
ccacaaagttggtgtgtttggcgtc

SEQ ID NO: 1651120 - DNA, 25 bp, Homo sapien
ttgcctgcccggttctggatgagga

SEQ ID NO: 1651121 - DNA, 25 bp, Homo sapien
ctctccttttacagcgctttcccag

SEQ ID NO: 1651122 - DNA, 25 bp, Homo sapien
tctctccttttacagcgctttccca

SEQ ID NO: 1651123 - DNA, 25 bp, Homo sapien
tctccttttacagcgctttcccaga

SEQ ID NO: 1651124 - DNA, 25 bp, Homo sapien
tccttttggtttcctgtgccaggtc

SEQ ID NO: 1651125 - DNA, 25 bp, Homo sapien
gagatcatccctctctcacaggcag

SEQ ID NO: 1651126 - DNA, 25 bp, Homo sapien
gccaggtctcttcttgagatcatcc

SEQ ID NO: 1651127 - DNA, 25 bp, Homo sapien
gtgccaggtctcttcttgagatcat

SEQ ID NO: 1651128 - DNA, 25 bp, Homo sapien
agggacttgtcagcgcccgatccag

SEQ ID NO: 1651129 - DNA, 25 bp, Homo sapien
agaagggacttgtcagcgcccgatc

SEQ ID NO: 1651130 - DNA, 25 bp, Homo sapien
gcccgatccagcctcggctatttac

SEQ ID NO: 1651131 - DNA, 25 bp, Homo sapien
cagaccatccgcggcagagaaggga

SEQ ID NO: 1651132 - DNA, 25 bp, Homo sapien
cctccgccagtccccggcgtagcgc

SEQ ID NO: 1651133 - DNA, 25 bp, Homo sapien
cagtccccggcgtagcgctcccccg

SEQ ID NO: 1651134 - DNA, 25 bp, Homo sapien
tccgccagtccccggcgtagcgctc

SEQ ID NO: 1651135 - DNA, 25 bp, Homo sapien
cgccagtccccggcgtagcgctccc

SEQ ID NO: 1651136 - DNA, 25 bp, Homo sapien
tcccgcggcgactgggcagctccgg

SEQ ID NO: 1651137 - DNA, 25 bp, Homo sapien
gccccggtcccgcggcgactgggca

SEQ ID NO: 1651138 - DNA, 25 bp, Homo sapien
cagctccggctcagggtgcagttgt

SEQ ID NO: 1651139 - DNA, 25 bp, Homo sapien
cggtcccgcggcgactgggcagctc

SEQ ID NO: 1651140 - DNA, 25 bp, Homo sapien
agagctagagcggacttccggtaga

SEQ ID NO: 1651141 - DNA, 25 bp, Homo sapien
gctagagcggacttccggtagaaaa

SEQ ID NO: 1651142 - DNA, 25 bp, Homo sapien
tgtagtttcaccaaaggggccagcc

SEQ ID NO: 1651143 - DNA, 25 bp, Homo sapien
gcccagagctagagcggacttccgg

SEQ ID NO: 1651144 - DNA, 25 bp, Homo sapien
ggagaagcacttgaaccctggagat

SEQ ID NO: 1651145 - DNA, 25 bp, Homo sapien
gaagcacttgaaccctggagatgga

SEQ ID NO: 1651146 - DNA, 25 bp, Homo sapien
tgagccgagatcgtgccactgcact

SEQ ID NO: 1651147 - DNA, 25 bp, Homo sapien
gtgagccgagatcgtgccactgcac

SEQ ID NO: 1651148 - DNA, 25 bp, Homo sapien
tggccctaaaagtgctacattaaaa

SEQ ID NO: 1651149 - DNA, 25 bp, Homo sapien
cctggccctaaaagtgctacattaa

SEQ ID NO: 1651150 - DNA, 25 bp, Homo sapien
cgcctggccctaaaagtgctacatt

SEQ ID NO: 1651151 - DNA, 25 bp, Homo sapien
gcctggccctaaaagtgctacatta

SEQ ID NO: 1651152 - DNA, 25 bp, Homo sapien
taatggaataaacaagcccctgtaa

SEQ ID NO: 1651153 - DNA, 25 bp, Homo sapien
tatttatcaacgcttacagagcgct

SEQ ID NO: 1651154 - DNA, 25 bp, Homo sapien
taattttcacagcagccctacgaga

SEQ ID NO: 1651155 - DNA, 25 bp, Homo sapien
gagcgcttactatgtatgcaatgca

SEQ ID NO: 1651156 - DNA, 25 bp, Homo sapien
cttcttccgggacgacgaattgcgg

SEQ ID NO: 1651157 - DNA, 25 bp, Homo sapien
ttcaggcgccctaattgacattcga

SEQ ID NO: 1651158 - DNA, 25 bp, Homo sapien
ttcagaggagtcaagggttacagcg

SEQ ID NO: 1651159 - DNA, 25 bp, Homo sapien
aaacaagttgcatggacgcgcgcgt

SEQ ID NO: 1651160 - DNA, 25 bp, Homo sapien
gggtgcgcacgcgctctgacctctt

SEQ ID NO: 1651161 - DNA, 25 bp, Homo sapien
ctgtggcagtaagcccctcgggtgc

SEQ ID NO: 1651162 - DNA, 25 bp, Homo sapien
cagcggctgtggcagtaagcccctc

SEQ ID NO: 1651163 - DNA, 25 bp, Homo sapien
gcagtaagcccctcgggtgcgcacg

SEQ ID NO: 1651164 - DNA, 25 bp, Homo sapien
tccttctcttcccatttagttccta

SEQ ID NO: 1651165 - DNA, 25 bp, Homo sapien
ctccttctcttcccatttagttcct

SEQ ID NO: 1651166 - DNA, 25 bp, Homo sapien
ccattccccattgagcacttcccct

SEQ ID NO: 1651167 - DNA, 25 bp, Homo sapien
attccccattgagcacttccccttt

SEQ ID NO: 1651168 - DNA, 25 bp, Homo sapien
acccattccccattgagcacttccc

SEQ ID NO: 1651169 - DNA, 25 bp, Homo sapien
ccacccattccccattgagcacttc

SEQ ID NO: 1651170 - DNA, 25 bp, Homo sapien
tctctgcgccctaaccctgagggtt

SEQ ID NO: 1651171 - DNA, 25 bp, Homo sapien
gctggattgggccttaggctctcca

SEQ ID NO: 1651172 - DNA, 25 bp, Homo sapien
cagggatcctgagagatctgggtaa

SEQ ID NO: 1651173 - DNA, 25 bp, Homo sapien
ggttgattgttactactctctggag

SEQ ID NO: 1651174 - DNA, 25 bp, Homo sapien
tcatctttgccccgggaaaggctcc

SEQ ID NO: 1651175 - DNA, 25 bp, Homo sapien
aaatgtcactcagatttctgccctc

SEQ ID NO: 1651176 - DNA, 25 bp, Homo sapien
agcactttgcggttgtttgttgaaa

SEQ ID NO: 1651177 - DNA, 25 bp, Homo sapien
tgaaagagagagtgccaaatgtcac

SEQ ID NO: 1651178 - DNA, 25 bp, Homo sapien
tgggcagatccatggacctgatggt

SEQ ID NO: 1651179 - DNA, 25 bp, Homo sapien
gaacagtgacaaatcagaaaatact

SEQ ID NO: 1651180 - DNA, 25 bp, Homo sapien
aagttgtcggtgtgcagattcatgg

SEQ ID NO: 1651181 - DNA, 25 bp, Homo sapien
tgaaggtcgatgcatttagaacagt

SEQ ID NO: 1651182 - DNA, 25 bp, Homo sapien
cactgtagtaaactggtaattgcat

SEQ ID NO: 1651183 - DNA, 25 bp, Homo sapien
tcttacttggatgatgccctcgtcc

SEQ ID NO: 1651184 - DNA, 25 bp, Homo sapien
gtattatagatctgcaggtatttcc

SEQ ID NO: 1651185 - DNA, 25 bp, Homo sapien
cctcgtcctggccactgtagtaaac

SEQ ID NO: 1651186 - DNA, 25 bp, Homo sapien
ccttgtacttggtaggcccccattg

SEQ ID NO: 1651187 - DNA, 25 bp, Homo sapien
cttgtacttggtaggcccccattgt

SEQ ID NO: 1651188 - DNA, 25 bp, Homo sapien
tccagaggatagaggtagaggtcta

SEQ ID NO: 1651189 - DNA, 25 bp, Homo sapien
caagaatgcattgactaggaagaca

SEQ ID NO: 1651190 - DNA, 25 bp, Homo sapien
ggtttagagtgcacaaaacatgcct

SEQ ID NO: 1651191 - DNA, 25 bp, Homo sapien
aaaaatttagaaggccagtggcctg

SEQ ID NO: 1651192 - DNA, 25 bp, Homo sapien
caggtcataggccaaatagcagttg

SEQ ID NO: 1651193 - DNA, 25 bp, Homo sapien
cataggccaaatagcagttgtccac

SEQ ID NO: 1651194 - DNA, 25 bp, Homo sapien
gtccacatttgtggaggcctccgtt

SEQ ID NO: 1651195 - DNA, 25 bp, Homo sapien
gaggcctccgttactctttttctca

SEQ ID NO: 1651196 - DNA, 25 bp, Homo sapien
ttgtctctaacaagggtcagcctgt

SEQ ID NO: 1651197 - DNA, 25 bp, Homo sapien
ttgaaagcgagggacatgtgactcc

SEQ ID NO: 1651198 - DNA, 25 bp, Homo sapien
cagagcttttggatgactaggtgcc

SEQ ID NO: 1651199 - DNA, 25 bp, Homo sapien
gagacaggatcagcgtatgttgacc

SEQ ID NO: 1651200 - DNA, 25 bp, Homo sapien
tgctctgtaccagcatatatgctgt

SEQ ID NO: 1651201 - DNA, 25 bp, Homo sapien
atatatgctgtagatggccaaatcc

SEQ ID NO: 1651202 - DNA, 25 bp, Homo sapien
tgtggtttgctctgtaccagcatat

SEQ ID NO: 1651203 - DNA, 25 bp, Homo sapien
ccctcatgcccttgggtaacggtgg

SEQ ID NO: 1651204 - DNA, 25 bp, Homo sapien
ttaagggcttgaggactgtggtaaa

SEQ ID NO: 1651205 - DNA, 25 bp, Homo sapien
tcaagctttaagggcttgaggactg

SEQ ID NO: 1651206 - DNA, 25 bp, Homo sapien
gctttaagggcttgaggactgtggt

SEQ ID NO: 1651207 - DNA, 25 bp, Homo sapien
taagggcttgaggactgtggtaaaa

SEQ ID NO: 1651208 - DNA, 25 bp, Homo sapien
ctgtcaagatagcttggctgtgaga

SEQ ID NO: 1651209 - DNA, 25 bp, Homo sapien
tcaagatagcttggctgtgagatgc

SEQ ID NO: 1651210 - DNA, 25 bp, Homo sapien
gctgtcaagatagcttggctgtgag

SEQ ID NO: 1651211 - DNA, 25 bp, Homo sapien
agagctgtcaagatagcttggctgt

SEQ ID NO: 1651212 - DNA, 25 bp, Homo sapien
taagccagagaatagtgttcccttc

SEQ ID NO: 1651213 - DNA, 25 bp, Homo sapien
taataagccagagaatagtgttccc

SEQ ID NO: 1651214 - DNA, 25 bp, Homo sapien
cagagaatagtgttcccttcttttc

SEQ ID NO: 1651215 - DNA, 25 bp, Homo sapien
taaattcagtggtttaataagccag

SEQ ID NO: 1651216 - DNA, 25 bp, Homo sapien
ggccctgcagccctatatcaagaga

SEQ ID NO: 1651217 - DNA, 25 bp, Homo sapien
tggaaagtcttgtttgtgcaaccgc

SEQ ID NO: 1651218 - DNA, 25 bp, Homo sapien
tgcgcccgagtgctgacgagtttca

SEQ ID NO: 1651219 - DNA, 25 bp, Homo sapien
ttttcaacctcatcgaagcacggcc

SEQ ID NO: 1651220 - DNA, 25 bp, Homo sapien
cttttcttcctgagtgctacaggca

SEQ ID NO: 1651221 - DNA, 25 bp, Homo sapien
tatagctgagctttttgtactagga

SEQ ID NO: 1651222 - DNA, 25 bp, Homo sapien
gaatgtcctcttcatgtaatgtgct

SEQ ID NO: 1651223 - DNA, 25 bp, Homo sapien
ccttccaggaccaagtgtggcctct

SEQ ID NO: 1651224 - DNA, 25 bp, Homo sapien
gacacacaagaccatgaaccgcggt

SEQ ID NO: 1651225 - DNA, 25 bp, Homo sapien
gggcacttccttgatggacacataa

SEQ ID NO: 1651226 - DNA, 25 bp, Homo sapien
gaagccaaccagtggtagcctggaa

SEQ ID NO: 1651227 - DNA, 25 bp, Homo sapien
tgtgtttcccgatacctgcccttgg

SEQ ID NO: 1651228 - DNA, 25 bp, Homo sapien
tcagatggcaaggatgtggtagtag

SEQ ID NO: 1651229 - DNA, 25 bp, Homo sapien
gaggatgtttaatgagcctctccag

SEQ ID NO: 1651230 - DNA, 25 bp, Homo sapien
tctcgcattcgtgcaatgaggatgt

SEQ ID NO: 1651231 - DNA, 25 bp, Homo sapien
atgaggatgtttaatgagcctctcc

SEQ ID NO: 1651232 - DNA, 25 bp, Homo sapien
aggatctgtgcttctcgcattcgtg

SEQ ID NO: 1651233 - DNA, 25 bp, Homo sapien
ttttccaagccccatctgaaagcgt

SEQ ID NO: 1651234 - DNA, 25 bp, Homo sapien
cttgttggagctgactttgccgtcc

SEQ ID NO: 1651235 - DNA, 25 bp, Homo sapien
ccatctgaaagcgtgcctcttctct

SEQ ID NO: 1651236 - DNA, 25 bp, Homo sapien
cgtccctcctgtggacatccatgcc

SEQ ID NO: 1651237 - DNA, 25 bp, Homo sapien
cacagcgtttgtggaaactatacca

SEQ ID NO: 1651238 - DNA, 25 bp, Homo sapien
aactataccactgatcgagagcaag

SEQ ID NO: 1651239 - DNA, 25 bp, Homo sapien
gcaagccaggacgatgatgcagcct

SEQ ID NO: 1651240 - DNA, 25 bp, Homo sapien
gcagccttgttctcaagggatttat

SEQ ID NO: 1651241 - DNA, 25 bp, Homo sapien
atcccctgccattggatcctctcca

SEQ ID NO: 1651242 - DNA, 25 bp, Homo sapien
cccctgccattggatcctctccaaa

SEQ ID NO: 1651243 - DNA, 25 bp, Homo sapien
cccatcccctgccattggatcctct

SEQ ID NO: 1651244 - DNA, 25 bp, Homo sapien
catcccctgccattggatcctctcc

SEQ ID NO: 1651245 - DNA, 25 bp, Homo sapien
cctttcctggcgatgcaggcgtgca

SEQ ID NO: 1651246 - DNA, 25 bp, Homo sapien
ttcctggcgatgcaggcgtgcagat

SEQ ID NO: 1651247 - DNA, 25 bp, Homo sapien
ttccctttcctggcgatgcaggcgt

SEQ ID NO: 1651248 - DNA, 25 bp, Homo sapien
gcgtgcagatggtcagcggcggcca

SEQ ID NO: 1651249 - DNA, 25 bp, Homo sapien
caccatagggtagaaggtgtccagg

SEQ ID NO: 1651250 - DNA, 25 bp, Homo sapien
tacagcagggctccactgaagatgg

SEQ ID NO: 1651251 - DNA, 25 bp, Homo sapien
ttggagcgggatagcccagtcagca

SEQ ID NO: 1651252 - DNA, 25 bp, Homo sapien
ggagtctgtgcttgaccacacccag

SEQ ID NO: 1651253 - DNA, 25 bp, Homo sapien
ctagagaggcacccactgggtcctt

SEQ ID NO: 1651254 - DNA, 25 bp, Homo sapien
actagagaggcacccactgggtcct

SEQ ID NO: 1651255 - DNA, 25 bp, Homo sapien
tagagaggcacccactgggtccttt

SEQ ID NO: 1651256 - DNA, 25 bp, Homo sapien
cacagggcacagacactgctggtgc

SEQ ID NO: 1651257 - DNA, 25 bp, Homo sapien
tgcctctgggtcagagtcacctcct

SEQ ID NO: 1651258 - DNA, 25 bp, Homo sapien
ctcgctgaggactgttgagggacct

SEQ ID NO: 1651259 - DNA, 25 bp, Homo sapien
ttccaaccagggcagctgaaaatgc

SEQ ID NO: 1651260 - DNA, 25 bp, Homo sapien
ttccactcgggtctgcggtcagggc

SEQ ID NO: 1651261 - DNA, 25 bp, Homo sapien
tccactcgggtctgcggtcagggcc

SEQ ID NO: 1651262 - DNA, 25 bp, Homo sapien
cttccactcgggtctgcggtcaggg

SEQ ID NO: 1651263 - DNA, 25 bp, Homo sapien
tccttcgtgagaccctcctgtggtt

SEQ ID NO: 1651264 - DNA, 25 bp, Homo sapien
cacacatatgtctccggccgagacg

SEQ ID NO: 1651265 - DNA, 25 bp, Homo sapien
tagcaatcatctgcgctttaacagg

SEQ ID NO: 1651266 - DNA, 25 bp, Homo sapien
tcatctatcccaaaggagcccgagc

SEQ ID NO: 1651267 - DNA, 25 bp, Homo sapien
tcagtgtgtcgcagaacaaggctct

SEQ ID NO: 1651268 - DNA, 25 bp, Homo sapien
ctgaaaattgacagccagggtcagt

SEQ ID NO: 1651269 - DNA, 25 bp, Homo sapien
ggtcagtgtgtcgcagaacaaggct

SEQ ID NO: 1651270 - DNA, 25 bp, Homo sapien
gccagggtcagtgtgtcgcagaaca

SEQ ID NO: 1651271 - DNA, 25 bp, Homo sapien
gagggcagcgcagggatccggggaa

SEQ ID NO: 1651272 - DNA, 25 bp, Homo sapien
gcttcgtggctctgaggtgtaacgg

SEQ ID NO: 1651273 - DNA, 25 bp, Homo sapien
ctgggtctggttgagtcgctgcttt

SEQ ID NO: 1651274 - DNA, 25 bp, Homo sapien
tgcggcagggagcgggcgccggctt

SEQ ID NO: 1651275 - DNA, 25 bp, Homo sapien
tgattagtgcatggtcagccctcaa

SEQ ID NO: 1651276 - DNA, 25 bp, Homo sapien
tttgaggctccaacctgattagtgc

SEQ ID NO: 1651277 - DNA, 25 bp, Homo sapien
tttaaccggaacatcgtctagctgg

SEQ ID NO: 1651278 - DNA, 25 bp, Homo sapien
gcagcgatgctacaggcctaagtta

SEQ ID NO: 1651279 - DNA, 25 bp, Homo sapien
agtagaaagcccggatggcggcttt

SEQ ID NO: 1651280 - DNA, 25 bp, Homo sapien
aggggtcagcagagcgccgccctgc

SEQ ID NO: 1651281 - DNA, 25 bp, Homo sapien
ccatggccatcccgggaagagtaga

SEQ ID NO: 1651282 - DNA, 25 bp, Homo sapien
gaagtaaggccggattagaaggaga

SEQ ID NO: 1651283 - DNA, 25 bp, Homo sapien
tctcatggctggcatagcacctgcc

SEQ ID NO: 1651284 - DNA, 25 bp, Homo sapien
ggctgcacagccaggaagtgctgtc

SEQ ID NO: 1651285 - DNA, 25 bp, Homo sapien
agccaggaagtgctgtcaggagaca

SEQ ID NO: 1651286 - DNA, 25 bp, Homo sapien
catggctggcatagcacctgcccag

SEQ ID NO: 1651287 - DNA, 25 bp, Homo sapien
cactcgtacatggggctcggctgca

SEQ ID NO: 1651288 - DNA, 25 bp, Homo sapien
ctcgtacatggggctcggctgcagg

SEQ ID NO: 1651289 - DNA, 25 bp, Homo sapien
actcgtacatggggctcggctgcag

SEQ ID NO: 1651290 - DNA, 25 bp, Homo sapien
tcactcgtacatggggctcggctgc

SEQ ID NO: 1651291 - DNA, 25 bp, Homo sapien
gatccgaggtgctacattctgaccc

SEQ ID NO: 1651292 - DNA, 25 bp, Homo sapien
tagctccgatccgaggtgctacatt

SEQ ID NO: 1651293 - DNA, 25 bp, Homo sapien
agacagtgcccggactccgctgttc

SEQ ID NO: 1651294 - DNA, 25 bp, Homo sapien
ctccgctgttccccttttggagtgg

SEQ ID NO: 1651295 - DNA, 25 bp, Homo sapien
ccgcagcgctggtcgcgcgtctcca

SEQ ID NO: 1651296 - DNA, 25 bp, Homo sapien
cagcgctggtcgcgcgtctccaagt

SEQ ID NO: 1651297 - DNA, 25 bp, Homo sapien
cgcccgcagcgctggtcgcgcgtct

SEQ ID NO: 1651298 - DNA, 25 bp, Homo sapien
gcagcgctggtcgcgcgtctccaag

SEQ ID NO: 1651299 - DNA, 25 bp, Homo sapien
cacgtggcgccatcccgagaggctg

SEQ ID NO: 1651300 - DNA, 25 bp, Homo sapien
gggatgtggcggtccgaacacgtgg

SEQ ID NO: 1651301 - DNA, 25 bp, Homo sapien
ctgggccccgagtgtcgggtcaatc

SEQ ID NO: 1651302 - DNA, 25 bp, Homo sapien
ggccccgagtgtcgggtcaatcctg

SEQ ID NO: 1651303 - DNA, 25 bp, Homo sapien
gggctggggcgtgcgtgcctggccc

SEQ ID NO: 1651304 - DNA, 25 bp, Homo sapien
ggctggggcgtgcgtgcctggcccg

SEQ ID NO: 1651305 - DNA, 25 bp, Homo sapien
ccgggggctggggcgtgcgtgcctg

SEQ ID NO: 1651306 - DNA, 25 bp, Homo sapien
gctggggcgtgcgtgcctggcccgg

SEQ ID NO: 1651307 - DNA, 25 bp, Homo sapien
tgcaatgcaatggccctaactcagc

SEQ ID NO: 1651308 - DNA, 25 bp, Homo sapien
gcaatgcaatggccctaactcagct

SEQ ID NO: 1651309 - DNA, 25 bp, Homo sapien
tcccggctctagtccctggatggct

SEQ ID NO: 1651310 - DNA, 25 bp, Homo sapien
gaacctcttaccacttggcggctgg

SEQ ID NO: 1651311 - DNA, 25 bp, Homo sapien
tacctggactgggaaggcgaatgct

SEQ ID NO: 1651312 - DNA, 25 bp, Homo sapien
tctatctgggtctctcacaggtaag

SEQ ID NO: 1651313 - DNA, 25 bp, Homo sapien
agtcctcgggcgctgtccagcgcct

SEQ ID NO: 1651314 - DNA, 25 bp, Homo sapien
ttaatgtcccagtcctcgggcgctg

SEQ ID NO: 1651315 - DNA, 25 bp, Homo sapien
ggtcaggtttaatgtcccagtcctc

SEQ ID NO: 1651316 - DNA, 25 bp, Homo sapien
caggtttaatgtcccagtcctcggg

SEQ ID NO: 1651317 - DNA, 25 bp, Homo sapien
ggtggcggccgacccgcctcatcag

SEQ ID NO: 1651318 - DNA, 25 bp, Homo sapien
ctcgggtggcggccgacccgcctca

SEQ ID NO: 1651319 - DNA, 25 bp, Homo sapien
cggccgacccgcctcatcagggcct

SEQ ID NO: 1651320 - DNA, 25 bp, Homo sapien
ggcggccgacccgcctcatcagggc

SEQ ID NO: 1651321 - DNA, 25 bp, Homo sapien
aggcccacggcgcacgcccagagca

SEQ ID NO: 1651322 - DNA, 25 bp, Homo sapien
tgccccatgtagaggcccacggcgc

SEQ ID NO: 1651323 - DNA, 25 bp, Homo sapien
catgtagaggcccacggcgcacgcc

SEQ ID NO: 1651324 - DNA, 25 bp, Homo sapien
tgtagaggcccacggcgcacgccca

SEQ ID NO: 1651325 - DNA, 25 bp, Homo sapien
gccccccagcgtcagctgcatgggt

SEQ ID NO: 1651326 - DNA, 25 bp, Homo sapien
ccagcgtcagctgcatgggtcctcg

SEQ ID NO: 1651327 - DNA, 25 bp, Homo sapien
agcgtcagctgcatgggtcctcgca

SEQ ID NO: 1651328 - DNA, 25 bp, Homo sapien
agctgcatgggtcctcgcagcgccg

SEQ ID NO: 1651329 - DNA, 25 bp, Homo sapien
aggcgctgccccacaccacgcacag

SEQ ID NO: 1651330 - DNA, 25 bp, Homo sapien
acaccacgcacaggccgcccagcag

SEQ ID NO: 1651331 - DNA, 25 bp, Homo sapien
ggcgctgccccacaccacgcacagg

SEQ ID NO: 1651332 - DNA, 25 bp, Homo sapien
cacaggccgcccagcaggaagaagc

SEQ ID NO: 1651333 - DNA, 25 bp, Homo sapien
gtcgggggatggtctgggagcaaag

SEQ ID NO: 1651334 - DNA, 25 bp, Homo sapien
gccagggttgaggagacaggaacag

SEQ ID NO: 1651335 - DNA, 25 bp, Homo sapien
aagccagggttgaggagacaggaac

SEQ ID NO: 1651336 - DNA, 25 bp, Homo sapien
tagcaacagggccaaggtcggggga

SEQ ID NO: 1651337 - DNA, 25 bp, Homo sapien
gcattccctggttccgtggggcgag

SEQ ID NO: 1651338 - DNA, 25 bp, Homo sapien
cattccctggttccgtggggcgaga

SEQ ID NO: 1651339 - DNA, 25 bp, Homo sapien
attccctggttccgtggggcgagag

SEQ ID NO: 1651340 - DNA, 25 bp, Homo sapien
ccatgtcactctgcatgaaggagat

SEQ ID NO: 1651341 - DNA, 25 bp, Homo sapien
tctccaatcctgaacttccccctct

SEQ ID NO: 1651342 - DNA, 25 bp, Homo sapien
gagctttctcccgattggttgtccc

SEQ ID NO: 1651343 - DNA, 25 bp, Homo sapien
tcttctgcggggatccacactcccg

SEQ ID NO: 1651344 - DNA, 25 bp, Homo sapien
caatcctgaacttccccctcttctg

SEQ ID NO: 1651345 - DNA, 25 bp, Homo sapien
ggcctctgcaatcgggatggaccca

SEQ ID NO: 1651346 - DNA, 25 bp, Homo sapien
tggcctctgcaatcgggatggaccc

SEQ ID NO: 1651347 - DNA, 25 bp, Homo sapien
gtggcctctgcaatcgggatggacc

SEQ ID NO: 1651348 - DNA, 25 bp, Homo sapien
gcctctgcaatcgggatggacccat

SEQ ID NO: 1651349 - DNA, 25 bp, Homo sapien
gtctcgtgcgcttttcggaggagcc

SEQ ID NO: 1651350 - DNA, 25 bp, Homo sapien
aggagccaggcgtccgcacgatcca

SEQ ID NO: 1651351 - DNA, 25 bp, Homo sapien
aggcgtccgcacgatccagctcgga

SEQ ID NO: 1651352 - DNA, 25 bp, Homo sapien
ctcgtgcgcttttcggaggagccag

SEQ ID NO: 1651353 - DNA, 25 bp, Homo sapien
gacgggcaaggcgagcggcccgagc

SEQ ID NO: 1651354 - DNA, 25 bp, Homo sapien
cggcagtagcgacctccggaagcga

SEQ ID NO: 1651355 - DNA, 25 bp, Homo sapien
ccgctgaggcggcagtagcgacctc

SEQ ID NO: 1651356 - DNA, 25 bp, Homo sapien
acctccggaagcgaagacgggcaag

SEQ ID NO: 1651357 - DNA, 25 bp, Homo sapien
tccggtaggttgcaacccatgtcac

SEQ ID NO: 1651358 - DNA, 25 bp, Homo sapien
ggttgcaacccatgtcactcaggat

SEQ ID NO: 1651359 - DNA, 25 bp, Homo sapien
ggtaggttgcaacccatgtcactca

SEQ ID NO: 1651360 - DNA, 25 bp, Homo sapien
taggttgcaacccatgtcactcagg

SEQ ID NO: 1651361 - DNA, 25 bp, Homo sapien
cgccactcaggtccggcgtgaactg

SEQ ID NO: 1651362 - DNA, 25 bp, Homo sapien
cattggtcggaatggcagtgattcc

SEQ ID NO: 1651363 - DNA, 25 bp, Homo sapien
attggctatgcgctcgccactcagg

SEQ ID NO: 1651364 - DNA, 25 bp, Homo sapien
ctgtccattggtcggaatggcagtg

SEQ ID NO: 1651365 - DNA, 25 bp, Homo sapien
ctcgaccacatcctggtgctggtgg

SEQ ID NO: 1651366 - DNA, 25 bp, Homo sapien
tcaggctccacgcacttcctgagcg

SEQ ID NO: 1651367 - DNA, 25 bp, Homo sapien
gctccacgcacttcctgagcgacat

SEQ ID NO: 1651368 - DNA, 25 bp, Homo sapien
tcagcctccataccttcctccaatg

SEQ ID NO: 1651369 - DNA, 25 bp, Homo sapien
aaagggtgtgaaatagtcatgcggc

SEQ ID NO: 1651370 - DNA, 25 bp, Homo sapien
aaaggcaggtgacgtttctggaaga

SEQ ID NO: 1651371 - DNA, 25 bp, Homo sapien
tggaagacagatatggagtataaaa

SEQ ID NO: 1651372 - DNA, 25 bp, Homo sapien
gtcatgcggcgatcattgtaaaaat

SEQ ID NO: 1651373 - DNA, 25 bp, Homo sapien
gaaagttcacaggtttgcgggcatg

SEQ ID NO: 1651374 - DNA, 25 bp, Homo sapien
taatactgacagaacgtgcgtgctc

SEQ ID NO: 1651375 - DNA, 25 bp, Homo sapien
taaaagctcggcctgatggcaaatg

SEQ ID NO: 1651376 - DNA, 25 bp, Homo sapien
tgaaaagacagtgatggtgcaccct

SEQ ID NO: 1651377 - DNA, 25 bp, Homo sapien
aaacatccttcagggatgccgcatc

SEQ ID NO: 1651378 - DNA, 25 bp, Homo sapien
taaaaacatccttcagggatgccgc

SEQ ID NO: 1651379 - DNA, 25 bp, Homo sapien
ctttaaaaacatccttcagggatgc

SEQ ID NO: 1651380 - DNA, 25 bp, Homo sapien
tccttcagggatgccgcatcctgct

SEQ ID NO: 1651381 - DNA, 25 bp, Homo sapien
tcgggtcgtagaggctgataccgct

SEQ ID NO: 1651382 - DNA, 25 bp, Homo sapien
ggccggactgttcccagcaaatggg

SEQ ID NO: 1651383 - DNA, 25 bp, Homo sapien
ttccagggcagacttgcggacgaac

SEQ ID NO: 1651384 - DNA, 25 bp, Homo sapien
gggtgtctgcttcaccgtcccgaag

SEQ ID NO: 1651385 - DNA, 25 bp, Homo sapien
tcactgggtttgtcgctggaaccgg

SEQ ID NO: 1651386 - DNA, 25 bp, Homo sapien
tgggcatggattgcagggccgcggg

SEQ ID NO: 1651387 - DNA, 25 bp, Homo sapien
gttggcgccctgtgtgctggaatcc

SEQ ID NO: 1651388 - DNA, 25 bp, Homo sapien
tcttgaggatgcgagacagaagttc

SEQ ID NO: 1651389 - DNA, 25 bp, Homo sapien
ctgcagctgtgaccgtgggtcccgc

SEQ ID NO: 1651390 - DNA, 25 bp, Homo sapien
cagggtcacgtccttcttgatgtgg

SEQ ID NO: 1651391 - DNA, 25 bp, Homo sapien
gatggaggtgacactgcttccaccc

SEQ ID NO: 1651392 - DNA, 25 bp, Homo sapien
ccgaggatcggagggtcccgaatca

SEQ ID NO: 1651393 - DNA, 25 bp, Homo sapien
cctggggcctgtgccccggcccctg

SEQ ID NO: 1651394 - DNA, 25 bp, Homo sapien
tgcacagcggcctggggcctgtgcc

SEQ ID NO: 1651395 - DNA, 25 bp, Homo sapien
gccgctcccctgcacagcggcctgg

SEQ ID NO: 1651396 - DNA, 25 bp, Homo sapien
caccgccgctcccctgcacagcggc

SEQ ID NO: 1651397 - DNA, 25 bp, Homo sapien
gcagctcttcgtagtgcccgtagtc

SEQ ID NO: 1651398 - DNA, 25 bp, Homo sapien
cctggcagctcttcgtagtgcccgt

SEQ ID NO: 1651399 - DNA, 25 bp, Homo sapien
agctcttcgtagtgcccgtagtcct

SEQ ID NO: 1651400 - DNA, 25 bp, Homo sapien
aagtcagggacaccggcgcctggct

SEQ ID NO: 1651401 - DNA, 25 bp, Homo sapien
tgtggcagggaagaaccgagggttc

SEQ ID NO: 1651402 - DNA, 25 bp, Homo sapien
ctgtggcagggaagaaccgagggtt

SEQ ID NO: 1651403 - DNA, 25 bp, Homo sapien
gtggcagggaagaaccgagggttca

SEQ ID NO: 1651404 - DNA, 25 bp, Homo sapien
tggcagggaagaaccgagggttcat

SEQ ID NO: 1651405 - DNA, 25 bp, Homo sapien
cggcaccgtgtccaaacctcgaagc

SEQ ID NO: 1651406 - DNA, 25 bp, Homo sapien
accgtgtccaaacctcgaagccctg

SEQ ID NO: 1651407 - DNA, 25 bp, Homo sapien
gtgtccaaacctcgaagccctgcct

SEQ ID NO: 1651408 - DNA, 25 bp, Homo sapien
ggcaccgtgtccaaacctcgaagcc

SEQ ID NO: 1651409 - DNA, 25 bp, Homo sapien
tcaaagagacttggacgaaggaaga

SEQ ID NO: 1651410 - DNA, 25 bp, Homo sapien
ctgctggtagaagttttcatagaag

SEQ ID NO: 1651411 - DNA, 25 bp, Homo sapien
catcccccaggagtccgggctccat

SEQ ID NO: 1651412 - DNA, 25 bp, Homo sapien
aggagtccgggctccatctccatgc

SEQ ID NO: 1651413 - DNA, 25 bp, Homo sapien
tcctgctgctggtagaagttttcat

SEQ ID NO: 1651414 - DNA, 25 bp, Homo sapien
cgggatagggggcatcattccagaa

SEQ ID NO: 1651415 - DNA, 25 bp, Homo sapien
ggatagggggcatcattccagaatg

SEQ ID NO: 1651416 - DNA, 25 bp, Homo sapien
ctggcgggatagggggcatcattcc

SEQ ID NO: 1651417 - DNA, 25 bp, Homo sapien
atagggggcatcattccagaatgtg

SEQ ID NO: 1651418 - DNA, 25 bp, Homo sapien
ccagggccgtagggcatcattggag

SEQ ID NO: 1651419 - DNA, 25 bp, Homo sapien
tccagggccgtagggcatcattgga

SEQ ID NO: 1651420 - DNA, 25 bp, Homo sapien
gcgtgcatgtctgcgtgcatgtcag

SEQ ID NO: 1651421 - DNA, 25 bp, Homo sapien
tgcatgtctgcgtgcatgtcagggt

SEQ ID NO: 1651422 - DNA, 25 bp, Homo sapien
cgtgcatgtcagggtgcatgtccgg

SEQ ID NO: 1651423 - DNA, 25 bp, Homo sapien
tgcgtgcatgtcagggtgcatgtcc

SEQ ID NO: 1651424 - DNA, 25 bp, Homo sapien
gtcggggtgcatgtcaggatgcatt

SEQ ID NO: 1651425 - DNA, 25 bp, Homo sapien
tcggggtgcatgtcaggatgcattg

SEQ ID NO: 1651426 - DNA, 25 bp, Homo sapien
cggggtgcatgtcaggatgcattgg

SEQ ID NO: 1651427 - DNA, 25 bp, Homo sapien
gggtgcatgtcaggatgcattggac

SEQ ID NO: 1651428 - DNA, 25 bp, Homo sapien
ctgggggtcccatgttgggcccagg

SEQ ID NO: 1651429 - DNA, 25 bp, Homo sapien
cgcccattggccctgggggtcccat

SEQ ID NO: 1651430 - DNA, 25 bp, Homo sapien
ttgggcccagggcccattggccctg

SEQ ID NO: 1651431 - DNA, 25 bp, Homo sapien
atgttgggcccagggcccattggcc

SEQ ID NO: 1651432 - DNA, 25 bp, Homo sapien
aaaaggtgcctgtgacggaagctgc

SEQ ID NO: 1651433 - DNA, 25 bp, Homo sapien
agggctgcagagccgaaggtcatgg

SEQ ID NO: 1651434 - DNA, 25 bp, Homo sapien
gggctgcagagccgaaggtcatggg

SEQ ID NO: 1651435 - DNA, 25 bp, Homo sapien
tgcctgtgacggaagctgccgagga

SEQ ID NO: 1651436 - DNA, 25 bp, Homo sapien
gtgggccgcaccacgatctcaaaca

SEQ ID NO: 1651437 - DNA, 25 bp, Homo sapien
gcaccacgatctcaaacaaggaggg

SEQ ID NO: 1651438 - DNA, 25 bp, Homo sapien
gccgcaccacgatctcaaacaagga

SEQ ID NO: 1651439 - DNA, 25 bp, Homo sapien
cagctgtcccgtgggccgcaccacg

SEQ ID NO: 1651440 - DNA, 25 bp, Homo sapien
gacagtggctcatgcaccggcatgg

SEQ ID NO: 1651441 - DNA, 25 bp, Homo sapien
cagtggctcatgcaccggcatgggc

SEQ ID NO: 1651442 - DNA, 25 bp, Homo sapien
acagtggctcatgcaccggcatggg

SEQ ID NO: 1651443 - DNA, 25 bp, Homo sapien
gtggctcatgcaccggcatgggcat

SEQ ID NO: 1651444 - DNA, 25 bp, Homo sapien
ctgcatgggcctgccgttgggagag

SEQ ID NO: 1651445 - DNA, 25 bp, Homo sapien
gggcctgccgttgggagaggttgga

SEQ ID NO: 1651446 - DNA, 25 bp, Homo sapien
catgggcctgccgttgggagaggtt

SEQ ID NO: 1651447 - DNA, 25 bp, Homo sapien
gcctgccgttgggagaggttggagc

SEQ ID NO: 1651448 - DNA, 25 bp, Homo sapien
gtttgggcagggggttgatgccctg

SEQ ID NO: 1651449 - DNA, 25 bp, Homo sapien
tttgggcagggggttgatgccctgc

SEQ ID NO: 1651450 - DNA, 25 bp, Homo sapien
tcatcctcggcacctgcttctgcat

SEQ ID NO: 1651451 - DNA, 25 bp, Homo sapien
gagctccctcgtctcttcggtcaga

SEQ ID NO: 1651452 - DNA, 25 bp, Homo sapien
aagagctccctcgtctcttcggtca

SEQ ID NO: 1651453 - DNA, 25 bp, Homo sapien
ggtcgtgggaaaacatgcagtcgtc

SEQ ID NO: 1651454 - DNA, 25 bp, Homo sapien
ccattgatgcagttcccagtggtgt

SEQ ID NO: 1651455 - DNA, 25 bp, Homo sapien
gttcatggcaaattaaggtaaatgc

SEQ ID NO: 1651456 - DNA, 25 bp, Homo sapien
catggcaaattaaggtaaatgcttc

SEQ ID NO: 1651457 - DNA, 25 bp, Homo sapien
tcatggcaaattaaggtaaatgctt

SEQ ID NO: 1651458 - DNA, 25 bp, Homo sapien
tggcaaattaaggtaaatgcttcat

SEQ ID NO: 1651459 - DNA, 25 bp, Homo sapien
cagttctcgcttctttgggagttcg

SEQ ID NO: 1651460 - DNA, 25 bp, Homo sapien
tgggagttcgatgtcatggctaaaa

SEQ ID NO: 1651461 - DNA, 25 bp, Homo sapien
tcagctctggcgcaaaatccagtga

SEQ ID NO: 1651462 - DNA, 25 bp, Homo sapien
tctggcgcaaaatccagtgatgtaa

SEQ ID NO: 1651463 - DNA, 25 bp, Homo sapien
tgctgctttgcattcacatcaacct

SEQ ID NO: 1651464 - DNA, 25 bp, Homo sapien
ttacgtttcaggctatatggattgg

SEQ ID NO: 1651465 - DNA, 25 bp, Homo sapien
gccggctgaactaatactgggttat

SEQ ID NO: 1651466 - DNA, 25 bp, Homo sapien
tgaactctgctatgaagtccaaggt

SEQ ID NO: 1651467 - DNA, 25 bp, Homo sapien
gcttgtcatggtcacgactccggta

SEQ ID NO: 1651468 - DNA, 25 bp, Homo sapien
gtgcagcgcccttccacgaagtact

SEQ ID NO: 1651469 - DNA, 25 bp, Homo sapien
atggtcacgactccggtagcttcca

SEQ ID NO: 1651470 - DNA, 25 bp, Homo sapien
cttccacgaagtacttgcaaatgac

SEQ ID NO: 1651471 - DNA, 25 bp, Homo sapien
cagagatgtgttaggtatggctgca

SEQ ID NO: 1651472 - DNA, 25 bp, Homo sapien
cagggctaattggatggttcaccta

SEQ ID NO: 1651473 - DNA, 25 bp, Homo sapien
gatggttcacctagaaccttctgaa

SEQ ID NO: 1651474 - DNA, 25 bp, Homo sapien
caggtgctgctaatgacatggtttt

SEQ ID NO: 1651475 - DNA, 25 bp, Homo sapien
gaagtcttcgtcatcgttcattccg

SEQ ID NO: 1651476 - DNA, 25 bp, Homo sapien
tcatcgttcattccgcccttgttca

SEQ ID NO: 1651477 - DNA, 25 bp, Homo sapien
gtcctcgtcatagaagtcttcgtca

SEQ ID NO: 1651478 - DNA, 25 bp, Homo sapien
gcccatgtcctcgtcatagaagtct

SEQ ID NO: 1651479 - DNA, 25 bp, Homo sapien
gagcccctgccacggcctcgactta

SEQ ID NO: 1651480 - DNA, 25 bp, Homo sapien
cattcctttccctcgacctcgggag

SEQ ID NO: 1651481 - DNA, 25 bp, Homo sapien
ttccctcgacctcgggagcccctgc

SEQ ID NO: 1651482 - DNA, 25 bp, Homo sapien
tcgacctcgggagcccctgccacgg

SEQ ID NO: 1651483 - DNA, 25 bp, Homo sapien
cctcggctgtccttggagcggcggt

SEQ ID NO: 1651484 - DNA, 25 bp, Homo sapien
tccttggagcggcggtactggttca

SEQ ID NO: 1651485 - DNA, 25 bp, Homo sapien
tagtcgtcgtctcccattggctcct

SEQ ID NO: 1651486 - DNA, 25 bp, Homo sapien
tccttggagtactcgtcatagtcgt

SEQ ID NO: 1651487 - DNA, 25 bp, Homo sapien
cgcggcctcgcgatcctccacggct

SEQ ID NO: 1651488 - DNA, 25 bp, Homo sapien
tccacggcttcctcggcccctgtag

SEQ ID NO: 1651489 - DNA, 25 bp, Homo sapien
ggcctcgcgatcctccacggcttcc

SEQ ID NO: 1651490 - DNA, 25 bp, Homo sapien
tctcttcctcgtagaaatcctcttc

SEQ ID NO: 1651491 - DNA, 25 bp, Homo sapien
tctcgtagtcctcgtacatgccata

SEQ ID NO: 1651492 - DNA, 25 bp, Homo sapien
cttggcacgccggtactggttcagc

SEQ ID NO: 1651493 - DNA, 25 bp, Homo sapien
tccatcttggagtatgccttcttgg

SEQ ID NO: 1651494 - DNA, 25 bp, Homo sapien
tttggtgaagtcgtcatagtcctcc

SEQ ID NO: 1651495 - DNA, 25 bp, Homo sapien
tgggagtagcagcgggcccaagtgt

SEQ ID NO: 1651496 - DNA, 25 bp, Homo sapien
ggagtagcagcgggcccaagtgttt

SEQ ID NO: 1651497 - DNA, 25 bp, Homo sapien
agtgggagtagcagcgggcccaagt

SEQ ID NO: 1651498 - DNA, 25 bp, Homo sapien
gagtagcagcgggcccaagtgtttc

SEQ ID NO: 1651499 - DNA, 25 bp, Homo sapien
cttggttgtctgggctgccttgttg

SEQ ID NO: 1651500 - DNA, 25 bp, Homo sapien
gattaaattaatacctgatggccca

SEQ ID NO: 1651501 - DNA, 25 bp, Homo sapien
attaatacctgatggcccaggactg

SEQ ID NO: 1651502 - DNA, 25 bp, Homo sapien
gaaacacaagcagttgaactcctcc

SEQ ID NO: 1651503 - DNA, 25 bp, Homo sapien
tacttgcggtgacctttctcactgg

SEQ ID NO: 1651504 - DNA, 25 bp, Homo sapien
gggctgaaatccgagtcatctgaga

SEQ ID NO: 1651505 - DNA, 25 bp, Homo sapien
gctgtactctctgtacttgcggtga

SEQ ID NO: 1651506 - DNA, 25 bp, Homo sapien
agtcatcgctagaagaagcatggcg

SEQ ID NO: 1651507 - DNA, 25 bp, Homo sapien
tcaggccctccggaggtatcctggg

SEQ ID NO: 1651508 - DNA, 25 bp, Homo sapien
ttcagtctcctgtgggacttctcct

SEQ ID NO: 1651509 - DNA, 25 bp, Homo sapien
gctctttcttccgtttccgcttcag

SEQ ID NO: 1651510 - DNA, 25 bp, Homo sapien
ttttctttccggcttctctcaggcc

SEQ ID NO: 1651511 - DNA, 25 bp, Homo sapien
ctgctgtgagcgaagtgagaccctg

SEQ ID NO: 1651512 - DNA, 25 bp, Homo sapien
gacaggaaccgaaggcctgactgct

SEQ ID NO: 1651513 - DNA, 25 bp, Homo sapien
aatcccaccatgaacacagggtttg

SEQ ID NO: 1651514 - DNA, 25 bp, Homo sapien
cgaaggcctgactgctgtgagcgaa

SEQ ID NO: 1651515 - DNA, 25 bp, Homo sapien
tgagaaccgctggaaacaggctcag

SEQ ID NO: 1651516 - DNA, 25 bp, Homo sapien
aaggtctgacccaccctcgtcagtc

SEQ ID NO: 1651517 - DNA, 25 bp, Homo sapien
caggtcacaaggtctgacccaccct

SEQ ID NO: 1651518 - DNA, 25 bp, Homo sapien
acaaaagccccatgagaaccgctgg

SEQ ID NO: 1651519 - DNA, 25 bp, Homo sapien
ctccagatagtggaaccccttctgg

SEQ ID NO: 1651520 - DNA, 25 bp, Homo sapien
gatagtggaaccccttctggctccc

SEQ ID NO: 1651521 - DNA, 25 bp, Homo sapien
tccagatagtggaaccccttctggc

SEQ ID NO: 1651522 - DNA, 25 bp, Homo sapien
cagatagtggaaccccttctggctc

SEQ ID NO: 1651523 - DNA, 25 bp, Homo sapien
caaagaacagatctggacgcccact

SEQ ID NO: 1651524 - DNA, 25 bp, Homo sapien
ctccccctggtcaaagaacagatct

SEQ ID NO: 1651525 - DNA, 25 bp, Homo sapien
ggtatttcggttcccattttcagca

SEQ ID NO: 1651526 - DNA, 25 bp, Homo sapien
tgctcctccccctggtcaaagaaca

SEQ ID NO: 1651527 - DNA, 25 bp, Homo sapien
ccagaaaccaagaacaaatgtgctc

SEQ ID NO: 1651528 - DNA, 25 bp, Homo sapien
aaaccaagaacaaatgtgctctgtc

SEQ ID NO: 1651529 - DNA, 25 bp, Homo sapien
ctaggttcatcaaccagaaaccaag

SEQ ID NO: 1651530 - DNA, 25 bp, Homo sapien
tacctaggttcatcaaccagaaacc

SEQ ID NO: 1651531 - DNA, 25 bp, Homo sapien
tgacatgcctgtgagctttttaaat

SEQ ID NO: 1651532 - DNA, 25 bp, Homo sapien
caataaaccgttgtgttgacatgcc

SEQ ID NO: 1651533 - DNA, 25 bp, Homo sapien
tactggggcttctaggtcttaatgg

SEQ ID NO: 1651534 - DNA, 25 bp, Homo sapien
atagtttcaaattcactgaacattg

SEQ ID NO: 1651535 - DNA, 25 bp, Homo sapien
tagcctttggaacttgggtcatcag

SEQ ID NO: 1651536 - DNA, 25 bp, Homo sapien
cagacatttcttgcaggatatcgta

SEQ ID NO: 1651537 - DNA, 25 bp, Homo sapien
ggagatttcttcctcccgtaactga

SEQ ID NO: 1651538 - DNA, 25 bp, Homo sapien
tgcaattcattttgggctgacccag

SEQ ID NO: 1651539 - DNA, 25 bp, Homo sapien
tgtaaaacacatcagaagtacagtg

SEQ ID NO: 1651540 - DNA, 25 bp, Homo sapien
tccaacatgactgggcgtgtaacac

SEQ ID NO: 1651541 - DNA, 25 bp, Homo sapien
gtaacacgtttgcatcaacttttca

SEQ ID NO: 1651542 - DNA, 25 bp, Homo sapien
taacggaacttatgcttgtaaaaca

SEQ ID NO: 1651543 - DNA, 25 bp, Homo sapien
ggaaccattaatttgaatacctgca

SEQ ID NO: 1651544 - DNA, 25 bp, Homo sapien
tacaaatggacttgaagtatccact

SEQ ID NO: 1651545 - DNA, 25 bp, Homo sapien
agtaagcttgtctcctacaaatgga

SEQ ID NO: 1651546 - DNA, 25 bp, Homo sapien
aatccagtaagcttgtctcctacaa

SEQ ID NO: 1651547 - DNA, 25 bp, Homo sapien
atcaaatccagtaagcttgtctcct

SEQ ID NO: 1651548 - DNA, 25 bp, Homo sapien
caagggtctgaaaacatacgggcct

SEQ ID NO: 1651549 - DNA, 25 bp, Homo sapien
tgaaatggaaagaaggatgccaagg

SEQ ID NO: 1651550 - DNA, 25 bp, Homo sapien
gaacatatcaattcactctcaagca

SEQ ID NO: 1651551 - DNA, 25 bp, Homo sapien
tgcaagtctaaaagggctcaacagg

SEQ ID NO: 1651552 - DNA, 25 bp, Homo sapien
cgtgtaagcacctttgagtaatgca

SEQ ID NO: 1651553 - DNA, 25 bp, Homo sapien
ccttagaggtcgaataaagcgtgta

SEQ ID NO: 1651554 - DNA, 25 bp, Homo sapien
tcccaacccattgtaagacatacac

SEQ ID NO: 1651555 - DNA, 25 bp, Homo sapien
tctgacataagagaactccttagag

SEQ ID NO: 1651556 - DNA, 25 bp, Homo sapien
caacgagggcttagcgaacagacct

SEQ ID NO: 1651557 - DNA, 25 bp, Homo sapien
tagcgaacagacctttgctaatctg

SEQ ID NO: 1651558 - DNA, 25 bp, Homo sapien
agggcttagcgaacagacctttgct

SEQ ID NO: 1651559 - DNA, 25 bp, Homo sapien
gcccaacgagggcttagcgaacaga

SEQ ID NO: 1651560 - DNA, 25 bp, Homo sapien
aaactgctgcacttgtgtctctgaa

SEQ ID NO: 1651561 - DNA, 25 bp, Homo sapien
gctgcacttgtgtctctgaatgtgg

SEQ ID NO: 1651562 - DNA, 25 bp, Homo sapien
ctgaatgtgggtggcatttctttta

SEQ ID NO: 1651563 - DNA, 25 bp, Homo sapien
tctgaatgtgggtggcatttctttt

SEQ ID NO: 1651564 - DNA, 25 bp, Homo sapien
ccagggctgcgacggagtagccatc

SEQ ID NO: 1651565 - DNA, 25 bp, Homo sapien
ggctgaaacccaccgtccgtgtcca

SEQ ID NO: 1651566 - DNA, 25 bp, Homo sapien
tgcgacggagtagccatctgtccag

SEQ ID NO: 1651567 - DNA, 25 bp, Homo sapien
agactcgctttcctgccggctgaaa

SEQ ID NO: 1651568 - DNA, 25 bp, Homo sapien
ctgaaacgcgccgggctgaccccat

SEQ ID NO: 1651569 - DNA, 25 bp, Homo sapien
gaaacagtgggcgaaccctgcaccc

SEQ ID NO: 1651570 - DNA, 25 bp, Homo sapien
caactccttctgctcgagcagggga

SEQ ID NO: 1651571 - DNA, 25 bp, Homo sapien
tcgccctgaaacgcgccgggctgac

SEQ ID NO: 1651572 - DNA, 25 bp, Homo sapien
tacgaaaagcgagaggacccctgcc

SEQ ID NO: 1651573 - DNA, 25 bp, Homo sapien
ctacgaaaagcgagaggacccctgc

SEQ ID NO: 1651574 - DNA, 25 bp, Homo sapien
catggcgcccaaaaaagacagagcg

SEQ ID NO: 1651575 - DNA, 25 bp, Homo sapien
ctcagcatggcgcccaaaaaagaca

SEQ ID NO: 1651576 - DNA, 25 bp, Homo sapien
aagacagagcgagagcgagggagag

SEQ ID NO: 1651577 - DNA, 25 bp, Homo sapien
cagcatggcgcccaaaaaagacaga

SEQ ID NO: 1651578 - DNA, 25 bp, Homo sapien
cctcctccgcggcccggcccaacat

SEQ ID NO: 1651579 - DNA, 25 bp, Homo sapien
tcctcctcctccgcggcccggccca

SEQ ID NO: 1651580 - DNA, 25 bp, Homo sapien
tcctcctccgcggcccggcccaaca

SEQ ID NO: 1651581 - DNA, 25 bp, Homo sapien
tcctcctcctcctccgcggcccggc

SEQ ID NO: 1651582 - DNA, 25 bp, Homo sapien
ggaggaggcgaaggcgttgatggcg

SEQ ID NO: 1651583 - DNA, 25 bp, Homo sapien
gaggaggcgaaggcgttgatggcgg

SEQ ID NO: 1651584 - DNA, 25 bp, Homo sapien
tgttaatgcacgaaaaaggactgct

SEQ ID NO: 1651585 - DNA, 25 bp, Homo sapien
taatgcacgaaaaaggactgcttgg

SEQ ID NO: 1651586 - DNA, 25 bp, Homo sapien
cacgaaaaaggactgcttgggcgtg

SEQ ID NO: 1651587 - DNA, 25 bp, Homo sapien
gggatgttaatgcacgaaaaaggac

SEQ ID NO: 1651588 - DNA, 25 bp, Homo sapien
aaagctggaggccaggtgccgagag

SEQ ID NO: 1651589 - DNA, 25 bp, Homo sapien
ctggaggccaggtgccgagagtcgg

SEQ ID NO: 1651590 - DNA, 25 bp, Homo sapien
agctggaggccaggtgccgagagtc

SEQ ID NO: 1651591 - DNA, 25 bp, Homo sapien
cgaaagctggaggccaggtgccgag

SEQ ID NO: 1651592 - DNA, 25 bp, Homo sapien
tcagtgtcatgatggaacattgtgg

SEQ ID NO: 1651593 - DNA, 25 bp, Homo sapien
tgtcatgatggaacattgtggaaca

SEQ ID NO: 1651594 - DNA, 25 bp, Homo sapien
tgatggaacattgtggaacattgtc

SEQ ID NO: 1651595 - DNA, 25 bp, Homo sapien
tcatgatggaacattgtggaacatt

SEQ ID NO: 1651596 - DNA, 25 bp, Homo sapien
agcaaaacaccagccctgggttaca

SEQ ID NO: 1651597 - DNA, 25 bp, Homo sapien
aagcagcaaaacaccagccctgggt

SEQ ID NO: 1651598 - DNA, 25 bp, Homo sapien
gcagcaaaacaccagccctgggtta

SEQ ID NO: 1651599 - DNA, 25 bp, Homo sapien
tttaaagcagcaaaacaccagccct

SEQ ID NO: 1651600 - DNA, 25 bp, Homo sapien
cagcagtaagagcagagtcttttcc

SEQ ID NO: 1651601 - DNA, 25 bp, Homo sapien
tgttgcatgtgagtgggctgcactc

SEQ ID NO: 1651602 - DNA, 25 bp, Homo sapien
cgctcagctggatgaactatttgaa

SEQ ID NO: 1651603 - DNA, 25 bp, Homo sapien
ctcctcttgatagtgggatcaggtg

SEQ ID NO: 1651604 - DNA, 25 bp, Homo sapien
cataggcagccatcgctatttgggt

SEQ ID NO: 1651605 - DNA, 25 bp, Homo sapien
tgggtatgacattccccagtgggtt

SEQ ID NO: 1651606 - DNA, 25 bp, Homo sapien
ctttgcaaagcaggccataggcagc

SEQ ID NO: 1651607 - DNA, 25 bp, Homo sapien
gggtttttggtgtccagtaatgaca

SEQ ID NO: 1651608 - DNA, 25 bp, Homo sapien
gaggccaatagtccaagaccaacat

SEQ ID NO: 1651609 - DNA, 25 bp, Homo sapien
ggccaatagtccaagaccaacatgg

SEQ ID NO: 1651610 - DNA, 25 bp, Homo sapien
gccaatagtccaagaccaacatggg

SEQ ID NO: 1651611 - DNA, 25 bp, Homo sapien
caatagtccaagaccaacatgggca

SEQ ID NO: 1651612 - DNA, 25 bp, Homo sapien
gccttccaagtactgggattatagg

SEQ ID NO: 1651613 - DNA, 25 bp, Homo sapien
cgcctcggccttccaagtactggga

SEQ ID NO: 1651614 - DNA, 25 bp, Homo sapien
tcggccttccaagtactgggattat

SEQ ID NO: 1651615 - DNA, 25 bp, Homo sapien
ccgcctcggccttccaagtactggg

SEQ ID NO: 1651616 - DNA, 25 bp, Homo sapien
gcagcggtgtgatttcggctcaccg

SEQ ID NO: 1651617 - DNA, 25 bp, Homo sapien
gacagcctctctctgtagcccagac

SEQ ID NO: 1651618 - DNA, 25 bp, Homo sapien
tttgagacagcctctctctgtagcc

SEQ ID NO: 1651619 - DNA, 25 bp, Homo sapien
gagacagcctctctctgtagcccag

SEQ ID NO: 1651620 - DNA, 25 bp, Homo sapien
ctctcttttaggtactgcttctccg

SEQ ID NO: 1651621 - DNA, 25 bp, Homo sapien
tcaggagagcctactactgaatttc

SEQ ID NO: 1651622 - DNA, 25 bp, Homo sapien
tgcttctccgagatggccccagtgt

SEQ ID NO: 1651623 - DNA, 25 bp, Homo sapien
ggcacaggaaattgtgaaggtaaaa

SEQ ID NO: 1651624 - DNA, 25 bp, Homo sapien
tggcccgatacaaaacatttcctgc

SEQ ID NO: 1651625 - DNA, 25 bp, Homo sapien
cagcagctgctcgacaaggggcgca

SEQ ID NO: 1651626 - DNA, 25 bp, Homo sapien
tctccaggcaaggaaaactgaagtc

SEQ ID NO: 1651627 - DNA, 25 bp, Homo sapien
catttcctgcaacgaaggaggtggt

SEQ ID NO: 1651628 - DNA, 25 bp, Homo sapien
cagccgctacgggtcagagctttta

SEQ ID NO: 1651629 - DNA, 25 bp, Homo sapien
gatgcagccaaagtgcgttccagtt

SEQ ID NO: 1651630 - DNA, 25 bp, Homo sapien
gatgcttcatatgccccaagtgcca

SEQ ID NO: 1651631 - DNA, 25 bp, Homo sapien
gaccaggtttgccttgatgcagcca

SEQ ID NO: 1651632 - DNA, 25 bp, Homo sapien
tttggctcatttgctcttcacgggc

SEQ ID NO: 1651633 - DNA, 25 bp, Homo sapien
caaatgaatgccagtggtcacacgt

SEQ ID NO: 1651634 - DNA, 25 bp, Homo sapien
tcattccggtatctacagcagcgca

SEQ ID NO: 1651635 - DNA, 25 bp, Homo sapien
cacaggattcacagtctgggcccct

SEQ ID NO: 1651636 - DNA, 25 bp, Homo sapien
ccgagtccctgacgtccaccgggcg

SEQ ID NO: 1651637 - DNA, 25 bp, Homo sapien
acgtccaccgggcgggtgcaggcac

SEQ ID NO: 1651638 - DNA, 25 bp, Homo sapien
tgccccccgagtccctgacgtccac

SEQ ID NO: 1651639 - DNA, 25 bp, Homo sapien
tccctgacgtccaccgggcgggtgc

SEQ ID NO: 1651640 - DNA, 25 bp, Homo sapien
taagggcaggagtcccatgatgaga

SEQ ID NO: 1651641 - DNA, 25 bp, Homo sapien
ctgggtaagggcaggagtcccatga

SEQ ID NO: 1651642 - DNA, 25 bp, Homo sapien
taattgggctccatctcgggggctc

SEQ ID NO: 1651643 - DNA, 25 bp, Homo sapien
caggagtcccatgatgagattgtac

SEQ ID NO: 1651644 - DNA, 25 bp, Homo sapien
gccgcgggccacgggcgcgcagctc

SEQ ID NO: 1651645 - DNA, 25 bp, Homo sapien
tgggcacgggcgactccaggtgctg

SEQ ID NO: 1651646 - DNA, 25 bp, Homo sapien
ccgccgctcgtactgtgcgttgagg

SEQ ID NO: 1651647 - DNA, 25 bp, Homo sapien
gtgcgttgaggtcgtccgccatccg

SEQ ID NO: 1651648 - DNA, 25 bp, Homo sapien
gcctgggtgggaccgcccgccagag

SEQ ID NO: 1651649 - DNA, 25 bp, Homo sapien
gatcccatcgctagtgagtcaattt

SEQ ID NO: 1651650 - DNA, 25 bp, Homo sapien
cacaggcaccagaaagcaagaagta

SEQ ID NO: 1651651 - DNA, 25 bp, Homo sapien
tgaggcccgcccttagggagtatcc

SEQ ID NO: 1651652 - DNA, 25 bp, Homo sapien
cacagggatacagtgactgacccca

SEQ ID NO: 1651653 - DNA, 25 bp, Homo sapien
ctggcctgagggttccctaaggcct

SEQ ID NO: 1651654 - DNA, 25 bp, Homo sapien
gttccctaaggcctacagccagggc

SEQ ID NO: 1651655 - DNA, 25 bp, Homo sapien
cctgagggttccctaaggcctacag

SEQ ID NO: 1651656 - DNA, 25 bp, Homo sapien
agggttccctaaggcctacagccag

SEQ ID NO: 1651657 - DNA, 25 bp, Homo sapien
gccttgaaatcggtgtccccttcca

SEQ ID NO: 1651658 - DNA, 25 bp, Homo sapien
cttggccttgaaatcggtgtcccct

SEQ ID NO: 1651659 - DNA, 25 bp, Homo sapien
ccttgaaatcggtgtccccttccag

SEQ ID NO: 1651660 - DNA, 25 bp, Homo sapien
tggccttgaaatcggtgtccccttc

SEQ ID NO: 1651661 - DNA, 25 bp, Homo sapien
gggcgcagaggtaggcagcgggcag

SEQ ID NO: 1651662 - DNA, 25 bp, Homo sapien
cgcagaggccgcaggacactgccga

SEQ ID NO: 1651663 - DNA, 25 bp, Homo sapien
ggcgcagaggtaggcagcgggcagc

SEQ ID NO: 1651664 - DNA, 25 bp, Homo sapien
aggccgggctcgcagaggccgcagg

SEQ ID NO: 1651665 - DNA, 25 bp, Homo sapien
ctgccctcctggcgtgcgcgggcca

SEQ ID NO: 1651666 - DNA, 25 bp, Homo sapien
cgggccaggccctctacgggctccg

SEQ ID NO: 1651667 - DNA, 25 bp, Homo sapien
agctgccctcctggcgtgcgcgggc

SEQ ID NO: 1651668 - DNA, 25 bp, Homo sapien
tgccctcctggcgtgcgcgggccat

SEQ ID NO: 1651669 - DNA, 25 bp, Homo sapien
ctgagatggccccagtctcggacat

SEQ ID NO: 1651670 - DNA, 25 bp, Homo sapien
aaacactgagatggccccagtctcg

SEQ ID NO: 1651671 - DNA, 25 bp, Homo sapien
ctcccacttgcacacaaacactgag

SEQ ID NO: 1651672 - DNA, 25 bp, Homo sapien
ccacttgcacacaaacactgagatg

SEQ ID NO: 1651673 - DNA, 25 bp, Homo sapien
ggccgcaggcgcgtccgcgtcgtgg

SEQ ID NO: 1651674 - DNA, 25 bp, Homo sapien
cgtccgcgtcgtggccgctgctggg

SEQ ID NO: 1651675 - DNA, 25 bp, Homo sapien
ccgggggcatgaacacgccggaggg

SEQ ID NO: 1651676 - DNA, 25 bp, Homo sapien
gcttccttcaggagggcgcgcccgc

SEQ ID NO: 1651677 - DNA, 25 bp, Homo sapien
ggggacccacgtcgtggaagcagcc

SEQ ID NO: 1651678 - DNA, 25 bp, Homo sapien
aatctggcaggggacccacgtcgtg

SEQ ID NO: 1651679 - DNA, 25 bp, Homo sapien
ggacccacgtcgtggaagcagccct

SEQ ID NO: 1651680 - DNA, 25 bp, Homo sapien
cacaaatctggcaggggacccacgt

SEQ ID NO: 1651681 - DNA, 25 bp, Homo sapien
tgtctcatagctttccattccgttt

SEQ ID NO: 1651682 - DNA, 25 bp, Homo sapien
ccaaagccgtggattcctgtctcct

SEQ ID NO: 1651683 - DNA, 25 bp, Homo sapien
tctggtttggtgagttttgtccttc

SEQ ID NO: 1651684 - DNA, 25 bp, Homo sapien
gggtctcacccaatcgcaatcgcct

SEQ ID NO: 1651685 - DNA, 25 bp, Homo sapien
tgcccagccccggaatgttctttat

SEQ ID NO: 1651686 - DNA, 25 bp, Homo sapien
caagagtctatttggccataagcgt

SEQ ID NO: 1651687 - DNA, 25 bp, Homo sapien
taatcccagtatcacggaaggccga

SEQ ID NO: 1651688 - DNA, 25 bp, Homo sapien
ggcaacatgcggaaacctaactggg

SEQ ID NO: 1651689 - DNA, 25 bp, Homo sapien
tggggtcaggatgcccaggtctact

SEQ ID NO: 1651690 - DNA, 25 bp, Homo sapien
tcatggggtcaggatgcccaggtct

SEQ ID NO: 1651691 - DNA, 25 bp, Homo sapien
ggggtcaggatgcccaggtctactt

SEQ ID NO: 1651692 - DNA, 25 bp, Homo sapien
catggggtcaggatgcccaggtcta

SEQ ID NO: 1651693 - DNA, 25 bp, Homo sapien
tcgtctccaagatcttgtctgccat

SEQ ID NO: 1651694 - DNA, 25 bp, Homo sapien
tctcgtctccaagatcttgtctgcc

SEQ ID NO: 1651695 - DNA, 25 bp, Homo sapien
gtctccaagatcttgtctgccattc

SEQ ID NO: 1651696 - DNA, 25 bp, Homo sapien
cgtctccaagatcttgtctgccatt

SEQ ID NO: 1651697 - DNA, 25 bp, Homo sapien
ttggcaccgaccccccaccttgcgc

SEQ ID NO: 1651698 - DNA, 25 bp, Homo sapien
tgttggcaccgaccccccaccttgc

SEQ ID NO: 1651699 - DNA, 25 bp, Homo sapien
ggcaccgaccccccaccttgcgcca

SEQ ID NO: 1651700 - DNA, 25 bp, Homo sapien
ctgttggcaccgaccccccaccttg

SEQ ID NO: 1651701 - DNA, 25 bp, Homo sapien
atgcaccaagctcattcaccacagg

SEQ ID NO: 1651702 - DNA, 25 bp, Homo sapien
taatgctgtaacctcctggactctg

SEQ ID NO: 1651703 - DNA, 25 bp, Homo sapien
tgcataggttgtgtccttggcctgc

SEQ ID NO: 1651704 - DNA, 25 bp, Homo sapien
acagcgcctggtcggcttgtcacac

SEQ ID NO: 1651705 - DNA, 25 bp, Homo sapien
cccttcctcacgtggtgcaggcagg

SEQ ID NO: 1651706 - DNA, 25 bp, Homo sapien
agaggccgacggagccggagtcgcg

SEQ ID NO: 1651707 - DNA, 25 bp, Homo sapien
agttggatgagcttgcggaacaccc

SEQ ID NO: 1651708 - DNA, 25 bp, Homo sapien
gggagctgcggtcgcagaggccgac

SEQ ID NO: 1651709 - DNA, 25 bp, Homo sapien
gtggcggggagtgcgaacaggcccg

SEQ ID NO: 1651710 - DNA, 25 bp, Homo sapien
cggggagtgcgaacaggcccgggcg

SEQ ID NO: 1651711 - DNA, 25 bp, Homo sapien
caggacgcccacatgggaagctgga

SEQ ID NO: 1651712 - DNA, 25 bp, Homo sapien
ggcggggacaggacgcccacatggg

SEQ ID NO: 1651713 - DNA, 25 bp, Homo sapien
aagtgggtccagattcttggccggg

SEQ ID NO: 1651714 - DNA, 25 bp, Homo sapien
tggaagtgggtccagattcttggcc

SEQ ID NO: 1651715 - DNA, 25 bp, Homo sapien
tgggtccagattcttggccgggacg

SEQ ID NO: 1651716 - DNA, 25 bp, Homo sapien
tccagattcttggccgggacgttgg

SEQ ID NO: 1651717 - DNA, 25 bp, Homo sapien
aaagtttcgtctgagccacgggcgc

SEQ ID NO: 1651718 - DNA, 25 bp, Homo sapien
cggccagagcgttggccgggaggcg

SEQ ID NO: 1651719 - DNA, 25 bp, Homo sapien
aagcggggagttgagccagaaccct

SEQ ID NO: 1651720 - DNA, 25 bp, Homo sapien
ggtggagccagaaagtttcgtctga

SEQ ID NO: 1651721 - DNA, 25 bp, Homo sapien
taatgacatcgctcagcgtctctgg

SEQ ID NO: 1651722 - DNA, 25 bp, Homo sapien
gattggtccggccttcttcctaatg

SEQ ID NO: 1651723 - DNA, 25 bp, Homo sapien
tctggagccgtcatcccgcggaatg

SEQ ID NO: 1651724 - DNA, 25 bp, Homo sapien
gatgcaccgtctctggattggtccg

SEQ ID NO: 1651725 - DNA, 25 bp, Homo sapien
taggtgagactcaaacgtgatggct

SEQ ID NO: 1651726 - DNA, 25 bp, Homo sapien
gaaaactgcttttgccctagacctg

SEQ ID NO: 1651727 - DNA, 25 bp, Homo sapien
tcctggaggacatttcgaacacacc

SEQ ID NO: 1651728 - DNA, 25 bp, Homo sapien
tgctaaggtccgagtgttgccatgg

SEQ ID NO: 1651729 - DNA, 25 bp, Homo sapien
tttcatatccctcatctcccgttag

SEQ ID NO: 1651730 - DNA, 25 bp, Homo sapien
ctcttctcgcttcgacttgccatta

SEQ ID NO: 1651731 - DNA, 25 bp, Homo sapien
tctcccgttagcttctgcttcataa

SEQ ID NO: 1651732 - DNA, 25 bp, Homo sapien
gcttcgacttgccattatcctccgt

SEQ ID NO: 1651733 - DNA, 25 bp, Homo sapien
ggtaagtggtggtcaaccagcccag

SEQ ID NO: 1651734 - DNA, 25 bp, Homo sapien
tcggataactgcatgggcacaagca

SEQ ID NO: 1651735 - DNA, 25 bp, Homo sapien
tccttgggatgtggtagctgcagcc

SEQ ID NO: 1651736 - DNA, 25 bp, Homo sapien
gctgaggaaccctcgtgccaaggga

SEQ ID NO: 1651737 - DNA, 25 bp, Homo sapien
tattccaccacgtggctaaacccca

SEQ ID NO: 1651738 - DNA, 25 bp, Homo sapien
gtaatattccaccacgtggctaaac

SEQ ID NO: 1651739 - DNA, 25 bp, Homo sapien
taatattccaccacgtggctaaacc

SEQ ID NO: 1651740 - DNA, 25 bp, Homo sapien
ggcctgcctggtggtctacggttca

SEQ ID NO: 1651741 - DNA, 25 bp, Homo sapien
attttgggagggctcaactccgccg

SEQ ID NO: 1651742 - DNA, 25 bp, Homo sapien
tcatcctgctgaccatgtatgccag

SEQ ID NO: 1651743 - DNA, 25 bp, Homo sapien
agaatgcggtgactgccatccggtt

SEQ ID NO: 1651744 - DNA, 25 bp, Homo sapien
caggctccttagctcggcattcaag

SEQ ID NO: 1651745 - DNA, 25 bp, Homo sapien
ggaacacagacctcctgacactttt

SEQ ID NO: 1651746 - DNA, 25 bp, Homo sapien
acaggaggtgacaacggaagcagat

SEQ ID NO: 1651747 - DNA, 25 bp, Homo sapien
tggacacacttactctctagcttct

SEQ ID NO: 1651748 - DNA, 25 bp, Homo sapien
tggtgactgccatattcgacagcac

SEQ ID NO: 1651749 - DNA, 25 bp, Homo sapien
tacttttgaactctacctgctcaga

SEQ ID NO: 1651750 - DNA, 25 bp, Homo sapien
catttcaaatttagttcctcgggca

SEQ ID NO: 1651751 - DNA, 25 bp, Homo sapien
ctcgggcacactggccatagttcaa

SEQ ID NO: 1651752 - DNA, 25 bp, Homo sapien
gtgatgatgaacaagacggactgaa

SEQ ID NO: 1651753 - DNA, 25 bp, Homo sapien
agagagatgcgagctgactaggaca

SEQ ID NO: 1651754 - DNA, 25 bp, Homo sapien
aaaatcagactacagaatgactcat

SEQ ID NO: 1651755 - DNA, 25 bp, Homo sapien
ccaaaagatggtcagagacacagtt

SEQ ID NO: 1651756 - DNA, 25 bp, Homo sapien
cgggccgcacgggccccggagtctg

SEQ ID NO: 1651757 - DNA, 25 bp, Homo sapien
caggtgcctggcatttgggtgcggg

SEQ ID NO: 1651758 - DNA, 25 bp, Homo sapien
ggatgcggagtaaagacagacctgt

SEQ ID NO: 1651759 - DNA, 25 bp, Homo sapien
tgcgggtagacctgtgcactggaac

SEQ ID NO: 1651760 - DNA, 25 bp, Homo sapien
tctgtcctgcagctatctctgcctt

SEQ ID NO: 1651761 - DNA, 25 bp, Homo sapien
gatgcattagtccacgtgcttagag

SEQ ID NO: 1651762 - DNA, 25 bp, Homo sapien
ggattggcacataaacggttctcag

SEQ ID NO: 1651763 - DNA, 25 bp, Homo sapien
tcagcaaacatcagctacagtgatc

SEQ ID NO: 1651764 - DNA, 25 bp, Homo sapien
gtaggcaaggagaatgttgtcatcc

SEQ ID NO: 1651765 - DNA, 25 bp, Homo sapien
acaggagagtgaaggaatctctcca

SEQ ID NO: 1651766 - DNA, 25 bp, Homo sapien
ggccctagccgccatcttctgggga

SEQ ID NO: 1651767 - DNA, 25 bp, Homo sapien
tccaaaatgtcggatccgggcgacc

SEQ ID NO: 1651768 - DNA, 25 bp, Homo sapien
tgtcctggcggcgaggccctagccg

SEQ ID NO: 1651769 - DNA, 25 bp, Homo sapien
tccttgagagcccttggatgggcac

SEQ ID NO: 1651770 - DNA, 25 bp, Homo sapien
gtccttgagagcccttggatgggca

SEQ ID NO: 1651771 - DNA, 25 bp, Homo sapien
tgtccttgagagcccttggatgggc

SEQ ID NO: 1651772 - DNA, 25 bp, Homo sapien
caggcccccatgtcccagcagggcc

SEQ ID NO: 1651773 - DNA, 25 bp, Homo sapien
tcaggcccccatgtcccagcagggc

SEQ ID NO: 1651774 - DNA, 25 bp, Homo sapien
tagggaggtaggcattgagcagagg

SEQ ID NO: 1651775 - DNA, 25 bp, Homo sapien
agggaggtaggcattgagcagaggg

SEQ ID NO: 1651776 - DNA, 25 bp, Homo sapien
gaggtaggcattgagcagaggggcc

SEQ ID NO: 1651777 - DNA, 25 bp, Homo sapien
ggaggtaggcattgagcagaggggc

SEQ ID NO: 1651778 - DNA, 25 bp, Homo sapien
ctgggggtcacagccggaggctggg

SEQ ID NO: 1651779 - DNA, 25 bp, Homo sapien
tgggggtcacagccggaggctgggt

SEQ ID NO: 1651780 - DNA, 25 bp, Homo sapien
agcccatctgtgcaggcctcatcag

SEQ ID NO: 1651781 - DNA, 25 bp, Homo sapien
acagggatgtgggagggtcacagag

SEQ ID NO: 1651782 - DNA, 25 bp, Homo sapien
cctcatcagccccaatgtgaggggg

SEQ ID NO: 1651783 - DNA, 25 bp, Homo sapien
tggctggcggggaatggcacaggga

SEQ ID NO: 1651784 - DNA, 25 bp, Homo sapien
actagactttgtgccccatgagggc

SEQ ID NO: 1651785 - DNA, 25 bp, Homo sapien
ggatgggtctgtccccttcactaga

SEQ ID NO: 1651786 - DNA, 25 bp, Homo sapien
ttcactagactttgtgccccatgag

SEQ ID NO: 1651787 - DNA, 25 bp, Homo sapien
ccttcactagactttgtgccccatg

SEQ ID NO: 1651788 - DNA, 25 bp, Homo sapien
tagatgtgtgggtggttggtcagtg

SEQ ID NO: 1651789 - DNA, 25 bp, Homo sapien
cccagccaagggctcagtttatgtt

SEQ ID NO: 1651790 - DNA, 25 bp, Homo sapien
gagatgtatcatagatgaatgggtg

SEQ ID NO: 1651791 - DNA, 25 bp, Homo sapien
gtgaatgcacagataaatgggtaga

SEQ ID NO: 1651792 - DNA, 25 bp, Homo sapien
tgacccactactctggaagtgccca

SEQ ID NO: 1651793 - DNA, 25 bp, Homo sapien
tcctgaggtctaatggaggtttgag

SEQ ID NO: 1651794 - DNA, 25 bp, Homo sapien
ttgcacaatccccagcccttagacc

SEQ ID NO: 1651795 - DNA, 25 bp, Homo sapien
cctcagagaacccacagtacaggga

SEQ ID NO: 1651796 - DNA, 25 bp, Homo sapien
tagataatgccattctccttccaag

SEQ ID NO: 1651797 - DNA, 25 bp, Homo sapien
cattctccttccaagttcaaactca

SEQ ID NO: 1651798 - DNA, 25 bp, Homo sapien
taatgccattctccttccaagttca

SEQ ID NO: 1651799 - DNA, 25 bp, Homo sapien
aagttcaaactcatccccactgatc

SEQ ID NO: 1651800 - DNA, 25 bp, Homo sapien
aaaagtggagccttccgaggtattg

SEQ ID NO: 1651801 - DNA, 25 bp, Homo sapien
tggagccttccgaggtattgggctt

SEQ ID NO: 1651802 - DNA, 25 bp, Homo sapien
gagccttccgaggtattgggcttga

SEQ ID NO: 1651803 - DNA, 25 bp, Homo sapien
ccttccgaggtattgggcttgaagt

SEQ ID NO: 1651804 - DNA, 25 bp, Homo sapien
tctcggtatagcccccgatgggctg

SEQ ID NO: 1651805 - DNA, 25 bp, Homo sapien
ctcggtatagcccccgatgggctgg

SEQ ID NO: 1651806 - DNA, 25 bp, Homo sapien
gtctcggtatagcccccgatgggct

SEQ ID NO: 1651807 - DNA, 25 bp, Homo sapien
tggattgatcgatcataggttgcac

SEQ ID NO: 1651808 - DNA, 25 bp, Homo sapien
tgcggttggattgatcgatcatagg

SEQ ID NO: 1651809 - DNA, 25 bp, Homo sapien
cggttggattgatcgatcataggtt

SEQ ID NO: 1651810 - DNA, 25 bp, Homo sapien
gttggattgatcgatcataggttgc

SEQ ID NO: 1651811 - DNA, 25 bp, Homo sapien
gccccgtgtcctgcgccagctgttt

SEQ ID NO: 1651812 - DNA, 25 bp, Homo sapien
cagttgttgacttgcaggatggtga

SEQ ID NO: 1651813 - DNA, 25 bp, Homo sapien
gagccccgtgtcctgcgccagctgt

SEQ ID NO: 1651814 - DNA, 25 bp, Homo sapien
tgcaggatggtgagccccgtgtcct

SEQ ID NO: 1651815 - DNA, 25 bp, Homo sapien
cttctgctcctccgaggggtacggg

SEQ ID NO: 1651816 - DNA, 25 bp, Homo sapien
tctgctcctccgaggggtacgggtg

SEQ ID NO: 1651817 - DNA, 25 bp, Homo sapien
cagccaccagcaagagtcactctgc

SEQ ID NO: 1651818 - DNA, 25 bp, Homo sapien
gcagtctgaaccccaaggtctggcc

SEQ ID NO: 1651819 - DNA, 25 bp, Homo sapien
ctgaaccccaaggtctggcccaccg

SEQ ID NO: 1651820 - DNA, 25 bp, Homo sapien
agtctgaaccccaaggtctggccca

SEQ ID NO: 1651821 - DNA, 25 bp, Homo sapien
cgcagtctgaaccccaaggtctggc

SEQ ID NO: 1651822 - DNA, 25 bp, Homo sapien
cgtctgggagaaccggcgcttctga

SEQ ID NO: 1651823 - DNA, 25 bp, Homo sapien
caggcagacgtctgggagaaccggc

SEQ ID NO: 1651824 - DNA, 25 bp, Homo sapien
cagacgtctgggagaaccggcgctt

SEQ ID NO: 1651825 - DNA, 25 bp, Homo sapien
ggagaaccggcgcttctgagcgtct

SEQ ID NO: 1651826 - DNA, 25 bp, Homo sapien
gggcaattacatgcctgccagcccc

SEQ ID NO: 1651827 - DNA, 25 bp, Homo sapien
ggcaattacatgcctgccagccccc

SEQ ID NO: 1651828 - DNA, 25 bp, Homo sapien
ggggcaattacatgcctgccagccc

SEQ ID NO: 1651829 - DNA, 25 bp, Homo sapien
tctgaatctgtcagagtctctgtgt

SEQ ID NO: 1651830 - DNA, 25 bp, Homo sapien
ggcttcactggcgtcggggagggaa

SEQ ID NO: 1651831 - DNA, 25 bp, Homo sapien
caattagaggttaactggccagctc

SEQ ID NO: 1651832 - DNA, 25 bp, Homo sapien
tggccagctctgattagagagactg

SEQ ID NO: 1651833 - DNA, 25 bp, Homo sapien
aacaaccaggctcgcatgatgttgg

SEQ ID NO: 1651834 - DNA, 25 bp, Homo sapien
caggctcgcatgatgttggtggcca

SEQ ID NO: 1651835 - DNA, 25 bp, Homo sapien
caaccaggctcgcatgatgttggtg

SEQ ID NO: 1651836 - DNA, 25 bp, Homo sapien
ggaacaaccaggctcgcatgatgtt

SEQ ID NO: 1651837 - DNA, 25 bp, Homo sapien
ggaggccaggcccccactggatgga

SEQ ID NO: 1651838 - DNA, 25 bp, Homo sapien
ggagttgtccccactctgggaggcc

SEQ ID NO: 1651839 - DNA, 25 bp, Homo sapien
gaggccaggcccccactggatggac

SEQ ID NO: 1651840 - DNA, 25 bp, Homo sapien
cttggtcactggagttgtccccact

SEQ ID NO: 1651841 - DNA, 25 bp, Homo sapien
gtccccaaatgtacagacccactat

SEQ ID NO: 1651842 - DNA, 25 bp, Homo sapien
tgtacagacccactatcctcatggt

SEQ ID NO: 1651843 - DNA, 25 bp, Homo sapien
cactatcctcatggtctcgaatcca

SEQ ID NO: 1651844 - DNA, 25 bp, Homo sapien
gacccactatcctcatggtctcgaa

SEQ ID NO: 1651845 - DNA, 25 bp, Homo sapien
taactggaaaatgaaggacaggacc

SEQ ID NO: 1651846 - DNA, 25 bp, Homo sapien
ggaaaatgaaggacaggaccaggca

SEQ ID NO: 1651847 - DNA, 25 bp, Homo sapien
aaatgaaggacaggaccaggcacgg

SEQ ID NO: 1651848 - DNA, 25 bp, Homo sapien
cttaactggaaaatgaaggacagga

SEQ ID NO: 1651849 - DNA, 25 bp, Homo sapien
tctatgctgctgtcgtatggctggg

SEQ ID NO: 1651850 - DNA, 25 bp, Homo sapien
tatatctgagtttgccgggcagtac

SEQ ID NO: 1651851 - DNA, 25 bp, Homo sapien
cagtccgggcccaagtgtggttata

SEQ ID NO: 1651852 - DNA, 25 bp, Homo sapien
tactcaattgagaacggcgtgcgga

SEQ ID NO: 1651853 - DNA, 25 bp, Homo sapien
ctgagttggtgtggctgtatgtgga

SEQ ID NO: 1651854 - DNA, 25 bp, Homo sapien
ccggtggacgctactgtctggctgt

SEQ ID NO: 1651855 - DNA, 25 bp, Homo sapien
ctgttgctgagttggtgtggctgta

SEQ ID NO: 1651856 - DNA, 25 bp, Homo sapien
tgctgagttggtgtggctgtatgtg

SEQ ID NO: 1651857 - DNA, 25 bp, Homo sapien
ccgagtctgcgtagctgttgtgtag

SEQ ID NO: 1651858 - DNA, 25 bp, Homo sapien
gcgtgtgtctgtgcactgttgccca

SEQ ID NO: 1651859 - DNA, 25 bp, Homo sapien
agctgaatctgtgggtggcatctgc

SEQ ID NO: 1651860 - DNA, 25 bp, Homo sapien
cagccgcatccgagtctgcgtagct

SEQ ID NO: 1651861 - DNA, 25 bp, Homo sapien
gctgtgtagtgcacatgcgccctca

SEQ ID NO: 1651862 - DNA, 25 bp, Homo sapien
tgcgtgccctgtgatcaggctgact

SEQ ID NO: 1651863 - DNA, 25 bp, Homo sapien
ctgcaggacgatgcctggtgcccgt

SEQ ID NO: 1651864 - DNA, 25 bp, Homo sapien
tgactgtggcttcgtctgaggctgt

SEQ ID NO: 1651865 - DNA, 25 bp, Homo sapien
gtagtcctcgaagtcctccctgcag

SEQ ID NO: 1651866 - DNA, 25 bp, Homo sapien
tgggtagtcctcgaagtcctccctg

SEQ ID NO: 1651867 - DNA, 25 bp, Homo sapien
ggctgggtagtcctcgaagtcctcc

SEQ ID NO: 1651868 - DNA, 25 bp, Homo sapien
gaggctgggtagtcctcgaagtcct

SEQ ID NO: 1651869 - DNA, 25 bp, Homo sapien
tgatgtagcggtgacagaagttgtc

SEQ ID NO: 1651870 - DNA, 25 bp, Homo sapien
gaggcaggtgatgtagcggtgacag

SEQ ID NO: 1651871 - DNA, 25 bp, Homo sapien
tagcggtgacagaagttgtcgcaca

SEQ ID NO: 1651872 - DNA, 25 bp, Homo sapien
gacagaagttgtcgcacaggtcgtg

SEQ ID NO: 1651873 - DNA, 25 bp, Homo sapien
ggcattctgcttcaactccggtggg

SEQ ID NO: 1651874 - DNA, 25 bp, Homo sapien
gggcggcattctgcttcaactccgg

SEQ ID NO: 1651875 - DNA, 25 bp, Homo sapien
gacgggggcggcattctgcttcaac

SEQ ID NO: 1651876 - DNA, 25 bp, Homo sapien
ggtgtggggaggtgagacgcgctca

SEQ ID NO: 1651877 - DNA, 25 bp, Homo sapien
gctccagcaggtggaaccgcagcac

SEQ ID NO: 1651878 - DNA, 25 bp, Homo sapien
tccagcaggtggaaccgcagcacct

SEQ ID NO: 1651879 - DNA, 25 bp, Homo sapien
cagcaggtggaaccgcagcacctgg

SEQ ID NO: 1651880 - DNA, 25 bp, Homo sapien
gcagcacctggatggcctggatcat

SEQ ID NO: 1651881 - DNA, 25 bp, Homo sapien
gctgatcttctgacggatggaacat

SEQ ID NO: 1651882 - DNA, 25 bp, Homo sapien
gcacgtgggcaacaatcatgacggt

SEQ ID NO: 1651883 - DNA, 25 bp, Homo sapien
agactctaggctgtaccacacggca

SEQ ID NO: 1651884 - DNA, 25 bp, Homo sapien
ccaaggcacggagatgcagagtgac

SEQ ID NO: 1651885 - DNA, 25 bp, Homo sapien
ggagaagaggggcctctcagagcga

SEQ ID NO: 1651886 - DNA, 25 bp, Homo sapien
cagattgtccagttctgggttggag

SEQ ID NO: 1651887 - DNA, 25 bp, Homo sapien
ttggaggagaagaggggcctctcag

SEQ ID NO: 1651888 - DNA, 25 bp, Homo sapien
agaagaggggcctctcagagcgaac

SEQ ID NO: 1651889 - DNA, 25 bp, Homo sapien
cggcagggggatgtcccgccttcca

SEQ ID NO: 1651890 - DNA, 25 bp, Homo sapien
acccctcctcgctggctctctgact

SEQ ID NO: 1651891 - DNA, 25 bp, Homo sapien
ccctcctcgctggctctctgactcg

SEQ ID NO: 1651892 - DNA, 25 bp, Homo sapien
gcagggggatgtcccgccttccacc

SEQ ID NO: 1651893 - DNA, 25 bp, Homo sapien
tcacggggagagcatgtagccagtt

SEQ ID NO: 1651894 - DNA, 25 bp, Homo sapien
cggggagagcatgtagccagttcac

SEQ ID NO: 1651895 - DNA, 25 bp, Homo sapien
ggagagcatgtagccagttcacatt

SEQ ID NO: 1651896 - DNA, 25 bp, Homo sapien
gggagagcatgtagccagttcacat

SEQ ID NO: 1651897 - DNA, 25 bp, Homo sapien
caggccgtcgctgtccaagcctggg

SEQ ID NO: 1651898 - DNA, 25 bp, Homo sapien
gcaccccgagactcggctgaggagc

SEQ ID NO: 1651899 - DNA, 25 bp, Homo sapien
cccgagactcggctgaggagcttct

SEQ ID NO: 1651900 - DNA, 25 bp, Homo sapien
ggtcagcaccccgagactcggctga

SEQ ID NO: 1651901 - DNA, 25 bp, Homo sapien
ccgagactcggctgaggagcttctc

SEQ ID NO: 1651902 - DNA, 25 bp, Homo sapien
catttcacagttggcagataagcgc

SEQ ID NO: 1651903 - DNA, 25 bp, Homo sapien
aaagtacacatacgaagcctccctg

SEQ ID NO: 1651904 - DNA, 25 bp, Homo sapien
taggaaccgcgcattgttgtacaca

SEQ ID NO: 1651905 - DNA, 25 bp, Homo sapien
gataagcgcatcagagtaagtctca

SEQ ID NO: 1651906 - DNA, 25 bp, Homo sapien
caccaggcacaagaatgaatgcatg

SEQ ID NO: 1651907 - DNA, 25 bp, Homo sapien
cacttgttgccggagagggtcactc

SEQ ID NO: 1651908 - DNA, 25 bp, Homo sapien
cacgattgcgcacccaagagaaaca

SEQ ID NO: 1651909 - DNA, 25 bp, Homo sapien
tgaatgaggcatttagcacagggcc

SEQ ID NO: 1651910 - DNA, 25 bp, Homo sapien
ggctagaacgttcctgcctcggacc

SEQ ID NO: 1651911 - DNA, 25 bp, Homo sapien
gactcgcacgggaagaggctagaac

SEQ ID NO: 1651912 - DNA, 25 bp, Homo sapien
gctgctcaaggcactctcaccaaaa

SEQ ID NO: 1651913 - DNA, 25 bp, Homo sapien
cctgtgccctgaagttgaatccaac

SEQ ID NO: 1651914 - DNA, 25 bp, Homo sapien
gacggcccgcggtgttgacgccagg

SEQ ID NO: 1651915 - DNA, 25 bp, Homo sapien
gccgcagcccctgacggcccgcggt

SEQ ID NO: 1651916 - DNA, 25 bp, Homo sapien
ggactccgcgcatggaccccggccc

SEQ ID NO: 1651917 - DNA, 25 bp, Homo sapien
ccgccgccgtcagcggcaggcgccg

SEQ ID NO: 1651918 - DNA, 25 bp, Homo sapien
cgagacggacacaccggggaccgca

SEQ ID NO: 1651919 - DNA, 25 bp, Homo sapien
cggctctggagggaatcgaaccgtc

SEQ ID NO: 1651920 - DNA, 25 bp, Homo sapien
gaatcgaaccgtcccgagacggaca

SEQ ID NO: 1651921 - DNA, 25 bp, Homo sapien
gtcacggccaggagcgcatcgccgc

SEQ ID NO: 1651922 - DNA, 25 bp, Homo sapien
tctctgaggctcgattccccctctg

SEQ ID NO: 1651923 - DNA, 25 bp, Homo sapien
ctgaggctcgattccccctctgcag

SEQ ID NO: 1651924 - DNA, 25 bp, Homo sapien
tctgaggctcgattccccctctgca

SEQ ID NO: 1651925 - DNA, 25 bp, Homo sapien
ctctctgaggctcgattccccctct

SEQ ID NO: 1651926 - DNA, 25 bp, Homo sapien
ccggggatccgcagtggtccccagg

SEQ ID NO: 1651927 - DNA, 25 bp, Homo sapien
cccggggatccgcagtggtccccag

SEQ ID NO: 1651928 - DNA, 25 bp, Homo sapien
ggggatccgcagtggtccccaggat

SEQ ID NO: 1651929 - DNA, 25 bp, Homo sapien
ggatccgcagtggtccccaggatcc

SEQ ID NO: 1651930 - DNA, 25 bp, Homo sapien
tgaagcctggagcctcatccctctc

SEQ ID NO: 1651931 - DNA, 25 bp, Homo sapien
gcctggagcctcatccctctctcct

SEQ ID NO: 1651932 - DNA, 25 bp, Homo sapien
gagcctcatccctctctcctttggc

SEQ ID NO: 1651933 - DNA, 25 bp, Homo sapien
cctcatccctctctcctttggccat

SEQ ID NO: 1651934 - DNA, 25 bp, Homo sapien
taattgacggatgcgggcgtagcaa

SEQ ID NO: 1651935 - DNA, 25 bp, Homo sapien
tggctcaggcaaatgaacgtctctc

SEQ ID NO: 1651936 - DNA, 25 bp, Homo sapien
gaaaatgcagatggcctaccgacag

SEQ ID NO: 1651937 - DNA, 25 bp, Homo sapien
taccgacagatggaaggcctccaaa

SEQ ID NO: 1651938 - DNA, 25 bp, Homo sapien
ttcgagggtcctgcccggattggct

SEQ ID NO: 1651939 - DNA, 25 bp, Homo sapien
cagagatgtggcagcatttgctggc

SEQ ID NO: 1651940 - DNA, 25 bp, Homo sapien
tggtcctctgggaccctcggtctcc

SEQ ID NO: 1651941 - DNA, 25 bp, Homo sapien
gctggcttgtagcattggtcctctg

SEQ ID NO: 1651942 - DNA, 25 bp, Homo sapien
tttccccagggatatagacggtcac

SEQ ID NO: 1651943 - DNA, 25 bp, Homo sapien
tccgagcctggagaatgagtgtcct

SEQ ID NO: 1651944 - DNA, 25 bp, Homo sapien
aactggactcgctttgattcccggc

SEQ ID NO: 1651945 - DNA, 25 bp, Homo sapien
tgtcctcccaagaacccgagtggag

SEQ ID NO: 1651946 - DNA, 25 bp, Homo sapien
ctagaagccccggatgtggcagtac

SEQ ID NO: 1651947 - DNA, 25 bp, Homo sapien
cgttggagccggtcacgttgccgat

SEQ ID NO: 1651948 - DNA, 25 bp, Homo sapien
aaggaacacgttcaccgcgttggag

SEQ ID NO: 1651949 - DNA, 25 bp, Homo sapien
gcgccggtacagcagcacggcaatg

SEQ ID NO: 1651950 - DNA, 25 bp, Homo sapien
cccacgaaggcgaagacggtgaaga

SEQ ID NO: 1651951 - DNA, 25 bp, Homo sapien
cctggctcatctgagatcctacccc

SEQ ID NO: 1651952 - DNA, 25 bp, Homo sapien
tggctcatctgagatcctaccccac

SEQ ID NO: 1651953 - DNA, 25 bp, Homo sapien
ctggctcatctgagatcctacccca

SEQ ID NO: 1651954 - DNA, 25 bp, Homo sapien
gtgcccagggcaacgaagacaacag

SEQ ID NO: 1651955 - DNA, 25 bp, Homo sapien
tagtcaaagcacgacggcagccgct

SEQ ID NO: 1651956 - DNA, 25 bp, Homo sapien
cagagtccttgaggccaacggtgca

SEQ ID NO: 1651957 - DNA, 25 bp, Homo sapien
caccgtcaggaagtgcatcacgtag

SEQ ID NO: 1651958 - DNA, 25 bp, Homo sapien
ttccttgcctacagaggccccattt

SEQ ID NO: 1651959 - DNA, 25 bp, Homo sapien
gccccattttgtctaacttcctgac

SEQ ID NO: 1651960 - DNA, 25 bp, Homo sapien
aggccccattttgtctaacttcctg

SEQ ID NO: 1651961 - DNA, 25 bp, Homo sapien
ctggggcatacactcagacttcctt

SEQ ID NO: 1651962 - DNA, 25 bp, Homo sapien
gtctccactaagtccccagaggaag

SEQ ID NO: 1651963 - DNA, 25 bp, Homo sapien
tataaacccacagcacgatgtacgc

SEQ ID NO: 1651964 - DNA, 25 bp, Homo sapien
gaaggaaatgctccgaagctcaaag

SEQ ID NO: 1651965 - DNA, 25 bp, Homo sapien
tagggtcaccgttgtcataatcagg

SEQ ID NO: 1651966 - DNA, 25 bp, Homo sapien
gcgctcaccgtaattgcctctaaaa

SEQ ID NO: 1651967 - DNA, 25 bp, Homo sapien
gaatgggtcccaattaccaaggcca

SEQ ID NO: 1651968 - DNA, 25 bp, Homo sapien
gcctctaaaaactgctccctccatg

SEQ ID NO: 1651969 - DNA, 25 bp, Homo sapien
caaggccaagttcgttttcttgatg

SEQ ID NO: 1651970 - DNA, 25 bp, Homo sapien
caggctggactccaggaaggtgagg

SEQ ID NO: 1651971 - DNA, 25 bp, Homo sapien
ggctggactccaggaaggtgaggcc

SEQ ID NO: 1651972 - DNA, 25 bp, Homo sapien
tggactccaggaaggtgaggccccg

SEQ ID NO: 1651973 - DNA, 25 bp, Homo sapien
ctggactccaggaaggtgaggcccc

SEQ ID NO: 1651974 - DNA, 25 bp, Homo sapien
aatcatatgactcctcgatgatgac

SEQ ID NO: 1651975 - DNA, 25 bp, Homo sapien
tatgactcctcgatgatgacctcca

SEQ ID NO: 1651976 - DNA, 25 bp, Homo sapien
cttaaaatcatatgactcctcgatg

SEQ ID NO: 1651977 - DNA, 25 bp, Homo sapien
catatgactcctcgatgatgacctc

SEQ ID NO: 1651978 - DNA, 25 bp, Homo sapien
tattcctcgtcatcaactatcttca

SEQ ID NO: 1651979 - DNA, 25 bp, Homo sapien
gaaatccctcgcttaagccactggg

SEQ ID NO: 1651980 - DNA, 25 bp, Homo sapien
tcatattcctcgtcatcaactatct

SEQ ID NO: 1651981 - DNA, 25 bp, Homo sapien
ctgaaatccctcgcttaagccactg

SEQ ID NO: 1651982 - DNA, 25 bp, Homo sapien
aggcacataatccacacccctcgac

SEQ ID NO: 1651983 - DNA, 25 bp, Homo sapien
tcaggcacataatccacacccctcg

SEQ ID NO: 1651984 - DNA, 25 bp, Homo sapien
acataatccacacccctcgacccca

SEQ ID NO: 1651985 - DNA, 25 bp, Homo sapien
gcacataatccacacccctcgaccc

SEQ ID NO: 1651986 - DNA, 25 bp, Homo sapien
caaggacaggcgcacacaagacggc

SEQ ID NO: 1651987 - DNA, 25 bp, Homo sapien
ccgcgcaaggacaggcgcacacaag

SEQ ID NO: 1651988 - DNA, 25 bp, Homo sapien
ggacaggcgcacacaagacggccat

SEQ ID NO: 1651989 - DNA, 25 bp, Homo sapien
aagacacagcgacacccgcgcaagg

SEQ ID NO: 1651990 - DNA, 25 bp, Homo sapien
aggccagagtgcaatggcgtgacct

SEQ ID NO: 1651991 - DNA, 25 bp, Homo sapien
cggctcacagcaaccttcgcctgct

SEQ ID NO: 1651992 - DNA, 25 bp, Homo sapien
ggctcacagcaaccttcgcctgctg

SEQ ID NO: 1651993 - DNA, 25 bp, Homo sapien
gtttcatcatattggtcaggctggt

SEQ ID NO: 1651994 - DNA, 25 bp, Homo sapien
agttctgttattctgtcttcagctc

SEQ ID NO: 1651995 - DNA, 25 bp, Homo sapien
cagttctgttattctgtcttcagct

SEQ ID NO: 1651996 - DNA, 25 bp, Homo sapien
agttctcaacaaccctcagacagag

SEQ ID NO: 1651997 - DNA, 25 bp, Homo sapien
aaagcgcctctaattagtgcctgcc

SEQ ID NO: 1651998 - DNA, 25 bp, Homo sapien
cagtgagaagctgagtgctgcccga

SEQ ID NO: 1651999 - DNA, 25 bp, Homo sapien
acagggccgtaaggttgcagcagca

SEQ ID NO: 1652000 - DNA, 25 bp, Homo sapien
gacagacgggcatgcgggggcggaa

SEQ ID NO: 1652001 - DNA, 25 bp, Homo sapien
gggcggaagagagcgggcagaggag

SEQ ID NO: 1652002 - DNA, 25 bp, Homo sapien
cgggggcggaagagagcgggcagag

SEQ ID NO: 1652003 - DNA, 25 bp, Homo sapien
agacagacgggcatgcgggggcgga

SEQ ID NO: 1652004 - DNA, 25 bp, Homo sapien
cgtgattttatgtgtgtctgcgtgt

SEQ ID NO: 1652005 - DNA, 25 bp, Homo sapien
ccgtgattttatgtgtgtctgcgtg

SEQ ID NO: 1652006 - DNA, 25 bp, Homo sapien
tccgtgattttatgtgtgtctgcgt

SEQ ID NO: 1652007 - DNA, 25 bp, Homo sapien
caatctgtaaacgtctgtctacatg

SEQ ID NO: 1652008 - DNA, 25 bp, Homo sapien
atctgtaaacgtctgtctacatgtg

SEQ ID NO: 1652009 - DNA, 25 bp, Homo sapien
tccaatctgtaaacgtctgtctaca

SEQ ID NO: 1652010 - DNA, 25 bp, Homo sapien
tctgtaaacgtctgtctacatgtgt

SEQ ID NO: 1652011 - DNA, 25 bp, Homo sapien
attccagcaccatcttttcccaaat

SEQ ID NO: 1652012 - DNA, 25 bp, Homo sapien
ttcctgatgtcgtatgtccaaaccc

SEQ ID NO: 1652013 - DNA, 25 bp, Homo sapien
ttcgcgttaggtgccccgctatttc

SEQ ID NO: 1652014 - DNA, 25 bp, Homo sapien
aaatcctcgcccagattcgcgttag

SEQ ID NO: 1652015 - DNA, 25 bp, Homo sapien
tggtttgaacaccagcgtgccctcg

SEQ ID NO: 1652016 - DNA, 25 bp, Homo sapien
tcgtcgtcgatgatgccgatgcgca

SEQ ID NO: 1652017 - DNA, 25 bp, Homo sapien
aagatgcctgcgtggtcgtcgtcca

SEQ ID NO: 1652018 - DNA, 25 bp, Homo sapien
gcagccgcacgaagaaatgctcgtc

SEQ ID NO: 1652019 - DNA, 25 bp, Homo sapien
gagtctggacgtgcttcccagagga

SEQ ID NO: 1652020 - DNA, 25 bp, Homo sapien
gggtcgacaggcattaaacaagtaa

SEQ ID NO: 1652021 - DNA, 25 bp, Homo sapien
tcggtcatcggctgtgtgttgtacg

SEQ ID NO: 1652022 - DNA, 25 bp, Homo sapien
tagaagaactcccaagtatgagggt

SEQ ID NO: 1652023 - DNA, 25 bp, Homo sapien
caaaacaaaaccacaccagcctggg

SEQ ID NO: 1652024 - DNA, 25 bp, Homo sapien
acaaaacaaaaccacaccagcctgg

SEQ ID NO: 1652025 - DNA, 25 bp, Homo sapien
atataaattagctgggcgctgtggt

SEQ ID NO: 1652026 - DNA, 25 bp, Homo sapien
aatatataaattagctgggcgctgt

SEQ ID NO: 1652027 - DNA, 25 bp, Homo sapien
gtagtagttggcgatgcccaccagc

SEQ ID NO: 1652028 - DNA, 25 bp, Homo sapien
tagaggctaggctcgaagaagatgc

SEQ ID NO: 1652029 - DNA, 25 bp, Homo sapien
gcagagccgtcctcagtgcggtagt

SEQ ID NO: 1652030 - DNA, 25 bp, Homo sapien
tgcggtagtccacgtagaaggtgct

SEQ ID NO: 1652031 - DNA, 25 bp, Homo sapien
caggccgcccagctcacctggggcc

SEQ ID NO: 1652032 - DNA, 25 bp, Homo sapien
cgcccagctcacctggggcctcggc

SEQ ID NO: 1652033 - DNA, 25 bp, Homo sapien
agctcacctggggcctcggcgccca

SEQ ID NO: 1652034 - DNA, 25 bp, Homo sapien
gcccaggccgcccagctcacctggg

SEQ ID NO: 1652035 - DNA, 25 bp, Homo sapien
tcggcgcctatgatgatgccgctgc

SEQ ID NO: 1652036 - DNA, 25 bp, Homo sapien
tgcggtagcgcttgtacacgtactt

SEQ ID NO: 1652037 - DNA, 25 bp, Homo sapien
ataccacgcacaccgggaagaagac

SEQ ID NO: 1652038 - DNA, 25 bp, Homo sapien
gaagagcagccgcttgtcggccatc

SEQ ID NO: 1652039 - DNA, 25 bp, Homo sapien
ccggctgggatgacgtagatgcaca

SEQ ID NO: 1652040 - DNA, 25 bp, Homo sapien
gttgtggccgcagacttcgatgact

SEQ ID NO: 1652041 - DNA, 25 bp, Homo sapien
ccagacataggcgaagatgctccaa

SEQ ID NO: 1652042 - DNA, 25 bp, Homo sapien
tcgatggccgccatgaaacggtcgg

SEQ ID NO: 1652043 - DNA, 25 bp, Homo sapien
caggaggagtgtgacccccaccaag

SEQ ID NO: 1652044 - DNA, 25 bp, Homo sapien
agcgacgggtcgtcgggctcccaca

SEQ ID NO: 1652045 - DNA, 25 bp, Homo sapien
gggagccgccaggaggagtgtgacc

SEQ ID NO: 1652046 - DNA, 25 bp, Homo sapien
cccctgtgctggtgtcgctgtcatt

SEQ ID NO: 1652047 - DNA, 25 bp, Homo sapien
agcaggtccccccagcgctgggctg

SEQ ID NO: 1652048 - DNA, 25 bp, Homo sapien
tgcggctacagcctggagcaggtcc

SEQ ID NO: 1652049 - DNA, 25 bp, Homo sapien
gctggcagtggtgggcgactccgcc

SEQ ID NO: 1652050 - DNA, 25 bp, Homo sapien
gggctggcagtggtgggcgactccg

SEQ ID NO: 1652051 - DNA, 25 bp, Homo sapien
caattctcatccagagtggacaggg

SEQ ID NO: 1652052 - DNA, 25 bp, Homo sapien
gttcttctggacgtataaataacca

SEQ ID NO: 1652053 - DNA, 25 bp, Homo sapien
taaccatcaggtggccaattctcat

SEQ ID NO: 1652054 - DNA, 25 bp, Homo sapien
gacagggtggaatgggatcatccct

SEQ ID NO: 1652055 - DNA, 25 bp, Homo sapien
ccatgagtcgccccaggtctgggaa

SEQ ID NO: 1652056 - DNA, 25 bp, Homo sapien
acattgacgtacagagagaggagtg

SEQ ID NO: 1652057 - DNA, 25 bp, Homo sapien
tcaaatagggacattgacgtacaga

SEQ ID NO: 1652058 - DNA, 25 bp, Homo sapien
accagcggctggaggtgagcacgcc

SEQ ID NO: 1652059 - DNA, 25 bp, Homo sapien
agaggctgcattctcagcaggccct

SEQ ID NO: 1652060 - DNA, 25 bp, Homo sapien
gctgcattctcagcaggccctgcac

SEQ ID NO: 1652061 - DNA, 25 bp, Homo sapien
ttaagaggctgcattctcagcaggc

SEQ ID NO: 1652062 - DNA, 25 bp, Homo sapien
gaggctgcattctcagcaggccctg

SEQ ID NO: 1652063 - DNA, 25 bp, Homo sapien
agccgggtcaagaccagctctgagg

SEQ ID NO: 1652064 - DNA, 25 bp, Homo sapien
tgtcgaagccgggtcaagaccagct

SEQ ID NO: 1652065 - DNA, 25 bp, Homo sapien
cttgatgtcgaagccgggtcaagac

SEQ ID NO: 1652066 - DNA, 25 bp, Homo sapien
tgctccacttgatgtcgaagccggg

SEQ ID NO: 1652067 - DNA, 25 bp, Homo sapien
catccccggtcaggtccacgtgagc

SEQ ID NO: 1652068 - DNA, 25 bp, Homo sapien
cagggagaccacggcaagctcctgc

SEQ ID NO: 1652069 - DNA, 25 bp, Homo sapien
gggagaccacggcaagctcctgcag

SEQ ID NO: 1652070 - DNA, 25 bp, Homo sapien
ccggtcaggtccacgtgagccatgg

SEQ ID NO: 1652071 - DNA, 25 bp, Homo sapien
gctccgctgccacagcagatggaac

SEQ ID NO: 1652072 - DNA, 25 bp, Homo sapien
cagatggaacccgtgctgggcctca

SEQ ID NO: 1652073 - DNA, 25 bp, Homo sapien
ctgccacagcagatggaacccgtgc

SEQ ID NO: 1652074 - DNA, 25 bp, Homo sapien
tctgggccccggtacttataacaca

SEQ ID NO: 1652075 - DNA, 25 bp, Homo sapien
aggagaagctggtcttcaagacccc

SEQ ID NO: 1652076 - DNA, 25 bp, Homo sapien
ttcaagaccccggttcagcaggtcc

SEQ ID NO: 1652077 - DNA, 25 bp, Homo sapien
aaactggtcactgccgggcaggaga

SEQ ID NO: 1652078 - DNA, 25 bp, Homo sapien
tgcagaggacgctgtcaaactggtc

SEQ ID NO: 1652079 - DNA, 25 bp, Homo sapien
gctgtactcatcttgtagtggcctg

SEQ ID NO: 1652080 - DNA, 25 bp, Homo sapien
tcttgtagtggcctgtccttggtct

SEQ ID NO: 1652081 - DNA, 25 bp, Homo sapien
tactcatcttgtagtggcctgtcct

SEQ ID NO: 1652082 - DNA, 25 bp, Homo sapien
tcatcttgtagtggcctgtccttgg

SEQ ID NO: 1652083 - DNA, 25 bp, Homo sapien
ggctgaacacaatcactcgggagat

SEQ ID NO: 1652084 - DNA, 25 bp, Homo sapien
cttggcggccgagaggctgaacaca

SEQ ID NO: 1652085 - DNA, 25 bp, Homo sapien
atgggaccgtcctgcaggaccgacc

SEQ ID NO: 1652086 - DNA, 25 bp, Homo sapien
atcactcgggagatgggaccgtcct

SEQ ID NO: 1652087 - DNA, 25 bp, Homo sapien
ctgagaggcgccgggacgtgccggg

SEQ ID NO: 1652088 - DNA, 25 bp, Homo sapien
tcgactccgctggtccacgtgggcg

SEQ ID NO: 1652089 - DNA, 25 bp, Homo sapien
gggaagttgtggacgtccagccaga

SEQ ID NO: 1652090 - DNA, 25 bp, Homo sapien
agttgtggacgtccagccagaggac

SEQ ID NO: 1652091 - DNA, 25 bp, Homo sapien
cctcaaactgatgcagcccctcgtt

SEQ ID NO: 1652092 - DNA, 25 bp, Homo sapien
tcaggttcgtcagctctgggaagag

SEQ ID NO: 1652093 - DNA, 25 bp, Homo sapien
gaggttttccacgggctgttcctca

SEQ ID NO: 1652094 - DNA, 25 bp, Homo sapien
tactggtcaggttcgtcagctctgg

SEQ ID NO: 1652095 - DNA, 25 bp, Homo sapien
tctcaagttgatccccgacctggac

SEQ ID NO: 1652096 - DNA, 25 bp, Homo sapien
atgaatggccgggtcgttcccactc

SEQ ID NO: 1652097 - DNA, 25 bp, Homo sapien
gggtcgttcccactcaagagaaaca

SEQ ID NO: 1652098 - DNA, 25 bp, Homo sapien
acacagtctcaagttgatccccgac

SEQ ID NO: 1652099 - DNA, 25 bp, Homo sapien
gaacatggcttgctagaacctcccg

SEQ ID NO: 1652100 - DNA, 25 bp, Homo sapien
tacataactgtagaaacgagccctc

SEQ ID NO: 1652101 - DNA, 25 bp, Homo sapien
gatccagacactagacccagggtta

SEQ ID NO: 1652102 - DNA, 25 bp, Homo sapien
tgtggaactctagaatgaactgcag

SEQ ID NO: 1652103 - DNA, 25 bp, Homo sapien
ccgcatggcacagctggaacggagt

SEQ ID NO: 1652104 - DNA, 25 bp, Homo sapien
tccgcatggcacagctggaacggag

SEQ ID NO: 1652105 - DNA, 25 bp, Homo sapien
catggcacagctggaacggagtgaa

SEQ ID NO: 1652106 - DNA, 25 bp, Homo sapien
tggcacagctggaacggagtgaact

SEQ ID NO: 1652107 - DNA, 25 bp, Homo sapien
caatagagtcaaggttgtactcaga

SEQ ID NO: 1652108 - DNA, 25 bp, Homo sapien
tcgtagtcgcagtaaatgttcagga

SEQ ID NO: 1652109 - DNA, 25 bp, Homo sapien
cagagccgggctcgtagtcgcagta

SEQ ID NO: 1652110 - DNA, 25 bp, Homo sapien
gggcaatagagtcaaggttgtactc

SEQ ID NO: 1652111 - DNA, 25 bp, Homo sapien
tgaaagtgtcgatggagacaatctc

SEQ ID NO: 1652112 - DNA, 25 bp, Homo sapien
atccccacaaccagaccccgcttgg

SEQ ID NO: 1652113 - DNA, 25 bp, Homo sapien
tgttgaaagtgtcgatggagacaat

SEQ ID NO: 1652114 - DNA, 25 bp, Homo sapien
cttgttgaaagtgtcgatggagaca

SEQ ID NO: 1652115 - DNA, 25 bp, Homo sapien
tcagaagccttctcaacaccacgtt

SEQ ID NO: 1652116 - DNA, 25 bp, Homo sapien
atcccattcttccagcacggtgacc

SEQ ID NO: 1652117 - DNA, 25 bp, Homo sapien
attcttccagcacggtgacccggct

SEQ ID NO: 1652118 - DNA, 25 bp, Homo sapien
tgacccggctcagacagagcctcag

SEQ ID NO: 1652119 - DNA, 25 bp, Homo sapien
gaatgtagttgaactgcagctcctt

SEQ ID NO: 1652120 - DNA, 25 bp, Homo sapien
cgggaatgtagttgaactgcagctc

SEQ ID NO: 1652121 - DNA, 25 bp, Homo sapien
ggccactggccggattttctgtcgg

SEQ ID NO: 1652122 - DNA, 25 bp, Homo sapien
gaggtcttggtagcggaagccgagc

SEQ ID NO: 1652123 - DNA, 25 bp, Homo sapien
agaagcgcgtgaagctgtcctcgcg

SEQ ID NO: 1652124 - DNA, 25 bp, Homo sapien
tgaagctgtcctcgcgcaacggaca

SEQ ID NO: 1652125 - DNA, 25 bp, Homo sapien
tctgcgacgagaagcgcgtgaagct

SEQ ID NO: 1652126 - DNA, 25 bp, Homo sapien
agcccgtacacattgctctgcgacg

SEQ ID NO: 1652127 - DNA, 25 bp, Homo sapien
cccgcactacccaacctacgactct

SEQ ID NO: 1652128 - DNA, 25 bp, Homo sapien
gcctgctcgggcctcccaggcgact

SEQ ID NO: 1652129 - DNA, 25 bp, Homo sapien
tcccaggcgactttgccccactgcg

SEQ ID NO: 1652130 - DNA, 25 bp, Homo sapien
tcgggcctcccaggcgactttgccc

SEQ ID NO: 1652131 - DNA, 25 bp, Homo sapien
tccatttctggaccaaggggctgcc

SEQ ID NO: 1652132 - DNA, 25 bp, Homo sapien
cataatcttaacagtatcaccttta

SEQ ID NO: 1652133 - DNA, 25 bp, Homo sapien
tataataaccacctcctttatcgaa

SEQ ID NO: 1652134 - DNA, 25 bp, Homo sapien
ccagctataataaccacctccttta

SEQ ID NO: 1652135 - DNA, 25 bp, Homo sapien
aatgatccagctataataaccacct

SEQ ID NO: 1652136 - DNA, 25 bp, Homo sapien
tactgttaccctccctgccggttca

SEQ ID NO: 1652137 - DNA, 25 bp, Homo sapien
tcatgctggctctgataatctgatt

SEQ ID NO: 1652138 - DNA, 25 bp, Homo sapien
ttctgcaagggcctactgttaccct

SEQ ID NO: 1652139 - DNA, 25 bp, Homo sapien
tgctggctctgataatctgattcct

SEQ ID NO: 1652140 - DNA, 25 bp, Homo sapien
attttctttcttgggccagctgcag

SEQ ID NO: 1652141 - DNA, 25 bp, Homo sapien
cccagggtctaacctgagaggtcgg

SEQ ID NO: 1652142 - DNA, 25 bp, Homo sapien
ggagaatcccctaagctccagggcc

SEQ ID NO: 1652143 - DNA, 25 bp, Homo sapien
ctcaaagcattagggaaggagcagg

SEQ ID NO: 1652144 - DNA, 25 bp, Homo sapien
tatcaaagattctgtacagctggtt

SEQ ID NO: 1652145 - DNA, 25 bp, Homo sapien
ccggcagcacccctagcaaataggt

SEQ ID NO: 1652146 - DNA, 25 bp, Homo sapien
gagagagagaaaccggcctcatgac

SEQ ID NO: 1652147 - DNA, 25 bp, Homo sapien
gaaaggagggaagctctccagcaag

SEQ ID NO: 1652148 - DNA, 25 bp, Homo sapien
atgggacaggaagacgggcactggg

SEQ ID NO: 1652149 - DNA, 25 bp, Homo sapien
cagatgggacaggaagacgggcact

SEQ ID NO: 1652150 - DNA, 25 bp, Homo sapien
aggaagacgggcactggggggctgg

SEQ ID NO: 1652151 - DNA, 25 bp, Homo sapien
ctctctgagcagatgggacaggaag

SEQ ID NO: 1652152 - DNA, 25 bp, Homo sapien
gggagatggagtcgtattccttcac

SEQ ID NO: 1652153 - DNA, 25 bp, Homo sapien
cttcttgatgcgcagcagcatggtg

SEQ ID NO: 1652154 - DNA, 25 bp, Homo sapien
cctcatcgccctggatggtcttctt

SEQ ID NO: 1652155 - DNA, 25 bp, Homo sapien
agccgggagatggagtcgtattcct

SEQ ID NO: 1652156 - DNA, 25 bp, Homo sapien
gcagcccaagggcacttgtcccaag

SEQ ID NO: 1652157 - DNA, 25 bp, Homo sapien
cctcttgtctgtcttgactatgctg

SEQ ID NO: 1652158 - DNA, 25 bp, Homo sapien
agcccaagggcacttgtcccaaggt

SEQ ID NO: 1652159 - DNA, 25 bp, Homo sapien
tgtcttgactatgctgggcacatca

SEQ ID NO: 1652160 - DNA, 25 bp, Homo sapien
actcggtgtagctgtccacattctg

SEQ ID NO: 1652161 - DNA, 25 bp, Homo sapien
cgactcggtgtagctgtccacattc

SEQ ID NO: 1652162 - DNA, 25 bp, Homo sapien
gctcctcgtgggcctctagcaattt

SEQ ID NO: 1652163 - DNA, 25 bp, Homo sapien
gactcggtgtagctgtccacattct

SEQ ID NO: 1652164 - DNA, 25 bp, Homo sapien
tttcatcaacttgcattcccgggaa

SEQ ID NO: 1652165 - DNA, 25 bp, Homo sapien
attcccgggaatcagagaaagctgg

SEQ ID NO: 1652166 - DNA, 25 bp, Homo sapien
gctcctcatacttttggacagccag

SEQ ID NO: 1652167 - DNA, 25 bp, Homo sapien
acagctcctcatacttttggacagc

SEQ ID NO: 1652168 - DNA, 25 bp, Homo sapien
agaagatgagttagtaacaagaggg

SEQ ID NO: 1652169 - DNA, 25 bp, Homo sapien
ggtcctgcgggcgtggggtgtgcta

SEQ ID NO: 1652170 - DNA, 25 bp, Homo sapien
tggtcctgcgggcgtggggtgtgct

SEQ ID NO: 1652171 - DNA, 25 bp, Homo sapien
gtcctgcgggcgtggggtgtgctac

SEQ ID NO: 1652172 - DNA, 25 bp, Homo sapien
cctggagataagcacatggtggcct

SEQ ID NO: 1652173 - DNA, 25 bp, Homo sapien
cttggcgttgagcatgtcgatgcag

SEQ ID NO: 1652174 - DNA, 25 bp, Homo sapien
agaagtggcagagggccgccttgaa

SEQ ID NO: 1652175 - DNA, 25 bp, Homo sapien
gaagaagtagtctttggcgctgtac

SEQ ID NO: 1652176 - DNA, 25 bp, Homo sapien
tgagcatgtcgatgcagaagtggca

SEQ ID NO: 1652177 - DNA, 25 bp, Homo sapien
tcagcggccagtgcgtgagcgacca

SEQ ID NO: 1652178 - DNA, 25 bp, Homo sapien
cagtgcgtgagcgaccaagatcagg

SEQ ID NO: 1652179 - DNA, 25 bp, Homo sapien
tgtcccgaggtgaggccctgttaac

SEQ ID NO: 1652180 - DNA, 25 bp, Homo sapien
agctgggagctggttcatgtcccga

SEQ ID NO: 1652181 - DNA, 25 bp, Homo sapien
attcagccaggctgaagacagggtg

SEQ ID NO: 1652182 - DNA, 25 bp, Homo sapien
tttttctcggccatcacccagggct

SEQ ID NO: 1652183 - DNA, 25 bp, Homo sapien
cactgtggatgaggaccatcgggcc

SEQ ID NO: 1652184 - DNA, 25 bp, Homo sapien
catggagtcgtaggtggagaacatt

SEQ ID NO: 1652185 - DNA, 25 bp, Homo sapien
tccagcagcgcagcgtaaccagcca

SEQ ID NO: 1652186 - DNA, 25 bp, Homo sapien
gtcaatggccttctgatactgctcc

SEQ ID NO: 1652187 - DNA, 25 bp, Homo sapien
ctgttcgtagatgtcaatggccttc

SEQ ID NO: 1652188 - DNA, 25 bp, Homo sapien
agcgtaaccagccaccttcagcaga

SEQ ID NO: 1652189 - DNA, 25 bp, Homo sapien
tgaggggaagtggtggcggtccctg

SEQ ID NO: 1652190 - DNA, 25 bp, Homo sapien
gaagtggtggcggtccctgcggggc

SEQ ID NO: 1652191 - DNA, 25 bp, Homo sapien
aggggaagtggtggcggtccctgcg

SEQ ID NO: 1652192 - DNA, 25 bp, Homo sapien
gaggggaagtggtggcggtccctgc

SEQ ID NO: 1652193 - DNA, 25 bp, Homo sapien
cagactgctcgtagtgggcaatggc

SEQ ID NO: 1652194 - DNA, 25 bp, Homo sapien
tagtagtctgcagactgctcgtagt

SEQ ID NO: 1652195 - DNA, 25 bp, Homo sapien
gtctgcagactgctcgtagtgggca

SEQ ID NO: 1652196 - DNA, 25 bp, Homo sapien
ttgtagtagtctgcagactgctcgt

SEQ ID NO: 1652197 - DNA, 25 bp, Homo sapien
agaggaggcctccgtgaagcttcca

SEQ ID NO: 1652198 - DNA, 25 bp, Homo sapien
gagaggaggcctccgtgaagcttcc

SEQ ID NO: 1652199 - DNA, 25 bp, Homo sapien
aggaggcctccgtgaagcttccaca

SEQ ID NO: 1652200 - DNA, 25 bp, Homo sapien
gaggaggcctccgtgaagcttccac

SEQ ID NO: 1652201 - DNA, 25 bp, Homo sapien
cgccctgcctgcctgggacacagcc

SEQ ID NO: 1652202 - DNA, 25 bp, Homo sapien
ctgcctgcctgggacacagccagac

SEQ ID NO: 1652203 - DNA, 25 bp, Homo sapien
cctccgccctgcctgcctgggacac

SEQ ID NO: 1652204 - DNA, 25 bp, Homo sapien
ccctgcctgcctgggacacagccag

SEQ ID NO: 1652205 - DNA, 25 bp, Homo sapien
tgcccccttctcggcactcagacac

SEQ ID NO: 1652206 - DNA, 25 bp, Homo sapien
tggctgccagcccatgcagggccct

SEQ ID NO: 1652207 - DNA, 25 bp, Homo sapien
gagagcagcactggtcctggctgcc

SEQ ID NO: 1652208 - DNA, 25 bp, Homo sapien
aagagagagcagcactggtcctggc

SEQ ID NO: 1652209 - DNA, 25 bp, Homo sapien
catgcagggccctgctgccactcac

SEQ ID NO: 1652210 - DNA, 25 bp, Homo sapien
tctcatagatctcagcaatggagat

SEQ ID NO: 1652211 - DNA, 25 bp, Homo sapien
cttctcgatgtccaccaactctgtc

SEQ ID NO: 1652212 - DNA, 25 bp, Homo sapien
tctcagcaatggagatgtggtgctt

SEQ ID NO: 1652213 - DNA, 25 bp, Homo sapien
ggtgcttggccgcaatcgtgaatcg

SEQ ID NO: 1652214 - DNA, 25 bp, Homo sapien
tctgtgtagatctcgattgctcgca

SEQ ID NO: 1652215 - DNA, 25 bp, Homo sapien
gatctcgattgctcgcatcaaacag

SEQ ID NO: 1652216 - DNA, 25 bp, Homo sapien
tgctcgcatcaaacagttaatggcc

SEQ ID NO: 1652217 - DNA, 25 bp, Homo sapien
catgtctgtgtagatctcgattgct

SEQ ID NO: 1652218 - DNA, 25 bp, Homo sapien
gagacatgagaaagtgaagtcgttt

SEQ ID NO: 1652219 - DNA, 25 bp, Homo sapien
aggtgggaggagacatgagaaagtg

SEQ ID NO: 1652220 - DNA, 25 bp, Homo sapien
ggaggagacatgagaaagtgaagtc

SEQ ID NO: 1652221 - DNA, 25 bp, Homo sapien
gaaagtgaagtcgtttcagcagaag

SEQ ID NO: 1652222 - DNA, 25 bp, Homo sapien
gctcacggtctggatgggactccaa

SEQ ID NO: 1652223 - DNA, 25 bp, Homo sapien
aagagggtgctaccaagaagcgccg

SEQ ID NO: 1652224 - DNA, 25 bp, Homo sapien
tacagcactcagtccaggttctagg

SEQ ID NO: 1652225 - DNA, 25 bp, Homo sapien
cacgaggaggctggatgtcatcaac

SEQ ID NO: 1652226 - DNA, 25 bp, Homo sapien
gctctggagcacccgccgtcagcat

SEQ ID NO: 1652227 - DNA, 25 bp, Homo sapien
ccctccatgtctggaaagcggcggg

SEQ ID NO: 1652228 - DNA, 25 bp, Homo sapien
catgtctggaaagcggcgggccacc

SEQ ID NO: 1652229 - DNA, 25 bp, Homo sapien
cagcaacatggactcacggggttaa

SEQ ID NO: 1652230 - DNA, 25 bp, Homo sapien
ctcacggggttaagtcccctccatg

SEQ ID NO: 1652231 - DNA, 25 bp, Homo sapien
gggcctccagcgctgtctcacaagg

SEQ ID NO: 1652232 - DNA, 25 bp, Homo sapien
ggaagccaggcaaggttccaaatcg

SEQ ID NO: 1652233 - DNA, 25 bp, Homo sapien
caggcaaggttccaaatcgggcctc

SEQ ID NO: 1652234 - DNA, 25 bp, Homo sapien
aaatcgggcctccagcgctgtctca

SEQ ID NO: 1652235 - DNA, 25 bp, Homo sapien
tgttctctggcaactacatctcggg

SEQ ID NO: 1652236 - DNA, 25 bp, Homo sapien
gccaggttgggctaatttccgctcc

SEQ ID NO: 1652237 - DNA, 25 bp, Homo sapien
tttttcggcagcaactcctacctgg

SEQ ID NO: 1652238 - DNA, 25 bp, Homo sapien
taattagcaacctgtacctggcacc

SEQ ID NO: 1652239 - DNA, 25 bp, Homo sapien
tcacatgtcggccactggaaaaacc

SEQ ID NO: 1652240 - DNA, 25 bp, Homo sapien
agccagcccgtgtggcccgcagagg

SEQ ID NO: 1652241 - DNA, 25 bp, Homo sapien
tgtcggccactggaaaaaccagagc

SEQ ID NO: 1652242 - DNA, 25 bp, Homo sapien
gctaggatggcgctccggacagcca

SEQ ID NO: 1652243 - DNA, 25 bp, Homo sapien
cacaaagcaggtggctgcgtcgtgc

SEQ ID NO: 1652244 - DNA, 25 bp, Homo sapien
caggtggctgcgtcgtgcttgctct

SEQ ID NO: 1652245 - DNA, 25 bp, Homo sapien
gtgcagcctggcagaacgcgtttcc

SEQ ID NO: 1652246 - DNA, 25 bp, Homo sapien
gctttcttgaatgcgttgccagcgt

SEQ ID NO: 1652247 - DNA, 25 bp, Homo sapien
cacttactagttctggcatcctggg

SEQ ID NO: 1652248 - DNA, 25 bp, Homo sapien
tgcagggagctccaaacagatctcc

SEQ ID NO: 1652249 - DNA, 25 bp, Homo sapien
gcttgttggacttcttgggcctgca

SEQ ID NO: 1652250 - DNA, 25 bp, Homo sapien
gcaagagactaagccaagcctcagt

SEQ ID NO: 1652251 - DNA, 25 bp, Homo sapien
ggaagctgagggaggaggagagcac

SEQ ID NO: 1652252 - DNA, 25 bp, Homo sapien
agtggaagctgagggaggaggagag

SEQ ID NO: 1652253 - DNA, 25 bp, Homo sapien
tggaagctgagggaggaggagagca

SEQ ID NO: 1652254 - DNA, 25 bp, Homo sapien
gtggaagctgagggaggaggagagc

SEQ ID NO: 1652255 - DNA, 25 bp, Homo sapien
cttggaggagctctagcggagatga

SEQ ID NO: 1652256 - DNA, 25 bp, Homo sapien
tggaggagctctagcggagatgaca

SEQ ID NO: 1652257 - DNA, 25 bp, Homo sapien
gaggagctctagcggagatgacata

SEQ ID NO: 1652258 - DNA, 25 bp, Homo sapien
aggagctctagcggagatgacatac

SEQ ID NO: 1652259 - DNA, 25 bp, Homo sapien
tgctgctctggcgtagatttcgcat

SEQ ID NO: 1652260 - DNA, 25 bp, Homo sapien
catgtttgctgctctggcgtagatt

SEQ ID NO: 1652261 - DNA, 25 bp, Homo sapien
tctggcgtagatttcgcatgcttcc

SEQ ID NO: 1652262 - DNA, 25 bp, Homo sapien
gatttcgcatgcttcctctattttg

SEQ ID NO: 1652263 - DNA, 25 bp, Homo sapien
tggcacactcacttcgggcagacca

SEQ ID NO: 1652264 - DNA, 25 bp, Homo sapien
agtgccgggcacagacgtgccccta

SEQ ID NO: 1652265 - DNA, 25 bp, Homo sapien
gaccagctccctccgggagtactgg

SEQ ID NO: 1652266 - DNA, 25 bp, Homo sapien
tctagtcggctatccaggagaaagc

SEQ ID NO: 1652267 - DNA, 25 bp, Homo sapien
gccacacactttgggattcgctcag

SEQ ID NO: 1652268 - DNA, 25 bp, Homo sapien
tgcactgcggattcagtgtgtccaa

SEQ ID NO: 1652269 - DNA, 25 bp, Homo sapien
gaagtgctcatttcatcaaaccaga

SEQ ID NO: 1652270 - DNA, 25 bp, Homo sapien
tcagccacatgaagtgctcatttca

SEQ ID NO: 1652271 - DNA, 25 bp, Homo sapien
gcggccaggcctggcaatgtcagca

SEQ ID NO: 1652272 - DNA, 25 bp, Homo sapien
gaaagcagccaccagcgatcagatc

SEQ ID NO: 1652273 - DNA, 25 bp, Homo sapien
gcgatcagatcagcggccaggcctg

SEQ ID NO: 1652274 - DNA, 25 bp, Homo sapien
acggtgggcgggctggttgggccag

SEQ ID NO: 1652275 - DNA, 25 bp, Homo sapien
tagaaatgggagtgaagtccccaaa

SEQ ID NO: 1652276 - DNA, 25 bp, Homo sapien
agaaatgggagtgaagtccccaaag

SEQ ID NO: 1652277 - DNA, 25 bp, Homo sapien
gaaagtgacgtgcctaggttccagt

SEQ ID NO: 1652278 - DNA, 25 bp, Homo sapien
atcaatccagtccatcagccccgga

SEQ ID NO: 1652279 - DNA, 25 bp, Homo sapien
ccagtccatcagccccggatgtttc

SEQ ID NO: 1652280 - DNA, 25 bp, Homo sapien
aatccagtccatcagccccggatgt

SEQ ID NO: 1652281 - DNA, 25 bp, Homo sapien
ctaatcaatccagtccatcagcccc

SEQ ID NO: 1652282 - DNA, 25 bp, Homo sapien
ggctcaccgctcctaggatcatcta

SEQ ID NO: 1652283 - DNA, 25 bp, Homo sapien
ggttcctccgttcagctgtccttaa

SEQ ID NO: 1652284 - DNA, 25 bp, Homo sapien
taggatcatctagccctgagcccct

SEQ ID NO: 1652285 - DNA, 25 bp, Homo sapien
taaactagtcactgctaaccagggc

SEQ ID NO: 1652286 - DNA, 25 bp, Homo sapien
catcgcctccgcttccttcccggaa

SEQ ID NO: 1652287 - DNA, 25 bp, Homo sapien
gcgagttcttcactttgcgctccgc

SEQ ID NO: 1652288 - DNA, 25 bp, Homo sapien
cagagaagaaggactgcgagttctt

SEQ ID NO: 1652289 - DNA, 25 bp, Homo sapien
caacagcgccatcgcctccgcttcc

SEQ ID NO: 1652290 - DNA, 25 bp, Homo sapien
gccacaaagggactcagcaaagcgc

SEQ ID NO: 1652291 - DNA, 25 bp, Homo sapien
cggccacaaagggactcagcaaagc

SEQ ID NO: 1652292 - DNA, 25 bp, Homo sapien
ggccacaaagggactcagcaaagcg

SEQ ID NO: 1652293 - DNA, 25 bp, Homo sapien
ggcggccacaaagggactcagcaaa

SEQ ID NO: 1652294 - DNA, 25 bp, Homo sapien
ttgcggccaggaaccacgtgactag

SEQ ID NO: 1652295 - DNA, 25 bp, Homo sapien
agatcggtaaaactcgcccggctgc

SEQ ID NO: 1652296 - DNA, 25 bp, Homo sapien
caatcggcgtcaagagacctcaacg

SEQ ID NO: 1652297 - DNA, 25 bp, Homo sapien
cgggccgcggaacacagatcggtaa

SEQ ID NO: 1652298 - DNA, 25 bp, Homo sapien
gttctgcgcagaacttagtcccgcc

SEQ ID NO: 1652299 - DNA, 25 bp, Homo sapien
ccctctgtcggccagtactagaact

SEQ ID NO: 1652300 - DNA, 25 bp, Homo sapien
cccacgcccgggtttgacagttctg

SEQ ID NO: 1652301 - DNA, 25 bp, Homo sapien
tcttcacttggaaaggcgtttgtgg

SEQ ID NO: 1652302 - DNA, 25 bp, Homo sapien
tatgaacctaaggagagtggagcct

SEQ ID NO: 1652303 - DNA, 25 bp, Homo sapien
gaatctggaaggtagagtccccgcc

SEQ ID NO: 1652304 - DNA, 25 bp, Homo sapien
ctaagatttaagagctacccagagc

SEQ ID NO: 1652305 - DNA, 25 bp, Homo sapien
cagaattcatcgcaagactagggac

SEQ ID NO: 1652306 - DNA, 25 bp, Homo sapien
tagctggaagggcttcactggccac

SEQ ID NO: 1652307 - DNA, 25 bp, Homo sapien
catatgggcatttcgactcttgatc

SEQ ID NO: 1652308 - DNA, 25 bp, Homo sapien
ctccacgtggtcctgaaggcggtgc

SEQ ID NO: 1652309 - DNA, 25 bp, Homo sapien
aaggcggtgccgcttcatatgggca

SEQ ID NO: 1652310 - DNA, 25 bp, Homo sapien
tgaggatggactccctcctataact

SEQ ID NO: 1652311 - DNA, 25 bp, Homo sapien
gggtccgcttggagcctgcatttgg

SEQ ID NO: 1652312 - DNA, 25 bp, Homo sapien
ctataactcttggtctttaacttgg

SEQ ID NO: 1652313 - DNA, 25 bp, Homo sapien
tctgcacttcccaacagctcggggg

SEQ ID NO: 1652314 - DNA, 25 bp, Homo sapien
gcaaaagtgacataagggtgctgac

SEQ ID NO: 1652315 - DNA, 25 bp, Homo sapien
aaagtgacataagggtgctgacctg

SEQ ID NO: 1652316 - DNA, 25 bp, Homo sapien
ggagcaaaagtgacataagggtgct

SEQ ID NO: 1652317 - DNA, 25 bp, Homo sapien
gcagagggagcaaaagtgacataag

SEQ ID NO: 1652318 - DNA, 25 bp, Homo sapien
gtctcctgcaggaaaacccttccat

SEQ ID NO: 1652319 - DNA, 25 bp, Homo sapien
tgcaggaaaacccttccatcaggag

SEQ ID NO: 1652320 - DNA, 25 bp, Homo sapien
ccatcaggagcacccccgccctctg

SEQ ID NO: 1652321 - DNA, 25 bp, Homo sapien
tccatcaggagcacccccgccctct

SEQ ID NO: 1652322 - DNA, 25 bp, Homo sapien
caactcaacgggtagcaggcactgg

SEQ ID NO: 1652323 - DNA, 25 bp, Homo sapien
gagaagagctcccgacacagccctg

SEQ ID NO: 1652324 - DNA, 25 bp, Homo sapien
tccaactcaacgggtagcaggcact

SEQ ID NO: 1652325 - DNA, 25 bp, Homo sapien
gagagaagagctcccgacacagccc

SEQ ID NO: 1652326 - DNA, 25 bp, Homo sapien
taatactcaacgcactgagctaccg

SEQ ID NO: 1652327 - DNA, 25 bp, Homo sapien
taataatactcaacgcactgagcta

SEQ ID NO: 1652328 - DNA, 25 bp, Homo sapien
caacgcactgagctaccgtctttgt

SEQ ID NO: 1652329 - DNA, 25 bp, Homo sapien
gccacagtcaaacttgatcattttt

SEQ ID NO: 1652330 - DNA, 25 bp, Homo sapien
tctataggggtccagacgtctgaac

SEQ ID NO: 1652331 - DNA, 25 bp, Homo sapien
catagaacgccttcttaaaaagcct

SEQ ID NO: 1652332 - DNA, 25 bp, Homo sapien
cttgtgtatcaagtagaagtccttc

SEQ ID NO: 1652333 - DNA, 25 bp, Homo sapien
gaagtccttcttgtgggcatagaac

SEQ ID NO: 1652334 - DNA, 25 bp, Homo sapien
gggccctcggagcagaagagtctcc

SEQ ID NO: 1652335 - DNA, 25 bp, Homo sapien
ccctcggagcagaagagtctccagg

SEQ ID NO: 1652336 - DNA, 25 bp, Homo sapien
ctgtgtagcgatagtcagcgagcag

SEQ ID NO: 1652337 - DNA, 25 bp, Homo sapien
atagtcagcgagcaggtgtgtccgt

SEQ ID NO: 1652338 - DNA, 25 bp, Homo sapien
acaagaggagcgacaggctgcccag

SEQ ID NO: 1652339 - DNA, 25 bp, Homo sapien
ggaacaagaggagcgacaggctgcc

SEQ ID NO: 1652340 - DNA, 25 bp, Homo sapien
ctggaacaagaggagcgacaggctg

SEQ ID NO: 1652341 - DNA, 25 bp, Homo sapien
aacaagaggagcgacaggctgccca

SEQ ID NO: 1652342 - DNA, 25 bp, Homo sapien
catgccacattgcagagctcggtca

SEQ ID NO: 1652343 - DNA, 25 bp, Homo sapien
cctggcatcacgctggagcatgcca

SEQ ID NO: 1652344 - DNA, 25 bp, Homo sapien
cagagcgagctccaggttggtgccc

SEQ ID NO: 1652345 - DNA, 25 bp, Homo sapien
tgccctgagcctcgtgcaggcagtg

SEQ ID NO: 1652346 - DNA, 25 bp, Homo sapien
gaagaggaggcacacaggagtcatc

SEQ ID NO: 1652347 - DNA, 25 bp, Homo sapien
ggaggcacacaggagtcatcaggtg

SEQ ID NO: 1652348 - DNA, 25 bp, Homo sapien
gaggaggcacacaggagtcatcagg

SEQ ID NO: 1652349 - DNA, 25 bp, Homo sapien
ctgtttccaagaaggacatgaggaa

SEQ ID NO: 1652350 - DNA, 25 bp, Homo sapien
ctttcccgaaagacagcagagaggg

SEQ ID NO: 1652351 - DNA, 25 bp, Homo sapien
gaacctttcccgaaagacagcagag

SEQ ID NO: 1652352 - DNA, 25 bp, Homo sapien
acctttcccgaaagacagcagagag

SEQ ID NO: 1652353 - DNA, 25 bp, Homo sapien
gaggaacctttcccgaaagacagca

SEQ ID NO: 1652354 - DNA, 25 bp, Homo sapien
tctcctggagttccgggatctctgc

SEQ ID NO: 1652355 - DNA, 25 bp, Homo sapien
ttccagaccagagaagctacatgct

SEQ ID NO: 1652356 - DNA, 25 bp, Homo sapien
gaaaccggcttcctatattgatatg

SEQ ID NO: 1652357 - DNA, 25 bp, Homo sapien
tacatgctcgtcagttccagccagg

SEQ ID NO: 1652358 - DNA, 25 bp, Homo sapien
gatgggaagtgaaatggagacgctc

SEQ ID NO: 1652359 - DNA, 25 bp, Homo sapien
gctgtctcaggtgcatcaggtacgt

SEQ ID NO: 1652360 - DNA, 25 bp, Homo sapien
gggaagtgaaatggagacgctctgt

SEQ ID NO: 1652361 - DNA, 25 bp, Homo sapien
ctgtctcaggtgcatcaggtacgtg

SEQ ID NO: 1652362 - DNA, 25 bp, Homo sapien
caccacacagatgccaaaggaccca

SEQ ID NO: 1652363 - DNA, 25 bp, Homo sapien
ccttcaccacacagatgccaaagga

SEQ ID NO: 1652364 - DNA, 25 bp, Homo sapien
ttcaccacacagatgccaaaggacc

SEQ ID NO: 1652365 - DNA, 25 bp, Homo sapien
cttcaccacacagatgccaaaggac

SEQ ID NO: 1652366 - DNA, 25 bp, Homo sapien
gatatgggcggagtcactgctaatg

SEQ ID NO: 1652367 - DNA, 25 bp, Homo sapien
aaatggggcccatctgtacaaggga

SEQ ID NO: 1652368 - DNA, 25 bp, Homo sapien
acttacatgaaatgtcctgaatagg

SEQ ID NO: 1652369 - DNA, 25 bp, Homo sapien
gatatgcactacaatatgaagggac

SEQ ID NO: 1652370 - DNA, 25 bp, Homo sapien
caggaggcagtccaccaggaacatg

SEQ ID NO: 1652371 - DNA, 25 bp, Homo sapien
ggctggcctgagtggacgtggaaca

SEQ ID NO: 1652372 - DNA, 25 bp, Homo sapien
ctgtctcgctcctccccgtctttct

SEQ ID NO: 1652373 - DNA, 25 bp, Homo sapien
cctgagtggacgtggaacagagggt

SEQ ID NO: 1652374 - DNA, 25 bp, Homo sapien
tcttcagtagggggtcctccagtac

SEQ ID NO: 1652375 - DNA, 25 bp, Homo sapien
ttcagtagggggtcctccagtacag

SEQ ID NO: 1652376 - DNA, 25 bp, Homo sapien
ggagcttcttcagtagggggtcctc

SEQ ID NO: 1652377 - DNA, 25 bp, Homo sapien
caggagcttcttcagtagggggtcc

SEQ ID NO: 1652378 - DNA, 25 bp, Homo sapien
catggccatgctccctatgtgtcgg

SEQ ID NO: 1652379 - DNA, 25 bp, Homo sapien
tggttcctgggggactatgcctgtc

SEQ ID NO: 1652380 - DNA, 25 bp, Homo sapien
tcagcacctgtcttagcggcttgca

SEQ ID NO: 1652381 - DNA, 25 bp, Homo sapien
tcactggaaccacggggatcgattg

SEQ ID NO: 1652382 - DNA, 25 bp, Homo sapien
gcggttcctgcttccctcgaggtga

SEQ ID NO: 1652383 - DNA, 25 bp, Homo sapien
ttcttgcagacaaaagtgctcctgg

SEQ ID NO: 1652384 - DNA, 25 bp, Homo sapien
tttctccgtataaaacatctggctg

SEQ ID NO: 1652385 - DNA, 25 bp, Homo sapien
gacggccactggtcgctgtgaaaac

SEQ ID NO: 1652386 - DNA, 25 bp, Homo sapien
cttccttcaccggatgggggagcct

SEQ ID NO: 1652387 - DNA, 25 bp, Homo sapien
ccttcaccggatgggggagcctgta

SEQ ID NO: 1652388 - DNA, 25 bp, Homo sapien
atgggggagcctgtagatgtttcca

SEQ ID NO: 1652389 - DNA, 25 bp, Homo sapien
gggggagcctgtagatgtttccacc

SEQ ID NO: 1652390 - DNA, 25 bp, Homo sapien
tctctttccggaagccggagaatcg

SEQ ID NO: 1652391 - DNA, 25 bp, Homo sapien
gggcccggccgatgagaaggaggcc

SEQ ID NO: 1652392 - DNA, 25 bp, Homo sapien
gagaagccgcacagcacatatccat

SEQ ID NO: 1652393 - DNA, 25 bp, Homo sapien
gaatattgtcagcttggacttggag

SEQ ID NO: 1652394 - DNA, 25 bp, Homo sapien
ttgcccaagagccggtagcctccac

SEQ ID NO: 1652395 - DNA, 25 bp, Homo sapien
ggttgcccaagagccggtagcctcc

SEQ ID NO: 1652396 - DNA, 25 bp, Homo sapien
gggttgcccaagagccggtagcctc

SEQ ID NO: 1652397 - DNA, 25 bp, Homo sapien
tggggttgcccaagagccggtagcc

SEQ ID NO: 1652398 - DNA, 25 bp, Homo sapien
tttagaggatcgcagctgcttggcc

SEQ ID NO: 1652399 - DNA, 25 bp, Homo sapien
cctaactgggtctgccgttggcctg

SEQ ID NO: 1652400 - DNA, 25 bp, Homo sapien
catgggagaagatccgctgggactt

SEQ ID NO: 1652401 - DNA, 25 bp, Homo sapien
tgaagccgcgccattctcggctggg

SEQ ID NO: 1652402 - DNA, 25 bp, Homo sapien
tgctcgtggctcacaagaggttcct

SEQ ID NO: 1652403 - DNA, 25 bp, Homo sapien
gcttgtggacaacaaacacgttgtt

SEQ ID NO: 1652404 - DNA, 25 bp, Homo sapien
cacaggaaggagtcgcagtcgacct

SEQ ID NO: 1652405 - DNA, 25 bp, Homo sapien
gcttttgggacagcccggcaggttc

SEQ ID NO: 1652406 - DNA, 25 bp, Homo sapien
gtcttctggtggacgatgctactca

SEQ ID NO: 1652407 - DNA, 25 bp, Homo sapien
aagctcggtgtccagcgctgctggg

SEQ ID NO: 1652408 - DNA, 25 bp, Homo sapien
ggctcctcgggaagctcggtgtcca

SEQ ID NO: 1652409 - DNA, 25 bp, Homo sapien
gggtgcaggacgaggaccccgatga

SEQ ID NO: 1652410 - DNA, 25 bp, Homo sapien
tggccggccgactcgtgggcgtggg

SEQ ID NO: 1652411 - DNA, 25 bp, Homo sapien
caggccgtgatggacctcgtagtgc

SEQ ID NO: 1652412 - DNA, 25 bp, Homo sapien
gcagagagcggtagtcgcagtagct

SEQ ID NO: 1652413 - DNA, 25 bp, Homo sapien
agccctgctcgatgcacacgaaggg

SEQ ID NO: 1652414 - DNA, 25 bp, Homo sapien
cctgggaccgggctttctgctgtag

SEQ ID NO: 1652415 - DNA, 25 bp, Homo sapien
ggcacctgggaccgggctttctgct

SEQ ID NO: 1652416 - DNA, 25 bp, Homo sapien
ctttctgctgtaggaccctggtggc

SEQ ID NO: 1652417 - DNA, 25 bp, Homo sapien
agcaggggcgtcaccggggcacctg

SEQ ID NO: 1652418 - DNA, 25 bp, Homo sapien
tgtgctgccgctttcctttcctggc

SEQ ID NO: 1652419 - DNA, 25 bp, Homo sapien
agaactggcgctgctgaacaccttc

SEQ ID NO: 1652420 - DNA, 25 bp, Homo sapien
tttgcagacgtgcttcctttcctgg

SEQ ID NO: 1652421 - DNA, 25 bp, Homo sapien
tctttagccttaagcacacctagcc

SEQ ID NO: 1652422 - DNA, 25 bp, Homo sapien
aatcccggttgagggtgtcgctgca

SEQ ID NO: 1652423 - DNA, 25 bp, Homo sapien
caaggtgtctaagttgtcctccagc

SEQ ID NO: 1652424 - DNA, 25 bp, Homo sapien
cagaatcactgtccttcccggagta

SEQ ID NO: 1652425 - DNA, 25 bp, Homo sapien
gcacctcgctggacatgtcaggcgt

SEQ ID NO: 1652426 - DNA, 25 bp, Homo sapien
tgaaaatgaagggaggtgcatttct

SEQ ID NO: 1652427 - DNA, 25 bp, Homo sapien
ggcaccctcgtctccaaggctgtac

SEQ ID NO: 1652428 - DNA, 25 bp, Homo sapien
gtcctgcatgtccacatacacatgt

SEQ ID NO: 1652429 - DNA, 25 bp, Homo sapien
agtcctgcatgtccacatacacatg

SEQ ID NO: 1652430 - DNA, 25 bp, Homo sapien
caagttagtgaatctccagggaaca

SEQ ID NO: 1652431 - DNA, 25 bp, Homo sapien
tggtaaatgcaggatactcccaatt

SEQ ID NO: 1652432 - DNA, 25 bp, Homo sapien
ccactggatatgtcctcctggaaca

SEQ ID NO: 1652433 - DNA, 25 bp, Homo sapien
ggtgacaagcagaccactggatatg

SEQ ID NO: 1652434 - DNA, 25 bp, Homo sapien
gcaggcgcgcgtacgtgaccgcggg

SEQ ID NO: 1652435 - DNA, 25 bp, Homo sapien
gcgctctcggctgcttctccgaggg

SEQ ID NO: 1652436 - DNA, 25 bp, Homo sapien
cgcctcacgcctcccagagcggcct

SEQ ID NO: 1652437 - DNA, 25 bp, Homo sapien
cgcgcgtgcctcctggccgcgcgct

SEQ ID NO: 1652438 - DNA, 25 bp, Homo sapien
tccctcgccagccattcttggtctt

SEQ ID NO: 1652439 - DNA, 25 bp, Homo sapien
ctccctcgccagccattcttggtct

SEQ ID NO: 1652440 - DNA, 25 bp, Homo sapien
tcctccctcgccagccattcttggt

SEQ ID NO: 1652441 - DNA, 25 bp, Homo sapien
cctccctcgccagccattcttggtc

SEQ ID NO: 1652442 - DNA, 25 bp, Homo sapien
tcaaaaaacggacaggcagaagccc

SEQ ID NO: 1652443 - DNA, 25 bp, Homo sapien
cgactctccgcatccgccgagggta

SEQ ID NO: 1652444 - DNA, 25 bp, Homo sapien
ctcccagaagctgtcaggcggcggc

SEQ ID NO: 1652445 - DNA, 25 bp, Homo sapien
cagctccagggatcgcggtgctcag

SEQ ID NO: 1652446 - DNA, 25 bp, Homo sapien
cgcccgcagtaggcccgattcaaat

SEQ ID NO: 1652447 - DNA, 25 bp, Homo sapien
ctgggccaataggcggctgggctcc

SEQ ID NO: 1652448 - DNA, 25 bp, Homo sapien
tgcctgatttcgtggcggctcgcag

SEQ ID NO: 1652449 - DNA, 25 bp, Homo sapien
agtctgggcgctccgggcgctcggc

SEQ ID NO: 1652450 - DNA, 25 bp, Homo sapien
gctgggcgcgcagttgcctgatttc

SEQ ID NO: 1652451 - DNA, 25 bp, Homo sapien
taagggcaacgcgtgaatccgtgtc

SEQ ID NO: 1652452 - DNA, 25 bp, Homo sapien
ccagctagggtgagtgatcgagcca

SEQ ID NO: 1652453 - DNA, 25 bp, Homo sapien
gctatcttttcggacctgcggcgct

SEQ ID NO: 1652454 - DNA, 25 bp, Homo sapien
tgcacgagcttttctagggcactgg

SEQ ID NO: 1652455 - DNA, 25 bp, Homo sapien
tacacctctttacggagggcacttg

SEQ ID NO: 1652456 - DNA, 25 bp, Homo sapien
ggcctgagattcatgataagctctc

SEQ ID NO: 1652457 - DNA, 25 bp, Homo sapien
gtgacaggtcctagctctctggtgt

SEQ ID NO: 1652458 - DNA, 25 bp, Homo sapien
gaaactagaaacatccaaggcatca

SEQ ID NO: 1652459 - DNA, 25 bp, Homo sapien
taagtacattacacgctggccacag

SEQ ID NO: 1652460 - DNA, 25 bp, Homo sapien
gacttcagtggacctggttcggaaa

SEQ ID NO: 1652461 - DNA, 25 bp, Homo sapien
catagctccccgctcaagatggaaa

SEQ ID NO: 1652462 - DNA, 25 bp, Homo sapien
cagacattcccgttttccagacagg

SEQ ID NO: 1652463 - DNA, 25 bp, Homo sapien
gaaggggtaagatgcacctcgaagt

SEQ ID NO: 1652464 - DNA, 25 bp, Homo sapien
ggtaagatgcacctcgaagttgggc

SEQ ID NO: 1652465 - DNA, 25 bp, Homo sapien
ttttgagaaggggtaagatgcacct

SEQ ID NO: 1652466 - DNA, 25 bp, Homo sapien
gcacctcgaagttgggctgagggca

SEQ ID NO: 1652467 - DNA, 25 bp, Homo sapien
ccttggggtccttgagggagcgcct

SEQ ID NO: 1652468 - DNA, 25 bp, Homo sapien
gggtccttgagggagcgcctggtgg

SEQ ID NO: 1652469 - DNA, 25 bp, Homo sapien
gtccttgagggagcgcctggtggcc

SEQ ID NO: 1652470 - DNA, 25 bp, Homo sapien
tggggtccttgagggagcgcctggt

SEQ ID NO: 1652471 - DNA, 25 bp, Homo sapien
ccagcacaaatagccggtgctgtgc

SEQ ID NO: 1652472 - DNA, 25 bp, Homo sapien
ggaacacacccattcccctgcaaag

SEQ ID NO: 1652473 - DNA, 25 bp, Homo sapien
gggagagcgatgaggcaggaacaca

SEQ ID NO: 1652474 - DNA, 25 bp, Homo sapien
cagtgtctgaggattgccagctgag

SEQ ID NO: 1652475 - DNA, 25 bp, Homo sapien
acctccagtgatttgccctcctcag

SEQ ID NO: 1652476 - DNA, 25 bp, Homo sapien
tcactggtgcccaggctggattgcg

SEQ ID NO: 1652477 - DNA, 25 bp, Homo sapien
agcctcccaaagtgttgagattaca

SEQ ID NO: 1652478 - DNA, 25 bp, Homo sapien
tgacctccagtgatttgccctcctc

SEQ ID NO: 1652479 - DNA, 25 bp, Homo sapien
tctgtatcccaaagtttggcaaagg

SEQ ID NO: 1652480 - DNA, 25 bp, Homo sapien
gagctgttcacggatcgtgatggca

SEQ ID NO: 1652481 - DNA, 25 bp, Homo sapien
tcacggatcgtgatggcaataacca

SEQ ID NO: 1652482 - DNA, 25 bp, Homo sapien
agccagttaagagctgttcacggat

SEQ ID NO: 1652483 - DNA, 25 bp, Homo sapien
taatcattacatatggaaaaaagtc

SEQ ID NO: 1652484 - DNA, 25 bp, Homo sapien
tcagtagtgttaaatgtacttttat

SEQ ID NO: 1652485 - DNA, 25 bp, Homo sapien
aaaaagtcatataacacgacgaaag

SEQ ID NO: 1652486 - DNA, 25 bp, Homo sapien
gacgaaagtctttgcaccatctcct

SEQ ID NO: 1652487 - DNA, 25 bp, Homo sapien
taatattccgttgcatgaatagacc

SEQ ID NO: 1652488 - DNA, 25 bp, Homo sapien
cctgaaggcttattcgtggtgtggc

SEQ ID NO: 1652489 - DNA, 25 bp, Homo sapien
taagtgccaaatttaagtggactcc

SEQ ID NO: 1652490 - DNA, 25 bp, Homo sapien
catgagttgcttactcctcttggct

SEQ ID NO: 1652491 - DNA, 25 bp, Homo sapien
gcgtcaggccttgacgggctctgca

SEQ ID NO: 1652492 - DNA, 25 bp, Homo sapien
gcggcttctggaacccattctctga

SEQ ID NO: 1652493 - DNA, 25 bp, Homo sapien
ccttgccagacgagtgagaatgagc

SEQ ID NO: 1652494 - DNA, 25 bp, Homo sapien
agaatgagcagtggcgtcaggcctt

SEQ ID NO: 1652495 - DNA, 25 bp, Homo sapien
gatctgccttgtgggaccaggagga

SEQ ID NO: 1652496 - DNA, 25 bp, Homo sapien
tcgggcctgccctcgacatgggatc

SEQ ID NO: 1652497 - DNA, 25 bp, Homo sapien
catgggatctgccttgtgggaccag

SEQ ID NO: 1652498 - DNA, 25 bp, Homo sapien
ggcctgccctcgacatgggatctgc

SEQ ID NO: 1652499 - DNA, 25 bp, Homo sapien
ttctggtattataggctggagccac

SEQ ID NO: 1652500 - DNA, 25 bp, Homo sapien
tctcaagtgacttgcttgccctggc

SEQ ID NO: 1652501 - DNA, 25 bp, Homo sapien
tacattaataccattctggcctttg

SEQ ID NO: 1652502 - DNA, 25 bp, Homo sapien
catgccctgccaacagcaggttaca

SEQ ID NO: 1652503 - DNA, 25 bp, Homo sapien
agtgtgagccatgatgccttgcacc

SEQ ID NO: 1652504 - DNA, 25 bp, Homo sapien
tgagccatgatgccttgcaccccac

SEQ ID NO: 1652505 - DNA, 25 bp, Homo sapien
agccatgatgccttgcaccccaccc

SEQ ID NO: 1652506 - DNA, 25 bp, Homo sapien
ataagtgtgagccatgatgccttgc

SEQ ID NO: 1652507 - DNA, 25 bp, Homo sapien
tgcacggggatcctgtccacgatgg

SEQ ID NO: 1652508 - DNA, 25 bp, Homo sapien
ggtgcctgtgaccaagatgtccgca

SEQ ID NO: 1652509 - DNA, 25 bp, Homo sapien
agaccctgctatgtccttgaccaca

SEQ ID NO: 1652510 - DNA, 25 bp, Homo sapien
gatgtccgcatcgttagtgaagacc

SEQ ID NO: 1652511 - DNA, 25 bp, Homo sapien
gtgattttcctgcctcagccttccg

SEQ ID NO: 1652512 - DNA, 25 bp, Homo sapien
ggcctcccaaattacagggctgagc

SEQ ID NO: 1652513 - DNA, 25 bp, Homo sapien
tgcaaccctccaccacccagggtca

SEQ ID NO: 1652514 - DNA, 25 bp, Homo sapien
tggcctcccaaattacagggctgag

SEQ ID NO: 1652515 - DNA, 25 bp, Homo sapien
cttctcctcgggacgctgtctcttg

SEQ ID NO: 1652516 - DNA, 25 bp, Homo sapien
ttctcctcgggacgctgtctcttgg

SEQ ID NO: 1652517 - DNA, 25 bp, Homo sapien
ctgtctcttggttcagggtctgact

SEQ ID NO: 1652518 - DNA, 25 bp, Homo sapien
ggacgctgtctcttggttcagggtc

SEQ ID NO: 1652519 - DNA, 25 bp, Homo sapien
ggtcagcatctgaaggtgtttgctg

SEQ ID NO: 1652520 - DNA, 25 bp, Homo sapien
cacttctctggactctaaggctttt

SEQ ID NO: 1652521 - DNA, 25 bp, Homo sapien
tcagcatctgaaggtgtttgctgta

SEQ ID NO: 1652522 - DNA, 25 bp, Homo sapien
tcctgggcagatgtcggcctgctgt

SEQ ID NO: 1652523 - DNA, 25 bp, Homo sapien
aactgtataattttggtcgtgtcaa

SEQ ID NO: 1652524 - DNA, 25 bp, Homo sapien
tgtataattttggtcgtgtcaatgg

SEQ ID NO: 1652525 - DNA, 25 bp, Homo sapien
ccctaactgtataattttggtcgtg

SEQ ID NO: 1652526 - DNA, 25 bp, Homo sapien
ataattttggtcgtgtcaatggtac

SEQ ID NO: 1652527 - DNA, 25 bp, Homo sapien
tcattgtcattatattcatagcagt

SEQ ID NO: 1652528 - DNA, 25 bp, Homo sapien
aatgcataatggctgctgcggcacc

SEQ ID NO: 1652529 - DNA, 25 bp, Homo sapien
gctgctgcggcaccagtcattgtca

SEQ ID NO: 1652530 - DNA, 25 bp, Homo sapien
ttcccctcaggaatgcataatggct

SEQ ID NO: 1652531 - DNA, 25 bp, Homo sapien
catcaaatgcccagactcccaaaca

SEQ ID NO: 1652532 - DNA, 25 bp, Homo sapien
atcaaatgcccagactcccaaacac

SEQ ID NO: 1652533 - DNA, 25 bp, Homo sapien
ccatcaaatgcccagactcccaaac

SEQ ID NO: 1652534 - DNA, 25 bp, Homo sapien
gaggagggctttctatggtcgttta

SEQ ID NO: 1652535 - DNA, 25 bp, Homo sapien
ttctatggtcgtttacacatggcat

SEQ ID NO: 1652536 - DNA, 25 bp, Homo sapien
ggtccagtcggtggccagcgaggaa

SEQ ID NO: 1652537 - DNA, 25 bp, Homo sapien
ggcaggtccagtcggtggccagcga

SEQ ID NO: 1652538 - DNA, 25 bp, Homo sapien
gtggggcaggcatataggaggagct

SEQ ID NO: 1652539 - DNA, 25 bp, Homo sapien
tgtggggcaggcatataggaggagc

SEQ ID NO: 1652540 - DNA, 25 bp, Homo sapien
gtaatgccactatcctagctcacag

SEQ ID NO: 1652541 - DNA, 25 bp, Homo sapien
ggagtgtaatgccactatcctagct

SEQ ID NO: 1652542 - DNA, 25 bp, Homo sapien
gctggagtgtaatgccactatccta

SEQ ID NO: 1652543 - DNA, 25 bp, Homo sapien
aatgccactatcctagctcacagca

SEQ ID NO: 1652544 - DNA, 25 bp, Homo sapien
gattcagcaaatatgccccagccca

SEQ ID NO: 1652545 - DNA, 25 bp, Homo sapien
tgattcagcaaatatgccccagccc

SEQ ID NO: 1652546 - DNA, 25 bp, Homo sapien
tgttttggcatgaaacatgcgtgtg

SEQ ID NO: 1652547 - DNA, 25 bp, Homo sapien
catgcgtgtgtcattagatttttca

SEQ ID NO: 1652548 - DNA, 25 bp, Homo sapien
cgccgggaccagtggtgacaagctg

SEQ ID NO: 1652549 - DNA, 25 bp, Homo sapien
gccgggaccagtggtgacaagctga

SEQ ID NO: 1652550 - DNA, 25 bp, Homo sapien
ccgggaccagtggtgacaagctgag

SEQ ID NO: 1652551 - DNA, 25 bp, Homo sapien
ggaagatgacatcctgggctctcct

SEQ ID NO: 1652552 - DNA, 25 bp, Homo sapien
gtcatccagaagaacctctcggccg

SEQ ID NO: 1652553 - DNA, 25 bp, Homo sapien
gacgtggtcaacaaggccctgagtg

SEQ ID NO: 1652554 - DNA, 25 bp, Homo sapien
aacatcacggagcagacgctggagg

SEQ ID NO: 1652555 - DNA, 25 bp, Homo sapien
cgcactgcccgcgcctgccactgcg

SEQ ID NO: 1652556 - DNA, 25 bp, Homo sapien
ggcacggtggaccacccgccgcctg

SEQ ID NO: 1652557 - DNA, 25 bp, Homo sapien
cccgagcgcaagcccctgggcaccg

SEQ ID NO: 1652558 - DNA, 25 bp, Homo sapien
ccacgggccagatgaacggcacggt

SEQ ID NO: 1652559 - DNA, 25 bp, Homo sapien
gacaaatacatctgccctcatggaa

SEQ ID NO: 1652560 - DNA, 25 bp, Homo sapien
gacaccccggtggaagcatttagag

SEQ ID NO: 1652561 - DNA, 25 bp, Homo sapien
gaccacgggagggacaaggcttctc

SEQ ID NO: 1652562 - DNA, 25 bp, Homo sapien
taggcactgggcattaccatagaga

SEQ ID NO: 1652563 - DNA, 25 bp, Homo sapien
atctggacttaaggattgctgggcc

SEQ ID NO: 1652564 - DNA, 25 bp, Homo sapien
catattagtgcttgaccctggcagg

SEQ ID NO: 1652565 - DNA, 25 bp, Homo sapien
tttaaaaaggatcccgtagcaggca

SEQ ID NO: 1652566 - DNA, 25 bp, Homo sapien
tatttaagtggagcccctacgtaga

SEQ ID NO: 1652567 - DNA, 25 bp, Homo sapien
cacacatcagtttggaccgggagtg

SEQ ID NO: 1652568 - DNA, 25 bp, Homo sapien
tatggctgccacaggaagtacgtca

SEQ ID NO: 1652569 - DNA, 25 bp, Homo sapien
tcagtttgagcaaagaccccaggcg

SEQ ID NO: 1652570 - DNA, 25 bp, Homo sapien
ttaagggcgaaagctaagaacctgc

SEQ ID NO: 1652571 - DNA, 25 bp, Homo sapien
tttgacgtggtggtgtgaggtgcct

SEQ ID NO: 1652572 - DNA, 25 bp, Homo sapien
gcatgagcgggtgagagggtggaca

SEQ ID NO: 1652573 - DNA, 25 bp, Homo sapien
tttgggcttcggagtgcagattaga

SEQ ID NO: 1652574 - DNA, 25 bp, Homo sapien
gaggcgtgttcaggaggcacatcag

SEQ ID NO: 1652575 - DNA, 25 bp, Homo sapien
ggtctcacctttctgcaacctatat

SEQ ID NO: 1652576 - DNA, 25 bp, Homo sapien
tatcttcctctaaaatgcagatgag

SEQ ID NO: 1652577 - DNA, 25 bp, Homo sapien
cagtggccgagaactctgtgctgga

SEQ ID NO: 1652578 - DNA, 25 bp, Homo sapien
tgcagtagagtctgtctcagagccc

SEQ ID NO: 1652579 - DNA, 25 bp, Homo sapien
cttgtgaacggcgatgttgctgagc

SEQ ID NO: 1652580 - DNA, 25 bp, Homo sapien
gagcttcccgtttggcttgtgaacg

SEQ ID NO: 1652581 - DNA, 25 bp, Homo sapien
cgtgtgggtttgtggcatttgaggc

SEQ ID NO: 1652582 - DNA, 25 bp, Homo sapien
ggagttgcacgtagaccaaaggtga

SEQ ID NO: 1652583 - DNA, 25 bp, Homo sapien
tggctcacactggttacaaaggcct

SEQ ID NO: 1652584 - DNA, 25 bp, Homo sapien
gggactgcggcccactggagttggg

SEQ ID NO: 1652585 - DNA, 25 bp, Homo sapien
actggttacaaaggcctccacactg

SEQ ID NO: 1652586 - DNA, 25 bp, Homo sapien
cacactggccctgaccgggactgcg

SEQ ID NO: 1652587 - DNA, 25 bp, Homo sapien
aattccagcaggtgtctacttaggg

SEQ ID NO: 1652588 - DNA, 25 bp, Homo sapien
ctctggcttgaaggcccagctgtct

SEQ ID NO: 1652589 - DNA, 25 bp, Homo sapien
tttctaggtgttttcccagtgggca

SEQ ID NO: 1652590 - DNA, 25 bp, Homo sapien
cacctccttgcagttgatttttgga

SEQ ID NO: 1652591 - DNA, 25 bp, Homo sapien
cttacctggaagtagggtcgttgca

SEQ ID NO: 1652592 - DNA, 25 bp, Homo sapien
tgggtccactcccaaaattggcata

SEQ ID NO: 1652593 - DNA, 25 bp, Homo sapien
gccgagacaggaacatcacttaagc

SEQ ID NO: 1652594 - DNA, 25 bp, Homo sapien
taacccaccgtactttagaatgtga

SEQ ID NO: 1652595 - DNA, 25 bp, Homo sapien
tagacccggttggtggaggacaaca

SEQ ID NO: 1652596 - DNA, 25 bp, Homo sapien
agatggggtatgcaagatgacagct

SEQ ID NO: 1652597 - DNA, 25 bp, Homo sapien
ggtcagagggctgccctaaaacagc

SEQ ID NO: 1652598 - DNA, 25 bp, Homo sapien
cagagcgagcgggataaagttagac

SEQ ID NO: 1652599 - DNA, 25 bp, Homo sapien
tcctcctgtcccgtggtttcatcat

SEQ ID NO: 1652600 - DNA, 25 bp, Homo sapien
catcatatctctttgcataccccat

SEQ ID NO: 1652601 - DNA, 25 bp, Homo sapien
tctcagcagacgcttcatgatagga

SEQ ID NO: 1652602 - DNA, 25 bp, Homo sapien
ggactgaaaagtcttgtggacacct

SEQ ID NO: 1652603 - DNA, 25 bp, Homo sapien
caggcatccttctcaaggggaagcc

SEQ ID NO: 1652604 - DNA, 25 bp, Homo sapien
accaggagtcggttgaacatgtgac

SEQ ID NO: 1652605 - DNA, 25 bp, Homo sapien
cattgtaaccaggagtcggttgaac

SEQ ID NO: 1652606 - DNA, 25 bp, Homo sapien
tccaaagcattgtaaccaggagtcg

SEQ ID NO: 1652607 - DNA, 25 bp, Homo sapien
ggttgaacatgtgacttcttctctc

SEQ ID NO: 1652608 - DNA, 25 bp, Homo sapien
catctataatgaaggcaagtgtgtt

SEQ ID NO: 1652609 - DNA, 25 bp, Homo sapien
tcggcggaaacgtgatgatcgcaga

SEQ ID NO: 1652610 - DNA, 25 bp, Homo sapien
tggctttaacatctataatgaaggc

SEQ ID NO: 1652611 - DNA, 25 bp, Homo sapien
agtggtcggcggaaacgtgatgatc

SEQ ID NO: 1652612 - DNA, 25 bp, Homo sapien
gagattctgcagatgccgcctcacc

SEQ ID NO: 1652613 - DNA, 25 bp, Homo sapien
gcatgagaaggtgccagcacgggct

SEQ ID NO: 1652614 - DNA, 25 bp, Homo sapien
caactcttctgtgacccggctgaga

SEQ ID NO: 1652615 - DNA, 25 bp, Homo sapien
cacgggcttgagaagggttttgaca

SEQ ID NO: 1652616 - DNA, 25 bp, Homo sapien
caatcccagcagagaaacgctcagg

SEQ ID NO: 1652617 - DNA, 25 bp, Homo sapien
ggccctctgggatctgaagaacttt

SEQ ID NO: 1652618 - DNA, 25 bp, Homo sapien
taatgccagatatcccagtgagcag

SEQ ID NO: 1652619 - DNA, 25 bp, Homo sapien
gatgctgaccatcagaagccctggg

SEQ ID NO: 1652620 - DNA, 25 bp, Homo sapien
caggacttaagatgggacctgggcc

SEQ ID NO: 1652621 - DNA, 25 bp, Homo sapien
ccccttcttggtactgagaggtcat

SEQ ID NO: 1652622 - DNA, 25 bp, Homo sapien
gttccgccgctggaaggattcccga

SEQ ID NO: 1652623 - DNA, 25 bp, Homo sapien
gagaccctgagtgttttttgcccat

SEQ ID NO: 1652624 - DNA, 25 bp, Homo sapien
ctgcagctgttgctccctgaggctg

SEQ ID NO: 1652625 - DNA, 25 bp, Homo sapien
gcagctgttgctccctgaggctgag

SEQ ID NO: 1652626 - DNA, 25 bp, Homo sapien
agctgttgctccctgaggctgagca

SEQ ID NO: 1652627 - DNA, 25 bp, Homo sapien
gctgttgctccctgaggctgagcat

SEQ ID NO: 1652628 - DNA, 25 bp, Homo sapien
tagttcgggtactggtccttctgaa

SEQ ID NO: 1652629 - DNA, 25 bp, Homo sapien
tctgctggctttcagtgtagaccgt

SEQ ID NO: 1652630 - DNA, 25 bp, Homo sapien
agtgtagaccgtgcgctcctgccgc

SEQ ID NO: 1652631 - DNA, 25 bp, Homo sapien
cagattcagtcgctggtcgtagttc

SEQ ID NO: 1652632 - DNA, 25 bp, Homo sapien
cttggagatgaccagggtcttgcat

SEQ ID NO: 1652633 - DNA, 25 bp, Homo sapien
ggattaccctccgagttccaggcca

SEQ ID NO: 1652634 - DNA, 25 bp, Homo sapien
gattaccctccgagttccaggccat

SEQ ID NO: 1652635 - DNA, 25 bp, Homo sapien
gacggattgaggtcatttgatgctc

SEQ ID NO: 1652636 - DNA, 25 bp, Homo sapien
tccaagagcccttcattggtggagt

SEQ ID NO: 1652637 - DNA, 25 bp, Homo sapien
cacttgtgagaacctgaagacggat

SEQ ID NO: 1652638 - DNA, 25 bp, Homo sapien
gaatcttacttatggtgacactggc

SEQ ID NO: 1652639 - DNA, 25 bp, Homo sapien
gctagacaaaattcacacgggaggg

SEQ ID NO: 1652640 - DNA, 25 bp, Homo sapien
tgtgcaaacgttgggaccagaatcc

SEQ ID NO: 1652641 - DNA, 25 bp, Homo sapien
taagtttcattcttcggagacacgg

SEQ ID NO: 1652642 - DNA, 25 bp, Homo sapien
gactcaggcgtggaagagaatcttc

SEQ ID NO: 1652643 - DNA, 25 bp, Homo sapien
tgtcctggtcccgtttagcaaatgc

SEQ ID NO: 1652644 - DNA, 25 bp, Homo sapien
tctattgtaggcgagggagcccctg

SEQ ID NO: 1652645 - DNA, 25 bp, Homo sapien
tagccgaccctggtagtaaaataca

SEQ ID NO: 1652646 - DNA, 25 bp, Homo sapien
gattgctgctaagccgacgagtgcc

SEQ ID NO: 1652647 - DNA, 25 bp, Homo sapien
caggccgggccacggattagtttgt

SEQ ID NO: 1652648 - DNA, 25 bp, Homo sapien
atgagtcaccaggccgggccacgga

SEQ ID NO: 1652649 - DNA, 25 bp, Homo sapien
agtcaccaggccgggccacggatta

SEQ ID NO: 1652650 - DNA, 25 bp, Homo sapien
caccaggccgggccacggattagtt

SEQ ID NO: 1652651 - DNA, 25 bp, Homo sapien
caaattacactccttaagatcagag

SEQ ID NO: 1652652 - DNA, 25 bp, Homo sapien
aaattgtggagatacatgtgatgaa

SEQ ID NO: 1652653 - DNA, 25 bp, Homo sapien
gagcaataataaattgtggagatac

SEQ ID NO: 1652654 - DNA, 25 bp, Homo sapien
cataaacaccgtttattgtatatgg

SEQ ID NO: 1652655 - DNA, 25 bp, Homo sapien
tgggatcccatgactcaactcactg

SEQ ID NO: 1652656 - DNA, 25 bp, Homo sapien
tctgtaaacgggaaacattgcaaac

SEQ ID NO: 1652657 - DNA, 25 bp, Homo sapien
taagtcttacacaatgaccccagtc

SEQ ID NO: 1652658 - DNA, 25 bp, Homo sapien
gaccccagtcaggtacatgtacaag

SEQ ID NO: 1652659 - DNA, 25 bp, Homo sapien
gcttgggccactgtgaagtgatttt

SEQ ID NO: 1652660 - DNA, 25 bp, Homo sapien
gctctcgaggaagatctgccatctt

SEQ ID NO: 1652661 - DNA, 25 bp, Homo sapien
tgggccactgtgaagtgatttttcc

SEQ ID NO: 1652662 - DNA, 25 bp, Homo sapien
tattcccatgggaacagctctcgag

SEQ ID NO: 1652663 - DNA, 25 bp, Homo sapien
gctgtatttcgcctcataacacata

SEQ ID NO: 1652664 - DNA, 25 bp, Homo sapien
cacatatcatgtaggacaggttctg

SEQ ID NO: 1652665 - DNA, 25 bp, Homo sapien
tttagaggtcactccccatccttgc

SEQ ID NO: 1652666 - DNA, 25 bp, Homo sapien
tccaattcaagtttctcagcgaggt

SEQ ID NO: 1652667 - DNA, 25 bp, Homo sapien
ttttctcagaagttgtgctttgtcc

SEQ ID NO: 1652668 - DNA, 25 bp, Homo sapien
taacgtctttcccaggaattgacag

SEQ ID NO: 1652669 - DNA, 25 bp, Homo sapien
acactcaggagggaataattggaca

SEQ ID NO: 1652670 - DNA, 25 bp, Homo sapien
taattggacatcttgttttctttca

SEQ ID NO: 1652671 - DNA, 25 bp, Homo sapien
agaaggagggaaccgcagaatgagg

SEQ ID NO: 1652672 - DNA, 25 bp, Homo sapien
agatgcaaggatgggttgggcgccg

SEQ ID NO: 1652673 - DNA, 25 bp, Homo sapien
gagttgaatgcaattaggagaaaga

SEQ ID NO: 1652674 - DNA, 25 bp, Homo sapien
gagaggaacaacatgcagatgtgag

SEQ ID NO: 1652675 - DNA, 25 bp, Homo sapien
ggcatccagccatgaatgtggtcaa

SEQ ID NO: 1652676 - DNA, 25 bp, Homo sapien
tcatgggcatccagccatgaatgtg

SEQ ID NO: 1652677 - DNA, 25 bp, Homo sapien
tgggcatccagccatgaatgtggtc

SEQ ID NO: 1652678 - DNA, 25 bp, Homo sapien
catgggcatccagccatgaatgtgg

SEQ ID NO: 1652679 - DNA, 25 bp, Homo sapien
catgactttggtttcttaataaact

SEQ ID NO: 1652680 - DNA, 25 bp, Homo sapien
tgacaaaaccattcaaaatattctt

SEQ ID NO: 1652681 - DNA, 25 bp, Homo sapien
aaatattcttcccatgactttggtt

SEQ ID NO: 1652682 - DNA, 25 bp, Homo sapien
tcaaaatattcttcccatgactttg

SEQ ID NO: 1652683 - DNA, 25 bp, Homo sapien
aaaataaccagacaccaaaacatct

SEQ ID NO: 1652684 - DNA, 25 bp, Homo sapien
tgggatttctcatgagataaatcac

SEQ ID NO: 1652685 - DNA, 25 bp, Homo sapien
agacaccaaaacatctctgggattt

SEQ ID NO: 1652686 - DNA, 25 bp, Homo sapien
taaccagacaccaaaacatctctgg

SEQ ID NO: 1652687 - DNA, 25 bp, Homo sapien
tccgtttcactgagtgctgtatacc

SEQ ID NO: 1652688 - DNA, 25 bp, Homo sapien
ggaggagaataaacgtggactctcc

SEQ ID NO: 1652689 - DNA, 25 bp, Homo sapien
gctgtatacccaatctcactctcta

SEQ ID NO: 1652690 - DNA, 25 bp, Homo sapien
taaacgtggactctccgtttcactg

SEQ ID NO: 1652691 - DNA, 25 bp, Homo sapien
cagatgggcacagattggatccact

SEQ ID NO: 1652692 - DNA, 25 bp, Homo sapien
ggcagagaatctcagccaaccagtt

SEQ ID NO: 1652693 - DNA, 25 bp, Homo sapien
cagattggatccacttggcatcccc

SEQ ID NO: 1652694 - DNA, 25 bp, Homo sapien
gagaatctcagccaaccagtttgtt

SEQ ID NO: 1652695 - DNA, 25 bp, Homo sapien
tattacatcttcatcccttatcaca

SEQ ID NO: 1652696 - DNA, 25 bp, Homo sapien
caaaccataagaaatcgtccgacat

SEQ ID NO: 1652697 - DNA, 25 bp, Homo sapien
aactcatcacgtacttttcttaagg

SEQ ID NO: 1652698 - DNA, 25 bp, Homo sapien
ttcggatctgaaacccatagtaggg

SEQ ID NO: 1652699 - DNA, 25 bp, Homo sapien
acctcttcctgcgtggtgtgagggt

SEQ ID NO: 1652700 - DNA, 25 bp, Homo sapien
ggtgtgagggtttcaactgtagcca

SEQ ID NO: 1652701 - DNA, 25 bp, Homo sapien
gggtttcaactgtagccaccgctgg

SEQ ID NO: 1652702 - DNA, 25 bp, Homo sapien
tcctgcgtggtgtgagggtttcaac

SEQ ID NO: 1652703 - DNA, 25 bp, Homo sapien
acaacggtactcaaatcccacacat

SEQ ID NO: 1652704 - DNA, 25 bp, Homo sapien
ttctaggctctctaaggtaaggtgc

SEQ ID NO: 1652705 - DNA, 25 bp, Homo sapien
gatgttcatcagttctattgcacaa

SEQ ID NO: 1652706 - DNA, 25 bp, Homo sapien
aagctgaagatgtccaacaacggta

SEQ ID NO: 1652707 - DNA, 25 bp, Homo sapien
aagaagcaaagtggacggccgggcg

SEQ ID NO: 1652708 - DNA, 25 bp, Homo sapien
aatgagacccgagtacacacatgca

SEQ ID NO: 1652709 - DNA, 25 bp, Homo sapien
aaaagcgaagtgcatctcccataaa

SEQ ID NO: 1652710 - DNA, 25 bp, Homo sapien
tctcccataaacgaggtactgcagg

SEQ ID NO: 1652711 - DNA, 25 bp, Homo sapien
tctgggacacagctacaacagtgct

SEQ ID NO: 1652712 - DNA, 25 bp, Homo sapien
gctatatggctacattaagaagcta

SEQ ID NO: 1652713 - DNA, 25 bp, Homo sapien
aagatctcaaatgaaccgcctaaca

SEQ ID NO: 1652714 - DNA, 25 bp, Homo sapien
gaagtttctagtgctatatggctac

SEQ ID NO: 1652715 - DNA, 25 bp, Homo sapien
aagaagcaaagtggacggccgggcg

SEQ ID NO: 1652716 - DNA, 25 bp, Homo sapien
aatgagacccgagtacacacatgca

SEQ ID NO: 1652717 - DNA, 25 bp, Homo sapien
tctcccataaacgaggtactgcagg

SEQ ID NO: 1652718 - DNA, 25 bp, Homo sapien
aaaagcgaagtgcatctcccataaa

SEQ ID NO: 1652719 - DNA, 25 bp, Homo sapien
ttgccgtctaaaaccaccggcgtgc

SEQ ID NO: 1652720 - DNA, 25 bp, Homo sapien
tgaggcttcggtaaaggttgccgtc

SEQ ID NO: 1652721 - DNA, 25 bp, Homo sapien
ttctcccagtcttagaaaagataca

SEQ ID NO: 1652722 - DNA, 25 bp, Homo sapien
tggctgtgcactgaggcttcggtaa

SEQ ID NO: 1652723 - DNA, 25 bp, Homo sapien
aagaagcaaagtggacggccgggcg

SEQ ID NO: 1652724 - DNA, 25 bp, Homo sapien
aatgagacccgagtacacacatgca

SEQ ID NO: 1652725 - DNA, 25 bp, Homo sapien
aaaagcgaagtgcatctcccataaa

SEQ ID NO: 1652726 - DNA, 25 bp, Homo sapien
tctcccataaacgaggtactgcagg

SEQ ID NO: 1652727 - DNA, 25 bp, Homo sapien
aagaagcaaagtggacggccgggcg

SEQ ID NO: 1652728 - DNA, 25 bp, Homo sapien
aaaagcgaagtgcatctcccataaa

SEQ ID NO: 1652729 - DNA, 25 bp, Homo sapien
aatgagacccgagtacacacatgca

SEQ ID NO: 1652730 - DNA, 25 bp, Homo sapien
tctcccataaacgaggtactgcagg

SEQ ID NO: 1652731 - DNA, 25 bp, Homo sapien
aagaagcaaagtggacggccgggcg

SEQ ID NO: 1652732 - DNA, 25 bp, Homo sapien
aatgagacccgagtacacacatgca

SEQ ID NO: 1652733 - DNA, 25 bp, Homo sapien
aaaagcgaagtgcatctcccataaa

SEQ ID NO: 1652734 - DNA, 25 bp, Homo sapien
tctcccataaacgaggtactgcagg

SEQ ID NO: 1652735 - DNA, 25 bp, Homo sapien
ttcctagagcggaaaagcaagtcag

SEQ ID NO: 1652736 - DNA, 25 bp, Homo sapien
ttagtaattataccctgttgcctgg

SEQ ID NO: 1652737 - DNA, 25 bp, Homo sapien
gcttcttagggattaattgccacca

SEQ ID NO: 1652738 - DNA, 25 bp, Homo sapien
tatcaccaccagatgtcgctcttgc

SEQ ID NO: 1652739 - DNA, 25 bp, Homo sapien
tgatagccagcagatgcaagcaaac

SEQ ID NO: 1652740 - DNA, 25 bp, Homo sapien
ctgacctgctgaagaatccatggct

SEQ ID NO: 1652741 - DNA, 25 bp, Homo sapien
ttattactgctggatgcatcgatca

SEQ ID NO: 1652742 - DNA, 25 bp, Homo sapien
ctttcaggaagaagattattactgc

SEQ ID NO: 1652743 - DNA, 25 bp, Homo sapien
gttggcagactgaatgcttgattcc

SEQ ID NO: 1652744 - DNA, 25 bp, Homo sapien
ctcattgaggttggcagactgaatg

SEQ ID NO: 1652745 - DNA, 25 bp, Homo sapien
cattgaggttggcagactgaatgct

SEQ ID NO: 1652746 - DNA, 25 bp, Homo sapien
gaggttggcagactgaatgcttgat

SEQ ID NO: 1652747 - DNA, 25 bp, Homo sapien
tggtcagtgaacaccattttttccc

SEQ ID NO: 1652748 - DNA, 25 bp, Homo sapien
tacactcccagtagatcaagcgtct

SEQ ID NO: 1652749 - DNA, 25 bp, Homo sapien
ccatcatcagtacactcccagtaga

SEQ ID NO: 1652750 - DNA, 25 bp, Homo sapien
gatcaagcgtctgtaccagaaggga

SEQ ID NO: 1652751 - DNA, 25 bp, Homo sapien
aacttccagtatccttcgtaggtct

SEQ ID NO: 1652752 - DNA, 25 bp, Homo sapien
caccacttgtgtcttgccttggact

SEQ ID NO: 1652753 - DNA, 25 bp, Homo sapien
tcgtaggtcttgtttaacgagcacc

SEQ ID NO: 1652754 - DNA, 25 bp, Homo sapien
gccttggacttgatgcagtcataat

SEQ ID NO: 1652755 - DNA, 25 bp, Homo sapien
gtaacttctggaaaatgagttatag

SEQ ID NO: 1652756 - DNA, 25 bp, Homo sapien
taacttctggaaaatgagttatagt

SEQ ID NO: 1652757 - DNA, 25 bp, Homo sapien
acttctggaaaatgagttatagttt

SEQ ID NO: 1652758 - DNA, 25 bp, Homo sapien
ctgtaacttctggaaaatgagttat

SEQ ID NO: 1652759 - DNA, 25 bp, Homo sapien
agcagccgatgtgcaggactccgtc

SEQ ID NO: 1652760 - DNA, 25 bp, Homo sapien
gccgatgtgcaggactccgtcccag

SEQ ID NO: 1652761 - DNA, 25 bp, Homo sapien
gcagccgatgtgcaggactccgtcc

SEQ ID NO: 1652762 - DNA, 25 bp, Homo sapien
agccgatgtgcaggactccgtccca

SEQ ID NO: 1652763 - DNA, 25 bp, Homo sapien
cgaccacaccgcgaatcaggcagac

SEQ ID NO: 1652764 - DNA, 25 bp, Homo sapien
ttccagaacgttaaatacagcgccg

SEQ ID NO: 1652765 - DNA, 25 bp, Homo sapien
aacgttaaatacagcgccgaccaca

SEQ ID NO: 1652766 - DNA, 25 bp, Homo sapien
ttcttccagaacgttaaatacagcg

SEQ ID NO: 1652767 - DNA, 25 bp, Homo sapien
tgccttctgacagtaaccactgatg

SEQ ID NO: 1652768 - DNA, 25 bp, Homo sapien
tccagactgccttctgacagtaacc

SEQ ID NO: 1652769 - DNA, 25 bp, Homo sapien
ccttctgacagtaaccactgatgaa

SEQ ID NO: 1652770 - DNA, 25 bp, Homo sapien
gactgccttctgacagtaaccactg

SEQ ID NO: 1652771 - DNA, 25 bp, Homo sapien
tgaggactccgagctgtgcgtgtgt

SEQ ID NO: 1652772 - DNA, 25 bp, Homo sapien
ggagatgaggactccgagctgtgcg

SEQ ID NO: 1652773 - DNA, 25 bp, Homo sapien
gactccgagctgtgcgtgtgtccat

SEQ ID NO: 1652774 - DNA, 25 bp, Homo sapien
gagatgaggactccgagctgtgcgt

SEQ ID NO: 1652775 - DNA, 25 bp, Homo sapien
catggcacagatcgatgtcaggacg

SEQ ID NO: 1652776 - DNA, 25 bp, Homo sapien
gaacagacgacccatctaacagaga

SEQ ID NO: 1652777 - DNA, 25 bp, Homo sapien
gagaaaccagacagtgcttccagga

SEQ ID NO: 1652778 - DNA, 25 bp, Homo sapien
gaaagactttgcaacaacctggctg

SEQ ID NO: 1652779 - DNA, 25 bp, Homo sapien
tttggttctccacaagcgcttgctc

SEQ ID NO: 1652780 - DNA, 25 bp, Homo sapien
ttgatacccaacaggagaagagact

SEQ ID NO: 1652781 - DNA, 25 bp, Homo sapien
catcctggcaaagataccgctctgg

SEQ ID NO: 1652782 - DNA, 25 bp, Homo sapien
tcttaatctagttctgcagacgccc

SEQ ID NO: 1652783 - DNA, 25 bp, Homo sapien
tcagcgagacatcatcttcacaaac

SEQ ID NO: 1652784 - DNA, 25 bp, Homo sapien
cagcgagacatcatcttcacaaact

SEQ ID NO: 1652785 - DNA, 25 bp, Homo sapien
catctcgttgtaaaagcccccaaca

SEQ ID NO: 1652786 - DNA, 25 bp, Homo sapien
aggcactgctggtgatccctgggaa

SEQ ID NO: 1652787 - DNA, 25 bp, Homo sapien
cactgctggtgatccctgggaaatt

SEQ ID NO: 1652788 - DNA, 25 bp, Homo sapien
gctggtgatccctgggaaattactt

SEQ ID NO: 1652789 - DNA, 25 bp, Homo sapien
ttaacatcagcctcccggacaacct

SEQ ID NO: 1652790 - DNA, 25 bp, Homo sapien
cggacaacctcagagatctcccggg

SEQ ID NO: 1652791 - DNA, 25 bp, Homo sapien
cttcaaagtcaactgtgccgtctcc

SEQ ID NO: 1652792 - DNA, 25 bp, Homo sapien
tgtgccgtctccattaacatcagcc

SEQ ID NO: 1652793 - DNA, 25 bp, Homo sapien
gcgcaccaccaaacctgtttaatat

SEQ ID NO: 1652794 - DNA, 25 bp, Homo sapien
aagtgcccagcgatacatttaaaac

SEQ ID NO: 1652795 - DNA, 25 bp, Homo sapien
tttgtaccctttgacaagcaactgt

SEQ ID NO: 1652796 - DNA, 25 bp, Homo sapien
agccaaagtgcccagcgatacattt

SEQ ID NO: 1652797 - DNA, 25 bp, Homo sapien
tgcaagcaatttgggggtcatcagc

SEQ ID NO: 1652798 - DNA, 25 bp, Homo sapien
tcctggacaccgatcatcccagctg

SEQ ID NO: 1652799 - DNA, 25 bp, Homo sapien
gacaccgatcatcccagctgtttct

SEQ ID NO: 1652800 - DNA, 25 bp, Homo sapien
gcatcccgcatctcctggacaccga

SEQ ID NO: 1652801 - DNA, 25 bp, Homo sapien
tcaatcagttccatctccgtgggca

SEQ ID NO: 1652802 - DNA, 25 bp, Homo sapien
tatcgaactcaagaaatgcttcccg

SEQ ID NO: 1652803 - DNA, 25 bp, Homo sapien
catcgtcctcatgagattccccaga

SEQ ID NO: 1652804 - DNA, 25 bp, Homo sapien
catgcggatttgctggccgagctca

SEQ ID NO: 1652805 - DNA, 25 bp, Homo sapien
ggaagtccttcaactgccacgagaa

SEQ ID NO: 1652806 - DNA, 25 bp, Homo sapien
tcttggagatacttgaggatggata

SEQ ID NO: 1652807 - DNA, 25 bp, Homo sapien
tggatatgccttcgaaatactttgg

SEQ ID NO: 1652808 - DNA, 25 bp, Homo sapien
tatacggaaatgcacaaagggactg

SEQ ID NO: 1652809 - DNA, 25 bp, Homo sapien
aatctcatcttgtcccagtggtctt

SEQ ID NO: 1652810 - DNA, 25 bp, Homo sapien
tctcatcttgtcccagtggtctttc

SEQ ID NO: 1652811 - DNA, 25 bp, Homo sapien
cttcaatctcatcttgtcccagtgg

SEQ ID NO: 1652812 - DNA, 25 bp, Homo sapien
tcaatctcatcttgtcccagtggtc

SEQ ID NO: 1652813 - DNA, 25 bp, Homo sapien
tcaagaagatgcaggcggggcccat

SEQ ID NO: 1652814 - DNA, 25 bp, Homo sapien
ctcaagaagatgcaggcggggccca

SEQ ID NO: 1652815 - DNA, 25 bp, Homo sapien
cctcaagaagatgcaggcggggccc

SEQ ID NO: 1652816 - DNA, 25 bp, Homo sapien
agctcgcagggcaccagtctcaaga

SEQ ID NO: 1652817 - DNA, 25 bp, Homo sapien
tcgcagggcaccagtctcaagatgg

SEQ ID NO: 1652818 - DNA, 25 bp, Homo sapien
ggagctcgcagggcaccagtctcaa

SEQ ID NO: 1652819 - DNA, 25 bp, Homo sapien
ctcgcagggcaccagtctcaagatg

SEQ ID NO: 1652820 - DNA, 25 bp, Homo sapien
tacagagctaacttgtgcagagcta

SEQ ID NO: 1652821 - DNA, 25 bp, Homo sapien
gatagcccatgatttaagcccaagt

SEQ ID NO: 1652822 - DNA, 25 bp, Homo sapien
tattgagcacttgttgtattctcag

SEQ ID NO: 1652823 - DNA, 25 bp, Homo sapien
ttcttacttctacagagctaacttg

SEQ ID NO: 1652824 - DNA, 25 bp, Homo sapien
gaaggcattggtctgaactatcaca

SEQ ID NO: 1652825 - DNA, 25 bp, Homo sapien
gacatgatgcttctgattgtcagac

SEQ ID NO: 1652826 - DNA, 25 bp, Homo sapien
ctggccatctggacattggacatga

SEQ ID NO: 1652827 - DNA, 25 bp, Homo sapien
gctagaagtgcagtcataaaggagc

SEQ ID NO: 1652828 - DNA, 25 bp, Homo sapien
cgccttcttctgaatgacgctatca

SEQ ID NO: 1652829 - DNA, 25 bp, Homo sapien
gcaggacaaatttcaccaccttcag

SEQ ID NO: 1652830 - DNA, 25 bp, Homo sapien
gacgctatcaaaatcacagtctagc

SEQ ID NO: 1652831 - DNA, 25 bp, Homo sapien
tcacagtctagctggtcactggtga

SEQ ID NO: 1652832 - DNA, 25 bp, Homo sapien
cctagtagaccaacaggcccacagt

SEQ ID NO: 1652833 - DNA, 25 bp, Homo sapien
gacatcagggccctagtagaccaac

SEQ ID NO: 1652834 - DNA, 25 bp, Homo sapien
tcagggccctagtagaccaacaggc

SEQ ID NO: 1652835 - DNA, 25 bp, Homo sapien
tagtagaccaacaggcccacagtgc

SEQ ID NO: 1652836 - DNA, 25 bp, Homo sapien
ccaagcagcaacttcgggcactatc

SEQ ID NO: 1652837 - DNA, 25 bp, Homo sapien
tcgggcactatccttcgggtagtag

SEQ ID NO: 1652838 - DNA, 25 bp, Homo sapien
acttcgggcactatccttcgggtag

SEQ ID NO: 1652839 - DNA, 25 bp, Homo sapien
agcaacttcgggcactatccttcgg

SEQ ID NO: 1652840 - DNA, 25 bp, Homo sapien
cctcctgtggagctcttgtgatcta

SEQ ID NO: 1652841 - DNA, 25 bp, Homo sapien
tattaagcatgtatcaggagctggg

SEQ ID NO: 1652842 - DNA, 25 bp, Homo sapien
gaggtaactctttggcctacatcga

SEQ ID NO: 1652843 - DNA, 25 bp, Homo sapien
gcacactggataagattagaagacc

SEQ ID NO: 1652844 - DNA, 25 bp, Homo sapien
ccagccacagcttaagtttttcctt

SEQ ID NO: 1652845 - DNA, 25 bp, Homo sapien
tgattgatgggagcgtacttccccc

SEQ ID NO: 1652846 - DNA, 25 bp, Homo sapien
gaggtgattgatgggagcgtacttc

SEQ ID NO: 1652847 - DNA, 25 bp, Homo sapien
attgatgggagcgtacttccccctt

SEQ ID NO: 1652848 - DNA, 25 bp, Homo sapien
ggtgattgatgggagcgtacttccc

SEQ ID NO: 1652849 - DNA, 25 bp, Homo sapien
cgagcataggcatcagagcgactat

SEQ ID NO: 1652850 - DNA, 25 bp, Homo sapien
cataggcatcagagcgactatggtc

SEQ ID NO: 1652851 - DNA, 25 bp, Homo sapien
catcagagcgactatggtctcccac

SEQ ID NO: 1652852 - DNA, 25 bp, Homo sapien
tgaacgagcataggcatcagagcga

SEQ ID NO: 1652853 - DNA, 25 bp, Homo sapien
gccaagagtagcaccaccacatcta

SEQ ID NO: 1652854 - DNA, 25 bp, Homo sapien
tgtcgtatgtgtcactccatgcctc

SEQ ID NO: 1652855 - DNA, 25 bp, Homo sapien
tctagagtgtaggtgtcagcaagct

SEQ ID NO: 1652856 - DNA, 25 bp, Homo sapien
caactctctaaggatcttcttcttg

SEQ ID NO: 1652857 - DNA, 25 bp, Homo sapien
tgacttgcttggccttcgctttcca

SEQ ID NO: 1652858 - DNA, 25 bp, Homo sapien
ggtgacttgcttggccttcgctttc

SEQ ID NO: 1652859 - DNA, 25 bp, Homo sapien
gacttgcttggccttcgctttccac

SEQ ID NO: 1652860 - DNA, 25 bp, Homo sapien
aggtgacttgcttggccttcgcttt

SEQ ID NO: 1652861 - DNA, 25 bp, Homo sapien
tcctttcaggatgtagcagctggcg

SEQ ID NO: 1652862 - DNA, 25 bp, Homo sapien
cagtagtcagtggtagcccggatgg

SEQ ID NO: 1652863 - DNA, 25 bp, Homo sapien
gggggccttggaccacaaatccagc

SEQ ID NO: 1652864 - DNA, 25 bp, Homo sapien
aaaatgcatcaccactggtccagtt

SEQ ID NO: 1652865 - DNA, 25 bp, Homo sapien
agacccaatgggacctcagctaaca

SEQ ID NO: 1652866 - DNA, 25 bp, Homo sapien
tctgtaagggaaagagtaagcctct

SEQ ID NO: 1652867 - DNA, 25 bp, Homo sapien
gaaatggttgcaagacctctccaga

SEQ ID NO: 1652868 - DNA, 25 bp, Homo sapien
caacattcgcgaggttagagagtaa

SEQ ID NO: 1652869 - DNA, 25 bp, Homo sapien
cagaacaccagctatggaccaggca

SEQ ID NO: 1652870 - DNA, 25 bp, Homo sapien
tattcctgggccaagggtctagaaa

SEQ ID NO: 1652871 - DNA, 25 bp, Homo sapien
tgcgagccagatgatgtgattccca

SEQ ID NO: 1652872 - DNA, 25 bp, Homo sapien
ggagagccctgcctagtatgtcaat

SEQ ID NO: 1652873 - DNA, 25 bp, Homo sapien
ggtggagccatcgttagcccaattt

SEQ ID NO: 1652874 - DNA, 25 bp, Homo sapien
tggagccatcgttagcccaatttta

SEQ ID NO: 1652875 - DNA, 25 bp, Homo sapien
ggagccatcgttagcccaattttac

SEQ ID NO: 1652876 - DNA, 25 bp, Homo sapien
ctggtggagccatcgttagcccaat

SEQ ID NO: 1652877 - DNA, 25 bp, Homo sapien
tattgagggccactatttgcccagg

SEQ ID NO: 1652878 - DNA, 25 bp, Homo sapien
aagttcgttggatgtggccgaccgc

SEQ ID NO: 1652879 - DNA, 25 bp, Homo sapien
gaggagctaggctgttgcagttcaa

SEQ ID NO: 1652880 - DNA, 25 bp, Homo sapien
tcaaactggtatgaatgggcaggca

SEQ ID NO: 1652881 - DNA, 25 bp, Homo sapien
tgttgatggctaaaccagcatccac

SEQ ID NO: 1652882 - DNA, 25 bp, Homo sapien
tccaccaggtggaggtgcttccggc

SEQ ID NO: 1652883 - DNA, 25 bp, Homo sapien
aaggatctccggcactgaagtcgaa

SEQ ID NO: 1652884 - DNA, 25 bp, Homo sapien
gatgaggtgaacctcccgcgtcggg

SEQ ID NO: 1652885 - DNA, 25 bp, Homo sapien
tgaagcgcaaatgcctgttttcttc

SEQ ID NO: 1652886 - DNA, 25 bp, Homo sapien
ttcccactttgaagcgcaaatgcct

SEQ ID NO: 1652887 - DNA, 25 bp, Homo sapien
cactttgaagcgcaaatgcctgttt

SEQ ID NO: 1652888 - DNA, 25 bp, Homo sapien
tttgaagcgcaaatgcctgttttct

SEQ ID NO: 1652889 - DNA, 25 bp, Homo sapien
tagtgaggcttcgtgtggcacattc

SEQ ID NO: 1652890 - DNA, 25 bp, Homo sapien
tggccggctaggatgcatgttctca

SEQ ID NO: 1652891 - DNA, 25 bp, Homo sapien
catcaagttaatagtcggctccctc

SEQ ID NO: 1652892 - DNA, 25 bp, Homo sapien
ttctcatttcagcacaggagccagg

SEQ ID NO: 1652893 - DNA, 25 bp, Homo sapien
aatatccaaactgtaccagtgggac

SEQ ID NO: 1652894 - DNA, 25 bp, Homo sapien
actaatttacattgggggattacat

SEQ ID NO: 1652895 - DNA, 25 bp, Homo sapien
tatccaaactgtaccagtgggacat

SEQ ID NO: 1652896 - DNA, 25 bp, Homo sapien
aactgtaccagtgggacatctggtc

SEQ ID NO: 1652897 - DNA, 25 bp, Homo sapien
atgacacttatcacactacacatgg

SEQ ID NO: 1652898 - DNA, 25 bp, Homo sapien
acacttatcacactacacatggtac

SEQ ID NO: 1652899 - DNA, 25 bp, Homo sapien
gacacttatcacactacacatggta

SEQ ID NO: 1652900 - DNA, 25 bp, Homo sapien
tgacacttatcacactacacatggt

SEQ ID NO: 1652901 - DNA, 25 bp, Homo sapien
ccaattctcgagcatctcagtcagc

SEQ ID NO: 1652902 - DNA, 25 bp, Homo sapien
ggtgtgttcaggctcaccgccttca

SEQ ID NO: 1652903 - DNA, 25 bp, Homo sapien
ggaggtcctggtccaattctcgagc

SEQ ID NO: 1652904 - DNA, 25 bp, Homo sapien
tggtccaattctcgagcatctcagt

SEQ ID NO: 1652905 - DNA, 25 bp, Homo sapien
cccttgtgaactttcttgcagcctc

SEQ ID NO: 1652906 - DNA, 25 bp, Homo sapien
atgttccccttgtgaactttcttgc

SEQ ID NO: 1652907 - DNA, 25 bp, Homo sapien
tccccttgtgaactttcttgcagcc

SEQ ID NO: 1652908 - DNA, 25 bp, Homo sapien
gttccccttgtgaactttcttgcag

SEQ ID NO: 1652909 - DNA, 25 bp, Homo sapien
acaagtccagtgtaattcccatcaa

SEQ ID NO: 1652910 - DNA, 25 bp, Homo sapien
tctacaagtccagtgtaattcccat

SEQ ID NO: 1652911 - DNA, 25 bp, Homo sapien
aatctacaagtccagtgtaattccc

SEQ ID NO: 1652912 - DNA, 25 bp, Homo sapien
aagcaatctacaagtccagtgtaat

SEQ ID NO: 1652913 - DNA, 25 bp, Homo sapien
aatgaaactcgatccttatttctca

SEQ ID NO: 1652914 - DNA, 25 bp, Homo sapien
gaaactcgatccttatttctcacct

SEQ ID NO: 1652915 - DNA, 25 bp, Homo sapien
tgaaactcgatccttatttctcacc

SEQ ID NO: 1652916 - DNA, 25 bp, Homo sapien
atgaaactcgatccttatttctcac

SEQ ID NO: 1652917 - DNA, 25 bp, Homo sapien
caaatagtacatagtcccaatcttg

SEQ ID NO: 1652918 - DNA, 25 bp, Homo sapien
tcactaacgcatgagaggtggagct

SEQ ID NO: 1652919 - DNA, 25 bp, Homo sapien
taagcagctttctagggtcactaac

SEQ ID NO: 1652920 - DNA, 25 bp, Homo sapien
gggctatgcactattgtatccattt

SEQ ID NO: 1652921 - DNA, 25 bp, Homo sapien
atgttacccagcttgcactcgaacc

SEQ ID NO: 1652922 - DNA, 25 bp, Homo sapien
tgatgaacaggtaacgaatgccaat

SEQ ID NO: 1652923 - DNA, 25 bp, Homo sapien
ccatgttacccagcttgcactcgaa

SEQ ID NO: 1652924 - DNA, 25 bp, Homo sapien
ggtaacgaatgccaattttgtgtgt

SEQ ID NO: 1652925 - DNA, 25 bp, Homo sapien
caaaaataaggtgtccaatgctttt

SEQ ID NO: 1652926 - DNA, 25 bp, Homo sapien
atgcttttagcattagcaacagccc

SEQ ID NO: 1652927 - DNA, 25 bp, Homo sapien
aataaggtgtccaatgcttttagca

SEQ ID NO: 1652928 - DNA, 25 bp, Homo sapien
aatgcttttagcattagcaacagcc

SEQ ID NO: 1652929 - DNA, 25 bp, Homo sapien
ctttcagggtcagattccttaactg

SEQ ID NO: 1652930 - DNA, 25 bp, Homo sapien
ttcagggtcagattccttaactggt

SEQ ID NO: 1652931 - DNA, 25 bp, Homo sapien
tttcagggtcagattccttaactgg

SEQ ID NO: 1652932 - DNA, 25 bp, Homo sapien
tgtcaaagaacaacatcagcccggg

SEQ ID NO: 1652933 - DNA, 25 bp, Homo sapien
ttggtagcctgaagttggccacggt

SEQ ID NO: 1652934 - DNA, 25 bp, Homo sapien
gacccactggagaagtaacactcag

SEQ ID NO: 1652935 - DNA, 25 bp, Homo sapien
tactcgggaggagagttgcttaagc

SEQ ID NO: 1652936 - DNA, 25 bp, Homo sapien
ccctaatgacttcagtgttaccaag

SEQ ID NO: 1652937 - DNA, 25 bp, Homo sapien
cctaatgacttcagtgttaccaaga

SEQ ID NO: 1652938 - DNA, 25 bp, Homo sapien
tccctaatgacttcagtgttaccaa

SEQ ID NO: 1652939 - DNA, 25 bp, Homo sapien
ccagcagactggcataaagcactgc

SEQ ID NO: 1652940 - DNA, 25 bp, Homo sapien
ctccatcacgtgactgtcatgtttg

SEQ ID NO: 1652941 - DNA, 25 bp, Homo sapien
cagactggcataaagcactgcaggg

SEQ ID NO: 1652942 - DNA, 25 bp, Homo sapien
atatttatgaagcaattagtgggca

SEQ ID NO: 1652943 - DNA, 25 bp, Homo sapien
tggtttgataagtgttgggcagctc

SEQ ID NO: 1652944 - DNA, 25 bp, Homo sapien
tgatggtttgataagtgttgggcag

SEQ ID NO: 1652945 - DNA, 25 bp, Homo sapien
atggtttgataagtgttgggcagct

SEQ ID NO: 1652946 - DNA, 25 bp, Homo sapien
gctaccacttgaagaaggttctttc

SEQ ID NO: 1652947 - DNA, 25 bp, Homo sapien
tgtgtaagctacagtcaaggacatt

SEQ ID NO: 1652948 - DNA, 25 bp, Homo sapien
tgcccagcagggtaatgccttcaga

SEQ ID NO: 1652949 - DNA, 25 bp, Homo sapien
aattgtatgccccttgctttgctgg

SEQ ID NO: 1652950 - DNA, 25 bp, Homo sapien
tgctggtgcccaaaacacattctag

SEQ ID NO: 1652951 - DNA, 25 bp, Homo sapien
tgcttccgaagtgggttatggaaac

SEQ ID NO: 1652952 - DNA, 25 bp, Homo sapien
tgaggggtgaactcgaaccaggtct

SEQ ID NO: 1652953 - DNA, 25 bp, Homo sapien
ttcttgaatttgcttccgaagtggg

SEQ ID NO: 1652954 - DNA, 25 bp, Homo sapien
tgagttctgaccagtcttcccttct

SEQ ID NO: 1652955 - DNA, 25 bp, Homo sapien
tttgtcttttgtccctcctctcctc

SEQ ID NO: 1652956 - DNA, 25 bp, Homo sapien
ctttgtcactcaggctgtagtacaa

SEQ ID NO: 1652957 - DNA, 25 bp, Homo sapien
ttgtcttttgtccctcctctcctct

SEQ ID NO: 1652958 - DNA, 25 bp, Homo sapien
tcactttgtcactcaggctgtagta

SEQ ID NO: 1652959 - DNA, 25 bp, Homo sapien
tcgtctaagctgagcaccctgtttt

SEQ ID NO: 1652960 - DNA, 25 bp, Homo sapien
tcttgatccatgcaaagcaagtgca

SEQ ID NO: 1652961 - DNA, 25 bp, Homo sapien
gcaagtgcatgtcctctggtcactt

SEQ ID NO: 1652962 - DNA, 25 bp, Homo sapien
catgttggcctcttaaaggttttct

SEQ ID NO: 1652963 - DNA, 25 bp, Homo sapien
cctctccctccctctaaatgtttgc

SEQ ID NO: 1652964 - DNA, 25 bp, Homo sapien
tctccctccctctaaatgtttgctt

SEQ ID NO: 1652965 - DNA, 25 bp, Homo sapien
ctacctctccctccctctaaatgtt

SEQ ID NO: 1652966 - DNA, 25 bp, Homo sapien
tccctccctctaaatgtttgcttac

SEQ ID NO: 1652967 - DNA, 25 bp, Homo sapien
ggtcattgtcaatggctgcaaatat

SEQ ID NO: 1652968 - DNA, 25 bp, Homo sapien
tcctgccaggaaggttgcaggtcat

SEQ ID NO: 1652969 - DNA, 25 bp, Homo sapien
tgtcaatggctgcaaatattgggta

SEQ ID NO: 1652970 - DNA, 25 bp, Homo sapien
tgcaggtcattgtcaatggctgcaa

SEQ ID NO: 1652971 - DNA, 25 bp, Homo sapien
gagaaggtgccaagacagtgtgagg

SEQ ID NO: 1652972 - DNA, 25 bp, Homo sapien
agaaggtgccaagacagtgtgaggg

SEQ ID NO: 1652973 - DNA, 25 bp, Homo sapien
tagtgaattcaagacatcaaatggc

SEQ ID NO: 1652974 - DNA, 25 bp, Homo sapien
catcaaccgaagtgcccagattttg

SEQ ID NO: 1652975 - DNA, 25 bp, Homo sapien
tactttagttttgaggcatcaaccg

SEQ ID NO: 1652976 - DNA, 25 bp, Homo sapien
tcctgaaggacttaaaaggtggtgc

SEQ ID NO: 1652977 - DNA, 25 bp, Homo sapien
taaatcgatgtttcaggtcagcctc

SEQ ID NO: 1652978 - DNA, 25 bp, Homo sapien
catgtaggcccagaagtcggtcaga

SEQ ID NO: 1652979 - DNA, 25 bp, Homo sapien
ttgcttagagataaccatgtaggcc

SEQ ID NO: 1652980 - DNA, 25 bp, Homo sapien
taattctcagacctcgctgcttgga

SEQ ID NO: 1652981 - DNA, 25 bp, Homo sapien
tctagtgccggatactcaggaaacc

SEQ ID NO: 1652982 - DNA, 25 bp, Homo sapien
cacctgcctcatggagagggcgaca

SEQ ID NO: 1652983 - DNA, 25 bp, Homo sapien
cgatcaagttcgaaggaggactcaa

SEQ ID NO: 1652984 - DNA, 25 bp, Homo sapien
aaatcatctgggacaatccttccat

SEQ ID NO: 1652985 - DNA, 25 bp, Homo sapien
gcctgtgaaatggaaggactgtccc

SEQ ID NO: 1652986 - DNA, 25 bp, Homo sapien
caaagaagtatgtctgggctcgtaa

SEQ ID NO: 1652987 - DNA, 25 bp, Homo sapien
tacaatgctcaacagcggaggaaac

SEQ ID NO: 1652988 - DNA, 25 bp, Homo sapien
tgagtgctcctttgaacttgaccgt

SEQ ID NO: 1652989 - DNA, 25 bp, Homo sapien
tccagagacccctgcgaggtacgtg

SEQ ID NO: 1652990 - DNA, 25 bp, Homo sapien
tacgtgacggcatccaacaggccct

SEQ ID NO: 1652991 - DNA, 25 bp, Homo sapien
ccaaggcaggcaatgtgagcccgca

SEQ ID NO: 1652992 - DNA, 25 bp, Homo sapien
aggcaggcaatgtgagcccgcagtc

SEQ ID NO: 1652993 - DNA, 25 bp, Homo sapien
cccaggaattatggaaacttcagag

SEQ ID NO: 1652994 - DNA, 25 bp, Homo sapien
tggagcccaggaattatggaaactt

SEQ ID NO: 1652995 - DNA, 25 bp, Homo sapien
ctcatcagcctcaatccttagcttc

SEQ ID NO: 1652996 - DNA, 25 bp, Homo sapien
ctttcagcacatgaagtcttcgtct

SEQ ID NO: 1652997 - DNA, 25 bp, Homo sapien
cactgcggtcagaaaattctcagtc

SEQ ID NO: 1652998 - DNA, 25 bp, Homo sapien
tgcactgcggtcagaaaattctcag

SEQ ID NO: 1652999 - DNA, 25 bp, Homo sapien
ggtgcactgcggtcagaaaattctc

SEQ ID NO: 1653000 - DNA, 25 bp, Homo sapien
gtgcactgcggtcagaaaattctca

SEQ ID NO: 1653001 - DNA, 25 bp, Homo sapien
agagatcatgccattgcactccagt

SEQ ID NO: 1653002 - DNA, 25 bp, Homo sapien
cagagatcatgccattgcactccag

SEQ ID NO: 1653003 - DNA, 25 bp, Homo sapien
aactcaggaggtggaggtgccagtg

SEQ ID NO: 1653004 - DNA, 25 bp, Homo sapien
gtggaggtgccagtgagcagagatc

SEQ ID NO: 1653005 - DNA, 25 bp, Homo sapien
cttgtgctccggaatccggtgcgga

SEQ ID NO: 1653006 - DNA, 25 bp, Homo sapien
actgcggggatcctcggtgccaaag

SEQ ID NO: 1653007 - DNA, 25 bp, Homo sapien
cgcttagcggtgtagtcgctggaca

SEQ ID NO: 1653008 - DNA, 25 bp, Homo sapien
cagccggaatctccgcgggtgaaga

SEQ ID NO: 1653009 - DNA, 25 bp, Homo sapien
acctggaggtaaaatggcccctgcg

SEQ ID NO: 1653010 - DNA, 25 bp, Homo sapien
agccctcctcggcttgtaggccctg

SEQ ID NO: 1653011 - DNA, 25 bp, Homo sapien
tgcgcctttaaacagccctcctcgg

SEQ ID NO: 1653012 - DNA, 25 bp, Homo sapien
gaggaggtcgcgggctggaggtgtt

SEQ ID NO: 1653013 - DNA, 25 bp, Homo sapien
ctccgcgtgcagccgttttccccaa

SEQ ID NO: 1653014 - DNA, 25 bp, Homo sapien
ccgcgtgcagccgttttccccaagc

SEQ ID NO: 1653015 - DNA, 25 bp, Homo sapien
cgtgcagccgttttccccaagccag

SEQ ID NO: 1653016 - DNA, 25 bp, Homo sapien
cccggggttagaggcctcctgctct

SEQ ID NO: 1653017 - DNA, 25 bp, Homo sapien
gaatcccagactccggagtaagcca

SEQ ID NO: 1653018 - DNA, 25 bp, Homo sapien
ctcccctgactctcaaaatccacag

SEQ ID NO: 1653019 - DNA, 25 bp, Homo sapien
tgacgggatgaatcccagactccgg

SEQ ID NO: 1653020 - DNA, 25 bp, Homo sapien
tgaaagaaatgacgggatgaatccc

SEQ ID NO: 1653021 - DNA, 25 bp, Homo sapien
tgccctgtacccaggccctaggagg

SEQ ID NO: 1653022 - DNA, 25 bp, Homo sapien
atgccctgtacccaggccctaggag

SEQ ID NO: 1653023 - DNA, 25 bp, Homo sapien
aaccctggggtccgtccaactcatg

SEQ ID NO: 1653024 - DNA, 25 bp, Homo sapien
gggtccgtccaactcatgccctgta

SEQ ID NO: 1653025 - DNA, 25 bp, Homo sapien
taggtatcttcagggtcagagcctg

SEQ ID NO: 1653026 - DNA, 25 bp, Homo sapien
tcgccttgttggttctgaatctgac

SEQ ID NO: 1653027 - DNA, 25 bp, Homo sapien
gtcagagcctgagtcctcgccttgt

SEQ ID NO: 1653028 - DNA, 25 bp, Homo sapien
tagtaggtatcttcagggtcagagc

SEQ ID NO: 1653029 - DNA, 25 bp, Homo sapien
tttgcttccggtacaaacaggccac

SEQ ID NO: 1653030 - DNA, 25 bp, Homo sapien
tgctccggctgcttgtcttcacgga

SEQ ID NO: 1653031 - DNA, 25 bp, Homo sapien
gactcgaataaaccgagggaagcga

SEQ ID NO: 1653032 - DNA, 25 bp, Homo sapien
gggaagcgaagggagatgcccttgt

SEQ ID NO: 1653033 - DNA, 25 bp, Homo sapien
tgtcttcacggactcgaataaaccg

SEQ ID NO: 1653034 - DNA, 25 bp, Homo sapien
ctgctctctgtgtgcccgcccagaa

SEQ ID NO: 1653035 - DNA, 25 bp, Homo sapien
gtgtgcccgcccagaatcccacaca

SEQ ID NO: 1653036 - DNA, 25 bp, Homo sapien
agggccacggccaggtcctctgcca

SEQ ID NO: 1653037 - DNA, 25 bp, Homo sapien
acacagggccacggccaggtcctct

SEQ ID NO: 1653038 - DNA, 25 bp, Homo sapien
tctatccgcacgtaagggcgtgggc

SEQ ID NO: 1653039 - DNA, 25 bp, Homo sapien
ggtcgggaatcacagcgccatctat

SEQ ID NO: 1653040 - DNA, 25 bp, Homo sapien
ccccgcgcagcagggtagatgggag

SEQ ID NO: 1653041 - DNA, 25 bp, Homo sapien
agagggagaggtcagcgcacttcac

SEQ ID NO: 1653042 - DNA, 25 bp, Homo sapien
atctcaaagtcaaggccaagtgttg

SEQ ID NO: 1653043 - DNA, 25 bp, Homo sapien
tcaaagtcaaggccaagtgttggag

SEQ ID NO: 1653044 - DNA, 25 bp, Homo sapien
agtcaaggccaagtgttggagggct

SEQ ID NO: 1653045 - DNA, 25 bp, Homo sapien
tcaaggccaagtgttggagggctgg

SEQ ID NO: 1653046 - DNA, 25 bp, Homo sapien
tcacaaggagcagctatggcacctg

SEQ ID NO: 1653047 - DNA, 25 bp, Homo sapien
ttcacattgatcagggctcacaggc

SEQ ID NO: 1653048 - DNA, 25 bp, Homo sapien
gcctgaaatgcctgtgaccatgaca

SEQ ID NO: 1653049 - DNA, 25 bp, Homo sapien
cacgcccggcaagtcttgggttatt

SEQ ID NO: 1653050 - DNA, 25 bp, Homo sapien
cttgaggctctggtgatgctcctcc

SEQ ID NO: 1653051 - DNA, 25 bp, Homo sapien
gctctggtgatgctcctccagctcc

SEQ ID NO: 1653052 - DNA, 25 bp, Homo sapien
tgaggctctggtgatgctcctccag

SEQ ID NO: 1653053 - DNA, 25 bp, Homo sapien
ttgaggctctggtgatgctcctcca

SEQ ID NO: 1653054 - DNA, 25 bp, Homo sapien
tctggtctacgcagtatccacagaa

SEQ ID NO: 1653055 - DNA, 25 bp, Homo sapien
cccactctggtctacgcagtatcca

SEQ ID NO: 1653056 - DNA, 25 bp, Homo sapien
cagaaaaccagggaagtagggagct

SEQ ID NO: 1653057 - DNA, 25 bp, Homo sapien
tacgcagtatccacagaaaaccagg

SEQ ID NO: 1653058 - DNA, 25 bp, Homo sapien
gcagcaagtgggcaataatcaccaa

SEQ ID NO: 1653059 - DNA, 25 bp, Homo sapien
gcagatacgcagcaagtgggcaata

SEQ ID NO: 1653060 - DNA, 25 bp, Homo sapien
gggcaataatcaccaatataaacgt

SEQ ID NO: 1653061 - DNA, 25 bp, Homo sapien
caatataaacgtcacctggaaagcc

SEQ ID NO: 1653062 - DNA, 25 bp, Homo sapien
gaaaactcttgtgcgggcattcagg

SEQ ID NO: 1653063 - DNA, 25 bp, Homo sapien
acagcactatgtgctatggggcaca

SEQ ID NO: 1653064 - DNA, 25 bp, Homo sapien
catcagaacaaagccggcaacaact

SEQ ID NO: 1653065 - DNA, 25 bp, Homo sapien
cctgttgccatattgcttaagggca

SEQ ID NO: 1653066 - DNA, 25 bp, Homo sapien
gcaagagttgctcatagaaccagaa

SEQ ID NO: 1653067 - DNA, 25 bp, Homo sapien
cagccacattgtgatgatgaggcca

SEQ ID NO: 1653068 - DNA, 25 bp, Homo sapien
cacccctcggtctgggttgtgcaat

SEQ ID NO: 1653069 - DNA, 25 bp, Homo sapien
aaattcttttcttatgtgagccacc

SEQ ID NO: 1653070 - DNA, 25 bp, Homo sapien
cctcactgtcctcgtcgtaggaggc

SEQ ID NO: 1653071 - DNA, 25 bp, Homo sapien
aggtccagggtgtcacccacgccat

SEQ ID NO: 1653072 - DNA, 25 bp, Homo sapien
cgccatcaaggtagtccttcttcag

SEQ ID NO: 1653073 - DNA, 25 bp, Homo sapien
tgtcacccacgccatcaaggtagtc

SEQ ID NO: 1653074 - DNA, 25 bp, Homo sapien
agggctcgcagcagggagaaggtct

SEQ ID NO: 1653075 - DNA, 25 bp, Homo sapien
ctcgtgggatgtgcggtgcttgggc

SEQ ID NO: 1653076 - DNA, 25 bp, Homo sapien
agaaggtctgaactcagttgcagca

SEQ ID NO: 1653077 - DNA, 25 bp, Homo sapien
atcagaactcgtgagcaagggctcg

SEQ ID NO: 1653078 - DNA, 25 bp, Homo sapien
atctcttggcgatctcgtaggtggc

SEQ ID NO: 1653079 - DNA, 25 bp, Homo sapien
tcttggcgatctcgtaggtggcatc

SEQ ID NO: 1653080 - DNA, 25 bp, Homo sapien
ttcaccatcagcccctcgcaggagt

SEQ ID NO: 1653081 - DNA, 25 bp, Homo sapien
tggcgatctcgtaggtggcatcaac

SEQ ID NO: 1653082 - DNA, 25 bp, Homo sapien
gaggtggcgaagacaaactcgccct

SEQ ID NO: 1653083 - DNA, 25 bp, Homo sapien
ctgctcgatgtccttggtgtccagg

SEQ ID NO: 1653084 - DNA, 25 bp, Homo sapien
aaagttctcccggagcagctgccgg

SEQ ID NO: 1653085 - DNA, 25 bp, Homo sapien
caggaactcggcgatctgctcgatg

SEQ ID NO: 1653086 - DNA, 25 bp, Homo sapien
caactagtgacagggttcgtggaaa

SEQ ID NO: 1653087 - DNA, 25 bp, Homo sapien
ccctaaatgtgaggcgaacaggaca

SEQ ID NO: 1653088 - DNA, 25 bp, Homo sapien
aagagggcccgacaccatttagagt

SEQ ID NO: 1653089 - DNA, 25 bp, Homo sapien
gaacaggacatgtgcgggtcacaac

SEQ ID NO: 1653090 - DNA, 25 bp, Homo sapien
cagaggctggattctcctgcgtgct

SEQ ID NO: 1653091 - DNA, 25 bp, Homo sapien
gaagatccacctcacgccaatgtgg

SEQ ID NO: 1653092 - DNA, 25 bp, Homo sapien
cagtgcctggctctaaataacatat

SEQ ID NO: 1653093 - DNA, 25 bp, Homo sapien
tgcgtgcttctacgacacactcttc

SEQ ID NO: 1653094 - DNA, 25 bp, Homo sapien
gatgaggtcgaaggcgtacaaacac

SEQ ID NO: 1653095 - DNA, 25 bp, Homo sapien
tacaaacacacctgcacctggatct

SEQ ID NO: 1653096 - DNA, 25 bp, Homo sapien
ctccattgaggtagatgaggtcgaa

SEQ ID NO: 1653097 - DNA, 25 bp, Homo sapien
acctggatctcagacgcatccacct

SEQ ID NO: 1653098 - DNA, 25 bp, Homo sapien
actctgcccttctgggcactgggca

SEQ ID NO: 1653099 - DNA, 25 bp, Homo sapien
gcccttctgggcactgggcaggacc

SEQ ID NO: 1653100 - DNA, 25 bp, Homo sapien
tgcccttctgggcactgggcaggac

SEQ ID NO: 1653101 - DNA, 25 bp, Homo sapien
cttctgggcactgggcaggacccac

SEQ ID NO: 1653102 - DNA, 25 bp, Homo sapien
gcaggcagtggagcgggtgatgcta

SEQ ID NO: 1653103 - DNA, 25 bp, Homo sapien
gaagatgaggaagtacggggccttg

SEQ ID NO: 1653104 - DNA, 25 bp, Homo sapien
caggcagtggagcgggtgatgctac

SEQ ID NO: 1653105 - DNA, 25 bp, Homo sapien
agatgaggaagtacggggccttggc

SEQ ID NO: 1653106 - DNA, 25 bp, Homo sapien
aaggatgtgaccgatgggagtttaa

SEQ ID NO: 1653107 - DNA, 25 bp, Homo sapien
cggtcccaagccacggcttcggtgt

SEQ ID NO: 1653108 - DNA, 25 bp, Homo sapien
gagcacttggaatggctggatctgc

SEQ ID NO: 1653109 - DNA, 25 bp, Homo sapien
ttgcgtttgcgggtggtgagcactt

SEQ ID NO: 1653110 - DNA, 25 bp, Homo sapien
gcggctgatgatgtccgggtacttc

SEQ ID NO: 1653111 - DNA, 25 bp, Homo sapien
ttggggatgcggctgatgatgtccg

SEQ ID NO: 1653112 - DNA, 25 bp, Homo sapien
gatgcggctgatgatgtccgggtac

SEQ ID NO: 1653113 - DNA, 25 bp, Homo sapien
ggctgatgatgtccgggtacttccc

SEQ ID NO: 1653114 - DNA, 25 bp, Homo sapien
gagagatgagcgagggctcggcagt

SEQ ID NO: 1653115 - DNA, 25 bp, Homo sapien
agagagatgagcgagggctcggcag

SEQ ID NO: 1653116 - DNA, 25 bp, Homo sapien
gtttcaggacctcgctgatgccccg

SEQ ID NO: 1653117 - DNA, 25 bp, Homo sapien
catatttgtattcgcaggtgaaagc

SEQ ID NO: 1653118 - DNA, 25 bp, Homo sapien
aagctgcctcctcaaagcgtttcag

SEQ ID NO: 1653119 - DNA, 25 bp, Homo sapien
tgggatgggccaacattggtttcag

SEQ ID NO: 1653120 - DNA, 25 bp, Homo sapien
cttgcagtgctccgggagacgttcc

SEQ ID NO: 1653121 - DNA, 25 bp, Homo sapien
cacggggataattcggtccaggtcg

SEQ ID NO: 1653122 - DNA, 25 bp, Homo sapien
gcagcacggggataattcggtccag

SEQ ID NO: 1653123 - DNA, 25 bp, Homo sapien
agacgttccaggccgtgctccagca

SEQ ID NO: 1653124 - DNA, 25 bp, Homo sapien
tcctccagccacgtctttctggcct

SEQ ID NO: 1653125 - DNA, 25 bp, Homo sapien
ctccagccacgtctttctggcctct

SEQ ID NO: 1653126 - DNA, 25 bp, Homo sapien
cagaacgtctgcttcaggatcatgc

SEQ ID NO: 1653127 - DNA, 25 bp, Homo sapien
cctccagccacgtctttctggcctc

SEQ ID NO: 1653128 - DNA, 25 bp, Homo sapien
cccaaggcgcagccgtccgctcagg

SEQ ID NO: 1653129 - DNA, 25 bp, Homo sapien
ccaaggcgcagccgtccgctcaggg

SEQ ID NO: 1653130 - DNA, 25 bp, Homo sapien
aaggcgcagccgtccgctcagggac

SEQ ID NO: 1653131 - DNA, 25 bp, Homo sapien
caaggcgcagccgtccgctcaggga

SEQ ID NO: 1653132 - DNA, 25 bp, Homo sapien
ctagcgatgaaccgggcttctgagt

SEQ ID NO: 1653133 - DNA, 25 bp, Homo sapien
tgaaccgggcttctgagtggcggca

SEQ ID NO: 1653134 - DNA, 25 bp, Homo sapien
tgagtggcggcaggccacaaagagg

SEQ ID NO: 1653135 - DNA, 25 bp, Homo sapien
aaagaggcctttgatgatgtctatc

SEQ ID NO: 1653136 - DNA, 25 bp, Homo sapien
gagtcaggggaagagccgtcagtgc

SEQ ID NO: 1653137 - DNA, 25 bp, Homo sapien
ctggagagtcaggggaagagccgtc

SEQ ID NO: 1653138 - DNA, 25 bp, Homo sapien
ggagagtcaggggaagagccgtcag

SEQ ID NO: 1653139 - DNA, 25 bp, Homo sapien
gagagtcaggggaagagccgtcagt

SEQ ID NO: 1653140 - DNA, 25 bp, Homo sapien
accccggaggcagtgagcggaggtg

SEQ ID NO: 1653141 - DNA, 25 bp, Homo sapien
gccccacgtcgcctttctcggctgc

SEQ ID NO: 1653142 - DNA, 25 bp, Homo sapien
gtgctgcggctgttctcggccacca

SEQ ID NO: 1653143 - DNA, 25 bp, Homo sapien
tcgcggaacttgctgaagaccccgg

SEQ ID NO: 1653144 - DNA, 25 bp, Homo sapien
gctgggtcccatgggcgcctgggtg

SEQ ID NO: 1653145 - DNA, 25 bp, Homo sapien
tgtccagagctgggtcccatgggcg

SEQ ID NO: 1653146 - DNA, 25 bp, Homo sapien
tcccatgggcgcctgggtgtaagag

SEQ ID NO: 1653147 - DNA, 25 bp, Homo sapien
tccagagctgggtcccatgggcgcc

SEQ ID NO: 1653148 - DNA, 25 bp, Homo sapien
tggtatgacgtcagtgctcccgaaa

SEQ ID NO: 1653149 - DNA, 25 bp, Homo sapien
tccgtaatgaacgaacaagtgcgcg

SEQ ID NO: 1653150 - DNA, 25 bp, Homo sapien
caagtgcgcgtttcagtccacagat

SEQ ID NO: 1653151 - DNA, 25 bp, Homo sapien
tattcttaaccgaccccgtgtgtgc

SEQ ID NO: 1653152 - DNA, 25 bp, Homo sapien
gcgcagcaagttgctcagcgtctcc

SEQ ID NO: 1653153 - DNA, 25 bp, Homo sapien
ttgagaaggacaccatcacccacgc

SEQ ID NO: 1653154 - DNA, 25 bp, Homo sapien
ccaaggtggttgaggctgaggtaga

SEQ ID NO: 1653155 - DNA, 25 bp, Homo sapien
cagggaggaggtctggaggcgacag

SEQ ID NO: 1653156 - DNA, 25 bp, Homo sapien
cgtgtttctgtctaaaacttcaaag

SEQ ID NO: 1653157 - DNA, 25 bp, Homo sapien
gtgtttctgtctaaaacttcaaagc

SEQ ID NO: 1653158 - DNA, 25 bp, Homo sapien
acctcctcgatcttctcaaacgtcc

SEQ ID NO: 1653159 - DNA, 25 bp, Homo sapien
tcgatcttctcaaacgtccgggcca

SEQ ID NO: 1653160 - DNA, 25 bp, Homo sapien
tcctcgatcttctcaaacgtccggg

SEQ ID NO: 1653161 - DNA, 25 bp, Homo sapien
atcttctcaaacgtccgggccacag

SEQ ID NO: 1653162 - DNA, 25 bp, Homo sapien
ggattgtaaccagatggatccaggg

SEQ ID NO: 1653163 - DNA, 25 bp, Homo sapien
cttccacgggatgatagttgttctt

SEQ ID NO: 1653164 - DNA, 25 bp, Homo sapien
cttggcaggattgtaaccagatgga

SEQ ID NO: 1653165 - DNA, 25 bp, Homo sapien
aggcatcttccacgggatgatagtt

SEQ ID NO: 1653166 - DNA, 25 bp, Homo sapien
tcttttttgactgctggcttccggg

SEQ ID NO: 1653167 - DNA, 25 bp, Homo sapien
aagaagctgctgagcgtcttgggag

SEQ ID NO: 1653168 - DNA, 25 bp, Homo sapien
agctctgcggggaggcttggtctgc

SEQ ID NO: 1653169 - DNA, 25 bp, Homo sapien
tgcggggaggcttggtctgctcttc

SEQ ID NO: 1653170 - DNA, 25 bp, Homo sapien
agctgctgagcgtcttgggagctct

SEQ ID NO: 1653171 - DNA, 25 bp, Homo sapien
ctcaggctctgaaacgctttccgtc

SEQ ID NO: 1653172 - DNA, 25 bp, Homo sapien
aggctctgaaacgctttccgtcggg

SEQ ID NO: 1653173 - DNA, 25 bp, Homo sapien
caggctctgaaacgctttccgtcgg

SEQ ID NO: 1653174 - DNA, 25 bp, Homo sapien
tcaggctctgaaacgctttccgtcg

SEQ ID NO: 1653175 - DNA, 25 bp, Homo sapien
ctttaggggcttgggaggcgtggtg

SEQ ID NO: 1653176 - DNA, 25 bp, Homo sapien
ggcttgggaggcgtggtgggctggt

SEQ ID NO: 1653177 - DNA, 25 bp, Homo sapien
tctgtgaggctttctttcggggtct

SEQ ID NO: 1653178 - DNA, 25 bp, Homo sapien
cgtggtgggctggtccccgtcttct

SEQ ID NO: 1653179 - DNA, 25 bp, Homo sapien
cctgaatggtccgtttcgggagctg

SEQ ID NO: 1653180 - DNA, 25 bp, Homo sapien
ttcctgaatggtccgtttcgggagc

SEQ ID NO: 1653181 - DNA, 25 bp, Homo sapien
cttcctgaatggtccgtttcgggag

SEQ ID NO: 1653182 - DNA, 25 bp, Homo sapien
tgaatggtccgtttcgggagctgct

SEQ ID NO: 1653183 - DNA, 25 bp, Homo sapien
gaatcccacaaaactaagctccagc

SEQ ID NO: 1653184 - DNA, 25 bp, Homo sapien
cccacgatcggcaggagttggtgta

SEQ ID NO: 1653185 - DNA, 25 bp, Homo sapien
gctccagctgcccaacacatagcag

SEQ ID NO: 1653186 - DNA, 25 bp, Homo sapien
gtcactctggagcatttacaccgtt

SEQ ID NO: 1653187 - DNA, 25 bp, Homo sapien
caggagatgtggcaggacggggcgg

SEQ ID NO: 1653188 - DNA, 25 bp, Homo sapien
aactgtccatgggagaggtgtcaga

SEQ ID NO: 1653189 - DNA, 25 bp, Homo sapien
ggcggggagacctgtgagcagtcca

SEQ ID NO: 1653190 - DNA, 25 bp, Homo sapien
ctgatggggaactgtccatgggaga

SEQ ID NO: 1653191 - DNA, 25 bp, Homo sapien
ctggcctcttcaccggagagtcact

SEQ ID NO: 1653192 - DNA, 25 bp, Homo sapien
tttagcagggctaagggcttcatcc

SEQ ID NO: 1653193 - DNA, 25 bp, Homo sapien
ggagagtcactctcggacaccactc

SEQ ID NO: 1653194 - DNA, 25 bp, Homo sapien
ccttcgctgcccaggacccgggccg

SEQ ID NO: 1653195 - DNA, 25 bp, Homo sapien
ctctctgctgctattggatgcctcc

SEQ ID NO: 1653196 - DNA, 25 bp, Homo sapien
tctctgctgctattggatgcctcct

SEQ ID NO: 1653197 - DNA, 25 bp, Homo sapien
tctctctgctgctattggatgcctc

SEQ ID NO: 1653198 - DNA, 25 bp, Homo sapien
cgtctctctgctgctattggatgcc

SEQ ID NO: 1653199 - DNA, 25 bp, Homo sapien
tgccttcaagaagctaacactctgg

SEQ ID NO: 1653200 - DNA, 25 bp, Homo sapien
gctaacactctggtgaagggcagaa

SEQ ID NO: 1653201 - DNA, 25 bp, Homo sapien
cagtgacccagacacacgaagttcc

SEQ ID NO: 1653202 - DNA, 25 bp, Homo sapien
gcccggcctacctaagcacttatta

SEQ ID NO: 1653203 - DNA, 25 bp, Homo sapien
agcacttttcttcgtctgtcagctg

SEQ ID NO: 1653204 - DNA, 25 bp, Homo sapien
gcacttttcttcgtctgtcagctgc

SEQ ID NO: 1653205 - DNA, 25 bp, Homo sapien
gtgcagagatctaaacacacataaa

SEQ ID NO: 1653206 - DNA, 25 bp, Homo sapien
tgcagagatctaaacacacataaaa

SEQ ID NO: 1653207 - DNA, 25 bp, Homo sapien
tctgggagacacctctctgcactct

SEQ ID NO: 1653208 - DNA, 25 bp, Homo sapien
cgcgctctcggcagcctcagcgtcc

SEQ ID NO: 1653209 - DNA, 25 bp, Homo sapien
tgcagacaccccgacatggcgaagc

SEQ ID NO: 1653210 - DNA, 25 bp, Homo sapien
tggcgaagcataggccccaagcatt

SEQ ID NO: 1653211 - DNA, 25 bp, Homo sapien
ccgcctcccatctgcttgcggacgg

SEQ ID NO: 1653212 - DNA, 25 bp, Homo sapien
tcccatctgcttgcggacggcccca

SEQ ID NO: 1653213 - DNA, 25 bp, Homo sapien
gcctcccatctgcttgcggacggcc

SEQ ID NO: 1653214 - DNA, 25 bp, Homo sapien
atctgcttgcggacggccccacttg

SEQ ID NO: 1653215 - DNA, 25 bp, Homo sapien
cccgcgcgccgctgcccgggcaaca

SEQ ID NO: 1653216 - DNA, 25 bp, Homo sapien
ttgcgttggtcccgcgcgccgctgc

SEQ ID NO: 1653217 - DNA, 25 bp, Homo sapien
cttgcgttggtcccgcgcgccgctg

SEQ ID NO: 1653218 - DNA, 25 bp, Homo sapien
gcgcgccgctgcccgggcaacacac

SEQ ID NO: 1653219 - DNA, 25 bp, Homo sapien
gcgcctctgcagtcccaagttcgcg

SEQ ID NO: 1653220 - DNA, 25 bp, Homo sapien
tctgcagtcccaagttcgcgccacg

SEQ ID NO: 1653221 - DNA, 25 bp, Homo sapien
gcgcgcctctgcagtcccaagttcg

SEQ ID NO: 1653222 - DNA, 25 bp, Homo sapien
cagtcccaagttcgcgccacggcat

SEQ ID NO: 1653223 - DNA, 25 bp, Homo sapien
tcgcgcggaggacactgggagtcgt

SEQ ID NO: 1653224 - DNA, 25 bp, Homo sapien
ggagtcgtagtctcccgaatgggag

SEQ ID NO: 1653225 - DNA, 25 bp, Homo sapien
tttccctcgccctggatgagcgggt

SEQ ID NO: 1653226 - DNA, 25 bp, Homo sapien
cacactgggaaaatgcccgcgcttt

SEQ ID NO: 1653227 - DNA, 25 bp, Homo sapien
ggaagccccagctacagctgcatgt

SEQ ID NO: 1653228 - DNA, 25 bp, Homo sapien
tgcatgtggcgagccatagggtcat

SEQ ID NO: 1653229 - DNA, 25 bp, Homo sapien
ataactgcatgtggggagtacatct

SEQ ID NO: 1653230 - DNA, 25 bp, Homo sapien
tgtaggcgaagcgtggataactgca

SEQ ID NO: 1653231 - DNA, 25 bp, Homo sapien
ttgtgatgacatttgggcctacctg

SEQ ID NO: 1653232 - DNA, 25 bp, Homo sapien
ggcctacctgggtaatccagactct

SEQ ID NO: 1653233 - DNA, 25 bp, Homo sapien
taatttcatcacacccgcaaaggtc

SEQ ID NO: 1653234 - DNA, 25 bp, Homo sapien
catggaaggcagcatatgcacagtt

SEQ ID NO: 1653235 - DNA, 25 bp, Homo sapien
gcagcgttcacagaaggcctcaact

SEQ ID NO: 1653236 - DNA, 25 bp, Homo sapien
gaagactcgtgggtcattcatgcct

SEQ ID NO: 1653237 - DNA, 25 bp, Homo sapien
ttcatcatcgtcaagctgagcccgc

SEQ ID NO: 1653238 - DNA, 25 bp, Homo sapien
cacacagctggcatattcttagggc

SEQ ID NO: 1653239 - DNA, 25 bp, Homo sapien
cggcctgtacatgctgttttgcatc

SEQ ID NO: 1653240 - DNA, 25 bp, Homo sapien
gagtgccagatgtcaccatctttcg

SEQ ID NO: 1653241 - DNA, 25 bp, Homo sapien
gcatcttgctttatacgttggggag

SEQ ID NO: 1653242 - DNA, 25 bp, Homo sapien
acccggcctgtacatgctgttttgc

SEQ ID NO: 1653243 - DNA, 25 bp, Homo sapien
tggccaacataacgagcacctgtct

SEQ ID NO: 1653244 - DNA, 25 bp, Homo sapien
ctggccaacataacgagcacctgtc

SEQ ID NO: 1653245 - DNA, 25 bp, Homo sapien
actcaggaggcgtagcttgcagcga

SEQ ID NO: 1653246 - DNA, 25 bp, Homo sapien
gcctgggcgacagagtgagactcca

SEQ ID NO: 1653247 - DNA, 25 bp, Homo sapien
gccaagatcgtgctactgcactcca

SEQ ID NO: 1653248 - DNA, 25 bp, Homo sapien
gaactcaggaggcgtagcttgcagc

SEQ ID NO: 1653249 - DNA, 25 bp, Homo sapien
caggaggatgggcattcagcccaac

SEQ ID NO: 1653250 - DNA, 25 bp, Homo sapien
gaggatgggcattcagcccaacgta

SEQ ID NO: 1653251 - DNA, 25 bp, Homo sapien
gatgggcattcagcccaacgtaatt

SEQ ID NO: 1653252 - DNA, 25 bp, Homo sapien
atgttgggggagtactgtttatctg

SEQ ID NO: 1653253 - DNA, 25 bp, Homo sapien
gcttctccttggatgcgatgccgca

SEQ ID NO: 1653254 - DNA, 25 bp, Homo sapien
aagcaagtcacatgacactgcttac

SEQ ID NO: 1653255 - DNA, 25 bp, Homo sapien
cgaaggcttctccttggatgcgatg

SEQ ID NO: 1653256 - DNA, 25 bp, Homo sapien
cttggatgcgatgccgcagctccct

SEQ ID NO: 1653257 - DNA, 25 bp, Homo sapien
cttggcaagcggcaaaagataacca

SEQ ID NO: 1653258 - DNA, 25 bp, Homo sapien
tatgtagttacacaggcctcctgca

SEQ ID NO: 1653259 - DNA, 25 bp, Homo sapien
gggtactgtttcatcaagggccgcc

SEQ ID NO: 1653260 - DNA, 25 bp, Homo sapien
gcaacgctactaagtgcccgggaga

SEQ ID NO: 1653261 - DNA, 25 bp, Homo sapien
tgcaaatcgcatgggtgactccagg

SEQ ID NO: 1653262 - DNA, 25 bp, Homo sapien
ggtgactccaggcaagcaactgaag

SEQ ID NO: 1653263 - DNA, 25 bp, Homo sapien
catgggtgactccaggcaagcaact

SEQ ID NO: 1653264 - DNA, 25 bp, Homo sapien
ctggtattgcaaatcgcatgggtga

SEQ ID NO: 1653265 - DNA, 25 bp, Homo sapien
tgagagctgatgcacgccaggtgtc

SEQ ID NO: 1653266 - DNA, 25 bp, Homo sapien
tgaatactgctgagagatcgagaca

SEQ ID NO: 1653267 - DNA, 25 bp, Homo sapien
gatcgagacagacggtaagaacggc

SEQ ID NO: 1653268 - DNA, 25 bp, Homo sapien
ccatgcgttggccaggagtgatctc

SEQ ID NO: 1653269 - DNA, 25 bp, Homo sapien
gtgataatgaagtccacactgagga

SEQ ID NO: 1653270 - DNA, 25 bp, Homo sapien
tagagacatgatcaggcctagacct

SEQ ID NO: 1653271 - DNA, 25 bp, Homo sapien
gcccggcctaggaggcttctaataa

SEQ ID NO: 1653272 - DNA, 25 bp, Homo sapien
aaaatctggatctttgcttggctca

SEQ ID NO: 1653273 - DNA, 25 bp, Homo sapien
gtcaaaggctttgatggcagctgac

SEQ ID NO: 1653274 - DNA, 25 bp, Homo sapien
ttcaagtcatgcgaagtcaaaggct

SEQ ID NO: 1653275 - DNA, 25 bp, Homo sapien
gcctgcttttcgtgcgatggatttc

SEQ ID NO: 1653276 - DNA, 25 bp, Homo sapien
ggactagaagttcccatatcacacc

SEQ ID NO: 1653277 - DNA, 25 bp, Homo sapien
ctacaattatcggaaataggcttat

SEQ ID NO: 1653278 - DNA, 25 bp, Homo sapien
tagctgatcttcgttgggcttgccc

SEQ ID NO: 1653279 - DNA, 25 bp, Homo sapien
gcaaagcaactgatcataaacctac

SEQ ID NO: 1653280 - DNA, 25 bp, Homo sapien
tctaacaagatcctagtatgcatgt

SEQ ID NO: 1653281 - DNA, 25 bp, Homo sapien
cctgaaagccatccctaagtagtct

SEQ ID NO: 1653282 - DNA, 25 bp, Homo sapien
cagttattaagtcgatctcccgcca

SEQ ID NO: 1653283 - DNA, 25 bp, Homo sapien
gaccttccagcctatgttacagttg

SEQ ID NO: 1653284 - DNA, 25 bp, Homo sapien
tatagtgacgatccagtctgcacga

SEQ ID NO: 1653285 - DNA, 25 bp, Homo sapien
agaaagctacaactcccagccggct

SEQ ID NO: 1653286 - DNA, 25 bp, Homo sapien
tgcgcagtagaacccgcgggcccag

SEQ ID NO: 1653287 - DNA, 25 bp, Homo sapien
tttgctgagtgtgagggcctgcgca

SEQ ID NO: 1653288 - DNA, 25 bp, Homo sapien
ctttcgcgtccaagtccctttgctg

SEQ ID NO: 1653289 - DNA, 25 bp, Homo sapien
agaggagtggggaggagctctttac

SEQ ID NO: 1653290 - DNA, 25 bp, Homo sapien
ggagaggagtggggaggagctcttt

SEQ ID NO: 1653291 - DNA, 25 bp, Homo sapien
ctggcgggagaggagtggggaggag

SEQ ID NO: 1653292 - DNA, 25 bp, Homo sapien
gcgggagaggagtggggaggagctc

SEQ ID NO: 1653293 - DNA, 25 bp, Homo sapien
ttgtggggcccgcttggatctcctt

SEQ ID NO: 1653294 - DNA, 25 bp, Homo sapien
tctgggtgaggaggcggacgcggga

SEQ ID NO: 1653295 - DNA, 25 bp, Homo sapien
cattgtggggcccgcttggatctcc

SEQ ID NO: 1653296 - DNA, 25 bp, Homo sapien
ggggcccgcttggatctccttgtcc

SEQ ID NO: 1653297 - DNA, 25 bp, Homo sapien
ttacgagccgctcagcgcgcaggag

SEQ ID NO: 1653298 - DNA, 25 bp, Homo sapien
gttacgagccgctcagcgcgcagga

SEQ ID NO: 1653299 - DNA, 25 bp, Homo sapien
gggattcaaaggttggcgttgccac

SEQ ID NO: 1653300 - DNA, 25 bp, Homo sapien
caaaggttggcgttgccacagtaac

SEQ ID NO: 1653301 - DNA, 25 bp, Homo sapien
caagggttaaggcacaagcaggtgc

SEQ ID NO: 1653302 - DNA, 25 bp, Homo sapien
aagatctagagcagtcccaatgagt

SEQ ID NO: 1653303 - DNA, 25 bp, Homo sapien
gtctggataacagggatttagggta

SEQ ID NO: 1653304 - DNA, 25 bp, Homo sapien
ccaatgagtctggataacagggatt

SEQ ID NO: 1653305 - DNA, 25 bp, Homo sapien
aatgcactcagtgggacgacacaga

SEQ ID NO: 1653306 - DNA, 25 bp, Homo sapien
gataacaacaggtgaacactccagc

SEQ ID NO: 1653307 - DNA, 25 bp, Homo sapien
cacatttcgagggtacatatcggaa

SEQ ID NO: 1653308 - DNA, 25 bp, Homo sapien
tgagcattcattgcgctggtcctaa

SEQ ID NO: 1653309 - DNA, 25 bp, Homo sapien
tacatgccaggttacaagtctgtcc

SEQ ID NO: 1653310 - DNA, 25 bp, Homo sapien
aaagcctgtgtgatagatgttaccc

SEQ ID NO: 1653311 - DNA, 25 bp, Homo sapien
caaccagatggtgtctactaggaac

SEQ ID NO: 1653312 - DNA, 25 bp, Homo sapien
ggtgatacttcaaacggagtgtcca

SEQ ID NO: 1653313 - DNA, 25 bp, Homo sapien
cactaatgcttctgaagagcacgtc

SEQ ID NO: 1653314 - DNA, 25 bp, Homo sapien
caaattctgctgtctaagataggac

SEQ ID NO: 1653315 - DNA, 25 bp, Homo sapien
catgctcagcaaggcctcattcttg

SEQ ID NO: 1653316 - DNA, 25 bp, Homo sapien
gtcttggagatcatcgagcacccct

SEQ ID NO: 1653317 - DNA, 25 bp, Homo sapien
tggagttgccggtggttctccttca

SEQ ID NO: 1653318 - DNA, 25 bp, Homo sapien
gcttggagttgccggtggttctcct

SEQ ID NO: 1653319 - DNA, 25 bp, Homo sapien
tggcttggagttgccggtggttctc

SEQ ID NO: 1653320 - DNA, 25 bp, Homo sapien
ttggagttgccggtggttctccttc

SEQ ID NO: 1653321 - DNA, 25 bp, Homo sapien
ccaataagatctcgggaactgggcc

SEQ ID NO: 1653322 - DNA, 25 bp, Homo sapien
taactggcctataacctcttacgga

SEQ ID NO: 1653323 - DNA, 25 bp, Homo sapien
gaaaggccgtctcctgacagagaga

SEQ ID NO: 1653324 - DNA, 25 bp, Homo sapien
aagtgagcatgcgtatgactccaag

SEQ ID NO: 1653325 - DNA, 25 bp, Homo sapien
tgtcactcaaagaccccttgatgtc

SEQ ID NO: 1653326 - DNA, 25 bp, Homo sapien
tttgctgccagtaacgttctggtgc

SEQ ID NO: 1653327 - DNA, 25 bp, Homo sapien
ttgatgtctcatacatacccttggc

SEQ ID NO: 1653328 - DNA, 25 bp, Homo sapien
tgccatgtcacttggataccttcca

SEQ ID NO: 1653329 - DNA, 25 bp, Homo sapien
gagaaaggaggaggggctgatgcag

SEQ ID NO: 1653330 - DNA, 25 bp, Homo sapien
tgagaaaggaggaggggctgatgca

SEQ ID NO: 1653331 - DNA, 25 bp, Homo sapien
ctgagaaaggaggaggggctgatgc

SEQ ID NO: 1653332 - DNA, 25 bp, Homo sapien
tcccatctcctgtgaggtctcacaa

SEQ ID NO: 1653333 - DNA, 25 bp, Homo sapien
tgatgccttcaatgtggttttgcac

SEQ ID NO: 1653334 - DNA, 25 bp, Homo sapien
gctaattggagctaccattttggaa

SEQ ID NO: 1653335 - DNA, 25 bp, Homo sapien
ccaagactgttgatggtgcagaaat

SEQ ID NO: 1653336 - DNA, 25 bp, Homo sapien
tgaaccagcatactcatccaagacc

SEQ ID NO: 1653337 - DNA, 25 bp, Homo sapien
ccttgaaccagcatactcatccaag

SEQ ID NO: 1653338 - DNA, 25 bp, Homo sapien
acaatctcccccatttcatctagaa

SEQ ID NO: 1653339 - DNA, 25 bp, Homo sapien
tgggcagaacatgagctgccttgaa

SEQ ID NO: 1653340 - DNA, 25 bp, Homo sapien
aaaaagcatgattgtgacacctgga

SEQ ID NO: 1653341 - DNA, 25 bp, Homo sapien
aaaaaaagcatgattgtgacacctg

SEQ ID NO: 1653342 - DNA, 25 bp, Homo sapien
aaagcatgattgtgacacctggaaa

SEQ ID NO: 1653343 - DNA, 25 bp, Homo sapien
aaaaaagcatgattgtgacacctgg

SEQ ID NO: 1653344 - DNA, 25 bp, Homo sapien
cattctagccactgataatgcaggc

SEQ ID NO: 1653345 - DNA, 25 bp, Homo sapien
tcatccaaccctgcaatgtgcctgg

SEQ ID NO: 1653346 - DNA, 25 bp, Homo sapien
taagacattttaccgactggaggga

SEQ ID NO: 1653347 - DNA, 25 bp, Homo sapien
cctgggtcggctgagcatcatccaa

SEQ ID NO: 1653348 - DNA, 25 bp, Homo sapien
cctatcaaatcatcacctagatatt

SEQ ID NO: 1653349 - DNA, 25 bp, Homo sapien
cctagatattaagccctgcacgcat

SEQ ID NO: 1653350 - DNA, 25 bp, Homo sapien
cacctagatattaagccctgcacgc

SEQ ID NO: 1653351 - DNA, 25 bp, Homo sapien
agatattaagccctgcacgcattag

SEQ ID NO: 1653352 - DNA, 25 bp, Homo sapien
ttttgagaagtgctgaatttctcca

SEQ ID NO: 1653353 - DNA, 25 bp, Homo sapien
agtatcccacaccaaagtcccatgt

SEQ ID NO: 1653354 - DNA, 25 bp, Homo sapien
ggttccttcatctgcccagcataga

SEQ ID NO: 1653355 - DNA, 25 bp, Homo sapien
atctcaagttgaatgggttccttca

SEQ ID NO: 1653356 - DNA, 25 bp, Homo sapien
tgaggcccctcattaatgatgcgac

SEQ ID NO: 1653357 - DNA, 25 bp, Homo sapien
tagctgtcaacaccacatgagtcag

SEQ ID NO: 1653358 - DNA, 25 bp, Homo sapien
gaaaaactatctgagctaccaactg

SEQ ID NO: 1653359 - DNA, 25 bp, Homo sapien
tgatgcgaccagctcagaatccgag

SEQ ID NO: 1653360 - DNA, 25 bp, Homo sapien
ctcaatgtgtagttttaacctaaca

SEQ ID NO: 1653361 - DNA, 25 bp, Homo sapien
atgtgtagttttaacctaacataag

SEQ ID NO: 1653362 - DNA, 25 bp, Homo sapien
tgggaaactcaatgtgtagttttaa

SEQ ID NO: 1653363 - DNA, 25 bp, Homo sapien
cagtttgggaaactcaatgtgtagt

SEQ ID NO: 1653364 - DNA, 25 bp, Homo sapien
tgcaggcgcacaccatggaagcgat

SEQ ID NO: 1653365 - DNA, 25 bp, Homo sapien
tcaggttagcagaattagacacaat

SEQ ID NO: 1653366 - DNA, 25 bp, Homo sapien
caccatggaagcgatcttcctcatc

SEQ ID NO: 1653367 - DNA, 25 bp, Homo sapien
gaattagacacaatataactggaac

SEQ ID NO: 1653368 - DNA, 25 bp, Homo sapien
tgttatagttcttatcatatgcaca

SEQ ID NO: 1653369 - DNA, 25 bp, Homo sapien
tcctatagcattccatgtaatatct

SEQ ID NO: 1653370 - DNA, 25 bp, Homo sapien
tagttcttatcatatgcacatatat

SEQ ID NO: 1653371 - DNA, 25 bp, Homo sapien
ccatgtaatatctttggttgtcatg

SEQ ID NO: 1653372 - DNA, 25 bp, Homo sapien
atagaaaggctccacccgggctgga

SEQ ID NO: 1653373 - DNA, 25 bp, Homo sapien
tcattcttaaaatgggcaacgagaa

SEQ ID NO: 1653374 - DNA, 25 bp, Homo sapien
acgagaaaccaggagacgtccacct

SEQ ID NO: 1653375 - DNA, 25 bp, Homo sapien
agcaggatgcccatcagagagaagc

SEQ ID NO: 1653376 - DNA, 25 bp, Homo sapien
gtggatttcggcgacagcctcctct

SEQ ID NO: 1653377 - DNA, 25 bp, Homo sapien
cagccactgttcatggtgctgcagg

SEQ ID NO: 1653378 - DNA, 25 bp, Homo sapien
tgactccaggaaccaaacgcaatcg

SEQ ID NO: 1653379 - DNA, 25 bp, Homo sapien
actgtgacctcatcccttaccagga

SEQ ID NO: 1653380 - DNA, 25 bp, Homo sapien
gctcttatcaatcaactcaacatcc

SEQ ID NO: 1653381 - DNA, 25 bp, Homo sapien
caggccccagaaactgacgattttt

SEQ ID NO: 1653382 - DNA, 25 bp, Homo sapien
tatctgtttgtgctcttatcaatca

SEQ ID NO: 1653383 - DNA, 25 bp, Homo sapien
gccccagaaactgacgatttttata

SEQ ID NO: 1653384 - DNA, 25 bp, Homo sapien
ctttagaagcataagaggaaactat

SEQ ID NO: 1653385 - DNA, 25 bp, Homo sapien
ttgattctcttctgagcaaatgtct

SEQ ID NO: 1653386 - DNA, 25 bp, Homo sapien
taagaggaaactatttgattctctt

SEQ ID NO: 1653387 - DNA, 25 bp, Homo sapien
gaagcataagaggaaactatttgat

SEQ ID NO: 1653388 - DNA, 25 bp, Homo sapien
gactaaacgtatacaccaaattcca

SEQ ID NO: 1653389 - DNA, 25 bp, Homo sapien
tgggaggcaccatttgctgaggact

SEQ ID NO: 1653390 - DNA, 25 bp, Homo sapien
gaatgttccttgtcatgactaaacg

SEQ ID NO: 1653391 - DNA, 25 bp, Homo sapien
gcagtttcgcttctttgaatccaga

SEQ ID NO: 1653392 - DNA, 25 bp, Homo sapien
tcttgtccctctgaagattcctgct

SEQ ID NO: 1653393 - DNA, 25 bp, Homo sapien
tgtagcagagaatggaacactcccg

SEQ ID NO: 1653394 - DNA, 25 bp, Homo sapien
gttctatgacatacagcgtgagcca

SEQ ID NO: 1653395 - DNA, 25 bp, Homo sapien
tgcactgtcccgtagagtagccgct

SEQ ID NO: 1653396 - DNA, 25 bp, Homo sapien
gactgggcggatctagactatcaag

SEQ ID NO: 1653397 - DNA, 25 bp, Homo sapien
tgtttatttcgacgtgaaagagacc

SEQ ID NO: 1653398 - DNA, 25 bp, Homo sapien
cagagaaactgacacgtggattagg

SEQ ID NO: 1653399 - DNA, 25 bp, Homo sapien
cttctggagcaaggcaaccaactcc

SEQ ID NO: 1653400 - DNA, 25 bp, Homo sapien
tgatccattccttgagatatctgtt

SEQ ID NO: 1653401 - DNA, 25 bp, Homo sapien
ggctttacagcgcttttctcggaag

SEQ ID NO: 1653402 - DNA, 25 bp, Homo sapien
gaaaggctttacagcgcttttctcg

SEQ ID NO: 1653403 - DNA, 25 bp, Homo sapien
ttacagcgcttttctcggaaggatt

SEQ ID NO: 1653404 - DNA, 25 bp, Homo sapien
gaagagaaaggctttacagcgcttt

SEQ ID NO: 1653405 - DNA, 25 bp, Homo sapien
cagatcatgagagctgacggttcca

SEQ ID NO: 1653406 - DNA, 25 bp, Homo sapien
gctgacatcctaagactggttgctg

SEQ ID NO: 1653407 - DNA, 25 bp, Homo sapien
tcagcagtctatgcccttgaggtta

SEQ ID NO: 1653408 - DNA, 25 bp, Homo sapien
ctatggattcgggtagctacaggca

SEQ ID NO: 1653409 - DNA, 25 bp, Homo sapien
ggttctctagacacctccatggaag

SEQ ID NO: 1653410 - DNA, 25 bp, Homo sapien
tcaacccttggaaattggcataccc

SEQ ID NO: 1653411 - DNA, 25 bp, Homo sapien
catcatcagccagtttcctagagaa

SEQ ID NO: 1653412 - DNA, 25 bp, Homo sapien
tcccctgagttcgatgaaaaacacc

SEQ ID NO: 1653413 - DNA, 25 bp, Homo sapien
tcaggaacagcacggaacaataatg

SEQ ID NO: 1653414 - DNA, 25 bp, Homo sapien
cactcaggaacagcacggaacaata

SEQ ID NO: 1653415 - DNA, 25 bp, Homo sapien
ggaacagcacggaacaataatggct

SEQ ID NO: 1653416 - DNA, 25 bp, Homo sapien
gaatgtcccccccagatagttgaca

SEQ ID NO: 1653417 - DNA, 25 bp, Homo sapien
gtctcagaaacacagggtagctccc

SEQ ID NO: 1653418 - DNA, 25 bp, Homo sapien
atgtgagatgtcacaaagggtctca

SEQ ID NO: 1653419 - DNA, 25 bp, Homo sapien
aacacagggtagctccctgtatacc

SEQ ID NO: 1653420 - DNA, 25 bp, Homo sapien
tgagatgtcacaaagggtctcagaa

SEQ ID NO: 1653421 - DNA, 25 bp, Homo sapien
ttttatgcaaataacctgcatgtct

SEQ ID NO: 1653422 - DNA, 25 bp, Homo sapien
tgcttcttatgaatgtacataaacc

SEQ ID NO: 1653423 - DNA, 25 bp, Homo sapien
gcttcttatgaatgtacataaacca

SEQ ID NO: 1653424 - DNA, 25 bp, Homo sapien
tgcaaataacctgcatgtctttgct

SEQ ID NO: 1653425 - DNA, 25 bp, Homo sapien
tttcccaacaaatagatgtccctta

SEQ ID NO: 1653426 - DNA, 25 bp, Homo sapien
ttcccaacaaatagatgtcccttac

SEQ ID NO: 1653427 - DNA, 25 bp, Homo sapien
tatgctattgtcaaccaacagtttc

SEQ ID NO: 1653428 - DNA, 25 bp, Homo sapien
tgtgtattgcagttcccgtatgcta

SEQ ID NO: 1653429 - DNA, 25 bp, Homo sapien
ccaacagtttccgtgatccttgtag

SEQ ID NO: 1653430 - DNA, 25 bp, Homo sapien
tagtctaatgagtttggatgcatct

SEQ ID NO: 1653431 - DNA, 25 bp, Homo sapien
gtgatgtagcgaaagtagcccgatc

SEQ ID NO: 1653432 - DNA, 25 bp, Homo sapien
gatgccatcctcagagatgtcttag

SEQ ID NO: 1653433 - DNA, 25 bp, Homo sapien
gaaagtagcccgatccttagagata

SEQ ID NO: 1653434 - DNA, 25 bp, Homo sapien
gccatccttagagatactatcctta

SEQ ID NO: 1653435 - DNA, 25 bp, Homo sapien
agacataaacctggtgctgatgagg

SEQ ID NO: 1653436 - DNA, 25 bp, Homo sapien
gagacataaacctggtgctgatgag

SEQ ID NO: 1653437 - DNA, 25 bp, Homo sapien
ttgctcaggtatgaagttgccatgg

SEQ ID NO: 1653438 - DNA, 25 bp, Homo sapien
ctagactcgcttttgctcaggtatg

SEQ ID NO: 1653439 - DNA, 25 bp, Homo sapien
tgccatggtcagaatcaaggaagga

SEQ ID NO: 1653440 - DNA, 25 bp, Homo sapien
caggtatgaagttgccatggtcaga

SEQ ID NO: 1653441 - DNA, 25 bp, Homo sapien
cgtctcggcagctcttcctcactgc

SEQ ID NO: 1653442 - DNA, 25 bp, Homo sapien
tgctactcttttctggacactcctt

SEQ ID NO: 1653443 - DNA, 25 bp, Homo sapien
cactgctgctactcttttctggaca

SEQ ID NO: 1653444 - DNA, 25 bp, Homo sapien
gctgctactcttttctggacactcc

SEQ ID NO: 1653445 - DNA, 25 bp, Homo sapien
ttgtcaaatgtggtatttatgtctt

SEQ ID NO: 1653446 - DNA, 25 bp, Homo sapien
ggtatttatgtctttactgtatctt

SEQ ID NO: 1653447 - DNA, 25 bp, Homo sapien
aatgtggtatttatgtctttactgt

SEQ ID NO: 1653448 - DNA, 25 bp, Homo sapien
gtcaaatgtggtatttatgtcttta

SEQ ID NO: 1653449 - DNA, 25 bp, Homo sapien
aagaaactcattaagcggcactccc

SEQ ID NO: 1653450 - DNA, 25 bp, Homo sapien
gaatggtctcaacgcccttagcaaa

SEQ ID NO: 1653451 - DNA, 25 bp, Homo sapien
tgaatgtaccagtgccttgatcgtg

SEQ ID NO: 1653452 - DNA, 25 bp, Homo sapien
gcgcagcaagaagtcagccgtctat

SEQ ID NO: 1653453 - DNA, 25 bp, Homo sapien
gtttacccttcaaggaactgccaga

SEQ ID NO: 1653454 - DNA, 25 bp, Homo sapien
tccaaagcgccaatttccgtgctcg

SEQ ID NO: 1653455 - DNA, 25 bp, Homo sapien
aatggccattctagtacatgtaaag

SEQ ID NO: 1653456 - DNA, 25 bp, Homo sapien
tcaggtacgaatttccatgtggaca

SEQ ID NO: 1653457 - DNA, 25 bp, Homo sapien
ttctcaccggctgacaaaactgtgt

SEQ ID NO: 1653458 - DNA, 25 bp, Homo sapien
gcaataaggtgaacggaaaagtcca

SEQ ID NO: 1653459 - DNA, 25 bp, Homo sapien
aactgtgttaagtcagggtgaagca

SEQ ID NO: 1653460 - DNA, 25 bp, Homo sapien
cacctgtattaggagagttatgatc

SEQ ID NO: 1653461 - DNA, 25 bp, Homo sapien
attgaagatggcccagatgcttgca

SEQ ID NO: 1653462 - DNA, 25 bp, Homo sapien
tgtttccctcgaatctcagacagcc

SEQ ID NO: 1653463 - DNA, 25 bp, Homo sapien
cacagccatcatggcgaccggaagt

SEQ ID NO: 1653464 - DNA, 25 bp, Homo sapien
tggcgaccggaagtcctgagagctt

SEQ ID NO: 1653465 - DNA, 25 bp, Homo sapien
gagagcttgtttccctcgaatctca

SEQ ID NO: 1653466 - DNA, 25 bp, Homo sapien
acattatttcaaaagaagttgagaa

SEQ ID NO: 1653467 - DNA, 25 bp, Homo sapien
tgaacattatttcaaaagaagttga

SEQ ID NO: 1653468 - DNA, 25 bp, Homo sapien
gaacattatttcaaaagaagttgag

SEQ ID NO: 1653469 - DNA, 25 bp, Homo sapien
ctatgaacattatttcaaaagaagt

SEQ ID NO: 1653470 - DNA, 25 bp, Homo sapien
tcccatttggcctgtcctcccctaa

SEQ ID NO: 1653471 - DNA, 25 bp, Homo sapien
cgaagcttaaggggattctcccatt

SEQ ID NO: 1653472 - DNA, 25 bp, Homo sapien
catttggcctgtcctcccctaaagt

SEQ ID NO: 1653473 - DNA, 25 bp, Homo sapien
ccgaagcttaaggggattctcccat

SEQ ID NO: 1653474 - DNA, 25 bp, Homo sapien
gaggagcggaggcttgttgcttgga

SEQ ID NO: 1653475 - DNA, 25 bp, Homo sapien
agcggaggcttgttgcttggacact

SEQ ID NO: 1653476 - DNA, 25 bp, Homo sapien
gcggaggcttgttgcttggacactg

SEQ ID NO: 1653477 - DNA, 25 bp, Homo sapien
ggagcggaggcttgttgcttggaca

SEQ ID NO: 1653478 - DNA, 25 bp, Homo sapien
tcttttgaaataacgctcgcagagg

SEQ ID NO: 1653479 - DNA, 25 bp, Homo sapien
agcagcaggtggtgactttagggta

SEQ ID NO: 1653480 - DNA, 25 bp, Homo sapien
tgaaataacgctcgcagaggaggtg

SEQ ID NO: 1653481 - DNA, 25 bp, Homo sapien
taggacgggccaaatgggagaatcc

SEQ ID NO: 1653482 - DNA, 25 bp, Homo sapien
cactggtacattcagtgcctggaga

SEQ ID NO: 1653483 - DNA, 25 bp, Homo sapien
tcccacagtagaaagcgggagcgag

SEQ ID NO: 1653484 - DNA, 25 bp, Homo sapien
ccttgttcatagacggctgacttct

SEQ ID NO: 1653485 - DNA, 25 bp, Homo sapien
ctaagggcgttgagaccattcatga

SEQ ID NO: 1653486 - DNA, 25 bp, Homo sapien
attaggacccatttgtccagtacct

SEQ ID NO: 1653487 - DNA, 25 bp, Homo sapien
tgtccagtacctacacaacatatac

SEQ ID NO: 1653488 - DNA, 25 bp, Homo sapien
gacccatttgtccagtacctacaca

SEQ ID NO: 1653489 - DNA, 25 bp, Homo sapien
cctacacaacatatacagtgtagca

SEQ ID NO: 1653490 - DNA, 25 bp, Homo sapien
aaagcctgtttaggtggtcttctat

SEQ ID NO: 1653491 - DNA, 25 bp, Homo sapien
acacgcgtgacacccaggagttcga

SEQ ID NO: 1653492 - DNA, 25 bp, Homo sapien
tgtttaggtggtcttctatacggac

SEQ ID NO: 1653493 - DNA, 25 bp, Homo sapien
ttctatacggacacgcgtgacaccc

SEQ ID NO: 1653494 - DNA, 25 bp, Homo sapien
ctgtttccgcccttttacagtactg

SEQ ID NO: 1653495 - DNA, 25 bp, Homo sapien
ctgtctgtttccgcccttttacagt

SEQ ID NO: 1653496 - DNA, 25 bp, Homo sapien
tgtttccgcccttttacagtactga

SEQ ID NO: 1653497 - DNA, 25 bp, Homo sapien
tgtctgtttccgcccttttacagta

SEQ ID NO: 1653498 - DNA, 25 bp, Homo sapien
ccggccacaacctcatcttaattca

SEQ ID NO: 1653499 - DNA, 25 bp, Homo sapien
cacaacctcatcttaattcattgac

SEQ ID NO: 1653500 - DNA, 25 bp, Homo sapien
gccacaacctcatcttaattcattg

SEQ ID NO: 1653501 - DNA, 25 bp, Homo sapien
ggccacaacctcatcttaattcatt

SEQ ID NO: 1653502 - DNA, 25 bp, Homo sapien
tcagaaggctcggtctgctgtgctt

SEQ ID NO: 1653503 - DNA, 25 bp, Homo sapien
cagaaggctcggtctgctgtgctta

SEQ ID NO: 1653504 - DNA, 25 bp, Homo sapien
agaaggctcggtctgctgtgcttac

SEQ ID NO: 1653505 - DNA, 25 bp, Homo sapien
tatttccacagtcccattttcccat

SEQ ID NO: 1653506 - DNA, 25 bp, Homo sapien
tgaacctggcgtcttcgccctgact

SEQ ID NO: 1653507 - DNA, 25 bp, Homo sapien
tatggagacaagacggacagacact

SEQ ID NO: 1653508 - DNA, 25 bp, Homo sapien
agcagagagaaaggaaccgggagac

SEQ ID NO: 1653509 - DNA, 25 bp, Homo sapien
acagagacccacaaggcaaacaggg

SEQ ID NO: 1653510 - DNA, 25 bp, Homo sapien
caaacaggggaagtagagacacaaa

SEQ ID NO: 1653511 - DNA, 25 bp, Homo sapien
tgatgaagggcagatgaaaacagtt

SEQ ID NO: 1653512 - DNA, 25 bp, Homo sapien
cctgccactgggagaaaaagacaga

SEQ ID NO: 1653513 - DNA, 25 bp, Homo sapien
gagacgtggtctctgctggacccga

SEQ ID NO: 1653514 - DNA, 25 bp, Homo sapien
aggcagggccggtgctggagacgtg

SEQ ID NO: 1653515 - DNA, 25 bp, Homo sapien
ttagccccgggagtctttgctggtg

SEQ ID NO: 1653516 - DNA, 25 bp, Homo sapien
gaggcctccgctcgaatcagacgct

SEQ ID NO: 1653517 - DNA, 25 bp, Homo sapien
gagccacggtctctgctagtcttgt

SEQ ID NO: 1653518 - DNA, 25 bp, Homo sapien
tcttgtggctcaaaatggacccggg

SEQ ID NO: 1653519 - DNA, 25 bp, Homo sapien
ctgaggccgccaaaagtgacgtggc

SEQ ID NO: 1653520 - DNA, 25 bp, Homo sapien
cgtgatgtggctgggcaaatgccca

SEQ ID NO: 1653521 - DNA, 25 bp, Homo sapien
tgcagggaaggtgaactgggccccg

SEQ ID NO: 1653522 - DNA, 25 bp, Homo sapien
ggaaggtgaactgggccccgacaca

SEQ ID NO: 1653523 - DNA, 25 bp, Homo sapien
gcagggaaggtgaactgggccccga

SEQ ID NO: 1653524 - DNA, 25 bp, Homo sapien
gtcatcgctggcctcaaaacccggg

SEQ ID NO: 1653525 - DNA, 25 bp, Homo sapien
catggggtagtcatcgctggcctca

SEQ ID NO: 1653526 - DNA, 25 bp, Homo sapien
cctgctcatggggtagtcatcgctg

SEQ ID NO: 1653527 - DNA, 25 bp, Homo sapien
gggtagtcatcgctggcctcaaaac

SEQ ID NO: 1653528 - DNA, 25 bp, Homo sapien
gccatcttcttcggaaggtcctcca

SEQ ID NO: 1653529 - DNA, 25 bp, Homo sapien
ccatcttcttcggaaggtcctccag

SEQ ID NO: 1653530 - DNA, 25 bp, Homo sapien
ggagggcagcgtcggccagggaggt

SEQ ID NO: 1653531 - DNA, 25 bp, Homo sapien
ggccatcttcttcggaaggtcctcc

SEQ ID NO: 1653532 - DNA, 25 bp, Homo sapien
ctgggcatgtaggaaggcctgcact

SEQ ID NO: 1653533 - DNA, 25 bp, Homo sapien
ggaagaggcccatgtcccggtctcc

SEQ ID NO: 1653534 - DNA, 25 bp, Homo sapien
accccaaggaggtcatcgatcatgc

SEQ ID NO: 1653535 - DNA, 25 bp, Homo sapien
ggtcatcgatcatgctgctgtcgca

SEQ ID NO: 1653536 - DNA, 25 bp, Homo sapien
tgctgtcgcaatgggccttggtgaa

SEQ ID NO: 1653537 - DNA, 25 bp, Homo sapien
tgctcctgcagcaaatgctggtcat

SEQ ID NO: 1653538 - DNA, 25 bp, Homo sapien
ttgctggcacgtgcgctcaccaaag

SEQ ID NO: 1653539 - DNA, 25 bp, Homo sapien
ctggaagcgggcctcaaggcgctca

SEQ ID NO: 1653540 - DNA, 25 bp, Homo sapien
gcaccttgtccatgcgctgctgcaa

SEQ ID NO: 1653541 - DNA, 25 bp, Homo sapien
gttgaactcagcaaagttgcgctcc

SEQ ID NO: 1653542 - DNA, 25 bp, Homo sapien
aactcagcaaagttgcgctcctcga

SEQ ID NO: 1653543 - DNA, 25 bp, Homo sapien
atgaagttgaactcagcaaagttgc

SEQ ID NO: 1653544 - DNA, 25 bp, Homo sapien
gctccaagttctgctcgttgatgaa

SEQ ID NO: 1653545 - DNA, 25 bp, Homo sapien
agagttgggcaaggcggggcccaga

SEQ ID NO: 1653546 - DNA, 25 bp, Homo sapien
aacagagaggagtcacagagacaaa

SEQ ID NO: 1653547 - DNA, 25 bp, Homo sapien
gggaagatacggcaggtgggacaca

SEQ ID NO: 1653548 - DNA, 25 bp, Homo sapien
gaaggccacacagaaaccaaggcag

SEQ ID NO: 1653549 - DNA, 25 bp, Homo sapien
gcggggagaacggtagatatgggta

SEQ ID NO: 1653550 - DNA, 25 bp, Homo sapien
tggggagatgcaggcggggagaacg

SEQ ID NO: 1653551 - DNA, 25 bp, Homo sapien
gatgcaggcggggagaacggtagat

SEQ ID NO: 1653552 - DNA, 25 bp, Homo sapien
ccagagactcggcaatagcaaggga

SEQ ID NO: 1653553 - DNA, 25 bp, Homo sapien
tattcagggcgtcctcgtagcaaag

SEQ ID NO: 1653554 - DNA, 25 bp, Homo sapien
gacagtttattcagggcgtcctcgt

SEQ ID NO: 1653555 - DNA, 25 bp, Homo sapien
tcagctgggacagtttattcagggc

SEQ ID NO: 1653556 - DNA, 25 bp, Homo sapien
gggaggtcttccagacgccctcggc

SEQ ID NO: 1653557 - DNA, 25 bp, Homo sapien
tgccggtcgttgttcttgagcttga

SEQ ID NO: 1653558 - DNA, 25 bp, Homo sapien
cacgcttctccaggacatcgggatc

SEQ ID NO: 1653559 - DNA, 25 bp, Homo sapien
tgcttttcacgcttctccaggacat

SEQ ID NO: 1653560 - DNA, 25 bp, Homo sapien
ttctccaggacatcgggatccggct

SEQ ID NO: 1653561 - DNA, 25 bp, Homo sapien
ctcccgcagcaagcccatcttggcc

SEQ ID NO: 1653562 - DNA, 25 bp, Homo sapien
cctcctctttctccgcgcgctcccg

SEQ ID NO: 1653563 - DNA, 25 bp, Homo sapien
gcgcgctcccgcagcaagcccatct

SEQ ID NO: 1653564 - DNA, 25 bp, Homo sapien
gcgctcccgcagcaagcccatcttg

SEQ ID NO: 1653565 - DNA, 25 bp, Homo sapien
ctgacggcgtaggcagaggtggagg

SEQ ID NO: 1653566 - DNA, 25 bp, Homo sapien
tcagatagcggttcctgtcgatccg

SEQ ID NO: 1653567 - DNA, 25 bp, Homo sapien
cttcagcttgcggtccacgttcaga

SEQ ID NO: 1653568 - DNA, 25 bp, Homo sapien
ggccgcattccgtaccagctggttg

SEQ ID NO: 1653569 - DNA, 25 bp, Homo sapien
tgtcgatccgcagcagatccagctc

SEQ ID NO: 1653570 - DNA, 25 bp, Homo sapien
ccttcgcctgatcttgaccttctga

SEQ ID NO: 1653571 - DNA, 25 bp, Homo sapien
accttctgatccaggatgaatcccg

SEQ ID NO: 1653572 - DNA, 25 bp, Homo sapien
actgtgggtaaagatccgcgtctcc

SEQ ID NO: 1653573 - DNA, 25 bp, Homo sapien
atcccggggacctgacattcttact

SEQ ID NO: 1653574 - DNA, 25 bp, Homo sapien
cactcgaccaccgatggacatttgg

SEQ ID NO: 1653575 - DNA, 25 bp, Homo sapien
gaccacaatttgctcgtccactcga

SEQ ID NO: 1653576 - DNA, 25 bp, Homo sapien
tgtgtgtatcaatagccggttcctt

SEQ ID NO: 1653577 - DNA, 25 bp, Homo sapien
cttggctaaacatctaggagtggaa

SEQ ID NO: 1653578 - DNA, 25 bp, Homo sapien
ctgcttgtccagggccctggtctgc

SEQ ID NO: 1653579 - DNA, 25 bp, Homo sapien
ttgtccagggccctggtctgctcct

SEQ ID NO: 1653580 - DNA, 25 bp, Homo sapien
gtccagggccctggtctgctcctgc

SEQ ID NO: 1653581 - DNA, 25 bp, Homo sapien
gcttgtccagggccctggtctgctc

SEQ ID NO: 1653582 - DNA, 25 bp, Homo sapien
ccgaagccgcttgacctggttctgg

SEQ ID NO: 1653583 - DNA, 25 bp, Homo sapien
gtacctcctccaagcgccggatctc

SEQ ID NO: 1653584 - DNA, 25 bp, Homo sapien
gctgactgtcccgaagccgcttgac

SEQ ID NO: 1653585 - DNA, 25 bp, Homo sapien
tgcacctggagatcgccccgtacct

SEQ ID NO: 1653586 - DNA, 25 bp, Homo sapien
ttgttgatgcgctggtggacttcct

SEQ ID NO: 1653587 - DNA, 25 bp, Homo sapien
agttgcttgttgatgcgctggtgga

SEQ ID NO: 1653588 - DNA, 25 bp, Homo sapien
tccttgctgtaggcccgcctctccc

SEQ ID NO: 1653589 - DNA, 25 bp, Homo sapien
ttgcttgttgatgcgctggtggact

SEQ ID NO: 1653590 - DNA, 25 bp, Homo sapien
tgtcgctgcagcctactcagctccc

SEQ ID NO: 1653591 - DNA, 25 bp, Homo sapien
cactttgcattgtcgctgcagccta

SEQ ID NO: 1653592 - DNA, 25 bp, Homo sapien
tgcattgtcgctgcagcctactcag

SEQ ID NO: 1653593 - DNA, 25 bp, Homo sapien
tgcagcctactcagctcccaatcca

SEQ ID NO: 1653594 - DNA, 25 bp, Homo sapien
tgcttggcatcctacgacacacagg

SEQ ID NO: 1653595 - DNA, 25 bp, Homo sapien
aagaattatcccaccccaagagtca

SEQ ID NO: 1653596 - DNA, 25 bp, Homo sapien
ccaaaggcccagtagttttcaatca

SEQ ID NO: 1653597 - DNA, 25 bp, Homo sapien
tagaagccatggacactgcttggca

SEQ ID NO: 1653598 - DNA, 25 bp, Homo sapien
ccgccccgcctcccttagggcgcat

SEQ ID NO: 1653599 - DNA, 25 bp, Homo sapien
tccagaaatgcctcgcttccctcct

SEQ ID NO: 1653600 - DNA, 25 bp, Homo sapien
ccctgccaagcgtcccaaaggcatc

SEQ ID NO: 1653601 - DNA, 25 bp, Homo sapien
tccctgccaagcgtcccaaaggcat

SEQ ID NO: 1653602 - DNA, 25 bp, Homo sapien
cgctccctgccaagcgtcccaaagg

SEQ ID NO: 1653603 - DNA, 25 bp, Homo sapien
tggacaatgaactgcgagggactgg

SEQ ID NO: 1653604 - DNA, 25 bp, Homo sapien
ggtgaccctagaaccacgctggcct

SEQ ID NO: 1653605 - DNA, 25 bp, Homo sapien
gatggacatataagacccttcagac

SEQ ID NO: 1653606 - DNA, 25 bp, Homo sapien
tcattcctccaagaggggttggagg

SEQ ID NO: 1653607 - DNA, 25 bp, Homo sapien
ctccaagttcagtgttgtggtctgg

SEQ ID NO: 1653608 - DNA, 25 bp, Homo sapien
gtgctccaagttcagtgttgtggtc

SEQ ID NO: 1653609 - DNA, 25 bp, Homo sapien
tccaagttcagtgttgtggtctggt

SEQ ID NO: 1653610 - DNA, 25 bp, Homo sapien
caagttcagtgttgtggtctggtta

SEQ ID NO: 1653611 - DNA, 25 bp, Homo sapien
cgagaggtgccggtcttaagctgac

SEQ ID NO: 1653612 - DNA, 25 bp, Homo sapien
tcagcggttcactacgcaagcgcga

SEQ ID NO: 1653613 - DNA, 25 bp, Homo sapien
ggtgacctgtatggaagccctcgaa

SEQ ID NO: 1653614 - DNA, 25 bp, Homo sapien
tcctacaagacggagcccgagaggt

SEQ ID NO: 1653615 - DNA, 25 bp, Homo sapien
ggaagtgggtgagacctcgggcact

SEQ ID NO: 1653616 - DNA, 25 bp, Homo sapien
aagtgggtgagacctcgggcactcc

SEQ ID NO: 1653617 - DNA, 25 bp, Homo sapien
gtgggtgagacctcgggcactccat

SEQ ID NO: 1653618 - DNA, 25 bp, Homo sapien
agtgggtgagacctcgggcactcca

SEQ ID NO: 1653619 - DNA, 25 bp, Homo sapien
cagggttaccctaaaggcagtgcgt

SEQ ID NO: 1653620 - DNA, 25 bp, Homo sapien
ttttaaccactcctacagagcaggg

SEQ ID NO: 1653621 - DNA, 25 bp, Homo sapien
tgggaccccaagacctagctagagt

SEQ ID NO: 1653622 - DNA, 25 bp, Homo sapien
gcacaatcgcacatggctacgctat

SEQ ID NO: 1653623 - DNA, 25 bp, Homo sapien
tagttcctagcctgctgactgggca

SEQ ID NO: 1653624 - DNA, 25 bp, Homo sapien
caatgatatatagtctcgggagggc

SEQ ID NO: 1653625 - DNA, 25 bp, Homo sapien
aataaccgtaattgacagcctgtcg

SEQ ID NO: 1653626 - DNA, 25 bp, Homo sapien
tattactttgggacaggagacggga

SEQ ID NO: 1653627 - DNA, 25 bp, Homo sapien
ggctcggaagtgatcggagccactg

SEQ ID NO: 1653628 - DNA, 25 bp, Homo sapien
ggagatgttactgctgggcgtggct

SEQ ID NO: 1653629 - DNA, 25 bp, Homo sapien
atcggagccactgggtctagtttgg

SEQ ID NO: 1653630 - DNA, 25 bp, Homo sapien
tcaggagatgttactgctgggcgtg

SEQ ID NO: 1653631 - DNA, 25 bp, Homo sapien
cgttgaaggtcacctcacagcctga

SEQ ID NO: 1653632 - DNA, 25 bp, Homo sapien
acagcctgacttggctaggagccag

SEQ ID NO: 1653633 - DNA, 25 bp, Homo sapien
tccgaccggagccacctggaggtct

SEQ ID NO: 1653634 - DNA, 25 bp, Homo sapien
gcgccagggcccgagttccgttgaa

SEQ ID NO: 1653635 - DNA, 25 bp, Homo sapien
tgtagggagagtgtcagctcaggta

SEQ ID NO: 1653636 - DNA, 25 bp, Homo sapien
tgttctgaggtcacactgagatcgg

SEQ ID NO: 1653637 - DNA, 25 bp, Homo sapien
tcggggaagattcgagggagcagca

SEQ ID NO: 1653638 - DNA, 25 bp, Homo sapien
gcgcgcaggatctcttgtagggaga

SEQ ID NO: 1653639 - DNA, 25 bp, Homo sapien
ccgagttgttggacgtactgcgata

SEQ ID NO: 1653640 - DNA, 25 bp, Homo sapien
gtgtgctcgtcctgcgcgcgcaggg

SEQ ID NO: 1653641 - DNA, 25 bp, Homo sapien
tgcgatagtacagcatgtgcgccag

SEQ ID NO: 1653642 - DNA, 25 bp, Homo sapien
ttcgggcgagccttgagtgccccct

SEQ ID NO: 1653643 - DNA, 25 bp, Homo sapien
tttttcgacagggtctcgccctgta

SEQ ID NO: 1653644 - DNA, 25 bp, Homo sapien
aactcataacgcactgaagctttga

SEQ ID NO: 1653645 - DNA, 25 bp, Homo sapien
ggcaaactcataacgcactgaagct

SEQ ID NO: 1653646 - DNA, 25 bp, Homo sapien
cacaggcaaactcataacgcactga

SEQ ID NO: 1653647 - DNA, 25 bp, Homo sapien
gctattcacaggcaaactcataacg

SEQ ID NO: 1653648 - DNA, 25 bp, Homo sapien
taataaaacattgggacagccgggc

SEQ ID NO: 1653649 - DNA, 25 bp, Homo sapien
tgctggctagtggagtttatcatac

SEQ ID NO: 1653650 - DNA, 25 bp, Homo sapien
cggctgcccctggtaagacctaagt

SEQ ID NO: 1653651 - DNA, 25 bp, Homo sapien
ggttcaggaagtcaatacacggtta

SEQ ID NO: 1653652 - DNA, 25 bp, Homo sapien
tcgagacaggacacgcattttggca

SEQ ID NO: 1653653 - DNA, 25 bp, Homo sapien
gcccggcactcacatgtagcagaat

SEQ ID NO: 1653654 - DNA, 25 bp, Homo sapien
tgtgcaactgttcaaggcagcccgg

SEQ ID NO: 1653655 - DNA, 25 bp, Homo sapien
gaatccttggatggtgaacaacctg

SEQ ID NO: 1653656 - DNA, 25 bp, Homo sapien
ctaccagcatgaggttgagcagggc

SEQ ID NO: 1653657 - DNA, 25 bp, Homo sapien
ttgaggtcggttagcaccaccatgc

SEQ ID NO: 1653658 - DNA, 25 bp, Homo sapien
gaaactcttcagtaccaggtgtccc

SEQ ID NO: 1653659 - DNA, 25 bp, Homo sapien
catgcccacgttgacgaagatcgcc

SEQ ID NO: 1653660 - DNA, 25 bp, Homo sapien
tccaatcctaggacgctcactctgg

SEQ ID NO: 1653661 - DNA, 25 bp, Homo sapien
gagcaggatcgggactgcactgccc

SEQ ID NO: 1653662 - DNA, 25 bp, Homo sapien
tctggctctacagtcgcacaaccat

SEQ ID NO: 1653663 - DNA, 25 bp, Homo sapien
ttaaaagcgactcagtaatcatggg

SEQ ID NO: 1653664 - DNA, 25 bp, Homo sapien
tggccgtgccgcatcttcagaatgt

SEQ ID NO: 1653665 - DNA, 25 bp, Homo sapien
ttcagaatgtggacctccctctccg

SEQ ID NO: 1653666 - DNA, 25 bp, Homo sapien
gtagtactcactttcccttgagaag

SEQ ID NO: 1653667 - DNA, 25 bp, Homo sapien
gacagcatttggatgagtcacgcct

SEQ ID NO: 1653668 - DNA, 25 bp, Homo sapien
cccagggcccagaagtgaatgtaga

SEQ ID NO: 1653669 - DNA, 25 bp, Homo sapien
gggcatctgcccgactcgctggccc

SEQ ID NO: 1653670 - DNA, 25 bp, Homo sapien
tggtgaagaagccacgcctggagcc

SEQ ID NO: 1653671 - DNA, 25 bp, Homo sapien
gggcccagaagtgaatgtagacata

SEQ ID NO: 1653672 - DNA, 25 bp, Homo sapien
tggtggaccaccagcgcgtaggcca

SEQ ID NO: 1653673 - DNA, 25 bp, Homo sapien
tagtgatggctgatcgagggtctcc

SEQ ID NO: 1653674 - DNA, 25 bp, Homo sapien
gacctcatcctgagggtggtggacc

SEQ ID NO: 1653675 - DNA, 25 bp, Homo sapien
gcccgaagcacctcctgctcattag

SEQ ID NO: 1653676 - DNA, 25 bp, Homo sapien
cagggttgatggggtcatataaggc

SEQ ID NO: 1653677 - DNA, 25 bp, Homo sapien
tgtcagggttgatggggtcatataa

SEQ ID NO: 1653678 - DNA, 25 bp, Homo sapien
ctgtcagggttgatggggtcatata

SEQ ID NO: 1653679 - DNA, 25 bp, Homo sapien
gtcagggttgatggggtcatataag

SEQ ID NO: 1653680 - DNA, 25 bp, Homo sapien
ggcagtactaccatctattaataga

SEQ ID NO: 1653681 - DNA, 25 bp, Homo sapien
cagatccacatattcaagtctatct

SEQ ID NO: 1653682 - DNA, 25 bp, Homo sapien
gatccacatattcaagtctatcttt

SEQ ID NO: 1653683 - DNA, 25 bp, Homo sapien
gcgcccggcagtactaccatctatt

SEQ ID NO: 1653684 - DNA, 25 bp, Homo sapien
ccttctctgccggactcgagtggaa

SEQ ID NO: 1653685 - DNA, 25 bp, Homo sapien
tctctgccggactcgagtggaattc

SEQ ID NO: 1653686 - DNA, 25 bp, Homo sapien
tggaacagggtgcagaagtccacgt

SEQ ID NO: 1653687 - DNA, 25 bp, Homo sapien
gtgggccgagaacgcctccaaagcc

SEQ ID NO: 1653688 - DNA, 25 bp, Homo sapien
tggccaacatggtgaaatcctgtct

SEQ ID NO: 1653689 - DNA, 25 bp, Homo sapien
gcgtggccaacatggtgaaatcctg

SEQ ID NO: 1653690 - DNA, 25 bp, Homo sapien
gagttcaagaccagcgtggccaaca

SEQ ID NO: 1653691 - DNA, 25 bp, Homo sapien
gaggcagtggatcacttgaagtcag

SEQ ID NO: 1653692 - DNA, 25 bp, Homo sapien
agtggccatactcggaccctggacc

SEQ ID NO: 1653693 - DNA, 25 bp, Homo sapien
aagcgctcgcggtactgctgggccc

SEQ ID NO: 1653694 - DNA, 25 bp, Homo sapien
gggttccacatcttgcgatactccc

SEQ ID NO: 1653695 - DNA, 25 bp, Homo sapien
ttggctgccagcgatgagagggccc

SEQ ID NO: 1653696 - DNA, 25 bp, Homo sapien
tggggcgtttttcaggcccagagac

SEQ ID NO: 1653697 - DNA, 25 bp, Homo sapien
gcccagagaccctgtagtggtacaa

SEQ ID NO: 1653698 - DNA, 25 bp, Homo sapien
agaagccgtctctaccccaggcagg

SEQ ID NO: 1653699 - DNA, 25 bp, Homo sapien
agagcccatccgctcgcctcaaagc

SEQ ID NO: 1653700 - DNA, 25 bp, Homo sapien
tcctgcgcatgtgcaggagggcgtc

SEQ ID NO: 1653701 - DNA, 25 bp, Homo sapien
agcctcctgcgcatgtgcaggaggg

SEQ ID NO: 1653702 - DNA, 25 bp, Homo sapien
cctcctgcgcatgtgcaggagggcg

SEQ ID NO: 1653703 - DNA, 25 bp, Homo sapien
tgagcctcctgcgcatgtgcaggag

SEQ ID NO: 1653704 - DNA, 25 bp, Homo sapien
aaatttaaaccgctgcatgaggccg

SEQ ID NO: 1653705 - DNA, 25 bp, Homo sapien
caatacctcgtggaagttcgtgcag

SEQ ID NO: 1653706 - DNA, 25 bp, Homo sapien
ggccggcggctcctgtattagacag

SEQ ID NO: 1653707 - DNA, 25 bp, Homo sapien
tcgcctagcctaaaatcctgtgtta

SEQ ID NO: 1653708 - DNA, 25 bp, Homo sapien
tggtttttctacgacagtttggaca

SEQ ID NO: 1653709 - DNA, 25 bp, Homo sapien
actggctaccctaccagacagtgca

SEQ ID NO: 1653710 - DNA, 25 bp, Homo sapien
tcagtttggactcgccaggtttcag

SEQ ID NO: 1653711 - DNA, 25 bp, Homo sapien
tatttacaccaatagcacgcctcag

SEQ ID NO: 1653712 - DNA, 25 bp, Homo sapien
gagaacaaagattcaaccatcagtt

SEQ ID NO: 1653713 - DNA, 25 bp, Homo sapien
atgggtgtcggcagatttagtgttt

SEQ ID NO: 1653714 - DNA, 25 bp, Homo sapien
gagccatgggatcctcgggccagcc

SEQ ID NO: 1653715 - DNA, 25 bp, Homo sapien
ccctatccccaatctagaaatttag

SEQ ID NO: 1653716 - DNA, 25 bp, Homo sapien
gaccctgccccggcccataggacac

SEQ ID NO: 1653717 - DNA, 25 bp, Homo sapien
cttggaccctgccccggcccatagg

SEQ ID NO: 1653718 - DNA, 25 bp, Homo sapien
gaagggaaaagatcttggaccctgc

SEQ ID NO: 1653719 - DNA, 25 bp, Homo sapien
tggaccctgccccggcccataggac

SEQ ID NO: 1653720 - DNA, 25 bp, Homo sapien
gagtagaagaaaaacgagtcatcag

SEQ ID NO: 1653721 - DNA, 25 bp, Homo sapien
agagtagaagaaaaacgagtcatca

SEQ ID NO: 1653722 - DNA, 25 bp, Homo sapien
tagaagaaaaacgagtcatcagaat

SEQ ID NO: 1653723 - DNA, 25 bp, Homo sapien
agaaaaacgagtcatcagaatcaaa

SEQ ID NO: 1653724 - DNA, 25 bp, Homo sapien
ggagcacaagaggtgggttcttaaa

SEQ ID NO: 1653725 - DNA, 25 bp, Homo sapien
ggaggcgggatggggagcacaagag

SEQ ID NO: 1653726 - DNA, 25 bp, Homo sapien
ggcgggatggggagcacaagaggtg

SEQ ID NO: 1653727 - DNA, 25 bp, Homo sapien
gatggggagcacaagaggtgggttc

SEQ ID NO: 1653728 - DNA, 25 bp, Homo sapien
ctatgccggcaaactcaacttcttc

SEQ ID NO: 1653729 - DNA, 25 bp, Homo sapien
tgccggcaaactcaacttcttcccc

SEQ ID NO: 1653730 - DNA, 25 bp, Homo sapien
tatgccggcaaactcaacttcttcc

SEQ ID NO: 1653731 - DNA, 25 bp, Homo sapien
atgccggcaaactcaacttcttccc

SEQ ID NO: 1653732 - DNA, 25 bp, Homo sapien
gctaacggtctgaattcctaggagg

SEQ ID NO: 1653733 - DNA, 25 bp, Homo sapien
cagaaacccggcgaagaaatgctcc

SEQ ID NO: 1653734 - DNA, 25 bp, Homo sapien
aatgaatttcagtgggctgagtccc

SEQ ID NO: 1653735 - DNA, 25 bp, Homo sapien
ctggcctacgctccaagtgacatgg

SEQ ID NO: 1653736 - DNA, 25 bp, Homo sapien
tccagttgaagagatagagcgtgcg

SEQ ID NO: 1653737 - DNA, 25 bp, Homo sapien
gatgaggtcgaagaagccctcgaaa

SEQ ID NO: 1653738 - DNA, 25 bp, Homo sapien
cctcgaaatggtagcgccagatcca

SEQ ID NO: 1653739 - DNA, 25 bp, Homo sapien
gaaatcgcagtagaggactgtctgg

SEQ ID NO: 1653740 - DNA, 25 bp, Homo sapien
tggctggtgatggtctccgcctcgc

SEQ ID NO: 1653741 - DNA, 25 bp, Homo sapien
gtcttgctcaccatgaacagctgcg

SEQ ID NO: 1653742 - DNA, 25 bp, Homo sapien
gatggtctccgcctcgccggtcttg

SEQ ID NO: 1653743 - DNA, 25 bp, Homo sapien
gctgcggcaagatggccactgactc

SEQ ID NO: 1653744 - DNA, 25 bp, Homo sapien
cagaatcatccagaatcctccaggg

SEQ ID NO: 1653745 - DNA, 25 bp, Homo sapien
tcatccagaatcctccagggaggct

SEQ ID NO: 1653746 - DNA, 25 bp, Homo sapien
tgctcccagaatcatccagaatcct

SEQ ID NO: 1653747 - DNA, 25 bp, Homo sapien
gaatcatccagaatcctccagggag

SEQ ID NO: 1653748 - DNA, 25 bp, Homo sapien
actgcgcccagtcttgcatttttat

SEQ ID NO: 1653749 - DNA, 25 bp, Homo sapien
tatctattccatgctgtttgaattt

SEQ ID NO: 1653750 - DNA, 25 bp, Homo sapien
cagtcttgcatttttatctattcca

SEQ ID NO: 1653751 - DNA, 25 bp, Homo sapien
tttatctattccatgctgtttgaat

SEQ ID NO: 1653752 - DNA, 25 bp, Homo sapien
ctgttgaaaagatcagcacatctgg

SEQ ID NO: 1653753 - DNA, 25 bp, Homo sapien
ctcctgaattatggcttctgttgaa

SEQ ID NO: 1653754 - DNA, 25 bp, Homo sapien
agatcagcacatctggccacccagg

SEQ ID NO: 1653755 - DNA, 25 bp, Homo sapien
aaactcctgaattatggcttctgtt

SEQ ID NO: 1653756 - DNA, 25 bp, Homo sapien
aatggctgtgggaacgaccaggaac

SEQ ID NO: 1653757 - DNA, 25 bp, Homo sapien
tgattgaccaggaacgccagaatgg

SEQ ID NO: 1653758 - DNA, 25 bp, Homo sapien
gaactccactctgaacgtgtcatgg

SEQ ID NO: 1653759 - DNA, 25 bp, Homo sapien
tgctataaatcaaccagaccgtggt

SEQ ID NO: 1653760 - DNA, 25 bp, Homo sapien
ccagatatcgggcagtgaacaccac

SEQ ID NO: 1653761 - DNA, 25 bp, Homo sapien
cttcatacacgtgttgtagagtgag

SEQ ID NO: 1653762 - DNA, 25 bp, Homo sapien
tgaagaggtccagatatcgggcagt

SEQ ID NO: 1653763 - DNA, 25 bp, Homo sapien
cacgtgttgtagagtgagatgtagt

SEQ ID NO: 1653764 - DNA, 25 bp, Homo sapien
cagtctggacctgaggtgaggccta

SEQ ID NO: 1653765 - DNA, 25 bp, Homo sapien
tagaagagagatccccagcaagcag

SEQ ID NO: 1653766 - DNA, 25 bp, Homo sapien
cgtcccagactaggcctcatggcta

SEQ ID NO: 1653767 - DNA, 25 bp, Homo sapien
gcaataaactaaggcagggcgcccg

SEQ ID NO: 1653768 - DNA, 25 bp, Homo sapien
ggtctcccaggaatcggaagagatt

SEQ ID NO: 1653769 - DNA, 25 bp, Homo sapien
cttccagattttgagcagtagcaag

SEQ ID NO: 1653770 - DNA, 25 bp, Homo sapien
gaggtctcccaggaatcggaagaga

SEQ ID NO: 1653771 - DNA, 25 bp, Homo sapien
gcgcacgagcgggacttccagattt

SEQ ID NO: 1653772 - DNA, 25 bp, Homo sapien
ggctgctggtctgaacgggtagctg

SEQ ID NO: 1653773 - DNA, 25 bp, Homo sapien
ggtctgaacgggtagctgggctggg

SEQ ID NO: 1653774 - DNA, 25 bp, Homo sapien
gaagagggaccctaggtgcgctccg

SEQ ID NO: 1653775 - DNA, 25 bp, Homo sapien
agagggaccctaggtgcgctccgct

SEQ ID NO: 1653776 - DNA, 25 bp, Homo sapien
ttctggaagcccctagtgcggactc

SEQ ID NO: 1653777 - DNA, 25 bp, Homo sapien
ccccaggcggctagtattcaacagg

SEQ ID NO: 1653778 - DNA, 25 bp, Homo sapien
tgactcccttgctttgagaatgagg

SEQ ID NO: 1653779 - DNA, 25 bp, Homo sapien
taccaaattgctctgggctgggtgc

SEQ ID NO: 1653780 - DNA, 25 bp, Homo sapien
gcttcgctatttctgtcctcctgtt

SEQ ID NO: 1653781 - DNA, 25 bp, Homo sapien
gggtcccgatcttggccttgcttcg

SEQ ID NO: 1653782 - DNA, 25 bp, Homo sapien
tatgtgcgcgtgtctcttggtggcc

SEQ ID NO: 1653783 - DNA, 25 bp, Homo sapien
tctgtccaactttcttgcctcgctt

SEQ ID NO: 1653784 - DNA, 25 bp, Homo sapien
gctggtgctcaacggctcggacccg

SEQ ID NO: 1653785 - DNA, 25 bp, Homo sapien
cagcccgggcctagacgtgcggccc

SEQ ID NO: 1653786 - DNA, 25 bp, Homo sapien
gtacgcggccgaggcggcacgcctg

SEQ ID NO: 1653787 - DNA, 25 bp, Homo sapien
acgtgcggcccgtggcgctggtgct

SEQ ID NO: 1653788 - DNA, 25 bp, Homo sapien
gttagtcaggctggttgcaaacttc

SEQ ID NO: 1653789 - DNA, 25 bp, Homo sapien
cgcgcccggcctgctttcctttctt

SEQ ID NO: 1653790 - DNA, 25 bp, Homo sapien
caccatgcccagctaatttctttgt

SEQ ID NO: 1653791 - DNA, 25 bp, Homo sapien
agcagctccgattacaggcatgtgg

SEQ ID NO: 1653792 - DNA, 25 bp, Homo sapien
gctgggtctttcaatcgtattctca

SEQ ID NO: 1653793 - DNA, 25 bp, Homo sapien
tgtgtgccactttcgtgtagagacg

SEQ ID NO: 1653794 - DNA, 25 bp, Homo sapien
cattgatctgtttccgttgctgggt

SEQ ID NO: 1653795 - DNA, 25 bp, Homo sapien
gagccatgcgcatggccattgatct

SEQ ID NO: 1653796 - DNA, 25 bp, Homo sapien
tgaaagccatcacaacagagagagg

SEQ ID NO: 1653797 - DNA, 25 bp, Homo sapien
aaaccgctggtgctgatgggcgata

SEQ ID NO: 1653798 - DNA, 25 bp, Homo sapien
tgcccctagagggtagattgaaccg

SEQ ID NO: 1653799 - DNA, 25 bp, Homo sapien
ttatgtcaattagccaaaccgctgg

SEQ ID NO: 1653800 - DNA, 25 bp, Homo sapien
agtgggcctaatgaaccctcgcgaa

SEQ ID NO: 1653801 - DNA, 25 bp, Homo sapien
cacccctggtttcggaagagtgaga

SEQ ID NO: 1653802 - DNA, 25 bp, Homo sapien
gacctgcgacaagggactaacctca

SEQ ID NO: 1653803 - DNA, 25 bp, Homo sapien
aagactgtggtttgtcactcgggcc

SEQ ID NO: 1653804 - DNA, 25 bp, Homo sapien
cgagtgcactcgtgcactctcagct

SEQ ID NO: 1653805 - DNA, 25 bp, Homo sapien
gctcgagtgcactcgtgcactctca

SEQ ID NO: 1653806 - DNA, 25 bp, Homo sapien
aagctcgagtgcactcgtgcactct

SEQ ID NO: 1653807 - DNA, 25 bp, Homo sapien
cccaagctcgagtgcactcgtgcac

SEQ ID NO: 1653808 - DNA, 25 bp, Homo sapien
tagttggttgatacttgggtttcca

SEQ ID NO: 1653809 - DNA, 25 bp, Homo sapien
tgtcaaatactattcattggatgaa

SEQ ID NO: 1653810 - DNA, 25 bp, Homo sapien
tgttgttgcatctatcgatacttca

SEQ ID NO: 1653811 - DNA, 25 bp, Homo sapien
tgcgcgcctgtaatcaccatacccg

SEQ ID NO: 1653812 - DNA, 25 bp, Homo sapien
gatttagcactgtataaatgcatgc

SEQ ID NO: 1653813 - DNA, 25 bp, Homo sapien
tgtggcacttgctataatatcgtta

SEQ ID NO: 1653814 - DNA, 25 bp, Homo sapien
tgatgtctgcctcataggcttgctc

SEQ ID NO: 1653815 - DNA, 25 bp, Homo sapien
aatgcatgctgtaattattgtggca

SEQ ID NO: 1653816 - DNA, 25 bp, Homo sapien
ggacaccggtctgcagtgctaagga

SEQ ID NO: 1653817 - DNA, 25 bp, Homo sapien
tccatgatgcaaactgatgtcccct

SEQ ID NO: 1653818 - DNA, 25 bp, Homo sapien
cagcgtggctcccagtatgaggtcg

SEQ ID NO: 1653819 - DNA, 25 bp, Homo sapien
tatgaggtcgactatcgccacttcc

SEQ ID NO: 1653820 - DNA, 25 bp, Homo sapien
ccaacttctggctgtagagcaccca

SEQ ID NO: 1653821 - DNA, 25 bp, Homo sapien
caagcactggtgagtctaggacaga

SEQ ID NO: 1653822 - DNA, 25 bp, Homo sapien
tgctttgaaaggatccactgggtgg

SEQ ID NO: 1653823 - DNA, 25 bp, Homo sapien
gagttgtccattaccaaagcctgga

SEQ ID NO: 1653824 - DNA, 25 bp, Homo sapien
tagggcacagggctaattagtggac

SEQ ID NO: 1653825 - DNA, 25 bp, Homo sapien
gtagggcacagggctaattagtgga

SEQ ID NO: 1653826 - DNA, 25 bp, Homo sapien
gtgtcactttggactcctcttcatg

SEQ ID NO: 1653827 - DNA, 25 bp, Homo sapien
tttggactcctcttcatgtcagttt

SEQ ID NO: 1653828 - DNA, 25 bp, Homo sapien
tggactcctcttcatgtcagtttcc

SEQ ID NO: 1653829 - DNA, 25 bp, Homo sapien
actttggactcctcttcatgtcagt

SEQ ID NO: 1653830 - DNA, 25 bp, Homo sapien
agatactcttggaggctggctctga

SEQ ID NO: 1653831 - DNA, 25 bp, Homo sapien
gagtcctcactacaccaagggtggg

SEQ ID NO: 1653832 - DNA, 25 bp, Homo sapien
tccccagtgctggatcatacggcct

SEQ ID NO: 1653833 - DNA, 25 bp, Homo sapien
gatcatacggccttccaggagacgc

SEQ ID NO: 1653834 - DNA, 25 bp, Homo sapien
cacaagtgctgcatcaacccaaatg

SEQ ID NO: 1653835 - DNA, 25 bp, Homo sapien
agattaaagaactgggagccctagc

SEQ ID NO: 1653836 - DNA, 25 bp, Homo sapien
gagccctagcggatgtgtctgcgaa

SEQ ID NO: 1653837 - DNA, 25 bp, Homo sapien
tgtttctcgagcatgggtcctccga

SEQ ID NO: 1653838 - DNA, 25 bp, Homo sapien
tttttgtacgactgttggccctgga

SEQ ID NO: 1653839 - DNA, 25 bp, Homo sapien
tggccctggagaacgatcctttggt

SEQ ID NO: 1653840 - DNA, 25 bp, Homo sapien
ggaagagtcttttcagcgctgagga

SEQ ID NO: 1653841 - DNA, 25 bp, Homo sapien
gaaagcgcccactgtggattggaca

SEQ ID NO: 1653842 - DNA, 25 bp, Homo sapien
ttttctcctgaacgttccgccgcga

SEQ ID NO: 1653843 - DNA, 25 bp, Homo sapien
tcagtcgtagacttgtcgcgccgct

SEQ ID NO: 1653844 - DNA, 25 bp, Homo sapien
cccagaagcgttcggctcagtcgta

SEQ ID NO: 1653845 - DNA, 25 bp, Homo sapien
tagccgccatggaggacggcgtcta

SEQ ID NO: 1653846 - DNA, 25 bp, Homo sapien
gaaccggaagatggcaatgggcagg

SEQ ID NO: 1653847 - DNA, 25 bp, Homo sapien
ggaaccggaagatggcaatgggcag

SEQ ID NO: 1653848 - DNA, 25 bp, Homo sapien
accggaagatggcaatgggcaggaa

SEQ ID NO: 1653849 - DNA, 25 bp, Homo sapien
aaccggaagatggcaatgggcagga

SEQ ID NO: 1653850 - DNA, 25 bp, Homo sapien
aaagaagcggatttcagtcaagaag

SEQ ID NO: 1653851 - DNA, 25 bp, Homo sapien
tggatcctggttccctgtttggaaa

SEQ ID NO: 1653852 - DNA, 25 bp, Homo sapien
ttatttattacggagctgccccgcc

SEQ ID NO: 1653853 - DNA, 25 bp, Homo sapien
ccttctatgagatgctggcagcgag

SEQ ID NO: 1653854 - DNA, 25 bp, Homo sapien
cctcatggatagattaatgcctgcc

SEQ ID NO: 1653855 - DNA, 25 bp, Homo sapien
aaattcatgttgagattcgagcccc

SEQ ID NO: 1653856 - DNA, 25 bp, Homo sapien
tggatatcgtttgtcctcactaaaa

SEQ ID NO: 1653857 - DNA, 25 bp, Homo sapien
gagtgctcacccttgggaatttggg

SEQ ID NO: 1653858 - DNA, 25 bp, Homo sapien
ttgcagaaacgtggctctgaccgca

SEQ ID NO: 1653859 - DNA, 25 bp, Homo sapien
cacacagataggtgcggttagggta

SEQ ID NO: 1653860 - DNA, 25 bp, Homo sapien
tcgtgatccagtgtgggcatgagca

SEQ ID NO: 1653861 - DNA, 25 bp, Homo sapien
ggcggtcgcatggaaaaacaggtaa

SEQ ID NO: 1653862 - DNA, 25 bp, Homo sapien
tggcgccgtcatccacagaggattc

SEQ ID NO: 1653863 - DNA, 25 bp, Homo sapien
taatgtgaaaatgccacgcgaaggt

SEQ ID NO: 1653864 - DNA, 25 bp, Homo sapien
gttcagttccgagaaaggcggctct

SEQ ID NO: 1653865 - DNA, 25 bp, Homo sapien
tctcaacccctcttctgagggtgca

SEQ ID NO: 1653866 - DNA, 25 bp, Homo sapien
tgtccttgtggaaaagcttcctgtc

SEQ ID NO: 1653867 - DNA, 25 bp, Homo sapien
tcacccgtcttgctccacattgaat

SEQ ID NO: 1653868 - DNA, 25 bp, Homo sapien
tctctgcaagcctgagtttgcagtt

SEQ ID NO: 1653869 - DNA, 25 bp, Homo sapien
ctctgcaagcctgagtttgcagttc

SEQ ID NO: 1653870 - DNA, 25 bp, Homo sapien
gcaggctcacccgtcttgctccaca

SEQ ID NO: 1653871 - DNA, 25 bp, Homo sapien
taatggttagagactgctgctgcac

SEQ ID NO: 1653872 - DNA, 25 bp, Homo sapien
gctaagaaatggcagggacaatatc

SEQ ID NO: 1653873 - DNA, 25 bp, Homo sapien
catactcgggaggattaagccattt

SEQ ID NO: 1653874 - DNA, 25 bp, Homo sapien
cttctaccttagctctgataccggg

SEQ ID NO: 1653875 - DNA, 25 bp, Homo sapien
ggtggccccggggtctccagcgcag

SEQ ID NO: 1653876 - DNA, 25 bp, Homo sapien
caggcgagacggagaagcgggagaa

SEQ ID NO: 1653877 - DNA, 25 bp, Homo sapien
cagcgcaggcgagacggagaagcgg

SEQ ID NO: 1653878 - DNA, 25 bp, Homo sapien
tccagcgcaggcgagacggagaagc

SEQ ID NO: 1653879 - DNA, 25 bp, Homo sapien
tcctccgcccactcgaaactgcctc

SEQ ID NO: 1653880 - DNA, 25 bp, Homo sapien
aaatcctccgcccactcgaaactgc

SEQ ID NO: 1653881 - DNA, 25 bp, Homo sapien
gaaatcctccgcccactcgaaactg

SEQ ID NO: 1653882 - DNA, 25 bp, Homo sapien
atcctccgcccactcgaaactgcct

SEQ ID NO: 1653883 - DNA, 25 bp, Homo sapien
cgttgctgggaaacccatctccggg

SEQ ID NO: 1653884 - DNA, 25 bp, Homo sapien
ggcctggacgctcagctcgttggtt

SEQ ID NO: 1653885 - DNA, 25 bp, Homo sapien
caaagccgctgtcgttgctgggaaa

SEQ ID NO: 1653886 - DNA, 25 bp, Homo sapien
gcgctggaggcgttgacgggtccgt

SEQ ID NO: 1653887 - DNA, 25 bp, Homo sapien
gtcgaagaggtagacggtcacgtcc

SEQ ID NO: 1653888 - DNA, 25 bp, Homo sapien
tccccgtggaaggagaccatcttgc

SEQ ID NO: 1653889 - DNA, 25 bp, Homo sapien
agaggtagacggtcacgtccccgtg

SEQ ID NO: 1653890 - DNA, 25 bp, Homo sapien
aggagaccatcttgcgcttcctctc

SEQ ID NO: 1653891 - DNA, 25 bp, Homo sapien
gcggagacttgagcagcccccgcag

SEQ ID NO: 1653892 - DNA, 25 bp, Homo sapien
tcggccccgcgcggagacttgagca

SEQ ID NO: 1653893 - DNA, 25 bp, Homo sapien
cgcagcgggcgggccgcgtccgcgt

SEQ ID NO: 1653894 - DNA, 25 bp, Homo sapien
cccgcgcggagacttgagcagcccc

SEQ ID NO: 1653895 - DNA, 25 bp, Homo sapien
ctgctcaccacgacgggcaccgggg

SEQ ID NO: 1653896 - DNA, 25 bp, Homo sapien
atggcgtgagcgtgagcggcggcag

SEQ ID NO: 1653897 - DNA, 25 bp, Homo sapien
ggaatggcgtgagcgtgagcggcgg

SEQ ID NO: 1653898 - DNA, 25 bp, Homo sapien
cccgggaatggcgtgagcgtgagcg

SEQ ID NO: 1653899 - DNA, 25 bp, Homo sapien
cgggaatggcgtgagcgtgagcggc

SEQ ID NO: 1653900 - DNA, 25 bp, Homo sapien
tcactagtcctatggtggtggagtt

SEQ ID NO: 1653901 - DNA, 25 bp, Homo sapien
tatgtccacatctaaacaagggcta

SEQ ID NO: 1653902 - DNA, 25 bp, Homo sapien
cactggatagatgccttagcttact

SEQ ID NO: 1653903 - DNA, 25 bp, Homo sapien
tgtcagggcaagatctgaagctccc

SEQ ID NO: 1653904 - DNA, 25 bp, Homo sapien
ccaagaatagtcgtggcatctcggg

SEQ ID NO: 1653905 - DNA, 25 bp, Homo sapien
tcccaagtccaagaatagtcgtggc

SEQ ID NO: 1653906 - DNA, 25 bp, Homo sapien
cccgtctccgctgagtgccgtgtct

SEQ ID NO: 1653907 - DNA, 25 bp, Homo sapien
gtctccgctgagtgccgtgtctccg

SEQ ID NO: 1653908 - DNA, 25 bp, Homo sapien
tctcgggggcgctggctccagcctc

SEQ ID NO: 1653909 - DNA, 25 bp, Homo sapien
ggcctcgtgttgtctacccatccgg

SEQ ID NO: 1653910 - DNA, 25 bp, Homo sapien
ttgtctacccatccggcctttgcgt

SEQ ID NO: 1653911 - DNA, 25 bp, Homo sapien
cctttgcgtccacgccgcttccggg

SEQ ID NO: 1653912 - DNA, 25 bp, Homo sapien
gtggctgcggcctcgtgttgtctac

SEQ ID NO: 1653913 - DNA, 25 bp, Homo sapien
cagtctcgggggctctcctctcggt

SEQ ID NO: 1653914 - DNA, 25 bp, Homo sapien
ccgccgttccgggaggagaccactg

SEQ ID NO: 1653915 - DNA, 25 bp, Homo sapien
tggaccccaactctcgggcgtcttc

SEQ ID NO: 1653916 - DNA, 25 bp, Homo sapien
ccagtctctggtggcctctccgtgt

SEQ ID NO: 1653917 - DNA, 25 bp, Homo sapien
atctcaggcccccattctctgacac

SEQ ID NO: 1653918 - DNA, 25 bp, Homo sapien
ctggggaatctcaggcccccattct

SEQ ID NO: 1653919 - DNA, 25 bp, Homo sapien
tggggaatctcaggcccccattctc

SEQ ID NO: 1653920 - DNA, 25 bp, Homo sapien
ggaatctcaggcccccattctctga

SEQ ID NO: 1653921 - DNA, 25 bp, Homo sapien
ttgtcctcgctctttgggggtgtca

SEQ ID NO: 1653922 - DNA, 25 bp, Homo sapien
cactgtcaccccgttcactgggagg

SEQ ID NO: 1653923 - DNA, 25 bp, Homo sapien
ctggtccccgttctccagcactgtc

SEQ ID NO: 1653924 - DNA, 25 bp, Homo sapien
gcttgtttcccgttgcccaggactg

SEQ ID NO: 1653925 - DNA, 25 bp, Homo sapien
caggcccgggactttctctctgttc

SEQ ID NO: 1653926 - DNA, 25 bp, Homo sapien
ggaggttccttgtcacatcctcccg

SEQ ID NO: 1653927 - DNA, 25 bp, Homo sapien
tgttccgtgctcacttgaaccacga

SEQ ID NO: 1653928 - DNA, 25 bp, Homo sapien
ggtctcggtctcgtagccgctgtcc

SEQ ID NO: 1653929 - DNA, 25 bp, Homo sapien
tgcccgcagcgaggagtcgtcctcg

SEQ ID NO: 1653930 - DNA, 25 bp, Homo sapien
aagtcggccagggagccccgctctg

SEQ ID NO: 1653931 - DNA, 25 bp, Homo sapien
cggcggcttgggccacctccaaggc

SEQ ID NO: 1653932 - DNA, 25 bp, Homo sapien
ctcgcggctgcacaggggacagggt

SEQ ID NO: 1653933 - DNA, 25 bp, Homo sapien
tgcgggcgctgatgacaggcagcac

SEQ ID NO: 1653934 - DNA, 25 bp, Homo sapien
tgtagtactcgctgctcacggaggg

SEQ ID NO: 1653935 - DNA, 25 bp, Homo sapien
gggagccgtgctcctccaagcggat

SEQ ID NO: 1653936 - DNA, 25 bp, Homo sapien
aggaagctgcctgacgctgaggact

SEQ ID NO: 1653937 - DNA, 25 bp, Homo sapien
cgtggacagcgcctcgtagaaaggg

SEQ ID NO: 1653938 - DNA, 25 bp, Homo sapien
gcgtggacagcgcctcgtagaaagg

SEQ ID NO: 1653939 - DNA, 25 bp, Homo sapien
tctcggtgaccgtgagcacatcgtc

SEQ ID NO: 1653940 - DNA, 25 bp, Homo sapien
actcgaggttgaggccgcggctact

SEQ ID NO: 1653941 - DNA, 25 bp, Homo sapien
ctcggagagcaagtaggtgagctgc

SEQ ID NO: 1653942 - DNA, 25 bp, Homo sapien
tgcaattggagatcagaggctgaag

SEQ ID NO: 1653943 - DNA, 25 bp, Homo sapien
tgctggcggaccacgaaggcgagga

SEQ ID NO: 1653944 - DNA, 25 bp, Homo sapien
gccgggccagcttcacatgctgctg

SEQ ID NO: 1653945 - DNA, 25 bp, Homo sapien
tagtccgcgtaaggcagcttgagcc

SEQ ID NO: 1653946 - DNA, 25 bp, Homo sapien
accacgaaggcgaggacctcctcgt

SEQ ID NO: 1653947 - DNA, 25 bp, Homo sapien
gctcccacagggtcacccccaggga

SEQ ID NO: 1653948 - DNA, 25 bp, Homo sapien
cgcagtgggatccacaggcgctctg

SEQ ID NO: 1653949 - DNA, 25 bp, Homo sapien
tgaaggtcccgtggagctccccgag

SEQ ID NO: 1653950 - DNA, 25 bp, Homo sapien
agatgttgctctcgcggctctggtc

SEQ ID NO: 1653951 - DNA, 25 bp, Homo sapien
gctctggggtcaggtagtagtcctc

SEQ ID NO: 1653952 - DNA, 25 bp, Homo sapien
cagaggtcagcaggcagttgcgcag

SEQ ID NO: 1653953 - DNA, 25 bp, Homo sapien
agcccgtagtctccgatgcgcacgg

SEQ ID NO: 1653954 - DNA, 25 bp, Homo sapien
ctccgatgcgcacggtcaggtcaga

SEQ ID NO: 1653955 - DNA, 25 bp, Homo sapien
gtgggccagcccgtagtctccgatg

SEQ ID NO: 1653956 - DNA, 25 bp, Homo sapien
ctgtgcacgtagttgtgggaatgca

SEQ ID NO: 1653957 - DNA, 25 bp, Homo sapien
ccgcaggtctcgagggggtagctca

SEQ ID NO: 1653958 - DNA, 25 bp, Homo sapien
gctcggaggtaacgcttcaggtccc

SEQ ID NO: 1653959 - DNA, 25 bp, Homo sapien
gggaatgcaggtgcgccagcccgcg

SEQ ID NO: 1653960 - DNA, 25 bp, Homo sapien
cagttgacagaactccataatcagc

SEQ ID NO: 1653961 - DNA, 25 bp, Homo sapien
taatcagcagaaacggcagcgtctc

SEQ ID NO: 1653962 - DNA, 25 bp, Homo sapien
gacagaactccataatcagcagaaa

SEQ ID NO: 1653963 - DNA, 25 bp, Homo sapien
aaacggcagcgtctccacgcacaga

SEQ ID NO: 1653964 - DNA, 25 bp, Homo sapien
aatcctcccagcaacgtgctaggca

SEQ ID NO: 1653965 - DNA, 25 bp, Homo sapien
ggcttcaacagtggctggagttccc

SEQ ID NO: 1653966 - DNA, 25 bp, Homo sapien
ggcaggagcccgacaaagtgttcat

SEQ ID NO: 1653967 - DNA, 25 bp, Homo sapien
tgctaggcaggatgatgatccccat

SEQ ID NO: 1653968 - DNA, 25 bp, Homo sapien
ctgtacggctgtgcttccgagatga

SEQ ID NO: 1653969 - DNA, 25 bp, Homo sapien
gggtgtagtcggagaaaatctctcc

SEQ ID NO: 1653970 - DNA, 25 bp, Homo sapien
tagtcggagaaaatctctcccagga

SEQ ID NO: 1653971 - DNA, 25 bp, Homo sapien
cgagatgaacttgcgttgctccagg

SEQ ID NO: 1653972 - DNA, 25 bp, Homo sapien
aggtagctcaggtgctgccggctaa

SEQ ID NO: 1653973 - DNA, 25 bp, Homo sapien
agctcaggtgctgccggctaaggcc

SEQ ID NO: 1653974 - DNA, 25 bp, Homo sapien
tagctcaggtgctgccggctaaggc

SEQ ID NO: 1653975 - DNA, 25 bp, Homo sapien
tgctgccggctaaggcccagggggg

SEQ ID NO: 1653976 - DNA, 25 bp, Homo sapien
gtgaggaggaggtctcctccgcagg

SEQ ID NO: 1653977 - DNA, 25 bp, Homo sapien
tcagccagcgggagaatgtagacat

SEQ ID NO: 1653978 - DNA, 25 bp, Homo sapien
cgggagaatgtagacatcaggcagc

SEQ ID NO: 1653979 - DNA, 25 bp, Homo sapien
ggagtgtactccccggagcagtcct

SEQ ID NO: 1653980 - DNA, 25 bp, Homo sapien
gacatcgccccgtttgcagcacaga

SEQ ID NO: 1653981 - DNA, 25 bp, Homo sapien
cttgaagccgacatcgccccgtttg

SEQ ID NO: 1653982 - DNA, 25 bp, Homo sapien
gaaatgaggaccacagcgtagggag

SEQ ID NO: 1653983 - DNA, 25 bp, Homo sapien
ggaccacagcgtagggaggagccag

SEQ ID NO: 1653984 - DNA, 25 bp, Homo sapien
ttcaagtccctggataccggaatca

SEQ ID NO: 1653985 - DNA, 25 bp, Homo sapien
tcaagtccctggataccggaatcat

SEQ ID NO: 1653986 - DNA, 25 bp, Homo sapien
ggcggagacggccgcaaggaggatg

SEQ ID NO: 1653987 - DNA, 25 bp, Homo sapien
cggagacggccgcaaggaggatgag

SEQ ID NO: 1653988 - DNA, 25 bp, Homo sapien
gagacggccgcaaggaggatgaggg

SEQ ID NO: 1653989 - DNA, 25 bp, Homo sapien
gaggcggagacggccgcaaggagga

SEQ ID NO: 1653990 - DNA, 25 bp, Homo sapien
cagggaggtggaggtggtggcggct

SEQ ID NO: 1653991 - DNA, 25 bp, Homo sapien
cttgtcgaggatggcagggaggtgg

SEQ ID NO: 1653992 - DNA, 25 bp, Homo sapien
tgtcgaggatggcagggaggtggag

SEQ ID NO: 1653993 - DNA, 25 bp, Homo sapien
ggcagggaggtggaggtggtggcgg

SEQ ID NO: 1653994 - DNA, 25 bp, Homo sapien
cgtccgcagcgttttacacgtacag

SEQ ID NO: 1653995 - DNA, 25 bp, Homo sapien
tagtctgtgccaggtatcgtccgca

SEQ ID NO: 1653996 - DNA, 25 bp, Homo sapien
ttttttaatcatgcccattgtacag

SEQ ID NO: 1653997 - DNA, 25 bp, Homo sapien
tacagaattacctctcaatcctcac

SEQ ID NO: 1653998 - DNA, 25 bp, Homo sapien
atcacgtgccaggccgccgccgtct

SEQ ID NO: 1653999 - DNA, 25 bp, Homo sapien
gtctcggggtcacatcccaccctcc

SEQ ID NO: 1654000 - DNA, 25 bp, Homo sapien
tccagcgccccgagctgcagacaca

SEQ ID NO: 1654001 - DNA, 25 bp, Homo sapien
ggacctctccatcgtccgtgagcac

SEQ ID NO: 1654002 - DNA, 25 bp, Homo sapien
gcgaggcgttcccctgggtgaggct

SEQ ID NO: 1654003 - DNA, 25 bp, Homo sapien
tgcgaggcgttcccctgggtgaggc

SEQ ID NO: 1654004 - DNA, 25 bp, Homo sapien
ctgcgaggcgttcccctgggtgagg

SEQ ID NO: 1654005 - DNA, 25 bp, Homo sapien
gaggcgttcccctgggtgaggctgg

SEQ ID NO: 1654006 - DNA, 25 bp, Homo sapien
gcagccgtcctcatcggggggctca

SEQ ID NO: 1654007 - DNA, 25 bp, Homo sapien
cgcagccgtcctcatcggggggctc

SEQ ID NO: 1654008 - DNA, 25 bp, Homo sapien
gcgcagccgtcctcatcggggggct

SEQ ID NO: 1654009 - DNA, 25 bp, Homo sapien
cagccgtcctcatcggggggctcag

SEQ ID NO: 1654010 - DNA, 25 bp, Homo sapien
tcattggagaaactgaggcaggttc

SEQ ID NO: 1654011 - DNA, 25 bp, Homo sapien
cattggagaaactgaggcaggttca

SEQ ID NO: 1654012 - DNA, 25 bp, Homo sapien
attggagaaactgaggcaggttcat

SEQ ID NO: 1654013 - DNA, 25 bp, Homo sapien
ggagggggcgcacggcctaggctgc

SEQ ID NO: 1654014 - DNA, 25 bp, Homo sapien
gagggggcgcacggcctaggctgca

SEQ ID NO: 1654015 - DNA, 25 bp, Homo sapien
ccgggtctgttcagagcggtgcccc

SEQ ID NO: 1654016 - DNA, 25 bp, Homo sapien
agagcggtgcccctgccagaagtag

SEQ ID NO: 1654017 - DNA, 25 bp, Homo sapien
aatagcgtcctcgttctgttcctcc

SEQ ID NO: 1654018 - DNA, 25 bp, Homo sapien
ctccctggctgaaatagcgtcctcg

SEQ ID NO: 1654019 - DNA, 25 bp, Homo sapien
ctcgatctcctgaccacccgcctct

SEQ ID NO: 1654020 - DNA, 25 bp, Homo sapien
atctcctgaccacccgcctcttcct

SEQ ID NO: 1654021 - DNA, 25 bp, Homo sapien
tcgatctcctgaccacccgcctctt

SEQ ID NO: 1654022 - DNA, 25 bp, Homo sapien
cgatctcctgaccacccgcctcttc

SEQ ID NO: 1654023 - DNA, 25 bp, Homo sapien
aaggcctgaccctcgggagctgtgt

SEQ ID NO: 1654024 - DNA, 25 bp, Homo sapien
tcttctttaggatccgctgcctggg

SEQ ID NO: 1654025 - DNA, 25 bp, Homo sapien
catcttctgggttgtgacactgagg

SEQ ID NO: 1654026 - DNA, 25 bp, Homo sapien
gcaggcaatgggcttgcccaagtcc

SEQ ID NO: 1654027 - DNA, 25 bp, Homo sapien
cacctcgatcagcctttctttttct

SEQ ID NO: 1654028 - DNA, 25 bp, Homo sapien
tttttaaagagatggcctctcactg

SEQ ID NO: 1654029 - DNA, 25 bp, Homo sapien
cactgctgcctccacctcctgagct

SEQ ID NO: 1654030 - DNA, 25 bp, Homo sapien
ctgctgcctccacctcctgagctca

SEQ ID NO: 1654031 - DNA, 25 bp, Homo sapien
ttctgcttgacagacgccgaggcca

SEQ ID NO: 1654032 - DNA, 25 bp, Homo sapien
gccgaggccagaagccttgtccaag

SEQ ID NO: 1654033 - DNA, 25 bp, Homo sapien
tcccggcccaagttgcagaacaagt

SEQ ID NO: 1654034 - DNA, 25 bp, Homo sapien
ttgtccggcactgctccttgggtgg

SEQ ID NO: 1654035 - DNA, 25 bp, Homo sapien
tcagggttgccccccaagtcctgcc

SEQ ID NO: 1654036 - DNA, 25 bp, Homo sapien
tttgaatgtagcatccccaccgaac

SEQ ID NO: 1654037 - DNA, 25 bp, Homo sapien
tctgacggcctgacgcctctgggct

SEQ ID NO: 1654038 - DNA, 25 bp, Homo sapien
ctggggacagatagcggaggcggtg

SEQ ID NO: 1654039 - DNA, 25 bp, Homo sapien
aagtttgaatgtagcatccccaccg

SEQ ID NO: 1654040 - DNA, 25 bp, Homo sapien
acgattctcctgcctaagcctccgg

SEQ ID NO: 1654041 - DNA, 25 bp, Homo sapien
gcaaccgccgcctccctggctcaaa

SEQ ID NO: 1654042 - DNA, 25 bp, Homo sapien
cgccgcctccctggctcaaacgatt

SEQ ID NO: 1654043 - DNA, 25 bp, Homo sapien
accgccgcctccctggctcaaacga

SEQ ID NO: 1654044 - DNA, 25 bp, Homo sapien
tgggctccatcttctggcaccagcc

SEQ ID NO: 1654045 - DNA, 25 bp, Homo sapien
aggcggcttaggtcccacatggagc

SEQ ID NO: 1654046 - DNA, 25 bp, Homo sapien
acaggcggcttaggtcccacatgga

SEQ ID NO: 1654047 - DNA, 25 bp, Homo sapien
tgggacaggcggcttaggtcccaca

SEQ ID NO: 1654048 - DNA, 25 bp, Homo sapien
ggacaggcggcttaggtcccacatg

SEQ ID NO: 1654049 - DNA, 25 bp, Homo sapien
aggcggtgggccagcgggccgtcag

SEQ ID NO: 1654050 - DNA, 25 bp, Homo sapien
tagaatgtcactgagtgccggcccc

SEQ ID NO: 1654051 - DNA, 25 bp, Homo sapien
cgctgcacactccttagaatgtcac

SEQ ID NO: 1654052 - DNA, 25 bp, Homo sapien
gcgggacacgcggtgcgggctgcgg

SEQ ID NO: 1654053 - DNA, 25 bp, Homo sapien
gcgcaggtgggagcgggcaggaggc

SEQ ID NO: 1654054 - DNA, 25 bp, Homo sapien
gggcgcaggtgggagcgggcaggag

SEQ ID NO: 1654055 - DNA, 25 bp, Homo sapien
tgggagcgggcaggaggccgcgtac

SEQ ID NO: 1654056 - DNA, 25 bp, Homo sapien
tctgggggggcgcaggtgggagcgg

SEQ ID NO: 1654057 - DNA, 25 bp, Homo sapien
caggcgtgcgtcactccacgtgaag

SEQ ID NO: 1654058 - DNA, 25 bp, Homo sapien
aatttcaccagtcagcagggtcacc

SEQ ID NO: 1654059 - DNA, 25 bp, Homo sapien
ctcggtgcaggcgtgcgtcactcca

SEQ ID NO: 1654060 - DNA, 25 bp, Homo sapien
actcaaggctgaaggcgtcaacaat

SEQ ID NO: 1654061 - DNA, 25 bp, Homo sapien
agggcgttgggaacagaggacactc

SEQ ID NO: 1654062 - DNA, 25 bp, Homo sapien
tgttgggcagcagccacccgctcac

SEQ ID NO: 1654063 - DNA, 25 bp, Homo sapien
gacttagagggacgcagggcgttgg

SEQ ID NO: 1654064 - DNA, 25 bp, Homo sapien
ggacgcagggcgttgggaacagagg

SEQ ID NO: 1654065 - DNA, 25 bp, Homo sapien
caggccgccatggtcctgtgctggc

SEQ ID NO: 1654066 - DNA, 25 bp, Homo sapien
ccccaggcacgacgggcgtcaagga

SEQ ID NO: 1654067 - DNA, 25 bp, Homo sapien
tcattcagcggttccgggaggtctg

SEQ ID NO: 1654068 - DNA, 25 bp, Homo sapien
caaggactgcgtcttctgtgagctc

SEQ ID NO: 1654069 - DNA, 25 bp, Homo sapien
atcaacaaaggctgcctgcgagcca

SEQ ID NO: 1654070 - DNA, 25 bp, Homo sapien
cttgaggaacccgtcagctacaggg

SEQ ID NO: 1654071 - DNA, 25 bp, Homo sapien
gcactggtccggtcatcaacaaagg

SEQ ID NO: 1654072 - DNA, 25 bp, Homo sapien
cactgtggcgatgacgaggactgct

SEQ ID NO: 1654073 - DNA, 25 bp, Homo sapien
gggtatgctgcttcctccacgtttg

SEQ ID NO: 1654074 - DNA, 25 bp, Homo sapien
cagagccccgagcagccagacagtg

SEQ ID NO: 1654075 - DNA, 25 bp, Homo sapien
cactggggctgggtatgctgcttcc

SEQ ID NO: 1654076 - DNA, 25 bp, Homo sapien
ctgtgtaacagagccccgagcagcc

SEQ ID NO: 1654077 - DNA, 25 bp, Homo sapien
tgttccaggcacgatgaatggcagt

SEQ ID NO: 1654078 - DNA, 25 bp, Homo sapien
tcttacgttacgtgccactgaatcc

SEQ ID NO: 1654079 - DNA, 25 bp, Homo sapien
aacatcctggtctcaactccaatca

SEQ ID NO: 1654080 - DNA, 25 bp, Homo sapien
cctggccaagcctgtcttacgttac

SEQ ID NO: 1654081 - DNA, 25 bp, Homo sapien
gtgttttaacaagcgctcccaggga

SEQ ID NO: 1654082 - DNA, 25 bp, Homo sapien
gcatgcacagggttgaaagccactg

SEQ ID NO: 1654083 - DNA, 25 bp, Homo sapien
gggactagagatgcattccaccagg

SEQ ID NO: 1654084 - DNA, 25 bp, Homo sapien
cagggattctggtgcatgcacaggg

SEQ ID NO: 1654085 - DNA, 25 bp, Homo sapien
aaacttctcccgcacggtgccgctc

SEQ ID NO: 1654086 - DNA, 25 bp, Homo sapien
cagcagcacaaacttctcccgcacg

SEQ ID NO: 1654087 - DNA, 25 bp, Homo sapien
agcacaaacttctcccgcacggtgc

SEQ ID NO: 1654088 - DNA, 25 bp, Homo sapien
aacttctcccgcacggtgccgctca

SEQ ID NO: 1654089 - DNA, 25 bp, Homo sapien
gccgtcgccagcggctctggaagct

SEQ ID NO: 1654090 - DNA, 25 bp, Homo sapien
ctgccgtcgccagcggctctggaag

SEQ ID NO: 1654091 - DNA, 25 bp, Homo sapien
ccccgcacgacacggacatccacgt

SEQ ID NO: 1654092 - DNA, 25 bp, Homo sapien
cagccccgcacgacacggacatcca

SEQ ID NO: 1654093 - DNA, 25 bp, Homo sapien
gctagcatccatctcaatgacccgg

SEQ ID NO: 1654094 - DNA, 25 bp, Homo sapien
cagtgctgtgggcatcagatcccag

SEQ ID NO: 1654095 - DNA, 25 bp, Homo sapien
cggagctccatggaagggtctgccc

SEQ ID NO: 1654096 - DNA, 25 bp, Homo sapien
tcaagattccttgggaatgcccacc

SEQ ID NO: 1654097 - DNA, 25 bp, Homo sapien
caggtagacaggtacccagcggcgc

SEQ ID NO: 1654098 - DNA, 25 bp, Homo sapien
gtgaagacgtccatgaccacggcca

SEQ ID NO: 1654099 - DNA, 25 bp, Homo sapien
ccagcggcgcgtggcagcatccacc

SEQ ID NO: 1654100 - DNA, 25 bp, Homo sapien
tgaagacgtccatgaccacggccac

SEQ ID NO: 1654101 - DNA, 25 bp, Homo sapien
gcagctcaggggcgcaatctcagct

SEQ ID NO: 1654102 - DNA, 25 bp, Homo sapien
ctgcagctcaggggcgcaatctcag

SEQ ID NO: 1654103 - DNA, 25 bp, Homo sapien
caggctgcagctcaggggcgcaatc

SEQ ID NO: 1654104 - DNA, 25 bp, Homo sapien
ggctgcagctcaggggcgcaatctc

SEQ ID NO: 1654105 - DNA, 25 bp, Homo sapien
tgcccgcgtccacatcggtggtggt

SEQ ID NO: 1654106 - DNA, 25 bp, Homo sapien
gccgctggccctcggaatatagaaa

SEQ ID NO: 1654107 - DNA, 25 bp, Homo sapien
tcgcgctgcacgcaggtctggaacg

SEQ ID NO: 1654108 - DNA, 25 bp, Homo sapien
tgcctttccacgcagagtccactgg

SEQ ID NO: 1654109 - DNA, 25 bp, Homo sapien
gcagaccctacgtggccatccgagg

SEQ ID NO: 1654110 - DNA, 25 bp, Homo sapien
catctgggggttctcctgataggca

SEQ ID NO: 1654111 - DNA, 25 bp, Homo sapien
gccctgcagatgtccaaatggctcc

SEQ ID NO: 1654112 - DNA, 25 bp, Homo sapien
cagatgtccaaatggctccctgcag

SEQ ID NO: 1654113 - DNA, 25 bp, Homo sapien
caatggcttccgactgacagtcaca

SEQ ID NO: 1654114 - DNA, 25 bp, Homo sapien
cagccaggatgcctctccactgggc

SEQ ID NO: 1654115 - DNA, 25 bp, Homo sapien
cttccactgtctggcaaacgccaat

SEQ ID NO: 1654116 - DNA, 25 bp, Homo sapien
ggcaaacgccaatggcttccgactg

SEQ ID NO: 1654117 - DNA, 25 bp, Homo sapien
ccttgatccctgcaaaccagaagcc

SEQ ID NO: 1654118 - DNA, 25 bp, Homo sapien
attccaatcccaccaacccaggccg

SEQ ID NO: 1654119 - DNA, 25 bp, Homo sapien
gaagcccttcattccaatcccacca

SEQ ID NO: 1654120 - DNA, 25 bp, Homo sapien
tgatccctgcaaaccagaagccctt

SEQ ID NO: 1654121 - DNA, 25 bp, Homo sapien
gccagaggccgacgggccagccgag

SEQ ID NO: 1654122 - DNA, 25 bp, Homo sapien
gccgacgggccagccgaggctacaa

SEQ ID NO: 1654123 - DNA, 25 bp, Homo sapien
cgggccagccgaggctacaaaaact

SEQ ID NO: 1654124 - DNA, 25 bp, Homo sapien
gtgccagaggccgacgggccagccg

SEQ ID NO: 1654125 - DNA, 25 bp, Homo sapien
tgccagaggccgacgggccagccga

SEQ ID NO: 1654126 - DNA, 25 bp, Homo sapien
ggccagccgaggctacaaaaactaa

SEQ ID NO: 1654127 - DNA, 25 bp, Homo sapien
cggctggcccgtcggcctctggcac

SEQ ID NO: 1654128 - DNA, 25 bp, Homo sapien
ttgtagcctcggctggcccgtcggc

SEQ ID NO: 1654129 - DNA, 25 bp, Homo sapien
agtttttgtagcctcggctggcccg

SEQ ID NO: 1654130 - DNA, 25 bp, Homo sapien
ttagtttttgtagcctcggctggcc

SEQ ID NO: 1654131 - DNA, 25 bp, Homo sapien
ctcggctggcccgtcggcctctggc

SEQ ID NO: 1654132 - DNA, 25 bp, Homo sapien
tcggctggcccgtcggcctctggca

SEQ ID NO: 1654133 - DNA, 25 bp, Homo sapien
ccgctccaagggccggaagttcgag

SEQ ID NO: 1654134 - DNA, 25 bp, Homo sapien
cgctccaagggccggaagttcgagc

SEQ ID NO: 1654135 - DNA, 25 bp, Homo sapien
tccgctccaagggccggaagttcga

SEQ ID NO: 1654136 - DNA, 25 bp, Homo sapien
ctacgtccgctccaagggccggaag

SEQ ID NO: 1654137 - DNA, 25 bp, Homo sapien
tcgaacttccggcccttggagcgga

SEQ ID NO: 1654138 - DNA, 25 bp, Homo sapien
ctcgaacttccggcccttggagcgg

SEQ ID NO: 1654139 - DNA, 25 bp, Homo sapien
cttccggcccttggagcggacgtag

SEQ ID NO: 1654140 - DNA, 25 bp, Homo sapien
gctcgaacttccggcccttggagcg

SEQ ID NO: 1654141 - DNA, 25 bp, Homo sapien
tcctgtgccactccacaatggcctc

SEQ ID NO: 1654142 - DNA, 25 bp, Homo sapien
gagcatgcagttcaccggcctttgc

SEQ ID NO: 1654143 - DNA, 25 bp, Homo sapien
gggagcatgcagttcaccggccttt

SEQ ID NO: 1654144 - DNA, 25 bp, Homo sapien
tgggctgcttctcctatccctcgta

SEQ ID NO: 1654145 - DNA, 25 bp, Homo sapien
tggggcaggtgcttccatagcccct

SEQ ID NO: 1654146 - DNA, 25 bp, Homo sapien
gcatgcagttcaccggcctttgcca

SEQ ID NO: 1654147 - DNA, 25 bp, Homo sapien
gaggggctatggaagcacctgcccc

SEQ ID NO: 1654148 - DNA, 25 bp, Homo sapien
gccggtgaactgcatgctccccagg

SEQ ID NO: 1654149 - DNA, 25 bp, Homo sapien
tggcaaaggccggtgaactgcatgc

SEQ ID NO: 1654150 - DNA, 25 bp, Homo sapien
gggctggctggtacgagggatagga

SEQ ID NO: 1654151 - DNA, 25 bp, Homo sapien
tacgagggataggagaagcagccca

SEQ ID NO: 1654152 - DNA, 25 bp, Homo sapien
gaggccattgtggagtggcacagga

SEQ ID NO: 1654153 - DNA, 25 bp, Homo sapien
gtaccggcatttcggcaaggcccca

SEQ ID NO: 1654154 - DNA, 25 bp, Homo sapien
gcatttcggcaaggccccaggaacc

SEQ ID NO: 1654155 - DNA, 25 bp, Homo sapien
ccgagaggtgtaccggcatttcggc

SEQ ID NO: 1654156 - DNA, 25 bp, Homo sapien
ccggcatttcggcaaggccccagga

SEQ ID NO: 1654157 - DNA, 25 bp, Homo sapien
cggcatttcggcaaggccccaggaa

SEQ ID NO: 1654158 - DNA, 25 bp, Homo sapien
ggcaaggccccaggaaccccgcaca

SEQ ID NO: 1654159 - DNA, 25 bp, Homo sapien
gccgaaatgccggtacacctctcgg

SEQ ID NO: 1654160 - DNA, 25 bp, Homo sapien
tgtgcggggttcctggggccttgcc

SEQ ID NO: 1654161 - DNA, 25 bp, Homo sapien
ttcctggggccttgccgaaatgccg

SEQ ID NO: 1654162 - DNA, 25 bp, Homo sapien
ttgccgaaatgccggtacacctctc

SEQ ID NO: 1654163 - DNA, 25 bp, Homo sapien
ggttcctggggccttgccgaaatgc

SEQ ID NO: 1654164 - DNA, 25 bp, Homo sapien
tcctggggccttgccgaaatgccgg

SEQ ID NO: 1654165 - DNA, 25 bp, Homo sapien
cagaagctgggcgccagatccctgt

SEQ ID NO: 1654166 - DNA, 25 bp, Homo sapien
gcgccagatccctgtctcacccggt

SEQ ID NO: 1654167 - DNA, 25 bp, Homo sapien
tgatacgtggtcgacgggtttggac

SEQ ID NO: 1654168 - DNA, 25 bp, Homo sapien
gtgagtgatacgtggtcgacgggtt

SEQ ID NO: 1654169 - DNA, 25 bp, Homo sapien
tgggcgccagatccctgtctcaccc

SEQ ID NO: 1654170 - DNA, 25 bp, Homo sapien
cgtggtcgacgggtttggactgagc

SEQ ID NO: 1654171 - DNA, 25 bp, Homo sapien
gggtgagacagggatctggcgccca

SEQ ID NO: 1654172 - DNA, 25 bp, Homo sapien
cagggatctggcgcccagcttctgg

SEQ ID NO: 1654173 - DNA, 25 bp, Homo sapien
aaacccgtcgaccacgtatcactca

SEQ ID NO: 1654174 - DNA, 25 bp, Homo sapien
accgggtgagacagggatctggcgc

SEQ ID NO: 1654175 - DNA, 25 bp, Homo sapien
gtccaaacccgtcgaccacgtatca

SEQ ID NO: 1654176 - DNA, 25 bp, Homo sapien
gctcagtccaaacccgtcgaccacg

SEQ ID NO: 1654177 - DNA, 25 bp, Homo sapien
tcctggatctgggaggccagaagct

SEQ ID NO: 1654178 - DNA, 25 bp, Homo sapien
tttggactgagctgtgtggctactg

SEQ ID NO: 1654179 - DNA, 25 bp, Homo sapien
agccttcaccctcctggatctggga

SEQ ID NO: 1654180 - DNA, 25 bp, Homo sapien
tgatacgtggtcgacgggtttggac

SEQ ID NO: 1654181 - DNA, 25 bp, Homo sapien
tgtggctactggcagccttcaccct

SEQ ID NO: 1654182 - DNA, 25 bp, Homo sapien
gaagctgggcgccagatccctgtct

SEQ ID NO: 1654183 - DNA, 25 bp, Homo sapien
tcccagatccaggagggtgaaggct

SEQ ID NO: 1654184 - DNA, 25 bp, Homo sapien
gagacagggatctggcgcccagctt

SEQ ID NO: 1654185 - DNA, 25 bp, Homo sapien
agggtgaaggctgccagtagccaca

SEQ ID NO: 1654186 - DNA, 25 bp, Homo sapien
gtccaaacccgtcgaccacgtatca

SEQ ID NO: 1654187 - DNA, 25 bp, Homo sapien
cagtagccacacagctcagtccaaa

SEQ ID NO: 1654188 - DNA, 25 bp, Homo sapien
agcttctggcctcccagatccagga

SEQ ID NO: 1654189 - DNA, 25 bp, Homo sapien
tggactcccctaagggctgtggcac

SEQ ID NO: 1654190 - DNA, 25 bp, Homo sapien
ccctggactcccctaagggctgtgg

SEQ ID NO: 1654191 - DNA, 25 bp, Homo sapien
gtatgtgcactgcgcgtgaccagcc

SEQ ID NO: 1654192 - DNA, 25 bp, Homo sapien
ggactcccctaagggctgtggcact

SEQ ID NO: 1654193 - DNA, 25 bp, Homo sapien
gggcaagatcctcactttcgaccag

SEQ ID NO: 1654194 - DNA, 25 bp, Homo sapien
ctggactcccctaagggctgtggca

SEQ ID NO: 1654195 - DNA, 25 bp, Homo sapien
cgggcccggctggtcacgcgcagtg

SEQ ID NO: 1654196 - DNA, 25 bp, Homo sapien
ggctggtcacgcgcagtgcacatac

SEQ ID NO: 1654197 - DNA, 25 bp, Homo sapien
ctgaggatgcggctgcgggcccggc

SEQ ID NO: 1654198 - DNA, 25 bp, Homo sapien
tggtcgaaagtgaggatcttgcccc

SEQ ID NO: 1654199 - DNA, 25 bp, Homo sapien
agtgccacagcccttaggggagtcc

SEQ ID NO: 1654200 - DNA, 25 bp, Homo sapien
ccacagcccttaggggagtccaggg

SEQ ID NO: 1654201 - DNA, 25 bp, Homo sapien
gtttctagcataacaccagggatgt

SEQ ID NO: 1654202 - DNA, 25 bp, Homo sapien
tgctccgggtagtaaacgatagtgt

SEQ ID NO: 1654203 - DNA, 25 bp, Homo sapien
tcagtcttgccaccgctggtgaggc

SEQ ID NO: 1654204 - DNA, 25 bp, Homo sapien
taaactgttagtgctggcccctaga

SEQ ID NO: 1654205 - DNA, 25 bp, Homo sapien
agacccttgctgtactgtgctgtgc

SEQ ID NO: 1654206 - DNA, 25 bp, Homo sapien
cagcctgggctcaagtctagactcc

SEQ ID NO: 1654207 - DNA, 25 bp, Homo sapien
cactatcgtttactacccggagcac

SEQ ID NO: 1654208 - DNA, 25 bp, Homo sapien
tacaacttgccccagaagaagcttg

SEQ ID NO: 1654209 - DNA, 25 bp, Homo sapien
cagcacagcacagtacagcaagggt

SEQ ID NO: 1654210 - DNA, 25 bp, Homo sapien
ggagtctagacttgagcccaggctg

SEQ ID NO: 1654211 - DNA, 25 bp, Homo sapien
acatccctggtgttatgctagaaac

SEQ ID NO: 1654212 - DNA, 25 bp, Homo sapien
agcaagggtctgatgggtctgccca

SEQ ID NO: 1654213 - DNA, 25 bp, Homo sapien
gttgtggggaccataactgatgatg

SEQ ID NO: 1654214 - DNA, 25 bp, Homo sapien
ggttgtggggaccataactgatgat

SEQ ID NO: 1654215 - DNA, 25 bp, Homo sapien
atcatcagttatggtccccacaacc

SEQ ID NO: 1654216 - DNA, 25 bp, Homo sapien
catcatcagttatggtccccacaac

SEQ ID NO: 1654217 - DNA, 25 bp, Homo sapien
atccggaagatgaagcttcctggcc

SEQ ID NO: 1654218 - DNA, 25 bp, Homo sapien
gaccataactgatgatgtgcgggtt

SEQ ID NO: 1654219 - DNA, 25 bp, Homo sapien
gttgtggggaccataactgatgatg

SEQ ID NO: 1654220 - DNA, 25 bp, Homo sapien
tgtgcgggttcaggaggtacccaaa

SEQ ID NO: 1654221 - DNA, 25 bp, Homo sapien
ggaccataactgatgatgtgcgggt

SEQ ID NO: 1654222 - DNA, 25 bp, Homo sapien
ggttgtggggaccataactgatgat

SEQ ID NO: 1654223 - DNA, 25 bp, Homo sapien
atcatcagttatggtccccacaacc

SEQ ID NO: 1654224 - DNA, 25 bp, Homo sapien
aacccgcacatcatcagttatggtc

SEQ ID NO: 1654225 - DNA, 25 bp, Homo sapien
cacatcatcagttatggtccccaca

SEQ ID NO: 1654226 - DNA, 25 bp, Homo sapien
cgcacatcatcagttatggtcccca

SEQ ID NO: 1654227 - DNA, 25 bp, Homo sapien
catcatcagttatggtccccacaac

SEQ ID NO: 1654228 - DNA, 25 bp, Homo sapien
tttgggtacctcctgaacccgcaca

SEQ ID NO: 1654229 - DNA, 25 bp, Homo sapien
cagaacaacttacgacgtacatcct

SEQ ID NO: 1654230 - DNA, 25 bp, Homo sapien
caccagaacaacttacgacgtacat

SEQ ID NO: 1654231 - DNA, 25 bp, Homo sapien
tgtaaacaccagaacaacttacgac

SEQ ID NO: 1654232 - DNA, 25 bp, Homo sapien
accagaacaacttacgacgtacatc

SEQ ID NO: 1654233 - DNA, 25 bp, Homo sapien
cctcaagcggggctgaatgtaaaca

SEQ ID NO: 1654234 - DNA, 25 bp, Homo sapien
gaacaacttacgacgtacatcctcc

SEQ ID NO: 1654235 - DNA, 25 bp, Homo sapien
gatgtacgtcgtaagttgttctggt

SEQ ID NO: 1654236 - DNA, 25 bp, Homo sapien
tgtacgtcgtaagttgttctggtgt

SEQ ID NO: 1654237 - DNA, 25 bp, Homo sapien
tgtttacattcagccccgcttgagg

SEQ ID NO: 1654238 - DNA, 25 bp, Homo sapien
ggaggatgtacgtcgtaagttgttc

SEQ ID NO: 1654239 - DNA, 25 bp, Homo sapien
gtcgtaagttgttctggtgtttaca

SEQ ID NO: 1654240 - DNA, 25 bp, Homo sapien
ggatgtacgtcgtaagttgttctgg

SEQ ID NO: 1654241 - DNA, 25 bp, Homo sapien
gagattgccccaagtcataactgag

SEQ ID NO: 1654242 - DNA, 25 bp, Homo sapien
tggtccagagagcacggtagacctg

SEQ ID NO: 1654243 - DNA, 25 bp, Homo sapien
caagggtttgtctcagccagtcgcg

SEQ ID NO: 1654244 - DNA, 25 bp, Homo sapien
gggaggccctattgaacagtctgca

SEQ ID NO: 1654245 - DNA, 25 bp, Homo sapien
ccagtcgcgagcgtagagcttggac

SEQ ID NO: 1654246 - DNA, 25 bp, Homo sapien
ggcagtgggcaagtctcctggtcct

SEQ ID NO: 1654247 - DNA, 25 bp, Homo sapien
aagctctacgctcgcgactggctga

SEQ ID NO: 1654248 - DNA, 25 bp, Homo sapien
tggacactcagttccaaccaacagt

SEQ ID NO: 1654249 - DNA, 25 bp, Homo sapien
tgcagactgttcaatagggcctccc

SEQ ID NO: 1654250 - DNA, 25 bp, Homo sapien
tcagcagagcctttgacataaaact

SEQ ID NO: 1654251 - DNA, 25 bp, Homo sapien
aggtctaccgtgctctctggaccag

SEQ ID NO: 1654252 - DNA, 25 bp, Homo sapien
gcgactggctgagacaaacccttga

SEQ ID NO: 1654253 - DNA, 25 bp, Homo sapien
tctggccagaagaaccaactccaca

SEQ ID NO: 1654254 - DNA, 25 bp, Homo sapien
ctggccagaagaaccaactccacat

SEQ ID NO: 1654255 - DNA, 25 bp, Homo sapien
gtttatgagtcgcaccaaccggccg

SEQ ID NO: 1654256 - DNA, 25 bp, Homo sapien
gccgcctctgtccctttcccggatg

SEQ ID NO: 1654257 - DNA, 25 bp, Homo sapien
gtttctggccagaagaaccaactcc

SEQ ID NO: 1654258 - DNA, 25 bp, Homo sapien
gccagaagaaccaactccacattca

SEQ ID NO: 1654259 - DNA, 25 bp, Homo sapien
atgtggagttggttcttctggccag

SEQ ID NO: 1654260 - DNA, 25 bp, Homo sapien
cggccggttggtgcgactcataaac

SEQ ID NO: 1654261 - DNA, 25 bp, Homo sapien
tgaatgtggagttggttcttctggc

SEQ ID NO: 1654262 - DNA, 25 bp, Homo sapien
ggagttggttcttctggccagaaac

SEQ ID NO: 1654263 - DNA, 25 bp, Homo sapien
tgtggagttggttcttctggccaga

SEQ ID NO: 1654264 - DNA, 25 bp, Homo sapien
aagggacagaggcggccggttggtg

SEQ ID NO: 1654265 - DNA, 25 bp, Homo sapien
tctcactgtcttcccgtccctccag

SEQ ID NO: 1654266 - DNA, 25 bp, Homo sapien
aggctgtcccagcttctcactgtct

SEQ ID NO: 1654267 - DNA, 25 bp, Homo sapien
ggctgtcccagcttctcactgtctt

SEQ ID NO: 1654268 - DNA, 25 bp, Homo sapien
gcaggctgtcccagcttctcactgt

SEQ ID NO: 1654269 - DNA, 25 bp, Homo sapien
gtcccagcttctcactgtcttcccg

SEQ ID NO: 1654270 - DNA, 25 bp, Homo sapien
gggagcaggctgtcccagcttctca

SEQ ID NO: 1654271 - DNA, 25 bp, Homo sapien
cgggaagacagtgagaagctgggac

SEQ ID NO: 1654272 - DNA, 25 bp, Homo sapien
acagtgagaagctgggacagcctgc

SEQ ID NO: 1654273 - DNA, 25 bp, Homo sapien
agacagtgagaagctgggacagcct

SEQ ID NO: 1654274 - DNA, 25 bp, Homo sapien
aagacagtgagaagctgggacagcc

SEQ ID NO: 1654275 - DNA, 25 bp, Homo sapien
gagaagctgggacagcctgctcccc

SEQ ID NO: 1654276 - DNA, 25 bp, Homo sapien
tggagggacgggaagacagtgagaa

SEQ ID NO: 1654277 - DNA, 25 bp, Homo sapien
gtggacatccgccataacaaggacc

SEQ ID NO: 1654278 - DNA, 25 bp, Homo sapien
ggagtggacatccgccataacaagg

SEQ ID NO: 1654279 - DNA, 25 bp, Homo sapien
tggacatccgccataacaaggaccg

SEQ ID NO: 1654280 - DNA, 25 bp, Homo sapien
agtggacatccgccataacaaggac

SEQ ID NO: 1654281 - DNA, 25 bp, Homo sapien
gagtggacatccgccataacaagga

SEQ ID NO: 1654282 - DNA, 25 bp, Homo sapien
ggacatccgccataacaaggaccga

SEQ ID NO: 1654283 - DNA, 25 bp, Homo sapien
ggtccttgttatggcggatgtccac

SEQ ID NO: 1654284 - DNA, 25 bp, Homo sapien
tcggtccttgttatggcggatgtcc

SEQ ID NO: 1654285 - DNA, 25 bp, Homo sapien
tccttgttatggcggatgtccactc

SEQ ID NO: 1654286 - DNA, 25 bp, Homo sapien
gtccttgttatggcggatgtccact

SEQ ID NO: 1654287 - DNA, 25 bp, Homo sapien
cggtccttgttatggcggatgtcca

SEQ ID NO: 1654288 - DNA, 25 bp, Homo sapien
ccttgttatggcggatgtccactcc

SEQ ID NO: 1654289 - DNA, 25 bp, Homo sapien
tggacatccgccataacaaggaccg

SEQ ID NO: 1654290 - DNA, 25 bp, Homo sapien
caaggaccgaaaggttcggcgcaag

SEQ ID NO: 1654291 - DNA, 25 bp, Homo sapien
gacatccgccataacaaggaccgaa

SEQ ID NO: 1654292 - DNA, 25 bp, Homo sapien
gtggacatccgccataacaaggacc

SEQ ID NO: 1654293 - DNA, 25 bp, Homo sapien
atccgccataacaaggaccgaaagg

SEQ ID NO: 1654294 - DNA, 25 bp, Homo sapien
ggacatccgccataacaaggaccga

SEQ ID NO: 1654295 - DNA, 25 bp, Homo sapien
ggtccttgttatggcggatgtccac

SEQ ID NO: 1654296 - DNA, 25 bp, Homo sapien
cctttcggtccttgttatggcggat

SEQ ID NO: 1654297 - DNA, 25 bp, Homo sapien
tcggtccttgttatggcggatgtcc

SEQ ID NO: 1654298 - DNA, 25 bp, Homo sapien
cttgcgccgaacctttcggtccttg

SEQ ID NO: 1654299 - DNA, 25 bp, Homo sapien
ttcggtccttgttatggcggatgtc

SEQ ID NO: 1654300 - DNA, 25 bp, Homo sapien
cggtccttgttatggcggatgtcca

SEQ ID NO: 1654301 - DNA, 25 bp, Homo sapien
gtaaacccagtcatatcagcctccg

SEQ ID NO: 1654302 - DNA, 25 bp, Homo sapien
gatgagattactgtgtacccaacga

SEQ ID NO: 1654303 - DNA, 25 bp, Homo sapien
tgcaaaaccccgtgatgagcatctc

SEQ ID NO: 1654304 - DNA, 25 bp, Homo sapien
aataactaagagtggctgcgggtcc

SEQ ID NO: 1654305 - DNA, 25 bp, Homo sapien
cctgctcggccaggtccggaaagag

SEQ ID NO: 1654306 - DNA, 25 bp, Homo sapien
tcctgctcggccaggtccggaaaga

SEQ ID NO: 1654307 - DNA, 25 bp, Homo sapien
aacaagcgcaacgtccaagagggaa

SEQ ID NO: 1654308 - DNA, 25 bp, Homo sapien
cgataacggcagagagcatagagcg

SEQ ID NO: 1654309 - DNA, 25 bp, Homo sapien
acttctctgtggtgagttggacgac

SEQ ID NO: 1654310 - DNA, 25 bp, Homo sapien
gtgtagctagcacgatgcgtcgcgc

SEQ ID NO: 1654311 - DNA, 25 bp, Homo sapien
caaaatggagactccgtggcttggg

SEQ ID NO: 1654312 - DNA, 25 bp, Homo sapien
tactatggcttaagacccagggcca

SEQ ID NO: 1654313 - DNA, 25 bp, Homo sapien
tgtgtgcaaccagatggactggctg

SEQ ID NO: 1654314 - DNA, 25 bp, Homo sapien
ggacagtgagacctgactccttgct

SEQ ID NO: 1654315 - DNA, 25 bp, Homo sapien
ttaggacttgagtttatcctgtcta

SEQ ID NO: 1654316 - DNA, 25 bp, Homo sapien
taaaggactcaatctcgggccgggc

SEQ ID NO: 1654317 - DNA, 25 bp, Homo sapien
ttttaggacttgagtttatcctgtc

SEQ ID NO: 1654318 - DNA, 25 bp, Homo sapien
tgttttaggacttgagtttatcctg

SEQ ID NO: 1654319 - DNA, 25 bp, Homo sapien
catttggtttcacacctaagccctg

SEQ ID NO: 1654320 - DNA, 25 bp, Homo sapien
tgccaacagaggtctagggcttccc

SEQ ID NO: 1654321 - DNA, 25 bp, Homo sapien
gctggaagtaacctaatcctgggta

SEQ ID NO: 1654322 - DNA, 25 bp, Homo sapien
ttgaccacaggtgagtcacccaggg

SEQ ID NO: 1654323 - DNA, 25 bp, Homo sapien
ggagtctattttacgcgtcgcccaa

SEQ ID NO: 1654324 - DNA, 25 bp, Homo sapien
cactccggtgcctccatttagctgg

SEQ ID NO: 1654325 - DNA, 25 bp, Homo sapien
gctgcagccagtatgccagggagct

SEQ ID NO: 1654326 - DNA, 25 bp, Homo sapien
gggccggcgctaggatttgcactaa

SEQ ID NO: 1654327 - DNA, 25 bp, Homo sapien
tattcaggatcgtgttaacggaggc

SEQ ID NO: 1654328 - DNA, 25 bp, Homo sapien
aggatagggtccctgacgtgccggg

SEQ ID NO: 1654329 - DNA, 25 bp, Homo sapien
tctgcattatcacgtccctggggca

SEQ ID NO: 1654330 - DNA, 25 bp, Homo sapien
aacagggcgtaagtctcagcaaggc

SEQ ID NO: 1654331 - DNA, 25 bp, Homo sapien
cagctcctggcgcacggccacaact

SEQ ID NO: 1654332 - DNA, 25 bp, Homo sapien
gctgggcctggtatcgggacagcac

SEQ ID NO: 1654333 - DNA, 25 bp, Homo sapien
aggccgcccgcaccgatatctggtt

SEQ ID NO: 1654334 - DNA, 25 bp, Homo sapien
agcacggcgcggtagtgggacagct

SEQ ID NO: 1654335 - DNA, 25 bp, Homo sapien
gggaccgcttggctgcctcgttgtt

SEQ ID NO: 1654336 - DNA, 25 bp, Homo sapien
tgcctcgttgttcttgtaccgccgg

SEQ ID NO: 1654337 - DNA, 25 bp, Homo sapien
taccgccggctccagtatttctcat

SEQ ID NO: 1654338 - DNA, 25 bp, Homo sapien
gtcacgggaccgcttggctgcctcg

SEQ ID NO: 1654339 - DNA, 25 bp, Homo sapien
tccccacatgataaaggcctgcatg

SEQ ID NO: 1654340 - DNA, 25 bp, Homo sapien
acagtaaaggcatgagatagacccc

SEQ ID NO: 1654341 - DNA, 25 bp, Homo sapien
gggcctaaaccacaccaggtctctg

SEQ ID NO: 1654342 - DNA, 25 bp, Homo sapien
gattgggcccctagcaacagtaaag

SEQ ID NO: 1654343 - DNA, 25 bp, Homo sapien
tagggaagactccagtaatggcaaa

SEQ ID NO: 1654344 - DNA, 25 bp, Homo sapien
tcatgcaaagatgcaatgactgctc

SEQ ID NO: 1654345 - DNA, 25 bp, Homo sapien
cctggcccggaatgacaaagtcttg

SEQ ID NO: 1654346 - DNA, 25 bp, Homo sapien
tagccaaatgcaatcactccaaagg

SEQ ID NO: 1654347 - DNA, 25 bp, Homo sapien
ttctgctcctccggcacctggattt

SEQ ID NO: 1654348 - DNA, 25 bp, Homo sapien
tgctcctccggcacctggatttttc

SEQ ID NO: 1654349 - DNA, 25 bp, Homo sapien
ctcctccggcacctggatttttctt

SEQ ID NO: 1654350 - DNA, 25 bp, Homo sapien
ctgctcctccggcacctggattttt

SEQ ID NO: 1654351 - DNA, 25 bp, Homo sapien
cgatgtcttcgagggtcaaaggtct

SEQ ID NO: 1654352 - DNA, 25 bp, Homo sapien
tcaaaggtctcgtggccaggaatgc

SEQ ID NO: 1654353 - DNA, 25 bp, Homo sapien
ccaggaatgcttgatagggcaagat

SEQ ID NO: 1654354 - DNA, 25 bp, Homo sapien
gcaagatcagctgggtcgggttcaa

SEQ ID NO: 1654355 - DNA, 25 bp, Homo sapien
ctgaaaagctctcaagttagagtct

SEQ ID NO: 1654356 - DNA, 25 bp, Homo sapien
gaatccacgacctaagcttagaccc

SEQ ID NO: 1654357 - DNA, 25 bp, Homo sapien
aagagctactcgctggaaagaggag

SEQ ID NO: 1654358 - DNA, 25 bp, Homo sapien
aaaagaatctactgcactgaaaagc

SEQ ID NO: 1654359 - DNA, 25 bp, Homo sapien
ttcagggccgagtcacgtgctgacg

SEQ ID NO: 1654360 - DNA, 25 bp, Homo sapien
gacacaggttcagggccgagtcacg

SEQ ID NO: 1654361 - DNA, 25 bp, Homo sapien
gagtcacgtgctgacgcctgcttcc

SEQ ID NO: 1654362 - DNA, 25 bp, Homo sapien
cagccggggccagctaaggacacag

SEQ ID NO: 1654363 - DNA, 25 bp, Homo sapien
ggaatgtgccgctgggaagggtagg

SEQ ID NO: 1654364 - DNA, 25 bp, Homo sapien
aggaatgtgccgctgggaagggtag

SEQ ID NO: 1654365 - DNA, 25 bp, Homo sapien
gtggcgcaggaatgtgccgctggga

SEQ ID NO: 1654366 - DNA, 25 bp, Homo sapien
gcgcaggaatgtgccgctgggaagg

SEQ ID NO: 1654367 - DNA, 25 bp, Homo sapien
cagcagtggcgccaacagacccggg

SEQ ID NO: 1654368 - DNA, 25 bp, Homo sapien
aggtctacgtactccacatcgccga

SEQ ID NO: 1654369 - DNA, 25 bp, Homo sapien
acatcgccgaacggcagcgtgcgct

SEQ ID NO: 1654370 - DNA, 25 bp, Homo sapien
ggctgggcgggagcccgtgctccag

SEQ ID NO: 1654371 - DNA, 25 bp, Homo sapien
gggcatccgccgggcccgcagtctc

SEQ ID NO: 1654372 - DNA, 25 bp, Homo sapien
aggcagggccgccttgcgctccttt

SEQ ID NO: 1654373 - DNA, 25 bp, Homo sapien
gcccaggggttgtggctgcaggcag

SEQ ID NO: 1654374 - DNA, 25 bp, Homo sapien
gccttgcgctccttttccttcagga

SEQ ID NO: 1654375 - DNA, 25 bp, Homo sapien
agagaccccgagtccgagaggcaca

SEQ ID NO: 1654376 - DNA, 25 bp, Homo sapien
atggagaagagaccccgagtccgag

SEQ ID NO: 1654377 - DNA, 25 bp, Homo sapien
agaagagaccccgagtccgagaggc

SEQ ID NO: 1654378 - DNA, 25 bp, Homo sapien
tagagatggagaagagaccccgagt

SEQ ID NO: 1654379 - DNA, 25 bp, Homo sapien
gccggggtcctgtcgctcacaggcc

SEQ ID NO: 1654380 - DNA, 25 bp, Homo sapien
agaaggctccgcaacccaagcagcg

SEQ ID NO: 1654381 - DNA, 25 bp, Homo sapien
tgcagaaggctccgcaacccaagca

SEQ ID NO: 1654382 - DNA, 25 bp, Homo sapien
ggtcctgtcgctcacaggccgcgcc

SEQ ID NO: 1654383 - DNA, 25 bp, Homo sapien
gaaacgtgcaactcaagagggtccc

SEQ ID NO: 1654384 - DNA, 25 bp, Homo sapien
aacggaaggcgctttgcaatctgca

SEQ ID NO: 1654385 - DNA, 25 bp, Homo sapien
tgaggcgtggccaaagcaaacttct

SEQ ID NO: 1654386 - DNA, 25 bp, Homo sapien
tgaggtcctcggtgcagaaacgtgc

SEQ ID NO: 1654387 - DNA, 25 bp, Homo sapien
aatgtttccccaccgcgcctagaat

SEQ ID NO: 1654388 - DNA, 25 bp, Homo sapien
ccaccgcgcctagaatcagaccact

SEQ ID NO: 1654389 - DNA, 25 bp, Homo sapien
cgcgcctagaatcagaccactgaga

SEQ ID NO: 1654390 - DNA, 25 bp, Homo sapien
accgcgcctagaatcagaccactga

SEQ ID NO: 1654391 - DNA, 25 bp, Homo sapien
cttaggacgggcgggtgcaatcctc

SEQ ID NO: 1654392 - DNA, 25 bp, Homo sapien
gggaggcttaggacgggcgggtgca

SEQ ID NO: 1654393 - DNA, 25 bp, Homo sapien
cccctcgccttgtggggaggcttag

SEQ ID NO: 1654394 - DNA, 25 bp, Homo sapien
acgggcgggtgcaatcctcgaaggg

SEQ ID NO: 1654395 - DNA, 25 bp, Homo sapien
tcagcgaccatgggggacaccatcc

SEQ ID NO: 1654396 - DNA, 25 bp, Homo sapien
cagcgaccatgggggacaccatcca

SEQ ID NO: 1654397 - DNA, 25 bp, Homo sapien
cagggggcgtcagtataggatggaa

SEQ ID NO: 1654398 - DNA, 25 bp, Homo sapien
tcagtataggatggaaggggcgggg

SEQ ID NO: 1654399 - DNA, 25 bp, Homo sapien
gtaagacagagaacaacggcagggg

SEQ ID NO: 1654400 - DNA, 25 bp, Homo sapien
aacaacggcagggggcgtcagtata

SEQ ID NO: 1654401 - DNA, 25 bp, Homo sapien
tctgcgagcggggaaccagaatgta

SEQ ID NO: 1654402 - DNA, 25 bp, Homo sapien
ggaaccagaatgtactaggtcgaga

SEQ ID NO: 1654403 - DNA, 25 bp, Homo sapien
cgagcggggaaccagaatgtactag

SEQ ID NO: 1654404 - DNA, 25 bp, Homo sapien
tcggaagtctgcgagcggggaacca

SEQ ID NO: 1654405 - DNA, 25 bp, Homo sapien
gggaatcgggacgtccagattcagc

SEQ ID NO: 1654406 - DNA, 25 bp, Homo sapien
cagcagtaggctgaactacttgaag

SEQ ID NO: 1654407 - DNA, 25 bp, Homo sapien
ctgaaccacaagaagccaataggag

SEQ ID NO: 1654408 - DNA, 25 bp, Homo sapien
gaaccacaagaagccaataggaggg

SEQ ID NO: 1654409 - DNA, 25 bp, Homo sapien
ccatgttgcgaagccgggggtgtgt

SEQ ID NO: 1654410 - DNA, 25 bp, Homo sapien
tgttgcgaagccgggggtgtgtgag

SEQ ID NO: 1654411 - DNA, 25 bp, Homo sapien
gcgaagccgggggtgtgtgagattc

SEQ ID NO: 1654412 - DNA, 25 bp, Homo sapien
taccatgttgcgaagccgggggtgt

SEQ ID NO: 1654413 - DNA, 25 bp, Homo sapien
gagacacatataagagggttagccc

SEQ ID NO: 1654414 - DNA, 25 bp, Homo sapien
tagaccatatagacgcaggaaggag

SEQ ID NO: 1654415 - DNA, 25 bp, Homo sapien
gaaaaagagacagctcacgaggcta

SEQ ID NO: 1654416 - DNA, 25 bp, Homo sapien
gaaggaggatgggactgaatcacac

SEQ ID NO: 1654417 - DNA, 25 bp, Homo sapien
tagttggggcctcggcagcgcctct

SEQ ID NO: 1654418 - DNA, 25 bp, Homo sapien
ggccggctgttaccgctgaggctct

SEQ ID NO: 1654419 - DNA, 25 bp, Homo sapien
catgcaggcggtagttggggcctcg

SEQ ID NO: 1654420 - DNA, 25 bp, Homo sapien
gggtccctgttgcccctcagtgccc

SEQ ID NO: 1654421 - DNA, 25 bp, Homo sapien
agggtgggaaactgggagtgaatag

SEQ ID NO: 1654422 - DNA, 25 bp, Homo sapien
tgggaaactgggagtgaatagtgaa

SEQ ID NO: 1654423 - DNA, 25 bp, Homo sapien
ctgggagtgaatagtgaatggtctt

SEQ ID NO: 1654424 - DNA, 25 bp, Homo sapien
aaactgggagtgaatagtgaatggt

SEQ ID NO: 1654425 - DNA, 25 bp, Homo sapien
ctgagagagccctgataggtgatga

SEQ ID NO: 1654426 - DNA, 25 bp, Homo sapien
tccaggctcaggtcttgaagaaagt

SEQ ID NO: 1654427 - DNA, 25 bp, Homo sapien
tgatgaagccgaaggattcagggaa

SEQ ID NO: 1654428 - DNA, 25 bp, Homo sapien
atccaggtgacagtctcggagcagg

SEQ ID NO: 1654429 - DNA, 25 bp, Homo sapien
tcttgtaggagatgcgagtgatggt

SEQ ID NO: 1654430 - DNA, 25 bp, Homo sapien
tgaggaatgggttagaggtactggc

SEQ ID NO: 1654431 - DNA, 25 bp, Homo sapien
ttaaggaggcgactgaggaatgggt

SEQ ID NO: 1654432 - DNA, 25 bp, Homo sapien
cgagtgatggtgtcgcggttaagga

SEQ ID NO: 1654433 - DNA, 25 bp, Homo sapien
gctgaaattcccgtagagttcctgg

SEQ ID NO: 1654434 - DNA, 25 bp, Homo sapien
caggccattggggccgcgggaggca

SEQ ID NO: 1654435 - DNA, 25 bp, Homo sapien
gaggctgagaatggccaggccattg

SEQ ID NO: 1654436 - DNA, 25 bp, Homo sapien
gccgcgggaggcagcgctgaaattc

SEQ ID NO: 1654437 - DNA, 25 bp, Homo sapien
tcactgagtcggtggctgtaaagga

SEQ ID NO: 1654438 - DNA, 25 bp, Homo sapien
gttgatctgatgttccgagccggct

SEQ ID NO: 1654439 - DNA, 25 bp, Homo sapien
agctccaaacagcagccgcagttca

SEQ ID NO: 1654440 - DNA, 25 bp, Homo sapien
agagaagccctggtggttgatctga

SEQ ID NO: 1654441 - DNA, 25 bp, Homo sapien
aataataattgtacccattttgtgg

SEQ ID NO: 1654442 - DNA, 25 bp, Homo sapien
ctctgtgtgatcctaggcaagtaac

SEQ ID NO: 1654443 - DNA, 25 bp, Homo sapien
taaagcaggtcccagcattcatgct

SEQ ID NO: 1654444 - DNA, 25 bp, Homo sapien
tggttcccagcatggtactataaag

SEQ ID NO: 1654445 - DNA, 25 bp, Homo sapien
tccagtgctgagccttaatgggggc

SEQ ID NO: 1654446 - DNA, 25 bp, Homo sapien
ccagtgctgagccttaatgggggca

SEQ ID NO: 1654447 - DNA, 25 bp, Homo sapien
ctccagtgctgagccttaatggggg

SEQ ID NO: 1654448 - DNA, 25 bp, Homo sapien
cagtgctgagccttaatgggggcag

SEQ ID NO: 1654449 - DNA, 25 bp, Homo sapien
acagcacacagactccacgctgcat

SEQ ID NO: 1654450 - DNA, 25 bp, Homo sapien
gctgcattcaccaggccccagaaag

SEQ ID NO: 1654451 - DNA, 25 bp, Homo sapien
gcacacagactccacgctgcattca

SEQ ID NO: 1654452 - DNA, 25 bp, Homo sapien
agactccacgctgcattcaccaggc

SEQ ID NO: 1654453 - DNA, 25 bp, Homo sapien
ctggcacgaagtttccctggagatt

SEQ ID NO: 1654454 - DNA, 25 bp, Homo sapien
agattatccttgtagctccaccagt

SEQ ID NO: 1654455 - DNA, 25 bp, Homo sapien
tccctggagattatccttgtagctc

SEQ ID NO: 1654456 - DNA, 25 bp, Homo sapien
gaagtttccctggagattatccttg

SEQ ID NO: 1654457 - DNA, 25 bp, Homo sapien
agcccagagtaccagcgctcgaggg

SEQ ID NO: 1654458 - DNA, 25 bp, Homo sapien
accagcgctcgaggggcgctcagac

SEQ ID NO: 1654459 - DNA, 25 bp, Homo sapien
cccagtgcagcccagagtaccagcg

SEQ ID NO: 1654460 - DNA, 25 bp, Homo sapien
ctcgaggggcgctcagacgagctgc

SEQ ID NO: 1654461 - DNA, 25 bp, Homo sapien
tgcccccagggctacctcttggttc

SEQ ID NO: 1654462 - DNA, 25 bp, Homo sapien
cagggactgagatccgcccttcaaa

SEQ ID NO: 1654463 - DNA, 25 bp, Homo sapien
ttttcattaagctctcccaagccac

SEQ ID NO: 1654464 - DNA, 25 bp, Homo sapien
tccagcttcgtgctctccccacctc

SEQ ID NO: 1654465 - DNA, 25 bp, Homo sapien
gaactaacagggtctgaccctgctt

SEQ ID NO: 1654466 - DNA, 25 bp, Homo sapien
caagaactaacagggtctgaccctg

SEQ ID NO: 1654467 - DNA, 25 bp, Homo sapien
agaactaacagggtctgaccctgct

SEQ ID NO: 1654468 - DNA, 25 bp, Homo sapien
aagaactaacagggtctgaccctgc

SEQ ID NO: 1654469 - DNA, 25 bp, Homo sapien
tctctgcagtgcaccgtcgaggtag

SEQ ID NO: 1654470 - DNA, 25 bp, Homo sapien
ttttgctaaaagttccgcacgcctg

SEQ ID NO: 1654471 - DNA, 25 bp, Homo sapien
tactttgttggtgctcgaggcagcc

SEQ ID NO: 1654472 - DNA, 25 bp, Homo sapien
tagaaggctcagctcctagtcgctc

SEQ ID NO: 1654473 - DNA, 25 bp, Homo sapien
tgggactgggtgtgggtgcccgcac

SEQ ID NO: 1654474 - DNA, 25 bp, Homo sapien
agtgctccggcctgggactgggtgt

SEQ ID NO: 1654475 - DNA, 25 bp, Homo sapien
ctagtgctccggcctgggactgggt

SEQ ID NO: 1654476 - DNA, 25 bp, Homo sapien
gcctgggactgggtgtgggtgcccg

SEQ ID NO: 1654477 - DNA, 25 bp, Homo sapien
tggcggtcgaggatgaggcgcgtgg

SEQ ID NO: 1654478 - DNA, 25 bp, Homo sapien
agcaggtagtcggtgcctggctgca

SEQ ID NO: 1654479 - DNA, 25 bp, Homo sapien
gcctccatggcagcgcgaggccgtg

SEQ ID NO: 1654480 - DNA, 25 bp, Homo sapien
caggtagtcggtgcctggctgcagg

SEQ ID NO: 1654481 - DNA, 25 bp, Homo sapien
gggctgcgcccgctgcttgtaaacg

SEQ ID NO: 1654482 - DNA, 25 bp, Homo sapien
ttgtaaacggccagcacgcgcacgg

SEQ ID NO: 1654483 - DNA, 25 bp, Homo sapien
tggtcgccgcgtcgcacgggctgcg

SEQ ID NO: 1654484 - DNA, 25 bp, Homo sapien
gctgcttgtaaacggccagcacgcg

SEQ ID NO: 1654485 - DNA, 25 bp, Homo sapien
ctcggacgctagcacctgcgcgcgg

SEQ ID NO: 1654486 - DNA, 25 bp, Homo sapien
ggacgctagcacctgcgcgcggaga

SEQ ID NO: 1654487 - DNA, 25 bp, Homo sapien
tcggacgctagcacctgcgcgcgga

SEQ ID NO: 1654488 - DNA, 25 bp, Homo sapien
gacgctagcacctgcgcgcggagaa

SEQ ID NO: 1654489 - DNA, 25 bp, Homo sapien
tatacattgagagaaatagctggcg

SEQ ID NO: 1654490 - DNA, 25 bp, Homo sapien
gatgatgaaactctgtaagccgaag

SEQ ID NO: 1654491 - DNA, 25 bp, Homo sapien
ggctaaggctcaaatatctgggacc

SEQ ID NO: 1654492 - DNA, 25 bp, Homo sapien
gacacaggaaggtagtgaatgcccc

SEQ ID NO: 1654493 - DNA, 25 bp, Homo sapien
ggctcatgtgtaccctggtgtccga

SEQ ID NO: 1654494 - DNA, 25 bp, Homo sapien
ggtgtccgacatattgcagtagttt

SEQ ID NO: 1654495 - DNA, 25 bp, Homo sapien
tattgcagtagttttgacactgagg

SEQ ID NO: 1654496 - DNA, 25 bp, Homo sapien
acctccgaaggctcatgtgtaccct

SEQ ID NO: 1654497 - DNA, 25 bp, Homo sapien
cgttccatcttgatggccagctggg

SEQ ID NO: 1654498 - DNA, 25 bp, Homo sapien
ctggggcctagaccacagccttctg

SEQ ID NO: 1654499 - DNA, 25 bp, Homo sapien
gggtgacccatgtatccccatctgg

SEQ ID NO: 1654500 - DNA, 25 bp, Homo sapien
gggacccagtcagcccatcctcatt

SEQ ID NO: 1654501 - DNA, 25 bp, Homo sapien
cagggacctccgtgccagactgtct

SEQ ID NO: 1654502 - DNA, 25 bp, Homo sapien
gggacctccgtgccagactgtctta

SEQ ID NO: 1654503 - DNA, 25 bp, Homo sapien
ggacctccgtgccagactgtcttac

SEQ ID NO: 1654504 - DNA, 25 bp, Homo sapien
agggacctccgtgccagactgtctt

SEQ ID NO: 1654505 - DNA, 25 bp, Homo sapien
aagcaccaggagtagtggcaagggt

SEQ ID NO: 1654506 - DNA, 25 bp, Homo sapien
tgccccaatagggtggcactggcag

SEQ ID NO: 1654507 - DNA, 25 bp, Homo sapien
agggccacagcggttgcaggtcagg

SEQ ID NO: 1654508 - DNA, 25 bp, Homo sapien
tgacccctaacttgcaggtgcactg

SEQ ID NO: 1654509 - DNA, 25 bp, Homo sapien
ctcctgttgccccaatagggtggca

SEQ ID NO: 1654510 - DNA, 25 bp, Homo sapien
gtgtggtggcggcaccgctcacaaa

SEQ ID NO: 1654511 - DNA, 25 bp, Homo sapien
caggccctgcggctgaagataggct

SEQ ID NO: 1654512 - DNA, 25 bp, Homo sapien
agtagtggcagtgccgcccagctgt

SEQ ID NO: 1654513 - DNA, 25 bp, Homo sapien
gctcagagttgaaccggcagcgtcg

SEQ ID NO: 1654514 - DNA, 25 bp, Homo sapien
ctaggagcaaaatggggtgggggcg

SEQ ID NO: 1654515 - DNA, 25 bp, Homo sapien
aggagcaaaatggggtgggggcgca

SEQ ID NO: 1654516 - DNA, 25 bp, Homo sapien
ggagcaaaatggggtgggggcgcat

SEQ ID NO: 1654517 - DNA, 25 bp, Homo sapien
taggagcaaaatggggtgggggcgc

SEQ ID NO: 1654518 - DNA, 25 bp, Homo sapien
caggctcatggacactctttgaaga

SEQ ID NO: 1654519 - DNA, 25 bp, Homo sapien
tgtgggataatcagggagctcagac

SEQ ID NO: 1654520 - DNA, 25 bp, Homo sapien
acttggactgcagggtgttttgaca

SEQ ID NO: 1654521 - DNA, 25 bp, Homo sapien
aggtccctgagagcccggaagagtt

SEQ ID NO: 1654522 - DNA, 25 bp, Homo sapien
tgcctggcacacgtaggtgactgat

SEQ ID NO: 1654523 - DNA, 25 bp, Homo sapien
ccccaatctatggtggaggaaactg

SEQ ID NO: 1654524 - DNA, 25 bp, Homo sapien
tctgccacgtggtgtgacagtaccc

SEQ ID NO: 1654525 - DNA, 25 bp, Homo sapien
cttgctggcaatgagacttagggca

SEQ ID NO: 1654526 - DNA, 25 bp, Homo sapien
tacagaagcgcaagctgacagatgt

SEQ ID NO: 1654527 - DNA, 25 bp, Homo sapien
cattgcaggtttccctggcgccaag

SEQ ID NO: 1654528 - DNA, 25 bp, Homo sapien
cctgtggatcgtagcatgggtccgc

SEQ ID NO: 1654529 - DNA, 25 bp, Homo sapien
gagtggaaggtcaccctttcagggc

SEQ ID NO: 1654530 - DNA, 25 bp, Homo sapien
gggatccagaaaccagtcgtggccc

SEQ ID NO: 1654531 - DNA, 25 bp, Homo sapien
gctgtgagttccctagtgttcctgg

SEQ ID NO: 1654532 - DNA, 25 bp, Homo sapien
agaaaccagtcgtggcccacagaga

SEQ ID NO: 1654533 - DNA, 25 bp, Homo sapien
agagagcccatacccctctttaaga

SEQ ID NO: 1654534 - DNA, 25 bp, Homo sapien
tgcactcaagaagagagcgtcctgc

SEQ ID NO: 1654535 - DNA, 25 bp, Homo sapien
gctctcaggagggagtggcgtggct

SEQ ID NO: 1654536 - DNA, 25 bp, Homo sapien
ccagttccccgcaggctcttcctcc

SEQ ID NO: 1654537 - DNA, 25 bp, Homo sapien
cctccaagctgtggcgcggtgggct

SEQ ID NO: 1654538 - DNA, 25 bp, Homo sapien
gatttgaaagaagggagtcactccg

SEQ ID NO: 1654539 - DNA, 25 bp, Homo sapien
gaacttcgggattcaggcgcaggtc

SEQ ID NO: 1654540 - DNA, 25 bp, Homo sapien
gcaggacagggacatcggatttgaa

SEQ ID NO: 1654541 - DNA, 25 bp, Homo sapien
tttatcgtggtgtagcgtgggccca

SEQ ID NO: 1654542 - DNA, 25 bp, Homo sapien
taaagtctgcaaatagccacatgac

SEQ ID NO: 1654543 - DNA, 25 bp, Homo sapien
gcggctttctggttgtctaggctga

SEQ ID NO: 1654544 - DNA, 25 bp, Homo sapien
aaatggctgacaaggaatcgcggac

SEQ ID NO: 1654545 - DNA, 25 bp, Homo sapien
cagatgagttcagtccaggttggcg

SEQ ID NO: 1654546 - DNA, 25 bp, Homo sapien
ccccacagccgtcaagggattctgg

SEQ ID NO: 1654547 - DNA, 25 bp, Homo sapien
tgctctgaggcctctcccatgcact

SEQ ID NO: 1654548 - DNA, 25 bp, Homo sapien
ggtgcagtaacttgactgaagtcac

SEQ ID NO: 1654549 - DNA, 25 bp, Homo sapien
ggtgggtgaagagactcctgtcccc

SEQ ID NO: 1654550 - DNA, 25 bp, Homo sapien
gctggtaggccaccgcctaagtgaa

SEQ ID NO: 1654551 - DNA, 25 bp, Homo sapien
caactcaaaaggtcaaactgcacac

SEQ ID NO: 1654552 - DNA, 25 bp, Homo sapien
tgtctttcatgtcgcccgcttagcc

SEQ ID NO: 1654553 - DNA, 25 bp, Homo sapien
cagtaacagggtttgggcttgggag

SEQ ID NO: 1654554 - DNA, 25 bp, Homo sapien
ccctgttgatggacagacaaggaca

SEQ ID NO: 1654555 - DNA, 25 bp, Homo sapien
gggcatctcgccaaacctcaaaaat

SEQ ID NO: 1654556 - DNA, 25 bp, Homo sapien
aaaattcacaatctcatagcgcagc

SEQ ID NO: 1654557 - DNA, 25 bp, Homo sapien
taaaaggttcctgatcatgccgtgc

SEQ ID NO: 1654558 - DNA, 25 bp, Homo sapien
cttcaaagtggatacaggcaggaca

SEQ ID NO: 1654559 - DNA, 25 bp, Homo sapien
tcaagttcaactggctgcggccagg

SEQ ID NO: 1654560 - DNA, 25 bp, Homo sapien
gccatggccgatgaatgggaagtcc

SEQ ID NO: 1654561 - DNA, 25 bp, Homo sapien
gcactggactctggcaagtaggaaa

SEQ ID NO: 1654562 - DNA, 25 bp, Homo sapien
gacgatcaatgcaataggccgcctg

SEQ ID NO: 1654563 - DNA, 25 bp, Homo sapien
caagccatgtgggagttaccggtgc

SEQ ID NO: 1654564 - DNA, 25 bp, Homo sapien
gagggctcacctgccaaagattttg

SEQ ID NO: 1654565 - DNA, 25 bp, Homo sapien
tcagcagcggctagcgaagattcaa

SEQ ID NO: 1654566 - DNA, 25 bp, Homo sapien
tacagtcatggagttgggtattccc

SEQ ID NO: 1654567 - DNA, 25 bp, Homo sapien
cctggacgacgtagtgataccctga

SEQ ID NO: 1654568 - DNA, 25 bp, Homo sapien
caggagttagggaatatagtgcacc

SEQ ID NO: 1654569 - DNA, 25 bp, Homo sapien
tagtgcaccgtgattggacttgcga

SEQ ID NO: 1654570 - DNA, 25 bp, Homo sapien
attacaagtctggatcaaaaaggca

SEQ ID NO: 1654571 - DNA, 25 bp, Homo sapien
tagatggaatcctattacaagtctg

SEQ ID NO: 1654572 - DNA, 25 bp, Homo sapien
cctattacaagtctggatcaaaaag

SEQ ID NO: 1654573 - DNA, 25 bp, Homo sapien
aaattcttaagagtagatggaatcc

SEQ ID NO: 1654574 - DNA, 25 bp, Homo sapien
gcatggagtgtcacactgcacaacc

SEQ ID NO: 1654575 - DNA, 25 bp, Homo sapien
ttgtatgtgctagcccaggtgggcc

SEQ ID NO: 1654576 - DNA, 25 bp, Homo sapien
gccacagaggaatagtgctgacact

SEQ ID NO: 1654577 - DNA, 25 bp, Homo sapien
tagccaacatcacatggaactgaag

SEQ ID NO: 1654578 - DNA, 25 bp, Homo sapien
caactctaagttttggggtggtgtg

SEQ ID NO: 1654579 - DNA, 25 bp, Homo sapien
gcctccacctcctggtttcaagtga

SEQ ID NO: 1654580 - DNA, 25 bp, Homo sapien
cagcctccacctcctggtttcaagt

SEQ ID NO: 1654581 - DNA, 25 bp, Homo sapien
tgttttgagatggagtagcactctg

SEQ ID NO: 1654582 - DNA, 25 bp, Homo sapien
tttcatctccaaccagaacccaggg

SEQ ID NO: 1654583 - DNA, 25 bp, Homo sapien
gagaagctgatcttagacctgatgc

SEQ ID NO: 1654584 - DNA, 25 bp, Homo sapien
tgtaagaacatccatgaggtctctg

SEQ ID NO: 1654585 - DNA, 25 bp, Homo sapien
gcaagcagcttgtttgccgtggcca

SEQ ID NO: 1654586 - DNA, 25 bp, Homo sapien
acagcacgtcgaaggagccagggaa

SEQ ID NO: 1654587 - DNA, 25 bp, Homo sapien
atgagaggccttcagagtccgggga

SEQ ID NO: 1654588 - DNA, 25 bp, Homo sapien
tggagtcagataagtcagcggagaa

SEQ ID NO: 1654589 - DNA, 25 bp, Homo sapien
agttcgtgggagacgggagtgaaga

SEQ ID NO: 1654590 - DNA, 25 bp, Homo sapien
gatgtcatcgatgccccggttagga

SEQ ID NO: 1654591 - DNA, 25 bp, Homo sapien
caggatgtcatcgatgccccggtta

SEQ ID NO: 1654592 - DNA, 25 bp, Homo sapien
ggatgtcatcgatgccccggttagg

SEQ ID NO: 1654593 - DNA, 25 bp, Homo sapien
ctccaggatgtcatcgatgccccgg

SEQ ID NO: 1654594 - DNA, 25 bp, Homo sapien
cgccctccggatcgcttcctgcagc

SEQ ID NO: 1654595 - DNA, 25 bp, Homo sapien
gcgccctccggatcgcttcctgcag

SEQ ID NO: 1654596 - DNA, 25 bp, Homo sapien
ccctccggatcgcttcctgcagctc

SEQ ID NO: 1654597 - DNA, 25 bp, Homo sapien
ctgcgccctccggatcgcttcctgc

SEQ ID NO: 1654598 - DNA, 25 bp, Homo sapien
ctgtgagatgctgcgctgggcttga

SEQ ID NO: 1654599 - DNA, 25 bp, Homo sapien
cagcaggagccggagtgggagttgg

SEQ ID NO: 1654600 - DNA, 25 bp, Homo sapien
agtgggagttggagccggagccgtc

SEQ ID NO: 1654601 - DNA, 25 bp, Homo sapien
tatccgcggcacgtggaagaggtgg

SEQ ID NO: 1654602 - DNA, 25 bp, Homo sapien
gacgccgggcggctgccagggcctt

SEQ ID NO: 1654603 - DNA, 25 bp, Homo sapien
ggagcatagacttggtccccgacac

SEQ ID NO: 1654604 - DNA, 25 bp, Homo sapien
agggagcacccgcgggactgtcctc

SEQ ID NO: 1654605 - DNA, 25 bp, Homo sapien
ctcgcgccgcggcttcggccgctcg

SEQ ID NO: 1654606 - DNA, 25 bp, Homo sapien
ggaggccccgcaggcgcagctgctg

SEQ ID NO: 1654607 - DNA, 25 bp, Homo sapien
gcagctgctgccggagctctgagac

SEQ ID NO: 1654608 - DNA, 25 bp, Homo sapien
tgggaggccccgcaggcgcagctgc

SEQ ID NO: 1654609 - DNA, 25 bp, Homo sapien
gcgcagctgctgccggagctctgag

SEQ ID NO: 1654610 - DNA, 25 bp, Homo sapien
gctcctccagtttaagggtctgaag

SEQ ID NO: 1654611 - DNA, 25 bp, Homo sapien
cagctcctccagtttaagggtctga

SEQ ID NO: 1654612 - DNA, 25 bp, Homo sapien
cgtcagctcctccagtttaagggtc

SEQ ID NO: 1654613 - DNA, 25 bp, Homo sapien
tcagctcctccagtttaagggtctg

SEQ ID NO: 1654614 - DNA, 25 bp, Homo sapien
gggcagggagtgaggggagagggct

SEQ ID NO: 1654615 - DNA, 25 bp, Homo sapien
ctggtgggcagggagtgaggggaga

SEQ ID NO: 1654616 - DNA, 25 bp, Homo sapien
cagggagtgaggggagagggcttca

SEQ ID NO: 1654617 - DNA, 25 bp, Homo sapien
agggagtgaggggagagggcttcat

SEQ ID NO: 1654618 - DNA, 25 bp, Homo sapien
gaggatgctgggacctgaatttctg

SEQ ID NO: 1654619 - DNA, 25 bp, Homo sapien
tctgggtcccgggagaacagaagtg

SEQ ID NO: 1654620 - DNA, 25 bp, Homo sapien
caatcccctaatcttggactcgagg

SEQ ID NO: 1654621 - DNA, 25 bp, Homo sapien
gatcctggactcttaaaccctggga

SEQ ID NO: 1654622 - DNA, 25 bp, Homo sapien
gatgtggctgctgcgagtctgtccc

SEQ ID NO: 1654623 - DNA, 25 bp, Homo sapien
cctggatccctgtctcggctctggg

SEQ ID NO: 1654624 - DNA, 25 bp, Homo sapien
tgggggtccgccctggatccctgtc

SEQ ID NO: 1654625 - DNA, 25 bp, Homo sapien
tggctgctgcgagtctgtcccttcc

SEQ ID NO: 1654626 - DNA, 25 bp, Homo sapien
gcttggactccctccaacgttggga

SEQ ID NO: 1654627 - DNA, 25 bp, Homo sapien
gtactggtggtatgtcaagttcccc

SEQ ID NO: 1654628 - DNA, 25 bp, Homo sapien
tccctccaacgttgggagatcttgg

SEQ ID NO: 1654629 - DNA, 25 bp, Homo sapien
gactccctccaacgttgggagatct

SEQ ID NO: 1654630 - DNA, 25 bp, Homo sapien
gagatccacgggtccggatccgaga

SEQ ID NO: 1654631 - DNA, 25 bp, Homo sapien
ctgaggctgagatccacgggtccgg

SEQ ID NO: 1654632 - DNA, 25 bp, Homo sapien
ccaaggaggacaatattctggctcg

SEQ ID NO: 1654633 - DNA, 25 bp, Homo sapien
aaggaggacaatattctggctcggg

SEQ ID NO: 1654634 - DNA, 25 bp, Homo sapien
tggagagacggtgaaggaccctgag

SEQ ID NO: 1654635 - DNA, 25 bp, Homo sapien
gagagacggtgaaggaccctgagag

SEQ ID NO: 1654636 - DNA, 25 bp, Homo sapien
ctggagagacggtgaaggaccctga

SEQ ID NO: 1654637 - DNA, 25 bp, Homo sapien
gagacggtgaaggaccctgagaggc

SEQ ID NO: 1654638 - DNA, 25 bp, Homo sapien
gctgtgtggaaagcggggctccagg

SEQ ID NO: 1654639 - DNA, 25 bp, Homo sapien
agcaaggctgtgtggaaagcggggc

SEQ ID NO: 1654640 - DNA, 25 bp, Homo sapien
agggagcaagacttgattgctggga

SEQ ID NO: 1654641 - DNA, 25 bp, Homo sapien
ggagcaagacttgattgctgggaga

SEQ ID NO: 1654642 - DNA, 25 bp, Homo sapien
gctcctgattccgtctgtggatccg

SEQ ID NO: 1654643 - DNA, 25 bp, Homo sapien
cctgattccgtctgtggatccgaag

SEQ ID NO: 1654644 - DNA, 25 bp, Homo sapien
gattccgtctgtggatccgaagctg

SEQ ID NO: 1654645 - DNA, 25 bp, Homo sapien
tccgtctgtggatccgaagctggag

SEQ ID NO: 1654646 - DNA, 25 bp, Homo sapien
cttcctcgggcctcccgcctgctcc

SEQ ID NO: 1654647 - DNA, 25 bp, Homo sapien
ttggcgggatatgcgtgcccagccc

SEQ ID NO: 1654648 - DNA, 25 bp, Homo sapien
ttgttggcgggatatgcgtgcccag

SEQ ID NO: 1654649 - DNA, 25 bp, Homo sapien
agcccccttacacagcctgtgcagg

SEQ ID NO: 1654650 - DNA, 25 bp, Homo sapien
gaagccgccagggtcattgccaagg

SEQ ID NO: 1654651 - DNA, 25 bp, Homo sapien
cttggagcgaatgatttgggaacgc

SEQ ID NO: 1654652 - DNA, 25 bp, Homo sapien
tgggaacgctgggaggaagccgcca

SEQ ID NO: 1654653 - DNA, 25 bp, Homo sapien
cagatcggaacttggagcgaatgat

SEQ ID NO: 1654654 - DNA, 25 bp, Homo sapien
agagggggcagggcaggggccccat

SEQ ID NO: 1654655 - DNA, 25 bp, Homo sapien
gacggagagggggcagggcaggggc

SEQ ID NO: 1654656 - DNA, 25 bp, Homo sapien
gagagggggcagggcaggggcccca

SEQ ID NO: 1654657 - DNA, 25 bp, Homo sapien
ctggacggagagggggcagggcagg

SEQ ID NO: 1654658 - DNA, 25 bp, Homo sapien
gacatttcaaggttcgcgcgctcgt

SEQ ID NO: 1654659 - DNA, 25 bp, Homo sapien
tcctgtccgtagaagcccgtgacat

SEQ ID NO: 1654660 - DNA, 25 bp, Homo sapien
ccagaaagctttgcgctcaggcggg

SEQ ID NO: 1654661 - DNA, 25 bp, Homo sapien
tccacgcgggataagaactacaact

SEQ ID NO: 1654662 - DNA, 25 bp, Homo sapien
catggcgataattggctggcagctc

SEQ ID NO: 1654663 - DNA, 25 bp, Homo sapien
gagcctacggagttcacggtgcaag

SEQ ID NO: 1654664 - DNA, 25 bp, Homo sapien
gcatcgtccgtcactggaccagtga

SEQ ID NO: 1654665 - DNA, 25 bp, Homo sapien
gcgaggagaagctttcgaagatgtc

SEQ ID NO: 1654666 - DNA, 25 bp, Homo sapien
aggccgaaggcggcgcggttagagt

SEQ ID NO: 1654667 - DNA, 25 bp, Homo sapien
gggagggtcccacgcggctggcggc

SEQ ID NO: 1654668 - DNA, 25 bp, Homo sapien
ctgatagtggctgagcagatggtgc

SEQ ID NO: 1654669 - DNA, 25 bp, Homo sapien
ggtggtcggttcttaggctgctcca

SEQ ID NO: 1654670 - DNA, 25 bp, Homo sapien
cggttcttaggctgctccatgaagc

SEQ ID NO: 1654671 - DNA, 25 bp, Homo sapien
aggattcagacacagccgagtttag

SEQ ID NO: 1654672 - DNA, 25 bp, Homo sapien
taagttccaccaggattcagacaca

SEQ ID NO: 1654673 - DNA, 25 bp, Homo sapien
ataagttccaccaggattcagacac

SEQ ID NO: 1654674 - DNA, 25 bp, Homo sapien
cacagccgagtttagtcattgttgg

SEQ ID NO: 1654675 - DNA, 25 bp, Homo sapien
tccctgtagccagtccaagacgagg

SEQ ID NO: 1654676 - DNA, 25 bp, Homo sapien
gatttgaacagctcgggaccattga

SEQ ID NO: 1654677 - DNA, 25 bp, Homo sapien
gaccattgatagaaaggccggcctt

SEQ ID NO: 1654678 - DNA, 25 bp, Homo sapien
gaagaactcagtggcaatgtcgccc

SEQ ID NO: 1654679 - DNA, 25 bp, Homo sapien
taggtctcaatcctggaggcatggc

SEQ ID NO: 1654680 - DNA, 25 bp, Homo sapien
caaaagtctgagacacgaggtcagg

SEQ ID NO: 1654681 - DNA, 25 bp, Homo sapien
gaaagggttactatccaggagagca

SEQ ID NO: 1654682 - DNA, 25 bp, Homo sapien
ccatcagcgagttgagaagggatgc

SEQ ID NO: 1654683 - DNA, 25 bp, Homo sapien
ccagaaaccctgagaatgccaagaa

SEQ ID NO: 1654684 - DNA, 25 bp, Homo sapien
tcagcagagacagctcaaggaggac

SEQ ID NO: 1654685 - DNA, 25 bp, Homo sapien
gaaataaacgcacacttggcaggaa

SEQ ID NO: 1654686 - DNA, 25 bp, Homo sapien
ttctacagtcaacacccaaagggtc

SEQ ID NO: 1654687 - DNA, 25 bp, Homo sapien
gatgtaagctctaacaagtggtgtc

SEQ ID NO: 1654688 - DNA, 25 bp, Homo sapien
aagtggtgtcagaacagcaaagtcc

SEQ ID NO: 1654689 - DNA, 25 bp, Homo sapien
gccacacagtgtagttcaaacaaga

SEQ ID NO: 1654690 - DNA, 25 bp, Homo sapien
cgcgtttgcccaggtgatgattaca

SEQ ID NO: 1654691 - DNA, 25 bp, Homo sapien
cacataattccaagtcattgcagag

SEQ ID NO: 1654692 - DNA, 25 bp, Homo sapien
cttggtgaggtagtagacagactgc

SEQ ID NO: 1654693 - DNA, 25 bp, Homo sapien
ggaaggtacacatgatgacctcatc

SEQ ID NO: 1654694 - DNA, 25 bp, Homo sapien
catggcctcatcacataattccaag

SEQ ID NO: 1654695 - DNA, 25 bp, Homo sapien
cttctcctgcacaaagctaagcagc

SEQ ID NO: 1654696 - DNA, 25 bp, Homo sapien
ctgcacaaagctaagcagctccgtg

SEQ ID NO: 1654697 - DNA, 25 bp, Homo sapien
gcacaaagctaagcagctccgtggt

SEQ ID NO: 1654698 - DNA, 25 bp, Homo sapien
tcctgcacaaagctaagcagctccg

SEQ ID NO: 1654699 - DNA, 25 bp, Homo sapien
agcttcaggagtcaggggcacctcg

SEQ ID NO: 1654700 - DNA, 25 bp, Homo sapien
tccacagacacagcttcaggagtca

SEQ ID NO: 1654701 - DNA, 25 bp, Homo sapien
acacagcttcaggagtcaggggcac

SEQ ID NO: 1654702 - DNA, 25 bp, Homo sapien
cacagacacagcttcaggagtcagg

SEQ ID NO: 1654703 - DNA, 25 bp, Homo sapien
gctgacggtctccaatttccttaat

SEQ ID NO: 1654704 - DNA, 25 bp, Homo sapien
taaacctctctggttaggccctagc

SEQ ID NO: 1654705 - DNA, 25 bp, Homo sapien
cccacaagctttagaatggtctctc

SEQ ID NO: 1654706 - DNA, 25 bp, Homo sapien
catacacaccctatgattatgagtg

SEQ ID NO: 1654707 - DNA, 25 bp, Homo sapien
ttatgagtgatctagctccttcagg

SEQ ID NO: 1654708 - DNA, 25 bp, Homo sapien
aatcatttgaaccccggaggtagag

SEQ ID NO: 1654709 - DNA, 25 bp, Homo sapien
ccgggcgtgctggcaggcgcctgca

SEQ ID NO: 1654710 - DNA, 25 bp, Homo sapien
gggcgtgctggcaggcgcctgcaat

SEQ ID NO: 1654711 - DNA, 25 bp, Homo sapien
tgcagtgaaccaagaccgccactgc

SEQ ID NO: 1654712 - DNA, 25 bp, Homo sapien
gcgtcatcacatacaccacaaagtc

SEQ ID NO: 1654713 - DNA, 25 bp, Homo sapien
caggaggcacccgttgtgcgtgact

SEQ ID NO: 1654714 - DNA, 25 bp, Homo sapien
aaacacgtgctgctctcgcgtcatc

SEQ ID NO: 1654715 - DNA, 25 bp, Homo sapien
agctccagctcacgggcggaatgct

SEQ ID NO: 1654716 - DNA, 25 bp, Homo sapien
ttggttcactgcagacttgcagact

SEQ ID NO: 1654717 - DNA, 25 bp, Homo sapien
ggttcactgcagacttgcagactcc

SEQ ID NO: 1654718 - DNA, 25 bp, Homo sapien
cttggttcactgcagacttgcagac

SEQ ID NO: 1654719 - DNA, 25 bp, Homo sapien
tggttcactgcagacttgcagactc

SEQ ID NO: 1654720 - DNA, 25 bp, Homo sapien
gctgtacttgtttagcttggctgta

SEQ ID NO: 1654721 - DNA, 25 bp, Homo sapien
cagtcaagctgcctaacccaattgg

SEQ ID NO: 1654722 - DNA, 25 bp, Homo sapien
gaagagagtcttaccttctcaccca

SEQ ID NO: 1654723 - DNA, 25 bp, Homo sapien
ggaactgtcgaataagctacaccac

SEQ ID NO: 1654724 - DNA, 25 bp, Homo sapien
caaagacaagttttctgagcgctcc

SEQ ID NO: 1654725 - DNA, 25 bp, Homo sapien
tgagtcaactgatcgaagtccccgg

SEQ ID NO: 1654726 - DNA, 25 bp, Homo sapien
ctgaaggctaagctccgacacgctg

SEQ ID NO: 1654727 - DNA, 25 bp, Homo sapien
tctgcagttccgatttgggcgtcgg

SEQ ID NO: 1654728 - DNA, 25 bp, Homo sapien
cggagagatggagaacagtgaggct

SEQ ID NO: 1654729 - DNA, 25 bp, Homo sapien
gcggagagatggagaacagtgaggc

SEQ ID NO: 1654730 - DNA, 25 bp, Homo sapien
ctcgcggccgcgcaactcgaagcgc

SEQ ID NO: 1654731 - DNA, 25 bp, Homo sapien
agcgggcgctcggagtcgcccagca

SEQ ID NO: 1654732 - DNA, 25 bp, Homo sapien
cggccgcgcaactcgaagcgccgcg

SEQ ID NO: 1654733 - DNA, 25 bp, Homo sapien
ctcctcgcggccgcgcaactcgaag

SEQ ID NO: 1654734 - DNA, 25 bp, Homo sapien
gaaggcgtccacgcagctgctctcg

SEQ ID NO: 1654735 - DNA, 25 bp, Homo sapien
aagcgaaggcgtccacgcagctgct

SEQ ID NO: 1654736 - DNA, 25 bp, Homo sapien
aaagcgaaggcgtccacgcagctgc

SEQ ID NO: 1654737 - DNA, 25 bp, Homo sapien
gcgaaggcgtccacgcagctgctct

SEQ ID NO: 1654738 - DNA, 25 bp, Homo sapien
tggccagcacgctcttgtagttggc

SEQ ID NO: 1654739 - DNA, 25 bp, Homo sapien
agtccggcgccgaagatcttgagga

SEQ ID NO: 1654740 - DNA, 25 bp, Homo sapien
tagttggcgcccgatgccagtccgg

SEQ ID NO: 1654741 - DNA, 25 bp, Homo sapien
taggccgtagcgctctagcgcctcg

SEQ ID NO: 1654742 - DNA, 25 bp, Homo sapien
gctccccgtgtccgacgaagaagac

SEQ ID NO: 1654743 - DNA, 25 bp, Homo sapien
cgggggcggaggtagcggctcgctg

SEQ ID NO: 1654744 - DNA, 25 bp, Homo sapien
ggcggaggtagcggctcgctgctgc

SEQ ID NO: 1654745 - DNA, 25 bp, Homo sapien
gcggctccccgtgtccgacgaagaa

SEQ ID NO: 1654746 - DNA, 25 bp, Homo sapien
ggggaattgatccacaggcccacgg

SEQ ID NO: 1654747 - DNA, 25 bp, Homo sapien
tgaagcttcccgaagcgggggcttc

SEQ ID NO: 1654748 - DNA, 25 bp, Homo sapien
ttccgccctccttccgttcaccaga

SEQ ID NO: 1654749 - DNA, 25 bp, Homo sapien
cacggggagatgaagcttcccgaag

SEQ ID NO: 1654750 - DNA, 25 bp, Homo sapien
ggagggggcgtcctgtgaggagacc

SEQ ID NO: 1654751 - DNA, 25 bp, Homo sapien
cctgcttcgggtccggcacacccgg

SEQ ID NO: 1654752 - DNA, 25 bp, Homo sapien
tgcttcgggtccggcacacccggag

SEQ ID NO: 1654753 - DNA, 25 bp, Homo sapien
agggggcgtcctgtgaggagaccag

SEQ ID NO: 1654754 - DNA, 25 bp, Homo sapien
ctgggggaggagatctgggtagggt

SEQ ID NO: 1654755 - DNA, 25 bp, Homo sapien
ttattgttgcctcgaatctgtggcc

SEQ ID NO: 1654756 - DNA, 25 bp, Homo sapien
ggacctgggtttgctcggccgctcc

SEQ ID NO: 1654757 - DNA, 25 bp, Homo sapien
cactgccaaggccaaacagtgagga

SEQ ID NO: 1654758 - DNA, 25 bp, Homo sapien
gccaaacagtgaggatttgatgaaa

SEQ ID NO: 1654759 - DNA, 25 bp, Homo sapien
gcctgtcttcttcaatgggttgctt

SEQ ID NO: 1654760 - DNA, 25 bp, Homo sapien
ctgtcttcttcaatgggttgcttac

SEQ ID NO: 1654761 - DNA, 25 bp, Homo sapien
cctgtcttcttcaatgggttgctta

SEQ ID NO: 1654762 - DNA, 25 bp, Homo sapien
aagcctgtcttcttcaatgggttgc

SEQ ID NO: 1654763 - DNA, 25 bp, Homo sapien
cccagaaggcggcttgccagcattt

SEQ ID NO: 1654764 - DNA, 25 bp, Homo sapien
aaggtaaggccggttatcagtgcta

SEQ ID NO: 1654765 - DNA, 25 bp, Homo sapien
ttatggacgactccgtggtcgcctc

SEQ ID NO: 1654766 - DNA, 25 bp, Homo sapien
ttatcagtgctagggagccgcagat

SEQ ID NO: 1654767 - DNA, 25 bp, Homo sapien
tggcaaagacaagcccgtcccagta

SEQ ID NO: 1654768 - DNA, 25 bp, Homo sapien
tagagaaagcgtaaagagcagtcct

SEQ ID NO: 1654769 - DNA, 25 bp, Homo sapien
tggcagggcgtggagttcctgccct

SEQ ID NO: 1654770 - DNA, 25 bp, Homo sapien
gcagtcctggcagggcgtggagttc

SEQ ID NO: 1654771 - DNA, 25 bp, Homo sapien
gcttggtcagggtggcctctttccc

SEQ ID NO: 1654772 - DNA, 25 bp, Homo sapien
gacaccaaggtctccgtattgttcc

SEQ ID NO: 1654773 - DNA, 25 bp, Homo sapien
cagagcccagctcgcagcggtagct

SEQ ID NO: 1654774 - DNA, 25 bp, Homo sapien
tagacccaagctcaaggggtcactg

SEQ ID NO: 1654775 - DNA, 25 bp, Homo sapien
cccaagctcaaggggtcactgaggc

SEQ ID NO: 1654776 - DNA, 25 bp, Homo sapien
gacccaagctcaaggggtcactgag

SEQ ID NO: 1654777 - DNA, 25 bp, Homo sapien
ctagacccaagctcaaggggtcact

SEQ ID NO: 1654778 - DNA, 25 bp, Homo sapien
gaggccttccgaagcctgatgccag

SEQ ID NO: 1654779 - DNA, 25 bp, Homo sapien
aaagctgtaatcagtgaggccttcc

SEQ ID NO: 1654780 - DNA, 25 bp, Homo sapien
tgtaatcagtgaggccttccgaagc

SEQ ID NO: 1654781 - DNA, 25 bp, Homo sapien
gtgaggccttccgaagcctgatgcc

SEQ ID NO: 1654782 - DNA, 25 bp, Homo sapien
gatcatgtcttccatttgaggaact

SEQ ID NO: 1654783 - DNA, 25 bp, Homo sapien
catgtcttccatttgaggaacttcc

SEQ ID NO: 1654784 - DNA, 25 bp, Homo sapien
caggatcatgtcttccatttgagga

SEQ ID NO: 1654785 - DNA, 25 bp, Homo sapien
cagtccaggatcatgtcttccattt

SEQ ID NO: 1654786 - DNA, 25 bp, Homo sapien
agcctctcgaagtgcgagactatag

SEQ ID NO: 1654787 - DNA, 25 bp, Homo sapien
ctcgaagtgcgagactataggtgtg

SEQ ID NO: 1654788 - DNA, 25 bp, Homo sapien
acacccccatctaggctctctctag

SEQ ID NO: 1654789 - DNA, 25 bp, Homo sapien
ctctcgaagtgcgagactataggtg

SEQ ID NO: 1654790 - DNA, 25 bp, Homo sapien
ccaattcctcctgctgggtccagtt

SEQ ID NO: 1654791 - DNA, 25 bp, Homo sapien
ctcctgctgggtccagttctctcac

SEQ ID NO: 1654792 - DNA, 25 bp, Homo sapien
ttcctcctgctgggtccagttctct

SEQ ID NO: 1654793 - DNA, 25 bp, Homo sapien
accaattcctcctgctgggtccagt

SEQ ID NO: 1654794 - DNA, 25 bp, Homo sapien
caagcgtgaacctcctttttgcagt

SEQ ID NO: 1654795 - DNA, 25 bp, Homo sapien
ccccgcaatcgtaggactttcgaca

SEQ ID NO: 1654796 - DNA, 25 bp, Homo sapien
gttcttgcaccagatcagagtttgc

SEQ ID NO: 1654797 - DNA, 25 bp, Homo sapien
ttttgcagttcttgcaccagatcag

SEQ ID NO: 1654798 - DNA, 25 bp, Homo sapien
agtagaatatgacctgctccccaag

SEQ ID NO: 1654799 - DNA, 25 bp, Homo sapien
tagtaagtgggctccaacaaggctc

SEQ ID NO: 1654800 - DNA, 25 bp, Homo sapien
tcctagatggtcagacgaaggcaca

SEQ ID NO: 1654801 - DNA, 25 bp, Homo sapien
taaagattgtaagtagaggccggat

SEQ ID NO: 1654802 - DNA, 25 bp, Homo sapien
tttggaatcgagcaacataggtggc

SEQ ID NO: 1654803 - DNA, 25 bp, Homo sapien
aatcgagcaacataggtggcaaagg

SEQ ID NO: 1654804 - DNA, 25 bp, Homo sapien
tccaaaatagctccttcacgaagag

SEQ ID NO: 1654805 - DNA, 25 bp, Homo sapien
cctctttttggaatcgagcaacata

SEQ ID NO: 1654806 - DNA, 25 bp, Homo sapien
tcactgtctgtgatgcgtttcagat

SEQ ID NO: 1654807 - DNA, 25 bp, Homo sapien
actgtctgtgatgcgtttcagatcc

SEQ ID NO: 1654808 - DNA, 25 bp, Homo sapien
catcactgtctgtgatgcgtttcag

SEQ ID NO: 1654809 - DNA, 25 bp, Homo sapien
tacatcactgtctgtgatgcgtttc

SEQ ID NO: 1654810 - DNA, 25 bp, Homo sapien
ctccaggaccccttttgcagtgtgg

SEQ ID NO: 1654811 - DNA, 25 bp, Homo sapien
actccaggaccccttttgcagtgtg

SEQ ID NO: 1654812 - DNA, 25 bp, Homo sapien
gcaaactccaggaccccttttgcag

SEQ ID NO: 1654813 - DNA, 25 bp, Homo sapien
tcagcaaactccaggaccccttttg

SEQ ID NO: 1654814 - DNA, 25 bp, Homo sapien
tcattggcgcgcctaatcttagaaa

SEQ ID NO: 1654815 - DNA, 25 bp, Homo sapien
gaggagatataaccccagattccag

SEQ ID NO: 1654816 - DNA, 25 bp, Homo sapien
tactgtctcattggcgcgcctaatc

SEQ ID NO: 1654817 - DNA, 25 bp, Homo sapien
gattccagccttactgtctcattgg

SEQ ID NO: 1654818 - DNA, 25 bp, Homo sapien
ctggttaaggactcagccgcccgtt

SEQ ID NO: 1654819 - DNA, 25 bp, Homo sapien
tattacataaaattgccagccgagg

SEQ ID NO: 1654820 - DNA, 25 bp, Homo sapien
actgggcaaagataggcctggttaa

SEQ ID NO: 1654821 - DNA, 25 bp, Homo sapien
cagccgaggatagggaaaacggtat

SEQ ID NO: 1654822 - DNA, 25 bp, Homo sapien
cctcattaagcgacagttcctggaa

SEQ ID NO: 1654823 - DNA, 25 bp, Homo sapien
cccatataggcatcctcattaagcg

SEQ ID NO: 1654824 - DNA, 25 bp, Homo sapien
tcctggaaatccttcacggcattct

SEQ ID NO: 1654825 - DNA, 25 bp, Homo sapien
gacagttcctggaaatccttcacgg

SEQ ID NO: 1654826 - DNA, 25 bp, Homo sapien
tgatgcttcgcatccaggtggccag

SEQ ID NO: 1654827 - DNA, 25 bp, Homo sapien
cacacaggagggtaaaatgcggccc

SEQ ID NO: 1654828 - DNA, 25 bp, Homo sapien
ggccaggcaggtaatctttctccag

SEQ ID NO: 1654829 - DNA, 25 bp, Homo sapien
gacagacgggtcacatataacacac

SEQ ID NO: 1654830 - DNA, 25 bp, Homo sapien
gcacagttcccgaagaccgttagga

SEQ ID NO: 1654831 - DNA, 25 bp, Homo sapien
agggtgctctcaccccaaaccgaga

SEQ ID NO: 1654832 - DNA, 25 bp, Homo sapien
agccggcgcgcacagttcccgaaga

SEQ ID NO: 1654833 - DNA, 25 bp, Homo sapien
cgaagaccgttaggaagggtgctct

SEQ ID NO: 1654834 - DNA, 25 bp, Homo sapien
caaaatttagggttctcactgaatc

SEQ ID NO: 1654835 - DNA, 25 bp, Homo sapien
catcaaatgcctccgaagtgtgaaa

SEQ ID NO: 1654836 - DNA, 25 bp, Homo sapien
tccgcaaacctcgaaaagaggatct

SEQ ID NO: 1654837 - DNA, 25 bp, Homo sapien
tctccaaataaagaggacctatgtc

SEQ ID NO: 1654838 - DNA, 25 bp, Homo sapien
tccatgcggtcctctagacctaggg

SEQ ID NO: 1654839 - DNA, 25 bp, Homo sapien
taacgggctcccaatttgcagggcg

SEQ ID NO: 1654840 - DNA, 25 bp, Homo sapien
cagattcctagaactgaggacccca

SEQ ID NO: 1654841 - DNA, 25 bp, Homo sapien
cactaacacttaagcgagactccat

SEQ ID NO: 1654842 - DNA, 25 bp, Homo sapien
taacactagggttcattgaggagcc

SEQ ID NO: 1654843 - DNA, 25 bp, Homo sapien
agccccgatgcatcctgaacagtga

SEQ ID NO: 1654844 - DNA, 25 bp, Homo sapien
ccgcttagaaaaaggagccccgatg

SEQ ID NO: 1654845 - DNA, 25 bp, Homo sapien
tggttcccgatttgtggcctctaac

SEQ ID NO: 1654846 - DNA, 25 bp, Homo sapien
gaggaagccggggtcatgaccacct

SEQ ID NO: 1654847 - DNA, 25 bp, Homo sapien
aagaggaagccggggtcatgaccac

SEQ ID NO: 1654848 - DNA, 25 bp, Homo sapien
ggaagccggggtcatgaccacctac

SEQ ID NO: 1654849 - DNA, 25 bp, Homo sapien
aggaagccggggtcatgaccaccta

SEQ ID NO: 1654850 - DNA, 25 bp, Homo sapien
ccaggggtaaaatcaaggattgtgt

SEQ ID NO: 1654851 - DNA, 25 bp, Homo sapien
gttggttgcgtgaaatcgagagctt

SEQ ID NO: 1654852 - DNA, 25 bp, Homo sapien
gggtctgagtcacggacgatcccct

SEQ ID NO: 1654853 - DNA, 25 bp, Homo sapien
gagcttctcacgtaggggcccgaat

SEQ ID NO: 1654854 - DNA, 25 bp, Homo sapien
caagacgctggccaactagagatgg

SEQ ID NO: 1654855 - DNA, 25 bp, Homo sapien
tagaatcactctggatacgggcacc

SEQ ID NO: 1654856 - DNA, 25 bp, Homo sapien
tagcaatgagcacggtacctgccag

SEQ ID NO: 1654857 - DNA, 25 bp, Homo sapien
cagtttgtcacaagcacagagggtg

SEQ ID NO: 1654858 - DNA, 25 bp, Homo sapien
cttagccaatgtccagagtggagac

SEQ ID NO: 1654859 - DNA, 25 bp, Homo sapien
gggcaaagtctttccacggtgtagc

SEQ ID NO: 1654860 - DNA, 25 bp, Homo sapien
catgccgttgctggtgaccacgaaa

SEQ ID NO: 1654861 - DNA, 25 bp, Homo sapien
cctcttcccgaaggtggtcgtgcag

SEQ ID NO: 1654862 - DNA, 25 bp, Homo sapien
gacatccagtcgtgaagctgcagct

SEQ ID NO: 1654863 - DNA, 25 bp, Homo sapien
ccatcgcagtacccggcaggcagaa

SEQ ID NO: 1654864 - DNA, 25 bp, Homo sapien
cctaggccatgtggaaagctgtctt

SEQ ID NO: 1654865 - DNA, 25 bp, Homo sapien
tgtcaccaggcggcggtctggacac

SEQ ID NO: 1654866 - DNA, 25 bp, Homo sapien
tctggacacaggatcgacaggccta

SEQ ID NO: 1654867 - DNA, 25 bp, Homo sapien
gctgacgatggctccggagccacat

SEQ ID NO: 1654868 - DNA, 25 bp, Homo sapien
agagctgacgatggctccggagcca

SEQ ID NO: 1654869 - DNA, 25 bp, Homo sapien
gcagagctgacgatggctccggagc

SEQ ID NO: 1654870 - DNA, 25 bp, Homo sapien
aggcagagctgacgatggctccgga

SEQ ID NO: 1654871 - DNA, 25 bp, Homo sapien
tacctgtctgtgaggcgcaaaatcc

SEQ ID NO: 1654872 - DNA, 25 bp, Homo sapien
tgtaagttccgctgatactggactc

SEQ ID NO: 1654873 - DNA, 25 bp, Homo sapien
aggatccccggagctcacaatgagc

SEQ ID NO: 1654874 - DNA, 25 bp, Homo sapien
cagctacaccggatgctaaggcggg

SEQ ID NO: 1654875 - DNA, 25 bp, Homo sapien
aggtggcagatccacagtccgcttt

SEQ ID NO: 1654876 - DNA, 25 bp, Homo sapien
tccgcttttcgtggccggagcgcac

SEQ ID NO: 1654877 - DNA, 25 bp, Homo sapien
agcctgtccggactggcagcgaggg

SEQ ID NO: 1654878 - DNA, 25 bp, Homo sapien
cctggaacgccaggcgtccggctat

SEQ ID NO: 1654879 - DNA, 25 bp, Homo sapien
ggccgggagtctcgcagcgtccgcc

SEQ ID NO: 1654880 - DNA, 25 bp, Homo sapien
gtctcgcagcgtccgccctcccggg

SEQ ID NO: 1654881 - DNA, 25 bp, Homo sapien
gggagtctcgcagcgtccgccctcc

SEQ ID NO: 1654882 - DNA, 25 bp, Homo sapien
ccgggagtctcgcagcgtccgccct

SEQ ID NO: 1654883 - DNA, 25 bp, Homo sapien
agccccgcccgtcacttggcgccga

SEQ ID NO: 1654884 - DNA, 25 bp, Homo sapien
gctaaggcgatggcccctgggccca

SEQ ID NO: 1654885 - DNA, 25 bp, Homo sapien
tgggcccaccgctccccagatcggg

SEQ ID NO: 1654886 - DNA, 25 bp, Homo sapien
gccccgtcattgacctgcgcgaagg

SEQ ID NO: 1654887 - DNA, 25 bp, Homo sapien
catcattgcgtggaccaggagacgg

SEQ ID NO: 1654888 - DNA, 25 bp, Homo sapien
gagtggagcgatcgtccgccctctg

SEQ ID NO: 1654889 - DNA, 25 bp, Homo sapien
tcttccggtgccagggcttagagtc

SEQ ID NO: 1654890 - DNA, 25 bp, Homo sapien
agacggagcgcccagttgcaatgct

SEQ ID NO: 1654891 - DNA, 25 bp, Homo sapien
caaggctggagaccggagtggaaca

SEQ ID NO: 1654892 - DNA, 25 bp, Homo sapien
gcccgcttgtcacctaattaaagca

SEQ ID NO: 1654893 - DNA, 25 bp, Homo sapien
gcaggctaacgtagggtccagccct

SEQ ID NO: 1654894 - DNA, 25 bp, Homo sapien
tccagcatcgccaaccccgagcagg

SEQ ID NO: 1654895 - DNA, 25 bp, Homo sapien
tgtgaggagaggagagattgtaaga

SEQ ID NO: 1654896 - DNA, 25 bp, Homo sapien
tgaggagaggagagattgtaagaaa

SEQ ID NO: 1654897 - DNA, 25 bp, Homo sapien
aggagaggagagattgtaagaaata

SEQ ID NO: 1654898 - DNA, 25 bp, Homo sapien
ctgtgaggagaggagagattgtaag

SEQ ID NO: 1654899 - DNA, 25 bp, Homo sapien
ccttgcacccttaggggctccagga

SEQ ID NO: 1654900 - DNA, 25 bp, Homo sapien
cttgcacccttaggggctccaggaa

SEQ ID NO: 1654901 - DNA, 25 bp, Homo sapien
ttgcacccttaggggctccaggaaa

SEQ ID NO: 1654902 - DNA, 25 bp, Homo sapien
tgcacccttaggggctccaggaaat

SEQ ID NO: 1654903 - DNA, 25 bp, Homo sapien
cctggcttggctgccaactccagtc

SEQ ID NO: 1654904 - DNA, 25 bp, Homo sapien
tgttacacactcagggtgagcccat

SEQ ID NO: 1654905 - DNA, 25 bp, Homo sapien
catagtattgtaataggttgggaca

SEQ ID NO: 1654906 - DNA, 25 bp, Homo sapien
gatttcacggctgtttgttccagga

SEQ ID NO: 1654907 - DNA, 25 bp, Homo sapien
tttgggtgaagcttcgccgctgtct

SEQ ID NO: 1654908 - DNA, 25 bp, Homo sapien
catcctcgcacaggggccatcctag

SEQ ID NO: 1654909 - DNA, 25 bp, Homo sapien
tcgcacaggggccatcctagtcttc

SEQ ID NO: 1654910 - DNA, 25 bp, Homo sapien
tcctcgcacaggggccatcctagtc

SEQ ID NO: 1654911 - DNA, 25 bp, Homo sapien
ctcgcacaggggccatcctagtctt

SEQ ID NO: 1654912 - DNA, 25 bp, Homo sapien
cccgtgactacagtcctggctgagg

SEQ ID NO: 1654913 - DNA, 25 bp, Homo sapien
cctttgggccaggtagcagactgca

SEQ ID NO: 1654914 - DNA, 25 bp, Homo sapien
aacaagggtgccagtagaagacagc

SEQ ID NO: 1654915 - DNA, 25 bp, Homo sapien
acccactagggtcccgtgactacag

SEQ ID NO: 1654916 - DNA, 25 bp, Homo sapien
aaggtgtatccttgaccgcacgaca

SEQ ID NO: 1654917 - DNA, 25 bp, Homo sapien
cacgacaaggagtaatgggcggacc

SEQ ID NO: 1654918 - DNA, 25 bp, Homo sapien
cctgagaacggagagatccggaatc

SEQ ID NO: 1654919 - DNA, 25 bp, Homo sapien
tatttcgtattgcacttcaggtgag

SEQ ID NO: 1654920 - DNA, 25 bp, Homo sapien
acatccactcgtgggctctgattcc

SEQ ID NO: 1654921 - DNA, 25 bp, Homo sapien
gaacatccactcgtgggctctgatt

SEQ ID NO: 1654922 - DNA, 25 bp, Homo sapien
tccactcgtgggctctgattccgta

SEQ ID NO: 1654923 - DNA, 25 bp, Homo sapien
cgggaacatccactcgtgggctctg

SEQ ID NO: 1654924 - DNA, 25 bp, Homo sapien
agcagcacagaaagcccactctcca

SEQ ID NO: 1654925 - DNA, 25 bp, Homo sapien
agagcagcacagaaagcccactctc

SEQ ID NO: 1654926 - DNA, 25 bp, Homo sapien
cagagcagcacagaaagcccactct

SEQ ID NO: 1654927 - DNA, 25 bp, Homo sapien
gagcagcacagaaagcccactctcc

SEQ ID NO: 1654928 - DNA, 25 bp, Homo sapien
cattttccatggtgggaatgtggag

SEQ ID NO: 1654929 - DNA, 25 bp, Homo sapien
cttctggaagcggaggatcagctca

SEQ ID NO: 1654930 - DNA, 25 bp, Homo sapien
agctccttctggaagcggaggatca

SEQ ID NO: 1654931 - DNA, 25 bp, Homo sapien
ggaggatcagctcaggcccattttc

SEQ ID NO: 1654932 - DNA, 25 bp, Homo sapien
tgtctttgtacaggattcggtgcac

SEQ ID NO: 1654933 - DNA, 25 bp, Homo sapien
tgcactgggcagacctggcaagcgg

SEQ ID NO: 1654934 - DNA, 25 bp, Homo sapien
ctggcaagcggtgcccgagccaaag

SEQ ID NO: 1654935 - DNA, 25 bp, Homo sapien
tgcttcatggtgatcgtgcgctcca

SEQ ID NO: 1654936 - DNA, 25 bp, Homo sapien
aggcaggataacaccattcagcggg

SEQ ID NO: 1654937 - DNA, 25 bp, Homo sapien
tgagccatgtccagtagactctgtc

SEQ ID NO: 1654938 - DNA, 25 bp, Homo sapien
tccaggcaggataacaccattcagc

SEQ ID NO: 1654939 - DNA, 25 bp, Homo sapien
ttcagcgggggcgtcaccagctcca

SEQ ID NO: 1654940 - DNA, 25 bp, Homo sapien
tgttgcactaacacggtgggcccat

SEQ ID NO: 1654941 - DNA, 25 bp, Homo sapien
tggtcgggcccatacagccagagga

SEQ ID NO: 1654942 - DNA, 25 bp, Homo sapien
ccatcttcgtgggtccagtagacaa

SEQ ID NO: 1654943 - DNA, 25 bp, Homo sapien
aagatgttcatggttcccacctcgg

SEQ ID NO: 1654944 - DNA, 25 bp, Homo sapien
gcgcctggctccaaaaccgtttctg

SEQ ID NO: 1654945 - DNA, 25 bp, Homo sapien
tcccccagtgaactgggctacctgg

SEQ ID NO: 1654946 - DNA, 25 bp, Homo sapien
ttcatactgaccaaatcctcagctg

SEQ ID NO: 1654947 - DNA, 25 bp, Homo sapien
tgttgtcacctcctcgagaggtgtt

SEQ ID NO: 1654948 - DNA, 25 bp, Homo sapien
tttggaggctcaaacgactgtggga

SEQ ID NO: 1654949 - DNA, 25 bp, Homo sapien
gtgacatccagaggcatggccgaaa

SEQ ID NO: 1654950 - DNA, 25 bp, Homo sapien
aaggctttcacaatgccctgggtca

SEQ ID NO: 1654951 - DNA, 25 bp, Homo sapien
ggaggtcacttagcactgagccctg

SEQ ID NO: 1654952 - DNA, 25 bp, Homo sapien
agaccggggtcacggagcctccagg

SEQ ID NO: 1654953 - DNA, 25 bp, Homo sapien
cacccaggcccggatgaaggctggg

SEQ ID NO: 1654954 - DNA, 25 bp, Homo sapien
gggaagtaggcacccactgggcaga

SEQ ID NO: 1654955 - DNA, 25 bp, Homo sapien
gagcgcgcgcgtgggctggctgaca

SEQ ID NO: 1654956 - DNA, 25 bp, Homo sapien
tccttgtccacttcgatgagccggc

SEQ ID NO: 1654957 - DNA, 25 bp, Homo sapien
cacaggccgcacatagaggctggtg

SEQ ID NO: 1654958 - DNA, 25 bp, Homo sapien
gatgagccggcggatgcactccagc

SEQ ID NO: 1654959 - DNA, 25 bp, Homo sapien
gcatcggggacccagtccttgtcca

SEQ ID NO: 1654960 - DNA, 25 bp, Homo sapien
cgcagcatccggtccatgttgagcc

SEQ ID NO: 1654961 - DNA, 25 bp, Homo sapien
gcatccggtccatgttgagccaggg

SEQ ID NO: 1654962 - DNA, 25 bp, Homo sapien
aggcgcatggctgagcgcagcatcc

SEQ ID NO: 1654963 - DNA, 25 bp, Homo sapien
tgaacgccttcatgccctcaaacag

SEQ ID NO: 1654964 - DNA, 25 bp, Homo sapien
cttctccagacagtcatgagagaca

SEQ ID NO: 1654965 - DNA, 25 bp, Homo sapien
tctccagacagtcatgagagacacc

SEQ ID NO: 1654966 - DNA, 25 bp, Homo sapien
gaggccaagaggagagcaccgggga

SEQ ID NO: 1654967 - DNA, 25 bp, Homo sapien
tcatgagagacaccaagacagacag

SEQ ID NO: 1654968 - DNA, 25 bp, Homo sapien
cagcgcttggcacagagtgtttttt

SEQ ID NO: 1654969 - DNA, 25 bp, Homo sapien
gcagtcccatgcaccagggtaggca

SEQ ID NO: 1654970 - DNA, 25 bp, Homo sapien
tgcagtcccatgcaccagggtaggc

SEQ ID NO: 1654971 - DNA, 25 bp, Homo sapien
ggtaggcagcgcttggcacagagtg

SEQ ID NO: 1654972 - DNA, 25 bp, Homo sapien
atcagcatgtggtcggtaaatgtct

SEQ ID NO: 1654973 - DNA, 25 bp, Homo sapien
gggccaggcttcttatgaggcttct

SEQ ID NO: 1654974 - DNA, 25 bp, Homo sapien
tgcagcgtgaggttctggaagggct

SEQ ID NO: 1654975 - DNA, 25 bp, Homo sapien
catgtggtcggtaaatgtcttccca

SEQ ID NO: 1654976 - DNA, 25 bp, Homo sapien
acagagagaagctttcgtgcccaga

SEQ ID NO: 1654977 - DNA, 25 bp, Homo sapien
aactggaggaggcatatcttctggg

SEQ ID NO: 1654978 - DNA, 25 bp, Homo sapien
aggaggcatatcttctgggaccaca

SEQ ID NO: 1654979 - DNA, 25 bp, Homo sapien
cagagagaagctttcgtgcccagat

SEQ ID NO: 1654980 - DNA, 25 bp, Homo sapien
tgctgacaggccttagaagaccaag

SEQ ID NO: 1654981 - DNA, 25 bp, Homo sapien
gaaggtattcgatcaactgggctct

SEQ ID NO: 1654982 - DNA, 25 bp, Homo sapien
cacacaggtaagtgaaggcctccgg

SEQ ID NO: 1654983 - DNA, 25 bp, Homo sapien
ccagacccaggagtacaggtgctta

SEQ ID NO: 1654984 - DNA, 25 bp, Homo sapien
ggcagtgactccaattcccttcagc

SEQ ID NO: 1654985 - DNA, 25 bp, Homo sapien
gaaatacaaacccattttggcagtg

SEQ ID NO: 1654986 - DNA, 25 bp, Homo sapien
caaacccattttggcagtgactcca

SEQ ID NO: 1654987 - DNA, 25 bp, Homo sapien
cccattttggcagtgactccaattc

SEQ ID NO: 1654988 - DNA, 25 bp, Homo sapien
tgcatgaggctcaggcgggtcctcc

SEQ ID NO: 1654989 - DNA, 25 bp, Homo sapien
catgaggctcaggcgggtcctccca

SEQ ID NO: 1654990 - DNA, 25 bp, Homo sapien
gcatgaggctcaggcgggtcctccc

SEQ ID NO: 1654991 - DNA, 25 bp, Homo sapien
cctttgggtggcgacatctagactg

SEQ ID NO: 1654992 - DNA, 25 bp, Homo sapien
gcgtgggtccccagattgcctttgg

SEQ ID NO: 1654993 - DNA, 25 bp, Homo sapien
cgtggtcacttgtcgctaggtgagt

SEQ ID NO: 1654994 - DNA, 25 bp, Homo sapien
agatgggcctgcagcgtggtcttgc

SEQ ID NO: 1654995 - DNA, 25 bp, Homo sapien
ccagagggataggacacccacagta

SEQ ID NO: 1654996 - DNA, 25 bp, Homo sapien
cccagagggataggacacccacagt

SEQ ID NO: 1654997 - DNA, 25 bp, Homo sapien
acacaaacacagtgcgacagccagc

SEQ ID NO: 1654998 - DNA, 25 bp, Homo sapien
gagacacaaacacagtgcgacagcc

SEQ ID NO: 1654999 - DNA, 25 bp, Homo sapien
gcgggaggagcggcgccgagtcgga

SEQ ID NO: 1655000 - DNA, 25 bp, Homo sapien
tccgcgccctgcagcggaaccccag

SEQ ID NO: 1655001 - DNA, 25 bp, Homo sapien
caaagggcgccatcctcctccgcgc

SEQ ID NO: 1655002 - DNA, 25 bp, Homo sapien
ttaaagcctcgtgctcctttccaaa

SEQ ID NO: 1655003 - DNA, 25 bp, Homo sapien
gcgcggctccgaagagagacgttcc

SEQ ID NO: 1655004 - DNA, 25 bp, Homo sapien
tccgtgcggcgcgtaactgtgcccg

SEQ ID NO: 1655005 - DNA, 25 bp, Homo sapien
cgctcacgcctccttctgggggaag

SEQ ID NO: 1655006 - DNA, 25 bp, Homo sapien
cagctccagggcgtcggcagggagc

SEQ ID NO: 1655007 - DNA, 25 bp, Homo sapien
tgtaatcttagctactcggaaagct

SEQ ID NO: 1655008 - DNA, 25 bp, Homo sapien
cctgtaatcttagctactcggaaag

SEQ ID NO: 1655009 - DNA, 25 bp, Homo sapien
gcctgtaatcttagctactcggaaa

SEQ ID NO: 1655010 - DNA, 25 bp, Homo sapien
taatcttagctactcggaaagctga

SEQ ID NO: 1655011 - DNA, 25 bp, Homo sapien
catctgatacaggttggagtttggg

SEQ ID NO: 1655012 - DNA, 25 bp, Homo sapien
ggtgacccggcaccttgctaactgg

SEQ ID NO: 1655013 - DNA, 25 bp, Homo sapien
actgggcttagagtctaagggcttg

SEQ ID NO: 1655014 - DNA, 25 bp, Homo sapien
ttttatgggaacctgcagggtgacc

SEQ ID NO: 1655015 - DNA, 25 bp, Homo sapien
caggaagggatatcgggggcgtcca

SEQ ID NO: 1655016 - DNA, 25 bp, Homo sapien
tcaggaagggatatcgggggcgtcc

SEQ ID NO: 1655017 - DNA, 25 bp, Homo sapien
gcagccccgacctcagcgggctggc

SEQ ID NO: 1655018 - DNA, 25 bp, Homo sapien
ccgtcacgagcagttcaatgcccgt

SEQ ID NO: 1655019 - DNA, 25 bp, Homo sapien
tgcccgtgcagaagttggcttcgga

SEQ ID NO: 1655020 - DNA, 25 bp, Homo sapien
gagcagttcaatgcccgtgcagaag

SEQ ID NO: 1655021 - DNA, 25 bp, Homo sapien
ctggcattaaggctgccagctcctc

SEQ ID NO: 1655022 - DNA, 25 bp, Homo sapien
gattgtggccctagggtctggcatt

SEQ ID NO: 1655023 - DNA, 25 bp, Homo sapien
atgccctctcggattgtggccctag

SEQ ID NO: 1655024 - DNA, 25 bp, Homo sapien
cctagggtctggcattaaggctgcc

SEQ ID NO: 1655025 - DNA, 25 bp, Homo sapien
gactcggacaccatatggactttca

SEQ ID NO: 1655026 - DNA, 25 bp, Homo sapien
gacaccatatggactttcatccagg

SEQ ID NO: 1655027 - DNA, 25 bp, Homo sapien
gttgactcggacaccatatggactt

SEQ ID NO: 1655028 - DNA, 25 bp, Homo sapien
cagttgactcggacaccatatggac

SEQ ID NO: 1655029 - DNA, 25 bp, Homo sapien
ttcccttgactcttccgcaggtagg

SEQ ID NO: 1655030 - DNA, 25 bp, Homo sapien
gattgcccccaccaggctggagatg

SEQ ID NO: 1655031 - DNA, 25 bp, Homo sapien
tggtggccacatagggaactgcctg

SEQ ID NO: 1655032 - DNA, 25 bp, Homo sapien
tggagatgttgatgacattcccttg

SEQ ID NO: 1655033 - DNA, 25 bp, Homo sapien
tcaggtcgtctagagtccagaaacc

SEQ ID NO: 1655034 - DNA, 25 bp, Homo sapien
caagagaggcggtgattacaaaagt

SEQ ID NO: 1655035 - DNA, 25 bp, Homo sapien
tagagctacttggtatcaggtcgtc

SEQ ID NO: 1655036 - DNA, 25 bp, Homo sapien
ttagtcagtcatagtggtgcacccc

SEQ ID NO: 1655037 - DNA, 25 bp, Homo sapien
tggtcaaggtgtacgtccccagtag

SEQ ID NO: 1655038 - DNA, 25 bp, Homo sapien
gtgtacgtccccagtaggttcagct

SEQ ID NO: 1655039 - DNA, 25 bp, Homo sapien
cagcagctggcggaatccctgggca

SEQ ID NO: 1655040 - DNA, 25 bp, Homo sapien
cttggtcaaggtgtacgtccccagt

SEQ ID NO: 1655041 - DNA, 25 bp, Homo sapien
aatccaggcggccaaatcggcggat

SEQ ID NO: 1655042 - DNA, 25 bp, Homo sapien
atcggcggatggtctcagaaaccag

SEQ ID NO: 1655043 - DNA, 25 bp, Homo sapien
ttgttgacaacacaatccaggcggc

SEQ ID NO: 1655044 - DNA, 25 bp, Homo sapien
gccaaatcggcggatggtctcagaa

SEQ ID NO: 1655045 - DNA, 25 bp, Homo sapien
aacctttgacgagtccagcggagcc

SEQ ID NO: 1655046 - DNA, 25 bp, Homo sapien
tggagtgacactgggtggaaacctt

SEQ ID NO: 1655047 - DNA, 25 bp, Homo sapien
ggtggaaacctttgacgagtccagc

SEQ ID NO: 1655048 - DNA, 25 bp, Homo sapien
gacactgggtggaaacctttgacga

SEQ ID NO: 1655049 - DNA, 25 bp, Homo sapien
acagaggataaagacagctccaggg

SEQ ID NO: 1655050 - DNA, 25 bp, Homo sapien
acatcacagaggataaagacagctc

SEQ ID NO: 1655051 - DNA, 25 bp, Homo sapien
atcacagaggataaagacagctcca

SEQ ID NO: 1655052 - DNA, 25 bp, Homo sapien
cacagaggataaagacagctccagg

SEQ ID NO: 1655053 - DNA, 25 bp, Homo sapien
ttgtcgcagataaccactcgggccc

SEQ ID NO: 1655054 - DNA, 25 bp, Homo sapien
agataaccactcgggccccgctgtt

SEQ ID NO: 1655055 - DNA, 25 bp, Homo sapien
catccttgtcgcagataaccactcg

SEQ ID NO: 1655056 - DNA, 25 bp, Homo sapien
tccttgtcgcagataaccactcggg

SEQ ID NO: 1655057 - DNA, 25 bp, Homo sapien
atcccagctccgatgccgcgcccgc

SEQ ID NO: 1655058 - DNA, 25 bp, Homo sapien
accttcccggcatagcgcgttcccg

SEQ ID NO: 1655059 - DNA, 25 bp, Homo sapien
cggcatagcgcgttcccgtagccat

SEQ ID NO: 1655060 - DNA, 25 bp, Homo sapien
cgaaggcgcgcacgatcccagctcc

SEQ ID NO: 1655061 - DNA, 25 bp, Homo sapien
gcgttgccaggaaggctagagacct

SEQ ID NO: 1655062 - DNA, 25 bp, Homo sapien
ccgtcgcatcaaatcctcaatagag

SEQ ID NO: 1655063 - DNA, 25 bp, Homo sapien
tgccaggaaggctagagacctggaa

SEQ ID NO: 1655064 - DNA, 25 bp, Homo sapien
tctttcacctccaaagccccgtgag

SEQ ID NO: 1655065 - DNA, 25 bp, Homo sapien
caaactttggccatagaaaccattc

SEQ ID NO: 1655066 - DNA, 25 bp, Homo sapien
agttttaatccaaatttagacagtg

SEQ ID NO: 1655067 - DNA, 25 bp, Homo sapien
tttggccatagaaaccattcccctc

SEQ ID NO: 1655068 - DNA, 25 bp, Homo sapien
accaaactttggccatagaaaccat

SEQ ID NO: 1655069 - DNA, 25 bp, Homo sapien
acgtcctcgcgctccgattggctgc

SEQ ID NO: 1655070 - DNA, 25 bp, Homo sapien
tggtcccagatctccggcggtacct

SEQ ID NO: 1655071 - DNA, 25 bp, Homo sapien
ctgatgccctgagtggtcccagatc

SEQ ID NO: 1655072 - DNA, 25 bp, Homo sapien
agaccacgtcctcgcgctccgattg

SEQ ID NO: 1655073 - DNA, 25 bp, Homo sapien
gattgtagcagagtgactcgcagag

SEQ ID NO: 1655074 - DNA, 25 bp, Homo sapien
ggcgatcccggcatcccacgcgggc

SEQ ID NO: 1655075 - DNA, 25 bp, Homo sapien
tccctcggcgagagaaccccgtgga

SEQ ID NO: 1655076 - DNA, 25 bp, Homo sapien
ccctcgtcttgtggcaggaccggag

SEQ ID NO: 1655077 - DNA, 25 bp, Homo sapien
gtggggtccgaaggaggcagcggca

SEQ ID NO: 1655078 - DNA, 25 bp, Homo sapien
tggcgcgtggggtccgaaggaggca

SEQ ID NO: 1655079 - DNA, 25 bp, Homo sapien
gcggcacaccgggaagagggtctcc

SEQ ID NO: 1655080 - DNA, 25 bp, Homo sapien
gtccgaaggaggcagcggcacaccg

SEQ ID NO: 1655081 - DNA, 25 bp, Homo sapien
tctggatacgccagtccagtcctct

SEQ ID NO: 1655082 - DNA, 25 bp, Homo sapien
gaatggcaaacctcagcgctaggac

SEQ ID NO: 1655083 - DNA, 25 bp, Homo sapien
tcagatccaggagtctggatacgcc

SEQ ID NO: 1655084 - DNA, 25 bp, Homo sapien
tgagtgggacatgagaatggcaaac

SEQ ID NO: 1655085 - DNA, 25 bp, Homo sapien
gtcatcattctgtgccactgcgacg

SEQ ID NO: 1655086 - DNA, 25 bp, Homo sapien
catcattctgtgccactgcgacgcc

SEQ ID NO: 1655087 - DNA, 25 bp, Homo sapien
tcatcattctgtgccactgcgacgc

SEQ ID NO: 1655088 - DNA, 25 bp, Homo sapien
ctgtcatcattctgtgccactgcga

SEQ ID NO: 1655089 - DNA, 25 bp, Homo sapien
tagccagggcttgggagaggctgag

SEQ ID NO: 1655090 - DNA, 25 bp, Homo sapien
gtagccagggcttgggagaggctga

SEQ ID NO: 1655091 - DNA, 25 bp, Homo sapien
ttgggagaggctgagaacccgctcc

SEQ ID NO: 1655092 - DNA, 25 bp, Homo sapien
aggacccagagcttctgagccattt

SEQ ID NO: 1655093 - DNA, 25 bp, Homo sapien
ccaggacccagagcttctgagccat

SEQ ID NO: 1655094 - DNA, 25 bp, Homo sapien
tgagccatttctgggctcccgagtg

SEQ ID NO: 1655095 - DNA, 25 bp, Homo sapien
ttctgagccatttctgggctcccga

SEQ ID NO: 1655096 - DNA, 25 bp, Homo sapien
ttcctggtttctgcgcatccgctcc

SEQ ID NO: 1655097 - DNA, 25 bp, Homo sapien
gagggaagggccgtccacattcctg

SEQ ID NO: 1655098 - DNA, 25 bp, Homo sapien
ttgctccacgtcaggctggcgtctg

SEQ ID NO: 1655099 - DNA, 25 bp, Homo sapien
tggtttctgcgcatccgctccagct

SEQ ID NO: 1655100 - DNA, 25 bp, Homo sapien
tgctctgagtatggccttagaacgc

SEQ ID NO: 1655101 - DNA, 25 bp, Homo sapien
cagcttagaagcgacagagacaaaa

SEQ ID NO: 1655102 - DNA, 25 bp, Homo sapien
cctgatggtcagatgcaaggattac

SEQ ID NO: 1655103 - DNA, 25 bp, Homo sapien
ggtggtaggttctgctattagcccc

SEQ ID NO: 1655104 - DNA, 25 bp, Homo sapien
tggttcctagctgtggggaagggag

SEQ ID NO: 1655105 - DNA, 25 bp, Homo sapien
cttggttcctagctgtggggaaggg

SEQ ID NO: 1655106 - DNA, 25 bp, Homo sapien
ggtggcgaccctcagggctggaagc

SEQ ID NO: 1655107 - DNA, 25 bp, Homo sapien
ttggttcctagctgtggggaaggga

SEQ ID NO: 1655108 - DNA, 25 bp, Homo sapien
aaagacagaacgggacttggtgagg

SEQ ID NO: 1655109 - DNA, 25 bp, Homo sapien
ctggaaagacagaacgggacttggt

SEQ ID NO: 1655110 - DNA, 25 bp, Homo sapien
ggaaagacagaacgggacttggtga

SEQ ID NO: 1655111 - DNA, 25 bp, Homo sapien
agacagaacgggacttggtgaggac

SEQ ID NO: 1655112 - DNA, 25 bp, Homo sapien
cgaggtctttgtcgcctccaggagg

SEQ ID NO: 1655113 - DNA, 25 bp, Homo sapien
cccagtcagtctcgggggacctagg

SEQ ID NO: 1655114 - DNA, 25 bp, Homo sapien
ggcgaggtctttgtcgcctccagga

SEQ ID NO: 1655115 - DNA, 25 bp, Homo sapien
ggctggcgaggtctttgtcgcctcc

SEQ ID NO: 1655116 - DNA, 25 bp, Homo sapien
agtcaggctcagtgtgtgggggcgg

SEQ ID NO: 1655117 - DNA, 25 bp, Homo sapien
tcctcgccctggagcacgggagatg

SEQ ID NO: 1655118 - DNA, 25 bp, Homo sapien
ggactcctcgccctggagcacggga

SEQ ID NO: 1655119 - DNA, 25 bp, Homo sapien
actcctcgccctggagcacgggaga

SEQ ID NO: 1655120 - DNA, 25 bp, Homo sapien
tgccagcgtgtcttccaccatccac

SEQ ID NO: 1655121 - DNA, 25 bp, Homo sapien
gctgctgctgagcagacactctgtc

SEQ ID NO: 1655122 - DNA, 25 bp, Homo sapien
cacagctgctgctgagcagacactc

SEQ ID NO: 1655123 - DNA, 25 bp, Homo sapien
ctgccagcgtgtcttccaccatcca

SEQ ID NO: 1655124 - DNA, 25 bp, Homo sapien
gcgtctctcttaaggtgcccagctc

SEQ ID NO: 1655125 - DNA, 25 bp, Homo sapien
ccaggccactgtacgtgtcccaaac

SEQ ID NO: 1655126 - DNA, 25 bp, Homo sapien
gcaggtactccagcgtctctcttaa

SEQ ID NO: 1655127 - DNA, 25 bp, Homo sapien
gagaaccaaggtgcagcaggtactc

SEQ ID NO: 1655128 - DNA, 25 bp, Homo sapien
actccagagctgcttctagttgctc

SEQ ID NO: 1655129 - DNA, 25 bp, Homo sapien
actgaccagccggtcctgcaagagg

SEQ ID NO: 1655130 - DNA, 25 bp, Homo sapien
ggcccagctgttgccgggtcaactc

SEQ ID NO: 1655131 - DNA, 25 bp, Homo sapien
agagggtggccctcacactgaccag

SEQ ID NO: 1655132 - DNA, 25 bp, Homo sapien
cctgcttctggtctatctcctcctg

SEQ ID NO: 1655133 - DNA, 25 bp, Homo sapien
ctgcttctggtctatctcctcctgc

SEQ ID NO: 1655134 - DNA, 25 bp, Homo sapien
tcctgcttctggtctatctcctcct

SEQ ID NO: 1655135 - DNA, 25 bp, Homo sapien
tgcttctggtctatctcctcctgca

SEQ ID NO: 1655136 - DNA, 25 bp, Homo sapien
ctgcccgcacaacttggtcagcagc

SEQ ID NO: 1655137 - DNA, 25 bp, Homo sapien
tgcccgcacaacttggtcagcagcg

SEQ ID NO: 1655138 - DNA, 25 bp, Homo sapien
gcccgcacaacttggtcagcagcgt

SEQ ID NO: 1655139 - DNA, 25 bp, Homo sapien
atctgtctccaagctttggtggaaa

SEQ ID NO: 1655140 - DNA, 25 bp, Homo sapien
agctttggtggaaagttgactccag

SEQ ID NO: 1655141 - DNA, 25 bp, Homo sapien
caagctttggtggaaagttgactcc

SEQ ID NO: 1655142 - DNA, 25 bp, Homo sapien
gtctccaagctttggtggaaagttg

SEQ ID NO: 1655143 - DNA, 25 bp, Homo sapien
agtagaccaacttccacattcttgg

SEQ ID NO: 1655144 - DNA, 25 bp, Homo sapien
taggtgggacaacagatgccagcca

SEQ ID NO: 1655145 - DNA, 25 bp, Homo sapien
cagaaagatcaataatgggctcttg

SEQ ID NO: 1655146 - DNA, 25 bp, Homo sapien
gcattagcaaatttcagtagaccaa

SEQ ID NO: 1655147 - DNA, 25 bp, Homo sapien
gataagtgggggagccagagtgtgc

SEQ ID NO: 1655148 - DNA, 25 bp, Homo sapien
ctggagataagtgggggagccagag

SEQ ID NO: 1655149 - DNA, 25 bp, Homo sapien
tggagataagtgggggagccagagt

SEQ ID NO: 1655150 - DNA, 25 bp, Homo sapien
gagataagtgggggagccagagtgt

SEQ ID NO: 1655151 - DNA, 25 bp, Homo sapien
ggaggtcggacatcaatgcgactca

SEQ ID NO: 1655152 - DNA, 25 bp, Homo sapien
tcggacatcaatgcgactcaacggg

SEQ ID NO: 1655153 - DNA, 25 bp, Homo sapien
tccagaggaggtcggacatcaatgc

SEQ ID NO: 1655154 - DNA, 25 bp, Homo sapien
gccccaatccagaggaggtcggaca

SEQ ID NO: 1655155 - DNA, 25 bp, Homo sapien
cgcgcaggggcagaacggggacggg

SEQ ID NO: 1655156 - DNA, 25 bp, Homo sapien
aaggacatgtctcacttcactgtgt

SEQ ID NO: 1655157 - DNA, 25 bp, Homo sapien
tcccactgggttagaatcctcctct

SEQ ID NO: 1655158 - DNA, 25 bp, Homo sapien
cctcagtaatgtccgctttgtggca

SEQ ID NO: 1655159 - DNA, 25 bp, Homo sapien
cactgtgtcttactgtcccactggg

SEQ ID NO: 1655160 - DNA, 25 bp, Homo sapien
tcacttccggtgattctgagatgcg

SEQ ID NO: 1655161 - DNA, 25 bp, Homo sapien
tgggtctaccacgacctctggagag

SEQ ID NO: 1655162 - DNA, 25 bp, Homo sapien
gagcagcctgggtctaccacgacct

SEQ ID NO: 1655163 - DNA, 25 bp, Homo sapien
gacctctggagagtcgagtcacttc

SEQ ID NO: 1655164 - DNA, 25 bp, Homo sapien
ggtcgtgcaggtgacctgggttgcc

SEQ ID NO: 1655165 - DNA, 25 bp, Homo sapien
tcgtgcaggtgacctgggttgccca

SEQ ID NO: 1655166 - DNA, 25 bp, Homo sapien
ctggggtcgtgcaggtgacctgggt

SEQ ID NO: 1655167 - DNA, 25 bp, Homo sapien
cccgggctggggtcgtgcaggtgac

SEQ ID NO: 1655168 - DNA, 25 bp, Homo sapien
aggtcttctaaggtgtcagcggcca

SEQ ID NO: 1655169 - DNA, 25 bp, Homo sapien
caaaacgtaggtcctcatgcccggg

SEQ ID NO: 1655170 - DNA, 25 bp, Homo sapien
gccaaaacgtaggtcctcatgcccg

SEQ ID NO: 1655171 - DNA, 25 bp, Homo sapien
tctaaggtgtcagcggccaaaacgt

SEQ ID NO: 1655172 - DNA, 25 bp, Homo sapien
catctggtctaatattgtagctggg

SEQ ID NO: 1655173 - DNA, 25 bp, Homo sapien
ggtgaaggtgaagcgccgccctcgg

SEQ ID NO: 1655174 - DNA, 25 bp, Homo sapien
ggagcaggacgctgcctaggacact

SEQ ID NO: 1655175 - DNA, 25 bp, Homo sapien
cggcccatctggtctaatattgtag

SEQ ID NO: 1655176 - DNA, 25 bp, Homo sapien
ccagcggcgtttccagagacggagc

SEQ ID NO: 1655177 - DNA, 25 bp, Homo sapien
gagaggacgaaccagcggcgtttcc

SEQ ID NO: 1655178 - DNA, 25 bp, Homo sapien
gcgtttccagagacggagccccgag

SEQ ID NO: 1655179 - DNA, 25 bp, Homo sapien
gccggagaggacgaaccagcggcgt

SEQ ID NO: 1655180 - DNA, 25 bp, Homo sapien
tgcctctcttcccaaaggcgtggat

SEQ ID NO: 1655181 - DNA, 25 bp, Homo sapien
tgcacgggaaggttgggatccctcc

SEQ ID NO: 1655182 - DNA, 25 bp, Homo sapien
gttgggatccctcctgagcgcattg

SEQ ID NO: 1655183 - DNA, 25 bp, Homo sapien
tgaagccagcctcggatgtgcacgg

SEQ ID NO: 1655184 - DNA, 25 bp, Homo sapien
ggctcaggctgctgagcgaggagat

SEQ ID NO: 1655185 - DNA, 25 bp, Homo sapien
aggctcaggctgctgcgaggtcggc

SEQ ID NO: 1655186 - DNA, 25 bp, Homo sapien
aggctgctgcgaggtcggctcccct

SEQ ID NO: 1655187 - DNA, 25 bp, Homo sapien
ctcaggctgctgcgaggtcggctcc

SEQ ID NO: 1655188 - DNA, 25 bp, Homo sapien
tgtctcttagctgctgtctctcata

SEQ ID NO: 1655189 - DNA, 25 bp, Homo sapien
gtctcttagctgctgtctctcatag

SEQ ID NO: 1655190 - DNA, 25 bp, Homo sapien
ttctctctggctctgccgtttcctc

SEQ ID NO: 1655191 - DNA, 25 bp, Homo sapien
aaaagctggaatctccgcgagaagt

SEQ ID NO: 1655192 - DNA, 25 bp, Homo sapien
gcgtggtcacgctcggaaactccgc

SEQ ID NO: 1655193 - DNA, 25 bp, Homo sapien
tgattgacagttcgtttgttggagg

SEQ ID NO: 1655194 - DNA, 25 bp, Homo sapien
ccgccgtgacgttgcaaaagctgga

SEQ ID NO: 1655195 - DNA, 25 bp, Homo sapien
gaaggctgtgtacgctgtcacgcaa

SEQ ID NO: 1655196 - DNA, 25 bp, Homo sapien
caagtgactagccagatagaaagca

SEQ ID NO: 1655197 - DNA, 25 bp, Homo sapien
caatcccttgtaagaggccaggccc

SEQ ID NO: 1655198 - DNA, 25 bp, Homo sapien
tagagaatcccgtgacagtgacagg

SEQ ID NO: 1655199 - DNA, 25 bp, Homo sapien
gcagcggctgccctggacctcagtg

SEQ ID NO: 1655200 - DNA, 25 bp, Homo sapien
gaccaactggtttgcctataattta

SEQ ID NO: 1655201 - DNA, 25 bp, Homo sapien
agcttgctcgggatcgcagccgctt

SEQ ID NO: 1655202 - DNA, 25 bp, Homo sapien
agaccacgcccttgagccaagctgt

SEQ ID NO: 1655203 - DNA, 25 bp, Homo sapien
tcctccgttgctttgataccagtgg

SEQ ID NO: 1655204 - DNA, 25 bp, Homo sapien
aattgagtcacggatccctaaaagg

SEQ ID NO: 1655205 - DNA, 25 bp, Homo sapien
taccagtgggtatcgaggtccccaa

SEQ ID NO: 1655206 - DNA, 25 bp, Homo sapien
gactcgagagaatcacgtgcaaggg

SEQ ID NO: 1655207 - DNA, 25 bp, Homo sapien
taaccaaggggtaaaatactcatga

SEQ ID NO: 1655208 - DNA, 25 bp, Homo sapien
tttattgagttattcaacagccagc

SEQ ID NO: 1655209 - DNA, 25 bp, Homo sapien
gcctggagcgggctaaatggaaagc

SEQ ID NO: 1655210 - DNA, 25 bp, Homo sapien
ccactcggccgaactggagcaccag

SEQ ID NO: 1655211 - DNA, 25 bp, Homo sapien
tgggcccactcggccgaactggagc

SEQ ID NO: 1655212 - DNA, 25 bp, Homo sapien
cctggagcgggctaaatggaaagca

SEQ ID NO: 1655213 - DNA, 25 bp, Homo sapien
gctaaactggtttccaggagctcac

SEQ ID NO: 1655214 - DNA, 25 bp, Homo sapien
ccggctaaactggtttccaggagct

SEQ ID NO: 1655215 - DNA, 25 bp, Homo sapien
ctggcccggctaaactggtttccag

SEQ ID NO: 1655216 - DNA, 25 bp, Homo sapien
ggctaaactggtttccaggagctca

SEQ ID NO: 1655217 - DNA, 25 bp, Homo sapien
gtaacgactcagtagcgactcctgt

SEQ ID NO: 1655218 - DNA, 25 bp, Homo sapien
gagcgtgtagacaccgttctccttg

SEQ ID NO: 1655219 - DNA, 25 bp, Homo sapien
ccgagtgactcgaccatggaaattg

SEQ ID NO: 1655220 - DNA, 25 bp, Homo sapien
aagttcttcaccgaagcccgagtga

SEQ ID NO: 1655221 - DNA, 25 bp, Homo sapien
tactgccgtgtagggtttccattgg

SEQ ID NO: 1655222 - DNA, 25 bp, Homo sapien
ctgccgtgtagggtttccattggct

SEQ ID NO: 1655223 - DNA, 25 bp, Homo sapien
ctactgccgtgtagggtttccattg

SEQ ID NO: 1655224 - DNA, 25 bp, Homo sapien
ccctactgccgtgtagggtttccat

SEQ ID NO: 1655225 - DNA, 25 bp, Homo sapien
gtcattttccgaggccccaggtatc

SEQ ID NO: 1655226 - DNA, 25 bp, Homo sapien
ccaggtatcctaagacgttgggctc

SEQ ID NO: 1655227 - DNA, 25 bp, Homo sapien
gtggctggacattgattcgctggtt

SEQ ID NO: 1655228 - DNA, 25 bp, Homo sapien
attcgctggttctggctgttggttc

SEQ ID NO: 1655229 - DNA, 25 bp, Homo sapien
gcagtattcctggttaaatgctccc

SEQ ID NO: 1655230 - DNA, 25 bp, Homo sapien
taaatgctcccggtcaggattcacc

SEQ ID NO: 1655231 - DNA, 25 bp, Homo sapien
ccagctcctgtctgatccgggcagt

SEQ ID NO: 1655232 - DNA, 25 bp, Homo sapien
gctcctgtctgatccgggcagtatt

SEQ ID NO: 1655233 - DNA, 25 bp, Homo sapien
ttcttctctttcgcccagccaggag

SEQ ID NO: 1655234 - DNA, 25 bp, Homo sapien
atgaggtaattagaagttttgctcc

SEQ ID NO: 1655235 - DNA, 25 bp, Homo sapien
cccgagataggtgtgtaggatccag

SEQ ID NO: 1655236 - DNA, 25 bp, Homo sapien
tgactttgcccacgaaattgtcccc

SEQ ID NO: 1655237 - DNA, 25 bp, Homo sapien
tcagaggtctccaggtagaggtagt

SEQ ID NO: 1655238 - DNA, 25 bp, Homo sapien
tagcactgcatcatggtgcccggga

SEQ ID NO: 1655239 - DNA, 25 bp, Homo sapien
caactcttcgttgtgtgctgctgag

SEQ ID NO: 1655240 - DNA, 25 bp, Homo sapien
gcttcgtgcctcatatggtcgctgt

SEQ ID NO: 1655241 - DNA, 25 bp, Homo sapien
cttcttccaatatcctgagtgattg

SEQ ID NO: 1655242 - DNA, 25 bp, Homo sapien
cttccaatatcctgagtgattgtgc

SEQ ID NO: 1655243 - DNA, 25 bp, Homo sapien
tcttccaatatcctgagtgattgtg

SEQ ID NO: 1655244 - DNA, 25 bp, Homo sapien
ctcttcttccaatatcctgagtgat

SEQ ID NO: 1655245 - DNA, 25 bp, Homo sapien
catctcccatatcctgggagtcact

SEQ ID NO: 1655246 - DNA, 25 bp, Homo sapien
gtgtgcatctcccatatcctgggag

SEQ ID NO: 1655247 - DNA, 25 bp, Homo sapien
tgcatctcccatatcctgggagtca

SEQ ID NO: 1655248 - DNA, 25 bp, Homo sapien
tttggaaggccaagttttcatatac

SEQ ID NO: 1655249 - DNA, 25 bp, Homo sapien
tcctccaattctgcatcggaattgt

SEQ ID NO: 1655250 - DNA, 25 bp, Homo sapien
attctcggagactgtttaaaaggtg

SEQ ID NO: 1655251 - DNA, 25 bp, Homo sapien
caacccttgcgtcggattctcggag

SEQ ID NO: 1655252 - DNA, 25 bp, Homo sapien
gagagacggaaccattctccacgga

SEQ ID NO: 1655253 - DNA, 25 bp, Homo sapien
gaaaggggactggagaccgagattc

SEQ ID NO: 1655254 - DNA, 25 bp, Homo sapien
aaggggactggagaccgagattcct

SEQ ID NO: 1655255 - DNA, 25 bp, Homo sapien
ggggactggagaccgagattcctga

SEQ ID NO: 1655256 - DNA, 25 bp, Homo sapien
aggggactggagaccgagattcctg

SEQ ID NO: 1655257 - DNA, 25 bp, Homo sapien
tctgtccgcggtgtcgggaggccgc

SEQ ID NO: 1655258 - DNA, 25 bp, Homo sapien
cagggcactgtggatgccagagggc

SEQ ID NO: 1655259 - DNA, 25 bp, Homo sapien
agggcactgtggatgccagagggca

SEQ ID NO: 1655260 - DNA, 25 bp, Homo sapien
tgcttctgtccgcggtgtcgggagg

SEQ ID NO: 1655261 - DNA, 25 bp, Homo sapien
gcgccaaagccacggggaagcgtca

SEQ ID NO: 1655262 - DNA, 25 bp, Homo sapien
agctcctggcgcttctgtcgctgct

SEQ ID NO: 1655263 - DNA, 25 bp, Homo sapien
ggaagcgtcaggattggcctgaacc

SEQ ID NO: 1655264 - DNA, 25 bp, Homo sapien
tcctcccgcagacaagagcgccaaa

SEQ ID NO: 1655265 - DNA, 25 bp, Homo sapien
agcctcatagcagcgagctcatgcc

SEQ ID NO: 1655266 - DNA, 25 bp, Homo sapien
agcagcgagctcatgccccaggatg

SEQ ID NO: 1655267 - DNA, 25 bp, Homo sapien
tgcagcctcatagcagcgagctcat

SEQ ID NO: 1655268 - DNA, 25 bp, Homo sapien
tcatagcagcgagctcatgccccag

SEQ ID NO: 1655269 - DNA, 25 bp, Homo sapien
acacaggcccatggtgacagtgcac

SEQ ID NO: 1655270 - DNA, 25 bp, Homo sapien
gagacacaggcccatggtgacagtg

SEQ ID NO: 1655271 - DNA, 25 bp, Homo sapien
gagagacacaggcccatggtgacag

SEQ ID NO: 1655272 - DNA, 25 bp, Homo sapien
gacacaggcccatggtgacagtgca

SEQ ID NO: 1655273 - DNA, 25 bp, Homo sapien
atcaatgtgtcattatcctgagaca

SEQ ID NO: 1655274 - DNA, 25 bp, Homo sapien
tcaatgtgtcattatcctgagacat

SEQ ID NO: 1655275 - DNA, 25 bp, Homo sapien
tatctgcgaaatagggaggagaaga

SEQ ID NO: 1655276 - DNA, 25 bp, Homo sapien
aagctggggacctaatctcgggata

SEQ ID NO: 1655277 - DNA, 25 bp, Homo sapien
tctgggacctgaactggtccactcc

SEQ ID NO: 1655278 - DNA, 25 bp, Homo sapien
tctcgggatatctgcgaaataggga

SEQ ID NO: 1655279 - DNA, 25 bp, Homo sapien
tcagactcagtcgtgggatcacctc

SEQ ID NO: 1655280 - DNA, 25 bp, Homo sapien
ggttctgaaagaacatgccctcagg

SEQ ID NO: 1655281 - DNA, 25 bp, Homo sapien
tgggcttccctagtgctgtccgtga

SEQ ID NO: 1655282 - DNA, 25 bp, Homo sapien
tggatcatgtctggcccaagatggg

SEQ ID NO: 1655283 - DNA, 25 bp, Homo sapien
tactgtactggacagcgcagatcca

SEQ ID NO: 1655284 - DNA, 25 bp, Homo sapien
gaaagtcaagtcagatgcaggtgga

SEQ ID NO: 1655285 - DNA, 25 bp, Homo sapien
taaacagcccatgtggctagcggct

SEQ ID NO: 1655286 - DNA, 25 bp, Homo sapien
taaccactggatttgcaagatgagg

SEQ ID NO: 1655287 - DNA, 25 bp, Homo sapien
cctcttcccttcagatatcaacagt

SEQ ID NO: 1655288 - DNA, 25 bp, Homo sapien
tcccttcagatatcaacagtgatgg

SEQ ID NO: 1655289 - DNA, 25 bp, Homo sapien
tcagatatcaacagtgatggtgtcc

SEQ ID NO: 1655290 - DNA, 25 bp, Homo sapien
accaaggaggtgagcatcttggaag

SEQ ID NO: 1655291 - DNA, 25 bp, Homo sapien
cttcactcagggtcccttcagccac

SEQ ID NO: 1655292 - DNA, 25 bp, Homo sapien
actcagggtcccttcagccacaagg

SEQ ID NO: 1655293 - DNA, 25 bp, Homo sapien
ttcactcagggtcccttcagccaca

SEQ ID NO: 1655294 - DNA, 25 bp, Homo sapien
cagggtcccttcagccacaaggaca

SEQ ID NO: 1655295 - DNA, 25 bp, Homo sapien
tgaggccctgtctctaatagaaaaa

SEQ ID NO: 1655296 - DNA, 25 bp, Homo sapien
gtgagccatgatctatcactccact

SEQ ID NO: 1655297 - DNA, 25 bp, Homo sapien
gagccatgatctatcactccactgc

SEQ ID NO: 1655298 - DNA, 25 bp, Homo sapien
gaatgaggccctgtctctaatagaa

SEQ ID NO: 1655299 - DNA, 25 bp, Homo sapien
tggggggtttcaggagaggatgaca

SEQ ID NO: 1655300 - DNA, 25 bp, Homo sapien
ggaggatgactcaagctcagagctc

SEQ ID NO: 1655301 - DNA, 25 bp, Homo sapien
ttcgggctgctggaaagactttttc

SEQ ID NO: 1655302 - DNA, 25 bp, Homo sapien
caaagagcaggtgacattaaagcca

SEQ ID NO: 1655303 - DNA, 25 bp, Homo sapien
ttaaatacggaagcgacaagacctg

SEQ ID NO: 1655304 - DNA, 25 bp, Homo sapien
gaaagacttctaagggcaggtgaca

SEQ ID NO: 1655305 - DNA, 25 bp, Homo sapien
tctttgtggcgggagtgctcaccgc

SEQ ID NO: 1655306 - DNA, 25 bp, Homo sapien
tggcagaccgtgaccatctttgtgg

SEQ ID NO: 1655307 - DNA, 25 bp, Homo sapien
cactgaagcgactgatgtccctgtc

SEQ ID NO: 1655308 - DNA, 25 bp, Homo sapien
tgagtccagctctttaatgcccgtt

SEQ ID NO: 1655309 - DNA, 25 bp, Homo sapien
cacaccgctgcgtggtcttagggac

SEQ ID NO: 1655310 - DNA, 25 bp, Homo sapien
tcttaaccgctggaaatagaggcgc

SEQ ID NO: 1655311 - DNA, 25 bp, Homo sapien
gattgagttcggtcttgtgagccct

SEQ ID NO: 1655312 - DNA, 25 bp, Homo sapien
cagccttctttgtgcggtcgggtaa

SEQ ID NO: 1655313 - DNA, 25 bp, Homo sapien
tacgtacccgctgcatccatggcta

SEQ ID NO: 1655314 - DNA, 25 bp, Homo sapien
aaccatacccctcaagcctctgctc

SEQ ID NO: 1655315 - DNA, 25 bp, Homo sapien
ccatggctacccaaccatacccctc

SEQ ID NO: 1655316 - DNA, 25 bp, Homo sapien
gtacgtacccgctgcatccatggct

SEQ ID NO: 1655317 - DNA, 25 bp, Homo sapien
aggaagtgaagcttatcaagaagat

SEQ ID NO: 1655318 - DNA, 25 bp, Homo sapien
gcttatcaagaagatgggtgaccac

SEQ ID NO: 1655319 - DNA, 25 bp, Homo sapien
cttcctggagactcacttcctagat

SEQ ID NO: 1655320 - DNA, 25 bp, Homo sapien
tcctagatgaggaagtgaagcttat

SEQ ID NO: 1655321 - DNA, 25 bp, Homo sapien
tgggcgagtatctcttcgaaaggct

SEQ ID NO: 1655322 - DNA, 25 bp, Homo sapien
gagtatctcttcgaaaggctcactc

SEQ ID NO: 1655323 - DNA, 25 bp, Homo sapien
ggcgagtatctcttcgaaaggctca

SEQ ID NO: 1655324 - DNA, 25 bp, Homo sapien
gtatctcttcgaaaggctcactctc

SEQ ID NO: 1655325 - DNA, 25 bp, Homo sapien
gagcccagcgacttctgaagggccc

SEQ ID NO: 1655326 - DNA, 25 bp, Homo sapien
tgagcccagcgacttctgaagggcc

SEQ ID NO: 1655327 - DNA, 25 bp, Homo sapien
ccagcgacttctgaagggccccttg

SEQ ID NO: 1655328 - DNA, 25 bp, Homo sapien
gcgacttctgaagggccccttgcaa

SEQ ID NO: 1655329 - DNA, 25 bp, Homo sapien
cctctcaactgcaaaccaagcggtg

SEQ ID NO: 1655330 - DNA, 25 bp, Homo sapien
ggttctagaacccagtgacctcagt

SEQ ID NO: 1655331 - DNA, 25 bp, Homo sapien
cctttcaccaaagctgaaggcaggg

SEQ ID NO: 1655332 - DNA, 25 bp, Homo sapien
tggtaaggttccagatctagaagcc

SEQ ID NO: 1655333 - DNA, 25 bp, Homo sapien
gcagttgggaataagccaggttagg

SEQ ID NO: 1655334 - DNA, 25 bp, Homo sapien
cagttgggaataagccaggttaggg

SEQ ID NO: 1655335 - DNA, 25 bp, Homo sapien
gcaccaccgcagagtaatggcagat

SEQ ID NO: 1655336 - DNA, 25 bp, Homo sapien
ttcaaactctgaaagtgccccggct

SEQ ID NO: 1655337 - DNA, 25 bp, Homo sapien
cacgtggtttccagaacttggtggc

SEQ ID NO: 1655338 - DNA, 25 bp, Homo sapien
gattatgcatattctggagccagag

SEQ ID NO: 1655339 - DNA, 25 bp, Homo sapien
gagtgagctggaggtggccgtgtcc

SEQ ID NO: 1655340 - DNA, 25 bp, Homo sapien
tgtccacagagttgcgcttgctgcc

SEQ ID NO: 1655341 - DNA, 25 bp, Homo sapien
cgcggccactctggtgcacggatgt

SEQ ID NO: 1655342 - DNA, 25 bp, Homo sapien
tgcacggatgttgcgccggtccttg

SEQ ID NO: 1655343 - DNA, 25 bp, Homo sapien
cagcgccatgtggcgcgcagacata

SEQ ID NO: 1655344 - DNA, 25 bp, Homo sapien
cgttgggctcgtaggtgaagtgctc

SEQ ID NO: 1655345 - DNA, 25 bp, Homo sapien
ggctcgtaggtgaagtgctctggaa

SEQ ID NO: 1655346 - DNA, 25 bp, Homo sapien
ccatgtggcgcgcagacatatagta

SEQ ID NO: 1655347 - DNA, 25 bp, Homo sapien
aaccatgagccaccatcgcgatcgg

SEQ ID NO: 1655348 - DNA, 25 bp, Homo sapien
catgcgatccttcctgttaggcctc

SEQ ID NO: 1655349 - DNA, 25 bp, Homo sapien
taaagggacagcaactgttacaagt

SEQ ID NO: 1655350 - DNA, 25 bp, Homo sapien
gcctggttcattgcttaaagggaca

SEQ ID NO: 1655351 - DNA, 25 bp, Homo sapien
cgctccgtgcggttccgctggatga

SEQ ID NO: 1655352 - DNA, 25 bp, Homo sapien
ggatgatacgctgccgccggctctg

SEQ ID NO: 1655353 - DNA, 25 bp, Homo sapien
gccggctctgctgacagaaactgta

SEQ ID NO: 1655354 - DNA, 25 bp, Homo sapien
caggaatcatccaggctgcggaacc

SEQ ID NO: 1655355 - DNA, 25 bp, Homo sapien
aggacccaggttcagaaaacatcct

SEQ ID NO: 1655356 - DNA, 25 bp, Homo sapien
caggttcagaaaacatcctggggag

SEQ ID NO: 1655357 - DNA, 25 bp, Homo sapien
gacccaggttcagaaaacatcctgg

SEQ ID NO: 1655358 - DNA, 25 bp, Homo sapien
gccaggacccaggttcagaaaacat

SEQ ID NO: 1655359 - DNA, 25 bp, Homo sapien
atgaagcagccgaagccggagagat

SEQ ID NO: 1655360 - DNA, 25 bp, Homo sapien
gaggggtctgcgatgtgttcctcca

SEQ ID NO: 1655361 - DNA, 25 bp, Homo sapien
gggattcccataaccgtgcactcag

SEQ ID NO: 1655362 - DNA, 25 bp, Homo sapien
gccggagagattggtggagatactg

SEQ ID NO: 1655363 - DNA, 25 bp, Homo sapien
tcttacgaggagacttggccacact

SEQ ID NO: 1655364 - DNA, 25 bp, Homo sapien
tattgtatcacaaaagcacgcgctg

SEQ ID NO: 1655365 - DNA, 25 bp, Homo sapien
gatgggcactgggaacgtcttacga

SEQ ID NO: 1655366 - DNA, 25 bp, Homo sapien
cacgcgctgtagcagaacaggtgat

SEQ ID NO: 1655367 - DNA, 25 bp, Homo sapien
ccggtgtgtagccccaaggctcata

SEQ ID NO: 1655368 - DNA, 25 bp, Homo sapien
aggtgacagccacggacaaactcct

SEQ ID NO: 1655369 - DNA, 25 bp, Homo sapien
gagaggaactccgggtggaaaatca

SEQ ID NO: 1655370 - DNA, 25 bp, Homo sapien
gtgtgtagccccaaggctcatagta

SEQ ID NO: 1655371 - DNA, 25 bp, Homo sapien
agtcatccagcatattgtgggtgca

SEQ ID NO: 1655372 - DNA, 25 bp, Homo sapien
tcaccctgtcggcactgctattgaa

SEQ ID NO: 1655373 - DNA, 25 bp, Homo sapien
tgctattgaagaggccgattcggcg

SEQ ID NO: 1655374 - DNA, 25 bp, Homo sapien
cgattcggcggatggtggtcaggat

SEQ ID NO: 1655375 - DNA, 25 bp, Homo sapien
ccagcatcttgttcatgtcgggaag

SEQ ID NO: 1655376 - DNA, 25 bp, Homo sapien
tcttgttcatgtcgggaaggctccc

SEQ ID NO: 1655377 - DNA, 25 bp, Homo sapien
gcaaagatggctctcttcatcatag

SEQ ID NO: 1655378 - DNA, 25 bp, Homo sapien
tcatcatagtgaagtcttccttatc

SEQ ID NO: 1655379 - DNA, 25 bp, Homo sapien
accagtaaggattcataaagcttcc

SEQ ID NO: 1655380 - DNA, 25 bp, Homo sapien
ctgtcgcccaggatggcgcaatctc

SEQ ID NO: 1655381 - DNA, 25 bp, Homo sapien
tctgtcgcccaggatggcgcaatct

SEQ ID NO: 1655382 - DNA, 25 bp, Homo sapien
ctctgtcgcccaggatggcgcaatc

SEQ ID NO: 1655383 - DNA, 25 bp, Homo sapien
gggccttcgagtttgctgttcctca

SEQ ID NO: 1655384 - DNA, 25 bp, Homo sapien
ccaggacctggaatacatgaggagg

SEQ ID NO: 1655385 - DNA, 25 bp, Homo sapien
aataacactttctcagtgtggcctg

SEQ ID NO: 1655386 - DNA, 25 bp, Homo sapien
tctatgagacatgtcactccagccc

SEQ ID NO: 1655387 - DNA, 25 bp, Homo sapien
caggacccaaagcatgcatctggga

SEQ ID NO: 1655388 - DNA, 25 bp, Homo sapien
agactctaggagaaacacaggaccc

SEQ ID NO: 1655389 - DNA, 25 bp, Homo sapien
tctaggagaaacacaggacccaaag

SEQ ID NO: 1655390 - DNA, 25 bp, Homo sapien
gcatctgggagtgggctgcgccagg

SEQ ID NO: 1655391 - DNA, 25 bp, Homo sapien
ttccacgttgaaattgttggtccgc

SEQ ID NO: 1655392 - DNA, 25 bp, Homo sapien
gcacagcttggcctttgagggtttc

SEQ ID NO: 1655393 - DNA, 25 bp, Homo sapien
ttggtccgcgctggcatgatgaaga

SEQ ID NO: 1655394 - DNA, 25 bp, Homo sapien
tgtttgcgcacagcttggcctttga

SEQ ID NO: 1655395 - DNA, 25 bp, Homo sapien
gaagacgtcagcacccttgttggag

SEQ ID NO: 1655396 - DNA, 25 bp, Homo sapien
tctgagcagatagttgagccgagcc

SEQ ID NO: 1655397 - DNA, 25 bp, Homo sapien
gagccgagccaatgcctccaggaag

SEQ ID NO: 1655398 - DNA, 25 bp, Homo sapien
tgttggagaactcatagcggccggc

SEQ ID NO: 1655399 - DNA, 25 bp, Homo sapien
aatggccccgcacaaactcctggat

SEQ ID NO: 1655400 - DNA, 25 bp, Homo sapien
tctgagcatggaggttctggaactc

SEQ ID NO: 1655401 - DNA, 25 bp, Homo sapien
cattcagcccattgggggtcacaat

SEQ ID NO: 1655402 - DNA, 25 bp, Homo sapien
tcctggattcgagccttgctctgag

SEQ ID NO: 1655403 - DNA, 25 bp, Homo sapien
tgccgccctttccatgcagtatcgg

SEQ ID NO: 1655404 - DNA, 25 bp, Homo sapien
acacagtagtgaagacgtgagcgca

SEQ ID NO: 1655405 - DNA, 25 bp, Homo sapien
ctcgatggcggtgatctgggacaca

SEQ ID NO: 1655406 - DNA, 25 bp, Homo sapien
gtatcggtggtagatctgcctctcc

SEQ ID NO: 1655407 - DNA, 25 bp, Homo sapien
caaccactcatggaagtgagcaacc

SEQ ID NO: 1655408 - DNA, 25 bp, Homo sapien
tgttgtagaagtccacggcaccggc

SEQ ID NO: 1655409 - DNA, 25 bp, Homo sapien
catgggtggtgaagatggttgctac

SEQ ID NO: 1655410 - DNA, 25 bp, Homo sapien
acaggcagagtccaacgcctgccaa

SEQ ID NO: 1655411 - DNA, 25 bp, Homo sapien
tgagtccagcaatatcacactagag

SEQ ID NO: 1655412 - DNA, 25 bp, Homo sapien
aaaggaccctatgactcccagaatg

SEQ ID NO: 1655413 - DNA, 25 bp, Homo sapien
tgaagttggcatcgagagtagagcc

SEQ ID NO: 1655414 - DNA, 25 bp, Homo sapien
ggattcatgagcatccagggcagca

SEQ ID NO: 1655415 - DNA, 25 bp, Homo sapien
actccgatgttgcaggtatcccaga

SEQ ID NO: 1655416 - DNA, 25 bp, Homo sapien
ggaaccaggtggtcagaaagccaaa

SEQ ID NO: 1655417 - DNA, 25 bp, Homo sapien
cagcgtcgttggcctcgcggtcgta

SEQ ID NO: 1655418 - DNA, 25 bp, Homo sapien
gaaagccaaagaggacagcgtcgtt

SEQ ID NO: 1655419 - DNA, 25 bp, Homo sapien
tcatggctcactgggctgggcgcgg

SEQ ID NO: 1655420 - DNA, 25 bp, Homo sapien
gggcgtggcagcatgtgcctgaggt

SEQ ID NO: 1655421 - DNA, 25 bp, Homo sapien
aatcatggctcactgggctgggcgc

SEQ ID NO: 1655422 - DNA, 25 bp, Homo sapien
ccgggcgtggcagcatgtgcctgag

SEQ ID NO: 1655423 - DNA, 25 bp, Homo sapien
gaccaggctgtctttcgatcttgct

SEQ ID NO: 1655424 - DNA, 25 bp, Homo sapien
tattagcatgtccattagccaagga

SEQ ID NO: 1655425 - DNA, 25 bp, Homo sapien
gcaccgctagaaggtagacgctatt

SEQ ID NO: 1655426 - DNA, 25 bp, Homo sapien
ttctgaaacatctggtggcctctct

SEQ ID NO: 1655427 - DNA, 25 bp, Homo sapien
ggaagtagttgtcgccccattcgtc

SEQ ID NO: 1655428 - DNA, 25 bp, Homo sapien
gcagcccttgctgttcatggaatcc

SEQ ID NO: 1655429 - DNA, 25 bp, Homo sapien
tctgcagcaccgtgtagatgccacc

SEQ ID NO: 1655430 - DNA, 25 bp, Homo sapien
cgtgtacggccccaccaggaagtag

SEQ ID NO: 1655431 - DNA, 25 bp, Homo sapien
gtgggcccaagcgtgtgagggcagg

SEQ ID NO: 1655432 - DNA, 25 bp, Homo sapien
gggcccaagcgtgtgagggcaggcc

SEQ ID NO: 1655433 - DNA, 25 bp, Homo sapien
caggccccggccgaggtccatagtt

SEQ ID NO: 1655434 - DNA, 25 bp, Homo sapien
ctgtgggcccaagcgtgtgagggca

SEQ ID NO: 1655435 - DNA, 25 bp, Homo sapien
acctcccaggccacttcgaagagca

SEQ ID NO: 1655436 - DNA, 25 bp, Homo sapien
catggacaaagtgcggtttaaaggc

SEQ ID NO: 1655437 - DNA, 25 bp, Homo sapien
aggacatggacaaagtgcggtttaa

SEQ ID NO: 1655438 - DNA, 25 bp, Homo sapien
tgcgttctccaggtcgaattcatcc

SEQ ID NO: 1655439 - DNA, 25 bp, Homo sapien
ggctggcgcaggaaggggggctccg

SEQ ID NO: 1655440 - DNA, 25 bp, Homo sapien
tcggcttcctattgcaagaccgcac

SEQ ID NO: 1655441 - DNA, 25 bp, Homo sapien
gtgcccgacgggaagcttgcaagac

SEQ ID NO: 1655442 - DNA, 25 bp, Homo sapien
aagacgctcggcttcctattgcaag

SEQ ID NO: 1655443 - DNA, 25 bp, Homo sapien
cgggaagcttgcaagacgctcggct

SEQ ID NO: 1655444 - DNA, 25 bp, Homo sapien
gatctttgaagaaccagctagccta

SEQ ID NO: 1655445 - DNA, 25 bp, Homo sapien
gaattttgcaatcggcctgagcggg

SEQ ID NO: 1655446 - DNA, 25 bp, Homo sapien
tttacggaaacgagtggccttcagc

SEQ ID NO: 1655447 - DNA, 25 bp, Homo sapien
gatttccgcgtgtcctcattggtgg

SEQ ID NO: 1655448 - DNA, 25 bp, Homo sapien
tgaccctcagcgctctggaatgtcc

SEQ ID NO: 1655449 - DNA, 25 bp, Homo sapien
tgtggcttctaaggtcctccgggag

SEQ ID NO: 1655450 - DNA, 25 bp, Homo sapien
tatagcttcgcatggccacatgtgg

SEQ ID NO: 1655451 - DNA, 25 bp, Homo sapien
tggaatgtccctagtcctgactacc

SEQ ID NO: 1655452 - DNA, 25 bp, Homo sapien
gtcagggctccaggagtcgggatgg

SEQ ID NO: 1655453 - DNA, 25 bp, Homo sapien
tcagggctccaggagtcgggatgga

SEQ ID NO: 1655454 - DNA, 25 bp, Homo sapien
cagggctccaggagtcgggatggac

SEQ ID NO: 1655455 - DNA, 25 bp, Homo sapien
tagaggaagaggaggcctgagagtt

SEQ ID NO: 1655456 - DNA, 25 bp, Homo sapien
agaggaagaggaggcctgagagttg

SEQ ID NO: 1655457 - DNA, 25 bp, Homo sapien
ttagaggaagaggaggcctgagagt

SEQ ID NO: 1655458 - DNA, 25 bp, Homo sapien
cagggagccggatggactcgaagcg

SEQ ID NO: 1655459 - DNA, 25 bp, Homo sapien
gggagccggatggactcgaagcgca

SEQ ID NO: 1655460 - DNA, 25 bp, Homo sapien
gccggatggactcgaagcgcacatc

SEQ ID NO: 1655461 - DNA, 25 bp, Homo sapien
gagccggatggactcgaagcgcaca

SEQ ID NO: 1655462 - DNA, 25 bp, Homo sapien
cctgaggtggcagcatctgcccctg

SEQ ID NO: 1655463 - DNA, 25 bp, Homo sapien
tggccctgaggtggcagcatctgcc

SEQ ID NO: 1655464 - DNA, 25 bp, Homo sapien
gccctgaggtggcagcatctgcccc

SEQ ID NO: 1655465 - DNA, 25 bp, Homo sapien
gtctggccctgaggtggcagcatct

SEQ ID NO: 1655466 - DNA, 25 bp, Homo sapien
catggtggggcagtagccggcacag

SEQ ID NO: 1655467 - DNA, 25 bp, Homo sapien
tggtggtgttgacggtgatgcacac

SEQ ID NO: 1655468 - DNA, 25 bp, Homo sapien
atggtggtgttgacggtgatgcaca

SEQ ID NO: 1655469 - DNA, 25 bp, Homo sapien
gcagtagccggcacagatggtggtg

SEQ ID NO: 1655470 - DNA, 25 bp, Homo sapien
ggcatctcctattcaggacccacca

SEQ ID NO: 1655471 - DNA, 25 bp, Homo sapien
tggccttcccatcccgcgtggtaca

SEQ ID NO: 1655472 - DNA, 25 bp, Homo sapien
acccagagacccttcccggcatctc

SEQ ID NO: 1655473 - DNA, 25 bp, Homo sapien
gcgtggtacaccacccacaaagacc

SEQ ID NO: 1655474 - DNA, 25 bp, Homo sapien
aaggtgcccaggggccctgtagtct

SEQ ID NO: 1655475 - DNA, 25 bp, Homo sapien
gtggaaggtgcccaggggccctgta

SEQ ID NO: 1655476 - DNA, 25 bp, Homo sapien
gaaggtgcccaggggccctgtagtc

SEQ ID NO: 1655477 - DNA, 25 bp, Homo sapien
gtgcccaggggccctgtagtcttac

SEQ ID NO: 1655478 - DNA, 25 bp, Homo sapien
ggtgataggatgctggggtaacctg

SEQ ID NO: 1655479 - DNA, 25 bp, Homo sapien
taggatgctggggtaacctggacac

SEQ ID NO: 1655480 - DNA, 25 bp, Homo sapien
atgctggggtaacctggacactaat

SEQ ID NO: 1655481 - DNA, 25 bp, Homo sapien
gctggggtaacctggacactaatcc

SEQ ID NO: 1655482 - DNA, 25 bp, Homo sapien
tcgagtgctagggactagtcgagcc

SEQ ID NO: 1655483 - DNA, 25 bp, Homo sapien
aggcacagggagtagggtgtaggaa

SEQ ID NO: 1655484 - DNA, 25 bp, Homo sapien
gggactagtcgagcctggaggcaca

SEQ ID NO: 1655485 - DNA, 25 bp, Homo sapien
tggaggcacagggagtagggtgtag

SEQ ID NO: 1655486 - DNA, 25 bp, Homo sapien
ttcctgcaccacagtccaacctaac

SEQ ID NO: 1655487 - DNA, 25 bp, Homo sapien
accacagtccaacctaacaggaggg

SEQ ID NO: 1655488 - DNA, 25 bp, Homo sapien
tgcaccacagtccaacctaacagga

SEQ ID NO: 1655489 - DNA, 25 bp, Homo sapien
gcttcggacttagcttctgcccagt

SEQ ID NO: 1655490 - DNA, 25 bp, Homo sapien
cttgacccagatgcccccaaggagg

SEQ ID NO: 1655491 - DNA, 25 bp, Homo sapien
acttgacccagatgcccccaaggag

SEQ ID NO: 1655492 - DNA, 25 bp, Homo sapien
ttgacccagatgcccccaaggaggg

SEQ ID NO: 1655493 - DNA, 25 bp, Homo sapien
ggtgtggttcaggtgatttaactca

SEQ ID NO: 1655494 - DNA, 25 bp, Homo sapien
agtgggtgtggttcaggtgatttaa

SEQ ID NO: 1655495 - DNA, 25 bp, Homo sapien
gtgggtgtggttcaggtgatttaac

SEQ ID NO: 1655496 - DNA, 25 bp, Homo sapien
gggtgtggttcaggtgatttaactc

SEQ ID NO: 1655497 - DNA, 25 bp, Homo sapien
tgtctgggctagtcccgcccccacg

SEQ ID NO: 1655498 - DNA, 25 bp, Homo sapien
gagtgggtgtctgggctagtcccgc

SEQ ID NO: 1655499 - DNA, 25 bp, Homo sapien
tctggggtggggctggccctgacgg

SEQ ID NO: 1655500 - DNA, 25 bp, Homo sapien
ctggggtggggctggccctgacggc

SEQ ID NO: 1655501 - DNA, 25 bp, Homo sapien
gggtctggggtggggctggccctga

SEQ ID NO: 1655502 - DNA, 25 bp, Homo sapien
ggtctggggtggggctggccctgac

SEQ ID NO: 1655503 - DNA, 25 bp, Homo sapien
tactgtaggctttcggcacgctgta

SEQ ID NO: 1655504 - DNA, 25 bp, Homo sapien
ctgccatagctggagttctcggtac

SEQ ID NO: 1655505 - DNA, 25 bp, Homo sapien
tcgagccgccggagcgggtgcagca

SEQ ID NO: 1655506 - DNA, 25 bp, Homo sapien
agcgccggcttcaagctgccatagc

SEQ ID NO: 1655507 - DNA, 25 bp, Homo sapien
gacctggggcgtctcttcgaagctc

SEQ ID NO: 1655508 - DNA, 25 bp, Homo sapien
tccccggtgcggcatggccgaggtc

SEQ ID NO: 1655509 - DNA, 25 bp, Homo sapien
ggtcaccgggctgacgcgcggcacg

SEQ ID NO: 1655510 - DNA, 25 bp, Homo sapien
gcggcacgcggacccgcggtggtcg

SEQ ID NO: 1655511 - DNA, 25 bp, Homo sapien
tgggatagaaccgaaagtcccgcgc

SEQ ID NO: 1655512 - DNA, 25 bp, Homo sapien
gtggtcagatagagctggcggcggt

SEQ ID NO: 1655513 - DNA, 25 bp, Homo sapien
aaagtcccgcgccgaggtggtcaga

SEQ ID NO: 1655514 - DNA, 25 bp, Homo sapien
ccgaggtggtcagatagagctggcg

SEQ ID NO: 1655515 - DNA, 25 bp, Homo sapien
ctcggggttcttcgtccaggcaatt

SEQ ID NO: 1655516 - DNA, 25 bp, Homo sapien
cagctcggggttcttcgtccaggca

SEQ ID NO: 1655517 - DNA, 25 bp, Homo sapien
gaaaggccggccagacagctcgggg

SEQ ID NO: 1655518 - DNA, 25 bp, Homo sapien
gccggccagacagctcggggttctt

SEQ ID NO: 1655519 - DNA, 25 bp, Homo sapien
cagcttcctttctcatacccgaacc

SEQ ID NO: 1655520 - DNA, 25 bp, Homo sapien
cctgggtcccgagttcagaatccct

SEQ ID NO: 1655521 - DNA, 25 bp, Homo sapien
ggaggaggcatacccaagacataga

SEQ ID NO: 1655522 - DNA, 25 bp, Homo sapien
ttcggcctcgacagccatgacggcc

SEQ ID NO: 1655523 - DNA, 25 bp, Homo sapien
gtcttaaaccgtcttggtgtggcca

SEQ ID NO: 1655524 - DNA, 25 bp, Homo sapien
aaacaacctccctggttccgctctg

SEQ ID NO: 1655525 - DNA, 25 bp, Homo sapien
cacctgaccccgtctcagaatattc

SEQ ID NO: 1655526 - DNA, 25 bp, Homo sapien
ctccctaaatccaagcaccttctgc

SEQ ID NO: 1655527 - DNA, 25 bp, Homo sapien
tgtactgcgccctcgtctcgctgct

SEQ ID NO: 1655528 - DNA, 25 bp, Homo sapien
agtgtactgcgccctcgtctcgctg

SEQ ID NO: 1655529 - DNA, 25 bp, Homo sapien
gtgtactgcgccctcgtctcgctgc

SEQ ID NO: 1655530 - DNA, 25 bp, Homo sapien
tactgcgccctcgtctcgctgctct

SEQ ID NO: 1655531 - DNA, 25 bp, Homo sapien
ctgaggacctcgtcgaaagcccagt

SEQ ID NO: 1655532 - DNA, 25 bp, Homo sapien
gaggacctcgtcgaaagcccagttg

SEQ ID NO: 1655533 - DNA, 25 bp, Homo sapien
tgaggacctcgtcgaaagcccagtt

SEQ ID NO: 1655534 - DNA, 25 bp, Homo sapien
gatccaggtacctcggttgcagaga

SEQ ID NO: 1655535 - DNA, 25 bp, Homo sapien
ggataatgcggtgggaaaagtagct

SEQ ID NO: 1655536 - DNA, 25 bp, Homo sapien
gcctggatccaggtacctcggttgc

SEQ ID NO: 1655537 - DNA, 25 bp, Homo sapien
tgaagggtatgggtgggataatgcg

SEQ ID NO: 1655538 - DNA, 25 bp, Homo sapien
agagaagtgcaccggaccatagcga

SEQ ID NO: 1655539 - DNA, 25 bp, Homo sapien
caccggaccatagcgaaaaacatgg

SEQ ID NO: 1655540 - DNA, 25 bp, Homo sapien
aagtgcaccggaccatagcgaaaaa

SEQ ID NO: 1655541 - DNA, 25 bp, Homo sapien
tgcaccggaccatagcgaaaaacat

SEQ ID NO: 1655542 - DNA, 25 bp, Homo sapien
aggagtcctggaagcgggggtcatc

SEQ ID NO: 1655543 - DNA, 25 bp, Homo sapien
ttgtgggaggatcggggtgtccgag

SEQ ID NO: 1655544 - DNA, 25 bp, Homo sapien
ttgaggaagaggagtcctggaagcg

SEQ ID NO: 1655545 - DNA, 25 bp, Homo sapien
cgggagtcgggatgggcttggaagg

SEQ ID NO: 1655546 - DNA, 25 bp, Homo sapien
gcagagtgcacattgacagctgaga

SEQ ID NO: 1655547 - DNA, 25 bp, Homo sapien
gcggtagttgcacaccacctgaggc

SEQ ID NO: 1655548 - DNA, 25 bp, Homo sapien
attgacagctgagagccacggcgta

SEQ ID NO: 1655549 - DNA, 25 bp, Homo sapien
agccggatggactcgaagcgcacat

SEQ ID NO: 1655550 - DNA, 25 bp, Homo sapien
tggtgttgacggtgatgcacacggg

SEQ ID NO: 1655551 - DNA, 25 bp, Homo sapien
agcggctccttggatgcccatgtcc

SEQ ID NO: 1655552 - DNA, 25 bp, Homo sapien
ggcagtagccggcacagatggtggt

SEQ ID NO: 1655553 - DNA, 25 bp, Homo sapien
gccgaagcggctccttggatgccca

SEQ ID NO: 1655554 - DNA, 25 bp, Homo sapien
gaccccttctcatgccagtgattgc

SEQ ID NO: 1655555 - DNA, 25 bp, Homo sapien
ctgaccccttctcatgccagtgatt

SEQ ID NO: 1655556 - DNA, 25 bp, Homo sapien
caggaaatgccccacctgaagctta

SEQ ID NO: 1655557 - DNA, 25 bp, Homo sapien
ctgaagcttactgggggtcacgctc

SEQ ID NO: 1655558 - DNA, 25 bp, Homo sapien
cccctgcctcgtgtacctggcttta

SEQ ID NO: 1655559 - DNA, 25 bp, Homo sapien
tcccctgcctcgtgtacctggcttt

SEQ ID NO: 1655560 - DNA, 25 bp, Homo sapien
ctcagagactcagtcgtcgagtgct

SEQ ID NO: 1655561 - DNA, 25 bp, Homo sapien
gaggcacagggagtagggtgtagga

SEQ ID NO: 1655562 - DNA, 25 bp, Homo sapien
tcgtcgagtgctagggactagtcga

SEQ ID NO: 1655563 - DNA, 25 bp, Homo sapien
tggtccagcgccaagggtgaggcgg

SEQ ID NO: 1655564 - DNA, 25 bp, Homo sapien
tcaggcccggccagtccggctgagg

SEQ ID NO: 1655565 - DNA, 25 bp, Homo sapien
tgggcatcagcggtcaatgcccgca

SEQ ID NO: 1655566 - DNA, 25 bp, Homo sapien
aatgcccgcacataggactgcttgg

SEQ ID NO: 1655567 - DNA, 25 bp, Homo sapien
tcagcggtcaatgcccgcacatagg

SEQ ID NO: 1655568 - DNA, 25 bp, Homo sapien
cagatttatcggcctcgaagtgggc

SEQ ID NO: 1655569 - DNA, 25 bp, Homo sapien
gatggggttaggactccattgacac

SEQ ID NO: 1655570 - DNA, 25 bp, Homo sapien
tcgaggatggggttaggactccatt

SEQ ID NO: 1655571 - DNA, 25 bp, Homo sapien
ctggaggaggaaaaggcgacaatgt

SEQ ID NO: 1655572 - DNA, 25 bp, Homo sapien
aggaaaaggcgacaatgtcgaggat

SEQ ID NO: 1655573 - DNA, 25 bp, Homo sapien
cacctgcttcaaggccgataactct

SEQ ID NO: 1655574 - DNA, 25 bp, Homo sapien
aaggccaagcagtcctatgtgcggg

SEQ ID NO: 1655575 - DNA, 25 bp, Homo sapien
ggcattgaccgctgatgcccagggc

SEQ ID NO: 1655576 - DNA, 25 bp, Homo sapien
tggcgatggattcaaactggcacag

SEQ ID NO: 1655577 - DNA, 25 bp, Homo sapien
gcggattgagaagcctttattgtgg

SEQ ID NO: 1655578 - DNA, 25 bp, Homo sapien
ttgtgggaggatcggggtgtcctag

SEQ ID NO: 1655579 - DNA, 25 bp, Homo sapien
ttattgtgggaggatcggggtgtcc

SEQ ID NO: 1655580 - DNA, 25 bp, Homo sapien
gagaagcctttattgtgggaggatc

SEQ ID NO: 1655581 - DNA, 25 bp, Homo sapien
catcacaggtcaaggggtggtcctt

SEQ ID NO: 1655582 - DNA, 25 bp, Homo sapien
cctggaagcgggggtcatcacaggt

SEQ ID NO: 1655583 - DNA, 25 bp, Homo sapien
tcatcacaggtcaaggggtggtcct

SEQ ID NO: 1655584 - DNA, 25 bp, Homo sapien
ggaagcgggggtcatcacaggtcaa

SEQ ID NO: 1655585 - DNA, 25 bp, Homo sapien
gcagagtgcacattgacagctgaga

SEQ ID NO: 1655586 - DNA, 25 bp, Homo sapien
agccggatggactcgaagcgcacat

SEQ ID NO: 1655587 - DNA, 25 bp, Homo sapien
gcggtagttgcacaccacctgaggc

SEQ ID NO: 1655588 - DNA, 25 bp, Homo sapien
attgacagctgagagccacggcgta

SEQ ID NO: 1655589 - DNA, 25 bp, Homo sapien
gccgaagcggctccttggatgccca

SEQ ID NO: 1655590 - DNA, 25 bp, Homo sapien
tggtgttgacggtgatgcacacggg

SEQ ID NO: 1655591 - DNA, 25 bp, Homo sapien
agcggctccttggatgcccatgtcc

SEQ ID NO: 1655592 - DNA, 25 bp, Homo sapien
ggcagtagccggcacagatggtggt

SEQ ID NO: 1655593 - DNA, 25 bp, Homo sapien
gggcaaggacactgcttcacccggg

SEQ ID NO: 1655594 - DNA, 25 bp, Homo sapien
ccgggtctgagactgcagcccccag

SEQ ID NO: 1655595 - DNA, 25 bp, Homo sapien
aggacactgcttcacccgggtctga

SEQ ID NO: 1655596 - DNA, 25 bp, Homo sapien
gggtctgagactgcagcccccagtc

SEQ ID NO: 1655597 - DNA, 25 bp, Homo sapien
tcttagcgggatatcttccgcaagc

SEQ ID NO: 1655598 - DNA, 25 bp, Homo sapien
cttagcgggatatcttccgcaagca

SEQ ID NO: 1655599 - DNA, 25 bp, Homo sapien
gtctctctcttagcgggatatcttc

SEQ ID NO: 1655600 - DNA, 25 bp, Homo sapien
ctctcttagcgggatatcttccgca

SEQ ID NO: 1655601 - DNA, 25 bp, Homo sapien
gccacggaacgcagggccctcactg

SEQ ID NO: 1655602 - DNA, 25 bp, Homo sapien
gagtgaggggtgttggacgcggcac

SEQ ID NO: 1655603 - DNA, 25 bp, Homo sapien
acccaattggctgctctctctcaga

SEQ ID NO: 1655604 - DNA, 25 bp, Homo sapien
agtcagcggacccaattggctgctc

SEQ ID NO: 1655605 - DNA, 25 bp, Homo sapien
gtccacacggccctgggcatcagtg

SEQ ID NO: 1655606 - DNA, 25 bp, Homo sapien
ggcatcagtggtcaatgcccgccca

SEQ ID NO: 1655607 - DNA, 25 bp, Homo sapien
cacaggcagtgccaatttgaatcca

SEQ ID NO: 1655608 - DNA, 25 bp, Homo sapien
aatgcccgcccataggactgcttgg

SEQ ID NO: 1655609 - DNA, 25 bp, Homo sapien
gtccacaccccggcggcaggtcctc

SEQ ID NO: 1655610 - DNA, 25 bp, Homo sapien
ggtgaagtatcgctcaccccacgct

SEQ ID NO: 1655611 - DNA, 25 bp, Homo sapien
tcgaagcgggtaacaaagaagtgct

SEQ ID NO: 1655612 - DNA, 25 bp, Homo sapien
accttccttagatttatcggcctcg

SEQ ID NO: 1655613 - DNA, 25 bp, Homo sapien
agctcaccctgatgactcaccggtg

SEQ ID NO: 1655614 - DNA, 25 bp, Homo sapien
gatggggttaggactccaatgacac

SEQ ID NO: 1655615 - DNA, 25 bp, Homo sapien
ggaggaaaacgcgacaatgtcgagg

SEQ ID NO: 1655616 - DNA, 25 bp, Homo sapien
ctggaggaggaaaacgcgacaatgt

SEQ ID NO: 1655617 - DNA, 25 bp, Homo sapien
aggaaaacgcgacaatgtcgaggat

SEQ ID NO: 1655618 - DNA, 25 bp, Homo sapien
aaaatgagggggatgcggagggagc

SEQ ID NO: 1655619 - DNA, 25 bp, Homo sapien
gggagcaggagcatctctcagagca

SEQ ID NO: 1655620 - DNA, 25 bp, Homo sapien
ggaggaaaatgagggggatgcggag

SEQ ID NO: 1655621 - DNA, 25 bp, Homo sapien
tctcagagcatctctcagagcacat

SEQ ID NO: 1655622 - DNA, 25 bp, Homo sapien
cctggaagcgggggtcatcacaggt

SEQ ID NO: 1655623 - DNA, 25 bp, Homo sapien
catcacaggtcaaggggtggtcctt

SEQ ID NO: 1655624 - DNA, 25 bp, Homo sapien
tcatcacaggtcaaggggtggtcct

SEQ ID NO: 1655625 - DNA, 25 bp, Homo sapien
ggaagcgggggtcatcacaggtcaa

SEQ ID NO: 1655626 - DNA, 25 bp, Homo sapien
attgacagctgagagccacggcgta

SEQ ID NO: 1655627 - DNA, 25 bp, Homo sapien
gcagagtgcacattgacagctgaga

SEQ ID NO: 1655628 - DNA, 25 bp, Homo sapien
agccggatggactcgaagcgcacat

SEQ ID NO: 1655629 - DNA, 25 bp, Homo sapien
gcggtagttgcacaccacctgaggc

SEQ ID NO: 1655630 - DNA, 25 bp, Homo sapien
tggtgttgacggtgatgcacacggg

SEQ ID NO: 1655631 - DNA, 25 bp, Homo sapien
agcggctccttggatgcccatgtcc

SEQ ID NO: 1655632 - DNA, 25 bp, Homo sapien
gccgaagcggctccttggatgccca

SEQ ID NO: 1655633 - DNA, 25 bp, Homo sapien
ggcagtagccggcacagatggtggt

SEQ ID NO: 1655634 - DNA, 25 bp, Homo sapien
ctgggacaaggacactgcttcaccc

SEQ ID NO: 1655635 - DNA, 25 bp, Homo sapien
tgggacaaggacactgcttcacccg

SEQ ID NO: 1655636 - DNA, 25 bp, Homo sapien
gggacaaggacactgcttcacccgg

SEQ ID NO: 1655637 - DNA, 25 bp, Homo sapien
gacaaggacactgcttcacccgggt

SEQ ID NO: 1655638 - DNA, 25 bp, Homo sapien
cccctgcctcgtgtacctggcttta

SEQ ID NO: 1655639 - DNA, 25 bp, Homo sapien
gccaccaggaggttgtaggatgctg

SEQ ID NO: 1655640 - DNA, 25 bp, Homo sapien
tcccctgcctcgtgtacctggcttt

SEQ ID NO: 1655641 - DNA, 25 bp, Homo sapien
ccaccaggaggttgtaggatgctgg

SEQ ID NO: 1655642 - DNA, 25 bp, Homo sapien
ctcagagactcagtcgtcgagtgct

SEQ ID NO: 1655643 - DNA, 25 bp, Homo sapien
cgagtgctagggactagtcgagcct

SEQ ID NO: 1655644 - DNA, 25 bp, Homo sapien
gaggcacagggagtagggtgtagga

SEQ ID NO: 1655645 - DNA, 25 bp, Homo sapien
tggtccagcgccaagggtgaggcgg

SEQ ID NO: 1655646 - DNA, 25 bp, Homo sapien
tcaggcccggccagtccggctgagg

SEQ ID NO: 1655647 - DNA, 25 bp, Homo sapien
tgggcatcagcggtcaatgcccgca

SEQ ID NO: 1655648 - DNA, 25 bp, Homo sapien
aatgcccgcacataggactgcttgg

SEQ ID NO: 1655649 - DNA, 25 bp, Homo sapien
tcagcggtcaatgcccgcacatagg

SEQ ID NO: 1655650 - DNA, 25 bp, Homo sapien
agagttatcggcctcgaagcggtga

SEQ ID NO: 1655651 - DNA, 25 bp, Homo sapien
gtgaagcatcgctcgcctcacgctg

SEQ ID NO: 1655652 - DNA, 25 bp, Homo sapien
tcgccggtgaagcatcgctcgcctc

SEQ ID NO: 1655653 - DNA, 25 bp, Homo sapien
aagcggtgacaaagaagtgctggca

SEQ ID NO: 1655654 - DNA, 25 bp, Homo sapien
aagaccagagggggcccggcagcgg

SEQ ID NO: 1655655 - DNA, 25 bp, Homo sapien
ggaagaccagagggggcccggcagc

SEQ ID NO: 1655656 - DNA, 25 bp, Homo sapien
accagagggggcccggcagcggcac

SEQ ID NO: 1655657 - DNA, 25 bp, Homo sapien
gaagaccagagggggcccggcagcg

SEQ ID NO: 1655658 - DNA, 25 bp, Homo sapien
aggaggcctggaagcgggggtcatc

SEQ ID NO: 1655659 - DNA, 25 bp, Homo sapien
ttattgtgggaggatcggggtgtct

SEQ ID NO: 1655660 - DNA, 25 bp, Homo sapien
ccgggagtcgggatggacttggaag

SEQ ID NO: 1655661 - DNA, 25 bp, Homo sapien
tgtctgagggccccgggagtcggga

SEQ ID NO: 1655662 - DNA, 25 bp, Homo sapien
gcagagtgcacattgacagctgaga

SEQ ID NO: 1655663 - DNA, 25 bp, Homo sapien
agccggatggactcgaagcgcacat

SEQ ID NO: 1655664 - DNA, 25 bp, Homo sapien
gcggtagttgcacaccacctgaggc

SEQ ID NO: 1655665 - DNA, 25 bp, Homo sapien
attgacagctgagagccacggcgta

SEQ ID NO: 1655666 - DNA, 25 bp, Homo sapien
catggtggggcagtagccggcacag

SEQ ID NO: 1655667 - DNA, 25 bp, Homo sapien
tggtgttgacggtgatgcacacggg

SEQ ID NO: 1655668 - DNA, 25 bp, Homo sapien
gcagtagccggcacagatggtggtg

SEQ ID NO: 1655669 - DNA, 25 bp, Homo sapien
atggtggtgttgacggtgatgcaca

SEQ ID NO: 1655670 - DNA, 25 bp, Homo sapien
tagacttaatgagtgcgagcccacc

SEQ ID NO: 1655671 - DNA, 25 bp, Homo sapien
gcagcctcggaggacattgtctgga

SEQ ID NO: 1655672 - DNA, 25 bp, Homo sapien
cctcagtggtctagcgccaaggatg

SEQ ID NO: 1655673 - DNA, 25 bp, Homo sapien
tgattattgaataggcccgcaggag

SEQ ID NO: 1655674 - DNA, 25 bp, Homo sapien
gtggggctggcccggcaggctccca

SEQ ID NO: 1655675 - DNA, 25 bp, Homo sapien
gggtggggctggcccggcaggctcc

SEQ ID NO: 1655676 - DNA, 25 bp, Homo sapien
tggggtggggctggcccggcaggct

SEQ ID NO: 1655677 - DNA, 25 bp, Homo sapien
tctggggtggggctggcccggcagg

SEQ ID NO: 1655678 - DNA, 25 bp, Homo sapien
ggtgcggcgaggagctgtaggtttc

SEQ ID NO: 1655679 - DNA, 25 bp, Homo sapien
caagtcgcctccagcgggcggaagc

SEQ ID NO: 1655680 - DNA, 25 bp, Homo sapien
ttcgggacgctgtgtatgcccggca

SEQ ID NO: 1655681 - DNA, 25 bp, Homo sapien
tgctgtaggctttcgggacgctgtg

SEQ ID NO: 1655682 - DNA, 25 bp, Homo sapien
ctgccgctgcgggtcgtgactccag

SEQ ID NO: 1655683 - DNA, 25 bp, Homo sapien
gactccagagttggggcgtctcttc

SEQ ID NO: 1655684 - DNA, 25 bp, Homo sapien
aagctccagtaggtcaggtagtcct

SEQ ID NO: 1655685 - DNA, 25 bp, Homo sapien
tgcggcgctcgaggcggcctggaag

SEQ ID NO: 1655686 - DNA, 25 bp, Homo sapien
gaggtgacactaaggactcctgggt

SEQ ID NO: 1655687 - DNA, 25 bp, Homo sapien
aggtgacactaaggactcctgggtg

SEQ ID NO: 1655688 - DNA, 25 bp, Homo sapien
tgggatagaaccgaaagtcccgcgc

SEQ ID NO: 1655689 - DNA, 25 bp, Homo sapien
gtggtcagatagagctggcggcggt

SEQ ID NO: 1655690 - DNA, 25 bp, Homo sapien
aaagtcccgcgccgaggtggtcaga

SEQ ID NO: 1655691 - DNA, 25 bp, Homo sapien
ccgaggtggtcagatagagctggcg

SEQ ID NO: 1655692 - DNA, 25 bp, Homo sapien
ttcggcctcgacagccatgacggcc

SEQ ID NO: 1655693 - DNA, 25 bp, Homo sapien
cagcttcctttctcatacccgaacc

SEQ ID NO: 1655694 - DNA, 25 bp, Homo sapien
ggaggaggcatacccaagacataga

SEQ ID NO: 1655695 - DNA, 25 bp, Homo sapien
cctgggtcccgagttcagaatccct

SEQ ID NO: 1655696 - DNA, 25 bp, Homo sapien
caacaactccaggttacctctccta

SEQ ID NO: 1655697 - DNA, 25 bp, Homo sapien
caccctaccacgtctcagaatattc

SEQ ID NO: 1655698 - DNA, 25 bp, Homo sapien
ggtctcaagccttcttggtgtggcc

SEQ ID NO: 1655699 - DNA, 25 bp, Homo sapien
ccccggtctcaagccttcttggtgt

SEQ ID NO: 1655700 - DNA, 25 bp, Homo sapien
agtaggagggttcagctgcggtgtc

SEQ ID NO: 1655701 - DNA, 25 bp, Homo sapien
tagccacgccccaaagctgtgattt

SEQ ID NO: 1655702 - DNA, 25 bp, Homo sapien
cttaggagccctgaaggcgagtttc

SEQ ID NO: 1655703 - DNA, 25 bp, Homo sapien
tccttctggcctggcgtggatgccc

SEQ ID NO: 1655704 - DNA, 25 bp, Homo sapien
cgtaggccgagccagaggttgtctc

SEQ ID NO: 1655705 - DNA, 25 bp, Homo sapien
gcccgccatgggtcttgggcacgta

SEQ ID NO: 1655706 - DNA, 25 bp, Homo sapien
tcttgggcacgtaggccgagccaga

SEQ ID NO: 1655707 - DNA, 25 bp, Homo sapien
tccttgatccccacagtccgcgtgg

SEQ ID NO: 1655708 - DNA, 25 bp, Homo sapien
gaggacctcgtcgaaagcccagatg

SEQ ID NO: 1655709 - DNA, 25 bp, Homo sapien
tgaggacctcgtcgaaagcccagat

SEQ ID NO: 1655710 - DNA, 25 bp, Homo sapien
ctgaggacctcgtcgaaagcccaga

SEQ ID NO: 1655711 - DNA, 25 bp, Homo sapien
tttgcagtcggaggtagagggtccg

SEQ ID NO: 1655712 - DNA, 25 bp, Homo sapien
tgcagtcggaggtagagggtccgcg

SEQ ID NO: 1655713 - DNA, 25 bp, Homo sapien
ctgctttgcagtcggaggtagaggg

SEQ ID NO: 1655714 - DNA, 25 bp, Homo sapien
gctttgcagtcggaggtagagggtc

SEQ ID NO: 1655715 - DNA, 25 bp, Homo sapien
aggagtccaagctcccaatcccctt

SEQ ID NO: 1655716 - DNA, 25 bp, Homo sapien
agtccctggcatccaaattccctgg

SEQ ID NO: 1655717 - DNA, 25 bp, Homo sapien
gagaaggcgccgcacatcagctaga

SEQ ID NO: 1655718 - DNA, 25 bp, Homo sapien
catcagctagaaagactcaggagtc

SEQ ID NO: 1655719 - DNA, 25 bp, Homo sapien
aatgccatgggtaacgtagctgctg

SEQ ID NO: 1655720 - DNA, 25 bp, Homo sapien
aggattcaggcatctcggttgcaga

SEQ ID NO: 1655721 - DNA, 25 bp, Homo sapien
caggcatctcggttgcagagatgaa

SEQ ID NO: 1655722 - DNA, 25 bp, Homo sapien
gaagggtacgggtgggataatgcca

SEQ ID NO: 1655723 - DNA, 25 bp, Homo sapien
ccctccctgtagccaagcaggagct

SEQ ID NO: 1655724 - DNA, 25 bp, Homo sapien
ctccctgtagccaagcaggagctgg

SEQ ID NO: 1655725 - DNA, 25 bp, Homo sapien
tgttgccccaggtgacagaacccgc

SEQ ID NO: 1655726 - DNA, 25 bp, Homo sapien
ggagctggtttgttgctgttgcccc

SEQ ID NO: 1655727 - DNA, 25 bp, Homo sapien
catgtggtttcacccatcctgcaga

SEQ ID NO: 1655728 - DNA, 25 bp, Homo sapien
tcccaaactggggtccttagatcag

SEQ ID NO: 1655729 - DNA, 25 bp, Homo sapien
ggtttcacccatcctgcagagattg

SEQ ID NO: 1655730 - DNA, 25 bp, Homo sapien
gggtccttagatcagctgggccatc

SEQ ID NO: 1655731 - DNA, 25 bp, Homo sapien
gacgcaggcagtgtcaattcgaatc

SEQ ID NO: 1655732 - DNA, 25 bp, Homo sapien
ttgcagcgggtttcaaagaagtact

SEQ ID NO: 1655733 - DNA, 25 bp, Homo sapien
gacgactcgctggtgcagtttcgct

SEQ ID NO: 1655734 - DNA, 25 bp, Homo sapien
tcagcgttatcagccttgcagcggg

SEQ ID NO: 1655735 - DNA, 25 bp, Homo sapien
ccagcaggggcacccctagacagga

SEQ ID NO: 1655736 - DNA, 25 bp, Homo sapien
gcccagcaggggcacccctagacag

SEQ ID NO: 1655737 - DNA, 25 bp, Homo sapien
gcaggggcacccctagacaggacta

SEQ ID NO: 1655738 - DNA, 25 bp, Homo sapien
cagcaggggcacccctagacaggac

SEQ ID NO: 1655739 - DNA, 25 bp, Homo sapien
ggttgggactcaattggcacactgg

SEQ ID NO: 1655740 - DNA, 25 bp, Homo sapien
gggttgggactcaattggcacactg

SEQ ID NO: 1655741 - DNA, 25 bp, Homo sapien
gggactcaattggcacactggggag

SEQ ID NO: 1655742 - DNA, 25 bp, Homo sapien
aaaggtcacaacctggaatcctagg

SEQ ID NO: 1655743 - DNA, 25 bp, Homo sapien
tagggagaccccagttcacctcaaa

SEQ ID NO: 1655744 - DNA, 25 bp, Homo sapien
cacaacctggaatcctagggagacc

SEQ ID NO: 1655745 - DNA, 25 bp, Homo sapien
agttcacctcaaaactgccactaag

SEQ ID NO: 1655746 - DNA, 25 bp, Homo sapien
tggggctgggagtccccaggcttcg

SEQ ID NO: 1655747 - DNA, 25 bp, Homo sapien
cctccttcctgacatctcaggagag

SEQ ID NO: 1655748 - DNA, 25 bp, Homo sapien
ccttcctgacatctcaggagaggga

SEQ ID NO: 1655749 - DNA, 25 bp, Homo sapien
acctcctccgcctcggagctctggg

SEQ ID NO: 1655750 - DNA, 25 bp, Homo sapien
gaaatgcagactccgggttcctcat

SEQ ID NO: 1655751 - DNA, 25 bp, Homo sapien
atgcagactccgggttcctcatcct

SEQ ID NO: 1655752 - DNA, 25 bp, Homo sapien
aagaaatgcagactccgggttcctc

SEQ ID NO: 1655753 - DNA, 25 bp, Homo sapien
gcagactccgggttcctcatcctcc

SEQ ID NO: 1655754 - DNA, 25 bp, Homo sapien
acgctcgctggcccgccgggtgcta

SEQ ID NO: 1655755 - DNA, 25 bp, Homo sapien
ctggggcgccctcttcggctcccgc

SEQ ID NO: 1655756 - DNA, 25 bp, Homo sapien
gggcgccctcttcggctcccgcggc

SEQ ID NO: 1655757 - DNA, 25 bp, Homo sapien
tggcccgccgggtgctagctgctca

SEQ ID NO: 1655758 - DNA, 25 bp, Homo sapien
gatgtggccctatggaactcgttcg

SEQ ID NO: 1655759 - DNA, 25 bp, Homo sapien
tgtgaccttgggtaacacctgctgc

SEQ ID NO: 1655760 - DNA, 25 bp, Homo sapien
tgagactcaaacagtggcatgaccc

SEQ ID NO: 1655761 - DNA, 25 bp, Homo sapien
tccaactctgggtgtctgacgctgc

SEQ ID NO: 1655762 - DNA, 25 bp, Homo sapien
cccagagtggaggtggtagctcagg

SEQ ID NO: 1655763 - DNA, 25 bp, Homo sapien
gcccagagtggaggtggtagctcag

SEQ ID NO: 1655764 - DNA, 25 bp, Homo sapien
cttcggtgaccaggtgtttccctgg

SEQ ID NO: 1655765 - DNA, 25 bp, Homo sapien
tcacacttcggtgaccaggtgtttc

SEQ ID NO: 1655766 - DNA, 25 bp, Homo sapien
attggagacaatgacgggcactggc

SEQ ID NO: 1655767 - DNA, 25 bp, Homo sapien
tgctagtgaaatgggagtccacccg

SEQ ID NO: 1655768 - DNA, 25 bp, Homo sapien
caacttcggcaaagtagacggcgct

SEQ ID NO: 1655769 - DNA, 25 bp, Homo sapien
tgtctcccggtgataaaagtagctg

SEQ ID NO: 1655770 - DNA, 25 bp, Homo sapien
cccctagcagagtgtccgggaagcg

SEQ ID NO: 1655771 - DNA, 25 bp, Homo sapien
ggtcgaagaaatactcgcggcgcgc

SEQ ID NO: 1655772 - DNA, 25 bp, Homo sapien
tctcgggaaactcgaaaagcagcca

SEQ ID NO: 1655773 - DNA, 25 bp, Homo sapien
ctcttccaggaagacgtcgagcggc

SEQ ID NO: 1655774 - DNA, 25 bp, Homo sapien
aaaatagcccggcagggcggctagg

SEQ ID NO: 1655775 - DNA, 25 bp, Homo sapien
gggatcctgtcctgcgtctctccaa

SEQ ID NO: 1655776 - DNA, 25 bp, Homo sapien
tgtccgcgcgtaaaaatagcccggc

SEQ ID NO: 1655777 - DNA, 25 bp, Homo sapien
ccagcccggtgtccggtgtccggtg

SEQ ID NO: 1655778 - DNA, 25 bp, Homo sapien
accttaagtgatccacttgacttgg

SEQ ID NO: 1655779 - DNA, 25 bp, Homo sapien
agtgctgagattataggcgtgcacc

SEQ ID NO: 1655780 - DNA, 25 bp, Homo sapien
ccttaagtgatccacttgacttggc

SEQ ID NO: 1655781 - DNA, 25 bp, Homo sapien
caaagtgctgagattataggcgtgc

SEQ ID NO: 1655782 - DNA, 25 bp, Homo sapien
gttgtccaggccgatcttaaattcc

SEQ ID NO: 1655783 - DNA, 25 bp, Homo sapien
tccaggccgatcttaaattcctggg

SEQ ID NO: 1655784 - DNA, 25 bp, Homo sapien
tatgttgtccaggccgatcttaaat

SEQ ID NO: 1655785 - DNA, 25 bp, Homo sapien
tgtccaggccgatcttaaattcctg

SEQ ID NO: 1655786 - DNA, 25 bp, Homo sapien
taaaatgtgtaagtctctcatccac

SEQ ID NO: 1655787 - DNA, 25 bp, Homo sapien
gacactagggcacttctatctgcat

SEQ ID NO: 1655788 - DNA, 25 bp, Homo sapien
cgacagcaagaagtggagacagagc

SEQ ID NO: 1655789 - DNA, 25 bp, Homo sapien
tcctgacagagacgggaaaagattg

SEQ ID NO: 1655790 - DNA, 25 bp, Homo sapien
tatatcttaaccaaccacatccact

SEQ ID NO: 1655791 - DNA, 25 bp, Homo sapien
tcacgctctctcaatcaggctggag

SEQ ID NO: 1655792 - DNA, 25 bp, Homo sapien
acggagtcacgctctctcaatcagg

SEQ ID NO: 1655793 - DNA, 25 bp, Homo sapien
accgcagccggcctagtttgtctat

SEQ ID NO: 1655794 - DNA, 25 bp, Homo sapien
catttgtcccagatagcgattccct

SEQ ID NO: 1655795 - DNA, 25 bp, Homo sapien
aaagccagtgcagattgagagacct

SEQ ID NO: 1655796 - DNA, 25 bp, Homo sapien
tacttacaagagcacaaacatcggc

SEQ ID NO: 1655797 - DNA, 25 bp, Homo sapien
caacgctcagggataaggtatggca

SEQ ID NO: 1655798 - DNA, 25 bp, Homo sapien
tctgtgcgcgtgctcaggtaagctt

SEQ ID NO: 1655799 - DNA, 25 bp, Homo sapien
gtattacggttggttgaggacagcc

SEQ ID NO: 1655800 - DNA, 25 bp, Homo sapien
atgacagccccacgttgatcacagg

SEQ ID NO: 1655801 - DNA, 25 bp, Homo sapien
caaggccggcatcggtaaatggcac

SEQ ID NO: 1655802 - DNA, 25 bp, Homo sapien
ggtaaggcagggattttcagtagca

SEQ ID NO: 1655803 - DNA, 25 bp, Homo sapien
tgggagtgtataacccgcctctctg

SEQ ID NO: 1655804 - DNA, 25 bp, Homo sapien
ccctgggagtgtataacccgcctct

SEQ ID NO: 1655805 - DNA, 25 bp, Homo sapien
gattttcagtagcaccgcacggctc

SEQ ID NO: 1655806 - DNA, 25 bp, Homo sapien
cctcccaggactgtatgtcaatgtc

SEQ ID NO: 1655807 - DNA, 25 bp, Homo sapien
tcatcacagccgtagttggtcgtct

SEQ ID NO: 1655808 - DNA, 25 bp, Homo sapien
caaggcgcatatgccaacgcaggag

SEQ ID NO: 1655809 - DNA, 25 bp, Homo sapien
cttaggagtttgcatgaagccccaa

SEQ ID NO: 1655810 - DNA, 25 bp, Homo sapien
ttctgctccgctatccgagaggtga

SEQ ID NO: 1655811 - DNA, 25 bp, Homo sapien
ggttgagctcctcgagcggctccag

SEQ ID NO: 1655812 - DNA, 25 bp, Homo sapien
agggccgctggtggcagtctctcct

SEQ ID NO: 1655813 - DNA, 25 bp, Homo sapien
tgtccgactaggcttcggccgtcct

SEQ ID NO: 1655814 - DNA, 25 bp, Homo sapien
gtctgagaacagaggttaagacctc

SEQ ID NO: 1655815 - DNA, 25 bp, Homo sapien
aaggcggagacaggccggcttccaa

SEQ ID NO: 1655816 - DNA, 25 bp, Homo sapien
tgttcctggcactttatttaaagat

SEQ ID NO: 1655817 - DNA, 25 bp, Homo sapien
ccaagccgttgagaagccttttcca

SEQ ID NO: 1655818 - DNA, 25 bp, Homo sapien
cagaactgaggacaacgctgcctac

SEQ ID NO: 1655819 - DNA, 25 bp, Homo sapien
gtctgagggcgaaggccaagtccct

SEQ ID NO: 1655820 - DNA, 25 bp, Homo sapien
gggcggagcgaaccattagcctcgt

SEQ ID NO: 1655821 - DNA, 25 bp, Homo sapien
gctgcctacccttaagagcgtctga

SEQ ID NO: 1655822 - DNA, 25 bp, Homo sapien
gccgcgcgctactcgctccaggtga

SEQ ID NO: 1655823 - DNA, 25 bp, Homo sapien
agccggggtcgcgactcgcgttcca

SEQ ID NO: 1655824 - DNA, 25 bp, Homo sapien
cctcgtgtcccgtgcggcgcgaggg

SEQ ID NO: 1655825 - DNA, 25 bp, Homo sapien
gcgcgagggctagtgcgcgccactg

SEQ ID NO: 1655826 - DNA, 25 bp, Homo sapien
gtgagaccaaccctgtgacattata

SEQ ID NO: 1655827 - DNA, 25 bp, Homo sapien
tacaggtaaccacatcctagtgacc

SEQ ID NO: 1655828 - DNA, 25 bp, Homo sapien
tcttaaggcatggttctggtctggg

SEQ ID NO: 1655829 - DNA, 25 bp, Homo sapien
ctcagtagagccagaataggtagac

SEQ ID NO: 1655830 - DNA, 25 bp, Homo sapien
ttgagccgaatgtccagatcctgcc

SEQ ID NO: 1655831 - DNA, 25 bp, Homo sapien
cctctcagtgttgcagcgtgaccta

SEQ ID NO: 1655832 - DNA, 25 bp, Homo sapien
ctgaacttatgtcgggagcagctgc

SEQ ID NO: 1655833 - DNA, 25 bp, Homo sapien
tccagtcccagtgaatgaaggagac

SEQ ID NO: 1655834 - DNA, 25 bp, Homo sapien
gaatttggaaggaacacagcttgcc

SEQ ID NO: 1655835 - DNA, 25 bp, Homo sapien
cacagcttgccaaggtaggcgggag

SEQ ID NO: 1655836 - DNA, 25 bp, Homo sapien
aaaggaaagggcactctgggacctg

SEQ ID NO: 1655837 - DNA, 25 bp, Homo sapien
tgggacctgcttgggtgactgggta

SEQ ID NO: 1655838 - DNA, 25 bp, Homo sapien
cttcctctcccccacgcgaagccct

SEQ ID NO: 1655839 - DNA, 25 bp, Homo sapien
aaagcaggagggacataaacgtgtg

SEQ ID NO: 1655840 - DNA, 25 bp, Homo sapien
tcccaccatccattaacactccctg

SEQ ID NO: 1655841 - DNA, 25 bp, Homo sapien
aggagggacataaacgtgtggccca

SEQ ID NO: 1655842 - DNA, 25 bp, Homo sapien
tcttgtgaaaatgccgataccgact

SEQ ID NO: 1655843 - DNA, 25 bp, Homo sapien
taggtctggagtaaggtctgagatt

SEQ ID NO: 1655844 - DNA, 25 bp, Homo sapien
cgataccgacttcagtaggtctgga

SEQ ID NO: 1655845 - DNA, 25 bp, Homo sapien
tataatgtatatttcgaatcacctg

SEQ ID NO: 1655846 - DNA, 25 bp, Homo sapien
gctgctcagggtgagtctacattat

SEQ ID NO: 1655847 - DNA, 25 bp, Homo sapien
ctgctcagggtgagtctacattatg

SEQ ID NO: 1655848 - DNA, 25 bp, Homo sapien
gagtctacattatgggattatgtgc

SEQ ID NO: 1655849 - DNA, 25 bp, Homo sapien
gtcatctgcgggcgggttcccctct

SEQ ID NO: 1655850 - DNA, 25 bp, Homo sapien
caggcgtcactcagtgatcacgggt

SEQ ID NO: 1655851 - DNA, 25 bp, Homo sapien
gaatcctctttccacgatgccgctg

SEQ ID NO: 1655852 - DNA, 25 bp, Homo sapien
cggggtttgcatgggagaatcctct

SEQ ID NO: 1655853 - DNA, 25 bp, Homo sapien
agaaataaatatagctcgtggaaag

SEQ ID NO: 1655854 - DNA, 25 bp, Homo sapien
cagggggaggtacacctgcgtcgca

SEQ ID NO: 1655855 - DNA, 25 bp, Homo sapien
aaataaatatagctcgtggaaaggg

SEQ ID NO: 1655856 - DNA, 25 bp, Homo sapien
aggtacacctgcgtcgcagtcgagc

SEQ ID NO: 1655857 - DNA, 25 bp, Homo sapien
cagggttccggcgtttccagcatgt

SEQ ID NO: 1655858 - DNA, 25 bp, Homo sapien
ggttccggcgtttccagcatgtctg

SEQ ID NO: 1655859 - DNA, 25 bp, Homo sapien
gcgtttccagcatgtctgccagggc

SEQ ID NO: 1655860 - DNA, 25 bp, Homo sapien
tccggcgtttccagcatgtctgcca

SEQ ID NO: 1655861 - DNA, 25 bp, Homo sapien
gggacgaggagaaatagtcaacgta

SEQ ID NO: 1655862 - DNA, 25 bp, Homo sapien
aagggacgaggagaaatagtcaacg

SEQ ID NO: 1655863 - DNA, 25 bp, Homo sapien
gacgaggagaaatagtcaacgtagc

SEQ ID NO: 1655864 - DNA, 25 bp, Homo sapien
cgaggagaaatagtcaacgtagctt

SEQ ID NO: 1655865 - DNA, 25 bp, Homo sapien
tccacctggtgttcctcgagccagg

SEQ ID NO: 1655866 - DNA, 25 bp, Homo sapien
cattaggctctaagcccgcatctca

SEQ ID NO: 1655867 - DNA, 25 bp, Homo sapien
tgggtgattccgttctccagtagcc

SEQ ID NO: 1655868 - DNA, 25 bp, Homo sapien
gattcctacttgagttggcctcgcc

SEQ ID NO: 1655869 - DNA, 25 bp, Homo sapien
ttttccagggccccgcccatgctca

SEQ ID NO: 1655870 - DNA, 25 bp, Homo sapien
tttttccagggccccgcccatgctc

SEQ ID NO: 1655871 - DNA, 25 bp, Homo sapien
tttccagggccccgcccatgctcac

SEQ ID NO: 1655872 - DNA, 25 bp, Homo sapien
ctggagcgcagaccgtttcgcagac

SEQ ID NO: 1655873 - DNA, 25 bp, Homo sapien
cagaccgtttcgcagaccagcgggc

SEQ ID NO: 1655874 - DNA, 25 bp, Homo sapien
ggagcgcagaccgtttcgcagacca

SEQ ID NO: 1655875 - DNA, 25 bp, Homo sapien
agcgcagaccgtttcgcagaccagc

SEQ ID NO: 1655876 - DNA, 25 bp, Homo sapien
ggtcctcagagggtcccggtgcatc

SEQ ID NO: 1655877 - DNA, 25 bp, Homo sapien
ctaggttaaggttggagtcaggatc

SEQ ID NO: 1655878 - DNA, 25 bp, Homo sapien
cgcttgtggagtcaaggttgcatca

SEQ ID NO: 1655879 - DNA, 25 bp, Homo sapien
gacccggaccagaggctaggtctag

SEQ ID NO: 1655880 - DNA, 25 bp, Homo sapien
tggcactggtcgcagtgctcaccca

SEQ ID NO: 1655881 - DNA, 25 bp, Homo sapien
catcacagtgacagctctcacattc

SEQ ID NO: 1655882 - DNA, 25 bp, Homo sapien
atcacagtgacagctctcacattca

SEQ ID NO: 1655883 - DNA, 25 bp, Homo sapien
cactggtcgcagtgctcacccatgt

SEQ ID NO: 1655884 - DNA, 25 bp, Homo sapien
gggaccctggctggtagttcccata

SEQ ID NO: 1655885 - DNA, 25 bp, Homo sapien
ggaccctggctggtagttcccatac

SEQ ID NO: 1655886 - DNA, 25 bp, Homo sapien
gggatgatggtgaagcggggctcat

SEQ ID NO: 1655887 - DNA, 25 bp, Homo sapien
gatgatggtgaagcggggctcatct

SEQ ID NO: 1655888 - DNA, 25 bp, Homo sapien
ggatgatggtgaagcggggctcatc

SEQ ID NO: 1655889 - DNA, 25 bp, Homo sapien
tctgggctcagtggggccccaacct

SEQ ID NO: 1655890 - DNA, 25 bp, Homo sapien
tcctggttcaggctgaggccatgac

SEQ ID NO: 1655891 - DNA, 25 bp, Homo sapien
ctcctcctggttcaggctgaggcca

SEQ ID NO: 1655892 - DNA, 25 bp, Homo sapien
cttcctcctcgctgtggtctgggct

SEQ ID NO: 1655893 - DNA, 25 bp, Homo sapien
atcttcctggtcccggctgccatga

SEQ ID NO: 1655894 - DNA, 25 bp, Homo sapien
gaactttcatcgtcttcctcatggg

SEQ ID NO: 1655895 - DNA, 25 bp, Homo sapien
gcttctatccttgaccactgtgtgt

SEQ ID NO: 1655896 - DNA, 25 bp, Homo sapien
ctcagaatcatccttcctcaaatgg

SEQ ID NO: 1655897 - DNA, 25 bp, Homo sapien
gaccctggtgccaacgttcagtgga

SEQ ID NO: 1655898 - DNA, 25 bp, Homo sapien
gcttgcaacatagtggccgaactgg

SEQ ID NO: 1655899 - DNA, 25 bp, Homo sapien
gcctcgaggttggtggcttgcaaca

SEQ ID NO: 1655900 - DNA, 25 bp, Homo sapien
catctacaaggccatggtggacatg

SEQ ID NO: 1655901 - DNA, 25 bp, Homo sapien
tggtcagggacatgatggtggtgtt

SEQ ID NO: 1655902 - DNA, 25 bp, Homo sapien
gcctggtgtccatactcagtggaga

SEQ ID NO: 1655903 - DNA, 25 bp, Homo sapien
atgatggtgtccatctgagacatct

SEQ ID NO: 1655904 - DNA, 25 bp, Homo sapien
tcttcctttctgtggtcttggtgcc

SEQ ID NO: 1655905 - DNA, 25 bp, Homo sapien
tcttcaatcccgtggccttggtgcc

SEQ ID NO: 1655906 - DNA, 25 bp, Homo sapien
tgcctgtgggcctggtgtccatact

SEQ ID NO: 1655907 - DNA, 25 bp, Homo sapien
gatgatggtgtccatctgagacatc

SEQ ID NO: 1655908 - DNA, 25 bp, Homo sapien
tgtgggcctggtgtccatactcagt

SEQ ID NO: 1655909 - DNA, 25 bp, Homo sapien
ggcctggtgtccatactcagtggag

SEQ ID NO: 1655910 - DNA, 25 bp, Homo sapien
tcatcctcgtcttgatggctgtggc

SEQ ID NO: 1655911 - DNA, 25 bp, Homo sapien
tcagctgagtcttccgtgtcttcac

SEQ ID NO: 1655912 - DNA, 25 bp, Homo sapien
tgagacaccctcatctccgactttg

SEQ ID NO: 1655913 - DNA, 25 bp, Homo sapien
accatgctctgcaaagacctcctca

SEQ ID NO: 1655914 - DNA, 25 bp, Homo sapien
gaagcgtgcagccatggcctatggt

SEQ ID NO: 1655915 - DNA, 25 bp, Homo sapien
tgttccggtttctgaagcctagccc

SEQ ID NO: 1655916 - DNA, 25 bp, Homo sapien
tcatcctccttttcacggtctgggt

SEQ ID NO: 1655917 - DNA, 25 bp, Homo sapien
tggcgaagctctgctgatgcctcct

SEQ ID NO: 1655918 - DNA, 25 bp, Homo sapien
tttgtcctttcggtctctgtccacc

SEQ ID NO: 1655919 - DNA, 25 bp, Homo sapien
ctgcctctgcggcaatgtggacaaa

SEQ ID NO: 1655920 - DNA, 25 bp, Homo sapien
tcctttgtcctttcggtctctgtcc

SEQ ID NO: 1655921 - DNA, 25 bp, Homo sapien
tctgcggcaatgtggacaaacgttg

SEQ ID NO: 1655922 - DNA, 25 bp, Homo sapien
tatggccattgtacctgagaaactg

SEQ ID NO: 1655923 - DNA, 25 bp, Homo sapien
tacatccaatatggcagtcctggcc

SEQ ID NO: 1655924 - DNA, 25 bp, Homo sapien
gaacccatgcagctatcacattgga

SEQ ID NO: 1655925 - DNA, 25 bp, Homo sapien
caagctccagactattccgtgaaga

SEQ ID NO: 1655926 - DNA, 25 bp, Homo sapien
tgcttcctttcttgttggcatgatt

SEQ ID NO: 1655927 - DNA, 25 bp, Homo sapien
tcaccattgggtatgacggtagctg

SEQ ID NO: 1655928 - DNA, 25 bp, Homo sapien
cggccagttgttggaattttccgag

SEQ ID NO: 1655929 - DNA, 25 bp, Homo sapien
ttcattgcgggtgtgtagaaacaca

SEQ ID NO: 1655930 - DNA, 25 bp, Homo sapien
tggaatagcagtggtaaaagtggac

SEQ ID NO: 1655931 - DNA, 25 bp, Homo sapien
tgggaggtacctgggttgcagctct

SEQ ID NO: 1655932 - DNA, 25 bp, Homo sapien
ctaagaacttgctgggtcctgggag

SEQ ID NO: 1655933 - DNA, 25 bp, Homo sapien
acttgctgggtcctgggaggtacct

SEQ ID NO: 1655934 - DNA, 25 bp, Homo sapien
aggtacctgggttgcagctctggca

SEQ ID NO: 1655935 - DNA, 25 bp, Homo sapien
atgtacctggacttggatggcttgg

SEQ ID NO: 1655936 - DNA, 25 bp, Homo sapien
tctacaccaatgtacctggacttgg

SEQ ID NO: 1655937 - DNA, 25 bp, Homo sapien
ccaatgtacctggacttggatggct

SEQ ID NO: 1655938 - DNA, 25 bp, Homo sapien
cttcttctacaccaatgtacctgga

SEQ ID NO: 1655939 - DNA, 25 bp, Homo sapien
tctgcctttgacagcaggaggaact

SEQ ID NO: 1655940 - DNA, 25 bp, Homo sapien
cagggggttgctgaacgtcactgag

SEQ ID NO: 1655941 - DNA, 25 bp, Homo sapien
tgctgaacgtcactgaggctgcttt

SEQ ID NO: 1655942 - DNA, 25 bp, Homo sapien
ggttgctgaacgtcactgaggctgc

SEQ ID NO: 1655943 - DNA, 25 bp, Homo sapien
aggaagcatctcccacgttggattt

SEQ ID NO: 1655944 - DNA, 25 bp, Homo sapien
gaagcatctcccacgttggatttta

SEQ ID NO: 1655945 - DNA, 25 bp, Homo sapien
aagcatctcccacgttggattttac

SEQ ID NO: 1655946 - DNA, 25 bp, Homo sapien
ggaagcatctcccacgttggatttt

SEQ ID NO: 1655947 - DNA, 25 bp, Homo sapien
acagcccaggtgatttgcagttcct

SEQ ID NO: 1655948 - DNA, 25 bp, Homo sapien
agcccaggtgatttgcagttcctgg

SEQ ID NO: 1655949 - DNA, 25 bp, Homo sapien
cagcccaggtgatttgcagttcctg

SEQ ID NO: 1655950 - DNA, 25 bp, Homo sapien
tttacagacaacaagcacagatact

SEQ ID NO: 1655951 - DNA, 25 bp, Homo sapien
cccaatttccgtcactccagagagt

SEQ ID NO: 1655952 - DNA, 25 bp, Homo sapien
catctttgctaagcccgaggtcata

SEQ ID NO: 1655953 - DNA, 25 bp, Homo sapien
catataagtctgacctgttcttggg

SEQ ID NO: 1655954 - DNA, 25 bp, Homo sapien
tcaacacaggcgtggccattggtgg

SEQ ID NO: 1655955 - DNA, 25 bp, Homo sapien
tggcagccaccttgacataatcgtc

SEQ ID NO: 1655956 - DNA, 25 bp, Homo sapien
aaagacgagggatgttgtccgcgtt

SEQ ID NO: 1655957 - DNA, 25 bp, Homo sapien
cgcgttgaggttatcaggttgacca

SEQ ID NO: 1655958 - DNA, 25 bp, Homo sapien
taggaggtgaaggtgatgatggtcc

SEQ ID NO: 1655959 - DNA, 25 bp, Homo sapien
ggaggtgaaggtgatgatggtcccc

SEQ ID NO: 1655960 - DNA, 25 bp, Homo sapien
ctccggccttgtaggaggtgaaggt

SEQ ID NO: 1655961 - DNA, 25 bp, Homo sapien
aggtgaaggtgatgatggtccccat

SEQ ID NO: 1655962 - DNA, 25 bp, Homo sapien
ggctcagggaagagggtacacggcc

SEQ ID NO: 1655963 - DNA, 25 bp, Homo sapien
cagggaagagggtacacggcccctg

SEQ ID NO: 1655964 - DNA, 25 bp, Homo sapien
gctcagggaagagggtacacggccc

SEQ ID NO: 1655965 - DNA, 25 bp, Homo sapien
gcttggaagggtaggactaccagta

SEQ ID NO: 1655966 - DNA, 25 bp, Homo sapien
gagtgggcttggaagggtaggacta

SEQ ID NO: 1655967 - DNA, 25 bp, Homo sapien
ggactaccagtaaataagcaggcta

SEQ ID NO: 1655968 - DNA, 25 bp, Homo sapien
gggtaggactaccagtaaataagca

SEQ ID NO: 1655969 - DNA, 25 bp, Homo sapien
gcccagaagtaacacgatggaatta

SEQ ID NO: 1655970 - DNA, 25 bp, Homo sapien
ggtggcccagaagtaacacgatgga

SEQ ID NO: 1655971 - DNA, 25 bp, Homo sapien
tatgaacggtgtcaaggtggcccag

SEQ ID NO: 1655972 - DNA, 25 bp, Homo sapien
ggagtagaaatatgaacggtgtcaa

SEQ ID NO: 1655973 - DNA, 25 bp, Homo sapien
tacaagaagtactggtgggcccagt

SEQ ID NO: 1655974 - DNA, 25 bp, Homo sapien
ctgtgatcacgaccgagaagacaac

SEQ ID NO: 1655975 - DNA, 25 bp, Homo sapien
actgtggtccgaggcatggagggta

SEQ ID NO: 1655976 - DNA, 25 bp, Homo sapien
acaacccaggctgcggttcgggacg

SEQ ID NO: 1655977 - DNA, 25 bp, Homo sapien
tgttcttcaccagtgggcagtggtc

SEQ ID NO: 1655978 - DNA, 25 bp, Homo sapien
atgttcttcaccagtgggcagtggt

SEQ ID NO: 1655979 - DNA, 25 bp, Homo sapien
ctgggggtggacacggtgggcagag

SEQ ID NO: 1655980 - DNA, 25 bp, Homo sapien
tgggggtggacacggtgggcagaga

SEQ ID NO: 1655981 - DNA, 25 bp, Homo sapien
gggggtggacacggtgggcagagac

SEQ ID NO: 1655982 - DNA, 25 bp, Homo sapien
cggatgttgtccacatgcagccact

SEQ ID NO: 1655983 - DNA, 25 bp, Homo sapien
gatcacctccatgtataagagcggg

SEQ ID NO: 1655984 - DNA, 25 bp, Homo sapien
gcgggatcccgaataagagaagcat

SEQ ID NO: 1655985 - DNA, 25 bp, Homo sapien
acaagctgcttccagacccggatgt

SEQ ID NO: 1655986 - DNA, 25 bp, Homo sapien
gttttttcagagaactgaacagtgg

SEQ ID NO: 1655987 - DNA, 25 bp, Homo sapien
tgggagttttttcagagaactgaac

SEQ ID NO: 1655988 - DNA, 25 bp, Homo sapien
ttttttcagagaactgaacagtgga

SEQ ID NO: 1655989 - DNA, 25 bp, Homo sapien
ggagatgggagttttttcagagaac

SEQ ID NO: 1655990 - DNA, 25 bp, Homo sapien
ttcttaaagacccactcagtgatca

SEQ ID NO: 1655991 - DNA, 25 bp, Homo sapien
cagtgatcatccactgggcaagttc

SEQ ID NO: 1655992 - DNA, 25 bp, Homo sapien
tccttttggggagtacttcagcacc

SEQ ID NO: 1655993 - DNA, 25 bp, Homo sapien
tggcactaccctcccacaagttctt

SEQ ID NO: 1655994 - DNA, 25 bp, Homo sapien
aaaaagatctgcttacatccagtcc

SEQ ID NO: 1655995 - DNA, 25 bp, Homo sapien
atgaactaatacagactggaagcct

SEQ ID NO: 1655996 - DNA, 25 bp, Homo sapien
aactgaacatctgagacatctatag

SEQ ID NO: 1655997 - DNA, 25 bp, Homo sapien
gaagccttgtgacaggaaaactgaa

SEQ ID NO: 1655998 - DNA, 25 bp, Homo sapien
caggaagggattgcaagtccaggcc

SEQ ID NO: 1655999 - DNA, 25 bp, Homo sapien
ggatccagggagatcaacagttgca

SEQ ID NO: 1656000 - DNA, 25 bp, Homo sapien
gatttattcaccaacagcattgctc

SEQ ID NO: 1656001 - DNA, 25 bp, Homo sapien
agacaggcaccccagaagtagcagg

SEQ ID NO: 1656002 - DNA, 25 bp, Homo sapien
gacaatggcaaaaagggtgatcatc

SEQ ID NO: 1656003 - DNA, 25 bp, Homo sapien
ggtgatcatcaagagcagtgcccac

SEQ ID NO: 1656004 - DNA, 25 bp, Homo sapien
gaagggaatcctatgtatgcggcag

SEQ ID NO: 1656005 - DNA, 25 bp, Homo sapien
tgtggaggctgtcataggcccgtct

SEQ ID NO: 1656006 - DNA, 25 bp, Homo sapien
ggtatggtcgaagcacctcttttga

SEQ ID NO: 1656007 - DNA, 25 bp, Homo sapien
tgggtatggtcgaagcacctctttt

SEQ ID NO: 1656008 - DNA, 25 bp, Homo sapien
ggtgggtatggtcgaagcacctctt

SEQ ID NO: 1656009 - DNA, 25 bp, Homo sapien
gggtatggtcgaagcacctcttttg

SEQ ID NO: 1656010 - DNA, 25 bp, Homo sapien
tgagatgactgggttctttcaccca

SEQ ID NO: 1656011 - DNA, 25 bp, Homo sapien
agaaaacccatgagtcttcgggcag

SEQ ID NO: 1656012 - DNA, 25 bp, Homo sapien
ttcagaatatcaaaatccccaagag

SEQ ID NO: 1656013 - DNA, 25 bp, Homo sapien
cacccagagtgaattgaaaggtctg

SEQ ID NO: 1656014 - DNA, 25 bp, Homo sapien
gttctgggtcctgggggaggctcac

SEQ ID NO: 1656015 - DNA, 25 bp, Homo sapien
ggttctgggtcctgggggaggctca

SEQ ID NO: 1656016 - DNA, 25 bp, Homo sapien
caaagatgaaccatcatggtcacaa

SEQ ID NO: 1656017 - DNA, 25 bp, Homo sapien
cccaggacatgtaggtgatcggctt

SEQ ID NO: 1656018 - DNA, 25 bp, Homo sapien
gtggcccaacaggatcgtcaggtct

SEQ ID NO: 1656019 - DNA, 25 bp, Homo sapien
tcacaaagatgattagcagcacaac

SEQ ID NO: 1656020 - DNA, 25 bp, Homo sapien
tacttttgaccaagccattcttagc

SEQ ID NO: 1656021 - DNA, 25 bp, Homo sapien
tattacatagctttcaccaggcggg

SEQ ID NO: 1656022 - DNA, 25 bp, Homo sapien
gtctcttggtctagggtgcccatca

SEQ ID NO: 1656023 - DNA, 25 bp, Homo sapien
gttgccctggctacctctactatag

SEQ ID NO: 1656024 - DNA, 25 bp, Homo sapien
cttccctatagtcccatgctttgtg

SEQ ID NO: 1656025 - DNA, 25 bp, Homo sapien
atgctttgtgagaacctgggcttag

SEQ ID NO: 1656026 - DNA, 25 bp, Homo sapien
aagaagaggccgcacacgaacatga

SEQ ID NO: 1656027 - DNA, 25 bp, Homo sapien
cacgaacatgagcaaaaagactccc

SEQ ID NO: 1656028 - DNA, 25 bp, Homo sapien
tagctgcctgaaggtcgagtgaaga

SEQ ID NO: 1656029 - DNA, 25 bp, Homo sapien
caaatacgacaacgacgatgatggg

SEQ ID NO: 1656030 - DNA, 25 bp, Homo sapien
atctggatcaaggttagaagtcacg

SEQ ID NO: 1656031 - DNA, 25 bp, Homo sapien
tctggatcaaggttagaagtcacgg

SEQ ID NO: 1656032 - DNA, 25 bp, Homo sapien
gatctggatcaaggttagaagtcac

SEQ ID NO: 1656033 - DNA, 25 bp, Homo sapien
agatctggatcaaggttagaagtca

SEQ ID NO: 1656034 - DNA, 25 bp, Homo sapien
aggagtagggcctaggtcagagtac

SEQ ID NO: 1656035 - DNA, 25 bp, Homo sapien
ttaggagtagggcctaggtcagagt

SEQ ID NO: 1656036 - DNA, 25 bp, Homo sapien
taggagtagggcctaggtcagagta

SEQ ID NO: 1656037 - DNA, 25 bp, Homo sapien
agcagctttgtatgtttcctgaaga

SEQ ID NO: 1656038 - DNA, 25 bp, Homo sapien
cctggagtggagtaatgatgccctg

SEQ ID NO: 1656039 - DNA, 25 bp, Homo sapien
ggacatggcttcaacaaaggacagg

SEQ ID NO: 1656040 - DNA, 25 bp, Homo sapien
gatgccctgcataatccctattgcg

SEQ ID NO: 1656041 - DNA, 25 bp, Homo sapien
ctgaaaatccctggatcactgagaa

SEQ ID NO: 1656042 - DNA, 25 bp, Homo sapien
gtgtcattgaactaaacaataacaa

SEQ ID NO: 1656043 - DNA, 25 bp, Homo sapien
gtgttaaagtgtcattgaactaaac

SEQ ID NO: 1656044 - DNA, 25 bp, Homo sapien
tagacaagtatacattctatcttcc

SEQ ID NO: 1656045 - DNA, 25 bp, Homo sapien
agaaactgagtctctatgttgcact

SEQ ID NO: 1656046 - DNA, 25 bp, Homo sapien
ggcagtttccctaggtttatcagct

SEQ ID NO: 1656047 - DNA, 25 bp, Homo sapien
cactgagccaggcattgtagatgga

SEQ ID NO: 1656048 - DNA, 25 bp, Homo sapien
cctcgcggagaaccatgcttttgat

SEQ ID NO: 1656049 - DNA, 25 bp, Homo sapien
tagtacatcaggaacatgcataaga

SEQ ID NO: 1656050 - DNA, 25 bp, Homo sapien
ttaaaagcacagattaggcctggcg

SEQ ID NO: 1656051 - DNA, 25 bp, Homo sapien
tgcataagaatgtttgcagcaacat

SEQ ID NO: 1656052 - DNA, 25 bp, Homo sapien
gaatagacaactatgccccaacaat

SEQ ID NO: 1656053 - DNA, 25 bp, Homo sapien
gcaaacatgttggatgagaaaaaga

SEQ ID NO: 1656054 - DNA, 25 bp, Homo sapien
gagaatgtatatatgagggaacaaa

SEQ ID NO: 1656055 - DNA, 25 bp, Homo sapien
agtggacaaattatattgcttagct

SEQ ID NO: 1656056 - DNA, 25 bp, Homo sapien
catattgctttatataagtggacaa

SEQ ID NO: 1656057 - DNA, 25 bp, Homo sapien
tgatgggagggcaatgcattacgcc

SEQ ID NO: 1656058 - DNA, 25 bp, Homo sapien
tttgttagaggaagggtctcgccca

SEQ ID NO: 1656059 - DNA, 25 bp, Homo sapien
cacagagagcatctagggttattct

SEQ ID NO: 1656060 - DNA, 25 bp, Homo sapien
aaatggaagtctcacacatccctga

SEQ ID NO: 1656061 - DNA, 25 bp, Homo sapien
gacaatcaaggttctagtacagaga

SEQ ID NO: 1656062 - DNA, 25 bp, Homo sapien
gattcacctgtccaagtctctgttg

SEQ ID NO: 1656063 - DNA, 25 bp, Homo sapien
aacaaggactgtggtctgattcacc

SEQ ID NO: 1656064 - DNA, 25 bp, Homo sapien
cagaaatccccaattcaggagttaa

SEQ ID NO: 1656065 - DNA, 25 bp, Homo sapien
gcctgtgttagacaaaacttgaccc

SEQ ID NO: 1656066 - DNA, 25 bp, Homo sapien
tatcacagacacgagaaaggcatca

SEQ ID NO: 1656067 - DNA, 25 bp, Homo sapien
caacggagccaaggcctatgcctgt

SEQ ID NO: 1656068 - DNA, 25 bp, Homo sapien
tgtgtgatgactgtcgcccagaagc

SEQ ID NO: 1656069 - DNA, 25 bp, Homo sapien
tgaagaaaccgacaatgatgaaaca

SEQ ID NO: 1656070 - DNA, 25 bp, Homo sapien
gaaacaggggagcagtaccaagaca

SEQ ID NO: 1656071 - DNA, 25 bp, Homo sapien
gagtagagtccggatgaagaaaccg

SEQ ID NO: 1656072 - DNA, 25 bp, Homo sapien
ccccttccaggagtagagtccggat

SEQ ID NO: 1656073 - DNA, 25 bp, Homo sapien
ccagtggacttgagcccattgatca

SEQ ID NO: 1656074 - DNA, 25 bp, Homo sapien
catgaaagcaccaacaagacaccag

SEQ ID NO: 1656075 - DNA, 25 bp, Homo sapien
agactgtagactggtgacccgccat

SEQ ID NO: 1656076 - DNA, 25 bp, Homo sapien
gggtgttgtccgttcacattcagga

SEQ ID NO: 1656077 - DNA, 25 bp, Homo sapien
ccacattgaagtacaggccgaggat

SEQ ID NO: 1656078 - DNA, 25 bp, Homo sapien
catggaacgggaaactggaaggact

SEQ ID NO: 1656079 - DNA, 25 bp, Homo sapien
ggaaggactggctcatgtagaagat

SEQ ID NO: 1656080 - DNA, 25 bp, Homo sapien
tagagttcatcgttaagggacattt

SEQ ID NO: 1656081 - DNA, 25 bp, Homo sapien
gaagatgtagatggcagcgaaactg

SEQ ID NO: 1656082 - DNA, 25 bp, Homo sapien
catgaagctagaataccccacacca

SEQ ID NO: 1656083 - DNA, 25 bp, Homo sapien
ggcaatgatcttccatacacccatg

SEQ ID NO: 1656084 - DNA, 25 bp, Homo sapien
gaaccccgaccaggaacagcatgaa

SEQ ID NO: 1656085 - DNA, 25 bp, Homo sapien
tccaagatgttgcagaccgggtcaa

SEQ ID NO: 1656086 - DNA, 25 bp, Homo sapien
caaggatgtcgaaggctgggcctct

SEQ ID NO: 1656087 - DNA, 25 bp, Homo sapien
taagccacaggtaggcaaagcgcca

SEQ ID NO: 1656088 - DNA, 25 bp, Homo sapien
tgcaacccgggctgctgaaacttgg

SEQ ID NO: 1656089 - DNA, 25 bp, Homo sapien
gctcccgcttctgcaagggagggtt

SEQ ID NO: 1656090 - DNA, 25 bp, Homo sapien
tcccgcttctgcaagggagggttca

SEQ ID NO: 1656091 - DNA, 25 bp, Homo sapien
ctcccgcttctgcaagggagggttc

SEQ ID NO: 1656092 - DNA, 25 bp, Homo sapien
gacaaacctttaactagatgtacta

SEQ ID NO: 1656093 - DNA, 25 bp, Homo sapien
actcaaatgattaaaaccagaaatg

SEQ ID NO: 1656094 - DNA, 25 bp, Homo sapien
tgacaaacctttaactagatgtact

SEQ ID NO: 1656095 - DNA, 25 bp, Homo sapien
caaacctttaactagatgtactaag

SEQ ID NO: 1656096 - DNA, 25 bp, Homo sapien
gaattggctcaaactcggactggat

SEQ ID NO: 1656097 - DNA, 25 bp, Homo sapien
cactcgggcacttgacactgatggc

SEQ ID NO: 1656098 - DNA, 25 bp, Homo sapien
gagataatacctcgcatccattagg

SEQ ID NO: 1656099 - DNA, 25 bp, Homo sapien
gactgatggccgaatcctgtcaagg

SEQ ID NO: 1656100 - DNA, 25 bp, Homo sapien
tcagtccagccagtcggacaaaaat

SEQ ID NO: 1656101 - DNA, 25 bp, Homo sapien
caggccccttcaggcgtcgacagat

SEQ ID NO: 1656102 - DNA, 25 bp, Homo sapien
gtttgggcgacacccctcgatctgc

SEQ ID NO: 1656103 - DNA, 25 bp, Homo sapien
tccagccagtcggacaaaaatgagg

SEQ ID NO: 1656104 - DNA, 25 bp, Homo sapien
gaaatcatccaactaagctgctccc

SEQ ID NO: 1656105 - DNA, 25 bp, Homo sapien
taaatctccagatgactacagcccc

SEQ ID NO: 1656106 - DNA, 25 bp, Homo sapien
tgaaccatggtgaagtggatcctcc

SEQ ID NO: 1656107 - DNA, 25 bp, Homo sapien
tcaccatacggtgaggacactcaag

SEQ ID NO: 1656108 - DNA, 25 bp, Homo sapien
tgcccagcccggccttgtctcttaa

SEQ ID NO: 1656109 - DNA, 25 bp, Homo sapien
cgtgcccagcccggccttgtctctt

SEQ ID NO: 1656110 - DNA, 25 bp, Homo sapien
cagcccggccttgtctcttaaagga

SEQ ID NO: 1656111 - DNA, 25 bp, Homo sapien
cccagcccggccttgtctcttaaag

SEQ ID NO: 1656112 - DNA, 25 bp, Homo sapien
tcagcacgccacttccttcaaaggc

SEQ ID NO: 1656113 - DNA, 25 bp, Homo sapien
gtcagcacgccacttccttcaaagg

SEQ ID NO: 1656114 - DNA, 25 bp, Homo sapien
gtgtatgcagtaacaggtattctat

SEQ ID NO: 1656115 - DNA, 25 bp, Homo sapien
acaggtattctatttgtagttgtta

SEQ ID NO: 1656116 - DNA, 25 bp, Homo sapien
caggtattctatttgtagttgttag

SEQ ID NO: 1656117 - DNA, 25 bp, Homo sapien
gtattctatttgtagttgttaggat

SEQ ID NO: 1656118 - DNA, 25 bp, Homo sapien
tagtagcttaatacaacaggttgtt

SEQ ID NO: 1656119 - DNA, 25 bp, Homo sapien
aaatcttagtagcttaatacaacag

SEQ ID NO: 1656120 - DNA, 25 bp, Homo sapien
tcttagtagcttaatacaacaggtt

SEQ ID NO: 1656121 - DNA, 25 bp, Homo sapien
tagctgatttaacaaacaaccgtaa

SEQ ID NO: 1656122 - DNA, 25 bp, Homo sapien
gtccaaaatgctttatgtaagtcca

SEQ ID NO: 1656123 - DNA, 25 bp, Homo sapien
attccattggcccaagaccagtcac

SEQ ID NO: 1656124 - DNA, 25 bp, Homo sapien
caggctgagtctagaaatgggctgt

SEQ ID NO: 1656125 - DNA, 25 bp, Homo sapien
agtaaggattatggaggacatttca

SEQ ID NO: 1656126 - DNA, 25 bp, Homo sapien
ttagaaggacacttgtcagccgggt

SEQ ID NO: 1656127 - DNA, 25 bp, Homo sapien
gtgtctaccatcacatggtgctctc

SEQ ID NO: 1656128 - DNA, 25 bp, Homo sapien
agaaggacacttgtcagccgggtgc

SEQ ID NO: 1656129 - DNA, 25 bp, Homo sapien
tctgtgtctaccatcacatggtgct

SEQ ID NO: 1656130 - DNA, 25 bp, Homo sapien
gataatgcagtatcttgagatcctg

SEQ ID NO: 1656131 - DNA, 25 bp, Homo sapien
cacttgtcatcagatttaggggtca

SEQ ID NO: 1656132 - DNA, 25 bp, Homo sapien
acagataatgcagtatcttgagatc

SEQ ID NO: 1656133 - DNA, 25 bp, Homo sapien
cagatttaggggtcacacagataat

SEQ ID NO: 1656134 - DNA, 25 bp, Homo sapien
ggtgcaaggattgctcgagcctggg

SEQ ID NO: 1656135 - DNA, 25 bp, Homo sapien
tgaggtgcaaggattgctcgagcct

SEQ ID NO: 1656136 - DNA, 25 bp, Homo sapien
gaggtgcaaggattgctcgagcctg

SEQ ID NO: 1656137 - DNA, 25 bp, Homo sapien
tgcaaggattgctcgagcctgggaa

SEQ ID NO: 1656138 - DNA, 25 bp, Homo sapien
actcccactccatagcaagacccca

SEQ ID NO: 1656139 - DNA, 25 bp, Homo sapien
gctgttttccccaccgtactccagc

SEQ ID NO: 1656140 - DNA, 25 bp, Homo sapien
aaaaaatacaacactcccactccat

SEQ ID NO: 1656141 - DNA, 25 bp, Homo sapien
cactcccactccatagcaagacccc

SEQ ID NO: 1656142 - DNA, 25 bp, Homo sapien
gcgggacgtcgtagagaaaaccatc

SEQ ID NO: 1656143 - DNA, 25 bp, Homo sapien
caggcataaacagctccaaagggaa

SEQ ID NO: 1656144 - DNA, 25 bp, Homo sapien
ctatgtgcagttccaggtaagcccc

SEQ ID NO: 1656145 - DNA, 25 bp, Homo sapien
gagacagagacttatgagccgtaga

SEQ ID NO: 1656146 - DNA, 25 bp, Homo sapien
ttctcgcccgggtgggcatcacccc

SEQ ID NO: 1656147 - DNA, 25 bp, Homo sapien
ccgtctcgccagcaccccttcgact

SEQ ID NO: 1656148 - DNA, 25 bp, Homo sapien
tcgccagcaccccttcgacttctct

SEQ ID NO: 1656149 - DNA, 25 bp, Homo sapien
gtctcgccagcaccccttcgacttc

SEQ ID NO: 1656150 - DNA, 25 bp, Homo sapien
tagctcgggttcatgacgctctcga

SEQ ID NO: 1656151 - DNA, 25 bp, Homo sapien
tcatgacgctctcgatattcctgtg

SEQ ID NO: 1656152 - DNA, 25 bp, Homo sapien
gctctcgatattcctgtgcagaaac

SEQ ID NO: 1656153 - DNA, 25 bp, Homo sapien
cctttctctatagctcgggttcatg

SEQ ID NO: 1656154 - DNA, 25 bp, Homo sapien
tagaaagttcaacacactgcttgtg

SEQ ID NO: 1656155 - DNA, 25 bp, Homo sapien
aaatagctttatcctctgtcagaac

SEQ ID NO: 1656156 - DNA, 25 bp, Homo sapien
gctcctgcacagaaagggttcatct

SEQ ID NO: 1656157 - DNA, 25 bp, Homo sapien
gaaggaaaccgtctagctcagggct

SEQ ID NO: 1656158 - DNA, 25 bp, Homo sapien
tagcgctctccaagacatgcagagg

SEQ ID NO: 1656159 - DNA, 25 bp, Homo sapien
tgaggtcaacccctttacatcacag

SEQ ID NO: 1656160 - DNA, 25 bp, Homo sapien
gacaagccaatgtgtaactagcgct

SEQ ID NO: 1656161 - DNA, 25 bp, Homo sapien
cacaatccctgatactccggagtga

SEQ ID NO: 1656162 - DNA, 25 bp, Homo sapien
tggtggagacctcgaagacataggc

SEQ ID NO: 1656163 - DNA, 25 bp, Homo sapien
tgggccccacgctcgctggtggaga

SEQ ID NO: 1656164 - DNA, 25 bp, Homo sapien
aagacataggcggtgcagagcagca

SEQ ID NO: 1656165 - DNA, 25 bp, Homo sapien
ctgaccaggcggtaaatgtgatgct

SEQ ID NO: 1656166 - DNA, 25 bp, Homo sapien
gcagctgccgcaacttgtgcaagaa

SEQ ID NO: 1656167 - DNA, 25 bp, Homo sapien
aattcaccaggtactcgcacatggg

SEQ ID NO: 1656168 - DNA, 25 bp, Homo sapien
gcgcagcaggcggtacacaaatctg

SEQ ID NO: 1656169 - DNA, 25 bp, Homo sapien
tgttcatcatgtatcgctcaggcag

SEQ ID NO: 1656170 - DNA, 25 bp, Homo sapien
tgccaaaagagcagaccttggagga

SEQ ID NO: 1656171 - DNA, 25 bp, Homo sapien
gcttgccaaaagagcagaccttgga

SEQ ID NO: 1656172 - DNA, 25 bp, Homo sapien
ccaaaagagcagaccttggaggaac

SEQ ID NO: 1656173 - DNA, 25 bp, Homo sapien
aaaagagcagaccttggaggaacag

SEQ ID NO: 1656174 - DNA, 25 bp, Homo sapien
ccacttgggccccagttcaggtccg

SEQ ID NO: 1656175 - DNA, 25 bp, Homo sapien
tgctcactccgtagaagccaccact

SEQ ID NO: 1656176 - DNA, 25 bp, Homo sapien
tgagggtcatgtgttccaggctctc

SEQ ID NO: 1656177 - DNA, 25 bp, Homo sapien
gctgctcactccgtagaagccacca

SEQ ID NO: 1656178 - DNA, 25 bp, Homo sapien
caccacaggatttgtgagcactttt

SEQ ID NO: 1656179 - DNA, 25 bp, Homo sapien
ggtagggcccgcgacagattctctc

SEQ ID NO: 1656180 - DNA, 25 bp, Homo sapien
gcgacagattctctcagggccagag

SEQ ID NO: 1656181 - DNA, 25 bp, Homo sapien
tgggacaccacaggatttgtgagca

SEQ ID NO: 1656182 - DNA, 25 bp, Homo sapien
ggacgtccacactctcgagcggcgg

SEQ ID NO: 1656183 - DNA, 25 bp, Homo sapien
atagctctcggaggccacccttttt

SEQ ID NO: 1656184 - DNA, 25 bp, Homo sapien
gggccacgatcatatagctctcgga

SEQ ID NO: 1656185 - DNA, 25 bp, Homo sapien
ttgtcgtagatctgccggacgtcca

SEQ ID NO: 1656186 - DNA, 25 bp, Homo sapien
tgcctgagcccaccaaatgccgtca

SEQ ID NO: 1656187 - DNA, 25 bp, Homo sapien
aagtcggaggtgagctggatctcca

SEQ ID NO: 1656188 - DNA, 25 bp, Homo sapien
ggtgagaagtcggaggtgagctgga

SEQ ID NO: 1656189 - DNA, 25 bp, Homo sapien
caaatgccgtcaccatccccacagc

SEQ ID NO: 1656190 - DNA, 25 bp, Homo sapien
ctgttccacacagtccacccagcac

SEQ ID NO: 1656191 - DNA, 25 bp, Homo sapien
ttccacacagtccacccagcactgg

SEQ ID NO: 1656192 - DNA, 25 bp, Homo sapien
ccagcactgggcctgactgccaccc

SEQ ID NO: 1656193 - DNA, 25 bp, Homo sapien
cagcactgggcctgactgccaccca

SEQ ID NO: 1656194 - DNA, 25 bp, Homo sapien
tcaaaatccctcagcgactgtacca

SEQ ID NO: 1656195 - DNA, 25 bp, Homo sapien
aaatccctcagcgactgtaccaaaa

SEQ ID NO: 1656196 - DNA, 25 bp, Homo sapien
caaaatccctcagcgactgtaccaa

SEQ ID NO: 1656197 - DNA, 25 bp, Homo sapien
tccctcagcgactgtaccaaaattt

SEQ ID NO: 1656198 - DNA, 25 bp, Homo sapien
tctaccagctgcaaccgggcggtgc

SEQ ID NO: 1656199 - DNA, 25 bp, Homo sapien
catctggcggttccacgaaggctga

SEQ ID NO: 1656200 - DNA, 25 bp, Homo sapien
atcaactgcatctggcggttccacg

SEQ ID NO: 1656201 - DNA, 25 bp, Homo sapien
cgaaggctgagaactctaccagctg

SEQ ID NO: 1656202 - DNA, 25 bp, Homo sapien
tgagagggcttgggggggctcgtac

SEQ ID NO: 1656203 - DNA, 25 bp, Homo sapien
tgggggcaggggtgagagggcttgg

SEQ ID NO: 1656204 - DNA, 25 bp, Homo sapien
gtgagagggcttgggggggctcgta

SEQ ID NO: 1656205 - DNA, 25 bp, Homo sapien
taggtgggggcaggggtgagagggc

SEQ ID NO: 1656206 - DNA, 25 bp, Homo sapien
tcctagccaatgagacgttagggga

SEQ ID NO: 1656207 - DNA, 25 bp, Homo sapien
cacagtcctagccaatgagacgtta

SEQ ID NO: 1656208 - DNA, 25 bp, Homo sapien
cagtcctagccaatgagacgttagg

SEQ ID NO: 1656209 - DNA, 25 bp, Homo sapien
agtcctagccaatgagacgttaggg

SEQ ID NO: 1656210 - DNA, 25 bp, Homo sapien
cagtagatgggggagtcagtgacaa

SEQ ID NO: 1656211 - DNA, 25 bp, Homo sapien
cagtgacaaggtgaacggtgtctgt

SEQ ID NO: 1656212 - DNA, 25 bp, Homo sapien
agtcagtgacaaggtgaacggtgtc

SEQ ID NO: 1656213 - DNA, 25 bp, Homo sapien
gggagtcagtgacaaggtgaacggt

SEQ ID NO: 1656214 - DNA, 25 bp, Homo sapien
ctgggaaacattttcttccttctga

SEQ ID NO: 1656215 - DNA, 25 bp, Homo sapien
tgggaaacattttcttccttctgaa

SEQ ID NO: 1656216 - DNA, 25 bp, Homo sapien
tctgggaaacattttcttccttctg

SEQ ID NO: 1656217 - DNA, 25 bp, Homo sapien
ctctgggaaacattttcttccttct

SEQ ID NO: 1656218 - DNA, 25 bp, Homo sapien
ggcccagatcctccagaccaaaact

SEQ ID NO: 1656219 - DNA, 25 bp, Homo sapien
tggaacattccaggggggcccagat

SEQ ID NO: 1656220 - DNA, 25 bp, Homo sapien
agatcctccagaccaaaactggaaa

SEQ ID NO: 1656221 - DNA, 25 bp, Homo sapien
ccagatcctccagaccaaaactgga

SEQ ID NO: 1656222 - DNA, 25 bp, Homo sapien
gttgccattgtctggaaagccttgt

SEQ ID NO: 1656223 - DNA, 25 bp, Homo sapien
gaaggcgcggagatgagctgggcag

SEQ ID NO: 1656224 - DNA, 25 bp, Homo sapien
ggcgcggagatgagctgggcagagg

SEQ ID NO: 1656225 - DNA, 25 bp, Homo sapien
aaggcgcggagatgagctgggcaga

SEQ ID NO: 1656226 - DNA, 25 bp, Homo sapien
gggacagggcactagtttggagtga

SEQ ID NO: 1656227 - DNA, 25 bp, Homo sapien
cagggcactagtttggagtgagcgt

SEQ ID NO: 1656228 - DNA, 25 bp, Homo sapien
cactagtttggagtgagcgtgggtg

SEQ ID NO: 1656229 - DNA, 25 bp, Homo sapien
gaagctagggcacaacaatcactgg

SEQ ID NO: 1656230 - DNA, 25 bp, Homo sapien
tggatgcgcaacaggaagtggaggt

SEQ ID NO: 1656231 - DNA, 25 bp, Homo sapien
catgacttaggaagtacggcccgga

SEQ ID NO: 1656232 - DNA, 25 bp, Homo sapien
agtgccaagggatggatgcgcaaca

SEQ ID NO: 1656233 - DNA, 25 bp, Homo sapien
aacatgacttaggaagtacggcccg

SEQ ID NO: 1656234 - DNA, 25 bp, Homo sapien
tccttcgggccaaaacctggatgtg

SEQ ID NO: 1656235 - DNA, 25 bp, Homo sapien
ccttcgggccaaaacctggatgtga

SEQ ID NO: 1656236 - DNA, 25 bp, Homo sapien
cttcgggccaaaacctggatgtgac

SEQ ID NO: 1656237 - DNA, 25 bp, Homo sapien
ccagacagaagcccacaagtccatt

SEQ ID NO: 1656238 - DNA, 25 bp, Homo sapien
cctgaacctgcccatgcgaggatga

SEQ ID NO: 1656239 - DNA, 25 bp, Homo sapien
ctgcccatgcgaggatgaccctaag

SEQ ID NO: 1656240 - DNA, 25 bp, Homo sapien
catgcgaggatgaccctaagaagac

SEQ ID NO: 1656241 - DNA, 25 bp, Homo sapien
tccccgttctcagcttgatgtagcg

SEQ ID NO: 1656242 - DNA, 25 bp, Homo sapien
gatgtagcgggcgatcagttcattc

SEQ ID NO: 1656243 - DNA, 25 bp, Homo sapien
tagcgggcgatcagttcattccgac

SEQ ID NO: 1656244 - DNA, 25 bp, Homo sapien
tcgggtcttccccgttctcagcttg

SEQ ID NO: 1656245 - DNA, 25 bp, Homo sapien
caaaattattttccggcggccgcag

SEQ ID NO: 1656246 - DNA, 25 bp, Homo sapien
cgccggtaccctcctcactgccttc

SEQ ID NO: 1656247 - DNA, 25 bp, Homo sapien
cccgtccagccgctgccatcgtcca

SEQ ID NO: 1656248 - DNA, 25 bp, Homo sapien
cactgccgccggtaccctcctcact

SEQ ID NO: 1656249 - DNA, 25 bp, Homo sapien
caagggacttgaagctgagagggct

SEQ ID NO: 1656250 - DNA, 25 bp, Homo sapien
ccaccctcaagggacttgaagctga

SEQ ID NO: 1656251 - DNA, 25 bp, Homo sapien
cctcaagggacttgaagctgagagg

SEQ ID NO: 1656252 - DNA, 25 bp, Homo sapien
caccctcaagggacttgaagctgag

SEQ ID NO: 1656253 - DNA, 25 bp, Homo sapien
gcagcagctgaggccgagaccagga

SEQ ID NO: 1656254 - DNA, 25 bp, Homo sapien
tgaggccgagaccaggagagaccca

SEQ ID NO: 1656255 - DNA, 25 bp, Homo sapien
gagagacccacagaaccacaagctg

SEQ ID NO: 1656256 - DNA, 25 bp, Homo sapien
gcagggacagagactcagggcagca

SEQ ID NO: 1656257 - DNA, 25 bp, Homo sapien
caaagcaggatccccgactcccgcc

SEQ ID NO: 1656258 - DNA, 25 bp, Homo sapien
agcaggatccccgactcccgccggc

SEQ ID NO: 1656259 - DNA, 25 bp, Homo sapien
caggatccccgactcccgccggcgc

SEQ ID NO: 1656260 - DNA, 25 bp, Homo sapien
aaagcaggatccccgactcccgccg

SEQ ID NO: 1656261 - DNA, 25 bp, Homo sapien
tcccggcctggggctggggagccgc

SEQ ID NO: 1656262 - DNA, 25 bp, Homo sapien
gcctggggctggggagccgcgggcg

SEQ ID NO: 1656263 - DNA, 25 bp, Homo sapien
tggggctggggagccgcgggcgggc

SEQ ID NO: 1656264 - DNA, 25 bp, Homo sapien
ctcccggcctggggctggggagccg

SEQ ID NO: 1656265 - DNA, 25 bp, Homo sapien
agaaagttgccgggagctttgtttg

SEQ ID NO: 1656266 - DNA, 25 bp, Homo sapien
ctgcgagggagaaagttgccgggag

SEQ ID NO: 1656267 - DNA, 25 bp, Homo sapien
agggagaaagttgccgggagctttg

SEQ ID NO: 1656268 - DNA, 25 bp, Homo sapien
cgagggagaaagttgccgggagctt

SEQ ID NO: 1656269 - DNA, 25 bp, Homo sapien
taccctggtgatcccctccgctgca

SEQ ID NO: 1656270 - DNA, 25 bp, Homo sapien
ccctggtgatcccctccgctgcagc

SEQ ID NO: 1656271 - DNA, 25 bp, Homo sapien
tctaccctggtgatcccctccgctg

SEQ ID NO: 1656272 - DNA, 25 bp, Homo sapien
cccccgcaaggcggcatctgctggt

SEQ ID NO: 1656273 - DNA, 25 bp, Homo sapien
tcctacagttgtggcggtgacagcg

SEQ ID NO: 1656274 - DNA, 25 bp, Homo sapien
ggtgatcagtgaaaagtccccagaa

SEQ ID NO: 1656275 - DNA, 25 bp, Homo sapien
taatgtgaaggcaccctagggagtc

SEQ ID NO: 1656276 - DNA, 25 bp, Homo sapien
gatctgaatgccgacaaatgtgcca

SEQ ID NO: 1656277 - DNA, 25 bp, Homo sapien
cagtcagtcaagaatgtgccactgt

SEQ ID NO: 1656278 - DNA, 25 bp, Homo sapien
ttgcagtcagtcaagaatgtgccac

SEQ ID NO: 1656279 - DNA, 25 bp, Homo sapien
gaggttgcagtcagtcaagaatgtg

SEQ ID NO: 1656280 - DNA, 25 bp, Homo sapien
ggttgcagtcagtcaagaatgtgcc

SEQ ID NO: 1656281 - DNA, 25 bp, Homo sapien
catttcaccaaagcctgaagcggaa

SEQ ID NO: 1656282 - DNA, 25 bp, Homo sapien
tgaagcggaagagaaaaacacgagc

SEQ ID NO: 1656283 - DNA, 25 bp, Homo sapien
caaaactcaacagggatctcacaga

SEQ ID NO: 1656284 - DNA, 25 bp, Homo sapien
gcaatacataaaaaggacaggccag

SEQ ID NO: 1656285 - DNA, 25 bp, Homo sapien
gtcagctccgggcttaaaaagatcc

SEQ ID NO: 1656286 - DNA, 25 bp, Homo sapien
tggaaccatgtgagggacctactgg

SEQ ID NO: 1656287 - DNA, 25 bp, Homo sapien
ctccgggcttaaaaagatccctctg

SEQ ID NO: 1656288 - DNA, 25 bp, Homo sapien
ccatgtgagggacctactggaggca

SEQ ID NO: 1656289 - DNA, 25 bp, Homo sapien
ttacagtaggaggactggatgtgcc

SEQ ID NO: 1656290 - DNA, 25 bp, Homo sapien
gagctgagccatccgtctgcctcag

SEQ ID NO: 1656291 - DNA, 25 bp, Homo sapien
gaaggagccatccatgtggtaagga

SEQ ID NO: 1656292 - DNA, 25 bp, Homo sapien
tggtaaggagctgagccatccgtct

SEQ ID NO: 1656293 - DNA, 25 bp, Homo sapien
atactacactcccttgcagagactg

SEQ ID NO: 1656294 - DNA, 25 bp, Homo sapien
aacatactacactcccttgcagaga

SEQ ID NO: 1656295 - DNA, 25 bp, Homo sapien
ttcaacatactacactcccttgcag

SEQ ID NO: 1656296 - DNA, 25 bp, Homo sapien
actacactcccttgcagagactggg

SEQ ID NO: 1656297 - DNA, 25 bp, Homo sapien
tattaagatggggacgggcagcgcg

SEQ ID NO: 1656298 - DNA, 25 bp, Homo sapien
caggtcgcgcaggaactaggcgcag

SEQ ID NO: 1656299 - DNA, 25 bp, Homo sapien
aggcgcagtccggagcgcagggcat

SEQ ID NO: 1656300 - DNA, 25 bp, Homo sapien
gcgcagggcatggtctttattaaga

SEQ ID NO: 1656301 - DNA, 25 bp, Homo sapien
tgtgcatgtacgagttcagccagtg

SEQ ID NO: 1656302 - DNA, 25 bp, Homo sapien
gcttgtgcatgtacgagttcagcca

SEQ ID NO: 1656303 - DNA, 25 bp, Homo sapien
tgcatgtacgagttcagccagtggc

SEQ ID NO: 1656304 - DNA, 25 bp, Homo sapien
atgtacgagttcagccagtggcggc

SEQ ID NO: 1656305 - DNA, 25 bp, Homo sapien
tgggggtggcgggatccgcccaggc

SEQ ID NO: 1656306 - DNA, 25 bp, Homo sapien
aggcagtgcggacgccccagggcac

SEQ ID NO: 1656307 - DNA, 25 bp, Homo sapien
gggcagggcgactcccgaggcagtg

SEQ ID NO: 1656308 - DNA, 25 bp, Homo sapien
gcagcagcagccgaacccgagggct

SEQ ID NO: 1656309 - DNA, 25 bp, Homo sapien
gcagccgaacccgagggctcctgga

SEQ ID NO: 1656310 - DNA, 25 bp, Homo sapien
aaaggggctcagtagggctgcatcc

SEQ ID NO: 1656311 - DNA, 25 bp, Homo sapien
cccagcttcccgcacagtcccctac

SEQ ID NO: 1656312 - DNA, 25 bp, Homo sapien
tgcatcccggcccagaaccccgggc

SEQ ID NO: 1656313 - DNA, 25 bp, Homo sapien
agtagggctgcatcccggcccagaa

SEQ ID NO: 1656314 - DNA, 25 bp, Homo sapien
gcaccgggcagtgacgcaggccggg

SEQ ID NO: 1656315 - DNA, 25 bp, Homo sapien
cctccccaggctcattaggagccgc

SEQ ID NO: 1656316 - DNA, 25 bp, Homo sapien
attaggagccgccagcggtaatgag

SEQ ID NO: 1656317 - DNA, 25 bp, Homo sapien
tggtggcagcccccttatatcgcct

SEQ ID NO: 1656318 - DNA, 25 bp, Homo sapien
gattttgagtcattaagcccctgag

SEQ ID NO: 1656319 - DNA, 25 bp, Homo sapien
acctttgagttcatggactggagca

SEQ ID NO: 1656320 - DNA, 25 bp, Homo sapien
aaccatgtcagaaaaagtgcacggg

SEQ ID NO: 1656321 - DNA, 25 bp, Homo sapien
agcccctgagggacacaacaaatgg

SEQ ID NO: 1656322 - DNA, 25 bp, Homo sapien
tctggaagatgcagaacagagttgg

SEQ ID NO: 1656323 - DNA, 25 bp, Homo sapien
tgagtgatctcaaaggttagcctga

SEQ ID NO: 1656324 - DNA, 25 bp, Homo sapien
aacgctggtgagaatcaatccctgg

SEQ ID NO: 1656325 - DNA, 25 bp, Homo sapien
aatttggtgctttcgcagaatctgc

SEQ ID NO: 1656326 - DNA, 25 bp, Homo sapien
tgaaaccactgaggcagaacgggtg

SEQ ID NO: 1656327 - DNA, 25 bp, Homo sapien
tcactacccctgagaggcaattggg

SEQ ID NO: 1656328 - DNA, 25 bp, Homo sapien
gagagtgcttcttaggcctgaggca

SEQ ID NO: 1656329 - DNA, 25 bp, Homo sapien
aaactgccattcagtgggaggcaca

SEQ ID NO: 1656330 - DNA, 25 bp, Homo sapien
ggggggctgaaatgtgctgtgtgtg

SEQ ID NO: 1656331 - DNA, 25 bp, Homo sapien
ctggggggctgaaatgtgctgtgtg

SEQ ID NO: 1656332 - DNA, 25 bp, Homo sapien
gggctgaaatgtgctgtgtgtggcc

SEQ ID NO: 1656333 - DNA, 25 bp, Homo sapien
gcctggggggctgaaatgtgctgtg

SEQ ID NO: 1656334 - DNA, 25 bp, Homo sapien
tccatagtgcaccagggaggcaatt

SEQ ID NO: 1656335 - DNA, 25 bp, Homo sapien
tccatttcgctgtcgtcactgccag

SEQ ID NO: 1656336 - DNA, 25 bp, Homo sapien
tggtcatggccaacgaagccacact

SEQ ID NO: 1656337 - DNA, 25 bp, Homo sapien
caattaggaacacgtactgccactc

SEQ ID NO: 1656338 - DNA, 25 bp, Homo sapien
cacgccgttggagatgcccatgagg

SEQ ID NO: 1656339 - DNA, 25 bp, Homo sapien
gatgatggggcacaccatgcccgac

SEQ ID NO: 1656340 - DNA, 25 bp, Homo sapien
ttgtgcttagtcatggcccccacga

SEQ ID NO: 1656341 - DNA, 25 bp, Homo sapien
tatgtccaggtggttcacgttgaac

SEQ ID NO: 1656342 - DNA, 25 bp, Homo sapien
tggccacgcccttggagtgcgagta

SEQ ID NO: 1656343 - DNA, 25 bp, Homo sapien
cagagatggcgaagccgctgaagcc

SEQ ID NO: 1656344 - DNA, 25 bp, Homo sapien
tgaagcccacggctaggaccaggaa

SEQ ID NO: 1656345 - DNA, 25 bp, Homo sapien
tagccgaccaccaacagcagcgtgg

SEQ ID NO: 1656346 - DNA, 25 bp, Homo sapien
aacttgcgcacgttggtggtggaca

SEQ ID NO: 1656347 - DNA, 25 bp, Homo sapien
gatgggcacgatgatggtcatgacc

SEQ ID NO: 1656348 - DNA, 25 bp, Homo sapien
ggctccgcaggaagtccgcgatctg

SEQ ID NO: 1656349 - DNA, 25 bp, Homo sapien
tggtggacatgatgcggcggctccg

SEQ ID NO: 1656350 - DNA, 25 bp, Homo sapien
tggcatagacgtgaagaagcgccgc

SEQ ID NO: 1656351 - DNA, 25 bp, Homo sapien
cacttcttcgaagtaggcgggctgg

SEQ ID NO: 1656352 - DNA, 25 bp, Homo sapien
gcaggtagaacgtccagctgcggca

SEQ ID NO: 1656353 - DNA, 25 bp, Homo sapien
cacgatgatggcatagactggcata

SEQ ID NO: 1656354 - DNA, 25 bp, Homo sapien
ccgctaagacggggagcggggctga

SEQ ID NO: 1656355 - DNA, 25 bp, Homo sapien
gcttctccgcgtcccttcagggacc

SEQ ID NO: 1656356 - DNA, 25 bp, Homo sapien
tgagggcttctccgcgtcccttcag

SEQ ID NO: 1656357 - DNA, 25 bp, Homo sapien
tcccttcagggaccacagtgtagtt

SEQ ID NO: 1656358 - DNA, 25 bp, Homo sapien
ggttctaatcctgctcaactcccga

SEQ ID NO: 1656359 - DNA, 25 bp, Homo sapien
tatgccctgtcagtggttctaatcc

SEQ ID NO: 1656360 - DNA, 25 bp, Homo sapien
caaaatacagcctcaactcaaggtc

SEQ ID NO: 1656361 - DNA, 25 bp, Homo sapien
cccttctctgctggctttaactatg

SEQ ID NO: 1656362 - DNA, 25 bp, Homo sapien
ctgagaatctcgtcctccgcgggtt

SEQ ID NO: 1656363 - DNA, 25 bp, Homo sapien
gttccagtcccgtctcctctagagt

SEQ ID NO: 1656364 - DNA, 25 bp, Homo sapien
ggaaccgtccctgatctacacgctg

SEQ ID NO: 1656365 - DNA, 25 bp, Homo sapien
caggttcgtggcttgctatctctcc

SEQ ID NO: 1656366 - DNA, 25 bp, Homo sapien
gttcatgagtttcgcgctctctccg

SEQ ID NO: 1656367 - DNA, 25 bp, Homo sapien
gcgtcctcgatgtacttgcgctcct

SEQ ID NO: 1656368 - DNA, 25 bp, Homo sapien
gactcgtaggagacgagcagccaga

SEQ ID NO: 1656369 - DNA, 25 bp, Homo sapien
gaacaggtaccagaagatcccgaag

SEQ ID NO: 1656370 - DNA, 25 bp, Homo sapien
gctccatcctgagtactgcacaagg

SEQ ID NO: 1656371 - DNA, 25 bp, Homo sapien
tactgcacaaggaccccggcgaggg

SEQ ID NO: 1656372 - DNA, 25 bp, Homo sapien
tcctgagtactgcacaaggaccccg

SEQ ID NO: 1656373 - DNA, 25 bp, Homo sapien
gcatcgcgaccaccgccccagcata

SEQ ID NO: 1656374 - DNA, 25 bp, Homo sapien
cacaaaaggctgtcgtcgccaggcg

SEQ ID NO: 1656375 - DNA, 25 bp, Homo sapien
tcgtcgccaggcgactccgttctaa

SEQ ID NO: 1656376 - DNA, 25 bp, Homo sapien
aaaaggctgtcgtcgccaggcgact

SEQ ID NO: 1656377 - DNA, 25 bp, Homo sapien
ccaggcgactccgttctaagggtgg

SEQ ID NO: 1656378 - DNA, 25 bp, Homo sapien
ttagagtggatgttgccacaatagc

SEQ ID NO: 1656379 - DNA, 25 bp, Homo sapien
tgcaggatcctcacgaagatgacac

SEQ ID NO: 1656380 - DNA, 25 bp, Homo sapien
agccatagtggacgcgggcagctga

SEQ ID NO: 1656381 - DNA, 25 bp, Homo sapien
gatcctcacgaagatgacacagcca

SEQ ID NO: 1656382 - DNA, 25 bp, Homo sapien
aatctgagtgacaatgtagccccag

SEQ ID NO: 1656383 - DNA, 25 bp, Homo sapien
tatgaggccgacagtctctggatcc

SEQ ID NO: 1656384 - DNA, 25 bp, Homo sapien
ccccagaaaaaggagccgtgtatga

SEQ ID NO: 1656385 - DNA, 25 bp, Homo sapien
tttttgacagataaatcctcctgga

SEQ ID NO: 1656386 - DNA, 25 bp, Homo sapien
tgtacattaaatcagccgccctgtc

SEQ ID NO: 1656387 - DNA, 25 bp, Homo sapien
tagggcctatgctgccttaacaaca

SEQ ID NO: 1656388 - DNA, 25 bp, Homo sapien
gacctatcagcaacgaggaacccct

SEQ ID NO: 1656389 - DNA, 25 bp, Homo sapien
gctcttccacgttgctagggcctat

SEQ ID NO: 1656390 - DNA, 25 bp, Homo sapien
ggcgggtcccgggtctgcgtggtca

SEQ ID NO: 1656391 - DNA, 25 bp, Homo sapien
caggttgcagcggatgccaaagctg

SEQ ID NO: 1656392 - DNA, 25 bp, Homo sapien
ggtgcagtccaccaccggcgggtcc

SEQ ID NO: 1656393 - DNA, 25 bp, Homo sapien
ccccgcggtgggtcgtgctgttatt

SEQ ID NO: 1656394 - DNA, 25 bp, Homo sapien
catccctagggaaccttgagtccag

SEQ ID NO: 1656395 - DNA, 25 bp, Homo sapien
cctttgggattcaagagcctgtgcc

SEQ ID NO: 1656396 - DNA, 25 bp, Homo sapien
tctattcgaggaagcaaaaggtgct

SEQ ID NO: 1656397 - DNA, 25 bp, Homo sapien
cccaggagatagaacatagatgcag

SEQ ID NO: 1656398 - DNA, 25 bp, Homo sapien
gagagcacgacccgctagcttccga

SEQ ID NO: 1656399 - DNA, 25 bp, Homo sapien
agcttcccgagagcacgacccgcta

SEQ ID NO: 1656400 - DNA, 25 bp, Homo sapien
tcccgagagcacgacccgctagctt

SEQ ID NO: 1656401 - DNA, 25 bp, Homo sapien
gagcacgacccgctagcttccgaaa

SEQ ID NO: 1656402 - DNA, 25 bp, Homo sapien
gcagctccgctcggggggaaggagg

SEQ ID NO: 1656403 - DNA, 25 bp, Homo sapien
ccgcagctccgctcggggggaagga

SEQ ID NO: 1656404 - DNA, 25 bp, Homo sapien
ctcctgccgccggtcaccccgcggg

SEQ ID NO: 1656405 - DNA, 25 bp, Homo sapien
ccccgcagctccgctcggggggaag

SEQ ID NO: 1656406 - DNA, 25 bp, Homo sapien
atttcaacttttagggaagccagca

SEQ ID NO: 1656407 - DNA, 25 bp, Homo sapien
tatttcaacttttagggaagccagc

SEQ ID NO: 1656408 - DNA, 25 bp, Homo sapien
tctccacatctcagaagcacaagga

SEQ ID NO: 1656409 - DNA, 25 bp, Homo sapien
catctcagaagcacaaggagacacc

SEQ ID NO: 1656410 - DNA, 25 bp, Homo sapien
gcctcttctccacatctcagaagca

SEQ ID NO: 1656411 - DNA, 25 bp, Homo sapien
cacatctcagaagcacaaggagaca

SEQ ID NO: 1656412 - DNA, 25 bp, Homo sapien
tcaagaaggcaccggcagaagcggc

SEQ ID NO: 1656413 - DNA, 25 bp, Homo sapien
aaggcaccggcagaagcggcatggc

SEQ ID NO: 1656414 - DNA, 25 bp, Homo sapien
gcaccggcagaagcggcatggccac

SEQ ID NO: 1656415 - DNA, 25 bp, Homo sapien
aagaaggcaccggcagaagcggcat

SEQ ID NO: 1656416 - DNA, 25 bp, Homo sapien
agacagagtccaggccccgccaatg

SEQ ID NO: 1656417 - DNA, 25 bp, Homo sapien
aggccccgccaatgtcccagcttcc

SEQ ID NO: 1656418 - DNA, 25 bp, Homo sapien
gggagacagagtccaggccccgcca

SEQ ID NO: 1656419 - DNA, 25 bp, Homo sapien
caaagagaatgaggatccaggaccc

SEQ ID NO: 1656420 - DNA, 25 bp, Homo sapien
tctcttccggtggaaggctgccttg

SEQ ID NO: 1656421 - DNA, 25 bp, Homo sapien
ttctcttccggtggaaggctgcctt

SEQ ID NO: 1656422 - DNA, 25 bp, Homo sapien
ctgcagcgggatataagcgtctaga

SEQ ID NO: 1656423 - DNA, 25 bp, Homo sapien
taagcgtctagatgatacagctgct

SEQ ID NO: 1656424 - DNA, 25 bp, Homo sapien
gatataagcgtctagatgatacagc

SEQ ID NO: 1656425 - DNA, 25 bp, Homo sapien
ggttctccccgatctccagcgacag

SEQ ID NO: 1656426 - DNA, 25 bp, Homo sapien
ggagaggtggcggaatcaggtcacc

SEQ ID NO: 1656427 - DNA, 25 bp, Homo sapien
gtggcggaatcaggtcaccctcccc

SEQ ID NO: 1656428 - DNA, 25 bp, Homo sapien
aggtggcggaatcaggtcaccctcc

SEQ ID NO: 1656429 - DNA, 25 bp, Homo sapien
ctggagaggtggcggaatcaggtca

SEQ ID NO: 1656430 - DNA, 25 bp, Homo sapien
tcacacgctgggaaactatatttga

SEQ ID NO: 1656431 - DNA, 25 bp, Homo sapien
gcatggtagcctcacacgctgggaa

SEQ ID NO: 1656432 - DNA, 25 bp, Homo sapien
cgctgggaaactatatttgaagggt

SEQ ID NO: 1656433 - DNA, 25 bp, Homo sapien
ggcatggtagcctcacacgctggga

SEQ ID NO: 1656434 - DNA, 25 bp, Homo sapien
ctgctctggtccagcgcgcaaaact

SEQ ID NO: 1656435 - DNA, 25 bp, Homo sapien
ccctcaggacagcaccagaaggtgg

SEQ ID NO: 1656436 - DNA, 25 bp, Homo sapien
caattacaagtctcaacgaccgagc

SEQ ID NO: 1656437 - DNA, 25 bp, Homo sapien
gcagagaggacgcaactgacaagtc

SEQ ID NO: 1656438 - DNA, 25 bp, Homo sapien
gggaggtcaacttcggccaagagga

SEQ ID NO: 1656439 - DNA, 25 bp, Homo sapien
gccacaggttcaggtgaggcttttc

SEQ ID NO: 1656440 - DNA, 25 bp, Homo sapien
ttccagccacaggttcaggtgaggc

SEQ ID NO: 1656441 - DNA, 25 bp, Homo sapien
tcaacttcggccaagaggaggtcgg

SEQ ID NO: 1656442 - DNA, 25 bp, Homo sapien
ccaagagcgttgaggaaacatcaga

SEQ ID NO: 1656443 - DNA, 25 bp, Homo sapien
aaccagccctattggcctcaggacg

SEQ ID NO: 1656444 - DNA, 25 bp, Homo sapien
cccaggacatcacccagtgtgggag

SEQ ID NO: 1656445 - DNA, 25 bp, Homo sapien
tctttgcctggcgtgctgtcccttt

SEQ ID NO: 1656446 - DNA, 25 bp, Homo sapien
ccagctcctggatccgaggacgctg

SEQ ID NO: 1656447 - DNA, 25 bp, Homo sapien
gctcctggatccgaggacgctgctc

SEQ ID NO: 1656448 - DNA, 25 bp, Homo sapien
gacgctgctccgagcggatgttctg

SEQ ID NO: 1656449 - DNA, 25 bp, Homo sapien
gcgggcgtgtacaggtcccccagct

SEQ ID NO: 1656450 - DNA, 25 bp, Homo sapien
ccatgaatggccggttcttcatcat

SEQ ID NO: 1656451 - DNA, 25 bp, Homo sapien
tgaatggccggttcttcatcatgcg

SEQ ID NO: 1656452 - DNA, 25 bp, Homo sapien
gagcccatgaatggccggttcttca

SEQ ID NO: 1656453 - DNA, 25 bp, Homo sapien
ggagcccatgaatggccggttcttc

SEQ ID NO: 1656454 - DNA, 25 bp, Homo sapien
aagttgtatttgtcctcaaggccct

SEQ ID NO: 1656455 - DNA, 25 bp, Homo sapien
ctccctggcgatggtgatcacgagc

SEQ ID NO: 1656456 - DNA, 25 bp, Homo sapien
ccggattcagctgcaagttgtattt

SEQ ID NO: 1656457 - DNA, 25 bp, Homo sapien
cgagctcccgcaagaaatcgctgtt

SEQ ID NO: 1656458 - DNA, 25 bp, Homo sapien
caggcctcaaccgcagccccgcccc

SEQ ID NO: 1656459 - DNA, 25 bp, Homo sapien
acgtcgtaggcggtacatccctggc

SEQ ID NO: 1656460 - DNA, 25 bp, Homo sapien
cgctgttgacagctacgtcgtaggc

SEQ ID NO: 1656461 - DNA, 25 bp, Homo sapien
ctgcatcctccggtagaagtcgctg

SEQ ID NO: 1656462 - DNA, 25 bp, Homo sapien
tccggtagaagtcgctgttgacagc

SEQ ID NO: 1656463 - DNA, 25 bp, Homo sapien
tcatgtgggtgacgagccctctcaa

SEQ ID NO: 1656464 - DNA, 25 bp, Homo sapien
aagaaacattcagggacagcggccg

SEQ ID NO: 1656465 - DNA, 25 bp, Homo sapien
acaagcctggcgttggagaccctat

SEQ ID NO: 1656466 - DNA, 25 bp, Homo sapien
caggagatccgctaatgcacgaaga

SEQ ID NO: 1656467 - DNA, 25 bp, Homo sapien
ggaagaaggggcctagcgggccaga

SEQ ID NO: 1656468 - DNA, 25 bp, Homo sapien
aaagaatcagatcgaggggccagat

SEQ ID NO: 1656469 - DNA, 25 bp, Homo sapien
gaaaagaatcagatcgaggggccag

SEQ ID NO: 1656470 - DNA, 25 bp, Homo sapien
aaggggcctagcgggccagactcct

SEQ ID NO: 1656471 - DNA, 25 bp, Homo sapien
cagactcatggggatgcgaaaccca

SEQ ID NO: 1656472 - DNA, 25 bp, Homo sapien
tcctcctcggtcacgtcggcgggag

SEQ ID NO: 1656473 - DNA, 25 bp, Homo sapien
ggatgcgaaacccagcttggtcctc

SEQ ID NO: 1656474 - DNA, 25 bp, Homo sapien
cagttctgcatgaggctctcccaga

SEQ ID NO: 1656475 - DNA, 25 bp, Homo sapien
gctgaggctggatttgtgtcgattc

SEQ ID NO: 1656476 - DNA, 25 bp, Homo sapien
tgggcttgctggagctccttcgagg

SEQ ID NO: 1656477 - DNA, 25 bp, Homo sapien
ggctgaggctggatttgtgtcgatt

SEQ ID NO: 1656478 - DNA, 25 bp, Homo sapien
gggcttgctggagctccttcgaggc

SEQ ID NO: 1656479 - DNA, 25 bp, Homo sapien
tacctccaggctcggagtctgtgcc

SEQ ID NO: 1656480 - DNA, 25 bp, Homo sapien
tcctcaaatggagcaattcttatgc

SEQ ID NO: 1656481 - DNA, 25 bp, Homo sapien
atggagcaattcttatgcatgagag

SEQ ID NO: 1656482 - DNA, 25 bp, Homo sapien
tcagacccctcatttgttcctcaaa

SEQ ID NO: 1656483 - DNA, 25 bp, Homo sapien
ccatctttgagcaccccgccaaaat

SEQ ID NO: 1656484 - DNA, 25 bp, Homo sapien
cgaggcctggttcccgccttagtgc

SEQ ID NO: 1656485 - DNA, 25 bp, Homo sapien
gccaaaatccccgaatactcaagga

SEQ ID NO: 1656486 - DNA, 25 bp, Homo sapien
ccgccttagtgcattctgggaactg

SEQ ID NO: 1656487 - DNA, 25 bp, Homo sapien
agctcctcaaatcgcgccgaatcag

SEQ ID NO: 1656488 - DNA, 25 bp, Homo sapien
caccgatcgcctccgcctcgcttag

SEQ ID NO: 1656489 - DNA, 25 bp, Homo sapien
aaatcgcgccgaatcagcaccgatc

SEQ ID NO: 1656490 - DNA, 25 bp, Homo sapien
ttcccagcagcttcgggttcgccat

SEQ ID NO: 1656491 - DNA, 25 bp, Homo sapien
cgaacaccatcgtcaaatccgtggg

SEQ ID NO: 1656492 - DNA, 25 bp, Homo sapien
gaaagagatctaggcgtcctcgaga

SEQ ID NO: 1656493 - DNA, 25 bp, Homo sapien
tacgtgccgaactgtaaacgaagcc

SEQ ID NO: 1656494 - DNA, 25 bp, Homo sapien
gtgggaaactttgcccaggatccga

SEQ ID NO: 1656495 - DNA, 25 bp, Homo sapien
caaggttccccttaacacagagcgc

SEQ ID NO: 1656496 - DNA, 25 bp, Homo sapien
agagcgccccgcagtcttcgcggaa

SEQ ID NO: 1656497 - DNA, 25 bp, Homo sapien
ccccgcagtcttcgcggaaagcgtt

SEQ ID NO: 1656498 - DNA, 25 bp, Homo sapien
ttcggggtaggcgatggctgcgacg

SEQ ID NO: 1656499 - DNA, 25 bp, Homo sapien
gcatgcgcactggtgagagtctgcc

SEQ ID NO: 1656500 - DNA, 25 bp, Homo sapien
accggtgccggagagccacgcatgc

SEQ ID NO: 1656501 - DNA, 25 bp, Homo sapien
ctcgctggagtacggaccggtgccg

SEQ ID NO: 1656502 - DNA, 25 bp, Homo sapien
ggcgctgctcgctgcgttccccagg

SEQ ID NO: 1656503 - DNA, 25 bp, Homo sapien
gaccagacgtcgaggttcttagaag

SEQ ID NO: 1656504 - DNA, 25 bp, Homo sapien
actttcggtctctggctgtcacccg

SEQ ID NO: 1656505 - DNA, 25 bp, Homo sapien
ggcaagcctggtgcgtgaggagact

SEQ ID NO: 1656506 - DNA, 25 bp, Homo sapien
ggagacttggactctaggtccccaa

SEQ ID NO: 1656507 - DNA, 25 bp, Homo sapien
gagggtccgagacttgttcttctgt

SEQ ID NO: 1656508 - DNA, 25 bp, Homo sapien
tggagcccaacagtgcgtaaacccc

SEQ ID NO: 1656509 - DNA, 25 bp, Homo sapien
gacagatgacgaggaaataggaggg

SEQ ID NO: 1656510 - DNA, 25 bp, Homo sapien
gagatggacgggagaacagatggac

SEQ ID NO: 1656511 - DNA, 25 bp, Homo sapien
aaaaccaagcgaggccaggccgctc

SEQ ID NO: 1656512 - DNA, 25 bp, Homo sapien
acaaaaccaagcgaggccaggccgc

SEQ ID NO: 1656513 - DNA, 25 bp, Homo sapien
tctcaaggtgtttgacggcatccca

SEQ ID NO: 1656514 - DNA, 25 bp, Homo sapien
aggccgctctggaccgtctcaaggt

SEQ ID NO: 1656515 - DNA, 25 bp, Homo sapien
cgtgcgtctgaagcctacaagaaag

SEQ ID NO: 1656516 - DNA, 25 bp, Homo sapien
tcctgctgccctcaaggtcgtgcgt

SEQ ID NO: 1656517 - DNA, 25 bp, Homo sapien
aaaaagcggatggtggttcctgctg

SEQ ID NO: 1656518 - DNA, 25 bp, Homo sapien
caaggtcgtgcgtctgaagcctaca

SEQ ID NO: 1656519 - DNA, 25 bp, Homo sapien
ctcacgaggttggctggaagtacca

SEQ ID NO: 1656520 - DNA, 25 bp, Homo sapien
cagttactatgagtgaaagggagcc

SEQ ID NO: 1656521 - DNA, 25 bp, Homo sapien
aaagggtcttagtcactgcctcccg

SEQ ID NO: 1656522 - DNA, 25 bp, Homo sapien
tacacagggtatttctagaagcaga

SEQ ID NO: 1656523 - DNA, 25 bp, Homo sapien
cagaagactgattggagggccctat

SEQ ID NO: 1656524 - DNA, 25 bp, Homo sapien
agcagcgtccgggtttccttatcga

SEQ ID NO: 1656525 - DNA, 25 bp, Homo sapien
ggcaggctccctggattagccctta

SEQ ID NO: 1656526 - DNA, 25 bp, Homo sapien
aattaaataccagacggcaggctcc

SEQ ID NO: 1656527 - DNA, 25 bp, Homo sapien
tagaaaataatcacggacgcccgga

SEQ ID NO: 1656528 - DNA, 25 bp, Homo sapien
tagcccttaggagtccgtttccaca

SEQ ID NO: 1656529 - DNA, 25 bp, Homo sapien
ttgagcctccattaacgccaggagc

SEQ ID NO: 1656530 - DNA, 25 bp, Homo sapien
taagggctaatccagggagcctgcc

SEQ ID NO: 1656531 - DNA, 25 bp, Homo sapien
gctcctggcgttaatggaggctcaa

SEQ ID NO: 1656532 - DNA, 25 bp, Homo sapien
atggcggacattcaggtgcggactc

SEQ ID NO: 1656533 - DNA, 25 bp, Homo sapien
aatcgataaggaaacccggacgctg

SEQ ID NO: 1656534 - DNA, 25 bp, Homo sapien
tctgtggaaacggactcctaagggc

SEQ ID NO: 1656535 - DNA, 25 bp, Homo sapien
tccgggcgtccgtgattattttcta

SEQ ID NO: 1656536 - DNA, 25 bp, Homo sapien
cctcgaatggacacattaccagtga

SEQ ID NO: 1656537 - DNA, 25 bp, Homo sapien
ggatccgccctcgaatggacacatt

SEQ ID NO: 1656538 - DNA, 25 bp, Homo sapien
gaatggacacattaccagtgaaggg

SEQ ID NO: 1656539 - DNA, 25 bp, Homo sapien
gatccgccctcgaatggacacatta

SEQ ID NO: 1656540 - DNA, 25 bp, Homo sapien
aggatccgccctcgaatggacacat

SEQ ID NO: 1656541 - DNA, 25 bp, Homo sapien
cgccctcgaatggacacattaccag

SEQ ID NO: 1656542 - DNA, 25 bp, Homo sapien
ttcactggtaatgtgtccattcgag

SEQ ID NO: 1656543 - DNA, 25 bp, Homo sapien
tgccccttcactggtaatgtgtcca

SEQ ID NO: 1656544 - DNA, 25 bp, Homo sapien
taatgtgtccattcgagggcggatc

SEQ ID NO: 1656545 - DNA, 25 bp, Homo sapien
gtaatgtgtccattcgagggcggat

SEQ ID NO: 1656546 - DNA, 25 bp, Homo sapien
aatgtgtccattcgagggcggatcc

SEQ ID NO: 1656547 - DNA, 25 bp, Homo sapien
ctggtaatgtgtccattcgagggcg

SEQ ID NO: 1656548 - DNA, 25 bp, Homo sapien
tgcccacgtgggcatctgaagacca

SEQ ID NO: 1656549 - DNA, 25 bp, Homo sapien
gcccacgtgggcatctgaagaccat

SEQ ID NO: 1656550 - DNA, 25 bp, Homo sapien
gtgcccacgtgggcatctgaagacc

SEQ ID NO: 1656551 - DNA, 25 bp, Homo sapien
cagtgcccacgtgggcatctgaaga

SEQ ID NO: 1656552 - DNA, 25 bp, Homo sapien
cccacgtgggcatctgaagaccatc

SEQ ID NO: 1656553 - DNA, 25 bp, Homo sapien
agtgcccacgtgggcatctgaagac

SEQ ID NO: 1656554 - DNA, 25 bp, Homo sapien
ggtcttcagatgcccacgtgggcac

SEQ ID NO: 1656555 - DNA, 25 bp, Homo sapien
gatggtcttcagatgcccacgtggg

SEQ ID NO: 1656556 - DNA, 25 bp, Homo sapien
gtcttcagatgcccacgtgggcact

SEQ ID NO: 1656557 - DNA, 25 bp, Homo sapien
atggtcttcagatgcccacgtgggc

SEQ ID NO: 1656558 - DNA, 25 bp, Homo sapien
tggtcttcagatgcccacgtgggca

SEQ ID NO: 1656559 - DNA, 25 bp, Homo sapien
tcttcagatgcccacgtgggcactg

SEQ ID NO: 1656560 - DNA, 25 bp, Homo sapien
ggttgtacttgcggatgtagtgcag

SEQ ID NO: 1656561 - DNA, 25 bp, Homo sapien
ctgcactacatccgcaagtacaacc

SEQ ID NO: 1656562 - DNA, 25 bp, Homo sapien
tgcatcttcatcttggtcaccacgc

SEQ ID NO: 1656563 - DNA, 25 bp, Homo sapien
tagtctcggcggatgacaatggtcc

SEQ ID NO: 1656564 - DNA, 25 bp, Homo sapien
cggatgtagtgcagatagtctcggc

SEQ ID NO: 1656565 - DNA, 25 bp, Homo sapien
gggacaggtgtacagacatgttctt

SEQ ID NO: 1656566 - DNA, 25 bp, Homo sapien
gacatgttcttgtggcgcttctcga

SEQ ID NO: 1656567 - DNA, 25 bp, Homo sapien
cgaagcggttgtacttgcggatgta

SEQ ID NO: 1656568 - DNA, 25 bp, Homo sapien
gagactatctgcactacatccgcaa

SEQ ID NO: 1656569 - DNA, 25 bp, Homo sapien
ggaccattgtcatccgccgagacta

SEQ ID NO: 1656570 - DNA, 25 bp, Homo sapien
ttcgagaagcgccacaagaacatgt

SEQ ID NO: 1656571 - DNA, 25 bp, Homo sapien
tacatccgcaagtacaaccgcttcg

SEQ ID NO: 1656572 - DNA, 25 bp, Homo sapien
aagaacatgtctgtacacctgtccc

SEQ ID NO: 1656573 - DNA, 25 bp, Homo sapien
gcgtggtgaccaagatgaagatgca

SEQ ID NO: 1656574 - DNA, 25 bp, Homo sapien
tacgcaaactttgtttcacacagaa

SEQ ID NO: 1656575 - DNA, 25 bp, Homo sapien
gctttccaatggttcaatgtacgca

SEQ ID NO: 1656576 - DNA, 25 bp, Homo sapien
tataaaacgcactgcgtaagactac

SEQ ID NO: 1656577 - DNA, 25 bp, Homo sapien
cagaattataaaacgcactgcgtaa

SEQ ID NO: 1656578 - DNA, 25 bp, Homo sapien
tgaaacttcttcaataccagcgtga

SEQ ID NO: 1656579 - DNA, 25 bp, Homo sapien
caataccagcgtgacacctttgctt

SEQ ID NO: 1656580 - DNA, 25 bp, Homo sapien
tctgtgtgaaacaaagtttgcgtac

SEQ ID NO: 1656581 - DNA, 25 bp, Homo sapien
aagcaaaggtgtcacgctggtattg

SEQ ID NO: 1656582 - DNA, 25 bp, Homo sapien
ttacgcagtgcgttttataattctg

SEQ ID NO: 1656583 - DNA, 25 bp, Homo sapien
agtttgcgtacattgaaccattgga

SEQ ID NO: 1656584 - DNA, 25 bp, Homo sapien
tcacgctggtattgaagaagtttca

SEQ ID NO: 1656585 - DNA, 25 bp, Homo sapien
tgcgtacattgaaccattggaaagc

SEQ ID NO: 1656586 - DNA, 25 bp, Homo sapien
tgaccttgagcacgttgaagcgcac

SEQ ID NO: 1656587 - DNA, 25 bp, Homo sapien
gaccttgagcacgttgaagcgcact

SEQ ID NO: 1656588 - DNA, 25 bp, Homo sapien
ttggtgaccttgagcacgttgaagc

SEQ ID NO: 1656589 - DNA, 25 bp, Homo sapien
ggtgaccttgagcacgttgaagcgc

SEQ ID NO: 1656590 - DNA, 25 bp, Homo sapien
tgagcacgttgaagcgcactgtctt

SEQ ID NO: 1656591 - DNA, 25 bp, Homo sapien
ccttgagcacgttgaagcgcactgt

SEQ ID NO: 1656592 - DNA, 25 bp, Homo sapien
gcactcgcccactgtgacgatgtca

SEQ ID NO: 1656593 - DNA, 25 bp, Homo sapien
tcgcccactgtgacgatgtcaccga

SEQ ID NO: 1656594 - DNA, 25 bp, Homo sapien
cgatgtcaccgatctggacgtccct

SEQ ID NO: 1656595 - DNA, 25 bp, Homo sapien
tgtgacgatgtcaccgatctggacg

SEQ ID NO: 1656596 - DNA, 25 bp, Homo sapien
cactgtgacgatgtcaccgatctgg

SEQ ID NO: 1656597 - DNA, 25 bp, Homo sapien
cggcactcgcccactgtgacgatgt

SEQ ID NO: 1656598 - DNA, 25 bp, Homo sapien
acgtccagatcggtgacatcgtcac

SEQ ID NO: 1656599 - DNA, 25 bp, Homo sapien
agggacgtccagatcggtgacatcg

SEQ ID NO: 1656600 - DNA, 25 bp, Homo sapien
tgacatcgtcacagtgggcgagtgc

SEQ ID NO: 1656601 - DNA, 25 bp, Homo sapien
acatcgtcacagtgggcgagtgccg

SEQ ID NO: 1656602 - DNA, 25 bp, Homo sapien
tcggtgacatcgtcacagtgggcga

SEQ ID NO: 1656603 - DNA, 25 bp, Homo sapien
tccagatcggtgacatcgtcacagt

SEQ ID NO: 1656604 - DNA, 25 bp, Homo sapien
aagacagtgcgcttcaacgtgctca

SEQ ID NO: 1656605 - DNA, 25 bp, Homo sapien
gcgcttcaacgtgctcaaggtcacc

SEQ ID NO: 1656606 - DNA, 25 bp, Homo sapien
gtgcgcttcaacgtgctcaaggtca

SEQ ID NO: 1656607 - DNA, 25 bp, Homo sapien
gacagtgcgcttcaacgtgctcaag

SEQ ID NO: 1656608 - DNA, 25 bp, Homo sapien
cagtgcgcttcaacgtgctcaaggt

SEQ ID NO: 1656609 - DNA, 25 bp, Homo sapien
gcttcaacgtgctcaaggtcaccaa

SEQ ID NO: 1656610 - DNA, 25 bp, Homo sapien
tacaagggttgggagacagggccat

SEQ ID NO: 1656611 - DNA, 25 bp, Homo sapien
ctgagcccagcactggtacaagggt

SEQ ID NO: 1656612 - DNA, 25 bp, Homo sapien
agcccagcactggtacaagggttgg

SEQ ID NO: 1656613 - DNA, 25 bp, Homo sapien
cccagcactggtacaagggttggga

SEQ ID NO: 1656614 - DNA, 25 bp, Homo sapien
cttcgcctcccaagttaaagcgaat

SEQ ID NO: 1656615 - DNA, 25 bp, Homo sapien
gcgaatctcctgcctctgtctccta

SEQ ID NO: 1656616 - DNA, 25 bp, Homo sapien
ctgcctctgtctcctaagtagttgg

SEQ ID NO: 1656617 - DNA, 25 bp, Homo sapien
tcgcctcccaagttaaagcgaatct

SEQ ID NO: 1656618 - DNA, 25 bp, Homo sapien
tgtcatcgttcaggaacaagtcagt

SEQ ID NO: 1656619 - DNA, 25 bp, Homo sapien
tcatgtgtcatcgttcaggaacaag

SEQ ID NO: 1656620 - DNA, 25 bp, Homo sapien
tgtgtcatcgttcaggaacaagtca

SEQ ID NO: 1656621 - DNA, 25 bp, Homo sapien
gtcatcgttcaggaacaagtcagtg

SEQ ID NO: 1656622 - DNA, 25 bp, Homo sapien
tctgtagaaatctgcatatgccttc

SEQ ID NO: 1656623 - DNA, 25 bp, Homo sapien
tgtagaaatctgcatatgccttctt

SEQ ID NO: 1656624 - DNA, 25 bp, Homo sapien
tctcaaaatctttcatggaatcgta

SEQ ID NO: 1656625 - DNA, 25 bp, Homo sapien
aatctttcatggaatcgtaatttct

SEQ ID NO: 1656626 - DNA, 25 bp, Homo sapien
gcctctgcccatcagacacttggtg

SEQ ID NO: 1656627 - DNA, 25 bp, Homo sapien
acttggtgctggaatctccgaggct

SEQ ID NO: 1656628 - DNA, 25 bp, Homo sapien
caagtcctccgtgctcgtggtggga

SEQ ID NO: 1656629 - DNA, 25 bp, Homo sapien
tccacatctcacagcgttctctggc

SEQ ID NO: 1656630 - DNA, 25 bp, Homo sapien
tacatttcccgtgaggcgttgtgac

SEQ ID NO: 1656631 - DNA, 25 bp, Homo sapien
ttcttaaaccatcctgacaaaggga

SEQ ID NO: 1656632 - DNA, 25 bp, Homo sapien
gcaggccgcggtttcctttgtggac

SEQ ID NO: 1656633 - DNA, 25 bp, Homo sapien
cgttgtgactagaacagctggaggt

SEQ ID NO: 1656634 - DNA, 25 bp, Homo sapien
ccctcaaattaaaagtccaatgctc

SEQ ID NO: 1656635 - DNA, 25 bp, Homo sapien
aatgctctaccaactaagctaccca

SEQ ID NO: 1656636 - DNA, 25 bp, Homo sapien
gccctcaaattaaaagtccaatgct

SEQ ID NO: 1656637 - DNA, 25 bp, Homo sapien
aaagtccaatgctctaccaactaag

SEQ ID NO: 1656638 - DNA, 25 bp, Homo sapien
aagccaaccacctgctgcacgagag

SEQ ID NO: 1656639 - DNA, 25 bp, Homo sapien
acctgctgcacgagagcgacacgga

SEQ ID NO: 1656640 - DNA, 25 bp, Homo sapien
tggaagccaaccacctgctgcacga

SEQ ID NO: 1656641 - DNA, 25 bp, Homo sapien
aaccacctgctgcacgagagcgaca

SEQ ID NO: 1656642 - DNA, 25 bp, Homo sapien
gccaccaactatggcgaggacctga

SEQ ID NO: 1656643 - DNA, 25 bp, Homo sapien
acccggcaccacgatgagctgtgag

SEQ ID NO: 1656644 - DNA, 25 bp, Homo sapien
tgagcaaagcggaaatcctgggtaa

SEQ ID NO: 1656645 - DNA, 25 bp, Homo sapien
gtcccagaggataagcaatacctat

SEQ ID NO: 1656646 - DNA, 25 bp, Homo sapien
taaggaaactctgctcaaaaaagac

SEQ ID NO: 1656647 - DNA, 25 bp, Homo sapien
taattttctggacgcgctgcctgtg

SEQ ID NO: 1656648 - DNA, 25 bp, Homo sapien
cttaaatgacagaacagggtgaggt

SEQ ID NO: 1656649 - DNA, 25 bp, Homo sapien
ttcttgaaactggagccctcggcag

SEQ ID NO: 1656650 - DNA, 25 bp, Homo sapien
gcttttgtgactcaatggttattaa

SEQ ID NO: 1656651 - DNA, 25 bp, Homo sapien
tattaaacacaaggccttaaggaca

SEQ ID NO: 1656652 - DNA, 25 bp, Homo sapien
aagtctgacgccaccgggctggttc

SEQ ID NO: 1656653 - DNA, 25 bp, Homo sapien
tgtctccgtgctgtttttcacactg

SEQ ID NO: 1656654 - DNA, 25 bp, Homo sapien
gccggtttatttggtctcccgcaca

SEQ ID NO: 1656655 - DNA, 25 bp, Homo sapien
ggtttatttggtctcccgcacacac

SEQ ID NO: 1656656 - DNA, 25 bp, Homo sapien
cggtttatttggtctcccgcacaca

SEQ ID NO: 1656657 - DNA, 25 bp, Homo sapien
gccgtgatttctccgcttgcagctt

SEQ ID NO: 1656658 - DNA, 25 bp, Homo sapien
tccgcttgcagcttcactccggagc

SEQ ID NO: 1656659 - DNA, 25 bp, Homo sapien
tcaccggccgtgatttctccgcttg

SEQ ID NO: 1656660 - DNA, 25 bp, Homo sapien
tcaggcctgcatcaccggccgtgat

SEQ ID NO: 1656661 - DNA, 25 bp, Homo sapien
atgtccttccgaatcagcttctcca

SEQ ID NO: 1656662 - DNA, 25 bp, Homo sapien
ctccacgcattcgagggtgaccaca

SEQ ID NO: 1656663 - DNA, 25 bp, Homo sapien
cgctgcagcacgatgatgtcgcggt

SEQ ID NO: 1656664 - DNA, 25 bp, Homo sapien
tgtcgcggtctgtgagtttgtctcc

SEQ ID NO: 1656665 - DNA, 25 bp, Homo sapien
cgggagactctgatcaggggccttc

SEQ ID NO: 1656666 - DNA, 25 bp, Homo sapien
tgaggccgaaggcgggagactctga

SEQ ID NO: 1656667 - DNA, 25 bp, Homo sapien
ggccgaaggcgggagactctgatca

SEQ ID NO: 1656668 - DNA, 25 bp, Homo sapien
ggagactctgatcaggggccttcct

SEQ ID NO: 1656669 - DNA, 25 bp, Homo sapien
acacgtagcgctcgctgcgggtgat

SEQ ID NO: 1656670 - DNA, 25 bp, Homo sapien
ggcacacacgtagcgctcgctgcgg

SEQ ID NO: 1656671 - DNA, 25 bp, Homo sapien
aggctgtcgcgggtcacggcacaca

SEQ ID NO: 1656672 - DNA, 25 bp, Homo sapien
gggtcacggcacacacgtagcgctc

SEQ ID NO: 1656673 - DNA, 25 bp, Homo sapien
tagcggtgtgaagtgcacgggcgtc

SEQ ID NO: 1656674 - DNA, 25 bp, Homo sapien
acgggcgtcaggtccgacatgcgca

SEQ ID NO: 1656675 - DNA, 25 bp, Homo sapien
tccgacatgcgcaggggcttccctg

SEQ ID NO: 1656676 - DNA, 25 bp, Homo sapien
cctgacatggggcaggtcaccgtgc

SEQ ID NO: 1656677 - DNA, 25 bp, Homo sapien
accctggcgccctggcaccgtgcgt

SEQ ID NO: 1656678 - DNA, 25 bp, Homo sapien
gaggcgggctcagtaggcagggctg

SEQ ID NO: 1656679 - DNA, 25 bp, Homo sapien
gtccctgtgcgtgaggaggacggtg

SEQ ID NO: 1656680 - DNA, 25 bp, Homo sapien
ggtggagagcgcgtggtccctgtgc

SEQ ID NO: 1656681 - DNA, 25 bp, Homo sapien
ggtggccttggcttcgggcgtcagc

SEQ ID NO: 1656682 - DNA, 25 bp, Homo sapien
gcgtcagcgacgggatccagaagct

SEQ ID NO: 1656683 - DNA, 25 bp, Homo sapien
cttcgggcgtcagcgacgggatcca

SEQ ID NO: 1656684 - DNA, 25 bp, Homo sapien
ttggcttcgggcgtcagcgacggga

SEQ ID NO: 1656685 - DNA, 25 bp, Homo sapien
cccacactgggcccaggttggacat

SEQ ID NO: 1656686 - DNA, 25 bp, Homo sapien
tggaggacccacactgggcccaggt

SEQ ID NO: 1656687 - DNA, 25 bp, Homo sapien
acactgggcccaggttggacatcat

SEQ ID NO: 1656688 - DNA, 25 bp, Homo sapien
ggacccacactgggcccaggttgga

SEQ ID NO: 1656689 - DNA, 25 bp, Homo sapien
tccttctgctcctcgcgccgggtgc

SEQ ID NO: 1656690 - DNA, 25 bp, Homo sapien
cggctcacgatagccgactccttct

SEQ ID NO: 1656691 - DNA, 25 bp, Homo sapien
aagccccgcacatggtcctgcgagg

SEQ ID NO: 1656692 - DNA, 25 bp, Homo sapien
cgggtgccccgctgcttctcgtagg

SEQ ID NO: 1656693 - DNA, 25 bp, Homo sapien
gttttctatacagtgcatgccccag

SEQ ID NO: 1656694 - DNA, 25 bp, Homo sapien
atttaattaatgtcacctgctggcc

SEQ ID NO: 1656695 - DNA, 25 bp, Homo sapien
tactgcgttgtatagccagactgcc

SEQ ID NO: 1656696 - DNA, 25 bp, Homo sapien
tgatggatgctcatgagggcctccg

SEQ ID NO: 1656697 - DNA, 25 bp, Homo sapien
gcatgtgacctgtagtgtttcctga

SEQ ID NO: 1656698 - DNA, 25 bp, Homo sapien
gggacagacccactgtgcctcaaac

SEQ ID NO: 1656699 - DNA, 25 bp, Homo sapien
acagacccactgtgcctcaaacagg

SEQ ID NO: 1656700 - DNA, 25 bp, Homo sapien
agagggggacagacccactgtgcct

SEQ ID NO: 1656701 - DNA, 25 bp, Homo sapien
gctttgtccatggaaggccaggccg

SEQ ID NO: 1656702 - DNA, 25 bp, Homo sapien
ggttcccagtaacacgccttgagaa

SEQ ID NO: 1656703 - DNA, 25 bp, Homo sapien
tcatctgcgtgtacctcccaggtgc

SEQ ID NO: 1656704 - DNA, 25 bp, Homo sapien
gctgtgtcctctgatttggccgtca

SEQ ID NO: 1656705 - DNA, 25 bp, Homo sapien
gcatctgggctgaaatcggtgagaa

SEQ ID NO: 1656706 - DNA, 25 bp, Homo sapien
gaaagtgggcatgtgtcagacagcc

SEQ ID NO: 1656707 - DNA, 25 bp, Homo sapien
taaggacctaagctacagggtggga

SEQ ID NO: 1656708 - DNA, 25 bp, Homo sapien
cagggtgggaaaactcgaagtccat

SEQ ID NO: 1656709 - DNA, 25 bp, Homo sapien
gatggcctcacgctcatacaggtag

SEQ ID NO: 1656710 - DNA, 25 bp, Homo sapien
ccaggatggcctcacgctcatacag

SEQ ID NO: 1656711 - DNA, 25 bp, Homo sapien
cttctggtgcagaatgtactccagg

SEQ ID NO: 1656712 - DNA, 25 bp, Homo sapien
tggtgcagaatgtactccaggatgg

SEQ ID NO: 1656713 - DNA, 25 bp, Homo sapien
cagcaacaatgtgtgccacatattg

SEQ ID NO: 1656714 - DNA, 25 bp, Homo sapien
aatgtgtgccacatattgttgcagc

SEQ ID NO: 1656715 - DNA, 25 bp, Homo sapien
tgtgtgccacatattgttgcagcca

SEQ ID NO: 1656716 - DNA, 25 bp, Homo sapien
acaatgtgtgccacatattgttgca

SEQ ID NO: 1656717 - DNA, 25 bp, Homo sapien
gaaacagatgctaggatcatgccca

SEQ ID NO: 1656718 - DNA, 25 bp, Homo sapien
gagagccctacaccccattagaagt

SEQ ID NO: 1656719 - DNA, 25 bp, Homo sapien
catgggaagtgtccaaaggtgagct

SEQ ID NO: 1656720 - DNA, 25 bp, Homo sapien
cacgtatttagtgcctggactcagc

SEQ ID NO: 1656721 - DNA, 25 bp, Homo sapien
tgttctgggtcccatagcccgaggc

SEQ ID NO: 1656722 - DNA, 25 bp, Homo sapien
acaacaggatcgtggcaaggctgca

SEQ ID NO: 1656723 - DNA, 25 bp, Homo sapien
acggcatcccggctcagtcgaatgt

SEQ ID NO: 1656724 - DNA, 25 bp, Homo sapien
acaacagcagtcgaagtccttcacg

SEQ ID NO: 1656725 - DNA, 25 bp, Homo sapien
gtttacatggtcatggccatcagtg

SEQ ID NO: 1656726 - DNA, 25 bp, Homo sapien
ttctgactgtgaccaagctcaagtg

SEQ ID NO: 1656727 - DNA, 25 bp, Homo sapien
gcggagcaacaggagacatgtccgt

SEQ ID NO: 1656728 - DNA, 25 bp, Homo sapien
cgggctgaacccacagggagttgtc

SEQ ID NO: 1656729 - DNA, 25 bp, Homo sapien
tgcagttcttgccatgccgcgtcat

SEQ ID NO: 1656730 - DNA, 25 bp, Homo sapien
tctcgtggtaggtgtagacggcccc

SEQ ID NO: 1656731 - DNA, 25 bp, Homo sapien
tagacggcccctgcggtgcagttct

SEQ ID NO: 1656732 - DNA, 25 bp, Homo sapien
tcttcttctcgtggtaggtgtagac

SEQ ID NO: 1656733 - DNA, 25 bp, Homo sapien
ctagggaggaagggacagtggcagg

SEQ ID NO: 1656734 - DNA, 25 bp, Homo sapien
agggaggaagggacagtggcaggac

SEQ ID NO: 1656735 - DNA, 25 bp, Homo sapien
tagggaggaagggacagtggcagga

SEQ ID NO: 1656736 - DNA, 25 bp, Homo sapien
actgaaggccgagcaccgtggctta

SEQ ID NO: 1656737 - DNA, 25 bp, Homo sapien
gaaggccgagcaccgtggcttacac

SEQ ID NO: 1656738 - DNA, 25 bp, Homo sapien
ctgaaggccgagcaccgtggcttac

SEQ ID NO: 1656739 - DNA, 25 bp, Homo sapien
tgaaggccgagcaccgtggcttaca

SEQ ID NO: 1656740 - DNA, 25 bp, Homo sapien
cccagcccccacaactgccactcat

SEQ ID NO: 1656741 - DNA, 25 bp, Homo sapien
tccccagcccccacaactgccactc

SEQ ID NO: 1656742 - DNA, 25 bp, Homo sapien
ctgccatccgctccccagcccccac

SEQ ID NO: 1656743 - DNA, 25 bp, Homo sapien
gctccccagcccccacaactgccac

SEQ ID NO: 1656744 - DNA, 25 bp, Homo sapien
gaggcgaaggtcgtgatgagccaag

SEQ ID NO: 1656745 - DNA, 25 bp, Homo sapien
cgaaggtcgtgatgagccaagatcg

SEQ ID NO: 1656746 - DNA, 25 bp, Homo sapien
ctgggaggcgaaggtcgtgatgagc

SEQ ID NO: 1656747 - DNA, 25 bp, Homo sapien
ggcgaaggtcgtgatgagccaagat

SEQ ID NO: 1656748 - DNA, 25 bp, Homo sapien
tgatccctggcatgaggaaacaagt

SEQ ID NO: 1656749 - DNA, 25 bp, Homo sapien
ttgagtttggtctgtagaacataat

SEQ ID NO: 1656750 - DNA, 25 bp, Homo sapien
ctgatccctggcatgaggaaacaag

SEQ ID NO: 1656751 - DNA, 25 bp, Homo sapien
ggatttgagtttggtctgtagaaca

SEQ ID NO: 1656752 - DNA, 25 bp, Homo sapien
aaagtgtgatgatggtattgtggtc

SEQ ID NO: 1656753 - DNA, 25 bp, Homo sapien
tagtagtctagaattacggttgttc

SEQ ID NO: 1656754 - DNA, 25 bp, Homo sapien
cagttacactggacttgactctgca

SEQ ID NO: 1656755 - DNA, 25 bp, Homo sapien
caccacgtaatggatagtagtctag

SEQ ID NO: 1656756 - DNA, 25 bp, Homo sapien
ggaaagcgatcccagcaacactctt

SEQ ID NO: 1656757 - DNA, 25 bp, Homo sapien
gatgctagctaccacttgactgagt

SEQ ID NO: 1656758 - DNA, 25 bp, Homo sapien
gaactgcccgatggacggttggcca

SEQ ID NO: 1656759 - DNA, 25 bp, Homo sapien
taactctcaggagaactggccgatg

SEQ ID NO: 1656760 - DNA, 25 bp, Homo sapien
actcccagtccctcggtcgcttctt

SEQ ID NO: 1656761 - DNA, 25 bp, Homo sapien
tccctcggtcgcttcttcaactgtg

SEQ ID NO: 1656762 - DNA, 25 bp, Homo sapien
ctcactaacgactcccagtccctcg

SEQ ID NO: 1656763 - DNA, 25 bp, Homo sapien
ctaacgactcccagtccctcggtcg

SEQ ID NO: 1656764 - DNA, 25 bp, Homo sapien
cctcaaggagcgcttttgggagagc

SEQ ID NO: 1656765 - DNA, 25 bp, Homo sapien
ttaagaccccagcttgcctgaggag

SEQ ID NO: 1656766 - DNA, 25 bp, Homo sapien
gggagagctacatctacaatggcaa

SEQ ID NO: 1656767 - DNA, 25 bp, Homo sapien
tgttctgtgcagctaaggtagtccc

SEQ ID NO: 1656768 - DNA, 25 bp, Homo sapien
tgcccaattcaggaggacctgcctt

SEQ ID NO: 1656769 - DNA, 25 bp, Homo sapien
agtggctcctcgaatctacctgaag

SEQ ID NO: 1656770 - DNA, 25 bp, Homo sapien
gaagcctgaagcagtacctggctga

SEQ ID NO: 1656771 - DNA, 25 bp, Homo sapien
tctttcctgacaggcctagcgaggc

SEQ ID NO: 1656772 - DNA, 25 bp, Homo sapien
ctgagacgccaagggcggtcggagt

SEQ ID NO: 1656773 - DNA, 25 bp, Homo sapien
gggcgtggcccagcgttgtatgtgt

SEQ ID NO: 1656774 - DNA, 25 bp, Homo sapien
ccccatgcaaaggtctaggggcgtg

SEQ ID NO: 1656775 - DNA, 25 bp, Homo sapien
gagggtcctggattggctgagacgc

SEQ ID NO: 1656776 - DNA, 25 bp, Homo sapien
ctggcattgcatgggcccatgcatt

SEQ ID NO: 1656777 - DNA, 25 bp, Homo sapien
atgcatttgaacctcaacccccggg

SEQ ID NO: 1656778 - DNA, 25 bp, Homo sapien
tggcattgcatgggcccatgcattt

SEQ ID NO: 1656779 - DNA, 25 bp, Homo sapien
catgcatttgaacctcaacccccgg

SEQ ID NO: 1656780 - DNA, 25 bp, Homo sapien
cccctgaaaagacgacatctgagaa

SEQ ID NO: 1656781 - DNA, 25 bp, Homo sapien
agcagactcctgagacggccatgcc

SEQ ID NO: 1656782 - DNA, 25 bp, Homo sapien
gagacccctgaaaagacgacatctg

SEQ ID NO: 1656783 - DNA, 25 bp, Homo sapien
agactcctgagacggccatgcctga

SEQ ID NO: 1656784 - DNA, 25 bp, Homo sapien
gtcaacaatagaccatgaagccagg

SEQ ID NO: 1656785 - DNA, 25 bp, Homo sapien
ggatagtagcatttgagaaccataa

SEQ ID NO: 1656786 - DNA, 25 bp, Homo sapien
tggtttcagactagaggatggatag

SEQ ID NO: 1656787 - DNA, 25 bp, Homo sapien
gaaccataatgggtgagtcaacaat

SEQ ID NO: 1656788 - DNA, 25 bp, Homo sapien
tcacacagcaaggtgcgaaggcagc

SEQ ID NO: 1656789 - DNA, 25 bp, Homo sapien
ttatatacagcagtgacccggagcc

SEQ ID NO: 1656790 - DNA, 25 bp, Homo sapien
cacacagtggcagtagcccagaaga

SEQ ID NO: 1656791 - DNA, 25 bp, Homo sapien
ggacaggaggcgttggcagaaggca

SEQ ID NO: 1656792 - DNA, 25 bp, Homo sapien
ctcggtgggagctcttgttcctggt

SEQ ID NO: 1656793 - DNA, 25 bp, Homo sapien
ggaaaacgccagtgagtttggagtg

SEQ ID NO: 1656794 - DNA, 25 bp, Homo sapien
gtgggaaaacgccagtgagtttgga

SEQ ID NO: 1656795 - DNA, 25 bp, Homo sapien
ctgtgggaaaacgccagtgagtttg

SEQ ID NO: 1656796 - DNA, 25 bp, Homo sapien
aaaacgccagtgagtttggagtgga

SEQ ID NO: 1656797 - DNA, 25 bp, Homo sapien
gcccgcaccagctgctcaaaagcct

SEQ ID NO: 1656798 - DNA, 25 bp, Homo sapien
ttgagacgcagtttggccgaggcct

SEQ ID NO: 1656799 - DNA, 25 bp, Homo sapien
gaggcctcaaagtaggccacgtggt

SEQ ID NO: 1656800 - DNA, 25 bp, Homo sapien
agcctcgtccacgttgagacgcagt

SEQ ID NO: 1656801 - DNA, 25 bp, Homo sapien
gtccttgacccgcagaatctgcgtg

SEQ ID NO: 1656802 - DNA, 25 bp, Homo sapien
caacacaacggggaagtcgtcgcgg

SEQ ID NO: 1656803 - DNA, 25 bp, Homo sapien
tgccttgttcccgaccaacacaacg

SEQ ID NO: 1656804 - DNA, 25 bp, Homo sapien
gaatctgcgtgaagagcttgcccac

SEQ ID NO: 1656805 - DNA, 25 bp, Homo sapien
ccggtcgttaatggcgaacaccagc

SEQ ID NO: 1656806 - DNA, 25 bp, Homo sapien
ccgtggccagcacgcatgtactgct

SEQ ID NO: 1656807 - DNA, 25 bp, Homo sapien
ctcttcctggcccgcggtgtccagg

SEQ ID NO: 1656808 - DNA, 25 bp, Homo sapien
ctctgccggtcgttaatggcgaaca

SEQ ID NO: 1656809 - DNA, 25 bp, Homo sapien
aggctccccgcagtcacccccaaga

SEQ ID NO: 1656810 - DNA, 25 bp, Homo sapien
ggctccccgcagtcacccccaagag

SEQ ID NO: 1656811 - DNA, 25 bp, Homo sapien
ccaggctccccgcagtcacccccaa

SEQ ID NO: 1656812 - DNA, 25 bp, Homo sapien
ctccccgcagtcacccccaagagcc

SEQ ID NO: 1656813 - DNA, 25 bp, Homo sapien
ggtcgtagtcagacacgaagtagga

SEQ ID NO: 1656814 - DNA, 25 bp, Homo sapien
tcgtgtaggagtcctcaatagtggg

SEQ ID NO: 1656815 - DNA, 25 bp, Homo sapien
gtccagccgggctgggatgccatcc

SEQ ID NO: 1656816 - DNA, 25 bp, Homo sapien
ctgcagatcttcgtgtaggagtcct

SEQ ID NO: 1656817 - DNA, 25 bp, Homo sapien
gaggctaagaacagcactacactcc

SEQ ID NO: 1656818 - DNA, 25 bp, Homo sapien
ctacactccatccagcactggcaag

SEQ ID NO: 1656819 - DNA, 25 bp, Homo sapien
gcactacactccatccagcactggc

SEQ ID NO: 1656820 - DNA, 25 bp, Homo sapien
cagcactacactccatccagcactg

SEQ ID NO: 1656821 - DNA, 25 bp, Homo sapien
atgaactggatggtcagcgcgctct

SEQ ID NO: 1656822 - DNA, 25 bp, Homo sapien
gatgaactggatggtcagcgcgctc

SEQ ID NO: 1656823 - DNA, 25 bp, Homo sapien
tgaactggatggtcagcgcgctctt

SEQ ID NO: 1656824 - DNA, 25 bp, Homo sapien
gaactggatggtcagcgcgctcttg

SEQ ID NO: 1656825 - DNA, 25 bp, Homo sapien
tgtcccggacgccgccccgctgctc

SEQ ID NO: 1656826 - DNA, 25 bp, Homo sapien
ccctgtcccggacgccgccccgctg

SEQ ID NO: 1656827 - DNA, 25 bp, Homo sapien
tcccggacgccgccccgctgctcat

SEQ ID NO: 1656828 - DNA, 25 bp, Homo sapien
ctgtcccggacgccgccccgctgct

SEQ ID NO: 1656829 - DNA, 25 bp, Homo sapien
accgctgctgctgccttcgctaccg

SEQ ID NO: 1656830 - DNA, 25 bp, Homo sapien
cgccaccgctgctgctgccttcgct

SEQ ID NO: 1656831 - DNA, 25 bp, Homo sapien
gtcgccaccgctgctgctgccttcg

SEQ ID NO: 1656832 - DNA, 25 bp, Homo sapien
ccaccgctgctgctgccttcgctac

SEQ ID NO: 1656833 - DNA, 25 bp, Homo sapien
cgccaccctttccgcgcgcgcgcag

SEQ ID NO: 1656834 - DNA, 25 bp, Homo sapien
ccgcgcgcgcgcagggcactgtggg

SEQ ID NO: 1656835 - DNA, 25 bp, Homo sapien
ccgccaccctttccgcgcgcgcgca

SEQ ID NO: 1656836 - DNA, 25 bp, Homo sapien
ctgttccgccaccctttccgcgcgc

SEQ ID NO: 1656837 - DNA, 25 bp, Homo sapien
cccgcgcgacagaggcggtgcgcgg

SEQ ID NO: 1656838 - DNA, 25 bp, Homo sapien
ctgtccccgcgcgacagaggcggtg

SEQ ID NO: 1656839 - DNA, 25 bp, Homo sapien
aggcggtgcgcggactacgcctccc

SEQ ID NO: 1656840 - DNA, 25 bp, Homo sapien
cccattagctgtccccgcgcgacag

SEQ ID NO: 1656841 - DNA, 25 bp, Homo sapien
tcggagacaaatttgccagagggtt

SEQ ID NO: 1656842 - DNA, 25 bp, Homo sapien
tttcggagacaaatttgccagaggg

SEQ ID NO: 1656843 - DNA, 25 bp, Homo sapien
ttcggagacaaatttgccagagggt

SEQ ID NO: 1656844 - DNA, 25 bp, Homo sapien
gccggaccccacctgatcagcatct

SEQ ID NO: 1656845 - DNA, 25 bp, Homo sapien
cagccccgtgaagctggggtgatct

SEQ ID NO: 1656846 - DNA, 25 bp, Homo sapien
gaagctggggtgatctcatcaactg

SEQ ID NO: 1656847 - DNA, 25 bp, Homo sapien
tggcttctcttttcagcagccccgt

SEQ ID NO: 1656848 - DNA, 25 bp, Homo sapien
gcttctcttttcagcagccccgtga

SEQ ID NO: 1656849 - DNA, 25 bp, Homo sapien
gtgagtcagggctgcgctggcttct

SEQ ID NO: 1656850 - DNA, 25 bp, Homo sapien
ggctgcgctggcttctgccagtttc

SEQ ID NO: 1656851 - DNA, 25 bp, Homo sapien
tcagggctgcgctggcttctgccag

SEQ ID NO: 1656852 - DNA, 25 bp, Homo sapien
gctgcgctggcttctgccagtttca

SEQ ID NO: 1656853 - DNA, 25 bp, Homo sapien
ggagaggtgacagtgcccagggtca

SEQ ID NO: 1656854 - DNA, 25 bp, Homo sapien
caggagaggtgacagtgcccagggt

SEQ ID NO: 1656855 - DNA, 25 bp, Homo sapien
agaggtgacagtgcccagggtcacc

SEQ ID NO: 1656856 - DNA, 25 bp, Homo sapien
gaggtgacagtgcccagggtcacca

SEQ ID NO: 1656857 - DNA, 25 bp, Homo sapien
accaagacccctccagccccacgtg

SEQ ID NO: 1656858 - DNA, 25 bp, Homo sapien
ccaagacccctccagccccacgtgg

SEQ ID NO: 1656859 - DNA, 25 bp, Homo sapien
cacttgcccaaactgttcataggca

SEQ ID NO: 1656860 - DNA, 25 bp, Homo sapien
cagggggcctgggttctggctagtc

SEQ ID NO: 1656861 - DNA, 25 bp, Homo sapien
gggcctgggttctggctagtctttg

SEQ ID NO: 1656862 - DNA, 25 bp, Homo sapien
ctactctgtgacctttgcgcctctc

SEQ ID NO: 1656863 - DNA, 25 bp, Homo sapien
ccctgggcagaagtgaggaggtgtc

SEQ ID NO: 1656864 - DNA, 25 bp, Homo sapien
ctgccccctgcagtgcttggtcttc

SEQ ID NO: 1656865 - DNA, 25 bp, Homo sapien
tcagctgccccctgcagtgcttggt

SEQ ID NO: 1656866 - DNA, 25 bp, Homo sapien
gtgaggaggtgtcagctgccccctg

SEQ ID NO: 1656867 - DNA, 25 bp, Homo sapien
agagggcacccaacaccagacacgc

SEQ ID NO: 1656868 - DNA, 25 bp, Homo sapien
taacaaccatattgggtcagagggc

SEQ ID NO: 1656869 - DNA, 25 bp, Homo sapien
gaccctgagcgggaataacaaccat

SEQ ID NO: 1656870 - DNA, 25 bp, Homo sapien
gagcgggaataacaaccatattggg

SEQ ID NO: 1656871 - DNA, 25 bp, Homo sapien
aggggggttggaggcacaccatgag

SEQ ID NO: 1656872 - DNA, 25 bp, Homo sapien
acaggggggttggaggcacaccatg

SEQ ID NO: 1656873 - DNA, 25 bp, Homo sapien
aacaggggggttggaggcacaccat

SEQ ID NO: 1656874 - DNA, 25 bp, Homo sapien
gaacaggggggttggaggcacacca

SEQ ID NO: 1656875 - DNA, 25 bp, Homo sapien
aggccctgaggcacgtgggcacaac

SEQ ID NO: 1656876 - DNA, 25 bp, Homo sapien
ggtggctgttggaaatgtgcaggtc

SEQ ID NO: 1656877 - DNA, 25 bp, Homo sapien
tgcaggtccacagtattctccaggg

SEQ ID NO: 1656878 - DNA, 25 bp, Homo sapien
ccttgtactggtcggaggtgaggga

SEQ ID NO: 1656879 - DNA, 25 bp, Homo sapien
catgggaaggagctcccggggatga

SEQ ID NO: 1656880 - DNA, 25 bp, Homo sapien
tattgcagagatcttggaagttgca

SEQ ID NO: 1656881 - DNA, 25 bp, Homo sapien
tgggggccactggtttagagagttc

SEQ ID NO: 1656882 - DNA, 25 bp, Homo sapien
tctgtaaggccacccctttcagccc

SEQ ID NO: 1656883 - DNA, 25 bp, Homo sapien
gagcgtccgcttccttccgtgaagg

SEQ ID NO: 1656884 - DNA, 25 bp, Homo sapien
gcatagcgtggtgagcgtccgcttc

SEQ ID NO: 1656885 - DNA, 25 bp, Homo sapien
agaaccagagggcatagcgtggtga

SEQ ID NO: 1656886 - DNA, 25 bp, Homo sapien
agcgtggtgagcgtccgcttccttc

SEQ ID NO: 1656887 - DNA, 25 bp, Homo sapien
tgacctaaggccctctgctgcctcg

SEQ ID NO: 1656888 - DNA, 25 bp, Homo sapien
cctcgaccaggggactgcttgtttg

SEQ ID NO: 1656889 - DNA, 25 bp, Homo sapien
acctcccctgacctaaggccctctg

SEQ ID NO: 1656890 - DNA, 25 bp, Homo sapien
taaacttgaatgataacccccacca

SEQ ID NO: 1656891 - DNA, 25 bp, Homo sapien
tatacagcgggccaagggcagccag

SEQ ID NO: 1656892 - DNA, 25 bp, Homo sapien
ggattccacgggctcagggcaaagt

SEQ ID NO: 1656893 - DNA, 25 bp, Homo sapien
aaagtcctttgcctcggttatacag

SEQ ID NO: 1656894 - DNA, 25 bp, Homo sapien
ggcagccagcgtctgaattcagtcc

SEQ ID NO: 1656895 - DNA, 25 bp, Homo sapien
ccggccaatcctgagttgttaacca

SEQ ID NO: 1656896 - DNA, 25 bp, Homo sapien
aggtcgaagcccctgtctcactcac

SEQ ID NO: 1656897 - DNA, 25 bp, Homo sapien
gtgcaggctgctttgtactggccag

SEQ ID NO: 1656898 - DNA, 25 bp, Homo sapien
gcccggccaatcctgagttgttaac

SEQ ID NO: 1656899 - DNA, 25 bp, Homo sapien
tcgctcactgcccagtatgtgtggc

SEQ ID NO: 1656900 - DNA, 25 bp, Homo sapien
catcaggcccatgcccgctgttggg

SEQ ID NO: 1656901 - DNA, 25 bp, Homo sapien
tggggacctcgccatcaggcccatg

SEQ ID NO: 1656902 - DNA, 25 bp, Homo sapien
cagtatgtgtggcagtgccccagcc

SEQ ID NO: 1656903 - DNA, 25 bp, Homo sapien
tctgtcagggacatgccagggtctg

SEQ ID NO: 1656904 - DNA, 25 bp, Homo sapien
ccctgtctgtcagggacatgccagg

SEQ ID NO: 1656905 - DNA, 25 bp, Homo sapien
cagtgtgactggccatccaggcagc

SEQ ID NO: 1656906 - DNA, 25 bp, Homo sapien
agcacatgcctcacgtagctcatca

SEQ ID NO: 1656907 - DNA, 25 bp, Homo sapien
ggcggccccggtagaaggctgtcac

SEQ ID NO: 1656908 - DNA, 25 bp, Homo sapien
ggagatggtctgctggaagacttgg

SEQ ID NO: 1656909 - DNA, 25 bp, Homo sapien
agatggtctgctggaagacttggcg

SEQ ID NO: 1656910 - DNA, 25 bp, Homo sapien
tggaagacttggcggccccggtaga

SEQ ID NO: 1656911 - DNA, 25 bp, Homo sapien
ggttgagaatcaggggctgccgccc

SEQ ID NO: 1656912 - DNA, 25 bp, Homo sapien
ggggttgagaatcaggggctgccgc

SEQ ID NO: 1656913 - DNA, 25 bp, Homo sapien
ggagaggggttgagaatcaggggct

SEQ ID NO: 1656914 - DNA, 25 bp, Homo sapien
gaggggttgagaatcaggggctgcc

SEQ ID NO: 1656915 - DNA, 25 bp, Homo sapien
gaagggagtgggattgtccaagctg

SEQ ID NO: 1656916 - DNA, 25 bp, Homo sapien
gggagtggggccaacaccatgttac

SEQ ID NO: 1656917 - DNA, 25 bp, Homo sapien
tcagtgggttctcagagggccccag

SEQ ID NO: 1656918 - DNA, 25 bp, Homo sapien
caacagccgcttcagtgggttctca

SEQ ID NO: 1656919 - DNA, 25 bp, Homo sapien
tgggtatcagaagtactgcctccac

SEQ ID NO: 1656920 - DNA, 25 bp, Homo sapien
caccattggtgtccggagaggtgtc

SEQ ID NO: 1656921 - DNA, 25 bp, Homo sapien
gaagtactgcctccaccattggtgt

SEQ ID NO: 1656922 - DNA, 25 bp, Homo sapien
ctccaccattggtgtccggagaggt

SEQ ID NO: 1656923 - DNA, 25 bp, Homo sapien
caacccttctttgcggttgagggca

SEQ ID NO: 1656924 - DNA, 25 bp, Homo sapien
cctcccgggaacatatgcaccagtg

SEQ ID NO: 1656925 - DNA, 25 bp, Homo sapien
gcagagcggaaattcctcttccagg

SEQ ID NO: 1656926 - DNA, 25 bp, Homo sapien
caggttggcaggtctggcttatccc

SEQ ID NO: 1656927 - DNA, 25 bp, Homo sapien
cacactgtttaccacctctggcata

SEQ ID NO: 1656928 - DNA, 25 bp, Homo sapien
ccaggcttccaagtccaacttggtg

SEQ ID NO: 1656929 - DNA, 25 bp, Homo sapien
ctaattcggtagttaggaacctcag

SEQ ID NO: 1656930 - DNA, 25 bp, Homo sapien
caacttggtgtctaatcccgtgcac

SEQ ID NO: 1656931 - DNA, 25 bp, Homo sapien
ttttattcccgtaaccctgcagctc

SEQ ID NO: 1656932 - DNA, 25 bp, Homo sapien
caaccctgcttgcgccccaccatca

SEQ ID NO: 1656933 - DNA, 25 bp, Homo sapien
accctgcttgcgccccaccatcagt

SEQ ID NO: 1656934 - DNA, 25 bp, Homo sapien
attcccgtaaccctgcagctccaac

SEQ ID NO: 1656935 - DNA, 25 bp, Homo sapien
ggtttccagcgtcccaggtcgtcgc

SEQ ID NO: 1656936 - DNA, 25 bp, Homo sapien
agcgttggcacgagcccgcccctcg

SEQ ID NO: 1656937 - DNA, 25 bp, Homo sapien
tcagccgggcccactaggagtcctt

SEQ ID NO: 1656938 - DNA, 25 bp, Homo sapien
taggagtcctttccgcccagcgcgc

SEQ ID NO: 1656939 - DNA, 25 bp, Homo sapien
aagcgcgtgcggctcttgttcaccc

SEQ ID NO: 1656940 - DNA, 25 bp, Homo sapien
cgtaggccgtgcttccaagggatgc

SEQ ID NO: 1656941 - DNA, 25 bp, Homo sapien
aggtccagctgcgacaccagccagg

SEQ ID NO: 1656942 - DNA, 25 bp, Homo sapien
gattccgaaatcctcctgctgtgca

SEQ ID NO: 1656943 - DNA, 25 bp, Homo sapien
tggcctggagtttccgcacccagac

SEQ ID NO: 1656944 - DNA, 25 bp, Homo sapien
cttctcacgggccacggcacaggtc

SEQ ID NO: 1656945 - DNA, 25 bp, Homo sapien
ggcatttcctgggcgcgaccggcct

SEQ ID NO: 1656946 - DNA, 25 bp, Homo sapien
acctggcctggagtttccgcaccca

SEQ ID NO: 1656947 - DNA, 25 bp, Homo sapien
taagtatccccactttcagggtagc

SEQ ID NO: 1656948 - DNA, 25 bp, Homo sapien
gcacgccccaggtttcgagactgaa

SEQ ID NO: 1656949 - DNA, 25 bp, Homo sapien
tctaatcagctagggttccttccca

SEQ ID NO: 1656950 - DNA, 25 bp, Homo sapien
gaatcgattcacgtgtaagcctcta

SEQ ID NO: 1656951 - DNA, 25 bp, Homo sapien
gtgcagacccatcctctttcccgct

SEQ ID NO: 1656952 - DNA, 25 bp, Homo sapien
ctcgctctcggacgccaccaacgct

SEQ ID NO: 1656953 - DNA, 25 bp, Homo sapien
tagtttttctgcagccgacctccag

SEQ ID NO: 1656954 - DNA, 25 bp, Homo sapien
gtcggccactgtagctccttccttg

SEQ ID NO: 1656955 - DNA, 25 bp, Homo sapien
gggcgtgcgggcagctggaacccac

SEQ ID NO: 1656956 - DNA, 25 bp, Homo sapien
gaaggtcggggcgtgcgggcagctg

SEQ ID NO: 1656957 - DNA, 25 bp, Homo sapien
gatggaaggtcggggcgtgcgggca

SEQ ID NO: 1656958 - DNA, 25 bp, Homo sapien
ggggcgtgcgggcagctggaaccca

SEQ ID NO: 1656959 - DNA, 25 bp, Homo sapien
tttcccgtcagctgagctctagagc

SEQ ID NO: 1656960 - DNA, 25 bp, Homo sapien
tctttttgatcgacttcttgaaata

SEQ ID NO: 1656961 - DNA, 25 bp, Homo sapien
tagctctcaaactcgaggctgcgca

SEQ ID NO: 1656962 - DNA, 25 bp, Homo sapien
cctgtcttggagctccgggtagctc

SEQ ID NO: 1656963 - DNA, 25 bp, Homo sapien
ggcaatgcttatgcacagagctgca

SEQ ID NO: 1656964 - DNA, 25 bp, Homo sapien
tcttgcttcagctcaaacactggaa

SEQ ID NO: 1656965 - DNA, 25 bp, Homo sapien
tgcaacaagctaaagacctgatgtg

SEQ ID NO: 1656966 - DNA, 25 bp, Homo sapien
gtgcctgggcggtttgtctccttta

SEQ ID NO: 1656967 - DNA, 25 bp, Homo sapien
accccagggcgatgagcggatgcac

SEQ ID NO: 1656968 - DNA, 25 bp, Homo sapien
tgggctccgagatgtgcctgaggtc

SEQ ID NO: 1656969 - DNA, 25 bp, Homo sapien
ggatgcacatgcacgcgggccactg

SEQ ID NO: 1656970 - DNA, 25 bp, Homo sapien
aggctgggctccgagatgtgcctga

SEQ ID NO: 1656971 - DNA, 25 bp, Homo sapien
taccttgaatccaacccgctgtggc

SEQ ID NO: 1656972 - DNA, 25 bp, Homo sapien
ccgggttccgaacagctgcgtagaa

SEQ ID NO: 1656973 - DNA, 25 bp, Homo sapien
tgagccttgttcctcgaagagacag

SEQ ID NO: 1656974 - DNA, 25 bp, Homo sapien
cctccctggcgtgaaagggctgaga

SEQ ID NO: 1656975 - DNA, 25 bp, Homo sapien
gctgatcctgtttatttggcaggaa

SEQ ID NO: 1656976 - DNA, 25 bp, Homo sapien
cctcaccctggcccttcttggcgtt

SEQ ID NO: 1656977 - DNA, 25 bp, Homo sapien
cctcctcgtcgtctccagccccacc

SEQ ID NO: 1656978 - DNA, 25 bp, Homo sapien
cctggcccttcttggcgttcttcct

SEQ ID NO: 1656979 - DNA, 25 bp, Homo sapien
ctcctcgtcgtctccagccccaccc

SEQ ID NO: 1656980 - DNA, 25 bp, Homo sapien
agcgcagagacaagtcgatgcgctt

SEQ ID NO: 1656981 - DNA, 25 bp, Homo sapien
ccaccccatagggagagcgcagaga

SEQ ID NO: 1656982 - DNA, 25 bp, Homo sapien
gcagagacaagtcgatgcgcttctg

SEQ ID NO: 1656983 - DNA, 25 bp, Homo sapien
accccatagggagagcgcagagaca

SEQ ID NO: 1656984 - DNA, 25 bp, Homo sapien
gattgcggaccctgacacggcgctg

SEQ ID NO: 1656985 - DNA, 25 bp, Homo sapien
ggacgttgccttcaaacagacgccg

SEQ ID NO: 1656986 - DNA, 25 bp, Homo sapien
tcgccacctgattgcggaccctgac

SEQ ID NO: 1656987 - DNA, 25 bp, Homo sapien
cacctgattgcggaccctgacacgg

SEQ ID NO: 1656988 - DNA, 25 bp, Homo sapien
gcggatgttggccaaggtaaatttg

SEQ ID NO: 1656989 - DNA, 25 bp, Homo sapien
cttgcggatgttggccaaggtaaat

SEQ ID NO: 1656990 - DNA, 25 bp, Homo sapien
ggatgttggccaaggtaaatttgac

SEQ ID NO: 1656991 - DNA, 25 bp, Homo sapien
gatgttggccaaggtaaatttgacc

SEQ ID NO: 1656992 - DNA, 25 bp, Homo sapien
ttgttccggaacccatactcgccga

SEQ ID NO: 1656993 - DNA, 25 bp, Homo sapien
tgttccggaacccatactcgccgat

SEQ ID NO: 1656994 - DNA, 25 bp, Homo sapien
atcagcttcagctcttggtcgagac

SEQ ID NO: 1656995 - DNA, 25 bp, Homo sapien
gccgatcagcttcagctcttggtcg

SEQ ID NO: 1656996 - DNA, 25 bp, Homo sapien
taagttttgtgacaaacccagctcc

SEQ ID NO: 1656997 - DNA, 25 bp, Homo sapien
gagatttctcgaagggtctccgcgg

SEQ ID NO: 1656998 - DNA, 25 bp, Homo sapien
ttttgtgacaaacccagctccgggc

SEQ ID NO: 1656999 - DNA, 25 bp, Homo sapien
ctccgcggggtcacataagttttgt

SEQ ID NO: 1657000 - DNA, 25 bp, Homo sapien
gttggctccgcttccccgtctgcgc

SEQ ID NO: 1657001 - DNA, 25 bp, Homo sapien
agcacctctgtggggaccacgacat

SEQ ID NO: 1657002 - DNA, 25 bp, Homo sapien
ctctgtggggaccacgacatcctgt

SEQ ID NO: 1657003 - DNA, 25 bp, Homo sapien
acctctgtggggaccacgacatcct

SEQ ID NO: 1657004 - DNA, 25 bp, Homo sapien
tgtggggaccacgacatcctgtttg

SEQ ID NO: 1657005 - DNA, 25 bp, Homo sapien
tcaagtgtagatggtccagagtggc

SEQ ID NO: 1657006 - DNA, 25 bp, Homo sapien
gtggacccctcaagtggcaggttgc

SEQ ID NO: 1657007 - DNA, 25 bp, Homo sapien
attgttcccgtggacccctcaagtg

SEQ ID NO: 1657008 - DNA, 25 bp, Homo sapien
agatgatcgtggagggagcacatct

SEQ ID NO: 1657009 - DNA, 25 bp, Homo sapien
tggaaggggagatcaggccctttcc

SEQ ID NO: 1657010 - DNA, 25 bp, Homo sapien
gtcatgaggcagcggggagttgatg

SEQ ID NO: 1657011 - DNA, 25 bp, Homo sapien
agtggaaggggagatcaggcccttt

SEQ ID NO: 1657012 - DNA, 25 bp, Homo sapien
ctgtcatgaggcagcggggagttga

SEQ ID NO: 1657013 - DNA, 25 bp, Homo sapien
tcctcccatgccctcagcctccttc

SEQ ID NO: 1657014 - DNA, 25 bp, Homo sapien
cctcctcccatgccctcagcctcct

SEQ ID NO: 1657015 - DNA, 25 bp, Homo sapien
cctcccatgccctcagcctccttcc

SEQ ID NO: 1657016 - DNA, 25 bp, Homo sapien
ctcctcccatgccctcagcctcctt

SEQ ID NO: 1657017 - DNA, 25 bp, Homo sapien
ggcctctgccctgacgtgtttggct

SEQ ID NO: 1657018 - DNA, 25 bp, Homo sapien
ccctgacgtgtttggctaaggcctg

SEQ ID NO: 1657019 - DNA, 25 bp, Homo sapien
agggcctcgtcttgggccagccgaa

SEQ ID NO: 1657020 - DNA, 25 bp, Homo sapien
gtcagcagtaggttcttggcccgca

SEQ ID NO: 1657021 - DNA, 25 bp, Homo sapien
gagaggagcgtaggcgtagctgggc

SEQ ID NO: 1657022 - DNA, 25 bp, Homo sapien
ctggggagaggagcgtaggcgtagc

SEQ ID NO: 1657023 - DNA, 25 bp, Homo sapien
gcgtagctgggcttgctggactggg

SEQ ID NO: 1657024 - DNA, 25 bp, Homo sapien
gagcgtaggcgtagctgggcttgct

SEQ ID NO: 1657025 - DNA, 25 bp, Homo sapien
atttctccctcagagtttcccatca

SEQ ID NO: 1657026 - DNA, 25 bp, Homo sapien
actggattgcggagggcaaagggta

SEQ ID NO: 1657027 - DNA, 25 bp, Homo sapien
catttctccctcagagtttcccatc

SEQ ID NO: 1657028 - DNA, 25 bp, Homo sapien
gagggggaactggattgcggagggc

SEQ ID NO: 1657029 - DNA, 25 bp, Homo sapien
cagcagtacccttgagtccggggtt

SEQ ID NO: 1657030 - DNA, 25 bp, Homo sapien
cagaaaagtaaagtgggacatggtg

SEQ ID NO: 1657031 - DNA, 25 bp, Homo sapien
tcaccaccaaactgcttgtccatct

SEQ ID NO: 1657032 - DNA, 25 bp, Homo sapien
catctccccatgcattagggccaag

SEQ ID NO: 1657033 - DNA, 25 bp, Homo sapien
tcttgtgtagcctctgacagctggg

SEQ ID NO: 1657034 - DNA, 25 bp, Homo sapien
tgtgtagcctctgacagctgggaca

SEQ ID NO: 1657035 - DNA, 25 bp, Homo sapien
gaatcttcttgtgtagcctctgaca

SEQ ID NO: 1657036 - DNA, 25 bp, Homo sapien
agctgggacaggcaggagtcaggcc

SEQ ID NO: 1657037 - DNA, 25 bp, Homo sapien
cagggactccgtagacaactgcgac

SEQ ID NO: 1657038 - DNA, 25 bp, Homo sapien
gtcagtgctcggtccagcagctgct

SEQ ID NO: 1657039 - DNA, 25 bp, Homo sapien
tgctgcagggactccgtagacaact

SEQ ID NO: 1657040 - DNA, 25 bp, Homo sapien
tcgtccactagtgaggtcagtgctc

SEQ ID NO: 1657041 - DNA, 25 bp, Homo sapien
gaggtcaggccctcttcgagagttc

SEQ ID NO: 1657042 - DNA, 25 bp, Homo sapien
gagagttctgaaattgccgcccgaa

SEQ ID NO: 1657043 - DNA, 25 bp, Homo sapien
gaactcctccagaatgggtttcagt

SEQ ID NO: 1657044 - DNA, 25 bp, Homo sapien
cacagttgccttggtgggaccgatc

SEQ ID NO: 1657045 - DNA, 25 bp, Homo sapien
ctggcctaggaagccgtcgaccctg

SEQ ID NO: 1657046 - DNA, 25 bp, Homo sapien
ggcggtcagtgaggacacctctctc

SEQ ID NO: 1657047 - DNA, 25 bp, Homo sapien
gtctgtgcctgttcgcgctgtgccc

SEQ ID NO: 1657048 - DNA, 25 bp, Homo sapien
ctcctgatgccaccgggcggtcagt

SEQ ID NO: 1657049 - DNA, 25 bp, Homo sapien
tcagctcttcgatgccggtgaacag

SEQ ID NO: 1657050 - DNA, 25 bp, Homo sapien
ccgtgtggccgcgagggtttgtcgg

SEQ ID NO: 1657051 - DNA, 25 bp, Homo sapien
cgcgagggtttgtcgggactccctg

SEQ ID NO: 1657052 - DNA, 25 bp, Homo sapien
attcctgctcgctcacgtaggggcc

SEQ ID NO: 1657053 - DNA, 25 bp, Homo sapien
gctgctggaggtagcgcagcttctc

SEQ ID NO: 1657054 - DNA, 25 bp, Homo sapien
cggcctcctgccgtcgcggcgtctc

SEQ ID NO: 1657055 - DNA, 25 bp, Homo sapien
tgccgtcgcggcgtctcatcctgca

SEQ ID NO: 1657056 - DNA, 25 bp, Homo sapien
ctgctgctggaggtagcgcagcttc

SEQ ID NO: 1657057 - DNA, 25 bp, Homo sapien
aagtccagctcgattctctttctgg

SEQ ID NO: 1657058 - DNA, 25 bp, Homo sapien
tgactgcagggcaagagtcccccat

SEQ ID NO: 1657059 - DNA, 25 bp, Homo sapien
agtccagctcgattctctttctggg

SEQ ID NO: 1657060 - DNA, 25 bp, Homo sapien
tgtgactgcagggcaagagtccccc

SEQ ID NO: 1657061 - DNA, 25 bp, Homo sapien
gcagggagttccacctaaaagtgta

SEQ ID NO: 1657062 - DNA, 25 bp, Homo sapien
tccctcttatcagcgagttctaagg

SEQ ID NO: 1657063 - DNA, 25 bp, Homo sapien
taaggatgactatgtgcacgaaggt

SEQ ID NO: 1657064 - DNA, 25 bp, Homo sapien
tgttggagcctcatttgaatccctc

SEQ ID NO: 1657065 - DNA, 25 bp, Homo sapien
gcagaattctgcttcaagacgttgg

SEQ ID NO: 1657066 - DNA, 25 bp, Homo sapien
ggcagaattctgcttcaagacgttg

SEQ ID NO: 1657067 - DNA, 25 bp, Homo sapien
ctgggtcagacaccagggcgagggc

SEQ ID NO: 1657068 - DNA, 25 bp, Homo sapien
tgggtcagacaccagggcgagggcc

SEQ ID NO: 1657069 - DNA, 25 bp, Homo sapien
ttgaatgcagtacccctccaactct

SEQ ID NO: 1657070 - DNA, 25 bp, Homo sapien
tctccagattctcgctcagcacaga

SEQ ID NO: 1657071 - DNA, 25 bp, Homo sapien
cttgagttgaatgcagtacccctcc

SEQ ID NO: 1657072 - DNA, 25 bp, Homo sapien
attctcgctcagcacagaacactcg

SEQ ID NO: 1657073 - DNA, 25 bp, Homo sapien
gatggagtctttggcgcggaccaat

SEQ ID NO: 1657074 - DNA, 25 bp, Homo sapien
tggcgcggaccaatccactgttgac

SEQ ID NO: 1657075 - DNA, 25 bp, Homo sapien
tgcacgtgctggttaacccggttgg

SEQ ID NO: 1657076 - DNA, 25 bp, Homo sapien
tgcagagactgcacgtgctggttaa

SEQ ID NO: 1657077 - DNA, 25 bp, Homo sapien
tggagccaagggctatacctctgat

SEQ ID NO: 1657078 - DNA, 25 bp, Homo sapien
gctgtgtttacaccttgattttgcc

SEQ ID NO: 1657079 - DNA, 25 bp, Homo sapien
attcctgcgcggcaaacccagggca

SEQ ID NO: 1657080 - DNA, 25 bp, Homo sapien
tacctctgattcttagcattcctgc

SEQ ID NO: 1657081 - DNA, 25 bp, Homo sapien
gcctgtaagtgttggtcttacaagc

SEQ ID NO: 1657082 - DNA, 25 bp, Homo sapien
tgtaagtgttggtcttacaagcatg

SEQ ID NO: 1657083 - DNA, 25 bp, Homo sapien
cctgtaagtgttggtcttacaagca

SEQ ID NO: 1657084 - DNA, 25 bp, Homo sapien
tgcctgtaagtgttggtcttacaag

SEQ ID NO: 1657085 - DNA, 25 bp, Homo sapien
caggatttccgtgatgtctgcgtca

SEQ ID NO: 1657086 - DNA, 25 bp, Homo sapien
cgaggaccgtttgaggttcaggcac

SEQ ID NO: 1657087 - DNA, 25 bp, Homo sapien
cgtcatccggatcccagggtagggt

SEQ ID NO: 1657088 - DNA, 25 bp, Homo sapien
tgagttggccgctgaggtcttccac

SEQ ID NO: 1657089 - DNA, 25 bp, Homo sapien
gggtgtccccggcctcatggatctc

SEQ ID NO: 1657090 - DNA, 25 bp, Homo sapien
ggggtgtccccggcctcatggatct

SEQ ID NO: 1657091 - DNA, 25 bp, Homo sapien
agatcgtcttcaccaccacgctcgc

SEQ ID NO: 1657092 - DNA, 25 bp, Homo sapien
tggactgccagatcgtcttcaccac

SEQ ID NO: 1657093 - DNA, 25 bp, Homo sapien
tctggctcccagggaggggctcctt

SEQ ID NO: 1657094 - DNA, 25 bp, Homo sapien
ggtctggctcccagggaggggctcc

SEQ ID NO: 1657095 - DNA, 25 bp, Homo sapien
ctggctcccagggaggggctccttc

SEQ ID NO: 1657096 - DNA, 25 bp, Homo sapien
tggctcccagggaggggctccttcc

SEQ ID NO: 1657097 - DNA, 25 bp, Homo sapien
acaaatttgcatgtggtctttgcgc

SEQ ID NO: 1657098 - DNA, 25 bp, Homo sapien
ccaatgttaatacatgtgctgtcga

SEQ ID NO: 1657099 - DNA, 25 bp, Homo sapien
atatatggaacatgtcacaaatttg

SEQ ID NO: 1657100 - DNA, 25 bp, Homo sapien
tgcatgtggtctttgcgcagggccc

SEQ ID NO: 1657101 - DNA, 25 bp, Homo sapien
tgaagccccgtctctactaaaaata

SEQ ID NO: 1657102 - DNA, 25 bp, Homo sapien
caagaacagcttggccaacgtggtg

SEQ ID NO: 1657103 - DNA, 25 bp, Homo sapien
ggcacctgtaatcccagctacttgg

SEQ ID NO: 1657104 - DNA, 25 bp, Homo sapien
caaaaattagtcaggtgtggtggcg

SEQ ID NO: 1657105 - DNA, 25 bp, Homo sapien
ggctgtgtattattgtgagcgaata

SEQ ID NO: 1657106 - DNA, 25 bp, Homo sapien
tgtgagcgaataaacagagagacgc

SEQ ID NO: 1657107 - DNA, 25 bp, Homo sapien
gagacgctaacagccccatgtctgt

SEQ ID NO: 1657108 - DNA, 25 bp, Homo sapien
gccagggaagtggatgtctcctccc

SEQ ID NO: 1657109 - DNA, 25 bp, Homo sapien
ttcgcagcccatgggtgggactctg

SEQ ID NO: 1657110 - DNA, 25 bp, Homo sapien
tgcaaggccaccagacgcactcctg

SEQ ID NO: 1657111 - DNA, 25 bp, Homo sapien
agtgtgggtggccaggcttcgcagc

SEQ ID NO: 1657112 - DNA, 25 bp, Homo sapien
ggcttcgcagcccatgggtgggact

SEQ ID NO: 1657113 - DNA, 25 bp, Homo sapien
ggcctggtagacctcatcttctgtc

SEQ ID NO: 1657114 - DNA, 25 bp, Homo sapien
tgggcctggtagacctcatcttctg

SEQ ID NO: 1657115 - DNA, 25 bp, Homo sapien
agctgggcctggtagacctcatctt

SEQ ID NO: 1657116 - DNA, 25 bp, Homo sapien
gctgggcctggtagacctcatcttc

SEQ ID NO: 1657117 - DNA, 25 bp, Homo sapien
gctggctgtcagcaacttgaagacc

SEQ ID NO: 1657118 - DNA, 25 bp, Homo sapien
tagctggctgtcagcaacttgaaga

SEQ ID NO: 1657119 - DNA, 25 bp, Homo sapien
ctagctggctgtcagcaacttgaag

SEQ ID NO: 1657120 - DNA, 25 bp, Homo sapien
ctggctgtcagcaacttgaagacca

SEQ ID NO: 1657121 - DNA, 25 bp, Homo sapien
tcattctttcattacgtgtaaaggc

SEQ ID NO: 1657122 - DNA, 25 bp, Homo sapien
cattctttcattacgtgtaaaggca

SEQ ID NO: 1657123 - DNA, 25 bp, Homo sapien
ccagggtatagaagtttcggaggag

SEQ ID NO: 1657124 - DNA, 25 bp, Homo sapien
gaggcgccggcgctgttctggtgaa

SEQ ID NO: 1657125 - DNA, 25 bp, Homo sapien
gaagtgcgtggaggtgaccagggta

SEQ ID NO: 1657126 - DNA, 25 bp, Homo sapien
atagaagtttcggaggaggcgccgg

SEQ ID NO: 1657127 - DNA, 25 bp, Homo sapien
ccccaagggctccacggtgaagagg

SEQ ID NO: 1657128 - DNA, 25 bp, Homo sapien
atcccccaagggctccacggtgaag

SEQ ID NO: 1657129 - DNA, 25 bp, Homo sapien
ttatcccccaagggctccacggtga

SEQ ID NO: 1657130 - DNA, 25 bp, Homo sapien
ccaagggctccacggtgaagaggca

SEQ ID NO: 1657131 - DNA, 25 bp, Homo sapien
tcagttccaggtggaggagcagcag

SEQ ID NO: 1657132 - DNA, 25 bp, Homo sapien
cagttccaggtggaggagcagcagc

SEQ ID NO: 1657133 - DNA, 25 bp, Homo sapien
ggcagacaggcccgcaacgggtcca

SEQ ID NO: 1657134 - DNA, 25 bp, Homo sapien
acaggcccgcaacgggtccagcagt

SEQ ID NO: 1657135 - DNA, 25 bp, Homo sapien
agacaggcccgcaacgggtccagca

SEQ ID NO: 1657136 - DNA, 25 bp, Homo sapien
cgcccggggtcccaacggcagacag

SEQ ID NO: 1657137 - DNA, 25 bp, Homo sapien
tcagggtcaggagccggtgtgggac

SEQ ID NO: 1657138 - DNA, 25 bp, Homo sapien
tgggctcggcccgcagagtagacac

SEQ ID NO: 1657139 - DNA, 25 bp, Homo sapien
ctgtggatacaactggctgaggggt

SEQ ID NO: 1657140 - DNA, 25 bp, Homo sapien
cagctccaggctcggcagcagagtc

SEQ ID NO: 1657141 - DNA, 25 bp, Homo sapien
tacaccgggtagtcgcgagcggtct

SEQ ID NO: 1657142 - DNA, 25 bp, Homo sapien
cgcgagcggtctgcggcggcaggga

SEQ ID NO: 1657143 - DNA, 25 bp, Homo sapien
ctcccgtgcggcaggtacaccgggt

SEQ ID NO: 1657144 - DNA, 25 bp, Homo sapien
gtccccagccgccaccaaccctctg

SEQ ID NO: 1657145 - DNA, 25 bp, Homo sapien
cctcagcgaacccggagagggcttc

SEQ ID NO: 1657146 - DNA, 25 bp, Homo sapien
cgcggcctcagcgaacccggagagg

SEQ ID NO: 1657147 - DNA, 25 bp, Homo sapien
ggcctcagcgaacccggagagggct

SEQ ID NO: 1657148 - DNA, 25 bp, Homo sapien
tgcccgcggcctcagcgaacccgga

SEQ ID NO: 1657149 - DNA, 25 bp, Homo sapien
tatttaagtagaggtagctagagat

SEQ ID NO: 1657150 - DNA, 25 bp, Homo sapien
caccaggcaagtccacaagagcagt

SEQ ID NO: 1657151 - DNA, 25 bp, Homo sapien
ggcaagtccacaagagcagtattta

SEQ ID NO: 1657152 - DNA, 25 bp, Homo sapien
caagagcagtatttaagtagaggta

SEQ ID NO: 1657153 - DNA, 25 bp, Homo sapien
agaacaggtgtaagagtttccatag

SEQ ID NO: 1657154 - DNA, 25 bp, Homo sapien
taggaggaggttgggacaatggtcc

SEQ ID NO: 1657155 - DNA, 25 bp, Homo sapien
aggataggaggaggttgggacaatg

SEQ ID NO: 1657156 - DNA, 25 bp, Homo sapien
aacaggtgtaagagtttccatagca

SEQ ID NO: 1657157 - DNA, 25 bp, Homo sapien
ccccaggaagctgtcgatgaggcaa

SEQ ID NO: 1657158 - DNA, 25 bp, Homo sapien
cacacactgggtcaggtccccgatg

SEQ ID NO: 1657159 - DNA, 25 bp, Homo sapien
gtcaggtccccgatgagctccgagt

SEQ ID NO: 1657160 - DNA, 25 bp, Homo sapien
gaagctgtcgatgaggcaataactg

SEQ ID NO: 1657161 - DNA, 25 bp, Homo sapien
cctcaagtccttcttcagtctctcc

SEQ ID NO: 1657162 - DNA, 25 bp, Homo sapien
gtctctccacgttgcggatattggt

SEQ ID NO: 1657163 - DNA, 25 bp, Homo sapien
tccacgttgcggatattggtcagtt

SEQ ID NO: 1657164 - DNA, 25 bp, Homo sapien
aagtccttcttcagtctctccacgt

SEQ ID NO: 1657165 - DNA, 25 bp, Homo sapien
caccatttggagtagtctctccagc

SEQ ID NO: 1657166 - DNA, 25 bp, Homo sapien
caaacaccatttggagtagtctctc

SEQ ID NO: 1657167 - DNA, 25 bp, Homo sapien
aacaccatttggagtagtctctcca

SEQ ID NO: 1657168 - DNA, 25 bp, Homo sapien
ctccaaacaccatttggagtagtct

SEQ ID NO: 1657169 - DNA, 25 bp, Homo sapien
ctcagatgacagaacaatgagggtg

SEQ ID NO: 1657170 - DNA, 25 bp, Homo sapien
tcagatgacagaacaatgagggtga

SEQ ID NO: 1657171 - DNA, 25 bp, Homo sapien
tcttatagagaacatcagggatcaa

SEQ ID NO: 1657172 - DNA, 25 bp, Homo sapien
ctccggggtcatcttcaacagggac

SEQ ID NO: 1657173 - DNA, 25 bp, Homo sapien
ctaaagatcccatagccaaattaac

SEQ ID NO: 1657174 - DNA, 25 bp, Homo sapien
agggatcaaagagggtaactggctt

SEQ ID NO: 1657175 - DNA, 25 bp, Homo sapien
tcgtgttctcggtcctcgcagagct

SEQ ID NO: 1657176 - DNA, 25 bp, Homo sapien
gtgttctcggtcctcgcagagctca

SEQ ID NO: 1657177 - DNA, 25 bp, Homo sapien
gttctcggtcctcgcagagctcagc

SEQ ID NO: 1657178 - DNA, 25 bp, Homo sapien
gtcgtgttctcggtcctcgcagagc

SEQ ID NO: 1657179 - DNA, 25 bp, Homo sapien
ccattgagggaaccgatgacagaga

SEQ ID NO: 1657180 - DNA, 25 bp, Homo sapien
ggactccattgagggaaccgatgac

SEQ ID NO: 1657181 - DNA, 25 bp, Homo sapien
actccattgagggaaccgatgacag

SEQ ID NO: 1657182 - DNA, 25 bp, Homo sapien
ttgagggaaccgatgacagagaacg

SEQ ID NO: 1657183 - DNA, 25 bp, Homo sapien
acagcagatgcacagtgccgcccgt

SEQ ID NO: 1657184 - DNA, 25 bp, Homo sapien
actgctcctgcagaatagggggacc

SEQ ID NO: 1657185 - DNA, 25 bp, Homo sapien
ggccgcgaggcacagcagatgcaca

SEQ ID NO: 1657186 - DNA, 25 bp, Homo sapien
ggaccccgctggaggccgcgaggca

SEQ ID NO: 1657187 - DNA, 25 bp, Homo sapien
ttaggactcccaccgcggtccctca

SEQ ID NO: 1657188 - DNA, 25 bp, Homo sapien
taggactcccaccgcggtccctcac

SEQ ID NO: 1657189 - DNA, 25 bp, Homo sapien
catggcggtaatcagagtaactcgg

SEQ ID NO: 1657190 - DNA, 25 bp, Homo sapien
actgtcagtgcgggtcttggagcat

SEQ ID NO: 1657191 - DNA, 25 bp, Homo sapien
agtaactcggcctgtggtccggagc

SEQ ID NO: 1657192 - DNA, 25 bp, Homo sapien
gattggaagaggattaacttcccgc

SEQ ID NO: 1657193 - DNA, 25 bp, Homo sapien
ggaaaaaacagctgtgcccggatca

SEQ ID NO: 1657194 - DNA, 25 bp, Homo sapien
tgcctagcaaccacattccctgtag

SEQ ID NO: 1657195 - DNA, 25 bp, Homo sapien
cctactcaaagatggcgaccgtggc

SEQ ID NO: 1657196 - DNA, 25 bp, Homo sapien
caaagattgcgatggtcccaaagca

SEQ ID NO: 1657197 - DNA, 25 bp, Homo sapien
ggcaggagaatcgcttgaacccggg

SEQ ID NO: 1657198 - DNA, 25 bp, Homo sapien
agcggggcgtggttgcgggcacctg

SEQ ID NO: 1657199 - DNA, 25 bp, Homo sapien
gaagcggaggttgtagtgagccgag

SEQ ID NO: 1657200 - DNA, 25 bp, Homo sapien
taatcccagctactcgggaggctga

SEQ ID NO: 1657201 - DNA, 25 bp, Homo sapien
gaattaacagaagtggcgcggcagt

SEQ ID NO: 1657202 - DNA, 25 bp, Homo sapien
tacggcgctggttcctaaatacaag

SEQ ID NO: 1657203 - DNA, 25 bp, Homo sapien
caaggcgacagcatttggcaaggac

SEQ ID NO: 1657204 - DNA, 25 bp, Homo sapien
tccgaagcacaactacagacagcgt

SEQ ID NO: 1657205 - DNA, 25 bp, Homo sapien
tggaagggaagacgccagccttttg

SEQ ID NO: 1657206 - DNA, 25 bp, Homo sapien
ggcttcaactcaaaggcgcaaaaag

SEQ ID NO: 1657207 - DNA, 25 bp, Homo sapien
actgacatctcggtgtggaagggaa

SEQ ID NO: 1657208 - DNA, 25 bp, Homo sapien
gttccatgcattcaccatagttgag

SEQ ID NO: 1657209 - DNA, 25 bp, Homo sapien
tcttcacagggcaccttgcagttgc

SEQ ID NO: 1657210 - DNA, 25 bp, Homo sapien
tgcagttgcaatgtggcatccagct

SEQ ID NO: 1657211 - DNA, 25 bp, Homo sapien
gccgagagcctcagttcctagctgt

SEQ ID NO: 1657212 - DNA, 25 bp, Homo sapien
ggctgtgcagtcatcggaaggctcc

SEQ ID NO: 1657213 - DNA, 25 bp, Homo sapien
ggtggcaggcatctgggaaatccca

SEQ ID NO: 1657214 - DNA, 25 bp, Homo sapien
attgcacaccagtctgggctgcaag

SEQ ID NO: 1657215 - DNA, 25 bp, Homo sapien
tagaaatatgagaagggctgggtgc

SEQ ID NO: 1657216 - DNA, 25 bp, Homo sapien
caccagtctgggctgcaagagtgaa

SEQ ID NO: 1657217 - DNA, 25 bp, Homo sapien
cacctactgagattaagaacctggg

SEQ ID NO: 1657218 - DNA, 25 bp, Homo sapien
cagtgacgagggtaagacggtccca

SEQ ID NO: 1657219 - DNA, 25 bp, Homo sapien
gaactcatggcctgctgtgtgagaa

SEQ ID NO: 1657220 - DNA, 25 bp, Homo sapien
tgtaatctcaaacccaggacgctgg

SEQ ID NO: 1657221 - DNA, 25 bp, Homo sapien
ctctgcgtctggacacacacgatga

SEQ ID NO: 1657222 - DNA, 25 bp, Homo sapien
agcctctgcgtctggacacacacga

SEQ ID NO: 1657223 - DNA, 25 bp, Homo sapien
cctctgcgtctggacacacacgatg

SEQ ID NO: 1657224 - DNA, 25 bp, Homo sapien
gcctctgcgtctggacacacacgat

SEQ ID NO: 1657225 - DNA, 25 bp, Homo sapien
gagtttgcaaagcatgtatcaggca

SEQ ID NO: 1657226 - DNA, 25 bp, Homo sapien
tttgcaaagcatgtatcaggcagac

SEQ ID NO: 1657227 - DNA, 25 bp, Homo sapien
ctagagtttgcaaagcatgtatcag

SEQ ID NO: 1657228 - DNA, 25 bp, Homo sapien
agagtttgcaaagcatgtatcaggc

SEQ ID NO: 1657229 - DNA, 25 bp, Homo sapien
ccaagccagagatgatcttactccc

SEQ ID NO: 1657230 - DNA, 25 bp, Homo sapien
tcagtattggtctcctagttagcac

SEQ ID NO: 1657231 - DNA, 25 bp, Homo sapien
ctcttgtacgtaggaccaagaccct

SEQ ID NO: 1657232 - DNA, 25 bp, Homo sapien
taaacagacatctcttgtacgtagg

SEQ ID NO: 1657233 - DNA, 25 bp, Homo sapien
tagttagcacacgacattacattct

SEQ ID NO: 1657234 - DNA, 25 bp, Homo sapien
acaagaacttctggcataaacaggt

SEQ ID NO: 1657235 - DNA, 25 bp, Homo sapien
gtgtataaacaactgtcttgcatta

SEQ ID NO: 1657236 - DNA, 25 bp, Homo sapien
tgcattaatttcattagtttgatag

SEQ ID NO: 1657237 - DNA, 25 bp, Homo sapien
gcaatctggtttgtgtataaacaac

SEQ ID NO: 1657238 - DNA, 25 bp, Homo sapien
cagcaagagttaggagacgtcaccc

SEQ ID NO: 1657239 - DNA, 25 bp, Homo sapien
tagttaacacttagcacagcctgtg

SEQ ID NO: 1657240 - DNA, 25 bp, Homo sapien
ggtgcaatccgtaccctcagtgggt

SEQ ID NO: 1657241 - DNA, 25 bp, Homo sapien
taacatttgagtagtgactgcgcca

SEQ ID NO: 1657242 - DNA, 25 bp, Homo sapien
cgccgctccggggtgtcccctgtgg

SEQ ID NO: 1657243 - DNA, 25 bp, Homo sapien
gcctttgtccgcagcccccgccgct

SEQ ID NO: 1657244 - DNA, 25 bp, Homo sapien
gcagcccccgccgctccggggtgtc

SEQ ID NO: 1657245 - DNA, 25 bp, Homo sapien
ccgcagcccccgccgctccggggtg

SEQ ID NO: 1657246 - DNA, 25 bp, Homo sapien
taaatacactgcctcagcggtgtgg

SEQ ID NO: 1657247 - DNA, 25 bp, Homo sapien
tcagtgcaagtactagatgggcttc

SEQ ID NO: 1657248 - DNA, 25 bp, Homo sapien
aaacgtaaacattcagcttcgcagg

SEQ ID NO: 1657249 - DNA, 25 bp, Homo sapien
gctttgatggactgccgtgagccca

SEQ ID NO: 1657250 - DNA, 25 bp, Homo sapien
tcattctaacgccaagatactcagg

SEQ ID NO: 1657251 - DNA, 25 bp, Homo sapien
tatctgatcttctgacgactgccca

SEQ ID NO: 1657252 - DNA, 25 bp, Homo sapien
gatgtccggtatggtgcctgaagcc

SEQ ID NO: 1657253 - DNA, 25 bp, Homo sapien
tgccaggctgtttgcggagctttcc

SEQ ID NO: 1657254 - DNA, 25 bp, Homo sapien
ccagggcatctaggctgtgcacagt

SEQ ID NO: 1657255 - DNA, 25 bp, Homo sapien
gccagggcatctaggctgtgcacag

SEQ ID NO: 1657256 - DNA, 25 bp, Homo sapien
gggcgggctcccttgtagcactgtg

SEQ ID NO: 1657257 - DNA, 25 bp, Homo sapien
tgctcacacagtccaggcgggggtc

SEQ ID NO: 1657258 - DNA, 25 bp, Homo sapien
tccggaactcccagttggcacagtt

SEQ ID NO: 1657259 - DNA, 25 bp, Homo sapien
acagagactgcgactcgctcaaggg

SEQ ID NO: 1657260 - DNA, 25 bp, Homo sapien
tcctcaagaggcaccagcactttat

SEQ ID NO: 1657261 - DNA, 25 bp, Homo sapien
acacagctaggaggcagcagaacgg

SEQ ID NO: 1657262 - DNA, 25 bp, Homo sapien
gagcctttatgtggcaccaactgtg

SEQ ID NO: 1657263 - DNA, 25 bp, Homo sapien
tgtgtgcactattacccggttttac

SEQ ID NO: 1657264 - DNA, 25 bp, Homo sapien
tgcacgcagtagctcttccagaggg

SEQ ID NO: 1657265 - DNA, 25 bp, Homo sapien
cagtccagatcgtcaacaacaagtt

SEQ ID NO: 1657266 - DNA, 25 bp, Homo sapien
cagatcctcacggactgtggctggg

SEQ ID NO: 1657267 - DNA, 25 bp, Homo sapien
acagtcggtccaagaggtggctgcc

SEQ ID NO: 1657268 - DNA, 25 bp, Homo sapien
gggggctgccaagggatctgagagc

SEQ ID NO: 1657269 - DNA, 25 bp, Homo sapien
gggctgccaagggatctgagagcgg

SEQ ID NO: 1657270 - DNA, 25 bp, Homo sapien
ctgccaagggatctgagagcggctt

SEQ ID NO: 1657271 - DNA, 25 bp, Homo sapien
tggggggctgccaagggatctgaga

SEQ ID NO: 1657272 - DNA, 25 bp, Homo sapien
ggtcccctcgcttccccgcagacca

SEQ ID NO: 1657273 - DNA, 25 bp, Homo sapien
ccgggggactcagcgggctgggagc

SEQ ID NO: 1657274 - DNA, 25 bp, Homo sapien
gcccgggggactcagcgggctggga

SEQ ID NO: 1657275 - DNA, 25 bp, Homo sapien
ggaggccgtggtgggagaagccaga

SEQ ID NO: 1657276 - DNA, 25 bp, Homo sapien
agtgccgctgttccggaactcgcgc

SEQ ID NO: 1657277 - DNA, 25 bp, Homo sapien
ctagtgccgctgttccggaactcgc

SEQ ID NO: 1657278 - DNA, 25 bp, Homo sapien
cctagtgccgctgttccggaactcg

SEQ ID NO: 1657279 - DNA, 25 bp, Homo sapien
tagtgccgctgttccggaactcgcg

SEQ ID NO: 1657280 - DNA, 25 bp, Homo sapien
ctgtgccggatcatggacaatggct

SEQ ID NO: 1657281 - DNA, 25 bp, Homo sapien
tgtgccggatcatggacaatggctt

SEQ ID NO: 1657282 - DNA, 25 bp, Homo sapien
gtgccggatcatggacaatggcttc

SEQ ID NO: 1657283 - DNA, 25 bp, Homo sapien
ggacaggcgcccttgtcactcctgg

SEQ ID NO: 1657284 - DNA, 25 bp, Homo sapien
ctccgcgctctccactcctcaggga

SEQ ID NO: 1657285 - DNA, 25 bp, Homo sapien
aatatttggcgattgtcttatctgg

SEQ ID NO: 1657286 - DNA, 25 bp, Homo sapien
gtcccagaatatttggcgattgtct

SEQ ID NO: 1657287 - DNA, 25 bp, Homo sapien
catacttgggtaatatcccgaaact

SEQ ID NO: 1657288 - DNA, 25 bp, Homo sapien
ggccatacttgggtaatatcccgaa

SEQ ID NO: 1657289 - DNA, 25 bp, Homo sapien
gccatacttgggtaatatcccgaaa

SEQ ID NO: 1657290 - DNA, 25 bp, Homo sapien
aaactgtccacgaagctgttcgtgg

SEQ ID NO: 1657291 - DNA, 25 bp, Homo sapien
tcgactcagtctgagtaaactgtcc

SEQ ID NO: 1657292 - DNA, 25 bp, Homo sapien
agcaatttcaagcattccctcaggg

SEQ ID NO: 1657293 - DNA, 25 bp, Homo sapien
cctgggtgtaggtgcttttacatga

SEQ ID NO: 1657294 - DNA, 25 bp, Homo sapien
tttcctacaaagcatcgtgtgagat

SEQ ID NO: 1657295 - DNA, 25 bp, Homo sapien
gcaactttgtcaacggcatccggcg

SEQ ID NO: 1657296 - DNA, 25 bp, Homo sapien
catcgtgtgagatccgcgtgcttat

SEQ ID NO: 1657297 - DNA, 25 bp, Homo sapien
catccggcgtgtcattgccaaccag

SEQ ID NO: 1657298 - DNA, 25 bp, Homo sapien
ggtcctaggctgtcgggaaactgca

SEQ ID NO: 1657299 - DNA, 25 bp, Homo sapien
ctgtcatgtacaggagggaccctgg

SEQ ID NO: 1657300 - DNA, 25 bp, Homo sapien
ttgggaaagaagcagggcgaccttg

SEQ ID NO: 1657301 - DNA, 25 bp, Homo sapien
catgggaggtggtatccaggcctgg

SEQ ID NO: 1657302 - DNA, 25 bp, Homo sapien
gagaaacagcgtttattgtggaggg

SEQ ID NO: 1657303 - DNA, 25 bp, Homo sapien
aacagcgtttattgtggaggggagc

SEQ ID NO: 1657304 - DNA, 25 bp, Homo sapien
acagcgtttattgtggaggggagct

SEQ ID NO: 1657305 - DNA, 25 bp, Homo sapien
aaggagaaacagcgtttattgtgga

SEQ ID NO: 1657306 - DNA, 25 bp, Homo sapien
tagccggaacgggatctccaggatg

SEQ ID NO: 1657307 - DNA, 25 bp, Homo sapien
gaactggcagtacagccgccccagc

SEQ ID NO: 1657308 - DNA, 25 bp, Homo sapien
gctccacccatagccggaacgggat

SEQ ID NO: 1657309 - DNA, 25 bp, Homo sapien
gaagccttcagccagcgttggggcc

SEQ ID NO: 1657310 - DNA, 25 bp, Homo sapien
cagcctggatcatgtggcccagcca

SEQ ID NO: 1657311 - DNA, 25 bp, Homo sapien
acagcctggatcatgtggcccagcc

SEQ ID NO: 1657312 - DNA, 25 bp, Homo sapien
ccatgtctgacacggggatatgaga

SEQ ID NO: 1657313 - DNA, 25 bp, Homo sapien
gagaggagtccgtcatctctcgaaa

SEQ ID NO: 1657314 - DNA, 25 bp, Homo sapien
tacatgaccatgtctgacacgggga

SEQ ID NO: 1657315 - DNA, 25 bp, Homo sapien
ggatatgagaggagtccgtcatctc

SEQ ID NO: 1657316 - DNA, 25 bp, Homo sapien
ctgtggggaacatcagaggggcggc

SEQ ID NO: 1657317 - DNA, 25 bp, Homo sapien
tggggaacatcagaggggcggcagg

SEQ ID NO: 1657318 - DNA, 25 bp, Homo sapien
ggggtgtccgggctgagcgggctca

SEQ ID NO: 1657319 - DNA, 25 bp, Homo sapien
gggtgtccgggctgagcgggctcac

SEQ ID NO: 1657320 - DNA, 25 bp, Homo sapien
gttgttgtggcgcgcctgctccaga

SEQ ID NO: 1657321 - DNA, 25 bp, Homo sapien
cgcggctcgggcacactggacgtac

SEQ ID NO: 1657322 - DNA, 25 bp, Homo sapien
ccagagtggcggtgaagaggaagca

SEQ ID NO: 1657323 - DNA, 25 bp, Homo sapien
ctgctccagagtggcggtgaagagg

SEQ ID NO: 1657324 - DNA, 25 bp, Homo sapien
gcaggccacctacggccccgcggtc

SEQ ID NO: 1657325 - DNA, 25 bp, Homo sapien
cacctacggccccgcggtcacgcta

SEQ ID NO: 1657326 - DNA, 25 bp, Homo sapien
ccgccgcaggccacctacggccccg

SEQ ID NO: 1657327 - DNA, 25 bp, Homo sapien
ccaccccgccgcaggccacctacgg

SEQ ID NO: 1657328 - DNA, 25 bp, Homo sapien
tgtgttgtcgatggcgacccgtttc

SEQ ID NO: 1657329 - DNA, 25 bp, Homo sapien
gtttcccttgcttcagggctgtctc

SEQ ID NO: 1657330 - DNA, 25 bp, Homo sapien
tctcacacgtggtcacacagcgctg

SEQ ID NO: 1657331 - DNA, 25 bp, Homo sapien
gggctgtctcacacgtggtcacaca

SEQ ID NO: 1657332 - DNA, 25 bp, Homo sapien
gtcacaaacagatcggcagacccag

SEQ ID NO: 1657333 - DNA, 25 bp, Homo sapien
aagccgccccaaaccagttgagagg

SEQ ID NO: 1657334 - DNA, 25 bp, Homo sapien
aggcaatgatggaggaaagccgccc

SEQ ID NO: 1657335 - DNA, 25 bp, Homo sapien
gggacacgagaggtcacaaacagat

SEQ ID NO: 1657336 - DNA, 25 bp, Homo sapien
cctgttcacgtggacatatccggcc

SEQ ID NO: 1657337 - DNA, 25 bp, Homo sapien
ttcacgtggacatatccggccgaca

SEQ ID NO: 1657338 - DNA, 25 bp, Homo sapien
ccggccgacacgaggtgcttcttga

SEQ ID NO: 1657339 - DNA, 25 bp, Homo sapien
gacacgaggtgcttcttgagaaagg

SEQ ID NO: 1657340 - DNA, 25 bp, Homo sapien
gggcagtgtcggtgggtggcctagg

SEQ ID NO: 1657341 - DNA, 25 bp, Homo sapien
acgcgcacaggaacaggacacttac

SEQ ID NO: 1657342 - DNA, 25 bp, Homo sapien
gggcacgcgcacaggaacaggacac

SEQ ID NO: 1657343 - DNA, 25 bp, Homo sapien
gctcagggcacgcgcacaggaacag

SEQ ID NO: 1657344 - DNA, 25 bp, Homo sapien
cagggaatcccactgcgacaaccac

SEQ ID NO: 1657345 - DNA, 25 bp, Homo sapien
actgcgacaaccacctccgggctgg

SEQ ID NO: 1657346 - DNA, 25 bp, Homo sapien
tgcgacaaccacctccgggctggcg

SEQ ID NO: 1657347 - DNA, 25 bp, Homo sapien
ccccagggaatcccactgcgacaac

SEQ ID NO: 1657348 - DNA, 25 bp, Homo sapien
gctgggagctcgaagccggctgctg

SEQ ID NO: 1657349 - DNA, 25 bp, Homo sapien
caaaggctgggagctcgaagccggc

SEQ ID NO: 1657350 - DNA, 25 bp, Homo sapien
agaaagaactcctcaggcgtggcga

SEQ ID NO: 1657351 - DNA, 25 bp, Homo sapien
aactcctcaggcgtggcgaagggca

SEQ ID NO: 1657352 - DNA, 25 bp, Homo sapien
gcccagttggccgggcgtccggctg

SEQ ID NO: 1657353 - DNA, 25 bp, Homo sapien
ggcgatcggcgcaggagaagtcttt

SEQ ID NO: 1657354 - DNA, 25 bp, Homo sapien
aggcgatcggcgcaggagaagtctt

SEQ ID NO: 1657355 - DNA, 25 bp, Homo sapien
caggcgatcggcgcaggagaagtct

SEQ ID NO: 1657356 - DNA, 25 bp, Homo sapien
ccccgatggatatgggcgtgccgtc

SEQ ID NO: 1657357 - DNA, 25 bp, Homo sapien
tgtccccgatggatatgggcgtgcc

SEQ ID NO: 1657358 - DNA, 25 bp, Homo sapien
tggatatgggcgtgccgtcgttggc

SEQ ID NO: 1657359 - DNA, 25 bp, Homo sapien
tcccacaaagatgctgtccccgatg

SEQ ID NO: 1657360 - DNA, 25 bp, Homo sapien
agatggtcccacatgcccgtcaccg

SEQ ID NO: 1657361 - DNA, 25 bp, Homo sapien
acatgcccgtcaccggcttccggta

SEQ ID NO: 1657362 - DNA, 25 bp, Homo sapien
gtacaagcctgcgtgcgtggccacc

SEQ ID NO: 1657363 - DNA, 25 bp, Homo sapien
accggcttccggtacaagcctgcgt

SEQ ID NO: 1657364 - DNA, 25 bp, Homo sapien
tcccgcgcccgatgctcatctggtt

SEQ ID NO: 1657365 - DNA, 25 bp, Homo sapien
gcagcttcccgcgcccgatgctcat

SEQ ID NO: 1657366 - DNA, 25 bp, Homo sapien
agcttcccgcgcccgatgctcatct

SEQ ID NO: 1657367 - DNA, 25 bp, Homo sapien
cttcccgcgcccgatgctcatctgg

SEQ ID NO: 1657368 - DNA, 25 bp, Homo sapien
gccttggtctgactgcggtcggacc

SEQ ID NO: 1657369 - DNA, 25 bp, Homo sapien
ggagcaaagggtgtcaccagacgct

SEQ ID NO: 1657370 - DNA, 25 bp, Homo sapien
ccgccacgtgcacgtgcccatgcag

SEQ ID NO: 1657371 - DNA, 25 bp, Homo sapien
agggtgtcaccagacgctctgctca

SEQ ID NO: 1657372 - DNA, 25 bp, Homo sapien
tctcggagcttacggggaatctctg

SEQ ID NO: 1657373 - DNA, 25 bp, Homo sapien
ggcttccagctctcggagcttacgg

SEQ ID NO: 1657374 - DNA, 25 bp, Homo sapien
ctcggcttccagctctcggagctta

SEQ ID NO: 1657375 - DNA, 25 bp, Homo sapien
gcttccagctctcggagcttacggg

SEQ ID NO: 1657376 - DNA, 25 bp, Homo sapien
agaggtggactccaggcctcactca

SEQ ID NO: 1657377 - DNA, 25 bp, Homo sapien
ggtatgaagcggcaggggtgacccg

SEQ ID NO: 1657378 - DNA, 25 bp, Homo sapien
cactcccttgttttgcctcttatca

SEQ ID NO: 1657379 - DNA, 25 bp, Homo sapien
ctacggcaggtatgaagcggcaggg

SEQ ID NO: 1657380 - DNA, 25 bp, Homo sapien
cgtgtggtgatgagcgtcccgtcca

SEQ ID NO: 1657381 - DNA, 25 bp, Homo sapien
gaccttcccagagcgtgtggtgatg

SEQ ID NO: 1657382 - DNA, 25 bp, Homo sapien
atgagcgtcccgtccagatcaaagc

SEQ ID NO: 1657383 - DNA, 25 bp, Homo sapien
gggaaagaccttcccagagcgtgtg

SEQ ID NO: 1657384 - DNA, 25 bp, Homo sapien
agcatccgtgatgcctctgagtggg

SEQ ID NO: 1657385 - DNA, 25 bp, Homo sapien
ctgccaggcagggtgttatcactgc

SEQ ID NO: 1657386 - DNA, 25 bp, Homo sapien
cacctcggtgggctaataaccgtga

SEQ ID NO: 1657387 - DNA, 25 bp, Homo sapien
tcctgttactccttatgacgccagc

SEQ ID NO: 1657388 - DNA, 25 bp, Homo sapien
cggtgaacactagcaacttctccaa

SEQ ID NO: 1657389 - DNA, 25 bp, Homo sapien
cctggggtttcaccccagctgcggt

SEQ ID NO: 1657390 - DNA, 25 bp, Homo sapien
gctgcggtgaacactagcaacttct

SEQ ID NO: 1657391 - DNA, 25 bp, Homo sapien
accccagctgcggtgaacactagca

SEQ ID NO: 1657392 - DNA, 25 bp, Homo sapien
ggattctggtgtgcgggtctcttcc

SEQ ID NO: 1657393 - DNA, 25 bp, Homo sapien
tggaggccattgaccaaatacagtg

SEQ ID NO: 1657394 - DNA, 25 bp, Homo sapien
gggtgccaggcggagtatctggctg

SEQ ID NO: 1657395 - DNA, 25 bp, Homo sapien
caactcctgggtcccggtagttgag

SEQ ID NO: 1657396 - DNA, 25 bp, Homo sapien
tacccagcggaaaaatcagcccttc

SEQ ID NO: 1657397 - DNA, 25 bp, Homo sapien
ctccaatcaaatacccagcggaaaa

SEQ ID NO: 1657398 - DNA, 25 bp, Homo sapien
atcaaatacccagcggaaaaatcag

SEQ ID NO: 1657399 - DNA, 25 bp, Homo sapien
ccccaccgggagcttcctccaatca

SEQ ID NO: 1657400 - DNA, 25 bp, Homo sapien
gacggcttgcaattcctccccaaat

SEQ ID NO: 1657401 - DNA, 25 bp, Homo sapien
cctggccgccttgtccaatttctaa

SEQ ID NO: 1657402 - DNA, 25 bp, Homo sapien
gattaggaactacaaggacgcgcca

SEQ ID NO: 1657403 - DNA, 25 bp, Homo sapien
tctaaggtcttggacaggtacccac

SEQ ID NO: 1657404 - DNA, 25 bp, Homo sapien
tcactgccactgtccgggtctcagg

SEQ ID NO: 1657405 - DNA, 25 bp, Homo sapien
actgccactgtccgggtctcaggat

SEQ ID NO: 1657406 - DNA, 25 bp, Homo sapien
ccgggtctcaggatctgcgaccagc

SEQ ID NO: 1657407 - DNA, 25 bp, Homo sapien
gggtctcaggatctgcgaccagctc

SEQ ID NO: 1657408 - DNA, 25 bp, Homo sapien
attggaggggtggagtcaggatttg

SEQ ID NO: 1657409 - DNA, 25 bp, Homo sapien
ctgaggattggaggggtggagtcag

SEQ ID NO: 1657410 - DNA, 25 bp, Homo sapien
ggaggggtggagtcaggatttgcat

SEQ ID NO: 1657411 - DNA, 25 bp, Homo sapien
ggattggaggggtggagtcaggatt

SEQ ID NO: 1657412 - DNA, 25 bp, Homo sapien
ttgtgtgattgggtccctcatttct

SEQ ID NO: 1657413 - DNA, 25 bp, Homo sapien
gtgtgattgggtccctcatttctgg

SEQ ID NO: 1657414 - DNA, 25 bp, Homo sapien
tgattgggtccctcatttctgggga

SEQ ID NO: 1657415 - DNA, 25 bp, Homo sapien
ccttgtgtgattgggtccctcattt

SEQ ID NO: 1657416 - DNA, 25 bp, Homo sapien
tgtactccctagagagcaccttccg

SEQ ID NO: 1657417 - DNA, 25 bp, Homo sapien
gcctgagcatcatccgcgcagtgaa

SEQ ID NO: 1657418 - DNA, 25 bp, Homo sapien
gaacatcctccctaaatcggctcga

SEQ ID NO: 1657419 - DNA, 25 bp, Homo sapien
aaatgtggctagatataggtccggg

SEQ ID NO: 1657420 - DNA, 25 bp, Homo sapien
gctctcgagccacaagcggcccggg

SEQ ID NO: 1657421 - DNA, 25 bp, Homo sapien
caggaccagggcttgcccgtccgag

SEQ ID NO: 1657422 - DNA, 25 bp, Homo sapien
tggagcacttccggtccgtaacctg

SEQ ID NO: 1657423 - DNA, 25 bp, Homo sapien
gggggctctcgagccacaagcggcc

SEQ ID NO: 1657424 - DNA, 25 bp, Homo sapien
ggcgcacagccccaatttgctgcag

SEQ ID NO: 1657425 - DNA, 25 bp, Homo sapien
accattaactgctccggaagtccca

SEQ ID NO: 1657426 - DNA, 25 bp, Homo sapien
taaacgggcttgagcggcgcacagc

SEQ ID NO: 1657427 - DNA, 25 bp, Homo sapien
ccactttccagcgtacaggcagaga

SEQ ID NO: 1657428 - DNA, 25 bp, Homo sapien
gccacttccgaccagggaggtcctg

SEQ ID NO: 1657429 - DNA, 25 bp, Homo sapien
ggcttgggctcacggccacttccga

SEQ ID NO: 1657430 - DNA, 25 bp, Homo sapien
aggtgccccgcctgcaacccggccg

SEQ ID NO: 1657431 - DNA, 25 bp, Homo sapien
ccgggaccgcggcttgggctcacgg

SEQ ID NO: 1657432 - DNA, 25 bp, Homo sapien
catctctcttgctgcaacgcgaggc

SEQ ID NO: 1657433 - DNA, 25 bp, Homo sapien
gggactggatcctccgttagcagat

SEQ ID NO: 1657434 - DNA, 25 bp, Homo sapien
tcattgtcagtcgaggaaacctccg

SEQ ID NO: 1657435 - DNA, 25 bp, Homo sapien
tttggcttcaccctcgatgttctag

SEQ ID NO: 1657436 - DNA, 25 bp, Homo sapien
caagttgtcgggacgtgggcaaaga

SEQ ID NO: 1657437 - DNA, 25 bp, Homo sapien
ggagctggtaccatcctggatgcag

SEQ ID NO: 1657438 - DNA, 25 bp, Homo sapien
gacgggcttcgattggcaggctgtt

SEQ ID NO: 1657439 - DNA, 25 bp, Homo sapien
cgagggccctttaaggcacctgtgg

SEQ ID NO: 1657440 - DNA, 25 bp, Homo sapien
tagaaggaatctgtcgctaggcgga

SEQ ID NO: 1657441 - DNA, 25 bp, Homo sapien
tagagactggtcaagccctttacag

SEQ ID NO: 1657442 - DNA, 25 bp, Homo sapien
tttagagcttagaactcagcgagcc

SEQ ID NO: 1657443 - DNA, 25 bp, Homo sapien
gcaaatcccttgtcgctaggcggaa

SEQ ID NO: 1657444 - DNA, 25 bp, Homo sapien
tcccggatcggcctcagattagcag

SEQ ID NO: 1657445 - DNA, 25 bp, Homo sapien
gagacgcaaggaggccggtcccgga

SEQ ID NO: 1657446 - DNA, 25 bp, Homo sapien
aggccggtcccggatcggcctcaga

SEQ ID NO: 1657447 - DNA, 25 bp, Homo sapien
gcctcagattagcaggccccgggag

SEQ ID NO: 1657448 - DNA, 25 bp, Homo sapien
cagcgcgcgcatgctcgccgcgatg

SEQ ID NO: 1657449 - DNA, 25 bp, Homo sapien
gcaggtccccgaagacctgggtgtc

SEQ ID NO: 1657450 - DNA, 25 bp, Homo sapien
tgcggtccaggtcgggcgaagaggg

SEQ ID NO: 1657451 - DNA, 25 bp, Homo sapien
aagtcgctggtgttaagccgcggcc

SEQ ID NO: 1657452 - DNA, 25 bp, Homo sapien
gtggccactgcgctacagaaaagat

SEQ ID NO: 1657453 - DNA, 25 bp, Homo sapien
ggacaaattctgcaaagggctagga

SEQ ID NO: 1657454 - DNA, 25 bp, Homo sapien
gccattaaggctgagtgcaccgtct

SEQ ID NO: 1657455 - DNA, 25 bp, Homo sapien
agaaaagatccctcgctgtgtcagc

SEQ ID NO: 1657456 - DNA, 25 bp, Homo sapien
gctcgtgtccaagaactcgcctctt

SEQ ID NO: 1657457 - DNA, 25 bp, Homo sapien
taaatagagacgctcctggaaagga

SEQ ID NO: 1657458 - DNA, 25 bp, Homo sapien
tctctataaggcactaggacacatg

SEQ ID NO: 1657459 - DNA, 25 bp, Homo sapien
tgttaaaactgcaaggctcgtgtcc

SEQ ID NO: 1657460 - DNA, 25 bp, Homo sapien
ctcatctgatgaccgcgcctctgtc

SEQ ID NO: 1657461 - DNA, 25 bp, Homo sapien
tcttctccttgaagccccagacggg

SEQ ID NO: 1657462 - DNA, 25 bp, Homo sapien
cagggacttggcgtactgctgtgtg

SEQ ID NO: 1657463 - DNA, 25 bp, Homo sapien
ggcgtactgctgtgtgggtagggct

SEQ ID NO: 1657464 - DNA, 25 bp, Homo sapien
gtccctgcctttgtgtcggccgtgt

SEQ ID NO: 1657465 - DNA, 25 bp, Homo sapien
cctcaggtcgggaggggaacagcct

SEQ ID NO: 1657466 - DNA, 25 bp, Homo sapien
cctgcctttgtgtcggccgtgtgcc

SEQ ID NO: 1657467 - DNA, 25 bp, Homo sapien
ctgcctttgtgtcggccgtgtgcct

SEQ ID NO: 1657468 - DNA, 25 bp, Homo sapien
tactctcggggtctgactcacagaa

SEQ ID NO: 1657469 - DNA, 25 bp, Homo sapien
tgtactctcggggtctgactcacag

SEQ ID NO: 1657470 - DNA, 25 bp, Homo sapien
gtactctcggggtctgactcacaga

SEQ ID NO: 1657471 - DNA, 25 bp, Homo sapien
ctccccggaggtctctgtctctgtg

SEQ ID NO: 1657472 - DNA, 25 bp, Homo sapien
tccattatcactaatgcccagctgc

SEQ ID NO: 1657473 - DNA, 25 bp, Homo sapien
ctccattatcactaatgcccagctg

SEQ ID NO: 1657474 - DNA, 25 bp, Homo sapien
cattatcactaatgcccagctgctc

SEQ ID NO: 1657475 - DNA, 25 bp, Homo sapien
cggggtgggctgggtgtgggactgg

SEQ ID NO: 1657476 - DNA, 25 bp, Homo sapien
ccggggtgggctgggtgtgggactg

SEQ ID NO: 1657477 - DNA, 25 bp, Homo sapien
ggtgggctgggtgtgggactgggtg

SEQ ID NO: 1657478 - DNA, 25 bp, Homo sapien
gtgggctgggtgtgggactgggtgg

SEQ ID NO: 1657479 - DNA, 25 bp, Homo sapien
agccctgtgggccagtgcgatgtcg

SEQ ID NO: 1657480 - DNA, 25 bp, Homo sapien
cgccagggctcctcgaccatgggca

SEQ ID NO: 1657481 - DNA, 25 bp, Homo sapien
tcgtggaggcaacggcgcgctgcct

SEQ ID NO: 1657482 - DNA, 25 bp, Homo sapien
ctcctcgaccatgggcagcataggc

SEQ ID NO: 1657483 - DNA, 25 bp, Homo sapien
gtggtggcggcggggccgcggtcag

SEQ ID NO: 1657484 - DNA, 25 bp, Homo sapien
ggtggcggcggggccgcggtcagca

SEQ ID NO: 1657485 - DNA, 25 bp, Homo sapien
gcggcggggccgcggtcagcagcac

SEQ ID NO: 1657486 - DNA, 25 bp, Homo sapien
tggcggcggggccgcggtcagcagc

SEQ ID NO: 1657487 - DNA, 25 bp, Homo sapien
gctccgtgccagtccgggcccggaa

SEQ ID NO: 1657488 - DNA, 25 bp, Homo sapien
agctccgtgccagtccgggcccgga

SEQ ID NO: 1657489 - DNA, 25 bp, Homo sapien
ctccgtgccagtccgggcccggaag

SEQ ID NO: 1657490 - DNA, 25 bp, Homo sapien
ggcccggaagcgctcagcggccccc

SEQ ID NO: 1657491 - DNA, 25 bp, Homo sapien
ggtcggccctaagcagacaatgcag

SEQ ID NO: 1657492 - DNA, 25 bp, Homo sapien
gacaatgcagggtgcgtctccttac

SEQ ID NO: 1657493 - DNA, 25 bp, Homo sapien
aactggctggttctatgactgaggc

SEQ ID NO: 1657494 - DNA, 25 bp, Homo sapien
tacaataaagccgaacgagccgggc

SEQ ID NO: 1657495 - DNA, 25 bp, Homo sapien
cagggaggacccactggtctaggaa

SEQ ID NO: 1657496 - DNA, 25 bp, Homo sapien
gaacctgagcatgaacgcggtagcc

SEQ ID NO: 1657497 - DNA, 25 bp, Homo sapien
gaaagtgagacgtgttccccacagg

SEQ ID NO: 1657498 - DNA, 25 bp, Homo sapien
accccaagatgtgaggaacctgagc

SEQ ID NO: 1657499 - DNA, 25 bp, Homo sapien
gctctggaaccgcaaggtgagactg

SEQ ID NO: 1657500 - DNA, 25 bp, Homo sapien
ctcaggtctgacaggacgattccca

SEQ ID NO: 1657501 - DNA, 25 bp, Homo sapien
tcagcaaaggatcgctggcagacct

SEQ ID NO: 1657502 - DNA, 25 bp, Homo sapien
gagactgtctacgatttgcctcagg

SEQ ID NO: 1657503 - DNA, 25 bp, Homo sapien
tgacgacagcttgcccctaagaaaa

SEQ ID NO: 1657504 - DNA, 25 bp, Homo sapien
aatcggtgctcgttaacaacatggc

SEQ ID NO: 1657505 - DNA, 25 bp, Homo sapien
taaacgaaggcaagcgacctgacgt

SEQ ID NO: 1657506 - DNA, 25 bp, Homo sapien
tccgaaccagttgacaagggtgacg

SEQ ID NO: 1657507 - DNA, 25 bp, Homo sapien
catttcttgcttcggtttgccaggc

SEQ ID NO: 1657508 - DNA, 25 bp, Homo sapien
cgctttctcgcgacggtgactcaga

SEQ ID NO: 1657509 - DNA, 25 bp, Homo sapien
cattcggcacgaaggctggcaaaga

SEQ ID NO: 1657510 - DNA, 25 bp, Homo sapien
ggcaaagatccaacacggcagcatt

SEQ ID NO: 1657511 - DNA, 25 bp, Homo sapien
tattaacatggccttagctgaccgg

SEQ ID NO: 1657512 - DNA, 25 bp, Homo sapien
tttctccggaagtgacaacacgctg

SEQ ID NO: 1657513 - DNA, 25 bp, Homo sapien
gaaacgccccgtctagtgatcagct

SEQ ID NO: 1657514 - DNA, 25 bp, Homo sapien
taagcactgaggacgcattccctcg

SEQ ID NO: 1657515 - DNA, 25 bp, Homo sapien
caaacaccgatctcttataaacgcg

SEQ ID NO: 1657516 - DNA, 25 bp, Homo sapien
acaccgatctcttataaacgcgccg

SEQ ID NO: 1657517 - DNA, 25 bp, Homo sapien
ttggcaaacaccgatctcttataaa

SEQ ID NO: 1657518 - DNA, 25 bp, Homo sapien
gatctcttataaacgcgccgtcacc

SEQ ID NO: 1657519 - DNA, 25 bp, Homo sapien
ctccgagcgggatgcaggcggtctg

SEQ ID NO: 1657520 - DNA, 25 bp, Homo sapien
cgctaagaagtatcaggaccgagac

SEQ ID NO: 1657521 - DNA, 25 bp, Homo sapien
gaccgagactctctcatcgctggtg

SEQ ID NO: 1657522 - DNA, 25 bp, Homo sapien
catccgtgtcgtggaaaaggtgcgc

SEQ ID NO: 1657523 - DNA, 25 bp, Homo sapien
gcggtcagcagtgggacctgaagaa

SEQ ID NO: 1657524 - DNA, 25 bp, Homo sapien
ggtcagcagtgggacctgaagaagg

SEQ ID NO: 1657525 - DNA, 25 bp, Homo sapien
ctggcggtcagcagtgggacctgaa

SEQ ID NO: 1657526 - DNA, 25 bp, Homo sapien
ggcggtcagcagtgggacctgaaga

SEQ ID NO: 1657527 - DNA, 25 bp, Homo sapien
gggctcctgtagaggaggctggaga

SEQ ID NO: 1657528 - DNA, 25 bp, Homo sapien
tgggctcctgtagaggaggctggag

SEQ ID NO: 1657529 - DNA, 25 bp, Homo sapien
cctaggacaatgacgtcctcctgca

SEQ ID NO: 1657530 - DNA, 25 bp, Homo sapien
tcagagcccacgagaggtaggctga

SEQ ID NO: 1657531 - DNA, 25 bp, Homo sapien
gcctcgaggctaagatctgaatcca

SEQ ID NO: 1657532 - DNA, 25 bp, Homo sapien
cccttgagaagcacgtgtgggccag

SEQ ID NO: 1657533 - DNA, 25 bp, Homo sapien
ccgactatgaacctgactgggctgt

SEQ ID NO: 1657534 - DNA, 25 bp, Homo sapien
catcctgggttgtggttgataaggc

SEQ ID NO: 1657535 - DNA, 25 bp, Homo sapien
ggaaaggtacatgtccactgggccc

SEQ ID NO: 1657536 - DNA, 25 bp, Homo sapien
cctgtgccgaaggaacatcctgggt

SEQ ID NO: 1657537 - DNA, 25 bp, Homo sapien
gctgttggccaggtgagctctctcc

SEQ ID NO: 1657538 - DNA, 25 bp, Homo sapien
cagctccccgcaggactcccgcctc

SEQ ID NO: 1657539 - DNA, 25 bp, Homo sapien
agctccccgcaggactcccgcctct

SEQ ID NO: 1657540 - DNA, 25 bp, Homo sapien
gctccccgcaggactcccgcctcta

SEQ ID NO: 1657541 - DNA, 25 bp, Homo sapien
ctccccgcaggactcccgcctctac

SEQ ID NO: 1657542 - DNA, 25 bp, Homo sapien
gccaggagaccatgaagcggcaact

SEQ ID NO: 1657543 - DNA, 25 bp, Homo sapien
cctatcgagcgatcaggtgtcctgg

SEQ ID NO: 1657544 - DNA, 25 bp, Homo sapien
cagtggcatcctggacattgggtcc

SEQ ID NO: 1657545 - DNA, 25 bp, Homo sapien
gacttcctgggtatgtctctcggga

SEQ ID NO: 1657546 - DNA, 25 bp, Homo sapien
gatgaggaaactaagccatagaaaa

SEQ ID NO: 1657547 - DNA, 25 bp, Homo sapien
ggaaactaagccatagaaaagcatc

SEQ ID NO: 1657548 - DNA, 25 bp, Homo sapien
ctgatgaggaaactaagccatagaa

SEQ ID NO: 1657549 - DNA, 25 bp, Homo sapien
aaactaagccatagaaaagcatcac

SEQ ID NO: 1657550 - DNA, 25 bp, Homo sapien
ctcctagggcacaaggacagaggct

SEQ ID NO: 1657551 - DNA, 25 bp, Homo sapien
catcacttttcttgactgcgcggca

SEQ ID NO: 1657552 - DNA, 25 bp, Homo sapien
tgaaacatcacttttcttgactgcg

SEQ ID NO: 1657553 - DNA, 25 bp, Homo sapien
cttttcttgactgcgcggcattgtg

SEQ ID NO: 1657554 - DNA, 25 bp, Homo sapien
ggtctgtttcgtcgggcgtgctggg

SEQ ID NO: 1657555 - DNA, 25 bp, Homo sapien
ttcgtcgggcgtgctgggcgtcctg

SEQ ID NO: 1657556 - DNA, 25 bp, Homo sapien
ggcagaggtctgtttcgtcgggcgt

SEQ ID NO: 1657557 - DNA, 25 bp, Homo sapien
gtttcgtcgggcgtgctgggcgtcc

SEQ ID NO: 1657558 - DNA, 25 bp, Homo sapien
tcccggatgtccttcggctgtggga

SEQ ID NO: 1657559 - DNA, 25 bp, Homo sapien
catctggttcaagagggaattcccc

SEQ ID NO: 1657560 - DNA, 25 bp, Homo sapien
ttctgtttccggtggctgctcatct

SEQ ID NO: 1657561 - DNA, 25 bp, Homo sapien
caggatgacttctcaaactctcagt

SEQ ID NO: 1657562 - DNA, 25 bp, Homo sapien
agaccctggtgggacctcaggccca

SEQ ID NO: 1657563 - DNA, 25 bp, Homo sapien
gttgggcggagagggacagaccctg

SEQ ID NO: 1657564 - DNA, 25 bp, Homo sapien
cctctgtcccgcaccctcaggtgct

SEQ ID NO: 1657565 - DNA, 25 bp, Homo sapien
gtcccgcaccctcaggtgctgtgga

SEQ ID NO: 1657566 - DNA, 25 bp, Homo sapien
gctagtggttccgatgcaggcaaac

SEQ ID NO: 1657567 - DNA, 25 bp, Homo sapien
tgtttcccagcacgaagcacagagt

SEQ ID NO: 1657568 - DNA, 25 bp, Homo sapien
gacataaccaaggtggaagggcctg

SEQ ID NO: 1657569 - DNA, 25 bp, Homo sapien
tacgtgctcagaatgctcccggagg

SEQ ID NO: 1657570 - DNA, 25 bp, Homo sapien
tggagagataactggccttggactg

SEQ ID NO: 1657571 - DNA, 25 bp, Homo sapien
ctgttgatcttgatggcggcgcgca

SEQ ID NO: 1657572 - DNA, 25 bp, Homo sapien
tcttcctttgccaggtcatgcgagg

SEQ ID NO: 1657573 - DNA, 25 bp, Homo sapien
ttaatgcgaggtcctcgtgtgggtc

SEQ ID NO: 1657574 - DNA, 25 bp, Homo sapien
ggagaggtctcgatctgcacgtgca

SEQ ID NO: 1657575 - DNA, 25 bp, Homo sapien
tagatgcggccataagggaccgtcc

SEQ ID NO: 1657576 - DNA, 25 bp, Homo sapien
tgtgctcgccggcaaagtagatgcg

SEQ ID NO: 1657577 - DNA, 25 bp, Homo sapien
gcctgcggaagcttaggaacacctt

SEQ ID NO: 1657578 - DNA, 25 bp, Homo sapien
gagatagaagaagccatcctcggac

SEQ ID NO: 1657579 - DNA, 25 bp, Homo sapien
agaagccatcctcggacatcacgtc

SEQ ID NO: 1657580 - DNA, 25 bp, Homo sapien
gcctcggcgaagctgagatagaaga

SEQ ID NO: 1657581 - DNA, 25 bp, Homo sapien
tggagtctgtcgctgaggcagctgt

SEQ ID NO: 1657582 - DNA, 25 bp, Homo sapien
caagagcgtgtgcctttcaaacttc

SEQ ID NO: 1657583 - DNA, 25 bp, Homo sapien
agagcgtgtgcctttcaaacttctt

SEQ ID NO: 1657584 - DNA, 25 bp, Homo sapien
aagagcgtgtgcctttcaaacttct

SEQ ID NO: 1657585 - DNA, 25 bp, Homo sapien
tagttgcgcagcttcacttcgtgca

SEQ ID NO: 1657586 - DNA, 25 bp, Homo sapien
catctggtagatgtcttcgggcgag

SEQ ID NO: 1657587 - DNA, 25 bp, Homo sapien
aaggcgtagcccagcttctcgggca

SEQ ID NO: 1657588 - DNA, 25 bp, Homo sapien
gggcaccttctccaccacatagttg

SEQ ID NO: 1657589 - DNA, 25 bp, Homo sapien
agagctgggcatgcgcatggctccc

SEQ ID NO: 1657590 - DNA, 25 bp, Homo sapien
ttctggtcccggtaggtgaagatgc

SEQ ID NO: 1657591 - DNA, 25 bp, Homo sapien
gctccccaatccagcccgtgttctg

SEQ ID NO: 1657592 - DNA, 25 bp, Homo sapien
atgcggcccccgatcctgttatctg

SEQ ID NO: 1657593 - DNA, 25 bp, Homo sapien
gtcagtggttagacctcagggcaca

SEQ ID NO: 1657594 - DNA, 25 bp, Homo sapien
cagggcacacatccccttggtagag

SEQ ID NO: 1657595 - DNA, 25 bp, Homo sapien
tgacccatatgcgtagaagcccctg

SEQ ID NO: 1657596 - DNA, 25 bp, Homo sapien
gggctggcccattctcattctcgga

SEQ ID NO: 1657597 - DNA, 25 bp, Homo sapien
agctgctcatagtcaggatcctgca

SEQ ID NO: 1657598 - DNA, 25 bp, Homo sapien
gggcttcagggtccgattgagcccc

SEQ ID NO: 1657599 - DNA, 25 bp, Homo sapien
cttgtgtccagcatcgctgagcacc

SEQ ID NO: 1657600 - DNA, 25 bp, Homo sapien
aggatcctgcatgcatttctcgaag

SEQ ID NO: 1657601 - DNA, 25 bp, Homo sapien
gggaggccaccaggctgaggaggat

SEQ ID NO: 1657602 - DNA, 25 bp, Homo sapien
tgggaggccaccaggctgaggagga

SEQ ID NO: 1657603 - DNA, 25 bp, Homo sapien
gctgaggaggatggggacgaggacg

SEQ ID NO: 1657604 - DNA, 25 bp, Homo sapien
ccaggctgaggaggatggggacgag

SEQ ID NO: 1657605 - DNA, 25 bp, Homo sapien
ctcagtccctatttctgtgggtcct

SEQ ID NO: 1657606 - DNA, 25 bp, Homo sapien
tcagtccctatttctgtgggtcctg

SEQ ID NO: 1657607 - DNA, 25 bp, Homo sapien
caggacagcgcggtcctctccactg

SEQ ID NO: 1657608 - DNA, 25 bp, Homo sapien
gacagcaggacagcgcggtcctctc

SEQ ID NO: 1657609 - DNA, 25 bp, Homo sapien
ggacagcgcggtcctctccactgcc

SEQ ID NO: 1657610 - DNA, 25 bp, Homo sapien
gtgacagcaggacagcgcggtcctc

SEQ ID NO: 1657611 - DNA, 25 bp, Homo sapien
tggcctttatggttagcccaggaca

SEQ ID NO: 1657612 - DNA, 25 bp, Homo sapien
catggcctttatggttagcccagga

SEQ ID NO: 1657613 - DNA, 25 bp, Homo sapien
cctttatggttagcccaggacagaa

SEQ ID NO: 1657614 - DNA, 25 bp, Homo sapien
cccatggcctttatggttagcccag

SEQ ID NO: 1657615 - DNA, 25 bp, Homo sapien
gcccttgttagatcagagatgccaa

SEQ ID NO: 1657616 - DNA, 25 bp, Homo sapien
aaggtgaatgatggtggctttgtcc

SEQ ID NO: 1657617 - DNA, 25 bp, Homo sapien
gctttgtccttgttagtggtgccct

SEQ ID NO: 1657618 - DNA, 25 bp, Homo sapien
ccaagttcctgatattggggtcaga

SEQ ID NO: 1657619 - DNA, 25 bp, Homo sapien
caaagcagtaagagctgagattcac

SEQ ID NO: 1657620 - DNA, 25 bp, Homo sapien
cctaaacaggggaaagcaaagcagt

SEQ ID NO: 1657621 - DNA, 25 bp, Homo sapien
aactccagaccccaagtaatctact

SEQ ID NO: 1657622 - DNA, 25 bp, Homo sapien
tggcctccccaaaatgtcgggatta

SEQ ID NO: 1657623 - DNA, 25 bp, Homo sapien
ggaaaggccatttgtcaggactggg

SEQ ID NO: 1657624 - DNA, 25 bp, Homo sapien
aaaggccatttgtcaggactgggaa

SEQ ID NO: 1657625 - DNA, 25 bp, Homo sapien
gattccaaatttagtcaccaaatgt

SEQ ID NO: 1657626 - DNA, 25 bp, Homo sapien
caaatttagtcaccaaatgtgttgt

SEQ ID NO: 1657627 - DNA, 25 bp, Homo sapien
tcacaatctaacagcgagacgaggc

SEQ ID NO: 1657628 - DNA, 25 bp, Homo sapien
tctgtggactgacgttacactgggc

SEQ ID NO: 1657629 - DNA, 25 bp, Homo sapien
taagttccgagccaagtctacggcc

SEQ ID NO: 1657630 - DNA, 25 bp, Homo sapien
taacaagtgccacccaaggtacagg

SEQ ID NO: 1657631 - DNA, 25 bp, Homo sapien
ttagctttcacaagcacaagctcac

SEQ ID NO: 1657632 - DNA, 25 bp, Homo sapien
tgtgaaattcttgatcccgctctgt

SEQ ID NO: 1657633 - DNA, 25 bp, Homo sapien
cccgctctgttctattcacactgtg

SEQ ID NO: 1657634 - DNA, 25 bp, Homo sapien
tgccttggtggttagcatggttagc

SEQ ID NO: 1657635 - DNA, 25 bp, Homo sapien
cacacagcgatcatgtcaagggcag

SEQ ID NO: 1657636 - DNA, 25 bp, Homo sapien
cacctatgactatgctttggagaga

SEQ ID NO: 1657637 - DNA, 25 bp, Homo sapien
ccaaactacagacaacagggcgcat

SEQ ID NO: 1657638 - DNA, 25 bp, Homo sapien
catgaactccctagggacctgcggg

SEQ ID NO: 1657639 - DNA, 25 bp, Homo sapien
tgctccttgcgccggccctcgcaca

SEQ ID NO: 1657640 - DNA, 25 bp, Homo sapien
tcagtcaaaggtgatccggaagctg

SEQ ID NO: 1657641 - DNA, 25 bp, Homo sapien
tcctgctccttgcgccggccctcgc

SEQ ID NO: 1657642 - DNA, 25 bp, Homo sapien
gtcaaaggtgatccggaagctgcgc

SEQ ID NO: 1657643 - DNA, 25 bp, Homo sapien
gagttctggtcgatccactgcagtg

SEQ ID NO: 1657644 - DNA, 25 bp, Homo sapien
cagtgagtccatgtgcgcattgagg

SEQ ID NO: 1657645 - DNA, 25 bp, Homo sapien
ccccggacgtgttcaggtgctcgat

SEQ ID NO: 1657646 - DNA, 25 bp, Homo sapien
gagatcctgggccatgcgcttgagc

SEQ ID NO: 1657647 - DNA, 25 bp, Homo sapien
catccgcgtgctgcaggtagatggt

SEQ ID NO: 1657648 - DNA, 25 bp, Homo sapien
ctcctcatccgcgtgctgcaggtag

SEQ ID NO: 1657649 - DNA, 25 bp, Homo sapien
caggtagatggtcccgctctgctcc

SEQ ID NO: 1657650 - DNA, 25 bp, Homo sapien
cttgtaggttttctcacgctcctca

SEQ ID NO: 1657651 - DNA, 25 bp, Homo sapien
tccatttgttgatcaggctctccag

SEQ ID NO: 1657652 - DNA, 25 bp, Homo sapien
gatgaagtcgagctcctggtccagc

SEQ ID NO: 1657653 - DNA, 25 bp, Homo sapien
tccattctcgatcagcgtgcggtcc

SEQ ID NO: 1657654 - DNA, 25 bp, Homo sapien
gagcggtcacggcagctgctgtatt

SEQ ID NO: 1657655 - DNA, 25 bp, Homo sapien
ctattgacgcaaagaggctgggccc

SEQ ID NO: 1657656 - DNA, 25 bp, Homo sapien
tgaagccctgtgtcccagcagtggg

SEQ ID NO: 1657657 - DNA, 25 bp, Homo sapien
tggcgccagtggttttaaattcaag

SEQ ID NO: 1657658 - DNA, 25 bp, Homo sapien
taaattcaaggcaaagccggtggtg

SEQ ID NO: 1657659 - DNA, 25 bp, Homo sapien
agccaatgttgaaaccggagggttg

SEQ ID NO: 1657660 - DNA, 25 bp, Homo sapien
gagtgaagggcaacgtggcaggtgc

SEQ ID NO: 1657661 - DNA, 25 bp, Homo sapien
tgctgagccaatgttgaaaccggag

SEQ ID NO: 1657662 - DNA, 25 bp, Homo sapien
tgagccaatgttgaaaccggagggt

SEQ ID NO: 1657663 - DNA, 25 bp, Homo sapien
gccaaacacaaagccggtgggtgct

SEQ ID NO: 1657664 - DNA, 25 bp, Homo sapien
tgagctttgaagcaccgatccccaa

SEQ ID NO: 1657665 - DNA, 25 bp, Homo sapien
tgagaagcctccagatgtggtagct

SEQ ID NO: 1657666 - DNA, 25 bp, Homo sapien
tttgcagtgccaaacgtgaacccgc

SEQ ID NO: 1657667 - DNA, 25 bp, Homo sapien
aagcaaatccgtcggtgtctgcagc

SEQ ID NO: 1657668 - DNA, 25 bp, Homo sapien
aaatccgtcggtgtctgcagccttg

SEQ ID NO: 1657669 - DNA, 25 bp, Homo sapien
caaagcaaatccgtcggtgtctgca

SEQ ID NO: 1657670 - DNA, 25 bp, Homo sapien
gcaaatccgtcggtgtctgcagcct

SEQ ID NO: 1657671 - DNA, 25 bp, Homo sapien
gagatcagatttgaggcactgccac

SEQ ID NO: 1657672 - DNA, 25 bp, Homo sapien
ctagggacgtgcgtggccatgttca

SEQ ID NO: 1657673 - DNA, 25 bp, Homo sapien
gcgggactaggacacacaagaacag

SEQ ID NO: 1657674 - DNA, 25 bp, Homo sapien
ttctcaaccatctgcagacactggg

SEQ ID NO: 1657675 - DNA, 25 bp, Homo sapien
tattttttgtggaaatgggatctca

SEQ ID NO: 1657676 - DNA, 25 bp, Homo sapien
attttttgtggaaatgggatctcac

SEQ ID NO: 1657677 - DNA, 25 bp, Homo sapien
ttattttttgtggaaatgggatctc

SEQ ID NO: 1657678 - DNA, 25 bp, Homo sapien
gaaagcttgtggtgacacgagcaga

SEQ ID NO: 1657679 - DNA, 25 bp, Homo sapien
gactggagtgatgcgctttggaatc

SEQ ID NO: 1657680 - DNA, 25 bp, Homo sapien
caggcgtgagccctaaagatgatca

SEQ ID NO: 1657681 - DNA, 25 bp, Homo sapien
tgatcagcagtatccttagaagacg

SEQ ID NO: 1657682 - DNA, 25 bp, Homo sapien
cccttccagcttgagtaagaggcaa

SEQ ID NO: 1657683 - DNA, 25 bp, Homo sapien
taagaggcaacctatctcactaccc

SEQ ID NO: 1657684 - DNA, 25 bp, Homo sapien
tccagcttgagtaagaggcaaccta

SEQ ID NO: 1657685 - DNA, 25 bp, Homo sapien
gcttgagtaagaggcaacctatctc

SEQ ID NO: 1657686 - DNA, 25 bp, Homo sapien
cagtagatctcaatgggcgtccatc

SEQ ID NO: 1657687 - DNA, 25 bp, Homo sapien
taagttttgtttcgtctgctcctcc

SEQ ID NO: 1657688 - DNA, 25 bp, Homo sapien
gctgcacacgctctgccttgtctaa

SEQ ID NO: 1657689 - DNA, 25 bp, Homo sapien
catcactactgactgggagcattca

SEQ ID NO: 1657690 - DNA, 25 bp, Homo sapien
ggctggttaagccacggtccctgcc

SEQ ID NO: 1657691 - DNA, 25 bp, Homo sapien
ctcaaggcagccagagtcaaatgtc

SEQ ID NO: 1657692 - DNA, 25 bp, Homo sapien
gaagctgagcgttgcagatgcagca

SEQ ID NO: 1657693 - DNA, 25 bp, Homo sapien
gcccagagtggctggttaagccacg

SEQ ID NO: 1657694 - DNA, 25 bp, Homo sapien
catgctaacggttcgggcgttatat

SEQ ID NO: 1657695 - DNA, 25 bp, Homo sapien
cgggcgttatattgagggagccaca

SEQ ID NO: 1657696 - DNA, 25 bp, Homo sapien
gagggagccacaggcggactttatg

SEQ ID NO: 1657697 - DNA, 25 bp, Homo sapien
agccacaggcggactttatgggtgt

SEQ ID NO: 1657698 - DNA, 25 bp, Homo sapien
ggatgggaatacacagagcagagct

SEQ ID NO: 1657699 - DNA, 25 bp, Homo sapien
cccatgatgggaaaccagagctttc

SEQ ID NO: 1657700 - DNA, 25 bp, Homo sapien
tagggacctactgtgtaaccggcac

SEQ ID NO: 1657701 - DNA, 25 bp, Homo sapien
catggagaccaaggcggctggtaca

SEQ ID NO: 1657702 - DNA, 25 bp, Homo sapien
tctgtctaaaacaaacagacacaca

SEQ ID NO: 1657703 - DNA, 25 bp, Homo sapien
tctgtcatccagtgcagtggtataa

SEQ ID NO: 1657704 - DNA, 25 bp, Homo sapien
gccatggagagggtctgctttcctt

SEQ ID NO: 1657705 - DNA, 25 bp, Homo sapien
acaaaaacccaaagccatggagagg

SEQ ID NO: 1657706 - DNA, 25 bp, Homo sapien
ggcataaccgacttgcattaaggac

SEQ ID NO: 1657707 - DNA, 25 bp, Homo sapien
cctggcattctggtcccattttcct

SEQ ID NO: 1657708 - DNA, 25 bp, Homo sapien
tctcctccttaggtcacctggcatt

SEQ ID NO: 1657709 - DNA, 25 bp, Homo sapien
tcaacctacaggcataaccgacttg

SEQ ID NO: 1657710 - DNA, 25 bp, Homo sapien
tgtgaataggtagtatgttcacatt

SEQ ID NO: 1657711 - DNA, 25 bp, Homo sapien
tttgtgaataggtagtatgttcaca

SEQ ID NO: 1657712 - DNA, 25 bp, Homo sapien
ttgtgaataggtagtatgttcacat

SEQ ID NO: 1657713 - DNA, 25 bp, Homo sapien
gtgaataggtagtatgttcacattg

SEQ ID NO: 1657714 - DNA, 25 bp, Homo sapien
gggaagagcctagagctgaaacgct

SEQ ID NO: 1657715 - DNA, 25 bp, Homo sapien
taagggcaggcccatgccttccttg

SEQ ID NO: 1657716 - DNA, 25 bp, Homo sapien
ctgaaacgctctggttggcggtgca

SEQ ID NO: 1657717 - DNA, 25 bp, Homo sapien
tggccggtaatgctggttgagaaca

SEQ ID NO: 1657718 - DNA, 25 bp, Homo sapien
ctcggagactcttggaatgagggct

SEQ ID NO: 1657719 - DNA, 25 bp, Homo sapien
ctcttggaatgagggctgggttcct

SEQ ID NO: 1657720 - DNA, 25 bp, Homo sapien
aatcctcggagactcttggaatgag

SEQ ID NO: 1657721 - DNA, 25 bp, Homo sapien
cctcaatcctcggagactcttggaa

SEQ ID NO: 1657722 - DNA, 25 bp, Homo sapien
tattgatgcctacggaaatagcagc

SEQ ID NO: 1657723 - DNA, 25 bp, Homo sapien
cagtcacgtaggcagacatctgcac

SEQ ID NO: 1657724 - DNA, 25 bp, Homo sapien
tcagggacctcagtatcacattcgc

SEQ ID NO: 1657725 - DNA, 25 bp, Homo sapien
tctgtgctgagcaactcattagaaa

SEQ ID NO: 1657726 - DNA, 25 bp, Homo sapien
cagccgccggcttcactgatgccat

SEQ ID NO: 1657727 - DNA, 25 bp, Homo sapien
gcagccgccggcttcactgatgcca

SEQ ID NO: 1657728 - DNA, 25 bp, Homo sapien
gggtgcagtcaagttttgaactcat

SEQ ID NO: 1657729 - DNA, 25 bp, Homo sapien
tatgccaggtatgtataaaatttgg

SEQ ID NO: 1657730 - DNA, 25 bp, Homo sapien
gctccagagtctatgccaggtatgt

SEQ ID NO: 1657731 - DNA, 25 bp, Homo sapien
ctagtaagaggggtgcagtcaagtt

SEQ ID NO: 1657732 - DNA, 25 bp, Homo sapien
gatgtcctgatgtggatgggacaag

SEQ ID NO: 1657733 - DNA, 25 bp, Homo sapien
gaagggatgaaggttgaactccagc

SEQ ID NO: 1657734 - DNA, 25 bp, Homo sapien
ctggaccttgattcagtctcctaac

SEQ ID NO: 1657735 - DNA, 25 bp, Homo sapien
tgattcagtctcctaactgccacag

SEQ ID NO: 1657736 - DNA, 25 bp, Homo sapien
acagagaaaagacggacatccacct

SEQ ID NO: 1657737 - DNA, 25 bp, Homo sapien
caacagagaaaagacggacatccac

SEQ ID NO: 1657738 - DNA, 25 bp, Homo sapien
gagaaaagacggacatccacctcgg

SEQ ID NO: 1657739 - DNA, 25 bp, Homo sapien
agagaaaagacggacatccacctcg

SEQ ID NO: 1657740 - DNA, 25 bp, Homo sapien
gagtctcataaacccaccaggcgag

SEQ ID NO: 1657741 - DNA, 25 bp, Homo sapien
gatggctaccctgtgactaaacgaa

SEQ ID NO: 1657742 - DNA, 25 bp, Homo sapien
caacgtctgcggctcttacaagtgg

SEQ ID NO: 1657743 - DNA, 25 bp, Homo sapien
acttaagttatttgcccgaggccat

SEQ ID NO: 1657744 - DNA, 25 bp, Homo sapien
tgcagccatggagtgagtaaccgct

SEQ ID NO: 1657745 - DNA, 25 bp, Homo sapien
gccgcctctccttgctgcagccatg

SEQ ID NO: 1657746 - DNA, 25 bp, Homo sapien
agccatggagtgagtaaccgcttac

SEQ ID NO: 1657747 - DNA, 25 bp, Homo sapien
ctccttgctgcagccatggagtgag

SEQ ID NO: 1657748 - DNA, 25 bp, Homo sapien
tttcccgccctttcgcagctcgtgg

SEQ ID NO: 1657749 - DNA, 25 bp, Homo sapien
cgtggccctctttagggagccctgg

SEQ ID NO: 1657750 - DNA, 25 bp, Homo sapien
agcggggaatcacggtcgcgcaggc

SEQ ID NO: 1657751 - DNA, 25 bp, Homo sapien
cagctcgtggccctctttagggagc

SEQ ID NO: 1657752 - DNA, 25 bp, Homo sapien
tgtaaaggcaattggaccgctcggg

SEQ ID NO: 1657753 - DNA, 25 bp, Homo sapien
acatgcgcattgatccccaagaggg

SEQ ID NO: 1657754 - DNA, 25 bp, Homo sapien
agtgccccgtagtgaaagagctgcg

SEQ ID NO: 1657755 - DNA, 25 bp, Homo sapien
gcttggttgttcctgcgcagtagcc

SEQ ID NO: 1657756 - DNA, 25 bp, Homo sapien
tgactgagcgagttgatttcacagc

SEQ ID NO: 1657757 - DNA, 25 bp, Homo sapien
gaatgagacgtgagtcagcacccaa

SEQ ID NO: 1657758 - DNA, 25 bp, Homo sapien
gctggaacagatggaagacttcttc

SEQ ID NO: 1657759 - DNA, 25 bp, Homo sapien
ggttgaccgattccctgattgattg

SEQ ID NO: 1657760 - DNA, 25 bp, Homo sapien
ccacatcctgccaccacccgagggg

SEQ ID NO: 1657761 - DNA, 25 bp, Homo sapien
tcatcgaggtttacaaggcccggag

SEQ ID NO: 1657762 - DNA, 25 bp, Homo sapien
gagcgcgagatccagtacgtcaagg

SEQ ID NO: 1657763 - DNA, 25 bp, Homo sapien
gccagaggacccgtagctgctagaa

SEQ ID NO: 1657764 - DNA, 25 bp, Homo sapien
tacgtcaaggacctgctcatcgagg

SEQ ID NO: 1657765 - DNA, 25 bp, Homo sapien
gggacccatatcctacaggcaaaaa

SEQ ID NO: 1657766 - DNA, 25 bp, Homo sapien
gcaaaaagcaggctaggtgaccttg

SEQ ID NO: 1657767 - DNA, 25 bp, Homo sapien
gctgaaggactatgcaaatgaggaa

SEQ ID NO: 1657768 - DNA, 25 bp, Homo sapien
ggtgaccttgggacactacgctaag

SEQ ID NO: 1657769 - DNA, 25 bp, Homo sapien
tcaaaaggatacctgcacctccatg

SEQ ID NO: 1657770 - DNA, 25 bp, Homo sapien
agtcattatgagaagagtatggcga

SEQ ID NO: 1657771 - DNA, 25 bp, Homo sapien
gcacctccatgtagattacaccact

SEQ ID NO: 1657772 - DNA, 25 bp, Homo sapien
ttcataacagtaaagatacggaatc

SEQ ID NO: 1657773 - DNA, 25 bp, Homo sapien
gctgatgtggcttgttatcaccagg

SEQ ID NO: 1657774 - DNA, 25 bp, Homo sapien
tatcaccagggaagacgtgacctgt

SEQ ID NO: 1657775 - DNA, 25 bp, Homo sapien
gcttccaattggttagatgctatga

SEQ ID NO: 1657776 - DNA, 25 bp, Homo sapien
ttggctcaggaccaatcagtggccg

SEQ ID NO: 1657777 - DNA, 25 bp, Homo sapien
ggttcaaccaattctctgcctagtc

SEQ ID NO: 1657778 - DNA, 25 bp, Homo sapien
ttcaaccaattctctgcctagtctc

SEQ ID NO: 1657779 - DNA, 25 bp, Homo sapien
gagccaccatgcccagccttttttt

SEQ ID NO: 1657780 - DNA, 25 bp, Homo sapien
agccaccatgcccagcctttttttt

SEQ ID NO: 1657781 - DNA, 25 bp, Homo sapien
gaaggaagagcatggtcatcaacgg

SEQ ID NO: 1657782 - DNA, 25 bp, Homo sapien
gacacgatgcctcaaagtgtcatct

SEQ ID NO: 1657783 - DNA, 25 bp, Homo sapien
gaagcttctgtagtaatgaaccata

SEQ ID NO: 1657784 - DNA, 25 bp, Homo sapien
gcttctcgttctggagagcaccctg

SEQ ID NO: 1657785 - DNA, 25 bp, Homo sapien
cagtgcgactcccacacacttgctg

SEQ ID NO: 1657786 - DNA, 25 bp, Homo sapien
ctcaagctcttcattggggatgggg

SEQ ID NO: 1657787 - DNA, 25 bp, Homo sapien
tgaattgaaagtataatcttcagcc

SEQ ID NO: 1657788 - DNA, 25 bp, Homo sapien
ttctggccgtcacaccagtgcgact

SEQ ID NO: 1657789 - DNA, 25 bp, Homo sapien
gagggaggcatagtggagctcctgc

SEQ ID NO: 1657790 - DNA, 25 bp, Homo sapien
tcactttggaaccatccctgacatc

SEQ ID NO: 1657791 - DNA, 25 bp, Homo sapien
gctgagggaggcatagtggagctcc

SEQ ID NO: 1657792 - DNA, 25 bp, Homo sapien
tgacatctccctctccaattgaagc

SEQ ID NO: 1657793 - DNA, 25 bp, Homo sapien
ggagctgcctgccgagcattcatgc

SEQ ID NO: 1657794 - DNA, 25 bp, Homo sapien
gctgccctcttgcgagcttccttcc

SEQ ID NO: 1657795 - DNA, 25 bp, Homo sapien
tgctgccctcttgcgagcttccttc

SEQ ID NO: 1657796 - DNA, 25 bp, Homo sapien
ctgccctcttgcgagcttccttcct

SEQ ID NO: 1657797 - DNA, 25 bp, Homo sapien
ctgctgccctcttgcgagcttcctt

SEQ ID NO: 1657798 - DNA, 25 bp, Homo sapien
ctgcattgcctgccctccgatgctt

SEQ ID NO: 1657799 - DNA, 25 bp, Homo sapien
gcattgcctgccctccgatgcttac

SEQ ID NO: 1657800 - DNA, 25 bp, Homo sapien
tgcattgcctgccctccgatgctta

SEQ ID NO: 1657801 - DNA, 25 bp, Homo sapien
cctgcattgcctgccctccgatgct

SEQ ID NO: 1657802 - DNA, 25 bp, Homo sapien
tgaagacgacaaggcaggaacagaa

SEQ ID NO: 1657803 - DNA, 25 bp, Homo sapien
aagcgagcagggcagcgacgccagc

SEQ ID NO: 1657804 - DNA, 25 bp, Homo sapien
gaaagcgagcagggcagcgacgcca

SEQ ID NO: 1657805 - DNA, 25 bp, Homo sapien
ctgaagacgacaaggcaggaacaga

SEQ ID NO: 1657806 - DNA, 25 bp, Homo sapien
cactgagccggtttgcacctaaaat

SEQ ID NO: 1657807 - DNA, 25 bp, Homo sapien
tgtaagtctgctcataaaaacctcg

SEQ ID NO: 1657808 - DNA, 25 bp, Homo sapien
atcctcctgttctccgtatcggtct

SEQ ID NO: 1657809 - DNA, 25 bp, Homo sapien
tcatgctcagctttttagatgcgag

SEQ ID NO: 1657810 - DNA, 25 bp, Homo sapien
gccaagtagcttctgaaaactcccg

SEQ ID NO: 1657811 - DNA, 25 bp, Homo sapien
tctgcgtatggctaataggagctgc

SEQ ID NO: 1657812 - DNA, 25 bp, Homo sapien
tctcttagtgtggactgggtgctcc

SEQ ID NO: 1657813 - DNA, 25 bp, Homo sapien
caactaagactagtggtgatctgcg

SEQ ID NO: 1657814 - DNA, 25 bp, Homo sapien
gacagagccactctgggccccgtgg

SEQ ID NO: 1657815 - DNA, 25 bp, Homo sapien
tctgggccccgtggacgttccaggc

SEQ ID NO: 1657816 - DNA, 25 bp, Homo sapien
gggtgacctcgaaggagccctgact

SEQ ID NO: 1657817 - DNA, 25 bp, Homo sapien
tccaggccttacagcggagcctgag

SEQ ID NO: 1657818 - DNA, 25 bp, Homo sapien
gtggcaggtgaactctccttcgtgc

SEQ ID NO: 1657819 - DNA, 25 bp, Homo sapien
tgagggctgggaggggcccacggtc

SEQ ID NO: 1657820 - DNA, 25 bp, Homo sapien
agggctgggaggggcccacggtctg

SEQ ID NO: 1657821 - DNA, 25 bp, Homo sapien
gctgggaggggcccacggtctgtcc

SEQ ID NO: 1657822 - DNA, 25 bp, Homo sapien
ctgagggctgggaggggcccacggt

SEQ ID NO: 1657823 - DNA, 25 bp, Homo sapien
ccaggaccgggagggatgtgccgtt

SEQ ID NO: 1657824 - DNA, 25 bp, Homo sapien
acagaccaggcgcaggctttggccc

SEQ ID NO: 1657825 - DNA, 25 bp, Homo sapien
ctccaggaccgggagggatgtgccg

SEQ ID NO: 1657826 - DNA, 25 bp, Homo sapien
cgggagggatgtgccgttcccgagg

SEQ ID NO: 1657827 - DNA, 25 bp, Homo sapien
ctgtcctgtttgcttgggaaaccat

SEQ ID NO: 1657828 - DNA, 25 bp, Homo sapien
tgtcctgtttgcttgggaaaccatc

SEQ ID NO: 1657829 - DNA, 25 bp, Homo sapien
ggaaaccatcactctcaggttctct

SEQ ID NO: 1657830 - DNA, 25 bp, Homo sapien
aaccatcactctcaggttctctgga

SEQ ID NO: 1657831 - DNA, 25 bp, Homo sapien
gcctgttctccgctcggcaggtgta

SEQ ID NO: 1657832 - DNA, 25 bp, Homo sapien
tcggcaggtgtagcgccctgaatcc

SEQ ID NO: 1657833 - DNA, 25 bp, Homo sapien
gagccaagcctgttctccgctcggc

SEQ ID NO: 1657834 - DNA, 25 bp, Homo sapien
gctcggcaggtgtagcgccctgaat

SEQ ID NO: 1657835 - DNA, 25 bp, Homo sapien
tgtgaaatgctgataataaggtctt

SEQ ID NO: 1657836 - DNA, 25 bp, Homo sapien
cctccccacccaccggggctgtctg

SEQ ID NO: 1657837 - DNA, 25 bp, Homo sapien
tccccacccaccggggctgtctgca

SEQ ID NO: 1657838 - DNA, 25 bp, Homo sapien
ctccccacccaccggggctgtctgc

SEQ ID NO: 1657839 - DNA, 25 bp, Homo sapien
aggccacacggagtcggacggtcct

SEQ ID NO: 1657840 - DNA, 25 bp, Homo sapien
cacacggagtcggacggtcctctgt

SEQ ID NO: 1657841 - DNA, 25 bp, Homo sapien
cacggagtcggacggtcctctgtgc

SEQ ID NO: 1657842 - DNA, 25 bp, Homo sapien
gagtcggacggtcctctgtgcgctc

SEQ ID NO: 1657843 - DNA, 25 bp, Homo sapien
aagtgggaggtgcttggtctggttc

SEQ ID NO: 1657844 - DNA, 25 bp, Homo sapien
aaagaaggggctggacatttcttga

SEQ ID NO: 1657845 - DNA, 25 bp, Homo sapien
tctggttcttctaggggagagggca

SEQ ID NO: 1657846 - DNA, 25 bp, Homo sapien
aaggggctggacatttcttgaaagc

SEQ ID NO: 1657847 - DNA, 25 bp, Homo sapien
ttttagaaagaacgcattgctcagg

SEQ ID NO: 1657848 - DNA, 25 bp, Homo sapien
acttttagaaagaacgcattgctca

SEQ ID NO: 1657849 - DNA, 25 bp, Homo sapien
agaaagaacgcattgctcaggaaac

SEQ ID NO: 1657850 - DNA, 25 bp, Homo sapien
ttagaaagaacgcattgctcaggaa

SEQ ID NO: 1657851 - DNA, 25 bp, Homo sapien
cccccagcacgggcagcagcagggg

SEQ ID NO: 1657852 - DNA, 25 bp, Homo sapien
gcccccagcacgggcagcagcaggg

SEQ ID NO: 1657853 - DNA, 25 bp, Homo sapien
cgcccccagcacgggcagcagcagg

SEQ ID NO: 1657854 - DNA, 25 bp, Homo sapien
ggcagtgaccatccacagaggagga

SEQ ID NO: 1657855 - DNA, 25 bp, Homo sapien
ggcctgtcccgggaccatctggctt

SEQ ID NO: 1657856 - DNA, 25 bp, Homo sapien
tgggaaggaaactcctccagcagga

SEQ ID NO: 1657857 - DNA, 25 bp, Homo sapien
accatctggcttctgggccggcctg

SEQ ID NO: 1657858 - DNA, 25 bp, Homo sapien
gaccgtccgactccgtgtggcctgt

SEQ ID NO: 1657859 - DNA, 25 bp, Homo sapien
gagcgcacagaggaccgtccgactc

SEQ ID NO: 1657860 - DNA, 25 bp, Homo sapien
gcacagaggaccgtccgactccgtg

SEQ ID NO: 1657861 - DNA, 25 bp, Homo sapien
agaggaccgtccgactccgtgtggc

SEQ ID NO: 1657862 - DNA, 25 bp, Homo sapien
caaggactgctccactcaacttggc

SEQ ID NO: 1657863 - DNA, 25 bp, Homo sapien
ctccccctcgatggccccaaggact

SEQ ID NO: 1657864 - DNA, 25 bp, Homo sapien
cctccaacatcccgctggacacctc

SEQ ID NO: 1657865 - DNA, 25 bp, Homo sapien
ccaaggactgctccactcaacttgg

SEQ ID NO: 1657866 - DNA, 25 bp, Homo sapien
tgatgagtatcctgaaaccagtggc

SEQ ID NO: 1657867 - DNA, 25 bp, Homo sapien
taaacagcaggccttgagtcacatt

SEQ ID NO: 1657868 - DNA, 25 bp, Homo sapien
gggaacttcacattcacgggaggga

SEQ ID NO: 1657869 - DNA, 25 bp, Homo sapien
ccctccgggaggctaatcaggactg

SEQ ID NO: 1657870 - DNA, 25 bp, Homo sapien
tccagaactcgggatggcaggtgca

SEQ ID NO: 1657871 - DNA, 25 bp, Homo sapien
tgaccatacgggatgaggagcccct

SEQ ID NO: 1657872 - DNA, 25 bp, Homo sapien
gcaggtacataaagccaggatgagg

SEQ ID NO: 1657873 - DNA, 25 bp, Homo sapien
gaggcgggtggagactacacactaa

SEQ ID NO: 1657874 - DNA, 25 bp, Homo sapien
tcctcatacgtgagggccatcacca

SEQ ID NO: 1657875 - DNA, 25 bp, Homo sapien
ctcagcatggcgtagggcggcttct

SEQ ID NO: 1657876 - DNA, 25 bp, Homo sapien
cagatcctgcagcaaagcttctagg

SEQ ID NO: 1657877 - DNA, 25 bp, Homo sapien
gggtcatatggagacacacgcagat

SEQ ID NO: 1657878 - DNA, 25 bp, Homo sapien
cacgaagggccccggcttatcaaca

SEQ ID NO: 1657879 - DNA, 25 bp, Homo sapien
tgaccgcagggtcccacgaagggcc

SEQ ID NO: 1657880 - DNA, 25 bp, Homo sapien
cagtgaccgcagggtcccacgaagg

SEQ ID NO: 1657881 - DNA, 25 bp, Homo sapien
tgagggcctgatccagtgaccgcag

SEQ ID NO: 1657882 - DNA, 25 bp, Homo sapien
tgtgatccttaagacggagaggatc

SEQ ID NO: 1657883 - DNA, 25 bp, Homo sapien
ctgtgatccttaagacggagaggat

SEQ ID NO: 1657884 - DNA, 25 bp, Homo sapien
tgatccttaagacggagaggatccc

SEQ ID NO: 1657885 - DNA, 25 bp, Homo sapien
tctgtgatccttaagacggagagga

SEQ ID NO: 1657886 - DNA, 25 bp, Homo sapien
gacctccccacccgtcccaagcaca

SEQ ID NO: 1657887 - DNA, 25 bp, Homo sapien
cctgggggcacaccgcacacccaaa

SEQ ID NO: 1657888 - DNA, 25 bp, Homo sapien
tgacctccccacccgtcccaagcac

SEQ ID NO: 1657889 - DNA, 25 bp, Homo sapien
tgcaaactgctgacggtgaccgagc

SEQ ID NO: 1657890 - DNA, 25 bp, Homo sapien
gaggcggctgcataacggagatatc

SEQ ID NO: 1657891 - DNA, 25 bp, Homo sapien
gatatctgggtcaaccacacggagg

SEQ ID NO: 1657892 - DNA, 25 bp, Homo sapien
tgtggcatccgcacagttcagtgga

SEQ ID NO: 1657893 - DNA, 25 bp, Homo sapien
tgtggcctggactgattacctaagc

SEQ ID NO: 1657894 - DNA, 25 bp, Homo sapien
tcccgcaataggatgtgagctccct

SEQ ID NO: 1657895 - DNA, 25 bp, Homo sapien
tccacttgggaagcagcacgtaggt

SEQ ID NO: 1657896 - DNA, 25 bp, Homo sapien
ttacctgttaccatcgctgcgagac

SEQ ID NO: 1657897 - DNA, 25 bp, Homo sapien
acatcacttacgcaaatcacacaca

SEQ ID NO: 1657898 - DNA, 25 bp, Homo sapien
tcacttacgcaaatcacacacagca

SEQ ID NO: 1657899 - DNA, 25 bp, Homo sapien
ccacggccagcatgcgattttgagg

SEQ ID NO: 1657900 - DNA, 25 bp, Homo sapien
catgcgattttgagggtacaaatac

SEQ ID NO: 1657901 - DNA, 25 bp, Homo sapien
gcttgagcagctgtccatggttgag

SEQ ID NO: 1657902 - DNA, 25 bp, Homo sapien
tgcttgagcagctgtccatggttga

SEQ ID NO: 1657903 - DNA, 25 bp, Homo sapien
gcacttcagacgtagatggccagct

SEQ ID NO: 1657904 - DNA, 25 bp, Homo sapien
gacttcacggcacactaaggacagg

SEQ ID NO: 1657905 - DNA, 25 bp, Homo sapien
tgagggactcaacgccatttactgg

SEQ ID NO: 1657906 - DNA, 25 bp, Homo sapien
taaggacagggaaacatgagggact

SEQ ID NO: 1657907 - DNA, 25 bp, Homo sapien
tagtgctgaacccatacccctagtg

SEQ ID NO: 1657908 - DNA, 25 bp, Homo sapien
gtccttggtgctgaactcataccca

SEQ ID NO: 1657909 - DNA, 25 bp, Homo sapien
ccggcctgggcaactgatattcatg

SEQ ID NO: 1657910 - DNA, 25 bp, Homo sapien
tctgaagtgcatgcctagcacgccc

SEQ ID NO: 1657911 - DNA, 25 bp, Homo sapien
agaacttcctcatatgttccgctgt

SEQ ID NO: 1657912 - DNA, 25 bp, Homo sapien
gaacttcctcatatgttccgctgtc

SEQ ID NO: 1657913 - DNA, 25 bp, Homo sapien
acttcctcatatgttccgctgtcca

SEQ ID NO: 1657914 - DNA, 25 bp, Homo sapien
tcctcatatgttccgctgtccaccg

SEQ ID NO: 1657915 - DNA, 25 bp, Homo sapien
agaggtgaaggcactgatctggcag

SEQ ID NO: 1657916 - DNA, 25 bp, Homo sapien
ggtggtgctaccagtgctgaggcag

SEQ ID NO: 1657917 - DNA, 25 bp, Homo sapien
ggacactgcataggtggtgctacca

SEQ ID NO: 1657918 - DNA, 25 bp, Homo sapien
cctgcatgtttgtgatgaatgagtc

SEQ ID NO: 1657919 - DNA, 25 bp, Homo sapien
ccatggcagaaacccgtagagccac

SEQ ID NO: 1657920 - DNA, 25 bp, Homo sapien
gaaggcaatttgtccatggcagaaa

SEQ ID NO: 1657921 - DNA, 25 bp, Homo sapien
acccgtagagccacttcagcatgca

SEQ ID NO: 1657922 - DNA, 25 bp, Homo sapien
ggcagaaacccgtagagccacttca

SEQ ID NO: 1657923 - DNA, 25 bp, Homo sapien
gtgcaggtccatgctaatgaactca

SEQ ID NO: 1657924 - DNA, 25 bp, Homo sapien
ccacttgggcaatagcggaaggcga

SEQ ID NO: 1657925 - DNA, 25 bp, Homo sapien
taggccacgtgtttgccacttgggc

SEQ ID NO: 1657926 - DNA, 25 bp, Homo sapien
ggcgaagccatagcctgccaaagtc

SEQ ID NO: 1657927 - DNA, 25 bp, Homo sapien
ctacacctggataggttattatttt

SEQ ID NO: 1657928 - DNA, 25 bp, Homo sapien
cactacacctggataggttattatt

SEQ ID NO: 1657929 - DNA, 25 bp, Homo sapien
tacagatgaggttccctatgtttcc

SEQ ID NO: 1657930 - DNA, 25 bp, Homo sapien
gatgagatgaacattggggtttgta

SEQ ID NO: 1657931 - DNA, 25 bp, Homo sapien
ggtcctctggatccacaaagatatt

SEQ ID NO: 1657932 - DNA, 25 bp, Homo sapien
actctggtcctctggatccacaaag

SEQ ID NO: 1657933 - DNA, 25 bp, Homo sapien
tcattctcatggaggaactccaggg

SEQ ID NO: 1657934 - DNA, 25 bp, Homo sapien
catttccatgaacatactcattctc

SEQ ID NO: 1657935 - DNA, 25 bp, Homo sapien
acatccagggccgactgaaggctcc

SEQ ID NO: 1657936 - DNA, 25 bp, Homo sapien
acatgctttgggctgacatccaggg

SEQ ID NO: 1657937 - DNA, 25 bp, Homo sapien
catccagggccgactgaaggctcct

SEQ ID NO: 1657938 - DNA, 25 bp, Homo sapien
ttgtcctggtgaacaccgaaaccca

SEQ ID NO: 1657939 - DNA, 25 bp, Homo sapien
aacaccgaaacccatgcaggtaggg

SEQ ID NO: 1657940 - DNA, 25 bp, Homo sapien
tggtgaacaccgaaacccatgcagg

SEQ ID NO: 1657941 - DNA, 25 bp, Homo sapien
cagtggggtcgagtacagcttcttc

SEQ ID NO: 1657942 - DNA, 25 bp, Homo sapien
tcctgctatggccaactccaagcta

SEQ ID NO: 1657943 - DNA, 25 bp, Homo sapien
tggccaactccaagctaccaacatg

SEQ ID NO: 1657944 - DNA, 25 bp, Homo sapien
accgcgcccgactgcatttgctaat

SEQ ID NO: 1657945 - DNA, 25 bp, Homo sapien
ttctgcagtgtaaataaatactcct

SEQ ID NO: 1657946 - DNA, 25 bp, Homo sapien
cacccttctcatgcctgcaggtaga

SEQ ID NO: 1657947 - DNA, 25 bp, Homo sapien
caagtgctgtgaccaagttggcgcc

SEQ ID NO: 1657948 - DNA, 25 bp, Homo sapien
tcacaggagtcaggttatggacaca

SEQ ID NO: 1657949 - DNA, 25 bp, Homo sapien
agtataggcgtcaacccacgcccag

SEQ ID NO: 1657950 - DNA, 25 bp, Homo sapien
gctcattgaacaagcgcccatcctt

SEQ ID NO: 1657951 - DNA, 25 bp, Homo sapien
cttgcagaggcttggcggcccgctg

SEQ ID NO: 1657952 - DNA, 25 bp, Homo sapien
ttggcggcccgctggaagaagttct

SEQ ID NO: 1657953 - DNA, 25 bp, Homo sapien
agttctgctcattgaacaagcgccc

SEQ ID NO: 1657954 - DNA, 25 bp, Homo sapien
tgtgaacaaagcaacctgcgtgctg

SEQ ID NO: 1657955 - DNA, 25 bp, Homo sapien
gagactgcgagctaccttgctgtac

SEQ ID NO: 1657956 - DNA, 25 bp, Homo sapien
ggtaagagccacagtgttccctaga

SEQ ID NO: 1657957 - DNA, 25 bp, Homo sapien
tataaaaccatcctatcagctctgg

SEQ ID NO: 1657958 - DNA, 25 bp, Homo sapien
tgttaaatgggacacggtagctgcc

SEQ ID NO: 1657959 - DNA, 25 bp, Homo sapien
ccatagtgactgacgcgagcgacgt

SEQ ID NO: 1657960 - DNA, 25 bp, Homo sapien
tcacaggaggttgcaggaaaggctt

SEQ ID NO: 1657961 - DNA, 25 bp, Homo sapien
tgcttatgaaacacagcccggctca

SEQ ID NO: 1657962 - DNA, 25 bp, Homo sapien
agtgagaacttttgcttctgtggtc

SEQ ID NO: 1657963 - DNA, 25 bp, Homo sapien
gaggttataaccacgcggaaggtca

SEQ ID NO: 1657964 - DNA, 25 bp, Homo sapien
ggctcgctgagcctaaactgcttgt

SEQ ID NO: 1657965 - DNA, 25 bp, Homo sapien
cctgggatgcggatacatgtcagac

SEQ ID NO: 1657966 - DNA, 25 bp, Homo sapien
tggttccaacaaggtcaagcgcact

SEQ ID NO: 1657967 - DNA, 25 bp, Homo sapien
tgtcgcccactcttgtctgtcagca

SEQ ID NO: 1657968 - DNA, 25 bp, Homo sapien
tagagaatgccctggttgtccctgg

SEQ ID NO: 1657969 - DNA, 25 bp, Homo sapien
tcaagtgaggtggtcactcggctcc

SEQ ID NO: 1657970 - DNA, 25 bp, Homo sapien
tacagctggtcttctgagggctacc

SEQ ID NO: 1657971 - DNA, 25 bp, Homo sapien
gaactcagagtatcttcagactcag

SEQ ID NO: 1657972 - DNA, 25 bp, Homo sapien
gaggtgacggtgctggaccatttca

SEQ ID NO: 1657973 - DNA, 25 bp, Homo sapien
tatcttcagactcagaactgtcacc

SEQ ID NO: 1657974 - DNA, 25 bp, Homo sapien
accatttcactttcttaggagaggt

SEQ ID NO: 1657975 - DNA, 25 bp, Homo sapien
gaatgccgcttggatacttttgcca

SEQ ID NO: 1657976 - DNA, 25 bp, Homo sapien
tgtggattgacaaaggtctgggacc

SEQ ID NO: 1657977 - DNA, 25 bp, Homo sapien
cttggaaggatgacacatgtggatt

SEQ ID NO: 1657978 - DNA, 25 bp, Homo sapien
gggaccctacatgctcctctacagg

SEQ ID NO: 1657979 - DNA, 25 bp, Homo sapien
tcctatctgatagaatggtcgatga

SEQ ID NO: 1657980 - DNA, 25 bp, Homo sapien
ccctggctgcaagagaccattctga

SEQ ID NO: 1657981 - DNA, 25 bp, Homo sapien
tattcactgtaaaggctggcttctg

SEQ ID NO: 1657982 - DNA, 25 bp, Homo sapien
caggctgccagatttcaatcccaga

SEQ ID NO: 1657983 - DNA, 25 bp, Homo sapien
ctttatgaggtcacggtctggccct

SEQ ID NO: 1657984 - DNA, 25 bp, Homo sapien
ttggaaactccatcttgacagcgac

SEQ ID NO: 1657985 - DNA, 25 bp, Homo sapien
tgggttggaaactccatcttgacag

SEQ ID NO: 1657986 - DNA, 25 bp, Homo sapien
ggttggaaactccatcttgacagcg

SEQ ID NO: 1657987 - DNA, 25 bp, Homo sapien
gttggaaactccatcttgacagcga

SEQ ID NO: 1657988 - DNA, 25 bp, Homo sapien
gacgccaagtttcacagcggaggag

SEQ ID NO: 1657989 - DNA, 25 bp, Homo sapien
gaaaccacgggatgacttagacgcc

SEQ ID NO: 1657990 - DNA, 25 bp, Homo sapien
gaggagctgtcgaacttcccacaag

SEQ ID NO: 1657991 - DNA, 25 bp, Homo sapien
gattgcctaggcgacgacagagcct

SEQ ID NO: 1657992 - DNA, 25 bp, Homo sapien
gatcctccgcagttacccggactca

SEQ ID NO: 1657993 - DNA, 25 bp, Homo sapien
tgcagcctgaccctcggatcctccg

SEQ ID NO: 1657994 - DNA, 25 bp, Homo sapien
tctgcagcctgaccctcggatcctc

SEQ ID NO: 1657995 - DNA, 25 bp, Homo sapien
tcggatcctccgcagttacccggac

SEQ ID NO: 1657996 - DNA, 25 bp, Homo sapien
tagccgctttggaacgccttctggt

SEQ ID NO: 1657997 - DNA, 25 bp, Homo sapien
tcagtgtcagaccaatcggaatgca

SEQ ID NO: 1657998 - DNA, 25 bp, Homo sapien
tcggaatgcaccgtgaggtacctct

SEQ ID NO: 1657999 - DNA, 25 bp, Homo sapien
tggactacaaactgatgccgcctgg

SEQ ID NO: 1658000 - DNA, 25 bp, Homo sapien
tcgttctgtcaacaactgtaggtac

SEQ ID NO: 1658001 - DNA, 25 bp, Homo sapien
taggtgctaacccaccattgttggt

SEQ ID NO: 1658002 - DNA, 25 bp, Homo sapien
agagtaacagtttcggaggccaatt

SEQ ID NO: 1658003 - DNA, 25 bp, Homo sapien
catgtgctgactgactgttaggtgc

SEQ ID NO: 1658004 - DNA, 25 bp, Homo sapien
ttttgggggctcgtcagcatggaca

SEQ ID NO: 1658005 - DNA, 25 bp, Homo sapien
cgtcagcatggacagcgagtcagcc

SEQ ID NO: 1658006 - DNA, 25 bp, Homo sapien
cctggacattttgggggctcgtcag

SEQ ID NO: 1658007 - DNA, 25 bp, Homo sapien
cagcgagtcagccatgggtggaagg

SEQ ID NO: 1658008 - DNA, 25 bp, Homo sapien
tgtattgcttgactcatggcttctc

SEQ ID NO: 1658009 - DNA, 25 bp, Homo sapien
tggcccgttgccagcttctggaggt

SEQ ID NO: 1658010 - DNA, 25 bp, Homo sapien
caaagacagcagtggcgttttctcc

SEQ ID NO: 1658011 - DNA, 25 bp, Homo sapien
tggaggctccagcacgtagatagtc

SEQ ID NO: 1658012 - DNA, 25 bp, Homo sapien
acgctatgagtgttccaagtgccag

SEQ ID NO: 1658013 - DNA, 25 bp, Homo sapien
gccaggcgaccttcaacttgagaaa

SEQ ID NO: 1658014 - DNA, 25 bp, Homo sapien
gatccacactcggaaacgctatgag

SEQ ID NO: 1658015 - DNA, 25 bp, Homo sapien
caactgtaacgaatgcggcaaggct

SEQ ID NO: 1658016 - DNA, 25 bp, Homo sapien
tgagctacaggagcctaaaccaagc

SEQ ID NO: 1658017 - DNA, 25 bp, Homo sapien
tgtcggaactgataccccagctaaa

SEQ ID NO: 1658018 - DNA, 25 bp, Homo sapien
aagtcttctctagggccaaggtctc

SEQ ID NO: 1658019 - DNA, 25 bp, Homo sapien
aggtcaaggtataaagcagcagcaa

SEQ ID NO: 1658020 - DNA, 25 bp, Homo sapien
tcctcacatgtgtagcgtttgctgc

SEQ ID NO: 1658021 - DNA, 25 bp, Homo sapien
cacagatgtaggcattctggccagt

SEQ ID NO: 1658022 - DNA, 25 bp, Homo sapien
tgctgccagtgtggaccttctgatg

SEQ ID NO: 1658023 - DNA, 25 bp, Homo sapien
gggtataggttctcccacagtcact

SEQ ID NO: 1658024 - DNA, 25 bp, Homo sapien
tcccgcactcgtgacacgcgtaggg

SEQ ID NO: 1658025 - DNA, 25 bp, Homo sapien
ccgcactctccacattggtagggct

SEQ ID NO: 1658026 - DNA, 25 bp, Homo sapien
tgggagatctgggtataggctttcc

SEQ ID NO: 1658027 - DNA, 25 bp, Homo sapien
gaaatctgcgtgtaagccttcccgc

SEQ ID NO: 1658028 - DNA, 25 bp, Homo sapien
tgtggggcttctccctggtgtgaat

SEQ ID NO: 1658029 - DNA, 25 bp, Homo sapien
tggggcttctccctggtgtgaattc

SEQ ID NO: 1658030 - DNA, 25 bp, Homo sapien
ggggcttctccctggtgtgaattcg

SEQ ID NO: 1658031 - DNA, 25 bp, Homo sapien
ctgtggggcttctccctggtgtgaa

SEQ ID NO: 1658032 - DNA, 25 bp, Homo sapien
agggcactcgttgcttcctgatgag

SEQ ID NO: 1658033 - DNA, 25 bp, Homo sapien
gtcctttggcgtttcaagctcttcc

SEQ ID NO: 1658034 - DNA, 25 bp, Homo sapien
atggtttcttctccacgaacgtcct

SEQ ID NO: 1658035 - DNA, 25 bp, Homo sapien
ggaggcttctcccaagctcgttaca

SEQ ID NO: 1658036 - DNA, 25 bp, Homo sapien
tcgaggtgtctctcgaatagtcaca

SEQ ID NO: 1658037 - DNA, 25 bp, Homo sapien
ctcttttttcgaggtgtctctcgaa

SEQ ID NO: 1658038 - DNA, 25 bp, Homo sapien
atctccaagcatggcccttaaaggt

SEQ ID NO: 1658039 - DNA, 25 bp, Homo sapien
ctctcgaatagtcacagagcttgtc

SEQ ID NO: 1658040 - DNA, 25 bp, Homo sapien
cgggagatcacgtcggatttggacc

SEQ ID NO: 1658041 - DNA, 25 bp, Homo sapien
agatcacgtcggatttggacccagg

SEQ ID NO: 1658042 - DNA, 25 bp, Homo sapien
tccacacgggagatcacgtcggatt

SEQ ID NO: 1658043 - DNA, 25 bp, Homo sapien
cacacgggagatcacgtcggatttg

SEQ ID NO: 1658044 - DNA, 25 bp, Homo sapien
caggggcaagacgaggcctgggcag

SEQ ID NO: 1658045 - DNA, 25 bp, Homo sapien
gaggtgcaggggcaagacgaggcct

SEQ ID NO: 1658046 - DNA, 25 bp, Homo sapien
gggaacataaagacggagaacgaca

SEQ ID NO: 1658047 - DNA, 25 bp, Homo sapien
cggagaacgacaggtccaggaaggt

SEQ ID NO: 1658048 - DNA, 25 bp, Homo sapien
agggagagaaggttccagtagttct

SEQ ID NO: 1658049 - DNA, 25 bp, Homo sapien
gagagaaggttccagtagttctcca

SEQ ID NO: 1658050 - DNA, 25 bp, Homo sapien
ccagggagagaaggttccagtagtt

SEQ ID NO: 1658051 - DNA, 25 bp, Homo sapien
gagaaggttccagtagttctccagc

SEQ ID NO: 1658052 - DNA, 25 bp, Homo sapien
tggctaccccgagttgcaaagcggt

SEQ ID NO: 1658053 - DNA, 25 bp, Homo sapien
tctaaatcaggcagtgtagaccggg

SEQ ID NO: 1658054 - DNA, 25 bp, Homo sapien
tctctcttgccagaacccggctgtg

SEQ ID NO: 1658055 - DNA, 25 bp, Homo sapien
gcaaagcggtctgggtagtgaacat

SEQ ID NO: 1658056 - DNA, 25 bp, Homo sapien
ccagggacagagagggccctgcgtt

SEQ ID NO: 1658057 - DNA, 25 bp, Homo sapien
ccctgacatcacccagtccccaggg

SEQ ID NO: 1658058 - DNA, 25 bp, Homo sapien
cctgacatcacccagtccccaggga

SEQ ID NO: 1658059 - DNA, 25 bp, Homo sapien
ggacagagagggccctgcgttccat

SEQ ID NO: 1658060 - DNA, 25 bp, Homo sapien
catctcttggcaggcgactgtaatc

SEQ ID NO: 1658061 - DNA, 25 bp, Homo sapien
agactcccttgaaccgacgaggcgg

SEQ ID NO: 1658062 - DNA, 25 bp, Homo sapien
tgcagtggtgcacatctgcggccgc

SEQ ID NO: 1658063 - DNA, 25 bp, Homo sapien
agactctggctccacaaaaaggtta

SEQ ID NO: 1658064 - DNA, 25 bp, Homo sapien
tgaagggcagctttttgcatccacg

SEQ ID NO: 1658065 - DNA, 25 bp, Homo sapien
ttcaaggcagcccaaaaggacggct

SEQ ID NO: 1658066 - DNA, 25 bp, Homo sapien
gaaactaattcaagaagccgggcgc

SEQ ID NO: 1658067 - DNA, 25 bp, Homo sapien
cgagattcatagctcgagcgcgccc

SEQ ID NO: 1658068 - DNA, 25 bp, Homo sapien
cagagtttctaatgtccgttttata

SEQ ID NO: 1658069 - DNA, 25 bp, Homo sapien
tgcagtggtgcacatctgcggcccc

SEQ ID NO: 1658070 - DNA, 25 bp, Homo sapien
ctagaacttgagaactacttttgtg

SEQ ID NO: 1658071 - DNA, 25 bp, Homo sapien
agactctggctccacaaaaaggtta

SEQ ID NO: 1658072 - DNA, 25 bp, Homo sapien
catctcttggcaggcgactgtaatc

SEQ ID NO: 1658073 - DNA, 25 bp, Homo sapien
cacatggaagtaatttaaaaacact

SEQ ID NO: 1658074 - DNA, 25 bp, Homo sapien
gagataggagactcccttgaaccga

SEQ ID NO: 1658075 - DNA, 25 bp, Homo sapien
aacagagcaaggctcggtctcccaa

SEQ ID NO: 1658076 - DNA, 25 bp, Homo sapien
tgaagggcagctttttgcatccacg

SEQ ID NO: 1658077 - DNA, 25 bp, Homo sapien
ttcaaggcagcccaaaaggacggct

SEQ ID NO: 1658078 - DNA, 25 bp, Homo sapien
gaaactaattcaagaagccgggcgc

SEQ ID NO: 1658079 - DNA, 25 bp, Homo sapien
cgagattcatagctcgagcgcgccc

SEQ ID NO: 1658080 - DNA, 25 bp, Homo sapien
tgaagggcagctttttgcatccacg

SEQ ID NO: 1658081 - DNA, 25 bp, Homo sapien
ttcaaggcagcccaaaaggacggct

SEQ ID NO: 1658082 - DNA, 25 bp, Homo sapien
gaaactaattcaagaagccgggcgc

SEQ ID NO: 1658083 - DNA, 25 bp, Homo sapien
cgagattcatagctcgagcgcgccc

SEQ ID NO: 1658084 - DNA, 25 bp, Homo sapien
tgaagggcagctttttgcatccacg

SEQ ID NO: 1658085 - DNA, 25 bp, Homo sapien
ttcaaggcagcccaaaaggacggct

SEQ ID NO: 1658086 - DNA, 25 bp, Homo sapien
cgagattcatagctcgagcgcgccc

SEQ ID NO: 1658087 - DNA, 25 bp, Homo sapien
gaaactaattcaagaagccgggcgc

SEQ ID NO: 1658088 - DNA, 25 bp, Homo sapien
cagagtttctaatgtccgttttata

SEQ ID NO: 1658089 - DNA, 25 bp, Homo sapien
tgcagtggtgcacatctgcggcccc

SEQ ID NO: 1658090 - DNA, 25 bp, Homo sapien
ctagaacttgagaactacttttgtg

SEQ ID NO: 1658091 - DNA, 25 bp, Homo sapien
agactctggctccacaaaaaggtta

SEQ ID NO: 1658092 - DNA, 25 bp, Homo sapien
gctcccccctgtcgtcacccagtcc

SEQ ID NO: 1658093 - DNA, 25 bp, Homo sapien
aggctcccccctgtcgtcacccagt

SEQ ID NO: 1658094 - DNA, 25 bp, Homo sapien
cagaggctcccccctgtcgtcaccc

SEQ ID NO: 1658095 - DNA, 25 bp, Homo sapien
agaggctcccccctgtcgtcaccca

SEQ ID NO: 1658096 - DNA, 25 bp, Homo sapien
tgaagggcagctttttgcatccacg

SEQ ID NO: 1658097 - DNA, 25 bp, Homo sapien
ttcaaggcagcccaaaaggacggct

SEQ ID NO: 1658098 - DNA, 25 bp, Homo sapien
gaaactaattcaagaagccgggcgc

SEQ ID NO: 1658099 - DNA, 25 bp, Homo sapien
cgagattcatagctcgagcgcgccc

SEQ ID NO: 1658100 - DNA, 25 bp, Homo sapien
tgcagtggtgcacatctgcggcccc

SEQ ID NO: 1658101 - DNA, 25 bp, Homo sapien
ctagaacttgagaactacttttgtg

SEQ ID NO: 1658102 - DNA, 25 bp, Homo sapien
cagagtttctaatgtccgttttata

SEQ ID NO: 1658103 - DNA, 25 bp, Homo sapien
agactctggctccacaaaaaggtta

SEQ ID NO: 1658104 - DNA, 25 bp, Homo sapien
tgaagggcagctttttgcatccacg

SEQ ID NO: 1658105 - DNA, 25 bp, Homo sapien
ttcaaggcagcccaaaaggacggct

SEQ ID NO: 1658106 - DNA, 25 bp, Homo sapien
cgagattcatagctcgagcgcgccc

SEQ ID NO: 1658107 - DNA, 25 bp, Homo sapien
gaaactaattcaagaagccgggcgc

SEQ ID NO: 1658108 - DNA, 25 bp, Homo sapien
cacatttacatttggtactgggtga

SEQ ID NO: 1658109 - DNA, 25 bp, Homo sapien
gggcacacatttacatttggtactg

SEQ ID NO: 1658110 - DNA, 25 bp, Homo sapien
acatttggtactgggtgaatacagc

SEQ ID NO: 1658111 - DNA, 25 bp, Homo sapien
ttacatttggtactgggtgaataca

SEQ ID NO: 1658112 - DNA, 25 bp, Homo sapien
ttcccagtattggaagagtcaggag

SEQ ID NO: 1658113 - DNA, 25 bp, Homo sapien
tcaggagaccttgagatcatgcaca

SEQ ID NO: 1658114 - DNA, 25 bp, Homo sapien
cccagtattggaagagtcaggagac

SEQ ID NO: 1658115 - DNA, 25 bp, Homo sapien
tgagatcatgcacagggatgaagag

SEQ ID NO: 1658116 - DNA, 25 bp, Homo sapien
ggccatcaaggtcccattggccatt

SEQ ID NO: 1658117 - DNA, 25 bp, Homo sapien
tcggccatcaaggtcccattggcca

SEQ ID NO: 1658118 - DNA, 25 bp, Homo sapien
ctggccctcggccatcaaggtccca

SEQ ID NO: 1658119 - DNA, 25 bp, Homo sapien
ccctcggccatcaaggtcccattgg

SEQ ID NO: 1658120 - DNA, 25 bp, Homo sapien
tcgggtccgcgagttccgtgcgtcc

SEQ ID NO: 1658121 - DNA, 25 bp, Homo sapien
tgtctcggaactgtaagtcccggta

SEQ ID NO: 1658122 - DNA, 25 bp, Homo sapien
cggaacgcgcctgagcagtccctgt

SEQ ID NO: 1658123 - DNA, 25 bp, Homo sapien
gcgtccaggcggattccgctggaca

SEQ ID NO: 1658124 - DNA, 25 bp, Homo sapien
tggatttgtcaccaattttattaaa

SEQ ID NO: 1658125 - DNA, 25 bp, Homo sapien
tactgcagcaggagttttcggtttt

SEQ ID NO: 1658126 - DNA, 25 bp, Homo sapien
gttttcggttttgtctgtatgtaca

SEQ ID NO: 1658127 - DNA, 25 bp, Homo sapien
gcagcaggagttttcggttttgtct

SEQ ID NO: 1658128 - DNA, 25 bp, Homo sapien
caggagttttcggttttgtctgtat

SEQ ID NO: 1658129 - DNA, 25 bp, Homo sapien
gagacagagactaaagtgactgaag

SEQ ID NO: 1658130 - DNA, 25 bp, Homo sapien
gaggcccacaaaggcaaaagtgctg

SEQ ID NO: 1658131 - DNA, 25 bp, Homo sapien
gaaagttgtaatgtggcccagaggt

SEQ ID NO: 1658132 - DNA, 25 bp, Homo sapien
gactcccaaagtacacagtgaccca

SEQ ID NO: 1658133 - DNA, 25 bp, Homo sapien
aacagcgcctggttcctcgggtatt

SEQ ID NO: 1658134 - DNA, 25 bp, Homo sapien
caacagcgcctggttcctcgggtat

SEQ ID NO: 1658135 - DNA, 25 bp, Homo sapien
atgaggatgcccaacagcgcctggt

SEQ ID NO: 1658136 - DNA, 25 bp, Homo sapien
cagaaatgaggatgcccaacagcgc

SEQ ID NO: 1658137 - DNA, 25 bp, Homo sapien
aacagccccgacctccacgtcacca

SEQ ID NO: 1658138 - DNA, 25 bp, Homo sapien
ggaaacagccccgacctccacgtca

SEQ ID NO: 1658139 - DNA, 25 bp, Homo sapien
tccacgtcaccacccctccttagcc

SEQ ID NO: 1658140 - DNA, 25 bp, Homo sapien
cctccacgtcaccacccctccttag

SEQ ID NO: 1658141 - DNA, 25 bp, Homo sapien
taacagatggaggaaagtgaatttc

SEQ ID NO: 1658142 - DNA, 25 bp, Homo sapien
taaaatctttttctagcacctgcca

SEQ ID NO: 1658143 - DNA, 25 bp, Homo sapien
tgggccacactctaagcaaatggtt

SEQ ID NO: 1658144 - DNA, 25 bp, Homo sapien
gctgcatgtgggagcctcgaaaccc

SEQ ID NO: 1658145 - DNA, 25 bp, Homo sapien
ttttgtggatacacttgggagtgat

SEQ ID NO: 1658146 - DNA, 25 bp, Homo sapien
tgtaaacagtccaacacctcttctt

SEQ ID NO: 1658147 - DNA, 25 bp, Homo sapien
gatacacttgggagtgatcctctgg

SEQ ID NO: 1658148 - DNA, 25 bp, Homo sapien
tgggagtgatcctctggcaatgtaa

SEQ ID NO: 1658149 - DNA, 25 bp, Homo sapien
caagggcagatatcagaggaccggc

SEQ ID NO: 1658150 - DNA, 25 bp, Homo sapien
taagacaagggcagatatcagagga

SEQ ID NO: 1658151 - DNA, 25 bp, Homo sapien
ggagaagtaagacaagggcagatat

SEQ ID NO: 1658152 - DNA, 25 bp, Homo sapien
cagatatcagaggaccggcaagggt

SEQ ID NO: 1658153 - DNA, 25 bp, Homo sapien
cttgatcacattcgccctgagggtc

SEQ ID NO: 1658154 - DNA, 25 bp, Homo sapien
tccttgatcacattcgccctgaggg

SEQ ID NO: 1658155 - DNA, 25 bp, Homo sapien
attccttgatcacattcgccctgag

SEQ ID NO: 1658156 - DNA, 25 bp, Homo sapien
gatcacattcgccctgagggtcacc

SEQ ID NO: 1658157 - DNA, 25 bp, Homo sapien
ttcagagagttacccattaagtgct

SEQ ID NO: 1658158 - DNA, 25 bp, Homo sapien
tcttgacaaaggacgccacaaggtc

SEQ ID NO: 1658159 - DNA, 25 bp, Homo sapien
taagtgctgcgtttggttcttgaca

SEQ ID NO: 1658160 - DNA, 25 bp, Homo sapien
gacgccacaaggtccagttgatttg

SEQ ID NO: 1658161 - DNA, 25 bp, Homo sapien
gttcagcgcgtagtcccggaagaaa

SEQ ID NO: 1658162 - DNA, 25 bp, Homo sapien
acaaacacgttcagcgcgtagtccc

SEQ ID NO: 1658163 - DNA, 25 bp, Homo sapien
tcagcgcgtagtcccggaagaaagg

SEQ ID NO: 1658164 - DNA, 25 bp, Homo sapien
cacgttcagcgcgtagtcccggaag

SEQ ID NO: 1658165 - DNA, 25 bp, Homo sapien
gggggcgcccaagcccgagagcagc

SEQ ID NO: 1658166 - DNA, 25 bp, Homo sapien
accaaggggtcgcactgcaggcagc

SEQ ID NO: 1658167 - DNA, 25 bp, Homo sapien
tccagcaccaaggggtcgcactgca

SEQ ID NO: 1658168 - DNA, 25 bp, Homo sapien
cagcaccaaggggtcgcactgcagg

SEQ ID NO: 1658169 - DNA, 25 bp, Homo sapien
ttgtgacgtcacagagagaacccgg

SEQ ID NO: 1658170 - DNA, 25 bp, Homo sapien
cctttgtgacgtcacagagagaacc

SEQ ID NO: 1658171 - DNA, 25 bp, Homo sapien
cggggcctttgtgacgtcacagaga

SEQ ID NO: 1658172 - DNA, 25 bp, Homo sapien
ggcctttgtgacgtcacagagagaa

SEQ ID NO: 1658173 - DNA, 25 bp, Homo sapien
atgtggtgagccgtggttgtaccac

SEQ ID NO: 1658174 - DNA, 25 bp, Homo sapien
ccacattgcaagtacccggtagtgc

SEQ ID NO: 1658175 - DNA, 25 bp, Homo sapien
tgtgtttcctcagtgacacatgcca

SEQ ID NO: 1658176 - DNA, 25 bp, Homo sapien
agtacccggtagtgcacaggtggtg

SEQ ID NO: 1658177 - DNA, 25 bp, Homo sapien
gaaaatcctataccctttagctatc

SEQ ID NO: 1658178 - DNA, 25 bp, Homo sapien
ataatctaattttggaccattttca

SEQ ID NO: 1658179 - DNA, 25 bp, Homo sapien
aatcctataccctttagctatcatc

SEQ ID NO: 1658180 - DNA, 25 bp, Homo sapien
gagtggtatggccatcaccataatc

SEQ ID NO: 1658181 - DNA, 25 bp, Homo sapien
acacacagcgtgaagagaatctcca

SEQ ID NO: 1658182 - DNA, 25 bp, Homo sapien
tgcacacgcatagaaagtaaggaga

SEQ ID NO: 1658183 - DNA, 25 bp, Homo sapien
taaggagagccattcaccagaggca

SEQ ID NO: 1658184 - DNA, 25 bp, Homo sapien
tcacagaacgtgaggagaatcttcc

SEQ ID NO: 1658185 - DNA, 25 bp, Homo sapien
cagccagtgcaacccattccctctg

SEQ ID NO: 1658186 - DNA, 25 bp, Homo sapien
cagtgcaacccattccctctgcttc

SEQ ID NO: 1658187 - DNA, 25 bp, Homo sapien
ccagtgcaacccattccctctgctt

SEQ ID NO: 1658188 - DNA, 25 bp, Homo sapien
gccagtgcaacccattccctctgct

SEQ ID NO: 1658189 - DNA, 25 bp, Homo sapien
caccagagttggacgatttgcagac

SEQ ID NO: 1658190 - DNA, 25 bp, Homo sapien
aactcaaaagctgggtacgtgtggc

SEQ ID NO: 1658191 - DNA, 25 bp, Homo sapien
aatgattttccacccgcgagcgtga

SEQ ID NO: 1658192 - DNA, 25 bp, Homo sapien
aataaaccgtgtcctagccaagcag

SEQ ID NO: 1658193 - DNA, 25 bp, Homo sapien
gaggcgcagggacaccccgctcagg

SEQ ID NO: 1658194 - DNA, 25 bp, Homo sapien
tcaggcccgcgatgctgctgaggct

SEQ ID NO: 1658195 - DNA, 25 bp, Homo sapien
ctgaggctgcgggatttctcgtaac

SEQ ID NO: 1658196 - DNA, 25 bp, Homo sapien
cgctcaggcccgcgatgctgctgag

SEQ ID NO: 1658197 - DNA, 25 bp, Homo sapien
ggggggcagcaaggcgggatggtgg

SEQ ID NO: 1658198 - DNA, 25 bp, Homo sapien
ctgaggcaaaaggtggggggcagca

SEQ ID NO: 1658199 - DNA, 25 bp, Homo sapien
tgaggcaaaaggtggggggcagcaa

SEQ ID NO: 1658200 - DNA, 25 bp, Homo sapien
gcagcaaggcgggatggtgggcggc

SEQ ID NO: 1658201 - DNA, 25 bp, Homo sapien
tcaagatccagcaacagtgtgtgtg

SEQ ID NO: 1658202 - DNA, 25 bp, Homo sapien
gcttttccaggcaacgctaagggag

SEQ ID NO: 1658203 - DNA, 25 bp, Homo sapien
ggaatccgatgagaactccaggagc

SEQ ID NO: 1658204 - DNA, 25 bp, Homo sapien
cacaggcatctcacagctaatggga

SEQ ID NO: 1658205 - DNA, 25 bp, Homo sapien
aaagtctcgcgaggtctcaggcggt

SEQ ID NO: 1658206 - DNA, 25 bp, Homo sapien
cgaaagtctcgcgaggtctcaggcg

SEQ ID NO: 1658207 - DNA, 25 bp, Homo sapien
ctcgcgaggtctcaggcggtgacaa

SEQ ID NO: 1658208 - DNA, 25 bp, Homo sapien
gggaccgaaagtctcgcgaggtctc

SEQ ID NO: 1658209 - DNA, 25 bp, Homo sapien
aacgccgccgggatcatttcctcct

SEQ ID NO: 1658210 - DNA, 25 bp, Homo sapien
cagaaatacacagagtcacgggggt

SEQ ID NO: 1658211 - DNA, 25 bp, Homo sapien
ggggcggctgagacatcaaatatgg

SEQ ID NO: 1658212 - DNA, 25 bp, Homo sapien
gggatggagaaacgccgccgggatc

SEQ ID NO: 1658213 - DNA, 25 bp, Homo sapien
tggcgttgaggtcgggcaagaagct

SEQ ID NO: 1658214 - DNA, 25 bp, Homo sapien
aggccgcggcgttggcgttgaggtc

SEQ ID NO: 1658215 - DNA, 25 bp, Homo sapien
tatccaggccgcggcgttggcgttg

SEQ ID NO: 1658216 - DNA, 25 bp, Homo sapien
cggcgttggcgttgaggtcgggcaa

SEQ ID NO: 1658217 - DNA, 25 bp, Homo sapien
tgggggggcagtgggggagcaccag

SEQ ID NO: 1658218 - DNA, 25 bp, Homo sapien
gggggcagtgggggagcaccagtgg

SEQ ID NO: 1658219 - DNA, 25 bp, Homo sapien
ttgggggggcagtgggggagcacca

SEQ ID NO: 1658220 - DNA, 25 bp, Homo sapien
ggggggcagtgggggagcaccagtg

SEQ ID NO: 1658221 - DNA, 25 bp, Homo sapien
ggcatagtcggtgaggaggaagcag

SEQ ID NO: 1658222 - DNA, 25 bp, Homo sapien
gtcctcgtgggcaagcgcagctgct

SEQ ID NO: 1658223 - DNA, 25 bp, Homo sapien
gtcccggctatagcggccacggctt

SEQ ID NO: 1658224 - DNA, 25 bp, Homo sapien
gacatggcaggctggtcaatggctg

SEQ ID NO: 1658225 - DNA, 25 bp, Homo sapien
tcctcctagactcccaagccactgc

SEQ ID NO: 1658226 - DNA, 25 bp, Homo sapien
ttcctcctagactcccaagccactg

SEQ ID NO: 1658227 - DNA, 25 bp, Homo sapien
tcacctcctcctgagccaacgggca

SEQ ID NO: 1658228 - DNA, 25 bp, Homo sapien
cacctcctcctgagccaacgggcaa

SEQ ID NO: 1658229 - DNA, 25 bp, Homo sapien
atcacctcctcctgagccaacgggc

SEQ ID NO: 1658230 - DNA, 25 bp, Homo sapien
tgcccggttgatctcaatcacctcc

SEQ ID NO: 1658231 - DNA, 25 bp, Homo sapien
caaagttgttgacaatgacgggcac

SEQ ID NO: 1658232 - DNA, 25 bp, Homo sapien
gcctgggtcaccgtcttgttgctaa

SEQ ID NO: 1658233 - DNA, 25 bp, Homo sapien
ttggtgatgttctccggaggtgccc

SEQ ID NO: 1658234 - DNA, 25 bp, Homo sapien
gagaggcccacctcgagatagaagg

SEQ ID NO: 1658235 - DNA, 25 bp, Homo sapien
gaaggaatcccagggcaaggtagaa

SEQ ID NO: 1658236 - DNA, 25 bp, Homo sapien
gagtcccagggatagagagtgcact

SEQ ID NO: 1658237 - DNA, 25 bp, Homo sapien
agaaaaagttctagagcaggaggga

SEQ ID NO: 1658238 - DNA, 25 bp, Homo sapien
gtcacttagactaggaaacgggctg

SEQ ID NO: 1658239 - DNA, 25 bp, Homo sapien
cagcccgcgacgagtaggggtcctc

SEQ ID NO: 1658240 - DNA, 25 bp, Homo sapien
gcagcccgcgacgagtaggggtcct

SEQ ID NO: 1658241 - DNA, 25 bp, Homo sapien
cctggcagcccgcgacgagtagggg

SEQ ID NO: 1658242 - DNA, 25 bp, Homo sapien
tggcagcccgcgacgagtaggggtc

SEQ ID NO: 1658243 - DNA, 25 bp, Homo sapien
gcctcgaaggagtcgagcgcctcct

SEQ ID NO: 1658244 - DNA, 25 bp, Homo sapien
gtcgtccaggcctccgtcgtgggcg

SEQ ID NO: 1658245 - DNA, 25 bp, Homo sapien
aagcagaggcgcttgagctcgccgc

SEQ ID NO: 1658246 - DNA, 25 bp, Homo sapien
gcctgcggcgttggcggcgttggcg

SEQ ID NO: 1658247 - DNA, 25 bp, Homo sapien
gccccagaagccgagctcctcctca

SEQ ID NO: 1658248 - DNA, 25 bp, Homo sapien
cgtacgcgaagactcccgggtgccg

SEQ ID NO: 1658249 - DNA, 25 bp, Homo sapien
tcgagcggtacgtctcatggcgcac

SEQ ID NO: 1658250 - DNA, 25 bp, Homo sapien
tcggcgcccgggtcgtagtcgaagc

SEQ ID NO: 1658251 - DNA, 25 bp, Homo sapien
tagtcgaagcgtgccgccgcctcgg

SEQ ID NO: 1658252 - DNA, 25 bp, Homo sapien
gacgagacgcagactgagctcagca

SEQ ID NO: 1658253 - DNA, 25 bp, Homo sapien
ctggcgcccgcggaaggacgagacg

SEQ ID NO: 1658254 - DNA, 25 bp, Homo sapien
cccgcggaaggacgagacgcagact

SEQ ID NO: 1658255 - DNA, 25 bp, Homo sapien
ccggggcatggctcggcgcgccggt

SEQ ID NO: 1658256 - DNA, 25 bp, Homo sapien
gagacggagcgattggctctttcta

SEQ ID NO: 1658257 - DNA, 25 bp, Homo sapien
gggcgggcactctaacgcgacccag

SEQ ID NO: 1658258 - DNA, 25 bp, Homo sapien
gaggaaccaaactgattggcctggg

SEQ ID NO: 1658259 - DNA, 25 bp, Homo sapien
tctaacgcgacccagctggacgagt

SEQ ID NO: 1658260 - DNA, 25 bp, Homo sapien
tgggaaacttggatgccagcactcc

SEQ ID NO: 1658261 - DNA, 25 bp, Homo sapien
tgcgactcaggattagaggccatgg

SEQ ID NO: 1658262 - DNA, 25 bp, Homo sapien
tccacccacccattagagaggaggg

SEQ ID NO: 1658263 - DNA, 25 bp, Homo sapien
tcgactcttgactagggacaccagg

SEQ ID NO: 1658264 - DNA, 25 bp, Homo sapien
acccccgactgccacctgtggctgc

SEQ ID NO: 1658265 - DNA, 25 bp, Homo sapien
aatattggatttttactgagtagcg

SEQ ID NO: 1658266 - DNA, 25 bp, Homo sapien
tggatttttactgagtagcgctagc

SEQ ID NO: 1658267 - DNA, 25 bp, Homo sapien
tactgagtagcgctagctctgctac

SEQ ID NO: 1658268 - DNA, 25 bp, Homo sapien
ttttactgagtagcgctagctctgc

SEQ ID NO: 1658269 - DNA, 25 bp, Homo sapien
gcggcacccgcggtactgcgcctgc

SEQ ID NO: 1658270 - DNA, 25 bp, Homo sapien
cggcacccgcggtactgcgcctgcg

SEQ ID NO: 1658271 - DNA, 25 bp, Homo sapien
tgcgcctgcgcggtctcgcgccttc

SEQ ID NO: 1658272 - DNA, 25 bp, Homo sapien
ggtctcgcgccttcccaggtccgct

SEQ ID NO: 1658273 - DNA, 25 bp, Homo sapien
atgtccccgcggtcgaagacggtca

SEQ ID NO: 1658274 - DNA, 25 bp, Homo sapien
gcgaagcgatgtccaaggcccggaa

SEQ ID NO: 1658275 - DNA, 25 bp, Homo sapien
acacaggtactggaggcgaagcgat

SEQ ID NO: 1658276 - DNA, 25 bp, Homo sapien
cggacaagcagaggcggacgtcacc

SEQ ID NO: 1658277 - DNA, 25 bp, Homo sapien
ctgcaaggcgacaaggcggcaactg

SEQ ID NO: 1658278 - DNA, 25 bp, Homo sapien
aactgggtgtccaggccgcaggaac

SEQ ID NO: 1658279 - DNA, 25 bp, Homo sapien
actccagtcatattacatcactgtg

SEQ ID NO: 1658280 - DNA, 25 bp, Homo sapien
ggccctagtgatgtccaactaccag

SEQ ID NO: 1658281 - DNA, 25 bp, Homo sapien
ccaatgaggagtgagactgcgggga

SEQ ID NO: 1658282 - DNA, 25 bp, Homo sapien
ctggatgacgtaatcctgggccgtg

SEQ ID NO: 1658283 - DNA, 25 bp, Homo sapien
ggatttctgagcaccggatgatgta

SEQ ID NO: 1658284 - DNA, 25 bp, Homo sapien
tgggccgtgagattaaaccagaccc

SEQ ID NO: 1658285 - DNA, 25 bp, Homo sapien
ctctgctcaaatcccgtccgtggct

SEQ ID NO: 1658286 - DNA, 25 bp, Homo sapien
ttgagcacctgggtattcagcaccg

SEQ ID NO: 1658287 - DNA, 25 bp, Homo sapien
ttcagcaccgtgtgtggacagccct

SEQ ID NO: 1658288 - DNA, 25 bp, Homo sapien
ccccagtgccatggagtaatgttca

SEQ ID NO: 1658289 - DNA, 25 bp, Homo sapien
caggtgtgcctgtatccaggatggc

SEQ ID NO: 1658290 - DNA, 25 bp, Homo sapien
ggtcctacgatgacaggtgtgcctg

SEQ ID NO: 1658291 - DNA, 25 bp, Homo sapien
tgggcacagagagtcagccgtgagc

SEQ ID NO: 1658292 - DNA, 25 bp, Homo sapien
gcccggatctcctcagtgggtccta

SEQ ID NO: 1658293 - DNA, 25 bp, Homo sapien
tccatgtggatctgccagtaggcgg

SEQ ID NO: 1658294 - DNA, 25 bp, Homo sapien
gggatgtagtgtgccgggtctgagc

SEQ ID NO: 1658295 - DNA, 25 bp, Homo sapien
ccatgtggatctgccagtaggcggg

SEQ ID NO: 1658296 - DNA, 25 bp, Homo sapien
atgtagtgtgccgggtctgagcccc

SEQ ID NO: 1658297 - DNA, 25 bp, Homo sapien
gggcatagaatttcctagtttgatt

SEQ ID NO: 1658298 - DNA, 25 bp, Homo sapien
ttttgaaactcagcatattgaactg

SEQ ID NO: 1658299 - DNA, 25 bp, Homo sapien
cttaagttgtcacttaagctctggg

SEQ ID NO: 1658300 - DNA, 25 bp, Homo sapien
gagaaggttcctgagtatttggttg

SEQ ID NO: 1658301 - DNA, 25 bp, Homo sapien
gactcatagataggtgcaccctccc

SEQ ID NO: 1658302 - DNA, 25 bp, Homo sapien
caccgtgcctgaactgggactttct

SEQ ID NO: 1658303 - DNA, 25 bp, Homo sapien
tcacttccttctgaggaataggact

SEQ ID NO: 1658304 - DNA, 25 bp, Homo sapien
gaactgggactttctttatggagta

SEQ ID NO: 1658305 - DNA, 25 bp, Homo sapien
cagagcttccccgaaaatcacggat

SEQ ID NO: 1658306 - DNA, 25 bp, Homo sapien
aaaaccgaggcccaatatcccatcg

SEQ ID NO: 1658307 - DNA, 25 bp, Homo sapien
cacagagcttccccgaaaatcacgg

SEQ ID NO: 1658308 - DNA, 25 bp, Homo sapien
gcccaatatcccatcggggcgggaa

SEQ ID NO: 1658309 - DNA, 25 bp, Homo sapien
atccatcggctcaggaagcccctgc

SEQ ID NO: 1658310 - DNA, 25 bp, Homo sapien
cctaagccagatgatcttagacaac

SEQ ID NO: 1658311 - DNA, 25 bp, Homo sapien
agacaacagggttctcccaggctcg

SEQ ID NO: 1658312 - DNA, 25 bp, Homo sapien
cccaactgcttagcaaactttgcct

SEQ ID NO: 1658313 - DNA, 25 bp, Homo sapien
ggcattgggattgaagcggtggtgg

SEQ ID NO: 1658314 - DNA, 25 bp, Homo sapien
catctacccgcccagttccatactg

SEQ ID NO: 1658315 - DNA, 25 bp, Homo sapien
gaaggagctggaggcattgggattg

SEQ ID NO: 1658316 - DNA, 25 bp, Homo sapien
tacccgcccagttccatactgaatg

SEQ ID NO: 1658317 - DNA, 25 bp, Homo sapien
taaccttctgacctttgagggtgtc

SEQ ID NO: 1658318 - DNA, 25 bp, Homo sapien
cctttgagggtgtcagaaaagaaca

SEQ ID NO: 1658319 - DNA, 25 bp, Homo sapien
ggagctttccgaatgccttctgccc

SEQ ID NO: 1658320 - DNA, 25 bp, Homo sapien
ggaggggagctttccgaatgccttc

SEQ ID NO: 1658321 - DNA, 25 bp, Homo sapien
tcagccttattctcccacatagaag

SEQ ID NO: 1658322 - DNA, 25 bp, Homo sapien
ccttattctcccacatagaagctca

SEQ ID NO: 1658323 - DNA, 25 bp, Homo sapien
cagccttattctcccacatagaagc

SEQ ID NO: 1658324 - DNA, 25 bp, Homo sapien
attcagccttattctcccacataga

SEQ ID NO: 1658325 - DNA, 25 bp, Homo sapien
tggcatctcctggacgggacccaga

SEQ ID NO: 1658326 - DNA, 25 bp, Homo sapien
cagtgtcaaaggcaacagtgaagtt

SEQ ID NO: 1658327 - DNA, 25 bp, Homo sapien
gtgaagttttgtggaggcgttccca

SEQ ID NO: 1658328 - DNA, 25 bp, Homo sapien
caaaggcaacagtgaagttttgtgg

SEQ ID NO: 1658329 - DNA, 25 bp, Homo sapien
tggagagaggtaccgaggcaggctt

SEQ ID NO: 1658330 - DNA, 25 bp, Homo sapien
ccagggtggacttgacgaagaggga

SEQ ID NO: 1658331 - DNA, 25 bp, Homo sapien
tccaggaatttggagagaggtaccg

SEQ ID NO: 1658332 - DNA, 25 bp, Homo sapien
agggtggacttgacgaagagggatc

SEQ ID NO: 1658333 - DNA, 25 bp, Homo sapien
ccttcctggagaccctctaaaatag

SEQ ID NO: 1658334 - DNA, 25 bp, Homo sapien
ctgtagggtatgaagatgatgagaa

SEQ ID NO: 1658335 - DNA, 25 bp, Homo sapien
cctggagaccctctaaaatagactt

SEQ ID NO: 1658336 - DNA, 25 bp, Homo sapien
gatgagaattaggaagccgcccttc

SEQ ID NO: 1658337 - DNA, 25 bp, Homo sapien
ggaatatgatgacaaattcaacatt

SEQ ID NO: 1658338 - DNA, 25 bp, Homo sapien
aatggaatatgatgacaaattcaac

SEQ ID NO: 1658339 - DNA, 25 bp, Homo sapien
ccaaatggaatatgatgacaaattc

SEQ ID NO: 1658340 - DNA, 25 bp, Homo sapien
caaatggaatatgatgacaaattca

SEQ ID NO: 1658341 - DNA, 25 bp, Homo sapien
cccttgcggaaaaacgtaagcatca

SEQ ID NO: 1658342 - DNA, 25 bp, Homo sapien
tttgcagaagccctcggatggtggc

SEQ ID NO: 1658343 - DNA, 25 bp, Homo sapien
gaaaccatgatgacagatatcccca

SEQ ID NO: 1658344 - DNA, 25 bp, Homo sapien
gggaaaccctagcacagaaaccatg

SEQ ID NO: 1658345 - DNA, 25 bp, Homo sapien
tacatctggcctagattccctttag

SEQ ID NO: 1658346 - DNA, 25 bp, Homo sapien
tcaggctcagtgtttgccaagccca

SEQ ID NO: 1658347 - DNA, 25 bp, Homo sapien
gactcagagggctggttcaaattca

SEQ ID NO: 1658348 - DNA, 25 bp, Homo sapien
gaaatagcacgcagggtttgaccct

SEQ ID NO: 1658349 - DNA, 25 bp, Homo sapien
cccagcaggctccacattcagcaga

SEQ ID NO: 1658350 - DNA, 25 bp, Homo sapien
agcaggctccacattcagcagaggc

SEQ ID NO: 1658351 - DNA, 25 bp, Homo sapien
cggatcagtgtggccccagcaggct

SEQ ID NO: 1658352 - DNA, 25 bp, Homo sapien
gccccagcaggctccacattcagca

SEQ ID NO: 1658353 - DNA, 25 bp, Homo sapien
ttatgcccaagtggcgggcccatag

SEQ ID NO: 1658354 - DNA, 25 bp, Homo sapien
gcgggcccatagtattgtataattc

SEQ ID NO: 1658355 - DNA, 25 bp, Homo sapien
cagggaatcctaagagtttgttgtt

SEQ ID NO: 1658356 - DNA, 25 bp, Homo sapien
tagacagggaatcctaagagtttgt

SEQ ID NO: 1658357 - DNA, 25 bp, Homo sapien
ttttactgggtagcaggacctccgc

SEQ ID NO: 1658358 - DNA, 25 bp, Homo sapien
aatagtggatttttactgggtagca

SEQ ID NO: 1658359 - DNA, 25 bp, Homo sapien
tgggtagcaggacctccgcgaccac

SEQ ID NO: 1658360 - DNA, 25 bp, Homo sapien
tggatttttactgggtagcaggacc

SEQ ID NO: 1658361 - DNA, 25 bp, Homo sapien
tctccccatccgaggtccgctccgc

SEQ ID NO: 1658362 - DNA, 25 bp, Homo sapien
cccatccgaggtccgctccgcgagt

SEQ ID NO: 1658363 - DNA, 25 bp, Homo sapien
tccccatccgaggtccgctccgcga

SEQ ID NO: 1658364 - DNA, 25 bp, Homo sapien
atccgaggtccgctccgcgagtgcg

SEQ ID NO: 1658365 - DNA, 25 bp, Homo sapien
atgtccccgcggtcgaagacggcca

SEQ ID NO: 1658366 - DNA, 25 bp, Homo sapien
agggcctggaaaccggacaagcaga

SEQ ID NO: 1658367 - DNA, 25 bp, Homo sapien
tccccaagaagacgtcaccgaggat

SEQ ID NO: 1658368 - DNA, 25 bp, Homo sapien
agaggcggacgccatttcgagtagt

SEQ ID NO: 1658369 - DNA, 25 bp, Homo sapien
tgcaaggcaacaagacgacaactgg

SEQ ID NO: 1658370 - DNA, 25 bp, Homo sapien
caaggacggccatttgcctgggagc

SEQ ID NO: 1658371 - DNA, 25 bp, Homo sapien
cgggttctttgatgttcgccaacaa

SEQ ID NO: 1658372 - DNA, 25 bp, Homo sapien
cactatggcgtcatggtgatggcca

SEQ ID NO: 1658373 - DNA, 25 bp, Homo sapien
ctggatgacgtaatcatgggccgtg

SEQ ID NO: 1658374 - DNA, 25 bp, Homo sapien
gctttgggatttccgagcacaggat

SEQ ID NO: 1658375 - DNA, 25 bp, Homo sapien
ggagctttgggatttccgagcacag

SEQ ID NO: 1658376 - DNA, 25 bp, Homo sapien
catgggccgtgaggttaaaccagac

SEQ ID NO: 1658377 - DNA, 25 bp, Homo sapien
tatctgtcacgaagtccagtgcctg

SEQ ID NO: 1658378 - DNA, 25 bp, Homo sapien
gacttacgcagtcccaagcaaacct

SEQ ID NO: 1658379 - DNA, 25 bp, Homo sapien
tccgcagagtcgcagtgtagacacg

SEQ ID NO: 1658380 - DNA, 25 bp, Homo sapien
ggtaatttccctattgagcacctgg

SEQ ID NO: 1658381 - DNA, 25 bp, Homo sapien
gatgagggacgtgcccgtatccagg

SEQ ID NO: 1658382 - DNA, 25 bp, Homo sapien
tgagggacgtgcccgtatccaggat

SEQ ID NO: 1658383 - DNA, 25 bp, Homo sapien
ctcctcagtgggtcctgtgatgagg

SEQ ID NO: 1658384 - DNA, 25 bp, Homo sapien
gcccggatctcctcagtgggtcctg

SEQ ID NO: 1658385 - DNA, 25 bp, Homo sapien
agagccaggagaccaagtccctcac

SEQ ID NO: 1658386 - DNA, 25 bp, Homo sapien
gcagggtcctaggagtccaggcccc

SEQ ID NO: 1658387 - DNA, 25 bp, Homo sapien
gcagtcatcagaggcagggtcctag

SEQ ID NO: 1658388 - DNA, 25 bp, Homo sapien
aaggaggcagtcatcagaggcaggg

SEQ ID NO: 1658389 - DNA, 25 bp, Homo sapien
tccatgtggatctgccagtaggcag

SEQ ID NO: 1658390 - DNA, 25 bp, Homo sapien
gggatgtagtgtgccgggtccgagc

SEQ ID NO: 1658391 - DNA, 25 bp, Homo sapien
atgtagtgtgccgggtccgagcccc

SEQ ID NO: 1658392 - DNA, 25 bp, Homo sapien
ccatgtggatctgccagtaggcagg

SEQ ID NO: 1658393 - DNA, 25 bp, Homo sapien
aaatgggcaaaagcgaagaccaggc

SEQ ID NO: 1658394 - DNA, 25 bp, Homo sapien
gagagcctccccgaaaatcactgat

SEQ ID NO: 1658395 - DNA, 25 bp, Homo sapien
gaggcccaatatcccatcaaaatgg

SEQ ID NO: 1658396 - DNA, 25 bp, Homo sapien
aaaaccgaggcccaatatcccatca

SEQ ID NO: 1658397 - DNA, 25 bp, Homo sapien
cctaggaaactatgcctcttgagaa

SEQ ID NO: 1658398 - DNA, 25 bp, Homo sapien
ggacttctggatgcaagccccaact

SEQ ID NO: 1658399 - DNA, 25 bp, Homo sapien
tttgggaggacaataaccacatgtc

SEQ ID NO: 1658400 - DNA, 25 bp, Homo sapien
tcgagcctcttcctaagccagatga

SEQ ID NO: 1658401 - DNA, 25 bp, Homo sapien
tgaatggcaaacttggtcccattgg

SEQ ID NO: 1658402 - DNA, 25 bp, Homo sapien
atctacccgcccagttccatattga

SEQ ID NO: 1658403 - DNA, 25 bp, Homo sapien
cttggtcccattggcctggaaggag

SEQ ID NO: 1658404 - DNA, 25 bp, Homo sapien
tctacccgcccagttccatattgaa

SEQ ID NO: 1658405 - DNA, 25 bp, Homo sapien
ctttgggatcaaatcggtggtgtaa

SEQ ID NO: 1658406 - DNA, 25 bp, Homo sapien
ttgggatcaaatcggtggtgtaacc

SEQ ID NO: 1658407 - DNA, 25 bp, Homo sapien
tttgggatcaaatcggtggtgtaac

SEQ ID NO: 1658408 - DNA, 25 bp, Homo sapien
ctgagaagctgaggtccagccccgc

SEQ ID NO: 1658409 - DNA, 25 bp, Homo sapien
ctaggttagaggtcagaaaggtgtc

SEQ ID NO: 1658410 - DNA, 25 bp, Homo sapien
ctgtgagggcatgataaaagaacag

SEQ ID NO: 1658411 - DNA, 25 bp, Homo sapien
ttagaggtcagaaaggtgtcatggg

SEQ ID NO: 1658412 - DNA, 25 bp, Homo sapien
tggcatctcctggacgggacccaga

SEQ ID NO: 1658413 - DNA, 25 bp, Homo sapien
gtgaagttttgtggaggcgttccca

SEQ ID NO: 1658414 - DNA, 25 bp, Homo sapien
cagtgtcaaaggcaacagtgaagtt

SEQ ID NO: 1658415 - DNA, 25 bp, Homo sapien
caaaggcaacagtgaagttttgtgg

SEQ ID NO: 1658416 - DNA, 25 bp, Homo sapien
agtaaacgaagagtttggctcaagg

SEQ ID NO: 1658417 - DNA, 25 bp, Homo sapien
tagcaaaagaggagagtaaacgaag

SEQ ID NO: 1658418 - DNA, 25 bp, Homo sapien
ggagagtaaacgaagagtttggctc

SEQ ID NO: 1658419 - DNA, 25 bp, Homo sapien
caaaagaggagagtaaacgaagagt

SEQ ID NO: 1658420 - DNA, 25 bp, Homo sapien
ccctgtagttcgagagaggtacgaa

SEQ ID NO: 1658421 - DNA, 25 bp, Homo sapien
ccctcagtaggttcaggatcctgcg

SEQ ID NO: 1658422 - DNA, 25 bp, Homo sapien
cctgcgtccaggttggactcgatga

SEQ ID NO: 1658423 - DNA, 25 bp, Homo sapien
gaggtacgaagatgggcttgtcccc

SEQ ID NO: 1658424 - DNA, 25 bp, Homo sapien
tcttggagaacctctaaatagactt

SEQ ID NO: 1658425 - DNA, 25 bp, Homo sapien
gaggatattgacaggaagctgccct

SEQ ID NO: 1658426 - DNA, 25 bp, Homo sapien
ctgcccttcttggagaacctctaaa

SEQ ID NO: 1658427 - DNA, 25 bp, Homo sapien
ggaaagaggatattgacaggaagct

SEQ ID NO: 1658428 - DNA, 25 bp, Homo sapien
caaacagacctttccatgtccaaat

SEQ ID NO: 1658429 - DNA, 25 bp, Homo sapien
tgcaataacaacctccagaaaagcc

SEQ ID NO: 1658430 - DNA, 25 bp, Homo sapien
tctccaaggcactacaatagtagtc

SEQ ID NO: 1658431 - DNA, 25 bp, Homo sapien
atcaaagatgccatgatgacaaata

SEQ ID NO: 1658432 - DNA, 25 bp, Homo sapien
cagttcgtgaggttagggactattt

SEQ ID NO: 1658433 - DNA, 25 bp, Homo sapien
gccactatgccctgtccgggttcct

SEQ ID NO: 1658434 - DNA, 25 bp, Homo sapien
gagaaaaatgtaagcgtcaaatctt

SEQ ID NO: 1658435 - DNA, 25 bp, Homo sapien
tgggtggtggcccctgcatgcttca

SEQ ID NO: 1658436 - DNA, 25 bp, Homo sapien
tgtggccccggaaggctccacattc

SEQ ID NO: 1658437 - DNA, 25 bp, Homo sapien
cggaaggctccacattcagcagagg

SEQ ID NO: 1658438 - DNA, 25 bp, Homo sapien
gatcagtgtggccccggaaggctcc

SEQ ID NO: 1658439 - DNA, 25 bp, Homo sapien
cccggaaggctccacattcagcaga

SEQ ID NO: 1658440 - DNA, 25 bp, Homo sapien
gacgcagtgggacaaggatgttttt

SEQ ID NO: 1658441 - DNA, 25 bp, Homo sapien
tgttttttgaagatttgtgcagagt

SEQ ID NO: 1658442 - DNA, 25 bp, Homo sapien
cacctccaggtttagaaggagacca

SEQ ID NO: 1658443 - DNA, 25 bp, Homo sapien
aatctgtccgcaggtgacgcagtgg

SEQ ID NO: 1658444 - DNA, 25 bp, Homo sapien
ggaggacgaagaaaagcagagcaag

SEQ ID NO: 1658445 - DNA, 25 bp, Homo sapien
aggaggacgaagaaaagcagagcaa

SEQ ID NO: 1658446 - DNA, 25 bp, Homo sapien
gaggacgaagaaaagcagagcaagg

SEQ ID NO: 1658447 - DNA, 25 bp, Homo sapien
agttcactccgcgagaggccgtcca

SEQ ID NO: 1658448 - DNA, 25 bp, Homo sapien
gggcaacaggagtagttcactccgc

SEQ ID NO: 1658449 - DNA, 25 bp, Homo sapien
caggagtagttcactccgcgagagg

SEQ ID NO: 1658450 - DNA, 25 bp, Homo sapien
cgcctcccgcggctgtttccagggc

SEQ ID NO: 1658451 - DNA, 25 bp, Homo sapien
tctcctaccacgagttccctggata

SEQ ID NO: 1658452 - DNA, 25 bp, Homo sapien
cctctcctaccacgagttccctgga

SEQ ID NO: 1658453 - DNA, 25 bp, Homo sapien
tgtcctctcctaccacgagttccct

SEQ ID NO: 1658454 - DNA, 25 bp, Homo sapien
gctgctccgtgaccccaccatgtcc

SEQ ID NO: 1658455 - DNA, 25 bp, Homo sapien
tacaacgtgctcagctgcgaaggct

SEQ ID NO: 1658456 - DNA, 25 bp, Homo sapien
gatgctgggccacgagctttgccgt

SEQ ID NO: 1658457 - DNA, 25 bp, Homo sapien
cagagcgcaagcgaaagaagggccc

SEQ ID NO: 1658458 - DNA, 25 bp, Homo sapien
gatggacgctttcatgcggcgcaag

SEQ ID NO: 1658459 - DNA, 25 bp, Homo sapien
taatgatccagcagttggtggcggc

SEQ ID NO: 1658460 - DNA, 25 bp, Homo sapien
caggagtcacagtcacagtcgcagt

SEQ ID NO: 1658461 - DNA, 25 bp, Homo sapien
aactgcagtgcaacaaacgctcctt

SEQ ID NO: 1658462 - DNA, 25 bp, Homo sapien
gggtgtccagctaacagcggctcaa

SEQ ID NO: 1658463 - DNA, 25 bp, Homo sapien
gagatgcccgccagcaacgctttgc

SEQ ID NO: 1658464 - DNA, 25 bp, Homo sapien
caggagatcgtggacttcgctaagc

SEQ ID NO: 1658465 - DNA, 25 bp, Homo sapien
ggagctggccatcatctcagtccag

SEQ ID NO: 1658466 - DNA, 25 bp, Homo sapien
gggaggaccagatcgccctcctgaa

SEQ ID NO: 1658467 - DNA, 25 bp, Homo sapien
gagacagagtgtatcaccttcttga

SEQ ID NO: 1658468 - DNA, 25 bp, Homo sapien
tagagacagccaggcgctacaacca

SEQ ID NO: 1658469 - DNA, 25 bp, Homo sapien
agcaaggacgacttccaccgtgcag

SEQ ID NO: 1658470 - DNA, 25 bp, Homo sapien
aggcgctacaaccacgagacagagt

SEQ ID NO: 1658471 - DNA, 25 bp, Homo sapien
tggaggcgttgcagcagccctacgt

SEQ ID NO: 1658472 - DNA, 25 bp, Homo sapien
tgcaggtggagttcatcaaccccat

SEQ ID NO: 1658473 - DNA, 25 bp, Homo sapien
acgacgctgagtacgccctgctcat

SEQ ID NO: 1658474 - DNA, 25 bp, Homo sapien
aaccccatcttcgagttctcgcggg

SEQ ID NO: 1658475 - DNA, 25 bp, Homo sapien
ttcccgcgcatgctcatgaagctgg

SEQ ID NO: 1658476 - DNA, 25 bp, Homo sapien
aggtcttcgccttgcggctccagga

SEQ ID NO: 1658477 - DNA, 25 bp, Homo sapien
cggagcaggtcttcgccttgcggct

SEQ ID NO: 1658478 - DNA, 25 bp, Homo sapien
tgagctctgtgcactcggagcaggt

SEQ ID NO: 1658479 - DNA, 25 bp, Homo sapien
tgggccgagcctgtagacctatcgg

SEQ ID NO: 1658480 - DNA, 25 bp, Homo sapien
acctatcggctctcatcccttggga

SEQ ID NO: 1658481 - DNA, 25 bp, Homo sapien
tgggataagccccagtccaggtcca

SEQ ID NO: 1658482 - DNA, 25 bp, Homo sapien
cacgcagtgcaccttgaacagaggg

SEQ ID NO: 1658483 - DNA, 25 bp, Homo sapien
gaacagggatgtccgcctgcagaac

SEQ ID NO: 1658484 - DNA, 25 bp, Homo sapien
cagcagtcagctcttaagaacaggg

SEQ ID NO: 1658485 - DNA, 25 bp, Homo sapien
gattcttatttagatctgccacgtg

SEQ ID NO: 1658486 - DNA, 25 bp, Homo sapien
tgcagtttaacatgagacagtgacg

SEQ ID NO: 1658487 - DNA, 25 bp, Homo sapien
tctgggagccaccaatgtacgatgg

SEQ ID NO: 1658488 - DNA, 25 bp, Homo sapien
ttggagaggattgggccatccttgt

SEQ ID NO: 1658489 - DNA, 25 bp, Homo sapien
gctgtgcgcatcacctcggttggag

SEQ ID NO: 1658490 - DNA, 25 bp, Homo sapien
gtctgggagccaccaatgtacgatg

SEQ ID NO: 1658491 - DNA, 25 bp, Homo sapien
gggtttaacatcctagtccacagag

SEQ ID NO: 1658492 - DNA, 25 bp, Homo sapien
ctgagctgcgtgtccaggatggtct

SEQ ID NO: 1658493 - DNA, 25 bp, Homo sapien
cagaagggcatgtaacgaaaagcag

SEQ ID NO: 1658494 - DNA, 25 bp, Homo sapien
gacgtttcagaacccagcttgttag

SEQ ID NO: 1658495 - DNA, 25 bp, Homo sapien
taatatctcatctgcccggccctga

SEQ ID NO: 1658496 - DNA, 25 bp, Homo sapien
gttcttaatggactgacctttatta

SEQ ID NO: 1658497 - DNA, 25 bp, Homo sapien
tcttaatggactgacctttattaac

SEQ ID NO: 1658498 - DNA, 25 bp, Homo sapien
ctttaatatctcatctgcccggccc

SEQ ID NO: 1658499 - DNA, 25 bp, Homo sapien
agtccccagagttcagaggtcttgg

SEQ ID NO: 1658500 - DNA, 25 bp, Homo sapien
aaggatgctggaagactcagagtcc

SEQ ID NO: 1658501 - DNA, 25 bp, Homo sapien
cattcggtgaccttgaaggatgctg

SEQ ID NO: 1658502 - DNA, 25 bp, Homo sapien
tctctggtcattcggtgaccttgaa

SEQ ID NO: 1658503 - DNA, 25 bp, Homo sapien
catcaccctccccatctacatcctc

SEQ ID NO: 1658504 - DNA, 25 bp, Homo sapien
catcatcaccctccccatctacatc

SEQ ID NO: 1658505 - DNA, 25 bp, Homo sapien
tgggcctccacctcatcatcatcac

SEQ ID NO: 1658506 - DNA, 25 bp, Homo sapien
atcatcatcaccctccccatctaca

SEQ ID NO: 1658507 - DNA, 25 bp, Homo sapien
agcagagaggaagcgcaggcggtag

SEQ ID NO: 1658508 - DNA, 25 bp, Homo sapien
gcagagaggaagcgcaggcggtaga

SEQ ID NO: 1658509 - DNA, 25 bp, Homo sapien
cgaactctcggtctcgggtcttgag

SEQ ID NO: 1658510 - DNA, 25 bp, Homo sapien
gccgaactctcggtctcgggtcttg

SEQ ID NO: 1658511 - DNA, 25 bp, Homo sapien
aactctcggtctcgggtcttgagtg

SEQ ID NO: 1658512 - DNA, 25 bp, Homo sapien
tggccgaactctcggtctcgggtct

SEQ ID NO: 1658513 - DNA, 25 bp, Homo sapien
cgtggacaaagagctggacgaactt

SEQ ID NO: 1658514 - DNA, 25 bp, Homo sapien
tcaacttgacctcgagctgacaccg

SEQ ID NO: 1658515 - DNA, 25 bp, Homo sapien
gacaccggcttttgtcgtggacaaa

SEQ ID NO: 1658516 - DNA, 25 bp, Homo sapien
aaggtgcggctggtgttcaacttga

SEQ ID NO: 1658517 - DNA, 25 bp, Homo sapien
acccccatggtgacctcgttggcaa

SEQ ID NO: 1658518 - DNA, 25 bp, Homo sapien
ccccatggtgacctcgttggcaact

SEQ ID NO: 1658519 - DNA, 25 bp, Homo sapien
tggtgacctcgttggcaacttctcc

SEQ ID NO: 1658520 - DNA, 25 bp, Homo sapien
catggtgacctcgttggcaacttct

SEQ ID NO: 1658521 - DNA, 25 bp, Homo sapien
cagaggtcggggcaggatagatgtc

SEQ ID NO: 1658522 - DNA, 25 bp, Homo sapien
tcggggcaggatagatgtcggggca

SEQ ID NO: 1658523 - DNA, 25 bp, Homo sapien
aggtcggggcaggatagatgtcggg

SEQ ID NO: 1658524 - DNA, 25 bp, Homo sapien
gaggtcggggcaggatagatgtcgg

SEQ ID NO: 1658525 - DNA, 25 bp, Homo sapien
caaagatggggaagtcccgaaactg

SEQ ID NO: 1658526 - DNA, 25 bp, Homo sapien
tcgaattcgccgctctggaggtagc

SEQ ID NO: 1658527 - DNA, 25 bp, Homo sapien
gaggtagcgttggagccgtctggga

SEQ ID NO: 1658528 - DNA, 25 bp, Homo sapien
gagccgtctgggacggcccgtggga

SEQ ID NO: 1658529 - DNA, 25 bp, Homo sapien
ggactacgcgcactgtgacgtcatg

SEQ ID NO: 1658530 - DNA, 25 bp, Homo sapien
cactgtgacgtcatgatgcggagcg

SEQ ID NO: 1658531 - DNA, 25 bp, Homo sapien
tcattgcaatgtccccgtccgacgg

SEQ ID NO: 1658532 - DNA, 25 bp, Homo sapien
ttagggccgcgatcccgcctcattg

SEQ ID NO: 1658533 - DNA, 25 bp, Homo sapien
tatgacgtcacacaagagcgggctc

SEQ ID NO: 1658534 - DNA, 25 bp, Homo sapien
gctcctgatttgtgatgacgtccct

SEQ ID NO: 1658535 - DNA, 25 bp, Homo sapien
cgggctcctgatttgtgatgacgtc

SEQ ID NO: 1658536 - DNA, 25 bp, Homo sapien
aagagcgggctcctgatttgtgatg

SEQ ID NO: 1658537 - DNA, 25 bp, Homo sapien
acagccgtcccttcgctggtgggaa

SEQ ID NO: 1658538 - DNA, 25 bp, Homo sapien
tctttagctgtgcatagcgggcgcg

SEQ ID NO: 1658539 - DNA, 25 bp, Homo sapien
tacggatgtcgcaggtcttgggtct

SEQ ID NO: 1658540 - DNA, 25 bp, Homo sapien
cctgctcttgctgatggcggtagca

SEQ ID NO: 1658541 - DNA, 25 bp, Homo sapien
aagctggtggctatgtctcctcctt

SEQ ID NO: 1658542 - DNA, 25 bp, Homo sapien
gacccggggccctggatggcctgga

SEQ ID NO: 1658543 - DNA, 25 bp, Homo sapien
gccctggatggcctggaagctggtg

SEQ ID NO: 1658544 - DNA, 25 bp, Homo sapien
ggaagctggtggctatgtctcctcc

SEQ ID NO: 1658545 - DNA, 25 bp, Homo sapien
caagaagggtttgctggtccctcct

SEQ ID NO: 1658546 - DNA, 25 bp, Homo sapien
ggcctttggcacagcagccggtgtc

SEQ ID NO: 1658547 - DNA, 25 bp, Homo sapien
acagcagccggtgtctcctgcgccc

SEQ ID NO: 1658548 - DNA, 25 bp, Homo sapien
ccatcccaagaagggtttgctggtc

SEQ ID NO: 1658549 - DNA, 25 bp, Homo sapien
ttctgggcccgacgcctagtgcagc

SEQ ID NO: 1658550 - DNA, 25 bp, Homo sapien
tcggggctggatggccgggggcttc

SEQ ID NO: 1658551 - DNA, 25 bp, Homo sapien
cccgacgcctagtgcagcccctggg

SEQ ID NO: 1658552 - DNA, 25 bp, Homo sapien
gcttctgggcccgacgcctagtgca

SEQ ID NO: 1658553 - DNA, 25 bp, Homo sapien
cagttagtggagtcaaagcccagac

SEQ ID NO: 1658554 - DNA, 25 bp, Homo sapien
gagtcaaagcccagacactgtaaat

SEQ ID NO: 1658555 - DNA, 25 bp, Homo sapien
cagcatcctacctggactgcggtgc

SEQ ID NO: 1658556 - DNA, 25 bp, Homo sapien
ccagcatcctacctggactgcggtg

SEQ ID NO: 1658557 - DNA, 25 bp, Homo sapien
gacggtcctgatgtacaagcttgat

SEQ ID NO: 1658558 - DNA, 25 bp, Homo sapien
tgtgaacgttttgaaaagctacagc

SEQ ID NO: 1658559 - DNA, 25 bp, Homo sapien
tattcagaaacccaaggaatggctg

SEQ ID NO: 1658560 - DNA, 25 bp, Homo sapien
tgaaattcactgctcacttgatacg

SEQ ID NO: 1658561 - DNA, 25 bp, Homo sapien
tccagtcagcaaggcacaacaatgt

SEQ ID NO: 1658562 - DNA, 25 bp, Homo sapien
cattctcggtgtctcatatagctgg

SEQ ID NO: 1658563 - DNA, 25 bp, Homo sapien
ggaaatgcaatctcccaaacaggtt

SEQ ID NO: 1658564 - DNA, 25 bp, Homo sapien
gcatttccatgggagccaatccacc

SEQ ID NO: 1658565 - DNA, 25 bp, Homo sapien
tctctgagcgtcgtctttgtttccg

SEQ ID NO: 1658566 - DNA, 25 bp, Homo sapien
gcctgtttgggcctcggtatggact

SEQ ID NO: 1658567 - DNA, 25 bp, Homo sapien
gctgtgtatctttaggcaagttgct

SEQ ID NO: 1658568 - DNA, 25 bp, Homo sapien
cagagttccggacagatggaaaagg

SEQ ID NO: 1658569 - DNA, 25 bp, Homo sapien
aaagcaaagcaagaccagactcctc

SEQ ID NO: 1658570 - DNA, 25 bp, Homo sapien
aaagagggaggaaacgccgagcact

SEQ ID NO: 1658571 - DNA, 25 bp, Homo sapien
taacactgtgtcaggtcattgccct

SEQ ID NO: 1658572 - DNA, 25 bp, Homo sapien
cagactcctcatccggtaacactgt

SEQ ID NO: 1658573 - DNA, 25 bp, Homo sapien
gaatgtgcaactgtggagacacgcg

SEQ ID NO: 1658574 - DNA, 25 bp, Homo sapien
gacacgcgagcttatggtcccagga

SEQ ID NO: 1658575 - DNA, 25 bp, Homo sapien
tttgtgacctcctgcgtgatggcgc

SEQ ID NO: 1658576 - DNA, 25 bp, Homo sapien
cagataatgagctgcagacggacgg

SEQ ID NO: 1658577 - DNA, 25 bp, Homo sapien
gcgccaggctcagacgagccggtgg

SEQ ID NO: 1658578 - DNA, 25 bp, Homo sapien
agaaatagagtgtgtcagagacaga

SEQ ID NO: 1658579 - DNA, 25 bp, Homo sapien
gccggtgggagcagagacgaggaga

SEQ ID NO: 1658580 - DNA, 25 bp, Homo sapien
caaggacaatgactggcagaggaac

SEQ ID NO: 1658581 - DNA, 25 bp, Homo sapien
tgtggacgggcacagtgagactggg

SEQ ID NO: 1658582 - DNA, 25 bp, Homo sapien
cagtcggttgctgtggacgggcaca

SEQ ID NO: 1658583 - DNA, 25 bp, Homo sapien
ttctgacacagtcggttgctgtgga

SEQ ID NO: 1658584 - DNA, 25 bp, Homo sapien
ggcccccttgtctccttctgacaca

SEQ ID NO: 1658585 - DNA, 25 bp, Homo sapien
gagtagccattgtcgtccacatatt

SEQ ID NO: 1658586 - DNA, 25 bp, Homo sapien
ggagggagtagccattgtcgtccac

SEQ ID NO: 1658587 - DNA, 25 bp, Homo sapien
ctgcagccccgcacggtgtagctgg

SEQ ID NO: 1658588 - DNA, 25 bp, Homo sapien
tgtcgtccacatatttttccaaggg

SEQ ID NO: 1658589 - DNA, 25 bp, Homo sapien
gcacacccgaggacggcacacccgt

SEQ ID NO: 1658590 - DNA, 25 bp, Homo sapien
ccgtggcgggagacggagtgtgtga

SEQ ID NO: 1658591 - DNA, 25 bp, Homo sapien
gaggacggcacacccgtggcgggag

SEQ ID NO: 1658592 - DNA, 25 bp, Homo sapien
acggcacacccgtggcgggagacgg

SEQ ID NO: 1658593 - DNA, 25 bp, Homo sapien
ccatgcttagcttattttaaaattt

SEQ ID NO: 1658594 - DNA, 25 bp, Homo sapien
ccaccatgcttagcttattttaaaa

SEQ ID NO: 1658595 - DNA, 25 bp, Homo sapien
caccaccatgcttagcttattttaa

SEQ ID NO: 1658596 - DNA, 25 bp, Homo sapien
gcaccaccatgcttagcttatttta

SEQ ID NO: 1658597 - DNA, 25 bp, Homo sapien
aggcatgcagtgtgcgcagccggag

SEQ ID NO: 1658598 - DNA, 25 bp, Homo sapien
tgtgggcgccgatggtcagccatgg

SEQ ID NO: 1658599 - DNA, 25 bp, Homo sapien
agccggagggggatgcgcagggact

SEQ ID NO: 1658600 - DNA, 25 bp, Homo sapien
tgcgcagggactgcgctgtgggcgc

SEQ ID NO: 1658601 - DNA, 25 bp, Homo sapien
ccacctccttggtcactaccagcag

SEQ ID NO: 1658602 - DNA, 25 bp, Homo sapien
tccacctccttggtcactaccagca

SEQ ID NO: 1658603 - DNA, 25 bp, Homo sapien
ctggcgcagggccacccagtgccgc

SEQ ID NO: 1658604 - DNA, 25 bp, Homo sapien
ggttgtagtagacaccgtccacctg

SEQ ID NO: 1658605 - DNA, 25 bp, Homo sapien
gccccagcgacacgggcgagggcag

SEQ ID NO: 1658606 - DNA, 25 bp, Homo sapien
gggcaggttcaggatcagccccagt

SEQ ID NO: 1658607 - DNA, 25 bp, Homo sapien
acccagaggtgttccttaatcagcc

SEQ ID NO: 1658608 - DNA, 25 bp, Homo sapien
agcccacccagaggtgttccttaat

SEQ ID NO: 1658609 - DNA, 25 bp, Homo sapien
cccgccggtgaaatgttgctgaaca

SEQ ID NO: 1658610 - DNA, 25 bp, Homo sapien
ctccgcccgccggtgaaatgttgct

SEQ ID NO: 1658611 - DNA, 25 bp, Homo sapien
tgatcacattgacatcatagttgcc

SEQ ID NO: 1658612 - DNA, 25 bp, Homo sapien
tgtcccaccacacggcggccaggcc

SEQ ID NO: 1658613 - DNA, 25 bp, Homo sapien
cagcccctgcagagcggccatgatc

SEQ ID NO: 1658614 - DNA, 25 bp, Homo sapien
atgatcacattgacatcatagttgc

SEQ ID NO: 1658615 - DNA, 25 bp, Homo sapien
gcgatgagggttcagccgggagtct

SEQ ID NO: 1658616 - DNA, 25 bp, Homo sapien
tgcgatgagggttcagccgggagtc

SEQ ID NO: 1658617 - DNA, 25 bp, Homo sapien
gcttcagaccccacaactcatccac

SEQ ID NO: 1658618 - DNA, 25 bp, Homo sapien
ggggccacaagttgcctcagccttt

SEQ ID NO: 1658619 - DNA, 25 bp, Homo sapien
gccacaagttgcctcagcctttgac

SEQ ID NO: 1658620 - DNA, 25 bp, Homo sapien
cacaagttgcctcagcctttgactc

SEQ ID NO: 1658621 - DNA, 25 bp, Homo sapien
gtgaactgagccacctcaacgatga

SEQ ID NO: 1658622 - DNA, 25 bp, Homo sapien
cagatgtcacgtcctctgagaggag

SEQ ID NO: 1658623 - DNA, 25 bp, Homo sapien
cccaatgccttggacaaagtccctg

SEQ ID NO: 1658624 - DNA, 25 bp, Homo sapien
agagtcccacaaggccctgcgtggt

SEQ ID NO: 1658625 - DNA, 25 bp, Homo sapien
gcttaggcaagtgagcgcggagcag

SEQ ID NO: 1658626 - DNA, 25 bp, Homo sapien
tgagcgcggagcagaagaaagcccc

SEQ ID NO: 1658627 - DNA, 25 bp, Homo sapien
acccaggtgggtcactccgccagag

SEQ ID NO: 1658628 - DNA, 25 bp, Homo sapien
agacccaggtgggtcactccgccag

SEQ ID NO: 1658629 - DNA, 25 bp, Homo sapien
ttgcagatctcatcggcagcctcct

SEQ ID NO: 1658630 - DNA, 25 bp, Homo sapien
caggcgctgccgttcgtggtacacg

SEQ ID NO: 1658631 - DNA, 25 bp, Homo sapien
ctgctgctgcagaacgttgttgagg

SEQ ID NO: 1658632 - DNA, 25 bp, Homo sapien
ctcttgcagatctcatcggcagcct

SEQ ID NO: 1658633 - DNA, 25 bp, Homo sapien
gggcgggcaacaccgcgctgactgg

SEQ ID NO: 1658634 - DNA, 25 bp, Homo sapien
gggactcctgctccacacggaacgc

SEQ ID NO: 1658635 - DNA, 25 bp, Homo sapien
tccaccgagccaggggtttccgcat

SEQ ID NO: 1658636 - DNA, 25 bp, Homo sapien
gggcaggcgggacggactacagctc

SEQ ID NO: 1658637 - DNA, 25 bp, Homo sapien
caggcagatgatcttgtctcgggag

SEQ ID NO: 1658638 - DNA, 25 bp, Homo sapien
tgatctttactgagtcagaagggag

SEQ ID NO: 1658639 - DNA, 25 bp, Homo sapien
tctttactgagtcagaagggagacc

SEQ ID NO: 1658640 - DNA, 25 bp, Homo sapien
tttactgagtcagaagggagaccct

SEQ ID NO: 1658641 - DNA, 25 bp, Homo sapien
ggcctggaggggagctggcagcagg

SEQ ID NO: 1658642 - DNA, 25 bp, Homo sapien
agcagagatggatccccggcctgga

SEQ ID NO: 1658643 - DNA, 25 bp, Homo sapien
tcagcagagatggatccccggcctg

SEQ ID NO: 1658644 - DNA, 25 bp, Homo sapien
ccggcctggaggggagctggcagca

SEQ ID NO: 1658645 - DNA, 25 bp, Homo sapien
aactgcagaactagtgagagcccgg

SEQ ID NO: 1658646 - DNA, 25 bp, Homo sapien
tgccaggattcaaagtcatggagag

SEQ ID NO: 1658647 - DNA, 25 bp, Homo sapien
ggcgggcacaaatggagacatctac

SEQ ID NO: 1658648 - DNA, 25 bp, Homo sapien
agagtctcgatcagaggcgggcaca

SEQ ID NO: 1658649 - DNA, 25 bp, Homo sapien
gcctggctcggcagggttctctctg

SEQ ID NO: 1658650 - DNA, 25 bp, Homo sapien
gcacagcaaagcttcggcccgtggg

SEQ ID NO: 1658651 - DNA, 25 bp, Homo sapien
tgccagaaggccgtgacggtggcgg

SEQ ID NO: 1658652 - DNA, 25 bp, Homo sapien
gtggcggagccggtgaccgcgcctg

SEQ ID NO: 1658653 - DNA, 25 bp, Homo sapien
gggcagtcagtctggagagcctgga

SEQ ID NO: 1658654 - DNA, 25 bp, Homo sapien
ccaacaccctgcttagctctgctca

SEQ ID NO: 1658655 - DNA, 25 bp, Homo sapien
gcagtcagtctggagagcctggact

SEQ ID NO: 1658656 - DNA, 25 bp, Homo sapien
caacaccctgcttagctctgctcac

SEQ ID NO: 1658657 - DNA, 25 bp, Homo sapien
gggccttcgtagagcacagtgcaag

SEQ ID NO: 1658658 - DNA, 25 bp, Homo sapien
gagcaccccaatcaccccatcgaag

SEQ ID NO: 1658659 - DNA, 25 bp, Homo sapien
ctcaagccggaagccatcggggtgt

SEQ ID NO: 1658660 - DNA, 25 bp, Homo sapien
aggggtccctcaagccggaagccat

SEQ ID NO: 1658661 - DNA, 25 bp, Homo sapien
ctcgggccacaaacacggcgtggtc

SEQ ID NO: 1658662 - DNA, 25 bp, Homo sapien
tgtggtctggtcacttagagctgag

SEQ ID NO: 1658663 - DNA, 25 bp, Homo sapien
agctgccgctctgtggtctggtcac

SEQ ID NO: 1658664 - DNA, 25 bp, Homo sapien
cagctgcatccaatctcctgatgtc

SEQ ID NO: 1658665 - DNA, 25 bp, Homo sapien
catggattattttgggatgggccac

SEQ ID NO: 1658666 - DNA, 25 bp, Homo sapien
tcatggattattttgggatgggcca

SEQ ID NO: 1658667 - DNA, 25 bp, Homo sapien
caggagattggcatggcgcaggatt

SEQ ID NO: 1658668 - DNA, 25 bp, Homo sapien
tggcgcaggatttgtgccccagatt

SEQ ID NO: 1658669 - DNA, 25 bp, Homo sapien
ttccccaagggcagcaaggttctgg

SEQ ID NO: 1658670 - DNA, 25 bp, Homo sapien
ccaagggcagcaaggttctggagct

SEQ ID NO: 1658671 - DNA, 25 bp, Homo sapien
gaagggggcacgctccctgccattc

SEQ ID NO: 1658672 - DNA, 25 bp, Homo sapien
agggggcacgctccctgccattcgt

SEQ ID NO: 1658673 - DNA, 25 bp, Homo sapien
gtccctgagccaagaggcgggagac

SEQ ID NO: 1658674 - DNA, 25 bp, Homo sapien
gtcacgattccagacaaaaacaagt

SEQ ID NO: 1658675 - DNA, 25 bp, Homo sapien
ggtcacgattccagacaaaaacaag

SEQ ID NO: 1658676 - DNA, 25 bp, Homo sapien
ccaagaggcgggagacgagggactg

SEQ ID NO: 1658677 - DNA, 25 bp, Homo sapien
tgtcggccatggccctgagtgcggt

SEQ ID NO: 1658678 - DNA, 25 bp, Homo sapien
ctccacgggcccctgtcggccatgg

SEQ ID NO: 1658679 - DNA, 25 bp, Homo sapien
gccatggccctgagtgcggtgtctg

SEQ ID NO: 1658680 - DNA, 25 bp, Homo sapien
catggccctgagtgcggtgtctggg

SEQ ID NO: 1658681 - DNA, 25 bp, Homo sapien
ggtgcctggcatcggaaatggcgca

SEQ ID NO: 1658682 - DNA, 25 bp, Homo sapien
cagtgtgacgttctcgctcccacgt

SEQ ID NO: 1658683 - DNA, 25 bp, Homo sapien
cgttccccagctcgcgtcagcccag

SEQ ID NO: 1658684 - DNA, 25 bp, Homo sapien
ccaggagaagccttcgaggcctgga

SEQ ID NO: 1658685 - DNA, 25 bp, Homo sapien
gagcaggtagtcgttgacgcaaacc

SEQ ID NO: 1658686 - DNA, 25 bp, Homo sapien
aaacgcggagaactcaggccacttc

SEQ ID NO: 1658687 - DNA, 25 bp, Homo sapien
ggttgctgctgtagtgcgccttgaa

SEQ ID NO: 1658688 - DNA, 25 bp, Homo sapien
aattccctgcgtggtcccagaaggt

SEQ ID NO: 1658689 - DNA, 25 bp, Homo sapien
acgttgatgatctccacggtgcgcg

SEQ ID NO: 1658690 - DNA, 25 bp, Homo sapien
catgacgtcgtccaggtccttgagg

SEQ ID NO: 1658691 - DNA, 25 bp, Homo sapien
tgcgcagcttgtagaaggccacgag

SEQ ID NO: 1658692 - DNA, 25 bp, Homo sapien
gggcgttctccgtcacatccgtgat

SEQ ID NO: 1658693 - DNA, 25 bp, Homo sapien
ctccacggtcaccgtggtgaagtag

SEQ ID NO: 1658694 - DNA, 25 bp, Homo sapien
gaagtaggtgtagccgccactgccc

SEQ ID NO: 1658695 - DNA, 25 bp, Homo sapien
gtgaagtaggtgtagccgccactgc

SEQ ID NO: 1658696 - DNA, 25 bp, Homo sapien
ccacggtcaccgtggtgaagtaggt

SEQ ID NO: 1658697 - DNA, 25 bp, Homo sapien
tggtgttgccggctgagttcgtcac

SEQ ID NO: 1658698 - DNA, 25 bp, Homo sapien
ggccgagacgttgagcgtggccgag

SEQ ID NO: 1658699 - DNA, 25 bp, Homo sapien
tggccgaggcggtggtgttgccggc

SEQ ID NO: 1658700 - DNA, 25 bp, Homo sapien
ggcggtggtgttgccggctgagttc

SEQ ID NO: 1658701 - DNA, 25 bp, Homo sapien
cagccatgccctcggtgacgttgag

SEQ ID NO: 1658702 - DNA, 25 bp, Homo sapien
caggtgaaatgcgactggtccagct

SEQ ID NO: 1658703 - DNA, 25 bp, Homo sapien
gaagttaagcgtgccgtcatgcagg

SEQ ID NO: 1658704 - DNA, 25 bp, Homo sapien
gtgcatgagccacagcttgcgcagg

SEQ ID NO: 1658705 - DNA, 25 bp, Homo sapien
ctggaaggagcccgggcggatcagg

SEQ ID NO: 1658706 - DNA, 25 bp, Homo sapien
ccgggcggatcaggtccagccggtt

SEQ ID NO: 1658707 - DNA, 25 bp, Homo sapien
aggtccagccggttgcccgacagct

SEQ ID NO: 1658708 - DNA, 25 bp, Homo sapien
ggagcccgggcggatcaggtccagc

SEQ ID NO: 1658709 - DNA, 25 bp, Homo sapien
caaaaagctccagcgtgttgaggct

SEQ ID NO: 1658710 - DNA, 25 bp, Homo sapien
cgagatgtattccagccgcttgagc

SEQ ID NO: 1658711 - DNA, 25 bp, Homo sapien
cgtggtcagccggttgtcaaaaagc

SEQ ID NO: 1658712 - DNA, 25 bp, Homo sapien
tgtccttgaggttgcacatgcccag

SEQ ID NO: 1658713 - DNA, 25 bp, Homo sapien
catgtgttttacacccagggcgtcc

SEQ ID NO: 1658714 - DNA, 25 bp, Homo sapien
tctttatggtggagcttcgaaatcc

SEQ ID NO: 1658715 - DNA, 25 bp, Homo sapien
agatgctgcgggtttactcggtgcc

SEQ ID NO: 1658716 - DNA, 25 bp, Homo sapien
gggcacctctcagtagcaacgcatg

SEQ ID NO: 1658717 - DNA, 25 bp, Homo sapien
catcctttcccgcagaaaatcaggg

SEQ ID NO: 1658718 - DNA, 25 bp, Homo sapien
tttcccgcagaaaatcagggccgcc

SEQ ID NO: 1658719 - DNA, 25 bp, Homo sapien
cctttcccgcagaaaatcagggccg

SEQ ID NO: 1658720 - DNA, 25 bp, Homo sapien
cctgtcctccgactccctgttccag

SEQ ID NO: 1658721 - DNA, 25 bp, Homo sapien
tttatacccacagatcccctgtccc

SEQ ID NO: 1658722 - DNA, 25 bp, Homo sapien
tgtttatacccacagatcccctgtc

SEQ ID NO: 1658723 - DNA, 25 bp, Homo sapien
gtttatacccacagatcccctgtcc

SEQ ID NO: 1658724 - DNA, 25 bp, Homo sapien
tgataaagcaggcactcggttgcta

SEQ ID NO: 1658725 - DNA, 25 bp, Homo sapien
taaagcaggcactcggttgctattt

SEQ ID NO: 1658726 - DNA, 25 bp, Homo sapien
gataaagcaggcactcggttgctat

SEQ ID NO: 1658727 - DNA, 25 bp, Homo sapien
attgataaagcaggcactcggttgc

SEQ ID NO: 1658728 - DNA, 25 bp, Homo sapien
aggaccgtgacaacagcgtggccac

SEQ ID NO: 1658729 - DNA, 25 bp, Homo sapien
tgacaacagcgtggccacaggcgga

SEQ ID NO: 1658730 - DNA, 25 bp, Homo sapien
cagcgtggccacaggcggacagcct

SEQ ID NO: 1658731 - DNA, 25 bp, Homo sapien
acagaggaccgtgacaacagcgtgg

SEQ ID NO: 1658732 - DNA, 25 bp, Homo sapien
catccactctcgtggactggacgaa

SEQ ID NO: 1658733 - DNA, 25 bp, Homo sapien
tggactggacgaacacaccctccat

SEQ ID NO: 1658734 - DNA, 25 bp, Homo sapien
ctctcgtggactggacgaacacacc

SEQ ID NO: 1658735 - DNA, 25 bp, Homo sapien
aagcatccactctcgtggactggac

SEQ ID NO: 1658736 - DNA, 25 bp, Homo sapien
tctccgtgtgcagatcacccggctg

SEQ ID NO: 1658737 - DNA, 25 bp, Homo sapien
ctggatgccgttctcttgcaggttc

SEQ ID NO: 1658738 - DNA, 25 bp, Homo sapien
tcaggtaccgcgtgttgaccgggat

SEQ ID NO: 1658739 - DNA, 25 bp, Homo sapien
cgtgtgcagatcacccggctggcct

SEQ ID NO: 1658740 - DNA, 25 bp, Homo sapien
ggcggcagacgtcacggccactcca

SEQ ID NO: 1658741 - DNA, 25 bp, Homo sapien
cagaggaagagcaatgccccgtggg

SEQ ID NO: 1658742 - DNA, 25 bp, Homo sapien
tccggcggcagacgtcacggccact

SEQ ID NO: 1658743 - DNA, 25 bp, Homo sapien
cccctccggcggcagacgtcacggc

SEQ ID NO: 1658744 - DNA, 25 bp, Homo sapien
cagcggggggcacggggagccgcgg

SEQ ID NO: 1658745 - DNA, 25 bp, Homo sapien
acggggagccgcgggcacgcgccat

SEQ ID NO: 1658746 - DNA, 25 bp, Homo sapien
ggcggcagcggggggcacggggagc

SEQ ID NO: 1658747 - DNA, 25 bp, Homo sapien
ggggcacggggagccgcgggcacgc

SEQ ID NO: 1658748 - DNA, 25 bp, Homo sapien
tcaatgttcatgctccgcgtggacg

SEQ ID NO: 1658749 - DNA, 25 bp, Homo sapien
cctcaatgttcatgctccgcgtgga

SEQ ID NO: 1658750 - DNA, 25 bp, Homo sapien
aatgttcatgctccgcgtggacgct

SEQ ID NO: 1658751 - DNA, 25 bp, Homo sapien
tgttcatgctccgcgtggacgctgg

SEQ ID NO: 1658752 - DNA, 25 bp, Homo sapien
aagaccctggcgatgatccagccca

SEQ ID NO: 1658753 - DNA, 25 bp, Homo sapien
ttaagaccctggcgatgatccagcc

SEQ ID NO: 1658754 - DNA, 25 bp, Homo sapien
ctcttaagaccctggcgatgatcca

SEQ ID NO: 1658755 - DNA, 25 bp, Homo sapien
cgcagggcctggatttgaggccggg

SEQ ID NO: 1658756 - DNA, 25 bp, Homo sapien
cttggcttccgctgggcctctccct

SEQ ID NO: 1658757 - DNA, 25 bp, Homo sapien
ttggcttccgctgggcctctccctg

SEQ ID NO: 1658758 - DNA, 25 bp, Homo sapien
cctggtggcttggcttccgctgggc

SEQ ID NO: 1658759 - DNA, 25 bp, Homo sapien
gtggcttggcttccgctgggcctct

SEQ ID NO: 1658760 - DNA, 25 bp, Homo sapien
catcggccctgagcccgtctcagtc

SEQ ID NO: 1658761 - DNA, 25 bp, Homo sapien
atcttgcctccctcgggacccccag

SEQ ID NO: 1658762 - DNA, 25 bp, Homo sapien
gccctgagcccgtctcagtcaggtt

SEQ ID NO: 1658763 - DNA, 25 bp, Homo sapien
cctgtcaccctctcatcggccctga

SEQ ID NO: 1658764 - DNA, 25 bp, Homo sapien
gaaacacacggctaggaagtggccc

SEQ ID NO: 1658765 - DNA, 25 bp, Homo sapien
caagtgacatataggactcggagcc

SEQ ID NO: 1658766 - DNA, 25 bp, Homo sapien
tatttaccagccagcggaggactac

SEQ ID NO: 1658767 - DNA, 25 bp, Homo sapien
tacagattcagaggtgagcggcact

SEQ ID NO: 1658768 - DNA, 25 bp, Homo sapien
ctgctgacctctcggacggcgagga

SEQ ID NO: 1658769 - DNA, 25 bp, Homo sapien
ttccggaagggactgaggattcagc

SEQ ID NO: 1658770 - DNA, 25 bp, Homo sapien
gccagcgccctctgatacctgatgt

SEQ ID NO: 1658771 - DNA, 25 bp, Homo sapien
gccccgtggcgagaggaacactctc

SEQ ID NO: 1658772 - DNA, 25 bp, Homo sapien
tagaagagcaggtgtgagggtcgga

SEQ ID NO: 1658773 - DNA, 25 bp, Homo sapien
aagagcaggtgtgagggtcggaagc

SEQ ID NO: 1658774 - DNA, 25 bp, Homo sapien
gaagagcaggtgtgagggtcggaag

SEQ ID NO: 1658775 - DNA, 25 bp, Homo sapien
ctagaagagcaggtgtgagggtcgg

SEQ ID NO: 1658776 - DNA, 25 bp, Homo sapien
ccggggggcagcatgcccggcccgt

SEQ ID NO: 1658777 - DNA, 25 bp, Homo sapien
ttccttccggggggcagcatgcccg

SEQ ID NO: 1658778 - DNA, 25 bp, Homo sapien
gggttccttccggggggcagcatgc

SEQ ID NO: 1658779 - DNA, 25 bp, Homo sapien
ggggcagcatgcccggcccgtgggg

SEQ ID NO: 1658780 - DNA, 25 bp, Homo sapien
gtggatctaccctacctttggcatg

SEQ ID NO: 1658781 - DNA, 25 bp, Homo sapien
tactctgatcggatgcctggtgggt

SEQ ID NO: 1658782 - DNA, 25 bp, Homo sapien
tacctgattggatacctgctgccgt

SEQ ID NO: 1658783 - DNA, 25 bp, Homo sapien
gagagactcgtgtcatcctggcaac

SEQ ID NO: 1658784 - DNA, 25 bp, Homo sapien
cggcggccggctggcgactagtgac

SEQ ID NO: 1658785 - DNA, 25 bp, Homo sapien
ccggctggcgactagtgacgtcgca

SEQ ID NO: 1658786 - DNA, 25 bp, Homo sapien
tagtgacgtcgcaggggcttgtccc

SEQ ID NO: 1658787 - DNA, 25 bp, Homo sapien
gggcttgtccctgccttactggctg

SEQ ID NO: 1658788 - DNA, 25 bp, Homo sapien
aaaagtggacaaatggcgtgaattg

SEQ ID NO: 1658789 - DNA, 25 bp, Homo sapien
cacaaagtagcatattcatatggcc

SEQ ID NO: 1658790 - DNA, 25 bp, Homo sapien
caaatggcgtgaattgacatttcac

SEQ ID NO: 1658791 - DNA, 25 bp, Homo sapien
ccagaaacaaaggagccttaactat

SEQ ID NO: 1658792 - DNA, 25 bp, Homo sapien
agagagaagccaatagccaggcgcg

SEQ ID NO: 1658793 - DNA, 25 bp, Homo sapien
tacagcattatacacctggagctcc

SEQ ID NO: 1658794 - DNA, 25 bp, Homo sapien
agatacagcattatacacctggagc

SEQ ID NO: 1658795 - DNA, 25 bp, Homo sapien
actgcaaacacctacccgagagaga

SEQ ID NO: 1658796 - DNA, 25 bp, Homo sapien
ttattctggcgttgatagcagcagc

SEQ ID NO: 1658797 - DNA, 25 bp, Homo sapien
gcagctcggacgttatggcttcaag

SEQ ID NO: 1658798 - DNA, 25 bp, Homo sapien
tcaaggagatgaattcacggtccgg

SEQ ID NO: 1658799 - DNA, 25 bp, Homo sapien
cattcacggcgagaacaagggtcgg

SEQ ID NO: 1658800 - DNA, 25 bp, Homo sapien
tctttctctgatagtcctttgctgc

SEQ ID NO: 1658801 - DNA, 25 bp, Homo sapien
ttctctgatagtcctttgctgcctt

SEQ ID NO: 1658802 - DNA, 25 bp, Homo sapien
tctctttctctgatagtcctttgct

SEQ ID NO: 1658803 - DNA, 25 bp, Homo sapien
tctctgatagtcctttgctgccttt

SEQ ID NO: 1658804 - DNA, 25 bp, Homo sapien
gcagcgaccacctacagaacgttta

SEQ ID NO: 1658805 - DNA, 25 bp, Homo sapien
tctaagccgcacagctaaagttggc

SEQ ID NO: 1658806 - DNA, 25 bp, Homo sapien
tcatgggtaacaacagcagcgacca

SEQ ID NO: 1658807 - DNA, 25 bp, Homo sapien
ggattgaaacctaggacgcctggct

SEQ ID NO: 1658808 - DNA, 25 bp, Homo sapien
tgcttgtcaggggtcggtgtgggac

SEQ ID NO: 1658809 - DNA, 25 bp, Homo sapien
gagggtgcacgggtgcttgtcaggg

SEQ ID NO: 1658810 - DNA, 25 bp, Homo sapien
aacatgcagggcgttcgttgcatgg

SEQ ID NO: 1658811 - DNA, 25 bp, Homo sapien
cagggcgttcgttgcatggatgaag

SEQ ID NO: 1658812 - DNA, 25 bp, Homo sapien
gccgatcacctcgttgtgcccgatg

SEQ ID NO: 1658813 - DNA, 25 bp, Homo sapien
atgccagtgctccacgggcttgcgg

SEQ ID NO: 1658814 - DNA, 25 bp, Homo sapien
ggccgtgcgggtcggcagcgtcggg

SEQ ID NO: 1658815 - DNA, 25 bp, Homo sapien
cttgcggggattggccagcatctct

SEQ ID NO: 1658816 - DNA, 25 bp, Homo sapien
gaacaccagcgcctcattataggtg

SEQ ID NO: 1658817 - DNA, 25 bp, Homo sapien
cagtcgtagtctaccacggcgatgc

SEQ ID NO: 1658818 - DNA, 25 bp, Homo sapien
ggaggttttccgcttcttcagacgc

SEQ ID NO: 1658819 - DNA, 25 bp, Homo sapien
cgctgatcagggaggccttcacgta

SEQ ID NO: 1658820 - DNA, 25 bp, Homo sapien
tccatcgctttgaggttagaggctt

SEQ ID NO: 1658821 - DNA, 25 bp, Homo sapien
ggcgcccggccgtggggaggtagca

SEQ ID NO: 1658822 - DNA, 25 bp, Homo sapien
aagccagtgaggtccatcgctttga

SEQ ID NO: 1658823 - DNA, 25 bp, Homo sapien
aggttagaggctttgatgatggtca

SEQ ID NO: 1658824 - DNA, 25 bp, Homo sapien
tccctgattttctctccggtcggag

SEQ ID NO: 1658825 - DNA, 25 bp, Homo sapien
ttgcctcagcccctcttcaactctc

SEQ ID NO: 1658826 - DNA, 25 bp, Homo sapien
aaaggtcagcgatatcttgcctcag

SEQ ID NO: 1658827 - DNA, 25 bp, Homo sapien
tccggtcggagcctcctgctttaca

SEQ ID NO: 1658828 - DNA, 25 bp, Homo sapien
agtgcagtttgcgttgggccagctc

SEQ ID NO: 1658829 - DNA, 25 bp, Homo sapien
ggtcgtgccgcgagaagcggtcaaa

SEQ ID NO: 1658830 - DNA, 25 bp, Homo sapien
gggcaccgagaattgaaacgtctca

SEQ ID NO: 1658831 - DNA, 25 bp, Homo sapien
caccacctggccgatgaggtcgtgc

SEQ ID NO: 1658832 - DNA, 25 bp, Homo sapien
tctgagaagccgttggagtccttgg

SEQ ID NO: 1658833 - DNA, 25 bp, Homo sapien
aactttttcttgcggtcaggcagca

SEQ ID NO: 1658834 - DNA, 25 bp, Homo sapien
agaagccgttggagtccttggcagg

SEQ ID NO: 1658835 - DNA, 25 bp, Homo sapien
gggtctgagaagccgttggagtcct

SEQ ID NO: 1658836 - DNA, 25 bp, Homo sapien
tcccctggtacagctctggcttaat

SEQ ID NO: 1658837 - DNA, 25 bp, Homo sapien
taccgcagggcgaagctgatacggc

SEQ ID NO: 1658838 - DNA, 25 bp, Homo sapien
gcttaatctgcccaatgagtttggc

SEQ ID NO: 1658839 - DNA, 25 bp, Homo sapien
tggtccgagccatagaggtaccgca

SEQ ID NO: 1658840 - DNA, 25 bp, Homo sapien
ggcttgtgacctgctgatgtgactg

SEQ ID NO: 1658841 - DNA, 25 bp, Homo sapien
acctgctgatgtgactgggcactgg

SEQ ID NO: 1658842 - DNA, 25 bp, Homo sapien
cttgtgacctgctgatgtgactggg

SEQ ID NO: 1658843 - DNA, 25 bp, Homo sapien
ggtgccaggcttgtgacctgctgat

SEQ ID NO: 1658844 - DNA, 25 bp, Homo sapien
tgcagcctctggatacgagtccatg

SEQ ID NO: 1658845 - DNA, 25 bp, Homo sapien
gatggtgggcggcatgggcatggtg

SEQ ID NO: 1658846 - DNA, 25 bp, Homo sapien
ggatgtttggctcggtttgacccca

SEQ ID NO: 1658847 - DNA, 25 bp, Homo sapien
ggatacgagtccatgtccaagtagg

SEQ ID NO: 1658848 - DNA, 25 bp, Homo sapien
caccagggcctaggtctttgcgcag

SEQ ID NO: 1658849 - DNA, 25 bp, Homo sapien
gagcctcccttgtcccgccagggca

SEQ ID NO: 1658850 - DNA, 25 bp, Homo sapien
gccagggcacccagcacaacttcca

SEQ ID NO: 1658851 - DNA, 25 bp, Homo sapien
ccacagaatgtcacgatgaccgaca

SEQ ID NO: 1658852 - DNA, 25 bp, Homo sapien
tcgttggtgtcagcatctcggaccc

SEQ ID NO: 1658853 - DNA, 25 bp, Homo sapien
tgaactcctggcacctgtcgttggt

SEQ ID NO: 1658854 - DNA, 25 bp, Homo sapien
gcgcacagaggtccgagaccaggat

SEQ ID NO: 1658855 - DNA, 25 bp, Homo sapien
gatagcctcggattcggtcattgaa

SEQ ID NO: 1658856 - DNA, 25 bp, Homo sapien
cagacaagagggcagaaattaggga

SEQ ID NO: 1658857 - DNA, 25 bp, Homo sapien
caggtattagggatggacaaggaaa

SEQ ID NO: 1658858 - DNA, 25 bp, Homo sapien
taagggtggaaagagacaccgagaa

SEQ ID NO: 1658859 - DNA, 25 bp, Homo sapien
gaaaaggaattaggagtagacagac

SEQ ID NO: 1658860 - DNA, 25 bp, Homo sapien
tgagcagacaaggtgccagccattc

SEQ ID NO: 1658861 - DNA, 25 bp, Homo sapien
aactacgccctacgtgctgtgctgg

SEQ ID NO: 1658862 - DNA, 25 bp, Homo sapien
gaaacaaagattagggctgcacaga

SEQ ID NO: 1658863 - DNA, 25 bp, Homo sapien
caatccaacgagaggagacatagag

SEQ ID NO: 1658864 - DNA, 25 bp, Homo sapien
cgttcccacgcgccgggtaatgaga

SEQ ID NO: 1658865 - DNA, 25 bp, Homo sapien
ccatgggggttctagggcggacaag

SEQ ID NO: 1658866 - DNA, 25 bp, Homo sapien
ctgcgcttatctctgccgtgtcctg

SEQ ID NO: 1658867 - DNA, 25 bp, Homo sapien
cgccgggtaatgagagagaatgtct

SEQ ID NO: 1658868 - DNA, 25 bp, Homo sapien
taagagagcgtaaggagcctagagc

SEQ ID NO: 1658869 - DNA, 25 bp, Homo sapien
tcttcgacgatcaaagccagggctg

SEQ ID NO: 1658870 - DNA, 25 bp, Homo sapien
cagtgattaggacgcagaaccaggc

SEQ ID NO: 1658871 - DNA, 25 bp, Homo sapien
gatggagcctcgacagacagtgatt

SEQ ID NO: 1658872 - DNA, 25 bp, Homo sapien
ccccttacaggtggctcatcgcggt

SEQ ID NO: 1658873 - DNA, 25 bp, Homo sapien
cgcgggcttgcgcaccagatcgtgc

SEQ ID NO: 1658874 - DNA, 25 bp, Homo sapien
tcgcggtcacggacttccagacgcg

SEQ ID NO: 1658875 - DNA, 25 bp, Homo sapien
gcgcttgctgcgctccgggctcagt

SEQ ID NO: 1658876 - DNA, 25 bp, Homo sapien
tcccttgagggatgaactgaagccc

SEQ ID NO: 1658877 - DNA, 25 bp, Homo sapien
tgaagcccgcgaaagggaagacctg

SEQ ID NO: 1658878 - DNA, 25 bp, Homo sapien
ccatccagaatgaacgagcccttga

SEQ ID NO: 1658879 - DNA, 25 bp, Homo sapien
tgtctcagcgagaatcagacgtcct

SEQ ID NO: 1658880 - DNA, 25 bp, Homo sapien
aaagaaatgacagttacagcccaag

SEQ ID NO: 1658881 - DNA, 25 bp, Homo sapien
agccatgtcatggtgcgcaagaaca

SEQ ID NO: 1658882 - DNA, 25 bp, Homo sapien
caagatgcggtgtgcagccatgtca

SEQ ID NO: 1658883 - DNA, 25 bp, Homo sapien
agcccaagagtgcatggaatgagat

SEQ ID NO: 1658884 - DNA, 25 bp, Homo sapien
tgaccaaaagtgacggtgcaaaagg

SEQ ID NO: 1658885 - DNA, 25 bp, Homo sapien
aggcaagtgtgcaaaaggcgtgacc

SEQ ID NO: 1658886 - DNA, 25 bp, Homo sapien
gaagggaaagtgcttcaacgtaaga

SEQ ID NO: 1658887 - DNA, 25 bp, Homo sapien
tgcttcaacgtaagaaaatggaggt

SEQ ID NO: 1658888 - DNA, 25 bp, Homo sapien
tctgcaacaagggtccagagcgagc

SEQ ID NO: 1658889 - DNA, 25 bp, Homo sapien
gagtgtatttgagcgggcctcgcca

SEQ ID NO: 1658890 - DNA, 25 bp, Homo sapien
caaatgtccggcctggattgggcca

SEQ ID NO: 1658891 - DNA, 25 bp, Homo sapien
caaaggcagaatgtgcaagacagcg

SEQ ID NO: 1658892 - DNA, 25 bp, Homo sapien
gagccatcgatctcgtggtccagga

SEQ ID NO: 1658893 - DNA, 25 bp, Homo sapien
gtcgaacttggtccagaaccccaga

SEQ ID NO: 1658894 - DNA, 25 bp, Homo sapien
gaagaatttgagagcccggtcgatg

SEQ ID NO: 1658895 - DNA, 25 bp, Homo sapien
cccagaggtttagcgccaaacggct

SEQ ID NO: 1658896 - DNA, 25 bp, Homo sapien
ggagtgaggactgggagtcgtcgga

SEQ ID NO: 1658897 - DNA, 25 bp, Homo sapien
tctcgaactccacgccctggaggtg

SEQ ID NO: 1658898 - DNA, 25 bp, Homo sapien
agggggccgcatctcgaactccacg

SEQ ID NO: 1658899 - DNA, 25 bp, Homo sapien
accttgtgctccgaggcgggcagca

SEQ ID NO: 1658900 - DNA, 25 bp, Homo sapien
aatccccacgacagccctgatgcag

SEQ ID NO: 1658901 - DNA, 25 bp, Homo sapien
gccctgatgcaggttactattatta

SEQ ID NO: 1658902 - DNA, 25 bp, Homo sapien
gtgctttacatgattgcatctcagt

SEQ ID NO: 1658903 - DNA, 25 bp, Homo sapien
gcatctcagtttaatccccacgaca

SEQ ID NO: 1658904 - DNA, 25 bp, Homo sapien
tggcagagcccggttatatggcacc

SEQ ID NO: 1658905 - DNA, 25 bp, Homo sapien
tatatggcaccaaagtctgagctct

SEQ ID NO: 1658906 - DNA, 25 bp, Homo sapien
ccggttatatggcaccaaagtctga

SEQ ID NO: 1658907 - DNA, 25 bp, Homo sapien
agagcccggttatatggcaccaaag

SEQ ID NO: 1658908 - DNA, 25 bp, Homo sapien
caaacataagcaggtctcactccag

SEQ ID NO: 1658909 - DNA, 25 bp, Homo sapien
catttgcctaagatcacccaggtag

SEQ ID NO: 1658910 - DNA, 25 bp, Homo sapien
gacacatttggatagcagaccttca

SEQ ID NO: 1658911 - DNA, 25 bp, Homo sapien
tcaaaaactctttgggctggcacta

SEQ ID NO: 1658912 - DNA, 25 bp, Homo sapien
caccttcggcagataggctgctcag

SEQ ID NO: 1658913 - DNA, 25 bp, Homo sapien
ccccggagcttagagggagtcatga

SEQ ID NO: 1658914 - DNA, 25 bp, Homo sapien
gatgatgctggcttttactgtggcc

SEQ ID NO: 1658915 - DNA, 25 bp, Homo sapien
tcgatgccagaatccgtgccaggcg

SEQ ID NO: 1658916 - DNA, 25 bp, Homo sapien
gactctggcttttcgaagctgttgg

SEQ ID NO: 1658917 - DNA, 25 bp, Homo sapien
agggtggccacctcgctgtcatagg

SEQ ID NO: 1658918 - DNA, 25 bp, Homo sapien
agttttcaaggaaccgcacgtgcag

SEQ ID NO: 1658919 - DNA, 25 bp, Homo sapien
cagcggttccacgaaaaggaattcg

SEQ ID NO: 1658920 - DNA, 25 bp, Homo sapien
cctcgtagcggggcgatgggggcct

SEQ ID NO: 1658921 - DNA, 25 bp, Homo sapien
tggctcgtggtgggcgtggggcgag

SEQ ID NO: 1658922 - DNA, 25 bp, Homo sapien
gcctcgtagcggggcgatgggggcc

SEQ ID NO: 1658923 - DNA, 25 bp, Homo sapien
tcgtggtgggcgtggggcgagtggt

SEQ ID NO: 1658924 - DNA, 25 bp, Homo sapien
atccagggccttgccggtcagcggg

SEQ ID NO: 1658925 - DNA, 25 bp, Homo sapien
ggatccagggccttgccggtcagcg

SEQ ID NO: 1658926 - DNA, 25 bp, Homo sapien
ggccttgccggtcagcgggtgcacc

SEQ ID NO: 1658927 - DNA, 25 bp, Homo sapien
agggccttgccggtcagcgggtgca

SEQ ID NO: 1658928 - DNA, 25 bp, Homo sapien
ggcggagaacatgccctcgtcgatg

SEQ ID NO: 1658929 - DNA, 25 bp, Homo sapien
tgcccgcagactccagtcggaggta

SEQ ID NO: 1658930 - DNA, 25 bp, Homo sapien
gagttcttctccgagggcgcggcca

SEQ ID NO: 1658931 - DNA, 25 bp, Homo sapien
gcggccccgaactggctcgtgaagt

SEQ ID NO: 1658932 - DNA, 25 bp, Homo sapien
gaccagcgggcccttgcggccgcgg

SEQ ID NO: 1658933 - DNA, 25 bp, Homo sapien
cttgaccagcgggcccttgcggccg

SEQ ID NO: 1658934 - DNA, 25 bp, Homo sapien
ccagcgggcccttgcggccgcggcc

SEQ ID NO: 1658935 - DNA, 25 bp, Homo sapien
ttgaccagcgggcccttgcggccgc

SEQ ID NO: 1658936 - DNA, 25 bp, Homo sapien
cagctggaaatagcgtagagccggg

SEQ ID NO: 1658937 - DNA, 25 bp, Homo sapien
gctggaaatagcgtagagccgggcc

SEQ ID NO: 1658938 - DNA, 25 bp, Homo sapien
gggcagctggaaatagcgtagagcc

SEQ ID NO: 1658939 - DNA, 25 bp, Homo sapien
tggaaatagcgtagagccgggccct

SEQ ID NO: 1658940 - DNA, 25 bp, Homo sapien
cgcccctccagcctcgcaggctggg

SEQ ID NO: 1658941 - DNA, 25 bp, Homo sapien
gggagagccgcctgtctccatctcg

SEQ ID NO: 1658942 - DNA, 25 bp, Homo sapien
agccgcctgtctccatctcgggagg

SEQ ID NO: 1658943 - DNA, 25 bp, Homo sapien
cgtcgggagagccgcctgtctccat

SEQ ID NO: 1658944 - DNA, 25 bp, Homo sapien
tgtgctgtagggaggctccggtggg

SEQ ID NO: 1658945 - DNA, 25 bp, Homo sapien
tgtggtacaggctcttctcgcggct

SEQ ID NO: 1658946 - DNA, 25 bp, Homo sapien
gctccccacgcgagtgtcgggaggg

SEQ ID NO: 1658947 - DNA, 25 bp, Homo sapien
ggagggcccgtcaaaggatgcaggg

SEQ ID NO: 1658948 - DNA, 25 bp, Homo sapien
tggcgggggaatgtcctccgaacca

SEQ ID NO: 1658949 - DNA, 25 bp, Homo sapien
gctgcggctgaatttcatggctggg

SEQ ID NO: 1658950 - DNA, 25 bp, Homo sapien
aggcacagacaggctgcggctgaat

SEQ ID NO: 1658951 - DNA, 25 bp, Homo sapien
gggtgctaggtaaggtctgtcatct

SEQ ID NO: 1658952 - DNA, 25 bp, Homo sapien
gccggagcatcaacccaggtcctgg

SEQ ID NO: 1658953 - DNA, 25 bp, Homo sapien
aggacgctcgtaacttggctgggca

SEQ ID NO: 1658954 - DNA, 25 bp, Homo sapien
agatttttgccggagcatcaaccca

SEQ ID NO: 1658955 - DNA, 25 bp, Homo sapien
ggcaggaaagaaggacgctcgtaac

SEQ ID NO: 1658956 - DNA, 25 bp, Homo sapien
ttggagcggcagtcagagggggaga

SEQ ID NO: 1658957 - DNA, 25 bp, Homo sapien
ggagcggcagtcagagggggagaga

SEQ ID NO: 1658958 - DNA, 25 bp, Homo sapien
tttggagcggcagtcagagggggag

SEQ ID NO: 1658959 - DNA, 25 bp, Homo sapien
ctttggagcggcagtcagaggggga

SEQ ID NO: 1658960 - DNA, 25 bp, Homo sapien
ttggctttctgtcccgtcctgcagc

SEQ ID NO: 1658961 - DNA, 25 bp, Homo sapien
ttcagccacagaccaatactctgct

SEQ ID NO: 1658962 - DNA, 25 bp, Homo sapien
cacagaccaatactctgcttggctt

SEQ ID NO: 1658963 - DNA, 25 bp, Homo sapien
cagctgtgtggtatcagagagcaga

SEQ ID NO: 1658964 - DNA, 25 bp, Homo sapien
accttagaatgatacagggcagtgg

SEQ ID NO: 1658965 - DNA, 25 bp, Homo sapien
tcgaactactaagctccagggatca

SEQ ID NO: 1658966 - DNA, 25 bp, Homo sapien
tactaagctccagggatcagccagc

SEQ ID NO: 1658967 - DNA, 25 bp, Homo sapien
tcttttaaccttagaatgatacagg

SEQ ID NO: 1658968 - DNA, 25 bp, Homo sapien
ggaccagggctttcgcttgcactga

SEQ ID NO: 1658969 - DNA, 25 bp, Homo sapien
tgcggccaggatttcgtccagtttg

SEQ ID NO: 1658970 - DNA, 25 bp, Homo sapien
cagtggcaaagaaacctttgggtcg

SEQ ID NO: 1658971 - DNA, 25 bp, Homo sapien
tgggtcggtgtttgcccagggacgc

SEQ ID NO: 1658972 - DNA, 25 bp, Homo sapien
gccatctgatacacggtccgctttt

SEQ ID NO: 1658973 - DNA, 25 bp, Homo sapien
agagccatctgatacacggtccgct

SEQ ID NO: 1658974 - DNA, 25 bp, Homo sapien
ttctccatgctgggcaccggcgccg

SEQ ID NO: 1658975 - DNA, 25 bp, Homo sapien
ctgatacacggtccgctttttctcc

SEQ ID NO: 1658976 - DNA, 25 bp, Homo sapien
aggtcatagatttggaacgcaggga

SEQ ID NO: 1658977 - DNA, 25 bp, Homo sapien
catagatttggaacgcagggagatg

SEQ ID NO: 1658978 - DNA, 25 bp, Homo sapien
gtcatagatttggaacgcagggaga

SEQ ID NO: 1658979 - DNA, 25 bp, Homo sapien
ctgaggtcatagatttggaacgcag

SEQ ID NO: 1658980 - DNA, 25 bp, Homo sapien
gtcacggagaagcagtgctagggaa

SEQ ID NO: 1658981 - DNA, 25 bp, Homo sapien
agaatagccattgccagcgtgcgga

SEQ ID NO: 1658982 - DNA, 25 bp, Homo sapien
tcacggagaagcagtgctagggaag

SEQ ID NO: 1658983 - DNA, 25 bp, Homo sapien
cagagaatagccattgccagcgtgc

SEQ ID NO: 1658984 - DNA, 25 bp, Homo sapien
actgcctcatccatgtccgggtgcc

SEQ ID NO: 1658985 - DNA, 25 bp, Homo sapien
ctgcctcatccatgtccgggtgcct

SEQ ID NO: 1658986 - DNA, 25 bp, Homo sapien
ccaccttcaccatcagcgtgttgcc

SEQ ID NO: 1658987 - DNA, 25 bp, Homo sapien
tgttgcccccttggcggatcatgtt

SEQ ID NO: 1658988 - DNA, 25 bp, Homo sapien
tcggtggccgaccttcaccacattc

SEQ ID NO: 1658989 - DNA, 25 bp, Homo sapien
gtcggtggccgaccttcaccacatt

SEQ ID NO: 1658990 - DNA, 25 bp, Homo sapien
ggtggccgaccttcaccacattctg

SEQ ID NO: 1658991 - DNA, 25 bp, Homo sapien
tgtcggtggccgaccttcaccacat

SEQ ID NO: 1658992 - DNA, 25 bp, Homo sapien
gaagtctcccattcgcagtccagct

SEQ ID NO: 1658993 - DNA, 25 bp, Homo sapien
gccatgccacgccaccctcgtccac

SEQ ID NO: 1658994 - DNA, 25 bp, Homo sapien
aggaagtctcccattcgcagtccag

SEQ ID NO: 1658995 - DNA, 25 bp, Homo sapien
ccaccctcgtccaccgactccaggt

SEQ ID NO: 1658996 - DNA, 25 bp, Homo sapien
agactgtcttctccttaatgatgta

SEQ ID NO: 1658997 - DNA, 25 bp, Homo sapien
acccctcactgtccttcttctgcag

SEQ ID NO: 1658998 - DNA, 25 bp, Homo sapien
aaacccctcactgtccttcttctgc

SEQ ID NO: 1658999 - DNA, 25 bp, Homo sapien
ccaaacccctcactgtccttcttct

SEQ ID NO: 1659000 - DNA, 25 bp, Homo sapien
ggagtggagaagacatcatgagaca

SEQ ID NO: 1659001 - DNA, 25 bp, Homo sapien
gcaacccagacccaaacctctgctc

SEQ ID NO: 1659002 - DNA, 25 bp, Homo sapien
atgagacacagaggctgtcccccac

SEQ ID NO: 1659003 - DNA, 25 bp, Homo sapien
ccggcaacccagacccaaacctctg

SEQ ID NO: 1659004 - DNA, 25 bp, Homo sapien
agatgtaccagacgctgcgccgccg

SEQ ID NO: 1659005 - DNA, 25 bp, Homo sapien
atgtaccagacgctgcgccgccggg

SEQ ID NO: 1659006 - DNA, 25 bp, Homo sapien
ctgtagatgtaccagacgctgcgcc

SEQ ID NO: 1659007 - DNA, 25 bp, Homo sapien
gtagatgtaccagacgctgcgccgc

SEQ ID NO: 1659008 - DNA, 25 bp, Homo sapien
cccgccgccgaccgcagacaaagcc

SEQ ID NO: 1659009 - DNA, 25 bp, Homo sapien
ccgccgccgaccgcagacaaagcca

SEQ ID NO: 1659010 - DNA, 25 bp, Homo sapien
cgccgccgaccgcagacaaagccat

SEQ ID NO: 1659011 - DNA, 25 bp, Homo sapien
taggtacaggtacatccaggccaca

SEQ ID NO: 1659012 - DNA, 25 bp, Homo sapien
gcagactcactgacatgccctgtgg

SEQ ID NO: 1659013 - DNA, 25 bp, Homo sapien
tggtgcttgcccacggattcagaga

SEQ ID NO: 1659014 - DNA, 25 bp, Homo sapien
cagtatatacagagcagggcagacc

SEQ ID NO: 1659015 - DNA, 25 bp, Homo sapien
tccctgggccaatcccatccattaa

SEQ ID NO: 1659016 - DNA, 25 bp, Homo sapien
ccctgggccaatcccatccattaag

SEQ ID NO: 1659017 - DNA, 25 bp, Homo sapien
ctccctgggccaatcccatccatta

SEQ ID NO: 1659018 - DNA, 25 bp, Homo sapien
gggcatcaaagctgtcgtaggagcc

SEQ ID NO: 1659019 - DNA, 25 bp, Homo sapien
tcgtaggagcccacggtataatgcc

SEQ ID NO: 1659020 - DNA, 25 bp, Homo sapien
taatgccggaagagtctctttgcct

SEQ ID NO: 1659021 - DNA, 25 bp, Homo sapien
ccacggtataatgccggaagagtct

SEQ ID NO: 1659022 - DNA, 25 bp, Homo sapien
tgctctcctgagagcgattcgccac

SEQ ID NO: 1659023 - DNA, 25 bp, Homo sapien
caacacgacctttgacctggccttc

SEQ ID NO: 1659024 - DNA, 25 bp, Homo sapien
caggcagtcagaggggaaccagcca

SEQ ID NO: 1659025 - DNA, 25 bp, Homo sapien
tcctgagagcgattcgccacttctt

SEQ ID NO: 1659026 - DNA, 25 bp, Homo sapien
tgttccaatgcctcgtattaacggc

SEQ ID NO: 1659027 - DNA, 25 bp, Homo sapien
tcctgggcagcctagagtctggcaa

SEQ ID NO: 1659028 - DNA, 25 bp, Homo sapien
cctgcggcacgtggtggtctctaaa

SEQ ID NO: 1659029 - DNA, 25 bp, Homo sapien
caaatgatggctcttatatggcact

SEQ ID NO: 1659030 - DNA, 25 bp, Homo sapien
cagccatgaaggagcgtccgggtac

SEQ ID NO: 1659031 - DNA, 25 bp, Homo sapien
tccgggtaccgctgagtagagcttc

SEQ ID NO: 1659032 - DNA, 25 bp, Homo sapien
gcctggtaggacttcacagccatga

SEQ ID NO: 1659033 - DNA, 25 bp, Homo sapien
ttctcgcccttgctcagggagatct

SEQ ID NO: 1659034 - DNA, 25 bp, Homo sapien
gcacttcggagggtcccgctgctga

SEQ ID NO: 1659035 - DNA, 25 bp, Homo sapien
ctggtgtcactgttggcccgcagca

SEQ ID NO: 1659036 - DNA, 25 bp, Homo sapien
gcctcttggcgtcctcagggtgcct

SEQ ID NO: 1659037 - DNA, 25 bp, Homo sapien
cctcgggatggagagcgggccctgg

SEQ ID NO: 1659038 - DNA, 25 bp, Homo sapien
tcctgttctcggtggtttcggatca

SEQ ID NO: 1659039 - DNA, 25 bp, Homo sapien
ccacatcctgttctcggtggtttcg

SEQ ID NO: 1659040 - DNA, 25 bp, Homo sapien
tctcggtggtttcggatcagctccc

SEQ ID NO: 1659041 - DNA, 25 bp, Homo sapien
ccccagctcaaaattcccagcaatc

SEQ ID NO: 1659042 - DNA, 25 bp, Homo sapien
tacaggaggatcctggcacaggtct

SEQ ID NO: 1659043 - DNA, 25 bp, Homo sapien
tccgttgttgttcttcacatccttg

SEQ ID NO: 1659044 - DNA, 25 bp, Homo sapien
gggtctgtccgttgttgttcttcac

SEQ ID NO: 1659045 - DNA, 25 bp, Homo sapien
atccttgtcggcacctcgatacagg

SEQ ID NO: 1659046 - DNA, 25 bp, Homo sapien
cccggcctgcatggtagatattaat

SEQ ID NO: 1659047 - DNA, 25 bp, Homo sapien
agatattaattattgacccatttca

SEQ ID NO: 1659048 - DNA, 25 bp, Homo sapien
ttaattattgacccatttcacagct

SEQ ID NO: 1659049 - DNA, 25 bp, Homo sapien
tattaattattgacccatttcacag

SEQ ID NO: 1659050 - DNA, 25 bp, Homo sapien
catgagctcaacactttgtccccag

SEQ ID NO: 1659051 - DNA, 25 bp, Homo sapien
caagaggagtgtctgagcttggccc

SEQ ID NO: 1659052 - DNA, 25 bp, Homo sapien
gggaggcggctatcggggatgtgag

SEQ ID NO: 1659053 - DNA, 25 bp, Homo sapien
gctatcggggatgtgaggggcctgg

SEQ ID NO: 1659054 - DNA, 25 bp, Homo sapien
gccccgtagaaaagcagatgctcca

SEQ ID NO: 1659055 - DNA, 25 bp, Homo sapien
aggctcagccccgtagaaaagcaga

SEQ ID NO: 1659056 - DNA, 25 bp, Homo sapien
tcagccccgtagaaaagcagatgct

SEQ ID NO: 1659057 - DNA, 25 bp, Homo sapien
gggcgcagatgtgcagagccgtgtt

SEQ ID NO: 1659058 - DNA, 25 bp, Homo sapien
agctgggccctgttgaacaggagca

SEQ ID NO: 1659059 - DNA, 25 bp, Homo sapien
cagcccccgacggtccttgtagttg

SEQ ID NO: 1659060 - DNA, 25 bp, Homo sapien
ccagccgttctcatcagctatgccc

SEQ ID NO: 1659061 - DNA, 25 bp, Homo sapien
cacccaccatggccgtgtggaacag

SEQ ID NO: 1659062 - DNA, 25 bp, Homo sapien
tctacagagccttcggtctgggccg

SEQ ID NO: 1659063 - DNA, 25 bp, Homo sapien
cagtgtcgggcgcatgcggccttat

SEQ ID NO: 1659064 - DNA, 25 bp, Homo sapien
caggcacagggttcgaatcacctct

SEQ ID NO: 1659065 - DNA, 25 bp, Homo sapien
tgcagtgcggtcatgccatcccggg

SEQ ID NO: 1659066 - DNA, 25 bp, Homo sapien
gtcccgagctgcacatactccagga

SEQ ID NO: 1659067 - DNA, 25 bp, Homo sapien
agcagccgcgccaccttgtcagatg

SEQ ID NO: 1659068 - DNA, 25 bp, Homo sapien
gtcagatgtcccgagctgcacatac

SEQ ID NO: 1659069 - DNA, 25 bp, Homo sapien
gcagccgcgccaccttgtcagatgt

SEQ ID NO: 1659070 - DNA, 25 bp, Homo sapien
tgtaaactcgggtcttgtatcggaa

SEQ ID NO: 1659071 - DNA, 25 bp, Homo sapien
ttgtaaactcgggtcttgtatcgga

SEQ ID NO: 1659072 - DNA, 25 bp, Homo sapien
catagttgagcacatcctgcaggct

SEQ ID NO: 1659073 - DNA, 25 bp, Homo sapien
gccggttggaacaggccatagttga

SEQ ID NO: 1659074 - DNA, 25 bp, Homo sapien
ggaagttggcatcgcggccggaggt

SEQ ID NO: 1659075 - DNA, 25 bp, Homo sapien
tgcttggccgtccagatggtggcat

SEQ ID NO: 1659076 - DNA, 25 bp, Homo sapien
gaagagataggggctagggtgggcc

SEQ ID NO: 1659077 - DNA, 25 bp, Homo sapien
ctggttggggaagagataggggcta

SEQ ID NO: 1659078 - DNA, 25 bp, Homo sapien
agataggggctagggtgggccaggg

SEQ ID NO: 1659079 - DNA, 25 bp, Homo sapien
aagagataggggctagggtgggcca

SEQ ID NO: 1659080 - DNA, 25 bp, Homo sapien
tctgggacggacattgagcggccct

SEQ ID NO: 1659081 - DNA, 25 bp, Homo sapien
aatcctgaagaccatcatgctgaag

SEQ ID NO: 1659082 - DNA, 25 bp, Homo sapien
caggtccgggatgccaatcctgaag

SEQ ID NO: 1659083 - DNA, 25 bp, Homo sapien
tctaacagaggccaggctaccaggt

SEQ ID NO: 1659084 - DNA, 25 bp, Homo sapien
ctattcggtggtcaagcggtcaagg

SEQ ID NO: 1659085 - DNA, 25 bp, Homo sapien
gccaagggcggccatcagactagga

SEQ ID NO: 1659086 - DNA, 25 bp, Homo sapien
acggcagcatcacaggcggctgcag

SEQ ID NO: 1659087 - DNA, 25 bp, Homo sapien
tcagaggccgcaggcgctattcggt

SEQ ID NO: 1659088 - DNA, 25 bp, Homo sapien
cgtacccccagccgcacacccaggc

SEQ ID NO: 1659089 - DNA, 25 bp, Homo sapien
cccgtacccccagccgcacacccag

SEQ ID NO: 1659090 - DNA, 25 bp, Homo sapien
tcacccgtacccccagccgcacacc

SEQ ID NO: 1659091 - DNA, 25 bp, Homo sapien
ctcacccgtacccccagccgcacac

SEQ ID NO: 1659092 - DNA, 25 bp, Homo sapien
caaatgctctgaggttgtaatcagc

SEQ ID NO: 1659093 - DNA, 25 bp, Homo sapien
taacttgcggaatagataaggtggt

SEQ ID NO: 1659094 - DNA, 25 bp, Homo sapien
tgagacctcgatgatgagaaggagc

SEQ ID NO: 1659095 - DNA, 25 bp, Homo sapien
ggaaagggctagtgcaaatgctctg

SEQ ID NO: 1659096 - DNA, 25 bp, Homo sapien
gacaaatggcggtgatcatggccca

SEQ ID NO: 1659097 - DNA, 25 bp, Homo sapien
tgcaaactctacaccggttttgtgt

SEQ ID NO: 1659098 - DNA, 25 bp, Homo sapien
tacagttcaacttggagaatgagac

SEQ ID NO: 1659099 - DNA, 25 bp, Homo sapien
gctggtgagcgctttatctgctggt

SEQ ID NO: 1659100 - DNA, 25 bp, Homo sapien
aatggctgtacgcactgctacttgg

SEQ ID NO: 1659101 - DNA, 25 bp, Homo sapien
cgtggagggacacattatagggacc

SEQ ID NO: 1659102 - DNA, 25 bp, Homo sapien
tatagggaccattggccacttcctg

SEQ ID NO: 1659103 - DNA, 25 bp, Homo sapien
gctacttggcgttcaactctgacaa

SEQ ID NO: 1659104 - DNA, 25 bp, Homo sapien
tgaactgtgttaaagtcggcgcagg

SEQ ID NO: 1659105 - DNA, 25 bp, Homo sapien
cggcgcaggtaggacgtcacgatat

SEQ ID NO: 1659106 - DNA, 25 bp, Homo sapien
tcagaggtacctcccaaaaatgttg

SEQ ID NO: 1659107 - DNA, 25 bp, Homo sapien
cagtatgatgagcagacaagacggg

SEQ ID NO: 1659108 - DNA, 25 bp, Homo sapien
tgtgtgagccgctgcccttggcatg

SEQ ID NO: 1659109 - DNA, 25 bp, Homo sapien
catgtgtgagccgctgcccttggca

SEQ ID NO: 1659110 - DNA, 25 bp, Homo sapien
tgtgccatcatgccctcattaaatt

SEQ ID NO: 1659111 - DNA, 25 bp, Homo sapien
atgtgtgagccgctgcccttggcat

SEQ ID NO: 1659112 - DNA, 25 bp, Homo sapien
atttatctggcctcagagcgatggc

SEQ ID NO: 1659113 - DNA, 25 bp, Homo sapien
cagggctcttgtgcggggaggtcct

SEQ ID NO: 1659114 - DNA, 25 bp, Homo sapien
ttatctggcctcagagcgatggcag

SEQ ID NO: 1659115 - DNA, 25 bp, Homo sapien
tttatctggcctcagagcgatggca

SEQ ID NO: 1659116 - DNA, 25 bp, Homo sapien
aggatggtgaacaaggccatggcca

SEQ ID NO: 1659117 - DNA, 25 bp, Homo sapien
cttgttgaagaaatagatggaggtc

SEQ ID NO: 1659118 - DNA, 25 bp, Homo sapien
aggtcaggatggtgaacaaggccat

SEQ ID NO: 1659119 - DNA, 25 bp, Homo sapien
tgaagaaatagatggaggtcaggat

SEQ ID NO: 1659120 - DNA, 25 bp, Homo sapien
ttcctgaaagttcatggccttggga

SEQ ID NO: 1659121 - DNA, 25 bp, Homo sapien
cagccaccccttggttggtcttctc

SEQ ID NO: 1659122 - DNA, 25 bp, Homo sapien
tgggactccagccaccccttggttg

SEQ ID NO: 1659123 - DNA, 25 bp, Homo sapien
ctgaaagttcatggccttgggactc

SEQ ID NO: 1659124 - DNA, 25 bp, Homo sapien
catctccctggctataggaattctc

SEQ ID NO: 1659125 - DNA, 25 bp, Homo sapien
ccatctccctggctataggaattct

SEQ ID NO: 1659126 - DNA, 25 bp, Homo sapien
aacactgttatccacatcatgattt

SEQ ID NO: 1659127 - DNA, 25 bp, Homo sapien
cactgttatccacatcatgatttcc

SEQ ID NO: 1659128 - DNA, 25 bp, Homo sapien
acactgttatccacatcatgatttc

SEQ ID NO: 1659129 - DNA, 25 bp, Homo sapien
taagcagtctgtccttccggaggag

SEQ ID NO: 1659130 - DNA, 25 bp, Homo sapien
gggctgcccctcaagatggtcatgt

SEQ ID NO: 1659131 - DNA, 25 bp, Homo sapien
gatcctgctgaatgctatccttgca

SEQ ID NO: 1659132 - DNA, 25 bp, Homo sapien
acagcgatttaggtgaggaagagcc

SEQ ID NO: 1659133 - DNA, 25 bp, Homo sapien
cccagggactcatggtcagtgtcca

SEQ ID NO: 1659134 - DNA, 25 bp, Homo sapien
tcttccggtacccttgaacatggtg

SEQ ID NO: 1659135 - DNA, 25 bp, Homo sapien
catgtcccgcacttcctgaatgcag

SEQ ID NO: 1659136 - DNA, 25 bp, Homo sapien
cctgggcagaagtgcaacatggcac

SEQ ID NO: 1659137 - DNA, 25 bp, Homo sapien
tgtctgtccttgagagccaggccca

SEQ ID NO: 1659138 - DNA, 25 bp, Homo sapien
caagtccttgtgcactgggttgggt

SEQ ID NO: 1659139 - DNA, 25 bp, Homo sapien
tccccataggcctggtcacaatagg

SEQ ID NO: 1659140 - DNA, 25 bp, Homo sapien
tctcacggtggcgtatggacagctc

SEQ ID NO: 1659141 - DNA, 25 bp, Homo sapien
taacaggcatgtccttgggcgtcac

SEQ ID NO: 1659142 - DNA, 25 bp, Homo sapien
tgcagtggtagctgaagatggcacc

SEQ ID NO: 1659143 - DNA, 25 bp, Homo sapien
cagctagtgctggtacaggacctgg

SEQ ID NO: 1659144 - DNA, 25 bp, Homo sapien
ggaggaagctggatacccctgtcca

SEQ ID NO: 1659145 - DNA, 25 bp, Homo sapien
aaacagcagagtgtctggagggatg

SEQ ID NO: 1659146 - DNA, 25 bp, Homo sapien
ggaaacagcagagtgtctggaggga

SEQ ID NO: 1659147 - DNA, 25 bp, Homo sapien
taggcaggaaacagcagagtgtctg

SEQ ID NO: 1659148 - DNA, 25 bp, Homo sapien
gcaggaaacagcagagtgtctggag

SEQ ID NO: 1659149 - DNA, 25 bp, Homo sapien
tttcaagaaccctggacactggaca

SEQ ID NO: 1659150 - DNA, 25 bp, Homo sapien
caacagggttactaaggttaatgag

SEQ ID NO: 1659151 - DNA, 25 bp, Homo sapien
ctcagaaccccggatgtcaaaggtc

SEQ ID NO: 1659152 - DNA, 25 bp, Homo sapien
gagcccagtgcttagggcagcgcct

SEQ ID NO: 1659153 - DNA, 25 bp, Homo sapien
caacaccaggagtaacaggcagcct

SEQ ID NO: 1659154 - DNA, 25 bp, Homo sapien
ccaggagtaacaggcagcctcctct

SEQ ID NO: 1659155 - DNA, 25 bp, Homo sapien
cctcctctgttcttaatgagtgatg

SEQ ID NO: 1659156 - DNA, 25 bp, Homo sapien
tcttaatgagtgatggtcaggccct

SEQ ID NO: 1659157 - DNA, 25 bp, Homo sapien
ggctccttgtatgatctaggcccac

SEQ ID NO: 1659158 - DNA, 25 bp, Homo sapien
aactgaatgacacttggtccctggg

SEQ ID NO: 1659159 - DNA, 25 bp, Homo sapien
ccaggaccacctactgtcctaaggg

SEQ ID NO: 1659160 - DNA, 25 bp, Homo sapien
gaaaacgggactagagatgcctgca

SEQ ID NO: 1659161 - DNA, 25 bp, Homo sapien
taggcatggtgggtggtcctaagct

SEQ ID NO: 1659162 - DNA, 25 bp, Homo sapien
ctggataggcatggtgggtggtcct

SEQ ID NO: 1659163 - DNA, 25 bp, Homo sapien
tgggtggtcctaagcttgaagctgc

SEQ ID NO: 1659164 - DNA, 25 bp, Homo sapien
catggtgggtggtcctaagcttgaa

SEQ ID NO: 1659165 - DNA, 25 bp, Homo sapien
agtgctggacatcatgggagcccca

SEQ ID NO: 1659166 - DNA, 25 bp, Homo sapien
ggaggaaacagtctgcaagtccaca

SEQ ID NO: 1659167 - DNA, 25 bp, Homo sapien
gcaaccaggtcctgaggccacttac

SEQ ID NO: 1659168 - DNA, 25 bp, Homo sapien
aagtccacaagccattaaaactggg

SEQ ID NO: 1659169 - DNA, 25 bp, Homo sapien
agaggccaagctaacagagcttaaa

SEQ ID NO: 1659170 - DNA, 25 bp, Homo sapien
acagaggccaagctaacagagctta

SEQ ID NO: 1659171 - DNA, 25 bp, Homo sapien
cagaggccaagctaacagagcttaa

SEQ ID NO: 1659172 - DNA, 25 bp, Homo sapien
gacagaggccaagctaacagagctt

SEQ ID NO: 1659173 - DNA, 25 bp, Homo sapien
gacgtgccaacgatgaatgcatgaa

SEQ ID NO: 1659174 - DNA, 25 bp, Homo sapien
ccccgctcaagtcaggaaaccgatg

SEQ ID NO: 1659175 - DNA, 25 bp, Homo sapien
gagataggaaatgggctagctgctt

SEQ ID NO: 1659176 - DNA, 25 bp, Homo sapien
taatattgccaaaggacgacgtgcc

SEQ ID NO: 1659177 - DNA, 25 bp, Homo sapien
agcctcgaacccttcaggacacgtg

SEQ ID NO: 1659178 - DNA, 25 bp, Homo sapien
acccttcaggacacgtgcgtctttc

SEQ ID NO: 1659179 - DNA, 25 bp, Homo sapien
atggccgctcccgtcgcagcctcga

SEQ ID NO: 1659180 - DNA, 25 bp, Homo sapien
ctttccacgcgactacatggccgct

SEQ ID NO: 1659181 - DNA, 25 bp, Homo sapien
gccattttatagtgcgcgccgctcg

SEQ ID NO: 1659182 - DNA, 25 bp, Homo sapien
tcctgaacaagcgaggagacgctgt

SEQ ID NO: 1659183 - DNA, 25 bp, Homo sapien
ggaatactgcctgcttccgctagaa

SEQ ID NO: 1659184 - DNA, 25 bp, Homo sapien
cgggttgcagcacgcgccattttat

SEQ ID NO: 1659185 - DNA, 25 bp, Homo sapien
gctggagcgccaggatagaccagaa

SEQ ID NO: 1659186 - DNA, 25 bp, Homo sapien
agcgccaggatagaccagaagtaca

SEQ ID NO: 1659187 - DNA, 25 bp, Homo sapien
ccagaagtacatgtaattcagatag

SEQ ID NO: 1659188 - DNA, 25 bp, Homo sapien
catgtaattcagataggacaagaag

SEQ ID NO: 1659189 - DNA, 25 bp, Homo sapien
tagaacaggatacccagtacgatgc

SEQ ID NO: 1659190 - DNA, 25 bp, Homo sapien
caggatacccagtacgatgctggtt

SEQ ID NO: 1659191 - DNA, 25 bp, Homo sapien
gctggtaggtcatgccttcctgcag

SEQ ID NO: 1659192 - DNA, 25 bp, Homo sapien
caggtagaacaggatacccagtacg

SEQ ID NO: 1659193 - DNA, 25 bp, Homo sapien
gaatcagatatgtaaggactccttc

SEQ ID NO: 1659194 - DNA, 25 bp, Homo sapien
aatcagatatgtaaggactccttcc

SEQ ID NO: 1659195 - DNA, 25 bp, Homo sapien
tcagatatgtaaggactccttccca

SEQ ID NO: 1659196 - DNA, 25 bp, Homo sapien
atcagatatgtaaggactccttccc

SEQ ID NO: 1659197 - DNA, 25 bp, Homo sapien
taaagaggatggtgcttattagggc

SEQ ID NO: 1659198 - DNA, 25 bp, Homo sapien
aatccagcatggacgggttggagcc

SEQ ID NO: 1659199 - DNA, 25 bp, Homo sapien
ttggagccggtaaagaggatggtgc

SEQ ID NO: 1659200 - DNA, 25 bp, Homo sapien
tggtgcttattagggctatgcaaag

SEQ ID NO: 1659201 - DNA, 25 bp, Homo sapien
aaggcccaggaaaggtccagcaagt

SEQ ID NO: 1659202 - DNA, 25 bp, Homo sapien
aggaaggcccaggaaaggtccagca

SEQ ID NO: 1659203 - DNA, 25 bp, Homo sapien
gaggaaggcccaggaaaggtccagc

SEQ ID NO: 1659204 - DNA, 25 bp, Homo sapien
agaagaggaggaaggcccaggaaag

SEQ ID NO: 1659205 - DNA, 25 bp, Homo sapien
tgggactcccaggtaactgattcaa

SEQ ID NO: 1659206 - DNA, 25 bp, Homo sapien
ggactttggttgagttcagagctga

SEQ ID NO: 1659207 - DNA, 25 bp, Homo sapien
tcagagctgagcacacttgccttca

SEQ ID NO: 1659208 - DNA, 25 bp, Homo sapien
gaacacttaaatgggcagtctcggt

SEQ ID NO: 1659209 - DNA, 25 bp, Homo sapien
tgatctgttgactgctgatagctgg

SEQ ID NO: 1659210 - DNA, 25 bp, Homo sapien
tcttggatactgaccaggcgattgc

SEQ ID NO: 1659211 - DNA, 25 bp, Homo sapien
ggctgttggatactgaccccgtgac

SEQ ID NO: 1659212 - DNA, 25 bp, Homo sapien
gaaatcgtggctgtaggtaatggct

SEQ ID NO: 1659213 - DNA, 25 bp, Homo sapien
tgtgctgagtcctcctcccgcccat

SEQ ID NO: 1659214 - DNA, 25 bp, Homo sapien
gtggtcctccgcctgaacatggccg

SEQ ID NO: 1659215 - DNA, 25 bp, Homo sapien
ctccgcctgaacatggccgactttg

SEQ ID NO: 1659216 - DNA, 25 bp, Homo sapien
ccgcctgaacatggccgactttgtc

SEQ ID NO: 1659217 - DNA, 25 bp, Homo sapien
tgcacatttgattttactgggggta

SEQ ID NO: 1659218 - DNA, 25 bp, Homo sapien
cacatttgattttactgggggtagg

SEQ ID NO: 1659219 - DNA, 25 bp, Homo sapien
gatgcacatttgattttactggggg

SEQ ID NO: 1659220 - DNA, 25 bp, Homo sapien
ggatgcacatttgattttactgggg

SEQ ID NO: 1659221 - DNA, 25 bp, Homo sapien
tccgctatggtgtcctcgatccact

SEQ ID NO: 1659222 - DNA, 25 bp, Homo sapien
ctgacggcgacagaaggcttattgg

SEQ ID NO: 1659223 - DNA, 25 bp, Homo sapien
acataagacagcactctgacggcga

SEQ ID NO: 1659224 - DNA, 25 bp, Homo sapien
gttctccgctatggtgtcctcgatc

SEQ ID NO: 1659225 - DNA, 25 bp, Homo sapien
atgtgacaccttggagcacaccatc

SEQ ID NO: 1659226 - DNA, 25 bp, Homo sapien
gtgacaccttggagcacaccatcac

SEQ ID NO: 1659227 - DNA, 25 bp, Homo sapien
tgacaccttggagcacaccatcaca

SEQ ID NO: 1659228 - DNA, 25 bp, Homo sapien
tgtgacaccttggagcacaccatca

SEQ ID NO: 1659229 - DNA, 25 bp, Homo sapien
gagtgagaaaggtctacggggccca

SEQ ID NO: 1659230 - DNA, 25 bp, Homo sapien
ggagagtgagaaaggtctacggggc

SEQ ID NO: 1659231 - DNA, 25 bp, Homo sapien
gagagtgagaaaggtctacggggcc

SEQ ID NO: 1659232 - DNA, 25 bp, Homo sapien
cgagtggctacagctagctgggaag

SEQ ID NO: 1659233 - DNA, 25 bp, Homo sapien
gctacagctagctgggaagcagtga

SEQ ID NO: 1659234 - DNA, 25 bp, Homo sapien
cagaagccagttcagaggctgagtc

SEQ ID NO: 1659235 - DNA, 25 bp, Homo sapien
agatgcctggttagctctcagaagc

SEQ ID NO: 1659236 - DNA, 25 bp, Homo sapien
tctggacgtgggcttttttgcactc

SEQ ID NO: 1659237 - DNA, 25 bp, Homo sapien
aggtgtccgacacacagcatgaagt

SEQ ID NO: 1659238 - DNA, 25 bp, Homo sapien
tgtcaccttctggacgtgggctttt

SEQ ID NO: 1659239 - DNA, 25 bp, Homo sapien
ttccaggtgtccgacacacagcatg

SEQ ID NO: 1659240 - DNA, 25 bp, Homo sapien
ctcccttggacgcaggagtccccat

SEQ ID NO: 1659241 - DNA, 25 bp, Homo sapien
cctttctcccttggacgcaggagtc

SEQ ID NO: 1659242 - DNA, 25 bp, Homo sapien
gccctttctcccttggacgcaggag

SEQ ID NO: 1659243 - DNA, 25 bp, Homo sapien
tttctcccttggacgcaggagtccc

SEQ ID NO: 1659244 - DNA, 25 bp, Homo sapien
tgtgatggtatcagcaggctctgtc

SEQ ID NO: 1659245 - DNA, 25 bp, Homo sapien
acgaccttcacagcatctgtgatgg

SEQ ID NO: 1659246 - DNA, 25 bp, Homo sapien
gaagccaaacaggtgctccccactt

SEQ ID NO: 1659247 - DNA, 25 bp, Homo sapien
tcgggttcctcggtgggcaactcca

SEQ ID NO: 1659248 - DNA, 25 bp, Homo sapien
ctgggctgtgttttcgtcgtcaaac

SEQ ID NO: 1659249 - DNA, 25 bp, Homo sapien
aagttgtggcgacccagccagagct

SEQ ID NO: 1659250 - DNA, 25 bp, Homo sapien
cagggtgtgggaagctctcactgac

SEQ ID NO: 1659251 - DNA, 25 bp, Homo sapien
ctgtagtcctcgtctgcttggcggg

SEQ ID NO: 1659252 - DNA, 25 bp, Homo sapien
gaaatacagacagcgaatgggaaga

SEQ ID NO: 1659253 - DNA, 25 bp, Homo sapien
gaaacagggtgagcaaaaaagaggc

SEQ ID NO: 1659254 - DNA, 25 bp, Homo sapien
gaaggataaaagacagggacagcga

SEQ ID NO: 1659255 - DNA, 25 bp, Homo sapien
aacagaacacggaagggagcgagaa

SEQ ID NO: 1659256 - DNA, 25 bp, Homo sapien
ctgaaatggtacagagccgcctgcc

SEQ ID NO: 1659257 - DNA, 25 bp, Homo sapien
cacaatccgggactgaatcgggggc

SEQ ID NO: 1659258 - DNA, 25 bp, Homo sapien
agtgctgaaatggtacagagccgcc

SEQ ID NO: 1659259 - DNA, 25 bp, Homo sapien
gcctcccacaatccgggactgaatc

SEQ ID NO: 1659260 - DNA, 25 bp, Homo sapien
tcccccccagggacagggcgaggca

SEQ ID NO: 1659261 - DNA, 25 bp, Homo sapien
gggacagggcgaggcacagaaccag

SEQ ID NO: 1659262 - DNA, 25 bp, Homo sapien
cagtcccccccagggacagggcgag

SEQ ID NO: 1659263 - DNA, 25 bp, Homo sapien
cccagggacagggcgaggcacagaa

SEQ ID NO: 1659264 - DNA, 25 bp, Homo sapien
tgtccaggggccagcaggtggagga

SEQ ID NO: 1659265 - DNA, 25 bp, Homo sapien
ccaggggccagcaggtggaggaact

SEQ ID NO: 1659266 - DNA, 25 bp, Homo sapien
ggtgacagaggtgtccaggggccag

SEQ ID NO: 1659267 - DNA, 25 bp, Homo sapien
gtgacagaggtgtccaggggccagc

SEQ ID NO: 1659268 - DNA, 25 bp, Homo sapien
gcaggccctggatcacgctggacgc

SEQ ID NO: 1659269 - DNA, 25 bp, Homo sapien
tggatcacgctggacgcattcctgg

SEQ ID NO: 1659270 - DNA, 25 bp, Homo sapien
ggccctggatcacgctggacgcatt

SEQ ID NO: 1659271 - DNA, 25 bp, Homo sapien
cctggatcacgctggacgcattcct

SEQ ID NO: 1659272 - DNA, 25 bp, Homo sapien
caggtgaccttgagcgccagctttg

SEQ ID NO: 1659273 - DNA, 25 bp, Homo sapien
ccttggctaacatctgggccttgga

SEQ ID NO: 1659274 - DNA, 25 bp, Homo sapien
tccgttctgttccatgtcaggcggg

SEQ ID NO: 1659275 - DNA, 25 bp, Homo sapien
tcctacagagcaacttggatcagcg

SEQ ID NO: 1659276 - DNA, 25 bp, Homo sapien
cagttcctcttcatggtttccctga

SEQ ID NO: 1659277 - DNA, 25 bp, Homo sapien
agttcctcttcatggtttccctgat

SEQ ID NO: 1659278 - DNA, 25 bp, Homo sapien
tcagttcctcttcatggtttccctg

SEQ ID NO: 1659279 - DNA, 25 bp, Homo sapien
tagtggcagactttggtatagacac

SEQ ID NO: 1659280 - DNA, 25 bp, Homo sapien
tccaagtagtggcagactttggtat

SEQ ID NO: 1659281 - DNA, 25 bp, Homo sapien
agtagtggcagactttggtatagac

SEQ ID NO: 1659282 - DNA, 25 bp, Homo sapien
caagtagtggcagactttggtatag

SEQ ID NO: 1659283 - DNA, 25 bp, Homo sapien
gtgttgtcacaagggacgtcacccc

SEQ ID NO: 1659284 - DNA, 25 bp, Homo sapien
gtggtgttgtcacaagggacgtcac

SEQ ID NO: 1659285 - DNA, 25 bp, Homo sapien
tgtcacaagggacgtcaccccagga

SEQ ID NO: 1659286 - DNA, 25 bp, Homo sapien
agggacgtcaccccaggacacaatg

SEQ ID NO: 1659287 - DNA, 25 bp, Homo sapien
attctgcgcctctgccctccgcgcc

SEQ ID NO: 1659288 - DNA, 25 bp, Homo sapien
aggattctgcgcctctgccctccgc

SEQ ID NO: 1659289 - DNA, 25 bp, Homo sapien
ctctgccctccgcgcctgcacacac

SEQ ID NO: 1659290 - DNA, 25 bp, Homo sapien
cgcctctgccctccgcgcctgcaca

SEQ ID NO: 1659291 - DNA, 25 bp, Homo sapien
tcacaagatgtgtccgagataatgc

SEQ ID NO: 1659292 - DNA, 25 bp, Homo sapien
gcacaatgcaacgtatctgggagac

SEQ ID NO: 1659293 - DNA, 25 bp, Homo sapien
gccctgggtagctcttgtcacaaga

SEQ ID NO: 1659294 - DNA, 25 bp, Homo sapien
gctgatgttggcacaatgcaacgta

SEQ ID NO: 1659295 - DNA, 25 bp, Homo sapien
caagagccctggagcataggattcc

SEQ ID NO: 1659296 - DNA, 25 bp, Homo sapien
attccttgaggcctcgcatccagct

SEQ ID NO: 1659297 - DNA, 25 bp, Homo sapien
gcagatccataaattccggcccttg

SEQ ID NO: 1659298 - DNA, 25 bp, Homo sapien
gtggacttggagcagatccataaat

SEQ ID NO: 1659299 - DNA, 25 bp, Homo sapien
ggcaacgcgtgggtagcaccgcggg

SEQ ID NO: 1659300 - DNA, 25 bp, Homo sapien
ggctcgttgtgggacaccaggcccc

SEQ ID NO: 1659301 - DNA, 25 bp, Homo sapien
ccagcggtcccaggctcgttgtggg

SEQ ID NO: 1659302 - DNA, 25 bp, Homo sapien
ggtcccaggctcgttgtgggacacc

SEQ ID NO: 1659303 - DNA, 25 bp, Homo sapien
agcaacatgatgtcgttgcggtggc

SEQ ID NO: 1659304 - DNA, 25 bp, Homo sapien
cgggctggactaggcgcagcaacat

SEQ ID NO: 1659305 - DNA, 25 bp, Homo sapien
tggaatgacccgagacgtggtccgt

SEQ ID NO: 1659306 - DNA, 25 bp, Homo sapien
gctctgggccatcgcgcttgcgcag

SEQ ID NO: 1659307 - DNA, 25 bp, Homo sapien
tccagcaacttgtcaccatcctggg

SEQ ID NO: 1659308 - DNA, 25 bp, Homo sapien
gagatgagggaagcgccacagttaa

SEQ ID NO: 1659309 - DNA, 25 bp, Homo sapien
cagttaaagcgtccacgctcgtaga

SEQ ID NO: 1659310 - DNA, 25 bp, Homo sapien
tagagagccacttgccatggctggg

SEQ ID NO: 1659311 - DNA, 25 bp, Homo sapien
gggcactggatacaggttcagacag

SEQ ID NO: 1659312 - DNA, 25 bp, Homo sapien
tcagtatgtgtgacccagccttggc

SEQ ID NO: 1659313 - DNA, 25 bp, Homo sapien
acgtcaaacgcatgtggccactcag

SEQ ID NO: 1659314 - DNA, 25 bp, Homo sapien
gaaaccagtcattcacggtcaccaa

SEQ ID NO: 1659315 - DNA, 25 bp, Homo sapien
aggaaggagagagtgaggagaagcc

SEQ ID NO: 1659316 - DNA, 25 bp, Homo sapien
gaaggagagagtgaggagaagccac

SEQ ID NO: 1659317 - DNA, 25 bp, Homo sapien
ctgtggatgccagcaggaaggagag

SEQ ID NO: 1659318 - DNA, 25 bp, Homo sapien
aggagagagtgaggagaagccacat

SEQ ID NO: 1659319 - DNA, 25 bp, Homo sapien
ggagggaccagggttcggctgcagt

SEQ ID NO: 1659320 - DNA, 25 bp, Homo sapien
aggagggaccagggttcggctgcag

SEQ ID NO: 1659321 - DNA, 25 bp, Homo sapien
cccaaagggtctttctacatctgga

SEQ ID NO: 1659322 - DNA, 25 bp, Homo sapien
ccgcgcctggtctatctcaaccctc

SEQ ID NO: 1659323 - DNA, 25 bp, Homo sapien
ggtctatctcaaccctcttatctgg

SEQ ID NO: 1659324 - DNA, 25 bp, Homo sapien
catgaccccaaagggtctttctaca

SEQ ID NO: 1659325 - DNA, 25 bp, Homo sapien
ggtcttgaagatggggctcaggtca

SEQ ID NO: 1659326 - DNA, 25 bp, Homo sapien
tgaggtctggcctgttcttttctcc

SEQ ID NO: 1659327 - DNA, 25 bp, Homo sapien
ctgaggtctggcctgttcttttctc

SEQ ID NO: 1659328 - DNA, 25 bp, Homo sapien
gaggtctggcctgttcttttctcca

SEQ ID NO: 1659329 - DNA, 25 bp, Homo sapien
aatgacctgcagtctggaatatgga

SEQ ID NO: 1659330 - DNA, 25 bp, Homo sapien
ggcattcgaatctagaacccacaat

SEQ ID NO: 1659331 - DNA, 25 bp, Homo sapien
cttgagttggagattaatgacctgc

SEQ ID NO: 1659332 - DNA, 25 bp, Homo sapien
cccacaataggagcctggaatctgg

SEQ ID NO: 1659333 - DNA, 25 bp, Homo sapien
ctttgcacctgctatgagaagcctg

SEQ ID NO: 1659334 - DNA, 25 bp, Homo sapien
tggcaatcgaggctggaaacctttg

SEQ ID NO: 1659335 - DNA, 25 bp, Homo sapien
gaggctggaaacctttgcacctgct

SEQ ID NO: 1659336 - DNA, 25 bp, Homo sapien
caatcgaggctggaaacctttgcac

SEQ ID NO: 1659337 - DNA, 25 bp, Homo sapien
gtttcttatccttaaaatcagagga

SEQ ID NO: 1659338 - DNA, 25 bp, Homo sapien
cttatccttaaaatcagaggatccc

SEQ ID NO: 1659339 - DNA, 25 bp, Homo sapien
tatccttaaaatcagaggatcccct

SEQ ID NO: 1659340 - DNA, 25 bp, Homo sapien
ttcttatccttaaaatcagaggatc

SEQ ID NO: 1659341 - DNA, 25 bp, Homo sapien
tgtgggtcccggttgtcttcctcac

SEQ ID NO: 1659342 - DNA, 25 bp, Homo sapien
tgtgtcaccatgtgggtcccggttg

SEQ ID NO: 1659343 - DNA, 25 bp, Homo sapien
acctgcacccggagagctgtgtcac

SEQ ID NO: 1659344 - DNA, 25 bp, Homo sapien
ccctgtccgtgacgtggattggtga

SEQ ID NO: 1659345 - DNA, 25 bp, Homo sapien
tccttcttcctagccaggctatctg

SEQ ID NO: 1659346 - DNA, 25 bp, Homo sapien
caaatgggtccctcagtctggcaat

SEQ ID NO: 1659347 - DNA, 25 bp, Homo sapien
gactcttagccccagactcttcatt

SEQ ID NO: 1659348 - DNA, 25 bp, Homo sapien
ggctatctggcctgagacaacaaat

SEQ ID NO: 1659349 - DNA, 25 bp, Homo sapien
agagcctgccgagctcacggatgct

SEQ ID NO: 1659350 - DNA, 25 bp, Homo sapien
cgctctacgatatgagcctcctgaa

SEQ ID NO: 1659351 - DNA, 25 bp, Homo sapien
cacggatgctgtgaaggtcatggac

SEQ ID NO: 1659352 - DNA, 25 bp, Homo sapien
gaagaatcgattcctcaggccaggt

SEQ ID NO: 1659353 - DNA, 25 bp, Homo sapien
ggatcaaggacaccatcgtggccaa

SEQ ID NO: 1659354 - DNA, 25 bp, Homo sapien
caccaaggtggtgcattaccggaag

SEQ ID NO: 1659355 - DNA, 25 bp, Homo sapien
ggccatgcctggagacatatcactc

SEQ ID NO: 1659356 - DNA, 25 bp, Homo sapien
tgtgcttcaaggtatcacgtcatgg

SEQ ID NO: 1659357 - DNA, 25 bp, Homo sapien
tggagatagaatacatggagctggc

SEQ ID NO: 1659358 - DNA, 25 bp, Homo sapien
tgaaaacggagtatgaagaccagtt

SEQ ID NO: 1659359 - DNA, 25 bp, Homo sapien
gggtaaaattctgcttcggatgagt

SEQ ID NO: 1659360 - DNA, 25 bp, Homo sapien
catgcgaggatgtgcattagtttgg

SEQ ID NO: 1659361 - DNA, 25 bp, Homo sapien
catgcaggagctcaactaggcagag

SEQ ID NO: 1659362 - DNA, 25 bp, Homo sapien
cctgaggtggttgcatgaatggaca

SEQ ID NO: 1659363 - DNA, 25 bp, Homo sapien
caagatggttgaggccaagtgacgc

SEQ ID NO: 1659364 - DNA, 25 bp, Homo sapien
gctttgggtaatgggaacacgatca

SEQ ID NO: 1659365 - DNA, 25 bp, Homo sapien
cacatgtaggataggagatgaaagg

SEQ ID NO: 1659366 - DNA, 25 bp, Homo sapien
catgtaggataggagatgaaaggag

SEQ ID NO: 1659367 - DNA, 25 bp, Homo sapien
acatgtaggataggagatgaaagga

SEQ ID NO: 1659368 - DNA, 25 bp, Homo sapien
tcacatgtaggataggagatgaaag

SEQ ID NO: 1659369 - DNA, 25 bp, Homo sapien
gcagcaggacgtccttgcactggaa

SEQ ID NO: 1659370 - DNA, 25 bp, Homo sapien
ctggaagttgccgaaatggtacaac

SEQ ID NO: 1659371 - DNA, 25 bp, Homo sapien
tggaagttgccgaaatggtacaacc

SEQ ID NO: 1659372 - DNA, 25 bp, Homo sapien
gcactggaagttgccgaaatggtac

SEQ ID NO: 1659373 - DNA, 25 bp, Homo sapien
tgtatccagtgaccttatcttcatc

SEQ ID NO: 1659374 - DNA, 25 bp, Homo sapien
agagaacttcttgccctctggtctt

SEQ ID NO: 1659375 - DNA, 25 bp, Homo sapien
tatcttcatccccaaccacagagaa

SEQ ID NO: 1659376 - DNA, 25 bp, Homo sapien
acagagaacttcttgccctctggtc

SEQ ID NO: 1659377 - DNA, 25 bp, Homo sapien
ccactgtggatgctctaagatgccc

SEQ ID NO: 1659378 - DNA, 25 bp, Homo sapien
gaggcagtgtgcagccgacagcacc

SEQ ID NO: 1659379 - DNA, 25 bp, Homo sapien
tcttaaagttttccactgacggtgc

SEQ ID NO: 1659380 - DNA, 25 bp, Homo sapien
tgttgccaccaatgaggactttgct

SEQ ID NO: 1659381 - DNA, 25 bp, Homo sapien
tacctcctcttacaccatcctcaga

SEQ ID NO: 1659382 - DNA, 25 bp, Homo sapien
cccagccaggacatgtccgttctaa

SEQ ID NO: 1659383 - DNA, 25 bp, Homo sapien
ctggtctgtccctccgatacctcct

SEQ ID NO: 1659384 - DNA, 25 bp, Homo sapien
gacatgtccgttctaaactccaggc

SEQ ID NO: 1659385 - DNA, 25 bp, Homo sapien
gcatcgtcctatggagttgacctga

SEQ ID NO: 1659386 - DNA, 25 bp, Homo sapien
tcttcagagcaaggagtgccgcagg

SEQ ID NO: 1659387 - DNA, 25 bp, Homo sapien
aactaactgaggtctggcatcgtcc

SEQ ID NO: 1659388 - DNA, 25 bp, Homo sapien
tgttattataggcaacccctccagg

SEQ ID NO: 1659389 - DNA, 25 bp, Homo sapien
taaggttgggtcaacgtgccacaag

SEQ ID NO: 1659390 - DNA, 25 bp, Homo sapien
gagtctaggtggcattggaccgctg

SEQ ID NO: 1659391 - DNA, 25 bp, Homo sapien
gcattggaccgctgggtctgaggga

SEQ ID NO: 1659392 - DNA, 25 bp, Homo sapien
cgcttctcttagactttatttctgg

SEQ ID NO: 1659393 - DNA, 25 bp, Homo sapien
attcctgaattccttccgcaggatg

SEQ ID NO: 1659394 - DNA, 25 bp, Homo sapien
ggatctgtacccttggtttgaggga

SEQ ID NO: 1659395 - DNA, 25 bp, Homo sapien
attccttccgcaggatgtatttggg

SEQ ID NO: 1659396 - DNA, 25 bp, Homo sapien
gctggggatctgtacccttggtttg

SEQ ID NO: 1659397 - DNA, 25 bp, Homo sapien
ggttttctctatccactcagtgaat

SEQ ID NO: 1659398 - DNA, 25 bp, Homo sapien
ctggcctggacggttttctctatcc

SEQ ID NO: 1659399 - DNA, 25 bp, Homo sapien
ctctatccactcagtgaatttgcag

SEQ ID NO: 1659400 - DNA, 25 bp, Homo sapien
tggacggttttctctatccactcag

SEQ ID NO: 1659401 - DNA, 25 bp, Homo sapien
cttttccgaaagacacaaggccctg

SEQ ID NO: 1659402 - DNA, 25 bp, Homo sapien
tggcacgccaacttggccacacggg

SEQ ID NO: 1659403 - DNA, 25 bp, Homo sapien
tgcaagtacccgttgcagatcaggg

SEQ ID NO: 1659404 - DNA, 25 bp, Homo sapien
caaggccctgcaagtacccgttgca

SEQ ID NO: 1659405 - DNA, 25 bp, Homo sapien
tccaacaaaggtatatcatgaatgc

SEQ ID NO: 1659406 - DNA, 25 bp, Homo sapien
cataaaacgtatgcataaatcgact

SEQ ID NO: 1659407 - DNA, 25 bp, Homo sapien
aaattcacagacgaactgtgtagct

SEQ ID NO: 1659408 - DNA, 25 bp, Homo sapien
aacagtaggctatttctagtcaggt

SEQ ID NO: 1659409 - DNA, 25 bp, Homo sapien
acagcgggtcatagagcttactgca

SEQ ID NO: 1659410 - DNA, 25 bp, Homo sapien
cttactgcagacctcctcagacacc

SEQ ID NO: 1659411 - DNA, 25 bp, Homo sapien
gtggtacagcgggtcatagagctta

SEQ ID NO: 1659412 - DNA, 25 bp, Homo sapien
tggtcgtgccctccgccggcgcaga

SEQ ID NO: 1659413 - DNA, 25 bp, Homo sapien
cacgcactgcagcacggtaggcatt

SEQ ID NO: 1659414 - DNA, 25 bp, Homo sapien
tcacgcactgcagcacggtaggcat

SEQ ID NO: 1659415 - DNA, 25 bp, Homo sapien
ggacctccttgaagagggcagacac

SEQ ID NO: 1659416 - DNA, 25 bp, Homo sapien
ccgcgactgggcagaggacctcctt

SEQ ID NO: 1659417 - DNA, 25 bp, Homo sapien
gaagagggcagacacacacccgtga

SEQ ID NO: 1659418 - DNA, 25 bp, Homo sapien
agctctgggtcagcccccgcgactg

SEQ ID NO: 1659419 - DNA, 25 bp, Homo sapien
tgagcatgaggtcgttagcgagcaa

SEQ ID NO: 1659420 - DNA, 25 bp, Homo sapien
aagggtctgttgtactctgggtgcc

SEQ ID NO: 1659421 - DNA, 25 bp, Homo sapien
tgtcagactcggacacggattcgtc

SEQ ID NO: 1659422 - DNA, 25 bp, Homo sapien
cggtagggcactgcgaagcaatgct

SEQ ID NO: 1659423 - DNA, 25 bp, Homo sapien
agtccttccgaagcaagattcccgc

SEQ ID NO: 1659424 - DNA, 25 bp, Homo sapien
cactgggctgagatttcaagtcagg

SEQ ID NO: 1659425 - DNA, 25 bp, Homo sapien
ctctctgagtccttccgaagcaaga

SEQ ID NO: 1659426 - DNA, 25 bp, Homo sapien
ggctgagatttcaagtcaggactct

SEQ ID NO: 1659427 - DNA, 25 bp, Homo sapien
ccgagcagaacaattcgttttccat

SEQ ID NO: 1659428 - DNA, 25 bp, Homo sapien
acagcacccactgcggatgcaccag

SEQ ID NO: 1659429 - DNA, 25 bp, Homo sapien
actgcggatgcaccaggacgcccga

SEQ ID NO: 1659430 - DNA, 25 bp, Homo sapien
aacagtgtgcggctgacagcaccca

SEQ ID NO: 1659431 - DNA, 25 bp, Homo sapien
gctgcgagtgcgggctgcagtcctc

SEQ ID NO: 1659432 - DNA, 25 bp, Homo sapien
gcagtcctcgccgtttatgatttgg

SEQ ID NO: 1659433 - DNA, 25 bp, Homo sapien
gctgcagtcctcgccgtttatgatt

SEQ ID NO: 1659434 - DNA, 25 bp, Homo sapien
ggctgcgagtgcgggctgcagtcct

SEQ ID NO: 1659435 - DNA, 25 bp, Homo sapien
ctgcagctaccagagacgagcgatc

SEQ ID NO: 1659436 - DNA, 25 bp, Homo sapien
caaggatgaggtaccccaggaacca

SEQ ID NO: 1659437 - DNA, 25 bp, Homo sapien
aaggatgaggtaccccaggaaccag

SEQ ID NO: 1659438 - DNA, 25 bp, Homo sapien
aggatgaggtaccccaggaaccagc

SEQ ID NO: 1659439 - DNA, 25 bp, Homo sapien
gaaggacacgtggcctaagggctct

SEQ ID NO: 1659440 - DNA, 25 bp, Homo sapien
tggcctaagggctctccatcaacgg

SEQ ID NO: 1659441 - DNA, 25 bp, Homo sapien
gacacgtggcctaagggctctccat

SEQ ID NO: 1659442 - DNA, 25 bp, Homo sapien
taagggctctccatcaacggcgatg

SEQ ID NO: 1659443 - DNA, 25 bp, Homo sapien
tagtacaggactcgcagcggcagtg

SEQ ID NO: 1659444 - DNA, 25 bp, Homo sapien
gatagtacaggactcgcagcggcag

SEQ ID NO: 1659445 - DNA, 25 bp, Homo sapien
agtacaggactcgcagcggcagtgt

SEQ ID NO: 1659446 - DNA, 25 bp, Homo sapien
atagtacaggactcgcagcggcagt

SEQ ID NO: 1659447 - DNA, 25 bp, Homo sapien
tgaaagtgccccagggagattgaga

SEQ ID NO: 1659448 - DNA, 25 bp, Homo sapien
ccctgagcttgaggatgaaagtgcc

SEQ ID NO: 1659449 - DNA, 25 bp, Homo sapien
cttctcagtttatttctgggactaa

SEQ ID NO: 1659450 - DNA, 25 bp, Homo sapien
ttgttcccagggttcaactagagag

SEQ ID NO: 1659451 - DNA, 25 bp, Homo sapien
aggagttggcctggatggtttcctg

SEQ ID NO: 1659452 - DNA, 25 bp, Homo sapien
tcaggagttggcctggatggtttcc

SEQ ID NO: 1659453 - DNA, 25 bp, Homo sapien
ggagttggcctggatggtttcctgg

SEQ ID NO: 1659454 - DNA, 25 bp, Homo sapien
caggagttggcctggatggtttcct

SEQ ID NO: 1659455 - DNA, 25 bp, Homo sapien
tgtagacacccggtctgttgggccg

SEQ ID NO: 1659456 - DNA, 25 bp, Homo sapien
gcagaggttcgtgtagacacccggt

SEQ ID NO: 1659457 - DNA, 25 bp, Homo sapien
gcacaagggtaatctccccaggaca

SEQ ID NO: 1659458 - DNA, 25 bp, Homo sapien
ttgggccgggcacaagggtaatctc

SEQ ID NO: 1659459 - DNA, 25 bp, Homo sapien
cagggagccattgcagaccacaggc

SEQ ID NO: 1659460 - DNA, 25 bp, Homo sapien
gggagccattgcagaccacaggccc

SEQ ID NO: 1659461 - DNA, 25 bp, Homo sapien
agaccacaggccccccagaatcacc

SEQ ID NO: 1659462 - DNA, 25 bp, Homo sapien
ctgcagggagccattgcagaccaca

SEQ ID NO: 1659463 - DNA, 25 bp, Homo sapien
ttaccgcagcctcaaacgtttgggc

SEQ ID NO: 1659464 - DNA, 25 bp, Homo sapien
gtcatctatctgtctcgggtaagca

SEQ ID NO: 1659465 - DNA, 25 bp, Homo sapien
cactggaggaccttagggaagtgca

SEQ ID NO: 1659466 - DNA, 25 bp, Homo sapien
cacgctgatattcaagcactggagg

SEQ ID NO: 1659467 - DNA, 25 bp, Homo sapien
gcatcctcgcaccttttctgactta

SEQ ID NO: 1659468 - DNA, 25 bp, Homo sapien
gaaagatggaaggcggcagagatgg

SEQ ID NO: 1659469 - DNA, 25 bp, Homo sapien
agaaagatggaaggcggcagagatg

SEQ ID NO: 1659470 - DNA, 25 bp, Homo sapien
cagattcataaactggtgacaggga

SEQ ID NO: 1659471 - DNA, 25 bp, Homo sapien
catctttagtgggacgaattcttct

SEQ ID NO: 1659472 - DNA, 25 bp, Homo sapien
ggaacatctgctgcccagattcata

SEQ ID NO: 1659473 - DNA, 25 bp, Homo sapien
tagtggccgagacggactctgaaaa

SEQ ID NO: 1659474 - DNA, 25 bp, Homo sapien
gccacggctgggtgtgcatatcgca

SEQ ID NO: 1659475 - DNA, 25 bp, Homo sapien
cagtcggatccattgatgatgcggc

SEQ ID NO: 1659476 - DNA, 25 bp, Homo sapien
ccgcagtagagctggttgggcctta

SEQ ID NO: 1659477 - DNA, 25 bp, Homo sapien
ctgctgtcatccgaccgggcgtctt

SEQ ID NO: 1659478 - DNA, 25 bp, Homo sapien
ctgtgacccccagaagcaaggctgt

SEQ ID NO: 1659479 - DNA, 25 bp, Homo sapien
gaagcaaggctgtgatcagagcaca

SEQ ID NO: 1659480 - DNA, 25 bp, Homo sapien
tgatcagagcacagagcacccacat

SEQ ID NO: 1659481 - DNA, 25 bp, Homo sapien
cacccacatccaggggggtcttgct

SEQ ID NO: 1659482 - DNA, 25 bp, Homo sapien
acaaggacgggccaccatcggcact

SEQ ID NO: 1659483 - DNA, 25 bp, Homo sapien
tagagaggaaccacaaggacgggcc

SEQ ID NO: 1659484 - DNA, 25 bp, Homo sapien
cccaggtagagaggaaccacaagga

SEQ ID NO: 1659485 - DNA, 25 bp, Homo sapien
ggccaccatcggcactgcgctgaga

SEQ ID NO: 1659486 - DNA, 25 bp, Homo sapien
aagataggagtctagcagcctccag

SEQ ID NO: 1659487 - DNA, 25 bp, Homo sapien
tgcctgctgagccaccctcaccagg

SEQ ID NO: 1659488 - DNA, 25 bp, Homo sapien
cctgctgagccaccctcaccaggtc

SEQ ID NO: 1659489 - DNA, 25 bp, Homo sapien
ctgagccaccctcaccaggtctcac

SEQ ID NO: 1659490 - DNA, 25 bp, Homo sapien
tccctgcctgctgagccaccctcac

SEQ ID NO: 1659491 - DNA, 25 bp, Homo sapien
gctcagccgcagacttctcaggcct

SEQ ID NO: 1659492 - DNA, 25 bp, Homo sapien
ggcaccgggcctgagttataaccac

SEQ ID NO: 1659493 - DNA, 25 bp, Homo sapien
ctctgggcaccgggcctgagttata

SEQ ID NO: 1659494 - DNA, 25 bp, Homo sapien
ggcctgagttataaccacccactgc

SEQ ID NO: 1659495 - DNA, 25 bp, Homo sapien
cagtgaagaaaggtacatcccaagg

SEQ ID NO: 1659496 - DNA, 25 bp, Homo sapien
ctttattgagtgcatggtggcccag

SEQ ID NO: 1659497 - DNA, 25 bp, Homo sapien
gagatgcctagaagggattttcctg

SEQ ID NO: 1659498 - DNA, 25 bp, Homo sapien
gacaccgacagtaagcagcggagct

SEQ ID NO: 1659499 - DNA, 25 bp, Homo sapien
tcatcacgtcctccccagtgatgca

SEQ ID NO: 1659500 - DNA, 25 bp, Homo sapien
cctccccagtgatgcaaggatggag

SEQ ID NO: 1659501 - DNA, 25 bp, Homo sapien
cgtcctccccagtgatgcaaggatg

SEQ ID NO: 1659502 - DNA, 25 bp, Homo sapien
tcacgtcctccccagtgatgcaagg

SEQ ID NO: 1659503 - DNA, 25 bp, Homo sapien
gggagaatcaggaccctcacgtcgc

SEQ ID NO: 1659504 - DNA, 25 bp, Homo sapien
gcgtttattaagcatcagggtcaga

SEQ ID NO: 1659505 - DNA, 25 bp, Homo sapien
gtgagagacgttctggaaccagcca

SEQ ID NO: 1659506 - DNA, 25 bp, Homo sapien
tctaggtgagagacgttctggaacc

SEQ ID NO: 1659507 - DNA, 25 bp, Homo sapien
cctgaatggttttttggatccagtt

SEQ ID NO: 1659508 - DNA, 25 bp, Homo sapien
tggttttttggatccagttcgtgta

SEQ ID NO: 1659509 - DNA, 25 bp, Homo sapien
ggatccagttcgtgtatctgcagac

SEQ ID NO: 1659510 - DNA, 25 bp, Homo sapien
ttttggatccagttcgtgtatctgc

SEQ ID NO: 1659511 - DNA, 25 bp, Homo sapien
ctcctttgatccacaggggatgtta

SEQ ID NO: 1659512 - DNA, 25 bp, Homo sapien
tctcctttgatccacaggggatgtt

SEQ ID NO: 1659513 - DNA, 25 bp, Homo sapien
ggtggtctccacataccagcggacc

SEQ ID NO: 1659514 - DNA, 25 bp, Homo sapien
acataccagcggacccccagaatca

SEQ ID NO: 1659515 - DNA, 25 bp, Homo sapien
cccatgacacaaggcctcggaggtg

SEQ ID NO: 1659516 - DNA, 25 bp, Homo sapien
ctcggaggtggtctccacataccag

SEQ ID NO: 1659517 - DNA, 25 bp, Homo sapien
cactcctcacgggacaccaggtgga

SEQ ID NO: 1659518 - DNA, 25 bp, Homo sapien
ctcctcacgggacaccaggtggatg

SEQ ID NO: 1659519 - DNA, 25 bp, Homo sapien
ctggccagggtaggcatgctcacac

SEQ ID NO: 1659520 - DNA, 25 bp, Homo sapien
ccagggtaggcatgctcacactcct

SEQ ID NO: 1659521 - DNA, 25 bp, Homo sapien
cgaaggttatgcttccccaggaaga

SEQ ID NO: 1659522 - DNA, 25 bp, Homo sapien
cgtgccaggcgcaacagcatgatgt

SEQ ID NO: 1659523 - DNA, 25 bp, Homo sapien
catggctggcggcatcatagtcagg

SEQ ID NO: 1659524 - DNA, 25 bp, Homo sapien
catagtcagggtggatcacagcccg

SEQ ID NO: 1659525 - DNA, 25 bp, Homo sapien
gacccacagtggatggataaggacc

SEQ ID NO: 1659526 - DNA, 25 bp, Homo sapien
agggtccgccatgcaccaacttatt

SEQ ID NO: 1659527 - DNA, 25 bp, Homo sapien
ccacagagcaagtggcccgaggtgt

SEQ ID NO: 1659528 - DNA, 25 bp, Homo sapien
tgagatgtcttgtcgcagggtccgc

SEQ ID NO: 1659529 - DNA, 25 bp, Homo sapien
ctgcagcaatcagactcagcaccac

SEQ ID NO: 1659530 - DNA, 25 bp, Homo sapien
gaagccacatggtccattagtcact

SEQ ID NO: 1659531 - DNA, 25 bp, Homo sapien
gccacatggtccattagtcactgcc

SEQ ID NO: 1659532 - DNA, 25 bp, Homo sapien
gggaagccacatggtccattagtca

SEQ ID NO: 1659533 - DNA, 25 bp, Homo sapien
agaggggaagccacatggtccatta

SEQ ID NO: 1659534 - DNA, 25 bp, Homo sapien
caggcctccgggctccggggattct

SEQ ID NO: 1659535 - DNA, 25 bp, Homo sapien
ctccgggctccggggattcttgagt

SEQ ID NO: 1659536 - DNA, 25 bp, Homo sapien
gattcttgagtcgggggaaggaaca

SEQ ID NO: 1659537 - DNA, 25 bp, Homo sapien
attcttgagtcgggggaaggaacag

SEQ ID NO: 1659538 - DNA, 25 bp, Homo sapien
aggagagaagacactcagatgcagt

SEQ ID NO: 1659539 - DNA, 25 bp, Homo sapien
tgaggagagaagacactcagatgca

SEQ ID NO: 1659540 - DNA, 25 bp, Homo sapien
gccgtgaggagagaagacactcaga

SEQ ID NO: 1659541 - DNA, 25 bp, Homo sapien
gagccgtgaggagagaagacactca

SEQ ID NO: 1659542 - DNA, 25 bp, Homo sapien
cccaggaacaatcgggctttgtccg

SEQ ID NO: 1659543 - DNA, 25 bp, Homo sapien
gggagacagctacagcgtgtgtcac

SEQ ID NO: 1659544 - DNA, 25 bp, Homo sapien
gcccgtaggtccctctgtgtgctgc

SEQ ID NO: 1659545 - DNA, 25 bp, Homo sapien
gacagctacagcgtgtgtcaccaca

SEQ ID NO: 1659546 - DNA, 25 bp, Homo sapien
tctcggtgtacgttgaccaagtgtc

SEQ ID NO: 1659547 - DNA, 25 bp, Homo sapien
tcatgacgaccccagtatgcagtct

SEQ ID NO: 1659548 - DNA, 25 bp, Homo sapien
aaaacatcgttgtgccaagccagac

SEQ ID NO: 1659549 - DNA, 25 bp, Homo sapien
tgtaatatcattgtgggctggccgt

SEQ ID NO: 1659550 - DNA, 25 bp, Homo sapien
tcctgggtcattgggttggccgcaa

SEQ ID NO: 1659551 - DNA, 25 bp, Homo sapien
caccagaccttgcagggtacctctg

SEQ ID NO: 1659552 - DNA, 25 bp, Homo sapien
cttggtgaacttgcacacttgagtg

SEQ ID NO: 1659553 - DNA, 25 bp, Homo sapien
ggtacctctgcacaccaacggtccc

SEQ ID NO: 1659554 - DNA, 25 bp, Homo sapien
gaatagagccggagattaactttgg

SEQ ID NO: 1659555 - DNA, 25 bp, Homo sapien
gcttcagatcaaagcccaactcatt

SEQ ID NO: 1659556 - DNA, 25 bp, Homo sapien
tggacttccaccatagccaatgaga

SEQ ID NO: 1659557 - DNA, 25 bp, Homo sapien
cagttatcggtctttgtcttgcaga

SEQ ID NO: 1659558 - DNA, 25 bp, Homo sapien
ttgtaaaccttcgtgcagtcctggg

SEQ ID NO: 1659559 - DNA, 25 bp, Homo sapien
ttgcaggcgtttttcttggagtcgg

SEQ ID NO: 1659560 - DNA, 25 bp, Homo sapien
gccagcgcacagcatggaattttcc

SEQ ID NO: 1659561 - DNA, 25 bp, Homo sapien
catccacgcacatgaggtcagaggg

SEQ ID NO: 1659562 - DNA, 25 bp, Homo sapien
tctgggctcgtggtagtgccccagc

SEQ ID NO: 1659563 - DNA, 25 bp, Homo sapien
ccggagacagtacaggtggttccag

SEQ ID NO: 1659564 - DNA, 25 bp, Homo sapien
catctgggctcgtggtagtgcccca

SEQ ID NO: 1659565 - DNA, 25 bp, Homo sapien
gtgccccagccggagacagtacagg

SEQ ID NO: 1659566 - DNA, 25 bp, Homo sapien
cttcacgagcatgaggtcattaaca

SEQ ID NO: 1659567 - DNA, 25 bp, Homo sapien
actgcccaggtgcacggtgtactca

SEQ ID NO: 1659568 - DNA, 25 bp, Homo sapien
ggaatgacttcgaggccttgatcct

SEQ ID NO: 1659569 - DNA, 25 bp, Homo sapien
ggcctggctattgagcttcacgagc

SEQ ID NO: 1659570 - DNA, 25 bp, Homo sapien
agtgacattcacagattcagaagag

SEQ ID NO: 1659571 - DNA, 25 bp, Homo sapien
ctgcgaggagtgacattcacagatt

SEQ ID NO: 1659572 - DNA, 25 bp, Homo sapien
gacattcacagattcagaagagaca

SEQ ID NO: 1659573 - DNA, 25 bp, Homo sapien
tgcgaggagtgacattcacagattc

SEQ ID NO: 1659574 - DNA, 25 bp, Homo sapien
cctccgcagtggagctgattgccac

SEQ ID NO: 1659575 - DNA, 25 bp, Homo sapien
aggacgcctccgcagtggagctgat

SEQ ID NO: 1659576 - DNA, 25 bp, Homo sapien
tgaccaggacgcctccgcagtggag

SEQ ID NO: 1659577 - DNA, 25 bp, Homo sapien
tcattgaccaggacgcctccgcagt

SEQ ID NO: 1659578 - DNA, 25 bp, Homo sapien
catggggcgccatcaataatcttgt

SEQ ID NO: 1659579 - DNA, 25 bp, Homo sapien
ccatcaataatcttgtcaccctggg

SEQ ID NO: 1659580 - DNA, 25 bp, Homo sapien
gggcgccatcaataatcttgtcacc

SEQ ID NO: 1659581 - DNA, 25 bp, Homo sapien
gcctcttgcacatggggcgccatca

SEQ ID NO: 1659582 - DNA, 25 bp, Homo sapien
gatggagacatggaggagcacgtgg

SEQ ID NO: 1659583 - DNA, 25 bp, Homo sapien
ctggatggagacatggaggagcacg

SEQ ID NO: 1659584 - DNA, 25 bp, Homo sapien
ggagacatggaggagcacgtgggta

SEQ ID NO: 1659585 - DNA, 25 bp, Homo sapien
gagacatggaggagcacgtgggtag

SEQ ID NO: 1659586 - DNA, 25 bp, Homo sapien
aaggatagcagtaagatctgcaggg

SEQ ID NO: 1659587 - DNA, 25 bp, Homo sapien
atagcagtaagatctgcaggggcag

SEQ ID NO: 1659588 - DNA, 25 bp, Homo sapien
ggatagcagtaagatctgcaggggc

SEQ ID NO: 1659589 - DNA, 25 bp, Homo sapien
ctaaggatagcagtaagatctgcag

SEQ ID NO: 1659590 - DNA, 25 bp, Homo sapien
ggctgccaggcgaggaagggcctct

SEQ ID NO: 1659591 - DNA, 25 bp, Homo sapien
tgccctgctgagccgctcaggggct

SEQ ID NO: 1659592 - DNA, 25 bp, Homo sapien
tcaggggctgccaggcgaggaaggg

SEQ ID NO: 1659593 - DNA, 25 bp, Homo sapien
ggtgccctgctgagccgctcagggg

SEQ ID NO: 1659594 - DNA, 25 bp, Homo sapien
tctcgagagcagagtcaggcttgga

SEQ ID NO: 1659595 - DNA, 25 bp, Homo sapien
ctctcgagagcagagtcaggcttgg

SEQ ID NO: 1659596 - DNA, 25 bp, Homo sapien
gcagagtcaggcttggagccagcat

SEQ ID NO: 1659597 - DNA, 25 bp, Homo sapien
gagagcagagtcaggcttggagcca

SEQ ID NO: 1659598 - DNA, 25 bp, Homo sapien
ggatctgatgtgatccaagttccga

SEQ ID NO: 1659599 - DNA, 25 bp, Homo sapien
gtgatccaagttccgacttgggctg

SEQ ID NO: 1659600 - DNA, 25 bp, Homo sapien
tgctgggccgtcctcttatatcacc

SEQ ID NO: 1659601 - DNA, 25 bp, Homo sapien
aggcggagccgactctgggacaccc

SEQ ID NO: 1659602 - DNA, 25 bp, Homo sapien
aactggcatctgataatcttgccag

SEQ ID NO: 1659603 - DNA, 25 bp, Homo sapien
tccatcgtcctcagacctatgtcct

SEQ ID NO: 1659604 - DNA, 25 bp, Homo sapien
gtgaccctcgtacctcctgactcag

SEQ ID NO: 1659605 - DNA, 25 bp, Homo sapien
aacactgtgaccctcgtacctcctg

SEQ ID NO: 1659606 - DNA, 25 bp, Homo sapien
gtttattaagggagatctagtgctt

SEQ ID NO: 1659607 - DNA, 25 bp, Homo sapien
tattaagggagatctagtgcttatc

SEQ ID NO: 1659608 - DNA, 25 bp, Homo sapien
aagggagatctagtgcttatcctag

SEQ ID NO: 1659609 - DNA, 25 bp, Homo sapien
gggagatctagtgcttatcctagaa

SEQ ID NO: 1659610 - DNA, 25 bp, Homo sapien
tagacgccaggtttgtcggacctcc

SEQ ID NO: 1659611 - DNA, 25 bp, Homo sapien
gcagatgttggtatagacgccaggt

SEQ ID NO: 1659612 - DNA, 25 bp, Homo sapien
ccaggtagcggcagatgttggtata

SEQ ID NO: 1659613 - DNA, 25 bp, Homo sapien
tccagtccaggtagcggcagatgtt

SEQ ID NO: 1659614 - DNA, 25 bp, Homo sapien
acacaccagggggcctccagaatcg

SEQ ID NO: 1659615 - DNA, 25 bp, Homo sapien
cacacaccagggggcctccagaatc

SEQ ID NO: 1659616 - DNA, 25 bp, Homo sapien
tcacacaccagggggcctccagaat

SEQ ID NO: 1659617 - DNA, 25 bp, Homo sapien
acaccagggggcctccagaatcgcc

SEQ ID NO: 1659618 - DNA, 25 bp, Homo sapien
gcgttttaccagttctttggcatga

SEQ ID NO: 1659619 - DNA, 25 bp, Homo sapien
tgagaacagccttgcatctgagatg

SEQ ID NO: 1659620 - DNA, 25 bp, Homo sapien
gatgtccacaacgtcccttttcctg

SEQ ID NO: 1659621 - DNA, 25 bp, Homo sapien
ggcatgattggtcccctgtagccaa

SEQ ID NO: 1659622 - DNA, 25 bp, Homo sapien
aggcgttccagaccagcctggccaa

SEQ ID NO: 1659623 - DNA, 25 bp, Homo sapien
ggccaacatggtgaatccctgtctc

SEQ ID NO: 1659624 - DNA, 25 bp, Homo sapien
ccaacatggtgaatccctgtctcta

SEQ ID NO: 1659625 - DNA, 25 bp, Homo sapien
gccgaggcggtagatcacttgaagt

SEQ ID NO: 1659626 - DNA, 25 bp, Homo sapien
atgccatctgtgatctgccccgggt

SEQ ID NO: 1659627 - DNA, 25 bp, Homo sapien
cccgggtaagcatcctcacacttct

SEQ ID NO: 1659628 - DNA, 25 bp, Homo sapien
cagttgagagtgtcaggaaaattct

SEQ ID NO: 1659629 - DNA, 25 bp, Homo sapien
ttctgcacagttgagagtgtcagga

SEQ ID NO: 1659630 - DNA, 25 bp, Homo sapien
agaggttgtaaggttccctgagaga

SEQ ID NO: 1659631 - DNA, 25 bp, Homo sapien
aggttgtaaggttccctgagagagc

SEQ ID NO: 1659632 - DNA, 25 bp, Homo sapien
gaagaggttgtaaggttccctgaga

SEQ ID NO: 1659633 - DNA, 25 bp, Homo sapien
ggttgtaaggttccctgagagagca

SEQ ID NO: 1659634 - DNA, 25 bp, Homo sapien
catcagatcatggttgtggtcctcc

SEQ ID NO: 1659635 - DNA, 25 bp, Homo sapien
agacggtgcacttctggccaggctg

SEQ ID NO: 1659636 - DNA, 25 bp, Homo sapien
ggatgcctggtcacgcagttgaaga

SEQ ID NO: 1659637 - DNA, 25 bp, Homo sapien
tgtggtctcccaggcgtactgtgta

SEQ ID NO: 1659638 - DNA, 25 bp, Homo sapien
agagtagttgctggccctggaacaa

SEQ ID NO: 1659639 - DNA, 25 bp, Homo sapien
aaggacaccgccacagagtagttgc

SEQ ID NO: 1659640 - DNA, 25 bp, Homo sapien
cctggaacaaggccgcctgccaagg

SEQ ID NO: 1659641 - DNA, 25 bp, Homo sapien
ggacccagttgccacctacaaggac

SEQ ID NO: 1659642 - DNA, 25 bp, Homo sapien
gaatggggttggcactcatgacccc

SEQ ID NO: 1659643 - DNA, 25 bp, Homo sapien
ggttggcactcatgaccccccagca

SEQ ID NO: 1659644 - DNA, 25 bp, Homo sapien
tgcgaatggggttggcactcatgac

SEQ ID NO: 1659645 - DNA, 25 bp, Homo sapien
ttgtcctcctgtgccctggagtgtc

SEQ ID NO: 1659646 - DNA, 25 bp, Homo sapien
ggagagggttggatcgccaccctct

SEQ ID NO: 1659647 - DNA, 25 bp, Homo sapien
gtgaggaggtccaggcttccacacg

SEQ ID NO: 1659648 - DNA, 25 bp, Homo sapien
ccgcatacaacttagtgaggaggtc

SEQ ID NO: 1659649 - DNA, 25 bp, Homo sapien
atggacacacggcaagttctccgca

SEQ ID NO: 1659650 - DNA, 25 bp, Homo sapien
cctgcaccgtatcgcactcttcaca

SEQ ID NO: 1659651 - DNA, 25 bp, Homo sapien
tgcaccgtatcgcactcttcacatc

SEQ ID NO: 1659652 - DNA, 25 bp, Homo sapien
ccgtatcgcactcttcacatccgtg

SEQ ID NO: 1659653 - DNA, 25 bp, Homo sapien
agaggctcctgcaccgtatcgcact

SEQ ID NO: 1659654 - DNA, 25 bp, Homo sapien
gcaagagcaggaacatccacgtctt

SEQ ID NO: 1659655 - DNA, 25 bp, Homo sapien
aggaacatccacgtcttggccgcac

SEQ ID NO: 1659656 - DNA, 25 bp, Homo sapien
agagcaggaacatccacgtcttggc

SEQ ID NO: 1659657 - DNA, 25 bp, Homo sapien
catccacgtcttggccgcacgaggt

SEQ ID NO: 1659658 - DNA, 25 bp, Homo sapien
cctggtacacgattctggagccttt

SEQ ID NO: 1659659 - DNA, 25 bp, Homo sapien
tctgcctggtacacgattctggagc

SEQ ID NO: 1659660 - DNA, 25 bp, Homo sapien
gaggaggccccagtacttcagttct

SEQ ID NO: 1659661 - DNA, 25 bp, Homo sapien
ggtcacctactgattcggacccagt

SEQ ID NO: 1659662 - DNA, 25 bp, Homo sapien
tgtgtcttgcttgacctcgtgaggg

SEQ ID NO: 1659663 - DNA, 25 bp, Homo sapien
cattggctctaaaggtatccagacc

SEQ ID NO: 1659664 - DNA, 25 bp, Homo sapien
aaccattgaggctgggaccctacga

SEQ ID NO: 1659665 - DNA, 25 bp, Homo sapien
cagaaagaaggtgaggtttcccgcg

SEQ ID NO: 1659666 - DNA, 25 bp, Homo sapien
cccgtgcccttcggcctctcttggt

SEQ ID NO: 1659667 - DNA, 25 bp, Homo sapien
ccgtgcccttcggcctctcttggtc

SEQ ID NO: 1659668 - DNA, 25 bp, Homo sapien
caccacgcctgccaaggttccattg

SEQ ID NO: 1659669 - DNA, 25 bp, Homo sapien
cacgcctgccaaggttccattgcaa

SEQ ID NO: 1659670 - DNA, 25 bp, Homo sapien
gacaccacgcctgccaaggttccat

SEQ ID NO: 1659671 - DNA, 25 bp, Homo sapien
ccacgcctgccaaggttccattgca

SEQ ID NO: 1659672 - DNA, 25 bp, Homo sapien
agaagggcagaggaactgttaggcc

SEQ ID NO: 1659673 - DNA, 25 bp, Homo sapien
cagggtatgcccagtgacagagttt

SEQ ID NO: 1659674 - DNA, 25 bp, Homo sapien
tccgagatgtgtccagggtatgccc

SEQ ID NO: 1659675 - DNA, 25 bp, Homo sapien
cagagcatgctgtccgagatgtgtc

SEQ ID NO: 1659676 - DNA, 25 bp, Homo sapien
gacagagtttgttctccaggatgct

SEQ ID NO: 1659677 - DNA, 25 bp, Homo sapien
agcaggactcagacgtgcctgcctg

SEQ ID NO: 1659678 - DNA, 25 bp, Homo sapien
agatgagacactgcatgcctgggga

SEQ ID NO: 1659679 - DNA, 25 bp, Homo sapien
cagcaggactcagacgtgcctgcct

SEQ ID NO: 1659680 - DNA, 25 bp, Homo sapien
cagcctgagatgagacactgcatgc

SEQ ID NO: 1659681 - DNA, 25 bp, Homo sapien
cgtaacccggaacagctgctccgga

SEQ ID NO: 1659682 - DNA, 25 bp, Homo sapien
agaagtccgtaacccggaacagctg

SEQ ID NO: 1659683 - DNA, 25 bp, Homo sapien
gtggtgctctccaaggcggacccac

SEQ ID NO: 1659684 - DNA, 25 bp, Homo sapien
tgctccggaccctcccatttccaga

SEQ ID NO: 1659685 - DNA, 25 bp, Homo sapien
gctgggacaggcctcagaggtcaag

SEQ ID NO: 1659686 - DNA, 25 bp, Homo sapien
ctgctgggacaggcctcagaggtca

SEQ ID NO: 1659687 - DNA, 25 bp, Homo sapien
tgctgggacaggcctcagaggtcaa

SEQ ID NO: 1659688 - DNA, 25 bp, Homo sapien
ccgatggcacgggtgtctgcccagc

SEQ ID NO: 1659689 - DNA, 25 bp, Homo sapien
agtaaggtggaagaggccggcctgc

SEQ ID NO: 1659690 - DNA, 25 bp, Homo sapien
gccccacagaagagccgagtaaggt

SEQ ID NO: 1659691 - DNA, 25 bp, Homo sapien
gggcgacattcctcggccccgatgg

SEQ ID NO: 1659692 - DNA, 25 bp, Homo sapien
ggacaaaggggtcagcgaagagcag

SEQ ID NO: 1659693 - DNA, 25 bp, Homo sapien
gacaaaggggtcagcgaagagcagg

SEQ ID NO: 1659694 - DNA, 25 bp, Homo sapien
tgccagcagagagagcagagcacag

SEQ ID NO: 1659695 - DNA, 25 bp, Homo sapien
gagcacagaggagtcccagcttcat

SEQ ID NO: 1659696 - DNA, 25 bp, Homo sapien
gcagagcacagaggagtcccagctt

SEQ ID NO: 1659697 - DNA, 25 bp, Homo sapien
agcagagcacagaggagtcccagct

SEQ ID NO: 1659698 - DNA, 25 bp, Homo sapien
tggggccgcccctgtgattaatcgg

SEQ ID NO: 1659699 - DNA, 25 bp, Homo sapien
tctttatggtaagccatgccatctc

SEQ ID NO: 1659700 - DNA, 25 bp, Homo sapien
ctggatcctggaacgtgcacccggc

SEQ ID NO: 1659701 - DNA, 25 bp, Homo sapien
acccggcgtccagtgcttctttatg

SEQ ID NO: 1659702 - DNA, 25 bp, Homo sapien
taagaggtaggcacgtcattgttcc

SEQ ID NO: 1659703 - DNA, 25 bp, Homo sapien
aaagtggactcctatagcctgggca

SEQ ID NO: 1659704 - DNA, 25 bp, Homo sapien
gaaggtgctaatgactcagggccag

SEQ ID NO: 1659705 - DNA, 25 bp, Homo sapien
cagagggaggtttcttggcacaagc

SEQ ID NO: 1659706 - DNA, 25 bp, Homo sapien
taaacaccccacgagaggatgcctt

SEQ ID NO: 1659707 - DNA, 25 bp, Homo sapien
gagcgtatgactttattgatccagg

SEQ ID NO: 1659708 - DNA, 25 bp, Homo sapien
ttgatccaggacatgtatttgcaga

SEQ ID NO: 1659709 - DNA, 25 bp, Homo sapien
ggatgccttggagggtctcgtcaca

SEQ ID NO: 1659710 - DNA, 25 bp, Homo sapien
tggcaagggtcctggccccggtcca

SEQ ID NO: 1659711 - DNA, 25 bp, Homo sapien
tggtgaccacgccagggtagaagac

SEQ ID NO: 1659712 - DNA, 25 bp, Homo sapien
tctttagggctcaggatagtgatgc

SEQ ID NO: 1659713 - DNA, 25 bp, Homo sapien
gtccagtccagcacatatcatgttg

SEQ ID NO: 1659714 - DNA, 25 bp, Homo sapien
ggcggccgtggtgccccagccagca

SEQ ID NO: 1659715 - DNA, 25 bp, Homo sapien
ctctccgggcggccgtggtgcccca

SEQ ID NO: 1659716 - DNA, 25 bp, Homo sapien
cggccgtggtgccccagccagcaac

SEQ ID NO: 1659717 - DNA, 25 bp, Homo sapien
ccgggcggccgtggtgccccagcca

SEQ ID NO: 1659718 - DNA, 25 bp, Homo sapien
ccagcttcagcaacatgagatcgtg

SEQ ID NO: 1659719 - DNA, 25 bp, Homo sapien
ctgagcacagcggtagggaagctgc

SEQ ID NO: 1659720 - DNA, 25 bp, Homo sapien
gatcgtgctcatccgttcgccttgg

SEQ ID NO: 1659721 - DNA, 25 bp, Homo sapien
ctggcactggtctccgggctgagca

SEQ ID NO: 1659722 - DNA, 25 bp, Homo sapien
tgacgggcccagaaatgcggaaaag

SEQ ID NO: 1659723 - DNA, 25 bp, Homo sapien
ggaccctggcttctatccgttgcag

SEQ ID NO: 1659724 - DNA, 25 bp, Homo sapien
tagagctcaaggagaatcagcggga

SEQ ID NO: 1659725 - DNA, 25 bp, Homo sapien
tctctgtggtaatacccaacccttc

SEQ ID NO: 1659726 - DNA, 25 bp, Homo sapien
acccaactctggtccaccaggacac

SEQ ID NO: 1659727 - DNA, 25 bp, Homo sapien
agcacccaactctggtccaccagga

SEQ ID NO: 1659728 - DNA, 25 bp, Homo sapien
cacccaactctggtccaccaggaca

SEQ ID NO: 1659729 - DNA, 25 bp, Homo sapien
cagcacccaactctggtccaccagg

SEQ ID NO: 1659730 - DNA, 25 bp, Homo sapien
ccgttgaagagcgagacctgccagg

SEQ ID NO: 1659731 - DNA, 25 bp, Homo sapien
cttcggggtccaagcgcgtgtcgtt

SEQ ID NO: 1659732 - DNA, 25 bp, Homo sapien
acgagaggccgttgaagagcgagac

SEQ ID NO: 1659733 - DNA, 25 bp, Homo sapien
ccgcgcagtggaacgagaggccgtt

SEQ ID NO: 1659734 - DNA, 25 bp, Homo sapien
cagcagcttcgccagagcccgggcg

SEQ ID NO: 1659735 - DNA, 25 bp, Homo sapien
tgtggtctgccgctggtatcctctg

SEQ ID NO: 1659736 - DNA, 25 bp, Homo sapien
tgccctgcctgtggtctgccgctgg

SEQ ID NO: 1659737 - DNA, 25 bp, Homo sapien
gccgctggtatcctctgcccaggga

SEQ ID NO: 1659738 - DNA, 25 bp, Homo sapien
ctgggagtcgccgataggaaggagg

SEQ ID NO: 1659739 - DNA, 25 bp, Homo sapien
catcccttttggaactggcttccgt

SEQ ID NO: 1659740 - DNA, 25 bp, Homo sapien
gattctccgggtcccggtgccaaga

SEQ ID NO: 1659741 - DNA, 25 bp, Homo sapien
gggagagggttcacgtccccagcaa

SEQ ID NO: 1659742 - DNA, 25 bp, Homo sapien
acgtccccagcaaggctaggggtgg

SEQ ID NO: 1659743 - DNA, 25 bp, Homo sapien
caggttgagtaggagggacagaggc

SEQ ID NO: 1659744 - DNA, 25 bp, Homo sapien
aggaaggcctagagataaagcaggt

SEQ ID NO: 1659745 - DNA, 25 bp, Homo sapien
tagagataaagcaggttgagtagga

SEQ ID NO: 1659746 - DNA, 25 bp, Homo sapien
gcctagagataaagcaggttgagta

SEQ ID NO: 1659747 - DNA, 25 bp, Homo sapien
ggtctcactgatttcgaaccccagg

SEQ ID NO: 1659748 - DNA, 25 bp, Homo sapien
aaccttgatatatggccaggagctg

SEQ ID NO: 1659749 - DNA, 25 bp, Homo sapien
tccaggaggcccaaagaatgttcgt

SEQ ID NO: 1659750 - DNA, 25 bp, Homo sapien
gacagcatctcctgtagtccaggag

SEQ ID NO: 1659751 - DNA, 25 bp, Homo sapien
ctggatccagtccacatatttgcag

SEQ ID NO: 1659752 - DNA, 25 bp, Homo sapien
ggatccagtccacatatttgcagac

SEQ ID NO: 1659753 - DNA, 25 bp, Homo sapien
tggatccagtccacatatttgcaga

SEQ ID NO: 1659754 - DNA, 25 bp, Homo sapien
tcttcatcgtctcctggatccagtc

SEQ ID NO: 1659755 - DNA, 25 bp, Homo sapien
aggctttcgggtgatcgcacacgga

SEQ ID NO: 1659756 - DNA, 25 bp, Homo sapien
tcgtgtagacaccaggctttcgggt

SEQ ID NO: 1659757 - DNA, 25 bp, Homo sapien
ctggccccaggagataatgccttga

SEQ ID NO: 1659758 - DNA, 25 bp, Homo sapien
cgggtgatcgcacacggatcctggc

SEQ ID NO: 1659759 - DNA, 25 bp, Homo sapien
ctggttacagaccagagggcccccg

SEQ ID NO: 1659760 - DNA, 25 bp, Homo sapien
gtgatgttggcgcatcgcaaggtgt

SEQ ID NO: 1659761 - DNA, 25 bp, Homo sapien
gcgcatcgcaaggtgtgaggcaggc

SEQ ID NO: 1659762 - DNA, 25 bp, Homo sapien
tggcaggagtccttgcccccttcct

SEQ ID NO: 1659763 - DNA, 25 bp, Homo sapien
ccggggtaggcgttctcacacttct

SEQ ID NO: 1659764 - DNA, 25 bp, Homo sapien
ctgccccaggtgaactatgtagcgg

SEQ ID NO: 1659765 - DNA, 25 bp, Homo sapien
gatgtcattgcggtggtctttgttg

SEQ ID NO: 1659766 - DNA, 25 bp, Homo sapien
tgccagcagtgacacagcgtgagga

SEQ ID NO: 1659767 - DNA, 25 bp, Homo sapien
cccaggtgatggagactggcgatgc

SEQ ID NO: 1659768 - DNA, 25 bp, Homo sapien
gaggtgggagagacagtagttggag

SEQ ID NO: 1659769 - DNA, 25 bp, Homo sapien
gagagacagtagttggaggaggaaa

SEQ ID NO: 1659770 - DNA, 25 bp, Homo sapien
aggaggaaaggtcgggggagacatg

SEQ ID NO: 1659771 - DNA, 25 bp, Homo sapien
tcgggggagacatgggtgggagagg

SEQ ID NO: 1659772 - DNA, 25 bp, Homo sapien
tctgggggcgatgagcgtcgcccca

SEQ ID NO: 1659773 - DNA, 25 bp, Homo sapien
gccatctgggggcgatgagcgtcgc

SEQ ID NO: 1659774 - DNA, 25 bp, Homo sapien
gagccatctgggggcgatgagcgtc

SEQ ID NO: 1659775 - DNA, 25 bp, Homo sapien
catctgggggcgatgagcgtcgccc

SEQ ID NO: 1659776 - DNA, 25 bp, Homo sapien
gcactcgaaccccttgatgatcctg

SEQ ID NO: 1659777 - DNA, 25 bp, Homo sapien
cgcgtcttctcgaacagggctgcct

SEQ ID NO: 1659778 - DNA, 25 bp, Homo sapien
cactcgaaccccttgatgatcctgg

SEQ ID NO: 1659779 - DNA, 25 bp, Homo sapien
agagtagccgcgtcttctcgaacag

SEQ ID NO: 1659780 - DNA, 25 bp, Homo sapien
gccagagcaagcaggattaactgca

SEQ ID NO: 1659781 - DNA, 25 bp, Homo sapien
ccagagcaagcaggattaactgcag

SEQ ID NO: 1659782 - DNA, 25 bp, Homo sapien
agagcaagcaggattaactgcagaa

SEQ ID NO: 1659783 - DNA, 25 bp, Homo sapien
cagagcaagcaggattaactgcaga

SEQ ID NO: 1659784 - DNA, 25 bp, Homo sapien
caaggagggacatggggccgcatca

SEQ ID NO: 1659785 - DNA, 25 bp, Homo sapien
acaaggagggacatggggccgcatc

SEQ ID NO: 1659786 - DNA, 25 bp, Homo sapien
aacaaggagggacatggggccgcat

SEQ ID NO: 1659787 - DNA, 25 bp, Homo sapien
gagtctctgaatctgtgtctcgttc

SEQ ID NO: 1659788 - DNA, 25 bp, Homo sapien
gtctcgttctatgtgtcattccctg

SEQ ID NO: 1659789 - DNA, 25 bp, Homo sapien
cgggcccaggatgactggcctccaa

SEQ ID NO: 1659790 - DNA, 25 bp, Homo sapien
tctgtccctatgtgtctgtctgcct

SEQ ID NO: 1659791 - DNA, 25 bp, Homo sapien
tgctgtgagacctctgcccgatgac

SEQ ID NO: 1659792 - DNA, 25 bp, Homo sapien
ctgctgtgagacctctgcccgatga

SEQ ID NO: 1659793 - DNA, 25 bp, Homo sapien
ctgcggaacccgagcgcagattcct

SEQ ID NO: 1659794 - DNA, 25 bp, Homo sapien
cggaacccgagcgcagattcctgct

SEQ ID NO: 1659795 - DNA, 25 bp, Homo sapien
gaacccgagcgcagattcctgcttc

SEQ ID NO: 1659796 - DNA, 25 bp, Homo sapien
cccctgaccaggtgtggagcaaggc

SEQ ID NO: 1659797 - DNA, 25 bp, Homo sapien
aggattaaagacgtaggctgagctc

SEQ ID NO: 1659798 - DNA, 25 bp, Homo sapien
attaaagacgtaggctgagctctcc

SEQ ID NO: 1659799 - DNA, 25 bp, Homo sapien
gtgggcaggaggattaaagacgtag

SEQ ID NO: 1659800 - DNA, 25 bp, Homo sapien
ggcaggaggattaaagacgtaggct

SEQ ID NO: 1659801 - DNA, 25 bp, Homo sapien
ttatatttattccagactattgcac

SEQ ID NO: 1659802 - DNA, 25 bp, Homo sapien
tccagactattgcacacttctctca

SEQ ID NO: 1659803 - DNA, 25 bp, Homo sapien
acttctctcaccccgctcgtgggtc

SEQ ID NO: 1659804 - DNA, 25 bp, Homo sapien
tattccagactattgcacacttctc

SEQ ID NO: 1659805 - DNA, 25 bp, Homo sapien
gggctggcaggagttaaagttccaa

SEQ ID NO: 1659806 - DNA, 25 bp, Homo sapien
gttccaagaagttcccaggccaaca

SEQ ID NO: 1659807 - DNA, 25 bp, Homo sapien
agggctggcaggagttaaagttcca

SEQ ID NO: 1659808 - DNA, 25 bp, Homo sapien
agttcccaggccaacaagagtggag

SEQ ID NO: 1659809 - DNA, 25 bp, Homo sapien
gatggaggagatattggtgctctga

SEQ ID NO: 1659810 - DNA, 25 bp, Homo sapien
aagtgatggaggagatattggtgct

SEQ ID NO: 1659811 - DNA, 25 bp, Homo sapien
ggaggagatattggtgctctgaggg

SEQ ID NO: 1659812 - DNA, 25 bp, Homo sapien
tgatggaggagatattggtgctctg

SEQ ID NO: 1659813 - DNA, 25 bp, Homo sapien
ctcatgatcatccggatccagtcca

SEQ ID NO: 1659814 - DNA, 25 bp, Homo sapien
gatcatccggatccagtccacatac

SEQ ID NO: 1659815 - DNA, 25 bp, Homo sapien
catgatcatccggatccagtccaca

SEQ ID NO: 1659816 - DNA, 25 bp, Homo sapien
atgatcatccggatccagtccacat

SEQ ID NO: 1659817 - DNA, 25 bp, Homo sapien
ttgcaaatataggtgtagactccag

SEQ ID NO: 1659818 - DNA, 25 bp, Homo sapien
aatataggtgtagactccagggatg

SEQ ID NO: 1659819 - DNA, 25 bp, Homo sapien
cagggatgccatcttgtccacaggg

SEQ ID NO: 1659820 - DNA, 25 bp, Homo sapien
gacaccagaccttgaaggactcccc

SEQ ID NO: 1659821 - DNA, 25 bp, Homo sapien
tgcacacaccatgttgctcgtgatt

SEQ ID NO: 1659822 - DNA, 25 bp, Homo sapien
gggatacacaccatggcaggtggca

SEQ ID NO: 1659823 - DNA, 25 bp, Homo sapien
acaccatgttgctcgtgattctccc

SEQ ID NO: 1659824 - DNA, 25 bp, Homo sapien
cccgggatacacaccatggcaggtg

SEQ ID NO: 1659825 - DNA, 25 bp, Homo sapien
tcgtgctcgtggctcgtcgaggctc

SEQ ID NO: 1659826 - DNA, 25 bp, Homo sapien
agaagccgctgtgccggatctgctc

SEQ ID NO: 1659827 - DNA, 25 bp, Homo sapien
ccagcggttgcacagtcattgggca

SEQ ID NO: 1659828 - DNA, 25 bp, Homo sapien
tgctcggtccagtcgagctggctga

SEQ ID NO: 1659829 - DNA, 25 bp, Homo sapien
ctgcagtgagccgctgtgaggaccc

SEQ ID NO: 1659830 - DNA, 25 bp, Homo sapien
gccattgaaaatcttcggtgtggct

SEQ ID NO: 1659831 - DNA, 25 bp, Homo sapien
ggctgtgagttacgcccacactcag

SEQ ID NO: 1659832 - DNA, 25 bp, Homo sapien
attgaaaatcttcggtgtggctgcc

SEQ ID NO: 1659833 - DNA, 25 bp, Homo sapien
gccacggctgtgagttacgcccaca

SEQ ID NO: 1659834 - DNA, 25 bp, Homo sapien
cctgagagctgcaggtaaatggagg

SEQ ID NO: 1659835 - DNA, 25 bp, Homo sapien
tgaagggatccagtcgcagtcctgc

SEQ ID NO: 1659836 - DNA, 25 bp, Homo sapien
gggcctcctcatgggggtgaaggga

SEQ ID NO: 1659837 - DNA, 25 bp, Homo sapien
agagctgcaggtaaatggaggcaca

SEQ ID NO: 1659838 - DNA, 25 bp, Homo sapien
acacaggagcaaaaagatgctgagc

SEQ ID NO: 1659839 - DNA, 25 bp, Homo sapien
caggagcaaaaagatgctgagcccc

SEQ ID NO: 1659840 - DNA, 25 bp, Homo sapien
ggagcaaaaagatgctgagccccat

SEQ ID NO: 1659841 - DNA, 25 bp, Homo sapien
gaacacacaggagcaaaaagatgct

SEQ ID NO: 1659842 - DNA, 25 bp, Homo sapien
aaaggggaatctcagaggtcaccct

SEQ ID NO: 1659843 - DNA, 25 bp, Homo sapien
tgcctgtcttctcatgtgctggcca

SEQ ID NO: 1659844 - DNA, 25 bp, Homo sapien
ccagatcctctacgtggctgtcact

SEQ ID NO: 1659845 - DNA, 25 bp, Homo sapien
actgtttggcctgtcctcgtcgctg

SEQ ID NO: 1659846 - DNA, 25 bp, Homo sapien
gccaactctaccactctgcacctgg

SEQ ID NO: 1659847 - DNA, 25 bp, Homo sapien
gaaactcttctcagctaatcacact

SEQ ID NO: 1659848 - DNA, 25 bp, Homo sapien
tgtcatgttgctcaaccggtccctt

SEQ ID NO: 1659849 - DNA, 25 bp, Homo sapien
aagctcttaactctctttgtcctgg

SEQ ID NO: 1659850 - DNA, 25 bp, Homo sapien
gagctttacagctaaacggagtggg

SEQ ID NO: 1659851 - DNA, 25 bp, Homo sapien
attttccctagtgtaggtccattct

SEQ ID NO: 1659852 - DNA, 25 bp, Homo sapien
cagcgattttccctagtgtaggtcc

SEQ ID NO: 1659853 - DNA, 25 bp, Homo sapien
agcgattttccctagtgtaggtcca

SEQ ID NO: 1659854 - DNA, 25 bp, Homo sapien
cgattttccctagtgtaggtccatt

SEQ ID NO: 1659855 - DNA, 25 bp, Homo sapien
gggtcatgcacaaagatgtaacagc

SEQ ID NO: 1659856 - DNA, 25 bp, Homo sapien
aagttcaggcaagaagaccctttgg

SEQ ID NO: 1659857 - DNA, 25 bp, Homo sapien
taacagcaagggacactgaccaagg

SEQ ID NO: 1659858 - DNA, 25 bp, Homo sapien
tgtccaaagcaaggatttgcactac

SEQ ID NO: 1659859 - DNA, 25 bp, Homo sapien
ctgatgaagttgagagacctgggcc

SEQ ID NO: 1659860 - DNA, 25 bp, Homo sapien
gatgcaacatctgggagactgcaag

SEQ ID NO: 1659861 - DNA, 25 bp, Homo sapien
catggatcactggttcaaatggaac

SEQ ID NO: 1659862 - DNA, 25 bp, Homo sapien
cagacagaacgttcaggtggtgatc

SEQ ID NO: 1659863 - DNA, 25 bp, Homo sapien
cggatccacaggacgtatcttgaga

SEQ ID NO: 1659864 - DNA, 25 bp, Homo sapien
tatcttgagacacgggtgtagacac

SEQ ID NO: 1659865 - DNA, 25 bp, Homo sapien
gacaccaggccggtcaggttgccca

SEQ ID NO: 1659866 - DNA, 25 bp, Homo sapien
tcatattttcggattgtttcacgga

SEQ ID NO: 1659867 - DNA, 25 bp, Homo sapien
ccaggagacgatgccatacagtgtt

SEQ ID NO: 1659868 - DNA, 25 bp, Homo sapien
tctccccaggagacgatgccataca

SEQ ID NO: 1659869 - DNA, 25 bp, Homo sapien
ggagacgatgccatacagtgttctg

SEQ ID NO: 1659870 - DNA, 25 bp, Homo sapien
tccccaggagacgatgccatacagt

SEQ ID NO: 1659871 - DNA, 25 bp, Homo sapien
gagagagaggtgggtccttgctggg

SEQ ID NO: 1659872 - DNA, 25 bp, Homo sapien
gagagagagaggtgggtccttgctg

SEQ ID NO: 1659873 - DNA, 25 bp, Homo sapien
aagagagagagaggtgggtccttgc

SEQ ID NO: 1659874 - DNA, 25 bp, Homo sapien
aaagagagagagaggtgggtccttg

SEQ ID NO: 1659875 - DNA, 25 bp, Homo sapien
gatctttcctgggtagacttgacga

SEQ ID NO: 1659876 - DNA, 25 bp, Homo sapien
actcctcatctgagcgaagttggat

SEQ ID NO: 1659877 - DNA, 25 bp, Homo sapien
tgtgccggcacacaacatgttgtca

SEQ ID NO: 1659878 - DNA, 25 bp, Homo sapien
tctttgccaccctcttttgtgccgg

SEQ ID NO: 1659879 - DNA, 25 bp, Homo sapien
tatataaaggatacagctaacttta

SEQ ID NO: 1659880 - DNA, 25 bp, Homo sapien
taaaggatacagctaactttaaata

SEQ ID NO: 1659881 - DNA, 25 bp, Homo sapien
tatatttatataaaggatacagcta

SEQ ID NO: 1659882 - DNA, 25 bp, Homo sapien
tatttatataaaggatacagctaac

SEQ ID NO: 1659883 - DNA, 25 bp, Homo sapien
agccactcctatggggcctcaggcc

SEQ ID NO: 1659884 - DNA, 25 bp, Homo sapien
cactcctatggggcctcaggccacc

SEQ ID NO: 1659885 - DNA, 25 bp, Homo sapien
cagccactcctatggggcctcaggc

SEQ ID NO: 1659886 - DNA, 25 bp, Homo sapien
gccactcctatggggcctcaggcca

SEQ ID NO: 1659887 - DNA, 25 bp, Homo sapien
cagacacccgacaggtggtgccagg

SEQ ID NO: 1659888 - DNA, 25 bp, Homo sapien
tccagaagcatgatgtcatggtcgt

SEQ ID NO: 1659889 - DNA, 25 bp, Homo sapien
cagggtttggatgtagcctgtgagc

SEQ ID NO: 1659890 - DNA, 25 bp, Homo sapien
gggatagagtggacaacttccctca

SEQ ID NO: 1659891 - DNA, 25 bp, Homo sapien
gccctagggcgtgcttgcctaggta

SEQ ID NO: 1659892 - DNA, 25 bp, Homo sapien
acgccctagggcgtgcttgcctagg

SEQ ID NO: 1659893 - DNA, 25 bp, Homo sapien
ttccacacgccctagggcgtgcttg

SEQ ID NO: 1659894 - DNA, 25 bp, Homo sapien
cctagggcgtgcttgcctaggtaaa

SEQ ID NO: 1659895 - DNA, 25 bp, Homo sapien
ctggtcccattggtgttgagaacct

SEQ ID NO: 1659896 - DNA, 25 bp, Homo sapien
actagtagggcagcctgccagggct

SEQ ID NO: 1659897 - DNA, 25 bp, Homo sapien
agagtagccgcccttgcactagtag

SEQ ID NO: 1659898 - DNA, 25 bp, Homo sapien
acagtgtgcggcagtgaggacccat

SEQ ID NO: 1659899 - DNA, 25 bp, Homo sapien
gagactgacctacacatccacctag

SEQ ID NO: 1659900 - DNA, 25 bp, Homo sapien
gctgataggtaagcaggagcctgac

SEQ ID NO: 1659901 - DNA, 25 bp, Homo sapien
tgaagatgaatttgccgacctatgg

SEQ ID NO: 1659902 - DNA, 25 bp, Homo sapien
gaccaagtggagatgaattagggca

SEQ ID NO: 1659903 - DNA, 25 bp, Homo sapien
gtcagggaggcgatcactagggcca

SEQ ID NO: 1659904 - DNA, 25 bp, Homo sapien
aggtcagggaggcgatcactagggc

SEQ ID NO: 1659905 - DNA, 25 bp, Homo sapien
caaggtcagggaggcgatcactagg

SEQ ID NO: 1659906 - DNA, 25 bp, Homo sapien
cagggaggcgatcactagggccagg

SEQ ID NO: 1659907 - DNA, 25 bp, Homo sapien
gctccgggatcgggaggggagggca

SEQ ID NO: 1659908 - DNA, 25 bp, Homo sapien
ctccgggatcgggaggggagggcag

SEQ ID NO: 1659909 - DNA, 25 bp, Homo sapien
ggagggcagggcgggcggggcctga

SEQ ID NO: 1659910 - DNA, 25 bp, Homo sapien
gaaatcatcagctgggtggatagaa

SEQ ID NO: 1659911 - DNA, 25 bp, Homo sapien
caaccaccggacacaagaaggaaat

SEQ ID NO: 1659912 - DNA, 25 bp, Homo sapien
gacacaaggacacccacaattatcc

SEQ ID NO: 1659913 - DNA, 25 bp, Homo sapien
gatagaaaatcagctccctcggact

SEQ ID NO: 1659914 - DNA, 25 bp, Homo sapien
tctttggaatacaatgccggtttaa

SEQ ID NO: 1659915 - DNA, 25 bp, Homo sapien
gagccggagtaaagatcaggatgct

SEQ ID NO: 1659916 - DNA, 25 bp, Homo sapien
tcggtttttagagacactaagcgtg

SEQ ID NO: 1659917 - DNA, 25 bp, Homo sapien
ccctctgtgcctccggtcttgagta

SEQ ID NO: 1659918 - DNA, 25 bp, Homo sapien
gcctgggcagctgacgaggtccatc

SEQ ID NO: 1659919 - DNA, 25 bp, Homo sapien
agctgacgaggtccatcccaccgtg

SEQ ID NO: 1659920 - DNA, 25 bp, Homo sapien
gaggtccatcccaccgtgaagacca

SEQ ID NO: 1659921 - DNA, 25 bp, Homo sapien
actcctgggtcctgagtagagagag

SEQ ID NO: 1659922 - DNA, 25 bp, Homo sapien
tcaatccagcttctgtacttgcaca

SEQ ID NO: 1659923 - DNA, 25 bp, Homo sapien
tcatttgtcccgcatcgtttcctca

SEQ ID NO: 1659924 - DNA, 25 bp, Homo sapien
ccaggcagggcgcagcgctccattc

SEQ ID NO: 1659925 - DNA, 25 bp, Homo sapien
gggcgcagcgctccattccccaaga

SEQ ID NO: 1659926 - DNA, 25 bp, Homo sapien
gagctgtcctctgcacaccaggggt

SEQ ID NO: 1659927 - DNA, 25 bp, Homo sapien
tgtcctctgcacaccaggggtcccc

SEQ ID NO: 1659928 - DNA, 25 bp, Homo sapien
gctgtcctctgcacaccaggggtcc

SEQ ID NO: 1659929 - DNA, 25 bp, Homo sapien
ggagctgtcctctgcacaccagggg

SEQ ID NO: 1659930 - DNA, 25 bp, Homo sapien
cacagaccatgccaggcgtgatggt

SEQ ID NO: 1659931 - DNA, 25 bp, Homo sapien
tgatgttcacgcattgcagagaggc

SEQ ID NO: 1659932 - DNA, 25 bp, Homo sapien
tctggcacacctcatccggggagat

SEQ ID NO: 1659933 - DNA, 25 bp, Homo sapien
gcgtgatggttctaggataggcctt

SEQ ID NO: 1659934 - DNA, 25 bp, Homo sapien
ctcccgatccgtgcgggctgctgta

SEQ ID NO: 1659935 - DNA, 25 bp, Homo sapien
ctggatatagttccccagcctgaca

SEQ ID NO: 1659936 - DNA, 25 bp, Homo sapien
acctcctcaggttgtgcttgcccag

SEQ ID NO: 1659937 - DNA, 25 bp, Homo sapien
gcttgcccagggcaacctgaaggat

SEQ ID NO: 1659938 - DNA, 25 bp, Homo sapien
gagctccgggtgcacgtatggccac

SEQ ID NO: 1659939 - DNA, 25 bp, Homo sapien
tccgcagaggaagcggcgcctggga

SEQ ID NO: 1659940 - DNA, 25 bp, Homo sapien
gtatggccaccaattatcttgttct

SEQ ID NO: 1659941 - DNA, 25 bp, Homo sapien
aaagcagggcgcctccgcagaggaa

SEQ ID NO: 1659942 - DNA, 25 bp, Homo sapien
tatagccaggacttgaagtgctgtc

SEQ ID NO: 1659943 - DNA, 25 bp, Homo sapien
acagcagagaggtagggaccagaga

SEQ ID NO: 1659944 - DNA, 25 bp, Homo sapien
gagaggtagggaccagagacgaggg

SEQ ID NO: 1659945 - DNA, 25 bp, Homo sapien
agcagagaggtagggaccagagacg

SEQ ID NO: 1659946 - DNA, 25 bp, Homo sapien
cagagaggtagggaccagagacgag

SEQ ID NO: 1659947 - DNA, 25 bp, Homo sapien
gtgccagaactggcattccccagct

SEQ ID NO: 1659948 - DNA, 25 bp, Homo sapien
ggtgccagaactggcattccccagc

SEQ ID NO: 1659949 - DNA, 25 bp, Homo sapien
tatacgatggactactactcggcca

SEQ ID NO: 1659950 - DNA, 25 bp, Homo sapien
ggcacgtcagcaataggaacctagg

SEQ ID NO: 1659951 - DNA, 25 bp, Homo sapien
catacggtttgcattttcgattgga

SEQ ID NO: 1659952 - DNA, 25 bp, Homo sapien
cgattggagagtgccttaaaccaca

SEQ ID NO: 1659953 - DNA, 25 bp, Homo sapien
gctgaaaacccattccttatgtcac

SEQ ID NO: 1659954 - DNA, 25 bp, Homo sapien
gattcttctacataccagttaaaaa

SEQ ID NO: 1659955 - DNA, 25 bp, Homo sapien
gtgctgaaaacccattccttatgtc

SEQ ID NO: 1659956 - DNA, 25 bp, Homo sapien
cttttagattcttctacataccagt

SEQ ID NO: 1659957 - DNA, 25 bp, Homo sapien
gaaagaggctaagtcaccgacaggc

SEQ ID NO: 1659958 - DNA, 25 bp, Homo sapien
tcacccgtgacagagataccaggag

SEQ ID NO: 1659959 - DNA, 25 bp, Homo sapien
tcagggtttcaggtgaatgggcccc

SEQ ID NO: 1659960 - DNA, 25 bp, Homo sapien
tgatgctcaaggagggtcaggacca

SEQ ID NO: 1659961 - DNA, 25 bp, Homo sapien
ttattcacagtgtcatttacaggca

SEQ ID NO: 1659962 - DNA, 25 bp, Homo sapien
ccccggcggcccttgccgatggcca

SEQ ID NO: 1659963 - DNA, 25 bp, Homo sapien
cggcccttgccgatggccaggcggg

SEQ ID NO: 1659964 - DNA, 25 bp, Homo sapien
ggcggcccttgccgatggccaggcg

SEQ ID NO: 1659965 - DNA, 25 bp, Homo sapien
ccggcggcccttgccgatggccagg

SEQ ID NO: 1659966 - DNA, 25 bp, Homo sapien
cacagcgggagcaggcgccggggcg

SEQ ID NO: 1659967 - DNA, 25 bp, Homo sapien
ccagcgccccacagcgggagcaggc

SEQ ID NO: 1659968 - DNA, 25 bp, Homo sapien
agagcgcgcggctggccagcgcccc

SEQ ID NO: 1659969 - DNA, 25 bp, Homo sapien
agcgccaggcgctcggccgagtgca

SEQ ID NO: 1659970 - DNA, 25 bp, Homo sapien
tcgggcgcgtagacgcactcctcgg

SEQ ID NO: 1659971 - DNA, 25 bp, Homo sapien
ggcgtggccgcggaaggcctcgggc

SEQ ID NO: 1659972 - DNA, 25 bp, Homo sapien
caggtcccgggcgtggccgcggaag

SEQ ID NO: 1659973 - DNA, 25 bp, Homo sapien
gcactcctcggagaagtagtcgagg

SEQ ID NO: 1659974 - DNA, 25 bp, Homo sapien
ccgcgtcgccccgtaggaagttcat

SEQ ID NO: 1659975 - DNA, 25 bp, Homo sapien
cgtcgccccgtaggaagttcatgag

SEQ ID NO: 1659976 - DNA, 25 bp, Homo sapien
cagcgcggcagggcgcccccctcgc

SEQ ID NO: 1659977 - DNA, 25 bp, Homo sapien
agcgcggcagggcgcccccctcgcc

SEQ ID NO: 1659978 - DNA, 25 bp, Homo sapien
tctccgccatgtcgtcggcgttgtg

SEQ ID NO: 1659979 - DNA, 25 bp, Homo sapien
gtctccgccatgtcgtcggcgttgt

SEQ ID NO: 1659980 - DNA, 25 bp, Homo sapien
ggtctccgccatgtcgtcggcgttg

SEQ ID NO: 1659981 - DNA, 25 bp, Homo sapien
tccgccatgtcgtcggcgttgtgac

SEQ ID NO: 1659982 - DNA, 25 bp, Homo sapien
ctgtcacgatgtgcgtggctcccac

SEQ ID NO: 1659983 - DNA, 25 bp, Homo sapien
gccgcagcactccacagaaggtgca

SEQ ID NO: 1659984 - DNA, 25 bp, Homo sapien
ccaaagaggtcttcgtaggccacga

SEQ ID NO: 1659985 - DNA, 25 bp, Homo sapien
taggccacgaccgtgagcggcagct

SEQ ID NO: 1659986 - DNA, 25 bp, Homo sapien
acggccacgagctgcagtgagatgc

SEQ ID NO: 1659987 - DNA, 25 bp, Homo sapien
tagcgcatgcgtagagcagacttcg

SEQ ID NO: 1659988 - DNA, 25 bp, Homo sapien
tgtaaaaggcgcagatagcgcatgc

SEQ ID NO: 1659989 - DNA, 25 bp, Homo sapien
acttcgaggattggagtggaactcc

SEQ ID NO: 1659990 - DNA, 25 bp, Homo sapien
gattacagggcctatgatttctgcc

SEQ ID NO: 1659991 - DNA, 25 bp, Homo sapien
tgccatcaggctttccattgtcaaa

SEQ ID NO: 1659992 - DNA, 25 bp, Homo sapien
tctgcagactgcaacggaggtgctg

SEQ ID NO: 1659993 - DNA, 25 bp, Homo sapien
taagcaatccgcgtctggtggaaga

SEQ ID NO: 1659994 - DNA, 25 bp, Homo sapien
cacactagccccagatttaaccttg

SEQ ID NO: 1659995 - DNA, 25 bp, Homo sapien
tggccaggcccttttcggtcttgac

SEQ ID NO: 1659996 - DNA, 25 bp, Homo sapien
ggaagaccccacacatatttgcagg

SEQ ID NO: 1659997 - DNA, 25 bp, Homo sapien
aagctgttcagctgatcatgtccca

SEQ ID NO: 1659998 - DNA, 25 bp, Homo sapien
tcaaccaccccatgcatgagtcagg

SEQ ID NO: 1659999 - DNA, 25 bp, Homo sapien
cccagttcttggagttggatcacca

SEQ ID NO: 1660000 - DNA, 25 bp, Homo sapien
cattgtgtgagcactgaccctaggg

SEQ ID NO: 1660001 - DNA, 25 bp, Homo sapien
caggagcctctgttttcaacactgg

SEQ ID NO: 1660002 - DNA, 25 bp, Homo sapien
tcacgggtgcgtggcaagaatttca

SEQ ID NO: 1660003 - DNA, 25 bp, Homo sapien
gctgacttgatcgttccatggtgca

SEQ ID NO: 1660004 - DNA, 25 bp, Homo sapien
gagcctcaggacctatcaggacaag

SEQ ID NO: 1660005 - DNA, 25 bp, Homo sapien
tctggtgaaggaatccgagaacctg

SEQ ID NO: 1660006 - DNA, 25 bp, Homo sapien
tcgctcaggtactcagggcaggact

SEQ ID NO: 1660007 - DNA, 25 bp, Homo sapien
tggtcttgtcctcgggtctgaggac

SEQ ID NO: 1660008 - DNA, 25 bp, Homo sapien
tctggtcttgtcctcgggtctgagg

SEQ ID NO: 1660009 - DNA, 25 bp, Homo sapien
cctctggtcttgtcctcgggtctga

SEQ ID NO: 1660010 - DNA, 25 bp, Homo sapien
cttgtcctcgggtctgaggacatgc

SEQ ID NO: 1660011 - DNA, 25 bp, Homo sapien
ctggaacactggaagaatctaagtg

SEQ ID NO: 1660012 - DNA, 25 bp, Homo sapien
gattagatttccaagagctgtccga

SEQ ID NO: 1660013 - DNA, 25 bp, Homo sapien
gatcttgctgggttgtgaacttgcc

SEQ ID NO: 1660014 - DNA, 25 bp, Homo sapien
gctgtccgagaatttgtgaggatct

SEQ ID NO: 1660015 - DNA, 25 bp, Homo sapien
caaacaggcccacgtatgagaggag

SEQ ID NO: 1660016 - DNA, 25 bp, Homo sapien
taccggaacatttgtgcatctcaca

SEQ ID NO: 1660017 - DNA, 25 bp, Homo sapien
tcagcagacacttgatcagtttacc

SEQ ID NO: 1660018 - DNA, 25 bp, Homo sapien
tatgtcagagtctataagctggaac

SEQ ID NO: 1660019 - DNA, 25 bp, Homo sapien
gatgatttcccagcatacgcgatgg

SEQ ID NO: 1660020 - DNA, 25 bp, Homo sapien
cccagcatacgcgatgggaatggtg

SEQ ID NO: 1660021 - DNA, 25 bp, Homo sapien
catgacagcgggtatattgatgatt

SEQ ID NO: 1660022 - DNA, 25 bp, Homo sapien
ggtatattgatgatttcccagcata

SEQ ID NO: 1660023 - DNA, 25 bp, Homo sapien
actttgcgcagtcccgatacaggtc

SEQ ID NO: 1660024 - DNA, 25 bp, Homo sapien
aatcctccatcagcgcgcggagaaa

SEQ ID NO: 1660025 - DNA, 25 bp, Homo sapien
tcttgcctcgtgactgatccagaat

SEQ ID NO: 1660026 - DNA, 25 bp, Homo sapien
tcagctgactgagggacgccctgct

SEQ ID NO: 1660027 - DNA, 25 bp, Homo sapien
aatttacctaccatgaaagacgcag

SEQ ID NO: 1660028 - DNA, 25 bp, Homo sapien
tccacgtcgtgtgtgtcagcatctg

SEQ ID NO: 1660029 - DNA, 25 bp, Homo sapien
tcacatgtgcggttccatgagctcc

SEQ ID NO: 1660030 - DNA, 25 bp, Homo sapien
gaacttcatgtgattggcatcaccc

SEQ ID NO: 1660031 - DNA, 25 bp, Homo sapien
ccactgtcctcggacacaggagata

SEQ ID NO: 1660032 - DNA, 25 bp, Homo sapien
actgtcctcggacacaggagataaa

SEQ ID NO: 1660033 - DNA, 25 bp, Homo sapien
cactgtcctcggacacaggagataa

SEQ ID NO: 1660034 - DNA, 25 bp, Homo sapien
gagcaggtgtagatcacttctcggg

SEQ ID NO: 1660035 - DNA, 25 bp, Homo sapien
cacactctccgtgtattcttttgta

SEQ ID NO: 1660036 - DNA, 25 bp, Homo sapien
ctgcagctgcacactctccgtgtat

SEQ ID NO: 1660037 - DNA, 25 bp, Homo sapien
ggagcaggtgtagatcacttctcgg

SEQ ID NO: 1660038 - DNA, 25 bp, Homo sapien
tttgcaagcagagagtcgtggaatc

SEQ ID NO: 1660039 - DNA, 25 bp, Homo sapien
cccacaggcaatgggtttatagaca

SEQ ID NO: 1660040 - DNA, 25 bp, Homo sapien
tctgtgaagtaggtataagaagtcc

SEQ ID NO: 1660041 - DNA, 25 bp, Homo sapien
tgatgtcacacaagctccttaacct

SEQ ID NO: 1660042 - DNA, 25 bp, Homo sapien
agcaagacttacgctgaagacagca

SEQ ID NO: 1660043 - DNA, 25 bp, Homo sapien
gcagtcaaaagaatcctcaccaatg

SEQ ID NO: 1660044 - DNA, 25 bp, Homo sapien
ctctctaaattctcaattagaaacc

SEQ ID NO: 1660045 - DNA, 25 bp, Homo sapien
tcaccaatgcactctctaaattctc

SEQ ID NO: 1660046 - DNA, 25 bp, Homo sapien
tatctgaagggaaatgcacaggccg

SEQ ID NO: 1660047 - DNA, 25 bp, Homo sapien
cagaggcttggaggttgtgcaaacc

SEQ ID NO: 1660048 - DNA, 25 bp, Homo sapien
acagttagatcagcaagagtttccc

SEQ ID NO: 1660049 - DNA, 25 bp, Homo sapien
cacaaggttttgaaggtcacgacga

SEQ ID NO: 1660050 - DNA, 25 bp, Homo sapien
agtgaaataggaagttctggcccaa

SEQ ID NO: 1660051 - DNA, 25 bp, Homo sapien
aagttctggcccaaaacgccctgtg

SEQ ID NO: 1660052 - DNA, 25 bp, Homo sapien
tctggcccaaaacgccctgtgcagg

SEQ ID NO: 1660053 - DNA, 25 bp, Homo sapien
agttctggcccaaaacgccctgtgc

SEQ ID NO: 1660054 - DNA, 25 bp, Homo sapien
tgtggctgcgcgaacagtctttgag

SEQ ID NO: 1660055 - DNA, 25 bp, Homo sapien
gagcctccgcctacagagacaactg

SEQ ID NO: 1660056 - DNA, 25 bp, Homo sapien
aacagtctttgagcctccgcctaca

SEQ ID NO: 1660057 - DNA, 25 bp, Homo sapien
cacctgtgtggctgcgcgaacagtc

SEQ ID NO: 1660058 - DNA, 25 bp, Homo sapien
gtaggccctagttgagctgtggtcc

SEQ ID NO: 1660059 - DNA, 25 bp, Homo sapien
tcctccagagggactttgaggtcca

SEQ ID NO: 1660060 - DNA, 25 bp, Homo sapien
cagaggccatgaaatctccactggg

SEQ ID NO: 1660061 - DNA, 25 bp, Homo sapien
cactggggtcacactatgcatcttc

SEQ ID NO: 1660062 - DNA, 25 bp, Homo sapien
aagcggcacaggcagcagatgcaaa

SEQ ID NO: 1660063 - DNA, 25 bp, Homo sapien
caaaggaggagaagtacggctagca

SEQ ID NO: 1660064 - DNA, 25 bp, Homo sapien
aggacgatgccagcgatggccccat

SEQ ID NO: 1660065 - DNA, 25 bp, Homo sapien
cgatggccccatggctcaacgtggg

SEQ ID NO: 1660066 - DNA, 25 bp, Homo sapien
tgaggattcattcgtgggccaaaca

SEQ ID NO: 1660067 - DNA, 25 bp, Homo sapien
taatcacagattgtcccgagaaaga

SEQ ID NO: 1660068 - DNA, 25 bp, Homo sapien
ccagcactctcaactcatttaacag

SEQ ID NO: 1660069 - DNA, 25 bp, Homo sapien
caggaaagatatctacccttatggg

SEQ ID NO: 1660070 - DNA, 25 bp, Homo sapien
gcaccacggctgaccgctcctgagg

SEQ ID NO: 1660071 - DNA, 25 bp, Homo sapien
gaaggggcaccacggctgaccgctc

SEQ ID NO: 1660072 - DNA, 25 bp, Homo sapien
caggatgggcaggatccgaaaggtc

SEQ ID NO: 1660073 - DNA, 25 bp, Homo sapien
ggtagacccggctttgtgatggagt

SEQ ID NO: 1660074 - DNA, 25 bp, Homo sapien
tcctgcccagagcaggcccatctgg

SEQ ID NO: 1660075 - DNA, 25 bp, Homo sapien
taggtggaagtcctgcccagagcag

SEQ ID NO: 1660076 - DNA, 25 bp, Homo sapien
ctgtaggtggaagtcctgcccagag

SEQ ID NO: 1660077 - DNA, 25 bp, Homo sapien
gtcctgcccagagcaggcccatctg

SEQ ID NO: 1660078 - DNA, 25 bp, Homo sapien
acatcccaagtcagcacggctgcat

SEQ ID NO: 1660079 - DNA, 25 bp, Homo sapien
catgcctggatctcaaaactgctga

SEQ ID NO: 1660080 - DNA, 25 bp, Homo sapien
agcctccacgaggatatggagggtc

SEQ ID NO: 1660081 - DNA, 25 bp, Homo sapien
gctctctgaagcctccacgaggata

SEQ ID NO: 1660082 - DNA, 25 bp, Homo sapien
catcttgactgagccgcaggcgact

SEQ ID NO: 1660083 - DNA, 25 bp, Homo sapien
cagcacggagtaatttcccaggtcc

SEQ ID NO: 1660084 - DNA, 25 bp, Homo sapien
gaagttgccgatgtggagtttccgc

SEQ ID NO: 1660085 - DNA, 25 bp, Homo sapien
gagggtgatctggtcaccgccagca

SEQ ID NO: 1660086 - DNA, 25 bp, Homo sapien
aaccgtgtctctgccaccagcggat

SEQ ID NO: 1660087 - DNA, 25 bp, Homo sapien
cgtgtctctgccaccagcggatgca

SEQ ID NO: 1660088 - DNA, 25 bp, Homo sapien
tgtctctgccaccagcggatgcagc

SEQ ID NO: 1660089 - DNA, 25 bp, Homo sapien
tctctgccaccagcggatgcagcag

SEQ ID NO: 1660090 - DNA, 25 bp, Homo sapien
ccaggtggcgagcaaggcaggtgat

SEQ ID NO: 1660091 - DNA, 25 bp, Homo sapien
ccacgagcagcggaagcggaggctg

SEQ ID NO: 1660092 - DNA, 25 bp, Homo sapien
actgtgcaggtacgcgtggccacca

SEQ ID NO: 1660093 - DNA, 25 bp, Homo sapien
gacactggcccggcgcggatgcctt

SEQ ID NO: 1660094 - DNA, 25 bp, Homo sapien
agaatgaagatggagtccctttctc

SEQ ID NO: 1660095 - DNA, 25 bp, Homo sapien
gagaatgaagatggagtccctttct

SEQ ID NO: 1660096 - DNA, 25 bp, Homo sapien
tttgtcgagtgttccatgcccagga

SEQ ID NO: 1660097 - DNA, 25 bp, Homo sapien
gaatgtccgccctctcagtgctggg

SEQ ID NO: 1660098 - DNA, 25 bp, Homo sapien
tcgactttgtcgagtgttccatgcc

SEQ ID NO: 1660099 - DNA, 25 bp, Homo sapien
catttaactccgcttgtcgactttg

SEQ ID NO: 1660100 - DNA, 25 bp, Homo sapien
tccgaggagaccgtgatggtcggcg

SEQ ID NO: 1660101 - DNA, 25 bp, Homo sapien
ccactgtaaggttgagcagcgagcg

SEQ ID NO: 1660102 - DNA, 25 bp, Homo sapien
aaggtcacgttactgcccgcggtga

SEQ ID NO: 1660103 - DNA, 25 bp, Homo sapien
tccgccaggctccacgtgatgtcgg

SEQ ID NO: 1660104 - DNA, 25 bp, Homo sapien
aagacgctgacgtcggcggcagcct

SEQ ID NO: 1660105 - DNA, 25 bp, Homo sapien
gccttgggctgaaccgacagctggg

SEQ ID NO: 1660106 - DNA, 25 bp, Homo sapien
cgcacagggcgcacgatgagcagct

SEQ ID NO: 1660107 - DNA, 25 bp, Homo sapien
tggtcgccctctgagcgcatccggg

SEQ ID NO: 1660108 - DNA, 25 bp, Homo sapien
aaatcgcaggtggtctcggtgagca

SEQ ID NO: 1660109 - DNA, 25 bp, Homo sapien
cacccaccgtgaactcgtgagtctg

SEQ ID NO: 1660110 - DNA, 25 bp, Homo sapien
atgacctcagccgtgtagacccctg

SEQ ID NO: 1660111 - DNA, 25 bp, Homo sapien
ccccgggcctggtcaaatcgcaggt

SEQ ID NO: 1660112 - DNA, 25 bp, Homo sapien
caacagacagtttggtatgggagac

SEQ ID NO: 1660113 - DNA, 25 bp, Homo sapien
gagtttaagatccatatcatccggg

SEQ ID NO: 1660114 - DNA, 25 bp, Homo sapien
tctttggcaggaacttgaggatccg

SEQ ID NO: 1660115 - DNA, 25 bp, Homo sapien
tcagcagaaacatttgaccagaagg

SEQ ID NO: 1660116 - DNA, 25 bp, Homo sapien
gaagttggtttgctgaagtccagaa

SEQ ID NO: 1660117 - DNA, 25 bp, Homo sapien
aggagaagttggtttgctgaagtcc

SEQ ID NO: 1660118 - DNA, 25 bp, Homo sapien
aagttggtttgctgaagtccagaag

SEQ ID NO: 1660119 - DNA, 25 bp, Homo sapien
gagaagttggtttgctgaagtccag

SEQ ID NO: 1660120 - DNA, 25 bp, Homo sapien
ccaggagtaggaagagtggcagagc

SEQ ID NO: 1660121 - DNA, 25 bp, Homo sapien
aggagtaggaagagtggcagagcct

SEQ ID NO: 1660122 - DNA, 25 bp, Homo sapien
gagtggcagagcctgtgggttgtcc

SEQ ID NO: 1660123 - DNA, 25 bp, Homo sapien
gtggcagagcctgtgggttgtccat

SEQ ID NO: 1660124 - DNA, 25 bp, Homo sapien
gagtcagttttattgccatctctgg

SEQ ID NO: 1660125 - DNA, 25 bp, Homo sapien
agttttattgccatctctgggaggg

SEQ ID NO: 1660126 - DNA, 25 bp, Homo sapien
gtcagttttattgccatctctggga

SEQ ID NO: 1660127 - DNA, 25 bp, Homo sapien
gagagtcagttttattgccatctct

SEQ ID NO: 1660128 - DNA, 25 bp, Homo sapien
tcaaatccgcccaatctccttcagc

SEQ ID NO: 1660129 - DNA, 25 bp, Homo sapien
caatctccttcagcttggccaccag

SEQ ID NO: 1660130 - DNA, 25 bp, Homo sapien
ccaatctccttcagcttggccacca

SEQ ID NO: 1660131 - DNA, 25 bp, Homo sapien
cgcccaatctccttcagcttggcca

SEQ ID NO: 1660132 - DNA, 25 bp, Homo sapien
gctggggcgggtcctccacactgat

SEQ ID NO: 1660133 - DNA, 25 bp, Homo sapien
gggtcctccacactgatcacagaga

SEQ ID NO: 1660134 - DNA, 25 bp, Homo sapien
gggcgggtcctccacactgatcaca

SEQ ID NO: 1660135 - DNA, 25 bp, Homo sapien
agtggtctccaccttgacgccggcc

SEQ ID NO: 1660136 - DNA, 25 bp, Homo sapien
gtccccaggcttgatcacctcgatc

SEQ ID NO: 1660137 - DNA, 25 bp, Homo sapien
aggtccccaggcttgatcacctcga

SEQ ID NO: 1660138 - DNA, 25 bp, Homo sapien
ggtccccaggcttgatcacctcgat

SEQ ID NO: 1660139 - DNA, 25 bp, Homo sapien
actggccaggacacgcgaaacttct

SEQ ID NO: 1660140 - DNA, 25 bp, Homo sapien
cacacctggtgtggacaactcctgc

SEQ ID NO: 1660141 - DNA, 25 bp, Homo sapien
gtgtggacaactcctgctggctagg

SEQ ID NO: 1660142 - DNA, 25 bp, Homo sapien
gaggcccaactactgcagcagtcct

SEQ ID NO: 1660143 - DNA, 25 bp, Homo sapien
gagatgatccagtgaaccctccctg

SEQ ID NO: 1660144 - DNA, 25 bp, Homo sapien
tggcggagatgacccactaaactgt

SEQ ID NO: 1660145 - DNA, 25 bp, Homo sapien
gaacctagatgacccagtgaacttg

SEQ ID NO: 1660146 - DNA, 25 bp, Homo sapien
gctgaaggctcccaataggctgaga

SEQ ID NO: 1660147 - DNA, 25 bp, Homo sapien
gatctcccgctccactttcaacttg

SEQ ID NO: 1660148 - DNA, 25 bp, Homo sapien
tcccgctccactttcaacttgtccc

SEQ ID NO: 1660149 - DNA, 25 bp, Homo sapien
tgttgggcagcgtggcgtagcgggg

SEQ ID NO: 1660150 - DNA, 25 bp, Homo sapien
gtagcggggctcgttgagcctcagg

SEQ ID NO: 1660151 - DNA, 25 bp, Homo sapien
tagaatcgagcttgtacacctggga

SEQ ID NO: 1660152 - DNA, 25 bp, Homo sapien
tgaggctaattcaggtccgacccga

SEQ ID NO: 1660153 - DNA, 25 bp, Homo sapien
tatcaagtcatcgaatcctcgcagg

SEQ ID NO: 1660154 - DNA, 25 bp, Homo sapien
gagcgaacaatgcagggtcccatga

SEQ ID NO: 1660155 - DNA, 25 bp, Homo sapien
agtttgagggatgagggcctggccc

SEQ ID NO: 1660156 - DNA, 25 bp, Homo sapien
ggcaatccgagggaacagtgttcca

SEQ ID NO: 1660157 - DNA, 25 bp, Homo sapien
aatgaagtttgagggatgagggcct

SEQ ID NO: 1660158 - DNA, 25 bp, Homo sapien
caatccgagggaacagtgttccagg

SEQ ID NO: 1660159 - DNA, 25 bp, Homo sapien
tcatctgccctgtctggttacagtc

SEQ ID NO: 1660160 - DNA, 25 bp, Homo sapien
tctgccctgtctggttacagtcatc

SEQ ID NO: 1660161 - DNA, 25 bp, Homo sapien
cctgtctggttacagtcatcatcga

SEQ ID NO: 1660162 - DNA, 25 bp, Homo sapien
ctgtggccagtcaagaaatccagct

SEQ ID NO: 1660163 - DNA, 25 bp, Homo sapien
atggccagggcggtacgaatcgtct

SEQ ID NO: 1660164 - DNA, 25 bp, Homo sapien
gtggatacctcggtctgcacccatg

SEQ ID NO: 1660165 - DNA, 25 bp, Homo sapien
cacctgcaggggacccaagcgttct

SEQ ID NO: 1660166 - DNA, 25 bp, Homo sapien
ggacccaagcgttctgcttctgctg

SEQ ID NO: 1660167 - DNA, 25 bp, Homo sapien
acagctgacggcgatgacctccttc

SEQ ID NO: 1660168 - DNA, 25 bp, Homo sapien
tccgtgaccacaccggtcctgtcag

SEQ ID NO: 1660169 - DNA, 25 bp, Homo sapien
tccaccgcgatctcacagaaggggt

SEQ ID NO: 1660170 - DNA, 25 bp, Homo sapien
gagtgcttcacaccatccgtgacca

SEQ ID NO: 1660171 - DNA, 25 bp, Homo sapien
tggatgaggacaacgacagcctgga

SEQ ID NO: 1660172 - DNA, 25 bp, Homo sapien
ttgatcatccctactgttgtcactg

SEQ ID NO: 1660173 - DNA, 25 bp, Homo sapien
gacagaactgggttagagtttgtag

SEQ ID NO: 1660174 - DNA, 25 bp, Homo sapien
tcctgggtaccagggacatctgact

SEQ ID NO: 1660175 - DNA, 25 bp, Homo sapien
tagaccagggtgtagcgtgaaccac

SEQ ID NO: 1660176 - DNA, 25 bp, Homo sapien
gttctttgcgtgactgacaggctcc

SEQ ID NO: 1660177 - DNA, 25 bp, Homo sapien
ttttcggaaaaatgccagccctctg

SEQ ID NO: 1660178 - DNA, 25 bp, Homo sapien
tattagtttctctcggctgccgtaa

SEQ ID NO: 1660179 - DNA, 25 bp, Homo sapien
tcagggaggcttctgaagggcctca

SEQ ID NO: 1660180 - DNA, 25 bp, Homo sapien
taggagttgcccctttaagacagaa

SEQ ID NO: 1660181 - DNA, 25 bp, Homo sapien
taagtcaggaaacaatggtagggct

SEQ ID NO: 1660182 - DNA, 25 bp, Homo sapien
cccatcagtaagaggccccaagctt

SEQ ID NO: 1660183 - DNA, 25 bp, Homo sapien
ccactcagttaggttggctccttga

SEQ ID NO: 1660184 - DNA, 25 bp, Homo sapien
ggaagtcctcccagagaaggtgatg

SEQ ID NO: 1660185 - DNA, 25 bp, Homo sapien
gagtgagcacgtgattctgggaaca

SEQ ID NO: 1660186 - DNA, 25 bp, Homo sapien
gaacagaggtggatcagacatggcc

SEQ ID NO: 1660187 - DNA, 25 bp, Homo sapien
gccagggagaatcactaaattatta

SEQ ID NO: 1660188 - DNA, 25 bp, Homo sapien
cctgagggtgtagggtcaggggctt

SEQ ID NO: 1660189 - DNA, 25 bp, Homo sapien
tataccaaggcaacctgagggtgta

SEQ ID NO: 1660190 - DNA, 25 bp, Homo sapien
ggatataccaaggcaacctgagggt

SEQ ID NO: 1660191 - DNA, 25 bp, Homo sapien
gaatgggttaatctctgcaaaggac

SEQ ID NO: 1660192 - DNA, 25 bp, Homo sapien
taagtacccgctaaatgctggctgc

SEQ ID NO: 1660193 - DNA, 25 bp, Homo sapien
caggccctgcgctaggtaatgctgg

SEQ ID NO: 1660194 - DNA, 25 bp, Homo sapien
aggacttggaacgatgcctgccacg

SEQ ID NO: 1660195 - DNA, 25 bp, Homo sapien
cgtgcattaaacagggaccgtgact

SEQ ID NO: 1660196 - DNA, 25 bp, Homo sapien
ggaaaagagaacatggccgtgaccc

SEQ ID NO: 1660197 - DNA, 25 bp, Homo sapien
gaggaacctggatagaactctcggc

SEQ ID NO: 1660198 - DNA, 25 bp, Homo sapien
caagagagtgaatccagaacgaggg

SEQ ID NO: 1660199 - DNA, 25 bp, Homo sapien
ccagtgtgcgctcgtggccccggaa

SEQ ID NO: 1660200 - DNA, 25 bp, Homo sapien
agacccccacccagtgtgcgctcgt

SEQ ID NO: 1660201 - DNA, 25 bp, Homo sapien
cccggaagcacacggctgcgggact

SEQ ID NO: 1660202 - DNA, 25 bp, Homo sapien
tggccccggaagcacacggctgcgg

SEQ ID NO: 1660203 - DNA, 25 bp, Homo sapien
gaccctcttgacagctacgagcacg

SEQ ID NO: 1660204 - DNA, 25 bp, Homo sapien
cttcacggcgtagtcgatgaccctc

SEQ ID NO: 1660205 - DNA, 25 bp, Homo sapien
ggcgtagtcgatgaccctcttgaca

SEQ ID NO: 1660206 - DNA, 25 bp, Homo sapien
ttgacagctacgagcacgcgcagct

SEQ ID NO: 1660207 - DNA, 25 bp, Homo sapien
caccctcagcggctcagtccagaag

SEQ ID NO: 1660208 - DNA, 25 bp, Homo sapien
ggtcagcccgcaccctcagcggctc

SEQ ID NO: 1660209 - DNA, 25 bp, Homo sapien
gccacttacagggtcagcccgcacc

SEQ ID NO: 1660210 - DNA, 25 bp, Homo sapien
cagccacttacagggtcagcccgca

SEQ ID NO: 1660211 - DNA, 25 bp, Homo sapien
gccgttcctttattctgccccaggc

SEQ ID NO: 1660212 - DNA, 25 bp, Homo sapien
aagccgttcctttattctgccccag

SEQ ID NO: 1660213 - DNA, 25 bp, Homo sapien
agccgttcctttattctgccccagg

SEQ ID NO: 1660214 - DNA, 25 bp, Homo sapien
ccgttcctttattctgccccaggca

SEQ ID NO: 1660215 - DNA, 25 bp, Homo sapien
ggaatccactgatggcgtcggtgct

SEQ ID NO: 1660216 - DNA, 25 bp, Homo sapien
cgtcggtgctctgcatgatcatgtc

SEQ ID NO: 1660217 - DNA, 25 bp, Homo sapien
ctgcatgatcatgtctgccagcaga

SEQ ID NO: 1660218 - DNA, 25 bp, Homo sapien
atggcgtcggtgctctgcatgatca

SEQ ID NO: 1660219 - DNA, 25 bp, Homo sapien
caagggggtctctgccgggtctgcg

SEQ ID NO: 1660220 - DNA, 25 bp, Homo sapien
tctgcgggagtcgttagtgtgttgg

SEQ ID NO: 1660221 - DNA, 25 bp, Homo sapien
ggtctctgccgggtctgcgggagtc

SEQ ID NO: 1660222 - DNA, 25 bp, Homo sapien
gacgggggtgcggagcagggagagg

SEQ ID NO: 1660223 - DNA, 25 bp, Homo sapien
ttccacgcattcttcacggtgtagc

SEQ ID NO: 1660224 - DNA, 25 bp, Homo sapien
gaagaagacgttgttcttccacgca

SEQ ID NO: 1660225 - DNA, 25 bp, Homo sapien
gccacccagaaaaataggaccaaga

SEQ ID NO: 1660226 - DNA, 25 bp, Homo sapien
gaattgagaagggtaaggccagcca

SEQ ID NO: 1660227 - DNA, 25 bp, Homo sapien
tatcaaggcggtcagcagcagcagt

SEQ ID NO: 1660228 - DNA, 25 bp, Homo sapien
ctatcaaggcggtcagcagcagcag

SEQ ID NO: 1660229 - DNA, 25 bp, Homo sapien
atcaaggcggtcagcagcagcagtc

SEQ ID NO: 1660230 - DNA, 25 bp, Homo sapien
ccgcctggggcggtctgcagtctca

SEQ ID NO: 1660231 - DNA, 25 bp, Homo sapien
cggatcctggccgagtacctcaagc

SEQ ID NO: 1660232 - DNA, 25 bp, Homo sapien
ccgcccagccgcaagatgagctagc

SEQ ID NO: 1660233 - DNA, 25 bp, Homo sapien
ttctatcagaccacgcctatcgcct

SEQ ID NO: 1660234 - DNA, 25 bp, Homo sapien
agaggaaggcgctcgtggtctggcc

SEQ ID NO: 1660235 - DNA, 25 bp, Homo sapien
gcgactcgccctcgtcgcaccgaat

SEQ ID NO: 1660236 - DNA, 25 bp, Homo sapien
cacgccacagtcaccgccagcgtgg

SEQ ID NO: 1660237 - DNA, 25 bp, Homo sapien
accgaatccgcagtcccatcaccat

SEQ ID NO: 1660238 - DNA, 25 bp, Homo sapien
gctgagcagaatgcccccactctgg

SEQ ID NO: 1660239 - DNA, 25 bp, Homo sapien
gccctcttgttggcgggtccagtag

SEQ ID NO: 1660240 - DNA, 25 bp, Homo sapien
gatgccgtggttgcattcctgccac

SEQ ID NO: 1660241 - DNA, 25 bp, Homo sapien
agcaccatgaggacgttggccacga

SEQ ID NO: 1660242 - DNA, 25 bp, Homo sapien
tgcagccgggggccacaagggcagg

SEQ ID NO: 1660243 - DNA, 25 bp, Homo sapien
ggccacaagggcaggatgggcccag

SEQ ID NO: 1660244 - DNA, 25 bp, Homo sapien
ccacaagggcaggatgggcccaggc

SEQ ID NO: 1660245 - DNA, 25 bp, Homo sapien
cagccgggggccacaagggcaggat

SEQ ID NO: 1660246 - DNA, 25 bp, Homo sapien
aacaaccctgcctgaggatccacaa

SEQ ID NO: 1660247 - DNA, 25 bp, Homo sapien
gctttgctgtgaggaacctgtcttc

SEQ ID NO: 1660248 - DNA, 25 bp, Homo sapien
ggagaccttgagacttcccctgaga

SEQ ID NO: 1660249 - DNA, 25 bp, Homo sapien
ctcccctggtactcctgcctgaggt

SEQ ID NO: 1660250 - DNA, 25 bp, Homo sapien
tttggaatacaacgctcaaaactca

SEQ ID NO: 1660251 - DNA, 25 bp, Homo sapien
gatgtgggaccagactttcccgagg

SEQ ID NO: 1660252 - DNA, 25 bp, Homo sapien
gcagatgtgggaccagactttcccg

SEQ ID NO: 1660253 - DNA, 25 bp, Homo sapien
aggcctttggaatacaacgctcaaa

SEQ ID NO: 1660254 - DNA, 25 bp, Homo sapien
gtttcatagccaggacggggaccgc

SEQ ID NO: 1660255 - DNA, 25 bp, Homo sapien
tagccaggacggggaccgccacagt

SEQ ID NO: 1660256 - DNA, 25 bp, Homo sapien
tcatagccaggacggggaccgccac

SEQ ID NO: 1660257 - DNA, 25 bp, Homo sapien
tttcatagccaggacggggaccgcc

SEQ ID NO: 1660258 - DNA, 25 bp, Homo sapien
tacagagcaagaggatagctgagac

SEQ ID NO: 1660259 - DNA, 25 bp, Homo sapien
cagagcaagaggatagctgagaccc

SEQ ID NO: 1660260 - DNA, 25 bp, Homo sapien
ctgtacagagcaagaggatagctga

SEQ ID NO: 1660261 - DNA, 25 bp, Homo sapien
gcaagaggatagctgagacccagcc

SEQ ID NO: 1660262 - DNA, 25 bp, Homo sapien
gctggtgtacaccgccatggccacc

SEQ ID NO: 1660263 - DNA, 25 bp, Homo sapien
cgctcgctggtgtacaccgccatgg

SEQ ID NO: 1660264 - DNA, 25 bp, Homo sapien
gctcgctggtgtacaccgccatggc

SEQ ID NO: 1660265 - DNA, 25 bp, Homo sapien
tcgctggtgtacaccgccatggcca

SEQ ID NO: 1660266 - DNA, 25 bp, Homo sapien
aattcgctggctcgcgatgccccag

SEQ ID NO: 1660267 - DNA, 25 bp, Homo sapien
tcctcggcaggaattcgctggctcg

SEQ ID NO: 1660268 - DNA, 25 bp, Homo sapien
cagctcctcggcaggaattcgctgg

SEQ ID NO: 1660269 - DNA, 25 bp, Homo sapien
caggaattcgctggctcgcgatgcc

SEQ ID NO: 1660270 - DNA, 25 bp, Homo sapien
gcaaaggctgcggtggttgagacaa

SEQ ID NO: 1660271 - DNA, 25 bp, Homo sapien
gtggttgagacaagcgggccgtggc

SEQ ID NO: 1660272 - DNA, 25 bp, Homo sapien
ctgcggtggttgagacaagcgggcc

SEQ ID NO: 1660273 - DNA, 25 bp, Homo sapien
aaggctgcggtggttgagacaagcg

SEQ ID NO: 1660274 - DNA, 25 bp, Homo sapien
ggaagctcacggacaccagggccca

SEQ ID NO: 1660275 - DNA, 25 bp, Homo sapien
ggcccacagaacagccataatgctg

SEQ ID NO: 1660276 - DNA, 25 bp, Homo sapien
gcccacagaacagccataatgctga

SEQ ID NO: 1660277 - DNA, 25 bp, Homo sapien
ggaccaggaagctcacggacaccag

SEQ ID NO: 1660278 - DNA, 25 bp, Homo sapien
tatgatgtccccatgccctgttggc

SEQ ID NO: 1660279 - DNA, 25 bp, Homo sapien
gcctcaaaccagaaatcggtgctca

SEQ ID NO: 1660280 - DNA, 25 bp, Homo sapien
ggacccacagcctcaaaccagaaat

SEQ ID NO: 1660281 - DNA, 25 bp, Homo sapien
cgagtgagctgagtgggtgggaccc

SEQ ID NO: 1660282 - DNA, 25 bp, Homo sapien
gaacagcaagcagttggggcagtga

SEQ ID NO: 1660283 - DNA, 25 bp, Homo sapien
cagcaagcagttggggcagtgaggg

SEQ ID NO: 1660284 - DNA, 25 bp, Homo sapien
tcctgggtccttagagcccaagaaa

SEQ ID NO: 1660285 - DNA, 25 bp, Homo sapien
tgggtccttagagcccaagaaagag

SEQ ID NO: 1660286 - DNA, 25 bp, Homo sapien
agaattgctcgcaggatctccagca

SEQ ID NO: 1660287 - DNA, 25 bp, Homo sapien
gacagaattgctcgcaggatctcca

SEQ ID NO: 1660288 - DNA, 25 bp, Homo sapien
gaagacagaattgctcgcaggatct

SEQ ID NO: 1660289 - DNA, 25 bp, Homo sapien
cagaattgctcgcaggatctccagc

SEQ ID NO: 1660290 - DNA, 25 bp, Homo sapien
catttttctaacaacctgccaggca

SEQ ID NO: 1660291 - DNA, 25 bp, Homo sapien
caggcagacggggacttgagtcttc

SEQ ID NO: 1660292 - DNA, 25 bp, Homo sapien
gaaccaggatttcaggcctctagac

SEQ ID NO: 1660293 - DNA, 25 bp, Homo sapien
gaaagttgctctaatggatagtcca

SEQ ID NO: 1660294 - DNA, 25 bp, Homo sapien
ggcgccggcattcatgcacccggta

SEQ ID NO: 1660295 - DNA, 25 bp, Homo sapien
ggcattcatgcacccggtaggcgca

SEQ ID NO: 1660296 - DNA, 25 bp, Homo sapien
atgcacccggtaggcgcacatgtag

SEQ ID NO: 1660297 - DNA, 25 bp, Homo sapien
agacaggcgccggcattcatgcacc

SEQ ID NO: 1660298 - DNA, 25 bp, Homo sapien
tgtaggaccaggaaaagcgccagtc

SEQ ID NO: 1660299 - DNA, 25 bp, Homo sapien
atggccaaggccaacacgacgaaaa

SEQ ID NO: 1660300 - DNA, 25 bp, Homo sapien
gcgaagaacgtcatgagcactgcca

SEQ ID NO: 1660301 - DNA, 25 bp, Homo sapien
ccaggaagctgacggtgactccagt

SEQ ID NO: 1660302 - DNA, 25 bp, Homo sapien
atgaaggcccgggtggcattccagt

SEQ ID NO: 1660303 - DNA, 25 bp, Homo sapien
gcccatgatgatgccggagatggcg

SEQ ID NO: 1660304 - DNA, 25 bp, Homo sapien
agaagggccgggagatgcgggagaa

SEQ ID NO: 1660305 - DNA, 25 bp, Homo sapien
ctgatgagcgaaggccatgatgccc

SEQ ID NO: 1660306 - DNA, 25 bp, Homo sapien
atctggaatacaggtgtccttgggc

SEQ ID NO: 1660307 - DNA, 25 bp, Homo sapien
cctttccctctttgagccgcagagt

SEQ ID NO: 1660308 - DNA, 25 bp, Homo sapien
ctttgagccgcagagttctccatct

SEQ ID NO: 1660309 - DNA, 25 bp, Homo sapien
ttccctctttgagccgcagagttct

SEQ ID NO: 1660310 - DNA, 25 bp, Homo sapien
ttgttgcccaggcagtaccgccaca

SEQ ID NO: 1660311 - DNA, 25 bp, Homo sapien
tgacagccggtactgcatccagtgg

SEQ ID NO: 1660312 - DNA, 25 bp, Homo sapien
gcatccagtggtctgttgccatggc

SEQ ID NO: 1660313 - DNA, 25 bp, Homo sapien
gtctgcaggtagcacttgttgccca

SEQ ID NO: 1660314 - DNA, 25 bp, Homo sapien
ctgagtggcagagcctgcccgagcc

SEQ ID NO: 1660315 - DNA, 25 bp, Homo sapien
gagccctccttctgccacggcccct

SEQ ID NO: 1660316 - DNA, 25 bp, Homo sapien
ccgagccctccttctgccacggccc

SEQ ID NO: 1660317 - DNA, 25 bp, Homo sapien
tgcccgagccctccttctgccacgg

SEQ ID NO: 1660318 - DNA, 25 bp, Homo sapien
tccaaggtcctagtactctgtctcc

SEQ ID NO: 1660319 - DNA, 25 bp, Homo sapien
aatctcaggtgcctgaccctccaag

SEQ ID NO: 1660320 - DNA, 25 bp, Homo sapien
gacagggctgagatcactctgggcc

SEQ ID NO: 1660321 - DNA, 25 bp, Homo sapien
catgcgtttattgttcaaccagggc

SEQ ID NO: 1660322 - DNA, 25 bp, Homo sapien
ctggcctgtgcctgacttcccagcc

SEQ ID NO: 1660323 - DNA, 25 bp, Homo sapien
cagcctggcctgtgcctgacttccc

SEQ ID NO: 1660324 - DNA, 25 bp, Homo sapien
cagcctccgcgtcccctgggaggcc

SEQ ID NO: 1660325 - DNA, 25 bp, Homo sapien
tccgcgtcccctgggaggcctccta

SEQ ID NO: 1660326 - DNA, 25 bp, Homo sapien
tccaggcgtatgggcacggtgacag

SEQ ID NO: 1660327 - DNA, 25 bp, Homo sapien
agagggtgtccaggcgtatgggcac

SEQ ID NO: 1660328 - DNA, 25 bp, Homo sapien
caggcgtatgggcacggtgacagag

SEQ ID NO: 1660329 - DNA, 25 bp, Homo sapien
ggtgtccaggcgtatgggcacggtg

SEQ ID NO: 1660330 - DNA, 25 bp, Homo sapien
atggctcggtcccagatgacggcag

SEQ ID NO: 1660331 - DNA, 25 bp, Homo sapien
gggccatggctcggtcccagatgac

SEQ ID NO: 1660332 - DNA, 25 bp, Homo sapien
gccatggctcggtcccagatgacgg

SEQ ID NO: 1660333 - DNA, 25 bp, Homo sapien
agatgacggcagggacaggttgttc

SEQ ID NO: 1660334 - DNA, 25 bp, Homo sapien
cactggggccctcttacgtatcttc

SEQ ID NO: 1660335 - DNA, 25 bp, Homo sapien
ttacgtatcttctagcaacttcgcc

SEQ ID NO: 1660336 - DNA, 25 bp, Homo sapien
ttctagcaacttcgcctccgagatc

SEQ ID NO: 1660337 - DNA, 25 bp, Homo sapien
cagccccgtcctttggttgttccat

SEQ ID NO: 1660338 - DNA, 25 bp, Homo sapien
gatatgggctgtttgaaaactattt

SEQ ID NO: 1660339 - DNA, 25 bp, Homo sapien
ggatatgggctgtttgaaaactatt

SEQ ID NO: 1660340 - DNA, 25 bp, Homo sapien
catttcgctgatggatttgatggct

SEQ ID NO: 1660341 - DNA, 25 bp, Homo sapien
atttcgctgatggatttgatggctg

SEQ ID NO: 1660342 - DNA, 25 bp, Homo sapien
gtggcataaaatgacactccaagag

SEQ ID NO: 1660343 - DNA, 25 bp, Homo sapien
aaatgacactccaagagtctttcac

SEQ ID NO: 1660344 - DNA, 25 bp, Homo sapien
ttttccaggtggcataaaatgacac

SEQ ID NO: 1660345 - DNA, 25 bp, Homo sapien
gcataaaatgacactccaagagtct

SEQ ID NO: 1660346 - DNA, 25 bp, Homo sapien
ccatttccagtcattttacttctgg

SEQ ID NO: 1660347 - DNA, 25 bp, Homo sapien
gtctgaactgtgtcacagtgccaaa

SEQ ID NO: 1660348 - DNA, 25 bp, Homo sapien
ggacagtctgaactgtgtcacagtg

SEQ ID NO: 1660349 - DNA, 25 bp, Homo sapien
gtcattttacttctggacagtctga

SEQ ID NO: 1660350 - DNA, 25 bp, Homo sapien
gagttgctctggtttaaatgtctga

SEQ ID NO: 1660351 - DNA, 25 bp, Homo sapien
tcatggtgctgtcaggagtgtagca

SEQ ID NO: 1660352 - DNA, 25 bp, Homo sapien
gggacatatcgggtaacttcctgat

SEQ ID NO: 1660353 - DNA, 25 bp, Homo sapien
gcagcgcctagagctgctggttgcc

SEQ ID NO: 1660354 - DNA, 25 bp, Homo sapien
ttacagacacccaacccatttggag

SEQ ID NO: 1660355 - DNA, 25 bp, Homo sapien
gattacagacacccaacccatttgg

SEQ ID NO: 1660356 - DNA, 25 bp, Homo sapien
acagacacccaacccatttggagga

SEQ ID NO: 1660357 - DNA, 25 bp, Homo sapien
agacacccaacccatttggaggatt

SEQ ID NO: 1660358 - DNA, 25 bp, Homo sapien
tcccagtcctaaagcctaagagacc

SEQ ID NO: 1660359 - DNA, 25 bp, Homo sapien
cgaagtcccagtcctaaagcctaag

SEQ ID NO: 1660360 - DNA, 25 bp, Homo sapien
actttgcactctgttatcttcaacc

SEQ ID NO: 1660361 - DNA, 25 bp, Homo sapien
cctagccgaagtcccagtcctaaag

SEQ ID NO: 1660362 - DNA, 25 bp, Homo sapien
ttgacttctgcataatccgcctggg

SEQ ID NO: 1660363 - DNA, 25 bp, Homo sapien
tgcataatccgcctgggtgcccttg

SEQ ID NO: 1660364 - DNA, 25 bp, Homo sapien
cttctgcataatccgcctgggtgcc

SEQ ID NO: 1660365 - DNA, 25 bp, Homo sapien
ggaacttgacttctgcataatccgc

SEQ ID NO: 1660366 - DNA, 25 bp, Homo sapien
tgggaaactgggcaactgatactgc

SEQ ID NO: 1660367 - DNA, 25 bp, Homo sapien
ggagggagcacctggtggaagaggg

SEQ ID NO: 1660368 - DNA, 25 bp, Homo sapien
tgtggctttctgattccgcttctga

SEQ ID NO: 1660369 - DNA, 25 bp, Homo sapien
cctgggaagttgagcgtggcataat

SEQ ID NO: 1660370 - DNA, 25 bp, Homo sapien
ccagcatcatcctaggaggtggccg

SEQ ID NO: 1660371 - DNA, 25 bp, Homo sapien
gaggtggccgctagtattgtctcca

SEQ ID NO: 1660372 - DNA, 25 bp, Homo sapien
gaggtctcatagctagtaagtgcca

SEQ ID NO: 1660373 - DNA, 25 bp, Homo sapien
tgtgctgaatccctaggatgcccag

SEQ ID NO: 1660374 - DNA, 25 bp, Homo sapien
tgcaaaagtcagaaagtgggatgtc

SEQ ID NO: 1660375 - DNA, 25 bp, Homo sapien
cttgatgtcgctaagacaaggggtg

SEQ ID NO: 1660376 - DNA, 25 bp, Homo sapien
gtcgctaagacaaggggtgcaaaag

SEQ ID NO: 1660377 - DNA, 25 bp, Homo sapien
gtgcaaaagtcagaaagtgggatgt

SEQ ID NO: 1660378 - DNA, 25 bp, Homo sapien
aagagaaaaagtggaagcatggccc

SEQ ID NO: 1660379 - DNA, 25 bp, Homo sapien
agaagagaaaaagtggaagcatggc

SEQ ID NO: 1660380 - DNA, 25 bp, Homo sapien
agaaaaagtggaagcatggcccaga

SEQ ID NO: 1660381 - DNA, 25 bp, Homo sapien
gagaaaaagtggaagcatggcccag

SEQ ID NO: 1660382 - DNA, 25 bp, Homo sapien
gccgtcgggaccacattgatgtaat

SEQ ID NO: 1660383 - DNA, 25 bp, Homo sapien
cgtcgggaccacattgatgtaatcc

SEQ ID NO: 1660384 - DNA, 25 bp, Homo sapien
cagccgtcgggaccacattgatgta

SEQ ID NO: 1660385 - DNA, 25 bp, Homo sapien
gccagccgtcgggaccacattgatg

SEQ ID NO: 1660386 - DNA, 25 bp, Homo sapien
gcctcggggtttctgtctgagtccg

SEQ ID NO: 1660387 - DNA, 25 bp, Homo sapien
gggtttctgtctgagtccgtctctt

SEQ ID NO: 1660388 - DNA, 25 bp, Homo sapien
tgtctgagtccgtctcttcggtaga

SEQ ID NO: 1660389 - DNA, 25 bp, Homo sapien
ccgtctcttcggtagaatcttcatg

SEQ ID NO: 1660390 - DNA, 25 bp, Homo sapien
aagagccgtgatgccgattcccaga

SEQ ID NO: 1660391 - DNA, 25 bp, Homo sapien
gccgttgagatgagtcccttcttat

SEQ ID NO: 1660392 - DNA, 25 bp, Homo sapien
gagaatgccgttgagatgagtccct

SEQ ID NO: 1660393 - DNA, 25 bp, Homo sapien
ttcccagaaacgctccgttggagaa

SEQ ID NO: 1660394 - DNA, 25 bp, Homo sapien
cagctgcaggatggatccactctgg

SEQ ID NO: 1660395 - DNA, 25 bp, Homo sapien
tgacctcgaaggagtcctggctgct

SEQ ID NO: 1660396 - DNA, 25 bp, Homo sapien
tgggccccatggacgttccaggcct

SEQ ID NO: 1660397 - DNA, 25 bp, Homo sapien
ccaggcctcacagcggagcctgagg

SEQ ID NO: 1660398 - DNA, 25 bp, Homo sapien
gtggcaggtgaactctccttcgtgc

SEQ ID NO: 1660399 - DNA, 25 bp, Homo sapien
ggctcagaacctgtcccctctgggt

SEQ ID NO: 1660400 - DNA, 25 bp, Homo sapien
tgggaggggctcagaacctgtcccc

SEQ ID NO: 1660401 - DNA, 25 bp, Homo sapien
ggctgggaggggctcagaacctgtc

SEQ ID NO: 1660402 - DNA, 25 bp, Homo sapien
ggggctcagaacctgtcccctctgg

SEQ ID NO: 1660403 - DNA, 25 bp, Homo sapien
gctttggccctccagtactgggaga

SEQ ID NO: 1660404 - DNA, 25 bp, Homo sapien
tccagtactgggagagacgtgccgt

SEQ ID NO: 1660405 - DNA, 25 bp, Homo sapien
tactgggagagacgtgccgttccca

SEQ ID NO: 1660406 - DNA, 25 bp, Homo sapien
tggccctccagtactgggagagacg

SEQ ID NO: 1660407 - DNA, 25 bp, Homo sapien
ctgtcctgtttgcttgggaaaccat

SEQ ID NO: 1660408 - DNA, 25 bp, Homo sapien
tgtcctgtttgcttgggaaaccatc

SEQ ID NO: 1660409 - DNA, 25 bp, Homo sapien
ggaaaccatcactctcaggttctct

SEQ ID NO: 1660410 - DNA, 25 bp, Homo sapien
aaccatcactctcaggttctctgga

SEQ ID NO: 1660411 - DNA, 25 bp, Homo sapien
gcctgttctccgctcggcaggtgta

SEQ ID NO: 1660412 - DNA, 25 bp, Homo sapien
gctcggcaggtgtagcgccctgaat

SEQ ID NO: 1660413 - DNA, 25 bp, Homo sapien
gagccaagcctgttctccgctcggc

SEQ ID NO: 1660414 - DNA, 25 bp, Homo sapien
tcggcaggtgtagcgccctgaatcc

SEQ ID NO: 1660415 - DNA, 25 bp, Homo sapien
ttccaggtatgggacatttccctgg

SEQ ID NO: 1660416 - DNA, 25 bp, Homo sapien
cttccaggtatgggacatttccctg

SEQ ID NO: 1660417 - DNA, 25 bp, Homo sapien
atttccctggggctggggctccagg

SEQ ID NO: 1660418 - DNA, 25 bp, Homo sapien
tccaggtatgggacatttccctggg

SEQ ID NO: 1660419 - DNA, 25 bp, Homo sapien
cgtgaaatgctgataacaaggtctc

SEQ ID NO: 1660420 - DNA, 25 bp, Homo sapien
gctcacaccctttctggagaagtcc

SEQ ID NO: 1660421 - DNA, 25 bp, Homo sapien
ctgtgcgctcacaccctttctggag

SEQ ID NO: 1660422 - DNA, 25 bp, Homo sapien
aggccacacggagtcggacggtcct

SEQ ID NO: 1660423 - DNA, 25 bp, Homo sapien
gagtcggacggtcctctgtgcgctc

SEQ ID NO: 1660424 - DNA, 25 bp, Homo sapien
agatgaccgtcaccggctgcccggg

SEQ ID NO: 1660425 - DNA, 25 bp, Homo sapien
aacacacagatgaccgtcaccggct

SEQ ID NO: 1660426 - DNA, 25 bp, Homo sapien
acacacagatgaccgtcaccggctg

SEQ ID NO: 1660427 - DNA, 25 bp, Homo sapien
ccagggtctcggggatgtagacatc

SEQ ID NO: 1660428 - DNA, 25 bp, Homo sapien
gagcagttccccttggcgggatccc

SEQ ID NO: 1660429 - DNA, 25 bp, Homo sapien
cccgaaagaagtactgtgactcatc

SEQ ID NO: 1660430 - DNA, 25 bp, Homo sapien
gtgactcatcctgcatctgcgcgtc

SEQ ID NO: 1660431 - DNA, 25 bp, Homo sapien
gccacaggagcacccttggttgtct

SEQ ID NO: 1660432 - DNA, 25 bp, Homo sapien
actgactcctgcactcgtatccaga

SEQ ID NO: 1660433 - DNA, 25 bp, Homo sapien
gactcctgcactcgtatccagaatc

SEQ ID NO: 1660434 - DNA, 25 bp, Homo sapien
tgcactcgtatccagaatctcccat

SEQ ID NO: 1660435 - DNA, 25 bp, Homo sapien
aggccctccggcaccatcactgact

SEQ ID NO: 1660436 - DNA, 25 bp, Homo sapien
gcccagcagcgaggacagcagcagt

SEQ ID NO: 1660437 - DNA, 25 bp, Homo sapien
gcgaggacagcagcagtggcagtag

SEQ ID NO: 1660438 - DNA, 25 bp, Homo sapien
cgcccagcagcgaggacagcagcag

SEQ ID NO: 1660439 - DNA, 25 bp, Homo sapien
aggacagcagcagtggcagtagcat

SEQ ID NO: 1660440 - DNA, 25 bp, Homo sapien
cctgttctctggtcgtgctgtgagt

SEQ ID NO: 1660441 - DNA, 25 bp, Homo sapien
tctctggtcgtgctgtgagtggctc

SEQ ID NO: 1660442 - DNA, 25 bp, Homo sapien
gacaggcctgttctctggtcgtgct

SEQ ID NO: 1660443 - DNA, 25 bp, Homo sapien
ggcctgttctctggtcgtgctgtga

SEQ ID NO: 1660444 - DNA, 25 bp, Homo sapien
atgaaatgagcttcagacgctgagc

SEQ ID NO: 1660445 - DNA, 25 bp, Homo sapien
aatgagcttcagacgctgagctcac

SEQ ID NO: 1660446 - DNA, 25 bp, Homo sapien
aagccgaaggcggaagctgagccct

SEQ ID NO: 1660447 - DNA, 25 bp, Homo sapien
gggcctgatgcatgaaatgagcttc

SEQ ID NO: 1660448 - DNA, 25 bp, Homo sapien
gggtatcaagcactgagctttaggg

SEQ ID NO: 1660449 - DNA, 25 bp, Homo sapien
aagcactgagctttagggggacttg

SEQ ID NO: 1660450 - DNA, 25 bp, Homo sapien
caagcactgagctttagggggactt

SEQ ID NO: 1660451 - DNA, 25 bp, Homo sapien
cttgggtatcaagcactgagcttta

SEQ ID NO: 1660452 - DNA, 25 bp, Homo sapien
gcaccgcggagcctcgggccccaga

SEQ ID NO: 1660453 - DNA, 25 bp, Homo sapien
gcggcaccgcggagcctcgggcccc

SEQ ID NO: 1660454 - DNA, 25 bp, Homo sapien
cggcaccgcggagcctcgggcccca

SEQ ID NO: 1660455 - DNA, 25 bp, Homo sapien
ggcggcaccgcggagcctcgggccc

SEQ ID NO: 1660456 - DNA, 25 bp, Homo sapien
aagcagccgtatccccttgggagcc

SEQ ID NO: 1660457 - DNA, 25 bp, Homo sapien
gctcagtcaccgcaagcagccgtat

SEQ ID NO: 1660458 - DNA, 25 bp, Homo sapien
cccttgggagcccgtgagcctgtgt

SEQ ID NO: 1660459 - DNA, 25 bp, Homo sapien
ggagggagctcagtcaccgcaagca

SEQ ID NO: 1660460 - DNA, 25 bp, Homo sapien
cagctccaggacccggggatgcaag

SEQ ID NO: 1660461 - DNA, 25 bp, Homo sapien
tgtcagcatcacagaccaggtgcag

SEQ ID NO: 1660462 - DNA, 25 bp, Homo sapien
gagcccagcaggtgaattctcttcc

SEQ ID NO: 1660463 - DNA, 25 bp, Homo sapien
gacccggggatgcaagggttggcag

SEQ ID NO: 1660464 - DNA, 25 bp, Homo sapien
tagacctggcttcaacggtggctgg

SEQ ID NO: 1660465 - DNA, 25 bp, Homo sapien
cagggtccgatgatataagggctca

SEQ ID NO: 1660466 - DNA, 25 bp, Homo sapien
gacgctgaggcatacagagatcaag

SEQ ID NO: 1660467 - DNA, 25 bp, Homo sapien
gctgctcacccagagatttgccagg

SEQ ID NO: 1660468 - DNA, 25 bp, Homo sapien
tacagacccgccatacaggttgggc

SEQ ID NO: 1660469 - DNA, 25 bp, Homo sapien
gaagagacctcagaatcggacaggc

SEQ ID NO: 1660470 - DNA, 25 bp, Homo sapien
cagtgagatttccacacccggatac

SEQ ID NO: 1660471 - DNA, 25 bp, Homo sapien
gatacatcgtggaaccatcaaggca

SEQ ID NO: 1660472 - DNA, 25 bp, Homo sapien
cattggtccaagttttggttagaca

SEQ ID NO: 1660473 - DNA, 25 bp, Homo sapien
ctagagggttcttgttctatgagaa

SEQ ID NO: 1660474 - DNA, 25 bp, Homo sapien
tagtagaagctagaggcagggatgg

SEQ ID NO: 1660475 - DNA, 25 bp, Homo sapien
tcagagaggtcgagaggagaatggt

SEQ ID NO: 1660476 - DNA, 25 bp, Homo sapien
gaggcttcactttatggaagctgag

SEQ ID NO: 1660477 - DNA, 25 bp, Homo sapien
tccctgcgggtcctgaggcttcact

SEQ ID NO: 1660478 - DNA, 25 bp, Homo sapien
gctggaggggttgtgattcctcaaa

SEQ ID NO: 1660479 - DNA, 25 bp, Homo sapien
ttcctcccctgacgagggggcaaca

SEQ ID NO: 1660480 - DNA, 25 bp, Homo sapien
aaagaaatcaggtcccgccaatagg

SEQ ID NO: 1660481 - DNA, 25 bp, Homo sapien
gccataccaaagagagcgatcctgg

SEQ ID NO: 1660482 - DNA, 25 bp, Homo sapien
ttagtggcgtaaggatgacaagccg

SEQ ID NO: 1660483 - DNA, 25 bp, Homo sapien
cagggccttaattgagacatgatac

SEQ ID NO: 1660484 - DNA, 25 bp, Homo sapien
ccaggctggatgctcggtgtggaga

SEQ ID NO: 1660485 - DNA, 25 bp, Homo sapien
gtgtggagaagcccacatcactcac

SEQ ID NO: 1660486 - DNA, 25 bp, Homo sapien
tcagaggtgtccaggctggatgctc

SEQ ID NO: 1660487 - DNA, 25 bp, Homo sapien
gatgctcggtgtggagaagcccaca

SEQ ID NO: 1660488 - DNA, 25 bp, Homo sapien
gccgagcccctgatggcctttgcat

SEQ ID NO: 1660489 - DNA, 25 bp, Homo sapien
aggccgagcccctgatggcctttgc

SEQ ID NO: 1660490 - DNA, 25 bp, Homo sapien
ggccgagcccctgatggcctttgca

SEQ ID NO: 1660491 - DNA, 25 bp, Homo sapien
gaggccgagcccctgatggcctttg

SEQ ID NO: 1660492 - DNA, 25 bp, Homo sapien
cagtgtcacttgtgatacaggtctt

SEQ ID NO: 1660493 - DNA, 25 bp, Homo sapien
acttgtgatacaggtcttgaggtgc

SEQ ID NO: 1660494 - DNA, 25 bp, Homo sapien
tgtcacttgtgatacaggtcttgag

SEQ ID NO: 1660495 - DNA, 25 bp, Homo sapien
tcacttgtgatacaggtcttgaggt

SEQ ID NO: 1660496 - DNA, 25 bp, Homo sapien
acagaccaggcgcagagactggccc

SEQ ID NO: 1660497 - DNA, 25 bp, Homo sapien
aagagatgagccatttcccagggct

SEQ ID NO: 1660498 - DNA, 25 bp, Homo sapien
gagccatttcccagggctgtggatg

SEQ ID NO: 1660499 - DNA, 25 bp, Homo sapien
ctgaaagagatgagccatttcccag

SEQ ID NO: 1660500 - DNA, 25 bp, Homo sapien
atgagccatttcccagggctgtgga

SEQ ID NO: 1660501 - DNA, 25 bp, Homo sapien
gtcatggtcaagttccaaggagggt

SEQ ID NO: 1660502 - DNA, 25 bp, Homo sapien
aggacacatcgaggcggacggtact

SEQ ID NO: 1660503 - DNA, 25 bp, Homo sapien
cggacggtactggtcgtggtcacac

SEQ ID NO: 1660504 - DNA, 25 bp, Homo sapien
cacatcgaggcggacggtactggtc

SEQ ID NO: 1660505 - DNA, 25 bp, Homo sapien
ctggtcgtggtcacacctgtcccag

SEQ ID NO: 1660506 - DNA, 25 bp, Homo sapien
aggctggtgccgtggtcctggggct

SEQ ID NO: 1660507 - DNA, 25 bp, Homo sapien
tggtgccgtggtcctggggctttgg

SEQ ID NO: 1660508 - DNA, 25 bp, Homo sapien
gtgaggctggtgccgtggtcctggg

SEQ ID NO: 1660509 - DNA, 25 bp, Homo sapien
tggggctttggggtaagggtgagca

SEQ ID NO: 1660510 - DNA, 25 bp, Homo sapien
tagggtccctaggatgaggatgtca

SEQ ID NO: 1660511 - DNA, 25 bp, Homo sapien
ccagactctagggtccctaggatga

SEQ ID NO: 1660512 - DNA, 25 bp, Homo sapien
agactctagggtccctaggatgagg

SEQ ID NO: 1660513 - DNA, 25 bp, Homo sapien
ctctagggtccctaggatgaggatg

SEQ ID NO: 1660514 - DNA, 25 bp, Homo sapien
gcagcaagtaaccatccccatattg

SEQ ID NO: 1660515 - DNA, 25 bp, Homo sapien
tctctagccgaaagaaatatgaccc

SEQ ID NO: 1660516 - DNA, 25 bp, Homo sapien
tgtggccactggagcgtcttggtat

SEQ ID NO: 1660517 - DNA, 25 bp, Homo sapien
gacagctgcttagttttgtaattca

SEQ ID NO: 1660518 - DNA, 25 bp, Homo sapien
ccagggccgccagggaacgtctgtt

SEQ ID NO: 1660519 - DNA, 25 bp, Homo sapien
tctgggtttgaaggcgccagggccg

SEQ ID NO: 1660520 - DNA, 25 bp, Homo sapien
gtctgggtttgaaggcgccagggcc

SEQ ID NO: 1660521 - DNA, 25 bp, Homo sapien
ccgccagggaacgtctgttcctcag

SEQ ID NO: 1660522 - DNA, 25 bp, Homo sapien
tctatccaggactctcccatgtttc

SEQ ID NO: 1660523 - DNA, 25 bp, Homo sapien
tctcccatgtttcttagggacctga

SEQ ID NO: 1660524 - DNA, 25 bp, Homo sapien
tctccccataggacaaatcgggctc

SEQ ID NO: 1660525 - DNA, 25 bp, Homo sapien
aaatcgggctccatgagtgtccacc

SEQ ID NO: 1660526 - DNA, 25 bp, Homo sapien
cagagagacaaacactctacgatct

SEQ ID NO: 1660527 - DNA, 25 bp, Homo sapien
tctacgatctcactatatttggaac

SEQ ID NO: 1660528 - DNA, 25 bp, Homo sapien
ttctaaaggaatcagtctcgggctt

SEQ ID NO: 1660529 - DNA, 25 bp, Homo sapien
cctaaaatagtcgacctcagagaag

SEQ ID NO: 1660530 - DNA, 25 bp, Homo sapien
tgatctcggagtactcatagccgat

SEQ ID NO: 1660531 - DNA, 25 bp, Homo sapien
ggatgttgatctcggagtactcata

SEQ ID NO: 1660532 - DNA, 25 bp, Homo sapien
tcggagtactcatagccgatggcct

SEQ ID NO: 1660533 - DNA, 25 bp, Homo sapien
tactcatagccgatggcctcctgtt

SEQ ID NO: 1660534 - DNA, 25 bp, Homo sapien
gggctggcggagcatggtgtggggg

SEQ ID NO: 1660535 - DNA, 25 bp, Homo sapien
ggctggcggagcatggtgtgggggg

SEQ ID NO: 1660536 - DNA, 25 bp, Homo sapien
ctgccggggattcaatcaggggtcc

SEQ ID NO: 1660537 - DNA, 25 bp, Homo sapien
ctgctggccttgccgatttcttcct

SEQ ID NO: 1660538 - DNA, 25 bp, Homo sapien
ctggccttgccgatttcttcctgca

SEQ ID NO: 1660539 - DNA, 25 bp, Homo sapien
gctggccttgccgatttcttcctgc

SEQ ID NO: 1660540 - DNA, 25 bp, Homo sapien
tgctggccttgccgatttcttcctg

SEQ ID NO: 1660541 - DNA, 25 bp, Homo sapien
cagctcccccgaatgcccctagcgt

SEQ ID NO: 1660542 - DNA, 25 bp, Homo sapien
tgcccctagcgtcactcctgatata

SEQ ID NO: 1660543 - DNA, 25 bp, Homo sapien
aatgcccctagcgtcactcctgata

SEQ ID NO: 1660544 - DNA, 25 bp, Homo sapien
ccgaatgcccctagcgtcactcctg

SEQ ID NO: 1660545 - DNA, 25 bp, Homo sapien
ccagcaccccaaggttcgaggactg

SEQ ID NO: 1660546 - DNA, 25 bp, Homo sapien
ggccgagccattcctcaaggttgtg

SEQ ID NO: 1660547 - DNA, 25 bp, Homo sapien
agggccgagccattcctcaaggttg

SEQ ID NO: 1660548 - DNA, 25 bp, Homo sapien
aaagggccgagccattcctcaaggt

SEQ ID NO: 1660549 - DNA, 25 bp, Homo sapien
ctgaaagggccgagccattcctcaa

SEQ ID NO: 1660550 - DNA, 25 bp, Homo sapien
ttggaagacagtcatggtcaagttc

SEQ ID NO: 1660551 - DNA, 25 bp, Homo sapien
ctccttggaagacagtcatggtcaa

SEQ ID NO: 1660552 - DNA, 25 bp, Homo sapien
ccttggaagacagtcatggtcaagt

SEQ ID NO: 1660553 - DNA, 25 bp, Homo sapien
tccttggaagacagtcatggtcaag

SEQ ID NO: 1660554 - DNA, 25 bp, Homo sapien
agccctggtcatggtcacgccggcc

SEQ ID NO: 1660555 - DNA, 25 bp, Homo sapien
tatgttgagtcggacagccctggtc

SEQ ID NO: 1660556 - DNA, 25 bp, Homo sapien
aggatatgttgagtcggacagccct

SEQ ID NO: 1660557 - DNA, 25 bp, Homo sapien
gccctggtcatggtcacgccggccc

SEQ ID NO: 1660558 - DNA, 25 bp, Homo sapien
gctgagcatcgaggagcgagtgata

SEQ ID NO: 1660559 - DNA, 25 bp, Homo sapien
ctgagcatcgaggagcgagtgatag

SEQ ID NO: 1660560 - DNA, 25 bp, Homo sapien
tgagcatcgaggagcgagtgatagt

SEQ ID NO: 1660561 - DNA, 25 bp, Homo sapien
agcatcgaggagcgagtgatagtgg

SEQ ID NO: 1660562 - DNA, 25 bp, Homo sapien
cctgtatcttgacagtaggtcctgg

SEQ ID NO: 1660563 - DNA, 25 bp, Homo sapien
aatcgaccgtgggtatcctcttgca

SEQ ID NO: 1660564 - DNA, 25 bp, Homo sapien
taaacagggctagaggcagtccagt

SEQ ID NO: 1660565 - DNA, 25 bp, Homo sapien
gaatatcccatggtatatcggcccc

SEQ ID NO: 1660566 - DNA, 25 bp, Homo sapien
ccccactgtccctctcttcatttgc

SEQ ID NO: 1660567 - DNA, 25 bp, Homo sapien
gtggagaaacgagggtcagcccagc

SEQ ID NO: 1660568 - DNA, 25 bp, Homo sapien
ccactgtccctctcttcatttgccc

SEQ ID NO: 1660569 - DNA, 25 bp, Homo sapien
actgtccctctcttcatttgcccat

SEQ ID NO: 1660570 - DNA, 25 bp, Homo sapien
ctctgaggcagaggcttcctgggct

SEQ ID NO: 1660571 - DNA, 25 bp, Homo sapien
tctgaggcagaggcttcctgggctc

SEQ ID NO: 1660572 - DNA, 25 bp, Homo sapien
ctgaggcagaggcttcctgggctcc

SEQ ID NO: 1660573 - DNA, 25 bp, Homo sapien
gcctgcaccagacacgtaggtcctg

SEQ ID NO: 1660574 - DNA, 25 bp, Homo sapien
tctggaccatcgtggaggtccctcc

SEQ ID NO: 1660575 - DNA, 25 bp, Homo sapien
catctaaatgtggatctccgaggac

SEQ ID NO: 1660576 - DNA, 25 bp, Homo sapien
gtccctcctgtcttttgagcatcta

SEQ ID NO: 1660577 - DNA, 25 bp, Homo sapien
tgtcagcaggtaatccttctgttcc

SEQ ID NO: 1660578 - DNA, 25 bp, Homo sapien
caaaagacgtatgtccctgcatcac

SEQ ID NO: 1660579 - DNA, 25 bp, Homo sapien
ccatgaactggatcggaggcagtcc

SEQ ID NO: 1660580 - DNA, 25 bp, Homo sapien
gaatgttccggcttacatggtcccc

SEQ ID NO: 1660581 - DNA, 25 bp, Homo sapien
cagggttgctgaggtaagtctgttc

SEQ ID NO: 1660582 - DNA, 25 bp, Homo sapien
gggttgctgaggtaagtctgttcct

SEQ ID NO: 1660583 - DNA, 25 bp, Homo sapien
agggttgctgaggtaagtctgttcc

SEQ ID NO: 1660584 - DNA, 25 bp, Homo sapien
ccagggttgctgaggtaagtctgtt

SEQ ID NO: 1660585 - DNA, 25 bp, Homo sapien
ttgtccccaattgcccataacctgg

SEQ ID NO: 1660586 - DNA, 25 bp, Homo sapien
tcccgtaaggacagttgcagcatct

SEQ ID NO: 1660587 - DNA, 25 bp, Homo sapien
gcttgtatctcatcctgcagaccaa

SEQ ID NO: 1660588 - DNA, 25 bp, Homo sapien
tgccgtgtcactttcttcccgtaag

SEQ ID NO: 1660589 - DNA, 25 bp, Homo sapien
ttgaccgcctgcagcatcactcctg

SEQ ID NO: 1660590 - DNA, 25 bp, Homo sapien
agatacacttgaggcagttccagca

SEQ ID NO: 1660591 - DNA, 25 bp, Homo sapien
ccagcagcccaggattcaagggctg

SEQ ID NO: 1660592 - DNA, 25 bp, Homo sapien
ggtgaattccccttcgtccctcaga

SEQ ID NO: 1660593 - DNA, 25 bp, Homo sapien
gtggaaacttgactgactacatcag

SEQ ID NO: 1660594 - DNA, 25 bp, Homo sapien
taaacaacgtatagctacactttcc

SEQ ID NO: 1660595 - DNA, 25 bp, Homo sapien
catcctacagacttgttttttccag

SEQ ID NO: 1660596 - DNA, 25 bp, Homo sapien
cctctagttcacaggtggtaaactt

SEQ ID NO: 1660597 - DNA, 25 bp, Homo sapien
tatttgctactttcctaggttttca

SEQ ID NO: 1660598 - DNA, 25 bp, Homo sapien
tacatttgatgtttgacccctctac

SEQ ID NO: 1660599 - DNA, 25 bp, Homo sapien
tgggatcactttcctaatacctgaa

SEQ ID NO: 1660600 - DNA, 25 bp, Homo sapien
agctgtcagtctaattgtggttttt

SEQ ID NO: 1660601 - DNA, 25 bp, Homo sapien
agttctcttggacagaagtcctgtg

SEQ ID NO: 1660602 - DNA, 25 bp, Homo sapien
catatgttggaagtcctaaatctca

SEQ ID NO: 1660603 - DNA, 25 bp, Homo sapien
tgtggtctgccatatatacgaaggt

SEQ ID NO: 1660604 - DNA, 25 bp, Homo sapien
gatggagttgaactcagttctcttg

SEQ ID NO: 1660605 - DNA, 25 bp, Homo sapien
caaggttatggctttggacaattcc

SEQ ID NO: 1660606 - DNA, 25 bp, Homo sapien
attaggacacaaacacactcagagg

SEQ ID NO: 1660607 - DNA, 25 bp, Homo sapien
gccttagaagggaccaaccctgata

SEQ ID NO: 1660608 - DNA, 25 bp, Homo sapien
gctgtggcagccctagtaaccaata

SEQ ID NO: 1660609 - DNA, 25 bp, Homo sapien
ttgcaccttgtggaagtgtaggaca

SEQ ID NO: 1660610 - DNA, 25 bp, Homo sapien
ttggttcctgaggttgcaccttgtg

SEQ ID NO: 1660611 - DNA, 25 bp, Homo sapien
taggacagcgtagtggagctcctgc

SEQ ID NO: 1660612 - DNA, 25 bp, Homo sapien
tttctgagtactcagtgtcggtgac

SEQ ID NO: 1660613 - DNA, 25 bp, Homo sapien
gtctgaaactatgcctgtctggaac

SEQ ID NO: 1660614 - DNA, 25 bp, Homo sapien
tggtctgaaactatgcctgtctgga

SEQ ID NO: 1660615 - DNA, 25 bp, Homo sapien
gggtggtctgaaactatgcctgtct

SEQ ID NO: 1660616 - DNA, 25 bp, Homo sapien
ggtggtctgaaactatgcctgtctg

SEQ ID NO: 1660617 - DNA, 25 bp, Homo sapien
gaccatgacggggttcacatcatcc

SEQ ID NO: 1660618 - DNA, 25 bp, Homo sapien
gcctgagaccatgacggggttcaca

SEQ ID NO: 1660619 - DNA, 25 bp, Homo sapien
ttcacatcatccgtgttttgcactg

SEQ ID NO: 1660620 - DNA, 25 bp, Homo sapien
catccgtgttttgcactggctgggc

SEQ ID NO: 1660621 - DNA, 25 bp, Homo sapien
gtgatgctagctccccagactgctc

SEQ ID NO: 1660622 - DNA, 25 bp, Homo sapien
gctagctccccagactgctcccagg

SEQ ID NO: 1660623 - DNA, 25 bp, Homo sapien
ttgtgatgctagctccccagactgc

SEQ ID NO: 1660624 - DNA, 25 bp, Homo sapien
tgaagatgaagcaaacacagaggaa

SEQ ID NO: 1660625 - DNA, 25 bp, Homo sapien
cacggcaggtgaaatctccttcttc

SEQ ID NO: 1660626 - DNA, 25 bp, Homo sapien
tgctgagcacggcaggtgaaatctc

SEQ ID NO: 1660627 - DNA, 25 bp, Homo sapien
tcagagagatttgcagggagcccag

SEQ ID NO: 1660628 - DNA, 25 bp, Homo sapien
agcccagaggatgctgagcacggca

SEQ ID NO: 1660629 - DNA, 25 bp, Homo sapien
gacagggagggacgaggtgttttgc

SEQ ID NO: 1660630 - DNA, 25 bp, Homo sapien
tccaggaccccggtattggagatgg

SEQ ID NO: 1660631 - DNA, 25 bp, Homo sapien
tgcaggggggttgccgtcagcatca

SEQ ID NO: 1660632 - DNA, 25 bp, Homo sapien
gaagccctggaaccagctcaggtgt

SEQ ID NO: 1660633 - DNA, 25 bp, Homo sapien
tgccattcctggaccatggagacgc

SEQ ID NO: 1660634 - DNA, 25 bp, Homo sapien
caagtgccattcctggaccatggag

SEQ ID NO: 1660635 - DNA, 25 bp, Homo sapien
tggagcaagggctgcggacagcgtc

SEQ ID NO: 1660636 - DNA, 25 bp, Homo sapien
ctgcggacagcgtcgtggcagacaa

SEQ ID NO: 1660637 - DNA, 25 bp, Homo sapien
ctgcgctgtttccttggaagatgct

SEQ ID NO: 1660638 - DNA, 25 bp, Homo sapien
tccttggaagatgctgatggccact

SEQ ID NO: 1660639 - DNA, 25 bp, Homo sapien
cttggaagatgctgatggccacttt

SEQ ID NO: 1660640 - DNA, 25 bp, Homo sapien
tttccttggaagatgctgatggcca

SEQ ID NO: 1660641 - DNA, 25 bp, Homo sapien
ctggggtggaaagaggtggccgcct

SEQ ID NO: 1660642 - DNA, 25 bp, Homo sapien
gaaagaggtggccgcctcaacatcc

SEQ ID NO: 1660643 - DNA, 25 bp, Homo sapien
ggggtggaaagaggtggccgcctca

SEQ ID NO: 1660644 - DNA, 25 bp, Homo sapien
gtggaaagaggtggccgcctcaaca

SEQ ID NO: 1660645 - DNA, 25 bp, Homo sapien
gacccgggcgtcctggcccagcact

SEQ ID NO: 1660646 - DNA, 25 bp, Homo sapien
acccgggcgtcctggcccagcactc

SEQ ID NO: 1660647 - DNA, 25 bp, Homo sapien
tcagggacccgggcgtcctggccca

SEQ ID NO: 1660648 - DNA, 25 bp, Homo sapien
gggacccgggcgtcctggcccagca

SEQ ID NO: 1660649 - DNA, 25 bp, Homo sapien
ggtgattgtgagcaccgaggactgg

SEQ ID NO: 1660650 - DNA, 25 bp, Homo sapien
gtcagattgctgggatggccagact

SEQ ID NO: 1660651 - DNA, 25 bp, Homo sapien
cacagagcaggtcagattgctggga

SEQ ID NO: 1660652 - DNA, 25 bp, Homo sapien
agattgctgggatggccagactcca

SEQ ID NO: 1660653 - DNA, 25 bp, Homo sapien
agcaggtcagattgctgggatggcc

SEQ ID NO: 1660654 - DNA, 25 bp, Homo sapien
tggagatgttgggcctgtgggtcag

SEQ ID NO: 1660655 - DNA, 25 bp, Homo sapien
gatggagatgttgggcctgtgggtc

SEQ ID NO: 1660656 - DNA, 25 bp, Homo sapien
gagatgttgggcctgtgggtcaggg

SEQ ID NO: 1660657 - DNA, 25 bp, Homo sapien
ctgggatggagatgttgggcctgtg

SEQ ID NO: 1660658 - DNA, 25 bp, Homo sapien
cagtagccataaccatagtacgagg

SEQ ID NO: 1660659 - DNA, 25 bp, Homo sapien
catccatttggacttcaaccgaaag

SEQ ID NO: 1660660 - DNA, 25 bp, Homo sapien
catcacacgcacagagagcttggaa

SEQ ID NO: 1660661 - DNA, 25 bp, Homo sapien
tcttcgtctgggtcgtttgtggcca

SEQ ID NO: 1660662 - DNA, 25 bp, Homo sapien
gcaccgtcagtgactctggcccctc

SEQ ID NO: 1660663 - DNA, 25 bp, Homo sapien
ctgcagggtacgaggacgcacagac

SEQ ID NO: 1660664 - DNA, 25 bp, Homo sapien
tgcaccgtcagtgactctggcccct

SEQ ID NO: 1660665 - DNA, 25 bp, Homo sapien
cagctggaatctccgctcctgagcc

SEQ ID NO: 1660666 - DNA, 25 bp, Homo sapien
agcaggggcagcagcagcggtagca

SEQ ID NO: 1660667 - DNA, 25 bp, Homo sapien
gcaggggcagcagcagcggtagcat

SEQ ID NO: 1660668 - DNA, 25 bp, Homo sapien
ctgaggcggaggcttcctgggctcc

SEQ ID NO: 1660669 - DNA, 25 bp, Homo sapien
ctctgaggcggaggcttcctgggct

SEQ ID NO: 1660670 - DNA, 25 bp, Homo sapien
tctgaggcggaggcttcctgggctc

SEQ ID NO: 1660671 - DNA, 25 bp, Homo sapien
ctgcacagagcagacggaaactttg

SEQ ID NO: 1660672 - DNA, 25 bp, Homo sapien
gaggaactgcgaagccacaagccct

SEQ ID NO: 1660673 - DNA, 25 bp, Homo sapien
gacggaaactttgagacccagagac

SEQ ID NO: 1660674 - DNA, 25 bp, Homo sapien
cacagaagaggaactgcgaagccac

SEQ ID NO: 1660675 - DNA, 25 bp, Homo sapien
tgagcaacagagcccggaccagggc

SEQ ID NO: 1660676 - DNA, 25 bp, Homo sapien
gagcaacagagcccggaccagggcc

SEQ ID NO: 1660677 - DNA, 25 bp, Homo sapien
gtgagcaacagagcccggaccaggg

SEQ ID NO: 1660678 - DNA, 25 bp, Homo sapien
ggctgtatacatgtggccttatttc

SEQ ID NO: 1660679 - DNA, 25 bp, Homo sapien
tcagttttgttgacaatcaattggc

SEQ ID NO: 1660680 - DNA, 25 bp, Homo sapien
tgtgtgtgggtatacaattttccca

SEQ ID NO: 1660681 - DNA, 25 bp, Homo sapien
aaatctttagattgctatagaccag

SEQ ID NO: 1660682 - DNA, 25 bp, Homo sapien
cactactactatgagactataaaac

SEQ ID NO: 1660683 - DNA, 25 bp, Homo sapien
actgttatagcttagaaagcaacac

SEQ ID NO: 1660684 - DNA, 25 bp, Homo sapien
tatacactcaaacaagtcaagattt

SEQ ID NO: 1660685 - DNA, 25 bp, Homo sapien
aatccattaaggctccctttatata

SEQ ID NO: 1660686 - DNA, 25 bp, Homo sapien
ccagggaacttcacctgccaggtga

SEQ ID NO: 1660687 - DNA, 25 bp, Homo sapien
agctggatggttctctctgtagtca

SEQ ID NO: 1660688 - DNA, 25 bp, Homo sapien
acactgagctggatggttctctctg

SEQ ID NO: 1660689 - DNA, 25 bp, Homo sapien
tgatcgtgagcactgaggagccgaa

SEQ ID NO: 1660690 - DNA, 25 bp, Homo sapien
cagcagatccaggtgaatccacaga

SEQ ID NO: 1660691 - DNA, 25 bp, Homo sapien
tcccctaatcagtgtgaaacccagg

SEQ ID NO: 1660692 - DNA, 25 bp, Homo sapien
tcttctatagagataacggagtcac

SEQ ID NO: 1660693 - DNA, 25 bp, Homo sapien
cagggtctgtaaaacgccttcttct

SEQ ID NO: 1660694 - DNA, 25 bp, Homo sapien
ggtggcattctccaaggctacaggt

SEQ ID NO: 1660695 - DNA, 25 bp, Homo sapien
ttggttcttcaggactgacagggag

SEQ ID NO: 1660696 - DNA, 25 bp, Homo sapien
agagattcagggcttggccttccca

SEQ ID NO: 1660697 - DNA, 25 bp, Homo sapien
gctccaggacggctgattctgacga

SEQ ID NO: 1660698 - DNA, 25 bp, Homo sapien
actgatggtcaggttctgtggagca

SEQ ID NO: 1660699 - DNA, 25 bp, Homo sapien
agacactgatggtcaggttctgtgg

SEQ ID NO: 1660700 - DNA, 25 bp, Homo sapien
ccatggaagacactgatggtcaggt

SEQ ID NO: 1660701 - DNA, 25 bp, Homo sapien
tttatttccatggaagacactgatg

SEQ ID NO: 1660702 - DNA, 25 bp, Homo sapien
tctgtggtcacatgaaaccttggga

SEQ ID NO: 1660703 - DNA, 25 bp, Homo sapien
gggagatgacagttccccatgtcca

SEQ ID NO: 1660704 - DNA, 25 bp, Homo sapien
tccaggctgctgacacgtagcaggt

SEQ ID NO: 1660705 - DNA, 25 bp, Homo sapien
ggttcgcaggatggccagattccag

SEQ ID NO: 1660706 - DNA, 25 bp, Homo sapien
tgatgctcagggaacagatgtcagt

SEQ ID NO: 1660707 - DNA, 25 bp, Homo sapien
cctctccaaccgaaataaatacact

SEQ ID NO: 1660708 - DNA, 25 bp, Homo sapien
aatggtcctagcttctcttttgcag

SEQ ID NO: 1660709 - DNA, 25 bp, Homo sapien
gccatgggaggatcccagtgttcat

SEQ ID NO: 1660710 - DNA, 25 bp, Homo sapien
ctcctgcaccatcaccagctctgga

SEQ ID NO: 1660711 - DNA, 25 bp, Homo sapien
tcctgcaccatcaccagctctggaa

SEQ ID NO: 1660712 - DNA, 25 bp, Homo sapien
tcataccccgcgtggtcctccagca

SEQ ID NO: 1660713 - DNA, 25 bp, Homo sapien
tctgcagctcataccccgcgtggtc

SEQ ID NO: 1660714 - DNA, 25 bp, Homo sapien
tttctgaagttgaatgaaccgcgga

SEQ ID NO: 1660715 - DNA, 25 bp, Homo sapien
tctgaagttgaatgaaccgcggaat

SEQ ID NO: 1660716 - DNA, 25 bp, Homo sapien
aagttgaatgaaccgcggaataaag

SEQ ID NO: 1660717 - DNA, 25 bp, Homo sapien
ataaaggtacgccgttatacgccat

SEQ ID NO: 1660718 - DNA, 25 bp, Homo sapien
tactaaaggcgagcatgtttttccc

SEQ ID NO: 1660719 - DNA, 25 bp, Homo sapien
gtggctcacattcacggttcatgtt

SEQ ID NO: 1660720 - DNA, 25 bp, Homo sapien
ttgaatgcggctggttcaccctgag

SEQ ID NO: 1660721 - DNA, 25 bp, Homo sapien
gaggcttgatcagagtccacttgga

SEQ ID NO: 1660722 - DNA, 25 bp, Homo sapien
caattgtgaatataaggaccctggg

SEQ ID NO: 1660723 - DNA, 25 bp, Homo sapien
tgggcttgaaatcccacaaaaggag

SEQ ID NO: 1660724 - DNA, 25 bp, Homo sapien
tgaagctgaacctagaagtgaacgg

SEQ ID NO: 1660725 - DNA, 25 bp, Homo sapien
gaccctgggaaaatgattcgcacga

SEQ ID NO: 1660726 - DNA, 25 bp, Homo sapien
ttttagcgggcctcgtatccctgag

SEQ ID NO: 1660727 - DNA, 25 bp, Homo sapien
taatcttttaagtgcacaggcccag

SEQ ID NO: 1660728 - DNA, 25 bp, Homo sapien
tacttccgagaagcagaccagcata

SEQ ID NO: 1660729 - DNA, 25 bp, Homo sapien
taaacccttggaactgcatggacag

SEQ ID NO: 1660730 - DNA, 25 bp, Homo sapien
gggagtggcaccctgaccagtttca

SEQ ID NO: 1660731 - DNA, 25 bp, Homo sapien
aaaacttgagcccacagtgtagaca

SEQ ID NO: 1660732 - DNA, 25 bp, Homo sapien
tgtagacacactggttccaaagacc

SEQ ID NO: 1660733 - DNA, 25 bp, Homo sapien
cacctggggggatcactctgggtcc

SEQ ID NO: 1660734 - DNA, 25 bp, Homo sapien
tttgaaccaagctatctgatgccag

SEQ ID NO: 1660735 - DNA, 25 bp, Homo sapien
taataatagatctcgccttgtggct

SEQ ID NO: 1660736 - DNA, 25 bp, Homo sapien
ccctcgctagtttggtggcaagcaa

SEQ ID NO: 1660737 - DNA, 25 bp, Homo sapien
cagtagtagttaggctcatgggctc

SEQ ID NO: 1660738 - DNA, 25 bp, Homo sapien
ctcctgaggcttggaagttatgtcc

SEQ ID NO: 1660739 - DNA, 25 bp, Homo sapien
aagatacccctcagctttgcactgg

SEQ ID NO: 1660740 - DNA, 25 bp, Homo sapien
tttggagagcaacctgtagcccaga

SEQ ID NO: 1660741 - DNA, 25 bp, Homo sapien
gtagcccagacagttgatgccatca

SEQ ID NO: 1660742 - DNA, 25 bp, Homo sapien
gagatctgcaaaacgctccctttca

SEQ ID NO: 1660743 - DNA, 25 bp, Homo sapien
gattgtgcgtaactgttcaccgcgt

SEQ ID NO: 1660744 - DNA, 25 bp, Homo sapien
tgcttagcgcaggtgctatcttccc

SEQ ID NO: 1660745 - DNA, 25 bp, Homo sapien
gacgcggcccaatcctaggaatgtg

SEQ ID NO: 1660746 - DNA, 25 bp, Homo sapien
gcagctggcagagaattctggcacg

SEQ ID NO: 1660747 - DNA, 25 bp, Homo sapien
cccatctttgcactgacagcagtgc

SEQ ID NO: 1660748 - DNA, 25 bp, Homo sapien
catctttgcactgacagcagtgcac

SEQ ID NO: 1660749 - DNA, 25 bp, Homo sapien
gctggcagagaattctggcacggct

SEQ ID NO: 1660750 - DNA, 25 bp, Homo sapien
cggtcctggccctttgtcgcgatga

SEQ ID NO: 1660751 - DNA, 25 bp, Homo sapien
ctagtacactctgggaggcgtgcgc

SEQ ID NO: 1660752 - DNA, 25 bp, Homo sapien
aagtgtttcgggacgacgcaacgca

SEQ ID NO: 1660753 - DNA, 25 bp, Homo sapien
taggcccagtttgtccgagagccgc

SEQ ID NO: 1660754 - DNA, 25 bp, Homo sapien
tgcactcggccgaacgcctggcgct

SEQ ID NO: 1660755 - DNA, 25 bp, Homo sapien
tggacctggtgcactcggccgaacg

SEQ ID NO: 1660756 - DNA, 25 bp, Homo sapien
gccgcggccgtcggcggtgctggac

SEQ ID NO: 1660757 - DNA, 25 bp, Homo sapien
ggtgctggacctggtgcactcggcc

SEQ ID NO: 1660758 - DNA, 25 bp, Homo sapien
tcaaagcatgagaatacagaggcag

SEQ ID NO: 1660759 - DNA, 25 bp, Homo sapien
gacataggctcttctagagtaaaca

SEQ ID NO: 1660760 - DNA, 25 bp, Homo sapien
ttccacaaaccaaaagacataggct

SEQ ID NO: 1660761 - DNA, 25 bp, Homo sapien
tgggactcctgacatcgcctgatga

SEQ ID NO: 1660762 - DNA, 25 bp, Homo sapien
agaaatatacttaccattcacattg

SEQ ID NO: 1660763 - DNA, 25 bp, Homo sapien
acattgtgtgatcatctgttatgct

SEQ ID NO: 1660764 - DNA, 25 bp, Homo sapien
ccactgtgatgttgtcaaatctatc

SEQ ID NO: 1660765 - DNA, 25 bp, Homo sapien
gatgactatcagaagatcagacatt

SEQ ID NO: 1660766 - DNA, 25 bp, Homo sapien
tttgcaacctttcgctgggccacag

SEQ ID NO: 1660767 - DNA, 25 bp, Homo sapien
cacaaacccaatgtagggatggtct

SEQ ID NO: 1660768 - DNA, 25 bp, Homo sapien
ttccagagccacatgcaagaccaaa

SEQ ID NO: 1660769 - DNA, 25 bp, Homo sapien
tttcaatatgagcaaatgcccctgg

SEQ ID NO: 1660770 - DNA, 25 bp, Homo sapien
cattgtcatttatctgggtttggag

SEQ ID NO: 1660771 - DNA, 25 bp, Homo sapien
taacctgtcataaccaaaacagtag

SEQ ID NO: 1660772 - DNA, 25 bp, Homo sapien
tagttcaattttagaggagggagag

SEQ ID NO: 1660773 - DNA, 25 bp, Homo sapien
tttggagataccctagataagtaac

SEQ ID NO: 1660774 - DNA, 25 bp, Homo sapien
atccccagccttgagagaacttgcc

SEQ ID NO: 1660775 - DNA, 25 bp, Homo sapien
cagcaggacctttctattcaaggaa

SEQ ID NO: 1660776 - DNA, 25 bp, Homo sapien
ggcaaagatatgactctggcaagga

SEQ ID NO: 1660777 - DNA, 25 bp, Homo sapien
caaggattgcaggtaaaagtgggca

SEQ ID NO: 1660778 - DNA, 25 bp, Homo sapien
caacctttgaggtagcatgcatgat

SEQ ID NO: 1660779 - DNA, 25 bp, Homo sapien
taatgttaacattgccacaagggct

SEQ ID NO: 1660780 - DNA, 25 bp, Homo sapien
caagggctcttcgtgcttcagcaag

SEQ ID NO: 1660781 - DNA, 25 bp, Homo sapien
aattgcttgatgacagtgccagggc

SEQ ID NO: 1660782 - DNA, 25 bp, Homo sapien
cccaggaggagatgcttgatctccg

SEQ ID NO: 1660783 - DNA, 25 bp, Homo sapien
cagaaaaactaagggaggcataatg

SEQ ID NO: 1660784 - DNA, 25 bp, Homo sapien
ttaggctccctcgacttcatctcag

SEQ ID NO: 1660785 - DNA, 25 bp, Homo sapien
cataatggagctccttttgttcttc

SEQ ID NO: 1660786 - DNA, 25 bp, Homo sapien
cccggccccacctgtccatatacat

SEQ ID NO: 1660787 - DNA, 25 bp, Homo sapien
tacgtgcccaggaaccggcacaggg

SEQ ID NO: 1660788 - DNA, 25 bp, Homo sapien
gtacgtgcccaggaaccggcacagg

SEQ ID NO: 1660789 - DNA, 25 bp, Homo sapien
ctgcagagtatacatgaggacaggc

SEQ ID NO: 1660790 - DNA, 25 bp, Homo sapien
gcagagtatacatgaggacaggcat

SEQ ID NO: 1660791 - DNA, 25 bp, Homo sapien
atacatctgcagagtatacatgagg

SEQ ID NO: 1660792 - DNA, 25 bp, Homo sapien
tacatctgcagagtatacatgagga

SEQ ID NO: 1660793 - DNA, 25 bp, Homo sapien
aggacagcaggtccgtatggagaca

SEQ ID NO: 1660794 - DNA, 25 bp, Homo sapien
ttgcaagggctcaaagttgtaggac

SEQ ID NO: 1660795 - DNA, 25 bp, Homo sapien
cagcaggtccgtatggagacagaag

SEQ ID NO: 1660796 - DNA, 25 bp, Homo sapien
ctcaaagttgtaggacagcaggtcc

SEQ ID NO: 1660797 - DNA, 25 bp, Homo sapien
tgcttgcttcctgcgggctttcact

SEQ ID NO: 1660798 - DNA, 25 bp, Homo sapien
tcatcatccattttctctggtctcc

SEQ ID NO: 1660799 - DNA, 25 bp, Homo sapien
tggtctcccagctgcttgcttcctg

SEQ ID NO: 1660800 - DNA, 25 bp, Homo sapien
ggtgatggtacccataatggggtct

SEQ ID NO: 1660801 - DNA, 25 bp, Homo sapien
gaaccactcctgtcccgaggttcga

SEQ ID NO: 1660802 - DNA, 25 bp, Homo sapien
accaccaagggctgcaggaaccact

SEQ ID NO: 1660803 - DNA, 25 bp, Homo sapien
gaggcacagacagatacagagcagg

SEQ ID NO: 1660804 - DNA, 25 bp, Homo sapien
cagagcagggccatgacaccagcac

SEQ ID NO: 1660805 - DNA, 25 bp, Homo sapien
tgactttgaggtcggagctgagccc

SEQ ID NO: 1660806 - DNA, 25 bp, Homo sapien
ggacagagccgctctgggacccata

SEQ ID NO: 1660807 - DNA, 25 bp, Homo sapien
catagatgttccaggccttgcagct

SEQ ID NO: 1660808 - DNA, 25 bp, Homo sapien
cagctgactttgaggtcggagctga

SEQ ID NO: 1660809 - DNA, 25 bp, Homo sapien
ccggccgggctcgaaaggagcatct

SEQ ID NO: 1660810 - DNA, 25 bp, Homo sapien
ccgggctcgaaaggagcatctgcag

SEQ ID NO: 1660811 - DNA, 25 bp, Homo sapien
ctgagctggagttgaccttgaatga

SEQ ID NO: 1660812 - DNA, 25 bp, Homo sapien
ggcttctcctcaagccgccagcaca

SEQ ID NO: 1660813 - DNA, 25 bp, Homo sapien
gaccttactcgacgaagctccaaga

SEQ ID NO: 1660814 - DNA, 25 bp, Homo sapien
cctccaggaccggaaggtatgaggt

SEQ ID NO: 1660815 - DNA, 25 bp, Homo sapien
aagctccaagatcccggtattggag

SEQ ID NO: 1660816 - DNA, 25 bp, Homo sapien
cttcttctgcagaccttactcgacg

SEQ ID NO: 1660817 - DNA, 25 bp, Homo sapien
tgaagatggtgatggtctgtggagc

SEQ ID NO: 1660818 - DNA, 25 bp, Homo sapien
aagatggtgatggtctgtggagcat

SEQ ID NO: 1660819 - DNA, 25 bp, Homo sapien
atgccgttcctgaagatggtgatgg

SEQ ID NO: 1660820 - DNA, 25 bp, Homo sapien
ctatgccgttcctgaagatggtgat

SEQ ID NO: 1660821 - DNA, 25 bp, Homo sapien
tggtcacctgagctccttggcgttt

SEQ ID NO: 1660822 - DNA, 25 bp, Homo sapien
ttccccgtccaggagaatgtgagag

SEQ ID NO: 1660823 - DNA, 25 bp, Homo sapien
tggatgtcgggtttctctatcaggg

SEQ ID NO: 1660824 - DNA, 25 bp, Homo sapien
gcttcacaggatcctggaaggctgc

SEQ ID NO: 1660825 - DNA, 25 bp, Homo sapien
tctctccacgcggaagaaatagctt

SEQ ID NO: 1660826 - DNA, 25 bp, Homo sapien
cacaacctcagcgtagtatgggatc

SEQ ID NO: 1660827 - DNA, 25 bp, Homo sapien
tgcacttgcagctcgtacactggct

SEQ ID NO: 1660828 - DNA, 25 bp, Homo sapien
aagaaatagcttcccgtgtcctcca

SEQ ID NO: 1660829 - DNA, 25 bp, Homo sapien
caggggcagcagcagcaggggcagc

SEQ ID NO: 1660830 - DNA, 25 bp, Homo sapien
ccccccacagcaggggcagcagcag

SEQ ID NO: 1660831 - DNA, 25 bp, Homo sapien
agcaggggcagcagcagcaggggca

SEQ ID NO: 1660832 - DNA, 25 bp, Homo sapien
ggggcagcagcagcaggggcagcat

SEQ ID NO: 1660833 - DNA, 25 bp, Homo sapien
cagggccccagcccagtcccaggtc

SEQ ID NO: 1660834 - DNA, 25 bp, Homo sapien
gccagggccccagcccagtcccagg

SEQ ID NO: 1660835 - DNA, 25 bp, Homo sapien
tctccatccgccagggccccagccc

SEQ ID NO: 1660836 - DNA, 25 bp, Homo sapien
ccgccagggccccagcccagtccca

SEQ ID NO: 1660837 - DNA, 25 bp, Homo sapien
atgctccaaatgtccaaacgtgggg

SEQ ID NO: 1660838 - DNA, 25 bp, Homo sapien
gaaatgctccaaatgtccaaacgtg

SEQ ID NO: 1660839 - DNA, 25 bp, Homo sapien
ctccaaatgtccaaacgtggggtgg

SEQ ID NO: 1660840 - DNA, 25 bp, Homo sapien
ggaaatgctccaaatgtccaaacgt

SEQ ID NO: 1660841 - DNA, 25 bp, Homo sapien
ccccgacaggaagccggagggtgag

SEQ ID NO: 1660842 - DNA, 25 bp, Homo sapien
caggaagccggagggtgagtgagag

SEQ ID NO: 1660843 - DNA, 25 bp, Homo sapien
gccccgacaggaagccggagggtga

SEQ ID NO: 1660844 - DNA, 25 bp, Homo sapien
cgacaggaagccggagggtgagtga

SEQ ID NO: 1660845 - DNA, 25 bp, Homo sapien
ggtagcagtcatgggtctcaggtcc

SEQ ID NO: 1660846 - DNA, 25 bp, Homo sapien
caaggagtgaggtagcagtcatggg

SEQ ID NO: 1660847 - DNA, 25 bp, Homo sapien
cctgaagcccagaagtaaaggtgac

SEQ ID NO: 1660848 - DNA, 25 bp, Homo sapien
aggtgaccactgagacaaggagtga

SEQ ID NO: 1660849 - DNA, 25 bp, Homo sapien
tcagacgaaaaaattactagtggta

SEQ ID NO: 1660850 - DNA, 25 bp, Homo sapien
gaatttttgcaacacgatgtctagc

SEQ ID NO: 1660851 - DNA, 25 bp, Homo sapien
gactcaacaacgtggtactaggaca

SEQ ID NO: 1660852 - DNA, 25 bp, Homo sapien
ggacacaaaatccagtgaaagactt

SEQ ID NO: 1660853 - DNA, 25 bp, Homo sapien
caccattatgggttaatcactttcc

SEQ ID NO: 1660854 - DNA, 25 bp, Homo sapien
tcttttcgtggtatcctcacatggc

SEQ ID NO: 1660855 - DNA, 25 bp, Homo sapien
caccttgaggtttaagatttcaaca

SEQ ID NO: 1660856 - DNA, 25 bp, Homo sapien
tggagagaattatttgcttcccaga

SEQ ID NO: 1660857 - DNA, 25 bp, Homo sapien
tgcaaatactagtcaaaagaaaact

SEQ ID NO: 1660858 - DNA, 25 bp, Homo sapien
agttgattcagccaactgcggtggc

SEQ ID NO: 1660859 - DNA, 25 bp, Homo sapien
caaatataatgaggtgaggctagga

SEQ ID NO: 1660860 - DNA, 25 bp, Homo sapien
gaggctaggacttaaaggatgtgaa

SEQ ID NO: 1660861 - DNA, 25 bp, Homo sapien
gtacattcccttcacagggctggag

SEQ ID NO: 1660862 - DNA, 25 bp, Homo sapien
gaaggtaacttttggcagccaggca

SEQ ID NO: 1660863 - DNA, 25 bp, Homo sapien
tctgtgcctatatggatagggaagc

SEQ ID NO: 1660864 - DNA, 25 bp, Homo sapien
cagaaattcaagtgttaagaaggta

SEQ ID NO: 1660865 - DNA, 25 bp, Homo sapien
tgtccacacctcagttctgtcttga

SEQ ID NO: 1660866 - DNA, 25 bp, Homo sapien
tgtcccacagggctaagtgtccaca

SEQ ID NO: 1660867 - DNA, 25 bp, Homo sapien
acagtgatgtcctgcatgtgtccca

SEQ ID NO: 1660868 - DNA, 25 bp, Homo sapien
gtgatgtcctgcatgtgtcccacag

SEQ ID NO: 1660869 - DNA, 25 bp, Homo sapien
gagcccccctgatcagggtgaggac

SEQ ID NO: 1660870 - DNA, 25 bp, Homo sapien
gctgtttctcagttacacatatgca

SEQ ID NO: 1660871 - DNA, 25 bp, Homo sapien
tctcagttacacatatgcaggaaga

SEQ ID NO: 1660872 - DNA, 25 bp, Homo sapien
cccctgatcagggtgaggacgaggg

SEQ ID NO: 1660873 - DNA, 25 bp, Homo sapien
tccagggtcccagacattgaggtct

SEQ ID NO: 1660874 - DNA, 25 bp, Homo sapien
tcctggatgggcaccgacatgccat

SEQ ID NO: 1660875 - DNA, 25 bp, Homo sapien
tagctcctatgttaggcagctccag

SEQ ID NO: 1660876 - DNA, 25 bp, Homo sapien
cacagaaaggatgaaggacaggtgc

SEQ ID NO: 1660877 - DNA, 25 bp, Homo sapien
tgctgatggcgaggttctgtggagc

SEQ ID NO: 1660878 - DNA, 25 bp, Homo sapien
atgctgatggcgaggttctgtggag

SEQ ID NO: 1660879 - DNA, 25 bp, Homo sapien
gcttcacaggatcctggaaggctgc

SEQ ID NO: 1660880 - DNA, 25 bp, Homo sapien
ttccccgtccaggagaatgtgagag

SEQ ID NO: 1660881 - DNA, 25 bp, Homo sapien
tggatgtcgggtttctctatcaggg

SEQ ID NO: 1660882 - DNA, 25 bp, Homo sapien
tggtcacctgagctccttggcgttt

SEQ ID NO: 1660883 - DNA, 25 bp, Homo sapien
cacaacctcagcgtagtatgggatc

SEQ ID NO: 1660884 - DNA, 25 bp, Homo sapien
tctctccacgcggaagaaatagctt

SEQ ID NO: 1660885 - DNA, 25 bp, Homo sapien
tgcacttgcagctcgtacactggct

SEQ ID NO: 1660886 - DNA, 25 bp, Homo sapien
aagaaatagcttcccgtgtcctcca

SEQ ID NO: 1660887 - DNA, 25 bp, Homo sapien
ggcagcatgtctccatccgccaggg

SEQ ID NO: 1660888 - DNA, 25 bp, Homo sapien
aggggcagcatgtctccatccgcca

SEQ ID NO: 1660889 - DNA, 25 bp, Homo sapien
gcaggggcagcatgtctccatccgc

SEQ ID NO: 1660890 - DNA, 25 bp, Homo sapien
agcatgtctccatccgccagggccc

SEQ ID NO: 1660891 - DNA, 25 bp, Homo sapien
attatcctctccacaaggtagaatg

SEQ ID NO: 1660892 - DNA, 25 bp, Homo sapien
tccaattcatgggacctgtactgct

SEQ ID NO: 1660893 - DNA, 25 bp, Homo sapien
catctgctatataaggatccaattc

SEQ ID NO: 1660894 - DNA, 25 bp, Homo sapien
gaaataacttctcgtagcccttcaa

SEQ ID NO: 1660895 - DNA, 25 bp, Homo sapien
gggagccaatccacgtccaattgtg

SEQ ID NO: 1660896 - DNA, 25 bp, Homo sapien
tgctggacaaggtccacttgttcag

SEQ ID NO: 1660897 - DNA, 25 bp, Homo sapien
gatggagagctccagttgagatgct

SEQ ID NO: 1660898 - DNA, 25 bp, Homo sapien
acttgttcagaggaaacttgcggag

SEQ ID NO: 1660899 - DNA, 25 bp, Homo sapien
cagggatggccccttatgggtgtca

SEQ ID NO: 1660900 - DNA, 25 bp, Homo sapien
gtagtgggaagtgggaccaagcagg

SEQ ID NO: 1660901 - DNA, 25 bp, Homo sapien
tgtcagagcttgaacagggtgagtg

SEQ ID NO: 1660902 - DNA, 25 bp, Homo sapien
agtggagtcctttgccagagggcac

SEQ ID NO: 1660903 - DNA, 25 bp, Homo sapien
tcagttatcagtacgtcctgctggg

SEQ ID NO: 1660904 - DNA, 25 bp, Homo sapien
cataggcatgcaattccaaggtctc

SEQ ID NO: 1660905 - DNA, 25 bp, Homo sapien
gaatgatgaaagtgtggcccaacca

SEQ ID NO: 1660906 - DNA, 25 bp, Homo sapien
tgaacatggaagagctgctttgtca

SEQ ID NO: 1660907 - DNA, 25 bp, Homo sapien
gattctctgctactttgatgttcct

SEQ ID NO: 1660908 - DNA, 25 bp, Homo sapien
gaaggattctctgctactttgatgt

SEQ ID NO: 1660909 - DNA, 25 bp, Homo sapien
atggaaggattctctgctactttga

SEQ ID NO: 1660910 - DNA, 25 bp, Homo sapien
tctctgctactttgatgttcctcat

SEQ ID NO: 1660911 - DNA, 25 bp, Homo sapien
tagtggaggtcatgccacaaccacg

SEQ ID NO: 1660912 - DNA, 25 bp, Homo sapien
gtaaattcccaaagacagacccaga

SEQ ID NO: 1660913 - DNA, 25 bp, Homo sapien
ccctgtttcagggagtgaaggcaat

SEQ ID NO: 1660914 - DNA, 25 bp, Homo sapien
gagcttgggcaactcgctattcaga

SEQ ID NO: 1660915 - DNA, 25 bp, Homo sapien
cttgcggggccttcgccgcacacaa

SEQ ID NO: 1660916 - DNA, 25 bp, Homo sapien
gccgcacacaagctcgtgtctgtgg

SEQ ID NO: 1660917 - DNA, 25 bp, Homo sapien
gtgggtccgtgtcgggggctcacca

SEQ ID NO: 1660918 - DNA, 25 bp, Homo sapien
gtgtctgtgggtccgtgtcgggggc

SEQ ID NO: 1660919 - DNA, 25 bp, Homo sapien
tcacaggtgaggttcttgggagcct

SEQ ID NO: 1660920 - DNA, 25 bp, Homo sapien
gttgtatagttgaggaggacaccca

SEQ ID NO: 1660921 - DNA, 25 bp, Homo sapien
tgttgccagtctctaggtccctgag

SEQ ID NO: 1660922 - DNA, 25 bp, Homo sapien
tgagaccctttaacctgtgaggaca

SEQ ID NO: 1660923 - DNA, 25 bp, Homo sapien
cagctagatacctaggtgcagagtt

SEQ ID NO: 1660924 - DNA, 25 bp, Homo sapien
gagtctctttcctcagggcgctggg

SEQ ID NO: 1660925 - DNA, 25 bp, Homo sapien
cagaaaagtcagagagtgttgagtc

SEQ ID NO: 1660926 - DNA, 25 bp, Homo sapien
tcccagggacgtttaggaggcagct

SEQ ID NO: 1660927 - DNA, 25 bp, Homo sapien
gtctccagttcaagttggatcctgg

SEQ ID NO: 1660928 - DNA, 25 bp, Homo sapien
tactgagcacttctaagactgaggg

SEQ ID NO: 1660929 - DNA, 25 bp, Homo sapien
ccaaatataacacatcccagggatg

SEQ ID NO: 1660930 - DNA, 25 bp, Homo sapien
tatgttggcaactggttcattttct

SEQ ID NO: 1660931 - DNA, 25 bp, Homo sapien
tcctttgaggttgccttccctgatg

SEQ ID NO: 1660932 - DNA, 25 bp, Homo sapien
tgacagtacgtcctgtgagctaggg

SEQ ID NO: 1660933 - DNA, 25 bp, Homo sapien
catgacagtacgtcctgtgagctag

SEQ ID NO: 1660934 - DNA, 25 bp, Homo sapien
tagccctagccaggctagatcagaa

SEQ ID NO: 1660935 - DNA, 25 bp, Homo sapien
ggcgccgcgggatgccgagctgatc

SEQ ID NO: 1660936 - DNA, 25 bp, Homo sapien
ggaagtgctgcgctgggcgccgcgg

SEQ ID NO: 1660937 - DNA, 25 bp, Homo sapien
gagacagagttgcaggcctcgttcc

SEQ ID NO: 1660938 - DNA, 25 bp, Homo sapien
gggctcgtgcctggctgacgtgcgc

SEQ ID NO: 1660939 - DNA, 25 bp, Homo sapien
cccctgaagacccttgaggcggcat

SEQ ID NO: 1660940 - DNA, 25 bp, Homo sapien
taaataagaacgaggagaaagcagg

SEQ ID NO: 1660941 - DNA, 25 bp, Homo sapien
tagtccagactgaagaatcttgggc

SEQ ID NO: 1660942 - DNA, 25 bp, Homo sapien
tcctgatcacacagtagaaatggag

SEQ ID NO: 1660943 - DNA, 25 bp, Homo sapien
tcacggaagtacgacttggaccagc

SEQ ID NO: 1660944 - DNA, 25 bp, Homo sapien
tcatggtgactagcgccaggaactt

SEQ ID NO: 1660945 - DNA, 25 bp, Homo sapien
gcgttgtacagccactcacggaagt

SEQ ID NO: 1660946 - DNA, 25 bp, Homo sapien
tcgtaggtcatccacgcatggtgcc

SEQ ID NO: 1660947 - DNA, 25 bp, Homo sapien
aggaatgagggcatcatcgcgtgct

SEQ ID NO: 1660948 - DNA, 25 bp, Homo sapien
atgaccactgtggacggccactggg

SEQ ID NO: 1660949 - DNA, 25 bp, Homo sapien
gggcgaggaatgagggcatcatcgc

SEQ ID NO: 1660950 - DNA, 25 bp, Homo sapien
aatgagggcatcatcgcgtgctccc

SEQ ID NO: 1660951 - DNA, 25 bp, Homo sapien
actgctgcaagaggttattcctata

SEQ ID NO: 1660952 - DNA, 25 bp, Homo sapien
gccggtcatccccaaaagtacagtg

SEQ ID NO: 1660953 - DNA, 25 bp, Homo sapien
ttggtagcataacccatgctgagca

SEQ ID NO: 1660954 - DNA, 25 bp, Homo sapien
ctggttgtaccaggcctcaagaaac

SEQ ID NO: 1660955 - DNA, 25 bp, Homo sapien
tgaaggctacccagtatcgcaggct

SEQ ID NO: 1660956 - DNA, 25 bp, Homo sapien
tgacaagcccgctccacattgaagg

SEQ ID NO: 1660957 - DNA, 25 bp, Homo sapien
ccagagggttaaggatccgcacgtc

SEQ ID NO: 1660958 - DNA, 25 bp, Homo sapien
cacagtggaagtagctctgacaagc

SEQ ID NO: 1660959 - DNA, 25 bp, Homo sapien
tgcacgtagtccaccgaatctccga

SEQ ID NO: 1660960 - DNA, 25 bp, Homo sapien
cgaatctccgagcgccttgaaggct

SEQ ID NO: 1660961 - DNA, 25 bp, Homo sapien
tctccgagcgccttgaaggctgtgt

SEQ ID NO: 1660962 - DNA, 25 bp, Homo sapien
gacctcgcgcttgccgccccagcgc

SEQ ID NO: 1660963 - DNA, 25 bp, Homo sapien
gccgcccaggatcctccgcctccac

SEQ ID NO: 1660964 - DNA, 25 bp, Homo sapien
ccactgccagccgcccaggatcctc

SEQ ID NO: 1660965 - DNA, 25 bp, Homo sapien
agccgcccaggatcctccgcctcca

SEQ ID NO: 1660966 - DNA, 25 bp, Homo sapien
actgccagccgcccaggatcctccg

SEQ ID NO: 1660967 - DNA, 25 bp, Homo sapien
ggctggtggtagttgccgtcccaca

SEQ ID NO: 1660968 - DNA, 25 bp, Homo sapien
agggctggtggtagttgccgtccca

SEQ ID NO: 1660969 - DNA, 25 bp, Homo sapien
cagggctggtggtagttgccgtccc

SEQ ID NO: 1660970 - DNA, 25 bp, Homo sapien
gctggtggtagttgccgtcccacac

SEQ ID NO: 1660971 - DNA, 25 bp, Homo sapien
gacctcgcggaacatgtcgaccatg

SEQ ID NO: 1660972 - DNA, 25 bp, Homo sapien
ccatgtagaggtcctcggcgcggtt

SEQ ID NO: 1660973 - DNA, 25 bp, Homo sapien
gtcctcgtcagcgaagacctcgcgg

SEQ ID NO: 1660974 - DNA, 25 bp, Homo sapien
tggtaggcggagatggtcagcgcca

SEQ ID NO: 1660975 - DNA, 25 bp, Homo sapien
ctgcgcgcggtggctgcatccagcg

SEQ ID NO: 1660976 - DNA, 25 bp, Homo sapien
tgcgcgcggtggctgcatccagcgg

SEQ ID NO: 1660977 - DNA, 25 bp, Homo sapien
cgcggtggctgcatccagcggcccc

SEQ ID NO: 1660978 - DNA, 25 bp, Homo sapien
cgcgcggtggctgcatccagcggcc

SEQ ID NO: 1660979 - DNA, 25 bp, Homo sapien
accaggtgcgctgaaaggaaggccc

SEQ ID NO: 1660980 - DNA, 25 bp, Homo sapien
caggaggccgtagcgatcggaggcc

SEQ ID NO: 1660981 - DNA, 25 bp, Homo sapien
aggccccgtagaggccgaaggccag

SEQ ID NO: 1660982 - DNA, 25 bp, Homo sapien
gcgaagaggctctgcgccaccaggt

SEQ ID NO: 1660983 - DNA, 25 bp, Homo sapien
ctgcaggagtgggcttgggcgcgtc

SEQ ID NO: 1660984 - DNA, 25 bp, Homo sapien
ccaggatgagcagggcgaaggcgat

SEQ ID NO: 1660985 - DNA, 25 bp, Homo sapien
aaggcgatggtcagcaccctccggg

SEQ ID NO: 1660986 - DNA, 25 bp, Homo sapien
gatgagcagggcgaaggcgatggtc

SEQ ID NO: 1660987 - DNA, 25 bp, Homo sapien
gcgagaggggaaaggaaggggcatg

SEQ ID NO: 1660988 - DNA, 25 bp, Homo sapien
gagaggggaaaggaaggggcatgag

SEQ ID NO: 1660989 - DNA, 25 bp, Homo sapien
gagcgagaggggaaaggaaggggca

SEQ ID NO: 1660990 - DNA, 25 bp, Homo sapien
ctgggagcgagaggggaaaggaagg

SEQ ID NO: 1660991 - DNA, 25 bp, Homo sapien
tctgactttccagaggcatagcctg

SEQ ID NO: 1660992 - DNA, 25 bp, Homo sapien
caccatacaggtggccaaactgagg

SEQ ID NO: 1660993 - DNA, 25 bp, Homo sapien
cagaaggagtggcttgcacaagatc

SEQ ID NO: 1660994 - DNA, 25 bp, Homo sapien
cagcagcccatggtagaggactctt

SEQ ID NO: 1660995 - DNA, 25 bp, Homo sapien
cgcagtgggtctggccgggctctct

SEQ ID NO: 1660996 - DNA, 25 bp, Homo sapien
ctggccgggctctctcttctctccg

SEQ ID NO: 1660997 - DNA, 25 bp, Homo sapien
agtgggtctggccgggctctctctt

SEQ ID NO: 1660998 - DNA, 25 bp, Homo sapien
tctggccgggctctctcttctctcc

SEQ ID NO: 1660999 - DNA, 25 bp, Homo sapien
tgggtctgcgtgtgtgcaccagggt

SEQ ID NO: 1661000 - DNA, 25 bp, Homo sapien
acagagagttgtcggtcagctgacc

SEQ ID NO: 1661001 - DNA, 25 bp, Homo sapien
ctcagggatgaacacagagagttgt

SEQ ID NO: 1661002 - DNA, 25 bp, Homo sapien
tgggatttgtatccccagggactca

SEQ ID NO: 1661003 - DNA, 25 bp, Homo sapien
ctcgggtggagcagctgtataaaac

SEQ ID NO: 1661004 - DNA, 25 bp, Homo sapien
tgctcgggtggagcagctgtataaa

SEQ ID NO: 1661005 - DNA, 25 bp, Homo sapien
gagcagctgtataaaaccagatgtt

SEQ ID NO: 1661006 - DNA, 25 bp, Homo sapien
ggtggagcagctgtataaaaccaga

SEQ ID NO: 1661007 - DNA, 25 bp, Homo sapien
tcctctctgtaagttcccattgtcc

SEQ ID NO: 1661008 - DNA, 25 bp, Homo sapien
agttcccattgtccaccttgcctcc

SEQ ID NO: 1661009 - DNA, 25 bp, Homo sapien
cccattgtccaccttgcctcctgca

SEQ ID NO: 1661010 - DNA, 25 bp, Homo sapien
ttcccattgtccaccttgcctcctg

SEQ ID NO: 1661011 - DNA, 25 bp, Homo sapien
gggacatagcagaaagctccaaaca

SEQ ID NO: 1661012 - DNA, 25 bp, Homo sapien
cgggacatagcagaaagctccaaac

SEQ ID NO: 1661013 - DNA, 25 bp, Homo sapien
ccgggacatagcagaaagctccaaa

SEQ ID NO: 1661014 - DNA, 25 bp, Homo sapien
ggacatagcagaaagctccaaacag

SEQ ID NO: 1661015 - DNA, 25 bp, Homo sapien
ggcggcccctttctgtgacctgggc

SEQ ID NO: 1661016 - DNA, 25 bp, Homo sapien
cagagctgcagaagtccggcggccc

SEQ ID NO: 1661017 - DNA, 25 bp, Homo sapien
gaagtccggcggcccctttctgtga

SEQ ID NO: 1661018 - DNA, 25 bp, Homo sapien
acagagagtgtgtcatcaaaggggc

SEQ ID NO: 1661019 - DNA, 25 bp, Homo sapien
gacaggttctgctgtaagttaattc

SEQ ID NO: 1661020 - DNA, 25 bp, Homo sapien
ctgctgtaagttaattctggatgct

SEQ ID NO: 1661021 - DNA, 25 bp, Homo sapien
ggttctgctgtaagttaattctgga

SEQ ID NO: 1661022 - DNA, 25 bp, Homo sapien
taattctggatgctccaagcttctc

SEQ ID NO: 1661023 - DNA, 25 bp, Homo sapien
accgctcctgccctatataaagtat

SEQ ID NO: 1661024 - DNA, 25 bp, Homo sapien
tggaagtggacactactcatcatga

SEQ ID NO: 1661025 - DNA, 25 bp, Homo sapien
tcatcatgatgccagaatgatgggt

SEQ ID NO: 1661026 - DNA, 25 bp, Homo sapien
caggcaaactaggatgcagatgaca

SEQ ID NO: 1661027 - DNA, 25 bp, Homo sapien
tgtggctcagcctaactcaaggtga

SEQ ID NO: 1661028 - DNA, 25 bp, Homo sapien
gagtgggtaatcctaaaataagcag

SEQ ID NO: 1661029 - DNA, 25 bp, Homo sapien
gacgaagctggagctgggagctcga

SEQ ID NO: 1661030 - DNA, 25 bp, Homo sapien
gggagctcgaaagtgtcccccagct

SEQ ID NO: 1661031 - DNA, 25 bp, Homo sapien
cagaaggtaaagtagaattggtagc

SEQ ID NO: 1661032 - DNA, 25 bp, Homo sapien
ctgcagaaggtaaagtagaattggt

SEQ ID NO: 1661033 - DNA, 25 bp, Homo sapien
aaagtagaattggtagctgtgtcac

SEQ ID NO: 1661034 - DNA, 25 bp, Homo sapien
cacctctgcagaaggtaaagtagaa

SEQ ID NO: 1661035 - DNA, 25 bp, Homo sapien
gttgagtcctcggtcagggccctct

SEQ ID NO: 1661036 - DNA, 25 bp, Homo sapien
cctctccagactggcgggaagggcg

SEQ ID NO: 1661037 - DNA, 25 bp, Homo sapien
tttgggttgagtcctcggtcagggc

SEQ ID NO: 1661038 - DNA, 25 bp, Homo sapien
agggcgtggatcagcctctcccgga

SEQ ID NO: 1661039 - DNA, 25 bp, Homo sapien
cttgtcacatccactgcaataccaa

SEQ ID NO: 1661040 - DNA, 25 bp, Homo sapien
taactgacagcaacgatggacatgg

SEQ ID NO: 1661041 - DNA, 25 bp, Homo sapien
aatgatgaaccggatgatgcctctc

SEQ ID NO: 1661042 - DNA, 25 bp, Homo sapien
gggacgactggacttaatcaagcct

SEQ ID NO: 1661043 - DNA, 25 bp, Homo sapien
gaaaaaaggctgctgcgacaaagga

SEQ ID NO: 1661044 - DNA, 25 bp, Homo sapien
ctctctttagggtcgttggtccagg

SEQ ID NO: 1661045 - DNA, 25 bp, Homo sapien
aaagttaaaagtgcaggctactgtc

SEQ ID NO: 1661046 - DNA, 25 bp, Homo sapien
acatttatcctctctttagggtcgt

SEQ ID NO: 1661047 - DNA, 25 bp, Homo sapien
aagtgcaggctactgtccccgtttt

SEQ ID NO: 1661048 - DNA, 25 bp, Homo sapien
aagacgaatttgcacaggaaccagc

SEQ ID NO: 1661049 - DNA, 25 bp, Homo sapien
ccagagcaatgagggcgatcaggaa

SEQ ID NO: 1661050 - DNA, 25 bp, Homo sapien
tgtagtcacacgaatgataactggc

SEQ ID NO: 1661051 - DNA, 25 bp, Homo sapien
gaaccagccgaaaggccaatgtcct

SEQ ID NO: 1661052 - DNA, 25 bp, Homo sapien
gaagagatagccagcagatacagca

SEQ ID NO: 1661053 - DNA, 25 bp, Homo sapien
gataagtgatgatatccaggaagag

SEQ ID NO: 1661054 - DNA, 25 bp, Homo sapien
ggtgtccctccagagatgttcgtgg

SEQ ID NO: 1661055 - DNA, 25 bp, Homo sapien
actgcaaataccagataagtgatga

SEQ ID NO: 1661056 - DNA, 25 bp, Homo sapien
ggaaaaatcctgtgatttgcaatga

SEQ ID NO: 1661057 - DNA, 25 bp, Homo sapien
catcgatgaaggactttatgcttga

SEQ ID NO: 1661058 - DNA, 25 bp, Homo sapien
gcttgataatcattgtaccacatcc

SEQ ID NO: 1661059 - DNA, 25 bp, Homo sapien
gccttggtggctgccatcgatgaag

SEQ ID NO: 1661060 - DNA, 25 bp, Homo sapien
tctgggtagttctaggtctgggtct

SEQ ID NO: 1661061 - DNA, 25 bp, Homo sapien
gctctgggtagttctaggtctgggt

SEQ ID NO: 1661062 - DNA, 25 bp, Homo sapien
ctctgggtagttctaggtctgggtc

SEQ ID NO: 1661063 - DNA, 25 bp, Homo sapien
tccttcggtgcggaacatactttcc

SEQ ID NO: 1661064 - DNA, 25 bp, Homo sapien
ctcagaaatggtccttcggtgcgga

SEQ ID NO: 1661065 - DNA, 25 bp, Homo sapien
gtgcggaacatactttccggatgca

SEQ ID NO: 1661066 - DNA, 25 bp, Homo sapien
gaaatggtccttcggtgcggaacat

SEQ ID NO: 1661067 - DNA, 25 bp, Homo sapien
attgcactggaacagtgcctgctgc

SEQ ID NO: 1661068 - DNA, 25 bp, Homo sapien
ctgctgcatcctccccatttttctt

SEQ ID NO: 1661069 - DNA, 25 bp, Homo sapien
gcctgctgcatcctccccatttttc

SEQ ID NO: 1661070 - DNA, 25 bp, Homo sapien
ttaattgcactggaacagtgcctgc

SEQ ID NO: 1661071 - DNA, 25 bp, Homo sapien
cattcaccaccaataaacatttcta

SEQ ID NO: 1661072 - DNA, 25 bp, Homo sapien
tccaattgcacccttgtgtactggg

SEQ ID NO: 1661073 - DNA, 25 bp, Homo sapien
catttctagacttgctcgaatctgg

SEQ ID NO: 1661074 - DNA, 25 bp, Homo sapien
gaggattcttggtgtttatgggaca

SEQ ID NO: 1661075 - DNA, 25 bp, Homo sapien
tgctggagtagtctcataacgtggc

SEQ ID NO: 1661076 - DNA, 25 bp, Homo sapien
tccaggtgacataatcccatagata

SEQ ID NO: 1661077 - DNA, 25 bp, Homo sapien
tcaggaatttggaagtttctggctt

SEQ ID NO: 1661078 - DNA, 25 bp, Homo sapien
taacgtggctgatggtatctcccag

SEQ ID NO: 1661079 - DNA, 25 bp, Homo sapien
ggaagaaatgtatccacccagcgac

SEQ ID NO: 1661080 - DNA, 25 bp, Homo sapien
tgttggctcagaggtcttggttcca

SEQ ID NO: 1661081 - DNA, 25 bp, Homo sapien
cacaacaatgtttctactgaactgg

SEQ ID NO: 1661082 - DNA, 25 bp, Homo sapien
catgaccttatgctgtgttggctca

SEQ ID NO: 1661083 - DNA, 25 bp, Homo sapien
tgggtagtcggcatctccagggtaa

SEQ ID NO: 1661084 - DNA, 25 bp, Homo sapien
ctgggtagtcggcatctccagggta

SEQ ID NO: 1661085 - DNA, 25 bp, Homo sapien
ccgtggacggctctttgaggctcca

SEQ ID NO: 1661086 - DNA, 25 bp, Homo sapien
gagggcagatcctattgtaatgagg

SEQ ID NO: 1661087 - DNA, 25 bp, Homo sapien
attccagtgaccgtggacggctctt

SEQ ID NO: 1661088 - DNA, 25 bp, Homo sapien
gttaacttggagattctccagaaat

SEQ ID NO: 1661089 - DNA, 25 bp, Homo sapien
tgatgatagggccatgggccaccag

SEQ ID NO: 1661090 - DNA, 25 bp, Homo sapien
ctccatcttgctgatgatagggcca

SEQ ID NO: 1661091 - DNA, 25 bp, Homo sapien
tcttgctgatgatagggccatgggc

SEQ ID NO: 1661092 - DNA, 25 bp, Homo sapien
ttgctgatgatagggccatgggcca

SEQ ID NO: 1661093 - DNA, 25 bp, Homo sapien
agcccctcagaggtcgatcgggtca

SEQ ID NO: 1661094 - DNA, 25 bp, Homo sapien
ctgcattccttggtgctatcacttc

SEQ ID NO: 1661095 - DNA, 25 bp, Homo sapien
cttggtgctatcacttctcgttctc

SEQ ID NO: 1661096 - DNA, 25 bp, Homo sapien
gtgacacggcaactgcacctgagtc

SEQ ID NO: 1661097 - DNA, 25 bp, Homo sapien
tggttaattgcagtagaacagtgtc

SEQ ID NO: 1661098 - DNA, 25 bp, Homo sapien
tgcagtagaacagtgtccgctacat

SEQ ID NO: 1661099 - DNA, 25 bp, Homo sapien
gtagaacagtgtccgctacatctcc

SEQ ID NO: 1661100 - DNA, 25 bp, Homo sapien
cagtgtccgctacatctcccttttt

SEQ ID NO: 1661101 - DNA, 25 bp, Homo sapien
tgtgcctttacaacataggtactaa

SEQ ID NO: 1661102 - DNA, 25 bp, Homo sapien
tatatgaggatctatcgagcacccg

SEQ ID NO: 1661103 - DNA, 25 bp, Homo sapien
gagcacccgattctgtggctgttcg

SEQ ID NO: 1661104 - DNA, 25 bp, Homo sapien
tatgtaacctgccatgatccctggt

SEQ ID NO: 1661105 - DNA, 25 bp, Homo sapien
ttattagagaaaagcgatagtgaga

SEQ ID NO: 1661106 - DNA, 25 bp, Homo sapien
tttattagagaaaagcgatagtgag

SEQ ID NO: 1661107 - DNA, 25 bp, Homo sapien
tattagagaaaagcgatagtgagaa

SEQ ID NO: 1661108 - DNA, 25 bp, Homo sapien
tgtcagtaaatccaccgggcctttc

SEQ ID NO: 1661109 - DNA, 25 bp, Homo sapien
ccacatggcttgtcaatctcctgta

SEQ ID NO: 1661110 - DNA, 25 bp, Homo sapien
ggcttgtcaatctcctgtaaacaca

SEQ ID NO: 1661111 - DNA, 25 bp, Homo sapien
ccatgtcagtaaatccaccgggcct

SEQ ID NO: 1661112 - DNA, 25 bp, Homo sapien
cagtctcttggaatagccgctggag

SEQ ID NO: 1661113 - DNA, 25 bp, Homo sapien
gagtagtggttatctatcacgccca

SEQ ID NO: 1661114 - DNA, 25 bp, Homo sapien
aaagtttttgtaaggcacccatcag

SEQ ID NO: 1661115 - DNA, 25 bp, Homo sapien
gaattccaagcttatgtgtccggca

SEQ ID NO: 1661116 - DNA, 25 bp, Homo sapien
gtggctcaagtatttcctcagggaa

SEQ ID NO: 1661117 - DNA, 25 bp, Homo sapien
ggtcacattgagtcattccaggatg

SEQ ID NO: 1661118 - DNA, 25 bp, Homo sapien
ggtaagaagtagataatgaggccac

SEQ ID NO: 1661119 - DNA, 25 bp, Homo sapien
tgtctggacctcagcctatatcctg

SEQ ID NO: 1661120 - DNA, 25 bp, Homo sapien
gaaactaaattattcgttgtgcaca

SEQ ID NO: 1661121 - DNA, 25 bp, Homo sapien
actaaattattcgttgtgcacatgt

SEQ ID NO: 1661122 - DNA, 25 bp, Homo sapien
caattaatcggcttacagtgagata

SEQ ID NO: 1661123 - DNA, 25 bp, Homo sapien
cccagtgacactaggttgttgtaat

SEQ ID NO: 1661124 - DNA, 25 bp, Homo sapien
tgaacagggtctaatagattccact

SEQ ID NO: 1661125 - DNA, 25 bp, Homo sapien
tatcagagtacccacaaattgtggc

SEQ ID NO: 1661126 - DNA, 25 bp, Homo sapien
aaataccaaattatccgtggtggtg

SEQ ID NO: 1661127 - DNA, 25 bp, Homo sapien
gaggttatggtcagcgaagattgca

SEQ ID NO: 1661128 - DNA, 25 bp, Homo sapien
gaggtggaggttatggtcagcgaag

SEQ ID NO: 1661129 - DNA, 25 bp, Homo sapien
tatggtcagcgaagattgcaccatt

SEQ ID NO: 1661130 - DNA, 25 bp, Homo sapien
acagatacttcttagaacccactat

SEQ ID NO: 1661131 - DNA, 25 bp, Homo sapien
gggtcttcagtggtcagctcagcaa

SEQ ID NO: 1661132 - DNA, 25 bp, Homo sapien
caaacttcccaatagggacaacaag

SEQ ID NO: 1661133 - DNA, 25 bp, Homo sapien
tcttcagtggtcagctcagcaatta

SEQ ID NO: 1661134 - DNA, 25 bp, Homo sapien
tgtttgctccctaacggtactgcag

SEQ ID NO: 1661135 - DNA, 25 bp, Homo sapien
tgtctcctctgatacaagggtggtg

SEQ ID NO: 1661136 - DNA, 25 bp, Homo sapien
tgatcgtttttgaccagtgccctag

SEQ ID NO: 1661137 - DNA, 25 bp, Homo sapien
ggtactgcaggcttaggctactaca

SEQ ID NO: 1661138 - DNA, 25 bp, Homo sapien
tattctagacatccacatacccttg

SEQ ID NO: 1661139 - DNA, 25 bp, Homo sapien
gacactgttgtgaacaggaccatca

SEQ ID NO: 1661140 - DNA, 25 bp, Homo sapien
catttaagacgagaaacttggtgct

SEQ ID NO: 1661141 - DNA, 25 bp, Homo sapien
gctgagggagggataatatactgca

SEQ ID NO: 1661142 - DNA, 25 bp, Homo sapien
gaagggcctctacatgtttaagaac

SEQ ID NO: 1661143 - DNA, 25 bp, Homo sapien
ccaatacagaaagcaggagaaaccg

SEQ ID NO: 1661144 - DNA, 25 bp, Homo sapien
caagtgactgtagctttcaggctgc

SEQ ID NO: 1661145 - DNA, 25 bp, Homo sapien
gaactgctcaagtggcaagtgactg

SEQ ID NO: 1661146 - DNA, 25 bp, Homo sapien
tattatgcaaccaccatctctatct

SEQ ID NO: 1661147 - DNA, 25 bp, Homo sapien
catgcaacatgtcatcagtacttca

SEQ ID NO: 1661148 - DNA, 25 bp, Homo sapien
gaaaaccccatacatactacgcaga

SEQ ID NO: 1661149 - DNA, 25 bp, Homo sapien
tacgcagatagattgcattctccct

SEQ ID NO: 1661150 - DNA, 25 bp, Homo sapien
tataaagtacatgtcacatagtaca

SEQ ID NO: 1661151 - DNA, 25 bp, Homo sapien
tgtttcttcgtgtaattccaagtaa

SEQ ID NO: 1661152 - DNA, 25 bp, Homo sapien
cctaagatcctttgtcactattcga

SEQ ID NO: 1661153 - DNA, 25 bp, Homo sapien
tatatacaggcaagggtaattactc

SEQ ID NO: 1661154 - DNA, 25 bp, Homo sapien
tattcaaagagttttgactttcaga

SEQ ID NO: 1661155 - DNA, 25 bp, Homo sapien
agatattcaaagagttttgactttc

SEQ ID NO: 1661156 - DNA, 25 bp, Homo sapien
agagttttgactttcagattttaat

SEQ ID NO: 1661157 - DNA, 25 bp, Homo sapien
attcaaagagttttgactttcagat

SEQ ID NO: 1661158 - DNA, 25 bp, Homo sapien
ctgcaatgaggtgtgattcttctta

SEQ ID NO: 1661159 - DNA, 25 bp, Homo sapien
gcattccctccatctgtagggtcct

SEQ ID NO: 1661160 - DNA, 25 bp, Homo sapien
ttcttcttagctttcctgcattccc

SEQ ID NO: 1661161 - DNA, 25 bp, Homo sapien
catctgtagggtccttctcctgaat

SEQ ID NO: 1661162 - DNA, 25 bp, Homo sapien
tacggtaaacgagggatatcttcaa

SEQ ID NO: 1661163 - DNA, 25 bp, Homo sapien
tccactggtgctgcctactaaatgg

SEQ ID NO: 1661164 - DNA, 25 bp, Homo sapien
gcctggccaatgattcttcttgtga

SEQ ID NO: 1661165 - DNA, 25 bp, Homo sapien
tctctcccacaagagttccaaaagg

SEQ ID NO: 1661166 - DNA, 25 bp, Homo sapien
gatataccttactggagaaggccct

SEQ ID NO: 1661167 - DNA, 25 bp, Homo sapien
tgggatttccttactgcatgatgag

SEQ ID NO: 1661168 - DNA, 25 bp, Homo sapien
tgagatccaacttccagatgaaagc

SEQ ID NO: 1661169 - DNA, 25 bp, Homo sapien
ttttcgatgcttactgagacctgtc

SEQ ID NO: 1661170 - DNA, 25 bp, Homo sapien
gctttatgatagactttgcacctga

SEQ ID NO: 1661171 - DNA, 25 bp, Homo sapien
gaactttctgaggataactgagctc

SEQ ID NO: 1661172 - DNA, 25 bp, Homo sapien
gatgcaaaatgaggttcgacttcca

SEQ ID NO: 1661173 - DNA, 25 bp, Homo sapien
tagctgtgttctaaccatgaaggct

SEQ ID NO: 1661174 - DNA, 25 bp, Homo sapien
catttgctgcatgtacagactttcc

SEQ ID NO: 1661175 - DNA, 25 bp, Homo sapien
tgagatgtgtcctaaccacaaagcc

SEQ ID NO: 1661176 - DNA, 25 bp, Homo sapien
gttttctgatgatacacaagccctg

SEQ ID NO: 1661177 - DNA, 25 bp, Homo sapien
tttgcaaatgaacggtctctctcct

SEQ ID NO: 1661178 - DNA, 25 bp, Homo sapien
cctgggatttgtttcctgcatgagt

SEQ ID NO: 1661179 - DNA, 25 bp, Homo sapien
gaagggctctcctaaaatcatgaga

SEQ ID NO: 1661180 - DNA, 25 bp, Homo sapien
gcatgagttctctgaggcatggtca

SEQ ID NO: 1661181 - DNA, 25 bp, Homo sapien
taaaatcatgagattcctgggattt

SEQ ID NO: 1661182 - DNA, 25 bp, Homo sapien
tagtgtacgcacaacagagtaagtg

SEQ ID NO: 1661183 - DNA, 25 bp, Homo sapien
tggttataattagcaagctctgact

SEQ ID NO: 1661184 - DNA, 25 bp, Homo sapien
tctgattatgcaaaagaatgctctt

SEQ ID NO: 1661185 - DNA, 25 bp, Homo sapien
caagaagaggtccagaaaaaggctt

SEQ ID NO: 1661186 - DNA, 25 bp, Homo sapien
cttaaggcactctgtatgaagctac

SEQ ID NO: 1661187 - DNA, 25 bp, Homo sapien
tctgaacatcggacaaaagatctct

SEQ ID NO: 1661188 - DNA, 25 bp, Homo sapien
taagccttgcaaagtcattggaaag

SEQ ID NO: 1661189 - DNA, 25 bp, Homo sapien
ctcaatttccctcccttaatgaagg

SEQ ID NO: 1661190 - DNA, 25 bp, Homo sapien
cacacgaggcacaatttagcgctaa

SEQ ID NO: 1661191 - DNA, 25 bp, Homo sapien
tctatgtttctttggcacacgaggc

SEQ ID NO: 1661192 - DNA, 25 bp, Homo sapien
gaaaagcagccctgtcaacagcttg

SEQ ID NO: 1661193 - DNA, 25 bp, Homo sapien
aacagcttgatgtagccccgtgaga

SEQ ID NO: 1661194 - DNA, 25 bp, Homo sapien
ctcatgtataaggaggtatgactcc

SEQ ID NO: 1661195 - DNA, 25 bp, Homo sapien
tacatttctgcccactaggcgctca

SEQ ID NO: 1661196 - DNA, 25 bp, Homo sapien
taggcgctcactcttgtttaacaat

SEQ ID NO: 1661197 - DNA, 25 bp, Homo sapien
gatgtctattgagccggcacttccg

SEQ ID NO: 1661198 - DNA, 25 bp, Homo sapien
cctggagaaggctctcccgcacaca

SEQ ID NO: 1661199 - DNA, 25 bp, Homo sapien
tcctggagaaggctctcccgcacac

SEQ ID NO: 1661200 - DNA, 25 bp, Homo sapien
ttcctggagaaggctctcccgcaca

SEQ ID NO: 1661201 - DNA, 25 bp, Homo sapien
gagaaggctctcccgcacacactgc

SEQ ID NO: 1661202 - DNA, 25 bp, Homo sapien
attgagctgtgatttagggctgctg

SEQ ID NO: 1661203 - DNA, 25 bp, Homo sapien
taactccagtaagagttttgtcacg

SEQ ID NO: 1661204 - DNA, 25 bp, Homo sapien
gaggcatgatctcccatatccacca

SEQ ID NO: 1661205 - DNA, 25 bp, Homo sapien
tgtcacgcttgatatggaggcatga

SEQ ID NO: 1661206 - DNA, 25 bp, Homo sapien
caaacttttacaatgcgagccaaac

SEQ ID NO: 1661207 - DNA, 25 bp, Homo sapien
cttttacaatgcgagccaaacttat

SEQ ID NO: 1661208 - DNA, 25 bp, Homo sapien
tacaatgcgagccaaacttattgtg

SEQ ID NO: 1661209 - DNA, 25 bp, Homo sapien
tttcaaacttttacaatgcgagcca

SEQ ID NO: 1661210 - DNA, 25 bp, Homo sapien
tactaagttagtgcagcatagacac

SEQ ID NO: 1661211 - DNA, 25 bp, Homo sapien
cagtatgtggcttaaaacacctatg

SEQ ID NO: 1661212 - DNA, 25 bp, Homo sapien
gaagcctcataccaaccagtaaaac

SEQ ID NO: 1661213 - DNA, 25 bp, Homo sapien
cagaattcagatggcttgatcagga

SEQ ID NO: 1661214 - DNA, 25 bp, Homo sapien
gctccaacttgaagagcgaatctgg

SEQ ID NO: 1661215 - DNA, 25 bp, Homo sapien
ttctgctatccctgggggttctcct

SEQ ID NO: 1661216 - DNA, 25 bp, Homo sapien
cttgaagagcgaatctggcttggtg

SEQ ID NO: 1661217 - DNA, 25 bp, Homo sapien
gacagatttgactgtgggctgctcc

SEQ ID NO: 1661218 - DNA, 25 bp, Homo sapien
taacagtctgcgtgacacacccata

SEQ ID NO: 1661219 - DNA, 25 bp, Homo sapien
tgcgcgaatgcatttaacccactga

SEQ ID NO: 1661220 - DNA, 25 bp, Homo sapien
aaactgggaccctgtgtactcttgg

SEQ ID NO: 1661221 - DNA, 25 bp, Homo sapien
caaccacttcgtgccagggaggaaa

SEQ ID NO: 1661222 - DNA, 25 bp, Homo sapien
tccttgtacaagaccttctgagact

SEQ ID NO: 1661223 - DNA, 25 bp, Homo sapien
gactggtccaaaaactgccactcct

SEQ ID NO: 1661224 - DNA, 25 bp, Homo sapien
gccacatcttcgaatgacaatgacc

SEQ ID NO: 1661225 - DNA, 25 bp, Homo sapien
caagaccttctgagactggtccaaa

SEQ ID NO: 1661226 - DNA, 25 bp, Homo sapien
ccaatgcaatctgaggtggataaca

SEQ ID NO: 1661227 - DNA, 25 bp, Homo sapien
tatttcacataccaaaggaccatgg

SEQ ID NO: 1661228 - DNA, 25 bp, Homo sapien
tgacaacgtatgcacaccatggcta

SEQ ID NO: 1661229 - DNA, 25 bp, Homo sapien
taaaagcacgaaggcagtactagca

SEQ ID NO: 1661230 - DNA, 25 bp, Homo sapien
gctgaggcagggggctcatgaggtc

SEQ ID NO: 1661231 - DNA, 25 bp, Homo sapien
actttgggaggctgaggcagggggc

SEQ ID NO: 1661232 - DNA, 25 bp, Homo sapien
aaaaaagtaataatatggctgggca

SEQ ID NO: 1661233 - DNA, 25 bp, Homo sapien
ggtggctcacgcctgtaatcccagc

SEQ ID NO: 1661234 - DNA, 25 bp, Homo sapien
ctgaagaactgccttgctctctcct

SEQ ID NO: 1661235 - DNA, 25 bp, Homo sapien
ccctgaagaactgccttgctctctc

SEQ ID NO: 1661236 - DNA, 25 bp, Homo sapien
tcccctgaagaactgccttgctctc

SEQ ID NO: 1661237 - DNA, 25 bp, Homo sapien
ctcccctgaagaactgccttgctct

SEQ ID NO: 1661238 - DNA, 25 bp, Homo sapien
tttcatgtgtttcctgttatttcag

SEQ ID NO: 1661239 - DNA, 25 bp, Homo sapien
catttttcatgtgtttcctgttatt

SEQ ID NO: 1661240 - DNA, 25 bp, Homo sapien
tttttcatgtgtttcctgttatttc

SEQ ID NO: 1661241 - DNA, 25 bp, Homo sapien
tacaatcgtggcatttttcatgtgt

SEQ ID NO: 1661242 - DNA, 25 bp, Homo sapien
aaaatgtcttgttcctataggccag

SEQ ID NO: 1661243 - DNA, 25 bp, Homo sapien
ttcgttcaactcttaggggctagca

SEQ ID NO: 1661244 - DNA, 25 bp, Homo sapien
ggtggtcaggtatcatctcaggtca

SEQ ID NO: 1661245 - DNA, 25 bp, Homo sapien
ggggctagcaactctagtatgttct

SEQ ID NO: 1661246 - DNA, 25 bp, Homo sapien
tacacccagagagctgatctccaag

SEQ ID NO: 1661247 - DNA, 25 bp, Homo sapien
gatctccagggttgaaaaatccagg

SEQ ID NO: 1661248 - DNA, 25 bp, Homo sapien
tactcacgcggagaacatggcaatg

SEQ ID NO: 1661249 - DNA, 25 bp, Homo sapien
cactggtaaacgcactggtcaagat

SEQ ID NO: 1661250 - DNA, 25 bp, Homo sapien
taataattacctttggagaggagag

SEQ ID NO: 1661251 - DNA, 25 bp, Homo sapien
tgacaaccaagcacatctatgatgt

SEQ ID NO: 1661252 - DNA, 25 bp, Homo sapien
tattccgaagctaatccaagatatc

SEQ ID NO: 1661253 - DNA, 25 bp, Homo sapien
gtccctctccagcaatggattatgg

SEQ ID NO: 1661254 - DNA, 25 bp, Homo sapien
atttattcagaccatactacgtacc

SEQ ID NO: 1661255 - DNA, 25 bp, Homo sapien
tattcagaccatactacgtacctag

SEQ ID NO: 1661256 - DNA, 25 bp, Homo sapien
tcagaccatactacgtacctagtac

SEQ ID NO: 1661257 - DNA, 25 bp, Homo sapien
catactacgtacctagtactacact

SEQ ID NO: 1661258 - DNA, 25 bp, Homo sapien
gtccatacacttgccacctggctaa

SEQ ID NO: 1661259 - DNA, 25 bp, Homo sapien
ccacctggctaaaattatttgcaga

SEQ ID NO: 1661260 - DNA, 25 bp, Homo sapien
gcagaggcaggtacttcttactcca

SEQ ID NO: 1661261 - DNA, 25 bp, Homo sapien
tcttactccacagtccatacacttg

SEQ ID NO: 1661262 - DNA, 25 bp, Homo sapien
taagcaatgaacacgaactgcccag

SEQ ID NO: 1661263 - DNA, 25 bp, Homo sapien
gttccaatgcggagaccatgggctc

SEQ ID NO: 1661264 - DNA, 25 bp, Homo sapien
gcgctactgtgcaacgaagacctcc

SEQ ID NO: 1661265 - DNA, 25 bp, Homo sapien
tgcgaaacgaactccgagcgaggac

SEQ ID NO: 1661266 - DNA, 25 bp, Homo sapien
ggacccgaagtctctaaacactcgc

SEQ ID NO: 1661267 - DNA, 25 bp, Homo sapien
cactgctggaggcgagtcagggacc

SEQ ID NO: 1661268 - DNA, 25 bp, Homo sapien
tctccactgctggaggcgagtcagg

SEQ ID NO: 1661269 - DNA, 25 bp, Homo sapien
cagaccgatgacctgtctccactgc

SEQ ID NO: 1661270 - DNA, 25 bp, Homo sapien
ccagccgtccctttatgatgcaata

SEQ ID NO: 1661271 - DNA, 25 bp, Homo sapien
agacacggaatacggcaccagccgt

SEQ ID NO: 1661272 - DNA, 25 bp, Homo sapien
agacgcgacactcgcaagtttcggg

SEQ ID NO: 1661273 - DNA, 25 bp, Homo sapien
tactgcgtctttccggagacacgga

SEQ ID NO: 1661274 - DNA, 25 bp, Homo sapien
caaacactgttgtgcgtgctgggaa

SEQ ID NO: 1661275 - DNA, 25 bp, Homo sapien
gaaccaacacgaaaacagggctctc

SEQ ID NO: 1661276 - DNA, 25 bp, Homo sapien
gaaattcaggcacaaagactctcat

SEQ ID NO: 1661277 - DNA, 25 bp, Homo sapien
gagaacacagttgatcagcagttga

SEQ ID NO: 1661278 - DNA, 25 bp, Homo sapien
tatacatattagtgcagggagccaa

SEQ ID NO: 1661279 - DNA, 25 bp, Homo sapien
tagtgtccagtgagagtccatttcc

SEQ ID NO: 1661280 - DNA, 25 bp, Homo sapien
cacactcagctactctaagggaaag

SEQ ID NO: 1661281 - DNA, 25 bp, Homo sapien
cccatgggacatgacaaactcagca

SEQ ID NO: 1661282 - DNA, 25 bp, Homo sapien
actgccctgccaccattgccacagt

SEQ ID NO: 1661283 - DNA, 25 bp, Homo sapien
caaactcacactgccctgccaccat

SEQ ID NO: 1661284 - DNA, 25 bp, Homo sapien
tgtgggcaaactcacactgccctgc

SEQ ID NO: 1661285 - DNA, 25 bp, Homo sapien
tcacactgccctgccaccattgcca

SEQ ID NO: 1661286 - DNA, 25 bp, Homo sapien
ggcttttcccctgcacatgttcact

SEQ ID NO: 1661287 - DNA, 25 bp, Homo sapien
gcttttcccctgcacatgttcacta

SEQ ID NO: 1661288 - DNA, 25 bp, Homo sapien
cacatgttcactaggacttaagctg

SEQ ID NO: 1661289 - DNA, 25 bp, Homo sapien
cactaggacttaagctgtgacttgc

SEQ ID NO: 1661290 - DNA, 25 bp, Homo sapien
gctacaaggcaagacttctggctga

SEQ ID NO: 1661291 - DNA, 25 bp, Homo sapien
tgttcagtaagctcagatttcctgg

SEQ ID NO: 1661292 - DNA, 25 bp, Homo sapien
gacttctgtgaacagggttgcccac

SEQ ID NO: 1661293 - DNA, 25 bp, Homo sapien
caacgagtagtgattttctggagaa

SEQ ID NO: 1661294 - DNA, 25 bp, Homo sapien
aatttccgtaggcatttgttcatga

SEQ ID NO: 1661295 - DNA, 25 bp, Homo sapien
tccgtgttcatagcgttgtcccgtc

SEQ ID NO: 1661296 - DNA, 25 bp, Homo sapien
ttaaggaattgtgacttggtgctga

SEQ ID NO: 1661297 - DNA, 25 bp, Homo sapien
gcagatgatcatcagctttctcaat

SEQ ID NO: 1661298 - DNA, 25 bp, Homo sapien
cttgttccaacttggtgagggcatc

SEQ ID NO: 1661299 - DNA, 25 bp, Homo sapien
acttggtgagggcatcaggtttgcc

SEQ ID NO: 1661300 - DNA, 25 bp, Homo sapien
ggcatcaggtttgccggcttgatac

SEQ ID NO: 1661301 - DNA, 25 bp, Homo sapien
ggatttcatcttctagtgtccatag

SEQ ID NO: 1661302 - DNA, 25 bp, Homo sapien
cactgacacaaggttgctgtagttc

SEQ ID NO: 1661303 - DNA, 25 bp, Homo sapien
ggctcaggaactgccactcctccca

SEQ ID NO: 1661304 - DNA, 25 bp, Homo sapien
gagcagggctcaggaactgccactc

SEQ ID NO: 1661305 - DNA, 25 bp, Homo sapien
ccggtacaggtccttctgagcaggg

SEQ ID NO: 1661306 - DNA, 25 bp, Homo sapien
taataacacagtcctgcttaatatg

SEQ ID NO: 1661307 - DNA, 25 bp, Homo sapien
ctgtaataacacagtcctgcttaat

SEQ ID NO: 1661308 - DNA, 25 bp, Homo sapien
taacacagtcctgcttaatatgttt

SEQ ID NO: 1661309 - DNA, 25 bp, Homo sapien
acacagtcctgcttaatatgtttct

SEQ ID NO: 1661310 - DNA, 25 bp, Homo sapien
cacaagctgacacttaatgtagcca

SEQ ID NO: 1661311 - DNA, 25 bp, Homo sapien
gctgacacttaatgtagccaacagg

SEQ ID NO: 1661312 - DNA, 25 bp, Homo sapien
caagctgacacttaatgtagccaac

SEQ ID NO: 1661313 - DNA, 25 bp, Homo sapien
tgacacttaatgtagccaacagggt

SEQ ID NO: 1661314 - DNA, 25 bp, Homo sapien
aatacccaagaactgggatgcttcg

SEQ ID NO: 1661315 - DNA, 25 bp, Homo sapien
attttggctaagaaatctgagtctc

SEQ ID NO: 1661316 - DNA, 25 bp, Homo sapien
tctggatcctccctaaattttggct

SEQ ID NO: 1661317 - DNA, 25 bp, Homo sapien
tctccatttaagagtgttcccagaa

SEQ ID NO: 1661318 - DNA, 25 bp, Homo sapien
attctgccgcgctaggacgatggga

SEQ ID NO: 1661319 - DNA, 25 bp, Homo sapien
tcttcgaggaggtaacatgtccgcg

SEQ ID NO: 1661320 - DNA, 25 bp, Homo sapien
gacgatgggacatgggcttctcttc

SEQ ID NO: 1661321 - DNA, 25 bp, Homo sapien
gacgagggcgcgagtcaattctgcc

SEQ ID NO: 1661322 - DNA, 25 bp, Homo sapien
gaaactgtcaagaggcagcccactg

SEQ ID NO: 1661323 - DNA, 25 bp, Homo sapien
actaggaaactgtcaagaggcagcc

SEQ ID NO: 1661324 - DNA, 25 bp, Homo sapien
gaggcagcccactgagcatggccat

SEQ ID NO: 1661325 - DNA, 25 bp, Homo sapien
actgtcaagaggcagcccactgagc

SEQ ID NO: 1661326 - DNA, 25 bp, Homo sapien
agagaaagtcttcccgcactcaagg

SEQ ID NO: 1661327 - DNA, 25 bp, Homo sapien
tctctgatgagtagtgagactaaac

SEQ ID NO: 1661328 - DNA, 25 bp, Homo sapien
ccgcactcaaggcattcgtaaggct

SEQ ID NO: 1661329 - DNA, 25 bp, Homo sapien
gagactaaacttacgagagaaagtc

SEQ ID NO: 1661330 - DNA, 25 bp, Homo sapien
aagtcttctgacactgactgcattc

SEQ ID NO: 1661331 - DNA, 25 bp, Homo sapien
gaaagtcttctgacactgactgcat

SEQ ID NO: 1661332 - DNA, 25 bp, Homo sapien
aaagtcttctgacactgactgcatt

SEQ ID NO: 1661333 - DNA, 25 bp, Homo sapien
tgaaagtcttctgacactgactgca

SEQ ID NO: 1661334 - DNA, 25 bp, Homo sapien
tgagactaaacttgatggagaacat

SEQ ID NO: 1661335 - DNA, 25 bp, Homo sapien
tctttggtgtaggatgagactaaac

SEQ ID NO: 1661336 - DNA, 25 bp, Homo sapien
taggatgagactaaacttgatggag

SEQ ID NO: 1661337 - DNA, 25 bp, Homo sapien
tggtgtaggatgagactaaacttga

SEQ ID NO: 1661338 - DNA, 25 bp, Homo sapien
gattcaggtgtttcccaagtacaaa

SEQ ID NO: 1661339 - DNA, 25 bp, Homo sapien
gaaggctgtctgacatctactgcat

SEQ ID NO: 1661340 - DNA, 25 bp, Homo sapien
catgcgatttttccccggtatggat

SEQ ID NO: 1661341 - DNA, 25 bp, Homo sapien
tctcggtgccattctgtgtgatcat

SEQ ID NO: 1661342 - DNA, 25 bp, Homo sapien
gaataatgtgtctgctttggtaact

SEQ ID NO: 1661343 - DNA, 25 bp, Homo sapien
tgtgtctgctttggtaacttgatac

SEQ ID NO: 1661344 - DNA, 25 bp, Homo sapien
ggacaaacctgactctggatttctt

SEQ ID NO: 1661345 - DNA, 25 bp, Homo sapien
ctccaaccagaataatgtgtctgct

SEQ ID NO: 1661346 - DNA, 25 bp, Homo sapien
tgataccaggttgctataattttcc

SEQ ID NO: 1661347 - DNA, 25 bp, Homo sapien
cagtgataccaggttgctataattt

SEQ ID NO: 1661348 - DNA, 25 bp, Homo sapien
ccagtgataccaggttgctataatt

SEQ ID NO: 1661349 - DNA, 25 bp, Homo sapien
taccaggttgctataattttccaac

SEQ ID NO: 1661350 - DNA, 25 bp, Homo sapien
tcccaggtgaaacccacagctacat

SEQ ID NO: 1661351 - DNA, 25 bp, Homo sapien
cacgtcttggtacagattcttctga

SEQ ID NO: 1661352 - DNA, 25 bp, Homo sapien
ctgaacagggtccagtagctgccat

SEQ ID NO: 1661353 - DNA, 25 bp, Homo sapien
cattcttcccaggtgaaacccacag

SEQ ID NO: 1661354 - DNA, 25 bp, Homo sapien
gagccctgtaatagaacattcctac

SEQ ID NO: 1661355 - DNA, 25 bp, Homo sapien
actcaattctaaaggattaccattg

SEQ ID NO: 1661356 - DNA, 25 bp, Homo sapien
acagtgagccctgtaatagaacatt

SEQ ID NO: 1661357 - DNA, 25 bp, Homo sapien
cattcctactcaattctaaaggatt

SEQ ID NO: 1661358 - DNA, 25 bp, Homo sapien
catggggcacgaacccatgaccctg

SEQ ID NO: 1661359 - DNA, 25 bp, Homo sapien
atggggcacgaacccatgaccctga

SEQ ID NO: 1661360 - DNA, 25 bp, Homo sapien
gaccgtgtccctcaaatgtaaatga

SEQ ID NO: 1661361 - DNA, 25 bp, Homo sapien
ggtgaacaatatcctcgtacctcga

SEQ ID NO: 1661362 - DNA, 25 bp, Homo sapien
cacatgtagctagatgcgttttcgc

SEQ ID NO: 1661363 - DNA, 25 bp, Homo sapien
gcgttttcgcggtatatgactcagg

SEQ ID NO: 1661364 - DNA, 25 bp, Homo sapien
tttttaggattctcaaatctcatca

SEQ ID NO: 1661365 - DNA, 25 bp, Homo sapien
tcctttttaggattctcaaatctca

SEQ ID NO: 1661366 - DNA, 25 bp, Homo sapien
cttcctttttaggattctcaaatct

SEQ ID NO: 1661367 - DNA, 25 bp, Homo sapien
ttaggattctcaaatctcatcattt

SEQ ID NO: 1661368 - DNA, 25 bp, Homo sapien
gcaagagagatcagactattactat

SEQ ID NO: 1661369 - DNA, 25 bp, Homo sapien
tgcagcatataagacatttggtttc

SEQ ID NO: 1661370 - DNA, 25 bp, Homo sapien
ctgaggcacaatcatccatgtccat

SEQ ID NO: 1661371 - DNA, 25 bp, Homo sapien
gactctgagtatattcctgaggcac

SEQ ID NO: 1661372 - DNA, 25 bp, Homo sapien
tccacactggcactggtctaaggaa

SEQ ID NO: 1661373 - DNA, 25 bp, Homo sapien
cagccttatacatgttctctcagtg

SEQ ID NO: 1661374 - DNA, 25 bp, Homo sapien
tctcagtgtatgcttttcggccaca

SEQ ID NO: 1661375 - DNA, 25 bp, Homo sapien
taattgacacagtcgagcaattgct

SEQ ID NO: 1661376 - DNA, 25 bp, Homo sapien
gatcacggaaggcacaaccacattc

SEQ ID NO: 1661377 - DNA, 25 bp, Homo sapien
gcaaatcctctgttatctcctgagg

SEQ ID NO: 1661378 - DNA, 25 bp, Homo sapien
gtcctgtgcaaatcctctgttatct

SEQ ID NO: 1661379 - DNA, 25 bp, Homo sapien
taagacataattgatcacggaaggc

SEQ ID NO: 1661380 - DNA, 25 bp, Homo sapien
tacgttcctgtttgcgaggaggccg

SEQ ID NO: 1661381 - DNA, 25 bp, Homo sapien
tgtagtcgccccgttagcagagttt

SEQ ID NO: 1661382 - DNA, 25 bp, Homo sapien
cacagaaggcacttgtgtagtcgcc

SEQ ID NO: 1661383 - DNA, 25 bp, Homo sapien
gttagcatgaagaaaggagtcccca

SEQ ID NO: 1661384 - DNA, 25 bp, Homo sapien
aactcaacagagttctttatttcat

SEQ ID NO: 1661385 - DNA, 25 bp, Homo sapien
gttctttatttcatagcctttgctc

SEQ ID NO: 1661386 - DNA, 25 bp, Homo sapien
atttcatagcctttgctctggttaa

SEQ ID NO: 1661387 - DNA, 25 bp, Homo sapien
ctttatttcatagcctttgctctgg

SEQ ID NO: 1661388 - DNA, 25 bp, Homo sapien
tgccctaacagaaactgacttttgc

SEQ ID NO: 1661389 - DNA, 25 bp, Homo sapien
ttctgttcaccaggctttcactctg

SEQ ID NO: 1661390 - DNA, 25 bp, Homo sapien
ggctttcactctgcaagcgctccag

SEQ ID NO: 1661391 - DNA, 25 bp, Homo sapien
ttgccctaacagaaactgacttttg

SEQ ID NO: 1661392 - DNA, 25 bp, Homo sapien
tacaagcaattcactgtgaccagca

SEQ ID NO: 1661393 - DNA, 25 bp, Homo sapien
cttactgaatgatcaccgtgtgcca

SEQ ID NO: 1661394 - DNA, 25 bp, Homo sapien
gcacattggcaaaaagtaatagtat

SEQ ID NO: 1661395 - DNA, 25 bp, Homo sapien
aggctggaggcccatttcgtccaaa

SEQ ID NO: 1661396 - DNA, 25 bp, Homo sapien
aaggcaattttgaagagtgaagggc

SEQ ID NO: 1661397 - DNA, 25 bp, Homo sapien
gaaggcaattttgaagagtgaaggg

SEQ ID NO: 1661398 - DNA, 25 bp, Homo sapien
tgaaggcaattttgaagagtgaagg

SEQ ID NO: 1661399 - DNA, 25 bp, Homo sapien
aggcaattttgaagagtgaagggca

SEQ ID NO: 1661400 - DNA, 25 bp, Homo sapien
gaaggtggaatttcgtaacaagaga

SEQ ID NO: 1661401 - DNA, 25 bp, Homo sapien
ggaatttcgtaacaagagaggtgga

SEQ ID NO: 1661402 - DNA, 25 bp, Homo sapien
ctctgactgtctagaatgtgacttc

SEQ ID NO: 1661403 - DNA, 25 bp, Homo sapien
tctctgaggagataaagagtttttg

SEQ ID NO: 1661404 - DNA, 25 bp, Homo sapien
ctgaacaggctccactgtggattcc

SEQ ID NO: 1661405 - DNA, 25 bp, Homo sapien
tccatcttcaattgtccacagttgt

SEQ ID NO: 1661406 - DNA, 25 bp, Homo sapien
tgtggattccatcttcaattgtcca

SEQ ID NO: 1661407 - DNA, 25 bp, Homo sapien
gaacaggctccactgtggattccat

SEQ ID NO: 1661408 - DNA, 25 bp, Homo sapien
gccacatcctccagtgttatggatt

SEQ ID NO: 1661409 - DNA, 25 bp, Homo sapien
ccacatcctccagtgttatggattc

SEQ ID NO: 1661410 - DNA, 25 bp, Homo sapien
agccacatcctccagtgttatggat

SEQ ID NO: 1661411 - DNA, 25 bp, Homo sapien
tactgggacacaatcacagatgacc

SEQ ID NO: 1661412 - DNA, 25 bp, Homo sapien
cctatgtggctgatcttaggtccac

SEQ ID NO: 1661413 - DNA, 25 bp, Homo sapien
cattagcaagatattccagaagccc

SEQ ID NO: 1661414 - DNA, 25 bp, Homo sapien
tccattagcttgaacacaaaggcca

SEQ ID NO: 1661415 - DNA, 25 bp, Homo sapien
cagttcagctatctgttcattgaga

SEQ ID NO: 1661416 - DNA, 25 bp, Homo sapien
tattcaaacaccagttcagctatct

SEQ ID NO: 1661417 - DNA, 25 bp, Homo sapien
tcaaacaccagttcagctatctgtt

SEQ ID NO: 1661418 - DNA, 25 bp, Homo sapien
cctgtctccaaatctatattcaaac

SEQ ID NO: 1661419 - DNA, 25 bp, Homo sapien
ccgtaacagtatataaggagtcctt

SEQ ID NO: 1661420 - DNA, 25 bp, Homo sapien
catctgaatttatgagaaggctgct

SEQ ID NO: 1661421 - DNA, 25 bp, Homo sapien
gagatattagatgcaagctgacagc

SEQ ID NO: 1661422 - DNA, 25 bp, Homo sapien
caggatcctccagccatgcatggtg

SEQ ID NO: 1661423 - DNA, 25 bp, Homo sapien
gacagcattcaactgggatggtctg

SEQ ID NO: 1661424 - DNA, 25 bp, Homo sapien
tggaagacagcattcaactgggatg

SEQ ID NO: 1661425 - DNA, 25 bp, Homo sapien
aagacagcattcaactgggatggtc

SEQ ID NO: 1661426 - DNA, 25 bp, Homo sapien
ctgggatggtctgtctttgtatctt

SEQ ID NO: 1661427 - DNA, 25 bp, Homo sapien
tgtgccccaagaaatggtgaacccc

SEQ ID NO: 1661428 - DNA, 25 bp, Homo sapien
tgccccaagaaatggtgaaccccaa

SEQ ID NO: 1661429 - DNA, 25 bp, Homo sapien
gtgccccaagaaatggtgaacccca

SEQ ID NO: 1661430 - DNA, 25 bp, Homo sapien
caggagatggtgaactcttaggcag

SEQ ID NO: 1661431 - DNA, 25 bp, Homo sapien
ttcttaatgtggtggaggtatgcct

SEQ ID NO: 1661432 - DNA, 25 bp, Homo sapien
taggaaatgagacccaccatagcac

SEQ ID NO: 1661433 - DNA, 25 bp, Homo sapien
ctttcctctgtgacgtttccgtgga

SEQ ID NO: 1661434 - DNA, 25 bp, Homo sapien
tctaactcagcttactcactgtgtc

SEQ ID NO: 1661435 - DNA, 25 bp, Homo sapien
tctcagtaggtggagaactggacac

SEQ ID NO: 1661436 - DNA, 25 bp, Homo sapien
aggagaacaggtacaaagcttgcag

SEQ ID NO: 1661437 - DNA, 25 bp, Homo sapien
gttgcagcagcaattgcgtcatcat

SEQ ID NO: 1661438 - DNA, 25 bp, Homo sapien
tcaacgttacacttccgtaaactgc

SEQ ID NO: 1661439 - DNA, 25 bp, Homo sapien
gtcctcgcacgggtttatggtccac

SEQ ID NO: 1661440 - DNA, 25 bp, Homo sapien
tccagatacacaagaagggcctcaa

SEQ ID NO: 1661441 - DNA, 25 bp, Homo sapien
cgtaaactgctcctacttctggagt

SEQ ID NO: 1661442 - DNA, 25 bp, Homo sapien
gctgccaaaggctgaacacgtatca

SEQ ID NO: 1661443 - DNA, 25 bp, Homo sapien
aattctggtgctgcaaccccatcct

SEQ ID NO: 1661444 - DNA, 25 bp, Homo sapien
gcagcatcaggctttcaaggctaca

SEQ ID NO: 1661445 - DNA, 25 bp, Homo sapien
tatcagaacctacttccgattctgg

SEQ ID NO: 1661446 - DNA, 25 bp, Homo sapien
caaggcaactaggaatatggctcaa

SEQ ID NO: 1661447 - DNA, 25 bp, Homo sapien
tctcgattacggtggtggtgacatg

SEQ ID NO: 1661448 - DNA, 25 bp, Homo sapien
ttaagggcctacatctggcaagagg

SEQ ID NO: 1661449 - DNA, 25 bp, Homo sapien
cattatttcctagcacacgatgagg

SEQ ID NO: 1661450 - DNA, 25 bp, Homo sapien
tttaacaaggatagacaagtgcgca

SEQ ID NO: 1661451 - DNA, 25 bp, Homo sapien
cgcagtcactgcatttgtacggttt

SEQ ID NO: 1661452 - DNA, 25 bp, Homo sapien
tcgctgatgttgtatgaggcatgtc

SEQ ID NO: 1661453 - DNA, 25 bp, Homo sapien
cattcagtacatgcaaaggaagtct

SEQ ID NO: 1661454 - DNA, 25 bp, Homo sapien
cctgtatgagtgcgccgatgtacat

SEQ ID NO: 1661455 - DNA, 25 bp, Homo sapien
gagcatgcttttcccagttaagcct

SEQ ID NO: 1661456 - DNA, 25 bp, Homo sapien
cgccgatgtacattgagatgactct

SEQ ID NO: 1661457 - DNA, 25 bp, Homo sapien
gagtgcgccgatgtacattgagatg

SEQ ID NO: 1661458 - DNA, 25 bp, Homo sapien
tgatgcacaataaggcggctcttca

SEQ ID NO: 1661459 - DNA, 25 bp, Homo sapien
ccattagccggatctttgctggaaa

SEQ ID NO: 1661460 - DNA, 25 bp, Homo sapien
taaggcggctcttcacagtgaagcc

SEQ ID NO: 1661461 - DNA, 25 bp, Homo sapien
cgttgatgtcccattagccggatct

SEQ ID NO: 1661462 - DNA, 25 bp, Homo sapien
tcttcaaagcgaagccctttccaca

SEQ ID NO: 1661463 - DNA, 25 bp, Homo sapien
tgagtgggctcttcaaagcgaagcc

SEQ ID NO: 1661464 - DNA, 25 bp, Homo sapien
gagttcgttgatgtaccatgagaca

SEQ ID NO: 1661465 - DNA, 25 bp, Homo sapien
tcgacattcggtgcatacatagggt

SEQ ID NO: 1661466 - DNA, 25 bp, Homo sapien
tcgatgatgtgcagtaagacgcctc

SEQ ID NO: 1661467 - DNA, 25 bp, Homo sapien
taagactgttcttcaaggtgaagcc

SEQ ID NO: 1661468 - DNA, 25 bp, Homo sapien
gtatcacaatcttgcttcagcagga

SEQ ID NO: 1661469 - DNA, 25 bp, Homo sapien
aactcagcagagttctttaggccag

SEQ ID NO: 1661470 - DNA, 25 bp, Homo sapien
cttgtaggcaagagctaaacattgg

SEQ ID NO: 1661471 - DNA, 25 bp, Homo sapien
acttgtaggcaagagctaaacattg

SEQ ID NO: 1661472 - DNA, 25 bp, Homo sapien
gacaggattgagcttctagtgaatc

SEQ ID NO: 1661473 - DNA, 25 bp, Homo sapien
gtgaatcctcggcatcaggcaatat

SEQ ID NO: 1661474 - DNA, 25 bp, Homo sapien
tacttgggtgacaggattgagcttc

SEQ ID NO: 1661475 - DNA, 25 bp, Homo sapien
caggcaatatatccatgagacaaac

SEQ ID NO: 1661476 - DNA, 25 bp, Homo sapien
gcacctcctgatgcacctcctgaat

SEQ ID NO: 1661477 - DNA, 25 bp, Homo sapien
cagaacagattcgagagtagatttc

SEQ ID NO: 1661478 - DNA, 25 bp, Homo sapien
agaacagattcgagagtagatttca

SEQ ID NO: 1661479 - DNA, 25 bp, Homo sapien
gaacagattcgagagtagatttcat

SEQ ID NO: 1661480 - DNA, 25 bp, Homo sapien
aacagattcgagagtagatttcatc

SEQ ID NO: 1661481 - DNA, 25 bp, Homo sapien
agccacatcctccagtgttagggat

SEQ ID NO: 1661482 - DNA, 25 bp, Homo sapien
ggctcaggaactgccactcctccca

SEQ ID NO: 1661483 - DNA, 25 bp, Homo sapien
ccacatcctccagtgttagggattc

SEQ ID NO: 1661484 - DNA, 25 bp, Homo sapien
gagcagggctcaggaactgccactc

SEQ ID NO: 1661485 - DNA, 25 bp, Homo sapien
tattctgtaactgtgcggtcatcca

SEQ ID NO: 1661486 - DNA, 25 bp, Homo sapien
gtcatattcttttggtgataggaaa

SEQ ID NO: 1661487 - DNA, 25 bp, Homo sapien
tgtaataacacacttctgtttaatg

SEQ ID NO: 1661488 - DNA, 25 bp, Homo sapien
gaagtcattccgctcattttcacca

SEQ ID NO: 1661489 - DNA, 25 bp, Homo sapien
gaaatgactgctaacttggacgttc

SEQ ID NO: 1661490 - DNA, 25 bp, Homo sapien
tcaaaaacttcaatctccaatcaag

SEQ ID NO: 1661491 - DNA, 25 bp, Homo sapien
tcagctctaaatttcggttcaaaaa

SEQ ID NO: 1661492 - DNA, 25 bp, Homo sapien
aaacttcaatctccaatcaaggatg

SEQ ID NO: 1661493 - DNA, 25 bp, Homo sapien
ggccgccatccacatcttgatactt

SEQ ID NO: 1661494 - DNA, 25 bp, Homo sapien
acaggtgaacgccacatgcgctgct

SEQ ID NO: 1661495 - DNA, 25 bp, Homo sapien
gtgaacgccacatgcgctgctaatt

SEQ ID NO: 1661496 - DNA, 25 bp, Homo sapien
ctggagtgagtaagactccagtggc

SEQ ID NO: 1661497 - DNA, 25 bp, Homo sapien
gcagagatgttatcttacttgtgtc

SEQ ID NO: 1661498 - DNA, 25 bp, Homo sapien
tggcagagatgttatcttacttgtg

SEQ ID NO: 1661499 - DNA, 25 bp, Homo sapien
catggcagagatgttatcttacttg

SEQ ID NO: 1661500 - DNA, 25 bp, Homo sapien
ggcagagatgttatcttacttgtgt

SEQ ID NO: 1661501 - DNA, 25 bp, Homo sapien
ctatcacggacctcttgtagttccc

SEQ ID NO: 1661502 - DNA, 25 bp, Homo sapien
cctatcacggacctcttgtagttcc

SEQ ID NO: 1661503 - DNA, 25 bp, Homo sapien
agatgcaagatggccgcgccctcgt

SEQ ID NO: 1661504 - DNA, 25 bp, Homo sapien
tcctcagtgcctgacggcgactatc

SEQ ID NO: 1661505 - DNA, 25 bp, Homo sapien
gactatccagggtcggaggcgttcc

SEQ ID NO: 1661506 - DNA, 25 bp, Homo sapien
gaggcgttcccagcgtttgcgcaga

SEQ ID NO: 1661507 - DNA, 25 bp, Homo sapien
ctggcagcggaagcagtcatgagtt

SEQ ID NO: 1661508 - DNA, 25 bp, Homo sapien
tccagagtagggtttgcaagatggc

SEQ ID NO: 1661509 - DNA, 25 bp, Homo sapien
agagtagggtttgcaagatggcatt

SEQ ID NO: 1661510 - DNA, 25 bp, Homo sapien
aaccttctggcagcggaagcagtca

SEQ ID NO: 1661511 - DNA, 25 bp, Homo sapien
cctcggcctctcaagagaccctgtc

SEQ ID NO: 1661512 - DNA, 25 bp, Homo sapien
gcctcggcctctcaagagaccctgt

SEQ ID NO: 1661513 - DNA, 25 bp, Homo sapien
gagctctatgccaggaaccaggaac

SEQ ID NO: 1661514 - DNA, 25 bp, Homo sapien
ggttgaaggatactagcaaagcctc

SEQ ID NO: 1661515 - DNA, 25 bp, Homo sapien
cagtccaagttagtgcagtgcaagt

SEQ ID NO: 1661516 - DNA, 25 bp, Homo sapien
agagtgcgtcgctgaaatcctgcca

SEQ ID NO: 1661517 - DNA, 25 bp, Homo sapien
tgaggtaaaagaccactaaaggcac

SEQ ID NO: 1661518 - DNA, 25 bp, Homo sapien
tcatcaaattgatctctagggcaaa

SEQ ID NO: 1661519 - DNA, 25 bp, Homo sapien
ttatgttccaattggctagaaacac

SEQ ID NO: 1661520 - DNA, 25 bp, Homo sapien
aaggcatttccatagtcacggcact

SEQ ID NO: 1661521 - DNA, 25 bp, Homo sapien
ctgactttgtggtgaaggcttttcc

SEQ ID NO: 1661522 - DNA, 25 bp, Homo sapien
actgactttgtggtgaaggcttttc

SEQ ID NO: 1661523 - DNA, 25 bp, Homo sapien
tgagtactgactttgtggtgaaggc

SEQ ID NO: 1661524 - DNA, 25 bp, Homo sapien
gtactgactttgtggtgaaggcttt

SEQ ID NO: 1661525 - DNA, 25 bp, Homo sapien
tcctaaggaaggtttgctcacattc

SEQ ID NO: 1661526 - DNA, 25 bp, Homo sapien
agtatgcgtacgttcatgcttacca

SEQ ID NO: 1661527 - DNA, 25 bp, Homo sapien
tcgctgatgtataacgagagtgcgt

SEQ ID NO: 1661528 - DNA, 25 bp, Homo sapien
tgtacaacaagatagcgcttcatgg

SEQ ID NO: 1661529 - DNA, 25 bp, Homo sapien
caataaactcaacagggttatttat

SEQ ID NO: 1661530 - DNA, 25 bp, Homo sapien
ctcaacagggttatttattccatgt

SEQ ID NO: 1661531 - DNA, 25 bp, Homo sapien
ctccaataaactcaacagggttatt

SEQ ID NO: 1661532 - DNA, 25 bp, Homo sapien
aactcaacagggttatttattccat

SEQ ID NO: 1661533 - DNA, 25 bp, Homo sapien
tgctgagatgtacaatatttctaag

SEQ ID NO: 1661534 - DNA, 25 bp, Homo sapien
ccattgcattgctgcacgctcttca

SEQ ID NO: 1661535 - DNA, 25 bp, Homo sapien
atgtgtcttgctgagatgtacaata

SEQ ID NO: 1661536 - DNA, 25 bp, Homo sapien
tcttgctgagatgtacaatatttct

SEQ ID NO: 1661537 - DNA, 25 bp, Homo sapien
atctgttgtccatggttcttgtcca

SEQ ID NO: 1661538 - DNA, 25 bp, Homo sapien
tttagcatctgttgtccatggttct

SEQ ID NO: 1661539 - DNA, 25 bp, Homo sapien
tagcatctgttgtccatggttcttg

SEQ ID NO: 1661540 - DNA, 25 bp, Homo sapien
ctgttgtccatggttcttgtccatg

SEQ ID NO: 1661541 - DNA, 25 bp, Homo sapien
aggtgacacagggaaactattctta

SEQ ID NO: 1661542 - DNA, 25 bp, Homo sapien
ctaggtgacacagggaaactattct

SEQ ID NO: 1661543 - DNA, 25 bp, Homo sapien
ctctaggtgacacagggaaactatt

SEQ ID NO: 1661544 - DNA, 25 bp, Homo sapien
ggtgacacagggaaactattcttac

SEQ ID NO: 1661545 - DNA, 25 bp, Homo sapien
tactaggtggttatagttctccacc

SEQ ID NO: 1661546 - DNA, 25 bp, Homo sapien
tgatactaggtggttatagttctcc

SEQ ID NO: 1661547 - DNA, 25 bp, Homo sapien
taggtggttatagttctccaccatc

SEQ ID NO: 1661548 - DNA, 25 bp, Homo sapien
ccagtgatactaggtggttatagtt

SEQ ID NO: 1661549 - DNA, 25 bp, Homo sapien
ttgaacaagctaaaagagaagtaag

SEQ ID NO: 1661550 - DNA, 25 bp, Homo sapien
acatctgtaattacagtacttccag

SEQ ID NO: 1661551 - DNA, 25 bp, Homo sapien
gatgtaaacttaagaagaacttatg

SEQ ID NO: 1661552 - DNA, 25 bp, Homo sapien
gtacttccagaggagagtttgagcc

SEQ ID NO: 1661553 - DNA, 25 bp, Homo sapien
gatatccaaggccagcaacctcctt

SEQ ID NO: 1661554 - DNA, 25 bp, Homo sapien
tgatatccaaggccagcaacctcct

SEQ ID NO: 1661555 - DNA, 25 bp, Homo sapien
tcacattatgcgctaaaggagtaac

SEQ ID NO: 1661556 - DNA, 25 bp, Homo sapien
cacgtgtgcccatgtactggttcga

SEQ ID NO: 1661557 - DNA, 25 bp, Homo sapien
aggagtaactttacccaagagagct

SEQ ID NO: 1661558 - DNA, 25 bp, Homo sapien
gggtatacatacctcgtgtcaagac

SEQ ID NO: 1661559 - DNA, 25 bp, Homo sapien
gaaaacgcttcctattcagacgcgc

SEQ ID NO: 1661560 - DNA, 25 bp, Homo sapien
tcctgcgcggactccgggaagctga

SEQ ID NO: 1661561 - DNA, 25 bp, Homo sapien
ctgagcggtaaagaccgtgaagcga

SEQ ID NO: 1661562 - DNA, 25 bp, Homo sapien
tccagacaccactggcagcgacaaa

SEQ ID NO: 1661563 - DNA, 25 bp, Homo sapien
caggctgtgctgattcacgggacaa

SEQ ID NO: 1661564 - DNA, 25 bp, Homo sapien
tgggagcaccaatccacaatttagg

SEQ ID NO: 1661565 - DNA, 25 bp, Homo sapien
tttataaatgcagagtccgaacccc

SEQ ID NO: 1661566 - DNA, 25 bp, Homo sapien
tagcacctggtccacaggactatga

SEQ ID NO: 1661567 - DNA, 25 bp, Homo sapien
taatcagtgataagaacagcccgct

SEQ ID NO: 1661568 - DNA, 25 bp, Homo sapien
taccatgggtcatattgggaggaca

SEQ ID NO: 1661569 - DNA, 25 bp, Homo sapien
taattaatcaccgaaggcactagtg

SEQ ID NO: 1661570 - DNA, 25 bp, Homo sapien
gaatggatacacaaaccctggtgca

SEQ ID NO: 1661571 - DNA, 25 bp, Homo sapien
aatccacagactctctctcagatga

SEQ ID NO: 1661572 - DNA, 25 bp, Homo sapien
ctgatgttgtacaaggcagattttc

SEQ ID NO: 1661573 - DNA, 25 bp, Homo sapien
gacattgatagcattcatcctagtg

SEQ ID NO: 1661574 - DNA, 25 bp, Homo sapien
tcttcccaaaggcatgaacatgtcc

SEQ ID NO: 1661575 - DNA, 25 bp, Homo sapien
gttcgttgatgaacaattagacggc

SEQ ID NO: 1661576 - DNA, 25 bp, Homo sapien
tgatgaacaattagacggctcttca

SEQ ID NO: 1661577 - DNA, 25 bp, Homo sapien
gttgatgaacaattagacggctctt

SEQ ID NO: 1661578 - DNA, 25 bp, Homo sapien
tgagttcgttgatgaacaattagac

SEQ ID NO: 1661579 - DNA, 25 bp, Homo sapien
tataataagcatgctcttcccagtg

SEQ ID NO: 1661580 - DNA, 25 bp, Homo sapien
gtacaatcagccgactcttcaaggg

SEQ ID NO: 1661581 - DNA, 25 bp, Homo sapien
tcgctggtgtacaacaagattgctc

SEQ ID NO: 1661582 - DNA, 25 bp, Homo sapien
tgttcgatcatacggctcttcatgg

SEQ ID NO: 1661583 - DNA, 25 bp, Homo sapien
tctctgatgcttactgacttgggat

SEQ ID NO: 1661584 - DNA, 25 bp, Homo sapien
aaaggcttttggtttgagaggcagt

SEQ ID NO: 1661585 - DNA, 25 bp, Homo sapien
gctgatgttcaatcagacggctctt

SEQ ID NO: 1661586 - DNA, 25 bp, Homo sapien
tcagcatcctttgattttccaagtg

SEQ ID NO: 1661587 - DNA, 25 bp, Homo sapien
tcccattcctaatgtaggcactgct

SEQ ID NO: 1661588 - DNA, 25 bp, Homo sapien
ttcccattcctaatgtaggcactgc

SEQ ID NO: 1661589 - DNA, 25 bp, Homo sapien
cttacgcatcttgctgcttctcaca

SEQ ID NO: 1661590 - DNA, 25 bp, Homo sapien
cttctttcactgactataatattac

SEQ ID NO: 1661591 - DNA, 25 bp, Homo sapien
tggacagattcgactgtgcctttca

SEQ ID NO: 1661592 - DNA, 25 bp, Homo sapien
ctggacagattcgactgtgcctttc

SEQ ID NO: 1661593 - DNA, 25 bp, Homo sapien
cattgatagcaggttgctgtagatc

SEQ ID NO: 1661594 - DNA, 25 bp, Homo sapien
attgatagcaggttgctgtagatct

SEQ ID NO: 1661595 - DNA, 25 bp, Homo sapien
ttgatagcaggttgctgtagatctc

SEQ ID NO: 1661596 - DNA, 25 bp, Homo sapien
taacatcctccagtgtcagcaattc

SEQ ID NO: 1661597 - DNA, 25 bp, Homo sapien
cagagccttgcttaataggaagtgt

SEQ ID NO: 1661598 - DNA, 25 bp, Homo sapien
aaacagagccttgcttaataggaag

SEQ ID NO: 1661599 - DNA, 25 bp, Homo sapien
agccttgcttaataggaagtgtttc

SEQ ID NO: 1661600 - DNA, 25 bp, Homo sapien
cttgcttaataggaagtgtttctct

SEQ ID NO: 1661601 - DNA, 25 bp, Homo sapien
tgttgtgggaaatggccagcacctg

SEQ ID NO: 1661602 - DNA, 25 bp, Homo sapien
ccagcacctgggatactctgtcttt

SEQ ID NO: 1661603 - DNA, 25 bp, Homo sapien
cttctgttgtgggaaatggccagca

SEQ ID NO: 1661604 - DNA, 25 bp, Homo sapien
agcacctgggatactctgtctttgt

SEQ ID NO: 1661605 - DNA, 25 bp, Homo sapien
tgtccacagaaatcatatctaggtc

SEQ ID NO: 1661606 - DNA, 25 bp, Homo sapien
gggtgtccacagaaatcatatctag

SEQ ID NO: 1661607 - DNA, 25 bp, Homo sapien
cagaaatcatatctaggtcctggaa

SEQ ID NO: 1661608 - DNA, 25 bp, Homo sapien
gtgaagggtgtccacagaaatcata

SEQ ID NO: 1661609 - DNA, 25 bp, Homo sapien
gcgacctcttaaaagctgaacttac

SEQ ID NO: 1661610 - DNA, 25 bp, Homo sapien
actctccttggaatcgccgcgacct

SEQ ID NO: 1661611 - DNA, 25 bp, Homo sapien
tcgccgcgacctcttaaaagctgaa

SEQ ID NO: 1661612 - DNA, 25 bp, Homo sapien
tggaatcgccgcgacctcttaaaag

SEQ ID NO: 1661613 - DNA, 25 bp, Homo sapien
cctctaaacctccagagacggtcag

SEQ ID NO: 1661614 - DNA, 25 bp, Homo sapien
ctccagagacggtcagccgcgtttc

SEQ ID NO: 1661615 - DNA, 25 bp, Homo sapien
ctaaacctccagagacggtcagccg

SEQ ID NO: 1661616 - DNA, 25 bp, Homo sapien
aacctccagagacggtcagccgcgt

SEQ ID NO: 1661617 - DNA, 25 bp, Homo sapien
ttttcctcaggaggagacgcgtccg

SEQ ID NO: 1661618 - DNA, 25 bp, Homo sapien
gcggccttccggcttttcctcagga

SEQ ID NO: 1661619 - DNA, 25 bp, Homo sapien
gcggaatgcggccttccggcttttc

SEQ ID NO: 1661620 - DNA, 25 bp, Homo sapien
ccttccggcttttcctcaggaggag

SEQ ID NO: 1661621 - DNA, 25 bp, Homo sapien
taaactgtccgatttccagacacct

SEQ ID NO: 1661622 - DNA, 25 bp, Homo sapien
acagcggccgggagacgcggtggac

SEQ ID NO: 1661623 - DNA, 25 bp, Homo sapien
agtacgtgacgtacagaaggcacag

SEQ ID NO: 1661624 - DNA, 25 bp, Homo sapien
gtggacggaggcctcttaaactgtc

SEQ ID NO: 1661625 - DNA, 25 bp, Homo sapien
tatcagaggcttgagttcacacagg

SEQ ID NO: 1661626 - DNA, 25 bp, Homo sapien
aaattaaagtcacctctgggcacct

SEQ ID NO: 1661627 - DNA, 25 bp, Homo sapien
agaagcttgcggtggaactggccca

SEQ ID NO: 1661628 - DNA, 25 bp, Homo sapien
cattattaccacaaaggcgcggcat

SEQ ID NO: 1661629 - DNA, 25 bp, Homo sapien
taaaggtactttcatcatgtcagtc

SEQ ID NO: 1661630 - DNA, 25 bp, Homo sapien
tcatcttatgcgtatggcccctttc

SEQ ID NO: 1661631 - DNA, 25 bp, Homo sapien
cagtcttgaggctgaacaacactta

SEQ ID NO: 1661632 - DNA, 25 bp, Homo sapien
tgttttttgacaagtgccctatggg

SEQ ID NO: 1661633 - DNA, 25 bp, Homo sapien
gtgtattctaagcacaaataagaaa

SEQ ID NO: 1661634 - DNA, 25 bp, Homo sapien
tgtgtattctaagcacaaataagaa

SEQ ID NO: 1661635 - DNA, 25 bp, Homo sapien
ctgtgtattctaagcacaaataaga

SEQ ID NO: 1661636 - DNA, 25 bp, Homo sapien
actgtgtattctaagcacaaataag

SEQ ID NO: 1661637 - DNA, 25 bp, Homo sapien
gggcatactcggacagaatagctca

SEQ ID NO: 1661638 - DNA, 25 bp, Homo sapien
caaggcaaatgcaagccatggatct

SEQ ID NO: 1661639 - DNA, 25 bp, Homo sapien
catggatcttatacatacaaaggca

SEQ ID NO: 1661640 - DNA, 25 bp, Homo sapien
tattcatgcatactgaggcaggttt

SEQ ID NO: 1661641 - DNA, 25 bp, Homo sapien
ccccagaaatagtaccacacatgta

SEQ ID NO: 1661642 - DNA, 25 bp, Homo sapien
aaccaaaagagcacgatactggtac

SEQ ID NO: 1661643 - DNA, 25 bp, Homo sapien
caaaagagcacgatactggtaccaa

SEQ ID NO: 1661644 - DNA, 25 bp, Homo sapien
gcccccagaaatagtaccacacatg

SEQ ID NO: 1661645 - DNA, 25 bp, Homo sapien
tgactatggttaaggagtagggcaa

SEQ ID NO: 1661646 - DNA, 25 bp, Homo sapien
ttttgttaattagcactgtggccac

SEQ ID NO: 1661647 - DNA, 25 bp, Homo sapien
gactgatgacgtcacatagtgaagt

SEQ ID NO: 1661648 - DNA, 25 bp, Homo sapien
caaaagtggcttgtgagagcaggaa

SEQ ID NO: 1661649 - DNA, 25 bp, Homo sapien
gaggttatcataataagcatggcat

SEQ ID NO: 1661650 - DNA, 25 bp, Homo sapien
aacttggaggatccataaatcaagg

SEQ ID NO: 1661651 - DNA, 25 bp, Homo sapien
cataactgttgaaagtgcttccgaa

SEQ ID NO: 1661652 - DNA, 25 bp, Homo sapien
gcttccgaaatactgcttagacaaa

SEQ ID NO: 1661653 - DNA, 25 bp, Homo sapien
aacctaaggctgtttcacgctaacg

SEQ ID NO: 1661654 - DNA, 25 bp, Homo sapien
caaaagctctgttactaatgtgcaa

SEQ ID NO: 1661655 - DNA, 25 bp, Homo sapien
tatcaatatgtagaaggtcccttac

SEQ ID NO: 1661656 - DNA, 25 bp, Homo sapien
taacgtccttaagctaaattgatgg

SEQ ID NO: 1661657 - DNA, 25 bp, Homo sapien
taactgccaccgcttggttaaggtg

SEQ ID NO: 1661658 - DNA, 25 bp, Homo sapien
cacttgcaagtttctggccagggcc

SEQ ID NO: 1661659 - DNA, 25 bp, Homo sapien
gttacacaagtcagagggtccgggc

SEQ ID NO: 1661660 - DNA, 25 bp, Homo sapien
gaacaatgggcagtcttggtagcct

SEQ ID NO: 1661661 - DNA, 25 bp, Homo sapien
gcaacagggtggtgacatgataata

SEQ ID NO: 1661662 - DNA, 25 bp, Homo sapien
gagaatcttgtctgtatgcacttaa

SEQ ID NO: 1661663 - DNA, 25 bp, Homo sapien
ccagctgcaaaacatgtgaagcaac

SEQ ID NO: 1661664 - DNA, 25 bp, Homo sapien
tgtacaaatctaggtggagcacaga

SEQ ID NO: 1661665 - DNA, 25 bp, Homo sapien
tgtaaatttacatcattctccacca

SEQ ID NO: 1661666 - DNA, 25 bp, Homo sapien
gtaaatttacatcattctccaccat

SEQ ID NO: 1661667 - DNA, 25 bp, Homo sapien
attgtaaatttacatcattctccac

SEQ ID NO: 1661668 - DNA, 25 bp, Homo sapien
ttgtaaatttacatcattctccacc

SEQ ID NO: 1661669 - DNA, 25 bp, Homo sapien
cagtacagtgaccttaatcttccag

SEQ ID NO: 1661670 - DNA, 25 bp, Homo sapien
aaacatggatatgaaggaaccacac

SEQ ID NO: 1661671 - DNA, 25 bp, Homo sapien
agtacagtgaccttaatcttccaga

SEQ ID NO: 1661672 - DNA, 25 bp, Homo sapien
tacagcaacctccacatcctggatt

SEQ ID NO: 1661673 - DNA, 25 bp, Homo sapien
attcaagtgattcttctgcctcagc

SEQ ID NO: 1661674 - DNA, 25 bp, Homo sapien
cggcttacagcaacctccacatcct

SEQ ID NO: 1661675 - DNA, 25 bp, Homo sapien
acaggtgtgagccaccatacccagc

SEQ ID NO: 1661676 - DNA, 25 bp, Homo sapien
cattcgttacatttgtaagactgtt

SEQ ID NO: 1661677 - DNA, 25 bp, Homo sapien
tgatgtttccatttggatgttcggg

SEQ ID NO: 1661678 - DNA, 25 bp, Homo sapien
gttacatttgtaagactgttctcca

SEQ ID NO: 1661679 - DNA, 25 bp, Homo sapien
gatgtttccatttggatgttcgggt

SEQ ID NO: 1661680 - DNA, 25 bp, Homo sapien
tagtgactgaactctggtgaagctt

SEQ ID NO: 1661681 - DNA, 25 bp, Homo sapien
ggtctagtgagttcagacacctcgg

SEQ ID NO: 1661682 - DNA, 25 bp, Homo sapien
gcatatctgcactttgagttataga

SEQ ID NO: 1661683 - DNA, 25 bp, Homo sapien
aaacttagctatattctggccgggc

SEQ ID NO: 1661684 - DNA, 25 bp, Homo sapien
cagtccgcagtcccgcctgggcgac

SEQ ID NO: 1661685 - DNA, 25 bp, Homo sapien
tgcagtccgcagtcccgcctgggcg

SEQ ID NO: 1661686 - DNA, 25 bp, Homo sapien
cgccactgcagtccgcagtcccgcc

SEQ ID NO: 1661687 - DNA, 25 bp, Homo sapien
cactgcagtccgcagtcccgcctgg

SEQ ID NO: 1661688 - DNA, 25 bp, Homo sapien
gctttataggaaacatggcgctgac

SEQ ID NO: 1661689 - DNA, 25 bp, Homo sapien
tcacatggccagaagaacaaacaag

SEQ ID NO: 1661690 - DNA, 25 bp, Homo sapien
tcaccctctcgggaaacctgaggaa

SEQ ID NO: 1661691 - DNA, 25 bp, Homo sapien
aacatggcgctgacgtctgttcacc

SEQ ID NO: 1661692 - DNA, 25 bp, Homo sapien
tggtactaccagtacccgccacgaa

SEQ ID NO: 1661693 - DNA, 25 bp, Homo sapien
ggtgccattcactttcgtgcgtgcg

SEQ ID NO: 1661694 - DNA, 25 bp, Homo sapien
cgtgcgtgtgcgtgatggagtctca

SEQ ID NO: 1661695 - DNA, 25 bp, Homo sapien
ccacatgagacttcaaagggaaagg

SEQ ID NO: 1661696 - DNA, 25 bp, Homo sapien
atcccagaggttaggacaacatcta

SEQ ID NO: 1661697 - DNA, 25 bp, Homo sapien
gggatcccagaggttaggacaacat

SEQ ID NO: 1661698 - DNA, 25 bp, Homo sapien
gatcccagaggttaggacaacatct

SEQ ID NO: 1661699 - DNA, 25 bp, Homo sapien
ggatcccagaggttaggacaacatc

SEQ ID NO: 1661700 - DNA, 25 bp, Homo sapien
tgaatactccaatgacgtgcgaggc

SEQ ID NO: 1661701 - DNA, 25 bp, Homo sapien
caagtttgacctttcgataaaagct

SEQ ID NO: 1661702 - DNA, 25 bp, Homo sapien
tcgttggtgtttagtgaggcaagac

SEQ ID NO: 1661703 - DNA, 25 bp, Homo sapien
cgaggcctgagcgataacggaagac

SEQ ID NO: 1661704 - DNA, 25 bp, Homo sapien
gccgcattcgttacactggaaaggt

SEQ ID NO: 1661705 - DNA, 25 bp, Homo sapien
gatgtacagttagtaatgagcccca

SEQ ID NO: 1661706 - DNA, 25 bp, Homo sapien
tctccgatgccttgccagggttgta

SEQ ID NO: 1661707 - DNA, 25 bp, Homo sapien
catatgaaccgaaaggtatccaccg

SEQ ID NO: 1661708 - DNA, 25 bp, Homo sapien
tgcaagacgtgaacgttgaaagaag

SEQ ID NO: 1661709 - DNA, 25 bp, Homo sapien
caagacgtgaacgttgaaagaagac

SEQ ID NO: 1661710 - DNA, 25 bp, Homo sapien
gcaagacgtgaacgttgaaagaaga

SEQ ID NO: 1661711 - DNA, 25 bp, Homo sapien
ctgcaagacgtgaacgttgaaagaa

SEQ ID NO: 1661712 - DNA, 25 bp, Homo sapien
tgcaattcacccagaccggactgaa

SEQ ID NO: 1661713 - DNA, 25 bp, Homo sapien
tctacgtccccttgactatgtcgaa

SEQ ID NO: 1661714 - DNA, 25 bp, Homo sapien
gccccgatgaaaggctttaccagac

SEQ ID NO: 1661715 - DNA, 25 bp, Homo sapien
gaattatctggtgccttacaagttg

SEQ ID NO: 1661716 - DNA, 25 bp, Homo sapien
ccacagtttgggttcctcgctattt

SEQ ID NO: 1661717 - DNA, 25 bp, Homo sapien
cggtgatcacgcctttcatgcattc

SEQ ID NO: 1661718 - DNA, 25 bp, Homo sapien
ctttcatgcattccccacagtttgg

SEQ ID NO: 1661719 - DNA, 25 bp, Homo sapien
gggttcctcgctattttcacttggc

SEQ ID NO: 1661720 - DNA, 25 bp, Homo sapien
gaacccagcctaatgtctaggtaga

SEQ ID NO: 1661721 - DNA, 25 bp, Homo sapien
gaagagaaaacactgcagttgaatc

SEQ ID NO: 1661722 - DNA, 25 bp, Homo sapien
tagctctctcccaagaaatactgaa

SEQ ID NO: 1661723 - DNA, 25 bp, Homo sapien
agaagatgtcccacggtttttccag

SEQ ID NO: 1661724 - DNA, 25 bp, Homo sapien
acaaaaatgcacaagggaagatcct

SEQ ID NO: 1661725 - DNA, 25 bp, Homo sapien
caaaaatgcacaagggaagatccta

SEQ ID NO: 1661726 - DNA, 25 bp, Homo sapien
cctgtagttctccaacatcacgtcc

SEQ ID NO: 1661727 - DNA, 25 bp, Homo sapien
gttcctgtagttctccaacatcacg

SEQ ID NO: 1661728 - DNA, 25 bp, Homo sapien
ggttcctgtagttctccaacatcac

SEQ ID NO: 1661729 - DNA, 25 bp, Homo sapien
ccaggaagccgaggttcctgtagtt

SEQ ID NO: 1661730 - DNA, 25 bp, Homo sapien
aacagggtccaggcatttccactcc

SEQ ID NO: 1661731 - DNA, 25 bp, Homo sapien
tccactcctcctgagagaattctac

SEQ ID NO: 1661732 - DNA, 25 bp, Homo sapien
gtacaaagctttctgaacagggtcc

SEQ ID NO: 1661733 - DNA, 25 bp, Homo sapien
ctcctcctgagagaattctacagcc

SEQ ID NO: 1661734 - DNA, 25 bp, Homo sapien
gcaccaaagtctgcaatatcaaaga

SEQ ID NO: 1661735 - DNA, 25 bp, Homo sapien
agcaccaaagtctgcaatatcaaag

SEQ ID NO: 1661736 - DNA, 25 bp, Homo sapien
tgtagcaccaaagtctgcaatatca

SEQ ID NO: 1661737 - DNA, 25 bp, Homo sapien
cttctgggtagaaactagcaaacat

SEQ ID NO: 1661738 - DNA, 25 bp, Homo sapien
ccatctctgcttggacttttaccac

SEQ ID NO: 1661739 - DNA, 25 bp, Homo sapien
aaacaactgccggtaagagtcccag

SEQ ID NO: 1661740 - DNA, 25 bp, Homo sapien
aaagtttggctcttacatctgagca

SEQ ID NO: 1661741 - DNA, 25 bp, Homo sapien
tattccctaccatccttatgttgca

SEQ ID NO: 1661742 - DNA, 25 bp, Homo sapien
tctctcagtcaatataattaattct

SEQ ID NO: 1661743 - DNA, 25 bp, Homo sapien
ctctctcagtcaatataattaattc

SEQ ID NO: 1661744 - DNA, 25 bp, Homo sapien
atagattgaggtgtgcgattcagtt

SEQ ID NO: 1661745 - DNA, 25 bp, Homo sapien
caagataaattaatctggtgtaagg

SEQ ID NO: 1661746 - DNA, 25 bp, Homo sapien
aggtgtgcgattcagttgcccgcca

SEQ ID NO: 1661747 - DNA, 25 bp, Homo sapien
tgaggtgtgcgattcagttgcccgc

SEQ ID NO: 1661748 - DNA, 25 bp, Homo sapien
ccaattgatagtaacagggtagaac

SEQ ID NO: 1661749 - DNA, 25 bp, Homo sapien
gaggaagctaatgtacaccatggtg

SEQ ID NO: 1661750 - DNA, 25 bp, Homo sapien
tactgtatgacctcacaagtggaat

SEQ ID NO: 1661751 - DNA, 25 bp, Homo sapien
aacagttgttgccacaggctgctgg

SEQ ID NO: 1661752 - DNA, 25 bp, Homo sapien
atctgtaattccagtgcgttgagag

SEQ ID NO: 1661753 - DNA, 25 bp, Homo sapien
ttccagtgcgttgagaggctgaggt

SEQ ID NO: 1661754 - DNA, 25 bp, Homo sapien
cttgaggccaggaagtagaagctgc

SEQ ID NO: 1661755 - DNA, 25 bp, Homo sapien
gtaattccagtgcgttgagaggctg

SEQ ID NO: 1661756 - DNA, 25 bp, Homo sapien
catatcttgtagtgacagtcagtca

SEQ ID NO: 1661757 - DNA, 25 bp, Homo sapien
gagagttaccacaaataactggatc

SEQ ID NO: 1661758 - DNA, 25 bp, Homo sapien
tttatgctctactccatcattggga

SEQ ID NO: 1661759 - DNA, 25 bp, Homo sapien
tgccctctggctaaataggaattcc

SEQ ID NO: 1661760 - DNA, 25 bp, Homo sapien
gttctgcccaatgctctgcaactta

SEQ ID NO: 1661761 - DNA, 25 bp, Homo sapien
gtctgttctgcccaatgctctgcaa

SEQ ID NO: 1661762 - DNA, 25 bp, Homo sapien
ttatgtctgttctgcccaatgctct

SEQ ID NO: 1661763 - DNA, 25 bp, Homo sapien
tatgtctgttctgcccaatgctctg

SEQ ID NO: 1661764 - DNA, 25 bp, Homo sapien
gttcccactctctagcacccccaat

SEQ ID NO: 1661765 - DNA, 25 bp, Homo sapien
tgtccccaatctccacgtatttctg

SEQ ID NO: 1661766 - DNA, 25 bp, Homo sapien
agcaccacgtagctctgtcagccgc

SEQ ID NO: 1661767 - DNA, 25 bp, Homo sapien
aatttcctaggcttactccctgctg

SEQ ID NO: 1661768 - DNA, 25 bp, Homo sapien
attttgccgtgtatttatgggtctc

SEQ ID NO: 1661769 - DNA, 25 bp, Homo sapien
tgctctctttgcaagtccctaaagt

SEQ ID NO: 1661770 - DNA, 25 bp, Homo sapien
ttttccatccgttctctttcactct

SEQ ID NO: 1661771 - DNA, 25 bp, Homo sapien
tcatctctctgaaggtccccttttt

SEQ ID NO: 1661772 - DNA, 25 bp, Homo sapien
tccccaggtcacgggtatggagaac

SEQ ID NO: 1661773 - DNA, 25 bp, Homo sapien
cgatccccaggtcacgggtatggag

SEQ ID NO: 1661774 - DNA, 25 bp, Homo sapien
gatccccaggtcacgggtatggaga

SEQ ID NO: 1661775 - DNA, 25 bp, Homo sapien
ccaggtcacgggtatggagaaccga

SEQ ID NO: 1661776 - DNA, 25 bp, Homo sapien
tgcgaagtgcacgtttaatcaaggt

SEQ ID NO: 1661777 - DNA, 25 bp, Homo sapien
taatcaaggtagacgaagagaagca

SEQ ID NO: 1661778 - DNA, 25 bp, Homo sapien
caaacgtttaatccaggtagactga

SEQ ID NO: 1661779 - DNA, 25 bp, Homo sapien
ggtagactgaaacacactcatagcg

SEQ ID NO: 1661780 - DNA, 25 bp, Homo sapien
ctgttctggcctacaatacaccact

SEQ ID NO: 1661781 - DNA, 25 bp, Homo sapien
tcaactgttctggcctacaatacac

SEQ ID NO: 1661782 - DNA, 25 bp, Homo sapien
tacaccactgctgcgtcattatcca

SEQ ID NO: 1661783 - DNA, 25 bp, Homo sapien
tacaatacaccactgctgcgtcatt

SEQ ID NO: 1661784 - DNA, 25 bp, Homo sapien
cattcccagataccacaatgaagga

SEQ ID NO: 1661785 - DNA, 25 bp, Homo sapien
tacgtgttcatggacacctggaaca

SEQ ID NO: 1661786 - DNA, 25 bp, Homo sapien
tcaaaccttaggataaacgtcatag

SEQ ID NO: 1661787 - DNA, 25 bp, Homo sapien
tgtgaatctggcctgtgaccatgct

SEQ ID NO: 1661788 - DNA, 25 bp, Homo sapien
catgttcagcatacttacaggattt

SEQ ID NO: 1661789 - DNA, 25 bp, Homo sapien
taataatattccaggccaatcttgg

SEQ ID NO: 1661790 - DNA, 25 bp, Homo sapien
gttcaatcaaactgcaaaggcgtgg

SEQ ID NO: 1661791 - DNA, 25 bp, Homo sapien
tacagtgaggtgaactggtgccact

SEQ ID NO: 1661792 - DNA, 25 bp, Homo sapien
ccatccacatcgctgcaatggacat

SEQ ID NO: 1661793 - DNA, 25 bp, Homo sapien
tccacatcgctgcaatggacatgat

SEQ ID NO: 1661794 - DNA, 25 bp, Homo sapien
agctccatccacatcgctgcaatgg

SEQ ID NO: 1661795 - DNA, 25 bp, Homo sapien
ccacatcgctgcaatggacatgatc

SEQ ID NO: 1661796 - DNA, 25 bp, Homo sapien
tttattcagtctatcactgataagc

SEQ ID NO: 1661797 - DNA, 25 bp, Homo sapien
tgggttgattccaggtctttgaaca

SEQ ID NO: 1661798 - DNA, 25 bp, Homo sapien
tttgggttgattccaggtctttgaa

SEQ ID NO: 1661799 - DNA, 25 bp, Homo sapien
tattcagtctatcactgataagcat

SEQ ID NO: 1661800 - DNA, 25 bp, Homo sapien
taaactctcttatgacaagtagtga

SEQ ID NO: 1661801 - DNA, 25 bp, Homo sapien
gagtagaattcttgccacacgtatt

SEQ ID NO: 1661802 - DNA, 25 bp, Homo sapien
tatacaaattcttacacctagtgag

SEQ ID NO: 1661803 - DNA, 25 bp, Homo sapien
tgatgcctagtgagttccaatgcct

SEQ ID NO: 1661804 - DNA, 25 bp, Homo sapien
tggcatctgatcaccctctagggaa

SEQ ID NO: 1661805 - DNA, 25 bp, Homo sapien
gcaaagcgggtgtcggtatttcaca

SEQ ID NO: 1661806 - DNA, 25 bp, Homo sapien
caagcgacagggaagtgctatgcac

SEQ ID NO: 1661807 - DNA, 25 bp, Homo sapien
aactaggacaacgtctaaggccttg

SEQ ID NO: 1661808 - DNA, 25 bp, Homo sapien
gtgtttgctgagggaaaacaaccgc

SEQ ID NO: 1661809 - DNA, 25 bp, Homo sapien
tttgctgagggaaaacaaccgccca

SEQ ID NO: 1661810 - DNA, 25 bp, Homo sapien
tgctgagggaaaacaaccgcccaaa

SEQ ID NO: 1661811 - DNA, 25 bp, Homo sapien
aattctttggtgtttgctgagggaa

SEQ ID NO: 1661812 - DNA, 25 bp, Homo sapien
aagatggacacgctgactaaaggaa

SEQ ID NO: 1661813 - DNA, 25 bp, Homo sapien
tgtgaactatgcctgaataccttgc

SEQ ID NO: 1661814 - DNA, 25 bp, Homo sapien
ttacaagatgtgaactatgcctgaa

SEQ ID NO: 1661815 - DNA, 25 bp, Homo sapien
gatggacacgctgactaaaggaatt

SEQ ID NO: 1661816 - DNA, 25 bp, Homo sapien
gaattctccgatgcactgtaagacg

SEQ ID NO: 1661817 - DNA, 25 bp, Homo sapien
ctgtaagacgtgaacattgactgaa

SEQ ID NO: 1661818 - DNA, 25 bp, Homo sapien
cagtatgaactcttcgatgccctac

SEQ ID NO: 1661819 - DNA, 25 bp, Homo sapien
gccttgcaaaagctgaacggtcact

SEQ ID NO: 1661820 - DNA, 25 bp, Homo sapien
ctgcaagtcgtgaatgtatgctgaa

SEQ ID NO: 1661821 - DNA, 25 bp, Homo sapien
aatgcttactgtacaccttgccaca

SEQ ID NO: 1661822 - DNA, 25 bp, Homo sapien
caagtcgtgaatgtatgctgaaaac

SEQ ID NO: 1661823 - DNA, 25 bp, Homo sapien
gtgaatgcttactgtacaccttgcc

SEQ ID NO: 1661824 - DNA, 25 bp, Homo sapien
tctacagtgtgaattcgtcgatgca

SEQ ID NO: 1661825 - DNA, 25 bp, Homo sapien
ggattctccggtgacatacaagatt

SEQ ID NO: 1661826 - DNA, 25 bp, Homo sapien
gtgaattcgtcgatgcactgcaaga

SEQ ID NO: 1661827 - DNA, 25 bp, Homo sapien
ttctccggtgacatacaagatttga

SEQ ID NO: 1661828 - DNA, 25 bp, Homo sapien
gcatggattacctgatgtacagtga

SEQ ID NO: 1661829 - DNA, 25 bp, Homo sapien
catggattacctgatgtacagtgag

SEQ ID NO: 1661830 - DNA, 25 bp, Homo sapien
tgcatggattacctgatgtacagtg

SEQ ID NO: 1661831 - DNA, 25 bp, Homo sapien
aagatggacacgctgactaaaggat

SEQ ID NO: 1661832 - DNA, 25 bp, Homo sapien
ggactaccttgtgtacagttagtag

SEQ ID NO: 1661833 - DNA, 25 bp, Homo sapien
taaggctggaagacgctttaaaggc

SEQ ID NO: 1661834 - DNA, 25 bp, Homo sapien
tttccctcttgtatggactaccttg

SEQ ID NO: 1661835 - DNA, 25 bp, Homo sapien
agttcagccagacgtgactcaaagt

SEQ ID NO: 1661836 - DNA, 25 bp, Homo sapien
gactcaaagtttgatgtaagctggt

SEQ ID NO: 1661837 - DNA, 25 bp, Homo sapien
caaagtttgatgtaagctggttttc

SEQ ID NO: 1661838 - DNA, 25 bp, Homo sapien
gccagacgtgactcaaagtttgatg

SEQ ID NO: 1661839 - DNA, 25 bp, Homo sapien
ccagtgccactgtttggaacctttc

SEQ ID NO: 1661840 - DNA, 25 bp, Homo sapien
gtgccactgtttggaacctttctcc

SEQ ID NO: 1661841 - DNA, 25 bp, Homo sapien
ttccagtgccactgtttggaacctt

SEQ ID NO: 1661842 - DNA, 25 bp, Homo sapien
caaggtcatgtagatgtttctgtat

SEQ ID NO: 1661843 - DNA, 25 bp, Homo sapien
cacaaaggcagtaacggatatgaag

SEQ ID NO: 1661844 - DNA, 25 bp, Homo sapien
ttgggatgcagaagaagacacgctg

SEQ ID NO: 1661845 - DNA, 25 bp, Homo sapien
caatgttaaggagacttgggatgca

SEQ ID NO: 1661846 - DNA, 25 bp, Homo sapien
cataacatgggagcagacctgtaaa

SEQ ID NO: 1661847 - DNA, 25 bp, Homo sapien
ggacctaacctacatatgcacaacg

SEQ ID NO: 1661848 - DNA, 25 bp, Homo sapien
tgcacaacgcatctcccaaaaacag

SEQ ID NO: 1661849 - DNA, 25 bp, Homo sapien
tcctgacctcgtttaacacatttta

SEQ ID NO: 1661850 - DNA, 25 bp, Homo sapien
tcataaagtgtaacttatcccttca

SEQ ID NO: 1661851 - DNA, 25 bp, Homo sapien
aacagaggaaatacaaaaatgcaca

SEQ ID NO: 1661852 - DNA, 25 bp, Homo sapien
aaaaatgcacaagggcgaatctgaa

SEQ ID NO: 1661853 - DNA, 25 bp, Homo sapien
tacaaaaatgcacaagggcgaatct

SEQ ID NO: 1661854 - DNA, 25 bp, Homo sapien
aatacaaaaatgcacaagggcgaat

SEQ ID NO: 1661855 - DNA, 25 bp, Homo sapien
tccttgtacaaagctttctgcacag

SEQ ID NO: 1661856 - DNA, 25 bp, Homo sapien
cacatccttgtacaaagctttctgc

SEQ ID NO: 1661857 - DNA, 25 bp, Homo sapien
ttgtacaaagctttctgcacaggct

SEQ ID NO: 1661858 - DNA, 25 bp, Homo sapien
catccttgtacaaagctttctgcac

SEQ ID NO: 1661859 - DNA, 25 bp, Homo sapien
ggagagaactatcacatcactttga

SEQ ID NO: 1661860 - DNA, 25 bp, Homo sapien
aagcaatatgagagctcttctgttt

SEQ ID NO: 1661861 - DNA, 25 bp, Homo sapien
aatgaggagagaactatcacatcac

SEQ ID NO: 1661862 - DNA, 25 bp, Homo sapien
tcttctgtttacacaaaatgaggag

SEQ ID NO: 1661863 - DNA, 25 bp, Homo sapien
tgtggtgaagagagcattgtggcag

SEQ ID NO: 1661864 - DNA, 25 bp, Homo sapien
ctgtggtgaagagagcattgtggca

SEQ ID NO: 1661865 - DNA, 25 bp, Homo sapien
tggtgaagagagcattgtggcagcc

SEQ ID NO: 1661866 - DNA, 25 bp, Homo sapien
gtgaagagagcattgtggcagccat

SEQ ID NO: 1661867 - DNA, 25 bp, Homo sapien
caatgtaattattcacacatcaaac

SEQ ID NO: 1661868 - DNA, 25 bp, Homo sapien
gggtttctttctcagtcaatgtaat

SEQ ID NO: 1661869 - DNA, 25 bp, Homo sapien
tctcagtcaatgtaattattcacac

SEQ ID NO: 1661870 - DNA, 25 bp, Homo sapien
ctttctcagtcaatgtaattattca

SEQ ID NO: 1661871 - DNA, 25 bp, Homo sapien
tccccttggggccttgctgtcacca

SEQ ID NO: 1661872 - DNA, 25 bp, Homo sapien
ctccccttggggccttgctgtcacc

SEQ ID NO: 1661873 - DNA, 25 bp, Homo sapien
ccccttggggccttgctgtcaccag

SEQ ID NO: 1661874 - DNA, 25 bp, Homo sapien
cccttggggccttgctgtcaccagt

SEQ ID NO: 1661875 - DNA, 25 bp, Homo sapien
cctggttcacaggtaaacgggtcat

SEQ ID NO: 1661876 - DNA, 25 bp, Homo sapien
cagttgttacactttataataggcc

SEQ ID NO: 1661877 - DNA, 25 bp, Homo sapien
aggtaaaaatagacgttgcagttgt

SEQ ID NO: 1661878 - DNA, 25 bp, Homo sapien
gaaacgataagctttagggtctgtg

SEQ ID NO: 1661879 - DNA, 25 bp, Homo sapien
gggtattaagcctaatgtctattag

SEQ ID NO: 1661880 - DNA, 25 bp, Homo sapien
ttgttgccctctacgtatccatgtt

SEQ ID NO: 1661881 - DNA, 25 bp, Homo sapien
cgggtattaagcctaatgtctatta

SEQ ID NO: 1661882 - DNA, 25 bp, Homo sapien
gttgccctctacgtatccatgtttt

SEQ ID NO: 1661883 - DNA, 25 bp, Homo sapien
tcacatttattaactacaaaaggat

SEQ ID NO: 1661884 - DNA, 25 bp, Homo sapien
tgagggaagcacatctcacatgagt

SEQ ID NO: 1661885 - DNA, 25 bp, Homo sapien
aacccaatcatcacatttattaact

SEQ ID NO: 1661886 - DNA, 25 bp, Homo sapien
catcacatttattaactacaaaagg

SEQ ID NO: 1661887 - DNA, 25 bp, Homo sapien
tcccacatgccccaacaactcataa

SEQ ID NO: 1661888 - DNA, 25 bp, Homo sapien
ccaacaactcataaactcctgctga

SEQ ID NO: 1661889 - DNA, 25 bp, Homo sapien
tatcgtgctacgaaatcccacatgc

SEQ ID NO: 1661890 - DNA, 25 bp, Homo sapien
catagtgctccccatatcgtgctac

SEQ ID NO: 1661891 - DNA, 25 bp, Homo sapien
gcccactctcttcactactatgtgt

SEQ ID NO: 1661892 - DNA, 25 bp, Homo sapien
tgtttcccgctctcattctgcacgt

SEQ ID NO: 1661893 - DNA, 25 bp, Homo sapien
tatgtctattctgcccaatgcttcg

SEQ ID NO: 1661894 - DNA, 25 bp, Homo sapien
cagccgccacgtattcctgcctctt

SEQ ID NO: 1661895 - DNA, 25 bp, Homo sapien
tctactctcctttgttacccactcc

SEQ ID NO: 1661896 - DNA, 25 bp, Homo sapien
ccactctctagcacccccaacttcc

SEQ ID NO: 1661897 - DNA, 25 bp, Homo sapien
tcccactctctagcacccccaactt

SEQ ID NO: 1661898 - DNA, 25 bp, Homo sapien
gttcccactctctagcacccccaac

SEQ ID NO: 1661899 - DNA, 25 bp, Homo sapien
tgctactttctccatgcgtcctctt

SEQ ID NO: 1661900 - DNA, 25 bp, Homo sapien
cccgcgtctgactgcagtgcctcct

SEQ ID NO: 1661901 - DNA, 25 bp, Homo sapien
tctccatgcgtcctcttgcactctt

SEQ ID NO: 1661902 - DNA, 25 bp, Homo sapien
ttatgtgcttttctccccgtgctac

SEQ ID NO: 1661903 - DNA, 25 bp, Homo sapien
cgctcccctccaggcgtcgacaagg

SEQ ID NO: 1661904 - DNA, 25 bp, Homo sapien
gaagaagcggctccttcaggagctg

SEQ ID NO: 1661905 - DNA, 25 bp, Homo sapien
gagaagaagcggctccttcaggagc

SEQ ID NO: 1661906 - DNA, 25 bp, Homo sapien
cctccaggcgtcgacaagggcgaag

SEQ ID NO: 1661907 - DNA, 25 bp, Homo sapien
tgagagttttaagcaggaacacgac

SEQ ID NO: 1661908 - DNA, 25 bp, Homo sapien
tttaaggtccgtagcgatccccaga

SEQ ID NO: 1661909 - DNA, 25 bp, Homo sapien
gatccccagatcactggtacggaga

SEQ ID NO: 1661910 - DNA, 25 bp, Homo sapien
taatccaggcagacggagcgaagta

SEQ ID NO: 1661911 - DNA, 25 bp, Homo sapien
tgcaaagtgcacgtttaatccaggc

SEQ ID NO: 1661912 - DNA, 25 bp, Homo sapien
ctgcaccctgccttgttcctttact

SEQ ID NO: 1661913 - DNA, 25 bp, Homo sapien
tgcaccctgccttgttcctttactt

SEQ ID NO: 1661914 - DNA, 25 bp, Homo sapien
aagtaaaggaacaaggcagggtgca

SEQ ID NO: 1661915 - DNA, 25 bp, Homo sapien
agtaaaggaacaaggcagggtgcag

SEQ ID NO: 1661916 - DNA, 25 bp, Homo sapien
ctcagcctctctcaatgtgctggga

SEQ ID NO: 1661917 - DNA, 25 bp, Homo sapien
tgcaccctgccttgttcctttactt

SEQ ID NO: 1661918 - DNA, 25 bp, Homo sapien
cctgccttgttcctttacttgctta

SEQ ID NO: 1661919 - DNA, 25 bp, Homo sapien
cagcctctctcaatgtgctgggatt

SEQ ID NO: 1661920 - DNA, 25 bp, Homo sapien
ctctctcaatgtgctgggattacag

SEQ ID NO: 1661921 - DNA, 25 bp, Homo sapien
gcaccctgccttgttcctttacttg

SEQ ID NO: 1661922 - DNA, 25 bp, Homo sapien
aagtaaaggaacaaggcagggtgca

SEQ ID NO: 1661923 - DNA, 25 bp, Homo sapien
ctgtaatcccagcacattgagagag

SEQ ID NO: 1661924 - DNA, 25 bp, Homo sapien
caagtaaaggaacaaggcagggtgc

SEQ ID NO: 1661925 - DNA, 25 bp, Homo sapien
aatcccagcacattgagagaggctg

SEQ ID NO: 1661926 - DNA, 25 bp, Homo sapien
taagcaagtaaaggaacaaggcagg

SEQ ID NO: 1661927 - DNA, 25 bp, Homo sapien
tcccagcacattgagagaggctgag

SEQ ID NO: 1661928 - DNA, 25 bp, Homo sapien
gctcagaagctcaacattccgtgtt

SEQ ID NO: 1661929 - DNA, 25 bp, Homo sapien
cgttcccttcgtcatctggcttctg

SEQ ID NO: 1661930 - DNA, 25 bp, Homo sapien
ggtgcacaccattacccttggctaa

SEQ ID NO: 1661931 - DNA, 25 bp, Homo sapien
tccgtgttgaattagagtctgagcc

SEQ ID NO: 1661932 - DNA, 25 bp, Homo sapien
tggcattactgcactactgcttggg

SEQ ID NO: 1661933 - DNA, 25 bp, Homo sapien
ttgcgacgctttccaaacaatgacg

SEQ ID NO: 1661934 - DNA, 25 bp, Homo sapien
ttccgctatatcacgctcagaagct

SEQ ID NO: 1661935 - DNA, 25 bp, Homo sapien
gaagagaaggcacttccgctatatc

SEQ ID NO: 1661936 - DNA, 25 bp, Homo sapien
ggcacttccgctatatcacgctcag

SEQ ID NO: 1661937 - DNA, 25 bp, Homo sapien
gagaaggcacttccgctatatcacg

SEQ ID NO: 1661938 - DNA, 25 bp, Homo sapien
aaggcacttccgctatatcacgctc

SEQ ID NO: 1661939 - DNA, 25 bp, Homo sapien
gcacttccgctatatcacgctcaga

SEQ ID NO: 1661940 - DNA, 25 bp, Homo sapien
gatatagcggaagtgccttctcttc

SEQ ID NO: 1661941 - DNA, 25 bp, Homo sapien
tctgagcgtgatatagcggaagtgc

SEQ ID NO: 1661942 - DNA, 25 bp, Homo sapien
cgtgatatagcggaagtgccttctc

SEQ ID NO: 1661943 - DNA, 25 bp, Homo sapien
agcttctgagcgtgatatagcggaa

SEQ ID NO: 1661944 - DNA, 25 bp, Homo sapien
ctgagcgtgatatagcggaagtgcc

SEQ ID NO: 1661945 - DNA, 25 bp, Homo sapien
gagcgtgatatagcggaagtgcctt

SEQ ID NO: 1661946 - DNA, 25 bp, Homo sapien
cccaagcagtagtgcagtaatgcca

SEQ ID NO: 1661947 - DNA, 25 bp, Homo sapien
tagccaagggtaatggtgtgcacca

SEQ ID NO: 1661948 - DNA, 25 bp, Homo sapien
cgtcattgtttggaaagcgtcgcaa

SEQ ID NO: 1661949 - DNA, 25 bp, Homo sapien
cagaagccagatgacgaagggaacg

SEQ ID NO: 1661950 - DNA, 25 bp, Homo sapien
aacacggaatgttgagcttctgagc

SEQ ID NO: 1661951 - DNA, 25 bp, Homo sapien
ggctcagactctaattcaacacgga

SEQ ID NO: 1661952 - DNA, 25 bp, Homo sapien
tagagccacggcggcaacacaacgt

SEQ ID NO: 1661953 - DNA, 25 bp, Homo sapien
cttagagccacggcggcaacacaac

SEQ ID NO: 1661954 - DNA, 25 bp, Homo sapien
ttagagccacggcggcaacacaacg

SEQ ID NO: 1661955 - DNA, 25 bp, Homo sapien
acgttgtgttgccgccgtggctcta

SEQ ID NO: 1661956 - DNA, 25 bp, Homo sapien
gttgtgttgccgccgtggctctaag

SEQ ID NO: 1661957 - DNA, 25 bp, Homo sapien
cgttgtgttgccgccgtggctctaa

SEQ ID NO: 1661958 - DNA, 25 bp, Homo sapien
tagagccacggcggcaacacaacgt

SEQ ID NO: 1661959 - DNA, 25 bp, Homo sapien
cttagagccacggcggcaacacaac

SEQ ID NO: 1661960 - DNA, 25 bp, Homo sapien
gcgcttggcagcgtagccacatttg

SEQ ID NO: 1661961 - DNA, 25 bp, Homo sapien
aggccttagagccacggcggcaaca

SEQ ID NO: 1661962 - DNA, 25 bp, Homo sapien
ttagagccacggcggcaacacaacg

SEQ ID NO: 1661963 - DNA, 25 bp, Homo sapien
tatactttctcttgcgcttggcagc

SEQ ID NO: 1661964 - DNA, 25 bp, Homo sapien
tgtgttgccgccgtggctctaaggc

SEQ ID NO: 1661965 - DNA, 25 bp, Homo sapien
acgttgtgttgccgccgtggctcta

SEQ ID NO: 1661966 - DNA, 25 bp, Homo sapien
caaatgtggctacgctgccaagcgc

SEQ ID NO: 1661967 - DNA, 25 bp, Homo sapien
tgttgccgccgtggctctaaggcct

SEQ ID NO: 1661968 - DNA, 25 bp, Homo sapien
gttgtgttgccgccgtggctctaag

SEQ ID NO: 1661969 - DNA, 25 bp, Homo sapien
cgttgtgttgccgccgtggctctaa

SEQ ID NO: 1661970 - DNA, 25 bp, Homo sapien
cactgagagcccaatagagtcctcg

SEQ ID NO: 1661971 - DNA, 25 bp, Homo sapien
gttgcaagcaaggatctcatgacag

SEQ ID NO: 1661972 - DNA, 25 bp, Homo sapien
cagtaggtccatagcaaatgtgcaa

SEQ ID NO: 1661973 - DNA, 25 bp, Homo sapien
tacaatatgtgacagcgcagcttcc

SEQ ID NO: 1661974 - DNA, 25 bp, Homo sapien
ttaaagtccttgtgtcactaagtta

SEQ ID NO: 1661975 - DNA, 25 bp, Homo sapien
gtgttcttgagacgcaggacaagaa

SEQ ID NO: 1661976 - DNA, 25 bp, Homo sapien
tctgctcaccttccgaggaagcctc

SEQ ID NO: 1661977 - DNA, 25 bp, Homo sapien
ctcaccttccgaggaagcctcagga

SEQ ID NO: 1661978 - DNA, 25 bp, Homo sapien
atctgctcaccttccgaggaagcct

SEQ ID NO: 1661979 - DNA, 25 bp, Homo sapien
tgctcaccttccgaggaagcctcag

SEQ ID NO: 1661980 - DNA, 25 bp, Homo sapien
tttgttgaggcaagaaaaccgccca

SEQ ID NO: 1661981 - DNA, 25 bp, Homo sapien
tctttgatggtacaccagctttgac

SEQ ID NO: 1661982 - DNA, 25 bp, Homo sapien
caagctatatcaataagtatgaatt

SEQ ID NO: 1661983 - DNA, 25 bp, Homo sapien
ccacatgagatttcagacggaagtg

SEQ ID NO: 1661984 - DNA, 25 bp, Homo sapien
tccgatgccccacaagatgtgaagt

SEQ ID NO: 1661985 - DNA, 25 bp, Homo sapien
tctctgatggtacgtcaggcctgtt

SEQ ID NO: 1661986 - DNA, 25 bp, Homo sapien
tgaatactccgatgacgtgctagtg

SEQ ID NO: 1661987 - DNA, 25 bp, Homo sapien
tatgtcgagtgagtaatgagccctg

SEQ ID NO: 1661988 - DNA, 25 bp, Homo sapien
tgactgaagaccttgtcgcatacat

SEQ ID NO: 1661989 - DNA, 25 bp, Homo sapien
ctgaagaccttgtcgcatacatcac

SEQ ID NO: 1661990 - DNA, 25 bp, Homo sapien
ccttgcaagttgtgaacgttgactg

SEQ ID NO: 1661991 - DNA, 25 bp, Homo sapien
ctctggtgccttgcaagttgtgaac

SEQ ID NO: 1661992 - DNA, 25 bp, Homo sapien
cagacgtgactgaaagcttaatgta

SEQ ID NO: 1661993 - DNA, 25 bp, Homo sapien
gtctttccagcgtcactgtttggca

SEQ ID NO: 1661994 - DNA, 25 bp, Homo sapien
ctcaagttgggtgggtaatgacagc

SEQ ID NO: 1661995 - DNA, 25 bp, Homo sapien
gtctgatgagttgccaggttggaac

SEQ ID NO: 1661996 - DNA, 25 bp, Homo sapien
gaaagagtaatcacatgtaattcaa

SEQ ID NO: 1661997 - DNA, 25 bp, Homo sapien
gcagcaaacatatggctctctcaga

SEQ ID NO: 1661998 - DNA, 25 bp, Homo sapien
tgttgtgcaaacatatattagcact

SEQ ID NO: 1661999 - DNA, 25 bp, Homo sapien
tgactgaaagactcatgttgtgcaa

SEQ ID NO: 1662000 - DNA, 25 bp, Homo sapien
taaaactggccaaacagtcagtgca

SEQ ID NO: 1662001 - DNA, 25 bp, Homo sapien
ggtcactccaaataccaagagtgtg

SEQ ID NO: 1662002 - DNA, 25 bp, Homo sapien
taatttagaagtagcgtggtgactc

SEQ ID NO: 1662003 - DNA, 25 bp, Homo sapien
taactgggtagtccatctggaccaa

SEQ ID NO: 1662004 - DNA, 25 bp, Homo sapien
gagggcagatcttaacttctagagc

SEQ ID NO: 1662005 - DNA, 25 bp, Homo sapien
atacacgagggcagatcttaacttc

SEQ ID NO: 1662006 - DNA, 25 bp, Homo sapien
gatcttaacttctagagcaaaatta

SEQ ID NO: 1662007 - DNA, 25 bp, Homo sapien
ggcagatcttaacttctagagcaaa

SEQ ID NO: 1662008 - DNA, 25 bp, Homo sapien
cacatcccagtacaaagctttctgc

SEQ ID NO: 1662009 - DNA, 25 bp, Homo sapien
atcccagtacaaagctttctgcaca

SEQ ID NO: 1662010 - DNA, 25 bp, Homo sapien
gcacagggtccagggatttccactc

SEQ ID NO: 1662011 - DNA, 25 bp, Homo sapien
agtacaaagctttctgcacagggtc

SEQ ID NO: 1662012 - DNA, 25 bp, Homo sapien
tttcaacatgagcaatgggagagct

SEQ ID NO: 1662013 - DNA, 25 bp, Homo sapien
tcaacatgagcaatgggagagctct

SEQ ID NO: 1662014 - DNA, 25 bp, Homo sapien
catttcaacatgagcaatgggagag

SEQ ID NO: 1662015 - DNA, 25 bp, Homo sapien
ttcaacatgagcaatgggagagctc

SEQ ID NO: 1662016 - DNA, 25 bp, Homo sapien
tcagacatctgtggtaaagatagca

SEQ ID NO: 1662017 - DNA, 25 bp, Homo sapien
tgtggtatgccatcctaaaagaggc

SEQ ID NO: 1662018 - DNA, 25 bp, Homo sapien
actgcccaacctggaggaaacttca

SEQ ID NO: 1662019 - DNA, 25 bp, Homo sapien
aagaggcactcactctttaaactgc

SEQ ID NO: 1662020 - DNA, 25 bp, Homo sapien
tctctcagtcaatataattaattct

SEQ ID NO: 1662021 - DNA, 25 bp, Homo sapien
ctctctcagtcaatataattaattc

SEQ ID NO: 1662022 - DNA, 25 bp, Homo sapien
atggcactgtactctagtctgacag

SEQ ID NO: 1662023 - DNA, 25 bp, Homo sapien
gcactctgaggcagaaagactgctt

SEQ ID NO: 1662024 - DNA, 25 bp, Homo sapien
tggcactgtactctagtctgacaga

SEQ ID NO: 1662025 - DNA, 25 bp, Homo sapien
cccagcactctgaggcagaaagact

SEQ ID NO: 1662026 - DNA, 25 bp, Homo sapien
tgtccccaatctccacgtatttccg

SEQ ID NO: 1662027 - DNA, 25 bp, Homo sapien
ccccaatctccacgtatttccgcct

SEQ ID NO: 1662028 - DNA, 25 bp, Homo sapien
tccccaatctccacgtatttccgcc

SEQ ID NO: 1662029 - DNA, 25 bp, Homo sapien
gtccccaatctccacgtatttccgc

SEQ ID NO: 1662030 - DNA, 25 bp, Homo sapien
tccgggtgtgcaggaagctacacgc

SEQ ID NO: 1662031 - DNA, 25 bp, Homo sapien
tgcacgttcgattcaggcagacggg

SEQ ID NO: 1662032 - DNA, 25 bp, Homo sapien
tccaggtagacggaaactgacgcgc

SEQ ID NO: 1662033 - DNA, 25 bp, Homo sapien
gctacacgccctgagaaaaaagact

SEQ ID NO: 1662034 - DNA, 25 bp, Homo sapien
tctgggtttcgactgctgggccaag

SEQ ID NO: 1662035 - DNA, 25 bp, Homo sapien
tgtcctaagaggacggggacgcaaa

SEQ ID NO: 1662036 - DNA, 25 bp, Homo sapien
gaggcgaaggcctgccatcctaatt

SEQ ID NO: 1662037 - DNA, 25 bp, Homo sapien
gcctctcattttggtttaggtgtcc

SEQ ID NO: 1662038 - DNA, 25 bp, Homo sapien
ggcttggtcgggaactcttgacctc

SEQ ID NO: 1662039 - DNA, 25 bp, Homo sapien
cctcagctccctaattagctgcgat

SEQ ID NO: 1662040 - DNA, 25 bp, Homo sapien
tctgcataccgggttcaaaccatcc

SEQ ID NO: 1662041 - DNA, 25 bp, Homo sapien
taattagctgcgattaccggcgcga

SEQ ID NO: 1662042 - DNA, 25 bp, Homo sapien
aagaggcagagtccagattcgatcc

SEQ ID NO: 1662043 - DNA, 25 bp, Homo sapien
tcctatgtgctatcctcagagggct

SEQ ID NO: 1662044 - DNA, 25 bp, Homo sapien
cattctcagtgaggaaagtcccagt

SEQ ID NO: 1662045 - DNA, 25 bp, Homo sapien
agttccctgtgaccgatgtgcctga

SEQ ID NO: 1662046 - DNA, 25 bp, Homo sapien
gattgaccgtcaagcccgggtttga

SEQ ID NO: 1662047 - DNA, 25 bp, Homo sapien
cgcctttgatcgaagcaattgctgc

SEQ ID NO: 1662048 - DNA, 25 bp, Homo sapien
caggtccagtgcctttggcagataa

SEQ ID NO: 1662049 - DNA, 25 bp, Homo sapien
gaactctggtttatggctgtacact

SEQ ID NO: 1662050 - DNA, 25 bp, Homo sapien
tcagcaagcgctatatggtaatcgt

SEQ ID NO: 1662051 - DNA, 25 bp, Homo sapien
tcctatcctcggaatgtgcagggtt

SEQ ID NO: 1662052 - DNA, 25 bp, Homo sapien
gtttgaaggcaagcccatacgtgct

SEQ ID NO: 1662053 - DNA, 25 bp, Homo sapien
catacgtgctgcaagtgcgctagga

SEQ ID NO: 1662054 - DNA, 25 bp, Homo sapien
caggaaatgagagttagccaggagc

SEQ ID NO: 1662055 - DNA, 25 bp, Homo sapien
aagatagggcccatcctggacaaca

SEQ ID NO: 1662056 - DNA, 25 bp, Homo sapien
caacaggtgaggtctggatactccc

SEQ ID NO: 1662057 - DNA, 25 bp, Homo sapien
caatgtccgcttcaatgtggccaag

SEQ ID NO: 1662058 - DNA, 25 bp, Homo sapien
agagatgtgagcatcccgggtcact

SEQ ID NO: 1662059 - DNA, 25 bp, Homo sapien
tcactggatcctgctgctgtaatgg

SEQ ID NO: 1662060 - DNA, 25 bp, Homo sapien
tgggaagatgtctcactgtccacct

SEQ ID NO: 1662061 - DNA, 25 bp, Homo sapien
tccgcccacgtcagggagagatgtg

SEQ ID NO: 1662062 - DNA, 25 bp, Homo sapien
cattctgcgagttcccagtgactga

SEQ ID NO: 1662063 - DNA, 25 bp, Homo sapien
ctacgacaagtagatcattcctatt

SEQ ID NO: 1662064 - DNA, 25 bp, Homo sapien
gatcattcctattgccaactccctg

SEQ ID NO: 1662065 - DNA, 25 bp, Homo sapien
tctgcgagttcccagtgactgatat

SEQ ID NO: 1662066 - DNA, 25 bp, Homo sapien
gaagtatccaaaagaggctcttact

SEQ ID NO: 1662067 - DNA, 25 bp, Homo sapien
aaagagaccactgaagtatccaaaa

SEQ ID NO: 1662068 - DNA, 25 bp, Homo sapien
gaccactgaagtatccaaaagaggc

SEQ ID NO: 1662069 - DNA, 25 bp, Homo sapien
cagaggcaattacaactttctcata

SEQ ID NO: 1662070 - DNA, 25 bp, Homo sapien
tacggggatctcagcccaacagtcc

SEQ ID NO: 1662071 - DNA, 25 bp, Homo sapien
aattcaacaccaatttggattcctt

SEQ ID NO: 1662072 - DNA, 25 bp, Homo sapien
cacaattacggggatctcagcccaa

SEQ ID NO: 1662073 - DNA, 25 bp, Homo sapien
aactttatgccctgcacaattacgg

SEQ ID NO: 1662074 - DNA, 25 bp, Homo sapien
ctcttgacttctagtttctcccatt

SEQ ID NO: 1662075 - DNA, 25 bp, Homo sapien
tagtttctcccattcttgtgcccat

SEQ ID NO: 1662076 - DNA, 25 bp, Homo sapien
tctagtttctcccattcttgtgccc

SEQ ID NO: 1662077 - DNA, 25 bp, Homo sapien
cttcctcttgacttctagtttctcc

SEQ ID NO: 1662078 - DNA, 25 bp, Homo sapien
ataactgactatcttcggacctggc

SEQ ID NO: 1662079 - DNA, 25 bp, Homo sapien
gataactgactatcttcggacctgg

SEQ ID NO: 1662080 - DNA, 25 bp, Homo sapien
gagtgttaaaatcgccctagggctg

SEQ ID NO: 1662081 - DNA, 25 bp, Homo sapien
gagtaaattcatgcgtcccgtcaga

SEQ ID NO: 1662082 - DNA, 25 bp, Homo sapien
caagtgtggcttgcaaaacgcggaa

SEQ ID NO: 1662083 - DNA, 25 bp, Homo sapien
aacagacgttgaccctcctagtgag

SEQ ID NO: 1662084 - DNA, 25 bp, Homo sapien
tcagcatgtggaagctctcaggaac

SEQ ID NO: 1662085 - DNA, 25 bp, Homo sapien
ggcgaggcacatgggaagattcact

SEQ ID NO: 1662086 - DNA, 25 bp, Homo sapien
agattcactgggtgtgccgcccttg

SEQ ID NO: 1662087 - DNA, 25 bp, Homo sapien
tgaggagattcacaaggcgaggcac

SEQ ID NO: 1662088 - DNA, 25 bp, Homo sapien
aggatttttaaggttgaagcatcca

SEQ ID NO: 1662089 - DNA, 25 bp, Homo sapien
ggttgaagcatccacaacaattttg

SEQ ID NO: 1662090 - DNA, 25 bp, Homo sapien
tttaaggttgaagcatccacaacaa

SEQ ID NO: 1662091 - DNA, 25 bp, Homo sapien
gatttttaaggttgaagcatccaca

SEQ ID NO: 1662092 - DNA, 25 bp, Homo sapien
catgcccggccagatgctatgctta

SEQ ID NO: 1662093 - DNA, 25 bp, Homo sapien
ttttttccgaatgtcactctagtga

SEQ ID NO: 1662094 - DNA, 25 bp, Homo sapien
atgtcactctagtgaaaattttagg

SEQ ID NO: 1662095 - DNA, 25 bp, Homo sapien
tgacaagagtatgcacaagacaatg

SEQ ID NO: 1662096 - DNA, 25 bp, Homo sapien
caccccactgaaaaggtgttctgct

SEQ ID NO: 1662097 - DNA, 25 bp, Homo sapien
ttcttgcgggccaaataacacccca

SEQ ID NO: 1662098 - DNA, 25 bp, Homo sapien
tccatgtgaatgtgtgcagaaagag

SEQ ID NO: 1662099 - DNA, 25 bp, Homo sapien
tgttctgcttgtggacatcggatcc

SEQ ID NO: 1662100 - DNA, 25 bp, Homo sapien
tgagagctgcgaacagggtttgacc

SEQ ID NO: 1662101 - DNA, 25 bp, Homo sapien
tacttgatctcctagccgcattaca

SEQ ID NO: 1662102 - DNA, 25 bp, Homo sapien
tgtcatagccatcacaagcacgttt

SEQ ID NO: 1662103 - DNA, 25 bp, Homo sapien
acttctcacaggattcgggattcgg

SEQ ID NO: 1662104 - DNA, 25 bp, Homo sapien
gaggccttattgtcagtctcgacat

SEQ ID NO: 1662105 - DNA, 25 bp, Homo sapien
aggccttattgtcagtctcgacatg

SEQ ID NO: 1662106 - DNA, 25 bp, Homo sapien
ggaggccttattgtcagtctcgaca

SEQ ID NO: 1662107 - DNA, 25 bp, Homo sapien
agagtacttgggtgttctccagtgt

SEQ ID NO: 1662108 - DNA, 25 bp, Homo sapien
tggtgacccttcgacaagggtttga

SEQ ID NO: 1662109 - DNA, 25 bp, Homo sapien
ggtttgagccccatgttaggcgcca

SEQ ID NO: 1662110 - DNA, 25 bp, Homo sapien
gttaggcgccacttgctcagaccag

SEQ ID NO: 1662111 - DNA, 25 bp, Homo sapien
gtgcctctcacagagaccgattttc

SEQ ID NO: 1662112 - DNA, 25 bp, Homo sapien
ctctcacagagaccgattttccttt

SEQ ID NO: 1662113 - DNA, 25 bp, Homo sapien
cttggttcagggaggacgttctctc

SEQ ID NO: 1662114 - DNA, 25 bp, Homo sapien
tggttcagggaggacgttctctcat

SEQ ID NO: 1662115 - DNA, 25 bp, Homo sapien
gaattcataccagagagaagccgta

SEQ ID NO: 1662116 - DNA, 25 bp, Homo sapien
tttagtcgcaattcacaccttgcag

SEQ ID NO: 1662117 - DNA, 25 bp, Homo sapien
caagaacagaaagtacaccttagag

SEQ ID NO: 1662118 - DNA, 25 bp, Homo sapien
caaatgtaattcatgcggcaaggtc

SEQ ID NO: 1662119 - DNA, 25 bp, Homo sapien
atgtagtgaatgtggcaaggcattc

SEQ ID NO: 1662120 - DNA, 25 bp, Homo sapien
cttacaaatgtagtgaatgtggcaa

SEQ ID NO: 1662121 - DNA, 25 bp, Homo sapien
gtgaatgtggcaaggcattcagaca

SEQ ID NO: 1662122 - DNA, 25 bp, Homo sapien
tagtgaatgtggcaaggcattcaga

SEQ ID NO: 1662123 - DNA, 25 bp, Homo sapien
gaagattgaataactgcctgttggg

SEQ ID NO: 1662124 - DNA, 25 bp, Homo sapien
gaacagtagacacgggcttatgggt

SEQ ID NO: 1662125 - DNA, 25 bp, Homo sapien
gaacatagcattcaacccagcatcc

SEQ ID NO: 1662126 - DNA, 25 bp, Homo sapien
gagctgaggctcttatcctaagtga

SEQ ID NO: 1662127 - DNA, 25 bp, Homo sapien
gcaacatgcagttgacccatgtaca

SEQ ID NO: 1662128 - DNA, 25 bp, Homo sapien
cctgcaacatgcagttgacccatgt

SEQ ID NO: 1662129 - DNA, 25 bp, Homo sapien
caacatgcagttgacccatgtacac

SEQ ID NO: 1662130 - DNA, 25 bp, Homo sapien
tgcaacatgcagttgacccatgtac

SEQ ID NO: 1662131 - DNA, 25 bp, Homo sapien
tgtgaaggttataacagccagtata

SEQ ID NO: 1662132 - DNA, 25 bp, Homo sapien
gtgggctcagtgtgaaggttataac

SEQ ID NO: 1662133 - DNA, 25 bp, Homo sapien
cagtgtgaaggttataacagccagt

SEQ ID NO: 1662134 - DNA, 25 bp, Homo sapien
gctcagtgtgaaggttataacagcc

SEQ ID NO: 1662135 - DNA, 25 bp, Homo sapien
caccgtgcgtggcccctaaatttat

SEQ ID NO: 1662136 - DNA, 25 bp, Homo sapien
tatatctaggcagtacagtcatccc

SEQ ID NO: 1662137 - DNA, 25 bp, Homo sapien
cctcagtattggagggattacttcc

SEQ ID NO: 1662138 - DNA, 25 bp, Homo sapien
gagggattacttccacgacccctga

SEQ ID NO: 1662139 - DNA, 25 bp, Homo sapien
gctattttgcccaggactcgaatca

SEQ ID NO: 1662140 - DNA, 25 bp, Homo sapien
ctgcaacgtctgccttccgggttcc

SEQ ID NO: 1662141 - DNA, 25 bp, Homo sapien
acgtctgccttccgggttccagcga

SEQ ID NO: 1662142 - DNA, 25 bp, Homo sapien
gcaacgtctgccttccgggttccag

SEQ ID NO: 1662143 - DNA, 25 bp, Homo sapien
aacgtctgccttccgggttccagcg

SEQ ID NO: 1662144 - DNA, 25 bp, Homo sapien
gagcgcccctacagccgatttaaaa

SEQ ID NO: 1662145 - DNA, 25 bp, Homo sapien
tctgccgggacacaatctatttcca

SEQ ID NO: 1662146 - DNA, 25 bp, Homo sapien
tattaggcgcaaggtttctctctca

SEQ ID NO: 1662147 - DNA, 25 bp, Homo sapien
ggcaggtctagcctccaaaacgaga

SEQ ID NO: 1662148 - DNA, 25 bp, Homo sapien
catgagtgtggcaaagtcttcactc

SEQ ID NO: 1662149 - DNA, 25 bp, Homo sapien
gcaaatcatcacagaatccacactg

SEQ ID NO: 1662150 - DNA, 25 bp, Homo sapien
gcacgacatcagagaatacatactg

SEQ ID NO: 1662151 - DNA, 25 bp, Homo sapien
cttgcacgacatcagagaatacata

SEQ ID NO: 1662152 - DNA, 25 bp, Homo sapien
tagagactgttcaggccttactgcc

SEQ ID NO: 1662153 - DNA, 25 bp, Homo sapien
tgtggcaaagcatttagagactgtt

SEQ ID NO: 1662154 - DNA, 25 bp, Homo sapien
ggtcttcaggcatagattatcccta

SEQ ID NO: 1662155 - DNA, 25 bp, Homo sapien
actgcccatctactaattcacactg

SEQ ID NO: 1662156 - DNA, 25 bp, Homo sapien
ttttctcacggctgcactaggcgag

SEQ ID NO: 1662157 - DNA, 25 bp, Homo sapien
acatgtcttacgtggtggcgggcaa

SEQ ID NO: 1662158 - DNA, 25 bp, Homo sapien
tattggataaataacgcccgttgca

SEQ ID NO: 1662159 - DNA, 25 bp, Homo sapien
gtttcacacggctagagagacctca

SEQ ID NO: 1662160 - DNA, 25 bp, Homo sapien
cagtcccctccctatgaatgtgtgg

SEQ ID NO: 1662161 - DNA, 25 bp, Homo sapien
tgaaggagacccataaacagacggc

SEQ ID NO: 1662162 - DNA, 25 bp, Homo sapien
ccagacggcaggcagtgacttgact

SEQ ID NO: 1662163 - DNA, 25 bp, Homo sapien
aacacaggtaagagctcagatgggc

SEQ ID NO: 1662164 - DNA, 25 bp, Homo sapien
ccttgttagtatctgcagaatgcct

SEQ ID NO: 1662165 - DNA, 25 bp, Homo sapien
caatgacaaatacaaactaggttta

SEQ ID NO: 1662166 - DNA, 25 bp, Homo sapien
gattcttgcttcgagacaatgacaa

SEQ ID NO: 1662167 - DNA, 25 bp, Homo sapien
ggagtcttccaataaatgtatatgg

SEQ ID NO: 1662168 - DNA, 25 bp, Homo sapien
ggaaaggtattagcctgcacaacca

SEQ ID NO: 1662169 - DNA, 25 bp, Homo sapien
tgcacccttctgatattgaaccttg

SEQ ID NO: 1662170 - DNA, 25 bp, Homo sapien
tatccagtaacacaggtcataggga

SEQ ID NO: 1662171 - DNA, 25 bp, Homo sapien
gggatgtagctaccttcctttggga

SEQ ID NO: 1662172 - DNA, 25 bp, Homo sapien
tttcagattcccacaaaatgtacga

SEQ ID NO: 1662173 - DNA, 25 bp, Homo sapien
ggttcactgcacactggttgccaat

SEQ ID NO: 1662174 - DNA, 25 bp, Homo sapien
gataatctcacggacacacagtaag

SEQ ID NO: 1662175 - DNA, 25 bp, Homo sapien
gatacctgggattcatgcattctgc

SEQ ID NO: 1662176 - DNA, 25 bp, Homo sapien
tttcatgctccagggatgcatggca

SEQ ID NO: 1662177 - DNA, 25 bp, Homo sapien
tgctccagggatgcatggcacgttg

SEQ ID NO: 1662178 - DNA, 25 bp, Homo sapien
ctccagggatgcatggcacgttggc

SEQ ID NO: 1662179 - DNA, 25 bp, Homo sapien
catgctccagggatgcatggcacgt

SEQ ID NO: 1662180 - DNA, 25 bp, Homo sapien
cggtcccttcctctcaggatgttgc

SEQ ID NO: 1662181 - DNA, 25 bp, Homo sapien
gggatctggaacacatcctgtcctt

SEQ ID NO: 1662182 - DNA, 25 bp, Homo sapien
tccgccaatccagatatccctttta

SEQ ID NO: 1662183 - DNA, 25 bp, Homo sapien
gtgagaagtcagatgcaactgggcc

SEQ ID NO: 1662184 - DNA, 25 bp, Homo sapien
tggcccagatatcccctttaataaa

SEQ ID NO: 1662185 - DNA, 25 bp, Homo sapien
ctggcccagatatcccctttaataa

SEQ ID NO: 1662186 - DNA, 25 bp, Homo sapien
gcccagatatcccctttaataaagc

SEQ ID NO: 1662187 - DNA, 25 bp, Homo sapien
gaggctggtctcaggagattgaagt

SEQ ID NO: 1662188 - DNA, 25 bp, Homo sapien
aggctggtctcaggagattgaagta

SEQ ID NO: 1662189 - DNA, 25 bp, Homo sapien
gaggattgctgcctcaagcaggata

SEQ ID NO: 1662190 - DNA, 25 bp, Homo sapien
ggtacagccagttgcatttcactag

SEQ ID NO: 1662191 - DNA, 25 bp, Homo sapien
tttcactaggctcaagaggattgct

SEQ ID NO: 1662192 - DNA, 25 bp, Homo sapien
cagtgccgtagtccaggatcccagt

SEQ ID NO: 1662193 - DNA, 25 bp, Homo sapien
cagccaatgggcctgcttgtgggcc

SEQ ID NO: 1662194 - DNA, 25 bp, Homo sapien
tgcttgtgggccttatgtatttgtg

SEQ ID NO: 1662195 - DNA, 25 bp, Homo sapien
tcagatcaaagaaaagttcttcagg

SEQ ID NO: 1662196 - DNA, 25 bp, Homo sapien
taggtgagaagttggtactcagatc

SEQ ID NO: 1662197 - DNA, 25 bp, Homo sapien
tcccatgcaaggtgattcatgccta

SEQ ID NO: 1662198 - DNA, 25 bp, Homo sapien
cttgatgtgggggtccttatctccc

SEQ ID NO: 1662199 - DNA, 25 bp, Homo sapien
atctcccatgcaaggtgattcatgc

SEQ ID NO: 1662200 - DNA, 25 bp, Homo sapien
tgggggtccttatctcccatgcaag

SEQ ID NO: 1662201 - DNA, 25 bp, Homo sapien
cacgatgtccctaggaaagtctctg

SEQ ID NO: 1662202 - DNA, 25 bp, Homo sapien
tctggaattgagcacagggttgacc

SEQ ID NO: 1662203 - DNA, 25 bp, Homo sapien
gaaaattagcacagtggagaggcac

SEQ ID NO: 1662204 - DNA, 25 bp, Homo sapien
ggcacaggcctttactcacagctac

SEQ ID NO: 1662205 - DNA, 25 bp, Homo sapien
cattttagcttgcatcatccccttc

SEQ ID NO: 1662206 - DNA, 25 bp, Homo sapien
attttagcttgcatcatccccttca

SEQ ID NO: 1662207 - DNA, 25 bp, Homo sapien
gacaattccaaagtgtgttaattca

SEQ ID NO: 1662208 - DNA, 25 bp, Homo sapien
caattccaaagtgtgttaattcaat

SEQ ID NO: 1662209 - DNA, 25 bp, Homo sapien
cagggtaggtgggacttgaaattca

SEQ ID NO: 1662210 - DNA, 25 bp, Homo sapien
agggtaggtgggacttgaaattcat

SEQ ID NO: 1662211 - DNA, 25 bp, Homo sapien
tctgcgcaggtaagatccgttttca

SEQ ID NO: 1662212 - DNA, 25 bp, Homo sapien
tacaaccgattttgctctgcgcagg

SEQ ID NO: 1662213 - DNA, 25 bp, Homo sapien
ttttcgtggatataatctacaaccg

SEQ ID NO: 1662214 - DNA, 25 bp, Homo sapien
taatagaaggaattttcgtggatat

SEQ ID NO: 1662215 - DNA, 25 bp, Homo sapien
cagtcaagcgaacggaagcgcaggc

SEQ ID NO: 1662216 - DNA, 25 bp, Homo sapien
tcaagcgaacggaagcgcaggcccg

SEQ ID NO: 1662217 - DNA, 25 bp, Homo sapien
gccagtcaagcgaacggaagcgcag

SEQ ID NO: 1662218 - DNA, 25 bp, Homo sapien
gcgcagccagtcaagcgaacggaag

SEQ ID NO: 1662219 - DNA, 25 bp, Homo sapien
ccatggcttcttccagtcccttcat

SEQ ID NO: 1662220 - DNA, 25 bp, Homo sapien
tgtgctcagtgacataatttgaaat

SEQ ID NO: 1662221 - DNA, 25 bp, Homo sapien
tcgtaagggtggacacacagaatgg

SEQ ID NO: 1662222 - DNA, 25 bp, Homo sapien
aatgttcataaatttcctcgtaagg

SEQ ID NO: 1662223 - DNA, 25 bp, Homo sapien
tgtgaggataaggttaaaaatagtg

SEQ ID NO: 1662224 - DNA, 25 bp, Homo sapien
gatttggcttgggtattgagactga

SEQ ID NO: 1662225 - DNA, 25 bp, Homo sapien
gtacctggcctccactagaacttgt

SEQ ID NO: 1662226 - DNA, 25 bp, Homo sapien
gcttgggtattgagactgatgatgc

SEQ ID NO: 1662227 - DNA, 25 bp, Homo sapien
gaacttgtttgacgtccacctaaga

SEQ ID NO: 1662228 - DNA, 25 bp, Homo sapien
agccgtaaccgacaacctcggtgag

SEQ ID NO: 1662229 - DNA, 25 bp, Homo sapien
tggcacttgtataaatagaagccgt

SEQ ID NO: 1662230 - DNA, 25 bp, Homo sapien
tcacccaagggcgtagtttgacggc

SEQ ID NO: 1662231 - DNA, 25 bp, Homo sapien
atgctttccacaagtttgagcatcc

SEQ ID NO: 1662232 - DNA, 25 bp, Homo sapien
cccagcttgagaaatcatatgaata

SEQ ID NO: 1662233 - DNA, 25 bp, Homo sapien
ccagcttgagaaatcatatgaatat

SEQ ID NO: 1662234 - DNA, 25 bp, Homo sapien
acccagcttgagaaatcatatgaat

SEQ ID NO: 1662235 - DNA, 25 bp, Homo sapien
gcacccagcttgagaaatcatatga

SEQ ID NO: 1662236 - DNA, 25 bp, Homo sapien
gaaaaatgctcttctagtagagtcc

SEQ ID NO: 1662237 - DNA, 25 bp, Homo sapien
tcactatagtaacaaagggaagaaa

SEQ ID NO: 1662238 - DNA, 25 bp, Homo sapien
cagtcatattgtgcaatgggaccta

SEQ ID NO: 1662239 - DNA, 25 bp, Homo sapien
tatacctgccgtgatcttatgtgca

SEQ ID NO: 1662240 - DNA, 25 bp, Homo sapien
gactgaaggttgcatcattggcttc

SEQ ID NO: 1662241 - DNA, 25 bp, Homo sapien
tcatgggacctttgccttgtaattg

SEQ ID NO: 1662242 - DNA, 25 bp, Homo sapien
catcagattataggttcttcagcct

SEQ ID NO: 1662243 - DNA, 25 bp, Homo sapien
cctgggatatctcgagcctttggtc

SEQ ID NO: 1662244 - DNA, 25 bp, Homo sapien
ttccttccaatgtggattaacagat

SEQ ID NO: 1662245 - DNA, 25 bp, Homo sapien
gaatagctactatagaccttgccac

SEQ ID NO: 1662246 - DNA, 25 bp, Homo sapien
tgaaatttgattaaaggctctgcca

SEQ ID NO: 1662247 - DNA, 25 bp, Homo sapien
tgaattgttaaggagaacttgttcc

SEQ ID NO: 1662248 - DNA, 25 bp, Homo sapien
tgagttctccaatgtcgtgcaaggt

SEQ ID NO: 1662249 - DNA, 25 bp, Homo sapien
gagttctccaatgtcgtgcaaggtg

SEQ ID NO: 1662250 - DNA, 25 bp, Homo sapien
gggcaataaggcctgaatagtcact

SEQ ID NO: 1662251 - DNA, 25 bp, Homo sapien
ggcaataaggcctgaatagtcacta

SEQ ID NO: 1662252 - DNA, 25 bp, Homo sapien
gcaataaggcctgaatagtcactaa

SEQ ID NO: 1662253 - DNA, 25 bp, Homo sapien
atgggcaataaggcctgaatagtca

SEQ ID NO: 1662254 - DNA, 25 bp, Homo sapien
ctctccagtaagaaataactcagtc

SEQ ID NO: 1662255 - DNA, 25 bp, Homo sapien
cagtctcgggctaaaaactttgcca

SEQ ID NO: 1662256 - DNA, 25 bp, Homo sapien
gtaagaaataactcagtctcgggct

SEQ ID NO: 1662257 - DNA, 25 bp, Homo sapien
gaaataactcagtctcgggctaaaa

SEQ ID NO: 1662258 - DNA, 25 bp, Homo sapien
tctaaccactcgttaaatattttgc

SEQ ID NO: 1662259 - DNA, 25 bp, Homo sapien
ggataactcatacctgaagactttg

SEQ ID NO: 1662260 - DNA, 25 bp, Homo sapien
tgattgataagggataactcatacc

SEQ ID NO: 1662261 - DNA, 25 bp, Homo sapien
atgaattacaagatgggcagtgagg

SEQ ID NO: 1662262 - DNA, 25 bp, Homo sapien
ttctctccagtatgaattctcagat

SEQ ID NO: 1662263 - DNA, 25 bp, Homo sapien
tctccagtatgaattctcagatgtt

SEQ ID NO: 1662264 - DNA, 25 bp, Homo sapien
gtttctctccagtatgaattctcag

SEQ ID NO: 1662265 - DNA, 25 bp, Homo sapien
ttgccacattccatacatttgtaag

SEQ ID NO: 1662266 - DNA, 25 bp, Homo sapien
ctggatccaggattatgtcatggtt

SEQ ID NO: 1662267 - DNA, 25 bp, Homo sapien
caggattatgtcatggttaccaagg

SEQ ID NO: 1662268 - DNA, 25 bp, Homo sapien
ccaggattatgtcatggttaccaag

SEQ ID NO: 1662269 - DNA, 25 bp, Homo sapien
tctggatccaggattatgtcatggt

SEQ ID NO: 1662270 - DNA, 25 bp, Homo sapien
ctgcagtggcgcaggtgcttgtcat

SEQ ID NO: 1662271 - DNA, 25 bp, Homo sapien
gccctttcaggccatcacattggaa

SEQ ID NO: 1662272 - DNA, 25 bp, Homo sapien
actgacccctgaaacgactgacaaa

SEQ ID NO: 1662273 - DNA, 25 bp, Homo sapien
tagtgagcccacctgtaacatagag

SEQ ID NO: 1662274 - DNA, 25 bp, Homo sapien
ggtgaaatgtctcccgctgtgagcc

SEQ ID NO: 1662275 - DNA, 25 bp, Homo sapien
ctgtgagttttttgtaaggaagaat

SEQ ID NO: 1662276 - DNA, 25 bp, Homo sapien
tacagctgaccctctttcactgttt

SEQ ID NO: 1662277 - DNA, 25 bp, Homo sapien
tatttcttagttctacagctgaccc

SEQ ID NO: 1662278 - DNA, 25 bp, Homo sapien
tggtgcgatctggtgtcactccaat

SEQ ID NO: 1662279 - DNA, 25 bp, Homo sapien
gattgacttctaaagactgttggta

SEQ ID NO: 1662280 - DNA, 25 bp, Homo sapien
acattcatgattgacttctaaagac

SEQ ID NO: 1662281 - DNA, 25 bp, Homo sapien
ttctaaagactgttggtacgtgagg

SEQ ID NO: 1662282 - DNA, 25 bp, Homo sapien
gactgttggtacgtgaggaagaaac

SEQ ID NO: 1662283 - DNA, 25 bp, Homo sapien
ttctgtggaccaggattagagcagc

SEQ ID NO: 1662284 - DNA, 25 bp, Homo sapien
gagtcgcgtatgaatgtgcacaaag

SEQ ID NO: 1662285 - DNA, 25 bp, Homo sapien
gattagagcagctgccaatgggagt

SEQ ID NO: 1662286 - DNA, 25 bp, Homo sapien
ccacatctggatgctctgtcagctt

SEQ ID NO: 1662287 - DNA, 25 bp, Homo sapien
gactaggaagggagacctgccgcag

SEQ ID NO: 1662288 - DNA, 25 bp, Homo sapien
cggaagttctagtgagctgggatca

SEQ ID NO: 1662289 - DNA, 25 bp, Homo sapien
ggctcagcaattctctccgttgctt

SEQ ID NO: 1662290 - DNA, 25 bp, Homo sapien
gagacctgccgcagtgggtgttact

SEQ ID NO: 1662291 - DNA, 25 bp, Homo sapien
ctgtctgctatagggcaatgtatac

SEQ ID NO: 1662292 - DNA, 25 bp, Homo sapien
agaggccgggtgtcgcttcctttcg

SEQ ID NO: 1662293 - DNA, 25 bp, Homo sapien
tttaaagtcgtctggaggctggtcc

SEQ ID NO: 1662294 - DNA, 25 bp, Homo sapien
gcaaattgagacagcccagtgagag

SEQ ID NO: 1662295 - DNA, 25 bp, Homo sapien
cggcccctggagcgtcgcgccgcag

SEQ ID NO: 1662296 - DNA, 25 bp, Homo sapien
ggcccctggagcgtcgcgccgcagc

SEQ ID NO: 1662297 - DNA, 25 bp, Homo sapien
cctggcctgatgtgattcagctgcc

SEQ ID NO: 1662298 - DNA, 25 bp, Homo sapien
gcctggcctgatgtgattcagctgc

SEQ ID NO: 1662299 - DNA, 25 bp, Homo sapien
ctggcctgatgtgattcagctgcct

SEQ ID NO: 1662300 - DNA, 25 bp, Homo sapien
cgcgcccggcatctgaactttgttt

SEQ ID NO: 1662301 - DNA, 25 bp, Homo sapien
ccgcgcccggcatctgaactttgtt

SEQ ID NO: 1662302 - DNA, 25 bp, Homo sapien
acttttaatgacttggaattgtggg

SEQ ID NO: 1662303 - DNA, 25 bp, Homo sapien
tttaatgacttggaattgtggggaa

SEQ ID NO: 1662304 - DNA, 25 bp, Homo sapien
tgtactcctcgtagactttactcat

SEQ ID NO: 1662305 - DNA, 25 bp, Homo sapien
tcttcatactcagccaagggatcct

SEQ ID NO: 1662306 - DNA, 25 bp, Homo sapien
tccttcttcacatccatggtctcta

SEQ ID NO: 1662307 - DNA, 25 bp, Homo sapien
ggtctctacattgctgtactcctcg

SEQ ID NO: 1662308 - DNA, 25 bp, Homo sapien
aattctggaatctacacaaggcata

SEQ ID NO: 1662309 - DNA, 25 bp, Homo sapien
aaattctggaatctacacaaggcat

SEQ ID NO: 1662310 - DNA, 25 bp, Homo sapien
tgtaataagatatgtcagccttccc

SEQ ID NO: 1662311 - DNA, 25 bp, Homo sapien
aaatagcttagactggctggccaca

SEQ ID NO: 1662312 - DNA, 25 bp, Homo sapien
catattgcaggttttatgctacagg

SEQ ID NO: 1662313 - DNA, 25 bp, Homo sapien
taatgctattagatggcttcacata

SEQ ID NO: 1662314 - DNA, 25 bp, Homo sapien
cgtccgatttcccagtggattcgaa

SEQ ID NO: 1662315 - DNA, 25 bp, Homo sapien
tgctgtgtgagcatcataatcacgt

SEQ ID NO: 1662316 - DNA, 25 bp, Homo sapien
aggattaagcggtttctggccaaca

SEQ ID NO: 1662317 - DNA, 25 bp, Homo sapien
ctggcaataaaatcaggtccaactt

SEQ ID NO: 1662318 - DNA, 25 bp, Homo sapien
ttttgttacactgtcagcccactgg

SEQ ID NO: 1662319 - DNA, 25 bp, Homo sapien
tgaggtcgccctactgtgtaactgg

SEQ ID NO: 1662320 - DNA, 25 bp, Homo sapien
gcacctatgtaagagaaactttaag

SEQ ID NO: 1662321 - DNA, 25 bp, Homo sapien
ggagccaatgcaaccggccaaggat

SEQ ID NO: 1662322 - DNA, 25 bp, Homo sapien
tctcgcctccaaagcccgaaaaata

SEQ ID NO: 1662323 - DNA, 25 bp, Homo sapien
tccaaagcccgaaaaatagagtcgc

SEQ ID NO: 1662324 - DNA, 25 bp, Homo sapien
cgaaaaatagagtcgctgggagcga

SEQ ID NO: 1662325 - DNA, 25 bp, Homo sapien
tcagccttcctgaccgctctcgcct

SEQ ID NO: 1662326 - DNA, 25 bp, Homo sapien
ctgtgttgtattaagtctgcactcc

SEQ ID NO: 1662327 - DNA, 25 bp, Homo sapien
cggcacttccgtacctgggacgtgg

SEQ ID NO: 1662328 - DNA, 25 bp, Homo sapien
aggcctggctttagtcctgtgcgca

SEQ ID NO: 1662329 - DNA, 25 bp, Homo sapien
gatcccgtggagtgaaggtcgcacc

SEQ ID NO: 1662330 - DNA, 25 bp, Homo sapien
gaggactctatacagagacgtgatg

SEQ ID NO: 1662331 - DNA, 25 bp, Homo sapien
tgctcagaggactctatacagagac

SEQ ID NO: 1662332 - DNA, 25 bp, Homo sapien
cagaggactctatacagagacgtga

SEQ ID NO: 1662333 - DNA, 25 bp, Homo sapien
accctgctcagaggactctatacag

SEQ ID NO: 1662334 - DNA, 25 bp, Homo sapien
cagagcaaattgagacgtccgggtg

SEQ ID NO: 1662335 - DNA, 25 bp, Homo sapien
tgcagacacctcctgtagcgaaact

SEQ ID NO: 1662336 - DNA, 25 bp, Homo sapien
tttgagtttaaagtcgccctgaggc

SEQ ID NO: 1662337 - DNA, 25 bp, Homo sapien
ggtcttttctgcagtagggccgtgc

SEQ ID NO: 1662338 - DNA, 25 bp, Homo sapien
gcttctcacttatcagacggggtgg

SEQ ID NO: 1662339 - DNA, 25 bp, Homo sapien
gggcttctcacttatcagacggggt

SEQ ID NO: 1662340 - DNA, 25 bp, Homo sapien
ctttccagactggacagccaggcag

SEQ ID NO: 1662341 - DNA, 25 bp, Homo sapien
tctcacttatcagacggggtggctg

SEQ ID NO: 1662342 - DNA, 25 bp, Homo sapien
ttgaggatcacaacttgaaacacac

SEQ ID NO: 1662343 - DNA, 25 bp, Homo sapien
tgtggcaaagtctttcatcagaagc

SEQ ID NO: 1662344 - DNA, 25 bp, Homo sapien
tgtttaaggagacatcacgtaaccc

SEQ ID NO: 1662345 - DNA, 25 bp, Homo sapien
gaagcaataccttgcatggcaccat

SEQ ID NO: 1662346 - DNA, 25 bp, Homo sapien
tgtggtcaggcaacctgagtccagt

SEQ ID NO: 1662347 - DNA, 25 bp, Homo sapien
aaacagtacctttatctcagtagga

SEQ ID NO: 1662348 - DNA, 25 bp, Homo sapien
gagtccagtggaatgcaggtgcaac

SEQ ID NO: 1662349 - DNA, 25 bp, Homo sapien
tttttgaaggacttgggagctctct

SEQ ID NO: 1662350 - DNA, 25 bp, Homo sapien
tgttgttaacacatgacatctgtga

SEQ ID NO: 1662351 - DNA, 25 bp, Homo sapien
taatcaaggacatgctattgtgggt

SEQ ID NO: 1662352 - DNA, 25 bp, Homo sapien
caatagaaactgtagcctagccatc

SEQ ID NO: 1662353 - DNA, 25 bp, Homo sapien
taaactctcctttttggaccaggca

SEQ ID NO: 1662354 - DNA, 25 bp, Homo sapien
tgggtccggccctccactatgaatt

SEQ ID NO: 1662355 - DNA, 25 bp, Homo sapien
aggatgcatcttagattagtaacct

SEQ ID NO: 1662356 - DNA, 25 bp, Homo sapien
ggatgcatcttagattagtaacctt

SEQ ID NO: 1662357 - DNA, 25 bp, Homo sapien
atgagtcactgggtccggccctcca

SEQ ID NO: 1662358 - DNA, 25 bp, Homo sapien
tttggcctgcggaaaatctctatca

SEQ ID NO: 1662359 - DNA, 25 bp, Homo sapien
aaaagtttttgatgcctagtgagac

SEQ ID NO: 1662360 - DNA, 25 bp, Homo sapien
tgtgagaattgtgccagaagacctt

SEQ ID NO: 1662361 - DNA, 25 bp, Homo sapien
gagtggatctctcacgacaaaatca

SEQ ID NO: 1662362 - DNA, 25 bp, Homo sapien
gctaacggttattaagccttgaaca

SEQ ID NO: 1662363 - DNA, 25 bp, Homo sapien
tggtctagctaacggttattaagcc

SEQ ID NO: 1662364 - DNA, 25 bp, Homo sapien
ctctatggtctagctaacggttatt

SEQ ID NO: 1662365 - DNA, 25 bp, Homo sapien
aaagtttctgtcctctatggtctag

SEQ ID NO: 1662366 - DNA, 25 bp, Homo sapien
gctttaatgctaactgaacactctg

SEQ ID NO: 1662367 - DNA, 25 bp, Homo sapien
aatgctaactgaacactctgccaca

SEQ ID NO: 1662368 - DNA, 25 bp, Homo sapien
caaggctttaatgctaactgaacac

SEQ ID NO: 1662369 - DNA, 25 bp, Homo sapien
tcttacaaggctttaatgctaactg

SEQ ID NO: 1662370 - DNA, 25 bp, Homo sapien
tctccagtgtggatcgcatgatgat

SEQ ID NO: 1662371 - DNA, 25 bp, Homo sapien
tgatgattagtgaggcttgaacgca

SEQ ID NO: 1662372 - DNA, 25 bp, Homo sapien
gatgagtttagaccgaagaccttcc

SEQ ID NO: 1662373 - DNA, 25 bp, Homo sapien
gaattgtcgcggaagagtttgccac

SEQ ID NO: 1662374 - DNA, 25 bp, Homo sapien
cggcatgaattatcagatgttgggc

SEQ ID NO: 1662375 - DNA, 25 bp, Homo sapien
gaattatcagatgttgggcaaggta

SEQ ID NO: 1662376 - DNA, 25 bp, Homo sapien
tgggcaaggtatgaattgcgactga

SEQ ID NO: 1662377 - DNA, 25 bp, Homo sapien
tgttgggcaaggtatgaattgcgac

SEQ ID NO: 1662378 - DNA, 25 bp, Homo sapien
ccagtgatttactagggatgacttg

SEQ ID NO: 1662379 - DNA, 25 bp, Homo sapien
caaggtgtgaaatatgatggaagac

SEQ ID NO: 1662380 - DNA, 25 bp, Homo sapien
tgttgtgcaaggtgtgaaatatgat

SEQ ID NO: 1662381 - DNA, 25 bp, Homo sapien
tgtgaaatatgatggaagacctttc

SEQ ID NO: 1662382 - DNA, 25 bp, Homo sapien
tgcaaggtgtgaaatatgatggaag

SEQ ID NO: 1662383 - DNA, 25 bp, Homo sapien
tgttgtacaaggtaggaattgcgac

SEQ ID NO: 1662384 - DNA, 25 bp, Homo sapien
ccagtatgaatgatcagatgttgta

SEQ ID NO: 1662385 - DNA, 25 bp, Homo sapien
acaaggtaggaattgcgactgaaca

SEQ ID NO: 1662386 - DNA, 25 bp, Homo sapien
tgatcagatgttgtacaaggtagga

SEQ ID NO: 1662387 - DNA, 25 bp, Homo sapien
ctgtgcaaggtgtgacatattatgg

SEQ ID NO: 1662388 - DNA, 25 bp, Homo sapien
gaaactaaggaactactgttgacag

SEQ ID NO: 1662389 - DNA, 25 bp, Homo sapien
gatgtatagtaaaatgtaagccttg

SEQ ID NO: 1662390 - DNA, 25 bp, Homo sapien
ttgacagtagaagaaatacgttggg

SEQ ID NO: 1662391 - DNA, 25 bp, Homo sapien
ttgccacgctcactacatttgtagt

SEQ ID NO: 1662392 - DNA, 25 bp, Homo sapien
ctgcgggtttaatccaagctgattt

SEQ ID NO: 1662393 - DNA, 25 bp, Homo sapien
aacaggctgcttttgtgcatcatcc

SEQ ID NO: 1662394 - DNA, 25 bp, Homo sapien
tccaagctgatttttaacaggctgc

SEQ ID NO: 1662395 - DNA, 25 bp, Homo sapien
ttgtgcatcatcctttctcccatgc

SEQ ID NO: 1662396 - DNA, 25 bp, Homo sapien
ggtcacacgcactcgcttataatgt

SEQ ID NO: 1662397 - DNA, 25 bp, Homo sapien
gagactttccttataggtcacacgc

SEQ ID NO: 1662398 - DNA, 25 bp, Homo sapien
cttataggtcacacgcactcgctta

SEQ ID NO: 1662399 - DNA, 25 bp, Homo sapien
tcttctaccaatgagactttcctta

SEQ ID NO: 1662400 - DNA, 25 bp, Homo sapien
catgtttccacagacactgagagtc

SEQ ID NO: 1662401 - DNA, 25 bp, Homo sapien
ccaacattactgtctggaatatttc

SEQ ID NO: 1662402 - DNA, 25 bp, Homo sapien
aatatttctcctgtattactctcct

SEQ ID NO: 1662403 - DNA, 25 bp, Homo sapien
aaaatcttgtatgtcgtggctttca

SEQ ID NO: 1662404 - DNA, 25 bp, Homo sapien
ccgagattgtgccactgcactccag

SEQ ID NO: 1662405 - DNA, 25 bp, Homo sapien
cggaggtggtggtgagccgagattg

SEQ ID NO: 1662406 - DNA, 25 bp, Homo sapien
ggagaatcgcttgaacccgggaggc

SEQ ID NO: 1662407 - DNA, 25 bp, Homo sapien
tccagcaacttctgaggctgaggcg

SEQ ID NO: 1662408 - DNA, 25 bp, Homo sapien
caacacgacacgacatggcaaatag

SEQ ID NO: 1662409 - DNA, 25 bp, Homo sapien
caacatagagcagggcctatcaggg

SEQ ID NO: 1662410 - DNA, 25 bp, Homo sapien
gagggagaacattgggaaagatacc

SEQ ID NO: 1662411 - DNA, 25 bp, Homo sapien
gacaaacctgcacaacacgacacga

SEQ ID NO: 1662412 - DNA, 25 bp, Homo sapien
tatgtccaccatcgtacagagcaga

SEQ ID NO: 1662413 - DNA, 25 bp, Homo sapien
cagagcagacatcggtttaggctgt

SEQ ID NO: 1662414 - DNA, 25 bp, Homo sapien
tagacagcggtatgtccaccatcgt

SEQ ID NO: 1662415 - DNA, 25 bp, Homo sapien
catgtcacttggtaatccttcctag

SEQ ID NO: 1662416 - DNA, 25 bp, Homo sapien
tagcatggggactgagtactgtgga

SEQ ID NO: 1662417 - DNA, 25 bp, Homo sapien
taagcaagtgtctttccttacatgg

SEQ ID NO: 1662418 - DNA, 25 bp, Homo sapien
ccttacatggtgagagtagcatggg

SEQ ID NO: 1662419 - DNA, 25 bp, Homo sapien
agtactgtggatattgaggtggtca

SEQ ID NO: 1662420 - DNA, 25 bp, Homo sapien
ggttacagtgaaccgagatcgtgtc

SEQ ID NO: 1662421 - DNA, 25 bp, Homo sapien
acagtgaaccgagatcgtgtcactg

SEQ ID NO: 1662422 - DNA, 25 bp, Homo sapien
aagtcaggagttcaaacacagcctg

SEQ ID NO: 1662423 - DNA, 25 bp, Homo sapien
gcatggtggcatgtgactgcagtcc

SEQ ID NO: 1662424 - DNA, 25 bp, Homo sapien
cttaccttagcctttctagtacctg

SEQ ID NO: 1662425 - DNA, 25 bp, Homo sapien
aggttcaggtgataatcttacctta

SEQ ID NO: 1662426 - DNA, 25 bp, Homo sapien
ccaggttcaggtgataatcttacct

SEQ ID NO: 1662427 - DNA, 25 bp, Homo sapien
ataatcttaccttagcctttctagt

SEQ ID NO: 1662428 - DNA, 25 bp, Homo sapien
tgagctatcatgaagaacgcagaac

SEQ ID NO: 1662429 - DNA, 25 bp, Homo sapien
ttgccagccataaggttttaagcct

SEQ ID NO: 1662430 - DNA, 25 bp, Homo sapien
tttacttctggaacccccactgagc

SEQ ID NO: 1662431 - DNA, 25 bp, Homo sapien
tgaagtgatccacaagctttggcct

SEQ ID NO: 1662432 - DNA, 25 bp, Homo sapien
tttagtcaagcaaggatgcaactcc

SEQ ID NO: 1662433 - DNA, 25 bp, Homo sapien
aaagtccagatgctacatcatgaag

SEQ ID NO: 1662434 - DNA, 25 bp, Homo sapien
ggacagtgaaagtccagatgctaca

SEQ ID NO: 1662435 - DNA, 25 bp, Homo sapien
tccattttagtcaagcaaggatgca

SEQ ID NO: 1662436 - DNA, 25 bp, Homo sapien
agaccaggttcctataattctccaa

SEQ ID NO: 1662437 - DNA, 25 bp, Homo sapien
tcacatctctgtatagagtcctctg

SEQ ID NO: 1662438 - DNA, 25 bp, Homo sapien
catctctgtatagagtcctctgagc

SEQ ID NO: 1662439 - DNA, 25 bp, Homo sapien
cagggagaccaggttcctataattc

SEQ ID NO: 1662440 - DNA, 25 bp, Homo sapien
gccatgactcagattgggggacctc

SEQ ID NO: 1662441 - DNA, 25 bp, Homo sapien
tcgggcgccggtcacggagtaggga

SEQ ID NO: 1662442 - DNA, 25 bp, Homo sapien
ggagatcaatcgctgtcctcctgct

SEQ ID NO: 1662443 - DNA, 25 bp, Homo sapien
agaggtgtcagaccacacagggacg

SEQ ID NO: 1662444 - DNA, 25 bp, Homo sapien
ggaagaaccattcctgacgcctttg

SEQ ID NO: 1662445 - DNA, 25 bp, Homo sapien
gaaccattcctgacgcctttgcttt

SEQ ID NO: 1662446 - DNA, 25 bp, Homo sapien
gaagaaccattcctgacgcctttgc

SEQ ID NO: 1662447 - DNA, 25 bp, Homo sapien
tgaggaagaaccattcctgacgcct

SEQ ID NO: 1662448 - DNA, 25 bp, Homo sapien
attgctcagaatcaatacaccccat

SEQ ID NO: 1662449 - DNA, 25 bp, Homo sapien
tgctcagaatcaatacaccccattc

SEQ ID NO: 1662450 - DNA, 25 bp, Homo sapien
tattgctcagaatcaatacacccca

SEQ ID NO: 1662451 - DNA, 25 bp, Homo sapien
ttgctcagaatcaatacaccccatt

SEQ ID NO: 1662452 - DNA, 25 bp, Homo sapien
gccaggcatgaaggtacacgtctgt

SEQ ID NO: 1662453 - DNA, 25 bp, Homo sapien
aaaaaactatgtagaccacgtgcgg

SEQ ID NO: 1662454 - DNA, 25 bp, Homo sapien
ggtgcacactatcatgcccggttgt

SEQ ID NO: 1662455 - DNA, 25 bp, Homo sapien
ttctggaggagtccacacacgctgc

SEQ ID NO: 1662456 - DNA, 25 bp, Homo sapien
gctgtctcttgacaaatccatcacc

SEQ ID NO: 1662457 - DNA, 25 bp, Homo sapien
tctgtacatctaggtttctctacgt

SEQ ID NO: 1662458 - DNA, 25 bp, Homo sapien
ctctctgtacatctaggtttctcta

SEQ ID NO: 1662459 - DNA, 25 bp, Homo sapien
tacatctaggtttctctacgtttct

SEQ ID NO: 1662460 - DNA, 25 bp, Homo sapien
tactttgccctctgttatgggtctt

SEQ ID NO: 1662461 - DNA, 25 bp, Homo sapien
ctctactttgccctctgttatgggt

SEQ ID NO: 1662462 - DNA, 25 bp, Homo sapien
tctactttgccctctgttatgggtc

SEQ ID NO: 1662463 - DNA, 25 bp, Homo sapien
ctttgccctctgttatgggtctttc

SEQ ID NO: 1662464 - DNA, 25 bp, Homo sapien
catcccggaggagctcgttttccgg

SEQ ID NO: 1662465 - DNA, 25 bp, Homo sapien
tcccaatgcctttggccgacacaat

SEQ ID NO: 1662466 - DNA, 25 bp, Homo sapien
tgtctcccaatgcctttggccgaca

SEQ ID NO: 1662467 - DNA, 25 bp, Homo sapien
gcatcccggaggagctcgttttccg

SEQ ID NO: 1662468 - DNA, 25 bp, Homo sapien
aggcaaagtacgcggcctccctggg

SEQ ID NO: 1662469 - DNA, 25 bp, Homo sapien
ttcaggggaagaggtgactgtggag

SEQ ID NO: 1662470 - DNA, 25 bp, Homo sapien
gcaaagtacgcggcctccctgggac

SEQ ID NO: 1662471 - DNA, 25 bp, Homo sapien
ccaggaccaggcaaagtacgcggcc

SEQ ID NO: 1662472 - DNA, 25 bp, Homo sapien
actccacataatccgcttccgggtt

SEQ ID NO: 1662473 - DNA, 25 bp, Homo sapien
taactttcactccacataatccgct

SEQ ID NO: 1662474 - DNA, 25 bp, Homo sapien
gccacggtgtaactttcactccaca

SEQ ID NO: 1662475 - DNA, 25 bp, Homo sapien
catgtgcgcgcgcagtacagaagcc

SEQ ID NO: 1662476 - DNA, 25 bp, Homo sapien
tagttgacattacagacgcgcacaa

SEQ ID NO: 1662477 - DNA, 25 bp, Homo sapien
caagcccagtgcataggttgcagca

SEQ ID NO: 1662478 - DNA, 25 bp, Homo sapien
tccaaataaatgagatcggcgttcc

SEQ ID NO: 1662479 - DNA, 25 bp, Homo sapien
gttttacaacatagcgacgcgtgcc

SEQ ID NO: 1662480 - DNA, 25 bp, Homo sapien
tctgaaacactaacttgaaatgggc

SEQ ID NO: 1662481 - DNA, 25 bp, Homo sapien
gagcgtctgcctcaagaacatagca

SEQ ID NO: 1662482 - DNA, 25 bp, Homo sapien
tcatggtccacagagtcctaagcag

SEQ ID NO: 1662483 - DNA, 25 bp, Homo sapien
cagaactcggaggatttagtccagg

SEQ ID NO: 1662484 - DNA, 25 bp, Homo sapien
tgtacagagggacgggttctgtccc

SEQ ID NO: 1662485 - DNA, 25 bp, Homo sapien
aaagaccgggtatctccatgtcggt

SEQ ID NO: 1662486 - DNA, 25 bp, Homo sapien
aacgggaggcaagtttgtctgacac

SEQ ID NO: 1662487 - DNA, 25 bp, Homo sapien
gagcttgaggcttccagtttgtgag

SEQ ID NO: 1662488 - DNA, 25 bp, Homo sapien
ctgacaggcagaggaatcttcagat

SEQ ID NO: 1662489 - DNA, 25 bp, Homo sapien
ggtgggagggcatgggagacatctc

SEQ ID NO: 1662490 - DNA, 25 bp, Homo sapien
gagggcatgggagacatctctgagc

SEQ ID NO: 1662491 - DNA, 25 bp, Homo sapien
acaggcagaggaatcttcagatggg

SEQ ID NO: 1662492 - DNA, 25 bp, Homo sapien
gagcagggacaataacctgagacag

SEQ ID NO: 1662493 - DNA, 25 bp, Homo sapien
gtcatgagatgagggcaagttccca

SEQ ID NO: 1662494 - DNA, 25 bp, Homo sapien
tagtcatgagatgagggcaagttcc

SEQ ID NO: 1662495 - DNA, 25 bp, Homo sapien
gtcatcatttaggtacatagtgtaa

SEQ ID NO: 1662496 - DNA, 25 bp, Homo sapien
gaattcttacatgtgggcctggaag

SEQ ID NO: 1662497 - DNA, 25 bp, Homo sapien
ggtctagcccctcatctgcaagttg

SEQ ID NO: 1662498 - DNA, 25 bp, Homo sapien
aagaagtgtcttccacatacctggg

SEQ ID NO: 1662499 - DNA, 25 bp, Homo sapien
atcaagaatacatgggtggccgggt

SEQ ID NO: 1662500 - DNA, 25 bp, Homo sapien
tctccctcactctgatgagcctccc

SEQ ID NO: 1662501 - DNA, 25 bp, Homo sapien
cctgttatacccctctgtacccact

SEQ ID NO: 1662502 - DNA, 25 bp, Homo sapien
tctgatgagcctccctttttgctgc

SEQ ID NO: 1662503 - DNA, 25 bp, Homo sapien
tctggcaccctagattcccagctgt

SEQ ID NO: 1662504 - DNA, 25 bp, Homo sapien
tcctgagatgagatcaacctgctgc

SEQ ID NO: 1662505 - DNA, 25 bp, Homo sapien
tacggagtctgaccagtctatgcac

SEQ ID NO: 1662506 - DNA, 25 bp, Homo sapien
tgcaggtgttgtgccttagatccac

SEQ ID NO: 1662507 - DNA, 25 bp, Homo sapien
ctgctgctaaagaagactgcctgct

SEQ ID NO: 1662508 - DNA, 25 bp, Homo sapien
tgcttcaaacctggctttcgcagca

SEQ ID NO: 1662509 - DNA, 25 bp, Homo sapien
gcccacacacggttgttcttcagca

SEQ ID NO: 1662510 - DNA, 25 bp, Homo sapien
cagacagggttgaaggcccacacac

SEQ ID NO: 1662511 - DNA, 25 bp, Homo sapien
tgttcttcagcactcgaggctgaca

SEQ ID NO: 1662512 - DNA, 25 bp, Homo sapien
ccaaaacgttcccattgtagaccag

SEQ ID NO: 1662513 - DNA, 25 bp, Homo sapien
tcctcaatgggataacgacacagtc

SEQ ID NO: 1662514 - DNA, 25 bp, Homo sapien
tgagccggtatgacacatctgacaa

SEQ ID NO: 1662515 - DNA, 25 bp, Homo sapien
tagaccagaaattcccgacccaaga

SEQ ID NO: 1662516 - DNA, 25 bp, Homo sapien
tttctaatagactcaggagcttccc

SEQ ID NO: 1662517 - DNA, 25 bp, Homo sapien
tgaaacccgatcaaccaatgttaaa

SEQ ID NO: 1662518 - DNA, 25 bp, Homo sapien
tggcacccagccgaacttattactt

SEQ ID NO: 1662519 - DNA, 25 bp, Homo sapien
tttttgctacttcctaaggctggga

SEQ ID NO: 1662520 - DNA, 25 bp, Homo sapien
ccttctgggcatgtcctttagctga

SEQ ID NO: 1662521 - DNA, 25 bp, Homo sapien
tctgggtgaaaacaacaatactgct

SEQ ID NO: 1662522 - DNA, 25 bp, Homo sapien
aaactggttcaggtctgttggccca

SEQ ID NO: 1662523 - DNA, 25 bp, Homo sapien
gctggacagtcttaccccaaggatt

SEQ ID NO: 1662524 - DNA, 25 bp, Homo sapien
tttccctataccatggattgcttga

SEQ ID NO: 1662525 - DNA, 25 bp, Homo sapien
agtttccctataccatggattgctt

SEQ ID NO: 1662526 - DNA, 25 bp, Homo sapien
gtttccctataccatggattgcttg

SEQ ID NO: 1662527 - DNA, 25 bp, Homo sapien
aagtttccctataccatggattgct

SEQ ID NO: 1662528 - DNA, 25 bp, Homo sapien
atgacgtctacgatgccctacaagg

SEQ ID NO: 1662529 - DNA, 25 bp, Homo sapien
gaactctgttatggcgtgaaaggca

SEQ ID NO: 1662530 - DNA, 25 bp, Homo sapien
gatggcccacaagggatgacttctg

SEQ ID NO: 1662531 - DNA, 25 bp, Homo sapien
gacttgtgaccgaaggtcttggaac

SEQ ID NO: 1662532 - DNA, 25 bp, Homo sapien
acttctcctgtattaccgtgccctg

SEQ ID NO: 1662533 - DNA, 25 bp, Homo sapien
tctcctgtattaccgtgccctgttg

SEQ ID NO: 1662534 - DNA, 25 bp, Homo sapien
cctgtgtggatcacttctcctgtat

SEQ ID NO: 1662535 - DNA, 25 bp, Homo sapien
cctgtattaccgtgccctgttgatg

SEQ ID NO: 1662536 - DNA, 25 bp, Homo sapien
tgcttagagcaggatgacgttcaat

SEQ ID NO: 1662537 - DNA, 25 bp, Homo sapien
gacaggaggatcatcactgcagaaa

SEQ ID NO: 1662538 - DNA, 25 bp, Homo sapien
tggaaacacttgtcagtcactgtca

SEQ ID NO: 1662539 - DNA, 25 bp, Homo sapien
gacaattctgctcagggctaccagg

SEQ ID NO: 1662540 - DNA, 25 bp, Homo sapien
gccacatccctgaaagtcaagcatc

SEQ ID NO: 1662541 - DNA, 25 bp, Homo sapien
aacatcacggccctgtataaagccc

SEQ ID NO: 1662542 - DNA, 25 bp, Homo sapien
taaagccctctgtgcagggttcagg

SEQ ID NO: 1662543 - DNA, 25 bp, Homo sapien
gttctccaacatcacggccctgtat

SEQ ID NO: 1662544 - DNA, 25 bp, Homo sapien
ggtcttcttggtggctttctcatgt

SEQ ID NO: 1662545 - DNA, 25 bp, Homo sapien
gtcttcttggtggctttctcatgta

SEQ ID NO: 1662546 - DNA, 25 bp, Homo sapien
aaacacacatttccacaaaacatca

SEQ ID NO: 1662547 - DNA, 25 bp, Homo sapien
tgaaagtaaaatgtccctaaaatga

SEQ ID NO: 1662548 - DNA, 25 bp, Homo sapien
gctctcccacatcacttccctgtat

SEQ ID NO: 1662549 - DNA, 25 bp, Homo sapien
taaaatgtccctaaaatgaaacaca

SEQ ID NO: 1662550 - DNA, 25 bp, Homo sapien
caaggaaaagccagtagagcatcat

SEQ ID NO: 1662551 - DNA, 25 bp, Homo sapien
gcaaggaaaagccagtagagcatca

SEQ ID NO: 1662552 - DNA, 25 bp, Homo sapien
ggcaaggaaaagccagtagagcatc

SEQ ID NO: 1662553 - DNA, 25 bp, Homo sapien
gctcagctttttggatatgaatcca

SEQ ID NO: 1662554 - DNA, 25 bp, Homo sapien
aacacaaatatttccgcctcttctc

SEQ ID NO: 1662555 - DNA, 25 bp, Homo sapien
gtttctctcatattggtctctccat

SEQ ID NO: 1662556 - DNA, 25 bp, Homo sapien
gagccagtgcgtacctaaaataaac

SEQ ID NO: 1662557 - DNA, 25 bp, Homo sapien
acgcgatccgcttccagatttgcga

SEQ ID NO: 1662558 - DNA, 25 bp, Homo sapien
cgcgatccgcttccagatttgcgag

SEQ ID NO: 1662559 - DNA, 25 bp, Homo sapien
cagaagccaggcctcggcgggcccc

SEQ ID NO: 1662560 - DNA, 25 bp, Homo sapien
aggcctcggcgggccccgcgaggtg

SEQ ID NO: 1662561 - DNA, 25 bp, Homo sapien
gcgcgcaggacagaagccaggcctc

SEQ ID NO: 1662562 - DNA, 25 bp, Homo sapien
cccgcgaggtggtgggcggggcctg

SEQ ID NO: 1662563 - DNA, 25 bp, Homo sapien
tatctgtaggaatgcaggcatgctc

SEQ ID NO: 1662564 - DNA, 25 bp, Homo sapien
gccactatggcactctttatacaga

SEQ ID NO: 1662565 - DNA, 25 bp, Homo sapien
gagaaaaattgcaaaggacccacat

SEQ ID NO: 1662566 - DNA, 25 bp, Homo sapien
tcctagaggaagcaatcaccctttc

SEQ ID NO: 1662567 - DNA, 25 bp, Homo sapien
tgtcattcagccaatttccaatgca

SEQ ID NO: 1662568 - DNA, 25 bp, Homo sapien
cattcagccaatttccaatgcagat

SEQ ID NO: 1662569 - DNA, 25 bp, Homo sapien
cagccaatttccaatgcagatgtca

SEQ ID NO: 1662570 - DNA, 25 bp, Homo sapien
gcagatgtcaaagagcaagctagcc

SEQ ID NO: 1662571 - DNA, 25 bp, Homo sapien
gatatttttacagttgcttcaggct

SEQ ID NO: 1662572 - DNA, 25 bp, Homo sapien
agccctgacgaaaccccacgcagag

SEQ ID NO: 1662573 - DNA, 25 bp, Homo sapien
agacctcaccctgaggaaatagtgc

SEQ ID NO: 1662574 - DNA, 25 bp, Homo sapien
cctgaggaaatagtgccccctgctg

SEQ ID NO: 1662575 - DNA, 25 bp, Homo sapien
ctcatcgccaagttccaaggaggct

SEQ ID NO: 1662576 - DNA, 25 bp, Homo sapien
gcttttctggtgtagcccctcatcg

SEQ ID NO: 1662577 - DNA, 25 bp, Homo sapien
tcatttcaggggtcaaagtcactag

SEQ ID NO: 1662578 - DNA, 25 bp, Homo sapien
tcaaagtcactagggttgagctttt

SEQ ID NO: 1662579 - DNA, 25 bp, Homo sapien
gaggccattgactcctgacagtttg

SEQ ID NO: 1662580 - DNA, 25 bp, Homo sapien
gacgttgtagtgacaccagatcgca

SEQ ID NO: 1662581 - DNA, 25 bp, Homo sapien
gacaatgcaaaaacctagccaggag

SEQ ID NO: 1662582 - DNA, 25 bp, Homo sapien
tgagccaccacgtaccgaggctttg

SEQ ID NO: 1662583 - DNA, 25 bp, Homo sapien
gatatatccctttcaaaaagtacta

SEQ ID NO: 1662584 - DNA, 25 bp, Homo sapien
taaaaattactatgatatatccctt

SEQ ID NO: 1662585 - DNA, 25 bp, Homo sapien
aattactatgatatatccctttcaa

SEQ ID NO: 1662586 - DNA, 25 bp, Homo sapien
actatgatatatccctttcaaaaag

SEQ ID NO: 1662587 - DNA, 25 bp, Homo sapien
catttcattgggaacggttatctca

SEQ ID NO: 1662588 - DNA, 25 bp, Homo sapien
tgagttcaccgatgacctgcaatat

SEQ ID NO: 1662589 - DNA, 25 bp, Homo sapien
cctgcaatatgtgaacgatctctga

SEQ ID NO: 1662590 - DNA, 25 bp, Homo sapien
atactcatttcattgggaacggtta

SEQ ID NO: 1662591 - DNA, 25 bp, Homo sapien
atcattacattagtcaagtttccct

SEQ ID NO: 1662592 - DNA, 25 bp, Homo sapien
ctttgtgacaatcattacattagtc

SEQ ID NO: 1662593 - DNA, 25 bp, Homo sapien
gacaatcattacattagtcaagttt

SEQ ID NO: 1662594 - DNA, 25 bp, Homo sapien
cattacattagtcaagtttccctac

SEQ ID NO: 1662595 - DNA, 25 bp, Homo sapien
gtgaatcactcccaagtcttgtcag

SEQ ID NO: 1662596 - DNA, 25 bp, Homo sapien
tgaagtccagtatgttgttccaggt

SEQ ID NO: 1662597 - DNA, 25 bp, Homo sapien
gaatcactcccaagtcttgtcagaa

SEQ ID NO: 1662598 - DNA, 25 bp, Homo sapien
gtgtgaagtccagtatgttgttcca

SEQ ID NO: 1662599 - DNA, 25 bp, Homo sapien
gatttccaaatggaaactttgtcac

SEQ ID NO: 1662600 - DNA, 25 bp, Homo sapien
ctttaaggtgtgatttccaaatgga

SEQ ID NO: 1662601 - DNA, 25 bp, Homo sapien
ttccaaatggaaactttgtcacatg

SEQ ID NO: 1662602 - DNA, 25 bp, Homo sapien
tttaaggtgtgatttccaaatggaa

SEQ ID NO: 1662603 - DNA, 25 bp, Homo sapien
tatgtcttgacaggagtgaattacg

SEQ ID NO: 1662604 - DNA, 25 bp, Homo sapien
cttgacaggagtgaattacgcacga

SEQ ID NO: 1662605 - DNA, 25 bp, Homo sapien
gtgtgaattctggtatgtcttgaca

SEQ ID NO: 1662606 - DNA, 25 bp, Homo sapien
tctggtatgtcttgacaggagtgaa

SEQ ID NO: 1662607 - DNA, 25 bp, Homo sapien
accactatgaactctatgatggcat

SEQ ID NO: 1662608 - DNA, 25 bp, Homo sapien
atgaagggatgacctgcgactgaag

SEQ ID NO: 1662609 - DNA, 25 bp, Homo sapien
caaggtatgacctgtgactgaaggt

SEQ ID NO: 1662610 - DNA, 25 bp, Homo sapien
tgaagtctacgatggcaatgaaggg

SEQ ID NO: 1662611 - DNA, 25 bp, Homo sapien
gtctcaaggcttgatttacgactga

SEQ ID NO: 1662612 - DNA, 25 bp, Homo sapien
gccagttgtgaactccacacaaaag

SEQ ID NO: 1662613 - DNA, 25 bp, Homo sapien
caattgccttatcaattagaagggc

SEQ ID NO: 1662614 - DNA, 25 bp, Homo sapien
ttgaaactgagggagcatcattagt

SEQ ID NO: 1662615 - DNA, 25 bp, Homo sapien
gccttgccctgttgacaagacctcc

SEQ ID NO: 1662616 - DNA, 25 bp, Homo sapien
tgccctgttgacaagacctccttca

SEQ ID NO: 1662617 - DNA, 25 bp, Homo sapien
ctgttgacaagacctccttcatcat

SEQ ID NO: 1662618 - DNA, 25 bp, Homo sapien
cttgccctgttgacaagacctcctt

SEQ ID NO: 1662619 - DNA, 25 bp, Homo sapien
gctgaagcacaagaatcacttaaac

SEQ ID NO: 1662620 - DNA, 25 bp, Homo sapien
ggctgaagcacaagaatcacttaaa

SEQ ID NO: 1662621 - DNA, 25 bp, Homo sapien
aggctgaagcacaagaatcacttaa

SEQ ID NO: 1662622 - DNA, 25 bp, Homo sapien
gtcacccgggatggagtaagtggtg

SEQ ID NO: 1662623 - DNA, 25 bp, Homo sapien
acccgggatggagtaagtggtgcaa

SEQ ID NO: 1662624 - DNA, 25 bp, Homo sapien
tctgtcacccgggatggagtaagtg

SEQ ID NO: 1662625 - DNA, 25 bp, Homo sapien
ctctgtcacccgggatggagtaagt

SEQ ID NO: 1662626 - DNA, 25 bp, Homo sapien
ggaggttgcggtgaactcagattgt

SEQ ID NO: 1662627 - DNA, 25 bp, Homo sapien
gttgcggtgaactcagattgtgcca

SEQ ID NO: 1662628 - DNA, 25 bp, Homo sapien
gcggtgaactcagattgtgccattg

SEQ ID NO: 1662629 - DNA, 25 bp, Homo sapien
gtggaggttgcggtgaactcagatt

SEQ ID NO: 1662630 - DNA, 25 bp, Homo sapien
tgagccaagatagacaagagcagac

SEQ ID NO: 1662631 - DNA, 25 bp, Homo sapien
ctatagccacatcccggaaagtcaa

SEQ ID NO: 1662632 - DNA, 25 bp, Homo sapien
gccacatcccggaaagtcaagcgtc

SEQ ID NO: 1662633 - DNA, 25 bp, Homo sapien
tccctgtacaaagccctctgtgaag

SEQ ID NO: 1662634 - DNA, 25 bp, Homo sapien
cttccctgtacaaagccctctgtga

SEQ ID NO: 1662635 - DNA, 25 bp, Homo sapien
tctgagctgcttcctcacgtaacat

SEQ ID NO: 1662636 - DNA, 25 bp, Homo sapien
ctcttctgagctgcttcctcacgta

SEQ ID NO: 1662637 - DNA, 25 bp, Homo sapien
tgaggaagagccatgcctggctcct

SEQ ID NO: 1662638 - DNA, 25 bp, Homo sapien
ggaagagccatgcctggctcctttc

SEQ ID NO: 1662639 - DNA, 25 bp, Homo sapien
tcatccttcatcaattgccatccag

SEQ ID NO: 1662640 - DNA, 25 bp, Homo sapien
gcacagactcatccttcatcaattg

SEQ ID NO: 1662641 - DNA, 25 bp, Homo sapien
ttcatcaattgccatccagaggaca

SEQ ID NO: 1662642 - DNA, 25 bp, Homo sapien
cagactcatccttcatcaattgcca

SEQ ID NO: 1662643 - DNA, 25 bp, Homo sapien
tctgcatttccccctggacttctgc

SEQ ID NO: 1662644 - DNA, 25 bp, Homo sapien
cttttctgcatttccccctggactt

SEQ ID NO: 1662645 - DNA, 25 bp, Homo sapien
catttccccctggacttctgctcat

SEQ ID NO: 1662646 - DNA, 25 bp, Homo sapien
tgcatttccccctggacttctgctc

SEQ ID NO: 1662647 - DNA, 25 bp, Homo sapien
gtagggttacacattaacagcatct

SEQ ID NO: 1662648 - DNA, 25 bp, Homo sapien
gggtacacctgcagaaaggctgtca

SEQ ID NO: 1662649 - DNA, 25 bp, Homo sapien
ttggaagattgcacagcggccaggc

SEQ ID NO: 1662650 - DNA, 25 bp, Homo sapien
ggggtagggttacacattaacagca

SEQ ID NO: 1662651 - DNA, 25 bp, Homo sapien
cagcaggaaatcatgtaagcaaagc

SEQ ID NO: 1662652 - DNA, 25 bp, Homo sapien
tattctgtcccagggtactcgagac

SEQ ID NO: 1662653 - DNA, 25 bp, Homo sapien
gagggctatctctttcactaaccgt

SEQ ID NO: 1662654 - DNA, 25 bp, Homo sapien
tctgtaaacagaacatacgattggg

SEQ ID NO: 1662655 - DNA, 25 bp, Homo sapien
gctagactctgcttgcatgaccaca

SEQ ID NO: 1662656 - DNA, 25 bp, Homo sapien
gaggacttgaaaagcccttggtcac

SEQ ID NO: 1662657 - DNA, 25 bp, Homo sapien
agggtcagccaggaaaaactcttag

SEQ ID NO: 1662658 - DNA, 25 bp, Homo sapien
agctaactagcttcatcccgaggca

SEQ ID NO: 1662659 - DNA, 25 bp, Homo sapien
cctcccacctttttcatcaagcatt

SEQ ID NO: 1662660 - DNA, 25 bp, Homo sapien
tggtggcaaaaacagggctcactgc

SEQ ID NO: 1662661 - DNA, 25 bp, Homo sapien
ctcccacctttttcatcaagcattt

SEQ ID NO: 1662662 - DNA, 25 bp, Homo sapien
ggagtgtggtggcaaaaacagggct

SEQ ID NO: 1662663 - DNA, 25 bp, Homo sapien
cttctgatgtatgagttcaagtaaa

SEQ ID NO: 1662664 - DNA, 25 bp, Homo sapien
gtacagctgcatatcaccaggcaat

SEQ ID NO: 1662665 - DNA, 25 bp, Homo sapien
gcattgtccttcgttatctagtcaa

SEQ ID NO: 1662666 - DNA, 25 bp, Homo sapien
tgtatatatgcattgtccttcgtta

SEQ ID NO: 1662667 - DNA, 25 bp, Homo sapien
catgtcggagggtgcaattatgatg

SEQ ID NO: 1662668 - DNA, 25 bp, Homo sapien
ggcatatccctcaccaatcctctat

SEQ ID NO: 1662669 - DNA, 25 bp, Homo sapien
catatccctcaccaatcctctattt

SEQ ID NO: 1662670 - DNA, 25 bp, Homo sapien
gcatatccctcaccaatcctctatt

SEQ ID NO: 1662671 - DNA, 25 bp, Homo sapien
ggcccacacaatcgcaacacggttt

SEQ ID NO: 1662672 - DNA, 25 bp, Homo sapien
agaataccccgtgccgcaggacagg

SEQ ID NO: 1662673 - DNA, 25 bp, Homo sapien
ggagcgcattttccacgccctggag

SEQ ID NO: 1662674 - DNA, 25 bp, Homo sapien
tccccagtgcaggttcaatgaaagc

SEQ ID NO: 1662675 - DNA, 25 bp, Homo sapien
gcaggaaaactacgcaacagaaagt

SEQ ID NO: 1662676 - DNA, 25 bp, Homo sapien
cgcgacggcgccttaggaccaggat

SEQ ID NO: 1662677 - DNA, 25 bp, Homo sapien
caagaatccacatcgcgggtgaaga

SEQ ID NO: 1662678 - DNA, 25 bp, Homo sapien
ggcgcgaggagtcagaacaaggttt

SEQ ID NO: 1662679 - DNA, 25 bp, Homo sapien
cgcggcgatatgacctacactccac

SEQ ID NO: 1662680 - DNA, 25 bp, Homo sapien
ggcgatatgacctacactccacccg

SEQ ID NO: 1662681 - DNA, 25 bp, Homo sapien
gatatgacctacactccacccgatc

SEQ ID NO: 1662682 - DNA, 25 bp, Homo sapien
gcggcgatatgacctacactccacc

SEQ ID NO: 1662683 - DNA, 25 bp, Homo sapien
ctgatgttaggcatagattccagac

SEQ ID NO: 1662684 - DNA, 25 bp, Homo sapien
tgcttgctcaatcagtcactatcct

SEQ ID NO: 1662685 - DNA, 25 bp, Homo sapien
ctctccctgatcaccggtgcatgca

SEQ ID NO: 1662686 - DNA, 25 bp, Homo sapien
ccaggcctggatccgcctggcctaa

SEQ ID NO: 1662687 - DNA, 25 bp, Homo sapien
tgaaaacgggcaggaagcctccctg

SEQ ID NO: 1662688 - DNA, 25 bp, Homo sapien
caatcagaacccgggggatcgagtg

SEQ ID NO: 1662689 - DNA, 25 bp, Homo sapien
atcgagtgctggagatcaagaggat

SEQ ID NO: 1662690 - DNA, 25 bp, Homo sapien
aacccgggggatcgagtgctggaga

SEQ ID NO: 1662691 - DNA, 25 bp, Homo sapien
cccgacgcatcgctgccaggccccg

SEQ ID NO: 1662692 - DNA, 25 bp, Homo sapien
ctgaggagagagccccgacgcatcg

SEQ ID NO: 1662693 - DNA, 25 bp, Homo sapien
agagccccgacgcatcgctgccagg

SEQ ID NO: 1662694 - DNA, 25 bp, Homo sapien
ggagagagccccgacgcatcgctgc

SEQ ID NO: 1662695 - DNA, 25 bp, Homo sapien
atatttcacatgttatttctctgat

SEQ ID NO: 1662696 - DNA, 25 bp, Homo sapien
agatgtggcccctgaaccatccagg

SEQ ID NO: 1662697 - DNA, 25 bp, Homo sapien
tgttatttctctgatctggtccaca

SEQ ID NO: 1662698 - DNA, 25 bp, Homo sapien
tgtgcacattaacatatatatttca

SEQ ID NO: 1662699 - DNA, 25 bp, Homo sapien
catacagtgatttacatccaggcat

SEQ ID NO: 1662700 - DNA, 25 bp, Homo sapien
aactgactgatgattttggcctgga

SEQ ID NO: 1662701 - DNA, 25 bp, Homo sapien
cacagaaatggtgatcactgccatc

SEQ ID NO: 1662702 - DNA, 25 bp, Homo sapien
caggtcggtggctgtattcgatggg

SEQ ID NO: 1662703 - DNA, 25 bp, Homo sapien
gcctggcctgatctcccttttataa

SEQ ID NO: 1662704 - DNA, 25 bp, Homo sapien
ctggcctgatctcccttttataaag

SEQ ID NO: 1662705 - DNA, 25 bp, Homo sapien
ggattacttacatgagcctccgtgc

SEQ ID NO: 1662706 - DNA, 25 bp, Homo sapien
ctacgatggcaatgaaggtatgacc

SEQ ID NO: 1662707 - DNA, 25 bp, Homo sapien
tacgatggcaatgaaggtatgacct

SEQ ID NO: 1662708 - DNA, 25 bp, Homo sapien
ataagtgttgactgcttgctaaagg

SEQ ID NO: 1662709 - DNA, 25 bp, Homo sapien
tctgcgatggcttgcaaggtatgac

SEQ ID NO: 1662710 - DNA, 25 bp, Homo sapien
tatgtgtctcaagggttgatccaca

SEQ ID NO: 1662711 - DNA, 25 bp, Homo sapien
gtcttgccagctgagaattccatgt

SEQ ID NO: 1662712 - DNA, 25 bp, Homo sapien
tcttaccaggtgtgaattccacgca

SEQ ID NO: 1662713 - DNA, 25 bp, Homo sapien
tcatgtctgggggacatcattttcc

SEQ ID NO: 1662714 - DNA, 25 bp, Homo sapien
gccaatgagaattctatagccacat

SEQ ID NO: 1662715 - DNA, 25 bp, Homo sapien
ttccctgtacaaagccctctgcgaa

SEQ ID NO: 1662716 - DNA, 25 bp, Homo sapien
gcatttccactctgccaatgagaat

SEQ ID NO: 1662717 - DNA, 25 bp, Homo sapien
gtacaaagccctctgcgaagggttc

SEQ ID NO: 1662718 - DNA, 25 bp, Homo sapien
tgagctgcttcttcacataacatga

SEQ ID NO: 1662719 - DNA, 25 bp, Homo sapien
cataacatgagtctttaggaatcaa

SEQ ID NO: 1662720 - DNA, 25 bp, Homo sapien
taacatgagtctttaggaatcaatc

SEQ ID NO: 1662721 - DNA, 25 bp, Homo sapien
gctgcttcttcacataacatgagtc

SEQ ID NO: 1662722 - DNA, 25 bp, Homo sapien
gaaagccactcgtggacacctgaag

SEQ ID NO: 1662723 - DNA, 25 bp, Homo sapien
taaaatacatgctgtcaagttcggc

SEQ ID NO: 1662724 - DNA, 25 bp, Homo sapien
ggaagtacgtagtcaccctcatctg

SEQ ID NO: 1662725 - DNA, 25 bp, Homo sapien
ggatgcctgtttgatgacccaggag

SEQ ID NO: 1662726 - DNA, 25 bp, Homo sapien
taaaattcgagttaaaactgagcac

SEQ ID NO: 1662727 - DNA, 25 bp, Homo sapien
gagcttttccggtcttattcctcac

SEQ ID NO: 1662728 - DNA, 25 bp, Homo sapien
gttaaaactgagcactaccctctcc

SEQ ID NO: 1662729 - DNA, 25 bp, Homo sapien
ggttaaagctgtgagatgataaggt

SEQ ID NO: 1662730 - DNA, 25 bp, Homo sapien
aggaggaaggacgtgtggctgattc

SEQ ID NO: 1662731 - DNA, 25 bp, Homo sapien
tggctgattcccatgtgattgcctg

SEQ ID NO: 1662732 - DNA, 25 bp, Homo sapien
tgattcccatgtgattgcctggaag

SEQ ID NO: 1662733 - DNA, 25 bp, Homo sapien
aggaaggacgtgtggctgattccca

SEQ ID NO: 1662734 - DNA, 25 bp, Homo sapien
ctgcacccagggtcccccttcgtct

SEQ ID NO: 1662735 - DNA, 25 bp, Homo sapien
catctgcacccagggtcccccttcg

SEQ ID NO: 1662736 - DNA, 25 bp, Homo sapien
tcgtcttcattacttttcccctcca

SEQ ID NO: 1662737 - DNA, 25 bp, Homo sapien
cgtcttcattacttttcccctccat

SEQ ID NO: 1662738 - DNA, 25 bp, Homo sapien
tctgcatttccccctggacttctgc

SEQ ID NO: 1662739 - DNA, 25 bp, Homo sapien
cttttctgcatttccccctggactt

SEQ ID NO: 1662740 - DNA, 25 bp, Homo sapien
catttccccctggacttctgctcat

SEQ ID NO: 1662741 - DNA, 25 bp, Homo sapien
tgcatttccccctggacttctgctc

SEQ ID NO: 1662742 - DNA, 25 bp, Homo sapien
ccctaagacaaaggtgggacctgca

SEQ ID NO: 1662743 - DNA, 25 bp, Homo sapien
ggtatcataggacaagcccctgcga

SEQ ID NO: 1662744 - DNA, 25 bp, Homo sapien
ggaaagaacacctggtatcatagga

SEQ ID NO: 1662745 - DNA, 25 bp, Homo sapien
cccaggcgggtttggagtaatcaca

SEQ ID NO: 1662746 - DNA, 25 bp, Homo sapien
gacaggcgagaatttccaggtccgt

SEQ ID NO: 1662747 - DNA, 25 bp, Homo sapien
ggaagacaggcgagaatttccaggt

SEQ ID NO: 1662748 - DNA, 25 bp, Homo sapien
aagacaggcgagaatttccaggtcc

SEQ ID NO: 1662749 - DNA, 25 bp, Homo sapien
gaagggaagacaggcgagaatttcc

SEQ ID NO: 1662750 - DNA, 25 bp, Homo sapien
agacttaatccaaggcagagcaaaa

SEQ ID NO: 1662751 - DNA, 25 bp, Homo sapien
gagcaaaactcacgcgccgtggtag

SEQ ID NO: 1662752 - DNA, 25 bp, Homo sapien
ggcagagcaaaactcacgcgccgtg

SEQ ID NO: 1662753 - DNA, 25 bp, Homo sapien
gacttaatccaaggcagagcaaaac

SEQ ID NO: 1662754 - DNA, 25 bp, Homo sapien
atatgtttcatatgtggtttctctg

SEQ ID NO: 1662755 - DNA, 25 bp, Homo sapien
tatgtttcatatgtggtttctctga

SEQ ID NO: 1662756 - DNA, 25 bp, Homo sapien
atgtttcatatgtggtttctctgat

SEQ ID NO: 1662757 - DNA, 25 bp, Homo sapien
ggttaaagccctgagatgagataag

SEQ ID NO: 1662758 - DNA, 25 bp, Homo sapien
tgagtctaatcccgtttttccattc

SEQ ID NO: 1662759 - DNA, 25 bp, Homo sapien
gaataagttcaagatgatttgagtc

SEQ ID NO: 1662760 - DNA, 25 bp, Homo sapien
tggctaagtccccagaagtacacag

SEQ ID NO: 1662761 - DNA, 25 bp, Homo sapien
accacatcatctcaatacatgtaga

SEQ ID NO: 1662762 - DNA, 25 bp, Homo sapien
cacatcatctcaatacatgtagaaa

SEQ ID NO: 1662763 - DNA, 25 bp, Homo sapien
ccatgaaacgaccacagtggaaata

SEQ ID NO: 1662764 - DNA, 25 bp, Homo sapien
agtacaaagacaatccatgaaacga

SEQ ID NO: 1662765 - DNA, 25 bp, Homo sapien
tgctcaatgattatataaccgaatg

SEQ ID NO: 1662766 - DNA, 25 bp, Homo sapien
tcacagtcaaccaaaatacaactgg

SEQ ID NO: 1662767 - DNA, 25 bp, Homo sapien
cacaatactcatagaaatccccata

SEQ ID NO: 1662768 - DNA, 25 bp, Homo sapien
tcttaacctccagtgacctaccagt

SEQ ID NO: 1662769 - DNA, 25 bp, Homo sapien
tagcaatatatgaacgatatctgaa

SEQ ID NO: 1662770 - DNA, 25 bp, Homo sapien
tccagcatgagttcgatgatgaata

SEQ ID NO: 1662771 - DNA, 25 bp, Homo sapien
gcttgatggcttgctatactaatgg

SEQ ID NO: 1662772 - DNA, 25 bp, Homo sapien
gagttcgatgatgaatagcaatata

SEQ ID NO: 1662773 - DNA, 25 bp, Homo sapien
ctttgtgacaatcattatattagtc

SEQ ID NO: 1662774 - DNA, 25 bp, Homo sapien
tgtgacaatcattatattagtcaag

SEQ ID NO: 1662775 - DNA, 25 bp, Homo sapien
atcattatattagtcaagtttccct

SEQ ID NO: 1662776 - DNA, 25 bp, Homo sapien
ttatattagtcaagtttccctatac

SEQ ID NO: 1662777 - DNA, 25 bp, Homo sapien
taagtggtgactgcccactaaaggc

SEQ ID NO: 1662778 - DNA, 25 bp, Homo sapien
aataagtggtgactgcccactaaag

SEQ ID NO: 1662779 - DNA, 25 bp, Homo sapien
tatggattgcttgatggtgaataag

SEQ ID NO: 1662780 - DNA, 25 bp, Homo sapien
ggtgactgcccactaaaggctttgc

SEQ ID NO: 1662781 - DNA, 25 bp, Homo sapien
ctagtatggtgtgccaggtgtgaat

SEQ ID NO: 1662782 - DNA, 25 bp, Homo sapien
gtgccaggtgtgaatcactcccaaa

SEQ ID NO: 1662783 - DNA, 25 bp, Homo sapien
caggtgtgaatcactcccaaaagcc

SEQ ID NO: 1662784 - DNA, 25 bp, Homo sapien
gtatggtgtgccaggtgtgaatcac

SEQ ID NO: 1662785 - DNA, 25 bp, Homo sapien
aaatcttgtcataaaccttacatct

SEQ ID NO: 1662786 - DNA, 25 bp, Homo sapien
tctccaatacgaattgccttttgaa

SEQ ID NO: 1662787 - DNA, 25 bp, Homo sapien
tttctctccaatacgaattgccttt

SEQ ID NO: 1662788 - DNA, 25 bp, Homo sapien
aatacgaattgccttttgaattaca

SEQ ID NO: 1662789 - DNA, 25 bp, Homo sapien
ttcttatgtgtttcaaggtttgatt

SEQ ID NO: 1662790 - DNA, 25 bp, Homo sapien
tttgcaaccgaaaactttgtcacat

SEQ ID NO: 1662791 - DNA, 25 bp, Homo sapien
tcaaggtttgatttgcaaccgaaaa

SEQ ID NO: 1662792 - DNA, 25 bp, Homo sapien
atgtgtttcaaggtttgatttgcaa

SEQ ID NO: 1662793 - DNA, 25 bp, Homo sapien
tctccagtatgaatggctttgtgac

SEQ ID NO: 1662794 - DNA, 25 bp, Homo sapien
gaattctatgatgacgtgcaagggt

SEQ ID NO: 1662795 - DNA, 25 bp, Homo sapien
ctccagtatgaatggctttgtgact

SEQ ID NO: 1662796 - DNA, 25 bp, Homo sapien
ctatgatgacgtgcaagggttgttt

SEQ ID NO: 1662797 - DNA, 25 bp, Homo sapien
ggttgaattgtgatggaaggtgttg

SEQ ID NO: 1662798 - DNA, 25 bp, Homo sapien
agggttgaattgtgatggaaggtgt

SEQ ID NO: 1662799 - DNA, 25 bp, Homo sapien
gaattgtgatggaaggtgttgccac

SEQ ID NO: 1662800 - DNA, 25 bp, Homo sapien
ttgaattgtgatggaaggtgttgcc

SEQ ID NO: 1662801 - DNA, 25 bp, Homo sapien
tatgatggtatacaaggtttgacat

SEQ ID NO: 1662802 - DNA, 25 bp, Homo sapien
atgatggtatacaaggtttgacatc

SEQ ID NO: 1662803 - DNA, 25 bp, Homo sapien
taagcgatgatgtctgacggaaggt

SEQ ID NO: 1662804 - DNA, 25 bp, Homo sapien
agcctatgatggtatacgagggatg

SEQ ID NO: 1662805 - DNA, 25 bp, Homo sapien
ggattataagcgatgatgtctgacg

SEQ ID NO: 1662806 - DNA, 25 bp, Homo sapien
tataagcgatgatgtctgacggaag

SEQ ID NO: 1662807 - DNA, 25 bp, Homo sapien
gtgccaggtgtgaatccctccggaa

SEQ ID NO: 1662808 - DNA, 25 bp, Homo sapien
ttgtgccaggtgtgaatccctccgg

SEQ ID NO: 1662809 - DNA, 25 bp, Homo sapien
gttgtgccaggtgtgaatccctccg

SEQ ID NO: 1662810 - DNA, 25 bp, Homo sapien
ccaggtgtgaatccctccggaaagc

SEQ ID NO: 1662811 - DNA, 25 bp, Homo sapien
gaatcctcctatgtctttccatgtg

SEQ ID NO: 1662812 - DNA, 25 bp, Homo sapien
tatgaatcctcctatgtctttccat

SEQ ID NO: 1662813 - DNA, 25 bp, Homo sapien
cctcctatgtctttccatgtgtgat

SEQ ID NO: 1662814 - DNA, 25 bp, Homo sapien
catgtgtgatttgcgactgaaaact

SEQ ID NO: 1662815 - DNA, 25 bp, Homo sapien
tgcttttgtactaaaaaccttgcca

SEQ ID NO: 1662816 - DNA, 25 bp, Homo sapien
gcagtatgaagtttatgatgacatg

SEQ ID NO: 1662817 - DNA, 25 bp, Homo sapien
ctgcagtatgaagtttatgatgaca

SEQ ID NO: 1662818 - DNA, 25 bp, Homo sapien
tttatgatgacatgcaaggtttgct

SEQ ID NO: 1662819 - DNA, 25 bp, Homo sapien
tgatggcgtgcaagagttgattgtt

SEQ ID NO: 1662820 - DNA, 25 bp, Homo sapien
gatggcgtgcaagagttgattgttg

SEQ ID NO: 1662821 - DNA, 25 bp, Homo sapien
tctatgatggcgtgcaagagttgat

SEQ ID NO: 1662822 - DNA, 25 bp, Homo sapien
atggcgtgcaagagttgattgttga

SEQ ID NO: 1662823 - DNA, 25 bp, Homo sapien
atggcgtgcaagggttgacagtcga

SEQ ID NO: 1662824 - DNA, 25 bp, Homo sapien
tggcgtgcaagggttgacagtcgat

SEQ ID NO: 1662825 - DNA, 25 bp, Homo sapien
gatggcgtgcaagggttgacagtcg

SEQ ID NO: 1662826 - DNA, 25 bp, Homo sapien
gtatgaattacatgtgaaagctttg

SEQ ID NO: 1662827 - DNA, 25 bp, Homo sapien
gtgaaagctttgtcacaaaccttac

SEQ ID NO: 1662828 - DNA, 25 bp, Homo sapien
taggtatgaattacatgtgaaagct

SEQ ID NO: 1662829 - DNA, 25 bp, Homo sapien
ctaggtatgaattacatgtgaaagc

SEQ ID NO: 1662830 - DNA, 25 bp, Homo sapien
caaggtgtgatttgcgactgaaaac

SEQ ID NO: 1662831 - DNA, 25 bp, Homo sapien
tgatttgcgactgaaaactttgtca

SEQ ID NO: 1662832 - DNA, 25 bp, Homo sapien
aaattatcttatgtgtttcaaggtg

SEQ ID NO: 1662833 - DNA, 25 bp, Homo sapien
tgtgtttcaaggtgtgatttgcgac

SEQ ID NO: 1662834 - DNA, 25 bp, Homo sapien
catcaatgtgagatctacgatggca

SEQ ID NO: 1662835 - DNA, 25 bp, Homo sapien
ggatgtattgtgaccaaagatcttg

SEQ ID NO: 1662836 - DNA, 25 bp, Homo sapien
ctgcagtatgaagcgccttgtgaag

SEQ ID NO: 1662837 - DNA, 25 bp, Homo sapien
catgtgtacattccgtttttgtgtg

SEQ ID NO: 1662838 - DNA, 25 bp, Homo sapien
gagaagaatgtcttcatcatgcatt

SEQ ID NO: 1662839 - DNA, 25 bp, Homo sapien
tgagaagaatgtcttcatcatgcat

SEQ ID NO: 1662840 - DNA, 25 bp, Homo sapien
ctgttgagaagaatgtcttcatcat

SEQ ID NO: 1662841 - DNA, 25 bp, Homo sapien
gttgagaagaatgtcttcatcatgc

SEQ ID NO: 1662842 - DNA, 25 bp, Homo sapien
ccgaggtgacaccactgcactttag

SEQ ID NO: 1662843 - DNA, 25 bp, Homo sapien
ttagcctgggtgacagaccgaaaat

SEQ ID NO: 1662844 - DNA, 25 bp, Homo sapien
ctttagcctgggtgacagaccgaaa

SEQ ID NO: 1662845 - DNA, 25 bp, Homo sapien
agccgaggtgacaccactgcacttt

SEQ ID NO: 1662846 - DNA, 25 bp, Homo sapien
taaaaagaaaggaccataacatgct

SEQ ID NO: 1662847 - DNA, 25 bp, Homo sapien
cccagccctatgtttctgtaggaaa

SEQ ID NO: 1662848 - DNA, 25 bp, Homo sapien
tggagcttttctagagtcccagccc

SEQ ID NO: 1662849 - DNA, 25 bp, Homo sapien
agaagacattacagatgaatctagg

SEQ ID NO: 1662850 - DNA, 25 bp, Homo sapien
ttcatttcaaaatcaatacggcttc

SEQ ID NO: 1662851 - DNA, 25 bp, Homo sapien
tcaaaatcaatacggcttccatttt

SEQ ID NO: 1662852 - DNA, 25 bp, Homo sapien
tttcaaaatcaatacggcttccatt

SEQ ID NO: 1662853 - DNA, 25 bp, Homo sapien
catttcaaaatcaatacggcttcca

SEQ ID NO: 1662854 - DNA, 25 bp, Homo sapien
tgtggctcccaagaggcaacaagag

SEQ ID NO: 1662855 - DNA, 25 bp, Homo sapien
taaggatgtggctcccaagaggcaa

SEQ ID NO: 1662856 - DNA, 25 bp, Homo sapien
aaaatacaaagatacacaagggcac

SEQ ID NO: 1662857 - DNA, 25 bp, Homo sapien
tcaagtaaggatgtggctcccaaga

SEQ ID NO: 1662858 - DNA, 25 bp, Homo sapien
tggccacgtccctgaatgtcaatag

SEQ ID NO: 1662859 - DNA, 25 bp, Homo sapien
atcacatccctgtaaagagtcctct

SEQ ID NO: 1662860 - DNA, 25 bp, Homo sapien
ccacgtccctgaatgtcaatagacc

SEQ ID NO: 1662861 - DNA, 25 bp, Homo sapien
acatccctgtaaagagtcctctgag

SEQ ID NO: 1662862 - DNA, 25 bp, Homo sapien
tgcaaaggacacatgtgttgtcatt

SEQ ID NO: 1662863 - DNA, 25 bp, Homo sapien
aaaagttgcaaaggacacatgtgtt

SEQ ID NO: 1662864 - DNA, 25 bp, Homo sapien
agcaagctagccatgtttactaaca

SEQ ID NO: 1662865 - DNA, 25 bp, Homo sapien
gcaagctagccatgtttactaacat

SEQ ID NO: 1662866 - DNA, 25 bp, Homo sapien
cgtgtacaagacttgctctgacacc

SEQ ID NO: 1662867 - DNA, 25 bp, Homo sapien
tgacagtaacggctccccagggagg

SEQ ID NO: 1662868 - DNA, 25 bp, Homo sapien
cctggcacagaactgacagtaacgg

SEQ ID NO: 1662869 - DNA, 25 bp, Homo sapien
tctaaagcctcataatgctgcagaa

SEQ ID NO: 1662870 - DNA, 25 bp, Homo sapien
ccagcattctgtgaggctgaagcag

SEQ ID NO: 1662871 - DNA, 25 bp, Homo sapien
agcattctgtgaggctgaagcaggc

SEQ ID NO: 1662872 - DNA, 25 bp, Homo sapien
atcccagcattctgtgaggctgaag

SEQ ID NO: 1662873 - DNA, 25 bp, Homo sapien
cccagcattctgtgaggctgaagca

SEQ ID NO: 1662874 - DNA, 25 bp, Homo sapien
gaaaggagatgccttatggcaaagg

SEQ ID NO: 1662875 - DNA, 25 bp, Homo sapien
gctaacacagaactgacaatagtgg

SEQ ID NO: 1662876 - DNA, 25 bp, Homo sapien
aaagggtctaagctgcagctttgct

SEQ ID NO: 1662877 - DNA, 25 bp, Homo sapien
acaatagtggctcgccagtgaggct

SEQ ID NO: 1662878 - DNA, 25 bp, Homo sapien
tgggtttcttcctcacgtaccaaga

SEQ ID NO: 1662879 - DNA, 25 bp, Homo sapien
gtttcttcctcacgtaccaagattc

SEQ ID NO: 1662880 - DNA, 25 bp, Homo sapien
ttcttcctcacgtaccaagattctt

SEQ ID NO: 1662881 - DNA, 25 bp, Homo sapien
ttcctcacgtaccaagattctttag

SEQ ID NO: 1662882 - DNA, 25 bp, Homo sapien
acgatcacacgagggtttggagtaa

SEQ ID NO: 1662883 - DNA, 25 bp, Homo sapien
agaagcgcattttcccagagctgga

SEQ ID NO: 1662884 - DNA, 25 bp, Homo sapien
cacgatcacacgagggtttggagta

SEQ ID NO: 1662885 - DNA, 25 bp, Homo sapien
acacgatcacacgagggtttggagt

SEQ ID NO: 1662886 - DNA, 25 bp, Homo sapien
tccaacgcgggctcaggggaagcgg

SEQ ID NO: 1662887 - DNA, 25 bp, Homo sapien
ctctccaacgcgggctcaggggaag

SEQ ID NO: 1662888 - DNA, 25 bp, Homo sapien
ggctcaggggaagcggtgactgcgg

SEQ ID NO: 1662889 - DNA, 25 bp, Homo sapien
gaagcggtgactgcggaggggagat

SEQ ID NO: 1662890 - DNA, 25 bp, Homo sapien
gtcattccacgggatccgcttcctg

SEQ ID NO: 1662891 - DNA, 25 bp, Homo sapien
ggcgtcaccgtcattccacgggatc

SEQ ID NO: 1662892 - DNA, 25 bp, Homo sapien
gccgcggcgtcaccgtcattccacg

SEQ ID NO: 1662893 - DNA, 25 bp, Homo sapien
gcccgccgcggcgtcaccgtcattc

SEQ ID NO: 1662894 - DNA, 25 bp, Homo sapien
ctgcgcgcgcaggacagaaaccagg

SEQ ID NO: 1662895 - DNA, 25 bp, Homo sapien
tgcgcgcgcaggacagaaaccaggc

SEQ ID NO: 1662896 - DNA, 25 bp, Homo sapien
tcattgttctatgcaacccgttaag

SEQ ID NO: 1662897 - DNA, 25 bp, Homo sapien
ttgttctatgcaacccgttaagtac

SEQ ID NO: 1662898 - DNA, 25 bp, Homo sapien
aaacttcattgttctatgcaacccg

SEQ ID NO: 1662899 - DNA, 25 bp, Homo sapien
cttcattgttctatgcaacccgtta

SEQ ID NO: 1662900 - DNA, 25 bp, Homo sapien
gacccttgaacaatccaggttgccc

SEQ ID NO: 1662901 - DNA, 25 bp, Homo sapien
gagctgacatccagacatgaccctt

SEQ ID NO: 1662902 - DNA, 25 bp, Homo sapien
cagacatgacccttgaacaatccag

SEQ ID NO: 1662903 - DNA, 25 bp, Homo sapien
catccagacatgacccttgaacaat

SEQ ID NO: 1662904 - DNA, 25 bp, Homo sapien
tgtatgatacagactagaaagcatg

SEQ ID NO: 1662905 - DNA, 25 bp, Homo sapien
aatgtatgatacagactagaaagca

SEQ ID NO: 1662906 - DNA, 25 bp, Homo sapien
aaaagttccttgatatctttatcaa

SEQ ID NO: 1662907 - DNA, 25 bp, Homo sapien
aaagttccttgatatctttatcaag

SEQ ID NO: 1662908 - DNA, 25 bp, Homo sapien
agatgacatgaccttctgtaaagaa

SEQ ID NO: 1662909 - DNA, 25 bp, Homo sapien
gatataaatcccatactgattggaa

SEQ ID NO: 1662910 - DNA, 25 bp, Homo sapien
tcggtacaatactcatagaagtctc

SEQ ID NO: 1662911 - DNA, 25 bp, Homo sapien
caacaaactcaggtcaaggctgatt

SEQ ID NO: 1662912 - DNA, 25 bp, Homo sapien
aagtagctcccatctgttggctagg

SEQ ID NO: 1662913 - DNA, 25 bp, Homo sapien
gtatgaatcctcctatgttttgcat

SEQ ID NO: 1662914 - DNA, 25 bp, Homo sapien
tgaatgtgaagtaaacgctttgcca

SEQ ID NO: 1662915 - DNA, 25 bp, Homo sapien
cttggactgaagacccttccacact

SEQ ID NO: 1662916 - DNA, 25 bp, Homo sapien
gatttctgtccagcatggattctct

SEQ ID NO: 1662917 - DNA, 25 bp, Homo sapien
tgagttcaccagtgaaatgcaaggc

SEQ ID NO: 1662918 - DNA, 25 bp, Homo sapien
gagttcaccagtgaaatgcaaggca

SEQ ID NO: 1662919 - DNA, 25 bp, Homo sapien
tggtgactgcccactaaagggtttg

SEQ ID NO: 1662920 - DNA, 25 bp, Homo sapien
taagtggtgactgcccactaaaggg

SEQ ID NO: 1662921 - DNA, 25 bp, Homo sapien
gtgactgcccactaaagggtttgcc

SEQ ID NO: 1662922 - DNA, 25 bp, Homo sapien
gactgcccactaaagggtttgccac

SEQ ID NO: 1662923 - DNA, 25 bp, Homo sapien
gtgccacgtgtgaatcattcccgaa

SEQ ID NO: 1662924 - DNA, 25 bp, Homo sapien
cacgtgtgaatcattcccgaaagcc

SEQ ID NO: 1662925 - DNA, 25 bp, Homo sapien
acgtgtgaatcattcccgaaagcct

SEQ ID NO: 1662926 - DNA, 25 bp, Homo sapien
gccacgtgtgaatcattcccgaaag

SEQ ID NO: 1662927 - DNA, 25 bp, Homo sapien
cagatatgcattatatgcaaaaacc

SEQ ID NO: 1662928 - DNA, 25 bp, Homo sapien
tctatggtgatgtgcaaaggttgct

SEQ ID NO: 1662929 - DNA, 25 bp, Homo sapien
tgtgaattttgaccaacggtcttgc

SEQ ID NO: 1662930 - DNA, 25 bp, Homo sapien
acttttgtcacattcctcccatttg

SEQ ID NO: 1662931 - DNA, 25 bp, Homo sapien
cttacagggttgaattgtgatggaa

SEQ ID NO: 1662932 - DNA, 25 bp, Homo sapien
aggtcttgccacactcattacacta

SEQ ID NO: 1662933 - DNA, 25 bp, Homo sapien
gaattgtgatggaaggtcttgccac

SEQ ID NO: 1662934 - DNA, 25 bp, Homo sapien
gaaggtcttgccacactcattacac

SEQ ID NO: 1662935 - DNA, 25 bp, Homo sapien
tatacaagggatgacatctgactga

SEQ ID NO: 1662936 - DNA, 25 bp, Homo sapien
tacaagggatgacatctgactgaag

SEQ ID NO: 1662937 - DNA, 25 bp, Homo sapien
gcctatgatggtatacaagggatga

SEQ ID NO: 1662938 - DNA, 25 bp, Homo sapien
ctccactatgaagcctatgatggta

SEQ ID NO: 1662939 - DNA, 25 bp, Homo sapien
ggattataagcgatgatgtctgacc

SEQ ID NO: 1662940 - DNA, 25 bp, Homo sapien
gattataagcgatgatgtctgaccg

SEQ ID NO: 1662941 - DNA, 25 bp, Homo sapien
taagcgatgatgtctgaccgaaggt

SEQ ID NO: 1662942 - DNA, 25 bp, Homo sapien
tataagcgatgatgtctgaccgaag

SEQ ID NO: 1662943 - DNA, 25 bp, Homo sapien
gatcatgttggcctgtactaccagc

SEQ ID NO: 1662944 - DNA, 25 bp, Homo sapien
gaattatatgcgaaagcctcatcac

SEQ ID NO: 1662945 - DNA, 25 bp, Homo sapien
caattaaaggatttgaagctctgta

SEQ ID NO: 1662946 - DNA, 25 bp, Homo sapien
gaagctctgtatacattcaaaagat

SEQ ID NO: 1662947 - DNA, 25 bp, Homo sapien
ctgttgacgacaacgtcttcaacat

SEQ ID NO: 1662948 - DNA, 25 bp, Homo sapien
ctttagccgggatgacagaccaaaa

SEQ ID NO: 1662949 - DNA, 25 bp, Homo sapien
tttagccgggatgacagaccaaaac

SEQ ID NO: 1662950 - DNA, 25 bp, Homo sapien
ctgtactttagccgggatgacagac

SEQ ID NO: 1662951 - DNA, 25 bp, Homo sapien
tactttagccgggatgacagaccaa

SEQ ID NO: 1662952 - DNA, 25 bp, Homo sapien
catcacgtccctgtataaagtcctc

SEQ ID NO: 1662953 - DNA, 25 bp, Homo sapien
ggccacgtccctgaatgtcaataga

SEQ ID NO: 1662954 - DNA, 25 bp, Homo sapien
acgtccctgtataaagtcctctgag

SEQ ID NO: 1662955 - DNA, 25 bp, Homo sapien
cagggagacgaggttcctataattc

SEQ ID NO: 1662956 - DNA, 25 bp, Homo sapien
tcgcaaaggacccacgtgttgtcat

SEQ ID NO: 1662957 - DNA, 25 bp, Homo sapien
aaaatcgcaaaggacccacgtgttg

SEQ ID NO: 1662958 - DNA, 25 bp, Homo sapien
cgcaaaggacccacgtgttgtcatt

SEQ ID NO: 1662959 - DNA, 25 bp, Homo sapien
aatcgcaaaggacccacgtgttgtc

SEQ ID NO: 1662960 - DNA, 25 bp, Homo sapien
cacgtacttcgtgcatattaatacg

SEQ ID NO: 1662961 - DNA, 25 bp, Homo sapien
tattaatacgtgactcccattggca

SEQ ID NO: 1662962 - DNA, 25 bp, Homo sapien
gcctcttcccaagttcatgacactg

SEQ ID NO: 1662963 - DNA, 25 bp, Homo sapien
gacactgggtcacgagagacggaac

SEQ ID NO: 1662964 - DNA, 25 bp, Homo sapien
tttctcacgtaccaacagtctttag

SEQ ID NO: 1662965 - DNA, 25 bp, Homo sapien
gtttctttctcacgtaccaacagtc

SEQ ID NO: 1662966 - DNA, 25 bp, Homo sapien
tctttctcacgtaccaacagtcttt

SEQ ID NO: 1662967 - DNA, 25 bp, Homo sapien
tttctttctcacgtaccaacagtct

SEQ ID NO: 1662968 - DNA, 25 bp, Homo sapien
ccacacgatcacaagagggtttgga

SEQ ID NO: 1662969 - DNA, 25 bp, Homo sapien
ggttttctactgctctctcagtccc

SEQ ID NO: 1662970 - DNA, 25 bp, Homo sapien
ttggcccacacgatcacaagagggt

SEQ ID NO: 1662971 - DNA, 25 bp, Homo sapien
cctttggcccacacgatcacaagag

SEQ ID NO: 1662972 - DNA, 25 bp, Homo sapien
aggcacctctccaacgagggctcag

SEQ ID NO: 1662973 - DNA, 25 bp, Homo sapien
caggggacgcggtgactgcggaggg

SEQ ID NO: 1662974 - DNA, 25 bp, Homo sapien
gagggctcaggggacgcggtgactg

SEQ ID NO: 1662975 - DNA, 25 bp, Homo sapien
cccaggcacctctccaacgagggct

SEQ ID NO: 1662976 - DNA, 25 bp, Homo sapien
accgtcattccacgggatccacttc

SEQ ID NO: 1662977 - DNA, 25 bp, Homo sapien
cgcggcgtgaccgtcattccacggg

SEQ ID NO: 1662978 - DNA, 25 bp, Homo sapien
gtcattccacgggatccacttcctg

SEQ ID NO: 1662979 - DNA, 25 bp, Homo sapien
cgtgaccgtcattccacgggatcca

SEQ ID NO: 1662980 - DNA, 25 bp, Homo sapien
tgcgcgcgcaggacagaaaccaggc

SEQ ID NO: 1662981 - DNA, 25 bp, Homo sapien
ctgcgcgcgcaggacagaaaccagg

SEQ ID NO: 1662982 - DNA, 25 bp, Homo sapien
gatttaaagctatccttaggcggtc

SEQ ID NO: 1662983 - DNA, 25 bp, Homo sapien
gccggtctgctgacagtctaacaaa

SEQ ID NO: 1662984 - DNA, 25 bp, Homo sapien
tagcaatttgaaaggctgtaccagg

SEQ ID NO: 1662985 - DNA, 25 bp, Homo sapien
cacaaagtttgaggatagccatctg

SEQ ID NO: 1662986 - DNA, 25 bp, Homo sapien
cacattcagtggatttgcagaatac

SEQ ID NO: 1662987 - DNA, 25 bp, Homo sapien
catgatcttctgtggaaaaaatcca

SEQ ID NO: 1662988 - DNA, 25 bp, Homo sapien
cagcagcaaaaattagttgaatttc

SEQ ID NO: 1662989 - DNA, 25 bp, Homo sapien
tccaaagagtcaaccaaaatactac

SEQ ID NO: 1662990 - DNA, 25 bp, Homo sapien
actgaaaccttgtcacacttatgac

SEQ ID NO: 1662991 - DNA, 25 bp, Homo sapien
cctaatgacttgtgaacgtgaagta

SEQ ID NO: 1662992 - DNA, 25 bp, Homo sapien
gcctaatgacttgtgaacgtgaagt

SEQ ID NO: 1662993 - DNA, 25 bp, Homo sapien
ctgaaaccttgtcacacttatgaca

SEQ ID NO: 1662994 - DNA, 25 bp, Homo sapien
ctgatggatggtgagtaagtggtga

SEQ ID NO: 1662995 - DNA, 25 bp, Homo sapien
tggatggtgagtaagtggtgattgc

SEQ ID NO: 1662996 - DNA, 25 bp, Homo sapien
ggatggtgagtaagtggtgattgcc

SEQ ID NO: 1662997 - DNA, 25 bp, Homo sapien
gatggatggtgagtaagtggtgatt

SEQ ID NO: 1662998 - DNA, 25 bp, Homo sapien
tttgtggcagtcattacatctgtga

SEQ ID NO: 1662999 - DNA, 25 bp, Homo sapien
gcttgatggtgaataggcgatgccc

SEQ ID NO: 1663000 - DNA, 25 bp, Homo sapien
acatctgtgagctttcactatacca

SEQ ID NO: 1663001 - DNA, 25 bp, Homo sapien
tgcaagtgttgtagttttactggag

SEQ ID NO: 1663002 - DNA, 25 bp, Homo sapien
gccacactcattacacttgtaaggt

SEQ ID NO: 1663003 - DNA, 25 bp, Homo sapien
tttgccacactcattacacttgtaa

SEQ ID NO: 1663004 - DNA, 25 bp, Homo sapien
gctttgccacactcattacacttgt

SEQ ID NO: 1663005 - DNA, 25 bp, Homo sapien
tctccagtgtgaatttcagtatgtt

SEQ ID NO: 1663006 - DNA, 25 bp, Homo sapien
ttctcctatgcattgcaaggtgtga

SEQ ID NO: 1663007 - DNA, 25 bp, Homo sapien
attctcctatgcattgcaaggtgtg

SEQ ID NO: 1663008 - DNA, 25 bp, Homo sapien
gaattctcctatgcattgcaaggtg

SEQ ID NO: 1663009 - DNA, 25 bp, Homo sapien
gcaactgaaaacgttgtcacattct

SEQ ID NO: 1663010 - DNA, 25 bp, Homo sapien
actgaaaacgttgtcacattcttta

SEQ ID NO: 1663011 - DNA, 25 bp, Homo sapien
catttgtaaggtttctctccagtat

SEQ ID NO: 1663012 - DNA, 25 bp, Homo sapien
ctgcaactgaaaacgttgtcacatt

SEQ ID NO: 1663013 - DNA, 25 bp, Homo sapien
gatacacaaggacagattcttcatg

SEQ ID NO: 1663014 - DNA, 25 bp, Homo sapien
atacacaaggacagattcttcatgt

SEQ ID NO: 1663015 - DNA, 25 bp, Homo sapien
agatacacaaggacagattcttcat

SEQ ID NO: 1663016 - DNA, 25 bp, Homo sapien
aagatacacaaggacagattcttca

SEQ ID NO: 1663017 - DNA, 25 bp, Homo sapien
gggtccaggcgtttccactccagca

SEQ ID NO: 1663018 - DNA, 25 bp, Homo sapien
catctgcacccagggtcccccttcg

SEQ ID NO: 1663019 - DNA, 25 bp, Homo sapien
cttcgtcttcattactgtttccctc

SEQ ID NO: 1663020 - DNA, 25 bp, Homo sapien
ctgcacccagggtcccccttcgtct

SEQ ID NO: 1663021 - DNA, 25 bp, Homo sapien
ccttcgtcttcattactgtttccct

SEQ ID NO: 1663022 - DNA, 25 bp, Homo sapien
caccagagattatgcggagataaga

SEQ ID NO: 1663023 - DNA, 25 bp, Homo sapien
tatgcggagataagaaggtgccaca

SEQ ID NO: 1663024 - DNA, 25 bp, Homo sapien
ccactacaccagagattatgcggag

SEQ ID NO: 1663025 - DNA, 25 bp, Homo sapien
agataagaaggtgccacaggaagac

SEQ ID NO: 1663026 - DNA, 25 bp, Homo sapien
ccatttgaggggctgactgtggtgg

SEQ ID NO: 1663027 - DNA, 25 bp, Homo sapien
catttgaggggctgactgtggtgga

SEQ ID NO: 1663028 - DNA, 25 bp, Homo sapien
ctcagccatttgaggggctgactgt

SEQ ID NO: 1663029 - DNA, 25 bp, Homo sapien
agccatttgaggggctgactgtggt

SEQ ID NO: 1663030 - DNA, 25 bp, Homo sapien
gcaaaacaatgatgttacctcgtaa

SEQ ID NO: 1663031 - DNA, 25 bp, Homo sapien
agaacattttgaacacataccgtag

SEQ ID NO: 1663032 - DNA, 25 bp, Homo sapien
agattataccaaagctttcatgaga

SEQ ID NO: 1663033 - DNA, 25 bp, Homo sapien
aaatcatttatcaggtactagaaaa

SEQ ID NO: 1663034 - DNA, 25 bp, Homo sapien
caattaacacgaacctcaggaggtc

SEQ ID NO: 1663035 - DNA, 25 bp, Homo sapien
cagggagagtctaaggccaattaac

SEQ ID NO: 1663036 - DNA, 25 bp, Homo sapien
catatatacattggtccggtctgga

SEQ ID NO: 1663037 - DNA, 25 bp, Homo sapien
gaaacacatgcgtcctgggtctggg

SEQ ID NO: 1663038 - DNA, 25 bp, Homo sapien
gaaccaagccaacaaaggtgttcat

SEQ ID NO: 1663039 - DNA, 25 bp, Homo sapien
tataaaacttatgtggatggtctgc

SEQ ID NO: 1663040 - DNA, 25 bp, Homo sapien
tatggtaacgtgactgaatcttcag

SEQ ID NO: 1663041 - DNA, 25 bp, Homo sapien
catgaaccgggttagagaagatgag

SEQ ID NO: 1663042 - DNA, 25 bp, Homo sapien
gaagaccccttgtactagcgaactg

SEQ ID NO: 1663043 - DNA, 25 bp, Homo sapien
gcagaaataaccagtcagggaaaat

SEQ ID NO: 1663044 - DNA, 25 bp, Homo sapien
caaaatggttcaacatagtcaagca

SEQ ID NO: 1663045 - DNA, 25 bp, Homo sapien
gcatctggtctcatcgcaaatttga

SEQ ID NO: 1663046 - DNA, 25 bp, Homo sapien
aaaaacatatgcagtggatttgaag

SEQ ID NO: 1663047 - DNA, 25 bp, Homo sapien
ggctgtcctagctagagcaatgaaa

SEQ ID NO: 1663048 - DNA, 25 bp, Homo sapien
aaaaacatgtgcaaataagagatac

SEQ ID NO: 1663049 - DNA, 25 bp, Homo sapien
gagatacaagccatattgaatggaa

SEQ ID NO: 1663050 - DNA, 25 bp, Homo sapien
ataaaagaacatacaggctgggaaa

SEQ ID NO: 1663051 - DNA, 25 bp, Homo sapien
taaaagaacatacaggctgggaaaa

SEQ ID NO: 1663052 - DNA, 25 bp, Homo sapien
aataaaagaacatacaggctgggaa

SEQ ID NO: 1663053 - DNA, 25 bp, Homo sapien
aaataaaagaacatacaggctggga

SEQ ID NO: 1663054 - DNA, 25 bp, Homo sapien
aatgcttgatggtttgctatactca

SEQ ID NO: 1663055 - DNA, 25 bp, Homo sapien
ttgatggtttgctatactcattgca

SEQ ID NO: 1663056 - DNA, 25 bp, Homo sapien
attaatgcttgatggtttgctatac

SEQ ID NO: 1663057 - DNA, 25 bp, Homo sapien
tcaattaatgcttgatggtttgcta

SEQ ID NO: 1663058 - DNA, 25 bp, Homo sapien
cagtctatgatggtacacaaggtgt

SEQ ID NO: 1663059 - DNA, 25 bp, Homo sapien
tgttctgcaagacgtgaatcactcc

SEQ ID NO: 1663060 - DNA, 25 bp, Homo sapien
tgaactctacgatgtcctgcaagag

SEQ ID NO: 1663061 - DNA, 25 bp, Homo sapien
tttttgatgacatgcgaggtacgct

SEQ ID NO: 1663062 - DNA, 25 bp, Homo sapien
atggtcatttgtttcatcttcttgc

SEQ ID NO: 1663063 - DNA, 25 bp, Homo sapien
cttcatggtcatttgtttcatcttc

SEQ ID NO: 1663064 - DNA, 25 bp, Homo sapien
gtgcttcatggtcatttgtttcatc

SEQ ID NO: 1663065 - DNA, 25 bp, Homo sapien
gggtgcttcatggtcatttgtttca

SEQ ID NO: 1663066 - DNA, 25 bp, Homo sapien
gagcaaaatgctccaatgtgataac

SEQ ID NO: 1663067 - DNA, 25 bp, Homo sapien
tctcaatttcctgggagcaaaatgc

SEQ ID NO: 1663068 - DNA, 25 bp, Homo sapien
aatttcctgggagcaaaatgctcca

SEQ ID NO: 1663069 - DNA, 25 bp, Homo sapien
aatgtgataacttgcttgtctctgc

SEQ ID NO: 1663070 - DNA, 25 bp, Homo sapien
taaaaaaccagacaatgtactatat

SEQ ID NO: 1663071 - DNA, 25 bp, Homo sapien
acacagtgcaaaaaatatatcactg

SEQ ID NO: 1663072 - DNA, 25 bp, Homo sapien
tattggtaaataatccacaacaagc

SEQ ID NO: 1663073 - DNA, 25 bp, Homo sapien
taatcctaaggggtatcacacagtg

SEQ ID NO: 1663074 - DNA, 25 bp, Homo sapien
ttttggtaggctgagtcgggtggat

SEQ ID NO: 1663075 - DNA, 25 bp, Homo sapien
agcattttggtaggctgagtcgggt

SEQ ID NO: 1663076 - DNA, 25 bp, Homo sapien
catgaggtcaggagtttgagaccag

SEQ ID NO: 1663077 - DNA, 25 bp, Homo sapien
atgaggtcaggagtttgagaccagc

SEQ ID NO: 1663078 - DNA, 25 bp, Homo sapien
cgtctctgtatagagtcctctgagc

SEQ ID NO: 1663079 - DNA, 25 bp, Homo sapien
cacgtctctgtatagagtcctctga

SEQ ID NO: 1663080 - DNA, 25 bp, Homo sapien
tcacgtctctgtatagagtcctctg

SEQ ID NO: 1663081 - DNA, 25 bp, Homo sapien
catcacgtctctgtatagagtcctc

SEQ ID NO: 1663082 - DNA, 25 bp, Homo sapien
ggtaccaagagtctttagaagtcaa

SEQ ID NO: 1663083 - DNA, 25 bp, Homo sapien
gagaaagagccatccccgactcctt

SEQ ID NO: 1663084 - DNA, 25 bp, Homo sapien
gagccatccccgactcctttgcttt

SEQ ID NO: 1663085 - DNA, 25 bp, Homo sapien
gtttcttcctcaggtaccaagagtc

SEQ ID NO: 1663086 - DNA, 25 bp, Homo sapien
agccaagatcaggagactgcactca

SEQ ID NO: 1663087 - DNA, 25 bp, Homo sapien
caagatcaggagactgcactcacag

SEQ ID NO: 1663088 - DNA, 25 bp, Homo sapien
gccaagatcaggagactgcactcac

SEQ ID NO: 1663089 - DNA, 25 bp, Homo sapien
aagatcaggagactgcactcacagc

SEQ ID NO: 1663090 - DNA, 25 bp, Homo sapien
agtcattagattagggcaagctccc

SEQ ID NO: 1663091 - DNA, 25 bp, Homo sapien
gaagcatctttcacatacctgggct

SEQ ID NO: 1663092 - DNA, 25 bp, Homo sapien
tggagccacactgatgagttgggct

SEQ ID NO: 1663093 - DNA, 25 bp, Homo sapien
gaaagggttggtcttatcacctctc

SEQ ID NO: 1663094 - DNA, 25 bp, Homo sapien
ctctgttctccttgccaccagcacc

SEQ ID NO: 1663095 - DNA, 25 bp, Homo sapien
ccagcaccactctgctctgtctgcc

SEQ ID NO: 1663096 - DNA, 25 bp, Homo sapien
tccctctgttctccttgccaccagc

SEQ ID NO: 1663097 - DNA, 25 bp, Homo sapien
caccagcaccactctgctctgtctg

SEQ ID NO: 1663098 - DNA, 25 bp, Homo sapien
tggacaccttcatgtcagaggagcc

SEQ ID NO: 1663099 - DNA, 25 bp, Homo sapien
gctgtgttttctacgtaaaccatgg

SEQ ID NO: 1663100 - DNA, 25 bp, Homo sapien
ttgtgtcaccatataggccccaggc

SEQ ID NO: 1663101 - DNA, 25 bp, Homo sapien
tgggcagggaagaacaccttgtgtc

SEQ ID NO: 1663102 - DNA, 25 bp, Homo sapien
ggttgagacaattttggccagcgtg

SEQ ID NO: 1663103 - DNA, 25 bp, Homo sapien
gttgagacaattttggccagcgtgg

SEQ ID NO: 1663104 - DNA, 25 bp, Homo sapien
gggcttctcggcacgcccctgttgt

SEQ ID NO: 1663105 - DNA, 25 bp, Homo sapien
ttagctgggcttctcggcacgcccc

SEQ ID NO: 1663106 - DNA, 25 bp, Homo sapien
cttgagcccggagagcagaggttga

SEQ ID NO: 1663107 - DNA, 25 bp, Homo sapien
ggttgaagtgaatcaagatcgcaca

SEQ ID NO: 1663108 - DNA, 25 bp, Homo sapien
gaatcaagatcgcacaactgccctc

SEQ ID NO: 1663109 - DNA, 25 bp, Homo sapien
agcccggagagcagaggttgaagtg

SEQ ID NO: 1663110 - DNA, 25 bp, Homo sapien
aacttgagggagacatttacttaga

SEQ ID NO: 1663111 - DNA, 25 bp, Homo sapien
gcccatcgttcaacatctgcaagga

SEQ ID NO: 1663112 - DNA, 25 bp, Homo sapien
tacttagaagctcacagctcaccat

SEQ ID NO: 1663113 - DNA, 25 bp, Homo sapien
tgcaaggaatattatgaaccagagg

SEQ ID NO: 1663114 - DNA, 25 bp, Homo sapien
tcagcatttcgttggccaagggcca

SEQ ID NO: 1663115 - DNA, 25 bp, Homo sapien
tgcagaaagaccgaggacgggacct

SEQ ID NO: 1663116 - DNA, 25 bp, Homo sapien
tccgcgataggaggtgtctgcacga

SEQ ID NO: 1663117 - DNA, 25 bp, Homo sapien
ttggaactaggtagcaacaccgcac

SEQ ID NO: 1663118 - DNA, 25 bp, Homo sapien
gccactttaaactcgaagggactca

SEQ ID NO: 1663119 - DNA, 25 bp, Homo sapien
ctcagggccactttaaactcgaagg

SEQ ID NO: 1663120 - DNA, 25 bp, Homo sapien
tccccggtatagcagcaccacagga

SEQ ID NO: 1663121 - DNA, 25 bp, Homo sapien
gaggggccgcaatttccaggtctgt

SEQ ID NO: 1663122 - DNA, 25 bp, Homo sapien
gggactcaacgtccccggtatagca

SEQ ID NO: 1663123 - DNA, 25 bp, Homo sapien
taaaacagagcgaaactcacgcgct

SEQ ID NO: 1663124 - DNA, 25 bp, Homo sapien
tgaaatggactaaaccataagtgcc

SEQ ID NO: 1663125 - DNA, 25 bp, Homo sapien
taccagggtgaaatggactaaacca

SEQ ID NO: 1663126 - DNA, 25 bp, Homo sapien
tactaaaggtctactacaataccac

SEQ ID NO: 1663127 - DNA, 25 bp, Homo sapien
cagagtgcctactaaaggtctacta

SEQ ID NO: 1663128 - DNA, 25 bp, Homo sapien
ccaggtgtaactgtctgtgtactga

SEQ ID NO: 1663129 - DNA, 25 bp, Homo sapien
tatctttgaaactagggacccatcc

SEQ ID NO: 1663130 - DNA, 25 bp, Homo sapien
gggtcacagttacaccataatctcc

SEQ ID NO: 1663131 - DNA, 25 bp, Homo sapien
cacatactcaccacaagaatgggta

SEQ ID NO: 1663132 - DNA, 25 bp, Homo sapien
cgtgggggcctgctatgcaccgctc

SEQ ID NO: 1663133 - DNA, 25 bp, Homo sapien
tgctatgcaccgctctggcgaggca

SEQ ID NO: 1663134 - DNA, 25 bp, Homo sapien
gctatgcaccgctctggcgaggcat

SEQ ID NO: 1663135 - DNA, 25 bp, Homo sapien
gggggcctgctatgcaccgctctgg

SEQ ID NO: 1663136 - DNA, 25 bp, Homo sapien
gaactacagcgtatgaacgatgtct

SEQ ID NO: 1663137 - DNA, 25 bp, Homo sapien
cttaggaataaacgtacaaagctga

SEQ ID NO: 1663138 - DNA, 25 bp, Homo sapien
gcctatcagttgacattccaccaca

SEQ ID NO: 1663139 - DNA, 25 bp, Homo sapien
gcaccggtgttcagagtggaaaaga

SEQ ID NO: 1663140 - DNA, 25 bp, Homo sapien
tgttgactgtgcacgaaaggctttg

SEQ ID NO: 1663141 - DNA, 25 bp, Homo sapien
catgcaagttgtgactgtgtcctaa

SEQ ID NO: 1663142 - DNA, 25 bp, Homo sapien
gagtaacacttgaaagccttgtcac

SEQ ID NO: 1663143 - DNA, 25 bp, Homo sapien
aactaagagggctgaattttcacca

SEQ ID NO: 1663144 - DNA, 25 bp, Homo sapien
ccaagaactacagaatcgaaagcac

SEQ ID NO: 1663145 - DNA, 25 bp, Homo sapien
aactacagaatcgaaagcacaggag

SEQ ID NO: 1663146 - DNA, 25 bp, Homo sapien
agaactacagaatcgaaagcacagg

SEQ ID NO: 1663147 - DNA, 25 bp, Homo sapien
ctacagaatcgaaagcacaggagaa

SEQ ID NO: 1663148 - DNA, 25 bp, Homo sapien
cgtctctgtatagagtcctctgagc

SEQ ID NO: 1663149 - DNA, 25 bp, Homo sapien
catcacgtctctgtatagagtcctc

SEQ ID NO: 1663150 - DNA, 25 bp, Homo sapien
tcacgtctctgtatagagtcctctg

SEQ ID NO: 1663151 - DNA, 25 bp, Homo sapien
cacgtctctgtatagagtcctctga

SEQ ID NO: 1663152 - DNA, 25 bp, Homo sapien
ttctgagtttcttcttcacataccc

SEQ ID NO: 1663153 - DNA, 25 bp, Homo sapien
ctgaggaagagccatccctgactcc

SEQ ID NO: 1663154 - DNA, 25 bp, Homo sapien
cttctgagtttcttcttcacatacc

SEQ ID NO: 1663155 - DNA, 25 bp, Homo sapien
agagccatccctgactcctttgctt

SEQ ID NO: 1663156 - DNA, 25 bp, Homo sapien
tgacatgacttactttagatttagc

SEQ ID NO: 1663157 - DNA, 25 bp, Homo sapien
agggaatgacatgacttactttaga

SEQ ID NO: 1663158 - DNA, 25 bp, Homo sapien
gaatgacatgacttactttagattt

SEQ ID NO: 1663159 - DNA, 25 bp, Homo sapien
catgacttactttagatttagctgt

SEQ ID NO: 1663160 - DNA, 25 bp, Homo sapien
cagtgtgacttccagtccacgcgat

SEQ ID NO: 1663161 - DNA, 25 bp, Homo sapien
gccgcagtgtgacttccagtccacg

SEQ ID NO: 1663162 - DNA, 25 bp, Homo sapien
cgcagtgtgacttccagtccacgcg

SEQ ID NO: 1663163 - DNA, 25 bp, Homo sapien
tgtgacttccagtccacgcgatccg

SEQ ID NO: 1663164 - DNA, 25 bp, Homo sapien
tgccgggcccaagaaatactcttta

SEQ ID NO: 1663165 - DNA, 25 bp, Homo sapien
cgtgccgggcccaagaaatactctt

SEQ ID NO: 1663166 - DNA, 25 bp, Homo sapien
ccgtgccgggcccaagaaatactct

SEQ ID NO: 1663167 - DNA, 25 bp, Homo sapien
gagccttagacctgaatgtaatggg

SEQ ID NO: 1663168 - DNA, 25 bp, Homo sapien
taaagagccttagacctgaatgtaa

SEQ ID NO: 1663169 - DNA, 25 bp, Homo sapien
ataaagagccttagacctgaatgta

SEQ ID NO: 1663170 - DNA, 25 bp, Homo sapien
aagagccttagacctgaatgtaatg

SEQ ID NO: 1663171 - DNA, 25 bp, Homo sapien
ggataagttgcagcaacttgactgg

SEQ ID NO: 1663172 - DNA, 25 bp, Homo sapien
agttgcagcaacttgactggtgatg

SEQ ID NO: 1663173 - DNA, 25 bp, Homo sapien
tcaagaccagtggataagttgcagc

SEQ ID NO: 1663174 - DNA, 25 bp, Homo sapien
ccattcaagaccagtggataagttg

SEQ ID NO: 1663175 - DNA, 25 bp, Homo sapien
ctcaaaaaagttgcgcctgcggctg

SEQ ID NO: 1663176 - DNA, 25 bp, Homo sapien
ttgtgcctgcatgccactggactct

SEQ ID NO: 1663177 - DNA, 25 bp, Homo sapien
tgccttaaaaggatcgctcccaagt

SEQ ID NO: 1663178 - DNA, 25 bp, Homo sapien
tgcagaggctcgctcaggtgagact

SEQ ID NO: 1663179 - DNA, 25 bp, Homo sapien
agtagggcattctcaaaaacaaggg

SEQ ID NO: 1663180 - DNA, 25 bp, Homo sapien
acagtagggcattctcaaaaacaag

SEQ ID NO: 1663181 - DNA, 25 bp, Homo sapien
cattctcaaaaacaagggcaacgcc

SEQ ID NO: 1663182 - DNA, 25 bp, Homo sapien
ttctcaaaaacaagggcaacgccac

SEQ ID NO: 1663183 - DNA, 25 bp, Homo sapien
gtgatttgcgactgaaaactttttc

SEQ ID NO: 1663184 - DNA, 25 bp, Homo sapien
gttttgtctttcaagatgtgatttg

SEQ ID NO: 1663185 - DNA, 25 bp, Homo sapien
gtctatgatgacgtgcaaggtgtgc

SEQ ID NO: 1663186 - DNA, 25 bp, Homo sapien
gtgtgctttctgattaaaaaccttg

SEQ ID NO: 1663187 - DNA, 25 bp, Homo sapien
ttcaaccaaaggtcttgttatgctc

SEQ ID NO: 1663188 - DNA, 25 bp, Homo sapien
atttcaaccaaaggtcttgttatgc

SEQ ID NO: 1663189 - DNA, 25 bp, Homo sapien
ctgaatttcaaccaaaggtcttgtt

SEQ ID NO: 1663190 - DNA, 25 bp, Homo sapien
caaccaaaggtcttgttatgctcac

SEQ ID NO: 1663191 - DNA, 25 bp, Homo sapien
tatgaagtctacgatagcatgtaaa

SEQ ID NO: 1663192 - DNA, 25 bp, Homo sapien
tagcatgtaaaggatgacgtctgac

SEQ ID NO: 1663193 - DNA, 25 bp, Homo sapien
tgccacactcataacaactgtaagg

SEQ ID NO: 1663194 - DNA, 25 bp, Homo sapien
tctacgatagcatgtaaaggatgac

SEQ ID NO: 1663195 - DNA, 25 bp, Homo sapien
ctattatggcatacaaggaatcaat

SEQ ID NO: 1663196 - DNA, 25 bp, Homo sapien
tataattaaaggatttgccactctc

SEQ ID NO: 1663197 - DNA, 25 bp, Homo sapien
gctataattaaaggatttgccactc

SEQ ID NO: 1663198 - DNA, 25 bp, Homo sapien
ttagctataattaaaggatttgcca

SEQ ID NO: 1663199 - DNA, 25 bp, Homo sapien
ataattaaaggatttgccactctca

SEQ ID NO: 1663200 - DNA, 25 bp, Homo sapien
cttcccaatttttgtatgggtaatg

SEQ ID NO: 1663201 - DNA, 25 bp, Homo sapien
ttcccaatttttgtatgggtaatga

SEQ ID NO: 1663202 - DNA, 25 bp, Homo sapien
tcatgtgtacttcccaatttttgta

SEQ ID NO: 1663203 - DNA, 25 bp, Homo sapien
tgtgtacttcccaatttttgtatgg

SEQ ID NO: 1663204 - DNA, 25 bp, Homo sapien
aaaattaaggaggcattgatgatag

SEQ ID NO: 1663205 - DNA, 25 bp, Homo sapien
ttaaggaggcattgatgatagactt

SEQ ID NO: 1663206 - DNA, 25 bp, Homo sapien
aattaaggaggcattgatgatagac

SEQ ID NO: 1663207 - DNA, 25 bp, Homo sapien
taaggaggcattgatgatagacttc

SEQ ID NO: 1663208 - DNA, 25 bp, Homo sapien
caggcagatgcgaatgaaagctgga

SEQ ID NO: 1663209 - DNA, 25 bp, Homo sapien
caattttccattcaggctgaaatat

SEQ ID NO: 1663210 - DNA, 25 bp, Homo sapien
cgaatgaaagctggatccaagctga

SEQ ID NO: 1663211 - DNA, 25 bp, Homo sapien
gctgatctttaataggcttgtttcc

SEQ ID NO: 1663212 - DNA, 25 bp, Homo sapien
tcatgggtgcttcgtgaccattcct

SEQ ID NO: 1663213 - DNA, 25 bp, Homo sapien
tgtcatgggtgcttcgtgaccattc

SEQ ID NO: 1663214 - DNA, 25 bp, Homo sapien
gggtgcttcgtgaccattcctttcc

SEQ ID NO: 1663215 - DNA, 25 bp, Homo sapien
catgggtgcttcgtgaccattcctt

SEQ ID NO: 1663216 - DNA, 25 bp, Homo sapien
tacgctaccatctgttatggccttt

SEQ ID NO: 1663217 - DNA, 25 bp, Homo sapien
tcaggagaaacggtgattacggagg

SEQ ID NO: 1663218 - DNA, 25 bp, Homo sapien
tcacccatcctctacgctaccatct

SEQ ID NO: 1663219 - DNA, 25 bp, Homo sapien
cggtgattacggagggaagacctgg

SEQ ID NO: 1663220 - DNA, 25 bp, Homo sapien
accgtcactccacgcgacccgcttc

SEQ ID NO: 1663221 - DNA, 25 bp, Homo sapien
cacgcgacccgcttccgggtttgtg

SEQ ID NO: 1663222 - DNA, 25 bp, Homo sapien
cgcgacccgcttccgggtttgtgcg

SEQ ID NO: 1663223 - DNA, 25 bp, Homo sapien
cccgcggtgggaccgtcactccacg

SEQ ID NO: 1663224 - DNA, 25 bp, Homo sapien
atcacggcacaagagaatgaatcca

SEQ ID NO: 1663225 - DNA, 25 bp, Homo sapien
gggtaacatcacggcacaagagaat

SEQ ID NO: 1663226 - DNA, 25 bp, Homo sapien
attaggggtaacatcacggcacaag

SEQ ID NO: 1663227 - DNA, 25 bp, Homo sapien
taacatcacggcacaagagaatgaa

SEQ ID NO: 1663228 - DNA, 25 bp, Homo sapien
tactctatcgaattacgtcatttga

SEQ ID NO: 1663229 - DNA, 25 bp, Homo sapien
ttaaggtactctatcgaattacgtc

SEQ ID NO: 1663230 - DNA, 25 bp, Homo sapien
tctatcgaattacgtcatttgactt

SEQ ID NO: 1663231 - DNA, 25 bp, Homo sapien
ggtactctatcgaattacgtcattt

SEQ ID NO: 1663232 - DNA, 25 bp, Homo sapien
aatgtgttcgtaacagagtcagaga

SEQ ID NO: 1663233 - DNA, 25 bp, Homo sapien
gccaaccaatgtgttcgtaacagag

SEQ ID NO: 1663234 - DNA, 25 bp, Homo sapien
ctagccaaccaatgtgttcgtaaca

SEQ ID NO: 1663235 - DNA, 25 bp, Homo sapien
cttgatatggttgcgtgattgtgac

SEQ ID NO: 1663236 - DNA, 25 bp, Homo sapien
ctggggaatggaacaattctgcttt

SEQ ID NO: 1663237 - DNA, 25 bp, Homo sapien
ccaggactctcttaatcctgaaagt

SEQ ID NO: 1663238 - DNA, 25 bp, Homo sapien
cttggccaggactctcttaatcctg

SEQ ID NO: 1663239 - DNA, 25 bp, Homo sapien
cactggggaatggaacaattctgct

SEQ ID NO: 1663240 - DNA, 25 bp, Homo sapien
ggcaagaagccaagtcaagcacaca

SEQ ID NO: 1663241 - DNA, 25 bp, Homo sapien
gcgagtagctaggtttggccaaaat

SEQ ID NO: 1663242 - DNA, 25 bp, Homo sapien
caacacaaatggtcagaggtccctt

SEQ ID NO: 1663243 - DNA, 25 bp, Homo sapien
tattcctgcttgacctttactgcca

SEQ ID NO: 1663244 - DNA, 25 bp, Homo sapien
aatatgaactagaaaggcaggaacc

SEQ ID NO: 1663245 - DNA, 25 bp, Homo sapien
aaactcaagtcaatgttgaatcaac

SEQ ID NO: 1663246 - DNA, 25 bp, Homo sapien
actcaagtcaatgttgaatcaactc

SEQ ID NO: 1663247 - DNA, 25 bp, Homo sapien
ctcaagtcaatgttgaatcaactct

SEQ ID NO: 1663248 - DNA, 25 bp, Homo sapien
caagtcaatgttgaatcaactctaa

SEQ ID NO: 1663249 - DNA, 25 bp, Homo sapien
attttatttggaacaattatctcaa

SEQ ID NO: 1663250 - DNA, 25 bp, Homo sapien
tcattttatttggaacaattatctc

SEQ ID NO: 1663251 - DNA, 25 bp, Homo sapien
tatttggaacaattatctcaaaaat

SEQ ID NO: 1663252 - DNA, 25 bp, Homo sapien
tattcattttatttggaacaattat

SEQ ID NO: 1663253 - DNA, 25 bp, Homo sapien
tgaggtgtgaacatgaagtaaaggc

SEQ ID NO: 1663254 - DNA, 25 bp, Homo sapien
aggtgtgaacatgaagtaaaggctt

SEQ ID NO: 1663255 - DNA, 25 bp, Homo sapien
aatgaggtgtgaacatgaagtaaag

SEQ ID NO: 1663256 - DNA, 25 bp, Homo sapien
tctaatgaggtgtgaacatgaagta

SEQ ID NO: 1663257 - DNA, 25 bp, Homo sapien
ccttgtcacagtcatgatatttgta

SEQ ID NO: 1663258 - DNA, 25 bp, Homo sapien
aagaccttgtcacagtcatgatatt

SEQ ID NO: 1663259 - DNA, 25 bp, Homo sapien
ctgaagaccttgtcacagtcatgat

SEQ ID NO: 1663260 - DNA, 25 bp, Homo sapien
gtcacagtcatgatatttgtaaggt

SEQ ID NO: 1663261 - DNA, 25 bp, Homo sapien
aagttatgaatgacgtctgaaaaat

SEQ ID NO: 1663262 - DNA, 25 bp, Homo sapien
ttgtagatctctcttcaatatggat

SEQ ID NO: 1663263 - DNA, 25 bp, Homo sapien
acttgtagatctctcttcaatatgg

SEQ ID NO: 1663264 - DNA, 25 bp, Homo sapien
attacacttgtagatctctcttcaa

SEQ ID NO: 1663265 - DNA, 25 bp, Homo sapien
tttgcaatggttgtagcattactga

SEQ ID NO: 1663266 - DNA, 25 bp, Homo sapien
tgtaatgatttgcaatggttgtagc

SEQ ID NO: 1663267 - DNA, 25 bp, Homo sapien
cattactgaagactttgtgacaatc

SEQ ID NO: 1663268 - DNA, 25 bp, Homo sapien
atggttgtagcattactgaagactt

SEQ ID NO: 1663269 - DNA, 25 bp, Homo sapien
taagtgttgactgtccagtaaaggc

SEQ ID NO: 1663270 - DNA, 25 bp, Homo sapien
tgtaaagtttccctacacccatgga

SEQ ID NO: 1663271 - DNA, 25 bp, Homo sapien
ctgatgttttgcaaggcttgctttt

SEQ ID NO: 1663272 - DNA, 25 bp, Homo sapien
ttccctacacccatggattgcttga

SEQ ID NO: 1663273 - DNA, 25 bp, Homo sapien
tgatgttgtgcaaggattccttttt

SEQ ID NO: 1663274 - DNA, 25 bp, Homo sapien
tcgtatggtttgcaaggcatgaatc

SEQ ID NO: 1663275 - DNA, 25 bp, Homo sapien
cagtatgaactctcgtatggtttgc

SEQ ID NO: 1663276 - DNA, 25 bp, Homo sapien
ctctcgtatggtttgcaaggcatga

SEQ ID NO: 1663277 - DNA, 25 bp, Homo sapien
gaactctcgtatggtttgcaaggca

SEQ ID NO: 1663278 - DNA, 25 bp, Homo sapien
tgaggaagcaccgatagacttgtcc

SEQ ID NO: 1663279 - DNA, 25 bp, Homo sapien
gatgacttccgactgaaactcctgc

SEQ ID NO: 1663280 - DNA, 25 bp, Homo sapien
gatagacttgtccaattggttacta

SEQ ID NO: 1663281 - DNA, 25 bp, Homo sapien
gggttatgtggtgtctccttaagag

SEQ ID NO: 1663282 - DNA, 25 bp, Homo sapien
tactgtgcctggttgatgagaactc

SEQ ID NO: 1663283 - DNA, 25 bp, Homo sapien
actgtgcctggttgatgagaactcc

SEQ ID NO: 1663284 - DNA, 25 bp, Homo sapien
atactgtgcctggttgatgagaact

SEQ ID NO: 1663285 - DNA, 25 bp, Homo sapien
caaagagaactctatagccacatcc

SEQ ID NO: 1663286 - DNA, 25 bp, Homo sapien
taaagccctctgtgcagggttcagg

SEQ ID NO: 1663287 - DNA, 25 bp, Homo sapien
ctcctccaaagagaactctatagcc

SEQ ID NO: 1663288 - DNA, 25 bp, Homo sapien
aacatcacagccctgtataaagccc

SEQ ID NO: 1663289 - DNA, 25 bp, Homo sapien
cacgtaacatgagtctttggaaatc

SEQ ID NO: 1663290 - DNA, 25 bp, Homo sapien
tcctcacgtaacatgagtctttgga

SEQ ID NO: 1663291 - DNA, 25 bp, Homo sapien
gtggcttcctcacgtaacatgagtc

SEQ ID NO: 1663292 - DNA, 25 bp, Homo sapien
gctcttcttggtggcttcctcacgt

SEQ ID NO: 1663293 - DNA, 25 bp, Homo sapien
tcgccaaaaccgtggcacagcggtg

SEQ ID NO: 1663294 - DNA, 25 bp, Homo sapien
gtcaggagtcacttgaacagttgtt

SEQ ID NO: 1663295 - DNA, 25 bp, Homo sapien
ttgtactggaggtgcatgaaaccac

SEQ ID NO: 1663296 - DNA, 25 bp, Homo sapien
tgtgccacagctgctaggagccaca

SEQ ID NO: 1663297 - DNA, 25 bp, Homo sapien
acctgggccagatccccgagaggtg

SEQ ID NO: 1663298 - DNA, 25 bp, Homo sapien
agacaactaggaaacgcacacgccg

SEQ ID NO: 1663299 - DNA, 25 bp, Homo sapien
gtctgtgccaatcggcgcaggacag

SEQ ID NO: 1663300 - DNA, 25 bp, Homo sapien
acgtcccctatatagcagcaccaga

SEQ ID NO: 1663301 - DNA, 25 bp, Homo sapien
tgcaaaggacaaggggcccggcgcg

SEQ ID NO: 1663302 - DNA, 25 bp, Homo sapien
aggggcccggcgcggaagagaagag

SEQ ID NO: 1663303 - DNA, 25 bp, Homo sapien
gggcccggcgcggaagagaagagtc

SEQ ID NO: 1663304 - DNA, 25 bp, Homo sapien
ggcccggcgcggaagagaagagtct

SEQ ID NO: 1663305 - DNA, 25 bp, Homo sapien
aattccttatagacacggattggtt

SEQ ID NO: 1663306 - DNA, 25 bp, Homo sapien
attccttatagacacggattggttc

SEQ ID NO: 1663307 - DNA, 25 bp, Homo sapien
caattccttatagacacggattggt

SEQ ID NO: 1663308 - DNA, 25 bp, Homo sapien
gctgctccacgtgtaaccttcaaca

SEQ ID NO: 1663309 - DNA, 25 bp, Homo sapien
tcttcatcacggcacaaacaagatt

SEQ ID NO: 1663310 - DNA, 25 bp, Homo sapien
tcctcatgctacagactccacagta

SEQ ID NO: 1663311 - DNA, 25 bp, Homo sapien
gagtgacctcagactaaagatcttg

SEQ ID NO: 1663312 - DNA, 25 bp, Homo sapien
tgatgtgtaatgaggcatgaacctg

SEQ ID NO: 1663313 - DNA, 25 bp, Homo sapien
aatgaggcatgaacctgaaataaag

SEQ ID NO: 1663314 - DNA, 25 bp, Homo sapien
catcacccttgtgaggtttctttct

SEQ ID NO: 1663315 - DNA, 25 bp, Homo sapien
tgtgtaatgaggcatgaacctgaaa

SEQ ID NO: 1663316 - DNA, 25 bp, Homo sapien
taagttctcacttcattatgcattc

SEQ ID NO: 1663317 - DNA, 25 bp, Homo sapien
catttataacacttgtaagttctca

SEQ ID NO: 1663318 - DNA, 25 bp, Homo sapien
taaactgcaaggtatgaacgaagtc

SEQ ID NO: 1663319 - DNA, 25 bp, Homo sapien
gttcgctgataaactgcaaggtatg

SEQ ID NO: 1663320 - DNA, 25 bp, Homo sapien
ctgaggactttgtgacaatcattac

SEQ ID NO: 1663321 - DNA, 25 bp, Homo sapien
tgtgacaatcattacattagtaaag

SEQ ID NO: 1663322 - DNA, 25 bp, Homo sapien
ttacattagtaaagtttccctatga

SEQ ID NO: 1663323 - DNA, 25 bp, Homo sapien
tacattagtaaagtttccctatgac

SEQ ID NO: 1663324 - DNA, 25 bp, Homo sapien
gtgccaggtgtgaatcacgtctgaa

SEQ ID NO: 1663325 - DNA, 25 bp, Homo sapien
atgaactctcctatgtatttcaagg

SEQ ID NO: 1663326 - DNA, 25 bp, Homo sapien
gccaggtgtgaatcacgtctgaaag

SEQ ID NO: 1663327 - DNA, 25 bp, Homo sapien
tgccaggtgtgaatcacgtctgaaa

SEQ ID NO: 1663328 - DNA, 25 bp, Homo sapien
tgatgacttgcaagatatgcttttt

SEQ ID NO: 1663329 - DNA, 25 bp, Homo sapien
gatgacttgcaagatatgctttttg

SEQ ID NO: 1663330 - DNA, 25 bp, Homo sapien
atgatgacttgcaagatatgctttt

SEQ ID NO: 1663331 - DNA, 25 bp, Homo sapien
atgacttgcaagatatgctttttga

SEQ ID NO: 1663332 - DNA, 25 bp, Homo sapien
atgacttgtaactgaaggtcttgcc

SEQ ID NO: 1663333 - DNA, 25 bp, Homo sapien
ctatgatggtatgcaaggtatcgct

SEQ ID NO: 1663334 - DNA, 25 bp, Homo sapien
agggatgacttgtaactgaaggtct

SEQ ID NO: 1663335 - DNA, 25 bp, Homo sapien
tgccttgtgaattacaagggatgac

SEQ ID NO: 1663336 - DNA, 25 bp, Homo sapien
ggctttgccactctcattacattgg

SEQ ID NO: 1663337 - DNA, 25 bp, Homo sapien
gacatttttttaacagtgagctaca

SEQ ID NO: 1663338 - DNA, 25 bp, Homo sapien
catttttttaacagtgagctacaat

SEQ ID NO: 1663339 - DNA, 25 bp, Homo sapien
ctaaatggattatctgacatttttt

SEQ ID NO: 1663340 - DNA, 25 bp, Homo sapien
cctggaggaaattattcccatactt

SEQ ID NO: 1663341 - DNA, 25 bp, Homo sapien
tagaaatatgggttttaggaataca

SEQ ID NO: 1663342 - DNA, 25 bp, Homo sapien
aatacaagaaattctttgggatgct

SEQ ID NO: 1663343 - DNA, 25 bp, Homo sapien
tgcttcctggaggaaattattccca

SEQ ID NO: 1663344 - DNA, 25 bp, Homo sapien
tcatcttgactatcaattttccctt

SEQ ID NO: 1663345 - DNA, 25 bp, Homo sapien
tctcatcttgactatcaattttccc

SEQ ID NO: 1663346 - DNA, 25 bp, Homo sapien
gaagcatcattgacagacttctcat

SEQ ID NO: 1663347 - DNA, 25 bp, Homo sapien
tcattgacagacttctcatcttgac

SEQ ID NO: 1663348 - DNA, 25 bp, Homo sapien
tatatgcagttcaggcagatgtgaa

SEQ ID NO: 1663349 - DNA, 25 bp, Homo sapien
tgaatgaaagcttgatccaagctga

SEQ ID NO: 1663350 - DNA, 25 bp, Homo sapien
gcctttgatcatatcagtctgtatt

SEQ ID NO: 1663351 - DNA, 25 bp, Homo sapien
ttaataggtttgtttccagcatgcc

SEQ ID NO: 1663352 - DNA, 25 bp, Homo sapien
tccagtgtgatgacttgcttgtctt

SEQ ID NO: 1663353 - DNA, 25 bp, Homo sapien
aacacttctgtattgccttgccttc

SEQ ID NO: 1663354 - DNA, 25 bp, Homo sapien
ttcttgatgagaacttccttgtcat

SEQ ID NO: 1663355 - DNA, 25 bp, Homo sapien
tatctctgtcatgagtgcttcatgg

SEQ ID NO: 1663356 - DNA, 25 bp, Homo sapien
gcaatctttgcctcttgaattcaaa

SEQ ID NO: 1663357 - DNA, 25 bp, Homo sapien
tgcccactgcacttcgaattttcag

SEQ ID NO: 1663358 - DNA, 25 bp, Homo sapien
gccgtttcggctcctgcaatctttg

SEQ ID NO: 1663359 - DNA, 25 bp, Homo sapien
aaagtagtctttgcaggttatggaa

SEQ ID NO: 1663360 - DNA, 25 bp, Homo sapien
cagaagactcatattagccctaagg

SEQ ID NO: 1663361 - DNA, 25 bp, Homo sapien
tacggttagaaagatcgcaccactg

SEQ ID NO: 1663362 - DNA, 25 bp, Homo sapien
tttgatccctggtacagacagctcc

SEQ ID NO: 1663363 - DNA, 25 bp, Homo sapien
ttcatcgtgatgagggagctgagca

SEQ ID NO: 1663364 - DNA, 25 bp, Homo sapien
ctggggaagcatcaactttgtcatt

SEQ ID NO: 1663365 - DNA, 25 bp, Homo sapien
aaaagtcaccacacttagacacagg

SEQ ID NO: 1663366 - DNA, 25 bp, Homo sapien
tagacacaggagtttggcaactctc

SEQ ID NO: 1663367 - DNA, 25 bp, Homo sapien
aactgataagtcactgtcctctggc

SEQ ID NO: 1663368 - DNA, 25 bp, Homo sapien
cttttctggtgtagcccctcatctc

SEQ ID NO: 1663369 - DNA, 25 bp, Homo sapien
ctgcacccagggtcccccttcgtct

SEQ ID NO: 1663370 - DNA, 25 bp, Homo sapien
ggtcccccttcgtcttcattactgc

SEQ ID NO: 1663371 - DNA, 25 bp, Homo sapien
cccccttcgtcttcattactgcttc

SEQ ID NO: 1663372 - DNA, 25 bp, Homo sapien
cccttcgtcttcattactgcttccc

SEQ ID NO: 1663373 - DNA, 25 bp, Homo sapien
cttggtgtcttcctcatgtaacagg

SEQ ID NO: 1663374 - DNA, 25 bp, Homo sapien
tggtgtcttcctcatgtaacaggag

SEQ ID NO: 1663375 - DNA, 25 bp, Homo sapien
ttggtgtcttcctcatgtaacagga

SEQ ID NO: 1663376 - DNA, 25 bp, Homo sapien
tgctctccacttcgggacttgttcc

SEQ ID NO: 1663377 - DNA, 25 bp, Homo sapien
tctgctctccacttcgggacttgtt

SEQ ID NO: 1663378 - DNA, 25 bp, Homo sapien
gctctgctctccacttcgggacttg

SEQ ID NO: 1663379 - DNA, 25 bp, Homo sapien
tggctctgctctccacttcgggact

SEQ ID NO: 1663380 - DNA, 25 bp, Homo sapien
gacagggacccatatccaagaatga

SEQ ID NO: 1663381 - DNA, 25 bp, Homo sapien
agcagcccaaggttcagacagattg

SEQ ID NO: 1663382 - DNA, 25 bp, Homo sapien
caaggaacatggcacctgggatgtg

SEQ ID NO: 1663383 - DNA, 25 bp, Homo sapien
tggtggtccacccagtcttacagac

SEQ ID NO: 1663384 - DNA, 25 bp, Homo sapien
accaggtccacggttggccaacgtg

SEQ ID NO: 1663385 - DNA, 25 bp, Homo sapien
gacactactgctaacatggccaagc

SEQ ID NO: 1663386 - DNA, 25 bp, Homo sapien
cacgactcctactggagggaccagg

SEQ ID NO: 1663387 - DNA, 25 bp, Homo sapien
gggtcctgctagtctcccatttcat

SEQ ID NO: 1663388 - DNA, 25 bp, Homo sapien
ctgagcatggcctaaaattgcaaga

SEQ ID NO: 1663389 - DNA, 25 bp, Homo sapien
gatttgccaaccagtcaacatctcc

SEQ ID NO: 1663390 - DNA, 25 bp, Homo sapien
tctgcgagagtgatttgccaaccag

SEQ ID NO: 1663391 - DNA, 25 bp, Homo sapien
gctgtcaggaatccaaaggaacaat

SEQ ID NO: 1663392 - DNA, 25 bp, Homo sapien
aggaaatctattacacaatgagaaa

SEQ ID NO: 1663393 - DNA, 25 bp, Homo sapien
gaaatctattacacaatgagaaaaa

SEQ ID NO: 1663394 - DNA, 25 bp, Homo sapien
aaaagcgcttttgatattccttttg

SEQ ID NO: 1663395 - DNA, 25 bp, Homo sapien
aaagcgcttttgatattccttttgt

SEQ ID NO: 1663396 - DNA, 25 bp, Homo sapien
gtctttcgatcgtcctcaatctcca

SEQ ID NO: 1663397 - DNA, 25 bp, Homo sapien
tctttcgatcgtcctcaatctccat

SEQ ID NO: 1663398 - DNA, 25 bp, Homo sapien
ttcccagtctttcgatcgtcctcaa

SEQ ID NO: 1663399 - DNA, 25 bp, Homo sapien
ttcttcccagtctttcgatcgtcct

SEQ ID NO: 1663400 - DNA, 25 bp, Homo sapien
tgcggtgactttcactccacgcgat

SEQ ID NO: 1663401 - DNA, 25 bp, Homo sapien
tgctggcagcaggatcatgtgactt

SEQ ID NO: 1663402 - DNA, 25 bp, Homo sapien
taaaaagccgattcgctccacagtc

SEQ ID NO: 1663403 - DNA, 25 bp, Homo sapien
cacagtcctcagcttggattggcat

SEQ ID NO: 1663404 - DNA, 25 bp, Homo sapien
ggattggcatcccaacaatgttttg

SEQ ID NO: 1663405 - DNA, 25 bp, Homo sapien
gaattcctccttcgtgtacaagtgc

SEQ ID NO: 1663406 - DNA, 25 bp, Homo sapien
gccttgtctgtcctgcttgtctggg

SEQ ID NO: 1663407 - DNA, 25 bp, Homo sapien
ccttcgtgtacaagtgccttgtctg

SEQ ID NO: 1663408 - DNA, 25 bp, Homo sapien
gtttgcttcactgccaatcgccgga

SEQ ID NO: 1663409 - DNA, 25 bp, Homo sapien
tctggacatggagcttttctctaca

SEQ ID NO: 1663410 - DNA, 25 bp, Homo sapien
gagcttttctctacatttctccagt

SEQ ID NO: 1663411 - DNA, 25 bp, Homo sapien
ctttctggacatggagcttttctct

SEQ ID NO: 1663412 - DNA, 25 bp, Homo sapien
tttctccagttgtttccccatcctg

SEQ ID NO: 1663413 - DNA, 25 bp, Homo sapien
cgcgaatcccccacgcatcctccat

SEQ ID NO: 1663414 - DNA, 25 bp, Homo sapien
ctgtctcttcgcgaatcccccacgc

SEQ ID NO: 1663415 - DNA, 25 bp, Homo sapien
tcttcctgtctcttcgcgaatcccc

SEQ ID NO: 1663416 - DNA, 25 bp, Homo sapien
gtctcttcgcgaatcccccacgcat

SEQ ID NO: 1663417 - DNA, 25 bp, Homo sapien
acttctctcgcagtccctgtttcca

SEQ ID NO: 1663418 - DNA, 25 bp, Homo sapien
tctctgtctcagtttgtctacttct

SEQ ID NO: 1663419 - DNA, 25 bp, Homo sapien
tagcagtgaggggagcggtatgaga

SEQ ID NO: 1663420 - DNA, 25 bp, Homo sapien
tgagaattttcaggcgtgtacgaac

SEQ ID NO: 1663421 - DNA, 25 bp, Homo sapien
gagcggtatgagaattttcaggcgt

SEQ ID NO: 1663422 - DNA, 25 bp, Homo sapien
cggtatgagaattttcaggcgtgta

SEQ ID NO: 1663423 - DNA, 25 bp, Homo sapien
ctccaaatccggggtatggaggtga

SEQ ID NO: 1663424 - DNA, 25 bp, Homo sapien
aatccggggtatggaggtgagagga

SEQ ID NO: 1663425 - DNA, 25 bp, Homo sapien
ccaaatccggggtatggaggtgaga

SEQ ID NO: 1663426 - DNA, 25 bp, Homo sapien
caaatccggggtatggaggtgagag

SEQ ID NO: 1663427 - DNA, 25 bp, Homo sapien
gagggaaatccacgcgccgccatac

SEQ ID NO: 1663428 - DNA, 25 bp, Homo sapien
tagacagagggaaatccacgcgccg

SEQ ID NO: 1663429 - DNA, 25 bp, Homo sapien
agacagagggaaatccacgcgccgc

SEQ ID NO: 1663430 - DNA, 25 bp, Homo sapien
acagagggaaatccacgcgccgcca

SEQ ID NO: 1663431 - DNA, 25 bp, Homo sapien
gagcgacggcgtcgggagggaagaa

SEQ ID NO: 1663432 - DNA, 25 bp, Homo sapien
ttcactccgcgcgatctgtttccgg

SEQ ID NO: 1663433 - DNA, 25 bp, Homo sapien
tgggggggcctatgctttcctcttc

SEQ ID NO: 1663434 - DNA, 25 bp, Homo sapien
tccgggtctgcaggaaactaagcgc

SEQ ID NO: 1663435 - DNA, 25 bp, Homo sapien
gcatctctatttttcgggtttagga

SEQ ID NO: 1663436 - DNA, 25 bp, Homo sapien
aacatttaccagtgaggctgaagca

SEQ ID NO: 1663437 - DNA, 25 bp, Homo sapien
catctctatttttcgggtttaggag

SEQ ID NO: 1663438 - DNA, 25 bp, Homo sapien
gtttaggaggcaacatttaccagtg

SEQ ID NO: 1663439 - DNA, 25 bp, Homo sapien
aatctgtcgcccgaaaagttgggag

SEQ ID NO: 1663440 - DNA, 25 bp, Homo sapien
tctggtaccagtgaagaagacgtcc

SEQ ID NO: 1663441 - DNA, 25 bp, Homo sapien
tcagtttctgggtgacggtcacagg

SEQ ID NO: 1663442 - DNA, 25 bp, Homo sapien
gcctgaatgactctgcccaattgta

SEQ ID NO: 1663443 - DNA, 25 bp, Homo sapien
caaaaagctggtgccagattctctg

SEQ ID NO: 1663444 - DNA, 25 bp, Homo sapien
tcgcctggttatccaggtaagtacc

SEQ ID NO: 1663445 - DNA, 25 bp, Homo sapien
tctggttgacgacctctgcttcttt

SEQ ID NO: 1663446 - DNA, 25 bp, Homo sapien
caggtaagtaccaaaaagctggtgc

SEQ ID NO: 1663447 - DNA, 25 bp, Homo sapien
aacacggaagagtggaaggcatcac

SEQ ID NO: 1663448 - DNA, 25 bp, Homo sapien
cggaagagtggaaggcatcactgct

SEQ ID NO: 1663449 - DNA, 25 bp, Homo sapien
agtggaaggcatcactgctgggcat

SEQ ID NO: 1663450 - DNA, 25 bp, Homo sapien
ccaacacggaagagtggaaggcatc

SEQ ID NO: 1663451 - DNA, 25 bp, Homo sapien
gaatctttagaaacgcagcccactg

SEQ ID NO: 1663452 - DNA, 25 bp, Homo sapien
tgccagtgggcaaagattccgggaa

SEQ ID NO: 1663453 - DNA, 25 bp, Homo sapien
ggcatgagcaggcaagagagccctt

SEQ ID NO: 1663454 - DNA, 25 bp, Homo sapien
cagctatctgtcattggaggcccca

SEQ ID NO: 1663455 - DNA, 25 bp, Homo sapien
tgagtaagagccatccctgtttcct

SEQ ID NO: 1663456 - DNA, 25 bp, Homo sapien
ctgagtaagagccatccctgtttcc

SEQ ID NO: 1663457 - DNA, 25 bp, Homo sapien
gagtaagagccatccctgtttcctt

SEQ ID NO: 1663458 - DNA, 25 bp, Homo sapien
agtaagagccatccctgtttccttt

SEQ ID NO: 1663459 - DNA, 25 bp, Homo sapien
tatttacctcgggtgaagggcgcga

SEQ ID NO: 1663460 - DNA, 25 bp, Homo sapien
tcagagcgagttttacccacatggc

SEQ ID NO: 1663461 - DNA, 25 bp, Homo sapien
cccacatggcgaggtccgtatttac

SEQ ID NO: 1663462 - DNA, 25 bp, Homo sapien
cgggacggcgaatcgaaggcttaat

SEQ ID NO: 1663463 - DNA, 25 bp, Homo sapien
ccatacccagcctgtgaatgcttgc

SEQ ID NO: 1663464 - DNA, 25 bp, Homo sapien
caggagatgtggagacagcaaattt

SEQ ID NO: 1663465 - DNA, 25 bp, Homo sapien
caccttcatgaggagaagtcctttg

SEQ ID NO: 1663466 - DNA, 25 bp, Homo sapien
tgttattctgaaggtaacaccctga

SEQ ID NO: 1663467 - DNA, 25 bp, Homo sapien
aattctccagcctcagcctcctgag

SEQ ID NO: 1663468 - DNA, 25 bp, Homo sapien
tgaaacctccgcctcaagcaattct

SEQ ID NO: 1663469 - DNA, 25 bp, Homo sapien
gtgttgttttaagccactcactttg

SEQ ID NO: 1663470 - DNA, 25 bp, Homo sapien
catgcccagcctaaatttgtgttgt

SEQ ID NO: 1663471 - DNA, 25 bp, Homo sapien
gagagacctgagcaaacagcatact

SEQ ID NO: 1663472 - DNA, 25 bp, Homo sapien
tgatccccggtgtggccatattgag

SEQ ID NO: 1663473 - DNA, 25 bp, Homo sapien
ggactgtgttatcatgggagcagaa

SEQ ID NO: 1663474 - DNA, 25 bp, Homo sapien
caggctgggaagcatggtctctacc

SEQ ID NO: 1663475 - DNA, 25 bp, Homo sapien
aacgagtttcgttcctggtgcccag

SEQ ID NO: 1663476 - DNA, 25 bp, Homo sapien
cacaaaatgcggttataggtttcca

SEQ ID NO: 1663477 - DNA, 25 bp, Homo sapien
taagtatcctaagccacagtgtggg

SEQ ID NO: 1663478 - DNA, 25 bp, Homo sapien
tatggagtatcctactgagacagga

SEQ ID NO: 1663479 - DNA, 25 bp, Homo sapien
aaatcttgatgcctagtaacctgcg

SEQ ID NO: 1663480 - DNA, 25 bp, Homo sapien
gagggattggccactgtcactacat

SEQ ID NO: 1663481 - DNA, 25 bp, Homo sapien
ccatggaaggtgtgtaaggatgcac

SEQ ID NO: 1663482 - DNA, 25 bp, Homo sapien
taccatcggtcactgggtaatggcc

SEQ ID NO: 1663483 - DNA, 25 bp, Homo sapien
ggtagttagacttgatcttacccta

SEQ ID NO: 1663484 - DNA, 25 bp, Homo sapien
ttgccatatgggtagttagacttga

SEQ ID NO: 1663485 - DNA, 25 bp, Homo sapien
agacttgatcttaccctaaaggctt

SEQ ID NO: 1663486 - DNA, 25 bp, Homo sapien
tggattgccatatgggtagttagac

SEQ ID NO: 1663487 - DNA, 25 bp, Homo sapien
tcggtgatttgccaggtgagcattt

SEQ ID NO: 1663488 - DNA, 25 bp, Homo sapien
gtgatttgccaggtgagcattttga

SEQ ID NO: 1663489 - DNA, 25 bp, Homo sapien
cttcggtgatttgccaggtgagcat

SEQ ID NO: 1663490 - DNA, 25 bp, Homo sapien
ttcttcggtgatttgccaggtgagc

SEQ ID NO: 1663491 - DNA, 25 bp, Homo sapien
ggttaggcttgaacgaacactgaag

SEQ ID NO: 1663492 - DNA, 25 bp, Homo sapien
gtttgaatgcatactaaaggctttc

SEQ ID NO: 1663493 - DNA, 25 bp, Homo sapien
ttttcccagtatggattgcctgatg

SEQ ID NO: 1663494 - DNA, 25 bp, Homo sapien
tctccagtatggatgaccttatggg

SEQ ID NO: 1663495 - DNA, 25 bp, Homo sapien
gatgtttgagcgaagactttaccac

SEQ ID NO: 1663496 - DNA, 25 bp, Homo sapien
ggtagtcagacttgaacgaacactg

SEQ ID NO: 1663497 - DNA, 25 bp, Homo sapien
gattgctaggcttgaacgaacacta

SEQ ID NO: 1663498 - DNA, 25 bp, Homo sapien
tgaactctccgatgccttccgaggt

SEQ ID NO: 1663499 - DNA, 25 bp, Homo sapien
tgacttgtaaggttcgaattctgag

SEQ ID NO: 1663500 - DNA, 25 bp, Homo sapien
taaggttcgaattctgagtgaacgc

SEQ ID NO: 1663501 - DNA, 25 bp, Homo sapien
cttgtaaggttcgaattctgagtga

SEQ ID NO: 1663502 - DNA, 25 bp, Homo sapien
tcgaattctgagtgaacgccttgcc

SEQ ID NO: 1663503 - DNA, 25 bp, Homo sapien
tgagtaatgaaaaatggttaagttc

SEQ ID NO: 1663504 - DNA, 25 bp, Homo sapien
ggaatttgttgaagtggtgacactg

SEQ ID NO: 1663505 - DNA, 25 bp, Homo sapien
ctgtgggtttggacactagaaggaa

SEQ ID NO: 1663506 - DNA, 25 bp, Homo sapien
ggtgacactgaggaaccattgttgg

SEQ ID NO: 1663507 - DNA, 25 bp, Homo sapien
caacaccactgtgtggaatactgct

SEQ ID NO: 1663508 - DNA, 25 bp, Homo sapien
tgggccataagcactcccttgtaat

SEQ ID NO: 1663509 - DNA, 25 bp, Homo sapien
caatgtcagggctttcgtgtctttc

SEQ ID NO: 1663510 - DNA, 25 bp, Homo sapien
ttctatgtctcttctgtcgcgttga

SEQ ID NO: 1663511 - DNA, 25 bp, Homo sapien
ctttacggttatgctgagaacaatc

SEQ ID NO: 1663512 - DNA, 25 bp, Homo sapien
ttagaaccaacacaataagaactgg

SEQ ID NO: 1663513 - DNA, 25 bp, Homo sapien
gtggtaacccacattctactctttg

SEQ ID NO: 1663514 - DNA, 25 bp, Homo sapien
tacgcaccccatgtaagactgagga

SEQ ID NO: 1663515 - DNA, 25 bp, Homo sapien
aatggaagaaatggccgagggacct

SEQ ID NO: 1663516 - DNA, 25 bp, Homo sapien
ttagaagatagaacccactcgctta

SEQ ID NO: 1663517 - DNA, 25 bp, Homo sapien
agcagcagccaatgtttccatctcc

SEQ ID NO: 1663518 - DNA, 25 bp, Homo sapien
gcggagacggctggagactcttcca

SEQ ID NO: 1663519 - DNA, 25 bp, Homo sapien
ctttgacacattccggcgttcttgg

SEQ ID NO: 1663520 - DNA, 25 bp, Homo sapien
aacatggagataatattcatatcaa

SEQ ID NO: 1663521 - DNA, 25 bp, Homo sapien
tgaccacgcctttgacacattccgg

SEQ ID NO: 1663522 - DNA, 25 bp, Homo sapien
cacattccggcgttcttggttttct

SEQ ID NO: 1663523 - DNA, 25 bp, Homo sapien
gaaacaaggttccagtagttctcca

SEQ ID NO: 1663524 - DNA, 25 bp, Homo sapien
acatcacgtccctgtataagatcct

SEQ ID NO: 1663525 - DNA, 25 bp, Homo sapien
gtccctgtataagatcctctgagca

SEQ ID NO: 1663526 - DNA, 25 bp, Homo sapien
ccagagaaacaaggttccagtagtt

SEQ ID NO: 1663527 - DNA, 25 bp, Homo sapien
gattgagccctcagcctatgggagc

SEQ ID NO: 1663528 - DNA, 25 bp, Homo sapien
ttgaagtgggtgagctgacagatcc

SEQ ID NO: 1663529 - DNA, 25 bp, Homo sapien
gaaaggctgaggctcggttagacta

SEQ ID NO: 1663530 - DNA, 25 bp, Homo sapien
gaaagttcagttgatcaccaatgcc

SEQ ID NO: 1663531 - DNA, 25 bp, Homo sapien
cctacgcattaaggacttttgagca

SEQ ID NO: 1663532 - DNA, 25 bp, Homo sapien
catgaactaaataagcacaactggt

SEQ ID NO: 1663533 - DNA, 25 bp, Homo sapien
caaggttatctctatggaagtgtta

SEQ ID NO: 1663534 - DNA, 25 bp, Homo sapien
ttaagaaatgataatgcggccgggc

SEQ ID NO: 1663535 - DNA, 25 bp, Homo sapien
gccctatcctgccatgatgtagtat

SEQ ID NO: 1663536 - DNA, 25 bp, Homo sapien
gatgtagtatcactgtgagaaaacc

SEQ ID NO: 1663537 - DNA, 25 bp, Homo sapien
gccatgatgtagtatcactgtgaga

SEQ ID NO: 1663538 - DNA, 25 bp, Homo sapien
tatcctgccatgatgtagtatcact

SEQ ID NO: 1663539 - DNA, 25 bp, Homo sapien
caaagccatccgtcataaaccagag

SEQ ID NO: 1663540 - DNA, 25 bp, Homo sapien
cactgaagtaacaggaccccaggta

SEQ ID NO: 1663541 - DNA, 25 bp, Homo sapien
tacgcagacattaggtggcggtgca

SEQ ID NO: 1663542 - DNA, 25 bp, Homo sapien
cagagcttgtagtaacgtacgcaga

SEQ ID NO: 1663543 - DNA, 25 bp, Homo sapien
cggaacagccggcagacaacagagg

SEQ ID NO: 1663544 - DNA, 25 bp, Homo sapien
ctgcggaacagccggcagacaacag

SEQ ID NO: 1663545 - DNA, 25 bp, Homo sapien
gaacagccggcagacaacagaggca

SEQ ID NO: 1663546 - DNA, 25 bp, Homo sapien
aacagccggcagacaacagaggcat

SEQ ID NO: 1663547 - DNA, 25 bp, Homo sapien
gctacaatcaaaaagtccacggagg

SEQ ID NO: 1663548 - DNA, 25 bp, Homo sapien
tccagagcctctagtcaggatgact

SEQ ID NO: 1663549 - DNA, 25 bp, Homo sapien
gactgtagcatgtcttccctgaagg

SEQ ID NO: 1663550 - DNA, 25 bp, Homo sapien
tcccaacaggagataacgagatatc

SEQ ID NO: 1663551 - DNA, 25 bp, Homo sapien
gtcagcagtactcttaaacgccaat

SEQ ID NO: 1663552 - DNA, 25 bp, Homo sapien
tgactaggagtatgtctaaccaagg

SEQ ID NO: 1663553 - DNA, 25 bp, Homo sapien
gaactatctctatgaggagaactac

SEQ ID NO: 1663554 - DNA, 25 bp, Homo sapien
tgaaatgtccaaactgcccaaagca

SEQ ID NO: 1663555 - DNA, 25 bp, Homo sapien
acaaggtcttgttctatcactcagg

SEQ ID NO: 1663556 - DNA, 25 bp, Homo sapien
gcctcaatctctggggctcaaatga

SEQ ID NO: 1663557 - DNA, 25 bp, Homo sapien
tgagacaaggtcttgttctatcact

SEQ ID NO: 1663558 - DNA, 25 bp, Homo sapien
ctcaatctctggggctcaaatgatc

SEQ ID NO: 1663559 - DNA, 25 bp, Homo sapien
gtggcattctttatagaagtgagaa

SEQ ID NO: 1663560 - DNA, 25 bp, Homo sapien
gcattctttatagaagtgagaaagt

SEQ ID NO: 1663561 - DNA, 25 bp, Homo sapien
ggcattctttatagaagtgagaaag

SEQ ID NO: 1663562 - DNA, 25 bp, Homo sapien
tgtgtggcattctttatagaagtga

SEQ ID NO: 1663563 - DNA, 25 bp, Homo sapien
ttcccagcatgctccaacaaggatg

SEQ ID NO: 1663564 - DNA, 25 bp, Homo sapien
ccagcatgctccaacaaggatgtag

SEQ ID NO: 1663565 - DNA, 25 bp, Homo sapien
cattcccagcatgctccaacaagga

SEQ ID NO: 1663566 - DNA, 25 bp, Homo sapien
tcccagcatgctccaacaaggatgt

SEQ ID NO: 1663567 - DNA, 25 bp, Homo sapien
tctctctaatggcaaggttgttctg

SEQ ID NO: 1663568 - DNA, 25 bp, Homo sapien
acagaattgagaacagtggctcccc

SEQ ID NO: 1663569 - DNA, 25 bp, Homo sapien
aaatacatttctacaggacttgcac

SEQ ID NO: 1663570 - DNA, 25 bp, Homo sapien
gaaaagggatgctttacctcttggc

SEQ ID NO: 1663571 - DNA, 25 bp, Homo sapien
tgttgacgtcatacattaaaatgga

SEQ ID NO: 1663572 - DNA, 25 bp, Homo sapien
tggagtcggaaatccaatgactcac

SEQ ID NO: 1663573 - DNA, 25 bp, Homo sapien
cagtctttacgagtttggagtcgga

SEQ ID NO: 1663574 - DNA, 25 bp, Homo sapien
ccaatgtcagtgtctaaactttcca

SEQ ID NO: 1663575 - DNA, 25 bp, Homo sapien
tcaaatgcagttaccaatgaggcag

SEQ ID NO: 1663576 - DNA, 25 bp, Homo sapien
tatgccagtgagcaggtacgtgtgc

SEQ ID NO: 1663577 - DNA, 25 bp, Homo sapien
gttcatgtcactggatcacgggaga

SEQ ID NO: 1663578 - DNA, 25 bp, Homo sapien
tatcatggtttacacagcgctgaca

SEQ ID NO: 1663579 - DNA, 25 bp, Homo sapien
cagactcagagaagattcgcaatgc

SEQ ID NO: 1663580 - DNA, 25 bp, Homo sapien
gaacaatccaccaggagtatcactt

SEQ ID NO: 1663581 - DNA, 25 bp, Homo sapien
ctagcaaacatgtcaggcaggacgc

SEQ ID NO: 1663582 - DNA, 25 bp, Homo sapien
aatgccaatgccaggcatttcagga

SEQ ID NO: 1663583 - DNA, 25 bp, Homo sapien
ctgactccttttctttcctcttcct

SEQ ID NO: 1663584 - DNA, 25 bp, Homo sapien
tgactccttttctttcctcttcctc

SEQ ID NO: 1663585 - DNA, 25 bp, Homo sapien
tgctgcttagggctgagaatctata

SEQ ID NO: 1663586 - DNA, 25 bp, Homo sapien
catccccttcatgtgccacagtcac

SEQ ID NO: 1663587 - DNA, 25 bp, Homo sapien
tgggtaacataaaagagtctttaga

SEQ ID NO: 1663588 - DNA, 25 bp, Homo sapien
gtgccacagtcacacgcacagatct

SEQ ID NO: 1663589 - DNA, 25 bp, Homo sapien
tctgcgccccactgcaccaggggga

SEQ ID NO: 1663590 - DNA, 25 bp, Homo sapien
cctgtggaaagatggtcctctgcgc

SEQ ID NO: 1663591 - DNA, 25 bp, Homo sapien
atacggggacgagaaactcctacag

SEQ ID NO: 1663592 - DNA, 25 bp, Homo sapien
gtggaaagatggtcctctgcgcccc

SEQ ID NO: 1663593 - DNA, 25 bp, Homo sapien
caaaagacagtgattggtactatgc

SEQ ID NO: 1663594 - DNA, 25 bp, Homo sapien
tattactcagctgggctctaaaaca

SEQ ID NO: 1663595 - DNA, 25 bp, Homo sapien
tgtttctgcaaaacgcctaggcact

SEQ ID NO: 1663596 - DNA, 25 bp, Homo sapien
gctggctacagaatagagtcaactt

SEQ ID NO: 1663597 - DNA, 25 bp, Homo sapien
tctcctgttggggacttgttctcac

SEQ ID NO: 1663598 - DNA, 25 bp, Homo sapien
ggctctgctctcctgttggggactt

SEQ ID NO: 1663599 - DNA, 25 bp, Homo sapien
gttggggacttgttctcaccaggat

SEQ ID NO: 1663600 - DNA, 25 bp, Homo sapien
ctgctctcctgttggggacttgttc

SEQ ID NO: 1663601 - DNA, 25 bp, Homo sapien
gagatcacaaacgtttccacggagg

SEQ ID NO: 1663602 - DNA, 25 bp, Homo sapien
ccttagctgagatgtgcaagactgc

SEQ ID NO: 1663603 - DNA, 25 bp, Homo sapien
tgcagatcacgcagggagaggtctt

SEQ ID NO: 1663604 - DNA, 25 bp, Homo sapien
gggccagcccacatggaagccttga

SEQ ID NO: 1663605 - DNA, 25 bp, Homo sapien
cagttggtcgcccagaagttcaggt

SEQ ID NO: 1663606 - DNA, 25 bp, Homo sapien
tataagttcacccagttagtgtcgg

SEQ ID NO: 1663607 - DNA, 25 bp, Homo sapien
ggtttgaataactagctagcacagc

SEQ ID NO: 1663608 - DNA, 25 bp, Homo sapien
gaccgtggcaaattactacaacctg

SEQ ID NO: 1663609 - DNA, 25 bp, Homo sapien
ccagcacttcgtgggctgtaatccc

SEQ ID NO: 1663610 - DNA, 25 bp, Homo sapien
gaactacaatcactcatatatacac

SEQ ID NO: 1663611 - DNA, 25 bp, Homo sapien
agggtccggagtgacggctcatgcc

SEQ ID NO: 1663612 - DNA, 25 bp, Homo sapien
ctgaggactcctgcaaatcgagtct

SEQ ID NO: 1663613 - DNA, 25 bp, Homo sapien
agcttccagtggctgcaagaagagc

SEQ ID NO: 1663614 - DNA, 25 bp, Homo sapien
gcttccagtggctgcaagaagagct

SEQ ID NO: 1663615 - DNA, 25 bp, Homo sapien
gtgcagagaggccaggagttgggag

SEQ ID NO: 1663616 - DNA, 25 bp, Homo sapien
ctcgtgcagagaggccaggagttgg

SEQ ID NO: 1663617 - DNA, 25 bp, Homo sapien
agagaggccaggagttgggaggtgc

SEQ ID NO: 1663618 - DNA, 25 bp, Homo sapien
gcagagaggccaggagttgggaggt

SEQ ID NO: 1663619 - DNA, 25 bp, Homo sapien
gtttccagagctttggaggagagac

SEQ ID NO: 1663620 - DNA, 25 bp, Homo sapien
ggagtctgtttccagagctttggag

SEQ ID NO: 1663621 - DNA, 25 bp, Homo sapien
tctgtttccagagctttggaggaga

SEQ ID NO: 1663622 - DNA, 25 bp, Homo sapien
tctcactcccaggagtctgtttcca

SEQ ID NO: 1663623 - DNA, 25 bp, Homo sapien
cgaggctgaagccactcagtgggct

SEQ ID NO: 1663624 - DNA, 25 bp, Homo sapien
ctgggagccgggatctctctaggtc

SEQ ID NO: 1663625 - DNA, 25 bp, Homo sapien
gcagtgttcggatccaggaacgttt

SEQ ID NO: 1663626 - DNA, 25 bp, Homo sapien
ccgggatctctctaggtcgtcaggg

SEQ ID NO: 1663627 - DNA, 25 bp, Homo sapien
tggcttgaatattattcacagaccc

SEQ ID NO: 1663628 - DNA, 25 bp, Homo sapien
tccttgggtcttgcgtggggcaaac

SEQ ID NO: 1663629 - DNA, 25 bp, Homo sapien
tattcacagacccagatccttgggt

SEQ ID NO: 1663630 - DNA, 25 bp, Homo sapien
tcttgcgtggggcaaactgactgca

SEQ ID NO: 1663631 - DNA, 25 bp, Homo sapien
cacaaattcctgagcggaggggcac

SEQ ID NO: 1663632 - DNA, 25 bp, Homo sapien
ttctattgcacaaattcctgagcgg

SEQ ID NO: 1663633 - DNA, 25 bp, Homo sapien
attgcacaaattcctgagcggaggg

SEQ ID NO: 1663634 - DNA, 25 bp, Homo sapien
acaaattcctgagcggaggggcacc

SEQ ID NO: 1663635 - DNA, 25 bp, Homo sapien
cgctgtttagggagtgcctccttca

SEQ ID NO: 1663636 - DNA, 25 bp, Homo sapien
ccccgctgtttagggagtgcctcct

SEQ ID NO: 1663637 - DNA, 25 bp, Homo sapien
tcccccgctgtttagggagtgcctc

SEQ ID NO: 1663638 - DNA, 25 bp, Homo sapien
ccgctgtttagggagtgcctccttc

SEQ ID NO: 1663639 - DNA, 25 bp, Homo sapien
catgttggaggagtacattttccag

SEQ ID NO: 1663640 - DNA, 25 bp, Homo sapien
ttcactggagggtttgtagtaagat

SEQ ID NO: 1663641 - DNA, 25 bp, Homo sapien
gagggtttgtagtaagatgtctgca

SEQ ID NO: 1663642 - DNA, 25 bp, Homo sapien
tcccttgggccacacattcactgga

SEQ ID NO: 1663643 - DNA, 25 bp, Homo sapien
gcggagattttaagtccgtagcgac

SEQ ID NO: 1663644 - DNA, 25 bp, Homo sapien
gaggcgcaggttgagtctacacaga

SEQ ID NO: 1663645 - DNA, 25 bp, Homo sapien
cagaggaacactcatacgccatggt

SEQ ID NO: 1663646 - DNA, 25 bp, Homo sapien
ccatggtgtgatgcttgctccgcac

SEQ ID NO: 1663647 - DNA, 25 bp, Homo sapien
catggactctgatgtcaatgaatgc

SEQ ID NO: 1663648 - DNA, 25 bp, Homo sapien
gaatgcttgaacttgtgatgaaggg

SEQ ID NO: 1663649 - DNA, 25 bp, Homo sapien
ccttggttaatagcttcaacatgca

SEQ ID NO: 1663650 - DNA, 25 bp, Homo sapien
tgtgagacctaaatgaagcctctgc

SEQ ID NO: 1663651 - DNA, 25 bp, Homo sapien
cttagtatggataatttgatgtctg

SEQ ID NO: 1663652 - DNA, 25 bp, Homo sapien
tccttagtatggataatttgatgtc

SEQ ID NO: 1663653 - DNA, 25 bp, Homo sapien
tagtatggataatttgatgtctgaa

SEQ ID NO: 1663654 - DNA, 25 bp, Homo sapien
gtatggataatttgatgtctgaaga

SEQ ID NO: 1663655 - DNA, 25 bp, Homo sapien
tctccgatgtagtgcaaggcatgag

SEQ ID NO: 1663656 - DNA, 25 bp, Homo sapien
tgggtagttaagttcgaatgcacac

SEQ ID NO: 1663657 - DNA, 25 bp, Homo sapien
tgacgtacagtcatgtgtgagccat

SEQ ID NO: 1663658 - DNA, 25 bp, Homo sapien
gaactctccaatgacgcgcaaggtt

SEQ ID NO: 1663659 - DNA, 25 bp, Homo sapien
tgtggaatacttctcctgggttacc

SEQ ID NO: 1663660 - DNA, 25 bp, Homo sapien
gcgttggtctctcctacaagtaaga

SEQ ID NO: 1663661 - DNA, 25 bp, Homo sapien
ccttcctgttgtggtgctagttcct

SEQ ID NO: 1663662 - DNA, 25 bp, Homo sapien
ccttgattacacagttacgagacag

SEQ ID NO: 1663663 - DNA, 25 bp, Homo sapien
aatatctgtacccacctagaccagg

SEQ ID NO: 1663664 - DNA, 25 bp, Homo sapien
tattacattttacctagccacagca

SEQ ID NO: 1663665 - DNA, 25 bp, Homo sapien
taatagcactgagaaaacgagacaa

SEQ ID NO: 1663666 - DNA, 25 bp, Homo sapien
cctacgttagccctgaaaggagtat

SEQ ID NO: 1663667 - DNA, 25 bp, Homo sapien
agccgagattgcaccattgcactcc

SEQ ID NO: 1663668 - DNA, 25 bp, Homo sapien
cgagattgcaccattgcactccagc

SEQ ID NO: 1663669 - DNA, 25 bp, Homo sapien
gaatcatttgaatccgggaggcgaa

SEQ ID NO: 1663670 - DNA, 25 bp, Homo sapien
aatcatttgaatccgggaggcgaag

SEQ ID NO: 1663671 - DNA, 25 bp, Homo sapien
cttgctactcgtacttggctttcta

SEQ ID NO: 1663672 - DNA, 25 bp, Homo sapien
ttggttttcttgctactcgtacttg

SEQ ID NO: 1663673 - DNA, 25 bp, Homo sapien
cctttgatccattcccacccttttg

SEQ ID NO: 1663674 - DNA, 25 bp, Homo sapien
ggttttcttgctactcgtacttggc

SEQ ID NO: 1663675 - DNA, 25 bp, Homo sapien
aagagaatttcccgcttataaaatg

SEQ ID NO: 1663676 - DNA, 25 bp, Homo sapien
agaatttcccgcttataaaatgaat

SEQ ID NO: 1663677 - DNA, 25 bp, Homo sapien
agagaatttcccgcttataaaatga

SEQ ID NO: 1663678 - DNA, 25 bp, Homo sapien
gagaatttcccgcttataaaatgaa

SEQ ID NO: 1663679 - DNA, 25 bp, Homo sapien
aatggaaagataccaagggcagatt

SEQ ID NO: 1663680 - DNA, 25 bp, Homo sapien
gggcagattttgacttctggaagaa

SEQ ID NO: 1663681 - DNA, 25 bp, Homo sapien
ggcagattttgacttctggaagaaa

SEQ ID NO: 1663682 - DNA, 25 bp, Homo sapien
gaaagataccaagggcagattttga

SEQ ID NO: 1663683 - DNA, 25 bp, Homo sapien
accaggttcctgtagttctccaaca

SEQ ID NO: 1663684 - DNA, 25 bp, Homo sapien
ccaggttcctgtagttctccaacat

SEQ ID NO: 1663685 - DNA, 25 bp, Homo sapien
ccagggagaccaggttcctgtagtt

SEQ ID NO: 1663686 - DNA, 25 bp, Homo sapien
ggagaccaggttcctgtagttctcc

SEQ ID NO: 1663687 - DNA, 25 bp, Homo sapien
aaagtcctctgtgtagagttcaggc

SEQ ID NO: 1663688 - DNA, 25 bp, Homo sapien
aagtcctctgtgtagagttcaggca

SEQ ID NO: 1663689 - DNA, 25 bp, Homo sapien
gtcctctgtgtagagttcaggcatt

SEQ ID NO: 1663690 - DNA, 25 bp, Homo sapien
ataaagtcctctgtgtagagttcag

SEQ ID NO: 1663691 - DNA, 25 bp, Homo sapien
cttcagaagttcatgtcacagggtc

SEQ ID NO: 1663692 - DNA, 25 bp, Homo sapien
gaaggcacgggtcaatgtgagcaaa

SEQ ID NO: 1663693 - DNA, 25 bp, Homo sapien
cagtagagatgagaaggactgaggg

SEQ ID NO: 1663694 - DNA, 25 bp, Homo sapien
agggtcagggtgagacggaatctca

SEQ ID NO: 1663695 - DNA, 25 bp, Homo sapien
tgtgccaggagtctttggaagtcaa

SEQ ID NO: 1663696 - DNA, 25 bp, Homo sapien
catgtgccaggagtctttggaagtc

SEQ ID NO: 1663697 - DNA, 25 bp, Homo sapien
ttcctcatgtgccaggagtctttgg

SEQ ID NO: 1663698 - DNA, 25 bp, Homo sapien
ctcatgtgccaggagtctttggaag

SEQ ID NO: 1663699 - DNA, 25 bp, Homo sapien
ttgaggcaggagcaagctcggccca

SEQ ID NO: 1663700 - DNA, 25 bp, Homo sapien
gcacagcccacgtgaaggccttgag

SEQ ID NO: 1663701 - DNA, 25 bp, Homo sapien
gagcaagctcggcccaggaacagga

SEQ ID NO: 1663702 - DNA, 25 bp, Homo sapien
gggccagcgagttccagcagaggca

SEQ ID NO: 1663703 - DNA, 25 bp, Homo sapien
tcttgcgtggggcaaactgactgca

SEQ ID NO: 1663704 - DNA, 25 bp, Homo sapien
tccttgggtcttgcgtggggcaaac

SEQ ID NO: 1663705 - DNA, 25 bp, Homo sapien
tattcacagacccagatccttgggt

SEQ ID NO: 1663706 - DNA, 25 bp, Homo sapien
tggcttgaatattattcacagaccc

SEQ ID NO: 1663707 - DNA, 25 bp, Homo sapien
cgctgtttagggagtgcctccttca

SEQ ID NO: 1663708 - DNA, 25 bp, Homo sapien
ccgctgtttagggagtgcctccttc

SEQ ID NO: 1663709 - DNA, 25 bp, Homo sapien
ccccgctgtttagggagtgcctcct

SEQ ID NO: 1663710 - DNA, 25 bp, Homo sapien
tcccccgctgtttagggagtgcctc

SEQ ID NO: 1663711 - DNA, 25 bp, Homo sapien
cgtttagcttctgaacttctcgcca

SEQ ID NO: 1663712 - DNA, 25 bp, Homo sapien
ggcccgtttagcttctgaacttctc

SEQ ID NO: 1663713 - DNA, 25 bp, Homo sapien
gcccgtttagcttctgaacttctcg

SEQ ID NO: 1663714 - DNA, 25 bp, Homo sapien
ttagcttctgaacttctcgccaccc

SEQ ID NO: 1663715 - DNA, 25 bp, Homo sapien
tttatcacattggttccaaatgcag

SEQ ID NO: 1663716 - DNA, 25 bp, Homo sapien
agacctctatcaaaactggacacaa

SEQ ID NO: 1663717 - DNA, 25 bp, Homo sapien
tctaaaattacctactagtcaacaa

SEQ ID NO: 1663718 - DNA, 25 bp, Homo sapien
gcagctcacagcttactattttaac

SEQ ID NO: 1663719 - DNA, 25 bp, Homo sapien
ttttctcgaaatgtgtctagttact

SEQ ID NO: 1663720 - DNA, 25 bp, Homo sapien
cccaggacgggaatacacctcttgg

SEQ ID NO: 1663721 - DNA, 25 bp, Homo sapien
tgaaaatctctaaccatcctctact

SEQ ID NO: 1663722 - DNA, 25 bp, Homo sapien
tcaaagcgacttcaacccaaaggga

SEQ ID NO: 1663723 - DNA, 25 bp, Homo sapien
acatcggctgtggaaatgggaaaca

SEQ ID NO: 1663724 - DNA, 25 bp, Homo sapien
taagggccgtatcgaccctggacat

SEQ ID NO: 1663725 - DNA, 25 bp, Homo sapien
aacagggagcgcaggtttaatctac

SEQ ID NO: 1663726 - DNA, 25 bp, Homo sapien
ttaatctacacagagggtcactcac

SEQ ID NO: 1663727 - DNA, 25 bp, Homo sapien
caccttcacccaacgcgatccgttt

SEQ ID NO: 1663728 - DNA, 25 bp, Homo sapien
cgcgatccgtttccgggcctgtagg

SEQ ID NO: 1663729 - DNA, 25 bp, Homo sapien
tcaccttcacccaacgcgatccgtt

SEQ ID NO: 1663730 - DNA, 25 bp, Homo sapien
ccaacgcgatccgtttccgggcctg

SEQ ID NO: 1663731 - DNA, 25 bp, Homo sapien
taggtatagatggtgagtaaaggac

SEQ ID NO: 1663732 - DNA, 25 bp, Homo sapien
tactgaaatgtgacaagatgagtct

SEQ ID NO: 1663733 - DNA, 25 bp, Homo sapien
caaagttaccacaatcacaatgata

SEQ ID NO: 1663734 - DNA, 25 bp, Homo sapien
cagacaacatggattcaaatctcga

SEQ ID NO: 1663735 - DNA, 25 bp, Homo sapien
acctagtctgtacctgccattgttt

SEQ ID NO: 1663736 - DNA, 25 bp, Homo sapien
tgttcactggagtaacacagagaag

SEQ ID NO: 1663737 - DNA, 25 bp, Homo sapien
ctaaagatttacaaggacactccat

SEQ ID NO: 1663738 - DNA, 25 bp, Homo sapien
gctggttaacctccacacgcttgat

SEQ ID NO: 1663739 - DNA, 25 bp, Homo sapien
catctggccaagctgataatgtccg

SEQ ID NO: 1663740 - DNA, 25 bp, Homo sapien
caaatcacgtgtgggatcctcaccc

SEQ ID NO: 1663741 - DNA, 25 bp, Homo sapien
cctttggcactagatggaagttcaa

SEQ ID NO: 1663742 - DNA, 25 bp, Homo sapien
aatgtccgtgttccctcctttggca

SEQ ID NO: 1663743 - DNA, 25 bp, Homo sapien
ggtttttctgaccaagctctccact

SEQ ID NO: 1663744 - DNA, 25 bp, Homo sapien
ttcagtagagaaagtggcaaccatt

SEQ ID NO: 1663745 - DNA, 25 bp, Homo sapien
gcaggtagagccttacttccctaaa

SEQ ID NO: 1663746 - DNA, 25 bp, Homo sapien
aattccagtgtcctgaggtcttggc

SEQ ID NO: 1663747 - DNA, 25 bp, Homo sapien
ccacagatccatagttcaggttgaa

SEQ ID NO: 1663748 - DNA, 25 bp, Homo sapien
tgtgtggttccatcaaatacgtaga

SEQ ID NO: 1663749 - DNA, 25 bp, Homo sapien
ccacgaaaggtgcttaaggatgcaa

SEQ ID NO: 1663750 - DNA, 25 bp, Homo sapien
ctgcaaagctgtgaggcctgaataa

SEQ ID NO: 1663751 - DNA, 25 bp, Homo sapien
gaattctgtgatggcttgcaaggtt

SEQ ID NO: 1663752 - DNA, 25 bp, Homo sapien
ctatgaattctgtgatggcttgcaa

SEQ ID NO: 1663753 - DNA, 25 bp, Homo sapien
atggcttgcaaggtttgaactctga

SEQ ID NO: 1663754 - DNA, 25 bp, Homo sapien
tggcttgcaaggtttgaactctgac

SEQ ID NO: 1663755 - DNA, 25 bp, Homo sapien
tagaactttccacacgttacatttg

SEQ ID NO: 1663756 - DNA, 25 bp, Homo sapien
gggtagttaggcttgaacagatact

SEQ ID NO: 1663757 - DNA, 25 bp, Homo sapien
agtatggattgtctgatgggtagtt

SEQ ID NO: 1663758 - DNA, 25 bp, Homo sapien
ttgtctgatgggtagttaggcttga

SEQ ID NO: 1663759 - DNA, 25 bp, Homo sapien
tgaacagatactaaagggtttccca

SEQ ID NO: 1663760 - DNA, 25 bp, Homo sapien
gaattccccgatgtcttgcaaggtg

SEQ ID NO: 1663761 - DNA, 25 bp, Homo sapien
agtatgaattccccgatgtcttgca

SEQ ID NO: 1663762 - DNA, 25 bp, Homo sapien
tatgaattccccgatgtcttgcaag

SEQ ID NO: 1663763 - DNA, 25 bp, Homo sapien
ccccgatgtcttgcaaggtgtgaat

SEQ ID NO: 1663764 - DNA, 25 bp, Homo sapien
gaattcgctgatgccttgaaaggta

SEQ ID NO: 1663765 - DNA, 25 bp, Homo sapien
taagcttgaacgagctctaaaggct

SEQ ID NO: 1663766 - DNA, 25 bp, Homo sapien
aatagctaggcttgaacgaacacca

SEQ ID NO: 1663767 - DNA, 25 bp, Homo sapien
tgcctgatggatagctaagcttgaa

SEQ ID NO: 1663768 - DNA, 25 bp, Homo sapien
atttgtaaggtttctctttagtatg

SEQ ID NO: 1663769 - DNA, 25 bp, Homo sapien
tgccacactcataacatttgtaagg

SEQ ID NO: 1663770 - DNA, 25 bp, Homo sapien
tttgtaaggtttctctttagtatga

SEQ ID NO: 1663771 - DNA, 25 bp, Homo sapien
ctttgccacactcataacatttgta

SEQ ID NO: 1663772 - DNA, 25 bp, Homo sapien
gatgacttgcaaggtgtgaattttg

SEQ ID NO: 1663773 - DNA, 25 bp, Homo sapien
ggtgtgaattttgaggaaagaccat

SEQ ID NO: 1663774 - DNA, 25 bp, Homo sapien
cttctctgatgacttgcaaggtgtg

SEQ ID NO: 1663775 - DNA, 25 bp, Homo sapien
cttgcaaggtgtgaattttgaggaa

SEQ ID NO: 1663776 - DNA, 25 bp, Homo sapien
tccattagatttgtaagggcttccc

SEQ ID NO: 1663777 - DNA, 25 bp, Homo sapien
cacatccattagatttgtaagggct

SEQ ID NO: 1663778 - DNA, 25 bp, Homo sapien
ttgacattataaggcatttgttgag

SEQ ID NO: 1663779 - DNA, 25 bp, Homo sapien
tattgttgaaagacttctcaacctg

SEQ ID NO: 1663780 - DNA, 25 bp, Homo sapien
tgggtcaaaagcactcctttgtaat

SEQ ID NO: 1663781 - DNA, 25 bp, Homo sapien
cattgatactcaaggccatgtgtat

SEQ ID NO: 1663782 - DNA, 25 bp, Homo sapien
tgtgtatttttctggacttccctga

SEQ ID NO: 1663783 - DNA, 25 bp, Homo sapien
cttcttgggtcaaaagcactccttt

SEQ ID NO: 1663784 - DNA, 25 bp, Homo sapien
cactgtttggaatacttctcctgta

SEQ ID NO: 1663785 - DNA, 25 bp, Homo sapien
actcttccctttgtgtagtaaatct

SEQ ID NO: 1663786 - DNA, 25 bp, Homo sapien
ctcttccctttgtgtagtaaatctt

SEQ ID NO: 1663787 - DNA, 25 bp, Homo sapien
aatacttctcctgtattactcttcc

SEQ ID NO: 1663788 - DNA, 25 bp, Homo sapien
taatactgaggtcaaaacaagagat

SEQ ID NO: 1663789 - DNA, 25 bp, Homo sapien
catctgggtttcctgctatttgtac

SEQ ID NO: 1663790 - DNA, 25 bp, Homo sapien
tgctatttgtacttggctctccaaa

SEQ ID NO: 1663791 - DNA, 25 bp, Homo sapien
gctttgatccattcccatccatctg

SEQ ID NO: 1663792 - DNA, 25 bp, Homo sapien
aaagtcctctgagcggggtccaggc

SEQ ID NO: 1663793 - DNA, 25 bp, Homo sapien
tctgagcggggtccaggcatgtcca

SEQ ID NO: 1663794 - DNA, 25 bp, Homo sapien
gggaggccaggttcctataattctc

SEQ ID NO: 1663795 - DNA, 25 bp, Homo sapien
ccctgtacaaagtcctctgagcggg

SEQ ID NO: 1663796 - DNA, 25 bp, Homo sapien
gaacgtggttctaccctctctaatg

SEQ ID NO: 1663797 - DNA, 25 bp, Homo sapien
cctagcaccagttgcacaagggtcc

SEQ ID NO: 1663798 - DNA, 25 bp, Homo sapien
gaagttctgctcctataaccgaaca

SEQ ID NO: 1663799 - DNA, 25 bp, Homo sapien
tctctaatgggaaagaagttctgct

SEQ ID NO: 1663800 - DNA, 25 bp, Homo sapien
ctcttcctcttcttcaagggttctt

SEQ ID NO: 1663801 - DNA, 25 bp, Homo sapien
tgtctttctttcctcttcctcttct

SEQ ID NO: 1663802 - DNA, 25 bp, Homo sapien
gcctgacttgtctttctttcctctt

SEQ ID NO: 1663803 - DNA, 25 bp, Homo sapien
tcttcctcttcttcaagggttcttc

SEQ ID NO: 1663804 - DNA, 25 bp, Homo sapien
ttgaatatccaaaatgtgctgttta

SEQ ID NO: 1663805 - DNA, 25 bp, Homo sapien
gctcctatgggaagatcaataagtg

SEQ ID NO: 1663806 - DNA, 25 bp, Homo sapien
gtgctgtttattgctcagaatcaac

SEQ ID NO: 1663807 - DNA, 25 bp, Homo sapien
cccttcctatgccacaatcacacac

SEQ ID NO: 1663808 - DNA, 25 bp, Homo sapien
tgtccttcatgtctctggacatcga

SEQ ID NO: 1663809 - DNA, 25 bp, Homo sapien
tctggacatcgagcttttctctaca

SEQ ID NO: 1663810 - DNA, 25 bp, Homo sapien
tctctacatttccccagttgctttt

SEQ ID NO: 1663811 - DNA, 25 bp, Homo sapien
ttctctacatttccccagttgcttt

SEQ ID NO: 1663812 - DNA, 25 bp, Homo sapien
cggttcgcaagtttaatccatactg

SEQ ID NO: 1663813 - DNA, 25 bp, Homo sapien
ggcacggcggttcgcaagtttaatc

SEQ ID NO: 1663814 - DNA, 25 bp, Homo sapien
cacggcggttcgcaagtttaatcca

SEQ ID NO: 1663815 - DNA, 25 bp, Homo sapien
cggcggttcgcaagtttaatccata

SEQ ID NO: 1663816 - DNA, 25 bp, Homo sapien
actgcagaaaactgcgcgtgcgcgg

SEQ ID NO: 1663817 - DNA, 25 bp, Homo sapien
gcgcggaaaagagcccgggcactct

SEQ ID NO: 1663818 - DNA, 25 bp, Homo sapien
ggcgtcacccgcacccaacacgatc

SEQ ID NO: 1663819 - DNA, 25 bp, Homo sapien
cacgatccgcttccggaactgcaga

SEQ ID NO: 1663820 - DNA, 25 bp, Homo sapien
ggcacggcgattggatccagcaatt

SEQ ID NO: 1663821 - DNA, 25 bp, Homo sapien
gacccagtcctgctagggagtctgc

SEQ ID NO: 1663822 - DNA, 25 bp, Homo sapien
gaaagaatagacttacgtggaccac

SEQ ID NO: 1663823 - DNA, 25 bp, Homo sapien
gggagcaccgttccaatttgaagca

SEQ ID NO: 1663824 - DNA, 25 bp, Homo sapien
atgatcaaaatgttatgagggtgaa

SEQ ID NO: 1663825 - DNA, 25 bp, Homo sapien
ggtgaagttcaatacagttccagta

SEQ ID NO: 1663826 - DNA, 25 bp, Homo sapien
gaagttcaatacagttccagtagag

SEQ ID NO: 1663827 - DNA, 25 bp, Homo sapien
tttaggtgaagttcaatacagttcc

SEQ ID NO: 1663828 - DNA, 25 bp, Homo sapien
cctagtaacaaacatgggattctgg

SEQ ID NO: 1663829 - DNA, 25 bp, Homo sapien
aaatctatgatgcattcttaaatag

SEQ ID NO: 1663830 - DNA, 25 bp, Homo sapien
ccagcagttaatgtaaatcctagta

SEQ ID NO: 1663831 - DNA, 25 bp, Homo sapien
cttaaatagtagcaaaatgtgattc

SEQ ID NO: 1663832 - DNA, 25 bp, Homo sapien
gccagtagagaatttcttcccatac

SEQ ID NO: 1663833 - DNA, 25 bp, Homo sapien
cggccagtagagaatttcttcccat

SEQ ID NO: 1663834 - DNA, 25 bp, Homo sapien
ggccagtagagaatttcttcccata

SEQ ID NO: 1663835 - DNA, 25 bp, Homo sapien
ccggccagtagagaatttcttccca

SEQ ID NO: 1663836 - DNA, 25 bp, Homo sapien
tcttctgtcagaagaagggcacctg

SEQ ID NO: 1663837 - DNA, 25 bp, Homo sapien
tggtccaggagtaatagtctcagca

SEQ ID NO: 1663838 - DNA, 25 bp, Homo sapien
tatgaatcctcacctacagttgtgg

SEQ ID NO: 1663839 - DNA, 25 bp, Homo sapien
aaactggccgcactcctttgtaagg

SEQ ID NO: 1663840 - DNA, 25 bp, Homo sapien
ccactatgaattcttcgatgttttg

SEQ ID NO: 1663841 - DNA, 25 bp, Homo sapien
ttttgcaaggtttgaattttgagta

SEQ ID NO: 1663842 - DNA, 25 bp, Homo sapien
actatgaattcttcgatgttttgca

SEQ ID NO: 1663843 - DNA, 25 bp, Homo sapien
gaattcttcgatgttttgcaaggtt

SEQ ID NO: 1663844 - DNA, 25 bp, Homo sapien
tgtctccagtatggactgccatatg

SEQ ID NO: 1663845 - DNA, 25 bp, Homo sapien
ctaggtttgaatgtacactaaatgc

SEQ ID NO: 1663846 - DNA, 25 bp, Homo sapien
ccatatgggtagttagggttgaacg

SEQ ID NO: 1663847 - DNA, 25 bp, Homo sapien
aattgcaaggtacgaattgtgtctg

SEQ ID NO: 1663848 - DNA, 25 bp, Homo sapien
ctaagtgtgaatactgagtgaaaac

SEQ ID NO: 1663849 - DNA, 25 bp, Homo sapien
gatttgctaagtgtgaatactgagt

SEQ ID NO: 1663850 - DNA, 25 bp, Homo sapien
tgatttgctaagtgtgaatactgag

SEQ ID NO: 1663851 - DNA, 25 bp, Homo sapien
ttgctaagtgtgaatactgagtgaa

SEQ ID NO: 1663852 - DNA, 25 bp, Homo sapien
gagatgtgactgaaagcttactcca

SEQ ID NO: 1663853 - DNA, 25 bp, Homo sapien
ggtagtcaggcttgagcgaacacta

SEQ ID NO: 1663854 - DNA, 25 bp, Homo sapien
gaattctcttatgacttgttagccg

SEQ ID NO: 1663855 - DNA, 25 bp, Homo sapien
gattttcaatatgcctgtttcctgc

SEQ ID NO: 1663856 - DNA, 25 bp, Homo sapien
acactcaaagtcgtatgtatttttc

SEQ ID NO: 1663857 - DNA, 25 bp, Homo sapien
ctgacactcaaagtcgtatgtattt

SEQ ID NO: 1663858 - DNA, 25 bp, Homo sapien
gacactcaaagtcgtatgtattttt

SEQ ID NO: 1663859 - DNA, 25 bp, Homo sapien
tgacactcaaagtcgtatgtatttt

SEQ ID NO: 1663860 - DNA, 25 bp, Homo sapien
acttcaccgtgtagaacgcttctcc

SEQ ID NO: 1663861 - DNA, 25 bp, Homo sapien
aggacaagcctacagtgtcacagct

SEQ ID NO: 1663862 - DNA, 25 bp, Homo sapien
aagcctacagtgtcacagctttcaa

SEQ ID NO: 1663863 - DNA, 25 bp, Homo sapien
ctctccaacttcaccgtgtagaacg

SEQ ID NO: 1663864 - DNA, 25 bp, Homo sapien
tttggtggcaaatccgtgtttacac

SEQ ID NO: 1663865 - DNA, 25 bp, Homo sapien
atccgtgtttacacatttacaagag

SEQ ID NO: 1663866 - DNA, 25 bp, Homo sapien
ggtggcaaatccgtgtttacacatt

SEQ ID NO: 1663867 - DNA, 25 bp, Homo sapien
ggcaaatccgtgtttacacatttac

SEQ ID NO: 1663868 - DNA, 25 bp, Homo sapien
cgagaacagaccctgacttctaaaa

SEQ ID NO: 1663869 - DNA, 25 bp, Homo sapien
gagaacagaccctgacttctaaaag

SEQ ID NO: 1663870 - DNA, 25 bp, Homo sapien
acgagaacagaccctgacttctaaa

SEQ ID NO: 1663871 - DNA, 25 bp, Homo sapien
atgacgtccctgtacaaagtcttct

SEQ ID NO: 1663872 - DNA, 25 bp, Homo sapien
aacatgacgtccctgtacaaagtct

SEQ ID NO: 1663873 - DNA, 25 bp, Homo sapien
ccaacatgacgtccctgtacaaagt

SEQ ID NO: 1663874 - DNA, 25 bp, Homo sapien
attctccaacatgacgtccctgtac

SEQ ID NO: 1663875 - DNA, 25 bp, Homo sapien
taaggaaggctacatagtcaagaag

SEQ ID NO: 1663876 - DNA, 25 bp, Homo sapien
taggcggtttggaatgctaaagcat

SEQ ID NO: 1663877 - DNA, 25 bp, Homo sapien
gctcgcaatgccctgaataatcttc

SEQ ID NO: 1663878 - DNA, 25 bp, Homo sapien
tgaaagagcagctcgcaatgccctg

SEQ ID NO: 1663879 - DNA, 25 bp, Homo sapien
acctaatttcagcactgaattcagg

SEQ ID NO: 1663880 - DNA, 25 bp, Homo sapien
aaagtggctatgagttttggctgag

SEQ ID NO: 1663881 - DNA, 25 bp, Homo sapien
tcctttattacaaggtcacacttat

SEQ ID NO: 1663882 - DNA, 25 bp, Homo sapien
tggctatgagttttggctgagcaca

SEQ ID NO: 1663883 - DNA, 25 bp, Homo sapien
gaggcctggacatgcaactgggaac

SEQ ID NO: 1663884 - DNA, 25 bp, Homo sapien
tgggaactgagccatcaatctgtga

SEQ ID NO: 1663885 - DNA, 25 bp, Homo sapien
gggagaaacccctcgcatttggcca

SEQ ID NO: 1663886 - DNA, 25 bp, Homo sapien
gacctctaagagttgctccagcaaa

SEQ ID NO: 1663887 - DNA, 25 bp, Homo sapien
gagacagaacaatccaccgagaata

SEQ ID NO: 1663888 - DNA, 25 bp, Homo sapien
cagggccggaccttgtatcagaaaa

SEQ ID NO: 1663889 - DNA, 25 bp, Homo sapien
gaggccttaccctggcatgatgcag

SEQ ID NO: 1663890 - DNA, 25 bp, Homo sapien
cgagtgagtgcgagcaaacctgtca

SEQ ID NO: 1663891 - DNA, 25 bp, Homo sapien
cctttgccttcctcttcctcttctt

SEQ ID NO: 1663892 - DNA, 25 bp, Homo sapien
ctcttcctcttcttccagggttcta

SEQ ID NO: 1663893 - DNA, 25 bp, Homo sapien
tcttcctcttcttccagggttctac

SEQ ID NO: 1663894 - DNA, 25 bp, Homo sapien
tgactcctttgccttcctcttcctc

SEQ ID NO: 1663895 - DNA, 25 bp, Homo sapien
agccttcactccaagagatctgctt

SEQ ID NO: 1663896 - DNA, 25 bp, Homo sapien
gcggcgactaacagccttcactcca

SEQ ID NO: 1663897 - DNA, 25 bp, Homo sapien
tctgcttccgggtttgcaagaaact

SEQ ID NO: 1663898 - DNA, 25 bp, Homo sapien
aagagatctgcttccgggtttgcaa

SEQ ID NO: 1663899 - DNA, 25 bp, Homo sapien
gcacttctatagagatagctgtgtg

SEQ ID NO: 1663900 - DNA, 25 bp, Homo sapien
gagatagctgtgtgttgactattta

SEQ ID NO: 1663901 - DNA, 25 bp, Homo sapien
tatctagcacttctatagagatagc

SEQ ID NO: 1663902 - DNA, 25 bp, Homo sapien
tctatagagatagctgtgtgttgac

SEQ ID NO: 1663903 - DNA, 25 bp, Homo sapien
tcaataaaatgatagggcctacttc

SEQ ID NO: 1663904 - DNA, 25 bp, Homo sapien
tactggtttccgtctgatgtttgag

SEQ ID NO: 1663905 - DNA, 25 bp, Homo sapien
ggaaaggctacactactattactgg

SEQ ID NO: 1663906 - DNA, 25 bp, Homo sapien
tacttcattaggtgtggttcattcc

SEQ ID NO: 1663907 - DNA, 25 bp, Homo sapien
tgcatagctgtcttatgcaattcct

SEQ ID NO: 1663908 - DNA, 25 bp, Homo sapien
tgtcttatgcaattcctcacatgtc

SEQ ID NO: 1663909 - DNA, 25 bp, Homo sapien
tagctgtcttatgcaattcctcaca

SEQ ID NO: 1663910 - DNA, 25 bp, Homo sapien
ttatgcaattcctcacatgtcttcc

SEQ ID NO: 1663911 - DNA, 25 bp, Homo sapien
cagcggcctccctaagagggctaag

SEQ ID NO: 1663912 - DNA, 25 bp, Homo sapien
gcggcctccctaagagggctaaggc

SEQ ID NO: 1663913 - DNA, 25 bp, Homo sapien
gcagcggcctccctaagagggctaa

SEQ ID NO: 1663914 - DNA, 25 bp, Homo sapien
agcggcctccctaagagggctaagg

SEQ ID NO: 1663915 - DNA, 25 bp, Homo sapien
acacggagagcaagagaagggcggc

SEQ ID NO: 1663916 - DNA, 25 bp, Homo sapien
agacacggagagcaagagaagggcg

SEQ ID NO: 1663917 - DNA, 25 bp, Homo sapien
cggagagcaagagaagggcggcggc

SEQ ID NO: 1663918 - DNA, 25 bp, Homo sapien
ggagacacggagagcaagagaaggg

SEQ ID NO: 1663919 - DNA, 25 bp, Homo sapien
cgggcccggagcgccgcggagaagg

SEQ ID NO: 1663920 - DNA, 25 bp, Homo sapien
tgggtttttaagtggctctcttcca

SEQ ID NO: 1663921 - DNA, 25 bp, Homo sapien
agtgggcggtaaggccagcggcccg

SEQ ID NO: 1663922 - DNA, 25 bp, Homo sapien
agcgccgcggagaaggcctttgggt

SEQ ID NO: 1663923 - DNA, 25 bp, Homo sapien
cataatagcaagtccggaggctgca

SEQ ID NO: 1663924 - DNA, 25 bp, Homo sapien
tgaactaaatagatccacctcagca

SEQ ID NO: 1663925 - DNA, 25 bp, Homo sapien
caattaagttagaaagccaggaaca

SEQ ID NO: 1663926 - DNA, 25 bp, Homo sapien
tgagaagtccattctgcctactcta

SEQ ID NO: 1663927 - DNA, 25 bp, Homo sapien
ttaccaattatattaatgacaacgt

SEQ ID NO: 1663928 - DNA, 25 bp, Homo sapien
gttgcagaccaaatacctgttacca

SEQ ID NO: 1663929 - DNA, 25 bp, Homo sapien
caattatattaatgacaacgtggtc

SEQ ID NO: 1663930 - DNA, 25 bp, Homo sapien
ccaattatattaatgacaacgtggt

SEQ ID NO: 1663931 - DNA, 25 bp, Homo sapien
taagcatcagttgccctacagggtc

SEQ ID NO: 1663932 - DNA, 25 bp, Homo sapien
gttagagatctaggcctgaagggca

SEQ ID NO: 1663933 - DNA, 25 bp, Homo sapien
gaacactggaacatcgctggtagaa

SEQ ID NO: 1663934 - DNA, 25 bp, Homo sapien
cagggtcaactatcccagtggtgca

SEQ ID NO: 1663935 - DNA, 25 bp, Homo sapien
gatattgtcccactatggcatggca

SEQ ID NO: 1663936 - DNA, 25 bp, Homo sapien
tataaagaagccacacctaaggaag

SEQ ID NO: 1663937 - DNA, 25 bp, Homo sapien
tataatcgacaaaggtccccagtca

SEQ ID NO: 1663938 - DNA, 25 bp, Homo sapien
tcttttcacaatggagcccctgatg

SEQ ID NO: 1663939 - DNA, 25 bp, Homo sapien
tttgatgatctccaaggtttgaact

SEQ ID NO: 1663940 - DNA, 25 bp, Homo sapien
gatctccaaggtttgaactttggaa

SEQ ID NO: 1663941 - DNA, 25 bp, Homo sapien
gatgatctccaaggtttgaactttg

SEQ ID NO: 1663942 - DNA, 25 bp, Homo sapien
taggtacagcttgaatacttaattt

SEQ ID NO: 1663943 - DNA, 25 bp, Homo sapien
tgtgaacgctggataaatgccttac

SEQ ID NO: 1663944 - DNA, 25 bp, Homo sapien
taaggcttgaacgttcagcaaaggc

SEQ ID NO: 1663945 - DNA, 25 bp, Homo sapien
ctgatgcctagtgagatgtgagcac

SEQ ID NO: 1663946 - DNA, 25 bp, Homo sapien
gatgcctagtgaggttcgaacactg

SEQ ID NO: 1663947 - DNA, 25 bp, Homo sapien
aaatactggtgtgcactatctctta

SEQ ID NO: 1663948 - DNA, 25 bp, Homo sapien
ctggtgtgcactatctcttatagaa

SEQ ID NO: 1663949 - DNA, 25 bp, Homo sapien
aatggcttgtcatggatgaaatact

SEQ ID NO: 1663950 - DNA, 25 bp, Homo sapien
tggcttgtcatggatgaaatactgg

SEQ ID NO: 1663951 - DNA, 25 bp, Homo sapien
tttgttacaggtcaaaggcattcct

SEQ ID NO: 1663952 - DNA, 25 bp, Homo sapien
ccttgaggtcaaaattgttgatgcc

SEQ ID NO: 1663953 - DNA, 25 bp, Homo sapien
tcccacaggctgtcaaacttaggca

SEQ ID NO: 1663954 - DNA, 25 bp, Homo sapien
taatcccttgcttgtaaatccaaca

SEQ ID NO: 1663955 - DNA, 25 bp, Homo sapien
taacaacacaaagggactagctgtc

SEQ ID NO: 1663956 - DNA, 25 bp, Homo sapien
cagggcagcacggattataaatcac

SEQ ID NO: 1663957 - DNA, 25 bp, Homo sapien
ctgaacctgtgtgtgcgggctaaga

SEQ ID NO: 1663958 - DNA, 25 bp, Homo sapien
caaaaggtaaggcacagctcaagct

SEQ ID NO: 1663959 - DNA, 25 bp, Homo sapien
gcccaaacccaaagcatatacatag

SEQ ID NO: 1663960 - DNA, 25 bp, Homo sapien
cagacataaatactcaaggaagaaa

SEQ ID NO: 1663961 - DNA, 25 bp, Homo sapien
ttttgaggaaactaatactcagaca

SEQ ID NO: 1663962 - DNA, 25 bp, Homo sapien
gagtgaaccccaacatcgactatgg

SEQ ID NO: 1663963 - DNA, 25 bp, Homo sapien
tactcagtggcttcaagaggcacct

SEQ ID NO: 1663964 - DNA, 25 bp, Homo sapien
gggacatgcaggctactctactcag

SEQ ID NO: 1663965 - DNA, 25 bp, Homo sapien
tgggagagtccaccaaaagttgtcc

SEQ ID NO: 1663966 - DNA, 25 bp, Homo sapien
ctgcccttgggagacactggaaact

SEQ ID NO: 1663967 - DNA, 25 bp, Homo sapien
cgcccatccggaatgtgtatttcaa

SEQ ID NO: 1663968 - DNA, 25 bp, Homo sapien
atggaatcaggaagactaaggtctc

SEQ ID NO: 1663969 - DNA, 25 bp, Homo sapien
ctaagttcccggatagagtagaaag

SEQ ID NO: 1663970 - DNA, 25 bp, Homo sapien
gcaccacgcccatccggaatgtgta

SEQ ID NO: 1663971 - DNA, 25 bp, Homo sapien
taggattctaaggaagaggcagtgt

SEQ ID NO: 1663972 - DNA, 25 bp, Homo sapien
caagtctttacattaatgctgagta

SEQ ID NO: 1663973 - DNA, 25 bp, Homo sapien
ctaaaagaatgagatatattcccat

SEQ ID NO: 1663974 - DNA, 25 bp, Homo sapien
atctctctgtcaagtctttacatta

SEQ ID NO: 1663975 - DNA, 25 bp, Homo sapien
atggcaatcaaaaagaggatctctc

SEQ ID NO: 1663976 - DNA, 25 bp, Homo sapien
cctgattatgcgcagaacttctgaa

SEQ ID NO: 1663977 - DNA, 25 bp, Homo sapien
ggaaccaccactcgtcaaacctgat

SEQ ID NO: 1663978 - DNA, 25 bp, Homo sapien
gattcagacaagcacatcagggcct

SEQ ID NO: 1663979 - DNA, 25 bp, Homo sapien
ccttttagaacagggatcggattca

SEQ ID NO: 1663980 - DNA, 25 bp, Homo sapien
aatgtaaagatgtacaagggtggtt

SEQ ID NO: 1663981 - DNA, 25 bp, Homo sapien
aggaaaaatgtaaagatgtacaagg

SEQ ID NO: 1663982 - DNA, 25 bp, Homo sapien
aaaaatgtaaagatgtacaagggtg

SEQ ID NO: 1663983 - DNA, 25 bp, Homo sapien
tgtaaagatgtacaagggtggttac

SEQ ID NO: 1663984 - DNA, 25 bp, Homo sapien
tgttatcctcatcgagagaaagcag

SEQ ID NO: 1663985 - DNA, 25 bp, Homo sapien
gatgttatcctcatcgagagaaagc

SEQ ID NO: 1663986 - DNA, 25 bp, Homo sapien
tctggagggatgttatcctcatcga

SEQ ID NO: 1663987 - DNA, 25 bp, Homo sapien
gagggatgttatcctcatcgagaga

SEQ ID NO: 1663988 - DNA, 25 bp, Homo sapien
aaaaacacacttcaccaagtggaca

SEQ ID NO: 1663989 - DNA, 25 bp, Homo sapien
ttcactgatttatgtgagttaatgc

SEQ ID NO: 1663990 - DNA, 25 bp, Homo sapien
gagttaatgcaagcaacttatatat

SEQ ID NO: 1663991 - DNA, 25 bp, Homo sapien
acttcaccaagtggacacaggaaaa

SEQ ID NO: 1663992 - DNA, 25 bp, Homo sapien
tctgagtttctttctcaggtaagtc

SEQ ID NO: 1663993 - DNA, 25 bp, Homo sapien
tgagtttctttctcaggtaagtcag

SEQ ID NO: 1663994 - DNA, 25 bp, Homo sapien
cctctgagtttctttctcaggtaag

SEQ ID NO: 1663995 - DNA, 25 bp, Homo sapien
ttcctctgagtttctttctcaggta

SEQ ID NO: 1663996 - DNA, 25 bp, Homo sapien
catcttcctcgcatcctccccgagg

SEQ ID NO: 1663997 - DNA, 25 bp, Homo sapien
cctccccgaggtcatattgtgtggg

SEQ ID NO: 1663998 - DNA, 25 bp, Homo sapien
atcctccccgaggtcatattgtgtg

SEQ ID NO: 1663999 - DNA, 25 bp, Homo sapien
cgcatcctccccgaggtcatattgt

SEQ ID NO: 1664000 - DNA, 25 bp, Homo sapien
tgggaacgtcttagggccacgccgc

SEQ ID NO: 1664001 - DNA, 25 bp, Homo sapien
ttgaacccgaaagacggagactcac

SEQ ID NO: 1664002 - DNA, 25 bp, Homo sapien
caaaacccgacagcggagcgtggga

SEQ ID NO: 1664003 - DNA, 25 bp, Homo sapien
cgaaatggacgcagatctctagacc

SEQ ID NO: 1664004 - DNA, 25 bp, Homo sapien
gagagcgccagtagccccgcgagat

SEQ ID NO: 1664005 - DNA, 25 bp, Homo sapien
agccccgcgagatccgcttccgggt

SEQ ID NO: 1664006 - DNA, 25 bp, Homo sapien
gatccgcttccgggtcggcaggaac

SEQ ID NO: 1664007 - DNA, 25 bp, Homo sapien
cgagagcgccagtagccccgcgaga

SEQ ID NO: 1664008 - DNA, 25 bp, Homo sapien
caggcaaaacaaaacctgtatacac

SEQ ID NO: 1664009 - DNA, 25 bp, Homo sapien
caaaacaaaacctgtatacactggg

SEQ ID NO: 1664010 - DNA, 25 bp, Homo sapien
ggcaaaacaaaacctgtatacactg

SEQ ID NO: 1664011 - DNA, 25 bp, Homo sapien
ccaggcaaaacaaaacctgtataca

SEQ ID NO: 1664012 - DNA, 25 bp, Homo sapien
gcaggagagagtgtaagaagacaca

SEQ ID NO: 1664013 - DNA, 25 bp, Homo sapien
aaggctgaagtgttcaccagtaaac

SEQ ID NO: 1664014 - DNA, 25 bp, Homo sapien
ctcattaaggctgaagtgttcacca

SEQ ID NO: 1664015 - DNA, 25 bp, Homo sapien
cagtaaactattgggattatccaaa

SEQ ID NO: 1664016 - DNA, 25 bp, Homo sapien
tatcaatgtgctggacccgctgctt

SEQ ID NO: 1664017 - DNA, 25 bp, Homo sapien
gtatcccaaatcctcgttcactgtg

SEQ ID NO: 1664018 - DNA, 25 bp, Homo sapien
caacattgcacgcagtgtctgtgcg

SEQ ID NO: 1664019 - DNA, 25 bp, Homo sapien
gatgaggatgctctgcgtagctctg

SEQ ID NO: 1664020 - DNA, 25 bp, Homo sapien
gcaggtggtgccaatggacactccc

SEQ ID NO: 1664021 - DNA, 25 bp, Homo sapien
tcaaatctgtggaccttaacctgca

SEQ ID NO: 1664022 - DNA, 25 bp, Homo sapien
ggactcccaccacggtctgtgataa

SEQ ID NO: 1664023 - DNA, 25 bp, Homo sapien
gactcctttacagcggagagctaag

SEQ ID NO: 1664024 - DNA, 25 bp, Homo sapien
gtctgtcactgatgtttgtcttcag

SEQ ID NO: 1664025 - DNA, 25 bp, Homo sapien
tgtctgtcactgatgtttgtcttca

SEQ ID NO: 1664026 - DNA, 25 bp, Homo sapien
tctgtcactgatgtttgtcttcagg

SEQ ID NO: 1664027 - DNA, 25 bp, Homo sapien
gatgtctgtcactgatgtttgtctt

SEQ ID NO: 1664028 - DNA, 25 bp, Homo sapien
cttccctacagactgaaacagaaac

SEQ ID NO: 1664029 - DNA, 25 bp, Homo sapien
tgggaggcacccttccctacagact

SEQ ID NO: 1664030 - DNA, 25 bp, Homo sapien
gctcctgggaggcacccttccctac

SEQ ID NO: 1664031 - DNA, 25 bp, Homo sapien
aggcacccttccctacagactgaaa

SEQ ID NO: 1664032 - DNA, 25 bp, Homo sapien
cgagtgtccccggatactctgcttt

SEQ ID NO: 1664033 - DNA, 25 bp, Homo sapien
tgggaggttctgccccaaagcgagc

SEQ ID NO: 1664034 - DNA, 25 bp, Homo sapien
tgtccccggatactctgctttgctg

SEQ ID NO: 1664035 - DNA, 25 bp, Homo sapien
ggttctgccccaaagcgagctcttt

SEQ ID NO: 1664036 - DNA, 25 bp, Homo sapien
tctccatgtttatacagaatgctcc

SEQ ID NO: 1664037 - DNA, 25 bp, Homo sapien
taatacaatatttcttggcctaggg

SEQ ID NO: 1664038 - DNA, 25 bp, Homo sapien
tccaccagtatggaacagttcattc

SEQ ID NO: 1664039 - DNA, 25 bp, Homo sapien
tggtgcattaactccaatctccatg

SEQ ID NO: 1664040 - DNA, 25 bp, Homo sapien
ggaattcagtgctgactacttaaag

SEQ ID NO: 1664041 - DNA, 25 bp, Homo sapien
tggaattcagtgctgactacttaaa

SEQ ID NO: 1664042 - DNA, 25 bp, Homo sapien
atggaattcagtgctgactacttaa

SEQ ID NO: 1664043 - DNA, 25 bp, Homo sapien
agaacatagcacacccactgtagag

SEQ ID NO: 1664044 - DNA, 25 bp, Homo sapien
gccttagcggctcttcagggctgat

SEQ ID NO: 1664045 - DNA, 25 bp, Homo sapien
aataaccgcgctgcacatgggacat

SEQ ID NO: 1664046 - DNA, 25 bp, Homo sapien
aaaacaacagcgatatgtctgtcca

SEQ ID NO: 1664047 - DNA, 25 bp, Homo sapien
tctgtagtgtctttctgagcgctca

SEQ ID NO: 1664048 - DNA, 25 bp, Homo sapien
ggattagggaagatggtatcactga

SEQ ID NO: 1664049 - DNA, 25 bp, Homo sapien
tccctcaagtgaacgggttaaatga

SEQ ID NO: 1664050 - DNA, 25 bp, Homo sapien
tcttctagcagatatttgcaacctg

SEQ ID NO: 1664051 - DNA, 25 bp, Homo sapien
tggtagtttgtaccagagctccctc

SEQ ID NO: 1664052 - DNA, 25 bp, Homo sapien
gcatgctgttcccaaggatcttcct

SEQ ID NO: 1664053 - DNA, 25 bp, Homo sapien
aagctgctctttgttaacggagtac

SEQ ID NO: 1664054 - DNA, 25 bp, Homo sapien
atgtcccaaaagtaatgagccgggc

SEQ ID NO: 1664055 - DNA, 25 bp, Homo sapien
tgagccgggcttcataacccgtcat

SEQ ID NO: 1664056 - DNA, 25 bp, Homo sapien
tttgagaaattcctatcagaactcg

SEQ ID NO: 1664057 - DNA, 25 bp, Homo sapien
ggatggattccttggagaacttgtt

SEQ ID NO: 1664058 - DNA, 25 bp, Homo sapien
tcagaactcgcaacatcagattcac

SEQ ID NO: 1664059 - DNA, 25 bp, Homo sapien
cttggagaacttgttgaatttgaga

SEQ ID NO: 1664060 - DNA, 25 bp, Homo sapien
ctcgaatattaacgttgtggcccaa

SEQ ID NO: 1664061 - DNA, 25 bp, Homo sapien
ttgtggcccaaaataaagaagcaat

SEQ ID NO: 1664062 - DNA, 25 bp, Homo sapien
cgttgtggcccaaaataaagaagca

SEQ ID NO: 1664063 - DNA, 25 bp, Homo sapien
tcagtgcctgtgtagtacagcccag

SEQ ID NO: 1664064 - DNA, 25 bp, Homo sapien
tcagacggcctgtctaaagcacaac

SEQ ID NO: 1664065 - DNA, 25 bp, Homo sapien
aaaagccggtctgcacgagtctcag

SEQ ID NO: 1664066 - DNA, 25 bp, Homo sapien
gataaacctgcaattcggcgctgct

SEQ ID NO: 1664067 - DNA, 25 bp, Homo sapien
ccaggatttgcaggtttcgtggcac

SEQ ID NO: 1664068 - DNA, 25 bp, Homo sapien
ggcgtctcctccaacgcgccgatgc

SEQ ID NO: 1664069 - DNA, 25 bp, Homo sapien
cgtctcctccaacgcgccgatgccc

SEQ ID NO: 1664070 - DNA, 25 bp, Homo sapien
tccaacgcgccgatgcccaggcagg

SEQ ID NO: 1664071 - DNA, 25 bp, Homo sapien
tcctccaacgcgccgatgcccaggc

SEQ ID NO: 1664072 - DNA, 25 bp, Homo sapien
ttgtccaccgtctcgcgccaggata

SEQ ID NO: 1664073 - DNA, 25 bp, Homo sapien
aggcgatcggccttgtcccaacggg

SEQ ID NO: 1664074 - DNA, 25 bp, Homo sapien
gacacatacgttttagatccttcga

SEQ ID NO: 1664075 - DNA, 25 bp, Homo sapien
gcaaagccagcaaacgtttttgatc

SEQ ID NO: 1664076 - DNA, 25 bp, Homo sapien
tccagctggaaaccacgcggtggag

SEQ ID NO: 1664077 - DNA, 25 bp, Homo sapien
cagagctccgaagggtcagcaagaa

SEQ ID NO: 1664078 - DNA, 25 bp, Homo sapien
tttagcatgatatcgtccagctcca

SEQ ID NO: 1664079 - DNA, 25 bp, Homo sapien
aggctgacgacccacgattagcacc

SEQ ID NO: 1664080 - DNA, 25 bp, Homo sapien
ttcaggaggacgggatgtgggaggc

SEQ ID NO: 1664081 - DNA, 25 bp, Homo sapien
gtcctcatagaggacactcgttgag

SEQ ID NO: 1664082 - DNA, 25 bp, Homo sapien
tagaggacactcgttgagacctggg

SEQ ID NO: 1664083 - DNA, 25 bp, Homo sapien
catagaggacactcgttgagacctg

SEQ ID NO: 1664084 - DNA, 25 bp, Homo sapien
ctgtgcagtcgcctcgggtgcctgt

SEQ ID NO: 1664085 - DNA, 25 bp, Homo sapien
ctgtctgtgcagtcgcctcgggtgc

SEQ ID NO: 1664086 - DNA, 25 bp, Homo sapien
gtgcagtcgcctcgggtgcctgttt

SEQ ID NO: 1664087 - DNA, 25 bp, Homo sapien
cagtcgcctcgggtgcctgtttgga

SEQ ID NO: 1664088 - DNA, 25 bp, Homo sapien
caccatgggaggacatgtcaggcct

SEQ ID NO: 1664089 - DNA, 25 bp, Homo sapien
catgggaggacatgtcaggcctgtt

SEQ ID NO: 1664090 - DNA, 25 bp, Homo sapien
agcaccatgggaggacatgtcaggc

SEQ ID NO: 1664091 - DNA, 25 bp, Homo sapien
agagcaccatgggaggacatgtcag

SEQ ID NO: 1664092 - DNA, 25 bp, Homo sapien
catctcgggtttgttgacaggcggt

SEQ ID NO: 1664093 - DNA, 25 bp, Homo sapien
tcgttgtgacccgaagggcagagta

SEQ ID NO: 1664094 - DNA, 25 bp, Homo sapien
aagggcagagtaatctcatctcggg

SEQ ID NO: 1664095 - DNA, 25 bp, Homo sapien
ggcccaggacagatctcttcttggt

SEQ ID NO: 1664096 - DNA, 25 bp, Homo sapien
ccatgaagggcacagaagtgaagga

SEQ ID NO: 1664097 - DNA, 25 bp, Homo sapien
aagggcacagaagtgaaggaatcag

SEQ ID NO: 1664098 - DNA, 25 bp, Homo sapien
tgaagggcacagaagtgaaggaatc

SEQ ID NO: 1664099 - DNA, 25 bp, Homo sapien
cacagaagtgaaggaatcaggggac

SEQ ID NO: 1664100 - DNA, 25 bp, Homo sapien
caggcttcctgcgttttctcttggg

SEQ ID NO: 1664101 - DNA, 25 bp, Homo sapien
ttctgggaaatgtctgcttcggagc

SEQ ID NO: 1664102 - DNA, 25 bp, Homo sapien
tctgcttcggagctctgttctgctg

SEQ ID NO: 1664103 - DNA, 25 bp, Homo sapien
aatgaacaggcttccgctggctcct

SEQ ID NO: 1664104 - DNA, 25 bp, Homo sapien
ctccttctccttgtgtgagcccagg

SEQ ID NO: 1664105 - DNA, 25 bp, Homo sapien
gggcctttgctggtttcaggttctc

SEQ ID NO: 1664106 - DNA, 25 bp, Homo sapien
tcattcgtcgtaaagggccctggag

SEQ ID NO: 1664107 - DNA, 25 bp, Homo sapien
tcgtaaagggtagctgggcctttgc

SEQ ID NO: 1664108 - DNA, 25 bp, Homo sapien
atgggatgaccggccatctgtggca

SEQ ID NO: 1664109 - DNA, 25 bp, Homo sapien
gagcctgatgatggatgggatgacc

SEQ ID NO: 1664110 - DNA, 25 bp, Homo sapien
ctgatgatggatgggatgaccggcc

SEQ ID NO: 1664111 - DNA, 25 bp, Homo sapien
atggatgggatgaccggccatctgt

SEQ ID NO: 1664112 - DNA, 25 bp, Homo sapien
tggcagaggagaggaggaactccca

SEQ ID NO: 1664113 - DNA, 25 bp, Homo sapien
ggcagaggagaggaggaactcccat

SEQ ID NO: 1664114 - DNA, 25 bp, Homo sapien
caggaggaagccttggcagaggaga

SEQ ID NO: 1664115 - DNA, 25 bp, Homo sapien
gttctgcaggcaggaggaagccttg

SEQ ID NO: 1664116 - DNA, 25 bp, Homo sapien
ccctgttccatggagagagtgttgg

SEQ ID NO: 1664117 - DNA, 25 bp, Homo sapien
gaggagttcggtggatttctaacca

SEQ ID NO: 1664118 - DNA, 25 bp, Homo sapien
gcgcgggtctgcttagatgtcctaa

SEQ ID NO: 1664119 - DNA, 25 bp, Homo sapien
cagcgtggatttgcacccggtcgat

SEQ ID NO: 1664120 - DNA, 25 bp, Homo sapien
taaccaagtcccatttcaccgagag

SEQ ID NO: 1664121 - DNA, 25 bp, Homo sapien
gtcccgcaatgtccgagttgatgcg

SEQ ID NO: 1664122 - DNA, 25 bp, Homo sapien
taggatgcagtgtttccgagaagga

SEQ ID NO: 1664123 - DNA, 25 bp, Homo sapien
atgcagtgtttccgagaaggaggta

SEQ ID NO: 1664124 - DNA, 25 bp, Homo sapien
aataggatgcagtgtttccgagaag

SEQ ID NO: 1664125 - DNA, 25 bp, Homo sapien
gcagtgtttccgagaaggaggtata

SEQ ID NO: 1664126 - DNA, 25 bp, Homo sapien
ctttaacccaatagtgctcgttcat

SEQ ID NO: 1664127 - DNA, 25 bp, Homo sapien
tctccctctttaacccaatagtgct

SEQ ID NO: 1664128 - DNA, 25 bp, Homo sapien
tctctccctctttaacccaatagtg

SEQ ID NO: 1664129 - DNA, 25 bp, Homo sapien
ccctctttaacccaatagtgctcgt

SEQ ID NO: 1664130 - DNA, 25 bp, Homo sapien
tcttgagagcccataatgattcccc

SEQ ID NO: 1664131 - DNA, 25 bp, Homo sapien
cacacaatcctggaagctccatggg

SEQ ID NO: 1664132 - DNA, 25 bp, Homo sapien
gggtccaattcactcttgagagccc

SEQ ID NO: 1664133 - DNA, 25 bp, Homo sapien
agtcacacaatcctggaagctccat

SEQ ID NO: 1664134 - DNA, 25 bp, Homo sapien
ggatcccggacatcggtgcggaaca

SEQ ID NO: 1664135 - DNA, 25 bp, Homo sapien
tgacgccgggactctcaagagagga

SEQ ID NO: 1664136 - DNA, 25 bp, Homo sapien
cagattttaaagtctagaggatccc

SEQ ID NO: 1664137 - DNA, 25 bp, Homo sapien
caagagaggaatgggtgtgcagatt

SEQ ID NO: 1664138 - DNA, 25 bp, Homo sapien
tccgtcatcgtggtgtgtgcttgac

SEQ ID NO: 1664139 - DNA, 25 bp, Homo sapien
ttgccatgtcttctcacaagacttt

SEQ ID NO: 1664140 - DNA, 25 bp, Homo sapien
gcttgactccgcttcttgccatgtc

SEQ ID NO: 1664141 - DNA, 25 bp, Homo sapien
tgtgcttgactccgcttcttgccat

SEQ ID NO: 1664142 - DNA, 25 bp, Homo sapien
gtgtaatgaatgcagcaggaccttt

SEQ ID NO: 1664143 - DNA, 25 bp, Homo sapien
caggacctttagtcggaagtcatcc

SEQ ID NO: 1664144 - DNA, 25 bp, Homo sapien
tgaagctttcagtttcaaatcgaac

SEQ ID NO: 1664145 - DNA, 25 bp, Homo sapien
ggaagtcatcccttacacgccatcg

SEQ ID NO: 1664146 - DNA, 25 bp, Homo sapien
ttctagtttgcatccccgtttcagg

SEQ ID NO: 1664147 - DNA, 25 bp, Homo sapien
tctagtttgcatccccgtttcaggc

SEQ ID NO: 1664148 - DNA, 25 bp, Homo sapien
ttacattctagtttgcatccccgtt

SEQ ID NO: 1664149 - DNA, 25 bp, Homo sapien
cattctagtttgcatccccgtttca

SEQ ID NO: 1664150 - DNA, 25 bp, Homo sapien
cctcagcggcgcgtgagtttcgctc

SEQ ID NO: 1664151 - DNA, 25 bp, Homo sapien
tcagacgcgcgcaaacccggaagca

SEQ ID NO: 1664152 - DNA, 25 bp, Homo sapien
cagcggcgcgtgagtttcgctccat

SEQ ID NO: 1664153 - DNA, 25 bp, Homo sapien
gcagatcgcgtggagtgaaggtccc

SEQ ID NO: 1664154 - DNA, 25 bp, Homo sapien
ttagggcaagacaatgttgacagtg

SEQ ID NO: 1664155 - DNA, 25 bp, Homo sapien
cacatgcctgccgtctcagttattg

SEQ ID NO: 1664156 - DNA, 25 bp, Homo sapien
tgatggagagagatactgtcttaaa

SEQ ID NO: 1664157 - DNA, 25 bp, Homo sapien
tattttgagttagggcaagacaatg

SEQ ID NO: 1664158 - DNA, 25 bp, Homo sapien
cccactgccaatgtaaactaatagc

SEQ ID NO: 1664159 - DNA, 25 bp, Homo sapien
cactgccaatgtaaactaatagctt

SEQ ID NO: 1664160 - DNA, 25 bp, Homo sapien
gatgaatgcctatctgattgcttcc

SEQ ID NO: 1664161 - DNA, 25 bp, Homo sapien
tctgcacacctgagatgaatgccta

SEQ ID NO: 1664162 - DNA, 25 bp, Homo sapien
agacagacgtagagcagtagaaaac

SEQ ID NO: 1664163 - DNA, 25 bp, Homo sapien
cttgtgtaggctaaagggatcagga

SEQ ID NO: 1664164 - DNA, 25 bp, Homo sapien
aaagggatcaggagacagacgtaga

SEQ ID NO: 1664165 - DNA, 25 bp, Homo sapien
aagcctccggtgcttgtgtaggcta

SEQ ID NO: 1664166 - DNA, 25 bp, Homo sapien
taaagactcttggtatgtgaggaag

SEQ ID NO: 1664167 - DNA, 25 bp, Homo sapien
gattgacttctaaagactcttggta

SEQ ID NO: 1664168 - DNA, 25 bp, Homo sapien
gactcttggtatgtgaggaagaaac

SEQ ID NO: 1664169 - DNA, 25 bp, Homo sapien
ctaacattcaggattgacttctaaa

SEQ ID NO: 1664170 - DNA, 25 bp, Homo sapien
tgcctgacaggtttgctcgcactca

SEQ ID NO: 1664171 - DNA, 25 bp, Homo sapien
ggagtttggaatcttctctgagtct

SEQ ID NO: 1664172 - DNA, 25 bp, Homo sapien
gcatcttgcctgacaggtttgctcg

SEQ ID NO: 1664173 - DNA, 25 bp, Homo sapien
agtttggaatcttctctgagtctga

SEQ ID NO: 1664174 - DNA, 25 bp, Homo sapien
agacctttagtcggaagtcacattt

SEQ ID NO: 1664175 - DNA, 25 bp, Homo sapien
tgtgatgaagctttcagtttcaaat

SEQ ID NO: 1664176 - DNA, 25 bp, Homo sapien
ccaaaccataagtatgggttgtagc

SEQ ID NO: 1664177 - DNA, 25 bp, Homo sapien
cgcccagccccagtgataaggattt

SEQ ID NO: 1664178 - DNA, 25 bp, Homo sapien
ggttgtagctctatgtttctaatca

SEQ ID NO: 1664179 - DNA, 25 bp, Homo sapien
tggtgctgatactgtattgtgcaaa

SEQ ID NO: 1664180 - DNA, 25 bp, Homo sapien
gggcaccagagagtcgctgacgcgg

SEQ ID NO: 1664181 - DNA, 25 bp, Homo sapien
tcgctgacgcggcactgctgtcctt

SEQ ID NO: 1664182 - DNA, 25 bp, Homo sapien
atctgcctggggctcatgctctggg

SEQ ID NO: 1664183 - DNA, 25 bp, Homo sapien
agagagtcgctgacgcggcactgct

SEQ ID NO: 1664184 - DNA, 25 bp, Homo sapien
cacaaatggcctcagacctagagtg

SEQ ID NO: 1664185 - DNA, 25 bp, Homo sapien
tgagctacgtcttcacaaatggcct

SEQ ID NO: 1664186 - DNA, 25 bp, Homo sapien
gtgcagggagatcccctggcttttc

SEQ ID NO: 1664187 - DNA, 25 bp, Homo sapien
tgcttacttcccttacccagtgagg

SEQ ID NO: 1664188 - DNA, 25 bp, Homo sapien
taccaaacttcagtaagacagcagc

SEQ ID NO: 1664189 - DNA, 25 bp, Homo sapien
tgtgaaacctaagggaacgctgatc

SEQ ID NO: 1664190 - DNA, 25 bp, Homo sapien
tcttggcacatggactaaaaccaca

SEQ ID NO: 1664191 - DNA, 25 bp, Homo sapien
tgtgatttatggtctcccctgggaa

SEQ ID NO: 1664192 - DNA, 25 bp, Homo sapien
tcagtcagacgtcatcccttacatg

SEQ ID NO: 1664193 - DNA, 25 bp, Homo sapien
agaagtcaatccttacacgccatca

SEQ ID NO: 1664194 - DNA, 25 bp, Homo sapien
gaagtcaatccttacacgccatcat

SEQ ID NO: 1664195 - DNA, 25 bp, Homo sapien
gcagaagtcaatccttacacgccat

SEQ ID NO: 1664196 - DNA, 25 bp, Homo sapien
gtcaatccttacacgccatcatcga

SEQ ID NO: 1664197 - DNA, 25 bp, Homo sapien
aatcaaaccttgaaagacataggag

SEQ ID NO: 1664198 - DNA, 25 bp, Homo sapien
agaatgtgacaaagctttccgtttc

SEQ ID NO: 1664199 - DNA, 25 bp, Homo sapien
tgacaaagctttccgtttcaaatca

SEQ ID NO: 1664200 - DNA, 25 bp, Homo sapien
ttcaaatcaaaccttgaaagacata

SEQ ID NO: 1664201 - DNA, 25 bp, Homo sapien
caagacctttagtcagaagtcaaac

SEQ ID NO: 1664202 - DNA, 25 bp, Homo sapien
tacatgccatcgtagacttcatact

SEQ ID NO: 1664203 - DNA, 25 bp, Homo sapien
ttacatgccatcgtagacttcatac

SEQ ID NO: 1664204 - DNA, 25 bp, Homo sapien
cttacatgccatcgtagacttcata

SEQ ID NO: 1664205 - DNA, 25 bp, Homo sapien
caacacttgtttaccgtcaggcaat

SEQ ID NO: 1664206 - DNA, 25 bp, Homo sapien
caaagcctttagtaggcagtcaaca

SEQ ID NO: 1664207 - DNA, 25 bp, Homo sapien
gtaggcagtcaacacttgtttaccg

SEQ ID NO: 1664208 - DNA, 25 bp, Homo sapien
ttgtttaccgtcaggcaatccatgg

SEQ ID NO: 1664209 - DNA, 25 bp, Homo sapien
ggatttttatggatatcatgttgaa

SEQ ID NO: 1664210 - DNA, 25 bp, Homo sapien
tttatggatatcatgttgaatctaa

SEQ ID NO: 1664211 - DNA, 25 bp, Homo sapien
atggatatcatgttgaatctaaatc

SEQ ID NO: 1664212 - DNA, 25 bp, Homo sapien
agggatttttatggatatcatgttg

SEQ ID NO: 1664213 - DNA, 25 bp, Homo sapien
tgatgtgccatgatattacccctaa

SEQ ID NO: 1664214 - DNA, 25 bp, Homo sapien
ccacctgtactgaacgttgaatcgt

SEQ ID NO: 1664215 - DNA, 25 bp, Homo sapien
acaacatattgtagtgggccacctg

SEQ ID NO: 1664216 - DNA, 25 bp, Homo sapien
taatatcacagggatgcttcctgcc

SEQ ID NO: 1664217 - DNA, 25 bp, Homo sapien
ctggcctgagcactccgtcccgcat

SEQ ID NO: 1664218 - DNA, 25 bp, Homo sapien
cctgagcactccgtcccgcatccat

SEQ ID NO: 1664219 - DNA, 25 bp, Homo sapien
tccctggcctgagcactccgtcccg

SEQ ID NO: 1664220 - DNA, 25 bp, Homo sapien
ggcctgagcactccgtcccgcatcc

SEQ ID NO: 1664221 - DNA, 25 bp, Homo sapien
cagaatcttatgcagtgacccaggc

SEQ ID NO: 1664222 - DNA, 25 bp, Homo sapien
gaatcttatgcagtgacccaggctg

SEQ ID NO: 1664223 - DNA, 25 bp, Homo sapien
tggcagaatcttatgcagtgaccca

SEQ ID NO: 1664224 - DNA, 25 bp, Homo sapien
ttttttggcagaatcttatgcagtg

SEQ ID NO: 1664225 - DNA, 25 bp, Homo sapien
gactcttggtatgtgaggaagaaac

SEQ ID NO: 1664226 - DNA, 25 bp, Homo sapien
ctaacattcaggattgacttctaaa

SEQ ID NO: 1664227 - DNA, 25 bp, Homo sapien
tctaaagactcttggtatgtgagga

SEQ ID NO: 1664228 - DNA, 25 bp, Homo sapien
ttcaggattgacttctaaagactct

SEQ ID NO: 1664229 - DNA, 25 bp, Homo sapien
tacaagactagctaccctcatttcg

SEQ ID NO: 1664230 - DNA, 25 bp, Homo sapien
caagtccatgctgtaacttcttatg

SEQ ID NO: 1664231 - DNA, 25 bp, Homo sapien
tatgcactgcagtctatttctgagt

SEQ ID NO: 1664232 - DNA, 25 bp, Homo sapien
gcaataacatccataactcccaact

SEQ ID NO: 1664233 - DNA, 25 bp, Homo sapien
ttctgtgcgaggtcaatgctggtgg

SEQ ID NO: 1664234 - DNA, 25 bp, Homo sapien
gccgggctctgtccccataaactgt

SEQ ID NO: 1664235 - DNA, 25 bp, Homo sapien
acaggtgtgtgtagacgtctatgag

SEQ ID NO: 1664236 - DNA, 25 bp, Homo sapien
tctatgagggccatagcgccgggct

SEQ ID NO: 1664237 - DNA, 25 bp, Homo sapien
gcacttctgtcaggttgacagggac

SEQ ID NO: 1664238 - DNA, 25 bp, Homo sapien
catggccttttgagtgagcacaggt

SEQ ID NO: 1664239 - DNA, 25 bp, Homo sapien
gacaggcagtgtccctctggtgtga

SEQ ID NO: 1664240 - DNA, 25 bp, Homo sapien
caggacgggtctccgtgtctctgaa

SEQ ID NO: 1664241 - DNA, 25 bp, Homo sapien
ctttctagtgtctccgttgcttcct

SEQ ID NO: 1664242 - DNA, 25 bp, Homo sapien
gagcagtggtcccaaagtgacgtga

SEQ ID NO: 1664243 - DNA, 25 bp, Homo sapien
cccaaagtgacgtgagaggctctac

SEQ ID NO: 1664244 - DNA, 25 bp, Homo sapien
tgtggtacctgctagggagcagtgg

SEQ ID NO: 1664245 - DNA, 25 bp, Homo sapien
caagcaagggacaccgaatagcagc

SEQ ID NO: 1664246 - DNA, 25 bp, Homo sapien
ttgtttacaatgcagcaagcaaggg

SEQ ID NO: 1664247 - DNA, 25 bp, Homo sapien
cagagaattccaggtgacgctccag

SEQ ID NO: 1664248 - DNA, 25 bp, Homo sapien
gggcataactgctacctgtacattg

SEQ ID NO: 1664249 - DNA, 25 bp, Homo sapien
tgtgtccgcgtgtcagcatctgtgc

SEQ ID NO: 1664250 - DNA, 25 bp, Homo sapien
gtgtgtccgcgtgtcagcatctgtg

SEQ ID NO: 1664251 - DNA, 25 bp, Homo sapien
agtgtgtccgcgtgtcagcatctgt

SEQ ID NO: 1664252 - DNA, 25 bp, Homo sapien
tcagtgtgtccgcgtgtcagcatct

SEQ ID NO: 1664253 - DNA, 25 bp, Homo sapien
cacatgcgtgtcggcatctgtgcgt

SEQ ID NO: 1664254 - DNA, 25 bp, Homo sapien
tgcgtgcgcacacgcccgtcagggt

SEQ ID NO: 1664255 - DNA, 25 bp, Homo sapien
tgtcggcatctgtgcgtgcgcacac

SEQ ID NO: 1664256 - DNA, 25 bp, Homo sapien
tgtgcgtgcgcacacgcccgtcagg

SEQ ID NO: 1664257 - DNA, 25 bp, Homo sapien
tatgtatcgggggtctgtgtacgct

SEQ ID NO: 1664258 - DNA, 25 bp, Homo sapien
aacagctgagcacgctatgtatcgg

SEQ ID NO: 1664259 - DNA, 25 bp, Homo sapien
tcaacagctgagcacgctatgtatc

SEQ ID NO: 1664260 - DNA, 25 bp, Homo sapien
gtatcgggggtctgtgtacgctcac

SEQ ID NO: 1664261 - DNA, 25 bp, Homo sapien
gtaactgtgacacgggtgcacgcga

SEQ ID NO: 1664262 - DNA, 25 bp, Homo sapien
gaggctttgggtcaacgcagcccgt

SEQ ID NO: 1664263 - DNA, 25 bp, Homo sapien
tctgggtacgtgcacatacgtgtag

SEQ ID NO: 1664264 - DNA, 25 bp, Homo sapien
cggatgcacctctgcaccgtgtggg

SEQ ID NO: 1664265 - DNA, 25 bp, Homo sapien
cagaagtgctgtgcatgcaggccac

SEQ ID NO: 1664266 - DNA, 25 bp, Homo sapien
gcctgagcctcgcctggaaattcac

SEQ ID NO: 1664267 - DNA, 25 bp, Homo sapien
ctgcctgagaacaagggccgcggag

SEQ ID NO: 1664268 - DNA, 25 bp, Homo sapien
gccatgaggtgacgctttcagagcc

SEQ ID NO: 1664269 - DNA, 25 bp, Homo sapien
aggaggaagacgaatcgttaaacat

SEQ ID NO: 1664270 - DNA, 25 bp, Homo sapien
gaggaggaagacgaatcgttaaaca

SEQ ID NO: 1664271 - DNA, 25 bp, Homo sapien
tgtaccctgctcctatcttgttata

SEQ ID NO: 1664272 - DNA, 25 bp, Homo sapien
tataataggattaatgcaggcctgc

SEQ ID NO: 1664273 - DNA, 25 bp, Homo sapien
gcagtgggttgataatagttcacag

SEQ ID NO: 1664274 - DNA, 25 bp, Homo sapien
tgggttgataatagttcacagcagc

SEQ ID NO: 1664275 - DNA, 25 bp, Homo sapien
ccaggaacttaaggcgctgcatgct

SEQ ID NO: 1664276 - DNA, 25 bp, Homo sapien
gaagcccctgtgtgtttgggcctga

SEQ ID NO: 1664277 - DNA, 25 bp, Homo sapien
tgcagagaattccaggtgatgctcc

SEQ ID NO: 1664278 - DNA, 25 bp, Homo sapien
gagaggatacccttctgatgacagc

SEQ ID NO: 1664279 - DNA, 25 bp, Homo sapien
cgtaactgtgacacgggtgcacgca

SEQ ID NO: 1664280 - DNA, 25 bp, Homo sapien
tcgcacatgcggatcaaggtctggc

SEQ ID NO: 1664281 - DNA, 25 bp, Homo sapien
tacacgtgcatgtcgcggtctgggt

SEQ ID NO: 1664282 - DNA, 25 bp, Homo sapien
gcacggagcttctagcggtgacgca

SEQ ID NO: 1664283 - DNA, 25 bp, Homo sapien
gccatgaggtgacgctttcagagct

SEQ ID NO: 1664284 - DNA, 25 bp, Homo sapien
ctgcctgagaacaagggccgcggaa

SEQ ID NO: 1664285 - DNA, 25 bp, Homo sapien
gaggtgacgctttcagagctagaag

SEQ ID NO: 1664286 - DNA, 25 bp, Homo sapien
caagggccgcggaaggacgggagtg

SEQ ID NO: 1664287 - DNA, 25 bp, Homo sapien
aggaggaagacgaatcgttaaacat

SEQ ID NO: 1664288 - DNA, 25 bp, Homo sapien
gaggaggaagacgaatcgttaaaca

SEQ ID NO: 1664289 - DNA, 25 bp, Homo sapien
cgtgtccggccacagcaagcattta

SEQ ID NO: 1664290 - DNA, 25 bp, Homo sapien
tgagagctctctgggatcgttttta

SEQ ID NO: 1664291 - DNA, 25 bp, Homo sapien
agcttccggtgaggccttcttcaag

SEQ ID NO: 1664292 - DNA, 25 bp, Homo sapien
accagggtgccagtgcaagcagctt

SEQ ID NO: 1664293 - DNA, 25 bp, Homo sapien
gaccctgtcgcaaaatatatgtgca

SEQ ID NO: 1664294 - DNA, 25 bp, Homo sapien
gaggcaggcctatccattcagagtt

SEQ ID NO: 1664295 - DNA, 25 bp, Homo sapien
gagacacatttgagaggtgggcaaa

SEQ ID NO: 1664296 - DNA, 25 bp, Homo sapien
catacacacatttgagaggcaggcc

SEQ ID NO: 1664297 - DNA, 25 bp, Homo sapien
tctctgtccagattatacgtacctt

SEQ ID NO: 1664298 - DNA, 25 bp, Homo sapien
atctctgtccagattatacgtacct

SEQ ID NO: 1664299 - DNA, 25 bp, Homo sapien
tgtccagattatacgtaccttttta

SEQ ID NO: 1664300 - DNA, 25 bp, Homo sapien
tctgtccagattatacgtacctttt

SEQ ID NO: 1664301 - DNA, 25 bp, Homo sapien
gaaggccttccgttggggcaatcag

SEQ ID NO: 1664302 - DNA, 25 bp, Homo sapien
gggcaatcagcttactcaacatcaa

SEQ ID NO: 1664303 - DNA, 25 bp, Homo sapien
ggctcaagcctcgttattcataaga

SEQ ID NO: 1664304 - DNA, 25 bp, Homo sapien
agactgtgggaaggcttttcgatgg

SEQ ID NO: 1664305 - DNA, 25 bp, Homo sapien
gaagccgtacaagtgcacagaatgt

SEQ ID NO: 1664306 - DNA, 25 bp, Homo sapien
taagcacgagaggatacatacgggc
